United States Patent Application Publication US 2015/0240253 A1 - sequence listing, part 28

SEQ ID NO: 132224 - DNA, 470 bp, Zea Mays
catatggtaagctcttatcccaacttccaccatgtttaagagcacaagctcttaacatatcctccagcacttgattagtcatctctttctgtccatcagtttgaggatggtaggctgaactaaaattcaactttatatccaagctctcatgcaacttcttccaaacccgagaagtaaactgtgatcctcgatcagacacgatcttcttaggcactccatgtagacaaactatccgagtcatatacaattatgctagcttggctcctgtgtaattagtcctcactggtatgaattgagccacttttgtcaatctgtccacaatcacccaaatcgagtcataccctgctggagtgcggggtggtccaacaatgaaatccataccaatttcttcccatttccactcgggtatcttaagcgggtgcaatagtccagctggtctttgatgttcggccttgactctttgacacaca

SEQ ID NO: 132225 - DNA, 620 bp, Zea Mays
ttgaaagttgagaaggaaagagaaaaaaaatactatacaataccaaaataaattaataaaggaataaatttattcaaatcatacaatcaaaacttggttacaaattcgccacaaatgtgaattcaaatgtgaggttcaaattggaaagaggagagaaaaggaaagaaagcataaaagaaaaagaaaaaaagagaagaaaaccgtgcgcctgggccggctcagcttcaattcggcccacctggggtgcaacccgcacgcgagcccgctccactggattcgcggatggccgactgacccctggggcccgcgcgcagcctcaccacgtcacactcgcgcacggacagatggggctagaaggctagctcctttctcctgggcgccgcggtcgatttctgtcaccgccacgcgggcccgcgagtcagccaatgctcccttgcgcgcgcgtcgcgtttctctggcgggtggggcccctgggtcggaatcttcttccccgatttcttcggtaatagaacgcttgacggtcagagctaaccatgccgccaatgccggaaatctcgcgggtggctcaacaaaacatcgcggatctcgcggctggctccgagtcggactttggccgctac

SEQ ID NO: 132226 - DNA, 392 bp, Zea Mays
ccttcctttagtgaggttgttgctacggctaaggagaagattggttgacatgatgttgacgacattgacgttgatgggggctaaacgtaggtcctccacccaatgtgcaaagacttatcatcccaattaagtgtcagtgagagtgggataattatgttaaatcagctatgaagacacaaaagcaagtcatggaggtagtggtacgccgtttgttagttgcctctcgccctggagatgaaaactatgatcgtggtgccgaggtcgtgccaactgtgcatgatgctcaatctgcccccaatatgatcccattaagtgatcctataaatgattgtggcactcatgacctctacctagattctactgagggtatccctttggcaggcaccccctgc

SEQ ID NO: 132227 - DNA, 446 bp, Zea Mays
gtgtaacacttcggcgaactagagcaacgacatagcccgctaaataacatacacgccggcttgcctattattatcactatctaaggcacaacatacaccacaacatttttatagacatgtatattcacatatatattcacacatcgaccaaatcatacgaaccgtaaaccactaatctctaactcgaaaccattatgtgcttacttcccaattcatgaacacataacgtgtattgacccgactcaagatatagaggaagcgatgactactttggcatgtcaccacctctctatataagccaaaacaatttctaccatcgactaagagttctaagtattaaacacattattactttccacgcgcaaataaacctcaacttaacactagtggcaccgatggatttttactaaactcttcatgcacataacctcgtctcgcatacaacc

SEQ ID NO: 132228 - DNA, 561 bp, Zea Mays
catttcagtattcactggttgctcacacctttccatcatttcagaggctcttagacaaggctctagctattgaacacaagcgtgttcaactaggtgaaatgaagagaaaggccattacctagcggcaagggagcagcagcatttgtccttgctatgttccgccccagggtacaccagctcgtcctagaggaggacagcgcccagctcagtatgcacctcagggcactccacagacaccacacactcgttagactgcccccattggcaacccggtgaaaccagcaggacatagtatatgcaccacatgcttcaagtgtggtcaggttgggcactatgcaaatgcttgtctgatgaggaatcccaacacacccgctcagaacaagcaacagactccaacatctagcaagggattcaacattgccaggtcaaccaagtcagtgccgaggcaactgttgatggagctgacatcgctgtcggtatgttttacattaattcaattcctgcaaccatattatttgattctggagctacgcattcatttatttctgctctctatgccac

SEQ ID NO: 132229 - DNA, 1245 bp, Zea Mays
ccttctttggggctcgagtctgctctcaatactgcttctgctagaaccccgtcgttcgatagcacgtcggcgcctccggctttgggatttcccttgttactttctaaccatcaggtgagctgacctttgtcctgctttacttttgttgacaaaagactcctttgctaattcttgtatttgcagaatgttctaatctctgtgtcggctcagttgaggtcttgcagtgcccctgttcccgatcaggtttcgtccatgctacaatggaatcctctcttgcttcagaaggaaataaatgatctaaaagccttacacattggttagtgggttggtagctttcttcgcttctcgttgctccctcgttttacctcttgtgcgctttccttcttgcccttgcagctctgactcgacggtgctccgacgctgaggagagttatgcttagagtcaagccgacctgaaccaggtttctgcattcttggatggtgcctgaaccctgaactcttctttgaacgctcagcttgattcagagaagagagcccatgaggtagatttttctgactgttcctgatgcctttgttccacgcctttgcttcgatgtttagtacacttcttgcctgtaggaggagatgcgaagacttcttgattcccatgacagtctagacaaactataccgtcatggtagtagctcccttactactttggataggaatcatcgctttactatgttggagcttgatcgtcatagggatgagttgagggtttctcagtctgaagtgtcccggcttaataagttactgtcttcaaaagagtccgtcatcaaagaattgtgtgcctcaaagaaacttgtttcgtaggagttggaaattgctcgtcatgacattaaggtcttagaggatgaccattgtatcatgaaagcaatgtgtgataaagcgatggacaaagctgttcgtgctggtcgaatcctgatgaaaagacctcgtgttgtggtgcctaaggacattgttgctgacgttcttgctgcgtccgctggtatgagtaaaccttctccctctggtgatcctactggcaaggtcccctgcgagaacgcttcagcatagtaattgtgtaatgaagacaaattttgattcgtttgaacagaaaatacttttcgttgaattggtatttcttatcgagatggtgcatcatagagttcatttatgtgtgagcacgctgtgccgacttaagccgattattctgttagtagggtg

SEQ ID NO: 132230 - DNA, 512 bp, Zea Mays
ctctcgaccatagccgttactaaccatcctgttatgttttgacttctcgagtctagaacatggaacctaagtgatgaggacatcctccactattacccgttggcaaagacgcaattggcccagttggcccaattgtagtcggacggcgactgtgtgagcctcagaattatcccatctcgcttaacttgggaggaggaagccactttaaaagggatagccacccttcccccattggactagtcttttggggcgattggacctttccctgagatgggtgtgcttaatgaactattgggcttcgggcaaccctaatttgttgggcctcggccaaccccacctaggctgggtgtatcactaaggttactcatcattcaacctcctcaacctacctccatgctccctccaaaggaagcaaccacatcaccatgtgtcgttcaacttacacactactacatgccgcccctgtccgacaaccatccataaacattactctaaatccgacaaccctaaac

SEQ ID NO: 132231 - DNA, 426 bp, Zea Mays
aaggttcacttggtcgaatcagagggatgtgcctacccttgtgaaattggatcatgttttctgcactacagttgggaagattattttcctgattgttctcttcacagtaatgctacctcagtttcggatcactgtcccttaactcttaaagtcagagaggtgtgcttgggtaagagacagtttcattttgggagtttttggcctaagatccctggttttttggaggtggtggctgcattgtggaatcagctattacaggattcttgcactatggagaagatatcattgaaattaaaaatatgagctaagtctctgcaatcctgggggcataaagaagtgggcaatgtgaatgtccagttgggtcttgctcgtgaggcaatgcatagagtggaaatggcgcgagataacagaattttgtccagggag

SEQ ID NO: 132232 - DNA, 535 bp, Zea Mays
ggccacacagtggcggatgcgttaccgaggcaagacctttgactctctgcaccacgtgggctgctgccatcatggcctccactatagtgcacgaggtaccaaggcaaagggtgacaggcggagaagacaggacggcgtcgcctgagcatccctatgcacggtagcgcttcaacctatgccgcaacatactcctccactctgccccgattagatgaggccagggcacaacgggccaggtgatctacatgaagaccagaagaaggtctatttcccacgcataactggctgatgcgctcacgcgcgcccgagaggccgttggactcacgtccgatgcgtgacgaaccatcgcaggatagggtctgcccttaaacttcgtaaacttctgagcagtccacatggattactcaggggctcgaggtatacatctagcagatgcgctaacgcacaccggagaggctgatgaactcatgtccggttcgtggcgaaccatcgcaggaaagggtacccttacactgcataaacccccgagcaatct

SEQ ID NO: 132233 - DNA, 795 bp, Zea Mays
ggaataatatgggaataattcatttggcttagtaaataatggatacataaaataaaataaaccggatataataagttagagtttttgtttaagcacttaaatatactttaaattgaactctggttgaatttaatttgagatctgaattcaaatctaatttgaaattggaaagaattagaaaatagaaagggatttctgtgctgcctgggccgaattcgatgctcctggcccatttttccccttttctctactccacatcggcccacgtcgctcgcacccgcgctccgctgacaaaaggaccccgctcgtcagccccacgccgcgcggaatccgtgtgcccaacccacacgctcggactcggacgactcacctccatgaggggacgaatagtcagttctgtcttcctctcgtccgttgaatcgggtccccaaatctagccgcatgaggaccagaaaaatcgcgtgcctctctcctgccacatggagcctggccaacctcgccccgcctccttactccatgcgcgatcaggggtctgcaggtgggtcctgatgcacgctcaattccctcctgatgcgagctcaacaaacctcgcggattccaggatcggggggatccgctgccgtgacccatggctctttggttccttgaggggctatataagtcggtcgtgatctctctcctccctcatcccatagccggtgcatcgcgccatatgcgccccaccgcgaaccatggcggagagtgagagaaccacgagagacccgacctccaccgccgcatggagatctccttcgt

SEQ ID NO: 132234 - DNA, 683 bp, Zea Mays
tgatgaactgcgtgggacgacgacgacgtggacgcggcttagcgcggaggttgaagatgatggcgcagggaggtgcacttcaccagccacgcagggtacgtcaagcactaaggacatccctcaagtcttgggaaacgacgacgcctcaaggcctaggatgcaatagaggagcaagcttcccacaccaccatagcgcactagaaagactgatggctggcaacgcgcatcatggcaaggtagcgaggccacagtggctggtcaactgatgaggacacggctcatgtgggtagcctcgttgtccagacgccgtagaggtgaggttgatgcgatggaggagcgcgtcgagaagctcatcgcctgagctaggagaaagagcgtgtgcgtgaaacttgtgaaatttccagggagccaacgtgcgtagcgagcagaggtaggcgaggatcgctagcaagagcacgtagtggtggagggactagcactctagcgttggtgtgcaagactgtatgcagcgtgatggttgagcgcaagcactagggaagaccgaacataggtctgtgcgtgtgatagtgtcctagagataaagaacaaaagcgttaggaagattttttatggagctgttgtaacaccctaggtgtttatttctcatccgataacgattatggatttaagcacgtgatatcggt

SEQ ID NO: 132235 - DNA, 488 bp, Zea Mays
aagtaagagagtggatgagggaacgaggaaaggtaagtatgggtagttctaaataggaaagagcatatagaaagggggagaaagagtgactaagggttacctatctatgggggatgactacataactatgactacataactcttggaggggtgagatccacctatagtacttaccacctaggccaatagtggggcagcatgtggtgtctactacaagtgatatgaggaaaggacaaggtggatgatagaagggaagatttgtaccatctacatttgtccaaccatgaggcaccatgtgggcatggtgtggctcgcttggcgatgacgtggaggaatccaaatgaaggggcaatttgggttgtggcgttgggttggaaggatgatagaagggagagtatgccagggccaaaaatggattgtagtgatttttcctcttctctcacttgtatatatatatttggataaactattcctaggttgtaaacgac

SEQ ID NO: 132236 - DNA, 368 bp, Zea Mays
tcccaagtagcttcatcttctgtatgttggttccactgtatcttgtaaaacttaagagttcttgtttgggtaattatgtcctttagatccaagactcgaataggatattctaaatatgtcaagcctgttctaaggcaacatccgctacttcaatggttcgatcgggaacccgaagacacttcttcaattgcgatacgtggaacacattatctacagcagacaatgtttcgggtaactggagtcggtatgccactggtccacattgttcaagaacagggaaaggaccaatgtaccggggtgcaagcttcccttttaccccgaaacatgatatacgcttcatcggtgagactttgaggtagacataatcc

SEQ ID NO: 132237 - DNA, 533 bp, Zea Mays
gctatatctaatacaaaaggttatgcaacctatgttccattcgtatcaactagcctatcaactaagataggaaggtaaaccatatgacctaagtacataatgtaatacaaaaggtaaggaatgataaagatgcaaactctcgttctatagcgccagtatttattatcgaggttttgagaagcgcgcaagcttcccctagtcctcgtagtaccccacacatgggtagcccacaagctcccggccaggtaacttcgtagatagccccaagccttttccacgtgcatgtggtgctctaattttggcctctctcaaatgatccccatcattaccactatcaagcttaagactaaaatgtcgtggggtttgttctctctagtacatggtggtggccacaccataaacatagttggtgtgatcttgtaggacaattgcccctctcagtataactataatggtgtgcacaagcactgagggattttaggatgtctaaccacacttctagtcactagggataaacctagactaaatgctaa

SEQ ID NO: 132238 - DNA, 497 bp, Zea Mays
aacacccgtggttggctggacggctatttaagaacgtcgtctaccgtggccaaggtacttgtgcattaagtacgtcgaccctccgacgttcgtatggccacgtggctcgcccacggaccccgaccgagtgccacatggctcatagttaaaagcgtcggcctcttggtaccgacatacttaaggcagtaagaacgttagttttttcatggccgtcgtttttaatttaagaatgtcggccccgacgttcttagttgtttaaatacgtcgaatacaatacggccaggaaccgatgttcttactctaataggccgacgttcttaggttaagaacgtcggcagccgatgttcttaacctaagaacgccagcctattagagtaagaacattggttcctggccgacgttttttcttggttttcctatagtgtttgtcataaatctccaaaaaagatataaaggatataaaggaaaaaaatatgattaggcaagatttgaacaca

SEQ ID NO: 132239 - DNA, 583 bp, Zea Mays
tataaaagggagaggttcacctcagggcaagggggagctcttggacacaactggacgccttcagacagagatgaacccacaaggacgaacatgaggagcgccgacgaggaccaggaggctgaagccccgccaagccaagacttcgctaggactccaccttgcagctcctaagctccagttccatcccgataagagatatgagagcctctcctcactctctcgactacttgtaatccctactacgagtttgatcatcgattgtgctggtagcgcaagacaccgatgactgaaagtagggacattctacctgagctagtataaatcttgcgccctcaacgcacacccttgaacgtgtacaataaatttaattgtcggagcgaggtacgaaacaccgacaattggcgcaccatgtaggggacttgtgtgttccgcgatgagatcatccaagcttcggatggctagtaacaacagtggcgtggtctagacccctgggacgcccatttattttgggagtctggatttcgtcatcaacaaagaggcagagatgatgagggactcgatagacccgtctcccttggcaagc

SEQ ID NO: 132240 - DNA, 690 bp, Zea Mays
tcttttaatttgctggccgcgtcagcgtcagcgtcacgcaggcagggaggctgactgatgttgatgtgtcgtctcgtctctcttctctggctctctgcccgcttcacactatagtcagtcctccacaaaggaacagtggccagtaaaattattccttgatgtccaagcatgttctagctagctttttccttgatggtggggctgggatggaatctgtgctatcgtttgcatgatctccgtttccttcgatggcctccgtcacatcggatgctaatcatgtatcctcgttgctttctcttttggttgcactgatttattcacaagaatcctaaacttacagcacatgatgacataatgatgcaaagcaatagcatctttttggcaacatgtagcctgttttgttttctatctaagacatcacaatctaactaagcttagtcgctcgagatgaagaaattaaaggaggggtagtccaaaagcgcacgcctgatcggggggagtcaataaaaataatcgaagtcgatacgattcagagggcatggtctgttttgggggaataaaataaaggtttaggtggaaaacctcggaggcgcaagtgcaagtgcaaccaaaaagatctttttttgccagatccccctccccccctctatattttaagttagacgtgtatagaggctttggctaataatg

SEQ ID NO: 132241 - DNA, 588 bp, Zea Mays
cttctgcatctccttgttaccttcatcgattttgaccatgagttgcatcatcggatcttcgattcgcgtaggcgccatatcccctgccttggcttgcaacctggtgaagtactcgtgcttcgggaactccagctcgagatcaaaggctctgaataccaaatgttagaacacggtggtgggaatgagttgagcaccgctctcggcgctcggatcctctctcaaagtttatggaggtagcaggtacgatggttacacgacggcacaccgtcggttcgccggacgcagccgggttcaggttccaaatgccaatctctcctctcctcctctcagccgccgcaaatattcctctcccctacgtatcacacgtctgggcctaatcacttcacccactcatggcccaagagccggatgttgggccgtgtcacccgttggctccgtctgagtccatcagcgtgcgcgcctgtcttcgattcacgtcttcctcccgcgttgaagcttgcgtcttcatccgcctgggattggcttaccaccggtacactgacacatactcaagaattcctcgccaccgtggtgagaaacagggttgtc

SEQ ID NO: 132242 - DNA, 453 bp, Zea Mays
cttatgggacattgcttggaggcactacctggaaacaaatccacaatgatcaaatgttgataaatggaacgaagataccttggtccagattaataatgagaagacttagcattgcgttacatgaagctcgacctgattcaactttaccaaagtttggcaactacaagattgggcttcttcccaattgtccaaccatgttaccaaggtcaaacgattgtggtttttttgtcgcaaacttcctccgatactacgattttgatgatggcgacttatcagaattttatactctcgtatgttactaaattagggtttttatcatgcatatattactccttcatatttaatcttagcattaattcgatattatgactatttcaggatgaaccattggaccaacgtgcctttgttctgcattacctgacctttcatcgcaacaacagggttgccccctcc

SEQ ID NO: 132243 - DNA, 443 bp, Zea Mays
ctcctcactatccaaaaggtcttcctttccctcacaaggttgctccaactattagaacaaacaaggcaccttgtaaagctaacatgaggggtataaaatgccccaaagacccaaactagccatcagaactctagatgcaccggaccggacatccgctgtacccaaagactcccacttcgcgttccgttagggacaaacaagaacacaataaaggtttcagttagcagaagcctgcagccaacccaaccgtcagggcaagtaagcaattgtaccgttactttcagatctagtaccagtagtgaccaaaaaaaagtggcacatcgctctccagagggtttacatgtccaataataaagcatctggccattactcaagtagcgtgcggcttcacctggaagctcagctcacgtccagactccagaatttcaatccgctgaagatgc

SEQ ID NO: 132244 - DNA, 395 bp, Zea Mays
gaagaggtgaaggtacacaagaaccaagggtatgagtacaataaaggatggagctaaggtaagactggcacgtggcaaagacgaggttacgaccaaaggcgggataagtaaaacaccactctcgaattgagagggaagaagggaggttttaagtacaacaagcattaagctaggatcacaagggtaaaggcaatagcgaacaaaacacattaaacgatggagttgaaagttcacaagcagcaaagaataggacacatccaaaggaaaatgggtaagatacaactttgaaattgaggtggaagagagaagatttttagagggcagatataagataagcaacagggtggaatgtagagatgacaaaggtaaagatgatatccaaaaaagcatgacaa

SEQ ID NO: 132245 - DNA, 438 bp, Zea Mays
atccaaaggaattgatgtgatcttagggatggattggttaaccaaacacaaaggcatcatcagttgcgcagacaagacagtcctcctcaccgaccagcagggaaagtcagtctcttgtcaggcacatccacccaccagtgacccaatgatgttcaatctagcaacagaaagtatatcagtgatagaagaattcatggatgtgtttccagaagagttaccaggaatgccaccagaaagagaagtggagttctacatagatctgatccctggaacggcacccatcgcgaagagaccataccgcatggctccgaccgagttagcagaactgaagcttcaaatcggagatcttcagcaaaagggatacattcatcctagctcatccccttggggagcaccagtcctgttcgtctctaagaaagatggaagcatgagaatgtg

SEQ ID NO: 132246 - DNA, 579 bp, Zea Mays
atattagctctttgaaaaatatgccaagtccgaagagatccaccagcgcaaggttgagtctcagcggaaaccaaaagacgctccacaatccagccgcacgtggacgaggactccgcaaccagactccggtcgagacggccgcaaccagcagcaagtgcacaacatcgccagccagcaccccgctgctgacgcccctcgccgccaggagtatcccccccagggccgcgaaaatggaacccgcggtaggggtcgggggcgtgcgcagccgccacgccgattctactgtctttttcatggcgaagactgcgcccaccaaaccaaagactacccagaaacaaagaccaccaaagacaggatggcacgggcgcagccagccgacaaccccagagttgtcgcgcacacttattagcaaccccctccaccatacatccacgccccacccctcatccactgcaccacgcataccaacaacaccaggaagtacaaatcgtacctcctccacccccacctccacaccagcaacatcagaacatcccccacgccccaaaacaagaagacttcgccgatcagccgtatcgc

SEQ ID NO: 132247 - DNA, 806 bp, Zea Mays
gtagaactagtcgttttataatttccaaagacttatgagaaattaatactttagttatattgatatggcctaggaccaacttggcccagtaaacggctcagtctggcctgtaggccgtggcgccggcatggtaaggactaaggaggacctagagcctaggtggctaggaggtctatctcctgtagtcctgtactacccctgtccctaagtcagtccctatatatagaggccccatgtacccttgcaacttaaggagaagtagatcaaagggacaaagggttagcccatcttttcttcccctgacttgggcgttgtcctactggtcactcttcctgtcctctcatttctccccaaatccccctccctaatctggggcaatctaagtactaacatatatattctcccttgttcttgtgagactggttaggtgatagccaacgatctcaatatgcgaagatgtgacctccttatccataatacaaagagaatgtgcaccgccaacctaatagtaacaaaccatggagcagaaaacttcccctattgttctcttgcaaaggattgttcaggttcatataaagatccctgcaaactacaaaagctagaattcgaccgcatactttgtgatgttccgtgtagtggtgatgggactattcgcaagggtcatgacatgtggagaaagtggtaataacaggatctttgttttgtctgctgttttatgcttccctgtatgtatcctcaggtcgcaatctgttattgttgttcaggaactcaggcatgggtaaccaacttcatcttctgcaagtaaa

SEQ ID NO: 132248 - DNA, 437 bp, Zea Mays
gcttctattaaggtttttctatctattaacaaaaggtacttgcttgtttgtctgagatctttttgggggatatagaaagggaactaaacatgcatcttaatactggaatggttagtggggtatctattaatcatcaaagtttcagcatgcatcacatggtacactaactggaacaggattcatcactaaactgaaacaggattcatcacaaaacaatgtattgcctatctatttgttcagaactgaatctaataacttacaaggaagtgaaacatgatgtgattgaaagaacaaactgaaacaggattcatcactgatagcaataactgaaacaggattcatcactaaactgaaacaggattcatgtttcactaaacatagaacaggattcatccccctgagtactaaagcatggcagcagcaccagccaccagaac

SEQ ID NO: 132249 - DNA, 499 bp, Zea Mays
cgagggggacgtatacaaaattgttcctcaaaatgtcaacgcaaacatcaaaaaggaagcaaaggttgacaccaatgttgaagggccaacaacttcaaaaaaattcatcagcgaatcgccactgacgatgtcaagaaaccgtcagaatcagtggcacgctacctgcaaaaattgaagagagttatgaaaaatcaatcaaaagcggaatcagcatctcgtggagtacgcacacgatcccaaatagacaatttcgaagtatgggaagaagatggaatgattcatactcgagaatcattacgtcttaaaatcaatatcccgatatacaaggaggttgttcctcctaaatttgtgaatgggaggccgttcttgacgacggtgcaactttctaagttgtcgactccggagattagaatgcatgagtggtacatggtggctagcaacaaatacaaactcgaggacttcacatttgttgtgccagaagatgcattttggagcaaag

SEQ ID NO: 132250 - DNA, 378 bp, Zea Mays
gcataatctagcttcctttggggtctagcttgattcctactcttctttaatgagattgatctcttccatctcgagcctggttgtcacccttcgggtttgggacaagaggtcaagatagatcgataggtaacagatgggtagagggtttagtaggtagctatatgctaaatgggattagttatgtaacctgcttttgtaggtcaagttattgggtagggccaggttgatctaatatctcaaacttgtttataggagcagggtctaatgtatttcctcagcattagctaatcatgtttgagtgactcacattaggtatgatcataatagattagatatgattgggtgtgactagaatagactagataagatctcattaat

SEQ ID NO: 132251 - DNA, 325 bp, Zea Mays
tcgtcgaacacgtgggggtttgcttctgccagggttcaacggccgatttaaccaccttagcgtgcagatcttggcaaaaccccgtgtacggtctcttccctgtaccaaatcctaccttttttatgtgagttccaagcaaggatacggtcggggtagagagatataggggtgagaagtcggctctgtcagagctgtccacaccgagacaaaagccatgccaagtcgtgtcaaatggcttaggattgggttcaaacttttccagggtgttctagggatctttgggcgccattttgtcaattgggccaaaaggttttgagtttgggat

SEQ ID NO: 132252 - DNA, 646 bp, Zea Mays
agtacgtccaaatacaagaatgaatcaccataattaagcgtttattgtttgtgaagctttaggtttagatattggcaatttatgctggatccgatacgttgcatctgccatccagcagtatagggagtccctaggcagttctctgtccatgctgctaaacatatgccccttctcgatgatgattctattctaatatttaggaatcaaatgctaggtgcaactgttttcctttcacatctttccactagccactacctggtctatgaccaaaaacaaccatagggtcagtgaaccatcctagtgttctcctgattaaacattagggtctagatagactgcaagggacaacttcatttgggtgttgcataggtcaataactttttccccttgctgcagtggtctccaccttgcgcagcagtgtacctcatctagacattctttagtccccagagcaaaacgtacacatcttgtctacccttgcttgcttccaaacagttgccctatgcaaaaattttcatatctactctatgatttatgtcaacaatattctgactccgaactagctatgcaaattgtgtactttatttttcttagacacaatgttttgccatcttgtaattcaaaaggcaaaacgtctcatgttgat

SEQ ID NO: 132253 - DNA, 365 bp, Zea Mays
acgattgtgaagtctctgcttcggtgtttaagccttttgccctcattgcgatcggatggatggaagtggccttggaggtatagggttattggggaccgccagtcttccgccattataaggttaacgatccggtgcccgtcggcatcctgcattatttgtaggccttcaggatttcggacggctggtgtaccgatgacgtgatagaatacatgggagggcagggcttcgacttttgctgctcctttagctaatgtatcggcctcttcattcttgtttctctcaacgtgttgtagagtgaaacccttgaattgtttatcgaggcttcgaacatcggccagatactgcattagtacgggctctttggc

SEQ ID NO: 132254 - DNA, 427 bp, Zea Mays
gggaagttcaaaattcgagctctcggttgtaagattggaggcaatactgggtggtgtggtgcgtgatcaacctacggagcccatggtggcttcaatttatagggatcgaccgcgagcacaacgaatttgagcggcggatcgtgatcggtaagaacaaggtgagtcactggtggccgctcaacgtggcctttaccgtggcggtgcctccggcaaccaccgtatatgcatagcgcatttagtcgcgacgtggtaaagtgcccggacacgaggcgcacgacggtgatcgactaacggtggcgagctcatccgattccacagtggcgtgtgcggtacagtggccggatttgtttactggacggagttatccacggcgatgatatttgtgtgaccccaagtgctatccaaacaatccgagcacgaatcacaa

SEQ ID NO: 132255 - DNA, 586 bp, Zea Mays
ttgattactctatccaccttggtagcactaagatgtattaggatttgaagcaaaatactggtggtatggattaaagagagatgttgctacacatgtggctaagtgtgatgtgtgtcaaagagtcaaggccaaacatcaaagaccagctggactattgcacccgcttaagattcccgagtggaaattggaagaaattggtatggatttcattgttggactaccccgcactccagcaggatatgactctatttgggtaattgtggacaaattgacaaaagtggctcatttcataccggtgaggacaaattacacgggagccaagctagcagaattgtatatgacttggatagtttgtctacatggagtgcctaagaagatcgtgtctgaccgaggttcacagtttacctctcggttttggaagaagttgcatgagagcttggatacacagttgaattttagtttggcctaccatccccaaattgggcagacagagaggactaaccaagtactggaagatatgttaagagcttgtgctcttaagcatggagcaagttgggacaagagtctaccttatgctgagttctct

SEQ ID NO: 132256 - DNA, 406 bp, Zea Mays
tgctcttccccctcggtgagcagctactctcctctccccttctctcctgttctctgactgaaaggcagtggagcccctctttctctccctttgtgcaaaattcaaattcctgtgaaatctggagatttcttgttgtggaatgtgttcctttgtatgccttaaacatcattgcaggttcctagctccttcgggagggttttcatacctcaaatggccattttcctaaaaccctaactccccgcacaccatgtgctcggtgaaatgcccaaaccagccaaacttgctcaaattgaacccaaatttttcaggcaccttcacaatacttccagcaacatccttgccaaatttcacgccaattctagatcccaggcttaaatttcaccaaatttcccgttttgagcgatcg

SEQ ID NO: 132257 - DNA, 363 bp, Zea Mays
atagaattgaagaaggttcatggcacttaggtgaggtgataaaaatggccgatagctagcaactaggccttgcaatccagaaggagggcagagactggagcaaacgaaccttccacgcacatgaacgatgaatcctacgatcttagatgcggtctctcgagtcagggcacgacgcgcatgcacatgaaagcatgtgttcccaaagtcaggacagatcgcaccaaccccaaaccccattttcagttccaagcgtttactttcttcttctccagctgcatgcgaaccgagcagaacccatcgaactcttcccgtcccacgcatatgcagcagcagaggccggcatcctctgacctgactccaaag

SEQ ID NO: 132258 - DNA, 664 bp, Zea Mays
atggtatataggctgagcagaaagcaccactttaaccaaggtttccctacctgcctttgagagtagtctgcctttccatcctgctagccttttattaattttgtcaattagcggttggacatcaattctcctaacgtttctgaaatgtagaggtagaccaagatacctccccggaaattttgagtatttgcccgggaacacatccatcagatctggccaaagagtttggggatatcgaatcgggaaaatttcagttttatcaaaattaatcctcatccctgaacacccttcaaaaactttcagaatctttttcaaaaccttcagatcctctttatctgctctaacaaacacacctgcatcatctgcataaagagaacatcgttttttagccttattttacagaacccgccccagaagccctgcatctgtcgccatctcaatcatcctctgcagagggtccattgctagaataaacaagaacgacgatagcggatcaccctgacggacgccacacatgtgcttaattgcatttgtttgttgaccgttgatgatgatttttgaagagcaagatcctaatattgttgcgatccaatttctccatttctgggaaaaacctagagctctcagaacctctaacagatatgcccagttgatggaatcaaaa

SEQ ID NO: 132259 - DNA, 305 bp, Zea Mays
actcaacttggccatattaaatccggtccgttgattctagatctgagtgctcagattacataccggttcagtggggtctggatttaatctcgtacgtccaactctaatccaacgacagatatccacccatacctcttcgcgcgcgtcaacttgcaaagaaacccctctgttttcacaaaaacaacccaccgtccactgtgggtagaactgagtctaggaaatcttatagattaaaccctgtgcttctctggttttgacgcccagcccagagaattagaaaatccagaaagtaaatagaaaatgat

SEQ ID NO: 132260 - DNA, 873 bp, Zea Mays
ggaaaacaaactagagagctctagggtgcgttagactagtatggtggcatgcgtcggaccatatgacacaactatttgagttatgtttctttctatagggtcatcgaaccctttaaatagtggccttattggatcaatgagttgagtctgctgacctctgctaagtgaccatagggggtttcgcggacatcaaactgatccgacaatgagtgtcataccatacgctcgcaatagtaattcaaatggctagttctggcacagtacatatacaattactgttgtgtctcatcggaccatgcaatatggtcatacgggtgtacgttagacgatttgatgctcacgaattttgcctagagttactatatataatggctagttgtccagttggtggttataattacctcactaaccaaccatactagtgctcctacctaatttaatagctaaagcaacccatattgagtgtcagaaagagccattgcctagtgagagacttaagagttgaaattctcttggtttggagcctcattagtatataagagagtaatgagtgtgcacccattaatcttattgagcttggtacgtagagtcaagtgagagtttaatactcttgatgatcgacatcacttagacagtttagtggtgatcaagagtgcggtgaacactgatagagtttgtgggtgacccaactcaagacttatacatgatcatgagcggctcactgtgggcggcaaagaaccagcttgtaaagagcacttagtctttatttggaacaagggggagtgacacccgggtgctctaataacgagaattagtggagagtgctgactctctaagacgttggtaaaaacattgagaagtcttcaaactttt

SEQ ID NO: 132261 - DNA, 575 bp, Zea Mays
gtggttctttatttttgctataaattttactttgtcggagcctcgcgaaattggtttgaccaaatttggatgaattttactcaagttatacatttccaaagtttgttgttgaataaatgaattagatattctaaaagaaaaagaaaaacataacgctcttgggtccctggccttcccttcccttttcctcacataatcagtccctggtacactattcatctgagcttatggcttaacacttaaccctcctgtgtttctagacaactaacctacagtccttggctggaataaatagcacccgcggtgaagaaggtggtggagcggcttaccggtggcagtagagctttggcgaagggtcatatgaggtcggggaggctttggcggtcacgtcaatgtgccggtcggcgttggaggtgaccagaggtctattggccatgagctcaggtggcggtgttcttcggccacatcggttccagccaatccatggcggtagaggtcaatcaaactgcaccgggagcttcacttgatgatgggggcgtgtgtgcgcaaggaattgaagaatcgctcgctggatt

SEQ ID NO: 132262 - DNA, 1388 bp, Zea Mays
tgacgaaatcaagcaagaccataaaaactagtgttgcatagagttcaagtttcatatcaatacacgatagaagtttaaagaaggaagctatatgaacaaaagaagcaaacatgtcgttcagttcttactgaccgaattgaagtcgtgcttaccttgtcgaatggcgatcttctagaagggcgggggtactaagaaaggtgcatagttgtcgaatgacgatcttctcgaagggcggggcactaggaaaggtgcagggttaggcgacatctccggtcaagagctaggtctcactggtttgctaagctcattggccaccagggacaggtcacaatgtcgtgacgagaaagatcaggtcgacatcgcaacgacgactagggcgagggcactaggaatgggtgggggcagggagtgtcacacgtgggggatgggagacgacgggcaacattgggagcaaggaagactagctcaggcagtgtcagaaaaaatgtgctcgaacggatatatccgaggactggtctgaggagaacgggagtcgagagaactgtgtcaatccaaaaacttaatggtaagtgaacattaggtataagaggttataaaaattgagggagtcatagccctctttgggtctacccctgaggccctgatagtgccaacgagcgagtaaaatggtgaggtcccattattagactgtctcggggacgcgagactatagttgacaatgtttacagaatggagtttgaaataggggatgagataaggaatctactggagatagctttacgcaagactgttggatgcggtctaacgtgtcgcgctcttggagatcactgtgcgtctgcgttagtatgcaaatctcgaaacccctgcggtcaacttggccatgattaaaggtaaaaagagaggactgaactgtatgtgatggtaacaacaccaacaaaaggaaacgcgtacgtcctctactactgttgcagtatcggaaaatcatctgcaatccaacagatatttttcagccggccaacgattaatcagtcgttgctacgagaatgtacaggggaacagtgaaaccgaactttatgaattctattgcagtttttatgtagcaatggacaacaataaaaccgtttagacttctggaagaacaaagcaagacattgtcttttatatagttagctaatcattccatagtttaaaaatactatagagccaccaaatgctagcgtgtgtttgtcccggattcgaagagggcaccgtgacaggtgtctgacctaccttccacatgtccaacggtatggggtgctggctggtttgctttgcagtataaagtcaaaggtttccagtgtgggctggacaggtgatggctggtgtaaccgtgtaaagctagatacgca

SEQ ID NO: 132263 - DNA, 469 bp, Zea Mays
attcatgaaaccaccgctccatattcacctcagtcacatggggtagctgaaaggaagaaccgaacagtatgtgacttagctaatgctttgttgcaaagttcggggatgtctgacatctggtggggagaagcagtactcacggtatgctatgtcctgaacagggtgccgcctcgcaatcgtgaggccacgccctatgaaggatttaaaggaaggaagccagatcttttgcatcttcggacttggggctgccttgcaaaggtgaatgtcccattgtcgaagaagagaaagctaggccctaagaccgtagactgtgtcttcttgggttatgcacataacagtgcagcttatagatttctagtggtccattccgagacaagcgaaatcgctataaatgtaataatggagtctcgggatgtgacgttctttgagagcatcttccctatgcgggataaggaagtagtagccccag

SEQ ID NO: 132264 - DNA, 391 bp, Zea Mays
cagaattatcccacctcgcttaactcgagaggaggaagccaccttaaaagggagagctacctttcccccatcgaattagtcttttggggagattgggcatttccctgagttgagtgtgcttaatgaactgttgggctctagtcaaccttaatttgttaggcctcgaacaaccccacctgggctgggtgtatcatctggtaccagagctagggcccattttaagaaggcgagaatgatgaggacatcctccactattacctgttggcaaagacggaataggcctagttggcccaattgtagttggacgatgaccatgtgagtctcagaattattccacctcgcttaacttgggaggagtaagccaccttaaaagggagagctacccttcccc

SEQ ID NO: 132265 - DNA, 635 bp, Zea Mays
cagtcattttattttgcacatccttggagatctcgttaattccttgtaacttctttcggtagtgaattttttttttatttcaactcttctgtcggaacttcacttatcttatccttgattgttttctccacttcgtgactttacaagtcttgccataactctattattggactatgcttttcatcattatcacctttatccttatcacctctatatcttaccttgatgtttatcttataccggcctctaaaatctcccccttttccatctcaatctgagtgtcgtactttacctacttttcccttggtcgtaccctctttttttgtcacctgcaagtttttaactctatccattgttgtgttttgtttgttatttcctttacccttctcatcactctatccgaccttgtgattacattatgtctgttatctaaaaaaaatctccaatctcctatcctaatttgagagcggtgttttacttacctcacccttggctatatcctcttctttaccacgtgcaagcttgaacgtgactccattcttggttgtactcataccactggcactctaatgccttcatcttttctctcgtacccttgtccgttatcgcctttgacccttgcgatatttatgtct

SEQ ID NO: 132266 - DNA, 669 bp, Zea Mays
ctacgaagcaaacaacggtgccgacgggtgggcccatggtgtcaccctctcatcagccgcatgaacatcccgcagttggcttacaggtggggcccgaacactagtccccgcgtacacacttttctcttgcgtctaatttctccctgcactgtatcgaggtaattcgccccccatcaagttcgccctaccttggcttagtgtaacatggtttggattagagatttggggtggtttgaggcatgaacgtgggatcttcgatgaatgggccgccgtgaggggcgcgcgccgccgtgtttaaccggccgagtggaggagacgaagttgtgatcgttgatgctccctcggacggattagattagatctcgttcgtcgattgggtggggaatgtgttggaccgtccaatcgagatcgtggggtccgagttgatgtctgcgtaattaaatctggaccgcggatcgatgatccgagggcccgtgtagcgtaccagtttgtttaaagatcaaatgaatctgtgccattcaaatctattccaacggccagatcgggccgatacctcttcggtttgcacactttgcagaagagaccttaggtttttaggcaattaacccgccatcctgcgcggtgttcactgaatctggggagaattgcgagttagaccctgtgtttctt

SEQ ID NO: 132267 - DNA, 794 bp, Zea Mays
taactaaatcaaacaatacagttttcgaaatttgttctgacagtggacagaacacaacaaccagtttgtaaacagcacggcgaaaacagtgcgtgcaggccaaaacaacaactaataaatttcagcttctattgacttcaagaattaccatgttctagagactggaattactctaacactttaccatttgttagagttaaattaatcaaatgaggacaaacaagtagacttacaaattttattcaagttatttcgcgcgctagaattaccatactcaattaacaacgcattctctacaataatcaaatcccgtatacatgtatatcgaagcgcttttcaccaaataatttgcaatttaatttagacatcacatgagcactgttaaacaagtagacttacaaattttattcaagttatttcgcgcgctagaattaccatactcaattaacaacgcattctctacaataatcaaatctcgtatacatgtatatcgaagcgcttttcacccaataatttacaatttaatttagacatcacatgagcactgctacttttcatccgcgaccataaccatgcacaattggaccacaacaagcaaattatcgtgattacgagcttaactaaagccatctaacaagttggttaaccagagcaacaacctaggccgctatacaacatactcgtcggctagcctattattatcgaaatccgagacacaacatatatataacaatcacttaacgaaatcgactcctacttaacatgagttggctaatcacagtataagacttagc

SEQ ID NO: 132268 - DNA, 465 bp, Zea Mays
gaacggagtgagcaagccagggacaatcttgcaaggaacctgataatagagagagagaaaacaaagtaacagcatctaaagttgaaaaggcacagaaacattttttcttttgatccaatggactactctgcgtacagctcttattcctttcagtcaaggacatttttcttatctgaaaaaaggttccaaatttgcaaggactggtttttgtcggtggctgatttggagatagtaaatggggctgtgaaaggacggttcttggtgtatcatgagcaagcaccttttcgtccaaaaaaaacaggcaggtcatcatcagtttaaaccaaaacaaccaacactctgaccggaaaaagtggtaactcatcagttaccaataatccccaacacacaagtctggagcatgaatctgcagggacttaaacctgcggagcacttgggtacaggctgttttccatactaaaataa

SEQ ID NO: 132269 - DNA, 532 bp, Zea Mays
tccatttgaatatatacataaaaaaccaaaaactaaaatgacaactatttggggacaagggagtatataaacttagttaaacttatgaaagatttacttggtccaaaacctgaattgcattctttttttacggatggtaaaaactaaaaccagactagatagcttatgactttcttcagaccagattactgattacctatgcagtactttattttggagatctaggcagctatgctacaaccctttaggcaatgtggtgactgactgaatgaagcgatgcctggtggcatacatgattcgtgtcaagataaccagtaggcgcctcttggttgctggtgaatcatgcttccttagtttcttgagagagcaacaattaggagtcttagataggggtagtggaaagctattgcagtagaggccctacgttatttcatcattcatgtctctcagtcttagaagatctggtgtcaggctgttgtatcttattctgtcttgcacaacacgcaagcatgtcgtggtgatctgtcctccg

SEQ ID NO: 132270 - DNA, 429 bp, Zea Mays
gactaactccatcaagattgacaatggccaacaccctgaacgccatcctccaatgccgatgcacacccaggaacgcgttcaagccccagctcctctattccaagatctccttctccttgatttctattccatcactcctcccactgagccaatatgaagcatatgaaaaaactaaaaccaaagctctttctacgctatcctacacatcttttttataacataaggaatgagaaactacattggtacatgggtacagacactacccagaagagatccaactactcgtatcgtcatgtcgttgcggttgttctgtacactccacgttttcaacgtgccatagagcgagtgttacacgccaaagtactaggaatgagcttccacactatcgagtacagtgcaggtgtggtagcagaaggcacacacaattta

SEQ ID NO: 132271 - DNA, 316 bp, Zea Mays
ctccagccaactgtgtgaagttctcgtactcttgcctgtacgtctcaaacagtctggtcttcacatgatcgttgccctcatggaatctctcgagggtagaccagatctgatgagccgtagtcagatgtccaactcgctcaaactcaccaagcgagagacacgagaacaaagcgtttcgagctttgttgttcgaatcatggaactccatttgaattggagtgatccggtcacttgtagcatcaaaaatcgcatcgaggcaaatttcccaaacccggtaactgatgctctgaagatacgtagacatgcgaatcttcca

SEQ ID NO: 132272 - DNA, 301 bp, Zea Mays
gattttttccccctcccggagaaataggtcggtgatgccttgatttttgtcgcgatgatctgggtcgccattaccgaattccccgtcatctggagtttcataagttaactgcctgcgttaggcgcgttggacctttctgtcaaaattgttctctcgcttttactccacttttacctttttgaattgctttgattgtgattctcgtgtgtacgcttgatgttaacccagacttttgttcatgaaaatatcccttcactgaatctgctgttgtggtgctgcaaattgatttgagacactaccg

SEQ ID NO: 132273 - DNA, 346 bp, Zea Mays
gggagaagttgcatatcaactggaattacccgatcatctgtcagatgtacatgatgtattccatgtgtctcagctaaagaagtgcctcagggtacctgaggagcagctaccactggaggaccttagtgttcaagatgacctgacttatgcggagtacccaatcaagattctggatactttgactcgagttactagaaataaggttataaagatgtgcaaggtacaatggagtcaccatggtgaagatgaagctacttgggaaagagaagaagagcttcgcatagacttcccccatcttttccttagttcttcttaaatctcggggacgagattatttttaaggggg

SEQ ID NO: 132274 - DNA, 667 bp, Zea Mays
ccccggtgcccttcgtctgtaggcaccatgcgcctcgcttcggacgaagatgcggagatgggagatcgggcttgtctagtgcttgtgtagtgctcgtcacaatgcgccgtgcacaaccagctagggaaattttgggcgctgcgggtgaactgcactcaacgataaacggctggtcgctaggattcgtcctcgctgcgcaggctccatcgacaagccatcgcccagctcggtcggagggaggtggaagaaggtccgtgcaccgttcattccgtgatcgacgataacgattagaagattataccccccccttcgttgttgtgatctcgacccttgatcttagatcgtagggttctgggaggctcaacatgttcgaacatctgtggccactggattgtgggtgcatgaataggattagatcctcagggtagcgtttctttgtccaatctgatccactaattgagtaatggatgacatggattaggtcgcgcataccttcgcgagatttaaaccaggccattgaatcggatcggacggctgagaattatcaataacccttcggtcaacccttattgcaaaagagaccctgaactttttatgaatcaacccaccatccacattagttataaagtaattggatcgaggtccagaaatttatgatttttcccgt

SEQ ID NO: 132275 - DNA, 730 bp, Zea Mays
ggcccttctgctcctgctactaaggaagtgccagtggaacattttactagagctgatcccaatggttgtgaccctgctgacgctgaccctaatgggtgtgaccttgatgatgctgatctcaatgggtgcaatccggccgacgctgaccccaatgggtgtgttgttcgtattgttgacgaggatgagaaagaggaggaggaaatctccttaattcggaaaaacagtcggcgctacctggtcagtgggggagtagtgatattccttctccagccttgtctgcactcgttggtctgcaagagttgtccatagcaaattttgatcaggctctcgaggatatggttcctgaagatctactgtccgagccaacagatggtggtatgatggacgtttgcgctaacattccggatgtggggttagagttatcccgagcagcgtctcgagcctcatcgaccttggagtgcggtcttcagagtcaagaagttggtctaggttgctccattcatatggaggtaactgagaatccttcagccttagaggtggctgttgcagagaacccggtcctcaaggatggtgccagcaattacttagcccccgagggtgttgccggtaatgatccggcccgggtgggtagtgcgagctacaacccagcccccgagggtgctgccggtggtgatccggctccgatgggcaatgcaggctacgacccagcccccgagggtgtccgagcggg

SEQ ID NO: 132276 - DNA, 294 bp, Zea Mays
gaaaggggctggccgcggtgagctcgatcctgcggtgtttcagaacagaattaggggaaacttgaaattggagctcacggttgcaagattgggagcgatactagacggtgtggtgcgtgatgaggttgcggagctaacagtgggctcaatttatagattccaggggcggtggcgcttgaatcgatgatggcgcggtggccgccggaggtgaagaagaacgctggtgcggtgagtacgtgttcagtgtcgtggcagtaagtccggtggtcgacgggaagctagagggggtcacgg

SEQ ID NO: 132277 - DNA, 538 bp, Zea Mays
gaggctcttgtcttgtcgccggtgttcatcctgattggcacagttatggcacgagaatccctgtcgttttttttaaaataaaaagcaaaaccaaagaaactgttatgcgacggcatttccaaagctgccgtttcatgcctgctctggatgaaaggatgcagttcggcagttgtgaatcaggtcttgcatgcatcctaccaagaacacaagaacacaagaatgcagatgccccttttcttttcttggtcagcaggcagtcaggataagcacgtgctggacggacagggagcggagggaacatgtgcttcttgcgtcttgaccgaagaacgggaggcacggcgaaaccaagccatacgagctgggaattgcgatccacctccaaatgttattattattatctctatgtaagatagattgcagtcttcttctgcaaaggctgacccacactgcccagaccaagaccacgaatggtaagactgtctccaacaacaccctgtaaagggttctgtccgctaaatttagaggattgttaggtccc

SEQ ID NO: 132278 - DNA, 307 bp, Zea Mays
gccttagtacaaagatgatcaaggatggaggtgatgtggaggatcttagccggtagccaacatgaacgaaggcctgaaagaccaaggaacacatgatgttgttagtaatgcaaatcatacgatcatcctcgccattctagaaagaagtgtaggggcagaacatccgaagttgaacaccataggagaagaatgactgagctgagttatcaaactcacagtcgttatcacgctgaatgaccttaatggtgcgaacaaactaagtggaaaccaagcaaagaagtgcaggagagtcacaaatgtatcgaac

SEQ ID NO: 132279 - DNA, 282 bp, Zea Mays
gcaaggtctcccctaggtgctgaaggagaagtcggtggagaagggagtgaaactcacctccccgcacctccggaactgccattagacttagcccaagttctggccaaccaaacccgactcattgaggtcctcaccagaagccttgagaaccagcgcccaaatggtggaagacctcaggacagaatgggagaatttctaaggctcaagcctcccacattcgctggatccagcaacccactcaacgctgatgactggctgcacacaataaaaaggaagttagag

SEQ ID NO: 132280 - DNA, 812 bp, Zea Mays
tttttcatgttgccatattaatagaataataactacgaataaacaacctgataaagtggtaaataaagtggcaaatgtgatggatccgatcatatcttcttcaaaagtggagtattgtgatttgaaatttgtattttttaatagctcactcatttcattttatagaagcagcataaaactctcactgatatgtaaaaagtttgagcctcttgaatcccctccaaagaggtaagcttttgtacagttaactccctacctgtcagctcatataattacttaccgaaagtatatatacataccatcaatgccaccctgcataaaaatacttccttaattacttaccaaaagtatatacacatactgttaataccaccgtttacaaaaaaactactttcgatgcatatgtataacattacaaacactatttgtttgtacatgtgcttttaaaattatataaattgtatctattgtttcacaggatcaaaaggattctacggaccaaagtaccccatgaatgatagatgcaaccacatgaaacccataaaaatagcccttaccggcagtgtcagcttttgctatcaatcttaccattttgtaaccaaaataccaaatacaatggatgcatagataacccttcagacgttctactaaatgcagctgatgtgctgcaacttatatttatttatttattttagacaatgacctacttaaatatggcatgaagattatgtatgtcatcgtttttatttctagattcgatacatgcatatacaattagctgctagcccttagataatgctacctactaattg

SEQ ID NO: 132281 - DNA, 366 bp, Zea Mays
cggcaacggccgtcgtgctggtgaagaccaagaccaccgccgccaccgccatggcgggcaaggagcagatggctggaagccgggggtgatgcatggctgccttcgtgctggtggtattatctatggtcgctcatgtgcaggtgcgagcaccggtcgatgggtgggccgtgggtgcaaatgcaatatataactgactggactgccgtgtgcaagggggtcatctggaccaccaccatttttatatgccatgcaacttgacagtcatgctccatggctggtctttggctcctgccccgtctaaatccaaaccagtgaatacacacaccgcaccattgacacatcgacgcggcaaatactcaaacctag

SEQ ID NO: 132282 - DNA, 524 bp, Zea Mays
gggataccaaatagcatcataactgacctgggatccaacttcaccagttcagagttcttcgatttctgcgagcaaaagagcattcagatcaaatatgcctcggtggcgcacccaagagccaacgggcaagtagaaagagccaacggggtgatattagaagcactcagaaagaaagtcttcgacaagaatgagaagttcgcaggaaagtgcatcaaagagctgtcgtatgtggtttggagcctgataactcaacctagccgagctctgcatggaaatactcccttctttatggtctacggttcggaggcagtgctacctgttgatcacaagttcggggcaccaaggttaatctttgaaaacatagcagaagctgaagctactaggctggaggatgttgatgtactcgaagaagagcgactaaatacggtgattcaatcagcacggtatcagcaaactctgaggcgctatcatgataaggccatacggcatcgatccttcgcagtgggagatctcgtcctctgccg

SEQ ID NO: 132283 - DNA, 476 bp, Zea Mays
ttcccaggtgatctgatgtccagccggttgaactgctacaaaattcgcccaccatgtactggcagggcctctcagttgttgggcagcaaataatggcttatgtggctccgtgcaacggaccaatccgaacttctgctccattactcttatccattcatcagcttctagaagatcttctgctttaataaagagagcgggacgtgtctaagagaattccagatatgaggtttcacgcggtccttgtggaggagctctcccaccatgctgttggaactgattaccctccatctcacgcaagaagcgggtattatctgcagtagcattgaccaaggcagcgatagcctcagccagtgtcggtggtacaggcggcgggttgggagtatcttcccatccacgggaagtccccacaccgtcatgcgcgcgagtccgtgatggcatatgaggcaaagagacatttggaacaaatatgacattcc

SEQ ID NO: 132284 - DNA, 368 bp, Zea Mays
cttacttccccctgtctcgcatttacctgcccgctattgctcaccagagtatcctccggcccaccgagaactcccttccgtcgtctggcctcctcacccctgttcacacaaaaccgaccccgccatagagttcgcacgaccctccccaacctctctagctacctgaactgacccttcgcgccctagagggcagtctgcctcgcctccagcgatagcgccggtgcgcccacggggagcaccacccctggcttcccggcgaagacaaaaccccctcgcgcacatccagcccgcccaaatccaattggacggtccgatttcagttaggctagaactaatcccgaccgcccgatctggatctaaccattctc

SEQ ID NO: 132285 - DNA, 493 bp, Zea Mays
taagtgtgtgacaccacccacaaggtgcgaagtcttctacgaagacaccgtccgagcaaaagtcgcctaagggtgcagccggaaaaagcacaataagtgcgcgacaccacccacagggtgcgaagtcttctacgaagacaccgtctaagcaaaagtcggctaagggtgcagccggaaaaagcacaataagtgcgcgacaccacccacaggatgcaaagtcttctacgaagacaccgtccgagtaaaagtcgcctaagggtgcagccggaaaaagcacaataagtgcgcgacaccatccaaagggtgcgaagtcttctacgaagatagtcttagcaaaagtcgcctaaaggtgcagctggataagcacaacagatgtgcggccacctagcaagcgcagagtcatccacgacacatagacgcccatccacgacacatagacgcctaaacttgcagcaagctcgcaataggcacaataaattacatagcgcaatcg

SEQ ID NO: 132286 - DNA, 550 bp, Zea Mays
cgcggcgcgccgtggaccgagtcttgcacttgatgtcggccgaaatttgtttgggaattgagttcagggagtcgtcaatctcgtgggggccgaacgaatttgggtctggcgctcgggttggccggattcgtgggctccggtgaccccgccgccgtgcgcagtggctggttgggtggctcgggcagggttgacgacgaagcttccgcggccgtcggatcaagatctggcggtcacaagctcataacggttcaacgtgcagatctaaccattgatctcaatcgggcggctgaaacaagtctaggttaaaggaagatctctaccattggtctccgatccgacgttaggaatcgtgtaccggttcacttaaagtcctgatctaatctgggccgctcagttcagatcgtgcagccgagatctaaccgtgccctttcgcgctggcacttttattaaagagcccctggaaaaacaacaaatcaacccgccatccacgcggggttagctctgtgtcttaggaaacttacaccgagaaccctgcccttttacaaatttg

SEQ ID NO: 132287 - DNA, 389 bp, Zea Mays
ccgccgtgaagaacagctcgctgcggccagctcgattccggttagctcgcgcccctctgtttcttgttctagcgtccccatgtgcccttgatgctcaccaaaccatccaattacactagaagcccaccaatcgctgggaacacgaactaacatccatggtttccgctgtccccgtgggcagaacgaaataggtcgccaatcatgcaattgacttaggggaaatactccttaggggtagaatcaggtgtgaaccaaagattagcgtcggtcttcgccatctccggccggtatagctcgccggatttcggtttcccgtgcggagctccgccgaggaccggacgcagtgaaggaatagaacgtgaagggtttgtctgcaatttgtcagtgac

SEQ ID NO: 132288 - DNA, 337 bp, Zea Mays
cgtgaaaaggattagggaccagctcacctacagtgcaatcgcgcagccaactatttgtccagaatttagcggcctgaccatcgaagagagggcactgaaaaggcagcccttcccaaggtcaagaatcggttttttagccacagccaacggatgcgcaaggcccatcccattgattcaaggttgggtatccaagaccatcatactgtaacggcctcaaccttttcccaagtgagcactgaatagtgcctaaagtatctaaccaaccaaaacgtttgaaatagagctaggcaaataaaaagatgtttctcttgtcatactccctcgtcctaaaatataa

SEQ ID NO: 132289 - DNA, 455 bp, Zea Mays
cgaaggaaagaagaagagggaatcgtatggatgcaagcttttagatagctcctccctctctggttgctcttggaacttcatcaagtgaaacaagcatctccagtcggtgcctaacaggagatagaccacgagcgtgggttgactgcttgtcatgggcggaatattgctacaacacttcctttcactcagctctccgcactacaccattccaagtggtctatgaaaggtcaccaccagccttactaccatacacgcaaggcacaacagctatagatgtaatggattatctattatgggatagagacattttcctcgttgatgttcgtgaaaggttgctgcaagcacaagcatatgtaaaacgacactatgatggacaccatcatgagctagaattccaagtgggtgactgggtatggctgcgacttctacatagccaagcacgagcactagttgac

SEQ ID NO: 132290 - DNA, 424 bp, Zea Mays
atcgcagcaggggacacgtagtcgcctgattcaccacattgccgtgatcgtggcatctttaagatagttgtggtcgctactagatgaacgcatgcgctccacggtgagcctcggtgattgcctcacccgggagataagctccactctcctcccaaatcggagccgccgcctaaagctcctattaattgatgcctcactctgcttcgccaagttatcacgaacccgagacactaacgctcatctccgattagccaccattgccgtagaatttgagttttcccccaaattggtcatctgcgccgccgtgaatcaccctgtcggggctagccgctctcaggtccgcactcaccctccttattcgtgttttaacactcttacacgcttgtgatgcttgtcggctcaactaaataagctagacgacgct

SEQ ID NO: 132291 - DNA, 476 bp, Zea Mays
ttcaaccttttcagacacaatttgctctgccgcttcttcttcaactacggcgggctcgggctctgtctcagtgggctctgaaggcctagcttcggtttcagcttgaatttttgcagcttcaacttctgcttgcttcgtttcatcctcgggtagagctttggaagcttcggcaatttttcctgaaggagcaggattcaaggattttgctgaatctagcacaacatctaacacatttgccattcttctcctcttaggagttgcagcggaacccttttgtgctttcggcactattatctctgttgacgggctcaaaatctccaacatttttgttatttttcaactttcaacccttcagccttatccttatcagccttcgtctaaaccagcttaactaaaggtaacttcggcattacaaccggctcttcagggctctgcgcaattggagcagtcactcttgtttcagcagctgaagaggc

SEQ ID NO: 132292 - DNA, 420 bp, Zea Mays
ccggaaaggaggtaggacatggcgctaaggtcaaattcgaacaagtcggtcgtctaccggtgcagcatggaaggtcatgaggacaccttgtacgaggagaacgggatccagttctacatgcagaccttaatctggggcaccgtggacttaatttgtgtttggcaatgcccaggccatgttccagagctgcccgctgctggtgcgccacccaccgaaaggcaagcacaatgtgctgacgacgtagggcagcaacaacgcaagccgcgagtctgacttctcgttccacatgtgcaccatggaagcggcgccgggcatggacctcgatggcgtggagacctacctcagcctcccctacaggaacatctcccacatcaccttcatcaagtcgtatctcagtcgcgtggtcagcaccaactgttg

SEQ ID NO: 132293 - DNA, 569 bp, Zea Mays
gccatcccatcgaaaagcaagggaggaaaaggaaagttgttgcctctacatctactagtgtgtcgaagtcaaagaaaatcaaggttttgacacatagacccaggcgcattgaggcggttgatgttccaaagttaattgaaagggtggaaacaaccccccagccagagaggttgttcctgctatgcctattgaagccattgcagacccgaccagagagccggagccataaaaggtatcagaaaaagtaccagagcagcctaagatgatggtgacagctctgccgaagctgccaactaccacaggaactccaaggaagaggaggatggctagtgtcttggaagttgttcttctagaatctgtgaaaacgcctccttctgccaaagcttctggcagcaaaactgaagatgtcatagagatgaccactacctgtacttctgctcccaaaaatcttatgaaagaaagccttccagagaaaccctcgacacctgctcccgaagcatcttccatgagtgatttgagtttcattatgcgacatgcttcgggaaaacaactatcagcagagcaagttg

SEQ ID NO: 132294 - DNA, 410 bp, Zea Mays
ttgaaaagacatcaagtccaaaagagcttagatggatgcctcaaaatgcaacttgaagaaaaatggtaaagttgtgaggtttgcacccttagacatgttgcataggtccattacaatgtttctagcacttctctatctttatctctactactgtaatgtgacagcttcgtgcagacccccactccctgtcgtcctcctgcgttgttgctcgcccacgcaaaagcatctccgcaccagccaccacacaacatgcttcccctgctcggtaatagcccgtgtccgctagacccgctcgcggtcctcgcaccccacgtgatccccgggagcagcaacctcgtggctcggtgcccaccgtgtcgacttcgagaactctgtcttcccctctactcctcaaatggtgtccacctcct

SEQ ID NO: 132295 - DNA, 546 bp, Zea Mays
ggacgatgttggtcagacatagtcatatagtgtagtcctcaatcaattcaccatcctggatcgcgatcaactcgtaagtgcgacgttctgtgcggctgccttttgcacccggtcatcgcaactgcaagggttcttgacggcctcccatgcccccttggccaatggcttggtcgctagggtgaaaatcatctttgggggaaccccactatagattgcctctagcgccatccgatcatcgtggaactcgacatcaccatgcttgatggcgtcccgtagatgatgagcttggagattcagcttcataaacagagaccacaagtggtagttggtcctcgctaattgcggccatttgcgagagttgccagactccctgaccacacgctcaatcacgacatcccgtggacaacgtgtgtcatgggttcgcgagtggcagacgttgcgggtccatgcggcacgacaacgaatagcttggcgatggtgtgcgtgttggggtcttgtcgccggagccatcaactttgctagatgtacccgtcttgtctgttgcct

SEQ ID NO: 132296 - DNA, 463 bp, Zea Mays
taaggcgtttctgacttaagttgatcgttgtttgagagtttgtttgccattggacgaacacagaagctttatcgataatgagaccccttgtttacaatgtgtggcttgccgactggagtttgtggtattgctacgggtaaaatttcctgaggtgctcaatattccacgagtttcctacttgggttccatccatttgggtaagtcggtaggacctaggccgggtgacttctgcaatgatgaatggtcattcccattgcggtgataatttgtgccatccttctcctgccaatatgtggtggagtactaggtctcctactgtgaaggatcggtgccactttgctttgtcgtggtagcgcctcagagtttgctaatacctgaccgattggatgacgacattcaaacgttcttcttccaatacgttgacatcctccagtctgattgcttcagcttcagctattctttc

SEQ ID NO: 132297 - DNA, 970 bp, Zea Mays
cgagggttggtcctccaccgggcggaggctcggcgtgctggcaatgagccagtaacttatttcactgccagtggaggttctgctctccttcaggatctccgtttccagaatcctgcattgcgcattcgtgatgccaggattgatgggaaccgcttttggacgcttcatcatgtggatttttataattctgtgatcctccccaagaaacatcaacccatactgcttcaacgctatatcaactgggaaggatgtgaggccattggggacccagagatgacacatgcattgagggcctatgaaagaaaaaagatgaagagtatcatgacattccaatatgattggaatgatgaagtcattgctcaattttactcaactttgtggatcaagccagctgacgaggagagtccatacaactatccttatctgaacttctacattgaaggcagttggtacaaggtgagctaccgtcggtttgctcacattcttggtttcactgacaatgatatctctggtgataagatcaagatccatgatttccgccagcctaccagagatgaagccagagatcttcatctctctgagtctgggaaatattgggagtctaccaacatgcacgagtattatagatacatcaactccctcagcaggatgaccctcattccaaaagggggtaatcagatgaatattcttggagagagcaaggttttgctctcattcatgaagcccagcagctcagagagtataaatgtctttgatatgatttggcaggaaatcattcatgctgcctgctttccattgaagggatgtcttcatgcaccttttatcatgaagatgattgaagttgtgactcagtttcgatttgataaaggtacaagacatcaatcctatacccctttctggattgatcccaacaatccagcagggcgcttaaggaaagccccttccagctcccgtgcacatacctctgcgg

SEQ ID NO: 132298 - DNA, 662 bp, Zea Mays
gagagtgaggagaggctcccaagctaagggcaacaagatggagtcctaactaagtattggctaggctgcaaggctccagtctcctggtcctcatcggtgtgtactcgtcctcccgtcgggctttcttctatgttcatccgggtccttgttcgtcttgggaccgaccacctccttttataggtcaaggagggggtcgccagtggtggcttactcaaggagtcatcggacgatggtaaaaccgagcgttctaccctggtgaagcgatgtgcgcccatggccccgaggtcgcctagttctctcgtattctttatagtggatgacgcgggcagcggggcccgagtgccatgattcgagctacgccgatcgttggcctttgtaacctaggcctcgatgccacttgtcttgtgccccacaaatggtccacgtactctggcctagtcctgataggtcatgagtgcgtcgtaggaggggacatgcgagccataaatgtgctgcggcccgagaggctcgtaggccatgagtgggagatgtattggcgcctctattgtggctctgtaataccaaaatttataaatcatgtgataacagaatatttcctttatctatatgtgtgagttatatctatttactatcatatgaaaatgaacaccatcaaaaaggag

SEQ ID NO: 132299 - DNA, 1030 bp, Zea Mays
gtaggctggacgatttggaagcgaagcacctggtaccaaatcaatttgatgctcaattccacggagtggaggaagtccagctagtatctcatcaggaaaaacatcttcgaagtcctgtaagagatcaagaacaacactaggcagtgatgaaggtaaatcgttggttgaaagtaggacctccttttacaagagcacaaagaatggggctgtggtgtttctcacttctctcaaataactcttgctcacaaagagacactcactgtggtgtggctgtttaggattggcatgaggctttatgttgctggatgggttagaactctctcccttacttgggttgggggtctcactcaattttcttttgtctgattcctctcttttcttgtgagccatatctgaagtatgtatctcctctggagataatggaacaagaaccaccttcttgtcattgtgaatgaaagtgtatttgttagaccgtccaaaatgcaccgagtccacatcaaattgccagggccgaccaagtagcaaatggcatgcttgcatggggacaatatcacaatccacctctccatgataatcaccaatggaaaatgacaaacgaatcatggctgaaaccttaactgtcccagaattattcagccattgcatatggtacggatgtggatggcgacgtggctgcaaaccaagcttctcaacaagcaaagcactaacaatattattgaagctcccaccatctatgatgaaacggcacacttggccttgcactttgcatcgggactgaaataaattatggtgttgtccttgttcagctgcaacaaactgagtggaaagaactctcctaaccaccaaacaaggagatggtgtattcattgtacaaggctcgaaatcaggaaaatcaggaagcaactcatcaaaatcagcactagtaatctcgtcagaagatggagaaataacatcttgtaacatgtcattgtgagcaaaagttggaataggttgaatcgctaaacaattcagaccaagctcaaatgtacca

SEQ ID NO: 132300 - DNA, 409 bp, Zea Mays
cccgactattttagctgcgtgatttccattgctactagtagaaacagacaaacagttaaaggctgacgaatcagggacgacgctatgctcggttgcctttattttactagctagtgtataccagggagagaggaaggacgactccacggttcttccctgctccgtccgttggactcttgcgtgagtactgtgctagtgggtattattttccgtcccaacaaagaaaaacacgtgatgccatgctgccaaatggagaaccaggtgcgtaagcagtgatgagcgcgaaccgggaacagccgcaaagagggagtatagtacagcgcagcacgcggcagcggagacatcgaacctctcggtctcggccaaatccgcgcggcaatcggatgtaccagtgcagaagacttccgtg

SEQ ID NO: 132301 - DNA, 506 bp, Zea Mays
ctcatttgcatgccggaccctcatatgttatctaaaatctctcccagcggacgcatgccgctcggcttctagtgcaccgctgcggcaaccattctttgaacgtcgcttgcgctgcttgcacaacaccgccaacgcctcctcgactgccgacgactctccctctccccgcccgcaatcacatggccaacagcttcttccccggccattgatggtgccgaacttaatgctttttttctgttcctcttctccagcgttgatttctcttccctcgcagcctataaattcacagctgcagccacaccgaccgttcccctccgtccccttgaccattattcttccttccattatgtgatggcagtttctttccaccgagtcgctgacaattatttcctttgttcatggctattgatgggcatcactctctgtctcacgctctccctggtcgcctataaatggaaccaccatcttcttttccccagcgttctcgcttttctcctccacgctcg

SEQ ID NO: 132302 - DNA, 609 bp, Zea Mays
gagagaaaaatcgagctgcgccattgccctgcaggctcgtcgttgccgcgactctagtgtgtgccgccgctcccgcataactgcagaatcgtcgtttgggactccaaaatctagaagtcgaggcaccaccgcacgcgtttgggcccgccatagccttgcccggcgtggattgtcggggtccgccgcaattcctcaccgtggtaactcctccgccgcggcagccgcagtatcacgtggtccgtcttcgccatagctccagcccctcggtatgaccttcgaccacctttaccgcatttgtaggatcgtgatgcacctgtcagtggtgaggatcgtgagttatggagtcggattgcctctctccggcgtgaggacgccgtgaagtcgggcggcgccgccgtcgctagctgagggttgggggaaacaccctggtcgtccgatcctcgttggacggtatagattagatcgacgataacctttcggctctttaaatctggtccgtagaaatgtgatcgaagggctacggttctttcaaattcagtccgttgatgatagatccaagcgcctataatgcgtcacggttcgtcgtagttggcttttaatctgggccgt

SEQ ID NO: 132303 - DNA, 565 bp, Zea Mays
cccacctttccttcttggctgctcggcccatttctactctttctccccgcggacgtgtgatactctttcttttcgctggcgcatggaccgcaatgtcagcgcgttctctcccttcatcgtggccgcgcagatgctgcaacgacttcgcggaaatggcgccgatggccatgatccggggcctcagtgttgaaccgagcgcgccctcatgggtgagaatataaacgtagtcggccttccctggaaccctttaaacaaaatcgcagccacctctacaaccggataatagccattgtgccgccgccgctgcactaatattgtcgtcgtggtcggatctcggtagtagagcgtatcggggtttgctgagtgcctcagcggcctcgttggggcgtggcgggcacctctggtggaagtctggagcgtgcggtcaaacggttctcggtgagttgcttgtctgagtagtgcgcgcgcagtccttccgcttctcaccgtggtgcggctcctcctcatcgccattgccggtaataagccctcccctgtgtccgcagtacgctcgatttgggttagc

SEQ ID NO: 132304 - DNA, 405 bp, Zea Mays
tagaattcagttttcctgatccaaacaattagtatttatttttcttgatccaagccatagcttcttgcctcctcacacgaatacagaaacatgttgcaacctatctggtcggcaaagtttcacatgggaaacatgatggtggtggcagcagcaaagttttgcatagagatacatggtggatagcaagcaggaaaccacacgtccatggaacatacgaacaagaactttgcagtggctgggagggagatgaacctgttgtggccgcgagggagaaattcctgtggcggagtggaggaagacaatctccgattggcggcggccatgttcatgatggggaagtgaagtactctcaattctgcgatggaaagacgtatcggtggatggagtgcaggggcaacatggtca

SEQ ID NO: 132305 - DNA, 978 bp, Zea Mays
atcacggtgtccatttgtgagtgaagcgcttggcgcgttgcaggtccttctagaacgcgcgcgtgatgcgggccagtttgctcacacgccatggagaagagacgagtcgtatggccttatgacgcgtggtcctaggatgtggctgggttcacacgtcattaggcataacgttccttagtgcatagtggccgatagcagttgttgggtaagtcgacttcgatgcttgcatgcagcgtgagtggagggagccacgaggatcggcttcggcggcttgcatgtagcatgagtggatgagggggcacatcgttagttggctaagataagcattactatcttgcactgcagccagtgatgtgtggctaacaaccgagagagagagagagaggaggagatgctctagtcgagtttagtttgtattgcttgtttggtactctaatgccagaacattagtgtcgtttcatctcgacatcatctgactttgtcgagtgtgaacaaatcacttgaaaacaacgtatacgtggtatggtttaatatataagagttgtgggctgaggttgcttgctctgcatgcggattacgatgtctaattatatatacccgccttcatctcctactgatgtgtcgtcgaagagaggatgacgtgtattggtgtagcacactcccttagctagtcagaccaagactaatcaaagctccagctagctatggacaaatggacaaataaatttctcgcccgggaagccgggagtaggaagaccaaggggctggggctggctggtgccgatgctcccgtatcagacaagttgacgtcgtgcgcattctcacagccgtcggctacgccaataccaacatccgtgcgttatggcggatgacagtacggcttgcatgtagcgtgagtgggagggcagctgcatgcctgcatgcagggcaccatatgggaggcgggggcactttatggtctacattagcttcttaata

SEQ ID NO: 132306 - DNA, 966 bp, Zea Mays
gccgcctcggccggagaactgagatggcgggacacaggagcaggtggcctggtgcagtatccacatgtttggtttctgtatttggagagtcaggccaacttggcccgtacgcgcagagcctgcatgcgcagcgcaactaccctagtgggtatggccgtagcttggttcaaggccaccttttgcatgagctaatgcacgccatgtcaacaacccagtcaaccaaacaagaaaaaaaataaaaaaatcatgtatcccatgacacagatcaaacaaatgcagaaaccaatcacacgtatgtggctccacacacgctctgaagttatgagcataaattatcaatccaacctgaaagttgtttgcaaacctcttgatttggcatagatatacatacaaagtgacataaaaatatgtatgagattgtatgtcatccctacaccacgaacatgcattcaggcgcatccccaccagacgcatgcatgtagtcctatttatttggcacttctgaacaatatggcaaccactaggcacatgcacgtggtttttatttttatacaaatccaaaaattatgacagctcataaaagttttcattgcattcacataaattttcattgcatgtgcacatagcatcccctcatgccgaaccacgcgtatgcatgcgcacgtgcaccatcgagtgactctttcccccgaaaaaattgaaaactgattttactattgtgcttgtcgcgataaaaactttaaaactgatctcacttgacatatgtatctcaagttttattagggtcagtcattctatcttttaacttcagtatttcatagggattattaggataacggtaacggtaagtgagtcagtcactctacaaaaaatatgcattacgaggaaggaatttatcgaactcggtcattctctgaatactcaatcattccatctttttagtcttagtcatttatgagaataatt

SEQ ID NO: 132307 - DNA, 476 bp, Zea Mays
cttcgtccttgctctagttcactcgtcttttcgctactctaggattagggaagctacctagcatagtacaactcaccagtagactccagctgttcagaccatgttgattcaaaccacacacttggtcttagccaatttgtgtatgtctatcaccttcagtgggatcactagcgacctgtttggattgacaaatgaactcgtccggaatcatccgaacctaaatccgaacatgcatgttctgtttggtttgtgtcacgaggtaaacccatccgtcatcaagccatccttcatagctttctccataggtataagttgacggtcgagctggttccttgaaaaagcagcggatgacctcgtccttctgatctctaacccatgacggatgatttaactccgggctacatgatgctgcaatccaaacacgtcatagataccccactcctccattactagtgtcattgactacaacagatgag

SEQ ID NO: 132308 - DNA, 272 bp, Zea Mays
cgggactctgtcctggtggtcctcatgagtactaggtccccttcgttgaattctcttgggacgacagtgttgtcacgccatgccttggtctggacctgatacttgtttagggcctgtagggcgaggacacggtctctgtcgatgagatctttggaggtcggttcgtcgatgtcggggacggctgattcgtttgttcggggggacccatgctttaactcttgcagtgtcattgatttggatccatacatcaggcaaaagggtgtgaacccggt

SEQ ID NO: 132309 - DNA, 664 bp, Zea Mays
cgtagatctgttcaagagactcaagaacctgcacctgccttgttcaatgtgctcgccgtcacctgggacggatctaggggcaggagaaagaagaactaagccaaggaagcgacgccggaggtgaggaagaataaaccatggaagtgacgtcaaaggaacggaggcaggggcatgaatggaaaagaaaatacactaatgctagctaagtgaagtcgatgctacaacttcaaagagcctatgattataatgccagtatggcaattgccatcttcgagatgtcaattctcaaaagcccagcgtagctgatgccagtattgcaagtattgcaaacatcttgtctgttggaggcccgttggcccaataaatttcgccctgttcaacacgcccagtggcccacgcgtggggctctctctctcgcgtcgacactggacaccgccggcgcctccctatcctctgtctcgtggcgacgatttgccgctgccgccattcgccaggtcgttctgagccccttttagggctcctttggtagtttgggatcccggaaggatcccagccccactgaccccaaaaatcgcgggccaaatcaccctcggacaattttttttctcgtttggcgaccacgcaccccggcccattccgcaggggaccacggcgttttcgcccc

SEQ ID NO: 132310 - DNA, 309 bp, Zea Mays
gaatttcagacaaattcgttttcatgaaaattcagaacaatttggcttgagatacttgaccagggctgtggctctccacgaatccatcaatcatactccaatgattcggtagctcaatgatttcgcacatatccattaaattccaactcgaaaactatattttcagggaaaaacatagaatagaaaacaacaagagtgcatggccatggccgcgtctcagctctgacactgtcgacaggacctggtggtatccctgcagctcttgtacttggccaggcacagacagcccttttcgcagccgtaaaaatt

SEQ ID NO: 132311 - DNA, 541 bp, Zea Mays
catggcagaggtgacttgtcggctagggaccttacaaaggtgaggccaggtcccacgatgggcccgcactagcatcaccctcaaccaagcatggttcacgaccttgaaaccgcaatcagtcgtggtggtcttctcttgaaacccagaactcgcactagtggtatttcaaggagagggcaacgtcaatacctacgtggtccattgtgttggcctactagtaggctcggtgtcgccaaggctcaactcgtcggccacaacacaaggccatggcgcttggggtaggctgtgtcaggtggtagcctcgagctgatggtgtgcggggtagctaccgaacctctccccaggcactgtctttggctactaccaaggtagaaaaggctgctgcttacccttccagtctgaagggtgatagtggtcccggtagggcaggaggggtgccaaccacagcaagtgcattcaacagccaagcgatcgtcgcctcacctcaccctcaaccatcaacaagggagcacaggctacagctcaccttttgaatccaaaa

SEQ ID NO: 132312 - DNA, 826 bp, Zea Mays
cgcggctggcacgaccgagggcgaggcaaggccgcaggggagtggggacaaccgacggccatgtgagggactgagggtgggtggctcgaagacgacggaaacagacacgaaaaggaacggagcttagatccatgtctttagaacacctttgcaaaaatttagatccatgggctgttcgacgatatgcgcagccaggaactactgggccctctggccacggcgtcgtaaactctccgcacacccatcctcctggtttcccatcacattagttgcttatgctttgcttaatttcaatgctactgctcatcttccatgctatttgaaggtcactgatcaataaaccctgtgttccatttcattcatacattaacagataacaacgccaacaaacagatttacaaagacactacacacggtactacagtggttacaactgaattgcagaggagcccttcccccctacttctgctagaatggaacacgttatcttgcagacaccggcaccggggacaaaggggatgatgaagcatcagaagtaccatctctgccggttgcatcgtgatggcctgcactactgtcagtgtccatggcaccttccaacttccaagaccttgacgacctgagacatggctggccgtttgctgcagtcacgctgcaaacaccagacagccagcttgatcacttccgccatttccgacccatgtaactggaggtcttcatcctggtcgtccactatatccagagctcgcccggccttcattttctcctgcagtatattgactaggttagggctgccctcaggctggttgttctccaggttcttcct

SEQ ID NO: 132313 - DNA, 351 bp, Zea Mays
ccgtccccttcctcccgttcccttccttccgtcgcggcccgcctccttcactacaaccaggacaggccaacgcggaagcccgtcctccccacccccttccagatttgcagctcgcacctcgcgaatccccgaattccccactgcctcgccacgccgcgcgctgaccgcggcacccggagccccacctgctattcccgaggcggaggacccatcctgccttggcgctcgttcctccctcgtgatcggcgccgcgggcgaatcgcgctgcccggtgggggggaatctagggttccggccatgccggcctagtcgtagggcgggggtaccggcctgcgtcgccggcgcgcgtgg

SEQ ID NO: 132314 - DNA, 569 bp, Zea Mays
attcacgccccaaccattgattcccctaagttaattgcacaaatggtgaactaatgtggtctggccacggtgagcgcgcggatgaaccaaagatccatgcgttcccgacggttagtggacccctagtccaattggatgggtcagcaagcatcgtagacatgtgagaatgcttaaacgagggagagggagggttggactgaccggagtacggctggccgcggtgaggttgggcttcgggtggcggagaacagatttggggcgaacgtgaaattggagagctgtggggagtaatcggagctacgcgtgggttctctggacgtacaattacctagcggcactggccgaggctccaatttataggcagctttgacagtggccgggaattttaacggtgatgtatggcggtcggagataaggaagaggtctagtgtcgtggttacgtgtccccagccgtggcgagctcatcgacgatgatgggacgacagtagggaatcacggcggtgccgtggaaaggctcggacacgcggcgagcacagagatggcacgacgacggtgagcggccttatcta

SEQ ID NO: 132315 - DNA, 445 bp, Zea Mays
tagggagctccgccgctgttcgctgtggtctcgtgtccattctgcagtcgccgtcgagccctcactgggtttgttgcctcggtaagcttcgccccgcctcgtgcgacccgggacacctctcggttcgctccctccccttatgtttttctcggtccacgctcaccgaccctctctctgccctaccgtcgtcgacccgtgtcctcgtcgtgcctcggacaccattcgtgagaccccgagccttctctcaaggtaactgatctaatcccgcccctaatttcccctgggctacccttagttgcgcgcgattgctcgccggagtatcccccggtccgccaaggactccctctccgtcgtctggtcgactcacccccattcctgcaaccctgaccccgccataggattcgtcgtcctccccaacctttctggctatccagaccacccctag

SEQ ID NO: 132316 - DNA, 344 bp, Zea Mays
ccgggacgcagcaaagctccttcagaccatcagccccaagaggaagagggagacgaagcttcagaggaagattcaactcacaatagagaaggttgttctatttgtcctgtggagaggataagaggaacacaactaggacctgccaagttacaatatagatgcaaaaggagagagctgaggccgaagcacggcaaaatcagtcgaaacaagtcctgcatactgcttcgtgttattccccatacattctagagtatgtggacaatcagcagccattttcacatcccatagttttagtagctccagcaagccactctccagctgcttgggccttgccacaaccaccg

SEQ ID NO: 132317 - DNA, 563 bp, Zea Mays
ggccggtggggattttcgcacgtaaagaaagtttagatcaaaggtccaaaagcgatggtgaactggtagcaccgtagcaatcgagacgcttgcaggatgcagatcgttgtgaagtgacacgggtgatggacctgctatcgtcatccactttattccttctgcagttttgttgacccaacagaggggaaaaaaactggagtagcaataaaagcaggtagaagctaagggtgagaaatgactgtagaaagaagataaaaggtttaagggttcctgacgtagaaaatgaaggctttctactatctctactacttattaagttagtctgctttttatgttctgccattctgcgatctcagccgtccattctaccgttgtacaatctcagtcgtccaatctcgcacaccagttttccgcgcgcagaaaaaaaatcaaaccatgactgcctagggatcgaaccttggatcttttgagcagaatgcctagccttccaccctctagccaacatgactcatgttgaattgtatacaacttcaactaaaacgtcttttgtgtttaacccaccg

SEQ ID NO: 132318 - DNA, 445 bp, Zea Mays
tataattcaagaatcgccgcgttctagagacttgaattattctaacactttaccatttgttagagttaacataaccaagggagaactaacaagtagacttactaatttttatacaagtcaattcacgcgcgagaactaaatacacatttaattaacgcattcaccacacgaacacagtttcacgccgcacactagtttctaacatgcttttcacataactcataattcaactactcactaacaataaatcacgcacgacaactaccacatcaaccgatttatttatttggaacaccgcctgcctagcgtaccactagttcccacaatttgattcaagctcaacaatacaaccttcattcgattatacaacagcgacctaagcatcgcattacccaaggcatacatccttcctcgtcgcgagtataaccatatcactgcatatacc

SEQ ID NO: 132319 - DNA, 477 bp, Zea Mays
cccccacacagttcgtgcaaccgactcccccctcttcagtccccacgtcgtccactactgcatgcttcctccccacgacctccacttcctcagacaccttatagagctcgatgaagataaaccgggagcatgcgttttcaccagagtcttgtccgagcacgcgttttcaccagagttttgttcctgtaccacgccgcgccgggcatctacagtgtccgagcgcgcctgtagtggaccgagggggcgctcagcagaggccaggaggggcttgctcggccgacaaccgggactgcgcaggctacaaggggagtagtgaagatcgacggcgagttgctccacgaccggtctctcccgcttgaggagtaaggtagtttttttaattacccctaaatttttatgctgttggaatatgtcgtttcagcaatgtacagattttaaggcttccaagcctcaagcttacaattaccccctcaatgt

SEQ ID NO: 132320 - DNA, 459 bp, Zea Mays
agacataatcccttttgcttgtgatggctcccctgaaaacccactcagattcatatttgtcttaattagctcaccctccttgtaccctaatttggaaaacacggacaacgacatcacatttacacctgctcccccgtcaatcagcatgccccccattggcttcccatcaatgtgaccgtgaatatatagtggttttaggtgagacccctgcttgtttgatttctcaaacacagcacgctcagcccccaatgctagttctgcaatatctccctcagctgccctaaactcagtaggcaatacaaacaccatgttaacatccatacccactaggacttcaacacttttttcccatctgaatcgttattgctactgtagtcactttcctcttctcttgccaatcgtttttccctccacgtcttcttaggaataaccatcggcctgtccggattaaaccacctg

SEQ ID NO: 132321 - DNA, 770 bp, Zea Mays
ttaatgtgactttatggaggtgaatgctttgcccgccttcattaccatcattaataatggtagtgctccaccacgccctggtcacgataatgtagccataatataaggtcagtgtctcacaaaatcaaatgtgtagaagtgaccatgagcttaaatcttgagtacttgtccagctcagtgtaaatataaataagctttcacagtatacacttacgattgcgatccttaccacaccacatagaatattaatacaaatatcccactatcctcctgtctgcgatattccacccccatatccaccctctcgtcgtcgctagagctttacactagtggatccacacacgtatgagctagcacagtaaagcatcatgacctcccccgtgtgatcaacatgacaagttatgaactgcttggaatgtgtggtactcaggaacaagacataacgagccaaaaaccttgcacaaccgaccgaggggcaccagctacaagtgtctagaactttgttgagagaaatcgagggattagcacgtggacggtcagaaagtctgtggagaaatgagaaaaagaattgctttgtgagacaaacgaaagattggaagaggcgagcaggaaaacagaagagagaaacaattggtttgtgctgcaaggtctataaaggacactatgttcacttctgttctacaagatccattctggttgccaatatgttacattaacttctctattcgtgcttgaaatgtcacaacttctactggaataaaactatttcc

SEQ ID NO: 132322 - DNA, 383 bp, Zea Mays
gacggtggattacaaagaggatgaggagcagcatgggaagattgtggaggtgatgatggatgtaaaggtactaaagttttaggaggcagagatggttggggatgagatgacgacggcgttggtggatcaaccaattcgacatcccttcgaggccaaatgatgaaatttttgatggcttgtccaagtgtctcgattccttcgggcccagggatgtctagcatgtcatcctcagatccttggacgaccatcgtcacttctaccctgtaataatcatctggtatgtcgcttccatgaaacttacatcctaggaccgcaatgcttgttcctactttcttcgtgcgattattattaataccatatcttataaccagtgtgcacatcac

SEQ ID NO: 132323 - DNA, 430 bp, Zea Mays
ggttgaggtctggctgagtgaagatatacttcaaactcttgtgatcggtgaagatgtgacatttgttcccaattaggtagtgcctccatattttcagggcatgcattatggctgccaattccaaatcatgggtgggataattctgctcatgcggcttgagtaagcgtgatgcataagcaatgactttctcattttgcatcagaacacaccctaagccttgccttgaagcatcatagaagacgacgaaatcctgatgtatatctggtagcgtcaaaacgggtgcggtcgtgagcttcttctttatgatctggaaacttttctcacactttggggtccacacaaacttattgtctttcttgaggagctcggtcataggtcttgctatgctggagaatcccttgataaagcgacggtaatgtcctgccattcc

SEQ ID NO: 132324 - DNA, 958 bp, Zea Mays
taagcgtgagcatgttgcaccgtcttaagtcgttgccgacttaagctgattgctccgttagcagggcatagtggtcaacccgagttaagtaagaatgcaggtcgacaatgaataatttgagcgctcttgaagtcttcccagtgatgatatatttcccagtttacagagtacattgtcgtcccaatagctttcgaaatacagctaggggtaaaacttcctaaggtgttctatgttccatgagttcccaatttctgttccgtccatctgagtaagacgatatgatcccggccgagtgacttttgctactatgaatggtccttcccatagaggtgacaatttatgtcgtccctcccccgctagaattcagcggaggacgagatctcccactgcgaaggatcaacgtcgtatggccttatcatgatagcgcctcagagtttgttggtatcgcgctgattgaatcaccatgttcagccgttcttcttcgagtacatcaacatcttctagcctagtagcctcagcttctgctatgttctcaaagatcaaccttggcgccccaaacttgagatcagcaggtagtactgccactgaaccgtagaccatgaagaaaggagtatttccatgcagggctcgactaggttgagttctaaggctccaaacgacgtagggcaactcccttatccattttcctgtgaacttttcatttttatcgaagacttttttcctgagggcctccaatatcatcctgttagctctttcaacctgcccattggctcttgggtgcgccaccgaagcatatttgatctgaatgctcttctgctcacagaaatcaaagaactctgaacttgtgaagttggatcccaggtcagttatgatgctattcgatattccaaatctgaatattatgtcttgtatgaattccactgccttagctgaatttaaggaagcaatgggtttgaac

SEQ ID NO: 132325 - DNA, 884 bp, Zea Mays
ccgcgggagcaaggctgtcacgtagtttggccacgtgttctaaaaaaatatttgccgtccgatccaagatcaacgctgcacgttaagtgtttgtatacggcatctacggtgtcctggaagtatccggagatcgccatatggataaaaaaggaaagccaaatatcttctttctactccggccgaagaagactggacaccgcaccactgaacgaacgaaggcgacggatacgacgtgaaggtggcaggtgacttcgatgccgcaaagcacgcgacttggacatcctcctcatctatcctgctgccaaaaattgccaacgcttccttccaggtgagattaatagtcacattcttcccccattcggtgtcgcacgtcgtatctcagttcaagctaggattgatattgcattttcatttttttcccaattggtacctgtgttgttcctttgaagtccttcacaacatcaatctaggcatctggctctgttgaagcagcaaatcttcacggatagcacgtagcgaaagcaaatctacacgcgatctgtgcggattggcaaattcccggtggccatcacggtgtgacactgcagaactgagccagtgcgttgcgtaattggggcaaaaaaatgaatctgacggttgtagaagtatgcggccatccccgattcaatccaatgtcatcccaaatccgagcacagacgcaatagcaacatctcctaatctcctttctcttcctccccacatcaacggctccacccggccggcttttttttcctttaatttttcccacaacatgcaagctatccactctcgtcggctttctctgtatgtatcctattgttcccctctgctgcatcctagtagatctgtacagtcttaagtattat

SEQ ID NO: 132326 - DNA, 306 bp, Zea Mays
gcacacccatggtgatctcgttgtttccttgtaacttccttcggtaataaatttttacttcaactcttctgtccgaacctcacttatcttatccttgattgttttctccacttcgtcacattgcgagtcttgccttaactttgtccatggattatgcttttcatcattatcacatttatcattatcacccctatatcttaccttgatgtttatcttataccagcctttaaaatatcctcttttccatctcaatctgagcattgtactttacctactttcccttggtcgtatcctcttctttgtcac

SEQ ID NO: 132327 - DNA, 340 bp, Zea Mays
tgagacgatatgatcccggccgagtgacttctgctactatgaatggtccttcccataagggtgataacttgtgtcgtccctcccccattagaattcggcggaggacgagatctcctactgaaaaggatcgttgtcgcacggccttgtcgtgatagcgtctcagagtctgctggtaccgtgccgattgaattactgcgttcagccgctcttcttcgagtacatcaacatcttctagcctagttgcttcggcctctgctttgctttcaaagatcaacctcggcgctccaaacttgagatcagcaggtagtactgcctctgaaccatagaccatgaagaaagg

SEQ ID NO: 132328 - DNA, 418 bp, Zea Mays
tggaaaccagagtaagcatctaggaaagacaggaggtcacacccggaggtggaatccatgatttgatctattcgtggaagtggatacaggtccttgggataggccttattgaggctggtgtagtcgatgcacatctgaagcttcccgtttgccttggggacaatgactaggttggccagccatactgggtgatggacctcttcgatgaagccagcgttcaacagctttcggacctccttatggatgaagtcctaccgctcaacggactatctccgaggcttctgactcaccagtctggcatcagggtggatcttcagatggtgctcgatcacctccctggggatcccaggcatctgcgacggttcccatgcgaatacgtcggcatttgcctggaggaaggcgacgagcgcgagttcct

SEQ ID NO: 132329 - DNA, 554 bp, Zea Mays
gataagttgttcacgtgaaggtaaaagtgcaccaaaatcaaatgatacacctagaatgaggaataggtcatcggggcgtacgcaatgtaaagctggaataaaattaaaaaatatatatgatgatgaaaaaaatggttgtagctgcaaaaattgaactggtaaacttggagcataaccatgagttcataactgacgaagcagagaaacaacatttacgttgcaacaaaattagggatgctgagttcataaattttgtggatgcaatgcatgatagccgagtgccgcaacattgcatagttgattttatatcagaaatgcatgatgggccggagaacgtaccggtaactgctcaagatctgaaaaacatgtaagcaatacttttttgttacatgtgtatatatcaagagccataaatattactatagtaaatgtgtgtgtaataattttttgtgcaaacaaatgtaggagggcagccaggagaagagaaaactgcgcaaatgatgtagccaaacttttggctttctttagagaatgcaagaaacggaatccacaat

SEQ ID NO: 132330 - DNA, 778 bp, Zea Mays
cacccggccggtggatttcaccatcgacagggcagataatattcataccgtttacacatctagcggtaggcctccctttctctatacttctgttttctcttattaaatagcatgttcttatatatttagttttttgcatgactgatctgtgggcgttaaaaaaccgttgttgcgatgaaaatttgtaaaacaatggccaatttagacctggtataggtactcttggaatatgggggattacagtggatcaaggtttaaacactctttgtccaaaccattccaatccaagcccctagctagacctgatgggtgatagacacctatttacattttttcagtttagggatatttcctatatatgaaaggcggtagaaaacggcgatgcaaatggtgtccacgtcatcttttattttcttgatcgtcggatcacaaatgaatggttcagtttctcctacaccgactgtcctcttcattcacacgacaaatcatgaagcttccagatgaagccgaaacctctcagctcctagggtgatgtcgtccaagctaaaaagttcggccaccgcgacgacggcgacacgttttgctgccgagtcacacgacgccatgggcaccatcccctccaccactcccctcaggcctcaaccagcgccactgtaccagatcagtccgccgccagaagcggatgtagcgttatcccctccccaatcgccatggcggtgccgtctcgggctgccaccatcgcggcggcgtctcgagctgctgctggtaagtccattcc

SEQ ID NO: 132331 - DNA, 512 bp, Zea Mays
tgcgattctataaatgctgaatatctgtgatcgagatggtttcttgctgagtaggctgtgcgatttacaatgcaatgattttgagttgaacagaggggagcccagaaataaccatgtgtgcattaatgaagtgcgatacagtaactagcaatggcatgacgatgcacattgcatggtttctgcacaaatttctgcttacatgttattatagccattgaaattgtgtgcactatttgcttattttcaagttcacacaagaggagcacactattaattattatgttcggttaggggtggattgaaggggattggaggtagggatggtagtgggtaaggtacccaatgggcacaccgcacacaaagccatacccgtacccactagagaaaaatgcctcatacccgctacccatcatgggtacaaaattacgccatacccatacccaccatgtgtagcgggtacccatacccactaacattatagtagacatgatcatttgaatcgtaaaagtaag

SEQ ID NO: 132332 - DNA, 491 bp, Zea Mays
gttattgtgtgtcttgtgacttgtgacaatgcgcgatcgcgtcatgacatgttctaaatgacagtttactttttttccttttgtttgattgcagggtgcggttcctagaatttagtatattgaacccgtcaagttgctgcgaccctctataaagggggaggtcctttagtcggagggcacatgacatagcaaccgactcgtcttctcattctcttctctctgcaccgccgcttctctgccatgtcatctctttgtctatcatgcagcagttcaagggagagcggtgtctccgaaacaataccggtgttttggcgacccacacaggtggagaggtgagaatcaagtttctagaaagggcttcacgcagtccacttgggttcctcaccatcactcgtggaaatcactataagtaaatccgcattttcagtttattgtgatgacagtcttatggttacatctgttgtcgattcttcttttatgcgtcaatcttg

SEQ ID NO: 132333 - DNA, 633 bp, Zea Mays
aagaaaaactcacctgggctgcaggccttcatttcggcccatttggccaactcttccacacagcccacctttcccgcgctccagccatctcactgacacgtggggcccgctgcccagtctcatatcacgtgcgcggatcgcctcaccgggttgcgagtcactggagggtggcccggtttgtcagtcctttcccctagcttcgcgcaaccaaacctgtcgccctcgcatgccgttgcgtgatccgtgtgtcagctccggagtccgttgggatgggatcgcctgtgcgggcttgggatataaatctccccttccgtgtccttggtaacttgattcaagccatacccgaacgccattacccttgccaccgccgttgcgtgagggagcagtgtagggagtttccgccaccggggatttcatcctcgccgtggctcgaagctcaaacccgtgggcttaagtgttgcaccgggccacggggaagacgttggtgacctcattgggcgagatttgcgaccagggacccctagatttgtcaccggagccattgactcgcggtggagccgcccctcgtcgtggatagtgtgactccacgctcgattctcggtaatagttgcttgcccgaactcgtgttcatca

SEQ ID NO: 132334 - DNA, 530 bp, Zea Mays
gaggatcagtgggtcacgcaggtcatggtgctcacaagaatcagcgtcggaccactagaattttggttggtcgacaccgacgctgtcaacgggttagcgtgcgacgtcgagctcgtgttccaacaaaactatgccagtaatggccaaacggccaccacggtgagcttcactagcacacagggatgctcaaacacaaatcaaaggcatagaaccataccgggttcgcctggccacgggaatgcggggatgagcacgctctgtggggtccgatggggataatggatgtcgcgatgaattctggcggaaacaggcagtcacactagagctatacgatcgcaagggactacaagttcaccgtgcactaccaatttgggacgaggaagggaagacaccgcgaattttggcttctaccgatcacaccggaagacagtgaagacctcactatggttcatggagcaatttaaagggatggcgacctagctagctatccgcggtcacgaggcacgacgtttgtgcatggcgaccacgta

SEQ ID NO: 132335 - DNA, 537 bp, Zea Mays
gtccaagactcagtgcatagtgaatatggacggcgggttggttttctggaatcctagggtttcttttgcaaaatggttaaaccaaagggtactgcgtaatttcagccgcccgatctaaaatcgatggtcccgattagatccagcgatcatgaaaccttggccgcacgatggaacttcaacgtctcagatttaaataacctatactgatttactaccggccgatcgagattggacggcgcgcgatcctcacccgaagcggtacgcatcaggctcaatcgcgaccgtaggtgctcgatccaacggcgagctcgtatttctcccctaccctcgaccagtgcggcggcgccaataatccccggcggcgcagcccgccggcgaggccacggtcggcgccctggtgctctaacccgcaaacctacgggcgctatgctacgagaagtacaaggcgaaagacgtggagaggaccataccgcgaatcgcgcagccgtaagccccggccacgacgcatggcggcaccgccgcgaaccatttgctccg

SEQ ID NO: 132336 - DNA, 420 bp, Zea Mays
agtgagacgatatgatccaggccgagtgacttctgctactatgaatggtccttcccatagtggtgacagtttgtgccatccctcccccgtaagaattcgccagaggacgaggtctcccactgcgaaggatcgatgtcgtatggccttgtcgtgatagcgccttagagtttgctgataccgtgctgactgaatcaccgtgttcaatcgttcttcttctagtatatcaacatcctctagtctggtagcttcggcttctgctatgttttcaaagatcagcctcggtgccccaaacttgagatcaacgggtagcactgcctccgaaccgtagaccatgaagaaaggagtatttccatgcagagctcggctaggttgagttctcaggctccaaacaacatatggcaactctctaatccactttcc

SEQ ID NO: 132337 - DNA, 647 bp, Zea Mays
gtttgagttcagaaggaagaaaaggaaaagtgtcaccacagtgacagtgccaagtcagcaagtgccgtcgtccgagccgcagacggatgtgttcataagcagcaccaggaaccgtcggttgcttgacacgaggcaaccgagtttagagtaatccctacgtcgtcagctagagcagaactagctcgctatatacactgtcccagaaacaaaaggaaaaacacgggcttttgtggagtaccgtccaactgcacctgctgcaaataaacgcatttgttaatttacaccttctcttcaaggaaagaaaaatggaagagaaaaaaaagatggcacgcgcgcttaattggttttgggtgggagtgggacacagcacactacagtctactgctatgggggagctctgggaagaaacaggaacatgacccttgagtgacgtggtgcttgtcgcgtagctctttctttcttctagctcgtgccccccagaccccagtactgcgaaagtatgtggttggtagtgcagcaggccagcagcggtggtgctatggctgctggtgcatagcatagcgtcaagaattggccatgtccatgactgtctcgtcttaatttcttcccctggagctggagctttgcgtcgtcactcgtcgtcgttg

SEQ ID NO: 132338 - DNA, 806 bp, Zea Mays
gtttctctgatctgctccccctacacatctcatctcctgtgccgcgctcttgccgcctctgtacgcgcgacatcctcgtcgtcgcctggccaatgccgcactgcaccagagcctcgccacgccgccaacgcgtctctagcgtcccttttctcctccagtgagttctctctggtatgtttccttcatgttcactgttaatttgcagtcgtcttctcccttggatcttctctcccttctctctccatgcgtgtgttgcatccaggcagccgccgaagccccctgcccgtgtcctggtgctgtggctagttcctttccctgtgacctgcctgccgccagcgagcagcagacccaaccggctgaactcccacctcctagtcacgtagttgcgtccctacgccgcttccattcctatcagcgagccgccatgtcgtccgcctagccacggtcggctgttggccttctcctccggtgccatgactgataatttttggatgaagaaaatgctcatgcagtaaccgtgtgtccatgtcaaatggagaaggaaagtcgtcgtgcgtgttctgcagttgaagaacgtggggcccagtgcataatatctctcatgcgtgtgatgtgcatgcagtaagaaaaggaaaaaaaattgtacatggactctaccttgcatgtcgtattttcttccctgactgcatgcgataagagagaaactatcttccaaagatcctatatggacacaaaattcatggaccactggtatggctccaactaatcgtagtaggccgcgtcgcagtagatatggattattaaat

SEQ ID NO: 132339 - DNA, 495 bp, Zea Mays
tcccgcgctcggctaacaaactccgaccgccgcgcaccgacctgtgggaccaccacgacagagccttctccacctgcgcggactccgcaacgaacgccggcgaagccgcgcaccgtccgcaagcttcggagccgttcagtcgcccggtaccccgcttcgcctataagcatcgaccccacgaactcatccgctcgggcccctcttgtttttctgccaccgccactccacgccagctcttgcgccgccgctacccacacggacaactcaccgccgccggtgaatcttatcaccgttggttgtctgccctcggggttgggttgtggaggagcgtctacacccgtagttgccgtccgtggcatctgtgtgtggaatcgatcaccaggcaaccgagaattgctcgccgcacttcatcctccgtcgcagaaccgcaccaccgcgtgggcagagaagtctccgccccaatccgaggtaaaattacccccatcctccttggtc

SEQ ID NO: 132340 - DNA, 872 bp, Zea Mays
attctataaggtcttttcgatataggtgcggttccgggtaataattcaatagaaaactctacatcacggtcaggtggcatacctggtaattcctccggaaatacgtctgggtactcacacactaccttgatattttccaagggcttttcttccaagtgattcatcactgtcttcccttttgcatctgtttacttgtctatgctaacttggattctttcaccttgaggacttgtcaacataattgttccgttggcacactgtatcactccatcacaacttttcaaccagtcgcatccaagaatcacatcaataccgttggatcctaggaccactgggttgactggaaaatctattccttgaatcttgagattaacatgggggcatgagtgtgtggccttcatgtcacctcctggtgaactaatgtgtaacatcttcttaagggggtacttgggtatgttatgtttttccacaaatgactcagttataaacgaatgtgatgctccagagtcaaataaaactgatgcaggtatggagttaacaaggaacataccatacactacgtcgacatcctcaggcactgattctgcggtgacgtgattgacccttcctctactccggttctgcggagtcttgttctgtgcagatccacgagcgggggtgttctggtcatttatctggttattgattttctgaggtgtctgctggttgcgccttgggcagttgttagcatagtggcccagctcaccgcacttgaaacaaccattgggttggactggtgcgttgttgcttctggcttgcgtgttactggcgccaccttgacgattctgtgaattcccaccagacctctggttggtctgggagttgctcctttg

SEQ ID NO: 132341 - DNA, 739 bp, Zea Mays
tttagactatcttcattttgtcacaaacactgtcagagattagcgatttgatattgttcgttgtagttgaaccgctcatatgaacggttgaagtgcatgctcaatctcttatgcgtttcttctcaaacgtggttgatccttgctcatcataggttctatctcttatttcttatttcttagaatggtgcgtcgaaggaacccggcagtggtcgaatccgactcctcggatgacaagaagatccatggtgatacccctcctcgctctcgatccaagcgagggcgcggatgcggtaatgtcatgccgggtactgaggcctccgggtctcaaagtgctcgcggtcggacttcccggactccttccggtcgatctcgacctgctacgaatccgcaggcgtgggagcctgcaagtgatgatgatggtgggaaggacgatgaagttgatcttcccccggctcaggctcctgtgattcgcggcttggtgctccaccgggccgaggctcggcgtgctggcaatgagccagtcactgacttcacggccagtggagggtctgctcttctccaggatcttcgtttccaaaatcctgtattgcgtattcgcgatgccaggatcgatggaaattgcttttggactcttcaccacgtggatttctataattctgtcattcttcccaagaagcatcaacccatccttcatcaacgatatattaactgggaaggttgtgaagcgattggggaccca

SEQ ID NO: 132342 - DNA, 600 bp, Zea Mays
cttccacgggatctggttcgtgggcgcgctggaggaagtcgcggcgccgctgcgtgcgttggacaagcctcgggtgacgaattgctcgtcggcattctctacgcctcgctaatcgcctcccaccgcggccaatccgcctctgctgctcccaaccgttggtatggcttcgatcggattctatttctccacacctctgcatagaatcaatcgtatctaggtttaagaccctgggtgctctgcttgccggagtgcgccaccgtgtggatcgccgctgtcgctactggattctggaggtagatgacaacctgtgagccgtagatcgtgttaccagtggccaggatttgaagatagggccaactcgacatgagcctatctccaccgttggatcctcggccaacgtttgggattggacccgtgcatgccccttcgcgctcctaatccaaaccgtagatctaggatggacggttgagggcgatctagcgcataataatattgggaccagaggatttggatctgacagtcttcgctccgtacctattcattttaagtacgatctaatcctagcccttggtttctaatcttgtggccagatttcgcgga

SEQ ID NO: 132343 - DNA, 372 bp, Zea Mays
gcgggtattcaatccgtctttgagcaataaccagaagaacattttgtgtttaggttgacatttagatttccataaccaagagaagagagggtgcgactgttgggtgccaatcaagtgagcatagaccttctgagatgaaaacagattggaagagccactgcaacgccaaatatcattgtgatcatgcaattggaaattagcaagaatgtcatgaaaagaaagaagatggccaaacgcttcagcagataggggagtgtggaacaattcattcggggaagccaaccgagcttgatgaatgttaatctccctgacagatgcaaaagaccagagctccgggaatctttcagatgtgcgctgtccattccatcaatc

SEQ ID NO: 132344 - DNA, 356 bp, Zea Mays
ttcttgcccacctaggagagacaataggttagtaacctccaacataattgcgaagcattatttcagtgagattaaggacaatccaacatggaaagttgaactgataaagaaagttgttctaaaagaccttcttgcagacgtgtcaccgtccaagtgaaagagggcaaaggcattggtcctgaaggctgctctggactccatgaaaggagagtacaacaaggtgtatgactaccagttggagctcttgagaagtaaccctggtagtacagttgtggtgtatctgaatccagagtttgaagatcaagtatttgaaaggttctatgtgtgctttgatgcatgtaagaaaggattccttg

SEQ ID NO: 132345 - DNA, 852 bp, Zea Mays
caacagtactcttgcactaagtccctagtactgatgtgcctagccaccactctaaattctacttcggtcaattggcaaggggactctaactacatgttgcacaatggtcgagccatgccgaagttcagcttcaagggactcatgaccatactcatgagtttttccctcttcttctcatcagctttcatgtaaaaccattcattagtccatccggttggccacttggtgcgatagccaataaccggggccttcatatccttccgatacacaaaattataacagccaaagttcttgtgaaggccatctgctctagccttcgtctggtagtgtagctcgtgcatccggcaaaaagcttcgccattagcatccattccttggcttcggagagcccatatgaagaccctaagtctaacaatagcattgggggtcagctgatgaaggtatatttcaaagttctttagaacctctcctatcatgtcatttagggggaaccgaagccctactctgaagaagctcttaaagacaataacttcgtcctccctcggctctggaattacctcttccccagcaactcgaacaagcttgctctcagactccccgaaatagcctagttttttcatcatagtcatgtcatcttctgttacagtagatttttcaaattcaagatgactaggctttgccgggttcagaatgttgttatcctcttcgctttcattatcactctcaccctcaaccatagtttgtccagcttcggcattggaagcaccttcgttagtaacttcccctggcacaactagacctgatcgcttcattacttctgatatgggcgctgtttcggcagcttcggcctcg

SEQ ID NO: 132346 - DNA, 774 bp, Zea Mays
tttacgacgggcacggtggccgggccgccgtggatttcgttgccgacaagctgggcaagaacgtcgttgccgtgctcgccgccgccgccactgtgacgagccagcaccaacggcccgaggcggcatcgtcgtcaacgacgcagccggccaaaacaagtggtgacgagcaggttgacgcggtcgcggcggcgatcagagcggcctacctgacgacagaccgcgagttcttgacccaggtatgcatcatctaccgcccaccacaccacaccatgcgcatcatcagattcgtatatgctactagctagcttgtagctagcttgcaaattgcaatgcaactagctagcccttttttcctcctgtctgaccgggtctcttcctgcattgttatattcatatatacattcatgcatgggtcggtacggcgtcgatcggcgtggtttaatttgtttgaacgggtcaagtcttgcgtgttggttgctgttgttctctcggctggacgttgacagtttgcgtcgcgattctggtagccacgtatacgtaggtggtggccaactggttaggtttttagccaagtgctgttgtaagcgtgtgtgtgtgatagagattgcatgtccagcaaaagccgctcctagctgcttcagtgccagtgccgtgtggcttctgctagcttagcttgcattggatggcaatggcatgcatccagcatgcagaggacggccgtcggtagcacgtacgtacgtacacacgttcacattggctggctggctggctgcc

SEQ ID NO: 132347 - DNA, 543 bp, Zea Mays
ttttcatgttcttttccgaatataccattcaacacaaaggcaaacaccctttagtgcttgccgtcatattcttttccagttacatcggttgctctgtgagacaaccactcacttgcatttcttaagaagcattggtagttacctatagcagtcccatagtacctctcgcgtcaacaaacatgaaacaagttcttcttacccaatgatgaacaaagatatataacaacctagggagactgtctgcataagctcacttgaaatcagaacctcaatgacgacatgatgactaatgagattaaatgtatttagaaagtaaacgacatggtaattgatcagaaactcgatgacgacatgagaatttatgagaataaaaggctttagaaagtaataacttttttgagcttctgacaacatatattttcatgaactattagacaacaatagaatattgaaccgcgaaagtatgacatgtgttccatttaaatttaaattttaaattctgttaaaggctacaaggttttgatggaaccagtcatattgaac

SEQ ID NO: 132348 - DNA, 414 bp, Zea Mays
gtggacttgctgccgcgaatctcgggagtctggggttaacttcgcaagactataaatgcgtgtgctcggcgctctgtgaccttcaccacgccgcagaaactgctttaccgtggaggagagaaggaaggagatctaccgccggtggaatctcggattgcaccaacattttggctgtgctggggaatcgggtgacctcgtcggtgatcaccgagcgcggtcgtgctcttactggcaaggacatcagctgtgggttcggcaaatcaccactggagttggagccccacccttaaaccatcccccaccgtggtcggcctccgcagcttcatcatagctggtatggggtacctcctgtgttccgcccatattccaattacattttgcaccgggtagttcgacgtggtcgatggagcttca

SEQ ID NO: 132349 - DNA, 397 bp, Zea Mays
ttaaccatagccgaagctttttcactgcattctcgagcaaaccatcatcttgaattagcttcgtcaaaagagggagcatcgtcaaaaaactgtaaaaaacatcagcttcgtaaaaactgtaaaaaattcatcatcagatggccagagtacgcttgactgcaagggtgacccgtgaaggagaggaggccgaagccaccgatatagcctcgatctccgaagttatgagacaatcgggactagttgtgatggagggggccattgacgaaggtgcacctactgccaaagctgaacaagctgatgttgaggaagaaaatgttgatgaagaagaggaagactataacactctgatcccaacaaaacccagccacttggattttggaaaatctacagtgtctga

SEQ ID NO: 132350 - DNA, 669 bp, Zea Mays
agacgacaatggaacctgcttcaaagggcatcctaggagcggagggtgcgctacatgaaccaagagcaaagaggaaactgagcccaatagcagggcgaccggcctagactgggtgcactcgttcccctggcctgctccaacgtttgttggttccccaagctgcttggcatacaatctcgatggactttattgaagggctaccacggtcttaaagttttgactgcatattagtggtggtagacgtatttactaagtatgctcactttattccattgtcccatcctttttcagttgttaccattgctcagtccttctttcagcacgtttacaagttgcatgggcttttagttgctattgtgtctgagcgcgataagattttcacgagtattttttggaaggaactcttcaagctagccggggtcagtctccacatgactagcgcttaccatcctcaaacagacgggcaaacaaagcgcattaatcaatgtctcgatacttatcttagatgctttattttcacttatccttccaagtggccagttggattgcttcaacagagttctggtataacaccagccaccattcctctattggcaaatcaccatttgaagtgttgtatggatatgttcccaggcactttggtgttcaggtcccgaactcttcttctac

SEQ ID NO: 132351 - DNA, 673 bp, Zea Mays
ccgagaaaacttaccggcgatggaactgtcagcgactccacagctggaggtaggtgacagcgaaatgcgctatcagtcaaacccactgccgaagaagatcccgctgcgtgccgaagtaagctttgctcgcctcctagtcgcccgatcacagcggagaaatgagaaacgcggaggatgaagaggagacaaggtgccagttgtttaggaagcctaccgccgtgattgaaggtgggctacgtgtgggtctgatttgtttcctaacgaacgttggctatgggtgggtctgtgttgcacactggtggggtcgaaccaccttgagggcttccgtttgttaatgtgagcccattgctctaaatatataaactatatatgtgtgtagaaagttgtgtaaagacagactcttctcgaagagctcgtctcatacttatttttttccacttaacctcctaagagaaactataataaggctgactaggcgggcttcaaacagctgcatctcaccaaaatcctaggtggcatagtgagaatacatgatagagaagaaattgagtgtttcatgaggagctaagctctgctccaggagcaagagcctgcttgcatcctactgtgtgagttaaggttaattcttttttagccaacctaaatgatttctctcttcaacttagggattgtt

SEQ ID NO: 132352 - DNA, 625 bp, Zea Mays
tgtttccatgtttgcaaagatcgtatgagagcatataattctttatcataagtagaataattaagaacaggaccatttaatttttcactaaaatatgcaacgggtttacctccttgcatcaaaatagcaccaatgccaactccacttgcatcacattcgagttcaaaagtcttaccaaagtcaggaagttggagtagtggtgcgtgagtaagcttctcttttgaaagagcaaaagaatcctcttgtgactgcccccaattaaatgaaacacccttcttggtcaactcatgtaatggggcagcgatggtgctgaaatccttcacgaaacgacgataaaatcctgcaagtccaagaaaactccgtacttgtgtcaccgtcgatggcgttggccaactctgaatagcatgcaccttggcctcatcaacctcaataccctgtgtagtgacaacatagccaagaaacgatacgcgttcggtgcaaaaggtgcatttgtcaaggttagcaaataagcgcgcggcgcgcaaagcataaaaaacaacacgtagatggtcaagatgttcagataaacaagtgctgtagatcaagatatcatcaaaataaaccaccacaaattttccaataaatg

SEQ ID NO: 132353 - DNA, 318 bp, Zea Mays
tgatagggtgaagatgaaggtataaacgaacaaatgaaacatttaaagttgaaacaagaatgatgtaagatgaggactcaatgaaagtattcaaatacaaaaaacattgttatgtaatgctctctccttttattaactaaagatttatacaagtaccttaggcttcgtaagattacaaagagggagagaagaaggaacaacttcgtatgaagagtgacgcgtccagttccgatcgagagaaaaaatcccccctcaatgcatggcgttgttcatctatttataggcgcagagtacaactttagcgaatttacaaccatg

SEQ ID NO: 132354 - DNA, 500 bp, Zea Mays
gtattccttggtgacaacctcgtttagcgatcctccaagcaacaagctaccatgtctcttttcagcactaaagtagaataccatgatgtggccaatactatcgtcgaggctacttggctgtgctagctatccttgagctccagtcgcgccccaccaccatgcaatccttgtctactatcacaacattagcacgatttacatcttcaccaacctcattcagcactagtacaccaagaacattgagattgatctacacttcgttcgtgtgtgtggctataggtgacatcaaggttctacatgttcccacaacatcacagtttgctgatatcttcaccaaagggctttcaagttcggtcatccgcagagtcgcaacttagacagagggtgcggctattaggcctagtgcctatttgactaggatagattgattggtctatataggcaaggatcaccattgattggtcatgtttctataaaccattagccatccttatctccta

SEQ ID NO: 132355 - DNA, 742 bp, Zea Mays
aaactttagagaaaatccaccctaaactttggctgtcaggagcactgaagaacattgccatggtacagtgcccgggaggataagcttcagaccctcgctgccgacaaccaatccgcgccgtgatttgcgctagggtcaggatgggcgcgcggcgtgcatctcctcgcaaagatctccttgatccgggtaagatcgccgcggtggagtatgatgattccggccgccacgcggccactaatcactccggccatatccggtcatcggcgccgctcctctccgttcatccacgccctcactgatttgaccgcgttactgtcgcggagggacgtggcaagctcgtaggaaaggatagcgcttgacgccgccgttgatcgccagctaaggccggcaatggttatcaccatggacatggcagtggctcactgcgcctataaattcatcgcatcctcaccccctccgtttaaatcaaccgagcacagctcttcgtctctaaattgcgaagccgaagcacccgctcccaccctcgattagccaccatagccggagaatctcccttttcccccaaattgggtcgccgcgccaccgtgaacagctcgatcgtggccagcccgttcgggtaaggctctgtccatcttgaatgatgtttttgtggctctgcatgctagtgaagcttaccgtggcactcgtttgctcaattcggccatgatttggcgggaacgcgtgctcgtgatcccagtttctg

SEQ ID NO: 132356 - DNA, 671 bp, Zea Mays
ctcctccgggttcgctgccagcgagagttgatctcaacaaagttagagaggcaaagagatttgccgtccttgaagcgcagcatgagggatgccttggaagctataaaagcttcgattccctctttgggaattaccttgttcctgtcataccaacgaacgatttctttcatcaggccgggaccaaatgatgaacaagaatggctatttgtaacgaacagaatgactactaaattttgcaatttcctttaagagcgcgacctgatacagcattactaagctatcaacggaagataacacgaagaccaagttttgtgtgtggtgttgtacgtaggccccctaacttgcaagatctcaaaaggtaaagattatcctgcacagttgcagatctaagtagtgaaaaagtttttgcattatggggagcatatgtcagtgtgtgttagctttctttttttttcccttctagtgcgaatttgtcaagacatattttccatgaatctatttatcactcaaaaaaacgttcggctgccatcacctacacagaatagttgagatgcagaacatggacttaggccttagggcctagggagttctaacgtgcatttgaagttcgaaattagaaagttcaccacatagaggttccagattggaaattgaagtcatggctttgataa

SEQ ID NO: 132357 - DNA, 309 bp, Zea Mays
caaacatcggaataaaactttccacccaccagagtagcttcggccgaagggtctctcgtgtcgtctgtggagaaggtggcttcagtctgggccgcagccttaatgtggtcgcagtcagccttctccagaattgtcgcaattcctcgagcgccagtgaaagcacagatgtccccgcgatcactcaggatctcttcaaaagcttcggcttccccgcttatccaatcaataacaccctcggggtcacctcgaataaaattctcttcgaaagaataagcacccactttggcaaagctagtttttaattttctt

SEQ ID NO: 132358 - DNA, 502 bp, Zea Mays
cagggattacggagctaaaagccggacctgcgactgcgtagccctttccccctccatcgcgtgcccaccaccgcgaccaactgtatcagctgtgcgccaagattcgccatcgagagagagagacagagaaaagggagtgcggggaaaggctcgccgccacagataaacgacggtgctcgtcgtcgaccttgttccataggccggtccgagtcactggtggcgcatgggcggactgcgtggtgtaatttcgtccccaaggttcgccgcacagccatcaccgacctccgcgggagcagcggaccgccctcaccgtgtaacctcacccttgcggtcaccttcaccttgggtaagtcacccaagtcatcttccacacctacgggatggattacaactcaccagattagaaattgcggggccgggtcgtgaactaattcctcgtcagagttcgatttcgctgaccaatccttctcaccataccggagtcgtgctcgtccttatcggc

SEQ ID NO: 132359 - DNA, 398 bp, Zea Mays
cgacgtctaatttctcgccgtcgaccgctctgtgtcacgattccgccgtgctcgacgatcatgccttgactgctatcggttggtggccgagaaacgtcgcctagcatccctgaccgcactggtggtgtcgcgtccggaagatttggtgatcggagcgaggagaggatttctcaccgttctattcttcaccaccgcgccgcccgcacgcgggcacgaggattcgtgcgccaaccctccggtacgacctctggtatatgtccacccgcaccttcgtttcacataggttcagacagggatagttttgggtagtgggaaaatggggctccggggccgggcgcgctgctcgccggcggaagcaccaccgcggtactcgcacatctccactgcgggtgaacaga

SEQ ID NO: 132360 - DNA, 360 bp, Zea Mays
ctcctagatgctctcttatgttactagtatcaagtttctagccaaaatgatgcgggtcttatttcctacaatacatagtgatggccacactataaatgcaggtgatgtgctctcagaagactacaagctctttcgatacaactactataataatgcatgcaagcaccgatcaataagaggtgttctaacctcactcaaacattatgtctaaacctaaagcaagtgctataagaagcggtctaactaatttaagaacttcacaaagcatctatactaataatcgagtgatctttgagcacttgggggtataaagctactagaaatgagcttcaactttcattgtgatgttcctcagctccc

SEQ ID NO: 132361 - DNA, 433 bp, Zea Mays
cgaaacagaaaactgagcattaccgagggttgggtggcggagcgaagctatcctcgacatcaggcgggttcggggcggcgcttaagctacagtgagtgattctgacgtcgttggcccacaatcgcacccggaaagaccacagacggtttccagacgcgcaggcaacttcactcgatcccttcctggtccgagattggcggtaggggaggacaacgtcggcggcggcctcccactctctctgtctcccgctttctccctgagccaatggcggcacgacgcagtcacatattggatggcaccgagggggaagacccggcttggttttaaatccccataccacgcaatactcgcgcacaggtgaacagaactccgcccatggcgagcgcaagacgcggatcgtggctgacgggcgtgcgcaaggtgggggtcaaac

SEQ ID NO: 132362 - DNA, 355 bp, Zea Mays
ctgtttctatttctaaagagcacagaggctagtttataaatatccagggctcaatagcaattactttacattagtcgaggacggcgggttgattactgtgaagatcaggggctcttatgcaatagtgttgggctgaaggggggtatcgagcatccaggaccatccgatctgattcaacgacctagattaaatcgcgtgaaggggtatgcgcgacctaatccacgtcgtccactacacgatcaacagatcagattaggtctaccgcataccgaagcggtacgcgatacgagccgcacatcatccaagcgacggtgtagattttaaacactcgtggtacaacgttggccacctgatt

SEQ ID NO: 132363 - DNA, 333 bp, Zea Mays
cagcttctaaccaaccactaggaccggagatgaatactcctctgaatccctcacctgctgggactgatgctgttatagctgtccaaatacaactactgcaacaaatgtccaacactatgacaaagatgcaagctcagctccacctaaaccagacgtgcgatccacgtatagtatgtatacatatagtcctacttgcacacgctgtctaccgtactgcatctgcatgtcgtgtatgtacctgccgcgtctctctcttgtcgtcaacccgaccctgctacaaacaaacttgtctccatttatgagcaaacctctgtttcattcatcgacgtcgac

SEQ ID NO: 132364 - DNA, 410 bp, Zea Mays
agacccaagggcgacaaaatcaaccacaagactctgggactcaacaacagtcctctcagaataatttccacccaccagctctaagaggaggaaggggaggtggaagattcaaaggaagatacaactcataaccaagaaagctattatgtttcttctgtggagaaaacaagggccataccacaaggacttgttaagtaagaatataaaagcagaaggaaaccatcgaagcataacaaaatcaaccaaaacaggttctccacacatcctcgtactactcccactatatcccagaacatgtccatcgtcatcaatcaaacccacaacctttagggtctatcgctacaacaagtccatcaccaacttgttggataataccacaacattttgtaccagcaccttcgccatatgag

SEQ ID NO: 132365 - DNA, 733 bp, Zea Mays
acaaaaccaaaataaacacaaaactacgacccttaggagctggctctcaggacaaaatcctggaggggtgttgctccagccatataccacaaatgcccttcagtggccacacactgaatcacatttagagtatccggactaactctctcaaagacacagaaattcctatttctccacagctcccaggagactagtatcaccaaggagttaaatccctttaacacctccttaggcaaagatgcagttggctatgttgatgttgactcggcgaagaggcttagtttggaagagtgggtggtgactggtgaagttgttgcttgactcatcacttgaacttgagcttatgccttcacactcaactattgctcaatcgcgaacaaagcctctttcttcctcctttgctcttctagccttctcttgaccaacatgcaacatgagttgagtacctcatcttccaaagcactcgcacatggtatgcaatctccttgacctggctttaacttctcttgagcactcatcctcaattgaggagcttgaggtttgttcttcatcatcgctctcttcacttgagcttggttcttgttgccttggctagttctggcgtttataattgtttgtggtggccaaactcttgatgtttggtgttagtgaagaagagttcttgatgctcatttgaaggccatacacgatgatcttgttgataacttgattcagcatcatctcgtcaagtctc

SEQ ID NO: 132366 - DNA, 515 bp, Zea Mays
acgaccggacggagcgacgaggcagggctgagcgacgccagtggccagcaggtggggtgcgactaccatagattcaaccaacaaaaaaagcatcggagaagaaaggttgctcaccggagatggaggagatggccggagaaaagcaccaccggcgacgtctaaggggcaggttgtcgtggcaccgcgcgagcacgcatgaagaggatggctgcacgacgggggagttgtggtggactggcgacgttggaagtgggggtgggggtgtatatttatatagagagggtagagggcttagggagctagttgcgcgcacgacgcgtggggcgttgcgcgacgagacgaggcaaaacgaggtggttatggctgcgtccgtgtcattagcgcgcgaaacggacgacagttggcgagacgaagctgacacgtggactcaagctagtaggatatgcaacaatgaggagcacacgtggccagagagaagaagttgcgcggcagagcgaggtaaggcggggttgatg

SEQ ID NO: 132367 - DNA, 457 bp, Zea Mays
cgctgcggcggtaggccacgggtctcgtggaacaggtcatcgaaggaggtgagcatagcgtcgaggacgtcccgtcctattgctgcgagcaggcgcgatcgtggtgactctgcgagtcctcgccactccatcggtcgtccttcacgtcagaacgccatggacaccttggcgaagtcccagaggatcggccccagcatggcgagccactgggtctgagtaccatgtcaaacccgaccaagggcaggacgatgagattggccgagaaggtggagatgtggatgacgaagggcgctgatctaaagactcctaggcatgacagcttctcgccattagccacgatgatgcacatgttcccccgttgtgcgaccggaagacctgttcgtgcggtagtggatttggagatgaagttgtgtgtagatacggagtcaatgagggcgacgatgctaatcgtgcccag

SEQ ID NO: 132368 - DNA, 880 bp, Zea Mays
cagccggtcgttgcaagttaggatgtggctaatcggttgcaaagacgataaagcacaagtctagtacagacacacctactgacaccctgaggtacctggggcttttgacgaagcatgcacattggcaaggtaataaggcttctataccatccaagcaatggcttttatcagttattgcttcccttcccagtgggcactatctgcatagcgacaaaggtgttcgttaagtaatcgttgatgatggggcactttcgtcctggcacctaaaaggtgatttggtcaaggaattaaaatcggtttttcactctagagtctagacccgcacattatctaatgaatagtgcagattcctgcaattacttatcaaaataacattgcaaaaagtttactgttccaaagcgatccaatttactgaatgcaagggttgtaaattttgattctgtcgatcttgcaaaaatgaggttattgtacttaccgttttttgtcaaccaaaaatggcattttcccattcggcgccattgtattcataattattttttattccttttttcttttgcactacttaattttgttttttgttttctctttcctttccatctccgttattatgtgacaaacagtttttgactttttgtgcccaattctgtttcgctgcagtcaatcgagcaataacggtcactaggacacaggtcctgtttggaacggctgaaactattatgaaaaagctggcttgcgtctggctgtcctgaaaaactgttatctggagaagcacctgtctgaacgagctaggtatttaacagtctgattttttgatgggttgaagagatgctaaagatgtgtatcgaagccgaagccggagcctccttcacccgagccggag

SEQ ID NO: 132369 - DNA, 438 bp, Zea Mays
atggacgcaatgtgttgaatcacttcgaactgcatagttggtttggaatgaaaatgatggttagtctatggtggggtttccttttgtgtactgttctaggtcttgtgagtgatttttttggcacataaaccatgcattttttctttgtgatttttgctcataatgttggcatgagactggtggagctgataatatgctacaggtacttgaaaagaagcgatctttcaaaccacgtcattttgttatttgaaaaaacaaggtcatatgtttatcaaatgtgtgacctctttctactgacatacgcagatatagatgtcgtacatgagtatgccacaagactcgaatttgaaaaggtctctgaacagactatatatagatgagtgcaaagcaaatgtcacgacgccgacatttttactaaagcagcaatttgtataattg

SEQ ID NO: 132370 - DNA, 587 bp, Zea Mays
gccattcaccgagttggagtaggcgggtactggtggcttcagctgcggacagttgttcttgaagtgactgggatcaccgcagtgccaacatgcatttgccgggggttggttgcttgccactgagggggaatggaaggagctctgactctgctggctgaatcgcgatggagtgggtctagctggtctactgaagtttggccccttgtgtggaaacccaaatgattgagtcttctggtgccggtcctgctgctgtgcccggagaacctggaacttccttttaagatgccctttttcttcctcctttgccctttcaacttgcatggccttgttggaaaggtgagagaagttgaggaagtcttggctagccagaattgtcttgagttctggcctgagtcccttcaggaaacgggccatcttcttgctctcggtactgacatcatctggcgcatagcgggctaactctatgaacttgtgcacatattcgctgacagatcttccgtcttgagtcaattctcggaactcgtcctccttaagctgtaccaggccttggggcacatggtgctctcggaaagctgcttcaaattccg

SEQ ID NO: 132371 - DNA, 462 bp, Zea Mays
agacgactcgccaattcagaacggtacacggtttgctgagtccaattgtgatgaggccactaacgttgctattgcggaagtgttcgatctggcgacaaagctgaagactgaggtgcagtgtcaccttgaatctgttcgtctattctgattctagtaggatcttcattgcctgaactagttgttattagtctctgaccctcgaaattcactggagaaaatcaaaaccagtgaactgtaagaattgatgcctaaattaggcttgtttggatcccaagaactaaagtaaaagtgaataaaatttagacacttaagagctaaagattcaaacaggaagattttgagcaatgctcctggtctgtcctacaacataaagcctataaggcacatttcagcatctacctccatggcaaaccacttccgagcttccaggtaagggcaccagtgtgctgtactgtgttcttc

SEQ ID NO: 132372 - DNA, 313 bp, Zea Mays
agaaagtgcaggactcctctgtactgggatcaaactagagaaagacaattctttgggcctgaattgattcaagaagcagaagaacaagtccgtgtaattcgagagaatttgagggtggctcaaaccaggcaaaagagttatgctgataatagaaggaggccactggaatttgaaggagattatgtgtatttcaaggtgtcaccacttcgtggaatgaggagatttaaagttaagggcaaattgtcccctcgctatattagaccattcctgatctttagaagagttggggagatggcataccaacttgagttac

SEQ ID NO: 132373 - DNA, 544 bp, Zea Mays
atttttcgtgaccaccggtgcgcaccactcatacctgtggccttgctacgacggggcggcaacccggggcggcaaatttctgatcggttcacaggagtcgtcatggaatctcgctccaccgcgggcgagcagatctacgctccaagtctcggtgaggcctcgctggcgcttccccatggttaccgcgatgattagcacttggattcgctaggaattgagcaccgaagcactgggggatctgggtgctggtttatcgtggtgccgctgatcagcgcatcgccgtctctcggtgggtgtcggcttagtcttttggcgtgggaaggaagatgactcactgatgtgctgtttattttgaacggctgggattagtttgggcatacccattcgatgcattaaatcgctgacgtcaaccagtaatcaaacggttttggggtcgcgtgaagctctgaccgtggatcctagatccgagggctaatagcgcataccggttcaatgaaagtaacatctaatatgggcggttggtgatcgattggacggtcgagat

SEQ ID NO: 132374 - DNA, 663 bp, Zea Mays
agatccgccaccgccatcgattcgtgctgcgttcgttggcttgggtcgtgccctcggagtcctgtggtgcaagggacaaccttgccgcgggcttgcagatatcgaggaagcttggaggaccgctcggaaccaatcaattgctcgccgtcgaaccaaatctgccgtggagccgcctctcgccgtgggtaagcgcatccagttagttgcgctaggggcaacacatagtccgtaggaattgagttattagggccctaaccctgggattggccgaacgccggccatggcgctgcctggggcactctgcgccgccgcggtctgtgtttgtgaatcccgcaacacgctgccaatcagtgtcgtaggtgacgcagggagctttgggtgacctcgtgtggtcgattcgtgggggtggtggtgcaccggagtcttgggtggggcggcaattttcgccgacaaaccagcttcgcggcgagtcctcgtgacaccgtggccagcatctcgaatcactccaataccggtaagcccctacttaatcagttcgcgcagatcccgtagttcggatagcactcatccactttcggaatggcacatttgggcgcgagatcgggttcaccggtgaggtctccgccgtcgggcctgtgcgccgccgcgcgtctggtggagaag

SEQ ID NO: 132375 - DNA, 451 bp, Zea Mays
ttctggacaaatagatggctgcatggagaaagacttgcagatcttgttcctaaactttttggtgcaatcccaaaatggttggtcaataccacgactattcaggatgccaatattaagggagctctcagttggtgtactcattgattatcttcatatctgggatttgctttcagattttgagctgcagcctagcatagatgataaacacctttttagtttagcctcaaatcgcaaatactcggctaaatttgcttacaaaggctttttccttggctcaagctcctttgagtattacaagattgtatgtaaatcttgggccccgcccaaatgtcggttctttatttggctggttactcagaaaagatgttggacaacggatagacttacaaaacggggcctagatcacccgaagaaatgtcttctttgtgaccaagatgctgaaactatagac

SEQ ID NO: 132376 - DNA, 527 bp, Zea Mays
aagccattcaagtggaggttcaatggggatttctgaaattcagatttctaaattttcagcccttgaaccaaaaccgagtgtgttcaccttgatccttagctctaatcctagtgctcccattaacaaaaacgtgtctaactaacccctctgtcacatgccagaagatggcattgggacatgagccctagacacgacaaaaccaaggatttgcctcgggctcgggcagggagacagaccagacttcagggctccaaatctttgaaaccagtaggcaaaaccctatgacccccacacaagatcagtagcttatagggaggagaagaggttttgtgcactgaccaaggcgagagcaggctcggatgaatgaccacacgtaccggaacttgggcagaatgaacgcgcacacgtgttcgaccctggtcggcacgccagtgttcgcccaacccgcacgcgcactcgccccagcgttcggtcaagtccaccgcgtgccctcgccctcggtcgtgcccgcccgcacctttaaagcc

SEQ ID NO: 132377 - DNA, 305 bp, Zea Mays
gtcaggtgaaccgaaaggaaaccacttgagtagatccttcgcctgacccaccataagtgactgccacactaactatgcctagcaccgagccaaggcagaggcgtcggtctgcctcccactcatggcctacgagctcctcggtctgcagcacactcatgtcatacgcacccctcggactgtggtgcatttaagacccgcgtaccccccctccctgggcctgagtgcacagaccgcttgcacgacacaccaagaaaagtcatgccaagccccgagctacggaggctaggggttggtatagctcaaat

SEQ ID NO: 132378 - DNA, 381 bp, Zea Mays
ctggaaagctactcgtgtttattgtcagccatcgaggaatcgaggctaacccaaagaagattgaagccatactgaggatgaaaccaccacgattgtagaaaaatgtatagaggctcacgggatgcacgacaacgctaactcgatccatctcaggctctgtgaaagagggatgccattctataaattgcttaagaaagtggataggttctagtggactccagaggctcaagaagcactagatgcactcaaaaagttcttgaccaccccaccggtcctcaagccaccacatcgaactacggctagtcggccagttgaagaccttctattgtacatctcctgcacgactcacgtggtaagcactgcgttggtggtcgagcgggc

SEQ ID NO: 132379 - DNA, 419 bp, Zea Mays
cgtgggggttcttctgtaaaatgaccgggtcgaaggggtaagaagtattcctaatcgtcatattagaaatctacagccatgattggttcgaggttagcttcaaccgatactctacgaccgccctccgattgaggacccacgactaggatttaatacagctacgctcgcctcttattgacccgatcagagatccacggttgggatcgatcgcgcgaagggggtacacaagcttctaatctgggttgtccaacgagatccgacggtgcccgattcttccccccatctgacagccgcgcacggtggtgccgccctcgcactacggtggctccattactggtgacccacaaattggcgcccaaatgcgaattactcggatggaatcgatgctatgcgcagaggaaacaaaaccgaatcaatgg

SEQ ID NO: 132380 - DNA, 347 bp, Zea Mays
ccctcaccttcttcggagctacgcgcttcgcatagggatccgcaagaagccagagtatgtttggaaagaataccacaaaaacgggattgagaaatgctctatggcagtctacctgggagaaagccgaaactacccaaatcaccctcccttccaaatcaccgccactagacaccgcttcccaaacacttgccagaatactgcccaaaaagccctccgccaactatgccaaacttacaacagggaagtctctgagacaccccttcgctactttccacctagcaataaaaatactcctgcttggaggaaaagactccagaccttgtcagggagagatcctaatgaagatg

SEQ ID NO: 132381 - DNA, 825 bp, Zea Mays
agcactaaactcagctctacacaagtgctctagcaactctatgctatctagctctcaaatggatgtctattctaagcacggaactcaatttggagcacttggatggattggatggctaggagatgatcgctttacgtatgactgatgtttcttagctcatgtatagagttgtgcccaattggggtggtatatataggctccccacttaaaactagccgtttgaaccccactcaacattctgcgtgttcaccagacatgtctggtggtggacctggcaggcccgatcccatctcagtattagcaattgggtaaagctatcaaaccgttagtctgacacactgtgccaatcatgtccgatgtgccaccagatacaccacgtcaactagttgttggagcttctcgttagccgaccttgaacattgtagatccgatgtgatgtctagtacgccaccggatatgtcaggtgccccattgtggcttggttcatttgacatgctctctgagtgtcgtgttcggtgtgccatccggtgctatgccgaacacatcaggtgcactttgttgatttatgtccaatttacaccctctctgcaagccccgttcggtgtgccaccagacatgtcaggtgttcactgagttctgaagtccaaaaacaagctctcagcaagccatatttggtgttccaccggatatgtctagtgctctttagatgattccaagttgttttcttgatttcctttccttaggcttggcttggcttaagtcttggacatgtgaatgactttgacaaatgttccttgagtcaattagtgtcatctaagtaatttt

SEQ ID NO: 132382 - DNA, 271 bp, Zea Mays
tatgctcgcgaaggcgttacgtacttggtctggtgtaattgttatgctggactggtgcgcgtgtagtcggtctttgcgcggacagtttggtgtggtcgttttcgcttttgttacgcttcgtccggctgtgccttcgggcaactgttgcacggatagtctccgtggtagacttcggttttttgcacttgttgtgctagtccggctgcaccattaggcgacttcggcacggatagtctgcgtggtagacttcggtttttcgcacttgttgtgc

SEQ ID NO: 132383 - DNA, 598 bp, Zea Mays
tacattttttaggaaaaaggaaaaaatgatgtgaaaatattaacatgaaaatgcagtataaatggccgactaagtaaggtaagggaaaaattaaatatgcgattaaaaagattgtggatcttagaaatgaagaacgtgtgtgtatggggaggggttagggagaggaaatctggtacattctgcaatcaaatccagagtaaataagttataaggatgcaagctgaaccctaaaaagaggggaaaataaagctgcacaggaagcacacgttcgtatgttggagaaggacagttaaaatggagtatcagacaaaagaaatatagtgattcttatgaacgaagttatcatttcagtagatcccaacacaagaatgctggatccatatacaagcagcccaaatcgataaaatctgaagcatattttatcaatgagaaaatataggaatggaaagcgcagggaacaggagccaacgttgagttataatacaaacgcaagtgagcaagtgctattttaccgaaggaatggagatctctttccccgcagaacacacgcccctgtgacctttcctcctccagtgttgcagcctcgtcgccgtcgact

SEQ ID NO: 132384 - DNA, 858 bp, Zea Mays
gggatttaattcatgagcatatagccttcagggtatggctgcttgtagaaagctgggaaatgtcgaaggagaccaccaccgactctagcaaagatggtctggttcgactgaagtataccttcagattcagggagaagtttgatgaacccaacgatgactggttgaagtgtatcgaagctacaagtgatgaattgcatggagcttattccaaggccgaagataatgctctatccgcagccttcggaagacgagggaagaaaagactgaacagggtttttgatgccattggcttcatataccccgactaccgctatccgctgcggggacaggggaaaaagaggaaaactgctacttcggccaccccagttgagcctgtgccgaaggacaaaaaggtaaaggttcttacccaccggccgcgctacattgaaccggctgtggtgcctgagtttggcgcagggtcctcttcagcggccaaaacaatacaaactgctttgactgcacatggcgttgaagaaccagctgtaatgccgaagatgcatatagctgagccagctgaaggtaaggctgaaaaggctgaagagccaaagattgacgagataacaaaaacgccaaagattctgagccttctgatagaggcagatctgccaaagatacaaaagacttctgctgccactcctaagaggagaaggatggcaaacgtgctggatgttgtgctagaaacgacgaaagttttgagtcctgctctcgtaaagaaagtcgttccaaccgaaactaaatcgcaggccaaaaccgaaactaggcaagccgaagctgcacaagttcaagctgaaactgaagctacgcaaattcaagctgaaa

SEQ ID NO: 132385 - DNA, 713 bp, Zea Mays
tgcaaccgttgtatggtgtgatgatctggatcgaattcaacagtgctatggtccgaggtttgcaagcatcctattgttatagtagtagacttagttactaaagaaggtcattgagtttactccaacaaagatgtttaagtataatagaatgtattgtgtagcttgttacgacgcaacatagttccgataattatgctcttgttttctctagctaacacccaccgtagagcatttctttgcaacagttcaggccatatacccacgacgattatatcccacctataaataaagcttttattgtttgaataaaatataacacgtatgcagtttaaaaaaggttgtggctataaattaatgacctggaatccattagtatggcctctctgtacgaccttccaacgatgtgctctaacggcgccaaatgaatgactattcctattacatctgagacattcatatgtgaggggttaaatttcgagtatatttttatggtttagtgcggtataagtatactccatatagaaagacgagcacatacctataaacctcttatgaggttgttggaggacctcatgaaatggcataagatgttttggatacggcgggaactgaattggcaagtggaatgggtccacaacagtccgagttgccaaggtcaattctagcctatgtccaaaattccgaaatagatacgcccccagcttacacagaat

SEQ ID NO: 132386 - DNA, 284 bp, Zea Mays
atcaaggtaattctcgggggttgtggctgttgaactcagcttatcttaccctcatccccaagaagactgatgccacaacagcggctgatttcagacccataagtctcattcatagttttgccaaattggtgaccaagattatggctaaccggttggctcctctcctgccaaggttagtggctgcaaatcagagtgcttttgtgaggggaaggtctatccacgataactatatgtttgttcagcactcgatcaagtcccttcatcggcgaaaggtctctagcctg

SEQ ID NO: 132387 - DNA, 514 bp, Zea Mays
ccgctacccgtcaagggggcagaagagaaagagtgcaacttctgggaaggatgttacttcagctgctccgagtgagcccgcgccgaagaagagaaaagtgaaggttcttactcaccgaccgcgctacattgaaccggccacagtgcccgaatttggcggtgagacctcttcggctactgaagccaaagaacatgcgcttacgcagaagattgaagagccggctgcaatgccgaaggcatcctcagccaaaatagctgagccgaaggccgataatattgaaggaacaaagatattagaagttataagcccttcggcagaagtgacagtgccgaaggcacaaaaaggtcttacagcgacccccaagaggaaaaggatggtcaatgtactagatgcgctggagacgataaagacttcaagctctactctagggaaaactgtcgaagcttcaaaagcgcagactgagacaaaactaaccgaagccgaagctgcaaagagccaggccaagaccaaagct

SEQ ID NO: 132388 - DNA, 415 bp, Zea Mays
tacaggctaacaacgccatccggcgaagacctagagcattcctggaatattgacaatctccgcaaattttttgtttaaaccctcagggcccacgcgtccttataatccaccaaactgtactattccggcccgcactcttttcctcctgggggtgaggtttttaacgaggcggagccatgtaatacacctgcaaaaatcccccgcaaaaactcagacgcaacatgtcaaaaaagaccgcatcgacggtcttcggcattcgaccacaccgaagtcaccgcgagaggcagcacagactgccctcgcgtgcgacactccgcgcaaaagtcgcctaagggtgcagccggaatagcacaacaagtgcgttaatcgaagtcttttatctaaaagacactccgctcaaaagttgcctaagggt

SEQ ID NO: 132389 - DNA, 530 bp, Zea Mays
tgcagccatacgctggaccccaatgcgatgctccgcccagagatcttctagtgtcttcctcattgcctctgccgcctgggaacccggtgccgcctgcgccgcctggaaccgacggacccgctcctccagcgttcgctctttctcctccagtttcttctccttcacctccgcctcaagcttgtgctcggccagcaacttgtcccgcctttcccacatctcctccctctaggcgaggtccttcccctgttggatgagatccatcgcccactcctccagggaggcatccttcgccttgaggttttcttcggcgagagagatgttgctagtcctgtcatcaagctcctgctgcagcttctacagtgccgcctcagtcgcggtctactcatcccactgcttctccagcatcgcattataggctttcaatttctcatgaaattctgtgatgaccgcatctcgctggtctaagtgctctttcttctcaaccagcctcttctcctctcgggtcgccttccgctcccgctcaagcacct

SEQ ID NO: 132390 - DNA, 736 bp, Zea Mays
actacctcctattgttactctttgtccacatgatgcagagataggtggttccagctaatacctcctcctatgccccaaacacctaaccctgctctcttaggtcttgtttagcatctaattcattagtaggagaatcaggcagcaaagcaggcttgccttgctgcagagccgacacaggttgtagctgagcaggctcgacgtgatgaggagcatcgcttggctcagtagagacatgatgataggatgcatacactacttgagaacatccaacatcgtcaagacatgttccaggagtagtagttgcacatagggcagagcttcgagttttcatgcagtatattctttagcacactgatcctcctatgcctctagttctgtcgacacctcctcctcctcttcatactttagttatgacaacgatacattcaagtactcagcctcactcttttggatcgactgcctctcatctctgacctatgaccttggacttctctacttaggccatcgaagttgagattgttcagatggtcgtgccactagtttgctccacagtttctaccccagaagtggcagtgtcctttcatgcgacagtcacaatgccaactctagcaccaacactagttcctcacactcagtcgttaggtccctctgagtcaacacctgctccagcttctacaacagattctagatcagattttgactttgaccttgatgttgtgtttgagctgtttcctcg

SEQ ID NO: 132391 - DNA, 545 bp, Zea Mays
ggaggctgaaggctcaatgtccactgaccatgaatcggaagggagaaaacttgccatcgtccactgaccatgaactgcaactaaacaaaaatcggaagggagaaaataagtgaagtgctcaccagatcgaagacatcctagaagctccacgtcttcttgccgtcgtcgtacaccgttcaagggcaagttcttcagcgtctgcaacctggcgacagaggatgagagagatggcgatggcacggacagcgggtgacaaagcagaggcgaggacgagagaaacaacaacctggggccatgaatgagagatgtggtgacggctggacggtggctgagggcggcgacggtgatgtgtgagggaggcgacgaatgcaacgcagaggacgtcgcgggccacacaaaatcggtcgtcagaggagtgggaccctacccccgtcaaaactgccgatacacgggcccagcaatcctacgaacaggcatcccaaacacgcatacgaagatctcgtgttgtctgtgaccgtgggctacctatcccctgaaaaccgtcc

SEQ ID NO: 132392 - DNA, 619 bp, Zea Mays
ggccgaccaactacctgaagtggtctgggccctaaacacaacagaatgccgggcaaccggattcacaccatttcgtctgttatatggatccgaggccatgatgccgcaagagataaagcatagatcgccccgaacaagcacatcagcggttcctgatgtcgacgaaccaacgaccaaagacctcatcgacggagaccacgtcctcgccccacaggccctcaacaaatattaggctcaaaccaaggcctggcgcgacaacgcggttgtcccaagagagttcagcaaaggacacctcgtactcgtccagaccacccagacagaatcacggggcaagctggagccaaaatgggagggtacattcatcgtcaagtcgaaggcatcgcccagcgcgtacaggctagtaatgccttccggcgaagacttagagcacttctggaacattgacaatcaccgcaaattttttgtttaatcatcagggcccacgcgcccttgtaattcagcaaacaatgttattccggcccacactcttttcctcccgggggtgaggtttttaacgaggcggagccatgtaatacaccagcaaaagcccccgcaaaaacaaaaactcagacgcagcatg

SEQ ID NO: 132393 - DNA, 353 bp, Zea Mays
tgagcagcatcagctatgtagtagtagttgtaaacaagcaagagtcgtatcgatttacctctcaagcacaaaagcaataggcaccaagaagaggataccagtcagatgcctgtagaaaacaaagaccgacgtgttcatgccttcatcgaaggcagccttggtgagtatctgcgtgcctgcatatatagccctcaggagaaacgcgaccacgaaagctgctctgctgcccatttccacaagcatacagtggtcgtctgttggggctactcctaactcctgggacatgggtttttatataatgcgctgcgcggcctccttttgcgtcagcatacattagtcccgcttgataggta

SEQ ID NO: 132394 - DNA, 397 bp, Zea Mays
agggacatgcgatccatggtggctcccaacttccgatgaggaattgcgacagcgccagagatcgttccaatcccatgacgcaatgccaaccatccaacaggccggtgattcaccctatctcccagccaagcaccgaagccaatcaacgactcacaatcgatggcagcacggagcggcttcctctgtgctctcccccatggcggctctgagctctcacggtcgtgcggcgttagcaggacgagatgcagaggagtatggggagctaacttaagtacccgagaggatcatgtagtggcccgagaaaaaggggaagagggttgagggagatgcaagattcacgggcgggagatcggcgaagtctgttggcaagacgctcctgacgactcggccccaccgc

SEQ ID NO: 132395 - DNA, 619 bp, Zea Mays
gtctaatatccacgtaaactaatatgttatgaactgcagaattttgaacttctggttgcatgttttgttttagtcatgtagaaatgtttatgttgctgcttattaactactactactgcataaatatatatttttctgagtaaatactgttttagattaacagtctgttggtttgcatatatgtatatggcaatttctacaatgcaatgatacgatttttttgatgttttgttcacttaccatttatgttgttagggtcatataacacaattgatgaattataatgggtatgactgtgtcgagtgtacaattagttcgtataatcattggtgtatatgttgatgtaactcaataaagcacatatgctttacattgttcctttgcaggctgctgcttcaataatgcggaaggttgatcgacccccaaccaatccgaagcgtttaatcattgagtcaagtcaagaacgtttcagtgttgatattccacgctcgactgacattggagaccctacaaatacgcagtgtgatggtgatcctccgcagcatagaaagaggggtgttgctgccgatgctaaaaagattcctatgcctaatgtggatgatgatgatgactttgagcc

SEQ ID NO: 132396 - DNA, 840 bp, Zea Mays
atttcttgccagatcatatcaaagacatttatattctctgagctgctgggcttcatgaatgagagcaaaaccttgctctctccaagaatattcatctgattaccccctttaggaatgagggtcatcctgctgagggagttgatgtatccataatacttgtgcatgttggtggactcccaatatttcccagactcagagagatgaagatctctggcttcatctctggtaggttggcggaaatcatggatcttgatcttatcaccagaaatatcattgtcagtgaatccaagaatgtgagcaaaccaacggtagctcaccttgtaccagctgccttcaatgtagaagtttagataaggatagttgtatggactttcctcatcagctggcttgatccacagagttgagtaaaactgggcaatgacttcatcattccaatcatattggaatgtcattatattcttcatcctctttctttcacaggccctcaacgcctgtgtcatctctaggtccccaatagcctcacatccttcccagttgatatagcgttgatgtagtatgggttgatgtttcttggggaggatcactaagttgtaaaaatccacaagctggagcgtccaaaaatggttcccatcaatcctggcatcacgaatgcgcaatgcaggattctggaaacggagatcctgaaggagagcagaacctccactggtagtgaaatcagtcactggctcattgccagcatgccaagcctccgcccggtggaggaccaaccctcgaataacaggggcgtgggcagggggaagatcaatttcatcatctttcccgccctcatcatcacttgtt

SEQ ID NO: 132397 - DNA, 392 bp, Zea Mays
atgccaagttcggttagagttattttgttagttgggattgtggggtgaagtgatggcatgaccatgtagccgtcacgtcatctattgtgtgactatggttaagtgtgccttgatataagttggaataagtcgagtctctagaacgcggcaatttttgaagtaaatagaagctgaattttattaattgttgttttgtgctgcacgcgctgtttttgtcgtgctatatgtttgaggaactaaatcatattttctgtagaaaagtcatatagaagagttgtagataacatggttatcttgcttgtacaaaaatttgacagccataaacctgatcgtttaggagttgtgcttttcacaagcccaacacctgaatctatcgaattcctgaacagatt

SEQ ID NO: 132398 - DNA, 709 bp, Zea Mays
gcacgttattatgagcaaagccaaagccgcagccgtcctttattaccgtccggtagtacaagtacattgccctccctcccctccgtcggcaaagcgtcttaattacgcaccacggtagtgctgcttcaccatggcatggatatccccagcgctcggacttgcgaggaagaagcagcccgtatcatcggtcgcctttgccctggcacatgcgatgctcacgagcccacgttccggtgcaggcagagcggcgcctttccagcctgggatcttgcttagctgtaatgcgtatcccgcgtcttgaaatatcggcgtcgggtggctcagctcagttactgtgcaacgtcatactgtagttgtttctctgcaagctccgtaccccatctgcatctgccgctttgactggacttgtttctctgcaaaaaggaacactgggtaggggtgggctagctggacctgtacgtgacgaggacgagacttggggcgagcaagtgtccaccgttgacactgagtcagcccgcccggaggggctacgccggcgtaccgcgtaccacctgcccgaacctgaacacctcgggttggggtgggtcattgggtggcggggcgactgcttgcttgcaagtcggggtgttgggggacggaacgtgggtgcaaggggcgtcatccagggccggatccagagctggggcatacttcaaccagcttagcagca

SEQ ID NO: 132399 - DNA, 390 bp, Zea Mays
cagttgttggtttgtaagcttgtgttctgttgggctggcccttcactgacccaacccaacctgcagagaggagcgaggtggtgtccgcgttccagagcgaggggaggtgggcgccgcacaccacgaggtcttggcggtttctgggcttcgaggaggggctcgaccgtcgcccccccgacgacggtggggatcagtggctgctgccgtcgtccctcgacaaggccagcgaggacatcatcgtcggcatcctcgactccggtgagagaccgcgcgcttcttgcaccgtgttcgtcgtttcttgttttgttcatctgcatgccacgtacgtcatcgcacatgtgagataaagaagaagaagaagaaaaggagcagcgagctaggcatgcacca

SEQ ID NO: 132400 - DNA, 393 bp, Zea Mays
cataataatcagagatgtatttcgagtaactgaattattgtatataccttcgtccttttcctttcttggaaactagctttgtaaactattggtttactatactaagttgggaaacctacttctgttattagtctccttttgcaagtgtttttctggttaatctttcataacgagactggagtgaataagttaaatggattatgacccctatcgcatgcagccttttttgtatgcacactagcatttttttgttgctgctagcctgctacctttgagattatatttgctcttacgtagttatgtattttgacaacatagttttagtcattgttaagtactcctataagctcccacatatcctatcaggtgcatttccttttagcatataaaatt

SEQ ID NO: 132401 - DNA, 710 bp, Zea Mays
cttttttgtggttctagctgttgttgctatcgaatggccatgatgctatagttttcgttggttctacactattatcgcaaaaggagaatcacaccgactcactcactcttcaacggcaaatgcacttctgccactggcttcttgcagtattagcccttctactgtacaatatagaaatcttttgcagttctgttgtattaagtgaactgccgtgcctggtatgccctgggccctggctgcttctgctatcttagatgtctataaaattttatatatttgcatgctctgaacaacttgggctggcggatgcccatgtccatgccgctacacaacttaggtctgtactagtgtttcaaacagattttcttattggccccctattttgtactccgtttctttcggattcattgtttttgtgggtttgaatttctataaggatttgcgcatcaaatattgatatgacttcaagacaatattgcagttcatgtcctgaatttgcatcctgagcttgattttctgtcgagttgactttaatagctatttatttgtcacttgtacatctattccacttcataccaaacaaacccaccatgtcttgccggttcctgtaggcagaaatatgacactagatagactccaaagctatagtgccaggctgacaagtgttctgtcagttcataatactttcgttggcaacttgtgattgtcac

SEQ ID NO: 132402 - DNA, 480 bp, Zea Mays
ctaaaacccactgggaacaacactttaactttgtatggatacttcacaaataatagaggcaatgaccaaacacacaccttttgtaaagttaagccctttagggccaaagctaattaactctatagcttcagtgaaggaaaatgacactaaagatgaggtgacatagatgcctatccaagatgagatccctctagctgaaatgaggctcgagccgaagttaggtgccaaggaaaattcgaaagtggcaacgttgaaaacgccgaggaaggctagctgcatgactttggttatggatgccctcttcgacacaccatccaccgagggaggcaacgacaaggccccatgtgccttagcctaggcattatcctctcatcttgaacctcacagtgggcaattctagactgcactgagtccttattgatggcacaatgtcaccatatcttaggttgcaaggtactcgagaccactattcgctacgtg

SEQ ID NO: 132403 - DNA, 426 bp, Zea Mays
gtctagaaatcccatcaaaatcaccccagggaagagcgggtgggcattcaagacttgcacaatcgagggggaaggagaaaaaagttaacttgggtagggtgggcacgcctgtgatctactcctacactgatataggtaaggagattgtgggcataatatctgatggtcaggacgtccagactgtcgagaggtaccactcctacggccattacatcctctcctttgtttgtatatgattgtgtgattaaaggtgttgttgattatgtatactgatgaaaggtgttgttgggttgcattcttttttatagggggtactactgcgccactttcaagtgttacgggcctggtatgcctccaatggtaacctcaactctgacctatgtgcaggcatgtaacaccccgatatccacaaacaccccagaatgc

SEQ ID NO: 132404 - DNA, 800 bp, Zea Mays
gtcgattgctccgttagtagggtatagtggtcaccctaagtcgagtaagcgtgagcatgttgcaccgtcttaagtcactgccgacttaagctgattgctccgttagtagggtatagtggtcaccctaagtcgagtaagcgtgagcatgttgcaccatcataagttaatgtcgacttaagccgattgctccgttagtagggtatagtgttcaccctaagtcgagtaagcgtgctgattgataataaatagttcgagtgctcttgagaatgaaatcttttactcatgaggtatttaccaattacagaatacaatgctcccccaatagcttttgaaatcttgctaagggtaaaacttcctgagatgctctatattccatgaattccctatttccgtgccatccatttgagtaagcctatatgatcctggccgagtgacctctgctactacaaatggcccttcccatagtggtgataatttgtgtcgtccttcccccgttagaattcgacgaaggaccaagtctcccactacaaaggatcgatgtcgtatggcattgtcatgatagcgccacagagtttgctggtatctagctgactgaattactgtattcaatcgttcttcctccaatacgtcaatgtcctctaatctggtagcctctacttcagctatgctttcgaagaccaaccttggtgccccaaacctgagatcagtaggtagcactgcctccgaaccatagaccatgaagaaaggagtatttccatgcagagctcgattaggttgagttcttaagctctaaaccacat

SEQ ID NO: 132405 - DNA, 788 bp, Zea Mays
cggtgaggtcgccgtcggattccgatgcaactgcaaagtcccatccatctgcatcccagtgcaaaggtgcctgtttttcatatgccgctataggatcccactctgggttggttcacggctagaagaatgggagacaaaagaagcagaggaatcactcggtgatgtcgacatgggtaaagctaagcgttgtggcgatgaatggaaatgtggaaatgtgcttgttttttctgagtgatattcccgtagctctactgccggcttgcaccgattgtacaaccgtcccaagctctattgcgtcaacgggaaataaggtctattatccaattgatgacataacaaggccagtgacgtgcacactggttataagatatggtattaacaataatcgcacgaagaaagtaggaacaggcattgcgatcccacgacgtaagtttcatgaaagtgacataccagatgattattgcagggtagaagtgacgatggtcgtccaaggatctgaggacgacatgctagacatccttgggcccgaaggaatcgagacactcggacaagccatcaaaaatttcgtcctttggcctcgaagggatgtcgaattggttgatccaccaatgtcgtcgtcatctcatccccaaccatctccgcctcttcaaactttagtacctttacatccatcatcatctccacaatcttcccatgctgctcctcatcctctttctaatccatcgtctccgccacaggcatcaacatttaggacaccaccaccttctccacaaccatcaagggattca

SEQ ID NO: 132406 - DNA, 734 bp, Zea Mays
ataatatttccctaaagcatgacaaacaatgtatccaaaattgtctccagaagatgcttcgaatatagctgatgttatcttctccggaagatcttcctttgcttgctccactaacttagttctcgaagacccaactttagcgcagacagaagaagtacttgcagcaactgcttctcctaactcttaaattttgtccttagaagccttagtagaagcaggagttggcaccttcgaagatttcagaacagcatccaaaacgctggtcattctcctccctttcctaggagttgatgctggagcaggtgctaactttgacaaccccgtcttggttgggggactctacagcttcggtcgctgctctgtctttgagctctttggttctgcttcttatacctgagtcgtagtagcttcgacagtcatagcaggtattatctccaaagccgagggggtagctttggcatattcaacaacttccatcttctgtacaatagtcttctccaaagagtgcagcttcggccaatgagtcaaaactttagccctatttgccttcggcgcggcggaagaggtcgtagtttcgattttcctctttattccttgtttccgagcggaaaagtagtagtcaggataaataaatccaatcacataaaaaactctatttagtcttcttttgcctcgagcactgaaggtagtgttcatggcttcgtcctctgccttcgtataagtccccggcagct

SEQ ID NO: 132407 - DNA, 743 bp, Zea Mays
gaagatgacgcgccacggaggtatcgtatgctggaaagtatgttgggaacagataatgtcccaaagcaagctgaaatgcttgctgttgaagaattgttgacagccatcggtgaggagccatattcagtgactgaggctctgaaggtcactgattggagaaaggcaatgttagaggagatggcatcaattgaagggaacaagacatggccactggttgatttacaaaaaggacatcgtgccagaggtctgaaatgggtgtataagctgaagcgtaacgaatcaggagctgtgatcaagcccaaagctagactggtagctaagggatatgtgcaacaacaaggtattgattttgaagaagtttttgctctagtggcaagaatggagactgtcagggtactattggcagtcgtagcacatcatgggtggccaatccatcacatggatgtgaaatcagtgttcttgaatggtgatttggctgaggaggtatatgtcacacaacctcctgggttcactgcaaaaggggaggaaggcaaggttctaaaattgcacaaagctctgtacggactgcgacaggctcctcgagcttggaatgtgaagctagacaaaagtttaggcaaacttggtttcacaagatgcaagactgatcatgcactatatactagaaagaaaggtggtcagagagttgttgttggagtatatgtagatgatttgttaattataggggaatcagacgcacagatcac

SEQ ID NO: 132408 - DNA, 780 bp, Zea Mays
cggctaagtctgccaagaacactaccccacttaaaagaatcctgacttgggagcatttgaggtggcatagaaggtctgaccttggggttcgggtgaccaaaggaatttctagagatgtagtgggaatgccatgcttttccacaaaaccagtagctatgaatgaatgggatgctcctgaatcgaaaagtacaacagcgggggtaaattcaactaggaactcaccaagcactactcccggggcttgctgagcttcttgagtgtcggcgtggttcactcgtgccttgccatgaaactaggtcttgctcagctggctgttggaggagggtgccttgggggcgggtgctggagcattcttggggccatttaccgagttggagtaggtaggcaaggatgtcttcaactgaggacaattattcttgtagtgactagggtttccgcagtgccaacaagcattagttggaggttagttgcttgcaatagatggggcatggagggaactttgacccggctggctgaaacgtgacggagcggaccctgctggcttgttgaagctcgaccctttgggaggaaacccgaaagatcaaactctctggtgcctgtcctgttgctgagctcgaaggacttgaaacttcctcttgaggtgaccttttcttcttctctagccctttccacttgtatggccttgtttgagaggtgcgagaagctgagaaaatcttggctggcaaggatagtcttgagttctggtcttagccccttcaagaaacgggccatcttcttggc

SEQ ID NO: 132409 - DNA, 413 bp, Zea Mays
ctcatggcccatataaagatccccactttaatgatggcttcgggagtaagttgatgaaggtaaatttcaaaggtttttagaacctcgaccaacaatttgtccagggggaaccgaagctcggctttcatgaagcttctgtaaaccaccacttcgtcagctttgggaagaggaacattattatcccctctggccctcttgattgagatatcacgaaaatacctccccctcattgcatcgatctgcccttgtttaatagttgattttccgaagacaacatgacttggtctccatggccgatcttcggcatcttcatttccactttccacatcgaagctttcactattgctagagtttttagaaatcctagctaacatctcattggtgatcttctccacgttggttttttccatggc

SEQ ID NO: 132410 - DNA, 307 bp, Zea Mays
cgttgccactccttgagctgaaataacatggcccaagtaggcaattttctgctgtgcaaaggagcatttggacaacttgatctgccagcgatctgcctgaagaagcccgaagactaagtccaaatgatgaaggtgatccaaccaggtacggctgtagaccaatatgtcgtcaaaaaagacaagagcacatctgcggagcagtggggcaagggtcctgttcatcgccccctgaaatgttgctggagctccagacaatccgaaggccatgaccttgaactcaaagtggccatggtgggtttgaaatgcc

SEQ ID NO: 132411 - DNA, 424 bp, Zea Mays
gttcaaaggatagttcttttattcttgcttaaaaaaagatgtttgaactctgaagtagcaagcaccaaaggcctgggcatgttaattttttctgttcatgatgcatttgccacaaaatcagtgttgttaagtgccaatcttaccttcttttttgaatgcaaccaaccttagattctaaaacaaagcacttaagcaacgtctcacaaaaatctaaatggtaaattgatgttttccactttccggtacgtccacgtgttcctatgctatttgcatgctagttgtcaagttattctttggtacactagaaaaaaatcttcttaaatttcattcaggaaattttggtattactccctccgtccccttttgataatcataccagggaaaaaaatctgtaccaagtgatcatcattttgtcatggacgga

SEQ ID NO: 132412 - DNA, 355 bp, Zea Mays
tgtaactcgagtcagtgtatcaagaatcttgataggatactccgcataagttagatcctcttgaccactaaggtcctctattggtaggtgctcttcaggtaccctgagacatttcttcagctaagatacatgaaagacatcatgaacatccacgagatgatccggtaactccaattgatatgccacctctcccactcgctttaagatcaagaagggtccaataaagcgaggggacaactttcctttgactttaaatcttctcatgccccagagtggtgacaccttcaaatagacatgatcaccctccttaaactctagcagccttctccgggtatcagcatagtttttctgcctg

SEQ ID NO: 132413 - DNA, 663 bp, Zea Mays
gtccccaacggatcagatcggccgtggcagaaaaatcccaccgccggtaacctttcccgccgtgattcgcgtcgccggtgtcaagattcacgctcggggtaagtcgataacgtcgcagggtcaaatatcttcgccgccggtgacttggaagccacttcggctagccgtaattcattcccccttgctcaccgccgtggataaagctgctcgtcgccgtcgtgccatctccgtgtccgccgcgtgtccgagtctttccaccgcgtcgccgtgactccctatagcagtcccatcgtcgccggtgagctcgccacgactgtggacacgcactcacgcggccagtgccttcttcttcatttccggccgccgcgcgtcctccccaaattcgctggccaccactttaccctcctataaattgatggccggggctgttgcgctatgtgatcatgaagccaacgcaccagctattgcttcaaatcactcaccagagaccacaaattccttacttcccccaaaccggttcatcccaccgcaagaacaccctcaccgtggctagcgcaattcaggctagttcttacgctctgctccctcgtttaagcagtctcatgcgtctgtggtggtcaccgacccacccaattgaattagaccacccccaatcgccgggaa

SEQ ID NO: 132414 - DNA, 376 bp, Zea Mays
aacgaaatccttggtaactataccaaaaaggaggaccaactaatgactgctgccttcggcacccggccaaaacgaaggttgaatcgcataatggacgcgctagattttgaatatccggattatgagacatttgataagggtgccgaaggtttaaagaggaagagaattgttagcattttaaatagataggatgccagaatggttaaggaggatgagaagatttcaaagaaggcaaaatctgctcccgagccgaaggcgacagtctcaaaaaagaggaagcctaagaagaagcctgaagtagctgagccgaaggtaactgaggcaagagaagaaactctttcaacgcctcctactgctgaaatagcataaattctaa

SEQ ID NO: 132415 - DNA, 709 bp, Zea Mays
ctgaaatctagcttggtgcccatagctttctgaaggcttgtccagaatttggaggtgaactgggttcctctgtctgacactatctttcttggaatgccatggagtctgactatctctttgagataaatttgggcaagggtggctcctccaaaggtagttttcactatgatgaaatgggctaccttggtgaggcgatctattattacccagatagagtcattccctttttgcgtccggggtagtccggttacaaaatccatgcctatttcttcccacttccattcaggcactgggaggggttgcaataggcctgcaggtttttggtgcttggccttcgttcgttggtaggtggctgagcctgacaagagactgactttccttggtggtctatgagaaggactgtcctgtttgtgcaactgatgatacctttgtgtttggtcaaccaatccatccctaaggtcacatcaatccctttggatggcaagacggttaagtctgccaagaatactaccccacttaaaaggattttgacttgggagcatttgagctgacatagaaggtctgaccctggggttcgggtgaccaagggaatctctagaggggtagagggaatgccatgcttttccacaaaactagtggctataaaagaatgggatgctcctgaatcaaaaagtacggtagcgggagtaaattcaacaaagaactcacc

SEQ ID NO: 132416 - DNA, 548 bp, Zea Mays
gcccaatctagatcaacggccacggacacaacttcaatcctcccgatagccagggatggtggagcagaggtccatgacggcgctctcgtcggtgtgacgcgattgggcgacccggagcccgattgaaggcgcaactaaatgctcaatgacctagagtatgcaatgaaccgaatgaattgggttttaccctaaacagcgacgactgagatgccgcccacggcgatctgtggcccactggggaggagggagatcttgagcaatcccggcgactccgagcgcacactgaccacggtgaagcttcgaacaccttccacgccacactgcgaagctcctagtaccgcactcgagattggagctccgatgcggacccgatttccccacggcggcccatgctcaccgacctgatggtaaactcgacgacgatttggttcggggggtaggcaggtctagttgaggggatagggacgtcgtaggggcctggctttatggctgaggcatggaggtcggttggggcagctggtgcgacagggggaagatctccgctgcgc

SEQ ID NO: 132417 - DNA, 276 bp, Zea Mays
acacatattggaactcagacacaaccttgataatctcaagtggatctgcttcactgctatcaatagccatctgatgactacttcctttccttggctcaggtgagattaactcgtctaccacttcttctcctagtggggacaccaacttaactgtcctcttatcacagctgataattgcttggtacttatctagccaattcatccctaggatgacatctattccctgagtacccattactatgagattagcgggaaatgctatcccccttatttcca

SEQ ID NO: 132418 - DNA, 291 bp, Zea Mays
cttatgccaagaactattcttgcgtggtcatcatcttttccctctagattgtgcctagcttgcttgccctggatattccggtttataggtactgcatgcaacttgcaaggacagatggcacagcacgatgcaatgcaagcaagcagatcgatggcaactgcacaaggtcgtcacaggtagagtagagacctccctactccggcatttcgcgagtacaggcatgcatgcatgccatcatgcatgtctcccaccagctagctgctgttgagttgttggtttagtaattcgtca

SEQ ID NO: 132419 - DNA, 455 bp, Zea Mays
aaattgcccatctgttttacaggtcacatgaaaagattctaatcttttgcaaattaacaccttagaccagattaaactctcttatgaagcagcagcttcggcttctggttcctgcatattcaagcaaacgaaataggttatacatgatgtgtcaataaaatacaaatactttataattcaagttttcttcattgcatttatacaactgcaatcaaaacatgtatgcttctgagttaacactgaactctcttatgaagcagcaattggaggatattttttgataaaaatttgtaaaatggggtactgttggagccgttttttatcaattgagacttatattttcaagataggacactgagttagggcactgttggagatgctttacttgatagctggttagacttctacttgacatttctacctggcaggctgttgtactcacaagccaaattcca

SEQ ID NO: 132420 - DNA, 429 bp, Zea Mays
ttcctgtggatctcggcgtggtggttgaccaacgaaccccgcgatgctcggctagtcagctcatggaagaagcggggaggaggttcgaccggtttaaagcatgccctgcacggccgccatggctctcgcaagctaaggtcgacgcatccgtagccagtatacccgccgcgcaacccaagccactgtcgcgcgccattaacgggtgaagtgtgtgcttgcgtcaaacattctctggtggtgttcgccgtcgtcgggtcctgtgaggttgtccatcgggatccccctgtgcgagcgtgaatcaggtggcgactggtgtgcgggcgtgccttcgacgccacgaagcttgctgctagaacagccgttgtccacccaattggcagtcgtgtagcgtctctggtgccacccgcgcctgctggtgaccctccctgg

SEQ ID NO: 132421 - DNA, 407 bp, Zea Mays
tcccttttccacttgtatggctttgtttgagaggtgcgagaagctgaggaaatcttggctgtctaggatggttttgagttctggtctgagccccttcaaaaagcgggccatcttcttgacttttatgctgacgtcatccaacgcgtagcgggccaattctgtaaatttgtgcacgtactcactgatagatcttccatcctgagttagttcccggaattcatcttcctttagctgaacgatcccttggggcacatggtgctctcggaaagcggtttcaaactctgcccaggtagcatctctgatggcaacgttgaaggtatcccaccaggctagggccatcccggaaagttgatgagcaaccaattgaacacgttgattctccgggcatccgatggcttctaactttc

SEQ ID NO: 132422 - DNA, 684 bp, Zea Mays
gttctgttgattgttgaacttattctgcttcggatatggacagtcttttataaaatgaccagactttccacagttgaagcagccaatagaagaactagggagagcggggaaacgagcaccaggggcactcggctgatttgtagaagtgggggcagtggcaggacgaatgaaaacaggctgtttgaacggataggagagtggacgaggcgaagaacgattctgattaaaaggtcggattaccaacctggttcgcttctaaggtccatgattagacctgtcacctccaaaaacctttgattttccgtggcctgtgttcttggcttctactgccagcgttgtgctgacagctctgatgtaagtaagatatagacaggtggccattttccgttggagccggtcgttgagtcccctcatgaagcaattctttttcttcaggtcagtgttcacttaatcaatagcatattgggataaatggttaaacttgttgagatactgcattacagtatctcccccttgctttagtcgaataaactcctcttgtttcatgtgaagcactccctctggaacatagtgttcacgaaatgctagtttgaattcatcccaagtgacctggtgtccagccggttgaactgctacaaaattcgcccaccaggtactggcagggcctctcaattattgggcagc

SEQ ID NO: 132423 - DNA, 558 bp, Zea Mays
ccaatgaagaacacatttcatgaaatggaagatagaaagatgtagcctacgaactactaattgctgcacatcttaattgctaggtatgcatgaatacacataagggaaagtgacattggataccttaaagaacaactcccacaatttttcgaatggaagcttgcccggggtcaggaacataaaggcaatctttgggttccttgatatgaaaggaggcgtggagagtatctgtctgaaaacaacacgtgcagcagtctctgcatcagtaagttcccgcgtaggttccgagggaaaccagtccctgacagggtaggtgtaatcctggggagggtagagataagcccacagcacagtaatggcgacaaatactacgacaactgatatccatatgcgtcttcttggacttgctcttgtgcgaggaactgcagtacccttcatgtcgctgaagcccagttttcacacctgataccaccacttcattccctttggctactcacattgatgtgcctcgccttcattgctttcctcttgactaaagcaaatgctaccctactggag

SEQ ID NO: 132424 - DNA, 502 bp, Zea Mays
ggcggagtcagacagaaccgtatccctggattttttgcagtgatcggacacagtagacaggatgggcggcagtgacgacgcgaccacagggcggggggtggttgtgctgcattgataacatcatcttcaacctcggacgactctgcgaggcgggcaacggcgcgcaccgcagaggccagagagtggtgcggaatgagcacagatgacgcaagaacaagaggaccccgagtcacaattacattcgcaatattttgactggcgactgagaccctgaacacccaaggacgcaagcacacgacgcggaggcgatccggatgcaccgagaggaggtagtttgcggcgttgctgacggagtggatgttgtagtgggggagaagggaagatggagttaaccagagatgagccgacatttggtggcaaaccgaacctggggtagcggtggaatgatagttggcgaggagccatccctgcatgcgggcacctggacggaggagcgtccctg

SEQ ID NO: 132425 - DNA, 683 bp, Zea Mays
cagcactggagatcgactgagcctcgaagaagtgcagtagtttacaagttgctagaagtcgcgaatgcaaaagtgcatgcgggcaccaaagtgatcatacttcaggtcgtaacatgacttatggcgataaagtccaagtacaacttctcaaataattgctacaacgttatcatgaagctgattattgatgtcctcccgctgaaccgtaagatgctagagaacttgtacagtctaaaaagattgtctcgggtctcggcatgaactatgagaagattgatgtgtgcgaaaataattgcatgttgttctggagggatcacgaggaagaactcaatgtatgcagtggtggtggacgaggaaggcactgatgtcactacaaaagtctcggtcaagaagctctagtacatgcctattactctgtggcttaaatggttgtttctaaatcaggagacagtgaagcaaatgagatggcataaggaaggggattgtcaggaccaagattcggatatcatggtgcatccattagatggcgaggcatggtaggcactggaccgttttgatctagaatttgcaacggaccctagaagtgttcgtcttagtttgtcgatggacggattcactcctttcagcaaaagttccactctgtactcgtgttggccggttttcatgatgccctacaatctccc

SEQ ID NO: 132426 - DNA, 862 bp, Zea Mays
aactttgagtatgaattccaccttgatttagtgctcaaatgggttcaagtcgtatagccgaattatggttggtttgtagctctacaattctgctgcagagcttgggaggagctgccatatgaaattgaagggaaattcctctgcaaaatgtcctgtcaggctgtctgaaacgagctctgatggtacagtagtcaaaatggatcaggatgccagcatcgcgtgcttgccgccggtgaccctcccccgcgcaaggattcgcgtcgccacattaagattaacgtttgctggtaaccggataacgctgcgaggtaaaaagatcgtcgtcgccgtcgagctggaagccaccccggtcagccgcaatacccctcccctttgctcaccgccgtagataaagctgctcgccgtcgtcgtgccatctctgtgtctgtcacgtgtccgagcctttccacggcaccgccgtgattccctactgccgtcccatcatcgctgatgagctcgccacggctggggacacgtaaccacgacgccagacctcttccttatctccgaccaccacacatcgccgttaaaattctcggcccccgtcgaagctgcctataaattgagccctcccctagctgcataacatcatcatccacccagccaccgttaatcgctggcagtacttcgctagaactcgcgaattttggattcgccccaaatccactctccgccaccgtgaactcacatcaccgcggtcagccttccccaggtctgctcattcccttctcgttcttgttctagcacccttacatgttagtgatgctccccgacccctttaatcaaactgaaccgcctgggatcgccgggaacacaacacctt

SEQ ID NO: 132427 - DNA, 574 bp, Zea Mays
taagaccataaaaaatcgtgcgcagggcgcgcgttatacactagttctgtttaataacgggtcttgtgagcgtacccgggcgtgcgcacctcgggccctgggccgcctcacgtgtccgcccacggcccacctcatccaagtagttctgggctcccactccaagtcggtctagtacgcaccagcgagctgctggcctgctgctacccaatcaacaactaggccaagcaaggattcaggttcccaatcttggaggacccttgtttttcctctggaaagtggaaacggacctgatccagagagtatgttggcaatggcttttaagcgacttgcatagctagaggtcttctccctagttcagacagagacctcaaagattggcaaaccctggaaggtgcaaactcgagaggtttacaaatttccaataatttttttgtctgtttactagtacttaaagaattgtcatttccatggccaggcctcggccttttccagtttcgaccgccctctcaccattaaggtttggcatttatttcaatgagaaaggatgtgtggtcttggatttgaattggttcta

SEQ ID NO: 132428 - DNA, 383 bp, Zea Mays
cggctcggctcggctcgtttccagccctaagcaccgccttctcctctgcatcgtctgggagacttcgcgtgtcaacagtagtcaatagccagttatgtttgatgatctaaacaagcaagaaaggaacaaatctacccctcacccacccactctagagtttctatgcttattttcatagctcttcacgagtggcttatttggatttgagtcaccaggttatccgtcgaatcatccaatcctaaatccgagcctagtaacttgtttggtttgcatccatagttctatgtccatcatggaacaatccaaccaacgagctttttgtgggaccaactcatccaaaaaaacgtccacaggtgttctacatggttgggttccataccagt

SEQ ID NO: 132429 - DNA, 340 bp, Zea Mays
ctcggttgatttgaacgaaaagagtgaggatgcggtgaatttataggtgcagtgagtcactgccgcggccatggtgataaccatcgccggccttagctggcgatcaacgacggcgtcgagcgctaccctttcctacatgcttgccacgtccccgccgcgacagtaacacggtcaaatcggtgaggcgtggatgaacggagaggagcggcgccgatgaccggatatggccggagcgattagtggccgcgtggtgaccggaatcattgcactccaccgcggcgatcttacccagttcaataagatcttcgcgcggagatgcacgccactcgcccatcccgac

SEQ ID NO: 132430 - DNA, 579 bp, Zea Mays
ggtcagcatcactaagtgacaagagtgctcgaacaaaggagaaggggggatgaactgacctagaatgggttggccgcggtgagcttgattctacggtggcagaaacccgatttggggcgaacgcgaaattcccgagctccggcgaacgattgtggctaattggcggtggctggttagctgataaccctacggagctagtcacgggctcaatttataggagggcaaggcggtggccagtgaattttgggaggacgcgcggcggccggaaatgaagaagaagacggttgcagtgaatacgtgttccacgacgtggcagtaactccggtgatcgacgggaagctagaggaggtcacgacgatgcggtggaaaggctaagccacgcggcgcacggccgggaggcggcggtcaccggtgagtaaatccgttcagccgcaaagaggaagagagagccacggggagtcaccggagtgatctccagctcaccgtcggcgaggatcctttaccgtgtgtccttacctgcccatcccgagcccaagttgggccggcaacggcacaaatcacggcggaattggtcgtcag

SEQ ID NO: 132431 - DNA, 491 bp, Zea Mays
gtcagaaccttcacctttttgctcttcggtacaggctcagctggggtgaccgaagcagcaatcttcctctttttctcctgtcctcgcaacgggtagcggtaatcggggtatacgaagccgatcgcgtcaaaaactctattcagtcttttcttcccccgacctccgaaggctgtggacagagcattatcttctgccttggaatatgctccaagtagttcatcactggtagcttcgatgcacttcagccagtcgtcgtttggctcatcaaacttctccctgaatctgaaggtatacttcagtcggaccagaccaccttcgttagaatcggtggtggtctcctttggcatttcctagctttccacaagcggccataccctgaaggctatatgttcctgaattaaatatcttgtgccaataaaggagcaaacagtgttgaaagccctctggcacgcttcgacagtgtcatcaatttccacctttggccttcggag

SEQ ID NO: 132432 - DNA, 744 bp, Zea Mays
ggttgcaaaagctacaagtcaagctgcctttccagcgtcttttggctaggttatctttagtaaggatcgctccccgacataaattctacaaaaaaacttttattttcaaggggagcttaagtttccagagctttttattccgttcgttgttgggattattcatcaaacaatggtacatagattggactgagaaaattccattcttatgaccatcccaaacaaatttgtcgctagacagattcaaagtaacattagatagcaagtttaacatgttgtgccattccatcaatttaatccccctaattattcggcgaaaagataaattaagattcgtagctgaaaaaacgtctaccactaatgctgatttattccgcactatattaaatagattcggaaattgctcacaaagaggccgactggttagccatttatccttccaaaatctgatagtttgaccattcctcgcttcgaagcgcccccatctgagaaattgatccttagtattcattaaacctgaccagaaatgagaatcacccggtcttctagatatttgagtaagggatttaactcttaggtatttatttttaagtaattgttgccacatcacatcctcattgaataatttgaagagccatttgccgagtaagctaatgtttttaacagccagattagagacacctaaaccacctatcgctttgggttgacaaacaacattccatctagcaagcctatactttcttttac

SEQ ID NO: 132433 - DNA, 559 bp, Zea Mays
atcacaacaattttggttgttatggcttcgtgccccgcgccgatgtaagttacccggtcccaacattccgaaaaaggtggcccggggcctggatggaggaatggttctatgttaagaataatttaattgagaggggagatataagaggaattattcaacgtcccatttggtctcgcttcggcatcaggaggccagccaccgctcttgggaacgatacagaggcatgccagagaagcttcaccactgtgtgtacttttgttggcactagagacttggttcaagaacacattgcctacagagtttaagcagtattgaggcaccagtgacaaattgcttacacaagggccgaagatgatgccatgactttggccttcgaagccgtggcaagaaaagattaaatagagtttttgacatcataggtttcgtataccctgattattgctatccctcgcgaaagcatggaaagaaaaggaaaactgccgcttcggccatttctgctgtgccgaagggcaaaaagatcaaggtcttaacacatcggccaagatacattgaaacgacc

SEQ ID NO: 132434 - DNA, 519 bp, Zea Mays
taaagctttgtaacagaatgcttcatcaccttaacaaaagaaaccatcccaaaaatttggagagagagaaaacaatagcacatgccatagtaactactactcctacaagcagctcaataaccagaccactttaatcctctaaccttggatcccagaatcaaggagagttgcaaacattgtagaaggcgtttctccttcatgtggcacatacatatcgtcctccagtttgactggcttcagcgtctgcctcactgcttgcctgcccgaactgtaagctgcgcctgatgcagaaccgccatcgagagatgtccttttcggcgaaccgaacagtctcaatccatccaagctttctacgttggaataatcggcagcttcctgctttatgtcttcaaggagtaaaccggcattaggctgtcttgggatgctttctccatcatataacagccttggtccagaggtcttggagagtgatcttcccagcagaggagagacatttgaagaagacaacctcttcctgta

SEQ ID NO: 132435 - DNA, 961 bp, Zea Mays
aaatgagtgggcggaagagttgaagtttgatccagtactctgcaaatgtggtattgaagctaagtatggattagttccttccgagcttggtgttggctatttttgtggacatatggtagattacgatgaggttggtatttattttttgtttgcatcagctgcaatgttgcacccgtacttactattttttgtaggagacgaggaaatgtggttgggagagttacgacgacaaaggagaggtgatgcgtacaataaagtcaagagactaatgggacagaagatgcattgtggatctcagctcgtcgattcgtacattaacgatcgcatataggacatgcgtaggttcgtgaaatcggtgagttttgacagcccgatgcgtgcagagcagaggagattgaaggcagcaaatgagaagagagcatatgatgcaagggaatgggaggcggctagagccgagaaacagatgttggataatcttgctgatcgtctcaagagaagtgagtgagaaaaatgacatgatagttttgtttgtacaatttatttatcctgactttacaaacttatttgtctcattacatttgcagagattggatgtgtcgtaaactatattacagatgaggcacgtgcaagatacgttgagaaaaaaatgacgacggtggagctgatggaggaggaggaggacgacacatcaaggttgagtgagcttatcgctctcactgatagaagattacatggggaagaggaggacgacacatcaaggttgagtgagctcatcacactagctgaggcaggattacatgctcaagaggaggaggacgagtttatgtctcaggccgccgaagaggtagaggccgcttattacaagcagaagtgtgatgaggctgaggatgaggatcagctattctcccaagctgcagatgaagcagaagccaattattacaagagaactgcgaaaaactgt

SEQ ID NO: 132436 - DNA, 448 bp, Zea Mays
caaaaggagcccacaattagtgacaactggtgctctcacggcaattcaggaagaggcaaaggtatggagaatggaactatgcaatttcattgaatatcttgaagttccattgattgtgatcacaactatgactttgcctctgaattggtagtatcttggcttaagtgctccttactttgaaatgttgtttcttttggtgtacctaaggaaccttattaactatgatgtgcttagacattgtgctttatatgcatgatcgtgttgtctttcaattggtatatgtggtgcaatgattgacaagtatgaagcatgtctaggttgcttgtaaaatgttatacttcttgaggcatgcaatgttgtattaagtcaacccttcatttggtattcaattgttatctctttatgatgaaattgagagtacgccttgaccaagatatgtagtgatccc

SEQ ID NO: 132437 - DNA, 321 bp, Zea Mays
ggcgatcgctgcaagcacagcatcatcactgttgttgtttctgcgggtagattgaggcaacaaattttcgacaagcgcagcaccatcactgttgttgtttctgcgagcagattgaggcaacagattttggcgactccgctagggaatgatttgcaatagtttcatagtgacaaactgctggcgattggcgtccttatcgccaatcatagtcagggctatggaggaaaagacagcgaagaagacggcgccggacaaatctgaagttcatcccttgaacgtaatcaaggtcacgatagaggaccttatagaggcggaccggaa

SEQ ID NO: 132438 - DNA, 529 bp, Zea Mays
ggacaggctaactaaagtagcccactttattccagtaaagaccacatattcaggagctaaattggcagagttgtacatggcacggattgtatgcctacatggtgtgcccaagaagattgtgtcggaccggggatcacagtttacttctcggtattggaagaagatgcacgagtcattggatacgagattgaattttagctcggcttaccatccacagaccgatgggtagactgaaaggactaatcaagtacttgaggacatgttgagagcttaagcccttcaacaaggtagtagtgaacaagagtctaccttgtgctgagttctcatataataatagttaccaggccagtctgaagatgtcactgttcgaggctctatatggtaggaagtgcaggactcctctatattgggatcagactggagaaagacaattctttgggcctgaattgattcaagaagcagaggaacaagtccatataattcgagagaatttgagggtggctcaaaccaggcaaaagagctacactga

SEQ ID NO: 132439 - DNA, 274 bp, Zea Mays
gtcattgcgtccgacgggctctgggacaaggtcagcaaccaggaggccatagacgccgtctctggcggccggagccgcgccgcatcctgcagggacctggtggacatggcacgccgcaggggaagccgggacgacgtcaccgtcatggtagtcgacctccagaggttcgtaagataggatatttgatggatcggagctgttggagacactaattgagcaacaagttcacctgggttttgattgaggaaggtgaaagtgaaccacactggcacag

SEQ ID NO: 132440 - DNA, 533 bp, Zea Mays
ctttgtcttaaaaagcgtgaacactgaaatggccagagtacgatccactgctagggtgtctcatgagggggacgagactgaagtgaccgaaacagcaccaatatcagaagtgatgaggcaatcgggtcttgttgtgccagaggaggctgttgccgaaggtacctccactactgaagctgaaaagatcgtggctgaaggaggaagtgagaacgaaggtgaggacgacaacactattctcagcccaatgaaacctagccacattgaatttggtaaatctactgtgatggcagacgatatggttatgatgaaaaaattgggctactttggggaagccgagagcaagcttgtccggtttgccggggaggaggtggttccgcagccaagggaggatgaagtcgttgtttttaagagcttcttcagggcagggcttcggttccctctacatgagatgattggagaagttttaaagaattttgagatatactttcatcagttgacacccaatgcaatcgttagacttagtgtctacatat

SEQ ID NO: 132441 - DNA, 551 bp, Zea Mays
ttggcgcgccaggtagggggcttggcattaggtttttgcttgttttcctgctcgacaccatggtccagatcgtcgagcaccacgacttggctcccgaagacttctcgatggaggaagaagctgcgtcctccacgccacgggccttcaaccgccctgcacctggtgatgctgttgtgcactctgcgcggcagcacactcctgcgtagacatccagagcatctagggctgcgcctggggcgctatctgcggccacggaattgctgcaccaccctcctagctccacggcctcgccgggggccgtgaagcagtggcatgacgatgtcaaccgtctgctcggctggcgcattctggctcaaccaggcccaggcctcggtcatcccgacgtcaacatgaggcatcgacgtcagtgcgctcaccctcggtgagggccgcaccgactaaggacctgcgtgtggagctcaaccgcaggcgtgcaggagaggacgctccagtctctctagagaggcctgatgacctgcgagcagaactcaaccgcaggcatgcgggcgagg

SEQ ID NO: 132442 - DNA, 713 bp, Zea Mays
gtgaggggtacatggggcataaatgttggtgagccaccaggcttgatttgtcaactttgtacggaaagaaatcgtgtgactgaaagaattttgatcaatcacctcagcatcaaagtgagaacctttccagattgttaagaagcccccagatgaaccaatagaaggtccgaaagcgaacttatcaaggatctgttgcagaagcgacggatgtaggagtcatcgaaggactctttctttgtctcttgaatacaaatgatgtcacaattgatttccataatgttattgcgcaaggagttccatttgatatcagagttaattcctctaatattatgtgacagaattttcaagctgtggtgtaaattctgaggggagaaagccattgatgaacaataatcttcgcactaagaaatcccggtatgcatagcatacatcaatagttcttcataaataagtttgtccataaacagaaatatccagaaaaccaatatataagcatgaagtgggggacataaatcttcaaaggggccaaactagaagtttccaaaaggagccaagataacaaataacagaaattccaaacaccataattatccatgccgagaaccaaagagtcatcgactctttcagagtttgttacggcaaacaaaaatagcgccacatgcgcgccatcaccaacagttatcatgttgctatacatggaaaaccactaaaag

SEQ ID NO: 132443 - DNA, 641 bp, Zea Mays
gcacgctgacatgaggaccgcatggaataaaaaaacgagcctcaccatacgctgtggccgggtcgctgatccgtgggactgcagtgccagtgtcagctatcaccgcacgtaatgcattttactgagattgccgcatgggcccgcgtgtaagaatcctcaaccttgggacaaaacaaactcgaccgctttcctcgcatggccatcgggacggactccgaacccggccttcgtccccgcatgaaaagcgccacggcgggcggatcgcaaccacccgcgcggatttcccagctgagcgttagccgacccccccttgggcgcttgggttataagcttcaagttgccgtcatctccagccctagtctcaagaattcgcagcacgctggggttttccttcattcatagccaccggtaggagagagagagatagaatcgtcaccatgcggatcttcttcgagcgctgattgctcgggttcgggtgggggatctgtggtgttcatcggtgctcaccagggtggagctcgcgaggtgccgccattgccgctgatttcgccaatgctgcagcacgcaaccaccgccgtcagggcctcgcaagcgggcctaggactatccccagcacaaccaaggtttgggcatggcttcct

SEQ ID NO: 132444 - DNA, 317 bp, Zea Mays
aaggattctcatcttatcctaatagatctaactaatctcaaaagattctaccatggtcttagaaactcatcttgacctcttgtccctaatccggaagaagaccccaagattcgagaagaacgagatcaaactcgttgaggaatgataatattcaagccatacctccaaaggaatcaagatccataatctggagcggagtctttcccttaccctactctttcttaccaacacctactcatacttctaggacatcttctatcctacataataaaatggtcatccatataaacacctatgctttcctaatcactcactaa

SEQ ID NO: 132445 - DNA, 647 bp, Zea Mays
tgttctgtcatgattatgcatttatctggaatggtttatgcctttttattcagttctttacgatatacgataacatatacatagtgactacaatgcgccagctatttagtttttgcaataaaaagactttatgccatggaatgaatatcaatttatatggctaaacaaatccaccattaacatattgcttaggaaataattactttgcattaatagatataatcaatacaatgagcttttaatgcaaataatcatcatatagtaacatgatcataacattttcatataatcctatataaaattttgcatgtatgtttcacaatcatgtcacataatcgtcatcagatccatggtctctagaatcaaccattttgtccttctttgaagtcaatgtctcattccactgaggggccatcgttgaattcttgtttctagacccgggcggccgtccactttttctattagcaaggctagccaatttaaccctattctcctccacacacagacatgtgtgactgttgtgtccatcagcaatgccacacttttggcacttttgattcttcttcttttatcctttcgcacccagtttcacaactctttgctcactagttttgattgtccttccctttggccttgcgttatctggc

SEQ ID NO: 132446 - DNA, 2366 bp, Zea Mays
gttctcggtgacggcgaagtcgttgtcacagacagtgctatggtgactggtggtgttgcggtgcaggagtagaagccatagcaggaaaggggtaagcctggtgtcttttgttagctgttgattagctgtcattagctgttttctgttatctgttgattagctgtcatcagctgtaatggtgattactctgtaatgggttagccttagtagagatctataaatactgtaaagactagctggcaaagatatgaaataacagaaccaaatccacatacctcgtgtgcacctgagtctgtcaggtgttcgtcggagaacctcacgtcgcggtgactctgccgcggccacggggaaacgtcacagtggtatcaaagccgacgatcttcggagaccgtcactacggcgccgtcaacaaaaccgtccgtgcagacccgtttgctgctggaagctatggccggagcggagctgaagggagaggagcgttgggataagatgatgcgggtgttggagagggtggatcggcgattggaggcgctggaatcagggcaacagtctgcaaacgaggctgcgcgaaaggcggaggaggaacgtgtcatcctggcacgacaggtggacgagacagggaagacggtttcgcgtcttcgactggaatggatggcgcaggaaatggaaggtatggagtctgatcctgagagggagaatcgtggtcgacgagagtttggtagaagaaatttggaggagagggagcagtatcagtttggagggaatagaaatttggaagagagggagcagaaccagtttaggggaaatagaaatttggaggagagggagcagtatcagtttgaagggaatagaaatttggaagagagggagcagaaccagtttagggggaatagatatttggaggagagggagcagtatcagtttggagggaacaggaattttcgttccattgatttgccaaagatgtccttcccaaagtttcaaggaattgaaccagggatatggatcactaagtgtcttgagtacttcatgatctaccaaattccagagttcatgtgggcatcttctgcttctttacacatggagggaagggctggtaggtggatgcaggtgtacaaaatgagacaggggttgggtgactggtctcattttgttcgagctgtacaggacaagtttggttctgaagagtattctcagtgtatgagggaattggttcatatgacacagagagctagcttggatgaatatattcaggagtttgaggacagtcgatatgcaacaatggtgcataatccaaggctggatgagactttctttgtgtcccagtttattaaagggttgaggggagaaactaagggatatgtgatgtctcagttgcctagaacagttgacagggccatagctctagcccagatccatcaagaggttttggagaagggaggatacaaatttcagaaaggtctacagtcaaacaaaggtctgggaggtactgtcaagttagatgtcaaaatgggtggaggatcgtcagatatgactaaggaaagacaattgagggacttcagaagattgaatggtttgtgctttggatgtggggagaaatatgaacctgggcatcaagccaagtgtcctaaaagggtgggtcctcagctgcatagtttgactgtggaagatatgggactgctgttatcagatgaagttctgcacaatttggatcaggaggaccaaacgttggaggaatcctacaagctctcactaaatgctatcagtgggacggatcaggaggggtgtatgagagtgagagcactgatcaagaatcaggtgatggtgattttggtggactctggtagttccacaacttttgtcagccagaagatggtgaacaagttgaatttgcaaactgaaagctgtcaagctattagggtgaaagtggctaatggggagatgatgcagagttcaaagaaggtgccatgtttgtcctggtgggctggtggacatacttatagtacagatatgagagtgcttgagttggaagcatatgatgctattctgggttatgattggttaaaggtccacagtcccatggagtgtgattggaacaataaggtattgacctttgtggacagaggggtgcaggtgcagttaaaaggggatgggaatgaacttagggaggtttcccaggtgacagcgctgcagttgacaaaatggatgaagggtaatgaggtatgggctctagtgatgctagagcaagttccagtggagaaagatgacaaggtgcaagaatctttggagttgttgctaaaagagttcgaagatgtgtttgcagtaccctctggattgccttcttctagagtgtatgatcaccatat

SEQ ID NO: 132447 - DNA, 1160 bp, Zea Mays
cattgagcatgatctgagtggaagtggtcataagaagaccactaatcacatccctccacacaggaccaaaacccaaccgctccacctcaagaagaaaaggccaagagaccgagtcgaaggccttggagatgtctaacttgagaagaattctaggttgtttttgagcatgaaaaaatcttgccgtctgctggacgagcataaaattgtcttgtatgaatcgacctttgatgaaagcactttgagctttggaaatcagcccctcaacctattggcaagaaccttagtaaccaatttggggcgaagctgtggatcaaactaattggcctgaagtccttggcaacaagagcatcattatgctttggcagcaggacaatgaaggctatgttaagaaacctgaagtttctgaaatctctcccaaattgttgaaacagcagccataatgtcatttttttataataggctagcagcacttatagaaacgcccagtgaagccatcgggcccaggggccttgtctgatggaagttgcttgatagtgctcaatacttcaacttctgtaatcaagagctcaagagcctaaagatcatgctgctgtatgtctatggcttccaggttgatagcttggtttctttgctccccacttccaattagattcgaattaaaatccaggaagacttcggccttcccatcatgagaggtgatcagctgatccccatcctttattgcagcaatgaaattcttcctcttacgaaaccttcagcatgaatgaaaaaacttggtgttagcatcaccattcttgagccaaagaagccgagatctggttctagccactgtcctgagcagggaggcaagcgccaaagaatgtttttcaacctctgcagcagctagcattcaagatcattgagatatctgctctccctagccgtttccagctgcaacatcacctctctatccaactcaagctgcatcttgaaattgcccactttcttgtcactcccaacactgcagccccttagctgtagccttcaacttgagggagagggttttgagagggcaagagatgttctggacagagttccatgcactggaaaccgcatcatgaaagccttcaaatttcggccaaaagggctcaaaatgaaatcgcctcttaccccaatgattg

SEQ ID NO: 132448 - DNA, 675 bp, Zea Mays
ctgctacagacgctatcggcactgttcatcatcggtcgcacccttccctcctcgtcggccttgtcctctagccccagccactggctcccccctcctctctaccctccccgccgacatgtatcccctgtctccctagctgccgcgctgggcgggcataacccccatggatccgggcgcagtcgccatcagcgtctacgtgaccagcgtcgccatcaacgcccctctggccgccgccgatgaactcgtcgtgggcctagccaccagcgctgcagttgggttgaccccgcagcgagtctaccgaccggtaggccgtcgccaccacctcgcaggtcgcgctacttggcttccactcctccaacggtctccgcatcacccctggtgtatgcaccgcgcccctccgcaccagcacgctcgccggggacgaccccccttcaccctcgccctggagtaggagcgcgccatgggcgccaccctgagtgcacagatggccaccgcgcagcgtctcatcttcggtcaccctccagtcgcttaggtggctcctccagtcactcctgaggcccctagcctctagacttgacgctgaccatatcgccgctctccacgctcaggccgtcgggctgcataacatccggccccttgtgtccatcgtgttggacccgacgtcctcccctaccc

SEQ ID NO: 132449 - DNA, 409 bp, Zea Mays
ttacattggggcaaactatttacagacaaacaatgcttcattttgcaagtattacctccgtaaaattagaaaattatccccacaaactttacatgtatagaatgaatgccagcttgatttatggattgagctggcaatatgttgatctgcttttcttttcctggtgacaatggttcttgtaaaaattccttccagtataaatagaattggggcttcccattctcaaaactggtgatatgctgtttgagttaatttataaattactatagtaaacatgatttattttttcatgttcatgttttatggcacttattagactatgtgctttcatatggaaattagaaacactgctttttgctacaaattcgtgggtttgctaaatgtttgcacatgtttaactttgaaattg

SEQ ID NO: 132450 - DNA, 352 bp, Zea Mays
tggggcaagctagcattctgctagctagtggaaggagaaggacgacctggtcttggaatctcagggcaacagtagcattctgatgttacggtcgtcgctgcgccgctgcggccaacaagacttgccaaatcagacgtattctcctcctgttttttcttcgatgcatggaaacaacgagtggagagtggagactggagaatttatatcacggggagactggagagaccaccgccatgcatgctcaaaactagtggagcttgaccggtgttaagtcttctcaggagttaccatccgagatgtttgccaaagcggattttcaagtgtgttcggtgttttttttcttctttttgaa

SEQ ID NO: 132451 - DNA, 658 bp, Zea Mays
ctctatctgatactatcttccgtggaatgccatgtagcctgactatatctttaaggcatatttgggcaagggcggctcctccaaaagtggtctttactggaacgaagtgggccaccttggtgagacgatcgattattacccatatggaatcatttcccttctgtgatctgggcagtccggttacgaaatccatgcctatttcttcccacttccattcgggtattgggaggggttgaagtaggcctacaggcttctgatgttcgacctttgttcgctgacaggtgtcacatcgggccacatattgtgctatttccttcttcatccctttccaccagtatctggccttgaggtctaggtacattttggtggtccctgggtggatagagtaagctgagttgtgggcttcattgagcagggtttctcgtgcctcttccactggcacacacaagcggttcttgaaccagaggactccttgctcgtctgtcctaaggtccggaagttgctccttgcgagctcttcccataaacctggctgtctctgcgtccaggcgttgagccttgcatatgagatcttctagatttggcttgacttccaggctacagttgtctcccagacatgcattcagctgagctgattctttcttccaatcttccagaaa

SEQ ID NO: 132452 - DNA, 357 bp, Zea Mays
gtggagaagtgggccttgccgccttgggcttggactggacatgatcacgtgcacatgccatggcccatgatctgatgatcccaccaagtcaagtagtcaacaccgcacgtccgcacaccaagccaattagccaagctgccaaagtgcccaggcggcaaggcacgacgctgcaaaacctagaagtagctagccgccacccgccaccgcaagacacctttctccattattctagtgatccagtccctcatcctcggtggcgcgtggtggactggtggtgcccgaggcagcggccgaaccagacgtcggctgcttcttcaatcttcaccaatcatcactcatcaggtcgctggttctttt

SEQ ID NO: 132453 - DNA, 586 bp, Zea Mays
aaaatgagcatatttggagaatctgtccacgactaccaaaatagtgtcaaaacctacagacttaggcagcccctccacaaaatccatagaaacatcctcccaagcacctgtagggataggcagaggctctaacagtcctggtggatgcacttctttcacttttagcttgctgacatacttggcactgccccacaaactgagtaacatcattcttaagtcccttccaccaaaacattttttcaccctgtgataagtagcatgcactcctgaatgccctccaacagcactgtcatgcaaagctgtgatcaacttagtccttagagcagagttgtctccaatccaagtcaccccattcctccttataattccctgatgcaaactgtagccctgctcattaggactttgaatcaaaagctgagtcttcaactcttgagcctccatatcagtttcatatgaatttaaaacctcctgaacccaaagagattgtacctcagacacttgggataaggccatgagataactcactctggacagagcatctgccacaacattttccaccccctttttgtatactatctgaaattgc

SEQ ID NO: 132454 - DNA, 702 bp, Zea Mays
gtaaagctggaataaaattaaaaaaaatatatgatgatgaaaacaaaatggttgtagctgcaaaaattgaactggtaaacttggagcataaccatgagttcataactgacgaagcagagaaacaacatttacgttgcaacaaaattagggatgctgagttcataaattttgtggatgcaatgcatgatagccgagtgccgcagcattgcatagttgattttatatcagaaatacatgatgggccagagaacgtaccggtaactgctcaagatctgaaaaacatgtaagcaatacttttttgttacatgtgtatatatcaagagccatgaatattactatagtaaatgtgtgtgtaataattttttgtgcaaacaaatgtaggagggcagccaggagaagagaaaactgcacaaatgatgtagccaaacttttggctttctttagagaatgcaagaaacagaatccacaatttttttgtgatttccagctagacaatgatgggaaaatagtgagtattttttggtcacacgcaagtatgtagggggaatacgcagattatggtgatgctgtgacatttgatacaacacacaagacaaatatatatgataaaccactgggcatgtttgttggagctaacagccatctgcagtgtacagtgtttggatttgttttgttgggagatgaaactgtacatacttttga

SEQ ID NO: 132455 - DNA, 2112 bp, Zea Mays
cgcctccttaacttcatattcttgtatccttcgtacaaaacccctgttgttgtcatcgaatggttcgtccaattctattgtagcactctcattccctccattgaacaatttgttgaagtactccttccatctgttcttgatctcttcactcttcactaatagttggtttgcttcgtccttgatgcatttgacttggttgacatcccttgtcttcctttcacgaatcttggccatcctatagatatccttttctccctgctttgtgtccagccgttgataaaggtcgtcataggcttgaccccgggctctactaaccgctcgctttgcagacttcttcgctatcctgtacttctctatgttttctgcacacttgtcatgatgtaagcgtttgtagcaatctttcttctccttgatagccttttggacatcttcgttccaccaccaagtgtcttaacaaaccaaaccaatataatttgttcggcactctacttgccataacaaaagctgtttagtgtttacagttgaaaaacatgcacaaacaaatggactaattctgaagacattatagttggtctaaaattcacaaaaagatagaaacagaagcaaattgtggtatagcaacattgacaataatatgacaaaatcaattccgtggtgcactacgagagttactagaatttcaaggaatgaaatgcagggcagaaacaaacctttcatcacaatctgaatcagggtcacacagatccttacgagcaacaggctccatccagtctgttatcacgtgtgcgcttgtaaggaaagaatcctgaactttatcctgcctgttttgagaaaatgtgctctgtgccatgtagtcactggctatcacagaatctgaacatggcttcaaagagcttgaagcaggtggacagtaggcagagctcgaagcactaatagagatatctgcaatattatgaacacaactctgttcgtctactggctttctttggagagaatcccatacattcatgatccaccggatgctgctgaattgtaaacgtaattctaatgaatcaactgatacatctgcatcaattttctcaaagctcaagcaacccttattccatgggatgcttaaattgagtttccctgagaatccaccaatgggaccggttaagactgcggtagtactatgatgtgctgaaatgtcagctgttcctctatttagatcattttgaagcagtgtgtcgacatcatccatcttcaaaaactcaatgactgcctcacggaaagttaaaaagttgtccagtttaaatagaccaagttgggttccaaattccaactctttaattcggaaaactagagatcgactagtttctggaaatctactactcaaactggtttgaggatcaaatatgacataggcattctttaacttgatattaaagcttgtcagaaaccgtttgacggcattggcaattctctttacaccatcatccacatctcgagatacagaagtggaacactgattactatcggattcatttctttggatcttgactaaagtgtgtgtgtcactagtactaccagagacagagcattcagtatgcacatcatcaacttcacttgcaacagatggagaaagcacaagctccaattcttcaacaacaatctcgcagctagcagcgaatcttactagcaaggattttattgatccttctttcagcgtaataggggatcctgataactgaaataatgcagaaaattaactgatgatttcactataagacaggaagcaaacaatttcacttccgcaggttccacaactttttttggtgggggcattcaaataagaaatgattgtggtgtgctaagtacaacagtgaatcaaattagaagaaaaaatagtgagcaaagggtattgaagctacaaagaacagcaagtaaaatcatagactaactggtcacatgatgctttctgctaaattgaatataacactagccacactcggcatttcagtgtgtgcaaactttacattgtaatgtatttcaatttaagatgcttcatatgaatgaactacaacaaaggtgcatagcctcttctcctgcccccaagatcttattatgttgcta

SEQ ID NO: 132456 - DNA, 763 bp, Zea Mays
atctagagcggcccactgaactaccttatgtctcattccagtctctccaagaatctccttgaaatgctgatgagcctcttgcattttgtcttgttggctagacaataaagtaccattccgaaggagagatctgatatagttcttctttctcctattgttggctaccaggtgaaagaatttcgtgtttgcgtctcccatacgcatccataactgtctggagtgttgtctcgcagttgctttttgaatggaagcaagaccaagaattttgattttcagtcttctcctgaactccaattcatcgttggagagctgtctattttcttgcgccttctctaggtgagtaagagtgatctggataattgccaggcggatcttgatgctccctactgttttgcgtctccacatactaagggccttagctgtgcgtgacatcttgacatgcagcctcagaatggcatcttcagagttaacatcagtagaccaagctcgattaaccacctccttgaaatcgtccaactttgtccagaacgattcaaatctgaagcctttgaagaaacgaaattgtgaacgaccttgcataataattgggcagtggtctgaagtcatagtgcaaagggacggcagatctgccgatgggaagagcccatgccattgagttgtcccaaagaatctatctatcctggtcattgtagggtccacttgttcatttgaccaagtaaaggctctatcattgagctcaagctctaacagatgcaaatcatca

SEQ ID NO: 132457 - DNA, 371 bp, Zea Mays
cacagatgatctcttcccagaccatgtcaaacacattgatgcgggcgagactgttgggagcaaggaggagaaggaagactcgactctccccaaggacgttcatttgattcccgcccttcgggagaacggtcatcctggacaaagaattaaggtacctgtagtacctatgcatgttggcggtcgtccagaactcccgatcattagagacatgaataaattcagtctcttcccgcatgggcagcctaatgttatgcactcgcatgttgctgccctgaatatccgcatcagagaagcccaaaatatgggcaaaacgacgataactgactttgtgccagttaccctggatgaagaaatacatgactgggaaatca

SEQ ID NO: 132458 - DNA, 477 bp, Zea Mays
gtatttttctcgcgggggcgagcttcttcagtttcttgtcatagtccatctttagggtgcggtaagcctcacgggtattggtttcctcgccttcagctattgcgaggctctcttgaagggatgccttctcccctgaaagttccctgactttttgctccagactttccacccgggaggttaggtaggtgcagtggagggtgaggtcatcatattggttatcaagggtgtgaaggtatccagccatgtagacgatggtgggatcatcctcaataggatctcctcctgacagggcctgaagtcttttcctccaggtgggggtattcttgttgctaggtggaaagtagcgaaggggggtttcaaagatcaccttgttgtagttctagcacagttgtcggagggctgttcgggcaacattctggcaagtatctgggaagcggtatccggtaaaggtgacttggaaggaaggatggttcagat

SEQ ID NO: 132459 - DNA, 652 bp, Zea Mays
ccatttggccacatgcaaaatgtgaacgataaagagatggcggttaggtccactaggatggacaggttctcggcggagcgggggtgctagagtcggagtggtacctgcacccaacatttcatcaacctcgatgacgcgcctggcccttgccagcgctagcgaacgatcgaaagaaagcaaggcgcagatcgagtgagggtgataatggcgtatgaccctaacgacgacgctgaatgcctctttgtctgtttcaaatgtggtgtctcccctcctaatatactgctccttttcctcaagatctgttgtcactgctgtagagtcgagatggcagactagaggaggtgaatagttatttataaaactaattgcaccacaagatggcggactagcaaaactcactaattgcactacacaagcacaacgagagagaaacaactacttagctacacaagcaaaacaaaacatattaattacacaagctaacaagtgagtactattttacaagtatgactagatatacatcatgcgtcacttgtgaaacgcgtaggtttgttcctctcctcttgattttcgtctacggatggaccgttacaatacatatgggtcgtgataaagcacccaagtccaacatggaagcaacacgcaacataat

SEQ ID NO: 132460 - DNA, 383 bp, Zea Mays
gacccctgtacctcaaaatgccttgagacaaagtaaaattaccctgagaatgcccagttactgacagttcagacaacaattgttgcgcatgggcatcactggaatatccttccaccacttgagtcaaccactgtggtgtacctgatgaaatactgaacagcgaggattcactttcagacactggtcggcatgacaaagcatcagcagccccattgtcaacccctttttatatacaatgcgatactgtagaccaagcagcttagtgaatacacggtgttcccatggcgtgctcaaacgctgctctgtcaaatgagacagactgcgatggtccgaatatataagaaattttgcatgctgtatatagtgacgccacttgtccactg

SEQ ID NO: 132461 - DNA, 707 bp, Zea Mays
cgcccacgatctccctgccgtgttcgtgcccacgaccacgcgttctccgaccacgaccgagcccccgcgccccttttgaaccccacgccctgctcgcccacctcccctcttccatttgcgccctctgcccagctctctcgccctctctctcgctctgcccatgcaaaccgagaacctccgccaccgcccgccgacgtccacctcctgttccgtggccgccgttgcgcccgtgccccttctagtgccacggtaagcttcgccttgccgtcagctactcgggataccctttagtgtgccctccccctctctagtctgtctgtttcacgctcactggagtggttcttgcgcagctggagctccaccaccatcaccccgtcgcgtccatgtgcctccaccgttgccccgtgcctccagcgcttcccctcaaggtgagcaacctccccgcgcccctatttcagtcactggttagcacacaattgctcgccagagttgccccacgccgccgttagcccgcctcgctgtgtgcagcgccctctagtgctcccgcgccggcgtggtgccctcggctgagtctgccaaatccccctgtgcgcgcctaggccaacccccaatactctagtgccccgccgtggccggtctgctcgtctctggtgagttcccgctgcgggaccgcgtggcaccaccgtgcccatgtccacccctctgcc

SEQ ID NO: 132462 - DNA, 1150 bp, Zea Mays
tttagatggaatgaaaagtggattaccaaagcatggaaacttcatagcatgaactagattattccatagatgatgttatgctcagttttaactcataaaataagcatggtcaatttcttaagattatgggaacaagtctaattcataacatggagagcgatgaatgtataagaatcatgtccaatttaagcaagaagaaatacattataaatcatcggattgatttttcttttcatgttagattacacatttccatagagaaacttattctctctatttgagactacttaggttagatagacaaaagcattagtctcacaattcaagtcataaagagatattccctttagaagtgtcctagggatttgaattccttatatgacactttattcttttaagaacttggaatatgtctctatgtctagactatggcaataatgggatgattagtgtaaacatacaatatggtacttacaataatttaaagcatgtagattgccataacattgaaatgatgaaaattcaatctaccatatgagaggaactttctccaaagaacggtgacataatttgataatattcttaagtgcttcctttttctatgtgactacacaagacacaagagaaatggtaattgaagatacttgcacttaaagacataagtgttaccatcctttggctttcctccatgttgtaggctttggtttttccacataggataatcctttaattcctacaacttcaatatcttgctcgagatgatatgagtagatataataactcaaaataactttgggtcaatcttaaagatatagattattgtaagattgatagcttgagtcaatatgaattgaattgatcctctcaagcacctccaaagcttcatatcatctctttcccctgcaaagcttgtcaagtatattttggtccccatctcttgatgggtccatcaaggttagtcaacaaagatctaggaacccaaatatcctttgtgccagcactttgtaaactcattacctttctagcacaagtttcagttttgggttgcctagttacatatgaattaattgacaagttaggagcaggatagttaccaataggacattccttacattgatgtcctttcttttggcatatgtagcaaaggcga

SEQ ID NO: 132463 - DNA, 651 bp, Zea Mays
atccattccgcaccatgtggaatggagtgttactgctgcggggcacagattcaaagacacctgccaagtcatcgctcgcaaggcattgagggccctgtgtcaaatctatgaagaagaagtggccgacaccccgctcagattctttccgccctttcagagagaccgtccagtttggatggccaggatgcgtgcattggaaggacaacaactgcttgaggacgaccccacactcatatacctcactacatacctgctcaccctggatgcacagtatgatttcttggctcggcactaccgtcagatgattgcccgagcagaagatgcagagaagtgcaactgtcagttccatgtggatctcacctcagctcaagcccagctgccttggaaagtcgtgaagttattgctattgaagccctgaagcaagcgaaggatgagcacatccagaagttgatggaggcctaccttggtcacccgtaaccaacgtagagccctacggatccaagagcccgcttcatccaacctagttcaacccgtgaaagatgaagatccccagattcttgaaggtcacccgatctctattagaggagataagaaggcttgggaactcccggaaggagccatagtcttggaaggaattccagtctcccctca

SEQ ID NO: 132464 - DNA, 498 bp, Zea Mays
gtagagcttgaagtctttatttcttccagtacatctagtacgtggaccatccttttcctcttaggggtaactgtaagatctttttgtgccttcggcactgtcacccctgccgaaggacttgtaacttttgatatctttgttctctcgaccttcggctcacccaatttggccaatggtgccttcggcgttgcagccggctcttcagtcttctgcataagcgcagtttctttggcttcgttagccgaagaggtctcaccgccaaattcaggcactgtggccgtttcaatgtatcatggtcggtgagtgaggaccttcactttcttcctcttcgacgtaggctcactagagacagccaaagcaacatccttcacaggagccgcacctttccttttctaaccccgtagtgggtatcggtagtcaggggtacacaaatcctatagcatcaaaaactctgtttagtctcttctttttccgggtcccgaaggccgcagataatgc

SEQ ID NO: 132465 - DNA, 345 bp, Zea Mays
ctggtaagtaggtaaacatagtcttttggaatgtggtatgagtttagtacgttgatcattagtgtatcacaatgtgagaatatctagttgtaggtatgagacaacataagtcttccttttggaaaggtatataaagagagtacaaaacctaaagggagcattgtaccccaactaaaaattatgtagcttggaaggccaatgggatcttaccaaagagcaagtgaccaagttcatgtcgtaccactgccaagtcataaacaaaaacgacagtagcctacaaggtaatgtaacattatttcagtctattgtgcatgaaagtagtaccttgtacatgaccatagtgac

SEQ ID NO: 132466 - DNA, 461 bp, Zea Mays
acccaaccagctgagccatgttttaacacttcaggtccaatatttacttcctaggcttggagttatacactttgttaatagtactcaaatatttaaaatcaaaggtattgatcaatgttgtgttgacgtggtagccatcaccaacaaacaatccacaatactttctggacctatttatcatgcagcatatgcatactgacctagtgctcctgacaatcataaaaatgaacttaccattctctgaacgccacccaaccccactagatcgtttaaatcctgccaacataaaatcatcatagtttatcctaacacatacatgtgcttgcaaggtttgacaagaaaccatatagctttatgtttccaagactacaaatttgaaattatgcacgtcttttgcctcataagtgttttttaggaaactttgcctcataaataatccacacaccacaaatgtcgtcttt

SEQ ID NO: 132467 - DNA, 818 bp, Zea Mays
cagttatagtcaagacactgaggctcagtcgttgctgtccaagttggcaatagctcctagtgctgtgcctcattttactctggtccatggactcctgaaatacaaaggacgcatctgggtgggcgctgatgaccaacttaaaactcggatcctgacagcccttcattgctcccctgttggtggtcactctggggcacctgttacatatcgtcgagttaagagtatgtttgcttgggccaaactgcgacaatcagtccatgaatttgtgaaacagtgccagatttgtttgcaagcaaaaccggacaggtctgcttatccgggcaagctccaacccttgccggtaccacacacagcttggcacacagtttcattggacttcgttgaaggcctccctcgctccggcactgctgattgcatcctagtggtggtcgacaagtttaccaagtttgcccatttccttccattatcccatccttacaccgctgcttctgtcgcacagttattcctgtctcaagtgtaccgtcttcatgggttccctatggctgttatatcagatcgtgacccagtctttactagccagttttggcagtcactgttcaagttagcaggtgctgagcttcgcatgagttcatcttatcacccccaatccgatggtcaaacggaacgagtcaatcagtgcctcgaaacattcctacgctgctttgtaagtgcctgtcctaaaaagtggtctgcgtggcttccctcggctgaattctggtacaatacaagcttccactcatccctgggctcttcaccctttgaagtactctatggtcgca

SEQ ID NO: 132468 - DNA, 1250 bp, Zea Mays
gttagcagttgcctacttgctggtatggttactggaatggagaaatccaaggaaaagttatgtcttctgtagtcacattaaaatgcacctcatactgtagataaactttataatttaatcatacagtttaagctaacatactgagttattgacatctttaggaaactggcataatattatgtagctttaatgcccattctgcccctcgttaaatcgaacctacatgttttatgtggggtgcgttactatctatatgtgcgattagtaggatgaaatggactcatgggcggacgtagtcacaaagttcctgggacgattaggtcgtggaacaggggatgaggaacatgatatgctccttaaaaaaggtttttcacttcggggatgatattgttcctggaacggaaacggcgttcccggtgacgaacatgtgatggtgctcatgggattgagtatgcataatgaaagattttgaggaaccatcatgtggatgtgctggactatggcaacattctcggtttaatgtccaatcacatgtctaaagcatgctggtgatttttataagaattcagacataaacattggcgcccaaaggtttgagcattggtctttgttgtgaactgcattctatcctgtggcgagatcagatggtgatgcagtttgaatggagttctgcattgcagtctttcaggtatatttgtacaatatggctgaaaggaagtaaaagtaacagcattgttctgttgatgaaaaaatagcttcagaattcagaatgttgtgccatgagttagttgggttgtcggatcttcttgttgataatgtttgacaccaaagacgaccgtgtcctgtgaagtcagctagctacattggcaaactgctctttctccatggtaacatggagtgaacactcggcaggccacatgtgcaaatttggagaccattaacatgtgcaaatttggagaccattgtgcaagtttggcaatttctttgtaggaataacattatggcaattttatcgagccctcaagcatgtttacttctttaggtcgtacctagcctaccagtaccagcgtattagaattttgctagcacagtttgaaaaccatgcgtgtgcaggtttgccaaatcaagattgcaaaggctgctgcttacatatacggtctggagaggtagagcagcctgagctatgcatgggctgtatggtggcatgctgctacttatttcttgcaagaatctgtaggttgaactattcg

SEQ ID NO: 132469 - DNA, 1152 bp, Zea Mays
cgcaatgtttaagatagtaaacactaaggatatgccagaaatcccagagagactttctaaagaagggaaagatttccttagtttgtgcttaaaacgtgatccggcacagcgcccatctgcaactcagttgctgcgccatccttttgttcaagacaatcaggaaatcagtggggccaaatgcaacaccactttgagaaatggactatcttcgcctgcagaggcatgtcataaaaaagtggcttacatgctggtccatttttaatagacattgtgctagtttcttagaagcatttccagtcatgttaatgttttgcaatgatcttgctacccttaaatttgtttgcagtccaacaaagaaccttcattgaagagaagtgttgctcctctgcgggacattggagggataagagcgcgaggttttacgggatcttcctcagcatgcgtttcaccccacaaaacttccaggcacagtaacctgcatttactgaccatccttctttccggttcatcccatcacacccagtaccttgacttctgccatcatccatcctgcagcaggcatattgatgtgagagcaaacatgtctctcccggtgtctccatgctcaagcccgttacgccagctgaagcaatggaactggagctgcgttgcttccccatcacatctggcattctcctcgggatctgtggcccacaacacagtcagtgacatgcagaaccagatgagaggaagcgacccagttccagatccatggcgcgacatcagccacagacgacaaagcccatatgactccccaaagagattctgattatgatccgtacagctgtaggagactatcacttatcggtattttcacggcaaagttaggtgatctaggagatgtttgcgttgaaaaatcctcggtaactaggaatcctcatgatctgatctattgtgtacgtagatgataaaggtgtagctgatgattgtaaactatgtgcaggtgttgtaaatgctcattgtacatcctgtatagattaaatatgacgatgcaggtgttgtaaatggtcatataaataaagtaatagaaaattacacagatgaagtttcttcccttgcatgtttatgttgtgactagctctgagccctgtgacaggacaaaatggatggacc

SEQ ID NO: 132470 - DNA, 463 bp, Zea Mays
gggccccaataaccctgttcctgcaaggatattaccacccaagtgacgtcaacgaggccaagcgcctcaagcaccgaagccgggacttcgtacttattgggggccagctatacaagaagggggtcagtcaacccatgcttaaatgcttcaccgaaaccgaaggcattcaaatccttcgcgaagtccacaacggaacttgcggctcccacttagggcccacggccctcgctgccaaggtgatctgtcaaggattttattggcctgcaataatctgcgtcgtgaatcgagtcacgaggtcgtgtgaagcttgccagaagttttctccctgctcgggcaacccttcgcagttcaccaagcttattgcccacacatggccacttcaatgctgggggctggatattgttgggccactacctatggctcaagggaacctcaagttcacctttgtcgtcgtcgaatattt

SEQ ID NO: 132471 - DNA, 289 bp, Zea Mays
aagggcaactgaactccagataagcataaatgcatgatgtggacatattcagatagagttagatagtcatcacggcttgaaagggataacctctggtcatctatataaggacaagggggtacccatgcatctcagatctcatctcgtcacattccatcaccacttcatagctcgttagccttctcatagcaaccacgcaaccactagattaataggagagctcaccctccaccacccatagctcatctgtaactcgtgtacgccagtaatactcaaatacttagcctcg

SEQ ID NO: 132472 - DNA, 3074 bp, Zea Mays
cctaaataaactttattttatttactccaaacttatcaaaggctttctttagatttcatctattccatattctcctcaactggatggacttctggggcggcaggggttgcaacccctcactcacgcgcctcctttacgacacccaaggtgagattgcggttcacaaggggccggtgttgggcctccgttgcccgctaggcccaatgctgcagcccacatttaggcctatgacatctcccccttctccactcagcgtgtcctcgcgctctattatagtctagttgttgatgcagtttgagggaagaggttctccaaatgggattgcctagatcctgacaatgagacgatcgtggatgatgttagccaagatctagttgtcttggatcctgatgatgatgagctcaaagtagtaacgatagttgctagaggtgaggatcgatcggtgtatggctacgtcaagagtgaatatctgcatagcttaaggagatctctcaaagctatgtaccttgttgctgcgaaggatgaaggctgccatacgacgacaaattgtcaacatgatgcacatagattgtgttgttgttaggtctagcaagtcaccaaacatgaacttgccccgttgaagttgtttggcgagaggctcgagtgtctcaagtcatggatggtgttgatgtgttcttggtagcgaggaagtggcaattggcgatgtcgaagaagatgaaattgacgaaggaatgataccttgcggccactcacggatcataaggatgctgatagggaagctgcaggtgatggctgcagtcgttggtggcgtgtagaaccccaacactagtagtcgtagattcctcatttcgccaatgacgacgtgtctcgaagaggtcgagcaatagtggtaatgtcgtggggaggtagaattgtccgttgaagaagaggagatcttggtccatggactaagttgatgcagctctcccgcctatgatggtggtggtgatggcgcgtagctcgagtaccattgcctatgatggcgtcgtacaatgctgattttgtcgagggcattaggttgacacggttgaattgccttgctcatgttacatcatggctgcgatggagaccatgatcgtgggagaagtgatgggtgtcgaggcaccggtaggattggcataagacaggaagaacaagcaaattctatggtgctcaacggtcagggacattgacgaagatgatggtatgttcgtcccattagaattgcttctctagggtcacaaagttctagatgatgttgccatggtcgaccaaccatggcatgtcgaagatgacgtcgatctggaacgtcttggtgttgatgtgaagccaagtgttgaggcaggcttcctggcgagcaatctcattgccactgttgacaagctttatggtttggatgcgctgttccgcaaggttggccggcttggcaaagttgatgtcgatgatgttgtgggtggtgcctgttttgacgaggatgagcaccaagttggcaccttccaggaacatggtgtgtcgaccacacgcacactagagtcttggggctgatcatcatcatgaggccagggtcgacaccgtcgttggcatgacgagcgtgatgtctaacaagtgcttgcacttgtggccacaggcaaagggttcgtcacagttgaagcatagcccaatgcaatgacgctccatcatctcctctgttgtaaggggcttgaaggggtgaggtggtgtagccggcgtaggtgtcggatgaccccggtgttatcgaggcggatagggttgttgatggcacctttgaatcttggggaagccgatgtgtggaatgttgtagatttggtgttgtcagcgatgacaaccgcctgtcgcttgtatgctcatggtagggacatggccatctctatgtcttggggttctagagctcgacatgtcttcagtggctcgagcaggtcagcagtgtagacgttcacctgctgctgttcgtcaagtgtctcggtgcgcaccacgtgtgtcaagatgtgctccatgtagtcgtcgatggtgctagtcttctgcaaggatgcaagctctcgtagtgtttgcgtcgtcttggcggcccaaaatactcgttgacgcaactgcaaagcatgcccagttggtgacaactttatcccgcgttaggtgcatcagtgcatgtaccattgtttagtgccacctagagatgaaaagatgcataccatactcgctcgatgtcagtagtcttttgccctgtgaagaactgctcacagcggttaagttatggcagtggattttccttgctgtcatatgttgggagcgacaattgtggtagcgtggttggaggatggggaaggagctgattgctgtagactggtgagggtatggcagtgttaagggccccttggtggcgcctccctctcctagttggcgacgaacagtttgccacttcttccacaagctcgaggacggtcaatgaccttgctgtctcctccttgaggaaggcacgtcgagcttgatctatggcgtgcttggtctccacttcgagctgcttggtgacagcctcacattccagcttttccttggctgcggtggcgatctcgtttttggaccctccttgcttcatgttgcccaggcagacgtcgaccttggcaaggtgctcttgcaccttgtccatgtgcttggtgagatcagcagcgagggtctcgagccactccatttctgtggacatggtggaattgttacccatgggatcgagacggttgggggggggggttgttgaattccaagcaaactagagtgagagataaagggaggagcaatagctctagtcttgcttagattgaaacggatacattgccgagtatgtatagtccttattagaattgtataccaagcaaactagatgattccttatagatttagacttgtattccaagcaaactagaagagtccttacagatttggattcactattcctaacaaaccaatctccttttctaaacgaactcgatttatttattccaatttatcgaaggctacctccagatttttgatctattcctgttctctccggc

SEQ ID NO: 132473 - DNA, 872 bp, Zea Mays
atttgtttttatacttgttgggaaaaagaaccttgtacccctagggtccactagttagtagaaggccaaggaaaaagtttgccctggttaattctaaggcaccgagcctagggttggacaaggcagagtcggaaggggagggggatcgggagtaatccactctagtggattctatgctcgactcgggattgacccgccataagtgaccgtcctcattaactgcacctgacatcgagccacaaagggagtcgatccacgttccactcattacctatgggcccctaggtctacggtccactcattatctatcgagcccaggcccaagctacgaaggttgaaggttaggggttggcgtagcatagagacgataatgattatgccggagctcttcgccgcccacatcacccatcataaagagcgcgaccagggaagaccagacgaccgagacacatacggacaaacacaactttaccaaggtagaacgtcccgttttaccacaacactgtagctccttcctttagaaggtaccggtagttaacccccacctttgcctataaaaagggggaggtcggccaacatgagaaaggagagccatatacgaacacaggcatacacacgaacggacgaccagaccagaagacccagaggaccacagaggccgaggccaaggagcgaaccaccacgacgcttaaggcttagcagagagcaccagacccgtagtccttagatctagccatgcataagagatttttaggagctcttctctctcgcccacttgtaaccctaactacgagcattgagcaaccaggtgccaatagcgtgagccaccgaagaatggatgtaggggtgttctcccggaaccagtataaatc

SEQ ID NO: 132474 - DNA, 570 bp, Zea Mays
acccctgcatcgagcaagggctcgaggctcgccccgcacgagtatggtggatgggtgaaagttgcacggaaagcacccccagacccaaaagggctcaagacaaagcaggattaggggcccctcgaaacccatatgtgtcattggagcagctgagtcgcacgtggagccatggaagattatgaatcgcgaaactacagatgattgcacactattcccttcacaacaccatcagagcactgcattcgtagcagcatcgaaatcacctaacaataggtccacatctgtcgctgacgaaccctcaagccgaccaacgtcattgtggaaattatcactgaagtgtagcagtacaatggcgagggccacaaccacaacccagtgaagtcccgagctccacgatcttgtgtgcatgagctgggacatcaaggagacgcaaatcgcagtccccaccacgaacgcgaacgagcctcgtggtctgattcacgcacaggtaaagagtcgaaagctcaggctccagcaagcgctacgaacaatattgccaacaagaacaaaaaacgatggatcaactttttc

SEQ ID NO: 132475 - DNA, 1181 bp, Zea Mays
gcgtcagttagtgttaagttctataaacagagaaagactgaaatgttcaggtgaggtacctcttcaagtgagagctttatcgggcctacgccatttgacaactgccgcgtaagcttgttgtaccgtccccacaaatctttgaagtatttaaacctattttgcagatacttaagtggaatagtcatattcgtttgtttattaatggattttgtaacattctgccaaaaaaggtgagtgaattctgttacatagatgccgttctcaacctctttgaaacacgcatccacgaaaagtgtgtccaatacatcaggccatgccatgtccaacggatccctccaacctaaaatggaaaaaaagatgcaagcagtttaaccatctgttctgaaagtattgtatggatttctgcaagcaaatcgtgtatcggtgttccagggtgatatgtcatcccttgcgccccaacaattttaaacaatggtcagagaagtgaaacacaaaatattacaactatttcttggactgggcaattattgattatgtgctgagacaaagctgacactcgatacttctgtagcaagcaatcctattaagtgctttataatttaccactggattccaatattccacaagaaccaagaaccctaggacccaagaaccctacttcgtggtcagcagatgcgaaggaagaggaggtacctgtcaatcgactggaccgacaaggtgaagaccgagtcaaacgagaactgcaaccggcgatgcgacgactgaacctcaccaaagagccaccaccgatccagcaagaatatgggccgactatgtgtcggctgtattggtaagaaaatttgccggcaatgcgtcggctggatctccgcgcatggccactgtcgttcgggcgcggaccagaggactcgcccttgcccttcatttgttgggggagagaatggagggagggggagaacttcaatgcaggcagtgaaggccagaaggggcacgcgggcggctgtagccagtgactcagagcaatggcgattagacaggctcgggggcagcgactcggaggcagaggactcggctggatctccgcgcatggccactgccgtccaggcccggaccagaggactcgcccttcatttgttgggggagagaatggaggttggagggaggggcagaacttcaatgcgggc

SEQ ID NO: 132476 - DNA, 596 bp, Zea Mays
cgacatattgtgtcttagtttttgcgggggatttttgcagttatattacatggctccgcctcattaaaaacctcacgcccccgggaggaaaagagtgcgggccgaaatggtactgtttgatggattacaagggcgtgttggccctgaggattcaaacaaaaaatttgtggaggttatcgatattccaggaatgctctaggtccttgtcggatggcgttgttagcttgtacgcgctgggggacgccttcgtcttgacgatgaatgggcctttccactttggctccagcttgcctcgtgactctgtccgggttgttcggacgagtacgaggtccccttcgttgaactctcttgggacgactgtgtggtcgcgccaggccttcgtttgagcttggtatttgttgagggcctgcaaggtgaagacgcggtctccgtcaatgaggtctttggaggttggttcgtctacgtcggggacgactgaagcgcttgtccgtggtgacccatgctttatttcctgcggggtcatggcctccgatccgtatagtaggcgaaagggagtgaatccagtcgcccggcactcggtcgtgttcagcgcccag

SEQ ID NO: 132477 - DNA, 528 bp, Zea Mays
caatatttcaaattttttgttttcataggcacaacaacatttctcaaaagttcatggttctcatatgcatttagatgtctagcaattttcaaaatatggtgcaacattaagggtaatgtagggtaatataccccagatagtgcaactgttgagtcatagaataattaaaggaaagacaacaacttctctgcaacaacccaatgattatcactcaacaaaaaagatccatcatctttccaaggatatttagtctaatccacacagagaaagtgctatgataaggaactaaatgtttaagcatctggaatgttgaattccatctaacatccatatctactccaaaattacgtggtctaacaccaacactcatgtagtactgtttataagaagcaattcattgacttgaagagtttaagaatgtcaagagtattcgtcgtcgtcatcccttggtgaagaagaggagatgttgctgttgtagtagatgatcttcttgatgtgcctcttcttctttccatccttccttttgtt

SEQ ID NO: 132478 - DNA, 661 bp, Zea Mays
acagtacacacataataaacataaacaaaagcctctagcgtgagtttaacaaaactcaaaggtgttaatagtctctcctgcaacaacaatgggaacaaaacttctaaggttacaataccaaaatttccagactactattggtactaatattacaacagaggatacacctatagacctagtgcccattttattcctctgcgtcagtgtcaatctcttacacactactatccccttgagaaccaccacctggtgcaaccataggagctgcttcttcctctaagtctgcattaggctcacccccatcagctagcacaataccaccttctgcctccgcggctcctggcgcgtcatcggggtgcaactggtagtaaagctggtgaacttcctcatgcaactaattagagtaatcctccagatcattataatctagaaccaaatcctagaaacgacccctcagatgattctcacgaccaaaagctgcctccctagatcgcattgtcgcagccagttgttccttctgctcaactaactccttctgaagctgcttcttttccgccagcatctctagaatatgagctgcatcaaggcaccactcaatttgatcgctgaatcacggtgacggcgatagctcgaggagctccacgttagcctcaacggtgtc

SEQ ID NO: 132479 - DNA, 649 bp, Zea Mays
tagggtgaccactataccctactaacggagcaatcggcttaagtcggcgacgacttaagacggtgcaacatgctcgcgcttacttgacttagggtgaccactataccctactaacggagcaatcggcttaagtcgacgacgacttaagacggtgcaacatgctcacgcttacttgacttagggtgaccactgtaccctactaacagagcaatcggcttaagtcgacgacgacttaagacggtgcaacatgctcgcgcttacttgacttagggtgaccactatgacctactaacagagcagtcgcctttggtcggcaatgacctaagacgatgctacatgttcacactgactcggcttaggggaaccactataccctactagcaggacaatcaactcaaaaggcagcaatgatttaaaagtcagcacgatacatctacctatcctaaggcgaccactatgcctaaccagccaagcgattggcataagccagggaaagttccaaaaccagcacgctacatttactttcataattgttcaggatgactgttataccctgacaacaaaaacagtcagtacttcaggagaacaggatgttataattgtcagcatcaaggacccgttctagtgccctatccacaaaatattcaaa

SEQ ID NO: 132480 - DNA, 654 bp, Zea Mays
cggagtctagccacttggccgcgggtggtctgttggagctatcgcccgcagagacttcgatgggtttgacaaataaattttgagtcccgtgttcgcagtcaagctgggcgaccgttcttgagatctttttgttgcggagactgaaaaggaggcagaggaccttgttggtcctatgacggaggttgaaatcaagaagggtgctgctctgcgcggaggccatgtttgccttaatcacgtttttagccagatgggtctgaagtatgaggagcataaggctcggttgatgagggcaaagaaaacgccgactggggcccctactcaatcacacacgtcgccggagactccatcaacttgtttagggcgttcaacttgttggtctaatggatgtgcgaggcggctggtttggcggacgatgtggaagccgagtccacagaggacttcgtcgagcgagttatcgaggttaagttagggtgagacttaattttgatgagggttgatcgggtagtgcgaagcgttgggttgtgagggacgcgattgcggcatgtggttgcgaagacatttccgctagcccgcatggcgagggagttgcttatcttcccttactcgcataatatcccagatattattgctgtagcaatggacccgaaggggaag

SEQ ID NO: 132481 - DNA, 804 bp, Zea Mays
ccttctctttctttttccctttgagcttcggcatgtcccattctttcaaagtcgggaatactctaaaagctaagaattcttgcaccagatccctagtaccaatgtgctccgcaataactcgaaattcgcctagtgcaatctggcatggactctccggtgccatattgcattggggcctagtctctccgaagattaattctaatgggctttgaaccaacttctcctttttctcatcaactttgacataaaaccattcagtcttccaaccagctggccatttggtacgatagctgataactagagtcttcgcatctttgcgataagcaaaattatagcatccgaagttttcgtgcaacccatcttctctagcttttgtctgataatgaagctcatgtgcccggcagaagcctttggcaagcggttctgccccttggctttagagagcccagatgtagacactaagcctaacgatggcgttaggagttagctgatggagataaatccaaaacttccccagaacatccgcaatcatctcattcaaaggaaatcttaatcctgcattaaagaagcttttaaagactaccacctcatccttttctggctccggagtaatttcctctccgccaaagcgaattagttcctttttggcttcactgaaatagcctaacttcatcaacttagtcatatcatcttcgataacagtggacctcccaaactccaggtggctgggtttagatggcacgacactataatcatcttcagattcaccttcgtcagcaccaacttgttcagcttcagcggcag

SEQ ID NO: 132482 - DNA, 506 bp, Zea Mays
gcgattcagtggaacagatgagtgcgcggcgtgaaacggtgaggctgcacgtgggacccaccggtcagtggctcacagcgcaaccacgttctcgcctgggctgcgcagaggggagtgtggagctgggccgaattggaggcagtcggcccagttagggttttattcctttttctttttactttattttcttttgtcttttcccttctttccaaattcaaactccaattcaaattcaagctttggggcactttgtacaccagataattatttattttgatcataccaactgtgatgaagttatcaaattataattttgtttgtattgaacaatattccttcctccctatctttcatggttttatccctaagtttagagtttaaatttttatggaccccttgatatgttgctaatgactcatttattttattaaccacaaatgcgcaatcgagtaaagctcagcatgatgaaaaatttatttaggggtctttgggggtatttatttaac

SEQ ID NO: 132483 - DNA, 423 bp, Zea Mays
gtggtattgttctttgccggtagtgttcgtctcgtataatagctcatgcatgttgcagaagcacttcgcgctcggctccagcccctagctccttacagcctagacaaatattcccattgattatagcttcaggggtaatctggtgaagaaagatttggaatatctttaatacctcagccacaaatttactcagtgggaaccgaaggcctgccttcaagaagcttcggtaaataacaacttcgttttcctcaggagcaggggcagtgctgtctctcccaactctgacaatagacatgtcgcgaaaatatctccctctcatggcgccaatatgactttgtttgatagtcgattttccgaagatagtatggcttggtcgctagggccgatcctcagaatcttcatccccactttccacgttataac

SEQ ID NO: 132484 - DNA, 349 bp, Zea Mays
ctttttttagaaagcatagtaaacgtttatgcagttcacaaaaacaagggtggcaaaccagctatccaaacacatcgaaacaaaatgggacacaatcacacaacaccaaaccctccacgcatctaacatctaaaaacacgaccacaccagcaacacaaaaggaaagctgctaccaaagcaagctctatactctacatccaagtcctgtgtgtgtttccaaaagttctccagccatgtcttcataatcttggcatctccctccttcagtagtaagctccatatctacaagaacacaaacatttttttttttcttttgaaaaacttcgctcgacaactttggattttttcc

SEQ ID NO: 132485 - DNA, 636 bp, Zea Mays
gggaagggccattcatggtagcagaggtcactcggccaggatcatatcgacttactcaaatggatggcacggaaatagggaattcatggaatatagagcatctcaggaagttttacccctagctagatttcaaaagctatcggggcagcattgtattctgtaatcggaaaatacatcatcaataaaaagacttcattctcaaaggcactcgaactatttattatcaatctgcatgcctacttaacttagggtgaccactataccctactaacggagcaatcggcttaagtcggcagtgacttaagacggtgcaacatgctcacacttacttaacttagggtgaccactataccctactaacggagcaatcggcttaagtcggcagtggcttaagacggtgcaacatgctcacgcttacttaacttagggtgaccactataccctactaatggagcaatctgcttaagtcggcagtgacttaagacagtgcaacatgctcacacttacttaacttagggtgaccactatacccaaccaacagagcaatcggcttaagtcggcaatgacttaaggcgttgcaacatgctcacgtctactcgacctagtataaacatgcttacgatcactcatcttagg

SEQ ID NO: 132486 - DNA, 672 bp, Zea Mays
cacaacacaatcaaataaaataaagagtcaaacaaaattgtttacgaaggttgcacataatatgacttcagggccttgaacgacccaccacaatccacacgagtacaagctttatcgtatctggcgccaacgtgtgtgcgaccatcagggctatcgcatcatagcaagccttcgtaataagcgcgacaggcgcaattgtggcttaatagtcatggtataagataagtccacgcaacatgcgcaacagacacaattgtggctcgataataatgactgacgaacaatgcctacagggcatgcaaaaaatacgcgactcgatgatggcatccgactcaacaggagtggtccgattaagcgagagtgcgatatagcaatcaaatgacacagccaggttcgtacgacacaaataatgtgttgtgttgccagggcgcagccaatgctcagccaataccataactcaatcgattaataatgtatcctgatcggcgcatctgagtacccactatacaattaaatcgctcgtgtgtgagtccgaaagcttaacacaacacaaatatttagatggatttgagtatacacaatatatactccacatgcatttttaataatttgtctactatttacttcaggaaataaagtagaaaaataaataccaatattaatccataatca

SEQ ID NO: 132487 - DNA, 562 bp, Zea Mays
gtgaatgtggagctaacaactgaggttcaaatcttagtttatgcacaatgttactttatttttgtttaagtggaaagattacatagccgatcaggctgataccgttcctgcgggctgcggtaaataatctttgcaggagctccgcgtgagtggctgaatcttggactggcaaacgaaaacgacgtccatttttcaacaattacatatggctctgtttggaacgagaggacgttccttacggagagccaggttgtttcccatccggcctgcactgctccaaccataaacaatggctttctgtgataccagaagccagtgtgtattcagattcaggacttgaggtgacgaagaggtgccatgcatgagtcagcatcatactacactacacacgtttacgttgccaacttttagatagtgcaagagcactgcagatgatcgggtagtgcatgggtcataagactactactactacaagagagtgttgaaggaggaagatgcatcaatcctagatccgttccagttgtgtggatacgtatgcgtttacatataggaacagaacaga

SEQ ID NO: 132488 - DNA, 392 bp, Zea Mays
aggcgatggaagacagcctcaagagccaagtgatgcagctgaccaaaaacaagacatgaaggcagtgatcttgtaggacagttgaccagtggaggtacataatggtttagcttgcagtgcatattggatgaggtgcagctgttcttggatattttggtataaggaacaaaatagttgttgatggtagttataatcaattttagctgatgtagaggggcgcatatcatattgatatacaagactgagaaagggattggccgatcaagaaatagtgatttggctgtggtagggcgtttgtcttgtctatagtatttgtagtgtagaagcacatgtagtttgctatataataaaagaataaatagcacagagatgtttatgttagaaaccaaacg

SEQ ID NO: 132489 - DNA, 304 bp, Zea Mays
ggggcatggaaggagctctgactctgctgactgaaccgatacgaggtgggtccagctggtctactgaagcttggtcccttgggtggaaatccaaaggatcgagttttctggtgccggtcttgctgctgagcccggaggacttggaatttccttttgagatgccctttttcttcctcctttgccctttcaacttgcatggccttgttggagaggtgagagaaactaaggaagtcttggctagccagaattgtcttgagttctggcctgagtcccttcaggaaacgggccatcttcttgacctcgg

SEQ ID NO: 132490 - DNA, 470 bp, Zea Mays
cagaggaaggcttcacccaaggcatgttagaatgatacacaatcctagctcaagtaaagacagaggcaatcacacccaagggcatcagcacagctcacaatcatctaggacgcacaaaggtccttcaaaccaccagccccaagaggcagaggaggacgaagctttagaggaagattcaactcacaaccaagaaggttgttctgcttgttctgtggagaagataagggtcacacaactaggacatgccaggttacaatactgaagcaaaaggagatagctgaggccaaagcacgacagaatcagccaaagcatgtcctacatactgcttcgtgctactccttgtaaattcctaagtatgtgggcaatcaacagtcattttcacaacccatagtgtcagtagctttggcgagccactccccagctgcatgagccttaccaccatcaccaccggtcatgaccccaacttcatc

SEQ ID NO: 132491 - DNA, 713 bp, Zea Mays
gttgcattccttggtgcgcgcaagcgtatctgctagatgtagcccctgagcctctgagtaatccatgtatatcgcttgggggtttatgcatttcatgtgcggtttagagacggacccttcccgtaatagtcaccaagcgttgagcgtgagtccatggttactggctctctgttggaggctgaattacctggcgcacacaagtgcatttcctagatgtagcccagagcccctgagtaatccatgtggattgcttgggggtttattcgatgttcgtgcagtttagagacaaacgcttcccacgatggtcatcacgcgctgagcgtgagtccatggatactggctctcttttagagactgaattcctgggtgctcgaaagcgcatctgctagatgtagccccccgagtaatccatgtggatggcttggggtttattcggtatttgtgcaattcagggatggacccttcccgtgatggtcgtcttgtgctgagtgtgagtccatgcagtgcgagaaatgggtgtggtcttggaggatgatccactgagttgttcgtcttctgggtgcttgatccttgacgtgcacgcatccccctcgaaaggctttttgtggtcctttcgagggcagggccaccctccaccgacatagttggcacggagaaggtggtcgttgagctatgaatgggttatctaagtgagatccgaccaccctccggta

SEQ ID NO: 132492 - DNA, 449 bp, Zea Mays
gttttccccagactcagaacaacccagaggtgtactgcgggttgattagtgtaaagggcaggggctcttatgcaaattcatcagccgaaggggtatcggccaacgagcgccattggatgcaggatcaacggcgcagattacacaaacctctttatgaaccggtacatgatgattgccataggatcggaaatccacggtcgttacttaacggggcgaaagcgtatctgtcacttaatctgattcgttagttccgtgatgaacaaccatcacactgtatcccttccccaatcaccatcgcgaaggcatgtgcccaccatggcggcggcgccacagttccccacggcggaagtcaccggagtagtgcaatccggccccagtgaggaattgcgatggcgccaaggactcccacgactagctactcccgtgagcacctgccccgaggatcagcg

SEQ ID NO: 132493 - DNA, 322 bp, Zea Mays
tactagatgaatcatcatctccgacatccaccgttcgttttttcgacgttgatgtctcattccactgtggtgctgcagctatgattttgttccttgaaccaggaggccgtcctcgcttacgtccagataggttagccaatcgaaccctattatcctccacagttaaacacgtacggctgttgtgaccatcagttatgccacatttctggcacttcctgctcatcttcttagctcctttcgcacccaatttaagaacttgttgctcactacttttgattgttcttcccttaggcttggccttatctggtcttgctaagtttac

SEQ ID NO: 132494 - DNA, 371 bp, Zea Mays
tgaaaccttcttgacataccttagaagtgtttaagggtctgtacaacccgaggcaaaagggatcacgactcgtgagtaaagtgtgcaacctctatagagggttattcaaaactggtatatcaatcatgctcatagttaagagtgtccttggaatcctctgattagagatattgtggttttggtttatgctgatcatggatattagcaatgattttcttgaaggaggaaatgactcatgggttgataacttcaggatgcatgctaaaacatggcttatattaatgataaatacctgatgaagtaaaagaaacctgctattatcctaactccacacaaagctagtccaatttagccaaacagggcatttgttg

SEQ ID NO: 132495 - DNA, 382 bp, Zea Mays
atccggccggcccgagcaccattcatcaattaactcgcgccacgcaaagctgatgcttccctaaactcaatcccccaaccaattttggccgacctcgagtgcacgactcggtacacggcacgtcgcggtggcaccatggccggacagcggaaccggggacctagctacacccacttacaattcgctagcgcatagcctagaggaagggaggacggatacggtggggactcaccaacggtcggccgaggtcagacgacgcccgtccacggagcttgggcggaacccgcctgcagcagtcacggcggcgagcaattcgaccaccacaccaacgcatgactccaatcgcaggcgcggccggcttccttggaagattacgaccccg

SEQ ID NO: 132496 - DNA, 614 bp, Zea Mays
ccccacgtttgggcataggtgcagtatacaaaaggagcactgggaggtcgctatcaaacatgaccgaacgcctccacatacaacctcaaatgtgcccccactgccccgtggggttagtcaacctcagccgcaaggggaccttatccctagagtccgaacagtgactcgcatatcagggagacaggacaatgtgacatgccaagcgtatgccaacgtatgcgggctagtgacgtgtggctcgtgacgactggcggagctgtgctgcacacgatcatgtcatggtgctgacccacaagacccacctcacatttctacgaagacatcagcgaaggattcgctacatggactcgtatggcacgtaggcaaaacaatacgccataccgagagtatggctacgcacggccctagagacggtgtcaagaattctacctcaagcaggggcggcaaagcgccccttacgaatagaaaacaagtccctattgtaaggtctacccctgaactattaaagggcaggccctccttctcaaacacatgcactagttgtatcattattcaggcaatactatgattagcactacactggactagggcgcaagcctaaaccagtataaccc

SEQ ID NO: 132497 - DNA, 625 bp, Zea Mays
aaacaaaacaaacacggcgccatgtggagtgtgagctaatatagcagcgctgctcttgcaagttgcgagagtggtcgcctggcttgtcgcttcaccccttcatcatatcagcattgggcgactgctggtggataaaatttgctgtggaaggattcttcagggtaaatggtgatagtagtactcgctactcgggggatctgtaaattctttcgtctgtttctggtcagggtgcagtgacgcctgtctcgctcgtgtcctctctctgtctgaggtacccttcccttccctcccatcagtcagagacagcacgggcctaaatagagtgggcctgcctgccggcccgacgctgtaacccgtaggtggtccaaaactgaggcacgaaccatttttaaaaagcctttcgtggcacgtgagaagcccatatccttccccatcgtcgtgctctatatacatgtcctgtctcatacttcacctcgatcataaacagacgaatgtgcgccgtatgactgtgtgtttcaaattttatcgcatgttgatccaatgattaacgcgaacggttagagttatcagaggaacggtcataatgtttttaaccacgctattggctaatctattcgttacaaac

SEQ ID NO: 132498 - DNA, 436 bp, Zea Mays
ccccaaaaaaattagcaccaagcacaagcaaatccaccaagaacaagaagcaaggtagcattttcaaccaattgaaataatgaaatacttctgccatgtaccatctcagatttccagtaggctcaacaaaaacacaaactattaaaatgccggctgctgttgcagctgtggctaaagctgcacacacataagaaaatgtgtgcagccgctgtggttgactcccacttccccatctgcatcctcgccaagtcaaatcctaaattaaactgacaccaaaccaaactggaaagtaaaattctaagaccatcagacacgcgcgcgtgcacacactcacacaaaggagggggcactcatctgcataaaaagaaaacgaaaaacggagaaaaacttgatcgtccaattatcccaaacacatccagtaacagcagcatgcagt

SEQ ID NO: 132499 - DNA, 799 bp, Zea Mays
tgggctcctctatttatagcctcatggagggctaccagaggcgccatggtttgtcacatatgggagtggagatgtgtccgagcccctatagccggtatggtattcggtatggtctttgtacttgctgttgacttaggccgagaggacgatgtccaatccctttatttgcatctttgaccgagtagagggtcgaggccagggtctggggctcggtcacgcacccgagcttgtctggtgaacgtgttgtcctattcgtagtggttgaaacagtgataagtatggcaaaagcgcttggaaatccgtgaagtatcccgacgtcagctctataacttctggtgatgtcgagcgtccttttcgggcgagatggatgtcctctcgaggccatggtcgagcctgctctggggcatgcaatcgtgtagggaacagttcaaggattggcctcgtgcgggattcgcggggagttgttcctggggcactcggtcgaggccgagctcgggcgaggaggagttttctccgaggttgaggccgacttcatgcgacgcggagtcccccccctcgagggtgagaccgtgttctaccgtacacacatcctgtctaaagttgcttgagtacaatagacggcgtggtctcgcgtcggtgcctggcatcacgctccgctcgttctcgctcgtgctcatgggcgtggcgacgatcgcgacgttgggaattgttgagctcgcagagcaccatgtcgtcaggagtctctcgtgcctcggatgcctcgtcctgatatacgggttgcacggggtcccattctctg

SEQ ID NO: 132500 - DNA, 1036 bp, Zea Mays
gtttcaagactcagaatactatttgtagtactgcgggttgattctagaaaagcacagggactcttaagcaagtttccagggccgaaggggtatcggatgcgcacagccgttcagattacaatcaacggcctggattttatagcaagctacacgttacgcatgcactcggatcacgatcctgtgatccacagagcgccacgttcacaccatatcccaatcgttcccctacggatctacggtcacgatcagttcacgcgattgatgactctatgagttgatctgatccgctcatcccaaaagggtaacctaggatctaatcaggaccgtccctaaaacaatcaacggctcatgtttgttcttccctacccacgcggccggtaggcgacagaactcgccatcacggcggagctcgccggcgagctccccaatctcggtacaaacgcggccctacgcatcgcggaatgggtgctatcccaaatcaagggtttggaggagacatgggagagattaataccgtgatttgtgaagcagttcaccacgcccacggagatgcgtgaccccgcggcggccttggagctgcggcgagcgattctctggacaccgaatgccaccgcggccaagcacatgcccggtcacaatccacgtgcaccggcgattctcccaaaccccaccatggacaccgaatggaggaagagatgccggaccatggtggcggcattacctcgctcccccggtggcggtggcgagtccatagatacggagcacttggaggactggctcaaaggagggtagtggggtccggtctgcagggagccgtgagggggaagatggttggagggggcagcggcgctggcagacgatttctgcccctgcttctctctctctccacgcgacggcggctgacttcctccatggcggcacaagagctcgccgctggcttttatggcccagaggagagtccgggtaggtgccaggagtccgaccgaagtgggttgttgcagatttggcggcgaagtcagaatcgccccagatcgca

SEQ ID NO: 132501 - DNA, 478 bp, Zea Mays
tcttaagtaagtttggcactgcgaaggggtatcggacgttttaagccgtctgatcaagtgagggtggtccagattagaacgccgagatgcccaaccggtacatgatcacaacggttggtttacgatcctacgcttcgggttcaatgaagtggtgatcaccatccatctgttcggtgttgaatccaacggtcacgactcacaagactacacggtgcgcgattgttcaatcccaagcgttactctgggatccaatggcgccaaacaacctactccctcatctatttgtgaccgcaaatcacgaaatcaacagccctggggtattgtctctcctctaatgcttctacacggtggcgccgcccacccacggccgtgcaactcgccggaatcccatgccctatcacccggtgacaaaccccagctctgattagcgcaagatgaaatgagggcatgattcgcagtagggagccccggccatggg

SEQ ID NO: 132502 - DNA, 453 bp, Zea Mays
gtttgcatccacgtgggcactcttcaccaacttgttcatgctctctcttcgttgtgtagagaccataagaccacaatagtctcctttgaaaaatgcaggtacccaatctttgcgtatttcatataatctggcaagggtgttgttctcgtgtagctggaaatcatctagcatcatttaccaggcagcctcgaactccatttcattcaatggatgatgtattatagattggaaccttgttttgaaatccatctcctcaaatcttgcatacaattcattcaagtggggcatatatccgttttgcacatgccacaaacacaatcgatgtattgtgtttgggaatactctgcctagtgcgattggcatagcagggtcttgatctgaaatagataaatttacataacattatgcaagccaatatgatatcatatagtacgtgccataataattacgagt

SEQ ID NO: 132503 - DNA, 502 bp, Zea Mays
tttacagagcttcacttctgaggtgcgagtctttcggactgccgaatcaagaatctttactggcttctctcggtactgaagatctttctgaatctgcactgcctcttcttcgatgtgactttccggtgcttgcaggcatttgcggagctgggatacgtgaaacacattgtggatgtcagacatggactctggtagttcaagacggtatgctgcgggtcccactctgccaatgatgggatagggaccgacgaaacgcggtgctagctttccttttacttggaacctcctgacaccacgcatcggggagaccttgagtctccttcctcaaatctgagttctctccgcctgttgtctgcataactcttctgccgactctgagcttcaagtaatctcctgcggatcagggcaactttctcttccgcctctttgacaaaggcaggtccttctagtgctttttcccctatgttggaccacatgagaggtgtctggcattttcgtccat

SEQ ID NO: 132504 - DNA, 422 bp, Zea Mays
aagaattgccgcattctagagacttgaattattctaacactttaccatttgttagagctaaattaatcaaaagagggctaaccagtcgacttacaaattgtgttcaagtcatttcgtgcctagaattaccatacacaattaacaacgcgttcaccacaataatcaaatccggtatacatgtatgtcgaaacgcttttcacccactagttcgccttttaacttagacaccacatgagcactgctaaatttttacccgcgaccataaccacacgcatttatactacaacaagcagttcatcgtgaccacgagcttaactaaagtcatctaacaagttggttaaccagtataaaacttagcaagtattttagacttcgcaactcaaaaacataggtgggagcaggttaattagtttttcttaacc

SEQ ID NO: 132505 - DNA, 678 bp, Zea Mays
ggcctcttgagcgtcgaggtggttgactcgtgctctgccttggtattgggtcctgctctgctgactgttggagggaggtgccgagggaatcttagggccattcaccgagttggagtaggtaggtccgggtgccttcaactgggggcagttattcttgaagtgactggggtctccgcagtgccaacaggcatttgctggcggttggttgcttgcaacagagggggcctgaagggagctctgactctgctgactatagcatgacgaagtgagtccggctggtctattgaagcttggtcccctaggtggaagcccaaaggatcgagctctccggtgacagtcttgctgctgagctcggagaacctggaatttcctcttgaggtgccctttttcttcctcttttgccctttccacttggatggctttgttggagaggtgagagaagttgaggaaatgttggctagcgaggatggtcttaagctcgggtcttagccctttcagaaaacaggccatcttcctagactcatgctgacatcgccaggcgcgtaacgggccaactctgtgaacttgtgcacatactcactgacagttcttccaccttgagttagttcctggaactcatcttccttgagttgaactatcccctgaggtacgtggtgctcacaaaaggcagtttcaaat

SEQ ID NO: 132506 - DNA, 514 bp, Zea Mays
ccgccgctgcgcccagttgcgtcgtgagaaaacccatcgacaacacgcttcgcgccgccgtcatcgctctgcccgcctgctactgctactactacagtgggtttcctctgctcgtcttggtcggtggtggttggctgctcgtgaaaacggcttcctcttcaccgcccttttccttccttgcttccattttccctagttccctccctcccctcccggccggcctcccctgagcactggccactctgatcgagtctgtaggctgtggttccctgctgccactactgtactacccactcgttcttctcccttggcggctacgcttctgcattcaactctgccggcctctgtgagacctctttccttcgctcccatgtttcttggctacagcctacaggcctctgtaaaagattctgccctttctcttccgctgaagcttcttcccctgccttgttcgttcaagtttcctgtcctgctgcgctagcgctactacaggtttcaaaatattttgtttcgt

SEQ ID NO: 132507 - DNA, 487 bp, Zea Mays
agcggatatacttaccaatattattgcctcaagaatcctcgtcctcgtcgaagggcggcaccatggggctcccctagctccagcgaggaattgccgatcaagcacccactcatgcgccctgaaatcaccttgtacacgatctacactccctactgcaccatcttaacacttccctggcaccttggccattgagtaggtgaggaaccccagtgacggtgatctatctcccctcccgcaacccgccattgctcacggtcactagggctcaagaactccacctatttctagacccaatggacgagttaggggtacgagactccgccttaaagcaccgggccgcgaagccaatagagcggatgtggttgagattgcacgagttgcgcgcattctattaccgggcgtggaggaacaatgaaggggataagcctgacaaggttggcccacaccacagtggaacaagggcacacaagagactatgacaatgcag

SEQ ID NO: 132508 - DNA, 636 bp, Zea Mays
caaacatgcccaatgtttctctgcgagaatacacaagtagattacatatctttctttgtacatggtactttcagttccacgagacccaaggggtgaaccaatatgctccacaagaacaatactgttgcacgagccacagcaaaatctcgggtcacaagaacaatatatgtatggaaaggcataaaacacgacgctcgtgatcaagttgtcaatcgaggccttaacttcacgttacagttaactgtttcgcttgactttaattcataccggcggctactgcttctacagtgcttttctctctctatggattacggttgcagcagtcaaaatagttgtctttaatccgaagcgaacaaccctaaaccctaaaaccgttagaatcatttttgtctgttttttggcgataaatctatccatcatatccctataaacataaaaaataattttatcaactagcaaataattgaccaaaccaagataactaaagtctaaaacctaatctgttggtgaacgataatactcactccgtcccgaaataatagttattttagctcttggtttttatgtttaaattcaaatagatgacaataaatttagacacatatataaaacacatgcattaataattattcgaac

SEQ ID NO: 132509 - DNA, 436 bp, Zea Mays
cttggcccacttttaacatccaacttccatcgatcaaagagatgatgtcaagtaagatcaacgatctcccacctcgtcatcgatctaaattcacagacattcttgctgcatatgacttggaggttgacaagtcatgcatagccataaaagacagcattgacaaaattattgagaagcaatacgacatagcagacaagtttatagagttgatcgacgaggtactacgtgctgagtctgataatttagaaaatgagacagatgagccacagcatccgaggaattcggctaattcagcaggtcagtcatacaattatcccttttcatacattcagaacctttaacagtctacatgtgcatacggtttttttatacgtacaattaacatcattttgttttttcaagtatacgcagcaacatttgatctataatgcaattt

SEQ ID NO: 132510 - DNA, 304 bp, Zea Mays
caaaagtggcagatggtccggcctttgggcccggacggtccgcaaccccgcgtttagataacttgggtgagtatccttatctcgtgtgtggttatctatctaatcacgtgggagcaccctaaggtctacgtcgtccggggacgcctcaggtgacctgctgagccggagcgccctaaggtctctcccctatgggcgggatctaggtcctacgagaagaagacgaccctacgtcatcatggaccgtctgccccagagtgcggaccatccggacaacatgcaaggaagaagccgcttccgccgccag

SEQ ID NO: 132511 - DNA, 450 bp, Zea Mays
ctattttgcagatacttaagtggaatagtcatattcgtttgttcattaatggattttgtaacattctgccaaaaaaggtgagtgaattctgctacatagatgccgttctcaacctctttgaaacacgcatccacgaaaagtgtgtccaatacatcaggccgtgccatgtccaacggatccctccaacctaaaagggaaaaaaagatgcaaggagtttaaccatctgttctgaaagtattgtatggatttctgcaagcaaatcgtgtatcggtgttccagggtgatatgccatcccttgcgccctaacaattttaaacaatggtcagagaagtgaaacacaaaatagtacaactatttattggactgggcaattactgattatgtgctgagacaaagctgacactcgatacttctgtagcaagcaatcctattaagtgctctataatttac

SEQ ID NO: 132512 - DNA, 507 bp, Zea Mays
cgaccctggaagcgggacgttcgttgcccctgctgctgttgctgctgttgatgctgctgctgcccctggggtggaggcggtgaacctgatggtggtggcggtggcggcggtactgatgatggtggtggaggaggactgacgtgcctctgcgcgccctgggcttgggagctggcctccacggtcccaccagccgtcctctgtcgcttctggggggaatctgaatcaaggggtgggtccgagacaaaagacctgtcgacgcggcgcagttagtgtcgcctctctccctctgacctcccgatggcgcccggagaggaagagatgcccgcagcccctttgcccttgtccgaggagttgggggccgcagggggagctctgaagcccgcattggcaggctgggagcctctgaccgatacaccgggaatacgatcccccggtgggggtcccggccaccggtttggcagaccgccatgtcgctctcatcgagggtcggcagccaggataacaccg

SEQ ID NO: 132513 - DNA, 602 bp, Zea Mays
aacgaaaagaaagtggggctgctaggagggcaagagacagaggtactcatggacagtgagatagagggatccgaactggtaccaggctcaggtgctccagatttgtcttttggtgatggggccgtagttagcaagatttcaagtttgttaactcctgaaggcttagcacttgcggcagtgccggaggcagtggttggctcctctgtcatgaagagaagtaagaggagagcagcatcaagcgcaggtgactccattgtgagagcttccaagcttaaggctgcatggaatttggacactgcgttcagtgaaggtatggtgcactcatcttctgttacaaattttgatcacaatgaagttctttcaaacctacagtcattaggcttttctttccataatgaatctgttgggttacgcaagtttgtagaatttctggttaataataaaaattctgggcctagtttgcaggttagtcatgatgtttttagtagagctatagaaaaaggcgagagagagttgttagaagaagcagagcttgataagctcatgttaagtaatctctgtagcgtggttttagaggaggtgatggacgcacacagtgagca

SEQ ID NO: 132514 - DNA, 626 bp, Zea Mays
tctgtactttttgattcaggagcatcccattctttaatagccaccaagtttgtggaaaagcatggcatcccctctacacccctagccatccctttggtcacccgaaccccgggatcagacctcctatgccaactctggtgctctcaaatcagaattctcttaagtggggtagtgttcctggcagacttaaccgtcctgccgtcccaagggattgatgtgatcctaggaatggattggctaactaagcacaaaggtatcatcagctgcgcgaacaagaccgtccttctcaccgatcaccaaggaaaagcagtttcctatcaagcccagccgcccgcaaacgatccaatggtgtttaatctggcagcagaaaacatgtctgtaatcgaagagtttgaggatgtatttccagaagagttgcccggaatgccaccagaaagaggagtagagttctatatagatctcattcctggcactgcgcccatcgcaaggagaccataccgcatggcccccacagagttagcagaattaaaactccaaattgcagagctgcaacaaaaagggtacatccgtcccagtttgtctccctggggagcacccattcttttcgttaccaaaaaggatggaag

SEQ ID NO: 132515 - DNA, 346 bp, Zea Mays
atttggaacaacaaagatgggctagcatgagtaggacggtgcagttagattgaaaggcgagaaacgatctgttgccaaaccgaagtagacattctgcacttcatcaacaaagctggaatcaaaggcatctagtgccttccatgcatctgtatcaactgggtgtgccatgacatctggattctcaagtaccccttctttgtgccacctcatgtgtctggctgtattcttggagatgaacaagcgtttcaaccgaggtataagaggcatgtaacaaagctacttacgtgttgtgctatctcggtcgtcacggtcaaaccatcatcgatttcaacctctacgaatctac

SEQ ID NO: 132516 - DNA, 413 bp, Zea Mays
gaaaaaacaaacaaaaagaataaccttcaacttctcttctttgcaaaccgggtatcacaaacagtcaccgttacagagtcagtgggggggagtagcgatattccttctccagctctgtctgctcttgttggtctgtaagaattatccatagcaaattttgatcaggctctcgaggatgttgttcctgaagatctgctgtcagaaccagctgatggtgatatgatggacgtctgctctgacactccagatgtgggattagaggtatccagggcagcgtcttgtgcatcgtcgaccttggaaggtggtcttcggagccaagaggttggtcaagatcactcaactcccatggagatgactgagaatcctttagccttagaggtggctgttgcagagatcccagtcctcaagggtgg

SEQ ID NO: 132517 - DNA, 276 bp, Zea Mays
ggagaattttgaaaggtgagcttcgtccagtatcttctttctaagctcagggtctttaggaacaaccaatcgatctccaaaccatagaattcccttactgtcctgtcgaaaacacttgtatttctctgccttttgtttgatcatatccttgataacctgaacacccttatcctcaacctgagcccttatgatctgctcttgcaacgtgggctctaccgagatatagcttagtttacccgaagaaacaacttccaggttcaacttgcacaactcatc

SEQ ID NO: 132518 - DNA, 357 bp, Zea Mays
aattgctgaaattagtggaaaactttgcccatgcgatggtgtcagcagcgacatgagcaacacaataagagtcccaccagtctgcaacgaggccagtgaggtgacccagtgcatagaggaccttatctctatcggtgcactgagtgatgttaagcattttatccattgtcttcatccaatcatctacctgaagtggatctagagagctagagaaggtggatggcttatgactcataaactccctatgcttatccctgggtggtgctaatggtggtggaggtggtggctgctgtcgatcttggcggatctaagcttgcatctccaccatggtggattatgtggggctcatattgggtc

SEQ ID NO: 132519 - DNA, 514 bp, Zea Mays
ttctaattccaaattaattttccctgattttctaatcctctggactgggcctcaaatactgaaaactgcaggggctcactgggaaaattccccagacacaggcataaccccgcggtggatggcgggttattattattaaactttagggtctcttttgcataatagcatggccgaaggggtaaggtaggttctcggtcgtccgatcctgatccgatagatccaatataacggtgaaggggtacgctctattgaccactagatcaagatctggtggtgaggatttcaccaacctaaacgctatattgcgattaaatcctgagcgcaggatggccgatcaacggtcgagagaagccttggacgaatcaatactccgatctaaccacagccctcgcctaaagatccaacggccaggaggccatctcccaccactgtccaagccgagcgacgacgccaggagctccccacgacggagctgtcgccggagatagccatcccgcgccccgagaccttccca

SEQ ID NO: 132520 - DNA, 419 bp, Zea Mays
ctctctatctaaaccctagaactcatgaaccaaaatacattgatggcttctcacacttcattcaaagcgattcaactccattctcacgccctaagtctttctccctttgattggtgggaagattcttcaatgtgagataggttctagatctcaaacacgattttgactttaatcctttgatctttctctctcgagttggtgcaatcattcttaattgcaaattctttgttcttggaatgtgttactccttgtctaattataatttttgaaaggtgttgttccttgagatagcctccaaagttgtgaatgaccccaagaacaatttgtatcacccgctctttgtggacacttgagtaaggggtcaccttgacctgtgtggtcggcaaggagaaacggggtggagaaagactcaactcttt

SEQ ID NO: 132521 - DNA, 570 bp, Zea Mays
aaagttaaaggttcttactcaccggtcgcgctatattgaaccggctgtggtgcctgagtttggtggggaggcttcttcagctgctgaatcaagagaacctgctcctcctacgcagaaggctgaagagtcggctataatgccgaaggcaccttcggttgagctagttgaaacgaaggttaacaaagataaggctgaaaggtcaaagactgaagaagtaacaaagatgccaaggattttaagtccttcaacagaagcaacatcgttgaaggcagaaaagatttctgccataacccctaagagaagaaggatggtaaatgtattagatattttagaaacaacctactccataagtcctgctcctacatggaaagttgtcgaagctgacaaaacgcaacccaaagctgatactaagcaaatagaagtcgagactacaataacccaagctgaaaccgaggcagagcctacagtgcctactgagacgaagcttgccgccaccgagcagaaggccgaaggaataactccagatattaatataggttttgagaagagtgcggccaaagaagccgaatc

SEQ ID NO: 132522 - DNA, 317 bp, Zea Mays
cagggtttggacttgttctagattaagctgagccaatgttcgagccccatcatgttgcttgttcacaacataagtttgtgactcgttacaatgatgactctagctctcctacgggtatacttgtgaagtgtgtcgttcattccaagaaggtccaacttagggcttaggtcaaccatgactcagctcaagggcagttggtagttctacatgcatggtcgcataagttagcatgcagttgatctggttcaagtatccatgggcctacatgttgactcttggaagcaactgtgtaagtcgatcaaacaatagtttttttg

SEQ ID NO: 132523 - DNA, 707 bp, Zea Mays
gttgcctctcttgttttttgttaatacatacttattaggtggcgatgcaaggctgtctttgttgagctgatatggaagttggtcgtcaacatgtgattaagtggataataagtgtcaaataatgtggttaatgtaaaatagaagttcaaaagttattttgtcatctttttcgttgttgttaaaattgttgtatcaatgttataaagttgaagatcattatcttttttgataccttcgttttttgttgcttatacaaaacatgtatcaaggtagagtggattgtaatatgtgtttttgttgcaacaagagtatacaactatacaactttgggaatatatgtaatctaaatgttaaaacatgtttcaagggagagtggattgtaatatgtgttttgttgcatcaagagtagacagttatgtgactctaggaacatgcggaattcaaatgtattggtataacaaacttacctctgtatcctgtagtgtcttagaagatgtaagtcaacgtcatcgctgccaaatagatttcatcagcccatacacacatacataagttgatatgaaatatttgtagttaattctaagaaatcccttatcatattttattgatcggcaaaagtggatagttttggcaatgatgccgctggagagtcttgtgtggttatgaggccaagtatgttgtcttgtgtcagcatttcttgttgggga

SEQ ID NO: 132524 - DNA, 476 bp, Zea Mays
ccaggtatggacggcgggttgattggtgaattcctcagggactctttagcaaaactaccagcgcgaaagggtacgcatcaaacctggccgtcagatttcgtgcaaacggtatggattagatctgcgcggatcaaacccagagcgccgcagaaccatccgattggggatcaacggtgcggattttaaatgctaggatcactacgcgcccgtccgtttatgatctaacggcagggatccgtctcaacgatggggtacgcattgatctaatctacaccgttccttttgcatcctacggcccacggttcttcttcctcagctcgccaccaggatatggccaacagcgcccacaatcggcgaacacgccagtgccgccaattaccagccacccggcggtagcctagacccgacaccccatggaggaatgccgcgctcgcacccaaactcctggtgcgcaccaaaataacgcaaagtaagaa

SEQ ID NO: 132525 - DNA, 441 bp, Zea Mays
ggaagatatgtggagagcttgtgcccttcagcatggaagaagttgggataaaagtctaccatatgcagagttctcatataataatagttaccaggccagtctgaaggtgtcaccttttgaagctttatatgggaggaagtgcaggactcctctatattgggatcaaactggagaaagacagttctttgggcctgaactgattcaagaggcagaagaacaagtccgtataattcgagagaatttgagggtagctcaaaccaggcaaaagagctatgctgataatagaaggagaccactggaatttgaggaaggagattatgtgtacctcaaggtgtcaccactttgtggaatgaggaggtttaaagtcaagggcaaattgtcccctcgctttattggaccattcatgatctttaggcgagttggggagatggcataccaact

SEQ ID NO: 132526 - DNA, 309 bp, Zea Mays
gcggtgaacatgtcaccgtggttcacgactcacgcaaagcggacaagccaaacgcacccggaaaactgcagggaactgagaaggaggcctggccggccattaatggacatcgaaaagctagggtgattgggtgaacaagtgaagtattgccaccactcccttgatagtccgtctacgccgtacgttggttgaagagctctaaaacatcactccaaaagatctgaaatctgtgtttggttatccgattcaaatccaaatccctcgaagcctcatcatattaaaaaaaagataaagtaaaatcacaacccc

SEQ ID NO: 132527 - DNA, 498 bp, Zea Mays
atgaggtcttcgaccagtctgatgaaaactttgagcgcgaaatttttaaggtcaaagaccctgtggtaaaggattccgcgggggcgctcttcgatcggatgtggggtcctcatggctaggaggcggttagggagcggtctgatcgggcgagagagcaggtaaggcttgtttttttgtttcgtgtggttgaatgtgggtacgtgtgggtttgctgaatgagtgtgctgttgctgcagatggcgcgtgccgaggatgtcgaagaccttggggatctgaacggcgcgcggcctgaggccgaggtcaacccggtgctgcccgaggctgaggtcgacccgaccctgcgctcggaagccgttgagggctcctccgtcggacctgtgtccactatgtccggtgaaggctccttgccagcccctacgccgacggcggaggaccccccgaaggcggtggcggagctggcagcggaggatcccatggcggcggccgggccttcgcagg

SEQ ID NO: 132528 - DNA, 509 bp, Zea Mays
ccgataaagggtatttctgtgacctcgtagaatacaactgatggtaggggctcacctcttgttactgttttcatcaacatatcaacctcttcatttttccctgcttgatgtgattgtgaggccgcaaaactatttttcaaggcttcacatgtctgtcagatactgaagcaacactggctctaggcagtacattccttttctacttgaacaaccacaatcttcgagtcggtcttcactatgcaggttctgactctaagggctctgagcttgcgaaggccaagaataacgactttcagactctgctatgttgttggtgcatttgtcggagtctaaggtgaagttgaggcgaacaacatacttgtacttggcgcccgagggggcggtaaagactgtggtaacccatcgtgccctccacgtccttccatgtgaggggcaatatgaaattgagtgttgagcaccccaaatgctctctccacgtccttccatgcccctcctagcacacaacaaac

SEQ ID NO: 132529 - DNA, 374 bp, Zea Mays
ctcatacttcgagtatgtttgcattcttgcatgattctttcaatacttgtggtaacattttgaagttacactatgcttaattttatttgcctttcttaggttatggtcaatgacacttccatgtgcctataaatatataaagtccaaatcaagatctttcctttatttaatcatcctcttattcaacttcaagttgatttctgccaatgagataaacatacttacaaaggagataatgcccatgattaggaaaaatagatcttcaagaccttgagcagctagtggtcattgtatctttgctacagtgattgccatcttttcaagatagtttgcattatatgatagatacctaatgactattgctcttgttcaag

SEQ ID NO: 132530 - DNA, 435 bp, Zea Mays
ctgcagctaacgtgcacagatgagacccctatcccagagtcgatcgtccaattggtttttgaagacaaaatgctgacgaattcctagatcattcgtgcctcgctggattcaaatctaattaaagatctcggttcatcaaaccggaacgtgtacgaatttggcattgttcgatcagagtaattgtgtgttcctgagcgtagccaatgttcaaggttagaaacattgaggaataagtccactttttcactgatccctccagagtttttgttgttcgtttctacgttcacgatgtcttttatcaaaggaaatgagcaaccgtaaaactcccacccgaaactataactgacttcttggtgttttttcttcaaaattactgtacattttcttttttaccaactgcgcgcgtatggaaacgttatttatttatcacctaaa

SEQ ID NO: 132531 - DNA, 366 bp, Zea Mays
ccttacttcactgttggagaaaggtaaagagtttaagtgggatgaagcatatcagaaatgtttcgaggaactaaaagaaaggctaaccactgcaccagtgttatttatgcctgatattcataaaggatttgatgtgtattgcgatgcatcacatttaggacttggatgtgtgttaatgcaagaaggaaaagtgattgcctatgcttcaaggaagttacggaagcatgaaaagaattatcctacacatgatttggaattagctaccgtagtgcacgctttgaagatttgaaaggcactacatgattggaaacaagtgtaaaatcttcacggatcataaaagcttgaaatacatcttcacgcagaaag

SEQ ID NO: 132532 - DNA, 453 bp, Zea Mays
tgacgccgccaccgtcgatgctcaggacggtgacgagcttcaccttctcagggtctgtctcgtgtgcgccttgtgcagaactagcgcttgccatttcgcgattccgatggcacacaaagcaagctatatatgtatgtatgcactatgagttatgagaacttgacaaggaacacgatgtcgtggaggtagtactgagaagcagagcgagcattattaaggtcgtctttatataaacacatgcaggagcctggattaactcgaggaagaagcaacaatgttgcctcagctgcagggttatacagggtcgtcaaagtaatgcgagtgatgctgtgatggccagctgacctgattatatttctctcctcggtagaagcctacctgttcctttcaaccgcttgtaggtaggagaagaaatcggtgccagactgccacgcatcttcaacgcggcaaaat

SEQ ID NO: 132533 - DNA, 280 bp, Zea Mays
ctagcttggcctgcccatgcaaggccagacaacggagaaggctggtgcgtgataggaggacgatgcacggggacctgccggccgcttgcagcaggaagaagaaaagatggagagggatcgatcgagacatgcttgtgacccctaagtacatgcacgctgcggcgttgtgacagttaatttactgcgggtcaagtcaggggagctgcaatatatactgcgtacccaggcggctgcttcagggttcctcgtgatttgcttcgcgtcttgactttgatgattt

SEQ ID NO: 132534 - DNA, 356 bp, Zea Mays
gaacaaataattgaataaaaggatgcattaactttgtgacaaaaaacaatcccttctctcacaacaagtattcttccaccagtttgagtgaagcgacttcgcgacaagttgggctatagttctatcaaacgaaataaccaagggaaacactaacatgttaatgtcaagtgggatctgcaccttaggtgtgctaaggataaatagaaactgaaatgaacgacaagcatgctttgctatttctgatttgcatatcattatgtaaggagatatgtaacaaatatatagaacacccataaatagaaactaaaatgaacacaccatttcaatgaaaaaaggtttcttagtatgaaaacatg

SEQ ID NO: 132535 - DNA, 563 bp, Zea Mays
acagttttaaaaaccattgatctatcatacctcctcttagcgctaagattataagctatcgaggaagcaaacaaagtggaaggcatgtcgtgacatacgaattacaaggagattttatgttaacatcaaagaaagtgttaggtttaagtagcatatattgtatgcttcagcaaatcggagtcagatgtgaatatcttaagcaaacaaaattgttgcttacactgagagtgggagactcgcaacattctaataggccaattcagagcgaagacatgatggctccaaatgaagtaagtttggggatcgaggctcgaagaatgccatcaaatagaggcacaattacgacatgtacaataatagacttttagcatttgccagtcaaggccatttgtgcaaaaacgccaaaattcaaaatgagcacggcgtgaagcaagatctactgtgaagtttgtgatgaaggatgcttggccagatctagatgggagtaatgtaattgtgtaaataagcaagagaattatatcatgtgcaaccactgaattattctaggatcgcataacaatttt

SEQ ID NO: 132536 - DNA, 544 bp, Zea Mays
atagtgttcacttgagctgaaaagtatagctaatctaaccaatgggttacatctttcttttggatttggactttatccgactattaattggtctggtccttaaattttaggatgtcatctgctccttaaattttaagaggacatctggtccttagattgtaaaatctcatggcatatgtttagaggtattcatgtatcaattctgattttacctaactctgatgcatttgatagcagtatggcactatgcattgacttctcccattccttttgcagctagggtggttcaagcagaccttccttcattctttacctacacaactttagatacaatgtcatctcttttaccatgttactgataacccacaactgtcattagctccctccctcttctgatctgaattaatttagacacttgctggcagaattggaccaattaaccttattgccacttgttttgttcgtggggtttttcgtgttcctgtgcaccaatgtagccatcctaggtgacgtgcacgccattggagatgaaccttacatccca

SEQ ID NO: 132537 - DNA, 411 bp, Zea Mays
ggcaaagatttatccgcggtgaccccgatggagttatccagtggatcagcggggaaaagaagctttcgaagaaattcttggtgatcgaagagatttctgtgcctttcctggtgcccgggggccatgtccatcttggggaaggctggttgcgatcatactaaggttgtagctcagtaaaactttgccttctcagttgatgatatcaaaaatacttcaaccgaagctactacccttggtggaaaaatttacttcgagatatggctgaatggcgaatgagaagtagctgatgaagccatcaaaagaaacgaaaaggaaacacatgatgcttcagaagcggcaaaaagggctgaagaagctgtcgaacgggctaggcttataggtacatctattgtgttttagcttcgtattccg

SEQ ID NO: 132538 - DNA, 331 bp, Zea Mays
gcgaggttgcgtaccatgcgaatgtggtaccagccagggatagcgagaataatcggacatggtaggcttccctattagccgattctcctagatgtgctaagaattggcttatgtgctcatacgtacttttcccgccttcaccgaaaatttagagaaatccagtatcctagttccctgcagatatggtacggcgtcaaatcggtgactataaggtttctgatatgactgccccgttgctgacacactaacaccaagtttatctctgaataaccaggttacctggtccctaattttttcaactacattaggtggtcatccattaagtacgggg

SEQ ID NO: 132539 - DNA, 439 bp, Zea Mays
taagtatgcaggcccagggaagtcaaagggctttggaggtgacaggtccaaccaggggcctgaaaagcgacaaaggttggtgattcgacctttcaatcaaaaccgttcttcacctcgtccaccctcctaccccttcaaataacttgtattcatccgccctgctactgcccccacctcaacaactcagccgagtgcccctggtgctcgtttccctgcactcccaagttcatcaactggctgcttcaattgtgggaagtctgaacatttcatcaaagactgcccataggcggaacaactccaataattagcagaacctggggagttccagccaaggcaagggaaacacgacaaataatgtagcgggcaagaatgtgaagaaaactaggcgaatctattatacacaagtggccactacaccggagagagatccggttatgat

SEQ ID NO: 132540 - DNA, 440 bp, Zea Mays
ctaccatacctgccatgccatgtccttgcatgcttcatgttgccattggcgcgtagctagatacgtacatggcaggcaggagcagagcaggaccggcgtccgggcgggacttggactgttcctgctgcaatcacacacagatcaagcactagagatgtccccaacacggggagcaagggaaacgagagagatcagggacggggggactcgtccagactccagagaccgttgccatccctagcccacgcctgacgccccacggcccgctccgatttcttatctttctgactgcaactaccgttcgttgagaatgagaaaggggtgaaatgagtgaacaccttttccttagactagactcgcatcccctggccgtaaccatggcagttacccactggaggctggagctgtacgtagaaatccttcgcgccttttgctgagac

SEQ ID NO: 132541 - DNA, 737 bp, Zea Mays
ggctttaacccaagcggtacacgcttgaggttgttgattcgaagatcgacggtcaggatgttatagaagccttaattacccacgccccaccgatcaagatcgaaaggtggaaggacgcggagttcagagcgcatacctagtcaaatctacattgttcctgacgatcggacggtcaccattcccccatgtccgaacgatacgcgagatcttatcgtgtccatccattttcgatctgatggcccccacgcgtcttctcccacacgaactttaccgacggtggaggcgccctgcccacggtggagggcccgccagagaaagccgaatccgtgcacccaggatcaaacccccgatccgattgattctaaacggtgctacgaaaatagcgaagatgtctggggaccttacctaaggactggagcatcagaggatcatggcctcgaggacctgcgacatggtggtggccatacattccgttgagcaattccatgcaccaccggtttcaagttcacctgatgaggtcatgggcgtcccccatgagacacgaggaagaccccctgccaaccgccgagggcacaatgccggtgaaccagatcttcacccaccctgcatggtggccctccatctccttcccagctactcgccgcaacgacgtgctctaaggcggggctcgacaggagttcgccaaggggggtgcggtacccaggtatttatcaccggggtaggacagtccgagccta

SEQ ID NO: 132542 - DNA, 519 bp, Zea Mays
atgtgcccttcagcatggaggaagttgggataaaagtctaccatatgctgagttctcatataataatagttatcaggccagtctgaagatgtcaccttttgaagctttatatgggaggaagtgcaggactcctctgtattgggatcaaactggagaaagacaattctttgggcctgaactgattcaagaagcagaagagcaagtccgtataattcgggagaatttgagggtggctcaaaccagacaaaagagctatgctgataatagaaggagaccactggaatttgaggaaggagattatgtgtacctcaaggtgtcaccacttcgtggcatgaggagattcgaagtcaagggcaaattgtccccacgctacattggaccattcttgatctttaggcgagttggggagatggcataccaactcgagttacctgctactctatcagatgtgcataatgtgttccacgtgtctcaactaaagaagtgtctccgtgtccctgaggaacagttacccatgga

SEQ ID NO: 132543 - DNA, 299 bp, Zea Mays
tagcatggggtgagaaagtttacagtgagaaagaactccttgtcgggtggtaatgcctctgaagatcgagtttgacttctctccttccttgacgaggttgatattgtccttttccagtcttgctctttggtgtctccatccgggtttgggacaagaggctaagatatatctgtgtatgtaggtcaagttgttgggtatggccaagttgatttaggtcaccaatttaagcttaagtggatttggagtatggctttatcctttgtaccagcattaagtaacttactctagattagatcata

SEQ ID NO: 132544 - DNA, 461 bp, Zea Mays
ctcgcctacgtatgggtccagctcgtcagttccttggcgcgcgcctgggaatgtttgtctcgccgacctatgggacccacctggcggtctctcactcgcactcgcgctctgcatctgtcacttctacgcgggcccgctctaccagggtcttccccttccgtcgccgcgcaaatcgggcgagctcggtgtggcgcagtccgcggaatccgttggagtagtgcgtgaaccgatcttaggcggccataagaagggcgtggccgggtccttgctcttcccttacctcgtcaacgcgcataccgtgtgccgccattactgtgcgtagagagaaagggaagaagaggcggccgcacgaccatctggacgtctgggccgcgggtgagccgtagttcgggtcggtaatcgtcgcgggttcgcggcggagccttccgcgggtgagccaagtggagtcggtcggggaaacg

SEQ ID NO: 132545 - DNA, 280 bp, Zea Mays
gctttccatatagcctggacctacaagttggacctgtattccacatgtaagcttaaagcttcctcttcaacacctcctgttcagtagattcattggtgtctgaaccttagaaaatccaatagtaactgttggatgtccagcaatcggatatctatttgagactgggattagttatgaacaaaccaagagtagctttccatatagcctggacctacaagttggacctgtattccacatgtaagcttaaagcttcctcttcaacacctcctgttcagtagat

SEQ ID NO: 132546 - DNA, 620 bp, Zea Mays
cgagctccggcgaactcgtaccggccacgacacttaatgatcggtgctctaatttggctgagacctaattcaacacctaacaagcgtttcccctcaatcaattacacaatccgagctctaaatcgtcctgcccacggagacagtgcgaactatggatgaacaaacgtgtccccagcgatctagggcaatctagtttagttcaatgggtcggggagcatcagtggcaggtaagaatgctgaaacaagagagcagagggtatgatcggacctgaaacgagctagccacggcgaagactctttcacggtggcagaaaacagatttggggaaactgagcaattcgtgggctcaggtgagtaattggaggcatgagcgggtggattggatgctagaatacctaacagagccgaggggggctcaatttataggactcttgatcggtggctcttgaatttgaaggagacgtgcggcggccggagagggggaagagtactggcgcaagcgattggtggcatttaccgtggcgggctcaccgacgatgaccgggcgtgctagagcgagtcactaagacgaagtacaacatctaggcacgtgtcatccgagcggcaaacacctaactccg

SEQ ID NO: 132547 - DNA, 727 bp, Zea Mays
cttgtccccgagcaggcaccaaagggaaggcttgcttgaccgtttccagagtctcccaggtagctaatgaactcggcaagcaagaccacttgattagaacttgagtattgcctttagaatcaagacgcctttgcaagaccagttcaggcacttgcaatcctgccaaagacctcgacagctgagccacatccatagaggaaggaattgctttctctaaccgagaaacatgagaactggatgaatatgagatgatgggggcaacggcaatttgtaagccactagcccaatcttagaaataacagtaaaaggcacaaagaaacgaaacaccagcttttgattggaacgaggtgccaaagaagattgcatatagggttgtagcttcaagtagacagtgtcgcccaccgcaaactatctatccgagcacttcttatcagcttgagttttgttttcatgcagtgttgagctcgtgctaagtgttgatgtaccagtgttgtcattactgatttttcctgaagccaatcagcaagcgaaggaattggacatgtcgcttgaaggtcaatgctaaaatgctttggtttgtatccatagagtacttcaaagggagaaagctgcagagctgaatgccaactcacgtgccaaaattcagccaaatagatccactgaacccacttgtgaggacacacatttatgaaatagcgaaggaatgtttccatacactggttcagcc

SEQ ID NO: 132548 - DNA, 450 bp, Zea Mays
cagatgtattttggatttcaataaaatgcattgtttgatgttaactaaaagtctacgaaagagggggaaaaacccgatgtaagcgatgaggtgactgtaggtttacagtaaaggttaaggttgtgcagtggagcgttgtgatagataggaactgataatcgacataaactggttggtagttgatatgacagccagggctcgaagcaacctttaatagtttgggagctaggtctaggcttgcatatggcctcatgctctctctgatcattatcagcgtcgtccgccccgtcaggtaattgggttaaccagaacgcagacaactggccgtcctaggacaccgacatcatacggggcaggagtgcagatggaggaagaagacgacacccatctgattcagatcctgcgccacctagacagtgtcgaaggagaagccttcgatgagtgcataat

SEQ ID NO: 132549 - DNA, 520 bp, Zea Mays
gtgcagggaagctggcactggtggtggcttctgtcgtggatctccagctgcgaggactcggtcgctaggcacgaaggcgaggtcgcggcaacggcgagcggaggtgctgggaccagggcatggtgtgacaacaacaggacaagcagtgctgagcactagtgacgtcacggccacaaagtctttgatgaggcttcggtggcgagcagatcaggcaactagcaagcagcgcgatggagtagtagaggcaaatagagaagcaagcgagtgaacagtggaggagaaaggagcacggccgatatatctttatatagccagagaagggaaggcagctcctaaagaggatgcgctttaatttctacaagaaacagcagcataaattaccatcaacaatgacgtaaacactgcgagaaacggctgagagcaattgctgtggaggaggggagaagagaaaacgccatggagagaagctcggcgcggtggtgcgcgcggctagtggggagaagagccgtcgcggcgcgcg

SEQ ID NO: 132550 - DNA, 433 bp, Zea Mays
agcccttcgccagctatgccaaaattacagcagggaagtctccgagacaccccttcgttactttccacccagcaataaaaatacccctacctggaggaaaagactttaggccctgtcagggagagatcctaatgaggatgaccccaccatagtctacatggccggatatctccacactcttgacaaccactatgatgaccttttctcccactgcacccacctaaattcctgggtggaaagcctagaacaacaaatcaaggcgtccctccaagagagtctcgaaatagcagaaggtgaagaggccaacactcatgaagcctaccaaactctaaagatggactacgataagaagttaaagaagctcgcccccactaagaagatccggaaacggacaaagagccaaggatgccagactgaacgaaaagaggaagcc

SEQ ID NO: 132551 - DNA, 605 bp, Zea Mays
ggccccctggcgggtttgtctgcttcgtccctagatttctccgacggtctccgcttttaggattgaattttcaacaagtttaaccgtccgatcaaccccatcccgggtaaatttgatcgtcatgagttctttttagtcgtctcctttggcagatgctccatacgtttgtgccctgattctgtgggccttctgcttcaatcgtttgttggtggcgaggctggtttattcagagtttctcagctggcggaccgggtgtttcgcttttcgatctcttgcaaagttgttggttttgcagtttatcatctacgctcctactcttgctccgtattcaaggcgtacctgcacctgtggaattctggcggccctaattggtttattgagtggcagcgttattctgcggaggaatccaattcctggaaactggttactcatcgccgttcttctccggccccgaatgtgaataagtctcgtattccagctctgacaggtgcaaatttggtccctttaggacatcgacagaggtctgttcgtgcccccgaaggattgatgcagatgcagcggcgttcgatttttgatcggatttccttctcccgccgctctgtccg

SEQ ID NO: 132552 - DNA, 548 bp, Zea Mays
gcacgaccgagggtgctcgctggccgcgcgcggcaacacgagggcagggggtcgctccttatccagggggagagagagagttaccgcaggatatagcgggatagagggtggggaagaggtcaccgttgtagtcaaagtggtggtcctgtagccgctaaagcgaggggagggggatgcgcgatggaaccgttgaagccagtctaagagctcttggcgaacttcatgaatgaccatttctgcatcctcctgaagcgaaatgtgatcgtctatgccaaaccatatccggaggagttcgataggatgccaccactgccaaagtttaaagttctagagtttttgagcgatggcacaagcacaatctagcacgtaagtcgacacatagcgcagctcggtctagcaactttggtcaaacatatgaaagtttagttgttttctctttcactgtataggaccacatttggatggtgcacttccctcggtccaagctccataacctcatggaagcagatggagggcgcttccacacacacttctactctgcactggtg

SEQ ID NO: 132553 - DNA, 399 bp, Zea Mays
ggtgacgagattccgcctccatcatttgaagggaagcgagtgatcctaaacctcaatgcacatgtgtaccccatctgcaagtctgcattctccaaccttgccgaatgcttggttgtgctgcagctcggccggtggaacaatcttgacgacaagacatacatggaggtggatggactggagtcacgggatgccatcggctcgctcaagaaccttcggtacctgagcctccgtggtctatcacggctaacagagctcccaaaagggatcgagagccttaagaaacttgaaatcctggacatgcgaggctgccaaaacctagccagagtgtcggcaggtgtcatcaaacagttgaagcagcttacccatctggacctcaccgagtgctacatgttagagcac

SEQ ID NO: 132554 - DNA, 564 bp, Zea Mays
cgcaccctctttaagcacaagtttgtggcaaggaaaattgggtgcattcatggaattgagaaattcggttgggtaaagcacatcaaaatctggaatgtgttctgctgattttgaaattgtgtcacaactaatgcactcgacgccacttccaggtaccatcgaaacaatactctcattgatgtcatcaacagttgaattattaggacaaatgatagcccgcacagctaggtaatcatagtttctgtgattttcaataaaattcgggtacacttcagttataagtgcgaggatcttgtcaccgtcaacatgaatcaatagatcgggagggatcgtgatccacgaaggctcggcctcgtcgccaatcttctcaacaggaacagtaccatctctgatagatagaacccatttgctaaattcagcaagagcagcacgcttttctgacggtaggcatgggctggcaagacgcatgttcgtgtgtaggctcaagaagctgacatggcgccaaagcctagagttggtaatgcaagcattaacaatcgcagatcgtgatcccttacgaacaac

SEQ ID NO: 132555 - DNA, 374 bp, Zea Mays
cgtggtgtgcacctccctcgtcgagggtcccgtgtggatctccgaggtcggtgttacaactgcctctctacttctcaccgggttgctacctgccggcgtccaacaaggtgctttcggtgtctcagctttggacatcgggtggcagtctgctcgtctctgccggtcgattctcagaaacagccagtgtggcagcgcctgggcgacgtcaaacagcgtcttccgggaagacaggaaacctcccatcgtgccttggtgaggccgaggattccggtgcggcctccggtgtggcagaggttgtctggcatggacaaggctcattctctggagggcgcgcgcaagacctcggtctggagacgtcttgcttcgtcgcatga

SEQ ID NO: 132556 - DNA, 843 bp, Zea Mays
aggaaatccaaacagctctcggatctaggtagcatgcaaagtcacatcctctcgctcaaacctgaacctcagccactgatgatctggatctatccatactgtggcataaaatactctgaccaactcctcaatatatctaccaccgaaggtcagaagagagagtaaacctggcagataggagagatgatcctttgactctacaccggcgactgacagaaaggcgggaagatccaaaagccagtgcactcgcagggcaatctaagcaggcaactgcgccctgaagaaagactcatgggtcccggtgctgaagagtggcgtagctgctgggtccctctgagctggcaatcaagaatccaaagataggtgtctgaaccgacgtacctgggcagttgtggctcgctgaaggtcaagcagacgaggatcagcagcaagcagtctcacctcagtcttgtgacgctcacagaagcgagttggaggactaggtggagtggaagcgggagcgggtgcagtggaagcaggagtagtggaggtggtggaaacagagggagtggtggacggctcaagagcggtaggagctggcgaagtgggaggtcgagtggagactgggtcgaaaggcgtggagcgagcagtggaggagcgaggccgagacgcgaggcgacaaactcggtagacgatctgatcagaggagatcctcaactgccctccctgctcagcctgatctgctgctgctgcaagagctgcacgagcggctctgtccaaacgcctcttctctctgccctcttgctgctcaagatagacagtcttgcccttgacctgtttgaaggggcgaggagggtcctcgtc

SEQ ID NO: 132557 - DNA, 580 bp, Zea Mays
ctctctcttacgcgcagggcccacccgcctcttccccttcccaggcgccgcatcgcctcgagcgcgcgctcacgcatgggcgctgcgccgcgccgccgcccgactggtcgcgtccgcactgcaccacccggccgccttcctccccgcctgctcgccttctccgcgagtggagcacggaaacggccgccccttccctctcctctccccccactctgctctaagtaaccaccgatgccattgatggcattaatggcaccactggccatttctctcctcccggcacccctcccttcttctcttctctataaaacctgacaccgagcccatggattctgttctcagccaccccatgctcgtcccgcgcccctaactcccttgctccgcgatgctcgacgtcggccttctgttcgtcgtcagccgccgctagagcgccgtccccatcgacccccatcgccagagcctgaccccgaccccctcgcggccgaccacccaccgtccccctgcacaagaaaacagagaggaccaaggttgaagatgatgatttttcaatctagtccacgatgttctttcttgctacccc

SEQ ID NO: 132558 - DNA, 558 bp, Zea Mays
gtttatcgtggagaatcacgggaattccctccccccacgggcagggagacagccagatgttcgcactccgagctggaccgaatcccccacagacctggaggtggctgaggcaggggctctacttgctgaggttggattgttgaaagagaggggtctgactgcagaagctgtggttgccgatttcattttcaagaacattcagccactaaaagacagagcatacccgacttatctgtattgaggcctcgctgattcgacccgggttaccaatagaagaattcctgctgtggatttggtcagtcggctcgagatgatactcaaaggcaaggtttcgaacatcggtgctcctgttgcatactcagcctggaatctgcctccttccagggcctttaccagttttgtgtcaaatcctcctgctggtgatagcggtttgggccttagagtgcgaccctctcccggagaggttagtgctttggttgcctcacttggtgaaattcctgacgatgagaggtaggttcattttgaggtacctttgaatcccagtgatgcagagataag

SEQ ID NO: 132559 - DNA, 442 bp, Zea Mays
ttaataaaggaggaggacagtcaaggcttagtagagaacttaaaagactaagtatgacataaggactctcatcgggaatatcagaggaatggggaagaaacccagagttagacaactgaaagacttaattagtaaagagaaggtggacattgttggtatacaggagactatcaagcagggatttatatggatcaagaattgaagggttttatagagggttatgcttttatatcgaactgcattctgggggaattttggtaggggtcaaggatgatagatttgaggtgtaagggtggattaaaggaagattttttggaggtggatatcagagatagattaaacaaaattagatggagactggtttttggtctatggtcctacagaccacgagtgctcagaagattacttcaaggaactagaggactgctgccaagtttctaag

SEQ ID NO: 132560 - DNA, 556 bp, Zea Mays
tacacttcacatatcttgtgcatatgcctagtttgagcatctgctagcacgtgcatttattgctgcacacttagcacaacaccgcttagagcatttttacactctggctagtatactcctgaagctcatgcattttatctatttcatactctttgttgcatttctattttttctcaggggaggttctcttgtcaagggggaatttttctttctacccctgtctgtgcttgatgagttcacttgtcaacaagggggagagattttgagatttcccgtttcctctatctagggggagaattttgtcttgcgggcttccgctcactcaatagggcgagatatgttatttggagctattgctagttgtgttgagccgtttgcctccttctggaggaactagctttgattttagcttttgtgctccgatgagattttggcttctcgctagtggtgttgaaccctgcttttgcctcttattgagggctagtcttttcttgcttggtcgtgttgagccgttgcccatttctttggggaccaagttttgcttactctaaatgac

SEQ ID NO: 132561 - DNA, 760 bp, Zea Mays
cagcccatctccgcgtaggcgtccgtgggtgtcacgtggggcctctcggccaggctccaggggcacgctctggtgcactcttcaggtcacggccaggtggacccgatttgccagcccctgctcaccagcgctatattttgcgccactccgtgcccgcattcgccctggtacactgccatgtggggccctcactctagcctcacccacctggtctgcgcacgcgcctcaactcaacgccatgtgggtcccctcggctgacaggtcttcttctccacgaggatcggatcgcgctgacccggatcttccatgatcgcgtgcaaccaactccgtcgccagctaagaaaagtggttacgccccctcgtcctgcatataaattcggagccggatcgtgtcgccccacatctccctgaccacccaaacgtagagggaaagtgtgtgccgccgtcgacatcgcggaagagaggaggaaagggtagccgccataagtcgacccgtgcgctcatcgccaccgcgtcctcggtgtcatgcctaggggcttcactgaaccacgaggatggtgtacatggcctcatcaagcgggactagcaaccggggacctggggattcctcgctgtcgcagaaatcctcacggagccgcttcacgccgtgggccggcatcgtcaccgtgcaatcctagtaaggcccctacctgttagtttaccacaagttctagcgtgtaacactctttgtgatagcttcgtttgggccatcgagggtcgg

SEQ ID NO: 132562 - DNA, 511 bp, Zea Mays
gtgtatggtcaagttggcatatatgtgttctatgacatattggtgatctgttgatggggttgaagttgtggtgagctcattgctgcacatatattgttgttgtactgctggacagtgtgtggttgcttgatttgaagcttagatgcttcatttggttcatacccacaaggtgttcgatgaaatacttgtgacaacttagcttgctgttgtttggtgcccgctttcgcagtgcgcggagcctcacaagtgatatcagagccgtgttatatcaaaggaacttggttactctctcaaaatgtcacgtttggaagtaagcaagtttgatggaactggtgactttcagctatggcaagttaaaatacattctgtgttaattgacaagagtttggaggctgctttggaggatggttatcctaatttgcttccacttcaagagtagagatgaacaatatttataagagggcattggcggtgctctgtttggctcttgcagataatgtgttgaggcaag

SEQ ID NO: 132563 - DNA, 348 bp, Zea Mays
gaaggaaggaggaaaaaggtggaactcaaggtgatcttgaagttatctatgtttttgcgctaaaattcaattgattatatgtctatctatgcgaatcggtagaggtgctgtccagaatttttgtgggtgggcaaacaacagtaattctagtgatttctgggaatttttcgtggttaattagtggggatcagtaggagagtcatgtataaatttgtcatacctttccaatgagtacttatgcgcttgattcggagttatattttaggagacatcgctgtttgaatccgggtatgctgctgtcaagaaaaacagatttacaggtgggcaaacagcagtagtattagaagt

SEQ ID NO: 132564 - DNA, 337 bp, Zea Mays
gggaagagccagtgtgttctcaaagatagatctgaagtcaggttaccatcagctgagaatccgaccctcagacataccgaagacagcattcatcaccaaatacggactatatgagttcatggttatgtcatttggattgacgaatgcgccagcttacttcatgtatctgatgaacaatgtgttcatggaatacctcgacaaattcgtagtggtgttcatagatgatatccttatatattcccagaataagcaagagcatgaggaacatttgaggaaagtacttcagagactacgagattgccagctgtatgccaagcttagcaagtgcgagttctgg

SEQ ID NO: 132565 - DNA, 402 bp, Zea Mays
tgccgcgtatatcggttggcgtcaaaacaacaaccgtatttttcggggatctgaaactgaaaacctagtagcttgcttcggactctggggaggactaacaactcgtatctcttaatctctatcgcgctgcaagcaagcaactcaggatcaaaacccaaatccatcctttcctgccgatgccaaaatccggagaggccgcatccttatccagccagtcgtcccatacgagcgttgtcgatggcaccaacaccgggcggcagagaagagataagaagcaacctttccacgctctggaaccgacctccccgccttcttcctctgctccgcctgcgccagcgcgccggcattgacctccggcatcgccaacccctgtcgccccaatccgcaggcaaggagggggag

SEQ ID NO: 132566 - DNA, 1005 bp, Zea Mays
gtggactggtggttgcacgggcgctcgggtacatagggcagtagatgagagcgtgatgagcgttggggccaacagggcgacgctgagtcgaggggcgtgtggggcgggcccagtgtgtcagcgtggggtggaagccgtgtgtagggcggacccagtgtgtcagcgtggggtgaagccgtggtagcaccaagtgtccaccttccgttcttaataatagtagggatagagagagaaaatggcaagggggggggggaacggaaaaaggagagtgcagactggaatctcttggatctggatgcaatgtgggatcaagacaaagtgtgacccatgctagtggccaactggaggaagtgctgggagcatgcagcattgtctggtatgagaacagtattataattatctggacacatgcctacggaaggctgattctcgatctgctgttttcctcagactgctctagagtaccagagcacgtagccttgctccaagggtaccctaatgtggatgaatgacggtcgaacactgactctgggctgtacgcgtttggtggttatgtgctcaggcaacactgggtggaaacctctgaatataatctgagtggtccaggatgctcatttgggccttctgcagttttttcagtacctagtgccatttagatcgtgttctaatgtttttgtctgaaataccagaacctgttcatgcgttttggaccgtgagttcttttttatcatcagaaaacaacttcccgttcttcaggcatggtttcccagacctgctggcaaagctctcggtttactttgcaacatggtatgatgtttctgtggtgggaggccaaagtttccccatgctacagaatttacatgggctccgttgtatagtcatgtacgatccactaacgacggtcgttccttttagtggccctgaggtctctgagcaccatgtgaacggcaatattgtacccgtttgataatctacaggcgtaggttattttgaattttttttgcc

SEQ ID NO: 132567 - DNA, 653 bp, Zea Mays
ccgctgaccaaaccgactccgttgaggaaaagggggggggctataacccgacgcgtcgaacaccaaacctcagcctatccattgccagctgagcttcagtcatcgccgaaggggagcacgcgctttgagggaggagagagcgtgccgctgtcgtcgggggtcaatcccatgattcaccgccatccgtgtcctcggggcaaggattggagcattgtgcaatcaagtggaaccgatactttgtggtgggagtgcacagaagctctctgtgacgccgcaatttctcgtcatcgacctcctttccatcgtggagccgctcgcgccatggccaagccctacgaccatactcccatcggtaagactacccctatctaattcgcattcgtctgagcatcgtattttacaagatggcgggcgaattagagtatcagatcgggggggggtcgcatgcaccagtaagctaagtcaccgtggcggcgaaggtgccatcgctcattgcggtgggttgctaaagacgccctggtgccgttagatttcaaacctgcggccaagattaaaaccagtgacactgattcaagctttgaacacgggccattgatcggcgatcaggcggtccttgtgataatgggtctctggtcgttggtagggcatctagg

SEQ ID NO: 132568 - DNA, 362 bp, Zea Mays
gctcggttgagtggacggaagagtcgtcggatgaggacttggattactttgcggccttggatgtggcagctacggaggcttcgccgtgtgctgcggatgctgatgttgtgtctgacctgagtgctgggcgtaggcggcgaagggcggttgcgaagcgtagagtgagtgaggtggatggcggtcggcttcgtgtgggcagggctggcaagcaggaattgtagtcctcgccggtcgttgcgagtgtaggtgagggggagttgcgaagtctttttgagggtgaggagctgaggataatgctatttaactatagggagatgggaatcattccgaaggttgaaccgatgtaaggtgtgatgccctcg

SEQ ID NO: 132569 - DNA, 337 bp, Zea Mays
agatgatagagcactcaagaaattcactgacagaaattagattacatagtaagtcgcatcctgttggaggaagacttcactaaaacgatgcaactcgcttaaaaacaatggttaaattcgccaacatggtggttgccagcatagcggagagatcaccacccaaatcatgaaaatggcgtttccacgacccaccaaaagcaaattgcacttaccaagctggtggaggctctccattctccaccttgttgataatggagcaaaacttataagagtccacgcttgtcatcccatccttctaatctacacaccaacataactgatcatgctaccttttgtg

SEQ ID NO: 132570 - DNA, 455 bp, Zea Mays
cttatgttgaatggtgtttaaaccctaacccttgaatgggctaagtatatatatatgcacgacgactcatcacccagggtgatggaccagaggcccatcacctgaaccagcccaaacctaattaaatcctaccaaaccatgcgcaacagctcatcgaaccacccctgcatgcatgtcagccacccaaactaatttccccccatgtcgccactcgcacgtatcactccgctgccacctgcaattagctaaagtctgctctgatctaatccaatccaccaccgcaccgatctacgctaccccaacgtccgcaattcctcatcgtcatgcctccattcattagccacatcatacgtctctcgttctcgactcatcaccttgaattgctgaatgtttatttttgaatgactgaagtataccttgaagtgctgaatgtttcttcattgtagaattttaga

SEQ ID NO: 132571 - DNA, 527 bp, Zea Mays
aggcaccagagggttcaatcttttgggttcccttccaaggggtcgaacctcagcaagccagccggatccactccgtcacatttcaactagcctggtcaaagttccttccacacccagtctgttgcaagcagccaacctccaaccaatgcttgttgacattgtggagatcccggtcactttaggaatggattggttgacccgacacaatgccattataaactgtgcggataatactgttcttctcatcgaccaccagggaaaattagtttcgtgtaaagctcgactgccaacccaagttccaatggtgttcagcctggcagcagaaggcatatctgtggtagaagaattcatggatgtatttcctgaagagttgccaggaatgcctcctgaaagagaagtagatttctacattgacctcctcccaggcaccgcaccaatcgcaaaaagactgtaccgcatggcacccatggaattggcagaactgaagcttcagatcgccgaacttcaacagaaagggtttattcatc

SEQ ID NO: 132572 - DNA, 539 bp, Zea Mays
ggggttcttttgtaaaacggtttcagcgaaggggtacgggtgaatggtggccgtgggatcacaaatcaagggtgcggattagaagcccaggctccgaaccggtgtccaacgtcagtggtcggatcccgatctaacggtcttcccttaaagcaccgatgcgagagccccagccgatggatccaagatcaacgaatctggaccaatccatcgaagggggtatccttgatataatccaggccgtccgtcatcgatccgacagccacaaccacctttctaatctagaccgttaccccgcagatcaacagcaccagtacatctcctaccttacgcctgtagccgagctccccacggtggtgttgtagttcaccgacgcacagagatccagccacccggcgcgcccaacccataaccgaattgtccaaggcctatagaagtgtttaacgagctcgtagtagtcacatacctgcgttggtcatgcacattgcgggctggccacggcagcggcggatccgcggcgaagttccctcaccggcgagaaa

SEQ ID NO: 132573 - DNA, 1151 bp, Zea Mays
gtaaatagtacaatctacagtactttacacagccgtttacactgaccgatgaagttggcctcagggcagcggggtcgtgggggagggggagagatgagggatgatccaaataataattttcattggatttgagtaagtgagagggttatcgagcgatatgaaccgttggtttttatagtgtgttaagttcgactccaatttatttggtggagggatggaggtgatttggttgggtgagttttgcaaagtttaaactagtatagataatgtccggggatgtcttactccccgcaggttgagttttttttttacgttgttagatatatggtagcgaccaggagaggaaatccatgaattttatatgttacccactgaaatttgggtactagatttgggcattttctacatttaaattagtgtccttattgcttataggctcgtttattttagtggaatataaggatgtgattgcggtttagaaaactccgatgatgccttgagtctatcatatcctttattggtaccgcactatcatatcctttattggtaccgcactaagtaaatgcagcaataatttcacttaaaaccttcgttgtttgtgaaagatacaaattcctgctactatagctatttgaagtattgttgcccgatgtgctgactgctgaggtagtaagtagtatggatctcgttggttaataccttgcattttgtttcttcattctagcaattcagcaattgaccgtgatgcacttctacatagctattttgaagtcttaatttagttgactagttgatttagctattaagcttaggtgcatctaatttaggactattgcattttcttgttcccttggaacttggaagtagtgaactgagacatgatagctgggatctttctctacgagaatcaattagtcagctgcagcatatccagaccagggctttcagcgatcaacttactcgccaaatgatgattttcccatttccaaagttttctttctggccttcaaggacccctgttactgcagaaatatcacagttttttcccctctgttctttggatgcctttttgcaatgccgtgtatgcattatatatgccctttggagtaattggttattttacgagtagagatgaaaacggtcgaaaacag

SEQ ID NO: 132574 - DNA, 831 bp, Zea Mays
aggcatttggtactgtctgctttttttattgatacaagagatttaatccaagagcatatagcctttagagtatggccgcttgtagagaactgggaaatgccgaaggagactgtcaccgagtctagcgaaggtgagctggttcaactgaaatacaccttcagatatggagataaatttgatgaaccaaatgacgactgactgaaatgtatcgacgctacaagtgatgaactgcttgggtcatattctaaagcggaagatgatgcattatccacatcctttgggggtcaaggaaaaaggagattgaacagagtttttgatgccattggttttgtttaccccgactactgctacccgctacgggtacggggaaagaagagaaaaactgctgctttggccaagactgctgcttcggccactccagatgaggctgcgccaaagagcaaaaggttgaaagtccttacccaccagccacgttatattgaaccggtcgtagtgcctgagtttggcggggagacttctttagctgctgaaccaaaagagcccattccccctacgcataaggttgaagattcggctataatgccgaaggtacccttagccgagctagctgagtcgaagactgataaagataaggccgaagagccaaaaattgaaggaacaaaaacgttagaaattttaagcccttcggcagaagtaacagtgccgaaggcacaaaaaagttttgcggcaactcccaaaagaagaaggatggcaaatgtactagatgtgttagaaacagtaaaggctttaagctccactccttcagggaaaatcgccgaagcttcaaaaatg

SEQ ID NO: 132575 - DNA, 669 bp, Zea Mays
tttatttcgtatcgctttctctttcagcaaaatctgcttgatcgcagaagaatcctcctccttgctagctcgtgctgctgttgttccctgcaccgaacttatcggatcaaaagcgggtgctggcactggcacgaggcagtgctgtgactgtcaccataccactaggcagctcaattatcactgtggattggattggattggattggaggatgggaagcggtggtggcctgaaccccgcccactcgacgatccctctagcgcagagcaacggagaaaatgcgcctcgaaagcgtgtgctgggtgaagcatgaaccgcgtacactctcgttgcaccggccaccaccaccgggcagcgacgagcaatcgaacagcccattttctcaaataaaaccatgagctttagttggcatgctgcatgtacacatgtacgcgtcgaggggggaccccgagcctcggccattgtttggcgaaatccagtactgaaaggaagctccaaagcttgtttgtacgccgaacgtttcgcgggaaagggaccgagcaagtacggtggtggtggcccctccccgttgctttcgccgtggaaaaccagttgcgacggatggggatcggacaggtgtgcgtgtgcgtcacgcgcggggggcacggtggtggtggcggtggcggcggcgg

SEQ ID NO: 132576 - DNA, 1211 bp, Zea Mays
ctgcctcctcccaagacgttcatcagttttgtgtcaaatcctcctgctggggatagtggtttgggccttagagtgcagccctctcccgaggaggttgaggctttggttgcttcgcttggtggaatccccaatgacgagaggcaggttcactttgagatgcctactagcccgagcgacgcagaaataagtaccatgctggatatgttggctgaggattcctctaactcggctcctgctgaaacactagttgtagcactcatcccagagtctagaaaaacattggacattcagagacctgatactattcgcccgaaacgtctccaccaagctattcatccaacttctcctgctaaagggaagaagaagaaaaagagacggcttcggcgagtgtcatccttgaattagaatgtcggcccttctgctcctgctgccggggaagtgctagtgccagtttttgttgaagctgaacccaatgggtgtgacccgattgttgctgatcccaatgggtgtggccttgatgatgttgaccccaatgggtgtattgtccgtattattgatgaggatgaggaagaggaggaggaaatccccttaattcgaaagaacagtcggcgctacatagccagcggggagagtagtggtgttccttctccagctttgtctgctctcgttggtctgcaggaatcgtctctggcaaattttgatcagacttttgaagacatggtccctgaagatctgttgtccgagcccgcagatggtggaatgatggaagtttgcgctgatgtgcctgatgccgggttagagttatcctgagcagcgtctcgtgcctcgtcgaccttggagcgcggtcttaagagtcgagaagctgatctggattgctccgttcccatggaagtggttgaaagtccttcagccttagaggtggctgttatagagaactcggtccccaaggatgatgcttgcctttacccagcccccgagggtgttgccagtgatgatctggctcgggtgggcagcgcgagctatgacccagcccccaagggtgtccgagcgggttctctttttcatacttccatggatgttcacatcgggtcttctcctccacattctggttgcattgcagcaacacgggcttcgggtcaggaggtcgccttagagaccggcgcgcctgatgacagtgttttgatttctgctggtgacgctgaattggtccc

SEQ ID NO: 132577 - DNA, 442 bp, Zea Mays
gaacatactgcagcccaatggtggcagtttcacaagatgcatcatgggctgggaggttggcaagatttttctgcagcagtggtggagaaatttggggctgaagcttatccaaatgcgttgaggaagttgttggagttgaggcaaactgatacccttgatcagtacattaaggagtttgatcagattcaatatggggtagcagtgcacaaccctgtgttcgatgagattttctttgtgactcactttgtacatggtctgaagtatgatattcaaagtgtggtcaggatgcagatgcatacgacggttgatcgggcaattgtgttggctcaaactcagcatgatattttggagcaagccaaaggaaagggacaacgtcagccgttccataacaagcaagttgtagtggggttcaaaggagaagggaagcaaccaccagtgggcg

SEQ ID NO: 132578 - DNA, 376 bp, Zea Mays
gtgatctgtctataaataaatatgcatgaagagccatattgtaaagttgttcatgaattctaagttaagttggcagcattcgtgacatatatagtaagtagatgttgatggttcgtaataacagtaagtgaccatgtggtaaaaagtgagaaaacgaaatggaagtttatgtatgcagggtgaacaagattgaggatagtagcaattggtgacttgaaactgtggaaaactggaagtgcatattttgttgaggaagaacagtaacaattagtgacttgaaatttgaaaacaggaagtgtgtgttttaaagaggaataagtgagacaacaatataaaattgatgatgtgtagattcataaatacgcataaaaaacat

SEQ ID NO: 132579 - DNA, 541 bp, Zea Mays
cttgccatccgctggagaagagtcaatcgcggcggccccgttcaatggtctcacgacggctaccgtgaacacgacgacgcacccgcgcgagatggcgacctcctcggcgtctatctatggcttggttgctggcgaggctagtggcgatcttgttgccctccctcaggcgggtgagtcttgcggcgggcgcaaacacagcgggtgagctaatggcagccaatgcaaccggttaagggcacacgtccggcaatggcgccccgtactgtagtgcctatagtggtcagcgccaagccctatcaggtacgtatcaaatccacccctcacgagtctttgaagattaggattcctgataaagggtggtgtttggtgttttcgtgaactgggggttcctgaatttattattatttttttggggggaagaactggtttgtcaaactatggtttcaggaattgaatttggtcgtgatttgctaatcccctcattgtacttgctgttattctctacgttagacatgagccgaatctcaattaggcttacggc

SEQ ID NO: 132580 - DNA, 798 bp, Zea Mays
gtatgggcagcagatggcagtggccgagcgccgagaggggcaagccagcgaggaagacaatcgatggcagccagtatcgtcaaggtgaggtcgcgatggtcgtgggatagaggatggcgttcgcggcacccgcggttgttgcgggcgctctcatcgcgtggagatcgcttgtcggcgggaggcgggctcgtcgcatggcgtaggccggatgctgccttgttggagcttgtggcggcgacagctgtccgcggagcagggtgctcgtggtagaggcggtgattgttggcggtcgtgggcgcagtggtggcgcgattgattgatagatgattgatgagcagcattgagggatgacccattaaagaatgtttgtcggatgtcttggaataagagagagtacacaaataaaatgatttagagcgttggttttttatagcgagatttatatggtgttaaaatgtttgatagctttagcagagacatgagtgtgtgggatggtttgtgctgtgtacgtagtttagtttaaattggtgggttaaaggggtagagatagagataagcacagtaataacatgtggcttcaaatgagagaatcggttatgcactagtgctggtaatttggctgggctgagcccgagcctatcgtgcttcgggccaagaaggctcaaaagttttttaggtcgtatcgtgcgagtctaaagagtagaaaaagtggcttggcccaaccctaaagtacgtcgtgctttcgttggaccgtgctggcccaagatcgacctatatacttgaactacataaaatcca

SEQ ID NO: 132581 - DNA, 1711 bp, Zea Mays
ccagcaggcagtagccgcttaaaccctcgtccccctttcctcctcttcccccaaaccccgctctcctccgccggtccgcccccgccatcgcctgcactcccccggcctccacaataagccgcatcttgcatcacaccgacgccctaatgctctcgccggcctcctctcgctaggccgcgccgcggacgagcgtcccctgcacctgcacacccgcgcgaccgtgctcgcgcctgctccgcgagaaaacggcgcccctcggtttctgcttgtccttgtccgccggcggcgctgcggggaggagaggagccgggtacaacctgaggcggtccgcacggtcgatggtggcggcgcaggtgacgccggcgccactgctgcggcgccacggctcggcgcccccgtggctgtcgtcgtcgccgcccttcctccttcgccgccgcgcctcgtcgcccttctccctgcaccgccgcgcctcgccgccactggcgatttccgggtgcaggaggtagtcgccgcggtgccgaatcactcttatttcctgtcgactcaaccgatgttcgttgtggccttcggaggccgttgaatcctcttcgggctacgtggaacggacgttctctaggcggtgctgagttgtgtgcctgtgctgggtcgggagtgatgttcgtattgttctgggcgcagagtgagtcactacgtggatttgcgtctcgggagctcttctatttcatttccaactaattagctccatgtattgacctctgtaagtacagtctctgccaactattcacgggttgagccggctgctgcataggggacgcagtgtgccagtgtcacatcctactgtaccaagtttgttctgttctgcgctgttagtgcactgccggctaatagcgatacacttaagcttgtcattgtaccttgcaatctattcacactctctgaaatttctccctttacacattttccagtgacttagtaatttcatgttgcttagtggttcctaactttggtaacccttttaactgacaggcaggactattcccattgctcagatatggctgttcgaggaagcagtgctttcaagctacgtttctatcccaacttagaagtacaaaatattgcacaagaatgggttaaagagagccggaggctgttctatctaagaactgccaacaatgtcacaaataacatctataagggaaacactcctctatggactggaatggtacaaaatgaactctctgaagattgcaggggtttgaactacacttatttgaataatttgagggaacgcgtatcgtccaaatcaattgtaaatagacatggtaataaccgagaactgatcgggcatagtacgataaatcagcatgtgaaatcagtgccagctccagtacgtgttgttaatgatagtgtcaagtgtttcagcatgcctagagcctctaaggtggagattccttggcctgcctattcaccagcggaggatcctttgcttgataaatctaatacagaggtaattttggagcttgaggataaagttcatgatggtgatgacaaaaagaaaaaaactgttgtaaaaaaggtggtttcacctttcccaactaaagcggccttctctgaggaatctttgaaagcacgggaggcacttgctagcatctacgacaaagttttggtagttgacgatatcgagtcagctaggaacattgttaaactgctc

SEQ ID NO: 132582 - DNA, 378 bp, Zea Mays
tgcggaaagatcttcggagaactctgtaccgcctgtgattctggacctcaaccagagtttcggcgagggtagcgaggaaggggaagccggagaggatggcagctacgacgaggaggatggtgactgcgacggcggtagcatgagtagagtcgccggaggaagcagttcaagcaacagcagcagcaccaaccaccatacttctatgagcaacaagaattatgacacgaataatagcagcagttgtaagggtgagggcagcggggagacggcgcagaccgtgaggcagtacaacagatccaagcttccccggctccggtggactccggacctgcatatggcgttcgtccacgccgtggagaggctgggcggccaagagag

SEQ ID NO: 132583 - DNA, 692 bp, Zea Mays
gggtgagtgagttgccacacaaaaattgaagaacaagaccctacaagttgctcgggcagagggactgacgaagatagccatggtacagtgatcagaaagatctccggtgccgtgagcctgacgccggtcatcttccaccgcaattcgcgctagcctaggagattcgtgccgcgggagtgatagataacgccgggtcaaggtgaaaatatcgggggaggggtgaactcagtcattggctagaccagccatcgtgtcccgccgcagtcagtcagtcacgttggcatcatcggagctcaccatttctccgaccgtgacacgcaacgatctctactccacatcgtaatggtcgtggaaagcgaccggttatcatccctggaccaattccctcctgcgcgccacgttgagtcggccaccgtaaaatatcctcgccacggtaaccttgatctcaatccaaaattcgtgttaagcttggccagagactataaattggaagcaccccctgttccgcctactcgttacaaactcagtgaaccactcctcacccccaatcatccaccgtagcgccctaatttggaattttcctcaaatccattctccgcgccgccgtgagcaccccctccgtcgacccactgtcctgtccctccacccgtcttcctagcttccgttcttgagtcctggtatgttgctaaagc

SEQ ID NO: 132584 - DNA, 663 bp, Zea Mays
cgtcaaactaaatgtcatgaccgtgaactcatatagtccatacttagtgatgaatgttgtcttcagtatatctgagggtcggattctgagctgatggtagcctgacctcagatctatctttgagaacacactggctcctctcaactgatcgaataaatcttcaattctgggcaagggatacttgttcttgatagtaacttcattcaaagctcgataatcgatgcacatcctcttcgtgccatccttcttctccacaaataacactggggctgcccaaggcgaggtactcggtctgatatagcctttctctgacaactcatcaatctgcttcttgagctccaccaattctggtctggacactcgataggctctcttggaaataggggcggtgcctggtataagctctatggcaaattcaaccttcctttcaggtggcatacccgataactcctcgggaaacacatctgggaattctgacactacattgatagcctctactggtttaatcttctcaatatgagcggtgacttggtgacaactccctttcctcggtcctaacaagaccaattccactaacacttcttctcctgatagggacactaacttcactgttctctcatcgcaactaagactggcttgatacttggttagccaattcatccc

SEQ ID NO: 132585 - DNA, 898 bp, Zea Mays
cgttagtgaaagtaggacctccttttgcaagagcacaaagaatggggctgtggtgtttctcacttctctcagatcactcttgctcacaaagagacactcagtgtggcgtggctgtttaggattggcatgaggctttacatggctagatgggttagaactctctcccttacttgggttgggggtctcactcaattttcttttgtctgattcctctcttttcttatgagccatatctgaagtatgtatctcctctggagataatggaacaagaaccaccttcttgtcattgtgaatgaaagtgtatttgttagaccgtccaaaatgcactgagtccacatcaaattgccagggccgaccaagcagcaaatggcatgcttgcatgggggcaatatcacaatccacctctccatgataatcaccaatggaaaatgacaaatgaatcatggctgaaaccttaactgtcccagaattattcagccattgcatatggtacagatgtggatggcgacgtggctacaaaccaagcttctcaacaagcaaagcactaacaatattattgcagctcccaccatgtatgatgaaacggcacacacttggccttgcactttgcatcgggactgaaataaattatggcgttgtccttgttcagatgcaacaaactgagtggaaagaactctcctaaccaccaaagaaggagatggtgtattcattgtagaaggctcgaaatcaggaaaatcagcaagcaactcatcaaaatcagcactagtaatctcgttacaagatggagaaataacatcttgtaacatgtcattgtgagcaaaagttggaataggctaaatcgctaaacaattcagacctagctcaaatgtaccatcctctgctgaataacaagtgtcaa

SEQ ID NO: 132586 - DNA, 1146 bp, Zea Mays
atgggttctcttactgtttaacaaggacactgacactttgcaagaaggtcctccagtttctatctcttcgcacggctaggaccccgacgacggcagcgcacggagaagctccggcgagccactgtaccggccgattggggcagtgaccaacgctaagctaccgccgagaccaaattcgagtcaccacgactgtttcccccaacttaattgcactattggtgaactatggagctccggccacggtggccgtaagcatagcggcgaaatgatcatgttcccggcgaccagagagcccccagcccaattacatgggtcggcaagcatcatggagttacgagaaagctcaaacgagagggagagaaggatgagctgaccgaaaaggggctggccgcggtgaagccggtttcacggtggcggaaggtgatttggggcaaaaccaaaattcatgcactcggaggcacgattgctagcgattgttggtggccgagggggtgatggtgttacgcagctaggggagggctcaatttataggcggagtgagcggtggccgcaaattttggacgagcaacgcggcggccggaggtggagaagaacactggcgcagtgaatacgtgttcaacgtcgtggcagctattccggtgagcaacggggagctaaagtgaatcgtggcggtgcagtagcgaggctcggacacgcggcgcaaggccgaggggcggtggtcatcggcgaggttatccagttccgccgcggtgaatgcttgtacggtggccggaatactttactggccggagttatccacgacgatgatctccaagtgctatccagtggatttggtcacgagtcacggcggtgatggcacgaatctttgcgcagggagggtcaccggcggcgagcaagttacgctggcattctgatccactcggtctactgtaccatggcgaatcccattcaaacagcctgtcagccgaacttggagcatcattttctcttaatttctaatgtcaacacatgtcaagctctgcagcaaaagtatagagcaatatgccctctacaactttgtaatatgatgatgccacaaaaactcattggatcatgcttgaatttaagcttgaagttgatggcatcaatctgccagtctgattttca

SEQ ID NO: 132587 - DNA, 823 bp, Zea Mays
tgggagtagctagtacacattcgagctgtcgcaaataattgcgagatggaggatcgcctaacaaaccctcttgcattgcattgcatgcgcgcgcgcgcgtcgcctaacaaaccattacacaattattaattgttggattacctctctatatatgcagtgcacgctttaatattcttgttaattggatggcggtgtatattaattaatgaagacaagctagctagctagctagcacaatgctgtgcacacccactaattttataaaacttgcaataattagcacatgcatggggtttcatacatacatatatttttactttgtcttttcgtagcatgttatgcacttttttgttacgtgaagaaataaataatattccgtttatgtacctttttcactaatatatactctctttcattagttcaaaaatgaaacgggtttcattagttgaccaccggccgatcgactcggaggctgatgtaagcccaagcgtcctatcctccgggacgaataacctgggctagagcatgcaagtcgtgtcagtcagggagagtacaacgttacagttacataccagtgcagtgccgcatgcaacatgcattgcatggtacgtaccatctcggttgttggttggttggtccaaacattgcccagtttcaaaggaaagagaccatccaggcaggactcaggagcatgagctgagcagcaggaggaacgggcgagtagtggttggttgcctttgttgggttagttagttgcgttgcccggcctccgtcccccatctgcacctgcatcaacgtggcactttaatttcctcatcatgca

SEQ ID NO: 132588 - DNA, 926 bp, Zea Mays
atagagaatatgtagcctttggcagctccaaataccatcgtgtacagtgtgttcgtgtgaattttgcctccctccgatcggtgttctaacaacccagcaactcgcttaccagccgaccagccgccacaccacatttgcatacctctgagccccttccgtcgagcaccgagacccctgtcccagcctacctgggctccagccattcgaccgtcacccgccctagcatcaatgcctcgcccgctgggtcgtcgctcgcatcgctctcttgcctggcgacaccttttttagtgcagattgcagaggacatgtcgccttggctgtagaataatcgagtaagcgatagaagccactcgtatggagaggtagtaggaagaaatcatgaaacatttttcaccgtcagaattagatcgagcgaccaagaaaaaagaagacatggcattgcgaggtatcagctttgctttctcctttaatatatagaaatataaattggtgagttctatattgatgtactaccaaattttagaaatatatttctctttttcagtacaattattgttggatgtaaagaaaacattgagaaatctttatatgcgacacaattttttttcacagatttattgggttcaattgtgctctacatttcaaagctgagctgtgatgattggttgctaaacaaagtaggttgagatcttataaacagttataattaaattctttgctatgtgatatataaaagtcgtagcaacgtacgagcacttaactagtggacaataacgcttatgtagacatttgttttgcagccctcgcctttataaatcataaatggatctggaggaaaataacacttcgtgtacaccatttggagacctgataaacaccaccaatgaaggtaaccatttatctatatggatctatgtagtatagtt

SEQ ID NO: 132589 - DNA, 447 bp, Zea Mays
tgggtatccatcctcttgttcattgtggtcacctgtgctaggaggcgatccagcttctcgtgtatcgccatggtgtccccctgatcgttctcgatgccggacatttttgtcgaggcgtcgatcggctccggtgccaaattgatacgcctgggccttctaggagtgcgtaagggcgaatagaggagcagcgcagcctgggacagggacctgagtgcgtatggtggagaagagtgggaggaagaagcaggagcaagatcaccgtcggccagggtgaccaaggtaatcgccccacagggagattgtatttccttcgatgcctagttacacgctactgcttcccctttatagaccagggtcggcaccaactgataagagataaacttgcttaacaactccctgctattatttagctaacaactccctgctattatctagctaacaaaccag

SEQ ID NO: 132590 - DNA, 552 bp, Zea Mays
gttggaatgtcagtcactattgaagtctgaattttgaccgatagtgagatcggatgaactttgtgatcgaattgtgggggatttagtggatctttgcgcaagacctttgtaacaaagttatagttggatcattggacaacaactttgctgcagatgaatgagtgagttgtcgcacaaagatttgagaacaaagccctgcaagttgagccatcagacagcctgaagaagatagcaatggtacagtgactgaatcagaggccagattcagtaaacctcgctgacggtgacctccgcgccgcgattcacgtcggtgccacaattcgtgccagtaaagagtggataaccgtggtggttaaaagatcttgggggaggagggcttggccagagttgagtcaccgccgtacccacttgcccgcgcggtcggtaaaatatcgccgccggtgctcgccgtgatcgcagcaagggacacgtagtcgcctgattcactgcattgtcgtgatcgtggcatcccctagatagtgacttgtcgcacggtgaacgcgtgcgctccac

SEQ ID NO: 132591 - DNA, 474 bp, Zea Mays
tcacaaaccctaaataaccctaaataggccattttagtgcaagagggaaaaacttgtaaaaagactttgaaaaacacagaatcatgatgagaaccaaataacaaagttaaaatgcactaaatgaactacaaaacatagtaagaaagtttgatcagcaaagctttgcaaaaatctcaaaaaggcccttcaagctaaacttcaaaaaggaaatttagaaaattcataactgaattttcagccctttgtaaagttcagccgtgttctctgttttccaaaactcaaatctacaaaacccaaatatgaaagtggcgccaaaataccttgaacacaccctggagaaatttggaagcaaaattcggccgtttgacatgatcttggcagggatttgcctcgggactccaccctgtgacactgccacattgccgaggcgacaactctctgcccttgacccgaaatcgctcggctccacgcgca

SEQ ID NO: 132592 - DNA, 448 bp, Zea Mays
tggcaataagttttaatccactgtaagatcgagtaaaatattgagctattgcaagggtatcataaatttagcttaagtctgacagatatcgtgtggcaaaagaataagacacgtgtatatcaaggtctagctgatgcatctttgtgcttgaggtcttgaaattttatcttttcattattcatacaaagtagtgaattgcctagagaccaaaatttcgagttctgctcctcgttcatgtgatggtaatagtttgcacatactcccatttcatgctttttaggcagtggcttgctaggacaaatgaatcgatagaagtgtcttttgctaccaccaccgctaccctcgccccgacgttggagccgcatcggccatgtttatttcaacttttttcagtcaggggctggttcaatataatgacaagggtattcaaatgaataccaagatttca

SEQ ID NO: 132593 - DNA, 314 bp, Zea Mays
tacttaatttattttcaatatattttttcttttaggaccattatatgttttcttctaggataggattctctcgtgccttgctttttaagttgcatgatacttcattgcgacattaatggatagtagtttccatgtgagcttgtcataccttatgcttgcaaataatagaacaaaagcctaaggagcactcagtttggtttatttataaaatatacaaatgtaataacacaaaagggttgccctgtgtggctacttgtacatgcttatctcaaacttggatcaaagatttatttttgatatttttgttcaaaatt

SEQ ID NO: 132594 - DNA, 303 bp, Zea Mays
gagaagaggagggaaaaactcatgaccatcgtaatgagtcctttgagattgagcttcgagatgacaaggccattgtgcaatatgcaactcggctccccatgccagctggtcgaagttgaattcagagtggtgctgctgaaattagcactagggacttagtgcaggaatacctggcgaataaaacttttccaacctctagcggttgagggatgccgaagaagaaggaaggaggaaagaaatacgaacttgttcgactcccctttcgtttcaaatttgagaaacaattcaagaaaccatgtactg

SEQ ID NO: 132595 - DNA, 689 bp, Zea Mays
cagaacacgatacagccaagcgcggtttgtagctagtagggtcaagcgcggtttggtgtgtgtcgttggaagaactcgaatttcccacagaagcaacgattattctctactagggatgatgctaaacaaagctacaagctagctagggacctcgctcatcacttccaggaaagacactgggtgtaggcagctatatactaataaataactagttgttaatcatgatgttgattcgttcattcctaaagccccatatacatacttgtttctttcacaagcagcatcatatctatccatggcaataataatacaaatcaagacatctatgtcgatggtagtagtactttgtatatatttgcagagatgaatggggcatcatctggagcatcgatctatagataattgttagcaacaattaattgtaagtgtttcaagctggccaaccaaaatcttaactaattgttagctagaccccaattaacaattagtacctgggttagaacagctaaaatccatgaccaaatatctctcgtgcgggcataacttccaagactatcttggttccccacccagtttctacaacatcttttttttaatgactaccgtatatgcaaaagacaacacacaacagcaagatccaaaatgcgcaagccaaaacagtaaccagacctggcaccgacgcgtgcaag

SEQ ID NO: 132596 - DNA, 562 bp, Zea Mays
ttctactaatatttttcttctatgttgtttttggttggatctctgggccatcatctagagaaagacagcaagaaggacgttggaggaaaaaagcaagctaatcagaaaaattgtcgaagaaatctccaaacgtgaatttggctgggcgccggtagatcgtcatattacgtaaataaagacgtctacataaagatcatctccaggcaaaaaaatcgtgttttcacctttaatgtcttcgcttttgctagtataggaaggtatcaccctggcagatgtgtggtatgggctgcttgatctcaattctatgtcttagtgatgtttcccctgggctgtatgaacctgtaaacgttgttcagatcgtgctctctgaataagttcagtcgtcgtaggcctaagtcgtggaaatgctaatgcatgtaaaatctcgttgtaagtgttaagtcgtacttggttcctatttcctaataaaatagggggaaacccctttttgataaaaaatgcaagctttatttgtggtcgtcgtgcctattaaatctatctagggctagaaacgagctgagcc

SEQ ID NO: 132597 - DNA, 753 bp, Zea Mays
aaaatatctggcattttcattatatcttcaatttctggtttatcagtcttatcaaccttcgtttcaacttccttggctgcaggcatcttcggcattacaaccggctcttcagtactctgtgtagttgaagcagtttcttttctttcggcagcagaagatgtccctgcgccaaactcaggaaccacgaccggttcaatgtaacgcggccggtgggtaagaaccttcaattttttgcccttcggcacaggcttatctaggctgtccggagcagaagttttcctctttttcccttgtccccgcagcgggtagcggtagtcagggtatacaaagccgatggcgtcgaaaactctgtttaatcttttctttctctggccactgaaggctgcggacaaggcattgtcctcggttttggagtacgccccaagtaactcgtcgctagtagtttcaatgcacctcagccaatcatcatttggttcatcaaacttatcttcaaacctgaaggtgtatttcagccggaccaagtcaccttcgctagaatcattaatggtttccttcggtgtttcccagccttccgcaagcggccacactctgaaggctatgtgctcttaaactaaatctcttgtgcaaataaaagagcaaacagtgtcgaaggccttctaacacgcttccgcagcatcatcaatttcaaccttcggccttcggaggccgaagcaagaccaaatgggacgcataatgacttccttaatatcttcc

SEQ ID NO: 132598 - DNA, 604 bp, Zea Mays
acgacacgacgatcaagccgagccggcacgagctcgatggattatggatcaagtcgtgcttgagccgagccaacatgagtccggtggacaatgggtcaggccatatgctcggggcaggccatgggtcacctagcaggtccggtccatttggacatatatacccgtacaccattgatgcgtccacacaagtagatagcagcacaagcaagaggatgacacgtacaggggggctaccaagcgtaacacaatagagttgccaggacatcgattgaggtatatggggtttagatctggtaaatctgggattagttaagttcgattcgagattgtagttatttgactaaggaggggacgtacgccggtgcgggcacccatcatgccgtcgccacccgccaagcctatgaggcttgaagtcgcgaggacgtgaggaggacctgcctctaccatccacacaagccactcatgacatttggctatttactctagtgccaaggcagagatgggagaaggaagggtcaatggtggctagggtttagtgtcacccgagccacctcaagggagacgacgggtggatcaaaattatggtttctcactagtcgggggc

SEQ ID NO: 132599 - DNA, 455 bp, Zea Mays
gcggttcgtgggccagacatctccatcgccgacgtgctggccggttcctactcggtttccgtcaagctctcgggccctaggattggggatccttggtggctatccacggtgtacggaccacaagggatagccgagaaagagctgttcctggaggaggtcgccgcggcgcgtgacgcctgcgaagggccttgggtcgtcatgggtgacttcaatctcattcttgacgagactgacaagagcaacggcagggttaaccgacggctcatgcaggagtttcggcattgcgtcagtgatttggagctccaggacttgcatttgcacggaaggttgttcacttggagcaacgagagggagtctcccacgctgattcgcctggatcgggcattggtttcgctcgattgggatgagcgctttccagattccttcctccaagcactctcctcagatacctcgga

SEQ ID NO: 132600 - DNA, 302 bp, Zea Mays
cgagaccttgtcaaatccggtgagctcagcgccccaccattgcctccgagtgccagccaccgcaaccaatcgacccaggtcatgttccatcccactccgttgctctgaaaacttccctagagcattgagaggaatcaccaagctatagcacaagctaagacccaccgaaatagtgggatcggcatcaccaatgctcggtaatccgccgacgaacgtgggccaacctccacataccaccatcgtccaattcctctgagggtcagcgctccaccaaccctgtggagcttccttaccgaccggac

SEQ ID NO: 132601 - DNA, 883 bp, Zea Mays
gcggcatgttctgctgccgctttggatctgccggatttggactgttttccacccgtttcttgcgtctaggcctagcgatccgtgcgccacgtacggggaacaggtagccagacgttccgaagcgtctgatcaacgtaacgctaaacccgcgatggatcgtccatcggtgtgcggatccatcactgatggcccggcttgccgttgagccgatcggtctgccgcgccgccgtgcgccgtgcacgcacgcgggcgagtggtacgttagatgtggatctactgctggtcgaggggggcaagagcggtgtgaaggaatgatagccgtcgtcggtcccttgtacccgtcgtcgctgatctttttatttttatttttcgtgaggagaagaaaaaggaaggaaaccagggagggagtgatgatcaggaccatcttccacgcacgctgctagctagcctttgagctgctgctgctgctgccgtccatgaccatgagccttgctttgattctactcctccaggggagtgtgccaacactgtctgacaggcagctagcgagtgggatcggagtcggagcagggtgaaagaggcctccctcgatctccttttctttttaatttacgcggctccatgaccgtacggaacgggtggtcgatgcgaggaggacacccacccaagggctgatccgatcggagccttccccccgggatagacggcgaccgacggaggacgtttcgcctctggtggtcatctataatcgagccggccggccggttctctatccatgtacccacgtcacatgatatatatatatatataacacgccggggccggcggtcgacgtggccgctgggcgggaagatgagatcgatcgatgcttccggaccaacag

SEQ ID NO: 132602 - DNA, 538 bp, Zea Mays
tagcagaagcagcaatctattgattggggtcataatatcctctcctagctgcgtcaataattctggggaacggggccctagctagctagccgatagcaggcacaaaaaaaaatagaagaacattttatttcttttttttcttggagctctgcttggctttttggaaagtgagctcttctcgacgggaagctttctgatgccttttggtgtctctgtatgctcgcccatggcggtcgtcgctaatgtcaacttgtacagctttcccctcggcccttttccccttggaaggttgccgctactaggaaccgcagttaagctatttgctagtagagctagagcatgccaacctacctgctagcacgtcgtctctaaccctcctccgctttctcctccttcattaattgacatgagtttatggtatctcgggcagctgccaccgtggaaaacccttcaatcaaaagggttaaaccacgggcactagttagatgaaaccttcactataatgtggagtgtttatagaacgccacttataagagaa

SEQ ID NO: 132603 - DNA, 446 bp, Zea Mays
aattccaaattggagggtagacgaagtgggaggatgaaaccgtaccgcagattatgaagtgaggagccctgacgacgactcgcggcggtcccggcgtgcagcagctacgtcggcgaggaattgtgcccgaatcgatcccccatattgcttggcgttgacgcaaacttcaccaccgtgcacccgcgacacgccccaaactccaaaataggtccagcgtggatacaccgggatcctggacggcggcggctccttacttgccccaaacccggtgtgcatagccctctgctcacgcagctttctctctaaaggtcatgacgttggttaggttaacgactctaggacctgggtttcttatatgcgcggggttcggttcgtggcggtatcaaccgattctgaggatcgcgcaaggattgagttcgtccgggtcgcgcgggtgcagaaagggg

SEQ ID NO: 132604 - DNA, 350 bp, Zea Mays
ggggggctggccatgtgcgccgccgggtgctggtgcgccgtcggccggaatttggggagaaggaagaagggcctctggtcgttgatctgatggtgggcggcctggattagaaggtagcttaccccttcggttaaagagaacccggaccgtagatctgcaatcctatggatacgattcgatctcggttattttggatccgagccgtagatataggatccagcggctattgttgaataccggttcagatttataaccctctaatctgggccgtgtggtttagatctgacggtcacaattcaacaataccccttcgcgagcacatttgtcatatgagcccttgggaaacaggg

SEQ ID NO: 132605 - DNA, 300 bp, Zea Mays
caactccattcccgaaataccccaactgctgcatgtcttgcacgcgaaccgaggagatcctcgaaacgctgaattccactgtgtggcccaggtgtagctccgccgccgccaaatcactgaaggtatactcggacgacgattcgcccaacggtgtattcgcaacggatgaagaagaagacgacatggctatgtaccgtcggtgacggcacgcggtctgcttgacgcgggccaaatctccgatgaagaggaacaaggagggcaagcgagcgggcgaacgatttcaaaaggctagggtttcgc

SEQ ID NO: 132606 - DNA, 507 bp, Zea Mays
cagaaaattgacggctacgattagatggggaggtatcctttcggtgatctgatccgaaccgttgggtagatcggatggcccatattggatcacgttccgttaaatactgaccgtagatccaggatctggcggccagtagtgcgtacggttcacttaaatgggctatgtaatctgggcggtcggtagtttatccaacggtcccggtgcagcgatacctcttcgttgtggcaggttagcatatgagtccctgagcttcgtagaaataaacctgcggtccaccgcgtgggtagtctgtgtcttggtttcatttacaccgtagcccctgcgcttttctgtaaatgaggcgcggtccacagattaggaaaaccagggaaataaaattagaaaacagatttttgttattaaattaattgcagaaacttatttaatttgtagaaaattcatataaactccaaatttgaccattccagtttctaaatgttcataatattattgtctacccatttg

SEQ ID NO: 132607 - DNA, 487 bp, Zea Mays
gggagattttccatatccatgtaaccagaaggcactcattcatcggtctgctatctaaaaacaccaaacccccttgctccttcaacctagtcaccatttcccgtttagccataagataacagtttttcttttctgctccttgcgagaagaagtttgctctgatagagttcattttctggtgtgcctctttcgaaagaagatagaagctcatgttatacatcgggaggctactcagactggagttagtcaatatcagcctctccccagaggacagatacttaccctttcatgggtcaagcctcttattcatttttgctagaatagggtccgaaatagcagggttcagatgatggtgagaaatggccacacacctaggttgcggcgtttgtgtgggagctgttggagagggacttgctgatcacgttcggtgagggcaattaaggtatcgtagacatgttctacacggcagccatgtgcgggagcgtgg

SEQ ID NO: 132608 - DNA, 541 bp, Zea Mays
attattgaagttctagcaattatttttctattaaaaatccatttataaattaatttctctggttttacactgctctggactgggcctcaatatctgataacaacagggggctcgaggtaaatatttctagacacagagaatagtcgtgcaggactgcgggttggtttctcagaagcccgagggctcataagcaaaacgccaaggctgaaggggtatggacagatcctagccgttggattagatgcgaacgagccagattagatcagcgcggctgcgaatcggtatgccaccatggcccctggatcccgatccgacgatcgtagtttaatgaaacctagatcagatctccatcgcacgattccctcgcaacgacccagattcgctcacgtgaaagggtatcccactgtctaatctcagccgttcagagatcaatcaacggccgaagtgtttctcccccaaccgaaacagacgacggcggcgctccgcccgtggtggcgccatcaccggcgagaatcaccaacggcccgaatgaccaaatccg

SEQ ID NO: 132609 - DNA, 647 bp, Zea Mays
cgagaaatagaatttttcactgagcattcgagcttaggacaaaactcacggcataacatgaaatagacacctagggtgtcacaatcagccactacattagccactcaatttagagttaaatcaaagaagttatgaatttatgaagttttaggatttcatttctatattaaaattcatttttcggtttattctatcaacttgaggttttatttggatggtggatgatgttttgaggaaacccagggtgctatgtgtaaatttcagggcctaactcgaattatttcctatcggacccggactacaggttagttttaggttcctctaagggctcttttgcaactgcaccgcaatgaaagggtactgatcaatcccacccgatccgcatcaacgacctagattagatttctcctaacacgaaccggtaagccctcctggccaaaggatcctcgatcgacgatcgaggatgtgccatgccacgatccagccagaaccgcccatatccgatcgaacggttgtggtttattgagtgaaggggtacttccctgttttaattagagccacccaggagaggatcaacggctctgctagcttctccctacccgaacccggacagcggctgtgccgcccctccccacagcggaggatgg

SEQ ID NO: 132610 - DNA, 505 bp, Zea Mays
cgctgacacctggtaagtagtagcaagcaataatcaagcatcgtctaggcgatatttgtagtcagtgtcaaaccacaccatgctacaagtagtaaacaaagagacgggatgggatgcatagtctaggctagctaaaccaaccccgcatcgatctttattagaacgtgacggcctcctcttttggctttcatcgtgcgtgcccgtagcttttcgttcacccagcagtcgtgtgggccagacgcccagactaaagctgcctaccaactccatccgaccatccaaaccaattagtgatgtgtttaatttgatgttaaagtaggatgatgcagacgtgatattgtctcctcaaccttttgggatcacgtcgccaccaaaaaattactctgttgtttatctcattcacgcgtgactctcatcaaacattatataaattatagccgaattactccgttgtttatctcattcatgcgtgactctcatcaaacattatataaattgtggccac

SEQ ID NO: 132611 - DNA, 757 bp, Zea Mays
ccgactggacgccttgtcctaacccttcagcatatcctctagctcatcgtctgggacgtcttgagggaagccgatgatgtcttgaaggctacaaatagagcaaagctcccgacgatcaaggctatggttgtccctcgatgaatgctaaaatctataatatccttgacgcaacatgagacattgtataagcgctccatatgggacgaaccgtgggccccaacatacttcatgacctagttcatccagtggcgaaccttctttagctcggcctccaaaattgtaaagaaaaacacacgaatggattggattagaaaagagcgagggaggcacaaaaaggggagcgctacctgccacacggccattagactcgacaagttgttcccgaagaagacttgcctcagcttcagttgtgtctaaggttgcatcggaagtggtgaggttctcctcgaattcgaaaaaatatggaggggaccccgcaggcccaaccataccaacccgaaaggaggagatgcatcccgaccccacaaacgatggaagatgcactacagtaagaagccagacatcaaaagattgcaatggaaagaaaaacatatcacaaaggagttactctaacccatctcgacacaacatgttcctcgacgaagacccgatgaccgactgactgcgtggatccatctgagggggaaaacgaaagaaaggagtggtgtggtggccgatgctcccccacctcctatgcttataaatagtagagggatac

SEQ ID NO: 132612 - DNA, 774 bp, Zea Mays
gcctgacgctgcatgcgaagctgagctcggaccaggtgttggtggacaagatcctgcatattagaacattcctataaccattttgacagctgaccaggcacattctggtttggagatacgcccagagaatgtggtttacggccatataggacttcaaacggagatgaacccaaagccgaatgaaaagtagtgttataccagtattctgaagtgggtaaccaagaggaccatttcttggggcaagcagttacaaaacagcgcagaaatgtctctagacactgattcacccgttctgtctgaccatccgtttgggggtggtaggaagaactcattcgcagctcagacccgaccaacttgaacagatgttgccaaaagtggttggtgaagacaggaccgtgatctgatataacagccaatggaaatccatggaggcgatacacattggaaagaaacaactgagcgacagaggcagcagtataaggatgagatagtggtatgaagtgggcaaatttggtgaacttttcaaccactaccattatacaatctgctgaacctaagcgagggagaccttccacaaagtcaagtgaaactatgtgccaagcagtaagaggaatggggagaggttgaagtttgccaggatacgtcgatctatccggtttagcttgcagacaaacttgacattgctgtacaaattcttggatgaattgcttcagtttcggccaggcaaacaaactcttaactcgacgatacgtggctggaatgcctgaatgaccg

SEQ ID NO: 132613 - DNA, 627 bp, Zea Mays
cgacctgcctgggtgccccaggccaggttgcgaaccaaatggcctttcactcactctcagtctctcactgccttgcttcaattcttttcggttactagttcatgacctcattgaataatgtagctaggaaactacaatggtaattgcatttcatgtgacctctaaagtggagtgatcttatcatggctagaaaatgtagctactttttagttgcataaagtcacgcaggagagttgtgcatcattaatattataaagaaaaaggtgaagaacccttacaaaccacacacacccaaagacgttattagttattacaatcacatctgcgctaggaaactacaaggatatgactgtgacctaaacacatactactacaatgattaggtgaaaaggtaagaaatactattagccccggcaaaaccctagtactgtaattcctcgatagagagcaataaagctatggccaaatgaggaggaacagcatcaaatacccatctattgcagtgatttcaaatggtccaagccccatggttcataagggagtcgaggcctttctgcagttctccaacagcaaggataatcttctcccaacaattatcaaagaactcttctccaatccgaggggcaa

SEQ ID NO: 132614 - DNA, 528 bp, Zea Mays
atatagtacaacatttgcattttcacgctggagttttgtggttgtgcatttgtactaagtttgaaatctaaaccttaactaaacttgaaaattcaaaatagaggactaaaataggaatctaaaacaggaaataaaagaaaaaggaaaatggggaacttgattgggtcgaaactccttgctcagcccatgccctcacctctactcggcccagtaggaagatacccatctacgccctcttccttcaccgcacggcctgcacgcctggtgccactgataggtagggctcgcatcgtcagcttcaacctcacgtcgaagctgtcgcgtgcttgtgccgtggatcccatgcctccgtcgtcgctgacacttgggccctgcgcgctagccatccccctcggacatcaccgtgtgcgcaaggttcgcagcaactcccagctagcataaccgtctaggagtcgcccgaccacgatttggcctctgtccaagctttgcggcaacaactccatcaccagctatataatccaatcgtcc

SEQ ID NO: 132615 - DNA, 411 bp, Zea Mays
gagacacagtcatgactcgttcgaggccaagcctaggcgggacaggcagtaacgactcgcctgaggtcatccgcgggcgggacagacagtcacgactcgcccaacgccaaccccccgggtgggatacacagttacagctcgcctgaggccaaccccggtgggatacaaagttacaactcgctcgaggccaaggcaagacagaacaggcagtccgcccgaggcaaccctcgggtgggagaggcagtcatgactcgcccgaggccaagcccaggcaggacaggcagccacgactagcccaaggccatcctctggcgagacaggcagtcacgactcgccagaagccaacccccaacgggagacacaatcacaactcacccgagaccaagccctggctggacagttagccacgac

SEQ ID NO: 132616 - DNA, 414 bp, Zea Mays
aaccctgacatccacaaggcgcagaagatcaaactctgaaattacagacatatggttacccgcgaatggcaactgactattggggttgatttacaggatgatagccacggtggaactctgtttcttctgtttcggcgccatcgcaatctcgctggcggagcaaacaggagcgaaatctaaggaaaacagggggtggttcgaggcgaaaatgtgaagttagggctcaaaaatcaaaagcgcacgtcgacatgagtataaatggggttttcccgggttgtgcgccatttctaaaaaagtgctaaatcaacactcgggaaagtgagacttcagacataacttggtcgttacctctaaaatgccgacagggtcaagcataactcggccgttacctctaaaacgccgacagggtcaagc

SEQ ID NO: 132617 - DNA, 308 bp, Zea Mays
ttgcgcctcgcggtacacctaggatttctctatagagacgttgcatggtgatgtggcaaggagagaggcggagacgacaggcggcgaggtatgtggtgtggggcgagacgagatgaagtttttctctctcgtctttttcacacttgcaagatcagtgatggtgagagttaaggtactaaactatagatggccaaatgaatcgtcaacccaagccacgacatgatctgacccaacacgattcaaagtagtaggctcatgttggtcggtcccgagaatcgtcccgtgcctggatcaccttctcggcccac

SEQ ID NO: 132618 - DNA, 562 bp, Zea Mays
cacccagcaacaaaaatacccccacctggaggaaaagacttcaggccctgtcagggagagaccccaccgaggatgaccccaccattgtctacatggccgaatacctccacactctcgataaccactacgatgatctctcctcccactgcacccacctaaactctcgagtggaaagcttagagcagcaagtcaaggagcttaagaaggagaaggcatccctccaagagtgtctcgacatagcggaaggcgaggaggccaacacccgtgaagcctattgaaccttaaagatggactatgataagaagctaaagaagctcgcccccacgaagaaaatccaaaagaagaccaggaaccaaggaggccaagctgagcggaggaagaaggctcccccagcaccagctcccgccaggatagagaatttgtccaacatcaaggatatgtccctagctagccttgatgatcttctcaaggaatttggggacactctagaaaaagagttcggtagtacctcagagaacgctcgcgtgtagtacaacttgtagtagccatatgcttgtaatgt

SEQ ID NO: 132619 - DNA, 464 bp, Zea Mays
ggtggtcctaggatgaaggagacggagggtgaccatgtgctccttactgggttgcttgaagcatttgaggctgaagccaaatgtatcattggctcttgtgactgggtgtgactggggttaaacatactaagggacatacggtgaatagtacgaagatgtactgaacacctccttcgactaagatggttgagtagctgatgaagcaagttctttttgcttgttaattatatggtggcgggttctcgttgtgtggcctttgtcctcaccacaaaacaggcaaaatggctttcttggaggcgcattaaacctgccaccaaagcttcggcctccccttccccctctcgaaggaggtgggcaaaatgtgttgtgagacggctgttgttgggagcttgcctattgttggccagactgaccatgagattgagctgttttttcttctccctgcactgggttgttaatacttc

SEQ ID NO: 132620 - DNA, 518 bp, Zea Mays
cgtgaatcatgaactaaggaaacgcagccccctaatgtagggatattgcctaagtaaatatggaatatatcttctgtcagctaatacccccctcaatctggacaccggtcaagtaagttcaggagagacagaggtaaacttggggctcaggccatacgggctagagcctcttcagctaattcgacgaagaccttgtctcgagaaagcgcatgcctaaaacaaggacgcaggtgatcgaatgtacgtcagcaagcgaaggctaattcgtggagaggactacaccgacaagcagagacctcgcgctaactcccaaagggaaaatcggatgacctcgtgactttgtcaagaaggtcgtgttcttggaaacgaaatctacgggcctactgctgagagtccacctccgaccagacggcgatagtcccacatgtaaatctctcacggagcggttggatcgtgtgtaattacccccattacacagaatattctgataatatagcacgtaacagagtgctgtattt

SEQ ID NO: 132621 - DNA, 598 bp, Zea Mays
tcctccgcttgatcacagtctggacagcttgtaggatgtgggagatttctttttgctaattgatcagctgtccaacacctatcccgaattaccagccacataaagaacctacatttaccatggggccaaagatttccaaatcctttcccatgacctgaagatcacccctccctgaaatagatttcataagccgattttgcggagtactagccatcacaagacaaccctccaaacatggcaatcatcaatcctaggttgtaacaccacctcagagagcaaataccagagactaagaaactcattaataactccaaaagttagagctccatagatatccatcacccaagagtgatcagtaagagcttcatgtactgtccttttgctaattctcatcttgggaactgttgcaaagacttgtggtgcaaggtcagcaattctctgaccctgaatccatctatccgaccaaaacagggttgctgccccattgcccacctctgaaaccactgctatggagaatcttgaacacaagatataaatgaatgaatatatacccagtaaataggattagaggaggataactggaatgatacctcccggt

SEQ ID NO: 132622 - DNA, 597 bp, Zea Mays
ctaggatatatggggattaatatgaggaagtgtgaaggacttgtttttgttggttctgtcgtgtttcaggttcagcaatttccttctactttcggattatcacctggcatgtccttgtggtgtgccccttgtcttctccatagaaaagacataatagctttcttggctcggagttataccttccttcaaagctcttcctcctttgtcgtctcttggggctggtggtctaaagttactctatgatggttgttgctgagtactatacgcttgtgattggttctactgcccctgagtttggttggttttgtcttcgttttgaggtgggttgtgtatactcctaacacgccttaagtggaaccttcccccaaagcccctagtgatttctgcatatctttgggcttcttctcttctatgatagaaattaatgtctgccctgatgtactcatccatcatctacaaaagcttttctagagaatgaggaggtttcctagcaaaatactgagccatcggccctggacaaagtgccttaatcatagcttctgtgactatctcatttgggaccattggtgcttgagctcttagccgaaggaaccttcg

SEQ ID NO: 132623 - DNA, 1185 bp, Zea Mays
aaaaatctaagccgcatactagtttaactgcttgaaacaactggagagagcgtgattataagattgtttgcgtgggtttatttgagcacgctttaagtggtgcacataatttaaggattgttttcaaaacaatgtggtgatggagaaaggtaaacctgatgtgtctttggttgatactgcagcagtgtaataggatgcaaaaaaaaaattgtgtcttaccccaccttaatgggaatattctataaatatttgacttatgtaatctaaagcagaggcctaacccttgccgtttttttttcggttgtacaaagaccttaggatcttcaattctacaaaataagtagttggtttaaattgcacgatactctgttaatcggttcttagcttacatacaaatatttgtctttcaggaacagacatcaagtattaactctgccaattcgatggcattagctaatggtgccaattacgtgccattacctacctggatcagcaggggccactcacgcattgttgagaaggatttcaaggtttcagactggaggggatcaagggtgttagggaggaaccatctctgaggattttgtctgcacagctaggaaggatgaactgcagtgacgaggatgagaataggtgtgtcacaagaggcaagaatcagaccaccaggagtggatgcacagtgaagtcatcccaggcaaaaaggcccacccggaacttcaatatcaaagttgaccacacaatcggttggttcggtaaatctgtagaacacacttgatagaaaattcgtttgggtccacatcacctaagcgcacactttaaacacacagcaaaggaccaaccactcctagctagtaatgtcatcggcacccagtgtgtgctagttttacatagtgtgaataactgaatgtttccaggcatgatgaggaagacccacctcaggaatcttgcagtagtcccgtgcactgagctgtagcgacatgacgttgtcacgcagaatggagcaagcgagtgcagagtggccacttgacgtcgtcacgcagaagactgttgcagtcctctggagccattttccaggcgagcagagcagtggttttctcgtactgattgtctgagaaagaagtggatacgccaaaagcgcagttgctcaacttactcgaattactgaagtgggctaactaatcgacg

SEQ ID NO: 132624 - DNA, 672 bp, Zea Mays
agatcaagttggccactttggaaaaaaatgtagctaaggctggctgcaagaattatgacttttgccctggtatgcatgttgaaattgatgtctatattgtgcttttttgtatgcagccaaccaatacagtttttattgtattttaatggtataagcattcaaacctttatactttatgcagccaagtggtggggaaattatggaacacatactagctctccaaaagatggctataaggattatttcactcactgcaagtgcctcgggatgtgaaaggaattggagttgctttgaaggggtaagttaaattagttttgaactgtgatagattggaaatctaaattctatatattttacatgcaatgactaatttgaaaaataaatctattattgcatattcataccaagaagataaataggctaacttgtgaaagagttgaaaatcttgtctttgtgtgattcaatccacttcatacaaagaaaaaagataaggccaacaataacaacaaagtagatcccctgctggcaactgatgctgcttctgctcaagggtggattgttgaaggtagagatgaagaaagctctgatgtcaacactgtgactggactaacatggcaacagatcgtagatgcatgtgggtcagaggaggacacaaaactgtggaagagtgct

SEQ ID NO: 132625 - DNA, 335 bp, Zea Mays
ctcccgtgttatggagcatgaactgtttccgtttcttcctcccccatgattctcttcggtaaccaacaccattgatggcacttgaagccccgccgtccgcctctccctctctctagcgtctctatctcgctcccatcgcccctataaatccgacgccaagctctctcttcctcccctacccaagctcgcccctctctctagctcttctcgcttgccatcgtcgctggagccctgcattaccggagcttcgcccgcccaagcacaccatcgtcagccgtctacgctcgtcggagctcttgccccatcgcagaccatcccctactcgtccatcgtgc

SEQ ID NO: 132626 - DNA, 704 bp, Zea Mays
agctcctggccttgtgaacgaacatgtatcctatgtgcggatatgtccattatatagacatattggtggagtggtaggctgtggagcgtcgaatcgatttgttggacttaagtcttcaggtcttggaacacagtacacatgtacaaggcaaaacgagaatatggatgtaagactgagttcaacggttcactctatatttctcctcctatatcccactcacgcaccacgtcagcaacttctcacccctaaatctccaccttctacagcagttccctctaaactcttcccttataccccataccaaacataaaatatcatttttcatacctattcattatgcatccattaccattttttctcaaacaaaaaaccattgttgcgcactccaaccaagggaaggggctactgtcgcagacgccacgattgttggagtattatacccttcacttgtactgttgccggtaggggatttcaaaggggagccgttgaacgttgtggggggctactatcgccgtcatagagaggagagagggcctctggcggtaaccgtagaagacaatctaatgtcaattcaaagtttgaggggcccacaagcgacatacattgattccgcgagtattatgacttagacgaacactcgtacgaccgtgtatgctatattacatagagtaacatgatatacaactgtatgtacatatagaggg

SEQ ID NO: 132627 - DNA, 326 bp, Zea Mays
gttgagggcctgcagggcgaggacgcggtctccgtcgatgaggtctttagatgttggttcgtcgacgtcggggactgctgatgtgcttgttcggggcgagccatgttttatctcctgcggcgtcatggcctccgatccatataatagacgaaaaggtgtgaatccggttgcccgacattcggtcgtgtttagggcccagactacttcaggtagttggtcggcccatttgcccttcttgtcgtcgagaagtcttttcttgatggcagtgaaaatcttgccgttggcgtgctcgacgacgctgttggattgcgggtggtataccgagg

SEQ ID NO: 132628 - DNA, 306 bp, Zea Mays
tgaggggcgacgaggagggtcagaagtgccgtagcagagactgtgaaggcgagtcgtcgactcggggaatccaaatagctggcggatctgactggcagtaattgtgacatcctctcgctcaaagcggaacctcatccagtgatgatccgggttaatccaaacagaggcgtaaaagactcgtacccactcctcaacgtatctgccgctgatagtcagaagggtctgaaggccaggcagataggtgagatgcgcctcagagtcagcaccggctgcaagcagaaaggatggaagatccaaaagccggtg

SEQ ID NO: 132629 - DNA, 445 bp, Zea Mays
gcaaaacacaaacacttacaggtcaacgagcgcatccttcgtgaagggcaaagggtggactgccatgacgccttgcacattccaaataatgactgccaccacatgtcgctagacctccacgtcagatagctcgtcaggatcatctgcattaggtcagaggggcccccaatgaggtctaacggtgtttcgaatctagcttcgacaagtaaatttgattgagtcattacctcaagaagttggctgcatcctaaggacgaagtagatgcacttctctcccttgctcttgcataattgtcttcttaaccttcgccttagtaatcttagccttcattttcttcaaaggagtagctctgtctgaaggcaactcttcgtcattgtcactttctacatccttcggttcatcatcatcatcatattcattctactctattctcttataccccgt

SEQ ID NO: 132630 - DNA, 272 bp, Zea Mays
actccatgtgctatacctaaaacacattgtttgaacccgaaggtgaaggagtttgaggatcttcggcaatataggcccccaacagtagccccttgcgtaatgagttcgctttttataactagcttagatcgcataaaatatgattgggagaccttgggccgaaggtccgaaaaacaccttcctgagcttgttactgaaaatgacgaaaacatgcgcttcggctaaatattgtaatatgtctgcggcccactagacagtaagaagatgggaac

SEQ ID NO: 132631 - DNA, 409 bp, Zea Mays
ccaagggttagatgtcatcctagggatgaattagctccacagaaaccaagcaactaccagttgtgataagaggacagtaaagttagtgtccccatccgagaaagaagtagtaactgaactattcatgcctgaatcagaagaaggagcctgtcgccatttgtctgtaaatggtaaggaggccaacttgattgaggatattagaattgtgttagagttccccgacgtgttccctggaggagttaccaggaatgccacccaagcgtaaagttgagttcgccatagagcttatcctaggcaccgccccctatttccaagagagcccatcgagtgtccggaccagaattggtggaactcaagaagcagattgatgagctgttagagaaaggctacatcagaccaagtacctcgc

SEQ ID NO: 132632 - DNA, 335 bp, Zea Mays
gtggcaccttggtgccccttttggggccatcggtttccttccgtttcgcttctgatcgttcgtccgaagatttctttctcgcttccgtgctttccgggcacatgggctccagatcccgccgcagatggaaataacaacagctaccgcctactgagtacctgattgccgctcgagctgaaaagagtcgccacgatttggccacaagaaattcacccaaaaatctagcactgtgaggctatgctgcggtgctgcctgtgctggtgccggctgccggctgccgccgaacaggtcaaagagttttgttgccggtgaaaatccaaccgaaactgtggcgc

SEQ ID NO: 132633 - DNA, 582 bp, Zea Mays
ttcaacctggatacaaggccgagctggcgagggcccagcgagagagagctttgtcgtgcccacgcgcaggacaggggtcctcccttcaagttcagaacctacccgcgccgctgtagacacactagacacacggagacagtaacgcacgggacgagcgagcgagctgccgcgatggatcagtggagtcgccctacggcttcacggacgggacgcgtgacgcatgtccgctcgcgctcagcctcctgggtgctcgtcggtcgtcgtccggctagccgctggctgctagccatccaccggaccgagctgaacgtacggtaggttaggtgtgcaatgcagtgcatgcgcacgatcgtcaaaaggggagctccaagaatatatatatatatttctatatattaaaggcggacgcaaagctcacaccacaagcgtccacgttagcttctttttttcagaccgtccgatcatattacaacggctaaaaacgcagtcgcaaatacaggttacgagggaagcagctggcgttaaaatatatccagtcacgttacgcgctctggaaacttcgtccaacttccactgagcgct

SEQ ID NO: 132634 - DNA, 609 bp, Zea Mays
taacgtaactagaacgacacaacacgaatttaaaacgcaaccgataacacgtattcaatgtaccgtggaattaaactatgcaacgacatttattcagtggatcaagaccacacgaaggggtagaggatagcatgattgacatgctgtgacatctagggggtaggtagagggccctaggagtagacggcgatgtctggtgggtagatgggtgggtcgacagacgtcgtcaaaatttcggcggcgtgctacgcaacggcggttgagaggctgtggttcggtggctgttgcgcgcagggcatgacgggtagcgacttggtaagcagagagagcgaggcgtggtagaggcgagcaggggcgctgctagctacttgtcggagttactggccaccgcaccaggcgagctcgcgggcaaagggacggggagaggggcaggcccaggcgctacaccatggggtgcgttgaaccggacataggtcttgacgagggcggcacgacgcgcagtcgacgggatgactcgacggggagctcgtgacggcgaacggacggggacggatgcagcggggcggcgtgcatcgaggagcgggtcatgccgaggtgaagctcgcggcg

SEQ ID NO: 132635 - DNA, 336 bp, Zea Mays
ggacagaaacccctcataagcggaatttcaagcctgggaggtgtgtcaggctttcctggagcaatccctccgtgagcgcaccacctactagaagcaaagtagcaagcagaaagtcatcatggaggtggacggggacattgccttttagcacgcccatgcttgtgcgcgaaggaagcagtgctccatagctcgaattcaggttgactccgttgtttatacatgtcaggaggaaaaacaaggttatcaccgagttctatgcttcgtctatgggggttgactccgcccctcaccccgactttgattaccaatagttgtacccaccccacaccctcccac

SEQ ID NO: 132636 - DNA, 402 bp, Zea Mays
gttgaggttgagtccacaccatcagaggaacccatgatcatgccactctctgctgcagttgttactggctcttctataaaaaggtccatgtgtgtttgtgggtcacatgattcaaatggatgtcttgattttggtggattcagacagtgccaattcttttatcaatcaatccactgtcagtaggttgggtttggttactgtatcagctgctcctattcaagtccaagttgctaatgggggtctgttgtcttgttccatagtggttccgcaagctttctggagtcttcaggggtgccattttgtgcaggacttacaagtgttagcattacccacttttgacatcctctaggcaatggattggcttgaatactacagccctatgaaagtgcactggcatcaaaa

SEQ ID NO: 132637 - DNA, 355 bp, Zea Mays
aggtcctcaccgtgcccatttttgccacgggtgcaaaggtctcatcatagtcaatcccatatgtctgactatatcccttcgccaccaatcttgctttgtacctgtcaatctttccttcaggagtctgctttactgtgaagacccacttgcaccccaccgccttctttccttctggtaggtgaacaagttcccatgtcttgttctttttaagggcaagcagctcttccttcatggcatccttccactttggatcctgtttggcatacctccaatcttttggaatagatattgtttgtagagatgcaatgaacgttctatatgcaggagagacactagagtatgagacatacttagc

SEQ ID NO: 132638 - DNA, 389 bp, Zea Mays
atggtgtttatgtccactcaagtaaaacaccgcacatcattatgccacatcgtttctaaaaataaaataaagacaataggaaatttaaccaaattgtgtaagagatctgtccaaacataggttaaggttgtaagacaccttttttccaccatacagttgctaaaaagttggaatataaagaattcaaaacaatagatcatgtttgaaacaaaaaatagtgtttctatgatattaagggtattgtattcgcacaagagggtattagagtacaactattggatgaagacgctagtgggctagctaatgatcttttgtgataacaggtttcctataatcccctctattcaaggaatacttaaacagtgtttatgtccactcaagtaaaacgc

SEQ ID NO: 132639 - DNA, 520 bp, Zea Mays
gataggtaaagggcattgaacctatctgacagttaagagttcctgcaaggatcgccattttagcaggattgacgttgatggggtacatacttgatttgttgtagttcaccttcaaccccgttgaaaaagcaaaagagttcaggacggctcttaaaaagaatagctgtctagggcaagcttccaaaatcagcagtgtgtcatccgcgtattggactatcggaaaatcttgaccacaattctctggcaatggtaacttgagcaggtcttgccgccgcgctttatttatgatgctctgaagtagatctgccgcgagaacaaaaagaagaggcgagaggggatcaccctgcctgaccccacgcttgcagtgaaaggttttcccagggacaccattaagaagaactgaagacgtgccagaccgaagaatatccctaatccagcttatccatctgggcccgaagccattgtgcagcaatacctgaagaatgaactcatgctctagagaatcaaaagccttttcaaa

SEQ ID NO: 132640 - DNA, 457 bp, Zea Mays
ccaatttcttctcttcaatggcatcaaatcgatctatttcttctttctttagttttaggtatctttcatgaaatccatcaggagggctagcagatttgttttttttcttctttccacgtcgagaatcaggaagctctgaagttatttgtgtggaactaggtgggacttccttttcatgaacctgagcagatgggtattgtgataagcccaaatttccctcaatttcttcatcaaaagaaaattgcaatcccaattcatctacaccatttaaagtaggagatggtgactgatatgtttctgctacagttgttgcttgtcctccaggagctgatgctttcttcgtcttgtttgcataatgatccataccttgacgagttcttccttcagcataacgacctgcagaatcatatttaggaaaacacatatgactcggatgtatttgcaagcaattagaaac

SEQ ID NO: 132641 - DNA, 562 bp, Zea Mays
attccctaaaaacagaggggttcttttgtgaaataggttctgcgaaggggtatgatctaatacaggccgttggatctgagttccacggtagtgattagatcaggttataggcaaaccggtgtgtaatgtgggtcgtccgatcaaggatcaatggccttgaggtctcctaatctgagtcgttcgatttacgatctacgtataggaatcaagtggcgaggggttttcatcagatctaatccaagtcgttagatgtggatccaacagctcccacgattcttcaacctgccgacgacgtgcacaccgacccagcccccctgacgaacaagcgccccagatccccgcctgttctgagctacaccacgctacagcagaacaaaatcgcaagggaaaaacacttaccgacaatggggtcgacgatgtatagactacggcgctaggtggctcgcggtggcttgatatgtccgccgtgaaattgccctcaatttgccgcaccctgcgcatgattgttaccgaggatcgtcgcaagggggggtcgcgcacgcacccacagcccgaatccggc

SEQ ID NO: 132642 - DNA, 563 bp, Zea Mays
gttgcaggaggaggtgcgcgagggtacccgacagcgggagggcaagttcactccaagaacattcagcaaaccagcggcctcaggcaccagccttacacatgacagtaaagcaactcattccctcaagctggatcatgcgcctgctgccattccttctcgacaagctcagttagaggacaaattggctacattatatgcatatcgaaaggccaaaagactttgttacaaatgtggactccaatataatcgaggtcacaagtgccctgacaccgtgcagttacacctggtcgaagaaatgtggcagtcttttcagttaccggaagatgaggaacctgttactgatgttacagctgaggagttgcttctgttacatatgtcgcaggctgctgttctcagtgcagatacccccaagaccatgcggtttattggccacattggtggtatggatatgttggtactgttggattcgagcagctctacttcatttatcagccaccgagttgcttcgcatttgcccaattggactcgcttatcagcttcacttcgcgtacaggtggccaatg

SEQ ID NO: 132643 - DNA, 933 bp, Zea Mays
aaatgagaaagattgcgcagcaaaaaaaccgatccttgtgcaatacctatcaacattacaaaatctggagaagcagttcaaagggtttactctacaacacatagacaggaacaagaacgaagaaggtggcatgctggcgaggttacaaccaaaggtgatcccttgccttcggacatattcttccacatgatagaaacccctgtggtaataaactcgaacgtctaagaatcacatatgatcctgagggccaaagaatcgtaaacataatcatgatcgaggactggagagctcccataactctatacctctagggccttcatcaccccacagattaggtcgatgccaaaagattaaaataccaaagtcacgtgttcacaataatataaggtcaactctacaaaaaaggacccaaccaaccattgctcaaatgcatcacagaagtcgaaggcattgagctgctccaagaaatccacaaaggagtccgaggttgtcactcaagccctagggccctcgctgccaaagtcatgcgccaggggttctactagccagccattgtatgcgcagccaaccgcatagtgcgttcatgcaaggcatgctagaaattctcaccgtgaagtggggcaccatcacaactcatcaaactaattgctcacacttggcctctacaaagttggggccttggtatagtcgtaccacttcccaccacacaaggcaacctcaagtacgcctttgtgacgatggaatactttacaaaatggatcgaggcaagagagcctccgcaataaccgcaaagacgacgcaaaaattcttctggcagaacattgtctatcgtttcatagtaccctccaaactaatagtcaacaatggaaaacaattttacaaccaagatttccaagatttttgcgcctccataggcacacgggcagtcttcac

SEQ ID NO: 132644 - DNA, 352 bp, Zea Mays
acggacggcccagattagaagtagcatacgccgaacaggtatgtaatccgagccgcaggatcttgttccaaccgcccagatcagatctgtactaacacgcaccggtacgcaatcacggcggttggatccaggatcaacggtcccgattttatgatacgcggccgctctgaatcgtccgatcaaacaccaaatcctacggtgcacaccaatgctccctccccccaacagagctgagccagggcgcgacaacgcccatggcggagtcctcaccgacgctccgccgaattctcccaccccggtgaccgagttcgagcaataacgtgcggaaaacgaaattgatagctaggcaaac

SEQ ID NO: 132645 - DNA, 400 bp, Zea Mays
tcgggtctcggtatgtagtacaaaaaatttgatgtctgtgacaataactgtatacttttctggaaggagaccatcaatgagaagaagtgtacaatatgtcgtgagcctagattcgtagaggttcaaaacgatgatggtgtgaccataatgactaaggtagaacataagcaactttgttacatacctcgtgtacctcggttgaaacgtttgtttatctcgaagaatacaattagacccatgaaatgacacaaagaaggtgtacatgacaatcccgatgttatggcacatctagctaatacagatgcatggaagacactagatgcctttgattctaactttgctagcgaagcgagaaatgtctgtatcggtttgacaacagatggtttctcgtcttttaatc

SEQ ID NO: 132646 - DNA, 456 bp, Zea Mays
tactaagaatcaagccctgtaaagaagaagaaagaattgagtatgacaataaaatacttcgtttccaacttcaaagttaacttttatacctttatgatattgtacgagaggctatcaacaagttcatctttcgatagaaccgaaagaccttcttcaagtttcagaaatctcacactcttagctatctctcggcaaacggatatttctttgttgtccgggagacagtagtgtcattaaacactaaagctcccttcggatatttcaaatttcgcgcataatgtctggcttccagaacttcttcttcggacaactttttcaccgaagcatgacgataaatataatcagcatcctcgacaatggcttcgggggcaggagattttgccctttctgtcgcttcttgcccttcttccatgccagcaactaaagcctgttgatcagttttatcttcaggcacga

SEQ ID NO: 132647 - DNA, 971 bp, Zea Mays
cttgagcttgtgacgagtgctccacttgccagtgaccacgttggtgtcagggggacacaacaccaagtcccaggtgtggttggtcagcagggcctcatactcctcgatagcacggcgccggtggggatcagcgagcacgatacgaacgcaggggacaggcgagagagtcatagtagtggcggtcgtgagcccccgtcgatccactggtcagaggacaccggctgagcggtctgtgaccattgggtggacgtggtagggtcgcggtggatggcgacaggatggtgcaccgacgactcgttacgagagcgggccagggcatggagcagctcgtcggaggagggacctgtgaaccggcctgcacatgccgctggtagacgcgggcgggatcggcaaagcgagtcaaagggggtcggagaggtggggacacacgcatggcacggtcgaaggcgtcgggaccgcgtagggtgtggaagaagtcgtcggaaccggtggtaaggagagaggagagatggcaacaaaattggcgtcgaggagagtcgaggtctagaggtgaggagccaacaaggggaaaagtgtcctcatcgaaaacatgtctagagatgatgatgtggttggtgagaagatcgaggcactgataccccttgtgatcagaggattatacaaggaaaaggcagcgagtggatcggggcacaagtttgtggagagcagtggcagaggtattacaataggaagcacaacaaaaaacacggagatgcgtatagaaagaggctatgtcgaagagggcgaagaatgaagtgggatgactggccgccttggcggggaggcagttcaggaggtaggtgcaatgtggaggccctcagcccagtaacaagcaggaaagaaggcatgaaacaggagggtgcaaatgaggttggtgatggtgtgaatcgtgcgatcggccttgccgttctaaggggaggtgtaaggacacg

SEQ ID NO: 132648 - DNA, 490 bp, Zea Mays
gccgaatgtggtcgataaagacaagggcaaggacatcatcattggtaaccctcgggccctcgatgtgaacacaaaaatctgacaacgttgggggtaaatgtagacaagggcagggaagttgttgctaagatgaccccaaacggcaaggaaacattaaagatcaccatcaagtctgacaatgttgggggtaaatgtagacaagtgaccaagccaagctccctattctccacatcatggatggtccgactggtcatcgtggatggtccagatcaccagtggatagtccgggcagttctcacagacaattcggcaacacccagagacaatagcaactgcgtaccttcaagccacggcgacccaaaataggtacgtgaaagcaaaattcagcaaaggcacttggtcggctgattaacaaaaaggtcagtcaattattgtccaaatatgccaataaaaaggtcggtcaccatgatcaaccaataaagcgaccttg

SEQ ID NO: 132649 - DNA, 599 bp, Zea Mays
agttaaaaggaataaagtgatcaaaatgtgcaaagtgcaatggagtcatcatggagaagatgaagctacttgggagagagaagaagagcttcgaatagaatttccccatctccctagttcctcttaatctcgaggacgagattctttttaagggggtaggatttgtaatactcaaaattgtaaataatgaaaatagagtggatctccttatttgtgtgacctctgtgacaacctagtgtcacctagggtttctctcaaagtgctaacccatgaaccatcatcttatgtgaaccaaatttgagcatcaacatcaaattgacttaagaataaaggacccactaatcctatacttaaaagtatcatgaccaaaacaaatgggtttttcaaaaaggcaaaatgtgcaaccccaacaaaaaccctaagtgagccctgtgaacaaaattcaagagaatggggaaaaggatatgaaaaatttagaatcatggtttgggccaattataaacattgaagtatatttaataagcaacaataaagattgaggaagcttggccaaaataattcaaataaaactccaagcaagcttctcatgtggggactca

SEQ ID NO: 132650 - DNA, 288 bp, Zea Mays
gctaaaaccctgaagtggcgctgctcggttaatcggcaatcaccggacgctcgccgtggctctgcccgcgcaggtgagctcgccagcgcgtttacagctcagtgaacctcatcgatctccggccatctgcctataaattgagcccgagcactggttcttcaccacatcacacacacgagcgcttgtgcaatcgactcaatcccaccggagaactcagacagaccacaaatctcctcctccctgttcttagcgccgccgtgaaggacctcttcgtgggcagcccttttc

SEQ ID NO: 132651 - DNA, 586 bp, Zea Mays
cacatgctgctcctcatcctctttctaacccaccgtctccgccacaagcatcaacatttaggacaccaccaccttctccacaaccatcaagggactcacgaccatcaaagaaatctaaattccctataccaaaattggtgtccatgttcaagaaaaagaagagtaaagctactactgctggcacagcttgatttttgaaagggattgcatgggacctcacgtcacatactgttgatttggtcgagcatgaggagtctatagaaaatgttgagacaatggccgcaaagataaagatcccaactaaggcagattataaaaatgtgtctaaacaatatgtgtcgggcagacctctactaacttttgagaaactaaggaaggtccctgctggtattaaaaggttgcatgatgggtacatgcgagcatcatcagttggcattgacaccattagtgtgcatataccagaccatgcttttattggttcggaccaaaagtcctttgttgcattcaaggatatgtggttaatgatgatccttcaaagactcgacctgcaacttgtgacgcggtttgcactgtaagtgtcgctcgt

SEQ ID NO: 132652 - DNA, 420 bp, Zea Mays
caagcatctattacgaaacatgtagaatatttacactactactccaccatccggtattttcaaacaaagaacatgcatgggcaagaaaaggtcagtttcgctcgactgctgactgcaagatgatctttaccaaccgacctctaatcacgcgatggaatattcaacttcccgattcgacggcggcgggcaatcctggttgtaacagccgtggactgcaactgcaatgggtcctccgtccgttcgttgttagtttacggcttttcccatgacaaattccgtatgattctttcaaagatactaccctcctcgtcctcgaccacttgctttgctgtcgtaatctcaccataccaatgaaaacacctagccttagcgtatgctctgggccgcccatgcaagcgggaagaatctcacctgcccaca

SEQ ID NO: 132653 - DNA, 363 bp, Zea Mays
gttaagaaacactgattaatctgctccaacctttgtttttgagtcgcgatgtcaaaaatagtttgctaagttttatactgtgttggctaacttcggttaagagagagtcgattgcgacaagtgattgctatatacatgttgtgtctcggagtgctataataataagttaggagacttgttagatgattttgggttaagttcgtggtcacgatgaattgcttgttgtagtctaaatgcgtgtggttatggtcgcgggtaaaaattagtagtgctcatgtggtgtctaagctaaaatgagaactagtgtgtgaaaagcgctttgatatacttatataccaaatttgattattgtgatgaatgcgt

SEQ ID NO: 132654 - DNA, 296 bp, Zea Mays
ggccgacgagggcgccgccgtgagactcgctgccatcaatcggtgttgactgggggggatgacgcactgtgaccgtcgaatgtaattggtgcggtcgggattagatgttgaaaccccttgctgttggacgttgtgccaccgcccgatctccatcgagcggcttagatttgatgtggcggcaacgattagatcaggtgaataccagccgtcgatccatgatccaaaggactttatcgcgtatcgcttcgccactatgggcgatttaatctgggcgcctcgtttcagatccaacggcc

SEQ ID NO: 132655 - DNA, 318 bp, Zea Mays
ctggatggctggccaacatatacttctccatgctttggatcaggttctccacgacttcgggttcaggttcctcacctggaaggtagtaaaacatgcaacaataattcaggagatatggttgacaaaatacagtccactaggcaaataacacctctagtgaaaagtaagggatggttttcctttggatgggcaaacgttcctgtcaattttgagccagttcctagaatttacgtgagcaggttcagacattggtcccatattcataactttataggcggcgctcaacacatcaactatttatctatacagaactggcct

SEQ ID NO: 132656 - DNA, 538 bp, Zea Mays
aaactacagggactcttttgaatgtttgctcggccgaaggggtacggggtgatcaccgccgttggattggatatgggcgcgccagattaaaacactactccagcgaaccggtactcagtgtgaccccttggattcaaatccgacgacctagattttaaacacacagatctcaccgtagccgcaggatatgagatctacgattcattttccccacgcgcgaggggttacggaagatctaatccaagccgcataatgtcgatctaacggctagaggctttccccccactcccctttctcctaccggcgtcaacacgacggcgcctgactgaggcacagcggcgccattacctcggacccgaatcccatcaccctgtgcccgaagctcaaatctactaggtgcaacaccatcacagggccaaagcgaatacagagcggggcgtactcaccagtcacgagggtgaagaggactgcgcccacggtgccgcgcaatccacgcacgccgatgacgaattgatgccgccctgctcgccgactcggt

SEQ ID NO: 132657 - DNA, 455 bp, Zea Mays
ggaaaatgttgatagggctgacccggaccccacattatataggctacaggacgggccttagtagttcccttttggagtgtatactgtgtccagtgatgcagaatgtacaagatctgaaatctctccaagtgaaaggaactgcaaccccatagagcaatgaatgaactaatgagatagttaactcaatcactattaaagactaccctgataaacttctttgtgtcgatctgtttctgagcacacgtgtgactatctgacattcgtcaagctaatggacacaggcattcacaaagagtgcgtccactggtattgaagagaaggtactgtcaacactgcttatattattccattgcatatataaggcatggtttggtgcgcggtagtcaccctttgtttgcgcttgactacaggtgctgaagttggttgagatagactttccagaggatatgatgagc

SEQ ID NO: 132658 - DNA, 526 bp, Zea Mays
gcactgaaaagactattgagatatgtgaaatacactcttggtcatggcttaaagattccaaggtcgtcatctttacttgttagtcttttgctgacacagattgggctggtgacccaaatgataggtgatcttcagggggctttgcagtttatcttggtagtaatcttgtgtcctggagtgctagaaagcagccaatggtgtcaaggtcaagtatagaagctaaatacaaggctcttgataatgctaatgcagaattaatcttgatacaatctcttttgtatgagttaaagattcactgtccaccttctgctagaatctggtgtgataatataggggctacttatctcacagcaaatccaatgttccatggccaggtaaagcatatcaaaattgattttcactttgtcagagaaagagtagctagaaagctcttagaaagtgagactcatctccactgaagatcagattgcagatggttttactaaggccttaactatgaagaaattggcatcctttagagacaatc

SEQ ID NO: 132659 - DNA, 538 bp, Zea Mays
tggaaggtccttatatcaacgaagctcgttgcatcagaaacaaacatcaagagcatgcgtagatagtatagccccccagctgttgggtgcacgtaatacatgagaccaatcttggcagacgacaacctccttctacgccaacacctaatagaaacgtcccacgaccactcttttgggaaatcacaataagtcaggcgatgtgcatcactatatttcaagtttgtttcaaaccattcagttaacattgtcttcttcactgcacggctcaaaagcagcgcttgtaggtctgcccaagctcgtatcgtacaatgtttttttgcaggtaagtgcaccgccagacgttccacagaaggtactctaaagtgaatgtcgaattcgaagattcgccatagagcctcacatgttgataggtatctggcatctacacggatctcatttggcggggctatttgaggacctggagatgcattagttgtgtttgcagtcaactcaaaatatatcttggctcgatcacttcccttggtaacatatttaaaca

SEQ ID NO: 132660 - DNA, 274 bp, Zea Mays
cttgttcttgatagtaacctcattcaaggatctgtagtcaatgcacatcctctttgttccatccttcttctccacaaacaatactggggctgcccaaggcgaggtacatggtctgatgtagcctttctctaacaactcatcaatctgcttcttgagtaccaccaactctggtccggacactcgataagctctcttggaaataggggcggtgcctagaataagctctatggcaaattcaaccttcctttcaggtggcatacctggtaactcctcg

SEQ ID NO: 132661 - DNA, 754 bp, Zea Mays
caaggatcttgataggacacttagtataagtcagatcatcttgaacactaagatcctccataggtagctgctcctcgggtaccgtgaggcatttcttcagttgggacacatggaagacatcatgtacatccacaagatggtcgggtaattccatttgataggcaacttcccccactcgctttaggatcaagaagggtccaataaagcgaggggacaacttccctttaactttaaatcttcgcataccacgaatcggtgacaccttaagatacacgtgatcaccctccttaaactctaatagtcttctccgggtattcgcatagcttttctgtcttcaccgcgcatttctaaagttctcccgtatcaatcgtacttgttcttctgcctcttgtacaatttttggcccaaataatcgcctttcaccagtttgatcccaatatagaggagtcctgcattttctgccatatagagcctcaaatggggcatcttcaaactggcctggtagcttttattgtaagagaactccgcatagggcaaactcttatcccaactgccaccatgtttaagagcacaagctcttaatatatcttccagtacttggttggttctctcggtctgcccatacgtttgaggatggtaggccgagctgaagttcagtcttgtatccaagcactcatgcaacttttgccaaaaccgagaagtaaactgagatcctcagtccgacacgatcttcttaggcacaccgtgtagacaa

SEQ ID NO: 132662 - DNA, 285 bp, Zea Mays
tggaggagaagctccagagcacggctgccacgtttcttcattgcagcaattcatcgaacacgtggtgagtgctacagtagcgacattgggcggccatttttagcgttttctgtttggattcggacatgggtcactgtagcaaagataattcccacgcaatactctacaagtttgattaagggttctcagccatttgcaaactagattaagagataattaagtccaaagttgctactgtcaaagggttcatttcacctaagaatggatgtcaaaccttgtcaaaat

SEQ ID NO: 132663 - DNA, 684 bp, Zea Mays
ccaaagccttgatgtgggactccgatagtggattggagaagaaacgtccatacttatcatgagcttcagtgctaacaacctcatttccactagcaatacccaaccttctaatgagatcttgctggatatgtctgataggcgcatctttgctggatttagaacccttgcttgccaggcggctgctatgacgaggaacaaaatccggaggcagctgcgcagaccttctcttctgtgggggcggatggggaagaatgcaagagattggttttgtaacactagcaacaaacgattgcaccggtgtgataccttgctgaaccaaagcttgagagttgttgctgtaatctgatctaggatcaaattcatcttgcacctgatgctggctcctgatccgccttctagaataatacttcagtgggggagcctgaccatggaccagctccagcgaccctgcagcctgatgaggcccttcatgcggacttgtagcatccctctgctccagtggtccaacacataagtagggatgaaacctgaacaggcccctcacgcggacatgatgcatctctctgcagaggcgggcccagccgcaccaagtccagaggcccaccacacaaaaaaggtcggggcaaggtgagaacgggcctctccagtggcccatctacctccgcctggaccccttcaacacgg

SEQ ID NO: 132664 - DNA, 331 bp, Zea Mays
tggttggctggttgtgcttttgaatggactgttttttgtattagtaggccctattcattagtatatttagatcgactgcgtacctatataaactcaacaacaataactaaagtctactaatataaaatactcctgtcacggcgcagctgctggccttttgttgctaattaaacagtacgagtaggagacgagagcagcagctgctgctgattgtggttgcctactgctacgacggcgccagcacgaccgtaccattgctctcccatcaacagctagctagcaatggcgagcttttgtctacttgtcatgtcgatcccatgtcatcttcccc

SEQ ID NO: 132665 - DNA, 604 bp, Zea Mays
ggaagatcaattggaacaatctgaagagcatcattgggggttgatttagctccactagcagatatcagaattctggcatctggtgcgccgacctctaaggcgactccctcacttgaagctaaagaagtatgcatcgctatcactccatcagaacgtggtggagatgacctgacgtggacatccatggaggtatgggaaggagagctcgctcggacaccctcgggggctgggttgcaactcgcactgccatcggagccggatcactaactgcaacactctcgggggctgggttgaagcttgcgatacccacccgagccggatcattacgtgcaacaccctcgggggctaggtaaccgctagcaccacccttgggggctgggttttctgcaacagccacatctacggctgaaggatccttagtcacctccatgggagtcgggcaatcttgaccaacctcttgacaccgaagaccgccttccaaggtcgacgatgcgcgagatgctgcccgggatacctctaatcccacatctggaatgtcagagaaaacatccatcatatcaccatcaatcggctctgagagcatatcttcaggaataacatcctc

SEQ ID NO: 132666 - DNA, 372 bp, Zea Mays
cgatgactaaagagcgccaacccccacgaggttgtgctcctccaacagcagaaagaagaaggcaacaccggtgcaccccatctggaggcctggaagatggaaagacgcgatgaatgcgagaagagcaaaggcatggctactgcccaagagatcgatccctttttaaagacagatctccccactcgcgccccaaagcatcacgggcaaagtctcccccgacgtgctccagggttcccgccctacgacacgggggctaggtcccacatgtcatacaaattgacccgaaacgcgaagatggcgaaccgccgcacacgaagcatgcaaccaccccgcggttaagcgctctctcatcctcgccgaaaccagcggtcg

SEQ ID NO: 132667 - DNA, 365 bp, Zea Mays
ctcaatttttatggttccaaacctcttactccagtgatattcaaatgtcattggttcgaccctcaagtgactcaagaatggtttgatcataactcttatcatcactatcaaccatttcatagtcaacaccatctgaaggcgcaagttcgccattaatgtcattgccttcaaggattactaagtcattctcattttgcacctcatcatcctcctcatcaacaaccatttcaatatctacgtccattctgatagcttcggttaagtctatctcaaatcgcccttctagcccatcttcttggaagaactctccatcatatgtgtccgggtctaagttataatcttcatcgttaggaacaggtaatctc

SEQ ID NO: 132668 - DNA, 293 bp, Zea Mays
tggggcactagattacgcccttcaaatcctccatctcacctagatcatttgtaacataaatccattgcttcattcatgagcccaaccatttttctaaagcgtaagcataggacacctcacatcagaccggtacacaaaactatagcatccgaagttgttatgatattgctctttcccaaccgcctttgtctggtaggacaattcatgaatgttgcagaagcagttcacatctggctccagcccttggctcctcatagcccaaatgaaaactccaacttcaatcaaagctttgg

SEQ ID NO: 132669 - DNA, 396 bp, Zea Mays
ccctccctccctccctcccgataaaacaaacgctcaaccttattgggctggtaagtgagaaaggtgtgttgccagcccagcccagcccatggtcgacggtcgagactggaggatggattgattcttggtgcagctgcggacggtcgccaaccaagcaaaagcgaatggaatcctcgggtccgtccggccacgcaagcggcggcaccaccattcatctacgaatccatgggaggagattggagtggggccagctaacggatcggagtcggagtccttcttgtgcttctcctgctctgctggtgccgctgccatgggtttccccagcacccccaacctgaagctggagcctcgccctcgcacgcggaggctcctgcgctgcgccctcagctctgagcc

SEQ ID NO: 132670 - DNA, 351 bp, Zea Mays
cacgatgcggctaccgtgctcctgcgacatgaacttctccccctccagcgcacgaattgtgggccatcctctctcgccatcctcgtccatagaccaccgcacaaacatgtgagagcgggacgatgcagagcgtgaatagaccaacggcgagcgggggaggagatgacaggagacaagacgatagagtgggtgctccctgcgtttgccgtactcacgctcggtgactcctcgtcaccgcagccacgggttagtccgcctgcatgtggggcgctcgtaaccgctgcttctcaggacaaaaggggaagcggggaggaggacaaaccgatagctgatcaggtgggcttcggcaac

SEQ ID NO: 132671 - DNA, 737 bp, Zea Mays
taggacctattcgtcagttgctctctgctctcgctcacgatttgtcactgacacctaggcccctgttgtcattcccgacctcccgctcgtttcatcgctattcaccgatcaacgcaccaccattgaaactatccctacaatactgtattggaccaaacgacggcggcgatccctctagacatatttgtcctttaccctagccatgtcttcatcgaatcgacataaaattaaaccgagaggaccatcacgtcctccatcactcccctggcgaagctgctcacacagtggcctcctccctcaaatcaatggcatgactctaaaaaaagacaaccccctgcactctgcttacctcacttcgagctctattgttccccaagcccttgaactcgcacaccatcaccaccgtcgagctacgtgactttgttccacctccagcagagccccaccttcttttgcaccggtgtcacgagctccaccaacatttgaaactcctgtgacacacctcagagtgaactccactaacgtcttacataccagaccatggtgacccgaccttgtcgtgcttcgctgccatataccaaggtctctggacaccgaccaggcttctgcttgtcgctaggaggcgcgctagataggtactaacgttcttcactgttcccttgtcaaaacacacatacacattcgatccgaattgctcgccgaagttgtctcagccatcgcagactcccctcaccacc

SEQ ID NO: 132672 - DNA, 297 bp, Zea Mays
gatccatgtagactgactttgtttgatttggcatcctagattctgaatcctgcggagagttttcgaaatattgtcgccgattacccgtaagaacaacggccactcttctaaatctgaatttcatgctgccatgtcgatttgccttgcaaactaattaagtcactcaattcatctattggcagaacggttgaatgtacatcctcagtgttgcaggctttggtattatttggtgacttcaattcagagtaccgcagtaaagaaataaaagaaaatgttgacaaagctgccatatttatc

SEQ ID NO: 132673 - DNA, 503 bp, Zea Mays
gtggccttataggttctgtgcttctcattttctccacaatgtttactaatgaagaaatctgatgatacgagtgtgtcaactttgctgagcatataatcttcagattgctttaccactctatgcaacataggaaagcgtctcgctggtgattgacagcaatacgagccataaaccgtagcaagatggtgattgacgtcgtactcccaggatacagaagttaacctgccattcttactcgaggccatgacatgctgcatggagctaatgctctcaggatacagtccaagaaccagactgcttgcatcaaagaaaagcctcatctcagacgacagaacctcgtgagccagccaccaattctgtgctcctcttccatacagaaaagaaggcagaactccagcatgtaaagcactgcttggattgttccacgccacaatcagccctctgtcagagctctccgatgatgaccacttggcaactagaatctcctgcagctaatgcagaca

SEQ ID NO: 132674 - DNA, 795 bp, Zea Mays
agggtttatccgaagattatgatgacagtgatagttatgacgtggaaagtggggatgaagactctgaggatcggccgtggagcccaagccatactatcttcggaaaatcgactaccaagcaaagtcatattgatgccatgagggggagatattttcgcgacatgtctattgtcagagttggaggagacagtactgcccctgctccagaggaaaacgaagttgttatataccaaagcttcttaaaggcaggtcttcggttcccactgagcaagtttgtggttgaagtgctgaagctataattaggatggggatttttgtctgggctgtaaggagtcaggggctagagccgagcgcgaagtgcttctgcagtatgcacgagcttttatatgagacgaaggctactggcgaagaacaataccgtaacaacttcggttgttatggatttattgctcgccccaatgcaagccaccctgtgccaacattccggaaaagatggcccgaggcctggatggaggagtggttttacgttaaaaatgatttaatgacaagggaagacatcaaagaaatcattcagcgccccatttagtctcgcttcgacctccgaaggccgaaggtggaaattgatggcactgttgaagcatgtcagaaggcctttatcactgtgtgtgtgccttcattggcacgagggatttgattcaagagcatgtagtcttcagggtatggccgtttgtggagagctgtgatatgccgaaggagaccaccgccgattccattgagggtggcctggtccgattg

SEQ ID NO: 132675 - DNA, 528 bp, Zea Mays
gtgaacgctgggcctcctaacaacctagcgtgcgcgcacccgtgaatctggacgcgcttcccgtgatcaaaggccggtttgaccggggctagaacacatataaagcttgtgctccacagctacctcgcctgcccagcgagtttctgtgaaccaccacaaaagaattagatgtcgcacaaggttcgccattagtgtggagatcgggagagagacgtcgtcgccgacactagggggaggatacaccatagcttgggcctcgacaggggatccggtagactgggtggatgacgctcggtagtcttgtcgcatcttagggttgatttggtgacaaccgaaccacgagaaaattaaaggagattgaggggaaaatgaactaattttctcctttaatcccctccgatccatctgtggtctcgggtcatcaaatcagccctgaagggtgcccgggtggccgggaattctttgcggcggtgaactccgacgtcaggctgtgacgggtcgtgatcggttctcaagagtctatccccg

SEQ ID NO: 132676 - DNA, 563 bp, Zea Mays
agctgtgcaaggaattgaatttgcaactccactcactggagaatctgtcaactcaaaaggagtgccacaaagattcagaacattggcaaatatcaatgacacaactgatgagattactgattttgagtacagtggggtgtgctaccttgcagcagaagaacccagaagcattgagactgctctgaatgagcaatgttggagaaaagccatggaggccgagatgcagtcaatagaagaaaataaaacctggcagctgtcttcactacctgctggccatcgagctattggcctgaaatgggtattcaaagtgaaaaaggatccagagggcaatgtggttaagcacaaagctcggttggtagcgaagggatatgctcagcgtgagggggtggatgttgatgaggtttttgcaccggttgcaagaattgagacagtgagattgttgattgctctggctgctcagaagggttggcaagtgcaccacatggatgtcaagtcagctttcttgaatggtgagttgagggaggaggtgtatgttcaacaacctccaggatttgttgtcaaaa

SEQ ID NO: 132677 - DNA, 502 bp, Zea Mays
ttaggttcaggataccgaatagcatcataactgacctaggatccaacttcaccagttcagaattcttcgatttctgcgagcaaaagagcattcagatcaaatatgcctcggtggcgcacccaagagccaacaggcaagtagaaagagccaacgggatgatattagaagcactcagaaagaaagtcttcgacaagaatgaaaagttcgcaggaaaatggatcagagagttgccatatgtagtttggagcctgagaactcaacccagccgagctctgcatggaaatacccccttctttatggtttatggttcggaggcagtgttacctgccgatctcaagttcggggcaccaaggctaatctttgacaacatagcagaagctgaagctactaggctggaagacgttgatgtactcgaagaagaatgactgaatacggtgattcaatcagcacgataccagcaaactctaaggcgctatcatgataaggccatacggcatcgatc

SEQ ID NO: 132678 - DNA, 577 bp, Zea Mays
gcagtatccaaatggaagtagctatccaacgtcagtgaagttcgaagctttctaggaatggcaggatattaccgtcgttttatcaaagggttctccagcatagccaggcctatgaccgagctcctcaataaggaaaataagtttgtgtggaccccgaagtgtgaggacagtttccagatcataaagaagaagctcacgaccgcacccgttttgacactgccagacatccatcaggattttgtcgtcttctgtgatgcttcaaggcaaggcttagggtgtgttctgatgcaaaatgagaaagtcattgcttatgcatcacgcttactcaagccgcatgagcagaattatcccacacacgatttggaattggcagccgtagtgcatgccctaaagatatggaggcactacctgattgggaacaaatgtcatgtcttcactgatcacaagagtctgaagtatatcttcactcagccagacctcaacctccgccagcgaagatggctggaaatgatcaaagattatgaccttgagatccactaccaccccgggaaggccaacatagtagcagacgccctca

SEQ ID NO: 132679 - DNA, 566 bp, Zea Mays
caaagttggaaattggcctgattacgatctccacgatccaatggattcaattctgaacttgttggacaaggcaaagtcagaaattgagtgagccattgatacttactctagaatttattgttaaggaaacttttacgcctgcatctcaaatactactacttaggagacctctctcgttcttcctcaaagtttgcggctattactgagaagagaatctccattgccatgatatctctattgccacaactctgcacgcacagacctagtagagcatgcctctaaaatcttgtttgctgaagatcctacttaggatagtagccaataaggttttggtggagcatctatactatgggactgcttacaaaataactactatgtctacttcccgatgactgttcgatgggctacgcaacatcatttttcaccgctttgatctatacaactgcatcaactaatatcaactaagtacagtggcggacccagaaaataaccaagacccgggccgaagtgaccataaactctaatagtagcatataaataaattgtacggcgaaacaacgttatta

SEQ ID NO: 132680 - DNA, 281 bp, Zea Mays
catcagggtatgtacaatgagtgttttgggttgtgccttaaagtatgtcaaaaagagtaaatgtaaaaaactaaagacacgtcttttaacaaagacattccacctgtttggttacctgtatatgagcatgcaacacccatgggatgcaaaaatcagatggtgcatgttgtttggttacctgtgtgggggtcggagcctgtctcgcttgctgcaaaacccacctctcaaccaggcccggctcatacggccattttgggcgtcgctccgtagccaggctcccc

SEQ ID NO: 132681 - DNA, 615 bp, Zea Mays
ctctttcgcctttggcctgctggcagatttggcattgttgcacaaaatcagccacatcagatttcattcccttccacacaaacaacttcttgaggcgatgataagtggcatgcatcccagaatgacccccagccgcgctgtcatgaaccgctgccactaatttagtgcgaagagcagaattctggcccacccaaatcagacctcctttcctgatcaccccttgagataaagaataaccgtgttcatcaggattatggacacatagccgagccaggagagattgagcagcaggatcagtcacataggaatttgtaacttcttggatccaaagtggttgaacctcactgactgctgttaatgccatcactgcccccacccgagaaagtgcatcggcaaccttgttatctttaccttgcttgtaaaccactttaaactgcagacccatcagcttagccatcgcctttcgctgcaactcggaatgtaaatcttgacttcccaagaaactgagagccttgtggtcggtccgaatttcaaactcactccgctgtaaataatggcgccaatgatcgacagccatgatcaaggcaatgaattctttctcatatattgacaatt

SEQ ID NO: 132682 - DNA, 487 bp, Zea Mays
agcgcgccttaagcccctccccatggtcagaatggctcaccagagttgctttggccgcccgaggctttctcaccgccgttctcccctctctgcccgtggattcgtggcctcttccccgccattgagttcgccgtggcgccgtcttcctcgctgcccaactccggcgagcctggaaccaccctggctcgcgtcagcctcaactccagcgacctcaccgctgcggagaggagcagcgtcgcccgcagccgtcggtttccccagtctgatcccctccgtctgattcagatcgaacgactcacatcacggataacgcttcgcgcacgaacgccctgactccctggcccgcctgtcagcgcccaaaccctctggcgctaggcccgcttggtcagcgcgctctccccctctgttgctgaaacaccctagcccgcctgtcagcgctcgcccgctcgcgcgcgcacgccctcggccgcagatctaatctcagccg

SEQ ID NO: 132683 - DNA, 344 bp, Zea Mays
gtactctcagagccaggccgacttagctcagacttctgcttttctggatagtgctcgttccctaaattcctctctgaatgcacaacttgattttaagaagatggcacacgaggtaaacctccttggttgatcctgctttgctctccttgcttcgatgctggatgctgttctttgcttgcaggaagaaaaacaaacacttgttgcttcccgtgaccatctggacaggttgtaccgtgacgctaataactccttgaccatcctggaaaggagccatctcttcaccatgtctgacttagaccatcatcgccacgagctgcaaacatctcaggatgaggtatctcgac

SEQ ID NO: 132684 - DNA, 448 bp, Zea Mays
cacgtccaaaactttttgtttttccttgccccgaattcttcgcctccaccgagattgttgtgctcatggccctgttgaaagtgagatctagacaggtggccattttccgctgcagtctatcattcagacctctcataaaaaattcttcttctttaagtctgtattgacttgttgtatggcatattgagagagatagttgaacttagcaaggtactgcatcacagaatcaccaccttgcttcagacgtacaaactcttccaacttcatttgcagaacaccatctagaaaagtaatgctcgctgaacgcttgcttaaactctgcccatgtaacaagatgaccttcaggatgaatggctacgaagtttgcccaccaggtactggcggaacctcgcagttgctgagcagcaaataggggcttctgagtttccatgcatcggatcaatccgaa

SEQ ID NO: 132685 - DNA, 520 bp, Zea Mays
tcctccaccgtcccgctcgcacgaatctccttcgttgcgacactatcgtgggcctgcggtgcaaggagatcgccacgctcgttgttggggcctctgcgctctcctcctggcacgacggcagtcgtggtgagccccgaccctacttcattcttgaaagcttggcacctccgcgcgggattgggtgggttggttttctagcagactggtgaggttggtggcccgcgccttctacgatgaccacgatgggtgcaacccgccacatgacgccaacactcggtatgccgtgcagctgctcgacgtctgtggtgagccccgaccctacgtcattctcgaaaccctagccgcagtcgttcctgacctccgcgtggtgtcaagtgtgttcgttttctggtaggctggcggaccgtgccttctacaatgaagtctctatgaacggcgacaaccaaccattgaatatttgtaagcttttttgaccttttatatggcctggcacttcaatggtagactagtatagaaggca

SEQ ID NO: 132686 - DNA, 363 bp, Zea Mays
acaagctcatcttaactttgcatcgccttgatgcaagcttcctaattacgtcatgtaccttctcacattcatgtcgaaactccaagagagttttgagacccaaagccaagaaaccattccctcaatgcttttaagcccaaaccaccaaaccccttatgagtaaccaagtactgacagtcatatgccttcacttgactttgtcaaccgcagtcttgacatggtcaatatggtctcatctcccatatactcttactcttgtcaacactcccatatgttagccaccacaattagtcctctggcttctcttagtccatgccccaacgcccatccttcactacttttagtccatcaatacaaactcta

SEQ ID NO: 132687 - DNA, 568 bp, Zea Mays
gcgtgaatgcgagattttgttactatggtatgctttcgatgtgggacctatatgcaaatcttgtcgtcctaactagcacatattatcttcatatattttgaatcctaatcaacaaatttcagccaactctgatgaaattctaagatatgaacacaagcttttgtttctagggtctagttttgatgagagccattaattaatgtctatagtgctaaggctattaccaatccatagtatcatgcacttttaacacatgccacataagcattttttatgatgtgacaaaagagttaggatgaaagagaagaaaattgaatcttgagggagatgagatcatatgcattgaaattttaaccatctaattggcccacatttcatactctcgcatgtattagcatttaatatttttgtagaggatcaaaaagtaatctatgatgccgtacattaggataattatatcttatataatttaatatgacatggcaagtttagcctaattggtactgagtaggtgtttgttgcattaaatcatctgcaataaattttagacagtttggattaaaaaaag

SEQ ID NO: 132688 - DNA, 978 bp, Zea Mays
tgcaagagtgccgacacatcagaggttttgagtagaaacttctgaaagagtctaaaccagaagacctaaagccaaaaagctccaaaaccaccaacaataacgactcagacgatgatgccggggcaagttcctaaagccaatgcaagccatcatttatatcattggtagccccgactcgtacgagtctaagagaaaaacaatagttggagatgaggtacgtctactctgtgtagccggccacaccagagttcctccactagtcaaatgtgtcgattacatttgacagatctaatcactctggtcatgtgccacggttagggtggtatcttctgatattgaatccaacagttggcgacacacgactccactgagtcctcattgatggtggatgtagtctgaatattctcttcgtcgaaaccttcaggaagatggggctatcggaaatcatagaagttgagtcttgtgccattttacgacattatcccgggcaagtccatgattccactagggtagatcactctgcttgttatatttggcaccaagaaaaacttctgcatagaatttttgcacttcaaggtggaaaattttgacgcgacacatcatgcaatcatcgaaagacctaggctcaccaagttcatggcaatcccctattacgcatacctagtccttaaaataccatattctaatgggatgatcatggtcaatgccaacctaaagtaatcatacatctgtgatatagaaaggtgaagcctagttttgttgcaggtcatgcatgtaggtagagtttgatagcctaaaggagtctctccggctgagtcatccagaggtaggacgagaggaggatcttgaacctccactgaagaaggcatcattgcaggccgagtccaagcttactaagcaattctagttagatcccaatgactcttccaagaccacacacatctgggccagcatttcatcatcgtcatccgagtcact

SEQ ID NO: 132689 - DNA, 357 bp, Zea Mays
ggcgtgatggagtagatcgcgaagctttcttttgcagagcgcggcgacgtgatggagcagagcgtgaggcgcacggatgggaggttgttcgcggcttcaagatgaggatttcgggcgccatgggcatgcgcggctagcggcggatggggtcggtttgttcatggacggatgaggctgctggcggcggatggggtgggggtttgttcacggatcccggatgagtctgctggcggcggatgagtcggcggttgcgtcggaaggagtggtagcagctcgggctaggagacggggaccgtgattgttggcggatcaggcgggtagagggccgaggcacatggatggacggtcctgatttga

SEQ ID NO: 132690 - DNA, 827 bp, Zea Mays
gttctatagttacttgggagtcactcaatttatacattccaattttacccatatgatacctccactttatttttcaatgatatactttttataggttcatgtgtgaatagatacatagtcatccaagtttcaagcatatttatgaagttctatgaactttggttcagacacaaacacattagcataataattgtctaaaaaacaagtaaaaaccataaatttcatataagtttcatgtgaaatcccacactccaaaatccaataaatcgaagatgccaaaatttgcctcattcacctttcaattacccatgaaaacgaacatcgatgtggcaacccctttaatcaaccaaatgccaataagaagaaatttaaatctaaatacatttctactttgttgtggggcaaaacgggggaacaagtcataacactggtcccacaaattcttagttctcgtttccctccctaatatctattcccctatgacatataatgtggtgcccatgcacattataattgtgatcccaatgacataatgcttaccaatgcctcgactggatgcacaacatggagcgcatgactacctcaaatgacgctgataccatgcacaaaagtcaactatgcattactaaaggtatcattgcgtgattttgctgatacggctagtgaataccaatgcatgacatagatatgccaaagggaaagtataggatgcaggagtatttatgaagagatatgacaatgcggcgtgaggatgcgtattttgactaaagaaaatagtgcgggacaggttggtgagcggaggaagcacgcgaggtctaggattcaag

SEQ ID NO: 132691 - DNA, 315 bp, Zea Mays
cgacggagtctggactcaagaagaaaccagctggtgagggagtagactggatctgccgccgtgattactcgctcacacgacttcacagtggctggtgttggttgggagtggtccttcggggaacgggagtttttctgggaagcctcgggcaccggaggaagccttgaccgtcgctaattcctcactgacgactcgcgccgactgggggaccgcacattgccgtagccacgaaaattcacgccattgcttgaggtacggtgttctcctctgatctcgtccttctctccgcttccgggagcaccctaaggatagttt

SEQ ID NO: 132692 - DNA, 293 bp, Zea Mays
tcttggtcggcaaatgacttgtatggagtcgatggaagcataatagagcatgacctaaatgttgacccaagcactaggccacaaaagcagaaacttcgcaagatgtttaaggacaaagccaaagtcaaaagattgcttagtgtcgggtcataagagaagttgcatatatagaatggttggctagtcatggtcaagaaatccaatggcaagtagaggatgtgcatcgacttcacagacctcaacaaagcatgctcgaaggatgagttctcgttaccaagaattgaacctctggt

SEQ ID NO: 132693 - DNA, 272 bp, Zea Mays
gattcaagattggagacctcgaaggcctaaagatcgagctacattacgaagtgcacggggagaacgagtaggcaaagactcgggtgctaccaccgccttgaccggccagggtgaagaccatcaaggacttcggagacttaacattcagaactgtgaagatcatgcattgtaacctgccactaattgtaataaggggcccgtgtatagtaggcccatgctataggatcccacccgtaggccaccacgcaggcagagctggtagtgggtcagcc

SEQ ID NO: 132694 - DNA, 692 bp, Zea Mays
ctgatttccctcgtgcgcgcctcggcccaataccactctcccaccgcgccagcccagttgccttccccgtggccccgcggcgtctgcctcactgttcggtgggccgctactgccagctcctccctcgcacccgttcacttacgaatgggccctggtggtcagtcccctttcctttcccgtgaccgctcgcgcgccttgatcactcattgactcgtgggaccgggatgtcggtcgtcctcttcccggcgacgcggtggggatgatgcagccggggatctcagaattccgttgcaacagactccgaatccacatccctctcctcggctggtgcgttactcccatcggtataagtccccagacgctcctcctctcacccgggtgcgcaggccgaaacaacacatgccaccgtgatccaagttcgccatggtggagagagaaatgatgccgccaccatcgatctcctccgtgggtaactccccgacctcgggggtgttcttagcgcgtcgtgggatgctgccgcgcgtgcgcttgacctcggcaggcggggatcgcagccgtgaggtcggtgattttccgccggtgtagcagcgccgccgcgatgtggatgtgtgccgtggcaaacctctgccacagcgccagctgaggtaataatcatgccgcagtattcgcctagctctccagttcgcgtcgcc

SEQ ID NO: 132695 - DNA, 864 bp, Zea Mays
ggaaaggatgtaacacccctggtgttactaaaactgaaatctggcataacatcatgtgcattagcatatctgtgattttaatgactctagagtgcctttactaggtttaagaaaactttgaatgtaagtagtagtgagtaggaagtttatagaaaaccctcatatgtaatcccaaataatgaaatttgaatttagtcatattttgtccaaagtcaaattatcaaacttatagagttttccataccaaatagctttcatgtgtatggattttcaggtcttataggaaagaggtgggatttcagaatctggatttcaggtttagtgtgattcctagaactgaagcttttatgtttagagaccactttggaagtctattagtggcaaatttataccattctagacttggagtattataataaagtgcaagaccacatgttggtgtataaatttaattaagggtcatgtcactaatgctgtataaaactggtggaaaaacctagcccaaaggtcctatcctcaaatctgaaatttcagacttagtgcagttcagattttagaaatgtgtataattggtctaacattggggcccttttgtggatgattagtggagtattgggccatatttgctatagagaaattgtagattacctatcagggcacaagtttgcttaagggagactggtttggttctacacaaaaatagcagaaaatggcgcctacagataggctgtcagacttctacatcttcagatggggaatagtgtactggtctgaatttcagtaatttggctcaactttggagctgtatggtgtcttttctaggaagtttggagctgagatctttataacaaaaatggagatcat

SEQ ID NO: 132696 - DNA, 509 bp, Zea Mays
gatttgcctcgggctcgggctgtgagacatatcctacttgagtgctccatatctctaaaaccagtaggcaaaatcctttgacccccacacaaaatcggtagcttatggaaaggggaagagcttttgtgcattgaccaagacaagagtaggcatggatgagtgactacacgcgccagaactcgggcagaagcaacgcacacacgtgttcgacccatgcgcacggtcaattccaccgcgcgccctcctcacgcccatgcctataaaggccattagcccttggacatacttgcctcatcctcgcacactcgccgtgctcaatcactggagcattggccgtgaaccgagagctccacctcctgccaagccgcccgagctccggccatcgtggccagctcacccaagccatccctagccaacgccagtagttcagttagcttcaccagagattcgtgaagcttcccaaaccctcagaccgagcgcaacctcaccggaaacaccggatcaccctc

SEQ ID NO: 132697 - DNA, 672 bp, Zea Mays
caaagttggctagggacagttcttgcagaccaatgagggcagacaaagcaggagagggaactccactactttcaccgctggcgatgaactgccgactgtttttccgagttaaaggagcttcattctcttcctcctcatcatccacattggcgacacaagcagcacccccattggggtcagcaacagatggagcacccacattgggatcagcagcagattggggacacccattggggtcagcatcaataagtccagtcgcaggcatttcttcagtagcaggaaccgaggtaccagcgtcctgatcaaagctggatactcgccggaggcgtcttcttttcttttttttgctcatcagcagaaggatcaggctgattggctcggcaagggcgcctcgggcgagtactgacaggtttcaaagcatccaaagtcgtatcaacctctgggaggggcaccactgccaacgccccagcaggagcagcatcggaagaatcctcagttagcaaatcgagcatagtgtttatatctacatcactagggttcaggggcacctcaaaatggacctgccgttcgtcatcaggaatctccccaagcaaagcaaccaaagcactaacttcttcagcagagggtcgcactctaaggcccaaacaaccatcagaaatgggtggattcgac

SEQ ID NO: 132698 - DNA, 371 bp, Zea Mays
cgtggctgagggatctttagccttagaggaggctaccacggaggacccagcccccgagggtgttggggcaagttccccttctactgcttccatggacgtccatgttggattgccgccagtccaatccgaggaggctgcggtgacacatctatctacggctcttgtcggtctggttactttagaggtcagtgaaccagacgccaggagtctgccgcctgctgatggggctgaagttcctccgagtcatgcctttgatatcattcccgctgatctcccctcatcaagcaatgtatcaacacttcctgctttgggtcttcccttgttcctctctaatcttcaggtgagtcaactttcgcttttttactgttccc

SEQ ID NO: 132699 - DNA, 488 bp, Zea Mays
gttggcactggattgcttacttcagaacgggttacaaaaccataacaaccgaaattgttgtggtattgctcttttccaacagccttcgcctcataagttaattcaagcaagctgaagaaacattttgcattcggctcttgcccttggctcctcatggcccaaatataaacccctatcttaatgatggcttcgagggtaagctgatgatggtagacttcgaatgtcttcaacacttagaccagcacactatccaaagggaaccgaagccccgctttcataaaacttatatagacaactacctcgtcagcttcgggcagagggacattactctctcctccagctcgcacaatagaaatgtcacgaaaataccttcctctcatagcatggatctgtccttgtttaattgttgactttccaaaaacaacatggcttggcctccagggccgatcttcggcatcctcagtctcacttttggcatcaaagtcttc

SEQ ID NO: 132700 - DNA, 593 bp, Zea Mays
aagagacctcttcgaaagataagaattttgaccttcgacacctgggtggccaacaacttttctaagaggacatatcagaattgaaggagtttgccatatcctgcggctaccagcctggattcatgctctttggtggagtcaacgaagagattttgggatgcattcgcgaccgcgctagggctaaaatcataagcacttatcgaaaagcattggattcccaaagctagaaaaggacatcagttgttacaggcaacaacacattattggcagcttgttttactcaaacttcaaagtaagattcctttactacattttttatcgtgtcaatttaagtattctaactttaattcgtctttcagagtctattactgagcaagtccttgaagatgcagcaggatgacgaagacagaaaaaatgaaatcgttatcgaaggctttgaagataagattaaaaaacataaaaattctttgaaggaaaaagacagcttgctgtgttcagctgaaagctcactcgccgaagagcattctcaaaataaaaaattgggcaaagagctagaagaagctcgaacacttttggaaaagaactcagatcgc

SEQ ID NO: 132701 - DNA, 5228 bp, Zea Mays
gcctgcgccactgaaaaggttaaaatgcagtactagaaaaggaagcaacgtgtaccctaaacagtaaatgatctctatagggtcaataggcttatattaaatacctcaagaagctccccgcttctccttagaatttcccttgggctctgaaactctttttgtatgatcaactccctccttttagtttcatacaacacttcaccattataagaggctttttcagcgaatccctgtcccaatctcttggagccaagtctgtgttcatgttcctctccacttctttcagtaataattttatcacactcaaccacaggacatcttatgtccttccaagatctagtgacattcgtgttgcttaaggaaaaacaattaactccttcactcacaaaggcattacaaacatccacaggattaacagatatttcccacaaaatattaaacaatgcctccatattctcactgtttgaaagctgtgaaatcctcgagaggtgatcatagctatcactgactgggagttgctgaggcaacttggactctaaccagaagagcaaacttgaacttgaattcatcggtaaattcttcctcaagaacgatgcatgcagtggtactaatgaagatgacacaaaatgaatggaatccataacaaactttgcagcaacagaagtgataagacccctgaattctgaaccactaacaccagcttcatgttcaagtccctctttctcaaagaattcccttagacgatgttcaagcacagatatcaaccgaacccacacagaagcgcctatcaaatgccacttctcatctgctaaaagatttgaattcacactctttttcagttgtgttttactcaatgcagcatggggcattcctcctgtacttgatgatatatcatgatttttgtggcatatagcatgcatcagttgatctaatagtacttgaaaggaatccccattaacagaagtagctaggactggatttatcatgataagtaatgattttatgtcataatacaaccaagaaaaagaaaactctataatgtactcaaacagatccataactgccagcatagctgacctgtcatccagaatataatttccacttttgtcatgtttaagaagtaacctgctgacattcaggtaatttgacaaacttattacaatgtacttatgtctctctttaagtgcccatgcagtagaattggtgtcctccatattcagaacagaacacatggaggagaggacaacatatcgactaaaaaacttgcagctctctttgaatgaaaacaataacagataatcaattgggcagagagggtgacattcaagaatataattatcagttgcaacatctggtgacctagtaccccataacaaaacatacgctagaaacaataaaccatcatggctacaaaagattaggatctgcaacaaaagaggggggaaattggatgaaataccattcaaagttcaccagaaattatcaaaataaaagaaactgttatctaccagcgttaccttctcagctatatcagcaaatttgagggagaaccttttatcaaatattgagattactgttgtaatatcacacgtcagtttttcaatttgatgattgttgtactcattaaggaccttttcttcagataatggtgcgttcaattgtgaacagagtgagtgctttctcagaaggctagatagatattttgaagccatagttagtttaaggttggactcaatgccactaatgacagatgaagacagccaattcttagaagcagagacagggctcagtattccataaaaaatcttgtggtctccatcaccatgtgcgattatgctatccttgccatctatgctcgagttagtagacaagcattctagtgcttcaagctaatgagtgggaaaaaattcaacaattagaataatgcaaaataatagatacaaaatatgcagatacaaagggtggacaggtgaaaagaagttagccagcacagggtaaacttacaggtagtccgcacttattcaaggcacatgcagccactgcaaatgaaagcttagataactttgcagatacagcttcaccaacagagtttctgaaactactttttgctgagagaattgcacaataatgacccaattctgggtctgcaagcacattttgatcaataagcaactttggatggcaaccaaatattctattgacggactggcaataatttcctaacatccactgaggattcagatgagataaagttaagttgaaggattgtaactctggaaacacgataatttatattgattctcaacataaaaaaatagaaaggcaattagacaaaagccacgtatatgacacacctcaagcaggcttgacagccagttatctcctctctcaactgcatctggaagtagcacattagaaatgagattacgctccagaggccctccagatccttcaataagccgacaaattacaatggcaagctgttcatcttgaaggttctttgcacaaacattcactgctgatgaagtatcatcaccaaggaggaaaaaagctatagcaagctcccattggtgccttcccattagtacataagcattttttagagcagcagccttgtgcctttcttcctgaatagattcatcacaataagtgtgatgtaataatatagtttgcaacacagagtgttgttttcatatatatgaagttcgtgtttttaaccaatacaaaacttagatattcattcacaaatatatgatgtaaccctcgtcaatctgtgttggcaatatcatgaacttattgcagaaggaacctgccgaaggagggtgaaaatgtgcaaacgtcaaatcatttggcaaggctctagaaaatatcgacctgcaggggaaagactggtccaacagcattgcatcaggaagaagcttctcttgtgcagaccgagaagagaaacaccctaaaggatgactgccccagacgcgccaacaattgtttacaacatgcctatggacatgtgtatctcgctggaaacaactcaaatggttataactcaggaacgcagccgacgaggggtgtcttttatccagacttgtttaaatccactccctccagaaaagaaacctaggaccaggggtgctactaaggttgctgtgtgccctaagcaacagaccgttttgcgaattgattatatgatggcatgtttgaacaaacatggaaacaagtaaatttaaaaaaatgaatatttcaaaaacaatactattaaaaaataatataaaattccttttgttatattatctgcatctggctcaaaaaaggccaggattgccagcataatgataatctatgaactgtcccctagctgatatgaggtgccagaactagcattacttatttcctgaagaatctgaaacatgaacattgcaagataattataggatcaagcaacgcatgtgaaataggaacaaccacatgactgattttgtcaagtaattaaatacaaaacttattacagactgaaatacctggaagtttctggacagaaactcatatagacgtttatccttttcatctctactaatcttgaaaagaccaaccaacacttttattctgttcaatgctatgtagagcaaagcacaatccttgggatccttgcttttaagatattgcaaccttgccaacttctccatctacaatttcatacatatctaatcagcacagatgattatccagataaattcaagtataaaaatcattcattatggtgtttagagatagggcacaaaagatcaatggagagtcattaatgcttaattcctaaaatttggaaaactgcattacaaacaatgataaaacagtatcccatcagttgagaaagtctacaatcctatcacagacatgtcaaatttaatgacttcttaaggggaaagcaacatagcatttaactctaaccaaggcaagcagaaagaacactagtgtctgttttggtcgggaaatgggaaatagacatgaatctttaggattaatattttcaaggagcaacgaaatccacttcatccaaacactcatttggtataggatattagtgatcaaaccaacctgtgattatgtgttagcttaaattatcttattagcacctgcaggatacattgcaaaaaacataaacgggatttttaggggttgagaacatgatccatacgaatttaatcaaattgtgcatcatgagggctttgccagttcactaagacatgctctagtttatcactccttttaaatgatgaatcccttttctctttaggaaaaaagttacagaagttacattagttctgaaacattggatcgcttggaatcacatacccttgtccttagttgggacacatttgtataccataatcctataccaagctttcgcatctctggccaggttggctctgcaggaagcacagaattaagtagatcatcctgacaatcagattggaaggcccaggctatggaagcagaatcaacacggcacccttcattactggatgaatctgcagatcttctaagagcatggaattgttcgaactgcacagcaacccagaaccttgatataaaatatcaattagtgtgactttaaccacatatgatagtacaaaactcattcaaacacttaactagtctctagattcaagtaatgcaataccaatgaattttcataagtaaatatttcaaagttcccttaccttcttcctgcttcgtcaagatttttgtagggagaggaatggctctgatcagtgattccagccataagatcagaaattgcaagtatctgatttttctctgagtcacttataccatatttgctgaaactcttgtcaaggagctcaacaatgtctggtttttcagatgcactagttgtagtattaatacctaaattgccatcctcgtaaagaaatgaagttgaaggtgacaacaaattaaaagttgtgttacttctattctcaccccacataaaccccttggtagaaatgttgttggacactgttgccgcaaagtattcagacaaaggaagttctggaatactatggcatgtactgtaatttgacacgccctttgaagtttcactcactttcatggaccgaacaagatggtgcagagcagcatccgcacgtttccattcacctatgcataagcaacaaaagaatcaatgactcaactatgttatttgatttgcacaaaattgtgtcggatgctaa

SEQ ID NO: 132702 - DNA, 421 bp, Zea Mays
gaagcaacaggggccttcaaaatggtttgattatgatgtgaacaaggctgaacaaatatttgacctattaattaaacaaaaatagttaaagctgccagaaggccacaaatttcctatggtgcaagaactacatggaagaccatacttcaagtggcacaactcgttcacacacaccactaacgattgcaaagagctttgctaacagatccagtcatccattgagcagggctgtctgatcctagggcaattcacgatgaaggttgacagccagctgttcccaggtgtcaacatggtggagtgtgctgaccaagttttctcattcaacatcaatatggtaggatctgcaagatatcaggatgcacggaagggtaaggccggtccaggcaatcagccccaaaaatatgaaaaggaatatgttact

SEQ ID NO: 132703 - DNA, 431 bp, Zea Mays
ccgcaaccctgaccttaaaagttgccttaacaagaaaacacctcttacccccaagaaacactctccccctttccccgatattaacagacccttcttttcttctaccagatggaaggcccctgggttattaggacattctattgctcagaggaggaaggctttcctcaccttctacgaagttgcgcgctacgcatggggatccgcaagaagcccgaatatgtctggaaggagtaccgcgaaaatggaatagaaaagtgctctatggcagtctacctgggagaaagccgaaactacccaaaccaccctcccttccaaatcaccttcatcaggcaccgcttcccagacacttgccagggtgttgcccgaaaagctcttaaacagttgtgccaaaactacagccgagagatctccgagacccccttcgatatttg

SEQ ID NO: 132704 - DNA, 643 bp, Zea Mays
ggcccatgctctttttgactctagcgctagctattcatttgtttcgtagaattttgtgtcgcgggctggtctttcggtgcagaggttgggtcacccaattttggttagttctgctaatggctccattagtagttgttcattttgtcaggggtgttctgtcattctcgctgatgaggtcttttcggccaatcttgttgtgatttccttgggggcattcgatgttatcttgggtatggattggttatctcagtatcgtgcagttatatcctgtttttggaagacagtgttattgcaggcgtcgtcgggtagggaggtggtattcttgggaagttccccaaagtacacgttatccttgttggcgcaattgcttccggatcgccggtcaaggaagtcgggaatctttttctccatggtggtggagggtgaggctgtcttgcgagtgtaggacatccgtgtggtgtgtgactttgccgatgtgtttccggcagagcttctaggcattccttcggaacgcgatgcagcttttgagatcaagatgattccgggtatgcagcctattcataaggccccgtatcggatggccccaaaggagcaggttgaattgaagcggcaattggatgatctgctggctaagggtttcatt

SEQ ID NO: 132705 - DNA, 1286 bp, Zea Mays
caaaaatcgcaagaatttttaatctagaattatgaagagcgttgtgggctgctcggctgctctccccggcccagtcgtcgtctcattctcgccagtgttataatatcccccgcgcgcgcgcgtggcggcgacccggccgtctataaattgggtacactctgatagcgagagaactcaccagacttgcagctccacaccagcaacagcgcgacgatagctagctagtagtagaagcaggcagcggctctagttgtcgagcgttccacaggtcatcaagcaccggcgtttaattagccatccgctccgatcgtcccctcccctattcccatggccagtttcgctgctcaggtcatggacatgttcttcgtgctcgtcgagcgcgtcaccggctacggcggccacgctgaggacgaccagaaggacgcttcaggtaataataaacaaccaaattaatagaggttaattaatggattcatacaatatttgatacgtgtgttttaagtgctaaaacaactaatatattggaacgaaaaggagtatgtcattctgaaattaaaggtgacaaaagagcggtcatccagctgatgataatactatgtactactacagtaaagtattcttaattggctctcttaataaataacatatgatgcaggtgcacatgagcccaccaagctgctgacatcgtctggcgtttctgaaaccgaacaaggagaagaagaggtggtcgttgcggtgcagaatgttcagataagagcaagagggggcggcgaaccctttgtgcaaggtggctcgatgcctcaggttaattagcactgcatgcatgcgggttttgtagaggttattagttgccgctgcctcaggtgatcgagcttcgcagacgatgatgcgtttaatttgcagccagtgttttaacctttttcatgcaaggatgtgtgtgtgtgtgttgtctggatcgtgtttcgtcgtttccttcttctgattgaattaagagtatgtctgtcgagttctatcaagttggttgtaattccagtatcctatgtgcaagcaatgtgtgagcttgctgtcaagtttgtggtgccatcggatcagtccattcttagcctttaactttcaggcaatgtgtgtgtgtgtttttttctcgaagcttgggttgatgcctattggtgttcgtattctagacgcatgcaaacgaacttgcagtaggacgaactgaatgagattaattgaaaacacgagaacatacgctgacgacgccccctactgcgtgctcgagaaaggacgca

SEQ ID NO: 132706 - DNA, 441 bp, Zea Mays
cttcggtgccgtccatctgggtgagccggtaggatcccggtcgtatgacctctgcgacgatgaatggtccttcccacggtggtgatagtttgtgccgtccctcccccgtcagcactcggcggaggaccaaatctcccactgcgaaggatcgatgtcgcactgctttgtcgtggtagcgccttagggtctactggtatctggctgactgaattaccatatttagccgtccttcctccagtacatcgatgtcctccagtctggttgcttctgcttcggctatgctttcaaatgttaatctgggtgctccaaagataagatctgctggtagcactgcctccgatccatacaccatgaatggggtgttttcgtgtaaagctcggtcggctaggttggtaggctccagactatatatggcaattctctgatccacttccctgcgag

SEQ ID NO: 132707 - DNA, 665 bp, Zea Mays
attgaatacttagtataatgataagacctttattttcttttagccatactataaaaaagatattagatgggtaatttgacctagtcgagtctaataagacgcgttggtgtacaattaaataaaatagtgctaggtaacccatgggagctcaaaaaaaaattggagtgaaacaaaaaagcatgcaaacaacctaattttacaaaactctacgacacctacatgtccgttgtatatcggttgtgttgcaccataaagggcatacaaagagatcaaaaccctagccctatgcactggttagtcaccggatatgtattgtgtggcattggatgttacatcggacatggcatccaaagaaggtgttttatatgcatagtcacttgttactcaccggacttgtctaggccatggcagcgcacccagtgagtattgatccctcatgcacacgtcatgaacgtcctcaggaaactagaatggcatatcttgaggtggactatcactgtgaatgaatacgttgccatattactagtgaacgacgatacatgtgcatgagaaaaaacataattaactggtgtactatcagttgtgggtttttctagattactatcggacccataaataatagacatagataattacaaagtcatagacacggattgacatagcag

SEQ ID NO: 132708 - DNA, 538 bp, Zea Mays
ccccatgatccatcacagaatactgtccaaacttctccatctatcgaatgcacttcgttgtgagcccatgtcgtccagtcagcaataaagtctgctagtgcttgagattggattgaggatcgatggacgaagtcgatagtgaactcattgagttcttcatcccattttccaacccttcctatgacttttctatttcttataatatctttcaatgattgagacgaatgtactattatatgatgggactgaaaatagtgctgaatctttctagaggccattaatacgagatataataccttctctaattctgtgtaatttctctttgacgggctcaagacttttgagacgaagtaaactaggacttgtttcttcgtctgtccatttgcttttcttggactagcactgcactaacagtagtatgggaggcagctacatacaacagcagtggagctcctgatgaaggtggagttagggttatcaattgtataaggtactgcttcaaatcttcgaaagctttctattgagttgatccccattg

SEQ ID NO: 132709 - DNA, 329 bp, Zea Mays
cgcgaccgctggatcagtagctggcggctgggatttgatctgggtcagagagactatggaccgtagatctgtcggtgggcggcgtggattagacgggcgatacctcttggcaacattgaaatctatccgtagatccgttgatggacgcttgggatctggtgtaggcgtggccatctcgggaagcctcggatcgtgatccggtggctgtgattcagtaccgtttcaaggggggagcggttttaatctgagtcgttgatgtctaatcggacggctccgggcgggagataccctttcgccttggcatatttactaaagagaccctaggcttc

SEQ ID NO: 132710 - DNA, 730 bp, Zea Mays
tgtgtcactattcacgattttgtggggttattcttagtagtaattcggaccaagagtatggtttaggccctagtggccacaagcctgaatctgcccctgtgtatagccattagctttgtccgcttccttgcggtcttaaggttcatacacctatgaaggctatgagtacatcttaatttctcagtttgcaaacggcaacacagagtaaattcatttttagaatccaggtgttgggtgtaactagatgactatattacattgagctcttaaacaatttatataaaagtagaatacttaaaaggcaagcaaagcgatcctcatatacaaataacagtctacaagtacataatgtctaaactatcaattatactctagcacatatgttagtctatggtacatgtctaaactaccgaattactttaacccatatttttagtacatgttgtggccttggcatgcataaacttgttctaacatccctgctcttattgttataagtttatgcaaaccaagaagttgaaagccgtaaatctttcttatgcatatactcgaggttgtgtcgtcggcaatcaccaaaaagggagattgaaggcatttaggactataaattagttttgatgattaatgatgacacaaccattatgactaacatgttctttgcatcgacattacttggattagtgataggatctccttttccactttggttgtactataaagggggtatgca

SEQ ID NO: 132711 - DNA, 571 bp, Zea Mays
cacgagtacagcgaaacgacggcgaccgggaagcgccgcccggagcgtggcagccagagattagagaagatggaatgaaacctgcagctgcaggacagcccggagacgagggttatggtggcagtcggcagatgagccagcgccttgcgagcgacactctttgaccggtccaagatagagagagaggttgaagcaagcagatggtacagaaacctgtccacttcaccatgtcaaaggtctcagaaagtttgctccgcctttgacagctgacatgacaaccaacttgaagtcaggcaccgcaccgcaccacaccagaaggaggcctgttctggcagccctaatgaagcaccaatctgactgaatatcaggcccccctttcacttggtacacatacaaaaaaattaccatagctcaggtcctaggtgtgcttttacttttgttccagtaaattaaagaaaataagttagcgtattgaggaagaggaacagcattatcctcggttcatataaacagttaacatgaaatattgtaatgctaatatgaaatgaatcctaggtactaaaaacattat

SEQ ID NO: 132712 - DNA, 503 bp, Zea Mays
cgaagtgggccaccttggtgaaacgatcgattattacccatatggaatcatttcctttctgtgatctgggcagtccggttacgaaatccatgcctatttcttcccacttccattcgggtattgggaggggttgaagtaggcctgcaggcttctgatgttcggcctttgttcgctgacaggtgtcacatcgggccacatactgtgctatttccttcttcatccctttccaccagtatgtggccttgaggtctaggtacattttggtggtccctgggtggatagagtaagctgagctgtgggcttcattgagcagggtttctcgtgcctctcccactggcacacacaagcggttcttgaaccagaggactccttgctcgtctgtcctaaggtccgggagttgctccttgcgagctcttcccataagcctggctgtctctgcgtccaggcgttgagccttgcatatgagatcttctagatttggcttgacttccaggctatcgttg

SEQ ID NO: 132713 - DNA, 462 bp, Zea Mays
gagaactctagcgtcttgttatctgtgtcccatccatgtacagtgggggtatttataggtaaccaggcgagtaggtgggtgcccaagtatcgttatacccccccgattacctactacattcctggaatattcccctcaacggcgtcattacagtgaggtgaagtacaacatcctggacacaccacaaaatataccccgtaaaggggcttacaggtggccctagatggtaatggggtggaggttaggccccacggtgatctggtatagccttcgcttgcatgttgcactcttgaccctacgaagtagtgcccactggacttcgtgcagacttggacttcgctgtctgaaaaggagttcaagtctttgggacgcgtgtgtggggctgcagcgagccccctcccttgacaaccggggcccttcgcttcatcccctatgaaatccgcgatcgtagacctcgttgtt

SEQ ID NO: 132714 - DNA, 424 bp, Zea Mays
tcgtcgtgctcaacaccgagctggaccacgcccttgacgagttgggcaaggtttaggcagagattgcggaattgtgtgctgagtgcgcatcacgccactacttggatggtggttctcccgcccctgtcgggattcagtacccttaccattcgccacccgtggttgctttgattatggtacccctgactataggacccagatagatttggatccatagatcgatggagtcggagtctgtaataatgcttaattcagtgtcttagtcttagccagtcttagttagagttagtttgcttatcatatgttggatgcttgtcgtgatgaacttgtaatgaagttggatctttgtaatgattgtcaccaaggtgtgggtatcccctaccacttggtgtagctattaataaagtcagttattcagttgggt

SEQ ID NO: 132715 - DNA, 560 bp, Zea Mays
cctagccgttgatcggccgaagtttggtcgtgattatgttataatacccttttggctggtgggatcttggccgtgcgttattgatcgaacagagccttggcgatctcagttatttaaatccatgcccttgatattagatctaagggctactgatgcgtaccgattcagatgggtactgatttagtcatgggcgcacgattttgatcctacggctcatgtgcatagatttccctttggcttggccaaaattgcaaaagaacacccgagatagttcctaaccaacccgtcgtcctgtttttgcacccgagcccccaaaattaacttttaaaaatacagagcggtccttagactttacaaaaaaaccctggaagctattttggcatcaaaattaataacaaaaacaccccaaacttgtttagctcatgaagttctcgttttaactccgttttaacccattcaaattgcgttagcttcgcaataatattccctatgctatagtagcattatttttaccaagtaacatattttcgaaaataggtatttgtttaacctaagctagt

SEQ ID NO: 132716 - DNA, 550 bp, Zea Mays
attggcaaagtagtggttgagccacttatagttctccgaacatacacccaaataatagttctcaatttaccatgaatccatatagcaatggtaaaccctaaacataataattagttctcgtcttcatgcgccacatgctctagatatcgacgttgcttaacttcatagtaagccctctgtgtcggatttaggctacttagatcaatggacatgatacacacttcttctttagctgcttgtgcatcccacttcttctttaactccactagctggtttgccatcctctatttttgcttgaatgttttttcctgagctgttatcatatacttaatgtttgcatccatagccccctccacttctttgtaggctccaatcctctctagctacaagtttgacaacaaactggtgtactcagaacttgattggcttccaaatggagtggaggtcgtgcgtttcgaagctttcgctgcatcccttcccatgggtctctttggtccccgattctaaagctcactatcgtcatttgtagctcctaagtctcctacatcaa

SEQ ID NO: 132717 - DNA, 431 bp, Zea Mays
tatacagatcataaaagtctgaaatatatctttacacagtcagaactaaacatgaggcagagaagatggcttgagctgattaaagattatgattcagaaatccactatcatccaggaaaggccaatgtggtggcagatgcactgagtcctaaagcttcatgtcattgtcttacaataaggacccctgacaccacactatgtcaagaaatggaaaagttaaacctgggtatcatacaacacggaactttgacacaattaaggcttgagtcagttcttctacagagaattattgatgcccaaagaaccgacaagggtatgaaacatattcatgagaaaatagaagccgacaaagctaattgcttcagaaaagatgatcaaggaataatatgtttcaatgattgcatagttgtgcctaaagatgctaaagtctg

SEQ ID NO: 132718 - DNA, 602 bp, Zea Mays
attaagcgccggcaggtggggccctttgggcagtggcactagcgcttccacactttctctccttcactgatccgcggggctgccttgccagccaccccggggcacgccgtgttctggtgaatcactgcctggttggcccggttgcacagggttatcttccccacatgattcggcagcccggccgaagttcatggcgcccgcgcagatccgaacttgctggccgatgtgggcctcgcctactgcgtcaccagcaagcactcgccaactcccctcctccagtctgcgcgtacactggggaagctatagcgcaacgaaacccgcttcctgcgtggcttcaacggcggactaccgcgcgcaagctgcgcgccagccggatcccggggccattccgcccgccggacccgcggcaactagctccgcttcctgctccgtaatggacgctgcgagttcgccgttgggactaagcccacgtaggtccgcacgcttaccattggtgctcgtcgaccgatcgggtctgcacgtggagatctccggtcaacagaagccgcagccattgaaccacctccgcggcaatcgggggcagttgcaaccaccccaccgcc

SEQ ID NO: 132719 - DNA, 369 bp, Zea Mays
caaaatggtcacacatcccattgacatttgatgcaaaggacgtagacttgcgaagcgcaccacgcacagatgctatggtagtaaactacaacatagacggttgggatttgcacaaggccctcgtcaacaacaatagccaaacagatatcatcttttcgcatgccttcggtcgcatgggcatcaaacacaatctattgcagcaggctggcaatccattatatggatttgggagaagggttgtcctccccataagaaaaataacattgccattgtcctttgatgttgcccctaatgcgaggttagaacaaatgacattcagtggatatggtgtacccccacaatgccatcctcgatagggaggagttcgat

SEQ ID NO: 132720 - DNA, 760 bp, Zea Mays
ctaatacctatggaatttaaggacgtactcatatgtatgcccacatgcaaatttacgtactcatattctataggtttaatttggaacgaaggtagtacaattttttctataggtttgtaccatggttatttcacttccaattttctactctcgacacaatttaattaaatctttaattgtttccaggtttcaaacttcatctcatggtatatatatatatagggcaggtataacgggagtcctgggctttagatattaaagagagcccgggtcggttacagggtctggtccgctgaaccaagcgcgcgtgagtataatggagacgaggcagagagcatgcagtacagacgacgccgtgacgcggttggttaatggcaaggcggtaaacatatggtagtgggcagaattatagggattagattccacatgcaaacatgcttattctgatacgtgggcgcggaatttatggatcttgcatggggtataatggcgggagttaaagataatatcgaataagatgttgaaagctatggcataaaacagatacgctataaatattgcatatatagtatataccgtttggcgtaaaacattgagtcattgtacgtaagtagtgtgttagggatatttgtattacatgtacattgctataatatcggtacggtttcggaaattatggaaataccctaaaaacgtggatgcggttacttgtttagtatagcatccgtgatttcctttcattcgaaaaaaatacccccag

SEQ ID NO: 132721 - DNA, 414 bp, Zea Mays
gcggcaccataatggctctgccttcgtggccaacatagcagagctaggtaagccccaactcgagaaccgtgtgtgggagacgaagtcgccgccgcgattcaccgccgataaggggagtagagtgccaattggactagctggggttgctcgtgagggattaattggtgggcgacttgctggtgctccggaaaatcgctcaccggcgcgctcttcaccgcggaacagccgtcgcccgtggaccgccctcgattcgtcgtccctgccggtgtgtactctctccttgcgttctccgtgcctggtgttgcttgaatcacgttgtagattagagattatggccctctgtgtcgcgggattgttcaccggagttccagctccgctcatccccgccgcgtcgcgtggcctgccacgtccatt

SEQ ID NO: 132722 - DNA, 367 bp, Zea Mays
agatgatccacctgttatctgctacatgatcagcctcaagttgccatcagtgtgatgtgcacatgaattattaatcttttttctccctaataatacggtgcttgtacaaggtgacggcgttccttgagacctgcatccggtgtcatgtgtgctgtggaatcttcccataaaacaagaaaccaggaacccaagaaatctgaggtttgcttcaggcttcagctggggtaccagaagaacaagagttgaccttacctttgtcccaatgcaacatgcacgattgttgtcttggcggaggtagtatttaattagcaagaggcagcatctttcttactgttgctttggtctggtgttatctgacgaatgtttg

SEQ ID NO: 132723 - DNA, 614 bp, Zea Mays
atcaacacatagtggcactagataattgtgtttgctttaaattttccctcttagtagtacaattatctattctaaacctgacacacacacactattatgtctcgggcgacaaaagcaaagccctaacatataccttttacttctgacttgttcctttcgtcttcttctctactattgatcatttgatcaacttgtggtcaacaccatctccaccatgaataccaccttactcaacccttgacgtggacttcacatggcttaatcaacactaagcaaaagattagtttaccatttttcttaattaccaaaaccaaacatcaggcttttaggggcatcgagagtctttgagggttgggatgacgtgagtgggtaggaattgtccgaggctagtgggcgacatcggtgatcacacgtcacatagtgaagagaaagctgacaaggaagacacttattaggtcgacagagacccaatctcacacaatacagagatggtgaggctttgcatcgggaaaccccacttctagttatagtctaatgcaaaggtattgaatttgtaattccaaatgtcaattattcgaggtttcaatatctatatccaaacaaggtgtaagttg

SEQ ID NO: 132724 - DNA, 390 bp, Zea Mays
aacgaggggcggcgccaccgcctccgcgattccgggtcccttcccggtgaggaagaataaggcgacggcgtctctgcggcggagaaggcgattccgggtctctgcggtggagaaggtgaatgcgacgacggtggaacgacggggggagaatctctatgtgttccgcggccgcggtagagaagaagctcacgacggcgattaatctagggttcggcgggcgcggtggagaagaagcagacggcggcgattgagctagggttcggccgccgcgagcgttacgggtgaggtgagctgaaaaaatgtgtgctcgattgctggattcgtgggcccgatacacgtaaactgctggcgaaatcaacacgaaggcacatggaccgacacgtggattac

SEQ ID NO: 132725 - DNA, 489 bp, Zea Mays
tcattacagacctaggatctaacttcactagctcaaagttcattgacttctatgagcagaggagcatctagaccaagtatgcatcagtggcacacccaagagctaatgggcaggtggaaagagccaacgggatgatactcgatgcactcaggaaaaaggtgtttgacaagagcgagaagctcgcaggaaaatggatcagggaactaccatatgtggtctggagcctacgaaccgagccgagctttacacggaaacaccccattcatcatggtgtatgggtcggaggcagtgttaccatcagatatgatctttagagcacctagattaacagtcgaaagcatagccgaagtagaggcaactagggtggaggacattgacatactagaggaagaacgattgaatgtggtcattcagtcggccagataccagcagaacctgaggcgctatcacgacaaagcagtgtggcatcgatccttcgcagtgggagat

SEQ ID NO: 132726 - DNA, 551 bp, Zea Mays
acggtagaagccacgaattcattgcgccagtactttcttccacctccggccgccgcgcgtcctcctaaaaattcacggccaccgtcttaccctcctataaattgagaccgtgactagctccgtgaggtcgtcagctaactagccaccgctaatcagccacaatcatccaccagtgagctcgaattcgcgttttcccccaaatctctttccgccaccgtgaaacaagcttcaccgtcgtcagccctttttccggtcagtccaaccctccctttgcttcgtttaagcttctccccgtgtctgtgatgcttaccgaaccgtccaattgagctagaagtcccctgaccgtcgggaacacatggatctttggtccatccacgcgctctccgtggccagaccaaattaatccaccaattatgcaattaacttaggggaatcgttgactggggtgtgaattcggtttcgaccgaagaaggacgtcagtccttgccccaatcggccggcgcagacagctcgccggagctcgaccgtgctccacgccgtcggggactgtg

SEQ ID NO: 132727 - DNA, 346 bp, Zea Mays
catcataaccgacctgggatccaatttcacaagctcagagtttttttatttctgcgaacaaaaaagcattctgatcaaatatgcctcggtggcgcacccaagagccaacgggcaggtagaaagagccaacgggatgatattggaagcactcagaaggaaagttttcgacaagaatgaaaagttcacaggaaagtggattagagagttgccatatgttgtttggagcctgagaactcaacctagccgagctctgcatggaaacactcctttctttatggtctatggttcggaggtagtgctacccgctgatctcaagtttggggcaccaaggttaatttttgaaaac

SEQ ID NO: 132728 - DNA, 515 bp, Zea Mays
taagggtgcagtcggactctccgcgcaaaagccgcctacgggtgcagccggactctccatgcaaaaggcgcccacgggtgcagccggactagcacagtaagcgcgcaaaatcgaaagtattttccaaaaggttccccacgcacaagtcgtctacgggcacgaccggatcaacgaaggcacacagcctcttacaaatcacgggtacatacatacagcgagggcatcacacgttacattggctcaaccttagggatgatgcccatctccctgtagttgaacagcattatcctcagctcctcaccctcaaaaacatttcgcaactccccctcacctacacttatcccagccggcgaggacaataattctcgtttgccagccccgtcaacacgaagacgacttccctccacctcactaaccctccgcttcgcgactgcccttcgccgcctacgcccgacactcgcactaggaataacttcagcacctaccacgcgcggagaagcttccaccgcaaccac

SEQ ID NO: 132729 - DNA, 275 bp, Zea Mays
cgttacaataatgctaatatggtgttaatctaggattgctcattttgagtattcctgtatgactcatggttttctagagaaaagatcttggactgttgcactatctccacttgtaagatctagacttatgtagttatctgccatagcaacactgaaagtgacaatgtttgaatggtatagttcttttccttggtcggtgatatatattcacttgatggtatagctctgccaaaagcacaacaactcctgcttgatccacaaaaaataggatgctc

SEQ ID NO: 132730 - DNA, 290 bp, Zea Mays
tcggcaggcagcactacttccgacccataaaccatgaagaacggggtatttccatgcagagctcgactgggttgagttcgcaggctccagaccacgtacaacagttctttgatccattttcctgcaagtttttcgctcttgtcgaataccttttttctaagtgcttccagtatcattccgttggccctttccacctagccattggttcttggatgtgccactgatgcgtacttgatctggatgctcctttgcttgcagtaatcgaagaacttagagctggtgaagttgga

SEQ ID NO: 132731 - DNA, 474 bp, Zea Mays
ccaggctctccattgactaaaatctgagtggatgaagtagacagtaataaacaaaggagatcccgccaacgctgaccaaatcccattttacttaaaacctccaaaaggaacgaccaagaaatagagtcaaaagccttggagatgtccaacttaagaaggatatgtggttctttcttcctgtgcagcgacttcacaatttgttggacaagcataaagttatcatgaatcctcctccccctcacaaaggcactctggttcacagaaaccagtgagggaagcaaaggggtcagtcgagtagccatgagcttagctaccaatttggcaaaactatgaatcaaacttataggccggaaatccttaacctcaacagcatccatcttcttaggcactaaggagatataagccgtgttaagcaggcgaaatttgaaaacatggccacgctggatgacatccaaagccatcaacacatcacct

SEQ ID NO: 132732 - DNA, 294 bp, Zea Mays
cgagcgtctgcacatcctctcctcttcctccttcatttccccagtcgccagcactcgatgtctccaaaatcgccgcccagtcctcacatcgccatcactgacatgtgttcggagctcgttgtcgaaaccgccgcatcggagtccatcctcgccgtgttcgtctgcaccagagccgctcgccacctacctcttccatgccctgttgagccgcgcgcccgtgccatctccgttgagctacgaggtgagcatcctccccgtcgcctcctcccctctcctctccttcgtctattcccc

SEQ ID NO: 132733 - DNA, 1251 bp, Zea Mays
ggccgagtgacttctgctaccatgaatggcccttcccatagtggcgacaatttgtgccgtccttcccccgttagaattcgacggaggacaagatctcccactgcgaaggatcgatgtcgtatggccttatcatgatagcgcctcagagtttgctggtacctagctgactgaattactgtattcaatcgttctttttccagtatatcaacatcctccagtctagtagcttcagctatgttttcgaagatcagccttggtgccccaaacctgagatcagcaggtagtactgcctccgaaccatagaccatgaagaagggagtatttccatgcaaagctcggctaggttgagttcttaagctccagaccacatatggcaactctctgatccacttccctgcgaacttttcattcttgtcgaagactttcttcctgagtgcttccaatatcattccattagccctttctacctgactgttggctcttgggtgtgctactgatgcatatttgatctggatgcttctttgttcgcagaaatcaaagaattctgagcttgtgaaattggatcccaggtcagttataatgctatttggtattccgaacctgaatattatatcttgtatgaattccactgccttagctgatgtcagagaagcgatgagtttgtactctatccatttagtgaatttgtcaatggcaaccagcaagtgagtgtaacctccttgagctttcttgaatggtccaatcatgtccagtccccagcacacaaatggccatgttacaggtatggtctgcagttgctgtgctagtaagtgctgctgctttgataagtattggcaagcttcacacctctggactagatcggctgcatcattctttgatgttggccagtagaaaccagacctgaagaccttcccaactagagtcctagatgctgcatgtattccgcattgcccagcgtggatctcatctagtagttgcttcccggtagccgagagaatgcacatcatgaagactcctgtcacgccccttctgtacagtgtttccccaatgagagtgtagtgggttgactgccttgcgatgcgttctgccacagttttgtcatccgactcttcttcattctttatatatctaatgattggctccctccagtcatctgaatctgactctggctggctcagaacattgcactcttctgcctgctctaaggaaatactcgggcgtggcacttcttggacgaaaaccccaggtgtg

SEQ ID NO: 132734 - DNA, 372 bp, Zea Mays
tgcgaacatgttaaaactttggcccctcgacggaggcaagcgtaataggcggaaaatttttcattgacatttcagagaatggcggtcgagggatggcttacgaaataataaagaaaagtgaaaaagatactcacgacactagagaagcaacaaaaacagctgaacaggctgcggagcttgagagacgaataggtattacttaatgatttttacctttgttgtttacttttgcgacttcgaaataatttacgttttctaccgcagctgaactatctcctcccctagagcccttcgagccactggccgaagcagaggccaaagaatcatcagaaattattagcatggccgaaactattatagacgaagtcgtta

SEQ ID NO: 132735 - DNA, 351 bp, Zea Mays
gttccgttctcgttgctaattggatgattgattagtgcgtccttgactgacccgcaccgatggaagggaagggagtcaaactttggtttgagtcggatcggaatcagaccatcggatggatgaaatggacgatgagaggagctgcctctgtgttcctgcctttcccgatcccaactcccacgcttggcgtgacgcgccttttccttttcacccatctcttccttcctcaattcgtgctccaaataagcaacaagccgacccaacgattgatcaagcaaaaagctgcttcttccatatgatccaccaccgatcacttcataactagcctcttctttccttcaattcgttcac

SEQ ID NO: 132736 - DNA, 678 bp, Zea Mays
ggaagcggtgcggcgggagcggtagtcgtggcgcctaccacggtcgccgcggtacgaatcgttgccggggcgcgcgtctctgcgtccggagcccgctcctcttcctcgacctcttttacctccacctcccctgcctccgcctccgtgtcgcatggcgccggctaggtcgtagctacggcctgagagtagggatcgccgctaccgtgaccggtggaacggtgggtgaatggctgtgggatcgaggcgggtttcagatcaaggcctcagaatctcgtacgcgtcaagatggcggcggctgtggcaatagccgtcgccgtagtgaggatgggcgatggggttcggaggcggcgtgcggagggcggaggggagggggatcgcggtgggttcgagtgcggttgggggttgccacttttatgctcctgatgtggtggtgggcctgcattgcttggttgggcctgtgaagcgcaagcccgaaccccgaaagaccaaaacaaagctgatcctaaaaaactaaacaaaggcaagtgaaaggccgaaaaaagaaatatatgaaaaaagatatgaagttttgggtatgctttgccttttgcggagagtttttggatatagtttaccttgtcgcatacaatggcagtgaaaggaatatacagtatgctttgctttaggtgcactcttttc

SEQ ID NO: 132737 - DNA, 443 bp, Zea Mays
caactccctctgccctgtggccctagccgtcatctcactcacgtttcgccgtgtggaccccagtggtcaggccgacgcttccttcttcctcggatcgtgggacgccgacttccgcgcgccataccaaccgcgcgagaaccgcgggctctggaggatccacgacttcccctcacgattcatccgctcgggagataaatactctctcggagactcgaaaagctacacgcacctgtctctctgccatcaccaggacctgtgagcgagtgaagccctgccgtcgccactatccttcgccggcgacgtggctagacttccgtggtgaaacccgagtgcctattgggtgcagaaaggcttcagctccaccgatttggcgaatcttgcctcggggttcctcgtcgtagttactcctccgtcgcggaagtcgctgtacagcgtggccagtc

SEQ ID NO: 132738 - DNA, 369 bp, Zea Mays
gcatagtggtcaccttgaattgcgtagtcgtgagcatgttgcattggcttaaatcgccactgactttagccgattgctccgttagtagggcatagtggtcaccccgagttaagtaagcgtgagcatgtcacaccgccttaagtcgttgctgacttaagccgattgctccgttagcagggcatagtggtcaccccgagttaagtaagcgtgagcatgtcgcaccaccttaagtcgttgccgacttaagccgattgctccgttagcagggcatagtggtcacccgagttaagtaagcgtgagcatgtcgcaccaccttaagttgttgccgacttaagctgattgctccgttagcagggcatagtggtcacc

SEQ ID NO: 132739 - DNA, 392 bp, Zea Mays
ctgattgaatcaccgtattcagtcgctcttcttcgagtacgtcaacgtcctccagcctagtagcttcagcttctgctatgttatcaaagattaaccttagtgccccgaacttgagatcggcaggtagcactgcctccgaaccataaaccataaagaagggggtatttccatgcagagctcggctgggttgagttctcaggctccaaactacatatgacaattctctgatccactttcctgcgaacttctcattcttgtcgaagactttctttctgagtgcttctaatatcatcttgttggctctttctacttgcccgttggctcttggatgtgccaccgaggcatatttgatctgaatgctcttttgctcgcagaaatcgaagaattctgaa

SEQ ID NO: 132740 - DNA, 351 bp, Zea Mays
ttgtaatgcgcgggattgcggagccgagaggccaggtggcgggcgttggcagggggtgctcctgtccaggaggagaggcgctctgcgtggttcgtgaaaggggcaggtgaggcatttcgctccgcgctagcagccatcagccatggcagcgggcgggagtgctgcctgcgctccgcaaccagacgaaacggcgcgcgtggagcggttcagacgttgtcctggtggagatggcaagtccgttttcgtatgttggcagatgactgttgtgtggtgcgatgtgctgtggtcgatacggcacaagtagttgtgcttatctggcgaaaccatgctactccattagtccagtgtcta

SEQ ID NO: 132741 - DNA, 629 bp, Zea Mays
ggggaattcatggaatatagagcatctcaggaagttttacccttagcaagacttcaaaagctattggagcaatgttgtactctgtaattggaaaatacgtcatcaataaaagatttcattctcaaaggcattcaaactgttggttatcaattgacttcgatttgattagacttgaaatcaacacacttactcgactagggggtgaccactataccctactaaaggaacaatcggcttaagtcggcaatgacttaagacggtgcaaaatgctcgcgcttactcgacttagggtgaccactataccctactaacagagcaatcggcttaagtcggcgatgacttaagacagtgcaacatgctcgcgcttactcgacttagggtgaccactataccctactaacggagcaattagcttaagtcgacgatgacttaagacggtgcaacatgctcgcgcttactcgacttagggtgaccactataccctactaacggagcaatcgacttaagtctgcaatgacttaagacggtgcaacatgctcacacttactcgacttagggtgaccactataccctactaacagagcatttggcttaagtcggcaatgacttaagacggtgcaacatgctcg

SEQ ID NO: 132742 - DNA, 494 bp, Zea Mays
ggagcaagttggccagcttgggcctctggctgttgcttgtgtgctgtcagttggaatcattgccatgtcgtcagtgacagagcctgctcattttaggtgcattgcattgcattgcggtccaaggatcctgtggcaagttgggttttcagaaagtcccgacttgcaaacctcggacaataaggaactccatttgactgaaacaagctccactggccactggaggctggatattttgatcgatcctcgtctttaaccttatcgcctagaccgcttctcacattgaggttgtaccgttcgatgattgatggatggatgggtttagtaggcgggtgagtgagacgactaggcgagacaaaacgtcgcggcctggagcacagcaacagcagggccatcgagcacttgtgttggcgcgcgcggaaagggacccgcgtgcacgacgctccattctccggttggcttggctcatcacttgttgattgccacggacgatggat

SEQ ID NO: 132743 - DNA, 310 bp, Zea Mays
ctcagttctctgaattaataatctttctacattaagtaaaaagcgttattagtttgaactacgatgaggttttggtgtcatgttcaatgtgtgtgcatgccttagttttagaatagtaatacagaattggcccaacaaaattcatttaaaattcaccatccttcatgtcgatttatttatttatttataacatcatatttattagcttatacaaccactgtttcagtcatcaattttgataggacatgaattttgggagatgggatttgaaagtgatgaagatatattattttcgtttagtaaagttatt

SEQ ID NO: 132744 - DNA, 444 bp, Zea Mays
caacggtgtttgcacgatcatatatacgatctgctaatcaaaacctaactaagacggtctagatttagacccctataatgtctttaatctattgttcatttttttcaccgtaagttgtcattggagtgttccagatgaacaaagattttaaagcgacacaaatcggtcatgacattggctccaactgtagccaaactacgacctatctaatccatccccatcgccagagttcaatttgtacacatttttgttgacgaagtatgtttattaaaaaaacatggcctataaaaaattcttttcttaaaagatataaacacgctggtgaccatcaatacgtagattagaccgtcacccgggtgccagtgccacctaacccagcaattcaatacctgagcacgccatcaaagcctcgtgttccctctccctctccaagctccattcccc

SEQ ID NO: 132745 - DNA, 601 bp, Zea Mays
gccaagttcaaggccatcccgcactaaccgtacatgatactcaagatgcccgaacctcatggcatcatcatcatctaggccgacttccaaggatttgtagagtgttttcgagcaactatccagacggccctcaccgtcagaccctcggtagcacctccgacaacaaacaccgacgcatcgctaggggatgacctcacaatcctcatgaatgaagcatctaccgctaccaccgtgcggcccgttgaagaaaccaagagatccaacctcggcttctccgacgaacgcaagacgacgatcatcagctccagcctcactaccaaataggaatacatgctcgtccgttttctgcaggacaaccaggatgtattgacatggcaacatgtttacatgctaggagtccccagagagctagccaagcacaaactgaaggtgtaccctcaagcaaagccgatctagcagaagtttcatcactttacacccgaaaaaagagaagccatacaggctgagttagctcgcctcgtagcagcaggtttcattaaagaagtaacgcacactgagtggcatgcgaatcctattcttgtactaagaaagaataaagttg

SEQ ID NO: 132746 - DNA, 511 bp, Zea Mays
ttgtctcctacatctcgtgcgggctggcgttgccgatctcccccttcttcatgttactgttggaggaattcggtctccagctgcagcacctcacaccccactccatcctccaggcggccatctttgctcacctgtgcgagatgttcgtgcgggtggcaccatgcacctctctcttccgccactttttcgtgctggtgaagtccgggaaggccaaggaccatctcggtgcgtattacttccagacaagggcggattcggccggcgcctatatctcctccctcagcggtgcgaggtgggaaaactggcgggccgaatgggtgatcgctagtaccgaggctagcgaccgcctcgcacttctgagtgacaggccgaggcttgagaggaagctatggagagctaagccgtcgttggtgccggagttcgagcccgtgttgggcaggatcgagtctctggcgacctgtggtctgacgtcaatgcatgtggtcggcgactttttgcagcgcaggatcgc

SEQ ID NO: 132747 - DNA, 543 bp, Zea Mays
ttcgatgcaggaagaataggtatactgatgattcgatgcaggaagagatcgagcagtcgtgagcagttgtgtcgctgacactcctaaaaaatgtgtttgctcgtcccttaaagaaaacaagaaaaataagagatatacctagtggcaaacatatgtcgattgatatcgatatcgacgtgtggttggtatagtaatgattcgatgcgggaagagattaagcaatcgtgtcgccggcactattaaaaatgtgattgtctggccctcacctgagtagcaaaatgcaggagtgtatgccccttggcccttatataggtgcagggtgagtttagttcattgaacctgaatgctctttggtgtgtgttgatggtcatcaatctgccacatcacgcctacgtcctagcccgacctgactcggtgaggcgagggaacgcgcatgcaagtggcatgccaatttgtttttctccaacttcatagaaggtgtacattaagtccaccttttatgttggttaatttttttctttcactagcaatgtggaattaaac

SEQ ID NO: 132748 - DNA, 401 bp, Zea Mays
ggatcgccctgcctaacacctctcctgcaatgaaagggcttaccaggaactccattaagtaacaccgaagacgtgccagagtgaagaatgctccgaatccagttgatccacttagggctgaaacctttgtggatcagaacctggataatcaactcatgctcaaccatgtcaaaggctttctcgaaatccagcttgagcacaatgatctctttttttgaggagtgacaaaggtgaatgtattccaaggcccaggccaagcagtcttgaatggacctccccttgatgaaaccatactgattcttgtgaattaacctgggcatgaacggttgcagacggtttgccaacagcttcgttaagattttcatactattgtttagaagagaaattggcctgtaatcccc

SEQ ID NO: 132749 - DNA, 778 bp, Zea Mays
ggggtgttcaccatggtacagtgtacagctgaaacagataagatcgccagcaaacccaccgccgacgaccaattccgccgtgattcgtgccgttgccgtcccaacttgtgctcgggatgggcagataaggacacacggtaaaaggttctcgccgacggtgagctggagatcactccggtgactccccgtggctctctctccctctttgcggctgagcggattaacacgctggcgaccgccgcctcccggccatgcgccgcgtggctctcgctttccaccgcaccgccgtgacaccttaacactgtcccatcgtcgccggggagattgccacgccgttagccacggatttatttgcgccagtgttcttctttccctccggccgccgcgcgtcctccccaaaattcacggtcaccgccgttgtgcgctataaattgagcccgtgaccagctccgtagggtcatcagctaaccagccaccgccaattagccacaatcgtttgctggagctcgggaatttcgcgttcgccccaaatcgggtttccgccaccgtagaatcaagctcaccgcggccatccccctttccggtcagtccaatcctccctctccctcgtttaagtaccctaatgactctacgatactttccgagccactgaattgagctaggagcccgccaatcgccgggaacgcgtcggtcttgccgtgatgctcacggccaccgtggccagagctacgtagttggtcttagctgcaattaggttgggggaaatggtcagggtagc

SEQ ID NO: 132750 - DNA, 316 bp, Zea Mays
gtgtcgttcctgatggtaatcgaattgccacgtcatgcaaacgcatatgaccggtcctcgcgttccgtgcaaatggatggatgctggcatgctgctatggaagatggtgtactactacatgctggtcgcataaaaaatcgtgcacacggccagcggccacatgaaccgaagcgtcgacacgttttcgctcgtgtggccccacaggatgatgcacgtccggagcagtccaacgcacgctaggatcgaaggccgaggccgacaccgacgccgggatcctccagccctagagcgcgatggctggcgctcgattgctcgt

SEQ ID NO: 132751 - DNA, 1536 bp, Zea Mays
cacgtcttcgccgagtccgttcgagcgctcgcgatccacctgggaaatccgccgccatccgcaaccacctcgtggccgccttgccagctggccaagggccgggtggtgcctttatataccagtcgcgacccttattcaccgaaaccgaagcaccatcgttgaagacaccgcggcgagaagagagaaaccgagagaagggagagagcgccgccgcgcatgggcagagcgtgtccatgcggtcattggggcctcgggaccgagtcaaggggcgtcgccaggccgcgctgaacatgactgtgacttcgcctgggcggacttgcgctccggaccaccggaatttctcgccggaatcctcgtgccgccacaccgcgtggtcgggcccctctgcgccataaactccggtaagttttccccatacagttcgctttgtcctgctctgcgtgtttcgccggtcggttacgagttcgggcgctgggagcgtcgggttgtcgtgccacggcgatggcgccgccgcggtggtgttcctcgccgctgtgggggtcgttggttgaggaagacacgccctgcccgttgaccgcttgatgaacgatagggattaaatcaccaataccccccttcaccgattcaatccggactgctgatcgaaggatggacgggcagggtcagatcgaaggattttaaatccttaatcgtttatccccgatcggacggctcacattacgcaccggttcgcgcctcggttgatctaatcgggaccgtgcgtgtttgatccaacggccagaaaacatgcgtaccccttcgtcgcgtcgattttgctaaagagcccctctggtctttataaataaacccgccctccatagtaatagaaagaccattacattcaggtcccgaacttcatgaaatcgaccctgagtctgttcaaaatagtgcccgcggtccctggtctaatataatatatgggattaaatctggaaaatagatttctgctgtaaaaataattgtaaaacttaggaaatccatatcttattcattctaagtccattttagtccgttcaagttgcgttagtttcgtaataaaattgcctacgcagtgacaagcattattttttaatatcacatacttttatagttagatttttattaaccctatgtatagtagattaatctttctaatcaaagtaacctgtctataattataatttgactagaagatgatctctaaccaagatataacttatattaaagttgaattagttatttatttaatatatatctcacatgatttataaaatcaactaagaatctagtttttcatagttaatcacatagatcttcgagaactatatcttttcaaccgtaactccgaatttagtgattctcaaatctacgatctcgtagcgacgcgtagaatattattgtgtgatttatttccatgttttggtttaatgttatcatatccattattatttttatttgtatgtattgctacgaatagaagcaaggtaacgaggagacctaaagcaccaactttggaga

SEQ ID NO: 132752 - DNA, 362 bp, Zea Mays
cggtactgaagatctttctgaatctgcactgcctcttcatcgatgtgactttctggtgcttgcaggcatttgtggagctgggatacgtgaaacacattgtggatgtcagacatggactctggtaattcaagacggtatgctgcgggtcctactctgccaatgatgggataggggccgacaaaccggggtgctagctttccttttgcttggaacctcctgacaccacacatcggagagaccctgaggtagacgaagtctccttcctcaaatctaagttccctccgcctgttgtccgcataactcttctgccgactctgagcttcaagtaatctcctgcggatcagggcaactttctcttctgc

SEQ ID NO: 132753 - DNA, 495 bp, Zea Mays
ataagttcttgacccttcctgcggatggcacccatggtggtattcttattgcttggaaaggcgctgtttgtcaagccatttcttcccgtgttgatgattactcggtctcagttcagtttgctgggctggatggtatggttcacaggggtgtatggcccccaggaggatgatctgaaaatccagtttctgcatgagcttaaagacatcagggcactctgtacaggaccttggttgcttgctggagattttaatatgatttatcaggtggctgacaagaaaagctccaatcagttttcggagttttttggatgatacaagtcttaaagaaattcctttgcacggtcacaaacatacatagtccaacgaaagagcttctcgtacccttgtgaggcttgacagatttgtttgctgctctgattgggaagaattattcccagaatccctcttgcaaagtgcagcagcaggggtgtcagatcactgcccccttactcttgg

SEQ ID NO: 132754 - DNA, 489 bp, Zea Mays
cctcctgataccacgcattggagaaaccttgaggtagacgaagtctccctcctcgaatcggagttccctccgcctgttgtctgcataactcttctgtcgactctgagcttcgagtaaccttctgcggatcagtgcaactttctcttctgcctctttgacaaaggcaggtccttctagtgcttttcccccacgttggaccacatgagaggggtctggcatttccgtccatacagtgcttcgaatggcgacatcttgatgctggcctgatagctattgttgtatgagaactctgcgtagggtagactggattcccaacttctatcaaaagctaacacacatgctcttaacaggtcttcaaggactttgttgactctttatgtctgcccatctgtctgagggtgataagcggtactgaaatctagcttggttcccatagctttctgaaggcttgtccaaaatttggatgtgaactgggttcccctgtctgac

SEQ ID NO: 132755 - DNA, 480 bp, Zea Mays
acggttgcatatgtatttgccgaatctcgtcggtttcaacatatgggatgagattcaatcagcggataaaatcgcccaccaattacgtcgttcaatctacaaaaccagacaaatccttttatgtttctaaagtctgaactctaaactgaaacaacaatggcatgttcgaactgtgaacatcaatgtcatggacaatagccagtagttgtagctgagtgcgatctccataccccggcagaacgaatcagaaatggcccctgtcctcgaagttctgaccgaagacccacctcggggcatggcgatgacccaaaacgacaggccctagccgacgctgcggctgtcgctgctcgtccacacctgcccccagctgcggaccatgtcagcccactgcccgccgtcgtcccgagcggcgacagccctgacgtccctggcctccgccacgttgaacaccagcacgaccaccaccatcggttgcccctg

SEQ ID NO: 132756 - DNA, 413 bp, Zea Mays
ggcaactttacaaacatatttcttgtggatggcaaatatcagaatctctcgccggggtttgaaccggagggctgtcgtacggtttgccgaagtcgtgggcgtgcgcatcgcgggatgtgacggtttggacatgatacatggcgagtggggcccacgggttggccagggccgcagggcgcctaggcgcaggggcgttgtgcgcctgggtgcttgtgcacgtgcccacacaattgttgagctgggccgggtgacgagtgggaaaaaatagaattgtttttcccttttttttcattcttttatatataaatgggtatatatatgtttatatatatctgaatgcatttgtttatattaggtcacctaaatttaatgcttcccttttttaacgaaaacaacacccagaccatttttag

SEQ ID NO: 132757 - DNA, 364 bp, Zea Mays
gtggaattcatacaggacataatattcaggttcgggataccgaatagcatcataaccgacctgggatccaatttcacaagctcagagttcttcgatttctgtgaacaaaaaagcattcagatcaaatatgcctcggtggcgcacccaagagccaacggcaagtagaaagggccaacgggatgatattcgaggcgctcagaaagaaagtcttcgacaagaatgaaaagttcgcaggaaagtggatcagagagttaccatatgttgtctggagcctgagaactcaacctagccgagctctgcatggaaacactcctttctttatggtctatggctcggaggcagtgctacctgctgatctcaagtt

SEQ ID NO: 132758 - DNA, 389 bp, Zea Mays
catggcggcgaggcgtggattgcatttggggcgtggaggatatgggcggggcatccgcggtgcatgggaagaacgattgggcagtgtggtcctgcgcgcgggggtcgtcgacggtgggatttttgcgtgttggattgctacgaggcgtggatagcggcgaggggatgtgtttccttctgtggcagtggcaggatttttgcttccataaccgaggcattgatcggtgaggggattgcagcgaggaccatgcacatgcagaggtagaggggagagggtgtgcacggggaagaaaggagacactaacatgtgggccatatgcgtcgtgaggaagcagaaccatgcactgcaccatggtctacattagattattatagagtagtatagatttg

SEQ ID NO: 132759 - DNA, 322 bp, Zea Mays
ggggacaatccgaggcacgggctggtgtgttgggtgtgtgattactcagcggagctcactagggcggcaatttataggttccatcggcggtggcggctaattttgagaagacgcgtggcggccggagaggagggaggtcactagcgcaagtgattcgtggctcttactgtggcaaggcctcaggcgatggatgggctatctatggtgattaattgtgatgtggtaagatggctgacggcgtggcataaccgtgaggaatggcggcacgacagcgatggtcgcacggccacatcgccgggcaagtgggcacagcaaccaggcg

SEQ ID NO: 132760 - DNA, 512 bp, Zea Mays
cggaggatgcaacgtagttgatgcgggagcagacgtttacgtactccctctagtcctccttgagcagcaggtgggcttagatgtggagcgtcatgtggattcgacaataggtcgggggaggaagaaggtctggcctcagggtggtagtagattcggttggagtggacgaaagtgaaggtttaggtgcggagatgagagagtactcataggcatattgagtgctaggggtggcttctattttgcacttcaggatagggggcctgctggagctatgaacagttcatcgggctgcagaaaaagggatagagagcgtgatagggaggctgctcaagttggtcataactgtggatttattatattaattaaggatatacttttacagtaaatctatgacacatgcacatattgatatgtttttatataaagttggtcaaatataagaaaacttgtctagaacaacaacggtcagatgtaacattctttgggtcactagatgtcgctttgaatgagac

SEQ ID NO: 132761 - DNA, 577 bp, Zea Mays
attgttgccctagtggcccgtggccacctccccacctccgatgacttggagttcgtagggatggccgacgatgacgggacctcatcttcgacgctctacaccgactcggacttggatctgagtccccctgagagcagtaagaataaccccccggtggtaaggagaacaaagaccgctcggctgctgaggccccatcagctataccaacacagtggggcaccatgcatggtaggagtcggaggggtcatcgaacataacacttccagcaagggcccatagtaggcattagggtggagtggatccatgccccgtttgtaaacgcttcaggctatagtgaatgaagtgtatttgcgaaattctttctgagagacgagcgcgggatagctgcaagaaaagctcatcgtagacaagtgacgacggtcgccctgcaaatcccatcatcaacaaatgttgttcaaatggcaaaccatcttttagccccaatttttttaaaaaaacgctctcgaggcgtcggtgagcataggtgctcacgagcagttagatgaagtactaagataaaggaaggccccttcttttc

SEQ ID NO: 132762 - DNA, 574 bp, Zea Mays
gaactaacccatagacgaccggacacggcgagatgtctcacagcggtgttctgatcgatttggggaatgggaaattgagagcctctggtggacgatcagaggcgagagctggtgctttggatgtgtaataacgtagcggagctcattggggcatcaatttatagagttcatcagtggtggcacccaattttgagaagatgtgctggcggccggagagaggggaggttcactggcgcgggttaccgtggcaatcactggctgaggagctacgacggtcactggtgagctattttggcgagtaacgacgtggtgaaagggtcacggcgtggcacaatcgcggtgaacggtgtacacctcggcgacggccgctcggccatgtcgccagcaagtaggtacgacgcctgggcagaacagtgctccgaactcatccatggtgaagatttttccactatcgatcgcaatccacaccacagagggcacgaaacgcggcaccgacgcgaatccgagcacgaggtcaccggcggcgagatgcagcgaacctgtgatctttttcagtctactgtaccatcagaac

SEQ ID NO: 132763 - DNA, 368 bp, Zea Mays
ggggggaaacgaaattctccggctatggtggctaatcagaggcgaggagcagtgctctgtgttcgtaacaaactagcggaacaagccgaggcatcaatttatagagggtgaccatgagtaggacgaatttgaacggagaagtgctcgcggagataacggaatgagtcaccggagttcgctaacgtggcattcactgggcaaagacttacggccgtcactggttatcctacacaacccacgacgacgtggtgaaacggcttgaggagtgacgggaccgaagtaaatggcggcacgacggctgcagtcgtgtggccacgttgccggtcatgtaggtacgaccactgagttgtaacagtgccccaagttca

SEQ ID NO: 132764 - DNA, 582 bp, Zea Mays
gggtaacagtgaagttgggcaagttttgagattgggttcgaccatgatccagtaattgtttgactatggttgctatagcaagattgtagctggatcatagggctacaactttgatatagtgatatggttgagtcactacatgaatttgggaacaaatctccctgcaagttgctctgtcaggctgactaaataagaattcgatggtacagtaaacaaagatcttctgttcagcccccctcgccgctggtggcctttgcgcccggattcgcgtcggccgtcgcgattcatgccttgggcgagtggattacgctcaacggtaaaaagatctcgtcgtggatgaacacaagacactgtggtcgctctgtctcttgcccgcctgcgttggcaacatggtcgcacggccattgctgcggctgtggccgttctcctcgggtatgccacgtcgtggctcgttactgtgcggtggtaaccgtggcacccttaggatcgcaatcgttgagccgttgcaccggtgaatgccacgattaaagccgccagtgttcttcttcctctccgaccgccagtgcacttcatccaattcac

SEQ ID NO: 132765 - DNA, 326 bp, Zea Mays
acaatcaagaataattatccgctacctcatattgacattctctttgaacagctgagaggttcctaggtattctctaagattgatttgaactttggttatcattagttgaggattcgcgaggaggatattgagaagacagcttttagcactaggtatgggcacttcaagtttatcgtcatgtcctttggcttaactaatgcccctgctacttttatggaagcaatgaataagatgttgcatgagttcttggatgactttgtggttgtgtttctggatgatattctgatttactcgaagatggaggaagagcatgagcgacatcttcg

SEQ ID NO: 132766 - DNA, 289 bp, Zea Mays
caattatgaaacctaaagacaccttgtttcatttgaagtgcctgctcgagtccttgatttcactggcaaacctaccccaaaatttaggtaggagaaacccaattcctcgggtctgagcttacaaatctgaactgcatcatttggaaggtctaggcgccaccgaaatgcaaatttttcagttggttagccatccaagatagaatttggacagcggatcgtgtagctaagaggggttggccccataacactgcctgtacattgtgtgggcaacaatgttttcaagtcgggc

SEQ ID NO: 132767 - DNA, 446 bp, Zea Mays
gtggaatcgggttttggggttcggtcgtgtgggcttgccacgctccaacgaaattatcatcatgtatcgtggttaacgttcgcggtcaccgtaatccctcagaaacacccctaggtcatttatatgtacattgtactttgagtaggactgttcggattaggggtttgtctcttgaagcgccgaatcggctaactccggtattgttaccaccgtgggttgagggcagcgccgcctcgggttggcggaaggttgaagaggtgtggtggtcgttgattcgaggatgaatggccacgattagagccagggtacctgatcgtttgcgttatatcctgagtgtcaatcgtcgatcgatcggttctggtggggatcagcctcggctgcgtggcgtttttgactaagaaccctaagttttaaggaaatcaatctgccgtccggtagcattcaaa

SEQ ID NO: 132768 - DNA, 505 bp, Zea Mays
atgcatcacttgatcatgcgttggacggtgtggattaaaggatagggatgaagaaaccaagaccgtaggatggtgagtggagggggtagattaaatctcgcgtaccccttcgtaatatggaatccgggcggttagattgtgatcgtgtggcctagatctgggcaggttttcataaagcgcggatctaatcttgaccatatatcttgaagcggacagccaggatggatccataccccttcggctagcgcaattcgcaaaagagtccctctgtttatctaaaaacaacccgccgtcctcattaacagtagactgagtcttggaattattgcaccagagcccctgaccttcctgaaaaatgacgcccagtccagagcgtatttaaaataagtaaataaattagtaaatgcatttttaatacaaaaacaattcctagaacttatttaattcatagaaaattcatttgtagtccaaatcgatccattacaatttataaatttttgtaata

SEQ ID NO: 132769 - DNA, 451 bp, Zea Mays
ggaatctctgtgcaatggaactccacctctatgttgcccccttccaaggccaaataggaatgaaccttaataccttcatgttatgtgcaggaccttgggttcagctctgtgaggtgatggaccgtccgtggttggtctctagaccgtccatgctaggtcactagatcgtccgaggtgtgcgtagagatagcagtgggttctcgtagaacctggatctcgttccccaggagggtcctcgtcagaaaaaagatcctagggttgttttggagtcgacatgccacccaagatgcctctagacgatgtagagtcaaatagaggtgaagattgatatgtggaaactgcaactaaaactacgctacatctactcctaaggcatgaataacgaggcgtctgtggttattttggttcgattggattgtgttcggggggttctcaatcggctgtacccctt

SEQ ID NO: 132770 - DNA, 448 bp, Zea Mays
gcaccgtcggatggggatggagtgggaccgtcttagagtagatcggtttggtaaacgagagttgatgtcttcgccgattgggacgagcattggtgagggggatctacggaatctttttgagggtgaggaattgaaaataatgttgttcaattatagggaggcaggcatcatcccgaaggttgagccgatgtagtatgtggtgccctcgcgttgtccggcggtaatggagggcgtagttgtctttatttgtgcggtgggtctagtgaccattcgctgagtgtatgtaactgcaacttgtattataatgtggcctgatggccttctttgagtgagatacttcgtatcacacacttgttgtgctaattcggctgcacccttaggcgacttttgcacgaggtgtccttttagtaaaaaacttcgtatcgcgcacttgttgtgctaatccggc

SEQ ID NO: 132771 - DNA, 524 bp, Zea Mays
gggaggcttcagaggcgtggaaaacaaatagctttgtcacatcacgaagtcgccttcaaaacaatgtgttagaacttggaacgaagctacggttaaccaagggcgctgtgaagggaaggggtccaaaagggacgtgtgtggcatgtctcaggggaaaaacagaaacacccattgtagttttataggatttgtatgtagacatcatgacactagtataatttcataggaaggtgtacaatgatatgctcctataaataggtgaatagtgcacatgcacgtgagacttttggcaattcgcgtactctcactaccttcgaagtgctcagcctccaaagttttctctataaatttaccttcagacgtcttgtactcattttgacaggttctagtccgcaggcggttcaactgggaggtcgactgagcttcaaggttgagctaacctattgaacctagtttggctctgcccaaaatcagttcaactggctttgagatgcggttcaactgcattttgtcaaacctcggga

SEQ ID NO: 132772 - DNA, 359 bp, Zea Mays
gcagtgttgtaggtgtactcggcccacggcagtcaacaaagccactcgcgcaggcgatctccggtgaagcagcgcaagtacgtgccgatgacgcagttagcagcctccgtctagccatccaattgcggatggaatgccaagaaattgtgttgcctaatggccgttacgcgcatcagcttgctccagaaggtagacatgaagttgggatcccggtccgagacgatcgactggggcacgccatggaggcggacaatgtcggaaaagaatgtctgggccactgattcagcagtgtatgggtgagctaaggcaatgaaatgacaatacttgctgaagtgatccaccatagtgaggatgacgga

SEQ ID NO: 132773 - DNA, 361 bp, Zea Mays
ctgaagactagcaggcacccatcaccttatacctttaaggtcactatcacccctctgaccaaagcaaagccaaaagtcgaaggcatagaactccttcgcgacgtccacagagaaacatgcgaatcacactcgagacctagacctctcgctgctaaggtcatgcgacaaggcttctactagccagccttgtgtgtgcagccaatagagtggttcgctcgtgtgaagcatgccaaaaattctcacctcgcataggcaccccttcacattttacaaagctcatcgcacacacctggccactacagcgttggggactcgatattgttggaccactgcccacaatgcagggcaacctcaaattttc

SEQ ID NO: 132774 - DNA, 323 bp, Zea Mays
ttcgaagcgcaacgcatccgcaatttccctccatttggggttgcatgtgaaagtcaaaaaaagatctggtgggccgtacactctgcaaatagccatcgcgtcttggtaattcataacatggtatcgcctactgccagtgaaactcgcaggcacgatcactttaccgccaacagcgtccgcactaattagacctttgtcaacggcatcagctatcccctgcactgattcagaccgcaagtctttttgatggtcggctatgaactgtaacctggagccctcgatagttgaatatgcgtcgacaatgacctgagcacttaacctac

SEQ ID NO: 132775 - DNA, 670 bp, Zea Mays
cgccaccacccatgccgacgccccgctggccgctgtccaagcgcacgcccccacctttcgaaggatagagtggacagcgagaggagaggaggaataggatcgcgacctcgatggtgcgcgcaatgaagacgtgatcccctacgacttcattaaggcctactctgtccatgtgaagcgttctggcaaggtacccgcttgttcctccctctcactttccaccttgttccatcatatgtaacagctactacgacaacgttgaggatttcattgtcatcgtgatgaacattttttacccagtgttggaatggatattggattggtcaagcgtcttttacgttatcctaaaggttctgatccatacatagctggtgtagagaagttccttgaatttgcatttaaagataaagctaaaggcatcaagatttattgcccatgttagacatgtgtgcacactactattcagacaagagatgagatgtatgggcatttggtgtgcaatgggatacttgagaattatgatgaatggaattttcatggtgataattcagtgcagcacacaatagttcggaaccaaattcacatattgatgaaaggcatgttgatgtcgaccagctgattcaagatgcccttggacatctgtatgatggcacacctatgactgaaggtcaag

SEQ ID NO: 132776 - DNA, 288 bp, Zea Mays
cacaatccaaagtgtagataaaccctcaggaaggcctcacagagatggacaaagatagcaatttggagtacagagttgggattcagatgagtcaggttgagagaagagaaatcgagaaggtcgccgaagaaaggagaaactggtagacctaatcctcggaccaggaagggaatgaagactactgactcgtgggtgtcctctaaggggatgatagtcccctgccagatctgccaagagcacagttcctttggcagcagaaccccaatttcaatgaggtggagaagatcg

SEQ ID NO: 132777 - DNA, 676 bp, Zea Mays
tttagaaaaatcgaaactagagaccagttcatataattcatgaagctccttagaggctacttttagaaacactgtttctatatattctcatgaagctgtacgaaaatatccaccatgccactgttatacaacatacaacttctgaaaaatcaattgtactatataaattgggacttgaggcccgacagatctgatgctaaatttacccggttcttgttctccaaacggtaatgtcagggcctgatcatctactactctctatcatgggttagtttttgactttttgtcgacactggatttctcagacgacttgagcaagaacctcccgatgcggcaatcccaatgtgacggatgagctccacccggtgcggcaagcccagcctcgatcttgtctcgtctcgtctcgtgaggtctggccatggtcatccaatccaggaggagggaaacgacgaagacgagcagagggaggcgaagtcaggccataactggacaggcgagtcgcgcgcggcagatcaaaatcacatgagccgagtcgcgcgctaacggcgagatcaggatcagcgcgcggcgcagaaaggaccgcgccgcgggcgggcgggcacccaccaccaaaatgtcggcatcagctggtcctcggacgtgggcgtgttgcttggatcgctaggcccggagggtg

SEQ ID NO: 132778 - DNA, 683 bp, Zea Mays
aagggggtccgccatgacagagcgtagcctcagtcggccgagccacaagtgtcacaatgaccctagtttcacccgatgtaggcgtaattttgcgtggggtggaagcctgccgaagttcttgcgccttggagttcatcggcgtagttcttgctggcgttgggcaaggcaatcctgctgtcgtgtttggcgccatcggggaagatctgttcccggatgggtccgcaatgtggcgcaagatgccttcctgatctgcaatgcagaagagggatccgaagcataagaactctctagcattgaaggtgaccaggatgttgaagacgatagccatggagtcttcatagaccagccgtcagtgtttgtgacctaactgcgcaccatggggttacccacgtgatgcttttgggtaggacgacatcgtttaccgcgactcgatggtacgtgcaggggcacgtcgtacttgcacaagggtttatacaggttcagaccgctttagaatgtgtaacaccctacttcctgttgagggtgtgtactagattttctctagagtatgaagattacaagtgagctttgtgggtgcccaggtgttgttgatgagggcaggtgtaaggtgagatgggatgagatgagattgttttgtaggggtcccccttggccttatatacatgactagagagttatccctt

SEQ ID NO: 132779 - DNA, 461 bp, Zea Mays
gaaggcgacaagccaacaacaacaagaagcaggagttggcgagcatagtaaaactggaggtacggtggaggaggaggagggaggcgctcgatgttgacgccgttatccgttgcatagctcgatgtaccgtacagacgatggtcgggaattaatagaatatttcgtttattgtgtaaagtgcactagctggccatttatttacagtagtaacgcatgaacagcgtgtatatatagccgtatactgatggactgcaggatggaagtgtcatcgtcatcggtatatatgctcatgtatacgacgtggccacgtgtcgcagcgtgtgtgtgtgtgtggtactatatatacaattgtcagctaactgacgccatcgatcgctgttggggtccggccggggtgatgaatcctctggaagaaaaaagagaaaaaaaaagagggccctggcgacgtggcggccacacac

SEQ ID NO: 132780 - DNA, 698 bp, Zea Mays
gcggtggggctccagcctcctggtactcgtcagtgctcctcctcctgttcgtcggttcgtctcgggtttgtccttctaggtgcatatccgcaagaactcaactccagtcaacccccttgtctaggggtcaatctcttacttttataggtggagagaggggtttgccggcggtgacggtgacttccttgggaaggagccgtaaggcaagggtaaaaccaagcgttcttacccagggtaaagccatgtgtgctcatgggccctagggccgcttggctatctcgtatttactatggcggatgatgcgagaccatgtggatcctaggtgccatcatttaggctatgccaacccctagccttcatagactagagctcggcatggctcgtcatgttgagccctgccagtggtctaagtattactcaggcgtagtccgataggtcatgagtgtaccgtaggtcgagggcacgtggaccataaatgtgccgccgttcgggggcttataggttagtgctatgcaggcccaggggttcgtaggtcatgagtgggaagtggaccgatgcccatgccatgcctcggcgctaggcgtggttaatgtgaccaattatttgcgaattatgatgggtcggtctagggtcaggcgtgggatctactcgagtggttccccttcgacatgcccgacccctcctgtcaggttccgcca

SEQ ID NO: 132781 - DNA, 408 bp, Zea Mays
gcggtagtcgggataaacgaagccaatagcgtcaaaaactctgttcaatctcttctttcctagagttccgaaggctgtggacaatgcattatcttctgccttggaatatgatccaagcagttcatcacttgtcacctcgatgcattttaaccagtcgtcgtttggttcgtcaaacctatccccatatctgaaagtatatttcagccggaccagttcaccttcactagcttcggtgattgtctccttcggcatttcccatttctctataagcgtccatactctgtatgctatgtgctcttgaaccaaatctcttgtaccaataaagaagtagacagtaccaaatgctttctgacattcttcggcggcttcgtcaatttcaaccttcggccttcgaaggccaaagcggga

SEQ ID NO: 132782 - DNA, 1012 bp, Zea Mays
tggagggggatgtcagcacccctgcttcgtgtactcaggaggcaggtgactctgccatgcatgctggtgggacaacatctaaaggatagaatgcactggagctgctaaggagaggcaagcataggaggaagtccaactcaagttacatgggcctagaatggggcatgtgaatggcccatgaaagcaaggacaacactggaatacaattaacgcaatacagttaccttcctccttcccttcttcctcaacttcccttctttcttcaagtttgtatggccgccgcgagtctcgatgcagtgacactgcatcaccaaggagcactcatcgtagttggtccttgtcagttgcaagagctccatgacgcggggattggccatgatgctcaagccttctacgatcttgggcaacatgatgtcttcaactttcatcaacctaagctctaataccaaatgttggctttgcctaggaactctcactctcaagaactcgactcacatgacgaacaaaaggaagaagatgaatagtgtttttcgtgacgacatacaccacaaccgcgaactagctctttttcacttcactagacttggctactacaaaatggagtagtacatgggctacaaataggtcagggtgcaccaagtttcatatcaagcctaaccttcatgccatgatctacacacgactcgagtcatttgctcatcctgcatattgtggctcccttcacatatatcaacaccactcaaaccatgtagtcctaaccacctatgacttgcttgatcagccccaacatctctcctacatggaaactagatcatgaacgcgcaacttacaacatagatacgcacacacacctaaacaaaatgacgagctagacaaacatgtcatgacaaggacacatcatggtcaaggttatttccaacaatctcccctaaacttgacatggtgaacttcggcatacaataacattgactcatcattggcatcagctaggaatgccttctactccttcacg

SEQ ID NO: 132783 - DNA, 486 bp, Zea Mays
aaggtgtcgaacatcggtgctcctattgcatactcagcctggaatctacctccttccaaggctttttccagttttgtgtcgaatcctcctgctggtgatagcggtttgggccttagagtgcgaccctctcccgaagaggttagtgctttggttgcctcacttggtgaagtccctgatgatgagaggcaggttcatttcgaggtgcctttgaatccaagtgatgcagagataagtgccatgctggatatgttggccgaagattcctctgatgcagcccctgctgaaacactggctgtagcacccatcccagaggctgacaaagctttggatactcataggtctaatagtgttcgcccgaagcgtcctcgccgagccactcaaccaacttctcctgctgaggggaagaaaaagaaaaagagacgtcttcacagagtgtcatgcttggatcaggatgctggtccttctgctcctgctgctgaggaagtg

SEQ ID NO: 132784 - DNA, 274 bp, Zea Mays
gcgatgtagtagcatatggttttgagctcgagaagcttgggctcggatccgcctttgccgaacatggcgctgtcgggggaaggccctgtgtcgctgtgccggccgcctggggagggagatgatatgtaagctgtggagtggtaaacggacggctgggattcggtcgaggatgtagttcggccggctccgatatccgccgttggatcggcaatggatgggtgaggggtcgcggaccggtgatccatccgtgaacggtcgtgattaaaacgtcgac

SEQ ID NO: 132785 - DNA, 437 bp, Zea Mays
ctcaaacttgtccagattaccctgtttcagcacatctgtagccaaataccctaaaatggctgaccttgggtggccgtccaaatcgtagctcataagaagttttgctcagaaaagtccgaagaaagatgcggttagacacattgcaagcagtgttgatcgcttcggcccagaaacgcataggattcctatgctcatcaagcatcgtcttgaccatctcaacaagggtccgatttttgcgttcaacaataccattttgctggggcacatacggagaggaaagttgatgctcgagtcccaaagaagcacaaaaagttgcaaattgagtattttcgaattctatgccattgtcactgcgtatagctctcatggcatttttaggaaactcattttgcaaccgaagaatcaaatctcgagcatgagtaaaagcctcatccttc

SEQ ID NO: 132786 - DNA, 677 bp, Zea Mays
cgccttacaccgttcaccctggcgaaaccaaaatgtaccgagatctgaagcaaaatttctggtggaagcggatgaaggttgacgtttctaagtacgtggccgcctgtgaagtatgtcagcgcgtgaaggccgagcataagaggcctgcaggtttgctgaagccattggaaattctggagtggaagtgggagcatatcaccatggattttgtggtgggcttaccttgttctcctcgaggcagggatgctatttaggtggtagtggatcgcttgactaagtctgcacactttattcccatgaagaccaccaattcagcttcagaattggttcccttgtatatgaaggaagtaatcaggctccacggggtgcctaagtccattgtttctgatcgagactccaaatttgtatccaaattctgggagagccttcatagtgcattgggtaccaagcttttgcttagtgtcgcgtttcaccctcagactgatggtcagtcggagcgaacgatccaaaccttggaagatatgttgtgtgcttgtgttctgtcatggaagggcagctgggaggatcatcttgcattggcagagtttgcttataacaacatctaccaggctagcatcaagatggcaccatttgaggctttatatggcaggcggtgtgttggggacttgttctcaaat

SEQ ID NO: 132787 - DNA, 430 bp, Zea Mays
tctaggtgtttttcgtctgatggtgagtttgggagtccgttttcctggaccgaagagtcttcggatgaagacttggattattttgttgcgttagatgtggccgcggcggagtcctcgccgcgggtggaggttggcgaggtggctgatcttcctagtgcgaggaccaagtgccgacgacgaagggtggtgtcgaagcatagcgtgggcgaggtttcgcggagtggtaggtgccgtcggatggggatggagcgggaccgtcttcgagtagattgtattggtaaacgagaactattgtctttgccgattgggacgagcattggtgagggggatctgcggaacctttttgagggtgaggaattgaaaataatgttgttcaattatagggaggcaggcatcatcccgaaggttgagccgatgtagtatgtggtgc

SEQ ID NO: 132788 - DNA, 549 bp, Zea Mays
ctacccggagttgatgcggctcatctaccactcggagggtctgtgacgtctccaactactgcacccacctctcccgcaccaacacctgggggtgtgtctccggatccaccagcgttcgactctgtcgtgcaggggggacaacgatgtcagggtcttctaagaatcctgtctctctatcgcgtgccacacatgaagtctccggactcggggtgatgtccgtttgtcacgaggctgatacaggtggaccgagtgtacctgctgatctagaggccacgcgcgcacctggagtgcatgatgctgcgcgtggcattgaagctcctactgtcttgcgaccacgaacgcgtctgcaagcaggtattcgacaacccaaacaatttaaagatggtacggtaaggtatggccttctcaccactacaggcgagcctaacaatttagatgaagcttttgggaatccaaattggaagagagcaatggatgaagaattcatggcattgcaaagcaacaagacttggcgacttgttccacaggttctaggacgaaatataattg

SEQ ID NO: 132789 - DNA, 303 bp, Zea Mays
caggtacgatctcagttgattcgtttgtggcccatgctctttttgactctggcgctagctattcgtttgttttggagaattttgtgtcgcgggctggtctttcggtgcagaggttgggtcacccaattttggttagttctgctaatggctccattagtagctattctgtttgttaggggtgttccgtcattcttgctgatgaggtcttttcggctaatcttgttgtgatttccttggggcattcgatgttatcttgggtatggattggttatcttagtatcacgcagttatatactgtttctg

SEQ ID NO: 132790 - DNA, 391 bp, Zea Mays
tgaaaacggacggaaacggacggaaaaacccctctctcgtttccgtatccgcattttatcatcggaaacgggatcgggtccggaatagtcgggaacgaaaacgggagcgggataaacagaattgcaaaaacgaacggaaatggaaatactaacggaaactcataatttaatacaaatagaaatgttattgatgtttgactagtgattgattggcagaacaataacataaaataaatagatatagagaggcaacattctattgttgtttggttgctaaatgtgtatatttagctacatccgatgttgtttaagactttagatcacttgtcttttgaaaagagccggtggttacaatggccaattgtgctataatttgtcacctaaatacacg

SEQ ID NO: 132791 - DNA, 334 bp, Zea Mays
ctgagggactgtttgctttgcacccaggcagaactgcctggcgtgagcgctgctccgagacgtgtctgctgtctgggaggctgcgaagtgcgaagcacacatacacgccccttggatgtcctgcgacctgcatgctccacccccttccagaaaggagagacgactctgccaaacctatcagctgtcattctgccccctctcgctatgtatttgctgcacccgtgggtagtggtgtgccgaatctaatgctccatccaagcttctgagtttcacaatcccctaggactcaactccctcgttagttctcaacttctcatcgcacgagccgtcggcg

SEQ ID NO: 132792 - DNA, 742 bp, Zea Mays
cttgttgtgcgataaaattggaaaggcaaagaacaggggtaatgtgtcgatcaagttaaccgataggttccgtgaacacgcttgtgatgcttttatatgcatgataagatcgatgcattgtcgtcgtagtcttaggaactttttctgaaacgcgctagcgctctactgatgggttgaatgaacttgagatgtattacactagctgtatgtctcacaagttatccaaaaatggcgaaaggtggtgtgggttgataattgggaaatagtcacgtcattagccaactcatgttaagtaggagtcgatggcgtaagtgattgtgatataaatagatgtggtgtctcggactgcgataataacaggcaagccgacgtgcacgctgtcgagcggaccgtgtcgttgctctagttagccaaattgttcgatggcttaggttaagctcgtagttacgataaattacttattgtagtctaaatgtgtatggttatgatcgcgggtaaaaattagtagtgctcaagtgatgtctaagttaaaatacaaactagagtataaagggcgcgtcgatacacgtacatgtaccgggtccgattattgtggtggatgtgtttgtaaaaaattgtgtgtggtgattctagcgtacaaagtaactcggataaaaattggtaagttgacttgttggttctcatttgattaatttaactctaacaaatggtaaagcgttagagtaattcaagtctctcgaac

SEQ ID NO: 132793 - DNA, 404 bp, Zea Mays
tgtaggttagttcctcgccggaggaatcaccccggggggcgccacgatagaccgcgccgatgactcaccctttgtctcggccgccggtctctctgcgcaaaattagacgccaccgcttaccctcactataaattgagtgtccccgcggctccgtaggataatcacgcatcagttgcaccaaactttgccccggattattcacctgagatcgagaatcgctcgtttcccccaattacagtccccgccaccgtgaaaacaaccgtactgcggccagcacaatcccgatcagttcatcttctatgccttctcgtttgagtgcttccataacctcgtgatgctcactgacccacccaattgaattataccgccaccaatcttcgggaacgcgttgttctttggatcac

SEQ ID NO: 132794 - DNA, 574 bp, Zea Mays
ttagaatctcttattcagattgaggctacttgagtacttgtgaagctcgcgcaggctgtgactgttgcagttggtgttcttccgagtgcatcaagttcttgcaccacttgtggttctacgagattcagagcagcgctcgtcgtctaatcgcccctgaactcggccacaacccattgctgtgcttgtgtttgcagattgcggcacgggccagcacgggccgctgcccagcatccgtacgccgatcccaatctagccacaacgggtcctgttggaccctagcaggccctcctctgtagtcttctgtgggccgcagtcaatagtagatgcacggtgtgtgctcgacggaattgcctgtgctctgtttggttgatttcgctctcgcttgtttgtgtgcctgccgtccgtgtccctggtgcccgaaactgcagcatttgcacctcgccagcatcactaaaccctgctactgctgggttgctgctccaatacactctgtctgcacccctgcgtttagattggttccttccttcaaaattacaaatcaaatccaacctaaatctagcacgacacacagtca

SEQ ID NO: 132795 - DNA, 458 bp, Zea Mays
ctgacacgagctgcaccagtgcacgctcgggctcagggaccctagttcatctacaagtcatgcatggccaccgttgcgtcggctggacacagaactgcaccagtacctttgtctcggtagtgcgctgtagcaggcccaacatgcaaactttgttatccacctccctgactcgggactagacttagatcagtcagaggaggaaaaagggtcgagggccccaccatcttcaagagtcaaaaaacacgactgactgacgccatggccacttggcccgcaagtgcggtcatcaagctcgcggagccagagcctcccctatactacccttacgccctcttcaaggggggagtagacaacgatcctttctctgacgatgagcccagcatatagggggaggagcctccacagcgtggggcacgtctccgtcggaatcgacaccacaacatctagtgtcaccacac

SEQ ID NO: 132796 - DNA, 535 bp, Zea Mays
catctctggtgctccctgactccctctcctccctccctacgtctccttgttcctaactctaaccctaatcccattcggatctggtgattggtgataccctaaccctaatcccattcggatctggtgattggtgatgctcgttcatcgttggtgctcctcgctggtcggctggtgctcctcgcctcctcggatcgagttgtagcttcacagctggacggctggtgctctgtgcggcgccggtgcgtgattccttcctgattcttctttgtctccggtccggtggtccgcggctccgtgccttgtatggtcactgcctcactgcctcactagtgcagtagtgcccctgctggctgcttggacatctataattttgttatgttttcattttcctcccattctcgccctccttctaacctgtccggttgctcgactttctctggtgctcggctggtccttgcttgctgttgttggtcgctctgctcggctgctcctcggaccttggctccgttccgtcgtctctggtgctccggcttgg

SEQ ID NO: 132797 - DNA, 771 bp, Zea Mays
aatctattagatctgatctcactcttgtgcttgcgacatctttgtagatgccccatgaccataaccttcttgtttttttgggattctttcctcttccattgttaaattgctatcatttcgcaatatctattccattggtattgacatgctagtatccttgcatttttaatatccttatcccttaattcaaagtacttacccttgtacctatgttgtttatttaaacagttcggtttatatgaccatgaccttcctgtcttgtgagatcctttcccattccgttgttaagtcattatcttttggcaatttatattctcttggtattcgtatgctcgtatccttggagtcttgcatactctcatattttcatgtatgcttaccttcataccccaatgactattcaagacattttagttagcatgcccttgaccacccttgtttcctaataatccatgagcggtcatttttattttgcacatccttggtgatttcattaattccttgtaacttccttcgataatgaattttttacttcaactcttctgtcagaacttcacttatcttatccttgattgttttctcaacttcatcactttgcgagtcttgtcttaactctgtccatggattatgcttttcatcgttatcacctttacccttatcacctctatatcttaccttgatgtttatcttatactggccctttaaaatctcatctttccatctcaatctgagcgctgtactttgcctacttttcccttggtcgtgtcctct

SEQ ID NO: 132798 - DNA, 453 bp, Zea Mays
cgaggacttgcatgcgcccagcaccttttactagcttcaatattgaactcgcacaagctctatattccctccatttcaaaacaattagatttctaattcctctgtttccttcgttctaattataagtgtagacgcaaaacacaggaaaataaatcgtctgacaatgctctctataaagacgcagatggtccataaccttaggccagacggtccgcgacctggcccaggagcggctcttctctgcttacggccggacggtacacgtctaggactcgaacggtctatgatggtatagagagtgtcttcttcgcactagatctagattttgtttcctgaaaatacccatcagggagagaagatcctagggtatatcttggagtcggtagaccacccaagagtctttagtcgacgtagagccaaaaaaatgcgaagattcgaggtaaaggaaggcta

SEQ ID NO: 132799 - DNA, 545 bp, Zea Mays
gcgctggtgctgaggtagcaccgacggacccccaggatccgcctatcaacgtcgaggcggcaccttcgggttctcgagttcccgagttgccaacagctgttgaatgcctagcggcggggatatcgtcggatgcaccgttggtggtaggcgtgggaggcgtgtccagctctgtttcgccaccaactccagggtctccggaggttcaggttatccttaggcgaccgctccggtctggcatcgatccttgggcaacgctgactcccctcccccaggtgttgtcccgcgctcaccaggctctccgggaaatcgaggtggctatccggcaggagtgggaggcactcgagaccgagcaccagcgccttggcgactggtgtgcccaactggaggagcgcactaaggtggtgtcctgccatttcgcctcagagcgggccgagtttgagcaggagcgcgaggacttcaaggaggacatccggaaggtgtctgaccgagaggaagaggtgacccagacggaaaaagcctggctaagaaggaggtacgcttagacc

SEQ ID NO: 132800 - DNA, 407 bp, Zea Mays
gttcttgtttgtgacatatgttgtgtagatgttagttggtgtaggggatatatagagggaacggttggatacaccctatatattaaaggagaaccttttgagggaggtagtaaaagagattagaaattacatataagggaagaagtataggggatatttttggacagagcttaagatgggcatgtattacatgacgagtaatcctgcgcgatgtgcgagctagtagtgttttggccagaccctatgattggtctccttgatttactttggtgatgtttgtggagacctaaagatgacttagaaatagggatgacaacgggtcgtgtattgtgcgaatataagtgaatacccgaccggcaacacattagctatcatgtaaaattttgtatcgatacccgtactcgtgg

SEQ ID NO: 132801 - DNA, 330 bp, Zea Mays
ttgctggcaagttgtaactgtgtctagtcaatcccaccatttagcttatacaacaatatactttgtaggaaacgtgacaacttactaaaatattaatgtcatgagcttttgaatttgagatgtgtagaagacaattggtagaattggtcaattgtgtcgctgagctcgtgggcagattatacatgagtacattcacttggatggcaagaaacctccctaaagataagaagtcaggattacatgaccctaatctagcatatttaaagatattccaatataatataccaccccccatatttttctcgaacgtgcaggaaagctgcacatctt

SEQ ID NO: 132802 - DNA, 395 bp, Zea Mays
ggaaattctcctgctacggtggctaattgagggtgagaatgggtgcttcggcttcgtgataacatggcgcaactgactcggccttcaatttatagaaatgctaagcggtgacgtccaattttgaaaggagagaccggcggccgagaagagagatgagtcatcggcttgaactgtcgtggcgcttcctggggtaatttctccggcaaggaactgacctcttacggatatctacagcgacatggtacatcttctaagcacgtggcatggttataatcgccggcgaaatccgacgaggacactacagtccactgcgcggcatgtgtcgcggtgaatagtccgacgttaagcttctctcctttccccgagttgagatctttctctacccatgattatcc

SEQ ID NO: 132803 - DNA, 304 bp, Zea Mays
ctgcaatggggaagaaggggtggcggctgctgcaaaaatgagggaaggagggggcggctgctgctatgagggaaggggaggggcggctagggtttttgagaagaggagggagcgatgcccttgatgcgaaaccgacggctcacaaccaaatcccccatccatgccccgattcatacaaatgaatactgaaatgatatcgtttaaatgagatcttcacatctgcggactccgaacttccaacggcccacaaccattttcccacgtctatgcaccgaagatcaacttttggtcaacattttttttg

SEQ ID NO: 132804 - DNA, 542 bp, Zea Mays
ctttgtaacatcttcagcggattgaaggatcaagaaatgagctttatggagcaattcttgatctggtatctctgtgctcaatccaagtcccccttgccctttaagtcttccctcatggcgtgacagtggaaggccaatcggtgccacctcatccatgtagtccacacagaaatcgatgacactctcaattacataactttctgtaatagaaccctccaggcgtgccttattcctaacaaaacgtttcaagattcccgtgaacctttcgatcggatacatgtaatgtaagaaatgcggcccacaaatcttagcctcttcaactagatgcacagtcaaatgtaccatgatgtcgaagaatgaaggtgggaagtacatctcaatttggcataaagtttgaaccaattccctttgtaagttgtcaagggcttcaatatctagcacctttgaatttatttcattaaagaaatagcatagtctaatgacagtgtctcgtattttgatatgcttgaaagacccaaggaggaccacggggaggatctgag

SEQ ID NO: 132805 - DNA, 370 bp, Zea Mays
gcccaggtattttaaggggaaggtagcccttctggctggcatattccttagggccgcgttgaggtcaataccttgacaacagataggcacaactgtggacttatggaagtttgtcaacagccctgacgcctcaccaaatagcccgagcagctttagtattgtctcgacctcctctttttttggtgcaataaacaaggccgcatcatcaacgtacaatgagagacaaggcaaggcgagcggcccctaattttgctgagaagtcccgtctctattgccaagtctaaaattttctgcaatgggtcaatggcaagcacaaataacaatggtgagagtgggtctccatgtctaagtcctcgaccatgagacaagg

SEQ ID NO: 132806 - DNA, 523 bp, Zea Mays
ccagccctaggttggcttggcccagttggtgcaagtcaccttttttgtgttgctgtacaaaatgagctcggcccaggcgagatcgtgtttgtgaccctttttcacagctgggctaagaggccaactgcccaactgccaaactgggaatatgtttggcagctggctatggtcggcctggcccatagacattgctgacagaaaatagagatggacattgctgacagaaaatagaggattacaacaacatatgtcaattgaacaatacaagcatcaactgagttagcctcagacaaatttaacttaacttcatcaattattgtcattgttggctacaagttacaatcaaagaagccatgaaagaatgacagtagcaatgattttcctcagatatccatctgcaacatagtcaggtagttgggcatccatctgcaacatatccatcaaataagccatgcaagattgacaatagcaatgattttcctcagatataattgtcattttcatgtgatcttttaacttggag

SEQ ID NO: 132807 - DNA, 283 bp, Zea Mays
agatgctccaaaatcaaattaaactaacgcaggtatggagttaataaggaacataccatacaccaagtctgcatcctctggaactatttctgcagtcacatggtttaccctgcctttactctagttctgttgatttttattttgcacattgccacgagtaggcgtattctagtcaaacctttgactattgttcttctgggtgtctatggatggctctttgggcagttattagcatagtgaccaatctctccacacttgaaacattcgttgggctgaactgcgg

SEQ ID NO: 132808 - DNA, 637 bp, Zea Mays
tagcagctgatatctttttcaagcttcccaaatactcttgggtagggtgcttatgattttagcaccggcgcggtcgagaatgcatcccacaatttcttcatcgaccccaccaaatagcattgatccaggctggtagccgcaggagatagcaaattcctttagttctgatatgtcctcttcggagagttgttggccgcccaagtgtcgtaggtcgaaatttgcattttccgaagaggtttcttcaattttcttccccttatcagaaactgttgtggttgcatctttctccacaaccaaatccgatataagtctgtcaatttctgatagggtggttgtgagattttcatcttcggctgcggcggtagcttcgacatcagtagatttagtaactttgtctgccgaagctgagagaggggtctgttcaatggcttccagtatattcatcatacgtcgtttcttctggcccccgttttttccctcgacatccgaagagatttccctagtctgtaagaggctagtcagttccaacctcataggacttagcagtgcaaatgggaaagactcagtcattaccttcaaaatctccgaaacctcaacagtagaagacaaggaagggctcgtagtctgcttcggcaca

SEQ ID NO: 132809 - DNA, 488 bp, Zea Mays
agaatgaagttgaatcacatttctacccctgggataccaaaaaccctaattagaaccctggaaaaccctaaaaccaaaccctagggacctatgtgcaaaattagtacacttttgggactaaagtgcaaaaactatgttaaataagtatcctaagtcatttggttcacaaatgtgtggacttgtaagccaaatatttgattttggacttaattgcaaaatggacctcaattgagttctatactaagtctgaaattcagtgttgagggctcaactttggagccttgtacctttcaaagtatagggtgtttgccctaggtcaccacataaaaattgtagagcaaacaaaggagaacaattttgcttaagagtgcaagccatgttcttgtgaaaaatctggagataatcatgctcaaaatcaggctgtcaggctgttaaggtctgaatttcagactgacagtgcaactgcagtgactttgggcatgaatttg

SEQ ID NO: 132810 - DNA, 491 bp, Zea Mays
gccgcgcacgatccctggtggttgggttgggctttttttgtttgctatgggacatgagctatatggatttaggtgacgtttggatagtcactggcgcacagagaaatgaaaatagaatgagagagtagaaaggttctagttatagattaggaaaccagacctaattcattgtttgtcaatagttagttagagtaactccaatagtttttctaaaaaaacttcataaattcaggctcaacaagttgctaaatagctattaggaataaaaatagcttggtcttctatatttcctaaaacttaatagctattaggaataaactcaggctcaactgttgttctgtccacgcccgccgtagctctgcgcacgacgtcgctgctttgccgcgtacctaggattttggagggtatgcatcataaaacttaataattaaccggaaattttgaactagattacaatagagcccaaacatatgaaatatgaaatttgcaag

SEQ ID NO: 132811 - DNA, 504 bp, Zea Mays
tgcagtccgcggcggagcactaacaatgacaaggaaatccgcctgaccccaccattgattctgtcaggtgggggcatgtacgtcttccatgtgacactgtggggcttcctagcctaaatcctgaccccgaacagcaacatccctttggttttgcccgcggcgatattcacctcatcgttctcggtgccgtgttctgtgctcccatcgcggtcgagtatgaaccgatggaggaagagggagggggctaggctcctacttatacgcgggtaaggcagggaattgcaacaacttcgaccatagctagccgacgaaagtctgacgtctgtggcggagtccgttgcaacaacccagacgcgatgaagggggtatggctgatagtgggtcccatccaatagagatgcagtggctggaaggctagatggtgaacggggatagaggaaacgactgacgacgtgggcccgtgggacaacggtagccaggcctgcggtgcgggccactggccgg

SEQ ID NO: 132812 - DNA, 460 bp, Zea Mays
aggagctacgcgatgctacagtaaccagatcagagcgccagttcagttaactcaccaccggcaaccgtgcgcccggattcgtgtccgccacggtgattcatggttggtgtagttggataacgcagaggtaataagaaatatcacccagtggatgaactccggccactgttcactctgaccgccgtgtccgcttagctcacggccgcttcggatctaccctcgccggagttagacacctcgtagccttgcgccatgtgcctcaacactttaaccacaccgccgtgactcatgttagcccatccggtgatcgccggtgagcttgccacggtaattgccaccaatcgcgtgtgccagtgcacctccttctctccgaccgccactgcacgagttcaaattcactggccacaactcatgggctctataaattgagcacaccctcgactccgttaggtattcaagc

SEQ ID NO: 132813 - DNA, 431 bp, Zea Mays
aaggcaatctggtcggaggtgatcctcaactaacctccctgctctacctgatctgctgctgcggcggcaactgctgcacggatggctttgtccaaccatctctttttcttgcccactgatgctcaaggtagactgccttgcccttgtcctttcggaaggggcgaggagggtcctggtcatctcctccccttgacggtgtgacattcttcatcagcaccatcctgcactgactactaacacgctgcatgataatgagaaaaggtaagcgagagcagtagagaagtaggtaagtaaatatatagaatggaatagctacctgggtatgtctcgagagagaagaaccaggcaggataggagtcgcgcaggcgggcaagcaggcacactgaaatgacataataggtgagcacatattagtcacataatcataagta

SEQ ID NO: 132814 - DNA, 601 bp, Zea Mays
acccggcaaccagacgacggggtggtttggggccgtgaagtcgcttggtatggtcaagtaccgtaagcctacacgccccaccgctctgcggccggtcttgttgcgtgaatcaaagtataagaaataccagctggcgaaccctatgggtgcgctactaaacatacctagccaagactgtgtgcaggtcgggtcccagttgggggtaccccttgggggtcacgacaccagttcctccttatgaatcctagcatccagccccgacgcgtcgaagccatatcccaggggggcgagtaccagggaagaagttggtaacaatgcacacaacaaaggaaaagtggcgtgcagataagttgtaatatcacctgataagtagtacctaaagagtatcttacgaaatcaaagatatattacaacccgctctccagcggaaccatcgtttttctccacgcaggcctggctactcatcgtcagtaggatcccgctggaagcgcccgaccactgcgtccacaacgtcctgcacgccctcccgggcagcatcttcagtatcggccaccggacctgcgatgactggccctaaggaggcagccgggtcatggctccg

SEQ ID NO: 132815 - DNA, 706 bp, Zea Mays
ctgaggagctctaggaagggaatcactagagatgttgggaaaggtgtcaagtgtgttcctaagatggttaggttttggaagccacacttgtttctgtggaggagctctcataggttcatcaatcacactatctctcacaggggtgacaggcttagcagaggtggttttgataagcttgggagtgggtgaaggtttctctgaaggtgtcaaaccactgcactcaccaaccttgccaaagcgagcgacactcccatccttagtagcaaagcctaaccccggtccgccagttcccctcttgaactgactgaccatcatgcccaattggggatcactgcacgacacccaactcaagatagatcgaaggtatgtgttttcttcctcgattcttgtcttgtcgtgtctgcaggactcaagggcagattgcaaaccctcacaaagtgcacactgcgtaggtgcaggggcactcactcagctagccttctcaagcaaagctatcctagcgtctctctctgctagctcagtctgcagccaggacaaatggtacacgctcccaacaggatagacctagatctcaactcgtcatgctcatctagcaaggtggagtacttggtctgcaaagtggtgatgtttgacatgtgtagagcgcactcatcacattcagtctcgtcggacacctcaactgaagctctagcagactcaagttccc

SEQ ID NO: 132816 - DNA, 600 bp, Zea Mays
ggaccttggaccactccgatacttccttgggattgagatagctagatcatctcagggaattattctctcccaaagaaagtatgtcctcgatcttttgtcagagacaggaatgcttgggtgtcgcccatgtggctcacccattgataggaatcaccaaacttgtgctgagtcaggtgaccctgtggatcgggaaagatatcagaggctagttggtcgtttgatatacctttgtcatacaagaccggacattgcttatgcagtaagtgtggtgagtaggtatatgcatgatcctagaactgggcatatgaagatagtttatcaaatcttgagatacctgaagggaacccctggcaagggattgtggtttagaccaaatcatcatatggatttggaggggtattgtgatgcggactgggcaagcagtagggatgatcggagatccacttctggatactgtgtatttgtgggaggtaatctggtttcatggagaagcaagaagcaagttgtggtgtctcggtccactgcagaggctgaacatagagcaatggctctagcagtgtgtgaaatgatatggttgaagggtctcttgagggagcttaa

SEQ ID NO: 132817 - DNA, 636 bp, Zea Mays
caactaatatccttttctagcttcgggaatccaatgctcttagataaagtgcttataatcttagcctcggcacggtcgcgaatgcatcccaaaatctcttcatcaaccctgccgaagagcattgatccaggttggtagccgcaggatatggcaaattttttcagttctgatatgtcctctacggaaagttgttggccgcccaggtgccaaaggtcgaaattcatatcttctgaagaggtctcttcaattcttttccccttatcagaaggcactgtggctacatctttctcagcaaccacatccgaaataagtctgtcgatttccgatagtgtggttgcaagattctcgacttcggctacgacagtatcttcagcattgacgggtatagtagctttatccgctgaagctaggggcggggtctgttcaatagcttccattacattcatcatatgccgcttcttttgcccccccattttcccctcggtagccgaagcgatttcctttgactgcaagaggctagtcagatccaacctgagaggacttagcagtgcaaatgggaaaggttcagtcattaccttcaaaatttccgaaacctcagcagcagaagacgaagaagggctcataatctgcttcggc

SEQ ID NO: 132818 - DNA, 446 bp, Zea Mays
acggcgacggccaccggcgacgagcaagggatgggatctttttcagtttaacacttactgtaccatggcgtcccatttcagttaacctgacagagcaaattggagcaggatttactcttaatttccaatgacaactccacccaagctctgcagcaaacttgtagagctatgtaccacctatatttcgactatagtgactgagctcatttgatcaccagatcatggttgaattcaaccccaaagatgtctctgttacactaagaatctgaatttcagaataaaccagcctgacagccaagctttgagcttaattatctctggatttttcttaacaactgagctcacattcttaagcaaagttgttctccttagtttggtctacaattttgatgtggtgacctagggcaaaaaccctagaatttgcaagatacaatgctccaaagttg

SEQ ID NO: 132819 - DNA, 627 bp, Zea Mays
ggaagatggggggataatcaggcttcccacctttcttagtcgtcggtttctgtttctttctttcggctgctaggttttgcgcccaaccccagagtctagaactgtagtttacgggagacttagggccccctttatgtaaataatgatgtagccctagggagaccttggtctaatgtatagttttcatcccgacgtccttctttacgcaaatgaatacttacgtcgggtcttccttcgagaggtggcgtgacatgtggcctaacatgatggtggggcaggcttgcttcctcgtccagtggatcttttccatcggtcccaagtagcagggttttgcaggatggcctttatttaatcgtgtcgctcaccctatcttgtccaccttgctttcggttcctcggaccttcgtcttcttcgcttagcctgtccttattttgctcgggtcttctgtcgctcctcccgtgacggactggcgtcgatccctaacgagtcaggggaaccttcaagccctcgttgggcgtggtttactggatgaaggcgggtggttgattccgaacgctgaggaggccccaaccccgcctcctggttatgtggtttcatttgttcgtttccatgagcgaggtctcgttg

SEQ ID NO: 132820 - DNA, 636 bp, Zea Mays
ttaaagcaagctctttcctagcaatttcttgatcaaatacatatttttccactgctactgacccatccgtattttttcccaacttcaaagttgattgctttagtccttttctaacctgcctagattgacaagttctcagatgaccacgtagatgatttgtaccagatctactatctccgactagtgccttcttacaccaattacactcagctttcaatttgccagccactgtaacttgtttaaattctaaccatacatctgacttgagctttcttttgaccccaacttgaagattatcatcatcatctatgactacattttcattaccttcttctgttggaggttgaacttgtgcacttgagcatggagtagcattagcagcacttgacgaatgggcatttggtgtaggtgtagcagctgcaacaacatttgaagaagctgcaacattggtcggtgtagcacttgacctgtttgaggagggcctttgtgatcttgaatcttgcagtgttggaggagggttccgtggtgcttgtgaatcagaaccaccggtgttcgccatgagggactggtcactggtgttcaccaatctccaacgcgcggctgagtggcgagtcctaggcgcgcggctgagtggcg

SEQ ID NO: 132821 - DNA, 420 bp, Zea Mays
tgcgtctcattttgtcaattgaatgcagcaaccatttatgaggcggaaaaaccgttagatggtagattggctgtgcagatagcaccgattttactagagtttccctaccagccttggacaacagtttacctttccaaccagccaacctgttgttaattttttcgattagtggttggagatcagtcctttttacattcctgtaatgaaggggtagccctagatactttccgggtaggctagagtaatttccagggaacacgtccattagcgttggccataaagatgctggatatcgaattgggaaaatttctgttttgtcatagttgatctttagtcctgaacacccctcgaacgcgttgagaatccctttcaccactatattctcagtattagtttttttcgtggctgttaacattcttt

SEQ ID NO: 132822 - DNA, 404 bp, Zea Mays
caagaagtactgcacccgagcatttcactggatcgagtagaggaatgcaatattctgagccaaccagagccagatgattggagggaggcgatcattaggtacataaagaatgaggaggaaccagatgacaaaaatgcagccgaacgcactgcgaggcagtcagctcattacactctcattggggaaacgctatacagaagaggcatgtcaggagtcctcatgaaatgcattctctcaggtactggaaaacaacttctggatgaggtccatgctgggcaatgcggggtacacgcagcatcaaggaccctagttgggaaggtcttcaggtcgggtttctactggccaacagcaaagagtgatgcagccgagttagtccagaggtgcgaagcctgccagtacttatc

SEQ ID NO: 132823 - DNA, 912 bp, Zea Mays
atgagttttcaaccctagtggagtagaatggtgcgatggctaggacacatcttgacatgataggaggcgcttcgggtaggagacgtaccgattaggatgaatagatgaacgtggcatagcgcgtatgaaggatttgagaggaagaagaaaggggggacgagcgacatacgtacagcagccacagccgaaaaaggcattcttttggtctgctccccacaaataaagaggagccagagagagaagaggccggtgtgtggggtgcggctatatatcttcttctttacagctccaaagtcctaatgccgtgtggtttagcgaaggcgctgacgggagatggagacggatggggctcctgcgcgagtgcgcgacaggtaggtagcaagctttcctcacgagaaacggaatccctccctcctggcacgccgcctggacccggttagcggaatcgctcgtgtagccgcagcagcagttgtcgattggagtcattggacaatggctagctataaaaaggctaacacatcatcacatagtaaccctcccaaagctgactgcaaaagatggcatcctccatctatggcaattaaacaaacacgtagcagcagcttttatatactatactcctagtagtatatctatctctatctacgaaaacgtaccagcagcgaccactgctccgctccgagtccgagcacgtaaatttcacgcgaaaaaggcgaaaccgcctactttccctcaagagtcaagatctactactagttgccactacctcactccctccatgtgcctacgaggctacgaggcaccggcgcgtcaccggatcgccttcgggtttccttgcatatcaaactgattagtgattaccctgaccccagtggcaccgctgcaaccaaccgcgccgccagcggacccgtc

SEQ ID NO: 132824 - DNA, 680 bp, Zea Mays
ttacggaggccagtagcaagcataaagaaaagaatccatcagaaaaactacaaaacaaccacaccaaccctaagactcagctaaaggggcagccaaataggagactctgtgactcttttacagctgatatgaactctgtctctacccaaaggagtggcggtgtgaataatgtattcaagaaaaggatcaccttttgagacattgatgtttcttccatttgccgtgtgatgcgatatgcttcacaagctccacactttagcagcttcggaatatgcttcattttgaagcgcgtctatgggacaagaactcgtgcaatccgacacaatggaaaaagggcaaacaaggtacgtgctctagaacatcagggatccagggatttctttcagtttcaggaacaaaataaaaagacagcagatgatatgatgaaatgctttttttttgaccgggaatgtgatgaaatgttggataggagtctttcgttgcttgatcatgaacagtctatctaggagcttacaatgagaaagaggctgctgcaagggcctatgaccttgctgctctcaagtaccggggcccaccacctacacaaaattcccagtataaccttggaacatcttcactgtcgtgtaaaacaagggactagtgagagattgacccagtctgcaagcatcagtgaaccacgc

SEQ ID NO: 132825 - DNA, 404 bp, Zea Mays
cgaatgtcggtgctcctgttgcgtattcagcctggaatctgcctccttccaagactttcatcagttttgtgtcaaatcctcctgctggtgacagtggtttgggccttagagtgcgaccctctcccgaagaggttgaagctttgattgtttcgcttggtgaaatccccaatgacgagaggcaggttcattttgagatgcctataaacccgagcgacgcagaaataaatgctatgctagacatgttgcctgaggattcctctgattcggtccctgctgaaacactagctatagcacctatcccagagcctagaaagaccttggacattcaaagatctgacagcactcgtccgaagcgtcctcgcccggccagtcatccagcttctcctgctgaggggaagaaaaag

SEQ ID NO: 132826 - DNA, 297 bp, Zea Mays
gggaaacataaatggagttgacgaccaggtaatattttttgtaaggtcaagattttgacatctaacaacggtttgctcatagtgagaggtggggtgaagtctctaagagcattgtgcattcttcttgaaattatggccctacagtaatgaatcatctgaaagctgcaatgtggaagatgatgataagattttaagaacactagttctgcacatctaatcttgctgatttcgcacatctaatgttgccactccatctgccattgataagaggtactttgtagggttggccatctggaa

SEQ ID NO: 132827 - DNA, 389 bp, Zea Mays
agtgtttatgtggaggatagatattaattgtacttgcacgccattattaaggcggcgtccttgtcattgccttgccgatccagtcatgatcatgcgtgtcaatcatcaccatgcatcaatcgatcctgaatccattcgagatggtgcaaataaaacaagatttgcttgcaacttgtccattgatgtgatgtaaaagcgttactgtaacagcacactcaaactctaaattaatctcatttcctctaaattaagctacccgccctcttttttggatcctgtatgtacatccctccatggagggagaaaaaaaactgcctaaaactccctcgggtccacgaagatggaggcgccggggggcgccttggtccagtcgccgagcgcgccgtcgc

SEQ ID NO: 132828 - DNA, 271 bp, Zea Mays
atacgattttgggtcgaatcgaatcgaatcatttggtggcagctttcacagttcgcacttggtacggtagcgcagagatggccagcaatttggcgtttcggtagaaattttgaaaccaccagtggacagtggtaggattgcagttgtttaagccttttatttaagggtgcatcaatgcatggttgttgagtgaccgtgcagtagcgcacaggtatagctgcagtggctattgtgcaattacgggagcatgagatacctccaggctcgaggc

SEQ ID NO: 132829 - DNA, 393 bp, Zea Mays
caaaaattaaagaaacgacagcccaaagttactctgtcagaatggtgtttaataaccgaaactgaatttaaaaacagaaatggtcacaatggaatggagccaatttggacgcgccatatctttggattcactcgattttgacccaaatatcctatagtaagtttgaagtcggttgataggtgaacaaactttattaatgaaatttgctctgtccttaacaagaatcaagagattgagtggatagaaggaggtcggttcaggcgaactctgaagatccagtgcactgaaatatctgaagaacacagggaaaagatctatggcactgttgaagcagatgagctcgagtgatccagtggggggatcgatccgggggatgataactttggacgtggc

SEQ ID NO: 132830 - DNA, 577 bp, Zea Mays
tggatgtctggctagttgaggcaggtgactctcagctggacaccacccctctctgtgcttcaatgcttctgctgattggacttgcagtttagtagctacatttggacttctttttatctctgccgatctctcccttttgtcatagtacattcattgcgtatactgtgtggatatgacttcttcagaaaatctttgaaaattcttggcaacacacccaatgggtgtgcccaaggggtgtcttggtacgcagagtatttaccacactgtcctggagtagtaacttgatgtgaccgcggggtgtaatcatattgcctgagcagttgaccttggtccaaacggtgtcatgttatgcgaagcggcgcctgttgcctgactcgttttcaggcgacttgaattgcttattgaatacttgtgactgtttggcaagcatggtaggaagtggacggtcactcccatcctctataaatagcctgcttgccttgttgttctcttcactcatcctttgatcatctactgctttcttcttcttcgctctctccttctccaaccaaccatgggtagaggcaggaggggtcgt

SEQ ID NO: 132831 - DNA, 323 bp, Zea Mays
gaaaattttggctgttataacttcgcgtatcgcaaggatacaaaggctctggtcctcagctatcgcaccaagtggccaactggctggaagagtgagtggttttatatcaaggccgatgagaagaagagggagaagttgaagacgatggtcatgagcccattgagtttaagcttcgggatgaccagacccttatgcaacatgaagccagggtcaccatgccagctggccgtagtagaattcagagtggtggctgaacatatcagcaccagggatctagtgcaagaatacttggcctacagggtatctccaatgttgagtgaatg

SEQ ID NO: 132832 - DNA, 369 bp, Zea Mays
ctgactaccagcggtagatatgttgaggagtgggtccgagtgttttatgcttccgtatggattgaccccgatcaccagtggatgaggttctgttttgagcgataggttgtcactattcatgccagccagatccgctacctgtttggatttaccgattcgttcactcgccttcacagcctgtgctatggcacttttgatcctcctcaacgccctcacgatggagtcgctccagccacatctcacgtcgtggccctgttccgatcgcctttttcagatgggtcgcgacgctctccagtcactccagtggccaagtatctctatcaaatcatgagacggacgctactgcctcggatgggttatagagaagcc

SEQ ID NO: 132833 - DNA, 571 bp, Zea Mays
gagaatttctagcatgcttcacacgatcgggttacttggttggtcgtgcatatgattgcgggccaatagaatccctgacgtatgaccttagctgcgagggccctcagtcctgagtgtgatctgcatgtactgctgtggacctcgtggagaagctctaaaccttcgacttcagttatgcatttcaacataggccattgatgattgtgaagtctctgcttctgtgtttaagccttttggcttcattgtgatccgaaggatggtagtggccttggaggtatagggttattggagtccgctagtcttcggccattataaggttgatgattcgatgcccgtcggcgtcttgcgttatttgcagaccttcagggtttctgacggctggtgtaccaactacgtgataaaatacatcgggtggctttgcccttcgctgctgctttagctaatgtgtcagcctcttcattcttgtttctctcgatgtgttgttgggtgaaacccttgaattgtttctcgaggctttgaatggcggtgagatactgcattagcatgggctctttggctgagtagtcatttt

SEQ ID NO: 132834 - DNA, 1394 bp, Zea Mays
gggaattgccttggccctggtccaaaaaaggatacaactcttcgggcaacttaatcttgagatggtccgaagaaatgacatctacaccaacatgtatccttgagaacgaccaagcatctcagggccctcgtgtcctcgaagcactctgagtttaggggcactctcacatttatgggaactactttgtaagaacagtttgagatctagacatctaaaccaacatgtctctttgattagagtagaactcctaacatccttaaatgtggtttaaggatcaatagagtagaactcctaacatggaggatatatgagatcatgatgattagtagtttttttgagcttgtaatgatcttttgcacttttgtgttcatcaactgacaagtgataagagaactcatggtattatgttgtggcctgaacctctctaaattgtccgtgtgctggtttttggtggtgtggtgtctaggttcaacctatcacttacctgctacacctccgatccactctctctaatgagtttatattttatttttgtgtacttgtttacatactccggtgtctaaggataattagcgggaatgtaggtttccaagagcaccgagaaagaaacagcggagtttgaaaggcgggcgggcagtgggcagggagtacgagagatttgtctttggggacagaggccactgggctgggtataccccgtatgcatgtgcatagccataggggggcaaaggcaaggaatgatggcctggaaatgggcatcagtttgaggcatggcgtcgacgcttggttggctgcagcaaccgccttttgaggcggcggcacagtcagaccagagtgacgacccccatgcagcaatcatgcatgcctccctcccagtcccatagaatagaagatcattattgttgttattacaagtttctatgatatcttgtctaggcgctcagctcgtaccgtacgtggggtttaggaggacgagaggggtgattatatatcttagtaggatttgcattgattggggacatgagcggcacggtcttccatcgacgatgatgcacgcgtcgttggaacagctatagtagtaatactcgtgtgcgtggccgtacgtggttgaccggtggtggggtccacgctactcatcctgtgctgtgcccggaccccggtggttttatatgcaatgaattccattgcattgcattgcagtgatctcgtctagctcatcaccaacagtcgccgtcgtatgcgttagctgttccatcgatctggaacagcttgggggcattgattattcgtgcagtggaatatatatgatgctgtcacacggcggtttgttccgtcttctcccaacattttggccgcggcgtggcttccatgtctctccatcgacgatatctctc

SEQ ID NO: 132835 - DNA, 278 bp, Zea Mays
cacatcaaggttgagtgagctcatcgcactagctgaggcaggattacgtgctcaagaggaggaggacgagtttatgtctcaagccactgaagaggtagaggcggcttattacaagaagaagtctgatgaggctgaggttgaggatgagctattctctcaagctgtagatgaagcagaagccaattattacaagagaactgctgacaactgtgatgcaggacaatgcagcaagtggaacgaggttgttgttgaggattgcgcgacggatgactccgaag

SEQ ID NO: 132836 - DNA, 499 bp, Zea Mays
ctcggccctagggaggaaggcgccctctaggccgtccattccggattgggtggcggtgattagatctagggttggtgcacccctggccgtgcgatcaactatggacggctaggattggatgagtcgctgacctgttagagtatgaaatcttggttgccggattgtgatcggagggtaggcatagcgtaccagttcacttaagcttggatctgatctggaccatggatttctaaccggacgatcgtaaaaccccgatactccttcggccacgtgttttcacaaaagagcccctgtgcttcataagatttaacccgccgtacacgctttggcactgtgtctggtgtttcttgcgtagagacccccaggtttctctgtttttatgcgcgcagaccagaggtagtgaaattcattttagaaatgatttttaatgtaaaaataattactacaacttgtatattccctagaaaattcatattgagttcaaattgatccattccag

SEQ ID NO: 132837 - DNA, 460 bp, Zea Mays
ggcctgaacaacccaccacaatccacgcgagtacaagctctagcgtctggtgtcaacgcgtgtgcggccatcagggctacaacaacacaacaagccttcgtaataagcgcaacaggcgcagttatggctcggtaattggggtacacgataaatccacgcaacgtgcgcaacaggcgcaattgtggctcgcgtcagacagacagtgcctacagggtatgaaaaaattacacgactcagcgatggcggtctgactcaacgagagctatccgattaatggagagtgcgacatagcaatcacatgacgcagccaatgcatagttgatgccataactcagccgattaataacgcagtctgatcgacatgtccgagtacccactatatcatttaatcgctcgacgtgagcccaaaagctcaatgcaacacaaatatttagagcgatttgagtatacacaatataac

SEQ ID NO: 132838 - DNA, 279 bp, Zea Mays
acctcccctgcacggggaggttttcaaagcctataaatataagtagcagcacgatggctgacatccacacatatacatatccacacatatacattaatgcctaaataaccacataaacatcttttgtgcaattaaaagacttacctaatgcatgcaaagtgaccactaaaaacctaactctatttcacaatacacaatcacacacaaaaaacctaactctatttcacaacaatcaaacatttatttgacaatatttagcaactaaaatctcaaaatgag

SEQ ID NO: 132839 - DNA, 670 bp, Zea Mays
gcagagagacaaccattggtgtttatcaagatgaagctagcaaatgctaggaaggagcttgaggacatgagagcagacattaaaaaatccaaggatgatgttaggaaactttggaatgtcgcagctacatttcgggctgatatagatagggaggaggcaggtctactagcattagagcacaaagagcaccttgcttcgatttctgtatcatctcaccaggaagagctaagcaacattacatatgagctcaacatcatccatgaaagaacaaaagcaactaagatgcctatagagctacaacaagcaactgaagttgtggaacaagcaaaagctaaggctttgatggcccattatgaggtggcaaaagctagggaagatgcagatcaagttaagtcacaattaaatgtcattaaattgagactagaagcggcgtcaagggagatacttgcagtgaatgcatctaaagaaattgcaaccacctcagcaaatgcattgcaagaatacaaagatgaagcacatatagagccccaagatgagcagataagaaataactatatgacattatcacttgaagagtatgacgccttgagcaagaaatcccaagatgctgaacgcctcgctaagaagcgagtcatcaaggctattgagaaaatcaaagaagccaaggatg

SEQ ID NO: 132840 - DNA, 277 bp, Zea Mays
gtgttgttgaggtgtaggtgatggttgaggtgaaacatggttagcagcggcgacggaactagattttggtatagagttcaggaaggaactgaggtacaaaactaggtttcgggataaagtcaaagaaggaactgaggcccttagtcgaggatgttgtatgagatgttttggttgaagcatcattgcatatcgtgattgtgtgcgttggagtgggcttggcccatgcgacacctagcctagtcgatacaacgacatgggagacctaagaggggtgcag

SEQ ID NO: 132841 - DNA, 397 bp, Zea Mays
acgagggtggctttcaagctgcagaaagacatgtaagccatagttactatttttgttattgttcattgaatgtctgaaactctctaaatgttgctataatcgcaggtttcattacatggcattggctgacgacaggcagagaattatgccaatgcccaatgaccggttgcctcctcgaggacaaccattagcgtaccctgaggctgtgctccttgtggacccaatcaaccctgaacttagaggggaggtaagcttccctgacagagataaatataatacatgtatgttatccattgtaagtgtctgagtgcattctgaatctgaatgttgcttataatgtttgtcaaggttgacgacaagtaccagtactcttgcgaagaccagtacaacaatgtcc

SEQ ID NO: 132842 - DNA, 493 bp, Zea Mays
gccagccaagatttccacagcttctcgcacctctcaaacaaagtcatacaagtggagagggcaagggaagaagaaaaagtcacctcaagaggaaattccaagtcctccgagctcagcagcaagaccagcaccagataactcgatcctttgggtttccacccaagggaccaagctacaacaagccagctggacccactccatcacatttcagtcagcagagtcagagctcttttcaggccccctcagtcgcaagcatcctaccactagctaatgcctgttggcactgtggagaccccagtcacttcaagaataactgcccccagttgaaggcatcaggacctacttactccaactcggtgaatggccccaagaatgccccagcgcccgcctccaaggcaccctcctccatcatccagcagaacaagatccagtatcatggcaaggcacgagtaaaccacgtcgatgctcaagaggctcagcaagctccgggagt

SEQ ID NO: 132843 - DNA, 467 bp, Zea Mays
acagaatgtttgaagtctctgtagttctgcagggtgtggcgcatgtccttgtggtacagacactgggagtcgaggatttcatccagtgtacacactccttcacgaggtgcgccatgggctcgagtggcaggtagcccagtggtgtgcacctcctcgcgaggccttttctcctagggcttgtccggctactggttcatgtcccgctgtggcgcggattttgtgcctccgatgaggtcctcggcccgctcatccatagtaatgtagatgtccgcctcctagaacaattgtttggaggtggctggcaccttttggagtatggctcggacgaaggctgagtcattggatccccgatagaagtcttcaattacggccgcctcagcgacttcagggatgcggttcctcattatttgaaatcttttgaggaacgatcgaagggtctcatcattttgacgcctgatggatttgag

SEQ ID NO: 132844 - DNA, 447 bp, Zea Mays
atagagatagattcgatggaatttagcttttaaactgctacgtggtgcttgcaaaaaaacaaaagaaaacaaaaatggcatgtcctggagctcgggtacatgaacttttacattcttctttgaaaaaacaaacacaacgtgaataagtgtctgatgtgaaaccagacgtactctaatacatgcagaattgtacgtaggacgtggtagaagtttggtcaataatatgttactgccaacgagcagcagcaacccagattaaaggaaatacatatacgtgggtggtgcttgttcgtcactttagtaaaacagggtattttcgatggttaaagccctcagacataagttatttccgacggacggtcgtaggcttatgttcgatggtacccgtccctctgtcgtaaagcgtcaaaaatactcttatttctgacggtggccgttggacataag

SEQ ID NO: 132845 - DNA, 570 bp, Zea Mays
tgttttgtggtgctttgaggtgaggtgttggatcttcttatacattcatctggtgtggatgtttccccattgaattaaaattaattgttgatgcttgtaagggttgtgcttagtgcatattaccccttcataaaagagtgttgttttaggacattgatgttgatgtatagctgcaaccaaattcgatggtgtgaaatcgtagtgttgattgcatctatgacttgctttgagcttcattgtatgttgtttcatgctgaatatcaagttgtgtagtttccttagacaattagtccgaggtagaagttcttgtgttaattaagactaataatggacccatgttttgaatggtggtgctatatggggtaccttggatgctttgcttggagtggtcgaattcgaggatgaattctttttaaggggggtagagtgtgataacccaattttctgaaaagaagttaagcttctttttctcttttctttcatgttcagtggcattggggtttggagtttcaggaggcattcctcaggaaacagtagatcttttggcattttttattccgctggggtcgg

SEQ ID NO: 132846 - DNA, 824 bp, Zea Mays
tctagatatggcagcagtgagataatctagggtttgcaaacgacttgagaaggtgaagcggcgactacgaatgtgcgtgggaagacaaatgactcatgaaagtataaggaccatgaggtgtttccatttataagcgttgtggaaaattaagcgttgtggagctttttatcgacaagccaaaaaaaagtcgaagcgatgcgatttttcagaatctgaagcacacattcgaagtaattgagttcttaatagtaaaatgttgagtctatagactcgggggttgcaccatagaattaaggactcggcggaagggagagcaactcagatacaacaaagacaagccatgtgaaaagatataccaagggtactattaaagatataccaagggtcaaataagtctcaaaggcaactattaaagatataccaagggtatcgaaaccaaacaatatagcggatggcctccctccccaccggctctctcccccacggcgaccgcgctccccccgccgccgcatccgcccgatctgccgctgtcccatcgtcctcggcagatcccacccccaggaagctagatcccacccagcgtactcccctagcaccgctagctcggcctcccatgcccctgcccccgctgccgccgcctccacctgccagcctaccccaggtccttcactcctccaagcgcgttcgctttgcattgactgcgagcggcgcgccagacgtcactcatctctcctcccccaaatccaccagcaaatccagtcgctttgatgtctccaccgatcctccgacaactcatggctgcgaccgcattgaagacgaagctc

SEQ ID NO: 132847 - DNA, 584 bp, Zea Mays
ttccaaattcaataaatacaatatgaaccaaatgtcgattcataacatatatatgtgcgagcaaaaaaaacatcaagtgggatagatccggtgttgattttacctttttatgtgacaaaacttttgttcacgggcgcaatgcatcgactacggacccaaagacgaaacccgtgtaatgcagtcgcttcaaggagggttgagggagtatgagaagggggacaacaacggcaatagtggcgcacgtcgacagcggattggggtgaaccgagatgcgactgtcgtctgttggctgcagcagcagtgcgtcgccggccgagggttggtggagaaccaggaggcggctgacgtcgtacggcggcagcaacggtgagcatcggcaggaatcatgtgtccgccgcgggttggggatgaaccgggaacgggctatcggggacggatgcagccgcgatgcgcatcggccaaggcgcacgccggctgctggttgaggatgaatccggcggcggtagtcttctacttaggttttggtgaacgatgaggcgcgacggattggtatggagcatgcgaggtcacatcgtgcaagcttc

SEQ ID NO: 132848 - DNA, 455 bp, Zea Mays
ggcttgataggttcttttgcaatccagagtgggagaagttttttgacaactatgggctgcaagctctttcatcttcagtctctgaccactgcccgctgcttctatctaataatgctaggctgaggcgtccgcgctccttcaaatttgagaatttttggacggttttaccgagtttcaagcaggtggtggagcacgcttggtcgaagccgaccaagcatcatgaaccttttcataggttgtattataaactccagagcacagctcgtgcagttaggggatggagctccatgcttgttcctgattctaggttgttcatgcatatggccatggaagttctccttaggctagacctagcataagaaaataggcggttgtcggacttcgagtcaagtctccgaagcagactggagatgcgtatccttggctatgatgttattgaaagggcacgaaaaagg

SEQ ID NO: 132849 - DNA, 411 bp, Zea Mays
caaggtcagggactaaagcataaagcttacgcagactcagaactcccctgctaggactgcgggtttatttttcagaaagcagagggctccattgcaaaactgatctcggactcctataccaggacacatggctccccgcgactcgctgaaatcatgccacaccctggtgcacaaggtgaggcacacgggatccgatccacacaagatccccaccaccgcccgcacgtgcatataagtgggatcacccccggaccgtcagatcgacaatcaatggcccagatctaaagtgtcgaagggatattagttgatataatcacaaccgtccattagaagatccacggcggcgatttttccagcccaggatctaatcaccgccacactattaaaaatctatggttctcaacctttctt

SEQ ID NO: 132850 - DNA, 445 bp, Zea Mays
atcgacacgagcaccaccggctttatactaagaaaacacccctaattccattgatcagctagctaggtaggtagacgagtgagggtcgagctatataaggtagactaattaagtgggcaactaacatgtactgtgtactaggggagtagggacgcattagtttactttactgggcctgattgccgcaggatatggatgctcggttgcctagcttgtttatgcatgcgcgcgtacgtaacgcgatagtttttgtcctgacggcgcctgggtgttgtttaaagaccaagcaaggcattacaataatgcaggctgctttggggcgtgtgtgtgttatagcctgaccgattattatatatattggcgttgtcatgtactagtacgtagaaagagacgatggggaccatatgcaatgcaggcgcggcatctgcaggagacagtttccaac

SEQ ID NO: 132851 - DNA, 432 bp, Zea Mays
attgtacataacatcgctgtaatgaccccataagggggaatatttcggagctgtagcaggtaaccgggggtataacagtgcttaggtgggcacacccacctactcggttacctataaatacccccgcactgtacatggatgtgacacacttaacaagaagttacagttccctgcttactgttttgttgtgcacatgtgttcccccctctcaagtgtttgggcccgtctgaccacgtgccagtcagtcccaacatttggcgcccactgttcgtgctacgacaaaacaaacccatgatggccctcaagaaagcaacttccaaggccaccatccctctagacgcgatgcgaaggcggccctcactgagacaaaaaggcaagacaacccttgtcggcgatgcccctcaagatgcacccgaaaacgacagagcaatc

SEQ ID NO: 132852 - DNA, 518 bp, Zea Mays
gggaaatgagaaccaggggaactcgactgattgttctgggtgggggcaggagtgggatggatgaacatgggttgcctaaagggatatgtgggtggacaaggagaagaacggtttgggctgaagggaggaattatcaaccttgtccgcttctcataaccctgagatgatccttcacccacatatctttttgactttccttgtcccgaatttttggcttcaactgacagtgttgtgcttacaaccctgctataggtaagatctagacacgtagccattttgcgctggagtctatcattcaaccctctcatgaagcaaattttcttttttagatctatgtccattggtcaatagcatattgggagaggtgattaaacttgttgaggtactgcatcatggaatctcccccttgctttagacgtatgaactcctctagcttcatctgtagcaccccttccgaaacataatgttccctgaacacctgtttgaactcttctcacgtgagctgatgtcctgcaggc

SEQ ID NO: 132853 - DNA, 529 bp, Zea Mays
tgtttcttttttttctttgatccgtctgatccagtgtttctgctgcttgttctcgtggttcctcgttggctgtgtttcttgcgaagaacaatccagtaccctcctgccactatatatatgcagtggttggatcggagctcacgttcatctgcgccaaaaataaagcatgcgcgcggcgtctctctttgcttgggattcttgaccatatggtgctgttgcatcgcggtgatgggactgctattcatctggccacctctctggctctaccgttcatgacagcttgttctgtagtccttctctgcaacgatttttctgctcttttgttttcggactgtttcgtatcgatcgcgtctgctggagctgcatggtgcgtgttctttggttggctgtcgtttgagcgcaagctttttcagctttcagcagtagtttctctctctctctccctccctcttttcggatcttttgtgtttttgttttgaaactagctatggacctatatggtttctcgcactgtcaaattaaatctgtc

SEQ ID NO: 132854 - DNA, 350 bp, Zea Mays
acctaatttgattgctttgtcttctttaatatatatcatagaggagcaggttgagagccttaaggatgaggagttggtgcttgctatcagtcggtccacgtagttctgcaaacaatcgcttaaatctgtggcatggcggggctaaggatggattcttcaactatagagaccccgaacacttcatcgtcaattgctctaagatgaagggcaagcctgaggctagcaagggtgaccaccactctggtcagtgcaagggcaagtgcgactacacctctggcaagcacaagtccaaggggagtttgacaaggaggcgctcaagcagaagtacctccataaggccaagatcaaag

SEQ ID NO: 132855 - DNA, 507 bp, Zea Mays
gttggatgtactatcttatgtccgacggccgttggaagccgttggagataatggtatctccgatagcttgtatggaagctgtcggaaataactcagccgtctgatgttcagtgttttcctgttgtgggagagaaacatgcagcgtgcgtcggcgctggtaataaccctaaccctctgatcgatcagggaggcgtcagacggtagccgtcaaatcggtcgggtttcgaaaatctaggtgtacagacgtgcagtggaagtgtaacaaaaatcggttagtctctctgggtacgaaaaattatatgtatggacgctgcacaagtatgtacagcaacccgtacatgatagtagttctcttattatcttctttcgagcagaaaatcgttaccgctaaccagtagtttttagtctttaatcggtattgttaatcctaaggacacctccggcagtggcggtcttgacatttcagaggcctagaacaagttttaaagtagaggctcttctaatctt

SEQ ID NO: 132856 - DNA, 577 bp, Zea Mays
gctgactgacatacttccttgcttcagcgatagaaattccttcttcttaatcttcattaatccagctggtatatgataattccgaaactgtgtactgaactctgcccatgtgatagtgtcagcagcatcgtgggaagcagtgtatgaatcccaccaatcagcagcaggacctgtcagacgtccagaagcatataaaaccttctcccggtctgtgcactgagcaatgttcaacatcttctctacggacttcaaccaatcatccgcgtccagtggatcaggagaactagcaaatgtcggtggcttatgactcatgaactcccggtgcttatctcggggtggaactagtggttgtggtggaggcgtggtacttgttgttgttgatgttgttgcagctgctgttgcgccctcctttcctgacgtatctcttctcgttcttggcgcagctctcgacgtatatcctcccgctcttggcgcatctcctggcgttcctgctgcatctgagcacgcatatctgccatagtgtccgccatctgttgcatcatcctcatctgagctgcaaccagtgtgtcaactcctg

SEQ ID NO: 132857 - DNA, 289 bp, Zea Mays
cttcggggtagtttcctctccaccgaagcgaatcagctttttctcatcttcgctgaagtagcccgatttcaccatcttgggaagatcagccttggagatagtcgactttccaaagtccagatggctaggcttgctcggtactgagatattgtaatcatcgttagaatcagcctcctcaatatctccttgttctgcttcggcagcggcttgttctgcttcggcagcgggaacttcttccgatgtcaccaatccagatcgttgcattgcttccgagataggaacagtctcc

SEQ ID NO: 132858 - DNA, 867 bp, Zea Mays
gtgttttttaccatctgccatttctggactgagaggcaccaattaagagcaatcatttatcagtatgaaaaatcacactggccccatactaataattttattttctgacgcactaatttggtgaggatgatgcatgtctccatgtgtgttctgttctctctctttttttagcaaggattcttctctctgagaaaaaatcctggtgcatgctatcatgatgttcgatttgagcttcatttacgtccttttcttaccaaatttatactatctagctagagctttttatttttacgtgacatgtttagatgactattgccaattgcggtggtaaagcaaacaggcatatgtggcctgtcaatacgacattggtcaagtaaatggccacatcaatagaaaatatacatcgtggtgcataaaaattaattgaatggatgtattatcatatatttgtatcccatatttacgtctattttaaatatgaatgtgtaatcttttgtattccatattctactcagatgtagtggttatgatacgagtgttgggtacccaccggcaagtctacttgtatctatcttttgatgaaagttgttgtggttatttttaatttttgtagtggttatgatatgagtggattaaaacactgtgttgtttaagatcatgtaaaatttatatatatctaatttagatcgagaagtctcatgttatgatatgttgtttgatttacggagtcgtgtcatgtgtataaattttatgctttgtttgatttgcggtatcacatagataacgattccacatgtttcctcgtagcatcgcacggacataaacttatttgtacataattatcgtggtattgtaggttcctgttgc

SEQ ID NO: 132859 - DNA, 444 bp, Zea Mays
ctgggacatcgtaggtggacacgcagaaatcatccataccgaaagaatgttgatgcatttgatgggagtattgaaaataaaaggctccatcacgcaggcctggacatgtggtttatgagagtgtgaaggacattgaaaataagttcgggaaacacaatttagcattgtctggaatttggaagaaaaaatccatattttggaggttaccttattggcgcgatctaagtgtgcgtcattgtcttgatcttatgcatattgagaagaatgtgtgtgaagctttgattggtacaatttttaacataaaagggaaaactaaggacaacaccaacgcccagtgtgaccttgatgagctgaacattgaaaaaccccaggaatggtatactctgaccaaggaggaaaaaattaaagtttttgatctgttacatgatgtgaaagttccatctg

SEQ ID NO: 132860 - DNA, 340 bp, Zea Mays
gttccgccacaactggtatcggagcaaattccaccacacagaaggacaataaaccatgaatatcattttcaaaatttaaaacttgcctagaaactgctacggatcgtcaggactagaccgctagacctaggacgaaaggccttaggcatagagggggaaataggtggctaattaagtaggccccgtgggccagtacttagactttttaaggatgccctaagagcaccctattatttggagaggagacgttacttccagcatgcatgcattatatacacaaaagggaattaaaacttgagctaacccacttcctttaaaaaccatctgggctcttttattt

SEQ ID NO: 132861 - DNA, 426 bp, Zea Mays
gggggccaaaatgttaaatcgatcaagttaagcataacatgaaaatgcgtatgttatgtgtcgaggattactggagggattaaaagaaccattggagctcttgctagtgtctttattgatagattgtatctttttttataagtaagggatcactagaagtaatgaattgagattaacatactctctacataccatatctattagacgaaagagagaagaaactttcaaatgatcaaatttaatacctaggtgacttatgggcacaaaactgcatcttatggatgtgagtgaatgctgaacaatatctgcaacccctcttccaagccctacggcccacagaagagaatacatacagatagaaaggtctgggctgcgcctccctcaaaatataggtaatgtctatttcaattgaagcttgaaactctt

SEQ ID NO: 132862 - DNA, 430 bp, Zea Mays
aaaagcgaaagcacccaggccgaagaggcaaagaattgttactgtgatagaagtcattgaagcaacaccaccaagggtttcagctccgaaggtgccggctattgaaatcatgacatctactgaagctgtaccttcagaggccgccgcagaagaggccagagccgaatatgccaaatccgaagataataatttagagagcatagctgttgatatagacaaaatgctgctaaacatggtcgcggaagaagctgccgcagccaccaaagagactacggccgcaaaacccgtaaaggaagagatgaccgaagatacttcggaggatgaaacttttgactttcaaaacttagttggccaagagtttacaaaagctgagaaagaggaattaaaagaatatgctatatcctgctggtatcggccgggagcgcttctc

SEQ ID NO: 132863 - DNA, 310 bp, Zea Mays
aaatcatgcaaccagagccacaatcatttgcatctccagtcccagacctccccttaggtctctcaccatcaagctccttacctctacctgaaatgggtagtaatgaacctctctttgaacatgttgatttacccattgcacaatgtagagatcatatagtcaatgctggaaaacctccatctctctttggttttgagcacgatataactaactacatgtcatactgtcatgtgtcacctgcatatagaaccttcattgcatctttgcaaacaatgtccattctgaaagactggagatgtgcaaaactgaa

SEQ ID NO: 132864 - DNA, 334 bp, Zea Mays
cttatgtgcatatgctatcgaattgttctccaattttaaccaggactgacttatgaatgctacttgcttccaataattattgggctgcgataacgctcatataagacctctaatcgatcaacgagacatttatttatccaatgggaatggaatgcgatacttgaccaagcaaggcatcaatccgccatacaacagaaaccatgccgacacagatggacttttactagactcatcatgcgcataaccttgtctcgcatacaaccatatggtggcgtgcactcgagacacttcaatcaatgtggcgcgaccactaatatatgaactctgatactca

SEQ ID NO: 132865 - DNA, 493 bp, Zea Mays
cgaagatgagatgaggtggcggcaagtgtatgactgagatcatggtgcaccggcacgcaaccatgcaaccaggacaaagtgagcagttgcctctatgaatagcatggcaccacaccggttgctagggagaggtgacacgacacacggtgtcactcgccgcccaaggactaccaccatgaccacactcgagaagaacgccgggaggaccggggtacatgcggaatctcagtccttttcccccggttccagccaattcaatggccacctaacttcatggtctcgaacgtcgacaagtatgagcttaagcaagatccaggcagttcattggctgtctatacgaccactgcccaggccactagagcaatagaggatgtcatgatagtgtactttcccattgttcttgagcaagatgcgctgcagtggctccgacaccttcctcgccatttcattgacgactaggacgacttctgccactggtttgttacgaatttcc

SEQ ID NO: 132866 - DNA, 550 bp, Zea Mays
aaaaaatggtggtttcatattcatccagttcaggggcaactaaagaatgctaaattgcctctacatatgaatgtgtgatgcaacagtacaccggccatggcgtttttggacgtcttggaaggtaatctgctacaaacctacaagtctacaactggatgggggatgcctctgcctcccattccggccagccgcagccggtgctccgctgttccgctgtctcctccctgatgcagtcgccccacgcgcaggccctcgccgcctcattgcgtgtcacctcgaacttctcgccgtcgccccagagagcccttcccgtgcgccgcgtcgtcgctcgcggatcttgagctggtagtcgggcatgcgcagcgggcagcggcacgaagatgccaacgacgaggatgatacccgtggtgaccacgacgttccaagcgacgatgaagagggcgcacacgcacccggaaggtggaggtggagggccatgaagaaaacccagtgtgcggaggaggccctcgaggacatcgacgacgacgtggaggtggagcccggcgacggc

SEQ ID NO: 132867 - DNA, 417 bp, Zea Mays
aaaactatcaaacaaaagatacgaattctgaatggaagcacaaaaatctgcaatttggtgtacacatgaactagcagcggacccacatgtcttagagttagacacatggaatcatcttcctcccttgacttctacacgcacagcagtagggaaggggagctcgaacctgagacatggaggggcttgcgcgtgagcagggatggccgtgccgaggggatgctgctcgcttggggactgctggagctcgacgtggatgagcatggagccgacctggcagaggccaagcaccatgggggagagggtcgcctgcccttgctgctggattccaaggggaacagggaaccggccatggagaaaaaaaactttcgtgcgtcacagagggagagagcagggagaaggcgccatggaaaaggggag

SEQ ID NO: 132868 - DNA, 290 bp, Zea Mays
ctcgagacacttcaagcaatgtggcgcgaccactaatataaatgaactccgacactcatgtcttaacgatacatcctccacacaaacgagcattttctaaactactcgtcacatcaacaattataactcctacataatcacgaatcccatcacattgcatagaatttgcacttcaatcacgacttaattgcacgcctcatacttgtttattttaaaactcttcgcctaaccaatacactacattctgcctacataggatctttttaacacactcgacgtatacacttaat

SEQ ID NO: 132869 - DNA, 485 bp, Zea Mays
cacaacatcaccctttttcatccctcctcattcttcatcttcctcaagacggcgtgcttcctcctaccaccgccgacgagctactcgcccgcagcatgactctacatcatggtcgtactattataaagcactagtttcgacagttgtcatgcgttattttttacaaaaatcccttacatttattttaaaaccaacctgtggtccccatatcagatcacatctcgcacatcgcacgctatagtttgacctcacccatacctatcctgctccgcttcatttggggccgcatagccaccacctcttccattcctttagctaaccctagcgtcgcctcgcagcccgtcgcgcctcctctcccgaccaaaattcgctggttcctttttcctattctatcccatcacggtgtcaccctttttcatccgtccccttctttctcttcctctatacggcgtgtttcctcctgccgccgccgacgagctgctcgc

SEQ ID NO: 132870 - DNA, 411 bp, Zea Mays
tgcactcgttgtgtctaagaaaaaaaattgttgtttggtgtctagttgcacaaaccctatcaaggccatgtttcttccatagatcctgtcccgaatcttcataacctttctgatgctcatcctaatcgatctcatgcgactacctctcttttcgcctggatctagtaacctttacctttgtgaatcatgttggctttatcatctgaatctctggatcccttaatgattctgctccgttatctggttatctgctataacctgttctcatgtatcaaatgtgaatcagtctaatatatcattatgatcgttctcatactcttctctgtggatcatgacgttgttttattgattctatctctaagcggtgtgtccattcggttcaatggattatgttgttgtctttagttctct

SEQ ID NO: 132871 - DNA, 545 bp, Zea Mays
gtcgtcttgctagagggctgcattgttggggtaccattgatagggttgcctttagatggatgtactgcaggggtaacactaacatgattgctgccaagcaagttttcaccctcatcagagatttcatcctccacataagcttcatcttcatgaaactgagcaatattatgtgtttgatcaatatgttgtccagacctcgtgtcctaaaataaatatgagggtaataagtaataaatattccatagatttcaaaatgactcaagatgtttagctactttaccggatggtgtcgtgtattagaaccatcatgcgagatgatttccacatctcccatttcatgagccatcctttggtcctgcattttctcctccatttctgctatgcgttgttctagagcagctttctcatgtttaacctttttgcgggctaggacttccatttggagtcttgtgggtgtgtaacttctcaagcccggggtaccaatatcttggggagttggtcctagacccaaaactcggacatgtcctcttggctctttctctcca

SEQ ID NO: 132872 - DNA, 1010 bp, Zea Mays
atgcaaacacatacacccccacaacatttgaatatcgttaaattgaaaaagtaagtgtagaaatccattgggccccacctgcagaagaagggcgtcattgttcatacaaggaaacacatgttaaccttgccaagataataagattgcgaaatgaaggaaatttaaaataaaaaaacgtggatttccagaagcgcgtactgacaactgcccctacccacgaaagacaaacgtctcgtgcacccggatcggagcccacgtatccccatagcccaccaccaccacacgcctcctcacaccgggcccactactttctcgtcctcacacgtcagtgacacaagccaataccccatgtccatgaccccctgcccccaccccagcctacgatctctcacagagtcacagtcactgttcacacaacagctgctagtagccgtagcccgtaggcgagccagaggcggcccaattcgagagcggttccggcggcgtgggcggcgccgtgcctgagatcggagccccgtggcgcggtgctggcaactggcggcgcgatgtgggcggtccacgggagggagtccacggccgctgcgcttcgcctgctgctgatcgcgatcgcctgcggcctcgtcttcgcgctcctccacctccccctcccggatgaccgtgcgcgaaccgccgaccccggtgagtcccgcgacttgcctcctcgcgtcgcggagaacccctcgcgcctgatttggttgggacctgggagcgcggggttcagtggcgcgcttgcgcttgcgcttggtgtggtgtgtgtgtgttctgcgggttttttttttttttttttttttttgcctttgctgatagctatgggaacctgctttgcgtgcaggtgggcagcgcggcgctgctgggggcggcggggcccgcctgtcggtgcagcaggtgagagtgagaccgtcccaggcgatcctgatcctggtcctttcctcctcccgttatgtcgatcccattctgaatttggtgcttgt

SEQ ID NO: 132873 - DNA, 681 bp, Zea Mays
cttattgctccgtactttaacaaaatattattgtgtagaatccattaataacttattactttatcttttgtatagccaaataatattctaaggactagtaggttaaacatttagggtttggttcccagccacaacacaccatgcctaaactgtggtacgccacaaaaacagaatttgatgtttggtcgataatgttactaaccttgaattacagagagaataattagtgcttaggacttggttgaatatataggtacaggtaatatgggccacatgggccttaatagataagactaatgaggcagccacataagattgctcagtgcaaatcatgttttacagtaccacatttactgttttatcaagaaatccggaaagaccggtgttatgtcctgacaagtgggcctcaacactcggaggcggacgaatgacacaatgaacgacaaaacgttaggtaggggaactatattgtctcgttgtgtgtgtcctgtccaactacaggacgggtttatagggcaaccgagggttggtggcccaaaatacattcattcccccggttacctactacatacttggaatattacgcgcaacggggtaattacagcgtggtgcccaaatgtctacccactgattgcactgaccggtggggcctccggggcggcccacagtggattgaaggcc

SEQ ID NO: 132874 - DNA, 333 bp, Zea Mays
cgccgccctcatcccgccacaactcctctacatttttgcagcagatgaggatgatcagcagctggcggggagctgatgaggatgatgcggtccgatcttccgatagagacaatctctactactctataagaacgtaacgtagacagtggtgcacggttctatctcctcagagcgcatacgacccacatgctggtgtctctcttcttccccgtgcacgccctctcctctctacccctgcatccgcatggccctcgctgcaatcccctcaccgattaatgcctcagccatggaagaaaaaaactcgtcaccgctacagaaggaaacacatccccc

SEQ ID NO: 132875 - DNA, 370 bp, Zea Mays
ctgatcgaacggatcttctattctgggcaaggggtacttgttcttgattctgacttcattcagagcttgataatcgatgcacatcctcctagtgccatccttcttctccacgaacaagacaggggcggcccaaggtgaggtacttggtctgatgtaacctttctctgacagctcatctatttgcttcttgagctcaaccaactctggtttagataccttgtaggctcttttagaaatgggggcggtgccaggaataagccctatggcaaactcaacttttcgctcaggtggcatgcctggtaaatcttttgggaacacatccagaaattctgacacaaccttgatagtctcgagtggatctgcctccttg

SEQ ID NO: 132876 - DNA, 471 bp, Zea Mays
agttgattgaagcggcttctttaataatttgggacgaagcattcatgacacatagaaatgcttttgaagccctagatcgttcccttcgtgatttactttctttgaaatctgctcaatctgctaccattccttttgggggtaaggtcatcgtactaggaggtgatcctagacagatattacctgtgatagaaggtggcaatcgtgcacaaattataaatgctgctataaccaattcgccactttggaattcagtcacagtcctacatcttacacaaaacatgagacttcgttcaacggatttaacagatagcgaaaaaactgaacttgcagattttagtgcatggatcttaaatattggcaacgacaatataccagctatacaaaaaccaggagaaatggagcccacatggatacaaattccttctgaattcctcttactgccccaagaagatcatatttcagctttaattg

SEQ ID NO: 132877 - DNA, 329 bp, Zea Mays
tccttttctcgcccgcttccagcagtcggccaatctctctgacagttgggtctgcttgtcagttcgtcttaccagggaaccctgcgactcagtcagcctccacgctcgcgatgttgtcgcggtcacccacctgacgggcccactggtcagctccacactcggtcatgcgagtcactgcttagtgggccaaccgacactgttgatcttctccctcttccgcgcgtaacaacccgacgccttcaccgcagattccgccgtagctcctgcatgcccacctgcttagtctcagccagagtataaagtcatccgtctccatctcctttgccacc

SEQ ID NO: 132878 - DNA, 887 bp, Zea Mays
caaccggtgatcaccggaggaagcgccacggtggaagccacccatcccttgctccagtgtccatgttccctctccgaccgccagcaccccttgaccaaattcgtccccagcgctcgatgcgcctataaattgcatgcgccattcactccgtagggtagtaagctaaccagccaccccggatcagccgcaacccttcgctagaatccacgaattttgaattcgccccaaatcagtctccgccgccgtgaagaacagctcgctgcggccagctcgattccggttagctcgcgtccctctgtttcttgttctagcatccataagcaccctgcgaacccctcgacccattcgatgcaactggaccaccacccatcgccaggaacatcctcatccatccgcaaccttcatggtcaccgtggccagcacaaccctgttgatcattagtgaaattaagttgggggaaaggtttgggatgagtccaattccgtgtccgtcgctcgggaaccctagtcgttgccctatcccaccggtctaggagctcgccggacttcggccgcgctcgacgccgtcgtggactcagcacagtgaaggattagaacttggaggggttttctgtagtatgtcagagactcagtgaaatagtgatagaacccagttatggttagccaagaaaccgaggtccttttcgcaaaactgccagagcagcgcgggcgcgcgcatgagcgcacttctgccctaactgggccgacgcaggccagttttgagcccacgactgttgaagtgtttttcttttatctccagagccaaaacaattatcaaaaacagtagaaaaatcctaaaaatatgaaaccaattttcttagaaccctaatttcctgtagtatttaataa

SEQ ID NO: 132879 - DNA, 362 bp, Zea Mays
aaataaagttagtccactaaatacgtcacctcatataggagccaaatcctctttatataatttgccgactgccaactcaaatttgcatagtgacaagcatggactgtctagtttctgttatgctgacatggagcaacgttctgatggatgtgaccggaacacagcgaagaaagcaagaatgtgactttttgctacaaataatgcaaggtaatgggcgccatgaaacttgcagcctttgagttgtgtcattctagctcatacgttccttgtacttttagattaataggcagttattggtgtgtttggttgcaaagttaggatagtcgggacagtcgtactccggcgtcttttctcgttcgtcc

SEQ ID NO: 132880 - DNA, 319 bp, Zea Mays
agattacgcagcaaaggaccccgcacttatgcagtacctcgtggttatccacagtctcgagagacaattcaaaggcttcaccttgcagcatgtggaccgcaccaagaatgaggaggccgacgcgttggccaaagcagccgccaggggcgagaccctaccctcggacgtattctaccatgtcatcagcacaccagccgtccgcagcccagagggcctacaaataaccaacaacaccgagggccaccgcatagtcaacctcattatgaccgaagattggcgggcaccaataaccctgttcctgcaaggatactaccatcca

SEQ ID NO: 132881 - DNA, 470 bp, Zea Mays
ggcaaccaaggcactaacttcttcagcagagggtcgcactctaagacccaaactgccatcagtgacaggtggattcgacacaaaaagggtaaaggctttgggaggaggcaggttccaggtcgagtatgccactggagcaccaacatttgacactttgcccctaaggatcatctcaagtcagctcaccaaatcggcaggtggaattctcctgttggtaacccgagttgagtcggctagccctcgatacagataagctgggtatgccctgtctttcaatggctgaatattcttgaagacaaaatcagcaaccacagcttcagcagtcagacccctctctttcagcaatccaacctcagctaacaacgcacctgcctcagctacttcttgatctgtgggagactcggtctagcttggggtgcgaacatccggctgtcttcccgaccgggaggggagagaattcccgtaattct

SEQ ID NO: 132882 - DNA, 617 bp, Zea Mays
tgtttatattatagaaaaggacataggaaagaaatgagtaaaaaagaaggaaacgaatccttttagttacttgctgttcgatttactaccatgtccttctattccacatctaggatatgttgtccttttttttccacagccccctcgcatatgtctcaccacattttctacaaatttgggtttagggtttatggtacagaaaaggtatgtttttttacaccatcaagtttttgattctttgtcactttaaattgctattgatgtgtaaaaaagagttgcttatatgttctacataaattgctagaatcctttgtggctacaaaagaattgaatcaattgattatatgttcgttgatgaggtaaactaaaattagttttaagctgcttccattcgcactagttgtccgctatatggcgcgtagtgattttatagttacctttcttgaactgagtttaaatgcttcggtcttataggtactgtttgtttctggtcttttatcgaagcacgtggagtgatacctctgcacctcagtggctttatcggcgaggctttgttgctgaggtaattagcattattttttatctactttccttcgtgatgattgttcactaataga

SEQ ID NO: 132883 - DNA, 1482 bp, Zea Mays
tcactggtacgcactggtatggtgggggtttaaatgctaaaattagcaactacgattggatcacaatctaaaagccattgtctcaaggtaacgacggttacacaagcaaatcttaggtgcaagtatgtgagcctcctggattttaaatcatgatccaatcatccaaccaaagtcgtacgtacttaaacctcccatcataccagggcataccagtgtcatgtctggactaatagcgagctagtgaagggtttaagtgttaaatgtgtaactaaggttggtgagggtttaagtgctatatgtataactatggttggaatacgtgaagggccatgagacacgcacctaataaggcttgcttgctgcgtatatgaacaaaccagaaaagagcatccaaaatatcatccccacgcgagctcaggttactcttgtcccaaatagacgggcaaagaactcccgtaagtagtagtaactgtacgggtaaccgctaaccaagattgaaccagtttctccaggacaggatggcggggtttgttctagtcctttctccgttgataacaatggcggtgtctacctgtattccagtcgtccatggtagtcagagcgttgcatcacagcagctttgaccatcaccaattggcatgataagaaatgcagaaagaggtgcgacgacggttgagaactcgagatacttggagtgccatcgactatataaggcagcataagacccagaagaatagaggaagaacgggcattcatcaccgtgagatgcagctctcagttccaccctgactgactgatgaaaataatcaagctgagactttgataactgtaataacaagagcttaagaagaaataagaatcaccatccagtgacgtaccagtagaggacggctcaaaataaggtcgagttgttatgaaagagggatcctgagcatcaatctccaagtggcgtgttgtgctaatcttttgaagacctgttgattcgacaagctttactaatttgtccgttatgattgtcatgggcgggcggagatctggtgattgctgcattgtggaagaaatatcataagtaattgtaacttctgttaatgttttagttggtgaacatttacatcattagaattgctgcaagaatatattttttgttaaaggatagagatttcctccttgattacagggctacgtccttgattcttcccttgattttgataacagggctgcgcccctgccttattcttctccttgactatagggttgtgcccctgattcttctctgtaaccatctgtgatgtacaccattgatctatatattcacacgacagccactcctataggtgtggattatttcatctaacatggtaccagagtcaaggttcttttaaaccaccacctcctccacccgatcctttcccaccaccaccatggcatccatcgattcctctcccaccaccatggcaacgatctccatcattcctctacacc

SEQ ID NO: 132884 - DNA, 1688 bp, Zea Mays
ataaaagcatcaccgagacacatacagtatgccagctgactaactgggttggagcctagcttcgagctgagcatacccaccaccagttggagctttcttgagagagcatttgagagttcgagcactagctagcttgtaggggatgaagcaagcaaggcgtgggagtaacaagctgaagcaatggagcagagcggcgccggcgctgtggctcctgctgcctcttctagttttgatggtgctcaagacaaatctcctgccagtgcttgcacgatgtaagtctcaccgcatcatatcaaggttggacagaaaagatgtgtcagtttttgcttaatttgttacttgtttcactcccgtcgttaccatttcttttcaagaacacgcagttcattggaaacgcaccgtaagttgcgcttatatatatatagttaaagctagcgcagaccatctggttctgatatatgatcacagtgacacgcaattagaagcaactgtgtatatatactaggaatgatcaatttaattttgtccactttattttctcatacaaagcaaatagaatagtgatgttagcttcgcaaataagctaagagaccagatttcccaaagtcgtcataaatatccattcctcaatttgccgagctaagtttgtacacacagaacacttttgcatacttaatctcaattttgacacgactaatgtaatagttcacgtctttattcatggtatcaaaagcagccacttgcatagcgagttagaagcagctgtagaataatgtcaaaagatctggagagaagatggcaattatagcactgtagaataatgtatcaaaagcagctgtagaataatgtatcatcaaaagcagccatatataatcgtttaaaacgttattaccgtcctcaatgcaaaaactaaaatagattgataggaccggtacctatttgacctagtatgtaaaatggatcgattcactcatcaggtaataacgttttaaatcattatatatggttatcatcatacttattgagtgttcggtgtttaggatcatagcagtatagcactgtagaaggcagctaaccatgcaggtgcatgcatgctgactacggccggcattcttctagaaaagagtagcatttgcatggatcgaatattgttattaacatcagatctgaatatttaagataagtacttctgtgtcacaaaaactaaggcaggcctgcccgccacgggccacggtccaaaaggctaaggccggatgggcccatttctatccattactataattgcctcagtatctgctttataaaaaatgttattcttttatgttctatttggaaacaaagttttttttttgaaaaaccacagttttttaaataatacattataatttagtcatgacaataccacagtttaaaataatataattcgaaaactagggtcgagacctaagtttagaataccttaacacaaattcagtatgacagagattttagctacactatttgagaatactagagtatttttccacaatttcacccacaagcacccccttagtgatgtttaacttgtcttcctcgatacatgtattattaacaaacatatgtaccatgtggctttccattgaaatccagattcagtagtcgggtctccacatatcgcggcatcaacacgcggtgcgagtgtgaccagc

SEQ ID NO: 132885 - DNA, 903 bp, Zea Mays
cgcacaaccaaagtcattcctaaaagactctccgtgtagaagtcgcctatgggcgcggctgtatcaacgaaggcgcgcaaccttatcatacaaattatggttacatacacagcgagggcatcacatattacattggctcaaccttcagaatgatacccatctccctgtagttgaacagcattatcctcaattcctcaccctcaaaaagatttcgcagctccccttcacccacactagccccagccggcgaggacaacaattcccgtttaccagtcccgtccacgcgaagacgaccactctccatctcaccacaatgacgcctgccacttcgcgacaattcactcactctccgtttcgccaccacccttcgctgcctacacctagtactcacacccagaagatactcagcacccacctcacgcggcgaagtctccgccgcagccatgtctaatgctgcaaaataatccaagtcctcatctgaagactcctctgtccacgcaatcgaactcccagaatcatcagactcaaaacacttagacacagagccaaacgagtcgtcatcagcagccacggtcgaagccgccacaaaaatagcattgtcagtagcggttgcgtgcgtaggcccaaaccccagaacctgcgcagcaatcgaggttcagtatcacacagacaaaatttacaaactcctcaacacctattcagccacctgtgaaggcccggccacggctgtggggtcttcggctgccggctcggccaccaccctcaaggcgtcttcgcccgtcgacgcaggggctggtgcggggccttcgccggccgcagtgggcacaggggtcaccgaggtgccttcaccggcatccgagggcggcaccggattgacatctgtagcctcgggcagcacgccgt

SEQ ID NO: 132886 - DNA, 763 bp, Zea Mays
atcccctgtacggattcacagcgcaattctttttggtggtccgctatgaactgcaatcgagacgcctcaatcgtagaatacgcatcgacagctagttggttgcttagcctaccatagcaagtgaatgggttcggttcattgagcctatagtgtgaacgatgtctaacaaattcaagcatcgtaacatacttgcggcatgcgccatcaccttctcccacgtcagtgtattttattccaagatgatatccacgatcaccgtaagggaaaagcagcgggtactgcaaggccatgtaggacgggtgcaagcacgaaacatgtttgaggccaccgtctttagcgtgcacgagaacatcatacttgtattgtgaagataagcaatcacccactattatagcagcgagctcaccactggctggtaagttgtattgtgcgtcatgacgtgtgttacagcctaacaaccgcaacgtcaccttttggtcgccttcttcgtgtaaacgttctttagcaaagcgaaatgccgcgaccagcttgttatgctcatctagcatgttaagtaataaacgggccacctctggatccggacgatcatggacatcagcctcattctcaaacatgcccaacctattttgcacctcatgttcagtgtcatatatgtaaagctgcgcaaattgtgggcgcaatccatgactaggcagtagcgagccaatgcgatggtgtacgacgccattgattttgaaaacataaggtgcagtaccgttattta

SEQ ID NO: 132887 - DNA, 484 bp, Zea Mays
tccgtggattgcggcgcccccttcctgagctgatcctcccctgttagcaagccgcgtagcgcaccacctttacgctggggccatggccgccgggaacgcgagagataggaggtagagagagagaaccagagaaccggccgctgtcaccgtccttggcttacgccgccgtgtggtccgtggcatggtcgaggagggctgccagggcttgtgcaagcttttgtggcgtcgatggatggtgagcatcaccgttgtggacccaatttctcaccggcgatctctgctcgttgcggggccgccatgcgccgtggccgaagcttgcagctccgtgattctcggtgagtgttccctcattaggttcgcttaggttccggcattgcgtggggtctctggtttgggcgcgtggcgtaccaggtagttgatcatccctcgccggcgtgtgcgccgccacggtcttctccgatgccgccgtgtgcgtgctccagcg

SEQ ID NO: 132888 - DNA, 378 bp, Zea Mays
ctcttgtcgaggggagtttctgtttgtacccttgtttgtggcttgatgagtccatttatcaacaacggggagaaattctggattgatggggtctagagtattgggggagagattctggatttttgagaattctggatttttcttgtactcctatcaagggggtgaaatttgaaggaggaagaaattgagcttttgctagttgtattgagctatttgcctctttctggaggaactagctttgatttcatcttttatgctgattttgtgctccgatgggggttttgactgctggctagtggtgttgagcccttcttttgcctcatcttgaggactagcttctttcgcttggtcgtgttgaattgttgcccatttctttgt

SEQ ID NO: 132889 - DNA, 694 bp, Zea Mays
aacatttgagagaacgactggttaccttctcagagtgcttccttgggctgactccttgtgtagcgcctcctctttcctcttccccttcgcctttgtcctgccacccatgcgtgaggccacctgcctgcttgcttcattcatgtcgagacacttatttggcttagtggagtagatgtatgatgtgctgacaagctaagactttttcgccgtggatgattcctaggctcttggagatgcttatcaggtgcgtaatgacccactatagaggttttagtagcctgaagcttgttagtcatagcatcttggaagggcttgataattataactgtctaaaagagaatggtaatgaaaataagtgttgactagaaatataggacacgactattgtcctccatggtggtgcagacaaggtcttttattgataaaatctattttaaggtgtaatagacgttcttatatttcttcgattctggtggcataaggtaactttgttttattattcgctgacttgtttctctctctaaataggctacagttcattgttcaccgacctcacttttaattgaatttaggacaccaggtaccttgggccaataatactccatcgtgctggacatttcccatctcaaatattagttgtactgttgtaccactactggaactccactcggatctttctcagatgttaaaaccc

SEQ ID NO: 132890 - DNA, 362 bp, Zea Mays
cacagacccggatcgccagtcgtcgagtcgttgcctcgagcgtccctcttttctctctctgcaccgtgggccagccctgtcagctctgccttctccacgctcgccgtggaccggcgtgtgcgcactcgcgcacgtcgctgggtttctcagccacgacgcccaccctcatgtctagttcccttcttatagccctacctgtgccccatgcacacccctcacctcatttcgcacaccctcaccctctctcgcgctctgtcttcaccgccaaccaccgccagagacccgcgcctgcgtccccgaccatccagctcgctggagaccgctccaagcctccctgagctccgccccgaggtgagacaccc

SEQ ID NO: 132891 - DNA, 499 bp, Zea Mays
ctgatttggactgtttggggaccgctttgtgctatgtcggcaccgctagtgaggagactcgtatgcttattcaatcttccctcatggagagagtgcgtgcggctcagcagcaggatcgtttattgcaggaagctcaaaagagggttggcgatggtaaaccccgggagttctccattgatgagaatgatttggttcgttttaggggtcgcctttgtgtgcctcagaaatcagaggtgaagatggatatcttgagagaagctcataaaacgccttacaccgttcaccctggcgaaaccaaaatgtaccgagatctgaagcaaaacttctggtggaagcggatgaaggttgacgtttctaagtacatggccgcatgtgaagtatgtcagcacgtgaaggctgagcataagaggcctgcaggtttgctgaagccattggaaattccggagtggaagtgggagcatatcaccatggattttgtggtgggcttacctcgttctcc

SEQ ID NO: 132892 - DNA, 518 bp, Zea Mays
ctcggtaagcgcggcccgctgggaccgcagcgaatcccagatgtcgctctcgcggcggatgaacagcgacttggcggtgctcacgtccgcaagttcctaaggaaggaaaacaggatattacaaagaatgccctggtcacgcaaggtgtacatctaaatccttacttggaagatcctaggaacgtccctggaaaggatctccatggtcgaccgaagcgacctcatcgccgcctcggtatactcacggaaattatcccgagacctctcctccggctcatcattgagggagaggaggggttctgaatccgaggtggtgcggctccagaacaggagcggctgcccaccccactcattggggttgagctgcgcggggataaggccgctgctccccaagacgggccacgactctacgtgcccctcgactaaggcgtcgggtcccatgcagccgatgcatcaggtgccgtcgcagtcgacgtactgggcctccccttggctaaggtggcaggcctccgatcatcg

SEQ ID NO: 132893 - DNA, 897 bp, Zea Mays
gtaagagtgtgaccgtacgtcgtccggcattaattgtgccatgcagaggtaaagctatagcctcagcctatctttcccggccggaggaatccaaccaaaaggaatggcatccgtatatacgttcacgtggatagtagaccaatgggggcatgcatgcgatagcagcagggtgtgtgtactgcctgcgcgtactagtagttatggcactagcttggtcctagcgtgctagctggtagcaacctagctcctccatgtgcattgcgcgcaacagatgtatacataggaaaatattttattatctcatctcctattttaaactctacaatgctatctataaacaatgtcagctggttgacatccatcagtgttgtagctgttcggattactacaactgaaatccagagagacaaaacactgtagccgtagcggcagccagattaaagccccagcaagccacactgccacagcgaatatatctgtcaacattatatccttgtcaattgctatccaacatgcaggaagggtcaatattcccgaatgggcacacttgagctgttgctatcatcccttgtgtgatcccgtccagcagccatcgcaaatctcggaccatccgggacaagcagctaggatgcatgtccctcttgtaaagttgtaattgctcgttctactatatcgatgtctctgaacaaataaaaaaaaatcaagctgactgtttcccttctcaaccgtaccaaacagaaaacaaaatcatcccgttccactaatcaaagaaaggactgtcctatattaccttgtgtctcttaattaaacgctaccgaaaacgcccagtggcagacatagacaccggagttgaaaagaacatccttgtaagttgtaactaacacacactgcacacac

SEQ ID NO: 132894 - DNA, 425 bp, Zea Mays
ccgaaggcgcaaaaggatcttacaacgaccccaaatggaaaaggatggtcaacgtactagatgtactggaaaaaataaagacttcaagctctactccagggaaaacagccgaagcttcaaaaacgcgaattgaaacaaaacagactgaagctgaagctgcacaaagtcatgccgagaccgaagccgggccttcagagcccgccaaggagaaatccttggaaatcggagaagaaaaagcggaaaaggaatttgcagaacaaattctgtctgaaaaaactgccattcctattcctgaagcatcttccgaagctcttgattatattgtacgacatgcttcgggaaaaaggttatctacagaagaaaagcgagaagctcaatattatgcccagagattggaatatccaaaaggggcgttaatattcaac

SEQ ID NO: 132895 - DNA, 434 bp, Zea Mays
atcaaatgctcatgtcccctgtgaccttcgactgagacctgcctcggggttgccttccttgcccgatacgggctcgggcgaggcggagacggtagttctggggagagaggacctcggctgggacgaggattctactgagtatgtaccttgtcagagggcaggtccgggtgaggcagagttatgggtgaccgtcgagaagggcctcgggcgaattgtggtttataccttattgtcctctttgaatgtgcctggtggcaacctcgaggttaagcacgtttagggatgtaatccaggtacctctagttatgatacccgacaagtcatctcttgagttggatctttcagctagccttgagtcttgacttagaccagtgactacactgggcatgaaagaagaggagagaagaacgatgcagtccttaaataccctaatt

SEQ ID NO: 132896 - DNA, 395 bp, Zea Mays
tggtggctctcgtcttgtcaagcaaaaattggtcacatcatcatcaccatctcctacttgtgcaacgtcacaagttggtggctctcgtcttgtcaagcaaaaattggtcacatcatcatcaccatctcctacttgtgcaacgttagaagacgatggaacaaaatcctcgtttccggtaatagttgggtaaggagtaagtgtagctgtgccggtgtcaccaccaacaggccgaaaaaaatcgagttttcttttggttaaagattcttcactgtcacataaaagagtgtctttagatagtctccgctttctgttgtcttcaggctgcatgtaaacctgatcatccatggagtctttctgtgatgtattatcggtcgatacgtgttgcaaagaagaac

SEQ ID NO: 132897 - DNA, 396 bp, Zea Mays
ttgagtaagtcgatatgatcctggccgagtgacctccgctactacaaatgacccttcccatagtggtgaaaatttgtgccgtccttcccctgttgtaattcggtgaatgaccaagtctcccactacaaaggatcaatgtcgtatagcctctgcctcagctatgttttcaaagaccagccttggtgccccaaacctgaggtcagcaggtagcactgcctccgaaccatagaccatgaagaagggggtgtttccatgcagagctcgactgggttgagttcttaggctccaaaccacataaggtaattctccgatccacttccctgcgaacttttcattcttgtcgaagactttcttcctgagtgcttccagtatcattccattagccctttccacctg

SEQ ID NO: 132898 - DNA, 785 bp, Zea Mays
cggaaacatggagagcatccgctcggacatctgttgctggatggcttcctgtcaagcctgctctgttgccagacgagcctgctgctgcgttagtgactgaagaatcatggccagagtagggtcaatagctggaggggcagcaggagcagcactagaactacccgcctcgtgatcatgtgagcgaggtggcataggaggcggtggcgagatcccaaggccctcatcaacatctaaagaagtgtcatcctcggcaccctgggtgtcgaactgtataaaggtctcatcttcagcccgaacatctaatactggatctggcacagggactgggtcctcacgggctggacgataggaaccgaactgaaggcgagaggcctcaagggtgccgtggaactgaggaggcctaatcagctgcacaaagatgtgacagagatagtgagcatatggcagctgtcggcgagcacgaagaccatccaatattgtgtcctcgatctcacagataaggaagtcaaccacatcaaactctgaatgtgagaccaaagcaccaagtagccatagctgaatatgagtggtggcctctctgtatcccatcctgggtagaagtgtccatctcatcagctcatataagagcttcgctgcagtagtgaagtcagcaggagatcgtcacgatccatcggtaaaaggaggtcttgtaacatcccaaaatcccacccaaggtttgaaaccctaacctcataaatccccccttattttacctttccccttaaccctacccttagaaccccttc

SEQ ID NO: 132899 - DNA, 544 bp, Zea Mays
cggcggcgacatcactggtgttcaggcgatccggggatccgggctcgatactcgttaattcttcgcaaaagatggagaggaggtccaggcgaaccttatgggagggttccacattggtgacgaatgcggtgatggtccgtccacagcgcctcaaggcaccgcgacggtgagtaggagaaccggacgaatgagggggcagaatcgagcatagatgggttctacacgtggagcgggtagaggcgaactcggaggaggtttgcttacccaacttgtagcgcggagcaccctggccacggtgaagcgctgctttgctctgatgtgcggcatcggcgagctctcccttgatctccgactacttcccccgattgaggagaccatccccacacgcggagcactccagcgaagcttctagcgccatcagaaaccccgccgccatgaattccctcaatctgccaatctcctctcccttccaactctgcacgccatggctactggattggcacaggagttcgcggcgatctgcactttatagcccagcatcgtc

SEQ ID NO: 132900 - DNA, 307 bp, Zea Mays
ccagactctgcgacgacgacggcggcggtgggattggtgggaaggaagaaagcttgctccctgtgttccaacgacgaccgaaccgactgcgtccatggagcgcatgccgcaggacgccgggcaggagagagtcatggcggccgctaagcagatcctgaagagccttgccgtgtccaagaacgccgccgacgacatgatgcacttcctgtcgactttcgacccgcgcctccacccgctgtcctccccggaggcggccgaggaggaggcgtccgggtccggcgctgatgatgatgatctcgaagaggag

SEQ ID NO: 132901 - DNA, 867 bp, Zea Mays
caaaaattgtttaattcactatttttgattgctagttttaaagctttgtgatgatctttcaaaaacttggtgaaaatgttaaaattcgaatgcattttagttctaagattttttgggctcaactggcttgaccagctgaacttcggagctgaacttcagctcagctgcttttaaccagtttttttaccaggaccatcctggttaaaaccggttgaaccggcatagtggaccggttgaaccggtctctgaccggtttgtccgcgcaggtctgtccgcgcaggcctgtccgcgtaggtctgtcagctgcaccttttttcagtcgcgcaacatctttttctctcttgaccggtcgcttccacttctgctggcagcctgacgtgcaaattttttaatccggtcgcatcctgcagggcgcgcagcacctttttttcttatctctgcagggcgcacaacatttattttgaacggtcacttcctctgctgggcgctcagatttttttcttctgcttgctgccgctcagcagggtctgtgcgcgccatttttttctgtccggtcgcttctccaccgccgtgtcagagcgccagaactttttatttgagggctgtctggtctcagtttgcatgcaaatgtcagggggccatgcagtatccgctgtgctctagcgtcaatgcgcgcacaaatttttttttgtggagtccggtcagcagcggtgtgcatgcagaatcttttttctgtccggtcacttctcctctgctgggcgcgcgcagatttttttttggacgcttctgctcagcccgcgcgccatgctgtagattttttctctcctgctcacagccatgcatgcgtgtcaggggcgccagtttttt

SEQ ID NO: 132902 - DNA, 474 bp, Zea Mays
gggagacacaccacgggagttgggaggatggagaggaacgtcgtgcttccaggggagcaccaagcagatccgacgccgagaaccacaacgcaaaatccaaactgggcaaaggcgtgtgaccggatggtgaagcagaggatggagggaatgaggcgtgtgtgtggctagatcgagagtggaggttggaggggacgaggcaggggcatgcagctgaatcgctagtagatggagtggaggcgaggcagaagacgaccatcgaaatttcctgtggagagcactcaaactatagggctgacactttctaggtccaaatatgctattcatgaggttgggccctaaaatgtttagatgaatttcattgaaatcaggccctattgaagctgtcttttattgtttaggctctatctttcaaattgtttatgtgtttagggctcctattggagttgctcttagtagtgccgaaggaaaacatgc

SEQ ID NO: 132903 - DNA, 347 bp, Zea Mays
ctgggttctccaccactcgtccgctcgttgccgatgccacctaggcttccccgacgccctccactgactccgcgctggcatctgccatcccaggctgccctagccacctcgcaggagagcgccgcgtctagcgcactggagcaggagcgtgccttgggcgcagctctgaccgcccagatggtcgccgcgcagcatctcatcatcggctctcctccggtcacccacgagacacctccacccacccagaggctccccacgcctctagactcgacaccgaccacatcgctgctctccacgcccaagctgtcggtctccacaacatctggtccctcatatccatcgtgcta

SEQ ID NO: 132904 - DNA, 655 bp, Zea Mays
gcacggatggtttgggggatttttgtttcactcaaatttgcgggaggaaggctgctgatacaggggagacgaaaaaattggggaagtattggcagtctgttggagagaagattttgtcttttttctttaaaaaatcgttttggggctttttagctctcttggagttgctctaatcatgcttacagcctctaccacacctacttccacaactctcgttccctctaccgctccaccggttcctacctcatttccgagagagcgacgagatagaggtgcgattacttgctgaggatcctcgactgtttgacctttagagagccactgctgtcagagtttgccggtttagacacgtgccagtggagtccaggtttccaactcagagagatcatgtcgtagctcctctcttcagtatccaaactcaggagtccttctaccgcacccagctgacagctcagatcgccttgagggctcaccgtcgattaacctgacagctttccattcagtagctggtacagaggttgagggccacatcacatacctaccagttctgtactcattgctgacttttggtcgatacaaagaggagtaggccagagtattttatgctattgtttagattgactccggccatcagtggatgaagtttcgcttcgag

SEQ ID NO: 132905 - DNA, 295 bp, Zea Mays
tgcgagagaaggcttgctttggtttatccttttttcagacccctctcatgtgggagcctccaacactgggtcgggattgccctttaatgatcttagatgtgatgattaatttgattctggacccctcatctcgtaaatcttaatttacaagcgaaattttgctccaatgcgtctattgaaattgatttttggaagatgttgagttattcacagtgcgatgttcatgtcagctttactccacttaagccaactacccaggaaaccaccaaatcaccatgttatttaagaggtttta

SEQ ID NO: 132906 - DNA, 715 bp, Zea Mays
gttttgtaccttattcattaggtttagttttgtaccctacttgtcatgtttgacttattaagggctcggagtttggggattttgtttacttaccatccattggtactagaggtggtattctggatcattctgtgtcagtctgttttatgaaggaaaacagcaccaccttgtggttctcgggggtctacggcccccatagagatgaggagaaattggcttttctagaagaactttctcaggtcagaaccagttgccctggtcctgggtgattgcaggggacttcaatatgatccgttgtgctgaggacaagaataattcgaatcttaatagagctctcatgggtagcttaaatatttggattaataatcactctctcaaggagttgcctctaactggaagaagattcacctggtccaaagagatgtccctaccttagtcaagcttgacagggtgttctgcacttctgattgggaggccttattcctagattgttctctgcagagtaatgcctctagtatgtttgatcactgtcccctggttctgaggcttaatgtgggctttaagggaaagaagcgtttccactttgagagtttttggccaaagatgcaaggttttcaggaggtggtgtctgattcctggaactctagtatttcggttttttttgtcccatggagagattatctattaaattcaaaagacttgcgaaggccctgca

SEQ ID NO: 132907 - DNA, 464 bp, Zea Mays
agcgaattccattccccttaaccacggcgttaatacctcggacattgaaacttaaaacagaccagtcagagtaattaatagcattgtgactattcatcatagggattaagttcatcgatgggaaggagcccaaacccaaaaactgggagggcaaaagtgtatctgttgagacaaaacagagcacagccagaaaccaccaagttcgtgaacacagaaatcagatagaaacgccagggccgagacagctaaaaagcctggcgaggttgagacctgcaaaaaacacccacccaaggcagaattaacatatcagttgtcatcatcggaagagtcttgtttcttgtcccccttatcttttttgcctgacttgttggagccaacacagccaggcggattcttctttttcttcagggctttgtcagccaattcctcctctgacagattacaaaagcgctcgcctaagcgcc

SEQ ID NO: 132908 - DNA, 529 bp, Zea Mays
ctcgcctggcgtgtggcatcgccgcgggaccgccccgtgccgtgggcgggttagtactcggctctaattaaggtattttctcccccatccgtttcgtctggttctcaggagcgttttgcacctcgtcgtttgctcagtcgggctccagggcgccgacttggccaacaccggcgggctcaccaccgcctgggtgggtggcgccaccgtcgggccgcgctgggaggaagacagacctgggccatcagatccgaatcgtgaggataggattagatccagtaggggcgggtgtatggccgttggattaggatcgtgtggatcagggcgcatgccagtagggtgatgtggtcttctgatctgaaccgtagatctagatccgagggccacggatggatatcggcttcattaaatccttacccttgatcttagatccagtggccgtaatcgcatacctcttcatttattggcgatctgatccggaccgtcagatctggatcgtgcggtcctagatccccgataccccttcgccgtg

SEQ ID NO: 132909 - DNA, 455 bp, Zea Mays
tctggatgtggtttcagataccggtcggacgtccacaggtgttccctcctcggccctggttccatggtgttcctcctcgtcgacgccctacgtacgcatacatttgggaccaggtagccatcccatatggcagggcaaaacagacgtacttggattacgtcaacgagctggacacactctcagcaaccagcgtaagtgttcaacaattataaagtttactaacaatttcgtagcatccaacgtctgatgttcatttatgcaggtaatatgggagccatacaatgcaccaggcctaaatgattgggaatttagtgatatgtgcagaaatgatgacgatttatacaggatgaggtgtcctcttatttgcttctagtgcgttgagtggcaccttccctatcgggttgcgaggcaatttggaaagaaccaacattggtcggttccagattttcccacag

SEQ ID NO: 132910 - DNA, 437 bp, Zea Mays
gtcgtggcttctgtgcttcaatcttttggcttcgctctagtcagaggggtgataatgaccttggaggtataaaataatgggtgcacgccagtcttcggtcattattagatgtacggttatgcgatcgtcgaagtcttgtgttatctacaaacctttggggtttcttacagctggtgtgccgattgtgtggaaaacacgtcagatggtagtgggtcgcctttcgctgctgctttcgtcaacatgtctgcctcttcattcttgttccgctctatgtgttgcaatgtgaatcctttggactgtttttccaagcttcgcacgaccaagagatattgcatgaggactagttctttggtggaaaagtccttttcgatttggcctgcgactatcttggaatcagttttgactatacacgttgttacccccagggatcgtagttt

SEQ ID NO: 132911 - DNA, 1411 bp, Zea Mays
gttaaatttatattaatttgatatactaaacttgcatttaccttaaattttgtattttctaagagctagtttggaaaattaaatcatctctgggattcccgagaattggggagaaaattagcttaattttccctctaatccctgaagagatttaactttccaaactagctctaacatggatgaatttcctatggggataaatttctcagcggggacgaagatagaaaaaaaaaagctcctcctaagcgtgcagccgtgcacaaaaacagatgaaaaaattttctccccacatagaaccaggatggggagccattctctgatagaaaattctccattgattgatatcaattgataatccaacagatcaaaaacaaaaaaaacaaagcaagaaaagcaccaatctcaaaaacttcagcatcatacttcacattttccaccttcacgtgcaatagcattctattaaaaccttaacaacatttcatgatactatgatagactatctcaaataaaattactcatctcacctcctatgtcaagcttcaatctataaagttatggtcagcaagtcgtgcaaaacattgtaagctgctggagatagcctaaacagtatagtatgcagtgcaaaactgtgttttgcacggccatatgcatattgctataggctaagagcactaaatcaatcaattagcaagaaagggcaaaaatacaacatgtacaaagaacggcgataggctacactgaacttaggtattatgcaatacagctggtgtctgctaactctaatgttgacatatttgtaaaacgccccttgtatcttacaccaaattgtatatttcatctgactaatgttttttccgcagacgggactcagttcccattaacactaatgggagttaaagcaccactacaagtaatattagtgattctgtcaatgtccaatataatgcatgtcaaattctaagttaacccttaaatgccatacgtatcagtctgacaagtatggttgtccattaataaataatataatgtgagtatttttactcaataaattaacaacatgtggggttgttcaaacacaacagcgcaatcgcagaaatatgtgtagctactattcaaaataacaaatctgaaaggtgcctcaaggtctttgggaaactgttatacaataactacaatgacattcaattggtcgatccaagatatatatgaaatgaaatacaacaatgtaaaactaaccttttgttttccctacaatcagtaaaaacatccacaatagctagctgaacaaaatcaccgcagatgtccttttgtatttactgattgatttatttatgcttctaggtatagtgaagtcatttatcagctaatgatgcacctctaaaaagaatgattgtataaccagacaattctg

SEQ ID NO: 132912 - DNA, 496 bp, Zea Mays
accatgattttggtaggttagagaccggtatcgatgttaggtgtcgttgtagcaaatctcaaaacatttatttccatgacaggagtactatgtcaatagatctttgtaagaacgactttatatctagttatgtggtgtggatgcaccatggcgatgagctacctcgtcataatgtatcgaaagttgaggcacatcaagagggagactatgataggatggaagaaatgctagagcatatacgacacaagattttacccaatgattctaagtattcgtctttacccaacaattcttaggattagcctacactagaggttctaaagttatttgagctctttagggcttccaaagaaccattacatgagcacgcgaaagtgaccatccttgctttcgggacttggcttatggatattaagtccaagcttgcattctcaaacaactactacaaggagctcattattgacgatttttatgccaattggattttactctgcaa

SEQ ID NO: 132913 - DNA, 470 bp, Zea Mays
agccttcaagaaccgtatttccactgctctctggattgcaaggtgattaactcgaactgatatgctatggttatcctactatgtttcagaaaataaaattcatgctaaatgaggggagcagaataattatgatctaaaaggtcgttaggaagagcaagtatttcgaacttgtttgtcatgcaatattcatgccagttataaaaaaatttgtttcatagtatgcatcattttcaggtagagtatatactacgacagaagaaaaaattgtcagcatatttgcgcccatgcaagaccttgcagcttggccctgatttcttcattcctcatgatgctgatgacgacacaactcactcaacccttgttgatgttgatgagcccatgggatcatcggactcggagaatttgagtgtgccgtgcacaaattttgttcggaaaaaacggagtggaccatatatttgtgcacggtctgc

SEQ ID NO: 132914 - DNA, 297 bp, Zea Mays
caggccaccagctccaagaggcagaggtggaagaagcttcagaggaaggttcaacactcaacccaggaaattgttctgcttattctgcgggaaggacaagggacacacaacaaggacatgccaagttacgatccaaaagcagaagaagatagctgaagccgaagcacgacagaatcagccgaagcaggtcttgcatactgcctcatgctattcaccatatattcctgagtatgtgggcaaccagaaacccacgacatcagttgcttcagcaagtcattctcaagctgcttgggctca

SEQ ID NO: 132915 - DNA, 432 bp, Zea Mays
gtccagtacgttccgtgccgtcccgtgtgcagcgtcgtttcaactccagttgttgtccagttccttcgctggaaacttgagaaggcgtacatgagattgagaaggagagaacgctttgtttatagggccgcaatggatcagagcggaatcgtggtcgtggagctggccgaggcccacgccgtgccggtttcaggtaaacttgaggttaaattaatcagctgctggtagctagattcatacgtcgttggcgtcatcattcacttttgctagctccagagataagacgacgacgatgacgacagctgatttactttgatatgtacagagcgaaagagatctctactctgcgtgcgtctctctctcacattgatgtcgtccgcgtacctacacggtgaaaacaactactactagtagtagttatctttagcgaac

SEQ ID NO: 132916 - DNA, 430 bp, Zea Mays
gcactgcacagtttgggtgagagcgttgcttcatttacaggagtagttcaagtgacaacatctgtggttggtgcggcttgcagcagctaggccagtagcactgctttgaagagatcgattcagctgaaagtgggaaatcctgctaaaagatgaagggatgaaggccatatacatacactccttcaggtgctttgttggatgcgcccaacattttcgtccaagagtaaatacacctgcgaggtctggcacaaagttaaacatctggccatgtactccttcagccatgaaattttctccaaagtttgtgcaagagtttcagggacctatttctttgttccgagggtgtacatatcaaagaagttgtccatagcgttacaatcctctgaaattccttgggcccccttaattttaaaaataagggccaggtgtg

SEQ ID NO: 132917 - DNA, 368 bp, Zea Mays
gtgagtgtatcctccttgagctttcttgaaaggtccaatcatatccagtccccagcatgcgaagggccaagtcactggtatggtctgcagttgctgtgctggtagatgttgttgctttgacaagtactggcaagcttcgcacctctgaactaactcggctgcgtcactcttcgctgttggccaatagaatcctgacctgaagaccttcccgactagtgtcttgtacgctgcgtgtattccacattgcccagcatggacctcgtccagaagtcgcttcccagtagatgagagaatgcacttcatgaggacgcctgatgcacctcgtctgtataatgtctccccaatgagtgggtagtgagccgactgtc

SEQ ID NO: 132918 - DNA, 732 bp, Zea Mays
ttcggttgagtggacggaagagtcttcggatgaggacttggattactttgcggctttggatgtggctgcggcggaggcttctccgcgtgttacggatgctaaagttttgcctggtccgagtgctgggcgcaggcggcgaagggcggtggcgaagcgtagggtgagtgaggtggatggcggtcggcttcgtgtgggcagggctggcaaacgggaaatgttgtcctcgccggctggggcgagtgtaggtgagggggagttgcgaactcttttgagggtgaggagcttaggataatgctatttaactatagggagatgggaatcattccgaaggttgaaccaatgtaaggtgtgatgccctcgctgtacgtgtgtaactatggtttgtataatgaggttgtacgccttcgcgcgtccggctatgtctatgggggcattgtgcgcttggtctatcacatttcatacgttggtccggctgcgccttgtagttggtctgtgcgcggacggttccttggtgtagacttttgcacggatgtaacgctttgcgttttggcgcgcttgttgagctaatccggttgcacccttaggcgacttttgcgcggatagtctttttaggaagacttcgattttgcgaacttgttgtgctagtccggctgcacccttaggcgacttttgcgcggagtgtcgcacgcgagggtagctagcgttgcccctcgcggtgactttgtattggtc

SEQ ID NO: 132919 - DNA, 556 bp, Zea Mays
ggttattgacctccccctatgtcacatcattcgtcaatcgtcactgacctccccctccacacaaaacgcaaacacccgactctccttcaccattcatgtacgtggagctgaaggcagtgccttgtgtcaaccacgcatacctgctctggtgtgatggccaacgaccctctccgctggtgtgctttccgtactcagggctctagtgctccagcaccatcctggtgcacagccctatggctgtctgcatcaaggtggttgtctcgtgtatatggtcgcggaaaacactgctttcagtgagagtgaagtttgaaatagcggatgaggtggggaattggatgggtaagctgctggagaccgtctaaacagctgctctccctgtagtgtgtttagattttgcttcttgtgctgctgcttctttgatcaggtagcataaaaaatacagcgctagagtacccaagcgcacagatgtgtggtggttgtcttcttcagtactgtactgaaatgaaatactccctgacccactgggccaattggttcgatgaccttgatgaatttg

SEQ ID NO: 132920 - DNA, 1159 bp, Zea Mays
tttcctatgtatttttctgaattttctaatcttttggactgggcgcacaattaccaaaatcgtcaggggtctcagcgcaagttttctaagactcagaacgaccctggtgcagacggcgggttcattactaagaagttcagggactcttttgagatattgccaagcgaaggggtattatggcacgtgaaccgcacgattacgatccggtggtccagattagtttgatccgcatccgaggacccgcggatgatccagaccgtaggcacacagatctacggctaggatatattaacatgaaggggtatctcgtctctaatctgagcccacaattcggtgatcgacgactcgcattcagttaccatcagatgtaatcctatccatctgttcgccgatcaacgactcacacacgtcgtcttccccacgaccacacatgggatgatgcatgagcgtcccacggcgtgacctcgtcggcgatcacccacatctacaccgattgccccaattacaaaatagagtggtgctacgtgaagcgaaaaacaaggcgaaataagggagaagtagctcactgtaggaggaggcagaaacagagctacccacgaggcgaggtggaccgacagccgtaccccaacatcggcgacgaggaattgtgcagcgtgtggccacaaccctggcccggctagacatcgatgacgagtggtgtgcgtcgaagatggcacaacgagcagtaaggaaggagctttggcggggggaaaaaggccgcttcggaaatctggagaggagagagaacgcgccgggtcttcacggcgatggtgcccatggttcttatacccggaactgagtccgattttgggggggggattggtcaacggagcgcgccatgcgcgcgagcatccagcggagaggataagtccgtcgcatgctccagctccgattgttatggcggatcccaactgaccggcattatttcagcggatggaacatcgaacgcactggctgggaaaggggatgagtccgacaggctaaccccaccagccatcgactgattctgtcaatgtccggcaactagtctagtgaggcccacacgtcagtggagaaatgaggagagcaagcgcatgaatcgtcccccagcgtgcatggcacaggatcaggtccccccatg

SEQ ID NO: 132921 - DNA, 490 bp, Zea Mays
ctacccgtgcaaagaccaactacaggtgcagccggaccgacataataaacgcgctagacctagtgcacaagtcccctacgggcacggccggatcagcgaaggcacacagcctcatcatacaaattatagttacatacgtacagcgagggcatcacaccttacattggttcaaccttcgggatgatacccatctccctatagttaaacaacattatcctcagctcctcaccctcaaaaagacttcgcaactccccctcacctacactcgccccagctggcgaggacaacaattcccgcttgccagccctgtccacacgaagacaaccaccctccacctcactcactctgcgattcgccaccacccttcgctgcctacgcctagcactcggaccgggaacctcagcacccatcacacgcggcgaagcctccgccgcagccacatccaatgccacaaaataatccaaatcctcatccgaagactcttccgtcc

SEQ ID NO: 132922 - DNA, 416 bp, Zea Mays
tgaacactgacggtaaaaagcgagattgtttcatgcggggtttgagttttaaactgcagaagaaaatggcaacctgttatgacttgacatttaatagagcagtcagtgtggcgattgcagtagaagacaaggggcgggtgcaccaaaatgcaaaaaggatgtggaaaggatatggaactggatcttcccaggatccagccaagcatcaaaaggtaatcattagaacagctggctctaccaacactccttaccgttcagccacttaccctgttaaaactcctatcttcattcatcccaccaatatgcaacgtcaatcactacctacaaataaccaagctccccgttttcctgctcccactggcaccaaatatccttgctataactgtggaaaagcagggcattttattaaagactgt

SEQ ID NO: 132923 - DNA, 755 bp, Zea Mays
agagatcgaagaaaaccgacggctcaacgagagctgctcggcgttggcgaccacacgctgacggacatgccatcgctctcacagtctcacctcgcccgggttcaatcacacgctacgctccagcagcagcaccagcaccaccaaacccaccgtcacttgcggccgcaagcactatcacgcgaaccgcacaagttaaatgaagcttcgtggctctgggtctggacagggctgcgctgagtgcgggctcttcctgggcctgtttgggctctggggccgggctaagcatgcattttccagtcacatggcctgctaaatcactgaattgtaagagggccccggggtggagccgctgcaagatgggacttttgaaattttaaaaacgcacactgaactgaaacaacgctgaagcaaacggagcactactgattctgctaacaaaagaagagaaaaaattactaattctagccatgcacggtcagactcgagaccactcatgagaagaaaagatgcatggagaaattaacagctggcttcatcaacattcagggacagatccaggttactagaactccagaagagaaacaaaccgcaagaagacgagctcttttgtgctcgacaagcacgaaccatgtttacattctcacaacagggacaggaaggaggccgcggcggccaggaacagcagagcgggcagcgagctccatccggcggtcctgctggcgccgcgcgcggccgcgccggagggcggcgcgtca

SEQ ID NO: 132924 - DNA, 459 bp, Zea Mays
gtcagagatgaatatgggtacgcccgtacatggccctagcttgggttgcgacccgaggtaccttaagacatatccgagacccccgggagtgatttgtggtggtatcccattgtaggaaggcatcgagccctcggaccccatcaaacgggttagggaccaggcgaatcacctgcaagtaacttttggggcgtgtctctggaccactagccgactctaatcaaaaggagctcggacccccgctcggattacccgataacagctcaaaggaaacgtcttgctcgctcgtcgcccatcgaaggtagcatgacgcattcccccttcctcctcgtggagaagcaatgaaggggtgtatgaaccaaaagtcgagacctccctcgatcgaccccttgcatagtgcaaagtcttggggcctgtcctcgcaaaccacgccaaaggttccaacagattgaccgaagatcg

SEQ ID NO: 132925 - DNA, 1108 bp, Zea Mays
cgggcactgggcatcgtggatctcgtccagcgtccgagcatttcctcgtggcatgccgcgaggtcaggacaccgggggccctgcagcatgcacttcatatcttggcctcttgtcccagcgcttgaccgactgctggtttccctccttcgacgcctagggtgctggcttcgtgtggccaatgaggtcctaggcccactcattagtggtgatgtagatgtctgcctctcaaaaaagttgttctgaggtcattggagcttttctggaggatggctcagatgaaagcgaagtcactagacccacggtagaagtcctcgattacagcggtctccgtgatgtttgggatgcgattcctcatagtttggaaatgattcaggaatgaatggagggactcgtcactttgtcgtttgatggatttgaggtcctagggttgtgtcggcttatcgaaaagtgactagaaattcgtgacaatccggtggcagaagtcggcctaatcgttgatgcaatggcaaggaaggtgttggagccactgcagcgcatcctacctgaggacgatgggcaagtacactatcatgatgtcctctattgccccgatcgctagggcgacggtcatatagacggccaaccagccacctggatcttgcttgtgcttgtacttgtcgatgtccgagaccttgaagttaggcggccattgaatcgcctagaatcggggagaaagggctgagactccacacatcccacgagcctcccagtagtcttttcgatcgcagtcatggtggcggtccctgggaggcgactgatgcgaatagtcgtgcaacctctctcgagccaatcaacatggtgttgggttgtttgtagaggctgatgccgactctgtccttgttgcacggttgcgtgctggtgcgccatgatctcggtcatactcttcctgccgccttatcttactttcgtgccgatgatcgtgcaaatcattgatattgctctgcgcgtctcattgactgttgatgacatagtgcatgtccgtacccggatgagcgggtggaagaagatggtttgctgcctaggtgaggatcttttggtagccctccgtgtccagggtacggggcaggcc

SEQ ID NO: 132926 - DNA, 336 bp, Zea Mays
ctcgaagttcttcaacttctgtgagcagaggagcattcagatcaagtacgcatcagtggcacacccaagagctaatgggcaggtggaaagagccaacgggatgatacttgatgcactcagaaagaaggtgttcgataaaagcgagaagcttgcagggaagtggatcagggaactaccatatgtggtctggagcctgcaaacccagccaagccgagctctacatggaaacactccattcttcatggtgtatgggtcggaggcagtgctaccaactgatctgatctttgggcgcccagattaacctttgaaagcatagccgaagcagaagcaaccaag

SEQ ID NO: 132927 - DNA, 387 bp, Zea Mays
gcggtgctctctctacgcggatgacgtgggtgtgttcattaaagctgacaggtcagacttggaggtgctcaaagggattctcaacgtgttcgaggggtgctctgggctaaggatcaactatgacaaaacagaaatctacccaattcgttacccgacaccattatggcatgcgcttatggaggtgtttctaggcaaatactctagcctccccgggaagtacctcgggttaccccttcatttcaaaaaagttagaagaaatgaccttcaacctttaatagaaaaaatcaacaacaggttggcaggctggaaaggcaaattgctgtcaaaggccggtagagaaactcttgttaaagcggtgctatccgcacaaccaatctaccatttaac

SEQ ID NO: 132928 - DNA, 385 bp, Zea Mays
aagcaagtggtactacagtagtagcaatagaatgcatgcgtgcctcattatttatctttttgacaaaaaaaaacacaaaacaaaagcatgcatgcagtgcattgatgatgagcaagtgtccaagcatgcaggcgcggccgtataagcctagggagctcacgcgatcagtgacgtggacacctcctccattccatccctctgcgacgatatgctcaggtccaccaccacaccgccgtagaccgtatagtaccatgcgtgcatgcatgcatgtactacgtgaatatatacatgatgtgcataaatctatactacctattaagactctaaggggtaggctgcctctgacatgttctgccttccagcgatctggaccgtccgatacgcc

SEQ ID NO: 132929 - DNA, 302 bp, Zea Mays
gatctggaccatcgatcacagaatctatggccagaccaaatccaccgaaccggtgtccaatcgatctaatatgggctaccaatggccagatcaacggctgcggcctaacgtccctagccagagtcaaggcacggtggcgccggtcaccagggacggcggcgccgttgccggcatgcctccacccgacgccccagtgctccgaaccacaacccagcgcatgctacacaatgagagaaggagggcaaaccgtatgtgagcttcttacctcgaatcatgccaggccaagccctgaccacggcgat

SEQ ID NO: 132930 - DNA, 281 bp, Zea Mays
atcaggtgttgctctggcgggatcttcgtcgtggatgccaatggcgtcactgtgcctggccatcagaggtaaagttagggcgagagccatcaattgcgtgatggatatactagattagagggcggatatcgtttcatggtttaagatcggggccgtcagatggagatctggtggatcagagtgccctcatgttatgaccgcgtggctggttttcaacggttggatagaaatccaacgacttggtacgcatactggttcggcatgtccaagttttaattgtg

SEQ ID NO: 132931 - DNA, 602 bp, Zea Mays
tggggatgacgtgaggaggcgtgagagctagttatttatagtcccgagagaaggagagtctgggaagcatgggagaagaatcgggaggatcctaacaaacccagcggtattcgcgtggctcagttcctcggtgctcgcacgacggggaggattcggcatagggttgcgacattgaagatgaacaggaatcgggcccatcagtcagtggaaaagcgagcagcgcgtgcggcagagtggaagactggcgagcgggtctggcttgtcagtgactcaccgttcggtgcgcgtggcgctgagacgggccaagcgcgcatacgagtgaagtgggtcggtttgcgcgcacgagggaaatagggggatgggctgaattccagtcgcacgacccaatacgagtgatttccctttttcttttttcttttctattcttttctcttctatttttccaaattcaaggattcaaataaagttaagtttctagtttgaacttcaaattcccaaatatcaaacacagccctattgagaacataacttctactatttgcgttaatttagttttctttctatagtgtatattcttttcctccccttctcttttcttttct

SEQ ID NO: 132932 - DNA, 405 bp, Zea Mays
gctcgattggtgtgtgttaccaaaatattgggggtggaattatgattttaactttgtttggccatttggggtttgtctggtcacatgggccatggacaacatccaaccaggtacaggatgccatgtgtagttggcgagtccaacatgatacatcttgtgcttgtgctagttaaactttcatggctccaccatgtgatctatcaagggcatatgggtttagggaggcaaggacccagctgcagagtttatagtctctgtcggtaatggcacggtgtttatcctcttgacgccctattgtggagggagattaggaataagaggggattaggaagtaatctgatgttgcttaatctcaatcgagtcatacaagaggtaaataggcccatgcttattaaggcgtcgctt

SEQ ID NO: 132933 - DNA, 778 bp, Zea Mays
ctcgtggcgaggtcaatcgcgcagtgcatggttgataaccagaggagaagtggtgctgcgattgcggggttctagtcgtgttgattggaagccggatcgtctatgtgacatctccaccaaatcaatagttatcttcacctgacggaagatcgggcacccccgttcctatcaagtggtattcaaagactcaggtattaccgtcaggcttaccctagtttagtttaggtttttcatcctataactccagataattgtcatacaaaaaatatattccgatgtcctagaacccttgtttagccttgcaatttcgtttcagattgttttgttgagtttgtgtccgtgtcgagtcttgttgctggtttaggtcgtgtcgtcatcgtagttcaaccgctccatcgctgttatttgtttccaccgctatcccatccaccttgcccagattacaagtcgagacaccacattactcgatttgccctcgctagccgccttgtgtgaattctcgccacgctagccctagattaggttgcaagccgcattgcattgcagcccctccttgtttcatcatctggcgcttacctattgcttataccagggaggtttgtgcccctgtgctctatagccgccactacggttcctaccaatttgtgcccttaaaaaccataacttgaggtaccttctataaaacgggcataacttttcgctcggtgctccgtttgagctcaaatttttacagcagattcctgactccattctggggtgacccaaactagccgatagc

SEQ ID NO: 132934 - DNA, 639 bp, Zea Mays
ctagaacttgggctaggtctagtggtagatttggaggtgcggggaggtgggtctcactcccttctccgccagcttcttcctcggctctcagagggcaacctgctccaattccggaggcggtaggcgtggttttattcgaagccatctgccatgggaagagagtcactatcatgcacatgccattttttaactagttattttattcattacatcaagccattacataatacagcacaccgctaccataagctcatcacacacgagtgctatctagggtactcccgaactccttctctaaagtgtccccaaattccttgagaagatcatcaaggctggctagggacatctcctcggtgtcggacgagttccttaacccggcagggggtagggttggaggggtttcttccttctgctcagtctgacatccttggtttttggtcttcttgcgtatttttcttgcgggggcgagcttcttcagtttcttgtcatagtccatcttcagggtgcggtaagcctcacaggtattggtctcctcgccttcagctattgcgaggctctcttgaagggatgccttttcccctgaaagttccctgactttttgctccagactttccacccgggaggttaggtaggtgcagt

SEQ ID NO: 132935 - DNA, 306 bp, Zea Mays
aacgcccgatatgtatcacttgagaaccaacatcgcatagagacttgggatccttccctctcttgcccgcttatatcgcacatctatctttgtctatcccgattatatcaaggatcttgtgaagttcagaaatatttcgccatagtaattaacgagaatagtgcctactcgacttagtcgtaaagcgaatatgaatttggagaataaactcagtctcgcgatttaattgaaattaactcgacgactttactcgcttccacatattcaaatagccatcgtcatctatctacaacatctatccctccg

SEQ ID NO: 132936 - DNA, 480 bp, Zea Mays
ctcgaatactgaaaactataggggcttcctagtaagtagctcgagactcagacaatggtgatactggacggcgggttgattcttaagttttctagggtctcttctgcgaactggcaaagtgaaggggtatcggccatgatgggccatcggatcagacccgaatggcccagattaggtacgtgcacttaagtgatcagtctgcaatgcgagcccttggatcgggatcctacggcccatagccaatccgtgggttggaacgcagagccaaatctacccgtctgttcccaaaccaacagttccgatttaaagaaattcatcaccgcgccagcactaatcccaagcgcccaaccaggatccaacggcccaggttacaactaagccaaaagcgcgcacatccgatcttggccgctggcttctaatcgtatggctaggaacccttcttcaacctcaagtctcccaggctgtgcacctcccgcagcg

SEQ ID NO: 132937 - DNA, 374 bp, Zea Mays
ggcgaggatccttaaacgtgtacaatcgaaggtatgctattcttcgggtgttgacaccagcattgaagttgcttgttttgcaccttcagtgccttctacaaattattgatgagcacttaatgaatctatagagttcaaatgaaaatttgacaacataactctgttgttctacacctgcacatctgaatatgatacaatgaagaatagtgtaggtaagcgttgaaattttgtttgaaccttataggttcgtcataaataccatgttgtaccttggaggctattcgaaaagggataattttggactggcctccagccagtggcgaatacagggagggcacataggcaatgtccccataatactcccctaattctac

SEQ ID NO: 132938 - DNA, 318 bp, Zea Mays
aatagctgctaccattcatctctaaaatgttctccattcaaggctttgtatggggtagagccaaacttgggagttttgcctatctgactgtctgacggttcaactgaagctgcagtatccttgcaacagagacatgactatcttgacatgataaaaactcacttggcctcagctcaaaacaagatgaagttttatgcagaccagcaaaggacatttagacagtttgctgtgggggataaggtgtttgtcaagcttcagttgtttgcccaaacatctgtggcctactaccaaccttgtgctaaactctcttttaagttc

SEQ ID NO: 132939 - DNA, 869 bp, Zea Mays
ctccaattagcatattttttgaacaaaggcacataactccaataacatgttttttccattgcctgtaaatatcacatacagaactacacaaggctgacagctaatcagcgattgattattcgcaaacgaacaattacaaatgtcagcagaaatggactgacattgttatgaaatttaccaatccccactgatgggctcataaactctacatatgctttcactgggaatcctttcgcactaaaaaaaatgttagttggtcttaacgtctactaatggtccaactgcaaaagcagcataaggtgtactaatcaatgcctacatcggatccttgaaaattcttcactaccccttctatttcgtttccttccaagattgtctagatctgaagaagtcgaagcaagcatcctaaatgtcactctctgtgattactccatctgattcattcagtgattcaacatcttggtctgatctggcaagactacacattgcttatgcagataaaaaagattgagagcaggaaaaaagaaactgcgagttccacgtgttttatcgttttatcaatgctatgctattgttccagtgaaacagcataaaaaggaacataaaggaacaccccccctggttgtcggaaaatacggtagagatctgtcccattctactaattccccggaaacccacttctctgatctgtccaagtcatccgaaaaaaggtagtagtatactgagagaccgatggcaggctgtagtggagaaccgagtcaccgatggcatgtgaacgccctcgcagataggccaaccagagagacagcaacaggaggagggagggagggagtgaggacaaacaagagcacacacacgtacggacggac

SEQ ID NO: 132940 - DNA, 456 bp, Zea Mays
ctttggattcgtgattacctaacgaagctagcggtatgctcaatttatagagtccaagagcggtggctcctatttttggaatggcgtgctggcggccggagagaaggaaggttactggcgcaagggatttgtggctttcaccgtggcatgtcctctggcaatggacgggcttgctacatacgttcactgcgacgtgctaagcttccaagatgcgtggcgcacgatcgttaagcagctaacgccggtgaggatcatcccggccaaccgcagtccaagtgggtacggcgagctcaccgtcgaccgggtccgagccaatccgagcgctaagatctttactcccctcagttatccacttgcactgggcacaaatcgtagcggccggcgcgaatccgggcacaagataaccggcggcgaggggcgatgaccctggggatctttttcagttactgtacaatg

SEQ ID NO: 132941 - DNA, 623 bp, Zea Mays
tgtaacgtggccatttgcatgttgggggctggacatgatcggacctttcaagaaagctaagggaggctatactcacgtgctggttgccattgacaaattcacaaaatggatagagtacaagcccattgcctctttgacctcagccaaggcagtggaattcatataagacataatattcaggtttgggataccaaatagcatcattaccgacctaggatccaacttcaccagctctgaattcttcgacttctgcgagtagcggagcatccagattaagtatgcatcactagcgcatccaagagccaatgtccaagtagaaagagctaacgggatgatactggaagcactcaggaagaaagtatttgacaagagtgaaaagcttgcagggaaataccccgttcttcatggtttatgggtcataagcagtgctgcccgccgacctaatattcgaggcgccgaggttggctttcgaaaacatagcagaagcagaagctaccaggctagaagatattgatgtgctggaggaagaacgatggaacatagtaattcagtcggctaggtaccagcagaccttgaggcgctaccatgataaagccgtgcgacactggtcctttggagtggga

SEQ ID NO: 132942 - DNA, 1167 bp, Zea Mays
ttcttagtcggtaggggtaaatcttgaatttgttattagtttttaagaattcctgcacagaactcaagttatggaactatgatagccttccacgaatccacccattgttttagtgacaaatgaggtcatttgatactcgtgtaaagcccaaacatgtacatcactgctcaatgtcgcagctcgtagggactgacacaatgtcacatcaagactgcatgcatcttttgaaagttaatctcaataacccataaaagtcgtaggcgatgttgcagctgctgagaaaaactgagacttttttctgattttcgctacatttaccttcagtccatttcttcgatgctcagttagtccctctgatccaagatatgtcgttttagtatctgtgttaccaaacaattttagctttgcccatcagtaaaaactacttttcactatatgtcattcttttattaaaaaatgtttttcacccttggagaccgtgtcaatggatttatttgcggccttgcccctctcagttgactggaattagagaatacttcagtgaatggcttgagctagtttttttttctcgaacccacaagagaattgtgtgttttattaataagagaagagaagaagtacaaaaggagtatactcctgctacattagggacactgggacacaacctacaacaacccatagcatggagatgagcactccacatagcatggagatgagatgcatcgccatttgaaactgtaggttttaaaccattaaagacacaactatttatgtgtttccatagctcccaagcaacaagaataacgatataattcattccttttcttttatccttagaaaacttccatgattgctttgctccaccaggaagaaatacagatatctgtgggctggggtaccaaagttaagaaacccagtttttgaaagacagtagcccacacttgtctaccaaagacacacgtcttcctgatcagtgatcacagaggacacaccgaaggatggggaagtccctgtttggcaagtctatcagctgtctaacatgacatgctctttcttcaaatccaacggtttgagctagttggattcaaatccaacatgccatgctcttcaacatcttgtgcatcactctatcttcaaacaaatcggattagctcccactccctgccc

SEQ ID NO: 132943 - DNA, 725 bp, Zea Mays
aaagcatgcccattgatgtgtttgtggaagatggtgagagatgatgatgagcaaaccaagattagtaagcaaacagactattatgagaggtcagaaagcgggtgcttctcaaagccattagcaatgagatagagataaaaaaaatcctagtaagtctgcacaattctattgtttccttccctaacaactttatttggtaatgcaacaaataactaatatgaaattgtgcattatattgcagttctttggtggaattcatatgtcagcctagcatatgagctccaaagtttagcaaaaaagaattgttagcctccgttgtgctgcatctggatgtgagcgtaattggacagtggtttctcatgtaagtactttggactttgtagctaatattccttgcataacaatatgatgtactgattttgcgttgtatttttgtagatgcataccaaaacgagaaatcgattgagcataaaaggctaaataatttggtatatgttagctataataagatggaaatcatattttaaaatattagagagcttagttccaaaggaaagaaagcttgcttgaagaatttaaatgggaaggtgaatgggttgatgaaaactgtgagccacttcatgaaggtgttgttgatgactggaattggctcatgtggatgaggttgttgatgctactcaagggctattgggtcgcaactttgcctagggctgctgttgctcgtg

SEQ ID NO: 132944 - DNA, 975 bp, Zea Mays
tttgtgtttctgaaactcattcaactcagcatgaataatgtaatctcatttcaaaagatatgacaaatcaagcccatgtaatgaactatattatagccacctatagataagagttattggccacaagaagtttcagaacccagatttcagtctatcatttgacagttaggaacaagattatatgtactgttttttgaatagatagctacttaatccatctacaatcagggacataaacctacacctgccactgaacagcatatacccaactatccaacaagcgggaagcagatctaaaagtacttagtcatgaaagggattgtatcttcataacaaataacattggatttattatcctagcacataggatacaactacgaaaattacgtatagacaactacacctgctactgaatagctacacatgtgctatcctaaaagttgcattaatcacctatttggacagtgcagagtggcttttacacagcaaatgcacatgtttaaccaaaaattagcaatggtatgtgttttccactactacaaccctgaattcgcatggacaaaaacctgttagactcataggacaggaaatccaaccacaaaaataacagtaaacagctacacacaatgcaaacgatggggaggagagcgcatgatcgacaaatggcgagtctcaagggctatgcaaatatggctagcaatggggaggagatggtgagctggatacgatggcgagtttgatggggaggagatggcgagccggatacgatggcgagtttgaaggcgagactgttgcaagctaatatctggaggttttccatttctttaccgagcacagtctgtttagccagtctgttggtgatgctcttatatgggtactcattcatctattctttgccttcgcaataaggatttccattgagctgcgcttctatatttcacaattgttgacatgaatattttgcttatctctagg

SEQ ID NO: 132945 - DNA, 434 bp, Zea Mays
tagagtggttcgggccgctggagcgtaataccctactccactgttgtgtgttgtattgaatctgtgagcttgagagcttgtatgaacttgtgagtctgagagtccgagttgggtctgccttgtaacgttgtgtgccctcccttttatagcccaaggggggcacgtacaaggatgctgagccccgacatgtgggcccaagagcaaaacggagggaatacattatagaagtaactaacgcgagtacgcctgagcaatctcctggcgccatgatatccgtagtccatgcaatattgatatgttgcgactgctttcttagtaacacgcgagtaatgatgagcgtagtgcacgtggcatcatgggcatactgcctgccagtggaatggataggcacaccgcctgcggaatggactggtcgccgcctacccgtggaatgg

SEQ ID NO: 132946 - DNA, 354 bp, Zea Mays
agcgatttgatgatagtgaggaggtactatgtccatgtagaaagtgtttgaatcggcttgccaaacctaagtcacagatacaggatcatttatatattcatggaatggcgagcacatacactacgtggatacatcatagggaggaacaattggatgctgaactgagtgaacaagctggccatctacatgaacattatagtatgaatgaggatgtttgtatgaatgggcctgaaaaccctgaagatagattgcctgatatggtacaagatttttttcagagctgaagagggaggtgcacaaaattctatgtttgcagttgtattggatgagatgaagcaagaacttcacccaggc

SEQ ID NO: 132947 - DNA, 526 bp, Zea Mays
tattggaatcgtcaggactagaacgctagacctaggacgaaaggccttagaaatagtggggaaaataggtggctaattaagtaggccctattggccattcttaggatttcaagcatgccctaacggcaccattctaattcggtgaggagacgttcttttcagcatgcatgcattataaaacacaaaaggattagaaattaaaggagtaaaaatttgatctaacccacttccttttaacaacccaagctctctcatttttctaccataacctttacgtctgatcctcttccaaatatgacttcacccacccccgctaatggaggagacactcgtttcagttctgatttcctttctcacgagggtttccctttcatcttgtgggaggtgctcaactccgctggttaccctacgccccctttgtacacagtgcagctgtacgaggagcatcgggtgccacgtttttgagtctggcttactctggaggcacacccccttcagccgagttggcattcccttgactccgaga

SEQ ID NO: 132948 - DNA, 291 bp, Zea Mays
caaacctttgcactcctttcatgggtgataccttcagatatacgaaatctcccacttcaaactggaggggttttcttctcttatcatggcaaatcttctacctggcctgagcagcttttagattcttcctgattagtttgacattcttttcggcttcagtcactaagtcaggtccaaagatttctctttctccaggctgagaccagttgaggggtgttcgacaccttcttccagatagggcttcaaagggtgtcatctttaggctggattgataactgttgttataagcaa

SEQ ID NO: 132949 - DNA, 471 bp, Zea Mays
caaaggataacataaaggcgagagtggatctagcagcgttatgtgatagaccaaaccaagagatgaagccgccaagtggtggaaagacatggagaaggcctaaggccgattttgtcctaagcagggcccagaggaaggaagtacttcagtggatcaagatgttgatgttccctgatgggtatgcaactaacctgagtagggggtgaacttatctactcggcgagtcttagggatgaagagtcatgacttccacatatggattgaacggattcttcctgtgatggttcgagactatgtccctgagcatgtctagctagcgctttcagagttgagttatttcttccgccagctttgtgcaaaaaaattatctcggaccgtggttgcagacttggaaagattggcacctgtgttactgtgtaagcttgagaagatatttccacccggcttcttcaatccaatgcagcatttgat

SEQ ID NO: 132950 - DNA, 570 bp, Zea Mays
gggaaacacgcaagtttgagcaggttcgggcctctttgagaagcgtaatactctacttcctatggtggttttctgtatggagatgggtttacaggttgtgactgctaagatgatgggttattgatgagccgaaaatggcaagggtgccctctggccttatatacacaaccagagagggctcccccgcataggtgttgattataatctccctacttatcccctaattagtagcgaatggtcttccattatcctgggaaatccggtcctcccgcgcccgagctatcgccgacagtttaggatgtagggtgtgcggaacaaacctggcccgatatattcgcacttatgccgcggctaactcagacgtgggcctctttctcatctggaccagctcgcttctgttggctccgtttacccggcccatagcgggacgcctcaaaggggcgactgttgtgtggccccgggcgcatttttacacttgtgtggatccgagagatatccatccctcacaagcccctgatctttaaattgattttgaaataatcaattaaaaggtcctcaccacttgctttt

SEQ ID NO: 132951 - DNA, 445 bp, Zea Mays
gccgaacatgcccttctggttgctgatcatgacttggggcaggcgacagtgggggtggtggtagtaattgagcccaggaagcttgagagtgacttgctgaagtagcagaagttgtaggctgttgattgcctaagtatttggggatatatggagagtagcacgaagcagtatgcatgatctgctttggttgattctgtcgtgccttggctttagtaatttcgttttgcttttggattgtgacctggcacgtcctcgttgtgtatcccttgtcctcgccacagaaaaggcagaacaatttcctcggctgattatcgtaccttcctccactgaagcttctccttcctctgcctctcagagctggtggtctataagaagtttgctgcatgcctaaagactgtgagctgtgatgacttctctgagcattgttggccctttcgtctttggc

SEQ ID NO: 132952 - DNA, 899 bp, Zea Mays
tgtattatgaatggagggaatgaatttagagggaatcactgtgagagctaggattcaattagggaatgaaatcttttagagggcggtgagaaaataggattgacggggataatatagagggaacaactgcgtgcagatagtcttatgtagacaaagagaagtgctcctacccagcatgcatataggccttaaccacaagtttatagtgagagggagctaactcatgtaggggtagctgatctcggtgtccccaacttgaacaatataatgtaatgtcgatccagttgcattgtatatcatcattatgtaaaatgatttgaagttggacagttggaacctgcattgtttggtagctagctagttagattgtggcagaggacagaagggacacacacacacgcacagagagagagaagagagagagagagaggtgtcaatgatgggcagatcaaatcctcgtctggtggaccattgcgatgtacaacagctttaccaaaaactgtccggggagaaatcgttgcgttgtccattcaatcgattcagtcccgattgattgatatatctgagagctagtatacggactgtactccaagcgtcacgcttcacgacaagctctctgcggcttccatcgagcgcgtaaatttttgctttgctttccatatcttttgcttttgtggtggctggctaccgtccacagatctgcggctagctagctgcgagttcggtcgacggatccagcagcagtgtgtgtgtgtcatcaggactactgttcactgaagtggagctctcgtggacaggcaacctcatgtctttgagaagcatggtgttgattgttgagctttcatattctgtaagctttctgaaaacagaaacgcacttacccgattgtacatctggca

SEQ ID NO: 132953 - DNA, 343 bp, Zea Mays
cgacatccggtgtcaatggcgcggaggagtcagtctcgtagtataccaccttcttgatctttcttattcttgtcgccattcttcttatgtaacttggtggagtcggcggattcctccttatgctccttgtacttgtgcttatcgtcggatgacttgatctctcccgatggcaccttgtcttcgggcttcgatcccgatggctcgggttttcctccagatggaaccttctcgtccttggcgttttcacccgacatcagttcgagttgttagactctaatgaagtgctaggctccgataccaattaaaattcgcctaaagatggagtgaataggcgaaatctgaa

SEQ ID NO: 132954 - DNA, 924 bp, Zea Mays
ctcgcgtgcgacactctccgcgcaaaagtcacctaagggtgcaaccggattagcacaaaaagtgcgtcaattgaagtcttttactaaaaggacactccgtgaaaaagtcgcttaagggtgcagccggattagcacaacaagtgcgcaatacaaagtcttactccgtgcaaaagtcacccaagggtgcagccggacaagcacaacaagtgtgcaatacgaagtcttactccatgcaaaagtcgcccaagggtgcagccggacaagcacaacaagtgtgtcaatcgaagtcttttactaaaaggacactccgtgcaaaagtcgccaaaggtgcagccggattagcacaacaagtgtgcgatacgaagtcttttactaaaaggacactccgtgcaaaagtcgcctaagggtgcagccggattagcacaacaagtgcacgatacgaagtctctcacacaaagaagaccaacaggacacattacaatacaagttgcagttacatacactctacgaagggtcactagacccaccgcacaaataaacacaactacaccctccattaccgccagaacaacgcaagggcaccacatactacatcggttcaaccttcgggatgatgactgcctccctataattgaacaacattattttcaatttctcaccctcaaaaagattccacagatccccctcaccaatgctcgttccaatcggcgaagacagtagctctcgtttaccaaaccgatctactcgaagacgatcccgctccatccccatccgatggcgcctaccacttcgcgaaacctcgccaacgctatgcttcgacaccacccttcgtcgccagcacttggtcctcgcactaggaagatcagacacctcgccaacctccacccgcggtgaggattccgctgcggccacatctaatgcagc

SEQ ID NO: 132955 - DNA, 650 bp, Zea Mays
atccacgcgaacccgtcgcaaccggagcgccaaatccgccgtagtggaggtgtatattccggagtcttggactgcacctgccagggtccttccctcgagaacatatacgcggtcctcctgccctcatcgcccaaccaccttttagccaattaggggccgtatttgcctagggtccattaccgcgggtgggggatgtccgccgcggagggagctttgattcaccggcattgaggctccggtgcttgcctggggatacgctctgggagtcggggaacactctggtgtgggtcactaggcaggcgaccatctcgtggctgtgaatttctcaccggagcttcgggaatcgacgtggaatcgcctcaccgcgcgagcaggggaatcttcaccgcgaatccaggtaaacggagcaccattcatttcgagattcactgggcgtcgtgtagagagactcggattaaggttttggtgaccaacgtgcggaatggtgcgcagtccggtcgtgcgccgccatgcttcaggcggcgccgccgtgggtgttccgcgcgcaggaagaaatgcgatccgatgggtgtctcggccctcagatcatgatcgggtggtcctggttggatcacgtttcattaaaacccaaccgttagatgtcgatcggg

SEQ ID NO: 132956 - DNA, 601 bp, Zea Mays
gccctactctaaaatacgttcgtgtaagattccttggctcaaaatgcacgggagcgagacgcatacgtccgttgcttcactctttcagtttgccaaattctgtctctcgcgctaaaaatatgttaattccatatacacccacccatgcatgcactagctgcatgctgtatatgtggcgcacataataatggagataaaaagaacaaggtgttcgatcgatgaaaagaagccaccagatgccatatgcaaaacattgcagcgcatatgtatgtttatatctccattattattcactccatgcgtgcatatattcccgaagcatagtgtatggaacaagctccaccgctgcagagaccaaacaagctccatgcgcgtgactgatatggaatggtacccgtcgaatatatatatgtaaataaatagttctctttccacagcgtgcaaggctcgtacttagcgaagagaccactactcgacgacgacactgaaagatcgatgctgatcgaagggacaaagaacatgaatgcatggtctggaattattcgttgtggatttggcgccgttcctgcacattatatatgcacacacctgtgtgttcagg

SEQ ID NO: 132957 - DNA, 483 bp, Zea Mays
caatatcatctagtctggtagcttctgccttagctatgttttcgaagaccagccttggtgccccaaacctgaggtccgcaggtagcactacctccaaaccatagaccatgaagaagggagtgtttccatgcaaagctcgactaggttgagttcttaggctccaaaccacatacgacaactctctgatccactttcccgtgaacttttcattcttgtcgaagactttcttcctgagtgcttccaatatcattccattagccctttctacctgaccgttggctcttgggtgtgctaatgacgcatatttggtctggatgcttctttgctcgcagaaatcaaagaattcagagctagtgaaattggatcccaagtcagttataatgctattcggtattccgaacctaaatattatatcttgtatgaattccactaccttagcagaagtcagagaagcaatgggtttgtactatatccatttagtga

SEQ ID NO: 132958 - DNA, 466 bp, Zea Mays
tccttctgctaggctgacttaacatgtgatccagaggattcatgcgtgctgccaccttttttttttccttttctcggaggagagagtgtgtctgtgtgtgtgatgtgggtaacagctgttgtcatcacgctgttcatcgccgtcgacggcacggcagggtttggctttcctttatccaccgtacgtgctgtcattgctaatccgatcattttgtcatcagtcagggatgtttgacactgggctgtgtcaggtttacttcacctgttgttgactacttgttgacagcaaggtcgtcgtaattaagacttggagtcgtgggttctaggatccttaggatcttaatccgccttattggtatcctgcacacgtccatccagactaaacctgtgcgttgaccagtgtttacaagtcgtccgactaatcgcgattagtcgggctggtcgcctggaagagggcgattaggagg

SEQ ID NO: 132959 - DNA, 667 bp, Zea Mays
tgctgtcagagccgactgctggcgacatgatggatgcttgctctgaaattccagacgtgggattagaggtatcccaagcagtatctcacgcatcgtcgactttggaaggcagtcttcggtgtcaagaagttggtcaggattgcccgactcccatggaggtgaggatccttcagccttagaggtggctgttgcagaaaacccaaccctcgagggtggtgctggcagttacccagcccctgagggtgtcactggtagtgatctggctctggtgggtagcgcgagctgcaacccagtccccaagggtgttgccagtaatgatccggctctagtgggtggcgcgagctacaacccagcccccgagggtgtccaagtgagctctccttcccacacctccatggatgtccatgccgggtcgtctccaccacgatctgatggggtaatggcgatgcatacttctttgacttcgagcaagcaagtcgccttggaggtcggcgagccagatgcaagaattctgatatctgctagtagggttgagtcaacccccgacgatgctcttcaaattgttccgattgatcttccttcgtcgagctacaacgcagcttctcatgacatgggattaccctcattcttctctaatcttcaggtaacttagctcttttgttttgtc

SEQ ID NO: 132960 - DNA, 441 bp, Zea Mays
ttcccctttttacacctctactttgaaactaggaagggtacatttcatcttattatcttttaaggtacaacatggataaaaggtggatgaataaacctaggtatatttctaacaatgttctataaaccattattttgtagtaatcacctttgaccaacatatcgtttttgtacctaatatttataggcacacgaaggtctacatagatggggtagctggatttattgagtttgcgtttagcaattttataggtggaaatagaattctatgttcttgtagaaaatgtgttaattctctatggaaagatgaaaatgaagttcgtgcacacttgatatgtgatggctttcaagagggatacaaaaggtggacttatcatggagaaacagactctatgcctattaatagtcatgactatagtgatatagaggctgcaaacaattc

SEQ ID NO: 132961 - DNA, 708 bp, Zea Mays
cttacttcacaatatccgaaaggttcggccccatggcgtgccttcctcttgtcggctttagtcaatgcttttatgatattcttatcaaagaattttatgcgaggtgtaccaagcttattttgaggggcaacggttgcatgcaggtgatccaggtaatacaactacagaaaatatttcaatgtgcaagggctgtgtaagtaaacataacaaacatcataaaatatgatatatcatgccccacaaaaaaacaatgagctaaaaaattgcaatatatgtacataaggcaaactctatacttacaaggacaacaatttagcatccgtatatcgtcgtggatacgtttgtggtgcttcggttacgccacttcttcgccgcttcacaaaggtcattaaatataagctggcaccaatcggtctcgtggaaactgtgcatttctttagtcagaagcacttcatggtttgttatgccccagctagcagttggaaacaacagacagttgaataagataaggaagaaacatctgatggtaaggtcatcatcctcccctttccttaaacgatcttgtagcaatgtcacattgaactcgtctttagccaaaccaagctctgccctcaaattacttgctgcaactgcttcgtcaatccccaatggttttccaccaccatgatttggtacaccaaggataagatgcacagtgtcctttgtgat

SEQ ID NO: 132962 - DNA, 902 bp, Zea Mays
cggattcacgctcgtcgtagtgattcgcgctcggatcagttggatagcaccgggggtaagaaaatatcatgtcgtggatacactccgaccactaatttactccggccaccgtacccgcgcagaccacggttgatttggatgggttcgccagagatagccacttcaggccctacgccacgtgccttggcactttaacctcaccgccgtgactcacgttagcacgtccggtggtcgcaggggagcttgccacggtaattgccaccaatcgcgcgcgccagtaaccttcttcctctccggccgctagtgcatcttcgcgaaattggacgccaccgctgtgggagcctataaattgccgacctcgcctgctccgctaagtagttgtgcaaccagtgaagcaacccgtgcctcgaatcatccactaaagctcctcaatttgggaattcccccaaacctgctttgcgccactgtgaaagagacctcgccatggctagctcacctcaggtccgctcataccctctgctcttttgtttcaatgtccttgtgtgcccctgatgctccctgaccccgccaattaagctaggacccccttagatcgtcgagaacgcgttggtttggccattgatcacacggtcaccgtggacagagcatgttagagcgtcgttagtgaaattagttaaggggaaacgcttgttagggctcgaattaggtctgcaccaatgtagagcaccggtcgttgcgtgaatcggccggtgtaggctcgccggagcacggcccagcgccgttcgtcgtcgtggactggggactgtgaagagaggaaagcgcgagggtgtttctgcaagtgtcagcgagacaaaggaattgtgggaggggctctttaaagaatttcaaatcatcagggctct

SEQ ID NO: 132963 - DNA, 274 bp, Zea Mays
ttatttggtactacaacatttcaaaacgaaactgtttcagataagatattgacaggacatggattgtactcatcagaatttgtactgttgtcggagaggtaccatgatgggctcacttgcttaatagtacgaaatgcatgggcatggtcttgtcaagaacaaaggaatcagatttgttaaaccatgtcctgaaagtaaaaccagtacaatggtagctgagcagtagcttcagaaactatggtgtaaataccagggcagcttatttggttttgca

SEQ ID NO: 132964 - DNA, 358 bp, Zea Mays
ggagcacgacaactcatggtgagacgtgactctaagttgtttgtcaaccaagtcatgaaggcaatagagccacgctacctgtggatgtgcgcataatatagcaaagtacgcaagttggaagagaggttaaagggctttgagcttcaccaaagctatcagtgtcgagctctcgaccatcgcatctgggcaaaaacccatccttgacgaggtcttcacctccgacatacatgaaccctccatcaagatcaagcaaccaagggaagagcctagtaagacgatgggcaaccaagtcgaccatgcagcataggctcaggggctggtcgcaacgatcggtcagtagggctgacaccgaccattt

SEQ ID NO: 132965 - DNA, 596 bp, Zea Mays
ggagccaatcatattttgttgctaaaactaaaattgagcacttcacttaaattgatataaagaaagcactcaaaccaaaatcatatcagaaaaccagtgatctcatgttttcaaaatgtttcaaatactcacacgagatcaacaaaacaaattgatcacaaatcgaacactgaaaagtccgaataggttcaaaactgtgtcgcgaactagtgttgatttcagcagcaccaaattcagttctaggatgcgaaacagaaccaaacgaactccaaataagatgaaattttacacacgccttaaaaaaagtgtttccaaggtcttcacaaatttggagctcaatcgaacttgtaaatcaaccgcagatctaaaaatacaaacagaattggggttttctagaatgaacacaaaatgagatcagctaagatcacaaccacaaactgcaccaacaaggagtaagtaatgatcctagaagtaaatctcaccctccaacaaattccaacaacacctagaacacatgaatttgatggttcttctcaaatcaacaagagaagagaaaggaagaactcaagagcaaaatactccgaaaattcagcaaa

SEQ ID NO: 132966 - DNA, 659 bp, Zea Mays
tcattcccaccagcatccgccgattccatgtcccttgccatcagctcgagacgaatttccgccacttcacgccccgtctgctccatccgctgcgcgaggcgcagacgctcctctgcggccttctgggcgacggtagcagcgagctccgcctgagccagcaactgctgttggacctcatccatgtccaccaccttgtcggtaagtcgatccaacttggtcatcaaacgctcccaccgatcgccatcctccttcgccttatccgccatcgcttccagaataaagcgagactgcaccgatggcttcgcaaccggcgccgtgatgaccgccggggaccctccacgccgagatcgaccgaatctgataccactgtgacaccccttggccgacggcgagtcgccgcgacgtgagacaacacaggatgaacgcgcgcaactctcaggtgagtttgtgcggtggtttttctctctattattttctttctgctcaagtcttagagattacagtatttaagccacgcttggccgacccacaccaatctccatagctatgagaatacggcccaacaacggcccacacaaccacacacgcccaatgctgcgcaaccagcaacctcttgcctttctcttctctgatgacgccttgtcagttaggcacaggcc

SEQ ID NO: 132967 - DNA, 522 bp, Zea Mays
ggatttgactgcttcagaaattctattgaaaattcctggccgtcccccacccaatgggtgttttccaatgggtgtgactaagtgacgtcttggtacgcaaagcgtttagcacattgtcctagagtagtaacttgatgcaaccgttgggcgtaatcatattgccccagcagttgaccttagtcgaaatggtgtcatgttacgtgaagcggcgtctgctgcctgactcgccttcaggcgatttgaattgcttattgaatacttacgactctttggtgggcgtggtaggaggtgaacagttgcttccggcctctataaatagcctctttgctccatcattgttttcacacatcccttgatcatctgttgtttcttcctcaaccttctcttctcttccatctagccatgggcaaggacaagaaaggtcagggctcgccgcgtcgctctggcgacaaacggaagtgcgaaccgagtccttcgtctgaggactttggtgactccgagtactcagaggaggagttctcc

SEQ ID NO: 132968 - DNA, 789 bp, Zea Mays
ggagagcacatccaatccggttccttgcggactaccagcgccaccgtcagcctcacacctcggccacctcatcggaagccaaggggtgtaacatagtaaattgggtttgcgtgcttgtttttgcagagcaggaagataagaccaagcgattggcgtaccttgtgatactcctcgccgacgaagggcctgaagaagatctgggcatctgatgtatggcagcagcgactaaatctaccatagatgtagtaccgcaaagaatatgaactgtgggaatataatgaatgcatgctcacctgcacagctctgttcaacctcttgattggcctggaacacagatcaccgcatgaattttagcaaagagatcaaaggagcagaaaaaacagaacaaactttatttcttggtaggttgataatgcaagtaccaataaaattttagacaaagacatgtcaacgtagaccatttaaaactaagttattgagaggctaacccatagtctaacttctgaaactagtttccgaatcatactgcaattctgttgattcttcatcataactttaactgtctcagcatcacatatcctgatcccacttgcactgcctatccaaatgccaccactgtggggaggatgaagaatagaagggctacaaagattcaatgcaaagcacacctgactgcaggcgcatatccagtaaaggacatgggtgtgctcatgtacgcataataatctttgaaagggatcgaagttggcatgtgcatgtacacacatgtaattagatggactcacagag

SEQ ID NO: 132969 - DNA, 341 bp, Zea Mays
ataattccataaaccaatctattgttatacttacatgattttttcgttccctgccctgtcagcatctattttcctgacctatgatgacgactcaaggaggtttgtagccgacaagcaatgaagctaatctgtgcaccaacgacaatggtagccaacttggtacacggattgtggacgagattatggccgggaagaacgtcttctttgatcttcctgataagtaaaaatctatctacccatattgttctctactgctttggccttggcgcagatcataattatagtatattgttttcatacctcttaattgttgaatgaaatctttttacaacactatttta

SEQ ID NO: 132970 - DNA, 306 bp, Zea Mays
ggccccaggatgtgggaatctatcagggtggtcgccgcaatagaagacgatcgggaactctgaccactggagatgttgtgggatggtcggttctgctgcatgcacctcttgatgggcggcattgatgcgacacttgttgctatatgcctctgccctgccgaagatcatgaggcaccccgttcgctcgaggaaatcttcgatgcggacctcctgctccgtcggctcctccggtcttgcttttttggtaggcggcttggagatgaagcgcttcagaagctcgcactcccgaagcttgtgatggacagg

SEQ ID NO: 132971 - DNA, 590 bp, Zea Mays
agaaccgcgaaggccatgagcatttgatcgcgttcccgacgagtggtggtctcttagttcaaattggggattcggtaagtatcacagagctattcaagtgcttaaacaagggagagagagggataaactgaccggaaagggggctggcctcggcgaggttagttcgcggtgttcttgaaccgaattggggagaatgcgcaattcgggctcgctagtgttcggctgggagcaattcttgatgtgggggtgtgcaatgatgttgcgaagcttgctgcggggtcaatttatagcgcacaatggcggtgaccgtgaaatttgggcgctgacgcgcggcggtcgaaagtgaagaagaacacgggtgcagtgaatacgtgttccacgacgtggcagtaactccggtggtcgacgggaagctagagggagtcacggcgatgcggtggcgaggttgggacacgcggcgcaaggccggacgatggctatcaccggcgttcttatcggcttccaccgcggtgacacagtacggtggccggagttctttaacggttggagcttatccacggcggcgtacaccgggtgttacccacttaccc

SEQ ID NO: 132972 - DNA, 339 bp, Zea Mays
cttgcatagttgcatgcttgcatgcagtgtgagtgggtgagtaggtgcatggtgagcgggggcatgttttggtctacattaccttcttaatagttagtagagactagcatgttctggacttttatcgtcctgttctgagtctttgtcccttccaccgtcaccatcaccccgaggctcctccctaaatattacaggggaagccgggagaaaattcttctcttccatagcaaaggtgatctcatatccctttctatcaaatacaatatcaatggtaaggggtaaatgatctctgctcatcatcccaaccagcagcctaattattccccttcttcctgtaag

SEQ ID NO: 132973 - DNA, 354 bp, Zea Mays
gtatgttgcaccggcttaagtcgccactgactttagccgattgctccgttagtagggcatagtggtcaccccaagttacgtaagcgtgagcaagttgcaccgccttaattcattgccgacttaagtcgactgctccgttggtagggcatagtggtcaccccgagttaagtaagcgtgagcatgttgcaccgccttaagtcgttgccgacttaagtcgattgttccgtttgtagggcatagtggtcaccccgagttaagtaagagtgagcatgttgcaccgccttaagtcgttgccgacttaagtcgattgctccgtttgtagggcatagtggtcaccccgagttaagtaagcgt

SEQ ID NO: 132974 - DNA, 517 bp, Zea Mays
cacccccatcctctttgtctcactcaccgctgcgcatagcatctttcggaggtagatttagggggctcaatcgcaatcaccacgcccggccgggactgctccgccgtggagctcagcctcgccaccctgctccggcctggatgtgggcgcgcggatgtgaagcattggatccgcgtggaacggctgggattagatggggaataacggttggataggttggatcgtagccgcccaatctggatctgacggcgggtattatagaacgggtttagggaatcatcagccgtgggatttcgatctgacggctgcgattcggtaccgctttgatgaggatatgatttaatctgcaccgcgcaatgacaatccaacggctcgagatcgcccgtacccccttcgggcgacagctttgcaaaagaagccctgaactttacagaaatgaacccgcggtccactgggactgtgcgcagagtccttgaaagcttgcgcagagacccctgcccttcccagaaattagcgc

SEQ ID NO: 132975 - DNA, 758 bp, Zea Mays
gagaagttcaagtaaggacaaaattaaagtgagctataatgagagaactacctgtatggctgtaaggtcttgtgaaactcaaggagtgtttggtagggtggcttaccctttgtccaggcttagataatactagttttgattgtttggatgcctgactagcttctaagcgaggcttgagcgagccaaaaagagtgttggcgcctacattgccggaaacccttgaggtctgcgtttccacaaagctaggcatgtataagtgtagtggcccacatgttaggatttggctcacctccttgctcctttgtgtctttgtcgagatctgtatccaccatcgacatcttcctcgcgagcaccacaaccacgatcggctcacctcctcttctactgtcgtccaccaacgagcgtcgtagccaccgtcagctacaccaagctccgccgaaaccctcacgaaattcgctggcccctgcatgagcttcgccaggtcccatgcgagatctgccgagcaccacgtgaatgtcgttgaccatcacacaagctccatcgagcaccactatgccccacgtgcgcgcaaccatgaccttgttcctccccggctccaccattgctcgaagacgacgatgcggcctcgtgaggacggaggagtttgaggttcgtctccgcctggccatggctttagcctcaccacattaacatcgggcacaatccctagctccaccctcgtcggccatggatttaagctcgacgctgctatatatgat

SEQ ID NO: 132976 - DNA, 424 bp, Zea Mays
gccgtgtccaagcgcttggggtggcagatgacgttcttggcgttggatcctcatccaacggtggggattaaattgtgcagctgattgtttcggggcgttgatctctgcatgggcggacaggattagaatcagcatacccccttcatcaaacggatccgagccgtaggatggtagttcgatgaccgggattagatcacatcttcataacaccctagccgtaggatcttaatctgatgccccacgctgcgtaccggttcgctcgagttacgatctaatctgggccgtcaacacttgatcggacgtccgtccgcgcaccgtaccccttcaccgagccataattgcaaaagagaccctggaaaatgtttgaatcaacccgccgtcctactgcttagtattctgagtcgtaggatcttttgcgcctggg

SEQ ID NO: 132977 - DNA, 453 bp, Zea Mays
ggaacccacggtggagcaccaactccggcgtgaaatcgcgggttccccgatcggcaatcccatctagcgaagcaccttgtgccatccatgcctctaatcaaagctcccagacccactggtggaatcccgagcggtagcgtgggcgagttccacggcggtggaaccacaacatcggcgcaaaggcgaccgaccaccacagtgcccaaaacgtcgattaaaccgagctacgcatagaggagacaatagcgaacgtgggggatgaggactcaccagagaaggagtctgcggagaggctgaccacggaggacagtgggttcgcggtctcccgtgaagaaatcccaagcctcgggcgccggttcaacgcggcgaggccacaataacttctccacgcacaggtggagcttcacggcacggcactggggcagcgacaacgacgagcccaccggcgatggc

SEQ ID NO: 132978 - DNA, 383 bp, Zea Mays
tctgaacgtctgcttccttgattctcagctggtgatatcctgaccttagatcaatcttggagaaatacttggccccttgaagctggtcgaagaggtcgtcaatctgaggtagtggatacttgttttttattgtaacttcatttaaggatcggtagtcaatgcacattctcatgcttccatccttcttggtgacgaacaagactggtgctccctaaggagatgaactgggacgaatgtaccctttctgttgaagttctgcgatctggagcttcagttctgccaattctgtgggagccatgcagtatggtctttttgcgattggtgcggtgcctgtgatcagatcaatgtagaattctacctctctttccggaggcattcctggc

SEQ ID NO: 132979 - DNA, 584 bp, Zea Mays
gcgggttagcgctgccgatctcgccgttcttcctgctgctgttggaggagttcagactccagctccagcacctcacgccccactccatcctccaggtggccatcttcgtccacctctgcgagatgttcgtgggggtggcagcctgcacttccctctttcgccaattcttcgtgctggtgagatctgggaaaggcaaggaccacctcggtgcctactatttccagacgaggtcagatccaaccgcggcctacatcgccacccttggcggcgcgaggtgggagaattggcacaatgactgggtgatcgccagtgctgaggtcaacgaccgccttgccctgccgaacgacgaaccaagacgcgaccggaagcaatggagggccaaaccgtcccttgcgccggagttcgaacccgtactagacaggatcaaggaactggcgaccggtggtttgacctcgatgcacgtagtcggtgatttcctgaagcgtcgggtcatgccgttgcaggggaggccacatttgtgttgctggtacaccggccccaatgacattagcagggttcagcgcgggccagagaccgacctgtcc

SEQ ID NO: 132980 - DNA, 754 bp, Zea Mays
atcccaattccatcttgcaaatttctatctttgtacatctgtgtgaggcctacctcggaattcttccccactttggtttatggaagtatttatatcactgtcgacctaggatggctggagggcagcaccagctcgtgggtggtgcgagtttggagatgtgccgcgggaggaaaacagaataccttgacattcctctcaagaacaacattaaagggtggcgccttgaatggtttattgtggaaaaccacggcaagtccctccccccttggtcgggaagacagccagatgtgtgcactccgagttggattgagtctcctactgccttggaagtaacagaagctagggttttgcttgctgaaatctgtctgctgaaggagagaggtttgaccaccgaggttgtggttgctgactttgtttttaagaatattcagcccttgaaggacaaagcatacccagcttacttgtatagtggtgctaccgactcgactcgggttaccaataggagaattcctgctaaggatctggtgagccgactagacatgatcttgagaggcaaagtatcaaatgttggtgctcctgttgcctactctgcttggaatctgccacctcctaagtcctttttcaatttcgtgtccaatcctcctgctggtgatagtggtctgggtcttagagtgcgaccctctcctgaagatattgaggtcctggttgcttctctttgtgatcttcccaatgatgagaggcaagttcctttttt

SEQ ID NO: 132981 - DNA, 353 bp, Zea Mays
tcgaatgccgcctgtcctaactccttcgaagcccccctgctgctggagacagatcccgcagaacagttgcagcggccatggagacctcttgttatgccgcggatgggctacaggttgaggcagcgatcgtccttggtgggcatgtgtggggcagcgatggccccggtgttccacagtccgagcagcaaggatcactcaaggcatggaggagatgaaggggcaccagatcggtgcgttcgtgcaaggcatgggagaggcacaggatcacgacgccgttacagttatgcaaggcgttgaggaggcacagcaggagcaagaaactgaaactcggaaattgtaattgcattcagtca

SEQ ID NO: 132982 - DNA, 518 bp, Zea Mays
agcccaaagggtcgagctctctggtgacgttcttgctgttgagctcgaagaacttggaatttccttttgaggtgccctttctcttcctcttttgccctttccacttggatggatttgttggagaggtgagagaagttgaggaagtcttcgctggtgaggatggtcttaagctcgggtcttagtcctcttaggaaacgggccatcttcctggactcggtgccgacatcgtcaggcgcgtaacgggccaactctgtgaacttgtgcacatactcactgactgttctcccgccttgagttagctctcggaattcatcctccttgagttgaactatcccttggggtacatggttctcacggaaggctgtttcgaattctgcccaggtagcatctctgacggcttcactaaaggtgtcccaccatgctaaagccattcctgaaagctgatgagcagccagttggacacgctgattttcggggcatctgatggcttccagcttcctcttgatcgtgcgaagcca

SEQ ID NO: 132983 - DNA, 429 bp, Zea Mays
gatatagtcgtacattttggcagatgcttcggggacgacggtatcaatttcttcgaccgaagctgcctctgacattttcatttcttcggttgcctctgcaatttttacttcctctgcttccgaaggtagtaccttggttggttctgaaggcccggtttcaactccagtctgttgcttcgtagcttcagcaacgagcacttcggcaagcgcttcagaagtttcagcagtcttctttggagttgtgcttggaagtttaattgtttccaaaacatctaatacattaaccattcttttccttttaggggtcactgtcggccccttcttaatttttgatgcttcaatttcttctgaaggacttaaaatctctgataccttcactccctcagctgatgctttcgcttcttccgtctccggctcttttatcttttc

SEQ ID NO: 132984 - DNA, 537 bp, Zea Mays
aatcgatgccccagatcccaccacgccagcgcccactcatggccatcggatggataatatacggcacggatttaaagcgctaacgggtacatccccagattaatctcagtcgtcaacccctaatcccacggctgccagttttcttctccaccataacgcatgccgacggcgcccctcgaagatcccgtggccctcaatggcggcgaggaacgccagcagccgtcccccaccaaagtttgccccagcctctgcgccccagccaagatcgatactaagctgacaccgcactctgcgatacaccgagcaggccactggttctaccccgatccatgcatgtatcgacgacgaaggaagagaaggtgaatccgaggtggttccttaccgacatcttgtctagctacaatgcttccgatgagcgcacacaaatcgccttcgtggttccgaccaacagccgagggcaagcgttgagaagctcaggcggcggcggttggttgatccaggcctcaattctaaccggccctgcgaggggtgtgcgag

SEQ ID NO: 132985 - DNA, 522 bp, Zea Mays
atcatctccaaccattcttggcaaggctctttgaactgtttttcaaacttaaagtgataaggcaatcgaaaaagttcattcttcttctttattccctttagcttcggcatgctccagtcacttaatgttggagatatcctgttggccagatattcttgcactagatccctggtgctgatttattcagccaccactctggattctgctatggccagcggacatgctgaccctggcttcatgttgcacaagggtctggtcatcccgaagcttaaagccagtgggctcatcaccaccgtcatcagtttccctcttttcttctcatcggccttaatataaaaccactcactcttccagccagttggccacttggtgcgatagctgaggaccagagccttcgtatccttgtgatacacgaagttataacaaccaaaattttcatgtagcccgtcttctctggccttcgtttggtaatgcaactcatgcactcggcagaaagcttcaacatttgggtccatcccttgg

SEQ ID NO: 132986 - DNA, 813 bp, Zea Mays
ggtgtgagtctgagcgttggatgaggatcgtacgacggagaagaaaatcgctgacgtggacgcaccagtggccagatttgctcccagctttaatatatagtgcctgcaacggtgtgaagctgatggccaatgccgggcgcgtgacgcagcgggcactgggcaggccgaatgcggagcgggacacgtggcgggtgggccggatgcagtgtgggccacgccgacgtgggtggcaggaggatgcacatagatttgggtggttgcgggtatgtgtcgctcagttgtgagggtggaatcgatggataccttatatacctggactgctcaagttcccatggccaccatctgcagcaactgaaggcaaagacagcaccggacgtgatgtacagatggggttgcagtgggaggaggaagtgagagagggagcggcggcagccatgggcggcgtgaagctcagaagaggccgcgaccgagcaattgaagagaggcggcggccgagccgtgggagggagaggagtctagaagcatcgtaactttgggtgtcgctgaagacgggagaggaccgtcggctaccagaggtgtgagtctgagcgttggatgaggatcgtacgacggagaagaaaatcgctgacgtggacgcaccagtggccagatttgctcccagctttaatatatagtaatatagcacaaaaagctatcatggtagtagtaaccgtacatcttatctaggaaaagttaatggaaatttaattaatctgattctcaattttgcaacagtagtaacagttatagcattatggcaatagataatgtgac

SEQ ID NO: 132987 - DNA, 458 bp, Zea Mays
gccgccgccgccgccgccacagctggacaaccccgacgacgctctgttcgacctccccgacctcctcctcgacctcagacacggggcctcgtcgtgccagctctcgtgcgcgccgtcgtggtacgacgacgcgtgcttctccggcgccggcgccggcgccggcgcgttgttccgcctggaggagccgctgctgtgggagtactgagtgcagtgaaatagactgttttgctcagtcgacgagaatcaagcgcggcttcgagctgctgctgcttggtgtgtggccatctacggcctagctatgggctgtaattgcggcggtggaccagagcgcaatcgatgtaaaccatggagcagcgttggagttggaccagctggaatggaaccaaattagagccatttctcctttgcgtctgctcctacagatttagaaagcaaaccacatgtataaaagaaaaatc

SEQ ID NO: 132988 - DNA, 399 bp, Zea Mays
gaaaaaagttgtagatcctttcattgctggatttatttagtccatggcaaaaacaaatacaaagaaaattactaaggagatcatggagggtttatccgaagattctgatgacagtgatagttatgacgtggaaagtggggatgaagactgaggatcggccgtgtcgcccaagccatactatcttcgaaaaatcgactatcaagcaaagtcatattggtgccatgagggggagatattttcgcgacatgtctattgtcagagttggaggagacagtattgcccctgctctggaggaaaacgaagttgttatatatcgaagcttcttaaaggcaggtcttcggttcccgctgagcaagtttgtggttgaagtgctgaagatataccagatcttccttcatc

SEQ ID NO: 132989 - DNA, 467 bp, Zea Mays
gccgggctgcacgacaaaaatccttgaagccgagcgatggccgaaagacgccgatctccacgaggccgcgctcctccaacgacatcaagggcaaggcgacgttggagcaccccgtctgggggctcaaaaggtggaagggcgcaatgtatgaggggaggacgaaggcatggccactgcctaggggatcgatccccctttataggcagacctcctcgcttgcaccccttagcgtcacgggcgaaatccccactgacatcctccagggttctccctctacgacacgggggctgggacccgcacgtcatatgagctgatccgaagcacgaagatggcgaactgctgcacgcgaggcatgtaaccgtcccgcggttacaagcgctctcccatcttcgcagaaaccggtggtcgaaagggtggaccgccacgcgacaggcatccaactgcaccgcaactgtgcgccccttcgg

SEQ ID NO: 132990 - DNA, 349 bp, Zea Mays
cccgcaggagcaaatcccagtggtgggtcatcgcaggaaaggtctttagagctacatgtgtggacgctgcctttcggggtaggtgggtctttagttcgagggtgcttgctattgattgcctctgtctcgttgttttcagctgtggctggtatggtgtcttctgcgagggttgccttgccttttttgtgaacgagggctgccttcgtagcctcatccagggaggagctagctctggtggttactttctaaggagccatcgttggtgttgattttcggggcacgaacggtgggcaccaaatgttgaacctgctaacatgtggacatgtgggctcaagcacatggaaattga

SEQ ID NO: 132991 - DNA, 376 bp, Zea Mays
gtcacgccatgctttagtttgggcttggtatttgtttagagcctgtagagcgaagacgcggtctccatcgatgaggtccttcgaagtgggctcgtccacgtcggggacagctgacgggactgtccatggggacccgtgttttatttcttacggggtcatggcctctgatccgtatagaaggcggaaaggggtgaacccagtcgccctgcactcagtcgtgttcaatgcccagaccgcttcaggtaacaaatcggcccacttgcccatttttatcgtcgaggagcatcttcttgacagctgtgaaattttttccatttgctcgttccacaactccgttggattgcgggtggtatactgaggcgaaggcaagcttggt

SEQ ID NO: 132992 - DNA, 749 bp, Zea Mays
ggaatcgaagaatggcttgctagattacctagaccaggaacgtcggtgggtggaggaagtccggtgaggtgattcggtgtctccggcaaagtagcattcggtctgaaggtttgggaagcttcactagcctcttggaagctaacggtgaagctagactgggcgaagaggggctagggtggtcgtaccgcggtggccgaggctcagcgagcttgcgggcggtgttgtgctcgatttcctggtgatcactgacgtttaggcttcgactaggttgtgagacgtgcgggagagcaaggccaaggggttgggccatcttataggcgaaggcacgggcacggtcgcggggttgggcgcacggtcgtgccgaccgaagcttgggacacgagtgagcatggacaggtcacgttcccgggtgttagccgaggtcgagcacatggtggcttgcttctgcccttgtcgaagtgcctgtttagctgccctaacatgcatatcttggcaaagatctcgtgtatggtctcttcaccgagccaagctctacctctgttgtgcaagttccaagtgtagatgtggtcagggttaaaagatcttggggttccaagtttgctatgttagtcgtgccgccgccgagacaaatcttaggctaaatcatgtcaaacgattttggtttgatctcaaactttgtcagggtgtgcctagggtattttgtcaccactttgtccattggactatttggttttgagttttggaactag

SEQ ID NO: 132993 - DNA, 449 bp, Zea Mays
cgccagcaccatgcctgcagcgggggagcttgccatgggagagggctggtggcgtggggaggggagcacgccatggaagggggcgtctgctccatgctgctggcaacaacgaagggaaggagacggtgtgagggagagaaagggaggtgatgaggctggtggcggctaggtaggagagggaaaaaatctcacatgtgtgagggaatattttagtttaggtttgggagattgcttaggatacaagcaaaggattgcttaaaagataagtaaaaggagtttgcttagaaaaggctcaaagaggttgcttagagaataaaagggttttatctaggctaaggaaactatttaaaggcagaaaaatctctcatgggatttgtagaatagagagaaccggtgtttgatcgaacggattagcgaagaattatctgaactaggaatttgatttttgg

SEQ ID NO: 132994 - DNA, 437 bp, Zea Mays
gtccatgtgcggctgtcggacgtatgaacaatttaagtttgacggtctacatgtggaccgtcagacataacgtcagtggggcctactgaacgtcgtcacggccgttacctgatttaactgtggatggtccctgaaagccgttgaagatatgttatgtttgacggccgctatcggacataatcttatttctgaccttttagaactgacgccgctgaacataaaccctaagccgttggaaataggtaatgtccgatggtttagtgcttatgtccgacgggttaaaccgtcgaaattttatggttttactgttgcggagaggttgtcttccagagcttttaaacacttttgcagttcatttttttttcacattcaaatacaaaaactgcaccttttctgaacaatacatccacagggacatacatggggcaaaccgcaaa

SEQ ID NO: 132995 - DNA, 493 bp, Zea Mays
atcttgacctggtcaatacagtctactcctccatgtactcttgcactcctccatgtactcttgcacttttcaatgtcatccacctatggttggtcctctagcttctgtaatccctcagtccaagctcgacgtttgtccttcaccactcttaatccatcgacatgaacctacatgatgttcaccttcatcatcgaccaccacctttatgctccataagtcaaaagacatgttacataacagcacactcacaccatagttagtcttcaaactcaacaaaagcggatcattcccttaagttcattacacttaacatcgtgagcacatatcttaattaagaagcctgatttagaattgatttttaggatttaagtgatgattcatttttgaaaaaggttctcaatcttcttattttgtttcccgagcacaaaagcttgacaatcaatttgccagtcgtgcgtgtctagacgcaaaaaataatggctttaccaaaaaa

SEQ ID NO: 132996 - DNA, 439 bp, Zea Mays
ctcgtacttcatttcggcccaccgtaggaaacacactgtgcggcccagctggttgcttccacgcgcgcgctgctggcgctgacgaccgggccccgctgctcagttctcctcacgcgcgggttgactcaccgacctgtgggaccctctggtcagatcggtcttccccatctcccgggcattctgttgaaacagctccgttcggtgcggctggaggatcgggtgacggagtccgtgcgcggtcgtggcctctcgggccataaatgcgttgcgtcggggttgacttcttccctgactcctcacattgcaacaatcgaaaccacgcagaggggcggtcatcggagaggattgccgccgtggggattgcgcggactcaaccccgtcggggtctctgcaccgggtctggcaacttgggctggctccttgggtgtgtgcgtggaca

SEQ ID NO: 132997 - DNA, 471 bp, Zea Mays
acatggtactgttgttttggtctgtagatgccttgacgttgcagtatgatttgacctacttaagcataaaaaagccaataaacatctcatttagtttggatatccatccaaaaccgcatgtaccggtgaggcatggtctgaactttttggaggaatgtgtctgttccctaggaatagccaacggggggtctctacgtagaacaactccatgaaagactgattgattccgcagcttaaaccaaactgcagcacacgccatggaatggttttgtgatgcaaaccaaacacgctgtgagcgaccagagcttgctcacgcaacttgcagtagacaagtggattgaacatctgctgatctacacactgcaccctaaatcatttaacaccaagactgcatgtgtgaatctacgagtaggttttaggggcatcctagatatatgagtgggttttaggggcatcctagatctacgaggg

SEQ ID NO: 132998 - DNA, 609 bp, Zea Mays
aggggaacaagaatagggaagagatgtcccacacgcgttagtgcagatcatcgggggaaaaatcgtcgcgtgtatggggttgaggagctattctctaacagagaattctccattgccatccctacatgtaagtgactgatcacttacagcggacaacataaacaagtgaatgttgctatgttcagccagttttaggtttcgatttttgaccattaccgatgcaatttatgtttagttcgttacggtcatctcgtataccccgcatctgacctcgtttcgacaatttcaatctcgaattcgttttcaaataaaaatcccgaatttgttttcaaacaaaaatgtaaaagtgaaagcaagaagggaacatatctggtgcaaaccaactcttttatgcaaccatgcaaacttctaatttgaaccacctctagttgcatgagtcaacgtccgggtctaaaaacaaaggtccaaagtaggggactagtacagggttgcactggcaatggggcgaatcgaaagagagccacggactgccatgggagtgcaagcttttcactttcaacagttcccaatcacactctgcttacatggcgttccagaagaaagagccga

SEQ ID NO: 132999 - DNA, 1073 bp, Zea Mays
cttcattcaccaggaggtccggaagctgcttgacgtcggcttcatcgaagaggttcatcacccagtgtggttggccaacccagtcatcatccccaaggcaaatgggaagcttcggatgtgcatcgactacaccatcctaaataaggcctatcccaaggacccgtatccacttccacgcatagatcaaatcgtggactctacctccgggtgcgacctcttgtcctttttagatgcctactcgggtttccatcagatccgaatgggtagggaggataggaagcataccacttttgtaacagtggatgggctctactgctatgttgtaatgccctacggtctgaagaacgccttgccaacatttgtacgggagatgagtaagaccttcggggacctgattagggacaaggtagagatatacgtcgatgacatcatggtcaagactaggagggggtcgactctggtggaagacctgaccctggtctttgataagctgcgggtgacgcgcacaaagctgaacctagacaaatgtgtctttggcgtctccgctggggagctgctgggattcctggtttcacaccggggcattgaagcaaacccggagaagatcagcgcgattgaggcaatgaggcctccggcccgtatcaaggacgtccagaagcttacagggtcattagctgcccttagccgcttcatctcacggctggctgagagggcgctacccttcttcaagctcctgcgaaaatccggtccattctcttggaccgaagaggctgaacaagcctttcaagagttgaagcagcacctggtgtccctacaagtactggtagctccagaccctggggagtcattgtatttatacatcgcggcggccatagaagtggtgagcatggtgctggtggtggaaagggcgacacaagaaaactgggagcctgagggctcgggaccagctacaagggtccggaccgttcagaggccggtctactacatcagcgaggtcctccatgaggcaaagaccaggtaccttgagacgcacaagctcctctatgctgtacttgttgcgtccaggaagctgc

SEQ ID NO: 133000 - DNA, 301 bp, Zea Mays
gcacgtgttggtccgtttgggcctctagggtggggggcatccgcgacctctccaaagaaggtaacaccctttaccttagacttcctgtggtatagatgtccatccaggtcgcccgatatagacatggtccgagcatactcagacacgacacaaatagaatcgtgcttagcacggcactgtgattgccctcatcatgccggaccaggtcacagacctcgagccctatccaagcatgacctgaacatgcccagatcgtgctaggccgacccgacagcccgtgggactatcacgggtcataccg

SEQ ID NO: 133001 - DNA, 380 bp, Zea Mays
caagggatagagccaagcgcgaagtgtttctacagcatgcacgaacttctgtatgagacgaaggccatgggtaaagaacagtatcacaacaacttcggttgttatggatttatcgcccatcccaacgcaagccacctagtgccaacatttcgaaagagatggctcggaactttaatggaagaatggttttatgtgaagaacgacttgacagcgagggaggacatcaaggaggttagcatgcaccccatatggtcccgcttcggtctccgaaagccgaatgttgaaattgatgacgccgccgaagcgtgtcagaaggcgtttggtactgtctgcttgttcattgctacaagagatttaattcaagagcatatagcattcag

SEQ ID NO: 133002 - DNA, 361 bp, Zea Mays
caaggacccatcctccattcaaatgcagggacccgatcatcttgatgcattgcgatgtacagtttttggtccacgcagagtctctacacatttgaagcacaaagctgtttctagagtatttgaagcttttaaattacagaacattagatatgctcgtgcttaagcactaacttgctgaaagttgcttttgatgatctgaccgtcttctccattttctcgtatgatgtccatcagcttggacctggtgatcctcagaatctgagatagtttcgtagtccagaaagtgaatgacgaccctcggctacttggtagttagaaagtagctatgggtttaatgtgacacaatagaaaattatattgg

SEQ ID NO: 133003 - DNA, 375 bp, Zea Mays
atagaattgcgagatcatttaattgacaaattatctgtgcttttcaacaaatgtggctccaatataaaagaatacaacttgccacaaaaaactaattcaacgggctcaatccacggcaatcgatttattgaggaagagttatcatataacttcgatactttatcacaaactgcatacaatctccgtgtgaaactgaatgatcaacagttgcatgcttttaatactatagttgatactgtcctatcaaacatatttggattcttctttttatctggatatggaggcactggaaagactttcctttggaatgcgatcataacacacttacgagcacaaaaaaggatagtcttaacggttgcatcttctggggttgcc

SEQ ID NO: 133004 - DNA, 518 bp, Zea Mays
accatgaatggcccttcccatagtggcgacaatttgtgtcgtccttcctacgttagaattcggcgaaggaccaagtctcccactgcaaaggatcgatgtcgtatggccttatcatgatagcgcctcagggtttgctggtatctagctaactgaattactgtattcaatcgttcttcttccaatgtatcaatattctctagtctggtagcttctgcctcagctatgttttcgaagaccagccttggtgccccaaacttgaggtcggcaggtagcactgcctccaaaccatagaccatgaagaagggagtgtttccatgcaaagctcgactaggttgagttcttaggctccaaatcacatacggcaactctctgatccactttcccgcgaacttttcattcttgtcgaagacttccttcctgagtgcttccaatatcattccattagccctttctacctaatcgttggctcttgggtgtgctactaacgcatatttgatctggatgcttctttgttcgta

SEQ ID NO: 133005 - DNA, 307 bp, Zea Mays
aaaattttgattcagcaacaagaagatactcactcgtatgctattacggttagggaagaacttaaggaaaccatgggcttcctaggtcatcatgatcaggtgcttgaggagttgcatcatacctatccgatggaatttcaaacagtgcagcgactgatcaaccatctgcaacaaacggtgcatatgctcaatgttgccttttattctgccccaacaccaacagactaaaaggtacctatggagcatggaaacagacatctggcagatgtgataatcggagaagatgtagcaggcaacttaattctcg

SEQ ID NO: 133006 - DNA, 325 bp, Zea Mays
gttccgaatacatgccgcaatatggttgtattcgtgacaaggaggtgtaggttttactcaactagaagtttggttgatgtggctaggcattgctttggcttgtgtggtgaggtgatgacaagccaaagtagtcatcgtttcctctatgtttataagtcgagtcgtgatgatacacattatgcgttcgttaaattatgcttttcatatagtgtatggttgtgctcacgattttgattaaacacatcgggtggtcaagtaggttcgtgatacaagttgtgtaatggagttagtttgttttagaatgattattgaaatgctcagttca

SEQ ID NO: 133007 - DNA, 1073 bp, Zea Mays
agggttagatcagttggttctataccagtttctgggtctctctatgatgtgaagaatgcattatacaagtttgtcattaatcatggaaaataatgtagtggtcatatcattacctgatcaaagcttatgggaaaaagttctagaacccattatatgctttgttcttcgtttctgacggttttctgagttccgactacttattttctacaaaataataacagttgtaaatgaattaataaataaaatgctagaatcatcgatattatgcaagtgtgaatcattgtaaaggaaatgctatcgaacgtggaatttctcagatccaaaatacagcataaggtaatgccactcgacgatgtctacatctttaggcttgtttttcatcctttcagcataattgttgtatgccttgtatgttgagcttaatgctgatcgccatcctttgtacctctccttggcaatagaccatatctttttcacgcgcgtcctcatttcttggaaactcccaccttctctgtttcagttttgatacaaagagatggttaattgtctagtaatttgtgaacagttgaccatatctcagtagatcataccaaacaaaatttgagatggcttaatctcggatgaagtagcggtgccatagcatgctaggcaactaatagttactaaataaattgcacataccaatacgtgagatgctatagaagatctaacattgagctctatatctttccactttttcactccaatgagtggtgcctttttctttgtaaacaatacgatttcatccacaaacgtgcgagtgtttggtcctacaggacctccaagcttagatgaaaattcaatcttaagtttgtgatcgccgttcttgattcgcttggtagctgctactatacccttaagggtaccacgcccctcctttttgaagactccatcgttatctacatatataccaataacatatgaatgggtagaaatatccaaagtagaagattgcaccatttgaataaaaaacactctaagtaaaatatatcaggatctctttttctatgacgtctagcatgagatggccaatc

SEQ ID NO: 133008 - DNA, 366 bp, Zea Mays
gtttcaacagatgtggcgaaaaccttgcccggatcctcatcctttctaccgaattcttgggggaggtggactccgcctgttgaggggcataaaacccgccgctacctcttgcctcgcctccgtgattccctagtcgagccatcatccttccccgtcgcgaattgtgagggagtgacgccgccgctgccgtggagtttgtgttccgtcatcgttcggggcgcgagctcaggtctgtgggcttcctcgagcacggcggagatcattgaagaactcgtgggtggaagaagcctttggtgctgccccaatttctcaccgacgccaacattagccgcgggtccgcactccatcgcggccgggggtctgcac

SEQ ID NO: 133009 - DNA, 557 bp, Zea Mays
gtctgcgggaggccgatagggagtccgagcgcggcaaacgcttctggtgcggcggcgaaaacaccttggtttctcggcgctaccatcacgtggaggaccagcgaactgtgcgcgccagccccatcttcacctctacggtatgactagatctcctctctgcagcgtgatagaagcgcgcgaaattttagttggcgttggcgcggttatggcaggcccgccgtcgggcgtgttggcagtgtgcgcgggtgtcgcgctggggaagaaaacggggctaccggcgagcagacaacttgaagagagagaaagggggggatggtagagcgcggggaggaagaaggccggtggtccgttgggtgaggattagacggtggagattcgacggtgtccaggtcgcaggatcataatctggcggtcggcggacgaaacagatctcgagtgcgttaggccattgatcgggctgtgtacggataagattagacggataggtaaggggctttcgaccgtggattggtgatcttacggctggaatccaattaaacgtaccgtttcgatgaaat

SEQ ID NO: 133010 - DNA, 327 bp, Zea Mays
gcctgatatagtgaaggaggccgaggaaaaggttcagaaaattattcataatctgaagaaagcccaagctcggcagaagagctatgcagacaaacggtgaatgcccttgtattttcttgaaggggactatgtctacttgaaggtttcaccaatgaagggagtatcgcatttcgggataaaaggaaagcttgcacccaggtacattggtccatttcctatacttcaaagatatgggccagtggcgtatcgacttcagctccccgaagcattgtctgctgtacataatgtgttccatgtgtcacaattgaagaagtgtcttcgtgctcc

SEQ ID NO: 133011 - DNA, 538 bp, Zea Mays
agggtgaatatgctcaatgaaaggccttgtatgggattgtagaggtccgacaaataagggggtgtttgcttatgtgagaaaccttatctctcaatataaatttttctttcgttgggctacaagaaactatgattgaagatggcttagcaaaatagagtttcaagatattctgcgggaggctgcagctgctggtccaggctgctaatgttggtctaaaaatgacatttttgtgaagcctaatccctattccctacataaacatacaacaattgtaattaaacacgatttgcctccatgatgcacatgttatatagctgaaacgaagcaaactattggataccctaaaaatgacattgcattgtgtttctacaattgtacatgcagaagtcgttggagggccgaaggcagaaggttgagctcatcaaagggatgaccaccgcagcagagggcttccagctttcctcctttgcctcggtcttcacaagagttaagttaacgcataacttccatcacaagacaaagcagcgtgagtcaaaat

SEQ ID NO: 133012 - DNA, 723 bp, Zea Mays
aacactagtgatgaactacttggagcctactccaagtctgaagataacacactatctgcggccttcgggagccgaaaaaagaagaggctaaatagagtttttgatgctattggatttatgtaccctgactaccgctacccgccacgggggcagaagagaaagagtgcaacttctgggaaggatgctgcttcagctgctccaagcgagcccgcgccgaagaggaaaaagatgaaggttcttactcaccgaccacgctatattgaaccggccacagagcttgaatttggcagtgagacctcttcggctactgaagccaaagaacctgcgcttacgcagaggattgaagagccgactgtaatgccgaaggcatcctcagccaaattagctgagccgaaggccgataatattgaagagataggagtcgagggaacgaaaatattagaagttctaagcccttcggcagaagtgacagtgccgaaggcacaaaaaggtcttacagcgacccccaagaggaaaaggatggccagtgtactagatgtgctggagacgataaaaacttcaagctctactctagggaaaactgctgaggcttcaaaagcgcagactgagacaaaactgatcgaagccaaagctacaaagagccaggccgagaccgaagctgggccttcagagcctgccaaggagaaatccttggaaaccagagaaaaggcaaccgaaaaagag

SEQ ID NO: 133013 - DNA, 541 bp, Zea Mays
gtcgtaatcatcgagccacaattgcacctattgcgcatgttgcgtgaacttgtctagtaccccgactatcgagtcacaactgcgcctgttgcgtttgttacgaaggcttgttgtgttgtcgtagccctgatggctgcacacgcattgacgccggatacgcttgagcttgtattcacgtggattgtggtgggttgttcaagcccctgaagtcacattacgctcaaccttcgtaaacagtcttgtttggctctatattttatttgattgtgttgtgtggcatcatatatttatatatatcgctaagtggccataacaactatatcaagctctatattgcttggaaatctgggtaattaaactaaaatacaatgaaacacagataagttaattctctactctcaccttatgcataaagttttacctgaagtaacctaaagatatataatgcatgaaagcctttttgacatataagacatcacaaatttggattctattagtaagcaaaaagtccttaccaaatgatttaagaccggaaatctca

SEQ ID NO: 133014 - DNA, 490 bp, Zea Mays
agactgtagagcacatgcatctcaatttagtgccaccccgaaagctttgagcgagcggagccaatcaaatgatataaaagaatactacaggcgctagggaactcgtagaacttttggctaagatcgatacatgtttttatcagtttaataaatatttattattatgtgctatcagtttaatatattatatgactgtgtccgcgggtgccataaacccgcgagtagcgggtttgggtaacatacgctacccgtcgtgggtagcgggtacaggtacgggtttaacattaatctcgtaggtgcgggtttgtaatctctgtatctgcggattttaaattcgttgccatccctatccgcgaggctacttcttgagctcaacagagacaatagtgtcactccatataatagcttttaccttcgcaactaatcattaaaattattgttttaatttttttttacgtggtagcctacctagaccgcggataacgccacc

SEQ ID NO: 133015 - DNA, 820 bp, Zea Mays
gacctagagccgtccgatcgcccatcaaccgacgggattagatcccccctaaagtgaacaggaatcacccacaacccttggatgcggcatccacggttccagacgatctcaaaccccatccactcgatcaggcgccaaaggcttggattcaatacgcgaaggggtaaatgttacttttaatcccagccgtccatctcaatcctacggccagggacctgtcttcccccgactggactcaagccgaggcagcgcggaagtgcctagggcggcggcgccatggccgcacaccatgatctggcgtcacgaggctctgctactgttaatccggggtgcaacacaaaggaaaaggcaaagtaaacctcgtgaaggtaatctcaccacagatcatcatctgtaggttcaagtcatggtggcgcagcttcatggtgatttttgaatttcagcgatcgattccggtggcttcgatcaaatctcgtgcccaatcagaggtgtttgttcctccccgaatcccgtaaccacctccaacacagtctgtggagcaaggcgaatcaagatgtagacctcatcccagtctctctctttctcgcctgctcgatggcgctctgctccttccgatggctttgatgctcaatatatagatcacagggctaggggcgagtccgagcttggccgacctggtcccgaggtccacgcccgtcggcttgaatctcgcggcatttggttggggaatcgccaggattccgcgcaggtcgttggggaggaagacaacactgaccacgcgggcccatctgtcatcgcctcagcacgaagcagcccacgc

SEQ ID NO: 133016 - DNA, 563 bp, Zea Mays
atgcatctaattaagaaaccaatttcacctttatgttcctgataattttatgaacaaaacttgatctcactttctatatgaaatagttattttattttattttgcttctttctcactcagccaaccaatcaaaaattgtactagacctggttgaacaaagaaacgaaaccaatcacacaagcctggtccattgcacacattcccaactcagcctcgttccaaatcccatgcaggcttagttaataaatgaaaccaatcacgccctaaattgcagtagagaccgggctgcctaagtacaatttagagcatctccaagagaaactataacacaaccccaaaagcatttatcatggaaaaactattttgagccctccaactcttatcttctcccctaaaagcttcacatcctgaatctgtggcccttccccctcatatttttcgcgttgtctaatactccctcaattgtcccagcacgtggcgcatttacacgctatatttggccacatgtttcgcgtcgccgaatcctcacgcgctcttgtcggtagaggcgcagtaaataaaga

SEQ ID NO: 133017 - DNA, 417 bp, Zea Mays
caggtttcttggtctgatagtccagactcaactataatagcatcaagaataggggcgtgagagaggtttcaaatagtggatcgaccgtgaaggctttgtctttaaaagttcgagtaaaaccacgaagtgaataaaaacaatggcaaaatcataattggagttcaaagtaggaacaagaacacaataacaatatatggagaaagacataattaattcatgcactactgagtacaaaaataactttatgtgtcaccgccagaggggattacagttttgtggagcctcacaataatccaggtagcatatagaacatttttacatgtgctttaacccatctagcacactgatttgagcactttaaaatttattgttgcaactgttattgaaaaagaatctttgagcattgctcgttgccac

SEQ ID NO: 133018 - DNA, 642 bp, Zea Mays
gtttcaatcattttcagccactcttggcaaggttctttaaattgtttctcaaatttaaaccgataaggaagtcgcacaagctcaagtcccttcttcgtcccttttagcttcggcatgctaaattcgctcaaggtcggagatgttctgttagccaaatattcttgaactagatctctggtgctgatctgttcggctaccaccctgaattctgctacaacttgttggcatggtgaccccgacgtcatgcggcacaggggcctagtcaacccgaagcttaaactcagcgggctcatcactagtgtcttcaacttctccctcttcttctcatcggccttgacatagaacgactcacttttccaaccggttggccacttggtgcgatagcaaagcaccggggccttcatatccttgcgatatgcgaagttataacagccaaagttttcatgcaactcgtcttctctggccttcgtctggtaatgcagctcatgcactcgacataaagcttcggcattcgggtccattccttggcttcgaagggcccaaatgaagacgctgagcctaacgatagcgttaggggtcagctgatgaagatatatttcgtagttatccaaaacttccccaatcatctcgttcaagggaaac

SEQ ID NO: 133019 - DNA, 678 bp, Zea Mays
aagaagatggctttgggtaggtttaccaatgattgatcaggctcataatccactaattaatagttttaaatttaaaaatgcccaactgagtgtaccaacagatattttaaaaatcactggcataaatatttaattcagataacaaatatgaagcatattatagacataatcaacacccgaagagattaaaaacagcatgtcatgtttctgaagttgcaagcattggaaaatcatgttgattttccaaggagatatctcaaatatgtcgaattttctcatccccactgtcattttcctaacatcaatacaacccgaaggggcgaggatggctgacggcagcaaatgaatctaatgttacttgaacccttcatacatcaatgcatctggtgcggaaggggcgaggatggctgacggcagcaaatgcgaacgcggggatccgaaagcaagggtagaatgatcactccggaagcaaaaaactgaaaagaaaataaaaagaagttaaaagtactctaaatactattttagcaaaatagtccacaaagttatattataaataatctaatattacttgaacccttcatacatcagcactgaatcttaaatgaaattagtttaattttttaaaaaaataaaaattccttaaaaaataatgttctcaaactaacccttattatttgt

SEQ ID NO: 133020 - DNA, 347 bp, Zea Mays
agggaatcgagtgcctggggcacccggctgatttgggggagtgggggtattgttggggcgaataatgattggctgcttaaaagggaatgcaagtggacgagaaaaagtgcgattttggctagaaggccggatgacaaaccgttgcctcttcgcctggccctgagtaggcctctcaccactgaatcccttgttctttctagaacttgcgtattttgcttccacagataaggttgtactgacagcctttccatacgtgagatctatacatgtggccatctttcgctgcaaccggtcatttagacccctcatgaagcagttctttttctttaaatcagtattcacctggt

SEQ ID NO: 133021 - DNA, 450 bp, Zea Mays
gtttggacatctatagcagcgacacaacccataggccaacaacaatacaatagcagtatgtgcatccgtaaggcagtaacatcataggcggattgcttcgtgcttgggcctagctgcctgggaggctaagtgggccaatcgggccatgccaaatagattttccggtctactgtaaagcgggataatacgggaaaataccggctcaaaacgggataccggaaatacgggcgggaaactaccttaactgttttcgcacccgttttcggttggtcccatcccgttttcgtaccgttttcgtattttcccggaaatacgaaaatagtcgggacaaaatgggaatacggagtgggtcgggacgggaaatttcccgttcgttttcatccctagtcagaacgcaccggacatgtccggtgtgctaccagactgtctggtgcccctagagaacagagg

SEQ ID NO: 133022 - DNA, 459 bp, Zea Mays
gaactagtactggccgtacactctcacaaatggagtcatcagacataagggccgtatttggttggcgctaatcccattttgcagcagactgttacgacagcaatgcacagcagtgccttagggggccactctggtttgtctgttacataccgaagactcaaaatgacatttgcatggcctggcatgaaacaacaagtgaaggaatttgtgcaatcttgtctcatatgccaacaggccaaacctgacaaggccaagtatccgggacttcttcttccacttccaattccttcgcatgcatggcacacagtcagcctagactttatcactagtttaccacagtctggtcgttcgaattgcattttagtggtggtcgataaattctccaaatatgcccattttattcccttgactcacccatttacagctccgtccgtagctaaagtatatttgtctgaggtc

SEQ ID NO: 133023 - DNA, 546 bp, Zea Mays
atgagttaactgacaatacttataccttattcctaaaccacggaatgaaatttttggcccaggtggatgtatattgtggcaatgaagacacttcctcgccattgctatactcactgtaatacaaaatattagtactaatatcagaacaggaaattgatattacataagtaaaaattgaaggtacccgcaagaattacctaataaatggttgcacctcatcacaattccttagaacatatatatgagcctgttctaactcaagcaattcaaggtctcgagtcttgtgagcaccaagtgatcttcccacacaagaaaatattggtaaagaaaactttccataatcatactcatcattgattcgtccaggacgattgtgcactgtctgcacatcatctaagtacctcgagcacaatgttataaattcatatgcaagataaccctctgctattgaggcctctggatgagccatgttgcgaatgagagatttaagaagttttatatatctctcaaattggtacatccatcgatacatggtgggtccaccaa

SEQ ID NO: 133024 - DNA, 586 bp, Zea Mays
cactatcttgaacataacgcttctgtaagtaagaccacatagcttttgcagtcttgaatgaataaagactcataatcatggatggcttgacactgttaacaataggaaccatcacttttccatcattaatagcccaagtcttaatttcagatgcattactgttatttgcagtgggcttaggtggaccatcaatcaaatgaaaggtaagaccatgaccttgtaaagcagtttctacacagaaggaccattcacgataattttgaccatccaaagtgatgttgataggaattgcagtaggttgcgatatggtacactagcactaaagaaggaatcccaacaatattcaaaccgaccggaggagcagagtatccaaaccgacgagagtagactggatgcagacatgagccatcagcgggtgaagaaggcttcgacttgacgacgtgacgacattggggatctccaagatctagggcggagcagagcctgcgggtcggtctgggacgacgcgccaacgccaggaaccaccgaggacaggggcgggacggactccagattgaacgacgcgacgacgccaagaaccaccgag

SEQ ID NO: 133025 - DNA, 1389 bp, Zea Mays
cacgaagaaggtgaccatattggatgctagtgggggcagacatgaactggctcagaatgtggacatcataggagatatctggatgagtgatgccaaggtagacaatactaccaacaaggtgacaatagcaagtgggatctgcaagaggaacaccatttgtggcacgaagacgaagctgaagatccatgggagtgtccacagaacagtgatcagcaagtctagcacgatcaaggatgtcatgaatgtatttgcgctaagagaggtaataaccatcgggcgtggaggtgacttcaatcccaagaaagaagctaagaggacctaagtcagacatatggaactacacactaagtcgtgccttgacaaaggcaatataatcaaggtcatcaccagtgatcaacatagcatcaacatatagaagaatgagggtgcgacctcgaggtgaagtgtgaacaaagagagtaggatcatgttggctagcaacaaaaccggtattagtgacaacagaggtgaagcactcaaaccaggcacgaggggcatgtttgaggccataaagagaacggcgaagtcgacagacatgaccatcagggacaaggtaactagggggagggtgcatgtagacttcctcacgcaactcaccatgaagaaaagcattcttcacatcagttgtgagatagcccaccaatgaacagaggcaacatcaacaagagtatgaacaatggtctgatgggcaacatgagcaaaggtctcctcatagtcacgcccatactcttgtttaaaaccacctgcaacaagtcatgctttgtagcgctcaatggagccatcatagcgggtcttaatattatagatccacttacacgtgataggagaagtagaggaaggaagtgggacaagatcccaagtgtcggttcgctcaagagtagcaatctcctcggccatatctaattgctactcaggatgggaaagagcatcacagtaggaagtaggcttagagagaatagaagcagaagcgacaaaaccaagacgagccggacgacaaatcgtacgacgaccgtgaaggttatattttggaggaggcgcaccaagcacacaaggggatgagctagatgatgccaagggggacagtggaggacatggacgttgagtgtagtggaaaagaataggaggacatgatggaggggatggtggagatggaggtggaggcaatgctggagggggagaaggcgatagtggtggaggtgagggatgtggaggtgatggtgatgaaataggaataggggaggatagcggagacaaggtggtaggaagaggtggaaccgagcggagaaaatcaatagactcaaaggaagaggaagaagaggacaaatcagtaggaaagaaaggacatgactc

SEQ ID NO: 133026 - DNA, 776 bp, Zea Mays
cgaagcggggtttaagaaccgaagtatcgtggcctttcctctgcatcccatccaagcgccgccccatagctcacttttccttgccccgccgtgccagcatcgttaagggcggatattgccgccgccatagaatctcgggccgtgactagccaaagctttaggcgggagttcaattggattcgcttggtcgcggtgaaggttgccagcgacgtttctggggcgaatcggggcccagcaccttggatttctcgccgttgagttgcagtccaccgcgtaccgcactgctctggagccagggcacgactcgacataaacctaggtataaacgcttatcccatgctcgcgttgtccttctgctctcgttgcgcgcttcggcagggtggttgggggattgttatcgggttgggtttgctcaccggcgtggtctccgccgtgaacggaggtgagcgccgccgtgcccaatgtcagattaggggaaggaatgtgcaccgttagatctcaatggacagcccagattagatgtctgcgtaccctttcacgctgttgtatgcaggtcgtggatctgtgatcgtgcggttaggctgctggggctagtcataatagatctggaccgtcggatccgtatccgacgactgtgattatgttctggttcgcgcggagataagatttaatcgtggccgttcgctcaatccgatggcccaaatcgtgcgataccccttcggctagcgcaattgcaaaagagaccctaacctctctggaaatcaacccgccgtccc

SEQ ID NO: 133027 - DNA, 315 bp, Zea Mays
cgacgaagagagagagagacatgttttcttgtatagatgctcgatcgaattttcctctgttctgtatatatttctgcttgcttgctgttgtgtgtcatttccgctgaacatctagatctgtaattgagcttgcgcgcgcgtttcacgatttcgttataaacatgtggtcgagcgagcagcaacatttgagttgagaagaatacaggacacccgtgtctactaaccgcaccattttttagctgatggtacattctccctgaatatttttgggtccacacaccacttacctactctactcttgtccgtccgtacctg

SEQ ID NO: 133028 - DNA, 438 bp, Zea Mays
ggcgaggccgcgatggaggtcacgacgtgcgtggcggagatccgcgggcgagcagggagatcctcatgcagggagatccgcgggcgcggtggaggcatgcggcacggcgggggcgcacggagctgcggacgccttcattacggttgtaatggagcaccacggccgcaccttccatggagagcatggacgaggatcgtgagccggggcggggtcgctgatggtggggcgaggctggctaggggcgagcatcgcgacgattgcgagggagaggaacacggaggcgccttccatcgacagcgtggacgagcatctcggtggagggggtcgcgggcgaggagagacgggcgggggcacgcgaatcacggcggcggtgtcgcaggtgcggaggtagaacagtggtgcacggggtgtggacgcctacgctataggcttattgag

SEQ ID NO: 133029 - DNA, 337 bp, Zea Mays
gtttgcagcaggagattatagagcgagacagggctatagactaggctgtaaaatcacgatctatagcctgggattgcgaggcaaatgcctgagcccgggtggaggagctaagcgtagccttggcaaatctgcaagcatacagtaacactctgcacgaggaagtgcacatgtggtatgaccagttgcatccgaacgtgccaccggaggttgtggcaatgggaattggaacattaggagcagctggcggaggaccttatggggagttggatctctttggagcccctccttccatgaacctcacagatgatcgttctcccgaagctagcagtggagcggg

SEQ ID NO: 133030 - DNA, 668 bp, Zea Mays
ccgggcttgattgattaattaaggaagtcttgtgtagatattggttcatagtagctggagatgaaagaatgcttttatgccacttctattcttggctaggaattggtgatcggaagtgggcttctatgctttcctagtgcaagggtagaagggtagggatttgtcacttgctcttggttcctatgggacaccaaaaacaaggcaacattgtaacaccccaggtgttcatcacattctaaaccatggttgtgaacctaaatgagtatgtctatgaggatcctaatctctatgccgcacatctatctcgatgatataaaggatcttgcggaattaaggttttttcgtgacaacaaataacaagaatagggcgtactcgacttaagcgtaaagcaaatgcaaatgcggagaatcaacccaatattgcgatttcgccccagacaaatttattagaactcgacaacaaaagttacgtgggcgaaattaaccctaaatcaaaatgtcgcactgcgcttgaggagcactcgacttttataatccaaaaacacgcacgaaatcatgtgcgagttaatatctcgaggttttcttcatgcacctcacccagggtcaagaaatcaaagtgttcggataattaagcagatgaaatttatttgattctggtatgacgtgct

SEQ ID NO: 133031 - DNA, 767 bp, Zea Mays
gggcagggtattggaacatgcagtcggaaaaccataaatcctggcgtctccgacattattatgcgttttgtttttgtttcctaaagtttgttttattgcatgtctgtggcatgacatcacgatcaataatccatcgttgtagcaacctttgctcctagctatagactgtttagtactattggattttagccattgaacccacgcttacgagacccaggctatggaggctaggaatcggcatagtacaaagacggcatagtacaaagacagtaattaactaattatggcatcggagctcttcaccacccgcgcgcctccagacttaaaaggcacgacctaagaagctctaacgaccaagagacatatgccgacaagcacgactttaccaaggtagaataccctgttttaccacgacgcagtagctccttagcttccttgagaacttactggtaataactgacccccaccttgacctataaaagagaaagggtcagccaatacgtggaggaccacagtagagcacgtggaggactatggaggccaaattcaaggagcacgctgccacgaaccccaaggcttagctaggttgagaacaccaaatttatagttcttaggccataccacgcataagaggcttaggagactcctccctatctcgctcgcttgaaccctacaacgagcattgagtaacaaaggtgccggtagcgtgagccgtcgaagactgggtgtagggacggtctgtctgaaccagtataaatctcgcgccc

SEQ ID NO: 133032 - DNA, 638 bp, Zea Mays
attcggcaacacctcccccgcgaggaggtttccaaaacatgcaaataaaactaacagcacgatggctgacatccacacatatatcaacggtacgatggcagacaatcacaacgaagacgtttctatggtaattagatttccatgaccggcgtgcattattcaaagctctaggcgcacaaatgataagccactaataaaagttcattgtttcttgttacgatcacaatgtatgctagtacgttctttccaaattgttagatgttttgcttttttagctacattagtacgtgcgtaaactattcactacatatacgacaagtcagaatggaaaccattcactgcatacatgtaatttagttaaatcaacttagcgggggcagggatggccggtgtggtaggtgttagtggcgggatggacgtggaggtgttcttcagcgacaaagatgactggggaggtggccaacagcagtaggtggttggaaatggcggcggcacggcggagatggcgacgacgtcgggtccggggatggcggaggcgctaggctggtggggagttcgtcggatgcggggaggacgactagcgtgatggccggaggtgtcgagtcagccgtagaagacgacgtagcggcggtgttggc

SEQ ID NO: 133033 - DNA, 402 bp, Zea Mays
gtatcgagggctagccgactcaactcgggttaccaacagaagaattctctctgcagacttggtgagccgacttgagatgatccttaggggcaaagtgtcaaatgttggtgctccagtggcatacttggcctggaacctgcctcctcccaaagccttcacctttttgcgtcgaatccacctgtcactgatggcagtttgggccttagagtgcgaccctctgctgatgaagttagtgccttggttgcttcgcttggggagattcctgatgatgaacggtaggtccattttgaggtgcccttgaaccctagtgatgcagagataagtgctatgcttgatttgttggctgaggattcttccgacgctgctcctgctggggcgttggtagtggcgcccctcccagag

SEQ ID NO: 133034 - DNA, 358 bp, Zea Mays
gtcagactcgtccctaaccctgtgggccgttgcaaccgccccgcgtatggcggcatgggagccttggactagggtcttcctgcactcgggggtaaaaaggcatggcctggtggctccgctgcgaaccccaggaccaaggacccccctaggtttccaccgccaccattaaatcgagggagagagatcgatgagggcgccaccgttgtgccaaccgtagggagtaccgccgggggttgatttcatgctggggcattgttgggtatggctagtgttgttggggaggtggccgaccctatcgatgggcatggtgcagtcaccgtgctccgggatacgcatgggagttgtggttcctcgtcgg

SEQ ID NO: 133035 - DNA, 347 bp, Zea Mays
caacagacaagtgaccttggaacatgttgttgtgagtactatggaattccttgtcgccagatcagtacaaacgaaagtgaaactacaaaacagaagaactggattttattttctggcataaacagacaaatgtctccccaagaacatctaatagcagattctctcgtacctaatgcactatcagatgatgaattgcaaagtattccaaaaaggaaacatcataaggatgcacaaccccaagaagaatcacaagagtgttacattgatggatggactattacttgcacacagtttcagcctcgtcgtcacatcagctccaagaaacaaaaagggaaacatggaaaaag

SEQ ID NO: 133036 - DNA, 464 bp, Zea Mays
ggttgaaagtccctcagccttagaggtggctgctacagagagcttggtccccaaggatggcgctagcgtttacccagcccccgagggtgttgctagtgatgatccggctcgggtgggcagcgcgagctatgacccagcccccgagggtgtccgagcgggttctccttctcatacttccatggatgttcacgtcgggtcttctccacattctggttgcatggcagtagcatgggcttcgggtcaggaggtcgccttagaggccggcgcgcctgatgacagagttttgatttctactggtgacgctgaattggtccccactgatgctctgcatattgcttcggttggtgatccttcatcaagtcaccaactgaattcccatgatttgggggttccttcgttcttctccaatctccaggtaatttggttttttctgacctgactatactccgtgtgaaatactgttc

SEQ ID NO: 133037 - DNA, 628 bp, Zea Mays
tgaccattgagttcgccagggttttgaccgcgccgccgcaactccgtcgccacattctgcaggcatcgtcaaggttggactcctcccccatcgcatcgtcgtcttcgcaggtatattcgtcacctccatttcgaccatgtctatcctccgccgtgctgttacggatccgttcctcccccatgtactgattagggtttaggttgcatccacgtccgtggttaatacttcccccctctattcacgactatttcagaacgggttactaacgattagcgtgtgacatgtgatgttcagatttcggcgactaatctggtagttcctgttgcgtccgaagatccagtggtaccaaggtgatgttaatatcaacttcttggttatttttactgcttttcttggtgtgtatgtattcgaagatccagtgccaaatttgttctcggtttagggaaatccattcaaagtgtgtttgcacttttattagtacacactttcctagttttttggtacttcaaccctagtttagtttgttagcaggcgaggcaattcatgtcaatacgtgtccccatgtctagtatactaacgacctaaatccacatcagatggattcagtagactccatagccgacaaggc

SEQ ID NO: 133038 - DNA, 811 bp, Zea Mays
ccttggtccagatgggtgatgcaagaagacacaagttttatcctggttcgggcaagagaaggccctacttctagcagagggggatgagacttacttgcacctaagtgcttgtagtagggggtacaagctggtcgggagagggagaggatcccaagtccctcatggtgattaaggcgagtgccaatatctgtcgtgggggatgaaaactagtgaagtgttctcctcctgtcatttgaagccccagactccttttatagcctcaaggagggttcccaggagcgcctaggcttgtcgtattgaggaggggagacgaatccaagcccctatagctggcattgccgatgtaatggccttgtcctagcggttgacttgaaacagggggaggacgcatgacccttgtatctcacatcttaaccgagcagagagtcgaggcctgggctgggggctcagacgcgtacccaagccaaccagatggaggtgtagtccgagtcgtagttgttgaaacagtgataagtatggtgaaaagcgcatggtaatcttccccgtatggtgtaaagcagacttgatgtcgttcccgcagtttcctgtagccatcccgttgtcagcagtcttcaaggaggagttggtggagtcctctcgtcgatgttatctaggccaagaccaagctcgggcgagatggaggttcctcctgaggccatggttgtacccatgatggggcatacagtcgtgcagggagtggtagtacatgtatcggagtggcctcctacaggatgcggggagttgttgccggggcagttggctaaagccaggc

SEQ ID NO: 133039 - DNA, 686 bp, Zea Mays
attgtatcatttcacatagttgaaatccatttcatgcctcctcttatgttcagttttcctagaatcaaattactcgctgctcacaactggcgggcccatgtttattcccataactttaactgctaattcagaaaaaatgatcgaatgaagcttgaacagaaagcaacaagtcttttgcaataaacaaaataaaaagcaccaagacattactgggatacaaagtgacattattgggacaaattcagttcatctgtcgtgttactgcacatttaataatccacatctttaccatcactgtcaaaatctctgcagtctccatattctttcaaagcaagttgtttgctgacctcagcatgtttgcaaaaacatcgcaaataataatggaaccatgaataatttctagacaatgtgaactaatatgtcattgaaatagacgcaatgccctattcattacatgatttcaagagttatagaacaattagctaggtcacaaaaagcatatagattaaaatatgcaagaaaaaagatgtttttaagaaaatgagaaagcaaacagtctccacccctttgttttgcttgttaaaagaaacacataggctaagcagcgtacctgttcttgcccgaggagtattgacttccaattttaaactggattccacaccatcgatggattccattagttcaag

SEQ ID NO: 133040 - DNA, 435 bp, Zea Mays
ccctactcaggttagctgcatacccatcagggaacatcaacatcttgatccactgaagtacttcctctgggccctgcttaggacgaaatcagccttagaccttctccatgtctttccaccaccaggcggcttcatctcttggtttggtctatcacataacgctgccagatccacgcttgcctttacattatcctttgacttatcaggaatgtccataattgttgcccaaagtgcctcggcaacattctttttagtgtgcatcacgtcaatgttgtgtggaaggagcaggtcgtcataataggggagccaagtcaagcccgacttatgtgtccacatatgctgctcaccatatcccacaaaaccaccttctgtagaagccacgagcccatctatctgttgacgaatttcggcacaggtcatcgttgcaggtgggcg

SEQ ID NO: 133041 - DNA, 668 bp, Zea Mays
cgaaggggtatcgttcgtttctggccacccgattacaactgaacgggtcagatcggttctgacattaatacgaaccggaacatgctcctaaccgccagatctcgatctaacggccacgagttcagaactacgcgatccaatctaacgcgtgagatctcgatccaacggttcctatttggctacccccagatttaatccaaaccgcccaatcgttgatccgacggcaagcggtattcttccacttcctgccccgatcctaacagttccctagccgatcgacggctaaaacttcatcccctccgacaggacttcacgccgacgcgcggtggaccacgccccgccccgcggcggaggtcatctccggcaacccagtgcacagccccccggcaagactccagcatccatgaacacacgcacccatttccactggtatggccctacgcggcgacacgattcgagcgaggcaaacacgatagggtggaacataccaggaattggtgtcttccttgcctacggcgagcgcggaccgcggcgcaccctcaccttctctgcgacacaaagcatggggtctgtggacgcggcactcatacggtgaggtcgaggagtctccccgaggcgccaagaaaaatccccaggtacggcgtcgaggatgaggagtgatgggcacg

SEQ ID NO: 133042 - DNA, 327 bp, Zea Mays
actctgcgagcgtgtcgtgtggcggcgcgcccgtctcccacaacaagctagaacccgacatcacatccgtcaccgcctgtagatgaagcgcgtcgggatcgtggggagaacaggagtgctgcagatcgccgtcgaacgctggttcctccgctgggtcagctgcgccgtcgtgaggcgagatttcttcgttggtggggtggcacgttcggtcgtatatctagcctgattggtcggcggtcgggttttgttagttgtgggaggatgggaggcgggcgtatagctttcagaacttctggggttgcaatgaatttgggccgggggcgtggg

SEQ ID NO: 133043 - DNA, 655 bp, Zea Mays
ggcctttggttggtacggtgcttatattgaatcatgatcgtcatcttaatatctaatgttcctcgtctttgtttttgcaaatagcatctctagctatccacacctttctaagagcatcttcaaaaaactttctaaattgtactctctaagttattatttagagatttatttgcattaaatcaatttctatagtttttcaatctccaatggtttttaaatcttttttgcactttagacagctatttatatttttttttctttggctagcaataaaccggagtgaacgatagctatacttggataaccaagtaaataagctgtcggagttttttttttaatatctatttatatcagtgactcagtgaggaaggagttgctctaaggagatagacaaggaacattgtgcatacttgatatgcttcccgtttaattttatcctccctaaaaaaagctgctaattaatactactatcatgaattcttttcagcctaacataatcataaaggtaggccggcctgccggattaggcaattgctgggaaagccattctagtgacaggagacaatattcaaggttggccgggtccggtggctgacgcggcgcactaatggcagaagggaacttggggaaggaggaccagttgttcatctttttc

SEQ ID NO: 133044 - DNA, 274 bp, Zea Mays
cgttgtttccactctccactgaatgaagagtacatccaggaagaaaggggtgggtgcggtggtgcatcctttcccgttctcccttgagggcagagtagccgagatgattgtcggtggtgctccctggcccttgtctgtagcattcatctctctctaccaagtgatctgtgaccacaccttagtgggcaaagtggacaacggagttcgctgcgccgaggaggccatgatcgatcgagcttcagttaccaaggggatcccgggcttggccttgtgt

SEQ ID NO: 133045 - DNA, 543 bp, Zea Mays
ccctaactgggccccaacttcgctttcggcccactattgcttccacagcgcgcgacccaactactaaccctcctccacgcgcgcgctccgcccactctcgcttaccactgccacatgggcccacgttccgctgcgcagcgcctcacttacgtgtgggacccaattgtcagcattgcctcccacgtgagctctgaccggttcttccccaacggcgtgcgcggaccttgcgggggaatcgcgggctttcggttgaagaggtggagctcggggataaagcttaccctgcgactacgtctacccctcgcctccctctatccatgcgctggacccgagcatcgaagttagccaccgtcgtcgcgcgccatcggctgggtgagagaaggccaccgtccgtcgttgtcgaccagcggattcaccgacgtgcgtgcctcggtgcttgatctggggtgatcgcgacgtcgtcccggtggtgtccacgggttcctcggcccctggacttgttctaccccaccggaattgctcgccgttgtctgcagaccgccg

SEQ ID NO: 133046 - DNA, 800 bp, Zea Mays
ccactttcctgcgaacttttcattcttatcgaagactttctttctgagtgcttccaatatcatcccgttggctctttctacctgcccgttggctcttgggtgtgccaccgaggcatatttgatctgaatgctcttttgctcgcagaaatcgaagaactctgagcttgtgaaattggatcccaggtcggttatgatgctattcggtattccaaacctgaatattatgtcttgtatgaattccactgccttagctaaggttagagaagcaatgggtttgaactctatccatttagtgaatttatcgatagcaaccagtacatgagtgtatcctccttgagccttcttgaaaggtccaatcatatccaatccccagcatgcgaacggccaagttatgggtatggtttgcaattgctacactggtagatgttgttgttttgacaagtactagcaagcttcgcacctctgaactaactcggctgcatcactctttgctgttggccagtagaaacacgacctgaagaccttcccaaccagggtcctggatgctgcgtgtatcccgcattgcccagcatgaacctcttctagcagttgctttccggtggctgagagaatgcatttcatgaggactcctgatgcgccccttctgtatagcgtttccccaatgagagtataatgagctgattgccttgcaattctttctgctgcatttttgtcgcctggttcctcctcattttttatgtacctgatgatcgactccatccagtcatcagaatttgactctagttggcttagagcgttgc

SEQ ID NO: 133047 - DNA, 565 bp, Zea Mays
tacttcacatattcttatcctttatttttcatttgacgtgaatatctttcaaataaccatatcttcctaagagttgaattctggattagcatagtcattttccagaaaaaaaacttcatgtttgatttctattggctgcacaggaataaaagaataaaaataaagagaaatttagacagctgttgtttagtgcagatagtggattgtgcatgcttctgtccattttgtcttaggtgatttatgaaataattctgttattaaggtcagatgctacattttgacactggatcacaagaaagtataacaacataatggacagaaagcatgtacatgtcaacctctttctatataaaaggcaacccttgtgttgtcactgtgatggtatgcagtttcaatggggctcttgagcgctgattgtggagagggctccacctggtattcttgccagattgccattcctctaaacaaagcctttatttttttagtaggggaagatgtgctgttgccattcaaaaatgaaatccacatcttttatcgatttatgtcagcaagttattatagttgt

SEQ ID NO: 133048 - DNA, 380 bp, Zea Mays
tgatgcttggtggtaccacagaggttaaaaaaaatgtgagatgccaacgataaagatgtcttggtctgcatcttgggctcttggttatctcaccttcacagccacatcagggtagcgttcctcgttgcatgcggaaacacctcattaccagtcatcatcattcgctggcggaggcgcagagcagctgcgtctagcacgaaatgttcgcgtggttgcggtcagcaatgtacccagaactcgacggattcgatccgcagcggaatgccagaaatcgtcgttggtctggcggaacgagcctgttcaacttcaagcaaaggcagctgggtatcagcgtgtatgttagttccggacggggccagttcgagatcggctcggctggg

SEQ ID NO: 133049 - DNA, 474 bp, Zea Mays
atgggtgttaccttacatttttaaataggtttcatatttttctctggtggtctacttcatcaatagttgggtaaaaatttatttgcctactgttgcacaattttaggcttccttatgatttaattaaaatatgggccaattccatattttaaatgtttagctcacttattgtgaggggttggggtgtctattatttttgtagtggtgttctagcagttagcagtccactgaattttctttaccctttttatagtggtccttgtatttttaatcatggttttccttgatttcttagtgcctaataaatatttaaccgtggaacaactctggactaggttttcctgtattttttctatgatccctatcacttaagtatactagaaaaatgtgttccttccctgtttattattttccactactttccttgattttctaagttttggatagatatagtctttaatagtaaaacttgag

SEQ ID NO: 133050 - DNA, 465 bp, Zea Mays
cgccgcccttgcgtgggcggagggaatactggcccaagacgactacgacgacaacgcggtttgtgagggagtgggttatccagcgatgatgctggagctgttggattccctgaaggatgaaacagggactgttgtgggtgacaaggaggttgcggttggtgccaagaacacgaacaccatgcctgatgctcgttgcgacgatgatggcgatgattgcgtcattcttgacggtgaccctgataagccggttgccgttgcaaaggaggaggggggaccgccacgagatgcccctgaggatgaactgcagatagttgcggagaaaggagaggtattgctcttacgattactagctttaatttctccactgccgttatgggttgtatgatggtgtcattgtgagccgctagcgattgtgttgtcatcgtgagtcactagcgatagaatccaaagtcgtatatgtacgcc

SEQ ID NO: 133051 - DNA, 431 bp, Zea Mays
tactactcgcggcatgtggtagtttaattgtcaccaagtactagttgctagtccacatgtgtttcataaaagaaatcaatgccccatgaattatttcaactgcgatcagattgtgcagcagggcggctacgatcggattgcacatacctagaattcaagagttctatatgaactgaaaacacatacaattctatctgaattttagccacagctacacatgaatctgatttggaaacagtatataggagcagaacatgcaactaaaaatccacatgttattcatatataagtgtactccatgaaactaaataatataaaagtagtatggccaccattggaaacgtggaaagcgtggggaagaaataacgcgcgaaatagaaaagaaagtaggcttcgatttcatgtggaatgagcttcggggagttcctttg

SEQ ID NO: 133052 - DNA, 534 bp, Zea Mays
ggggatctggacttcattcagatttaaggggctgagtccaaagctaggctctataaggcgaggctatgaaattcggaggattgagtacaacaaataaaggccctaatgaaacattgctaagcatcgatcctagaccacattcaggatcgagctctggtctgatggtagcctcgaacaactaaagctactagagctgctaggaaatcgaaagaaaagaaaaagaggacaaaactggctaccacaattggaggcgcttacacagggaatagtctggtagtggtctgaccctgtaaacctggtctgctaatatacaaccatagtccagtaaggtcgctcacataaaaatgtctttggtgccttctatggtctagcccggtaagaacaacccttataaacaccaattggagacaaaaaaaagaacaaagaagaaatggatcaacctcgtaaagaaggataaaagtcaaaaccagatcttcagatgtgtcaccgcccagtgcggagcctttccttgccataatatttcttcccccggca

SEQ ID NO: 133053 - DNA, 915 bp, Zea Mays
cagaagtcagagcagccgccagaggcataccggacagtgaacagtacatgttcggtgcggcaccggactgtccagtgcaactagaagacaaagctccaacggtcctggagggtccaccttgatccagcagtagtgggtgccccaatcttgaggtaccaatagaaacaaaacaaaaaaatttagaaatttctataacaatcatgaagccatgaaatgagggcataaggcaaggttttaaaatcttctacaataataaccatggcaagctataaaacttagatatctattgctattgaaaattaggaattctctggattagatatttgttaagatctttctaaaatgtgtacaagtggcacttgataagtgtcgatggctagtgcaacaacctttgctctattgcctacacacatattcaactcatttgtagcaaatattctagtcctttttagtccttgcaatgatttgcaagtatgaatcatcgatctgatatcaaatacccatgattcactaaaagaaatagccagattaatttcaataacatatatacacaaaatagaagtctcaatttccttagtcttctaagtacttcttgtagtttctagaccgtttctcaaggtcaccacaatgaaatttttgtctttagaagaaaggccagacttagactttgcatttagctttgagatctcatctttagccttgccctcacctttgcccttcatctttagcaaatgtctaggacttaccctattagattaaaataatcaatgagactttgctttggtaggcccaccaagtgatgattagaatctatataaacatagtaattggaagggtatcaaaataaactcttaattttttagggaaactatcctatcatagtaaggtaggaaaataaaccatcgcagataatta

SEQ ID NO: 133054 - DNA, 413 bp, Zea Mays
gtcaaatctggttctagggcaagatccaccacatcaatagttcgatcaggaatccgaaggcactttttaattgagatacatggaacacgttatgtaccgcagataatgattcaggcagttgaagtttgttcgccactggtccgtatcgttcaagaataggaaacggggcaatataccagggtgccaattttccttttaccccgaatcggttaacaaccttcatcggtgatactttcaggtatacatgatcattgacttgaaagactaaaggttggcgtcgtttatccgcataatttttctgtcgagcttgtgcctctttcaagttgtgccttatccgttgaactttttcttccgtctctttaaccatgtcaggcctgaaaaaccaccgttctcctggttcagaccaatttaag

SEQ ID NO: 133055 - DNA, 680 bp, Zea Mays
tcagaaggacaggattacccaaagaaaaactctcaagttttacatgatacagtggaaccaacattccgaagatgaggctacataggaaactcaagactttttagataagaatttcccaggctttttagcctcttgtaatttgtaaagtgtacaacattgttataataaaggagtgagtcccaaaccacccctgccttgtaccaagaataaggaaataaagacgtgatgcgtttcctttaccattacttaccctaggacttttaatctcgggacgagattcttttatggggggaaggatgtaacacccctggtgttactgctactaaaatttgagcataacatcataagcatgggcattgcatatgtttgacacacctagagtgcattcactaggcaaaaatttcaaacaagttgtactgttttggtattttgcaaatagaaccctggaataggggacttaaccctaaatagggattaggggggtaaaacataacccaaattgagaaaacccaaaaactttagaggaatagtcataaaatgctcccaagaatgaacttgaattacattcatacccctgagataccaaaaaacctaattggagccctgaaaaaccctaaatttaaaccctaggggcctatgtgcaaaagcagtgcacatgttgggggccttcggcttacgaa

SEQ ID NO: 133056 - DNA, 712 bp, Zea Mays
caatgtcattgttatgtgaaccaatggttaagggacttcatttaagcctattgacacattatatttgcaaggaaaccaccccattctcttgagaagcttttactggatgaatacatctgagtagataatattttttgtcattgcctgtaggaagtatagcggtacattgtctagaagctttggaggatggttcatccaaggcacatttgaagcatccataagttaggccaacacaaagagaagcaatcctggtatggaggacaacattttcatcctgaacacctagtctagtacttgagtgggcactcacaatattcacaagacaattttctccatcccttggcaccgagagaaggaagggcatgtcatagctttgaaggacgattcaaccagaatatgtaacaacgaagaactttctatgtcttttatggggaaaataaagtccacactacaaaatcatgtcaaatcatggttcagaagcaggagttagcagctacaacacaaagcaatcaacaaaaagaagtgtaccatacaacatactattgcccacctccgtatgccccacatcatattcaatatcaaggaccaatggcccaaccgacatccgatgcctcggttcatctgtagtctagccatgggggcttcatcaatcctatctcccgagcccttcaataaacaagcaaccacattttgatgagccctaatatccaac

SEQ ID NO: 133057 - DNA, 1256 bp, Zea Mays
attctcgtcccctgtgggtatgggtcgtagtcgaatcggttgtcatatggtctccgataggattgccccacatgggacacgttaactccaagtttgtcttggaatgtccccgctatctcctccctaactatatcaatggcggccggtggaaatccaccgaccctttggtccatatgtgtgtgtgctggtgtatcattatgttgctcccttgcccatgggtttggtttatgtggggtattaatgttggctctaggtactccatactatacgttaggtctctccggccttctagggcccgaaaagggcttgtacctatgtgttggtgggatcattccacgtccttgaagggtcgtgggtgctagagagacgttagtttggggctggtagtaggattgctggtaatattttatattttactcctcataccctatcgcgaacggtccagtgtaatacctggatggtttggtgatgtgctcggacggtccgcgtgtatagccagacggtccaagcatctctattgtccctagcgtggacttcagtttaccatcacgggggacagagccagccgtcgctgggctggacggtctagcctcaggcctggactgttcgactatgcgcaggggcacgagttcgaccgtgcgcaggggcacaggttattcccatataggcggtggaggatgtggctagtcattataggagttcagcaacatcccataaagggactgggattaggcatgcctttgctgtcgatgaatcttgtgggtgttctttggtttcgacctcgtgcgatggaaattagtaatggctaatttatcaaacgcatgcgctagcctcctataatcttcttgcataccacctaagatttgttgcatctattcatgtggttcttctatgtaagatcaaagagcttgcatgtcgtcgagcacagcgggtcgaagatttgtcaggttgtattccctccgtcggacgagattctggtttcgatcgaccttgaaatcaaccaaaagtagctcgtcaacttctgcctgcatctttttcttggcgtcttccagcctctgatattcttcaactggcagccaatccgtagtcggtttgatgatatttcttggggagagattggagttatcccttggatcgaccatatggggccgatcttatagatccaaccttagtctccccagtgaagttgccaaaaagtgtgttggcgtgaatctaggtgccaatcactaggagttgttccgcttgtcgggctctct

SEQ ID NO: 133058 - DNA, 649 bp, Zea Mays
aaaaaagaatggaagctatatttaataatttttagtcttttagcaaaatgtttgttttttctctcacattaatatcctaagaatttacttctaagtgcctactttgtggaggttgaggtttatgtatttcaacatccttctatgtttgattggattgcggatttgcgcttgttcttctttctagcacagttttcctttatgagaactacagcgagaatactatgaatcattagtcctttgcattccttttctatatggtgctctatgcaattgatcccagacaattcagtttctggggggttttccaaaactttcaatttgccttctgttcttgggaccttacttgttcatctgtccacctgaaaacaaaatgaaattcccttaacttacactttcggaaggcttagatcatacgtagttgataagtcatcatttgttccaccgtaggtgtagaaaagctaattagacatttggactcttttgtctctgtagtctgtacatacccacccctgcttattcacgtgcatttgaactggcaattcttctgtttgcattgaagccatgtttgtagtagtaagatactattaaagatcacggctggaatactggttgcgagagaaggaaatgtttttgttttcactgaattgat

SEQ ID NO: 133059 - DNA, 509 bp, Zea Mays
gaacctcgtggcctaccaccagtccggtgccatgatcaccacatcagactactacccggcacagcgccaatagcggtgcggccataccgctaccccagctcttaaaggatgagatcgagaagcaatgtgaggacatgctgtagcaaggaattataagggaatgcatatctgcattctcttccccagtgcttctagtgaagaaatcagatggaacatggcgattctgtgtggactactgggagcttaatgggaagactgtgaaggaccgttaccccataccagtagtggacgagtttctagatgagctccaaggttctagattcttcaccaagctggaccttcggagtgggtaccaccaggtgagaatgcactccgaagatgttgacaaaatagcattcagaacacaccgatgccactttgagttcctcatcatgccattcggtctcaccaacggcccgtcaacattccagagcttgatgaatgatatcctcaacccattcatacgcaag

SEQ ID NO: 133060 - DNA, 334 bp, Zea Mays
ttgggacaagagtctaccatatgctgagttctcatataataatagttatgaggccagtctgaagatgtcaccatttgaagctttatatggcaggaagtgcatgactcctctatattgggatcagactggagaaagacagttctttgggcctgaacttattcaagaggcagaagaacaagtccgtataatctgggagaacttgagggtagctcagaccaggcaaaagagctatgaagataatcgaagaagaccactagagtttgaggaaggtgatcatgtgtacctcaaggtgttaccacttcgtggaatgaggagattcaaagttaaaggcaaa

SEQ ID NO: 133061 - DNA, 728 bp, Zea Mays
ctcagggtgaccactatgccctgtcaatggagcaatcggcttaagtcggcgatgacttaagacggtgcaacatgctcacgcttacttaactcggggtgatcactataccctactaacggagcaatcggcttaagtcggcgacgacttaagacagtgcaacatgctcgcgcttgcttaactcagggtgaccactataccctactaacggagcaatcggcttaagtcggcgacgacttaagacggtgcaacatgctcacgcttacttaactcggggtgatcactatgccctgctaacggagcaatcggcttaagtcggcgatgacttaagacggtgcaacatcgcgcttgcttaactcagggtgaccactataccctactaacggagcaatcggcttaagtcggcgacgacttaagacggtgcaacatgctcacacttacttaactcgggtgatcactatgccctgctaacggagcaatcggtttaagtcggcgatgacttaagacggtgcaacatgctcgcgcttgcttaactcggggtggccactaaaccacactaacggagcgatcggtctgagttaattctagcttaaactagcgcagcacactcggcgtgcatacagttactcatccaggggcggcctctatgtcccatgaagaagtctcaaaaccatcacgctgcattttacttctacaaatttagatgctgctgaattctaaacaataggaga

SEQ ID NO: 133062 - DNA, 533 bp, Zea Mays
gggagggcgagacatggctagccaagggggagagaccagcggcgcaaaccgagctggagaggagtgcagctttaaaggaacgagaagatggagaggaacctccagctgaagcgtcgccgcgccagcgctgggccttggaccgcccttcctgggggctcagccgccgggacgaccaggacgcagacgccgaggaggtgggaaacagggtggtagtcgccggtaccggagagatggccggcgaggggctggtggggaggggagatgggatggaagctgaacaggcgggttggaattccgaggtggagggcgccgcgccagggcagggagccgaggcgccggggcagggagccgaggcgtcagccatcaagcctttgccaaagatttctcttgtctttgttctgtgattgtctgtcttagagtcttagaaaactgtatttgtatgtccatcttaggaaccgtgtttccttgccctgaatgttttttcttggtcataatttgcacatataaagtaataatatcatgtgagctgctga

SEQ ID NO: 133063 - DNA, 395 bp, Zea Mays
tttgattgtttagttcacatgttggctaaaaatgcttagttcgcacttagcggacatagacgtgtaatgtctaaacttaggataacatgcgttccatgattgatgtgcttgcttgagtagttgattgtggataggaatttctcctctgttgaactggtgattgggatgcttttgtgtgataaatagaagaactaatgaaaagccgtagcaagttaaataattgctcgtacttatggggtcacatttgtgttgcgtaaatatacaaaatgtttgtcgtcttttagtggtgttaatgttgtgcgctcaatgatatgtagtagctaacgctagtgtgtgtggttgcttatgatgtctcgctacttagtgtgtaattcgctaacatgtacttaaagtat

SEQ ID NO: 133064 - DNA, 762 bp, Zea Mays
gatttgtaagaataggatagttttataaatgttgtcagggttttacgctccttgctctgtttcatccctgttaacggtcgtcctatcggaaagggcatcacaacttcctaggactcccgattccgctggtgaccatcgtcgtagcctccgaggcttaggtgtttgcagtccaaccagcttactcgaggggacatttcgtttatattgtaagtccctgataacgtaaaataagaaaactcgaaacaatcattttttgtaaggaagaataacgtagctgggttatcggtgggggtcccgcccatctctccgtcgattcccttgttgtccatcccatgcctatggcatccgacgtgtcacctaccctgttagctaccaggagagatagagctaggcttaggtcagggctcgttacccctttcctatgtatgacaccgggaacagtttcgaaacaacattttattgatggttatcaaggaattacaagcggagtgtgaacccgctcctatcgagagctatcgaggattcttggtggtgacattacgcttgtcaattcctccagctcttgtcgtgtgtggtaccccatttcgctggtgtcgtcagcgacatctgccttttggggggtagagatcatgagggatgagctaccttcattccccacattgctggggtccgctcttggtactcgttggggagctagggtcggagcttgagtccgagtagagggcatcaaaaataaggtctccaccgccatcgaccatcccc

SEQ ID NO: 133065 - DNA, 501 bp, Zea Mays
cttatctagttattccaatctaatctagatcctatctaatctaatatgatctaatctagtgtgagttacttaatgctggtacacaagataaggccatacccccatgcacttgaaactaaactagtgtcttaaaccaactcagccacatgcatgagatctgatccaaccaataaagtcatgaagaattgcataatctgtctatccccacctaacatcaaacaaacttttaacctacatcttgtagtctatctcgcccatatatatctctcatcttgacagattctatcttacccttggatattcaccttatacgactggttaccccaatctggacataaaacaaagattaagccctactaaagaatcttcagattataaccagctactagcttattcattccgcttattgaataaattcctttgcaaaactattaccatatgcttctaactttcatggtcaataccaggaaaggaaagattatcacgcaaacagaaatgaat

SEQ ID NO: 133066 - DNA, 418 bp, Zea Mays
cttgctgtcaggaaggcagtataggaagtcattctcttcatcaccttcatacactagggatcctcgaggatacttcagatctctagggtaatgctgagcttcgaaaatttgcttctgagtcagttgttttctcgaagtgtgacagatgatgaatttaagatctctggtcgacaccgcttcgggtatcgatagtgatattttctttcgcaaactttcgtttacttgtcctgttagcctaatttatgaagctccagctttagtgcaatcaggagcagcacttccttcgatagcttttttccaaatctccagtttgtctttggaaattctagtaggagccggggaggctattttcgaaggccttagaacaacatctagaacgctggccattcttctcccttgtttaggtgttgatgtcgaa

SEQ ID NO: 133067 - DNA, 542 bp, Zea Mays
ttttaccgagaaactctatgatcactaaatgctctattgttgttttcttcttcttttgcttgtacagaagatggcaaaggcttttggtatgtttgttggatacttggatccatgctgtttatgagcacctgtggtggtatgatggtcgtctagggagccttccgtaggctgactgcaatggatatcagcggagctgggttcctttgttgttttctccccctctttttgttagcagtggatttgttcttacttcagtttgagacaattgaagtgcatctagattctagactctagagacaggtgtctgcttgctcttgtgaaatatgggttgcctctttcttgatcttttttatgggcagaactactgaaggtgccttcaagattattgcaaacagtcaaatcaaccaagcgcatgagccgcagtttttttaaaaccatttgaattctggtccgtggaatggtactcccttcttggctcgcttaaattcatgcaatctgtgttagaagagaaatatggtcggtgtactgtcgcaatgtaaggc

SEQ ID NO: 133068 - DNA, 558 bp, Zea Mays
gtgtgccacacccttggtaaggccctctcacctttaatttcggctccacccttcggtcgttatgcgcccttcaaattggtctttgggtcaccagggtcgcggtttggcgaccatcggcgaaagccccgctgcggaggcctgcggcgccgccatagtcgaggtcggagagagagagaagtgtgctggccgtagatcgttgaataaacggttgtgatcagatgtgtctgatactgattcggtcggggtggtaggacccgtccgatctgaatcggaggggtgagaatgagttgattttcattaaaatcgggtcgttggtcttaaatctggcgatcgatgttccatgtcgattcacgccctgggtgatctaatcgagactgttcataatcgatcctgcggttgtgggatgcgcataccccccttcagcgtggtcgttttacagaagaaccctcaatgttttgcagaatcaacccgtcgtccgatttagtagaaagaagattcaatttaggtcctgcatttttatacagtagaccctggagttctagattatggtgaccgtcg

SEQ ID NO: 133069 - DNA, 722 bp, Zea Mays
gcccaaaactttcggctcaaacttgagttggacaacatacaccgagccttggagattattgttctgttcatacgctctgccacaccgttctgctgaggcgtatatggtatagtgtggtgcctcacaatgccctccttcccacagaaagagttaaaatcaccataacaaaactccataccattgtcagttctcagaactttcagcttcctctcagtctgcttctcaaccatagtcttccaaaccttgaaagactcaaaggcatctgatttttgcttaagaaaataaggccaaactctgtgaattatcatcaatgataatcaacatgtaacgagcaccaccatgagaagttatacgtgacggcccccacaaatcagcatgaacataatcaagaatattttcggtattatgaacagtagaactgaactttacccttttatgcttagcgaaaacacagtgctcacagaaatcaagggtatcagcatggcaaccatcaagaaggcctctcttgctcaattctgccaaaccaggtgcactcatatggccaaaacgcatatgccaaattttagtagtctcagaatcagaagcaacaacagcattagcagagccagaactacctcgaagcacatataagttttcagctttcaaatcacctttaataaccacaagagagccttttgttacctttatgacaccgtcaccggcggtatacttgtaaccttttg

SEQ ID NO: 133070 - DNA, 821 bp, Zea Mays
caggcggtgggcgtcgtccggcgcatggtggagcaaggccgcgcgggcggcgaggacggacgggggtctgaggagcgacgaggcgcggaggagattggcggcgagaaggccgggggtgtggcgtcgcatccaccgccgcggcgcgtcgagcttaggcggcggctgcggcgccgctcctgcattggaaggccgaggccggttatttgtgatcgttgagaattgacagctcagaagaggaaaggccggcgaagaaaagctacggaaactttggcccagcccaccaggatggaaagggattaagggagtccaactgttggctgtgccagttatggactataataataagctggattttgggcctaaatttgaggtttattagaaattagggcacctgtgatgtgtaggaggtggccctccacgccagattgcctttttctcacttggcgctttgccacgagccgaggaaccgattctctcggtcccaagacacgacacggagtaagaaagcaaatcaatgggagaaagcagtctctgtcgccgcgccgttacgtgagatttaggaataggaggactggaggaggttgagccgagggaccccgattagcagacgaagggcacgtgactgcctacttaatccgttggcgtcttcctcctccgacagcctaccctaccctggagcagagcgcagaaggcagaagcaggagcaggagaatcttctcatggctcgtagctgacactggcaggcagacagctcacgacgcacgagacaggcagggttgctcatctcgtctagcttcttgctcgtgctggctggacggacc

SEQ ID NO: 133071 - DNA, 482 bp, Zea Mays
tccctccccgatcagtgtgtgtgagcaactttgttaatctccacttgaacaggagcgggagacgccgtcagcctcggcaaaagtagcgtagacatgttcatctcaacggacaggtttagttgcactcacatgttcatctactttgactcgttacgggcgcacatgacagcttcatttgaccgtaccatgctaagctgctagccaggattcagaacaacgggacctgatctggacgtgctacagtgccggtcattcaaaggcaaagctgaacgctccaggtcgtcgccgttgagctgcaagaagaaaagctggcccaaaccaaaaaaataaaataaaatggcaaccatgatcccacaactcggttgactgttgaccagatccagacctttaaaaagtaagcagcgtggtttagatcccaggaaaacaccaggcgatgatcatgatcctgcagctgtggcgagatctgcttttccctgcctgcc

SEQ ID NO: 133072 - DNA, 1530 bp, Zea Mays
ggaaaagttgtgataagcttgttactctaaaaaaatcaagacctgaaagaatattacttatatatttcaataacaatatgacaacattcatgaggacaataaaacgtctagctctagcatacatcagaagtcaaatttaaaaaaggtttcactgtaacaaagtccaagacagcttattaaaccgataaggctacaagtgcaaaaggacgaatagcgtgattggtgagtttaagttgggaaacaaaaaaatacagccatgcaacaaggtggataacaagaaactatgccaatgcaatgaagcaaaaaaaacattcattctgcttacaggggtatttccagatacaggtatttccccgactgaccccacaacagctttatctaagctaggcttttcagcactttgatcttgatcttcaccatccttggcaccagagagagcaagaaaagcttttctagcattcctgcgtgattcttcattcagagtttttttgtcaagttagaagacatacaactccaaatgatcaagaagaaatgtcatatttgagaatcacaatgaaacttttgagcagaataatgttttcaaactaatgataattagcgaggacagaagctgctattacaagacattggatgtagcatgagttctgaccaaatgaaggaccacatttcgacagagaatggctaaacttaccaaacaaacaaaaacattgaaaacaaaaggcataccatataaggaatcagcatgtgagtccctaatagagcgtccttggcgccaacccattttcattaacaatgtcacacctgttcaaacatggtaacaatataaaattcaatgaaagtacatacatcgactcaaatgttattgagaaaacattagaacaaatgataccaattgaatttgtggtggggaccacgaattcatcaggtatgggaccaggtatagcagatggtctgcaagaagatgtaaaaaattaaaaacatatatcagcaaaaggtagttcaatttggatgcactcatacacgagtggtggcattcaaatacaatggcataaatgttaaatgtaagaatacaagtagataaataatgaaaaaataggaaattgaagggctcaaaaggcaaataattttaaaaaaaccgatagaggcccataggaaccatatggtttttcctcttcctctccagggatcatttttgttcattttccctccacccaactcaacgatatggccgcatgagactcccaccaactgtttgggcttaagttttgaccaaaacagcttagaagaatggaatcacaataaaaggcagaaaatgtgcagagagatgactgaagagtgctttgatgggcaacaaataggctaaattcaataagtgcaatcatttattaacctgatagaacaggaagataagatgctaacctctccttttgttccttggatgcctgttttcgagcgtgctctgcagctgtaaaaccaaaggtatcgtactgctgagatgtctccaaagcattaccacccatatcctgtaaa

SEQ ID NO: 133073 - DNA, 381 bp, Zea Mays
cttcacatccagttggtgaattggccatgagcgagacagagccagggtgagaaccacccggatggtgtctggtttcacaactgggctgaaagtttcatcatagtcaatgcacggtcgctgtgtaaacccgtgaaggacccagcgagctttgtagcggtcaagagagccatcagacttgaacttttgacgaaaaacccacttgccggtaacgaggttgatgccaggagggcgaggcaccaaggtctaggtgtcattggcctacagagcgtcgaactcggcttgcatagcatgacgccaggctgggtccgagagagttgtgcgaacggatgatggtagcggagaggtggccgcgaccgtcgtgctgaggttgagacggtccac

SEQ ID NO: 133074 - DNA, 489 bp, Zea Mays
cttgcgaatccagttggtggaatgtgttcaattgtccctagtgtgtatccctgcaggttcttggctccttcgggagggttttcatacctcaaatggccatttccctaaaaccctaattcctcgccctccacgtgttcggtgaaatgcccaaaccagtcaaaaatgctccaattgaacccaaatttttcaggcaccttcacaacacttccagtaacctacttgccaaatttcacgccaatccgagatcccaggcttaaatttcaccaaatttcccgttttgagcgatcgtttccgagccgagtgcccaaattcctttttcttcgcctaaattcaaaccaagcacacacttcactcattttcacctatataaacctattcgtgaagtatcggctcaattccatatcgtttcgtgcctcaattcgaattccaaacatcctatgacatcatttatccgtcaaacgtcgttttcacgtcatttgacttcttgat

SEQ ID NO: 133075 - DNA, 621 bp, Zea Mays
ttttgaaagaaatcatcatagggcaacttttagtctcaactctactggagaattttgtaaacatggcacagcatcaaacaggctgaatcagccttagcccactctaaacagccatagccctcagttattttttaacataaaaccaacaagtgtagtatacagttcacttttttcaaagaaaacatcacagggctaggctagtacatcatctcacatgagcacaagcatcaggtaaatattttttgtgcaactcaatcattgccgggcatcaggtaaatagcaacaatgtttgaaaaccacaaataatcacaaacttttcctcacttaacacttactcacttcgcatttcaatgacagggctaaacaatctcaatcattgcctggcacaagaatagtttgagaatacaaacctcacaatatttggcaatagtctccttagcacaatcggcggctgcactcgcctggctgtaagaactcatagcacttttttccgccgccacagcggattcaagaacatcaagagtagaaaccacatcgttacctaaggaaaatgtggcgcaataatcaccagcaaccatacaggcggtagatgaagctttcattgtgtcaagggcggcatca

SEQ ID NO: 133076 - DNA, 885 bp, Zea Mays
gcaacccgctggatatattgaagtagggtacatgcagacaacaatggacgactgaagtttgtggccgcccagccggacacgcgaaacacacttgaaggcgcatatgtagacaaagcttgcgaaggtaatccgtagctgtaggcctctggctgctacctcatgccccaacgagctaacaataactaatgtagtgatacaagtggcagatcgcatcccctgaaacaagcagaagtgtgcacactttccacagacaaagcagatgacaataaacatacctaacatggcaaagttgtttcccacaacaacattccacagctcaagatgactgcagtccagcctcattagggtcatccaatccgcatagggcgaccaaagccttggtggctaggtgggtcagcgggccattgaacaggctgaagtagcgcttgagctcctcgtcagttgcccggttctgcctctgattagagcccgactctggtaggattcccagtcgcttcatgagcacttggcgcgcgcggctctgaatgtctccacgcggccaagcgatggccgctagcctcgcgctcttgcgggtagaagttcttgcacgtcccatgaaacttctttgtgtcttcttggggagctcataccgctgatcttgcgggcgcaatataggttgggcgacaggggcggagatgctgtcgatgaaagacgttgctgcttgcagctcctggtgcgacgccgatctgctgcgtctgcggtagacgcatccggggcggaagcggcacacgggtgtggtcgaccccgccgacatggtggtgccaatcgccggcgggcttgggggaggtgggtgcgtgctgtcgaggtcgtcgcggcgggcatccgaggtacagcgtgaacccccag

SEQ ID NO: 133077 - DNA, 766 bp, Zea Mays
tcagaaatctctgccattgctgctccaacatccatagaaaaacacgaacagctacttcccaacggttcaaatatgctagttgacaatccgaggatcaatattctggtataaaaaaaagcaaatcagaccaaaaaatgatgcacaaaaacaaaaaaactccataccaccatcagcactgcacgcaccacccgcgaaaaaaggaaaaaactagaaaaacaaaataataagagcgcccaaaaaaacaacacaaaattgaatcacaaaaaacctgaagaaacatgttgcgaactagagacttgtcttcagtgttcttctcactaaaaatagagatcgttggccaaggtgattcgaatttgagggatgtcctcagtgcggaacttgagcatcatatcaacagatataacccaatattccatgtattgtagtgtgaaaataccgcaatcatgcctatgataattaaagaaggcaaaattactacaagaaataatttattgtgggtgtttttaaaccatataaaatatatagaaaaaattaagatagcaactgaatttggattctaataaaaagaaatgatagaaatgaaacttatgtattttcctactttggtactgccggatataaaattttgaatgatgatacataagcatgaccaactaaactaggctaaaaaaatgacgatacactacacatggaaaaggcaatgaaaacaaaccaacaaaattgctgaaaatcttggacagatcaggcaagagcattcataagacag

SEQ ID NO: 133078 - DNA, 567 bp, Zea Mays
ggggaattaggttgggactgattttgtttgagggattgtcttgggttatgtagggtcttaatctctaggaggggtttttgtgctatccttgggtaccccgtgtatgggtacatgttagtcgtgctctctcattttccttcgacctttgacccgatgccgcacgaatggaagcggtggctagctagggttcttcattgtcgtctccgtcggacctccccaacccaataattgaagcatgaccgccctctcaaccttatctggcctcatttctaccttctctaggcaacctatccgtattcttcggtcctccgctagatgtaggaggttgagcacgcgacactagcgaaggggcttgagcacatgacattgggtccaggcctagagaagacgaggacaacaatctttctacagccacaccatcgatttcgacgcaggtggaattccatgttcagttaaagccatatctatacaatttgggtgaagttcatttatccccccccccacaattggagctatcttttgaaccatgagacgtataccaggatgtaaatctttcgaatcatgagc

SEQ ID NO: 133079 - DNA, 309 bp, Zea Mays
gtcgggagctgtcattggctcgacatgttaagctttgccaactgttgggcccctccataatccctgcccttgtgcggttgtacaaagctactatatgctgcactacaacgaccttttgaatcagcacctatccagcaagtgaagctaggaccaactgttgacaacaatgcttcaacgccccacaatcaaagtgagccagccaatttggctggccctgctgtgtctgtgtgggagttgtacgcccgatgatacaggtctcctgatgccatcagaacatatgtagtagttgtttacactgcaatatctggc

SEQ ID NO: 133080 - DNA, 515 bp, Zea Mays
gagttcgtgaacccgccggagcacgtggaccaggtaaccctctgcaccatttctcaattcgttgcgcgcatgtcctctacatcaccccgtggagctcctcgtgcactctaattgaaccctaccgccatggtttggccggagcaggagccgctgacgaccttcgccgcctgcgctcgtggcctgggcagctccgaccacctcagacaccgacccgcacaccgacgtgaccgctgtgacctccccgacgccactgaacaccccgccggagctcaactgtcgtcggtaagcctcgccgccgtgatttttaccacgggtactgtttcagctagccagggatcgtgggttagatttagattaagtccagggggttttgtgcaaggtcagtgactcatgcaaatagtagactgagggctgttttgtgagagaaaagggggagaaaacccaggggcttcagcgcaaatctgtatttcttttccatttcgaatttacttttcttttaaatattgcagagaact

SEQ ID NO: 133081 - DNA, 283 bp, Zea Mays
gcgggagcaagcttatgcggcgtggtggcggagaggttcggatagcaagcacatccaaagactcgaagctgctcatatgtgggaggtgtgttgtacagggcagcaaagggacaagaggcgcagacagttttggtgggaaggcaattgagaagataagtgactgtatgaagagcatctacccaatagcgaggtggcatggacgcttggagcagcaaggtgcggatcatattgttggtggtgcggagcatgcatttggctttaccgttctgtggcgatgtatagg

SEQ ID NO: 133082 - DNA, 1017 bp, Zea Mays
attttagttaaagtttaaatcgtttaacttataaaaaaagaaataaagagtaagagacttgagagttacattaatcagaacagagagagtacaaaatatttttaacacgaggtgcacgcgatggagaaccggtaccggttggtgagcacggagcaggtactgatactgtggaccattggctagttgagacagtactgccggtccaccacagaccacacccccatgtgatcgagcgaccagtgccttcgttagctcacaatgcaaggtccgtactttttttttaaaaaaacgtaaaaggacaattgtgggtaccctgcagtctgcactaagcacacaaataaaaaaacttgagaacaacaaaatagaggtgcgatgtgcccaatgtggagagctactggacagggcagctacaatcccaaaaaaataactggatgcagcgccgagaaggccctccaccaaaataacaaatgtgagactagaaagaacccaagtgacaaaagaaatgagcaagacatctctgcaaaaataagctatcaatcaaatgcacacaaactaagaactctgcacgccaacacttgaatgaggttgctgtaatctatcagaataagcgagcccatactataggatgaatcaatggcatgtagagtaaggggctacagatgtttggcgagccgtagtagttacaggcatcaatcaataagctatgctctagcaactgtggatagggtaggagtaggactatttgttaattcagtaattataataaattggtcatgcactccactctatgccctagcaactttgtggatggggtaggactatttgttaaatcagtaattataatgaattgggcaaccatactgtagcacagttgctagacaacaataaatgcaaggactagacaacaataaatgcagtcttaattctgaacacagaacccccacccccgccccacatacgtacactagtattacagaacaaaaagtctaagggggtgcttgggaacaaagtttttct

SEQ ID NO: 133083 - DNA, 614 bp, Zea Mays
tactaaatgatagagaatattattacaaaattttagaaattggaatggttcaatttggatcaaaaatgggatttctatgaattttacaagtttctaggtttgttttcatattaaaaatgaatttctaatatcatttctctattttaatcttctctggactgggcctcaattactggtaagttcaggggctaacccgcaagatctccaagacacagcgcgccactggtctggactgcgggttgatttccagagaggtgagggtctctttataaaaattgacctgcgaaggggtacgaatgttttctggccgttggatcacttgccaagggcacggattagatcggatctcggccgaaccggtacccgcccagagccgcccgatctagatccgatggtaaggatttaatgagtcgagggtttaacgttcatcactggatcacaaatctacggctgaaatcgtcccggtcgaaacgttacaccatatctaatctctaccgatcatcctgagatcaacggctcacgctggttcaaatctagaccgtccgataagatcagacggcgcactctgcttctccctaacccgagaactcgtcacggcagatcgacattccccc

SEQ ID NO: 133084 - DNA, 705 bp, Zea Mays
cattgatgtgctggaggaagaacgattgaacacagtaattcagtcggccaggtaccagcagaccttgaggacaacaaagttgtgcgtcaccgatcctttgcagtaggagacttggtccttcaccgaattctaacgggggagggacgacacaagctgtcatcaccacgggaagggccgttcatcgtattagaggtcacacggccgggttcatatcggcttactcagatggacgacacagaagtggggaactcatggaacatagaacacttcagaaagttctacccttagcaaggcctcaaaaaactcttgaaggaatattgtactctgtaacccgaagacttcatcatcaataaagctttcattttccaaaaggcattcagattcttgacttacaactgacttcgattgggcttgacttgaaatcgacatgacttgacttagggtgaccactataccctgctaacagagcaatcggcttaagtcagcgacggcttaagtcgatgcgacatgctcacgcttacttgagttagggtgaccactataccctgctaatggagcaatcggcttaaggcggcgacggcttaagtcgatgcgacaggctcacacttacttgacttagggtgaccactataccctactaacggagcaatcggcttaagtcggagacggcttaagtcggtgcgacatgctcacgcttaacttagg

SEQ ID NO: 133085 - DNA, 543 bp, Zea Mays
tgatactagatgaggaacagaagtccaaagagctggaacaacaaatcgcagacatgcaaggcgaaggccaccaccaattgcaataggaccctctccacatactagtcatgaccccagctactttccaaggaataaactaccttgacgagcgaagccctctcgcaccgcagctcgaagcctcaccttggcctagcaattttaggacgggtacctatcctaggtacaatggcagcaccgacccagcacagtacatcataagctaccaagttgtggtcgtatcattcggaggggacgacaccaccatggccaaatccttcattatagcattcaaaggtctagccctcacatggtacacaagattgccaccattatcaatcgactcatggaaaaccctccacaacaagttcttgttaaattttcaagggtaccggccagaaatagatgccctggcattatcactctccaagcagcatgaggaagaaacccttcgggagtactacaaaaaattcctcctcctaaagtcacaactaccttcagtcgatg

SEQ ID NO: 133086 - DNA, 443 bp, Zea Mays
ttcgtcaggagtttctcccacctccgaaatttcatctcgggatacaagctgtgccgggtcccgttcccctgcttcgtgatgtcgccaaatatttcggtgtttgttcctccgtcggtgagcttctcgcggaggaggttcttccccgggtatggttggctcgtcatcggagatgggagatgattctactcttcccccgatgaagaggacatcggggtagaaaagagttgttgtggtgacaagcttctttctgtcctcctttgagggcgaaggcgccagaagagcagcttgacgggcctctatcccgtttgcttcttttttcctcgtaatccatgtccactcttccgtggacgaggtggacaacggggttcttcgggtaaatgaattctctgctcctgacttgcaagaggtagtcttcgcccggggcgctggaggttgcgctattt

SEQ ID NO: 133087 - DNA, 580 bp, Zea Mays
ctggggaacaccagaaggacaacgagggggaataatttcgtcctggtttgggcgaggacgtggccttgttcctttcagtataaccgctaaggtaaagtcatggaagagaagaaagagcttcggttttgggtctgataggccatgagtgtaactatccatttccccaaacataatggatgtcaccaaaaacacttcccccaaattgttatgtataaaaagatgaagacagaaaggaaaaatttggcagcacctcccttgaaagttgcataacgaggaaaccacagtgtttaaacatgatgcaagagaaaggtaatccacagtgtataaacatgatgcaagagaaaagtaaacattcagaacaagattaattcagctaaccaaaaatacgaccaccataatgactagaacatattagaccacttgcacacactatttaaaaatgaccaacatccttgacccgaagcccctgattaaaatcattactaagcagtggtaaagttgtttagaggtgtagtgatcgtgctgctatttccctcctttccccaagcaaggttcaagtgcctgcatcaaacaatgcaag

SEQ ID NO: 133088 - DNA, 638 bp, Zea Mays
tggcgcggtggcgggcgctcgcggcggtgaggtcaccggcgaggcagccgagcgcaataggaggtggggatgggtgcattgcgttcgtgagggagtggcgaagctcaagaaccatatgaattggactgggacttagcagagggaggaggtcagagctcaccggagaggggagagacgacggcgccgagtccgaatgagctcgagggagggaggtggagtggctgaggcctggtgtggtggaaggcggtgctcggtcggtcccttttataggcgcccgggaggggggagggaggagggacggcaacgccgacgagctagccatgctggcggtgatggcgcaaacggcgacgggatggctcgggtaggcgaggggtgaggggacggctcgggtacagtggcggggaggtagctgaggccggtgcgcgcgttaatggcgaggagacggggcgggcggtggtcggcggcgaacgcgccggtgaaggcatgggcgggacgagggagctgacgagcgggcccgggctgtcagcggaagagcggcgcgagagggagagggagggtgcagctgacgggtggggtcgggccgtcaagcgcggcgcgggcgcgcgcagctgggccgcttgggccacgagaggagaggg

SEQ ID NO: 133089 - DNA, 427 bp, Zea Mays
tggccctgacaaaaaggttgcggcgctgtcgttgcaaacttgcaccgtactatgtgcgtgcggtgtttccacactactgtgtgcgtgcggctgctgcagcagcaggtcttgccgcgcgagtcgcttcaagtggaaagccgctagactagggtagtagctagcagttctcggtgctgtttcccacttccgcaccgaaagaggaatgctttcttgcttgcttgcatgcatgattgtccgtcctgccgctaccgggctggctggctcactgagcattaggctgactccagcagtaatcctatctcatcctctatcttaaacttaccataatttacaggatatctactatgctaccagcattattttcatcgaccgatcaacgcacggcctaaccgacaccggcagccggcagacggctgttgaatttgct

SEQ ID NO: 133090 - DNA, 405 bp, Zea Mays
gttttgccttctttgcacctttcttgtactagggctgcactgactgcgctggttgatgctgcgatgtagagtagtaggggtagcacgggatctgggctagttagtgtcactaaattagataagtactgttttaaggactcgaaggctgcaacttgctctaggccccaagtgaagtccttagctccgcataacattttcaggaatggaaggcttcgctcagcggaccatgaaataaatctgttcagtgcttctagtcttcctttcaatcgttggatgtctcgggttgactgtggtggagccatgtccattatggcctatatcttgctggggtttgctttgatgcctctgtgtgatacaaggtaaccgagtattttgccttgtcgtacttcgaatatgcatttctgt

SEQ ID NO: 133091 - DNA, 377 bp, Zea Mays
ataattttgaggctttattagttggtggtcacatgtcatgctggagatgtgtgttgtgcattgcaattattgtgtgccgatgctgctggatctccttccttcctgttggttcgttttgcctgcttgtccagcccctgccgaccgccacgcgcgcgttttcatgcgtcttgcgtacgttctggttggtcgttgcccctctgggcgccgagtattgggagttgggacacactgctacaggacctcgtgatgagcggaggtattttgccatcgcggaaacggatgcgagctgacgcgacgtcgtcgccctcggtggcgccttgcgatcgacggccccgcgtggcgctagctgtcccgtctttagggattgaaactgccgg

SEQ ID NO: 133092 - DNA, 756 bp, Zea Mays
caagaacaaaatgatatagaacaaagcattaaaatgaatatttatatatgcataaggacatatgaagaaacaccggcctccatcaatccccctcgacgaacatctgcaccaagcaatcctcaccatgcatgcacttcgaccaatcttctctcctgttattgtaatacctaagtctaacctcattgttgaaatctcttttactttgaactggaaagttaaaaatcgtctcctcaaaataatctggaccaagagggccatcgaaacagatgggaggtaacttctctccatcaaaacaaatggcagcaatgaaaagaacaaagtaggcattcttgaaaatgatgatcagctggaaagagacttactgcagggggtgcctgccaaagggataccctcagtagaatctaggtagaggtcatgagtgccacaatcatttgtaggatcacttaatgggatcatattgggggcagattgagcatcaggcacagttggcacgacctcggcaccacgatcatagttttcatctccagggcgagaggcaactaacaaacggcgtaccactacctccatgacttgcttttgtatcttcatagctgatttaacataattatcccactctcgctgacacttaattgggatgataagtctttgcacgttgggtggaggacctacgtttagcaccccatcaacgtcaatgtcatcaacatcatgccaaccaatcttctccttagccgtagcaacaacctcactaaaggaagg

SEQ ID NO: 133093 - DNA, 536 bp, Zea Mays
agttctatgtacctgggacttctcagttcgtgccgatgcagggttttcctcagtatctggccgcgcctactcctgcaccgactactactatactgtctcagtttggagctccgcgtctgcctcacccgatgacttagtggggttcttctattaacttcactccaggagcttcctcttctgcgggtatttccggagcttatgtgctaccctctgcggatgacagagagcaaggagacgtggtgacaggtacgatttcagttgatttgtttgtggcccatgctctttttgactctggcgctagctattcgtttgtttcgcagaattttgtgtcgtgagctggtcttttggtgcagaggttgggtcacccaattttggttagttctgctaatggctccgttagtagctgttcagtttgtcaggggcgttccatcattcttgctgatgatgtcttttcggctaatcttgttgtgatttccttgggggcattcgatgttatcttgggtatggattggttatctcagtatcacgcagttata

SEQ ID NO: 133094 - DNA, 316 bp, Zea Mays
cagcagtcttctctagagagtgcagcttcggctttcgagtcaaaactttagccctttttggcttgacgcggtggaagaggtggtagtcgtgatttttctcttcgctccttgtttctgagcgggaaagcagtaatcagaataaatgaatccaatcacatcaaaaactttgttcagtctccttttgcctcgagcgccgaaggtagtgttcatggcttcgtcttctgcctttgtataagcccctagcatttcgtcactggtcgcctcaacagcttcaagccaatcatcattcggcatgtcaaattgacttctatagcga

SEQ ID NO: 133095 - DNA, 600 bp, Zea Mays
aagatgaagcgtatgacaaagcccctcacagagcaagtctgcgaggcggagcgagcgaccaacccctcgccgagcgagtctgcgaagcggacgaccaagtcccccgcgtgagcaagtttgtgaggcggagcaagcgatcaggccctctggccaagcaagtctacaaagcgggggcggacgaccaagtcctccatcgagcaagtttgcgaggtagagcggacgaccaagtcctccgccgccgagaaattatgcgagacagagcggacgatcaagtctcctgtcaagaaattttgtgagatggagcggacgaccaattctctcgccaagcaagtttaagtgttaagccagaatcgaaagcatacgtcgaccacgacagtgtgtaacgtcaggagccctagtaataggacacgagcacaactattgtgtcaaggacgaccttagcactagaacctctacagtggccggtatgccagaaacgacaaggcaggatgccatatcgaatgaaccgatacacacatgaaaggacaacatcgagcctacaaaggcgaaggggaaccatgccgagtcagtcgagtcctgcgcttgcgccatagagcccgc

SEQ ID NO: 133096 - DNA, 471 bp, Zea Mays
actaaacagaagcacaacaaaggatggagttgagaactcgcaagcgacaaagaggaggatacgaccaagggaaaaataggtaaaacataactcccagattgagatggaaaagaggagaatttaaagggcaggtataagataaacatcaaggtacgatatagggatgtcaaaggtaaaggtgataataatgaaaagcacaaggatagagctcaggcaagactcactaggtggtggagtggataaaacaatcaagggtaagatatgtaaggttgcaacagaatggttggagtttaaaattcattatcgagggatgttacaaggaaacaacgagatcagtaaggatgtgcaaaataaaatgaccgctcatggatcattgagaaacaagggtggtcaggggcatgtaaactgaaatgctctaaatagacattgggatataaaggtacacatatatataaagataagagtatgcaa

SEQ ID NO: 133097 - DNA, 996 bp, Zea Mays
tatatgccgattgatatataaaaattcctgaaggtaaatattcaagttgaatacctaaacaaaatttggtttgaccccaatccttcatctcaaattccgtctttaaatgatgacgtgcttcatttatatctttttcgcttccaataatattgaggtcatcaacatatactgaaatgatacaaaatccagtggaggacttcttaatgaacacacatggacaatcatcattattagtgtatcctttaatagaaaggaaatcacttaagcgattgtaccacattcgccctgattgttttaagccatatagtgactttttcaactttacacaatacatgttacgatttgccgatggattcggtatatttattccatctggaactttcatataaatttctgaatctagtgacccatataaatatgcggttactacgtccatcaactgcaaagatagacgattttgtactgccagtgaaattaagtatcgaaatgttatgccactcattactagagagtatgtttcattataatcaatgtcgggcttttgcgtaaagccttgtgctactaaccttgctttatatctcaccacttcattgttttcgtttcgcttacgaacaaaaacccacttgtatcctactgggaaggtgcctttaggtgttaactttacttccgagaatacttctcttttataaagcgaggtaatctctttttcaatagcttctttccactgattccagtccgagcgttttctacactctaccatggatttaggatctagatcattaaggatgtcagcaacttgttcagagaaataagagtcgactacagtagccttgcggtcaaaggtttcgccagtttcaatataattggtagcaagttcatctacccttaaggacacatcaggatttctcgtatccatggtcctcgggttttccgatattacttctttgactatgcgcgcattcgaagagggttgtgtatcaattccacattgtgttt

SEQ ID NO: 133098 - DNA, 278 bp, Zea Mays
gttgtactcttctttttctcgaacaggggaaccatttttggtatagaaaatttaggcttctttggctgtggagaaggtggatcccttgatggctatggagaaggtggatcccttgtttgtggcatagacactgagtcacgaagaggatgagtatggcatggagaaggtggtggagcccgtaattgcgatgcttgtggcagagacaatgagtcaagaagaggataaggagcagtagttgaagtttgaggaggtgatgacagtttatctataggatctgc

SEQ ID NO: 133099 - DNA, 441 bp, Zea Mays
ttgggccgccactcggcccacctctgccacaactgctgccatgatcccacccgtcgcgtgcacaacttcagcacttcgcactgccgtgtggggcccttcgccagtgcatgcgtgggtgtttgctcctgggcactggatgacaagtggggccttggtcctgttgatcttctccccaccgtcgccaaccagggtgagcttcaacagatgcgggtgagaatcgcgccagtcgtgcggtagttagcctcctttcccctctttgccatggcatataaagtataatcggccacccttcctctcggtccacagaatcatcgcgtgagagagaggaatcgaaggagagagagaacacggggtagaaggtaatcctgtgcactgccatgggaacgattttgccggcaccatcgattcgattgaggaaagtggtggggaactccggtgatt

SEQ ID NO: 133100 - DNA, 449 bp, Zea Mays
atgatggggaacaactcgcatgctattgttctcggtgttggtatgattgatctgaagtttatctcgggaaagatcgtgcgactgaagaatgtgcaacatgcgtcctcaataaataagaacctctttagtggatcgatcatatgtcgagatggttcgaagctggtattcgagtgaataaagtagtggattcaagatatggccaattcattggcaaggactatgatagcagaggttggttccgtttttctctatccaatttctataataaagttgcgaaccatgtgtgtgactcaaacaactctatggctgatataagacattctcgtttgtgtcacattaattttggttgtatgttgcatgtattgattatgagtttgattccaaattttactactgtcaaaggctctaagtgtcaagtgtgtgtgcaagcaaagcaacctcgtaagcca

SEQ ID NO: 133101 - DNA, 531 bp, Zea Mays
cgctcatacctatcaaccgcaacagtaccaccaacatcaatatcaaaacgagcacccatactaccccagcagcaaaaccccaatctctttccacagcaacaatgccttcaacaccaagaaaggttagctctgccaccgccaccaccacaacatccaaatcaacaccaaccaccccaccaccaaagcaagaagacttcgccaatccacccttcaggggagtgattcataagatcaccggagggtccaactcggacttcgataacaaacgacaaaaaggatctctaccgaagggttaaccatgtcatagtcacaagacccatcgttcagacgaagtggtctcatgtaccattaaccttcgacgcaagagacgtcgaccttcgcagcgtgccccacaccacccggacacactcgtcattagttgcaacgtggcagactgggagctgcacaaggtacttgttgacaatgggagctaagccgacatcatcttcctgcatgccttcgaccaaatgggcatcaaccacaacctacttc

SEQ ID NO: 133102 - DNA, 822 bp, Zea Mays
gttgtcacccatacctaccctgttctgacgaagacggtgtcgtaggcgggcgtctctggtagctgcctcatcaaaattgccacgtgcatcgaaaatggcatcatcttgagcctgtggtggaggttgttgatgccgtggtggatgttgttggggttgtggtggtggaggaggttgctgatgtagtggacgtgtttccaacgtggcaacctgatcgacaagctctgttatctgtctctccaccctatctagcactttgccaagatccattgcaataatcgtgtcatggatagacttgtggaccgtttcctccatattttcctccatacgcttgcaaataacatcgaagtcttcgcggctgacacaatcagaaaattatgtgggaatgactacctcaatctcgtcatcggatcctgccattggaaacaccaaaacaggaacaaacagtaaaggttatccctaataagcaactacgcgctctctgggtgaataggaacacacgctaccgtgtcttaccaagttcttactagtatctaatgaaaacacaatgcaaaggatggtacaatcggaggctggttcatgatacttaccaagaggtagtgaaaccgcgatcgcaaggtcaaatctgtattgatcagaagatatagtatgtggagctataggacaggcacaatatgtatgtgaatgtggaacaaaattgagtgcagatgagcgaagttcaataaatatccaaagcacaagtcacaattgatgtctaagagatgtatctgaggcagtacaacaagttggaacaaagaacaatggaagaagctcactgaactaaca

SEQ ID NO: 133103 - DNA, 787 bp, Zea Mays
agtccccaagtccctagagatgattgaggcaaatgccaatatctaagacagagtggaggagtgagcgttcgtctacgtgtgttgatccatcgtccatggagggaccactgccctatttataaaccaagcggagcgtccgcagtgaagctgagtcttgtattcgaaggagagatgccctggcgtctgacatgacggcgaactgtgtagtagatttgtgcctgctgacttcccgtagagagccgaggccgagaccgagggatcgtctgtacgcccgagctccagagggagaggccgcccataccgtagtggttgtaacagcgtcggggtatgggccaaaggctacttacggggtgcgtcatcgtcctggcgcgtgatgatgtcgagattccctgctacactcatcgagatcaaagcccctggttgatgcggaagtcttcccgaggcgttggccgagctgtccctcgacgtgcgctacagtcgggcggagtggctgtctgcgagattcgcgacgtagttggtggctgaggccgagaccgagggatcgtccgtacgcccgagctcccgaaggagaggtcgcccataccgtagtggttgtaacagcgctggggtatgggccaaaggctacttacggggtgcgtcatcgtcctagcgcgtgatgacgtcgagattccctgctacactcatcgagatcagagcccctggtgatgcggaagtcttcccgaggcgttggccgagctgtccctcgacgtgcgctacagtcgggcggagtggctgtctgcgagattcg

SEQ ID NO: 133104 - DNA, 520 bp, Zea Mays
cccaatagaaggcaaagtggtgatcaagataataaaaacctcaagaaatacaatagaagactctttgaaaatctataacaacatgcaaaatccaagacatgagaaggaacccgaatgtacacaaagatcgtaaataaacaaagaacaaaagatattatagggtgtcagaccctaaccttggactatggtatcaaggcgtaggacatatcctggtactattcaccccacgaaattgttagactcgtactgttcactagagagtcttggactatatggtggacctaattggctgagggaagggtgttggacgtgactctcagattgatggcctagacagtgttggactagatggggatactgttcactggagggctcattgatcaatgtgtaggatggggaggcatccaactagtctgataggacttggtagttcttaaggagttttttgtacggcatcagacaatatgactatagtccaaagatcgttggaccagagagcatcagactaaacagaaactag

SEQ ID NO: 133105 - DNA, 563 bp, Zea Mays
gtcaaggaggaccagaaggctatgaagaagcaaaaaactctattggagccgaaggactcagctcccaagaaacgaaagctcgtcaggatatcttctatagagacgaaggtacaagatatgccaaacaagactataggcccttcttcgccttcttctgttgatgtttcagaaattttgaaggtaatgacttaacctatctcgttcacaatgctaagtcctctaacgctagatctaactagcctcttgcagtcaaaggaaaccgctttggttactaggggaaagccggggggcagaagaaacggcaaatgatgaacgtgatgcaatctattgaacaaaccctggccccagcctcggcagaaaagtctattgtgcttgttgatgctaaagatactgtcggggccgaagttaatgaagctatacctaaaactgataatctcgctaccacaatgtaagaaatttatagacacatatctgatgtggttcctgagaaagacgcagccgaagcggctactgataagggaaagggaattgaagagacctcttcagaagataagaatttcgac

SEQ ID NO: 133106 - DNA, 484 bp, Zea Mays
gtggcactggacatctgaatcgacattttagagcttgtttgaagaaggtagggcaaactcttggtgcaggtgtgcaaactcaacttaacttcgctgtggatggcactgtaagtacatgggtttacaatccacaagtagcacatgaagaaattattaaatacattgtttctgaagatttacctattatgatgggtgaaagccctaattttaagaatctgattcaacgtgctttctgtccacaataccaacctatatatcagtagaactactataaaatctgatttaatgttgcagtatcgcaaacatcttgctgcccttaaagataattttaaaaaagttcagttttcatttgctttaacttcagatatttggacttcatcacatcaaaaaactagccacatttctgttgttgcacactatttggataattcatattgtcttcataagcgtgttataggttttagagtgatgaatgattcacata

SEQ ID NO: 133107 - DNA, 887 bp, Zea Mays
aatttctttgccgcggatttggtgctgcaaattttctagaattttttcgttttgtagggggcattattggcacggtatcttagtcctgggcttatattatctgcattttcgtttcccccgattttttcgactcaatttcttaacggatttgggaatcgcggctagggggctctgcattgccggatttgctcgatttcgtgggcgcattgcagctttgcattgcataacgatctttgccttggtcgcccacgttcgcgattctgtctgagcttcctcacccgggctcgtgcatttctccgaacatctccaggtgtctgttgcacaagctctcgcttgttgctccaatttcacgcgttctgcatgcatgtattccccgaaggtggtgccattctggggctgttgcaaagttctctggtcaaaaccaatggattccgtcgagcaatcggttccacggtgctaagagattgttgtccattggccatccccatgaatttctgaagggggagaagaattgctgttgcatttcccgggcaggtgcattggcatggtcgcagtagtgtaggaagcagaaaagatgaggcactgttggagtgcatggctcctggccctgtgcctcgtctctgtccagctcctcgctccattggtatgcgagcgattgctcgttgcagcacagaacctgtcaccgccagccttgacaccgccccttgtcaaagaagtagacgatgtggtaagcttatttttgtttattttatagaatttttatgcggagttggtatattttaattctactcgcgacagtgtcttcttatggtggagatgttggcatggtagtggactagtggtgacacgttttagttatgtgcacaatgtagttctttaattctgtt

SEQ ID NO: 133108 - DNA, 510 bp, Zea Mays
tgagcaattaccctctgctcgtcgatcccatgatccaagaaagtcgggtcaacaatatgttggtggacggtggcagcagcatcaatgtcaccttccccagaacgctccaagctctcggatcctgaccgctgacctcatcgagtcagatacccccttcttcggcattgtcccgactgaaggagaatacacactgggccacgtctacatgttggtgactttcgacaccactgataactacgaaactgagttcctacgctttgaggtagctcagtttgactgcggctacaacgccgtcattgggaggccggggttgactaaattcatggccatcccccaccacccctatatggtgctcaaaatgctcgggccccacggcatcatcatcgtctgggtcaactttcaaggagcagcagagtgctaccgagggccattcaggaagccctcaccgttggcccctcggcagtcggcggctagggctggacgaaatgctcgtggctcattggcttgctc

SEQ ID NO: 133109 - DNA, 443 bp, Zea Mays
ttagtcttgaccacgatgtcatcgacgtagacttctactttgtccctaatcaggtccccgaaagtcttactcatcgcccgcacaaatgtaggcaaggcgtttttcagaccgtacgacataacaacatagcagtaaagcccatccactgttacaaaagcagtatgcttcctatcttccctagacatctagatttgatggaaactagagtaagcgtctaggaatgataacagatagcacccggaggtagaatccacgatttggcctatacgtggcagtggatacgggtccttgggacaggccttattcaggatggtgtagtcgatgcacatccgaagcttcccattcgctttggggacgatgactgggttggccagccatattgggtgatgaacctcttcgatgaagctagcgtctagcagtttctggacctcctttcggatgaa

SEQ ID NO: 133110 - DNA, 862 bp, Zea Mays
gttttaggacccaattttaagactctcttcgagatgctcttagggtatgtacaaccctatttaatataagtcttttgactctaggagttaattgaaaaaatacaagaaagaaggtcttcacgagcaagagattgtctctatacacttattcatacacatggtcttttaactgtatttattatttaggagcttggagttatatgatacaaaatcttgtatacttgaaaaatgaaaactgatccacagttttagggacaaaaagcttgattacgtaggcctagccgcctaggccgacaaacgggtaggccaacataaattgtacggaacttcgggctgtctcaaacggtcaaacctacattccagatcctagtggcttcaggtgtaggcgcaaccaaattaataaagcgagtcgagcctcgaggccaattcattcccaaataaaccgaagaagaatgtatttatgcttcgtttggatgtaggcattcacgtggtggaattgaattgatctaggaataccaaatctgagggaaatggaattgatctgcaataccaatgttgttgtttggatgcgggtgtaattgaattctgagcaataccgaggtggggggcttggtattgaaggggagggggtgcaggtgtagttgaataccaggggaattgggatggatttccagttccgaattccgtgagcatccaaacgctgaaattcggctttaccaattccaattccaaaatctgggcctcaataccagcatccaaacgcagtgttaggggtatttggtctcattttattcgattttaatttttaaattgataaatacaaaaactaaaatacaagtatttaacaatttagaaaatcaaa

SEQ ID NO: 133111 - DNA, 439 bp, Zea Mays
taggattttaatatgtgtaacaacccaaatgtgaaaatcacaaccaaactcaaatttaaaatttgaaatctaaaataaggagaaaaagaaaacaaaaggaaaagaagaaaaaaaagaaaagaggaaaactcgtgttgggcccaaagtgatcggctcggcccaccttcgttctccgcgcggtccgagagctcgtgtcggcgccgacacccgggacccacctgttggtctctaccggtgtgtgcgctttcttcgtactcgaccgcgtgtgccgtgtcgctgaccgtgccccccacatgtcaggtccacccaccccgtccgctagccgttagctcaccgcgattgtcgtgccgccgtggccacgtcctcgtgtggactcgcgcatgccctagctacaaatgtggccgcccctgctatcgtcgcgcccccttaagtgcttgga

SEQ ID NO: 133112 - DNA, 537 bp, Zea Mays
cctgaagcccaagtccccgccatggcgttgtcccctccccgcaagaggattcgctatggggagcctggatccatcaccagacagctttgaagttttaatttataaattgttataagatagttctcgcgtcagacgatgaatactcttttataagttatctttataataataacaaccatgtgatggtgttggttgctatgtttgagttggatttttgtttgagtgcaatgttcttatggaatgatggccataagagcatataaaaaataaacttaaactattcctctctagaatctttattactcctcactcctctaaagaagttcactttctaaccaatcagatggtgaacgctcgttcaggacccaacaacaacaggaaccagcatgctcagcagataccaccaccaccaccaaaccctaacaaggagtagtttatcgcagctcagatgcaacttctgtagggactcactgcatctgtacaacagattcagcaaaaccagcagaatcaacagcaccagcagcaacagcagaatgc

SEQ ID NO: 133113 - DNA, 382 bp, Zea Mays
acctatgcaaagaccagtggtgaaacacatccaagaatctctcaaaccttgtctagtcttcattgttcaacactcatgcatgaggaagatagtcaagaattaaagaagcagccatcataaaggtcaagaaagaactcaagggatttggagaggaagaagatgattagtgagataaaagcaaaggtgagaaggttacatggatttgtgaaaaaggtaaataatcaaatagaggcatatttaaagcctttatcctccactctctattcactggatgaagaacacaaaacattgtgtgacccacataaaaaggtgagtcatgtgacatgacaagcgtgtatgtgaaattgtccaaccactatggtgattgagcccaagattcttg

SEQ ID NO: 133114 - DNA, 1059 bp, Zea Mays
tgttggggccgtgcgcaaatcccgggcggaatcggtcctcgccggcgacgcaattttggcggagacttcggtcgctggctacaaatacggatgtccaaattccctctgttatgagccacaccttggatttagctcaagtacacggatttcccggtgccaggagttctgcgaggaaggaggacggggagaaactaatcgccgacgctgatcgtcgtggtcaccacaacctgggactccatgctgggatccgggtgctcgcgagtgtcctccacatgcgaccatggcctcatatggccgaatcttcgggcagtgaggaaggaatttctcatcggcacagcatcgatcaccatagagccgttgtgcgccatgggcagagttctaagctgcgtgattcacagtgagtctaccccatttcgattcgccttattcccagcatcgcattgaaccgcttgggtttgcgtttggggtgctgatgcaccgggtcgcgtgactccggtaatggccccgccgcggttcagggacgcgctgccgcgggtttggtcttgggaggaagacagagtctagcctttggtttcgagatgagcggccaggattaacctacgcataccgtttcggatggtgcagtctgattcgtccgatctggatcgtgcagatgggaatagaactggggttaatccaatgtgaaccgtcgatccattcgcggacgatcgtgattaggcggtagcttaccccttcgcccgataggataccggtcgttcgattctaatcctgtgcgggtgaatcaatggcgctgtggtaaaatcgtatccatccgatctagatccggtagcctctattcagtaccggttaggagttatgaaaaatctaatctaaaccatcgggcgctgatccaacgactcagatggcctcatacctcttcgccgtacacttttataaaagagaccctaaccattactcgaatcaacccgccatcctcaggagttagaaaataattactactgggtcctaaaatttatgagttagacccttggttctctgatattaatgtccgtagtccag

SEQ ID NO: 133115 - DNA, 332 bp, Zea Mays
agccccaaccaaccatgtttagtttcttggattggtggcgcagagtcaatgatttggtgggtgaacaattgacagggggattaaacatcttgattattttgggggcatggaccatctggaatcatagaaacaaatgtgtgtttgatggtatctcacatagtatcgcgactacgatgatccaagttggtgaggaaagacatctctgggaggcagcaggagcaaaagggatatctttcctaacaactcctctggatgttcattagtttcttttgggtcttttggttattgcttcatgtttcatgtgttttggacggcgtgcgttggtgggtgtg

SEQ ID NO: 133116 - DNA, 502 bp, Zea Mays
cttggctaaatgagcatcacgacagtctttggtaccgaagtggcttcaatacggacatcaagtgcgactacataaccaacaacattgctgaggttttcaacaattggattaaggattggaaggatttgcctgtttgtgacttggctgacatgataagggaggaaattatggagctgtttcacaggaggaggaggattgcacaaaagttgcaaagacggattttaccgtcggttctgcatatcctacacgccaggacaagaggtttaggtcatttagcagtacagaaagctgacaactacattgcagaggtaagggataacaatgatgtgcattcaaagcacattgtaaatgctcagctgcgggaatgttcgtgcaaagagtggcagcacacgggcaaaccatgtatccatgccctgtgcttgataacagctcaagaatttagggatgacaggatggagggttttgtcgacgagtactactttgtagctatgttcaccacagc

SEQ ID NO: 133117 - DNA, 512 bp, Zea Mays
gacgatccttagaggcaaagtatcaaatattggcgccccagtggcatattcagcatggaacctgccttctcccaagaccttcacttttttcgtgtcgaatccacctgttactgatgaaggtttgggccttagagtgcgaccctctgtcgaagaggttaacacattggttgcttcgctcggggaaattcctgacgacgaacggcaagtccactttgaggtgcccttggatcctagtgatgcagaaataagtgctatgcttgattttctggctgaggactcccctgatgctgctcctgctgggacattggtagcggcgcctctcccagaagccagtataactttggatgttcagaagcctgctagtgctcgcccgagacgcccttgccgagccaatcaacctgatccttctgcggatgagcagaaaaagaaaaagagacgtctccggcaagtgtctagtttggatcggggtgctggttcctcggctcctgctgctgaggaggttcccgtgcctg

SEQ ID NO: 133118 - DNA, 372 bp, Zea Mays
cccggagggtgaagccaggcgaagggtttcgaggtggtcctttagagcttcacgtgcgaacgatgccatcagggtaggtggattctccgtgcgtggtcacttgctgttgactgctccatcttcgagggcctcatgagggacatcaccgataagggctactttgcccttcttttcagcgagggctgctttcgcagtgtcgtccaggtaggtggcaacgttcgaagttgctttcttgggagccatcgtgggattggtttgttgaagcacgaacggtgggcgccaaatgttgggacctgctgacacgtggccaacggggcctaagcgatggcaagtaggagtgctttgatgctcaacaacataacgaattgaggc

SEQ ID NO: 133119 - DNA, 459 bp, Zea Mays
gctgcagaaaatgagtgcataagagacaagcttgccagagtattttaagaagaagaagaatacaaagtccggaaagagaaatgcacatcattatattaagaagaatacgaggtccggaaagagaccaaaaaaacagaaggcaccttacggtggccaaaaacaaagaaaccagaaaggatccctgaagggaaataaaaaataaactgctcactaaatccccggaattggggctgttagaagagccaagcttttggctccagctagattccagaagtctatctcttcagctttagtaatagcctcttccaagtcatggttacaaccatcaaacacacaaccgtttctatggttccaaagaatccagagaccaaggacgactaaagtatagaacagagcgagttccctggtttattgttcaaattagaaaccctttatgggaccttcacaatgtcacaatcg

SEQ ID NO: 133120 - DNA, 318 bp, Zea Mays
gccggatcttaagaagtggatccatgaagatggcaagagggagaaaaccggcatgctgagcattgtcgggtttggtggtgtgggtaaaaccaccatcgcaatggatctctaccaaaatacgggcctgaattctagcgtcgagcaatggttactatgtcccagaactcagatcctgaggcggttgtcagaattatactgaaccaggtcaaaccattgtccaacaacgccgagaggcgaggcgaagatagctctggcgccatctccttggggaagaagaatccagtcattgcaactatattaagccgaattagtttgtcg

SEQ ID NO: 133121 - DNA, 423 bp, Zea Mays
gactcctgtctcgcttactatcctgtaggagttgggcgatgtcttcttcttgatcacatagggccttcccattttggttctagttttcctctgccttctattcttgtggtgcgaatgagaatgaggtctccatcgaattccttggggatgaccgctttgtctctccatgcttttgttgtggcttgctatttgtttagtgtgtcgagggcttgggctcggtcgctgtcgaggtcttttgtatctgctttgacgatgtctaggattgtgtcatcgtttgtctgtggtgatttatgcttgagttcatgtggtttcattgcttccgcgccatacatgagtttgaaggctgtgaaacccgtagcccgacattgagtcgtgttaagcccccagaggacttcgggaaattgttcagcccacttgcctttt

SEQ ID NO: 133122 - DNA, 617 bp, Zea Mays
ccctaactaagaacccaagtgcattccagaacttagggagtgcccttctggagctaggggctaacttttcgggctcacatctgagattttatatgttttgtcagaaaacttgttcagtcccctgtcacctcttttccggtcgctctacttccttttccttgacctctcggtggttgtatcggttggtaccggtgcgtcttcgtcttggttcagccccggtgcatcttggtatcgtgtcatggcttcatcaagtatcgcacaatattgagacaagacctcctattcatataatgaaatgcaaaacatgcatgtgtaatagacattgtgaaatcaactaattaggtacaaacacgaaactaaagatgtgtactttacctcacactcttgtggatcataattacggtcatgttgcaaatcacaccgaggggccctatctatgctaggacaagggttggtaggcgtttcatatccttcaacacttgaatgttcttgagaaacacccttgttcatgtggtcgggcattaacccttggtccttgtttagaggactcattgagctatatataagattgcaataaagattcaaaaaaattgaacacaaagatttgaacagaagat

SEQ ID NO: 133123 - DNA, 455 bp, Zea Mays
ctggaagagcctatctttgttaaagaggctgaagagaaagttaccctgatccgcaaaagattacttgaagctcagagtcgacagaaaagttatgcggacaacaggcagagagaactcagatttgaggaaggagactttgtctacctcaaggtctccccgatgcatggtgtcagaaggttccaagtaaaaggaaagctagcaccgcgattcgtcggcccctatcccatcattggcagagtgggatccgcagcataccgtcttgaattaccaaaatccatgtctgatatccacaatgtgtttcatgtgtcccagctccgcaaatgcctgcaagtaccagaaagtcacatcgaagaagaggcaatccagattcagaaagatcttcagtaccgagagaagccaataaagattcttgactcagcagtccggaagacccgcaactcagaagtaagacactg

SEQ ID NO: 133124 - DNA, 733 bp, Zea Mays
acagaagagttacgcagacaatagacgaagagaactcagatttgaggaaggagatttagtttatctcaaggtctccccgatgcgtggtgtcaaaaggttccaaatgaaaggaaagctagcaccacgtttcgtcggcccctaccccgtcattagccgagtgggacccgcagcataccgccttgagctaccagaatctatgtcagatattcacaatgtgtttcatgtgtctcagctccgcaaatgcctacaagtaccagaaaaccacatcgaggcagaggcaattcagattcaaaaggatctctagtaccaagaaaagccagtgaagattctcgactcagcagtccgaaggacccgcaactcagaagtgagactctgtaaggttcagtggagcagagatggagaagaggaagccacttggaaaagtgaggactctctgaggaaggaatacccttaccttttctcgagccccgtctgaatctcgagggcgagattcctttaagtggggtaggtttgtaacatcccaaaattctaacccaggtttggaaccgtaatctccccccttcttatcttctatcccaaaactcccttagatttttcccatcatatgcatacactttgtttgatcacaagcacctcacttagattttattttccgacacctagattatccactaaatgatttgttcaaaaagaaaagaaacaaaaatggaaatgagttattaaaaagaaaaag

SEQ ID NO: 133125 - DNA, 475 bp, Zea Mays
cagtggatgaagacattattgggctagctaatgaccttttgtgataccaggtttcctataatcccctctattcaaggcatacctagatggtgtttatgtccactcaagtaaaacaccacacatcattatgccacattgtttctcaaaatataataaagaccataggaaatttagccaaattgcgtaagagatctgtccaaacataggttaaggttgtaagacaccttttttccaccatacagttgctaaaaagttggactataaagaattcaaaacaatagatcacctttgaaactaaaaatagtgtttctatgatattgagggcattgtattcgcacaagagggtattagagtacaactagtggatgaagacgttagtgggctagctaatgaccttttgtgataacagatttcttataatcccctctattcatggcatacttagatggtgtttatgtccactcaagtaaaacac

SEQ ID NO: 133126 - DNA, 340 bp, Zea Mays
cttcattgctagagagaaccgatagggtcggatgcttactggtctggcaccttcaataagggggatagaatggtcacaaaaccgactgggcggcaacgtcgcgggtggctagaacaggctctcgtaattgcggagcagctgcacaactggagcaggcaaggacaactcaatagaacgcagctgggctaatgcaggttccgttaccgtaaccggccagatctccagtatagtgcatgcaggaaccaatggctggcaaccttgtaacaccactgtggaacctgaatgtggtaatgatagccatttatgtttccagtcaactgtcattgggctaaacatctcc

SEQ ID NO: 133127 - DNA, 349 bp, Zea Mays
cgaaaggagctaagaagatgagcaggaagtgccagaaatgtggcatagctgattgtcacaacagccgtacgtgtttaactgtggaggataacagggttcgattggctaacctatctggacgtaagcgaggacggcctcctggttcaaggaacaaaatcataggtgcagcaccacagtggaatgagacatcaacgtcgaaaaaacgaacggtgtatgtcggagatgatgattcatctggtagagagtagaataccataagatttatgataaaattatatttggatgtaaatgtgattcctatgtttaattgacaatgcccagaaagtgtcataaatatgcttgtaaactg

SEQ ID NO: 133128 - DNA, 470 bp, Zea Mays
ccgcgatatcgttgctgcccactcgacactcattgtggacctcgtggctgctgcccagtagcgcgagtcgcgatcctcgcttgggagcaagagcgcactacttcggacaccctcgcttgtcagcttgcggaggccaaacgtcatctatgtggttcttcttgccctaatccactcctcgggtaccaggcgaccaatcccccagtggtgtacgatactgtcatcgtcgcccaccttcatgcctaggcagcgggtgtcttgaaaatctggttcctggtgcttgtcctcctatgtctgctagcacgacctctttctcctcaccctacaacactacaccctcgacgactacgtcctcattaacacggcgtcctacactatctccttttggtgctggatggatagtgtagttctctcctggatcctggggactatcatgattgagctataggacgtcgtctgcgtggtggcactgt

SEQ ID NO: 133129 - DNA, 311 bp, Zea Mays
cgacaaggattcctagcgtgcatgggtgctgaaacgagggtgaggagggcgagagcggacctagagacggcggtccacgacgcggtgactcacggcggcgcggagaaccgatttggtggaaattgcgattgctcgggctatggtgagtaatcagaggcgaggagcgatgcactggatgcgtaacaagctaacggagcacgctgagcgctcaatttatagagagcaactgcgagtacgacgaacttggatggagaagagcttgcggtgagaaaggagaggagtcactggaggccgctcaacgtggcattcac

SEQ ID NO: 133130 - DNA, 646 bp, Zea Mays
tgtagctggtttatagagctacaactttgatacaaatgaatggtcaagttgctacacaaaatttggagcaaatcgcccccaaataagctctgtcatgtgctctgaatggtgttctaatggtaccgtagactgacaaagatcctaggtacgctgcacctcgccgccggtgactctcgcgccgtgatccacgccttcgctacgattcgtgctctctggcgaggagataatcacgacagagtaaaaatcttggcaccggataggctcggacccggtcgacgatgagctcgccgtacccacttgggctgcggtcggccaaaatggtcctcgtcggcgttggtcgcttaccgaccgtgcgccacgtgccttagggcgttaccacgtcgtagtaaaccacggaagcgtgtccgttcatcgccggtgaccttgccacggtgaaagccatgaatcccttgcgccagtaaccttccttctctccggctgccagcacgccatgcccaaattaggagccaccacccttggatactataaattggtgccccagcctgctccgctaagtagttgtgcacccagtgaaccagccctcccctctaatcgtcctccacagctccccaatttgggatttcccccaaatcagtcaagaatccca

SEQ ID NO: 133131 - DNA, 809 bp, Zea Mays
ggagattgtattggctgggccgtgaattgctcgccagtcttccgtcgtcgccgccgtaccacggaccaccgcgaccgggagcaactacgtctacagcttggtaagaaccaccccaatccgctccgcgttgatgtatgcatcgtgtaggactggtcgattctaggtatggggcggtgattgggcggcggtcgccgcggtggcgagagcgccaccgcgggatggtcggtgccgccacgactgcgtgcagagttgggataattggatctgaccgttcgatcgcaaggagacggtctcgatttagtccacgtgctgctaaggcatagtttagatctacaccgttggatctcgggtgtgcggatcagattttgtgttggtgtggcacactgcgggccgcgggatcgtgatccaagcgtgggcgtggcgtacctattcgggtgcacgctcgatctaatctaaatcgttagaattcgatccgacggcggggaaacaatggcaccccttcggctgggtattcttcttaaaaagcccctacgatttccagaaaacaacccgccatccccgctgactgttctctacgtcttagacaacttgcgccgtagcccctagggtttccgtaaatagtgcgcacagtccaaagtgtgggtaaatcagtgaaaatatttataaattgatttgtgactataggaataattgtagaaacttattttattcataaaaaatcatatgtggtccaaattaatccattctagttcctataattttgtattaattatgtttatcccttggtaacactgttttaacatgaaagc

SEQ ID NO: 133132 - DNA, 696 bp, Zea Mays
cgcgacgacccaattggagagcaccttcggtgaggatcagagagggagaaagggagaaggatagccgtcgtcgacatcattcgcctccgccaccatccagaatccccaatgtgactgaaggcgttctgtcaggtgtatggtgcgtgctcggggaagcagtggagtgtgcgggaccacagagccatggcaattcgtcgccggtgacgggagcgccactgcggaacgcacttctcgatgggcggaggacgacgcgatgtaatcctcggtaagagcacccatatcgatttcgccttagcacctgcatcatttatcacctagttgactttgggaatcgggcaccacagccccgaagcgtgggagctgtgtggagtgttgatccgagcacatgtgactgttattagacgtagaatcacccttcgcacgtttcaatccgggtcactggatcagatcgggtggttctgatcgaatcccacttcattaaatcgtggttgttcatcctcgatcctagggcggtcatcgcgtaccggttcaagctgagaaacgtttaatcgatgttgtcgattcagatcgaatgacgctgatatacctataccccttcgaccgcatacacttacgaaagagtccctgatctatttttagaataatccacagttcagtgtagtattagattattgaatctaagtcctaacaatttgc

SEQ ID NO: 133133 - DNA, 812 bp, Zea Mays
agctatttgaaaaacccgtaaagagtccttagcactattcttgtatgtctttaacattcgcacaaaggcccctgcacttctgtttcttcgcacacccaggtccccgacggcgaacgagggtgagcgtgccctccagcgaacctgtaccaaccgagatgtttaatgaccaaagccctagctcggccgacacctaatcccaccctcggcgacccgaaaccgaccattaattgcacaattctggaccggagcatgccagctcacgacgacggcgaaaaccgagaataatccgatgtgttcttggtgattcaaggcaatctagttcaattaaatgggtctatgagtattaggagacttaagggatgctagaacaacaagctaagaagcttgaatttacctgtagagggctggccacgacgaggtgttcacggtggcgcagaaaacaaatttgggggaaacgtgaaattgagaggctctagtggatgatcagaggtgagagttggtgtgttaggtgtgtaataacctagcggacctggttgatcacttaaatttataacatcgatcggtggtggcgtccaattttgagagagcgcgctggcggccggagagaggggaagtcactggtgcaagcgctatcgtggctttcactgaagtaatgacttagacgatggactgactatctacggaggtctatggcaacgtggtgaaatggctgacggcgtggcagggcctcgaggaacggcgacacgacgacgatggtcgcacggccacgttgcggcgcaactgggcatgatgacagagcactacagtgtccc

SEQ ID NO: 133134 - DNA, 489 bp, Zea Mays
caagaaggtgccggaggaggagaaggagacggcggcgctcgtggagaggctggaggagctggaggagtgcatcgacggcctggaggccggcagcgacaaagtgttcaggagcctcgtgcagaccagggttgcgctgctcaacatacacacccacatcgtctagctccagagtccagactccaatctactaattagtagttaagcatatgcatgctgtttacttgttgattagcagtcgtcgaaaaatgaagatgcatgagtgtaactgtaattctgtaaatacgtgagcttttttgtacagttacgcttgtgtatgtttactgctgaatcattatacgtgctttgcttatgttgttgggttgatctcattccagcgatcgagtcggtctgaatcgaacaccttgtgtgcctggtttggggcacaataatggccttttagttatgattttgtttcacaccgtgtatatctctgctactccgtatttgcac

SEQ ID NO: 133135 - DNA, 570 bp, Zea Mays
gggtttctcggtggcattccgccgtggagctccggtcgggtggcgggacatcatgtcgtcatcgccagcctcgtccttgcctcagtgtgagtaagtctccctcccaccatgctctcttcctgctcagtagatgaacgccagacttaagactgtagcaatcgggagcgcggggtagagctgaacggcagcagcgccactgtctcgcgcgcgtttactggcggctggaggtagaagacgacgcgcctgccgtcggatctgagtagggcggtctggattaaactagggtgcatgtgcattgtcgtgtagaccgtggatctcaacatgcatggcggggattgggtctggcgtatcgtttggggtcagtgtgatccacgccgttagatggaaatgcgatggccacgattgaatctcgggcaataaaatcctgaccatcgatctagacatcagcggtcagctttgcataccggttcggcgggcgtaggatataataagatccgtcggattgagatcgaatggctgatctcatcccgtaccccccctcggccgcacgttttataaaatagacccctg

SEQ ID NO: 133136 - DNA, 1335 bp, Zea Mays
gcaacttataagagactttcccaatgcgacttgttacctggtatggcccaaagaagcgaggacccaatttcgacggagcagccgcggtgacacccactgctgtccgctgttgtaaacggagccatacccagtctccttcttggaattcgacctctcgtcgtgactgatcctgatatgtcttcatcacaatttgtgcttgtaccagccttgccttgatttcagtcagaaattcatccctttcctggagctgctgatctaccgctgccacctttgcgacacctggatggtaagctaataatgctggcggctctcggccataaactacccgaaagggggaacatttgagggcggtgtggtacgaagtgttgtaacaaaattctgcccatggtaaccactgtaaccaagttcttggacggtcgcctgctaggcagcgaagatacatgataatgatccgattgaccacttccgcctggcatcagattgagggtgaaaggcagaactcatgtgtagcttgacccctgctaagcgaaacaactcggtccaaaaagcactagtgaaaaccgtgtcccgatcactgacaatggaacaaggaaaaccatgaagccggtcaatgccatcaaagaaggccttggcgactgaggctgctgtgtatgggtggcctaatggaatgaaatgcgccattttggaaaatcggtccaccactgtgagaattactgatttaccgcccaccttggaaaaaccttccacaaaatccatggagatatcactccaaatgcctgttggaattggtaatggttgcagcagcccgacagggtgcaagtggactgacttgttgcgttgacatactgagcagcccttcacatattctctgattcgttggagggcatgagcattataaaatgtagcccgccaacggtgcaccgtcttctctacaccttcatgcgccccatcatgggcatcggccaagaggagtggccacatagatgatgcatctggtacgaagatcttgcctttaaatagcagcaacccatctacttcagtccattcctctttggctgttcctactgccagctgagcacggatagcctgcacttgggaattagtggccgcctcatctcgcaagttgtcaaacagtgagaatattgggagtgatatgctgtgcacagtgcccattggttcctcccgccgagataaagcgtctgcagcaccattcaatttgcccggatgatattcaacagtcaaatcatagccaaataatttactgacccatgtgtgttggggaatggtggagagccgctggtccaagatgaacttcaaactgtaatgatctgtccg

SEQ ID NO: 133137 - DNA, 549 bp, Zea Mays
ttgttgagaatttgatcaagattgctgtgacaaagttgtagctagtttgtcaggctataattttggtacaaagagctagcttagtcaccacacaaaattgggagtaaatcatgctccaaatctctctgtcagttcatctaataggagatcaccatggtacagtaaatgttcaactgcagaagatcccaattccaccccctactcgtcgccggtagcccatcgccgttgatcgattgctcgccgtgattcgtgcgccatggccatcggataagcacggctcagtaagaatctcggcgtccgatccacttgcgctcggattgcggctaagcttgccagaccccccctccggccgtcggtcgaccagataagtctcaccgccgtcgagctgccgccattacccgccacgtgccttagtgctggacttcaccgcggtgactcaccgaatgcatgtccggcgatcaccggagccactgccacggtgaaagccacttttcccctgcactgagctcatctcccctctccggccgccaccgcgccatcatcaattca

SEQ ID NO: 133138 - DNA, 605 bp, Zea Mays
ctaattagccatacgttatcgacctacgaatttaacactactaagaaaccgacaaacactatcatatacatagccaccacaaacacgacatcacgagtacaaccatttatttaattggatacgacttttcattagttcttccatagatcgcacaaaagcatcccagacaacacaagttcaatagaggacataggcatcaatgtctatggaactcctatatcacaatcaactagagaaagaaacatataaaacatgacacacatgcaatattaagcttagtcatggcaagtctacgttaattaagtgctaaccaactatttttagcaaaacgggtgaactaaacaatcagataagcacttgcagattttttgacagcaacacaacagttacttgttttaatcataactcttcaaatattaatccaaaaatagcaactaggactttctagaaagcttaaaatgtgctctacaactttggtatttttacctcaacacgattcaacacttagcaaggtcaaaaaatgataacacgacagctctgtccagatttggacagattcagacttgcgactttaaaaatccataactagatattcatgcacccaa

SEQ ID NO: 133139 - DNA, 723 bp, Zea Mays
gatacaccggaaaaaagcacaaaggcctgaagaacgtaccgaaatagataaacacctcatttttcaaaaggactcttccacccctggtaaattttcgagtacactctcccacctcgactaacgtacgtgtgttggtttgcggtttgcacgttcattgtaaaatagcaagcaagatcacaagaggtcaaaaccagacaagaccgttcttttaggacgtatgcaatgcaatacaatagtagtgacgagcgcgagaagatagattaatgaagaatatagctagggcaaagagattcggtccctagtaccgtcgtcaaaaagtatatatgttgcaggaaagtttcagtctatagtagtctacacctggccaaatgagcccggccggtctagcttgtttcgagcagctcccaacaatactcggtcgacatgatcaaatttctctctataaaaaacagtgtagtttcgtatatcccctatttttgacactcatcatactactcatgcatgggcttctatctttcattgttttagattagaaaaaggcttttgttagttgttgtacatatatctattgcttaagagagaaactcctatgtctttgaaaatgcaaatgctagcgcgttctaaagcatgggtcgcctggcaggcaacaacgaactagtgctagctgcattcatatatcttggaggagtgcatgtacaagttccctcccgaccagggcgcggc

SEQ ID NO: 133140 - DNA, 291 bp, Zea Mays
ctagcgacatcctctgttaagccctaagttaaggactataagggggttagtttaggatactaaccactaacccacaactataatgcaattttctgcaggtacactaactaaaccctaggaaactccgactagtgttcaatgacggagtgagtaggattgccaccgccatagaatgtgatagccactatatgttggcaagagttgcaaggacgaataggacgagcatgcatcatgtcatacaactttaagttaaaccccctgtgtagctattttagtacatgtttcatctac

SEQ ID NO: 133141 - DNA, 468 bp, Zea Mays
ggttttttcgttagctagctttgttagtatgctggaaccaaatatttttaggaaactcactttaaatgatggcgtcaaagatatggttaactgctatacattgctattttgttgttgaacttagaacacctggacctcattctattgaaggcgagcatgtgctctaggatgctaacactatgtttaaggggcaataattagcatgctggaacattctatagttggtgcatgtgacaatgttcactgacaaagaaatataggatgcaccagaggccaaatatagagtttcttacgctggtaatgagttatatgtcatcaagtagtttcataactagaggccaaatatcgaatgcttgttttaaatctgtgaatcatgtgagccttgacagtgagataaatatttggcattcacgtttatatcatataaattttgattatataacatacttagttggtattaatgtaatc

SEQ ID NO: 133142 - DNA, 380 bp, Zea Mays
ctgtggtgaagcaggcgggtctggagttccactgtgcgaaggttgtgtcccggcatctggtggcactgtcgatccggtgagggtgctcttcgttttacttcatcttttcctgtgctcgagtatattttcctagttctactgtttttttgggatgttcagtatgcaatgtgtgttcttctgtttctattagcaaaggaacaaattatgcaattctagttaaaatttgtcctagtatatttgaggataacataggtattgttgaaatttatatatagttaatgcatgcaattttgaagttgtaatttagcattgaaatgtatgtgcgatgtctgtgccttgacggagatgaatgagtgtgagatgtctgtgcgaactgtgat

SEQ ID NO: 133143 - DNA, 380 bp, Zea Mays
tgctagcctaccagaccaaatggccaagtgaatgggctaagaaatggttcaacattaaggtagacacgaagaagagggagtcgattaaatatataattacgaggccagctttggcataaagagacccatctacaacatgggcggaaacagccaaacgactattattcattcaacaccatggtggacatgatcaacacccaggatttagtgcaataatttcttgtgggcagagtgttccctataagatccggttggggtacgtcgaagcctaagaaaggtgatgcagaggtaaagatgagagttttgttaactctaccatgttgcttcaagcatcaacctttgtccaaatgttcgtgcctcgagtggctagagtccattga

SEQ ID NO: 133144 - DNA, 546 bp, Zea Mays
tccccgtcgggtctgtggaagacgaagtcgaggtggtgagcaagcagctccggtcgcgaccgaagatgaagcggccgcaaatccgactccgtcgaggttcgtcgcgaccgcttccttcgtttcccgctccgagcatcgacgcgttcctcggatccggacatcttcgcttcgattcctcttctttcggccgaaatcttcggatcttgaggtacgcccttcgtctcctatggtttctgttcttcatgcgcacctctttgatgaactaattactacacgaatcgactaaacctgttaaccgtaattgattacatccgagaacacccgatttatccccggtgcgaacaagtccacggatctggtgtgccttttagggttaaacatttatatggtactctcccgctgaatatccttgatatttactggaacaaatggtactgcaaactattacggcctaatggtctgcagattgccatattttgtaatccctacactacggcttcacttcgaatctgccttaaactgtcatgtcttatgccaaaaattttt

SEQ ID NO: 133145 - DNA, 317 bp, Zea Mays
ttcggagggcccagatgtagacactaagcctaacgatggcgttaggcgttagttgatgaagataaattccaaatttcttcagaacatcagcaatcatcctattcaaaggaaatcttagtcctgctttgaagaagcttttgaacaccactacttcatccttccctggcttcggagtagtctcttccccaccgaaacgaaccagctctttcttcgcttcactgaaatatcccaaattcatcatcttcggcatgtcaccttcggaaatggtggatttcccaaaatctaagtggctaggtttagttggcgcagcgccgtaa

SEQ ID NO: 133146 - DNA, 589 bp, Zea Mays
atgtgcgaggaggagcatgcacagctagcggtgacgtagtggcgagtcactggcgcagacgagcagcaggcattggtgtggtactccggcgtggggaaaggcgttcaatcgtgaactgacggcgagctgcgcgtagcgacaagcggcacaacagcagctggcaagcagaggcacggtggcacgacgatctcatgagtagagagcagggagagaagggtgctcggggcatagtagattggtgacgatggcggacggcgaggcgtagcaaatcttcgaacgcgcgcagaagcttcggcagacgcaggaggagggagaaaagtctaggaacggttcgacgaggtcacggacatgtgatttataaggagagggagaagaaacgggcattggaatgggaagagaaagcgcatcggctccattaatgatgcttcggccgagcttgcaacgggacaagatgaagctgctgagtggggagaggagaaggcgtgatgcagtgaggaaggagagcagcagacacggtgtcagtgctccactaggaggcgaaggaccagcgagggcggcggccaggaagatcgagagatggcagttgcgg

SEQ ID NO: 133147 - DNA, 399 bp, Zea Mays
tgggaactgtcacagatgcctgggatccccagggaggtgattgagcaccatctgaagatccaccccgacgccaaaccggtgagtcagaagcctcgaagacagtccgttgagcggcaggacttcatccgtcaggaggtccggaagctgctagacgccggctttatcaaagaggtccatcaccccatgtggctggccaacccagtcatcgttccaaaggcgaatgggaagcttcggatgtgcatcgactacaccagccttaataaggcttgtcccaaggacctgtatccacttccacgcatagatcaaatcgtggactctacttccgggtgcgaccttttgtccttcttagatgcttactctgggttccatcagatccagatggctagggaagatagggag

SEQ ID NO: 133148 - DNA, 530 bp, Zea Mays
agggctagctagtttgtgtaagttccaatggaagatctgccctagcttgtgagatatgtgggcgccaagtcttgtctgtctgcactattcaccagcgaaaaactaatgccaaaccatgtcaaacgaccatggtttaatttcaaattttgtaggtgggtgccttgggtaatttggccactttttgctatttagtccaagtggttttggcgcccgcacaagggtgaacacatttgatctttgggctatggttggttttggtgacttagaaaattttgaatggctctagtgtgctccccacttggtgaatggttttggggtttttgttggccctttttgcaatacctctcttaatacattttgtagatttactaatatacttcatctttggtaaaggttccctttattgatttggccatttgcccactctttcccctttaatcccatgcttagggttttaatggcttaagaggggaattagggttttagaaccttgttcatgggtgaaaattgtatgaaggctagggttcctt

SEQ ID NO: 133149 - DNA, 528 bp, Zea Mays
ttgatgtttcgaccactttctttgccttgtggtctttgttcttcttgggggaatcttgttcatttgagatcaaggcatgagtgtctcttgtcttgattggggctttttcagactcatgttgttgaatttttgcaaatagttggtgtggtgtcatttcctcatagtcatcacggtcccttatcatccttgctagacttttgtccttttctttgtatgctctcataaatagtctagtgaccttggagtcactccaatcttcacttccaagcactcttattttgttgaccaacaccattagctgatcaaagagtgactgaagtgactcaccctcagtccaatcatattgagcaagctcactctccaaagcttcaattctatgtctcttagctttggggtctctttcatgtgacatcttgagaatgttccaaatgtcacgagcatcctctcttccttggactttccggtaccctttcggacaaaggcttccttttattatgctcaccgcttgagcattgcgatgtacttctt

SEQ ID NO: 133150 - DNA, 750 bp, Zea Mays
acaccaccattgggatcaacctcagtaaggacctctgctggtacttcttcacaaacaggagcagaagggccagcatcctggtccaagcatgacagtcgccgaagccgcctcttctttttcttcttctcctcaacaggcgcagttggatggctaacttggcgagcacactttgggcgagtaccctcaggctttcgggtgtccactgttttgttaagctcttgtccaaccgtaacagccatcggttcagcatgggccgagtcagaagattctccagccaacatattgagtacaacatctatttctgcatcatccggacttgccggcatcgaaaagtgaacttgcctctcatcattgggaagatcacgaagaggagcaaccagagcttcaatgtctttaggagagggtcgcactctaagacctagaccactatcaatagcaggagggttggacacgaaattgaaaaatgacctaggagatggcagattccaagcagaataagcaacaggagcacccacatttgataccttgcccctcaggatcatgtctagtcggctcaccaggacctcagtaggaattttcctgttggtaacccgagttgagtcagtaataccactgtacaagtaagctggatacgccctgtctttcaaaggctaaatattcttgaaaatgaagtcagcaaccatagcttcgatagttagacctctctccttcagcagacagatctcagcaagcagaaccctagcttccgtc

SEQ ID NO: 133151 - DNA, 1335 bp, Zea Mays
caccccccccctctaggcgactttcaactgcgagctccatatttggcgctcctccacacttgcgttgatcgtttacaccgacactgactaggtcgggtgtctggccacccgtcggtcgatattcgactatgcggtgtacctagaggccaacctcatttcttgatcctccaagcgatagctcgtggtctcccgatccagtgctgaggctgagtaatgggctgacgctaatgggttggctaaggcgagctggttgtgccagcttctccaggagattcacacacccctcaaccgaagcacactggtctactacgacaaccgaaaacgtcagagccatctacctctccatcaacctcgtccaacatcgccacaaaaagcatctcaaaattgacttttcacttcatccatgagcgtgttgctgtcggaggcatccacgccatcacgtcctgacgagcttgcagtttgccgacaattcaccaaggatcttccctccttgttgttctcgaagtttcagtccaatctcaacatctgttgcggcttgagtttcgactatgaaggtgtttagattattgttctgtctaagggttatgtgccttggtccaatccatgtcacccctttcctgatatatacaatactcagcccagacttttgcggctagggttttttattgcccaacaaatttcatgagccaaaaaaggttaactactctatgaaaatgttcatatgtgatttcctagctagtttagttcagataagtagttgcaagagatatgaaggtacaaaatatactgtgatgcataaataactgtgataaaaactacatgaccaaaccttgtcttctgaaagcatcaattcctgcagtgcattgcttactgttggagctttgtatgagatggggaagttactagatccagatatttgaccactagcacaatgagtgcttgcctaattaaaatatttgaatagatgagataagtgaagtcatccaagtgttaaatctgttgaagtaaaggaaattgcaaacatctgagaagccaaaagactattagaaaaaggtaaaaactgtacaaacgttggcacatatgtgattgtacagcagctttagtacagagaactactgctggagacagagatctgaaactaattctcatgtacaaagattcagcctcaaatcattagacaacaaaaaggcacactgcaaagttgactaaccttgtcctctgaaagcatcaattcctgcagcgcactctttacagttagagctttgtcggagagaggcaaattagtagatgcagaaatttgaccagtagcacaaggagcgcttgcctagataagaa

SEQ ID NO: 133152 - DNA, 283 bp, Zea Mays
ggcaaactgattagttagcatatcaccatggtaatctggaagcagagcagcatccccaacttctctttgttacattgattgaacggacaagaaaacgaagcatcagcatcatactactgtccaatgtctaagctatcggttagcgcatcagtttcaatctttcaaagcgtcattggaagtcaaaggctaggtagcactagcacaagttgtttctagcatcgtccagatctgatgcatccgttaaacaggcgcacgagctcaaggccttcaccttggatcaggg

SEQ ID NO: 133153 - DNA, 460 bp, Zea Mays
ggcgacgatgccaggtggtagaagacgtggtggcagcaaaaacagcagctgtgtcaggtgacgaagacgaagaagatgtggcgtgcggaagccgaagggtgtagagggggccggtgctatcacatctaaggagggggcaccgagttgccaagtcctttacagtaagaccagaagagtcaaactcgacagaacaagaattatcggcaataaactgacgaatagaaagaagattatggaccaaagaaggagcgacaagaacatcgggaacacgaaaagagccgggagggccagcggcacccacagatgtgacaggaagacatgagccattcgccaccatgatggacaaagggagagaggaaggagggcaaacagaggtgagtataccagggtcaggaatggtgtggtaggtagcaccggtgttcacgatccactcgagacccatcggcggagtcagagtggg

SEQ ID NO: 133154 - DNA, 272 bp, Zea Mays
ggacgaaaggccttaggaatagagggaagaataggtggctaattaagtaggccctgtgggccagtatttagattcttagaggatgccttaaagcacccttttattcggagaggagacgttatttttagcatgcatgcattataaaactaaaaggattaagaactgaagaagtaaaaatttgagctaacccgcttccttttaaaccacccaggttctttttatttttcctcttccaccataatatttacatataatgatacccttccgcagat

SEQ ID NO: 133155 - DNA, 509 bp, Zea Mays
aagtctccgaaactgtcagattatgacaatctgtaaagagtcagatccactgttatgtcaatcagcaaagaaccgtcatgtgaacggatcctaagactggggcgacaattgcgcatcatcatcctctgaagaatggatacaggcatgcagcaaagatgagaaaaaaaaaagaacacaaatgtaacacactgcaacggatgggaggaagtggtgaaggcgaactcatgaacagtggagtcagaaacgataacatgtcaatcagcaaaggtccggaagtccggatcctaagactggggcgacaaaaaccatatcatcatcctccgacacgaccatcgacactgatgaattcaaaagaaatcaaaatcaaaagatgggaaaacaacactgtttcgaccaaaaaacgcaccgagcagcgagaaatcatgggagtcaagaatgctagacgaccgtagaagaattcggctacacgcgttgtgtatttatattcagctaccgccggtgaggtgtct

SEQ ID NO: 133156 - DNA, 546 bp, Zea Mays
ggcatgtagagactggaatatgatgtagatggcataagcttagtgcgtccaaataatgcaaggccaaagggaaggacgataaaaactagtgaacaaagagttctgaaactgggtgcgaaaggagaaaagaagaagactcgaaagtgccaaaaatgtggcattgctgatggacacaacagtcgaacctgcttgtctatagaggaaaatatggttaaattggctagccttgctgatagaaaaagaggacgactgcctgggtctagaaacaaaaattcaacattggccccgtagtggaatgagacatccacatcaaaaaaacataaacataccaattctgaagaacatggttcagatgatgataatttgacatgattgtaaaacatttatacataaataatggatgatattgaaatgttatgatcatgatactatttgatgaatatgaatatttgcgttaaaagctcactgtatggattatatctattaatgcaatgtaattatttcttatgagctatgctactgttgggtttgtttggctatataatc

SEQ ID NO: 133157 - DNA, 470 bp, Zea Mays
ggagttgacaggtactgaaccaggtcttaggggtatgcaatgatcaaattgcctcattggtggtagatgggtaggaacattaaacaattcagcaaactcttgcagaagcaactggatatcagtttcattaacttgactgccagaatcagcagtggattccactagcaccatggcccaaatatcatgtccagccagccatttctgcacttggagtgctgatacctcctgaatggttgaacccgagtgaacatcatccccatataaggtcacctcctgtccagcatctcgaaactgtagcaccttgtgtacccaatcacattccatagggctatgctgcatcaaccaatcataacccaagatagcatcaaaagcttctaaaggaagtactctcatgtcagtatggtagaaatgcccatgagaccaccattcaacatttctaaccatagagttgcaaatcattttgtgtccac

SEQ ID NO: 133158 - DNA, 508 bp, Zea Mays
gtgttttcctttggagattagcgaggctctcaattccgacgggggatggccgacaccatagaaatatggttccggataatgggggttgcacgttgattattccaaggctgctagactgcagcctagctcaatgtgatgtggccatgtgattttacttaggattttaattaacagagctgtttaattatccggtcctttcaagagtctagctacttttctataactttttatatatgtttatttacgatctgatttaaacctgtactgttcgattagaatctacgattgtggcaacctttgcaagttggctgagacaggatttatatatatttggtcgcggtgcacggggcacaattggtcgcggtgcacggggcacaattgggaatgggaaacgggtcacatggcgggacacagttgggaatgggaatgaaaacacaaacacacagagcgcatgggaatggaaatgaaaacacacaggcgcatgggaatgggaatgaaaacacatagg

SEQ ID NO: 133159 - DNA, 277 bp, Zea Mays
gcggtttgggtcttagagtgcggccctctgacgaagaggttaacactttggttgcttcgctcggggaaattcctgacgacgaacggcaagtccactttgaggtgcctttggatcctagtgacgcagaaataagtgctatgcttgatttgctggctgaggactctcctgatgctgctcctgccgggacattagtggtggcgcctctcccagaagctagtataactttggatgttcagaagcctgccagtgctcgcccgagacgcccttgccgagccaa

SEQ ID NO: 133160 - DNA, 860 bp, Zea Mays
ccactgcttccggttgagtcttggcccgtcgctcggcagggcgaggcggtcgttggcctccgcgctagggatcacccagtcaccgcgccagttatcccaccttgcacagccaagagaggggatgtaggcgccagccgaatccgaccttgtctagaagtagtaggcaccgaggtggtccttcgccttccccgacttcaccagcacaaagaaatggcggaagagggaggtgcagggcgccacccccacgaacatctctcacaggtgggcgaagatggccgcctggaggatggagtggggtgaggtgctgaagctggaggccgaactcctccaacaacatcaggaagaaaggcgagattggcagcgccaacccgcaggagatgtaggaggtgaacaaaacgaactccctgacggcgaggtcaccgagggggacggcgccagcgcggatcctcccggcgagcgctgacgcactccatccaagcaggtggtgcaccacatcgagcgtcgcctcggtctggaagcggtcgggttggccaagcgaagtcatggcgtcgacggtggcgcaggtgtggagcaggagagcgcgaatgcaaaggggcgcagaaagctcgaaggcgaaagggcgcaacaagaagagagaatgtgaaagcgtaactgctgcacgcgaggtgaatcccttttcaaggaagactctcccgctcgcgcccatctcgcccggcgcgcaccaaagcaacccagcctctaacacgggggcccggggccacaagtcatacagctggtgtgcaggactccgagtactgagaaggcgaaccgccacgcaagaagtgaaccgccgcccacggtagtgcgcctctccatctccg

SEQ ID NO: 133161 - DNA, 738 bp, Zea Mays
caaggggtaggggctcttttacaaaatggctcaactgaaagggtatcaacgatctgcggcagtccgatcattgaccgccagtgcagattagacctggtctcttctgaaagggtacacaatatagagcctcagatccagatccaatggtccgcgttttatgaaagtaggacctagactcgaaccgcacgattccgatccgaccgcccgaatcctacgaaatgaaggggtacacaaaatctgatctatgccgcccatttaaaatcctacgattccgaccatcacacaatctcttctaatcttaaccattcatcacgagattgatggccctggactcgtcttcttcccctcgactgcataacaacggttgcaagcaccaggagggtgcaatcccaacgagtgccatcctagcagccatgattcagagcacggacaaaaattgcataacacggagataatgacgaactaccaggttgcgatcataccgacgtccgtagcgtgagcaaggttgcccttggaagatcagtgcgacggtgcctttgcttgttgatggtgatgcgccggctcgacgccctagtgatgcttcggacgaaccccccccacgcgcaacacagaaaatcgccatgggccgcccgcgcttgactccacccacgctcaccctctctcttcgacgcccgcaccagctctctactccccccttcctctttcttctacactgacgggcgctgatggcggtctcgg

SEQ ID NO: 133162 - DNA, 393 bp, Zea Mays
gacactcccaatccatcacctgtacctcctgcactggctgaggctatcgctgccttggtcaacgccaccgccgacaagacgcgctttctgcgcgaaatggcgggaaaccaaatttaacaacacggaggaagaggtcaaccacaaggaccacacgacaccacctatctggagttctccgagacccatgcaccgctctttgccaaggtggagtaacccctggagacagatgaatgggtgccggtgatggaataaaaatttgggttaatctgatgaaccgagatatagaagcccctatttgccgctcagcagttaagaggctccactagcacctggtgggcaaactttttcgccatccagcctgcgggacatgaagtcacttgggaagaattcaaa

SEQ ID NO: 133163 - DNA, 362 bp, Zea Mays
attaatgcctcagccatggaaggaaaaatcccgtcactgccacagaagtaaacacatcccctcgcagcaattcagcacgcatgaatcccattgtcgatgacgcgcaggaccacccattgcccaatcgttctttccatgcaccgcggatgccccgcccatatccctctcgccccaaatgcaatccacgcctcgccaccatggaaggaatcgcaacctaatcccctcatcgccatccagcgcacaggaccaccatcggcccgcatcccatcgcaagtgtaggaccaccccgcctggatcttttgatgctcgagtacttcccattctacgcgccagccctgcccagatcttgcgatgctcgagta

SEQ ID NO: 133164 - DNA, 703 bp, Zea Mays
gccttttgaaatatggctcgaacgaaaactggatcgttggatccccagtaaaagtcttcgatcacagctgcctcagcaacctcagggatacagttcctcattgtttggaatcttctgaggaataaacgaagagtttcatcattctgccgcctgatggatttgaggtcccaggctgcgctggtttatcggagagggactggaagttcgtgataaactagcgactaaaatctccccaatcatcgatgtagtgtcagagcagatgccggagccattgtagcgcatcctgtcccagaatgatgggcaagtacaccgtcatgatgtcctctgttgccctagcagcccaggcggcgatagtgtagatggccatccaacccctgggtcctgcttgggttcatatttgtcgacgttggagactttgaaattgggaggcattggatggctcggagacgaggggtgagcgcggagaccccacacgtatccgactgtcgatgatcatgtcgtcggtcctagggtggggagcgagtattaggtcacctcgaccgtcctcggaccggagtgttagtagaggctgctgctgactcgatcttggttgtgcggctgtgtgccggtacaccatgatcttggtcgtattcctcctggcgtcttatttcattttcatgtcgacaatcgtgcgaagcactgatgttgctccgtgcgtctcatc

SEQ ID NO: 133165 - DNA, 623 bp, Zea Mays
tctgattaggaacaaatgccacatcttcaccgatcacaagagtctgaagtacatcttcactcagccggacctcaacctccgtcaaagaagatggcttgaattgatcaaggattatgacctcgaaatccactaccaccccgggaaggccaacgtggtagcagacgcccttagccgaaaaccattcgggattaaggggaccaactttttagaagattggaagaaagaatcagctcagctaaatgcatgtctgggagacaatggtagcctggaagtcaaaccaatgctagaagatctcatatgcaaggctcaacgcctggacgcagagatagctagacttacggaaagagctcgcaaggagaaacttccggatcttaggacagatgaacaaggagtcctttggttcaagaatcgtctgtgtgtaccaatgggagaggcacggaaagtcctgctcaatgaagcccacaactcagcttactccatccacccagtaaccaccaatatgtacctggacctcaaaacccagatactggtggaaagggatgaagaaggaaatagcacagtatgtggcccggtgtgacacctgccagcgaacaaaggccgaacatcagaagcctgcaggcctg

SEQ ID NO: 133166 - DNA, 364 bp, Zea Mays
gcacgtctaaaatatcacattaatggagcatcactagcgccacaagcaccacaagctatgataaaggtacaacaggataacacatatgtcatcatcaccaactctacctataaaacaactgtatgcaactgataaacaagtgcttgcacaccttctctcattcgtggtaaaagatgtcatgacacaggtgacgataagcaccactgcgatgacaacatggcacattataaagggaatatttttctctataatatggcatgctccatcaacacacaaattaccctaatcaatctaaagaaaggctataagttcatcacagaatatgcgacaaacgctcgagcgcttgccaatgtggtgatctttg

SEQ ID NO: 133167 - DNA, 529 bp, Zea Mays
cccttggtcaagttcatgtatgaatttgttttgaacaaagctcaaagactgacatttgattcatcataaccaaatgggatccatttgttccgggaggttagcaagataatcgtggcttacaaatcatgaaatctattgcttcctaatggcacaaacatttatggaagtaaatacaaaggcatatggatctcgatctcactgactgttctctaaaggggtgagtaacaaacacctttagtcttggtaatttgacatatattgcaagtgggttgactatagattttattagggtagtagctagctggtttccgttctattaatactatattttagaaggcttgatatcactggttacatgaatgtgaaacatgattatttgttggagcttttgtaatagacatttttgtaatcaactgtagtgtttattatcccaatttcaatgatctagatttagtttgggcaagatggaatgtagtaggaagaataagctcatcctctgaggctctgattgctttttagggttcctact

SEQ ID NO: 133168 - DNA, 375 bp, Zea Mays
catgtgggcaacaggagcaaaagtctcatcataatctcgaccctgactttgctgaaaacctctagcaacaagacgagccttgtatcgctcaacagaaccatctgatttggtcttgactttgaagacccatttgcatgttatcggtacagcatgtgacggtaaaggaacaatatcccaagtaccggtgcggtcaagtgtagcaagctcctcaatcatagcaagttgccactcgtgaataccagcagcttcctgataagtagtaggttcaacaattacgacagcagaacatggataacgataacgatctggaggtgctattgtagtacgatcacgtaaattatatctctgggcaacctgcaactcatcagaattgtt

SEQ ID NO: 133169 - DNA, 307 bp, Zea Mays
ctaggctcttggagttgctctaaggggcggaaatatcacactggcatatgggccgttggtagaacaacgaagcccatagtccatgcttcttcctagtagcacaaaaaagagggcatataataaaaataaaagaaatagaacaaacggcatcagaaggcttcttcctttcctccacatgttatcaagatccccttctcatatgtgattagctcatgtccaccgttcgatctggccatagtaaacgggtggtgacaacgatgagcataacataggatgctactagtcggttgtccgtgcgttgcgacgg

SEQ ID NO: 133170 - DNA, 665 bp, Zea Mays
ttgtattctgtaattgggagatacaccatcaataaaatgacttcattctcaaaggcactcgaattgtttattgtcaatctgcatgcttactcgactcagggtgaccactataccctacaaacagagcaatcagcttaagtcggcaacgacttaaggcggtgtgacatgctcacgcttacttaacctagagtgaccactatactctgcgaacggagcaatcggcttaagtcggcaatgacttaaggcggtgtgacatgctcacgcttacttaacccagggtgaccactatgccctattaacggagcaatcagcttaagtcggcaatgacttaaggcggtgtgacatgctcatgcttacttaactcagggtgaccactatgccctactaacggagcaatcgacttaagtcggcaatgacttaaggcggtgtgacatgctctcgtttacttaactcagggtgaccactagaccctaccaacgaagcagtcggtttaagttggcagtgacttaaatcagcacgacatgctcgcgactactcgattcagcataagcacgtttgcgattgctcgtcttagggcgatctccatgccccgcgaaataggaagaagtttcaaaaccatcacactgcacttacttctgcaatcataatgactattgaattcaaac

SEQ ID NO: 133171 - DNA, 796 bp, Zea Mays
gccaaccataatggataagcggctaagggcaactccacgtctccatcaaccttaatcggagttcaaatgatacaagtgccaatcttccaaacaaggaaacaactgagaatctaataatcaccattaaactctggtgacacacatacgtaagctagtaaatggaatccccaaacttcttgcgctactcctgtactccacagtaattcatcattctagggaaatatcagtgccttatcctggacaaggtccttgaacaacctcttcgtggtaatatgatagaaacacaaaaagtactaaacaaagtcaataatatttcatttagctagtggctgagcaacgagccaaacatcaacaaagaactgagaggagaaagaacaagagcttgtttggattccctcccttaaactttagagctctaaaattattttagctccgttttaaggtcaaaagctctaacgtgaggttggctaaaatttagagctaactttagacaacacatgtctaaaaactttagctctaaagtatagagaaggagatccaaacaggtcctgttaatatacaccttgcatcttacaatcaaaagaaacatggggcatctataaggagattgtattgatgcaagccaaataatcagcctgacctgatgatcttgctgttgtacctgcaaagctccagttaaccaggatcaaacagcatagaggcataaagcagcacagcaaggggggctgccgcagcccacctgaaagtagcagttctgatcataagaaaacagacgaagctaacatggctcttctgg

SEQ ID NO: 133172 - DNA, 613 bp, Zea Mays
attgggttctgttgcttctaatgggttgaagcagctagcaaatgctatctgaacaatctcttatattggtctaaagctcagaacggtatttgtggttcatgttgcttgatatatttaatatgaaattgccatgactcttagatgtgttttcctcttttgggtcatttcatgccttatttgcaagaagccatagaagatatgaatcatatagtttgtgtcatatttcatattaataatgtcaagtttgtttccacaagatttgcatgatatgttgttatccttgtattatgcatgattcctcatatcttaggtgctaatgtgctgtacaatttgcatcactcaaacaatgaaccatttagtgaaattcttttacctgcttctctcttctgttgattttattttattgtaaatgtagaactgtgcttttttttgtttgaactgttcgctaaacagactgctcatcatctttgaagtataatatgcataaatagactgcccgttacctttatttgaagtatagtatgcataaatagttatattgatcttgtgtgcaaatgctcatcatctttgaagtatagtatgcacacaagatctagcatttgaggaattgtca

SEQ ID NO: 133173 - DNA, 848 bp, Zea Mays
tgtcggcaccgctagagaggagactcggatgctcattcaatcttcccttctggagagagtgcgcgtggctcaacagtaggatcgtttgttgcaggaagctcaaaagagggtcagtgatggtaaaccccgtgagttcaccattgatgagaatgatttttttcgtttcaagggctgtctttgtgtgcctcaaaagtcagaggtgaagatggatatatcgagagaagctcataaaatgccttacaccgttcaccctggcgaaaccaaaatgtacagagatttgaagcaaaacttctagtggaagaggatgaaggttgacgtttctaagtatgtggccgcctgtgaagtatgtcagcgcgtgaaggccgagcataagaggcctgcaggtttattgaagccattggaaattccagattggaagtgggagcatatcaccatggattttgtggtgggcttacctcgttctcctcgaggaagggatgctatatgggtggtagtggatcgcttgacttagtctgcgcactttattcccatgaagaccacaaattcagctttagagttggttcccttgtatataaagaaagtaatcaggcttcacggggtgcctaagtccattgtttctgatcgagactccaaatttgtatccaaattctaggagagtcttcacagtgcattgggtaccaagctctcacttagtgtcgcttttcaccctcagactgatagtcagtcggagcgaactatccaaaccttggaagatatgctatgtgcttgtgttctatcttggaagggtagctgagaggatcatcttgccttggccgagttcgcttataacaacagctaccaggctagca

SEQ ID NO: 133174 - DNA, 477 bp, Zea Mays
gttcactggtacaacatcagacagtaagggaatgtgatggtcaaatggcctcggtggaggtaaagagactggagtagcaaacacatctttgtactcgtccaacagagactacaattcaatttcctctcttgattttttcagattcagtgactgtctccactagagcaaaagcccagatatcattccccttcatcatcttctccaaatgcacagtagaaatccctatcacttctccccgttgtccattggttcccagcaattggacaatctctccattatcttcaaagcttatgacctttccttcccagtcacattgcatggggctatgtctcttcaaccagtcataatattgcgtcataagctcctaactccaacacccgcatgtcattcctataggtgtggccattagcccaccactccatggccttaaccatcttatcactcttcaagatctccccattggccacttttactttc

SEQ ID NO: 133175 - DNA, 931 bp, Zea Mays
gatggcttcaacgtatgtatatttgcatatggtcaaactggatcgggaaagacctttacaatggtgattgacctgtcagctgttactttttacatgagtattgtattgatacttcttgcaatatgaaaacattgctttctggctactgcagagtggtcccaaaattttgacagaagaagggctcggtgtcaactacagagcactaaatgatctatttggtatccaggagcagaggaaagatacaatttgttatgaaattgctgtacagatgatggagatatacaacgagcaagtgagagatctccttcagactggcggaaacaaaaaatatcctttcacactgagcttgatattaatcctgctcttagatatcttaacttttttttttttgcatatgttgaacatctatcttatttatgtgggcctccttaacgccaagaaacattggaaattcgaaataattctcaaaacggaattgcagttccagatgcaaatgtggtgccagtcagatcgaccgctgatgtaattgacttgatgaatctgggccaaaagaatcgaacagtttgctcaactgccatgaatgaccgaagtagtcgctcccataggtttgtttgttgcttttgcattagtgcctccagtaccaggcatgatgttgaacttgtttttagctgatgtttgagtaaaccaattgcagctgtctgactgttcatgttcaaggacgagatttaacatctggaacagtcctaagaggttgcatgcatcttgtggatctagctggcagtgaaagagtcgataaatctgaagtggtaggaataggattaaaggaggcacagcacataaacaagtcactggctgcactgggagatgtgattgcagctctagcccagaaaagcacacatgttccttacagaaacagcaaacttactcaact

SEQ ID NO: 133176 - DNA, 711 bp, Zea Mays
atttggtcgaggaactttggcaacagttggatctgggtgactcggatgatcaacaggtcgctgacgaagctgagctccacaaccttctgctttctcagtctgctgcaggcctaaaagtctcttccaagacgatgaagttcagaggttctatacagggtgtggaattattaatcctcctggattcaggcagttcacatacctttctgagtgcttcagtggcagcccaacttacgggttgctcgccggtagatgtcccaatgccggtacaggtggccaatggtcataacttgctctgttcttctgaattacgggagacggtatggttcctcaacgagtatcagttccagtctacactgaaaattttaccactgaccacgtacgatatggtggtcgacatggattggttggagttgcatagtcctatgtctgttcactggttggataagtggcttactattccctaccgagggtccatcatcaagctcttgggacttcaagcaagttcatcacagtgtgctgtcatggagctttgccacattgccactctgccagacaaagacaatcagctcgttcaagatttacctgaagcgttgcaacaccttattgctcgtttctcccatgtgtttgctctgccgcaaggacttccacccgcaagagactgtgatcaccacattcctcttttgccaggcgtcagagctgtacaaatccgac

SEQ ID NO: 133177 - DNA, 553 bp, Zea Mays
ctgcggcggcggcggcggccgacgcttgctactacgacctggccaacatcgcgtcgttcacggccgatgagtacggtggcgccggcagcagcagcctccatcatcaggcggcggccgtggacgtcgcgcatatggcgtttctgatgggcggcgacggcgtcagccatgcgccgcagccctttggtccgatgctgctgcctgctcccgacgaccttccgccgccggcgccactggctttccactacggctccgaccacaaccatatcgcgggatatcaaggccatgcctacgaccctggatgtggcagcggcggcggccatggcgccgcttatgaaatggaagggtggacaacggccacgtgcaacttctttgggtagctttgtgtcagtttaattactagtacttcttgttcactttaatggtgaataataatgccgttgtgccctaggtctgctgcatgatgaatcaatgaagttaattggggtagttaaattcaatttgtatatacatatctatatctgataataaagagagaaaaaatatggctcttttc

SEQ ID NO: 133178 - DNA, 596 bp, Zea Mays
gcgatgcaggccatgcagtaggagttggccattctgatgcaggctattcctattgctcctgcgggtgttgcttagggtgctggtggtgtaggtgtgcccgggggcgcttttcccgcgggtgttgcttcaggtggcggggctgaggtgcctcttcccgtcagtggtctttctctgatgcagtggatgggcttgaagttggacacttttgatggcagtggcactccggtcgaggcggtagattgactaacttacgtggaggataagacgaatgtcttcgagattgtgtatggggatcgtgttcgctttggcacacagctgctgaaggaagaggctcagatttggtggagaggcgtgcaggcagctcactcctattcaccaggagttctgtcctgggatgttttcatcaggcagtttgagaggaggttctacccggtcaccttcctggagaaaatgaagattgatatgcagtcctacaagcaagagaagaagtccgtcacagagtatgaagtgggcttcaacaagatggtccgctttgttcctcatgtggcttgcaatgagttggagaaggcgagccaattccatcagggcctgaaacc

SEQ ID NO: 133179 - DNA, 364 bp, Zea Mays
gtccaagaagtaccaagaactacggaattcagaagaggaagctcttgcgctagttgaaatggagaaagcgaagtgtagagctgcacttgaggcagcagaagctgcgcagaaaattgcagagctcgaggcgcagaagagattgagagcagagtggaaggcaaagagggaggctgaggataggaagaaagcaactgatgcactgaacaaaaatgatatccggtacaggagatactccatcgatgacatagaggctgctactcataagtttgataaggcgctcaagataggagaaggcggatatggaccagtatacaaagcagtactggatcataccaatgttgctatcaaaatcttgagaccagat

SEQ ID NO: 133180 - DNA, 387 bp, Zea Mays
cccaagggcaatcaccgtggccaaccctttcctgcccacctccgctcgatccaagccctcggatagcttccccagaaggccgtgaagcttgcccgagcttgagccgaggaccagccccaccggaacaaagtaatcgcgctcgccggagttcgtgaaccctccggagcacgtggactgggtaaccttctgcgccatttctcgattccttgcgcacatggcctctacatcacccagtgtagcccctcatgcactttaattgaaccccgccgccatggtttagccttcgcaggtggctaagtagttaaataggtgcaggggagtttgtaaattttgtctacgtgttactgaacctcggttgctgcgcaggttcagggttttgggcctgcg

SEQ ID NO: 133181 - DNA, 849 bp, Zea Mays
tataaacgcacagtgtttacgatcctttacacaacaatttatgctccatatgaacacgacgtacacacaacaatttatacaacgtgcggggtgtggttcagggttaatgcttgtataaaagcacagtgtttatgatcctttacacaacaatttatgctccatatgaacacgacgtacacacaacaatttatacaacgtgcagggtgtggttcggggttaatgcttgtataaacgtacaatgtttacgatcctttacacaacaatttatgctccatatgaacacgacgtacacacaacaatttatacaacgtgcggggtgtggttcggggttaatgcttgtataaacacacagtgtttacgatcctttacacaacaatttatgctccatatgaacacgacgtacacaaaacaatttatacaacgtgcggggtgtggttcggggttaatgcttgtataaaagcacaatgtttacgatcctttacacaacaatttatgctccatatggacacgacgtacacacaacaatttatacaacgtgcggggtgtggttcggggttaatgcttgtataaacgtacagtgtttatgatcctttacacaacaatatatgctccatatgaacacaccgtacacacactaaccaaccgatcgtgcacacactacgggtccccacagtcctgcgtcgcttcccgctagccgactgagccaatgtggtcaacgttcgagacccactcgtacgaacagaaccaacccacgcgtcgtggccccaccaaaaccctaataaaatatgtgccttgccgtcgccgccacccgctcctacgatcgccaacgccgagggccccaccgcccca

SEQ ID NO: 133182 - DNA, 507 bp, Zea Mays
gcgacaaagaaatttgatggagaaaaagctatgtattcggtacgccaagatagtggggggataaaaagaagagctattggagggctcattttgcactttttgattgcacgtataaaagacatcaacctacgacccactgcgtttatgcatagggctagctgtgtatacacagcaaaactacgaagccatcgattacagaaaataaacagatcgtctgactcactcgactaaaccgtacgactattgctgtgtcgtcgtcgtaagtatggctgcagccggtggagaaggcgataacggcgagaaatcggggttccggtgcctagacgcggcgaggtacgtggctgccgccgtggtaatcgtgctgattgtcgccgtcgtcgtcaacgccatcaaggtagtcgcccgccccgacaacatctccgtcctagtgctcgggagctccgtgaccactcaccagatgacgactcaggcgggcaaggaccttgtgtccttcgagttcaccctccg

SEQ ID NO: 133183 - DNA, 340 bp, Zea Mays
gggggctattattgagcacaatacccataaacaaccagcatcttccacttcatcatgtaccatcatagtaagttttacatgctgaaaggtctagaagtgaacaatgagccaatacaacataaaaagggggcagacccagtgcaggaggctccaacatgaatggggtttggggaactataaaaaatatggataaaatttcatggtaaagcatcaaacctgtgaattgatgcccttggtaccaaaactgcaaaaacatcaccaccctcctaatgtcacctagacaaacatcaattacatgttttaactgaggaacagtgacattcactccctcagatttaca

SEQ ID NO: 133184 - DNA, 317 bp, Zea Mays
atgcttgtctgaaggattgcgtgctatttaggaaagaatacgcagaggcaaagtactgtcccaagtgtaaatcatctaggttcatggaggtagactctggtgatggacagaagaggcagctcgacatccccttgacaatcttatgacacctttcgttcataccgaggatccagcgtctatacatgaccgaggactccacgaaacagatgacatggcacaaaaatggaaaatgatacaatccagacaagatggtgcacgcttccgatggtgaagcatggaaacactttgatgccattcaccatgagaaagccgaagag

SEQ ID NO: 133185 - DNA, 536 bp, Zea Mays
gaagtgggcaaatttggtgaacttatcaaccactaccattatacaatctgctgaacctgagcgagggagaccttccacaaagtcaagtgaaactgtgtgccaagcagtaagaggaatggggagaggttgaagtttgccaggatacgtcgatctatcaggtttagcttgcagacaaacttgacactgctgtgcaaattcttggatgaattgcttcagtttcggccaggcaaacaaactcttaacccgacgatacgtggctggaatgcctgaatgaccacctatagcagaggtgtgtaacgcggacagtaccctattttttaactgagaatcatcgcccaaccagattctgcccttgtagcgtaagataccctccttcaagataaagtgtggcgctgccgttggatcaagcgacaatttagcgatcaaggacagagcctctggatccttttcatagctagtctgaacgtccttcagccattgaggaactactgctgaaacagcctgacactccgcatcaactctgtgcgacaaagcat

SEQ ID NO: 133186 - DNA, 298 bp, Zea Mays
attgatatagtaagggaagaaatagccgggcgttccgagataagctcggagtaagcatggtccctgggggggcaatcatatcggaaaccttatgacagccgatttgatcaccacccatacccacagggaaccaggatacccgaattcgcaaagttttcgggtgatcaaggaaaaaacacacgcgaacatataggccagttcttagcacaattgggagaagtggccgacatagaggcatttcgcgtacgtttattttcattatcgctaacaggaaccgcgtttgcatggtatgccacct

SEQ ID NO: 133187 - DNA, 1055 bp, Zea Mays
atcaatttaactcggtactggactggacctcaattcctgaaaagtccaggggctctggcgcaagattactctagactcagaaaacttcccactggacggtgggttctaattcgactaaacgcaggggcttttatgcaaagttctagggccgaaggggtatcggtgaacctgagccgctggattagacactgagcgcccagattaaatcattattcctgcgaaccggtacggaattgcgtccattggatccgaatcaaacggtgagggttttattattctagatctatctctgtccgtccgatctagatcgacgaaccagatcgaaacttggtgaaagggtacgcgcggactaatcacagccgttcactactaaaccaacggtcaccaaaccttcttccttctcccagcgactagaacggcggcgctgtccaaaaacccacggcggagatcaacgtcggccactcaactatctgaatcctgctccgatatctcgatccgataggcgcaaaccgaaatagaggtaattgcgaagctaggtttggttatctcaccgagtattgaagaatgaccaaacccggacgcgacgaagggcggcttcttgcggcgacaaaacctccggcgaggaatccgtgttgccacgccgtccgatccctcctagcacgccgacgaaccgcactaccgcgtcaccagacgactcccgacccaatcctcagctttcccccgtggccctgacgccctgatgaacccgcggcggcttcactgtaggcggctgggagtggtacacaagagaagcgcggtggtgtttctgcggcgtagccggacctcctctatccttccccccccccccatataggccgaggtcccaacagaattcgcagtgcggaaccggtaaatccggccggcgggtgcggaggacggagtccgcggcgcgagttagcccgaggtttactgcgtttgaagacgagtctgacagtgggtccccgggcgcagtgaggggccggttcaacgtgggtgcaaaacagcggatgacgcgcgggaccaatttgtcagcagca

SEQ ID NO: 133188 - DNA, 668 bp, Zea Mays
gtcgcctcagcgacctcatcctccatccccatcaccagctccttgctgctgctgtgctccaccgtgggagcaacagggctacaacagctgccgcattagctgctcatcgcccccatataggcgacgacgccagccagtaagtcagtccgaccactctcccgcgggatgctgcctctctgtcccagctctttgcctccgcctcccctcgtcctccatcgctcccctcgtcctccatcgctcctctctggtgccgccgccacaccactctctcaggggggatccaggtccgataaacgtagttctgggcctcggcacaggcaacacgtacttatgtatctctttgatatgacataacagctacagattatttcttctatccatcttttctgacagaatgtgttcatggcaacagaagacaatggttggaatatccccagaaatatgtatccttcatttcaacagatgattttgcggccttctgatatgtctagaaagcaaggatccaactccaaacctccagcttgaagatcgtgaagatagggttgtttggactgaagattgcaagctaattggtactgctttacctttgggactggaaggtgaagttggtccgttgctactcgatgagctaattggtatccttcatgctctgtccagttcacgttcat

SEQ ID NO: 133189 - DNA, 647 bp, Zea Mays
atacccctccccttggctcaccgcccgcggtaaagtgctcaccgtcgaccaccgcctcccggccgtgcgccgcgtggctcaacactttcaccgtgtcgccgtgacctcctctgaactctccgtagctcaccggagttactgccacggcgataaacacgtgttcactacacgcggttcttcctcctctccggccgccacacatcttcatccaaattaagcgccgccgtcgaagccccctataaattgagcccctgggcagctgcgctaagccatcccgaagctatagcacctgctcccaccctcgattatccaccagcacgcgcggatttcccattctccccaaatccgatttccgccaccgcgaaaccaagttcaccgtcgccagcccaattccggtcagtccccgtcccatgctttctcgtttgtgcactctcacatcgttgtgatgcctgccaaacccttaatttgcatggagtagcctctggtcgccgggaacgcgtcggtcttgccgcgctgctcacggccatcgtggccagagctccataattgatgaatagccaaattaagttgggggaaatggttggggtagtgttaatttcgtgtccgttgctcggagaacccggccgttgccctaatcggccggcgta

SEQ ID NO: 133190 - DNA, 551 bp, Zea Mays
aacatctgctgctaaatagttgcccgctggcctgctctacggccaaatgatcctgttgctgagtaagtgactgaagaatggcaatcaacacaggatcaatcactggaggtgtggctggggctacactagagctaccggcctcgtcatcatgtgaacgaggtggcacaggaggtggtggcggaatccctagatcctcatcgtcattggaagaggtttctacaacgaaaccctgatcctcgaactatctaatggcctcatcctcaactctgatatctaatgctagagctagaactagaattgtgtcctgaggagctgggcgatagaacctgaactgaagtcgagaggcctcgagggtggcctagaactgaggaggccggatcagctgcacaaagatgtgacagagatagtgagcgtacaacaactagcagcgagcatagagaccattcaacactgtcctcaatctcatagatcagaaaatgaaccacgtcaaactctgagtttgagatcaaggcaccgagtagccagagttggatatgtgtggtggcctccct

SEQ ID NO: 133191 - DNA, 301 bp, Zea Mays
ggttagagaagccgaaggctagccacaagcgagtacaatgaattcattcaattatgatgccttccctcaatacaatatggaggaggatgatttggatgataaagccttatgtgacaccgcgattgtctgtggggactgggaccttttcgaagagtacctgacctacgaaatatggtcgctgagccatgacaaggtggttggagaggtgatcttccatgacattccaaacctaaccaggtaggtgcgaagcccccatttgatgttgacttgaaagttaggtcgggcaaagacttcatcaatg

SEQ ID NO: 133192 - DNA, 606 bp, Zea Mays
ctgaaaagtcgcgccgccgcgtggactgtggtactgcaaccccagattgaggtataaactcaccaaccaatttgcccttccctaagcatggcgcagcgttgatcgaatttggaatttgggacttgattcatggatgtagtgcgctggccgtagttgccgccatgggtccgtgcttgcgctgccgtggttgtgcctggtacgcctatggcgcaccaaattgacgccaccacagtattcgccatgggctcctcatcgttttgcatctatcggtcgtgaagattgggtcccgatgcactggatccaccatctccggcaagctcaacagcggactgttgggcggtgccattgccggagtacgcgggttggggaagagtgctcgcaaccgttagattcattatcaacgtccacgattagaagccgagcgcatcattttggccgagtacgcgcgaccgttgatccctgatccgaaggtggcgcgttgatctcggtgatgtagaatgcagtccgttgatcgatcatccgatggctgtgatcgcgcgctagtgtatagaaccatggatctaatctgggccataggagtaagatcgagcggcccaaatatgtcga

SEQ ID NO: 133193 - DNA, 499 bp, Zea Mays
cagaaatctaccacaggggcgcctgcctacaacgatgctcggggcatgatagttggtcaggggagatcgtcgtggcgctctagacgcgcgtgcattggtcctagggtcggatgaccaaccggggtgccgttgttgttcgctggaagaactgctccaccaggaatcatcccgctcgtgtgggcagcctcattggcaccttcagctctggtatgattgtctcccgtcgattcacctttctccctaccatgttttgagctgttcgcattggattctagggcctaggatcggaggaattgggtgctcgctggcgtggcatcaccgcacgaccagcgcgccgccgcgcctcggctcgggaggaaggagaagaaggggccgtcggattgatcatcgacgattgagattagacataagggaggagttgcatgaaaccgttgatcagctaacatgctatagagattaaatagttaacgtaccccttcgccacttgaatctggtgcgt

SEQ ID NO: 133194 - DNA, 272 bp, Zea Mays
catactatgtcttgacacttaaattaactgagccatactattttgatatcctgcattctcttttgggttaaccctggcatgtcacgaacatgatctatcctggaaatctgccttgactgctgtattttctgattctctaatcaaaattttgagaaatcagtgtagatggttctagagactataaagctctctatttcttgaacgtaattgaggtcttttgtgcttgcttgatctctggtagcttatccagtcaatctgcatccctcttatgt

SEQ ID NO: 133195 - DNA, 585 bp, Zea Mays
taaagcttcacatttatgagttgatgcgattgttgacaaattaacctcattcgtcattactatgagcaggaccacttgatgattcttcgctttcattttcattccttctatttgtgttataaggcatgcaggagcacttcacattcattaaggcaggagcgctgcccattcattaaggtaggagcgcactaagttcagtacaagcaaacacctcttttggtgatcaccctgctctgtattgccaaacgcccagatcctttgattttctcttttatttgttcttttttggattcctatttgcttgttgcatgttgtgcttatgcttggtaccacattgatggtttgtgctcatttgattttgtagagtttgatgacttgaaagaatctgcattgtgggactagcaaaaatgacctgctcaacttcacaatagatggtaggctccttgcgcagagtgcggcactccaggggttatataatgcagggcacatctctaacatgttaactgaattttttgaataaatcttggattcttggtactcgaattgtgtgatggtaagttcactaatttgaaactatcattgttg

SEQ ID NO: 133196 - DNA, 357 bp, Zea Mays
cgacgggacgggcgattcacggggcgtctgttgcgcgtgcgcgagctgttcgaggaacagaaagaccgtttcaccttcgggtttgaattccgcggcgggttcgggcgaagccttgggtggatctcgcccgggcctttatatacccggaagaggggccggtgctggttctttaccctgccatttgtgcttgccctcttctttggtttccgcaacctaagagagcagacagaaaaaaaggaaaccactcatcccttccgcctccaccacctccgttcggcgatggcagacaaggtgaccgtcattccgccgtgcgacccatggcctttctccaccgtcgctatggaggatctggagacc

SEQ ID NO: 133197 - DNA, 378 bp, Zea Mays
ccgcaagtgccgctgtggacttcgcgcaggatctggaggccttcgatctctgtgacacatttgagcatgggttgactgatccctttcttgtatagctggccctcaataagtgtgaagccccggcttcggtgtttgaggggcttggcctcgttgacatcacctggatggtaatatccttgcaagaacagggttattgggcccaccagtcttcggccatgatgaggttgacaatgcgatggccctcggcgttggtggttatttgcagaccctctgggttgcggatggctggtgtgccaatgacgtggtagaacacgtcggagggcagggctttgcctctggctgctgctttggctaacgcgtcgacttcttcattcctag

SEQ ID NO: 133198 - DNA, 514 bp, Zea Mays
gtgggtcggtcgtggaccagtgatttcattgcgcgttcaccaacggagacacccaggggacgttcgccggtggtcaggggtgggaaccgtgccctcaccgtcccggattacgactggggccgagtggaatcgctcgatggtgtccctcttccaccgcaaatccgcccttcctagcgattggtctgcgctggcgacaagcaacaccggtaagttgtccctacgatttcgtctaaggctactctaggtataggatgactcgggtaggaatttagccctctgtgtcgttgtattgtcgtgcgccggtgagccgcgccgccgcgggagagtctgcgccgtcgcggtcgtgttcaagcagggaagaaacgtagtggccgccggatgataaacgaagggctgcgatttgatctgtgaactgacttagctaaggctcctcgtgaccgtagattggaggatgaacgggcggtcgtgtgcgtgggttgtttttaatcccaacccttggattaggatctggtgg

SEQ ID NO: 133199 - DNA, 339 bp, Zea Mays
caaatttgctacatgtggcgtctttatttctctaccaccaataatatgactaagtatgatgagatcatcgagggcctaaaaatcgccatcacccttgaggtttggcaactgttagtcaaagttagcttttagctggtgattaactaggtttgtatgctttgcccatgtaacaacacatagctggcgacctatgccatcaatgtcaagcagttggagctttgttcaatatcgtgcactatattcatataccgaggaactaaaacatgagagtcaataagctctccataattgcttcaacttatacacctctacctatggggaggccacctagcatgagag

SEQ ID NO: 133200 - DNA, 407 bp, Zea Mays
ctccgataaaaggttctcggggatgatctttccaatgcatggtcaaaatcggatatctacaaccccagaaggctgacaagtgttgataaggcctgcatcgggatgtcactgctcctgttgcgacggctgttcttgtgaatcaagggaacttcttcttcctcctcatcctcatcaagcacacaaccgccaacccgagcatcgtcacaacctctgacatcgtcctcgagggtggtgctcaccgggacatcaccaaggagtaatgttgaagggccagcatcttgctccaagcatgataaccaccggagtcgtttcttcctctttttctcctcgttaggcacagctggatggttcgcttggcgtgactgcttgcgatgagcaccttcaggttttcaaatttcttcgtcttc

SEQ ID NO: 133201 - DNA, 530 bp, Zea Mays
ttcgggtgatttaaattatatctcggtagagcccacattacaagagcaaatagtcagggcccagattgaagacaagggtgttcaggttatcaaagaaatgatcaagcagaaggcagagaaatacaagtgctttcgtcaggacagcaagggaattctatggtttggagattggttggttgttcccaaggaccctgagcaccgaaagaagatattggttgaagctcacctttccaaattctccatgcaccctggtagcaacaaaatgtatcatgatcttagatctttatattggtggaccagaatgaaaagggagattgccaaatacatatcctagtgtgacacctgccagaggatcaaagctagtcatttgaaggcagcaggccctttgcaaccccttcccataccatcttggaaatgggaggacatttgcatggactttatcgtgggattgcccaatacctccaggcaccatgattccatttgggttattgtggacagattgaccaagactgctcatttcttaccagtgc

SEQ ID NO: 133202 - DNA, 651 bp, Zea Mays
atcgccctaagatgagtaattgcaaatgtgcttgtgttggatcgagtaggtgcgagtgcatcgtgccgatttaagtcattaccgacttaaaccgactgctacgttagtagggtatagtggtcaccctgagttacgcatgagcatgtcacaccgccttaagtcgttgccgacttaagtcgattgctccgttagtagggtatagtggtcaccctgagttaagtaagcgtgagcatgtcacacctccttaagtcgttgtcgacttaagtcgattgctccgttagtagggtatagtggtcaccctgagttaagtaagcatgagcacgtcacacctccttaagtcgttgccgacttaagtcgattgctccattagtagggtatagtggtcaccctgagttaagtaagcgtgagcacgtcacacctccttaagtcgttgccgacttaagtcgattgctccgttagtagggtatagtggtcaccctgagttaagtaagcgtgagcatgtcacaccgccttgagtcgttgccgacttaagttgatttcttcgttagttgggtatagtggtcaccctgagttaagtaagcatgcaggttgatagtaaacaatttgagcgcctttgagaatgaagtctttttattgatgatatatttccca

SEQ ID NO: 133203 - DNA, 389 bp, Zea Mays
gttagccccaaatttctagagcgaggggtgtggatttgagtgcttgccctgcactattttttgcacggtgttgtagctgcgcgggcggggtcaggatccacaggacagtagctgagagagcgttgcgcgtacaaccccaaatttctagagcaacgtggtagctctctatgatcatagaccattcccacagactaatacgagtcttttgtacgcacacccatcccaatattgctctggtggttagccccaaatttctagagcgacgtggcagctctctatgatcatataccatccacacagaccaatacaaatgttttgtgcacacacccatcccaatattgctcttggggtaagcatgcttaacccagatgttcttttgaggcaggctt

SEQ ID NO: 133204 - DNA, 1057 bp, Zea Mays
gaagaggtgaattgtttacaggacttgctgctatgcaatatttcagtttttccctgtaagtacctcggtttgcctttgtctcccaagaaactcacaagggaccaggttcaagccattgttgaaagagtggccagccttttgccaggatggaaagctgaacttatgaccagggctggtagagctattcatgtgcagtttgtcatgacggctaagatgatatatgcagctctggcacttgaccttcctgtatgggccatcaaagcaatcgataagctgaggaagggcttcctctggaggggtaggaaagagttccgtggtggtcactgcctcttggcttggcctaaggttacccgtcccaaggagttgggtggtcttgggattagtgagttaaagaacctctgttgggctttgagagctcgctggccatggctgcagaaaacagaccccagtaggccttgggcggacttccccattcatgtttgtaaggtggttaaaaatctgattgctgcagccattattactaagctcggtgatggagccaatacccttttctggaaggacagatggttggaggggagatgtattaaggacatagctcctgcgttgtttgatttggtgcccttgcgtcttgccaacaaacggttggtcaaagatactctccctaatttccattggctctcagatgtgcaaggggcaatctcagtcagagtcattgctgaattcctggaactttgtgaagtgcttgatgcagttgtgctccagcctggaataagggatcgatatttatggaaattcagcgcttcaggtgattatacatctagttctgcttataatgctctcttccttggttcagttcagttcgaaccagcagagcggctatggaaatcttgggctcctgggaagtgcaagttctttatatggcttgtggaacataataggtgctggactgctgacaggctcagaaaaagagggctagaccgaccagagcagtgccccttgtgcgaccaagaggttgaaaccataaatcatttgctggtcaagtgtgtttttgctaagc

SEQ ID NO: 133205 - DNA, 309 bp, Zea Mays
ctcagttcttctctgttctggtgagcagagcctcccacctcttccctttgtgcaattactctaaatcctgtgaattctggtgatttccctttgtgaaatgtgttcccctgtgtgccttaagcatccttgcaggttcctagctccttcgggagggttttcacacctcaaataaccgtttcaccgaaaccctaaatccccgcacactacgtgctcggtgaaatgcccaaaccagccaaacttgctccaattgaacccaaatttttcaggcaccttcacaacacttccagtaacctacttgccaaatttcac

SEQ ID NO: 133206 - DNA, 360 bp, Zea Mays
gggtgctgaggatccgccatatgcgtcgccctgagcatgaattacaatcctcctctggtgctcaaacctgcttttgatattacttctatcagtgtcctgccatctgatagtatctcaatgcctccggccttggagtttcctttgttcctttccaacctttaggtgagtttgtccttaccatgatttatcgtcatcgatagatgattctcttgctaacttttatatttgcagaatgttctagactcagtgtcaactcagctgagggcatgtggtgctcccgttcctgatcaaattttatctttgttgcaatggaaccctcttcttcttcagaaacaaatagatgacctgaaagcttcgaac

SEQ ID NO: 133207 - DNA, 481 bp, Zea Mays
acaagttcgtagtggttttcatcgatgatatcttggtgtactcgaagaacgaagaagaacatgtcgggcatttgcatgtagtgcttcaacgtctgcgatagcaccatctttatgccaaattgtcaaaatgtgatttttggctaaaggagaacaaattcttgggtcacactatctctcaggcaggtatagctgttgatcctgataaggtgcaagaggtgatgaactggaagccaccaacgactgtccgtcagattcggagttttttgggattagctggttattatcgaagattcattctggaattctctcgaattgcgaagcccataactgagctgttgaagaaagaagccaagtttgtttggggtcagaagtgcgaagatgcctttcatgcattgaggcaacatctgaccacagcaccggtgttagcgcaacccgacagcagcaagccatttgatgtgtactgtgatgcctctagcactgg

SEQ ID NO: 133208 - DNA, 605 bp, Zea Mays
gtgcgaatcaagggtcaccgccgtcaaagctatccgtgccatcgttcggagtcctagggaaggcgcgggggtcatatgtgcatcgttaattgctcatcggagcaaaatctccgccgtgactcacttctcaccgtggtctgggcactaggctgcatacctctcggtgagtaccccccaactacttcccaccgtccgtctctagagaattccgcctctggattggagtttatgcgttgtgagtgggggagtgcgtggcaccggccatggcgcgccgccgtgtagttcctgcgcggcgtcgctcggcctggctcagggatggaagaaggtgggtcagtggtcgtcgatctcatgttgggtggctaggattagatcctagtttaccctttcgttccaatcgatgctgtccattggattgcggatgtagagtgtagattagatccttggtgtttaaatcctggccatcggcttttaatcctgcggcttctggcgcatatcgtttcgatcttgggcaaatctgatctcgacccttggcttgcgatcggatggccgagatttattcatacccctttgccctggctttctttctaaagagcccctcggttttg

SEQ ID NO: 133209 - DNA, 469 bp, Zea Mays
gctaaaataaagggtaatatttgtccttatctgattaatatctgatatagggagcatatattcactttgatatattttttggtatcaaattggtcgtgtgtcgttgcaacgggcattgtactagtgtatttttgtaaaatgggtgctcctacacgtacggttctagtgttagaccgatagacagactagaatcatctaatggttcatgatttattagttcagaacaagaggcaacaacaatagttcaattgtacgagtggatcgtaggtgaagcatttccctagaaaaatagtcctactcataacatatgcatgtagtagtgggttttcactaataaaatggaattactattactgctatgatatgattatttctataaaaaaactgaaaactctagtatttgtattactagcatagatcccatgctaacattatgataccgcggaagggagagatcgatgatgacggt

SEQ ID NO: 133210 - DNA, 438 bp, Zea Mays
gttgtttcatgcttgatatcaggttgtgtagtttccttagacaattagtccgaggtagaggttcttgtgttaattaagaccaataatggacccatgttttgaatggtggtgctatatgaggtaccttggatgctttgcttggaagtggtcgaattcgaggacgaattctttttaaggggggtagagtgtgataccccaattttcggaaaagaagttaaatttccatttctcttttctttcatgttctgtggcattggggtttggagtttcaggaggcattcctcagggaaacagtagatattttggcatttttttccgctgtggtcgggagctcaaatgggagagcgagttcgggccattgatctcgatccgatggatgagagccccccctctcctccccaaccctagccgaccccctctccctctccccaattgttg

SEQ ID NO: 133211 - DNA, 599 bp, Zea Mays
tcgaggaggagttcattgcggacgacggcgaaggaggggaacgggcgcccgcgccggagatggacaccgatgtccttgtagcgctcgttaagcccacgaagcacgttgaggaccaaggtgcggtcagtgacgtgctcgttgaggtcagcgaggtcgtcggccatcttcttgaagcgcttgcaatactcggtgatggagaggtctccttgagcaaaggtgcgaaattgggcgtcgaggtggagggcgcgggtctcctggttgccgaggaaatggtcctcgatggcgagccaggcctcacgggcggatgcacggtggtcgatcacggcgtcggcgaggtcagcggagactgtgctgtatagccatgacttgacgacggcgtccatctgagtccagtcagcaagggctgagatggagtcgctgcggacgtggtctagaagcgagtacttggtgacggcgaggaggaattgctcgcgccaacgggggtagttgccagcggtgtcgaggaccgtcggcaccaggctgcgtgcgttctgcacggagactgcctgggcgtggagattgaggacagcagcggcctcgtggagaagcatggcgtgggg

SEQ ID NO: 133212 - DNA, 1413 bp, Zea Mays
cttagcaaatcttcgaggatcttgttgactctttctgtttgaccatctgactgggggtggtaagcggtgctgaaatctagtttggtgcccattgcttgctggaggcccttccaaaattttgaagtgaactacgttcctctatctgacactatcttccgtggaatgccatggagcctgactatctctttaaggtatattcgggcaagggcggctcctccaaaagtggtctttactggaacgaagtgggccaccttggtgagacgatcgattattacccatatggaatcatttcctttctgtgttcggggcagtctggtcacgaaatccatgcctatttcttcccacttccattcaggcactgggaggggttgcagtaggcctgcaggtttctggtgttcggcctttgttcgctgacaagtgtcacgtcgggccacatactgtgctatttccttcttcatccctttccaccagtatctggctttgtggtccaggtacatcttggtggtccctgggtggatggagtaagctgagttgtgggcttcattgagcagggcttcccgtgcctctcccattggtacacacagtcggttcttgaaccagaggactccttgctcatctgtcctaaggtccggaagttgctccttgcgagctctttccataagtctggttgtctctgcgtccaggtgttgatccttgcacatgagatcttctagattgggcttgacttccaggctaccgctgtctcccagacatgcatttagctgagctgattctttcttccaatcttctaaaaagttggtccctttaatcccgaaaggttttcggctgagggcgtctgctaccacgttggccttcccggggtggtagtggattccgaggtcataatccttgatcaattcaagccatcttctttgacggaggttgaggtcaggttgcgtgaagatgtacttcagactcttgtgatcagtgaagatgtggcatttgttcccgatcagataatgcctccatatctttagggcgtgcacgatggctgccaattccaatcgtgggtagggtagttctgctcgtgtggcttgagtaggcgggatgcataggcaataactttctcattttgcatcaagacacaccctaagccttgccttgaagcatcacagaagatgacgaaatcctggtgtatatctggcagtgtcaaaactggcgcagttgtaagcttctccttgatgatctggaaactcccctcacactttggagtccacacaaacttattgtcctttttagtagttcggtcataggttttgctatgctggagaatcccttgataaagcggcggtaataccctgccattcccagaaagcttcgtacttcactgacgttggatggttgtttccattttgaaacggcttctaccttgga

SEQ ID NO: 133213 - DNA, 379 bp, Zea Mays
agcatccagtacgttggccatccttctcctcttgggagttgcggcaaaagccttttgcatcttcggcagatttgccttcgtcggagggctcagaatttttggcttcaacctttggctcttcggccttatcaaccttatcttcgactgccttgactgtatgcgtcttcggcattacggtcggctcttcggcgctctatgtaatcgaagcagtctgtgttgcttcggctgctgaagtggaccctgcgccaaattcaggcaccacagccggttcaatgaaacgcgaccggtgggtcagaaccttcacctttttgctcttcggcacaggctcagctggggtgaccgaagcagcaatcttcctctttttctcttgtcctcgcag

SEQ ID NO: 133214 - DNA, 348 bp, Zea Mays
ggtggccttgcggaataatgggcctggagtctttcgcgaggccttccaaccttctagtggacccgggggatatctgtcccccacacagccggaaagctgctcggattcattgtcagccatcggggaattgaagcaaatccggagaagatcgaggccatcatgagaatggaagcgtcgcgatcgcagaaaaaggtgcagaggcttactggatgcttggcagctctaagcaggttcatatcgaggctaggcgagaaaggaatgcctttttataaattactcaagaaggtggacaagtttcaatggaccacagaggcacaggaagctctagaggcactgaagatgttcttg

SEQ ID NO: 133215 - DNA, 415 bp, Zea Mays
ctgttttttcctcgtcttcttttgccaagctaatctgatgatacccagagtagcaatccaagaaagacaacacagaacatccggcggttgagtccaccacctggtctatcctaggaagtccgaagggatccttcggacagtgtttgttgagatccgtatagtcgacgcacatgcgccaatccactttattctttttgagtacaagaacagggttaggtaaccactcaggatgtaacacctctctaatgaatccggccgtgaccaagcgagccagctcagcacggatggcttctctcttgttgggcgtgaagcgacgcaatttttgtcggatcggcctcgcctaggggtagaccttcagtttgtgctcggccagttctctcgggactctcggcatatccacaggttgccatgcgaa

SEQ ID NO: 133216 - DNA, 454 bp, Zea Mays
gtcttctcagcctgcccttggagaactttgatttattttggtggtgacgtttatccagctctcgcctggtttgaacctattctgactggaatatcctcgatgacaaggacctagccgggtgagtctgaaccggtggaggtccagctggacggcactcaaccagggtcttcaatgcttctatcgattggactttggccgatagagttccagccgacttcagtttgaccaatcttgcttttttgtcgtttagtattcattgcagatattttgcaggtcatgctgcttcagaaaatctcgaaaaatctaggtggtacacccaacgggtggacccaatgggtgtatatccattgaaaagtgtaccctgtcttgtccaaaaatagtaaactgacgtgatgaggaggtgtaatgttgtgtctaagcgattgactctgctttcttctggtgccgtgttaca

SEQ ID NO: 133217 - DNA, 729 bp, Zea Mays
gacagttttcttttaataatagacaaatttatctttacaaaacaatttgtctagtctcttggacttagttgtcctaaagaaatatttccttgttctttatagcacattttaaaggatttcgtccttcctgttccattttgtgcggggtgacaatagcctaggcttcacaaatcacaacacactcatgtgcgcttacctcacaccaccgttctcgctcgcccacccaccaccatggctatgtggacacctcagccctgcccaaacacgcagggaaaaagtacatgtggccgtgccgcaaacagccgagttgtggcacatctctataattgaggacacgtgtatatcaaacggtcaacatttctgattgaggacgcatgtatatcagacgatcacctgatgcttccggttccgtggctcaagtcgcccctactctgaatcagaatcaaggtgggtggtagcagagatgacaccagcaaccttacctggcaggcaacaaaggcgaaggcctaacctggcgatggcctgatgggaggttttgaacaggctctgattctgattcagggaccaagcgaaagagaagtatttgtttcggcaagcattaggtgataccagcgtccttgatcccaatggtgctgcacctcagctgtttgcggcacggccacatgtaattgtttcccacaggcagaacctgtcaatgttgggtttttctagagataaaaacgattttca

SEQ ID NO: 133218 - DNA, 743 bp, Zea Mays
gaaaccgttgcataggactgcgggttcaatctaagaatttacaggggctctttaccatttttgccagggccgaaaggggatcctcgttcctgactgcccgatcacctatcgactgccaggattagatgcctactcgaccgaatcggtattcaataccggttgatggatcgaaatccaacggcccatatttcctaatacactgacaccctctgaccgaccgatcgcgatcctacggttgagatgattcttgcgaaggggtatgcgcggcttctaatctaaaccgtcagcatcccatccgacggcgcaagagtgtcttctaccctggttcacctgggacatggcggtgcctgctccattcacggcggcggatcgtcggagccacatgcccttccttccaaccgcgccctaaaatgacacccgccaagtgctacgcaaagccacggtaaatccgaatggtagggaggggtagttacccaagttgccgcggcgaggtagactaatccgcggcgagggcggatctctggaatcacgcgacgtccgacgagcaatctcgtcgctcccagtggctgccctccgcctatggacgtcacggtacccttccaaaaccctaggagttgctcccggaccgatcaccggggggcctatgccggcgaccacccgatttgatcacgacgacgatcttcgtcacgacggtggctgcgaattgcggtgcagatggtgatggtcgcgagggcaagaaatag

SEQ ID NO: 133219 - DNA, 1637 bp, Zea Mays
agtcacttttacatatatgttactattcgtctcagtcgcaccgcaataaaaacaattatcaatatctgtgtctttataatgaacgatcagacagagctaattagtttcttttgtaatgcataaagggttttctccatcaattggtggtaaactggtaatggtctttcacgctaccaaactgattttccatgaaatagaggtacactctgaatatatctctactactataatgcaagagtttctccgtgcatcacccctcctgtgcacctctccctactcccctccccgctttatgcgggctagcctatggtcccgacgggccttgacaacacatacatttaaatggtaaaaaaataagctaaaattttgcacaagttggggtttgaaccatagttgttggctccaaacacacatccacctaaccaacataacacatatatttttgtgttttatactctatactcaagcagcatgatatagatatttttatgaaaaataggaaaaaaataaaattgtgttgtgtcaagcctagcttgtcgtgtcgcaccgaaggtccaggcatggcaaggtgatcgggccgggccaacacgagcctagggaacaataggctaggtcatgctcgggccgggctaaactatgccacaccataggccacccagcaggcacgacccatttggacatgtatacaccagatgccctcgtgcagacaagcaacgaaccaagcaagacgatggcttgtgcagacatggctaccagcagagctgtcaggtcttcggttgagatacatgggtttttggtaaatttgggattagttaggttcgatttgatattggagttgtttgattgaggagggggagggacgccgacgcgggcacctgtcgtggcgccgccgcccgccacacctgcgaggcctgaagtcgtgaggaagtgaggagccgaggaggaccccgccgccacatcctcacaagtcactcgggactttcggctacttactctactggcgacaaggcgatagagggaggagaaaggggtggcggtagttagggtttggtgccgcttgagccacctcatgggagacggcgcggggattggaattgtggttttctcactcagcatatgaaatgtatttatgaaggttacatggtagacgcgttgagatcacgcacaacggccggttcaaatatagcacaaataattgtaaatattttgaacgtgtttgaacaactatctcatttaaacaaggtctacctatgtgatactactgtatagaaattgtagcaacagacgagcacctaactagtctataagtaatatgattgtagtttatctttctccatacctaacttgttacattttttgcataaatcaagtcaaatcaagacaaaacaactaggagcttggcaatggtgagacaacgcacaaatactaaacaaatagatgaactaggactaataaaaagttgcatcagaatcctattgtgattcatcagaatcctattgtgatttacatgtctactggaagaatatagaatgggtgaggtcattggatccaatgttattaaagcgataaaacgttgaagcgctcatgagaacttgttgactttaaaacgtttaagcaagctttaaaatgtcttttta

SEQ ID NO: 133220 - DNA, 564 bp, Zea Mays
ttttgaggaccttcgacaatacaggcccccaacactaattgactctaaccatgttaccgacacataagtctctccaaagtcaagtccctccacttgagtgaatccttaagcaaccaaccatgcattgttccttatcaccatgccatgttcatcttgcttgttgcgaaatacccactttgtcccaatcacattttccttgggtctcccactaaggatcagacttcattccgtgtgaagttattgagctcctcttgcatggcaattatccaatttgaatctcctcgtgcttcatctaccttgagtggcttaagagaggaaacaattgagtaaaatttacaaaaaagtgtcgatctagaatgagttgttaccactattttggtgctacccaagatgttgtctatggggtgatccctttgcacactttgatgaactcgaggatgtggcactagagattgatgttgaatacacccatcatcctcttgttcttgtggagctccaccatccaccacttcacaaatcattaatgcttggcatctctgtggttggatgggttcttcttgagtt

SEQ ID NO: 133221 - DNA, 459 bp, Zea Mays
tttttaacagcgagaagctcagtagttaggtttctgtctccgtccaatctttcatacctatcaagatctccttttctctcacgctctgccctctcaggttctaaacggaaacaaggatatatatgcaaaagatatattagttctgtatgtttagaggaaggtatatagaaaaggcaatgtgaataactaaatagtatcgtgtgaagacgatctaaggaagaacctgggcacatatcagggcaaagcccaacaattgcagccaaagctgtggaatccatgtcaaccaaagtattgtcatcggtgtcatcatttgttctcaaaggagttcttcccactgatgtggcttgtttggacttatctgcagagcttttaactgttttcacaaaatcattagtattttctactggcctgcttaattcaacatggaaacgagccagacgcttggcttttgcttgttcc

SEQ ID NO: 133222 - DNA, 295 bp, Zea Mays
aaacgagaagcaatattgctgcaaacacctgaacaggatgattgttatagtgagtgtactggatgtattgtttttttactagcgacaactctacctatgcggcgattgtgataacatgctccccgcttagaccatatgaagtattaactagagatgtccaaatggaccactcagtctggctcgacctagatccgttaaagcacagcctgttgaagcatggcacggttaggtccgattaattatttgagccaggtcaggctgtccgacaggcttaactcgccgaacgagcccggca

SEQ ID NO: 133223 - DNA, 1027 bp, Zea Mays
gatttttgttgtatggcaatgtgatgcttcgctttgtcaatcgtcacattccatgcccacgggataaagaaatgtctagttgatcgagtaggagtcctatatgaacgtaatcgcagcccaataattattggaggcgagtagcgttcgtaagtcgatccttgttaaaattgaagaacaatccgataagatatgcacagaagtgcttgaggtccttcagtagcaaatgtagttttatggagttttacgccatgtgtaattgcctccatgttagattccaaaaatgtgccattttaagtgacctgtgtattaacaactttaagttgagcaatgactaggaaaagctgattaatctgttccacccatgttttgagtcgcaatgactaaaatgggttgaatgaacttgagatgtattacaatagctgtgtgtcgtgccggtcatccaaaaatggcgaaaggtggtgtgtgatggtaattgggaaatagtcacgacattagccaactcatgtcaggtaggagttgattgtgaagtgattgttatatatgtcgtgtcacgaattatgataataataggcaagccggcgtgtatgctgtctagcgggctgtgtcgttgctctagctagccgactcgttagatgactttagttaagcttgtagtcactttaaattacttgttatagtctaaatgcgcatggttatgatcgcgggtaaaaatctatagtgctcatgtggtgtctaaattaaaatacgaactagtgggtgaaaagcgcgttgatatacatatatgccgaaattgatgattgtggtgaatacgttgattaaatgtgtatgttagttctagcgcgcgaaataacttggatgaaaattagtgagtctacttgttagtcctcatttgattattttaactctaacaaatggtaaagtgttagaataattcaagtctctagagcaaggcaatttttgaattgtataggagctgaaatttagtaattgctgttttggactgcacgtactgttttctgtgtgctgt

SEQ ID NO: 133224 - DNA, 406 bp, Zea Mays
taaactaaacttgggcaagttcatcgaacctcagctccaggaggtctcggaggatacaactgcagcaacatcggcggtggctcccactgttgcaaaacatttctatggccatgttgctgctgaagtatatattgattttaaatgcaaattgttagtaaatgaaagcactaaatggtcaaaatgctaattgttctaaaatcacatttataataatccaattttattgttgtgtggtgtagtaagcaaagtactcttgctgcttcacgttgtactcattttgcgtcctcaacacctcctacaaattctcgatggcaacatcttgctccatgtagcgatatcaactaatagtaccaccaaaactctgagaagaagattccctctatgaccagacatgtctcaagtcgac

SEQ ID NO: 133225 - DNA, 518 bp, Zea Mays
ctgttcttctttgactcttcaagggcaatctccttttcacctttcaaccatatgtcaaacaaaaagttctttccccattctgaagcttcaacagttgatcttttaacatgctctatagacaccttgaagtcagggtccaaacaggtcttcaagtgcccaaaaccagctctcagaagtaccaaagaagtgctttgggcacctatccatgcacaataatcctcctgagtcgagaggataaccttaaaagcccctacctcaccatgaatccacctcatgacaccgacaatatcaccatcaatgaaatttctgtcccaagaccttgccccaaccaaggaaaaggtcctctatagctcttcatagcaccttgtggctacgcagaagcaatcgaccttcaggcttcgaaagttcccaacaagtgtatttagatgatctttttcggctatagcatcttccttcttacattttcaagttcaaaattaacaatcgcttcagcagatgctcttcttattttgtcagtt

SEQ ID NO: 133226 - DNA, 790 bp, Zea Mays
gagcacgaagagagtcagaaatggatggctctcccgcgtcccttcccctcccttcccgacgcctgcactccccaacacctcatgtttgtgcccactccgggcccgatggtcacctcccgagggatcgccgccgccctccacccttcaccttcccctccactgcaggcgtctccgtcaacttccgcgtccatttcccttccatcaccttctgcttagcgtgcggttccggccatgtcgagagggaggtccaagtttgaacgttgacgaggtgacagccccgctggtggcagctcgcttggtcccgccggtggtgttacatccaggccctccttccgcgatgtggtgcagctgctaggccttaatcgccggacggtttggctatcactctatcaggtctaggactcagacgcggctgtccagtgtcatttcggcaagattccattcgtcgaccgtgggtcagagtctcgcgaaggctgatgttgatgctgatgggtggcggaaggtcgagtctcggtgctcgatgaggctacgtctgaaggcagccaggttccaacgtcaagcgtctggtgatttctctggcaggtgcttcaattgcctttccccgaatcactgggttcgacattgccaattgaagacaagttgcttctcattcctttggcttggacatagggcgtccctctgcccagaagctcctgatcacgctcttgcgattgctcctgctcccagagcgtcggtgtggtctcgtcttgggggttttcctagcagggcttctgtctggtctcatctttat

SEQ ID NO: 133227 - DNA, 291 bp, Zea Mays
gcacgacaaaaacagcgtgtgcagcccaaaacagcaattattaaaattcagcttctatttacttcaaaaattaccgcgttctagagactcaacttattctaacttatagcaaggcacacttaagcatagtcacatgatagatgacgtgacggctacgtagtcatgccatcacttcaccccacaatcccaagtaacaaaataactctaaccgaacttggcatttagccgatcgattcctaacccattttttataccacgactacacgacatgcctaatacgttaaatgaccc

SEQ ID NO: 133228 - DNA, 445 bp, Zea Mays
atactatgtatacttgtcctgaaatctgggcatggcatatatcttacgtaacttatggcaataatcaataccatgtatttctgccacacaacacctagccaagtacaagatacatcaagtgttgccttcgtcaacttggacttatctctctctatgttagaactaatttgattaacttaccattacccaaggctcgactttcagttataacacatcttcaatttaaatcaaggagtttcactaacgaatcatactcgcatataatgaaaatatcatggaacatgtcactaaaacatgtaaatcacaaacattgacataatgtcatcatcctatgataaccattattgtacacatcatcataagcctcccactcacattaaagttatttgtgccaacatttgatgcccattattcttgcgtgtgcctcatgctttgcttatggtag

SEQ ID NO: 133229 - DNA, 685 bp, Zea Mays
cggtggttcacggtgtgcggaaaaccgattttgggagagaaagaaattggagctctctggtggcaaattggaggcaggatcgggtattttggcttcgtgatgacccaatggagctgatggcatgattaatttatagggcccgagggtggtggctcttgaatttggaatggcgcgctggcggccggagagagaggagagcactggcgcaagagatgcgtggctttcaccgtggccagaccaccagcgatgaccggacatgctaaggcaagtcactgcgacgtggtattgcgcttaggcacgtggcacccgatcggtaggcggccaactccggcgtggttatctggaccggtcgtaaggcacgggggtatggcggctagggcgaaacagtgtctcgagcacatcctcaacgcgatatttcttaccccgagcagttatctgcatttcaccgagcacgaatcgcaacgacgacgacgatcacggcgcgggatcaccggggcaatacactgaatctggcgatcttcgtcagttcactgtaccattagaacactattcagagcacctgacagagcggtttacagcgcccagatctccaattttcatgtgataacttgctaatccacctttaacaaagttgtggtcccataattcagctttaatcatgctatagccaccatacttcaattct

SEQ ID NO: 133230 - DNA, 476 bp, Zea Mays
tgcgggttggtttctggaaagcagaggggctcttatgcaaagttctatggccgaaggggtatggaatgctactggccgctcgatccaaaaccgagggcccagattagatcctatccaaagtgaagcggtacgatacttagccgtttgatcggggatcaacggtgcagatttaaaactgtcctgatccaccctgacccgcacgattcatgatcaacggttcaggtgagttttactgaagcggtacacccgatctaatcgtagccctctgttcccgatccaaaggccagggcagcccccccttctccgatggaggagcacggtggcgcgcgcccatccacggcggtccgcccgccggagatcacgaatccggcccatacgaacgccatatcccgattcactcgactcacgcgcaattgacgactcccagaaccccatgctacaactaatttcggctgttgtcgagtgtaggattcggc

SEQ ID NO: 133231 - DNA, 461 bp, Zea Mays
ttctataaatattcccaagactcagagcgctgtagctctggacggcgggttctattttgtaataacctagggtctcttacgcaatgttacagggccgaaggggtatccgcaaacctcggccgttggaccaccagccgagggctcggattagatctggagggcgccgaaacggtacgcttggtggaccatcggatcaacgatcgagggtatggattttatgaagccgaggtctattcctagccgttcatcaagcccgcaatggccacgatcctatgtactggaacggtatcccccgattgatcatggccgtcactcagcagatcaacggtccatggcatgctccctcatttcgaccaccagggcggcggcgctctagtgccgcacggcggagggcccgccggcgatagccgtgccggtgcgcagatgccccaatccccgctcctaagggtcctacgtgaagc

SEQ ID NO: 133232 - DNA, 772 bp, Zea Mays
gctctcactgccgacgactcccttcgccgcaattcgtgtcaccagcgtcgggattcgtgcctgagtggatggatagcatcgcggggtaaaagatcttcaccgtcggtgtgctggacgccactccgatgactcaccgccgtacccccctgctttgcggctggagcagataggctcgccggtgaactgccgcctctcggccttgcgccacgtatccgaacacctctgtcgcgtcgccgtgactctttacagccgtcaaatcgtcgccggtgagctcgccacgactgaggacacgaacccactgcgccatgatccttccctgtttccggccgccagctctgcccggccaaaattgagcgccaccgtcgaagccctctataaattgatggccggggcagctgcgctatgtcatcgtgaagccatagcacccgctcccacccttaatcattcacccgagcccgtgaatttcgaacttcccccaaattcgatccctgcccccgtgaagatcagctcaccgcggccagctcgattcaggttagctcgagtccctctgatgcttgttctagcatccctaagcttccctcaaactcatcgaccctttagattgaactaaatcgccatagatcactgggaacaccttcatctgtccgcaacactctcggtcaaagtggccagagcaaaccaattggccatagatgaaattgtgttgggggaaatggtcggggtaggtccaagttcgtgtccgccgctcggggccgccagtcttggctctctc

SEQ ID NO: 133233 - DNA, 484 bp, Zea Mays
gcaagatctcttcctggcacctagggctagctagtttgtgtaagttccaatggaagatctgccctagcttgtgagatatgtgggcgccaagtcttgtctgtctgcgctgttcaccagcgacaaaactgatgtcaaaccatgtcaaacgaccttggtttgaattcaaattttttagggatgtgccttgggtaatttggccacttttttctatttggtccaagtggttttggcgccagcacaaaggtgaacacctttaatctttgggctagggtggttttggggacttagagaatttttgaatggctctagtgtactccccacttggtgaattgttttggggtttttgttgggcctttttgtaatacctttcttaatacattttatagattcactaatatacttcatctttggtaaaggttcccttttgtgatttggccatttgcccactctttcccctttaatcccatgcttagggtttaatggc

SEQ ID NO: 133234 - DNA, 365 bp, Zea Mays
cggccactattttactccggctaccgtacccgagcagaccacggtggatttggataagttcgccggagatagcctcttcgcggccttgcgccacgtgccttggcacgttaacctcaccgccgtgactcacgttagcccgtccggtggtcgccggagagcttgccacggtaataggccacgaatcaccgcgctggtgactcatttcttctccgaccgccaccgcgcccaacccaaattcactggccatcgctcaagcacgctataaattgagcatgtcgtgagctccgtagggtaatcacccatccaaagcaccaacaattgcctccaattgttcaccagagaccacgaattgctcatttccccaa

SEQ ID NO: 133235 - DNA, 600 bp, Zea Mays
ctcgcttagtgagtttgggcgagttggacacctgactatggctcatcagatctggtctacccttgagtgattccatgagggcaacgatcatgtgaagaccagactatttgagacgtacaggcgagagtacgagaacttcacacagttcgctggagagaccattgattctatgttctccaggttccagtcaattgtgaacaagatgcatgccaacaatgcataactaccctatagtgatcatgagagagcgctgaaactactacatgctctagattggagggtttgagaggtgaaggtctcgacgatcatcgagtcgcccaactatgagactcccaccatggacaagctcttcagcaggctcaagtccatagagattgaccaccagactcgggccaagattgagaaccctaatgcacccaccatggacctggtctctagaggtggttctacttctaactcttcacctgctatgtttgctctatcttctttgttgtctattacagaggagcaggtggagagccttggggatgaggagctagcacttgtggccagccggttcacgtggttccacaacaaccatatgagccggcggcgtggtgg

SEQ ID NO: 133236 - DNA, 443 bp, Zea Mays
tccaaatcccgaagccatcatcaaggtggggatctttatatgggccatgaggagccaaggactggaaccaaatgcaagatgcttttgcaacattcatgagttgtcttatgagatgaaggctactggaaaggagcaatatcacaacaactttggttgttacagtttcatgcctcggtctgaagtgagctacccagttcccacattttggcagaggtgaccgggttcatggatgcaggaatggttttacgtgaaaaatgatccaagtgcaagggaggatgtgagagggattatccaacgccctatatggtctcgcttcggcataaggaggtcagccactgtccttgggaatgaaatacaaacatgccagacggctttcaatacagtgtgtacttacataggcacaagagatttagtgaaggaacacattgcttatagagtgtggc

SEQ ID NO: 133237 - DNA, 718 bp, Zea Mays
ttgagactcggttgcatcttgctagagacttgatccatcagcttgagattgcgcaggaggaagacgcgcagcaaggtggagtactgggcgtcgagggccaggggaggcacgaccaccagggttggggcgcgatgggaaacgacggcggctggtaaaggataaggaagaggatggatcgtgggaataatgccaaggagatatttttccacatttcctctctttttttatttctctttggcttttctatttatgcaaaaatctgtatacatccgtgttctaagatttagatcaaaacgagatgcaaacgaaccgaacaaaatcacatcagccttgatatttgagactgcacttgatccggttgaaatcagataaattttatttgcagaccgaacactcagatcagggcaagaaacaaatagatcgaaccaaattacatcggctttgatattttaagcgacatttggtttagtcaaacatatatgaattttgccgccatccaaacattcgactagataacaattcgattaaggaatcggtgcatggtttttctcggacaacgggcggggtcccaattttacagaaaatcagtcgttttccgatttttcatattcacttagacgcgtaatccgaacgtctcaaactcgccatcatatgagattagtgaattccgaacttcatgaaatctttttaataatctgatatggacagagatgcacga

SEQ ID NO: 133238 - DNA, 1007 bp, Zea Mays
attttcagttttaaatgtctattttcatggtctagtgtgtgtttccatttaccattgtgccattgtcatatattcacatgttggtactttgcccctcgtccgcacaatacaaatgtatgcatgtagaggattattcggaccaaactgggaccaaagaagcatctcctggcctgaatcgacacatcagtgtcttaatatcatcagatggacttattccagattcctcacgacatttaaaatgtctatgcaagaagaaattacactttcgatggtgtgaatgggcattcagaacttctgagaatagactcatcataccatggagattgcattgaagttgtttcaggcggaacaccacattctgcctcggacctccacagaagcctcaatatgtgcaactgccataaacaattcatgcagatttgttttcttctttcagcagggaataaaaggtgaggtgcactgcctactacattatgtacgttctgctctactttatactctaaaagccatcctctgccttatattccgctttgtcgtcaagtacaccgtgctttctcaggcttctttcacctttttttctgaatagcatataagactatatactggagtgtaagcaacaaatgtatgaaaatcaatacatgcttatgcatcagggttctcatttcgttccagcgatcataacaaccgcacagagacagactgcaaactagtttttgactattagataactactactttggacgtgtcctctgggaaagttgcttgaaggcatgcaagtttgcagtgagaacacaaaacccttttgaagggaatatactcaacgtctaacgatctcttggaataaaggcagtataggtactgtcctgcagatcagatgggcatctccaccaggacgtttgcaagcagaaaggtagaagatcacctttgaactttgaaagttctgacatcccgagggggcaaaaggcgccagggaatttctcccgcactgcaaacagcctacacccaga

SEQ ID NO: 133239 - DNA, 618 bp, Zea Mays
tgtggcctggccgaggctccctctctagctataaatggaagtcgcgacccccttcctcgccatgctgatagccgggaacagaagaagagaccgagagggagagaaggctagccgccatgggaaatcggtgttcggtcatcgtgagggcctccaagctttgccgagaagcttagccatggcgcagggaacgtttatgtggcccctgctggcggattgggctgttcgtggctctggaatcgctcaccggagcaaccccaacgccgcagatccgccatgaccgtggatgggtacctgcgcctcgacgttcgccggtaagttgccctcccatgggtttgccgtccaccgctatacgagtagagcccattttacggaagtattgtgcgtaggaattaggttctggcgtggtccagccatggcgccgccgtggatccctggccgctgttctttttggtcgggggcaagaagaagcctggtggactgttgagagtgagatgggcgatccagattcggttaggcatgagagatgaggggagttgagcagccgccgttggatcttatgctagcgcgccagattagaaactgaggatacctcttcgtgcgaattgatctggaccgctg

SEQ ID NO: 133240 - DNA, 726 bp, Zea Mays
ccttttttagacaaacatagtttcaaggaaggtatgcggacaatcacctatggtgttgattgttcaagaatcacatcagtaccactcattctttgttattctgaatgtttgctacatttataactagcttgtgggatttggactggggtgggtgtttgaaacttttcagctttcatatggcaggatttggactcacatcttattaccaattattcataaaaaaacatactgacaaccagtgagactctccattgttgatctgtttgacatatttacaaaacatcctttagacttgcatgcacctatttacagaaatatgagttgttgacaatggaaggagaggatattgactaatacatctcaatgacaatcctcaagaaaaggaggcacattgacgttgaggacactctggaccttatctggtgtcaataaatgcaggttgtttatttagacagaaaatgatagagatgcagcatcatatacatatccggttatgtataccaaggaccatatggagtcttatggcccattttcagttttactacttaattatcgttgcaaattactgcagagttgtccactccacattccaccataggcgatctgctaatatggaggtacgaatctctgatagcattcatttcagtggctgcatcatgtatgagtgttctttccctaggctgtttctttgagcatgatattccaagagcaaatactgaagccaag

SEQ ID NO: 133241 - DNA, 521 bp, Zea Mays
cctggttcccaacctgctgctgcgccgcctcatccacctgcacgcggccacgctgccgccttccccgtcgcccgaggaggtgctgtcgcagctggccgccgcagacggggagcccgcggccgcggagaaggccgtgcggtcgctggcggccaagatcgcgccggagaaagggaagcgggcctcggtcgcgtccgcggtgtccgccgatctcgactccgcggtgccggcgctcctctcgttcgccaagggcggggcgggcgccgacgcgcgcgtggacgcggtgagggtccttgctaccgtggccccggagctggtcccttacctgacgggggatggcacggagaatcgcgacagggtgagtatggcggtggaggccctggccgccgtgctgtccgcggaagggatcgcggaagaggccagggagggcctcgtccttgctcttgtcgccgaggatctgggccgcgtcgtgacgacgctgctcggcgcgggcgcgaacggcgccgcggtccttgaggcgatgc

SEQ ID NO: 133242 - DNA, 495 bp, Zea Mays
gatcttattccttttaatctattctgaggagtaaagtagattaagggagaaggttgaaacaatcataaataagtaataaaacaagagactaaggctttgaattaatataatgcaatgcctttatgattacaaatggttacaagtatacttttgaaggattcaaagaatgtttgagtgttcaaatactttatagcttcaaatgaagagcaattcatgattacagtggtgtgtccccgttttcgagagaggtccccctgtgcatgggcattatttacctatttataggggtagcatgacgcacaacttcttgtagaattacaagtatgaccctaaatcctatacacatgaactacaaggtctattgagggcatcatcatcctttctccatgtaaacgtgatgcacacgtagctcaatccttccttcatttccatgttacctgctttctgtgccacaagatgctttggctaggcactgatgctgaaactttgtccttc

SEQ ID NO: 133243 - DNA, 537 bp, Zea Mays
ggggcccagtgtgcagccgcctttccttctgaagcgtgggtccgcggtgtcaatctcggctcgggctgaccacggacgcgccacactcctgctatgcttctgctgtgtgggacccggttgtaagtcccatccctatccccagtccattcaaccaaatccatagaggccgcaccttccgccgcgttttcctctcgcctcggcctcaacctcaacagattccgccctgatttccggtcggttgcggcatcttcgggcgaccgggctcctttaaatgtcaagcgccgcctgaatctcgaatcactgtgtagacctcgtcaccagagcgctgtgagttcgtaacctagaccggctatacccccttgctcgccgtcgacatactgcaccgctcagagctctggctttgcccttgaaacgtcgctgcgcgggaggaaggtgttgccccgcatcagagttactccacgggcggggcagtccgggaattcctcgccggtgctcgcgcccaatctctctctgcaccccgtcgtggcctgcttctgc

SEQ ID NO: 133244 - DNA, 695 bp, Zea Mays
gctgctttggtgaaaattttaaaactcacattcaaaaggcaaatggggttgttctgttgaatcaggttagcctccccgtactttgggaataatcatgattactccaaagttgagactaaaaagcgccaggtcccctatggacaaatcaccaaacatacacatcatatatgacttgatggtttcccaaaaatgttggtaaaatttcattgggaaaccatctggtcctggtgctttattgtgttccatcccaaaaactgcttccctaacctccttctcagtgaaggggacagttaaaagcacattttcttttgggctaacatgaggcaagtcatctgtccatgattcaatcaaactaaagtcattcatcggtggggggcgaacaaatcattgtaaaatgaggttatatattttgtgagattctcttgaccctcaattttttcttgatcatgatccaacgagaagattcttttttatgttcttaccattagcaatcatatggaagtatctggtgttattgtcactcaaaagaatgtcctttgtcttggctcgttgtaaattctaatttcttcctcccttagaagcttagctaattgatctcgtgactgtgctaagagaatttgctcggcttccgataggtccctaatttcagctactacatccaagtcaattattgttccttgaatggcagctttttt

SEQ ID NO: 133245 - DNA, 431 bp, Zea Mays
cgaccaccttcggcaagcatcgaccttcgtcatgccaccgaagaagacattagcactaggggctgcattgcagccactggacactaatcaggagacactacgtgaagctcggagccagaagaggaaggctactagccctacacctcagaaggaggaactggaccaagaaatcagggatctcgaagctatccatcaacaggtccaaaagaagagagagaagatgcttcggctcgccgatctccagaagaagattgatgaagccgccgaagaaatgcgtcacctcacctaggatgaccaagaccgaaggccccaacacagggagcttcgtcaagagaattcatacaatgatgatgaatggtatggtgattttcaacatggcaattttgcttttgatgatgcttctccgttggtagaagaattgcaggctaccc

SEQ ID NO: 133246 - DNA, 404 bp, Zea Mays
cgaacttgccgaggacttcatcgaagaagcaccgccagtggccgtaattggcctcatcgacgtcaagggtgacagggacatgagcacggatgttcactgtttggagaacggtggcaggtgtgggttgttcaggaacaaaggtgtcggagtcagaggaggaagaatggccgtccatggcgtgtggaagaggggcagaggagtgatcgagaggttgaagaaagtgagagcagcggtgagctgaagtcactggggcctggtgaattggatcaacgcataacttgtattgatctcaagtgatctatttatacacgtacagaaggcggtggccgaacctaacggatcacagctgatcggccatgcacctagagaatcggcagaggccgttacatgaacaagagactcgg

SEQ ID NO: 133247 - DNA, 461 bp, Zea Mays
ttggaggtaggtgccgagagaatcttggggccattcaccgagttggagtaggtcagtccggatgcctttaactgagggcagttattcttaaagtgactggggtccccgcagtgccaacagacatttgctggcggttggttgcttgcaacggagggtgcctgaagggagctctgactctgctgactgtagcgcgacggagtgggtccagatggtttattgaagcttggacccctgggtgggagtccaaagggtcgagctctctggtgatgttcttgctgttgagctcggaggacttggaatttcctcttgaggtgccctttttcttcttcttttgccctttccacttggatagccttgttggagaggtgagagaagctgaggaagtcttggctggtgaggatggtcttaagctcgggtcttagtcctttcagaaaacgggccatctttctggactcggtgct

SEQ ID NO: 133248 - DNA, 551 bp, Zea Mays
gttcatgattttgggcctgcgcacgcaaccgctactgatactactaattttgtggcggcttcgaccgtggttgctggaaatgaatcggatgattctgtgtctaaggtttttgagtctgatgattctgggagttcggttgtgtggacggaagagtcttcggatgaggatttggattattttgcggccttggatgtggctgcgacggaggcttctccgcatgtgacggatgctgaagtttgtcctggtccgagtgttgggcataggcggcgaagggcggtggcgaagcgtagagtgagtgaggtggagggtggtcgtatttgtgtggacagggctggcaagtgggaattgctgtcctcgccggttggggcgagtgtaggtgagggggaattgcgaagtctttttgagggtgaggagctgaggataatgctgtttaactatagggagatgggtatcatcccgaagattgaaccaatgtaaggtgtgatgccctcgctgtacgtatgtaactataatttgtatgatgaggctgtgtgccttcgctgatccggccg

SEQ ID NO: 133249 - DNA, 626 bp, Zea Mays
cgccgcttccaacccaggcgcgaggaggcgacaaatcggtagtacttcgggggtcatcgacatcctcggggtcgtggcccaagagaggatcggggtcctgggacttaacgcagtcggggaggtcgtcttggaggaaggtcgttccgtggatcggacagtgcattccctcaagacttcgctgaatccagtaaagtgggatcattttgggctggagtcgaataagagaagaagcatgcgactgctaatggtacactagctggtgatcaaggaaagaaacacaaagaagagttgtgctgcgaaatttgtgacatggatcacacatcgtaggattgtccgatgttcaatggccctaagccgcatgcactcttgtgtggttttgcagtaggtgattctggttttttccaaattcccacttgcggcgccaatgggatgacacccaaaaaaagacaatgccacaacttttatttctgttaaggaaggaaacattaccccagatttggtgaaagcagaattggcacgtcttattccagtgaattggacttggtctgtccaacatcatgccgatggatttgtggtacctttttcctgcaaggttgagcttcagcatatgattgctatgaaatatg

SEQ ID NO: 133250 - DNA, 388 bp, Zea Mays
tggcaacgtgctgcttcctgttagcctaagtgcacttgtgcattctgtccgacagagatgatgaccattgaatcaattagtaatcttgaagttgcatgcttgaaaagcaaacccattctcatatggtttctcttgcctctagccttctttctcctgcccgtctgctacaaataggatttcccagcgccaagcacctcagcctcttttgtgctgatcattagaaaacttgtacaagtgcagtgttcagggttatgattgtgaggggcagcatcttgaattattttctatggcttcgcacgcccaatattggatccaacgtccgctactgagtttaaaggtccagcaaaatacatgttgtagtgtctataaaatagatttgtcatgtagt

SEQ ID NO: 133251 - DNA, 681 bp, Zea Mays
tgtcgagctattgtagtgttactgaaaactgaattcaagaaaaggaatagtcacagtagaatggggccgaattggaagcaccatatctttgattccattcagttttggttcagggatcctatagtaagtttgaagattgttgattagtgaacaatctttattaatggagattaccctgttcttaacaagaatcaagagaaagagagggtgaaagggggttggttcagaagaacactgaagatcagagcactgaaaatatccgaagaacgatgacaaagatccagggcactgtagaattggatgtgtttgagtgatttggggaagagatcgaccgtggggagataactttgggtcgtgtcatgattccgcgaacctagccagagcctgcccgggatatatcaccggtgttcaccgtggcttggtcattctgccgccgtgtcactcgtgccttgcccctccctcacggtgtctcttccttacatggtaaccatgcactgacaatgcaatttgtggccacggatcgctattcgtacccacggcgaggtactcaccacatcaccagtgagctaggttgaagcacaaattcacggaatcctctccacctctccccaaattaatggtgcacggtgaatcagtagccttttgcgaccggatacccccaacatgaccttctaattccac

SEQ ID NO: 133252 - DNA, 423 bp, Zea Mays
ctcatatatcgcaggttcggaatacccaggccacccagttttagcggcctagtaactttgtcccatgacactaacagctgcccccattcacttctttccttcctttccaaagaaacccctgccgcagcttatcgatagatttgatcacccactttggcacattcatggcaataagaaggtacaccgggatagctgataggacaaactggacaagatcaaatatctcaattgtcagtatttttgtttgtttctattctaatgctcttaagacaagatttgctttgatttttgaacaattgaagcaacagaaagctggtgacatggatgggcacattgttaatgtcttggcaaatgatttaaattacaagtaatattcagcatggttcttactaagattcatgtttggttcccctaactaaagtt

SEQ ID NO: 133253 - DNA, 343 bp, Zea Mays
ccctgtgctaatgactgggtcactactaatctctagccatgttttgcaaagcaacaggtcttcatctggtttgaagttctgttcctttgtcctcctaaatgtcccaggtgtatctgaaggtttgctagggctgttaacttcctggacactgtgttctgcttcggattcaaaatttatagggtcagtctggttgggaacatgggtggaaacctgtggacatgtaatgggtggtaccaactgtggttgaccgaatgatgtttgtgtaggaggacccccaggattcgtcataccaaaaaatgggttccatggattacgaaaggtatatgaagatgggtcatgaggt

SEQ ID NO: 133254 - DNA, 611 bp, Zea Mays
ctttttggccgtatctggcgaatccataatctcgtctccggccaaatctttcaactccttcccaactacatgcatctttgcaatggcttgggcgaggtcactacgaactgtttcaaatcgggttatctgcgaaaccacaaaaattgctgttggaattgaacgagtagtactgcatagtattgaacttagtacaacccttaccgacactgaacgaggtggcgagcagtgattgacgacagaaggggtctgctgctgggggagtgctccttgacgacagaaagaggtacctgatgtggccgcgcaggtgagttccttgccggtggtgtgctctttggcggtggagtgctccaagccgcaaccgtcgcctgtacgcttggcaacgattgaaacagataatcggctgaaggcggaagccacttcgacctcactgtcgacctcgacatcgacgtcgaggaccagccgtttcttccctctcgccggagtcgccatcggaggaagagtgctctcggaggagcgagcaaagaggagacagaggagtgggagcggcggcgtcgtggaaggaaaactcccgtggaagggaggagtgaggaggagttaggttttcaccagcc

SEQ ID NO: 133255 - DNA, 653 bp, Zea Mays
ggttgagaaactattaatacaaggtctcttttgcaaaataggcacgacgaaggggtacggtgcattatgggccgtcagatcgtccatcaagcacccagattagatcattcatcttaaatgctcccacgctctctaccggccgttggatcataaatcgatggcaccgattaggtcttcttctaagtgaaccggtacgaaaccaggtccaaccgatccccatcccacggttcacattagattgagtgaataggtatgctttagcttgatgcccatcgtctggtgatagatcgacgggccaggaccctcatccccccaaaccagtcagacgcggcggtgctgccgagcgctcacggtggatgcacaccggcgttaggtgatccggcagcccgaccttcccacgcggatacagacaagggctaaacgaagcggggagatcaacgatgctagcgaggtagcccttaccggacatggtggtggtagtggccctgcccacgagttcttgcgaccagatggtgaatccttgctccggtgagcaattactaggcagtccaaagcataatccgcccaggtgacaccatggttgtgacctccaaggttcggtgaagcaccgaggatatgacaccgaggcatacaaggaggcgaattgaagtccc

SEQ ID NO: 133256 - DNA, 527 bp, Zea Mays
ggctaatcctaacaagcacagcgtcgacaagaacaccgtgcgcaaccatgagtgacttgggcgagctgagctgaatccgagctggagcgtcccaagggctgaccgtgagccatggcaagcagggacgcgcagaccagcgaaccagggaggaaatcatggacgagatctggagcttggacgtggaaagagactcagttggcgctccacacgacggctggagatggtggcttgggaagaggctggacaggagaagctgcgcgcagggaggcttgataccgagcaacctaggacctgggggcgccatccgagccagaggcaagcagagggggcgcgatgcaagcttccacagagagggcgcgctgggagatggagcttgggcgcgccagcagaggagctttgtgcgcgtccatggaaacaggggggagagggcagggacgttcattgctcgtagtggagaccgagctatgctcctggcgattggtagagggagctggaggaagggagcagctgggctgggcttgctgcac

SEQ ID NO: 133257 - DNA, 324 bp, Zea Mays
gaggcaaccaaagcactaacttcttcgggagagggtcacactctaaggcccaaaccgctatcaccagcaggaggatttgacacgaaactggtaaaggcctgggaaggaggcagattccaggccgagtatgcaacaggagcgccgatgttcgacaccttgcctctgagtatcatctcgagccggctcaccaagtccacagcagggattcttctgttagttacccgggttgaatcagccaagcctcgatacagataggccggatacgctctgtctttcagcagctgaatgttcttgaaaacaaagtcagcgaccacaacttctgca

SEQ ID NO: 133258 - DNA, 751 bp, Zea Mays
cttagaccggcgtgtgtttgatttaaaatatagataaatactaactattcaaaacttcggtagtttaaactcgaatcgagttgtgccataatcttaaggtttaaatttaagattgattggtgtgaaaaaaatacgaatcgtgaagtaaattagttattgcttgacagaatgaatattcctttgagttatcctcaaccaccgcttaacattatctcctatttgccgtatcctgtatttccatatcctctcgtcgttttttttcctctgcccgctggtcgcgcaagctctagctcttgtccgtaccggccaccgccccagcctgtcgatctcatctccctgtgattttttatcagccgtcggggggagaaaaatcttccctgttcttatcccccgtcgccctgctcagattttccagccaccgctgtactgatattttggcgcgcgatgcctattccttgcgcgctcctctctgccgagcggcttcttcacgcgtgtctctctctccctggtgcctgctcgcgacaagctcctgctcccttccgtggtcgcgtgctcagctcttctgcaggccgcgcccagcttctcaccctcggcgctcacagctctctctctcccctagtccctgccatggccgccgttccctgatcggagtttgttctagctcggatctcctccctacggcgcccgagctccatggctgctgcgttcttcagccgacgcgtcctgccgagtccctctccatccccacggc

SEQ ID NO: 133259 - DNA, 291 bp, Zea Mays
ggcctgccttcataaagctttggtaaacaacaacttcattttcttcaggagcaggggcggtgttgtctcctccaaccctcacaatagacatatcacgaaagtaccttcccctcacggcgtcaacctcattttgtttaatggtcgactttccgaagatagtatggcttggccgccagggtcgatcttcggaatcttcatctccactttccacatcaaaatcatcactgtcatcaaaatcttcagataaatccgccattatctccttggtaatcttctctgtatttgtttttg

SEQ ID NO: 133260 - DNA, 307 bp, Zea Mays
ttaacaactttgtctaacaaatcaacaacacagtcgtagtgcttcttttcaggctctaacccgtaacttttgtttgttgcattgagggatctcagttggagctcaatttccccacgtgtcagtaagaagtgagtacataaatgaatgcaacattagtctagctttagccagacactacacggatcctcaaactgaacaaacactactcagtgttatggtctgaagaacctataaattcaacaaccacaggcaggtaagaaaaatgatgtccattttgacatgtgttggcatgcttagaatgtaaggc

SEQ ID NO: 133261 - DNA, 577 bp, Zea Mays
aggctgaccttgaagatgctgatatggatgaggaggaggaagacccagaggagattgagggtgtttctgagttaaccaccgagagtggagcaccactgccaccagtcgactgagcacacccctcggtagggagtgttatgtcagttaataattaggatagattagttagcaacgaatgatgggtatgctcctcggagtagaaaaaatttggtttttggggtgtaactggctaacctagactagagcattccttgcatgttggtaccctatgttgtaaggcaaattttgtgtaaacagggcctaacagcatggtatgtgcaagaaactgaaaactagttgttgttttggaaatcataactggtgcgaatcctcagcataatatattggtattttcggtccttgcaatgcataccaaatgttgttgtgaattttgttgcctatgcacctataaaatcttaattaccttcatcatatgcagcacatgtgatgcctaaaatactaatataaaggttcacagttgcagatggcggatgaaatgcgccagcaccatagaggccatgatgagactagtggaaac

SEQ ID NO: 133262 - DNA, 589 bp, Zea Mays
cagaggtagaaggagctagctaatagttttctatacgctagatagtttagtagttgaaaatgagctatagttgggccataagctagcctttttaatagctagcaacttatgttactcactctatgatccattaactacaaatagttagctagctaattagctaattgcttataacaaatattaggtagctaactcttatagcatctccaacatgagtccctaatggagttgtattttaaaatataggactctaacaccaaaaaactacttcaacataggtcctatttcacaaaaaaaatcatcaaataattataggactcacactacaggaaaatacttaacttcctagagcctaaactgcaggaagtttgccctatactctcggaagttagaaaattgaaagttatgctcttagaaagaaacgatcggaagttagcttagcttccgagaggctctcagaagttctcggaaggtagattaacttttgagaggcctctcaaaagttaatgggttcacgtcgttcccgtgggcgacgctgttagccagctaactttcgaccatttactcttcctctaggaagttagcaggc

SEQ ID NO: 133263 - DNA, 792 bp, Zea Mays
tcagtttcattttgctctgcatgagatgaagggaaattgaattctatatctatattggagatggccttgtcctctagtatgtcttcaaaccccatatttctttcccttagatatccacgttgcatcgttttgaacttcaaattaatcaataatgtggaagtagaataatataatatcatggccttcacttgctaaacttaggcgaacatattggagatgtaacaaatgcaaattcatatctaggtgatcatgcaaacttataatgtgtcttgtgtttagatggaccagacttaaatggaccgggaaccacatcgatcagtattatgcaaatatgccataggttcaacacttgagtctctttaaacttaatgcatcaagttaactaccagctacctgagttttcatggccaattggactttcatttaacaaatacacatttttatgacaaggatattcagagagtatagaaacaaactaacatatgaatcgaagtcaagatcgtattaatcaatagtgaagcagcttgaagtggatcaaccataaaatttttgcatgaccaatggattttgctggatagtatgttcggctccgaaccagtatagacacattgaagtcactccatattttgggctaggtgcagaaaatgaaatttagaatttttggaaatgagagatgcaaaatatttgggttgtgcaaaactttaatccgtagagatggttatgggtacaatgtctggagatgaaaatgtgctagtactcaggtgcctttggttagagaatttgggtttcatc

SEQ ID NO: 133264 - DNA, 356 bp, Zea Mays
tgcgtggaaacgaacagtacgtggaggggcacgaaaagaacacctagtaaattcttaacatctccttgggatctggacggaccgttcgtgattattaggttaaaataaaaggaaaggggatcgatcggatgacgcagcggtcgtcgtcagttgcttgaggggagtggggttgcgtaggatcaaggctaagcttgccgctgccggggcccattggcctcactgctgcttccatccatctccccccgtcggattcctgcgcgcctagctataggaatcaagcaagttgatcgattccttcgtttccttttttttcttctcttctcctgaacaaaatttaccggctctgtcatcgcttg

SEQ ID NO: 133265 - DNA, 1358 bp, Zea Mays
aacacaactccttaacttcatcttcttgtgccaactgctgtaatgtatcatcagacaatatctcagacatatcctcagtagccactacatttagctgcagtgctccacgctttgcacatttggcaatatgaccaggctcaaacttttccccacaagcatagcataacccattaagtctcctgaaatccctaagttgtcgtgctcttgtgagatctgccccgggtccttggtcatctgttttctggccaaccacaggttgtttcacatgcatagacaaccctgaccgttgtccccaaaatttagtgcgctccaacacctcctgttgaagctgagccaagtgaatagcacggtccaccgtagaaggtgtttgaacctgcaccacatcctgcaattcatacttaaggcctcgcacaaaataggtaacaaagaatgtctcatcaaactccgagttatgaacagctaatccatatctggcctgttcaaattctgacacataagaatccagtgtaccagtttgcttcaaagccaacaacctcctcaatgctttaggataagcattagcaccaaacttagcaaccacagctgaagtaaactcctgccaaccaccgaacccatgcctcaacttgtgatactgccaccactaggctgcaacatgttccaaattcatagaagcaacagacacccacatagcattggaaaccctgtaagtggtaaaatattccatgcattgatccaaccatactacaggatcaccccctgaaaacctgggaaaaggtaacttgggtaaaccctgataatgtggatccaaagactgtctgtcttctccctgcatcctccctgaatcacctttgaaagctctaccaccctccacctccttctgatgacgacctctcgtatacagagacccactatgctgcacctccaatgatggtgaaccagaaccccagaagattcacctaattccttccccaactgttccaacctcatctgtgctactacccttccagtctcctccaatttaagacccaaatcatttctctccttcgcagcctgttcagcaactgatgccgctaattccgtccgcatcatgatttgttgctgcaccctctccacatccttcaacctgctactcactccctccaatgtctcaataacacgactccaattctcttgactaacccgctccccatccgccatagcctgtaacaccaaacgagtctgtaccgatggtttggttgcgggcgccgtagtgatgaactggatggacccagcagaagaagaagtcgcccacgaaccgccaaagacgaggaacagcgcgtggaagatgatgaagacgcagccgaccccgaatctgatac

SEQ ID NO: 133266 - DNA, 310 bp, Zea Mays
caatcacaaccacaaccacttcactcccatccacctcaaccaaccttccaacgtcaatctcagccttgctgccacccacatctacaatacccatacccatccatcagatacccttcccacactccccatccccaatcccaggcttttccgaaccccaccataccgcttacccaccacagcaaaaccatccaaatcagcaccaccacaaccttccctttcccacatttgacgacaaagaggatcctgctggatggttgccccggtgtgagagcttcttctacaaccaagggacccggagggggacaaagtc

SEQ ID NO: 133267 - DNA, 672 bp, Zea Mays
cagatctcgatttttcatgtgatgacttgctaatccaccagtaacaaagttgttgcctgatgatccagctacaatcttgctatagcaaccatagccaaactctcactagatcatggttgaattctagtccaaagattgctcaatcacactgtcagtctgaattcagacttaaggcagtctgacagcccatctttgggcctaattatctcaaaacatttcatggcaccaaggcataatccctatagcaaagttgtcctccttttatagctctacaaacttgatgtgttgacctagggaaaaattttcataatttggaagatatagggattcaaagttgaccttattccactgaaattcagacttaactcgatagattttaagtggggctttttgcaaataagtccaaatctcaaggtttaatttgcaaatccacatacatgtgaatcatatgagttaaggtaccctaatttcatggtttttgcacttaggtccaaaatgtgcacacttttacagataaccccctagggtttcagtccagggttttccaggggcctatttagggtttttggcacttctagggttgggatgctacttaagtccattcatcatgatattttatgattattacaactaagttttgaagttttctcttattaggctttgtttactccc

SEQ ID NO: 133268 - DNA, 297 bp, Zea Mays
gttatgattcatcttctcgtcgcatgcgtatttctcgagatgtgagctttaatgaaaaccgacccttcttttacaactcgtccactcattcttcttttaattccacaaagtctacctccttcatgagccttcctcccatttctgatacttcatcagtattgccacctactgtttctacaccggatgttcttattctcatcacaccaccttccacttccacaccatctcagtcttactattccaaaccacctgttactcagacttacattcgtcgtcctcgatctaatcccacggcca

SEQ ID NO: 133269 - DNA, 490 bp, Zea Mays
cttcctgatcgactgcggcgggacggcgcccctcaccgccgacggcaagtcgtacaagacggacgcgcaggccaaccacctgctctccgccaccgacgccatccgcgtcgccgccgacgacaaggccgacgtgccctcgccgctgtacgccaccgcgcgggtgtttaaggaggaggccgtctacagcttcccgctcaccgtcccgggctggcacttcatccgcctctacttcttcccgctcaagggcggcgacgtggacctcgcgtcggtgacctttagcgtcgtcaccgacgacaacgtcctgctccacagcttcaccccgggggacaagcccgtcatgaacgagtacctggtgaacgccaccgagaaccacctggcgctcaagttccagccgctcagtggctccgccgccttcgtcaacgccatcgaggtggtgaacgcgcccgacgagctcgtcaccgactcggcgctggccgtcgcgccgctgggc

SEQ ID NO: 133270 - DNA, 794 bp, Zea Mays
ctattctatactatataacaaccattacagaatggactcaatgcatattcttctttttaagcttcgcaactatactttcatagaagtacttggccaagcacataaaccttaccaaggtacttttctacagatctcaaagatgtagttcaaacaataactttagcaacttttatatttgataaaacatcaccaatagaaagaacagaaaggccaggtaaaggaaaataccttgcactggacagctcacatcacagaaaagaagccaatttataccaactacctgcgaaaggaaactatgaaactctctggatttataaattggtcactataatgttttcactataagatatgtattgttatggtttgagtgttgattggaatgtgggactgctccaaatagaattactctcgcggtcttgcccaagcaaaaaaaccaatataatcgaactacttctcatactattgaattaggaaacgggaatacatatctgaaccaagtaacccaaaattaacgtcagacaactaatgtcctctcagagtctcggagatctactgctatgacccatggttacctctatatgttataataaggggaagaaggcatgacaccatagtttgcatcaagattaagggggcatgcaaaagaagtatagaattaaaaggagatacctatctcgactaaggcaagtgcattcggatttgttggttgttcaattaaagtagaggactcaatccttgaacatgcatataaccgtatcaccatactacttctgtatcacagttcacaaaaatgc

SEQ ID NO: 133271 - DNA, 375 bp, Zea Mays
gtaaaaaccaagtcggtctctttccctgacccattaatctctgttgtttggccctcagctactgtggaagagctggaaggtggaaaaggtgttatttcggctgataatttgaatcctggcgaccagacagcacaacagcctcagcttgctgctcctaccaaggttcgcgttgccgagcatttaagtttctcatatgttgtgttaagccctaaatctgtagagattgcatatcctaatcctgatacaactctgagtactttgcaacttataaatacaactagggtggcagcagccccaaattcaataaatcagctgttggatgtagaacctcaagcacttccacattcaaaccttaattgtgcatctgtcatgccg

SEQ ID NO: 133272 - DNA, 408 bp, Zea Mays
gccaaagtaaagtaaggatcacaaacgtcccgatgtcttgctaaggtatcgaagtgtcaacactctccactaattctcgttcaagcatctacataagagtgtcactcacccttaatctatgaaaggaccatgtggccctctacagacttgttctttgccactcgagcacgatgaactacccataaccatatatacctcaagttgggccaccacaaactcttcgagtgatcaccaaactcttaatcaccaccaaactgtctagatgatgccaataactaagagtaccaagaaaaaactctcacttgatctatccaagtctaatgagaatggtggatgaacacaagattctttcaatatactaatgaggccgctaatcacgtgattatcaactatcataaccctcactag

SEQ ID NO: 133273 - DNA, 732 bp, Zea Mays
ccggcccaaaatcatctggctcctcatgcgcatacacatccagtggttgacaagtgggtcccgcttgtcatcgttctcatccgcacctgaacagaatccgcgcggagctgactctcaaccccccccccccccgagttcgccgctaccgcaactaatcttttccgggtcttactcggtcgcttgctggtgggccccaccagcagggtcttctcccagctctagttccgttcgcaaacgctgaatccgcgcgcgaagatatcgcttcttgaccatgctcggacttcaccgaggtgcataaaaaccgatgctccgcgacccccctccctccatctaccgattcgaggccgtatcaccgtgcgtgtagtgccttaccaccgccgccgcggagaggaagagaggagaaaagaagtacgccgccactgaccggcgggaattgctcgcttgagttacaacgccgccacggatctgccccacgccgcgagcagggtgctcgccgcctctaatcccggtaagaaacccatccaaatggctcgcctcgtcctccacttcgtgtagcaccaatcaatttcagtgttggggacgcttgggcggagaatcgtgcgctcgccggtgaacctccaccgcggcgttggcagcgccgccgcggcctggctggggtttgggggaaagcgattctggccgttagatctgttgccaacgcataggattagatctggatagcgcatcgtccgc

SEQ ID NO: 133274 - DNA, 499 bp, Zea Mays
attagaggcacatatggatcagttacgtgctgtttttggcgctttgcgagctgcacgtttatttgctaacctcgagaagtgcaccttttgcatcaaacgagttttgtttcttggctatgttgtgactccacagggcattgaggtggatgaggccaaggtgtatgccattcagagttggccaacgccttcgacggtgacacaagtgcggagttttcttggacttgtaggcttttatcgctgtgttgtgaaggattttagcaccatcgttgcccctttacatgaactgaccaagaagggcatttcgttccattgggggcagccacaagaggattcctttgcacttttgaaagcgaaacttactcacgcaccgctactccaacttcctgattttggtaagacttttgagcttaaatgtgatgcaagtggagttggtattggtgctgttttgttgcaaggaggtaaacccgttgcttactttagtgagaaactgcatggacct

SEQ ID NO: 133275 - DNA, 1065 bp, Zea Mays
atcatataaatttatcttagtccagtctaaaaaaatttagcccccctcctgccgttaatccattcttggatctgccatttttttatttagagttgttaccatgtacacatgttacatatctgttacataaactaatacgttcatctaatagttcccagacaactcttggaggtatggttgtgctgtaagatatgattggtgtgcttgccaggtttgaagaccgcaatcgtgatacaagagaagttatttgataagaatgataataattgagcgatgacatctcttctaaaagcaatcatgatatttgtaaaagcatttcaattcagatccatatagcttgttgtgaggcagagaattcaggatgacgagaatttatctgagattgattgtagccactggctcctgcttgatgattgagggagagagctagcgactgcttgtcatccgagcgggggcaataaataggtgtggatgtcaactatggcactcgagaccttggcctggtgctacaatctgtggcccacatgttttttcaagcttgctgaactttcgaatgagatttaagataattgtgtcagtttagacttcagctctacacatggtgacatactgtgctgcactatatcttgtttttatttgataaggtattacagtttgttgcttgttaaagtctgctgcttagcctggtttagtttcatgtgtcttatacaccgtgttctgaatgcaattcatgaaagagttcagagatgcgtgttagcacaaccagcacctcctccacacaacacattactcacacacactgtttttaatgaagtgtgcagttgtttgatgaagtataatatttatttcccaaactagacctagccaacaggccataacccatagcagcgagccgtctagacctagccagcatggatagttgaacaaattcttctgcgtggtccttgcctctttgtgtactgttaattaattttgtttcatcaatcgtgcctagacctgctagatagcgttcattatttaactgataggttaatcaatttttatagcctccttcaccaattattt

SEQ ID NO: 133276 - DNA, 598 bp, Zea Mays
ctgcgaagaagacagaaattgatggtagtggttcaggagggattacaaagagtgagatgatgagtgaaatgagaagtatcatccaggagctcatggggttagggttgattggtgctagggcaaatataggtacatctgagttgaagttggaacttgtgcctaatgatgtgaagctagaaggtagtaagaattatctaagctggtctagaagagtgcgtgtactcctaggaggcaagggagtggagcattatttggaggagacatgtgttgagccgattgataagctcgacgcagaatggagaatctggcaggagacaaactctgtgatagttgcatggttactggcatccatgtctcccactgttagcaagagggtggaagccatgcgtactgcatcacaaatctggaacaccttgagtaatatatattctcgaaaggggaatgtgatggtgatgatggaaattcagaacaaggcagatgcagtaaagcagatggggagaccagtggaacaatatgctagtgagctccagcacttatggggagagctgggtcattatgctcctctccaaatggtttgcccacaggatgcacaaatggt

SEQ ID NO: 133277 - DNA, 594 bp, Zea Mays
cttgactcgaagtccgacaaccgcctattttcttgtgctaggtctagcctaaggagaacttccatggccatatgcatgaacaacttagaatcaggaacaagcctggagctccatcccctgagcgcccgagctgtgctttggagtttataatacagtctatggaaaggttcatgatgaagggtcggcttcgaccaagcgtgctccaccacctgcttgaaacccggtaaaaccgtccaaaaattctcaaatttgaaggagcgcggacgcctcagcctagcattattagatagaagcagcgggcagtggtcaaagactgaagatgaaagagcgtgcagcccatagttgtcgaaaaactcctcccactctgggttgcaaaagaacctatcaagcctgaccgaagtggggtgtcgcctctcattgctccaagtgaattttctattttgcagaggaatttcctttaggtcacaattatcgagagcttgtctgaacaagtgcataaggagatgatttattctagaattatttttgtcactagctttgtatgtgcaattgaaatcaccgaggatcagccatggggaagacaaaggaggtctc

SEQ ID NO: 133278 - DNA, 294 bp, Zea Mays
gcgattgaatgggaataggtggggagagcaaccaaggcgagtgagctatttaaaggggccagtaggtgactgttcacttcctacccgctcaccgaacagtcacaggaattcaatagcatttcaagcctccagcaaatgagtcaggcacctgctaccgtttctcataacacgacaccatatggaatcaaagtcaaccgctcagacggagtattacacctccccgtcatatcaagttactattttaggactacacgatggacatcttttactgggcagacacccattgggcacacc

SEQ ID NO: 133279 - DNA, 526 bp, Zea Mays
aagaacttgaaaacacaaatggccagggtgagatccactgctagggtatctcatgaaggagaggagaccgaaaccgccgagacaacaccaatttcagaagtgatgaagcggtcgggtctggttgtgtcagaggaagttgctgccgaaggtgcctccaataccgaagctgaacagattgtagctagaggcaaaagtgacaatgaaagtgaagaagataacaacatcctgaatccaacaaagcctagtcacattgagtttgggaaatctactgtaagagaggatgacatggttatgatgaggaaacttggttatttcggggaggctgagagcaagcttgtccggtttgctagggaggagattattttggaaccaaaagaagacgaagttgtcgttttcaagagcttcttcagagcaggactttggttccccttaaatgacatgataggggaagttttaaagaactttgagatataccttcatcaattgacacccaatgctattgttaggctcagtgtttttatatggg

SEQ ID NO: 133280 - DNA, 453 bp, Zea Mays
cgaatatgtctggaaggaataccgcgaaaatggaatggagaaattctctatggcagtctacctgggagaaagccgaagctacccaaaccaccccccccttcccagtcaccttcatcgggcaccgcttcccagacacttgctaaagtgttgcccgaaaggccctcaaacagctatgccaaaactacagcagagaaattttgaaacccctctttgttatttcccacccaccaataaaattacccccacctggaggaaaagacttcaggctctctcagggagggaccccaccgaggatgaccccaccattgtctacatggccgggtacctccacaccctcgatacccactacgatgatctctcctcccactgcacccacctaaactcccgggtggagaacctagagcagcaagtcaaagagcttaagaaggagaaggcatccctccaagagtactg

SEQ ID NO: 133281 - DNA, 545 bp, Zea Mays
gatcgagaggtcaaacgacgtgaaaacggtgtttgaacgataaaagtgccataggaggtttggaattcgaattgaggcacagaatgacgtggaattgagccgatacttcacgaataggtttatatgggtgaatatgagtgaagtgtgtgcttggtttgaatttaggcgaagaaaatgagattagggcactcggctcggaaacgatcgctcaaaaacggggaatttggtgaaattaaagcctggaatatcggatgggcgtgaaatttggcgactatgttactggaggtattgtgaaggtgcctgaaaaatttgggttcaattggagcatttttggctggtttgggcatttcactgaacacgtggtgtgcggagttttagggtttcggtgaaaagactatgtgaggtgggaaaaccctcccgaaggagctagtaacctgcaagaatgctcaggaagcacaaagggacacttcctaccagtaggaatcacaggaattcacaagaattggaaaaaggcacttaaggggaggaggagtattcactgccca

SEQ ID NO: 133282 - DNA, 940 bp, Zea Mays
ctcagctgtcaagtggatttcacatgcctgcttgttggtcattctttgacccttcactttcttgaagtacacggtaacagctttgacccgtgcatctgacattgaaccatttataacttttctagaagcattgtggaatacacgttttgcatgttcttcgttcgttgtttcgtccaatctaaattgttcctgcaaaatgaagaagcaattaaattcatttatagacgcccacggtaagtaaatttaaaagacataataaactcacccaaaacgatgaccacactgcgtcttggtgagtacggtcgggtccatatggtttgaggccccagtgagcccagtgatacgcccctatatctgccccgttgaattgtaccacccctagatagtgaaaacgagctatagatcccaacactgtgttaactggtgtccggtgacctttgccactccatgccacctccacccagctcctctctcctgcagggtttatgaccctacgttggtccaagggttgtgtctgtggaactctaagggaccgccaaaacctacaaaattgtaaattgtgcactggtaataatatcaatccaacaaaaaatagaactcatcgtcaaaataaaattacctgaagttcgttgcctgtgttgttgtaacaacctcgtcatcggcctctccatcggcctctccatcgtagtcctgcccatagtcatcatcatcatgcatcggtgaatcttggcgtgccagctcgtcctcctgcctaggtgcattgtggtctgccgcctcgtgcgcttgctcaaatgcattgtggtcctgctctagcataggtccacttgagtctatcgcctcacgctctggctcaagtgcattctggcctgccacctcgcgctcttgcccaggtgcactatggcctgccacctcgcgctcttgcccaggtgcactatggctt

SEQ ID NO: 133283 - DNA, 540 bp, Zea Mays
aaccatggttgcaggaagaatagttacaattcaaaatcggcctcgctgcttgggccggtgcctgacttcaatggcctattgcaccacctaccccccctacacaggtggcgtgctgcaagtcggtgggggcagtcgtcaaagatcttgtcgtccctctacctttgtctctaagattgactcgggtcagagctctttactccctccctctcttaaacctgactcaggtgtcttttcgagttcaagtggatgtctagtccacaccgaccccgcgtccacacccttgagaaacactatggtcgccataaaccctcacactcttgcctcattaaggcataccccctcttccaacaagtactcctatccctcgccagccctcactcacaccacaacgccaaaaccccaaacccatcacctcccctgtccactgttttcggtgcctcatgaaagtcgcctagatgggggggtgaataggcaaaacctgaaaattataaactttgaacacaaacttcacacgaggttagcgttagaacgagtaataat

SEQ ID NO: 133284 - DNA, 453 bp, Zea Mays
cccgtctcaaacattgatgtataatgttcggtgatagtccatatccgcacgaagtggtcctgttgttcactgttggcttcctcactgacgttctcctcttcttcttcttcgtcgtcttcatcattgtcaccagagtcatccggatcatctcctcccggagcaggggcttgggatgcaggtgctggcggtgctgaagatgacgatccagccacgaaggctagtgattctgccaacggggtgggcgtcgatagaaactctattctccacatgaaggcgagggagatccacagggatttcctcgactaccactgggtagacaggagcctaccgtggcggagggatgtagttggtgttgactcgggtggtttggattgtacgcaccatctacaagagaaaatgtcaacttagttgaattttaaagaggtaagattaataaaataattttgtaagagc

SEQ ID NO: 133285 - DNA, 398 bp, Zea Mays
cgtaggtccaactctgtgtgcttcaaagccttatcagtggatacttcggctatgtctttcttaggagccacatagatataagtctgtcaatctcggacattgtggtcccaaggttctcatcttcaggtgtggcttcattagcttcagctttgatagtatcttcggcattagcaggcacatcaattttttccaccgaagccgagggcagggtcttttggatggcttgcattacgtccatcattcaccgtttcttctgacccctggcatttcccctggtagccgaagtagtctcctttcctcccaagctttgttcaaatccattcttctttgactgcaataggctagtcagatctgacccacgggacttagcattgcaaacgggaatggtttagtcatta

SEQ ID NO: 133286 - DNA, 325 bp, Zea Mays
ctcacccacactcgccccagccggcgaggacaacaattcccgtttgccagtcccatccacacgaagacgaccagcctccatctcaccacgatgacgcctttcacctcgtgacaactcacccactctccgtttcgccaccgctcttcgccgcctacgcctagcactcgcacccggatgatcctcagcacccatcacacacgaaggagtctccgccgcagccacatccaacgctgcaaaataatccaagtcctcttccgaagacccctccgtccacacaatcgaactcccagaatcatcagactcaaaaaacttagacatagaatca

SEQ ID NO: 133287 - DNA, 361 bp, Zea Mays
cccacaggcggcatgcctgtccgttccactggcagactgcacgcccatactgccgcgtgcactacgcccatcattactcgtacgttaccaaggaagctgccgcctcatgtcaacgttgcgcgtgctgcggacaacatgggcctggagattgcacatacgacacttgcattagttgctctaggtattccatctgttatgttcctaggcccacatgtcggggctcagcaaccttgtatgtgcctcccttgagctataaaagggaaggcacacgacgttacaaggcaagtccactcaagccaacttagaccctcaggaagttctccaagctctcgagcaccagcaatacaacacacagtggagt

SEQ ID NO: 133288 - DNA, 519 bp, Zea Mays
gccttaccggtttgcatgacaccacaaaaaataactgaggacacataaccataagaaaacagactactacaggagaacaacccacatttttcttactttgcagaaactagggcaactcaatacagatatgcaaactgtcgttcttaattcacaaatctgcttgttcttcacaaaaacttcttgttcttacatcacagaaacaacaacatggttgttacgtacatcacatagatagataataagctcactcgcacatacatagaaacaacaacttcttgttctttcaacacaaatactatgttcatccacacaaatgtactcgtggagcaccaagcagatccgacgtcgagaaccacaacgcgaaatccaaactggagcgaaggtgtgtggccagatcgtgaagcggaggatggagggaatggggtgcgtgcgtgcagccagatcgggaggggaggttggaggaacggggtgggggcgtgcagccggatcgccaatagatggagtgcgggcgaggaaaaa

SEQ ID NO: 133289 - DNA, 421 bp, Zea Mays
cgaaagggcactggtgcgaggtcgattgctcgccggggtgttgggcgccgccgtgatggtcggcaacgcctctgctcggccgtcgggtatggacgaaacacagtgaccgtgggatccgttctgcggctgggattggaaggggggtgtccaccgatggatcttggacgaacgggttagattagaagtagtataccccttcggtgggatcatcttgggtcgttcgatcaggatcccgtgacccagattgatctcgtttcattaaaccaggatcgttgatctcggatccaagggctcgtattgcataccgtttcatttaaagcacgatctaatccaggccgccgaatctggatcgggcggctctgtgtgcgggataccccttcgaccgggaagtcttacaaaagagcccctcggcttattccga

SEQ ID NO: 133290 - DNA, 528 bp, Zea Mays
cttgctttagtcggatgaacttttccagtttcatttgtaacactccttccggaacataatgttccctaaatgccagcttgaactcttcccaagtgacttgatgtcccgcaggctggatggtggaaatgtttgcccaccaggtgttggtggggcctcttaactactgagtgacaaataggggtttctgtacctcggtgcatcgaattagcctgaatttttgttccattactcgcacccattcatcagcttccaagggttcctccgccttgataaagagcggtgggcggctttcagagaactctagataggtagtgtctcgtggtccttgagggggaactcttccttcgtgttgttgaaattggttgcctgccatttcacgcagaaagtgtgtgttgtcggcggtggcgttgaccaaggcaacgatagcctcggcctgggtaggaggtaaaggtggcggattgggagtgtcctccccgccgcgggatgtacctgccccatcatgagcacgggtccgagatggcatctgag

SEQ ID NO: 133291 - DNA, 774 bp, Zea Mays
gtttgggcttggtaccacatggaattgagataaaatctagcttcaagttgctctgtcaggtcgactgactgaagaaacaccatggtacagtgctcagatgtagatcagactaccagcaacggatgttcaccgccggcgacctcttcgccgggattcgtgctacgggcgtatgggttttgttcaccaggtaaagatctcctcgcggatatgtatgagctaccgtagactcgtcacttcctgtcctttttcaccggcgacgtggcctcctggccgtcaccggtgttgccgtgtgttactgtggctgcgccacgctccaagctctccaccacgtcatatctagccgcaccagctcaccggtaaccgtcatagcttcttaaccggtgatcaccggaggaagcgccacggtgaaagccacctgtttcacacaccgagcgctttgtttcctctggccgccagcgctgctcgatcggattgatcaccacctctcaagtattctataaattgaggcctcagcttgttccgctaggtaatcgtgcgtccagtgaaaccactcgtagctccgatcgtctcccacagcttcccaatttgggatttcccccaaaacgattgaagaacaccgcgaacccaagctcactgtgggaagctctcctcaggtccgatcctgttatctttagtcttgttctagcatcctcatgtgcccttgatactcaccgaaccaccccattgaattatactgccaccattcgccgtgaacgcattgttctttgaatcgtt

SEQ ID NO: 133292 - DNA, 461 bp, Zea Mays
tattccggccgccacgcggccattgatccttccggtcgtgcctggtcaccggcgccgctcctctctgtccatccacgccatcaccgatttgaccgctttaccgtcgtggcggaacatggcaaactcttagaaaagggcagcgcccgacgtcgttgttagtcgccagctaagtatggtgatggttatcaccatggccatcgcggtggctcactgggcctataaattcaccgcgctctcacccccttcatccaaattaaccaagcacagctcttcgtcccttagttacgaagccaacgaatcactagccaccctgttctgtccaccaccctcaaagatcatcaaaattccctagaatcggtctcttccgccgccgtgaaggacccatccgtggccagcactcctcgggtcagtacataccaaattgcttcctattctagcttgactttggccttctattgctc

SEQ ID NO: 133293 - DNA, 2371 bp, Zea Mays
gataagacatactgtgaataacatagtaaacagtgaattcggattagttgatgatatatataatataaaatgtaaaacttatctctacaactttatatagatgataaaatggacccaaatgcgacccgatcattagtgtgtcacataagtcatcattttgcttgacatcgttctttttggagaattacaatttaattttttaagatctgagtggtttagaatcacgaagaagattatgaactctctagtgatatgaccaatttagataatatagtcatagatatggaatgagtttataaacaataaaagtgtgaacgtgtgtgacagagtccaagtcatgccctgccctgcacactccgtagtgggcctgtgattcaattaaagtccagcccgacatcctcactccaaattgactgctaaatcctccaccagctccaaccactagggctgcaatcatccaccttctgctcgccgcctcctccaacgccgactcatgctcatcggtcgccacctctccggactcgcgtagctccctcctgctcgtcgcgtcgtctacggaatctagcctgcggccattggcggctagcgccccgccgtggtgccccccaccagcaatcagtgttcgcggtctatcccttctcaccccttcggatctgctaagcgtgaggcacagccgcgtctatggtctgcctggctggtccctccctctccgcgcgcgacgcgcctctccaggtccgaccggcgtcgagcgcgccaccgtgggccccctcctctgccttagatgacaacatttggtgagtggtgatgcaactgggcagagtggtgaactggtgtttgacgcgcttgccgacgagttgcaaattgggtgaggatcgacttctcatctgcttgttcttaagtctgaaaattcactcatagttcatttgtgttgtgttttttagcccatagcttttagatgcctggtcattttggagatagtatgggggtcatgtaggtttttggtttagaaaatggtacttaaatgaaagcaaatgagataaaagggtaactttgtatagacaaggaacattgtccagcactagacaggagagatcatgtcacataaaatcctcaagctgaaacaagaacatgttccactggattttattatccttttgttattaaatttggcctggggctttggtaatatctgaatttgccactgcatagagtagtaaacctaaaaaattcagctaaaaagttattaatggcccataccttttctgtgatatgttttggtagttgaaattgattacaatgttaccttttcaaatatatcggcaacatcttttaggactatgacagttatcaaatttgtggagttcctaaacctgtgatacatctcgactgttgtttgatagagatcgtgtgaagataatttttaaaatcagtgttcacataaaggtaccattggattcatatttgaaagcacttccatatgctatgagctttgttgtcatgataaacatcataatatatgatatattggtggtcaaagtgtggtgttggcaggtcaaaccgcactttacatttcgaaaaggatggagtaatattttagccttgattttgacatccttttttgcagagcagtggatcaacattattcaaaattttgctcctgacgtctgatatgtggacagttgccattcaagttttactctatcatcaacaggtgaagattcctgatccagaatacttgtgtaagattattaacatgttacccaataataatcttacataatttggcccaacccaaagatatgttaatttaaactccctagattattttgtggaatcccaacagagtttattcatttgcttgtactctatgaagtggaagttcttgagatgccaaaaaagcagggaagtgcggacacaacagtcaagatgagctacttaaaagtgaggataattcaaaggagcgtggtatcccgagaatatgaacactccagagatgcaatatttgaggttagtatgcagtagtcgagcctattcatagattattgttcctgttttctaatcttggtcttatgactaataatttttaatgagtggttctaactggactgcttccaaatgtagtcattggctaagccaaaatttgaatttcataaagtaactaagatcagtgtttgtccggattgtgacaaggctatagcttttcccttaatcgatcagaccatatcctaggattaactgattaaggatgtgcaacagaacccttttgttgtcgacgatatcaatgagcttcgtttttttttcacatccataactatataccaagcctttttgccacatttgcaagccacaccatcgctatgaacagaaaaac

SEQ ID NO: 133294 - DNA, 297 bp, Zea Mays
aatttggacactacataaacgtcttaataactaaaaattaaccgtctcatataacatgatctgtagtagtgaagggacacggtcgattgtagacgccaacaatcgaaccaaatcaatctaacttccattcctatattttcatgccctaggagtagtagtaacgtagctttcttgatctccatcttcacctctattcggttctacgtcatcttggggtgccttgggtgtagggttgaaaacggacagaaaaaatcccgtcccgactcgtaccgttttctacatttgacccgaccgttt

SEQ ID NO: 133295 - DNA, 415 bp, Zea Mays
tgcatatgtcctcgtatgatgttgtggtaccttgatgacattaaaatgatcatgtgttgcgagaggtaaagagtttagaattaacttatcgtcacatactaatttacattattaaagtgtctctttcatggtaaccaacttacataacataagcatgtgatagttgtgttcgataaccaaatcattgcaatttagaaatgagaatttgtagtaactatccctgattgtgcttgatgattgagttaagtgttcctgtgcttgcatgtatagctttggttgtgaaattaagctagtaataaaaatgacatggataaaaattagtgagtctacttgttagtcctcagttgattattttaactctaacaaatggtaaagtgttagaataattcaagtctctagagcaagacaattcttg

SEQ ID NO: 133296 - DNA, 402 bp, Zea Mays
aaaaaaaattgtacccccaaattcagggcgttacacttggtgatctccccaatgatgaaaggcaagttcactttgagatgcctataaacccgagtgatgcagagataagtgctatgctggacatgttggctgaggattcatctgactccgtccctgctgaaaccatagctattgcaattgtccccgagcctgaaaagaccttgactactcaaaaatctgatggtgctcgcccaaagcgccttcgcccggccagtcatccaactactcctgtcgaggggaagaaaaagaaaaagaggaggcttcggtgagtgtcatgtttgaatcaggatgccgacccttctgctcctgctgctgaggaagtgccagcggaactttttagtggagctgatcccaatgggtgtg

SEQ ID NO: 133297 - DNA, 920 bp, Zea Mays
ccatctccatcgcgtggcgtaggctctggttgcacaccgcaacagacggcgctagaaccggtcgtttctgtttcccccaccaaaatcggactcgttaatccatgcctacatatatgtgtgaatcgagctcctcctttcccccatgaaccgtgtgggcgagcctcgagggagcgtggagggaaaccttggctcctgtacgggagagggccacctgtgcgctatgaatttctcgccgatggagatcctctgccgctgggccactacgctccgtggttgtgctccaccacttacgtccagctctcgttgatcgacctgggaggatgcgcagcgcacacggatgttcgtcgcagcttcgcctgggtggattcattctcggcgcggctggaatttctcaccgatgtgagctctccgccgccaaagcttcacctgccgtgggcgggcctcgtcaccacctcgcactccggtaagaagcctcactatgatccaccatattgcactcctcgaatagcactgatcggattggagtttggggcacggggcgtctgtggaccgagcgccggtggtgggcgccaccattgtggctgatgcgcctgaccggagttttgggggtgggatggtagaaagaagacaacgtttggggccgttgatctgcgattcggcgcacacgattagatccaggcggtgtcttggcttcgggcatcgtggaccgttgatcgttcatcgaggggaggagattgatttcggctgcattgaattcgggccctcggatcttgatccagtggccgttatttcaataccggttcggggttaatacgttctaatcgtggccgtagacttgtgatccaagggatcaaatcgcttgccagttcgttgttttaatctgagcttttcatctcagatccgacagccatagatcacca

SEQ ID NO: 133298 - DNA, 512 bp, Zea Mays
gctcattaccatggatcgtgcagtgcgttgacccgaccacagcagggcggtgttccatggaagcgtttgtactccagcgaggatttcagttgtcattgaagcctcccgtgcccaataaccctcacgcgccaaccccacggccactagcgaagaccattagccatatcccggatgtcgatcggtgtggggcgcgagttatggtggcggcggatccattagcccacatcttccacacgacggtggtagccggggtcccaggttaccgacgcaaggtggatgtgagggaagggttagcggtgcacgagatttatatccccctgaccacgagcccagccgaattttgttgcagcaatttaggagaaaactcagcgaccgttttggtgttctgttcgctacggtggtgctcggattcggagcatgaagaagggtctggcgtcttgtccccacctgacagtggccgtcatgagcacacccgagtggaagagaggctggccaaatgggcccacaagtcg

SEQ ID NO: 133299 - DNA, 293 bp, Zea Mays
ggcaaaggcaaggaggtcatcatcggcgatgtgcgaaaggccgatgaaaatactaaaaactcttgaaggaaattggtggcagaaaggactccttatggaggggaaactctgaaggttaccatcactgcctccaacatagggggcagttgggcacgtagccaggcgtggacccatgttctgcgcatcacggacagtccgacacatagacgcggatggtccgagacattgtcggacagtctggatcatcccagcggaaataggtacgtggaaaactaacacattcaaggcagctg

SEQ ID NO: 133300 - DNA, 405 bp, Zea Mays
ctaaatgatccaataaagcgaggggacaattttcccttgactttaaatctcctcattccacgaaggggtgacaccttgaggtacacataatcttcttcctcaaattccagtggtcttcttctattatcagtgtagctcctttgcctggtctgagctaccctcaaattctcctgaattatacggacttgttcttctgcctcttgaatcagttcaggtccaaagaactgtcttcctctagtctggtccaaaaatagaggagtcttgcatttcctgccatatagagtctcgaacagtgacaccttcagagtggcctggtaactattattatatgagaactcagcataaggtagactcttgtcccaactactaccatgctgaagggcataagcgctcaacatgtcctcc

SEQ ID NO: 133301 - DNA, 777 bp, Zea Mays
cagaaatatcgcgctgtggattaggatcacccccgccggtgataagaacgccaccgcggcgtgaccgatcgtcggtggtcgcggtaaagctcctgggtatcgtggcaaaagttaccgaggtggcgaactcaggttaagcggcaaccccgtgccctcaccggaaaccgccgcgcggaaagcttgccagcgcatccgcagctcgcgtttcttctccaactccggttgatggtcctccgccgcgtggcctagcttttctaccgtgtcgctgtgactcccttgggccatcccatcatcgccggggaggttgccacgccgttggccacgtaactgcgcgtgccaggcttcttccccgtctccggccgccaacacatcgcggtcaaattgagagccaccgcccttgaagcctataaattgagggcggggatagttgcgccatataatcgccaagctatagcacccactctcatctcctctcgctcaccgtagctccgcaattcgggtttgcccccaaattggtttccgccaccgtaaaacaccacttccccgtggactgtccgttctggtaaggcaccatccaaattgcgtgttgttcttatgtccctatatgctagtgatgctctccaaaccctctaattaaactagaaacccaccaatcattgggaacacgaatgaacttccatagctttcgctgtcctcgtggacagtgggttgtagagctccaattccgaaattaagttaggggaaaggcttggaatggatctaattaggtgttaatcg

SEQ ID NO: 133302 - DNA, 355 bp, Zea Mays
gcttcctattcttttgtgtgatagggttggcttcaaccatttggcttcagcacaacgcttacctcaagatggcccgacactttggtctaactcttcttgagaaaacctaccttgagaatgtgacttaaactttcaacacatgaaagttctattcatagcttgaagtcattgctcatagctcgattagtatctcaactcaatgcaagtactctctccttcactttacccatggttgctcggtcgccaacccgtcagtggctcgtcaccttctcttagtccctcgagaatcccttttctttctcactccaggtcatattatatcttgaaacaacatttagaattcatttgaagtccc

SEQ ID NO: 133303 - DNA, 612 bp, Zea Mays
gggcatcccatatgaacacccctaatcgcattatagcacttggggtaactaatgaaaatagttttacatacttcctcaatacttacaaaaacattggttgcactagaaagtgaagcccttcctagaagaagctcttatacacaacaattgtctctccatggctatggtgtctcgttgttaccgccaaggcggctaagcttaaaattgtctatatattcaagcttcacatacaccttctggtccccatcttttaccactgatttcccaatatctaaatgactcgatgcctgggccttagggcactttcatcatcctcggcgtcctcttcgacgccaggctcttcattgttaggttgggttcctcaaaccatgctttccttctttacgactcgtgttgggctgtcaacaacttcttccacatgattctcctcctcaatggtgctacttacattgtctcgctggagagcttcataggaagtgggaataggaaccgaagtggtcatacgaatgtgagccatattagaaaatcttgaaatgaagctaaatgtcaaagtgctcgaatttgaaataagtgaaaaaattggagctggaggaatgtcatgcagaactcgac

SEQ ID NO: 133304 - DNA, 467 bp, Zea Mays
cgatatttaatatgaggaggaaccaaccatgagatcgagattgataagcttttagagacatgagagatccaaagataacaacaacattcattaatccacatggatatgccgtttagagataagttgataaaacaagcgtcatgatcctcggagaagggggtatgagaatgaccagaaatgagagatttaggcagatcaacacctgatacttaggaacgggtaatagcagataaccagataatagggcagaatcatttaaaggatttggagattcggatgataaggccacaacatgattcataaggaaagagatcaccagatccatgcgaaaggagaggtaggcaacaagatcagctggatgatcaacgggaatgctatgaagttttaggggcaaggatttatggaaagaaacatggccttgatagggttcgcgcaactagacaccaacaacatttttttgacacaac

SEQ ID NO: 133305 - DNA, 411 bp, Zea Mays
ctatatcagctgggtgcgccatgacatctggattctagcgtaccccttctttgtgccacctcatgtgtctagttgtattcttggagatgaacaaacgtttcaaccgagttataagaggcatgttacgaatctgcttacgtgctatctcggttttcacggtcaaaccatcgtcgttttcaacctctacgaatctacgctcaccacatactttacacttcttctcactcatggtctccttctagaaaagcatatagttgttgtcatagacatcgattttttcgtagtccataccgagaccagatagcaacttcttggactcatacatgtcctttggcatcttgtgattctccggaagtacatcactgatcaagttcagaagctccttgtagcagttgtttgagaacgcaaact

SEQ ID NO: 133306 - DNA, 461 bp, Zea Mays
ctcagctgcgatagaaaacgtaaataagttcgatgttgcaaaaataaaacataaagctagaagttataaagcaatacctatcctcttttctagttccgcagttctttcagctgccttcatcgcttcttttgcatcatgagaatctttttcactcttttttattatctcgtgtgccatctttcggccgccattctcccagatgtcagtaaagaattttccgcccactaagctggcttcggccgaaggatcttttgtatcttcaatacttaaagtagcttcggcttgagccaaagttttcacatggttgcagcctgatttctccaaaatagccacgattcctcgggcacctgagaaagcgcagatatccccgcgaccactcaaaacttcctcaaaagcttcagcttcgttgctgatccaatcaattgggccttcaggatcacttcttacgaagttgtcttcgt

SEQ ID NO: 133307 - DNA, 554 bp, Zea Mays
acaatcaaacaggttttaaatgcaggtacaggttgtgaagggtacttcgacttgtaacaacgtcggggtcttcaaccgcggcctttggaggggatgaagcgaagggccacgatggtcaagggggttcgatgaagccccacgtacgcgttctgaaggctcaaactctttcctaggcagcaaaatccgagtccacacgaagttaggggcgcgacttcacgaggtcaagggtgcaacgtgcaaggaaagaccgtaccagatcacagtggggcctaggctccgtcccgtcaccatctggcccatctgttagcccttcacagggtagattttatagtatatctagactactgtacttcaccccactataatgaccccgtcgaagggcttattctagaaatgtagcaggtagccagggtataacggtacttaaagattaacctacccatccagttacctataaacactatcatactatacataacacgcataacaagacgatattgttccttacctactattttattatgctcctgagttctcttatctgcgagtaattg

SEQ ID NO: 133308 - DNA, 321 bp, Zea Mays
ctccgcaacagccacctctaaggctgaaggactctcagtcacctccatgggaattgaacaaccttgaccaacctcttgactccgaagaccgccttccaaggtcgacgaggcacgagacgctgctcgggataactctaatcccacatctggaatgtcagagcaaacgtccatcatgccaccatcagttggctcggacaacagatcttcaggaacaacatcctctagagcctgatcaaaatttgctatggataattcttgcagaccaacaagagcatacaaagctggagaaggaatatcgctactccccccactggctctgta

SEQ ID NO: 133309 - DNA, 319 bp, Zea Mays
cacagacgtatcgctacgattatgaacaccagacaagctaagcatgcggcggtagctcggacggatgggcaagaaggactccagatgtgaagggatacagtctgctacaaactaggagacaaacaagtagatagccatcatcatcagtatgagataactctccctggtcgagcatataaggccgggaggtacccctaccatttcatctcaccctagccttcaacactcacaattctcagcttgtaatcctcacctcaataccagagtcgccacagaaagtagggtattacgcaactctacgcggcccgaacctatataa

SEQ ID NO: 133310 - DNA, 522 bp, Zea Mays
ctgatactgctaattttgtggcggcttcgaccgtggttgcggaaaatgattcgggtgattctgtgtctaagttttttgagtctgatgattctgggagttcggtgatgtggacggaagagtcttcggatgatgatttggattattttgcggcattggatgtggctgctcggaggcctctccgcgtgtggtgggtgctgaagttcccggtccaagtgttgggtgtaggcgtcgaagggcggtggtgaagcgtagagtgagtgaggtggagggtggtcgacttcgtgtggacaggactggcaagcgggaattgttgtcctcgccagctggggtgagtgtaggtgagggggaattgtgaagtctttttgagggtgaggagctgaggataatgctgtttaactatagggagatgggtattatcccgaaggttgaaccaatgtaaggtgtgatgccctcgttgtacgtatgcaactataatttgtatgaagaggctatgtgccttcgctgatccggccttgtccgtag

SEQ ID NO: 133311 - DNA, 321 bp, Zea Mays
ccatccagcgctgagccactgatgcaacttggcattggtgctggcgtgctgtagatcagttttccgtatattttgtacactgccccctttgttgttcttaaacgtctcctatagcaaagtttgatggctttagtctttgtttagatggctaatttttctttatgttggaaagctaaaattcgaccagtacatacattcgagtggcatcgacccaaacaccttattagctgtgcctgcttattagtaccactgtatcagctagtagcccgtgcgttgacattagtcggatcaaacttgttagcaaagtaggaaacaactagc

SEQ ID NO: 133312 - DNA, 569 bp, Zea Mays
gttgattggctcggcaagggcgcttcgggcgaacactaacaggcctctgaatatccaaggttttaccagcttccgggagaggcgccaccaccaatgtcccagcaggagcagcatcagaagagtcctcggccagcatatcaagcatagcacttatctctacatcactaggatccaaaggcacgtcaaagtggacatgccgttcatcatcaggaatttctccaagcgaagcaaccaaagcactaacttcttcggcagagggtcgcactctaaggcccaaaccgccatcagcagcaggaggattcgacacaaaatgagtaaaggccttggaaggaggcaggttccagaccgagtatgcgataggggcgccaacatttgataccttgcctctaagtatcatttcaagctggttcaccaagtctacagtaggaattcttctgttggtgacccgggttgagtcagctagacctcggtacagataggccgggtatgccctgtccttcaatggctgaatgttcttgaagacaaaatcagcaaccatagcctctacagtcagacccctctccttcagc

SEQ ID NO: 133313 - DNA, 532 bp, Zea Mays
gtgctccaggggtcaacataagagatgtgttgtgccggaacacgtgccctggggactgaaacaagtgccccgataagtgaatgatgcccacgaaggaactgcttgcattagttgagcaattcagggggaccttgccatcgtagatagagaagtcttggggcatggcgcccactgatgaggatgcctaatggctctcaatgatggcttgccacgatcggacggtgacctgctacacgttgaggttggccacctgttgtgcgatctcggagaggacctctattatggcgtcgagacagttactactagcactccctgctgcgtcggcaacacgacttgttgtgtcagctgagaagaagtgttgacgttcatcacaacaacaactttggaacctgagatctccaatacctggtattgtggtggcggctaatggttcacggagctcaaggaggctgcccaagagccttgcccatggtcgagcaagtgggaagtctttccttcataattcttgcatgattagattgatacatctcct

SEQ ID NO: 133314 - DNA, 550 bp, Zea Mays
caccacctccagaaaaccaggaattttgggccaaaaactctcaaagtgaaaccgtcttttccccatgcagccacctctgacactgagggtcaaaggacaatgatctgaagatgtggtagcattactatgaagagaagcgtccgggaatagatcttcccaacagctagtgcaaaaaacatggtccagcttaacaagagttggagcatccctctggttggaccaagtatacctccttcccttcaaatgaatctcttttagatccaaggaaataataagcctacggaagccccccagcatagccctgttaatattggaattgttcttgtcttcctccctgaaaatcagattgaaatcgcccccaatgatccatggtcccacacaggtatctctgatttctattaattcctgaagaaaggaggatttaagattgtcctagtgaggaccatacactccagtgaaccaccaacaagaaccatttttctcttgcaatttaacgaaaaccgaaaattgttggataactaaagccaacgatgtaaaaactccatcacgc

SEQ ID NO: 133315 - DNA, 523 bp, Zea Mays
gagtctgcttctaagttttctgattttggtgactctgggagttcggttgagtggacggaagagtcgtcggatgaggacttagattactttgcggccttggatgtggcagcggcggaggcttcgccgcgtgctgcggatgctgaagttgtgcctggtccgagtgcttggcgtaggcggcgaagggcggttgcaaagcgtagagtgagtgaggtggatggcggtcggcttcgtgtgggcagggctggcaagcaggaaatgttgtcctcgccggccgttgcgagtgtaggtgagggggagttgcgaagtctttttgagggtgaggagcttaggataatgttatttaactatagggagatgggaatcattctaaaggttgaaccgatgtgaggtgtggtgccctcgctgtaagtatgttactatagtttgtatgatgaggtcgtgtgccttcgcgcatccggctatgtctatagggacgttgtgcgcttggtcgggcgcatttattatgttggtctggttgcgcctg

SEQ ID NO: 133316 - DNA, 311 bp, Zea Mays
gcttatgtccgcacacagtttggcaccaccatcaaaagcgtccagtgcgacaatggccgtgaattcgataattcccttgcccgcacgttctttctttcccacgatgttgcccttcgcatgtcgtgcccttatacatcccagtaaaatggcaaggctgagcgctctctttgtaccattaaaaacatcttgcgctcactcttatttcaggcgagtcttcctccggtctactgggttgaggcactccacactgccacataccttgtcaaccggctccccaccaaaaccctcgcctcctccacccctttcttcca

SEQ ID NO: 133317 - DNA, 906 bp, Zea Mays
cggagaggcaattggtatgagtaaacaacaatatgatcacttggcatgtagggaaaaataaatcaaacatgactgactctttggtgctctggcactatagctgatgttgatgtcaattattgcaatgactctgttcttccgtacgaagatgaagcatgacatgttgaatgccggggtccttatatgggcgcactcttctttggtgggcttatgatcatgttcaatggcttatctgagctgacgctaattgtcttcaagttgtctgtattcttcaagtagagggatctccttttctttccggcatggtcctacactatacccgcatggatcctcaaggtacccatactgttccaggccaatcaagaggttgaacagagctgtgcaggtgagcatgcattcattatattcccacagttgatattctttgcggtactacatctatggcagatttagtcgctgctgccatacaccagatgctcagatcttcttcaggcccttcgtcggtgaggagtatcacaaggtatgccaatcgcttggtcttatcttcctgctctgcgaaaacaagcacgcaaacccaatttactatgttacaccccttggcttccgacgaggtggtcgaggcgtgaggctgacagtggcgctggtagtccgctaggaatcggatttggacgcgctctccctcgtcactaggtaagagacccaggtaaggaacatataagtgtttgttctgatttctggtattagccaatttcccccctccaatctgttactgatttatatgcccttccggggatcaacagatcccacacctattacatgatctgtccttctagaatagaatctgctctctatcttctgaaccggtactgccttcttcaatatcggccaccggccagtccacctctt

SEQ ID NO: 133318 - DNA, 616 bp, Zea Mays
gcggggagtgaggaaataaagggagaaagatctcttgcgtggagggaaagtggtatatgggcgctatttgtttagcttttttcagcttctgaccatcaaaagatgttgtggactgccaaacgtttagtttttcaaacaacttctataaaaattgatttgataaaaaccatccggtgtcctttggggagcagctgcaccaacaactcccctcacaccgtactacctatatatatactagtataatacttgtgcgttgcaacaacacaccaatcatatttgatggtacagtgtaatggttgtatgacacgtaagggcctagtgacaaactagtgtgatgaacgatcctcataaaaataaattttaaattaaaatggacatatagtcattttccaaatattaaattgcagatactgcactttatattagctaaaaggctgagaaagatgagttgaatagaagacatgtccctttttatagctaatccatctgctcttcttcagctagcgaggtggtactaaccgaaagtgtgaagttgcgtgtggtttcgtgccatattgggcttgtgtgttttctcatgatccgtgtagaactgctcgtcctctttcagctatcaaga

SEQ ID NO: 133319 - DNA, 322 bp, Zea Mays
atgacattgtagttccttggacctagggcttgagggcgattgggtgcctactggtgaggtgtcctgatcacccaacatccttgttgctactgacggcctctgctctaattattggaaacaatcttgaagcattgaggctgagctgagggtcctgccataggtgctttccttttcttctctaccctgtgagccacaatacaatctacctgagagatggccaagttgaccagcccgttgttactatccgccctaacagtgttgagatactcacggagcatagtgttgaggcctctctagatcctgtgtccctcttcttatcatt

SEQ ID NO: 133320 - DNA, 457 bp, Zea Mays
ccgtgacttcgccgtgctgcccagcccatctggagttcaggaccatctcttatccctagttctcattccttcaaacagtgcatccactctctccctctccagccgtcccctacccacctggtagcccggccgctcctctcctccagccgccggccaacggccatccctcccctccagcagccgtcggcctctcccttcgctcccctccagcatgttgctaataacccgctgctcagtcatcggaggcagcagacacttcactgtcttatgtttcagttgtctcgcgttcagtttacagtagttcgtcagaatctgttttcagcttcagttttcagcctgttttaggcagtcccgagtctgtccgcctgatgcatgatgtgttcatgcagagcgttagttagactccgcgaatcactagcagatcgtggagtggcacgatttgatgtgcgtgtgtgag

SEQ ID NO: 133321 - DNA, 425 bp, Zea Mays
cgcgggtaggtaatcggcaacaggtacaacacaggcggcgagagtcagcaacattatggcgtgaacagcaggacataacagagaagcaggagagcaatagggcgacataacagagaagcggcgcacgacgacgacgagtgagtagagctgcgtgcaacgaacagagaacaagggatgggaggcgagctgggagaaaggctagcgagtggagggaggagagggtgcggcgtcgcgacgacatgagctacggagaggatcgtggacttgtcgacgcaatgtagacgatgactaggcgaacgacagcgtggatagcgcacgacaacagagctgtagcgaggagaggcgtgctcaaggctgtctatttaaccattctcagttcgttagaaaaaaactgaaacaaacggactatatggctagccacatcg

SEQ ID NO: 133322 - DNA, 282 bp, Zea Mays
tgaccttgcgccacgtgccctggcgtcttaccacgtcgcagtagctcgtgttatgcatatccggtgatcgccgatgagctcgccacggtgatagccactaatcgcttgcgccagtgcatccccttctctctgatcgccaccgcgtaatcgcaaattatcgggccaccgctcaagggccctataaattgagcacaccctcgactccgctatgtaattatgcactcaacacacccactcgtgcctccaattactcaccagagccgccgaatcgctcaattcccc

SEQ ID NO: 133323 - DNA, 597 bp, Zea Mays
ccaacgtgctttgcttacggtggcaaaagtgcagaggccggcgcacacaggggcacgggcgagcgagacgacggagacacatggtcctgcacgctcgcggccctatatgctgcgcacgatctcaagattccggagaaagtcctactaataatgcaggcgcaggctagctcatggatcggcgcctcgttggctctgacgaccttttgggggcgatcgacgcatgcatgtttgcagataatatatgcttttccaaagattttgtgcgcggagagtccggggatgctgtgggtgcagtgcatgcatgccctcctatccttcgcaggttgacgttgatctactgcccctgggccctggccccctgctgcggctgcggcatggcatactagtgcaaatggaatgttacctacgtcgttgtcacaggctcacagcctagctcaaggtcccggtggagtgttccctgcttgtgtttgtcagacattgctcctgttctgcatgacaaagatatgaggccaacatatatatacatgtggataacgctgaaatcatatcattgcaatgcagtgtttgtgttattttatattcttcccgtcaattcgg

SEQ ID NO: 133324 - DNA, 415 bp, Zea Mays
cccaaacactgagggacaaacaattttcaggtgcgcaatgaaacgttaggtgggaacaatagtgtctcgatatgcgtgtcccatcagtctacagaacaggggtattttatagggcaccgaggggctagtagacttaagtacaattatgccctggttacctgctacattctcggaatattctatacaatgggataattacaatatagtaacacccgtcgacctagatacacccgaggggcttacaagtggggccaccacaaccgagtgaagcctgggccccactaaggtggcctaggatcttgccttcgcatgccaagcggccttcgtccatggtggcttaatggcgacgaacacccttccttgtgtgggcctccacgtggtcaccctcaacggggacaaccgagggccttcttgc

SEQ ID NO: 133325 - DNA, 358 bp, Zea Mays
ctgcattacacttacgtgtggcccctagcacatgcccttctctctccccattctcttctccagttcattctcggattgcaggatcgcagtagccgctgccatttcatgcgctcgctggcccttcgcctccgtgtggagcataacactacgccttggccacctgtttcctctcccacttcgttcgacgtttcctctccttcctccactaagcatgctgatcgtttcttctcctttgatggcgactgttttctccctgtcccattaatcctccaccatccgacagtttctccttaccccactctcttgacgtctgctcagctcttgcccagctctataaattggcaccctgaccatgctt

SEQ ID NO: 133326 - DNA, 848 bp, Zea Mays
tatccttgttgtcccaattgcttccagatcgtcggtcaaggaagtcgggaatctttttctccatggtggtggagagtgaggttgccttgcgggtgcaagtcttctgtgtggtgtgtgactatgccgatgtgtttccagcagagcttccaggcattccaccggagcgtgatgcgacttttgaaatcaaactgattccgggtatgcagcctattcataaggcctcgtatcggatggctccaaaggagcaggtggaattggagcggcaattggatgatctgctggctaagggtttcattaggcctagcatgtcaccatgggcttccccagtattgtttgttgagaagaaggataaaagcaagaggttatgtgtggattatcgtgctttgaatcaagtgacaatcaagaataaatatctgctacctcgtattaaggttctctttgagcagttgaggggtgctcaggtgttctctaaaattgatttgaactctggttttcatcagttgaggattcatgaggaggatattgagaagacaactttttacaccaggtatgggcatttcgagttcatagtcatgtcttttggcttaactaatgcccctgctgcttttatggaagcaatgaatagaatgttacatgagttcttggatgactttgtggtcgtgtttctggatgatattctgatttattcaaaaacggaggaagagcatgagcggcatctccgtcttgttctgggtgctcttaggaagaatcaattttatggcaaattgaagaagtgtgctttttggctgcctgaagtggctttcctgggtcatgtgattaatcagcagggcgttgcggttgatcccaag

SEQ ID NO: 133327 - DNA, 309 bp, Zea Mays
gttatggatagaatttcatgaggtgctcaatattccatgaattccccacttcggtgccatccatttgggtgagtcggtaggatccaggccgggtaacttttacaacgatgaatggtccttcccatgggggtgacagtttgtgttgtccctcccccgtcagtactcggcgaaggactagatctcccactgcgaaggatcgatgacgcacggctttgtcgtggtagcccctcagggtttgctggtatctgaccgactgaatgaccacattcagtcgttcttcctctaatatatcaatgtcttccagcctga

SEQ ID NO: 133328 - DNA, 774 bp, Zea Mays
tgaactcaagccaggccacatgagtccacctctagtatctagcagcgtaggatctatgcaagacttcatatcgggcaccaagtaccctgtagacgatattgttgaggacaagccttgatttcttcatattccaatcaatcaatctaggacaaaaacaaaacaagctgctactggtttggtaaaaccaggatttgttaactacaaggataatcttgtcccgccacactatgctatggtccaagttctagagatcacagacagtggttgtgaagattgggagatagactttccagttgaggggatcataactttgcaggaggcaatgaacgagttggtcctttggcatcgacgcgacatcaagttgggtgatgagccgatcttaagccgtctatcgcgtcataagtcaccaacgatgaattcaacgccaatgcaacagaaagatagttcgatcattccataccccatggtgcaggaaaatatagcaccgacctccacaaaaaccgttgaaacaatcatatcacctcttgcgaaggaactcgacgagggggacatagacaaaattgttcctcagaatgtcgacacaaacatcaaaaaggaagcaaaggttgacaccaatgttgaagggccaactacttcaaagaaaattcatcagcgaatcgccactgacaatgtcaagaaaccgtcagaatcagtgacacgctacctgcaaaaattgcagagagttatgacagatcaatcaaaagcggaatcagcatctcgtggagtacgcacacg

SEQ ID NO: 133329 - DNA, 409 bp, Zea Mays
ggggtttcggcgagccgcttcatgcgggccttgtcgcactactacatggtggagctgtacaacttcaaccccaactccatcgcgcaggcggccatcttctccgctgtctgtgagggattcctggggattgagccccattgggacatgtggctccatctctttcatgtggagcccttctccgtccctagcgaggtgaggaaggtgcgccacgccatccacaccggtggctacacgctccagctatgctcggatcgagcgatgttgtacatccctgctacccttacctcgtcgaacaaggggtggcagagccgattgttctacctccataatgatgatgggcgggtgccggagtttacacatcatgtcgtcctcggagcggaggagaagtggaggtgggggctgccgcggg

SEQ ID NO: 133330 - DNA, 534 bp, Zea Mays
aaagccctgccgaatttatcaaggtctggtatccctaaaccgcccaagtccttcggtcttgtgaccgttgcccaattcactaggcagtggcccccgttggcgttttcttctcctttccagaggaaggatcttctgattctgtcgattcccaagtccttcggtcttgtgaccgttgcccaattcactaggcagtggcccccgttggcgttttcttctcctttccagaggaaggatcttctgattctgtcgattctcttacgggcccagactgcgagcgggaacaccgtcagatgataggttggtatggaagagaggaccgatgagacaagagtgagacgaccggctctattcagccacttccctttccagccagggagtctgtgagcaatacgttcgatgagcggctgaacgtgcactttctttagagggcgtgtatggagctgcaggccaaggtagcggcatgggaaagattctatgatcccattgaagggctcaaggacgtggtctagctcgatgtcttcacaacgtattgga

SEQ ID NO: 133331 - DNA, 558 bp, Zea Mays
ctttacggccatcgtcacgacgtctgtaaacagggtacgaatccttcccttgcaaggttgtgtcactgaaaggccgagggtaatgattcttgcacgatgcacaacccttagtgcatgggcagttagggtttagcgacccacacgggccatgcatcatatgcttgataaccatctttcatagttcagggtacttgttgcttgggatctcggctgagatcaaaaggtcatactgctcagggcacgtgagcttgtacttcctttgcatgatgagtagaaaatgggcatgcggcaaaccccgcttctgaaactccacgacatagacgtaggctcggaccttaccaagaatatcctgtttactcagcctatgctttaactcctgtagcttcgcatgaaagacacgcaccggatgatcttgcggtgtctgcccagggagaagctccctccttatctcatcccagttggggttacatgtcatggtaagaaagatgtctggtttaccaaacttccgcaccagagccatagcatccatatatcgacgtctcatgtcacgaggaccgc

SEQ ID NO: 133332 - DNA, 502 bp, Zea Mays
gcggctcatgacgtgcgcgcgcgtctgtcactggatctgggccgaggtgttagtctttagtctaacgcttggggtttgcccctcaaatgcggtcgcttctgcgtgtctctgctcgtagattttgcctgtccatttcagcgatgcttccgttgcgccgtgtaagtcaccagatcagacatgtcctcctggcaatttctaaactgttcgtgctcggtccaattcttcgaacagttgccaaatcggcaataggtaatgatatattgttcatgtttcgctgtcttggagatccagtgaaatggagcctcagattgtttagatccctgtgtttacccatgcctcaacaatttcttgtcataattaccatggaccgacggtgaattagatccttctttgccctgttgcagcgtgcctttgtttatgactactacaccattgaattagttcatcttgtgtaaattcaaaattaccttcctggcattttgatcttagcctcgacttcaag

SEQ ID NO: 133333 - DNA, 346 bp, Zea Mays
ttagccctgaatttcagtgaaataattcccataacctaaaattaccatttctattttcacgggaacgaaaactgaaaagagagaggtcttgggattacaggaggtggtggaaggagggatatctaatcttaggtcatccttacaatatggcgtttgctcgtttgctagttttagaggtgactctagtgcctgattggttgtcttagccaaccaaactgaaactggctcgtactcgtaggcttccatcagccaaccaaactgaaactggctcgtactcgtaggctcccatcagccaggctacaacggtgcaaggaggtcttgtttggttcaagttcctgtgtagcca

SEQ ID NO: 133334 - DNA, 432 bp, Zea Mays
acaacgagtgtgcgcgctcgcatttgcttgcgcgcagtgcgtcgacaggactccgtctacgtttgcatatccttcgtctacccctagacggctctcgtctactcctgtctacccccgtctaaccccgtgtgcgttcgtgtcgttcgccatcgcccgcgcgtcgcgcaataaatcgtcgcgtgttgtccgcgcgcgttgtgcgtgctgttcgcacgtgtcgtcgtgcgttttacgcacactaatgactcatctcacctagaatagctcacgctaattaaatatatatttaagcaacggttattcgaacaacacactaatcgggactaagtagtaattttactcggcatatgattattgtccgttaataggattacgtcgaactaagtattgtaattcacgttcgcttagtgtaaacgtgatatccctcgaccg

SEQ ID NO: 133335 - DNA, 1084 bp, Zea Mays
tttattgcatgtcatctgtcactctgcagagataacttgtaggtgcatgtccagattttgaattgattattaagtgtcaagcattttattttattttatttttatgttttggtgtatcaagggatccaactacgccgaaatgataagaagattctaaatgacataaacgctgacaaagatggtagacttctatttcatattgtcatgaagaatggaaaaaggaagaagcgtgttcagacaagagaagagaaaatattcttgctagcaaatgattgcttaactggagactctctaatccatgatttatccctcaaccaggttgtttgcttgtttaggttcagacaccccttgattttctcccctactatgttgacttaagtggactcccatgcaggaaacaaatgcaatatgctcaaatggatgtaggattgccaaatgcatgcgagaatattttatatacaaaaagaattacagatctgccattaattctatgatccttgcaaatagtctgcatcaaaagctttgggagagcagtccatttctgctgaaacaactgcctgggattggaattgtaacagcaaaggttattaattttgtgattgctatataaacacttttgtatctgcagtcagcataattaattcttgagttgatcacttgccacctcaggctctgaagactgctggagtttatagctttgagaccttggcaactgctgatgcaagaaagatagaattggccacagggcgcaattatccatttgggaatcatatcaaagaatcaatgtcatcattaccacccaaaattgacatacacatagaggaaactggaaacagacttgggaaatcgaccattactgtaacactaactcgtctatcacaggcagttaaatccagtaaacgcaactgtgctgacatggtaccttatttaacttagtttcaggtcattagagcatctccaagaaactagctaaatagtttgttaagctaaattttagatacttaatagtataatagctttccaacagactagctatttaacttactaagctatcaggctctctaaattaactccctcactagcc

SEQ ID NO: 133336 - DNA, 320 bp, Zea Mays
gtttcatcatgctctcgatcgttcctagggtctgattatttataccacttcattacaatacggcccatccggccttacacggcccattccggcccagaaactctcacgttccggcgtttcacccgcggcgtccgtgtagcagctccttcctctagctcgccaccagctttgttgcctgctcccacgttgtcttgggtgtcggtgctgacattcccccgttcttgaaacgccgcttgtccccaagccggcgcgtgtggaaacctgtctttgagtgccttcaagtcttcccaggttgccaaggactcatccatgccggacca

SEQ ID NO: 133337 - DNA, 765 bp, Zea Mays
ctcaacatcattgtggttcaaaaactgaacataatctgatcaatcatttatataatttattgataacataaggaaagagaataaagtgacaactttatatggtcaaacactgatgatcagtgaagttctgaaatgtgatactggcatgcaactttccactgagttatgagatcaaaaaagaaatgccacctgaactccttatatatgaacattagcaatttagcatgtcaacagtacatgtatggtttacccgatttgaaattaaaaaattgaacaacgccactatagtatactaacacgagataagtttcaccacactttgacatgaaccagtattaaatcaaaacctaagcaaaatgttttgcatttattcatgatcaatgttttgacgatatgcatactttgtacttgcaataggaaattagtgtcatgacatgtcaaagcacttaacaatcacctgtataaataaattataaattatgtcaatcagcaagcaccgaagcagtaagcaatcttctgtgcaccaataacaaaccaaccattagcctcttcccaaaactgattaaccatatgtttgatctgggacatagtgggatgggatagttttgaccctgatttttaagatgggatgatccagtttcatgtctgcgttagggagatgggcccatctatacatgtacatgtgggccggcctggcccggcacggcacaggcccacaaaagcacggcccacaaaggcacggcccacaaaagcacatatctaatt

SEQ ID NO: 133338 - DNA, 420 bp, Zea Mays
tctaatcagattagattgaatctaatgagagttacttaaacatggtagttaatactggtgaaatacactaggctctactcctataaacatgatttaacttaattcattttaccttaaattcatggcatagcctagctcggccatgcacaaccacctgacctactaaatgagttgcctaaatccatctatcctaagctaagaccagaagtaaaccttgtttgacctacctcattttttatagccatctacctagctaaaatcttatagacaagatggagacaccaagaccaaagatgatcaacctagtcaatgaaggacgagagtcaaaccgagaccccaagattcaccacccaagatgaagtcttttctcgccataatctttcttaacctaacttatccttacccagatctcattggcct

SEQ ID NO: 133339 - DNA, 358 bp, Zea Mays
atttgttgctagttgctctacactagtgtcattgactactaaatccatagattttccctatggcatgctaaggaactaccctaggggttaagtaggcccttcgataggtgttatggatgctaatgctttagtggtcaatcctacatatataccacccccatcactagtgttccttagatatgcaatgtgaaagattggattgaagctgatgactttgagtctcctgggagtactcttgctccttccaagttggatcatctgaagactcgatagtatcatgacttgacatcagaaccgctggagcctcggtgcactcggctgcataagtcatcatgttatcgatttgcttcaagtcttc

SEQ ID NO: 133340 - DNA, 313 bp, Zea Mays
gcttgttggccatgggtggccgcatcaggaaatagcagaggctgaattttcgctcttagttgtatgtagaaacaggaattttgtctgcgaatcttagacatcgaatcttggtattctttctaggtgggtcatggatatacttctctttgcaatttatgcttccagcttccttgcaaagggaatttgtgttcatgagcacatgcatgtagaacagtcaaatatggcaggcgcagttctcctggattcctgatatatctgaataggggattacaatatgtaaatcatgaaggaaacaatatgatgtttaatgcaa

SEQ ID NO: 133341 - DNA, 440 bp, Zea Mays
gggggagcgatacccttgcgcgggtgctccaacgaggactagggaagagtgccgactcttcgataccttggcaaaaaattggaggagtcttcttacccttgctttacattccacatttaatttgagcatttcagtgtttcaattgcttagcaagtatttgaagtaatgacttagggttgttgtttttctagtatttttatttattgccagtagttgggtgaagttgggctcttgcttagggtttaacatttgtggaatttagaaaagcccaatgcaccccctcttgggcatcgtgatcctctcaattagtatcagagcctagttgctcatagtttagcttaactgctagagtagcgatgtccggcggggatggacctgctcctgttttttatggtgataattttccttattggaaaatttgtatggaagcttatctagag

SEQ ID NO: 133342 - DNA, 462 bp, Zea Mays
ggtgacgccgcccagccctgccctgcccggcacaagctcgggctagacgcaggcgcggtgtctggtgggttgcgtcgggtgggagtggaactcaactgtcggtggatatggaggcagattgatgcagcgcggcgacgattcgcaaggccagctagctcgcgatccgggtatgtttcttcggaacatggcccgagtatatacgatatgatttggaatattacacgatctcgggttctcgactgaaagccatcggccgtcgcctggctctggctgactgagaactgagcttctcgaaaaaaaaaatttgctgttctggacgggactgggacggacgcgggcagatgcatgctcccttgtcatctcatcttcgcctccgatccggccctctactgccacttaccacctcgacgaacccaaaccgtttcgtactggtagtcgccgttcggttcctctagaatcgtg

SEQ ID NO: 133343 - DNA, 1068 bp, Zea Mays
ggggaatttagcttctcgctgggaggtggaccctagggccgcttcgagaaataggttccttatcattattcttgggaatccattctagaagttggggaggtcagtacaatatcgacatctaaatcacacaaaagagtgtttaagctagagttgaataactaggaatataagcaaaagagaaagaatcctaaaatgtatcttgggggtggggtttcgttaggaagtacgactcagtgtagcaaccctttggccagttgcctgtggaaaaaagaatatttggcgcagatgcaccttgatatccggcatgatgctttttaactccatagaccggaaggggtatcacgactgacggccgtcgactagctgctccctgtgtcgtcgccctagctgcctgccggctctgcggtcctcactcctcagcccacaacccgaccgtctgtgtttctgctagtttatgcaaacacagcaacaaacacaggatatggcacgcacaacacaagattaagaatttcacacaagaaagagaaaatcgggattaaggactctgatcgggtaaaatggggatttcgggtaagcctgcagcggccatttccgaggctttagttacttttggttagttttttagggctactcgagctcagttaccatattttctgcagatttgattttaactcctttccattctgatgggacgctctcttggtcctcctttgcgcctataaggcttacggggctatgcgttttgcattcattctcacgttaggtaaaccagtcgttttggcccatgtctttcgtggggaggaataataagtagtaagtgggcttaccaggaccggacagagaagatttgggcttttcttgtcttggtccaggaaggtcccctactacctgctacggtctttgggcggagaggcttcggctactacgaccatgccatgcacttgttgtctctgcaaagtgcaaacaaacgacattttctggcccgctgggcatggtgcgtagtgtagaacatccgtcggcgtttggccccgtgttgatttccctgcaatcagcctgaacatggaaatc

SEQ ID NO: 133344 - DNA, 732 bp, Zea Mays
aaaatcgtgcttgcgaaggggtatcgcggggtattggccgtccgttctcagatctagggtctagattagattggcgcggtcacaaaacggtacacgacgagaaccgttggatgcaaatacgacgggatgattttattattttagatttgtttctatccgtccgatccagatcaacggactagaccgaaagccgcgaacgggtatgcgatcatctaatcttagtcgttcactgacgaaaccaagacacccgtgaccccgccgttatccgctcccgcgaccaccgtacttgggcgacggcgcccgttctaacagcggcgagaccaccggagttgagccatacggtgttacggcgacccattccctaccccgagtagcgctacacaaagggaatgacatcgtgaactatatgggtagctactcacccagaataggcgcggctagagcgggaatcctcggcattagcggccgtggcggaggaggtaactccgatgatgaatccacgcaccaccagctgcccacggacgaaatcgcgcggctgagcatgtcccgagcacggcgccacgcccccgagtccgcgctccgaggcccaacggtgacggaggagcggtctcctcggatgcggctctcccttcctctcaggttggcgatggaggcttggatttagggttatggcgtgaagaagtcaacgaggcaatggctacggggctatggggtggagtcggtctgcctttg

SEQ ID NO: 133345 - DNA, 292 bp, Zea Mays
ttctttggaggcatcggccacgactcgttgggggtgtcagccatgtcgcgactacgggcgctccggtcggtggtggttctggggcggcagacgacggatagtggcggtggagaagctccgatcggtggtggcgaacaatgagtagtggcaggggagaagctacggatggtggcggctctagcggtggctccaagggcagcggacgtagatcggtggctggcagcagggcgtgagagaaagagactatcgggggagagaaaagggaagaaaataactcgatgcagattcttaa

SEQ ID NO: 133346 - DNA, 718 bp, Zea Mays
gtaggatggagccactccatcctagtactaaaggtgtttggttcgaatctagagagaacggagccgctctaatttaggaatattccctcaagatgttgcatctctagtcctaaaaaactaccggacccgagcgctcacgatcgaaggctcctctccccgtccctgtatgctcgtcctcttcctctgcgctcttgctcctagcacttcctcgtgtttgtccctggccatggcgcccgtgacctggcagtcgttctcctgcgccccgctcaccggtggccgagcacgcgacccgtgcgtcgtctacactgctccatttgctgaccttgcttctaatccccatgtgagcaagtgggcaagtccctgtgctcgctcatggccttggccgtttgaagccaaaaagtagcatgtgaagtgtggtcttgaatctgtacccatgctcctaatctgaaattagcttcaacttctacttgttcactctagaagcaaacaaaaaacagagtgactctattctgactaccaaacacaaaatataaccgctccgtctaagtaggttctcgaaccaaacactgcctatgtgttctatagttgtgacttcgggagtattttactgactagtcgggttgatgctcactaactataaaaacgacaaaaccaagaggccaaatcaaaataaatgatgttttttgttgctctcaatatttctcaatttatgatgcac

SEQ ID NO: 133347 - DNA, 489 bp, Zea Mays
tgacaattcggctttcaaaaacaatacccgaatacgtactcgatctaagctaaactcgaaaattcgggttcaatacgggtagccgcgattgcaaacaacatgcaatatatcagttattcatatttctaaacagtatgcagtgtattccggcagcaaataacacaatatttaataatacaacaaaaaaggcatcacaactgaacaataagcattgtgttttaaaggccaaacatctcatagtctcagtctcagactctcatacttagtattagaggttgccacaaaggcacaaacccacaataaagctaccagccgagcacactgcacatgtccatagactgacaatccacttatccaatctctagtctccacacaaaatcacacactagacacacccaaagtcccacaccaacagcacctcagcaacagaagggtgcaaggccggcaagcagcacaagagtcatgcgagcaccaaaaaatcaccacagc

SEQ ID NO: 133348 - DNA, 491 bp, Zea Mays
tgtgtacctaagtaatagtgaaccgactaaacttatcttcctataatccatccgacttatccttagtctgttccgtcattcaaggtcgtcccacacgggaaggtcggatcggcgctgtggataatgtttaaatccaacgaaccgcctgggcctaagtttgcttcttcctcgtgtcggcccattccgccagcaattctcccctagcccatgaagggacggccttgcgagacaataggcccaaaaccttttgcgaggccttcttgccttctagtggacccaggggatatccatcccccacaagcccccaatatttgagttgattttgaaacaatcaacccaactattctaggtctagcttgcaatcgtgtggcttgatttccactctggtgataggcgtgccgaaggtgtacccattgatcgttgttcttgagctttaggtgactcggtaaaaaacagccttcgacggtcctccttcggtgctttggagatca

SEQ ID NO: 133349 - DNA, 437 bp, Zea Mays
ccctacaccgacattctgccttcgcagcatgtctggtggtttctcccttatatgtgtacagggtcataggtcttctagggactcgctggtttctcccttatctatgtacatggtcatagggcttctagggactcacgcctagaattcacaggtcgtgagtggaggaaagaccgatacatgtggcatctcgccgactggcatagttaatgaggcgaacacaaagctcacggtgcggtgagtctaatggatacacaaaatctacttgactgtgtttccaccgatttggctgaccccttctgcctgtctccatctcgcttgttcacttggctcgatgcggggtcacatgtgggtgcagtagattcttaattgacatgtaacgaacaaactgtctgttcattgactcgtggcccttaaggactcggggatccgaacacatc

SEQ ID NO: 133350 - DNA, 531 bp, Zea Mays
attcgcttcagccagctcgtcgggtacggaacaggctgttaggggactcgtaatgacagcgcttgtgcggtacagcggtaggtgtccgcacactcttcttctattgtttgtctactcactccactcccgtcctcgctccttccacgaaactacgttcactagctcgggatgaacagagtcgcctctctctctgctagtcaggtctactgatcgtccaccacacggatcagtttgtaattaccgtgacttcattgccacagctacacaattgcacgagtcaaagtcttttggctggctcctagcacccacacaaaacaacctcgcccggaagcatgggcttcagtgcttcagattacaaatttgacttgctagcttgggcactaaaccaaacacacggagcgtaggcaaggcaaccccactagagatttatatacatgtaacaatcttaaccaggtttaggtttcaactttcaatctaagagcgtctcaagtttggtatagtttttttacttgctaaattggtaggtctagc

SEQ ID NO: 133351 - DNA, 2002 bp, Zea Mays
aaagcattggcattgcatatgtttgatacacctagaatgcattcactaggcaaaaatttcgaaacaagttgtattgttttaatgttttgcaaataggaccctggataggaagctttaaccctaaataggcattagaggggtaaaacttaacccaaattgagaaaacctaaaaaactttaggggaaaagtcataaaatgaccccaagaataaacttgaattacctttatacccctaagataccagaaaccctaattggaaccctggagaaccctaaaaccaaaccctaggggcttatgtgcaaaattggtccacttttgggctaaagtgcaaaaaccaagccaaataggtattttaagtcatttggttcacaaatatgtggacttgaaagccaaaccctaagttttggactcatttgcaaaaaggaccccaattttgattcctatgctaagtctgaaatcagggttatagacccaactttggggttgtgtagctttcacaagagtgagaattcatattaggtcaccacatcaaaattgtagcccaattataggacaagtttgcttaagagtgcaagccatgttcttgtgaaaagttgggaaataattgagcttgaagttggactgtcagactgcttgatgtctgaaattcagattaacagtgggatgacatgaacttagggcttgattttaagcaagatccagtgactttttgtgggagcacattgtagcaaagttatagatggattgtagttctacaactttgctgcagatcattgggtatgttgccatgaaaatttgtgagcaaatcgagcctaaactatggctgtcaggttgactgaatgctgcagcccatggtacagtgcccaaccggatcagatcagccgccgcagaagaatcccaccgctgacgaccttcgccgtgattcacgccaccgctgttggattcgtgctctgggcgagtggataacatcgtgcggtagaagcccctcgccgacggtgagctggaggtcactccggtgacatcaccgtggctctctctccctctttgcggctgagcggattaacacgccggcgaccgccgtcttccggccatgcgcagcgtggctctcgctttccaccgcaccaccgcgccttaccctcgctctccgtggctcaccggagttactgccacgccataggacacgtattcaccgcgccaggcttcttcctcatctccggccgccaccgcgccatcgtcaattcaagcgccaccgctcgctccgcctataaattgagccaccggccagctgctctaggtcgtaccaaagccatagccaccactcccgtctccgattaacccccatagccagagaatcgctcacttcccccaattcagtttccgccaccgtgaaacgagcctcaccgtcgccagccatactccggtcagttcccgtcttctgctcccttgtttaagcgttctcatgcatctgcgatgctccccgacccctttaatcgaaccaaaccgcctgggatcgccgggaacgcaacactttaaccgccatgctcacggccgccgtggccagagctccgtagttgattataagcgcaattaagttaggggaaatgatcatggtagccccgatttcatgtccgctgctcagggaacccagccgtagccccaatcggccggtctaggacctcgccggagtctctccgcgcgtgggcgccgtcggggacctccctctgcaaagaattaggatttcaggggttcctttgcaatctgtcagcgacacagtgcaacagtaaagaagttcgttctccaattagccaaaccccgagggcctctgtgcaagtctgccagctcgggcgcgcgcgcgggcgcctttctgccctagctgggccgcctgggctggatttagcccagatccgttcctctttttctctttttctttttactccagagccaaaacaattatagaaaacagtagaaaaatgataaaattgtgaaaccaattttcctaggc

SEQ ID NO: 133352 - DNA, 568 bp, Zea Mays
cgaaatttgaaagcattgcgccattgttgctcgtcgagcttctagcaacgagtgatgaatgagcagcacagatgaagcaaggcgcagcgaacctcggacaaccagagcattcgcaacattctgactggaaactcttaccctgaacacccaaggatcgacctgaacaacacctaggcgactcggaaaagaggtgaggaggaagttgacagaattgcgaacaaaatgcagattgaaggacggggatgggagtggaggggtgtgttagacaggagatctcaccttccatcattgactcctgtaatctcgtgtgattgatttggtgattgatttggtagattgatttggttgccctcccgggttctgtttctataaaccgggatgaggctttgcctatataaatgtaacctgtacgcatgattcattcaagcagtactactctcccacatatctgtcttcatggtatcaaattagttctttcctctcctcgcttccgctctccttccatggctaccgaagttcccatgccctctgctgtcattgatgctagcaccacgtcacctgcagcagc

SEQ ID NO: 133353 - DNA, 327 bp, Zea Mays
ttgacaggtacaaagcaagattggtggcgaagggatatagtcagacatatgggatcgactatgacgagacctttgcacccgtggcaaaaatgggcacagtgaggaccttaatctcatgtgcggtcaactttggttggtcccttcatcagctagatgtgaagaatgcattcctccatggtgacctgaaggaagaggtctatatggaaattccacctggatttgcgaataaacagactattgggaaagtgtgcagacttaagaagtcgctttatggcctaaagcagtcaccgcgtgcatggtttgatagattcaggcgagttgtgtgtg

SEQ ID NO: 133354 - DNA, 1186 bp, Zea Mays
ttccttgctaattaggatctagcagctttcaactgataacacatgatttcacagctggaggtagaatcagttacacgcctatctcaatttcacggttcatagcacttgcctgttcatggatttcacccaacgagcaatattattggcatcttttgcttcttttcaatttaatttacatctctattttattttctcctgtctgctgctaggcgcgtgccggcattcaagaagttcatttcctcccattcaatccaactgacaagagaacagcacttacatacttagacgctaggggtaaaatgcacagggttagcaaaggcgctcctgaacaggtatatacattgcatgttcgattcctttataaaatgctacctgaaataaagtgcagaaggcatagtatggagactatttgaaaagcacagtagccaaatatggtaatatctatagcaaagcttcaatatatgttgagatgaattgtgcatgaaacttatttggtgcattttatcttcttgggctactaccgccataacaaaaacaactgaaggaatatgaattccttattgcacattcttaatgtatatgtggaggccacccacctagtcttgaacctgggcagttcatgtgagtatgtggctaaagggttcatgactcccctctcttaagataaaactatgagatgtctattgtcttctccctgtggtcattttttggtgtaggtgtatcaactgtaatgataacttttcagtactagtttatgtgtattttgtttgcctctatcaatctaattctgcatcttttcaactaaagtcaattttatttgtgctccttaattcatcactttttggtatttgcttcgttgaaatgaatataagtgagcaatatcactggatgcagtcgcatcattgatactccagtatacctatatttcatcaaatattcaaatgctcttgcagatcctgaacctagcatcgaacaagtctgagattgaaaggaaggtccatcattctattggcaattatgcagagagagggctacgatcgcttgctgttgcctatcaggtggtaaccaactagtatactatggcatgcttgtctatatacaagcaaaaccttactaaatttattcatcgtaaaggaagtacctgaagggactaaggaaagttctggtgggccttggcaatttattg

SEQ ID NO: 133355 - DNA, 440 bp, Zea Mays
actaggttgagttctcaagctccaaaccacatagggcaactctctgatccactttcctgcgaacttttcatttttgtcgaacactttcttcctgagtgcttccagtatcattctattagccctttccacctaaccattggctcttgggtgtgctactgatgtgtacttgatctggatacttcgttgttcgcagaaatcaaagaattcagagctagtgaagttggatcccaggtcggttatgatgctattcggtatcccaaacctgaatattatgtcttgtatgaactccactgccttggctgaggttaaagaagcaataggcttgtactctatccatttggtgaatttgtcaatggcaaccagcacgtgggtatagcctccctaagctttcttgaagggtccaatcatgtccaatccccagcatgcaaatggccatgtca

SEQ ID NO: 133356 - DNA, 571 bp, Zea Mays
aaaagctactcctaccattgatgggaaaagaaggcaccgatcacataacctcatccatggagtagaagaactcgttggcgagaagcatgatctcctacctaggctcctcgctcgttgcaggcaatcaaacggttcaagtcaatgtacaggaaggtggcctttagctggagatctctcctgaccagatcccacaagtcaccatccagatcagtcaaatgccgagctcttgatccgacaggtgcatcccttgacccattggtgctcctgacagcctcctctgcagctctgctatatcttcttgcagctgcaaatgacaaaggatcagaaccaatgatttggacgtattttatggaaaggcaaaatgagaaactgattcttggaggatgtctagaagcaaacagatgtcagcatatgcatcagagaaaggtccctgtatagtgcagtaaggggcaaagtggccagtgcagaagattacaagattaattaatgttgctggttgtttttaagttttgcatatgaatgaatcaacgaatgaacatacatatatcattgctcataaatatgctattgt

SEQ ID NO: 133357 - DNA, 881 bp, Zea Mays
atgaagtgaaattaagatgcagaggcaagaaaactaatgaagaacactattactgaaactattttgcatctgttctgagttactactgcagtttgaagcatggcaactctgtgttttaatgttgtttatggtacaatctttttataacattactttgtatgagtaagccaatgttaaccaacatgtgtgtttctaaactcctacatgatgtcctctacaaaattttaaatccaaactcactatacatgaagaaacaaaaaacaaatctcatatgggtaaactgggactgctgaactaaattgttgggggcatctggacataggtcaaacatgaagggggagtttggactttttccttgaagaaagataaaaaattcagaattaccttgcagataacagatttttgggagtaattaagtcaacaaagaaaatatgttcttgtctcaaccttctttgcaacctctaaaatttgatggaatcaatcaggcatgaaaatattttgatagaagatagctagcaagatccaaaccttatatacaccatctgtgcttgaggagctagaaagacaaagggtggtgggagcacaaaataatttgagaatatgatctcggactatgcacaaagtgcaataaaaaacaagcacttgacaagaacctcagtagatggaatgaatagtagttgtgaatccgaatagaacaagttgcgatggctgaacactaagggaggcccgatctatggtcagaagcgagaagcgtaggcgctggtgcacacatatctaaagtggagcaccttgatccatcgctaacctgatacacaccatgaataaagtaaattattaaccaaataaacaatcagtcgaagcaaaatgctagaataggtatg

SEQ ID NO: 133358 - DNA, 461 bp, Zea Mays
gttttggcactactacacgaagccttgatatgttgtgcacttgcatacaaacactatccagttaactaatcatagcattttttttctttagttgatctgctgcacttaaatgatcacacttgctcttatattttttttgcttgagtaatgatgcttacttgcttagtactctttaagttccaaattatatttcacatgcatgtcgctagccgggatgctacttcagtgagacattgaagcccatatcagaagaggtgcgcaatctcgatgttgtactatctagatttcatttaaaggatcaccagtgcagtagttccaaaatgtaaattctgcatgaatctgatggtttgtttgaattgcaatttggaccgaggcaaaatctactatctcatgccaaggtgacactggtgtttgaggttcagtaacttgagttgctgaaggtcatgtgattatgatcgtcc

SEQ ID NO: 133359 - DNA, 585 bp, Zea Mays
gtgagattcggttccatcgagctcgaggtcgatgcctgttcgtctctcccgttgatctcatttctacgattcagtccagcactattcatcgtttcgtcctagatctttcttttacgagttgatccttgaacgcaggagggctagctcgggagtggaatatctactgacccccgactccgcaaggcatgtccaagccagcagcctcaccaccctcttctttgcctttgcccttgtgtccatccaaccaaccagccacagccactagagaggtcgaatccttactttcttgcaaacaatgggcctccttccaatccacagaatcatcttgctgtgtttttgctcgtctagcttattactgcctcctccagtatcatcggacagccgcatccttcccaacaagccgctgactgttggaagcacgctcacctccgatgacggcacttttgccctgggcttcttctccccgtccaacccggacaagaaacactactactatgttggtatatggtacgccaacattcccaaggacaacgtcgtgtgggttgccaaccgtggaaccccaataatcacggacccttcctctgc

SEQ ID NO: 133360 - DNA, 306 bp, Zea Mays
catgtggtttacctcatctatatctatctaaaccatatttcccaaccccgataatatacactaacctcgaatcaatgagaccaagaccagaggagaaaagatcaacatcgacaaggaagggtataacagtcaaagcgaatctcgagatgaatcatgacttaaacattttggataaagtcttttccttgccataatctttcttacctcaacctgtttagtttatatctcacataaatagtagctggatacctatgcttccccaatcttccactacctccaccaccaccaccagctccaccaagctac

SEQ ID NO: 133361 - DNA, 613 bp, Zea Mays
gggagctgcaggcggccacggacgggttcagcgccaagaacatcctgggcaagggcgggttcgggaacgtgtaccgcggccgcctcgccgacggcaccacggtggccgtgaagcggctcaaggaccccagcgcgtcgggcgaggcccagttccgcacggaggtggagatgatcagcctcgccgtgcaccgccacctgctgcgcctggtcggcttctgcgccgcctcgggcgagcgcctcctcgtctacccctacatgcccaacggcagcgtcgcgtcgcggctgcgaggtacgttcccctcctgaatgcccccctgtcctgtcgtgtcgtgtcatgtcaccccatgcatgtcgttcacgtcgtagtatctctgtcgcggacggggtacgaccgtacatgtctcggccagccagtggcttaattgtgccggcatcaaggttcgtgcggggagattacgcggtcggagcgagtgggaccctccaccacgcgcgcggaagtgcacgcaagagtcatggagggtgtacagtacccagcagtcaggcgtggtcgcgcgtcccctgtactttggcgcggggaccatatggagcgccagggggggcggagaccacaggca

SEQ ID NO: 133362 - DNA, 721 bp, Zea Mays
ggaggaaaataaaacacgtgcactaagctgcttcaattcttgaatggaaccgccactcgtgactcgtgaagaactctatggccaccacctccaaagactggcacatgacgaggatttgttgttgcgtttcttccttctgcaatagtctccaaaatctgaaccagtgtgtgcccttgaagatagtctgtataattgacggtataggtttatgattaaacaccacatcattacggcaaagccaaatcgaccaaaacaatgctgcaacaccattaagaagcaattttttatgcgtgcaacctttgttggattcccaatcccctataatatgattaatattaatgggtcggtctatctttaaagcaaaataaataattctccaaacagttttagctaggtaacagtcaaagaaaaggtgttgtatgctctcgttctggttacaaaagctacacttcggacttccttgccatctacgtttggccaagttgtctttggtgagggtcacacccctacctagataccaaagaaagatttttatcttaaggggtagttttagcttccaaagcacacaattactattaaaattggggttatttattaaaatatagtacatggatcgggttgagaaagtcccatccctatgagctccccacacgaaagtgtccctcaacaaattcagggtaaccggagccaataagtgtaccaagttctgcaattccacgag

SEQ ID NO: 133363 - DNA, 562 bp, Zea Mays
cgattctgatgaatatgtgtctaagtgttttgagtctgatgattctaggagttcgattgtgtggacagaggagtcttcggatgaggatttggattactttgcggcattggatgtggctgcggcggaggcttcaccgcgtgtaatgggtgatgaggatcttctgggtgcgagtgttgggcataggcggcgaagggcggtggcgaagcggagggtgagtgagttgccgcgaagtgataggcgtcatcatggtgaggtggaaggtggtcgccttcgtatggatgggactggcaagcgggaattgttgtcctcgccgtctggggcgagtgtgggtgagggggagctgcaaagtctgtttgcgggtgaggaattgaggataatgttgttcaactatagggagatgggtatcatcccgaaggttgagccaatgtaatgtttgatgccctcgatgtatgtatgcaaccatactcttgtgcgatgaagttgcgcgctttcgttgatcaggccgctcccgtaggcttctgtacggagttctttagaaaagacttcgattttttcgtactag

SEQ ID NO: 133364 - DNA, 502 bp, Zea Mays
gtctgactgctgaagttgtggttgcagactttgtttttaagaatattcagccactgaaggacagagcatactcggcttatttgtatagtggtgtcaccgactcaacccgggttaccaacaagaggattcctgctgtagatttggtgagccaactggagatgatcttgagaggcaaagtatcaaatattggtgctcctgttgcatattctgcttggaatctgccaccttctaagtcctttttcaattttgtgtccaatcctcctgctggtgatagtggtttgggtcttagagtgcgaccctctctcgaagatattgaggtcctggttgcttcacttggtgatcttcccaatgatgagaggcaagttcactttgagatgcctacgagtccaggtgatgcagagataagtgctatgctggacatgttggctggggattcttctgactcggtccctactgaaacaatggctgttgcaactatccgagagcttgaaaaaaccgtgga

SEQ ID NO: 133365 - DNA, 1283 bp, Zea Mays
ctatagtcgaattgtagctggtttgtaactctacaactttggtacagaggtttaatgaagttcacatgcaaatttcaaagaaaatcgagcctaaaccttgtctgtcagtcgctctgaatgggggttcaccatggtacagtagcccggattggatcaggctgccagcgcggaactcccaccgccgacgacacctccgccgtgattcgtgccgttgccggcctgacttgtgcacgggatgggcagataagggcacacggtaaaagatcttcgccgacggtgagctggaaatcactccggtgacccccccgccgtgtctctcttttcctccttacggctggaacggatgtgctcgccggtgaccgccgcttcccggctgtgtgccgcgtgtccaaacctttccaccgcgtcgccatgactccctgtacccgtcccatcgtcgacggggaggttgccatggcggcggacacgaattcaccgcgcaagcttcttctttatctccggccgccaacacggctcggccaaattgggcaccaccgcccacgggcgctataaattgaccgtacccccagctccgccatgcatccaagcagctattgcacccgcttgcatcctaaacctcccaccagagaacttgaattcggaatttcccccaacgaacctcgctctccgccaccgtgaaacaagtctcaccgtggccagcccaaattaggtcagttcatgttgctctgttgcttgttctaacattctcatgtgtccttgatgctctccaaaccatccaattgaacttaactgccatgaattgattggaacacgaacacctatccgcgccgtgcactgtcctcgcgggcagagcttggcagatcaccaagtatgaaattgattggggggaaagagtccttaggagttgaatttggtgtttgctgctcaaaaaccatagccgttgccccttttggccggttctggcgctcgccggagctcggcggggcgtgaacgccgtcgtggacgcgccgggtaaaggaatagaaagtcaagggcgtttctgtaaactgtcagcgactcagtgaatagtgctacggatctgcttcgggttgttctgaaacgcgaggccctttctgcaaaaccgccagggcgcgggcgcgcgcgagcgcctttcctccctggacctgggccgctgggctgaatccggcccagttctatttaatccttttccttttctttttccagcagagctttagaaatatgtagaaaaatgtagaaaaatgctaaaattgtgaaactaattt

SEQ ID NO: 133366 - DNA, 541 bp, Zea Mays
caactattgattggtcagatgaacagtagggtattcggtgcaccatgagacgtgcttggtgtgaccagagtttgtctgtacttttggtacggacttcaaacaactatataggctttgagagcctataaatacaactccaacttgttgatacatcattaatgagctgagaaacaaacatacaagttagagcaacacctccaagtaatacaggtgggccaagtgtcttaaatcaagtagtgtgcttagagatagccatcctttgagagtttgtagagatagcacttgtgttgagctcaaaagaggagtgtgttgtgatgtttgagtttggagttaagctccctttaagttgtaaagtgtgcaagagcctccaagtgtgtggagaaatttgcaagactctggtctcaccattgggcaaagacaaaaagactcaagttcgaccttagtgatcgcttgagtgataaaagggttgaaagagacacagttctttatgaaaccgaactctggtaaataaatcacttgtctcgtgtgctttttgtttgac

SEQ ID NO: 133367 - DNA, 353 bp, Zea Mays
gcattacatggaaacccctctatgtcccttgatgtccctcacccaagagatacatcatcgtctagtggcacccctcaatgtcattcaatgtctttgaggttcacaacatgttctttggtatcatctagcatctctcgacgtcacttggcatccctcaccattattcatcattcctcattatccgtcggcgtctccctgtgccccacaacatccctccttatctctcaatgtcctttgatgtccctctacatcacttggtgcccattagactccctaggctagcttcacttggtgctccctcaaattcccacaccattgcttgatgctactttacatcccttgacattctatag

SEQ ID NO: 133368 - DNA, 552 bp, Zea Mays
tgggtagagattatatgggggcattaatgctcaccctagggtgactcataatgtatgttaaatctttttggtcttcttggggccaaaaagtgctcgctccgcatgttcgtggggccatgccatgattttgaggagtcgtgggtgataagatgaagcttggctaaggcgggtgtaaggattgctggtaataacccacatcttgttctgcatgccctatgtcggacggtctggagatatactcggatggtccgcacgtatgaccggatgatccgagcttgtctgttagcccttgcatagagtacggtggccctagcgtggatctcgatcgctcgtcatgaagttaggagcaagctgttgtagggtaggacggttcgagctcaggtccgaacggtctggtcgtgcgtaggttagtcctagatcagttgagagggttgtggttgtgtcacaaatgtattcatcggcatatcgtataaaggttgggtttgtatacacccatttacatctaatgcttttgctaaggttgactcaatcgtgaccttgtgtgatggagaa

SEQ ID NO: 133369 - DNA, 362 bp, Zea Mays
ttcgtattttgcgagttttgaaatggtcgaagagaagaaaagcgaagagcttgctcttgtgtttcatgatgccatgtagaggtataatgttaagaagattaccgatgagatgctagccggtctgttagatgattctgaagacaacgagtagtttgattttgaagaagatgctgatgatgccaaagattggccttggaaaccaagtcatgttatcttcgagaaatcgtctgtgaaaaaggggtatattgaggtaatgaaagacacttattttcacgacatttctattgtgagacctggtggggaggcactgtcccgcacccaaagaaggatgaggtagtagttttctgaaacttcacgaggac

SEQ ID NO: 133370 - DNA, 769 bp, Zea Mays
ctaaaataggttttgccctgtccccctcaacaactgggttcaacgtacacataattcgactgtacaacaactggatcagcccaaagaaaatcatacatcgataatccaaagctaatcctcagattcctaaaccataaaagaataaatcaagctcaatgtgatgctcgtacagggatctaaagctaatcctcagaacccctacaccctagaagaataaatcgagcacaatgcgatgctcgtacagagataaaccaaaggctaatcttcaaaaccctaaaccctagaagaataaatcgaacacaatgtaatgcaacgctcgaaccgaataactaactacaaaattcctactcgaaccaatcaaagcaactaattggacgaaacaacagtagcgaaccaatcaaagcaagtaattcgacgctgcattagcgaaccaattagagtaacaatccatcgaagcagcagctcggcgacgaaattggatttgaaggaggtcggggcatggtagcacgggtagcaccattcaggcagtaatcgacggggacacacgagaagattggggcagagatagaagatgtgaaacccacggccgcaaccgttgcataacatcatctcagcgaccgcctcctcggactcgcacaccttgcacctcacgttgtcgtcatcgtagccggcgacagcttccgatctgggccctagtgacgtctgctcctgggtccagtgacgaagatagcccgcagcgtccatttccgcatgcgagatctgagataat

SEQ ID NO: 133371 - DNA, 456 bp, Zea Mays
cttttgactaccagcggcagatatgttgaggaatgggtccgagttttctacgctactgtatggatcgaccctgatcaccactggatgagattccgttttgagcgagaggatgtcactattcatgccagccagattcgccagctatttggatttcacgagtcatcgtctcgtcttcacagcttatgctatggcacctctgaccctcctcatcgccctcacggcggtgttgctcctggtacagctcacgtcgcggctctgttctgaccgcccttctcagatgggtcacgacgctctccgacagacttcaccacagcagcaaagtttttatatcagcttatgagacggacacttctgccgcggatggggtacagggaggctgccactcatatccaactctggctccttggtgccctagtctctcactcagagtttgatgttgtggatttccttattagt

SEQ ID NO: 133372 - DNA, 597 bp, Zea Mays
attttgcacaagagagagttcttacaactagtgatcctttttctaagacatggttaacatatatcaagtggatcacaaattgcataaatgaatcatgaattctccttttaacctagtgcatatcaagagagatatcgatttgaaagagtatgaggcactaagtgtcatttgatgttattctatgatcaaacaaacaatggatgtgatcaagagagtaacatattggaatatgaattaagcttaaaatgggagaatccaagaagcatgctactttagcaatgaaagcaacaatccttgataaaggcgacattattttaacaagttggattgatgtggagtagcatactatacgagaaacttattctcatgtaagagactatatgaaattactaagataaagtaatagtctcaacataatcaagatatagaaagaggctccctctaaagatatgcatcaagaatttgaatgaattgaatggatgtatttacttggaagacaaatagggagaaccattatacatcttgatcaaggctcattaaatttgtaataaacaacttgagcctagtattttcattatgaaagatttagagtactca

SEQ ID NO: 133373 - DNA, 585 bp, Zea Mays
aacaggatgcaaatgctgataagctatcacatatgccatcgttcaggagggggaaaagactctgattgtagtccgcatatatctttacttaaaacattaatagtatgattttttcctcagaagaagatgctttgatttggcaatttagtcccagtggcatttactcctcccaatctctgtataaagtgattaaattcagagggatcactttgattcatagccctgcagtgtgggatttaacgattcctcctagagtccaatttttcctttggttagtttctcagaataaaatccttacccgagataacattgcaaaacacagggagctaggtgatgtctcatgtttgttttgtactgaagatgagtcggttcatcatctttttatttgactgtgtagtagctaatcagatttggaaatgtgtgtcagatagcttggatatccatcaggctcatagttttctttcaataggaaatatgtggttaagtaacaaaaagtttctagtgcataacatggtatgtgctgcagccttatgggagttgtggaaaccaaggaatgcaatatgttttcagcattcaggttgacgg

SEQ ID NO: 133374 - DNA, 504 bp, Zea Mays
gagagatgagagggcgaccgccaccgcaaaccctcgcctgtgtcgtctatcgagccacggatgagatcctagatgattcgttgggtagcgctgggcatactgccagattattgggcggggaagtcaaccggtgctccggcaattgctcgtcggagaagaagctccgccgcggtccaccttgtgccgcgggtagtgctcctgtgctcgtcatccgtggtgaatacctcctccgatgattcgttgttcgcacggtttcgcgtgggactgtttagtagcgagtttgggacaccggctcggcgggtggtcgcgcgtcggcgatggcgccgccatggggctagggcaccgccgtcttattagggtcgcaatggagaagaagtgtggttgccattgatctgtaaaccaacgatccagattagatcttgggtgtacctattcgtggtagcatggggggccgtccgatctagatcagagggatgcgcttaggtatcgcttgattaaatctgg

SEQ ID NO: 133375 - DNA, 330 bp, Zea Mays
gtcgagggatcggggaagctgacgcaagttggagcagctgatatcgtcgccgacagggatccgagggtgttccagaagtcctgggaaaaggtgtagtggaaaatgatgtgtggtgtcggtttcggcccagtagagcaaatttcacaggtgacatctgaaacaattccctttctatgcaggtttgcccgagtctggagcttgtcccatgaagccagccagaagaagaacttgacgcgttgtggtgcactattgtccccgatgaagcgtgacatgggcgaagcctcatggagcctaggtgacagccaggagtagaggtctctggttcgaagg

SEQ ID NO: 133376 - DNA, 563 bp, Zea Mays
ttgggatagtcgaaattcgacaagattccaccttagcaggagacgatgtctatatcgtggcccaacaggccacaaaagtgtattatctcccatatgcgtgccaaacgaaagaacatcttaagggttgggatgttgtgtataaggtatcgccgcacgggaggttacctgttcctaacgatgaagattacaacttagacccggacacatatgatggagagtttttccaagaagatgggctagaagggcgatttgagatagacttaactgaagctatcagaatggacgtagatattgaaatggttgttgatgaggaggaggatgaggtgcaaaatgataatgacttagtaatccttgaaggcaatgtcattaatgacgaggttgcgtcttccgatggtgttgagattgaaatggctgattgtgatgatgagagttatgatccggctaaccccgacacatatgaagattatttttaatcgtaatgctatatgactttttatttcgcacatgtttttaaatacatctttttatatgtgcttatttgtttactcttaattgcaggtttt

SEQ ID NO: 133377 - DNA, 413 bp, Zea Mays
ttcattgccattgcattgttgtgctgttgaaaaatttaagcataaccgaagctttttcactgcattctcgagcaaaccatcattttgaattagcttcgtcaaaactgtaaaaaacatcaacttcgtaaaaaccgcaatggattcatcagatggccagagtacgctcgactgcgagggtgactcgcgaaggagaggagactgagaccaccgagacagctccgattccgaagtcatgagaaaatcgggcttagttgtgacaaagagaaccgttgacgaaggtacttctggtgccgaagctgagcaggctgatattgaagaagaagaaaatgctgatgatgaagaagaagattatagcatcttgatcccatcaaaacccacccacctagattttgagaaatctactgtgtctgaaa

SEQ ID NO: 133378 - DNA, 446 bp, Zea Mays
gcgagtttgaacacccttactaatgtcacccacaatttgatcaactgggtgatccttcacaatagaatgatggattcttgataccatttgagaattactagttgaagcatgaggagggaccaaatgacttgaagtatcttgatcatgagcatccatactttcatcattttgttggctttggtgattttcatcatttagggttgaagaggatggaatgacaaccacactattttcgtcatcatcttctcttggctttatttcaccaatagccattgttttcatagcatttctcaattgagctccaccaacatcatcaagattatcgttttcatcttgagacccatttgtttcatcaaactcaacatcatatgcttcttcaataataccatgagtcttgttgaaaactctataagctttgctatttgatgaatatccaagtagaaaac

SEQ ID NO: 133379 - DNA, 674 bp, Zea Mays
gcgcgcctgccaccaccgtgtggggccctttggtcagacttcgggggcgcgctctggtcattctccgggtcgctgcaatgtgggcccgtgtttctagctcattccctggccgccatcgtcttcaatctgcgtatggcggaactcattccgagcaagtcggacccggccgttgggggtttctgggatcatcgcgaccttttcgcccacgcctccaacctataaaagctcggcctcgcgacctccttaggccatagactcgaaccgagctcgtgcaccttgtccagaaacataaaatgggggaaacatcaccgtgggtgagggaaaatcgggccaccatcgtgggacagccaccttggcgtcgtctggcatccaaaaatcggtctgggggtgtgcgcatcagctcaggggtgttctccggtgagacattttgtgccgtggggtatggttcaacaacgatttctcaccggacatgggattccaccgcagaaccactccttaccgtggccggtgcgtctaggggcacggactgtgtcatgggtcccctggcctcgatcgccttgtcactctcgtcgtgttgcaccatcaacgtcgaggtttgggctgctgtgtggggatcctgtaggttgcggccatggcaccaccacgatggcgatggcgtcaccgcctggtctcgg

SEQ ID NO: 133380 - DNA, 361 bp, Zea Mays
ctggacagtctacctagggtggtcagatggttcgactagaccttggacaatatggcgtagggtgttagatggtccccgagcggctggggttaaacccgaactgtttggctgtgtgggacattgcttgagtgtcgagcgcgaggttcggtatttgtccagccaattcgacgaagggtaccaaacggtccctgagatgactaggtggttcttgattgtgctcagactatccggtcgtgcccaaagccagctatgcactgagtgctggcaatggtggttgtggttgtcccatgtatgtgctcatcgacatactatacaatgggctgggttggtgaaggatccatttacaactgatctgtccggc

SEQ ID NO: 133381 - DNA, 496 bp, Zea Mays
tgtgtgtccatgcactcgtgcaacttcttccaaaaccgagaagtaaactatgatcctcggtctgacacgatcttcttaggcaccccaagtaaacatactatccgagtcatatacaattctgctagcttggatcccgtgtaattagtcctcacaggtatgaagtgagccacttttgtcagtctgtccacaatcacccaaatggagtcataccctccaggagtgcggggtagtccaacaatgaaatccatgccaatttattcccatttccacttgggtatcttaagcaggtgcaatagtccagctggtctttgatgtttggccttgactctttgacacacatcacacttagccacatgtgcagcaacatctctttttagcccatactaccagtacttctgcttcaaatcccgatacatcttagtgctaccagggtggatagagtaatcagaatcatgggcttctttcaatatagtctcatgaaggctatcaatctccg

SEQ ID NO: 133382 - DNA, 662 bp, Zea Mays
agaacctggtcgaaggagcattggagcagcgattggggttggacgagaggccgatggcgctggagacggatcttggcgtaggcgatcttctgatctccttgacctcgatgacggcgccatcgccgggcttcttgagggggatggggggttgtctcggcgagcgcggatctgggggtggcattgggcaagggcatggccttgactggtgtggtcatgcggatgtcctccttccactcgtaatggggtgagaacgatggcgggacacaacgtgtgggtgataccatcgatggaaggggattgcgggctcgggggcgaggattgcggtgcgtcgcgggggaggatggcggtcgccggcggggatcacggtcgggggggggggcgaggaaaggggatcacggaggcaggggtgggcgtgaagggcagaaccgtgcgctgtggtggaggttgcgcgaccaaggagaggcgctggcaatagatactgggccgcacgttgaagaggaggggcgctgggctgctgggccgcatgtcgaattgctgggctgcacgaacgctagacataggcgctggtatgggatttatttgattagtaccataccggccactgaaagagacggaacgtggcttataagcgttgttgtggatcatctgttgctcattctaac

SEQ ID NO: 133383 - DNA, 596 bp, Zea Mays
aacaatcggagctggagcatgcgacggacttatcctctccgctggatgctcgcgcgcatggcgcgctccgttgaccaattccccccccaaatcggactcagttccgggtataggaaccgtgggcaccgtcgccgtgaagacccggcgcgttctctctcctctccagatttccgaagcggccttttttccccgccaaagctccttccttactactcgttgtgccatcttcgacgcacaccactcgttatcgacgtctagccaggccagggttgtggccacacgctgcacaattcctcgtcgctgatgttggggtacggctgtcggtccacctcgcctcgtgggtagctctatttctgcctccacctgcagtgagctacttctcccttattttgccttgtttttcgcttcatgtaggaccgctctattttgtggttggggcaatcggtgtagatgtgggtgatcgccgacgaggtcacgccgtgggacgctcatgcatcatcccgtgtgtggtcatggggaagacgacgtgtgtgagtcgttgatcggcgaacagatcgataggattacatctgatggtaactgaatgcgagcggtca

SEQ ID NO: 133384 - DNA, 1220 bp, Zea Mays
cacagtggaccttgacctttcaaacaactaataaagaatcttgtgcactattcacatgtgtctctgacaattgcaccgaggcccctccctttttgtttctccgcaaggtcaggtccccgaccacggacggtggagcagttgctccgacgagcttgtaccggccggaacacgcaaaggctaagcttcttacttggtcaaaatcgaattctacctcgggcaaccctaacccctctaccaattgcgaagttctagctcaaaatttctctgcccacggggatggcgcaaaccgaggacaacccgaggtgtttccagtgatctaacatgatctagttcaattggttgggtcgataagcatccatagcacacaagggtgctagaacgaggacaaggagggtatgaatggacatgaaaacggcggtccacgacatggtagctcacggtggcgtggagaactgaattgtggtggctaatcggaggcaagggcaggtgctctggcttcgtgacaacctaacagagctcactggggcattgatttatagtgtccattagcggtggcatccaatttgaaggaagtgtgctggcggccgaagagaggggaaatgtactgacgcgggtgatcgtggatggcaccgtggcaaggcctccggcgatggacgggcttgctacaagggttcactgcgacgtgttaaacctcccaggcacgtggcacacgatcggtaagcggccaacgccggtgaagatcattccggccggccgcagaccaagtgggtacggtgaacccaacagtgaccgagtccaagccaatctgggcactaagatcttttactcccctcagttatccactttgcgctgggcacgaatcgcggcagccggcgcgaatccaggcgggggggttaccggcggcgaggtgcactgcacctgagatattcttcagacactgtaccatcagaactccattcagagcacctgacagagcatattcaggggtgtttttcttcaatttttatgtgataacttgaccagccctctgtaacaaaattgttaatctataatccagctacaattcgactataggaaccctggccatttactgactggattaagttcaaatccactccaaagttcttcagtgttcactgtcagccacatttcaactttctgactcgactgatagccaaactttctgtccattttactccaatttttgcatagcatcaagg

SEQ ID NO: 133385 - DNA, 502 bp, Zea Mays
ctgtgccgattatcttgctgttgtgtttgtggcataacttagagtttttgaattattcctccgcccgccttatttatgaagttgactcctttgggatagtaattaaataactcgggcatcacatcgacgcttttaggggtgatggccgagctattattgtcaacatttgcgcttttgagatagcgtccgagtggtgacgaagccatgtcagtgtcggaatgactgatgaccgcgctggcgcttttagaggtaaagagccgagtgacttatgacgtcgtcggcgtcttagaggcaaccgccgagcgactgaaaacgacatcggcgttttagaggtaactgccgagtgactcgacgacatcggctttttagaggcaactgccgagtgtcttatgacgtcgtcggcgtcttagaggtaaccgccgagcgactgaaaacgacatcggcgttttagaggtaactgccgagtgactgaaaacgacatcggcgttttagaggtgactgc

SEQ ID NO: 133386 - DNA, 647 bp, Zea Mays
gccgcctccgcggtgagcgactggtgcaccgtgtacgcccccgcccgcatcgctgatgcgcgctgtgtctgtctgtgtgagcgtgtggcacaccgccggtcgcttgtcagcagcagctatgctatggtatgctacaatagtactgctcccctcttgtttggcctagactagtagagccctaggcgtggatggaagatggatataacgcaacctgtgctttttgctcctagtcctagtggagtggcagtgcaggtttttctcatggtcatggacgcgcgtagctttctcttttgtgctggtttttttgaagctccactgttcacagtgcacagaataggtagactggcgactgggctgggctccgatgcaaagcggctttctcgtccctcttctcacctatctgatcggcggcatgctcttttctttttctcattccgattcgtctgcgactcgtgtctctttgtgcagagaaagagaaagagagagagagagaggagggcaagggcagggccagtttgtctctcttttttttcatgcatgcagaagatacacagtggacgtactactgtactgctaggacggaagtggggttgggcttggcttggctttgccctttgcttttgttttgcggtggcttcgtgctccgt

SEQ ID NO: 133387 - DNA, 341 bp, Zea Mays
gaccagggtgtagatcgggggagttgagaggagcgacgaagtctggtgaaatgccaaacagatccaaatccatggaaccgaactcacctaaaccctaaactcacatccggtgacggtaagaggaagaacagaagagagagatggatgggtaaggaggacgacgagaactcacgtacagccgcgagagatgtccagccccgagaaacctcgagccgtggataccagctgggatgaagacgacggcagacggcgtctgagcacggcgacggtaatggtgaaagggaccctgaaatctgttggcgcagccccaaatgaccgtctcatgtccattttggcgtttg

SEQ ID NO: 133388 - DNA, 403 bp, Zea Mays
ggtgtctcgacttgtaatctgggtaaggtggatgggatagcggcggaaacaaataacaacgatggagcgattgaactacgattacgacatgacctaaaccagcaacaagactcgacacggacacaaactcaacgaagcaatctgaaacgaaattgcaaggctaaacaagggttctaagacagcggaatatatttttttgtatggcaattatctggagttataggatgaaaaacctaaactaaactagggtaagcctgacggtaatacctgagtctttgaataccacttaataggaacgggggtgcccgatctttcgtcaggtgaagataactatcgatttggtggagatgtcacacaaacgatctggcttccaatcaacacgactagaaccccgcaatcgcag

SEQ ID NO: 133389 - DNA, 770 bp, Zea Mays
gttcatgatcaccaatagtacgcatagtattaaggcactgtcctccttgatttactgtcatcctcgatgcctcaaatatggtctgttcatcaacccctggggccctcaaagctgctggtggagtaattgcgtctacagcagtagctgattctgtatgcgaaattccatctgacgctaactggtaccctccttgttcttcttcctgcaccattgttacgatatccaagcattgattttgtcgatgaacagacgtcggcgtcgcatactcacttatggacttgtttccccatggcgccgccatcttccagagcaaatacgcccttcacccagcagcggactatcaaatgatgcgtactctccacttttttggaagattatgattttttccctgtaccatgcgtatatccaatatcgtggacgcatatttcacggcgcatatccattacccgctgaattttaggatcgtggccgcgctgatcgtgggcgatctgatcgggggagtaacagtcatctatgcaattttatacatagatttacggtgtcgtaactgtctgtttaaatgcgcttcccccttttacgggttccacgtcaccgatccacgtacgaacacgtggcccacgttggtttacgcatatttgtacaagctattatacttgcataactgtagtgcattaaaacgggccgcctggatcgatccattcggttcgaccacgttcggctcgtctggctggggctccgcgcacctatatgaagcccagggcttccattac

SEQ ID NO: 133390 - DNA, 554 bp, Zea Mays
gcgggggcagcgtggcccagagcccttacgtcaggcttcgcccactggcttacgtcacgggcgataggccacgtggcagcatcgggcctccgcctgaacggggagcgggagcgcacgggctaaagccctgacatgtgtcagcaccggacccttgcctagtccagggtatcccccgtcccgtgaccttgctgtgggtggcccagatctcactcagaggggtccgaaccccatccaaggggtccagaatgcttacccaggggtcccgaaccgtacccgggactgttctttgtgcggctagagatagccacacaggcaccgtgtcttcatactgtagtaaggggtacccctgattcaaggtaccgacagtggcccccgggcccgcctcaggggaggaacgagcctgcaggtggggccaaagtttgattggtgattggcacgctggttctgcgtgcccactgtcgtaattactgcttgttcacctttgatcgcgccaactgttacgcctatccccgcggctgactgacccgtgacttctgtacttgacggctttgctg

SEQ ID NO: 133391 - DNA, 341 bp, Zea Mays
ctggttccgaagatgagtacagctgcgggatgccaagtaaacctagtcatttggattttggaaagtccaccatctctgaagttgatcttcccaaaatggtgaaactgggctacttcagtgaagaaaaaaagaagctgattcgttttggcggagaggaaattactccgaagctggaaaagaatgaggttgtagtgttcaaaagcttctttaaagtaggattaagatttcctttgaatgggatgattgctgatgttttgaaaaagtttggggtttaccttcatcagctgacccctaatgctattgttagattaagcgtttatatttgggcccttcgtagccag

SEQ ID NO: 133392 - DNA, 446 bp, Zea Mays
aaagaatcggaatgcttcagttggtatcaaagcccatagaactggtcgtagaccgcagccctgaccttaaaagttgtcttaacaagaaaacacatcttacccctaagaaaaaccttccctcctttctccgatattaacggacccttcttttctcctaccagatggaaggctcttgggtcattaggacatcctgttactcagaggaggaaggatttcctcacctcctacgaagttgcgcactacgcatggggatccgcaagaagcccgaatatgtctggaaagtataccgcgaaaatggagtggagaagtgctctatggcggtctacctgggagaaagccgaagctacccaaaccaccctcttttccaagtcaccttcatcgggcaccgcttcccagacacttgccaaagtgttgcctgaaaagcccttaaacagttatgccaaaac

SEQ ID NO: 133393 - DNA, 436 bp, Zea Mays
gatccagccacacatccatacctaatagatgcaactcacagtttgaaaaggcctaacagtatgatgccaaagtaagtaactaacccaaatgcctaatataacctctctgagttcacctgcgatctaacaaacatttcatgctcatagttgacaagattttctttccccggacaaactgagaagtatattatcaacttcatgtctctgtctccagaaaatccacgattctactgacaaattagagcagatcaaacagagcaagcaccggaacccagagcgtgcacaggacagtaggaaagggacgagagacgctcacctgctgctgctgcggcggcgcggggtggtcgggcactgtggcggaggacgccgggtggaggggcggagtctggcgggcggaggcggggctgcggcctgcggctgtacgggcggccaggca

SEQ ID NO: 133394 - DNA, 366 bp, Zea Mays
cgacaccccgaagctcccagaccagatcttgtctccaatcgcagacgccggagaggtcccatggtggcgactgccccgcgcgctctcagctctgtaacgctacgctccgttgaggtagttgcttacccacccggtcctcgcgatgactaggaacatggtcatgcatatatacccggagtcaggggggttcggccccaggctagcaacggctgacgagagattcgcggcaactgatcccgaccatggcggcgaactccagggaggctgctagcggggtttgttgggattcttgccggcacagcgaagaagacggattccagttagcgggctcaccaagcagtagcagagagagagagagagagagag

SEQ ID NO: 133395 - DNA, 586 bp, Zea Mays
catcgggacggcatcgaaccggtataggcccacagtcgttggatccgagatctacggtcgggattagaagcgcacagggggtatacacggcgcgatcccaagcgttcaactagcatcagatggtcgaggcttaatattttcacgatctaatcttgaccacccatttcggatcttgcagccacggcaccgtcctcttccctcagccgatacccagcatgatggtgaacagcccgcggcggcgccgccccgtcgtgaccaaatccagtgcccggagctcgacaaatcaagtggcgaggtgtcaaaatgctcccaatatcatgacggaccaacagagggtgagattaccttaaatcgagatgggccacaagcagaccacgatgcgaggcggtccgacggcggcggacgaatcccccatgtgaaattccttgttgtacctccccttctgccgcacagagaggacacagacgccaacccagtgcggccgcgaatgcccccgatcgatcatcccgagttcgtcggtgtggtacccacggcttaacctacggcggcatagattttctctccctcactctctctctcaggtgcg

SEQ ID NO: 133396 - DNA, 783 bp, Zea Mays
gccaaagtgatcggccggagcggagagggaccaacagaaggaatagggggtccggtctgaatcgctggcacaactggagcctgatgcggaggaggaggagcagactgaattgggggaactgagacaccagaatgctgtagcataagggccatgaatgccctgctctcaacccgatcctggagtagctgctgctgaagcgcatcctgcctgtcctacatgttctgaaacatccagagcatcctcttggataaccgggtctgctcggctgctaggtgagcctgctgctgagtgatagactggagaatcgaagcaagagcagggtccatagccggaggggcagtaggggcagcactagaactcccagcctcatgatcatgtgagcatggaggcataggaggcggaggcggaggaggaaccccaaaatcatcatcatcatcatcatcatcatcaacaacaactgctgtatcctgagtgtcgaactaacgaagagccgcgtcctcggcctgagagtcaaagacaggagcagaagctggcacaggagcctcaggcgcaggacggaaaacgaggcgtgaggcctcaagtgtgccctgaaaccgaggaggctgaatcagctgcgcaaagatgtggcataagtagtaagcatatggaaactgtcaacgagcatgaatcccatccaaaacggtgtcctcgatctcacaaataaggaaatccacgacgtcaaactcagagtgggagaccagggcaccaaggagccagagctgaatatgtgtggtagcctccctg

SEQ ID NO: 133397 - DNA, 359 bp, Zea Mays
gtgctcggtgagttccttgttgaatttactcccgctactatactttttgattcaggagcatcccatccttttatagccactagttttgtggaaaagcatggcatcccctctacccacctagaaattcccttggtcacccgaaccccagggtcagaccttctatgccagctcaaatgctcccaagtcagaatccttttaagtggggtagtgttcttggcagacttaactgtcctgccatcccaagggattgatgtgatcttaggaatggattggttaaccaagcacaaaggcatcataagttgcgcaaacaagacagtccttctcacggaccaccaaggaaagtcagtttcttgtcaggc

SEQ ID NO: 133398 - DNA, 457 bp, Zea Mays
ggagttttggtacaacacttgtccccattcaactctgggcacttctccatttgaagtattatatggtcactctcctctccattttgggcttactgacaatggccagtgcactgttcctgaccttcacgagttgttgaaagaacatcagttgatgctccaacaggttaaaatgcatctccatcgggcacaacaacgtatgaagagacaggctgacaagggaagaactgaccgtgtcttggaagtgggccaacaagtatttctcaaattacaaccttactatcaaacttcagtggttgctcgcccttatcccaaactagcatttcggttctttggtccatttgaaattactcgtaagattaaccctgtggcttatgagctagctcttccaccaggctcaggcattcatctggtgtttcacgtttcccaattgaagcctaaagtgggatccaatgccccg

SEQ ID NO: 133399 - DNA, 523 bp, Zea Mays
agtatctctatgaagatcaaatagcctcaggtccacagtcaaaagctgaacctaggtcttgtcacgctccctaaagcggggtggaggaacaggtggagtagtggagggagcagaagcggtggaggctgcgggtgtagtgagggtagtggtaggcattggagtagtggaggctggagtggtagtggaagctggagcaagggttcaagtctggctagggtggagcgtaaccgagactactatcgtctgacatggtaagcaatatgatctgatccaatatgcaattgtcctttttgctatgctctctcagttgctgctgctaccgctgcttgagtagctctatcaagtttgtgcttcttcttccctccctgctgctataaatagactacttttcgcttctcctatcgaggagggtgaggagggtcttgatcatcacctccgcctgctagagtggcattcttcgttcgaaccatactaattgagctaagtccttctctagaaagaccataaccctgaccattgtcac

SEQ ID NO: 133400 - DNA, 384 bp, Zea Mays
agccggattagcacaataagtgcgaaaaatcgaagtctaccgcgaagactcaccgtgcagaagtcgcctaagggtgcagccggaccagcacaataagtgcgaaaaaccgaagtctaccgcgaagacttaccgtgcagaagtcgcctaagggtgcagccggactagcacaacaagtgcgaaaaactgaagtctaccgcggagactatccgtgcaaaagtcgcctacgggcgcagccgggctagcgcgataacaattacacctgtccgtgcaacagtccgcgcaaagaccgactacacgcacaccagtccaccatagcaattacacccgaccaagtgcgtaacgccttcgctagcataaccgaatgtgcgagggcacacaacttca

SEQ ID NO: 133401 - DNA, 286 bp, Zea Mays
gcgttccaacgttttatcgttttaataaccttgcgcctatgattactgtgtattgataggaccccaaggttcaacatatataggcagacaggagggaggaaaccctagggctgccgcctacaggagggtggcggcaggacagggggaaaaacctcccagcagaggtggcgcagcacctatgggccgggcctgtacatacgcagatgacagcctgaccccctacacacaaggcctatacaaatattctaacaattataacaattactgtgacttcaagatcctgctt

SEQ ID NO: 133402 - DNA, 998 bp, Zea Mays
atcagaagtgtctacttccggctagcaactcgcctaaaactctgatcaacctgcaaaacaagcataccaaggtgcacagaattcatgctgaaagaacaaatgcatcctggtagattcttctattccagtctaactgctttgcaaggaaaatgttccatgtggtcacggtgaaggggtgaaaaggaagaaaatcaatctggatttgcctgctttctacaagctgtcgagttgcttcagttgttcgatctgactcttgcccgggctgaacttgtcagctttcatcctctctctgaacccatagggtgtaacctgggcactggcataagctgcaagtaacaaattatagggcagagttcttgcagggaagttggtctgctttaccctatcaaatatcttctccgcgttatggatatcgcccttttctgcgtatgcctttagtaagattacatatgagctgaaaaggggatgtctgtcaggattatcttctgtgacattcatcagaaacgagtcggcctttgacaactcgcctaaattcacataaagcttgacaactgcatcccaggtaagagggccgattgtacacccatccaaacacatcctttctataaactttttgcttttgtccagaagtttattttccgcatacacctccaacatagcattaaagtacttggaagtgagtttcggaaacgtctttaccaacacgtcaaagatctcttccgctctttcgatatgtccaagtttactccatgccttaattgcagccaaaaagtcctccaactttggttcagcgcacaagttccatactctctctacatcaactggccttccaagaatagcatagaggtcaagaagagacctgacggcatgacgattagcctttacatgtacctccatagcattgataacctcttctgctttctctgtaaagcacccagatatgtagaatttagcaaccatagtctggatggtaaaatttggctcaagaccattttctt

SEQ ID NO: 133403 - DNA, 514 bp, Zea Mays
gtaaattagcgagaatacctttggcctataggaaataggtttgcaatgggtgtagttttcagactcagatgacatgttctatgcggtatgtgtgtggaactagtgcagcatattttgttcgtgccagttaactgaacgtgtgaaaagaagagttgctggagaagctggtcttcatgtgtagattcatactttgtgaaatgtgaactttcttcaagtaccaataactctgagtataatgggtgggttatccttttgagaaatattggttgggagtttgggccgttgcagtattgatgtactatcattgagcagaaaatctggtgatgacgtgatgtaatgcaagatgcgtattttggctagtgcacattgtattgctgtggttacatcatattattatctgaatgttgactattgtaagactggactcctagtcaacaagcaatcatttgaggtgacttggaatgaaatgccaactgatcacctgtcctgccgatttccctatggtattccttag

SEQ ID NO: 133404 - DNA, 612 bp, Zea Mays
ctatctggcattttttccaaaaccgcctccttccaactaaataatagtcgaaagctgtcctcccaagcaccatgcaaatcaagaaaggccttttctcttcccttccaaacggtgtcataggaaatggtacatttccatttgtcttgcaactctttttgtaactctttggcacccatgtttggtttcttcatcaagattggaagagctagtccagcaacccacgagctagtgggagtggtggtccttctcctggcacttgaagtacaagtatgccgatctgtcatcgctgtcacctggaaagaataaccaaatcaagtaaatcaaatagctcaacgtactaaaaaaggagtatgaaagggagatatagataatataggaagaaattaaatacaatgatagttgctgatcctggtacttccaacactgcatgaagtctccagggacaatcatcacccatacataaccctctatatcgagaggtagaagtagtctcgatgcctagctcaaactctttcataattgcatagtgtcgcacagcaagtcgaaacactgacatatttggatacaaggcaccaactttcatcactggattcgtccagtcatacacgatag

SEQ ID NO: 133405 - DNA, 379 bp, Zea Mays
tgcatgagctagctgaaaagggaaggggattccagagatgccgttgttcgaacgggatcgctaccagaggctggacggcgtgggcgcccggaggccgccgccgccgccgtcgtcgttctgctcgtcggcaaccgtcgtcgtcttcgtggcgctctgcctcgtcgccgcgtggatgatggcgtcgtccaacaacatcgccgtcaccgtaacgccagagaacaactcgggggccaaggaccaggacgggtccgtcgacgttggcggcgacacgcggcaggcgagcgacgaggtggcggacactggcagcggcacgcagtcgacggaggtgagtggggacgcaggcaagaaagatgatcgtagcggtggcgacgcttcgcag

SEQ ID NO: 133406 - DNA, 482 bp, Zea Mays
tgataaccagacctcaggtctatcttggagaaatatttggccccttgaagctggtcgaagaggtcgtcgattcgagggagtggatacttgttttttattgtaacttcatttaaagattggtaatcaatacacatcctcatacttccatcctttttagtgacgaaaaggactggtgctccccaaggggatgagctgggacggatgtaccctttttgttgaagctctgcgatttggagttttaattctgctaactcggtaggagccatgcggtatggtctctttgcaatgggtgccgtaccagggatcaggtctatgtagaactccacttctctttttggcggcattcctggtaactcttctgggaatacatccatgaattcttctatcactgacatgctttctgctgatagattaaacaccattggatcattggcgggtggctgagcctaacaagagactgactttcctttgtggtccgtgag

SEQ ID NO: 133407 - DNA, 559 bp, Zea Mays
ccgatagatgctatcaactaatcgttaaaaatattaaacttacttctcgctttgccactacaccaccctttagtcacatgaccatcgtgagcatccttcacacaattatacgacagcaacctaaacgttgtgttacacaatacatacatctttcttcgtcgtgagtataaccatatcacggcatatacccgcacacctaaatcaaatatcctacgccaccactactataatacacaacggcacacacacatacgtgtactaattcaatcctcacataatctgtatttccaaacctactcatcacataaatttctatcgatgcccttctgacaacataacctgcaatttaagattaatccacacagcaaaccacacatccaatcaacaccacgcgcccactgcatccgtatgaccaaattttagcataattatttatgtcaacatttatcgactaggcgagtggaacaccaactgattattcgcacatctcgtcgtcaaaacaccaatcacaagtggcataatttatattttcaacccactctaacctacatcaacgatg

SEQ ID NO: 133408 - DNA, 1330 bp, Zea Mays
cttcaagaaggctcaaggaggatacactcatgtactggttgctatcgacaaattcactaagtggatagagttcaagcccattgcttctctaacttcagctaaggcagtggaattcatacaggacataatattcaggttcggaataccgaacaacatcataaccgacctgggatccaatttcactagttcggagttctttgatttctgcgaacaaaaaagcatccagatcaaatatgcatcagtggcacacccaagagccaacaggcaggtagaaagagccaacagaatgatattggaagcactcagaaagaaagtcttcgacaagaatgaaaagttcgcaggaaagtggatcagagagttgccttatgtggtctagagcctaagaactcaacccagccgagctttgcatggaaacactcccttcttcatggtttatggttcggaggcagtgctacctgctgatctcaagtttggggcaccaagattgatcttcaaaaacatagctgaagctactagactggaggatgttgatatactagaagaagaacagttgaatacagtgattcagtcagcaagataccaacagactctgaggcgctatcatgataaggccatacagcatcgatccttcgcaatgggagatcttgtcctccgccgaattctaacgggggagggacgacactaattgtcgccactatgggaagggccattcatagtagcagaaatcactcggcctggatcatatcgtcttactcaaatgggtggcacggaaatagggaactcatggaatatagagcatctcaggaagttttacccctagctagatttcaaaagctattgggacgacattgtattctataattgggagatacaccatcaattaaatgacttcattctcaaaggcactcgaattgtttattgtcaatctgcatacttactcgactcagggtgaccactataccctacaaatggagcaatcggcttaagtcggcaacgacttaaggcggtgtgacatgctcacgcttacttaactcagggtgaccactataccctacaaacggagcaatcggcttaagtcggcaacgacttaaggcggtgtgacatgctcacgcttacttaacccagggtgaccactataccctacaaacggagcaatcggcttaagtcggcgatgacttaaggcggagtgacatgctcacgcttacttaactcagggtgaccactatgccctactaatggagcaatcggcttaagtcggcaatgacttaaggcggtgttacatgctcacgtttacttaactcagggtgaccactagaccctaccaatggag

SEQ ID NO: 133409 - DNA, 391 bp, Zea Mays
tgggagcggatgggccaaatctacagcgcagcgctcggtcgccctctgtagacgcggccgcctctgtccctctccgtccattgacgccgccatcgcctcgcgttgcctcgtgcgtcgtcgtcgtcacttcgggggccatgtggtgctgactcagtggtccctgcctcgaagcgggtccacgcgcagctgctacacggagaggcgcgggactacgcgaggctgcggagccatcgtcgagtcgtcggcagtctccgttgcgactgtgctgcagcagtgacaggcatggctgagatagtgtcatcctctgggtgtgtactttcttccccttaaatgtttccttcccctctcctcggagcccgttcgcattatttagtccttatatctactgatt

SEQ ID NO: 133410 - DNA, 432 bp, Zea Mays
caaaagtgtctgagactcagccacctccacacaggacggcgggttgaatactggaaaccagggggtttcttatgtaaaagtcgcgagaccgaaggggtacgggagaaatctggccatcggatcctcactggacgacccagattagatcaaccacaacactgaatcggtacgctacacataccctcagatcccccatcaacggattagatttaatatgaccgagatcaacccgcaaccgttcaattgcaaacaattggcttggattctgagccctagatccacaaatcaacgatccacggcgttcagacacacagaagggcgacggtctaatcccgaccactcatctacatatcaatgatcccgatcaaatcataacgaacgagtacgcttggcccaatcccaaccgttcccatgccatcaacggtccacgca

SEQ ID NO: 133411 - DNA, 599 bp, Zea Mays
gcgtgagcatgtcacaccgccttaagtcattaccgacttaagccggttgctccgttagtagggcatagtggtcaccccgagtttagtaagcgtgagcatgtcgcaccgccttaagtcattgctgacttaagccgattgctccgttagtagggcatagtggtcaccccgagtttagtaagcgtgagcatgtcgcactgccataagtcattgccgacttaagccgattgctccgttagtagggcatagtggtcacccccgagtttagtaagcgtgagcatgtcgcaccgccttaagtcattgccgacttaagccgattgctccgttagtaggacatagtggtcaccccgagtttagtaagcgtgagcatgtcacaccgccttaagtcattgccgacttaagccgattgctccgttagtagggcatagtggtcaccccgagttaggtaagcatgccaattgatagtgaacaatctgagtgcctttgaaacctttttattgatgatatttttctcgatttacagaatacatcgtcgttccgagagcttctgggatgtagctaggggtaaaacttcctgaggtgttctatattccatgagttcc

SEQ ID NO: 133412 - DNA, 500 bp, Zea Mays
acggtcgatggattggtgcgtagccaccgaggcgtcacggtggccctgcgtgtgcttcagtcggtggatgctggaggattgttgatgctcataaactttgcctaattggtctggatagtggaacggatgtgtgtcacttgttctcatgttctcatgaccagcaccgatgctacaacaacaagcatgagatagataatgggaatagtgcccacgttaaactctctaaaataattcacgacaactagagtatctctctatgacacccaaattaaatcagtttcttttgttttgtttacagtttttttaccacttgaaatgattgttttaccctcacttttatttctttattctttctttagtatctccattgtatctctcaactctctcctctctctctacggtaatgctcgacacgtcgtcagctcttcagccccttccccctcccttctgcatgtcgacgctgcccacccaagccccgacactcccacatggcgttcgtg

SEQ ID NO: 133413 - DNA, 510 bp, Zea Mays
caatcatcttgttcaaaggaaatcttaaaccagccttaaagaaacttttaaagaccactacttcatcctttcctggcttcggagtagtctcttccccaccaaaacgaaccaactctttctttgcttcattgaaatagcccaaattcaacatcttaggcagatcatcttcggagatggtggatttcctgaaatccaagtggctcggtttacttggcactgcgctgtaatcatcttcagactcagtctcctcaacatcagcttattctgcttcagtggcaggtgcttcctccgaagctaccagccctgagtgcttcatcactttggagattggggcagtttctgcacctttggcttcttctccgtcactcgtaaccctagctgtggaacgcactctagccatctgatgattgaatttcttgttttttgaatgaagttgaaaatttttctttactttgtcgaagctctctcattttacgaagcttgagcaaagtaaatagcttcggttttggt

SEQ ID NO: 133414 - DNA, 349 bp, Zea Mays
gtgactttgtatttgtcgaatgccgaagaccgtcgatgcggtcttttttcgacgtaatttttgcgggggatttttcgcgtgtatattacatggctccgcctcgttaaaaacctcaccccccgggaggaaaagagtgcgggccggaataaaagctgtcttgcaaattacaagggcgagctggccctgaggagtcaaacaaaaaacttgcgaagattgtcaatgttccaagaatgctctaagtcttcgccggatggtgttgtgagcctgtacgcgctgggggacgccttcgtcttgacgatgaaagggccctcccactttggctctagcttgccccgggactctatccgag

SEQ ID NO: 133415 - DNA, 545 bp, Zea Mays
acgtttttatgtatatgtgttgtttgatttggctcgaacatcatatatgaagaacgcagcagcacgtctccctatccctacatccaaacccttcctagtgggccctagcagtgctccccggccccctttgttcatattttgcacaacatgcatagatgttagtagtgctgctgcatgcttttttgtgtagtaatggaatgcatggtcatgaactgaactgaattgatttgcgcttatctttttattgctcctttacgttttttatgtatatgtgttgtttgatttggcaggaacatcatacatgaagaacatagaccgacctccatctaatctaaaacggattataattcagtctactcaagagtgctttagtgtcgacataccccgtgttccggcggaaactgttagacacaaaacaaggcaggctgctgatgaggacgatgactttatgccattatcgaagaagcgtaactttgatgacagtcctccaaaagtcttgaagaagatagttacaaagcagaggaaagtagtggaccccccccccg

SEQ ID NO: 133416 - DNA, 430 bp, Zea Mays
cggactgcgaccatggcgccaccgcatacgctggagcaccgccgcatctggtggctggaggaggaagaaggatggcggatcatcgatctcatcttcaacggtttggattagatctgagtaacgtttcgcgttaaaccaatctggagcgttgatcggagatcgggtggcggctgagcgttccgcgctatttaaaaccttggccgttggatctagatccaaggatctgcgtagcgtaccgattcagggtaattgagatctaatctgggcccttaaattttgatccgacggccagatctggctgataccctttcagctgataaattcgcataagagaccccgcagatattagttatcaacccgccgtccctcgcaactgtacgctgagtcttaagaagttttgcaccgaggaccccgctcttttcagaattca

SEQ ID NO: 133417 - DNA, 436 bp, Zea Mays
cctcgatttatcttggaattgtgagtggatatttaataagggatgtaaccgagagtgacctcgagacttctagtgtctgagttcagtgagctcgatgcttatcccccctcgacgacctcccagtctgcctgttatcgatttgagtgttgttgcctagctgtgcccttgatcacgcgtggtgcttgtgctctgaagccatgtgtccaggtccaagcagctgctggcaccagcacgtcgatctctagcgccaggttcagtgccttcactctcgtactcaccccgcgcgcgcagtatatcctgcctgagtccatcgcacgctatcttctccgtgtctggtggtcgcaccgtcatctatcagtgctcggcccatacaccgctcgactcctcctttggcgacgtgtttcctcctatctcgtcgtggctgcttcactctctg

SEQ ID NO: 133418 - DNA, 552 bp, Zea Mays
cccgccgatctcaagtttggggcgccaaggttgatcttcgaaagcatagcagaagctgaggccaccaggcaggaggacattgatgtacttgaagaagaacggctaaacgtggtaatccaatcagcacggtaccagcagactctaaggcgctatcacgacaaggttgtgcgacaacgatccttctcagtaggagatctcgtcctccgccgaattctaacaagggagggacggcacaagttatcgcccttatgggaaggaccattcatggtagcagaagtcactcgacccggatcgtatcgtctcactcggatggatggcacagaagttgggaactcctggaacatagaacacctcagaaagttttatccctagctgtatttcaaaactgctgggacgacgatgtattctgtaaagtggaaatatgtcatcaataaaaaagaggtcgtttacgattgacttgcacacttacttaactcagggtgaccactatgccctgctaacggagcaatcgacttaagtcgacaacgacttaaggcggtgcaacatgctcac

SEQ ID NO: 133419 - DNA, 756 bp, Zea Mays
aaggaagtgagacccacctccccgcacctccagaactacccttagatttagcccaagttctagccaaccaaacccgactcatcgaggtcctcactagaagtttggaaaatcaacgtccgaatggtggaagaccacaagaccggatgggagatttcctgaggctcaagcctcccacgtttgccggatctagcaatcccctcgatgctgacgattggttgcgcacaattaaaaggaagctggaagccatcagatgcccggaaaatcagcgtgttcaactggctgctcatcaactttccggaatgaccttagcctagtgggataccttcaatgttaccatcagagatgctacctgggcagagtttgaaacggctttctgggagcaccatgtgccccaagggatcgttcagatcaaggaagatgaattccgggaactgactcaagacgaaagatctgtcagtgagtacatgcacaaattcacagagttggcccgctacgcgtcgaatgatgtcagcatcgaagtcaagaagatggcccgctttcttaaggggctcagaccagaactcaagaccatcctagccagccaagacttcctcagtttctcgcacctctccaacaaagccatgcaagtggaaagggcaaaggaagaagaaaaaggccatctcaagaggaaattccaagtcctccgagctcagcagcaagaccggcaccagaaaactcgatcctttggatttccacccaagggaccaagcttcagta

SEQ ID NO: 133420 - DNA, 428 bp, Zea Mays
aggggcacctcaaaatggacttgtcattcgtcatcaggaatctccccaagcgaagcaaccaaagcactaacttcttcagcagagggtcgcattctaaggcccaaattgccatcagtcacaggtggatttgacacgaaaagggtgaaggctttggcaggaggcaagttccaggccgagtacgccaccggagcaccaacattggacaccttgcccctgagaatcatttccagtcggctcaccaagtccgcagaagggattctcctgttggtaacccgagttgagtcggctagccctcgatacagataagctgggtataccctatctttcagtggctgaatgttcttgaaaacgaagtcagcgaccacagcttcagcagttagacctctctctttcagcagtccaacttcagctagcaacacacccgcttc

SEQ ID NO: 133421 - DNA, 602 bp, Zea Mays
atttctagcatgatcagacgcatgatacatccgcttcattccacgtgaaggtcaatccatgtgggggcgaatttgaaactcactattcgtagtccaccacgcgcgcctggagtttctgcaaacttcggtcaaaaatccaagcgcaatggtttcaaccttcaaagcatcccaccgaattcgccgaatctggcccgatccgtttcgtcagggtcgcagctttcatgtgttcctgttgttagttggcgtcgatgccggcctgacccagatgctgctgtggcggcgcccttcccttccacgaagtttcgcaggggtctccttcatttcagacttcagaggcacagagaacttgggtggcgttggaaacttgccggcatgacaccgacgtgcccggaacggtccaagccggggtagcctttgctagcagtagcactagcactagcagtccccccgcacgggctcggaagctgtcaggaagctatagcctgggccgctggtgaggtgtacacggccgcacctactgctctctggagtctggatgcagcgtcatggatccgtagctgtgaggtgaaaggcacatgataaacgacgccctgacgggcagc

SEQ ID NO: 133422 - DNA, 368 bp, Zea Mays
ggctggcaaagggccttcactgaccacagtaggcacgggtgcagcagaggagccttcaccggcatccgagggcagcaccgggttgacctcagcctcgggcagcgcgccgaccagatctccaaggtccacgacatcctcgacacgcgccatctgcagcaacaccacactcattcagcaaaaccacatgtacccacacataaccacacaaaacaaaagataacctttacctgctctctcgcccggtcagactgctccctaaccgcctcccgaccctgcggaccccacatcctatcgaagagtgcccccgctgactgctttaccacagggtcttcgaccttgaaaatttcacgttcaaagttctcgtctga

SEQ ID NO: 133423 - DNA, 359 bp, Zea Mays
gttcgtgaacagatcggcggcaaaaacactatctccctcccccgcggcgaaccacggcgaacagagccgcggcgcccgaccaccctccggcgaggacaaccgccgaccccagagcgccaacctcaatcataaccgcctacacgtacagggaaatgtacataaccgaataggggaaaactcaccagctctcgacgcaccgagaggtctgtccgtggcgcacggcggaggaggaattcacggcgacgaattaagcttgcgcaggacaccggcgggggaaaattgacggcggccgaagcttcgccgcaccaagcaggtacccaggttctagcgcagaggaccagtcgcggtgtgggtgaggg

SEQ ID NO: 133424 - DNA, 985 bp, Zea Mays
ctgcatcctgtctagctgagtccgctgacctgacgagtagacaaactccaagcaagcagcgcgagcgcgagggatggccgcccgccgccaccgccagattggttcagtggcggacccccgacggatccctcctgttccccactcgcagtcgcagacaaggcggcttgctttgcttgcttcgtgcctcttcctcgtcgcctaggccgcctccttcactcttcgttctgctccatccatccccaatccatccaccattccgcccgtctgtctctacttgattcctcttgccggggttccttggcctgcctatccttgctaatcgggcgggccagtccgccgcctgcagatctgaacgctgccctcccctgctccccgagcgcggcgaggatcgccgctccacggacgcaagaacaagtgcccttgatcttttccccccatttgattgattcatccagtgctgctggtactggtacccagcaacagttttcggtaggaaactactatggcaacttctccaggcaagttcgtttcgttcaaccagagaggattcaaatggttttcatccatccttctttcgtagggagtggaatcccgcttgggaaagtctctcgtccaaatggcatctgatccttgttcctgctctgctttcctctgcttcaggtacatacagatggtgctagtgagggagaggtccgcgagccgtcgccgccatttcggaccaaccaaggcggcgctagtatgcttctgcttgctttccttctacctggacactactgcaatgccgtcaacgtcattgtaaaccgtcagtgctagccacatggtaacgctagactgcgaaagttgcgatctttttctcgcatctcctcggcaacttgccaatttggtcagcatcgtcatcaccaccaccatcagcggcgcagctgaactgacgatgctttgcccgagatccggatgctcatccagatcgagacgccattcatctccc

SEQ ID NO: 133425 - DNA, 304 bp, Zea Mays
cttttataatcatcaagaagtgattctatgtttaaccaaatcaaacaattcagttttcgaaatctgttctaacagtggacagaacacaacaaccagtttgtaaaattcataactcttaaactgtcaggcctatggttgtgaaattttaacacaaccaagataagaaaagcatctacaactttcttataattgacaaggactgattctaaactgaacttaagcaaacaatgcgacctctgaaatctgtacaggaagtggacagattcagttactaaacttgcgaaaagcataacttctaaacaat

SEQ ID NO: 133426 - DNA, 698 bp, Zea Mays
agctgggcatgtggcagagagattcgagaggtcgctcagcgttgctgcctactcacacgtcttgcgcggctgaccgacgaaaacgatagatttccgtgtagctatgcatgccatccttaaccacgggctgattcaggcatcgacgacaaaaatggaaccagatacatcatctctcctatatcttcaaatttctttggggttttaaaatgtgtattggactgtttgcgatgccaattgtacagatcaagacgcgtattggactaagtttgccgatgtcatttgtatagattcatgaggcgtgttgacgccgctggctgggctggaccacatccatgcacacaaccatgcgagtagtctggtgacggccctcattgcaccctcccattcatttctctgcagcagcgacgttcatgcatggtgatcaaggaagaggtttcttctttcctgattttcctcttacacaaaactatttgttcaatgtattttcctataggatctgtgtaccttctttaggctttcaggtagtaagaattattgggtcggcatttttaggcttcgttaccaggtgacccctcttccttctgctttcctttttgtgttcgatggttttgatttttttttcccctgtgaccccggccccttccatttcattgtccctgtaagatcctatagctctgattaccatcaactaactgaac

SEQ ID NO: 133427 - DNA, 1132 bp, Zea Mays
gctggggcccaggggcacgtgctgaattacaacctggctaggactaggtcgggacctccacctcgctgagttgctcagtagggactaggtcgggacatccgcctcgttgagttgcttgatagggacttggtcgagacctccacctcgttgagttgcttagtagggacctagtcgtcaggtgggccgttaagagtcatgggactactacaggtacctggttcccgggcgcctgtcaccatgtcaaacggggcttaaggggcaagctataccaaccaatacaatttacaaggaagggtcattggattagacactgcacccgaccaccagggcgcggtattcctagggttgtattactttagccattacagaggtgagaatgtgcaagtctgactaagcgagaggttcgattgacaaaaatgggagtatgtatgtcagagcgcgtatgtaatccaccacgacctattggtggacagtggctcaaccacttcgtagctattaagtcaacaaaggacactggataaaccgctgtaggacatgactgagtgtaacggcgggctccagggtggcctaggtgtgcctacagtaccctgacggaggaagaaggcgtcatccatggcgttccttgactgatgggaacccaagaggacaacgaactacacgacaatgcgtgacctttattctcttgaccgttaggctcttgtaacagtgttggtctttgaccttggcctataaaggaagggaaagggacacgattccgaggacaagcaatcacacacacacatcactagcacaagtcaaagcacatagcacttataaccgcacacatattcacacactagagacttgggagctcgatccctctctcgcccgtttgtaaccactactacaaaccagtgcaaggtaacatgagcaggtcaactggatttatggatgttatgcccaaactagaataaacccttgtgtcctctttgtacaccatccgctcgaagacacacacagcacaataattactagccagtggtttcgaaacaccaacagttgacacgccaggcatgagcatttttgcccgtctcgcaacatgtttccatcacacaatagcggatgaccaactagttagctgggtgcaacaccc

SEQ ID NO: 133428 - DNA, 719 bp, Zea Mays
caagagcagggtcaatggcaggaggggcagcaggggtagcactagaactaccagcctcatgatcatgtgagcgtggaggcataggaggcggaggcggaggtggaaccccaaagtcatcatcatcatcatggactgctgcgtcctgagtctcaaactggtgaaaagtggtatcctcggcctgagtatcaatcactagagcaggtgccggcacaggatcctctggagctagacggtacgacccagtgatgaggcgagaggcctcaagagtaccctggaactatgggggccgaatcagctgagcaaagatgtgacacagatagtgagcataaggcagttgtcgacgagcacgcagaccatccagtatggtgtcctcgatctcacaaatgagaaaatccatgacatcaaactctgagtgagaaactagggcaccaaggagccaaagttgaatatgagtggcagcctccctgtaacccatccatggcagaagcgttcgtctcatgagttgatatagaaacctggccgctgtggtgaagtctgccggagaacgtcgcgacccatctgagaagggtggtcggaacaaagccgcgacgtgagttgtaccaggagcaactccgccgtgagggcgacgaggagggtaagaagtgccatagcacatgctgtgaagacgagtcgatgactcgttgaatccaaacacctgacgaatctgactggcatgtatg

SEQ ID NO: 133429 - DNA, 670 bp, Zea Mays
tgaagcagcaatgcgacatgaaaaggttcaaatacaactcaagtcaacctttttttctcatttatgattaattgatactttgttttactaatatttctttttcctttcatcacagagagacatatgaagctatgagggcatcctatacacaaaaaggaaggtcaaggcattccaaaactgaaacatactctgcagaacaactgcaaagcgctctcgctgagtaccaagaagacgcagcgctgttcatatttcgcttaaagtcattgaggcaagggcaattccatagccttttaacacaggcttctcggcatcatgccgctcaggtaggttatttcttcctgcataacgctgtcagttggcctagcgattgggtgaattaatacataacctaactgtcacactgtcctttgaactgtagttaagctttttcaggagagggttgaactgtcttgaggcactcgaacctcatgtaaaggcaatagctgagaaacagcacatcgactaccagttcagtggtcttgaggatgatgcatctgacaacgatgattacagctcctaccaggatgattgcagtgacgatggagagctcagtttcgactatgaaataaacgacaaggatcaatattttgttgcttcaagtggttcaatggatgtaagttctatgattcat

SEQ ID NO: 133430 - DNA, 634 bp, Zea Mays
tttgtccaccgacattgaggattccgtccaacggcatgagtcgatgctgcttgttctgttcccgacgagtctggacccatacatttgtactcatacttttgtattgtttctcctcattttggccggtttatagttattactgctgctacagttggagaatgggaatcctaaccctaatcaagttaggagtgtatatatatagctgagtgttgtgagccaaggctcgttacaatggagatatacatagtaacgtaaacaacacattcgcagtctcaactctagcaagtggtggagcacgacagaaaaaataaggtatggctgtgggcaaaactcacacattgcatcaaaagaaaaaattagtacaagaacatcattaaaaagtacctcaaataaagaaaaacttatcgagtgcataccaaattagcaatttaaccaaatataagttgtcatgcaaagtggaagcaagaatgttccagaataacaaacgatcaaatgccatagatttataaaagtttctgtttcatctagagtaacaaacaccatagtggatacctaaacaattgacatgaagaaaattcctcctaaagaaataggtagagacctgagagctttacttcatcacgaggtaagcttg

SEQ ID NO: 133431 - DNA, 408 bp, Zea Mays
gcgcgagctatgacccagcccccgagggtgtccgagcgggttccccttctcatacttctatggatgtccatgtcgggtcttctcctccacactctggttgcatggctgcatcacacgcttcgggtcaggaagtcgccttagaggccgacgcacctgatgctggagttttgatttctgctggtgatgctgaattggtccccaatgatgctctgctgattgcttcagttggtaatccttcgtcaagtcaccaactgacttcccatgatttggggcttccttcgttcttctccaatctccaagtaatttggcttttcccgatctggctatactccgggtgaaatactgtctttgcactcatttgttttccatgtcaggctttggttgacgagatggccggtcaacggagat

SEQ ID NO: 133432 - DNA, 369 bp, Zea Mays
cactaactcaggtgactcacactgtgttgcaatatgcccaagctttcaatgacatgtgccaatatgcgggttaccatgcagactcggatgagaagaagagagatcgcttccggagaggactcaacactatgctccgtgaacacattaataccgtttgggcccaacatctttaatgaactggtcaacctagccatttcacaggaggactgcatcttagcccaccgggcagagaagaagaggaagtcaccaatgacaaggtcctcggccccacctcaaaggttccggattgtctccaacaatcaaagaaggggatcccaacaacaagcagggagatgggtcatcaggccacctcagcagcagcaagcaccc

SEQ ID NO: 133433 - DNA, 302 bp, Zea Mays
ttctgctgcattattggatgctgaaaataacaactgaagggcatatttgagttgttcacctccaggtgcgatgaagaggatccctgcgcctgccccctgtagcttcaacgagccatcgaaatacatctgccatacttctgcagtctccgggttatctggcacttgttgctcggtccactctgatacgaagtcaactagtgcttaagtctttattgcagtgcgaggtcgaaactcgatgtcgtgagctcccagctcgcaggcccacttggctattcttccaatggcttctttgttgtggagaa

SEQ ID NO: 133434 - DNA, 273 bp, Zea Mays
cataactacaagcttttttgttggggaagcatcggccctccttttcgttttatacacatctatctgattccgacgagtgagttgaatcccttgaatctgaatccaagtttatctaccgagtccaagttctcaactaggcccaagtttattgctcttcctcttccaatgtcttggctattgatgtatctcgagtatccctggtgtatattcattacaatagcccctgagtctagctttgaaggagttatctactcaggtaagtcgaactcatta

SEQ ID NO: 133435 - DNA, 370 bp, Zea Mays
cccttgaatttgttgcaggggatgtgccgacatttttattcatcgaatcaactctctggacccatttaagagtttcatacactatcttcacacttgaatgttgttactttaaatgacaatcaattcagcgaaaatattccttcatcactcttccacctcataaatttggttcttttggatcttagctcaaataacctaacaggtattatagaccttgactctttttggaaactacgaaagctcactcaaatgagcctagccgacaacaagctatatatcaaggagggaaaaggaagtaactccacattccgtttgttacccaaactcactgaactaaatctgaagtcatgtggcttgaccgaaattccta

SEQ ID NO: 133436 - DNA, 506 bp, Zea Mays
cacccagagttgtcggagtaaatgctgaaaaggtggtctaccagcgtgtgcatcggaccgtgtacagtaccggtccagtgcacattggattgtctgtcctctgtcctggaaggcgaccgttctgaactgccaaaggcaccataccaagaatagtgagggtatggtgtccgtcggacccttgctacgtcaacatatccgttagagtgaagtatctgttgagatcggttagacgattcgatgcaccatcagaccgatctggtgcttcacctctaaaaacacccaaaacatcctctctgcataaccggtctgatgcacatcgatccggtttgatgccccaactctattttgtccaagtctcggccctccctacaaactcggtttggtgctcactggactggtccaatgctcaccggactagtctagtgcgcttgagggtgttcctatgacttagacaaacatatgtagtgccaattaaactagtctaagtcatggatcatggacttttt

SEQ ID NO: 133437 - DNA, 615 bp, Zea Mays
tgaccaacagggggtgagggttgaccggatgtctgtatctcatatagctgagtctgacttgattcttctgtttgggtatccatgtgtttcagggcttttgcttgaggtggactaatcatgtatccaaacatttttctattccttttgttgttcttcattccattcattgaatatctcggtgactcatttttctcgttcatagttgttaaggtaggaatattgtcattggcatcacctagtttattggggttcatcatctggttagagagtaaaagagatagtgagacaagtttacataataggcttgtatgacattaagataaagagctaacacaacgttttgatttccaatataagattagttaaggaacaaggatggtttcagatttctactggtttcatcatactttgagagtttacaggtgttatattccttaacaaagatcttttgaaccttatagattttagagcatgatatccaaatcatctttctgatccaacatttttttctttgagcacaatttgagagaaagacttgagcgggactttagggcaactagagtatcatactgtttgcatataacagatgacaccatactttattttctttataaa

SEQ ID NO: 133438 - DNA, 309 bp, Zea Mays
acactagcggccttcggtgactcctcccccttctcaccgcgagcgcttccccatccaaatttgcactcctcgcagccatcctctataaattgatgcctcggcctgttccatctacttgttacgaacctagagcatcagcccttgcctccgatcattcaccatagcgccccaatttcgttttccccccaaatccactctccacgccaccgaaagtcacctcatcgtggtcagccgtttacaggtccgctctcgccctccttatccttgtttcaacacccttgcacgctagtgatgcttgtcggctcaacc

SEQ ID NO: 133439 - DNA, 272 bp, Zea Mays
aattcgatttttctctcgggtggcatgcccgttagttcctcgggaaacacatctggaaagtacgacacaaccctgatagcctcgagcgggttggcctccttgctatcaaccgaaatctggtgacaatcacctttcgctgttttaggcatccttagctcagccactaccttctctccgggcggggacttaaatgttacggttctcttgtcacagctaacactcgcctcatacttcattaaccaattcatccctaggatgacatctaccccagg

SEQ ID NO: 133440 - DNA, 1165 bp, Zea Mays
ggcggacggcttatctcggccgagcgctttaccgcatccttgaggacgccttaataactctgctcctaaatattatttgttttacaatatttggtttgctagtgaaatacatggcaaactgtaggcagaaagcacttcacttaatgcacacacaaactactgttgactgtccaaaggatcatcaattatgtcaatctatattacccattgcatttttatattatgaaaaaacagtattacacatagtaaccctacagtttctcccctaaaaaactcgacccttgggggtgaaaactcctatagcctaaggagtcgaactcaagacatgagaaatattatttagacacctaaccaactcagctataaactctttcacaacaatttcttacatagctctagttacatatttgtattgctacctgtatacaattgtaagagcaactaagcaatagcccacaatcaggacctctatttttgattattgaaggttctcctactttttggtgccctgatttctatgttccgctatagtaaaacctctaaatcaaagcacctacttttctaggacatatgtgtacgtgatatagggaggggttgttgggagcccaaggcttccaatagttacagaaagtcccaaccaattcgtgcttctagtcgcaccagccatccctgaccccactaggagcaccgatgtgtgtttttggttcaatcgggtgggaatcggcccgatcggcatactggtggccgcaccgccaggtttgagcgttaaatactctcaagtttaagtgtaaatagtgtcagatatagcgtaaatattggcacaacggtcaacgtgatgttgcttacgacccaaacataacagacgtgtatgaatccaggtggttaccgtaaatacagagccaacgtgagagacgtggaaatctctgagacgttgtatccatgatcgtaaaactcccaagtttgagcgtaaatagtattagaaatagcgtaaatgttgttacaatgatcggcgtgatgtcacgtccatgccaacaagatgagttggttgtgtattctgatgcggattgggctggatgtcccgacactcgaaagtctacctcaggatatgtggtgttccttagtgactatcatctcatggtcatccaagcgtcaaaacagtctcaca

SEQ ID NO: 133441 - DNA, 421 bp, Zea Mays
aactattgctcgcatttgtatgaggggtcgttggttcgaatccctttgaggctatttgtgttttttaattttagctagacgttggctttacggagaatgagaatggaaatgggctttgcggggaggggagaatgagaaaggtaaaataagaaatgagaatgacagaacaagaaatgagaatgacagaacaagtaatgctagaatgatggtagaacacgaaataacattacagtcttaaatgcggctgattggttgagtgcctcacgcgggctagcctcctgcgcacgtggctcaccagcgattgtcgcccgcaccatctccacgcatgcaggcgagtagtgaaaaaaggcataacctgcacgttcacatgctagggctagaccgatcaggatcccgtgcttggtcaaagcacgcagagaac

SEQ ID NO: 133442 - DNA, 312 bp, Zea Mays
ctcagcaccactccggcgaggaattagttcatgatccggccccgcaattcctaatctgatcggtcgtattcaatccctaaggtgcggcagatgacttgggtgacttacccaaggtgaagacgaccgcaaggatgatgttccacggcgagggcggttcgctgctcccacagaggccggtgatggctgtgcggcaaactttggggacgaaatcacaccacgcagtccgcccatgcgccaccagtgaaccggaccggcctatggaacgaggtcaacggcaagcaccgtcgtttatccgtggcggcgagccttcac

SEQ ID NO: 133443 - DNA, 341 bp, Zea Mays
tgatgataaaagaatagttaatacgttagacatctttatattgtgttgtttttggatgaactcatggattttattacagaaaaaatcggcaagaaggatgctggaggaaagaagcaatcagatcaggaaaatggctagtgagttcttcagtcgagcttggggatggtctccagttgacaggaggctgacgcagtgatcggttgagcgggggatcttttttggcgatgatgcttctttctgttcttgaacctagagactcttttggctattatatcaggatgtcggtctgtaataatgtcttggttaaaccccctttcttgtcttagtcgtcttggtttggc

SEQ ID NO: 133444 - DNA, 305 bp, Zea Mays
gggagttggacctttttggagcccctccttccatgaacctcacagatgaacattctctcgaggctggcagtggagcggccaaggacgaagataattagagtagtgtagtacaagtagtgtccatatgtaataaggaagttgagttgtactaatgagtttgtataattattaccagttcagcataatgtaataaaggtggtgtacttttggtatgtaataattcaggatgtttttcttcctcagatgccatcaagaactcgtgctcatgatggggcaggaacttcccgcggcggggaggaaactcc

SEQ ID NO: 133445 - DNA, 464 bp, Zea Mays
atttggtacaattgatccatggtgagactcataacaagatttaaatctaaatttgaaaatcaagagaatgaaatagggaaaggaaaaggaaaggaaagaaacgcttaatgggccaaaacctcacttttcggcccacctgatctcacctatgcgcaggccatccgcgtccgttcgccgacaggtgggcccgcctggttagtcacgcgcatgcgctcggttcagcgattcgacgtcgacaccctgaccccactctggcttaccgtgttcgcttgcacatgggacccactggccattgattcagtccacgctcgcacgatccgttgtctccatgacgcgcgggcctacctggtcagagtcttctcccccaaatccgtgtcgggactcaactaatccacgaaattctgggcgccgttgtgatcgtgctcacctggtcatggccttaagctagctgccgtgcaccttct

SEQ ID NO: 133446 - DNA, 451 bp, Zea Mays
cagcatggtagtagttgggacaagagtctaccttatgctgagttctcatatactagttaacaggccagtctgaagatgtcaccgttcgagactctgtatgacaggaaatacatgacttctctatttttggaccagactagaggaagacagttccttggacctgaacttattcaagaggtagaagaacaagtccgtataattcgggagaatttgagggtagcttagaccaggcaaaggagctatgctgataatagaagaagaccactcgaatttgaggaaggagattatgtgtacctcaaggtgccaccacttcgtggaacgaggagatttaaagtcaaaggaaagttatccccttgctttattggacccttcttaatcttaaagcgagtgggagaggtggcatatcaattggagttaccggatcatcttgtgaaagttcatgatgtttttc

SEQ ID NO: 133447 - DNA, 300 bp, Zea Mays
ttcttcctaagttctcaacctcacttgtgatattgctcgtagtataattcctatcttggaagagcaatcaaatgaagaggaatttttatctcttctttactcaaactttgttttaattttctctaacctcattttagatcatatttgtgtttttaagttaattttataggatcacctatgcatcccctctaggtgctcttagttggtatcggagttgatttcttccataaggactaaccactcgaacagatggacttcaaaggcaaggggaaggtgaccgatgagaaggatatggtcccc

SEQ ID NO: 133448 - DNA, 528 bp, Zea Mays
tggaaggcgctgcaggattggtcgtaggaggcacagggctggaaggagttgagctgtgtgtcggaccccgtcctgcaaaggagttagtatatgtctacgatcgtcgtcccagcacttcacgttcagctttgcaagcgtattcaaaataatccttataatcaagtacatcctgaattttcctattcaaaccaccatgaaaacgtgccatagcagcgtcatccgattctaccaaaccacaacgtatcatgcccttttgttactcccggtaatattactcaacagattgtgaaccttgttgaaaacgctgcattttgttaagcaaatcacgggcataataggaaggaacaaatctatggcgcatggcagtttttaattgagtccaagtaatgacactgttaacgggaatgttttgtttatactcacgccaccaaattaaagcaaaatcagtaaattcactaatggcaaccttaacttgggtattagcaggaatatcatggcatgaaaatttctgttttacctctaattccc

SEQ ID NO: 133449 - DNA, 332 bp, Zea Mays
ctcctgttaagtaagagtcaattgcgttaagagattattatacatatattgtcttggattgtgataataataggcggaccgacctgtatgctgtgtagcggactgtgtcgttgctctagctagccgacttgttagacgacttgggttaagctcgtagtcacgatgaattgtgtattgtagtctatatgcgcatggttatggtcacggatgaaaagtattagtgctcatgtggtgtctaaattaaaatgcaaactattggtgaaaagcgcttcgatattgattgttatagagaatgcattgttaattgagtatggtacttttagtgcgcgaaa

SEQ ID NO: 133450 - DNA, 458 bp, Zea Mays
gtggtgacaggtacgatttcagttgattagtttgtggcccatgctctttttgactctagcgctagctattcgtttgtttcagagaattttgtgtcgcgggctggtcattcggtgcagaggttgggtcacccaattatggttagttctgctaatggctccattagtagttgttcagtttgttagggttgttctgttattcttgctgatgaggtcttttcagctaatcttgttgtaatttccctgggggcatttgatgttatcttgggtatggattggttatctcagtatcgcgcggttatatcctgtttttggaagacagcgttattgcaggcgtcgtcgggtagggaggtggtattcttgggaagttctccaaagttcacgttatccttgttgtcgcaattgcttctggatcgtcggtcaaggaagtcgggaatctttttctccatggtggtggaggg

SEQ ID NO: 133451 - DNA, 4783 bp, Zea Mays
ttcttaaccatgcaagagcataagtagataaactaatgtaatctatatattccttttataagtttctaataataagaccattttcaagagtttccaaaacccactctaatcttgatttcttttggcaagattgaaaaaaccactctccaacgactatttatctcaactcctaatcttactgcacttcggaaaatcgatcgaaaggcgcggaaatataagcgttcttatcagtcttcaactatggaggtggaaagatacggggaagcttaaagagtaaggacagggttcccaatgcaaagtttaatgagagaaagaaagtataaaagtgagtggagggatctaaaaatggtcatggatttctaatgcaaaattgctttctctttttaggagcgagattttgaacccaacaaacatgcttccaacttttgtttaggcacttgggagttgagaaactcattgatttactaatttaactaatgtagatgctctaataaagtctcctgcaatattattagataaaatatggtgattccttgtcacttgtggacgagaataatttattcattacatatatatcagtaactagtggtatagctatagcagtgggaaattacggtcatgtcgaccagacagtgcgtacctttgatgccaatcggttcatatgaccagtcccgaagatgacgcgcagccaaataaaaagaacggagtgctgtaaacccatagaccaatcagtcgcagatcatctgcaccagggaattcgagggtgcatcaggcgtcggtgcctcctcagctgatccgtgttgattgccagtggtggagccagcagcattcgggagggcattaggcgacggtggattcgagggtgcatcatcaggcgtcgatggtccttgttcaatgtcatccctgaattctgcagtggatcttgcggcgggtgaatcaggcattgccgcattggtggttgcccagctgctccctgatggatatacagtggcaggctttgggtgcactgcaagaacttagcttgaaagtcccagaacatgtgattcaggttctgggcgcactgctgtagcttagctacaaggtcccaaaacttcagatccagatcctgagcgcacttctgcagcttctctccaaggtccctgagcttctgatactggttctgggcgcgcgcactgcaacagcttttgcccgaacgagctacgcttccagtaggtgatccaatcgccaatagcttgcagcgcccagatgcaaatagtagtgctgatcaactttttgtcaccaccgatgactttcttctcgattcagcgatattcaataacatccaggacgtcttccaaatcgcacagagcagacttgagatccttgtccagctcgacgaggatcttcagtatcccttatcctcatctttggctcctctcagaattctttgctccgttacatctcctagtatcatgtcacaccccgtggccacccgtggtgaggaccgggacgtgaggatctcgacaagaggacaatctcacctagaccgtccttcacgaggaagaagacgactatttttttgtattttctttcttgccttcccccatacagactcttggaacttatacccagcatctggtcttccacctgggtcccatgggtgggtggcccgcttgtcagctaaagccctggacatgttgctattcatggatgttacatttccaccctcacaaaatgttgcttgtccccaagcaaccgcatgaccttgaattgtatctcgatgactaaagatcccagaaattcctggatcccactgtctgactatgtatgtcttgagttgcaacaaacatttgcttgggctgccaccattgagtctccaagacagaatcggttcacatattagatcagtgtcacaccatggtctcccgagcttttggtcaggaagcaacaatagttcatcgacttggtcaagaatgttgtatagctcttcagcagcaaatctctgggccttagaacagaagtcatcaccaccctatatagttttctgcgaccaagctgcaggaatagagaacaagcactgatatgctgcaatacatcattgacacccaggactgtagcatgcatttccattttaaaacacgactttaacctgtgttgccatatatcctttccacccccacaaatggttgcttgtccccaaacaaccgcatgaccatgaattgtatcttggtgactaaagatcccagaaattccatgactgttgggccaagtagtacctcatgataaagaagaaactagctttcagcataacataaacagattgtatgaacaaactagaatcagcaccaccctatcagttctgcagcagggcacctacagtttgatttgtaaaattctactggacctagatcccactgtatcaatgttatcatgtaaagctcaagctgctcactctctcctggatgaaaatcaccaacctggaaaagcatgttatctatttcctcactagcaagtgtggacacattggcatgtgagatctcaggtagccaacaagtatctctccaactagcaggttccaattctccgatacaaatgcatgtgttcttgtatatctgataagtatcagtaaaggatacaaacttggaagctttataattgaactgcaagttagtagcaacaagtatagattgtctgttgagcttgcagcttcctggactgaaaccattgattctccatgactgtattgctaattctatggaggtaaagacattgtggtgccaagggtgtaattctgcaaaaagaacctgcagacccattgctccttggcatcccccataaatgatcaaggtgacgttgccaaaattcaactcctggccagcagccaatacatcgaaaatgtcatttacaggcactgtgccttgttcattcagatcctccccattgcatgattgcagcagcacaaaaggattcctgaaccatttaaggataactgaatcccattgtttctcaaacatcctatatatctcaagctgttgctgctcatgggccatagtacctttgcaccaaattcctggatcccattggcttatagaaatgtatggttttttgtactgcgtcttcagcagataagcatcgatgactagcgcatatttggaaggttgatcactgatctgcatgcttgaatcaatgctgaaagcgaggttgccaacatcggtgagaacatcttccaggaccatctcagcaataagcgtgcacatttcataagcaaagtgcttcctgtcccatgccacttgctgcaataacgagccatgtgtctcaggtacagatggcaagtcctcattcatgccaaggctggacgggctggccagcatctcatccacctgatccataccaaggcccaagagaaaaggagtgtctctgtcctggttgagctcatcatctttacaacatgccagtaactgtaataagccaccatgagtatcgaggtcagataacatgtcctcgtcccacacaacatcacttcgcctagaatccgcaccaatcaccaacatagagaaatggtcattgacatgaatgagcaagttgttgatgtctggttcaatattgactttcctctcatcatagtaatctccactttgagccaatttctccttgccctgcatctggttatccattgcttcagcatggtgctgcaataggccatgtgagtcaaagccatgatgtgtctcctcatcccagatgacatccgtgcaatgcatttcatcgaatagtgccccttcatcatcccagaccacctctgtaaatgacatatcatcgaacatgttgtgtgccaggttactggcttgccttagcatcaacaaattaacaccgcgctcacccaaaatctgctcaactagtgattgtagaggatgaaagcagccaatcacgatctgagcgctacgagcgggatgcagagccactcgagctccacaatctcccgtagctgccgcacacacgcaccaaatcccgtgttgccgccagtggttggagtctcagagaaagggaacccgtcaccagtgccgtgactgagagcactcgtcaccagatatcccaaacagtggcgtcgtgggcacgccgcctgccgaaggggatctgaggaagaaagttgagggagcacacaggcaacttgatggagtcgccgccaccagcaccgccaaatcgagacctcccgtcagcccagcaccgccaaatccgccgcaaccaccgccgtcgacaccgcctcgatgaaggagttgccgggggaaagggaagccatcgcggaacaaaacggaactcgagccaagggccgctggagcgccaccgttagctgaaggaggtaggtcgcgccggatcaatgaggtcaccacgccggaccgctggatccgccgtcgacgcgccaacaatcgtcgtcgccaccccgatagctagcgcagagaagagctggtggccgtccgtcgccccccacgccgaggatacaccgtctctggtaccaactgtcacaccccgtcgccaccggtggtgaggaccgggacgtgaggatctcgacaagaggacaatctcacctagaccgtccttcacgaggaagaagacgactatttttttttttccttttgtattttctttcttgccttccccatacagactcttggaacttatggaataaaaattgtgtgctggactccagcacaacgccgcgcgtggtggacctgcgccgattcgcgacgcgtggactgccttcacatcggacgcccgcctcctccgtagtctcggttctgctcgcttcgct

SEQ ID NO: 133452 - DNA, 515 bp, Zea Mays
tgacagaattaaccaaacctttttttcttttttccttttcacagcaaaattggttggttgaaagaaaaggtaacatttaatcaagtggatcaagattactaaacccaaagagaaagggggtttatgggtcaaagatttgagaagaatgaatattagtctcctttgcaagtggtgatggaaaatgggaagggaatttgataggaaactgtacacaattaaagaagcgagttgtttctcatcttaagcaaaataataaaaaaatctctcctgtgtggaatgatctactgaagattaggcatatatatctaaaaggcagagctactgcagtaggtattaggtaatggcagagctaccagtttttggaagaataagtgccacctatcagatcatggagagagaacatgtggttttattttttgtctaacaaaattcccatggaactgtgatctctgaatgttggcagaatcgttagctcttttaattgttgagatcagagttcagaatatttgaaaacc

SEQ ID NO: 133453 - DNA, 750 bp, Zea Mays
aattgaagctgcctcggccatcccttgatgtcctggcgtacggtgtgctataggctctgttgattgggcgcgtgatcaactggaatcaccggaattcgtcgccagtgacggaggttcaccgtgccgcgtggacagcttcgccttgcctcctaaaccataggtaatgccccttggatcgattcgacaccttctctgcattgcttagcacctagttacgctttgaatcaagccctggcatgataattggatgctccgcggtcatggcgccgccgtgggtagggccggcgtgctgccgtattccggctgggagaagaagacatacttctagccgtggatccatgaaacagcaatctagattagatcagggttcaaactaaatgtgcaccgtccgaccgtacacgagtggctaagattagttggaggataccgcttcgcccgatcgcgatctggggcgttgatcttccatcaggcggtcggcgggcatcacacgactcattaaatgtggaccgttggatctagatctagggtccagcgtagtttaccgactcacctacgccgcgatctgatctcgtgcgtccgatttggatcgggcgggcacaggtcagcccataccccttcgcgggcaaagtttcaaatagaccccttggttttcttcaaaagaacccgccgtcccccgcggggtagatctgtgtcttggggaaatatacgaattagcccctggtctttcgcggaatagtgtccccagtccaa

SEQ ID NO: 133454 - DNA, 530 bp, Zea Mays
cccggggtcgaaacgccgacacttcttgttttggtgcttggggtgatttgggtggtggatgtttggctgatgcgggtgcggaggcgggagtgggggtggtacgacttgtacctcctggtggtgttggtatgcgtggttaggtggatgctgagcggggccatgattgtatggttgtgggaggtggtgttgatatgtgtgcgcgacaactcttgggttgtcggctggttgtgcccgagacatcctgtccctggtggccttcgttttcgggcagtccctcgatgggtgcgtacagtcttcgttgtgaaataggcaataaaatttgcgcggctgctgcgcccgtcctcggccccgaccacgagtgccattgccgcggccctgggggggataatcttgacagcgaggggactcaccggcggggtgctggttggcaatgttatgcacctgctgctgactgcggctgtcccgaccggagtctgactgcgaaggtcttgtccatgttcggctggactgcggagggtccttgggtttcc

SEQ ID NO: 133455 - DNA, 1177 bp, Zea Mays
gtcccaacttctcttcgtcgtgccttggctgatccaaactggcatgctgccatgaccgaagagttcgatgctttacaatcaaatgagacatgggatcttgtccctcgtccatctggcgtcaatattgtcactggaaagtgggtctaccgtcacaagctgcgtccagatggctctctcgagcgttacaaggctcgttgggttcttcgaggattcacccaacgtcctggtattgattttgatgaaacttttagcccagtcgtgaagcctgtcactattcgcaccgtgctctcactagctctctcacgtgactggcctattcatcaacttgatgtgaaaaatgcttttttacatggaactttgtctgagacagtatattgtgtgcaaccctctggttttgcagattctactcacccagattatgtctgtcgccttaacaaatccctctacggattaaagcaggctcctcgggcttggtacagtcggtttgcatctcacatttcttctctcgggtttattgaggcaaaatcagatacctccttgttcatcttctctcgaggctcagatatggcttacctgcttttatatgtggatgacattattctaacagcaacaaactatagcttacttcagcgcattatcacagctttacagactgaatttgctatgaaagatttaggtaaccttcatcatttcttgggtatctcggtaactcgtcaacccagctctttatttctgtctcagaagcattacattcttgatatactggatcgtgctggcatgacagattgcaaaccttgcaacacacctattgatacttcatccaaactctctagtgatggacctcgaatatcagacccgacacaatatcgcagtttggctggtgctcttcagtatctcgtgttcacaagaccagatattgcttatgctgtgcaacaggcctgtctcttcatgcatgatccccgcgagcctcatctagccttggtgaagcgtatattgcgatatcttcgtggtactttggactatggattcttaattcacaagtcttcattggacaatttaattgtttacacagatgctgattgggcaggttgtcctgacacacggaagtccacctctgggtatgccgtttttcttggagataatctattgtcgtggtcttccaaaaggcagccaactg

SEQ ID NO: 133456 - DNA, 400 bp, Zea Mays
ggtcagcaaggctcggagagacgtggcctcacgtttcaaccggggagcgcgctacgtctacgcgtaccactgaaaaaatcaaccaaagcttgcgccctccgatgatcctgctccaagagtagtagtggcctttctaagcttcacatggccttgctagcacacagccccaacactgtgtcgaaaaactatggtgagcgcatgtgtcacactcgcttggaaaacgcttaaactatgccgccgtcgtcgtccagcctccagcagggtcagcttcagcctcagcagccggccgtgaggaaccctgcaatctctgagagagagaagaagaagagacaaacggacgtgcggcgcagtcgtgcagcacgtagacagacacccacagcgcccaccaacctactcgatc

SEQ ID NO: 133457 - DNA, 390 bp, Zea Mays
taatgttcgaaccgtaaacataaaactctaaaaaattagcatgtaatagaagcatcagagcttattacataccttctgcgtgcccatggagttaacacaccttgtctataaacccatgcacagggaaacaggataggatttcgtccaaaatcaagaagtggtccctgcagtacaatcatgtcagttgcaaccacagtaggctggcaggagcagaaatgatgtcccaaccaacagcatcagtatctaaccgtataacatgcttccgcaaatggatggaggaaagcagcttcttgcataagctcatgggatgcctccacaaggtcagtctgcaattcagataaattcccgtgcttctgcaatagagcaagccctacaacatgtacaatatag

SEQ ID NO: 133458 - DNA, 690 bp, Zea Mays
ttcccagatttgatatagttgttatggccacttgacgatatatataaatatatgatgccacacaacacaatcaaacaaaatatagagcgaaaacaaaattgtttacgaaggttgcgtataatgtgactaccagaccttgaataacccaccacaatccacgcgagtacaagctctagcatatctggtgtcaatgtgtgtgcggccatcagggctatgacaacacaacaagccctcgcaaaaaatgcacagacgcagttttggctcgatagtcggggtacaagataagtccatgcaacatgcgtaatagacacaattgtggctcagtggtcgcaatagacagacagtgactacagggcctgcaaaaaatgcgtgtctcggcgatggcggtccgactcaacatgagcggttcgatttagcgagactgcgacatagcaatcacatggcgtagccaagttcgtacgacacaaataatgtgtcatgttgtcagggcgcaaccaacgcttagttaatgccataactcagccaattaatgacgtaacatggtcaacgtgtcagagtacccactatacaatttaattgctcagcgcaagaccaaaagttcaacgcaacataaatatttaaagcatataaaaatgtgcaatagtcttcacatgcattttaataaacttctgctaattatttgctacggga

SEQ ID NO: 133459 - DNA, 364 bp, Zea Mays
gccacgcggtactcccaaccctgcccatgcggtggggtcgggtgctgcttcccgtgcgactgggcggtgtcgtacgggtgcggcgtcttcataccgcagaagggggtacccctgtctcaaggtaccgacaagcacaatagtgaagacgatagaaaccaatcttagagtggctatcttggagacccacttacgtatgggaaaggtcctaaagctagagttatctgactaagaccttggaccttatgagggcatccttgtaaggggcttttgaggattgggggaagcttacgctcttcttgatatatcgataaaagtactaaatcatcgacgagagttcacatttctatcattcttttatcttccg

SEQ ID NO: 133460 - DNA, 332 bp, Zea Mays
ggggtgatccctttgtacgctttgatgaactcgaggatgtggtactaatggtttatgttgaattggcccatcatcctcttggtcttatggagctccgccatccaccacttcttcataatcatgcaagctacacatatcttgtggttggatgggttcttcctgagttggatgacttgaggttgatggttttatttggatggagggttgatcgtcctccaccctagtattcccatttacaacttcattggtcatccaaatacttccttcatcctcatcgttctcttgtggccttacttcaccgatagccagcttcttggttgcctcaaaaagtg

SEQ ID NO: 133461 - DNA, 771 bp, Zea Mays
gtggactacaatacaaacaaacatttggtaccatctgagttcataattgataccttgcctcacatgttcccatgcttgttccacacatgctcaattagatcattcttcaatttttcattggctgatttgcacctaatctccttgtgtttttgaataagttgtgaaatttctggaacatctctggtattaggaatgtgaagtcttgtcgctgcatcgtagtcaaccccttcgagacttggaaggtgcctttcaacttgcacagacatattatgcaatatgacaacacagtctactatgaacttcaaatctaccggatgccataaacgtggaggacctttaattattgcgtactgaccttgaagaacgccgaagcaacgctcgacgtcttttcgatactctgcttgtttcatagtgaagagtcgttgcttgttgctaatagctgatggtactccactaattaaagttgcccaaggagggtaaattccatcacacaagtaataaggcatatcatattgtgtgtcgttaacttcataggtaacaggaggaacatcacctgtggctatgctatcgaagactggtgatctgtgaagaacatttatgtcgttgcaagaaccaggcaaaccaaaaaatgcgtgccatatccaaagatcatgtgatgctattgcttcgagaatcagtgttggttttttgaaatggccacgataactcccttgccatgcagtggggcaacgttcccactcccagtgcatgcaatctatgctacctagcatc

SEQ ID NO: 133462 - DNA, 297 bp, Zea Mays
atttggtagttcggcaatatctgcaagactcaagaatatatgttttgggaatggcggcatttgaaatggaactgtgtacggctccacgacagtttgtctggtgagatacaattccattggaccacttatatgtcgaaactgatgttcacccatactaatactgaaatctacattgtgcatcttgaaaacatgcttttcatgtagcaaattgttgaagtgcttgactgtctcgtacgaacttgtcattgcctcgatcttggctccctaatattattccagcagaaaaaggcagtggta

SEQ ID NO: 133463 - DNA, 815 bp, Zea Mays
atagtgtttttaactttgtacacgattgaccttattaataagctaacgtaactagaacgacaccacgaatttaaaacgcaaccgataacacgtattcaatgtaccgtggaattaaactatgcaacgacatttattcagtggatcgagactacacagaggggtagaggatagcatgatcgacatgctgtgacatctagggggtaggcagagggccctaggagtagacgacgatgtctggtgggtagatgggtgggtcgacagacgtcgtcgaaatttcggcggcgtgctgcgcgacggcggttgagaggctgtggttcggtggctgttgcgcgcagggcatgacgggtagcgacttggtaagtagagagagcgaggcgtggtagaggcgagcaggggcgctgctagctacttgtcggagttactggccaccgcaccaggcgagctcgcgggcaaagggacggggagatgggcaggcccaggcgctacaccatggggtgcgttgaaccggacataggtcttgacgagggcggcacgacgcgcagtcgacgggatgactcgacggggagctcgtgacggcgaacggacggggacggatgcagcggggcggcgtccatcgaggagcgggtcatgccgaggtgaagctcgcggcggcgccatggaccaggcgcaacaacagcacacaaccggatggacagggcaagacgtgaggcttaccagggcatcggcttgctgcactgctccagtgcgcggggtgctcaccgaggtccatgcgacgtgggaaggagacggtttggattttggaagatgaacagggg

SEQ ID NO: 133464 - DNA, 590 bp, Zea Mays
gggaagcgaatccgccgccgcgggaggaacgtggcgtcgtggtcagcacggtgtttaccaccgctctcggtgagttctctttcccatgtttcgcttgaatctctatcacgtctagggtagctcggatttggcttaggtgcgttagttcgcgagaccatgccgatggcaatggcgccaccacggcgctgtgggccgggttatacactcgacatcggccgaaattagtggtatcattgagatctgagagtcgtcaattgcgcgtggggcgagtgaatcggggtatggcgttcgtatgggccggattcatgatctccggcgggcggaccaccgtggaacggcgagcgccaccgtgctcctccatcggaggtagggggtgtgctctgcggggttgatctccatagcgacggccctgattagataggatataccctttccgccctgttgtattcggaccgtcggatctgtatccgacgattgcgattgtgtaccggtttgcccggaggtaggatttaatcatgaccgttcactcaaatcggatggctctgattgcacgataccgcttcggccacgcgttttgctaaagaaccccc

SEQ ID NO: 133465 - DNA, 549 bp, Zea Mays
agaatagccggtccacgtgcacggcgggaaccgagcacgggagtacatgttctcgccaaaccatggtcgatcagagcaaacagacgccaccgtgagcttcgcgagtatgcaagaacactagaacgacgcaaggattggacaatgacttaccagagtacgctggccacgggcgggctgttttgggtggcgcggcggactgaattggggggaagtggcaattcaacgtctctggacgaaattaggggtggggattgaggctataggatagtaagggactgggctttcaccgtgcgcaatcgatttgagagaaggtggagaggacagtgtgaatttctggttgtacctgagctcacttgaagatcagcgagcacctcgtcgtgaccccctgctcaatttataggcacggtggcccaacggatggcccccggccacggatagtaacacacgtgcatgcttaccacgtcggaaagagatacagtgagggagaacgacggcatgagtgccactgcggcggaatccactgagtcacggcggccgccggtgagtaac

SEQ ID NO: 133466 - DNA, 493 bp, Zea Mays
actaccacccaaatagcatccctgccccgaggagaacgaggtaagcccaccacaaaatccatggtgatatgctcccacttccactccagaatctccaatggcttcagcaaacctgcaggcctcttatgctcggccttcacgcgctgacatacttcacaggcggccacgtacttagaaacgtcaaccttcatccacttccaccagaagttttgcttcagatctcggtacatcttggtttcgccagggtgaacggtgtaaggcgttttatgagcttctctcaatatatccatcttcacctctgatttctaaggcacacagaggcgacccctgaaacgaaccaaatcattctcatcgatggagaactctcggggtttaccatcgccaaccctctttcgagcttcctgcaataaacgatcctgctactgagccgcacgcactctctccatgagggaagattgaacaagcatacgagtctcctcactagcggtgccga

SEQ ID NO: 133467 - DNA, 321 bp, Zea Mays
gcttgctcaatcgattcatacgatttctattagatatggacatgaactcctcagaagcccaatactcgcacatccacgcccaagcatccgaatggtggctcaaccaatccacctcactctctttgtactgctgagccatcaggtggatttcctttgccatattcgcgtcacaatagttcccctgacgcttttggtacactgtgacggccctcaatagtgctttatacatcatgccctttactgctctatctgctgagccattgaatacctcacgcacatatggatcatccaaggtataggggtcgcacacgcgaaattggc

SEQ ID NO: 133468 - DNA, 393 bp, Zea Mays
gtgacacctttagatacacgtgatcaccctccttaaactccagtagtcttctccgggtatcagcatagctcttctgccttgagtgtgcaattctcaaattctctcttatcatttgaacttgttcttctgcctcttgtataagttcaggcccaaagaactgcctctcactagtttgatcccaatacagtggagtcctgcattttctgccatatagagcctcaaacggtgacatcttcaaactgtcctggtagctattattatatgagaactccgcatatggtaagctcttatcccaacttccaccatgtttaagagcacaagctcttaacatatcctccagcacttggttagtcctctctgtctgcccatcagtctgaggatggtaggccgaac

SEQ ID NO: 133469 - DNA, 783 bp, Zea Mays
ctgccgctggccgctcccgcgttcctctgccgagtgggtcccgttggtcagtaccatatctgtccccgacgtcaactccggaccgaacttgcggcaacagaactccatagattttgcgtacctcgcacaaacctggggactcctcatccctataaatcgggtcccgatacccccaccaccgtccgcgccaactggaagccgccgcggatacctcggggagcagagagcctcgtggcatgagagagagcgagagtcgaggagagatgagcgccgccgcagggggaaattgctaaaacgctatcggcacataaccgaggtttgatctgtggatgtcgccgggagctatggagggtgtccgtggtatccccgtccgggttcagtgaccggtgaaccggtgatttctcgccgttgccagtgctccgccgcggagccgcatcaggccgtggaccgcgccctggtcccaatccctgcctacggtgagtcctccccatttcgattcgccttgttcccagcatcacattgaaccacttgggtatgcgtttggggtgctgatgcaccggttcgcgtgtctctagtgaccttccaccgtgatatagggcggcgccgccgtgctctgttggccaaggaaggagaagcgtaggtagccgtcgatctttagtggagtgaccgagattagattcatggttgggaatgcctcggccatcggattccgatggacgctctcgattaaaacgatgcataccccttcggcttatgtgacccggaccattggatccaccatgg

SEQ ID NO: 133470 - DNA, 338 bp, Zea Mays
cttgactcccttcttcaatagttcagtaattggcttggcgattctagagaaatccggaatgaatcgtcgataataccctgccaaacccagaaaattccgaatctgtctcactgtggtaggaggtttccaatccattacctcttgtaccttctcaggatcaactgatatcccattctgtgaaattgtgtgaccaagaatttaatttccctcagccagaattcacatttagacaacttggcatacaagcgatgatcgcgcagtcgctgaagcacagtgtgcagatgctcagtatgttcgtcttcattcttggaatagaccaggatatcatcaatgaaaac

SEQ ID NO: 133471 - DNA, 686 bp, Zea Mays
cctctgggcccgccatactattgttcaagcactccattctagctgctacattttttggacgcactacatgtaggtatttgaatagcgaagtccagttcagccaactcattagcttatgccttagaaattagagttcaagcacacattctaaacacccaaggagttaggtttatccaagaaaccaaggacccaaaacaaagaaaatccagcagcgcaaacacatacccggaaactatgactgtcaaaccagaaccattcaattggctagcagtagtgcttgttttaaatataaatcgcctttttaaacgctaaggttggtgtttaatgtttaattttaattggcaccaaatctacttttttattttagttatgttcatgcatgttcccatgagtttaaatgttagcaagggcaaatttgtagatgaatttagaagttattttaagtttatatggacaatttgtgttcatgcccttactttgaagtctaatggtgaatttgtcctcattttttgacttggtgatttggcatctggttttcaaaataaaggtaaagtataccctggctagcgatattgcttgttttcccatgattttgacttctcctagggggctggattgccaatcacctttcactggttaaattgtagtcttgacattgaaaggattggccaacttttatagttgac

SEQ ID NO: 133472 - DNA, 593 bp, Zea Mays
caagggtttaggtgttcttgaactggtttcacagttagggtttatgtgttcttcaacttatttcacagttagggtttaggttatctcggatctccgattcagccattgtgtaggttgctttcatcccaaatttagcttagctttccgataactgtaaggatccgtagtttcctttaaccttgtcggcccgtagtgtagctctgtctataattgcactaactgaacctacaatttgcagtagtgtttccttacatgagtaaccattgcatgcaactaacaaacacctttacttattatgcatcttgaaaaaattagttgattatttgacgtccacttcaagtaattgaggttctaaatcctttttcgctatagttcattgtttttaatgaatttcataagtctagtttccatggatgctgtctgtgctttcatgtttgttgtgtaattctagtttactatatgcaaccaacagatttacctacccacggttcaagtgtttataaaatgtgtataatttgtttagcattcttcttccacaataacatttttggcccaacattttgtacatgttacccacacttcctgtatttttg

SEQ ID NO: 133473 - DNA, 509 bp, Zea Mays
cggaggggtctgcgaggaccaccagtatacacctcttcgggattggaacctaccgtggcggatcgtgggcggggcgctgtacaatttcgtaccggcactcctgctccgccgcagaaccttgcgtcaccgtggccaggcaccatcttggtacaattgccggtgagtaccctcaaaccgtgttcgcaatagcatgatcatcgcgtagtcctatccgatttggttttgtcgctcggggttggccgttcgccgtcgcactcacgtgctccgctgtgtgagcctggcggcggtgactctgctcggagttggtaggaagaagggcttctagccgttcattctttgatggtcggctagaattaggggtcttgggtgtattaaaccagagccgtcgaattggatgtgtgcggcccagatcagaaagcttatataccgtttagtcggaggagtgtaatccgtagatcttggatcctacgaacgagagcgagcacaggttcataagggctcggatctaa

SEQ ID NO: 133474 - DNA, 427 bp, Zea Mays
aacaaatctaatgaaaactagattttgatctatttttctctcgacgctttactgctcagttcactcttcacctgagccatttgattctcttccctggcgcaagcccactcccactcgtggctcactcgcttcttcgatcatcgactgactattagtaagtcggtgacctaacccgcccgctgcagcgcaccttgccttctcattactcatcagctcgtcgactcgtcgggatcctgcacacaacattgatattttgcctcctagttcacaccagcagatgggtaagctgttggtgtgaccgtggcgtcatctgtccctcgctagctcattagggtcccaccgcgtcgtcgcaacacaacaatggctgtcgcttgccgtcaccgtcatctattgctacctcgcctcctgcactcgatcctcccacctg

SEQ ID NO: 133475 - DNA, 442 bp, Zea Mays
ctgtggaacagcttgattgcccttgcgcaccagacgtcgatctagaatttcttcaggaacaatgccagtccttgagaggtccaccaatggaggcaaataagtaaagactggagtatacgatggatgataaggttttagttgtgaaacgtgaaacaccggatgaacttgagcattgtctggaagatccaatttgtaagctgccgcaccaatcttagccaacactctgaaaggaccaaaaaacttgaaagccaactttggagaaggacggtttaccacagtcttttgagcatatggctgaagcttgagcagcaccatctccccaacctgaaactctcttaccgtccttccccgatcagccatttgtttcatccaattttgagctcgagcgagttgttctctaagatgagttgagaaagcaaccctatcagccagccaatccgtt

SEQ ID NO: 133476 - DNA, 987 bp, Zea Mays
taatcttcggtttacacctaattctacccctgaggagtatttcccctcactcaatttctgaattggagctctactgcactctgtccacggtgacagtgcggagaatctaaggaacagcgtgttcccggcgacccatggcagtctagttcaattggacgattcggtgagcatcaagaacatgggagggtgttggaacaatcgcacagagggcgagatcggacctgagttgagctggccgcgacgagggcgttcttgcggtggtataacaggtttggggaaagtaagaaatttgtggtctctggtgagcgatttgaagcaatagctggtgcgttggcttctggattatatggcgcaatagccccagccatcaatttatagggggcttaggcggtggcgcgcaatttggccgagcagtgctggtggccggagatagagaagaaccttggcgcagtggattcgtgtctaccgtcgtggcgacttcaccggcaaccaacggggagctagagtgagtcacgatgatgcggtagacaggtagagacacgcggcggatggcggtgagggcttaacggtggtgagaaccttatccgaaggatcagtgcgcaagggggaggcacggcggctagccggagtggcgtctagcgcacgcagtgatgatcttttaccccgcgatgctatccatcaactcccggcacgaatccagtcgtcggtgacacgaatcgcggcgaaggatcggacgtcggcggtgagggctccctgcactggcgtcttgatcctcacaaagcactgtaccatggcgattttcagtcagatgaacctgacagccaatctttgagctaaattttctctcaaactcatatagcaactaatccgggactctgcagcaaagttgttcctctataatagctctacaactttgttatagcaaccctaggtagattctcactggatcatagtcgaaatggctctcaaacttggatctaggtcact

SEQ ID NO: 133477 - DNA, 569 bp, Zea Mays
atcgtgcgaagctcgggccacgtccaaccacccaagcctttggtccaaccccggtcgaccacataaagcacctcctcctacccgtccgtgcaactcgtcgcgcataccgtgagccaccataccgtgagtagagaggaaaggaagaagagaggcggtcgcttgaccatctgggtgtctgggccgtgggtgagctgaagttcgggtcggtgatcgtcgctggttcgcggtggagctgtcagcgggcgagccgagtagagttggacggggaagcagcccgaattgcttgccgaaccttgcatgaacctggagatatgccgtcgccgcggattggccttcctcacggcgataactcgggtaacttcccatccctaggtttcgctttccgcctggcatcacgtagacgcgttcggatcaggctttgggcatcgggggcctggaattggatgtcacgggcggggtccgtcgcgttgaggggcgccgccgccgtgtccagtgtggttttggggaagaagtcgctcgaccattggatggacagcggacagccgtgattaggtcaaggatacaccttc

SEQ ID NO: 133478 - DNA, 526 bp, Zea Mays
ggtcaaatgaggctataggttcaccttctgactttactgaatgctcacaacatagtttgtcaatggatggggcaaaatgtggtctaaaatatgaagaaggaccaaaaccacatgaagaaataactaatatgaagacacatgaccaaggatcacggggtgggtctgcatctcagcatctgcaagcaagaccaaaaagaggtatatgctaactaaggaagatacatttgtgcatctaggaatgagtgttgttgtcaacaatgtcactaaagctattagtgaacctaaggtggtagaagtccacctagatctatatggggcggtgatgttcatgactggattcagtgatgaggccttaatggtggcatactcccacttgattgacagtaagacctaggggcgaggacgctacatctgttagtatgaatgaggctcatcgtgtcctctggttacacacattcctagctaaaaactgctacacaatttaggttctaaccgacagtgccgtttctagaaatatggggctccg

SEQ ID NO: 133479 - DNA, 329 bp, Zea Mays
tccgacctgtaatgtcgaagtgtagaagtttctcagcaaggtgaattatttacgaaggtttatttctaacctagccgggaagattgatgccttcacccctatccttcggcttaagaatgatgctgaattcgcttggggcagagcagcaggaagcatttgatctcattaaaaaatacttgtctttggctcccgtattaaaagcaccatgagcaggagtaccattctgattatacattgcagctgaagataaggtcattggggccattctgacacaagaaactgaaggaaaggagcatgtggtgacatatctaagtccgaggttggtggat

SEQ ID NO: 133480 - DNA, 507 bp, Zea Mays
atcaaagataagctcgatggagccgacgtcattcggccaccctatcccggccgtcatatcaaataatgtgcgcgccgttccattgcaattgcaattgcaatgtgatcggcgtgcttctgccgtaggtaggtaggtaggttggggacgcttgttgctatctggttggacgtcggatgcaggctgatactatcgcttaattagtagactacttgctcagctacggagaattggcgattgcttctcgctcgggaaatcaagtccgtctgcaaattaaggtttcccggttgttttgtgcgacgaaagaagtttgccaaagtggctcttcaacatgaggtgtctgtgtctcttcaacaaccggcagcgtgggcaagctaaggtggcgataatgcgcggccaggcagaggatggagacggagatgagatgaaatcgtgagactcattactgctactacgcatcacgtgctaggccgctagtggtacccatccatcacctcgaatgttctctgc

SEQ ID NO: 133481 - DNA, 527 bp, Zea Mays
tcgtggctattttggagaaatcaggctgcgaccatgtgaaaactttggctcaagccgaagctactttaagtattgaagatacaaaagacccttcggccgaagccagcttagtgggtggaaaattctttactgacatctgggagaatggcggccgaaagatggcacacgagataataaaaaagagtgaaaaagattctcatgatgcaaaagaagtgatgaaggcatctgaaaaaactacagaactagaaaggaggataggtattgtttaatgacttctaactttatgttttatttttgcgacttcgaacttatttacgttttttatcgcagctgagctatcttcttccccagagcccttcgagccaacggccgacccagaagcaaagagggaggaagaaattactaaaatggctgaagctattttagatgaagttgtttctcgactgttgaacgaagctgcggaagcagttttgaaagaagaatagttgttattgtaaaaacatttggaatgtaatatttgctgaaca

SEQ ID NO: 133482 - DNA, 411 bp, Zea Mays
gaggaggaagccactttaaaagggagagccacccttcccccattggactagtcttttgggggcaattgggcctttccctgagttgggtgtgcttaatgaactgttgggctccgggcaaccctaatttgttgggcctcggccaaccccacctgggctgggtgtatcatctggtatcaaagctagggcccattttaagaaggtgggaatgatgaggacatcctccactattacccgttggcaaagacgcaataggcccagttggcccaattgtagtcggacggtgaccgtgtgagccttagaattatcccacctcgcttaacttgggaggaggaagccactttaaaagggagagccacccttcccccattggactagtcttttgggggcaattgggcctttccctgagttggg

SEQ ID NO: 133483 - DNA, 622 bp, Zea Mays
ccgacgaggagaatgccgagtcgcttcgccgcacgatgccttggtcgatcatggctatgcactgccgctcgagctcatccttgtgagccaccgggtaccggtatggtcggattgcgaccggagccgcgccgggaacgaggatggtgcggtggtcgcggccccgttggggaggtagacccgtgggctcaacgaagatgtcggtgatgtgagccagcagcgcgtcgaggagctggttgctgccggtggtgacgccgaaggccgatgtcgcagtcgacgtggttccggaccagcagaccgtgcgtccctggagctggaactgcatggtgcggttggcgatgtcccagacgatcgaccccaaggtggcaatccattgtgtcccaaggaccaaatcgaagcctgccagtggcatgatgtagaggtcgacgcataacggaacgccctcaatggagatcggcgcctggggcaagactcccgggcacgcgatgcgctccccgttggccacccgcgccgtgagcctttttcgagcccggacctatagattcgtgcggacagccgcctcctcgccgatgaaattgtgtgttgaatcggtgtcgaggagagcgatcagggtcgtcgcgcccac

SEQ ID NO: 133484 - DNA, 738 bp, Zea Mays
gttgaaatcccctccaaccatgacaggttcagtgattttactaaccatgttcacaagttccgctaaaaactgttccttaaggtggtcttgggcgggaccataaacgcagaccaaagaccacttaaacccaccatgcttatttcttaacaaaaaacggacatagaaatctccttcatctatggcacctatgtcaaaaaccgagaggtcgatccccataagaatacctcccgaccgacctctaggttctttacaatgccatagaaagtccttgcccgcacacagatttttgagaaaagaggtcgagaactctttttaacagtttcggaaagcgcaataaaactaagattaaactccttagttaaatccgcaacaaaacgatgcttcttagggtctccaaaaccatcacaattccaaaacacccctttcattttaacttttgtttttgcacgataacttcttctttctttttttcgatctaactttcttcctatgtgtatcactacctggatccaatggattttgacaatccgccttgttgtcaactccgttatccattaagtcatccatgatacccccacaaagattattaagagtaagtatgtctaattcctcatctgactcctcatccactatgttataaacagtcccttctaccacgctatcccgacccacctgactcaccatacctttatcatagctattaagaacctggattgacttagctaaatgggattcctc

SEQ ID NO: 133485 - DNA, 708 bp, Zea Mays
gccttggtgaaccccgtcgacgtgcaccgccatagccgggaggtgagatgagggagaaggttgccatcgccgcgcagcaatgcccctcgcctcagtcgggatgcgaactcgggcctggggcttctcgacgttgccagggagtttttcatggctgccctggacgaaatggtgccccgtggctccatcaattgctcaccggcgctggagcaccgccgcatcaccgctccgcgccggggacagggatcatcgcgacataatcactcgtaatgacaccttcgtggcactcgcctttacttccgcatcgtgtagcacctcgctgaagttcgattagtgcacctgggccttacgccggagaaacgccgatggacctccgcctagggtcgctcgggcggcgccgtggtcggcccgtcggggaagaggaccgggataccattgatggtggggtgaacggttaggattcgatcaaacttgactggttcagggttggatctgggtcgtccatccgttattcaacgggtgtggagcaaatctcgcctattaaaatctgagtcgttgacgcttgatcatgcgatctgtgccacgtaccgattcatttaatcggtgacctaatctagtgcgtcggttctcgatcggacgatccggatcccgcgataccccttcgaccaggtagtttcttaaagagaccctccactttaagctattcaaccc

SEQ ID NO: 133486 - DNA, 464 bp, Zea Mays
gcggtggcggaaatcggatttggggagaatgggaaatccgcgcgtgctggtggatgatcgagggtgggagcgggtgctatagcttcgggatggcttagcgcagctgcccgggggctcaatttatagggggcttcgacggcggcgcttaatttggatgaagatgtgcggcggccggagaggaggaagaaccgcgtgtagtgaacacgtgtttatcgccgtggcagtaactacggtgagctacgaagagttcagaggaggtcacggcgacacggcgaaagtgttgagccacgcggcgcacggccgggaggcggtggtcgacagtgagcactttaccgcgggcggtgagccaaggggaggggtatcgtggccgatcggggtagcttccagtccagcggtgacgacgaccttttaaccccacggcgctatccacaagtccggtgcacgaatccaaacgccggtgaccc

SEQ ID NO: 133487 - DNA, 461 bp, Zea Mays
ggaaaaccgattatcttgacatctcgctcaaagacagcatcaaaggatggcgcttggagtggtttatcgtggaaaatcataggaattcactcccacctcggtcagggagacagccggatgttcgtactccgagttggaccgagtcccccacagaccaggaagtggctgaagcaggggctttgctagctgaagttggattgctgaaggggaggggtctgactgacgaggctgtagtagttgactttgtcttcaagaatattcagccgttgaaggacagggcatacccggcctatctgtatcgaggtctagccgattcaactcgggtcaccaacagaaaaattcctgctgtgggcttggtgaaccggcttgaaatgatacttagaggcaaggtatcaaacattggcgcccctgttgcgtactcggcctggaacctgcctccttccaaagcctttacttatttc

SEQ ID NO: 133488 - DNA, 887 bp, Zea Mays
ccagagcagtctccacgataacagcgaagaccacccaaaaattcttctggcaaaacattgtctgctggttcggagtcccgtccgagctaacagtcgacaacagcaaatagtttgacaaccaggacttccaggaattttgcagttccatcggcaccaagacagtcttcgcctctgtctaccacccacaatccaacggcgtcgtcgaacgtgccaacgacaagattttcagcgccatcaagaaaaggctccttgacgacaaaaagggcaaatgggcagaccaattacccgaagtcatatgggcgttgaatacgatagaatgctgagcaaccgggttcacacctttccgcttgatgtatggatccgaagcaatgacaccgcaagagttaaagcacgcatccccccgaaccaaccaatcagccatccccgacgtcgacgaaccaacctccaaagatctcattgatggagaccgtgtcctcgccctgtaggcccaaaacaaatatcaggtccaaactaaggcatggcgtgacaacaatgtcgtcctaagagaattcaacgaaggggatctagtactcgtgaggaccaccaggacagagtcccggggcaagctagagccaaagtgggaagggtcgtacatagtcaagacgaaggcattcccaagtgcttacaggctaacaacttcatccggcgaagacttagagcactcatggaacatcgataacctccgaaatttttttatttaagatccaaggcccaagcgcctttgtaattcctcaaacaatgtcattcaggcccgcactcttttcctcccgggggtgaggtttttaacgaggtggagccatttaatataccgccaaaaagcccccgcataaaatccagcaagcatcatg

SEQ ID NO: 133489 - DNA, 635 bp, Zea Mays
cagcaaacataagtgccccagtttcaacaccaccaccagcaactgcaagatttgcctctggttgtttttgttccttgcctttctccctcttaggacgcttacagtcttgagcccaatgaccatatatcccacaatttctgcatctcccttttctcctaggtgtgccttgtgaagtgagtttctgcttactgaaacttcctgaactccctccatcagatcgatggggagccttaggcttccactgacatgagtcactactgctactgtctttatttgaagacgactgaaaacgatgcttatgcttttcaagccaatcttcttcagctaacagtaaacgacctgttttatcagtgatgtgctcaaccttgtcttctagtcgatcttcagcagcacgaagtctgccaacaagatcttcaactgtaagatccttcatctcacaaaacatttcaatggatactgctacttgattaaaccggggtggtacaacacgcaggaactttttgaccacacgggtatcatctattgattcaccaagggatttgatatttgtgacaaggttagtaattctcatcccaaaatcctcaacactctccccctccttgaactctatattctcaaattctctaataagtttc

SEQ ID NO: 133490 - DNA, 299 bp, Zea Mays
cagatatgtcaagtattagctatattttctgaaggggagaagaaggaaagagaaacaaactaaatgcaacaacagacacacaacctggatatgatgtgattgatcaattgctctttatgcactgggttgaagtccactgacgagcacacaaacatggcgaatctaggggtggtttggcgccctagcgtgacgacggaggagatgttcatggtcacccccaccacccccgtgaagctattctgccctccctactcactagcgatgtggtcaagcacggtcatgtttgttggaaaattaac

SEQ ID NO: 133491 - DNA, 316 bp, Zea Mays
ctcaccatgtgggtgatgtgcatttaattatggaagtaaaaattaatagctgatgatatgatttcagatcaatctgttttgtctcatcagctcaggttgctttcttctcataaacgattaatctcacacccaatgatttgggttaaactactctaaacccgatgatttgcgctagacattaatatcacacccacgaggaagtcgagtcaccgagacttctttcattaatgaagtgaaattaaactagtacaagtaggtggcctatataactctgctatataaaacactaatttcaacggtcacagtcacgtcatcc

SEQ ID NO: 133492 - DNA, 310 bp, Zea Mays
gcagcttcttcagcttgtcttgcttctactcgggcgtcatggatgtctttttcacttttcttcataatttcatgacccatctctcggtcaccattcacccagacatcattatagaattttccgcccatcaaggttgcttcagctgaaggatccttcgtgtcatctgctgagaaggcagcttcggcctaggccatggtcttgatgtgatcacatctcgccttcttcaagatagctaaaatctcccgcgcaccggaaaatgcacagacatccccgcgatcacttaagatttcttcgaaggtctcgacctccc

SEQ ID NO: 133493 - DNA, 790 bp, Zea Mays
catcaataaattgcaggctacttgcgcatcagagggacggtgtgagattcttatacaatttgtatagaaacaatatggcggtgttcttggagatgacatgtgtggcttcaaaattgcagatgatcattttctttaaggagattgatgatcctcattccattcttgaaataaccttgaatatcaatcgagagtcttctttttgataaatacttactcaatcatattaagtgttggtggggatgtatattattttagcaaagcaactactttctcaatgcagtttgttgttgctggtgcataatactaagtaagctcgacttattaaaggttagcatatgcagatatatacactgttgatatagtgacaatcaactcattcctacacgtagaagttaccgtgctctttgaatcttattgcatttcctgttcactttttaaaatgatttctcttgtgatttaggggtttggggaagaccattcaaactattgcttttttgtcttctgttattggaaaaggaaatggccatggacaattaacaaacaaaggaaagatgactggtcctgtactcatcctctgccctacttcggtgatccggaactgggaaaatgaattttctgagtgggcagaattctctgttgctgtctatcatggtccaattcgtgatttagtttttggaaaaattgaaactcaaggactggaggtactcattactagttttgacactttcagaattcatgataaggttttatgtggtatctcgtgggaacttgtggttgttgatgaggcaca

SEQ ID NO: 133494 - DNA, 564 bp, Zea Mays
tggtttatgggtcaggagcagtgcttcctgccgatctgatcttcgaggtgcgaaggttgactttcgaaaacatagctgaggcagaagcaaccaggctggaagacattgatgtgctggaggaagaacgattgaacacagtaattcagtcggccaggtaccagcagaccttgaggcactaccacgacaaagctgtgcggcaccaatcctttgcagtgggagacttggtcctttgccgaattctaacgggggagggatgacataagctgtcaccaccatgagaaggaccgttcattgtatcagaggtcacacggccgggatcatatcgacttactcagatgcacgacacagaagtggggaactcatggaacatagaacacctcagaaagttctacccttagcaatgcctcaaaagctcttgaagaaaagttgtactatgtaaccagaagatttcatcatcaataaagctttcattttccaaaggtgttcagattcttgattaacaactgacttcgattgggcttgacttgaaatcggcatgacttgacttagggtgatcactatgcc

SEQ ID NO: 133495 - DNA, 582 bp, Zea Mays
tctaggcgttgcaaattgttctgtcaggcgctttgtcgaacgtttccaatggtacagtgaacagataggatcaggttcagagaacctcgccgccggcgaccgtgcgcatggattcgcgctcgccgcggtgattcgtgctcggctcagttagataacgtcgtggggtaagtaaatatcacgccgtggatgaactccggccactattttacttcggccgccgtacccgagcatgtcacggccgctttggataggttcgtcggagttagccacctcatggtcttgcgccacgtgcctcgccatttaccacgtcgcagtcagtcgtgttatgcatgtccggtgatcgccggtgagcccgccacggtgaaagccactaatccttgcgccagtgcaactcttctctccggccgccaccgcgccaagtccaaattcactggccaccacccccggagcgtataaattgagtgtgtcgtcggggctataaggtagtcaagcacccaatccaccaagccgtgcctctaattgctcaccagagctcgccaatttcggatttcccccaaattggtctgaaacaccgcgccttgt

SEQ ID NO: 133496 - DNA, 544 bp, Zea Mays
ctggcatagaaggtctgaccccggggtttgggtgaccaaaggaatttctaggggtgtagaggggatgccatgcttttccacaaacttagtggctataaatgaatgggatgctcctaaatcaaaaagcacagtagcgggattaaattcaacaaggaactcaccaagcactactcctggagcttgctgggcctcttgagcgtcgacgtggtcgactcatgctctgccctggtactgggtcctgctctgctgactgttggagggaggtgccttggaggtaggtgccgagggaatcttggggccattcaccgagttggagtaggtaggtccgggtgccttcaactgggggcagttattcttgaagtgactggggtctccgcagtgccaacaggcatttgctggcggttggttgcttgcaacagagggggcctgaagggagctctgactctgctgactgtaacatgacggagtgggtctagctggtctattgaagcttggtcccctgggtggaagcccaaagggtcgagctctctggtgacgatcttgc

SEQ ID NO: 133497 - DNA, 427 bp, Zea Mays
atcttccttctgtctcgatacattcattgcatatactgtatggatgcgactgcctaggaaaatctattgaaaattcttggacgtccccccaatgggtgtagccaagggacggcttggtgcgctgagcgtttagcaaactgcccctgagtagtaacttgacgtgaccgtggggtgtaatcatatcgtccaagtagttgacttcagtcccaatgggtgccgtgttacgtgaaacaacgtttgccgcttgacttgttttcagacgatttgaattgcatattgaatatttgcgactattcagtgaccgtggtaggagatgagcggctgcctcccgcccctataaatagggcgcttgcttcactggtgtcttcacacatctctcggccatttgttgcttattctcttcttttctcttctcttttactccacc

SEQ ID NO: 133498 - DNA, 462 bp, Zea Mays
gtttaatatatatttgcaccagcttactcctaacacgatcatgaggcttggggttttttatttaggatgtacaaagccatggtatagagtcgaatgcagaatacatcagccagatccatgatttacactatcaaacaaaggtagttggggttgatcgatttcataacaacttcgggtgttataactttgcttatcaaaaggaagtgcagttctcggcccttgtgtatcatagcagatgactgaatgcttggatgaagtaatggttccatataaagaattatttggaaaagagagaagatattaggggaataagtcaaaagcctatccgaccaagctttgggttcaagaagcctacttgctatatatatgaactccaaggcccaggactccttaattgccttcaacgccttttttacccacattggtacaagggatcttgttcaagaacacctgttgtttaac

SEQ ID NO: 133499 - DNA, 505 bp, Zea Mays
atcggctgggcagttgcgtacgtagggcgcggttcggtgatgcctatgggcgggcatgcatggaacctgagtacctgaccatatcgtggtccttgtggacgctgacgcgggcgagagctcgggttctggccgctgccgcgcgcccggcgacctcagatccaaccgtcgcgagcaaggcagtagagatcgatggtggatgaacgtggcgcgccgggcatatcatcgacgtgcgcaggaacatgaaggagctagtacgtggatgcatgtagtggaggtggaggacgggtggagagggaacacgctggttcttgttgtggcgtcggggagaggatagaaagagatatacagatcgaggagtgcttatgatactataattatgccgccgctggccacgtcagggccaagggggctggttcttgtggcatcggggacaggcaggagaaacgcacgacatcatctcctcgcgagcgtcattgcatgctttttgaaactcggcaaagtcttt

SEQ ID NO: 133500 - DNA, 1410 bp, Zea Mays
ggaacctttagtagtgtcgtggccaagttttctagtattcatcaaatgcgggcggggcagacaggtggagccacctacgcaagaaatagaagcaacaaaatagaaagtcactaatacatggatgtgccaaaatcacgagtatagaggcactacaatcattacgattattctgttttttcaaacaagttcaggaagggatttaccgccaaataggaagatgctggaaaactttctcatcatctgactctgaaatcttcaccccctgaggaacctcacctttctggtagcaacccagaggcattgcgataagagccagactgcgtagtttcggaagccttaacaactcttcaggcaggtggaccagtttggggcacttgcaaagcgtcaacaccctgagacatatcatggatccacactcaattttccatttctccactgcaagatcgtagagcaccagtcgttcaagtgtcatgaagctgcctgacgggaaaaccatcaccttgccagtatatgactgctcgcctatctctagcaccttgaggttttttatcctcccaagctccaggatcttgtgatcattgctgagtagattggcgcagcaaatcttcagttcccagtaatcatgcgtctcatcaaaattgaggaggtcgatggggaactggacccccgtattgcatctccctatgacttccatgccatatttcccatactccacccccaagcagaacgagagatccaggttcttgttcctcagcacttgccttctagttttctccacaatccgcttagcatcgtccatatgggtactgctcccacaatctactagtataacaagaacctttgatgactgtgaaccgatctgtggtgatgataagcttctagcataggggatatgcacttgcctcagtgtcctgttccgccacaatgatgctgggatgtggtctatacttgctgtgcagtacagtgtttcgaggcttaagaggcctccaatgttggaagggagatcataggagcagttgcctcccaagccaagatatctcaaatacctcatctggtgaatatcctttggcagagaaacctcgccagaacagttcaggtgaagcacgcgtaaaccctggaacgattttggcacctgtactgatgtgtggttgttgaagtctaatagagtgcgaagctttctcgtggtggttccaactcccctttccagtgacagtgagctgtggagcaccactcggtaagctttcatcatctcctcccccgagtaggccacctcgatatcctccgcagaatggcaatctttcataaacccttctctctgagctcgtccaaacccccactcgcgcaggatgtcatgcaccttgaccaccttgatcatcccagagttcgtccatccctccgcttggatcatgc

SEQ ID NO: 133501 - DNA, 510 bp, Zea Mays
tgcgtctttgccaacgggtaatagtggaggatatcctcatcattcccaccttcttaaaatgggccctagctttgataccagatggtacacccagctcaggtggggttggccgaggcccaacaaattagggttgctcggagcccaacagttcattatgcacacccaacttagggaaaggcccaatcgctccaaaagactagtccaatgggggaagggtggctctcccttttaaagtggcttcctcctcccaagttaagcaaggtgggataattctgaggctcacatggtcaccgtccgactacaattgggccaactgggccaattacgtctttgccaatgggtaatagtggaggatgtcctcatcattcccaccttcttaaaattggctctagctctgatatcagatgatacacccagcccaggtaggatttgccgaggcccaacaaattagggttgcccggagcccaacagttcattatgcacacccaactcaaggaaaggcccaatcgc

SEQ ID NO: 133502 - DNA, 392 bp, Zea Mays
cggcactggacaccaagccattgcgccagtaaactttccctttctctgaccgccgcgcgtcaccgttcaaattcccggccaccgccctcccgtagtataaattgaccctgccgcgagctccgtaaggtagttaagcatccagccaccaagaattagcctcaatcgttcaccagggtgtgcgaattttgaacttcccccaaatccgcgcaagaacatcgtaggagagacctcgccgcggccagctcaactcaggtcagtccaagtccctcaattgcttgttctagcgtccctaggccctcctcaagctcctcgacccctttaattgaattggaccgccatggatcatcgggaacgtgctattcgtttggtcagtcgcactgtcgtcgtggcca

SEQ ID NO: 133503 - DNA, 308 bp, Zea Mays
taacaaatcctctggaaccatatcctcaagagtctgatcaaaattggcagggacagttcttgcaggccaatgagagcagacaaagcaggagagggaactcccactactttcaccgctagcgatgaactgccgactgtttttccgagtcaaaggaacttcatcttcttcctcctcgtcgtccacattagcaacacaggcagcacccccattgggatcagcagcagatgaagcactcacattgggatcagcaacagattgggtacacccattggggtcagcgtcagtaaattcagtcacaggcacttctt

SEQ ID NO: 133504 - DNA, 356 bp, Zea Mays
atccaattccttgatccgtgctcggactctatccgttcttggggtataaaaacacttccgtcggccctaccttgcccccatcatccatggagtgcagaggacatcagagcgagagagagaagaaaatttgtcgctgcggggtgggagctgtgaaggaccgccgcgcacgctggccatctgcgacctcactgcggctgtattggcttgccggtgaatcaccaaagctcgtgtacctgggctctgcgtgggtggtcacgattgggtatccaggcagggtggctaccttgtcagactccatctttgccgacgtggttcgacctccaccgcgattagggcatagcgccaccggattcacg

SEQ ID NO: 133505 - DNA, 575 bp, Zea Mays
ggccacccttttaacgtgttctggggcacgccggtgaggtcgagatctgtgtggcatcgacaaggcggagttcaacgacattgcgcaggggcttggcgtgggaggtggagctcgctgcgcacgatgtcgttgtagcagtccggcaacagggaagaagcccgcagtacagggcgcggcaaccaatgcgtaggagcacactcggccgcgaagcttaggttattcatggacaaaatcttaaccaggcggtggtgagtaggcagggacgactcatacttacagagacgacgcgcagcgacagatccacaacaaggcacgggtgtgagaccgatgcacaccgcggtgagcgatttctgttcaccccggagaccttcccgccaagcgatgctttgaagacttgcgacccagctgcggtcgagtcgtgatgaggatgcacacgtggttgataccaggagatccccatggagggcttcatatataggggcgagagccgcagtcagccgacaacttgccggcgggaatcgcggcggagtccgcggcagcgcgaaggagatatgcgtgattctgttgggaacaaa

SEQ ID NO: 133506 - DNA, 445 bp, Zea Mays
cacgggatgacctcaacccagcatcaagcacatcagcacaaacctccatcacaccatcatccactggctccaataacaaatcctctggaaccatatcctcaagagtctgatcaaaattggctagggatagttcttgcaggccaatgagagcagacaaagcaggagaagggactccactactttcaccactagcaatgaactgccgactgtttttccgagtcaaaggaacttcatcttcttcctcctcgtcgtccacgtcagcaacacaggcagcacccccattgggatcaacagcagatggagcacacccattgggttcaacaacagatggaacacccacattgggatcagcaacagaaggggcacacccattggggtcagcgtcagtaaattcagtcacaagcacttcttcagcagcaggaaccaaggtaccaacatcccgatc

SEQ ID NO: 133507 - DNA, 544 bp, Zea Mays
ttggcaagaacgaaacaagactggtatccgcctaggatccgtcttcaacaacagatagtgttgctctcatatgaaggaagcatctggtctccacaagatcttcatagttctatcacaaattaacatcaccaatagcttagtggtcaagaattatggattttcgacactacaaaccaatgacatattaatgcccaattttgcttcaagctcagtggtaatatgggattccatggctattttctactcttcttactcctggtagatcagagatagattacaataagcatgttaaagggtggaatccaatatagttctgctacataaactccaggtatatgttcattcagaatcgacctttaccatttggtttatagtatataccataccagtcaaaggactatcctaagtcaattcagcggctataagtatttaaattctgagagatgtatgcaacacaagcatagaggtcctagataggccgagtaaagtggttcgacgagaacacacaatgttttttcacaccaacgttgtgaaaaaattctca

SEQ ID NO: 133508 - DNA, 2008 bp, Zea Mays
cagaaatcctcgcagtcctcgtggtgcctgtggctgtggccagaaagtgacagcctccaccttggcactatccatggcgactccctctgtagaaatcacatgtcccagataggtgacggttgtggttccaaaggaacacttagactgcttggcgaacagcttgttggctttcagggactccaaaaccgccttgacatgtattaggtggtcagaccatgatgcacctgtaaatgagaatgtcataaaaaaaatacgagcacaaatcgccgaaggaactgtcccaacacttcattcatgagggcctggaatgttgtcggggcattggagagaccaaatggcatgaccaagaattcaaaatgaccatgatgtgtccggaaggctgttttatgcacatcatcggggtgaacacggacctggtgataacctgaacgcagatccaatttggtgaagaatcttgcaccctgaagttcatccaacaattcatccactacaggtataggatatttatcctttactgtcttctcattcaatgctctgtagtcaatgcaaaagcgccaagaattgtcacttttctttactaacaatactggggctgagaaagccgatgtgctgtggcggatgatgccttgttggagcatggccttacactgggcttcaagttcatctttctggagctgtggatatctgtaaggtcgtactgctactggtgttgttcctgggaggagatgaatccggtgatcacagcacctagatgggggaaggccactaggtgtctcaaacactttgtgaagctgctgtagcagacattccatcataggtttgggctctgccttgagtgaccggactgcaggtctcatggaaatgtcccagcgctgcgaacctagtcccttccagagaatacgttgtcctctcctccagaatgccatacatagatcttcaagatcccaaagaatgggccccaaagtgcgcaaaaatgtgatacccaatataatgtcaaaggaatctagaggaatggcatatgcgtccatcaagaactcttcaccgggaatggacataccaataatgtcggcagtgaatcttgtcgccatttgctactgtggcctggaaaccttggttggaactgtaggctagccgtagcccatctgcagttttgaggctgacaaaattgtgggtagagcccgtgtcaagaagagctgtgagggcgtatccccgaatatcgacttgcagttgcatggtgccctctgagctgatgcctgttaaggcgtggagtgaaatgatgggtgctggatcctctggattggattcatcctcgattcctgtatcctcttcaaaatctgtgacctccagatagaatagacgcgggcaccgatgaccacgaacgtattgttcgtcacagttgtaacacagtccccgtttgcggcgctcagccatctcgccgggggtgagcttcttaaatggacgttgtgcccccatgctggttggtgctgctactgttacagtggactgttgtgctggaataggaaatgacggccgctggggaggcctcgacggcttgctggtagttgatgtctggtggacgtcgagtgcctgagcccttcgttcacatgctcttgccaaacttaatgcatgattgagatcccgaggagccataagttcgacatcgatcttgatacgctctggaagacctgtcgtgaagagttgtaccttctgttccagagtgagtggcgtggtgtgggccagtaaatcccagaacctctcctgataatcctccactgttgtccggaatggaagccttgccaattccccgagtgggttgctgcgaagcggtggtccaaatcagagttggcatagctgcttgaaacgcccccatgacaggggtggttcatcacgcaggagctggctgtaccaagtccgtgcagcaccgagcatgtgatatgaagccaaccagactttctcctcttccaacgtgcgctgtccctcgaagaattgttcacatcgagtcaaccag

SEQ ID NO: 133509 - DNA, 370 bp, Zea Mays
ctgtggcggtggcacgtggagggaggtgtgaggacagtcggtggctcggtgcatggtggcactgttgtccgacgagacgggcttgagttggcgagtagggaacatgggtggccgacaccagtagtccaaggcagggcgatgtggagctcctgtctagtgtcaccgagtgggtgagggccggggcgaggaggtgagccacgagtctgcaacggcgcaagcacatgcctgagatgggggcacactgtgtgatctgtttgtcgcgttcctggagaaacagtgattctagctatgagggatgctcgacggagaagagaccggatgatcggtgaacaaccagaggttgaagaaaagggtagaaaagacattcccc

SEQ ID NO: 133510 - DNA, 299 bp, Zea Mays
ctattgatacattcgattatatttaaagcgatgccatgcaacaccttgaatgaagagggtagcgaccagactgggagttgaagaatgcaaacgaaattattctatagcatttgatatgtgaagtcagcatgtccaatactgttgtttcaatattttattgtgtctccagttaactgaaatgaatgatattgtgctctttgagaaatggatgatatcttgtgctttggagaacaatatattttatggcaggtaatagttacaatggcaattagcgtgttagctagagtggaggatcagga

SEQ ID NO: 133511 - DNA, 753 bp, Zea Mays
ggtctcggatagcatcgataagtttagacctattagtctaataaacaactttatgaagatcgtcaccaaaattttggcaaacagactggcaccgcgcatgaatgaaattgtatctgttgcccaaaatgccttcatccaaaagcgatcaattcatgataacttcttatacgttcaaagggtgattatgaagatgcacaagaggggtcagcctgcgcttttcatcaagcttgacatctccaaagccttcgactccataaattgggcttatctccttgatgtgttaaaggccattggtttctcccaaaggtggcgagactggatcgctctaattctaggctcatcttcctccaaaataataataaatggagagccgacaaatagaattaaacacaggcgtggtgtacgacaaggggaccccctttctccatttcttttcattttagcaatggaccctctccagcgtatgatcgataaggcggctcaggctgggctactgggaagcgtcctgcctaaaggggcaaagcttcgttgttccctatatgcagatgatgctggggtgtttgtgagagcagacaagtcggacctcaaagttctcaaaacgattctagaagtctttgaaggttgttcagggctaaagataaattttgataaaacagaaatctttccaattcgctatcctcagtcgctttggtcaaatcttgccgaagtgttcccgggtaaatatgctaacttacctggaaagtatcttggtct

SEQ ID NO: 133512 - DNA, 452 bp, Zea Mays
taagccttcgcctggaaaaagcagagccaattaaggcctagatacagagcaacgaggaagccaagaaagtgcctttggacacatcggtacccaaccaaacggtcttaatcagcgaagacctaagcaaagcggaagaaggcaaattgctatcatgcctgaatcgcaataaggatatcttcgcatggtcaaccctaaacctcgttggcgtcagccgcacagtcatcgagcacagtctgaacaccaacacttcgatactccccaaaaaacagagactacaaaatgtcagatgagaagaccgaagcagcaaaagccgaggttcaatggctgttggaggtcaaattcatcgagccaatcgactacccaacctggctcgtcaatgtagtcatgatcaagagtagtaggcaattttgatctagttcagtgtgatgtttgggcatcccccgttctcagca

SEQ ID NO: 133513 - DNA, 343 bp, Zea Mays
ccggctatcatcaaattaagatcaaggcaagcgatgttacgaagacgactttctcaaccagatatgggctttatgagtatttagtgatgtctttcagactgactaacgccccagcgtatttcatgtattcgatgaactcggtattcatgccagagccgaacaaattcgttgtggttttcatcgatgacatcttgctgtattcaaagaatgaagatgaacatattatgcatctgcacattatactccaacacctgtgagatcaccgcttatatgtcaagctttctaaatgtgaattctagctgaagcaaattaagttcttgggtcacacaatttctcaggaagg

SEQ ID NO: 133514 - DNA, 372 bp, Zea Mays
ttgggcctcagcgtaatatctttttaatgccagaagacgccgggttcattctggcaaagatcggggactcttttgcaaacctacgtagccgaaggggtatcgttgcactctgaccggaggattactatctgacggtcacaattagatcaaattacttaacgaaccgatactcaccaagggccaccggatccgagatccatgtcacgcaatacgcccacgcgttgatcacatccgagcccttggatttgatcacaacggtccgagcgcacccaaaccgaaggggtaacctcatcaaatcagggttgtctgcataggaattgacggcacacacgtcatcttccttccccatccgattgggcacggcggcggcat

SEQ ID NO: 133515 - DNA, 422 bp, Zea Mays
tgcgcagagatgtgtctagctctgcatctgctgctatactggcctacttgtgatgaactgtggaggaaggtgcgggtttgcttggtcctattctctcctaccgcaagaagtagactagaccggagattacaggtgtcagtgttctgaactggctctgaaaccttcctcttttttcgtgaggaaatggtcatggttggatgtgcctggatagtggatactgatgaagaatggcagctcaaggttgtgtttctggggtcactgatatttggatggaagtagcatgcaaacacctgactggataagtttacagaaaacaaaaggatgagcatagttcctcatctctgtacggctcctagagtcccagtaagccgcgtaagtgatacctagaactggaactgtgtagtggcatattcttgctgaac

SEQ ID NO: 133516 - DNA, 1367 bp, Zea Mays
aagaagaatttagagatgattaagcctaaagtcaggctgtcaggctgactaggtctgaaaatcagactgacaggtggatgccctgaacttcaagcccaatttcaaaccagatgcagtggctttttggggcaatatcatatggcaatattgtagatggcatattgctctacaactttgctgcagagcttggtatgagttatcatcagaaatcaagagaaaacttggcttcaaatctggctgccaggttcatttaactgaactcctccatggtacagtgctatcgggaggatcagaccgccagcgccaaaagatctcgtcgctggtggcccgtcgccgttgatcgattgcttgccgtgattcgtgcgccatggccatggataagcacaacccagtaaagatctcggcgtctgatccactcgagctcggttgcggctaagcatgccgtactttcccccagttcgtcggacgctcggataaccctcaccgccgtcgtactgtcgccgttgcgcaccacgtgccttagcactggctcccgtcacggtgaatcatgcggtgcatgcccggtgatcaccggagcacctgccacggtgaaagaccactgtgtcatgcgctagagcccttttcctctccggccgccaccgcgccatcatcaattcaagcgctaccgccccctggaatctataaattgagcccactgttagctccgcaacctcatcacgcaccacaccgtctagtatcgctcccaatcttgcaaccgtgagctccaatttcaagtttcccccaattctgttcttaaacaccgctgggtcgagctcaccgtggccagttctccacaggtttaatcataccatccttgttcttgttttagcatctctgtgtgctggtgatgctcaccaactcgcccaattaagctaagatcccatgaatcaccgggaacgtgtagattgttagttcatccgcgcgctcaccgtggccagaaacatttggttagccgttcctgaaattaacttaggggaaacatttactaggtcccgaatctagtttaggccgaagaaggacgccgttcctcgcatgaatcagccggtacgcaggctcgccggagctctgtcgtgctgctcgccgtcgaggatcgggcggtgtaaaaggaatagaacctcaggggtttctttgtaatctgtcagtgacctattacaacagtacgctgaacttggttctagatatgcaaaaccgcgggggcctccatgcaaagttaccacaggcgcgcgcgcgggcgcatttctgctgtagttgggccgacttgggctgctttcggcccgagactattcataaatttcctttttcttttcctagcaggctttggaaatctg

SEQ ID NO: 133517 - DNA, 536 bp, Zea Mays
gccatgtacggacgtacccatagccatccctgactctgtgttctagggcggttgtcgaaccctttcgagggcccaacctacgaacccctgaacagtatgtggcctctcccttcttccttcgtgaggaatgaagtctgaggggtgtcttctccctgctacctgtgtaggaatgaaaaaggggggagagagaggcacaccttttaatgcgtgttactcggggaggcgcagcggcgcccgttgccttgcgtcaggcgggaattaatgcgatgggacgcaacggcccgcgggctgtctattgcagcgcgcgtgcgcgcggaatgcgaagagaccaagcccactcctggatttgactcagggaggcttgacccatacatcggtgagtctgcccaatccctatatattcacccgagaggggattctcttggtttcttaccttgcctttgcctcctagccctagccgcctttgccttctttagtcgtagaaagtgagaaaagtgctcaagcccttctccctcgtcttcctcctcggttgcaat

SEQ ID NO: 133518 - DNA, 288 bp, Zea Mays
cgcgagcatggagaggtggatgcccttccggagacgaacacagacgaggacatagaccgaatggaggacatgctagatgacatccgacatgagtatccaacactagagaccgactgaccccgccggaggaagtgcagtagttttacaagttgttagaagcctcggatgcaaaagtgcacgagggcactaacgtgatcgtactttaggtcataatacgacttatggtgatcaagtcaaagtacaacttctcaaataactgctacaacgatatcgtgaagctgattattg

SEQ ID NO: 133519 - DNA, 628 bp, Zea Mays
atcagccacctccccttccctaacctcctgcttgtgcactccgccgtggacgcgcccatgtcgtgcgtttccccggccactcccccacacgcgcgacctcctttttggagcccgcactcactcgctcactcccccgcttagtagcgcccccagtagaccccctcgcacctctctctctcgcaccgcacgcgcacccgtggagcaccactactgtaagttgtccattctgtagctgctgtcgagctcctgtcgcgttcgttgccccagtgagttccgcctcctcgccagcaacccgagacaccctctggttttcccctagcccctctatttccctcggttcacgcccaccagacttctcgcctcgtagccgagtgtccgctgccgtcgaccaaggtccctgcagccgtctctcgagataaccaatccacccatgcccttaatttcccatttactgccctgttatccgcgcaatcacttgccagagtcgatgtgcgccgtcgtcgggctgcttcgccgtggaccgtgccctctggtgcctctgcgctgggttcgtgcccacggctgagcccgccatgtcaccctgaactcgcctgagtcctttcccagcgccttagaccctcgtcgtggc

SEQ ID NO: 133520 - DNA, 398 bp, Zea Mays
acgattagtgatccaacagcagttgtcgagctgcagatcggtcatactgtgacatcgtgtatttactcgggccgcgtgcatgagatgcagcgtttggggtattttgggaatggagttgggcgagcgtcggggcctgaagatgtccccgagccggagggtgagttggttgtgtttaaggcctttttactgttggacttcgcttgtcgccacaccgatttatagtggaagtgctgcagaagtttgaaattcagattcattagctgacaccgaaagttatggtagcattggcgaagtttgtctaggcggtgacttcatatggtgggaatcgtctgttgaggtcttcgccaagaattattgtctgaattggcagaaaaagaagattagtgaattgattgccc

SEQ ID NO: 133521 - DNA, 786 bp, Zea Mays
aaataattgtagctacgctagatgcagaattgaggagacctgttgttgtaatccaagcaatgtatgtgtcaggtcctagctctctaatggacgagcctatttctggtttttcttgtctctttgaataggatgtgctttactaaagcacacgaactggctattgaaccaatacaacttggtgggtagatttagagttcataatagatttagaaaaatcacaaaatacattcgaaggcataaaaagtcattaaaaatgttgttgccataactaaacttcaggttaggatttcactgctgaggttcctcctatattttctgtgttcagttattgaaccattgcgaaactctcaaccatgaggtaacaccaattttgaattagtgattcatgtggaaatagccggcattatttgttcaatagcaatgttactataattgttcaatagcactactgaggttcctcttatattttctgttgccataactaaacttcttttatggttctcaagcagtgttacttcagggctgcaggtactatagaagcccttggagaaactctactaatttgttctcgtccagttttttactataattgcaacaatgtaatcacacacttatacaacattttttaggagagatgagtgggggagactaggagagtgatgagtgtattctgtgattgagacggactccacctaggtaattgtcttctccctacctcccctcgatctgcagtccatccacgcctccataccactaggtgtaatttaacagcaacacatttgatgc

SEQ ID NO: 133522 - DNA, 463 bp, Zea Mays
gcagtcagtatgtaattagcgcggtgcgttatattgaaaataaaaaatcagtaatagattctcggtcgaggacgtcgtctctgcagcaagagcatagctaaagctaagagcctgaaacctaagaccccttgtctagagcgtacgtactttatctatctagaaagatcaagtagcagcacaaaataataatagacctaagagattgaactatgaatatcgcagtcacacagacaataataccaagtagtagtgtttgtgacaaatgaattgccttttctcgaagaaatgaagtacaaggcacatcaaataattttgcttggtgtagctcaaagataatacattgaaatataagaccgaaataaaactcataccgggttacttcttagaacaactccaagagactttctatatccttaccctccaacaacttatttaattactcattcgaatatatccatctttt

SEQ ID NO: 133523 - DNA, 383 bp, Zea Mays
gtcagacgacaaggctgctgccaagcgcattgagaggcagtcagcccactatgatgtcataggggaaggactatacaagagaggggtcgctagagtcttcatgaaatgcatccactcagctgttgggaagtgtttgctggaagaaattcatgcagggcagtgtggagtacatgcattgtcaatgactagtagggaaggctttcagaacaggcttctattggccgacagcaaagaaatatgtagctgacctagtccaaagatgtgaagcggccaattcctggctaagcagcagcatttagcagcccaacaaatgcaaactattctagtcaccttgcccttcgtgctgggtgctgaatatgatcgggccattcaaaaaatctcag

SEQ ID NO: 133524 - DNA, 365 bp, Zea Mays
gaaagtttgaaattcgtgctcactggtgatcgactgggagcaatactgggtggtgtggtgtgtgatgatgttgcgaagctgacggcgggctcaatttatagagtgcaacagcggtggccgagaattgcagtggtgacgcgcggcagttggaggatggggagtttactggtgtgtgtgattagtggcgaaaccccgtggcatccactccggtgatcaccggacatgcgacgcacggttaaccgcgacgtggtaaagcgtcaggacatgcggcggacgacggtggtggatcaacggtggtgaaagccttatccgaaggatcggtgagcaaggggagaggcacggcggctagccggagtggcgtccag

SEQ ID NO: 133525 - DNA, 540 bp, Zea Mays
gtccgagtaaaagccctcatttaatttaaacgatttgaccctaagtgaagcttgttcttggtcacggcagcagaacggccctggaggtcgtgttccggacgattaatgggatcgatgctaaaattaaagcttggggaagcttcacgggttcatcagggactaggtacacgattgaatttaggccgaacgaggatagggaagcgggtcgacagagagggtgtatacggcggcgttctatggaacaacggagtgttccggtggtgggactctggtaaacttcaattggttggcatcgagagcaacaggaagctaaggacatgctagaacaagaggcaattgggtgagtactaacccgagaagggctgcccacgaagaggtccttcacggcggcagaagagaccgatcccagggaaatccgatgatctccgatgatggtggacagaatagggtggctagtgagccgttagcttcgtaactaagggacaaagaacagtgctcggttgatttggatgacgggggtgagagcgcggtgaatttata

SEQ ID NO: 133526 - DNA, 450 bp, Zea Mays
cctcagttcgtttcaagattttgggaggaattccacaagtctcttggtactaagctaattcatagttcggcttatcatccccaaactagtgggcaaaccaaaagggtaaatcagatcttggaagatatgttgcgagcatgtgtattagtctattcggaaaaatgggatgagtgtttgtcattggctgaattctcttacaacaatagttaccaagagagtatccagatggcaccttttgaggctctttatgggcagcggtgcagaactccaatcaactggtcagggctcggtgaacggtttttctttgggctagatttagtaaaagaggcggaagaaaaagtgaaacttattcaacaccgtttaaaggttgcacaacaccgccacaaacgttatgcggaccagcgaagacgacccttatttttccaagtgggcgattttgtgtatctgaag

SEQ ID NO: 133527 - DNA, 428 bp, Zea Mays
tgatattcgatgatagaccttcctttagtgaggttgttgctacggctaaggagaagattggttggcatgatgttgacgacattaacgttgatggggtgctaaacgtaggtcctccacccaacgtgcaaagacttatcatcccaattaagtgtcagcgagagtgggataattatgttaaatcagctatgaagacacaaaagcaagtcatggaggtagtggtacgccgtttgttagttgcctctcgccctggagatgaaaactacgatcgtggtgccgaggtcgtgccaactgtgcctgatgctcaatctgcccccaatatgatcccattaagtgatcctacaaatgattgtggcactcatgacctctaactagattctactgagggtatccctttggcaggcaccccctgcagtaagtctctttgcacc

SEQ ID NO: 133528 - DNA, 295 bp, Zea Mays
ggcacttcgcttatgcggttcgaccttcagggccttcggtcttgaatacattggcgtggggagctcgaacgagggggatgtgttcgccttcgtcccaataggtagataggcgtggaagccaagggctatgttgtacgcgctcactaccttgtggaccgacagtgttctgtattcaaaattatccacgtttaattctatttttagttacatgctcaaggaaagtgtttttcggaccttcggtataggctttgtctgttttgtggcctgagcacttcacaaaaaactgaactaatcc

SEQ ID NO: 133529 - DNA, 522 bp, Zea Mays
cggaggtgatgaggtacttcttaccggtggtctagcggtgaagtagacgggccacgatgcgaggggttccgcgggtgagctaggactttcgatgaggaattccttgtgcccagagactccaacggagaaattagcggccgccaaggtgtcaaggggtcacggcgcaactctggagtgccccacagatatcccagagcccgtggtttacgtgttctacggcggcgacctcgtgctctcccgacgagctcacggtgtgttggctgcgcgaggattaactcagggtgggtaggtcggaaacaaggaataggttgcggcggcttggcttttatggtcgagagatggggtgctgcccgggtcgacggccgcaacggcagccgtgatcagcgggaggtcatggagcctggggaagatctacagtgcgacccggtcgcgttgattggtcgctgcgagcgtggtcccacctgaagagaaacgcgcgccgcacgcgaaggctggctgacccgtgggtcccgctagtcagcg

SEQ ID NO: 133530 - DNA, 459 bp, Zea Mays
ctctatattcaatgagttccccacttccgtgccatccatttgagtaagccgatatgatcatggccgagtgacctccgacaccatgaatggcccttcccatagcgacgacaatttgtaccgtccttctcccgttagaattcggcgaaggaccaagtctcccactacgaaggatcgatgtcgtatagccttatcatgatagcacctcagggtctgctggtatctagctgactgaattactgtattcaatcgctcttcttccagtacgtcaatatcttctagcctggtagcctctgcttcagctatgctttcgaagaccagccttggtgccccaaacctgaggtcggcaggtagcactgcctccgaaccatagaccatgaagaagggggtgtttccatgcggagctcgactgggttgagttcttaggctccaaaccacataaggtaattctctgatccactc

SEQ ID NO: 133531 - DNA, 308 bp, Zea Mays
ccacataactgagcatagtgagatgttggaggccactttggctagagatcaacagaggtataagcattttgcagataagaagagggttcctagggagtttcaggtcggagaacatgttttgctcaagctccagccttatgctcaaaattctgtggtcaatagaccttgtcgcaaattcgcattcaagtattttgtgccttacacagtgactgagaaaattgggccaactgcttatcgtttggctcttccaccagaagctcagatccaccctgtcttccatgtttcccaactcaaaccatttgttccaa

SEQ ID NO: 133532 - DNA, 812 bp, Zea Mays
cattggccgttttaaggacttattgattttatttcacctcatctttgattctacttcaaaatattagtcacctcgactaattctatgttgtgctcctatatgcccccttgccaaaagtattttattctattatggtctatacttctctcaatctattagatctgatctcactcttatgcttgcgacatctttgtagattgccccctgaccataacctttttgtctattgggattcttccctcttccgtcacgaaattgctaccctttgactgtcttttttccccttagtattgacatgttcgtactcctagattcttcagtacttttgtttcaaatacttacatctgaatttctcctgcctacttaaacactctagtttatatgtccatgaacttctggtcttccgagatccctccctgttccgctgttaagtcattatcctctgcctttttgtattcccttgtctgggtacgcttgtatcattggaatattgcatattcttaattttatatatgcttacctttatatcccaatgactattcaagacatttcagttaacatatccttgaccacccttgtatcctaatgatccatgaacggtcattttgttttgcacatccttggtgatctcattaattccttataatttccctcggtaatatgttctgttacttcaatcgttttgttggaaccttagctaccttacccttgattgttttctccacttcatgagtcttgccttaactctatccttgattatgctttcacgattatcatctttatccttatcatctctatatcttaccttgatg

SEQ ID NO: 133533 - DNA, 432 bp, Zea Mays
ctcaatcaccaccagggacttgggaacttctccctttgctgaccggcttgtatcccctactacaagcacttaggtgcaagtaatataagtctcatgcccctctgctggaagtagggccttctcttgcttgaaccaggataaaggcttgtgtctcctagcatcacccatctgggtctaggcacgcagtactaattcactagtcggtaggatccttaggtcaaaacaccgacacttggcgatgcagtctgcctcaaaatagccctcgacttgttcaactctataacagggcttaagatcaacttcaacgaaagtgtcgtcgttcccatgcacatgaatgaggaccacactcagcaatacactaccctccttgggtgtaggaaagaaagcttctcctagacctacctcaccttccccttctccccaccaaactgc

SEQ ID NO: 133534 - DNA, 793 bp, Zea Mays
gagaaaatgaaaggaaaaacaaagggaaagagatgaaattgatcttgataattcaggaggtgataggtcaagtgaagaagagagtgaacatgggaatgatgttattgtgctcaagtcaacaaaaggtggcagtagctctagattagcaacaactggtggcactattgataaattctacaaaccttagtcaattgaagaatctgtccaaaagaacaaaagaggattaagcactagccaaaaaattcaaacacaattgacaactcagaaaagagaggagaggagggatagagcttgtgagtatatatgtcaattcttttatgaagctggtattgcacataacacagtcacccttcctagctttgctcatatggttgaggcaattggagcatttggtagaggtttgacaggtcctagttcctatgagatgagcggaccattcttgaaaaaatgcaaagaaaaggtgttggatagatttaagagccaccaagaatcatggcaacccacaggttgtacaattatgacagatgcatggacagatagaaagggtcggggggtaatgaatttagttgtccacagtgctcaaggggtctgtttcttggattctgtggactgctccgctgtgaagaaggatggcaaatatatttttgatcttgtggatagatgcatcaaagagataggagaggaacatgttgtccaggtggtcacagataatgctagtgtcaatacagcagcagcaagtctattggcagcaaagagaccctccattttttggaatggatgtgctgctcactgc

SEQ ID NO: 133535 - DNA, 579 bp, Zea Mays
tggtttaatgaatcatcttttctgatttaggttgtcctattctctatggtatgtaactaaatagcctatacaaaagttaccataatggatcagatcttaacggaaattgtttgtgaatatctatctagcttctggagttctgttaagccttcatttatcttctaactaggcataggatcgtctcatttaccctttagctgagagcatgtccatttcacctccatcgcttggagcatgtccatttcaccttcatcacattagtaatcatgtactatcaggacataatcccttcgctgcaaaggaaaggcttggcacaccattgttttagttattatgatctgaacaaaccattttatatatgaagctcgtggcaatggcagccccacaacacgacgatggaacccgtagtgcgcttaggctcgcgcttctttgcaacaatgcattgttctccataagggctcccgtcactattgcgttcacgttgtccgttgcaattggaggctcgttaatttgtgtttcgtcgcaacgcacaggcacatacctagtagctacttatgctcaacagattactctaaattc

SEQ ID NO: 133536 - DNA, 620 bp, Zea Mays
gggaaggacgccacaagctatcaccaccatgggaaggacccttcatagtaacggaagtggctcggtcgggctcataccagctaactcagatggatggcactctaattaggtacccctagaacattgagcatcccagaaaattttacccttagcggcaccataaactcagatggtgggctaccacttgtaagtccgtgaactcatttttttaataaagttctactttctgcccacatacaattgtactttggtatactactgacagtggaattgacttaagtcagtgttacattctcatgcttacaaacaaagggtgcacaccataccataccacacaaggaaatcggttcgggcggcgaaatccgaccccagttcggtgctacatgccttgcttgactcattggtaacctctaaaccgttacttacacaaggaaatcggctcaggcggtgaagcctgaccctagttcagtgctacatgccttgcttgactcgcgggtgacctctaagcccttacttacacgaggcaatcagctcgggcagcaaagtccgaccctagttcggtgctatatgccttgcttgactttgggtgcactcatgccctactttacgaaggcaatcac

SEQ ID NO: 133537 - DNA, 434 bp, Zea Mays
cggaccgcccgtctctcgtgcccgaggggcaccccgcggaggcgaacgaacattgtatgacatcctcgacgctcagtgcccgtaccacaaggatatgcgtcatactcttcagaactgcagagacttcaagcactccatcgagaatgggcggcctttccaacctctaccacctcccccaccacgaggaggacccggagaacctcgacaaccttagccgtgggaagggggaggaggcggagcattcccgcgcgtcgatggagaagtcaacgtcatcttcggcagccacgggtcacaagagaaaaaaaggcagtagaagctcaacgatcactagatactggtggcggccaccagtgctcccgccccatatcgatggtctaaacacccgatcaccttcactcggccggatcaatggctcaacttcgatcatccaggca

SEQ ID NO: 133538 - DNA, 298 bp, Zea Mays
caaggattatgatttggatgtacattaccatcctggtaaagctaatgttgtggcagatgccttgagcagaaaggcccagtgcaattgcataagcataggtacaagagttaccaccctgtgtgatgaactgtgcaagctgaacctggaagttgttccttccggtgaattaagttatatctcggtggaacccacattgcaagagcaaatagtcagggcacagattgaggataaaggtgttcaggttatcaagggaatgatcaagcaacaggcagaaaaatacaagtgttttcggcaagac

SEQ ID NO: 133539 - DNA, 396 bp, Zea Mays
taaatcgcgtaaggtgcagccgtccgatgcagatggcgtccccgtgaagtccatccaggtaggagcagactccttctagaccacccgcatcatgggggatctaggggagaaataggaaatcacgttcatcgccttcctccgagcaaatgtggacgtgttcgcctgggaaccgtcatagatgcatgggatctccagggaggcgatcgagcaccatatgaagatcaaccctaatgctaagctagtgagttataagcctcgaaagcagtccatcgagcggcatgacttcatccgtgaagaggtccgaaagctattgcacgctagttttatcaaggaggtccaccacctcgtgtggttggccaattaggtcattgtccccaaggtgaatgggaagctttg

SEQ ID NO: 133540 - DNA, 331 bp, Zea Mays
gttggttaaggcaagaatatcctagtgtaagaaagtttatggtgagaaaggactccttgttgggtggtaatgcatctgaagatcgagtttgacttctctccttccttgacgaggtttatcttgtccttttcgagtcttgctctttggtgtctccatccgagtttgggacaagaggctaagatagatttgttatgtaggtcaagttgttgggtatggccgagttgatctaggtcaccagtttaagcttaagcggatttggagtatggcttaatcctttgtaccagcattaagtaacttactctacattagatcataatagattagatagaat

SEQ ID NO: 133541 - DNA, 303 bp, Zea Mays
gcatatgtatgtcgatgtattataatagtgattgcgttagagtcatttgaagtattttgaatgcatgtcgaatatggttgcattcgaaatagggaaagagtcatgctgtgcgatgaaaaggctagattgattttataggtcgtacgaaaatcgttctattaagtgtatacgtcgagtgtgttaaaaagatcctatgtaggcagaatgtagtgtattggttaggtgaagagttttataataaacaagtatgaggcgtgcaattcagtcgagattgaagtgcaaatcctatgcaatgtgatggga

SEQ ID NO: 133542 - DNA, 534 bp, Zea Mays
gctagccttgatgatcttcttagggtgtttggggacaccttagaaaatgctcgtgcgtagtgtgatctatggtgattgtatgcttgtgatgaactggagtgctgaataaaataacatgtttgagaaaaaatatggcatatgcatagtagtaatcctttctcccctctagcagatggcctcagataaaaccacgcctaccgcctcagggattggagcaaggtctcccctaggtgtcgaaggagaagtcggtgggaagggagtgagacccacctctccgcacctctggagatgccattagacctagcccaagttctggccaaccaaacccgactcattgaggtcctcactagaagcctcaagaaccagcgcccgattggaggaagacctcaggacagaatgggagagttcctaaggctcaagcctcccacattcgccggatccatcaacccactcgatgttgagactggctacgcacaataaagtggaagttagaggccatcggataccctgaaaaccagcgtgttcatctagctg

SEQ ID NO: 133543 - DNA, 486 bp, Zea Mays
gaagaggggagggagagcatagagatagagggaggcatttaataataaataaagtgaaagaggtactgtcctgttgccgcagaccggagaacaggtccgtcgcccatgcctcgacagtgcagaggtgtggagaaaatgtggatccgtgcagcggcgattttgacgaggggaacgcaccacaccacgtcttctcctgcagctgctgcgtgggggtctacgggatcagcatgggcgaactggcggaaggttacgacggggtatggcgaggggcgccgcacacagacaggcacgtacggtggcaaacggatttggggaaatcgaactgcgaacagggaacatgacagtggtaaacagatctgtggatggtgagctctgaacaataaacagacttacaatcgatgacttctggcgaaaggacggcggctgtgacggtggaacggcgaggacagagctggtggcggggaggacagagctagccgcggctgc

SEQ ID NO: 133544 - DNA, 577 bp, Zea Mays
cggaggtcgacctacttaaagagctaaagtgcagtccaacatggcagcttgtggacaatatataatctactggccaaaatacacacacgagtgctgcatgcaccgtttcttcagtggtggcggtaactagctggtaaagaggccggcgccactaactagctacaactacgacttgagtgatgctgcaactgtgacagatcgagagctgcatttagcgaaacgaaagggtcggtgtagtgggggtggcatgcatgtctgccgcccgatatttacccagctacttgtcccggccgctagctgcctagcagaatcgattggtcggttcgcacagtccgaatggcactagtattgctgtcacgtcaaacatcgatcgtcgacctacgcatcattcagtaacgaaaacacgtagatataattggaaaaaatattttatttaatattagagatacatgtagatatagggctattaaaatagttaatttaataaacgaaaacatgaagaaaaaaattgggatgatttggtttgggctcttggccttctgtcgcgtaccatttatatcggcccagtacaagtgct

SEQ ID NO: 133545 - DNA, 569 bp, Zea Mays
ggggattcacctcgccggtaatggcgtcgccgtaactgtaacgcgggcggggctctgtgtttcgaatccaggaaagaaagggtcgtcatcgggttcgtagtcgatagggctacgcatatagcctttagaaacgcgggatgagcgctctgggcgcgctgttggcgggctccggtctagcgccgccgcggtgctgggcatcgctgtcctaataccgccggcgttggtagggagcaccacgggccgtcgatctgctagcgtacggtcacgattagatgctagggcaccggttcgatgggctcaatctggtccgtctgtctccgatcgagcgcgcgggattcacagagggcaacatagaatccggaccactgatcttaaatcgtgcgatcggcatgggatattggtttatttacacctaagatctaatctgggtcgcacacttatgatccgacggctgtagactcccgtaccccttcgccgagccataattgcaaaagagaccctagaaaacctttttatcaacccgccatccacgggagctgtagtctgggactaggaaatgttaccccgag

SEQ ID NO: 133546 - DNA, 859 bp, Zea Mays
cagaactgtgcttgaggccttgagagacagaaatggttaactgatattaaaggggccttgacagtaggtgtctttgccgacctccttgatctttgggatgaacttcaaactgttcagcttcatccagacatggaggacaagcatattttcaggtttgctactgatggaatttattcagctaaagcagcttatgatggcctcttcatcaggtcgatcaaggctcagtattgagaattaatttggaaaacttgttctcctcccaaatgtaaattctttccatggcttgctgatcttggaagatgttggacagcagaccgtctgcacaagagaggtttaagccatcctgacaaatgtgttatgtgtgaccaagatcaagaaaccatagaccacattttggtgggttgtgctaggagcttttgatttcagctgctgggacaggtcaacctgtctggctttgctcctcagttgggagaagttaaaactatggaatggtggagcaaaatcagtgagcagctatgggattgctaaaaaagggcttaattccttgattaccgttgggctatggactctctggaaccatagaaatgggtgcgtttttgacagagtaaaacccagtctagagggagctattagaagagccgaagaagaaattgttgtatggaagttcgcgggggccaaacaccttgcccttattacatctcccattccaggtgtccttcagggatctggtagagggattagtcgctagctccataaaggaagtcttttgtgtctggggctggactggtgctttgggtctgtggttgtggtgaccttttaggtggtcatcttgttttgatgtggccggatggccatgatt

SEQ ID NO: 133547 - DNA, 396 bp, Zea Mays
cacccctgaaataccaaaaaccctaataaggaccctggaaaaccctaaacctaaaccctagggggttaagcgcaaaattagtgcacttttggactaaagtgtaaaaactataatgttaaggcatataaagtcatttggttcacaatcatgaagatttgcaagctaaaccatgaattttggacctatttgcaaaaagaccccatgtgtgttctagggttgagtctgaaaatcagtgatattgactccactttggagctctatatcttccaaaatagtgaggatttaccctaggtcaccacatcaaatttgtaaacctatcaaaggagaacaattttgcttaagagtgtaagcaaggttgttatgaagaatttggagataattaaacctaaagtcagg

SEQ ID NO: 133548 - DNA, 431 bp, Zea Mays
aaccaattaacaacgtattcttcacgataatcacccaacgatttgcgttttcaattagacctcacatgagcactactactttttacccgtgcccataaccatgcacatttagatcaacaggcaaatcgtcatgactacgagcctaactaaagccatctaacaattcggctaactagaacaacgacaccgcccgctagacagcatacacgtcggctttgcctattattatcacaattcgagacaccacatacactacaatatttttataaacattcatattcacaagtatttttgcacaccgaccaaatcatacaaatcgtaaactactagtctccaactcacaatcaccatgcatttactccccgatcatgaacacatacatgtttatcatacgaacagagcatttcaataattatcctaaaacaattaac

SEQ ID NO: 133549 - DNA, 364 bp, Zea Mays
tagagcggcacttatagcactagtggaggtgggtggcttggatggttatggagttggcagcggtggccagtccatcagtgagcaatatgatggccataactttcatcgcccaaagatcaatttccccaacctacaatgtgacacgcacccgcccgagcttacgagcgatgtatgtttgtatcctcaggcgtaacctcaccaatatctaccatggcatcagctagaaagaccctagtatcttttcctttcatataggcgaccttggaaacatctaagccatgtttctaatggctatccctaaaggagttggcgaccaaatgggaaaacagggaatgctaccactaccctaaaaagtacaccagct

SEQ ID NO: 133550 - DNA, 534 bp, Zea Mays
gtcatggtgtagtgaaattgcatagatgtatgatgaattctccttttaacttagtgcacatcaagagagatatcgattgatagtatataaggcactaagaaacataagtgttaattgaagttattcaatgatcaaacaaataacagatgtgatcaaaagaacaacatatgcatttgataagataggagaatctagtagatatgctactttagcaatgaaactacaatccttgataaagatgacattactctaacaagatggattgatttgtagtagcatacttcatgagaatcttattctcatacttgagactaaatgagattaccaagataaagtgttagtctcaacatgatcaagatatagaaatagactccccctaaagatatgcatcaagaatttgaatgagatgaatagatgcattcattttagagacgtgtagggagaagcattatacatcttgatcaaggcttataagatttgcaataaacaccttatgcccgatattctcacaatgaaaaggatttagaatactca

SEQ ID NO: 133551 - DNA, 703 bp, Zea Mays
aaaatagattggcaacttgctgagacatgagagaactaaagtcaacagcataatccattgaaccaaatggatacactgcttagagatagaatcgataaaatggcatcatgattcttggaggaagagcatgagatcgaccagaattgagagatttaggccagatcaacatctgatacttgagaatgggttatagcagataaccagataacggggcagaatcattaaaggatccagggattcggatgataaagccacaacatgactcacaaggaaagagatcaccagatccatgcgaaaggagaggtaggcaaacaggatcagctaggatgatcaacagaaacgccatgaagttttaggggcaaggatttatggaaagaaacatggcttggtcatggtttgcgcaactagacaacaaacgatgtttttttttgacataaccgcttgcacaaggaagttccggtttggctagtggttaagctatgggggtctataagctgtgcaggtgcattaccaatagcgcaacacacaagggctagaaacaccaacaccatcatgatttttttaagaggttttacttgctaaactcaaggtggtttggatggggtctttttatgagcaaaacaagcaacaatttttattggcaaaagggttgaacattacaataccacctagatagcaagacgagagaaacacataacacgac

SEQ ID NO: 133552 - DNA, 516 bp, Zea Mays
cctcggcttcacgccacgaggagcagcggtggcgcccgctgcgtcgatgcggagctctatcgcgacctaccgggagagcctgtctcggctcgccggcgaggtcgacgacgccgctgccgacgaggtccctgggccgccgctcgccccggcagctaggggcgtcgacatatccgccacaccaccgtcgtcgggaaggcgccgacggtactcccgccctggccccggctccgatgccaccgagcccgacgaggtaaacccccattccccgccgcaaatttctcaggtggattggttcaaatagaggttcaggtgtgcctggtaagttctcgggatccttttgagagtgcatctaccgacgccttttagatagtatggtttcgatcactcaaccagcgcgtgtagccaagttattacgggaaattcacattgatgagcaggatgttgatgttggaagaaaaaccagtatatagagtgttgatatccgggtttaagggggtgctgatagcgaggtgggta

SEQ ID NO: 133553 - DNA, 498 bp, Zea Mays
cacatacagggtcggaccgctttaaattgcgtaacaccatacttcctgttgtggctaggtattgatttctagagtatggggattacaaatgagctttatgatggctcaactgctgttgacatacaggttcaggccgctttaaattgcgtaacaccctacttcctgttgtggctaggtattgatttctagagtatggggattacaaataagctttatgatcgctcagctgttgttgatgagggtggagtgagatgatgtgagatggttttgtagggtcccccctcggccttatatacacgaccagagaattatcccattacaagttgtaatcactatctacttcacttatctcctttgtcgcagcttgcagtctgatatatctgaagtcttgatcatcttctcgtccgagttatcgcaagatgcatagctccttaggtccttacaactgcaccacccaagatatcagttcctcggtagcgcctaactcggacatcggtc

SEQ ID NO: 133554 - DNA, 730 bp, Zea Mays
gggatccgcaatagttaagtaagtaatgcgatgagctcagtccaaaccttttcaaatcctctaagaaaatattttactagatcatgaatgctcttggaaaaaccacttttactccccactaagaattccccttggttcacctcagctttctcaaaatctgttcatcagtttcaacaatcggttcaaccggacccaaaaccggttcaaccggtttctgcattattccttctgtcactttctgacctgccagtctgccagtcaatcctatcagaaaaagtcatgtgcagagttttttgaaaactggttcaatcggattttggtccggctcaaccgaatttggggccggtcgagtctccggctgagtcccttagtgaactgagaactccctggtggaaaccggttcaaccggtttaagaaccggttccaccagttttgagtccacttttcccaacggctgccagcttttgggggatcctttatatacccctcacactctctctcttcattcacttctgccctctccacgaattcttggcttaccaaccttcaaacaagagtattcaattcacctctcacaaccgaaatcgcatctccttcaatcgtttgaaggacccttggtgtgaggtgaagtcgatctaactcgctgttgatttcatcttgattctcccattctcttcatctcttgagctcatcgcaaacttgaatcttgtgcggatttgttactcttgga

SEQ ID NO: 133555 - DNA, 597 bp, Zea Mays
gcaatacactgtaagtgtcatatgcggtggtgtctgcttcaagagtaaaataatcaggccttgcatttttaatttaagtgccatatgaggtggtgtctgattcgacagaaacaagtgttgtatagtcaggaccaaaatcacagaaaacactgccaaaacggttaaattcaggaccaaaatcactgaaaactcagatgttttttctaggctggcagaggacagcgatagcagggggaggtgcgtcagatgcaatacgtgcggaggatggggtctcggcggtgccttggacttggaggagctggatttgatggccggcgagcagacatctgcctggcttcagcgctggactagcctatggtttcaaacacacgccatttacttctacccaatctatcaaaatgtaaattttttacctcttgagatctccctggttcatacaccgacatctccctctcccaatcaacttgcatcgtggcttcggtgtggccggagttcgacaaggttggcgactgaacggtgaagcgctccacgaacggtggtgccataccttggcccaatgctctgttggaggagagaaacgaagcgtcgaggtttgct

SEQ ID NO: 133556 - DNA, 594 bp, Zea Mays
gtcagccgctgcgggcttagagcctcctatccaagaggagggggcacggtatacttcaattgaaactcacgcgttaccaaagcaaaaggccacgcctaagcacttctacgagcggtaacgcatcagcctatacctcaacagcctacacctcaacctacaaatgcgccctgctccgattatacggtgaacgaaccggcaccgcatgacaggagatctacacggcgactttcctccgagttgtcaaataaagcaagagccttcccggaacgaaaggaatcccaagcaatagcggcggcatcccaagccccaacggcaagaataacagagggcagagcaaagcagaagttgagcagagcagccccagaccagcacgctcaagcaaaacactctccctctcaaattccaaaccctgccaccacgaaccattgctctttccccattgcacatttaccccaccaagagtaacccgccgatctagagcgcgcccaaggctagaacagagcaatgcgcaaggcgctcgtcaacgccgtcctcttcccggctctcgccgtggtcgtcgctctggccatctgctacttcgtccgccgccgccgc

SEQ ID NO: 133557 - DNA, 732 bp, Zea Mays
caaatggcgaagtcaaacttgctgattttggcatggctaaacatgtaatgtggtttcttttcattttatggattttttttcagtgtgcgtgtgcctgtgtttaggagcactattggaacctcactcacccccacactagcatttagctagggcgctaggctatagtttgtctccatggccagccaaccagctgtcctagttggtagaggctggaactttgttccattatctaaaaaacaggtgtcatagtttgtacacctagctcctcctagattggatatcattttatacacacttttccctgcgaggatgttgatggtcatattccgttttctgcactccgtggcatcattagataactgaagcaagcatgattctgattggtactaatctttttgccatatgaagaggcaattagctaaaaggagatccttttgagtttttcccccatctcacattatttgtttatatgaagcagataacatctttagccgaaatacactcattgagaggaagcccatactggatggctcctgaggtatgctgttttctatcgacggcatttgaagagttttccatgtatggtttccatctccaggaaaagttgtgtgaagtccttcaaattcttcaggttataatgaataaaaatgggtacagttttgaagttgatatctggagccttgggtgcacaattattgaaatgggaactgggagacatccttggcatcagta

SEQ ID NO: 133558 - DNA, 743 bp, Zea Mays
agtagaatatttagcgtgttttcctcccatgtcatcccaatatacctctgatcaaacaacacaacctagatcaaacaccacaaccaaaaaaagaggataacaatgttgaaatgacagtgtacttacaacaatatcaggctaggagaagttcctcgagctatgttacatgtgcctagtaaaaagactcccgtgtaagaaatttagagtggaatgaatgaatagatacatagataaactgagtcagcgagaaaacaacacaagatccatcaaatcaccagactcgagatgtaagactaacctgtttgacaacgaggatctcactggactcgaggtccatgccgaggtagacatgcctgaatgctccactcgtgatgaggtcgcctacggtccctaacacattcgtcggaagccaagatcgtggccaagggcgagggcggttgcggcatgatgcaacacgtgggtgacgtgcccgagtctgctccctgttgcccccagcaccacccgcagtgacagaggaggagagcaatgtggcgagcttgttgagggctagggcgtccgcatggaaggagatggagcggcgcacggagtagaatcctaatcctcgaggtgtcgacgacgaagtagcgcgaggcggcgtggcacacgacgataacagtcgcagagaggagcacaatcccaatgtcgtctaaatcattgctgagaggaccttgatgcttcacttatggcgacgcgtgatgagctgg

SEQ ID NO: 133559 - DNA, 1329 bp, Zea Mays
ggatcaatttggactaaatatggattttctagggattaaataagttctaacaattacttttacattaaaaatcaatttctatttcattttctttgattttcttttgccctggactgcgcacattaaatcagaagagtgcagggggtattctataagaattccgagtctttacacgacatgtgtaccgtgggttgatttctactaaccctaggggcccgactgtaaaatgtcacggccgaaatggtatggaaaggtatccaccacctgatttggttccgtcgcgccagattagattgactcggctatgaatcggtaagcgcccgctgctattggatctgggatccatggcccagatccgtccacgccaacacacacacgaaccaccgatcccgagatcgacagccaccatttaattggggacgagggggtatgttgatctaatcctagccgcacgatcagatcggatggcccggcgtcatcttcaaccttctgccctccaacacgacggtggattgtacttcacgacggcgcttcgccgccgagcgcggacactgcgatttaatgccccaagacctcatccgaagggtactcgcgtagaggagagtagggcagagagtatggaggtgatcttaccccggattcgggacgatagcggctctgtccacgtggttgtgcggtccacagagatttcccagcgacggtgagaaattccgcctgtacggagccgcctcctcccaatcatcgaccaccgagcgatgtgtcgtgatgcgcccgccgttccccaactccaaacaccgacgtcgaccgcgcgcaggtgacggctggtgaattccaccgcggatagtcccaccgactccctcgcctatgcctcggtctggtgcttcaattgtgtaagggaagttaaaagctaggagggggaaagaggggcccgggcttcctttgtacccggtccagaagggtggtctagtctacccagttccgcggatttcgcggcgaagtggtcgcggcgcccgatttccacggcgagcgatcgagggagagggcacggagtctaacagtggggtctggttcccagtgtttgaagtcacgcccgagcgcccgcggttcactggccagtgggcccgccggtcagtcgcagagcacgcggcgcgcgcgtggaccgctatgatggcataagtgggccgagaactcaggaataggcccaagcgcgggtagggtaagtatttttcctttttctttgtttttccttcttcctattttcgaatttcaaattttaaattcaaatttggttgagtttcactccttgggctaaatgtacaaattcaaaac

SEQ ID NO: 133560 - DNA, 638 bp, Zea Mays
taggggtctagaatttacggtgtatgagcaaggcacaatatggcttaagaaccggatatgtgttcctgagattgacagcctctgtgagactatactgaaagaagcccatgactctaattattctattcatcctggtagcactaaaatgtatcaggatctgaatcaaaagtactgatggtatgggctaaaaagagatgtggctgtgtgtgatgtgtgtcaaagagtcaaagctgaacaccaaagaccagctggactactgcacccgttaaaggtacccgaatgaaaatgggaagaaattggtatggatttcattatcgggctgcctcgcacctcaaaaggttatgattcgatatgggtgattgtggatagactgaccaaagtggctcacttcatttcggtcaagattacttataaatgatctcaattggtagagatatatatggctcgaattgtgtgtttacacagtgtaccgaagaagatcgtttccgatagaagctcacagtttacctcaagattttggaaaagctttcatgagaatatggatacgaagttgagcttcagttcggcctatcaccctcaaactgatggccaaactgagaggactaaccaagtactagaggatatgttgagagcttgtg

SEQ ID NO: 133561 - DNA, 597 bp, Zea Mays
ctaaacgcatcagtttcttacgcaattctctatgataagatgggggaacaaatctatcacacatagcatcctttaggtcatcccaagtagttggttctctaccatcacccactaaaccagtccaccaaatgatagcaaaatctttgaactcactagtggcttgtctaacctgatggtgttcaggcacaagatgggtggcaaattgttgctctatgtcatctcccaatcaagatatgcctcaacatcataatgacccgaaaaagaaggtatgctgaacttaatcttagcaaaagggtcatcgagaatacgattgttattacctcgctggttgtcacccatacctaccctgttccgacgaagacgacattgtaggcgggtgtctctggtagctgcctcatcaaaattgccacgtgcatcgaaaatggcatcatcttgagcctgtggtggatgctgctgatgctgtggtggatgctgctggagttgtggtggtggaggaggctgctgatgtagtggacgtgtctccaacatggcaacccgatcgacaagctcggttatccgtctctccaccctatctagcactttgccaagatccattgc

SEQ ID NO: 133562 - DNA, 725 bp, Zea Mays
gggtgcgctggatgcttgactacctagcggggctaatggcacgtcaatttattggacccgagggcggtgactcttgaatttggcatggcgcgctggcggccggagagaggggagagcaccggcgcaagaggtgcgtggctttcaccacggcaaggttaccggcgatgaacggacacgccaaggcacgttactgcgacgtggtagagtacctaggcacgtggcaactgatcaacaagcggccagctctggcgagcttatctgaaccggccgtgagtcagacggacacggcggccggggcggaacagtggcctaagttcatcctcaatgcgatatctcttaccccgagcagttatctatactccgttgagcatgaatcgcggggcctggcgtgaatccgagcgcggggtcgccggcggcgaggttcactgaaccagaagatcttttcgttactgtaccatcaggggctgctttagttgttctgacagagcggtttgcagcgcccaaatctcaaatttttacatgataacttgttaatctacctgtaacaaagttgttgccctatgattcggctacaatcttgctatagcaaccatagtcaaacaatcactggatcatggtcgaatccaatctcaaagtttgcccaacttcactgttaaccattattcagttcattggctcattggcagcctgtctttagatctaattatctccaaattttgtatgac

SEQ ID NO: 133563 - DNA, 386 bp, Zea Mays
gagagtttccctatgtggtttggagcctaagaactcaacccagtcgagctctgcatgaaaacacccccttcttcatggtatacggttcggaggcagtgctacctgccgatctcaggtttggggcaccgaggctggtcttcgaaagcatagctgaagcagaagctaccatgctagaggatattgatgtgctggaggaagagcgattgaatacagtaattcagtcagctagataccagcagaccctgaggcgttatcatgataaggctatacgacatcgatcctttgtagtgggagacttggtccttcgtcgaattctaacgggagaaggacgacacaaattgtcactgctatgggaagggccattcatggtatcgaaggtcactcag

SEQ ID NO: 133564 - DNA, 685 bp, Zea Mays
cgaactcgaagctttccgcttgggcgccatctcaaccttgctagcgagcggagcggaagcgatattgcaggagagcagagaaagcctggatgcagaaaagcagaaactagggcacggaacgcggaggcgtgcgacagtgcagtacatatggggttttcccgggcccggcgccacttccaaaatgttggcacgccatgtcatcacccggtcgttatttctaaaatgtgggcgtgccacatcatcactcggccgttatttccaaaacggccgatgcaacccattttaactcagcggttatttctaaaaatgctgatgctaccagacttcacccggccattgtttccaaagcggccggcgtggcccgttatcactcggttgttacctctaaaacgccgacatcgccatcgatcactcggctgttacctctaaaacaccgatgtcgccatcagtcactcggttgttattcctagagcaggtgacgtggctccaaaaggattcggttgttacctctaaaacgccgacatcaccagtaaccgctcggtcgttacttctaaaacaccgacgtggcccgctatcactcagccattacttcaaaaagcgccaacatcaccaataataactcggccgctactaccaaagcactgacgttgcaaataaagcagtctgaagcgtgatccgatgattc

SEQ ID NO: 133565 - DNA, 338 bp, Zea Mays
ttgagttctccgtgtaggttagaacctatcggtagggtggtttagggtctcggtggcttgcatggcatgtgttgtccatggcgtcgccgctggggatcatggcgcccccatgcccctgtgtcgagggaagaagatgaatcagtggtcattggattttgatcgacgggtaggattagatccaagttttagcgcttcggatggagcgaggtcgttgatctatgagtcaacggtggaggctagatccaaggttgatggtgtttctgtcgtcagatttagtacctctttgccgcagtaaactgagacctagatttagatccgatggctagattaggtcgtag

SEQ ID NO: 133566 - DNA, 401 bp, Zea Mays
cgcggccgtcgctgcggtcgagcgacggcgcgcgcccaagaagcaagagcggggccggcaggcccccgtccagctcgcgcagccccggcccgtcgcgcccgtcctccgcggcggcggccgacaagccggtgccgtccttcctccgccccaccgttagctcgtccatgcacagctcctcgtcgtcctcctctctgccgttgccctgcgcctcctcctcatccgccgcaggctccaagggcgccgccgccgctacggcgaggcggtccgccgacaaggccccggcgcggccggtgggcgcgccgcggccgatcacgcccaaggacagggcctccgcgcagcctgtgggcgcgccgcggccgatcacacctaaggacagggcctcggcgcagccggtgggcgcg

SEQ ID NO: 133567 - DNA, 299 bp, Zea Mays
cttggctcggctcgtagctgcaccgagccacgtcaagccgagtcgagcttggtttttcccttaccttgcgactccttccctgaaaagccatcattggtcgacccttctcccagcctataaatgtgggaggctagccttaggacaagggagaagaacgaggaacagaaggacacagatcgagaggagagcacttggagacaatcggacgccttcagacgtagacgaacccacaaggacgaacaagaagaggagcgccgacgaggaccaggaggccaaagtccagccaagccaagacttat

SEQ ID NO: 133568 - DNA, 432 bp, Zea Mays
ccgtgtatttcaataattatcccaaaacaactaactccattacacacttgtatcacaaaccgacttgacttacttgaagtgtctactcgaaatcgtgagcacaatcatacaccatatgcgacgcataattgaacgaacgcataatacgcatcgttacgattcgacccataaatatagagaagcgacgactactttggcatgtcaccacctctctatataagccaaaacaatttctactatcaactaagagttctaggtattaagcacattattactttccacgcgcaaataaacctcaacttaacacaagtgacaccgatagatttttactaactcgtcaggcacataacccggtctcgcatacaaccatattgtgacgtgcactcgagacacttcgatcaatgtggcgcgaccactaatatatgaaccccg

SEQ ID NO: 133569 - DNA, 329 bp, Zea Mays
gaaagtattcgacaaaaatgaaaagctcacggggaagtggatcagggaactgccttatgtagtctagagtctgtgaacccatcccaaccaagccttacacaataatactccatttttcatggtatacggatcagaggcagtgttacctacatatctactcttcagagcacctaggttaacatttgaaaacattgtagaggcagaagcaacctggctcgaggaagtcgatgtgctagaggaggaacgtctgaatgctgtgatttagttgaccaggtaccagcaaaccctgaggcgctaccatgataaagcagtacgacaccgggcattta

SEQ ID NO: 133570 - DNA, 441 bp, Zea Mays
gtttccttatgtgctgctacaaaagagaaaaatataagaaatatttgaaaaaagaaaaatcacaaaaaaacaacaactagagcaaaaatcagggaaaagataaaaaagagtagcacataatgagaaacgccaatgttctgtgcacctctatgatcaatttgctccctacttgtttccttgttgtacctatatacttgtttgtcctttcttgtgccttggtcccactgttctaatacattttctaggccagcaactaggacgcgtacttagaacacttactcaacattgctatttgttactgacttatgtgctatatatatagtcagccttcctaaaactccacctttctcttgatcagaacaagcgctctttggaccgtcacaccggccactatttgccacctgcagtgctggtaagaatcttgtaagagtggggtaagac

SEQ ID NO: 133571 - DNA, 275 bp, Zea Mays
acacagtttgctatctcataaagttgtatattcgttgagcattgggattagttaggttagatcgaagaatgtggatgtttgattgaggcggagagatatgctggcacatgcacatatcgtggcaccaccttctatcatgcatgcaaggccttaaggcgtgaggactcgtgcaccatgccatcaccatcctggcaagtcgctcggaactttttggaagctcattataaagatttagatgtgttttaacatgtattgcatttaaatagtctttctat

SEQ ID NO: 133572 - DNA, 283 bp, Zea Mays
aaaagcttcatcagttgcggcccagtggacttagcagcttgatagctaaggattcggtcattacctgtaaaatttcttctacttcgacagccgaaggcgttgaaggagtttcctcttctatctcagctgcttttggctccggagttgcagcccttctctttttcgaagttgccacctttggctctggactggattttctcttttttagagcttcttcatcctctttcaccatcctagcagcctgtctgctcagaacactaacaaccctttttctctttgtccc

SEQ ID NO: 133573 - DNA, 344 bp, Zea Mays
agacaggcaagtaaagggcttcaagagactaagcaaaggtgaaggtcaagcagatggcttgtaaaccgaggtatcatggctaaggtaaagaagagagtacttgcaagatgtcaatggactaatcagattgagaagagtcacattgtgctgaggctcaacattagaagacatgatttgatgccatcggattaactcatatgaagatgggatggttcaaatcataaggctcaaggtatgttagatcaagataagtgaagaagcatggtgttggggacaaaatccctagaccaccccaggggccacgagttagtattgggttggattgccacgaatccatccgtcag

SEQ ID NO: 133574 - DNA, 371 bp, Zea Mays
tggagaagacacggagccatacacggtcggggcacggcggaacttctcctcacacatggcctatggtggcgcccccacgaggtttgctgtaggtgatgaggagagggagtaggggcgcggcggagggagcacgccatgggcaaccgagggaaggagaagaggagcaccaggcacgcagatttgtagtccgatcaggtcagacgtttctagccgcctggcattgcgcgggccacgaagtcttcctgcgtcgttcggccgggaattcgcttggttgttacagcctcggagatttggtcagggagtcccaagaatcgcggcgcggaggttgttgacgccgcgcgggttccgggaagacgaagacccagcacgcg

SEQ ID NO: 133575 - DNA, 394 bp, Zea Mays
aggcatgccctgggagcctttccgttggtggacttccatactacagtggagcaggcactgggtgtggagatgcaacaccagtgtaccatggagtcgcagaagtctttgggtgttgatcagcctcgtggccaggacgcgaggaggggcaacactggaggtccagcccacaagaggggcaagtctcagcatcagcgccaccatccctaccgtggaaaatcttctgacttgggtactttgggaggaagtactcagaggtttcaggctgttcctaagcccgggctggggctggtgtgtttccgttgtggtgatgcacatcaccgtgcagagtgccagtggaatggcaggtgttcaatctatagtcaagaccacaaggatgtggtgtgtaggaggaatc

SEQ ID NO: 133576 - DNA, 602 bp, Zea Mays
gcgcaagtgtatctctctatatctatatcttagaatgacttaataaatttaaattattcacgatctttataagtcatttgttaaatcattttcggaataggtgattatcatttatattgacgaatagttctactctatatatataataacataatgtatatgcgttacaacagcacatcaattatatttgataatataatgcagcaactgtataatatacgagggcctaatgacaaatcagtgtgatagattcttctaaaaaaattaaaattaaagtagactcccctcgtactgaagatagctgctcgtgatatggattcattggtgtcactaagtctatcttcaacaatatctgataaaaggcacggtccactacatataaatgatacaagtttcctcaaggcgtacaacatggtgcgtttcgttcgggcgggccgcctacgctgaatcccgcggcgccatgaagttgttgcatgaagttgttttatatttgttgatgcatgtatgtacaccaccgctatatctgttgattcatgtacgcagtgaagatttttgacgttttatgtacggaggtgttaaaaatatgaatgatatctaaatct

SEQ ID NO: 133577 - DNA, 513 bp, Zea Mays
tatagcataagatatgaaatggtactggctattacaataaggtcatcacatcattaaaatgtttgtggctctaggccatcaccgcatgcaccacaatagtcaggcgaataattattacagaccaggtgttcattacagaaattaaaagcgctgccaagatgagaatccttctccccctttttggcaactagcaccaaaaaaggagagaaccaccaaccacaaatcaccattgaggaggaggcggaccaaagaattgagtcgccaagttagccgcaaagttttcttcctcaggctgagctgggggaggatagctgcctgaaggatcatggggaggaggatatgaagaggattgacccggatccccctggtggggaggcggggcaaactgctcacaatcatcaaagtattcttcttcttcatcttcatctttagctgacataaagggcaccccataggcctgctggtgccattcattgatttctggtggcggaggatgaagaggcacatcaggcg

SEQ ID NO: 133578 - DNA, 822 bp, Zea Mays
atagagggccctcaacaaacaaggaaactagaggagaaaacacaacttataccatctaggcgagggagtagggcgctgcacaaggtcagggcatacgacagctcctccttgggcggcggtggtggctccttgggcagcggctctgtcttggggcaacgacgggagctgcagacgtgttcgccgctggggactgcagtcgtgtgcgccggtggcctggtccttgtgcgctggcagctcctagttcttgttcaccgacagctgtgcgggactggagggcggctgaccggctgtgcgcctgtgagaagacgaccaagcagacttgccgagcaagtctgcgaggcggggcgaacgaccaagtcccccgccaagcaagcctgcgagactgagtggacgaccaagtcccctgccgagcaagtttgcgaggcagggcggacgaccaggcattcaccaagtgagcccaaccactaggccagcgctgcaagcatacgtcaaccacggcaggaccgagggattcaactccttaagagaaagccttcgcacgaccacaataggtcacacaaaggcttgggggatgctgtcaggtacccgggaatgtggtacccaaaacaagcccataaacccttttctagccaacgcgccaaagtcccccgccgagcaagcctacgaggcggagcagacgaccaagtcccccaccgagcaagtttgcgaggcggagcggacgaccaagtcccctgccgagcaagtttgcgaggcaggcaggcgaccaaatcccccgtcgagcaagtctgcgagacggagcagacgaccaagtcctctgccgag

SEQ ID NO: 133579 - DNA, 470 bp, Zea Mays
ggaggccgtgatgacggtcgtattcctcctcaaccgtgcctcgacgagaagcttggtggggcgcacgccgtatgaggcgtggcacggtgaaagaccagccgtgcacttcctgtgagttttcggctgcgtggctcacgtgaagatcaccaagccgaacgccgggaaacttgacgatcgaagcacaaagatggtgatgatcgggtacaaggctggttcgaaggcctaaagggtgtacgaccccgtcgcaaaccgggtgcatgttacccgcaacgtggtgtttgaagaaggcgcaacctgggattggaactcgtccgaaaaccgtgacccggaaggctcctgcgacgatggagaccaggacacgtttgtggttgaagagtgggaggatcccactgctgcttcgccgacaagccatgcctcccctctgtacacgcggggcgaaggcgcttctccatcaccgtcgggttctactt

SEQ ID NO: 133580 - DNA, 320 bp, Zea Mays
gttagaactttgaagtttcatttgatacttgtcctttggataagtagtcaaacattgtagtgaatatgggtagcaatagcacaactggaggtggaaagtatgttggttaagtaagaattaggtagcaatagcacaactggaagtgggaagtatgttggttaagtaagaattaggtagcaatagcacaactggaagtgggaagtatgttggttaagtaagaattaggtagcaatagcaacaggcaacagctacatttcatgccatggttacagctttgcatgttcaattggctctcttggacagttgtgtatacaacttgt

SEQ ID NO: 133581 - DNA, 343 bp, Zea Mays
gatttcttcatcacctaatagccagaaactatcgccagcaaagggagagtgccgagatgagagagagaaagaggaagttgcgtcgccgcattgctagctgggtcgttgcgatcccatctttggtgattgagttcggccgttgaggcgttgagcatcccggaagattcggctccaggaatcgcaggtggaagagggctgcgccgcacgggtgcttttacgaaggcggcattatcggatcttgtgctgatggcaagggagacttccttgggcgcgtggatctgctcgatgcttggttggcgcggcgaatcccatggcacaacgtggacagtttctccaatgcctc

SEQ ID NO: 133582 - DNA, 697 bp, Zea Mays
attggctcaaccttcgggatgatgcccgcctccctataattgaacaacattattttcaattcctcaccctcaaaaagattacgcagatccccctcaccaatgctcgtcccaatcggcgaagacaatagctctcgtttaccaaaccgatccactcaaagacggtctcgctccatccccatccgacggcgcctaccactttgcgaaacctcgcccacgctatgcttcgacaccacccttcgtcgccggcacttggtcctcgcactaggaagatcagccaccttgccaacctccacccgcggcgaggactccaccgcagccacatctaacacagcaaaataatccaagtcttcatctgaagactcttcggtccaggaaaacggactcccaaactcaccatcagacgaaaaagacccagatccagaaccagataaattgtcattggcaggcactacggttgcggccgccacaaaattagtatcgtcagcagcggttgcttgcgcaggcccatacgtcgaaacctgtgcagcaaccgagtttcagtatcacaaaaacaaaatcttacacctgatagccctagctcctaccccgccacctgcgaagggccggccgacgctgcagggtctttggcagctggttcgcccgccaccaccgaagtgtcctcaccagtcggcgcagcggccggcacagggtcctcgcc

SEQ ID NO: 133583 - DNA, 589 bp, Zea Mays
gcttttatttgtgcgcacatttgcactaggacgttcaccttcaaggtgtgttactgctggaacatctgaaaggaagcgtgttgcattctcttcagtaacttgctggtgcaggcgtccctgcttagctaatactgaatcatccggttttctcccccttttcctaggatggggagtacgagtagagtccataccttgcacaggtatctccactctctctggtgcatttgctgcaggaatatgcgacttcgacactcctcttatatcagtaaaggcatctggcagattatttgctaagttttgcaggtgtattattcttgaacttcaagtttggtttctctagtgcgtgggtcaagcgattggatgctactagcactccattctatttctcggcattctttattattaaggtacaatcctccccctaatgccaggaaatgctcttcatcgaaaatgctatcagtgtaccgagtcgtgaacagatcactagttctaagctctaaatatttgattatggacagagattcataaccaacatagatccccaacttccggtgaggtcccatagatgtacgctggggtggtgatatcg

SEQ ID NO: 133584 - DNA, 315 bp, Zea Mays
ttcatgctctcttttttactactaatgtctttgaatggggggtgtcagttttcactcaaagcatgtagcactagacagaaatcgtggggttgctgcagattgcaccactagtcatcgccatttcgacaatggaggatgcgaccagtaagcagcaacagtaggctcagaattgaaggccaaggcagccagaacatggcgttttacagctataaggagcttagttgataatgtctagttgacatttcacaatactgatgctaaaggttgtttgtgtacttgcccaaattgcgggcaactggggcaccggaaaacaag

SEQ ID NO: 133585 - DNA, 869 bp, Zea Mays
caaacacctccctggtcacggcacgctcgccgttcatccctggcatggcccgtaccggccatggccggcgacgactgctatggctaacgaccggggaggcatcactggcttaaggcgacctaggaacatccatttaatcgacacaaaccccactggaaactatctgtccacgatcagggcggaacccgtggtgtcgatcctgtgttcccaataatctacgctcggattggtcaaacggccactacgaggagcttcatgaatacacagagctgctaaaacaaagcttggatcggacagggccttaccagagaaggctggccatggagcgcagagctttacattcgctggagacagagaaaggggaaaacggtgtcgcgacggctttgggcgaaattgggagatgggatcagggctataggaccgtaagaggctgtgctttcaccgtgcgcaatcgatttgggagaaggtggagagggtagtgcgaattcctggttgtactcaagcttacttgaagaacagcgagcacctcgccgtggctccctgtcctatatataggcacggcggtccggtgatcgatccacggctacgaggtgggcaaccacgtaaggaagaggcacagtgaggcgaatcaaagcatgtgcgacagcgtggcgagagctcactgagtcacggtggccgccggtgaataactccggccgagctcaggagatggtgccacgtatgagttaccctttccccggcgttatccatccaataccatgcacgaattcggaaggcggcggcacgaatcttcacgcagggaggtcgccggcggtgagcacgcagcgctggcaatctggtccacagcagagcactataccatggcgaac

SEQ ID NO: 133586 - DNA, 862 bp, Zea Mays
actggatctagcatcaagggttcagatttatcgaatcaaatccacacgatctacatctgacggtcacgatcaaaacctcgcgaccccaaaccagtacccactagcggtcgatggatttggatccgacggcctagagacacccatgccccgttctattcctgaccactcgcataccgatcaacgacccagattaaccccggccgaaggggtctctcacttctaatcgtggctgcacatctcgaatcgaacggtgcaacatgccttctccctcccgtgacaggtgatagcggcggtcgcgcccacacggcggcgccatcaccggctttagcagattcagctccctggcgcactaacgagtctctaattcgatccaaaacagggcggagaataatacgaacacgtgagtaggcttcttaccggagtcaaagtgaagacgatgctcgcccacacaccgacgcggatcagcggtggcgcaaagcttcgatgagcaattgcactggcgcagtgacacccatggcgtaattagtggacaccaaagtttctagggatcccgacgcagctctagaacgccccacggatgcctgagtgcccgctgttcacgtgttcgacgacggtgggtccgtcttctcccatgatctctcggtgctttggtggctaaggctacgcggcgaagagaagggggaggagacggctcggccctgcccttttattgacactggggttggttggagagggagtggcgccaactgcgcccgagcttctcgcgcggtggttacgacaaagtccaccatgcgtgtgtggaggtgctcagctggtaagcgggcccaggtggttagcgagggtgtgcgaggttaggcacgaa

SEQ ID NO: 133587 - DNA, 532 bp, Zea Mays
cgcttccgctctctgctcaggcggaggcccgatgctgccacgtggcctattgcccgtgacgtaagccagcgggtgaagcctgacgtaaggtctctgggtcgcgctgcctctgcatttattgcggagaagacgcgccgcctgtctatcccactgatagatgatatgctccctcagcatttaatgtgtcctgtccaccccgctggcaggcggcgcccaggccatcctacagatggcatgcctgtccagtccattgtcaaacagtatgcccgtgctgcgaggtgcactgtgtccatcatcacttatatgttaccaggaaagcttcccctacacgccgatactacgcagatctcggatgtcagggcgcaagaagattgctccagcaacggacattagttgcccccaagtattacatccgttatgtttctgggcccacatgtcaaggctcaatacccttgtacgtgcccccttagctataaaaggggaggcatgcaacgatacaacacagactaacttaggcacacttagacccagc

SEQ ID NO: 133588 - DNA, 636 bp, Zea Mays
atccttttgtgtcttgaatgtctgttcatcagctgttttatttctagtgacgcttctacttgccaacacttgctggtatgaggaagtgagttgagatgctttctgtattatcagagcttgtgcctgtaacagcttttctaagtcaactatcgagggtgatgttgatgtcatatgattaccggtagtctgctcaggtgctataaattttgctaaatcaacttgttggagtctagctaccacttgagatgttgcttgcagaaagtgtgcatgtgccttcttgaactgtttcatctgatccttagctggaggagttgccaacatagtgtattctttgcatttagtgacctcacttgtagttgacattccaaggattgatatctctatgggtatggaagaatggaagggacgaaagggttgagcaaagacagattatagagagcagagaaaacccatctatctaaggtttttcctagctaactgatgtcattgtggacaaaagtcacacaatacaacaacaatcattacaaagaagcaaatcaaacatagtcaaaaatataactaacatgaactcaaacatatcagcacaacacaatccaattctactcattcaaccaaaacaaaaggtgagacaaggtt

SEQ ID NO: 133589 - DNA, 407 bp, Zea Mays
gtaaaatacgggtgcatggaggatccatttactatggtggaagaacagtcgcagacatggtcttaatattaatcaccatgttgatcctgctcattgcatgtgctgcccttctagctacttgttttaatgcctggctccttccttgataggtggctgttgggatcgtcgaggctttttttcattggacacaccttcaccatcggcctgccttttgatttaattggaaaatgctgctactaaagaactttagccattggactgaaactctacttggatgtgagttgactgaaaccattcttgctgctggtttggctgattagagcagattaatacaacattagatgatgcattaaaccttctgttcctcctttgctagattacctggtgttaattctgtaagcaacttg

SEQ ID NO: 133590 - DNA, 637 bp, Zea Mays
tacgagaactactaaatacacgtcacgattacgattgcactaagcaagtaatgaatcaaaacatttgcgttggtattaatgacgttaacatatatttataaaagtgcaacttaaaactataaattaaattgctattttaataaccataggacaaaccattaattaattaattaattaactgaaacatgtgtgttacgaccaaaattatatttttaacgtgtacacgactttattaggaaactaacacgactcgaacagaataaattggacgtgaaaagataacgcatatttaataagtcgtggattaaaaaaataatgtggcacgatttcattggttgataggttgccatgtggagggttgcgaggatcatggccgcagaaaatccgtgggttatgtgtgatactattttgctttcgctgatcgtatggagtaaagaaattgtgccgcatgcaatggctttgattctgcatgtcgtgcatgcggtggggctcaggtttgttccaaaagcacggcaagaggaaaacgtgggcgggtggaaatcgcatgcaaccaaggacggtttcctttttccctggttttgcacgaacgaacaactgccttttcttcttccacggacgaacacagagacggacggaa

SEQ ID NO: 133591 - DNA, 462 bp, Zea Mays
gaagaagaggcggcttcggcgactgtcatgcttggaccaggatgcaggtccttctgctccggcttgtgatgaagtgccagcagaggccctttcctgaggttgacccaattgttgtgtccatgctgaagttgatcccaatgggtgtgaccgtcctgaagttgatcccaatgggtgtgaccgtgcaccggctgttgtctgtatatttgatgaagatgaagaagaagtcccgctgattcataagaacagccgacattacagaggtagtaagggggatagtgatattccttctccagctctgtcagctcttgtcagccttcaggaactatcaatatcggattttgatcaagcccttgaggaggtcgtccctgaggatatgctatcggagccgactgccgatgacatgatggctgtttgttcggaaattccagacgtgggattggaggtatcccgagcagtgtctcg

SEQ ID NO: 133592 - DNA, 385 bp, Zea Mays
cggaatgacaagacccttgtgccgtatgcagcttggctccccatgctaagtagctgaagtagagtttagagtagtatcagccaaggtcagcagtagagatctggtgcaagaattcttggcgaaaagagtattttcgacctctagtggctggggaatgcccaagaagaaggatggaggcaaaaagcacgaacttgttcggcttccctaccgtttcaagtttgagaaagagttcaagaaactatgccaagagtggttagaaatgattgaaactatgtgcaacgaaatccttggcaactacaccaagaaggaggaccagttaatgactgctaccttcggcacccagccaaaacgaaggctaaatcgcatgatggacacgttaaatttt

SEQ ID NO: 133593 - DNA, 540 bp, Zea Mays
cctcatccctgttaatccacggggaaacaaaaaactgctctggcctcgtgtttaccgttcccgtctctctgctagtttgtctctgtcgcagcagccatggcggctagggtttacgccgtcggcttccatccgtaggaaaaacctcctcatccagtcgttgccctccatccccacatgcccacgctgctcgtcgcccctctccaccaccaggaatcattcagttcacccaatccagcgcatcgcatctgcaaccgtgcgtccagttcctgctttgctcagctgacgcggtctctgcagtagatcaggcctgaggtgagctatgcttgtcgcatccttgactgggctcacacgcaaacactacagttagtacactagtataaccaagatgtccattgatgtgatagaatttgtggtgccgtctcaagcagctgcatgatttatgtgatttttggttctgtctcaagcatctgtctgatttttttgatgattggtgacatctcaagcagaagcagttgcctgatttttggtgccgtctcaagc

SEQ ID NO: 133594 - DNA, 1149 bp, Zea Mays
atcatgtcttcacgagtcaggtgcatcgtctcgtgtgttaagcctgcagcagcgttttgggtgacccatgtatgccttggctcgtcccgaatgctgtagggacttgtgaagtggacactgatgaaagaacgactgccagccgttgccaacagatgcatgcagtgatgcatcatggaatgcccctgctcaatgtcaatggggctggaagtggaaactgggaaaaactgacgctgacgggagttagatgcttgattgaagcacatcatggtcatggtaatgtcacgctggaagtggaaggaggcggttaacgcatcattttcatgttcgttttcactttgcatgtggaatccggtgaagcaagtacgtacgagtgctaacttacctactattctcaacactgaaatgttgcatggaatttaacctgttcatgctttgggtggccatcaaatgttagagacgtgctggagtccgccgcttttgcaataagttcttcgatgcgaaatttggtgccgtccaagccttcaaggtgcaacattcttcatcttacgcagaccgacattcccacactttatgttggaagatactgtgaggaaggcttcaagagttttcaactttcaagcagcctatttctgtatccaacaaatcatagacaccagggaagaaacccagtaggatatcttctataggttttctttcagcttgtagtcgtgtagactactctatgaatgaactactttatacagttattactagtagtgtcttatggaattacctagttgatgttctgatgaaggctggaaaacttgtttaggctgaacctatgatcaggtgtcattgattccagatgcatatggatcacaattcttggggcttgcagggtacatggaaacattgagataactgagagagcagcaagcaaattgtttgcgctagttcatgcagcgtaatttcttgcaaatcgctgtcacacttatttgctgattttacaagatgcagtgatgtcggtaccagacttctgaaatatatctgctagatcatgggggtaaagaaggaactatttgttcagctggattgagactaacggtcaggtatgactctatgaactattgttcttgttgcgagcccgatgctcaaaatactggaattttg

SEQ ID NO: 133595 - DNA, 315 bp, Zea Mays
tggaagtgactgagggaccttcagccttagaggtggctgctgtagagaactcggtcctcaaggatggtgttggcgctcacccagcccccgagggtgttgccgaggatgattcggctcggatgggtagcgcaagctgcgacccagcccccgatggtgttgccggagacgatccggctcgaatgggtagagcaaactatgacctagcccccgagggtgtccgagcgggttctccctcttgcacttccatggatgttcacgtagagtcttctcctccacactctggttgcatggtggtagcccaagcctttggtcaag

SEQ ID NO: 133596 - DNA, 487 bp, Zea Mays
gaagacccgacgtggacatccatggaagtatgagaaggggaacccgctcggacacccttgggggctgggtcatagctcgcgctgcccacccgagccggatcattaccggcaacacccttgggggctgggtaaacgctggcgccatccttggggaccaggttctctgcagcagccacctctaaggctgaaggattttcagccacttccatgggaacggagcaatgtagatcagcctcttgactcttaagaccgcgctccaaggtcgatgaggcacgagacgctgctcgggataactctaacccgacatcaggcatatcagtgcaaacgtccatcataccaccatctgtcggctcggacagcagatcttcagggaccacatcctcgagagcctgatcaaaatttgccagagacaattcttgtagaccaacgagagcagacaaagctggagaaggaatatcactactctccccactgactatataacgcc

SEQ ID NO: 133597 - DNA, 653 bp, Zea Mays
ggatgagcactacaggggccatgtcaaggtatgccacattgactttaggtagtagtcaatgttatatctattttgctttcaatgcctgcattattttgttgtcagtgctgacttatgtattctaactatgcagacacaccctaaggatgctgacttcctaaacaaactaattgagaactaccagcagatgcagatcatctttggcaatggtctagcaacaggcaaatttgccatgggttcaaatgaggctcttggttcaccatctgactttgttgagggcgcactgctgggtgagggacacaagagtggactgaagacagaggatgtgtccaagctctttgaggagggaaccaagaatcatgaggaagctggtggtagtagcggctctggtggtgcaagtgttggacagaagagaaagagaagtatgctcagtgaagaggacactattgtgcttactgggatgacagctgctgtgaacaatgttgctgatgctattcgtcacaccaaggttgatgagatccaccctgagctctatggggctgtcatgtacatgccagggttcactgaggaagctctcctatattccttctcccatttggtggacaacaaagctcaagggactgcatttgttgggatgtctgaggctcacaggg

SEQ ID NO: 133598 - DNA, 542 bp, Zea Mays
tgagctcctacccttactcgtccatggaccagtgtctaccctttgttgacgtggtctagagcttacaccaagattgtagtctctaacctgctctcggcttgagaccgggcccttgcaaacatcttaggcagtggaccagatcgttgagttcccgctaactcgacccagatctaccacatgtatcataccatgcaccaactctttgtttgaattcatgctcctctctagacgcatgtagtgcagcctgaattttagcatcataatcatcaccttgttcttcatcataataagttcttgctacttcatctgctcgttgactctagacaatcctttgcctcttcttttcctttgtcttgtctagctcgccagcaaagaatttctttatttcaggaggaacggatggacagttcttgacatccttccctcgatgtgctaaatgctgcttggaacgagtagcacttccaccactcttcccttcatgacggtacttgcacctgaaaccttgaccaatattctctccatgctcccacactaggcccgac

SEQ ID NO: 133599 - DNA, 505 bp, Zea Mays
ccgtggccagcctgctatgtcagtgaccaatgccggtatgtgacttctacgagttcgtgaaacactgctataggcctaggtcgattcagttgggggaggatgcgccgggtcgccggacctctacgtgccggtgatctatgccgccctggagctccacttttgatcgctcggatgactggagaaagaagaaaggctctggtcgttgtcttcgtgatgagaggccatgattagagggtgatgtaccgcttcgcgggttgtgatctgggccacacgtgtttggatcggcggccacgatcagagcgtgtataccggctggatcttaaccctcggatcatgatcgggcgcttgcggatcaacctaggcattttaaaatctaaagcgtcagttattgatccagtggctcaggtgagttggctggtttggatctaatcgtggccctcagaattgcatccaacggatagaatttatggataccccttcgccgtgctattattgcagaagagcc

SEQ ID NO: 133600 - DNA, 319 bp, Zea Mays
agaaaatgtaacaccccaggtgttaccctggctaaaacccactttggcactagaagttgtgttcacaaggggtcaagacttagggcaccacataagaacttggagatcaaatgctaataaagttgccaatggcatgagaagctttaccctaatccttactcactcaccaccttggataagaggggagaagacccctaggccctctcctaaaccctatcttccaaaaccctaggtaagaggggaaagagagtgaacaagtgtgcaaagtgtgtgtaacttttgcccaaaccctaagcaacattataaccatcaattaggg

SEQ ID NO: 133601 - DNA, 438 bp, Zea Mays
cttcctaccaaatcgctcacaacgcaaacgattgatctagcgctagttccccacatcctgtcatcgcacgcgcgcgttatagcgaggctaatagtatcgttgattgccaacggtaaagatctttgtaggatatcttttatctcatctgtatggtagttagctgagctcttcactattaatatataacccacttgtctttcttataaagtttctttttttctaagccgagtgtaagtttacaatctggttctcttctctctcctcttatctaattatttagtcggcttattgtttattgctacacttgcttttagggtttgtttggttcccttctttagttagattaggttgtatttggtcatcgctagctaggctgtggccagtgaatggtttggttgctttgctctatagcgtcgagatcttgagaacaattgtttg

SEQ ID NO: 133602 - DNA, 804 bp, Zea Mays
tttgactgtcaagggcctggattccattgcattagccatggggacggcaatttacattggaagggtactacatctcaaagcatatagaagaaagatacatggggttagggagagaggggaacataagcatatgttaccgacttccctctggtaagtccgtaacttgtgtttcctggtgtctctcaagggtgagtggagggggatgttggaatgaagcagtgcgtagggaagaggaggacgctgaccgactaggttccctgtgctggcgttgtgcccagccaggatgacccaagacgatcccgccctaaggaggatctttatttcttggatgcctaatacaaactacagcctgcgcctttatagaggcagacgacttacaactcaagaaaacaagcagatattttaaggaactaatctgctattatttggcaaccaactagctaaggaaactaagtatccctgatttgtagccacaattgttacctgccccttttctccttatttgctgattgtctttccttaactatccctgctggcattcggttccttagccgcccttctccttgaatactggcgccccacagaggtatctataacatttccctcctccccaacaaacagctcgtccgtgagctgtatatctagatagcgacgtttgaactcatcaagctgctcccaggatgcatcagacgcggcctgtccaacccactgtaccagcaactcccacacacctctgtttaaacgtgatttgaccaccttggctggagtaggaagtactttaccatgtagaatatctggcaaggg

SEQ ID NO: 133603 - DNA, 654 bp, Zea Mays
ctgagtgaagaggtatgcatcaccttgatccccaccatctggtgatagatcgacgggccaggaccctcatcccccccaaaccagtcagacgcggcggcgccgccgagcgcctacggtggatgcacatcgacgtcaggtgatccggcagcctggccttcccaccggatatagacgagggctaaacgaagcggggatatcaacgatgctagcgaggtagcccttaccggacatggtggtggtagtggccctgcccatgagctcttgcgaccagatggcgaatccttactctggtgagcaattactaggcggtccgaagcataattcgcccaggtgataccatggttgtgacctccaaggttcggtgaagcacccagggtatgataccgaggcacgctaggaggcgaattgaagtttttccctcccgtagtggagtttgccgcgcaatcccctatgatgacggtgatgattggatcgcgattggagagttggggggggggtttgcgatggcggacacctttatacgtcgaggtgagaggatctcggccaaaatgttggaacaaccagctagattcgcgcgggcgccatggaatttggccggcttgttcaagtccgtgtggggatgagtttgaccccgacaacctaggcccacgcagc

SEQ ID NO: 133604 - DNA, 424 bp, Zea Mays
gtccatgccagtgcgtacgttttagggtcccggaaaggcactccacaacactgccgctttatttgccctgcaccatcgcgagtgggcacagagatgggcagaaccaacgagatggtcgggggtcgacgggggcgcgccgcgggcgagcaggcaggtaggttgcccatgtccggtgttggcagccgccgacgtcgcgggctttggccacttgtgtctgtcactcactcactggtcatttgcagtgcagacgtgcagtcagttgaactctgagagcggatggaaggggttgtcctggcagcgtcgcttcgcattgcactaccactgctgcgtacgtcctggccaccaaactgtttgttggatcactagacattgctgactgactgttgttagggatggtccgcaaggaggacggacttcacagaca

SEQ ID NO: 133605 - DNA, 321 bp, Zea Mays
attgtattaacatctagtgtagagtagaaggtacacattgattgacatgtatccgatctcgtcctaggattatactttagttgccttctatctcgatgatgaagaatgttgcagctacggttttggtcccgatggtaaactcaacggacgtcacacctttggcctcaattggactatcactaccaacactgcttagagtcatattggtcctgatcaagtcattgtcgagcttgacctgctttcagtacaaagaatatggaataaagttaacttcgtgccaccatcaattagcgtacttgaaatcgatgtcccgtcaatatg

SEQ ID NO: 133606 - DNA, 800 bp, Zea Mays
cggttttgctaacggcactctagccgctctctcgctgcagttccgtgccgcggaggctcacaacacgtttgaagaaatgcgcaggagccatggggtcatcgtcccagtggtgatgggtcatgattcttgcggtaacctggctcactcaggctcttcatcggtgacgctcgtgcgatcccggcaatttgcaacggccgtggcctcgtcactgtcgccgcctgtcagtcgaagcactcctcgccgccacgcgcgcggaggggagcccgcgcggatatttgggttaaatagcacctcatacggcgggtttatcaagatagcggaagctccatcgcgaggtcgaggcagatggggtgcgccgaggggttgatgccttgaggggctgattgattgattcagattgaagttgtgggaatcaacgatgggtagagtgcgatggatgtctagtccatggacagtgtgatagtccggatgagtaaaggtgggcgccagagtcctgtggaggaaacattgaacatgtgttgagggatgaaggtttgttctcactgtttcataggcaaagttttttttactgaatttcatgtgagtatatatgaactacggatcaagtagtttagagtctgtttacttggtttaggattatgattttctcagatgagattgtactgttttcagattaatatgactgcacttctgcttcctataaacatatttgaatgtttccacgtgttaaaataatctcttgatttgaaactgggaaatattttaatgatctttcaattcggacagtttttataaccttg

SEQ ID NO: 133607 - DNA, 317 bp, Zea Mays
ctccttagtaatcttctctgtatttgtttttgccattgactcaataaatccaacaatgtaaggattcacagccttcttctcctcaaaaagcttctccacttcagttagcttcgtctcagcaacaaccttcctgtcttgagacatttctccttcagagatgatgaaaatgcgtctttttaactgaagctcagaaagcttgagaaactagcaagcgttagtgagcaagagctatgatattgagaaaataaagcaaatggcacaagcagcgtatcaaatgtggtgggtgcgagttcttatttatatgctcagcacgctcc

SEQ ID NO: 133608 - DNA, 348 bp, Zea Mays
tttgctgccgtgcagcgtgcacagcagcagtgcccgacactgggcgattgggaacctgtggcgtggaagaaacaacttcttcctccaccagaaaatccgttgatgtctcggcgcggtgctccacgatttgcaccatcatgttgagcgaggatgcaagcaaaaacctaatgcctagccgcctacctggcgcgctaaatgtcggagaggcaattctccgactgggtggtagagtgcacccgccctaaatcctaaaatgaggaaggggcttaagcgttttgcctatcctgctaagcgtaaatcaaacacatgaacacacgagagtttagagtggttcgggccgccggaacg

SEQ ID NO: 133609 - DNA, 417 bp, Zea Mays
atcgacgaggtagtatcctagttgtactcatggtcattcactgtaaagttcacgtttggtgcttcccccctaagcacgttggcgaacaacagtgattgattgagtatgttgacatcattgtttgatcctggcaccccaaaaattatgctagatccacaagtcatattatgcaacaaccgtgagcatgatagttgaggatctaatgtcctctcttgtaaactattctctccatccaataggacaactcatccacttccaacgcctacaatctatactccctatcataccaaaaaatcccctttcctcccccttagctaatagatgtctaaggtcatcaacaatggggcaacacatgtactccagtccaaaacattcgacaacacctctacagaaatgttcaagacactctaagataga

SEQ ID NO: 133610 - DNA, 512 bp, Zea Mays
gttgacgcaattcagccacatcctcccaagtagctaattctgccggcatgtgagtccatttcaccaaaatttgagcacaagcagtagtacccctcgctactgtacgatgctgcaaaatcatttcaggaacattgaaagcaaaatcaccagtgggaagagtaggtgaagctttcagaccgacacccaacgccttcttcagttgcgaaacatgaaataccggatggaccttggacgtatctggcaacaacaacttgtaggccactgctcccacacgctgcaccacacgaaacggcccaaaaaacttgaaagctagcttctgatgcgcacgtggagccaccgaagactgcacatacggctgcagtttcaggaaaacccaatctcccacagcaaactccctttcagaacgtcgtttatctgcctgccttttcattcgtaatttggcacgttccaaatgttgacgcaccaattctgacattagatgacgctcctgtaaccaaacatccaaatccgtg

SEQ ID NO: 133611 - DNA, 345 bp, Zea Mays
gacgacgacgactgtgtgtccaggtgcatccgcggtactgtttcccttttttaattccatgcagaaacatgacgacgacttcgtatgcgtaaaataaacgacctttaatttggcactctccctctggtctggtgtgtgtcccgtacgttgatcgatgagcgtatacgtacacaggtattccgttacgtgaacgcgcacggcacggaagctgtggatcggattatccaccacctgttgcgaggaaatgcacacacatagtgcccgccgccgtacgtagacgtcgattcgtagccggaatggtggtttctagtataccagggcgggcgacacgattttgtttggctt

SEQ ID NO: 133612 - DNA, 356 bp, Zea Mays
ctagcagtgtcggcctgggttccctccttgtggatctgcttggtgggcacttgatcattctccccgcctcgtggactctcttgccggggtttggtcgtttgccccgcctcatggacttgctcggcaggggcttggtcattcatcccacgccccgtcttgctcggtgcggacttggtccttcgccccgcatttacagaattgttcggcggggacatggtcgttcgccccgcctcatagacttgctcggtggagacttggtcagtaaatgtgctagagaaaggtttatgggcctcgccttgggtaccccattcctgggtacccgacatcagcccctgagccttcgtgtgactccttgg

SEQ ID NO: 133613 - DNA, 528 bp, Zea Mays
tggaatttaagtttggatttagctctgttcagtgttcaccttccttaaatgttgtttcggcgcccacaaacatctcccttgcaggttgcgcagccagctctttttcaatgttgggtgtagatcacaatctatccactactagtatagtagctctttttcaatgttgagtacttcagaaacagcattggtaatggggagttcagagcaaagaagccttcaggcttttgagaaacagcattgggctgggagaccgacttcatcgtcttgtccgttgcagaaatttgtaccgtaactatgatgacgaatacatggatgaatgcacgaaggcatgacgtcggcgagcagaaactggagtgctgtaatccatgcccgtgttaactccgatcagatagatgttcagcctacctacagacgctcgaaagtgttgggtgaggcgctcaccggttggtgagggttgtatatgttgtggggccgggtctgcgttgtcgacttgtcgccagacagttcccaatagccagagagcagccg

SEQ ID NO: 133614 - DNA, 314 bp, Zea Mays
atggaatgggctccctagcatccccgacaaagctaagaacctgactgccaagttcaagtatgtaaggaaagttctgaaagattggcagagttcgttaccaaaaattgataaaacggtgaagaacatcaagctgcttattgagcttattgacatcatggaagagcatcgagatctatctattgaggaatggaatttcagagatattttgcaacaaaaggtggccgaattgcttaacattcagaaaatctattggaagcagcgtgcggctattaggtgggtttctgatggagacatctgttctcgcttcttccacg

SEQ ID NO: 133615 - DNA, 651 bp, Zea Mays
ctgggatccaacttcacaagttcagagttcttcgacttctgcgagcaaaagggcattcagatcaaatatgcctccgtggcacacccaagagccaatgggcaggtagaaagagccaacgggatgatattagatgcgctcaagaagaaagtttcgacaaaaatgagaagttcgcaagaaagtggatcagggaactgccatacgtcgtttggagcctgagaactcaacccagtcgagccttgcatggaaacactcctttctttatggtctatggttcggaggcagtgctacctgctgatctcaaatttggagcaccaaggttgatctttgaaaacatagcagaagctgaggctactaggctggaggatgtcgacatactcgaagaagaacgactaaacacggtgattcaatcagcacggtatcagcaaactctgaggcgctatcacgataaggccatacgacatcgatccttcgcagtgggagacctcatcctccgccgaattctaacgggggaggggcggcacaaattgtcacctctttgggaaggaccattcatagtagctaaagtcattcgacctggatcatatcgactcacacagatggatggcacagaagttgggaactcatggaatatagaacatctcaggaagtttt

SEQ ID NO: 133616 - DNA, 306 bp, Zea Mays
gtcgggtatccatgggaaaggggtctgggcacggtcggcttcttaaataggcgagaacaaggccggtgtcgtaacggtctgcgcggagttggcgtgccccgccatgcacggcgtgtttgttgaggggcaaaaagggagccgatcacctggattaagcggggaaagatttttcttgaccccgattgtaaggtggtgcgggcaaggaaggtcccccaatggcggaatcaggcggacgtcgatccaggtgcgtggagtccgagtctaaagtgccgcggtcgcttccatgaggtctgcgttcgcgggaag

SEQ ID NO: 133617 - DNA, 568 bp, Zea Mays
gtggacttggcgtgctatggtggacgcagacccctcagccctcgagtgagttcataaagtcgcttagggttcatttagtgggatgacctcttggtccgacaagatatttttgattgtttgaccggtcgagtgaactcaacgtgctagggtagacgtacacccttgagcacccaaacaagtctattgaattggtcgaggttcatttagtgagaggacctcttagttgaacagagtagttttgccatctagtcgatcgagcacaatagggcagacgtagacccctaagccctgagtgagtccatcaagtcggtcggggtagtgggacaatctttttggttggatagagtagttttggtcatttggttgatcgggcgcacttggagttggggcgaacgcagacccaggagcccatgatcgaatccatacactcagtcgaggttcatttagcgggatgaccttttggtcaaatagagtatgtttggtcatctgatggacgcaatcatttgtatgctttttataggatcgattgggctcgtgtgaatgttgtatctgtcgagctacaattggg

SEQ ID NO: 133618 - DNA, 384 bp, Zea Mays
taagggtggccatcttgttccttaaaacttgaacgcatttgggctcacgcccgcatttcacgtggccttgcgtgcctccagttcattcaatgtgaccctacctaacccagctaagcattcgaactacagtctgtcgcgtggtcctcctcgtggaacgcgtcgccccgcgtctgcgcttggcctccagatctgacgagtgttgcggcaacttcgtcgcgcacaacaggggcatggccacccctccggtgaggccgacagtcgggagctgtagatgggacccctcgtctgcttcgtccatagtttcgtcatggggagcacgggagcagcgccgccttcgcctcgtgcgtaggtcacgctaccgctgatgtggtgggatcggctcca

SEQ ID NO: 133619 - DNA, 343 bp, Zea Mays
cattatgcaagcaagaatcgatttaagcataccatgtctgcccacatatccatccaagcacattctatacattatatcatcccatcgaagaactctctctttttttaattatactatgcatatatatatccatccaataactcacacaatctgcatctccacctagacttcacatgacgtaactatttcatacttacgcaaacacgccaagaccagaaaacatggcttcacaacaatacgtactggcctattcaaatatccctcgctatctctctgtttcagcccacgctccgcatatacaataacaagataactatcacaaccactacatctattccctccc

SEQ ID NO: 133620 - DNA, 464 bp, Zea Mays
atcatgtccttctccacacctgcttctgtttgctcaagctctatcatgctcacagctaccatggttttctagtcgctgctgctgcttgatgggtcgggtgcttgttttcaaaacactacgacatgctatgcatttgtcagcaacttagtcttaggtttatgagctggagaaaagatctagacgtgtttatgagcactcctttcgcaagtccaagcattggagaggagatctagacatgtttatgagctgctcttgatctcgtcttaggtttacaaatatggaaagtaactgcgttcatattgtgttttaaatagcatgcatgtaggtttaatctgaaattgagccagacccatttggaggaaaactccaaacatgatgcacctgctctattcagcgttcagcaccctctcggcaactttaggggttgcttggtttcaaaggactaattttagtccctctatttt

SEQ ID NO: 133621 - DNA, 500 bp, Zea Mays
aaaagaggcgttcattggcctttgccttagacctagactcatggcgttcacttgtaggtgccacccgtatgactattttttgtgagaagtaattggatgggtgatgaactgtccttatgacagtcaggatcacttatgcctagagcaaaggcttcctttgtacatttacatggcgatgtatcatcactatacatttttcttacagcttgctgtcaaaatccttctccaaacaggccaccagactaccttgtattctttttacgtacatcttttctgaactaggaccctagcaccatgtgcattaacaacacaaatgagtaaggaagtttgttgctcgctattatggacaacaggacatacattaggaattatttatatttaaatcgtgggtatcccatgctttttgtgtagatttctaacataaccaaggtgttcctttgtcatgttgggttttagctctgttttggaccaatcagtctgaaaacagaagggttgtatct

SEQ ID NO: 133622 - DNA, 343 bp, Zea Mays
cctgaattgagctggccacggtgaggctaaaccgagcggagttcggacgggatttggggagaatccaaaattagagctctctggtggaggatttgaggtgcgggtgggtgcgttagctgcttgaatacatggcggagccgagggggtgctcaatttataggcctagtgagcggtggccgggaattcgagcgatggcgcgcggcggtcggaggagggaaagttcactggcgcgtgtgattggtggcaaaccccgtggcaaggccttaggtaatagaaggacggtgtgttgcgatcgactgcgacgtggtaagatggctcacggtgtggcataattgcgaagaac

SEQ ID NO: 133623 - DNA, 321 bp, Zea Mays
agctttcttgaaaggtccaatcatatccagtccccagcacgcgaacgaccaagttacaggtatggtttgcagttgttgtgctggtagatgctgctgttttgataagtactggcagtcttcgcacctctggactaactcggctgcatcactcttcgccgttggccagtagaaaccagacctgaagaccttcccaaccagagtccttgatgctgcgtgtatcccacattgtccagcatggacctcatccagaagttgtttcccagtagtcgaaagaatgcatttcatgaggactcttgatgcgccccttctgtatagtgtttc

SEQ ID NO: 133624 - DNA, 408 bp, Zea Mays
cgggaggccaagaaccgctttaaggtgctccggggacaaaaacacgtgcggtggaacgcggacataaaaatggtcgctgggccatgaaaacgtgtgctatagctcacgggaggccaaaacagccttaccagtctcaatggtcaaatcatgggtggcggacgggaggcacgaaatcgctgttcgacgacaaaaacatgtgtcacgggacgccctaaaacctaaaccctacagcttgtgggaggccaagaacaactttaaggtgctctggggaccaaaacgctggtggtggaacacgtacttaaaaatagtcgctcgaccatgaaaacatgtgctatagcttacgggaggccataaatagccttagcagtctctgtggccaaatcatgggtggcggacgggaggcatgaa

SEQ ID NO: 133625 - DNA, 305 bp, Zea Mays
gaattgtactactttaataatgttggttacttagtagtattagcagaaagccaaagacaggacattattcattttgtttccctaatatataactgcacttgctaactgttgattaagctaagctacttattagaccttaaccaatttagttcacttaacttagtgagatgtgtactatttacttatatataaccccaattatactagtcactattattattactcatgttcagtcaaatcccaaaacaaacaagcactcgactcaagacaagcacactggagtggaacaatcaatcacaattaac

SEQ ID NO: 133626 - DNA, 324 bp, Zea Mays
aaaaaaaagaggtccaacaagaaccctgttttaatgaaattcatcaacaaaatttagggctcgtctccctaaacccttcgcagtcggttctttgcaagttcgacctgctcctcgatccagaatcatgcaatcgccattgaccttgtctcacttccgtggttcccctggtacgtgagttgtcctcgtgcccaccttctccggttctcaagtgcgatggatggtcggcctcgttcccccatgcatgtgcacggccgtcggcgtctcatatttgaattttagagaagtaagaataagtttgtaggaacgattttgatagtattggag

SEQ ID NO: 133627 - DNA, 688 bp, Zea Mays
gaaacactgtagcaactgggggctgatgtattagcactttcttggttacaaacactataggagaaataccataggcaactatacacggaagtggattgtgctgcaagttttgcttcagaaaaaaaaacatggaacctcccttgcaaccttgtgtaccacgttgtcgacacagtgatagagcgcatacctccatggtctgttgcaaaataggacacaccaggacagccagaatccgaagatacatccagcaaccacaaagcaacataaccacacagcacctctctgttgtcgtcgtcgtcttggcttttctcgtcattgtgcctcgctgcatctgcacattcttgcaaagggaaaccgcatggccccaagttgttgccgtagattgatgggtcaaccagcgtccgcagctgatcatctgccggtatccttcccgacagccgattgttcggaaggttcagagggctaagagctttcaggtctgcaaagcccggaggagtctccccttccagttgattcaacgataggtccagggattccagcagcgccaagtttccattgtctccggggatatcacctgggaggaggtggtttcttgacaagttcaggtacctgagtccacggaggttcgtgactcgtgagcccttcaggaatcgtttgcgagagcaaattgcacgacaagtcaatagcc

SEQ ID NO: 133628 - DNA, 291 bp, Zea Mays
ataaagatacaatgatgcattgatacttctaatgaatcaagtagtatcattctcatgtgaaggatctaaaaacctcaatgtatgattgtggtaagctttaaaagtttggtttggatgcatgtcttttaggacagcatcttggacctggacaaagtcaacatatctatgtgtgattaatttaaaatctgaaaacaagagacacaagttgcgtgattcaagtgcaatccttcaaatcaactagcaagtttagaatcttaatagaattactgctcgaacaataatcagtctatg

SEQ ID NO: 133629 - DNA, 577 bp, Zea Mays
ggcgaggttcctctcacagcaacaatggcgggtggaaatctggagagacagtggcagccgaagaaatcaacgaggcactggcttaccgagatgtggggaagtcgtccgcctttgtagccagcgtgagacggaatcgtgccacgggggaatcgggtgacccaatggcagcgccgaggtgttcggcgtggtccgcaaaacccgtggagacgatgactggaagggtttgaggcttgactgacgagtaggccagtccggcagagagacacccatggatggcaaaccttgagcggccgggcccaccgatcagtcaaacggatgagcgcgcgacaggggctgacaactgggtagtgggccgcgcataaggaattcagaagtgggccaaaagctggtctgcggcccaggtaaggtctctttctctttttcttttattttctacttttcttttctctcttttcaaattccatttgaattaaaatttaactcaaacttttggggctcatcattacaaattatatttatgagattaaatataccaatctttaagaatttaatttattatctatatttttatatcatt

SEQ ID NO: 133630 - DNA, 275 bp, Zea Mays
atcatccacataagcttccacacgcttgccccagtggtcggctaagcatgtctgaatagccctctggtaagtcgctccagcgtttttgaggccgaacgacatggaggtatagtagaaggctccgaacgaggagcgagtacttgcccgggtggttgaagttgagccactgatctgcccgggtgaaggtgatcgagtgcttagaccatcggtacggggcgggaggaccggtggccgccaccagtatctgacgatcgttgagcttttgttgtctcttg

SEQ ID NO: 133631 - DNA, 508 bp, Zea Mays
gcacagcacgccgcaggccgcagatgtaaaccaacagagcgccgccgaaatatccatcacgattcacgcgccaactctccaacaagtcgcgagcgtcgccgacgtcgtcccccgctcggtcacccttcttctggacgcccgagtcacctgaagccgggacaggcggattatgcatgtcagtatcgctcgtggcggggcatcctccttgcgttggatgccagcgtcgagcggcggccgggaatggtggctagctactgtctcagaattcgtcggggacggtgacggagagccacagccacgcacggaacggatcgaaatgcatgctagctactggttcgaggtgtctgtgcctgtgcgtttgtgtgatcggtccactgtccattgctcgttccggaacctggattttggtggtggtggagtccatgaaattgcagattggttcggaatgactacacggcgagggccgagggtgcacagtggccgtgcaaagcgacagccgttgccgtgc

SEQ ID NO: 133632 - DNA, 426 bp, Zea Mays
cctggatcccgccacctaaatttagacaaagaaacgacaaaccccgagatctaaggaaggaaaagcagcggaggccagaattcctactaacgcatcacacctccgatcagctccccctttgccagcatgtggatccgacccggacagccaaacccatacgacgtgcaccaccgcggccgttctcaccaagccgccatcgacttgctgacgacgacgacgttcgtcaggcggtgcgcgctcagaccaccatggccagcgtcggcgacgacgcgccgctgctcggcggcggcgggaaggcggccgtgtggcgcgagcgctgccccgggtgcaggcagcagaggagggtgcaggccagtgacgggatcccttacgcggacttcctctacgtctggatcgcctgcctctgcgcctgtatgaatattattt

SEQ ID NO: 133633 - DNA, 652 bp, Zea Mays
ggtcatattaacagccttttggagatgctaacctaatcacctcaatcacatgcatgcatatcatgagtaactacccgccttgatcgaacggacgcagatagctatggcacacgccatacttgttctagcccatggccttggctcacgctggccaaagcattcatcttctccgcttcgctgccggtcgcagtttgcgcgtgaggctaagcagccatatcagcagcttctgtgtgagttcctcgttgtctcgcttctccgtaggccgccgctcgcccgctccaccgtctgcaggaccgccactcacgtttgtgcccgctgcttgactctgcgttgcgtgcctatgcctccaggactgcaggggggagaaagatgttattgacagctaaaaagtacagggcacgacaacacaattatctactagcttatctttgccttccccggtttggcagtttctctgacccctcatctactattgcgtgagtccctcatctactactgcgtgagtaacaagagtaagtagcatatcctttcagaaagcattaaactgaattatgtgagtgaaaaaggttttgagagactctgcctgttcgattcaatgaagttgtgtgaataccagtgccgagaaaacattaaaaacatttatttgatgggt

SEQ ID NO: 133634 - DNA, 449 bp, Zea Mays
cttgtgcctctgcgtggctcgtcggagtgactgccgcggtagatgccacagatccacgtgcgctagtgcccttcctttcctccgaccgccgcgcatcgtcatccaaattcccggccaccgccgttgagccctataaattgaagtccccaccagccccgcaagatcgtcacccacccagccaccgagaatcgttagcaatcgttcgccagagctcgtgaatttcgaattctccccaaactggtctccgccaccgcatgatcaagctcgccgtggccagctcgattcaggttagcccaagttcctctgctgcttgttctagaatccttaggtaccccgcaaacccctcgacccctttaattgaaccagaccgccagggatcaccgggaacgcgtaccattgtcctcatcgtccgcggttcacgtggacagagcttgatagcttaccaattg

SEQ ID NO: 133635 - DNA, 407 bp, Zea Mays
tgccccaccttcttaggatggacttggatcaatgtgcccccatctgagaaggcatacccctggacgcttggcgaaccaccataaacaaacaccgccataatgcaaaatggagagggattcccacaaaggcctcaaatagaatgtaatagaccgagatgtggaggatcccttctgggatctggtcatggaggtagagcccgtagtagagcaaccccataaataaggggagcttgaacacacaaaactcgtaatagtaaaaaggggcagaagaggcaacttcactcatagttggtctccgcttcacttggacctcgtcacgaggatccactcgattatttagatgactcctagggtcaccatgctctcttgcaactcctgaaactatttccaatcgatacacgacctcg

SEQ ID NO: 133636 - DNA, 369 bp, Zea Mays
ggtgatggcatggtggcggcggggtcggtgtatgtcgtggacaacggggtgagtacttctaggctcatgtcataacaatataatccttatccataaggcaaacctgaaagtgagacaagttggttaggggtgtggtaagtccaaaacatgtgttgagttcatagctggttccacaagcgtgcacacaagtaatcttataacttttagggtctgacaaaagtaagacaaaagaaaatccttgcatttaatacaaacaatatttcaaatttggagggataaaaatatagacctagaagtctaccattaggaaataagggcatacatgtgctctggtcagaactatattacaccagctgcaataaatatgca

SEQ ID NO: 133637 - DNA, 393 bp, Zea Mays
aaaagatctagcggggagatggattgggtcgcgggcagtagcttatcggaggggcttggtggctgtgcgacatggccgaacggtcgtggttgtcataggtcgccgacgagctcgactgcgccacaccgtggtcctttaccacatagtcgtaaccgtggcatgctcaaaattactctccctacgtttgtatgccgtcgagcgccacggcgtgctcgccagtgcaatgtcttgtcaccgccgccctccaaatcccttccaaattcggagtaaccgtggccaacctctataaattgagcacctccctttctttgccccctcataacgaacccagtgcaactctaacctcggccggtcatccaccatagcccaagcgattccgttttcccccaaatc

SEQ ID NO: 133638 - DNA, 457 bp, Zea Mays
ttcttcaattattccataatactcgaccccatcaaggccaggcgtaaaaactccagaacttgtagtttttctattaggtcgactctgctcgtagcttgttgtgcggaaatgatatccatttatgtcataaccagaaaatgacctgaccctataggcaaaaccatcggcaacctgtctcaactcgggactcatagacacatctctttggccctgtgagctcaagcaaaatatatcgttatattattcgcacatttcagaaatgaaatcaataactagattggacggtaccttctgtttaaaccaagaaataaaatcgggcaaaccatttcctgcaccctttctaagaaggatattagattcctgcggtgtaggatcccttgatccacgccataatttagaaagaaattctctgcatcatgcataattgagaacttactacatcatgtactggttgagg

SEQ ID NO: 133639 - DNA, 620 bp, Zea Mays
tctcctccccctgctggaccgaatcttggcccaaacccgcggcctccccttcccacgcgcccgcgctcctcctctttcggcccatcttcggcctgcctccgcgcgcgctagctcgctccacaccccgcctccctctcgctggcaaggcgtccccacccgtcagccgccctctctctcgcgcgctcgctccctctggcagaatggccccgctggtcagttgcttcgtcgtccttccgccgtcccctcaccgaagtcacctccgaccgtcgcctccgtcctcccctccgtcatttcgtcgcacagggaagtttggcaccgctccgtcctcccccccttgaccagcgtcctcgtcggtaccgccccgccgtggtgtcccctcggcggcgctgtgcggcattaatggtggcactgtgtagctcgccggagccaagaagctccaccgcccccccttccctcgcgcgcctataaaaggctcgccccgagctccttcttcctcgcaccagcctcggtcatccctctcctcccctcccccgagcacaattcgcgaagcgccggcgtcgtcctcctctccggtgagtcctttcctcctcctccctctccttctccgttggtccggcaag

SEQ ID NO: 133640 - DNA, 461 bp, Zea Mays
gaaccatgggaattctctccccccacggtcaggaagacagccggatgttcgcactccaagctggactgaatcccccacagaccaggaagtaactgaagcaggggctttgctagctgaagttggattgctgaaagaaaggggtctgactgcagaagctgtggtcgctgactttgttttcaagaacattcaaccgctgaaagatagagcatatccagcctatctgtatcgaggctttgctgattcaactcgggtaaccaacataagaattcctgccgtggacttggtgggccggctcgagatgatactcagaggcaaggtgtcaaacgtcggcgctcctgttgcatactcggcttggaatctgcctccttccaaggcctttaccagttttgtgtcaaatcctcctgctggtgatagcagtttgggccttagagtgcgaccctctcctgaagaggttagtgctt

SEQ ID NO: 133641 - DNA, 569 bp, Zea Mays
acggatttctttcgttgcttcaataattgcaatcgattttgaagatcacgttgatagctggaaggaacaaatcgcctcttcatcactcgcttcatctcttcccatgtattaatatgtcttagtcccaatctaagttgatgttcttgcagttgattccaccaagtaagagcataaccagaaaactcgactgaggccaagttcactaggtgttgatctaaaaaattgtgaactctgaaaatttgatcaaattgctcagcccaattaagatattcatctgcactttctttcccagtaaatttgggaatatccaacttgactaggccaatatggtctggatcatttctatgacgacgcccatgataatggtctctattttcaaaatcagcatgtcggtgatgatgtcgctgaccaaacattccatcatttgcaaagggattctcatccgatccttcatcacgatcacggtcttcatactcctcatctttaaatcttactcgacatccgtgtgcacgacaccttccacgcgaattatcaaaatcagcgcggcgaccatcaccataacctctacg

SEQ ID NO: 133642 - DNA, 557 bp, Zea Mays
tggatggttcggccatgggtgaattggaggatgcggctgagggtggggagggtggtgggctttgtggtggcgcggttgggttgagtggagcagcggcggtggactcggcgccggcgaaggtggatgagtaggatcggcgtgaccgtgataccaggttgtcaagggccttagtgtatagggtaggtggccctctactacggagatcgtagccatggtctgtcatcttctctggcgaggttatgtccctctgccgtcagcttagttgagagagagaatagggtaatgatctttcttcgttcccactcaggtatggttacaggaatatataggcccctaggcctaaccgcatggagctaactgctccctaattctagacatgcaaacaacccttaattctaagcatgcaaacaaacttatctaatttctatcctatccactagagctggcggttgttgcctcctaggcgcgctcacgcgcacaccgcacatcccgggcgcgctgtttcctgacgtagggccggccgtacatgacagacgtatccaccaccccccgcgaga

SEQ ID NO: 133643 - DNA, 490 bp, Zea Mays
gaaagaacggctgagttgctgccggtgtcttcaaaggtaacaaccgaatggttcttggcgacgtcggcgttttagattgcaatagccgaatcatgctgagccacatcggcgttttagaaataacggtcgagtgatgactgacgacgttagcgttttagaagtaatagccgagttttattaggccacgtcggcgttttagaaataaccaccgagtgatgactaagcactttttagaaatggtgtctcactcaagaaaaccccatttgtatcacatcgccggacgcctctacattctaagccctagcctcactttttgcctccgaacctcctctattttcctttgatttcgcttcctctcggtccaccgacgagattgtgatggcgcccaagcagaagagtcagaattctgccgctgcggttattcctcccatcgatcccaacagccaattgcctttcgcaggtaatcatatgtttgttgtttccgagtcgg

SEQ ID NO: 133644 - DNA, 578 bp, Zea Mays
ctctggactgggcacacaaaaccagaggagcacagggtttaatctataagatttcctagactcagaattcacccacgtggacggcgggttggtttcaaatggacggagggacttatttgcaatatggcgcaaccgaagaggtatgatgacatgtggaccgttagatcaatgatcgacgcccccgattagatccccctttaagtgaacctttacgcgacatggaccgcccgatctgaatccaagggtcagaaccgggatctggtcccacccctccatagccaatccaacggcttgggttgctccaaccgaagcggtacaatccaactaatctgggccacccattctacgatcaatggaccagggccgtcttctccaccacgccatccctatgaccaagcaggccgcgcggtggcacaatccaccgccccgtcggtgaagcccaccggcgatcctccgcccggtacctcggctccccctaacccgactaatcccagaaactgaaacagaagggtgcagggaacaacaagttaggatgcataccggaggtctacatgcggcaacaacagcgcgtggcagag

SEQ ID NO: 133645 - DNA, 397 bp, Zea Mays
atttggagaagggacctcttcagctgccgaagcaaaacaaactgctccgattgtgcagagccttgaagagctgactatagtgccgaaggtgcctacagtcgggccagccaaagctaaagatgataaggccgaagagccacaggtggaaaaagtgataaaagtgccagaaatcctgagcccaccggaagaggcagatttgccgaagatgcaaaaagctcctgttgcaactcccaagaggaggaggatggccagcgtgctagatgctgttatagagaccacgaaggccttaactcctgctcctgccaagaaaattgccgaagatgccaaaatccaagttgaagccaaagttgggccttcagcgctcactgagacgaaggccgccaagcctgaagataag

SEQ ID NO: 133646 - DNA, 751 bp, Zea Mays
tgagacaggggctctgctagctgaagttggattgttgaaggagaggggtctgactgcagaggctgtggttgctaactttgtcttcaagaatattcagccactgaaggacagggcatacccggcatatctgtaccgaggcctagctgactcaccccgggtaactaacagaagaattcctgctgtggacttggtgagccggctcgaaatgatacttagaggtaaggtatcaaatgttggcgcccctgttgcatactcggcctggatcctgcctccttccaaggcctttacccattttgtgtcaaatcctcctgctggtgatggcggtttgggccttagagtgcgaccctctgccgaagaagttagtgctttggttgcttcgcttgaagaaattcatgatgatgaacggcagattcactttgaggtgcctttggatcccagtgatgcagagataagtgtcatgcttgatatgttagctgaggattcttctgatgtcgctcgtgctgaaacattggtggtggtacccatccctgaggctgacaaagctttggacgctcagaagtctgtcaatgttcgtccaaaacgttctcgccgagccgatcaagcctcttttcctgctgagggggagaaaaagaagaagagacgtcttcgtcgggtgtctagcttagatccgggtgccggtccttctgctcctgttgttgaggaagtgctcgtgcctgaatttactgaagctgatcccaatgggtgtgacccg

SEQ ID NO: 133647 - DNA, 694 bp, Zea Mays
gtggaaccacgccgccgcaccctcgcctgcgattgccgctggtctgcactgtctgggtcgctgcaaccggctacgggagttcgcgtgtcaccgggggtcgcgtcggagtggatttcctcaacaccgaccggcctgcggttacccaattcctcatcggagttccggggtacattctgtcgcccgtcgtgccctgcgcaaattacgcctctacacttggtgagataactcccccttgctttgtcctgtgcttctcttctattgcgaccgtgcggggatcgtgtagggctctggtagcttaccaatcgctcggcggaagtagaatttgttcccctcaaccctcctcgccgtggctggggcgtgtccctgcacgggggcccatgtgggtacccttatcatgctctacgggggctccgcatcgtctgggaaatagggctttgagattggtgtcgttctttcgtggattcgccttacgccggtggctgcgccgccgcaaggagtccggctggcggtgtccggtcggcgaaggaagaagaacgaccatggaccgtcgatctgcttgtgttcggtcgagattagatgttagggtaccggttcggcgggagcaatccagtccgtccgtctctaatcgggcgcataggattcaccgtgggcagtattagatctgggcggttgatttctgatccgacagttgcag

SEQ ID NO: 133648 - DNA, 591 bp, Zea Mays
gtggattctattgttattgatctaatgacgagtagtgcgccaattttggggttttttttgttcgggctactgtggatttattctccagtcacttatttgatggcgagatgttagatcaagttcggatgtgtatcgggtgttcttttctttgttgtgaagtatgcccctcctcgttatttccaccagcaatcgaggtcagctctggtgttgtggcgatgttgttgatcgagttttggggcaatatatcggctgtcgattgagtttttgggcaatatatcagcatgttgattgttgaatataactcgtttatatgcgctctactctggtcgatgcttttgtcgtctgtgggacatacatgccattttttttgtttaaccttttctagctgattagcagccatctgagaacgtgagaagataggtgaaattaatcttggagttctgaatccatcctatcttgtagcttcacatttgcacattgactcctggtaccatcctattggtaacaacgtcctttatattcatcttttatatccatgtaggttctctataaaagattcttttcttatatctcgttccttttcaacaccgt

SEQ ID NO: 133649 - DNA, 554 bp, Zea Mays
ccgcccgcgggtaaagctgctcaccgtcgtcgtgccatcgccgttgtccaccgcgtgtctcaatcgcgccaccgcatcgccatgacttcctctagcctctccgttgatcaccggaatgaccgccacggtagaggccacgaatcccttgcgccagtaaagtttcctttcctccagccgtcgtgtgtctcgtccaaattcacgaccaccgctcgctcctcctataaattgaagaccgggccggctgcgttaggtcattacccacccagctatgaagaatcgttagccatcatcccccagtgagctagaatttaagatttcccccaaaccagtcgaagaacatcgtgaaaccagcttcaccacggccagcccctttccggtcagctcatccttctctctctctcgtttgagctttctcgtaactccacaatgcttgccgacccacgtaattgcgctaggagctctctggtcgccgggaacacgacgatcttgccgctctgctcacggtcaccgtggccagagcaaaacacttgatcattcgtgcaattaagttagga

SEQ ID NO: 133650 - DNA, 877 bp, Zea Mays
gacaaattggacactgtttgacaaaatcttccacatcagtcttcatacccttccaaaaaaacaatttcttcagtcgatgataagtggtgtgcaccccggaatgaccacccgtggcactatcatgcaatgcagccaccaactttgtccgaagagcagaattttggccaacccaaatcaaactgcccttcctgatgactccttgagatagagagtagccatgctcatccgggctgtggacacacaaccgagccagctgtgactgcgcatcagaattagtcacataggaattcgtaacttcttggatccagagaggttgaacttcactgattgttgtcaacgccatcacacagcccacacgagaaagagcatcagcgactttgttctctttgccctgcttgtagatgactttgaactgcatccccataagctttgccatggctttacgttgcaactccgaatgaagctcctgactacccaagaaactgagagccttgtgatcaatccggatttcaaactcgctccgttggagataatgacgccaacgatccacaaccataatcagggcgatgaactccttctcatagattgaaagtttttgattggtaactcccaacgccttactcaagaaagctataggtctcccctgctgcatcaacaccgctcccaccccgtcatcataggcgtaagtttcgacagcaaatggtatgttaaaatcaggtaatgccaataccggagtggaaaccatagcctgcttcagacgttgaaaagccagttcagcttctggtgtccacttgaaagcccctttctgcagtaacttcgttagtggccgggcaactatcccgtacccttgcacaaatcgcctgtagtaccctgtcag

SEQ ID NO: 133651 - DNA, 998 bp, Zea Mays
cattcacgaaacagcgcagatatgtctcaaggcattggttaacgcgttctgtctggccgtccgtttgagggtggtaggaagagctgagcttcagatcagtgccagtcagtcggaacagatgacgccaaaactggcttgtaaagattggatcacgatctgaaatgattgctgatggaagtccatgtaagcgatatacctcagtcatgaagcattgagccaccgtcagtgctgtataggggtgggacaaaggaataaagtggccatactttgtgaatttgtccacaacaacgagaatacaatcagcagtactagacctcggcaagccttcaataaagtctaatgagatagtatcccaagctacttctggaactggtaatggttgtaattttccagggtatgctgttcggtccggtttagcctgaagacagatttggcactgctgaatgaaagtatgaatgaattgtttcatatttttccaagcgaacagttgtttgatgcggctgtaagtaaccgggatacctgaatgtccacccaccgccgaacagtgaagagcagttacaatacgagtatgaagctgtgcatcatcaccaatccacacacgtcctttgtaacgcaagagtccattgtccaaaacaaaatgagggactgcattagggtccacagacagcttagtgagcatagactgtgttgcagaatcactggcatagctggattgcacatcctgcaaccattggggaaccacaactgatatagcctggatagaagattgagcacatctggatagtgcatcagccactcgattttcagaaccggatctgtaatggattttatattgtagccccaagagtttcgtaaagaccttatgctgccagggtgtatgaaggcgttgttcgttaagttgggagagacttttgtgatcagtgacaataatgaattcagcgtgttgaagataagctctccaatgttgaaccgctacaatgagtgccatgtactctttt

SEQ ID NO: 133652 - DNA, 1194 bp, Zea Mays
ctggcgaactacgaagatttctacaagacaagaggtatacacatataaagtacagcaaatatgttcataaacttcccacttcaaccggccggtgctaataaatatattaaccccaaactatatatatatatatatatgcattgagagcgttagcacattttttatggttacaatagaaaaaaggtgtcgcctttgtatcctttgtattaaatttcattctaataattataatttaagcacaaatcagttaagctaatgtgattttatccagagtatatttatatactaccgttgtacatatgagagatatttatgttctttatttctactgtagggtagcgagccaaagaaaacatgctataagttatatagtagaaatatagcatagtgttacatgaaatcaatttccatcctagaccatatacatttgagataaacttatatctaaactttgcaaagtggtaaaatatcaatttccatgctcaatagtctactatactaagtagattaattcttattcttctaaaatgaacgggtccagacggcccctaaagtattattttaaataatgttttaatactccatgtgctagagttaatatatcatgttctattatttaatttgagtgttgtctttacgcatggtaggtacttgatcgttatcgacgacgtttgggatacaaaatcttgggatacaataaaattagcttttgatcaaaagaataagcagagcagagtaatcacaaccactcgcaaccgacaagtagcttccagtgaggaggtttacgagctacatccgctctctcatgacagctcaaagaagctattttatatgaggctgttttggggtgaggacaaatgcccggctaatcatcctgaagaggcatctcaaaggattttggacaaatgtggtggtgtaccattagctatcatcacaatggcaagcttgctagtgggtaaatcgagagaatattggttggaggtgtgcaactcacctggtttctatcgcggtaaagataccaacgaacaagtagacgacaccgtgtggatactgtctctgagctattatgacctaccttcgtatctaaaaacttgcttattgtacctaagtgtgtatccagaagattatgagatcgagaagcatagattgatatggaagtgggtagctgaaggtttcatcgagaagaatgcagga

SEQ ID NO: 133653 - DNA, 416 bp, Zea Mays
gcgagtttttatgtcctaattcacaccccctctaggcatcagtgtttctttcaatggccatattggttgaatcagttgagtgaacgaggagggttgattttgatctcttgcacacctctggcagttatcacatatttttactaggtctgttgcatctgaagttgtcttcggccaatagaaaacctagtgaaacaccctttcgagcaatgctttgggtccaatgtgcgatccacaaatgcctgaatggatgtccttcatcaattccaagccttcggatctagatagacacttaagtaaagagagcaaacaccttgaacaattctcctatgatcttatatggttttgtcctggccttcatcatttttatccaagcttggtcatcagttggacggtttgattgagaaacaatatgatct

SEQ ID NO: 133654 - DNA, 668 bp, Zea Mays
cgaaggccttcgatccatcacgaaacaatggtcaataaagagtttgaattactcgctttgatggacaactatcccacatgagctatggacataaaagttagtctagtaacctgtggactttataattcacttcttatgctttatacatcataaggcaacacatacattcataccttaagtctgaatacatgttgggaaaaatccacatggactatggcttgcactcaaacaacactatgaactgcaaaaggcaattatcttgcccgaggccaattataaatgggcccacccttcgcctttaggatttcaaaattgttggtgattaaaaccatgctgtacataggatcaacactaagttgcagttatgtgaaaaggcactttcagatgcggatgaaattgaaaagactttgtcttttatgcttcccgccgaaagaatctttcaacaacaatgccgtgagacatttcacagtttatgctgagcttattcaaacattacttcaggctgaaagacatcatgaacttgtggtgtggaataatcagcatcgccctcttgggtctgcccattgcctgaagtacataccaatactcagcataaacccaaaaatgatgttcacactaagaactatcaaagaaactctcgtggtaaaaacaaacacagacacaacaag

SEQ ID NO: 133655 - DNA, 383 bp, Zea Mays
agaaaacggtatccccggcccccatcatgcaagtgcgctgccacagcaaaaatgggggggaaaggaggcgtcttactttaagtttcctagctatacgggctcaaactaactaaaggggaatcttaacctaattaggcaccgtgcgcgtgatctatctctgaagtgccaaatcaactgcatgtgtccacagaaccatagcccgtgccctaccactatctatgggtgggcggcaaaggatacgggcagcacgggctgtctatagcaacacaacactattagcttgattggaacctctgcgtgatttgatttggcaaaaaaaaattactgtgaaaatcacatggcaaacatagctcgttttaaggaaggccatatatcatgcaatc

SEQ ID NO: 133656 - DNA, 514 bp, Zea Mays
cacaaacctatacaactagctagcattcaaacaattttgaagctcctacacatacacatactagtgagcaaagcatacaaaactgaagtacactagcacaacctaactagctaccatagctacacaagctaaactagagaactaaataacttagctacataagcttactagcacaagagagcaaataatttactacaaaagtaaataagttacaagaacaacattaaacactagcacacatatggacatataataacaaccaacataggggggttacaaaccaacgaaaagaaaaatgtttacacgatgaggtttctctcccaaggtttggtggttcgccaaccacttactctctattgaggcaagcctaatgttgtcttgaatcctcttgtcagtggtgacctacaagtgacaccctcccatatggagtgctcacaaccgagctttagcatttgatccgaccaaccacttggtgctattcacacctcgctctactaatagtgtctttttcttc

SEQ ID NO: 133657 - DNA, 469 bp, Zea Mays
ggaaaactcatgaagtccatgaactgcggaggagtttagggttaggggctgggggttttggtggggaggaatttgttcttgacaatggcaccgctcattgtggtggtgggaattgatgatgggggaggtatgtttcattctagttagcgagggactagcagtgatgacagatgcagtggcaggagccgctagagacagaggaggcaggcacagtgggggtgctagagccaggaggaaaactatgggagaagcgaaaggagtcgtacggcttggtgctcatggtgtgcgacaccatgacacgcagatgacaggaaggcggcaggcggggtgcttcatttggcccattgaatctggtgtacaggtatcattgcagtagcaatatggaaaagaaaacaggtcactggatgtccgtcataaaggtccaaatctgacgtactttgggcacaacaatctgtctcagaatttgctt

SEQ ID NO: 133658 - DNA, 594 bp, Zea Mays
aaggttatctcacctgaaggttagataggaacaaaggaaacccaaagccggaggcattgacgcaccgtcaaaccgtggggtactagcaaaaacaatattgagagcaaactcaagccccaaaggaggatcaaaactcgcgcccaaggcagtactcagtgaaacctcagctccgacagcgtgctgcgaattcccagcgcccgggtcactgacctctaaagtgatcggaccaacaagagcgacaggaagaatcgtcaacactggctccttggattgagcttggcaccgttgagggctaggtcatcctcggcagcaccctcgggggctgtgttatcctaagcgtcacccttgggagctgaagcaccctcgatcgtacccacaggagatgggtaaccctagcctgcaatgtcaggagccgatgtgttcccatgaactaggccgccctcaaaggtcgaagaagcatgagaaactgtctgggttatttcttgcccgactggattactagctgaggggatgtcatccgggacctctgtaagggtgacagcaccctcaattttaggaagctccgataaaagatcttcagggataatctcttct

SEQ ID NO: 133659 - DNA, 530 bp, Zea Mays
cttggaaacaacggcagtattcattttataattcttgagttatagaaatcaccgttcaattaagagggatccgcaataagttaagtaagttatacaatgagctcaattcgaattccttcaaaatcatctaagagaacacttttctagatcatgaatgccctttgaaaaaccactcttactccccacaaaagttccaccttggttcacttcagatttttcaaaacttgctcttcagcttcaaaaaccggttcaaccggacctgaaaccggttcaatcaatttctggactgtttctctgccacctctgttctgaccgatttttaaaagctgccagaaaagtcgtgtgcagatattttttgaaaaccggttcaaccggagtttttcctggctcaaccgattttgaatccggtcgagtctccggctgagtagatcagtgaaccgagatcttcctggtggaaaccggttcaaccggtttttggtccttttctcccaacggctgccagcttttgggggatcctttaaatacccccc

SEQ ID NO: 133660 - DNA, 707 bp, Zea Mays
gacggacaaaatcttggactgcctgcttcaaccctttccatgcaaacagatgcttaatacgagcatacgtaactcgaatgccagaatgaccaccaactgcggacgaatgaaaagcagtcaaaagtttatgctgaagttcagatgaaggaccgacccagattctgtttttgtaacgcaacagcccatcttgccaagaaaagttgggcaccgccgaggcatcaacaacaagtttagcgattatatcagtagtcgcggaatcttgcgaataagaatctgcgatctctgccacccatttaggagtacacgaagatattgccaaacaggaagactccacattcggatggcgagataaggcatcggctgcactattatcactcccttttttaaaaacaatgcgatattgcagccccaatagtctagtaaacatcttcttctgccacggggtgtgcagtctgtgttcgttaaggtgagcaagactgcgatggtccgtaaagatcttgaattctttcaactgcaggtagtggcgccagtgatcaacaacagtcaagatggctaggtattccttctcataagtggacaacccctgagatttaggaccaagagccttactcaaatatgcaatggggtgcccatcctgcattaacacagcaccaatgcccagtttacttgcatctgtctcaaggcaaaatggcttggaaaaatcaggt

SEQ ID NO: 133661 - DNA, 482 bp, Zea Mays
ttggaaaggaaaaatctctctagccaatccaatccctgccgctcttctcgcctttagatttttcagccgccactacttatcttctgtgcgcagttcctttgcttctcatccgtcggcattcctctccattatttcctaccgctgccatggcctcaagctgcaatgctgcatgagctcgcccccatgtccgatggcagttgtctctgcccctcctccctgtttttgtgccagccaagttcgtccagccccttgccgctccatctcatcagcaccgtgcagctcgcttccatggccgttccctgctcgttcttcctggcgcgcgtgctcttcccctgcgctcgccgacgctcctccctcgcccatgccgcagcgctccagctcgcatccactccctgcgctcatgcttttccccaagccaagcacgtttgggtgttgacgactccagtctcctggtcgggctcttgctcagcgcctgacgccgc

SEQ ID NO: 133662 - DNA, 504 bp, Zea Mays
gaagtgccagtggagggaggagtcgtatatcaatcatggcctgaaccggaggagggagcacagacgccaaaatcagcatatgtctctagcagtccagctatgtgcataagaagcaagaccaattacacctctagtccttccatgggaactgggagcaaaaggaagttcaatgtctgatgtgctacagattgaagctctagaaactggagatgtgctagctcttttgtttaaaactgtgatgtgctagctcttttgtaaggcccttttgtaatagccaaactggtgtgacctagatagcttaaaactgaatgttctaatgtggcctagataactcttttgcatgccatatcaatgtgtaactgatgtgttatggcaagtagtgtcacgtaagtaaactgaacttttatatctcatcgaacattctgagggcaaaatcgtactgttgccgtccagtttgcatccgttacaaaggaaatagacggcagttgtatttaagaataagaa

SEQ ID NO: 133663 - DNA, 899 bp, Zea Mays
ggttgatgtgatgagtagtttagcaaatgctagtttgcgtggaggatgtatcgttaagacatgagtgtcggagttcatttatattagtggtcgcgccacattgcttgaagtgtctcgagtgcataccgcaatatggttgtattcgtgccaaggatgtataggttttactcaattagaagtctggttgatatggttaggaaattgtttcggcttgggtagtgaggtggtaacatgccaaagtagtcatcgcttcctctacggttaaatgggaatcatgtgtgatgatgttacttatggggtgaatacgtattgaaatcttttatgttgtgcaatatgactagaaatgtgaaggatagatagggtgtttcagaaatgttagcaaataggtcggacaagcatgatagaggttgagtcacttatgttataaaattgatgctcgacatgttaggtaccctaaaaggtgatgttttaggtgacttgtgtgttatccaatttaagttgagaaatgggtaagagaagctaattaatccgctccgaaccatgtttcgagttgcaatgtctaaaatggtttgctaagttttatactgcgttagccaactcatgtaagtaggagtcgattgcgtaagtgattgtgatatatatgttgtgtcttggattgcgataataataggcaaaccgatgtgtatggtgcatagcggcctaggttgttgcttgggttaaccaacttgttagatgtctttagttaagctcgtggtcacgatgaattgcttgttgtagtcgcggataaaaagtattagtgctcatgtgatgtctaagttgaaatgcaaattattaggtgaaaagcgctttgatatacatatatgccggatttgatgattgtggtgaatgcgttgttaatt

SEQ ID NO: 133664 - DNA, 396 bp, Zea Mays
taacaaccgaagttgttgtgatactactctttgccagtggccttcgtctcgtacaacagttcgtgcatattgcaaaaacacttcgcgctcggttccagcccctggcttctcatagcccaaacaaacaaacccattatgattatagcttcgggagtaatttgatgaagaaagatctgaaatatcttcaacacttcaaccaaaaatttgctcaatgggaaccaaagacccgccttcataaagcttctgtagacagcaacctcattttctacaggagcaggggcggtgctgtcccctccaaccctcacaatagacatgtcacgaaagtatcttcccttcatggcatcaatttgactttgtttaatggtcgactttccgaagatggtatggcttggtcgc

SEQ ID NO: 133665 - DNA, 514 bp, Zea Mays
ttttgcctggggtcactctttggtccccccatgactgcgtggggctctcattctcatcgtacataggccccacacgtcaccgagggaggcggacttggacttgctgtggctgtgggtgaagtgcatgcaccataagtactccctcccgacattaatctgtacttctgtcatcataaaaatcatcaacaccattcggataccaaacttcacacgttcggttccggagggcatcgcataaaatctcgacacaggtgcgctgtttctatcacataaaacccccagaattatctcaaaatgcgagatgagagctcagctttaagcctcatttgacagggcgtttatcgtttccaaacagtttattgggaacttcattatagactccggtaaaaaaagttgtttcccctcattttcaaaaaataattgcaaaccagtggaacgaaaaaaaaaaactaagctacaaagttctcctagttggatcgatctcacataatcgatttgacttgtacattacctc

SEQ ID NO: 133666 - DNA, 838 bp, Zea Mays
gtacctgctgcgcaccaattttggtatagcagctggagcatctttaacaggtactacaacgaactctgaacttccagtcttccaccatggtatggcatgcatgctttcccttttccatggttgactttgttagcattctgttgtatagcgtagccaaggttgttagcatctatgctagattaactcctagattagctcctagacggttttagttttgtatctatcctgtgcacatgctatctatataaagaaacaaagcaagcaccgaggtgctgtgccaccaattatattcttcctattgcattgttcaacttggtaatcagagcattcgatccattttttttcccccaccccgcccatcgtccatcgctgctccagtatttatggctctcaccaattccaccttcccaggcaccattgcctcctcctccccgagcctatctctttcttcccttggtcacgccatcaccgtgcgtttgactcgggagaattttttcctttggaaagcccaagcttccccggtgctgcgtgctcatcagcttttcggctatgtggatggttccatcaaggctccgtccgagttcatcactaccggatctggtgctgaagcacgtcaggtcccgaatcctgcgtatttgctttggtatactcaggatcagcttgttctgagcactcttgtctcctccatgagtgaagacatgctgggccagatgacacagtacaagaccgccgtcgatctctggacggctctgcatgagatgctttcttctcataatcgtgcacagattatgcaagttcgctatcaactctccaataccaagaagacgtcggacatgac

SEQ ID NO: 133667 - DNA, 737 bp, Zea Mays
ggagtgccgcgagatcattgatctcacgaagcgcgtcagcgagcggcatgagcagtctttcaagaatggctccccacctcgtcgtcgccctggcaaggaaaaggtcgacgacggcgaggtagccgcggctgagcgagacctcggataccagtcacctaagggggacctaagggacatcttcactagagattcccactccgatggcgactagatgaaccaccgacgggaccccatgtcccccggcctacggagctgaagcctgccttcctccggaaaccattctgggtcccccacgggtccagacttctgacagatttatctaggagtgaccaaggccaaggacgggggctccttcgtcaaacgcagatggaaacccggggtcgagacctaatcttacggaagtactaaaccaaatcagggctccgcaacactccccagctgggaaggacccttcaaggtaacaggaatactccgacctgagggcaactatctagctatgactgaaggaatacctcccccggtgctggaacatctctgtaagttctatctataaagcaggtctgaggggtcgagttgtttcccttttgtaactaagtagcgcatacgtgtacgtcaacccagtggggtctgcccccataaacccggcctgttggtccgcacacatgcatgataagttataaaggaaaactaccctctcagatgcgcctctatgatagtattgtcctactgctccatgg

SEQ ID NO: 133668 - DNA, 566 bp, Zea Mays
ttctaaaaaaacatcagccgtccagacatcatccagtatgatcaagtaccgctttttgtctagagtttttattaatttctcccttagttctgcactatccattgttccaggatcaaattctttcttatctttcttgaggatatctgtcagcattttcttccatatatcttcgagtttatatgactgagatatagaaacccatgcacggcagtcaaagttgaacccttcatttttgtacacattattggcaagagtgctttttccaatgccacccataccccagacagcaatgatttgaagtgatggatcttcaaattttaatgaactaatcaaggtttgcttatttttatcaattcctgcaagctcctcatctctgattgagtaatcgtgtccaggaagatacatttccttttctgtttcatagcttcctgcaggtacatcagtcccgccatccaagggtttagtccagcggtctttactttcagatagttgtataagctcttgctttatcttcttaatctcactagcaatttcatctagtgaaagcagacgctgaggcttcttgg

SEQ ID NO: 133669 - DNA, 660 bp, Zea Mays
cttcaaaaatatacggcttagcattattagcttctggtcagagtaacacaatgactactagctattcaggacaatacattatgcaggtaatttataataatggatggatacagggggtgtcagttccttgcattgtgcacatcaagatacatttacatttaccttatattatattaattcttatattatgtatataccaggagaaaattagaaaaaaaaataaagtccctctattcatggattctagaggctgtagatcttagggaaagcccctgcaaattttttttgaatgacaattgaaaaataccagtttatttttgctcccaaattctatggagtgaaaacttctgccatcttgatttgatgcagggtttctccgggatgaggaaatgcatcgtttttatcattgctccctgtttcaccgtcatacctagtttgataatttgcagtgttgctggtgcccctcacgttcgacaactcatcaacgtgtctgcggtaacttaaccctcttctcgtcatagatgaataatcagtatcagtagcggcgtagaatgctaatagctattgttcatcttgcagatcatcttagcttttgtattgccattttccctagttcccctcctaaaattcagcagcagttgcgcggtgaaggtaccatac

SEQ ID NO: 133670 - DNA, 390 bp, Zea Mays
ggacattagagctatcacaatcagaaaattgcagcgagagattggacatgaagacagagacaatggtgaagcggggatatgatttccaagaataacagactattgaaacagagaatgtcctcaaatctgatggcgtcaacaccctcgaagccccttttcaattaccaaaggtaagacataggaactcggtcgggggagttaaatcagataaggaaaacaaccattctgagttctaacgcacaaacaacttaacatgatcaagaattgatgaactcagccaagactcggcaatggcaaagatagatcacttcatttcatcaaccatccataaacaaaagaacagttcatcatgaattgtttttatagagatttctactacttctaccctac

SEQ ID NO: 133671 - DNA, 679 bp, Zea Mays
tgaagatgaagctaatcaagaaagtttagatactggtatgacaacggggcaaggtatgacagaaaaagcaaaatctcctgcccccgaagctccaaccgaagatgttgattacattattcgacattcttcggggaaaaattatctaaagaggaaatcctagaggctagacactacgcccagaaattaaaatatccaaagggggctttagtgtttaatggtactggcgaagatgattacatatactgtctcccggacaacaaagaaatatccgtgtgccggaagatagctaaaagtatgggtttttcgaagcttgaggaaggcctatcggtcatgtcgaaggatgatcttgctgatagccttgcatacaacagtacaaaggtacaaaggctatgttaactttaaagttgaaattgaagtatttttattgtcatgcttaattctctctttttcttgcagggcttaattcttagcaatgccttgagggctcaaaagaacactgaagatgaaaggtgcacaatagcacttaacaactttcgctcagaggtgattgaactgaaaaacgaaggtctagaaaaagacaaaattttgatttcatttgtgagtaaaataaaagaagacgaagctaagtacaatgctcaggccgaagcccaaaaagccgaggttgaagaccttcggagac

SEQ ID NO: 133672 - DNA, 620 bp, Zea Mays
gcgcgagaagccttgttcttctgaaagaggcttttgatggtgacctagagttggcaagtagtctagttgtgtgcaatgtcaaggacaaggaggtagttgtcaatgtaggagccaacgatcatccactatggattagttgggcacgcctctgctcccatggatgtgcaagcgaagatgaacttgccacacagggagaggaagaagggagaacttggttgatagttatggtgcttcaacccgaggatcatgggaacatgggacttgatgaagatcatcatgtagggggcgacatagatcagtggcaccgcctctgatctagatgggagggagcttgagctgttggagccgagcatggcgttggaagtagaggaatccattgacatggtaagggattgagagcggcggtgtaccgttcgttggctaggtgtttgagaggtggatggggaggggtggaataggaggaaggggtgtctctggcaggaggctgcgatagggagtagttgccgccgattatatggcaacgaggaaaggaagcgcacgagcggttggggtagggtcaacacggctagggtttggaggttggtgggcgagtgaacttaggcctggactcgtggtacctt

SEQ ID NO: 133673 - DNA, 926 bp, Zea Mays
gaataactttgctatagaaatcatgcctttgtaccatgaagaattctgagataaatgagcctgaagttggactgtcagactgcttgaaatcggaaattcagattaacagtggaatggcatggagttagggctcgaatttaagcatgatccattaagaatttggctaggggtgctataacaaagatgaagatggtttaatggtttacaactttgatgcagggccttagatgtgttgccatagaaaatttagagacaatctaccctaaacatcatctatcaagcactctgaagatgactctcatagtacagtagccgatcggatcaggttcagtgaacctcaccgccgatgaccgtcgcgctgtgattcacgtcgatcaccgggattcgtgcgctgtggattgtggataactgtgggcgggtaaagatcttggcgcctggatcagcttgagtccggccgcggttaagcccgccgtacccccttgctcatcggtggatcgggatgagacctcaccgccgttgatcgatcactgccgtgcgccgtgtgtccagacactttaccatgtcacgattagttgcgttaggggatccggtgatcgccggagggagcgccacggtgaaaaccactaagcacttgcgccagtgctcccttccctctccgaccgccgcgcgtcgttgctcaaattcgcggccaccgctcatgtttactataaattgaagccacagtgagctccgtaggatgatcatacaccaaaccaccaagtattgtctccagtcatacaaccgagagctccaatttcatacttcccccaatctgctcaaaaacaccgcaagaacaccctcaccgcggccagctcaattcaggtatgctcatatcttcttctcccttgtttgagtgttcttgtgtacccttgatgctcatcgacccg

SEQ ID NO: 133674 - DNA, 340 bp, Zea Mays
gttactattggagtagtggttagaccatggaggtataaaaaacttttactcacgtgagaggtgtactagaccacaaatataaaatatgttcttcaaacaatattaaaattaggactgtttcaatcctactactgaaatatcgatttcagtttacagtaaaagctggctagcagatagatccattgtcttcaagtctattgctttgctatgcaagaattcaaacaatgtaaactgcaagtatgcactacgcagtacacacgataactcatataaaacttttgcactaactgcttgctaacataggactgtgattagctgatggaagtacaaaactatatat

SEQ ID NO: 133675 - DNA, 524 bp, Zea Mays
cggcccatttgttttcttttaacccgcgcggcccaaccttcctagcgcacgctcagcggccgaccattggggcccactggcagcctcttccttgcgccggtcggatgcgcgtgctggctggcatgtggggctgattgccagttcttcgtctccgagggattcgcgagctccgtgcgggtcatggtgaagcggccggcgcgaaatccaggtggcttggacgacttttcctgcgcctatataagatttggggggccacggttcctccctctctcctcccctcaaactcgcggcgccaaccaaaagaaaatcgccactgcctccacgagcaggagagtgagatcgccgccgccggtgttatcgagtgtttccttctagccgaaccccgccaactgcgtcggacctcttgtgggtcactgggaaccgacacacgacgacatcgggcgcagtggtggattgggacctcgggaatttctcaccggaggagggactgcgctgcctcaacaccgctcgcgtggccggggtac

SEQ ID NO: 133676 - DNA, 679 bp, Zea Mays
cgcgagtgtcactgttgtcgcggggcccactgctcagtcttaggaacgtcgcacgttcccaaatctcaatgactcaccgtgaaaactgctgggatccctcggctgggtcctttggatatttattcaacgcggataaccctcccttatctcctccctgctcctacctagtcttcaggtcgtggcgcaccgccggcgtcaaactacccctccctggccgatacccacctcgcgtcaaccgaaccaccgcgcatcgtccgtctttctagaggtctgggtgagagtcgcgatttcgaagcgtcgcacggtattgggtgtcctgtgcagccatctttccaccgttggtgaccagcgaacccgtgctcttcaggctccggtgacagcatcttggcgtggagtcacgcgcctccgtaagctccatcttcgctgtgacgttgtcgaccggtgcgtttctattgcggtgagtatttttttcctgtgcctcgacgtattctagtcgtgcgttgacggtggagtgtcctatccgccgccgtggtgttgtgcacgcgcaagcctgggcggagggtggaagaaagccagcaaatcgttgatcaaccgttgtagggctaagattagatctagagggacttggctctcgaccatcgatcgtgtagggaatggcctagatcgatcctggacgtac

SEQ ID NO: 133677 - DNA, 528 bp, Zea Mays
gtcgtcgtcgtcgtcatcaggaccgtgcggtgccaaggcgctgaagctcgacgccggagctggaggtggcgaggttggcactgagctggtcctggcgacccccacctactgacgagttcttataaatggacagatgaccactgaagttttgcctcacctcacctcaccgccattaacccatcgtcgcctcacatctgagaacatagcacacatgacaggatagctgcagattacctacccttttacctttgctttaattgtcagtcagtagccgtcactagtctcagttggaacttacttgcaggtgggtttacttacagctgagcaccatgttgctgctgcttaatccctacagtagtttgtacttttggttggagacatttgtctgccactctgttgaagccaaatgctcatcaggagctggcatctgtagtgccgccgccaccttttgtcttgcctttgtttgcttgatggtttcttgacccagctatgactgtatgcttgattttgccatcctcatattcctca

SEQ ID NO: 133678 - DNA, 480 bp, Zea Mays
ttaagccgaaaggcccagtgcaactgtatcactatggactccaaggtcgccactctgtgtgacgagttgtgtaagctaaacctggaagttgtttcctcaggcaccttgggttatatttcagtagagcccacactacatgagcagaaaattgtggcccagattggtgacaagggtgttcaaatcatcaaggaaatgctcgagcagaaggtagataagtacaaatgcttccatcaggatagcaagggagttctatggtttgaagaccgattggttgtccctaagaattccgaactcaggaagaaaatattggatgaagctcatctttctaaattttccatgcaccccgacagtaacaagatgtatcacgatctcagatctttgtactggtggaccaggatgaagagggaaattgctaagtatatatctgaatgcgacacttgccaaagagtcaaggccagtcatttaaaggcagcaggcacc

SEQ ID NO: 133679 - DNA, 545 bp, Zea Mays
gaaaaaggaatgcatgcgaagggaaggtatcaatatggactttatactttacacaaccaattgatagtataaacaaaggtaggaattgcattatgtctcctgtttacagattgaaatagcagtctttgcacaatgaccatgaagattcatttatattttttgtttacaggtttaaacagcaacatttaaaggctgaccaacaaaacttgatggtgaaaggaattatttagtccaggtaattaatgtacatatacatagcaaggaatcacatatgtcgatcgggtgttagtattagtttggtacaagaattatataatctaaggaactttaaaatgattcaaatatctgtagtcagtaatatgatatctagttcaaatgaaatgaggatgataaaaaagaagcatgatggtaccttgtcaaacgaaatggatatgtcttccttgctatgtggtgacaagatatgattctatcgacgtgtgcagttagtactggaaaagtataatgtcagtgcagttagtcctagaaaagtagaatctaaaaaatac

SEQ ID NO: 133680 - DNA, 1094 bp, Zea Mays
gctaggagcatccagggaaggtaacgttgatgctacttcccccgtccactagtactttcttcacccggctctcttggatcactggatcgaggacgagtgggtacttgctggggtggtcgaagttgagccattgatccgctcggctgaaggttattgcgtgctccgaccattgatagggagccggggcactggtggttgccgccaggacctatcagtcattgagcttttgctacctcatgttctcctgtgcttcgtgtcttccgaagatgacgttgacctccctgttaacgcgcgagaatgctccgtcccctctcccttcttgctgctgaggttgtctgggctcgccaggccctcctcgcggtgggggaggtggtagaggctagagaatcgccggcgccaagccaatccggcgcccaggacccttgcctactctaccgcgaggtaaatcatgacgatgataggaaggctaatcaatccaggctaaatgtgtctgcgattggtggagcagggagtccagcccacgtcggcggatgacagagcaacccgtgtgcccaccggtgaggtgaccagagccgcacaaccactgtacatgaaggtagataggtatgacatggtcacgcgactacggagactaagagttagtgcataccaaaagttcgagacgaggatggagaggttggtcgcggcgagatttacggcccgcgcccacggtcgcaagaatcgccccgacgaggttctcctagctcccgacaccgaagcagcctctctggtgcaaactagctaaccccttcggccaaacacgaggtcagagcgccgtcgaggggtcaggcacaatggcaacggctcttgcgctcactctattttcttcccccaaatctctctctctcgtcgttagtggtgaaagaggggaagataggggaagggagttgccttcttagcctgcggacaaggctggtccgcgaggagatctcgcccgagccgttgcgccagccgagatggtggagtaagcagttgcggcgcgcgactctggcggcatggggacgatgacctcggactcagcagagtatggtatgtggggcccggttgacagagag

SEQ ID NO: 133681 - DNA, 587 bp, Zea Mays
ccaagggcacatttccctttcacatcgccaattagcagcagataggcgaagccccactcgcactcaagatacccccccacatctaggccgaggccatagggcaggtagatcgaggctgccattagggcagaggcccccaacaataacaaaagttgtatcgtgtcttccatggcgaagacgttgagcactccaccaaggactacccaatgaccaaggatgacagagatcacatggcttggacgatgccagacaataacccgagagccatcgcacacacctatcaaacccactacccctcactatcaagacatacaaccacccttttgccactaccaccaaaactacaaccaacaccaagaaagacttcccccacctccccatcaataaatgcttcccctcccaccccaccacaaataattcccctagcacaactccccctccataacctaaagaagagaaaaacaactgcttgtctcgggaataatccacatgatcactagagggtccagcatggacttcatgaacaatcggtagaagaaagaccactatcgaagagtgaatcatgtcgctgtcaacaaacccatagt

SEQ ID NO: 133682 - DNA, 500 bp, Zea Mays
cagtcaaacagtccaagtgttcgtttggaaaaacattagtcgcttacttgggccatgttatctcatcttagggcatttccatggattcagataaggtgacagcagtagaagtttggccgcgcccctcggtctatttgggtgcttcgaggtttcttaggtctcactggctattaccgcaagtttatagcggattatgggaccatagctgcacccctcatggctcttctcaagcgtgaggcattccgttggtctgaaagggcagaggaggcatttcttcaactcaagcaagccattatatcaacaccactgttacagatgtcggatttttctaaacagtttatagtggactgtgatgcattagggactaattttggagtagtccttcatcaaggagatggggccattgcatatttcagccctattgtagcaccacatcatcagaaattaccagtgtatgagcgggaattgattggtttagtcaaagcagtgaggaattggag

SEQ ID NO: 133683 - DNA, 593 bp, Zea Mays
gagggggtacccctatgaaaacatctcataccatctctcatcaaccacatcttagcacctccgcaaagctcattagccctcttgtaccaaacacgagctactagatcagtaagagaactcatcttccaccgcccacaactcatttgtaatctgtataccctagtgcaattccaatacatagcctcaacaggaagtagggtgttacacattctagcggcccaaacctgtatatatcattgtgcaaatccgacgtgctcctacacgtaccatcgagtcgcagtcaacgatgtcgtcctactcaagagcatcgcgtggggaacctcgtggtgtgcggttgggtcataaacactgagagctggtgtgccaggtagggggtgcgacgttaatccatgatgactccatgactatcatcttcaacatcccaatcactttcaatgctggggaggtcttctactttggctccctctcctacattgcagaccaagaaggcgtcctgcactgcatagtgcatccgtctaaaaagagacattctctgatggcgccaagtgtgggggcaggcttgctcacctaactctagtgagaactgcgccaac

SEQ ID NO: 133684 - DNA, 379 bp, Zea Mays
catagcccttgcatcgataacatagaacatctcttgttctacctgtggaggctactgaagagccactacctgctggtttctgggcagatttggttgctgaatttgtggaagatgcacgtggtttgtcgccggaggaaggtggtggtgctggtcgactcagcgagggagttggtgttggtgtacggcgggtcatggacgtagtcgtgcgctgctgccatggtgtagattttcctgtagaaacattagaccttgcattagcacgtcgtccctgcacttccctttcagctttgcaagcaagatgaaacaatcgggttacgttagcataatctttataagcaaggatgtcctgaatttccctatttaacccgcccaaaaatct

SEQ ID NO: 133685 - DNA, 313 bp, Zea Mays
tgaagttaccacaacattcattgctattgcactattgtgctgctgaaaaatttaaccatagccaaagctttcccatcacattctcaagcaaagcatcattttgaactagcttcgtcataagagagagattcgtcacaaccataaaaatcatcaacattcgtaagaactgcaaggaattcaacacctgatggctagagtacgttcaaccgctagggtgacccgcgatggagaagaggccgaaactacaaagactgctccgatctctaaagtgatgaaacaatcgtgaatggttgtgacagagatagctactgaa

SEQ ID NO: 133686 - DNA, 433 bp, Zea Mays
cactagcctcattgtcattagtttaatgattactgctggtgctggccttgttacctctggtctaggtccttcagggattgctgctcgtgctggccttgttacctctggtatgggtcctgtcagcagtggacaagtcaatgtctccgtctttatttgggacccagcggtcatgcgaagaacagtttggggacaaactgtatttcaacgattggggaatgtcaaccctgctacacaagaggcggctgtgctaatcacggacgacaaggatggagatagtcgggggtctgccgaggcaagcaactgagcacgtccaaggcgtgagaagcgtggcaacgtctgtattactgggtcgagttggtcgtgttagggttagctgggccgagctgccgagaaagtataaggatacaactcaggcaattgtaaggacatcgaa

SEQ ID NO: 133687 - DNA, 859 bp, Zea Mays
cgcaattgttgggcggcaaataggggcttttgtatctcggtgcatcgaattagcccgaacttttgttccatcacccgcacccattcatcagcttccaggggttcctccgccttgacaaagagcggtggatgggtttcggagaactctagataggtggtgtctcgtggtccttgagggggacctcttcctccatgctattgaaattgatttcccgccatttcgcgcaaaaagtgcgtgatgtaggcggtagcgttgaccaaggcagcgatagcctcggccagggtaggaagtacaggtggcggattgggagtgtcctccccgccgcggaatgtacccaccccatcttgagcacgagtccgggatggcatctgaggcaaaagaaacctttggaaatataacatgccaaacatacatcgtattcattacattgctgaactgtaataattatacatactccattatacaactcgacttccttacttattttacataagtacattacttaaactatactattctaattttcttcatccttagctactccactgcctgcttcaggagaccgttcatctgcaagatttatggaaggaggggccccaaaaaggaccagctccccataaggtcctccatttgctgtcctagatggtctagctcccattactgcaacttctggtggcacgttcgggtgcagctgatcataaaatacgtgcaccttttcatgcaaggtgttgcagtacgattgcaggttttctagggatgcgctaagttctgctactcgagctagagctttggcttcgcaatcccaagcgaaagagcgcgagtttacgacccagtcaatggtcatatcgcgttccgaaat

SEQ ID NO: 133688 - DNA, 857 bp, Zea Mays
tgaaagtagaaaaaatgaggttgatagggtatgctggcttttttggattttttatttggttacaacaacattgacttcaaatatgctaactttctagacaaaatcaacttgtgcagatagaggatgctatcaaaatgtaacctttccatttcatacattgttgggagattttgaaagataaagctaagtggaacaacaagctctcccaccaacaagagaatgccatccaagtcacaaggacaagtaccccaagccaatgtggatgttcaggatagacatgagggaagagactatgctaaaaaggacaatagagtctaaatcaaacactgttgtggaggttctccggcgcatccatggcaatagggagaaaaatcaagtgaatgaggatggacaactgcaacaaatactggaaatgaaagatgaaaaactttgtttgcaaagagaaatcctagaaatcaagaagcaaacacgacgaagttctagagctgaggaaacaaggaacagagttaagagctaaacatacagatacaactcatggctacagaggcagtaattatggggattggcctggaaaaggttgctccacatttgaaggactattgcataggaatgcaaaagcggatcatggagagaatgggttttacttctagcaccatgaaggagacctagataattgagtgttggtatgtgagttgtatcatttattgcacttttctcttatggtctatggcatgaaacaatatgtatgagaattttatgtaataatagtacttgcagagtaattgtatcctgaaatacgaagtcataattcagagtctttctatttccaacacggggctaccaggcttagaattgtc

SEQ ID NO: 133689 - DNA, 794 bp, Zea Mays
gttggatattatttgtcaccacctttttttgcaggggatattacaagaaaattagttgagcctataaaggttaccgtaccagttccttaccattggaatattatctgtcaccaccttttttgagcctataaaggttttctctaagaaggacctactttgcatctagataataagtggccaatccggataactgcaatgcaaagagtggaggatttactgctcggaggttcctgaatgtttctttttttatatatgttggttgtactgtgcactttcaaatatttatacttctgagttgaagaagtgtaatacttcttctgagggccttctctatttcatctttttaccaggtgctgcagactatttagactttcccatgctagaagtttagtcatttaggaaaaaatatatggtattgctctggccattttcatttcatcttgtttgattattgcactttatgcacagatggtaaggaactataaggtggctcgtatactaccaaggattattgaatttgcaaagaatgatagaagtgttgttcttggcgccgagtatgagaagcatcgatatggtatcgcaacaaatagtacttgatgggagcctacaaaatgttttccccaattgcattccttttagaatttcaccattaacaacatgaaaattctgggtccgaactatgtttgtcgtgaagttgcagccctgttgttagacccatgctaggacttactttcgtgaactgatttttaggttatcaaaaaatggggtgctccaaataagagaccatatcatgt

SEQ ID NO: 133690 - DNA, 425 bp, Zea Mays
atgtattttgaggattgaatgcaaccggttgatcttaagactagatctgatcaagcgaacatgttatcaaccaatctctactcctataaatcactagtctcaatgatcattctgtgtcatgcacaaaagtgcataagtttgttcctctcttccgcatctcatctaacaaaccagataagataagccttgagtgtttcctgctcctcgtgttgtcgttgtatattaacccaaattcccatctctcttttaccgtctctgcctccatcacctagattcttccaacttcccatctctcttttttcgtctctaccatgctcaccaagattgttctgcaccgccatagaagacatcctacaacttcccatctatcttttttgtctctgcttccccacctagattcttccaacttaccatctctcttttcc

SEQ ID NO: 133691 - DNA, 316 bp, Zea Mays
cccttttgcatttgttgacatgtctgtgctaacttgaactctttcgccttgcagacttgtcaacgtaattgttccgttggcacactgtatcactccatcacaacttttcaaccagtcacatccaagaatcacatcaataccattggatcctaggaccactaggttgactgaaaaatctattccttgaatcttgagattaacatggaggcatgagtgtgtggccttcatgtcacctcctggtgaactaatatgtaacatcttcttaagggggtactttggtatgttatgtttttccacaaatgactcagttataaat

SEQ ID NO: 133692 - DNA, 417 bp, Zea Mays
gtttgtatcgtgtttgaataactatctcattttaaaatgtctgccgatatgatatatagaaaccatagcgatgcatgcgcaactaactagtagagtaatattattggtgattatcaatattagtcaccaatacatcaaccctaataatgcttacatgtgggaacctacatgttggtacctttttcaacccgtcttctccatttttctagccttctgcaaccttctcatctacgacagcctccttcctggcctcgtcacatccacgtcggccctagccctagccttgggcactgattaggtggttttggccccacgacgtgccatgccatctttgactgtagagaccagtcgatcacatcctcgtgccatttgtcatggtctttgatgaaggaggcctcgagaagcaccctccacgcg

SEQ ID NO: 133693 - DNA, 744 bp, Zea Mays
taattagctgaagtgatgtatagaaattgtagctggtagagtggagagcattttatctacagcgactgacgcttggggagccttccatctttgtcgtggggagtttgaaacctggtagatcgcgctcgccgcgtgctgtgctcgtggtcgcgtggacgtcgagccttagagcgcgcagcgtcttgtctccatgcgtgggcaggcctcagcagcgccctgctccatttgcttgtgtcgagcacgccagcctcttccacactggtatcctctccttcccgcactcaccactcttctccctcactcaccagccttcttctctcactcctacgcgtgccaccatgggtgctggtgggtaactctcgtgaccacgtcttctctgtccgagacttgaccaccattgtcttcctcgagcttccccaagcgacgtgcatgcttcccaggagcatgagcacgccaaaacccccgacattgacgtcgtcatgcctttgctcgtgacggtgtgcgtggccggtacgcctccctccgtctcccgccgcccaaagactgtcgccaagattgtcttcgcccaccaccgcttgttttagcttcgcccagtcgtttccgtctctggtaagtcgtcggccgtgctcgctttcatctcccttcttcttggctggaggaagaagaaaggggaccacaggtaggaatagggtaaagcccggggttttttcgtattgtcatagactcagtgcaatagtgacataa

SEQ ID NO: 133694 - DNA, 393 bp, Zea Mays
ggaagaggcctatagatactccgagatgaccaggggcttcggagggagactccaccctaggcatatcaggacaatccataatcccaactcaagcaacgacaggggaactcacaccaaagccatcaacaaagctcccaatcatcagggacgcaacaaagttcctacaggccaccagctccaagaggcagaggaggaagaagcttcggtggaagattcaactcccaaccaagaaggttgttttgtttattctgtggagaagataagggacatacaacaaggacatgccaagtcacgatccagaagcagaaagaaatagctgaagctgaagcacgagagaatcagcctaagcaggtcctacataccgcttcgtgctattccccatacatccccgag

SEQ ID NO: 133695 - DNA, 289 bp, Zea Mays
ccagaataaagctatttgggatcgatcctctgttgcttcagcgtcaagagaaacaccacacgagtccccggccaaatgtgctgttcatacactaaactgctgcacacacatcacactctcctacatgcttttatttttcgtcagcaagctagctaggatagtaatatcgacgttgctacctaaacctttagaaataattcatgatcgatctcgttttcatgcctatttataatcatttccttgtcttcctcttcactcggtatatattttatatacctcttcctctagc

SEQ ID NO: 133696 - DNA, 564 bp, Zea Mays
gtaagaaatgagctgacttggtcaatctgtccacaatgacccaaatggaatcatggtgccgggaggtattgggcaatcccacgataaagtccatgcaaatgtcctcccatttccaagatggtatgggaaggggttgcaaagggcctactgccttcaaatgactggccttgattctctggcaggtgtcacattcggatatgtacttggcaatttccctcttcattctggtccaccagtataaggatctgagatcatgatacatcttgttgctgccggggtgcatggagaattttgaaaggtgagcttcatccaatatcttctttttgagctcagggaccttgggaacaaccaatcgatctccaaaccagagaattcctttgcagtcctgacagaagcatttgtatttttctgttttctgcttgatcatttccttgataacctgaacacccttgtcttcaatttgtgccctcactatttgctcttgtaatgtgggctccaccgagatataacttaaggcacctgaagaaacaacttccaggttcagcttgcacaactcatcacaca

SEQ ID NO: 133697 - DNA, 435 bp, Zea Mays
cccaaaacgaaagttgccgtcgcctcgccttccgatttcgtcttcccaccaagccaaaatgttgctcagattcctccgccgccgcgcttaccccggaaaactttcgagctcgcgcgatctgtaaaaccccgtctttctctcggctgggaactcccgcgcccagaaaaattcttctcccctagcttagctcatccatctcgctgcccgccatccatggagatcgccaagaacagcattgcgagcggccgcgtccgcgacctgccgccatcgaagcgattcaggcacgtcggctcccacctcggatcgactcccagcgtgccgctgccggccaagaagcgcatgctgccgtcgcacacgccggaggaagcagccgtcgctctctgcctcccggtgaagaagagggtcatcgcggcgccgcgggtggaggtggccggc

SEQ ID NO: 133698 - DNA, 398 bp, Zea Mays
gtgggaccagtcaaccccagtcacagggacctcaggatcggagcctcaatagtgaccagaatacctaaaagaacgggatagtacgacataccaggtgtatgccaatgtgtacaaaaaggtgacgcaaggtcatgacggaagatgaagttgtactgaatataacccagaacaccaccatgaggccactctgtgggacccgccaggtaccgctacattatcatcagacaagctacagggacacaaacaccgggtagacaagacgaaatgccacattaagaatacgacagtgtgcgcccctatggacgacgctaagagggctaaggcaacccaaggcaataggccaaactcctcccgagaagaatatgagttcttaatgtaaaatctacccttgagctata

SEQ ID NO: 133699 - DNA, 642 bp, Zea Mays
ctcgggcacgactgaagtggagaaaaccctatcctcccggcctcccctggcgattagaaaaccctccactcctccagaaacgtctggcggctgttctctgctccatcgcctggcgctcacggcgattctagaaaaccctagagtacatcgccgccgcctggtctctgctccatcggcgccggcgcgtctccctcccgctcctggatcccctcggcggctcggcctccagtctctgctccatcgccgcgtctgtgctccgcctccacgggcctcaggtatttcacctcgtctccctcccggtcccggctcccctcgtcttccggtctgtgttccatcgccaacgtcgtgtcgctggctcgctgctccacgggctcgccgtgtctcaggtatttcacccacatccaccccgtctccctctcggctcccggttcccctcggcttccagtctctgctccatcgctgcgtctatgctccgcctccacgggcctcaggtatttcacctcgtctccctcccggtcccggctcccctcgtcttccggtctgtgttccatcgccaacatcgtgtcgctggctcgctgctccacgggctcgccgtgtctcaggtatttcacccacatccaccccgtctccctctcggctccc

SEQ ID NO: 133700 - DNA, 435 bp, Zea Mays
agaaaagtccaaaatggatactggacaccctttgttggccaaagcagagttagtcgcatagtggacaataggttgactgggagcatatcatgcacaatggatgacaccatggtgttgcagggccgagcttgcagtctaaccaagtaatttgcttctgcattagtgggtccatagcctggtgctgtgggggtgtgtaagtggtagaaaatagatagcaacaactcgaatttgttcaatatgatctgggaggagcttaaggttgcttcacccctggactaggtaagggaaaggttatttgacattaatgacctgatgtcatatcaagtaaaatatatttgcaacttccgagtccttcagaatctaaccctgtgctgtgcatgttgtttttttctttccttttcggcttgtcattctgtagtgtacaatatgaactcc

SEQ ID NO: 133701 - DNA, 272 bp, Zea Mays
ttgtaatcgtgcattatatgctatgcattgcattcatagtgacacctagttcagcgcaatcctgttcaaatgccagaccaaaatatggtgaagtgaatcttttggtctaggaatggttttgcactgaaggttggacatatctagatacttttcaacgccttttagttcatttggagtaggatttataatggcatatctcttgcttgacttcatcagcgatcactggtcagtcacagaagcaggtttacgtgtactcaccacatatgagtgtt

SEQ ID NO: 133702 - DNA, 307 bp, Zea Mays
ggatccgtaacacgacatcggggaagaaaggtacacatggaagttaggaatgcacctacgaatacgacgacttcggataacggcggagtccaaccttgcggaagacctagcggcggcgaggtgaaaaccctagcgacgtcaacgggggacgagcggatacggaagacctggcggcgacgaggtcaaaaccctagcgacgatgcagcgacatcaacgggggacgaccggatacggaagacctggcggcggcgaggtcaaaaccctagcgacgatgcggcgaggtcaaaaccctagcgacgatgcagca

SEQ ID NO: 133703 - DNA, 712 bp, Zea Mays
gttgttttacactaggggaggatgtgggtggcaaggaccctaaatttatgacttcttcggtgaagatagagctgtggctatttttagatgacctatttatctctaaaatggatgtgaatacgtacaatagtatgatgatatttttttattgggctcatctttgcctcttcaatgcattattgatattaattactggcatatgatgagagatagataagtgggttagaggattgcctgccactccttgtttttaaaataaattgacatccacttgaatgttttgattataaaaatgcatgtattctgtcaatcgagtgaaaccttcaagtaaaattttaaacaagatttcgggtttttattgatactttttcttgtctcgtcatgtttttgtgccctgaaatttcattaatatgcacattatattgctcatatgatgttgatccatcaatattctatgttcatattggggatagattggcttcaggattttggtgcattattgtcaatattattgtaagtaggagtatacagtatgtgctgagagcctgagagggggtatattatacctgagcatatttcagtttgggttgaaaaaaggctgaaagatcttacccacaaacgtcatacggatcattttggattggctttaggttgagtctaggcctgatgaactgccgtgcacggtagatttcagtatgaaaataactaaata

SEQ ID NO: 133704 - DNA, 472 bp, Zea Mays
aaactgtatgccatgaaatcatgaatggaccacaaatacgcgactcggagtgtgaatctctcctttttgtagaaatcatatgcttcgacaccttcccataactttttgagatcatcaatcaagggttcatcatcacattcaaccctttcccaggatggtctagaccaggaataattagggaaagaaacatgtaatcatatttcatgcacatatgaggtggaaggttgtatggaataacaaatacaggccaacaagaatatgatgccgcatttgtattgaaaggtgtcaacccatctatcgccaacccaattcaaatatttctcgcttcactagcaaattttggatcaaagtcatctagagccttccacgcatcactgtcagatgggtgtgtcatcacatgagtgtcctctcgttcatgttctttgtgccatctcatgtgcctagctgtgtttctcgaaagaaacaaacgctt

SEQ ID NO: 133705 - DNA, 614 bp, Zea Mays
ccttggtgccgatggaacagcagaattccctgaagtcttggctgtcgaactgtttgtcgttgtcgactgtgagttcggacgggactccgaaacggcagacaatgttttgccagaagaatttttgggcggtcttcgatgttattgtggagactgtcctagcctcaatccactttgtgacatattcaacggcgacgaaggtgaacttgagattccattgagctgtgggcagtggtccaacgatgtccaaccctagcgttgtagtggccatgtatgggcgatgagcttggttaattgcgaagggtggcctaagcgaggagagaacttctggcatgcttcgcatgaccttgtgactcgattggcagtgcaattattgcgggcagtaaaatccctgacgaatcaccttggcagcgagggccttgggtcctgagtgggagccgcaagttccactgtggacttcgcggaggatttctatgccttcggtttcgattatgcatttcagcatgggctaaccgatcccctttttgtacagctgacccttgactaatgtgaagtccctgctcctgtgctttagtcgtttggcctcattgcgatcggttgggtggtagtggccttgc

SEQ ID NO: 133706 - DNA, 477 bp, Zea Mays
tgaagctccccgagccgcggattggacaccacctcaccagagacactggatcgacgtcgccggacttcaaccggccgccgtcgcacgtagactgagccccacggtaagccattcgtcgattccttgtacatatagcacccttagcatccattgaagctccccgtgccatttgattgaaccctaccgccgtgagcaagccggagcacaagccgctaacgagcccgaccgcctgcgcacgcggtcagccctattccggccatcaccgtcgacaatccgcacctcggcgtgaccatcaggacctcctggacctcacccagcccttcatcggacctccctcgccgctggtaagccgcaccaccctttttcctctccgcggtcactgttacaatggggaaggagcacgggttgaaagaaagaaaagccaggggggttcttgggaggtcagtgactcaggaaaatagttccacaggggcaccg

SEQ ID NO: 133707 - DNA, 918 bp, Zea Mays
tcacgtcgcggtgggacgtctccgtggctggttatctgaaggctgttttcggtgattgattggaaatggcaaccgctcttgtgtctggtccctcttcccgcctgcgatgccgcggttctactctttttgatttaatttcttttaatgaaatgcgttattttcacggcgatttccttcgcgcgcacgagatgttgagcgaattttcggtgaagtttcgtaatgtgcacgttctgccggaagtttcaaaattgcggcaagaaaaaagaatcagcagattcgagagtagtaaaggttacctagtagtattgacttgttattagaacgttcccgttgacttcccgtctcccgcttgttctgcctaaccctaggcttattaaatccccttgtctgtagctgggcaaacgttgtctttttgttcatctcctgttttctatccgtatgcttcggtgcgtgcatggagggcttgcctggtgggttggtgggaaattacccactgtttgttcaggaggagaattcctgagaagtcgatttattgccattaatctctacctggcatggagtttagactttggatggtctagcatttgtacagatgatgtagagttgtagttgaacagcatcatagtcggttacctggtccacgttcgatctctgggcacgtcactttcagtgtagctgataaatttgatatttcaccggtgaagttttcttgtattataggaaatttgcgtaaccattatgatcaagttgaacatgtcacactctttggacggcaacgggccaaagtcatgcaaaagagatgtcccaatttcctgtcccgccagttcactcctttgtaggtcataccagattacctatatagtcacccaaaaacagtagactgtaatgttcgtagagtgaaatttgaaacatatgatg

SEQ ID NO: 133708 - DNA, 473 bp, Zea Mays
cacacctacggcggccgaacgccggcgacatcgccccgggcgcgcggatgacccaaaccttaattaatccctaccacacgaagatatgactacggcgaacacgaaggaggtgaagattaccgagaatcgggcgtgtagacgagttgttcacgggtcggggcggctcggcggtgttccttcgactccgacgaacaattccgtcgatgaccgaggctttccgggccccaatccgccacggacgtgtttcactgtcccaggcgaaccacccaagcccccagtcgaccctggaatggtggcgtagggccaagtcagcggcggcggcgaagtcgtcgcgccccgaggtcccacggcgatgcaacggtgctgccggttgcgtttcgagggggaatagggaaagaggaagctgcggcgcgattcattttatgcgtaggggtcggtcaacaacggagtccgcagcgcctgccatgaccgag

SEQ ID NO: 133709 - DNA, 311 bp, Zea Mays
gcatgcagtatgttttctggaatcttttgttgttgacatttatgcatttgtgttgcgcttattctgtactatgcccttgtcatcatgtacttgaaccaggtgaccttttaaatgcatgtctgtccataaatccatatcttataaggtttttgcttttgtgaagtataatttgttcataccaacagtatcttagaatgcaagtttccattattgttacctgtggtatggaatgtacatgattatgtgctttagacttccatattgctgcatgttctgtgtaaatacttttgtacatgtactttatagatgaa

SEQ ID NO: 133710 - DNA, 352 bp, Zea Mays
ctgcgacggctccaatacacatgcgacggctccaatatacaggggagaacaatacacaagcgggagggaagaaaacgcaccttacggttgatgaactcagcgttgagagcgaggtcgttgagctgcagcgtgccgtggccaagctggatgtcgaactgatcgaggtccaggtcgccgaggatcagatcccccagccgcttcttgagcagcgacttgcagacgcgctttagcagcgtgtcgggacggaagccgtccaagaaccccatcgcttcccctttcgcggcggcgtcggtggttgcggagaaggaggctcgccggcgacggaagcgatagttgcttggttcgattgata

SEQ ID NO: 133711 - DNA, 926 bp, Zea Mays
gatgaagatcagatcgaccgctcccctcgccactgatgactccgcgtcgggatcgtcgcctccgttaagattcgtgctcactggtaaccggatagcgcttcggggcaaaagatcttcgcctggggataactccggcagctggccaccgtacccccatgccttacggtcggcacagattagttcaccggcgatggctgcccgttggtcacctgccacgtgctaaagtgttagatcacgtcgctgtaagtcgtgtctcacatgcacggtgatcgccagagggagcaccacggtgaaaaccactaaacgcttgcgccagtgcccctctcctcctccgaccgccgcgcgtctcgcccaaattcatcagccgccgcttaacaatcctataaagtgatggtcggggctgttgcaccatgtaatcacgaagccaacgcaccagctattgcttcaaatcactcaccagagaccacgaattccttacttcccccaaaccggttcatcccaccacaagaacacccttgccgtggctagcgcgatttaggttagttcttaccctctgctccctcgtttaagcaatctcatgcgtctgtgatgctcaccgacccacccaattaaattagaccaccaccaatcgccgggaacgcgttgttctttggatcatccgcgcggtcaccatggccagggacattagggtggccattcatgcaattgacttaggggaaacgctgattggggcgtgaattcggttttggccgaagaagggcgccagtccttgccccgttcggccggtctacacgctcgtcggagctctgccgtgcccctcgccgtcgaggatctggcgcggtaaagaaatagaacgtggaggtcatttatgcaaagtgtcagcgacgatgttaaatagtgtttgggctccttcgggttattcaaaa

SEQ ID NO: 133712 - DNA, 483 bp, Zea Mays
ttcaatttcggccggctttgtttcagcttcggtttgcatttttgaagcctcgacaattttccctgaaggagtagagcttaaagcctttactgtttctagcacatctagcacatttgccatccttcttcttttgggagttggcgcaaaacttttttgtgccttcggcactgttacttctgccgaagggcttaaaatttctaacatttttgttccttcaacttttggctcttcggccttatctttatcggtctttgactcagctagctcggatgaaggtaccttcggcatcatagccggatcttcagccttctgcgtaggaggaatgggctcctttggttcagcagctgaagaagtttccccgccaaactcaggcaccacggccgactcaatatagcgtggccggtgggtaaggactttcaactttttgctcgtcggcgcggcctcatctggaatggccgaagcagcagttttggccaaagcagc

SEQ ID NO: 133713 - DNA, 680 bp, Zea Mays
ccttgagccaaccagagtcggaccccagtgactggagagagcctatcatcaggtacataaaaaatgaagaagaaccggatgacaaggcggtagcggaacacatcgcaaggcagtcagcccactacaccctcatagggggcacactgtacagaagaggtgcgacgggagtcctcatgaagtgcattcactcggctattgggaaacaactgttagatgaaatccatgccgggcagtgcgaagtacatgcagcatccagaactctggttgggaaggttttcatatctggtttatattggccaacagcgaagagtgatgctgccgagttagtccagagatgtgaagcttgccaattcttatcaaagcaacaacatttacctgcacagcagcagcagaccattcctataacatggccatttgcatgctaggggctggacatgatcggactcttcaagaaagctcagggaggctatactcacgtgttggttgccattgataaattcacaaaatggatagagcataagtccattacctctttgacctcagccaaggcagtggaattcatacaagatataatatttaggtttgggatactaaatagcatcataaccgacctaggatccaacttcaccagctctgaattcttcgacttctgcgagcaacggagcatccaaattaagtat

SEQ ID NO: 133714 - DNA, 372 bp, Zea Mays
ggtgctggaggggctttcttctttcgctccgtctggcatccttggctcttggtcttcttttggattttcttcgtgggggcgagcttctttagcttcttatcataatccatcttcagggttcggtaggcttcacgagtgttggcctcctcgccttctactatatcgagacactcttggagggatgccttctcctttttaagttccttgacatgctgttctaagctttccacccgggagtttaggtgggtgcagtgggaggaaaggtcgtcatagtggttatcgagagtgtggaggtatccggccatgtagacgatggtggggtcatcctcggtaggatctctccctgacagggcctgaagtcttttcctccag

SEQ ID NO: 133715 - DNA, 462 bp, Zea Mays
tgtcgaaggaggctactgccaggtctagtcagggcggcttggtctatttaaaatatactttcagatatagaggcaggtttgatgagccaaatgatgaatggttaagtagtattgaggcaaccagtgacgaattgcttggggcctacacaagggccgaagatgatgcaatggcattggccttcgaaggtcgaggcaagaaaagattgaatagagtttttgacgtcattggtttcgtatatcctgattattgctattcctcgcgaaagcagagaaagaaaaggaaaactgttgcttcgtctatctctgttgtgccgaagggcaaaaagattaaggtcttaacacaccggctgagatacattgagacggccacagtgccgaagcttggtgaagggacatctctcgctgtcaaagcagagcaacctgctcccaccatccctggggaagacctaactatattgccga

SEQ ID NO: 133716 - DNA, 338 bp, Zea Mays
tttgcaggctgacgagaccaacaagacagccgggtttttagacagaagttgtgttattcggtactcaccatatttaagggaacacttctcaacggcctatggctctctgtatcctacttcatgaacgggaataaataagaactaccaaagaggtttttccatagggttcctagcttaagaactcagacctcataaacagaccaggattgccacaagagactcactttattaaaacaaagcatttattatcttcgagaaggcaggtacaactcctcttaacttacacacatgaggatcaggtactacaaccagctacaggaaactagagagctctagcg

SEQ ID NO: 133717 - DNA, 413 bp, Zea Mays
tcctgagatgctctatattccatgaattccctattttcgtgccatccatttgagtaatcctatatgatcctggccgagtgacctctactactacaaatggcccttcccatagtggtgataatttgtgtcgtccttcccccgttagaattcggcgaaggaccaagtctcccactacaaaggatcgatgtcgtatggccttgtcatgatagcgcctcaaggtttgctggtatctagctgactgaattactgtattcaatcgctcttcctccaatacgtcaatgtcctctaatctcgtagcctctgcttcagctatgctttcgaagaccaaccttggtgccccaaacctgagatcagcaggtagcactgcctccgaaccatagaccatgaagaaaggagtatttccatgcagagct

SEQ ID NO: 133718 - DNA, 435 bp, Zea Mays
cgttcgacctcctcaagtccgacaagcactgggtgcgcaacccggatgacaccttctgtggccccttctgcccctgcaagaagagcaggggtacaagagcaaggacctcctccagcacgctccgacgacatcgatgtctccaacaagcatcgacatcacggctgcaaatgtatgctttactttcagtcaaatctctgtgggaactaaactattgtatttgcatagacttcactgatatgtgcctttttgaatatttaggtggaggttatgtaatatcaccagtcgatcaatgaggacaatcagttttaaagcacatgtttgccaaggcctctccattgtatgtatctcaactctattgtgcgcaggcgagcaatggaataaaaaagccttactatgtatctcacctctattgctctgcttagccaaggcctctcc

SEQ ID NO: 133719 - DNA, 359 bp, Zea Mays
tctaatgcgttcccggtgatctaaggcagcttagctcaattgagttggtcgaggagtatccggggcaggtatgggtgctgaaacaagagggcagggagcatgaatggacctggagtacgctaaccacggcgagccaacacacggcggcgtggagaaccaaattgggggaagagagaaattgggaggctctggtggataatccggggcaaggactggtgcaatggatgcgtaattatcctacggagccacggttgcactcaatttatagtaggcttgagcggtggccagtgaatttgggttgggtgcggtggcggtcggagaaggaatgagtcactggtgcggtgattcatggccttcac

SEQ ID NO: 133720 - DNA, 372 bp, Zea Mays
ggaagcccaggccgggcttccattaccttctccctatatatatattcgggattaataatgagaaaactgccatgttaccaaccatatgacgcgtagcgggaagcatgaatggtccggtccagctaagtagtctatactactctattaatatagtagcgtcagcgtccacaccctggttgcccccgcctgaccccgcaccctcccacgcgcgcgcatggaagcagcccgccagtgggcatcctcgaagacaacgagtggtcgcgggaaagacctgcggcctctgctacctttccctcttcccctcgcttggcacagattcctagcgctgccaaaagcaaacaacagcctcctctcccctcccgccattactca

SEQ ID NO: 133721 - DNA, 349 bp, Zea Mays
gcgatgtggtggttatttgcgggacacctaatattgcataaggttccgtggttttaaggaaaaaggacaataatcttccatatgttagtggcaaaaaaacaggaaactgttaatacataaattttaaaattgatcttgcccaagcaatctgtatcactattcaccttttgcgttttgcatcaatgtaaaatcctgaaacctgtatatggagtactggctgctaattaagaatacattctgataagttttttgcatttcgctgctatttcgatttggctggcattgacattgtgtttcaatattttgttaagtctttaatgacttcacattctgatgtgacaaaatggcc

SEQ ID NO: 133722 - DNA, 532 bp, Zea Mays
cacaacgaaaacaatgcgtgcagcccagaacagcaatcaataaattctagcttctatataattcaagaattaccgcattctagagacttgaatcattctagcactttaccacttcttagagttaaattaattaaatgaggactagcaagtaggcttacaaattttatccaaatcatttagtgcactaaaattactacaaccaattaacaacgcattattcacgacaatcactcaacaatttgcgttttaaattagacatcgcatgagcactactacttttcatccgcgaccataaacatacgcatttagactacaataagcaattcaccgtgattatgagcttaaccaagtcatctaacaattcggttaactagagcaacgacatagccgctaaataacatatacgtcaacttgcccattattgccgcaatccaggacacaacatatactacaacattttcataaacacacagattcaaaagtatattcgcacaccgaccgactcatatgaattgtaaaccacaaatctcta

SEQ ID NO: 133723 - DNA, 564 bp, Zea Mays
aggtaaagaagacaggtaaaagtttcataccgagttaagtagttttcgtgcttcgtccccggccagttcacgcccgcctgttgcccagatttgggtgatgaatctgttccctatgcttcgggcttcggctgggatgtcaactaggtctgacatcgaaatattgaaatttggtttattaacagtcttggcatgagtgcacctggccttgataaaagctgcagctgtgccgcgtgaagccaccagggcatagaaatccctgtgcccagtgataacttcatcaagggcttcaacttcattttcaatatgatcaaaggccccggggatgtcttcgaccgaagggtgaatctcttcagaagcagctccaaccgagttgaatatccccttcaaccgattagcgcaccgggtggcaaagtcagcacacttgttccgaaggttctcaaaagcttcatgtagcttcgtatttctttcggtttcggctttgaccttcgcttaaagctcctttgtttcgcggttaaagcgatgtgagctttcatccaaaattgtttgggcttcgtccagttcctc

SEQ ID NO: 133724 - DNA, 450 bp, Zea Mays
cgggtgtctctcgatcggtgttgccgtcgaagaagtagatcgagcagcagtagatgtagatcaagtcgcagggctggcagcagcttccttccttgtttgcctttgcaccttttccacgctgtaaggttacgtatacatgcatgcacatgcacgtggatcggaatcacaacggcggtggcgatggcggtggcaccgcgcgcgccagccggctctctcatgtaccggtgcgtgctctcctccctgtcgtcgtccctggaacgtacgcacatgcttcatatatttgcctgggacctgctgccgctctcactagctagctagttcttaatttgtccaccgacagtccagcgtgcatccacaccgcttcctatcccctgtaagtttttagccccccgccgactggccttattattacttgtatctcggctcggctactgcgtgcatgcagattaa

SEQ ID NO: 133725 - DNA, 338 bp, Zea Mays
ggcgagtgctatcaggtctttgagtgtccaaggtctttccaggctctgggatagttgctacagctagtgtttcagcagggactgaatcagaggaatgctcagccaacatgtccagcatagcacttatttctgcatcgctcgggtttataggcatctcaaaatgaacctgcctctcatcattggggatatcaccaagcgaaacaaccaaagcctcaacctcttcgagagagggtcgtactctaagacccaaaccactgtcaccagcaggaggatttgacacaaaactgatgaaagtcttggaaggaggcagattccaagcagaatacgcaacaggagca

SEQ ID NO: 133726 - DNA, 477 bp, Zea Mays
gcgagaatggacttgatttgggctagccacggcgagcttgatttcacggcgacggaaaccgaattggggaatacccaaaattcgggcacactagtgatcgactgggggcaatgcttggtggctgggtgcgtgatgatgttgcggagctgaaggagggctcaatttataggcctagtgagcggtggccatgaatttgaaggaggacgcgcgacggtcggaggagggacaggtcactggcgcaatggcttggtgtccaacgtcgtggcaatcgctccggtgatcaacggagagcgagagcaggatatggcgatgcggtggaaagggttagacacgcggcggacaatggtgacggcttaacaacggtgagaatccttgtccgaggggtggtgagcaacgggagaggtaccgcggctagccggagtggcgtccagctcaccggcggtgaagattttcctaccccacgatgttatccatctg

SEQ ID NO: 133727 - DNA, 562 bp, Zea Mays
ttggacacgtggccacactcataggatccacgccggcacacaggcacgacaaagcaataaacttgatccgacacgcactaacaggaagcaagcaagcatagagctcaccgtggatgagtctgaactccctaagaccttatatttacagcttggactccactttacttaggcactagaatctcccagactagcatccatccatatctcaacctgaacaacacatgagcagggatatgaagatattttccttcccgtcaagctgatccaagcttcagctacccaataacattcagtaccaacctaccgatgtgcagttttagcatgccaacccctccccccgtccaaactgaaacaaattcagccccacactcccagttactggattggcttggattcccctttcaactaccagccttccgcatcttaaagcacagcttcaattcactaaaacaatgggcgaatggctgcagcctgtagagctttctgctcccaaaaactgaatccagtttccagtcacttgaaacagaattcagcactacccaactgaaaccccccttctcta

SEQ ID NO: 133728 - DNA, 499 bp, Zea Mays
gaaagagagagggtgagcacagaaagctgagtgtgcggttaggatctccaacgttgaggctggggcgggacccgatgcttccccgtgcagcgtggaagtcatccgtggcttcgccaagtcagagggccggtacctcaccatcggcgagcaagggaacaccgtcgcaccaacaccatccgtgggcagccctacttgtgcttctagcaccggtatggacgcgacctggtaactcttcatcgtatttgttttgcacaagttctatccgtgctccaaaccacgatctcgggtgactggtccgtcgctcgccggctttgcaccctcctgcaggtacaggcagccgtcgttcgggcgacggtgggaggaataagagtccagggccgtcgattttgtgataaacagccaccattagatgaagggttgtgatggtgggagccatgggatcctagattagtggtggagatttgatcttgcgtaccccttcgtctcataaaaatctggc

SEQ ID NO: 133729 - DNA, 366 bp, Zea Mays
ggactctctgctactggttgtgatatggaggcagggagccaggtatcgacgagcggcggctccagctgcacactacgcttaggcggcgacgtgctggtggctggtcccttctcaacgccgtgaattgcacgattcacggttgacgagttagggtttgctttgtgcgtgagtgcgcccgtgggcggcttgggttgttgtcatgtaagctagctcgctccgatttggaattataccgtctgactggttgcccatatcaactcatctcggaccatcacatgcgttgattttgtttgagcttatgtttggttgactgtacgtggtagatgcaggttgcatgagtagatgcaaaacaagtcattttaagat

SEQ ID NO: 133730 - DNA, 798 bp, Zea Mays
ggaaggagaggaacacgagagagagaaggtgaggaatttagtttaggtttttcttcttcgatatccttctcactgtccaggctggttcaaatacaactcacccaattcagaatacgtaatactgcctcatacgtgtacggtatacacacgtacacgtatggtacgccacacatctagacccactctggccctcggacgcggctgttgacgtgccgtttgcgtttgcctcgcacgcctgtgtcttgagtctgaatgtgatcttcttctccctctggcaaggctgaggtagtatctgtagtggtaacattcccctccccttgaaaattcgcttgaccccaagcgggtgccattggaaaacattggcgcaaggcttcgcggtcttcccaagttgccagatcacgaggtaaaccggaccactccaccaaaacctattgcaccaatctattacctttagtaatgccacgtgattgaagaatctgcaagggaaaactgtgctcaggtattgtggcaggaatatcagcagaatgggtgccatggaaaccaacagcctgttttagctgagatacgtggacaactgggtggatacgactggtagaaggcagctgaagacggtatgctactgccccgacccgagcttgtaccatgtaggggccgaagtatttgtaactcaatttctgatgagcacgcggcatgacggaagactgaacagagggttgcagtttgaggtacacccaatccccaacagaaaaaatacgttctgaccttttcttatcagcttgacgtttcatgcgatcttgg

SEQ ID NO: 133731 - DNA, 452 bp, Zea Mays
ggttgatatctacttatacttagtacagattatatagccagtaactgccaggccattactgactccaattgtaccatgacactagattaatgcactaaacacggcccacggcccaactctagagcacttaaacccttacacacaacatcactcattcctgcccacatcctgagaagacaccgtaggcacaaccttcttaccagacatgacaccttcaccggtgattcatcgctgttctgattctgcagctgcttccctgttctaatcgaatccagagacttcatcgccttcaccggtgaggtattttttttctcccatcgtcagactagatgcgagctaagcgcgcacctcgcctacacaaacatctccttgtttatttagattttgccttgcctttccttgcttccgtctggctgcttcgaatgtgagctaagcacacatgtctctcgtac

SEQ ID NO: 133732 - DNA, 443 bp, Zea Mays
accgcagatcacataacattcgtaacaaagcaccagttaccacttattacaagttcacatactgtgcatagtagagtacacatgagtccaccggttacatacccgaaatacccgttggtgcataactagcaacatcctaaattaaggtgtacaaaccaagctaggctgactacgccatagtacatgtaccacccaattagagctcgctgtcactaaaggatggcatctgttcagagtcgtactcaacacccacatgttttcgaaatgctcgacaaagtcaaacaattcaccggtgagtggttcagtaggcgatggtgtccacaacatgttagagggcacgtaatcgtcgtctaaatgtttcttttcattgtttatcttatccaaggtcacttggcacaccaaagagttatggtctagcatgtcagctatgtcttccaatgcaa

SEQ ID NO: 133733 - DNA, 634 bp, Zea Mays
gccgcacatacgttccggcagtcgcgtgcccatgcccatggcctccggcgccgctgccagaattgagcacagggaatccgttgatcgcatcagccgtgacgtcctggacattctccggcctgggcggcaccgaagacgatgacgacggcatcctgctcagttcataaacgacaaaaaaaaatgttactgtgaggacgaaggattaaacacaatgaatagtggcttccataaaaaaggaagcgagtaaaaagccgtaggaaaacaaatggatgtaaattgtgatccaaacatggcaccaacacagcaatgcattatgaatatatatatgatgccatgcagccacggaacggaaaaatctgaaaattgtttcagtcaatatgcatgaggccgcacacatcagcggtaattatgtaagaaaggaagctactcgaataatggaagacgaataaagtaagaaaagcttggcatgcagtactagtaaattttttcgtgaaattaaccgttcttactactagctgtgtcatgcatatgcaggtgtagacgtacaactaaaagctcaactaggaacaaaactaatgacggcagcatctgtgacgtgttgttttcgggggtaaaaatttcatttcatctacca

SEQ ID NO: 133734 - DNA, 478 bp, Zea Mays
gtcgctatgtgttttggttgaattagttcaaaagtatcgtcatcttacaaagctgctgcaacagtatgcaacgctgaagatcggtgagcagaaccacggtggctagctcgatctcttgtgcatctcgcattatgaaaaaaagtgtgtctttctgcgttgtttgattcaatttgtacatgttccgccgggagatactttcacttgtagtagccatatatttgcatgagctcaggttatccaccaccactgggtgggtgttttagctcagttgacattattgtccactgcagcatgaatccaagatgaagctttcgcacatggtgctatcgatcgtacgttctgtgtctgtctagctctagagcggttacgtatcgtcaatggttaaggtagtgttggaacggttgggacgatggagcagctcattaataggagtggctccgtccgaaagatttgagggagcatgatggtttaggatttg

SEQ ID NO: 133735 - DNA, 448 bp, Zea Mays
gaaaagactccaagctttgtcagggagagaacataatgaagatgatcctaccgtaatctacatggccggatatctccacacccttgacacccactttgatgaccttttctcccattgcacccacctaaactcccgggtggaaagcctagagcagcggatcaaagaattgaaggaacaaaatgcaactcttcaaaacagtctcgagatggtagaaggcgaggaagccaacactcgtgaggcatactggaccctgaagatggactatgccaggagaatgaagaggttcgccctagtcaagaagattcggaagcgtttcaaaagccaaggatgccagactgacccgaaggaagaatccctgcccgcactaccttccctagggatagaaaacctttctaacgtcgaggaagtgtccctggctagccttgatgatcttctcagggagtttggg

SEQ ID NO: 133736 - DNA, 562 bp, Zea Mays
acagagattgcaccgcgcgcggtctgattcctctcagagtctctggtggtggctgctgctggctgaagaaaatactgagctcagctcacaacgacagcacatgtcccgttccccgtttacaacatgcggattggatttctgttcggatcgagactgttttgtgactggcgacatctttaccgtacgaaaaaaaacactgcagagtaatataatagtatctttcagcagcttcatttccgtgtgaggctggctcccttagtcccttttcttatataaaaccaaagctagaaacagaaaacacggtagctttaaaattatttggtttacaaacatgtaagatatgtgcataagacggtgtactcgaaaatatttgcaaaaatctcataagaattccaagcgcgagcacaattttcctaagaatttcaagcaatctagttcgcgcgtggtcctagctgccacatctagtcatatattgtactttgatttgatcaatgatggttcaaatgtttccttatggggcaacacttgggcagggggtttgaggccgaaggacttggcggcg

SEQ ID NO: 133737 - DNA, 518 bp, Zea Mays
tcttgactaggttgtgtgctgtgcttctcttgtcttgctatctagaaaatgttttagttgttcaaccctttttgccctcaaccagcaaaatatatgtagataaaatgttgtttgttccctcatgaaagaccccccaaacaaccttgagcttagcaagtgaaacctaaaaaaattatcatgtgcttgttttgatgtttctagcccttgtgtgttttacacttgaaatttacacctgcacagtttatagaaccccacaacttgaccgctagaccaacccaagtctccttgtgcacttgttacgtcaaaaaaaaaatttgttgtttggtgtctagttgcgcaaaccctatcaaggccatgtttctttccataaatccttgctcctaaaactttataacatttctattgatcatcctagccgatcctgtttgcctacctctcctttcgcatggatctggtgatctctttccttgtgaatcatgttgtggctttatcatccgaatccctggatcctttaatga

SEQ ID NO: 133738 - DNA, 356 bp, Zea Mays
cgggaagatacccctaatccaccacctgtaccaccaacactggcagagactatcgctgccttggttaatgcgactgccgataatacccgcttcctacgtgaaatggcaggtaaccaattccagcagcaaggcggaagagctcctccataaggaccgcgcgaaacctcatatctagacttctctgaaacacgtcccccactctttgttaaaactgaagatcctcttgaagttgatgagtggatcagggtaatggagcagaagtttggattaatccgctgcaccgaaacacagaagttgttgttcgccgcccaacaactaagaggtcctgccagtacctggtggggaaattttgtggc

SEQ ID NO: 133739 - DNA, 345 bp, Zea Mays
tacaagaacaactattggaggcaaagatacaccgagagatgggtggttctgggtgatgaacgcactaagttttttcatgctaccaccacaaatagatttcaacataatgtgatcagtaatttaacaaatgatgagggcattagcttgttcaggcatgatgaaaagttgcttgtctttggaagaccttcaaagaaaggataggcgtttctaacagtcctttcatgtgcttcaatctcgtagagccgattcagcctgtggaaggtcttcattcccttattatgcccttttccactgatgaaattgagaccattgtgcaaaacatgcccctgacaaggctcatggacc

SEQ ID NO: 133740 - DNA, 577 bp, Zea Mays
ctccggtgagcaggcatccctcctctccttccctctctcggtttgaaaggctctgtgacattcaagtcacccccccccttgtgcaaatcaaatttctgtgaaatccaatgaatccagttggtggaatgtgtccccttgtccccattatgtatccctgcaggtccttggctccttcgggagggtttttccaccccaaataagcttttcaccgaaaccctaaatccccgcacaccacgtgctcggtgaaatgcccaaaccagccaaacttgctccaattgaacccaaatttttcaggcaccttcacaacacttccagcaacatccttgccaaatttcacgccaatccgagatcccaggcttaaatttcaccaaaattcccgttttgagcgatcgtttccgagccgagtgccctaattcctttttcttcgcctaaattcaaaccaagcacacactccactcatattcagctttggcttcttggtgccctggtatcccactcacagtttgacgttgtggactttctgatttgtgagatcgaggacaccgttctggatgggattcgtgctcgtaggcagcta

SEQ ID NO: 133741 - DNA, 517 bp, Zea Mays
cgacgttcggagttcggtgccggtcggggagatcgcgagatcgtatcgaggctcgtcgtgatgtcttcggacggtgatggctgccagctccggcctgggtgctcgccgtcgacagcgcacaaccacgattccactgggcatcgcggccagcttcacctgagtgccaaacctcggtaagaaacatcccactgaactcgatttcgccctcgttactcgtagcacccaatcagactcgattttgtgcgccggttgcaattgctccggcctggtccgccgccgcgcagtgagctctgctcgccgccatgctccgccgttgggggattgaacgtgcgccgtccgattgcaatggatggcatggattaaggacatcgtacaccgtcggatcgtagtgaacgtctcaggattagaagccggataacctttcgccgtgttaaatccatgccgcagaaattagatcggacgatccatagggaatcaaactttattaaatctgtgacgagatcttggaatgaacggt

SEQ ID NO: 133742 - DNA, 450 bp, Zea Mays
ggagaagggagtgaaacccacctccctgcacctccagagctgccattagatttagcccaagttctggccaaccaaacccgactcattgaggtcctcaccagaagccttgaaaactagcgcccaaatggtggaaggcctcaggacaggatgggagattttctaaggctcaagcctcccacattcgccggatccagcaacccgctcgacgctgatgactggttgcgcacaataaaaaggaagttagaggccatcggatgccctgaaaaccaacgtgttcatcttgttgctcatcaactctccgggatggccctatcctggtgggatactttcagcgctgccgtcggagatgctacctaggcagaatttgaagccgccttccgagagcatcatgtgcccctagggatcgtccagctcaaggaagaagaatttcgggaattaacccgaggaggg

SEQ ID NO: 133743 - DNA, 386 bp, Zea Mays
ctcgatcgtcaccatccgtgtttattactagtaagtacataataatcgcgcttcttaaatgcccgcctgacaaagacaaatgactagcgagctgtgctgtgcggaacgaaactgcccagtagcttctcgtgacagaagaagtgagtggtgttggtcggactagagggcaatagaaacgtactgtacgttttggtgtgggttcgagcagtaggagcgacgctattgtcacgcccaggaaaaagcaggtggtggcgctcattcaccgttcagtattgaacgcccgcgggggcggggcatggaaagttgttgggtttgtcctctggttttgagagcgctagcgcactatgggctagctagttgaatggaacagttgtcgatgggtagga

SEQ ID NO: 133744 - DNA, 446 bp, Zea Mays
ggcgagcttcttcagtttcttgtcatagtccatcttcagggtgcggtaagcctcacgggtattggtttcctcgccttcagctattgcaaggctctcttgaagggacgccttttcccctgaaagttccctgaccttttgctccagactttccacccgggaggttaggtaggtgcagtggagggtgaggtcatcatattggttatcaagggtgtgaaggtatccagccatgtagacgatggtgggatcattctcaataggatctcctcctgacaggacctgaagtcttttcctccaggtgggggtattcttgttgctgggtggaaagtagcgaaggggggtttcaaagatcaccttgttgtagttctggcatagttgtcggagggctgatcgggcaacattctggcaagtatctggaaagcggtatccggtaaaagtgacttggaagg

SEQ ID NO: 133745 - DNA, 301 bp, Zea Mays
gaatgaagtgagctaccttggtaagacggtcaattataaccaagatagaatcgttccctttttgggtccggggcagtccgattatgaaatccatgtctatttcttcccacttccatttgggcactgggaggggttgcagtaggcctgcaggcttctgatgttctgccttagttcgttgacaagtatcacaccgggccacatattgagctatctcctttttcatccctctccaccagtatctggtcttgaggtctaggtacatcttggtagaccctgggtggatagaataggctgagttgtg

SEQ ID NO: 133746 - DNA, 522 bp, Zea Mays
ctccctcaaaaaattatccgtgcaaaaaccgactataggtgcaaccggaccgacataataaacgtgctagatcaagtgcacaagtcccccacgggcacggccggatcagcgaaggcacacagcctcatcatacaaattatagttacacacatacagcgagggcatcacaccttacattggttcaaccttcgggatgatacccatctccctgtagttaaacagcattatcctcagctcctcaccctcaaaaagacttcgcaactccccctcacctacactcgccccaaccggcgaggacaacaattcccacttgccagccctgtccgcacgaagatgaccaccctccgcctcactcactctacgcttcgccaccgcccttcgccgcctacgcccagcactcggactaggaagaacagcatccatcacacgcggagaagcctccgccgcagccacatccaatgccgcaaaataatctaaatcctcatccgaagactcttccatccacacaaccgaactcccaga

SEQ ID NO: 133747 - DNA, 296 bp, Zea Mays
ggatcactaaacttcgtggtccccatctctgtttcaacatgtagacgcatggcatactagacgacatcccaaatcatgttgtccatgccaacacactgtttttcagtgctgcatccgaatttacttgccaacgtgaaggcacatactaacaaccataaaaacgtatttgattcactcccttggggctagatagagttcggtggatacaacttttgcgtgcattacgtcattgcagaggccctttagaaggtcacaaaggtgcaataatagatgagacctgagcttttagccaaaca

SEQ ID NO: 133748 - DNA, 397 bp, Zea Mays
catcacagattcggcgggcagctggctgacttgtgccctgcgtccataaaaggggggagaagatccccgaccccgcacaacatccctcatctacaccattgagaacgttgtgccgtggagagaaagcagaagggtggagggagatctgccgccgccgcaggatcgatcacccactgctggtgacctccgtccgcgtcgactctccactgggtgtttggaccccgtgacttcatcgtcgggtgtgaagtgcatgcggggagttactgggcttgggaagccggccaagcatggggcaatttctcatcggagaaatcttccaccgccgaacattggggcaccgtggctaactcatctaccccccttatctaccggtaaggaatccaccgacgcattcacc

SEQ ID NO: 133749 - DNA, 698 bp, Zea Mays
aaacaggactgggccgattctggcccagacggcccaagcctcagagaaaacggaacgcgcccgcgcccgcgagggagattttgcgcagaggccctcggcgttttgactaaactagaacagggccgcttactgtttaagcaagtcactgacaaatcacagaaagaccctcgggtttctgtttcttcgcaggggaaggtccccgaccacggcagcgcacggagaggctccggcgagccactgtaccggccgattggggcagtgaccggcgctcccgagcggtggacaccaaatcggggcttgcccgagcatttcccctaactaaattgcacgaatggcgacctattacgctctgtccacgtgaaccgagaacattgcggatgggtgaaggtgttcccggtaatccatggtggcttggttcaatcaaaagggtcagagagcatgtggaaagcctagggatgttagaacaagcaatggtgcagcttgaactaacctgggttgagctggccgcggtgagcttgattcggcggtgcttcagaacagaattgggggaaactagaaattggagcgtgctggtggaggattgagggtggaagtggttgctacagcttcacaatttcatggcgtaactgtccccgcccttaatttataggcttccagggcggtggctctcaatttgaccgcgatgcggtggcggccgg

SEQ ID NO: 133750 - DNA, 273 bp, Zea Mays
cttcaaggcaaggcttagggtgtgttctgatgcaaaatgagaaagtcattgcttatgcatcacgcttactcaagccacatgagcagaattatcccacccatgatttggaattggcagccatagtacatgccctgaaaatatggaggcactaccgaattgggaacaaatgtcacatcttcaccgatcacaagagtctgaagtatatcttcactcagccaaatctcaacctccgtcagagaagatggctggaactgatcaaagactatgaccttg

SEQ ID NO: 133751 - DNA, 537 bp, Zea Mays
aagcaagctctcaagtggggcggattgtcacgaccctatcactggtgcataaatccagtaaaggcaacacaagaaggcaagaaggtttagaaaagtataaggaggatgagagtaatacaactttaatctgctataacttagttgtaatacctgattaatgggcaaacccacttaggccttgttcgcttagcatgttccctaccgggatcaaggccaaaaccacgtggatcgcctcccctggaaaacataccagcccacgagaaaatagatgttcggttaagccccgtgtgggccgcatcctggcctttcctcattgccccgtcctagggatcagacctggtctgtgtggcgtggaatcatacccgacctgtggagggcgacggagctagggcaatgcgcacgcgtgaagggtaagcaccggtggcgacggtggcggcgtcagtggcacaaacacgggattcctctccccatcatcgatctcctccagcagtcgccttctcaccggtaatcttcttgctccctgtctcaactagggca

SEQ ID NO: 133752 - DNA, 707 bp, Zea Mays
caggctgttggatgtctgaagttcagactagcaatgcaactacaagcactttgggcatgaattaatgcatgatcgagcaaggattgacctagggttgctataccaagattacagctggatcctagagctacaactttgccaaagaatgtctgctatgttactacataaaattgagagaaaatcgaccctaaactttgactgtcaggcgcactgaatagaatttctgatggtatagtgacaaaagatctgagatgtcgtgcatctcaccgccggtgactcgccgccttgattagcgccaagcttcatgattcgtgcgccgggacacatggataatcatggacagagaaagatctcaactcggggataagagagcaagctatctctggactgttcaccgtgacacttgccgcgtagtggacgacagtgtcctcgtcggagttcgccggtgactataaccgcgccacgtgcttagaagatgtaccacgtcgtcgtagctcgcggtaggtagacagttcatcgctggagtaagtacccccggggcgcgccacgattgttcgcaccaatgactcatccttcgtctcggccgccgatcttgctgcgccaaattggacaccaccgcttaacctctctataaattgaaggccgagtcagctgcgctatgttatcacgaagccgaagcacccgctcccaccctcaatcgatcacca

SEQ ID NO: 133753 - DNA, 285 bp, Zea Mays
gccctatgttcggccaatttcaccttcgccggtgctcggccgcggtggtccgccgtgctcgcgcggtggccgaccgatttagcccagtctagttcaccggagtaggtccttgtgtcgcccttgcctctgctgaagttagccaaggccttagcgcgccttaggacccctccccgtggccggaatggctcaccggagttactccggcccgcctgagaccttatcaccgccgttctcccctctctgcccgtggattcatggccccttccccgccattgagttcgtcgt

SEQ ID NO: 133754 - DNA, 550 bp, Zea Mays
cattgtagtatgccatttgcctccgcttcatgacctcaaaaaacgtggtggaatctgaggccctcgtgaatggactatatatcaccgttgagttgggcatcagacgtctgaatgtctagggcaactcccaactcgtcatcagacaagtaatgaaagattcgaagtgtcgtgaccccaagatggcggtgtattgtaaggaagtacgctgcctcgaggacaaatttgatgccttgaattaaaccatgttctcgatgggataacgaagcagtagacgctctggcaaaaatatagtctgggcgaggaaccatctcagcaggggtcttctctaacgacctcttcaagttgatcgtttgttatggtgaaacccagtgcgagaatggtcgaccctcatgcgcctgtccgccgacccaagaagtctcacagcctcccttagggtccaaccctcgactgtccgccgaaacctttgctgttataggaagcgagaccaccctgtcgagtctcaccgatgactgaaggtcactataccaagactattccatcgaaacagagg

SEQ ID NO: 133755 - DNA, 746 bp, Zea Mays
tcgccatcgttgactcagagggaggtaagagaagagaaaccgggctgagaacgccgcggcaacctctcaccgccactaccactcggggtcggtcaattgggttgggggagcatcgaccgatccctgggaaggttgggatagcgtcacggttgttgaagggtccgcggggtgccctgaattgctcaccagtgtgtgcagatcaccgccgaccgccgctcgccgtggccaggactgtttgtgttaccaacccccagtaagatatccatcccctgattcgcaatctgctctgctctgaattgcggctgccggtgcggtgtttcgtgcgagaatcgtgtgggggctggaccaattagcaatggcgtcgtctcgagggcgggcgcaccaccgtcttcgtcttgagggaggaagggatactgtggggcgttgaacgctcgggcaacggcttggattaccccagggcataccgcttcgttggattgatatgggccgtggatccctggatcaacgaataggatcagatcgcagtcttataaaatccagaccgttgatctgttggtgtgcggtactgatcgcgtgccgtttcattataacggtaattcaactgtgaccgttcagtttgatcgggcggccgaaatcatccagtaccccttcgaccgccactttgcaaataaacccttatgatctatacgaaataaccgcagtccacactgatggttagctaagtctgggggatacttatgcttttg

SEQ ID NO: 133756 - DNA, 405 bp, Zea Mays
ggtcggttcaggtgactgatgaagatgtgccatggtacaatgttctgggtggatcagaacgccagctaagctcgccgtcgttgatcgccgtcccgattcgtgcgcaagatcggatggataacactgggaaaagggtaactcgtacgtggcaccatctcctgagctcggtcggagttattcaccggcggccaccgtgactcagtgagctctcgccgcgctgtcgcacatgctttgattcgcctcactgtgcctcttccttacgtggttgtcatgcgttaatagcccacctcgtagccgtggatcgatcaccggaccgccgtgcctatatataggacagggagccacggcgaggtgctcgctgttcttcaagtaagcttgagtacaaccaggaattcgcactgccct

SEQ ID NO: 133757 - DNA, 678 bp, Zea Mays
gccgcctaaaatctttgcttttggtgcaggatcatttgatctatagcagggtggaaagggaaaggaaattggagctacgaccatatatgcttgccaccatgccaatggtagagttggtagacagtaggcttcatttggtacagaaactaatgtttagtttttcaatctaaggttcatatggccaggatggggaggagctgataaaccaaaggttcgtcaggttcatgaacactgcctccatcttcttcagattgcaagcaacaaactccacttgtgcttgtgcatgttccgactctgtttcagtgccgctccactttcccagtggactctttcaattcgtatctggtcgggtttgtttctgtgcacatcaagcaccccggaagtgatgttccctacattgattgcatcttgttctattgtaacagccggcctcctctacggctccgcctccacctctgaattgttgcgcttcttccatcagtgctcgcgagaaaagggtaagttatgagtgcggcggttgtggactccagtcgatctagaagatgttttgcagcggtaccaagtagggtagaagatgttttgcagcagtaccaagtagggatgaatctggatgtttattcggatattaaattttcggttttctttcttcgattacgaatatatctcgaatattaaatt

SEQ ID NO: 133758 - DNA, 317 bp, Zea Mays
ctcggtcattatttctaaaacaccgacgtggcccactatcactcggctatcacttctaaaagcgccgacatcgtcgatgatcactcggctgttattcctaaagcgacaacgtgactccaaaggactcgactgctaccactaaagtgctgacatcgcgaaggaggtggtctgaagcgcgactcgacgattctaagtcgctactcaagcattacattcagaaacaacatctgcagtaagcattaatacgatcgacgattgacaggaaggcaaaatggtgcacacagaattgggcgaaatcattcttcattataaaaggg

SEQ ID NO: 133759 - DNA, 358 bp, Zea Mays
ggctcatcggggggattgcttctcgtcggcgttagcgccgccgcggagcacatgtgccgtcgtgtctaggtattagataagggagacgagagagggttcgtagatccacatccgaacgacatggattagatcatgaataacagtttgatcagggttggctgtgtccgttggattggctgtgggtggttaagattagaccgtgatcttttaaaatccgaaccatcgaattgaaatctagcgatcagaatcgcatatctgttcagggctacgaccgatctaatcggggcacgagggtagggatccaacggccagggttcacgtataccccttcaccgcgatagacttactaaagagacct

SEQ ID NO: 133760 - DNA, 277 bp, Zea Mays
atgcgcacgacgcgctcatatgcgtatgacgtgaccacacctgacgaccactacttgcatgtaggcaacgtacgcggcaagcctgcagaccggctccaaccagcgactgcttcacgatccgcagcttcagcatgcatggctaactatctgctcacgccacacgcaagcctcggccagtcacagcacgcttgcatgcacacatgctaactaactcacacacaacgtgcacgcacacgaccagccacacgcgcatacatgtgctgggtttatttctaac

SEQ ID NO: 133761 - DNA, 350 bp, Zea Mays
cttggatgctctgtgctatactgaactccttgtgaactttgaggacatttgtctttaaaattccacccaaagcttagcaaatcctaggtggcatgtctactttaaagttatggcatcaaatcttacttgcgtcattgcatgcatatagaagttaatcgatcgcttctttcaatataagaccttaaaggacctagtgtgctcatgtatgtccactttactgaagtgtgtccaggctggtttcttaggtggagaagagtggcataacccaaaatttggcggcctctgcagtatgattttgcttgcctatgtgctgcttgttatgagagctcagcacatgatgctgtggtttc

SEQ ID NO: 133762 - DNA, 657 bp, Zea Mays
aattagtccaaaaatcaagggtctctttttttcattagtgagtgattaggagagcatgggtatatatatgtatagtcattttattatagaagatgggtaggttagggtaagaatagccaggggtaagaaagtttatggtgagaaagaactccttgttgggtggtaatgcctctgaaggttgagtttgtcttggtctcattgattcgaagttagtgtatatcatcggagttggggaatatggttaagacatatatggatgagatagactacatgaggtagatcaaggtcttgtttgatgttaggtggggattgtcaaattatgcaattcatcatgactctactggttgagttagatttcatgcatgtggctgagttggtttaaggcactagtttagttttaagtgcatgaggggtatggccttatcttttgaaccatcattaagtaacttactctagattagatcataatagattagatagaatctatattaggttggatatgactagattagactagttaagatttaattaatttgcattggatcatggttgttaaactagggtggataagtatgcttcttaggataagatggatccataaagataagatagaatctttcgagatcagttagatctatgacataaaatcctttcaag

SEQ ID NO: 133763 - DNA, 639 bp, Zea Mays
gtggaagcctagaaaatagatgccggaataactcatatcaaggagcgtatggcaatggatcctactacgtgtttccaccttgataacaaaggtattctttggtttaagaattggctagtagtcccaaatgtctcgacattgaggcaacagatacttgatgaatctcatacctcctggtattccattcatcctgggagtaacaagatgtatcgagacttgaaatcgtgattctggtggaccaagatgaaaattgagattgctcgttacgttgctagatgtgatgtttgccaatgggttaaggctgtacatttaaagtctgatggacccttgcaatcgttgcctatctcagatgggaaatgggaggatattggtatggattttattataggtttacccaaaacatccaagggttatgactctatttgggtgattatggtccgttttactaaagtcgcacactttttgccggtaaagactttgtattcaatgaagacttatgccgaactatacattgctcggattatgagtctgcatggtgtgcctaagaccatagtgtctgatcgagggcctcaattcgtttttagattttgggaagacttccacaaatatcttgatactaagctaattcatagttcaacc

SEQ ID NO: 133764 - DNA, 537 bp, Zea Mays
aaggtggtctaggtattttagacaccaatttcatgaatgaatgtttattggcaaaatggatctggaaaattgttcaaggttcagagcatatgtggtataagctcgttaaagctgaatacatgcctaaggataatttttttctatccaaaattagaggggtctctcaattttgacaaggtttgcataagattaaacatcttttcaaatggggagcggtgaatatggttaagagcgagaaaggaactttattttggaaggatacttggtgcggaggggttccactagaagtgaagtatgccaggttctttgacatttgtagggacaaggatggtcgggtgtcggattgtcatgtggatggagactggtatgtggagttttgaagacctttttcggacacagagttcgttgagtgggaagagttgtataacgagctgaaggagcactctctttctcgcgagagggatatgataaattggagtttaaataaatccaatgtttctcttctagatcgctttacagttttatgaaagatggggg

SEQ ID NO: 133765 - DNA, 345 bp, Zea Mays
atccaccgttggatcgtggtgaacggcagggattagcttgtcataggtgtccagccgaagtcgatcagaaccgttgatcgaaaagcacgtgatcgaggttagctccgggcactttaaatctggtccgttgattgcttgttgggcggtcacaattaaatcagaagcgcgtccctcgtctgtgtaatcaaagccggtgattgggtgatggacggtcaaaactgggtctcggttatttaaaacactaggcgacggatctcgatccgatggctacctttgaataccgattcgcattaagggcaattctaacctggtcgtgggatctgatctggacgaccagaatcatcc

SEQ ID NO: 133766 - DNA, 692 bp, Zea Mays
cgaggatatactcctgtacagaaaagaagagattcccgctgcccctgcggcctactactgtactctacgaggaggggaggtgcaccatccagcagcggagcctaccttcgtgagttcgtgtgtgccctgagtactcttgtcgcctgctgctgcagagggtgattccgattcggcgtcctgctgcctgtgcaagtccacctcctctccgttgcgtttcgaaccggaccgggcatcgaaacggctgcatctggattgtcatttccttaccacacagcagctgtggctccgccggacagagacggggaacaaacaaccggcaaggtggtgcgtgcctaccacgctcgctcgtgacgcgacgatcccacggccaccacctcacgcccaaagccgcggcggcgcctttctctttctcccctccgatccgtgctccgcatgtcaacgcgacgcgaacaaaaaggactccctccatccaccaccggcaccgctgctctgcctgccacacaacgaaggttcgtcgctcccgctcgtataaagccagcgcccctcgcaaagtcgcaccactaagaccaactccagcaacactccgtatcccactccgcatccgcattttgcacggtctgaggcactattgcgcgctccagcaggctccgcatccctctccgcaaaatggacgccgtgtccctgcgctcccc

SEQ ID NO: 133767 - DNA, 307 bp, Zea Mays
gagctgggatctcatgacattgaatttcgacctcgcactgccattaaaactcaagcactggttgacttcgtatcagagtggaccgaacaacaagtaccggataacccggaaacagcagaagtatggcaaatatatttcgatggctcgttaaagctgcagggagcaggcgcagggatcctctttactgcacctggaggcgaacacctcagatgtgcccttcagttgttatttccagcctctaacaatgcagctgaatacgaagctctgattcatggactgaacattgctatatcgctgggcatcaaga

SEQ ID NO: 133768 - DNA, 277 bp, Zea Mays
tcggagtagtttcctctccaccaaaacgaaccagctccttttttgcttcgctaaagtagcccaggttcaccatttttggaaggtcagcttcagagatggtggactttccaaagtccaaatgactaggtttagttggtaccccgcagctgaactcatcctcagaaccaacttcttcaacattagcttgtgttgcttcgacagcaggtgtgtcctctgctgtagctagcccggagcgcctcatcgcttcagaaatcggaacagtttcagcagcttcggc

SEQ ID NO: 133769 - DNA, 681 bp, Zea Mays
aaacaacttatgctgatacaaatgatacttcttcatatgattaccctcgtttgtccgattggtatgatttaggtgaaattgaaatctttgaagacattgagaggagagaaatggaggaggcaagttttacccccttttttgggaagacctctctaatcttgtccaatgatattttctttttctaaattggcaaactaaatcaaatatgctgttttgcaatgtagattgatgaaagggtggaaagacctttgttatcatgggatgaagtgtacaaaaacgctcgtaaatcagaaaggctaaagtcagaaggaaatgaacgtgacgaaggtgaactagaaaggactgggcaacctgtgtgtatatatgagatctatagtggagagggggcatggccatttttacaccatggatctttgtatcgtggtgttacacttgtaagtctcggcaagtttatttcactgcatgtcttatccagaagctcatatcatttcccacttttcacgagatgctcgataatattatgtcatttagttttcatcatctctaccacttaatatttgagatatttatactatgtactggggaagcatcggcctagttcagtctgtatgcattattgaacatacactggtgtcctctacttaaatatatttcatcaagtcgccatcaccatgattcagc

SEQ ID NO: 133770 - DNA, 659 bp, Zea Mays
ggcagcgattgcttgtgcaattatattccacttcattcctaattaacaatttgggtcttatgattgacgactttgactttatcaccataaataaacctgacacacgaattatatctggattctggaacaggttcaataagagagcatcatagtgttgcataaataagtgtgcttatgattcatatttgctcattgcaaattggagttatttgtgttgtttctttgtatactcaacaaagagatgttaaccacttgtgtttatctcattgccacactcagttatgtcacgtaacttcattttcatgttttattttgttccagcaatgtagtttatctttgttttaatagctctttctttgtaaaacaacattttgttgtggttattatgcggataagagaacctaaaactacaacactgatgtttgtgtgacataagagaacctaaaacacattgatgacgtttggggccaagaactatagtggggtggttgatgtacttggagaatgagaagttgaagaatggacttaagttatttcaacgacttcattacctggcgcgcacacgagtattgtataatgcactatccttctatggaataaatgtgttttatttaagatgttttaatattcgctacaatattgtttattttttataaatg

SEQ ID NO: 133771 - DNA, 534 bp, Zea Mays
ggcgggcagtgagaaaggggaggagtcaccggagttatctatcgtggcatttaccggggcactgtcataggcgatggataggctacctatggtggtctactgcgacatggtaacacaactaattacggggcgcacgagcggcaagcggccaactccggcgaggatcattttggtctgtcgtagggcaagtgggtacagcggccagcacacgaccttatccgcggtaagatcttttcactgtcggtcctaatccgcaccccagagagcacgaatcgcaacaccggcgcgaatccgggcgcggaggtcaccgacggcgaggtgtggtgcatctgctgatctttttaagtattgtaccattgaaacctttcttcaaagcgcccgacagagcgaattagagggcttagttcttcaatttttatgtgacaacataaccagccctctgtagcaaagttgttaatctataatccagctacaattcgactataggaaccttgatcatttacttactcgatcaagcttgaatcgactccaaag

SEQ ID NO: 133772 - DNA, 350 bp, Zea Mays
atgctggtgacacatacaaatatctagaaacaagttagatgcaaacaaattaataactttataagcataggtccagtggaaatttagtgaatattatagggcatttgaaaagaaataaaggaacaaatgtgaaagaaagggactctgaggcacagaaaaaatgaattaagaatgaattcgctagcacattaattgttcatggaaaaggttataacagtagtccatgaactaaaatcataatgacactgtgaacactcagggatgagaaaaatgtcgtccacatagtaaattaagtgagaacaaataaatcatgcaagtaacaggttaacagttaataatactgatacccg

SEQ ID NO: 133773 - DNA, 408 bp, Zea Mays
aagagaaagaaggtatgagacggaagaggggcgattttaaagggcaggtatgagacaaacatcaatgtaggatatagaggtgtcaagggtgcatatgataataattaaaagcataacaaaggatatagttaaggcaacactcgtgaaacgacaaagtggagaaaacaatcaagggtaagataggtaaggttccaacataagagttgaagtaaagattcattaccgagtggagttacaaggagacaacgagatcaccaaggatatgcaaagtagaatgaccgctcatggatcattaagaaacaagggtggtcaagggcatgttaactgaaatgtctcaaacagatattgggatataaaggtaagcatatataaaaataagagtatgcaagattccaatggtacgagcat

SEQ ID NO: 133774 - DNA, 382 bp, Zea Mays
gtgacgaagacgaagaagaggtggcgtgcggaagccgaagggtgtagaggggtccggtgctgtcacatatgaggagggggcgccgagttgctgagtccttcacagtaagaccagaagagtcaaactcgacagaacaagaattatcaacggtaaaacgacgaatagaaagaagattgtggaccaaagaaggagcgacaagaacatcgggaatgcgaaaagagccgggagggccggcggcacccacagatgtgacaggaagacacgagccatttgccaccatgatggacgaagggagagaggaaggagggcgaacagaggtgagtataccagggtcgggagtggtgtggtaggtagcaccggtgtccgtgatccactcgggacc

SEQ ID NO: 133775 - DNA, 432 bp, Zea Mays
cttgagctttcttgaagggtccaatcatatccagtccccagcatgcgaacggccaggttacaggtatggtttgtagttgctgcgctggtagatgctgctgttttgacaagtactggcaggcttcgcacctctggactaactcggctgcatcaccctttgctgttggccaatagaaacccgacctgaagaccttcccaaccagggtcctagatgttgtgtgtatcccgcattgcccagcatggacctcatccagaagttgtttcctagtagtcgagagaatgcatttcatgaggactcctgatgtgccccttctgtatagcgtttccccaatgagagtataatgagctaactgcctcgcaatgcgttcggctgcatttttgtcatctggttcctcctcattctttatgtacctgatgatcggctccctccagt

SEQ ID NO: 133776 - DNA, 443 bp, Zea Mays
aaaacatccttgattaaccctgcaatcacacactctgacttctctaggctttggaaggttctgcggttccgctctttccaaatctcccaccagaaaaggatgatcaaaccatcaaactctctccttgagcatttatcgactttggctctgcacttgttccaccaagtgtatattgacgaagattgtgccatccctggcagcaatgcgaggtcaagcgaatgagaaagccgcgcccacaccgccctagtgaagatacagttttggaaaaagtgggttatagcttctggttcttgtttgcaaagtctgcagatcggatcattactccaacctcttttctggagattttcagctgttaagatcttattatgcagcagagtccacgcgaagaaatgacattttggctccacttttgccttccaaattggtaatagattgcacttggc

SEQ ID NO: 133777 - DNA, 399 bp, Zea Mays
ggccaggggaatgctgctttcaactgttgatatacagtgtgttgtctttgcagcggaaattaaatgtttttggtgagagtagtagtatagaggagtgagaaggggatgggagggtacacgccacacaaatagacacacgcatgtggcggatatgaagggggagacaacgggaatctagcttgagctgtgaatgatggaagggatcggtggcggtcaattttggtttaaccctttcttcttgtatcaatcctcctttgcttcttcttctagctagacacgtacggctttaagggtctgcttagtttagctgtagattttgtgaaaatttaattttagctataagaaagttgttgtaagctgataattgtgaaaaaaaactaaaatttgtttgattgaaac

SEQ ID NO: 133778 - DNA, 451 bp, Zea Mays
tctccgcatcctaacaatccggctcctgttacgctttatcgggtacaacagagaggaacgcactggtgccgcgtccccacccgcagccacggaggatcaccaggacccacatgcaagagatgacgtcaaagtgaagcatccatgcggcatgcccaggaacgacgctagttgttgagagaataccggagagcgtttgttgcgatctgttgtggtccgtaggacggagggaaggagatgacttccacatcctggccccacgcaccagctgttctaaatcggaagtggatgcaagatgggtgaggggatgaccactgggtcccgccagcaagtgagccgagtacgtagaaaatggcagggaaatacgagtgactccaggctgatggaaataataaaacaaaaaaatcaaaggggtggcatcggtggagtgtggtgtggggctgcatgaaggaaa

SEQ ID NO: 133779 - DNA, 486 bp, Zea Mays
tttatgagagcatataaagaaaaggataagagtctagcaagaatgataagggaccgtgatgactatgaggaaatgactcctcatcaactatttgcaaaaattcaacaacatgagtccgaagaagctccaatcaagacaagagacactcatgcctagatttcaaatgaacaagattcctctaagaagaacaaagatcacaagtcaaagaaagtggtcgaaacatcaagtgatgaagatagttcaagtgatgaagacacaactatgttcatcaaaaccttcaagaagtttgtaagtaaaaatgataagtatcaaagaaaaggaaagaagagggcatgttatgaatgtggccaaaccggtcatttcatagcggattgtccaaacaaaaaggaacaagaagcaaagaaggactacaaaaatgataagttcaaaaagggaggcaagaacaagggatacttcaagaagaagaaatatggccaagcccatatt

SEQ ID NO: 133780 - DNA, 882 bp, Zea Mays
acacatattaacacatattaaattcatattaacaaataccctaacccttaaccactaacactaaccctaagccctaaccctagcccctaatattgtgatacggatattatcgagttacgtatagagagggagagtcgtataggacgtagagagagagatggagagtcgtatagaacgtatagagagggagagagggagagtcgtatagaacgtagagagagatggagagtcgtatagaacgtatagagatggagagagggagagtcgtatagaacgtagggagagagggagagtcgtatagaacgtatagagagggagagaggaggagtcgtataggacgtagagagggagagatggagagtcgtatagaatgtataggaggaatcgtataggacgtagagagagagagatggagagtcgtaggcagccgcttgatgtgcggcccacatgctgtgtgaagggaaggggtgccaactaggctcgcccgctactctccatgtgtcctccttctcacccgtccgcatctctttacttagtcttttttccgcgtctcactaaaaaaccatatcagagatcatgtgctaattctaatcacaattgtcattcatgtctctcttgcgattatgaccacagtaacacggtaactatggcagaggaaatggcgttgtatgcatgcttctcatttgtgcgagtggcaactaagtaaacaaattgaggaaatgtcgttcggtgtaaagtaatactttccctctctccctcttctctcttctctctctccctccctccactctctttcctctctcttccctttccctctctcctctcctctctcttccctctccctcctctctcttccctctccctctctcttccctctccctc

SEQ ID NO: 133781 - DNA, 756 bp, Zea Mays
gagtcctatcctgggatgttttcctcaggcagtttgagaggaggttctacccggtcaccttcctagagaaaatgaagatttgatttgcagtcctacaagcaagagaagaagtttgccacagagtatgaagtgggctttaacaagatggtcttctttgttcctcatgtggcttacaatgagatggagaaggcgagccagttccatcagggcctgaaaccttatatgaggcatgccctgggagcctttccgttggtggatttatgtactacagtggagcaggcattggttgtagagatgcaacacaagtacaccatggagtcgtagaagtcttcgggtgttgatcagccccgtggccaggacgcgaggaggggcaacactgggggtccagcccacaagaggggcaagtctcagaaccagcgccaccacccctaccgtggaaaatcctctgaattgggtactttaggaggaagtactcagaggtatcaggctgttcctaagcccgggctggggctggtgtgtttccattgtggtgatgcgcatctccgtgctgagtgtcagtggagtggcaggtgctctatctgcagtcaggaacacaaggatgtggtgtgtaggaggaaacccaatgggaagctcagatgggaacgagcgacttcctcctcttcttagggcactgtcaacatgatgtcaagcgttgagcagcaaatttcagttccactccctccgcagcagttctatgtgcctgggacttctcagtcc

SEQ ID NO: 133782 - DNA, 390 bp, Zea Mays
cgagattgtcgtggaaatgacaaccacaagcggcgtcatgagtgatgggttgggcgatccatcccttcgactcctactccttcaaaagccccgtgttatggctcaaactgtcaccgtcgtcgtcgtctctgtcagggtctcttctagcagccagggtggcctatggtggtgtagggggcacctctagctgaggcacaggggagggctgcctcccagactccacctcctattgtggcgagggggaagagtcctgctgctccagctcctagcatcggtgttcctgctcctcgtgcaagtggcactgtagcctctccaggtggctcaactgttctgtcatcgtgcggtgcagtggacgctgtgcaagacgagagggcaagaaagggatcaccg

SEQ ID NO: 133783 - DNA, 481 bp, Zea Mays
ttggttggatagcatatgatatgccaatctaaatatatattgaatcatcaatcatggccatcatacccagattcacattctctcacacatccttttcctatactagaacacatatccaccaccctcacccttatttcagacaggaaggaagataaatgagggacgttagatatgaaatagacgatcatgattcaatgtatatataccaaataaaggataatgtacacatgatatgcatgttttcttgttatatatatgcatacatgcaatgccccccatctgtctctcgcagctaaattttgtcatcatgcagatggatccagcgttcgagtgcgtgtacatgcatggtgctggtgcacctctccgcccccctaataacgaggattgcatttattcaaactccacctcctgtttggttcaatgatgccattacagctacatcattgctgaaagcagctacatatataaaccataattcaat

SEQ ID NO: 133784 - DNA, 407 bp, Zea Mays
tacggtccacctcgcgtccatccgtacccaccccgctgcgtgatgtcgtgttcctagggttcatcctcgatcccgcgacacccctccccctcatgtccagtaggtccactgtcatcaaccacgaactaacagaacatttttcttcattgccgcctacagattgtcctatcacttcgagttgaaggtgttcggttccaagatcatctgggattcgaggacttcggttgcaacctccagtcaagcaaaggtaccgtgcaaatcaatttgtggttgacttatttgtcaccatacatgatgtgtatgtgttccaataacgtggatccttggcttgtttaagttcattctttttcagtacacctgaactatgagtccacggttaggataagagaactataacattgtttgtg

SEQ ID NO: 133785 - DNA, 543 bp, Zea Mays
gagatttctcttctcaagacggccagcagtccagcatctgtcatgagctgccaaccaaagaaaaaatgcacactttggtggtgaccatgttttccaaatgcgctcccaagcaccaaagtggatagcccccctgaacagagcttcattggctaactttgtggagtactgtccagtgttggataacctccaaatgtgtcgatctgcagtccatggttgaaggttgaatactgccaacacatcccacagctgaaggaattcatgaataacttgtcatgtcaccattccacgcatatcattgatccagcttgaatttgttagggcctcccttactgtcctcttgttcttaatcctcgctggaaccctaccaaaaaggctagttgcaagttgctccaagtttcggtcttgcagccaactctctctccagaataatgttgagactccatcgcctaccactgaagccactgtaatggagaaaaggttatcaatgaccttgctgacctgcaaggggaaagcagcccatggcttatccggatcaacctttct

SEQ ID NO: 133786 - DNA, 348 bp, Zea Mays
gtctttttgtaaagttcctttactgccttttgtaaacattttggtactcttaaactttggttaaggtttaaattatgaaatgtgcatttgtctagtctttctctcaactaaaggcttcaagagagggggcccaaggttcaatccttccttgcccaaggtgattattgcctaaaagcttgggtaatgctttagtccttggcatttcttaactcactcatgcttccaaggtcttaagtgctccctctcctccaagttttaaccacatgtgataataggtatatgtgccatgagggatccagcaccttggtaacacctggggtgttacatccccagcacttcgtggtaagt

SEQ ID NO: 133787 - DNA, 552 bp, Zea Mays
gttataatcacaaaaatcaacttgtgagttaaagaaagcctacataactataacatcaacacaatgctagggtttggtctatggactgtgtcccggtgataagagagagactaggatgaaaatgaaccatagaagcattcaaaagaatggaaccagaaaaattgaagcaaggtcttccattcttgctcttcgttcgcaaaagcaaatcttctcacatcttattgatcatcaacaacaaccatgggaacctactggtgagagcatcctcgccttctcatgcttggtcactaaggggaatggggtgtgatagttggtattcatcggcattgatctaggtatatttgcttgtgttcagttcatcgcttttgatcctaacccttccctcgatatcgagtttgttcagttggttgtgtttttgttatatcaaagaacttgatttgataaaaaaattaccatgacgtaaaacaccccaaggaattcaaggatgggcacagtttccatggatttttgcaccatgtacctcgagatagcaaagaggtgggttcaaggcag

SEQ ID NO: 133788 - DNA, 362 bp, Zea Mays
catgtatcttaattccagttgggatgcaagtgacccaactatgctatgggaagatgcaaaagttcaggtgattatatttctgacacgtaagtgctcgaggatagtacaaccagagccagcgagtaactactgcggtgctgcctatctatatgcatgtcatgagtattactgaactgtggaagtcactttgttttctctatttatgttttgccttgtgtaatcagatgatgattgagaaaggaaactggtcatactgttttgcactttcagaggattttcagaagacagagcaaaggggttgtgtctctggtagattaatttgttggtcaaacacgaatttggacagtcaaaacatgccctgc

SEQ ID NO: 133789 - DNA, 486 bp, Zea Mays
cccgccggagcgctcttcgcggccagggagttgttgtgccacccaccgagttccacagcctcgccgagggctgtgagacaatggcgcgacgacgtggatcgcctccttggcatagcacacattggctcgattaggcccaggcctcaatcgtctcgacgccattacgaggcgttggcctcggtgcacccgccctcggggagggccgtgccgaccaaagatctacgagcagagctcaatcatagacgtgcggcagaagatacgcaaatcatcccagagagaccagaagacctacgggacaaactcaaccgtaggcgtgcgagcaagaatgcccgtctctccttagggaaggcacgtgaatgctgccggaacctcgagagtcataacctcgagcaaggtcccgcagccgtcgtgccacagggcctgagagatacccgattccagacgggcatcccattggctggagtaggctgcgccgccctagcggac

SEQ ID NO: 133790 - DNA, 326 bp, Zea Mays
tgaaaaggttgaagagccaaagattgacgagataacaaaaacaccaaagattctgagccttccgttagaggcagatctgccaaagatacaaaagacttctgctgccactcctaagagaaggatggcaaacgtgccggatgttgtgttggaaacgacgaaagtcttgagtcctgctctcgtaaagaaagtcgttccaaccgaaatgaaatcgcaggccgaaaccaaaactaggcaagccgaagctgcacaagttcaagctgaaaccgaagctatgcaaattcaagctgaaaccggagctaggccttcagtgcctatcgcaacaatgc

SEQ ID NO: 133791 - DNA, 658 bp, Zea Mays
tagtccagtgcaagtatacatagcaatatagattttgacaataaatggttcaacgatgagccacccattctctaacgagggatttttttcatgagttatgacgttagtcgcgcttgcagtgtagttgtgtacggagtatgagataatagaacttatggtaactccccacataatagagttaggcctcctttggattgaaatttcccgtttcctatgtttttttgtgaaaatgaactgatttctgcgaaattcatatatgattcctgtgaaattcctgcattctaaagtagatcttagattcttgtatgagttgattgtattgtatatgatataggaaacaaattgtagaatactgtaataaataaatcgtacaatatcatgtgccatgtaataaaccatttttttgttttttcaattcataaatatagatgtgcctggaccaacgatttcaagtcgtccgattaaccagtctagtcagtcaggaagccatgattaggcttaacgactcaattaggtctcctgatcgtcggatcgtctgactaatcgttacctagacgtgattaatcacctgacttggaagacccagtgaccagatgatgtttattactaaatggatctgcggactgccgactttggggtgttgtggatgaagccttgg

SEQ ID NO: 133792 - DNA, 413 bp, Zea Mays
ctataatcacattatttagttaattatccgcttcaccgcagcaatgtcatcgtcgctctgtcatcgtccatgttcgccagagacaatctttcacatgatctcgttgtcctgctgatggagtagtaggccttcacgtgatcacgttgtccggtagatagggtagcgggccagcagttgttggttactctccaccaacaagagagataggaatctattagaagccagagctccagcttgctagttcgatttgatggcagcaactaacacgacaatgacgctcagcatgatatgaagattgccatcgataggaaggctcatcacctgctgttcgcggaggcgagaaagaatgtggtcgacttcttctccctactcatcctgctcgtcggcgcgaccgtcaaactgcaggggaataa

SEQ ID NO: 133793 - DNA, 551 bp, Zea Mays
gtcatgtgtacacgttgcgcaaccatattgaggtagttgaggatctcactttcattcgtggtaggggcagcagggggggtcctcccaaccgtttgcctcggcgtgagtttgtatggagttatggtgccctagattctgttggcgagaaaaaggagtatcaaattaatcatcgtggcagggattctgtccgtcgtgaccgggagcatgaagatgacgacgaccctcagaatggtcgtcaccagggcacccgtcgccggcgcagtctgtccggctgggcacgggtgtctcgctgccgtggaggccttgctgactgctacagttctaatggaaggcacagatcatccacccccttccgtcgtcatgggcaggagttgtcagtctccaaatcttgggtccctgtggtgaaagctaagaaggtttcctttgctaaccccctgatctcggccatgtggtcgtcgggtgtgggtgaagggtcgacagttgctgattgttctaggctgaccaatgttcacctccctggcatcaagattcctgtggttgctgaggggaat

SEQ ID NO: 133794 - DNA, 527 bp, Zea Mays
caataggcctgcaggtttttggtgctcggccttcgttcgttggcaggtgtcacaccgggccacatactgtgctatctctttcttcatccctctccaccagtatctggttttgaggtctaggtacatcttggtagttcctgggtggatggagtaggctgagttgtgagcttcctcgagcaagacttctcgtgcctccccttttggtacacacagttgatttttgaaccaaagggctccttgttcatctgtcctgaggtccgggagttgttccttgcgggctttctccacaagtcttgctgtctctgagtctaggcgttgagctttgcatatgaggtcttctagcattggtttgacattgagactgccattgtttcccaaacatgtattcagttgagccgattctttcttccaatcttctaaaaagttggttccctttattccgaatggttttcgactgagggcgtctgctaccacgttggcctttccggggtgataatgaatctcaaggtcataatccttgatcagct

SEQ ID NO: 133795 - DNA, 492 bp, Zea Mays
ccccgaatgctggaggaagaagcaggaaggagcgtcgcctccacagacatcctgcggaggcaggcgatgatggccgcctgaaggatgaagcagggcgtaatgtgttgagattggaggccaagcctctccagcaacaacacaaagaaagacggattcggcagcgccagaccgctagggaggttggagacaaatagcatgaactccccggcggtgaggtcgccgcgggcagaggtgccgacatagatctttccggcgaacgccgacacaccccatccgagcaggttgcgcaccaagttgagtgccacctcgggctggaggcgcttgggaggatctagcaaagccatggtggctacgacagcataagagagcggagaactcgaaggcgaaagggtgctgcgagcgatgagaatggctaccacgcttaggggagtccctttttaaagagagattccccaactgacgccccgaagcgccgcagaagacctcgcccga

SEQ ID NO: 133796 - DNA, 417 bp, Zea Mays
caggtccatgaccacgcccgctgccgagatcacgtggccaaggtaggcgacggacggggcgacgaacgcacactttgtgcgcttgatgaagaggtggtggcgacgtagctcatcgagcacggcgcggaggtgacgaaggtgatccgcccatgtcttgcaggaactcgtacagcccgtcatgagtatggaatgtcgtcttgtggacgtcttccggccacatgagcacttggtggtactcggagcgcaggtctagcttagagaagtaccgcgcaccatggagctcgtctagcaactcatcacccacaggaatggggaaggcatccttcaccgtgagcgcgttgagggcgcgatagtcgacgcagaaacgccaggacccgtcggccttcttgacgaggaggaccggcgacgagaacggcg

SEQ ID NO: 133797 - DNA, 821 bp, Zea Mays
cacacacacgcacagcacattctgccggtaaaaacaacatggatgtgggcccttccttagatttctgctgctgactttcgttgaactaggtgtgctcatctgtttccagcttaggaattttccgtgaactggtgtgctcatctgcttccagcgtaggaaatttccgtactggaacatcgtaggaattttccgtcttgtagtctgtagggtcagcaatgggcgctgaaagtcaagggtgctgagcttgtgccagatctaatattgccgttgccgatggggaatggatggactaccctctacccatgcccaccccacttgaacccagtgattaatcagaagacatctctcaaactatccccaaactccaggaaaaagtttatttttagcccttaagttgtctgattaaaggagaacatatcagttacaaccaggcacattagtgtaaccgtgcaaccagacacattgagaacatttgtaaagttgtctgattttattattgtaaggagcgtgaggcctaaaagtccagacttcgtcaaaactttggtagctaaaagtagacttcttcatatgcctaaatggacatagattatccaatgggcaattagaaaatgatgtaaagaagagtagcctttcgcgttagtctccatccccatgtcatgcctccatggtttcgttaagtcgccgcttatcgaccaggttgggatagttgcctgctctagtccgggatgtggtcgtctaggcggcgcgcggactcggacgatgactcccaaacagaaatcactgcctccgatccatcacttgttcctgtttcttccgcatgc

SEQ ID NO: 133798 - DNA, 1983 bp, Zea Mays
tgcgcagtaatttttgtacactaaaccaacactactacaagtctacaaaatgccctatccatgccagtttgtaacccacaacagtaaaaaatgtcaaccaacaggtaccttttggccccaaaaacaattgtaaagaaaaaagtcactccaacaacccccatcccaggtcacctttttgcagcagggttacacattttctcacacttggtgttcgtgggagtcaaacccacgatgggtaacctccttgccattcaactaacattgatcatccatagcaatagaatcttttccccttcgacctagttctttaaatctttaataaattatttggccatctaaatggctagaaattaatatatattgtcagaacctaaaaaatcatataaagcttgcctccatcagagtctataaagaagttatgaatttctgaaacaggaaactatcggtgtgggattgtaatatcaaccaacagggacgctaaggttccatggcgattcataatacgaaaggcacagatagttatgaaggtatccatgccccttggtaacatgaactggcacgtatagtcatcaagccatccatgtccattgataacatttcaggtgtttctctagcttatgttatgatccagcaatggtgcactatctgtgacacttccatttttcctgcagggatgtcttttcatagtagtgtgatatgttcgactactcttgattcgttactgatcttgaaatagtagtaaaaagccccccccccccaaaaaaaatagagtgaaaaatatttaagcagcaggtcaacttgagctactggtcacataattagtgtttattgagaaaaaagtgcattactgataaggataaaaccagatctaaaccaagactacaactttatctacagcagactcattgagaaaataaaagacgttatcacaagtaagcagctattttacaaaaaaaaacacacacacacacactcctacagacgttaatatgttgtgttgttcactctagttatttaaaaaaactctacctgcgaggagagaaaccaccccacagcattgcattaagaagaaacttaggccgagaaacaccccaaaggcgaacgcccaagacacatgcatgtggccatgggcatctcgctgcaggtggttcacatgcatagctcagggacagagccgacgagggttgtttttgctcccacaaggagtcaaatctaggacctgaggtgctaccaaggcacatgtaaccactaggctacagacccgttcgccagttaaagttcaatgaagctatgagataacccatatagagttactactgcatgggagatgtgtgcttcatgccaagcaaaatttatacaatttctgaccaaagaatgataggcagccaagacaaccaaattaacaaaacagtatgtctcaaggtatcgcaatagaagcttacatacatgatgagcacatttggcaactttgatagttctggaggaatgtagcctgacaagttattgttatccaataatctgcaaattaattgtgttctcaataaagtataaagactaatgatgcaaatatgcaatgtcagaaacttacaggtgaacaagtgaaggtaatctggataactcaggtgggatttgaccgctcaatgagttgttgttcatgtgactggatgaagatagaaaattcattagggtacgtattccttgataacagagatacaaaccatattatactcacaagtgcttggttttattcaggttagcaaatgatttaggtataagtccagatatatggttctgatcaatctgaatccgattcagattaggaaggaagccaatctcctctggtaaagagccattcaattggtttccattcaggagcctgcaaatgcacaatgggggcaccttgttatagagcagaaacaattgcgtgaaagaaataaaaaaaaaaattgcaaaggtcatcccatgctacataggatgtacaac

SEQ ID NO: 133799 - DNA, 777 bp, Zea Mays
gtgtcttcaggacaactataaccttcaaggtgtataatatacgatcttcaggtcgaattgtaagggctgaaattcagaggtgatctccccctgaaccctgcaggtctctcaaatgcctcatccctatacctcgtacacattttctgaatgtgactgcaggtaaggatttagtgaataaatcagccagattatcacaagacttgacttgcaggatttttacctcaccctcgttctggagttcatgaggataaaaatacttaggacagatatgcttagtcatattgctcttaatatagcccgtttccatttgtgcaacacatgcagcattatcttcatagataatggtgggggtatttacggtgttataaccacatgacttctggatgtagttagtcatccgtcgtagccaagcacattctcgtgcggcttcatatagtgagattatttatgagtggttagacgtcgttactaatgtctgtttgcacgatctccaggatacagcagtgccaccacatagaaatacaaagccaatatgagatataccattatggggatctggctgatatccagcatcagcatagcccaccatagtctggtcctgattctttgggaaaaacaggccaagatcttgagtgcctttgaggtatctaagtatagtcttaacacctacccaatgtcttctggttgggtttgcactgtatctagctagtagatttaccgcgaatgcaatatcaggcctggtgcaattcgcaaggtacatcagtgctccaatagcgc

SEQ ID NO: 133800 - DNA, 282 bp, Zea Mays
gttgatcgccaagccaacggctgggattaggatatgacataacccttcgcttgaatagaccatagccgtagatctgggatccgttgaatacgattcgatctcgggtattttgaatccgagccatagatataggatccagtggctgtcgttgtgtaccggctcagttaagggcagatctaatcttgtgcgtccaattttgatcggacgatcgagatccgcgcttacctcttcgaccgtggcattttgctaaagagaccctagacttgtaggaaatgaacccac

SEQ ID NO: 133801 - DNA, 416 bp, Zea Mays
cggacgcgatctacgcgatgctcgcgtcgacccggtcgctcgtcaaccaaaccttctcgcgacaaagaagtactatcgtcgtctcgtcgatgcccgtcctccctagcccctatgaaccctgctagctatagccttgcagtttttgcagcgttaattcgtttatgctcttatacgtattggtttaattactggtgaatagttgtttgggggaaatttcattttgcacttgtattagttagtctttctactttgttggacttctcattagttagtcttacatttactatgccttataccattgatccagtgacagaagttttcaaacgcaggtcagtgcgcatgatattgaagatgcattggcatggaaaaagaaaatagagctcctcattgatcgggtgcacaagtctctatttcag

SEQ ID NO: 133802 - DNA, 433 bp, Zea Mays
atcacatacacctagttaattattatcccagatgatagagaaggagaaaattaaattctccatcgcaggagacgtacgacagggacacgtacggacctaaccctagacgacggagaattgcccgcccctgaaacatctccaccagagccagcaatgcaagcagcatggtcctcttcctctcctccagcaaagcaaacctgatcattataagccttggccagcgcaagcaacccaagcgagtggaattaatagtgtgtgcatatatgcatgtcagagttggctctggctgccttcctttagccgtccagctgatgacaccgcaaggaaaaagtccatgtctgctgtctcgctggctaggcaaagcaccaagcaggcagcttgccgaagaagatcgagtagcgtgagataatagatatgtgacagacaagatggg

SEQ ID NO: 133803 - DNA, 290 bp, Zea Mays
tgaaggagaggggtctgactgcagaggttgtggttactgattttgtcttcaagaacattcagccattgaaggacagggcatacccgacctatctgtaccaaggtctagctgactcaacccgggtcaccaacagaagaattcatgttgtagacttggtgaaccggcttgaaatgatacttagaggcaaggtatcaaatgttggcgcccctgtcgcatactcggtctggaacctgcctccttccaaggcctttactcattttgtgtcgaatcctcctgctgctgatggcggt

SEQ ID NO: 133804 - DNA, 337 bp, Zea Mays
gatagctagcagctctatgtgctaaattgagaaacttacgagccatatattcgcaacgaatcatatcatctaatcttggattctctattatgttttgaccttgattgttctatacagttccactacgagcttctcgggcccatcgcttcaatatatattgtgtcagtactgacttgctattcataagatcaagaacttttagagcatggccacacaatattccaactctattaaattgttcacagttgcagtactagtttgttgtaatggatcactgataactctgtactccttctccaatgtaaagttttcatcaagaccccaattgctacaaaag

SEQ ID NO: 133805 - DNA, 319 bp, Zea Mays
catcgtgtagcgcggcttaggttagaggctacgatactgtggcatgctcggagccgagctccaaccatgacgccgccgcttacgcgtggacgccgccgtgccctgttggctggggggtgaaactggttggccgttcgatctggatgtacgaacgggatttggatctcaacgttttgaatctgagtcactggttgagatggagggccgagatttggtcaaggcgtggacatcccgtaggccgttgattcgggatccaaggacacctagggaatactgattcgtaacccaatccggtctaatctgggccgttgcttcgtga

SEQ ID NO: 133806 - DNA, 280 bp, Zea Mays
gaaatatttaagtttgaatttgtgtcatgtttgaatttgattcctaaagagaaaataaaagaaaaatggattagaaaatttagaattgtcgcgcctaagcccagggcgtgcgctccgcatgcacaaaccgcgcccatgcccccacgtctcgccccgcgcacgtcacccgatcgcctaggtgaagaccttggaccccccacagcatgcccctgcccctcattcaccctctccttgccccatgtcctcacccagccatcctcgccgggcctttgccatcgcc

SEQ ID NO: 133807 - DNA, 431 bp, Zea Mays
agagcaatgcctctaccccaaatcgagagtggctaacccaccaagacgcaatcgtcggatcaaaggcaagtcccgataagcaataagtgtcctaactaacatattgccgatcttggtgaataggcctgggctaaacaggatacctacccctaagaacggataacacccagatcgaacctaggcactaggcgacaaccgcacgacacaggtatgatgctgaggctcgacaaccatgcgaccacgcctgggtaagacgactcatcccgccttgtcagttcgcaatactatgtgccctgcacggaaggaattggtgggcccatattgaccaaggctgaaaattttgagtttgaaggccagcccgcgaagggtttgcgactgctcttgaaactatagagcgaggggtgaccaggaggtgggaacctagtggcttg

SEQ ID NO: 133808 - DNA, 439 bp, Zea Mays
ggcgcaacagccccggccatcaatttataggattgttaagcggcggctgatgaatttgggtgagacgcgctgcggtcggaggaggtagaaagttactggcgtagtggattcgtgtcttccgtcgtggcgaactcaccggcgatgagctatcatcgcaagccgagctacggtgacgttgtaaagtgtgttagcatgtggcgcacgacggtaatcagccaacggcggcgaggtcttatctcgatccaccgatgagcaagggggtacggcgggcttagtcgtggccgagctcgagctgatcccccgcccagatcttttctttgccgtagttatccacccgccagcgaacacgaatcacggcggcggcgtgaatcacggtgtagagatcgttggcggcgaggttgctgcgctggcggtctgatccactcaaagcactgtacca

SEQ ID NO: 133809 - DNA, 589 bp, Zea Mays
ctgctgccttgtaaacaacctaaaacaacctttctttagcggccagccaggacagatccagatctgcctgcttcagcggtcagtaccatgctactaaaaatagccaggcgagatgaagtacgaggcagctctacttggttgtttgtgaccggccggattagccggcaaccactagctgcaaaacgccataaataattgtagctaactgttttgactataactcggcatattgttattagatgatgatgatactggaatggcagatgccaagttagtgttatatatgagtgaattcaagaatgtaataatttattaggattgtttggatagtgagcaaaagatcacaccagaacagacatatatatacacggctaatgcttcttcttttttacgggaacggatcgtaaggcacctcatcacaaatcctccgattatttctcctcacagaggttggattccccttggcccctagtttgaagtttccaaacgagtagcccttaatttaatttcccaatccactgttgtctcaagatcgccatgtccgtcgtcggcttcccctcctggagcccttcgccttcctcaggaacca

SEQ ID NO: 133810 - DNA, 544 bp, Zea Mays
taggatgacattgtcatcgaggccatggtcaaaggtcttagaccagggccaatagcccaatacttagcaagaaaatctccacactctctagagaaaatattgtagaagatggaagaatacataagggccgacaatgatttatgccatagaagggaggagctacacagatacaaagtagctaagggcttcgggggaaggttccagtctaggcatgttcgaagcattcacaacccgatgcatggtaaggaaaaaatggcccagtcttagggtcagtcatgctagcagcaagcaagcttctaacagcgagcaacctctcagcagcaacctttgcataatacatttcatccacctgctctgagaggcagaaggggaaggcgaagttttggtggtagatttaatgcacctccaaggaaaccattctgcttgttttgaggcgaggacagaggccacacaacatgaacatgccatcatactatcaacaagcaaatgaacttgcttcatcagccactcagccctcccagtcaaaagaggtgttcagtacatc

SEQ ID NO: 133811 - DNA, 628 bp, Zea Mays
gcgatatataaatatataatgccacacaacacagtctaataaaatatagagccaaacaaaattgtttatgaaggttgcgcataatgtgactttagggtcttgaacaacccaccacaatctaacgagtacaagctctagcatctggtgtcaacgtgtgtgcgaccatcagagctacaacagtatagcaagccttcgtaataagcgcaacaggcacaattatgcctctatgattggggtacacgataagtccacgcaacgtgcgcaacaggcgcaattgtggctccatgatcacgacagacagatagtgcctacagggcatgcgaaaaatatgcgactcagcgatggcggtctgactcaacgggagcgatccgattaatggagagcgcgacatagcaatcacatgacgcagccaagttcgaacgactcaaatattgtgtcgtgttgccagggcgcagtcaatattcagctaatgtcataactcacccgattaccaacgcagcctgatcggtgtgtctgagtacccattatacaatttaatcgctcgatgtgagtccgaaagctcaacgcaatagaaatatttagagcgatttaaatatacacaatataaccttcacatgcattttaataa

SEQ ID NO: 133812 - DNA, 436 bp, Zea Mays
gcgaggaggatgagaaacgtcacagcacgggtgaagagagacgaggagggagaaagcgtcggtcagagagctgaaaaggagagaaggaggcgaggagacacgaacgtgagccgttggttggagatcgagcgaggaggagtatttggctgacgtggacatcgcgagagaggccgttttggaccgcgtttcatatataggaaattgggcgtgagaaaaagatgtgtcaaggcacgacgcatccgtgaacatttttttgacgctgcagccggagttctgcgtgcgacttaaaccagtaaccctggagtccggctccgcccggcagcgcgggcctgtgcaggccggctctgggtatagggacacccggcggctgccctagcccccaaattctaggctccatctcctataattaattatatagttaacatgatagataata

SEQ ID NO: 133813 - DNA, 760 bp, Zea Mays
ctcaagtgacatccaaacccctgaaatgtcaaaaaccctaaaaaggaccctggaaaaccctaaacttaaaccctagggggttaagtgcaaaattagtgcacttttggactaaagtgcaaaaactatgaagttaaagcgtcttaagtcatatggtccacaattatgaagatttgcaacctaaaccctgagttttggacttatttgcaaaagagccacatctgaactcttttaactaagtctgaatttcagtgtaatgggttcatctttggggcctggtaacttccaaacaaaaaaggattttgccccaggtcaccacatcaattttgtagatctatcaaaggtgaacaactttgtttaagggattaaacattgttgttatgaagaatttggagataaatacacccaaagttaggctttcaggctgtttgaagtctgaatttggactgccagtgggtttgagcaaactttgagctcaattctaagcatgatctagtaagaatttgttttggaatactataacaaagatgaagatggtatgttagactaccactttgctacagagccttgcattggttgccaagcgaatttaggagaaaatccagcttcaggtcgctctgtcaggtcgactgaagatggatgccattgtacagtgatctgaataagaatagatcgatagctcaattcttcgccgccgacgaccgccgcgcacggattcgcgtttttagccaccgtgattcgtgctgaccgattggatagcgct

SEQ ID NO: 133814 - DNA, 569 bp, Zea Mays
cttttcctgctcgtaaaagggtgaaaaacagagtttgtgtctaaaccaacggtggagatagtcctcgcagaccactagattaactagagccctataaaataactggccacaagatttcaggagttgtttctgttggcggccgcacaaacgtcaggttcgggaaaagctcggaaaagtagttcgtgctccaaaaccaaaaggttcgcgattggccactattgctttgtttgttgttttcttttctttcttccccgaaaaggctggacggcggctccgagctcactcgtcgccggcggctgttgcaggttctttctttttcctacccctacctcagttgcataagctagcacttcgtatcgtatgttgcttgatgcgctgatcggaaggttgtttcccgtggcgcttttcgttctcattggattggttattcgtcgtcgctggcgctggtttaatccggtggcgcgactaggttcatcagtccttagtttccaccaagttcggtcctttgctttaatccggcggcgcgacttgtttcatcagttagtttccaccgagttcgggcggtatgg

SEQ ID NO: 133815 - DNA, 658 bp, Zea Mays
gggttgcaaattcctgaaactgttctagacacgcgactgatctggcgtggagggaagacagtgtcacaggttttggtcaaatggtcgggatgggatacctctctagcaacatgggaagacgaagtagtggtgaaacaacattttccttttgcaccagcttgggggcaagctgtatctcgaggaggggaatatgtcaacaactctacaccacgcgaggatgccgccagcccaactacagagaacctgatgggaggaaagccgacgttggaagcggaagctgatggagctgtgaagctgagaaggagcagcagagttaagaagccgaactccaaatatattggtgccaactggctgtaacacaggggatgggcgtatctctggttggggtttcagtagcaagtataaaaggcgaactgctgcgtctgtaatttggcttttggcttttggttgttgaacaaacctgaacagacttgaaccgcaaggaataacacctgcccacatcgcaaaccccagatcgcgagttccttcctgtgaacgtgctaacacaagttcttcaggacgcgttagagtaggacaggtgtagactcggttaggacagactataccgagttaaccccgccaatacgtctcaagattttagggctctcgagtctcgaaa

SEQ ID NO: 133816 - DNA, 786 bp, Zea Mays
gggagataattgggtttaatgttggcctgaattttgaccaacagtgaaatcggatgaactttgcgatcgacttgcgggggatttagtggatgtttgcgcaggatatttgtagcaaagttgtagttgttacattggacaccaactttgatacaggcgggtgagtgagttgccacacaaaaattgaagaacaaggccctgcaagttgctcggacagagggactgacgaagatagccatggtacagtggcgggaaagatctccagtgccgtgagcctgacgccggtcatcttctgccgcaattcacgctcgcctgggagattcgtgccgcaggagtgatagataacaccgagtcaaggtgaaaatatccgggaggggtaaacccagtcactggctggaccggccatcgtgtcccgccgcggtcagtcacgttggcatcaccggagcacaccatttctctgaccatgacacgcaatgatctctactccgtgccgtaagggtcatggaaagcgaccggttatcatccctggaccaattccctcccgcgcgccacggtgagttggccaccgtaaaatatcctggccgcggtaaccttgatctcaatccaaaattcgtgatagcttggtcggagtctataaattggaagcaccccctattccgcctactcattacaaactcagtgaaccactcctcacctccgaatagttactgtagcaccctaatttggaatttttcccaaatccattctccgcgccgccgtgaggaccccctccgtcgacccactgtcatg

SEQ ID NO: 133817 - DNA, 803 bp, Zea Mays
gattggagatattgatgattttgtctccatctctgctttggagttcggcatcaggcattatagccttgccggtgaggaaaccttctaggcgagcaccacgcatggtggcaacaacttgagccttccaggttgagtagtttgttttggcaagcttctctgagatgggatgagtaatcatgggagtaaagctggatgtgagggaggaggaattgccggccatgatcttatttcttggctccgataccatatagaaaatcagaggcgcggaagattggggtgaagcagctcacctttgccgtggctgtctgcgtgttacttatagcgacaaagcgcgcttcagatttacattaacgtaacaaaccatgagatatcttcggtccaagataagggctaacaaataaaccaatctaatctattccttggccgactctactggtttgttccgagttacaaggggataagcatacaaggaagataaacatgaatcatagaatctatctaacactccctgctaatcaaggtctcgtctcctccttcagccacacccattgtcaccatgctcgctgctcgtgccctcagtcctccctatcccactaattggctggtcgactctaaagcctcattccacacaactcataccaccatcccgttatttcactaacaccctccccaccccacccatcctttctctatcgtcgtgggaaatggttccaaccgtttggtcaggatggttctacctcaatgacgtccttgttgcaccctatttgttcatcccctcctctctgttcatcacttcactagtg

SEQ ID NO: 133818 - DNA, 375 bp, Zea Mays
tggagttcatacaagacataatatttaggtttgggataccaaatagcatcataactgacctgggatccaacttcaccagctctgaattctttgatttctatgaacaacggagtatccagatcaagtatgcatcagtagcgcatccaagagccaatggccaggtggaaagagccaaaggaatgatactggaagcactcaggaagaagtgttcgacaaaaatgaaaaacttgcaggaaagtggatcagagagctgccatatgtggtttggagcttaagaactcaacctagtcgagctatacatggaaatactccgttcttcatggtttacggttcagaagcagtgctacccgccgacctcatgtttggggcaccgag

SEQ ID NO: 133819 - DNA, 425 bp, Zea Mays
gagtcctgcactttctgtcatataaagcttcaaatggtgacatattcagactggcctggtaactattattataagagaacttagcatatggtagactcttgtcccaactgcctccatgcttaagggcacaagctctcaacatatcctccagtacttggttagttctctcagtttggctattagtttgaggatgataggccgaactaaaactcaacttcatatccatgttctcatgaaagcttttccaaaatcttgaggtaaactatgatcctctatcaaaaacgatcttcttcggtacaccttgtaaacacaaaattcgagccatatataactcttccaactaaggacctttataagtaaccttgaccagaatgaagtgagccactttggtcaatctgtccacaatcacccatatagcatcgtag

SEQ ID NO: 133820 - DNA, 386 bp, Zea Mays
gtgatcagcttgcggtggtttgaattctggccatctgagcaagacacaaactctttctaaagtgattcacccgaagctagattctgaagcactactggaggggaagcttcggtggcacagaaaatgttggcagcgtgtaggtgaggacagtaaatgtgatctacgctactgaaaaattcgcgcgaagcgacgtgggtccctgaaaatattcccacacagcacccccagcttcccctctgtcgattcgacttcagaccgtctgttttcattgaattgaatccattttcttcataacaagcttcggtaaggtgtttttcagatcttcggcatgaggcctccaaattatagtttttacgatctaagctcgttacgaagaaacgaactca

SEQ ID NO: 133821 - DNA, 314 bp, Zea Mays
actctagctaattgttagaacaactagtttattagctagcctaacctagctaaaacttcacagaagacctttctaccccttcaacacactcactcatccactcttccgtatgcatacacattttgtgggcggcgttggattgtgtggccattctattggaccgcgtcgcatcatgtgatcgccctcccgtcatcgcccgctacaccggtggccgtgccacattgcttgccttacatcacgtcttgccctgtctcgccgtcatgtgtcgtcgacttctcgtggctgtcttctcgcctcactagcctcctggatcg

SEQ ID NO: 133822 - DNA, 398 bp, Zea Mays
gtcacatagaatgatagatgtttgacgccatttcatctaccctgccttgattctatgactaacatcttcattaaaaaattgacattgtcttgaaaagaaagtaatcaagaggaagatggaaaaattgtttggccaagacatcttttgtacatgtgtatgtttcaattgattctagccaaaaaaagaggaggggtgggggtaattgagaagctactggagaactgctgcgtgagaattggctgcatgtcatcaaaaggtgccttgtgtacctatatatgccataaaaggtttgactgcacttattactaacgataggtttacttccttggtaagatactaatctgtccacttccgttcctccttttattggactcaaatagatctcattttctagttcc

SEQ ID NO: 133823 - DNA, 537 bp, Zea Mays
ccatatggaaggaagtgcaggactcctctatttttggaccagactactagaggaagacaactctttgggcctgaactgattcaagaagcagaggaacaagttcgtataattcgagagaatttgagggtggctcaaaccaggcaaaagagttatgctgataatagaaggaggccactggaattcgaagaaggagattatgtgtatctcaaggtgtcaccacttcgtggaatgaggagatttaaagttaagggcaaattgtcccctcgttatattggaccattcttgatctttagaagagttggggagatggcataccaacttgagttacctgctagtctatcagatgtgcataatgtgtttcacgtatctcaactcaagaagtgtctccgtattcccgaggaacagttacccatagaagagctcagtgttcaaggtgatttgacttacacggagtacccgatcaagattttggatactttgactagagttacaaggaataaggttataaagatgtgcaaagtccaatggagtcaccat

SEQ ID NO: 133824 - DNA, 323 bp, Zea Mays
gaaagagcctcaagaacagttcttttattcgcaatccttttaggaatgatggcgaataacctaggcgccagactacacacattctggcccaagagccatttatctgtccaaaacaaagtgtgtgctccatttcccccttttgagaccaaaacaatggagaagaaagatcctgccttttttggaacttgaatagggaggtttgcccaaggttttactggattagttttatgaagccacaaccatctcatacgaagggcccagcataattccttcaaactagaaatacccaaacctcccaaatggaggggtctgcacacccttcc

SEQ ID NO: 133825 - DNA, 779 bp, Zea Mays
tgttggggtgaaagtcaatgatgagttaggtccctttttcagtacacataaaggcctacgacagggtgatcccctctcgccgatccttttaatatcgtcgcagatatgttggtaattcttttttcaagaacaaaagagacatgtcaatttgtaggggtagtaccacatttggtagatgggggctatccatactccaatatgcagccgacacggtggtttttatgggacataacttggaacatgcccgtaatgtgaaattacctttaactatatttgagcaaatgtgaggtctaaaaattaacttccacaaaagtgaacttttctgttatggattggctaaggaatatgaagaccattactcacgtcttttcggttgtggtattgggttgatgccttttacataccttggaattcttatgatgcatcgcaggttgagaaatagtgagtggtgaggtgtgattaataggtttgagaaaagacttagtaattggaaaggtaaatttctctcctcgggaggacgcttgatgcttatcaattctgttctaagcagtcttcctatttccatgatgtctttttttaagataccagtcggagtgttggaaaaactagatgttattcgatctagattcttttggcaaggaggtcaccacaacaagaaatatagactcgtgaagtggaagattatttgtcaaccaaaggagttatgtgtcctaggggtggctaaccacgctaccaagaacacttgcttactcagtaaatgatggtttaagcttcttaac

SEQ ID NO: 133826 - DNA, 454 bp, Zea Mays
ttggaaaccccattattctaaggaatttttattttcctaagaaaaaatagttcattttcttataaaaagactaaaaatcccttgagaaaatggagttcccaaattagccctaaaatggtagatctaccgtgagaagaaagctcggtgttgagcgctaagggctaatttccctagtcattagtgtgttgggatgtatggaacgaagaaaccgtcgtatcacaaagaatatacaagtcacacgctaataacctcagacaattgaggaggcactcgaaaggattggagggcctaaaataagatgggaattttagaccttccaatctcatccggtaggcaggcctgagcgctacttggctactctctccatcctgtaatatagcatattctagcattcaaattccatcatcaaagtcaaacataagagattctaggagaacaaaataatttcacatta

SEQ ID NO: 133827 - DNA, 545 bp, Zea Mays
gggctatcagaattctgaatttttcagatttgtgaatagtatctgaatctgaaatctgtatttttagtgcagttttggggctgtgtgctgcctgttctatgcagttttggaccatgattgctatggaagagttgaagagcatatgtcagtgaacaagtttcgttgtgtgcgttaggcttgatctaacccagaacatggagtaaaagttactcaaaactgggctgttagtttacatggactgaacttttgttcaattaacagacagctgaattttagtgagttttgctgaactttggagctttcttatcactaatccatggagttatgggttgtagtatctatagaaaagttaaagaacatagattgatgagcaagtttgttgaagtgtgtctggcctggtgctgcacgaaaattggaataaactatgccaaaactctctgtcaggcgtgttatgttcaggtctgattcagttcattaaatttttcagaaacaacttgctacccttagctttggacccctgtaacttctaatctgtggactcgtgg

SEQ ID NO: 133828 - DNA, 402 bp, Zea Mays
tgaatcgtctcaccttatacaaactgttggtcacttctctgtttgtctgaatatgtttcaggttaaagagctttcggacatgatatgctaatccatcctcttgttcggattgaattgtcaacaagtaaaaaggcaagcacgatgattaatattttttacaacttttagcagtggctaaccttggattctttcaatcagatacaggcacgccgagtggggttagcatatactatacatatatttctattttgtaatgtaatatcaaaatgcattattttttacttcattctttagtatcagcggtggttctcctgtatgtaaaagccccagccataccagaagtcgttctccattattacgttgggcttatgcgattctttggcgcttgggaatatatgcagc

SEQ ID NO: 133829 - DNA, 370 bp, Zea Mays
ggtgttccttttttggatattgcgattgttttcagggtttgtgcgtcgtcctattttcccctcatttgatttttggagggtcaactgatcgtgtcgtcattttctcgccaggtgtagttggtaggattattattaattagtagtttcgtttgtgctcctctctctcaacctgtacaaatgcgatgcatgtactacccttttggatccagtgaggaaaattgatgggaaataggttacccgctatatatgaaattgtgcttccattgcgctactgccaagtacgtccatcgttgtaactgtgagaggaaacatgtagtacctagcttgttgcgcgtggttaactggagtaatccttattagagcatctcca

SEQ ID NO: 133830 - DNA, 337 bp, Zea Mays
aacctgcaggccgcttatgctcggccttcacgcactgacatacttcacatgcggccacatacttagaaacatcaaccttcatccgcttccaccagaagttttgcttcagatctcagtacatcttggtttcgccagggtgaatggtgtaaggcgttttatgagcttctctcaatatatccatcttcacctctgatttctgaggcacacaaaggcgacccctgaaacgaaccaaatcattctcatcgatggagaactctcagggtttaccatcgccaaccctctttcgagcttcctgcaataaatgatcctactgctgagccgcacgcactttctccat

SEQ ID NO: 133831 - DNA, 464 bp, Zea Mays
cgagaagcacgaagagcaagacgcatcatcttcgtaggatcgataacaagctcggagatctccggttgaatgcgaccctccgtactagtcacgcagggcaagggcggtacttttaacgagtaaagaaagggtaatgggtgttgtttgtttgtcactatgcaaatgcacgtttggcgctctgtcatcacgatgccatggccgagacgatgttcggttcgtgtcttatttttagaataccgttctagaatctagttattagctaaatggtttctaaatttttatattagattttgtaccataagcttacgatctctctataaactgttaatagaatttgtattggattttgtgcagtatctaaccttcttcaaatccacgaggaatcaaacgggagagtgtggggaccgttttttatttcgttctttaaaaaaaacgttttggtctgtgtggaaactaatcttagc

SEQ ID NO: 133832 - DNA, 384 bp, Zea Mays
agatgtggtcagggagtatcttgttgagcatcgtcgggtcggtgttcgtgccattcagcgctcgcacttggggcaggtgatagtgcagtttcgtagtgttctggagcgggataatttggttttgctgggcccccagcaatatctggatgctactttcaccgcggtccgtcacaatgatgcttggaaccaccgggctcttcttttcaaccatgaatgctggcttatgcttctggggtttccattggattatcgttcttcagaatacctgcaggctgccattggatcgtttggaaggctgattctctgggaggaggatcagagtaatatctctagaaccttgcttcgtgttcgtgtcacttcacttgatgaggtcccccaatttat

SEQ ID NO: 133833 - DNA, 541 bp, Zea Mays
gccacgattaatatggaaacatgaagagatgttaagagtgataatttgtttgtaggtgtaaatatataatagttagtttttacatagatttaagaactggcatatttattaatatgtttgcagatgagtgcttggctgaaacactcaccggactcaataagtggaaacaacaagggcgataagtattgagatgacgtagctaaagagtacaacctcactactatcaaagcgagatgaaggactagaactcaagtcaaggaaaggtggcacaaaataaataagtgggcaaccacgttcaatgattgttggttgaaaactagaagggtgctcaccagtggctattcggatcatatgtggatggagaaagcacaaaagttttatcaagatgaaaacacaggatcatattttgtgcttgttgatgtgtggaacataggaaaaaatgaggccaaaagtggatttatataacaacaacctacaaagtaacgacaaccaaaaaaataagttaaaggagagggacaatgttgtctggtatcgtaattag

SEQ ID NO: 133834 - DNA, 1218 bp, Zea Mays
gtgactggtcatgtttaaaaatgagtaaaacttcactacgacacaaataaaccattgcatcattttggatttttgtttatgcattaaaagcaataataaaatgaataaaatgtaatgataatgtgatgaggatttagaataaaccctaaatcgagaattgatttttaaatagaaaagaaggaacaaatattatgagacaccaaaataaatccataaataaataaattgaccccacattgatatattcaaattgaatgattaatttggatacaaaattcaaggtcatacttgagattcaaattgggaattgaaaataggagaagaagaaaattagagaaaagataaaggaattttaacctaaatgggccgcagccacctattttggcccactatacctttctcacccgcgcggcctggctctggtgatggcgccgacatgtggggccagtaggtcagtcgcacgcgggcacgcctggctgtctccttccctctgccgtgcggggtccacgcgccagaaaccgtggagggagtcctctgttcttctcgcgaacaacctcgccgcgcatcgcgcgcaggaatcgcggcagcggctcagctggccggtacaacgactctgagccctcccgggtataaagcatcgcgccgccgctccttatccaccgccctaacctcgcgaccacctttttgcggccgcggtgaaaacgacgccagaaagatcaagccaccattgccgccggtaatctctgctcaccttggcgaacggccctcggatcttcgacccagaacttcgccgcgagtcgtgggagctctcgtggtgtcttcggacgtgggtagccactcgtgcgctggcgattgctcgccggacgctcctcttctgccacggatccaccgcaccgcggacaacctcgttggcgcttccatcactggtacggccctgcattgttgttacgttgttctagactagcgtaggtcgaccggattgatggggtagggattgtggctcggtaatttggtcatcggcgttagtttttcgctagatgtcgtggcccgcgctaaccggaccttaaacctttccgtggggcgtacggtcgagtccgccgtaccctaataccagtgtaaccacagtttagtgagggggaaagccatgggggaaccgaattggctatcgccggccaccctccgccgcgctcaggggtagtagcgccgccgcgctaaaga

SEQ ID NO: 133835 - DNA, 781 bp, Zea Mays
tgtgttcgataggggtgctagtgcggactcattctgaatggtgaatcactaggattcaaacgaaaaacttgaaacacgggggttatactggttcggaccggagccctagtccagtgtagtactgatcgtagtattacagtagagcgtgttacaactggtgggcttgtgtgcgtacgaggggagagggaccctcttttatactttaagggacgatccttacaagtgagagagggagaaagacacaaagtgagagagagttctttaactatcgccctcagttgtattgcgtagtgggcccctctggggccaatcttggggtgtgcatgcgcacgttatagctccttctgacaggtcgtgtgccttcatattccttgcatggcgctctatcccatccatctacccttcaggaccctatagtttactctatgcccatgccatcgcaccggatgggtcccacagaacgtactcccggtaaggttgaggttcgtgtccagtacgacttcatctttcgtcaactcccttgcgtcacccttcagcatgttcgagcacacgcagggtttgccgtcatgtccttcctggtacgtgggttgagacttcgatgccatgactccccttgttgtcgtacacatgacgtagacatggtttggtgacgttgttcctcatcgcggccgtcatggggaaacgacgttggccctggctccttcctcgtggatccactcggcggggacttggttgactctcacctagcagacttgctcgataggaacttggtcattcgtcc

SEQ ID NO: 133836 - DNA, 406 bp, Zea Mays
cgagaggacacggagctgcaacgaaaaaataactgtcacgtgggcccatatggtagggcatgcggtgtgcagaacatgggaatgggtttgagccgcgacgggaaaaaggagacagaggctgtcacgtgggcccacatgtgcagggcgtgtgttgagggtgcagatgggaatggctcctcacgagaggaatgtgtgtggagtgtgcagatgggaatggcgtgtgttgagggtgcagatgtgaatgggttttcacgagaggaatgtgtgtggagtgtgcagatgggaatggcagaacacggaaatggcagaacatgggaatggcagactactcttagagccttaataagtagtagagattaaaaatctatttcctatttgttttctctggtttttcgagtttctggac

SEQ ID NO: 133837 - DNA, 449 bp, Zea Mays
ggaaccggtacggtcgacccggtcctcgtcctcaaccctgctatgtacaacaccatggctgcggccagcgcagccgccgtggtccgcaccaccaccatgcttggccctcctgcgcgcagcgcagccgctgtcgccgcgtccaatgcttgtgtagccaacctccacctcttaaggctcaaactctcaggctatccgacgtgcacgggtgccctcgccgccatcgtggaatcgggacctctctcgtcagcccgtctctcccggcagccgctccctggcttctccaccactcgcccactcgtcgcaaaccccacctaggcttccccagcgccctccaccgatgccacgctggtctctaccatcgccaccatataggacgcctcgcaggagcgcaagcgtgtcgcatccctcaccctagagcaagagtatgccatgggcgccgctctgacgcg

SEQ ID NO: 133838 - DNA, 298 bp, Zea Mays
cgaggagaagagagttgtggacccttttcttgctgggttttacgaatctatggcaaaaacaaatacagagaagatcacaaaggaaataatggcggatttgtctgaagattctgacgatagcgatgactatgatgtgcaaagtggggatgaagattctgaagaccggccctggcggccaagccataccatcttcggaaagtcaaccattaaacaaagtcaaattgacgccatgaagggaagatactttcgtgacatgtctattgtgagggttggaggggacagcactgcccttgttcct

SEQ ID NO: 133839 - DNA, 697 bp, Zea Mays
cttgaggtagacaaaatctccttcctcgaaactgagttctctccttctgttgtctgcgtaactcttttaccgactctgggcttcgagtagtctcctgcggatcagggcaactttctcttctgcctccttgatgaaggcaggtccttctagggtcttttcccctacgtttgaccacatcagaggagtttggcacctccttccatacaaggcttcaaaaggtgacatcttgatgttggcctggtaactgttgttttacgagaattctgcatacggaaaactggacacctagtctccatcgaagatcagcacataagctctcaacaaatcttcgaggactttgttgactctttctgtctgtccatctgactagggtggtaggcggtgctaaagtctagcttggtgcccatagattgctgaaggatcaaccaaaattttgaggtgaattgtgttcccctgcctgacattattcttcgcggaataccatgaagtctaactatttctttgagatatatccgggcgagggtggttcctccaaaggtagtctttacgggaatgaagtgagctaccttggtaagatggtcaattataacccagatagaatcgttccccttttgggtttggggccgtctgattacgaagtccatgcctatttcttcccacttccatttgggcattggaaggggttgcagtaggcctg

SEQ ID NO: 133840 - DNA, 494 bp, Zea Mays
agaaaacacaagcatcaggtttgatagaaagaatgggaacttttgagtttgtgttcatattacatcttatgataagagtattggggaggactcaagatttatcacaatgtttgcaaagaaataatcaaaatattgttcgtgcaataggattgattggatttgtgctaaggaatatgaatgacatgagggaaaagggttgggatcccttatttgaggtagtgaagagtttttgtaccaaaatgaacatagtaatcccaaatatggatgacacaataccaactagaggcagatcaaggtgtcgtggagctaagttggtgagttactaccatcattttcataatggaattttcattgttttcattgatcaagtacttgttgagttcaacaactgcttccctgaaagatcaactcagttacttggatgtattgcttgccttgatccaagggattcttttgccaactttgatttagagaagttaattgagctatcaaag

SEQ ID NO: 133841 - DNA, 669 bp, Zea Mays
gaaccacggaagttctctccccccacggtcggggagacagccggacgttcgcaccccgagttggacggagtcccccaaagatcaggaggtggctgaggcaggggctttgctagctgaagttggactgcttaaggagagggatctgactgctgaagctgtggttgctgattttgtctttaagaacattcagccgttgaaggatagggcatacccggcttatctgtaccgaggtctagctgactcgacccgggttaccaacagaagaattcccgctgcaaatttggtgaaccgacttgaaatgattcttagaggcaaggtatcaaatgttggtgccccagtggcatactcggcctggaacctgcctcctaccaaagccttcactcattttgtgtcgaatccacctgtcactgatggtggtttgggccttagagtgtgaccctctgccgaagaagttagtgctttggttgcctcgctcggggaaattcctgatgatgagcggcaggtccactttgaggtgcctttggatcctagtgacacagagataagtgctatgcttgatttgctggctgagaactcttctgatgctgctcctgctgggacattggtggtggagcctctcccagaaactgatacaaccttggatattcagagacctgtcagtgttcgccc

SEQ ID NO: 133842 - DNA, 342 bp, Zea Mays
tctcatggtctcagttcagctgagttcacttaactaggaccagcatgtgcagtagaaaatccctggttaattatgggtccttctaacctccgttcgttgcttgaatttctcgttatatgtggcatgttcattcaagttgtttacttacaatcacataatgcttgcggtgttacatgggacatgctaatttctttggatgttagcatgtgaacttgtgagtcagttcattgctcatttcattgaacctatgctgccatgctggtgaagagacaatgaagcagccagttggtgctataaacacaatacaccttgctcccagatccgcattcgcctccgcctcag

SEQ ID NO: 133843 - DNA, 467 bp, Zea Mays
gttggtttagggttagataatgttcattcatgtaatctgatcattcgaacagctacatatacattattataatcttgatagtatgtgtgcgagtgttttgtgcttcttgtgccgccgaccacgaggattgttttcttgcgtggccgcactcgcaggtgaagaactgggatcatatcgatccgttggtacgtagtttcatcgcactgctttgagatatgagatgcatctatctatgctcttggacctcgtgtagtttcatgtacgtacgacgtagctaccaaattcatctcaaacagcgtggtgcatgtgcatgcctccatgccgcggttgagctgtttacctgcttcccgtccggccgtctactgcgtcgaagagttgaaccaaacgaactatccactacgcattcacgacacctgagaactggaatccattctgttggcaatgttgttaacaacacttgggtgttg

SEQ ID NO: 133844 - DNA, 602 bp, Zea Mays
gtgcgggtctttctgactactgaatcaagaatcttcactggcttctcacggtactgaaggtctttctgaatctgcactgtctcttcttcgatgtgactttctggtgcttgcaggcatttgcggagctgggatacatgaaacacattgtggatgtcggacatggattccggtaattccatacggtatgctgcgggtcctaccctgccaatgatgggatagggacctatgaatcgcggtgctagctttccttttacttggaacctcctgacaccacgcattggagaaaccttgaggtagacgaagtctccttcctcaaatcggagttccctccgcctgttgtccgcataactcttctgccgactctgagcttcaagtaaccttctgcggatcagtgcaactttctcttccacctctttgacaaaggcaggtccttctagtgctttttcccctacgttggaccacatgagaggggtctggcatttccgtccatacagtgcttcgaatggcgacatcttgatgctggcctgatagctattgttgtatgagaactctgcgtagggtagactggattcccaacttctatcaaatgctagcacacatgc

SEQ ID NO: 133845 - DNA, 751 bp, Zea Mays
gggcgggtgtgtgggaccgcgaattgcatcgggaggcagattggagggcgttaggtggatggaggccacgacatgtggaacgtggcgcggttagagcgagaggcgggaagaggtggaggaggccgggtgcggacagttctgccaaagtggccttaggcgagtcgtgactgcgtctgctactcgagcttggcctcggatgagtcgtgattgtgtctgctgcccgggcttggcctcggatgagtcgtgactgcctgtcccgctcgggcttggcctcagacgagtcgtgattatgtctctcgctcgagggtgtcctcaggcgagtcgtgactgcgtctcccaccgggcttggccttgggcgattcttgacagcctctcccgcccgagagtggtctcgagcgagtcatgactgtgtatcccaccggaggatggcctcgggcgagttgtgactacttgtcttgccggaggttggccttgggccagtcgtgactgtctatcccactcgtagatggcctcgagcgagtcattactgcctgtcccgcccgcggatggcctcaggcgagttgtgactatctgtcccacctgaggatggccacggacgagtcgtgactatgtctcccgccaggggttgcccttgggcgggtcatgactgcatgtcccacccgagggtggcctcaggcgagtcgtgactgattgtctagccagggcttgacctcggttgagtcgtgactgcatctcccgttgggggttggcc

SEQ ID NO: 133846 - DNA, 584 bp, Zea Mays
caagagcaaggccatgcatgtggcgccagttgggatgcgattggagagaccaggctaaggtttttgttgatttaatctatatatcgagtttttttgttagacaagaagattttatccacttcaatcctctctgatctgcttgctttcaagcaagccctaagaaaataatctatgttatgtcagccctttgtgtatggggtgcgacacgaccatgtgtatcgggttgtggtagcccaagctcgtacaacactgagccaagatatgcttggaccaagtctagaaaccgtgcttcgatctatcgtgccttgagttgcatgtgcttccataaccaaactaagatctagtttaggaactcaaatcctcttggagatttggaagaattgaagtggaaataaactgattttcaaactagctccaaagtaaattagaaagtggaaaaaggacaaactaataatcaaaccaaaataaattaggaagtggagaaaaaaaggacccatggtatgtactctgcacaaccaacctattctattcttgccaaatgggttcacagcagcggttagtgtatcttccctccccaccccaag

SEQ ID NO: 133847 - DNA, 288 bp, Zea Mays
ggtaggcctagtagtttctttttctatggtttctcctctttcaattcccacgactacgcatgatgtttcttcttcatcgagttcacggcatcacgcatggcggcatgcaggcacagtgaggccaggtgcacgacacgaacaaggaacggacatgagcatgatgaacttctcacctcggaatggagcacacgtgtaggaggatggggacaacagactcgacgggctctagcaaggatagtggttctggatccacgacggtggtcggagcaggcggagatgtcgcagggg

SEQ ID NO: 133848 - DNA, 796 bp, Zea Mays
gcctatatcagtcgagctttgtgtccaaagaacatgggattatctatctatgaaaaagaatgtttagccattctttttgctgtcgagcactggcgtccctaccttcagcatggtgaatttatcatcaaaacagatcaccaaagcttgactcatttggatgatcagaggttgtctacaccatggcagcagaaagccttgactaaactgctggggttacagtataaaatccagtacaagcaaggcagtgaaaatcgggttgctgatgctctgtccagaagacccaatatggatcaagatacagccaatgctcatttgaacacagtatccatgtctactattacacccgactggttgctgcaggttactcaagggtatgatcaagacccgacggcaaagaaaatattaactcagctagctgtgggtggtcaactggcacactatacaatcacccaaggtgttattcggtacaaaggaaggatctggctgggaaataatcaagagatgcatcagaaggtgatgtcgacattacatgatagcgcagttggcggtcattctggatttccagttacctatcgaagaattaaatctaattttgcctggccaggaatgaagcaccaaatccgtgaatttgttcaagggtgtcagatctgtcaacaggctaaaccggaaagggttaaatacccaggattactattgccgcttccagtccctaaacaagcatggcaaacggttagccttgattttatttctggacttcctccaacaggcaaaggaaattgtattctggtggttgtgg

SEQ ID NO: 133849 - DNA, 433 bp, Zea Mays
tagctgtaggagagaatgggttggtataggaaaaaaaagatcacatgaaaattttgcaggatgagagaaggattagggatgaaaaaaaagttcacatgaaaattttgcgcagcagtaagtctcggtgataaaaaagtatagtttgcatgaaaaaattgcgcatcagggggcaaaggtggcctagttcgcatggaaaattgtgtattataaaaaatagtttgcgcggcaagaaaaaaacgtggattagttcatcggttgagaaggatcatcgattgagaaagatggatgttgagacctgctgtgttgtgtgcgacaaggatgttgagtagggctggaaacgagtcgagtttgactcggctcactgcggctcgctcatgcaacgagtcgagttcggcttggctcgctcatctagcgagctcgaaaaagcggctcg

SEQ ID NO: 133850 - DNA, 491 bp, Zea Mays
gtttcacaatatcgttgtaacagttgttggagaaggtgtactttgacttcatcaccatgagacgtgttaccacctgcagtacgctcacattggttccttcatgcactttagcctctgaggcttcaagaagcttgtagaactctctcacatcctctggaaaagcttgattattctgtagttctggtactcattcctaatatcatccaacatctcttccattcggtctacatcctggtccccatatccgactcaatattatggtccacctctccatgctcatgccataccagatagttcggcataaagccatgtttgaaaacatgatacgagagctccacttttttcaaccgaaccaagtttcgacattttatacacgggcacctcgctaaacgagcatcaccagcaaatgcgagtgccacgaattcatctgcaactctcacccatgcatcagattgaccatgagtgacactgtcgaatccatcatacatcgc

SEQ ID NO: 133851 - DNA, 380 bp, Zea Mays
aagatggccaggccgaaggggtatggagaagttcgggccgtccgattagaaacctagggcgcagattaaatctttcccccgcccgaaccggtacacgatcgcgaccctaggatcaacaatccacggccagaaatcgatctgagagggtgactcacgggcctgctccaacacgtccgatttaaatcatacggtccggatttaatgaatggaaacttgaatcctagtcgcccgccgatggatcaacagtttggatcatgtctgtctgaatgggtacgctagcctaatctgagccgtccacactgatccgacggcgcgcgcgcatcatcaaccccacgcccaagtcacggcggcactgcccaaggaacgcacggcggaccatc

SEQ ID NO: 133852 - DNA, 770 bp, Zea Mays
gacgaagcggccggtgccggcgttgacgaagagtcgctcatcgctctggtgtacctcgtggagcatagcccactggtgcggccggaagcgcgggtccaaaggcctgctcttggggtcggtggtggaggaacgccagccacggcacacggcgcggaggtccatgtagtagtcgagttcgtcggtggccaggaggcggtccgcgatgcggttgacgaggtgcgccgggagagacgaccagtccgccattaccgctcggttgttggagcgcaactgcacagtgttcaggcttgcaggacgaattggatcggatattgcagggacttcagagagtgggagaacggctttatgtagaggatgaaagcagtgatcgtttcaatataaacgattcgtctttcgtacattaaaaacccatcgtttgcataccaatcgaggagctggaactccaaacgtccacccgatacggcgtgtggcggtcagtactccaattcttgggaagatgcggcaccataatgatcacgccgggcgatcgttgaacttccaagctccaacgacccacgtctagctgttcggctagtgcttcgttgcagccatcctagtgtttccctgagtggctcacagccacagctgctgctgcatgtgccccttttagctcaagcgaacggtttggaatcactcctcgaccagtcgacctcacttaccagtaatacacctctagtagaaccatcgtggaggaagtttgaaaatgcatatatcctttttgtgggttttgg

SEQ ID NO: 133853 - DNA, 492 bp, Zea Mays
ttcctgcgagcttttcgctcttgtcaaatacctttttcctgagtgcatcgagtatcattctgttggctctttccacctgcccattagctcttgggtgtgccactgatgcatacttgatctggatgctcctctgctcgcagaagtcaaagaactctaagctagtgaagttagatcccaagtttgtgataatgctgttaggtattccaaacctaaacattatttcttgaatgaattccactgcctttgctgcggtcaaagaggcgatgggtttgtattctatccacttcgtgaatttatcaatggcaaccagtatgtgagtatatactccttgagccttcttgaaaggcctaatcatgtacgacccccagcatgcaaacggccaagctacatgaatagtttgcaattgttgtgcggtagatgatgctgttttgataagaaccggcatgcttcgcacttctggactaactctattgcatcgttcttcaccgttgg

SEQ ID NO: 133854 - DNA, 281 bp, Zea Mays
taaggacgaaggcgatgaacgacatgtcgttgctgaagctgatgaagcgacgccaaagaaaccggagcgcgccaagcgaacccatcatcgtaacgtttaaataagtgggacagagtcggctgtgtagcagtaggtggtcctgggccgcaggcatagcgtatgcttcagtataaatggaaccgtgtatcatgtaccaggaattatcgaagaaaatagaaataacaatccatcgccttcgtctctatccttctccatattctctcttcttccttggtgccggg

SEQ ID NO: 133855 - DNA, 1862 bp, Zea Mays
gtcctggcagattccactaccctaacccaagaatatcatgtatcttacacattacacatggaacaaatgatagagcaagctggactgcattgttctggacattcaggcaagttgcttataaccccagctttatctttagctatagaatgacaaaggcacatgattcttttttatgttacttactgtgccttaatatactggattttcgcagatatcctaatacacactacagatttttgtaatgcactgctgctagaagattctagcacaaattatgagatgacagtttgcttgcaaccctaccaggcaactttgcctgggacacaagcaaaccggcctgaagtgcacatggtatcaaccatatcatacagtgcaaatagccctgtggaatcaactatacatggtttgcacctctatacttatggaatgtgacctgctgttctattatctctcctgtcatatttaaatcattaaatgcacatcaaagccaaaatgctttcaacagcaaactattctgattcatctcaacttcagagtatttggttacgaagtttcccttacatgattgagcaaaatagtataattaattttatactgaccattttatcctcataatcataccgaccatttatgctaggattaggaagtaggaaatatgatttttacagttcaatacaattgcttcgctagtataatgaaccctactaccgtagggttaaatgctgatatgctagggattataaattggaatggcttaaattgattcttcattgcttgattccctctaaagggtgccaaccgtgtgccctgatccgggtcttgggcctaacttgactaacaaactatagtctttcgtttcacatttgactaacatcaagctgttacaaccatgttactgctatcaaggcgcagggtttattaacaggactacagacaccttccaccaataatagttcgttaatgttgttcacaataacccctttggaggcctaccatgtctccctgaccatttatgctataggaaatcacataacagcttcgccctcaatcaattctgacaattaatcattttattttaggagatatgacagtgactcctgcacataactgtgaccattcctctttctatgcttcctattgcatcttctgcaggaacttgcacttcacatgactctagcacaagtgcgtccagctgtgctgacgatccaagtatgtcgactgacagcatggttaaatctgtggacatggatggtcagaagcacatgaaaaacgacaaaattaaggtgcacctagcccctcaaccagaaaacgcgtcatttaaggtactattatagtatttgaaacacagccgctgtcatggtagtggagaaggaattatggtggcgaattacatcacagtgttttatatctggctaggaagtcgaagtgcccttcttttcagtttaataatgttaccatttctaaagctcacacatgccaagcatgtctgaggaaaaaaaatatttctaaagcttatttcatagacgctcttgaaaatctaagcaagcaatattgtattgctgaacaaatgtctttgaagaaataacaactgctcgcttcttgcagaaaatgcttttgaggaacctgtcgaggaaactcaggtggtcaaaggcgcaggcagacacgcatcagaccatggcgcctggatcccagggcgcagaagaccctggatatccactggtttctccatcggatgatgatctggaggatagttgggagatcctgtaatatataataaaccgccaagaacctccgtgacttttcttttttgagctaagtttatccatgtcaggttaactggttttgagggaaggcacgtggcg

SEQ ID NO: 133856 - DNA, 761 bp, Zea Mays
cagctctggcagggtcacacccattgggatcagcatcagcagggacacacccatcaggttcagccccagtaaagagttccactggtacttcttcagtagcaggagcagaagggctggcatcacaatccaagcatgacactcgccgaagccatctctttttctttttcttcccctcggcaggagcagctagaggactgacttggcgaaagcgtttcgggcgagtaccctcaagccttcgagtatccacggttttctcaggctcttggataattgcaacagccattgtttcagcaggaaccgagtcagaagaatccctagccaacatgtccagcatagcgcttatctctgcatcacccggactcataggcatctcaaagtgaacttgcctctcatcgttgggaagatctccaagtgaagcaaccagaacctcaacttcttcaagagagggtcgcactctaagacccaaaccactgtcactagcaggaggatttgacacaaaatcgaaaaaggacttggaaggcggcagattccaagcaaaatatgcaacaagagcaccaatgttcgataccttgcctctaaggatcatttccagtcgactcaccaaatccacagcaggaatcctcttgttggtaacccgggttgaatcggtgacaccactatacaaataagctgggtatgccctatccttcagtggttgaatattcttaaaaacaaagtctgcaaccacagcttcagcggtcagacctctctccttcaacaag

SEQ ID NO: 133857 - DNA, 360 bp, Zea Mays
gtaacatgttgcttaatggcgtggtcgtatcatcctcctcaccttgaaaaggagttttcctcgactctgaagtgtcttcactcgtatatgatatgaggtcagcaacattgaacgtgttgctcgcaccatagcctggtggaagatctatcttgtatgcattatcattgatcttggcaagaacacgaaatggacccctcgtggcatcaatttagatttgcgctgatcaggaaaacgctccttgcgcaagtgaatccaaaccaagtccctcgtttcaaataacactttctttccatgcttgttcatgcttgcagccttgcgcacgagctcaattgcttccttcgtcttctcatgtatcttttt

SEQ ID NO: 133858 - DNA, 731 bp, Zea Mays
gttcattttgagatgcctttaaatccgagcgacgcagaaataagtgccatgctggacatgttggctgaggattcctctgattcggtccctgctgaaacactagctatagcatccatcccggagtctagaaaaactttggacattcaaagatctgatagtattcgcccgaagcgtcctcgctgaaccaatcacccaacttctcctgctgaggggaagaaaaagaaaaagagacggcttcggctagtgtcatgcttgaatcaggatgtcggcccttctgctcctgctgccggggaagtgccagtaccgacttttactgaagatgaacccaatgggtgtgacccgattgatgctgaccccaatgggtgtgaccttgatgatgctgaccccaatgggtgtaatcttgatgatgctgaccccaatgggtgtaaccttgatgatgctgaccccaatgggcgtactgtctgtaatattgatgaagatgaggaggaggaaatccccttaattcggaagaacagtcggcgctatatagccagtggggacaatagtggtgttccttctccagctttgtctgctctcattggtctgtaagaattgtctctgacaaattttgatcagactctcgaagatatggtccctgaagacctgttgtcggagccggcagatggtggaatgatggaaatttgtgctgatgtgcctactgtcggggtagagttatcccgagcagcgtctcg

SEQ ID NO: 133859 - DNA, 633 bp, Zea Mays
caagtgaatgcacttcatgaggactcttgtcgcacctcttctgtacagtatgcccctctatgagggtgtagttggctgactgccttgtgatgcgttccgctgccaccttgtcatctggttcttcttcattttttatgtacttgatgataggctctttccagtcattggggtccgacactggttggctcaaggtgctgcactcttgcatctgatctaagaggataattggttgtgatatttcttggacgaagatcctgggtggagcctgggcccgactggatcccagcttcgacaacgcgtctgccggcgcgttgcggtctctttccacgtgatggaactccaatccttcgaatttgtcctctaattttcggacggctgcacaatacttgcccatggaatcagtcaagcaatcccagtctttgtttatctggcttatgaccactaatgaatctccatataccatcagcttcttgatgctgagtgatgcggcgatgtttaatccatggatcagtgcttcatattctgctgcattatttgatgccggaaataatagctggagtgcatacttgagttgttcacctccaggagcaataaagagaatccctgcacctgctccttgcaacttcagcgagc

SEQ ID NO: 133860 - DNA, 537 bp, Zea Mays
gcttattatattctggatcggatggagttgccattgcgacgactgacccgaagagggaatgtcaggctttttcctgttttagtcatgctgcaagagcaagactggcgttggatatctttgccagtcagagtttggttggcgaccaccaatctagcactgaggctctacctagtgttgtacctctttctattttttgtctactaacccatggtcaagcttggtcaactgcaacaggttgtatataaaagacgggggcatccttaggcccagctgatagcagttagtttgtataatcctttctaaaatataattcgttttagactaaatctgtattcattcaataacatatgaatatagtttgtattcattatcattgcatggtgcttatattgtggatggggctaggcaccacttgccattgcgacgactgatccggagagtcctagtcatgctgcaagactggcgtcggacatgttcgtcagagtttgcttggtgtccaccaatctagcactgagtccttgtcttggttggaaggcc

SEQ ID NO: 133861 - DNA, 340 bp, Zea Mays
gtttgctactgtgacgctggtctctgcagttttcaaatgtgacactatttccttccaaacacaaaatggaaacgtaaaggctcaactgcttcacgtcttcttctggtctctggccttgcattagtagtagtgtgttactacaataatgaaacaaacttggtccttcctccagtccagtcaaaaactgtgttctcaactttgaaattttaaagaggcatggcatggcactggcctgacagacggcggaatggacatgtcttctcttgcgtccccgaagcgccaagaagattcaaaaccggcatgcaaatcgtcagaaacttgcagcaacgctttattcttt

SEQ ID NO: 133862 - DNA, 502 bp, Zea Mays
gtgacgcaccgatgggtggcgagtttaggcgctgggagcactgagttgtcgcgctttggccatggccaccgtcgtgcgggttttgtgcgtggtcgtggttgggcgccagggggaaagatggagcgaccaccgtggatcctccaatcgacggccagaaattgatgtgcgcttaccccttcacggggttgatctgtgccatgggatcgataatggagggtgtagattggtgcaatgtgtggttgctaatcggtcgtcgatcgacaatctggcagtcaaggtggctgaccggttttgtgatttgtgtgatctagtctgatccgtggaagcagatcggacggctggggtcagacgataccccttcgcatgcaccattttgcatatgaacccctaaggaaatgttgaatcaacctgcaatcctctcctagtgttaaactaatttcagtcgagtcctgagttttataaaacaacccctggccttctgcgtttatagtgtccacggtcc

SEQ ID NO: 133863 - DNA, 426 bp, Zea Mays
tgacagttgttgggaatctatcaaattcctcgagcgtagactccgctagctggggtataaaacccatgcatcgtcgtgcccctcagttcgtgtgcggagtcaggacggccagccctcactcagcactgcatgaatggagagatgtgtgtgtgtagggagccgtcgcgcctgagatctctccgcattaccagtgctccctagaatccaagccccgatgttctgttggaccgcaccagtactcgcggtaccctcgccatgctcacctggtggtctgggtggctggaacttctcgtcggtggtcggtcacagccatggatccgcccaacgtcgcggggagccccgtatcttttgcccctatcggtaagaacccctctgttgagttcgccatcatctcctctgttacagaacctcccaaggtattaggcc

SEQ ID NO: 133864 - DNA, 377 bp, Zea Mays
gtctagagtatactgggaaaaaactagggtcgacttgagcttaatttgatggtttgggcatttcaccaagcagttggtatgcatggttttgaaaagggtgtgaaatgggtgtttctaggtacaaaacctcccaaagggagcacaacacctacaagggatacatactagagtactagagacacaaaggttcacaggaattacacaatctcacaaggatttcatagaattgcacaagggtgggagtgttcttctttggagaggaaaacagagagagaagagggggagtaagcgttgcagatatcaccagagaaggaaggaggagcactagcacaggagagggtcaccggagtctggtttgacggtggtggccgccggcg

SEQ ID NO: 133865 - DNA, 321 bp, Zea Mays
gcagtgcaaacagcgaatgagcatgggtgttcccagcgatctagggcagtctagcctaattgaatgggtcgaggagcaactgtggtatgtaggagtgctgaaacaagagagtagagggcaagaccggacctgaattgcactgaccacggtgagagcttgttcacggtggcgtaaaatagatatgggaaaccgagcaattcgtgggctctggtgagtaattggaggcacgagcgggtggattggatgctggaatacctaacggagccgagggtgtgctcaatttatagggctcttgagcggcggccggtgaatttgaactcg

SEQ ID NO: 133866 - DNA, 434 bp, Zea Mays
atctgattcccccagtgggcttagcatagtgaaaggcaaagggtgcgtcattacctccgaaatttctataacgccaatagaagatgtcgaaggggtctcatctcagggacctgctttggaggtacaagtattttcttctcagcacggccaaccttcgatgattttcgctttttaggggcaggggattttggccccgattgtgaagactcaccttcatcagcaatctttcgtttcttcggaaatatccttttctttttgtcctcttgaactgacctcatagcttgtattttcataatacttagaactcttttccttttcactccaccagcttcttcttcaaacctttcgtaatctagataatcaaattccagcgcgtccatgacctgcttcaatcttcgtttatcccgatttccgaaagcgacagtcattagttg

SEQ ID NO: 133867 - DNA, 531 bp, Zea Mays
accaaattttacctttccccactttgacggtgaagctgaccccttgccttggatcaacaaatgcgacacatattttcgcggcatgagcgttcatcaagatgagcgggtttggcaggcatccttgcacttggaaggcgtcgcagcggagtggttttatgccctggagcgtgacattggttgcgtactcacttggtcaaggtttatagaattcctccagatgcgttttgggccaccactccgtttcaatggcatggctgacttgaaagcattgcagcgcaccggcaccgtcgaagactacactcgaccgtttttaacaatcctgtgccgttgacatgaatcatcggcagcagaccaacatgtacacagtaggattgggggagcccctacacactgatgtggagatggagatgccagagacacttcaacgggcaaagcatttggcccgagtgtatgagaggtgtctgctgctatctgccagctccagcacacctcatatcaggcaccagcagagccatccaaatcctcaacaat

SEQ ID NO: 133868 - DNA, 281 bp, Zea Mays
cgaagttcgggtgcttctaggactaggtttggttgcacgttggaggtagtcgtggtactagggatgcttaatggagtttaggaagagcagacattgttgccggaagagccaagacaatatgtggtgctatcctagtgtgaactctagtgagagccatgatgcgattgttattcctggaagattcaagcatggcaaagttccaaaaggtggggccaagggaagacaatcatggtgagccactaagaagtcatgaatctagagtgtctcgtcgtcgacgcgga

SEQ ID NO: 133869 - DNA, 894 bp, Zea Mays
gaaaagtgagggagcctccttgatagcaattccgacatttagtttagatgaagaatcatcatcatcatcatccgagcttgcatccgaatcccattcaactagataggctttgccatccctcttcttgtgaaagaacttctttttcttcttatcatctccatccttacccttgttcttcttgcttggacaattcatggcaatgtgaccgggttccccacactcaaaacattttctatcattgaaggcatttcttctatatgtttgtccccttctaggttgacccttctttttcctcatgaacttgttaaatttcttcacaaagagagctaattcctcatcactttcacttccatttccttcatcttcactttcttccttttcaattgcctttgaaactttagctttgagagctattgattcccctttcacctttttagccaaactcatagcttcggcttgagatttcttgaatatgtcttgagtaagaatttctccaaatacttcagttggagaggtagcggtcaaatcactccttactaacatggtcacaatagtgtcatatttttctggaagaaatctaaggaacttgcgagtgaaatccacatccgatacattaaaaccaagtcccttgagctcattcactatctcatttaagcggtaaaacatgtctgacacactttcatcttccttcatgagaaattgctcaaactttcctttacatacatacaacttttcactcttcacaattgtggttccttcatgaatttccattagctttgtccaaatctcatgagcggttttgatatttttgatgcggttgaactcatttatgtctaatgcatcatagaatacattcatagcttgatcattggttagaacattttcatgatcatt

SEQ ID NO: 133870 - DNA, 887 bp, Zea Mays
tggcacttgggccgaatcttctcactggcagcccactcaactcccttggcccatttcttcgtcaggcgcactcgcgcacggaccattccctcgcatgcgcgtcgttccaccgacacctgggcccctgcaccagtctgttgcccgttgccccttctgtttctcttacgcgtgggccgtggtcactgttgttcttccaataacagaagctccgcagctcctccgctcaccgcgcgagaatctcgctttgggcccacctgtcatcccttcgcgcggtcgcgataacagccttcacaagatccacggcgaactcctctgaactgattattctgcgtgtatcgcctcccggatctccgttcggccgttcgggtccggctccgtggcgcataagtagcgggcccctgccatatggcacccagtcgtgacccctccggtgccatccattgtgtgattgtgtcttgctgccattagcgcagggaggaaggatcttgcccaccgccattaccgagctgagagcgaagcgtgaaggaagagagtataggaattgccgccaacgtggaatctcgctcgctggcgtcgaggtatcgtcgtgggtccgtgcggtggcatggttgggaactctgcgctgggtggatcgcgatgagtaccttctcgggttattggtccttgtctctgcttcgcgttgtgtcgctcagacctggggttagggcacgatagctggtaggatagaaccgggcgctctggcgtgcggcgctatcgcaccgttgtcgtgcgctgtcagggaggaaggctagtcgctaggggaggcgcgtggactagggcggaaggtagaagaaggtcgggcgttggccgtggatcggcaaccaagcacggaggattagagctggccg

SEQ ID NO: 133871 - DNA, 340 bp, Zea Mays
tccagatgaggatagttcacattcagatattttacttctgtttgaaaatatcaagaaagaagcatgtgaagtcaaggatatacttctgagagtgtctaaatgggaaaatgagataataaatgattttggaggaatagctagacatttggatgaaatcatagaagaaggcaaccagctcaattcaatacattccacacttcaaattgtaaacactgagatgtccaagttaaaagatcgtatgcaacttcctctccatgttcccatgatcaagccaatagctcccacaaccttgccatcatctgtaccatccaaatgggttcacgcaaaagtttcagagcag

SEQ ID NO: 133872 - DNA, 555 bp, Zea Mays
gtaaaaaccttaatggaagatttttcccagtagagctctagggccaatatgagatccacatagtccaaaatgtaaggcctaggagagcgacgcggcctcctagggggtcaccatggagcgtcgtccccacgtcctgattatccactagcactagtacatcctcaacgttctcgagcacactaacatggctaactgcaagactgtatgactctagtgaacacttaggacaaggcctcctccaacgttgggcccctagtgatcgataccattggatatcagagtattgtcgaggccctatagtgcctcatcttcactggggcccaacatcgcctacaccgtccagcggatatgcctccatatgcatgaccttcaagagctgcacctcatcgccatgaagtgaaacctatggtacctctagggcaaccttgaattcagcatcatccttcgtcgctcctccaccaccgaccttgttgtctacactgatgtcgacatggtcgggtgccctgataggcgctgatgaggacatcacccccatacaaataatgaaactggggg

SEQ ID NO: 133873 - DNA, 417 bp, Zea Mays
caacgcctagctagctaggggcagaacggtcatcggatgccggacacagctttgggaattgaggacgctggggtccctttggcgaacaccgtcgtcatttgggtgtgccacggtctgccactaccatacataccatcgatgccctctgtcatgcttccatccccggccctcttcttccttccacggcttcgctttcaagttccacttccacacctcgtctcctcagccctcactgcctgagtgcctgggcggcgttgcagtttccatctctctttctactagcttgtctttattttcttcctctaatttactgtccgtttgtttcgcttcagatgcctagtcgtcgccagcaaggggggaaaggcgcgcggttggcgatcgagccggcgtgtgtactggtgtcagtcagtgtttcac

SEQ ID NO: 133874 - DNA, 572 bp, Zea Mays
gactacttccttagtaaatatctgaccccaggtgagtggataacaaatccctcccttgattcagtgctttgtatgcaatgcttatccacaaaagtcttgctcataaaggtatgtgatgcaccaaaatcgaaaatgataactactgggtggttggcaacaaggaacatacccatcatcaccggttcgccttccagtgtagtaggcacctgggtataatacactcgtccagtcttcttcatatttctgcccggtggaggattggtcgtgtttccctttccttgatttgtgttcccggaagtctgttgaaagtttgatttgttctgcttcaggtaggggtagtctttgatgaaatatccggacttgccacaattgaagcagccactcgaggaactgggaagggcagggaaacgagcaccaggggcactcggctgattggtctgggtgggggcaggagtgggacgaatgaacacgagttgtttgaagggatatgtgggtgggtgagtagaagaacgatttgaattgaaaggtcagattaccaaccttgtcctcttttcaggtccctgagttgatct

SEQ ID NO: 133875 - DNA, 491 bp, Zea Mays
ttcggacggaggttgcggaattgcgtgctgagtgcgtggcacgccactatcttgatggtggttctcccgcccctgtagggattcagcacccttaccgttcaccgtcccgtggtcgcctcgactatggtaccccagactgcaggacccacatagatttagatccatagatcgatggagtcggagtctgtaataatgcttacttcagtgtcttagtctagttagtcttagttcgagttagtttgcttatcatatgttgaaatgcttgtcatgatgaacatgtaatgaagttggatctttgtaatgattgtcatcaagctgtgggtatcccctataacttggtgtagttattagtaaagtcagttatttagttgggtaatccatgtgtttccacttccctctttatttgagaagctatcagtgaagatgatcaattgttcagtgctatgaagattttcgtatatcttttcttatgctgaaagactgcagagtca

SEQ ID NO: 133876 - DNA, 458 bp, Zea Mays
gttacatcatagatggggcatgaaaaaccaaacaaacccaatacgataggaaaccaaacgtagcgcaacactcgtacatagaagctaactgaaagaggacgagcaacatgacatgaagccaaacccagcgctcggagatacctttaaagcatgagttttgtgtgtcgtgcgccatacgtgaagtgcgtaacgtagatggttttttcatgtagaccttcaaatgaccttgtatgaaaaaacaaccaaccctaaaccctaaaccccatatctcaccaaataaccaggtctgttacgagatgggctatgagaaaacactaaaatccagcatgacacgaagccacatgtggcgtatcggtcactgctagcacctcgctagctgaaggaggacaaacgagctataaaaaggacaagtcttcttttcaactcatacttttctcgaccatttggctaagacaaac

SEQ ID NO: 133877 - DNA, 490 bp, Zea Mays
cgtggcgggagcggaggccagagtggcggagaggcgaagctcctcgagaaggaggtcgttcttcacctccgcaaaggtggcaaacggcttcatgcgggtgaggatgggcgtcacacgatcgaagcggggctcaaaccacgtaggaggttgagcacgaggctctcatcggtgatggaggccccgagggtgcggagagtgtccgccatcgtcttcatctggcggcaggactcgtccacagagagatcgccctgagcaagctggcgaaaggcggtctcgagatacagaatctgggtctggcggttgccgaaaaactgggcctcaagggcaccctagatccggtgagccgtatcgtccgacacacgaacgatgtcctgaagttcgcccgtgagggtgccatggatccaagaaagcaccacctcatccatcaggagccaatcctccgtcgggtcaggaaccggggagagaacgtggtcggcgagggcgtagcgac

SEQ ID NO: 133878 - DNA, 508 bp, Zea Mays
cgattatcctggtccggactactcgtggccctacttccagcagagaggatgatacttgtattacttgcaccttggtgcttgtagtaggggtttataagcacagtggaagagtggaagtccccaaatccctagagatgatcgagacaagtgccaatatctaagtcaaagtgagaaaacaagaactcgtctacgtcatagatgcccctcctcccttgtggagggtctcctgccctatttatacacccaggggagcgcccttggtgaactcgggtcttatattcgaaggagagatgctctggcgcctgatgtgacggcgggtcgtgcagtagattcgcgcctgctgacttcccgtagagagccgaggccaagggatcgttcgtacacctgagctcccgagggagaggtcgcccatgccgtagtggttgtaacaacgccgggatatgggccaagggccgcttaggggtacgtcatcgtcctggcgcgtgatgacgtcgagattctctacagc

SEQ ID NO: 133879 - DNA, 375 bp, Zea Mays
cttgtctttacattattacatcatattataatttaatagttgaaactaaagtgtccgcgccaggaacaaaaaagtgaaacaaactgctggtcaactggattgtctgttcatcagactccaacaaaagaaatatgtgcacatcacgcaggacattaagtctcatcagtgtatgtatgttctgttctgtctgtcccccctgattatgtcccagcgcaatagaatccctagcaagcgatgagcaacaccatgcaatgatcagatgtgatgcccaagcagcgaagctcaagacatcgaagccacttgcacactaaaagtgatggcactcactctgtcatcaaagaaagagaccactgaaagcgatgctagtatgtggac

SEQ ID NO: 133880 - DNA, 912 bp, Zea Mays
caagtggccacacaaaaaacaaagattagtgccctacaaatggccctgtcagataaactgaatggtgttctgattgaacagtaactgaataagatcgcagattcaccccctcgccgccggtgaccttgcgcctagatccacgcccagtcgaacacggataacgctcctcggtaagaaatatcgcgccgtagataacctccggccactgttctcaccggccgtcgtgtcctgccgcggttaatcgcgctggcatcaccggagttcgccgttatccggcccggctgcgtgcctcaaagccttaccacatcgcagtgagtcaccgtaagccgctctatatcactggctcgtcgccggtgagtctgccacgatgaaagacacgcagctcttgcgccagtacatctcctctccgaccgccaccgcgccaactccaattcacgcgccaccgcccctggagcctataaattgagcatgccgtcgggtccataaggtagttaagcacccaacccaccaagccatgcctccaatttctcaccagcaagtcccaatttgggatttcccccaaatcaaccaagaacaccgcgcggtgtgacctcgccgtggccaacatgttataggtccgttcatgtcctctggttccttgtttcagtatccttgggtgctcctgatactctctgacccgtccaattgagctagaatccattggatcatcgggaacatctcggtcggtccattcctcgcgctgtcaccatgaataggatgatgtagagctcgaatccagcaattaagtgaggggaaatggtcgcgtagggttgaattcggtgtcctgcaaaggggagggctagccgttgcgtagtttggccagtacaggctcgccggagctcggtatttgcaagtgtcagtgagacaaacaaa

SEQ ID NO: 133881 - DNA, 320 bp, Zea Mays
atttttttacacccaatatctttagtttaggatttccctataaatactttcacgtataaaaaatcccatcggccaacggttccctttttttagcctaaaaagtagtttgactttcatttccttccgctgatttatgttgatgccctgcgcggctctacggcaccaaacgacggcgagtcaccagaccatgcaagacgcgatcgtctaggtcatgtgatcgctgacaacattgatccattgtgttgttggctactggtggcaggatcttgttacttcgacctgctccattctcctgttcgaactagtggaacgatctcctt

SEQ ID NO: 133882 - DNA, 461 bp, Zea Mays
ggaaacgagtaccaggggcactcggctgattggtacgagtgggggcagtagtgggatgaataaagacaggctgcttgaatggatatgaaggtgggcgaggcgaagaaagattttgattaaaaggttggatcaccaacctagttctcttctcaggtccttgatttgacctttcacctccaaacccctttgattttccatgtcccgcatttttggcttccactgccagtgctgtactgacagccttactttaggtgaggtccaagcatgttgccattttccgctgaagcatgtcattgagccccctcataaaacaattctttttcttcaagtcggtatccacctggtcaatggcatactgagagaggtggttgaatttgttgagatactgcatcaccgtatctcctccttgcctcaatcggataaactcttctagtttcatctggagtactccctctagaaca

SEQ ID NO: 133883 - DNA, 306 bp, Zea Mays
ttaactgaaactgataccaattgttgtcttcagttgagaaatttggatatatcagatttccactgataaagtaaaaggtctaaaaacataaaaggtactttgttctactttcacatacatacctaagtgtttaacagaaaagtatcctttcatgcattaccaaagtgagagaacagcaaattcatttttttagcctgtcatgtaagcatgactgtcccaatactacaaccatgcagtgcatgaaggtttcagatagctaattctgaggcagataagggtgtcggcaccactaattatgaaagttgc

SEQ ID NO: 133884 - DNA, 473 bp, Zea Mays
gtcctgtgcaaacgtttcggaaaatggtcgggctcttgggcgaagcaatggctttatgttaaaattgatctgagtaagagggaggatgtaaagggcataatccagcatcccatacgatcatgcttcggcatcaggaagccttcgatcgcaagtggaaacgaagtacatgcatgtttgatggccttcaacacagtgtgtacttactttggcaccagagatttggtttaggagcacattgcttataaggtatggccacatgttaatgattgggagatgtcgaaggagaccgctgatggctccaacgaaggtggcctggtctatctgagatacacctgtcgctacagaagttagtttgacgagccgaatgatggctggcttgaagccgttgaggcaaccaatgatgagctgttgtgggcttatacaaaggcagaggacgaagccatgaacactgccttcgatgcccaaggcaaaat

SEQ ID NO: 133885 - DNA, 295 bp, Zea Mays
ccatatcctacctttttgttgtgagttccaagtcaagatatggtcggggtagggagatagaggggtgagaagtttcctatgtcatagctgtccaaaccgggacaaaagctatgccaagtcgtgtcaaacgacttagggtaggtgtcaacttcctccagggaattctatgggtaatttggcgccactttgtcaattgggtcgaagtgttttgaattttggaagagggtgaacatgtgtgatctttggccaaaggttagttttggacttaggcattttctgatttttcttttgtgct

SEQ ID NO: 133886 - DNA, 454 bp, Zea Mays
tgaagggcaagggattggcattgtgcttgtttcaccaagtaatgtctccttcgacttctctagccgattgaaaacttattgcactaacaatcaagccgaatatgaagcccttttgtttggcttggaacttttaaattgtatgggagtaaaacatgtaaaggcatttggtgattctcagctggtcgtccaacaggtgttagaagaatatcaatgttttgatggtactctaaatagctaccttgaaaaatgttggagcataatccattcttttgacgaattcagtattcggcatatctctagagttgagaatcatagagctaacaatttggcacaagatgcatcaggttatcggataaagcgagagaaatttcacaacattgaaaatctgataaccagtgcagggccaaatccccaggtcgcggaccatccgcgtgaagacgccggaccgtccggg

SEQ ID NO: 133887 - DNA, 568 bp, Zea Mays
ctgtctgtacaacttctaacatggccaatcagcaactaagaagtgaatacccaagttcgaaatgagaccatttcccacttactaagcactaccttttccttctctattttcagttttttaattcagaccacaataataagtaaacacttgaagttgacaatcctagtatatatcttggttatttccttccaaaatattttgttagcacgatatgattaccctcccatctgactctcccctggtagcatccacctgctctgagtgtttgagtagtatcactagcagtaaaaatccattgattacaaacaacgagcagtgatcaggacacatctggtcgataatgctattttgatgaatgcacttagtttgtaatatgtaacagaatcacagaacaatgtcgatgaaagagcgacaactgagcatttgccatgcactttaattacttttatgatcaataatttaatacaaacatatgtctctaccaatgttaaaggatttttcacgtacattttttgttctacaaaagaaaccgaggaaacaactcagttcaattgtgtaggcacaattt

SEQ ID NO: 133888 - DNA, 553 bp, Zea Mays
ggaattctcatataacaacaaccatcaggccagtatcaagatgtcaccgttcgaagcattgtatggacgaaagtgccagacccccctaatgtggtccaatgtaggggagaggacactggaaggacctgcctttgttaaagatgccaaagagaaagttgccctgatccgcaaaagattacttgaagcttagagtcgacagaaaagttatgcagacaacaggcggagagaactcagatttgaggaaggagatttcgtatacctcaaggtctccccgatgcgtggtgtcaaaaggttccaaatgaaaggaaagctagcaccgcgattcgtcggcccctatcccatcattggcagagtgggacccgcaacataccgccttgaattaccagaatccatgtcagatatccacaatgtgtttcatgtgtcacagctccgtaagtgcctgcaagtaccagagaaccacatcgaggcagagacaatccagattcaaaaagatctccagtaccgagaaaagccaataaaggttcttgactcagcagtctgaaagactcgcaac

SEQ ID NO: 133889 - DNA, 290 bp, Zea Mays
gaataagctattttatgggcttccttgaggatcagctctcgaattgatttgatgtcaggaacacacaacctatctttaaaccatactatgccttccacgtcttcccggaaatacttgcctttctcgtctaagatcagctaccgaatttcattgatcttctcatcatctttctgcccatccttgatatctcattctagagtgggttctagctcaacttccactccttgggtgctgtttagaaatctaagactcaacctatcaaattcgtttgctagttcatatggcatcag

SEQ ID NO: 133890 - DNA, 595 bp, Zea Mays
cccaaatataaacacttaatctaacaatagctttaggggtcagctgatgaaggtaaaccccaaacttcttcaacacatcagcaatcatcccattcaaaggaaatcttaatcctgctttaaagaagcttttgaacacaaccacctcattcttttccggcttcggagtaatctcctccccgccaaaacgaaccagctccttttttgtttcactaaagtagcccagcttcaccatttttggaagatcaacttcagagatggtggactttccaaagtccaaatgactaggtttgcttgacatcccgctgctgtactcatcttcggtaccaacttcttcaacatcagcttgcgttgcttcggcagcaggtgtgtcctctgatggaaccagcccagagcgcctcatcgctttagaaatcggaacagtttcaacggcttcggtctcgtctccatcacgctcaaccctagcagtggagcgtattctggccatttgattttaaattttcttgaaaaaattctttggaagtcaataaccttttttccgaagctatcctcgtgacgaagcacaatccaaactggagcttcgtttgaatgcaaaaat

SEQ ID NO: 133891 - DNA, 939 bp, Zea Mays
gggagagagggagagtcgtatagaacgtagagagagatggagagtcgtatagaacgtatagagagggagagagggagagtcatataggacgtagagagagagatggatagtcgtatagaacgtatagagagggagagagggatagtcgtatagaacgtagagagagatggagagtcgtatagaacgtatagagagggagagaggaggagtcgtataggacgtagagagagagagatggagagtcgtatagaacgtatagagagggagagagggagagtcgtatagaacgtagagagagatggagagtcgtatagaacgtatagagaggtggaatggtgttgcgtggattaaccttgagtcaagtcgtggacttgtgcccgtacacggttgcgtgtgttgtttatgtgcaggtgatgattgagacaaagcatggtcgccagcagcgacgaaactagattttggtataaagttcagggaggaactgaggtccttaatcggtgatgttgtacgagtgttttggtcgacgcatcgttgcgtatcatgattacgtgcgtcgaagacgtgcacggaatgacggaataatgcatttgagatatattggggagcacaactatggtggaaacaatggaactagtgttttaatttagtagagattttatagatctcaggattcattggttcaacgccattcatcttctctctctccctctctcctctcctctctcttccctctccctcctctctcttccctctccctctctcctctcctctccctctctctcactcctctccctctctctcactcctctctcttctctctctccctccctccactctctttaatctctcttccctttccctctctcctctcctctctcttccctctccctcctctctcttccctctccctctctcctctcctctccctctctctcactc

SEQ ID NO: 133892 - DNA, 286 bp, Zea Mays
tgcatcaactcgacgttaagaatgccttcctccatggtactctgatagggacggtgtattacactcagcggtcggctttgtgcaccccacgcaccccgacatggtctgcaagctcaactggtccctctacggcctccactaggcgcctagatcttggtatagttgctatgccacattcttgatttcacaaggcttcatcgaggccaaggcagacacctccttgttcatcttttgccatggcttggatactgcatacctcctcctctacatcgacgacatcgtcctc

SEQ ID NO: 133893 - DNA, 521 bp, Zea Mays
gagctagtagagaagaacgctaggatagccttgttgagaagtctagctcaatgagtgcatatgtacctgctcagtgttcactctatgagggcttgcggctagagcttgaagcctgtagacatagctagactaggatcacggaagaaaatacataccttcgatcagtgttgagctggctgtctagtagtgagcccccattgggcatgatgattaactagttcaagaggggaattggtgaactgaggttaggctttgctgctagggatgggaatgccacttgttatggtaaggtcagtgagtgcagtggcttgacacctttagagaaacctccagccacctcccagcctattagattcactccacccaaacttgtcaccccaactgtgaaaaattgagtgtttgaggagtattggagagccccatctcaaaaactaatgtggtgtccaaaacccaatcatcttaggaacacacttgacaccatgcacaacatatctagtgatccccttcctagagcacctcat

SEQ ID NO: 133894 - DNA, 601 bp, Zea Mays
gacggaaagggtcaacaaggttctcgaggatttattaagagcctgtgtgttgatgttcgacagaaactgggagtccagtttgccgtatgctgaattcttgtataacaacagccatcaggccagtatcaagatgtcaccgttcgaagcattgtgtggacgaaagtgccagacccccctaatgtggtccaacgtaggggaaaagacactggaaggacctgcctttgttaaagaggccgaacagaaagttgccctgatccgcaaaagattacttgaagctcagagtcggcagaaaagttatgcagacaacagccggagagaactcagttttgaggaaggagacttcgtatacctcaagatctccccgatgcgtggtgtcaaaaggttccaaatgaaaggaaagctagcaccgcgattcgtcggcccctatcccatcattggcagagtgggacccgcagcataccgccctaaattaccagaatccatgtcagatatccacaacgtgtttcatgtatcccagctccgcaagtgcctgcaagtaccagagaaccacatcgaggcagagacaatccagattcaaaaaaatctccagtaccgggaaaag

SEQ ID NO: 133895 - DNA, 569 bp, Zea Mays
gcgcatcttcagctcgaaccttcaattggtggtaaccagatctcaaatctatctttgtgaatatcttagctcctctcatctgatcaaacaaatcttcaatccatggtaagggatatttgtttttaatggttacttcatttaatctcctataatcaacacacattcttcttgaaccatctttcttatccacaaatagaactggagctctccaaggggacgagcttggatgaataaaacctttctctaatagttcttctatttgtttctgaagttcacctaaatccttgacatccattctatagggtctttttgatataggtgcggttccaggtaataattcaatagagaactcaatatctcggtcaggcggcatacgtggtaattcctcagggaatatgtctaggtagtcacagaccactttgatttcttctaaagacttttcccaatctgattcatgttacttctgcatctattgacatgtctgtgctaactttgattctttctccttgtggacttgtcaacataactattccgttggcacattgtaccactccatcacaacttttcaa

SEQ ID NO: 133896 - DNA, 338 bp, Zea Mays
gcgacattataagcctgttgctgtcaacttcctctacacgtgtccttgtcaatggggaacccgggatgcctattattcataaatggggtctcggcaaggtgatcctcttcccccatgctcttcatccttgttatggatgccatgaattatctagtcaagtacgccaccaacaatctgttgctgcagccccttgctgtgcagtatgccaagcataggatctccttctatgcagatgatgtcataatctttttgaaacccttaaggacatatctgatggtaatgaaatctattctaaacctgtttgggcaagatgctgggttacattgcaatttaaccaa

SEQ ID NO: 133897 - DNA, 624 bp, Zea Mays
gcgcactgagctaggttgtgaatgtcttccattcacaggataatcaatatcctttaggtgtccatcaacactaggttggttaccaacgaatagatggtctgcatttactatctcagaaggtctagccttcattagcttgcaagcattttaatcctaggatttgtgaccatacttctccccctcttatttacaacatcattgtaatagggagcttagtggtgttccatttaaccactctttctggcacttccacataggattaatttgagtgacacctcatagtaaatgcacatggcagtcaatttgcaacttcttgcaaatcattcgaacccaaaggttcagttttagtacgtgatcctgagcctgaatgcttactgcattcatcatttcctggcattctttttggtactcgaaatctccccctaatgcctggaaaagctcatgattcaagcaagcgtacgggccgtaaatagattctcatgaagagattctaaaacttaatgatcgacggagaatgaattctcacatagatccccagctttctgtgtgcccatacatgtacgctgcggtggtgagattgggaacatacccaatgtacgcatgggaaatccttcactgattccc

SEQ ID NO: 133898 - DNA, 1054 bp, Zea Mays
ctgctttggatacgtactcgggatctcttggtaatctgcctaagatgccatttcctgggtttgatggcgacagtcctaagttgtggcagtcgcgttgcgaggattactttgctatgtattcagtacaccctagtgtgtggatcaaagtgtctaagatgaattttactgggccagcatcacgatggcttcaatccattgagcatcagttgccatatctcacatggcctgatttctgtcacatgattggggaccgttttggcaaaaatcagcacgaacttcttattaggcagctatttcacattagacaaaattctactgtcactgagtatgttgagagattttttcagctgatagatcaattgcatgcatataatcctcatgatgatcctctttattatactactcgcttcattgatggtcttcgtgatgatattaaatcagtagtaattgtgcaacgacctaaagatttggatactgctgtcgttttggcgcaattgcaggaggaagtcagtgacaagaagaaagacggtcgcaggatggagatgtcatcttattctcagtccttctccaaaggtcctttgccttctcgtcagttgccgaatgccaaggttgctgactctcctgctactactgaaaagaccactcaagataagctggcttcgttgtttgcatatcggaaagctaaaggcctttgttataaatgcggcttgcaatatgccaagggacatcgttgtgctgatacagtccagttacatgtggtggatgaactatggaagttactggatctgtctgaccaacaggaagatgatatatctgaagcatccgcagaacttcagttgtgtctgtctcaagctgctgtgactgatatttcagcacctaaaacagtaaagtttgtgggtggtattcaaggaattgatctgctggtattattggattcgggtagttctcattcatttcttagttcccgggtggcccagcaccttacaggattaacccctatgaccaaggaattgtctgttcaggtggccaatgggtgtcaaatgcagtgtactca

SEQ ID NO: 133899 - DNA, 363 bp, Zea Mays
ggaaggacatgcatacccgatgcagcatccggtttattttatcagcaaagtcctcgggccctcaaagataaggtatcctcaagtccaaaagctgttgtacgtggtacttctaactgctcgcaagctccggcactactttgacgactacaaagtcatagtagtcacatgatttcccataggtgatattcttcacaacaaagaagccattggaaggataaccaagtgggcatgcgagcacggggctcatgacatagagttctgaccctgcacgacaataaagactcaggcactagttgacttcatatcagaatggactgagcaccaggtcccggagagcccagaagttgctgaagtatggagaat

SEQ ID NO: 133900 - DNA, 368 bp, Zea Mays
cacgatctttgatcacagattattattatcatatcatcagctacttgatctgcttttgttcatgccgaaacttcaagtcagcgttcacactacctttccgttttcttatgtcatcaagcatttaagccccctgttttagtaagtcaaccgcgaaaaggaagaaacaagacccgttcaagcaaccactctttcagatctcgcggaagacagctaaccctgtgtgctatttcgcagaaactaccggatgcaacaaccacctggagataggcagctcagggaaacctgcaaggctacaattacctgtactttggctggcatgcactgggagactctacttctaaggacctccatggattcacccccccccc

SEQ ID NO: 133901 - DNA, 375 bp, Zea Mays
cagccgtcgaccttacgtcatcgcgccccctcctcccagctctctgtttggcacatatactcccaatggctgccagcaacttccagcagctcgcagccatatcccccgcgagctcctctgttgcatttgtcgtcggacatggctgctactccctctctccctcgtcgtgcaacgcagcacactgccttatgtcttcccttttgccgcgcttgcgcattgttcaacaaaatgccaaatagcagcagccccctcggccttgaggtgcgctgctagcaaccgagtccctcgccattgcacctcgctgccacctgtttgatgttgtgcgcagcaagccgcgcgctgccttttctttgcagcagtgtgaaggcctgcgac

SEQ ID NO: 133902 - DNA, 363 bp, Zea Mays
tcccccaaatgcatgtgactggcagcgatgaactcgacctcgacggcgggggtaccttgcgtgcaagtggaatagctttccgcccgtgtgtgcctggacgggcgagagtcgtcgcagatccgttagattcatccttgttcggcggcagggagttctttgacataggtactaaagctagaggcgcctctactgtgcgtgctcttggaatcgaccttttgtgtgctgatatgcctagcgtccactttatctgtgatgagttattgattcctttcactacatatgtactactttattttgtttcctggttaatgctgctatctgaaaggggcccaatatactacatgtgcatgcagaacatcttca

SEQ ID NO: 133903 - DNA, 316 bp, Zea Mays
ccgatgttgtttgaacggtggagattagaagcagcggtgtccattcggggatgatgtttgggtcgtttgatccgaaagcaagggccacgattagatctccacgtaatgtgttagcaccgttagattttaatccaatggatatcgtaacgtactggttggcagatatgtctgatctaatctgcatcgcccgcgcgtgatccaacggccataatcgaccgataccccttcgccgtgtcaaatttgctaaagaaaccctgactaaaacagaaaacaacccgcagtccttccctagctagtctgtctcttagggtctttt

SEQ ID NO: 133904 - DNA, 344 bp, Zea Mays
cgagtatcagtgtatcaggcggctcgcggcttgcccacagcgaaaaagagaattgtgagtggagacgcgagctcgtgaggcccgaaacaaggacgcagagctctgattccaaggtggcccggaaggcctctacggcccaaaaaaattgtaggtgtttatcggggagaggtgtagttgttgttggaccggactgttatcgggatatgctctaaactggataggcgtaggaaggagtagttggactcggcccttttcgttcttctgatacaaggacgtgccacgcgtatcgatgactcggtactgttctccacaaaagtgtgtttactcgaaagcataaagtcaga

SEQ ID NO: 133905 - DNA, 331 bp, Zea Mays
ggtttctgtacctcctaccactcagtgcttgcatgcaccattattgtatttggaggggtttatagtcttgctagaccgtaccaaccatgtttctggtgtggctatcactatgtccctaagggaacaaggctcacaacggtttggccaaaagctcggtagtgaagctagaagggtgcggtctaggagaggtcatctcagagatccacttgcacatggtgaaggctagaggctatccaaggagttactcggctgtggctagaagcttggctcttgtgagggcatcattacgagaggctctagcgaggaatagggggagtgtgaacttctcaat

SEQ ID NO: 133906 - DNA, 1124 bp, Zea Mays
gcacgcaaatggccatgttacaggtatggtctgcagttgttgcgctagtaaatgctattgctttgacaagaattggcaagcttcacatctctggactaactcggctgcatcactctttgctgtcggccagtagaaaccagacctgaagaccttcccaactagagttctggatgttgcgtgtattccacactgtccggcgtgaatttcatctagtacctgtctcccagtgatcgaggaaatgcatttcatgaggactcctgttgcaccccttctgtataatgcctcccctatgagggtgtagtgggttgactgtcttgcgatacgctctgctgcggcattgtcatccggttcttctttattttttatatacttgatgataggctcactccagtcatcagagtctgattctggctggctcaaagcattgcactcttccgcctgatccgagggaatgcttgggcgtgacacttcctagacgaaaactccgggtgggacctgagctcaactggatcttagtttcgacaacgcgtctgctactgcattgtgatctctttccacgtgatgaaattctagcccttcaaatttgtcttccagtttttggacggctgtatagtacttgcccatagaatcattcgagcaatcccagtctttatttatctgacttatgaccaccagtgaatctccgtataccatcaacctcttaatgcccagtgatatggcaatgttcaatccatggatcagagcttcatattctgctgcattatttgatgctgagaacgacaactgaagagcatatttgagttgttcacctctaggggcaatgaagaggattcctgcgcctgctccctgtagtttcagcgagccatcgaaatacattcgtcatacttctgcagcctccgggttgtctggtacttgttgctcggtccattctgatatgaagtcaactagtgcttgagtctttattgcagtgcgaggccaaaactcaatatcgtaagctcctagctcgcaggcccacttggctattcttccaatggcttctttgttgtgaagaatatcccctattggaaacccggtgactactatgactttgtggtcgtcaaagtagtgacggagcttacgagcag

SEQ ID NO: 133907 - DNA, 441 bp, Zea Mays
ccaccgctgatggcggagacgaacttgcctcgcctgctgccgttgctggcgtagctgcgtctatcgtgcagtagctgcgatatgtgagtttttttattgagtttgaaaaatgtctatgtaaggtgacggccttcgccgaccaggttgcttcggaggcgctgacctcgcatatggtttccaagaggaaacaacttgagggtagggttgagcgcctttggacgtagcataccgaagcaattagggacaagtcggcggccgaaaataagagtcaaaaccttctcgagaaggtgacggcgcttgagagggaaaaagaggacctcacctgtcgacttaatgatgaaaaagaggatgcgaagaacgcccgcggggaggcctaggctgcccgcaagcgtgttgccgacttggagctagaattgaagaatatgtgcggctaccgcgaga

SEQ ID NO: 133908 - DNA, 442 bp, Zea Mays
cctccatcaacttctggacgtgctcatccttggcttgcttcagggcttccacagcaatgacttcacgactttccaaggcagctacatgggcttgagatgtggtgagatccacatggagttgacggttgcgcttctctgcatcttctgctcgggcaatcatctgacggtggtgccgagccaagaaatcatactgtgcatcaagggtgagcaggtatgcagtgaggtacacgactgtggggtcgtcctcaagcagctgctgctcttccaatgcacgcatcctggccatccaagcgggacggtctctctaaaaaggcggaaagaatctgagcggggtgtcggccacttcttcttcatagatctgacacagggccctcaatgccttgtgagcgacgacttggcaggtgtctttgaatctgtgcccagcagcagtgacactccattc

SEQ ID NO: 133909 - DNA, 343 bp, Zea Mays
ctaacctacatcataggttgtctaatccatttgttcaaaaagccaagtaaaactctatccaaacctacccacctcgtgtaccccggctatcctaactatatgtccttaactcggatggcaactccaagaagaaaggccaaagaagaccaaccacgtcaaagaaggataagcatcaactcaagtcttcaaggatcaagcgggatcaccagatgaatcaagatccacagttctggatgaagtctttccttattatactctaccttgccacaacctatacttgccataaccgtacctcatctgacataataaatggctagacatacatatccatataaaaaaaatt

SEQ ID NO: 133910 - DNA, 394 bp, Zea Mays
gattttgctccatttagaagatactcctgccttatgtctgtagtgcgaatgtcatatttacctccgtaattttagctgaggtggatcccttcctatatttttctctgctctgtttccttgaatgtgtggatctctttcctttccaactttctctattgatggaactatggaaggtggaaatcggcagtgtcctcatcggttataaatgtagccacacccccagtttctatctgctctccctctttttgcgcctccagaacttgtcacctatcacaaaaaattaagatcgcattgcagagtgcatgtgttggttctcttcttcctcacgccaacaccaacgccggacagaggtcggcaacaccagcggcaccgcagatctgtctctttccttctt

SEQ ID NO: 133911 - DNA, 365 bp, Zea Mays
tttgttgtggtgggtaagcggtatggtggggttcggaaaagcctgagattggtgatggggagtgtgggaaggctatctgatggatgggtatgggcatggtagatgtgggcagcaacaaggctgaggttggcggtggaagattggttgaggtggatgggagtggagcgggtgtggtggtgatcggcggtgatggtatgggtggcgcgacagggtttgacaagggaggtatcccgccataacctggcatgccatatgggatggaagtagggctggtggatgctgggggcggcagtggtgttggcgccctactgatcatctgagtgatggcggtggtgagatcgacaagggccttcgtcatggtgtcg

SEQ ID NO: 133912 - DNA, 453 bp, Zea Mays
cgtgtgtcgaacgagcttggagcagggcggcctcacgcagcccgactggcggcccgggtggtggtgcttctggcgctcatcgtgggcacgtcggaagctctggtcatagtgctggtacgcgacctgtgggggtacgcgtacagcagcgaggaggaagtggccaggtacaccgccaggatgatgccggtcctcgccgtgtccgtcatgctcgacggccagcagtgcgtgctctcaggtgtagtgaggggctgtggccgccagaaggccggcgctttcatcaaccttgccgcctactacctcgccggtatccctgccgcgctcgctttcgccttcgtgcgccgtctcgcgggaatggtactctcctgctctctttgcaacttcgattgggatccttcagtttgtgaattacatcagggaagttcttgtgccaactctgaacacaacagggcctct

SEQ ID NO: 133913 - DNA, 443 bp, Zea Mays
gatgacaatggcgctggcggacgatttttggccgcagtccaagcctaagcctcctatttctcgccgcggttgctagattaaacgggagcaatggacgcaggggttcatggggtcaggacttataggctaacgacacgaacagtcgagaaacctgggcgtggggcgagttcaccggagattatggaggacgcggcgcgagttctattgacgtgggcgcgatggatctgatggcttggtcccatagggtattgagcaatccagagccggccaccggattagtgcggctagtgagagggtcccacctgatagatcccgatgctggtcgcgcgcgtggagcggctgcccggggggcccaactgtcggtgcgcttaagatgaggagtcgggcctcgcggtagtaatttgctaggtgagccagatttggggtcagcggcccacgagtgg

SEQ ID NO: 133914 - DNA, 475 bp, Zea Mays
aaaaatctaaggtagggataatggccttgagaaaatcaaggagaagtcgcgtgtcgctgtaatggatatatctattatccatgtcatcgtgtcgtctgtttcagatccaggaacatgtgttacgtccacgtctcacaattacagtcatgaactcgctccggagttacgtggagtgagaagctaatgtgctgcgctgaaattgagacagaagcagcagcaccaataatacgatcaccgtcaccattggcacaatcacggccgccaacgccacccataacgacacgtcgtcgaagttgaagttgcagttgccgcctccaagcgaaatccgaacatttatcactatcctatctcatccaataaaactcagacacgcctgtcctcgtcgctggaccacacaggccaaaacttacgcctcctactgtgtactgcggctatacatgtccaaacgggtgtaccatgcaggtttgtcacgggc

SEQ ID NO: 133915 - DNA, 305 bp, Zea Mays
gtcattttggtattaattctatactaaaagttacttctaagggcaaatttgcaaattcctgatgtatcctatttattttaatcagttaatggatggcgggttgagtcattaaaagaggattggctcttttgcaagtgttgctcggctaaaagggtattggttgatctcgaccgcccgttcaaaacctgatggcccagattaaaaactctcttatccgaaccggtacgaaatattaaccatcagattgagatctgattgtccggatccaatgtaaccaaacaattattctatgttctaatcccgat

SEQ ID NO: 133916 - DNA, 515 bp, Zea Mays
gctcaatcaaacgggtctacgagcaataggagacttaagggatattagaacatcaagcagagaagcttgaactaacctacagatggctggccacggtgagaagctcacggcggcgcgaaaaacagaattaggggaaaagcgaaattaggacgctacattggatgatcagaggcaagagctggtgcactggcgcgtaacaacctaacagagcacgctgagcgctcagtttatagagatcaacagtggtggcgtccaatttggggaagacatgcgggcgaccggagagagggggaggtcactggcgtgagttatcgtggcattcactagagcaacgactcagacgatagacaggccatctatagcgacctactacaacgtggtaacaaggtagtagcgtggcatgcctgggttaacggtgatcatcgcggtgacggccgtgcgaccacgtcgcgatgcaagttggtgcggtgatagagcagccacagtgccccgacttcaccccttgccaaagatct

SEQ ID NO: 133917 - DNA, 364 bp, Zea Mays
ctcgcgcttatcggtctcttgcttgcccacaacttgggtcaattgacgatgaagtggacaaggtcgccatatttgaagcaatcctccttgcctccaccacactgttagttcatacggttgttgtgaaaccacacaaatcaactagcaacaaacaccaattcttcacctccaagagactcaacctactcctctaagatatacaacaaagaggacaaagtgaacatatagcaggtgaaggcttaagcaaagatggatcacgacttgagacaagtaccatgatgggtgtgctaggattctcaattttagcccgagtttggtggtcaatctctatggatttgagctagttgaatagctcatccataga

SEQ ID NO: 133918 - DNA, 353 bp, Zea Mays
gggccctaggccctgcgtgagagccgcaagtcccgctgtggacttcgtgcaggatttggacgccttcggtctcggtgacacatttaagcatgggttggctgacccccttcttgtaaagctggccttcgacgagtgtgatgtcccggcttcggtgtttgaggcgcttggcctcgttgatatcagttggatgatagtacccctacaggaacaaggttattggtgcccgccagtcttcggtcatgatgaggttgactatgcggtggccctcgctgtcattggttatttggaggccctctgggctgcggacggctggcgtgccgatgacatggtagaatacgtcggagggcagggcc

SEQ ID NO: 133919 - DNA, 354 bp, Zea Mays
ctcatggatggaccgattgacagctaccgtgtgtagctagtcgcctggacagcagaccgagagatctgagtctagctttgctcctcctgaaaccatatgcgcggcatttcgcttgtggatggacgtgggcctagtattgtcgtttccaggtttcggtggctaataagttccgtccgcaccaccccgtgcaatctttccgggttaacacttcctttttccccaatttgagaatctgtgggctgcaaaagcgtgagagaggtttgaggggagaggccggatttgctgtttagtgcaacttcaacatcctgtcactcgtcatctaaacagagcaaaattcactagtagtcatgttcc

SEQ ID NO: 133920 - DNA, 632 bp, Zea Mays
gggagccaagctagcagaattgtatatgactcggatagtttgtctacatggggtgcctaagaagatcgtgtcataccaaggttcacagtttacctttcggttttggaagaagttgcatgagagcttggatacacagttgaattttagttcagcctaccatccccaaactgatgggagacagagaggactaaccaagtgctggaggatatgttaagagcttgtgctcttaaacatggaggaagttgggataagagcttaccatatgcggagttctcgtacaataatagctaccaggccagtttgaagatgtcaccgtttgaggctttatatggcaggaaatgcaggactcctctatattgggatcagactagagaaagacagttctttgggcctgaacttatacaagaggcagaagaacaagtgcgaatgataagagagaatttgagaattgcacaatcaagacaaaagagctatgctgataaccggagaagactactggagtttaaggagggtgatcacgtgtatttgaaggtgtcaccgatccggggtatgaggagatttaaagttaaaggaaagttgtcccctcgctttattggacccttcttgatcttgaagcgagtgggagaagttgc

SEQ ID NO: 133921 - DNA, 602 bp, Zea Mays
ggatctttcacgtaaaactgtcggcacatatagaggtgtcaattgggaattctttaacgggtttggacacccccatatatacatgtccttgtgaagctatatttctctctatttccatacgcatacccatcatggggtataaggtggtgtttgtttcatcgtttttgctctgttactgattcattgtgctaatagattgcgtcacttcctgtttggttgagccaataacggtactggttgtggagggaacggatacgaggtatacaaaattgatatcatccaacttcgaatgctaattgatcacactgccaactatgattttttctgaaaggaagagcaactatgaaaattaaaaaacgaaccaaacaagttgttgttttggattacaatgcaaccaatcccaccgaaatctgattccattaacgttgccactcccaagagacaaccaaacaacgcctaagattcatcccatacacatactcattcgtgtatcgagtctccaatgggtccgtatcctctacaagaaaagcattgtcgcgctatattttatatgacattaacagacacatgacatccaacaacaatacatcaccaatataatc

SEQ ID NO: 133922 - DNA, 273 bp, Zea Mays
gcttcttttgcatcatgagaatctttttcactcttttttattatctcgtgcgccatctctcggccgccattctcccagatgtcagtaaagaatttcccgccaactaagcttgcttcggccgaggggtcttttatatcttcaatagataaggtagctttggtttgggccaaagctttcatgtgatcacagcctagtttctccaaaatagccacgattcccctggcacctgagaaggcacagacatccccgcgaccactcaaaacttcttcaaag

SEQ ID NO: 133923 - DNA, 311 bp, Zea Mays
gttgcggcttgcctgggcggcgcgggtggcttgcgcgtgaggctgggattgaacgattgaggctaagcgatggtcgaatggggattggggaattagggattagggtgggctggtggcttggtgctttggtgggctgaatgttactttggtgggctggcgcctgggctcaataatggactaatggttaatttcggatatccaacggattattcgcgagtgagatttagtatccaaattcatgcccactttatctcggatcggatacgggtctaacccgcgggtcaaaaaacatatccatatcctaatccgtc

SEQ ID NO: 133924 - DNA, 730 bp, Zea Mays
tttatctgtttggtacctgctatgttctcatgaaactcatgggcacatgcatggtcggctgtcaaatggtgatccgtggtagtaggtacccgaacaccactatacatcggcattgtactatgctgaaatgttccagaacatggaacatatttctgttgctccatttatgtagtagtacatcttttttttcttcctggtggctatggttggttgctagtgacctcattggtcctatccaccctggccactttatttggcgcgttgcagacgttgcctgtcgattgtgaaaaacgttggcgtggtaatttgttggtatcgtcgtccatttgtattattttattttcttgatgtgaatacgcactcatataaatcgcactgcttgtgttttctgttctggtgacctttctaacgcatcaatggtcgccgcccctgcatgtttctgtacttccttttcagttgaggccgtctcggttgtttcgctcaaattatccaatggttagggttgcagtcgattatatttggttgtaagaattgaggggattaaatcctctcatattcaatttttactgggaggagattcaatccacctcaaaacacttggaaccgaacatggcctggtagggaacgtatcctcattgttagtgacacggtttatgactttctcggagcttttgaacgcattggagttaatactttattgacttaaaaattgctatgactaaataatagt

SEQ ID NO: 133925 - DNA, 442 bp, Zea Mays
ggggttcgacacgttcaggtcaggagcattcagcgctcccatttgggtcaggcccttgtgaggttccgattcgcttttgacaaagataatcttgtggctatgggtccgtagcaagccctgggtttttctttcactgttattaggcacaatgaggcttggaatcagcgggcttgtactttaaccatgagtgttggcttctcctgctcggtttccctttggatttctggacccatgagcatatccagaatgcagacgggtcttttggtagggtgctcatgtgggatcctgacccgtctaatgtgaccagattgcttgttagggtcagggtgacgtctcttcaagaagttccccaatttattgtttttcggttgctgaaggattttaggagtttcctggacagttcagtgtgacatagtccagcagtttatgcttggtgcacaac

SEQ ID NO: 133926 - DNA, 848 bp, Zea Mays
taaagaactatggactgggcctcaatttctgtgaaacgcagggttctcggtgtaagaatctatagactcagagtacaacaccgatggatggcgggtttatttattacttcccagggggctcttttgcaaaagcgtggtcgaagaggtatccgatgctgtgggccgccagatcaaacacggacggcccggattagatcctacatgagatgaaacggtacgacaccctagccgttcgatcacggatcaacggcgtggattttatatcccagagtcgttccagtccacccgattagatcaaacggttcgaattcgtccccgcgaatcgttaagcgcccgaaatcacagccgtccatcggatcatccatggcccagaactaatcccctacctccctcgccgaagcacggtggcgccgtcctgaacgcgacggagcgacaccggcgaactccaatccggaaaacccgagcgccagactcaaattcgctcggcccccgcgagattgacgactcactgaactcaattccccatcaaattttggttgacctcgagtgtaggacccagtacacggtgtaccgcggcggcgccatggtcggccagtgctcccggggattcggctataccataccacaagtcgctagggaataacatggaggaagggaagacgaacacgatggggactcacttgtgactggccgaggtgcggtgatgcccgaccacggaagcacgcgagtacggcggagaaatcgagggagccacagggctcaatcccaaccagggcgactatgaatagctccctggcgaccacccgaagctccatggcccgagatgaacggctgtgaactaccttccc

SEQ ID NO: 133927 - DNA, 847 bp, Zea Mays
gggaaggagaaagctaaggatgatgggccgtccaggccgggacctcgaaggagcaagagaataccaaagcccaatagtcgtttcgctggcccagagtggcagccgtaacctgcacatgaatatatacctattaataagataagcagaggcatcgaagaggagagaactctgttcccggctgcgtccggtggctggcgctgcgtcgccgtgtaagaaccgcagacattcgtaaaccccagagttcttcgagagaggaccttgagcaccgggagcggtgctcaaccatcgaaatcccgctggtgcttacatttggtattcggagctaagctggagcccatgcacgagtacgcgacccgattccaggcaagaggtggaggtatggcgccgccgcggaatgaagatccgatggcgcagctgcttgccaagatcgaggagggcaacaaggagacacatcggcgcatggagacgatccagtcgtccatggcgagcgtggaggcaacagtgaaagggatgatgaaggaacaaggtgaatttcgcaagtggcgtccagaagtggaggcgaaggtggcggaggtggcagaggccttgaagacaattcaatctaaggtggatcaattcggtccacagccgctggagggcgatccttctggcgtgagcaaagcgaagggaactgcgtcgaccaccgcccaactgggggttccaccgatcgacgcgacgcaagggcaaaatcgccaccgcttcactgaaaatcaccggagatcgggtgttgggatggaaaccatccacacaccccctccggtcggaggtatgcaccctcctcctgaacgtacaccaatgtttatggatt

SEQ ID NO: 133928 - DNA, 808 bp, Zea Mays
tagccacactacgcggagagaacgagggatccaagggtcagctcattacattggattctgcggtgtattaaccccgccgccatatgagtctctgttaaacccgcagctcgacgtcgttgaaggattccggtcgccattctcccctggtgagtccccgagcacgcacagagcttcccagggaatcccacaagactcacccaaggcatcagtccgcccccagagccatggtagcgcgaccgcgattaagaggaggcggcgtgcgagagttgcgccagatggtagtgtgcggaactttatagcaggcggagacggaggcgcggacgtgccatggtggccacgtcatcgcaatcggcgcacggaagaggcggatgtggaggaggggtatgggagtggcacagcgagcaatgagatgcgagagtggcggtctgatctcctctccatgccagcgatgtgagcatgaggtgtagtcgcggcacgagaaggcgagatggccacgatacttatatgcaggggaaggaacacggaggttgcgaggacctggagtcttcccgtgatccgcggcacaagccttcccccggcggccgcgtgatttcagcggattcagttatctgcccaggcaatggcgcaaggtggatgccggacctgagcagcggggcccgcaagtctgtggcacggggcgcgtgttctgttccgaggtggacggacgagctgacaatgggccccactaatcagtgtcgtgagcatcaccagagagtgaggccggcttgtggccccggtgtgtcggcgccaacaatagaaactgggctgg

SEQ ID NO: 133929 - DNA, 779 bp, Zea Mays
gatttgtttctaagatgtttcctagatgtacaattatattatttaacttgtgttattatttgtaaattcattctgctcaaattcttttggcttttccagaaactaaagagcacaagtgcctaaattctgagttgtggcatgcatgtgccgaccctcttgtttcattgcctacggttggtagtcgtgttgtgtattttcctcaaggccacagtgagcaggttattcttctactttggacttcagattccagcgaaattagacataatatcgtacagtttatctgggtgttagtaatgtcaagatttaaaatgggtctgtcagaactaaagctccatttgtttcctttgtacaaaaaacactgagcttacaaatatctaccacaggtagcagcatcgacaaataaacaaatagaggttcagagaagtgttttttgtaaggtagtaaacatgtatataatcaaaacatgcagatgcttagtggaataatcagaacatgcacttgcttagtggaaaatataagcatgaaaaggcattagctgcaaggtatttattaggttttcactttctgagattaagcaagccatttagttgttgagtgcatgttatatgctgcaacataccgacgggcatggtggtgaacagaactccaactccatcgacaaccggaggagcatgaggtgagttcactggattaaaatgtaaaggtgccatcttcaggcccattttatttgctaggatactatccatcaaacgccaaacaaagtttccaaatgttcgtcc

SEQ ID NO: 133930 - DNA, 676 bp, Zea Mays
agaaaaaggaagacgaacatggcgatctaactggcacgcatgacaaagatgctcatcttgtgatctagtacatgggatagtggcactacgagtaagctgcatcaaggcatcgcgttcggggtggccaaggcgacgatgccaggtggtagaagacgtggtggcagcaaaaacagcagctgggtcaggtgacgaagacgaagaagatgtgtcgtgcggaagccgaagggtgtagagggggccggtgctgtcacatcggaggagggggcgccgagttgccgagtccttcacagtaagaccagaagagtgaaactcgacagaacaagaattatcagcagtaaaacgacgaatagagagaagattgtggaccaaagaaggagcgacaagaacatcgggaatgcgaaaagagccgggagggccggtggcacccacagatgtgacaagaagacacgagccattcgccaccatgatggacgaagggagagaggaaggagggcgaatagaggtcagtataccagggtcgggagtggtgtggtaggtagcaccggtgtctgcgatccactcgggacccatcggcggagtcagagtgggagtctagaaggcagccagggcggtcgcgtcccaaccaaccagcccggacggtggagtagccggcggcgtggtccacgacgaagcggca

SEQ ID NO: 133931 - DNA, 313 bp, Zea Mays
aaaggccaaaaggggacagtagcaactccaaaaagaaaaaggatggttaatgtgctggatgttttagaaacaattaaatcttcgagcataactccgaagaaaactgctaaagcttctgaagtatctgttgaagcctttgttagtgaagcttcaaagcaacaatttgtaactgagattggaccttcagaacccaccaaggtaaaacatttggaagctgaaaagacaaaattgacagaggcaactttggaaactgaacaaacaaaaataacagagcaaattttagtcgaggaaattgacactgccacccccgaag

SEQ ID NO: 133932 - DNA, 517 bp, Zea Mays
ccacagcccaataaaaatacttataaatattgaatgtacaacatggcagaagaaaaaggcaaagaaagctgtgtgctctgtagtggtttctactaattctatagtgttttgtctctatgaattgcaattatagtgtaaatgctgcactcactttttgacagcggcctagcagcctatttgcttcgaattaaagcctgctgctgacatgatgcactgttcactccagatgagagccatagtatagcagcatgggcaggtccagctccagatgagagccatagcatagcagcatgggcaggtccagcagcgagcgagagcagcacattccaccaacccctcatgtgaccacggacaccatggccatccatcaacggtcttctgcacccttgctagtagatgtcacgtcagttctaactaaaacttttcaaaaacactcttcaacaccctagccaactcgtccttggaccctgacccaaactccttccacgccttgcaacgtccttggattacgagtctc

SEQ ID NO: 133933 - DNA, 887 bp, Zea Mays
gagcagggagcacccgagttgtttcacatctggctggacagcgtgaatatttctgttattcctgatcacgcttcacagtaaggaataggagctggagccgacattgaaaattggaggcactagcagtagtttttgcgagacattcagcgctggggttaatgaggtcaatttgattgtgtgtgtgtctgtgaacctcctgcggtttgtttgcgtgtcggtttttcatcatcgcactggaattggaaatgaacgaaaagcttcactgaagaaggcggcgtttatcctgcttctcgtggagtttttaacatgtgttgtccctggccaactgtaaggcaaaacgttgaaggtgtgatactgaatatgacgatcaatccgatatgcatgagcaatttggatgtgtgtttttgtgaattctcatgcgtatgcttgaaacatgtgtctggtagtatttgagcatgtgtgcccactcttttgtggattatcatgtgtatgcttgaaacatgtgtcagcttgtatttgagcatgtgtgcccacttttttgtgaattctcatgtgtatgcttgaaacatgtgtctgctagtatttgagcaagtgtgcccattctttcgtgtgtgctctgtccatgttgtttggtgtacatctggtttgacagcggaacaggttgggcttagtgaaactggtgatcatgaacgcctgaatgtttctgttattcgtgctcatccctcacaacgaggaatagatgtgcaggcctggagctggagacaacattgaaaatttttgccaccagcagcagtttctgacacgttcatgcctgaggttaacgaagccaaattatgcggtttatctgccatgctgtttgttcttgattttttatactaatgttcaca

SEQ ID NO: 133934 - DNA, 585 bp, Zea Mays
gtgcattggatgatagacggtcatcactaccgtgttgactttgtcaccttctgtcgcatccttggctttgggcacgtgcataggacttacagtcggatccatgatgcacggcgtgctgagccacgtgaggtgagctttatgtggcaagatcaggatctcagtaggccggattggtcaaggaccaagctcaagagcctatattacatcatgaacaacctcatccggtgcaccctcaaccccaaggacaatgccactgatttgaatggatatattactaatgtgttgtccagattcccagatggtgagaggttcaatgtcgctaggttcatttgggtggagctagcgtatgctatggatgatgggaggagggggctgccctatgctccctacctcatgttcatgattgagagggtgacagggatgagattccttaaggattgtgtccacatggtctataggatcaagaagacccgtggttctcgctttgaggacagacccgagagctctcgtggtcacagacgctctaggagtggtgggaggatcaagaagtttgggcagtggatcaaggctatttttgctacttgc

SEQ ID NO: 133935 - DNA, 807 bp, Zea Mays
ctactttccccactggcaacatattgctgactgttcttccgagtcaaggggacctcatcttcttcctccccgtcgttttcattagcaacacacacaacacccccattgggatcagcgacagatggagcacacccattgggatcagcgacagatggatcacacccattggggtcagcgtcagtaaattcaggcacaggcacttcctcggcagcaggaaccgaaggaccaacatcccgatccaaactagatactcgccgaagacgtctttttttcttcttctactcatcagcaggataatcaagttgattggctcggcaagggtgtttcgggcgaacactgacaggcctctgaatatccaaggttgtaccagcttccgggagaggcgccaccaccaatgtcccagcaggagcagcatcagaagagtcctcaaccagcatatcaagcatagcacttatctctgcatcactaggatccaaaggcacctcaaagtggacctgccattcatcatcaagaatttctccaagcgaggcaaccaaagcactaacttcttcggcagagggtcgcactctaaggcccaaaccgtcgtcagcagcaggaggattcgacacaaaatgagtaaaggccttggaaggaggcaggttccaggccgagtatgcgacaggggcgccaacatttgataccttgcctctgagtatcatttcaagccggttcaccaagtctacagcaggaattcttctgttggcgacccgggttgagtcagctagacctcggtacaggtaggccgggtatgccctatccttcaacggc

SEQ ID NO: 133936 - DNA, 398 bp, Zea Mays
gccatccgtagggtgccattccctcctaggttccaagctccgactagcatcacaaagtattcggggggaaacaaagccagaactctggctcaccgattatcggctggcctatcagctctgggaatgaatgatgacaacctcatcatttgtaaccttcccctctttctattcgattccacccgagcctggctcgagcacctcccaccagaccagattcaggactgggaggacctagtcagggtcttcagggaaaatttctagggcatgtatgtacgctcgggaaactcctgagatctccgaagctgccgacaaaaacaagatgaaagcctccgcgagtgcattcgccggttctcaaagcagcgcaccgagctccccaacgtcaccgactccaacgtcat

SEQ ID NO: 133937 - DNA, 456 bp, Zea Mays
tttaaatttaattatgacagttggcatcattgagcctttccattccatcatgttagcgtcgctattggcagtttagtaataatatgctattattaggtgcccttcattattggggtttgagagatggtgagggctgagccaactcccatttatttgacaggtgcaccaacaatacggtgcctgcactgaaggattcctgtatattggttaggttagcgtcgcacatttcagccctcaaatctagttcagttggagttccttgaccgcttttgcatttgtgaaacagaaactaactttttggtactttaatcaaatggcctatgtgtttttttacatctatccctttgatccatcgatgaaggacaattattagctgcataatatcagcatgatgctatgtctgttgatcactgtgctgtggttggctggccactcgtggtggcggacaatgaccct

SEQ ID NO: 133938 - DNA, 379 bp, Zea Mays
gggtatcatgagagcgtaccttcttctattttgtcatgaagcaagtatgatgctcgttgggaagagggagtacttgttgaaggcagaggcaacaaatccctcatcatcggagtcaaaagaagagcagttcgagccccattcctcatcgatatgcgccttgcccttcttcttatagaacttctccttccatttcttgtcttggtcttggtcattttcattataaggacattgggcaataaaatgactggacttaccacacatgaagcatgaatgatttcccattaatttattcttgttgggttagtccttgcgtcccttcaaagcggttttcaagcgcttgataacaagcaccatctcgtcctcattgagaccttgtcgg

SEQ ID NO: 133939 - DNA, 537 bp, Zea Mays
gggatttagggtttcggtgaaaagtttatttggggtgggaaaaccctcccgaaggagctagaaacctgcaatggtgtttaaggcatacaaaggaacacattccacaacaggaaatctccagatttcacagggatttgaatttgcacaagggggtggtgaatagaatgtcacagagactttgaaaccgagagcagggagaaagagggaaggagagtagctgctcaccgaggggaagagcacgggcgaggtcgtcggagcccagcggggacggtggccgtcggtggctgaagttcgccggcgggagaggagaatcgccagagagctgagagcgcgggcgctggcagagaagtgagacagagcctctggctcggtcgggctggaggcctttttttaaaacgcgagatgggcacaccggacagtctacagtgcctgtccggtgcacaccggatagcgcacagtagctgtccggtgaaccaccggacagcgcacaggaaaaaggatttttgcgcgcggctgccggtgcaccggacattgcac

SEQ ID NO: 133940 - DNA, 276 bp, Zea Mays
ccaccaggctatggtggtgaatgtcagcgaaccaacagctaagccggtccgggtctactgcgttgcccacatccagcgctcgttcatcgcgttcgaatattgcctacgtcgtgcaataggtatctgcacatgcacgcatctcgagacatgaaccaaacaattgtcaagcacatcctatggtacatcaaaggcaccatcggcttcggcgtccagctgcgcaccgccgcgacgtctacgatcactccctactttggcgtcgactgggccagaagcctg

SEQ ID NO: 133941 - DNA, 411 bp, Zea Mays
ccccactagctatgtaacgttggttgttcttctgaatcagagggatttcatcctcttcttcatcatcttcatcaacaacacggacagtacacccattggggtcaacttcagcaggatcacacccattggggtcagcagcagtcgggtcacacccattgggttcagcctcagcaaattcaggcactggcacttcctcagcaacaggaacagaaggaccggcaccctgatccaagctagacactcgatgaagacgtctcttcttcttcttctgcccctcagcaggagaagtgggttgatcggctcggcgagaacgtttcgggccaacattgttagacctctgagcgtctaaagctttgccggcctcagggatgggcgccaccaccagtgtttcagcaggagcggcattagaag

SEQ ID NO: 133942 - DNA, 467 bp, Zea Mays
gtgatgggttgtggatcaatgtccacaattacatctgcatatacatccaggcacaaaggatagtatttgtaagacaactagacaatctaggttatccccttaaaaaaaaatctagcattccgtatctatctcgtcttgacaggttctatcttacctttggacattcacctcatacaattagttcccctagtcttgacataaaatatctggtcaagccctgccaaagaatttttagtacataaccaactattagcttattcattctgcctacaaatgattcctttgactatcttaccatatgtatctaactcagatggtcaataccaggcggggtggtggaattgatttacctcctaatcgacacactcggtggatatatagacaaccccaaccacagccagtagagatgaatcctcctaatcctccaacaggcggagttgacccactgattgcagctcagatgagta

SEQ ID NO: 133943 - DNA, 360 bp, Zea Mays
cggagtcgcggcgagcctgctcagcagggtcgtcgacggagggggcgggggtcccgaccatactgcggcgcggagtcagcgcgtaagggcagcggaagggtgagaggggttggggagatcccggtctcgtgataccatgaaagagtagtatggctgggaatagttgattgataaattggaggagcccaaggctcatacatataggcaaggatatccctaataaaggaaagatctaatctatcaataggaaaggtctaatctaggggatccttgccaaacacagccaactaaccaaatacagagggggggaggcagccgccgcaccctgttagggcaggtgagccgcctgggccctatttc

SEQ ID NO: 133944 - DNA, 474 bp, Zea Mays
aatttgtctccaatcctcctgctcgagatggtagcccgggccatagagtgtggccctcccctaaggatattgaagccttgattgctccccttcggaatcttcccgaggctgagaggcaaactcattttgagatgccatctagcaccgatgatgctgagatggatctcgtacttagcctgctggctggggaattgtatgactctacccgtaccaagccgatggccattacgactggacaagagtttggcgaggatgtggaaatctagaaacccgaaggtgcccgccagaagcgttcacgccgagtgaaccgcccggctgcacctgtcaaggagaagaagaagaaaaggcgactccggcgattgtcatgcctggattaagacgctgacccttctgcattattccttggtgacggcctggtggacaccattcccgaggtcaatgctaaaggttgtgatgatgctcaggctgctggcg

SEQ ID NO: 133945 - DNA, 333 bp, Zea Mays
atgagaatggctgcgatcaagattgggtcttgaacctatgttttgttgtgggacatacgaaaggttttttgaccctagccttagggtctaaagaatactaatccgatcacctaaccaacttagataaagaccctttttcttggctcaaagaaggtgatgctaatacaaaattatttcatatgcatgcccgtcaccggaaaagaaaaaaatttgtggcaagattggttgctgacaactaggttttcactggacataatgagaaggccattttgatggatcaattctattccaatctgctgggtgtcagcaatgacagagattgctctgtcaatc

SEQ ID NO: 133946 - DNA, 377 bp, Zea Mays
gtttcggggctccatgcggctatttaaacagagcttttcccctcatccgccctgtaccaccgcccgggcaatcgttcacgagtgtgcgtggagaggaagaagtcgctagtgaactgcgctcactgaatcaagctcggctgcatcgcaagacctgtggatcgtcggtgggagtctcactgcatcaccggtggtgcgcccgcgactgttgggggggaaatcgtctacttgggtggcatcaattgctcatcggatctcttgcaccgccgccacaccgctgtgcgccatggtcgcgtcctctactgcgtcgagacacggtaagaactccccataccgatccgcccatgcacctacatcgtgtagcaccagattgatttggg

SEQ ID NO: 133947 - DNA, 774 bp, Zea Mays
agatattgaggccctggttgcttctctttgtgatcttcccaatgatgagaggcaagttcattttgagatgccagctagtccggatgatgcagaaatagatgttgtgctcaatatgttggctggagaatcttctgactcggcccctactgaaacaatggctgttacggttaatacgagagcttgacaaaacagtggacatccgaaagcctgagggtattcgcccaaagcgtcctcgccaagtcagccgcccaactgcgcctgttgaggagaagaagaagaaaaggcggcttcggtgactgttatgcttggaccaggatgctggcccttctgctcctgtttgtgaagaagtatcagtagaggtctttactgaggttgatcccaatggtggtgtaccagttgaagctaaacccaatgggtgtaaccttgcaccagctgaccccaatgggtgtgaccttgttgaaactgaacccaatggatgtaaccgtgcagaaactgaaaccaatgggtgtgattgtgcaccagctgttgttcgtatttttgacgaggacgaagaagaggaagaagaaattcgctaattcgtaagaatagccgtcgttatagaggtagtagggggatagcgatattccttctctagctctatctgctcttgttagccttcaagaattatccataacaaattttgatcaggcccttgaggatgtcattcctgaagatatgctgtcggaaccaactgatggtgatatgatggatgtttgctctaacatttcagacgtg

SEQ ID NO: 133948 - DNA, 422 bp, Zea Mays
gctgaccaatgcccccggcatatttcatgtatttgatgaactcagtatttatgccagaactggataagtttgtggtggttttcattgatgacattctggtatattcaagaaatgaacaggagcatactatgcacttgcatacagtacttcagagactgtgtgatcatcgtctatatgctaagttgctcaaatgtgatttctggttgaaggaaatcaagtttttgggtcacaccatttctcaggatggggtatcagttgatcctgagaaagtgcaagaagtgatggattggaagcctcctaccaccgtgcggcagattcggagttttctgggattggcaggatattatcggcgattcattccggatttctctaggattgccaagccaatgactgaattgttgaagaaaggagtaaagtatgaa

SEQ ID NO: 133949 - DNA, 392 bp, Zea Mays
ctctatatagtttcttgttgttcagtgagggggggaatgcatggacagcgcgctatctatatcctttccactttcgattccccttcttcaattaattctttccttttgcaatgtcgttgttgagtggccggccgatgcatcactacggctagctatagcttccacatccatacttctcatgcttcttgcccatatggtttgcaggttttgcatgcggtggtcgatctgatttgatacaaagctgctgggaggatatatattcagtcgacaagagtggatacctctgaccatgcattatattgggcagcaacaatggattaattcaaggagttttttctttctttctttccaacaatctcaccatgaattgaagaaattcaatacagttatac

SEQ ID NO: 133950 - DNA, 527 bp, Zea Mays
ggtttgagacggagagaagggcacgtagaaggtatacgtgggcaacagcgggcacgaaatcgggcggccagatgccaattcgtcaccggtggttgaaatccgccatgaatctatccttcggcgcggtcagggacctcaacaccactattccggtgaaattcccctccctattaaattgccttcgtctctaggtcatgctacgcctatcgaatttgagtttggagccctggagcatagcattgccttcctccggtggggtcgccgccgtggccaacgcgggggccgtcgcggcgttgggggaagatagtgttgggagtcctagctgtaagatttgtgatggacagccttgattagaagatagggtaacgattcgaaccagtgaatcgtggtcgttgatctacctgcgtacgaataggattagatcaggttaagatgaaatcgggaccgttgtttttaaatctggtggtatagattgcgtaccgcttcgtgaagtaatctgaaccctagatctctaatccaatggctcg

SEQ ID NO: 133951 - DNA, 530 bp, Zea Mays
taccatagttgtttctcatagattgcttacttgttgtcactagagaatttatatctcttatcatattgattaaatttctctagtgtttttgattttagtcaaaatcgtctatttaccccccctctagccggtgtcctagatcctacaacgggtccgaccgtggcctcaggaggaacctccacctcgcctgagcatgacctcgccctagataacatcgacaaaaggacgcttgatgccaccaacccaaccgcatagacaactgacaacgagatgtctatagaaattgcatgactgatgtcaagtctgctttacgccatacacgacgaattaccatgtgcttttcaccataattatcactatttcaacaactgtgactcggacaacacatcctggccttgactctctactcgatcaatatgcaagatatagggggccagacatccttccctgatctaagacaaccgcaaggacagatgccattccggtggccatactgctacaggggctcgggctcgccccctctccccatt

SEQ ID NO: 133952 - DNA, 654 bp, Zea Mays
aaggcttagggtgtgtgcttacgcaaaatgagaaagtcattgcatatgcattgcgcttactaaagccgcacgagcagaattatcccacacacgatctggaattggcagtcatagtgcatgccctaaagatatagcggcactacctgattgggaacaaatgtcacatcttcactgatcacaagagtctgaagtatatcttcactcagccagacctcaacctccgtcagcgaagatggctggaattgatcaaagattatgaccttgagatccactaccaccccgggaaggccaacgtggtagcagacgccctcagccgaaaacctttcgggaagaaggggaccaactttttggaagattagaagtaggaatcagctcaactgaatgcatgtctaggagacaacggcagcctagaagtcaagccaatgctagaagacctcatatgcaaggctcaacgcctggacactgagacagcaggtcttatggaaaaagctcgcaaggaaccacttccggactttaggacagatgaggaaggagtcctttggttcaaaaatcatctgtgtgtgccaaacggggaggcccgagaagtcctgctcgacgaagctcacaactcagcctactccatccacccaggaaccaccaagatgtacctagacc

SEQ ID NO: 133953 - DNA, 834 bp, Zea Mays
agtcaggtccaaaaacttccctttctccagcttgtgaccaatttagcggtgtcctacaccttctcccatacaaggcctcgaacgtgccatctttaggctggattggtagctattattgtaagagaattcagccaaggaaaggcacttatcccaattcttaccatagtgtaacacacaggctcgcaacatgtcctcaagaatctgatttactctttccgtctggccgtcagtttgaggatggtatgctgagcttcttatcacatgggttccaagtgactcttgcagctgctcccagaaacgtgctatgaacggtgctcctctgtctgacacgatagtccttggtattccatgcaaacgcactatttggtcaatatagatttctgcatactttactgccctgtgggtggtatgtactgacaagaaatgagttgtcttggttagcctgtccacaatgacccaaatagaatcatggtgccgggatgtgttgggtaaacccacaataaaatccatgctgaggtcctcccatttccaagatggtatgggaagaggttgtaaggtacctgctgccttcaaatgactagccttgattctttggcaagtgtcgcattcagatacatacttagcaatttttgtcttcattctggtccaccaatacaaagatctaagatcatgatacatcttgttactgctggggtgcacagaaaatttggaaagatgagcttcatccaatattttcttcctgagttctggatttttaggaacaactaatcggtcttcaaaccatataactcccttgttgtcctgacgaaagcatttgtacttatccaccttttg

SEQ ID NO: 133954 - DNA, 445 bp, Zea Mays
gcgacggcaccgctcactgacgcggccatgacccgccggagcccctgccctccgccgcgccagtgcaccaaaacctaccccaattagtgccacgcatggaggagaacgaggtcaacacaacagtcgaagatttaccggagattggtgtggtagaagatctgaccacggcgagcaatggatttgcggcggtgccgggtcatcggcgagaaattgccgacctcacggctgtgatacacgcctgccgatgtcacgagcacgcgcggcggcatcccgcgacgtgcccagaacacccccccaaggtcggggagttgcccacggtgagatcgatagtggcggcatcctgattcccttctcctctgcctcttcacgcggcggcttcaaggtcaattcccccagcccagagagcactaccagcacgtaggagccccgatgagcacccgaacgg

SEQ ID NO: 133955 - DNA, 519 bp, Zea Mays
gggagagtgaggatagggaagggggaagcagggacacagaattctgctgttttaaaaaaacatgaatgaccttgagatttagtactattatattattattacatgcctgaaaagaagagggtggtatgtttcttctgtttgtgtggttctggtcatgtttcaatctctatattatcctcgcttgggattaaatactttgttgccatacaaatttgcagggtactgttagatggcttgaagcaaaacaagtttttctttggagacgagcagcaaaataaggccttcgactctacaaagagaatgtctaatgcctccccacgcacaattttatctaaaaattagcatcaaccgatacataccggaagattgcatataaactttataccccaataaaacccccaatacacacaagttcggcattgcattacttaacatatgtcatatataaaagttatattaggggaagcatttaaaagaagtcagttcattttatgtttaagcgacaaattcactaacata

SEQ ID NO: 133956 - DNA, 512 bp, Zea Mays
aatgtgtaagacattaaatttacggccacccctccatctaccaacatcttagcaatcggtatccatcgatatcaatgcgcacgaagaacaactttaaatggttgaccgattctttcggtttagtgaaggcggtgtatttaggaccaaaatcaaactaagcaacgacaggttcatcgtcactgataatagtacaatcggcggagaacataataacatttacgtccatacctgggtgttctggcgtagctccgtagtcgaccaagtgttctcccagcaggtcattctcctccataggtgttggcgcgtcattgggggagtcctggcatagcgtggacggttcgtactcgggggtcggacggtccatgtcatccacggacggtccagcctttatggtcggactgtccatcatacctgcagagagctgtaacgttgatgtctcgtttcctatcttcgtggctgtttgatttacttcaatggcctttggcctccacctcttttgtggtggtgggtac

SEQ ID NO: 133957 - DNA, 350 bp, Zea Mays
tccagagccatactgccccaccaaccctgcctcagtctgcttctatagctgcgacagtttggcacatgtcgcgtgcgtaccaagatctactttcacacctatccaaaacggcctcgttttggaaggacaacgatatcgagagcgacaagaaagctaaggctggaagctctttgtatggctttaagagagcagaattaccgtgccaacggcttcttgtgccctaaaacaggaaactccatggcagaaagacaggcgcagaggtttgcctaactgcctagggcaactggatgcccggcaacggatcccaccggatctgcagccgatccgtgtctgcaaaactctgggtccac

SEQ ID NO: 133958 - DNA, 1070 bp, Zea Mays
tttgtagtaacatgttaagtgtgcatcagtatgaacgcaatgtgttaggaagttataaaggaaggcttaatggaacaacctttatgaagcagtaaatttctatgtaggtctgcacatgttaataaagcatgtattgtgaaacaacagtttagagtatactaccaaaaaagcaataaaattaaaacgttgtgtacaatattatagaaaaatgaatattggcaatctccacatttggttatgatctgagcaccaacatagaaatcttcttagtgataggttaaggatatgacgacagcgacatcaagaatgcaacgatcctgatggagatgacattcgggctgtgggcacaacggatgccaaccagaggtgatacttgtgtatcagttagcgtggcacggtggctggctcgtacctgacgacatatatggctgtgcgggtaacggacggcaagaacagatttcatggctatacccggacggagcaagcgtggttcgacggcttgctaaaaaatgagggcttagggaccggaagacaggagcaggtagcacaccgacgatcgaacggagcgaggcatataaagggtaaaaatgatggcgcagggcacacatgggaataccgcggaaccacctgctacgccgaccatcggatgctgcgggcgagcatgttagaatgaatttgttccatttttgcaccagccgatagtataaagcacaaataagaagccatttttaactaaaatttgcagggacataacgattttttttattaaaatgaacaaatggtgcagaaaaaaatgacagtattcagtaacagagtaacctctatttctatgcccagccaatatattgatccacttacggttgatgttgtttagcgcctatatgaatgcagttggataaggtagatgaatacacactggtgtacgttggatataccatgaagaacaggtgcaactattgcccgtcgaatcaaacctccatcgatcgcagagtctggagttgaagacgggacatactcatccgtctgtcgccccaatttgcagtgcgcgaaacgcaggagcaacccgccca

SEQ ID NO: 133959 - DNA, 356 bp, Zea Mays
tagcactggggctgcccaaggtgaggtacttggtctgatgtagcctttctctaacaactcatcaatctgcttcttgagttccaccaattctggtccggacactcgataggctctcttggaaataggggcggtgcctggtataagctctatggcaaattcaactttcctttcaggtggcataccaggtaactccttgggaaacacatgtaggaattctgatactacattgatagcctctgatggttcaatctcctcaatatgggcggtgacttggtgacagcttcctttccgtggtccagacaagaccaactcctctgacacttcttctctcgataaggacactaacttcaccgttc

SEQ ID NO: 133960 - DNA, 592 bp, Zea Mays
acagtcctagggttgatgatgtcagggaatcacaacctattgttgtatgtgctgcgcgtgttgttttgactagtgctattagaggaactcatggtggaattcgtcgaaaggccgctgtaaataggggcatgagaccaccaatggctacaaaaggaaggcagccgtctggaacatctgataaaggccgagccacaaatactgaaagaggtattccatatggggttaattcatcggagtcatcattggatgattttgcggtgtcgctccctaatgaatcatcaagggaggcatttataaaagcattgatagagcacgacaattcaatcaggttggcgttgactaatattgaattgatagtgaagcaaattgtagattcgtaggttgagctaaacaagaataaggaggtcattcactaggcccaaaacaagcttactgaggttattaagtccattgttaaccctgcaacatcgtcgccgtatcctttatggacgtacaaaagacagagggtaagacatgacgaaggcagatatggcagtaagtagaagacatgttcagcgtcatcgtcgtgacctaggtcggaggcaccaacacc

SEQ ID NO: 133961 - DNA, 872 bp, Zea Mays
gaggaaaaggggacaccagagcaggagtgggctctagtgagttggctaaggagaggcagttgagggattttcgaaggttgaatggattgtgttttgggtgcggagaaaagtatgagccaggacaccaggccaagtgtccaaaaaggggtggaactcaattacatagtctgacaatggaggatatggggttaacattgtcagatgaggtgctgcagcagttagacaaggaggatagggagatggaggaagcaagtaatctgtccttaaatgccatcagtggaactgatagagaggggtgtatgagggttcgagcactgattcaaaatcaggtgatggggatgctggtagactcgggcagttccaccagttttgtcagtcagagaattgtggacaaactgactttgcagacagagcctgcttcacctgtcagggttaaggtggctaatggggagttcatgttgagctcgaggagggtggcagcattagagtggtgggctgatggacatacctatatcagtgacatgagagtattggatttagaagcttatgacgccatcttgggatatgattggttgaagggtcatagtcccatgcaatgtgattgggataacaaggttttggtgttcaaggatagaggtgtggaggtgcaattgaagggagatagcatggagaacaaggaggtgctgcaagtgtctgctgctcagctgcagaggtggatgaaagggaatgaggtatgggttctggtgctgttagagtcaatgcaggaagaagaggttgaaaagcatcaagaaccattgcagctcatactcaaggagtttgaggatgtttttgctgtgccaaccgggctacctcctgctagagtgtatgatcac

SEQ ID NO: 133962 - DNA, 432 bp, Zea Mays
aatcagagcaaggttttttcggcgagagattctacccatccctttacctgcagtccagaaaactacacaaaaacaggctagatctgaaaatccgaacacaagtttgagctttggttgttttgcttagttcttggcttgttgtgttttcagttacattgtttgggctagttgttggttcttagtggttcaatctttagagttttgagtcctggtcacgttttagtcaccacgaaatccaccaaatcttttcatatttccgctgtcatttctgcctccacgaatccatcttcccagatctgagaactggatgaaaatagtcctatatcttgtattacatgtccgattcatatgtttaaatacaatctagaaagcttatctcattttatttccaacggatctaaatttgctctctaactccttctgagcgcgtcg

SEQ ID NO: 133963 - DNA, 417 bp, Zea Mays
atttgagaaatagttcaagaaaccatgcaatgaatggctggaaatgatcgagaccatgtgcaatgagattcttggcattatacgaaggaggaccagctaatgactgctgccttcgatacccggccgaaacgaaggctgaaccgagtaatggatgcattgaacttcaaatacccagattatgagatgtttgacgaaggggccggggtgtgaaaagaaaaagggttgccagcatcctaagcaggcaagctgcccggtccgtaaaagaagatgaaaaggccctgaagaaagcaaaaacatcgccagagccgaaggcaacaatttctaagaagcgaaagcttgaccagataccctctactgaaccgaaggtaaacgaagcagcagagaaaacccctccatcgtcgtctgttgtcgaagtgg

SEQ ID NO: 133964 - DNA, 523 bp, Zea Mays
caaagccaaaacttgagagaaaataccgccaactccaatcgcatcagcattttcagtcgttgtgccaacctcttccactttactaacagcatcctgattttcagcattctgctccttctctaggctatcctctagcacactgccaaccctagcaggaagaagctcctccatgcttccaccattcttaaccactgcagttgcctcactcggtgagtcaggcctactagcttcatcttcaacatgagcatccttgctagccgattcttctaagtattctccacctcgagaaggctgcttcaataaaccttcatgcatgtgagttttagattgcatctcctcatcccatgccacttttagacccacttaaccgaacactaaggaatatgaatctttagggaacaagacaaccaccgcctcgttgttgttgtgagacatttcatcaaacaccagaggggccatacctccaacacctggtgcaacaagccacactgacatcctcgttcaccagactgtggatccaacc

SEQ ID NO: 133965 - DNA, 311 bp, Zea Mays
tcatgagggatctgcccaaactatttggcagggataatcttcagtgtcctaacaagtatccatgcaatcaaaccaccccaaacttgttgcaacgcaagatcaatcaaaacagagaagagaaggggaaggaaaaaaacaaatccgaaatcaaagcaaacacatgagctatgaatttcagaggaaagattgctttgattcaaccctcacggaggttttctatgctaaccctgcaagagggagttccactaaggattaggacaatggtcctattctacgttgatccctttggattcgacgttcgggccccaatc

SEQ ID NO: 133966 - DNA, 570 bp, Zea Mays
gcgacctcttgtccttcttggacgcttactctggtttccaccaaatccggatggctaaggaggataggaggcataccgcttttgtgacagtacatggactatactgttatgttgtaatgccctatggtctgcggaatgccttgccaacttttgttcgggcgatgagcaagacctttggggacctgatccgagataaggtggagatttacgtcgatgacattgtcgtcaagactagggaagggtcggctatagtcgaagacatgaccctagattttggcaagctgcgggcaacccgcaccaagctaaacccggagaaatgcatcttcggtgtctccgcagggaagttgctggggttcctggtttcataccggggcattgaagctaacctggagaaaatcaaggctattgaggtaatgaggcctctcgctcgtattaaggacatccagaagcttaccgggttgctagcagcccttagccgcttcatttcgaggttggctgagagggcgctgcctttcttcaagctcctgcggaaatcaggcccatttgcctggtccgaagaggcggaacaag

SEQ ID NO: 133967 - DNA, 443 bp, Zea Mays
gccaaaccagaggaggaacaacacaaacattgttccaaaaggaactacactagatgatttctcaccccaaatcagcgcattcagaaagaagaagaccgaaaagataataccaggaaacatgaaggcggttttgagggtgatcttcttccattcagtgcctttgaacatcttgtacaggcgagatgaggtgtatcttgccaatacacccatgaacacccacaaaaggaccatagcagtcatgagtcctccacggtttgcaggcgataagaatccaagaagagcaaacatcatggttacaagtgtcatcccaaagaactgaacaccagtgccaacataaacacaaaggaggcccgagtgaacaggaggtcggaatacatcaccatgcactaacttccatccagtttcttcctgagcctcatcctggttgtcaagctgattatagt

SEQ ID NO: 133968 - DNA, 424 bp, Zea Mays
ccacaatggaggacgctcgacatcatcagacactgcagagatgacacactacttagagaagcttttccatacttagcactgcaaccattacgatatgggcaacatctcgctaggggtctcggatacgtgactgagccctcgggcttggcctcagctctcagcagaaaccaagaaaccaagaggacgcaagtcgacaacaagtacaagaccatttctcaagccataccatctacaggggtacgatgacatctcctcacattgcgcgaccaattcctgtcctgcaggcagctcccttggggctataaataggatggtccatggctcctgaaggacgacaaggcaagcactccacaagttttctcccccacacggtattggtacttgcctcaatcaacctctgggatttgggatcattccgcctccc

SEQ ID NO: 133969 - DNA, 446 bp, Zea Mays
gtgctaagaccaggtgcgcaacgccctaccaacatagccagatgcgcgaaggcacacagcctcatcatacaaactatagttgcatgcgtacagcgagggcatcacaccttacattggttcaactttcggaatgatccccatctccctatagttaaatagcattatcctcagctcctcaccctcaaaaagactacgcaactccccctcacctatactcgccccaaccggcaaggacaacaattcctgcctgccagccctgcccacacgaagccgaccaccatccaattcactcactctacgcttcgccaccgcccttcgccgcctacgcccaacactcggaccaggcaaaacttcagcatccgtaacacgcggagtagcctccgcctcagccacatccaaggccgcaaagtaatccaagccctcgttcgaagactcttctatccata

SEQ ID NO: 133970 - DNA, 584 bp, Zea Mays
ggaatggaaaattggtgactcccacttttggtcttgtctaatgaaggtaaaaccagactttctacgcttcggaacctttctggttaatgacggatctcaagtaaggttctgggaggatagctggctggacgggtccccgctgaaagatcaatatcactccctgtataacattacaagacccaaatcaataactatagcggaagctatgagctccttccctcctaacttttcctggcgacgacaactttatggatccaacttggtggattggatttccttgttgtcacgtatagagggtttggagttgtcccttgaccgtgatacattttattggaaccttaccccaaatgggaagttctcggtaaaatcgttttacacagccttaaagtttagtactacccctaatgtaaacagagacatgtggaagatgaaggcccctttgaaaattaaactttttttatggtatttacgaaagggagtaattctcacaaaagataatctggccaaacgaaactggcatggaagtttaacttgtgttttctgccataaggaagagaccatcaaccaccttttctttgagtgcc

SEQ ID NO: 133971 - DNA, 456 bp, Zea Mays
caacttctcttgcaaacaagatctctggactgcctctaatttcacgagacatcttagcaagatccagagataactcagcaggttcaacctaattcagatgtatctatgagtcagcaaatatcagaacgcaaaagaccagatctgctcaagttgcctcaccttgtaaccaggatgtttgtctaacttgagcagtgcataataaccccgaaactccttttctgttgagaagagaacaccttctctcctatggtcatcatacatttgaaatagctcaactgatgttttattcatctgctcaatgttgaggtgtgcatcaaaaccctcggaaaaaccttctcctttgttgtattcacataattcatgcatcgcaattatgtggagccttatctgctcaacaaaagacagcttcaagatgaaacattccaggaaataagggtgcccacagaataaattcat

SEQ ID NO: 133972 - DNA, 615 bp, Zea Mays
ctcaatttgaattcatctgtgcaatttctctctgccaaaatttcaatctgggtgaggaacaaaaaagagatctagcgttatttcggccgaaccgatacatttagtattttattttatttaccgaaataattatcatataccgtcttattattgcattacataagaactttgtttttatatatattgtgatgtatcatatggtgaattattggcatgaacgcacaatgtagtatacccatcgattgctcctaattgcctgcttgaatttggatggtttctaaatgcatatacacagggatcagtgcaacttcttcaaaattccctaggttctccaggctctcgcccactacaatgccaggcaccctgtatgtctgccctttagtactagatcgcaaatatctgcattatactgcaatgtcgtggacatgacctagcttaattggagtatgcattgcagggtggcgagttcgatgatgtgaagcccctaaagcagagccgcgtgggattccggggccaggcatggttccatatcaacttctgggctcgcccccgcagcagcagcagcagtaataacaagacaatcaagcgcttctttgctgaggtgcactacaagcc

SEQ ID NO: 133973 - DNA, 586 bp, Zea Mays
ttcacctcgtatgcctttgtcacgggaaaacctgcatcctaaagccgaagctctctgtagcaatccttattatgctgaaaaacaaatggttagtcatgtttttaaggaccttcggaagaggaagacccacaacattaaccaacttagttttttttgataatggaaacaaaaaatgttccagccttttgtagtttcctacatacggcattacagattgaaaattaataaaacatgcatcattacaaaaataacatccttgacaagaacttgttctcgaatcaagcgtcctttaatctggcattagaactccaaccatgttttgcaaggatctccattgccatcatctctaaggattgacataccacaagaatctcttggtgagcttcttgtttctgcaataatctccagagtctgagccaatacatccccctgaaaagaacctgcaaaattgatggtattggtttaaaattaaaggccacatcattgcggcacaaccaaatagaccaaaacattgctgccactccaattaaaagttttttccgatgagctattcccttgttagtagcccaagaggccatttcacatc

SEQ ID NO: 133974 - DNA, 373 bp, Zea Mays
gactaagacactgaactaagcattattacagactctgactctgtcgatctagggatccaaatctatccgggtcctgcagtctggggtaccatagtcgaagcgaccatggggcggtgaacagtaagggtgctgaatcccgacaggggcgggagaaccaccatccagatagtggcatgttgcgcactcaacacgcaattccgcaacctctgcccgaaccttgcccaacttgtcaagggcatggtccaactctgtgttgagcacgacagccagattgaccatactgttcagtctgggattgccctcaccaactggtgaggcaatcacacctccagcactaccggtcgaacggcgagggtaatacttcaggtcgaga

SEQ ID NO: 133975 - DNA, 671 bp, Zea Mays
gccgattcgttcgttgactggtgggccgccactgtcagccatcttcttcctgaaaacaccgtaccagaacccgcttgccaagcgcgcggaatccgcgtgggattcgccctcatcgctgctgcatctggtgtcagcaggcgtactacctcgagtcactgtcgggtgagccccactcgtcaggttcacctttccccaatgccgccgtcgcaacggaatgccgacccatcgccctggattctagcaccccacctgcgtcgtgctttccgtggccgttgcagccattgaccgaaatccccacctcggcctcgtccctaggcactataagaatccccgcacctcgggaacctgaagccatgcccccttgaatagctcgccctgatgcaatgaaggaatggcgccgccgtgggccaacttcgatccaccgccgacttagcctcgatcggtgcccgcgcgccgtcaccagggggccttggaagcttacactgggatcaccagcaatcagggccgtctccggtgtgaggaatttctcatcagggttcaatcatcgccaccgtccgcatcctaccgtggccagggtgcccttcgcggcaagctccggtgagaaccgtaccctcataatcactaggaaccaagtacctttagcactttttaacttagagttctgagctcga

SEQ ID NO: 133976 - DNA, 664 bp, Zea Mays
cgcaagatcgtccttcgtcatggcacaaaggccatcttcgagcttcggaaagcccatacttttggccatctcccggcagacagataattctttgttgtctgggaggcaatataagaagtcatcttcgtctgtgccattaaacactaaggccccttttgggtattttagttctcgggcatagtgtttagcttcgaaaatttcttcttcagataatctttttcccgaagcgtgtcgaataatataatcaaggtcctcggaagatgcttcgggagcaggagcggcagctttttcaggcaaaatctgttctataccctcttcttctgctgccttttctccagtttccgaggatttctccttggcgggcactgaaggcccagcttcggcgtcagcctggttcagtatagcttcggcttcggtcagctttgtctcggtttcaatctgtattttcgaagccttggcaatttttcctggagtagagcttgaagtttttatcgtctccagcacatctaatacactagccatcctttttctcttgggggttgctgctagatctttttgtgccttctgcgcctccactcctgccgaagggcttagaacttctgatgttttcgtcccttcggttctcggttcttcaattttgtcagccttcggcattgcagtcggc

SEQ ID NO: 133977 - DNA, 576 bp, Zea Mays
agcagatatttgctgcggtgatcaaagttaagccattgatcagctcggctgaaggttatcgcgtgtattgaccatcggtaagggcccggagcactggtcgtggccaccaggacctgccgatcgttgagcttttgttgcctcctattttcttgtgccccatggccttcgaatatgacgttgaccgccctgtcaacgcacgagaaagctccacccctcccctcttcctgctgcctaggctcgccaggctctcctcgtgatgggggaggtggtagtggctagaacggtcggccatgcccgacagagtgtttgaagtctctgtagttccatagggtgtggcgcatgtccttgtgatacagacactgggagtcgagaatctcatccagtgttcgcactcctccgcgaggtgcaccgcgggctcgggcagtaggtggcccggtggtgtgcaccacctcgtggggcctttttcccagcgcttgtgtggctgctggttcgtatcccgtcgtggtgtgggtggcatggattttgtgcctccgatgagttgctgggcccgctcatccgcagtgatgtagatgtccg

SEQ ID NO: 133978 - DNA, 353 bp, Zea Mays
ggttgttaagacagtagtagttacagagattttgctcgtgttggcagtcggcacccagagtgagtgtttcgttgcatgtgtgtcagggtacctatccttttcaacctgcattggcttaatgaatgtgagctgctaggaggattggtattgctgatttgatcatcttagtttgtttagatatggttgtggatgtaccctgggaaggagtgattttgacatctgctgagtatgagtacatcagctagctgattgcttacatttcttggtccctatacctgctcaccttgcgggtcattacagagatgaagacaaagacagtttccaggttcgtaccggctcttagctgcgttctc

SEQ ID NO: 133979 - DNA, 719 bp, Zea Mays
cacagtttacccctagattttggaaaagtttccatgagaatatggatgcgaagttggattttagttcggactaccttagactgatggacagactgaaaggactaatcaagtattggaagacatgttgagagcttgtgcccttcagcatggtagtagtgggacaagagtctaccttatgctgagtctcatataataatagttaccaggccagtctgaagatgtcactgttcgagactctatacggcaggaaatgcaggattcctctacattggatcagactggaggaagacagttctttggatctaaacttattcaagaggcagaagaacaagtctgtataatcaaggagaacttgagggtagctcagaccagacaaaagagctacgcagataatagaagaagaccactggaatttgaggaaggtgatcatgtgtacctcaagatgtcaccacttcgtgggatgaggagatttaatgtcaagggcaaattgtcccctcgctatattggaccattctgagtttttaggcgagttggagagatggcctatcaactcgagctacctgctactctatcagatgtgcataatgtgttccacgtgtctcaacttaagaagtgtctccgtgtccccgaggaacagttaccaatggaagagctcagtgttcaaggtgatttgacttacacggaatacccgatcaagattttggataccttgactcgag

SEQ ID NO: 133980 - DNA, 296 bp, Zea Mays
gtcaaaacacgagcgtcacctattaggtgtggagagtagcacccgcttaaccacttcgtagctaggaagttagcaaagggcatcaagtaaaccaaagtgtaatgacaggcactggggcagcattggtgtggctacagtatctacccggagtgtaacgaaaggcaccaaggtggcattggcgtggctagagtatcctgatggaggaaggggacgtcatctagggcgtcccatagccggtgggaaccttaaaggacaccatgctacgagacaccacttacctttgctcgctttccccg

SEQ ID NO: 133981 - DNA, 467 bp, Zea Mays
tgactggtacatgcgtgcatcatcagttggcattgacgccatttgcatataccagaccatgcttttattggttcggaccaaaagacctttcttgcattcgaggatatgtggttaatgatgaaccttcagaaactagacgtgcaacttgtgactctatttgcactgtaagtgtcgctcatatttccacattatgtgttattaattttcaatatctgacacatgcacgtgtgacttgtagaatgcaacatgaccaacaagagatcctgtacggtaccaagcccgatgctaatgccggtaaaaggattgagtatctgaacccaatactgatatgtgaggaaagccacactttcagaatcggcaaagacaatgaagtgttaacgggaaagacggacgaagaagttgagcatcgcataaatactatgaagaatgattttgaagcaagatacgccacctacatagcaaatgca

SEQ ID NO: 133982 - DNA, 432 bp, Zea Mays
caacccctcagctgcagtacctagttttctctttttagtggccggcacagctccccgcgaagggccttcctcaaccgcagtcgctggctttttccccagcaatcgacagtagtagtagcgtcgtctcccgggtaaccgccatctggtagacggttcaactcgaagacacggttcaaacgaacattggaactgcgaatatcccaattccgcaaagcctccgtcctcggcacataacgccccacaatcctcactggtccatcctctacttcacgcacaaatgtggttgggtttcggccgcgcaaatccaaagcaaaggtaggacttcgcaccaactgctcgcccaaggtaggcatctggcgagagcacacttcgccaagcacccaaccgtgtgccaagggccatactccataactaatgaactcctcaaccaaa

SEQ ID NO: 133983 - DNA, 487 bp, Zea Mays
cgggacacagtcaaatattttaagaggtctccttcacgtatgtataaatttgttgaggtttgcaatgagtatgctattaaagctggaaaaggtttatcccttgatgttaaaacaaggtggaattcaacatatagaatgctggacacatgtatggagtacagggatgcatttcggtactatgctgaagtagaccataactatgtgtggcaacctacacaaactgattaggataagtatcataagattaggccaattttaggaacaatggctggagcaaccacttcattttcaagttcagtttatccaactgtcaatgtcttctacccttacatagtgaaagtaaagattgctttgttaacagcacggaaatctagttatgcatatttgaggtgtatggctgctgcaatgttagaaaaattcaataaatattgggaggggaacaatgtcatggttattactacaatccttgaccctaggttcaaaatga

SEQ ID NO: 133984 - DNA, 502 bp, Zea Mays
tatctcccagcaaacggatatttctttgttgtccgggagacagtataggaaatcatcttcgttagtgccattgaacactaaggcccccttcggatattttagtttctgggcatagtgtctggcttctaagatttcttctttggataattttttccctgaagcatgtcgaataatgtaatcaacatcttcggtcggagcttcgggggcaggagattttgctttttctatcttattttgccccgctgccatgccagtacctgaagtttgttgctcagctttatcttcaggcgcggtagccttcgtcttaatgggcactgaaggcccagcttccgcaacttccttagtaggagcaggggtcaaggcttttgtggtctccttgacagcgtctagcacgctggccatcctcctcctcttgggagttgtggcaggagcctttgtcatcttcggccattctgcctctgccggtgggctcaaaagttttggcatcatcattgttttttcc

SEQ ID NO: 133985 - DNA, 1006 bp, Zea Mays
cagatacattacaaaaaaaaaaaaataagtagcagcatgccaccataactcatttgtggaagttagctctgctgagcctttcatattttgcaccaaccaactcttgaagctgcattatagctggaagttttttatcaactttaagaaataggtttgttagcaagcatggaactacttctagtaataaatataacgtgcatcttgatggaagaaatggtcataaactgcaaactcttgatccttactgaactcccaaatagtttgagttttgtgaccttggatatgatgcctaccgaacgtgattgtgttatatatggagaatttcttagggtacaataaacaccatgagttcacaggattttattcaaccagagctgattcccacatctcttgcttcatgtaaacttctccatgctaagaaaatgatttgctggatggcactaagtgaactttttatacagaagaggataagaaaatgaagacactacacagtatgcgtcatgttttcatggctatatatttagtttcagttgaggccacattgctcgaacgggagctagtttggtagcatgaatgtttttttttatcaactggtagcatgaatgttacacactggaatgtaactgctgcactattagtctaaaaaatatactgcattagccgtggtattaaaaaaaatacaataataataaagccttttcgtcctaaataagttgagataggctagaatttaaacctaaaagaagccacaaatcaagattcagacacatggacaattgcttttcattcacttctatttaaggctaattttttggtatatttcatccttcaagcttcttttactgcttctttctatatcaacttcaacttttctttgcctcttttcacattactattgtgtcttaggatccaccctgcgctggtgtctttggatggaggtctttgttagatatatccaaaacagaggcggatccatagggggggcaaagtgggccatggcctcccc

SEQ ID NO: 133986 - DNA, 889 bp, Zea Mays
cccatcacgccacgcgcctccctccctcattcctggcatgtggaccccactcacccctcccagcactggtcgtcttccggctcctcacccgcacgcaaggacagcgcagccgccgtcgggacgtctgctgtcgtacccttttggctctgcgcggccacctctacgcctccctgccctagccgcgagtagagcagccttatgcccgcacctgtccgtttcctctcctcactgaccgcgtcgtcgttttccctcccgcattcacgtctgctcgatggcggtcattaatagtatttggttcgtgcagacgtttccgaggtcgccattccttctccctgggctatttatggacacgtcgaactcttctcatgttcccttgatcactctcctctgcgcccgcgcatccaacctgcccgcaccgcgctgcgtcactgccacccacgctacgatgcgcccgcagtcgcgctcatctcgctacgcctcacctgtttcccattcccgcagccgttttttgttcgttgaatgccaatattaatggccatcaacgttggccatcaacgccgattaatttctcctccctcccctcgcctataagagcagacctccgcccacacttctcacctcgcctcacccctgctcggcccttcatgtctctactcgcccgttccttctctcgctcgagctgcctgcatgcactgcgtcatcatctgttctcgccgctgacgctgttgactcctaccgctgtgccaagttcgccgaagccttctacgtctacgagtcccctctctggagtgtgtcgtcgtgtcggttacttgcccaatctcgatcccaccagcaccaggcgccattcgtcgccagccatcttcgcagctcgccggagccctgtgcacat

SEQ ID NO: 133987 - DNA, 675 bp, Zea Mays
agtcttcatagtgcattgggcaccaagctttcacttagtgtcgcttttcaccctcagactgatggtcagtcagagcgaacaatccaaaccttggaagatatgttgcgcgcttgtgttctgtcatggaagggtagctgggaggatcatcttgcactggcagagtttgcttataacaacaactaccaggctagcatcaagatggcaccatttgaggctttgtatggcaggcagtgtatctcccctctgtgctgggagactttgggagagagatccctagttggtcctgattgggttcagcagacttctgaaaaggttcgggaaatacgtcagaatattttggcagctcagagccgtcagaagagttatgctgatgtgaggaggcgggatctggaatttgctgtgggtgaccaagtacttctcagggtatcacctactaaaggagttgtgcggttcggtgtctctgggaagctcagcctgagatacattggaccattcactatcttggcccgagtgggcagcttggcttatcgcttgctactgccggattccatggcaggggtacacccgttttatcatgtctctatgttgagaaagttcttgcgggatctggaccatcagattgagatggaaccaattgcggtgcagcaggatctgactttggagtgtcgtccggtg

SEQ ID NO: 133988 - DNA, 359 bp, Zea Mays
caatcctacctggtcccagggagctaatgacacatcttcatatccctttcggaatccatggaacccattttttggtatgatgaatcctaggggtcctccaccacaaacatcattcggtcaagcccagttggtaccacccactccatgtccccaggtttatacccatgtcaccaaccagactgaccctatcaatttggaatcagaagcagagcacagtgtccaggaagttaacagccctaccaaaccttcagacacacctgggacagttaggaggacaaaggaacagaacttcaaacctgatgaagaccttttgctttgcaaaacttggctagagattagtagtgacccagtcattagca

SEQ ID NO: 133989 - DNA, 446 bp, Zea Mays
tgtcgcatctgctgccgcgaccaactccgccaacgcagcgctagagcaaaagatcgacaccataacaaaggctcttgtcgatctcaccaccgccatcacttagatgatcagcaggcaaccaacaccaccacctcccccaacgtccaccagccctacttccatccaatatggcatgccaagttatggcgagatacctcccttgtcaaaccccgctgcgccacccataccatcaccgccgatcaccaccacagccgctccactcccataaacctcaaccaaccttacaccgccaacctcagccttgttgccgcccacatctaccatgcccatacccatccatcagatacccttcccacactccccatcaccaatcccaggcttttccccccaccatatcgcttacccaccgcagcaaaaccctcccaaccagcaccaccacaaccttc

SEQ ID NO: 133990 - DNA, 718 bp, Zea Mays
aaatgcttgcccaacaagcagtgggaaatcagctccagcttttaattgtaattcttcctgaagttagtgggcgtaatacggttcttgagcgagcctttgcacacaatggtataccttttgtctctgaagtcccaacaatcatctttggcgtagatgtcacacacccccaccaggagaggactctgcatcatccattgctgctgttagtttcatcttaatcaatcataattcagttgtatgatcttcttataatgtgatattcatgctcgtaatttggtgcaatctgaactatgcaaaaataagttatcatgttgctaacttcaaacattcaaattgtgcaggtggtggcatcaatggactggcctgaaatcaccaagtacagaggtctggtttctgctcaaccacaccaagagataatagaagatttatttactgtcagtaaagatccacagatggggaacaacgttaatggtggcatgatcaggtaaggttttttattgatttgagttgacctattgaaagttgtcgaatggttcatctgggtaactggcattgcagggaactactgattgctttccgcaagaagacaaacagaaagcctgagaggataatattctataggcatgtgttccagattcctgtttttggttcatttattgtatgctgttgagtgaagtatgttgacttataactcctatgcagggacggtgtaagtgaa

SEQ ID NO: 133991 - DNA, 518 bp, Zea Mays
gcggcttccttggcctcgtgggatactaccgcaagttcatccacaactatggctccatcgtcgcgccgctcaccgcgctactcaagaaggagggcttcacgtggggcctaaggctgtctcagccttcctcgccctcaaggaggaggtcacctcagcgtcggtgctcgctatgccgaccttcgacaagccctttgtcatcgagtgcgatgcgtcgtcccacgggtttggtgttgtcctcatccaggaggggcatccgatcgccttcttcagccggccgatggcacctcgacatcaagccttggcagcctacgagcgtgagctcattggtttggtccaagcggtgcgccactagcggccatacctctgggggcgctgtttcacagtcaagacagatcactacatcttgaagtatctgctggactagcgcttggccaccattccgtagcacctttgggttggcaagctgttgggcttcgatttctccgtcgagtacaagccgggcgcgacgaacgtcatcg

SEQ ID NO: 133992 - DNA, 481 bp, Zea Mays
atataccccatcaattgacagaaaacgatgtgttcttccgcgcaaagctttcacggaaattttcagaacacagaactgttcttccgctagttacgacctggcctacgtgagcaaagaagtcaagtaaaacaagtcggtcgtctagtcatcccttgccgcaacaaatgagcaccacacatatcaatatttttcttcttcttctttatttgctgaattttctccatgaccgagtaaggtttatgattgcaataatgttttcgtgtgtacatatccgtgagaaattgtgtctatgtatgtattcttaacgaatttcatgtgttcatataaaatgacgcacgccgacacgcattttacagatctaacaggttctctagaaatacacggttgaaaaattaaaacgagactgtaaatagaaatgaatcattctgacatggaccgaaatgcagagaagttaccgagaatattactccgtccgttcaca

SEQ ID NO: 133993 - DNA, 1087 bp, Zea Mays
tggagaaatgattaaaatttaatccactaattatttagatatcccttaaaactgattttgaactgattttgaggagtcgtttcctagggctagggagctcttggagatgctatgagtagctccaaaattactgcactccttcgcctagactctacgtacgtgctctggtagcaagtaccactgaggttaatacggaaatcaaatgcaattatgcaacctaggcatggccaagcgatcaaaactcaaaatcaattatgttacgctatatgctagtacaggttacttaggctgtccgcagtaattaaatcatataaaatagaggatttaaattgtagattacattgtttacgtaataaagtttcaaataggcgcaacaacacaagctgatcttttctcccttccttactccttccttttgtgttgctaggattgaaaggagagcagcaatgcaacggacaagggtccctattctatagcaagagctacacagagagagaaaaaaaagagagcagcatgcaaaggtgttccagatatatctttcttgtttggctcccaaaagccaaacagttatttagtactagctggcaggcatatataaaacattccttcaaacagataaatcgcaaggaaggaaaaaaaaatccatggctacaacgtgtatatgcttatcctctttattttccttgattgatgaatgaagtgaaaggactggaaagtagcatgcaaaagtgttccatatgtcttggcttccgggctgcgggttccaaattaagccacatttgtttttttaatttccaacataatattatttgaaacctaacacttttggtttgtaatttctacactgattggcacaaccgaaagggtagcatctgtaacttaattcttttttgggtaagttatcttaaaataaaaatatctacttaaaaagatgttagaattttttttagaactacgaagtcacatgactggtacctggtaagcgcaatagaacccccggccccacacacataaccccacatctatccctcaacaaaaaaaaatcataaaccatgtcattagtagctgcgttggcattgatctcgaa

SEQ ID NO: 133994 - DNA, 527 bp, Zea Mays
cggtcaagtgacctctgatacaatgaacggcccttcccatagtggtgacaacttgtgccgtccttcccccgttagaattcggcgaaggaccaagtctcccactacaaaggatcgatgtcatatagctttatcatgatagtgcctcaaggtctactggtatctggctgactgaattactgtgttcaatcgctcttcctccagcacatcaatatcctctagcctggtagcttttgcttcagctatgcttttgaagaccagcctcggtgccccgaatttgaggtcggcgggtaacactgcctctgaaccatagacgatgaagaacatggtatttccatgcagtgctcgactaggttgagttctaaagctccaaaccacatagggcaattctctgatccactttcctgcaaacttttcatttttttcaaacaccttcttcctgagtgcttccagtatcattccattggccctttccacctgaccattggctcttgggtgtgctactgatgcatacttgatctggatactcc

SEQ ID NO: 133995 - DNA, 371 bp, Zea Mays
gttcccctcacccggctgaagttagtccaggccctagcacgcctcagaccctcctctcatcgaccatgattcctagctggagttgccccgacccgcccggagcctttcctccgccgttctcccttctctaaccctggtctcgtggtcaaagccccaccagtgagtttgccgagtcttcctattcatttctagccagccccggtgaccctgcaactgccatagcctgcacccaccccaactctggtgacctcaccgccatgagcaggagcggcgccgcccgcagccatcagccctcccggtgttgatctccaccgtccaattctgatcgcacggcccagatcacgggataccgcttcgcgcacgcgcgcccc

SEQ ID NO: 133996 - DNA, 711 bp, Zea Mays
gatttgcagctggtcttcaacagcctgaggcgataccggtggaagctcaacccagaaaaatgtgtcttcggagtaccaacagggaagttactaggattcattgtcagccaccgaggaatcgaagccaacctggaaaaaatcgaggccatcatgagaatggaagcgccgcgatcatagaagaaagtgcaaaggcttactggatgcatggcagccttgagcaggttcatatcgagattaggcgaaaagggcttaccgttctacaaattgctcaagaaggtggacaagtttcagtggaccgcagaagcacaggaagctcttgaagcattgaaaaagttcttgaccatgccaccagtactgaagccgccacgccgagccacaccaaatcagctggcagaagatctgttgttatacatctcctgcatgactcacgtggtgagcaccacgttagtagtcgagcgggcagaataaggacacacatatccagcacatcatccggtctacttcatcagcgaagttctgggaccctctaaaaagaagtatccccatgttcaaaaactattgtacgcggtacttctaaccgctcacaaactccgccactactttgacgaccacaaagtcatagtagtcactaggtttctaataggggatatccttcacaacaaagaagccattggaagaatagccaagtgggcctacgagctaggagttcat

SEQ ID NO: 133997 - DNA, 344 bp, Zea Mays
tgaaacttcttcacgagatatagaggtcacccctatatgagtaatcgtaagcatgtgaaatcgccttaattcgttgctgacttaaatcgattgcttttgttagtagggcatagtagtagtcccaagttaagtaagcgcgaacatgttgcatcgtcttaagtcgttgccgacttaagccgattgctccattagcagggcatagtggtcaccccgagttaagtaagcacgagcatgttgcaccgtcttgagtcgttaccgacttaagccgattgctccgttagcagggcatagtggtcaccccgagttaagtaagcgcgagcatgttgcaccgtcttaagttgttg

SEQ ID NO: 133998 - DNA, 353 bp, Zea Mays
agctgaaaaaactgcggaactcgaaaggcggataggtattgcttaatagcttttaactttattgtttatctttgtgacttcgaacttatttacattttctaccgcagccgaactatctcctcccccagagcccttcgagtcattagtcgacccagaggcaaaggaatcagcagaaattattaacatggccgaaagcattatggacgaagtcgttactcaactgctgaccgaagctgctagaatattaatgtaacatttgctagactatgcttgtaatatttggtgctcatgggttcttaatgtaatgtataaatggctttgtaattcatttctttgcgatgcatgaaactttt

SEQ ID NO: 133999 - DNA, 764 bp, Zea Mays
ctcaagagagaccctgggcctgccccagtcctacacaaaatgccttgcgggcggctcagcctatcgtccccgtctcccaccagcagttacggtcacagctttattcgtcctcctcctccctacacatcatcctacgactttggatccatctcctgtctcctatgtcagctcatctctctggagatgaagactggtatgcctctactcactagcatataatctgctcattcatcaggcaacattgctacaagcgctacccgtctcgaaaatctgaatgcatctccatacaattcaacactgtcacctatcagtaaacaaagattggtgacccgcaacatctcctaatagcttcaaaagagttctacccaagaaatgtcacaggatcttgatctttctctatataggtcatgaagacagagcctgcaatgttttcaacggcacacgggtcagatatttcagaggtccactttacacgaacatagcatgccctaccatgccagagtgaagaaactgtgggaagcatgcgaagcaaatggattattatgtagactggagaagtggatgccgcatggtttgtgacatggtaaggtttgagccccagctgttcttgagtattgttgtccgagggaacacactggcgttcgctgcagattcaattgggcggaaccagatggaatcactactgctttgcttactgtctcaggtgagcaacatgtgttttagctctgtgagatactaatgacatgtggcggtgcacccttaat

SEQ ID NO: 134000 - DNA, 548 bp, Zea Mays
gatctgttacgggacaatttttcaccagtgttatgtgacgttcttccatactatgcgatatatagagctatgcctgattctccatgcgtgcgtgttgcgagatgccacgaagcgaagcgcccaaggcatagtgcaattgcacagggttagtcctcacaaatttgatgccttgtttatgcatgcgatggtcggttcccatcctaatttgtgatgcttctcttgcgggccaaaaaaatatgcaacctctttagattgcccagtctttgagacagctgatgccatcgcattttgtatggtgaagatgaagtacacccatctaaccttccgcggacctctaaccagccaatacttgtgctacagggaacacgtgcgtacaaccatgtttgtccagccattacttcagcaaaaaacaatatggtgttagtgatgcttatgtcgacacaggtagtagatctataatgtcgttcccttcagcgcttgccgcatccaataggcgacgccggcgcaatagagtacatcacatggtagctgacgagccattgtcaacc

SEQ ID NO: 134001 - DNA, 344 bp, Zea Mays
ctaagttcgtcctgaccgaatcaagtcgtgcgtacgttgtcaaatatcgatctcctcgaagggtgggacaccgagaagaggcgggtcagatgatgtctccagctgagagccagggctcgctggttcgtcaagctcgccagttgtggtgtcaaggtcaggcaactttaggcgtcaggaaggaggcgacggtgttaagaatggagcacctggggggattggccccggcaggccgggatgtaagaagaaatgggacccgatggatagatgcgaggactagaccaaagaggatggaagttgagagaactgctcagggcaattttagcctatccaaaccttatttttat

SEQ ID NO: 134002 - DNA, 445 bp, Zea Mays
ccaaaaaaagaaaagattaaatagtgtttttgatgctattggatttgtgtaccctgtctatcgctacccaccatgggggcagaaaagaaagggtgcaacctctggaaaggttgctgcttcggctgctccaagcgagcctgtgctgaagagtaaaaagttgaaagtcctcacccaccggccccgttatattgaaccggctgtggtgcccaagtttggtgggaaggcttcttcagctgttgatccaaaggagccaattcctcctacgcaaaaggctgaagaactggctaccatgccgaaggcaccctcagccgagcaagctgaggcaaagactggtaaagataaggccgaagagccaaagactgaaggaacaaaaatgttagaagttttaagcccttcagcggaagtaacagtgccgaagatacaaaaaggtcttgcggccactccc

SEQ ID NO: 134003 - DNA, 747 bp, Zea Mays
tcatactcattgcccttccctttttaatgtgcttatatatttgctttcaagcaaaatatatgatacaaagtgttagtctacagtataatgtagacacatactcataagtccacaagacttatgattttctttgctattcattttgcgcttgcacatcaagccacaaaagcacataagttcttttcataagaaccataagagaaagagagcatctcatttcctccaaattgaagaggtgaattcccatatcatgcaaaaatgatcttgatatctaatgaacattgaggataattaaggccagtaggcgagttcatcaaactctattaaataattatcatccaaatggattaaccattttctgatgttgtaatatgccgcaaaatatatcatatctttatatgttggagaactctaggtatcacataaagtgtaccaaaagatttttgaaaattggtgtacacaacgtagataatctccatgtaatgaaacaatggagtagatctctcagtagtgggcaaaaacttttgttgcctgaaagcatggtctctgggctgatatattcaaggaacataccgcagccaatgcttaggactccactaccctgtgcttggccaaaatttcaaaaataaaatggtaatcacaataaaggtgaattaccaacatcacatctccaacatatctacttggggaaacacatataggtaatcatcatcgacatatgatgtagacctcttactgatgggcaaa

SEQ ID NO: 134004 - DNA, 350 bp, Zea Mays
cacggccttgcgccacatgccttggcacattcaccgcatcgccgtgactcgcattagtcgtccgttcattgccggggagcttgccacggtgaaagccactaagattgcgcgctagtaaccttcttcccctccggccgccagcacatctttgtgaaattggacgccaccgcccccagagcctataaattaccgctctcgtctgctccgctatgtagttgtgcaaccagtgaagcaacccgtgcctcaaatcatccactagaactccccaatttagaatttcccccaaatcactcaagaacaccgagcagtttgacctcgccgtggccagcgtgtctcaggtccgctcatac

SEQ ID NO: 134005 - DNA, 372 bp, Zea Mays
aacgtgcgcaagtgcgctagaaaaaaggaaacttccgtggcaccacttgcatgtcgtgtttcctcccatctctggttgcatgcaagtagagagaaaacatctgcaccactcgcatggtcgtgtgtcgccgtttggttggctcatgatttcacgtttcgcgttctagcgcccatacgagattaaactggccccacactggatcctaggattttctgcagctgaggttccggggccctctgtgtggtccatcgtatggttagccttcgaccaatagaatcgtgccacttagtttaaatcagagaaacactagttattcaatatatatgttgcgttgcgagtccgtctcgacttgtttcagtcgtagcgacttcg

SEQ ID NO: 134006 - DNA, 556 bp, Zea Mays
ctcactcccaaaaacagctctccggactcagttggtgattatagacccatctccctccttaacacgagtgttaaagtactgacaaaaatcttagccaatcgtttgcaactggtgatcacaaagctagtccatcagaatcaatatagttttatcaaggatagatcgatccaggattgcttagcctgggcttttgaatacatttatctttgccacaaatccagaaaggaaatggtcattttaaagcttgattttgagaaggcatttgacaaattagaacatgcagctcttatggagattttgaggcacaaggggttcggtgataaatggatccactgggtttctatgattcttggttctggttcttcagaagttcttttgaatggagtccctgggaaagatttcactgcagacgcggagtcagacaaggagaccctttgtcccccacttctttttgttcttgcagctgatcttctgcagtctattgtcaacaaggcttgcgattgtggcattcttcgtcttcccttaccaaacaattgtggtccggatttccctatca

SEQ ID NO: 134007 - DNA, 354 bp, Zea Mays
gtcagccaccgcccacggtgcatcgcgggtcccggtgccgactccttcatggatggctgctagagccgggtccatggcctgggcctgacgaaggcgcgcgatgaagtcgaagcggggcgcggagatcgctagcagcacgctctcctccgtgccgcggcgggaaagagcatctgcaacgacgttcgtggcgcccgacctgtactccatagtgaaagtaaatcccaacaacttatcgacccaatggtgttgcgggatcgtggagaggcgctggtcgaggaggtatttgaggctatagcggtccgtcttgacgacgaagcaccgcccccagaggtacggccgccagtgctggaccgc

SEQ ID NO: 134008 - DNA, 577 bp, Zea Mays
ggcatatcctttgaaggcgaattggagcaccagggtgataggaattcttcatcagaattgctccaccgccgcggggccatatatcaccgtgggtagggctccttgcacctcgattctgggttaaggggaatcgtctagcatggcggcctcaattgctcgtcgctgctgtgcatccacggtagcaccgctcttcgtcgtggcccggttccggcaccaccttgtcgcacggtatggagccctctgttacttcgccttaattacttgcacgcatagggctatcatgtttgggaaagagttactggtgtgccgagaacgcctccggccggcgagtgcgccgccgcagggaaaatgtgtgtcgtcggatagcagagaggaggaggaagaagcgttgtgagccactgatgtgtgatgggcgatccagatcaactgggcgcactgtctcagctgggcgcgtggtgagccgatcgatcacggttgaacgcctacgattaggcccttacgtatcccttcgccagattggttaccggctgtccgatcagaatcccgtgaccaagattcgacctcagtcattttaaat

SEQ ID NO: 134009 - DNA, 330 bp, Zea Mays
gccgggttttcctcaagataagcaatgtctgttcgctattagctaggagataagctggaagagtgtgatcagcatgtgtgcagggagtgccctatagttgtgcgtataaggcctagggggatccccatcattttcatctcattagcacctctccactcgtgagacaccacttgtaaacaccccacacatacaaagtcaccctaggaagaagggtattacgctcctcaagcggcccgaacttgcagaaaatcacccaactctctcttcctcgtgcccccagcacaaaccatcgagttatgatctacgacactgtcctacccaaaagcacca

SEQ ID NO: 134010 - DNA, 534 bp, Zea Mays
ggattgcatgcagcatgttgcagtctagtagaatgatctcatcaagtttcagcactatcattgcactgagatccagcctcttcacagctcatcctgagatatcaaggctcacgagctcattgaatgatcctgtcaagagtacattctctagcttagcacacccagccaatgagatcttctctagtccagcacatccttgatgaatgacgatggtctccaggctgcagcttttttctgtggcagatatgcaactctttccactaattatttcgttattaccagagaggtcaagaaaccgcaagcttttcgaccctgccaacaagtcatctttccagagagttgtaccacattgaattgtagactttgctactccaagtttgcaaatattaggaagctgcccctgtaactggcgtatgtcccaatccttggctccgatcacatttagcaccctcagctgagtcatgaactctagcatctgtccaaacaagatctgatcacagcatgtgtagcgcacatccagcacccacagccttt

SEQ ID NO: 134011 - DNA, 446 bp, Zea Mays
gcagggtcttttcaggccgggcgaaggcgctttgggcgagcaccatcagatttttgagcagtcaaggtcttttcaggcccggggacagttgcaatagctatggtttcaatagggatggagttagaggaatcctcagccaacatgtccagcatagcacttatctctacatcactcgggtttacaagcatctcaaagtgaacttgcctttcatcgttggggagatcaccaagtgaagcaaccagagcctcgacttcttcgggagagggtcgcactctaagacccaggccactgtcgctagcaggaggattggacacaaaactgaaaaaagtcttggaaggtggcagattctaggcagaatatgcaacatgagcaccaatattcgacaccttgcctctaaggatcatctccagccggcttaccaaatccatagcaggaatcctcctgtt

SEQ ID NO: 134012 - DNA, 454 bp, Zea Mays
agagaaggcactacgactcaaggtaaattctctggccagtgcccaccctgtgcagcagtgatgaccattagagcacatcttcactcgaacctgacgaacctgacctccttgtgccgaacaggaacagaatttacggctcgagattgagaaggcgcgggagcaattcaagagcctactgaacgaatacgtttcgttgtcagctacgccgacacagaaacggtaggcatcgtcccgaagccaccggccgtggccggcggcttgtgcactcgtgctagctcttcacgacatgtgggtatgttcagaatgccagagaaccgaatgctagcaaggaagcggtgatgcttctggacggctttgccggtggcggtgtagacatagcgcgaaaggcgtgtgtaccaagctctcagaaactcgactttggtttattctccagtgtcgagtgattagatactgt

SEQ ID NO: 134013 - DNA, 613 bp, Zea Mays
cgtttgctgtgtttattgatcaatataataaggcgcttttacttttagtgtgaatttctttccttctctgttcagtgcatacattagtatgttggaggatgtttatatagcatgattaggaccttcgttagaattgacatatctagaacggttttccaaagtctcctattgagctgataactgatagtaatccaccatccctacttgttcataaatgaacctggaacatattacaacactccatgctgcattctgtcttgatttaggggctgtaaggcaggacatgctgcccagtatgttggaggacatgctataaatatctgtgcagcggtattgtttgcatatttttggtcttttaatgttgtgtgacagatgatactgtgttgtgagagtaatgagtattgtgtagttgatcatcccagttcccaagcactaggtattttccccatctcaagctctagctggcaattagaatgatgtgcatctctaaatcctgatgaataattgagggcgccgatcccccatctagattgtgttgtgtggtaatgtacatttggaaccagagtttttgcgcatatatactggtgtatattgactgccatctgtgtttcta

SEQ ID NO: 134014 - DNA, 362 bp, Zea Mays
ttctaattcgatccttaaatcttataaagtaaaatttagagcccgttatcagccctaatcagcaaacgtcaggtgaaggtaggtcgaagcggagaacaccgtacgaatcgcgtcgctggcttcctcatcttcgatttggtctcgggcactggaaagcatcgtcaggtgcggcgatacagtccttggcggacaacagcgacttcgagcaggaactgggcaccacctcacttaaccgccacggcgtggtcacggctccctttcgttgtactcaacctgttcgacgaaatgtgagaagcaatattgagacataacctatgttggagacagcctaagactgactgcagcggtcgacgctaccgccc

SEQ ID NO: 134015 - DNA, 399 bp, Zea Mays
cgcacggcttgtataaataccctgagatggagcccagccacggaggagatcggtcagacggatgctttattcacgggattagttcataacgaactccgtgcatggcactgggagacttttcgcgagggagatacgccaggcggataaatccctgggccccaggcgtggttggtggcaaggccgcgcggtgcggagccctatcccccggaattaggtgtcaacagccgtccgaggttcatggcgccgccccggccaacctcgctcggacttccgcagtgcgttccggctttcgtggtgaggcaggtgaccagcggcaaggccacgtgcggccggggtcacggcaattttgttgagtcagattcggaggaaggatggaccgggggcggggaaatcaaatcc

SEQ ID NO: 134016 - DNA, 422 bp, Zea Mays
atccgaggcaaactggttccctcctggttgatcttcctgcaccattggtacaatatccaagcatggatttgatcgatgaactgatgtcggcgtcgtgtactctctgattggctctttaccccatggcaccgccatcttccagctccggttacttccttcagccaggcacatcctaacaaatgattcttgctgtctaacttttctggaagcgtgggattctttccttttgcccatgcacatatccattatcgtgggcgcaatattcatggcgagttcgcgtgcgtatctgctacattataggatcgtgggcgcgctgatcgtgggcgtaacaacaatttatgcaagttcgacgtaggtcttatgctgtcgtaaaacatagtttcgatccgcttccataatactcgggtgacacgtcaccggcc

SEQ ID NO: 134017 - DNA, 2848 bp, Zea Mays
ctatatcaaagaaaattgtaaaatttaaatgatacaacactgtagtgaattacactgcggtagatgagcataatgattgctgagcattgctctatttcgactcagcttgtgctttcaaaaatcacaatgtagttctggatgaatgctattgctataatttgcagggttatgagctaatgtattctccatccactagttgttttaaaaataccggtactggggccgcgctgacatcttgaatgtcctgcaggatttgaactatctgtcgcatggttggcctgtgagcctcattgtcctgaatgcaccagcatgcaaccttgcatgctctctctagctcttgaaaattcacggcacttagtctgggatccaaaatttcagaaatgtcaccttcacttatccttattgcggcccacactggaaagtaccttatggctccgctctccatcaattctgaattccttctgcccgaaatgatctcaaatagcatcattccatagctgtacacatctgcttttggtgttatgggcagacctccaatccactctggtgcaagataccctgctgttcctctcatagttgtcaaggccctgctaaaatgtctttccataagcttcgccagaccaaagtcagccagtttcggactgaagtttacatcaagaagtacgttttcaggctttatatcacaatgtatgatgcactcctgacattcatcatggagatactgtaatccctttgcaacacctagaataattaaaaatctggtgttccaatccaatatcttttcatccttgaagagatgagcatctaaagatccattcaccataaagtcatacaccaacatcctttcagcccctctcaagcagaacccaatgaggtggactagattgttatggtgaattttccctaaagccctcacctcggtgtgaaattgcttctctccttgtttcatgccttgaagcttcttgacagctatcggtttggagtctgggagcaatcctttgaacactgaaccaaagctaccttgccccactctatctgaaaagttctttgtgcagtgccgcaaaaacgagtaatcatagacgacgagagagtaattatctgagaatgcctttctagatgaagtcctttgaaacatcttaactgttatgctaagagcacatagtgccataaaaatactacccagcactgcaaatagcacaattagcctcagatggtgtgcctttttttcgctatcttgaactacatgatcagatgctgcaagacgtatatacatatctgaaccatcagtattaccattaggtagttgtttaagatcccagagttcactattccagatattgcaatcctgcttgtgtgcatatgcagtgcaagagcaattactcaagcatatagatctgcacccctccatgctttggactttcagttttactgggttttgtgaaaacttgatgttagtgatcttgagaaacgcatcactctcctttatggcacttgatatatttgactcagcacattggatatctgtttgcctaacacatccttgactccatgctccaagacgccaacttcttgaggaagctggtctgaaacctggcaagcagaagcattgctcatcagaacctgtcctgcagactccaaaaggcccgcatacagaatatacgtcacatagagctgcaggaaaataccaccctgttatccattcctccgaatcattggaccatgtgagacgttgtagttggccattattgcttagaattactcttgtgattactgacacatccttcgtagtccaccgaaacttaagctcgcgactgttgttaacgaagtcatatatgtagtcactctttagtggcattccagggatggacgtgaatgctttgcctgtccagttcccagattgccagtaaacttccgagtgattccatattgacacatattggctcatcgtaacaagatctgcgtgataggagaaaggacctggtgcaggatcttcttggttcttccaagaaacactgtcctgatattcatacgtgatcttgtctatgccaaaccactgcccgctcactaccgtgtctgttggatgatcaaagctttgccagaaaatatcagaagagttgtattgatctcttaggataaggtttccactatcaaggagaactgcagtgctagatctacttgacttccttgtgctattcgatgaccatatgggtgctcctagagagttgagtactaaatttccatccatagttattgcaagttctggagatgaagcatttgaaacaggtatatcccgattggccacccaaataacagtcctctttgaaatagtcctgaaccagataccaacataaaagttcccattattacctggggagaagaatccaagctcaaaattcccttcttttgacacaatagttatatcgcctgatagaggttgggtcctggagatagtatcagtcgcaccaaatgtaattgcgcagaaatggagaagaaatatggggagagtaatggaaggatgtgtctttttgagcaaagccatcactctgcacggaagtgttggacgtctggtgttcaagaattttatgcactactagggtgttatcttggtcaagcagagcgtgctttgatttctttgctctttgctgtcagccttcttatttgacttgacttcccttcacttctgaaatggatgtcttaatttttctttctgaactaatggatgtagttgttccacatggcacaagcacaaccgttcgatgatgtttgttaagacatgaaactcactcacagtttagttaggataactctagcaatagcctacaaatcgaggctgcaaccttttgttttt

SEQ ID NO: 134018 - DNA, 397 bp, Zea Mays
atccattctataaggtcttttcgagataggtgcagttctgggtaataatttaatagaaaactctatatcacggtgaggtggcatacctggtaattcctccggaaatatgtctgggtattcacacactatcttgatattttctaggggcttttcttccaaatgattcaacactgtctttccttttgcatttgttggcatgtctgtgctaacttggattctttcgccttgcggacttgtcaacgtaattgttccgttggcacactgtatcactccatcacaacttttcaaccaatcgcattcaagaatcacatcaataccgttggatcctaggaccactaggttgactgaaaaatctattccttgaatcttgagattaacatggaggcatgagtgtgtg

SEQ ID NO: 134019 - DNA, 535 bp, Zea Mays
ctgaagagtcctcggatgaaggcttggattattttgctgcattagatgtggccacggcggagtcctcgctgcgtgtggaggttggcgaggcgactgatcttcctagtgcgaggaccaattataggcggcgaagggtggtgtcaaagcatagcgtgggtgaggtttcgcgaagtggtaggcgtcgtcgtattgggatggagcgagaccgtcttcgtgtagaccggattggtaaacgtgaactgttgttcctaccgattgggacgagcataggtgagggggatctacgaaatctttttgagggtgaggaattgagaataatgttgtttaattatagggagttgggtatcatcccgaaggttgagccgatgtagtatatggtgccctcgctgtgtgtatgtaactgcaacttgtattgtaatgtggcttgttggccgttttcgcacgcctgtgctgatctggccgcacccgtaggcgactttttgcgcgaagtgtcgaatgacgtacttgttgcgcttatccggcagcacccttagtc

SEQ ID NO: 134020 - DNA, 675 bp, Zea Mays
gtccaaacttggctgatcaagtgaccaagccattcaatgtaggaaatggaaagtaaaacttgattatagttggacaacatttctactcttttggtctgtagttcaccattgatgcacagcatgtagaatgttgtccataacctgtaattttgtagcctcatcagaacaaaggatctgcactgtgcatctagctctattttatattagctgcccgaggcttgccctaccagcagaagatgctgcgcacttattaatcatccattgccgctactccattcggatctgggacaagatatatgcctggcttgcggctgttttggagcctcgtggggtatgtgaaaattttatatcggtgacagagtggtggaatgaggttgtacactcaaaactcaaaagggtgtcctagaaaggcattttgttcgatcccaattctgtaacctgggaaatctcgaaggagcgaaatgcaagaatttcaatcggagacactctttggcaatctatcttgtgacaaagataaaggagcaggccacgacttggggcagtgcaggtgcaagacaccttaaggagatcctacagagcacttagctttttgctgtaaattcttgttagtctttccttcctctcgtatttatgcatgtttaacaatgtatacagttgttggcttaagcctcttcc

SEQ ID NO: 134021 - DNA, 369 bp, Zea Mays
ggagaagttaaggtgattttgtgattaacccttgtttatttgtgctgcaattcaatcgattagatgtttacgtatgcgaattggtagaggtgctgtctagaaattttgtgggtgggcaaacagcagtagttctagcagtttctgggaatgtttcgtgggtatttagtgggaatcagtgggagaatcatgtagagctttgtcatacctttccaacgagtacttatgcgctcgattcggagttatattttaggagatatcgctgtttgaatccgggtatgttgctgtccaaaaaaaaacagatttgcaggtgggcgaataacagtagtattagcagtttctggatatttttcgtgggtaattagtgataat

SEQ ID NO: 134022 - DNA, 577 bp, Zea Mays
cctagaccccattcaacctaaactgatccaaaattaattaggtcttatttagtcaaatctagttatgctaaactactctagtttccatctaatctgaactaacccaatgtgacccactcaaacagattagttaatacttgtaacatggattagaccctatccatctattctaacgtgattcactcggcactaaattaagagtaaccgaccaactcaacaatgagcaaaagagttaacccaacccatagggtcatgatgaatggtataatctatctatccccacctaacatcaaacaaactttaatctacatcatgtagtctatcttacccacatctatattaatcctattcccccaactccgacaaaatacactaacctcgaatcaatgagactaagacttgaaaagggcaagatcaacctcggagagaagtcaaactcgatcttcagaggcattaccacccaacaagttctttctcaccgtaaactttcttaccccaggctattcttgccctaacctatccatctcttgtatttgacataatatgtagctgggtacctatactctcctaatcaccc

SEQ ID NO: 134023 - DNA, 311 bp, Zea Mays
actgtactttttgattcaggagcatctcattctttcatagccactagttttgtggaaaagcatggcattccctctacacacctagaaattcctttggtcacccgaaccccagggtcagaccttctatgccaactcaaatgcccccaagtcagaattcttttaagtggggtagtgttcctggcagacttagccgtcttgccatcccaagggattgatgtgatcttaggaatggattggttaaccaaacacaagggcatcataagttgcgcaaataagaccgtccttctcactgaccactgaggaaagtcagt

SEQ ID NO: 134024 - DNA, 467 bp, Zea Mays
ccaatctcccgccatgcaagctactaatgctgttgcctgctactacctctgtgtaagcttgtactgtagtaaattttaggtttcaattaatttcaggttttagttagcttcaaagcttgtactgtagtaaattttaggtttcaattaataaactgaattttatccaactacctgtcgcgtcctttctgctgaaattacacaagcagctcaggttcgcggaagcggaatcggagtccgcacgacgtcgatcatggcttcaccatgccttgcttctacttctgattctcgttgcttttgctgctgttgctggattgctgcagggagtaggaagaggaggaggaggagcctcagcaccagcggcatcacctgcggatgccatccaaatggacgcgcaggtctcgactcactgcggggtgccatacacagcttcactactcgccttcgatcccgtccagcgcctcctcgct

SEQ ID NO: 134025 - DNA, 495 bp, Zea Mays
attcacgtccttccaatgactactagacaaagctattgctctagaaaacaagaggtttgagtttggagaaaaaagaagggctactaatcagggacaggctggaagtaattcctgttcccgatatactactactcaaagtacacctgcttgtggcagttccgggcaacaaactcaacagacataaactgctcctcctcaagcaagcaccccagcgggacctatttctcctaatacatccaccaacaggtcatgcgtcaagtgtggactgtgtggacactatgccaactattgtcccaacatggctgcttttactactccggctccgataaagcagggtcagacctcggctggcaagagtcagcccttatctgtcaaccgagggcaggtcaaccatgcagaagtagaggctgaacctggtgaacctgaaaaccaagaagaggtgccagttgaaggtgaagaagccaatgaagaaggcaatgagcaacaagattagag

SEQ ID NO: 134026 - DNA, 739 bp, Zea Mays
attccttcagctttaacatggatggcgggtttaatacataaaaccctacgagctcatatgcgaaactcactggctgaaagggtaacattgcgtgtcagccatcagatctaaacctgacggcacaaattaaaagggatgaagggttactctgggttctaatccgcaccgcacataagcaatctaatagtcacgatctacattgccccacccccaatcttggccgcacctccgagatcccatggtttggttacacacaagcaaccactgaccactgaccattggattgtcatccaacgacccaagttcgacgccgaagcggtatcatcaacacccgatcgcagccgtatgatggccatccaatggccactattcctttcccagctacacccctccaagcagcccgcgcgcggcgacgccgcccagcccatggtgatggagttcgtcggagatgcacgatctccctctctggtttccaaaacctggatctaaagggtgctacgcagtgggggcgttaatgcaaacaaggtggggagaattttaccatcggtcgaagtcactaagctgcgggtccacgacacaccatggagcaccgccattttctaaaaatcagtgaggaattgcgacggtgtctggccgtccacacgccgggaaaatctatggctagtctccacacacataggcggtactcctccttcacaacccgaggtccgaatgacgatgatgctggttctatggcgcg

SEQ ID NO: 134027 - DNA, 378 bp, Zea Mays
ggagtttttgtggcgtcgtcgtcgtcgtatagaggaggccgctgttttctgcggtaaacgtgaagggcgcggcgggcctttgaaggcgtcgtctccgatagatatccccttggccaccagaggtgccgtcgccgcgcgtcgccgttggtagcaggctagcagcacacgcgttgagcgcgtcagtcgatcggtgcgctcgttcgttctcgatccgccgtgatggttttgcttgttgcgggtgatacttcgttcgcttgtttatagatgtcgatgtgcataggaaaagttcggagactcactggaggtgtgccgagatcgggatcggagcggagtaagattgtttcctcctcatttttggcgaccgaaatgttcctgtcc

SEQ ID NO: 134028 - DNA, 1179 bp, Zea Mays
cccaaaggaaggagacaagagaagacgcccagacacacacccagacgcaaagatgatggactgacgggagggaggaggacgcaccgacgaggaccaagaggtcggagccccgccgtcgatttaagacttagttaggactccactctgtagcccttagcttcacttcctccaccacaaagagacctgtgagtctctaatccctctcttgcccgcttgtaactcctactaccagcattgatcagcagtggtgctggtagcgcaagctaccgatgaccggatgtagggacattctgcccgaactagtataaatcttgagaagcccagacatgcacacagaaatatacttgtcggagcgaggttcaaaataccgacaaacttcctttcacaagttagcatcaagagctgaatatgcatcttctatagttttggagtatcataaggtatataatataatcatcaccaaaagactttgtggtcctctgtaacttacttttttgagtgactatagtagtatcctcctctagattttccacatgggtttcaaagtcagcatgtattactagtttaggtatctcaggtataaaatgcatagcatctctagattccataattgcaccaacattcagctcaggtactctagagtctattattaaaaatatataagccacaatgttagaagcatacccaagaaagacacattcaatagatttttcgtccaagcttttgcttcttgttgaatgacacattcaccttggccaagcaaccccaagttcatagataagagatattcaatcttttctttcattcatcgaatgatgtaattcccttgtcatttgttgttacttttttaggatatgacacactatcgttattgtagttcttcctttccgcaatcccattggattgtggtgagtatgacaatgtcctctcatgaataatatcatgctccgcatagaactcggaaaattcttttgagaaatattatcccccatgttcatactttaatagtttaaccttattctcaagttaattttctacctcaacattatagatcttaaaatgatgtaatgcttcattttttgatttttgataagtacacataacagaatctagtgcaatcatctatgaatgtcaagaagtatcttttgtcacctttggtcaactcgctatttatttcac

SEQ ID NO: 134029 - DNA, 561 bp, Zea Mays
ctttgtatccaatgtctatttaaaacatttcagtttacatgtccttgaccacccttgtttcttaatgatccatgagcggtcattttattttgcacatccttggtgatctcgttgtttcctcataacttccctaggtaacgaatttttacttcaacccttatgttggaaccatgtctatcttacccttgattattttctccacttcgccacttcgcgagtcttgccttaactctatccttggttatgcttttcacaattatcatctttacccttatcacctctatatcttaccttgatgtttatcttatatctgccctttaaaatctcctcttttcatcttaatctgagcattgtacttcacctattttccccttggtcgtaccctcatctttgtcgcttgcgagtttttaactccatcctttgttgtgctccggttgggtattacctttacctttctcatctcttgtaccttggtaattacactatgtccgttctctaaaatctccaatccctatcccaattggagagaggtgttttgcttatctcgcccttggcaatgtc

SEQ ID NO: 134030 - DNA, 437 bp, Zea Mays
ggtttataatatgacccaagaacagaacttcgctgatctagaacttgcacttgctaagcttggcatacaactggcaatctcgtagcctctgaagtactttcctcaaatgttcttcatgctcttgctcattttgggaatatacaagaatatcatcaatgaacaccactacgaacttgtcgaggtagtccatgaacacgttgttcatcaggtacatgaagtaagctggcgcattcgtcaatccgaatgacataaccatgaactcatatagtccatacttggtgataaatgcggtcttcggtatatctgagggtcggattctgagctgatggtaacctgacctcagatctatctttgagaacacactggctcctctcaactgatcaaataaatcttcaattctgggcagggggtacttattcttgacagtgacttcattc

SEQ ID NO: 134031 - DNA, 548 bp, Zea Mays
gtgggcagggccacgcggcggagctcatgcctatttgccgctgtgatacttgccggtggagttgcccttaccgggggtgttccttgtgcgtacgacgttgggcggacacagctctagcaccacgcgaagaagaccgtgtagggctgccatagtgtgaagttgttcgtccctgtgccgaaccacggtatgcctccattatttcctcgccgttaccccctctgatgttttagctttcatggcgggaaggcaggccaggtccgccgtcgcggtgcttggctagctgtgggtgtgcgtcgcgaggaggaagacgctagataagccctggatcataggatggacggctagcttaggtatggggcatctgttcggcggggatccgatccagacggttgaacttagatcctagggccaggtatgcgtaccggttcactctatacgacatctaatcagggccctcggaatgagatccgatggccagaatccatccatactctcagccgcgatagatttacatatgagaccctcatgattccctaaatagaacctgc

SEQ ID NO: 134032 - DNA, 662 bp, Zea Mays
gagattgtggcctagacctgggcatggacgcggagtccgggagccgttgcaacgaaccggaagtcccggccgaggggttgcgcgagcgatccggttgaggggatagagctgacgagggcttgactccatcatccaacgagcgaggccgaggcagcggatctcacccgccatttacgcgttcggtttgggaggttgaagaagatggtggagctgaccagcgggtcccaacgaacagcgacgcgcgcgcaattggaaggagtggacagaggctgacaagtaggacccgcgcgtaagtgacactggtaaaaagaaaaggaggtagcgtgggctgagaaggggggaaggaaccgcgggtggtgggctggcgagtggagaaagtgggccggccagggaaaaatggcccaagcgcaggcttcctttattcttttccatttagttttcttatttcagatttctaatatccaattcaaatttgaatccctgtttgaattttctgatttcaactctcaaggatagctctaatgtaaagctaaatcctcttttcattattatgtatttttctccctattatttaattatggaggtaataaatggcttttattacaattttcgttttatattttccatttatcatttgaggtcaaattaaatcttgattcctt

SEQ ID NO: 134033 - DNA, 321 bp, Zea Mays
tttcatggtgttcatgctcagcttgttcaaatacgtcctatgaggcctagaggtgctttgcctcttgctgcaaggcctcaggcagtgagaccacatggtggtcgtgccccatggggtgctggtcgtgtgtcatatggccaaggaccctgtgacagtggatttggttcttacttccctaatggaccacaattttcttcttatggtgatcgcttcccttctggaccagggttgggtggtgtttttcctaacactttttatgggcagatgccatagcattggtattattctcagtatcctaaccccagtgctgtgcaatttgct

SEQ ID NO: 134034 - DNA, 481 bp, Zea Mays
attttgcttaagagtgtaagtcatgttgttgtgaaaaaattggaaataatcatactcaaagtcaggttgtcaggctgattaagtctgaaattcagactgacagatatatggcatgaacttcaagctcagtttcaagcaagattcattgactttttgtgggaacacaatatagcaaagttgtagttggtttatagcactacaatattgctgcagagatctggatgtgttgccacagaaatttggaagaaatccggccataaactatggctgtcaggcttactaatgaagcagtgccatggtacagtgtccaaaatagaccaggccgccagcgcggcaacctcaccgccggcgacctccctatgcaaagattcgtgccatcaccggcgtgactcgtggccaaatcaactggatagcacttggagatcatcgccgtggataactccggccagtaaagtattccggccaccgtacaagcgttcac

SEQ ID NO: 134035 - DNA, 627 bp, Zea Mays
ttgatgactgtagccttcggcacccgaccgaagcgaagattaaattaggtaatggatgccctgaattttgaatatccagactatgagtgattgagcaagggcgccgaagggcaaaaaaaaagagttgtcagtgttgtgggtagacaggccgctagaatggtaaaagaagatgaagaaaacctaaagaagagaaaactgagccctgagccgaaggcagtcgctccgaagaaaaggaaagctacggtcccgaagcagaaggcagctgataaggaagaagagactgcttcaacaccttctgctgtcaacgtggaagaaattctaaaggtaatgaccgaatccttgcctaacaagctaagtccactgaggccacatctgacgaagcttttacagaagaaggaagagccctcggcaacgaagaagtccgctgggccgaaaaaacgaagaattattactgtgacagaggccattgaagaaacaccaccaccagcttcggcgccaaaagcaccagctgttgagagcgctgcagctatcgaagctgcacatcctgaagctgcaattgtcgaaggtgcaaacttagaaagtacactttctgatattgataaaatacttctggacatggccgcagaa

SEQ ID NO: 134036 - DNA, 1096 bp, Zea Mays
cttttagatatatggattggctattttggataaagaaagtgggggatattgaccctgaaatatagactggtccgatattccaggatcacaaacagatttacttccaatacaaataacttcttaatacttacattttctggaaatctcgtaaataagaaagttgtagatagttttctaagctttccaggaagtacaagaatactgaattctgagtctgtatgtgagatttatgctcaaaataacgaactggacagaaactaatctgataaggacgaaatgatgagatgaacattcatgggatctattttggaaattgaatttgtgggatcgcagtggatgaaatggattaaaatgaaccaaaacaaatctaaaccagcaataagacattgacctaagacacaaatgtaataccccaggtgtttatgtcccgttcgataacgaggatggaattaagcacgagataatgacgagatatcagtttatatgtcctaatcatctttgtctctccttagttcgacatcatttttataattatctatttggactatcccaaatgtttcacaaagtttggactttagaaatcttctgagatgtcaagtctatgttgttcggatgcgtctaatagacgaacgagatttcaaaaagggtttgatttttataaatttgaccaagatcgatatcctgaaaaacaaggcgcaaagttgttaatccaaatgatatctagtcgagtgcgcgttcttgaatacatttttgtttgatttcatttaaatcaagtactaactaaaatatcgatgtcagtattgttttgattcggaccattccaatctatctcaaactctaattcttggacccaggaattgtttgcaatttcttttgttagtaaaagcttggagagggaaaatctaaaaatatccccaccgcttaagctctagctgttctcatctccttatccctgcgacgtcgctcactagggttcatctcccaaccaccctctccatccaatagcagagcacaccatcccctcctctcggctcccctgcccccaacgccgcccggcttgccacggatcttactgcaagattccctttgatcttct

SEQ ID NO: 134037 - DNA, 548 bp, Zea Mays
gcttgctgaggtctgcttgctgaaggatagaggtctgactgctgaagctgtagttgctgacttcattttcaagaacattcaacccttaaaggatagggcttacccttcttatttgtacagtggtgtcaacgactccactcgggtcacgaacagaagaatccccactggagatctgctgagtcgactagacattatcctgagaggcagagtctcgaatgatggtgctcctgtggcctattctgcatggaatctgccgccacgtaggccattttctgagtttgtatccaaccctcctgctcgtaacagttgcccgggtcatagagtgcgaccctctccagcagatatcaaagccttgatcacttcactttagaaccttcctgaagatgagaagcagactcacttcgagatgccagccaacgctgatgacgttgagatagatgctgtgcttagcctgctggcaggggaatcatctgactctacccgcaccgagccaatgactatcacaactgggcaggagtttggtgaagaagtggaaacttggaaacccg

SEQ ID NO: 134038 - DNA, 287 bp, Zea Mays
gctcacggagcctataaatccaccctgctcccacttcgtttgtctcaaatcaaccaagcccagctcttcattcctcagttgtgaatccaaccagccactagccatcacgttctgtcccccatcctctatgatcaacggagttcccctgaaccagtttcttccgccgccgtgaagaactcttccatggctagcactcctcgggttagtgcatacccaattgattcgagttcttgcttgtttttagccccctgttgctctcggagccggccaattggagtttacctgag

SEQ ID NO: 134039 - DNA, 350 bp, Zea Mays
ggtgcaggagcttgaactacggtgctgaggttgatgacctagttgcgaaggccagtgactctgccaacggggtgggcgttggcagaagttcctccgagctgtcctccaagatgactccatgctccactcgaatgcgagggagatctaccggaacttcctcaactaccactgggtagacaggaacttgctgaggcggaggggcgtagttggtgttaactcgggtggtttgaagggcatgaaccatctacaagagaaatgtcaactcagttgaattttaaaaaggtaagcctaataaaataattttataagaatgaaattagcaagttttgaacaaactaggctttccattt

SEQ ID NO: 134040 - DNA, 599 bp, Zea Mays
gatttatgacacctagccccctgggctttggtttgcagactgctttccaagcaacttgaggtggtttttttgcatttatatctgctcctctccaaaggcagtgccgtctgaatttatcaatctgcttgatcaccgttttttggaggttgagggtgcacatgaaataagttgggagataaaaagaccatttgtagtctaccagcctgagataagttgggagcttgagggtgcacatgaaataagttgggaaataagttgggagcttgagggtgcacatgaaataccgcattaaccatttgtagtctaccagcctgagataaaaagacagcagttgacgtaagtcttctttcgatcttctgaatgagggggagaaacgctcccaagttgggtttttaaggcccaagggaagcccgaggtaggtgaaaggcatagttccaaccttgcagtgaaacgtatttgctaagagtgccaatttctggtctgagacattgatgggataaatattagacttatgatagttcacatggaggcctgtagaatctgcaaatgaattaagcatcactttgaggaagaaaagttgtctagggcaagcttccaag

SEQ ID NO: 134041 - DNA, 665 bp, Zea Mays
aagaagtctgcaaacgtgagtgaggttgatgaagaaaatttggagtatgataatttattacctattgtttttttgtcattcacccgattcgtgggttgagacaagagccaatattcacatgtgtgtcaatattcatatgggctgacacggggcatttttagttagtatggatagtccactaaataagcttttcgtgaagtccaagatcattgaaatcatattctggagtgaaaagttatggctcttttagttccatgcagggtcagaaatttcgatcgatttttagatcggggattgctaaagtcgattgattctctatgatcaaaatgttaatttttcacgtagatgtgctcattttgaaccaaattctgcagggataaaatttttcgatggggttggtttttttatcgagggtagaaaagtgtcataatcgctagcttttagtggttaggtatttatgccccatcacccctccttcagtccattcatcaactccaccatgaaaaacacctctctctaggtaatttgaactctccctccttgtgagatcaatttgattctcgtaagatctaaagagttgtgttgagaaattggatgattaagagagaaagagagtaatcccgcccttgagcacttgtggatttcgttgttgcgtccacccactt

SEQ ID NO: 134042 - DNA, 432 bp, Zea Mays
ctacaggccaccatctccaagaggcatagggggaagaagcttcggaggaaggtttagcactcaacccaggagattgttttgcttattctgtggggaggataagggacacacaacaaggatatgccaagtcacgatccaatagtagaaagagatcgctgaagccgaagcacggcagaatcagctgaagcaggtcttgcatacagcctcattctatttgccatatatccctgaatatgtgggcaaccaacaacctatgacatcagttgcttcgacaagtcattctcaagctgcatgggctcagttaccaccaccaccaccattggcaacctaccttggctcataaccagcagccagaagggcatcgccaagtgcaaacagcgtgacactcgagaggagtccaaggctcgcacagtcaacagtactgtgcccgaa

SEQ ID NO: 134043 - DNA, 471 bp, Zea Mays
atttcccattcgcctcccttgccgcctcgcgcaaacgcactcgctcgcgtcgtcgtctccgacttcgatcggtgctcgacgtttagatcggtgcactcgctcgcgtcgtcgtctccgactccgattggtgccccctcattgagtatctggtgctctggtttcaggtttggtctccaatctccatcgccactcgcttgctccacttccaagttttatatctgctctagcctataggtatcagcttccagtgttgtgttctcctctattattgtcttctactaccttttagctacccctcctgccctccattatctcctaccttctctatttggaaaccctaatcctcgatctttcaagatatccgctctattttccccttctcagcgaatctggtgctccggctacgcagcgcatgtgatagtaccactgccatctacatcttgtctccctctcaagttctctgttggttac

SEQ ID NO: 134044 - DNA, 677 bp, Zea Mays
gcgactctcaggtgagccacgcgcccacttgcacgtgccatgtcatctttcaattcagtacccaaccgacaaaccaaatgcccaaccaagtgaaccagccataccaccaaaccatttcgagtttgtaatccactaagaggcaatggacatgtaatgactaacgagtccacaaggcgtgcacattgcattggctctatggacccatgattcccccgtgagccacgtgcgccatgtcatctttctgtacccaaccagctatacgcccaaccaagtgaatcagctagcccaccaaatcgtttcggattcgtaatccattaatgggtcgtgcacacagtaatgagtccacaaagtgtatgcactgcattggctctgtggacccacgactccccccgcccacgaaccaggtgcgtccacccacgcgtcacgtcatctttctgtatccaaccgaccagccaaacacccaaccaagtgaaccagccagcccacaaaaccgtttcggggctgtaatccactaacgggttgtggacacagtaacgagtccacaagacgtgcacactgcattggctccatggactccgaccgcctgcgagccgcacgaacccgcccgtgtgccatatcatctttcaataaatttgtgctctttcagtcattcatcgggcactttaagtaattatatg

SEQ ID NO: 134045 - DNA, 777 bp, Zea Mays
tgtatagcatggaatggatacatgatccaagatgggtcctaactcctaataacccacggttgatgatgaattcatgatagtgtggtgcattgctagctctccatcaccagtaatcatactgcattcacaacaataagctgcggttgggcatttcgaggaattgtaccgtgaggcgatctcgtccagcgggaccttccctcggtttgtgtttcttgatcggaatggttgcttgagtgtgacttaaaggtgcagggcagtggtgtggaatcagaccacgttggctgcagttactgatgatcaggggaggtccagcaaccgaacagatatattactataatttttttcttatatgaagtttctccattctctaaacagttcaaaaacccggatgagggacagatggatgaggaacaaaactatttaggccctgttcggttaggtcggattgtggcaaggaactattccaactaatcaataatagtacaaataaacttatgattccaaccgaaacggtggcaatgaaaccgttccggagtaaacgaacaggcccttagacagatgagtgaaatactcagtcttctggtggtgtgagcttcgctctgcaccttgtcccttcagttaccaaagcactacatacgactagatgaagtgaagaccctagatatacaatttaaacaagaaagagcctcaagcaccacaatcaagaggcaacatatgtcttccaacttctgcctatgcctatgtcgtcattgttgagagagccaccgaggcttcaag

SEQ ID NO: 134046 - DNA, 1148 bp, Zea Mays
tcaaaaccagatactggtggagagggatgaagaaagaaatagcatagtatgtggcccggtgtgacacttgccaacgaacaaaagccgagcaccagaaacctgcaggcctattgcaacccctcccagtgcccgaatggaagtgggaggaaataggcatggattttgtaaccggactaccccggacgcaaaaagggaatgactctatctgggtaataatagaccgtcttaccaaggtagcccacttcatcccagtgaaaaccacctttggaggagccacccttgcccggatatatcttaaagaaatagttagactcaatggtatccctcggaagatagtgtcagacagagggacacagtttacttcaaaattttgggagagccttcagcaagctataggcaccaagttagatttcagcaccgcctatcacccccagtcagatggttagacggaaatggtcaacaaggtcctaaaggatctattaagagcctgtgtgttgacgttcgacagaaactgggagtccagtttgccgtatgccgaattctcatataacaacagccattaggccagtatcaagatgtcaccgttcgaagcgttgtacggacgaaagtgccagaccccccctaatgtggtctaacgtaggggaaaagacactgaaaggacctgccttcattaaagaggccgaagagaaagttgccctgatccgcaaaagattacttgaagctcagagtcgacagaaaagttatgcagacaacagatggagagaactcagatttgaggaaggagacttcgtatacctcaaggtctccccgatgcgtggtgtcaaaaggttccaaatgaaaggaaagctagcaccgcgattcatcggcccctatcccatcattggcagagtgggacccgcagcataccgcctcgaattaccagaatccatgtcagatatccacaatgtgtttcatgtgtcccagctctgtaagtgcctgcaagtaccagagagccacatcaaggcagagacaatccaaattcaaaaaggtctccagtaccgggaaaagccaataaagattcttgactcagcagtccgaaagacccgcaactcagaagtaagactctgtaaagttcagtggagcagagaaggagaagaggaagctacctg

SEQ ID NO: 134047 - DNA, 915 bp, Zea Mays
ctgagaactccaatgtgaaacagaaattttagctcccgacattttcattttcagttcagggaagttgatcatttcatcaagtttttcttgagaaggaaactgcataagataaccagcgtgacacttggtcgctttccaagtcttgccccaggggaagtgaaacccaaagtccttctcaagatcttccgcagaaatcaaaccttccataacagtgattaatcctatgaaactccttttcggttttctggacagaggtttcgcaaaatgggaagagtaaaaccctaaaccatcagccgccatacccacaataggcatacaaggtttgttttgcttcggcaacacacatcgggccgtcatgtgggtttctttgtgacaaatatcacaccacagagaccggaagcaatcccgagcatgatgaccatcgactccacatttttgacagaaagggcgacgcgcaacttcaagctcttttttcatagtaacgggaggggttttgaggatacctgtgtgacctccctcaccagcagacgaagcgccaatgtcttctttggtctcagcttttccaataatcggcttcaacctccaacttggattacggatcttgttccacgactgtgaaccttgaggattatctttctgattccatcgatcccagttagggtttcttcccttcggatccatcttatgcgacgacaccacgcgcgacagcgccggccactcctcgtccaccggcgggggacgaaacggagattcaatccacccaccgcgaaagctagcacgaaacgacgacggaagcgaccaaagacgcgagagcgaagaagcaaggtgcgggaaggagtgcgaaccgataaaatccgaaggaaaccctaaaacagaataagaggccctcacctcgccacgggaaggggaccgggg

SEQ ID NO: 134048 - DNA, 311 bp, Zea Mays
ctgttgggaccgactgacacatggtcaggtgtgcccaatcactcgagaaggagggaacttaggtgctcaacaaaacagtaagtaggaaactgtagcgtcttgttaagcgtgttccacccatgtacagtgcgaaggtatttacaggtaacgagcgggtaggtgtgccccctaaatattgttatggcctaggttacctgctacatctccagaatattccccccttacggggtcattacaacaatgataagtacagtctgattagacgcactacggaacgtacctcgagaaggggcttacaaatgggcccaaat

SEQ ID NO: 134049 - DNA, 793 bp, Zea Mays
ccatctcggaccgtccgagccctaggcgtggactgtccggacgtactcagagaaggagccactcctgcgcccagttcgtggaccatctgcgcctccgcagagagcaccgccaggtggacatctcctggtgtttggcacccagaataccaaatcagcgccaacagtaggattaacatatatatagtaatagtacatgggctgccaagacgcattacattaaaaataaaaacccagtaatctaacacagacatccaatcacctccttaaaggttaataaaatatcatgagcaaaaaacaatccttttgttctatagccaagagggcataggctgcatattagggcttctttgcaggctcaacctcctttggcccctactctagggtgtggaaaacttgggttcctccgaagtgtaggttcttcctctggctcacaactcataagagatgttagacgattgacagacttgctaaaagagagctgggtcatccaaccagttgccccctctgtcaccaagaagctgcaaccttggatcatcttctagtctcttgcgttttctcgagggtgttctggttccagcttctgcaaccttttggtctgcaaaatttaaccccacagcccggtatatcctcatttatgaactggtgggaagtgcttcagattcagctactggtcaagctaagaagggtatcaattctattgttgctttgggagcttggatcatttggaatcactggaataagtgtatttttgatggctgggtctgtaatgtttctctagctctcaagatagggg

SEQ ID NO: 134050 - DNA, 446 bp, Zea Mays
gcacgtttatgcatgcgtaaacatgtgttatattttgcgtaaacagaaggtgcgcacgtggtggggtcgagttgggatgtacgaaggtgggtcagcgtcgtgttcgctggtcaggtagttggttcctactcgtgtttatgctagcatatttaatggttcagacttgcataacatgagagcggcaacgaacttttcattggttcgttcaggtgggtccacacaccaccgtgattagcacgcccacgaagctagaagttaccgtatatatcggaacagaagtgtcaggtaccataattaggggtacccccaacgctcctaatcacgactggttaacaccctcagaccaactgacgggtgctgttcaaaccaagacttcatctacccgaagggcgcgatcttacccgagcccagcctcgggtaggaacagtggtcctagacgaattcac

SEQ ID NO: 134051 - DNA, 465 bp, Zea Mays
gccatccaaacaacggatttcaattgtgttccatttcaatatcaaggctgatttggtattctctccaattcaattccttcccttccaatatcaacatccaaacaaagcctaaggatattctcacatgtcctgtcattatttactagttaatatgtagctcatagcatgcagaaactagtgattatgtggagttatagtttggtctgcaagttcttcacctcagttgcggtgcaccacatatgcagggttttcacaaaaccaacaaactaccatggtctcaagcataacacattgatgtttatctgtgcatgggtttgctgggttttagcaggagctaaggagatcggtagtatgggcttagttgctgccctgggcgaggtcgggtctagtttcagtactactatgtaattcccttcgggataatgtgggtctttgggagatttgctctgcaacatctcctctttt

SEQ ID NO: 134052 - DNA, 487 bp, Zea Mays
atcctgatttagtcaatccatctttatatcaataatagcccatatacaagcaacagacaagtcaggacagacaaataaaaatttgctaataaatcaaataggcccaaatataaatcattttctttgaaaattcagggtcagacttgcagagaactaatcgaaaacatggatggcttctgatttttttttctggtaggtgtacatgggcagaccaagactcagtgagtattcacctaggaagctatcaggaaagctacaaccagcgaccttgttcccttcgttgtagacgcagctcttccgggattcatcacgtcaccgtcgggatggcgcagcagcaagcgatgggaatctcagatggacgccacagctcgcgcgcgatgcgatttggaggtgcgaaggcaggagaaaggcgcaggaaaaggaaatcgcgagagatttggagcgtcggcgtctgcggaaacatgtgtatgctggaggtctctttact

SEQ ID NO: 134053 - DNA, 555 bp, Zea Mays
cacatatttaaacagcactacaggtccatgtctcagattctaactggagacacaaaatttcctattctttaaagccggttagaaacggcttctgtccagcgtccacgtcactttttttccttcgccgttcgatccaggatcagtggccgacgacaaccgccgcctcctttcgtccgatgctgctatgcgctgcgaccacgtgtcttccgtggccctgctgcttctagaaacatcgatttgcaatcaatggacacacgaacacatcgtcgaatcgtttcattgcctccacacacacgatgtctctagaattctgtcgtgtgatgccctccacatggcgatggcttccacagggcgaggtgaagcagccagctccgcccaccacccccacccctccccaaaactcgcgcggccgaccgcctccgacggaggcaaggtgaggttgcttgtaggagcgcaaaggtgtcgaggacgacgtgcaggttctttccccacgctagctctctctcccccatcccccacccaccaagtctgcctccttgctcctaatagaaatgc

SEQ ID NO: 134054 - DNA, 915 bp, Zea Mays
attcgcaaaacagctttattccggcccgcactcttttcctcccggggggtgaggtttttaatgaggcggagccatgtaatatacacgcaaaaaatccccgacaaaaattacaacgtcgaaaaagaccgcatcgacggtcttcggcattcgaccacaacgaagtcaccgcgaggggcagcgctggctaccctcgcgtgcgacactccgcgcaaaagtcgcctaagggtgcagccggactagcacaacaagtgcgcaaaatcgaagtcttccccaaaagactatccgtgcaaaagttgcccaagggtgcagccggactagcacaacaagtgcgcaaaatcgaagtcttccccaaaagactatccgtgcaaaagtcgcccaagggtgcagccggactagcacaacaagtgcgcaaaatcgaagtcttccccaaaagactatccatgcaaaagtcgcctaagggtgcagtcggactagcacaacaagtgcgcaaaatcgaagcgcaaaatcgaagtctccctcaaaagactatccgtacaaaaaccgactacaggtgcagccggaccgacataataaacgcgctagatcaagtgcacaagtcccccacgggcacggccggatcaacgaacgcacacagcctcatcatacaaatcatcataccaattaaagttacacacatacagtgagggcatcacaccttacattggttcaaccatcgggatgatacccatctccctgtagttaaacaacattatcctcagctcctcgccctcaaagagacttcgcaactccccctcacctacactcaccccaactggcgaggacaacaattcccacttgccagccctatccacacgaagacgcccaccctccacctcactcactctacgcttcgccaccgcccttcgccgcctgcgc

SEQ ID NO: 134055 - DNA, 501 bp, Zea Mays
ttctaaacaaaaattcatctgtggcgaccctgatggaatcgtctagtggatcagcggagaagtcgaagcctttgacaaaattttaagtcaccgaggagacttctgcgcattcgctggtgctcggggggccacgttgattttaaagaaagctggctgtgaacatgctaaggttgtagttcagccaggatttgttttctcggtggatgacatcaaagacccttcggctgaagcttctgcgctaggcgggagattttactctaaggtgtggatgaaaggcggccatgagatagctgatgaagcgattagaaaaaatgaaaaagaatctaacgatgctcaagaagaaactaaacgagctgatcaagttgtcgagcgtgcgaggcttataggtacctttagtgaggtttagcttcggaattaacaaacattttttatgatgtagctaaactttcacccccaccggagccatataaccccgaagttgacctgaccatgaaggaagcg

SEQ ID NO: 134056 - DNA, 657 bp, Zea Mays
gaatacatgtaggaggtcaatgtaaaacacaatttacagatacaaatttgaactagcaatacatatttacataaaaaggcatataagcattgatttatttattataagcgttcaaatatgaacttgattgctcattaaggttttgcctacttagtggggtatgaaggttccatggctagaccacacatgcccctcttatctgaaatatccttctccattcttaggtatccattctcgccccaagtcgttccccatgagttcttcatcagccagtacttagtaccatcgctagtctttccataaccaatggcagcaatcccatggtctaagtcagtaccgcatgagccagtcatcacaccaccagagtagaatcgaaacgtcatgtctccaccgtccactgccaccgacacaggctggtttgccatggccttcatcaaggcagcctcatcatttgccggcacatcctcatagccctttatggttgcggcactatttgatccactattgcacttgccatctgcagcagtgtaaggatagctggactccgtggttaggccgccgttcttgatgatgaacttgaaagcatcgtccatcaaaccaccctcacaaccttgatcctcgccatggacatcgcaatccactaactcttgatctgca

SEQ ID NO: 134057 - DNA, 782 bp, Zea Mays
aattttttgagaatatttgatccaaagttaggctgtcaggtaaccgtaagtctgaactttgagtgacagtgaagttggatgaacttagggcttgattttgagtaagatctgttgctcgattgaggatagtggccatagtcaaattgtagctggattatagggctagaactttgttgcagagagattaactagttgttacacaaaaaatggagattaatgccctgcaaatagccctgtcagatagactgaatggcgttctgattgtatagtgactgaataagatcgcaggttcacccccctcgccgccggtgaccttgcacccagatccatgccggcgtcgcgattcacgcccggtcgaacacagataacgctcctcggtaagaaatatcgcgtcgtagataacctccagccactgttctcaccggtcgtcgtgtcccgccgtggttaatcacgctggcatcaccggcgttcgccgttatccggcccggctgcgtgcctcaaagccttaccacgtcgcagtgagtcaccataaaccgccctatagccctggctcgtcgccggtgagtctgccacggtgaaagccactaatcgtgtgcgctagtgcccctcttcctctccggctgccgcgtgtctctgtccatttcactagccgccactcaagcatgctataaattgagcacaccctcggctccgttaggtagtcaggcacctaatccagcaactcgtgcctccaattgcccaccagagcgcgccaatttcaaagttcccccaaatcggttttc

SEQ ID NO: 134058 - DNA, 608 bp, Zea Mays
tgttgttttaatacattgatgttgatgtatagctccatccaaattcgatggtgtgaaatcgtagtgttgattgcatctatgacttgctttgagcttcattgcatgttgtttcatgtttgataccaggttgtgtagtttccatagacaattagtctgaggtagaggttcttgtgttaattaagaccaataatggacccatgttttgaatggtggtgctatatggggtaccttggatgctttgcttggaagtggtcgaattcaaggacaaattctttttaagggggtagagtgtgataccccaattttctgaaaagaagttaaatttatttttctcttttctttcatgttctgtggcattagggtttggagttttaggaggcattcctcagggaaagagtagatcttttggcatttttttccactggggtcgggagctcagatgggagagcgagttcggcccattgatctcgatccgatggatgggagcccccctctcctccccaaacctagccgaccccctctccctctccccaattgttgcagccacccctccctcttcctctccttcccatttgcagccgccctctaccctctccacgacttcctcc

SEQ ID NO: 134059 - DNA, 571 bp, Zea Mays
gggtgcagccggacaaaagcataagtgcgcgtcaccatcgacagggtgcgaagtcacctacaaaagcaactcccaaaacagatatcgcctaggggcgcaaccgataattaaagtgtcgcgcagtcatccttacgacacaaacgcgattacaaatcgaagccaactcgcaataagcacaacatacaacgtgcaatcacaaataaacaacaaacgaagggctcaacggcaccatcgcacaataatatgaatcacggttgttaccctcacaactctgttacaaatcgaagccaactcgcaataagcacaacatacaacgtgcaatcacaaataaacaacaaacgaagggctcaacggcaccatcacgcaataatatgaatcacggttgttaccctcacaactctattgcgaagaggaggagggcagcgctttcactcactatcgcaacaagagcagtgagggcaacaaaaatgtcacataggctccgccttcggaataagacccacctcccagaaattaaacaacatcatccttaactcttccccctcaaacaggtcccgcaagtccccctctc

SEQ ID NO: 134060 - DNA, 800 bp, Zea Mays
caccaattccccttgtgtggcccaagtccacgcgcggtatgtacatggctctaggtgctgccagtggggcccgcataccagccatacatctccttctcgcctcgctgtgccgctgacaatgtggggcccagacgtcaggttcatcttccacccggtaaacagactccgctgaacggcgcgcgtggaatccggataagattgcccaccggccaccgccccagctccagcctccctccgatttcccccatccaacaaactctcactgccggtgggcccctgtggcaggtccatcttctccgtatcccaacaaacttgccacggccgacgcatccgcgaccgcggggcggaactccaccgatccgagcacaacgggatcgcaataacctgcagtgtcgctaggacttctccctcgcgaaggctgcgtgtaccaaattagagttcgttgaagaccttccgtgatctccggcgctggcccatggtggaggatgccatcctcgcctccggggtataaaaatcgtagaccagctctccctgttccccattgcaagctcccaccggcgaccgagctactccgtctcaccctctgctcgaccgtgcccaggcccgaggatttccgtaccgatgcctaggcatcgccgtagtgccacatcgcgtcgcgggccgtcgtacgccgtgaccctgcaacctcatcatcgtccggtgttgcgaggtcggagatcaatcgcgacgtccctagccggtgtcggggatccaccgccgcgccgcatgaactcgttggctggaccattgctaccaccctg

SEQ ID NO: 134061 - DNA, 419 bp, Zea Mays
atatgcttttggagtatcggctggtaagtttttaggatttgtcatccatgaacatggtatagagatagaccctgaccgaatcaagtctattcggaatgtgggacctccgacctgtaaggttgagatacagaagtttctcggcaaggtgaattatttacgaaggtttatttctaacttagccgggaagattgatgcgttcacccctattcttcggcttaggaatgatgtcgaattcgcttgggggcagaacagcaagaagcatttgatctcatcaaaaaatacttatcttcggctcccgtattaaaagcaccacgagtaggagtaccattccgattatacattgccgctgaagatagggtcattggggctgttctgacacaagaaactgaggggaaggagcatgtggtgacatatctaag

SEQ ID NO: 134062 - DNA, 1289 bp, Zea Mays
aatacgtgtttcattgtcgtttacgtattttgtaataaggttggtccactgtcaggccgtagggctttctgttaagacttgtataaggtgaacctcgtggggagggacagacagaaaagaaaaatagaaatacctgctccacaaacttgtgttccaagttggtcggagggtgagcaccgccgagcaccctcacgtcgcggttctcaccgccgttggccacgggcgtgtatcacaggtggtatcagacgtcagcccttcctcggccgcgctccactcgcggttcgattcgttcctggtgttttcccctcttcagcaccacggcgccgcctcccgttaagccgtcgaagcagacccagctgctcctcgacgctatggcggaagcgacacacaaggaggacgtccggttgaacaagatgcaggagagtctcgatctgatgtttgcgcagatccgttccatggacacctcgcaaacagcagatggcggctcagattgatctcacagcgaaggcgatgaaccagagtacccaggatcaaattctcttgtcccagcaactcaaggctacgggtgacgctgtggcgcgcctcaccatgtggcaaatgaagatggatgcagtttcttctccagtctccaacagatccgatgcggaggaagagaactggttcgcttctgcgcctaccgggcgtccgcgtcatcctcatcaccggctgcgccctgagggtcgtcaccaccatgacgatcaggtataccaacagcaatcctccatccccaaaatgtcgtttccacgtttcgatggtatacaccctaagatctggattgacaagtgtgaggaatactttcgcatatataatgtgagtgatgatctgaaaacttcatctgtctctttacatctggagggaaatgctgccaagtggtaccaggttttcaaattacagcatgggtttgtagcctggcctagacttaagagtgcagtacttgatcagtttggtacctatgactatcacacagctttggatgagttacttgagtttcgacaggagggtactgttgaggattatactcaaagttttgcctctttacagtatcaggtggccatgcataacccacatttggatgatctgttctttacttctcattatgtgaaaggtctcaaagaggatattaaaagggtggttcattcccaagctcccgcaactgttgctcgggctagtttcttggccaaactccagcagcagtctttacagaggtcctcagtgcattcagctagaccttttacacccagatatcattc

SEQ ID NO: 134063 - DNA, 296 bp, Zea Mays
caagatgtcaccatttgaagcattgtatggacaaaagtgtcagacccctctaatgtggtccaatgtaggggaaaagacactggaaggacctgcctttgttaaagaggccaaagagaaagttgccctgatccgcaaaagattacttgaagctcagaatcggcagaaaagttatgcagacaacaggcggagagaactcagatttgaggaaggagacttcgtttacctcaaggtctcccccatgcgtggtgtcaaaaggttccaagtgaaaggaaagctagcaccgcgattcgtcggcc

SEQ ID NO: 134064 - DNA, 610 bp, Zea Mays
ggccggtcatgttatgagtggcaccggtgtcgaggcaccatccttcgatcatgtctttgttggagccatcgccgaggaaagcgcgtgctttcgactcatcaaggtggaggagtgccgctgcggtcggtgccactggagatagctcggtgcttgcatgtgctaggagcagagcctcctcctctgcctccgcctgtgcgacattggcctggccatgtcgtggctgtcgacagtaactggcccagtggccaagcttgccatagttgtgacagtcgtcgtctcgtgccagcttcttgttgccgacggtgctgccttgggcatctccatgggcaccaccctcagcatgtcctcggccccggcctgggcgcttccacgcgccttgcgcagattactgcgtttgtggcctcgtgtcgaggaggactcaccttcttcttgtcaccctggcaggcctcccactgctgtctgctcccgagtgagatgtagcttcccgacgatagtgataggcccagagggagcctgtggttcgtcgccgtcgaccaccttgagacgacctatcacctcttcaatcatcatcgtggagaagtctagcagagactcgatcgagcgagcaagc

SEQ ID NO: 134065 - DNA, 708 bp, Zea Mays
gtttgattggctagaacttgggctaggtctagtggtagttccggaggtgcggggaggtgggtttcagccccttctccgccagcctctccttcagctcctagaggaagtcttgctccaatcccggaggcggtaggcgtggttctatccgaagccatctgccatgggaagagagttactattatgcacatgccatttttttactagttattttattcattacatcaagccattacataacacaacaccctgctaccacaagctcatcacacacgagtgctatctagggtactcccgtactccttctctaaggtgtccccaaattccttgagaaggtcatcaaggctggccagggacatctcttcggtgtcggacgggttccttggagggttttcttccttctgctcagtctgacatccttgacttttggtcttcttgcgaattttccttgcgggggcgagcttcttcagtttcttgtcatagtccatttttagggtgcgataggcttcccgggtattggtttcttcgccttcagctattgagaggctctcttgaagggacgccttttcttctgaaagttccctgactttttgctccaggctttccacccgggaggttagggaggtgcagtggagggcgaggtcatcatattggttgtcaagggtgtgaaggtatccggtcatgtagacaatggtgggatcattctcaata

SEQ ID NO: 134066 - DNA, 365 bp, Zea Mays
gccagttcgagtgaaagttgctgatgggagattgttatggagcaaatatatggtacctgactgtaagtggctctgtggaggcattacattttcaacccagttcaagattcttccattgggaagctatgatattattttgggaatggattggctggaatgtcactgtccaatgtcggtccattgggcacagaaatggctggaatttgattatggtaacagaaaagtacatctgcaaggagtccaaccaagggtagaagtttgccacaccttgacaggattacaactggattctctcatcaaacatgaagctgttgaacaactgttggagctccaagcagtggacagtaacctgtctgatcccattc

SEQ ID NO: 134067 - DNA, 390 bp, Zea Mays
gctcgttttcatatccaactttgcagcttattctctgtcgccgttgtcacatctgagccatccaaatgaaattcatgtaggacagtaggaggcttgcattcagaaactacgtacattactactaccttttcttctcttcttcatggcaaagtgcataggacactctgcccacaccaacaataagataagataggaaaaggacccaataagtttagggatgacaagacccacgagcacatagtttataaactcgtacccacaaaataaatattaaatccacacccgttattggtgacagacacaatgtatcatccgcaccaactactcacaggtgccacaaactcacgtgtatactcggaacaaacagataaacaaacaaacacccaaaac

SEQ ID NO: 134068 - DNA, 500 bp, Zea Mays
cccagattcttcacatgggttgtttcctcctgaactgatgaactgaaaatctgggaccgcaatgataatgaactggaaatctgggactgggtcagtgcagaaaatgatcatgttcagccctgtgaagaatgtatagaaaatgaacagatgaactgaggaggagaaaattgtcccataattcagctgaagtcccattaccagaacttatcatttttcggtcagtgcattccatgtgaaaatgaactgaacatgtgtgaactgaaattcagttcacagtcagtttgacaattcagttcacatgaattcatatgaagtcagacaattcagctcaaggctggcccacaatttagttctggatgtcaaactgacaattcagttcaaatgaaatcagagaacaaggtaaaatgacccacaatttcagttcaccagaatttcagttcacacatccaggattacagttcacacaaccacaatttcagttcaccagaattacatccaca

SEQ ID NO: 134069 - DNA, 592 bp, Zea Mays
cgctggttgtgtctagacggtgacgtcatgtgtgagtgaatcccttctgttcgtcgagaattctagtaaaactctataacttcgtgagagaaggatagtttcaggggcggggctcgctatcatcaccatctatctctcacaattggtattagattcttgttgcgatcctagcggatccatctgagtatactcttcgcccttaaaatcaggcaagggggcaaaacaaatcgacaacatggagaagagtttagccgatctctctcagctgctgcaatctttacaagtccagaatgattccatcaagcaagccattgaggtaaacatagcatctaagccctagaccgaggacgatgtgggtcacctgcatgaaaatgtgggacacctgtcgaacaaagtgaagaggtgatggtctgcgcccaccacacattcatgcatcgaaggtgttcgaaggtgtgctattgaaggatcaagcgacgctggaagtctctacatcgacatcacggcatcagtctgtaccggacctctacgatcaccgccctgctacagcttaccggagtgatggttttggggttgtcaccaccctaacaccatc

SEQ ID NO: 134070 - DNA, 875 bp, Zea Mays
caacagtggggcgatgttaatgcaagtgaacttgaaggcggcacgatggtggtacaacgtcgagctaagagaaagacaagaataccgtctaccaccaccgattgtctagcgctcgccacaatcctacgctttgtgacacccaacatgttggttggtcatcgatagaggagaacatcaataacacgggcgatggttaagcagatctgcatcgaggtctagtcggtgagtgaggccaatacacaatagctccatcatgactttagcaccttgttatggaaggaggcagagaatacggaagatttcacaaaccacatcatccagcgacgcaaacatcaagaagcacaatggtcgcgagcgaggccgtcgagagcgttggctccgcatcacgcgaaggctacaagggctagtatggtgatggataggctcccaaccatgaccatgcaagagccgtaaaaaatggccattgtgctagggattgtcttagaaagcccaaggacgaggcccacatcacgcaaagagacttggagtccacgttgtagatgtcattaaagaggatgtatttgagctgcttagcagtatgatgaggaggaggcttagaggtggagttgtacgtagtcactattcatccccaaacgaccactattctttttatcgttgtcgtcaacaggttaaagtatggaattcataaaggtgtatgtgtacttataaatattttgttcttcgtcttagtttagtcttgtcatagttggaattgtaatacattgagaaacgcatactagttggaggctacatcattgtggctgcttagtggcactatcgtgtctgagggagcacgagaagaggcagggacaccatatgtgggaggagtaccatag

SEQ ID NO: 134071 - DNA, 506 bp, Zea Mays
tagtcaaactattaatagaacacggactaaacactgcttcaataaatgttatatgcgaatatgcgatttaaaaggaaacaacactgtagaagaaaagttaacctttatactccaagtactctaaacgttaaacctaaaagtccaagctatagttatgacagagctcacttgtctgaaactctgaattgcatgtatcctaggcaaaaagaactacatatgagctttatccattacgatattctctgtaatactttctctgcactttgaccatccctcgatcttggtgccattactggccgaatttgtcagagaagttttcgagatacgaagttttactattcatttgcaatagcatgatgcataggacttcacatcatactaatgcttcatcttaatggttgtgcttgtacaagaagttaaaagcagaaagcattgccagaatggggtaaggagaaaggagaaactatgttttacagaagaaactcacaagttagaaaactagttca

SEQ ID NO: 134072 - DNA, 693 bp, Zea Mays
ccacgctcaccaaaagtaaatatcacaatggatattgcagtggcatataaactggacatatggaacaaatacgtttaaggtctttgttgtgtttttgaatgataatgtctcttttaaatgtaccaaaagatagtctccgtaaactattcagtaaatgcatgtaaaaaggaatatactccgtagaagaccaaaataagaaaggtgcgcaagaactgttccctttttctagggaaatattgcaatcataaaacagaaacacagctttgctaacgcgtgagcagcaaaaggcaactgcaggtccacaatacctgcccttagatttagggtttgcaatatcctaagaaaatgggaaaaagtatgtgggtttgcggctgtagacgtagagcgcattgcaacgtgagtttggagagcgatgaggaaaataaatgtgtaatttgcagtaagccacgaatggcggaaagcgaacaaaaacatgaaaaacatttctttacctgaaaaagtgacaatggccgaatgtagacgctgacgacggaggaagccgcaagctcgcagtccctcgaaactgggcggaggtggacgtcgacgatggaggaagccatgggcttgctgtcgccctcgaaatggatgcgggagccatagtaagggacgaccagtgggtagagaagggaagcatatgaatctttttttacctgg

SEQ ID NO: 134073 - DNA, 1344 bp, Zea Mays
cgtcattatgcttatctgcagaaggcttgggtgaatgtttatggggtcccttttgaaatccgctcttttcttcctttatgggcaataggcactattttgggtgctactcagaaagttgatatgcgctacactaggaaaatgggggtggttcgtattttggtggcagtgactaatgtaaatcatattccggagtctgctgaaatagtagttggtgaagggttatatgagatttttttcaaagttgacaaggttctcatagcggggaagtggacggatacagataacaggggtaatcgagacggagatgataaggagcaaggagaggatgaagattactctgagaaacatggaaatgattcttttcagctagagaagctagcggaagatactgtcatggaagataactctttgcatggtgatcctaagaagcctcaagatggggcctgtgacatggggttggtgactcagcttgagaatcagattgttaatgggacagtgataagcacgggtttgaggtcagaagggctgcctctgggcatgccgacaggcttgttggcacttaattccccttttgctgatcagtatgtctccactctcacatctggcgctcttgatcagacaccaggctgtggtagcggtgatgggaagtccaaatcccggctcgtgcaggatccccattgctctttccttgcaggcgtgtcacaggagagtgaggccgtgtggaacttgtcaggtcctgcagcaagccgtttgttcctgaatgagtctgcatctcgggctggcatggttgccggtatggatggtgaggcggtctgtgctcagccaaaggttggagtcggattggataatgagcattttaaagctgctggtaacttactaattcaccagaatattttacatgtttctccttctttgtttaatattcccgttcaggtatctgatcagtctgttactctgccctttgtatcagatactctggcgagtggctgttttctgggacaggttaattcatttgcaggggtccctcgctcagttctccaggtattatgtaaagaatttaatattaaagccaacactaaaaatgatgatatgagacaagctctttccttaagatctcaaactgataataaagtaatggtggcattgcaggatgcgctggaggctaattctgtttctaagagagtgaaatctgaaaagcttaataatgatgatctcattataagtgcgaagaggactaataccgatgaagatattttgaccaaagcgcagcgattggcagcaaagcgtaatctggaattaagtgagtcttccttcatctccctttccccggaagtaatcatttcc

SEQ ID NO: 134074 - DNA, 390 bp, Zea Mays
ttaccggtcacggcgggtgctccttctggaaggtcctcttgagtagtgaagttcagtcttcactgcttgacttgcactttctatttcttgcccttgttctgagctacaaatggtctaggtcttggttggttccgagggcaatctgttgcataatggctagtgttatcgcaagtgtagcatttgtgttccattgccctagcgatattattgcggctactgatgaggctggttgttcctttgagctagtacctgcgactgctgagatgttcttatcacccattgtcctgattgttgctgaggttccgtgttctaattgttagaaacaatcttgaaccgctgaggctaggttgaggatcctatcattggtgccttcctctttttctctatccg

SEQ ID NO: 134075 - DNA, 606 bp, Zea Mays
aatattttgatacatgttaggctaatattttggaggtgcttatattggtaggttgacatagtaagtgtaacttcgtcaatctcttggaatttatcgatctaatctttcaaaggtgctcatatggtatgttgtatgcacatatgttcataggagtgagtgatgatatctatggtgactttgtcaatctattcactgctaccccaaaaggctacatgcctaacgcaataccttctccactttggtccactagtgtaaaccaaaacgaagggtttccaaagttagtatcaacatacacaaaaccttttccaaaacacatccaacactaagtgatgacctcccacaagacgataatttaactcaccgtcagctaccttttagcaaaaatcacaaaggccttagcttttccgccactcaccaccaagcgtaacgcaatgttagaactcacaagtggcactagataagcgtgatgcaattcatggttgcccctcttattactacaaccatatattctaaattggactatctagccgataaaatgaaacaccttatgttcatagctttgtcataagcacacatccaaattctcataagttgatgtggatcact

SEQ ID NO: 134076 - DNA, 2060 bp, Zea Mays
gttgatgtccctggatcctgtacctattggtgtagttttgttttaattgatttggtgctttcagtctttgcttcgccaatgtttctgtaattgattgccctgggaagtgctgtagtaaaagcacgactccaattccaaattacagagaattccagacaagagggtctgccctggtctgatctataaatcgctatgttcttatcttcagtaatcatctattttcttaggtgcctcatattattgagaactcatggtcccagttcttttggcattaatagattgatgagttattttattggatgacgtcaaatttcctttgcctcactgtccaggttaaatggcctctgattattgacttgaaaactggcatgtgtgtgttttttcattttgtttctttataatctgcaccaactaacctgctttgaatagtttgtttgtgattctactgtttacgtgagtttgactggttagagaatttaaatgtatcaaaaaaatagttcaaccctgcattatacaaaattatgtggaaccataaaaggatttggtcgtgttgcatgatttgcatgatagcaaggctatattcactctaatcaggtttataattcctagaagcaaatatagagagttgctagatgttaaatgtcggttccttttttagttttttaagctcttatttctcctaaacataggtcaggcaacattatatgaagtagcattactgaattctcacacataatgcaaaggccttgtttgatgtgtctgttacatccatagttggcaatgggaagactgtgaagttctggactgatcgttggctctttggtcaaactgttgctgaatgctgcccatccttaattaaatcaattcctaaaaagggccttaaagcaacgaacagtagcagagggaatcacagactgcaagtgggtttctgatataagaggagcactgtccgtgcaagttctactggaatacttgcagctctggaatttggttgaggggtgtcggtgttttaaacccgccggttctaaccaactagtaaatttgtgctgcgtgctcttatcccggatggttgatgaaagaagacacacaaggtttatcctggttcgggcaagagaaggccctacatccagcggggggaggagacttatattatcttgcatctaagtgctcgtagtaggggatacaagcaagtcgagagagggagtgagtcctaagtctctgagtatgattgaggcgagtgccaatatcaggagtggagtgaggagtgaacggtgaagtgttgtccttgacctccttatagaaggccccgggctcttccttttatagctgcaaggaggaggcccaggggtacaggtgttgctatgctattgctgtggtaggaggaggtgtgtccgagccctgtagcggtatggccggcgggatggccctcgtccttgatgtcgtctttggtcaggagaaggacgcccgatccctgtagcctgtcctttgactaggtagagagccgaggccgggtttgggagcatgggcgtctgcccgagctcgtcctgtacaggggtgcgaatgagacgtttccgagggtgtcgagtcggagtggttgaaacagagctcggcatggtgaaaaagtgtgtggtaatctggtccggatgtcattctggatggtggaaagtggattggacactggtcttgttgtttctgtagccttcctgtcttcagcgggagagcaggtggcatttaatgcgcgtgcttccctgttggggcagttggccgaggtcaagctcgggcgaggcgaagatttcttccgaggccgaggccgtgattagacgttgcatgtagtcacgctctgggtggttgaaacagtggtcggagtgggggaatagtacccctgtattcgtgccctgaccatcgttgtgggtggtaaaagtagattagaccgtgggcgtgtcgtcctttgttgactttggcacctgctgcggggcaggtggccgtacagactacatttaatacgcacgttctgggatcggagtggttggccgaggcgggcatgccccggagcgctgccc

SEQ ID NO: 134077 - DNA, 404 bp, Zea Mays
gcaaacattccaatttttatcaaggttcataaccaacatcttacaaatgggttaaatttactacaacatatatttggtgaacatagaacttattcaattatacttctatgagcatgaccataatcctcacatatatagaaattgcttaacccaattaaaggctacatctattttattgtctagaacacaaatacttcacctaatcttgcattttaaatccgaatcccacatcacaccacatttgataatcacaagagcattatcaacacaaacacctagcacgcatcgcacgactgtcctctttacgaaaaacctagagttctgcttcctcacacaagcacacacatatccacatatcatcgcattagcataacaccaacaaaaatcatttcatcatacatcga

SEQ ID NO: 134078 - DNA, 694 bp, Zea Mays
cacgtccagtctttcagaaatttctaacggtagctgacccatgtagccggctaaacatgtttccctaacttaatattatcctattactgccacaaaaccgaagtcgactgtcacagaacaaaactacgaccgctcaaagtaactccgacctcctctctaccagcttccgctaaactaagtcagaataaaaatctgacagaagtaacttaggaccagattattttcactttataccataccagcccacccccagggaacctgctctctattcccagggctagctatttgctacaaaagtctcaacccgactctccatgaattagccgctacaggtgcctgaacagagcaaaatactactaaaattcagtacttagccattgggttaaatctgaaactgaaacctgatgatccacttttggacacccttcccttctaatttcccataaggacagaccttgcccattacaccaaacttgttcaccaagtattggtcttccacttttctgtaaacttatagcatcaatactgcacagatctccatttatgctactccaaaatgaggcacatctcataggagccaaattactgaaattcagaccagtacactattccccatctgaagctgtagaaaactgacagcccatctgtaggcgccattttctgctatttttgtgtagaaccaaaccaacctccc

SEQ ID NO: 134079 - DNA, 333 bp, Zea Mays
aaaataaatgcatggttcggcatggtgcaacaaacaaaataaagtattttagggttttgctttacacgagatctcaagccgaatcccgctataactttggaaaagatcaaggcttagcgaggggaaaagggaaaaaggaaagggtaacgcccgaatttggcgagtggagaaaagaaaaaattcaactcccaaaattcggggtgttacagcgccgccgcgccttcatccgctacggtgagtcctgccctcccgtctctgttgaattctagtccaattattgtagctcttgagcctcaccacgtcctcgcgagcacaacgcacccacccccttct

SEQ ID NO: 134080 - DNA, 438 bp, Zea Mays
attttcagccgttgtgccaacctcttccactttactaacagcagcctgatctttagctttctgctccttctccaggctatcctctagcacactgccagccctagcaggaagaaactcctccatgtcattccagataggctggcccaacaccatcactcacacaagtccaacacagcccacacgatttacaacaaaaaagaaacacacccctaatcatcgcacgacaatggctcctcttcagacttcagcttctactacttctgtcctgcttcatcaggtgtgacactgcagggccctggagcagcaacaacatgatggcttcaggggcggcgacccattgccgctactgggcggcaccccatggccggtgtcaggggcggcagagggcgtcttctgctggtggctttagatatgggcagcgcgagagtccagacctgg

SEQ ID NO: 134081 - DNA, 490 bp, Zea Mays
atgaagctcacctttccaaattctccatgcaccccaacagtaacaagatgtatcatgacctcagatccttgtactggtggaccagaatgaagagggaaattgctaagtatatatctgaatgtgacacctgccagagagtcaaggccagtcatttgaaggtagcaggcactttacagcccctttccataccatcctggaaatgggaagacatttgcatggacttcattgtgggattgcccaatacctcccgacaccatgattctatttgggtcgttgtggacagattgaccaagacagctcatttcttgccggtacacaccacccactgggcagaaaagtatgcagaaatttatatcgaccaaatagttcgtttgcatggaataccaaggactattgtgtctgatagaggagcaccatttgtagcacgtttctgggagcaaatgcaagagtccctcgggacccatgtaataagaagctccgcataccatcc

SEQ ID NO: 134082 - DNA, 391 bp, Zea Mays
attgttctttgctagtggcctttgtctcgtacgacagttagtgaatattgcaaaaacatcttgcatttggttctaacccctgactcctcatggcccaaataaaaatccccttcttgatgatagcctcgggggtgagttgatgaaggaatatttcaaaagtcttcaaaacttcaactagcaatttatctaaagggaaccgaagtcccgctttcatgaagcttctgtaaacgactacttcgtcagcttcgggcaaaggggcattgctatctcccccagccctcacaatagaaatatcgcggaagtaccttcccttcattgcatcaatctgactttgtttgatggttgacctcccgaagatggtatggcttggtcgccagggccgatattcggc

SEQ ID NO: 134083 - DNA, 408 bp, Zea Mays
ttcgactgcgcctcccgccacatagaaccagtaatcatgccagttgccccacttgttgcgggcacagggaactagctccacaacttccgccaaagtcttcccagtcctcggcgtaaaggtgcatgacccaaactgtgcaatcttgttccgaactttcctcttctgccagtgtaaacaataattcttggcgaagacctccacggagggctgaccgccatacaaagtcactgcccacacatacttcgccaaagccacaacggcgttaggtgtcaactgatgaatctgcacttcatacctctgcaacacctccgccacaaaacgatgcgcaggtaaccggaggccagcagtaaaacatgcctcgaacaccaccaactcaccctccggctccggaatctcttccgcccccgg

SEQ ID NO: 134084 - DNA, 373 bp, Zea Mays
aagtctacattctcgcgggtggtcaggagctaggtagtcgcttagcctagtcccgtaccgtaagcctacaccttccaccgcccagaatagctgacttagtactttctcgaccaggtacctaaaggtctatgcctcattcaaaattaaggtctagcttccataaactctgtctgtcaacaattcggctacatatttcgatggaatgagtatggcaaagctaggatcctcagggtacaactgataagcactattcccgagccaatcttggaactccacacactcctaagcactattcctaaaccaaaatcaggagtagctccctggaccaaaagcaatcccccacgactgggaaaaaagatccagggagcctttg

SEQ ID NO: 134085 - DNA, 786 bp, Zea Mays
taattagtcatcattagtttttgctattagactataattagttgatatccaagagccttttaatcgatgtttaaaatatagactagtaaaccttaactatccaaacaggccggactttatcacatggaagaaaagtcgcaaagacggcgtccaattacgtcttttttttatttgcaatgatccacagcagaaattaaaccgaccgttactgtgccagattcttctcaaaacataactgaaatagcaaaagcctgggaattactctcacgagttgaatttgggtaatgtgcttgggcagtatatgaatgctgtatagacggggaccgcctaatgtcaggtgacaagacaatgatgatacgattcctaagtcccatcctggcatctggtcatctggagctaagagagggtacactcacaagtgtgtggatatatatgcagggcaggagtccaggaccatgtggaatgtgcatttgtgtctactaattattgattaagtaataataattgcgagtttggtactaaagttgattaaagaataataattgggactaaagttgtcagtcttcactcttcgatcagtacttgttttatggccggtaccaattgatatcttcaactcgttagtggcttcaactgtggttggtgtggctgtagagtagccacgttctagacatcccttaccggttctagccactaaccaatactaaaagggtatttggatctcctggactaaagtttagttcatgttttggataccaaattaggaggactaaacatgaactaaat

SEQ ID NO: 134086 - DNA, 291 bp, Zea Mays
tttagaaaccagattttaaaaaccgagataagaaaccagtttcttataaactaatctatcaaagaagaaacaaaacgtagcttgtgatttcaaacagagcctaagtagcttgtaataaacatacgatggcaatgcattatgcatgcatgcatctccttttctctctctagcaacctctatatactactactgctatgtgtctctaattttgcttctctatctaattgatatacatctcggtctcgtctgtgctgctcggttcttcgaaaacggcatgctacattgagtatt

SEQ ID NO: 134087 - DNA, 606 bp, Zea Mays
ccagtacagagcggagcggggcgagagaagatcctggtcgccgcatgggcatctcaccggcggcgcggctctaggattggcatgcggtcagggctagtctactgggcctcctgcacataatcctggtttttctgtgtggcttcatcgaccgtagtatcaggaattcctcgccgttgaggaagaaagccgccgagctttgccgcagtaaggactccctacgccaccatcgctgttctgctcctatgtcgttgattcgcttccctctgcacttcgtttagcgcatgtctgcttgagatgtagaacaccaaaccgtggggtgcgtgcttcgccgacgaagctctgccatggttttgggcggcgccgccgcgcaccgttgtgcaaggaagggagaaaacaccgtggccgttccatcccatttcaacagatgagattagaaataaggtatcgcgtcggcttgattcgttctggaccatcgatggaatgatatgcgatcgcagattagatcaaggcgtggggcgctcctaaccgtttgatctgatcggacgattggtatcgcgtacccgttcagagtcatggcgatttgatcttggccgttggttctgatct

SEQ ID NO: 134088 - DNA, 654 bp, Zea Mays
cagaattgtcgaaggttgcaaaagctcccgccgcaactctcaagaggagaagaatggctagcgtactagacgctgtcatggagacgacaaggtcactactcctacccctgtagagaaagttgccaaagctgtgacggctcgtgttgaaacagaagctgggccttcagcgcccgcgaaggcagagcctaccgcaactgagtagagagtcggagaagaatttgcagatgttagcatagctctggagaagattgtggccgaaaaatccaaatcccctgctcccgaagcaccgtccgaatatcttgactatattattcgacatgcttcgggaaaaagattatccaaagaagaaattttagaagccaaacactatgcccgggaactgaaatacccgaaggggccttagtgttcaacagcacagacgaagacgatttcctatactgcctcccggacaacaaagagatatccggttgccaggaaatggccaaaagtatggcatttccgaagctcgaagttggcctctctgccatgtcgaaggatgaactcgcggacaaccttgcatgcaacagtctgaaggtatagaaattgtgaacttaaagtttatgaacttggaaataaagtcttactctcatgctaatcctttattcttcttttttg

SEQ ID NO: 134089 - DNA, 554 bp, Zea Mays
gtcgagtgcatgagctatactaccaaacaaaggccagagaagatgggcttcatgaaaattttggctgttataacttcgtgtatcgcaaggatacgaaggccccggtcctcagctatcggaccaaatggccaacaggctggaaaactgagtggttttatatcaatgctgacgagaagaagagggagaagctgaagacgctggtcatgagcccactgagcttaagcttcgggatgaccagactcttgtgcaacatgaagccagagttaccatgccagctagccatagcagaatttagagtggtggcttaacatgttagcaccagggatctagtgcaagaatacttggcgaacagggtatctccaacattgagtgaatggagtatgctgaagctgaaaggaacaaagaagaagggtgaacttattcgattgccctatcgcttcaagtttgagaaacaattcaaagatccctgccaagaatggctagagatgattgagactatgtgcaacgagattttgggcaattataccaaaaaggaagatcaactgatgactaca

SEQ ID NO: 134090 - DNA, 370 bp, Zea Mays
ggagaaggcatctctccaagagtgtctcgacatagcagaaggcgaggaggccaacacccgtgaggcctatcgaaccttaaagatggactatgataagaagcttaagaagctcgcccccacaaagaaaatccggaagaaaaccagaagccaaggatgccagatagaaaggaggaagaaagctcccccagcaccagctcccaccaggatagaaaatttgtccggtatcgaggatatgtccctcgctagccttgatgatcttctcaaggaatttggggacactctagaaaaggaattcggtagtacctcagggaacgctcgcgtgtagtacaacttgtagtagccgtatgcttgtaatgtattggtgtaatga

SEQ ID NO: 134091 - DNA, 392 bp, Zea Mays
gttccatcaataagggaacttggagaaaaaggtgattcaaaagaaatcgagcccaaacccgcctccggggcaggatcgggtcgggaagcaagctcgcagatagaagtgcactttccaatgcagttagacagagaaggcatggctgtgatgttataatgctgaaggaccccaagaagagattatgccctgtagtctaccacctcccgttatttgtgggcttcaccgagggcgggaaacatttggtgacatcaaacgaccttcgggctggggacgtctgcgagcttgttaaggggccagacgatggtgagccggtgtactctgtccggatgtgtggtcacaaaatttaaagccgccccggcttcatctgtgcgcttctcttctcttatgtcggc

SEQ ID NO: 134092 - DNA, 334 bp, Zea Mays
gtccagtagcaattgttgatgcagtcagagctggcggcagtggtggctgaacaagctgctgttgataggaatgatctgtaccggaagttggaggaaacaggacaagaagtgtctcagttgaggttggaacatatgggaagagagctgggcgaaacatcaactactactcaggaacaaggcggagatgtccgaaggaatcaacaacagtctcatggtgatcagaatcgtggaaaccaacagcgaggcatgagaggtgatcctcgccagtttactgattcaggtaatcaagcaatccccaaactaccttttccaaaattctcgaagggcgatcctg

SEQ ID NO: 134093 - DNA, 651 bp, Zea Mays
tgctaagcgtgaaagcacgaggcagcacgaacaggtcttcagaagctagttcaacatttccaaagtcttcgttcccctatatctgtcagtcgtgttgctctccgcccctggaatcatttcaccgccttctccatcccattctagctcctctctcgaaggccttggcacctcgtaacagggagttatacttggacttgaagaataatggctgtgagttttctaatgacccgtctcttctttcatttttgcttttcatgggttcgacgatcttgccagcctatgaaacggttgcctgccttgaacgctctcttgccttcttcgcgtgaaattcgtttttgcaccgttgattacaaaaaagaaacaggcaagatagaattttggttagtgtcaagaaggtagagatggttaaggcaaatagaaatggagctgagtaactccttttgatctgtatagcttgctgaccgctcccgtctacaaatcaccatggaaccatgttttgccctgtgtgctctgttcagatacaagggccaaaaactgcagtagcctttgacaaaattttggtgttcactttttgcgctaggccactctagaaagttagacaccatttgaagatacttcattttgattctttcgtttagaagcatggcgagc

SEQ ID NO: 134094 - DNA, 440 bp, Zea Mays
gtgattggccacgagaaacgtacccatcatgaccgattctccttctggcgtcgtggccacttgcgtataacaattttgcccagttttcttcatatttctgcccgctgtattattcgccgagtttcccttgccttgggcggaactcccagaactatgctgatatttgatctgttctgcttgggatatgggcagtccttgataaaatgtccggacttcccataattaaagcaaccagaagatgaactcgggattgcagggaaacgagtactaggggcactcggctgatttgttgaggtgggggcagtggcaggatggataaagacaggttatttaaaggggtaggagggtggacgtggtgaagaatggttttgattaaaaggtcggatcaccaacctttgtctcttctcaggcccctggttggacctgtcacctccatagct

SEQ ID NO: 134095 - DNA, 533 bp, Zea Mays
ctgaaattaattaaagcaagcatagaagtaaatacatcaaaaggaaaatgcgaccagtagctgacaaatgtattagtaaaagtaccaaaacacgttgatatgtacatgtagagcataaattaaaactttgaaatcaaaatgggatggatatctgcctgaagttgcttggcaaccagttaaacaaccagtttcacgcaatttgaatggatttgtacaggctgcgattaacactcccgattcagggaaggagaagagactgacctgaatctcaaagaagacgacagtgagtagcatgagaatggttccgcccacgacgaaccccatctgcgcgtcgagctcagccatcatcccaggccggtaatcaaagctggcgatatgcgcgaggaggtcgtgcttattgacagccagcaacctggcgacatcagccattaagttgttagccgttaatctttctgagccaaaacttcttcgagaaactaatctggaaacatcagcccacgactccgacacgaaccgctgggtggaaatccatc

SEQ ID NO: 134096 - DNA, 432 bp, Zea Mays
taggatttccaataggggacattcttcacaacaaagaagctatcggaaggatagccaagtgggcgtgcgagctgggagctcacgacatagagttccggccccgcacggctatcaagactcaggcactggttgacttcgtatctgagtgtactgaacaccaggtcctagacaacctggagactaccgaagtatggagaatgtactttgatgactcgctgaagttgcaaggagcaggtgcaaggattctctttattgctcctggaggtgaacaactcaagtatgcactccaactattgtttccggcatcaaataatgcagcagaatatgaagcactgatccacggattaaacatcgccgtatcactcagcatcaagaagctgatggtatatggagattcgctagtggtcataagccagattaacaaagattgtg

SEQ ID NO: 134097 - DNA, 621 bp, Zea Mays
aatctcgtcctcgagatttaggaaggaccagtgaaaagatggggaaaatctatgcgaagctcttcttctctttcccaagttgcttcatcttcaccgtggtgactccattaaactttgcacatctttataaccttattccttgtgacccgagtcagtgtatccagaatcttgatggggtactcagcataagtcaaatcctcctgaacactaaggtcctccattggtagctgctcctcaggtacccggaggcacttcttcagctgagatacatggaatacatcatgtacatctgacagatgatcgggtaactccagttgatatgcaacttctcccactcgctttaagatcaagaaaggtccaatgaagcgaggggacaactttcctttaactttgaatctcctcattccacgaagtggtgacatcttgaggtacacatgatcaccttcctcaaattccagtggtcttcttctattatctgcgtagctcttttgcctggtttgagctaccctcaaattttctcttatcattcgaacttgttcctctgcctcttgaataagctcaggtccaaagaattgtctttctccagtttgatcccaatacaggggagtcctgcattttctg

SEQ ID NO: 134098 - DNA, 1154 bp, Zea Mays
cgcgcgcctacaacctcagcccagcacgccctgtcccactgaccggtgggtcgtccgtgtagttcattgatgctcacaccggtgtcacctacacatgggacccaatcgtcagggcttctcctacctcaaacagaacgcgtaacaaacctccgcgaaatcaagctggccgtgaacctcggaaaatccgatcgaatccatcgctatccgcgcgccggactaactccgtgtgtgcgccactaggctataaagctgaatcccgcccccccttcctctactctcatctcaacttcttaaaccattgttgcgggtcaactgggagcagattgccgcctccctcaacaaactccacgattacctgcgcaaattcgccatgacttagatctggactccaaccgcccggacgtctctctgggaggtatgtaagcgaaccatggatgtcacgtccatctcgtgctttccacaaagaatcgcgttggggggaaatcagtgtggaagaagagccgccgccgccgtcgatcctgcccatgggcgatccttcggcctcgacgggtggtactggggcatcgaaggatcccaccgcgcacatatgtggcctcgttgtgcgtgaaccccgggcgggagaccagcaatttcacgccgatgctcaccttgtccaccaatccgcagcatgtcgtgggcgggcatactcacttgtgtactctcggtaatgtgctattgatcgcatttgttaccttccgatcttcgcttggcagctttggggggatcgattaggccactggttcgtcgttgtttggtgcgccggcgaggtgtcgccgtggagattcctgttcaccgcgatggttgatcggtgagcaaggggatgggtctggtgccattggattgttggcgtgcggctgcgattggatggaggataaggcttcggccgggaatatctgaaccgtctgatctaatcgagcggttggtgtgtgatgtggcgtcatgaaaatcctgaccgtgggtctcgggatctacggtctatagcgcatgccgttttgatgaagctctaatctaatccaaaccacatatatcatatcctacggctgatactgggtgataccccttcggcccaccccttttgctaataaccccctgcgtttaccagaaactagcccgcc

SEQ ID NO: 134099 - DNA, 573 bp, Zea Mays
cttcggttcagtagagggtaccttgtcaagctttcgcttcttagaaattgttgccttcggctctagcgctgtttttgctttcttcagggctttttcatcttcttttatggaccgggcagcttgcctgcttaggatgctaacaactctttttctcttcacaccctcggccccttcatcaagcctctcataatctgggtattcgaagttcaatgcatccattacctggttcagccttcgtttcggccggttaccgaaggcagcagccattagctggtcctccttcttcgtataattgccaagaatctcattgcacatggtctcgatcatttctagccattcattgcaaggcttcttgaactgtttctcaaatttgaagcgataggggagccgaacaagttcatacttttttccaccttcctttttcttcggcatcccccagccgctagaagttggaaatgttctatttgccaaatattcctgcactaggtccctagtgctaatctcggtagctaccactctaaattcaacttcggccagctagcacggggagccaagttgcatgtggcacaaggg

SEQ ID NO: 134100 - DNA, 900 bp, Zea Mays
aggcattataccactcttggtcatcctcgaggagcccatgagctctacatgtctctttgaagctggggtataaaacattattgtatgttcgcaatgattcaaaattctaggctccttttgcaaccattagaagcattctaagataatatctttcccctgcagatggatgcacaaagtgtatgcggcctatgttaccttgtctatgtctttgttcccatgatctttttttcgtcccacctccactcagatggaaaatcagggtaagttaggacctagcactttcatgtaattggttagcaacaaaccactctattagcattgttcggcgtaggaattcttatgacaagatttgtgacatgttggtgctagcatgatatgtaatgtaattctcattaggcaaatgaactgacaatctagtaacaggaggaaagtgccgatggatttcgtaaccaagaattctccaacatgaatcatatgggcatatgaatctagcatataagtattctttgacctcattccttgtgtttgtttcctcatcaataggagtgtattgaccatctaaaactcgttgtaggtatagtttgctctggtccggaccttttgtcacgtacttgaacagatatttgatgaatatacttttgttacaccattctacattgatgtgtgcttgatatttcttgagcaatgtcaagttatatggaacaatccatctgttatctagtttgatgttagacttcataacaaatctattattgtttgatctcttgtagaccgcaaatccatttgtatcaactacagtttcattaagaaaagagctcagacgctgccattaccattgatcaaatatcgaacggctggaaaattgatggctgacgtggacagcgtggtggaggccgtttc

SEQ ID NO: 134101 - DNA, 343 bp, Zea Mays
caaggacttggaggatgaccatgtcgtcatgaaggcaatttgtgacaaggccatggataaggttgttcgcgctgcgcggatcttgatgaggagacccggtgtcgtggtggctgatgacattgtcgctgatgtcatggccgcgcctgatgtcgcaagccatccatcttcttctgttgctcctgcaaatgatgcctcctgcaagaatactccagcacaattatttgcctgaaaaacacttatttatcgagttagcatcttttagagaaaaagtgtaatgtgagttctgtatgtgcacaacagttatgtttgaactgattgtttcatgggtagggtgctgaaaaac

SEQ ID NO: 134102 - DNA, 409 bp, Zea Mays
tccgtcggtaaaggtctttaccgacctatagttcgtcggtaaaactgattttaccgacagaccataagttgcaaataatgttccgtggtatagtgcacatactgaagaaactttgcagaggaggcagtgagaacaatatcatcaacatacagcagcaaataggcagtgtctggccctcgatgatatatgaacagtgaactatctgacttggtttcagtaaatccaagggaaaaagataggatgcgaacctgtgatgccaagcacgaggagcctgcttcaagccatatagggatttgttgagccgacatacaagatccggatgagaggaatccacaaaacgagagggttgtacatagtacactttctcggtgagggtgccatgtaagaatgcattcttcacatctagctg

SEQ ID NO: 134103 - DNA, 392 bp, Zea Mays
ctcggatagagtcccggggcaagctagagccaaagtgggagggccctttcatcgtcaagacgaaggcgtcccccagcgcgtacaggctaacaacgccatccggcgaggacttagagcattcttggaacattgacaatctccacaaattttttgtttgactcctcagggccagctcgcccttgtaattcgcaaaacagctttattccggcccgcactcttttcctcccggggggtgaggtttttaatgaggcggagccatgtagtatacacacaaaaatcccccgcaaaaattataacgtcgaaaaagaccgcatcgacggtcttcggcattcgaccacaacgaagtcaccgcgaggggcagcgctggctaccctcgcgtgcgacactccgcg

SEQ ID NO: 134104 - DNA, 597 bp, Zea Mays
cgtcgaccaccggaattactgccacgacattgaacacgtattcaccgcgccagggttctttcttatctccggccgcccgcgatgttcgatcaaattaagcgccaccgtcgaaacctcctataaattgagcccgagaccagctttgcaacatcatcacccatctcaccaccaagaatcactagcaatcgtgcaccagtgagctcgaatttcatttcccccccaaatcagtcgaagagcaccgtgaaaccaagttcaccgtgggcagtctgttctggtaaaactctgcccaattcaaaccttgtttaagtgctctcgtatgcctgtgatgcccatcgacccacttaattgcacggagtagcctctggtcgccgggaacacgacagtatagccgttatgctcacggtcaccgtggccagagcaaaccattgggccatagatgaaattaggttgggggaaatgcttggggtaggtctaatttggtgtccatcgctcgggagcgccggtcatggccctgttcggccggtacagttgctcaccggagcgcggccgtgatccacaccgtcgaggacctcccccgcgaagaaatagaaatttgag

SEQ ID NO: 134105 - DNA, 684 bp, Zea Mays
tgagaacacaggcccagaacatgtactaaaggatctagttgactctcttagtctaatcatctgtctatggatggtaagctaaactaaagtccaacttagtttcaagagccttgtgcaacttcttctagaatctagaggtgaactgggtaccttgatcagatatgatcctcctaggtatgccatgcggcttcacaatatagtcaatgtacaacttggccaacttatccccaccgaaggtagttcgtactagaatgaaatgagccaccttggtggatggttgactatcacccaaattgagtcatgaccattcttgatatagggcagactagtgatgaaatccatactaacttcatcccacttctagactagatttggcaatggttgcagtttaccactggtcttctggtgttttgccttgattcgctcacactcaacaacaaatctagcaatatcacccttcatgccatcccaccaatacttctctttgatgctcaagtacattttggttgttcctaggtgcatggaataggctgagttgtgagcctcatccattatgctttggtggaaatgaccctgctttggcacacataatctcttcttgaaccatagagtaccctgattgtcaatcccgaagtctggtgctttgcctgcactattctgagtcttgatccatatcaacctctt

SEQ ID NO: 134106 - DNA, 546 bp, Zea Mays
aggacaactcccagacctcaggacaaataaaaaggcccctttggttcaggaaccgtctgtgtgtgccaaagggagaggcacgagaaatcctgctcgatgaagctcacaactcagcctactctatccacccagggaccaccaagatgtacctagacctcaaaaccagatactggtggagaggaatgaaaaaggagataactcagtatgtggcccagtgtgatacttgctagcaaactaaggcagagcatcagaagcctgcaggtctactgcaacccctcccagtgcccaaatggaagtgggaagaaatatgcatggatttcgtaatcggactgcctcggacccaaaaagggaatgattctatctaggttataattgactgtctcaccaaggtagcccacttcttccagtaaaaactaccttcggaggagccacccttgaccggatatatcttaaagaaatagtcagactccatggtattccatggaagatagtgttagaaaggggaacgtagttcacctcaaaattctggatgagtcttcaacaagc

SEQ ID NO: 134107 - DNA, 380 bp, Zea Mays
gatcaaaaccaacaatcaggttaattataccatgtgtacacaaacgaacaaaatatggacgcatctaatatatgggctgggcgactggtggtttcaggttcctatcgatccacgtgcattactgtcgatcgtctgttcacttgtcttcatttcaggaaacagtgtacacatcaaaagcttttcaatgaatagtatggagagagctatatagccgccggcggcccgggatctagttagctagctaattaagcggctgcttagcggagattggcttgtgatgcagttagatctaaccaaaaaacagggtggtcagtgggtgggtgagtgagtgagtggataaacgtgtggggtctccgatcgtcgtgcgtactggcggcggg

SEQ ID NO: 134108 - DNA, 828 bp, Zea Mays
tagaactgccattctgctggttatttaagtttttgtccaccattccttgttacctttaccttgttgtgcttcgataggacacgtcttagccagcaattgtgacttgtgctttggacacttattgaacttcgctaatctgcactcgatttttgctaatccttgatattaatttttggcctcccaagctccacatattttcttctgatcaatacagctgtgaccttgcaatcgcggtttcactacctcttggtaagtatcacgaaccagcctccgattgtaccatcctttgcttgtattttgttagacacttgtaagagcttggtaagatacattagagcgtgttcatgtgttccacttgagaggagcgtgtagtgagattattagggataaccttcaccgtttgtttcctgtttttgtgtttcaatggcaggcgacgtcgaagaagcaaggatccctacagacttcgatgaatgtgttagccaccaagatcttgaggcaaacaacaagctcctgaaggagcaaatgcaggagacggtccacaagtcagtgcatgatgccttcattgacatgaaccttggcaagacttacgagaggctggatcgacgattgtcccagatcgtcgatagacttgctgtgttggagacacaacaacaagcaccgccaccaccacctcctcatccacgtcttcccgatgatgtggtgtttgatgaagaaggtaattatgatgaagcggccaccagagatttgcgcctacgttgccgtcttcatcaaaacatagaaggtacgccacaccgccagcaaggtaataacaatcgtgctcctgacgac

SEQ ID NO: 134109 - DNA, 425 bp, Zea Mays
gctcatcggggggccagtccgcgcgccgaagctgaatgtggacaacaagtctgccatagcattgatggagaaccctgtgcaccatgaccgaagtaaacatatagacataaagttccatttcatccgggaatgctgtgacaggaagctaatcgacgtcgagtttgttggcatcgaactgcagctgagcgatattcttacgaaggcgctcggtcctactaggtttcaggagctccgtggtctgatcggcatgaaaagattaggctagagtctataggacgtaggaggagattgtttgaataagtcctaaagatagaatgtagaaattagccagcacgaatggagttgtcatgagattttgacatgtctgatatgcgttgcagacactttattcttttgactactatttctgacctcttatgtccgac

SEQ ID NO: 134110 - DNA, 474 bp, Zea Mays
tttctggcgaggtgagtgatggcggtgttcttgcgctgttaggtgcgaagcgggtggacacgaccagagatatctccacaccatataggcgtgagcgcaagaggtggggcccaactgggccagagttcttggcacgaccattgtggacgccgccatgcgcgtggcgtggtggtagtggggctgaccccttgggcccacacggcagaggtctaggcgcgattgacaacgcaacccggtaacccagtgacgcatgagagcggaggtggggtcgtgctgacctgtcggacccaatgcgcagtgaaggggttaggccgcgacgtgggcgcggatgaccagctgtcgagcgagacccacggagcagcgactcaagtgcgagaggtgtgtctatcaaggggaccccgggtgtcggcgtcggtatcgcaagattgggctgcgcaggaaaacacgctagttgggctatctgatgatcattcg

SEQ ID NO: 134111 - DNA, 483 bp, Zea Mays
gatgaagaagatggtcggatagctaatttcttctaggcagatggtcaagctatcatggattacgcatgctttggtgacgccgtgtcatttgacaccacatttcaaacaaataagtttgaaatgccctttgctccgctccttgggactaaccaccataagcggacaattatttttagggctgcactcttatataatgaaacaattgaatcatttatctggctatttaatacatttctagcagctatgtcaggcaagcatcctagcacaatcttcactgatcaatgtgcggccatgtcagcagcaattagaattgttttaccaaatacaaggcatcgcctttgtttgtggcacatttatcaaaatgctgcaaaacatcttagtcaaataatgaaggaccatcctaagtttcttgctgattttaagaaatgtgtttatgaagagagttctgtggcatcctttgataagatgtggactgatttgttg

SEQ ID NO: 134112 - DNA, 664 bp, Zea Mays
ggaaagttgggggctgttggacggttgattttatttttttctcccctaagacgaggattgtgaccaatgttttaaggaactataggagatgagtgacaacgttacgaaactgctgagtcgccccgctacaattaaccagttgcatccgctgtcctattgagtttattgaaaccaatgtagaaatgttcttggttggaaccgcttgcatgtgactgcaactctatggaaaagaagcggcggagctcatgcgagatagagccatctccatctagctagggagaagaaccctcttttcactttttttccggtgattccttgggtaacccacacaaaccgaccaccaaatattccatcccagcaccaccgcccgccacaaagcaaatgcgatataaaaatgcaactcgttgcatggccggtggcctgcgctaaggtttctccgttagctacaactctttgcattgcgggcagagaagcccgaaaccaactctaatcgtcagagcttcgataatgactgcaaaatcggaggtttgtggaatctcagtaacccaagctctcgttgcatttttcttggcatgcatgctagtgaatcgaagagtgtggtttagatccattcaggaatgcctggtgcatctgtatgcacaacatcattaacctccaaaaggac

SEQ ID NO: 134113 - DNA, 503 bp, Zea Mays
caagtctctggatcgggcctcaaataccgagaagtgctggggttaacgtgaacgaattcccaagacccattgcactgccctttggacggcgggttcataacacaaaaccctagggactctttagtaagattaccgagccgaaggggtactcttagatctaagccgtcggatcaaaatgagcggacacgattacatcgcgcgcaggattgtactcgcttggatccgtgccacccattggctggccaatagcccagatttaaaacacctagaccagcctacacttgttggatcttgatcaaatggcgtaggctgatccaacccaaccggtatcctccattctaatcgcgactgttgcgtaaaagatcaacggttcgccatccttcttcaacctcaagcctcccaggcacatacgccgtggcctccccagtacactctctctctcccgttgatccatcggcgctggccaagacccgatagaggtaccctatggccgaacactggcc

SEQ ID NO: 134114 - DNA, 423 bp, Zea Mays
agtggccaaccgacaatacaggtaactgggtaagcacaatctctgattttgaaaagaaggatcttctgaattttaattgacatttctacatagatacataattcccaaaaaaaatctcagtgagcttgagatgaattttttatttgttttcttgttctatgcgtgttgaggtggtgtacttatggtttagatacttaaaatgattgttacgatgttgaatggttgggttaacaataaagctctttctaatgactactgatccaaaaatgataaagttgtgcagcaaatggtataaaaacaaaacattggccattgcttgaaataccaatttagaggaccaggacatctttccaatccctagtctgcatattccagttccatattccagttccaatcttgaaagggaaatgagctaggtagcca

SEQ ID NO: 134115 - DNA, 487 bp, Zea Mays
gaatggagttgtgtccaagcttacacacggtaaagaagaggatataaccaagggtgaggtaagtaaaacaccgctctcaaattgggatagaagattggagatcttagagaacggacatagtgtaatcaccgaggtaagatcaagagatgagaaaggtaaaggcaataacaaacaaaagcataacaaaggatgggttaaaaactcgcaagcgacaaggaagaggatacgaccaagggaaaagtaggtaaaatacaatgctcagattgagatggaaaagagggtattttaaaggccggtataagataaacatcaaggtaagatatagaggtgataaggataaaggtactaatgatgaaaaacataatccatggacagagttaaggcaagactcacaaagtgacgaagtggagaaaacaatcaaggatagataagtgaggttccgacagaagagttgaagtaagaattcattactgaaggaagttacaag

SEQ ID NO: 134116 - DNA, 407 bp, Zea Mays
gggtgcgctcgcgcacacccatcagaaacaaaatcttccactccttaggaaaagatagcatacccgcacaaagaacagaagaacctccaaacaagtgtcaatacacttctttggaaggcttggggctactatcgggtatgataattagaggtacccagattacactgctaaaatgcgcttaaaatcataagggctccatcaaggtacgtcctccgataacaaggaaccaaaactccgcctcgcccgtgctccccctcagaggtcttcccaaaacactacctcgcccgaggtccccatctggggtcttcccaaaacaccaccttgcccgaggtccccttcaagggtcttcccaaaacaacgccttgcccgaggtccccctcaggggtcttcccaaaactccactgcgc

SEQ ID NO: 134117 - DNA, 861 bp, Zea Mays
gaggctagggagtatttataacacgctcaaacaaaactagttgttgccctgctacatacacatgctggactggtcctgtatgcaccgtagttcctgttagctacggaaaagttcccaccctgaaaatgttggcaaaatgtatcaatctaattgaggtaccactgctcgaaaattccttaaaccaatccagtatcgccacccacaacaaactctgttaaaatctcgtggcactctcaaaaacctcgtatggattgaacttcagcacttatagacaatcatgttgcatctctcttaatagtacggcatacctatcagctcaagtttagatgaaaactgaattcaaatctcttgagttatactccattgatcaacgccataactttcaatcttcatcatacaggatgccaacatattcatcttgattgtagcttgagcatagccatcttgatcatgtgatttgatccaattcaatccatatgaattaatctaatggcatgaaatcagtttcttcaaatgatccaacaatgatttaatcctcctcacaatataacttcttctaacttgaatagtgaaaaactaaatgcaagcactttcttcttcaccacaaccatgtccttcgtttctatatgcccaagccgtcgcttttcctttatcttcacttggtccccacggaagccatttccttgctaccatcaccctttcaagccattccaagtcatatgagtttttaatcgatattaatcatacattgaaatccatatagtgaaaaccattttcatcaatattgattttcttgagcgagctctctaaataagaccattacatatgcaagacatcatgtctcctataaccaactcaaat

SEQ ID NO: 134118 - DNA, 417 bp, Zea Mays
ctcgagtttgccccgggactctgttctggtggttctgatgaggacgaggtccccttcatcgaactctttaggaatgacagtgttgccgtgccatgccttcgtttgcgcttggtatctattcaatgcttcgagggcgagaacacagtctccatcgataaggtccttggtggttgactcgtcgacatctgaagtagtcgtggcatttgctcgtggagatccatgctttagttcttgcggggtcattgcttcggatctgtacatcaagcagaaaggagtgaacccagtagctctagattctgttgtgttcaacgcccatatgactttgggaagttggtctgcccatttgcccttcttgtcgtcaaggagtctcttctttatggcgctgaaaatcttgttgttggcgcgttgtactactcc

SEQ ID NO: 134119 - DNA, 475 bp, Zea Mays
ttgctgcaacacacctatgccatggcaataccactagtcaagaaggtacagccatatagaacaagagatacatactaccataactattcccatttcatagaaacaataaccaaccccacagttcacatgcccatacctagattctttatttgtagaaatgccagattgcaaattaattgtgtgacccaagaagagattatactctgaatcttgatgccaaatgcaggacgcgtcacatgtttgcagtcatgtaacctatgcacattgtgtctgacccaactcatctaggactacacaagtccatgtattatctgcttgtgaagtgtgaatcataagccaagatgcaaaattaatcaacagaaggaaacactacattcagtcattcacagcagctaaatgcatattgtgggatctagtttgacactttggctgatgataagcaatctcactggggaagaaagggatgccacaaaat

SEQ ID NO: 134120 - DNA, 578 bp, Zea Mays
caaagtcgttgtcggccaggtcgaaaaagaatattcagcaaaagaccccgcactcatgctatctcacgactgttcgcagtcttgagaggcaattcaagggcttcaccttacaacatgtggaccgcgccaggatcgaggaggccgacgcgttggctaaggcaacggccagaggcgagaccttgccctccgacgtgttctaccatgtcattggcacaccagtcgtccgcaacccagagggattacaagtaaccaatgacgccgaaggccatcgcattgtcaacctcatcatgactgaagattggcgggccccaataacactatttttgcaaggatactaccacccgagtgacatcaatgaggccaagcgcctcaagcaccgaagtcgggacttcgtactagttggtggccagctatacaagaaggggattagtcaacccatgctaaaatgtgtcaccgaaaccgaaggcatccagttcgtgcgcgaagtccacagcggaacttgcggctctcactcagggcccagggccctcgctaccaaggtgatccgtcaaggattttactggaccgctataatctgc

SEQ ID NO: 134121 - DNA, 511 bp, Zea Mays
ggctaatctgatgcacggagacgcaaaagcccctgtttgccgctcagcagttaagatggcctgccagtacctggtgggcgaatttttccgcaatctagcctgttggacatcaagtcaccttggaagaattcaagatggcattccggggacattatgttccggagggggtgttacaaatgaaactataagagttcctccgactgaagcaagggggagatactgtgatgcagtatctcaataaattcaaccatctctcccagtacgccattgagcacatggatacagatctaaaaatgaagaattgttttatcagggggctaaatgatagacttcagcagaagatggcaacatgtttggacctcacttatagcagggctgtcagtacagcactggcagtcgaagctaaaaatgcgggacacaggaagtcaaagggatatgcgggtgaaaaatcaactcaaggacctgaaaagagaacaaggttggtaatctgacctttcaatctgaatcgttc

SEQ ID NO: 134122 - DNA, 1035 bp, Zea Mays
ctctaggctcagcagtacgccaagcggtactacgacaaccaacatcatgaactcgagttcaaggtggcaattaggtgtgactctcccttctccattgcccgacgcactcgctggagcccaggtccaagggcaacattgggcctcgctatgcaaaagccctttcagctattggagcgtattgagcaggtggcctaggcctaccaccctcaacttctaacaggcatccatatccatgacatgttccacgtagggctgctcaagctgctctgtggggaccctccaatgaccacaccacaagtggcaccagtctaggatggttggttgttgcctgctctagagcgcgtgttgcatacctagttatgtcgtggcgtctggcatgtgcttgtacagtgacaaggcctggccaccaatgacgttatttgggaaccactacacgacttcaaggatcgctacttgaatgtccagctcgaggacgagttttgaagaggtgggaagagatgttataaccgatatctccgatgcgcgccggaaaatgggcgacgcatgtgttaggctcaaactacacccgacgtaaacaatactcatttagagaaatggaattagtttgttaggaaagagatcccaaatcgcccaaatctctcatgtagtttacttgggaaccaagtcctatagagcctataaatataggaccctataaccagatgaaggcaaacatcttgcctgacctcaagggatttccctacatgttctctctcccttgctccatgccgcgcagtccctctatacccaagtcaccatgacgccttcccgaagtcgaaaattccaaccccgacccccggtctctacgccgcccctcgatacctaagccaccacaacgccttcctaaagtcaaaaactccaaccgcgacccccgatctcacattcctacacatttcacaaccacgaactaatttatttccatttatcgtttccagtctcttccaacatgtggaatgaagagtgaaatgaactaatttccccgtcaatccatcccag

SEQ ID NO: 134123 - DNA, 280 bp, Zea Mays
gcgagccacactttgtcctcctcaatcgtgcgttggcctctgaaatactgctcgcagtggttcaaccattcgaggggatcctccttcccatcaaatgttggaaactccatcttgtagtgtcgcggagctcctgcgtcgaaagactgcggggtgggatgggttgggatatgttgtaatggctgttgtggtatgtatggtggaaacgatggaagaggtgacggcgagtggggcatggggatttggtggactggtaatgtgttggatgatggtggagttgttg

SEQ ID NO: 134124 - DNA, 361 bp, Zea Mays
cctcgatgcgctttttcttcttcccatccttcttcttcttgcctaacccggagacgatggtctctcctaccttgggtgtgtcaccagagagtatctccttcttcttggtcacctttgccatccctttaggatccatcccttcgggtgattagtcccttgatgaagagaacgactccgatacacacacataatattcacccaaattcaggtgttaccttctttctctctttcttttctgttccttcctcccatttttaaagcatatagagatttatgtccgtgctacgtgaaagaaaaaccctaaggtgatatcgttgttgcatcatgctggagcatattaattcttgtttgatatagtgcc

SEQ ID NO: 134125 - DNA, 597 bp, Zea Mays
cttctgggttgtatggctccggtggcggtgaaagttcagctacatcataaaacatgcttgtgaattctgaagttaaaaacgaattctgaagctaaacctcagtaaaggtacctataagcctcgcacgctcagcagcttcttcagctcatttggcttcttcttgaacgtcgtgagattctttttcattctttctaatagcttcatcagctatctcacggtcgcccttcatccacacctcgaagtaaaatttcccgcctagtgcaaaagcttcggctgaagggtttttagtgtcattcgctgaaaaaacaaattttggctaaactacagccttggcatgttcactgctagctttctctaagatagacatggccccccgtgcaccagcaaagacacagaaatctcctcagtcacataaaattttgtcaaaagctttggcttccccgctgatccactagacaactccatcggggtcgccgcagatgaatttttgctcagaggaatatgccccatccttagcaaagctatcctttaatttcttggcgcattccaaggatatttcataacatttttctttcgaatcacgaagttcatcgccgt

SEQ ID NO: 134126 - DNA, 287 bp, Zea Mays
gtgcttccaggatgaatagaatagcgactaagatgtgcttcatccaaaaattgttggcagagctcttcattctttggcacaactatgcggttgttgaaccatacaatgccttgatcatcttttcgaaagtagtcagcttttccagcttctatcttctcatggatgtgtttcataccctcataattcttttgtgtgtcaattatcctttgtaaaaggactgactcaagctttagttgacttaaggctccttgttggatcattcccaggtttaacttctccatctcctg

SEQ ID NO: 134127 - DNA, 443 bp, Zea Mays
cagataacggctggcggtgaaggatctcaacgcagggaagggtttgtgatgtttcaccatgccacttgccacttgccacacgcagggattcgtgccccctgattattcaccatgccacttgccacgcaattaactgaggtgtccttgccggagttcgccgcccttcatagccgcaccacaaacttagaagagttactacgtcgcagtagatagccgtaggtagtctgtccatcgcttgagacattgccccggtgaacgccacggtagttcgcgccggtgactcaccccctctttcggccgctggtctcccccttcaaaatttggagccactactctcggacgctataaattgagtgcgctgctagctccgctaggttgttacgaagctagagcacccaccctgccctcgattagccaccataaccggagaatttcgttcttcc

SEQ ID NO: 134128 - DNA, 1362 bp, Zea Mays
ccagatttaatgaaccagctacgagtgtccaccattcgattccgatcggacggtgcataacctaaagcgcgaatgggtacctcagatctaatcggggccgttcctagtggatctgacggtgcacggtcctccccccaacggaacacccacgcacggcggcgccgccccgcacgctcggcagagcacgccggcgaggctgcaatcggccgttcccgagcgccatatacaaattgaaccgagctacacgtagaggaggacaacgcagagagtagggaggtgaatttaccgaggattgggtacacagtcgggctgaccacgacacgaggtggcttgacggcgttccgcccactccggtgatgaattgaggttgacgtggacccgaaccttgcacgccgagtgagtttacagctccgccaccccgagatgattatcccacgccacccaattggctcctaatgacggcgagacagcaaatcgactacggcggcgagcttcacccgtgcggaacccggcggcgttctctttctcacaactacgagtggcggtttcgcgagggtcaggcgggactctggaggaggggtcggtccacatttgtagccgagacgaggtggtcaagagtccggctagaactacggagagaatagcggcatggcgactggttgttgcgcccgagcggagaagaaaacgctgacgcgatgggcccacagatcggtggcggggaaaatgaacgcgcgcggagggagacagacaagcggggcccgcatgacagccgaagcaaccagcgcggggcacgctaaggaggcctgcactcgaggcccacatgttagagagacatcagaggcgcacgcggttagtgggctgcgcagagggtttcctctgatgggccaaaaatgcagccgtggcccaggtaagtggtctttccctttttcttttgtttttctctcttaaatttagattttcctttcccttttgaatttcaaattcaactttgaatttcagttataggtttgcacatgtataaaatgtgtcaaattaaatttttgtggatgaaggaaatatttttatgtatatatttatttcctatgtttttttgtggtatttcttttctttctccacttctaaatcctagattttattttatattctaaattccactttgggactttaatgtatttcttgtctcattatttccatgagtgaatgcacaaacatataaacaccagcatgatgcatgattctagtggcttttatgttattaattatttgtttttacctagggtgtacacatgtgatgatgcacaaaggttaaactgacataaggagaaattgtttctctattattacaaagtgggtgttacaaat

SEQ ID NO: 134129 - DNA, 534 bp, Zea Mays
ctacgcgtaaaaactgatctactggacgctttgactaatgctagtgtagtgtaggtgtagtagccgtgtaggaaaagaaatgcagtccatcttgcatctggtgtgtacgtagaatactagtacgcgacaggctgtgcgtgtagattacgcacgcgagcatgcaccgcgatccggacgcccaggaggccaggacccgggtgtgtgtctgactctgactcccggggcccgcattgtgatgagctgagctgtaagccgctgggcctgggattcgtgtatgccaatcagccgatgtggcgagccaatgaacggcaaacgagtcaacgactcggatttgccagcctgaggagcagattttgctatgcaaaaaaatttgcgtttgtcttgtgctgcaatatttcgtatttcctcttccggtcggctgtatgtagaaggcgtacgtagagctgtatacctgtatagtatggcttggtttggggtggccggcttggggaagcaacgtgcacaattgggtacgaggacaaggatgggggcctg

SEQ ID NO: 134130 - DNA, 965 bp, Zea Mays
ggtacagtagcctgatgtggatcagatcgccagcgtcatatcctcaccgccagcgacctctctgcgcgaagattcgtgccaccgccgtcctgattcgtgcaccgggcttggagataacgatttgggtagaaaagatcatcaccccgtgcgctggacaccactccggtgactcaccgtcgaacccctttgctttacggctttgggagataggttcaccggcgatggccaactgctggtcttgtgccgcgtgctcgggtacccccgtcgcgtcaccgtgactctctatagatgtcttatcgtcgccggtgaagttgccacgacggtcgacacaaattcgcgacgtcggtattcttccttatctctggccgcctgcgttgttcgaccaaattgtgcgccaccgtcgaagctccctataaattgaaggccgggactgctgcgctaggtcatcgtgaagccgacgcacccgttcttcccctcaattacccaccgtagccggaaaattccccttttcccccaaactggtctccgccaccgcgaagaacagctccactgtggccagcccattctggtaaggcaccgtccaattcgcgcattgttctcatgtctctgtatgctggtgatgctttccaacccgtccaattgaattaggtcgccacccattgccgggaacacgagcaaaagtccttagccttcactgttctcgtgggcagggcggagtaggtcaccaaccatgcaattaacttagggaaaatgctcggagtaggtctgatttggtgtccaccgctcgggaacgccagtcattgccccgttaggccggcctgctagctcgccggagctccaccgcgctcaccgtcgtcgtggacctccccctgcgaagaactagaatatggagggtttatgtgcaaactgttagtgacacaatgaaatagtaaaagaacccgttcccagttagccaaaaccccgag

SEQ ID NO: 134131 - DNA, 412 bp, Zea Mays
ggcatgtggtagatgttgagaacaagtaatgagttgtccattagccactctgaccgccattggacgttgcaatgggtgtctgcccgtcaacaatgacaaaaatcggtcgctaataaatgaatgggtcgacccagaatcaataagtatcatcaaaggctgctgttgaatagtgccctgaaaacgcaatgtggagactgcatctttccctgtccacgctgcatcagacagtgtcatcagcaattgaggttgactgtcttgcacggcttcactgtcctctggctcatccagcaaatcccaaacctcctcaataacttgtagttgcacagtattggggcatttgtgtcctctgaaccacttttctgcacagcgatcacagaggcctcgggcgcgacgataacttttcaatgaagcg

SEQ ID NO: 134132 - DNA, 525 bp, Zea Mays
gccacggcgatgggcggaagtacgacgatggcggaatcacggtgaggaattgccttcaattcaccgctgcccgcgcccgcttattgaccggacaatctccccccgatggcgcacaccaccacggcctggtttcggtcaccagacgatgccgcagccgagatcccgaccacggcggcaatggcgcagccgcttctctctctctcggtttgggctctggcgggtttgtgaaatagggggtacagatgcgacgcaagagtttataggcgtaggttggaccagctcacgcccggttttgcagcttggtggttgagattcatccgccatgcgcgcagaatccggcaatggccgctgcaacggagaagacgccgccatgacttgggcccacccgccagcagaagaagggaaggaggaaggcgcgcccgcgactgacttgggtggccgacttgtcggcgccgtccagcagtgcgggtggagaaatgggccaaggcgagggttttctttagtgggccgaaagtgggatccgag

SEQ ID NO: 134133 - DNA, 549 bp, Zea Mays
gccattggccctaaaacaatgtttagtggatcaacgatcaacattcttcatgactgttgagtaatgtccaaattaccaccagccttccatcaccattacttttgttggtagaagctaaagaggctcaccccattctcccttctgcctaattcaccctcttctttattcaacttcatgcacgtgtgtatacaactcccacaaactatagagccacaactcatcccctgaggatgatgaatgttgatcatatagcaacgatgattctagtgcatatagctctctagatctgaatcctccttgaacctttgagaagaagaactatgatgatgcctttgggctatgaaagtctcctagaggggaggggttaatagacgaaacctaagatgaggagggggcctagaggtttgcctggtcaaatggatgaacataagaacacaatgatttagagtggtttaggttgctggagagcaataccctacatccattatgagttgtattgctatgatagcttgagtgttgtgggtctgagtgtccgagtcctccccttcg

SEQ ID NO: 134134 - DNA, 424 bp, Zea Mays
gtggttttaggctagggacagagagttgtagcatcaccaaggtgccagtgtcagattgcctggtcccgaggtcaaacggtgccaaaaccgtgccaaatgaatttggtttgagttcaaatttttccagagcgtgttcaaggaaatttggaactactttgatatttggacttcttggttttgagttttgaaaaatagagaacacatttgatcttgaaaaagggttctgaaattcagaatttagaattctgaatttccccataggacttggtccaagggctgaattggggattttggaaaaaccaaatggccaaattttcttactatgatttgttggttatttggtgaactaaaactttgtaatttggtttttaccaaaatttgtattcttcccccaagatcttctcccaattaccctttatgctta

SEQ ID NO: 134135 - DNA, 879 bp, Zea Mays
cgcggtgatagctttccttcatttggaaccttttgacaccatgcatcggggagaccttgagataaacaaaatctccttcctcaaatctgagttctcttcgtctgttgtctgcataacttttctgtcgactctgagcttcaagtaacctcttgcggatcagggcaactttctcttcggcttctttaacaaagtcgggtccttctagtgtcctttcccctacattggaccacattaggggggtctggcattttcttccatacaatgcctcgaacggtgacattttgatgctggcctgatggctgttgttgtatgagaattcggcgtacggcaagctggactcccaatccctgtcgaacgttagcacacaggctcttagtaaatcttcgaggatcttgttgactctttccgtttgaccatctgactgggggtgataagcggtgctgaaatctaacttggtgcccatcgcttgctggaggcctttccaaaattttgaggtgaactgcatccctctttctgacactatcttctgtggaatgccatggagcctgactatctccttaagatatatccgggcaagggcggctcctccaaaagtggtttttactgggatgaagtgggccaccttggtgagacggtcgattattacccagatagaatcattccctttttgcgttcggggctgtcaggttacgaaatccatgcctatttcttcccacttccattcaggcactgggaggggttgcagtaggcctacaggcttctgatgttcggcctttgatcgctggcaggtgtcacaccgggccacatactgtgctatctccttcttcattcctctccaccagtatctggctttgaggtccaggtacatcttggtggttc

SEQ ID NO: 134136 - DNA, 349 bp, Zea Mays
accactcaaaaactggtttatgaaaagaaaaactgctctccggttttttttatttggtgtaaatttatactatccaacatgaaataaaaacaaatggagtcgaacatcgaattcatttcaggtcagagcgtgcacctttgagcaacgaacagttgctattccggccatctgcatttcatttcttcttttccccgtcgatgcgttcatgtccatcaaccatcgtgcatgcatcctccattcctccccgacaaaagaaacctgcccggtcggatcgtggccaccatcgggaaaggtagcccaggccgtcaccaccacgacacgagagagaaaccagtccaagtccagtccg

SEQ ID NO: 134137 - DNA, 688 bp, Zea Mays
gcacattgtttctattaattccaaccattcggcatagggcttgctgaagcttttctgaaatttaaatcggtagggaagtcatacaagttcatgtttattcccttcttcctttttcttcggcatcccccacccaccagacgttggaaatgttttgttggccagatattcttgcaccaagtccctagtactaatatgctccgctacaactctaaattccacttcggccaactggcagggggacctgagttgcatgttgcacaagggctgtgtcatgccgaagctcagtcttaagggactcatcaccatagtcgtaagcttgtccctcttcttctcgtcagctttcacgtaagaccattcattttttagccagtaggccacttggtgtgataactaattacaggagctttggtatctttctggtacgcaaaattgtaacatctgaagttcttatgtagtccatcagctctagccttcgtctggtagtggagttcgtgcacccggcaaaatccttcagcgttggcactcttcccctggcttcggagagcccatattacactaagtctaactatggcatttggggtgagttgatgaaggtagatctcgaacttctttaaaacctcaccgatcatctcgtatagagggaactgatgtcctactctgaagaagcttttgaaaactacgacttcgt

SEQ ID NO: 134138 - DNA, 461 bp, Zea Mays
gtgttttggtggctgctggtacactgatgaagtgatgattgaataacacgctatagatagatagataaatattgatttgctacacaaaactgcaaccgcaaagtttttcttttgctacattatattatgccactggtcgatcgaaatggtggttattgttgccttgttggatatatacgtgcgtagacgaatgtgtttcagcgagcgagagagagaggaagacgacgagaggatcggaaggtggaggagacctagctaggtggggcagcatcgggagcaggagcgcagaatgtgtgtgcctagaaagaaggctgggaggcccgtacaaaaggctcggagtttattaatcgagagcaccttgcacgtaactctgtctgcaatctgaagcccagtttcttaatcgctctttgctacctccttttcttaattctaccatccaacgacgccgcccggtggccggc

SEQ ID NO: 134139 - DNA, 326 bp, Zea Mays
cgcacatcgatcaggtggtcgattccaccacaggttgggaagttctgagttttctggacgcttacttgggctatcaccaatcacgatgaaggagtccaaccaattgacaacatacttcatcaccccttttggttcgtattgctatgtggcgatgtcgttcagtatgaagaacacggggccacataccagcggtgcatgatcaaatgatttggtgacctcatcgaaagaaccacgggagcatacgtcgacgatatcatggtcaagaccaggcggtacgaaggcttcatacattacctaagagaaagatgtgataggctaaaagccaa

SEQ ID NO: 134140 - DNA, 571 bp, Zea Mays
ccacccccaccgcggcgggagtgggaaagagcggaggagcatgcgggagggttttcaccgcggcccgagaaaggaggacctgcgccgcgcgcatcgcgacgagccgctccccgctggcacgcacgccaaaaggcgaagaatctctcggctgagcccccccgtcccctccgccaccgccgttgtagccagtaggaggtagctaccccagatctgctcgtctccgcgcccgcccgccagattcgccccaccctccgccatgcggttgccgccgccgccgctctgactgggctctcttctgctgtgagagggaggaataaaaagcggttttctttcgggcggcaggccggtcggtcgccatggggtgcggccagtccaagatggaggaagagtacgcggtgcgccactgccgggtgcgctccgagctcctcgcgctggccatccgccagcgctacacgctcgccgacgcgcaccacgcctacgccgagtcgctgcgcgccgtcggcgccctgctgcacgacttcctccgcggggtccagtcgctgccgccgccgccgcccgagcccgcgctccg

SEQ ID NO: 134141 - DNA, 448 bp, Zea Mays
ccccgagttaagtaagcatgcaggttgacagtgagcaattcgagtgcctttgaagtctttttattgatgatatattttccagtttacagagtacattgtcgtcccaatagcttttgagatatagctaggggtaaaacttcctgagatgttctatgttccatgagttcctaatttccgtgtcgtccatctgagtgagacgatatgatccaggccgagtgacttctgctactatgaatggtccttcccatagtggcgacagtttatgccgtccctcccccgttagaattcagcggaggatgaggtctcccactgcaaaggatcgacgccgtatagccttgtcatgatagcgcctcagagtttgctgataccgggccgactgaatcaccgtattcaatcgttcttcttctagtacatcgacatcttccagcctagtagcctcagcttctgc

SEQ ID NO: 134142 - DNA, 568 bp, Zea Mays
ccggacttccgcagcaacttgaagaaaggcagcgctctctcagctagcctcgaaatgaagcgactaagggcggctaatgaccccgtatgcttctggacgtccttgatacgggccggaggcctcatcgccgcgatcgctttgatcttctccgggtttgcttcaatgccccggtatgaaaccaggaaccccagcaacttcccagcggagacaccaaagacgcatttgtctgggttcagcttcgtgcgggttgcccgcagcttgtcgaagaccagggttaagtcttccactagggtcgaccctctcttagtcttgaccatgatgtcatcgatgtagacttccactttgtccctaattaggtccccgaaagtcttactcatcgcccgcacaaatgttggcaaggcatttttcagactgtaaggcataacaacatagcaccggaggtagaatccacgatttgatctatacgtggaagtgggtacgggtccttgggacaggccttattcagactggtgtagtcgatgcacatttgaagcttcccattcgccttggggacgatgactgggttggc

SEQ ID NO: 134143 - DNA, 690 bp, Zea Mays
gcaaactagagttgtgtctgaatatatttcccatttttctacattgatggatcagttatatgcatatgaatcggtgtctgatcccctgtactttacaacccaattcattgatggactgagagatgatgtttgagttgtggtcatggttcatagacctgggggatcttgacacaacttgtacacttgcacttttgcaggaggaggtggttgaaccaaccaaacatagagagtttccgaggttgggttctagcccatggagcaaaactgaggtgaaaggtccttttcttttaccatccccaccatctactgagaaaactagtgctgcaacttttgatcgtaaacccacatagccatgtaagaacgttgaagagcgcgtgacaactttacgtgtgttccggagagcaaaagggttgtgtgacaatcgtgtagaaaattagtatcgagtgcatacatatagcacgacaatacagttgcaggctatgcaggaggtctgggatttgttttctgtggaggagaacccttctcctaccccttatgaagcagcccctaaagaacacctcttcacacttatgatcttattctcgacatggactggttggagacacagtcgcatgaaggtgcattggagacagaagtggatgtccatcacttatcagggtacatcagtgctcctgtatggtgaaggataca

SEQ ID NO: 134144 - DNA, 508 bp, Zea Mays
ctggtcgagcacaaactgaaggtctatccccaggcgaggccgatccgacaaaagttgtgtcgtttcacacccgacaagagagaagctattcgtgccgagctagctcgattagtcgcagcaggattcattagagaagtactgcatcctgagtggttagcaaatcatgttcttgtactcaaaaggaataaagtggattggcgcatgtgcgtcgactatacagatctcaacaaacactgtccgaaggaccccttcggacttcctagaatagatcaggtggtagattcgaccgccggatgctctatgttgtcatttctggactgctactctggataccatcaaatcatcctagcaaaagaagacgaggaaaaaactgcattcattgccccatttggagccttctgctatatctccatgtcgtttggcctcaagaacgctagagcgacttcccagagagctattcaaacatgcttagccgatcactggggcaagcgggtagaagcttatgtcg

SEQ ID NO: 134145 - DNA, 469 bp, Zea Mays
gtaaaatggatggtttgctttggcatattatatttctccaaatgttctttgccttagatgtcgtccaagactcgcacataggatggggcaggaacctcccgtgggagggaagcaactcctaatccacccccggtacctccaacattagctgaggccatcgctgccttagttaatgccacggccgacaacacccgctttctgcgggaaatggcgggacaacaaatgcagcagcaaggcgggcgagcagatccgcaaggaccccgcgaaacttcatatctggatttctcagagacacgtcccccattatttgtcaaggcggaagatcctctagaagcagatgagtggatccgacttatcgaacaaaagtttgggcttctccgatgtacggagactcaaaagcctttgtttgcggcacaacagttgcgaggccctgccagcacctggtggggaaattatgtagccattcagc

SEQ ID NO: 134146 - DNA, 302 bp, Zea Mays
agaggagccacacctttacaccataatagcctatggcatcggcaaaatcagcaccttcttcaagcatatgtgcgcccacacctccatccaccactaccacacacaacgctgcaccttctatgttaaacacattgaaaggtccagttacgaaagtatgttaactgaatctccatgtatgtacttttctagtcaattatttttaaaaccttatggttggtgaagcacatgttttgttgattaaaaaccttgaagtagaccaacaaggacatcaaaaaggccgaagaggatagttaggatgtcta

SEQ ID NO: 134147 - DNA, 421 bp, Zea Mays
acttggctaatgattcatgaaatgttttgttgttgctcaatgtgaaaaggtttaaaatacgtacatataaattgactattattgctatttaattgattattgctcaattattgtttaaaagtgtacacttagtaaaacccgcgggtgacccgaaacccgacgggttcgggcgcgcgtttggaatggcactcgtgggtgccatcatgggtgggtttcggtagtcttcacgggtgtgcatgccccctgcccgcggatgcccaccactgcagtaccctgctgctgtgtatagcacacaaatgcattctacaagatcacagatagtcaataacataaaaaaaccagtgtgcgatgtactaactatggtcaactctttctgcatttagttttgtacattaacaacattaatgtggtttatgtcaag

SEQ ID NO: 134148 - DNA, 520 bp, Zea Mays
ttgtttaccccgattactgctacccgctgcgaggacggggaaagaagaggaaggctgctgcttcggccaaaattgctgcttcggccgcccccgatgagcctgcgccgaagagcaaaaaactgaaagtccttacccaccgaccacgctatattgaaccggccatggtgcctgaatttggcggagagacttcttcagctgctaaaccaaaggagcccatttctcctacacagaaggctgaagatccggatgtaatgccgaaggtaccctcagccgagctagatgagtcgaagactgataaggctgaagagccaaaaatcgaaggaacaaaaatgttagaagttttaagcccttcggcagaagtaacagtgcggaaggcacaaaaaggtcttgcggcaactcccaacagaagaaggatggcaaatgtactagatgtgctagaatcagtaaaggctttaagctctactccttcagggaaaattgccgaggcttcaaaaatgcaaaccgaagctgaaacaaagcc

SEQ ID NO: 134149 - DNA, 571 bp, Zea Mays
tcataggccttgatcacactatctctcactagtctctgttatctacactaggaaggagccaattactgtcaatgagctatttggccaacttctgaattttgagacccatgttgatctcgtctcggatagtaggtctatcaaagccatgagccaaagacatggcggtactcgagaacgaggtgggatttgcaaatgcttagttgggcatggcggttttgggtacgataataataggggccacaaccctaatagttctaatcataaccgtggtagataagaggagcaactcatatctcaagtttgcttaaaaatcatacaactgtgaatgctagcacaagtttgataattttttgtcccagataaaaaacttgttgcctctgtcatattcttatcaaactaattcaagctggtgcatagattatggcgccatcgaccacatcactcgagagctagaaaagcctgctatcagaaaacaagtataaagcatgagattaagtctacaacaccggtggatcatgtatgctagtaatacttcattaactactcctagtcgtagtttcgtactaaaata

SEQ ID NO: 134150 - DNA, 729 bp, Zea Mays
cgttctggacgacggaatacctcgccggagtgggaactccgccatgctatcgcgcgtaccgtgagcagtagccgtcgtggctccaatggatggtgagtcttcaatcatcgcttttgcctaggcctcctctgcgcgaagaacggattcggggtggtatatgattacttgtggcgattggcgttcactccggtgggttctgccgccgtggcacggggcggcgccgcctcagtccgacgagagatgggcaagaaatagaagccgttgatttcttgttgaacgcgcgggattaggcaaacgcacaacgattcacgagttttgatccgagccgtagagtgtagatcgatcggatgaggacagttctgatcttatagaatctgaaccgttagatatcaatccggtggccatcgtcccttaccggttcacagaaatgacgttatgatctgagccgtgcattgccgatcggacggttcaaaacacacgatacctcttcgactctgcaattttataaaagagccctctgctttcatagaattgaacccgctgtcctacttattgcgctctgtgtcttagagagttatacgccagggcccctgtgcttccagttattcatgcgcgcagtccagaatcatagaaaaatgcagaaattcaattagaaaatgatttttagtgttaaaataattccagaaacttatttaactcatagaaaattaattctagctccaaattaat

SEQ ID NO: 134151 - DNA, 681 bp, Zea Mays
ggccagtgttgatcggaacatatcttcgagctgctgctgcagcatcgagtacttatgccttgttctcctatagagcttccttgccatgtcactcgaacttgtaaaaaggaaaacactgtggtttatggagtcaagccatgaagaggtcccaatgctgctgctctgacgaacatgggtttagccactcagcgttctgatgaggttaaacaattgcgtggcgctaagaatcccaatgcctttgactgacagccatccctgccccgaaaggccgaccaagcgcaataaaagatgtgggaagaaaccaaaaccaaaaacaaatgacctgtccgatctctcctactgaactggtttatcttcagcacctcgctttcacagtgtcgtttgcaaagttcggacataattaagcgatcttgatcaggctttagtattagtaacagacccgttttggtttatggattcatcagaaacaaatgccaggtagatgtttgtatacggagcactgtcaaattccgagcaggatagatacaccaaaataaaaaaagatgtctccttcaagcaaagcctacggctccagtgctaaactaggcggcaattcccgacaacgtgaggggcctcgtcagcataacgcaagtgggcggctgtcaggctgtggcccaatgaggccaccatcaccactactac

SEQ ID NO: 134152 - DNA, 900 bp, Zea Mays
gcgctatgaacgccacactcaagccccttcttcgtcggtgcgttctcgtcttcttcgacgatatcctagtctacagcacggattaccaatcacatctgctcaacttgcatcaagtcctgtccttgctagcagctgaacactggaaaatcaaattaagcaaatgctcctttgctcaacggcagacaacgtacctggaacatttaatcagctctaacagtattgccaccgacccaaccaagatttctaccatcgtatcatggccagttcccagctccgtcaaggaacttcgcagtttcctcggtctcgcagggtactaccgaaagttcgtccgtaatttcggagttattagccgtcccctcacagatctgctcaagaaatctgcagtttttctctggactcaagtgcatacctcggccttcaacacgctgaagactgccctccagtcatcaccggtgctggctctcccgaatttttctcaaccgttttgtattgaaactgatgccagcggggccggtgtgggtgcagtcctcatgcaaaacagccaccccatcgcctatgtcagcaaggctttgggtcctaaaaccaggggattatccacctacgagaaggaatacctcgccattctcttagcagtccaacagtggcgccagttcctgcagtttggagaatttattgtgaaaactgatcaacgcagccttgcccacctctctaatcaacgtctgcacactccgtggaagcaaagagtgttcactaagttgttgggattacagtacaaaatcatgtacaaacagggatctgagaacaaagctgccgatgctctatcccggcgcccccattttcctaattctgaattgttggccatttctatgcccactcctacatggctttccaacattcagg

SEQ ID NO: 134153 - DNA, 2117 bp, Zea Mays
ctcatcacaatgaattgggaaaacattactcttctgaatgttggtcttcagaccagaggcttcaccaaaaagatgtagaatccccttaaatgcctcaatatcaaccacatccgaccgaaggaaaacaaccacatcatccgcgtataaagaaatccggtggtgaaggaatctcgaagaaaggggctggagaaccccttctgcagaggcacgctacaccataatattaaggacatccataaccaagacaaagagcataggagacaatgggtccccttgacgcaaaccccgccgatgatatatgacttctcccgggcatccgttaagcaaaatctgagttgaggaagaggacaacaagccgcaaacgacgttgcaccaaatctgtccaaaacccagcctaatgagaacttcaattaaaaatgaccaggaaacactatcaaaagccttagaaatgtccagtttgatcatgatacggggctgtttttgctgctgcaaaaaacaagcagtatgttgtaccagcatgaaattatcttgaataaaccttttcttgatgaaagcggattgattaggcgagacaagatgttgcaactgacaagccaatctattagccataagcttagacaccagctttgcaaaactatgaataaggctgataggtctaaaatctttgacccttgtcagccccttccaattttggaatgagagtgatgtaagcggagttcagacaattcatgttggcaaactttctagcccaaacacatgatattgcagccatgacatcaatcttgatgatggaccaacagaccttgtaaaaacgacctgtgaacccgtctggccctggcgccttgtcaagaggaagactaatgattgtattccatacctcatccgccgagaaagggctgtcaagagcttctagatcaaaagtgggaactccaagctgttccaaatcaaccacagcccccctattaattgcagaaccaagcagattcatatagaaatcagtgaacaagtccgccttctcttcctgggcagtgaaaacctttccatcctctgagacaattctagggatgaaactcttagctttgtgatacctcgcatgagagtgaaataaagcagtattcgcatccccatccttcaaccaacaaatccgagatctcatccggaccaaggaatgccataaagacgcaagagcaagactttgctgctttagactattacgcaaccaaaattcttcaggagaaagacttctactgtcctgagctatgtcgaactggtggagcagctccctggcaagaccaagctgtgatctaatatgaccaacctttttctcgccccaaccttgaagagctttagtcgtggccttgagcttcatggaaagagtgagcaacggacagtgactagcagggacagcagcccaggcttcctcaacagctaccagaaacccttccaatcttgtccaaaaagcttcaaaattccttgcacaatatccttaagccccagaagaagcaggcaatgatctgaatcgaatgaggccgaactttgcagcagggcccaagggaactgatcatcccaatccaaggagcagaaaacacggtccaatttgacaagagttcgattatgctgcccattcgaccaggtgtacttacgcccaaccaaaggcaactccttaagagccaagtcatcaatccatctccggaaactatgcatcattggcctatccagattggagttatttttaccctcatctttataaattaaattaaaatccccaaggaccaaccaagggccagaacaggaagcacgaatatctctcaattcttgaaggaaggcaattttgtcctggttgaactggggaccatacacacaagtcagccaccactcaacatcatcaacaggatgaaaaagaattgacactgaatgatcatccactctagaaacaccagaccaatttatatgatctttccaagcaaccaaaatgccaccactagcaccaatagatgggcaaaagacaaagttggcaaaatctggtccaagcatccgaataaccaaaaaacgagaaatatcctacattttagtttcttgtaaacaaaccacatccactccagaggagacgacctcag

SEQ ID NO: 134154 - DNA, 361 bp, Zea Mays
cagctctggctccttggtgccctggtctctcactcagagttcgatgttgtggatttccttatttgtgagatcgaggacaccgttctagatggtctgcgtgctcgtcgacagcttccttatgctcactatctgtgtcacatttttgctcagctgattcggcctccacagttccagggcacacttgaggcctcacgcctcctctttgggtcctaccgtccagcgcctgaggatcctgtgccagcacctgctccagtatttgacactcaggccgaggatactgctcttcatcagttcgaagctcaggacgcagcagttgatgatgatgatgatgatgattttgggattccacctccgcctccac

SEQ ID NO: 134155 - DNA, 336 bp, Zea Mays
gcttaggaattgttttgaatcacatcctgttaccatagtgacttcgttccacctgggcgatgttacccgcaatccggacatttctgtcaggatcgccaaatggcctcttgaattgatgaggtatgcgatctcctacaccccgtgaacaacgattaaatcacaagtccttgccaacttcgtcgcgcagtggactgagacccaattagagccagcacaaaccacctagaaatgttggatcatgcattttgatgggtcaatgacaaatcggggagccgatggcgacatcgtttttacgtcgccttcaggggaacgacttcggtacatggtgcaactcca

SEQ ID NO: 134156 - DNA, 512 bp, Zea Mays
gagagggggcggtcagatctagatcggagggctcagattagatccgctctagttaaatctaaaccgcccaatctcggacggacgcccgagatctaatgactgggggtggacacaggcacggtggtgccgctcggtcccgcggtgagagctcgccggagacgagggggctggccacgatggggcaccagaggcttggggactaggtcgagcgcattcagggcggtctggcggactcggtcatgggcatcacaccggcgcgggagcaccagggggcgctgcacatggcgaggtgggctaacggcggcacggggcaactccgatgaacaatcgcgcgctaaccagggcagtaacgaccaaatcaagggcgcaggcaggttgctcatctcgagaggaagcgctggagtcacggggcaacggcggtggcgcagggatgcgacggggcaaactagagggattaggggcgaaccgaggggtgtttcaagtggcgggtgatagggctgagcttaccaggg

SEQ ID NO: 134157 - DNA, 443 bp, Zea Mays
gtcagatcatcttgaacactaaggttctccattagtagctgctcctcaggtaccctgaggcacttcttcaactgagatacatggaatacatcatgtacatctgccagatgatcgggtagttctagttgatatgcaacttctcccactcgctttaagattaagaaaggtccaatgaagcgaggggacaactttcctttaactttgaatcttctcataccccggatcggtgatactttcagatacacgtgatcaccctccttaaactccagtagtcttctccgggtatcatcatagctcttctgccttgattgtgcaattctcaaattctcccttatgattcgcacttgttcttctacctcttgtataagttcaggtccaaagaactgtctttctccagtctggtcccaatacagtggtgtcctgcattttctgccatatagagc

SEQ ID NO: 134158 - DNA, 437 bp, Zea Mays
ccaggctcgaggaagtcgatgtgctagaggaggaatgcctaaatgttgtcattcagtcggtcaggtaccagcaaaccttgaggcaaaaccacgataagacagtatgacaccgagcattcgcagtaggagacctggtgctttgtcgcatacagtcaggggaaggacgacacaagctatcaccaccatgggaaggacccttcgttatcgcagaagttacttggctaggtagggtcttaccggctaactcagatggacgggactccagtagggaactcatggaatatcgagcatctcagaaagttctacccgtagtagcaccataaactctagatggtgaactacactttgtaaactggagacctcattatcaataaagcttctgtgttcatgcacatacaaacaaactctcaagtagcgatcagcttaagtcggaaaca

SEQ ID NO: 134159 - DNA, 317 bp, Zea Mays
agcatgacctatttatataaggttgttctagaaggtggttggttttgatggttgacaattctactcaaggtaggtgtattcaagagttagttgagtggattcaaggattaatacaaatttcctaaaaccaaatggatcattgttgggtcaaggacaacccaacagtgatagacataaatcacataattcataattcactaccaagtcaatgacaacctagaagtgactaatttaaatcgctcacgggtcatggccaccttagcagtgatgggaatggatcattgttgagtcaaggagaacattgtagtgattgggca

SEQ ID NO: 134160 - DNA, 400 bp, Zea Mays
gttcctgcgatcctgaggctatggcctctgcaaaaacgttcagttgcatggcagaatgtctgcaccaaaagggacctgaggacacgcgcggcgcgccccacgctttcttgctcgctagctctttacagccactgcactctcatcagaaagaagcccacggttcgtcagactctctcagcaaatcatttcatgaaaaaaccgctggcaacccctattatgtgcaaccgattgtgtggtcgaggaagaaaccccggagcagaagaactctcatctctcataaggcttcctataatgcaatagtaataataataataaagccactgatgagcgatgcaggattttttcaagcctccgatccgtcgatcaaatggcttagtccaatgcatcgtttctatcgaag

SEQ ID NO: 134161 - DNA, 298 bp, Zea Mays
agcggtctcaccgaatatgacatggcgagagatgatgatgcgacgtgtcgataggtcgaggcagcggtaacctttgtgcgaggggggatatccgaggaagacgcatgccgtggagcgaggggcgagcttatgtttggaggttgcttgcatgttggggtaacagaggcacccaaaaacacgcaaatggttataggttggcggctgattatgcagacgagtgtatggaatgtcatgctgaatggaggaggatgggcgcctattatggaggtagcaggccgtcaggagtccctcggcccaa

SEQ ID NO: 134162 - DNA, 706 bp, Zea Mays
gcgaaggagagcggggccgacgccgacgacccctggaggagtcaccaccatcgtcctcatccctgccatcagacacgggaggactaggcgcagcaggagcgtgaacctccgagaaccgcaactcaactggataggataacacccgtttcacaggagggacttcaacgatggccgacggcggctcaactacccagagttccctggaagaaggaagcttggacagatcggaacaccaagccaagcatctgaaacttgacagatccaacaaccccagcgtatcaggatgcacttgcggaacaccaagccaagcatctgaaacttgacagatccaacaaccccagcgtatcaggatgcacttgctgtatccaggcataagggcacaataggcgatcaacagtagacgtctcccacacatgggcagggatgccacgaagctccacatcaatcaaggacgacaacacacgaccatgagctccggccaaacgattccaacgtttgcacagaagactgagaccgcctccagaagaactgaccggctgccgaaggccaatcaaccgctcaaccagaaccaggtccggaagaaccaacaagaagctcgacggagaggcccgacggagaaccagagagctggcggcaacatcgatcctggcagcaagcaccgccgccacctcgccagcagagaccaggggctcatcactgataacat

SEQ ID NO: 134163 - DNA, 576 bp, Zea Mays
cttgggatagtcctttgactggtatggtatatactataaaccaaatggtaaaggtcgattctgaatagacatatatctggggtttatgtagcagaactacattgtattccaccccttggcatgcttaccataatctatatctgatctaccagaagtaagaagagtacaaaaatagccatggaatcccacatcaccacatagcttaaagctacattaggcattaatttgtccttggtttttggcgttggaagagccacaattctcgaccgcaatactgtcagtgatggtaatttgtgatagaaatataaagatcttatggagacctgttgtattctccgtagtcctgatgactccttcgtatgagagtagtactatctgttgttgaagacggatcctaggcggatactagtcttgttttcgttcttgcaaagcagttatcatcatttgtttcatgaaaagctagttatatggtgatttttcctagataaaaatgaattcttggccttgtctgttctattccaaagcttctctttttgttgaacaatgaagagatcgaaataatgatttatagaacaa

SEQ ID NO: 134164 - DNA, 294 bp, Zea Mays
gcgacacccgaaggtcctagttcaatactctgtttcgtttgagcaggccatgtttcaatgggcactgaaggcctggcttcgacttcagcacgaattgcagtagctgcggcggcctcctttgcaggagcaggagttgacgcccttgtcgattccaagactgcgtccaacacgctagccatcctcctcctcttacgagttattgcaggagctttggataccttctgcaattccggctctggtagcgggctcaagatttttggtagccctgccggctcccctagctctggctcttcg

SEQ ID NO: 134165 - DNA, 366 bp, Zea Mays
gttgattgtgactcggggcaagcgccagtggtggtggtggtggcaactgagcccgcgaagcttgagaatgacttgccaaagcaacggaagccgtaggctgttgattgcctccgtactccgggatatacggagaatagcatgaagcggtatggaggacctgcttcggctgattctgccgtgctacggcttcagctatttccttctgattcgggatcgtgacttggcgcgaccttgtagtgtgccccttgtcttcgccacagaataggcaaaacaacttcttgggctgattaccataccttcccccgccgaagcttctccccctatgcctctaagggctggtgccctgtaggaagtttgttgtatacc

SEQ ID NO: 134166 - DNA, 376 bp, Zea Mays
gtaatggaagcccagggcttccattactagagagagccccggcccccggcgtggctaggtgtgcggggcgcgggtcgacgtggcaggtggtgggtataccgcgcgcaggtaccggcgtttatgcatacgtaatatgaatgaaaaagcttcataaatggtagcgtggggccggggctcgggtggggagacgtgagccgcgcgttatgcttgcgtattttgccgttattggctgcgtaaattcggcgcgggtcgacgtggcagttggtgggactacccacgcatgcatcgattctaggtggggcgattatgcatacggaatttgaatgaaaaagatgcataaatggtaacgagggtacgggggtcgggtgtgtagacg

SEQ ID NO: 134167 - DNA, 438 bp, Zea Mays
cagggcgggtgcagtggggaagacaatgtctggaccgtcgatccgatgatttgtggcctagatctgatgggggtgaggtgttgatctaccgtctgatgcataatcgacggatgtgatcaaatatcgcttacctattcgcttcaagtaattgcagtcgtttattgactgacgtagggctgagatggatacatgttgcatcactgcggtgatcggatcagaaccatagatgtgtgatcgggtgggtaggatgagacacggttataataaaatctaggccattggttttagatcacgtggtctatggcttataccgatttgtcgtgagtgcgatctaatccgggcgcttgaaagatgatctgatggcctagatcacatcataccccttcgccgatcccattttgtaaaagagcccctgatgaattacagaataaacctgcg

SEQ ID NO: 134168 - DNA, 1052 bp, Zea Mays
gtcgagtaacttctgctactatgaatggtccttcccataagggcgataacttgtgtcgtccctcccccgttagaattcggcggaggatgagatctcccactgaaaaggatcgttgtcgcacggccttgtcgtgatagcgtctcagagtctgctggtaccgtgccaattgaattactgcattcagccgctcttcttcgagtacatcaacatcttccagcctagtggcttcggcctctgctatgctttcaaagatcaaccttggcgccccaaacttgagaccagcgggtagtactgcctctgacccatagaccatgaaaaaaggagtgttcccatgcagagctcggctaggtttggttcttaggctccaaaccacgtagggcaattcccttatccactttcctgcgaacttttcatttttatcgaagtccttttttctgagtgcctccaatatcatcccgttagctcgttcaacctgcccgttggctctcgggtgtgctaccgaagcatatttgacctgaatgcttttttgctcgcagaaatcgaagaactctgaagttgtgaagttggatcccaggtcggttatgatactgttcggtattccgaacctgaatattatgtcttgtatgaattccacggctttagctgaggttaaagaagcaatgggtttgaactctatccatttagtgaatttgtcgattgctaccagcacgtgagtgtatcctccttgagctttcttgaaaggtccaatcatatctagcccccagcatgcgaagggccaagtcaccggtatgttctgcagttgctgtgctggtagatgttgttgttttgacaagtattggcaagcttcgcacctccgaactaactcggctgcatcacttttcgctgttggccaatagaatcccgacttgaagaccttcccgactagtgtcttggacgctgcgtgtattccacattgtccagcatgaacctcatccagaagttgcttcccagtagatgagagaatgcatttcatgaagatgcctgatgcgccccttctgtatagtgtctcccca

SEQ ID NO: 134169 - DNA, 691 bp, Zea Mays
gattgagggtgatatgctgaactcaggcgcagctcggtaccagcaagcttaaagagagtggtccaaaactggcttgtaaatactgggtcccggtcagaaatgatggcaatgggaaatccatggagccggtatacatgagacatgaataggtgtgcgacggaagctgctgtataagggtgactgagagggataaagtgactgaacttagtaaatttgtccacaacaactaaaatgcaatcagctgttccagggaagtccctccacaaaatccatagaaatggtatgccacgcggaacgtggaactggcagcggttgcaacttgcctgggtaagccgagcgatcaggtttagcttgaaggcacacttgacactgctcaacaaactattggacagaagacttcaaattcgtccatgcaaatatgcctttcacccgactataagtgactggcacgccagaatgggcccccatagcagaacagtgcaaggctaatccgatggtgaagctgtgcatcggcccccagccaaatgcgtgttttgtagcgtagtagcccatccttcagtgtaaagtgtggcaccgccaacgggtcaatagatagcttagcaagtaggtcttgggcttcaacatcattaaggtaactagactgcacttcggacaaccactttggaaccaccacagaaatagcctgtaattc

SEQ ID NO: 134170 - DNA, 425 bp, Zea Mays
acgggcaggttgagcgagccaacggaatgatattggaagcactcaggaaaaaagtcttcgataagaatgaaaaattcgcaggaaaatggataagggaactgccttatgttgtttggagcctaagaacccaacctagccgagccctgcatgggaacacccctttcttcatggtctatgggtcggaggcagtgctacctgctgatctcaagtttggggcgccaaggttgatcttcgacagcatagcagaagctgaggccacccgactagaggatattgatgtactcgaggaggaacgactaaatgcagtgatccaatcagcacggtaccagcagactctaagacgctatcacgacaagaccgtgcggcaacgattcttctcactaggggatctcgtcctccgccgaattctaacgggggagggacgg

SEQ ID NO: 134171 - DNA, 630 bp, Zea Mays
gcgattgtgataggcgagcggcggggcaaggcggaaccgaggcggagtacctctccggtgagagattcataacgccaccattgtccacagcgccattgcttgccggtaccaactccgccacgctccaacacccaccagcgtgcccgaaatcgaccgaggcaccccaccgttagacgcccgcggcgattctctcgtcaacacaaagctcagcggacactgcaatggcggacggttctagaagaggtggagggttgcggcgcgacttggtttgggtggaggatgatgtgagggatggtttaatacggctgcgcatggtagccaggtagaggggaagtggttgagttagagcatgcggcggcggagaagtcggccgcgcagtgcggactgattcgttttcggttggagatggatctggcttcgggggcccatcggtcagtggcacagaggagcgcacgcgcgcgattcgcggctgacggcagggtcccacacgacagcgatccgcgggaacgcgtgatgcggcgtgagtatggacagcggggcccacaagtcggcgcctggttcatgtagctgggctgtgcggcatggagttaatgggccaaattgggatataaggcccaggtaagctttctc

SEQ ID NO: 134172 - DNA, 804 bp, Zea Mays
agaggctccaaagcctttatggcttcctcaacaacgtggatataagccttgatagcaagctgaaccacgaaataaagcatgtgctttctcctatgattttgagttgtgttacgtgctttccagtcgttgtgaatatttgtgactgtaagcacttagtggacttcgctggacatcaccaaacacatctctagcattatttgcaggtgtagttgttgaacactttgcatcgaacgacaaccacatgtgttgagtgacagtgtcgctaagcaacagtgccacactgatttctaacaagttcatgttttattttaaacatgccaacaccctagacgacatcaaggtcctttcagttaaagagtggtcaaggtcctaaaaaccaatgagaatgatcaaataaaatcgatttcatacgctttgtgtcgaaaatataatgcatattcaaatatgtattcgttctcatttggcattcacaactgcgatatttggcagattttttttttaaaaaaaactagaaatataacactaaaaatccatttaaaaagtatttgaaattatattatactcaaaatcaaattatgcgaggtgtgaagaaaataggaagtccatgttgatgttagattacatattcactcacaggaggagctatatcatgaaaaaaaaactcatcactacacccttgacaatgtatgctgaacttgttacttgctatgagacaacgagaaagattatatggctaaagaaatttatacttgatttaaaagtgatagacaaaactacagaatctactacaataataaaccagcg

SEQ ID NO: 134173 - DNA, 361 bp, Zea Mays
caaaactgagaagggatgtgagcctgtgcactagaggtgcattggaggctcaccggactgtctggtgcactagggaacaggagcccaatgactagttctaggtggcattatggaggagagacaccggactgtccgatgctagaggtcgaactatctggtgtgagaagtcaacatgccaacagttgaattgcaatagtcaaatccaacggctatgcacaccagattgtccagtgtgaacagaaagctgttgtttcttctccaacggctagtttcgagttggggcttatatataccccatccaacctggcatttgaggagtgaggagcacaagaaacatatcccaagcatagaggcacatttc

SEQ ID NO: 134174 - DNA, 380 bp, Zea Mays
atcggtgtcaaccatcaccataatttagtctgaacactgcaaaaaagagagaaaaggagaggtggagaagtggacaagagtacatgcatccgcatccaaagcgacaaagcaggaggtgccccactgccactcgatggaaaacgatgagtcaccatggcccctctcgggataagcctcgacacctgtggtggtctcactcaagctggtacgaacagataaggaatcatctcgtgctttccatccggtttctctcccttgttctctcacacgaacccacgacattgcagagctctactacttgtttgttgagggcaagattcatcgttagcaacaatagaattcagcagaataaccttagtagttagtccttgaactctcgc

SEQ ID NO: 134175 - DNA, 496 bp, Zea Mays
agcactaaaaatccatgtctccataaaacagcatcggtttcacctaatagatttagaaaataggactcctttgagttctgctgctttcttcatatacagatagacctaattgtccctgtagcattaaggtctcccttatatcccttcagtccaaacaaaactatacaaatagacaggcaaatacgagttccattttagtaatgctaagcagagcgtattgcatataagcatgatagacccacatgacatacaggttgcacgttatatatttataaccaagttagacattcaaacatctcaaaagaactactccatgtcgcatggtttataaaatatcacacaattccatgtcggagtactaagccatctcatcttagatggtgatgctaagctaccaattacaaaaaaaaagttttttatgcattatttgctctgtacaacaacaaaaaaatgaatacatctctgaatttgtgtttaaaattgtatccgaatttta

SEQ ID NO: 134176 - DNA, 354 bp, Zea Mays
cccaaggcgaggtgcttggccggatataatctttctctaacagctcatcaatctgcttcttaagctcaaccaactctggtccggatgttcggtaagctctcttaaagatgggggcggtgccaggaagaagctctatagcaaactcaactttccgctctggtggcatacctggtatgtcctttggaaacacatatgggaacttagacacaaccctgatactcttaattgggtctgcttcactgcctttgacagccatctgataacaacttcctttcttcggctcaggcgggactaactcggtcaccacttcctctcctagcggggacaccaacttgattgtcctcttatcacaac

SEQ ID NO: 134177 - DNA, 334 bp, Zea Mays
gaggttttcaaactagcactaaagtggcagaaaaactgctgaaatgcctggcatattctgtaggcaggaccattcatacagcaggttttctggaaactgatgctaagaatatcacgccatgtccatgcattaacatcaggggcgaagccagtctacaggttcgttggtgtcaatatcatttctagctggtgtcattagtactataagagctactttaaaaacttaaatcctctcctctccaaaatttatggatttatgggatcgagtagaaaattagctcattctctccttaattctcgggaattccggtgggaatttaaagtttccaattagc

SEQ ID NO: 134178 - DNA, 574 bp, Zea Mays
ccatccatcaagtagtagtagtgaaaacatgcttgtgaacgctactccctatcagagcatctccagtagttcccagaaacacactcccaatcttggttttatggcaggatggaaagaaagctctccaacaactctgcatcataactcccaatgtctctgcacttgggaaaatagatcgatacatgcgtgaacagcatagaaacagcacaaacgtagagaagcttttcacaaacatgaccaaaaaaagcacaaccaagctcatgacaataatttagcatgtctatcatttggattgatcaatccagattgatcaaagccatggcacaaaattaggaccactaacaccaatgccagttacccaaagggatttccaagctagtgcctcaggacacagaagtaaagacgcattagggaaccagttataagtattggtggaagaataaaagtagtaaataagagtgtggagaagaaataaaatcattctttagaacaaaatgagcaactcatccagttaagcttgggcatcccaaccaaaaacatgaagaatatatgcatcaaatctacccgagtcaag

SEQ ID NO: 134179 - DNA, 383 bp, Zea Mays
aaggtcactgaggtggcgggctccggttaaacggcgaccccccgtgccatcaccggaatccgccgtgtggaaagcttgccagcacatctgaaatccgcacttcttctccaattccggccgttggcctataaattgcgctcgggcttggcttcttctccacattccgcacctcagtgcttaagcaattgactcaattctatcagagaacttgtgcagcccacaatttctccccttccctgttcttgctccgccgcaaggaactctaccgtaatcagcaacctcgggttagtaattcccccaattgctccttgttttagcatgcttatggtttcttatagttctcggaatcggccaattgaagttcggccgaagcctttcaccag

SEQ ID NO: 134180 - DNA, 620 bp, Zea Mays
ccatcccacttaggtcattcttgacataaaaccattgcttcgtccaagagccctaccatttctttcagaaagttggcacaagatacctcgcatcagaacgatgcacaaagttgtaacatccaaagttgttgtgatactgctccttcccagttgccttcgtctggtaggataattcatgaatgttgcagaagcacctggcatctagctccagcccttggcttctcatagcccaaataaaaactccagctttaattaaggcttcgggaataagctaatgaaggtatatctcaaatgtctttagcacttcgaccagcatcttgtgcaagggaaaacgaagtctagccttcataaaacttttaaatactaccgcttcatctacttcaggaagaggaacagtgctttctccaccatccctcactatggatatatcatggaaatatctgcccttcatcgcttcaatttgcccttgtttgatagttgatttcccaaaaacaacatggcttggcctccacggacgatcatcaacatctttgttctcactttcaacatcaaagctcttgttgtcgctggaatcctcagatagtccagctaacatttcatcagtgatgttctcaacgttg

SEQ ID NO: 134181 - DNA, 597 bp, Zea Mays
tttgatggtaagcattgtggcaaagttgaagattaactatagctctacaactttggtacagaggtttgatgaagttcacatgcaaattttagagaaaatgtgacctaaacatgatctgttaggtgctctgatgaggtctcgccttggtacagtagaccaaagtggatcaggttgccagcgcggcttgctcgtcgacggcgacctccctgcgcgaaggttcacgccgccgccgtgattcgtgttcactggcggttggatagctacggcaaagaaaagatctcatggcgaggaagggataggatcgcgtcgtggatattttcgggttgtcgtggcctcgcggtatcccgaccacgtgcatcgacaacgtggccgtgcggccgtcgccgtagtttgcatcctccatcgtgattgtgccacgcttccggtcagtgaccacgtcgccgtgaactatgatcattacccagtgactgtcgtggcttctcatcccgtgaactgccacgaatcatcccgccggtgactcgcttcttctctgaccgccaccgcattcaaccccaaattcccggccaccgctcacttgatctataaattgagcgcgtc

SEQ ID NO: 134182 - DNA, 478 bp, Zea Mays
atagacattaccacataaaggagataatagaggtaacttaacacctgatgcagactggcagccatgatcaccaataacattctagaacagatacacatgacccacaacacacataatagttccaaccataaattagtaagatacagagggatgaggatccaatgattcgaacaccaccaccaggactaccaaataccatgcaacggccaatagtctagcaaaagaacctgcagcacaccatgctctacccccagacaagagcaagggagaattaactttgaacacataatataaaaactagaaccactgataactcaatcaggacgagcggttcattttcccgaagcagctttgatgatggaggccttaagtggcgacactctgcgtcccctgaacttgcttcctttcttccccttcccttgatttgccatctccataattgcgtccatctaatccttgctgagcggtcttgagaaaa

SEQ ID NO: 134183 - DNA, 557 bp, Zea Mays
atttttgcgggggatttttcgcttgtatattacatggctccgcctcgttaaaaacctcaccccccgggaggaaaagagtgtgggctagaataaaattgttgtgggaattacaagggcgagcgggccccgagcagtcaaacaaaaaatttgcggagattatcaatgttccaggaatgctccaattcttcgccggatggcgtcgcgagcctgtatgcgctgggggacgccttcgtcttgacgatgaaagggccctcccacttgggctccagtttgccccgggactctgtccgagcggttcggacgagtacgaggtctccttcgctaaattccctcgggatgattgcgtggtcacgccatgcttttgtttgggcctggtatttgtttagagcctgtaatgcgaagactcggtctccgtcgatcaggtcctttgaagtgggctcgtccacgtcggggacagctgacgggactgtctgtggggacccatgttttatttcttgcggggtcatggcctccgatccatatagaaggcggaaaggggtgaacccagtctccctgca

SEQ ID NO: 134184 - DNA, 328 bp, Zea Mays
cttcgacactgggatggggctcacccccagcggcactagagccgagctcgcctcgtcggcccatgcggcgataagctggaccccaatgcgatgctccgcccaaagatcttctagtgtcttcttcatcgcctccaccgcctaggaacccggagctgcctgcgccgtctaggctacctgcgctgcctggaaccggcgaacccgctcctctagtatctgctccttctcctccagtttcttctccttctcctccgcctcgagctcgtgctcggccagcaacttttcccgcctttcccacatctcctccctccaggcgaggtccttctcctgc

SEQ ID NO: 134185 - DNA, 656 bp, Zea Mays
tagacctttctttgtttgaaagttattggtgagctggtcattaatctttatgttcacgtgacctctttgggtgaaggcctcaatccaatcacaccacttgttcgagaaacctttcatcagcaaagtttgtctaacaaaagactaccgtactttgtcgtaagctttctcaaaatcaatcttaaacactaccccattttgcttcttacgatgtaattcgtgtaaggtctcatgaagaatcacaacaccttccatgatattacgaccgggacggaaagcagtctgggtagggctaataaccttgtgggccactgtcattagcctattcataaccgtcttggtaaaaattttaaactagaggatgtggtgttttgtttccggggctaaaatttaatccttgtcacatcgaatgcttaaatagcaataactagtacaagtattaatataaatacttcaattataaaacatattacactaaacaacgacacattttattttaaaatctaacgttttatttacttaagtaaactttagggccatcctccttgtctcaatacggtcgagttgtcagcctgtcgctatcacgctgagcgctcggctaagtacggacgtacaactggtaagctggagatgctgtcgtttgcatgcgtcgaacaaat

SEQ ID NO: 134186 - DNA, 316 bp, Zea Mays
cggggttagcgttagaacgagtataaatgtaaccagagtgcggaagagaagttcttgcttagagttgctcaatcaattgtggattactttggaactagagagagggaagaggaataatcaaatcgcaaagattgtgatcaacacaaagacacatgcgatttatttctcgaggttcaactctgaagagtttacgtcctcatttaggagtccacaaaggatgtgtctttttcaacccttaccctctctcacacgggcacgaagaccggatgagttttcttcattatcccagggacaccatgtcccgtaaggacctcca

SEQ ID NO: 134187 - DNA, 459 bp, Zea Mays
gccgtcgtggtcaccgaagcgcagcagcaagaagaagaggagcagccgtaggagggccaagaatggtgccgcggtcgccacgaggaggaccagctccatctacaagggcgtgaccaggtgcgtgatcggccaaggttcaatctttctcttcgtcggcgatgtggttgagttctgcgtttgtgatttctgaactcgttggtgcaggcacagggccaccggcaagtacgaggcgcacctgtgggacaagaatgctcggaaccggaccgggacaaagaagggcaggcaaggtggagtatttgtttacttgtcccgtcaatgaacaaattaacgattcatttatttcttatctagtctccgtttgtttgatttctcacgttgtagcaaaatgtgctgacattcttctctgtttcttctcattttctttgtttttttatatttgctctgctacttggacactcg

SEQ ID NO: 134188 - DNA, 393 bp, Zea Mays
tagattttggctcgccagagccgctcctcgtcgggccgccgcgacttcacggtgcccggccagtacagccttccccatgaccaaacccaaacataggatacccctaccccctcaccaaatctcatgccagtcttggtgcaccgaattatcccccactgcggtgggtattgctcgccggagcactatctggtccgcccgagaccctcctccgtcatctaccggccctcggtcccgttctcgcgacccaagctccaacatagtgctcattagattctacccaacagccctagcctgcctagaccgtgttagaacccctcgatccctgacccgcctcgccttcagcgactacgccaccacgggcatgagcggcactgccccagggtggacagagac

SEQ ID NO: 134189 - DNA, 491 bp, Zea Mays
ctgatctcaagtttggggcgccaaggttgatctttgaaaacatagcagaagccgaggctactaggctggaggatgttgatgtactcaaagaagaacggctgaacatggtaattcaatcagcacggtaccaacaaaccctgaggcgctatcacgataagaccatgagacatcgatccttcacagtaggagatctcgtcctccgccgaattctaatgggggaggggcggcacaagttgtcacctctatgggaaggaccattcatagtagcagaagtcactcggccgggatcatatcgtcttactcagatggatggcacggaaattgggaactcatggaacatagaacacctcaggaagttttacccctagctgtattccaaaagctattgggacgacaatgtactctgtaaactgggaaatatgtcatcaataagaagacttcgagagcgctcaaattgttcattgtcaacctgcattcttacttaaactcag

SEQ ID NO: 134190 - DNA, 295 bp, Zea Mays
ccaatcaggccaccgaaacatttaatcatgcatcgctggtacatgacccccgcattctttagtctttacaccaaacaacatcgtcacatagcagtatgagtcaaaaggggtgatgaaggaagttgtgggttggtcggatttcttcatcgtgacctggtgatagcccgagtaggcatcaaggaagcttagaacctcacagctggaggtagaatcgaccacctgatcgatgcaagggagggggaatggatcctttgggcatgccttattcaggtcggtgtaatcgacgcacatcctc

SEQ ID NO: 134191 - DNA, 338 bp, Zea Mays
ggaaaattgagatatttggttaatactcgacctgacttagctttctcagttgggtatgtgagcagattcatggaagaaccacatgaggagcatctcatagctgtgaaacatattctgagattcatagctggaacaagggattggggactcttctatcccaagagaaatggaggcaaagcaaaattgatgggtttcggtgacagtgatcttgctagtgatcaagatgataggaaaagcacaagtggagttcttttcttcttgggggacagtccaattagctggcaatcaacaaagcaaaaggtagtggcattgtcaagttgtgaggctgaaaatatagc

SEQ ID NO: 134192 - DNA, 548 bp, Zea Mays
tcgccgtggactgactggagcagtgccggattcaatgtaaggacttgctccccatgttttcccccttcccaattccatttcgcgcttagtttgcctagcaatcgtgcactgtaggatgaggtgagaactccggccatggcgcagccggctgtgcttgggcgccgccgcacgtggccgatgaagtgggaagatgagtcgtgcgccgtctgatctgaatcgtgaggatgagattggatctagtagtgggcgggtctctggccgttagattaggatcgtgtggatcagggtgcataccagtagggtgatgtggccttctgatctgggccgtaaatcttagagcgggcggttgagttcgcataccggttcggggatgatcgatctgatccggggcgtccagatctaatcctgcggtcgaaatcatccataccccttcgccttggcatttatgctaaagagaccttggcaaacacctgaatcaacccgccgtcccccgtggttgtgctttgagtcttgcggattcctgcgccagtgaccctaccttttctagt

SEQ ID NO: 134193 - DNA, 449 bp, Zea Mays
gacaaaatatactgggcattggtgggccttgtcgtcttttgccttttcttggactaatgctgcactgactgcgctgggcgaggctacaatgtatagtaggagggggagcgctgggtctagacttgttaatgttgccaggtcagatagatattgttttagagactcgaaggcagctgcttgttctatgccccaaacgaagtctttcgcgtcgcataatgttttaaaaaaagggaggcttcactcgacggaccttgagataaatctgtttagtgccgctaatctgcatgttaaccgttggatgtccttggtggattgtggtggtgccatatccatgatggcttgaattttatttggattggcttcgattcctctgtgtgacacgaggtaaccaaggatttttcgttgacgtaccccgaagatgcacttctctgggttcagtcggagtcttg

SEQ ID NO: 134194 - DNA, 590 bp, Zea Mays
cttatgtcaaacccatctgcagatgctgcctcaccaaaaaaaggatcatcagcagcaacatgtgccttggcattgtcttgttgtatgaatacaggggtaccacgttcctctggtggccacttctcctttattgcgggcaataccttgttcacaagataatcacggctaacatctttggttactgatggcagcaccttagtaaccattgtacctgtcggcctattgacactactccttttagctggctccactgtaacgaatgcccaagtaccaatctttcctgaaaatatacagttcccatcactatcaaacctaggcctagcgactgccgtcaaaaacatcaccttctctataaagttcttgctctaggttgttctctcgggtacagtctcatctacagccaagtagtacttctgagttttcttagtgcgataaaaccatttctcatcaatgtgcacaatgttgtacattccattaaaacttggttcatgtggcacactagatggttcgagcattgagagacaaaaccttactctagcctttttgttttcttcattcaatgttggcttgattgcatttgagtgacagtc

SEQ ID NO: 134195 - DNA, 570 bp, Zea Mays
ggcgaccaccgtgctccggcgatcttctgtgcttgcgcctgctctttctctggtgagcagccctgtttccccctgcatctcttcttctcctctctgtctgtctctgcagtaagcactcctttccacccctttgtgcccaactcaatttcctatccaattctgtgaatccatgtggtgtgaaatgttgctctgtgcccattgtgtatccctgcaggtttctagctccttagggagggtttcacagcctctaatagccatttcaccgaaaccctagaactccgcacgtcacgtgttcggtgaaatgcccaaaccagccaaaaatgctccatttgaacccaaatttttcaggcaccttcacaatacctccagtaacatattcaccaaatttcacgccaatccgatattccaggctttaatttcaccaaattccccgtttcgagcgatcgtttccgagccgagtgccctaatttcattttctttgcctaaattcaaaccaagcacacacttcactcatattcacccatataaacctattcgtgaagtatcgactcaattccacgtcatttcatg

SEQ ID NO: 134196 - DNA, 422 bp, Zea Mays
tgatgttgctgccaccatccaccagcaccttctttacccgtatttctcggatcacaggattgatgagtagcggatatttgccagggtgatcgaagttaagccactgatcaactcggctgaaggatattgtgtgttccgaccatcggtaaggagtcggagcactgttcgtggccactagaacttaccgatcattaagcttttgttgcctcctgctttcttgtgctccgtggcctccaactatgacgttgacctccctatcaacacgcgggaaagcttcgcctctccccccttcctactgctcatgctgcctacgttcattaggatctcctcgaggcaggggaggtggtagtagctagaatggtcggccgtgcctaacggagtttttgaactctctgcagttccgtagggtgtgccgcatgtcc

SEQ ID NO: 134197 - DNA, 293 bp, Zea Mays
ttacaatttttaaccagacatccttcgctttttcctggttgtagatccctcagcacacccaatcaattcggatttcttgaatgcgcgtcgtcgtcatcataaacaagcacacggctcacaaacaagcaacgaaacttaacaattgttctacttctctcttcacttcgtctggtttatttgcctatcaggtctttgattgtcaaatctcttgcctgcacaagcttggtttccaaggtaccaacaggcttcagttccagatcactgtatatataatcagttacgttttttttctc

SEQ ID NO: 134198 - DNA, 413 bp, Zea Mays
ggaaaagtttgaacccaaccctaagtcgtttgacacgacttgacacggcttttgtctcggtgtggacagctcggacagagccaacttctcacccccatatctctcaaccccgaccatatctttgcttggaactcacatggaaaagataggatttggtgcagagaagagaccgtacacgggatttttgctgcgatctgcacgctaaggcgaccaaacaggtcgttgaacactggcagaagtaaaccaccacgtgttcgacgtgggcagacactcaggaacgtgacagagcacgcccgcaagcgcacccccacgcgcgccctcggccacccccgtgcccacgcctgtaccgtgcctgcgagcggctataaagcccaccctcgtgcacgaccatcttccccgttgcctccttcgcg

SEQ ID NO: 134199 - DNA, 390 bp, Zea Mays
gggatagcagagtgctcttatgtagcttctcaggtttattttctttcctgtatacagttcaaaaccatatttcaggttatgctttgattgaccttttagttgacccgaattattgatttgtgagttgtgtttctctcgtcttgtggttgaaggccacagagttgcatttctttgcatccaaagtgcggttaggttagggcgatgtgttaaacgagtttgagaggtcaggttcttgttatgaattgaagttgccttgcatggtctgcagcatgattcatcagccattcacacatgctttccgcttaagtatatcccagtaagattagtttgtttgttcttgcctttcatctagaactacaggttcatcttgcttggccactcatgtcttcc

SEQ ID NO: 134200 - DNA, 308 bp, Zea Mays
gaggcttttactcatgctcgagatttgattcttcggttgcaaaatgagtttcctaaaaatgccatgagagctatacacaatgacaatgtcatagaattcaaaaatactcaatttgcaacattttgtgcttctttggaactcgagcatcggttttcctctccgtatgtgccccagcagaatggtattgttgaacacaaaaatcggacccttattgagatggcctggacgatgcttgatgagcataggactgctaggcgtttttgggccaaagcaataacactgcttgcatgtgtccaatcgcatctttc

SEQ ID NO: 134201 - DNA, 441 bp, Zea Mays
atttgtccttttcattatcgttaccccttcgcaagacttgaagtcacatcatatgctgtttttgccatcagctggcgcacctggtatcagtagtgttttggtttttggtttgctggtcccgagaaggaacaccactgcattcaagcaggaggttgccagcagtaaggctggctttttttgagagaatagtacatatgtgataagtggatgttcaaacacataaatatatgtttgatttagttagtgagagttgttttagattgtttggaccacgttcatcaagggctagcgaattcatgacaactttcactaggttcaattcacatgacattggcttcacgcgcgacgacacccatcggtattgttgaaggttgatatcaccaaaacttgactcgatggcattgaccattcctacttgaggtgctggagcacgtgtgctca

SEQ ID NO: 134202 - DNA, 505 bp, Zea Mays
acgcacttcaggtcttcagcaaataaatagaagtatagaagccgctttgggtcatgtataccaaacaatttcactaccgcctgtcgcgttcgaagaacgggaatatgttactctgatctttagaaaaacaaggatgcaaccgttcacacacacacacgcgtactttgatagttcgaaatgcaaagtcacacatgaccttgctttgcagctcattgttgctgcttccacattatttgctttctgtttggccggccggttgctttgcagctgtgactgtgacagctctcgatcgcatctgttcttctcgatcggagatctacgtcgagctaagcatgtcttaatggcttaatgcctccaggtgatccgatccatttgctgccaactgctttgacgggtttccgttctgtgtgtacaagaaaagctaagtgcgcacgtacgcccattgtacatactaactaatataaagtggtttgtaggtaattagcccgtcttaatttttttttgg

SEQ ID NO: 134203 - DNA, 516 bp, Zea Mays
agcgtgagcatgtcgcaccgacttaagtcgtcgccgacttaagccgattgctccgttagtagggtatagtggtcaccctaagtcgagtaagcgtgagcatgtcgcaccgacttaagtcgtcgccgacttaagccgattgctccattagtagggtatagtggtcaccctaagtcgagtaagcgtgagcatgtcgcaccgacttaagtcgtcaccgacttaagccgattgctccgttagtagggtatagtggtcaccctaagtcgagtaagtgtgatgatttcaagtccaatccaatagaagtcagttgtaagtcaagagtctgaatgcctttgaaaacgaaaactttattgatgatgaagtccccatattacagagtaccatgtttcttcgaaaatttttgaggcctcgctagggatagaactttctaaggtgctctatgttccatgagttccccacttccgtgccatccatttgagtaagccggtatgatcctagttgagtgacctctgatacgat

SEQ ID NO: 134204 - DNA, 452 bp, Zea Mays
gcaggagagggaactccactactttcaccactggcgatgaactgccgactgtttttccgagtcaaaggaatctcattttcttcctcctcatcatccacattggcaacacaagcagcacccacattgggatcaacagcggattgggcacacccattggggtcagcgtcagtaaatccagtcgcaggcacttcttcagcagcaggaaccgaggtaccagcgtcctgatcaaaactggatactcgccggaggcgtcttcttttcttcttctgctcatcagcagaaggatcaggctgattggctcggcaagggcgcctcaggcgagtgctgacaggcttctgaacatccaaagtcgtatcagcctctgggaggggcgccactaccaacgtcccagcaggagcagcgtcggatgaatcctcagctagcaaatcaagcatagcgcttatctctgcatc

SEQ ID NO: 134205 - DNA, 409 bp, Zea Mays
acaatagtgggtgattaggagagcataggtatccaactacttattatgtaggatataagagatggataggttagggcaagaatagccaggggtaagaaagtttatggtgaggaagaactccgtgttgggtggtaatgcatctgaagattgagtttgacttctctcctttcttaacgaggttgatcttttcttttccggccttggtctcatttatttgaggttagtgtatatcattggggttgaggactatggttaagatatggatgagatagactacatgatgcaggtcataagtttgtttgatgttaggtggggataacagattatacaattcatcatgactctattggttgggttagctcttctactcacggttgagttggtttaatgcactaattttaggtttaag

SEQ ID NO: 134206 - DNA, 342 bp, Zea Mays
gaaaaaggttgagaggaaaaggtcatgccaacttcggaggcaaagcatggtggggcatcaagttggcaagcgcaacaaatatggtgagtcgctagcttatataaagaccaaggcatggaagtcgaggggccacaacttctctcgctcattgccagtgggcgttcacacataaaattccattttcaactatgcacaatgtatttcggtttaaccattttcgataacaaactcaaaagaaggtgttttcggatattcggtggaagtcctctttgtcccaatttgtcgcggtttgagctcgttatggaaaatgaactaaccccgcgaggggttactggatagaag

SEQ ID NO: 134207 - DNA, 592 bp, Zea Mays
gtatttacccatccggggaccatgaatttgtcactggcgcctcatcggcgccgcgacaccgcgccatgccgtgggtagggcattccgccgcacgttttccagagaacacaggttcagtaggttcgccgttctttgaatttcgattagcaccagttgatttggggatttggggccctgtctccgtcgagcgaggtgcgccggcgtgttgctccgccgcggggtgctgttcgccccgtttagccgcgttgggttagagaagacgactccggggcgctggattcgcatctgacggcttagattagattggagataacgcttgggcacatgcgatctcggccgcccatctagatcgaacgactgacattagatcgtggtgtggtgagctccctgccctggattttagatccaacggccgaaatctagagttaaccccttcagccgaacagttttgcaaaagagtcctcggggttctgtgaaatagaacccgcagtcctggcggcagagatctgagtcttagagacttttacacaagaccccctgtgttcctgtttaaatgaggcccagtccagtgcggtttgaaattgattaaatg

SEQ ID NO: 134208 - DNA, 438 bp, Zea Mays
atcgtgagtatcagacattggtatctgtttatatctcaccagtatctcaatttcatccaaagcatgaaccaccctattattccatacaataagagctgggatgtttatggattgtcccagccttccgatgcgatcaacctagattccattccaacaacgtgtgttgatggttgcattcagacgagaaatcgcatgaaatgcctacataattcaaactctccagtagggacaaattgatgtcgcaaacaaacagtcgcgacccagcgaaatcaaacgcattcacgtaaatcgaatcgcttccgcactatcacgacgcagcacatcccccctaactcccaaacggatcttgtagccgaccgcatcagcgcttgaaagcattacttgggctaaatagaaacatgatgtcacttgaaaacattctcttttatagaagacttc

SEQ ID NO: 134209 - DNA, 612 bp, Zea Mays
caacttcgtcaaaggaaggtaggtgtgctactgcctagaacagggagtaaatgtggctcaaaaatgcattgtcaggcgacttcgaaaggaaaattcagattgaacagcgccctgacgaagaacgcaggtacagtgtacccgtcgccggtgaactcgcgccaagatccaagttttgcctgggagattcgtgctcggtgaagaatggataacactggggatgggtgaaaagatctggggcgggatgaattgcgattgctagctggtccggccgtcctatccacttgccgcacggtcggccgagcttaccatcaccggagctcgccgtttcactcaaccgtgccacgccgcaaagcattctccacgtcgtaaggatcgtggaggatagtcagttacccctcctgcatcgttttctcctcgcgcgccacgatgcatagatcactgtgaaatatccaggtcgccgtgagctgatccccaatccaaatttgtgataagttcgaccgaggcctttaaattgaaggtgcccccagttttgtctttgtgttacgcgcccaacccactctcagccagctcgtttcattccccgtagcctgcagtcaccaggttttccccaaa

SEQ ID NO: 134210 - DNA, 738 bp, Zea Mays
ctcaagttgtcatcaataaccaaagttcagccgttatggtgaattgttttaattcaccatcttataagtatataaaattcaaaagaaaaatgagtgttcatgttagattgagaaggaaatcaaatgttggagagtattccaaactgcaagcccacaaggaggaacgagaagcctgacaaactccaccacggtcgattcatatccgagcaccacaccgcaactccctcatagcaactttggtgatcatgccagaggaacctatcggcgagctcagttcacgctgagtatcacgataaacataacaaaacaacacggtgagaacaaaaacatgtcgatgcaaagagcaaaaagaaacacgcaaaaggaattgaagagatcgtcacgaagcggaaataagaacagcaggttatgagaccaggggcaggggaacgatagagttggttccattggagcaaatcgtctagccgtcgccacataaattgtttttggaagaggaagaaacggaagtgccctagaggacaccggcggcggtggaggatcggagggagaggacgactgcacgagcggcctccttttaaaagcgcgagcgacggatcacggttgggtggaccttgcgtttcggctgcaactcaacagcctgctcgtttcagttgaattattgggtcgttatgcatcagcccaaagaaaggatagctttcatgcagctgctgggctgggccgggccgatacaagatcaag

SEQ ID NO: 134211 - DNA, 508 bp, Zea Mays
gggtgatagtgcgcttcttagattgtaatgtcacacataatatattgtacgagagacttatctaatatgccagcgttatgtaaaacaaaagagcggtgtggcggtgccgcggtgtgtacgaccataagctgttcatgttagagctgtaataaggctgtaggggtttgtctccatctccaggtgcagtttctaagagagaaaaaatgctactgcatcgtttcctttgcaatgaccgaatgacgtggagtggagacgaagaaactgcagaaagtgaagcgcaggcgactgtgcataaagaagtaaacttgctgggaagatgcctccagactccagagcggagacagacaataaccaaaaccaactggaaacatgccgtgctgccatagcaatcgccatcgccatcgccagcctcagccgagctgtttgcaggaatgcaatggcggagcgctcagctcttcctctttgttagcacgttaacagggaggagcttcgcgatctgggattggcg

SEQ ID NO: 134212 - DNA, 397 bp, Zea Mays
gtgtactactaacgctgaagctgtgtatagatccagacctcggtgaggctgcctcccgagaattgttgacaaccttttcagatacactggtatccaacctcaacaaatcaagcctgcatccaaggcggggggccaggtaccaaggaggagtcaacaatgtcgcacacagcagaaacaagttgaaaatagataagtgctaatactgcttaaatagtactcttgagtaccttacaaaaaagcgaaagtattacatctgttttcaagtggagccctagttccatctctactctgcaggaatgaactacctccacacaagtagggccgcgggatagctagctccgagcggctcgccagcggaggcgaccacctcagcaccgacagcggcagccacttctgc

SEQ ID NO: 134213 - DNA, 948 bp, Zea Mays
gatgggtccacctttcatctttgatagtagtagtgcgtgccaactagcaactggggggtcttaattcgacaagttgctactagtacgtacagtactgattctgctagtaggctctagtgatgttgtcatccggtgggggccgccgagctacggcttgtgtctgttgccagttgccagccagccacgagtgtttggtggtttaatcatacagcgggttgtggcggctcttgcttctttttctttgttttttttttttgccatcgattcatccatctatgctctctttgggcgagtgatccaacaccaactgcaacgccatccgcctttggatccaacaccactccaggtccagggtgggctgctccgtgtcccccgtcatcagtggacgtcacctgacctctgcttgttggatcggagcgtgcacgtagggagggagagagactgacggtcgagtgggacggcggcggcgcacttgcggtggacgcagtacgcgcagtgggccggcaaggctgcaaatggagggttgacccgagtggcaacggtgttgcaaggcgtcgggagatactgtacctcacctcctggctaggggctggccgctggcgcttgccagtgcccccgatccgaccaatcgattcgctggtgcgcgtcatgtgaagcgcgatcttggtacggtagaggaggaggagtagtagtacgactgctacagtgccttttctctttgcgtggacaactggacaccggacagcagcggctttttctttcttgtcccccttgccgggccaccggaacgcatcattgatccatcgccagcttagctgacgacacatgctgcatgccgctgaacgggaacgggaacgggaatgggaactggaacgtgccgctgccgcccgggacatcgggcatgcatgatgcgtgtccagtatcggcggcctttccagctgacgcggg

SEQ ID NO: 134214 - DNA, 483 bp, Zea Mays
tgtccttgccttttttgtaaacaattttgaaatgaagccccatcaacttagccatagccttcctctgcatatcagattgcaaaagttgatcatccagaaaactcaaagcctgatgatcagtattaatcacaaattcagccctctgcaaatattgcctccacctgtccactgcaatgattagagccaaaaactctttttcataaatggagagcatcttattcttagcacccaatgctttacttagatatgccactggtctatcacattgcatcaaaacagcacatatcccatcatcacaagcatcagtctccacaacaaataactcatcaaacctaggtagggccaacacaggagtagtaagcatagccttcttcaacgcttgaaaagcctgatcagcctcaggactccactgaaaagccttatgcttcaacagattagtaaggggttttgcaataatcccataatgtctcacaaatctcctgt

SEQ ID NO: 134215 - DNA, 675 bp, Zea Mays
ttacaagaaccatagcccatctgcccattagggttgaaaatatttcctgctaacacgatccaaagaaaaactagacgataggtgctgaaaatcttatgagcatctgatcggacatttggacagttttgttctgtctacagatgcttggaatgctattagctacagtagttacatatgcaagctcaccaagacccccagcaagccgccgactccgagcccaggtccccaggaaccaggcccaccgagcggcgggccccagcctgcacggcctcctccaggtgggcctcaacttgggcctcccggtccatgaggacccaatattgaccgcccacgaagacaggaaccctccacagacacagctgcaacaaaaagaatttgaacgtatggactgatgtgatgcagacaagcagtgctagcctaggcggaggatgattttttttttatatacctgaccggcgatcaagattcaggactggcagctgcgcatgcacctgcccgttcaatggcacctccatctcatcttctggtctctgcctcaacaactgttcttcaattactactgcattctaggggaagactcttgcgctctcttaagcttggttcagtacatgactaattgtgcctcagctgtcgccggcattgtgaattttttaatctacaaaaacatggtgctgt

SEQ ID NO: 134216 - DNA, 363 bp, Zea Mays
tataattcccaagtatctcattgcacatggtctcaatcatgtctagccattctttgcaaggcttcttgaattgtttttcaaacttaaaacggtaagcaagtcgaacaagttcatgcttcttccccacttctttcctctttggcattccccagccacttgacgtcggatatgttctgtttgacaagtattcttgcaccaagtccctagtactgatctgctcggctaccactctaaattctacttcagccaactgacagggtgaccccagttgcatattgcataagagcctggtcattccgaagctcaaagtcagtggactcataaccatggtcatcagcttctccctctttttctcgtcagcct

SEQ ID NO: 134217 - DNA, 415 bp, Zea Mays
ggcattgcgcaggacatttccactaatggacgtaggtgactgcagttccagtccctttctgaaaaggagtattagtttagaagtacctgatggatggttttgatgctgctccttgatttacctgtgcagctttgagcagttctgtattaactttgcaaatgaaaaacttcagtaacactttaatgagttatgcattgtatttttctataggattcatatgtcattttcatttacttctcttgatactgggatctataaatgccttctcacagcatgtattcaagatggaataggagaagtacaaaagtgaggaaatggattggagctacattgagttcattgacaatcaggatatgctggatctgattgaaaaggttgtttctttacctttattcattggcctatgctaagtaca

SEQ ID NO: 134218 - DNA, 451 bp, Zea Mays
atcttcaccaaggggttgtagtcgagtgtcttcgccgactttcgatccagtctcaacatttgtactggatagagttgagactgtgggggtaatggcttggcccaattacacaacttatatatatgcactcccaacccagttagggttagggtttcattctccgacaaatacaaagagttagatcagctcacatttttaggcaaaagtcggtaacttggagtgcaccgctgacaatttgatagatcaagctctgatattggtttgcataagttatacttctctttgctagggaatgtactagcttcatgagctgctccttccttagaattgaaggtcaatactctttcagaatttttgctttccttgtatctctctttctcaggatcgctatccccctcgttctccttgtatctctctttttccacaggtctaaccatccgcgatgtttgcc

SEQ ID NO: 134219 - DNA, 957 bp, Zea Mays
atcaagtactccattcagagtggcagaaaaatgctatgaccaacttatggggttgcagtttcgaatggtgtatagagaagggaaggagaatgttgctgctgatgcactttctcaggtaggccatgcgatggtgatgcatgctgtgacagaagtgcaacctgtttggctacatgatgtgttgaactcttatatcacttatatggaggctcaagacttattggctcagctggctgttcatagtcctagtgagtaggggttttctttgcaaaatggtctcattcgaaaggatggtttaatatggattgcaaataatttagccttaaggacaaagctcatttcagctctgcatgatggggctgtgggtagtcattcggacagtttagccacttatcatcgtgtcaggcgtttgttttggtggaagggcttgaaagctgatgtggtggagtatgtgaaacaatgtgacatttgtcaaagggctaaagctgaaaggatacattctcctggtttgctgcaacctatgcccattccatagggagcttggcaagatcttgcaatggattttatagaaggtcttccaaagtccgaagggtatgacacaattttggtggtggttgatcagtacactaagtatgcccatttttttcactaaagcatcctttttcagcttctatggttgccaaagtgtttttggataatgtgattcgtcttcatgggactccaagatctgtggtctcggatagagataagatatttactagccatttttggaagtctgtttcaggttttaaacaccaagctagctcttactacaatatatcatccctagtccgatggacagttagagcgggttaatcaatgtttggagatgtatttgtgctgtgctattttggacagtcctaaacagtggaaaacttggttaccattggctgaattttggtacaactcttcatatcacac

SEQ ID NO: 134220 - DNA, 284 bp, Zea Mays
cctgttatatacaacagctaggattgggagttactaagtactacagcagcattcattatcattgatcagtattcatgggtggagctaaactgaaatgggtttctcgagaacgtcggttgagctaacgcacgcaagaacaaatagagagaaatttcattgccgttactaattaacgctgtccaaagggcagtcccaacgttagaaagaatattaattgagtgccaccaattctgtgtactgcaaagactaaactaatcttgttaaatggaatagagttcaggaac

SEQ ID NO: 134221 - DNA, 319 bp, Zea Mays
ttctacttcaatagcagaagacgttgcaggagtatcttcttcttgcaccaacgtttttggttctggagttgcagttttcctctttcttgcagtggccaccttcggctcagggttcaatttttcagggctaagtttttcagaatcttcccttttctttttggctaccttgacgaactcttcgtcaacagcgctggcaattctttttcgcttcgggcctccagcatccccgctcagtcgaccataatcagcatattcaaatcctatagcatcaagcaccctgttcaaccttcgcttcggccgagtgccgaaggctgctgtc

SEQ ID NO: 134222 - DNA, 725 bp, Zea Mays
ggctgaggggttagccatacgcccgagcccctaggggaggggatgccatatcgtagttgttgtaacggggcttcagtatgggtaaaagcctgcttacgggatgcgtcagtgtccctgtggtgggtgacgttgggattcctttgctcctttgggggcttttattttgtaccgtcgttggtgtgataggttcaatttgatctttggccgatctgttggaaccttcagcgtggtttgcgagggcagcccctgagcctttgcgtggagcaaaaggacggtcaagaggtgccttgacttttgatttgtacgccccttcgtcgcctctccgtgaggaggaacacgtcatgctaccctcgatgggcgacaagcatgatgtttccattgagcttttatcaggtaatccaagcgggggtccgagctcctttcaataagagtgggctagtagtccagagacatgccctaaaaagtacctgcgggtgattcacctggtaccgaacccgtttgatggggttcgagggctcaatgcctcactacaatgggatatcgtcatgaatagctcctgggggtctcggatatgtctcagggtaccttgggtcacaacccgagctagggtcatgtacaggcgtacccacagtcatccctgactctatgttctgaggcggttatgaagcccttctgaggagccaacctttgacaccctaatcagtaatgggctcggagccctggcg

SEQ ID NO: 134223 - DNA, 616 bp, Zea Mays
ttcttgtctttatgcactcggttgcaaactcttctccaccaatcagcaaatgcgatatcctctacaccaggggagatgtgaccaagaccaaaaggagataggaggttataccaaaattgtcgagcaaagacacacgtagtcataaagagggcaagctttcggatgtgggaggcctctttttgccaaagtatcagctgtctaacatttattcctcatagctagccatagaaaggtcttacatttaggaggggcccaacttttcatagcctcttccatggctgaaaaaggatggattctgtgaatagaaccttgtagcaggatttagatgaaaaccgcccagtagcctcatgcctccacacatgttgatcatcatcctgtcaacacaacctctcccaaagaatcccagagaagaaggtattgttacatccctagaaaagaaaggggggggggggggataatgtccctcacccaccttctgttgtcaagatcttgagccaccgttctagaggaaagggtcttcttatcaactttagcagccacctcaggagcaatgtcctgaatacaacagtcattcagccatctatcagaccagaacaacgtgttgtttccgttaccc

SEQ ID NO: 134224 - DNA, 274 bp, Zea Mays
atcagtctgagggtgataagccgtactaaagttcaactttgtattcatattctcatggaagcttctccagaatcttgaggtaaactgtgaacctcgatcagacacgatcttctttggtaatccgtgtaaacacacgacccgagccatatataactctgccagctgagagcctttataagtagtcttgaccggaatgaaatgagccactttagtcaatctatccaaaatcacccatatagcatcacatcctttttgggtgcgaggcaatccagta

SEQ ID NO: 134225 - DNA, 281 bp, Zea Mays
gaatgccatacgtcacaatgtgtgctaacactggcttaagctctcctacactaggaagtcaaatgtgaacaccgaccaacccgatgtgggacgtgatggaacataatgacaggatttgggatggctcgagcatggctacaatacccgaacgaaagaggtagatgtcatccacgacgttgcttgactaacaggtaacctgatggaccacagattacacgacatcaccctaccctcatttgctctgccaaacctcggactcttgtaacagagcccactcccac

SEQ ID NO: 134226 - DNA, 336 bp, Zea Mays
tagacgacattgaatcagcacacgtacaatagcaaacaggcactgcagcatatgaccatcaatcacataacaacgatagcgacatgaaaggtgaaaggggcaatttccctcagcacatgtacaatgcaaagaagcttttgtggtccatttccctgtgggtaattaacaggcactaaccaacaaaattttaccaaattctaggaacactcattaaactgcacttttgacaacgcaagaaatcacttttgacagccaatcagcatacaaaatgaattgtgccactcacggaaagcaactggaatcctatggttgtacacgggcgcaaacagaatcaac

SEQ ID NO: 134227 - DNA, 397 bp, Zea Mays
cgacaaggtagtgtttcttggatttgttgtatcaggacaaggtgtggaggtagatgaagaaaagatcaaagttgtacgcgactggatgcctccatagaatgtgagccaagtgagaagcttccttgggctcactgggttttaccggcggtttgtaaaagacgtcagtactattgctactcccattaatgaattgaccaaaaaagaagtacctttcaaatggggagaagcacaacagaaggcatttgaagaattgaagacaaagttaacaacaaccccagttcttgcactcctagacttcgataagacatttgaaatagaatgtgatgccaatggaattgggatcagaggcgtgctcatgcaagaacgaagaccaattgcctacttatgtgaaaagcta

SEQ ID NO: 134228 - DNA, 442 bp, Zea Mays
caattacatagaataatgaagaattatcacaacaatagctatctggccaactctgtataaaaacatactccctcggtttttagttaacatttttagtgtaagagcattagccagcgtcaaataaaaaataagaggtagtactattttctgggcggtcgtccattcaacaaggtacaaaatgcagtgaatttattaactaattatatttgtttgttaaacccctttccatgttgtactccctaacacatatgctctcaagctttgtggcctacaacaatggtatttactgcgatagaagccatgccccagattttttcgcaacctgcactgctattttttctatgtgaagtttttttatcaaacattgttgtcgatgtcataacagatgagttatacatatctccaaagttgctactacacattactcacccttccttatttt

SEQ ID NO: 134229 - DNA, 529 bp, Zea Mays
gcctagctaaggggatcgctggggtcttcgccatgtgccgcagtcgtgctgttgaggaggctgtgcacaaacaccaaacctaggcgcttcatgatgacatgcgaagcttcatagcttccatgggccaccccatgcctcagcgccctactcctcctccaactcctgcctaccccgagactctcaatgaatggaaccaacaggagtatggtgtgcccttcataactcctaaggatgaagctgaggagtttgattactcatttttgcagtctgctcctgacgctactccaggacctatccctggtgaccctaggccttcaggctatggtcaccttcctcctccaccttattttcagggtccttaatctttgcccacttttccttcatctgacaaccctccacagggctcttcatatgaagaagagatggttcactcattctttgtcgtgtatcctccctatcctccctatcctcctcctctgggtccctatggtggtagtgaccctggtggctattgagtcttgcgcatctc

SEQ ID NO: 134230 - DNA, 451 bp, Zea Mays
tcacgggccaccgctcaagggccctataaattgagcacagcctcggctctgctaagtattcaagcatccaatccacccgctcgtgcctccaattactcaccagagagccccaatttgggatttccccccaaatcggtccgaaacaccgcgcatagtgacctcgtcgtggctaactcgttccaggtccgttcatgctctctgctctcccgttttagtgtccttagattctcttgatgctcctcgacccattcaattaagctaaaccgcgctagatcgtcgggaacacccgtgttcatccttagttcatgctgtctccgtgaacagggtgatttaaagctcagatcgtgcaattgatcgaggggaaatggttattaagggttcaattcggtgtcaaccgcacgggagcaccggtagtggagttatccggccggtacaggctcgcccgagctca

SEQ ID NO: 134231 - DNA, 611 bp, Zea Mays
atgaagggcgtctggagcgcgtcggtggggaagaagatggtggagagggggggcgccaagcccagtgccaccggcggtggggagatgaagtgcgtcgggtgccgccgacggtggggagcttggaggggcgtcggggcacacgagtacaggatttgggtttgaggaattttggatggagaggggtcgcggggcctacttgcaggtcacggtaacggcatcagagtcacggaaacgatggccaagcagtgttctgatgtttttttacgcgtgggagggtagaaacgaggagttcctcagactaggggcaaaactgagcacctggtcacaactaaggtcacccatgtaaaaacccctagaatatattcgctaatttcttttttatttgtcgcgttttagtaaaaataactaacgaacatcgaatttgtgtgccttcgcaacgcacgagtattatactaatcagtgtatatatcacgactgagaaaaatccacatgtcaactctactactagtggtttagatggacgtcattcacatttgggcagtcagatatacgcaaggatctcagggtagtacatttcaacaaacacaacacatcctgatcctgcagcttgc

SEQ ID NO: 134232 - DNA, 556 bp, Zea Mays
ataatctagaagattaaattgttatattgggtgaattgtactctttttcctttatgtgagttttcatgaaagtttctcactaaggttttgatgaggcaattcatgcgacacaacaagcgtgagctatgtactctttctccaattttttcccactgggtttttatggagttttggaacatatgcatctcgcggcattgggccaagggggagtgttaagaaacctttcttgggccaggaaggcccatgtggcccatatgcctgaaaccctagttttgtctataaatagagaggagatccccatatcatgtaacctttgagagcagcaccatatagtaacaaagaatcagttcctctctacactcttgtctccttgtgttctactattattcagttaagcagcccttggactacactcggtagcaatgggttcttaacaatctcaatacagttttgcgtggagcgcgtgactgcgggcagccttaagcacggcagggctcgctgtccacccaaacctccgccggactcgcgggcccgacgcccaagaagcggtgccgat

SEQ ID NO: 134233 - DNA, 464 bp, Zea Mays
ggaagatatgttgcgtgcttgtgttttgtcttggaagggtagctgggaagatcatcttgcattggcagagtttgcttataacaacagctaccaggctagcatcaagatggcaccatttgaggctttatatgacaggcggtgtatgtcccctctgtgatgggagactttgggagagagatccctggttggtcctgattgggttcagcagacttctgagaaggttcgggaaattcgtcagaatattttggccgctcaaagtcattagaagagttatgctgatgtgaggaggcgggatttggaatttgcagtgggtgaccaagtccttctcagggtatcacccactaaaggagttgttcggttcggtgtctccggtaagcttagcccgagatatattggactgttcactatcttggcttgggtgggcaactttgcttatctcttgcaattgccagattccatggcag

SEQ ID NO: 134234 - DNA, 407 bp, Zea Mays
ctgtagtactgaataactgcagaatgtggaaacgttcataaagatttggttgggtcaatctacagctgttggtaggacaaaacaagaaaaacagattacaagcgagctttaggagaaataggacataagtagctcggtagggcagcaagtacatcttctgcgacgtcttgaaacagcgtgtgtgatacagtatattcattcaggaatacgacagtggcattgcagttgcaggtgtacggggctacaggcacagacctcgtcccggtccgcgggttggggcatttgatcgggataaaattgtccttcatgatcaggcttaaatcttctacttattttgtctttatgaattacagtaagttttaaaccagccacagcgaacacgctgatgcatgactgtaaaaatccgt

SEQ ID NO: 134235 - DNA, 352 bp, Zea Mays
gccgtttggcatcttttctcgtgggttcaatttggaatgtgcaaagtagctagtggtcaggagcaggaggttccattcctcagcacaaggaaaactcatgaaggccgcagaagtgaaagagtactgcagcatatatcttcagtaaggacatgtggccgagcaagagcagtttacatgtctaggctgtggatccatcttgaggactcggaactctccttaagaacagcagtattgtcatgccttggagtttctcctcttctctgaacttgaagaaagaacaatgcatgattcaaacagatcagaagttggctgctgccagtgggcgcatgtggctgatctgagattagcgctg

SEQ ID NO: 134236 - DNA, 339 bp, Zea Mays
cgaaaggcaagaaaatggaggttctgacccaccggcctcgatatattgaaccgaccatagtgcctgaatttggtgaagggacctcttcaagtgccgaagcaaaacaagctgcttccatcgtgcagagcactgaagagtatattgtaatgccgaaggtgcctacagtcgggctgcccaaagctaaggatgatacggtcgaagaaccaaaggtggaagaaacagtaaaaatgccagaaatcctgagcccaccggcagaggcaaatttgctgaagatgcaaaaagctcctgccgcaactcccaagaggaggaggatggccagcgtgctagacgctgttatgg

SEQ ID NO: 134237 - DNA, 1454 bp, Zea Mays
gatagtttgtttggttctgtgtctgagtgttttgtgtctgatggtgaatctaggagttcgtttccttggatggaggagtcctcggatgaaggcttggattattttgttgcgttggatggggctgcggcggagacttcgccgcgtgtggagggtgccggggatcttcctagtgcgagtactgggtgtaggcggtgaagggtggtgggaaaacatagtgtgggtgaattttcgcgaagtggcaggcggcgtcatatgggtatggagcgtggctgtcttcgagtagaccgggttggtaaaggagaattgttgtcctcgccgattggggcgagcataggcgagggggatcttcggaagctttttgagggtgaggaattgaggataatgttgtttaattatagggagatgggtatcatctcgaaggttgagccgatgtaatatgtgatgccctcgtcgtgtgtatgtaattgtaatttgtatggtaatgtggcatgtttgccgtattcgtacgcctgtgttggtccggctgcgcccgtgggcgaatttgcgcggagtgtctttttaatgagagacttcgattaacgcgcttggtgttctattccggctgcacccttaggtgacttttgcacggagtgtcttttaaataaaagacttcgattaacgcacttgttgtgctattccggctgcacccttaggcaacttttgcgcggagtgtcttttaaataaaagacttcgattaacgcacttgttgtgctactccgactgcactcttaggcgacttttgtgcggagtgtcttttaaataaaagacttcgattaacgcacttgttgtgctattccggctgcacccttaggcgacttttgcgcggagtgtcgcacgcgagggtagtctgcgctgcctctcgcggtgacttcggagtggtcgaatgcggtctttttcgacatgttgcgtctgagttattgcgggggatttttgcgggtatattacatggctccgccttgttaaaaacctcacccctcgggaggaaaagagtgcgggccggaatagtattgtttggtggattacaagggtgcgtgggtcctgagggtttaaacaaaaaatttgcggagattgtcaatattccaggaatgctctaggtcttcaccggatggcgttgtcagcctgtacgtgctgggggacgccttcaatttgatgatgaatggaccctcccactttggctctagtttgccccatgactctgttcaggtggtccggacgagtacgaggtcaccttcgttgaactctcttgggacgaccgcatggtcgcgccaggccttggtttgagcttggtatttgttgagggcctgcagggcgaagacatggtctccgtcgatgaggtctttggacgttggttcgtctacgtcggggactgctgatgtgcttgttcggggcgacccatgctttatctcttgcggcat

SEQ ID NO: 134238 - DNA, 455 bp, Zea Mays
atgttaagtcgctatcttttggcaatttgtactctcttcgtcttggtatgctcgtaccattggaatcttgcatactcttatttttatatgtgcttacctttatatctcaatatctgtttaagacatttcagttaacgtgcccttggccacccttgtttcttaatgatccatgagcggtcattttattttgcatatccttggtaatctcgttgtctccttgtaactccacttggtaattaattttatttactgcaaccattttgttggaaccttacctatcttacccttgcttgttttctccactttgtcagtcttgccttaactttgtccatggttatgcttttcatcattaccacctttacccttatcacctctatatcttaccttgatgtttatcttataccagcctttaaaatatcctcttttccatctcaatctgagcatcgtactttacc

SEQ ID NO: 134239 - DNA, 811 bp, Zea Mays
gcactccgcatttgtggcattgttcacggctccagaagaatccctatccggtcgtgcaaaataggggcaaccggtttcctctccctttccctatgcgttctctttcctccgtgcaaactaacttctacactctcgtgcgccctgtgtgactggctgaagattcatggtgtacaaaaatatggcgcgaaacccaattatgctcatatagggagatgaatgcatggctttgctggaaaggaggacgaatgtgtgacactgtgcatacgcaacaacgggggtactatgcggatatgaatctggagctattggagttagtcttacatttttttgtccatccctaactagcaggctatattgaaacacgacccatttaggccccctttggcagggctctttctctaccagttccaactctggctccggcttctctggtaaaacagttgaatggcgtcaaagattgttgtgcccccgtcactaaggatcggccaagaaacggatgtgggagtgtgcccgaccaaggaacgctcgcccaaggactagttgtgtccatggtccgtgctatattggatgcgctgacagccatgctggcagcttggccagcagccgcgctcctgaccgcatcagtcacctcaccaatagccacagccctcgtcgcatcaggaggcacacgcctggccgcatcgggagctgtgaccttggtttgtgcccctggcagcgccggcaggtgcgaccctcaccacgacagcctcctggtcgatagccgcgccggcaccgttgatgaccgcgggaatgcctccaactccggttgcac

SEQ ID NO: 134240 - DNA, 887 bp, Zea Mays
gataaattctatcatggtcaggtctgccttagaagtatcaacgggtccttcattgttttgataccgaagatagagagcccttagaaggtgggggattacaggccaatttctctcctaaacaatagtatgaaaatcttaacgaagttgttggcaaaccgtctgcaaccgttcatgccccggttaattcacaagaattagtatggtttcatcaaggggaggtctattcaagactgcttggcctgggcctttgaatacattcacttatgtcactcctcaaaaaaagagatcattgtgctcaagctggacttcgaaaaagcctttgacacggttgagcatgagttgattatccaggttctgatccacaaaggcttcggtcctaagtggatcaactggattcggagcatccttcactctggcacgtcttcggtgttacttaatggagttcctggtaagccctttcattgcaggagaggtgttaggcagggtgatcccctttcgcctctgttgtttgtcctggcagctgaccttcttcagagcatcatcaataaagctaggctgcggaatcttcttaagctccctttaccggatattggtgaccaggatttccggattgttcagtatgcagacgacactcttttgattttagaagcatgccctaagcaacttttcttcctcaaggcaatcctcaactcttttgcttctgccactggcctgaaggttaactataataaatcaaatatgttccctataaatgtgtcccctgataaaatggtgatcctgtcccataccttcaattccagattggcgagatgccattcacctatcttggcttgcctctgggccttgcgagacccagaaaggaacactatctccctcttattcaaagg

SEQ ID NO: 134241 - DNA, 388 bp, Zea Mays
gcgatcgtcgccgtcgtgccgccgtctggctcgattgtgacacgccttaagtcatcccaccactcgtcgcaagccgttaagactcgacagtgaccgccgtagaccgtgaaccagtgaacgccacgttagcgaactccggtgtctcttcccccttctcaccgtgagcgcttctctattcaaattcacccttctcgcggccgtccactataaattggtgcctcgacctgttccgctagattgttacgaagccagagcacccaccctctccctcgattagccaccatagccgaagaatttcattcttcccccaaatctgttgtctgtgccaccgtgagacgtcgcaccgtggccagccacctccaggtccactctcgctctccttgtctat

SEQ ID NO: 134242 - DNA, 566 bp, Zea Mays
atctgaagtactacggcaatagctgcactcccagtttgctaaattaaccagacacctagtgaccagaccttgccagaattcataacagtcatggcacaggggcaggattgtaccaggctcagaaatgccagtgttgccagaattcgtaagagtcatggcacagggacaggatggtaccaggctcccagaaatgtcagggttctcactgtatattccttagcaatggcgcaggggacccttatcacacacaccaaatgccagcatctcagtggtaccattgtcccctctttcactttggcatgtttaaaaacagaccaccggtacagaaggtaaagaatatacttgtatacaggacgtacgcgagtgagctaggaccggctcattgttttcattcgatcaatacatgatcaggtggtcaaatgcccccatccaatcagacccttccaatagaaatggtcagtactgaattatccgagaacgggaagagtctctggtttgtacaggacggctacattgcgcacccgaaccgcacatccgtctgaccgtctccgcactcaccagcgctc

SEQ ID NO: 134243 - DNA, 648 bp, Zea Mays
ctaggggttgtgggactgtctgggcaggccagggctgttggggagaacccaacgaacactacaacggagctccggttgcgagaacggggccgaggttgggcagacgacggagggggttctgggcaggtcggagggtgctccggtgagcaatccccaccgcaatgggggataatttggtgcaccgaggttggcgtgagcttcgatgagggtgtaggggcattctaggctaggattttggcacgagggaaggctatattggctaggcgtcgtggagacgcagcggtccgatgagcagcggctccggtgagctcaaatccaccacggtgagacagaattaagacaaaagaagggcggggtgaggttccttacctagtgacggtgctcgagggagcttggcacggtgttgggagcctctggtcggctggacgacgaggaaacgcgacggcagcggtcaccggtccgcatagggagggagtcagacgtggatggggcagaggggacggtgaaaggggaaacagaggcgatggcagaggcccggtgacgacggtggaatgactgtgcaacgatgttggcggggctacgagctgggtgagggcaaggggcagggagagagagcgaatgaggggtgggggtgtgctaggggtccat

SEQ ID NO: 134244 - DNA, 583 bp, Zea Mays
tcgggggatcttcggccgtcgacgcaggggctggcaaagggccctcaccggccacggtaggcacgggtgcagccgaggagccttcaccggcactcgagggcggcaccgggtcgacctcagcctcgggcgacgcgccgaccagatctccaaggtcctcgacatccttggcacgcgccatctgcagcaacagcacactcattcagcaaaatcacacatacccacacaaccacacaaaacaaaagataacctttacctgctctatcgcccggtcagaccgctccttaaccgcctcccgaccgtgcggaccccacatcctatcgaagagtgcccccgctgactgcttcaccatagggtcttcgaccttgaaaatttcacgttcaaagttctcgtctgattggtcgaagacctcgtagtgtcggcacccctcgcgggacaacgcatttagggtcccctcgcaggtgacgagggaggcgaaggacatgaaaccctgcacaatagtcgagagcaccagcagctcctcctgcaaccattcgaggaagcgaaggcctgcctcttggtcgggcacttcgaagtctgccgtccg

SEQ ID NO: 134245 - DNA, 726 bp, Zea Mays
cgacatcccgattcccgtccgtggccgaaccctcgtcttcccgaacggctcgcgtggagctcaccgaccgacgccgagttcaatcgctagagggcatgaaggctgccggggccgaccggcgaactcgccgctggccctacatcactagatgaggtagcacctgtgcgaattgtggcaggaggccccgaggccaggtcccgccgcttgtcccgcacctttcaaatgcgtgggaaccgcgatcaagcacagcgtcgtcaccatcaggtacgcggccaagctacctaggtggctaggtaagtgcctccgggtagtttatagcgtatgcgagccaaccagacttgcgatgctgacaaatgatggtttagaagttgatgccccgatagcgttctaggaaatgctataataatgaaaccttgtgcctgttagtagattcgaatctcactgtctatatatcatatatgttctcaatgttgttaattttgttggggctgtgcggatggatacacagtggggataaggtattggactatttccgttggccgttgctgttgccagctggcctactcttccaaccagttcctagacttgtatctgaattcattcagggtgatgtgctcgtggttccacttcaaacctcaatgggttaatgggattattggggtgagatgtatatgattcaggctttataataaattgtactggtgtctataatattattcagaatag

SEQ ID NO: 134246 - DNA, 470 bp, Zea Mays
cctcgctggtgaaccgccatcgcacggccttgtgccacgtatccgggcacccccgtcgcatcagcgtgactccctatcgctgtctcatcgtcgccggtgaggttgccacgacgaaagacacgaattcgcggcatcgatgttcttccttatctccggccacccgcactgcccggctaaattacacgccaccgccttcgcctcctataaattgatggcccgggcaactgcgctagatcatcccgaagccatagcacccgctcccactctcaatcattcaccagcactcgctaatttcaaattttccccaaattcggtctccgccgtcgtgaagaacagatcgcagcggccagctcgatttaggttagctcgcgtccctctgttgcttgttctagcatccgtaggcaccccgcgaacccctcgacccgttcaattgaactggaccaccacccatcgccggaaacatcttcatc

SEQ ID NO: 134247 - DNA, 409 bp, Zea Mays
gcggaaggcggccatgggacgggtgcgcgggctcgaggcgtgcgtcgacgccgccgagtcggggtgccaggaggtgtaccgcgcgctcgtgaacgccagagtctccctgctcaacctgctcacgcccacgttctgactctgacgccatctgctcataaaaatttcttggcgggccagacgtttttgccatcttgagtgagtcgtttgcggtgtgtaaatgatgtaaataccccccctagtgcttcggattgcaaagggaactagtcctggttagccgagaacccttgcggcgctttgtctcccatttccgtggccctcttctctgcttctgcacaagtggccaagtagacagacatttcgatggttttgcaagaaaaattagcaggcgagcggatgacaagagttgttt

SEQ ID NO: 134248 - DNA, 414 bp, Zea Mays
ccatcacccagggccaggggagcagcaacattcgtcctcgctttgctccaccctagggtacactagctcgttctggaggagggcaacggtcttaccagcgtcctgctcagcagacacctcaggccacccctcagacaccgcgtcctcgttaggctgccctcactggcatctcggctagacatgctggccagaacaccgctatgggcaccaccaacttcaagtatggtgaggttgggcattatgacaacacttgtcctaagaggaaccccaacacaccagctcgaggcagtggtcagggcaagcagcagactctagctagcaacaaggggttcagtattgccagagtcaagcagatcagtgctgaggctaccactgatggtgctgacattgctattggtacgttccttattaatt

SEQ ID NO: 134249 - DNA, 497 bp, Zea Mays
tcgtaggatcgtgcgtagtcatacaccagcagattagtctcacggtgcggttgtacgaagcgcggctcctccagtcgtcatcctccagcgtgttgtagacatacgcctgttatggcatgttgtctagtccttctaggtattcggggtcactgttgggattctggcactgaggtcatccgacgaccgggcttgactggccccacaatgcagtggtggcgcgtctgagtccgtacgcgcgggcgcacggttcgtgttctaatggagaccactcagcacgcctttggtgcgccgcacgtttatccgggtgtggcctaaggatggcgcgtcccatcgtagtcgatgtgggctagcagcatcgggttgaagctccttcctcatgagtccattcggtgggaactcggtcgttcatcctgtctggcagacttgctcgacggagacttggtcgtccgttctgcctcataggcttgctcgacgagaacttagtcgttagactcgct

SEQ ID NO: 134250 - DNA, 661 bp, Zea Mays
ccgcccccgtccctggccgccgccgccaagtctgccccgtccacagcggtccggccagcttccatgtgcttcttcctcagcgccaaccgcgccccctcccccccacggccatgaccccggctcctcagctgactgcgcccaccagctctgcccctctctggcgcccccccccactgtcgcgattctggctccccgtgctccatggcgcacctccccccaacatctgccataccaaccgtcgtgattacggctgctgactcggccctcatcgtcgattccgcgcttggcttcccctcgcccagcactgccggtgctaccaccgcagccaacgtgcgcgccgccggcctcgtcccctccgggcttggcctaccgggctacccgacgtgcacaggcgtcctctctggtctaccctcgccgacacgtcttcccagacacccgccccctaggttctccaccactcggccgctcgtcgccgacgccacttgggcttccccgacgccctccaccgactccacgctagcatctaccatcgccgccatccaagctgccctggccgcctcgcaggagcgtgagcgcgccgcgtctcgcgcactggaacaggagcgcgccctggccaccacactgactgcccagatggccactgcgcagcgtctcgtcatcg

SEQ ID NO: 134251 - DNA, 450 bp, Zea Mays
taaaagataaacaggagagggaatgacaatataagtggcaaagatagaaaccccacattctactgtgacaggtatgtctacatggataaaccgatgatgttaggtcggtcaaccaaacaacatcctactactccacaccttgattttaccaagatttacaaaatgtatcaaattgaaaaaaatacttctattattgcctgcttacatattagatcagagatatactgcttcattgtttatgaaagaaattaaactttgactcaataaaccattaatatgtacggtatatctgtccaaaaaaatagtttataagtgctggaaaatatatttgttaaatcatggtagaaataccgattgcatgcgataaagatgtcataacatcagctggagcattaaatggtccaaacgtgatgacagggtaggcagatggggcagagaactttatagtcg

SEQ ID NO: 134252 - DNA, 476 bp, Zea Mays
cagaaacatatgatcaagccggcgagcggcgacagtggcagaagcttacggcatgggccatcagaggatgaagagctggtggtgttcgcggcggaaggatcaaggtcagggttgagccagtcgtatgacttgacgtgcaagatagatatataaaaacacgaacttgatagtgtcatcgccaaagccaacgtacggaaaggttaggtagataaaaacacgagctttttcagcactccagtagtacactatcaaaattctgcctaccgagaaattcgggcttttttgtatcgagccctgaagaaccctaggtccgggcgtaggcccacgtcctctagtcgcattctgtctgaaatttggtacgagcaggagtttaggttttagtaaacgcatgcatgaaacaggtgcacgatcgatgcatgttgttgtgtacaggaattcagattcagtgagcagagcagctaagtgcaagtgctaat

SEQ ID NO: 134253 - DNA, 569 bp, Zea Mays
ctttttgcttttgggttgattaattcggctattgagttgtcggcttcgtctatacacagacataaaaagaacttttagcatttgtacaggatgaattgttccacaatctaatgcatgttggcctgtcaatgagccccctgatcttgtcgatattgtgcagcattgtttttactcccttttatcatctgcgccatgaacttaagctgcaaatagaggctttcttctcatgtgttatcctaagattagcacaaagtatatatggagcaagttatcagcagcaagaattgcccttgaggctctaactgatttttgccggcagaaagagtttatagctgagatgtatgcaaatatggactgtgatttacaatgctcaaaatattttaagagttcgcttaccttctgtctaagagtgcatttcctgtgaacagtcctttgtcagctataaatgtgcttgctttggatggtttggttgctgtcattcaggcaatggcaggtttggttgctgtcattcaggcaatggcacaaaggactgataatgcacctcaacatcatgagcaatcagcgccaga

SEQ ID NO: 134254 - DNA, 296 bp, Zea Mays
ccaatcgcttcttcgatcgtcatcgtggagaggtctattagagacttgattgagcgagcgatctgcttgtacttctcggggatgcaacgaaagagcttctcgacggctctctcctcatcgtaggtgtcgtcgccgaactgcaccatcttctgcaacagggtgttgaggcgaagagcaaagtcatcaacatcctcacctggcttgaaggccaagttctcccactccttgcgaagtgtctgcagcgtggtctttcgggcacggtcgctaccgatgcgggtcgcagcgatggcgtccca

SEQ ID NO: 134255 - DNA, 503 bp, Zea Mays
aacccttcgaatttgtcctcgagcttttggacggctgcacaatacttgcccaaagaatcagttgagcaatcctagtctttatttatctggcttatgaccactagtgaatctctgtataccatcaacttcttaatgcttagtgacacggcgatgttcaacccgtggatcagtgcctcatattctgctgcattatttgatgctggaaataatagctggagtgcatacttgagttgttctcctccaggagcaatgaagaggattccagcacctgctccctgcaacttcagcgagccatcaaagtacattttccatacttcagtagcctccgggttgtctgggacctgatgttcagtccactctgatacgaagtcaactagtgcttgagtctttattgctgtgcgaggctggaactctatgttgtgagctcctagctcacatgcccacttggctatccttccgatagcttctttgttgtggagaatgtccccaatcagaaatcctgt

SEQ ID NO: 134256 - DNA, 596 bp, Zea Mays
gcgagttcggttaagggatcaataccgggaatttggtcaccaggaggcacgcccgcggcgcacggcggaaatccaaggcagcgcgacgccagcgagcaattgccgttgccacgcggtccgccccaccaaattgctggcgcagaaagcttccgtagacgagtagtatccccctcggccccactccgaagaccgaggcccagcaacgatgagactcactggcggcggcactctctgctccccccttctcactctcgttcgaatttggcacgcggctccggcttggtctggcaaaataggagggcaggagggttgcgggtggcgactatatacgagctggtagcccaatttgtaggaacggtccccccggcgagcacgcgaagttagttgagccgcggcggcatttgcgcggaacttgagctcgaccacgacctgacgcagggaccctgccggccagtgacagagtaaaggagacggcgcgagagcgaggggatgagaggctgccccgtggggccctactgggtgggctgtgctcggtgtcgaggccatgggccgaaagtggcattctgggcccattcaggcgatttattcattttcca

SEQ ID NO: 134257 - DNA, 497 bp, Zea Mays
ctgtggggtacgtgctcatccattgcatttatcatgtttagggcatcgtgcggagcgattcgggtctgagctgtgcgttcgggtagagctttggggcgttgcggccatggcgccgccgcgcctagcgtctgcgccaccgcgtgggatcggtgagagaggggagttgggtcgtgccgtcggattcggtgcgaacggccggatttgtaccggacgagtccccctaggcgattcgatcgggaccgttagatcggatcggtcggttctgggtgactcgagctacatttaatctggaccgtagattgttgatccaaagattcctatagcgtaccggttcaatcgcgtgcggatgtaatcctggtcgtccaaagtagatcggacggttgtgagcgccccgtaccccttcgtggtgcacttttgcataaagatcccctctggaattatagattagaacccgcggtccactggactgttccctgtgccttagaaatcttaccccg

SEQ ID NO: 134258 - DNA, 326 bp, Zea Mays
tcaggctcagctggagtgaccaaagcggcaatcttcctctttttctcttgccctcgtagcgggtagcagtaatcagggtatacgaagccaatagcatcaaataccctgtttaatcttttcttgcctcgacctccaaaggctgcggacagagcattatcttcgaccttggaatatgctccaagtagctcatcactagtagcttcgatacacttcagctagtcatcgtttggctcatcaaacttttccctaaacctgaaggtatacttcagtcggaccaaaccaccctcactagaatcggcggtggtctccttcgacatatcccagct

SEQ ID NO: 134259 - DNA, 347 bp, Zea Mays
catctttgctgggcagacattaatggggtacatacttgatttattataattcaccctgagccccgtcaaagttgtgtaggagttaagaactgctctgaggaagaataattgcctagggcaagcttccattatcaataatgtgtcatcagcatattggacaatcgggaaatcttggccacagttctcagtaagaggcaactgaagtaggttttgctgtctcgctttattgataatactctgaagcagatctgccgctaaaataaacaataaaggcgagagagggtctccttgtctaaccccacgcttgcaatgaaatgttttcccagggacgccattaagtaagaccg

SEQ ID NO: 134260 - DNA, 708 bp, Zea Mays
ttaggagtcagctgatgaagatatatttcaaaattctttagcacctcccctatcatctcgttcagaggaaatcgcagtcctgctctgaaactcttaaaaaccactacttcatcattctttggtgctggagtagtctcttctttggcaaatcggacaagttttctttcagtttccccaaagtagccaagcttcatcatcatgggcatgtcgtcttcggacacagtagatttctcaaaatcaagatggctgggttttacggggatcagaatactgtaatctttctcaatttcatcaacattttcttcttcagcaacagcctgttcaacttcggcatcaggagtaccttcatcaatagctccctctatcacaactagtcctgatcgttccatgacttctaaaattggcgctgtctcagtgacctcggtctcttctccctcacgagacacccttgcagttgatcgcactctagccatttggatgtttttaacaacttgacgaagctaactcgtctgatgaagtttactttaaaatgatgaagtgctcgcttgagagtgcagcgcagaaagcttcagctatggttaaattttttaacagcacaacagtgcaatgacaatgaatgttgtggtaactcctcaccaacctgctgtttatatagtgctgcaggtgggaagacgaaccaccaggtcgcccgcactcgctgaacggtag

SEQ ID NO: 134261 - DNA, 829 bp, Zea Mays
gtaagccacatgaggaacaaagcggaccatcttgttgaagcccacttcatactcggtgacggacttcttctcttgcttgaaagactgcaaatcaatcttcattttctccagaaaagtgactgggtagaacctcctctcaaactgcctgatgaaaacatcccaggataggactcctggtgaagaggagtgagctgcctgcatgcctctccaccaaatttgagcctctcccttcagcagctgagtgccaaagcgaacacaataaccatacacaacctcaaagacgtccatcttatcctccacataagtcagccattccgccgcctcgaccggagtaccactgccatcaaaggtgtccagcttcatgcccatccactgcatcagagaaaggccactaacgagaaggggtgcctcagccccaccacccggagcagcaccccaagggacaacgcccccgggcactcctccacctccagcaccctgagcagcacccgtaggggcaacaggaatagcttgcctcagaatggccaactcctgatgcatggcctgcattgcggctaacattgccgcctgactcatagaatccctactaggaacatgcgggctgccacgagccctacgaggtggcataactgcagcaacagaagtaagtagataagtaaataagattgccatagcacctcaccaataatgtcaaaccagtactaacaatataataatgtatcaatagtaaaccaggaaacacatcctatatatgcagtgtgtcaatttatcattatttcacttgctaggacctacagcctattcctctgataccaactgtaacacccca

SEQ ID NO: 134262 - DNA, 555 bp, Zea Mays
aacgatttcgattttcgaatctgcttagaaaagtccggccgaaacgtccgatggattaccactatccaccagtacatatcaacggaccagaacgctgttagagaaggatgtagtccaaatccctcgccaagaaaccgcggctcggcggcatggcgtctggcggcggcgctgtctccaacaagaggtaccgacaggtcagcagctgcacgggccacgacgacgacagctgcgggacgagccgccgcggcaagacatgcgaagcagcccctagatccggccgcgaccacgacgacgacggagagagcgccgatggcgatggctctcgcgggcatgcccaggaaacggctgacgacggcagcagctccggcgacgaggattacatgttcgagtacgacgacgacgacgacgacgactgcgaaggaggagccgagcagacacaggccgacgccgcggcgtgcgacggggagcagaggtacgccgttctgaccgaggacgacgtccgcgcgcggcaagaggcggacaccgccagggtcgccgaggtgctgtccatcccgc

SEQ ID NO: 134263 - DNA, 346 bp, Zea Mays
ctattttatgcatgcaccaagtgtagatggtatttactgtctagtcattgcaccgttgccagtcaaaccgatgtgattatacatgttgcaaaacccgattatgagtggaagtattggtaaatgggcttatgcacttatagagtatgacttggcctatgaaccattgaaatatatgaaaggcaggttgtagcggattttattgtagaacatcggatcactaatactcataaactagacatatcatacctcattgttactccctggactttatattttgatggatcagattgcaatgaagggcaaggaattggcatcgtgcttgtttcaccaagtaatgtctccttcg

SEQ ID NO: 134264 - DNA, 299 bp, Zea Mays
gtggctgaggctggggctttgctagctgaagttggactgctgaaggagaggggtctgactgcagaggctgtggttgctgattttattttcaagaaccttcagccgttgaaggactgggcttacctgacttatctgtacagaggcctagctgaatcgactcgggttaccaacagaaggattccctctatagacttagtgaaccgacttgagatgattcttagaggcaaggtatcaaatgttggtgccccagtggcatactcagcctagaacctacctcctcccaaggccttcactctttt

SEQ ID NO: 134265 - DNA, 370 bp, Zea Mays
cttttagagtatggccacttgtagaaaagtgggaaatgccgatggagactgtcactaagactggtgaaggagagctagttcggttaaagtacaccttcagatatgaaggtaagtttgttaagtcggatgatgactggttaaaatgtatcaaagctagaagtgatgaattggttgggccgtactccagagcagaagataacgcattatctgcggccttcgggaaccggaaaaagaagagactaaacagagtttttgatgctattgggttcatgtaccctgactaccgctacccgtctcgggggcagaaaagaaaaagtgcggctcctgtgaaggatgttgcttcggctgcctcgagtgagcctacgccgaa

SEQ ID NO: 134266 - DNA, 346 bp, Zea Mays
aggggaatcacgcctcaccattggatatggagcaagtggtgagattagaggaagagtaccgcttcggccagattcgttatgggccgttgatggcgtgataatgcaatcgcagattagatcaaggcgtggggcggtgctgaccgttgatcttttctcggacgactacaattatgttagggcaatacctattcgtggatgcgtctgttccgtccgatttgggcgtggcgtgtgttgggccgtcgatcgtcgagtgggctgtcaagattaaatgtcaacataccgattcgcgagcagtagtgggccatacgatctaaatccaatgtctcgtatgcgtaagcagctgtct

SEQ ID NO: 134267 - DNA, 372 bp, Zea Mays
catttacttgcatgaatgaattcagtagggcgattttaaacctcaggaaaacaaaatgcaagctttagctgaaagtcatcctgtccggattcaggggacagttgcagactacgtggaacagtagaatggaaaaaaatgtacattatttctgcaatggcgtgataccacaattgacctggactaaagttcgctgcatgccttccgttttcaagtttatttatttggtgcacgaaagttgaacgagtaggcctatggacaaactttttgtgacggccacaactaatacgtggcgcttttttttaaacatcaagtacgttgacatatctcgacctctgatatttactcttaaacaattcggccttgacatccatg

SEQ ID NO: 134268 - DNA, 322 bp, Zea Mays
ctcggtaaggatgcctcatccgattcgtcgtatcgtctgcttcacgtagcgctattcggattggtgggtagagcaccagagtgtctggtacgatctacgccggcgagcctcgccgcggtggacacggcgccgccgcctggtcacggcgtggggaggaggatgaagctgaagccgtagatccgagatcgagaagtcaccagtagatcagggcacagcgtttcgtcgtatgaaaactcggtcgtggatctctgatccaagggccggtattgcgtaccgtttcatgctttaatataagtcgttgatcgcgaatccaacggatcag

SEQ ID NO: 134269 - DNA, 466 bp, Zea Mays
ggatatggctgaggcggaggcttctccacgtgttacggatgctgaaattttgcctggtccgagtgttgggcgtaggcggcgaagggcggtggcgaagcgtagagtgagcgggtttgatggtggtcggcttcgtgtgggcagggctggtaggcaggaattgttgtcctcgccggttggggcgagtgtgggtgagggggagttgcgaaggctttctgagggtgaggagctgaggataatgctatttaactatagggagatggggatcattccgaaggttgaaccaatgtaaggtgtgatgccctcgctgtacgcgtgtaactatagtttttatgataaggttgactgccttcgcgcacctgggtgtgttcgtaaggtgtttgcgcgcccggtctggtacattgttgtgtcggtccggctgcgcctgtagactttcggactgatgtaatgcgccttcgatttttacact

SEQ ID NO: 134270 - DNA, 708 bp, Zea Mays
aaaaataggactctataatctgggcaaactacctagaaggcaacaatgactacaaaattgatgaaaccaatttggatgttcggacagattgaaattgacaagtaaagaatcttggaagttacttactttgccttgtggtcatcaagattgaacgggaaatagagcagggcacctgcccggagtggtggcaagtagccgcctggccggcgcgcagcggtgccacagctatcggtcagcccaccaccaccagtccgccaccggacttcgccgcttcgcgtcaagggagagagagatcagataatgcgcgcggaggaggtgccaaggggatggataggaggggcgacgcgtgactgcgtgagcgtgactgcatgagtcgaagcgccgggcgccggccgacggtttcgtgcagaggcgtgggcgcgtggctgatgtttggcgggctgttgggtaattgctgggctgctgtggactctctctgttggctgatctgggccgtacaagttttggttgtttggcgacttccgctagctagtctagtacaactgtactagcagacaagcagtactctgctgcgtttttgtcttatcccgacatggcaacgcctgttccaacaaggcgtttccaagatcaattccgcacgaggacagaagcccgcccacagaaacaacacgatcaaagtgttacaaaattaccggggacaaaaattaa

SEQ ID NO: 134271 - DNA, 451 bp, Zea Mays
gccgggaccgccaccgctataattcgaggtgataattccctcaccttgttcatcttgtcgttcatgttgagtagtgcttgaccatagtggattcggggcatcgctgtagctaggcgacctcgccggacaccgcgccatggggcggcgccgccgtgtccttgggcgggttggagaagaatgccccgggaccgttgatcaacggattgagggcagggatcggttagagcttacccatccgcgtatctcttctgcaccattgcatccatttgtagcaaacacgattagaagatctttacctttttgttgaatcgattgcgaactgtgcgatctgcatctagcagatgggattaaatcctgggagtgtacttcacattgtagatctaggccgtcggatcccgatccaccgatcggaattgcttaccgattcatatgatgcgtaggtctaatcctg

SEQ ID NO: 134272 - DNA, 509 bp, Zea Mays
cccacccgagccggatcattaccggcaacaccctcgggggctgggcaaccaccgacaccatccttgaggactgagttctccgcaacagccacctctaaggctaaaggactctcagtcacctccatgggaatcgaacaaccttgaccaacctcttgactccgaagaccgccttccaaggtcgactaggcacgagacgctgctcgagataactctaaccccacctctgggatgtcagaacaaacatccatcatatcaccatcagctggctcggacagcatatcttcaggaatgacatcttcgagagcctgatcaaaatttgctatggataattcttgcagaccaacaagagcagacaaagctggagaaggaatatcgctactccctccactaactctttaacgctgactgttctttcgaactaaggggacttcctcttcttcttcctcgtcctcgtcaataatacggataatacatggcacaggatcacacccattgggatcagctctggc

SEQ ID NO: 134273 - DNA, 680 bp, Zea Mays
tgaaggtggggcaaatgggtgaggcaactagactcattcaagctgattgatggggtgacacaagaacagatcaaggtgtggctgggttctaacaaaagtatttaacagaaggtggtcagtgccttacatgatcgggcacttggatgtcaaatctatcggtgtgtcaaatctactttcagctggcctggaagggaagaacagatcaaagcatatgtgcagtcctgctaccatactgtattgggcaaatctccatttgaagtgctagatgttgcagcaagtcaaaatgcactcgcagcatgctcaaactccgatgaaacaccagctgatagacaaaagggcgcacagatcgtacatccgatgtgggtgatcgggtgtgtacttgaaattcaccctttactgtcagtcctcagtggctgaacgccagaaccacaagctagcgttccggttcttcgagccttacaatatgcaggcggctcagttcatccggtgtttcacgtttcacagctaaaactgtttgttaacgctagtcttgttgtcagttcttcggtgttagacttgtcccaggtttaccacaactacttatccgctggactggatacggagctgggaggacaagcagattaagatttgagtaatatttttattcaattttgagctaaaatttatttagggtcttacta

SEQ ID NO: 134274 - DNA, 424 bp, Zea Mays
gtcggaggcagtgctacctgctgatctcaagttcggggcgccaaggttgatcttcgacagtatagcagaagctgaagccaccagattagaggatattgatgtactcgaggaggaacggctaaatgcagtgatccaatcagcacggtaccagcagactctaagacgctatcatgacaaggccgtgcggcaacgatttttttcagtaggagatctcgtcctccgccgaattctaacgggggaaggacggcacaagttatcacccttatgggaaggacctttcatggtagtagaagtcactcggcccggatcgtatcgtctcactcagatggatggcacagaagttgggaactcctggaatatagaacacctcaggaagttttatccctagctgtatctcaaaactgctgggataacgatgtaatct

SEQ ID NO: 134275 - DNA, 461 bp, Zea Mays
tggatgtggctgcggcggaggcttctccgcgtgttacggatgctgaagttttgcctggtccgagtgctgggtgtaggcggcgaagggcggtggcgaagcgtagagtgagtgaagtggatggtggtcggcttcgtgtgggcagggctggcaagcgggaattgttgtcctcgtcgtttggggcgagtgtaggtgagggggagttgtgaagtctttttgagggtgaggagctgaggataatgttgtttaactatagggagatgagaatcattccgaaggttgaaccaatgtaaggtgtgaggccctcgctgtacgtgtgtaactatagtttgtatgatgaggctgtgcgccttcacgcatttggctatgtccttaggggcgttacacacttggtctagcacgtttattatgtcggtccggctgcgcctgtagtcggtctttgcgcggacagtttctcgatgtag

SEQ ID NO: 134276 - DNA, 1269 bp, Zea Mays
aatccataaaataagtattggataacacagctgctgtgtttcaaataacgtaacacagatgtcaaggaaaaggcacaaccccacagatggcatgtcaaggatccttggaagaactgagtaactgttacacaaatgtctgtacacgatctgacctatctaccgagtaccaaggctagtagttttataatggtaaaaaagactagtagttttgctccttcaggggcgatcttctaactgggtcatgccttggtttcttcctaatcacaggtgcagaacttctatcgttagttttctctgaggtaagcctatcattgcatggttcctcctcattaattttctgcgagatccttctcaaatttgacatcatactttcacctccataaattacctccccaatggtatcggttagtccagtcagctcattgaccaactgattcctctcttgaagtacaacaacagacatatcagctgtcttagacttcagctctcgtacgtgttcttctaatgtttcatttctttcctccaacaatttcagcttgtttgcaacttccagatgctgctttgccttttctgacatttcagaagcagtgcgagctttgagttgttccataagattcttcaaatttcttgactgatgcttctcttgcaataaactcacctgcagggagtcaagttctctttcgcactctgcaatgagcatatccttgaaaacagtatcatgcccttggatgacgttaagtgaattcagagtttctgcaaaaccataaagttgattcacctctagctcaacttctgccacttttgttgctgcagcctcaagaaggtgctcgatgtcaacctgaacagattcaacagtttgttgaatatcagaaattgcaatttctttctctgctattagtgtataccgatctgctttctcttgattaaacatttccatgagctcctgctccctgcatgcaaatttctgctcaaagaatctaatccgttcttccagctccagaagttttttgtcggagacctcaacaatttcatagtacctgttcttcacttcatgaatagacttctcatactccatcttgataagacttcccaaatcaagtttctggaccatgttttcctcttctagcacaacgatgcgttgctgaagcttatcaaccatcattcctttatcattaatgataccacataactcctgcttttcttttgtatgacactcatcagcctccattttagcaatgagaacaacatccaaatctctcttcagtacac

SEQ ID NO: 134277 - DNA, 450 bp, Zea Mays
cacccagggaccaccaagatgtacctagacctcaagaccagatactggtggagaggaatgaaaaaggagatagctcagtatgtggcccggtgtgacacttggcagcaaactaaggcagagcatcagaagcctacaggtctactgcaacccctcccagtgcccaaatggaagtgggaagaaataggcatggatttcgtaatcggactgcctcggacccaaaaagggaatgattctatctggattataatcaaccgtctcaccaaggtagctcacttcattccagtaaaaactaccttcggaggagccacccttgcccggaaatatcttaaggaaatagtcagactccatggtatcccacgaaagatagtgtcagacaggggaacacagttcacctcaaaattctggatgagtcttcagcaagctttgggcaccaagctagactttagcacc

SEQ ID NO: 134278 - DNA, 525 bp, Zea Mays
gtggatggcgggttcatttcatagaagttcaagatctctttagtaaaatgaacatggcgaaggggtatcctctaaccacaaccacccgatcatatcttgacggcccagatcagattataacctcttcgaaccggtatgaaatcttgatcatcagatcttcaatcgacgaccgagcttccccatgcttgcaagacatactagcccttagatcaaggatctacgaccaagatttaattgatcgaagtgtttcacacgatccaatcatgacccttcgttcctgatccgacgcaccctaggtcgtcttcctcccctggacacggcaatggcggcgcgagcaccaaaggtggcggcttcaaggtcaatcccccagccctcccttcgatttgttcactgcatttggccaaccatccagatcattccacagagccccacgctgttcttcttcccttggctgcctagcaccatggcacgcgcgggccgcagcagcgcggtaccggcgacccccatcccgttgcacgactaccc

SEQ ID NO: 134279 - DNA, 603 bp, Zea Mays
accatgatcgaaacatggtagatcaccgtgcgcggggacgaaggcacatccccctccagcaccgacgactcctccacatgcaggtcaataatcgacggaagaccccctggatcagcacaccagacccgtaacttgaacacggacaggtccccaccatccttagtgtcatcatgcaaatcgaggattatacagtgttcatccagaagctgctccgccgtacggatctcccagagatgaatcgggagaccaagaagctcgacgtccagcagtcgcggcaaagcgctaccaccagaggccatgaaatgacgagaccatcttctgatgtgcaggaggggaggtgcgtagagggactgaccaccattgaacacccgatcagccagctcgacgttgggaaggagggcaacaaaggtgctcggcgcaacacgacgaagatcgagcgcatccgcctcaagatcatatctcgagatgagcgcatcagagacttccgcggcgtagccagagacctcccgacccacaacagagacgagcagggcacgccggagatcgtcttcagcttgagtgatcctctgggtgcgcctaaagaagcgcgaaggccgggaagcg

SEQ ID NO: 134280 - DNA, 1812 bp, Zea Mays
cttccattcagtgatatggcttctgtagttcctatgctattgagcttttggtatacagtttctctctaagatttatttgggtttatacattattcttgtttacagggaggaccctctactgagcagatgccattaaatccatttgaccttccatttgacactcagtcggggactcctgatctggtatcttaatgctatttcttccttccattgataaagttttttttcggactgataatctttttatatgctcaccttccacgaatggtttctctagatgactcctgtaccagtagaattttgcaaaccgtataatgcatcgctataatgttaacgtaaagcattccgccgctgtgcaacacaagtgttgtgtctgatagaatctgcaaacccgtaacaatctagaacactgttgatagatgttttcaacgtcaggaggtcatagtcatgtgatatcagcataaatatcatgttgtcagaggcctggtagtatataaacttatacaatatctcaattgatggtggctcttgaagtccggccaaatttcagaattctattttatttgcactagtcatttctgagaactacactactacataaataggtttggctgtaaccaggattagatgatatcccattactgaggacagaataattttacccatggccctgtgctgaagaccaaataatctacgacgctgttttaactatggccgatagcctattcgatgctgtagaacaaatcatgacgtaaccttaaagttcagtcgtattccgactcccaacctgccgcctgtattaagtgatggccagcatgatcaacttgccagttgccacttacatcctggactatacttgcaccaattttctcacatgctccaaccttttgcagttcatggacgtaagttcattgcaagaggccttgcctagcccagatctgccaaccttccttgatggtttacctgaaagatggttctccagcagctcttgtgcttatgttccatcagcgtcagcgtcacatggtatgctctcctggatctaccaatgattatatttctaccgttcacagcttcacatcaaaaccaccggatatgactggaacaacctgtgcgtattcaggtggactgccgtgccttgtcgagcggggccccaactgttccttgctgtgagttgctcccctctgatgcatgctttattgtaaaccagctgagctgctatctgctgatatctgctttcccgccggtccaggaatataccagttggcactttatcagctggaaatccttttgtatagagggcatcacagtgaaaataatctgcgtcttggacttggcatgttcctttggtttggtgatcttagagctaggaatcttttctgtgcgaaccgggacaccttgcaaggttaccagaggaggtggggaatatgatagcgtccccaggacccactggaggaatgtttagtaattgtgagtttctgatggaggaatgtgtgtattctttctcggttcatgtactctaggacatgattattcagcactaccgggcatcctcccggtacatttctttctgatagttacaacgatacatggcttcatccagttattcaagttgttcaggtacatgtacatctcttgcggatattgcttcaggacatcaacatacatgggtatgtcggctgggtgggaactatacaacatatatattgtagaagtcgtagtcacagccggattaaagccgtagcgaacaaaacgacagcttacagtctataaccaatatttttacagctacagcccaatcaaactgtccttagc

SEQ ID NO: 134281 - DNA, 407 bp, Zea Mays
ccaataatccccttttcaggtttggtcacatggggatcatcattgtcacagttgggaggagcagggtggacgagcgagatccgatccatccaggaggaattgaggaaagaacacggccccgcctttcagatccatcagcattcagcacaatgcgaacgaagtctggcagcgtggagcatgcaggcaggcaggcagctgttcttcgctggccctgctgccgtgcgtgtccgccctggccttggtggccacttgattagcgcacaaattgccgcctaacctaacagtatatataataaggctgctggtatgtgcatgggctcactaaattggtgaatgtgtgatgtgatcagctgtatacgtactcccctccttccacaatgcaaagagtgcatccccaagttcatgag

SEQ ID NO: 134282 - DNA, 296 bp, Zea Mays
gttgaagaggttccttcgccaaattcaggcactatggccggttcaatatatcgcggccggtgggtcagaaccttcattttcttgcctttcagcataacagtggtgaccgaagcgacactttttctcttcttcccttgccttcgcagcgggtagtgatagtcagggtatacgaagccaattgcatcaaatactctgttcaatcttttcttcccccggcccccgaaggctgcggacaaggcatcatcttcggccttggaatatgtcccaagcagctcgtcactggtagcttcaataca

SEQ ID NO: 134283 - DNA, 649 bp, Zea Mays
aagacacagtgcacaatacccgcaggacggcgggtactattctcaaaaatcgtaaggtccctattgtaaaacgtacccgcgaaggggtatcttcggatccaagccgttggatcacgcgcgggcggtgtggattagatctcgcacttataaactaacgtgtgttttcgaccgtccaatcgataaccgacgcatcggattagattgccgcttccaaaattagtaactcgccccgaccgttcaatctacatccaagcgccaggatcggtcatcgcttaaacgagttgctacgcgatcacgtccactggatcgcccatctacggcccgcaacagccccgcacccagaactgatcctagctgctcatccaggatttgacggccacaggcgccttcccccctcccaccgacacgccatcgcccagccgcacgcggcggagcaacgatggcacggcggcggcatcgccggtgcccgccaaactcagtttcctgctctcgaacttcaatctaatcgatgataaatgatgcgtagacagaggcgagtatctgggaagccttcataccagtgattgccgtcgcgaagtcccctgccactgctcggtggcggaagttgaaccacgatgagcaattgcgtgcgcaccagtgattatccgca

SEQ ID NO: 134284 - DNA, 552 bp, Zea Mays
aatcttcttctagaactggacacttgatccgtcacctagaactttgccccgctaagaaagataaagaaaaaactggtagatctcaattcatgcttaagtttaatgctaatggatctgttgtgcactgggagtactctccatctgttgcaaggacttagctttgtcgtatgattgctagactagacctacctctgtgttttggtgaatgtagtgcatttcaagaatatattactcgtgctcataatcctcggtttgttaagtcctctaggcaaactactgctagagactcaattaggctttttaatgattgtgctgaacaacttattaatgtactcaaatctgtttcatctattgcacttacatctgacatttggtctggcaaggcaaaagaggattacatcagtgttgttgctcattttgtgaactctgattggtgtttagaaaagaggttgcttggtcttagaccaattgaggtagctcatacaggttataacattgctgagcgtgttgaactggttgctaacgattatggaattactgataaaatctttg

SEQ ID NO: 134285 - DNA, 675 bp, Zea Mays
gggagacgtgttgattctaagcctgcagtgtgggaacctgtctgtgacgatatgcgtccgtgtttctcggttttgggacttttctgatcctcaggatgctgcaaggctgctacactgtgatatggtgttgctcgatgaagaggtaaagtagcaacaacctctaccagcttgttgttgcatctcaccagtttgctttagtggtttttccccctgatatgacaatagagagcctaatgtgccttctttttactagctgaattgtttctactcttactaaagtttaatctacatcctcaccagtttgctttagtggtgtttttccccttaatatgataatagagagcctaatgtgtcttctttttactagctgaattgtttctactcttactaaagttgaatctacatctttctatatctagggaaatagcatacatgctacgatatacccacccttcatagagaaattcaggccactcataaaagaaggcagcgtgtacaacatgacatactttcgagttcgagcgtcgaacaacttgtataagccagttccaaatgatatcatgattaccttcacgaattggacaaagttagagcaggttattgagattcctcctgcatttcctacacttacctactccctcactcacatagagcagatccattcacgcatcgacc

SEQ ID NO: 134286 - DNA, 316 bp, Zea Mays
ccaacatgaggaaggagaatgtatcaatgaggacctagaggacagagccccgccaggccgccaccaagccaagacttagttaggactccagtttgtagccttagctccacctcttccaccacaagggacttgagagcttctccttcctctctcgtccgattgtaaccactactacgatcattgatcggcaatggtgtcagtagtgtaagtcgtcgaagactagatgtagggacgttctgttagaaccagtataaaccttgcgccaccatgcacaccgtccagaccccggaacgcgcacatagaaatttacatgtcg

SEQ ID NO: 134287 - DNA, 552 bp, Zea Mays
tgggagttccaaggttcaacaacccctgacatcttcattttttatctcaggaaaatttgcaagctcagccaatctctcctgcgaaggaaattgcatcgaaaaccccgagcggcatctggtcgctttccaaatccttccccacggaaaatggaaacacaataccctctggtgctcatttagacttgttaacccaaaagcacaaatcccgtgcgtaatcagtgaaatccgcagtgcagtgcaggctgcaacgcaatcgcaagcggctgatccgcgattccatttccatcaccacggcaatgcttcacatcagatcaccccaggataaattaataaaaatcccaagcgcatgcaaccacctgacctgattgagcttatcctgctgaaaggccaaaaagaaaacagagagggacggaaatcagacagcaaaagcaagcgcacaagccggaaatcagacagcaaaaaattgcaattgctctgagcaagacaactaagcgcccttctttactcgcaaagcgagtcctgcatccaaaagcagaattgcttcatacactt

SEQ ID NO: 134288 - DNA, 511 bp, Zea Mays
acgatgatccagtttggtgaaaatagatgctcccgtcagctcatcaattatctcatcaaagataggcagtggatacctatttttgacagtgtgggcatttaacttcctataatcaacacatagacgccactcaccatctttttttaattaacaggatgggtgatgcaaaaggactagagctttgttgaattactccactagataacatttcccgaacttgcttttcaatttcatctttctgttgtggagtatatctataaggtctcaaccaaaatggttgggcaccaggtagtaaatcaatggcatggtccactggtcttcgaggaggtaaaccttcaggtttcaagaaaaggtgctgatattgatcgatcaactgttgtattggtttcggcaccagttcagcagtaacttcacccttttccacgttcttcagtatcaacaactgctctactgcttcctgcttgatcatagactccaactgaccacacttgagactgtaacatgtctgaat

SEQ ID NO: 134289 - DNA, 323 bp, Zea Mays
cgacgatcaagacttccagggcttggagtgttcgagggaaagtgacgttgattttgctgccactatccaccagcaccttcttgactcggatttcccaaatcactgggttgacaagcaaggggtacttgctggggtggtcaaagttgagccactggtcggctcgactgaaggagatagtgtgttttgaccaccgatacaggttcggagcactgttggtggcaactaggacctgccgatcagtgagcttctgttgcctcctgttttcctgagccccgtgccctctgaagataatgttgacctccatgtcgatgcgcggaaaagcc

SEQ ID NO: 134290 - DNA, 459 bp, Zea Mays
cttcttagcccaactaattctccctgaccggccaaactctgctcacccacgcaagcccatcccttcccccacgctctaacccagtcagccacttccatgtgggccccgctggtccggtctccacctgcgcgtgcctggtgccacttccatgtgggtccagcaggtcagccgggtcttcttcaccaacaaacttccgccatccgtgctccgtggtcagctcaacagatctccaccggacgagattcgcacccctccgcgcggctcttccaaccagattctccttccccctcgagcataaatacccgcgctgggactcctccagtccatcgcctgggggtcgagatggagccgctaccgaggttctttgtcttcgccaccgattgaaggttgatgtgtggtcgagaatggcctttgggacgtgttcgtgctcctcatggcgtcgccgggctgtggggccca

SEQ ID NO: 134291 - DNA, 300 bp, Zea Mays
cccatggtatccacacgtatgtggatgaaacgtcgtgaggctggtatgctagcaccacatgtgcaatgagagaaatgacaacgttatcttgagtgtgtgtagccctagggagagcagacgtggcggctaaaatgatctcttaaacatgttgctaatgggattttactctaaatgtccattagcattctcatggatcatggttgtctcttggatatatattcaataatctcactcttacactagagtcaatcatccatgcaattgtaccaccccttaagtgtgtgacatgtaggttcctgt

SEQ ID NO: 134292 - DNA, 762 bp, Zea Mays
ggccgaccagatggtctgggggccctgccagtctgctggggctgttgagcaccatcaatgacctgagagcgacgttcatatgcccttgctagtcaagaagcctgctgtagattctgtgggttcatcagctcgacatcgattttaatccgctgtggcaatcccgccgtgaagagctgcacttgctggtcaggtgccaacgaagaagtgtggcacaacagtgacgagaagcgctcttggtaatcatccacggttgtccggaaacgaaggcaggccagttcgcctaatgggttggtgcgtagtggcggaccaaagcgctcattgtagagctctttgaattgaggccatgtcaccgttgcacagtcccgttccaccatgaaatactaggtatgtgctgctcccttgaggtgataggaggcgagccacactttgtcctcctcaatcgtgcgttggcctctgaaatactgctcgcagtggttcatccattcgaggggatcctccttcccatcaaatgtcggaaactccatcttgtagtgtcgcggagctcctgcgtcgaaagactgcagggtgggatgggttgggatatgatgtaatggctgatgtggtatgtatggtggaaaggatggaagaggtgacgacgagtggggcatgtggatttggtggattggtaatgtgttggatgatggtgggctatagctggtggtggcctggtggaggtcgatggtgcctgtgtctctggaatgccaccataacctgggagaccgt

SEQ ID NO: 134293 - DNA, 665 bp, Zea Mays
cggacgcgagcctcgttaccctaaccccttagaccctcgctgccatcttcaccaatccctgtgcgccgagtttcgccatggccgtgagatagtaggagagagaggggtgcgcaggaaactagcggggggggagattggtggccaccgctgggcacgaccgtggatttgtctgggcgaagctgtgctccgacgtcgtcttgccgccaccacgagcgtaccggtagcgtcgtcgcgtggaaccgtggaagaaggaatcaccgccgtcgcacgctcaacccgcgttctgtgctgctcggccgcggtcgcaaggtaagtgaaaagctcctggccgtcgatctagaacggacgactgtgatcaaagcataggatatttcaattctggtcatagatccgataacggacgggcgagtatctgtcaccacaaacgctatcatggagttagaatcaaccgtaggatcactaatgtgtggtgcggattagattccagaatagttcttcaaccttttaatcggggccgtcggatctgaatccaatggcttcactcggtgaccgatcaagatctgatctggcgcactcgtttacaatcgtgcggctctgaacgcacaataccccttcggcctgaagttttgcataagaaaccttatggttttaggattttaaacccg

SEQ ID NO: 134294 - DNA, 487 bp, Zea Mays
aatgtcatcccatttccacgaaggtatcgataggggttgcaaggcaccagctgattttaagtggcttgcctttatcctctgacaggtgtcacattccgacacatactgagctatctctctttttattctggtccaccaatataggggcttcatatcaaggtacatcttcgtgcttcctgggtgcatggtgaatttggagagatgagcctcatccgagattctcttctttaggtctctgtttttaggaaccaccaatctgtcttcaaaccacagtatccccttgctgtcttggtgaaagcacttatacttctccactttctgattaaggttctctttgatgatttgcactcccttgtcactgagttgggccataataatttgatatgacaaggttggctcaatggagatgtgagacaaggtaccagaaggaatcacttcaattctcatcttgttcaactcatcacacagggtattaatgcgagagtcc

SEQ ID NO: 134295 - DNA, 831 bp, Zea Mays
ggaggatttgacaaaaggagatgatagatgaatcactattgtaggtgggagaagggggcaccattgtttgcaatgggtttgtgccacttgggggagcttctgtgcatactaatactacttgagtgtggcgaatgacttgaactggaagcatcataccaaagcccaaggcaaggttgcataatgcagagttggctgacacaacatacacttgatccctaatagaggagcaaattttccacaagtagtttgaaacaaaagattctaccgaaactagggggcatgtgttggcacctaatcctaattaggctcgtgttacccttttctggtcgaatgactccaaagaaagccactaagccttggtgcaaagtagacgcgtagtatagaaattggtcttttacagtaaataggtaatcgattagatggatagtgtaagttgggatatgcttaccacttcaaggccacatggctatatattgtaacaaatacgatcataataatcagaaagccattcattcactaagcagtgtgtgcttctcatcctcttggcatatcgccaccccttcccctaaggcttttgcatggtaagcgacatgcagccctaatgcgctctcttaccgcgtggtagggcggcaaggtgtcacttccttactctagtagatcttgtactaagcattgttgttggtaagatctactatcatgtgtagttttaatctatgtttacctttaagcttcatcctatttgattgattttacaccgtgacatgtgtattccttgataggttgctacacccccatgacatgcaagctgcacatgtgcatgaggcaacttag

SEQ ID NO: 134296 - DNA, 1024 bp, Zea Mays
cacgaagaaagtattgtaaattttgggaccgtgcctctgcgagtgcgagttgtgtgcactgcagtgtccatcgcaccacaactccacccacccgcttcgagagtcgagacaaccaacaggcccgcggcgctcacgccgctccggacaccggagagggagacggacaagaaaggggaccaggcgaccacccggccctcggcaatggggtcctgtcctcctcctccgccaccgcagatggctcctgtcctctcgcgatttcccatcacccccaaacccgaccccgacggtccaagcccttcgcaatcccccatccccgtcgcagaacggtcgtcgctgatgctcgcgctcaccccggagctttgcgagattcaccaccgggagcttgctccttcccccgacgacgatccctccttcgctcactgccttcgccaataccaactccacctcgaagccctcgccgcccgtctccgcccgccctcttcctcctcacccgccgccacacctgttgcacgagtccctcctccgcctccatctcttccccctcagcaggggcagcaacaacaagcaggcgcaggcggaggatccaactccagctctaagaagcgcgcgcgcgccgccactgaggtggtgcgcgccacccacctgagcccggctgaccatctccgctaccgcgccctcgtccgccgcgcgcggctcaccttcgaggcgctccgcagcaggtaccagcgccaggagacctccgccggcgtccgcaaccgccatgacctccgcgcctcgagccagatgctctccgccggccactggctccaccgcgaggtccgcctcgtcggcgacatccccggcgtcctcgtcggcgacgccttctactaccgcgccgagatctgcgtcgtcggcctccacaccgcgcctcaggccggcatcggctacatccccggtagactcctcgacgtgggccagtccatcgccacgagcatcgtctcctccggagggtacctcgacgacgaggacaccggcgacgtcctcg

SEQ ID NO: 134297 - DNA, 2048 bp, Zea Mays
aattagcttatactgctatattgcagctaacatttccatcttatccacataaaaactgaatgttggtgaaaacctcacctctcccgtctgaaagaagttttggactgcgacggaaatcaagcatgcgaatcagcccagacatacaacccccctgaattttctcagatttggaatgctgtttgtaattcttctttgccatgatagctgagaacatggtcagataactttccttctaagggcttgctttagacaagcttataatctgaaagcaagaaatgcatgaagcgagtaagaataatgttgtagtaggatccagattagaaatacaaacacagaaaagcttcccattttctgcactcacaagtccccactactcatatttgctcatatcttccaaactctgatgaacagtttcaaactctagtttcacaaaagtacagttgtctaagaagaaaacaaacagggaggagacaagaaaacagttggaccccacttatgcaaatgccaatttcgacatactcatgccagaagcatttgtactcaaagtacgttctacctgcatgattttcctttgtgtaaatatatgagacaagaagtcataagaactataatcaccaactaaaattagataaatataacaattcggagcatccaaagggcatggtttttggcaagtaccttttaccagtacttgaatacttgatcacagaagtctaccgagcataaaagcagaggcggtcctgctacacttcacagatagtgcccaaaatgccaaaaaacaccgaaggaagatttggtttcaaagatcactcaatccaatctttgagtcttcagaaccaaaaaattgcaggcaggaacaggttattctgttggtcccaaacgaaggcccttgaaattgccgtgtctcctcggtttatacgagatgccgatgccgagtcggaaacaaatgaaactctgaagcggcaggaagggatatctcagaaggatcagaacacgcaaaagaaaggaagcggaacttttttttcttccttttactccagctagttgtcttcaccaaaacaaacgcgcagagcacacaaacctccacatcttcattctccagcaagacagacccctgcctcagaacaatctcagaattcagtaccccaaaaccaaggaaaaccggcgagaaaaccacctttttatcttcctctggttcttcacagcaacccctcgaggcctcgaaacactgagaccagcgccaagatcgaattttcggcctccaaaactgagaatgaataaataaacagcaaaccggcggatactcacaggtcacagccaaaaaaaaactgccttttttacagaaccgtatgaatgcaaccgaatcgcagttgtcttttccgatcctcccttccttgaaatccttcaagacgcggaagcagaagcatgccaacccggcaacagcgcatgcagcggtcctcgccgacgacggaggctttgccactgtggccgcgcgcgccaaccgctgccgctaccttgtctctctcattctcggcattctctatcctctctctaatggcggatggagaaggtaggatttggagggtgacccagcccgtacttttggtttttgtagatcacattgcggggaggggagtccgatttgtcttttgtctctattttggccaccaccacctctttttctacgtcaacaggtgcgcgatcaagatcaagctcagcacgtagtggctgccaacaaaaaatgggagatgagaacaagaacggacagcgctacgggcaaatcggcatatagagccttgagttttacagttaattaatgcttgtgccagttaggtggcctgaattggaaatacagattaaagcgacctcttggtttttagagtattcttaaatgcgtctaaaaataaaatggtttatattgtacaaatattttcttttcctgttataataatgtaaaagcgtgcatacagaccgccatgtgtgcacgggagtgtcacgaacactcagctgaatactgcatgtatgcattgctttcaattttcatctcg

SEQ ID NO: 134298 - DNA, 373 bp, Zea Mays
cccaagagccaatgggcaggtcgaaagagctaacaggatgatattggaggcgctcagaaagaaagtcttcgacaagaatgaaaagttcgcaggaaagtggatcagagagctgccgtatgttgtttggagcctgagaactcaacctagtcgagctctacatggaaacacacctttcttcatggtctatggttcggaagcagtgctacctgctgatctcaagttcggggcaccaaggttaatctttgaaaacatagcagaagctgaagctactaggctggaggatgttgatgtactcgaagaagagcgactgaacatggtgattcaatcagcacggtatcagcaaactctgaggcgctatcatgataaggccata

SEQ ID NO: 134299 - DNA, 493 bp, Zea Mays
gtcggagatgtatgtttttactgtagtagtgctgagcgcctacatatcttgatcttttgcgtgcacgatacaacagttcattgcgcctagcaggagtgcatagcgtcgctgttgttgcaatcaaagccacgacacgggcgttgcttttggccgcgagccaacgaccatcggccggcggtccgctcgtatggttcggtgcaacgattccggcggagccccgacacatgtgatgtgcgtactacgtactagatttcacgcttcgcagtcgtgttttagcttaccaccagtctcatttaggtaggcagagtgcactagtgcagcgtccatgcgatgatgcacaactgttccgtacaaggtcttgttggtacaggtactggagctccagactacaggtcgctaaacacgacaagtccaaaacccgggcgtatcatctagaccaaaaaaaaaaaaaaacgctcaacgtttcgtgaatccaacgtttaaataggatccg

SEQ ID NO: 134300 - DNA, 495 bp, Zea Mays
caataccattggtagggacaccatacttttgtaagagtacgacgccagctcgtgctctgtctgcgcgtacgtacgtggtggtgtttggttggtgcttgtataaggagcagccggcctacctaatataatctcgccagcaaatacagcatataatataacacggcatacattttggcacgtagcacaacgacgaacctcatgatcgagcgtacatgaaatcaaattcacaaaccaaagatcaaaacaatatgcaagcacatgctcgatatcgcgaggcaacaacctccccacttgtattatgggacgacatcatcaaggggacttgatcattcatcaagctagcacagagcccaaatctagacaaggaaaaaattgcgtctctgatcatacatatttcaacgttcccaatgcaagaacatcaacggaacccgtttcccgtgcagttatattaaggtctgatcagatcgacacacctctgttaattactcatcttcg

SEQ ID NO: 134301 - DNA, 342 bp, Zea Mays
gctcctcctctcggccgggctcagtcggtcggtaacgactcctgctgtgctgtgctccagcctccggcagcgcctgctccgcaaacagttgcctctcctgtgctcacccaagggtcaaggggccagtccatccatccgcccgtccaggaaggaaatcgttcatccccagaagacaaagcgatccacttggataccggataagccctgtcctggcggcgtcgcatcccctctcgattcccgcgacaggtcgcagtgaatgacgacggaaatcagcggcccttgaagcgaagactcccccccgccttcgctgctctccaccgatccgacgaaggcagcgctcgg

SEQ ID NO: 134302 - DNA, 333 bp, Zea Mays
ctcttgtgtttcttcttggggctgggcatccttgtgatgtttcccttttggattactttgcaattcattaactggcagtgcattaggtacgagagaatcttctattaattgttcttgaggagacatctgtctttttataccagaaaacaaaatacggttcttctgttttgtagtttcattttcatttgcattgatttggcgacaaggaattccatagtactcacaacaacaacatattccaaggtcacttgtctgttggtttggttgtgcatccttttgtgtcttcaatgtctgttcatcagctgttttatttagagtgttgttttgacttgc

SEQ ID NO: 134303 - DNA, 361 bp, Zea Mays
gacaccattaactatccttagatccacataggaggcggcgcggtcacgtggtttacgagaacacgaagatagtagtgctcccccttggttggatgagcagagactattctaccgacttgtccacctgtatctcgtttcctccgttgccagactttgcccttaccactctaccaagtgtaccactcagggaagtcacgatataggatgccacgagcctcctcgtgtagcctattcgcctcaaaatattctatgagcatcgacctatcaacacctggatggttgatgactcgctcgaccatttgccactcgtgaaacgccaccatgtgcatgtttggaagatggagttgcatctgcatcacag

SEQ ID NO: 134304 - DNA, 363 bp, Zea Mays
tcagtctccctaggttgttatatatatgtgttcatcaatgggtaagaataacttgtttcatgtttgttgatgcgagaggtactatgggacggctacagagaactgcaaatgcttgttaagaaattcaaagtgagtggttgtctcacagagcaaccgatgtaattggaaaagaacattaagacaagcacttaagggtgtttgcctttgtgttgaatggtatattcggaaaagaacatgaagagaagcagatgacaaagagaattgtgaacggatgcaagtgcaccgaactcaaagtatactaccatccaagcctccccactatcattttttctacgaattagcatcaaccgatatataccggaa

SEQ ID NO: 134305 - DNA, 634 bp, Zea Mays
cagggatcgggttctgaaattgtgggtccagggcatagtgcggccagccgcaatccttgatgccggcgagaaatcatgagtgctcctatcaccaatagcgcctggtctgtccacgagtaccctcgcacggttctctctgctcacctgacgaagctttctgtttgagtttgctccacctatgggttacggggacatgggctcctggcatggcactctcggcgacgagtcttgttctcttcctaagcggctcgatggaacgagagggatcacggccatccttatatggacagggaacaagtccgcactgttgatacacattctgttacgaactactgcagttctgttccgtgatcagcgcgtggttggagatagatactaaacggcggacccataatgtagtgaccgacttgatgcatgtgctgatgtcatcatttgcggctagaaaacaaaaatgaaaaaaaaacgtggagactaattaggccccgcggaatagagaaaatgggccaacagagaaaagggtcgcgcggcaggagattgctcttttttctttctaatttctgttttatttcagtttcaaatatttaaattcaatactgatctcttgtttttatttcgaatttgatttaaatgtaac

SEQ ID NO: 134306 - DNA, 535 bp, Zea Mays
ggcctgtccacgtgcacggcggaaaccgcggtgtcgatcccgtgttctcaattatccacgctcggatcggttaaacgaccactacgaggagcttcatgaacacatagagctgctaaaacaatgcttgaatcggacagggacttaccagagagggctggccacggagcgcagggctttacgttcgccggagacagagaaagggggaaatcggtgtcgcggcggctcgagttgaaattggggttggggattgaggctacagggccgtaagaggctgtgttttcattgcgcgcaatcaatttgggcgaagatggagagggcagtgcgaatttgacttcgatgagcttcactgatggagatgaaagcacctcgccgtggctccttgctcaatttataggcacggcggtccggtgattgatccgcggccacgaggtgcgctattaacgcatggcaaccacgtaagggagaggcacagtgaggcgaatcaaagcatgtgcgacagcgcggcggacaacgctgagtcacggcgaccgccggt

SEQ ID NO: 134307 - DNA, 481 bp, Zea Mays
catccattgggatcaatttcggcgcggttacacccattgggatcagcttcagcatggtcacacccattgggatcagcttcaacatggacgccaccgttgggatcaacctcaggaaggaactctgctggcacttcatcacaaaccggagcagaaggaccggcatcctggtccaagcatgacagtcgctggagccgcctcttcttcttcttcttttcctcaacaggcgcagtcagacgactaacttggcgaggacgctttgggcgggtaccctcaggatttcggatctccactgttttgttaagctcttgtccaaccgtgatagccatcggttcaacatgggtcgagtcagaagattctccagccaacatactgagtacattatctatttctgcatcatctggacttgccggcatctcaaagtgaatctgtctctcatcattgggaagatcatgaaggggagcaaccagagcctcaacgtctt

SEQ ID NO: 134308 - DNA, 345 bp, Zea Mays
cgacgacagctatggcccgcgtgtcagtccagcttacaggggtaccgcgccgacgcccgggggccaccttgtcagcccctttccactcctttctctcgtgcgcgctcgtctgggtcactgccctatgggcccgcctgctcagccgtagactcgcgcccacgttgacccaatcccttcactgcacttaggggcccacctggcaccaacctccacgcggccgcgacaacagaaactcatggaattcgcgatgagctcctgccacgattccatcgacgccgtcgctagcggaactgctctccggggaccataaaacttgcgggtgccttctcttctcccctcctctcg

SEQ ID NO: 134309 - DNA, 483 bp, Zea Mays
cctggagccgttgatttcatgcttagcggtcatgattagatgcagggttgaggtagtgagaaccgtgggatcttgggtggatggtcttgatttaatcgggcataccgttacgaactggcgtgtcctgaccgttcgattgggatcggatggtgttactcgttctaggcttcattaaatcgtggtcgtaggatctagatccggtggacgatgttgcgtaccgcctcgcagtcggcaagatttaatcctacgcgctggaatcagatcagacggccagaaagcacccataccccttcggccagcgcgtctttcaaaagagcccctctagtttttagaattaaacccgcagtccagaccagtggcgcgctgtgtcttggagatcttgcgggttagcccctgagttttccaggaattgacgcccgatccagagcccgtttaaaatgtataaatgaattagtaaatgtatttttaatacaaaaataattc

SEQ ID NO: 134310 - DNA, 360 bp, Zea Mays
gtcggcaacgccacacacaacagggacaaatagtatgcagataaatgctaatactgctcgataagtagaactcaaaagtaccttacaaaagcaaagttattacatccaccttcaagcgggaccctagccttgtgtctataggtatgacctactcgacatcagtagagtcgcactagaagcacgcgaccgccatctccacggcgtaagatgtcttgtacgaccccccgggcggcgtcctcagcatccaggccagcggtcaccattggaggcggcaccgaagccatcaaagccaaagagatggagccgcagcatggctcacttcccaccccaaagagttggggcacgagggatggagccgta

SEQ ID NO: 134311 - DNA, 704 bp, Zea Mays
aagctgaaagcactcggcgtgaccacctgcataatcaagacagactccaaagtcgttgctggccagatcgaaaaagactattcagcaaaagaccctgcacttctgcagtatcttacggtcgtttgcagtcttgagaagcaattcaagggtttcaccctgcagcatgtggaccgcgctagaaacgaagaagccgacgcgttggccaaagcagcagccagaggtgaagccctaccctccgacgtgttctaccacgtcataggcacaccaaccgtccgtagcccagagggtctgcaaataaccaccaacgccgagggccatcgcattgtcaacctcatcatggccgaagactggcgggccccaataaccctgttcttgcaaggatattaccatccaggtgatgtcaacgagaccaagcgcctcaaacaccgaagtcgggacttcacacttattgagggccagctatacaagaaagggatcaatcaacccatgctcaaatgtgtcacagagactgcaggcctccagatcatgcgcgaagttcacaacgacacttgcggctctcactcggggcctagggccctcactgccaaggtgatctgtcaaggtttctactggcccgctataatctgcgccgcaaatcgagtcacgaggtcgtgcgaagcctgccagaagttctctccccgtttgggcaacccctcgcaattcac

SEQ ID NO: 134312 - DNA, 621 bp, Zea Mays
ggctctacaagctctcccccagctgggaaggacccttcaaggtgatagaaatatgctgccccggatgcgttcgccttgccacagataacagagtacctctccccaacccctagaatatagagcatctccgtaagtttctcccttaaaaacagattcgcgggtccgccctcgatacgcccggtctgttggcttgctctcatgtatatccggttacaaggaaggggcctgacccacagggctgttttttcggttgattttacttctaaaattacaaccattattacaaccacatggttgtctccctccctggctggtatggcgacatccgaattgagtagccagactcggcaattaggcgatggggtggttaggggccatattgctgcatgttgccggtcttgttgcgtgaatcaaaggataagaaataccagctggcggaccttatgggtgcgctgttaaggatacctggcctaggccgtgtctaggaagggccccagtagggtttgcctcttcggagtgatggcactagtgccaccttaagaatcctggcatctgaccccgacaagtcgaggccatatcccaggggggccaagtaccgggaaagaagccggcatacagcag

SEQ ID NO: 134313 - DNA, 375 bp, Zea Mays
ggcttgccatctcgccccgatgccctatctgtaacatctgggctacgccaccgtcttcgcctgcggcctcgcctctggcgcccaagaccggttgggattcttgacgtcggggcggcgggtcatctctggcgcctggcgggtgagttcttggtccttgacgagttctttggtggattctgaccatcgatcaagaagccttctcgattgaatctccccggattcttacttctcgagagcgattcttgatgaatccttggcagtaacttgatcctgtgaaggatttcttggatgggattgcatgtacatcgactcaatcctcgaattcttactcgaaagcagtaggttttgtaggttccagtcacagttcttgtaaca

SEQ ID NO: 134314 - DNA, 424 bp, Zea Mays
aagtcttcaatttctttgtcagagtaaattttatgaaaatacaacattgactatttgactttatgtttcatatagccgtgaatctaaaatctttgttttatatagtcctatgtttctctgcatagcaacttatttttgttcatggagccagtgagagtatccataaccctctttaaccattgaggcatactggcatagtcactttgcaataacaattgtagttagacttgctggtagcgcagtggttgagcacccaaggtgcggagctccccaccagagtttgattcctggtgctgcatggttgtgtgcccattccctggttgaaactctttggtggtgcatggttgtgtgcccacctccctggttgaaacaacgcagatggttccttggccgccaaagaagcgtgcgcacgtgaggttcctgc

SEQ ID NO: 134315 - DNA, 303 bp, Zea Mays
ctttgcacgcatgtgacatggatccaaattcgtcctctaagcttttaaatacaggtaaatatcgtcgtattttctcggaaataaattgaaactattaatttgtgaacacattataaattataataacatgttccgtagaaccgccaaccgtacacgggaagtccctccgtcgcaagactacaacagccaggatccatgaatcttccgtcgcacgaccgtaaccgccaaccatacatgggaacacacatgattgttccgttgcaagacatgagcttctcgcacaagccaccctcctcaccttcc

SEQ ID NO: 134316 - DNA, 566 bp, Zea Mays
ggcggccgcattggtggtgctgtgtgcagcgacgacggtggcggtgttggccggtgacgaggatgatatcacgcttcccggctgcaggagccggtgcgggaacatgagcatcccgtacccgttcggcgtggaggccgggtgctacctccccggtttcaacgtcacctgcaggaggaggaacggcgatggcccagcggcggcggcggatgagctgctgttccttggcgacggcaccgtgcaggtgctggagatctccatccccaacgccacggtgctcatcaactccagcgctggctacttcgatggcgacaagtacgtttccttgtccagtccgggcacatggagcggcgcgctcgggagcggcgacggcgacggggtgggggtgtacagtctagcgtgggggaggaacaagctcttcgctatggggtacaacgtgcaggtccgcctggaggcggataacgaaacctccagcgtctgcgtctccttgttcttcgagggcaacttcgccgcgccgaccgacgactgcgccggcttcctctgctgccagtctcccatctgggatcagc

SEQ ID NO: 134317 - DNA, 631 bp, Zea Mays
cgagtcaaagtcaagagcaacgaacagggaagttctcaatgaactcatcaagttgcacgggaagacatctctgggcggcaaattgcctgcctatgatggcaggaagagtctctatactgctggttcacttccttttgaatcagaggagtttgtggttactcttgttgatcctgaaaagaaggagaaagaaaggtcttcccagatcctatgtcaggccatttttcagtactacacgaaagacatttctcacctgctcatattaatccttttcaatttatagggtggagagagagtacaaaatcacaattcgaattgccgggagaacagatttctaccaccttcagcagtttctgcttggaagacagagggatatgcctcaggaaaccatacaagtacttgatgttgtcctcagggagtcgccgtcttggaagtataatacctacactcaagttcttgctctgaattttgtttgagtaatcttttacccagggtactgacaactctttggtaaaaaaattgtcactgcagttatgtcacagtgtccagatcctttttctctacaacttttggtcacagaggtgatatcggtgaggggcttgagtgttggaggggttactaccaaagcctgcgc

SEQ ID NO: 134318 - DNA, 427 bp, Zea Mays
aatagccgggactgttatttcatatttgataatctcgcttttgttgaaatgtccgtctttctcgttgaatcatacacagggaggagaaagtgtaaactgcagcgagtgagcaggagagcgtctgaccctgtttgtgtggtctgggccatgattaacttggacccgaaacgctgcatcgcccgcccgcgcttttggcaaggatcctagtcatgctgccgtgtgtgttcattgcaaggaattggtcaagtattctaatcatgctctactgcctgctctttgctcctaatcaaacgtttatcaagcatatataaaatgtatacataaatataaaatgcatacgtaaatattgatacatttaattctaagcaaagaatattgatacatttaatacgcgtccaagtatatatgcatttatatattgctctat

SEQ ID NO: 134319 - DNA, 450 bp, Zea Mays
gacaagtctcagagacagggctcatgcttttctttggacagatacacacatagacttctagacaatacaactcacaatagatgtagggtattacattctggcggcctgaaccgctctaacacttgtgttctcgtgttcttccaactaatcaggcaatccataggctgcctccacatcttaagatcagggcaggtacactccaccacccggccgaagaatttttctctcctacatgtataatctcacaagcataattgctcgcgctcttacattgataaagagaaagatcgatcattaaacggtgcatgatatgttccatatgaattccgtggtattaagcttgctggtcatgatatgttccatatgaattccggtgcatgatgtgttaacaaaaaagaatttattttctccctttgttcgttgttgtgttcagcgtagcgctcaacgtgc

SEQ ID NO: 134320 - DNA, 404 bp, Zea Mays
aaagatttcgcagctccccctcacctacactcgccccagccagcgaggacaacaattcccgtttgccagtcccgtccacacgaagacgaccaccctccatctcaccatgatgacgcctaccacttcgcgacaattcactcactctctgcttcgccaccacccttcgccgcctacacctagtactcgcacccggaagatcctcagcacccatcacacgtggagaagtctccgccgcagccacatccaatgctgcaaaataatccaagtcctcatctgaagactcctctgtccacacaatcgaactcccagaatcatcacactcaaaacacttagacacagagccaaacgaatcgtcatcagcagccacggtcgaagccgccacaaaaatagcattgttagtagcg

SEQ ID NO: 134321 - DNA, 455 bp, Zea Mays
caatgactcggttgtcttgcatcaaaacacaacccagtctagtgccagaggcatcacaatatacatcaaatggtttgccgttgtcgggttgcgctaacactggtgctgtggtcagatgctgcctcaaggtgtggaaagcatcttcgcacttctgaccccagtcaaacttggctcccttcttcaacaatttagtcatgggcttcgcaatttgagagaagtctgggatgaatcttcgataataactagccaatcccagaaaacttcgaatctgatggacagttgttggcggcttccagttcatcacttcttgcactttatctggatcaatagctatgccagcttgagagatagtgtgacccaagaatttgatttcctttagccaaaaatcacatttggacagtttggcataaagacggtgctctcgcagacgttggagcaatacatgcagatgatcg

SEQ ID NO: 134322 - DNA, 275 bp, Zea Mays
acaacaacatacccggattcaaacagcgatatcttctaaaatataattccgaatcgagcgaataagtactcgttcgaaaggtatgacaaagctctacatgattctcatactgattatcactaattacctacgaaaaattcccagaaaacactagaactactgttgttcgcccatccattaaatttttggacagcacctctaccaattcgcatacgtaacatctattcaatggaattgcagcacaaataaacaagagataatcacaaaaatcacct

SEQ ID NO: 134323 - DNA, 298 bp, Zea Mays
gacaaacagtgcaaccactgagactttgagcatggattcaactatgatctagtatgaatctgcccatggcatctatgacaaacttgtagctggttagtagctctataactttgctgcagagcttggcatgagtggtcatcggaaatcgagagaaaacttggctccaagtttgtctgtcagactgactgaactccaatcgccatggtacagtaccgggatcggatcagaacgccagcgtcagaaagatctcgccgccgacgactccccgccgtgattcgtgctgtcgctgccagaactc

SEQ ID NO: 134324 - DNA, 288 bp, Zea Mays
tcttaggttgcgaagacaaaagcagaagacaagtgcaaatggcagggtaaagaacctttgtcggcccctctcccgggtatataaaggcccgggcgaaatccacccaaaacttcgctcgaacccttcgtgaatttcaaacttgaaggcaaaatggtttttccgtcctcgaacgactcgctcacgcgcaacagataccccgcgagtcgcccgtcctgtcgcattaactccctggcaggacacacgtctcctttgacaagcgggcgggcgccgtttcgcctccgtcatgat

SEQ ID NO: 134325 - DNA, 627 bp, Zea Mays
agggaataaaaaatagtccctagaaaccaaacacccctttacacaatgactaatgtcgggtgccgcgctaggactcctgcatgtatgcatgcatgccgcaagcctggccaacctagctcaaggaaacacacgcatgcagcagtgatggacgctttagcttctccagttgagttaatgcacataaagatcaaagcaacacacttacaaacctaataaaaatggaatcatgatgttgtatcgcttaataaaatggattggagggaatgtcatttgagctcagtatcccatgttaaaaaatttctatggcaaaatagattgtcaacgtccaagaaaggtcatacttctgaataccagcaatatgtcttctgaagatcccaccagcaaaagaaaacccaaagtagttccgactcatatcaacctcataaccctagaccctgtgccccaaggggccatgcccagcttcgactaagtctggagccctccaagccaggggacctggtcctggggcccttctagcctccggtgccctcaaggccagagggccggccggccaggtatcgaggccctcttggtacccagggccctcctagtctctagtgtcatgccactataaatctttcatgtgct

SEQ ID NO: 134326 - DNA, 680 bp, Zea Mays
cttggatatgagtgcaacgatatacgagaatatggctggggaaatctatttgttgctaatgtgtttgacataattgtttcggtgtaattcatgtgataaaaaattaggcatgtgaatttttgctaatgcatgcaccatattctctataccctaggtgatacttttaatccgattatcaaaaaaaattaatagattgaatatcattggttgacttggcatcacataccgtggggagctgctgcaacacggctgacatgtaaccgacatttatttccctctcctggacgatgttctagttgcgatctaccctgaagtgcgagaagtaccacttcttcgccaccttgagtacctgatcttagtgtcactggagcttcgcatccagcttcatgtcatcttctatttttatgctcagcgtccaacaaattagtcagacttgtgtcactgtttggagaaacaccgttgagatctttagaatcggccatataagcctaattttgtagatctgcaaccttcgtccccagtggagtcgccaaaaagtgtgttgtcaccgatttggacgccaaacaatgagagatgaaccacctggtggtgccctctatggtggcgtggatggttcatggctttgggtcagatgacccgcgacctgggtgtaggatcgacgcctttcctgcacgctttcg

SEQ ID NO: 134327 - DNA, 373 bp, Zea Mays
ccccaagctggaccgagtcccccacagatcaggaggtagccgaggcaggtgctttgctggctgaagttggattgctgaaggagaggggtctgattgctgaagttgttgttactgattttgtcttcaagaatatttagccgttgaaagacagggcgtacccggcttatctgtatcgaggcctagccgactcaactcgggttaccaacagaagaattccctctacagacttggtgaaccgacttgagatgatccttagaggcaaggtgtcaaatgttggtgccccagtggcatactcggcctggaacctgcctcctcccaaagccttcaccctttttgtgtcgaatccacctgttactgatggcagtttgggcct

SEQ ID NO: 134328 - DNA, 810 bp, Zea Mays
agcaggcactgaaggcccagcatcggtttcagcctcaattactacagcctcgacttctacttgcttagtatcagcttcggtttgcgccttggaagcttcggcaactttccctgtaggagcaggattcaaggctttggctgtttctagcacatccagtacatttaccattctcctactcttaggagttacaacagaacccatttgtaccttcggtactgttgcctttactggagggctcaaaacctctggcatcttcattatttcttcaatttctggcttttcagtcttatcaaccttcatttcaaccaccttgactgtaggcaccttcggcattacagctggcttttcaatattctgtgtaggtggggcagtttcttttgcttccatagcagaagatgtccctgcgccaaactcaggaaccacgaccggttcaatgtaacgcgaccggtgggtaagaaccttcaactttttgcccttcgacactggcttatctgggatgtccggagcagaagttttcctctttttctcttgtccccgcagcgggtagcgttagtcagggtatacgaagccgatggcgtcgaaaactctgtttaatcttttctttctccggccaccaaaggctgcggacaaggcattgtcctcggttttggagtacaccccaagtaactcgtcgctagtagtttcaatgcacttcagccaatcatcatttggttcatcaaacttatctccaaacctgaaggtgtatttcagccggaccaaataacctttgctagaatcattgatggtttccttcggcatttcccagccttc

SEQ ID NO: 134329 - DNA, 302 bp, Zea Mays
ggcgatgggcgtaagaaaagcagtcttaaagtcagactctccagtcgttacatgccaagtggacaagtcaagtaaggcaaagaacccagccttagagaagtacctagatacggtccgaagaatggagtcctctttcgaagggttcacattgaaaaatatcccgaggctgaataatgagcatgctgacatattggcaaagtctaccacctaggggctccctcttccccccgaagtgttcttccaaatattgaaggcaccttcggtcgagttgatggaaagagccatcttaacggtatctccta

SEQ ID NO: 134330 - DNA, 684 bp, Zea Mays
gtcttggtcaacctatccacaatgacccaaatagaatcatggtgtctggatgtgtttggtaaacccacaataaaatccatgctaagatcctcccatttccaagatggtatgggaaggggctgtaaggtacccgctaccttcaaatgactgaccttgactctttggcaagtgtcgcattcagatatatacttagcaatttccctcttcattctggtccaccaatacaaaggtctgagatcatgatacatcttgttactgccggggtgcatggagaatttggaaaggtgagcttcatccaatattttctttctgagtttgggattcttaggaacaaccaatcggtctccaaaccatagaattcccttgctgtcctgacggaagcatttgtacttacccaccttctgttcgagcatttccttgatgacttgaacacctttatcaccaatctgggccatgattatctgctcatgcaaagtgggctccattgagatatatttcaaggtctctgaggaaacaacttccacgttcagcttgcataattcgtcacacggaggcgatcttggagtccatagttacacagttgcactgggccttccgacttaaggcatctgccacaacattggccttgcccggatggtaatgcacttctaaatcatagtctttgatcaattccaaccatcttct

SEQ ID NO: 134331 - DNA, 825 bp, Zea Mays
tccaaggtcaccacctcgcgatttgcgatccctttccaacaagatcaccggcaccaccacttgcattggaatcgtgtgagccacatggacatggaggaacagttgctgcacctggagcacttcatgcccagcagcccgggcttctttgacgtcggcagtggccacgaccccgcccacttcccgaacggcgggttattcgtcgagcaggtcggcgccaccgacgacggcgggtgggtggaggaactcatgcagctgggcgaggagctgttcggcggtccgggcgatggcggcatcatgggcgacgccgacgaccactaccagcagtggcagtgcgacgacgacgtcgacggcggctccccagacggcggtccgccaccgagcgtgtccttggacggcgacgacgcgagcccaggggagcaaggcgccggggagctcgcctccgagccgcaccgcgaggacggcgacgacgtgtcgggcgcgacgcggaagcggagggaccggtccaagaccatcgtgtcggagcggaagcggagggtccggatgaaggagaagctctacgagctcaggtcgctcgtccccaacatcacaaaggtgaggctagctccggtctggacttcggagttcggacgactgttcgctggggagctcggtcattcgattcatgtcgtccccctgcatgcatgtgcgcgccatgtgcagatggacaaggcgtccatcatcgccgacgcggtggtgtacgtgaagaacctccaggcgcacgccaggaagctgaaggacgaggtcgccacgctggaggcccggccgagatcgcctacccgacaggac

SEQ ID NO: 134332 - DNA, 776 bp, Zea Mays
gccgtgattcacgccgtcgttgggatttgtgttcgctggcggggagataacttcggtgaagtaaagatctcgcggggaggagtggataggatcacacatcagagcttatcaccgtgattctagtcactgcgacgtgggcggtctgcctgtgccgccgtggaaacgccggtgaccgccgccctccggccttgtgtcgcgtgtttaccctttccaccgcatcgccacgacttacccctgctcaccgttgatcgccggaacaactgccacgcctctggacacgtattcaccgtgcccagggttcttccctatctccggccgccgcacatcttcattcaaattagcggccaccgcccgctagcactataaattgaagcctcagcacgttccgctaggcagtcgtacatccagtgaaccaactctcagttccaatcgttccccgcagctccccaatttgggattacccctaaatcgatcgaagaacgccgcaaaactaagctcgtcgtggtcagcccaattcgggtcagctcctcccctctgctcccttgtttaagcattcgcatacgtctgtgatactcgccaacccatccaattgaactgtgtgaccaccaatcgccgggaacacgattgccaagccgccatgctcacggacactgtggccagagctccgtagttgatcataagcgaaattaagttaggggaaacgctgattggggcgtgaattcggtttcgaccgaagaagggcgtcagtcctttccccaatcgaccggcctgctagc

SEQ ID NO: 134333 - DNA, 1251 bp, Zea Mays
ttccgaatatatgatttaaggacgtcattcattaaggactgaaaggtggagggtgcgttcgtcaacccaaaatgcgacaaggaactcgaattttccgcggtgtgtgcggaaagccgtcttgctgatgtcatccgaatgcatgcaaacttgatgatattcgctgtgaggtcaagcttggtgaagaacctggcaccacggagttcatccaatagctcatccactactggaatgggaaacgaatcttttgctgtcttgctgttgagctcgcggtagtcgatgcagaacctccacgacccatctgccttccgtaccaggaggactggagaggagaatcccgatgaacactccctgatgatgccttgctgcagcatagcctcgcattgcttctcgatctcatctttcagcagttgcgggtaacgatacggtttcaccgcaatcagtgttgtacccgacagtactgtaatgcgatgatcatggcgtcgaggtgggaggccacgtggttcctcaaagatgtcggcgaaggagtcgagtagtgttgtcaggagatcacgagtgatggccaacatggagagctgctgctgggggccgcctatcccggaccagcggacgtcacgctccttgtgctagaacgccattgtgaggtcggcgaagttccacaggatcggccctagagtgcgaagccactgcactccgaggacgatgttgaagccctccaccgtgagggtgtaacaggagatgtcgaaggtgtcgttgttgatggagatgaccaccttgcgacacaccccagtgctggggacacgggacacggtcgccgttcgccacctccatggagaggtcgggtcggcgatccatcgtgagccccagcttgtccaccagtccctcctggatgaaggtgtgagtcgatcctgagtctaccaatccgaccagggagactccgttgatgatgactaagagtttcatcgtgttgcccacgttgatacccatcagggcatgcagggagatccctaattcttccggcgtggtctcctcgtcaaagttgtcgtccatctcgatgaggaaaacgcccttgcctgcgcacttgtggtccgtcgtttacttttcggtgcagtgatagcactctccattggcgtgcttggtcgccagttctttcgtgcgagggcgtggcacaccactgagtttcgatgtgatcgccggggatagggcctttgtagacagttggccgactggtggcgtggcttgagtgagccggcg

SEQ ID NO: 134334 - DNA, 931 bp, Zea Mays
agaagctttgtcaaagctttctattgccagcttgtagacaactgttgatcatcaaggtgaataaggccttgctgatatgttttaatgataaattccccgtgctgaagatacgaacgccagtggtcgaccgcaaataaaatggcgagacattccttctcatagatctataaacccaaatttcttggtccaagtgccttgctaatatatgcaattggatgtccttcctgctgcaacacaaccccaataccgcctccactagcatcagtctcaattaaaaaagttttctgaaaattaggaatagctagaaccggagcttgagccaaagcttgctttagaatatcaaaagacttttgagttttagtggtccagacaaacactgtgtccttcctcaaaagattagtaaggggtgtactgatgatgccaaaatgctgcacaaactttctataataaccgaccataccaagaaaactccagagttctttaacacaatttggaactggccaatcttgaattatttagacattgcgtggatctgtagatacacctcgtgcactgatcacatggcccaaaaattccaaaatatcttgagccatcagacactttgatcgcttgagatgtagctgatggtcactcagtatctgaaatactgctttcaagtgctgcacatgaagttccaggctaggactgtaaacaagcacatcgtccaaaaaacaactacacacttgtgcagtaatggggccaaaatatggttcatgaactcctaaaaagtagcaggtgctcccgttaacccaaatggcataacacgatattcaaaatggctcgaatgtgtctgaaaggctgttttcggctcatccccttctttaatccgtatctggtggtaccccgctctatgatcgagcttagaaaagataacagccccactcaactcatc

SEQ ID NO: 134335 - DNA, 414 bp, Zea Mays
cggagggaaacccaacaccccactgccacactcccctcccctcggctttgtccagtctccactttttttctcccagcaccaccagatcgcgggaaatgtccgtatagcctcagcaagaagcaagaagcaagaagcagtcgggaggcaatgggttgctgcatcagcaagaagtgcgacgagccgccgggcacggcggctggggaagtttcccggcgtcggtcggaggcgcgcgacccgccgccgcccccgccggaggaggagacggtgaaggaggtcctctcggagaccccgaaggccaagccgaggcccagtccgaggcgcgtggctgcgtcggcggggaaagaagcaggggagatgggggccaatgcgaagcttggcactgctagggcgaaggattgtggtggtggtggcggc

SEQ ID NO: 134336 - DNA, 569 bp, Zea Mays
gacgacataaattgtcacctctatgggaaggaccatttatagtagcagaagtcactcggccgggatcatatcgcctcactcagatggacggaacagaaattggggattcatggaacatagaacatctcaggaagttctacccgtagctacatctcagaagctattggggcgacgatgtaaattgagaaaagtatcatcaataaaaaaggtttcaaaggcactcactgtcaattagcatgcttacttaactcggggtgaccactatgccctactaacggagcaatcggcttaagtcggcaatgacttaagacggtgcggcatgctcatgcttacttaactcagggtgaccactatgccctactaacggagcaatcggcttaagtcggcaatgacttaagacggtgcgacatgctcatacttacttaactcggggtgaccactatgccctactaacgaagcaatcggcttaagtcagcaatgacttaagacggtgcgacatgctcatgcttacttaactcagggtgaccactatgccctactaacggagcaatcggcttaagtcggcaatg

SEQ ID NO: 134337 - DNA, 277 bp, Zea Mays
gtgacagtggtttgggccttagagtgcgaccctctcccgaagaggttgaggctttggttgtttcgcttggtgaaatcctcgatgacgagaggcaggttcattttgagatgcctttaaatccgagcgacgcagaaataagtgccatgctggacatgttggctgaggattcctctgattcggtccctactgaaacactagctgtagcacccatcccagagtctggaacaactttggacattcaaagatctgatagtattcgcccgaagcgtccttgccg

SEQ ID NO: 134338 - DNA, 341 bp, Zea Mays
ctcaattgtagcaggcgtaggaccatcaatgagctaatgacgattgctagcaatcacgcacccaaagaatatgtagtagaccccatctccaacgataaagtaaaaagtcacccaatcgtagggacaaaccatgtgaccttattgagcaaggggagaaatgacaccagcatcacaacctctcctagccatgtgacatgaagattgtcgctaccatcaacctcccaactcaggctccatgaccccaatgctccaccatgcagtccccgcgaccaacacaaatgacatgaccaaagagcttggtcgcgcatggagcctggctagttcaaaaaactcatgaacac

SEQ ID NO: 134339 - DNA, 496 bp, Zea Mays
cagaaatcggccgagaccctaagggactacatccgatgcttttagcaacaatgcaaccagctgaccaacattgcagacaccgatgttatcgacactttcatctcgaggaccaccaacaaaaccctcctgcacaagctgggacggaagagcccgcgaacgacaaaggagctttttgacattgcgaccatccatgcatcggggggaggacgcggtgggagccatcttcgatcaccgcaagcgaaaggctagacatgacaaagagtcggacgagggtgtcggcaactagctcaatgcaaaaggtagataaaactaatggcaatgagttgacgtgttgatagacgcgataagtaggatggaaagaaggcctccaatcgaggagaccaccgacgactttgagaatctccttgaagtcccatgttcgaaccatcggtactcagtccgacacacctataagaattgtgggttacataggaaattcctaagcaagaagatatcg

SEQ ID NO: 134340 - DNA, 330 bp, Zea Mays
ccaagggcaaataggtaaaatacaactataagattgagacgaaggagaaaagggttttttaaggacaggtataatataagcatcaaggtaatatatagaggtgacaagggttaagatgataatcgtgaaaagcataaccaaggataaagttaaggcaagacttgcgaaatggcgaagtggagaaaacaatcaagggtaagacaagtaaggttccaacagaagggttgaagtaaatattccttactgagggaagttataaggaaacaacgagatcaccaatgatgtgcaaaataaaataatcgctcatgaatcattaagaaacaagcgtgg

SEQ ID NO: 134341 - DNA, 543 bp, Zea Mays
taagggatcacacaaattgacagaactctaaaattgggttcgacttcataatggcatctggttttctttttcccattggataacctagcctatcacaactctccccgttcaccactttatcagatcccaacattaaaactttctgggatggacagtaacatgttgagtggatggaccttgttttcaccacctcttatgatgttgcaaatagaactcgatcctaacatgctgtaacaaataacaggcaagcatggctaaatgatatggcccttcactttatgggacagggtcctttctaacgttgggccactggacacgattgacacatcctatgacttctagttaccatggccatgagcatacatgacctattgcttatgaagaaacatgaattcatattggacacctcaactgccagttattctcaaccaatgatagatagtactgaaaaaaatactactcccaactaagcaagtactctctggtacgattgctctttttttttgggtattctattgcggcaacaaccactttacaatcagg

SEQ ID NO: 134342 - DNA, 424 bp, Zea Mays
gttagctacatacccgtcaaggaacattaacatcttgatccactctattacttccttcctctaggccttgcttaggacaaaatcggccttaggccttctccatctctttccactactaggtggcttcatctcttggtttggtttatcacataacactaccagatccactcttgcctttacattatcctttgacttatcagaaatgtccatgattgttgcccatagtgcttcgacaacattttattcagtgtccatcgcgctaatgttgtgtggaaggagaaggtcatcataataggggagccgagtcaagcctgacttatgggtccacatatgctgctcaccatatcccacaaaaccaccttctggattgaccacgagactgtctatctattgaggaacttcggcaccaatcatcattgcgggt

SEQ ID NO: 134343 - DNA, 910 bp, Zea Mays
gccccgttcttcgctagcggatcatgtccacccagtcaatttgaccgatttcaccaaattacaccattccacgcatccaaacgctcacattctcacccacacccaaaaacctaacctcccatccggccccaccatctctccctcagatccaggctcctagaaaccgcattccgcctgtcctcatgcactagtcctccaatctgtgcacctgcgtgtgctctgatccccatggcggcggcagccgatgacgttgccaacaatgctaggccaagggcgctgttgcagcaccactttgtgcccacgccaggggagtaccaacggtacaccgcttcgacgcacctacgccacaagcgaggagaccatctatacagcatgcgtcgcccaggatcccatcctgtttcccccacgaggaacaccgcccagccggactccattggacctagcatctgacggtgacgacctacatcctagctaggtgctcccccaagccgatggtgagggccctgcactcccccaagccgatggattgagagtgtatgtacattgctctccctatcttttgtttcaatcagatctgcatttttatgcaatttttttgatgcacttagacgcaaaacaagtttatgtgtactcaagtggatgggtgaatttgttgccaaattatcttaaaagttgccgcatccatgtcctagtggcgtgagatcataaacctctgcttgtagcgcatggacaagtagcagtgggatctagagacgatgaatagggaatatgctacttggaggacgaaccgtttattttgactggcaacatttttttaatgcaccattatttgtggtttcggtctagctaatatttgtcatccgaaaataacatatctacaaaaaaccactaatatattattaaatcattg

SEQ ID NO: 134344 - DNA, 537 bp, Zea Mays
ttcccactttacagagtacattattgtcctgatagcttttgaaatacagctagggataaaacttcctgaggtgttctatattccaggagttctcaatttctgtgccgtccatctgagtgagacgatatgatcctggccgagtgacttctgctactatgaagggtccttcccataagggcgataacttgtgtcgtccctcccccgttagaattcggcgaaggacgagatctcctactgagaaggatcgctgtcgtacggccttgtcgtgatagcgccttagagtctgctggtatcgtgctgattggattactgcattcagtcgttcttcctcgagtacattatcctagtggcttcagcttctgctatgctttcgaagatcagccttggtgccccgaacttgagatcggcgggtaacactgcctctgacccatagaccatgaagaaaggagtgtttccatgcagagcttggctaggctgggttcttaggctccagacgacatagggcaattcccttatccactttcccgcgaacttttc

SEQ ID NO: 134345 - DNA, 1128 bp, Zea Mays
ggagatagtagcactatcagcacataacttcgaattgaggtcaacgggagtgtagcatgacctacaatcgaccattctagcacgacctagaatatccaaaatatactatcgttgagagtcaagcaaactagaagcagtgtgttaagtatgcatacccagaaaatgatgaagtctgcccaatccttcatagaaaactcatgttgaagagttccaatgatgcgacaaaggagaggttggaggaggcgatcaacacgatctcattcacatagagcaggaggtacgtaacatcatgaccatgatgaaacagaaacaatgaagtatatgtcttagcctccacaaactcaagctgaagaagagccgtcgaagcgattgtaccaagcacgaagggcttgtttgattgttttaggctttcagctcatagagtgacctatttaggcgacagacggagtctggataagaaaaaacttcaaatgtatctagaggctgggcacgatagactttgaaagggtgccatgaaaaaaagtgttattcacatcgagctgatggactggccaattgtgggactgccagtgagaactgtttggacgataacaagcttgatgacgacactaaaagtcttgccgtaattaatgccaagatgttgagtgaaaccatgaaggacccaacatgctttatagcgctcaggtgaaccatcacccttgaacttgtgcttgaacacccacttgccaatcaccacattggagtgaggtggttgctgaacgagatcccaagtgtggttggcaagaagtgttgagaactcttgcatagctagacgatagttagggtcaacgataacaacacagtaagatcgcaggatgggcgacagaggagccgcctagaagagcaccaggagccgaaggctagactttgcatgcgtcttcgtggtgtgctgatttaccataggaactaccaacctgattggttgcccgcatggtctcgttctgagccactatatgcggttactttgtctgtgctcctgtttggttgcctgcacgcgggagacacaatctacatggacggatgcaacacaagccattttaagatcatttggatgcatttgtacatatgcccgaaacggccgtatgtggc

SEQ ID NO: 134346 - DNA, 556 bp, Zea Mays
ccgaaggaagcgcctcaaggatctcaatcgtggaacaagaatcggaatcttagctggagattgaagccaaatcttggcaaatctgacatcaaggaggacattgtgacttcttctggcgatgggggacaatcaggtattctcaaaactcctcctgctcctttgaaaaaagagattgagaatgtttgtcgtcctttttgtcaaaaatgcgggatggagagtcatcatgctagagattgtttcaagtctctgtggtgcgatatttgtcgcaaagaaactcatgtgactgctcgttgtgtccttcccaaacaaaacaagtcttgcatgcctattgttggtatggcagctgacgggttaggattttactcttcccattttgtgaaacccctatctagaaaaccaaaaaggagcttcatcagtttggtgaaggttgttgaggggctgatttctgctgaagaccttgagaaggattttggttttcattttccgtggggcaaaacttgaaaagcaaccaagtgccatgtcgggttcttgatgcaattcccttctcaagagaaac

SEQ ID NO: 134347 - DNA, 780 bp, Zea Mays
gcgggttgtttctctaaaattataaggggttttctgcgaagtggcatggcgaaggggtattgagtattaggagccgcccgatctaaatcttgcggttcagattaaattcagatgtatacgaatctgtatgcaatcaccaccctcagatcggagttcaaaggtctggattttatgcgcttgagcccatcccgaaccgtccgatcagaacaacagctccgatcgagttgcacagcggatgaaggtttagatctaatccgaccgtccattcgggaatcagtggtcatgaactcgaccccatcccctgaccacaagccacggcggcgcgtccagccacccggcgaccgagcacgccggtgacccccaactagtgattcggagcgctcataccacgattacccaaggctacgcgaaattgagagtgtggcggacccaggagagtgcttattaccggcaacggtgaggtgaaggagccgcaccacgacgcgaggcggaaggacggcacacaccctgctccgacgagcaattccgatggatcaggcgacgatctccaagcggtgtggccacgactacttttcctagggtctggaggagctcttagggacgattccgatgccttggacaatggtcagccaagttttccccggcggtgcttctgtcctttcggcgatggcgagctgcgagaaggtatggtggcgactagtagggcgagaaccacagaggggtagagatgcagtcgggtagggagtcgtggccttaaagcatggagttgcgcgtgccgcg

SEQ ID NO: 134348 - DNA, 941 bp, Zea Mays
gcgctaacgtcgctgccgcagtcagtgacttgccgaacccacgcgtctgtgactcacccccgtgccttgcgccactggctgtcacgcggggcccgcaagtcagcaactacctccgcggactccgctcgatggcgcaacagaatgcccaccacgactccccgggattgaccagctcgcgcccatctcccggagctctcgccaccactcgggccttatttagcaaccccgtgacccgttccttcctaacctctcgcatggacctttcccctgagcacaccgccaccgccacaaaccttcaccgcgtccgctcggaaaagtgctgtcgccggtgattcccttacgcactcgcgcgcgtatccgtacgtgtggtcaggtgcgttcgccgggaacccgtgaagctgctggagtcctcaattcgaactgcggagcctcggagcgacttggattgctcgccgcagttcgatctccgccgcgggaccacttcacgacgtggccaggtgtccctgcttcgccgccgtcggtaagaactccccataccgattcgcccatgcacctacatcgtgtagcatcagtttgatttgggaatagtgcgctgggggcttgaatcgcgcgctcgtcggcgatggcgccgccgtgttccgtctggtgcgccgccgactagttgggttagatggtgtgtttgccgggtgccgtaggatctgtgataggcggttgtgattactttcaccgtaacgattcggctagggagactcgggggcgtcggatcatgatcggacgcgtaggatctagctggggtattttaaatcggggccgcagatcaccgatccaacggctagcgtaacatgcgggttctgcatgatgatagaatcatatgcgccgtccggatctaatccaacggcccacatctacggataccccttcgcgatagcgttttgcataag

SEQ ID NO: 134349 - DNA, 492 bp, Zea Mays
cgccggttgcagttctcgtttgactcggtcttcaccttgtcggtccagtcgattgccaggtacctcctcttccttcgcatctgctgaccacaaagtagggttcttgggtcctagggtttttagttcttgtggaatattggaattcagtggtaaattatagagcacttaataggattgcttgctacagaagtatcaagtgtcagctttgtctcagcacctaatcagtaattgcccagtccaataaatagttgtaatattttgtgtttcacttctctgaccattgtttaaaattgttgggggcgcaagggatgacatatcaccctggaacaccgatacacgattttcttgcagaaacccatacaatactttcataacagatggttaaactccttgcatcttttttcccttttaggttggagggatccgttggacatggcatggcctgatgtattggacacacttttcgtggatgcgtgtttcaaagaggttgag

SEQ ID NO: 134350 - DNA, 301 bp, Zea Mays
tgcgagtgttgggcataggtggcgaagggcggtggcgaaatggagggtgagtgggcgtcatcgtggtgagggggaaggtggtcgccttcatgtagacggggctggcaagcgggaattgttgtccttgccggctggggtgagtgtgggtgagggggagctgcgaagtctgtttgcgggtgaagaattaaggataatgttgttcaactatagggagatgggtatcatcccgaaggttgagccaatgtaatgtgtgatgccctcgctgtatgtatgtaaccatactcttgtgtgatgaagctgc

SEQ ID NO: 134351 - DNA, 833 bp, Zea Mays
catggatataaagagcttcttctaccttggtcactcccacggatgaacacccgtagctacaggcggcgaaacttagtgtctttgtaggcgctgccatcacccacaccaggtagagagtagggaagggcgcgctggaggttcggcacttggggaggacgccgtggacagagcaagagaccaagctagggttctgtggccatgggaacatggtggagccatggaggtacggatgtcgtgccgaggcgatgaccggcgactgcagatgtgcctagggcatggcgcagtgtgcagtaggagaataaatgggcgctggtgtacagagggacagggtggcagccatggctaggagagagggcgccatgggtggctgcatcgggttccagcaatggggaaaacctcccagcaccatggacccgagggggatgaaggcgctactgctcaaaagcttggggagggagtttggggaggccaagggtgtccatttgtaggcgagggagcataagagcttggacatgtggcggtaatggaggtagcaagctctgtgcattggtgggcatgggtggctgctaggcaatgttgttttccttttggacgaagcaacgaacacacattgggcgcccatttttgtcattttctcttgggaatcggatctggattactgtaggagattgtaacaccccaggtgttactgtacgctttacgacaaatatggtcgactgcccaaaatatttcacgaagctcggactttagtgaccttcaaaaatgccaagtccggtgctgtttagattggttatgagcgtaaatgcgacttcggaagaatagctcgagtttgg

SEQ ID NO: 134352 - DNA, 683 bp, Zea Mays
gtgtttggtttcatgttaaagcaggatgaggcgggacggcaccattccctcaattttttttatcatgtcaccactaaaaattgctccggtattaatctcgtccctgtgtgactctcattctaacactatataaaatatgaccgtcatcttctatccctcgttatacgtccaaccaaacacacatttaataccaatcggctccacaaccaaacagtgtccactctccatgtgacttcttaccatagcaaccgctctcctcttcttcctctctccccggcatgtgatccctctctataccagtcatgtgcttgctccctccacttcgtctggtccgcctccaaaaccagtgtggacctcatttctcacaaagattggtgctccagcagcatacgccatcatcggaggtaatggaccacgacatcagcatgacagctgggccaccgctgagcagctcactgctctgctccacctacaacgttgtcgccggtcacatgacacatcctcctgctcctccttgtctcccgcatgtggtgacacttccacggccaagcctccacctctggccactcctcccgccacacgctgttggttgcaaacgtcgttatcgactgggactcattcatcgcctcttcgtggccgatctcgtcgatcgaaccgagtccttctccaccatcgttgaccgc

SEQ ID NO: 134353 - DNA, 755 bp, Zea Mays
gggggtgcgagtttggagatgcgccgtgggaggaaaaccgagtacctcgacatcccactcaaggacagcatcaaaggatggcgcctggaatggtttatcgtggagaatcacaggaattctctcccccacggtcagggagacagccagatgtccgcactccaagttggactgaatcccccacagacctggaggtagctgaggccggggctctgcttgttgaggttggattgttgaaggagaggggtctgactgcagaggctgtcgttgccgattttgttttcaagaatattcagccactaaaagacagagcatacccagcttatatgtatcgaggcctcgctgattcaacccgggttaccaacagaaggattcctgttgtggatttggtgagccggctcgagatgatactcagaggtaaggtgtcgaatatcggtgctcctgttgcatactcagcctggaatctacctctttccaaggcctttatcagttttgtgtcaaatcctcctgctggtgatagcggtttgggccttagagtgcgaccttctcccgaagaggttgatgctttggttgcctcacttggtgaaatccctgacgacgagaaacaagttcatttcgaggtacctttgaatccaagtgacgcagagataagtgccatgctggacatgttggctgaagattcctctgatgcagcccctgctgaaacactggctgtagcacccatcccagagtctggcaaagctttagatactcagagg

SEQ ID NO: 134354 - DNA, 276 bp, Zea Mays
gcaacaattcccctggcacctgagaaggcgcagagatctccatggccgctcaaaacttcctcaaaggcttcggcttcgccgttgatccattcgattggaccttcgggatcgcctagtacgaagttgtcctcatttgaatatgcgccgatattggcgaaactggtttttatcttttgtacacatgccacagatttttcatagcatctttctttcgaagaacgaagctccacagctgtttttccccagtgttttttccagtagtcactggcgtctcgg

SEQ ID NO: 134355 - DNA, 310 bp, Zea Mays
gtcgcctaagggtgcagccggagtagcacaacaagtgcgaaaaatcgaagtcttccacgaagactatccgcgcagaagtcgcctaagggtgcagccggactagcacaacaagtgcgaaaaatcgaagtcttccacgaagactatccacacagaagtcgcctaagggtgcagccggattagcataacaagtgcgagacatcgaaatcttccgcgagggctatccgcgcagaagccgctcaagggtgccgccggattagcactacaaatacgaaaaatcgaggtcttccacgaagactacccgtgcaacaat

SEQ ID NO: 134356 - DNA, 410 bp, Zea Mays
gtcactgccacggtgaaagctacttttcccccgcacagagctcgtctctcctccggccgccagcactgttcggccgaattcgtcaccgccgctcgctacgtctataaattgaccccgtcgcgagctccgtagggtagtaagctgtccagccaccacgaatcagcctcggtcattctctagaatccacgaatttggaattctccccaaactggtttccgccaccgcaaaactcagctcgccgcggccagctcaactcaggtcagtccaagtccctctgttgcttgttctagcgtccctagtccctcctaaagctcttagacccgcccaattgaactagaccgccacccatcgccgagaacgcttgtggtcatccgcctcacccgcggtcaccgtggtcagggcgtctctgt

SEQ ID NO: 134357 - DNA, 764 bp, Zea Mays
cttgtttatccctttttccgcggtctccttgacttctacgatttaaatcttacacatttaaatcccaactccattcttcaagttgccattttcgtacacctatgcgaggcctttcttagaattctcccccactttggactctagaggtacctttaccactgtcggcccggtatggctgaaggacaacatcagcttgtcggtggtgccagtttggaacttcgccgggggagaaaagtggaataccttgacatccccctcaaggacagcatcaagggatggctcctcaagtggttcaccatggagaattacaacaaatccctccccctcgatcaggaaggcaacccgacgtttgcatgcccagctgggtagagtcccccacttattcagaggtagccgaagccaaagtgctgcttgctgaaggacagaggcctgactgctgaagccgtggttgctgattttgtcttcaagaacatccaacctctgaagggcagagtctaccctgcttacttgtacactggcatcaacgattctacccaagtcactaacaggcaaattcccaatgaggacctgctaagccgacttgatatgatactgaggggtagggtttcgaatgttggtgcccccttatcttattctgcatggaacctgcctccgcatagtcccttctctgattttgtctccaatcctcccgcgctcaagatggtagcccgggccatagagtgcgaccctcctcagaggacattgaggccttaattgctcccctc

SEQ ID NO: 134358 - DNA, 719 bp, Zea Mays
cgtggccacgctgtccctcggttccccgcgccggcgacgtggccttatggccatcaccggaattcgcgatattcaccacggttgcaccacgcctccggcctttaaccgcaccgccatgattcatgttagccatccgatcatcgtcggtgagttcgccacggtattctccatgaatcaactgcgcgagtaaccttcttcttctccggccaccgctcgtctcaatccaaattcaccggccaccgctcaagcctgctataaattgccgaccccgcctactccgctatgtaattgtgcaaccagtgaagcaaaccgtgcctcgaatcctccactagagctcactaatttctcatttcccccaaaccttctttctgtcgccgtggtatagccctcaccgtggtcaacgaatcccaggtctattcatgctccctactgtcttgtttcaacatccgtggatcctcctgatgctccccgacccggctaattggactaggacccatagaccaacgggaacgcgcttgattgtctgtagtactcgttgtcaccgtggacagtgcgtgttagagtgtcattagtaaaattggttgagaggaaaccctcgttaggtcttgaattcggtctctgccaaagtagggcgccggtcatcgagtaaatcagccggtgtaagctcgccggagctcggcccagcgccgttcgccgtcggggactgcaagctgtgaaga

SEQ ID NO: 134359 - DNA, 1618 bp, Zea Mays
acatgcgagccaacacagtccatatcagaatggaatgaaatgttagtaaaatagaacctaacctgacatgttttccctcaagtaacctcatgtttttaatcgtgtcatcgtcttcacaagttacaaatacaactttctcctggaaacatatgtaagtagcattctttttttcttttccaaaaaaatgcagtggaattcattaaaaacgaaacagtatttaaataaaatgaggcttttggtacgaacttgacgagctctaacaccaagatgtgataggtgaggtaattcttgtagaagaacaacgcccactatgttatccccagcagctttgacctgtcaaatgaggagccaaggctttgtgatatcatgaagttatcaagacaagaataacaaaccaagaatttaattgtttatagatacctcttcatctccatctgccttgtttacaactagcacgacaggttctttcatggatgacggcaatgatccaggagctattctttcaacctgataatgtttacaaataacccaatagatggtaatgtttacaatgtatataaacctatctagggtttcccctaaccctaacaggatatacatgggttgggccctagtcccataacactcccagccacacatggctaatacacagtctaaggctcccatagtcaaaactctagccacgacagatattgagattgtaccaaaactccgagaacaccaaggatggaaaatcccatggtgaagatgtcagcaaactgtgaggtcatcaggatgtggaggacacgaacgtcctcgaccgccacaggctcacagacgaaatgaagatccatatcaacatgctttgtgtgtgggttttggactgggttgatggagaggtagacgattctgatgttgtcgcaatagatgagtatgctcctggtaagtgggttgtgaagctccttaggagctgacggagccaacacacctcaacaacaccattggggatggtgtggtactcaacttcgacgctgtagcgggggaccatgggctgacgcttgaaggtccaggagatgaggttatccccaaggaatgcgtacacgataaaatgaatcaaaatcaataaacgtccaagaaagacctagacagaaaagttggagtgcctgagtgccaaataacaaaaggcaagcgaattgagtccctaaagaactcaggcagacgaattgaaacccaaataatgaaatttctcagttctaggtatcaatggagatgttggacacttagattagtgatagaacttctattttcttttagttgtactgtaaagaggggcatgagattctcctacgctttcgagaaaaaaaagggcatgagttgggtaacttgacatagtcaagtttagttaggtgtggtgatgtacaatacaattgcataaaactagtgctagataacccaagagaacccacaaaaattttggaggaaaaaccaaatcaaataacaaacaaaaaccatgtttcacagagtctgcagtagcactgaaaatgtttggtactccaccagatgctgcattggatacgagtttggccttgtgctaaatctaagttgcactggcacgatcagtgtgcaccggatgaacaac

SEQ ID NO: 134360 - DNA, 484 bp, Zea Mays
ggggtctggcactttcgtccatacaatgcttcgaacggtgacatcttgatactggcctgatgactgttgttatatgagaattcagcatacggcaaactggactcccagtttctgtcaaacgtcaacacacaggctcttaataaatcctcgaggaccttgttgaccctttccgtttgaccatctgactaggggtgataggcggtgctgaaatctaacttggtgcccatagcttgctgaaggctcttccaaaattttgaagtgaactgcgttcctctatctgatactatcttccgaggaataccatggagcctgactatctctttaagatatatccgggcaagggtggctcctccaaaagtggttttcactggaatgaagtgggccaccttggtgagacggtctattattacccagatagagtcattccctttttgtgtccggggcagtccgcttacaaaatccatgcctatttcctcccacttcc

SEQ ID NO: 134361 - DNA, 360 bp, Zea Mays
accatggcaagacttacgagaggctggatcgacgattgtcccagatcatcgacaggcttgctgtgttggagacgcaacaacaagcaccgccaccgccaccaccacctcctcgtccacgtcttcccgatgatgggtgtttgatgaagaaggtaattatgatgaagcggccactagagatttgcacctacattgccatcttcatcaaaacatagaaggtatgccacactgccagcaaggtaataacaatcgtgctcctgacgacccttatgctaagattaaattttctataccatcttttcgggtcattatgatgctgagggatatcttgattgggagatgacgatagaacagaaatttgct

SEQ ID NO: 134362 - DNA, 329 bp, Zea Mays
agagagcgttgaaattactacatgctctagatcagagggtttgggaggtgaaggtctcggcgatcatcgagttgcccaactacgagactctcactgtggacgagctcttcagcaaccttaagtccatagagattgaccaccagactcgagccaagattgagaatcttggtgcacccaccatggccctggtttctagatgtggttctgcttctaacccctcacctactatatttcctttatcttctttgttgtctatcatagagaagtaggtggagagccttggagatgacgagctggcacttgtggccagccagttcacttggttccac

SEQ ID NO: 134363 - DNA, 547 bp, Zea Mays
attgtccttctgggctactctttttgctcggtttgggtgcttccccgcacatggcaggctctcggccacgtgcgtgtcgacacgtgcggtaggggcttcgggcccaaaattttcttcgattcaacaaaacctacgtggctgcgttacccgcggtccgcgcttccttgtcagactctgtctaacccacgaccaccaccatttagattctcacgccgtccttccctccacgtcgctgcctcctcctcccgacctcgccgccgtcgccagtgctgggccgggttcgcgcgcgccattgccctttatgtcctcgtttccagcgacaacactgctcaccgatgagcgcgtcttcctcttcgtggccccgacacacctcgccacgtcgctcacgatcctcgtggtggccgcactcgtcgttgagctcaccgtggacggcttcggctccgccttgcttcgccactttgggactaggtgcgggcgggctgcgccccttccctctccctctctcgtccgatgtcgtctctcccgtatagccggtttttcccttctt

SEQ ID NO: 134364 - DNA, 677 bp, Zea Mays
gaggacagaacacagcaaccagtttgtaaaattcataactcttaaactatcaggcctatggttatgaaattttaacacaagcaagatcagaaaagcatctacaactttcttataacgatcatgaacagattgtaacattaaattaggcaaacaatacagtttctgaaatctgtacagaatttggacagattcagttactgaatttgttaaaagcataacttctaaactgtcagacctatgactgtcaaattttaacaccagcaagataataaagttatctaccatttttctatagcacatatctacagaaaacacaatttagttcatcaaacatacagcacgacaaaaacagcgcgtgcagcccaaaacagtaattaataaaattcagcttctatttacttcaaaaatcgccgcgttctagagactcgacttattctaacttatatctaggcacatttaagcatagtcacacaatagatgacgtgatggctacgtagtcatgccatcacttcaccccacaatcccaagtaacaaaatcactctaaccgaacttggcatttagccgatcggttcctaacccatttttcataccaccgctacacgacatgcctaaaacgttaaatgactcgttcacaattcacatacatctttaccaaaatattcccacatcgcttgca

SEQ ID NO: 134365 - DNA, 844 bp, Zea Mays
gcgacatgctcacgcttacacgaccaagggtgatcactacaccctactaacggagcaatcggcttaagtcaaaaaacaccttaagtcagtgcgacatgctcacgcttacatgacttagggtgatcactataccctactaacggagcaatcggcttaagtcggaaacgctttaagttggtgtgtcatgctcacgcttacatgacttagggtgattattataccctactaacggagcaatcggcttaagtcggaaacgccttaagtcggtgcgacatgctcacacttacacgactcggggtgatgactataccctactaacagagcaatcggcttaagtcgaatacgccttaagtggtgcgacatgctcatgcttacataattaggggtcattactataccctactaacgaaacagacagctcaagtcaggaacgcctcaaagcaatataacatgcttacatatttgagggtgatcttaacaccctgctaatggaacatttggtccaagcatagcgtgatcacacgcacgtgaattccatgatacactgtctcgctaaaaatactaactcaatgaaaagtatttctcatccgaacaaatcactaagcgggagcatttttgcaaggaacttctccagaaggattaccaaagtaagaaggtttgttcacaccagcagatacacccagaactcagcaacgatgtcctcagcaccacaacaccaggtcttctcatcaggattcgcccggcacgaacagtcttgtccatcgctttgtcacacattgctttcataaacaacacggtcatcctctaagtccttaatgttgtgatgagcgacttccaactcttg

SEQ ID NO: 134366 - DNA, 550 bp, Zea Mays
cgcgtccaactccttctcgtcggcctcggcggggtcgtcgtctcccgagagcaactgcagcggtgggcctccgccgccggtggcgccgcatgcgcttccttcttttcacatgagccccttctgcatgtaggcagctagctgcacggctgcaccactgatcgacaggagcaaggggcatagttgtcattagtgctagcttaagtacccaataatttctgcggcgatgtcttgtaaagactttgcacccttgcttggagcctttggacgcttgggggcccgtatgtaaattgttttggtacgccatgcagcatgctgatcgatgcggcccagcaagtcgagagtgcgtcggtgattagtactacgtcatcagtgctgcgctggctttatttgtctgactaaaataagtgggcaaataaagactattgggggcatgcatgcatatatgcgtactacactggagtctggacaggcacatgcatgcatgccactgatcagaacttagtagtatatcgtcatcggtgcagcagctagctaacttgtggtcagatct

SEQ ID NO: 134367 - DNA, 478 bp, Zea Mays
gaaaggagtagctgccgccatggatgaagctaatcaggctccagccgtggagtccttctactgcgctgagaaccggtaatgataactggaccttccttatgtcacgtggctagctttccgtagcgactccttgcactcgattccgttcacgggatcgcctagacaattgcccgccgtgagcgccaccatgggtcagcccgccactgcgggagctcacgctctgtcgctgctgattgacgggaggtggaagaaggtatccctggccgttggatcggcagcaatggtccatattagaggtggaatgccggtttgggttgatggagcctaggccgtctgatccgaatcgaacgcgtgagaatcgatttagaagttttaaaatccagggcgttaattatggatccggcggccaagatttcatgttgggtcgaattaatctgcaccataggttggtaatccaatggctgtggcgccacgatac

SEQ ID NO: 134368 - DNA, 424 bp, Zea Mays
tagaaatgggggcggtgccaggaagaagctctatggcaaactcaactttctgctcaggtgacatacccggtaagtctttcgggaacacatccggaaactctgacacaaccttgatagtctcgagtgaatctgcctccttgttattaatagccatatgatgacaacctcctttccttggctcaggtgatactaactcagctaccacttcttctcctagtggggacaccaacttaattgtcctcttatcacaactaataattgcttggtacttatctagccaattcatccctaggatgacatatattccctgagtacccatgactatgagattagcgggaaactctatcccccttatttccacacttacattcaagcaaacactatcagctcgaactctaccaccgactgaatcaatttgaatggg

SEQ ID NO: 134369 - DNA, 368 bp, Zea Mays
ggggaagctagcaagccggcgcggtaccgtggttctggactgagattgccgtctggaacagtgggtggcttcgtggatgacctatggaagtcggagttggtgatgctgtcgaccgccgtggaggagccgagccaccagcgaggggcagacaacatgggctcgcgacggaccgtggagggaggcaggaagcagggcacatggccataggttgtgaggaggttgccgactgccaagctcgctggttgctagatccatggagggcgcgcagcggccgtcgagctcatcgtagtgggcaccggcgaccgaccgtcgcctcgatcctcgagcaagcagtagcacgagaacgccgccgccacgccaggttaagg

SEQ ID NO: 134370 - DNA, 279 bp, Zea Mays
ccaggccgacagtggtaaagatacctccagagtccaaagtgggggagaattccaagaaaggcctcacacaagtgtacgaagatggcaacttgaagaatggaattgggatttaaatgtataaaatttaaatcgtaaaagtcaaggagaccgcggaaaaagggagaaacaggaagagcaagtctgcggatgaggaacaacacataaacaacggcctcatgggtgtcctctgtcggaacagtgacctcgcgtcagatttgccaagaacacagttctttcaac

SEQ ID NO: 134371 - DNA, 386 bp, Zea Mays
cgatgcaggccatgcagcaggagttggccattctgaggcaagctattcctgttgcctctgcgggtgctgttcaaggtgctggtggtggaggagtgcccgggggcgctgtacctgcgggtgctgctccaggtggcggggccgaggtgcctcttccagtcagtggtctttctctgatgcagtggatggacatgaagttggatacttttgatggcagtggtactccagtcgaggcggcggattggctaacttacgtggaggataagatgaatgtcttcgagattgcgtatggtgatcgtgttcactttggcacacaactgctgaagggagaagctcagatttggtggaggggcgtgcaggcagctcactcctcttcaccagaagtcctg

SEQ ID NO: 134372 - DNA, 927 bp, Zea Mays
cctaaagcgttggtgcctagagtataacgttgtggagagcgatgtcgcgtacgatcttgtggttgtaatggttgtgtcgaaggagccccctgaagctgtgaaggtcctatctcgtcgtgatcgtagtcgaagccagcacccattcctgtggagggcgttgctgtgtcggtacacgatggtacatggacgtcatgtgcaacattagtcctgcagccacagtgagcagcagctccacgtaggcgcctagataaacgctgcatgccaaagacatattagtttacaacatattcataacaagctaaaggctataaacgatgcatgtgggcttacctgcaagaagttgcgcatgctgctgtcgcccacagtcaaaagttggcgatcaatgtcctctaccgaccgtcgcaatgtgttacccttacaacacaatttgcatcaaacatacaatttatacatgtcgagtattaaaattgagtaaaacttaccactcgatctaatatgggtgccgcctccacttgggttcccaatctagtggacaggtcgtacttcgtttcttcatcatcagaagaatcaatgtcggtgtagtcttccgctgtccactgctggcgaagcttacaacgagtcgcaccctggtaccaagcttggtaccgcctgtagtaactgttgttgtgcaactcatcgttggaatatacattctcagcacccaaatcccattcattcataaatatcagatgatgttgacgaaagtccgttatcttcttttgcttccgctggtcaaatctacacacaaatcatatcatataaagaacacaaagttatgaatgattgatgttataaattgcaaactggatttatagattgcaaacttacttgtgtagctccttagaagtaggaatatcttcaaccgaccatatctggttcctaccaaac

SEQ ID NO: 134373 - DNA, 429 bp, Zea Mays
aggggaaagcgcgcgcccgcgcccgtgctgaagactttgcacggagatccctggctttttgaataaccagaagcgggaccgaatcactatttaaacgagtcactgacgtattacaaagaaacccctcacgttctaatccttcgcagaccaaggtccacgacggggaacaacccttgccgaactccggcgagcctattccggccggatgccgccacgactggagctctcgtgcgacagagacccaattagacccccaccgtacacttcccctcaatcaatttcatcatccggaccacgaatcaaccagtccacgatgacagggcggatgatcggaggggtgaacacgttccgaccaactgacggcgtggatgaccgaattgaagcttggggaagcttcacgggtttaccagaggtgacgcacacaccagg

SEQ ID NO: 134374 - DNA, 375 bp, Zea Mays
aacacacggggcaaggactggtgcaatggatgcgtaattatcctacgaagctgcgggtgcactcaatttatacaaggcttgagcggtggccagtgaatttgagttgggcgcggtggcgatcggagaaagaatgagtcactggtgcggtgattcgtggccttcaccgtggcggcctcaccggcgacgaaccagtagcagagagtggcttacggtgactcactacgacatggtaaaacgttgaggcacgcagcctggccagataacggtgacttcggtgatgccagcgcgactaaccatggcgggacacggcgactggtccggccagcgaccggattcaccccgcgctggatattctcaccacacccgacgttatcc

SEQ ID NO: 134375 - DNA, 460 bp, Zea Mays
aaggataaaaactgtggtctgtgttacctacgcgacaatctctggtgagaacattactaactggatcgtagtagacatctcgttgtttctgcccaagcatgtagaggatagcgctgtggggagtactcggcggctatggcgccaccgcacggggggtgcgctctgcctgtgagtcagccggggtggagatgacgaccgggtatcgttaatttggtgatcaacggtggagatgggattgggggtaccgttttgcgatgcagtgatccttaccgttgatcaaccaatggagggatcagtgctgatcgcggcacgggcgtagcgtaccggttcatgaaagttcataagttaatccgatccgttgaactctaatcggatggctcacgatggccgataccccttcggccgtgacaaattcttaaagagcccctgtccttttatcaaatcaaccctccgtcctgat

SEQ ID NO: 134376 - DNA, 548 bp, Zea Mays
attttccacgacagcaaaaatctcctcggccatatccgtgaatcaatagacaagggaagaattgggacaacacacattcacacgagcacacactgctagaacccagccgaggatcaccgtacgctttgctccgctcatctcctcctccgcggagcaattccgtcgaacgcctcgcgcgcgcacgcgctctcgcaccgccctcggcctttgtcccatcgaatgccgtagcgctgtggacgggcgcgcgcggcggtgcctgccatggcttcgctctgccccttatcagccgcgcccgctttcccgcgcgctgctcgacctcgtgccgcaagcttcaggggacccgcttcctggagcggcctcgcggcgaccgcgagcaatgcctgtgtctgtagctgtggacttctgcccactggaggctacgcgaggctgcggtcgcgactaaggagtcccgtgcgcgccaagatcgacgaggcggacaagggcacgggcgccggtctgggcttcccctcgccacgccgtaggaagctacgcttgcgcctgcgaccacg

SEQ ID NO: 134377 - DNA, 805 bp, Zea Mays
tgggtggagggggaattctgattgaaatgatgtccatgctgggtgcgacgaatgccgagatagctccggacaaaaggaatttcctggcccaatcaaacgaatctggcctcattaaaaggcccatgaagaaagcagcccaaatctttggaacaaaaactgagccatcattgtcagggaacaaatcagcccaagaggaggaacgctttctggccaagaaatcttcaagcgcagggtcagggacggtttgatccaagtgtaacatgaggcccacattgatgttatcttcagtttgcatgtcgtcctgtccctcgacattatttccctccaaatttaagttggcaggagggaaagcaggcagggcgagaaccgcttcagccggcgccggggcttcctcctgctggagctggactccctgagggataatgatgtcgttaaaatagcccaccgaatcgtcagaagggagatcctcaagacctgaaagctggtagctgaactgctcttcttcattgttcgcagcgttaacattatttggtacaacctctggcacagggggttgagcctgctcaacaggccaagggtcccagccatcatcagcattggcagcaacattttcctcagcattgattccatcttcaggaggaatattgaggtcgaactgaaaatggaagttgggcatcggttgtcccataccaaaaaactcaaccgggagctggtgaccatcatgggggtatggaggcacggggtcctcatcctgaggttgggcgccaagcatgaactgttgcacaatgtcacattgaaccgtcca

SEQ ID NO: 134378 - DNA, 337 bp, Zea Mays
ctaaccctaagaggctataatggaccgccaggaggggatagcgggaaacaccatgtcggtgaggacatggtcattgagggtgtagcggtgggcaaggtcgcactagcaggcgtaggaggaagaagccgagtcgagaagaacgggaaccagtgaccagatattctagacatccgtcgcttgggccatggaggttgatgatcacgacagcctcatatgctcaaccgtcgggaaagttgggggtggatcaacacaggaaggaccaccgagatggtgctcggcctcaacaagctaacctgcgagggcatccacaactgtacgttcctactcccaaacgagg

SEQ ID NO: 134379 - DNA, 406 bp, Zea Mays
cggccacggtggggctctaggggcttggggaaagacttgagtgtgttcatggcgacatggcaaactcgactgtgggcacaacgccggcgcgggggccatagaaggcgcagaacacggtggggtggcccaacggtggcgcggacctactccggcgagcaatcgcgtgaagaccagggtagtaaacagagaaacaggggcacagggaggttgctcacctcgagaggaaacactagagcaccggggaaacggcggggacacagggacgccttgggtcgacggtggcagagctccgactgcacggggagaactccggtgagcgcggaccgggcgaaccagaggggttagggcgaaccgaggggtgtcccgggctgttgacgacaaggtggaactcagcgaggcaacgagc

SEQ ID NO: 134380 - DNA, 468 bp, Zea Mays
ctcaggatcgatgatgcccgccgctcctcctcccaccctctcgtcggtctcctcgcgctctcgtctttcttccccacacaccgacccgtgaccctatggctagctagctagtgcgccatcgaggaaaaaggcgaatcggcttcacctagcattccctgtgccctcccttgaccaaagaaaaccctaaatccgtcccctccctcaatccctttcctctgctcagcaagatcgtgggccactactggggaaaaccacacaagttctttgcaagtgtggtcaagtcctaccgtgctccgattgtcttattaaagatacaaccaaggggtgctggcaggcgtggtggtgtgggagttcatggatatgggtgtaggacggcgagagataatgtttggcgaagggtcgttgaagactccacaagcgctcagaagaaagaaactgaacatcctgaagatggagatcagaaggatg

SEQ ID NO: 134381 - DNA, 540 bp, Zea Mays
gggggtgttccggtacctgggagagtgtctggagcttccccgtgtgggcgcaaacgtggtagcgtcaacctaggagatcgaaagccaccgtcgcgcccgtaatcgctcgccgtcgcacttctagacggcggatctgcgctgtgcgagggcagctgtctccgtcgtctggtttctggtgagtcacctcatatccattttttcttagctcagtgatcatgtagcatcaatcggggcatgtgcgggtgcggggtgacgccggggcgggttgccggagtttggccgccatgggcaggggcgctccccagctcggctctgttggggggggagacgatcgctcagccattggatggccacggtacgggtgagattaggatgtgttgacccatttagatcccaaccctcggatcttaatcggtcggatcagacgaatctccacgattttaaatctgggccgcttgttccggatcatgcgattggaaatcgggcaggctaggttctaatctgagacgcgcatcgttgatctaacggtcagggtttctg

SEQ ID NO: 134382 - DNA, 394 bp, Zea Mays
cccccaaaattttatttttactgcatgcgtcccgttcctcttccccggccttctgttcgtcagatcgcctgtgtgctactcctttatttttgtcaacccattttatgtcgatgtgcttattagctcaccggttcggtcactagagctgtttgaagcccccatctgctgatctatatgctactgttccattggagtgtatataggtggaacgatagctgatgctcatcgagatctcaaaatgctgtctcacatctttcttgagtcctgtgtagactgtagagtcatatcaagcagctcagcgcatacatcatgcaatactgtgaagtttcaacgtcttgctttcatcattgtgcgtaagcaccataaaccgatgtgcagcgcattatttacccgc

SEQ ID NO: 134383 - DNA, 276 bp, Zea Mays
atgaattccatgtgcgtgtgatggttgtgtttcgaatgttttgtggacagggcgtcagaacatgcccctggtgctgtcaagtaaaacgttcttttttcctggagtgctaattattttgttgttagggtataacgctcaccctgaataattgtgaaagtaaatgtgccgcgctgcttttaaggcattttccgacttaagctgatcgcctagctggtagggcataattgtcgccctaagataagtagacgtgatcatatcgcaccgacttaagtcatt

SEQ ID NO: 134384 - DNA, 672 bp, Zea Mays
cagtcggcgtgaccataggcggaccgacagtaactgcatcaacgggtgcgcaggagcaacgagccgatcgccagtcaaactctggccccacctgcaggctcgcatcctcccctgaggcgggtccgggggccactgttggtaccctggattaggggaacccctcgctacggtatgaaggcacgatgcctgcgcggctacccttagccgcgcggagaacagccccaggagtatctcgtgagcagttaaggtggcattctcggagacaacgtcgtcggaccaaaaaggcatgggacctctgtacgcacaacccggacccctggagtaaagcagcccggagccattggatagggttcagaccccaccaagtgagctccggaccatccgtaacaaggtcccgggagaggaagtgccatgacctaggcatgggtccggtgttgacgcgtgtccaggctctatccagagcgcctcgctccccactcggtcgaaggtctaatactgccacttggcttattgtccgtgacgtaggccagtgggcggagcatgacgtgagggctctgggtcgcgcgacctccgcatttattgcagagaggacacaccgcatgtccacccatctgacaggcgatgtgcccccacgacatttattgtgtcatgtccattctgctggcaggcggc

SEQ ID NO: 134385 - DNA, 467 bp, Zea Mays
aacaaagccatgcaagtggaaagggcaaaggaggaagaaaaaggccatctcaagaggaaattccaagtcctccgggctcagcaacaagatcggcactagaaaactcgatcctttggatttccacccaagggaccaagcttcagtaggccaactggacccaccccgtcacgattcagtcagcagagtcagagctcctttcatgccccctcagttgcaagcaaccaacccccggcgaatgtgtgttggcactgcggagatcccagtcacttcaagaacaactgtccccagctgaagccatcaggacctggttactccaactcgatgaatggccccaagaatacctcagcatccgcccccaaggcgccctcctccatcagccagcagaacaagacctcgtatcaatgaagggctcgattaaatcacgtcgatgctcaggaggctcagcaagctccaggagtagtgctcgg

SEQ ID NO: 134386 - DNA, 390 bp, Zea Mays
cgtacttgaaatatttggctttgatactttgttagagtggatgtactaaccacatgaagctaaaagattaagccatatggagaaggtacgcaatccactcatacactttaacattaccatgtgaactgcttacaaccattagcaaaagtcatttgccaatatcagcgcacaaaacaggaacaaactatcactccatagctcttctctctgatgggcaatacagggggatgtgcctctctttagtgcaagaataaaatatatgtaaatattgatgtattatgagcaactgcctactgtacagtcaaaacctttccaaactttgttcacacacaaaaaagaagtctctccaaacttccaatacgatatatctaaacacatgtgttataaaat

SEQ ID NO: 134387 - DNA, 685 bp, Zea Mays
cctatgtcttactgactgaggtatccaaaacacacgatcgacgtacgtttaatcagttttctttattcctttttttccaaccatctattgatccgatgaccaaggatatagcgtcctagacttgacgaccgacctatagggcaacccggcaacatccttacctgacgacggggtctcttccaggcgatttcttatcatctggtacggtggtttaatttcctcgtaaatataatctcgtcgttcgtcgttcttcgccacacacacacacacacacacaaaaaaaaaaacgttggttaccagctacattctttgatccatggtgacctcagccctcgttggtgtctgatccttgagatctagcttcacccatctcggcgtcaacccagtttataacgatcttcactgaacaacgaagttctcaggacctctatgatcattaattaattactgttactgcggggagattgtcgacaaggattcacacaacgatatggatttcattctaaggtaagtatgtagacagaaataatgtatatgttgacattgctagatttttttatgagcgtaatgtatcgactagtctggcctaaaatattttgtttatgcatctgattacaaaaaaaagactatgcaacaataatttacatattccaaataaaaatcgtcacagtagtacagtactaac

SEQ ID NO: 134388 - DNA, 393 bp, Zea Mays
cgccgtcgggcgcgccaccaacagcgcctgggcgtcttgccggggatgacgagtgcttggccgtcgatccagtgatcgtgggttgtaagcaggcgtgcgcatcatgggagcaagagtgaatctaggccttctttgcttaatcgaacggtcgtgatcagatctttggtatttgatgtctacaccgttcgattctgatctgaggatcttgattgcgtaccggttcacagttatgaatatataatctgatccgtaggtagtcgatccaacagcccagatatcacgataccccttcggccgcctattatgcataagagcccccggattttcctaaaaacaacccgcggtccagtactggattcactgagtctgcgtaaactttatgctttagcccct

SEQ ID NO: 134389 - DNA, 421 bp, Zea Mays
aagcagagatcctcaaccacttcaatatggttgcgaagcgtgtacacatggccttttttcagatctgtcggttcagcatggtgagcacccacaagaggcagaggggtgcttgtaggtggtaattcagggtcgggttcagacaccgttagccacacctccttagggatttcacaggggtcagagcaccatgcccaaaggtcaaaagaacgggtacgctctctacgcctagagcgctcctgaacataatgaatagtgcagcttctgcctaaggcccttgatgccacctcctcaccccagcagtgaacaggaatcccttccacccggaccttaactctaaactcccagctggtctttctagcatagctctcttccgaccagtcaccgaaatgaaactcacgcccacgataagaaactgatcttc

SEQ ID NO: 134390 - DNA, 620 bp, Zea Mays
acagtgtgtatgtttacaattccactcccacagaggaaatggatcatgacatcggcctttgtcatattctctgaagcgttgtattcttgatgtcagattgttgagtgttagaggtcaatggatagggatgtaagtctcatattttgggttattggtccttccagaacttgataaaagaaactaaagtggcatgccacctgattaatttagcatttaggtggagaactgaatcttctgaaatcaatgtatggtgtgctgacattctcaatactgaatagcactggatctgatgttttcaattttttcaccaatttaaagacacttctatgctctccatcaaggatttccctgttttgctgcattcattatatacttaaaagaagggaattttatagtaaaaagtcacaagttataacaatttaagaggctacaactttctggagctttacatccttgttatggttctataagtcaggtttttttaaatcttagagattgagaaagaaaagactaatgtgttttcactttattttctaattgcacactatcattaacatgatcaaaggtgattgattcttaaatggttaacaatataataccttccaaattgatgctactat

SEQ ID NO: 134391 - DNA, 428 bp, Zea Mays
acgggcgattatgatccatttctctcattttttaaatctcttcgcttctctatatctactatatcaaagcaccagtttaaacgatcgttccgtatcatttttttataaatctctactactctataagacgttagtgtagacgtccacaatttttggtgcacggttctgccgtctacagtcgcccgctctcctctctcgtgccccccgctctctgctattcgccgctagacccgcaatttgcgctctattttgccgccagaccctccctgcccccgctctcctctctcgcccgccatcatggaaggaaaatctcccaccagggaaggtccacgtgttccatggaaggtccgaccccgctctcctctttgctgtctctctcgcccgccatctgcacgctctctcgccaccatcttcgtgccccccgctct

SEQ ID NO: 134392 - DNA, 656 bp, Zea Mays
gaaaaagaaaaggaaaagagaagaaatgcgtgggccaaattccctcaacttgtcccaaaaccacctctcatcattcacccgcgccggcccaactccactttaaaactgctccggcccagttatccagccatcctggcagcccactcccccgcgccatcacgcttaccggcgaggcccgcttcaccgttcctcacccgcgcgcgcatagagtctgcgttgcggggcccgtcggccagcctcatgggcacctgctcggtcaccaccaagtgggccacactggtcagctacgtcccccctgtaacagacggatgcgagcaccaagcgcgtaacaaactcgcggacaccgtaaccgccgccagcttctttggctcggtttgttgcgatacggaccgcctgggtataaagcacgcgccccatgaccacctcatccatcggctcacaactaccagccgccgctgagggttcgtctccgagagagataacgcagagagagagagagggagaggtccgcctcgcggagaagacgccgacaccgacgcccgggcctctgcagggaatcctgtagcgcggggaaaggtcgggtggtcacgcacatggccttgctgcatcaggagggtgccctgaaggctggggaatccttcaccgacgaggagctt

SEQ ID NO: 134393 - DNA, 410 bp, Zea Mays
gacaagaagtaccgcgtgcacgtgaggctcgtgcctggtgaaaccgctgggtgcgaggagttgtggtggcgcctgatgtgcttgtcatcgatcatccgctgcctcaatgccgctgtcatcatcatgggtcgccgcacccggacctcgccatgaccgggcctctgctctcgttgggtggtcgtggggattcgttgatgcacgtggaggctggtcgtggtatcgtcgaagagaagggccttctgtgcggctgctattgctcgttggagacactcatccgccgagatgtagttgcgcgccgtggacaacacaggcatggtagtctaattgcctgtgagtgcccctgtaacttcacctatctcccctctgtttcacgcaccctagaacctaggatatggaagtatggcgccgag

SEQ ID NO: 134394 - DNA, 365 bp, Zea Mays
gggggctgggtaaccacttgcaccatccttggggacagggttctctacagcagccacctctaaggctgaaggattctcagtcacctccatgggaattgaacaaccttgaccagcctcttggccccgaagactgcactccaaggtcgacgaggcatgagacgccgcttggggtaactctaatcccacatctggaatgtcagagcatgtccatcataccaccgtccgtgggctcggacagcaaatcttcaggaacaacatcctcgagagcctgatcaaaatttgctagggataattcttgcagaccgacgagagcagacaaagctagagaaggaatatcactactctccccactgactatgtaacgc

SEQ ID NO: 134395 - DNA, 748 bp, Zea Mays
gtcctgcagcaagcaatgctgtcacttggttctctatttccgttttgtgatgaggagaataacgatagggtcgagcatttactggtatagaaccagggaaaagagggatatgatgatcaaatgctcgagaaggaggcaatgaagtcggaacagcaaacacatcctggaactcatccaccaaggcttgtatctcagtaggatcaggatgcacacccttgtttgcagcaggctcaagcaaagcaaaaacccatatatcattccctttgatactctttttaagctgcagcaccgatatctcagttacctccctgacttcagtaagatctcccaataactgaactgtttcgccccgatcctgaaaactgagcactctgttaccccaatcacagttcatgggactatgtgattccagccaatcaaaaccgagtatggcatcataagctccaagttccagtaccctgagatcagtataaaaagtgtgaccatttgcccaccaagccaactggtgtacctgagctgcactactaaggaaatcacccttcgctacctgaactcgagccatagtacatggacgagtatgcagacccagtctctccacaaaatgtttgttaataaaactgttggagctaccagaatcaaccaagactagcatagtctgagtacccacaagagctcggaccctcatacacccttcttgagttgtacctcggatggcattcagagaaagattaggaccctcttctaccat

SEQ ID NO: 134396 - DNA, 610 bp, Zea Mays
caatccttgaaatgcggccagaatctactctctcgtaatcgagggtgaatctctatgaaatttgtgtccttcggcttgattatgtcagaagacatcctatatattgcattaagttcttcactaaatttgcggcttatagtttccaatgagtgaccaaatttattcctaatccgcctaaatgattgtggacccccgcatgcccacaagaaaatagcagttgcttccattgtactgacaccacaacttggtaccagaccataattttgcaccaatgtatcatgcaaacgatgaaacactgttcgatgcatgcgaaacatgtcgaagcaatcgtcactactctccaatgttcgctcaacccattggatacctgtttcaaccatggttcttctggaaaccccacttggagagctcccccatatgtcaacagcaaacagtgcaactagcaattctccatccctctcatcatcatatgaatctgtattaggctcagacatctgcaaacatacaaacaataaccagattcctagaataagaactttaccatacaaacaaactcatggacatacttgttgacctccaatatgtttcacacaatgacattgttcacaga

SEQ ID NO: 134397 - DNA, 412 bp, Zea Mays
taaagtttcatgcatcgcaaagaaatgaattacaataatttacattttcgattcaaagctatacacatcaaatattacaatcttgttacaataaaggtacaatgtccattctagtgttttatacattgaccatctcaaaatgtttttacaataagtgctattcctctttaaagactttctctgcaacttcgtgcagtaatttgttaacaacttcatcaacaacggattcagccatgtttataatatccagcgcttccttcatttctggatccgctaggggatcaaacggttccggcggcggtgataattcagctgaagtaggaaaagttaattagtccgaagcaacaaaaataaaatgccgaagctaaaagacaaaaagcaatacctatacgtttttcacgctctgcagctt

SEQ ID NO: 134398 - DNA, 334 bp, Zea Mays
cttcaaagagcccatatgtaaacactgagactaacaatagcatttggggtcagctagtggagatatatctcaaatcttttcaaaacttccctatcatatcgtacaggggaaccgaagcctcgctttgaagaagcttttgaacacaactacctcatcatcttttggctctggggttacttcttctccagcaaagcgaataagtcctttttcattttccccaaaatagcctagatttttcatcacaaccaagtcctctgatgttacgatcgattttccaaattcaaagtgactaggtttcgttgggctcagaatgctgttgtcctcttcactttca

SEQ ID NO: 134399 - DNA, 633 bp, Zea Mays
gtcgttgtcgtcgtcttggcgcagtggactaagccaggcggcggtctcgtccgatccttctcgtattgagggctgtgctctgaacccttggtgttctcgtattgagggctgtgctctgaacccttggtgcaggctgtcgtccggagcccgcgtcgtgatccactgcaccatcgcttgcaacgacagcgacgaaggctctgaacgctcagggtcaggggagtcacgatggctgcagggagatcatgctgctgctttggaaaattagtgagagtttacattgcttgaaacgtgtattcagctagatgatccttttcactttcttaatttctttccttagaaattttatttaggtccccttatcattgtatcagctatgcgtttcgccaaaaaaaaaagatgtgtcgtttatatactgtctccgccgtggtttcataaaatttacttgtattggtcaacgatacaagtgcggtgagttggcaattattattcgataaaaaaactgataaaatttactgcaacagtcacgcgagagcgcatggtctggttcgagtgcacaacctcactcttacccctaccacgttagctctcgacttcactcacccctaatattccagtgcacaagcttctatagcc

SEQ ID NO: 134400 - DNA, 707 bp, Zea Mays
ggatttctccttggcgggctctgaaggcccagcttcggtctcggcctggctctttccagctttggcctcgacgagttttgtctcagtttgtgtttttgaagcttcggcagttttccctggagtagagcttgaagtctttattgtctccagcacatctaatacgttgaccatccttttcctcttgggggtaactgtaagatctttttgttccttcggcactgttagttctatcgaagggcttataacttctaatatctttgatctctcgacctctgtctcttcaatactatcggccttcgacaaacctaatttggccaatgatgccttcggcattgcagctggctcttcagtcttctgcataagcgcaagttctttggcttcagtagccgaagaggtctcaccgccaaattcgggcactgtggccggttcaatgaagcgcggtcggtgagtaaggaccttcaccttttttctcttcggcacaggctcgcttggagcagctgaagcatcatctttcccagaagttgcactttttcttttttgcccccgtgacgggtagcggtagtcagggtacatgaatacgatggcatcaaaaactctatttagtctcttcttttttcggcttccgaaggccacagataacgcattatcttttgctttggagtacggcccaagcagttcatcacttgtagcttcgacacacttcagcc

SEQ ID NO: 134401 - DNA, 393 bp, Zea Mays
cttttgtgatccgtgaagattttgcacttgtttccaatcatatagtgtctccaaatcttcaaagcatgcactacgacagctagttccaaatcatgcataggataattcttctcatgcttcctcaactgtcttgaggcataagttatttttccttcttgcattagcacacatccaagtccaagatgtgatgcatcacaatacacatcaaatcgcttgtgaatgtctggcattaccaatattggtgcagtggttaaccttttcttgagttcctcaaaacaattctggcatgcttcatcccacttaaactctttacttttctctagtagtgaggtaagaggtttcactaatttggaaaagccatcaataaatcttctatagtatcctgccaatcca

SEQ ID NO: 134402 - DNA, 642 bp, Zea Mays
gaggaaaccatatcatgaaaatcatctctaattaaccagccttgctcaaatttaaacaaggtgtggttacccgtcgaagcaactactttgccatttagtaaaagtggcgtgtgatccgaccgggttcgatcaagggcctgtacagtaacatttggaaatttaatatcccattctggactcatcaacaccctatccaacttctcaaacgttggtggtctaagtcatttgaccaggtgtactgtcgacccgtcatttctatttcccttagctccagactctctatgaccgcattgaataaattaggccatcggtaattaaagttgttattatttttgtcttctggtcgtctcataatgttgaaatcacctcctatgataaaagggtgaggctttgtaccacacgctcttgccatttcagttaggaacatgctcttaagatcatcctgtgctgggccgtataccgcaaaaagggcccaaatgaagccatcagttttatttctaaggcggaatttacagtaaaagtctccctcgtctatagctccaatatcaaatacgctaggatttacacctaagagcatacctcctgatctcctccttggtggcatagagtgccataagaaatcaactccaccactcaagtgtc

SEQ ID NO: 134403 - DNA, 284 bp, Zea Mays
tgcattgcgggtgatgaatcttgattcatcatgagattcgccttgacagttatatccttccttatcgatgtttatcttttcttctccggtcttggtctcattgatttgaggttagtgtatatcattaggttggggaatacggttaggatagatatcgatgagatagactacatgatgtaggtcaaaatcttgtttgatgtcaggtgagggtagacagattatgcaatccatcaagattctatgggttgggtcagatcttctactcatggttgagttggtcggtg

SEQ ID NO: 134404 - DNA, 912 bp, Zea Mays
agtctttctttcagacaaccagtccctgtctcgtgggaggtgagaaagaaaaatctgacctgctgatgcattcctctctagctagatgattatatatggctagatgattatatatatttctttcagattggttaatacgatggatagacgatacattaccaacttgtggaggtgagggcgcggaaggagacttttagggaggaacaggaacagccacgaccacgatgagtccttggcagtgcatgccgtcgactgcaacactactacacgtccatcaggtaacagatgcaacaaggcgtctgccgcccatcaggttcagtcacctaaatgctccaaatccaagaccacgtccaggtgtgtgatccatcaactattttttcaaacaaagatgcagagaattagcctgtcctgtccaactgttggtaaaaatgtttgttactatccacatctctgtcctgtccgcaacgaaccaaataatcatcgtgggaagaacccccaaacctattgtggcccttgtaatttcttctgtagctagtccatatataggatctaaattatgactgatcatggcggcatatcctactctcatagctggatcaatgtatacttgtatagtccaacacataatgacccaaattatgactgatcatgggtcatacttatttgagctgacactaaaaacagtattcaatgttgattgtacgtggccactatatatgccccctaggctttgaaaccaatgattgtacactgtgtttgagtgtagaggctagcggaacagtgtttatttgagtggacaggacataaaaatatgtcatgttcaaacaaggctgactttttaaaaaaaataaaaaactcacccttttaaccatgtcttgttattagctaggttgcgccatgggtgccacaaag

SEQ ID NO: 134405 - DNA, 581 bp, Zea Mays
ccgcgcgaagcgctaccctttattctaatctgagacgttcgtatgagatcaacggtcaagagcattaccaggaaacgtttgcctgcgcacggatctcagtcgtcagtttcctaatctacggatgccctggcgtcttcaacctttcgccgcccaggcctagacaccgcgccatacccggctccctcttccctgccggccaaccagcgctctgcccggccgagaccatccagtggtcaccatcgccgtccttcgtcggtgcaccggccccgagaccgcttcctacccacgctcccgcgacgtccaacggatccccaatgtaccgcataaaaagaaaaaccgactcaccgcagatgggccatcggtagatcccgcctgccgccgacggccaatgcttcgccgccgacgatcccggtatacgactgtccgaaccccagacccggcaccagtgttactacgccggtgatcgcactgcttccactcgcaccgccaatggcgatgataagagcgttacgattgtgctcgggggaactagggaaggaagaggtgggcgcaagcggtggagagagcacgacacacccggc

SEQ ID NO: 134406 - DNA, 1088 bp, Zea Mays
tttttcttcatcacgccctcatggtgcatgtttgcccccagcccttgccttgctttcccaacatcggtgatgaaaggaactcaagagctagaaaagggactagttgtaccatacagatgtgggactacacacacttacatgtttataatatatataatatatattatatataatatgctctcgtagtatttctagctagtgtgttgtctctgtataaaatatacatgtgcgttaagtgtgtgtgacagcatacatgtaagcgagcgaggtcttgttcctgttgtaggtgaggggtgtatgtcctggggtggcacatcacccctctctcacaccatcaccaccactactaccaccaccacttgacaagagagtagctctcctctctctccccccatccatcctagagagagaaagtgagggtgttagatagatggttagttatcactggctagtgatggaccttggcagcttgctactcccttgtgcacttccgcgcgcgcgcacacaaaagcttttggagatgcgtagtagcatgcatagccttaggcaggagcccccacggacacgcctttctgttctttcttttcctatgcacccctaggctcagaaaatggcctgcaagctcatcattgtccccaagcctttttctgctccgtccttctcttttgcttggctttcttccattccctagctagctcccgtgcactagtagtagtgcaatggcgcagatcggcagatggcgagcgagcgtgtgtacaagagaacatgcatgcaacagagctctctccatcatctcatccatctgtaaaaatatatatagtgtacatgagtacatacacgtactacacagctagtgcctagctagtgcctgtgtggatctattgcgtgagcataaaagtacgtattgcgagcgagagagtcttgagcgagatggatggtgccctagaaagagcctccttcacctaccatgcatcactgaaagctatgcaccatcctcacctctagctgctacctagtagctacctcgccgtatggcatgcaggaagcatcaagtagggctttcgagtgtcctccctcctctctctctc

SEQ ID NO: 134407 - DNA, 346 bp, Zea Mays
cgaaggtgccaggagccacaccccgggaggaaatgtgtatcgctctggcagcagaagaactggtgcctgaacgggagaacaaggaagccagcccagcagttggcctataaggaatcctaggactgagaatcatatgttgggccctcccattccaacggggacaagcactaattaagccaacaatccttgattctagcacaggatccgcatgagaatcccagaatatcgcctgacttgcatccttaccaaaatcgttcgaattcaaaccaacagccaaccgctccgctgatgccgctcccattgaagacgtcttcttcaacctttggccacggcaccttccaggaga

SEQ ID NO: 134408 - DNA, 625 bp, Zea Mays
gagcctaaacttggctttgatgccacgattagactaatacgcccttgctccaaaatcctagccctaaatatgtgagaactcagaggttatactttgttgttggatgccgatgccaattaggggtgatgagagtcggctcaacgatggcgaggtagagacgtcgacactctttccttcactaactatgtagagatagatcgaatctccagtgttgcgtttgaaagataaggtatgatgaacattagttcttatgctgtcttcagtggatatggtaaaagagtgggacacggaacactgtagatgacactgtttacagagtgaaagattgaaataggggatacgatagaaaatggaatacgagatctgccggagatagccttatgctggcctgcttcactaatgacgacgttcgcgtataggctagttttcgatcggtggctggcacttggcatgccgtcgttgagctagctttcacgaatggacgtgacacctaacacacggccacacctaaccaatcagtgagacacgagctcgtttttttttccaaatgcgatggtccttgctccctgatgtgcacggctacgtgaccacgcaccacgtacgtgtaactgcagctgcagttgct

SEQ ID NO: 134409 - DNA, 718 bp, Zea Mays
atcggccgatcctttagaggagatcaatataggagatggtaaaactccaaggccggcctttgtgaacaaaaccctggagactgatcctagatatgaaatgattggtctattgaagaatattctgattgctttgcttggaattacactgagatgtcaggattaagccgagagatagtagaacatcggctgcctattaagtccggtttcaaacctttcaagcagaaagctagaacatttcatctagacctactaccacgaataaaagacgaaattcactggctgctagaagctaattttattagacatgcagatgcgtagagtgggtctccaatattgtgccggtggagaaacaagaatcaggtaagctcagagtatgcattgattttcgcaatttgaatagagcaactcctaaagatgaatatcccatgcccatagtcgacacgttgatcaataatgcgtcaggaaatagaattattagctttcttgacagtaatgccgaatataatcaaattttcagggccaaagaagatgcgtctgaaacgacctttatatgtccaggcttcattggtttatttgagtgggttgtcatgacatttggtctaaaaatgctggtgctacttatcagagggctatgaatttgatctttcacgagttgttgggaaataccgtggaagtctacattgatgatattgtagtcaaatcggctgagtttagttct

SEQ ID NO: 134410 - DNA, 684 bp, Zea Mays
tagtacatttgccatccttcttcttttgggagttgccgcaaaacttttttgtgccttcggcactgttacttctgccgaagggcttaaaatttctaacatttttgttccttcaatttttggctcttcggccttatctttatcagtcttcgattcagctagtttggctaagggtaccttcggcattatagccggatcttcaatcttctgcgtaggaggaatgggctcttttggttcagcagctgaagaagtctccccgccaaactcaggcactacggtcggttcaatataacgtggccggtgggtaaggactttcaactttttgctcttcggtgcaggctcatctggagtggccgaagcagcagtttttctcttctttccccgtcctcgcagcgggtagcagtagtcggggtaaacaaaaccaatggcataaaaaactctgttcaatctcttttttcctcgacccccgaaggatgtggataatgcattatcttccactttggaatatggcccaagcagttcatcacttgtagcttcgatacatttcagccagtcatcatttggttcatcaaatttatctccatatctgaaggtgtatttcagtcgaaccagctcaccttcgctagactcggtgaaagtctccttcggcatttcccagttctctacaagcggccatactctgaaggc

SEQ ID NO: 134411 - DNA, 562 bp, Zea Mays
gcggaggctggcgaacgtggagttgagggcggcgatgaaggcggacgcgggcgtggcgttgtactggctgcacccctggttgagcagcgtggcctgcgggtcggcgaaggtgatcgggacccacgcggacgcaactaccaaggttagagccggcaagagcaggaagcgacccatgcgatggtgcatagccaacgccggtgagcacacggggtaggagatgaggcgaaaagaaccaccgtcgttggggcggtcaggtggggtggtactgccgtactgatagctggagtaatggggattggattggaattggaactagggagtgtggactgtggaggcgtaacctggaactggacacctggagggagcaggtctgcaggtgattagtttggacaaggtataaataaccgcatgagggagtcggagctcgtgacacgttagatactgtgtttcagctgaaatcgcccatggaattcctttcatactattgtcgtttgttgggctgtgggctacaggtgtggctgcaacttgatgcgtgcgcactgcgcaggaggattatctaaaa

SEQ ID NO: 134412 - DNA, 299 bp, Zea Mays
cttctgcaattagatagatggctggtatggctgtactttgtagtgacaaaactggaactctgactctgaataggctcataggctcacagtggacaagaacctcattgaggttacacttgaacaaccatcattagtccttcatatctaaccttaaaacgcttatatatgtttggttcaggtttttgaaagggagttcactcaagaccaagtaattatgaaggctgctagagcctcccggatagaaaatcaagatgctattgatactgcaataattggcatgctagctgatccaaaagagg

SEQ ID NO: 134413 - DNA, 416 bp, Zea Mays
gcagcccatctcacaactcggtgccgacaactcggtcttgcacgccagtcactcccgctctgttacgatctctaacacgcgggaccaccacgacagcttcttcgggcacacttcctttctcccctttacgctgttacttgtgcccatgaaacaaaccggtcatctcgctgcgctcgggggcccacctatcaccaattcgtcgtgtgaccgggacaacggagctcgcgggatccgtggcgagcacccaccacgttcacgttcccatcaatgccgccaccagctgaaccacttctcacgagccatatagctttcgggcgcgcctctttcctcccctcttccattctcctgctcgtggtcgagtacgagatcaattcaccgccgccacgcaccattgccgacaaatggagagatccgcc

SEQ ID NO: 134414 - DNA, 344 bp, Zea Mays
gtggccatctgggctacgacaacacaataagccttcataacaaacgcaacaggcgcagttgtgactagatagtcggggtacaagacaagtccacgcaacgtgcgcaataggcacaattgtggctcgaggcagacagacaatgcctacagggcatgcgaaaaatacgtgactcgatgatggcggtccgactcaacgagagtggtccgattaagcgagagtgcgacatagcaatcaaatgacgcagccaagttcgtacgacataaatactgcgtcgtgttgccagggcgcagccagtgctcagccaatgccataactcgatcgattaataacgtagtctgatcgac

SEQ ID NO: 134415 - DNA, 458 bp, Zea Mays
ggtcagtaaagccatctggccctggcgccttgtccattggcatgtcttttatagttgcccatagctccgcttccatgaaaggagcatctagttgagagagctcaatctgctgtatacccaattctgcaaggtcaacggtataaattggttcttcagctttccccagcaggttttcataaaagtctagcacaactgcttgcttgtcctcttgggaaactgctatctgatcaccaacattaagcttgggtatgaaattcttcttcctgaaccttgcttgctgatggaagaaggctgtattagcatcgccgtcttggagatagaggatacaggaccgcaagcgggcaatggttctttcaagggaggccaggccaaggcagtgtagtttaagcttcctccgcagccactcctgttcagagagatcccttgaatcacgctcaatttccagtcgatgtaagatt

SEQ ID NO: 134416 - DNA, 741 bp, Zea Mays
tagaactccactcctctttctggtggcattccaggcaactcttccggaaatacatcctcaaactcttcgattacagacatgttttctgctgccagattaaacatcattggatcgtttgtgggcggctgggcttgacaggaaactgcctttccttggtgatcggtgagaagaacagtcttgcttgcgcagctgatgatacctttgtgcttagttagccaatccattcctaggatcacatcaatcccttgggatggcaagacagttaagtctgccaggaacactaccccacttaagagaattctgacttgagagcacctgagttggcacaggaggtctgatcccggggttcgggtgaccaaagggatagctaggggtgtagaggggatgccatgcttttccacaaacttagcggctataaaagaatgggatgctcccgaatcaaaaagcacagtagcgggagtaaattcaacaaggaactcaccgagcactaatcccggggcttggtgggcttcttgagcgtcgacgtggttgactcgggccctgccctggtactgagtcctgctctgctggctgttggaaagaggtgccttggaggtaggtgccgagggaatcttggggccattcaccgagttggagtaggtcggtccgggtgcctttaactgagggcagttattcttaaagtgactggggtctccgcagtgccaacaggcatttgctggcggttggttgcttgcaacggag

SEQ ID NO: 134417 - DNA, 574 bp, Zea Mays
accctaatgatcaggggctctttcctcagcgcactctctggctagagggtcctagggaccagggatcatttccccgacatggtgcttgtgatgacagggtgctcagtgttcccattcttttttatcatgacctgtagaatgtctgccaccagaaggaacaagtagggtgatagggggtcaccttgcctgagacctttcttgcaggggaaccacaggccaagggaaccatttaggagcactgtaggttttgaggtggaaaggagggcatgaatcgagccacaccagagttcagagaatccccaaacccttaggatggcgagaagggttgaccaatcaacgatatcaaacactttattgaagtccaactctagaacaagggtgggtagcttcctcttgtgacagcattgcactagctctagtcatgtactaaggtttctgaaatagtttgaccttagacaaaaccaatttgatccggttctattagattcaagatctttgcttggaggcgagtggtgatgatttttacactgtaattctggaggcatgtcagcatgaaatccttaatcttcgaggc

SEQ ID NO: 134418 - DNA, 571 bp, Zea Mays
ttgatggtgtagagggtgtgccatgtcagctagccgttgaactttgttgttgccgatcgttaagccctcgaggtatccgatgtgccacatgatcccacactggataggtctagtgccttgtaccgagcttgtacaatttacatcctttctgactgtcgtatccggtgagccgtccggtgctgcattgaatatgtctggtccttgtatccgacttgttccattttacaacttctctcattgtcatatccggtgaggcacctagtacgccactagatatgttaggggccctttatctcctgaggtcactttgcagccttctctgtgtgttgtatttggtgccttagtccggtgtacatcatatgccttggtgcactctggtatgtttttatttgtttcttcgtgtttctttcttggccttattttgacctttgtcttggacttttatactatcttgacaagtcttcaatgagtcaacgtggcaatgggtaaaaccttagtaggtatctcttgcccaaacacatacccaccaataagaaatatgctcactaaaaaacccatacctataacgggt

SEQ ID NO: 134419 - DNA, 354 bp, Zea Mays
taaacattaaagagtaatggtttgtgcgaccataatgtaagctatcggtatcatattgccaaggcctaccgagcataagtgaacatgcttccattggaacaacatcgcaataagcataatcatgataggaccccatagagaaatgaacatgtattgagcgtgttaccttgagtcctcgttaagccattgaatatggtaggggtgtgggtgtggacgtgtggtgagagacttctccaccatatctgtgctcgccaagttgttgcagctgccaccatcaataatgatgcaaatggaacattcttgcacaacacctttggtatggaacaaggtgtggcactggtgctactcgggttg

SEQ ID NO: 134420 - DNA, 544 bp, Zea Mays
attatttgagctagtacactcatcatgaccacgaaaagccagaccttgcaatagaggaaatctgataacacctaagacaataataagacgtcccaaatattcttcttcttgtttcctactcacttgtgacattacatgtgacacactctgtctttgatttttaaaatcatcaaaacatcttctagccttattatgagcactatcaatgttacccacatgtacatcaaatgacctaatcgcattcttccaattgttataccctgtcgcaccagtgtagctttcaacaccaaagttttcccttcttggttgcttgaaaaggaaacaataaaagcaaaagaccgcatctttagcaacactgtattccaaccattcatgctttttgaaccatgattcctgaaaacttgtttgtctatctcctattcgcttcttgggaaatatgtgaccttttggttgacaagggcctaacaataaatactctcttctaacaacatctcgaatgttcacatctaacttttcaattggttttcgaagtctaggatcacca

SEQ ID NO: 134421 - DNA, 486 bp, Zea Mays
cgacatgttgtgtcttagtttttgcgggggatttttgtgggtatattacatggctccgcctcattaaaaacctcacccccaggaggaaaagagtgcgggccggaatgatactgtttggtgaattataagggcgtgttagccctgaggattcaaacaaaaaacttgtggagattatcgatattccagaaatgctctaggtcctcgccggatggcgttgttagcttttacgcgctgggggacgccttcgtcttgacgatgaaaggaccctcccactttggctccagcttgccccgtgactctgttcgagttgtccggacaagtacgaggtccccttcgtcgaattctcttgggacgactgcatggtcgcgccaggccttcgtttgagcttggtatttgttgagagcctgcagggcaaagacacggtctccgtcgatgaggtctttggaggttggttcgtctacgtcggggatggctgaagcgcttgtc

SEQ ID NO: 134422 - DNA, 299 bp, Zea Mays
tgaagattctggcgatagagaaagctttgatttggaaagtggaaacgaagataccgaagatcggccctggaggccgagtcataccatcttcggaaggtcatccattaagcaaagtcagattgatgctatgaaagggagatattttggtgatatttccactgtgagagctagaggggacagcgccgcccctgtgcccgaagtagacgaagttgttgtttacatgagcttcatgaaggcagggcttcggtttccattgagtaaatttctagttgaagtgctaaagacctttgagatttttc

SEQ ID NO: 134423 - DNA, 447 bp, Zea Mays
agcaccagctcgtgggggtgcgagtttggagatgcgccgtgggaggaaaaccgagtacctcgacatcccactcaaggacagcatcaaaggatggcgcctagaatggtttatcatggagaatcacgggaacaccctccccctcggttagggagacagccagatgtctgcactccaagttggactgaatcccccacagacctggaggtaactgaggccagggctctgcttgctgaggttggatttttgaaggagaggggtctgactgccgaggctgtggttgccgattttgttttcaagaacattcagccactaaaagacagagcatatccagcttatctgtatcgaggccttgctgattcaacccaggttaccaacagaaggattcctgctgtggatttggtgagccggcttgagatgatactcagaggcaaggtgtctaatgtcggt

SEQ ID NO: 134424 - DNA, 562 bp, Zea Mays
gggccatctctgtcggtctctgcgttgcctcgattgtgtgctcagctcgctgacatgtgggaccacctcgtcatccctatcctctagctgctatccaccacacccgtagacattgtccgctcggatttggatccaaacaacctgcgtggaaagcgagtggatctcggctttaacctctcaaccacctggcagctatctcctctttcttctctcactgggcgtagggacctacctgtcagatcttcccccatcctcgggcggccgttgggacgctcacgccagcaaccacgcaacagactccgcgctgcatgtaactcacgcggttgttgcgtacctcgggcctgcctcctagtgcttatataaccggggcacttttcctccttctcatctctgggagtcgaccggagccatcatctaccgtgaggagagcgtaggagtgtcgtcgtcgggttgcaagcttgtgacgtcatcgggactcgctaaacggatcaccgcgcttgcaagattgggcttgggatcttcgttggcagggaaaaagaccttgaaacacgttgaatcgctc

SEQ ID NO: 134425 - DNA, 476 bp, Zea Mays
cttcgacttgagggcatcaaaagcttgttgttgtgatggtccccaatgaaacgacactccattctttgtcaactcatggagaggtgctgcaatggtgctgaaatcccgcacaaatcgcctgtagaatcctgcaagaccaagaaaacttcgaacctgcatgaccgtggttggaagtggccagctcgtgatggcaacaatttttgcctcatccatctcaacaccctgcgatgtcacaacatatccaagaaaatacactcgatcggtgctaaaggtgcacttctcaaggttaccaaataaacgtgcatcacgcaaaacatcaaaaacagcacgtaaatgttcaatatgatcatcatgagatttactatagataagaatatcataaaaatataccaccacaaacttaccaatgaaagcacgtaaaacctcattcatcaatctcatgaaagtgctaggcgcattcgttaacccaaaaggca

SEQ ID NO: 134426 - DNA, 302 bp, Zea Mays
aatgactatcttcaaaatgaagaaatattgaagacggtaaaaactatacaagaagccaagctcttcctagttttgcagatcatcccctctagctatgtgtacaaacatttaatttcaaaccgctaaccacatgatacacctaaatatgcactcctatgtctatacaaaatggagcatccatcaacatatatttacttcatgggacataaacacgataatccatgatgtgctcactccagtgtttactcacagctagttgatatcattactgtatctaagatatacgtacgatcaggaatacg

SEQ ID NO: 134427 - DNA, 307 bp, Zea Mays
ctctgtgttctgtgacagctcacagctacatcaacaagttcgttcatgctgctccactgtaggttggaatgtatgtgtggtgttccctcaccacaagcttaggtgtctggaagggggtgggtcacctcgccttacgccatcataaccatgcctgtcactaatgattaatgttgttttgtactgtcatcttttttattcagataacaacttgacatcaatttgcatttttgtggtacttgaaacatccagatagctgttcaggattaacaagaattgataggtcaggctaattgtatagttttctttt

SEQ ID NO: 134428 - DNA, 306 bp, Zea Mays
ccaatttccaaagtcatgaaacaatcaggtctagttgtgacagagggaactactgacgaaggtactcctgttgccgaagctgaacagaccgttgctgaagaagaaaatattgataaagatgaggaagtttagagtattttgatcccaacaaaacccagccatctagattttgagaaatctactgtgtctgaagctgacatgcccatgatgatgaagctaggctactttggggaagctgaaagcaaacttgtccggtttgccagagaagagaccacccagcaccgaagagcgatgaagtatggtttt

SEQ ID NO: 134429 - DNA, 1942 bp, Zea Mays
ctgaaatccattaaataatgttcactacttctctcagtttaggtggcttctatataagaaggcctcacaagtgctatatctacattttgcattgaagagacgtgcatttcttgaagaattccatgagaaacaagaacaggttggttacataatctatgattattttgagccatgcttgaatatacctattctttctggttaaccactaaacacactggttacatcacaatgcaaatatatgtcgttgtggaagaacttttgcgcctttttttttcttgacaaaatcacaaaactatttagtttataaccatcatctgcatctaggaggtgcttctcattacattttgcatttcactgtattttctgtcattttcacttgcttgggccaacacatgcatattactttgagatctgtttgggggttctataccctaatgtagctgcacaatgcaagtatgccttctaagtgagtgattttgctgatcaacctgattctatccctttatttgactgtcaactcttcttgacacagtatatttgttttgtgcggaagcttcatttccagtcatgtagaactgaactaatctcctttgtttaattaaaggtcaaagaatggcttcaaaatttggggataggggagcatgtgccagttgtacatgatgatgatgaagccgatgatgtgcatgttccttcacagcatgacgaaaactctgtcaaaaacaggtaaagtggtggtttattaacaatgttcaccttattgaagtaaaagaataatggaaacttcagcaacaaaatcttgaaacaattttgatgcacttagcaattggcttcccacatatccatgtgcatgtatagtaataaacatacttaaactttggatgcaggaatgtcccttcaagtgctgttttacctgttattcgacctgcccttggccgtcagcaatcaatttctgatcgtgcaaaggctgccatgcaagaatacttgaaccatttcttgggaaacttggatattgtcaactcaagagaggtagcaaaaacacttttccgtaaaacaagtcatgttagttttgatgactgtgtaaatatatacaaagtgtattgttcatgtgtccgttagagtggatcatcatgtttctcattttcttttatacagtaacatctgttaaaatgcaggtctgcaagtttttggaagtttcactgttatcatttctgccagaatatgggcctaagctaaaggaagattatgttacagcaaggcacttgccgaaaattgagatggacagtaaagagagatactgttcatcctgttgttttagtttttgcagtagtagctggcaaaaggtactgaaaatatttgatgattttattttgttttactaaaatgatggtgacttttacatgagctgttaaatcaaacgcttcttgataggtttgggctgtactgaagccaggattcttggctttacttcaagatccatttgatcctaagctcttggacataattattttcgatgtgtcaccttgcactgatagagatggagatgaccaaaccactctagcaaaggagataaaggaacgtaatccattgcattttggatttgaggtatttcgtttccatttatgacttgcttggtctagcatcttgacatatcactccaatcaaataactaatattagagtctctcccgtggaattattatgttaccactcgtacggttctaccaaacaagtagactaaatgagtaaatgggtcctttagcataatcatttttttgggtcaattttgggttcaagtgcaatcaaaacaaaattgttagaggcatatgtcatgggcctatcaagcctaggttggcaatatagctcattagtgttagggttaattacaaataaggatcactcgcttagagacagtgttctcaaggcgcctaggcgagaaaatgcac

SEQ ID NO: 134430 - DNA, 329 bp, Zea Mays
cttggttggcgccataagcatatcgggctgggggattttaaggatccgccgccgccaccggcgttactcgccacgtcaccgctgggtacccgattggggagccagagaccttcgcaaacacacaccgcgcataacctggtgctcatcgtgcaggattagtgcgcgaggctcgggtaatcgctcaccgtcgctgtatattgttgccgagccgcacgcttccgtggctaggcacctccgcccttctatccactggtaatttcccctcccttgtgcttgtcctactcctccgaacatgtttcataggtccatgtggggatttgtgcgcaggc

SEQ ID NO: 134431 - DNA, 642 bp, Zea Mays
ccgccgtggaaacgccggtgaccgccgccctccggccttgtgccacgtgtttacccttaccaccgcatcgccacgacttaccccttctcaccattgatcgccggaacaaccgccacgcctctggacacgtattcatcgcgcccagtgttcttctccacctccgaccgccgcgcgtcttgctcaaaattcacggccgccgcctctgggatctataaattgagccccccactagttctgcaaagtcatcagctagccagcccctgctaatcgttagcactcatccaccagtgagctcgaattcgagttttcccccaaatctctttccgccaccgtgaaacgagcttcaccgtcgccagccctttttccagtcagtccaaccctccctctccctcgtttaagcttcctcacgtgtctgcgatgcttactgacctgtccaattggactaggggtcctctggtcgccgggaacacggcagtatagccgcgatactcacggccaccgtggccagagctccgtagttgatcataagcgcaattaagttaggggaaacgctgatttggggcgtgaattcggtttcgaccgaagaagggcgtcagtcctttccccaatcgaccggcctgctagctcgccggagttcctccg

SEQ ID NO: 134432 - DNA, 541 bp, Zea Mays
ccccttcctgagcccgaacttaggcctagagcacccccaccctctccccggagcctatgccgaccgcatagcgccggtttaaccctcaccgcgacgggtattgcttgccagagtaaccttggattcgcccgagggtccccctccactgtctgcccgtcttagtcctgttctcggcacccagaccttgccatagtgcttgccgagtcctccccaacctctctggctacccagaccaacccctagtgtcctagaagccccggtctgcctcgcctccggtgactgcgccgctgtgtccgctgagagcgccacccctagctgaccagaggagactaaacccctcgtgccgaatccgaaccgcccagtcttgatctgacggcctgaagtcatggataacggttcacgtggtttatggaaccagagccatcgatctacaatccagtggccaacgcgccccgtgtcctcttcatactgctgacccatgggccccgtgtatcagtgcctcaacccacccgagcccacctgtcaagagcctgcgccctcg

SEQ ID NO: 134433 - DNA, 422 bp, Zea Mays
caatgaagagatcgaaataatgctttatagaacaagttggtatataatatgaggagaaatatttgccctgctggcaacaccataaagaattgactattgttataagttctctctcaaaattattatacctaaacatgttgcattaatcgatacccaatttcagagcggtatgagtaagtgggtaaaccatgggcagtgataaaaacgagctggactatacatctctgcatataaaatttttgcttggcagcattggcctgatgtcgtgcactttaccaccattatacacgcacatattctcctatgtgcttgaaagcacaatgtaaccaatgaatgtccttgtgagcgctagaccctgatggtcattttacttgttgatctgaagtcaactacttgctccaaacgatgaatggtatgcatga

SEQ ID NO: 134434 - DNA, 426 bp, Zea Mays
aagccaatggcattaaaaactctattcaatctcttttttccctagcctccaaaggctgtggataatgcattgtcttccgccttggaatatgatccaagcagttcatcacttgtaacttcgatgcattttagccagtcatcgtttggttcatcgaatttatcccaatatctgaatgtgtacttcagccggaccagttcaccttcactagattcggtgatagtctccttcggcatttcctagctctctacaagcggccatactctgaatgctatgtgctcttgaatcaaatctctcgtaccaataaagaagcagacaatacccaaatgccttctaacatgcttcggtggcttcgtcaatttcaaccattggccttcggaggccgaagcaggaccaaatggggcgcataatgacttccttaatatcttc

SEQ ID NO: 134435 - DNA, 528 bp, Zea Mays
cagaggccttcttagagcactattctattactaagagggatactgtcgaggcagccatgcaagatggagcacgacgggcactttcttagtattgcttgttgttcagcggggtagatgatggcctagacctgaagtactaccgtcgccattcgaccggcagtgctggaggtgtgattgtcgccccagttggtgagggcaatcctaggctgaatagcatggtcaatctggctaccgtgctcaacacagagttggaccacgcccttgacgagttgggcaaggttcgggcagaggttgcggaattgcgtgctgagtgtgcagcacgccactatctggatggtggttctctcgcccctatcgggattcagcacccttaccgttcaccaccccgtggttgcttcgactttggtaccccagactgcaggacccggatagattggatccctagatcgacagagtcggagtctgtaataatgcttagttcagtgtcttagtctagtcagtcttagttagagttagtttgcttatctt

SEQ ID NO: 134436 - DNA, 462 bp, Zea Mays
tggtgggataccttcagcgctgccatcagagatgctacctgggcagaatttgaagctgctttccgagaacatcatgtgccctaagggattgttcagctcaaggaagatgaattttaggaactaactcaaggtggaagatctatcagtgagtatgtgcacaaattcacagaattggctcgctaagcgcctgacgacgtcagcacagaagctaagaagatggccagtttcttgaaagggctaagaccagaactcaagactatccgtgtcagctaagatttcctcagcttctcgcacctctcaaacaaggccatataagtggaaagggcaagggaagaagaaaagggtcacctcaagaggaaattccaagtcctttgagctcagcagcaggacaggcaccagagaattcgatcctttgggctcccacccaagggaccaagtttcaacaagccagctggacccact

SEQ ID NO: 134437 - DNA, 395 bp, Zea Mays
ttctagcatattccaatcacagcatcgtccagcccacacccatccaatttaggatcgatttgtgggagggagcaggcgtgtaggaccgatttgtgggagggagcagggccacgtgatcaatttctctcttaaccattgttctttccttttgtctccaataagatctgtgggaggaatacattggtctgatcatgtagtgcatgtgcaatgatacctgtgaaatagaagtcgttttctggggggagctccatcgtcgggaagaggggtcatggctcaccacggacaaaaggtttgtgatttccatcaccacgctcccacaggttacaattattttcttgaattttccattcgactatatcactttctaaatcccactggttatgtacatgagcaag

SEQ ID NO: 134438 - DNA, 310 bp, Zea Mays
gccccttgttaatgaatgggaaatgccgaaggagagtgtggatgggtctagccagagtgctgggaaaggtggcttagtctacttaaaatatacataccgatatagaaatcagtttggtgagcctgatgacgaatggcttgatgctattgaagcaacatgtgatgaaatgctaggggcttatacgaaggctgaagacgaggctatgaacactgcgtttggtgcccgaggaaaaagaagattaaatagggtgtttgatgctattggttttatttaccctgactactgcttccctgtctgaggcaaaggacaa

SEQ ID NO: 134439 - DNA, 392 bp, Zea Mays
tatccacagaccctaactatcttaaactacaactccctagctcagatggagataccaagactggataccgaagatgatcaacctcatcaagaaaggataagcaccaactcaagtcttcaaggatcaagcgggatcaccaagatgagtcaagatccacaatctaggccacaatctaggatggagtccttccttaccctatccaaacctatccatgctttggatacatcttttatcctacataataaagtagctatatatatacccatgctttcctaatcacatgataatttgtgatattaaaaaaaacaaatcttttggtattaaaaccaactagaaactaaagcatagactacaaaccaaacttgttggatcccctttcttactaatctcga

SEQ ID NO: 134440 - DNA, 711 bp, Zea Mays
gcacagcgttggggaggtgtccatggtggcacggtatctagaggcgcaggagccaacgaccaaggaggcgtggcgcgacggtggtgtcaaagagagagaagagagagattaggtgtgcgtctcagaggtatgagacgagtgttatgtaaaaaccatcgggagttatattatcaacatcggctaccggtggggactgatgagagctacgtaaacatcgtcgactcgagtagtggctgatgggagttacattaattaaaccttgtcaactcacttctggcgacaggagttagtttattcccatcggttaggcaaaaaaccgacgaggataattttggccgacggagatctccatgattcctgttgtggtcgtgagcttgaagtttagacacttatgtgcacaatttaaatatattgtggtgaatgtgatggttcaagtggtcttgtgagagacccgtccccgcatatgtgttgaataaacattgttccgctatgtaatacatctagcaaatgacatgaattaaaatatgtggttaaaagattctgaggaactgtcatgagatcctaggaggactcatatttttgaattataaatacacaatatataaatctcataccagataatacattcctaatgaatgatcattctcctgtgtagatagattatctcctagttgaggttatagttgactgatgggacctttctagatgaaa

SEQ ID NO: 134441 - DNA, 829 bp, Zea Mays
caccgcccgcagccgtggtggcgcaacgccggcgagacccatggccacgccccgaggacccgaatcactcgtcctactgcggctacctaaccgtggggtcgatgtgaacatgctggaagcgaggttaccgtggattatgtcgcgatgctctctggtcgcgggcggcggtggaggatgaagtccggtggacaattcgatgccacgccggtggtcaaacccgcacgacgatctcacgtgtggactcctagcactacaacagagctccccgacacaattttggggctgcaatggtgacatgattggatatgggtcgcgctgcacacgggcagatctcacagcggcggaagtggctatgggtgcacacgctagtgaaagagggtagagggggaggaagaaggggtgcgcaacagttatatggcccacagagggcgtccagtcagtaacggcgtcgacaagatccctgggagatgctcgccgcggataacgcgagccctattgacgcagccgcgcgaagggaagggtgacaggtgggccccaactgcagtgaggtgagtgggtgacgtgggtatgactcagtggctgtcggacgggccccatttgtcagggtggagcgcgcggaggagtgaagggcttgggccgcacgatggagaactaggttaatgggtcgaccgtgaagtttcagcccaggcacattttcctttttattctttttattttctgtttcccttttcctccttttcaaattcaaactcttttcaaatttaaatttcaaatcctgttataaatttgtcttcagattatatggggcagttaaggtactaacttttgg

SEQ ID NO: 134442 - DNA, 525 bp, Zea Mays
aagtgtctaggagtacaaggtggcgtagtagtgtccgccactgtttcctatactctgaaggttggtttatagtgtgtttggtttgagttcaaagtatgataagatgaagtcgacaccgtcatcttgatttttctttttcgtgatcctatcaccaaatcagcctacatggccactcctgctgcattgtttggtgctcatcagattcttgtgagaatcaagatgctgagacggtagctagctagatcacaccatgtactgggagtttatgcaacattggaaatcgccgtgctccaagacagtcacattcagaacaatcttcagcgaaatactagtattgggaacggaaataactacacaaggcgccgaaacaactgaatcacgagccgctcctgctcctttggcctttgcccgttggatcagctcagatcggccgaggaatgcgcgtccagcaagaagcgccaccgtccgtcgagccaactgagccagccgagaactagcggaggaggggttggccgagcgcgagcg

SEQ ID NO: 134443 - DNA, 486 bp, Zea Mays
ctgacgtagtagaccggcctctgaacggtccgagcccctgtagtcggtcccgagccctcaggttcctggccttttgtgtcatcctttcgacgaccatcaccatgctcaccgcttctgtagctgtcgcgatgtataaatataacggctccccaggttctagagctaccagtattggtagggacaccaggtgctgcttcaactcttgaaaggcttgttccgcctcttcggtccaagagaatgggccggacttccgcaacagcttgaagaagggcagcgccctctcagccagccttgaaatgaagcggctaagggtagctaatgaccccgtaagcttctggacgtccttgatacgggccggaggcctcatcacctcaatcgctttgatcttctccgggtttgcttcaatgccccggtgtgaaaccaggaaccccagcaactttcctgcggagacaccaaagacgcacttgtctgggttcagcttcgtgc

SEQ ID NO: 134444 - DNA, 545 bp, Zea Mays
gagcgctttattgaacataaaaaaacacaaaagtaacactgggtagggtttagtgccttagacccagcaactcgacaccctcagctctacgaccaatgaccagccagtactgacagatcacaagccaaatttcatcaattcatttacaactaacaacaagaaagtgtattagatgctgtctagaaccttacctcattatcctagccataataaaaaaacgaaaaactgagagttcactagaggcaacacaccggctttggttttaggctgatttaatttagcacactaaggactaaatttaattaaggccgggtccgttccgttttcacggaatcggtgcatatagaactattactagccgaattgattgtctaatttatataagattttatcggctggaacgattcctagtctattcctgtagagcactatatttcctcaccttaaacagatgaccttttaatttttcggaacaactcttaagctcgaaactcctaaacgtgtaagacgtttttcatgctgtattcagtgtgaaccgatgtctc

SEQ ID NO: 134445 - DNA, 281 bp, Zea Mays
gacacatcaaggttgagtgagctcatcgcactagcttaggcaggattacgtgctcaagaggaggacgagtttatgtctcagcgcgccaaagaggtagaggccgcttattacaagcagaagtatgatgagcctgaggatcagctattctcccaagctgcagataaagcagaagccaattattacaagagaaatgcagaaaagtgtgatgcaggacaatgcagcaagtggaacgaagttgtcattgaggattgcacgacggatgactctgatgatgagttact

SEQ ID NO: 134446 - DNA, 840 bp, Zea Mays
ctctagcaattatttaatcattaaaaatcattttctaaatccatttatttgatttcttaacttcctggactgggcgcactaatacagagaagctcagggggctcggggcaaaatttgccagacacagtgaacagccgagcgaggaccgcgggttgatttcactaaagtccgagggctctttaagaaaactgacccacgaaggggtatccagggtttcaggccgtccgatcactgatcaagggcccagattaaatctttcccccgcccgaaccggtacgcatttataaccgtccgatcgacgaccgacgatccagatttaaataaacaacacataagcgcacccctccgattcggatcggacggtccctgtggaacccgaacgaaccggtacgcgaaatctaatcagagccacatacgctagatccaacggccacaggcgttcttctacccccgacacaggagcacgaccgcgcaggaactccccccacggcggcgcgctcgccggagtttgtcatcgccgcgcacaagcacccagacgccaattcctcagagctaaacgtagagcgaaatgaggtgatctcgatcgagggatttttaccgtatttcacagtgtggagagctttgcccgcggtgagcggcggatgccgagttccggtgagaaattccggtctgtgcggtcgccaatcccgccagtaggctccacggtcggctccccgacgccacgcgcaatcccccccgacccagctaaagcactcggtcaacggcgaggccaagaaccgcggcggcggaattcttcttctctcactcaaatccacgctcctcggtgcttttcgctcgatg

SEQ ID NO: 134447 - DNA, 557 bp, Zea Mays
ctttgtttgaatgactggcctagtgacggctacatgattgacccttcgatagtgttctttcttctgccgttttgtgtcgaactcggagcttgatcctccggtgagaatatgaatgacacctcaaaagggttgatcggcaaagtcctcttgtttcggtgctggtggtggaggcagttgattttggtgatgtggtggtggtggaggcgttagagctaggatttcttggtgttgctggtatatgttgtggttttgctagtggggatggtaatgctcgttgtggaattggtgctcgttgtattgttgggggtgataggcgtgggcgacaactctttggttgtcagcggtttggtttctggccattccgtcctttgtggccttggtttcagggcagtccctggtgggatgtgccgagtcttcgccatggaaaaggcaatagaaccttcgctgttgtgggcctcggcctctgcctctggtgtttctgccgtggccctactgcgtggggtattcatgatgacgagcggtgtcaccagtctgccgctgattggcgatgttgtgca

SEQ ID NO: 134448 - DNA, 840 bp, Zea Mays
ctatatgacttttctacagaaaacatgatttggtttatcaaacaaacagcacaacgaaaacaatgcgtgcagcccaaaacaacaatcaataaattccagcttctatataattcaagaattgccgcattctagagacttgaatcattctagcactttaccattttttagagttaaattaattaaatgaggactagcaagtagacttacaaattttatccaaatcatttagtgcactaaaattactacaaccaattaacaacgcattcttcacgataatcacccaacgatttgcgttttcaattagacctcacatgagcactactactttttacccgtgcccataaccatacccatttagaccacaacaagcaattcaccatgactacaagattaactaaagtcatctaacgagtcggctagctagagcaacgacacagcccgctagacagcataaacgtcggcttgcctattattatcacaattcgagacacaacatatataacaatcacttaacaaaatcaactcctacctaacatgagttggctaatgacgtgactatttcccaattaccatcacacaccacctttcgtcatttttggataaccggcacgacacacagctattgtaatacatctcaagttcattcaacccatcagtggagcactagcatattttagaaaatttcttgagactacgacgacacggcatcgagcttatcctgcacataaaagcatcacaagcatttttacggaacctatcggttaacctgatcgacacactagacatgttcttcgcccttcaaaatttatcgcacaaccgaaatcatcccacttgctaatg

SEQ ID NO: 134449 - DNA, 336 bp, Zea Mays
ttgaatgtaagtgtggaaataagggggatagtgtttcccgctaatctcatagtaatgggtactcagggaatagatgtcatcctagggatgaattggctggataagtcgaagcaattatcaattgtgatgagaggataattaagttggtgtccccactaggagaagaagtggtagccgagctagtctcacccgaaccaaggaaaggaggttgtcatcatatggctattgatagcaaggagccagattcactcgagactatcaagggcatgtccgaattcccagatgtgttcccagaagacttaccaggtatgccacctgagctgaaagttgagtttg

SEQ ID NO: 134450 - DNA, 684 bp, Zea Mays
gcctgcccttccttctaggcggtttccttatggagcctttcctcctagaaggtttccatctggggcctttccttcctagccataaggtttccatcttctcgtgattcaaatactatcttctcattcttgatgattttttgcactactcttggacctttccgttgcgcctaaagtctgaaaccttctccactattactcattttttctcttatgttcttacacagtttgggcgcacggttaagagatttcaatgcgacaatggtcgggaattcgacaactcctccactcgcacgttctttctcaaccatggtgtccaccttcgcatgtcttgtccttacacctcaccacagaacggtaaagccgaacgtatgatgcgcaccacaaacaacagtattcgcactttgttgtttcaagcctccatggctccacggtattgggtcgatgcccttcatactgctacttacttactgaaccgccttcccacaaaccgttcggacttcatgcccttcacaacaaaacaccaaattatgaccaacttcgtgtcttcgggtgtgcgtgctatccaaacctctccgctactccccacataaacgtgttccccgttctgctcggtgtgtgtttataggatactcccctaaacacaagggatatcattgccttgatctttccacaaatcgcgtcgtg

SEQ ID NO: 134451 - DNA, 830 bp, Zea Mays
caagaggcaggcacgctagccctggaaggactatcccccagtcaaaccccatggcaccgagactagggtagggtggtggagcctgacaagggaggatgggcgtgtcagaagggaaccactcgagtggatcccgcgcccggccgcagactgacctgccataaatgactgaccgcgttaaccacacctggcaccgagctacagtgtgggtgtcgatccgcttccacctcatgacctacggacccctcaggctgcataacactcatgacctacgagcccccgtactatggcgcattaatggcccacgcgcctctcagcctacgacgcacttatggtctatcgagactagtcttgagtgcgcaaacctccgacaggacactaaagaatgggccgcgtagagctctagactacgaaagccaagggtcggcgtagcccaaatgatggcgcacgggaccaatgtcacccccacgtcacccaccacaataaatacacgacatccaggcagccccgagccccacgagtacgcgtggcctcacccaaggtaaaacactagttttacccctgtcttatggctccttcctagacaagccacagctggtcgacccctctccaggccagctggcctataaaagagaaagggtcaccttagggcaggagaaagggtcaccttagggtagggggatcaagagggattggacttggagacaactgaacacctccagacagagacgaacccataaggacgaacaggaggaggagcgtcgatgaggaccaggaggccgaagcctcgccaagacaagacttagctatgactccaccttgcagcttctaag

SEQ ID NO: 134452 - DNA, 335 bp, Zea Mays
caagaattcgtcgcgtgcctgtagttgtttgtcaacagcagccacctgtgatgttcctggatgatagggcagaagagcaggaggttctcggccatataccaccttaaatggagagcatcagagagcagtctggtaggaggtgttgtagtagaatttggcccatggaagccatttaagccactctcttggtctatcccctgctaggcaccgaagatacatggtgataattcgatttaccacttctgattgtccatcagattgggggtggaaagctgaactcatgtgcagcttaactcctgatagctggaactattctgaccagaatgtgctagtaa

SEQ ID NO: 134453 - DNA, 511 bp, Zea Mays
gggataccgaacaatatcataactgacctaggatccaacttcacaagttcagagttcttcgatttctgcgagcaaaaaagcattcagatcaagtatgcttcagtagcacacccaagagccaacgggcaggttgaacgagctaacgggatgatattggaagcactcaggaaaaaggtcttcgataagaatgaaaagttcgtaggaaagtggataagggaattgccctacatcgtttggagcctaagaacccaacctagccgagctctgcatggaaacactcctttcttcatggtctatgggtcagaggcggtattacccgctgatctcaagtttggggcgcgaggttgatcttcgaaagcatagcagaagccgaagctactaggctggaggacattgatgtactcgaagaagaacggctgaatgcagtaattcaatcagcacgataccagcagactctaagacgctatcacgacaaggccgtgcgacaacgatccttttcagtgggagatct

SEQ ID NO: 134454 - DNA, 571 bp, Zea Mays
gccagtgcttgcggctgatatgagttcgcagacaaaaagtaagggacgttctaagaatttttcagaagaggaggacaagatcatggaaactgacacaagtacaatggacaacgagtctaaagaatactttagattaatgaaacaggaaattttggatcgtcgttttggttctacgcaggcttagatgtgttttaaattttttagtttaaaacactacttatattttgttctttcctgtcctatgaataaatgacatggtgtaatatttatattcagttttatcatgcatcagttctgaaacaaagcttttggtaatgaataagagcagatgaaaactattcagttcaagttgttcattctgttcaatattacgttcatttgtagtcccttcttcagttctgtggggagagagcaggtctgcataatggattttttggcagcattgcaaagtcggtattcgttacagacactaacgatggcagacacacattcgtccttcaaattgttattcttgtgataattcgcattgtttacattaaaaaggaatgagtacgacactagaaataattaa

SEQ ID NO: 134455 - DNA, 476 bp, Zea Mays
cccggagtgaaattaatagaagaaccccactgagtcgtcgggtgaggcagacgcggagctccaaactgagacggcataggagtagtcggtgaaggagtaggcgcagccagatactgaggaaaaccctgcatcggcacgaactgagaagtcccaggcacataaaactactacagaggaagtggaactgaaaactgctgctcggcacttgacatcatgttgatagtgccctgagaagaggaggaagtcaccagctcccatctgagcttcccattcggattcctcctacacaccacatccttgtggtactgactgcagatagaacacctgccactccactggcactctgcacggcgatgcgcatcaccacaacgaaaacaaatcagccccagcccgggcttaggaatagcccgaaacctcttagtactttctcccgaagtacccgagtcagaagatttgccacggtaaggatggtggcg

SEQ ID NO: 134456 - DNA, 423 bp, Zea Mays
cggagctctatttgccaagtgtcacactcggcaaagcctccgtcgagtgtttccaggctttctcgagtgcttcagacactcgacaaagaggttgtttccggtagtgatagctatatacatttctggtagcacttaagtgtacatgtattaggatgcataaacaaaagatattcggatgatgtattcagaataagctataagttatatacatttgtcagtgtttcgaaggcttaactctaaactttaaatgtctttcctgtagtgtatggtaaattagttctttccatgttttgaaaaaaagatcgcaatggaagtaaaggactgcaacacattatatgcgtgaaaatgaagctaatcagatcatacatttttcattgtcaggttcgttttcttcaaaactgaactgtacggatttgtgccaag

SEQ ID NO: 134457 - DNA, 689 bp, Zea Mays
cgaagaaatagggatttgggcactcggctcggaaacgatcgctcaaaacgggaattttggtgaaatttaagcctggaatctcggattagcgtgaaatttggcaagtaggttactggaagtgttgtgaaggtgcctgaaaaatttgggttcaattggagcaagtttggctggtttgggcatttcaccgagcacatggtgtgcggggagttagggttttaggaatatggccatttgaggtaggaataccctcccgaaggagctaaaagcatgcagggatacacaaaagagatacttgaactcattccaccaattggattcacaggatttgacaagaattcaaaggaattggaatgggtgcaaaggggtggtgcacagtctcactgacagagaaacagggatagagatgacagagggagagaagagcagcacgtaccaagagaggggggacgggcgcaacagcaggggatcgccggagcacggccggagacggtggacgccggtgaggggtgagtggaatcgccaagaacagagaagaactggcggctggctgggaagaagagccctctggctcggctctgcgggctggaggcatttttaaaaacgcgatatgggcgcaccggacagtctacagtgcatgtccggtgcacaccggacagcgcacagtagctgtccggtgaaccaccggacag

SEQ ID NO: 134458 - DNA, 386 bp, Zea Mays
tagtggtcaccctgagttaagtaagcgtgagcatgtcacaccgtcttaagttgtcgccgacttaagtcgattgctccgttaatagggtatagtggtcaccctgagttaagtaagcgtgcaggttgatagtaaacagtttgagtgcctttgagaatgaagtctttttattgatgatgtatttcccaatttacagaatacaaggctgtcccaatagcttttgaaatctagctaggggtaaaactttctgagatgttctatattccatgagttcccaatttccgtgccgtccatttgagtaagacgatatgatccaggccgagtgacttctgctactatgaatggcccttcccatagcggcgacaatttgtgttgtccctcccccgtta

SEQ ID NO: 134459 - DNA, 686 bp, Zea Mays
aattagtgcattagaccaactcaaccgtgagcataagagctaacccaaccaatagtgtcatgatagattgcataatctgtttatccccacctaacctcaaacaaacttttgacctacatcatgtagtctatcttacccacatctatcttaaccatactccctgacccgatgatatacactaacctcgaatcaatgagaccaagaccataaagagaacaagatcaaccttgtcaagaaaggagagaagtcaaacttgatcatcagatgcattaccacccaacacgaagttctttttcaccataaactttcttaccccaggctatgcttgccctaacctatcttttatcctacacaataaggtgactatacgaatatatacccatcctttcgtgaccactttctaaataacatgaaacttcttattcctaaattaattagaagataaaggccaaatagtaaataaagctttttacatccctgtccttgcaaatctcgaggacgagatttctgttaaggggggtaggatttgtaaagcccaaaatttgcatcagaagaaaataaataataaacagtagaacaagaaaagaacatgaatacataacaatgagaagaataaaaaaaactaatactaataacattgtaaacgatataagttatattcacattagggtgaatttagacacttg

SEQ ID NO: 134460 - DNA, 310 bp, Zea Mays
caaaaagacaacgctacccttagtttgttcactagctcaaatgtataagtttaagggcatacttgtaatttttccaaagctatacctcacgactataaatagagtaacattgccatgcattaaatgggtctttggataagagaacatactactctgtctcagaagttgtatttacttctctcttcttttgtaccttcgcgaggatagggataaccgtgggtcgggttgtgttcgggtataacaatacccgacttaatattgtacccgatactttaacaaatattcatacccaccaatcggtcgtgaaatt

SEQ ID NO: 134461 - DNA, 457 bp, Zea Mays
ccacgaataggacaggggcggcccaaggtgaggtgcttggtctgatgtaacctttctctgacagctcatctatttgcttcttgagttcaaccaactcgggttcagataccctgtaagctcttttagaaatgggggcagtgctaggaagaagctctatggcaaactcaactttccactcaggtggcatacctggtaaatctttcgggaacacatccggaaactctaacacaaccttggtagtctcgagtgaatctgcctccttgctatcaatagccatctgatgacaacctcctttccttggctcgggtgagactaactcagccaccacttcttctcctagtggggacaccaacttaattgtcctcttatcacagctgataattgcttggtacttatctagccaattcatccctaggctgacatctattccctgagtacccattactatgaggttaac

SEQ ID NO: 134462 - DNA, 535 bp, Zea Mays
ccgaaggcttgcaaataactcaagatgtcgagggccaccacatcgttaacctcataatggccaaagactggcgagctccaataacactgtacctccagggccattaccatccaaccgattgcaacgaggccaacgactaaaacacaggagcagagatttcacaatagtcgaaggtcagctttacaaaagggcatcaaccagcctatgctaaaatgcataaccgaaaccgaaggcctagagatccttcacgaagtccactatggaacctgcgggtcacactcaggacccagggccctcgcagccaaggtgattcgtcagggattttactggcccgcgataatatgcatggccaaccgagtcaccagttcatgtgaagcatgccaaaaattctctcctcgcccaggcgccccttcacaattcaccaagctcatcgcccacacctggccacttcagcgatggggctggacatcatcgggccactaccaatggctcaagggaacctaaagttcaccttcgtcgccgtcgagtattttac

SEQ ID NO: 134463 - DNA, 397 bp, Zea Mays
tggctgaggcaaaatcaaagcttgctcaaggtactctcagcttcgctcttgatgatggttctcttgttgttaatcccactgaatatgattatgaacacactagaattttgattgccaagatgattattgttcatgagtattcactacaaatggtagagcatagatggtttaatatcttgatgaaatggatgaacaacagctatgaaagtataggtagaaagacgataaaaaatgagtgcatgaaagtgtatgaatctgaaaaggaccttctaaagaaaactcttagagatgctgaatccataagtttgactactgatctgtggacatctaaccaaaatgtccaatacatgagtttggttgcacactacatagatgtcaattgggaattgcaatgttg

SEQ ID NO: 134464 - DNA, 552 bp, Zea Mays
aaatatattaaattccaaaaataaaatttaaatcctaaaggaaatcctagaattgaaaagaaagagagaagaaaacactaaacaaataggataaaataaaaataagtggactaaaaatttagttcatattgttatagacatttagcctaaattataacctcacacacatggattcaaatctgaaatttaaatttaaaggagaagagaggtgagaagaaaagaaataggaaataaaagggggaaaggaacttttctgggccagtttattcctatttggcccactcccggattcccatggcgtgctccctccaccgcgcgcccacattatgactgggtcgcctcactgggatcatggtccacccagtcagccgccgttcgctacctcctaccgtgcgcctcgctcatttcaccgctgcgtgggacccgtgtgtcatccccacttcccagccgtcgtcatcgcgcgaaatgcgccgcgccgggcgggtgacagccaccttccgtggattccttggctatgcgccaactgcctaccggaccggccgcgatttaagc

SEQ ID NO: 134465 - DNA, 565 bp, Zea Mays
ccacaagcgttcatggtgatctaaggcaacccaattcaattgagcgggtcgacgagcatgatgagggcctagggatgctagaacaagcgacagagagccttggactgacctgagttaggcctggccgcagtacgattgttttcacggtggccaagactgtaattggggaaacgagcgattctcggtcccaggtgaataattcggggcaaagtttggtgcaactgatgcgtgattaccctacggagccgcggggacactcaatttatagtgagggtaagcggtggcgtctaattttgcgcagagagaccggcggccgagacgaagggtgagtcatcggcgcggtctatcgtggcgcgccccggggtgattcctccggcgaggagctaaccttcacaggatgtccatggcgacgtggtaagacgctcggatacgtggcaatcgaccggcagtcagccaacgccggtgaccttatctacacaggccgcaattcatgggggcacgacggctggccaccggagttatccaaaggtggagattttttcttttgccttggagtattatccgg

SEQ ID NO: 134466 - DNA, 548 bp, Zea Mays
tcggaggaatgggaggtcactggcgcagtggattcgtggagaataccgtggcgggctccccggcgatgatcggatggcttaagcgagtcacggcgatgtggtaaatgtgcccaggcacgtggcgcaaggccgtgaagtggctgtctccggtgaacacatccgaagcatccgtgactagctcggtacggtggtcggagtaatttagtggtcggagtatatccacggcgatgatatttactcaaccccaagcgctatccaactgatccgagcacgaatcacggcggcgaaagcacgaatccgcacgtggctcgtcggcggcgagggacagagctggcgacctgatcgggacactgtaccattggaactgcgattcagagctcctgacagcccaactggtatcgtccaaaacacaaatttctatataagaacttgctaattcgccagtagtaaacttgcagcccttcataccagctgcaattttgttatagcaacaaccaccaaacgagcaatacatctagctcaaaatggctctcaaacctagttctagg

SEQ ID NO: 134467 - DNA, 629 bp, Zea Mays
tctttctttttccatgaacaggacaggagcgccccaaggtgagatacttggtctgatgtaacctttctctgacatctcatctatcttcttcttgagctccaccaattctggtctagatatcatgtatgctcttttataaataggggtgttgccaggaataagctctatggcaaactcaactttccgcttaggtggcatacttggtagatctttagggaacacatccggaaattctgacacaaccttgatagcctcgagtggatcgatctctttgttatctatagccatctggtgacaacctcctttcgttggctcaggagagactagctcagtcaccacttcctctccaagtggggataccaacttcactgtcctcttatcacagctgataacagcttggtacttatctagccaatttatccctaggataacatctattccctgagtacccatcactatgaggttagcgggaaactctatcccccttatttccacacttacattcaagcatacactatcggctcgaacttttccactggctgaatcaatttgaattggtgttgtcatgttggttattcggagattatgcgcttctacccatgatgcagtaataaataaatgtgttgctc

SEQ ID NO: 134468 - DNA, 442 bp, Zea Mays
ttattgggctagctaatgaccttttgtgatatcaggtttcctataatccctttattcaaggcatacctagatggtgtttatgtccactcaagtaaaacatcacacatcattatgccacatcatttctcaaaataaaataaagaccatgggaaatttagccaaattgcacgagagaactttccaaacataggttaaggttgtaaggcacctttttccaccaaaaagatgctaataagtaggaatataaagaattcaaaccaatagatcaccttttaaactaaaaaggacgtttccctgatgtcaagggcattgtattcgcatgagagggtattagagtacaactagtggatgaagacattattgggctagctaatgaccttttgtaataccaggtttcctataatcccctctattcaaggcatacctagacggtgtttatgtc

SEQ ID NO: 134469 - DNA, 568 bp, Zea Mays
ccgtttggggatcgctttgtgctatgtcggcaccgctagtgaggagactcgtatgcttattcaatcttccctcatggagagagtgcgtgcggctcaacagcaggattgtttattgcaggaagctcgaaagagggttggcgatggtaaacccagggagttctccatcggtgagaatgatttggttcgtttcaggggtcgcctttgtgtgcctcagaaatcagaggtgaagatggatatattgagagaagctcataaaacgccttacaccgttcaccctggcgaaaccaaaatgtaccgagatctaaagcaaaacttctggtggaagcggatgaaggttgacgtttctaagtacgtggccgcctgtgaggtatgtcagcgcgtgaaggccaagcataagaggcctgcaggtttgctgaagccattggagattccggagtggaagtgggagcatatcaccacggattttgtggtgggcttaccttgttctccttggggcagggatgctatttgggtggtagtggatcgcttgactaagtctgcgcactttattcccatgaagaccaccaat

SEQ ID NO: 134470 - DNA, 418 bp, Zea Mays
agaaagttcttggaccaattgaaagtgtcaggctgaagcagattcgaaaggaaaaagggtgcccacttcttagggatgtccaccaagtggtcagccgacccagcaggatcaaaatatttggcccagagtctagagaactggacaactctttttctttcctcaaacatctggaaaacggggtcaggcagccattcctgagagaacatgaagttcatctccaaattctgagggtgattattgttaggctcaccaacatgggcctgaagaggcaagtcctccaaatcaatgacatggtccacctgatgcaccggtccatcaacctcctgaggcccaacgagaggggcatccccaggcagcaaatgtccattttccacaaaatgcccattcggaagaggtgcaagctgaccagcaccaatgg

SEQ ID NO: 134471 - DNA, 426 bp, Zea Mays
ccccgatccggtgggcgagcggtgtcggggccttagggcgagcaggcggcggtgaccccagggcctcgaggcgggtgagaggtggcagcactcccgagatgggcgggcaagcgacaacagcgttcccaaggcgggcgagcgacgacgtcacaccctaggtccgagtggaaaagacacaccataacccaagaacgatggtggtgcctcctgacatgcaagcagcgacaacaccgcacggggcatgaggatcgagcggcgtccacggaaggcatgaggtgcgtgcgacgatggtcgtgcgtgatatcctccgatccggtgcagttcaggcgccccaactgacgacctccctccgatcttctgtcctcgacggcatcctccgtcaactacctcatccaatccgtgttatgccttcaattattgtgtttt

SEQ ID NO: 134472 - DNA, 611 bp, Zea Mays
aacaacttttgattggccatctgtttgtggatggaaggttgtactcatccgaagtttgacacctgatagtttgaacagttctcgccaaacgttcccagtgaagacggggtcgcggtcactgacaatagactggggaaaactgtgaaggcgaatcaccccttcaaagaaagctcgggctacacttgttgttgtataggggtggcttaaggcaatgaagtgtgagtatttggaaaatcgatctactattgtcaagataactgacttgccatgcacctttggaagcccttctatgaagtccatggatatgtctgaccaaatctgggagggtacctcaagaggttgcagcagcccagctaggtggagagcttcagttttgttttgttggcagactgaacatgccctaacccaatcccttaccaaggatctatctttgggaacaaaaaaatcggcccgtagtcggtgtaatgttttctggattccaccatgaccagctgagtgggctttatcgagtatggctggcagcagggatgaattaggcggcacaaagatttgtcggccatgcagaatgagcccatcgaccatccgccatggttcagtgagggtgccatctt

SEQ ID NO: 134473 - DNA, 503 bp, Zea Mays
ctttggtgatggtgtcgggcgggttccgggcactgaggagatccctgagcctgagggcgaattggttgtgttcgaggcatttttcaatgccggtcgtcgtctcccagcgcatcgtttcgtggcggaggttttgcggaggttcgacgtgcaggtccaccagttgacacccaacgccgtggtttctttggcgaagtatgtttgggcgattgcttcatacggcggtaagccatccatggaagtcttcgccaagaactattgtctgcactggcaaaagagaaaaataggaaataagattgcacaatttggatcatgcaccttcacgttgaggactggaaagacttcggcggaagtcgtggaaatagtaccttgtgctcggaacaagtggggcaactggtgggacttttggttttatgtctctggtggagaagtcaaagatgtccctgggccccctgcagccattatgtgctctcactgctatgtggtgttcccaccgttcgaggtgg

SEQ ID NO: 134474 - DNA, 466 bp, Zea Mays
atgctatgttacttgaagcgaccaaagagagttttcacaacaagctcgagcacatgtggcatgctctttgcctttagtctaagtggtgcacaaagcatgataatgataatgagtgatgactgtcaaaaaaccttgtctcaacttaggtgacgatcatggcacaacgttagaggaaagtgtggacacaccatgccatattggctgtgatagggcaagagctcaataaaaggggagggacccaacaataagtagcatcgagtccatgagagggaaatggtcttcacacacatcgtccactaagtataaagttcacatttttgtgcttctctcttgagtacgttagtgaacaacaacgattagttcagcatgttgacgtcattttttcaaccccacaaaccctaaaaagcatgtcaaatccacaagtcatacgagacaaccacctcaagcataatggtcagaaatctaa

SEQ ID NO: 134475 - DNA, 660 bp, Zea Mays
agccactccagctagccgcggtacctctccccttgctcaccgccctcggataaggattctcaccgccgttaagccgtcgtcgttgtccgccgcgtgtctctagcctgtctaccgcatcaccgtgactcactcttgctccccgttgatcgccggagcaattgccacggcgcaggacaccaatccactacgctagtgctcttctctttctccggccgccagcattgctcgaccgaattacgcgccaccgcttaagccctctattaattgaaggccggggcagctgcgctacatcatcacgaaactagagcccccaatcccaccctcaatcgttcaccaaagctcacgaattttgggttctccccaaatcggtttccgccaccgcaaagagcacctcaccgcgtccagcacgatccaggtcagtccatgtcttctgcttccccgtttaagtattctcatgtgtctacgatgctcgccgacccacataattgagctagaccaccgccaatcgccgggaacgcatgattctttggttcatccgcacggttaccgtggccagagcgaattaggtcaccatttctgaaattaagttaggggaaacactcggggaaggttcaattcagtgatagccgctcgggagcactggtcattgtgtaaatccac

SEQ ID NO: 134476 - DNA, 297 bp, Zea Mays
ccggggtggcttccagcttgacggcggcgaggatattttaccccgagaggttatccacaagtccggtgcacgaatccaaacgccggcgacacgaatcgcggcggagggatccgtcggcggtgaggacagccgcgctggtggcctgatccgtttggttactgtaccatggggaaatggtattcagacagcctgacagagccatttggagcaccatttacacccaaatttctatggcaacatccacgagtctctgcatcaaagttgtagtgctacataccagctacaaatcgactatag

SEQ ID NO: 134477 - DNA, 426 bp, Zea Mays
agcccagtgcaattgtatgaacatggatgcaagagtcaccaccctatgtgatgagttgtgcaagctgaacctagaagtcatttcctccggtgctttcaattatatttcagtggagcccacattacaagagcaaatagtcatggcacagattggagacaagggtgttcaagtcattaaggaaatggtcaaacaaaaggtggataaatacaaatgtttccgtcgggacaacaaaggaatcctatggtttggagaccgattggttgttcccaagaaccctgagctcaaaaagaagatattggatgaagctcacctttcaaaattctccatgcaccccggcagtaataagatgtatcatgacctcagatccttatactggtggaccagaatgaagagggaaattgctaagtatatctccgaatgtgacac

SEQ ID NO: 134478 - DNA, 272 bp, Zea Mays
ttgttttctgtaaaagataagggttctttagcaaaatggccaggccgaaggggttaactctagatttcggtcgttggatctaaaatccaaggcacggagctcaccacaccacaatctaatgtcagtcgttcaatctagatgggcgaccgagatcacatgtgcccaagcgttatcttcaatctaatctaagccgtcagatgcgaatccagcgccccagagtcgtcttccctaacccgacgcagctaagcggggcgaacagcaccccgcggcgg

SEQ ID NO: 134479 - DNA, 488 bp, Zea Mays
cgagtatcaaaaaatacttgacaatgaattatttactgataaattatttgtcgagtgttttttttgtcaattataacacacgataaagaatttgctgaataccgagtgtttgagacactccacgaagattaacgaagattgagacaatcgacgaagaaccggtagttcagttaccgtatattcaacgctccaacccgcgagtccgcgactctgcgtcgtctgtttctcgacgagcatccccgccgccgcgtttctctttccgctcattttgccgcccctctcctctcccagatcctccagatccgtatattattctctgctccgtccccgcaacttcaccccgactccgtcaaccctgcccttgccctcgggtcgggcatagcgacttcgttgtcgcggtcgtcgccgaccgccgctccgcctctccccatccgttccggcggcgaccgcagcacctcagctgtcgtccctgacgtcgtgcatgcccg

SEQ ID NO: 134480 - DNA, 642 bp, Zea Mays
cgattttaaatacagaaaataaaaggaataagtccatcctccgtatctttctggatccgctgctcgcgtggtgtttttagtttgtgtgtgtgtaagggtggtcaccagcacgtctcgtaactggcggcgtgcttctttgatccgtttgcttatgtcgcctgacgtcaatacatcagctaaggtgccctttcccggttgtggatcggggttcaggaatcaggatatattcattctttctccaaaaactatagaattcattcagtgtcggacggaccttgacaaaatggaagaagcagggcgcagaggcatcagcttatttccacacgaccgcgtattttctatttaaccagcgcagcgcagcgcaggcatggaagcacagcggccgttcatgcagatgaaagatgagagagacctgaatgaaagaacaacaggaggacaaggaaggaggacgccgtcagccctctgtttaggaagctcaaccgggccatggagtcctcttcagcccgcaccatctacgtgagcactgagccgtcagataagaacatcagaggtggcactggatctggatggtccgcgagctagcagagataatagataacgcacgtcatttcaggtgttttacccgtatgctctttagtgaac

SEQ ID NO: 134481 - DNA, 453 bp, Zea Mays
gagatagcaaggaacgtttgaataggccagtacgtattgttgtgaaaccacgttttcttgtattggcgtgattgcgtaagtatgaaatagttacgtcatgtgaagtctaggttgagatgcaatttgtctgagttattcgatagatatatgtatagtataattaaaaaaagagagttcctatatgagatgatataatgtatagaatgtgcttggatgaatatgtgggcaggcctaacatgcttaaacagattcatgtttgcatgatgtgagattaggcttaaatggtttaaaaagttatcatattgcttctatacttatatttgttctaagtatctcgtaatgaagaacctaaagttattagtctttcgatgaacgcttaatcttagaagagtaatgaacctgaataaaatctattgcttgttgttgggtctgcatgaccagttttagttatgc

SEQ ID NO: 134482 - DNA, 325 bp, Zea Mays
gttcttcattccattcatcaaatatctctgtgattcatttttctcgtttatagttgttaaggtaggaatattgtcgttggcatcatttacttcatttccattggggttcatcatctagtcagagggtaaaagagtgagatagactacataagaggcttgcatgacattaagataaagagctaacacaacattttgatttccaagataagattagttaaggatgatttccgattccgcctagcttcatcatactacaagagtgtacaagtgttataatccttaacagaggtcttttgaatcttatagatttcagagcatgatatcc

SEQ ID NO: 134483 - DNA, 626 bp, Zea Mays
ggagactttagaggccggatggtagtagtgttgttgtatcccccttggattggctgggcattcatctcatcagttgattttttttcctttcattcgttgggacttgagagggtgtatgcatctgtctgcgggcagtggatctgatctgataatgctgctatggcgtggagagcgacgtgcccttaggaaacgccagatgtgcatgctcttgctgaagaaacaggcggttaagtattcttgtgcctgtgttgctcttctaggggtggtaggagcgtggcatcctttgtctgcgttcagtgtgcgctgtatgtgcttgcgtcttccagctgtagacggcgaagacctgcagaggccgtggagagctgctgctgcagtatgactgacatataatcgacgtttatttttctgccggacgactttttggtggcaatctacattgaagcgtgagaggaatcacttattcgctatcttgaacacctgatcttattgtcgctggatttcctcgttcatattcttcatgtcatcttctaattttttatgcttagcggccgacaaattagtcagtcttgtgtcgctgtttggagaagcagcgttgggatctttagaaccggtcatataagcctgat

SEQ ID NO: 134484 - DNA, 373 bp, Zea Mays
ttctcaattcctcaccctcaaatagatttcacagatccccctcacctatgctcgtcccaatcagcggggacaacggttctcgtttaccaatccggtccacacgaagacggtctcgctccatcccaatacgacggtgcctaccacttcgtgaaacctcacccacgctatgctttgacaccacccttcgccgcctgtacttggtcctcgcactaggaagatcagccgcctcgccaacctccacacgcggcgaggactccgccgcggccacatctaatgcagcaaaaaaaatccaagccttcatctgaggactcttcagtccaggaaaacgaactctcagactctccatcagactcaaaacactcagatccagaac

SEQ ID NO: 134485 - DNA, 312 bp, Zea Mays
ctttcttttaatctcccgtcttttacgaaaagatgtgtcaatatccatctcatgtgcaatgtctttggctgtctgaatgcttctaagaaaccaatttctctataatttttgaagaaagaaaccaacccttgcactttatcaataacatcatcaatgagcatatctttggcttgcaagtgcttgcttactatattgacaacaaatagtacctcataccaaatgactattgccactataaattcatactctccaagttcgttattagccaaacctttagcctcgctgctcgttttcgcatcattgtcagcatct

SEQ ID NO: 134486 - DNA, 359 bp, Zea Mays
aacaatttaataacgcgcgtcacaacgcacgaaacagcatgcgccacacgcaccaacgacgcgcgacaacacgcacagacatcacgtgaataaagtgtgaaccggacgcgcggcgcagatgcatgcaggggtagacatctcacctccgcgacaaactaccataaggtgaacgtggcgtggctccctcctcgatggcgagagggcgaaggcgtcgacgagctcgatgatggcgaggcttggatgcacgacgaaggtgatgcgcatgctcaccgcgtctctcctcctgatgacgacggccgtgcatggtggggcatggtcggcgtgccgatggcgaggctgtgcaactcctccacgcaatg

SEQ ID NO: 134487 - DNA, 461 bp, Zea Mays
gtaagtaatgatccaaaatagtgaacaccttttgtggtaatgtaagtaaacagaataaataaataaatagttagcattccatgaggccagaggaataatacaaatgcttgcttcaactaaactgtcagtagttaagctcagattatctacatgaagggcatggatgtgggggcgagcttggcatataagtagttcttctacaacagtacaaaaacatcaataccaagtgtcaaaagaattgtacaacaatggttgaggaaagaataaaagcaatagaattgttgcgaggcctctcatgtatttatgtgtgcccagcggccctagaaggatgatgcataattaaagttcatacacacacatgtatatacaaatcgtcattggtttatctaagttcgcatcaaaagaattcagcacagtggtcctaagcaaggcctatattctcaattgagctcacaactggc

SEQ ID NO: 134488 - DNA, 429 bp, Zea Mays
cactgctgttcacccacctgaaaaatctgttttttggacagcaacataaccggattcaaacaacgatatctcctgaattataactccgaatcgagcgcataagtacttgttggaaagataacataaagccctacatgattctcatactgattaacactaattactcccgaaaaatccccagaaactgctaatactgctgctgttcatccccctgaaaaatctgtttttttggacagccacatacccggattcaaacggtgataactttgaatttataactccaaattgagcgcataaatactcgttggaaaggtaaggtaaagttctacatgatccctaaaatgatttcccttaattcctcacgaaaaaacacagaaactgctagactactgctgttcacccaccacctaaaattctggacagcccccc

SEQ ID NO: 134489 - DNA, 1058 bp, Zea Mays
gttgtcctgcatctttttgaactgtggtacagaaatagtatggtaatacggttatatgcatgttcaaggattgagtcctctactttaattgaacaaccaacaaatatgaatacacttgccttagtcgagataggtatctccttttaattctatacttctttcgcatgcccccttaatcttgatgcaactatggtgtcatgccttcttctccttattataacatatagaggtaaccatgggtcatagcagtagatctctgagactctgagtggacattagttgtctgacgttaatttagggttacttggttcagatttgtattcccatttcctaattcaatagtatgagaagtagttcgattatattggtttttttgcttgggcaagaccgcgagagtaattctatttggagcagtcccacattccaatcaacactcaaaccataacaatacatatcttatagtgaaaacattatagtgaccaatttataaatccagagagtttcatagtttcctttcgcaggtagttggtataaattggcttcttttctgtgatgtgagctgtccagtgcaaggtattttcctttacctggcctttctgttctttctattggtgatgttttatcaaatataaaagttgctaaagttatcgtttgaactacatctttgagatctgtagaaaaataccttggtaaggtttatgtgcttggccaagtactgctatgaaagtatagttgcgaagcttaaaaagaagaatatgcattgagtccattctgtaatggttgttatatagtatagaatagaactcaattttttgtttgaaacacagcgacacaatatttctgtactatgatcttacatatgaaagtatgaaatgcattgaactacactttttgagcagctgtaaagtttaattaactttttaaatttctctgtccaaggtgcacttctgataggattttaatgcaaagcatctatgaggcccaagcacttgcataggaaagccagtagaaacagattgaattgtgacctttatttttcagtcagatctggcttactg

SEQ ID NO: 134490 - DNA, 368 bp, Zea Mays
tcttattatcgtaatccgagacaacacatatataaggaacactaacaaaatcgactcctatttaacatgagctggctaatcacagtagaagacttagcgaaccattttagacatcgcaactcaaaacatgggtgggagcaggttacttaatgtttcttaaccttttctcaacttaaactggacaacacacaagtcacttaaaacaccatatttaaggggtctaacatagaggcatcaacacctggcctaaaactccgtaagacttacactggctactaaaggacctacaacacccatgtgcatatgttatcggactgttcttcaattttagcaaggattgactcatgaacgctactcgcctccaataa

SEQ ID NO: 134491 - DNA, 451 bp, Zea Mays
accaatatgtcattgagttgcttggcacattgctactgaggaaaaagaccaggtcaaccacttagcctagctttagctccaccaatgcttacacaatttttttgtaactaaaaatataattatacaaggttcgccacaccatcatcaagtgccacgatatgaacagaaaaataatatacaatggataaaagcaccaaacgttatggtcaaatgaacttaagcaaaagcaggcataagtgtttggatgcaaagagaaggattagagaaatggtatatcctatttttctgatattccgatactctcgaaaaggttgaatatccaaacttcccacttgcttttactatttcgtgattattgcaaattaaggctgccaaacttaaagaacttctgatctcacatgtatccattagaatccacagaaactacagtggaaatcattgttagttgatc

SEQ ID NO: 134492 - DNA, 978 bp, Zea Mays
tccatggatcagctttactagcagccgccgccgccgcggcggagagagacgccagacacttcttctgggcttctctctctctatctctctgactctcttacaaggaggggagtcgagagacaaatcgtcttgaggtatcttcctcccttgtatggttcgtttatttcttggatgttacggtggtgatccaccgcctaggagctcgatcgccggcgacgtcgtggccgtgtgctgtcgttctaatgcggctaggggtggatctagaataaaatatgactgatagtatacttgtgaggacgagtacaaaaatatcagaacaaagacagttaggttgaggaggtgatctcatgataaatattagagcttatttgatttgctgactaacttgttatattttatctaaattttctgtttgactttaatatttaattcgaatgattaatcttagtcaaaatgtgatgcaattagacacgaataaaacagtcctttaaattctactagttacaacagataaaaagcggaggtctgtaccctcgctgcactagccctaactaggtccgcccctcacggtcccgttgggttctgaaaactcaaaaagagagagaggtaatttgggtaatcaagtctgtgtatgattactagaataggtacagtatatataggctaagccactagccgattatagaaacagatcgggagggcagtcactggttagccaagattacagcacggctgattagccaaaattacagcagcagttacaggagaggatatcctctagcaatatactgtcaaagctccaacgccattggtgaacgaatctcaaggaggtacgtagacagagacagacgccgcaagctcgcgttcgcagtgccagtcaaactggtggtgagcaagttggacttttcagtcagtggccttgttggctctcttcctctccggttggttcttggttcagatatcgggggtgggtcttcg

SEQ ID NO: 134493 - DNA, 475 bp, Zea Mays
gtgtttgggcagcgactccggtcaggtgccgagcaagaagctgcgccagtccccctcccccgcatgttgtcccgtgcccaccaggtccttagtgacactagggcagcaatcttgtggaagtgggaggcgcttgaggctgagcaccagcgcctcagtgactggtgcacccaactggaggaacgcaccaagacgacgtcctgtcagttcatctccgagcggtcccaactagagcgggaccgcaaggagtacaagagggacctccagagggtgtgcgccagagagctggaggcgtcccggagggagaagaaggtgaccaggagggaggaggccgtgacccagagggaggccctcacaatagagtaccaggccaagctgagcgccctggatcagactctaaaagcccagcgggcccagcaggtcaaggccgtggagaggctgcaaaagtggcagcaagagctcgagggcaaggccagcg

SEQ ID NO: 134494 - DNA, 535 bp, Zea Mays
aagtgttcttttgggcaacaggaaataacttatttgggacatgttgtcagtaagacaggagtctctactgatacttccaaagtagcaactgtggtttcgtggccagtgcctgctacaataaaagcactccgagggtttttgggactggcggggtactatcgaaagtttgtcaagaattttggagttctagcgaagcctctaacggaattattaaagaagaatgttgtatttgtgtggacatctcagcatgataatgcctttcaagccctcaagcaagccttatcctcggcaccagttttggcattgcctaattttcacaagcctttctccatagaaactgatgcttcaaggaagggtattggagctctcctgcagcaagatggtcacccgctggcatttgtgagcaaagctttgggaacaactaacatgtgccttttagcttatgaaaaagagtacttagttattcttctagttgttactcagtggcgtacttatctgcatcatgccaaattttgcttctacagtgatcaacgta

SEQ ID NO: 134495 - DNA, 559 bp, Zea Mays
gaaaaaacgaagataacaagcatgaaaagagacacaatcgtctgagtagcagcagcgctagagtatttacatatcattgctatgtacaacacaaaagatggatgaaaaattaggtggctagtatggcagccgcttcagcgacagtgaggacttcgtggtacaccacatttcaagtctgtaccccgcacgaaccgtcctcattctcaatcaggattctaaggccacctctggatgtagtcctagatacggccacataaagttgtccatgagtgaagaccggtttcttgaggtaaagcccaaccctggatagggtttgtccttggctcttattaattgtcattgcgtagcatactcgtactgggaattgccttctctggagtgtgaacggccattttacatcaatagtattgagggttattgtagacccctaaaacttaactataagtatatgcataatgatattatattaataagttatgtgggaaacaaaattaagatttatgctagcccatgcattacttgtaaggcatatatactcctttttacatgctaatcgata

SEQ ID NO: 134496 - DNA, 474 bp, Zea Mays
caaaattcccagttcccatcatagatgaatttctggatgaattgcatggggcagcgtggttctccaccttagacctccgagctggtttccaccaaattcggcttgccccggaagaccaacacaagtcagcgttccaaacccataatggacactttgagttcaaggtgatggcctttggtctgtccggagctccagctaccttccaaggcgcaatgaaccgaaccttgggtccactactgcgttcctgtgtgcttgtgttcttcgacgacatcctcgtatatagtcctacttgggaggatcatcttcaccacctggaactagtcctgcagttgttttccacagactagtggcaagtgaagctctccaagtgttcattcgccaagcaacaaatccattatttgggccacgtaatatccaacaggggtgtggccaccgacccctctaaggttgctgctgtcaccacttggccccaac

SEQ ID NO: 134497 - DNA, 367 bp, Zea Mays
acaaaggggacagaaacaaagcacaaaagttgtaggccccagtacaaaagggatagaatcaatgactgctgctgacgcacactacactactaggtactaaaatattagaatcatcactgctgactcggtctactaggaaagacgatggattcttgggtaaaagcgcaaccagcatagactctcatggacatttgcctattaacacgttttggagatttacctaacatctgcttcagttgtcacacttgttcaatgtattcggacagactctctaggaccgggatggtgtggtgtgcgcctaaaagctgcttactacgtggacccctctatttagttcgatcgttattgcctattgtctctactagct

SEQ ID NO: 134498 - DNA, 530 bp, Zea Mays
caccaattcgacccactttccctttttctccacgcatgcgcacggcccagaaaccttcctgtgaccgacacgcgggcccgtgtgggcagtggtcgcgcccgcgcaccatgtgacaccgccgtgtgggtcctctctgtcggatctatcctctcccctctttgtctcctttcaacagaacgcgaaatcgcgcgagtgtatcggtgtcgcaccgtgatcttcggggaaaacgttgggattcttggccatgggggcataaatggcagtgctgcatccccttctcggcctccaagctaatacatgggtctcatggcaaaccgggggatcgtggggaagaagtctggcgctgagaagaatggcgggccgccacggtcagtcccagtcctggctaccggttcgccgtcggggcctccaaactccctagggatgttcgccggttccctctaagactttgcgtggcatcggtgagccggatgcgtctgcggcactgatccagtttgctcatcggagcatggcggagtggcagaatcccc

SEQ ID NO: 134499 - DNA, 556 bp, Zea Mays
actgtaaaacttagcaactgaatgttgccactgtcttttggtattttgggtgaatgttttgcttgttgcaatcagcggctagctgcttttcttgtgaacaggtgaggtaggtgcatggctagctgctttgtttgttgcaatcagcggctagctgttttgcttgctgaatggctgactgaatgtgcgtgctacagtgaggtaggtggatgttctggacttctggtaggtgcatattatttctggtgaatgttttgctagttgtttacatttgtgaatggtaaatgtattttgggctgctttgcttgttgcaatcagcggctagctatttttgttcgaggtgcattttaaattgtaggtgagaatgtgagttgtgagatcaatgacttggatgtttgctagcgttgccaggctacctgggatgctgccggtcagaaggttccgagcagccaggaagtaaacaagcgaggagaggtctgggaactgggatcgggccgtcgaggctgttcgtggaatttgggacaggcatgatcatgggaggatctgtctaagtgtctac

SEQ ID NO: 134500 - DNA, 346 bp, Zea Mays
attttacccatcctgggaacttgatactgcttgttggtactgttgatagaacatgcaagtttttgctttctcgacttggatgcacctgacagaaatttttgagcaacgtgagatgcaatatgtctctacacgagtggaccttggaaaaaaatgaccagacgcacactaaacatgattattaagttagccttatatttggtggtgtgtgaggactgaggacttcatttgtgtgggggcactcatggtgaaaaattgtcatgtacctcactcaacataacttgggtctgcccctgtatcactatgacactatgtttacttcctttatttctttctgtttttacttggg

SEQ ID NO: 134501 - DNA, 288 bp, Zea Mays
gcacgtggaccgggccaagaatgaagaggccgatgcactagccaaggctgccaccagaggcgagtctctgccctccgacgtgttctaccatgtcatcggcacgccagccgtccggagccccgaagggctcaaaataaccaatgacagcgagggccaccgcatagtcaaccttatcatgaccgaagactggcaggcaccaataaccctgttcctacaggggtactatcaaccaaccgacatcaacgaggccaagcgcctcaaacatcgaagccgggacttcgcgctgat

SEQ ID NO: 134502 - DNA, 689 bp, Zea Mays
tggccatcgacgcgatcgtcgccggccaccgtctgccctgtctcctcgccattactcacccaccagcaaggtttggcgccttgtgtccctatccccttgcgcctgccccgagccatcccatcaccaccgtctgcccgagccgtcccgtcgccactgtgtgccatcatcgccgccacggcaagcatcaccggtgcttgccacctctccttccccctcccagtcgcctataaaaggaccgccccaagcttccccaactccccacaccggcctcggcctccccacacccctcctccgagctcaatcaagccacgacactgcgcccttcctctgctccggtgagctcccatctcccctctctagtggcttatagtcaaattgttatagctcttaagctctgccactgcgtcacaagcataacacgcgcttctccttcgcctattatgcccggtagccccaccggtgacctcaccgccgcgggcactcgccacctcaccgcagactggctgttccaagcccccaccggccaaattgaccccacctctgtgataccctacctccgcccgtgctatgccaccatcccgtcgatccagaaccggaccaccggtgaggaaccgccgtcaggttcaccggcgaccggttctcaccgccgcgggcgaaccgccctcctcccccctaacactgttacctcc

SEQ ID NO: 134503 - DNA, 356 bp, Zea Mays
cgaccttacccgaactccttaatatcgccagataaatatcatgaccgcaccgaacctagcgcgattaagtttccacaagagcctagcctttatggcctagcaccaaatcggcactagcgtcaataagcgcggcttgcttgcgaacctagcaagtgaatgttttcgcaagctgttgccgtgtcaccaccagtctacactaacaccatgctgcacatactgggcaaaagaacgggggcttgctcttccaggcacagaaagtgaaagggagaagagaaagcaggaggggttgtacgcaccttgtcagcgggcagagtgcgaggcagttgtgaattgtgattggaggggacggggacggc

SEQ ID NO: 134504 - DNA, 502 bp, Zea Mays
gggtagtattgtattttctcctttctccactgctacgtaggtcttggccttcgtcatatgagagcttctccgctagctggcattcgaaacctttctcctttcccgaaggtatcgactttggctcgcaccttcacctcttgcgcatataggcaaagcttctttacatgttccttcggtcgaagatcagcttcatccatcaatagaaaagcacatgaaacacaattacttgtgccgaaatgaaggttaaatggagaccttcggcatgataggcccccaacagtagccccttgcgaaatgagttcgtttcttcataacgagcttaaatcgcaaaatagaaaaattgggaggtcttgtgccgaaggtccaaaaaacaccttctcgaagctcgttatgaataccctgactggtagggcccagatctcagtgggtacaacgggtaagttaataatctacgggtataaaaggaagcgatacccgacggtgttagtacgacatttgctat

SEQ ID NO: 134505 - DNA, 359 bp, Zea Mays
ggaaccagatgacaaaagtgcagccgagcgcattgctagacagtcagctcactacacgctcattggggaaacactatacagaaggggcgcatagggcgtcctcatgaaatgcattctctcatctactggaaagcaacttctggatgaggtccatgctgggcaatgtggaatacacgcagcatccaggacactagtcgggaaagtcttcaggtccggattctactggccaacagcaaaaagtgatgcagctgagttagttcagaggtgtgaagcctaccagtacttgtcaaaacaatagcatctaccagcacagcaactgcagaccataccagtaacctggccgttcgcatgctggggac

SEQ ID NO: 134506 - DNA, 370 bp, Zea Mays
aaatttgcttcttaggttgggatccccgggtcggaccgaaaattcgagaccattgtggtacttttcgatgaagttggatgcactgtagttgagatgaatcaagttgtttatgatgaattttaatattgatcatttaagtgttgttttcaattgttacttgatatggttgtgcatatagtcgtgtaaatgcttttacattgtttacagagtgaattttgaaatacaaaatgagatagaaaatacgatgtgtaagctgctgtatagatgaccaaatgagtcgtgtctgggggccagtccgaggcatataccatttaatagtgcctaggctggctcgacacgagagacttatcgtgcctaggccgctgcctcg

SEQ ID NO: 134507 - DNA, 485 bp, Zea Mays
cacacctagaatggccatttcccaacaaaagcctctacgcaactccaaggagttacacaaaggctcggggctgctgttgggcacccaggaacggggtgcccaaaggaagtccaagaaattccttgaaatgacccactaatcgattctccatcgagcaaacccatgaggtggaacagacgaccaagtctctaccgagcaaccctgcgaggtagagcggacgaccaagtctctgtcgagcaacctgcgccgaacgaccaagtcctccgttgagcaaccccacgaggcggaacaaaagaccaaccatttgtcgagaaatcccgcgaggcgcaacaaatgactaggtcccgagcaaaacagcgtaggggaagggacaacctaatgctgctgacccacgtcagcatgacaagatgcgtcaccaccaaaccatgttcgggccacgtgtacggtgtcgaaaagtccctgtcaaacacaatggtatagtctca

SEQ ID NO: 134508 - DNA, 401 bp, Zea Mays
atgttgtgcctaatgcgagttggcttcgatttgtaatcatgttcttgccgtaggggactcctctttcgacaggtgacaatgcaacatttcacttatccggttgcgcccttaggcgatatctgtttagtaggttgtttgtgtagtgaggatcgcgtaccgtgagtgttgttggttttttggctgcacgcttgggcgacttctgcttggaagttgtctttgtagaagacttcgccccctgttggtggtgacgcgcgcttatgcttttgtccggctgcacccttaggcggctttttgctcggatgtgttgtgtctcgcacttattgtgcttctgtccggctgcacccttaggtgacttttgctcggacgtgttgtgtctcgcacttattgtgcttctgtccggc

SEQ ID NO: 134509 - DNA, 935 bp, Zea Mays
cacatattggaccacacggagagcagccacagaagatcctttgcagcaaataccctataggaaaaagccaagctacgtgagtggggtttgtacgatttcctctctggtcgcacgaagcaagggggtggggaggagaatacgacatgcaagtgggacctgggagatttttaatgcatgcagccatgcaggcgggacccatacacgatttctcttttcagttgcatgcttgcgcaggaaaaactggatcgcgcctcgcacgtcggttgctgcaagctgcatgcgggcaagacgcggggcaggatcaccggccagtgctgcgcgcggctcgttagagccgaggtcgaggtgcgtgggagctagccggcaccggcggcgcaaatggtgacgtgccgctaggcgtggggcagtatggctcgggaggctttagtctggcatgggcatgggccacacgtaccacacgcacacgcaggggctgccctacagacaggctagggacgagcgccatggctcctgtcatggttggccctacggaaggcgctacgactctccagccgaagcgtggctatggcgacgcgcgaccgaccacagcgcagaggcacgtcgagggatgaatctgcggcttcgggtagaagaaacaacacgaatagagacacagaatggaagataaatagacaatagaaaagactcaccacacaccgcagaaggagaggctcgccagagaagcgtcatcggcgggatcaatgcacgttccgctctaggtgaggacggcaagggagattgacgatcagctcctcaggtcactgcatagaaaagaagaggtgtgggggaaggagttggtactgtgcatagtggagggggagttttggcgagctatcgtgagaccaaccagcgatgtgaagaggaacgagggcgaaggttacgcgcagggagagaat

SEQ ID NO: 134510 - DNA, 846 bp, Zea Mays
cttttatgatcgatgtaaatgtcacaagcctcgccataaagataatgcatccacgactttagagcaaaaaccaccgtggccaattcaagatcatgagttggttaattcccctcatgcttcctcaactgccttgagccataagcaatcactctgccttcctgcatcaacacacagccaagaccaatatgcgaagcatccgtataaactgtgaaacgcttaccgctctcaggcaaagctaggataggggcgtccaccaacttgctctttaatgtctgataactgacctcgcaatcgctggaccagatgaagagaacacccttctccaagagtctagtcaagggcttagcaatgctggaaaaatttggtacaaaacgccgataatatccagcgagccccaagaaacttcgaatttcaaagacactagaggtctcttccactccaccacagccgcaacattcttggaatcaaccgcaatgccctgctgattaatcacatgccccaggaaagccacttcagacagccaaaatgcacacttcttcaacttgccatagaactgattctcccttagggcacccagaacgagacggagatgctgctcatgctcagcctcggtcttagaataaatcagaatgtcatccaggaacacgaccacaaagtcgtccaagaactcatgcaacatcctattcattgcttccataaaagcagcatgggcattagttaagccaaaagacattactatgaactcataatgcccatacctagtgcaaaaagcggtcttctcaatatcctcctcacgaatcctcagttgatgataaccagagttcaaatcaattttggagaacacct

SEQ ID NO: 134511 - DNA, 301 bp, Zea Mays
gcaagacaagctgctccgattgtgcagagcgttgaagagccgaatgtagtgccgaaggtgcctacagtcgggccagccaaagctaaagatgataaggccgaagagccacaaaaagaaatgccagaaattctgatcccactagcagaggcaaaattgccgaaggtgcaaagggctcctgccacaactcccaagaggaggaggatggccagcgtgctggacgctgttatggagaccacaaaggccttgagcccttctcctgctaagaaaattgctgaagctgccaaagtccaaaccggagccg

SEQ ID NO: 134512 - DNA, 360 bp, Zea Mays
ccctgctgtctcgccttattgattatactttgaagcaaatctgccgctagaacgaataaaagaggtgaaagggggtctccttgtcgtaccccacgcttgcaatgaaaagatttgcccggcacaccattaaggagaaccgaggacgtgccagaatggaggatatccctaatccagcccagccatttgggcccaaatcctctgaaggacagcacctgaatgatcagatcgtgctcaactgtgtcaaaggccttctcaaagtccagcttgagcacaatgatttcttttttggaaacatggcacaaatggatgtattcataagcccaagctaggcaatcctggatggatctacctttgatgaag

SEQ ID NO: 134513 - DNA, 500 bp, Zea Mays
cgaaactcatcgcccacacatggcctcttcagcgctagggcctggacattatcgggccgcttcccacggctcaagggaacctcaagttcaccttcgtcgccgtcgagtatttcaccaagtggatcgaggcaagagcagtatccacgataacagcgaagaccgcccagaaattcttctggcaaaacattgtttgccgattcggagtcccgtccgagctcacagttgacaatggcaaacaattcgatagccaagacttcagggacttctgcttctccatcggcaccaagcttgccttcgcctcagtgtaccacccacaatccaacgacgtcgtagagcgcgccaacgacaagattttcacggcaatcaagaaaatgctcctcgatgacaagaagggtaaatgggctgacctgctacctgaagcagtctgggcactgaacacgaccgagtgtcgggcgaccggattcactccctttcgcctgctatacggatcggaggccatg

SEQ ID NO: 134514 - DNA, 314 bp, Zea Mays
acgggcttgagctgtggtgagatccacatggagcttacggttgagcttctctgcatcttctgctcaggcaatcatctgacggtggtgccgagccaagaaatcatactgcgcatccagggtgagcaggtatgtagtgaggtacacgactgtggggtcgtcctcaagcagctgctgctcttccaatgcacgcatcctggccatccaaacgggacggtctctctgaaagggcggaaagaatctgagcggtgtgtcggccacttcatcttcatagatctgacacagggtcctcaatgccttgcaggcgacgacttggc

SEQ ID NO: 134515 - DNA, 644 bp, Zea Mays
tatagagagagaagcccacggagagtagacaccattagagcagcattcctctcccctccaaaagaagagagcgctgcatttttcgccccaagcatggcttaccgtacaagatctgcgagtgcgccttccagccgttgctccaacgaacccagcatcgaggatcagctgcagattcattaacgaaaccatccgaggaggcttggaagtgtgtctacaacgacatttaggagatcatgtgcttgactagcaaccaagtcagcctgtgccaaccaaagcaaaggaaagcagtggaggacgaggttgagcgcgcgctccctctctctctcctgttgcttgatttcttcggtgccatgcaagagagcaagctcgagcattcaggagacaggaggtgcaactgattatcaaaaggggagacgttgaagccaagattcagtttcgaaccctaaatatgctttgtaaagaagatgcagagagctggaggaggttcaagaagattaacaataggtctaccttcagctaaccaggagagctgcagggtggtcaagctgttgggtgaagctagagatattgctgtctcaattctcgagtcctcgtcacatttcctgtcaaagcagattgcagcaaagttctagcaagtggtcttt

SEQ ID NO: 134516 - DNA, 559 bp, Zea Mays
gaagacgctaagcctaacaatggtgttaggggtcagctgatgaagatatatttctaaatttttcaagacttcccctatcatctcattcagagcaagtcgcagtcctgctctagaaaagctcttgaaaaccactacttcatcattcctcagtgctggggtggtctcttcttcgacaaatcagacaaatttcctttcagcttccccaaagtagcccaacttcatcatcatgggcatgtcagcttcagacatagtagatttctcaaaatctagatggctagattttgttgggatcaaaatactataatcttcttcatcgtcttcaatatcttcttctttagcaacagtctgttcagcttcggtaacaagggtaccttcgtcagtagttccctctatcacaactagacctgattgtttcatgactttggaaattggtgctgtctcggtgacctcggtctcttctccttcacgagtcacccttgcagtcgaacgcactctggccatctgatggatttttgtggttttaacgaagttgatgtttctttttgtagttttgacgaag

SEQ ID NO: 134517 - DNA, 425 bp, Zea Mays
ctcaaagcacatttccttggattcacgaagctcctcaacatttttctctagcctagttttcgaccattcactaatttcttgactagccttggcaactgcaaagttctcattggctttggcaagtttttttctgaaggtcttcaatttgggctttataaatttcggattgagtgttaaaccttgtttcatcttctttcactttatccaccaatgaaagtagaattttgtccttctccaaggctttcattttctcagtttaatgacttctgatcgaaggttgccaagagctatcgtgcagctctcatcctctgcattcttttgcgccctcagggcgttgctaagaattaagccctgcaaaaaaggacggaggattagcatgaaagactttatttctaagttcatagactttaagttcacaacttctg

SEQ ID NO: 134518 - DNA, 451 bp, Zea Mays
cacctggtctgactgatgccaagaatgcaggcgaggtactgagattgaagaagactctttttatgtactgtcaaacaggcaccaagagctcacttctgttgattggagtatatgttggcgatcttatcatctgtgggccagacaataagaaaactgatgagcttaagcaatagatgaagagctgctgtcagcatgagtggtctagcctatcgagttattatctgggaatggaaaagtacttcaggtgttgtgttcttccttggctcgaatttagtgacctggacatctccgaaggccgaagcaaagggtggtagccctgtctgtccttttgtgtagctgaatatatattgcagcatcagcaggcgcttgtcaaaggtgtctgccttagcaggctcattgcagaccatattggtggtgaagtgaagatgttgaagctcttcactggcaggca

SEQ ID NO: 134519 - DNA, 530 bp, Zea Mays
ctctccgcagatttcttttccccagccacctctcttccttatcttcttcaccgcgtagcttcttgttgccgtgccctgatcttttcccctgcgcgcgcgtctcatggcagcatgctctgtacttggagaaaaatcacgccgtggttatctccagccgcctcacatggagaaaaatctgctgccgtcgcctaggtcttcatctcccacgcgcgcccttgctccctgattttttgacacgccgcgcgcttcttcttccttatcccctgcgcgctcctctctgccgagtctccctctgcttcagccatggccgcgcgcttcatccactcgtgcgttgcgaccaagctcctccctctccctctgccggctgagcgccctcgccatggagctgctcccttcgccacgcgcactgctcccgattggccgcgaagagctcgcccctaacttcccatggcgctcggccctgtttggatttcgcccagccgagcccctacacgcgcccctccgttgctccatccagggccggagcctcc

SEQ ID NO: 134520 - DNA, 406 bp, Zea Mays
aaacggctattgccaaaagaactagtagcgaagcgtgcaaagggggaatgctatcactgcatagagaagtactcagtggaccacaaatgtgctgctcaaggggttttcttgctggaattagaagaagacactagagagtaggaggcagtggccaagatggacatatcaccgcacgccctgacaggaattgatgtggggatactatgaatcttacagttctaatcaaaggagtgccactcacagccctggtagacattggttccacacacattcatcacagaagcaaaggtgtctgagctgcagctgccactggaaaggcgccaaggagcagtaagggtcgccaatggggacaaggtcaccaacctagggttctgcacgagattatccgtacaaagtgctgaagagc

SEQ ID NO: 134521 - DNA, 391 bp, Zea Mays
gatcgcttaaaaccccatcgtttattttctatccttctcttggccatttcatcgaacatatgcatggcagagccgtagagctactgttggctctctctcccaccttcgcgcagcttctctccaactgggcacaagcaaccaaagccacacgagcaccatggccaacacggtggcctctgcgtcggttgggacgagctctgcgatcacacattcaccgccgtcggcaacaagttggtcctcgccggcagtggtacggtacatgggtgcgggaatgaatggaggagacggcacgcgaacagtgtttagcgagtggtcgtacgtccggcagatttagcgtctcggaggcagccgctaaattttagcgtatggtttagagtctcttgctggaggc

SEQ ID NO: 134522 - DNA, 693 bp, Zea Mays
tgagaattcctcctatggtctctccttcgtccccgcatcgcgtaggatcagtatattgtagatttggggtcatggggcgctggagatttctcatcggatctcacctctattgcggctccgctattcaccgtgggtaggcctggtggcccgatggtacaccaattttgtgccaccactgggttcgccttggcttactcttcgcatagcattagtctgggattggttggtgcgctaatgggtgacgaagctcgtcgccggcgcaatcactgtagtggttcgtactcgagccaccgtctcgcgtggtggggggaagaagacagctcccgtgccgtctgattccattcggacggtgtagattagatcaccgaataaccctccgcttgaacaaatcgtaaccattgattctgggtgtgcagtcaggattagaaggtcgcgataccccttcgcaaatgaaatccgagccacaggttttagatctgacggcagtcgtagcttaccgattcatacgcatcgagatctaatctaaaccacagaatgtagatccaacggccctgtgatcacgataccccttcgcgggtacgttttataaaagagaccctgtcttttacatatatcaacccgccgtccattagtcactatacgctgtgtctcaggtttcttgtcccaagccccctagacttttatcaatttgac

SEQ ID NO: 134523 - DNA, 341 bp, Zea Mays
ggaggatctacgatggacgacccggatttaatgaacgatgtggttatgcgctaccacatcgaaaccgtccatcccgggatctacggttaccaacccttccccccgatctaatcctaggtgttggatagaaatcctacggcgaccgcaccacgctcccatccagtcacaacgagcgacggtgccacgccccctcgcggcggaggccatggccggaggtgaccgtatcggtggactattccctaaactccaattggtacggtgctatgcgtgaagaatggcaaagcgaacttcatggatgcggaactcattgcggacgaagtcgcacgcgggctgttctcggc

SEQ ID NO: 134524 - DNA, 642 bp, Zea Mays
cgattgtcaagaaaagctaaattcagccttttttagacatttcactctgattgtagtatgaaactcgttcctgtgatgtatatataagaagcagaaacaagtaatgctcctccattactgtaatttagactgcatgtgatgtatatataagaagcagaaacaagtaatgctcctccattactgtaatttagactgcatggcattctgcaaagaaaagcgttagatagaaggacacaattcacctccaattaccggaatcaatgtcagacatccacaatgtgttccatgtattccagctccaaaaacgcatataagtgctagaaacccatatcatagaatagccaatccagaagatctgcagtctcgagaaaaacgactgaaaatcttggacctagccgttcacaaaacccggaacttagaggtaagggtctataatgtttagtggggctaagaaggtgaagaagaagcaacctaggaaagtgaggactcaatgaggaaggaatactcttatcttttctcagacccatcctgaatctcgagggaaagattcttttaagtgggtaagtttgtaacatcccgattctcaaaaaagaggttagtagaagaaaccttaattgcataatcccaaaactctaacatcat

SEQ ID NO: 134525 - DNA, 1094 bp, Zea Mays
gccatatttgtggggatgctgcttcatcatacggacagaccactatagtctcaagtttctcctcgaccagcgactctccacaatcccgcagcaccagtggattagtaaaatccttgggtttgatttctctgtccagtaccagccaggtcacctcaacacagtagtagatgcactctcccgtcgcaatgcggatacccttttctctgtagctctatcggggccaacttttaccctctatgatgacctccgaagggacaccgctagggacccagactgctagaccatgtgcacccagattcgagaggggaccttacctcacccatggcgcgtgtaggacggtctcattctccatggccgacacatttacgtgccaacatcatcagattgtttgatggtgctgctgcaagaagtccataatgaggccatgaagggattcaaaaaacacttaccatactaagggctgatttctatatcccacaggacaaagctcgagttcgagattttgttaagtcctatacaacatgtcaacgcaacaaaacagagcgtctgcacccagcaggcctcttacagccattggacattccctcacaggtgtgggcagatatctcaatggactttgttgaaggattgccatgagttcatggaaaatctgtgatcctgacagtagtggatcgattctccaaatacgtccatttcattgcactcagtcacccctacaccgcatcttctgttgccaggatcttctttgcggaaattgtttgtcttcatggcattcccgcatctattgtgagtgatcgaaacccggtcttcactagccatctaaggacttattcaagctgactggtagcaaactccagttaagcactgcgttccacccccaaacagatggtcaatcggaagtcgtcaatcgcacaattgctatgtacttgcgatgcatcacaggagatcgacctcgttcctggctggactggcttccatgggcggaatattgctataatacatccttccactcaatgttgtagactacaccattcaaattggtatacggacatgagcctccggcactggtaccataccaacagggcacgacgcaa

SEQ ID NO: 134526 - DNA, 486 bp, Zea Mays
cgataaaatgctctggtcatacctcaagaggtttcagaccatgaggaactgcatccccaaagtcgccgaggcagcggtgattgaagacttctaccggagatccaatgactcggccttcgtctgagccatactccagaaagtgccagccacctccgaacaattgttccagaaggcagacctctacatcaccgcggatgaatgggcccaggacctcatatgaggcatgaaacctgcaccacccgcgccacaacgtgatgggaaccagcagctggataggcgctgggagaagaggccccgcaaggaggtgcacacagtcgggccacccatcgcttgagcctgcggcgcaccccacggaggggtatggacactggatgaaatcctcgacgctaagtacccataccacaaggacatgcgccacaacctatggaactacagggacttcaagcactctgttgggcatggccaaccattctagcctctgttgcc

SEQ ID NO: 134527 - DNA, 422 bp, Zea Mays
tacggataaacatccttcttctccccaattcaatcctagccacggcggcagagaagccacccggcggtgcgcccaccggcaacatggccgaccgacccccatagccctaacccgagcgctaactggtgcaaacggaagagggagggatgccgaaccaaatgggagcgattttaccgtgaatcatgtagcaggactcgccgcccacggagacatgcgggttcacggcggcaaatcgatcaccggcgacgaattcccacgaccctagttgaccgccttgcccgaggagtcgtccaacacccgcagcaagagacggcgatcatccagcatggtctggcgctccaattcccgacgatggcagagaatcgcgcacggtcctccagttgacgccgcaagaattccccacacgcgagccctcagttcag

SEQ ID NO: 134528 - DNA, 403 bp, Zea Mays
aaatcaagcccatttagaagtataaacattggaattcagaataattctaccacaaagtagcagtggtgcatcacattggtttagttgtgtctttgaagtactagcaatttgttttttacatttactccaaggaaaacattcctagccatctagtagttatgattatgaaaaacatagacaaagcctgagtcatccagaggtgtgcaagaaaactgccagtttaattggtgtgcaaggaaactgccagtttattagggtttaatggctttgttggtcatgtgaataagtttaatgtgatcattttaatgcagcattaggtttagcttacttccattgaatcaacactcctgccactacttgttaactggcttgtgtgattagagcaatcctagccaacactgtc

SEQ ID NO: 134529 - DNA, 278 bp, Zea Mays
gggtaacttggctcaaaagctaaagacacttcggcaagcttagtctttttggctgtctctgtatgtttggggcgatgagtcagaaccttgactcttttcggcttcggcgtgctagaaatcgccgaagcggcagtctttctcttttttccttgcttttgcgaaggataacagtaatctgggtatacaaacccaatgacgtcaaaaaccctattcaaccttttcctgcctcgacctccaaaggccgctgtcatggcatcatcttcagcccttgtgtaggc

SEQ ID NO: 134530 - DNA, 296 bp, Zea Mays
cttcctgaatgaatttcctgtattcatgagtccaattcggtccaccatgattccatagattgaagaaagccctgaattccgaacgatcaatgcatttagaattataaacatgaaaaccgacggccttggagaataccgagaagcgaaaacccgatcagatagctgagatacattgaaaccctttgcaaaacctcccagagcagcttgaagaagataaccaactgaaaccgtgtcaagcttgaatatgcaacgaccaaaagagatgaccaaccaaaaggtcgcagggagattcagac

SEQ ID NO: 134531 - DNA, 656 bp, Zea Mays
ccctgcacgagccaccagttgagcgtcgtgctgacagatgggccccagccgtcggcttcccctacctgcgtgagccatactcgctcgcttactctctggtgtgtggggccgggctgccagggcattagcatgttcatccggtcgctgactggtggacctctctgtcaggctggtcctcaacctcgcgaccacggccgaacgctacttccgtgttcatcggacaccgatgccgtgcgacaggttgggttgttctcccccgcgacttccacggagttacgaaccagtcgcctcggacctctatcgcgcatatatatacggacagtgccctcctctcaacccagcgcgccgtcgcattcgcagcagccgagagagagagagagaaaggagacaggagagaactagtgcgtgagctaagcctgggtcgtgcgctgaccggggggaaacagagcttcatcgccgcgcgtcgtgatcccggctggtcgatcgcagtaccaggcggtgttcctggcagtgccacggtaagttgtgctcccataatcttcatcgcccgtatctccctagcgttagaacttgcgtatggtagatgcgagtcgcggcgcgcctgttcaatccgacgggtcgcgccatgggcgctcactgctgtcgaacgcccgtgc

SEQ ID NO: 134532 - DNA, 335 bp, Zea Mays
ctgattccaaaggacccgttgtctgtttacactaagggctgatttggtgaccagaaatcacgaggatccataaaacctttggtattcaatttgccataaatcatctcgtgatccctgagcaccaaattgtcctcgggagtccggagtaaggacatgattagaaacctaatcgtcggttaatcgtgtttagccttggacgatcagagacatgattgttttaggaattctggtccacttcgttttgttttttaccattcattttggccaagtcccacgcatacaagtacacgacgcaaaaagcatccacattccagtttccacacgctaacacagcc

SEQ ID NO: 134533 - DNA, 1170 bp, Zea Mays
ctgccatgcaatcaaaatgtggaggagaagacccgacgtggacatccatggaggtatgagaaggggagcccgctcgaacaccctcaggggctaggtcgcagcctgcatcgcccattggagccggatcaccaccggcagcaccctcgggggctgggttgtagctcgctcgcgctacccactcgagccggatcattgccggcaacaccctcgggggctgggtaatcgctagcgccatccttggggaccgggttctctgcagcagccacctctaaggctgaaggattctcagtcacctccatgagaatggagcaacctagaccagcttcttgactctaaagaccgcactccaaggtcgacgaggcatgagacactgctcgggataactctaactccacatccggaatgtcagtgcaaacgtccatcataccaccatctgttggctcggacagcagatcttcaggaaccatatcctcgagagcccggtcaaaatttgctatggacaactcttgcagaccaacgagagcagacaaagctggagaaggaatatcactactccccccactgactaggtaacgccgactgtttttccgaattaaggggatttcctcctcctcttcttcatcctcgtcaacaatacgaacaacacacccattggggtcagcgtcgcccggattgcacccattgggttcagcatcatcaaggtcacacccattggggtcagcgtcaatagggtcacacccattgggatcggctctagtaaaaagttccactggcatttctttagtagcaggagcagaagggccggcatcctgattcaaacatgacactagccgaagcctcctctttttcttcttcttcccctcggcaggaatagttggatgactggccgggcgaaggcgctttgggcgagcaccatcagatttttgagcagtcaaggtcttttcaggctcgaggacagttgcaatagctatggtttcagcagggacggaatcagatgaatcctcagccaacatgtccagcatagcacttatctctgcatcactcgggtttataggcatctcaaagtgaacttgcctttcatcattcgggagatcaccaagtgaagcaaccagagcctcgacttcttcgggagagggtcgcactctaagacccaggccactgtcgctagca

SEQ ID NO: 134534 - DNA, 2125 bp, Zea Mays
cattgtaagtaagtttttatgtatataaaatgatcgtggaacttgtattccagcgtatctgtaggcagcttccgattcttccgaaatgtcttgttttcatcactttgtgcatttgaacaaaggctgtattcgtgaatgttgaattgtgggtttatttatgtgacaaggtccagtaattttgtatgtgcagccttcctctgcttgcacgctgcatgattgcttcattttgctgtctcaaatgagaagctgacgatgatggtgattttcagtcgaagcaaacaaggacaagtcggtgaacttttcatgtaaatcaagacgtaacctcgtggaaagctgggagatgcaacgagtcgaggtatgtaaaatttcaagattttcttggcctagctagctagtgataaggacagtgttttagtgttccctaaataatacattgctggctagtaagtgcctatgcgaggttatcatttgaatttggcaaggcagcactatgtacggatgatgatgtacactcacttctactctcacgtatacttgtcatatgctcctcttacttgtatgcatgccatttcctggactaaaaatcgatcgcagctttggttcttttttgctttcctgtgctaatgatggatgcagtctacttgagacgtcggtaatgctgcctgctttggttgggcatcgggagttggtgccccccagatttagggtcttgtcgagcgaatgaacaggactaggtgcttccactaccccgcgaaagggtcttatcacagtgtagaaaagcagcactttttacctttcccttgcacgaacggcgacgatgagacgctgataagtatttctttggacatgcaggaggatgatggaaagcagaggaacaaagcttgtcaaatgaaggctggcccccgtctcatgccacttgttcttgacatcagaaagcactacggacaaggtcgatatcatgataaatagcatgctgtatgtatgggatcatcagcgaacgttatggctgaatttgtttgctgttccaaatgaaacgggcgatgaagaacactgcacagattgtacttatatcagtatccacacaaggatcgatcctcagattcagttccatacaagaactgcttatcaaaaagattcttcgcactagctgcgggaaacacggattggaggccgcatcattctctccattctccaacatgagaattaaaggaagcaaagaaaggaggaggaactaaatgaagccctgtcactcagtttgagccatcattctctttccgtaagcatccaatcatatgggccattaaagcaggcaaaggagagagagagagagagaagctcagtcaggatattccatgaaaaacgcaaaagaaagcacctgcaatcatcaccagcttcatcactcatcaggctgctaatgctaatggcggggtatattccccatcctggctctcccctgtcgggcgggtttcctgtgaatctgtgattcaatttgctgctcaccaggtggtgccaaacgcttgtctccctccctctaaaaaaacacttgtctcacagcttctagataccgtgcagagttgcggacacgcacttagctcgatgtcatagacagtagtgcacttgtatatttgattccctttgttttgttggtaactaatgattcagatgaagcgcacgtaaccacatcatcacacggctgcataaatttcatctatagatactactactagcccagtgcaattacctcgcatcgcatctaatgatcacgcacgctctgcctaaaaagtaaaaacccaagaccaaggaatctatgcttctctcttcccctgctctgctcctcattgagaacgatctgcatggtttcagtgactttgttaagtcttttttttttcctttcgatttttgaacattgagtttggggatgtttggttcctcggtacaatttgccataacttaccttagccaaatgtggctagaaaatttgaagacatacttcgccgcactttttttactctaatataggtggagccctaaaaaaaatcttacctatatgtatctttcaagttgtttgtttaactttgtttctatagtgttttgtctctatgagattgtatttgcaaatagctat

SEQ ID NO: 134535 - DNA, 468 bp, Zea Mays
ctgtgttgcttgcgagttttaactctatcctttgttgtgcttttgctcttcattgcctttacctctcgcatttctcgatcttaccttggtgatgacattaggtctgttatctaaaatctccaatctcccatctcatttcgggagtggaattttacttatcctgcctttggtcataacctcatatttgccacgtgccagcctggccttagcttcattctttattctactcatacccttggttctcttgcaccttcacctcttctcttatacccttgtctgttatcgcctttaacccctgtaatatctatatctttaccttgacacttactttgaacccaacctttagagccttcccttctccatcccagttcaggagtggtgctttacctatctcgcccttcattatttctcctagtgtcgccttgcaagttttgtctcagttccatcctttgatgtgtttctgtttgc

SEQ ID NO: 134536 - DNA, 726 bp, Zea Mays
aacctatggacttagatgacatcggttttggtgaagatgaggggcagaattcaaaggaaaatgatttaaaatctggtcatcacccaacgaatgaatctgatcaaagtaacaacaagaagaagaatggcggggattggcatgggtctgcagcgaatggtacaggcaagcgggtggtatctctgctgagtttatcttgaataggctgcaacctttaggtttctcttttccttcaaatgatagtgttgttcataacttggtagagttatgggctaattcaaaaatttcgaaaccggaagtgcatgtcaatcaggacgctctctcacgggtactgggaaaggaggaaaatgatctgacagaggaggatgagctcgataatttttttcctaagcaccttgagtgatgatatttagaggagttgacggatacagacaatgagcatttaataaagtctcgattctagccctggctagagttgccattgcagctgccgcgaccacggccgagacagggcaccttagatccgccgcagcaaggggctatggcgaagcagggggagaaccttcctcaaccgaagtcgccaacgcaactgccacagccacggaagattcaccttccccatccagcgaagcagggggagaatcttcctcaaccggagtcgccaatgcaactgccacggccgaggaaggttcaccttccccaaccagcgaagcagggggagacccttcc

SEQ ID NO: 134537 - DNA, 794 bp, Zea Mays
actcaaaataaactagctgcagttgatccaccttttgtgcaggtagcaagtgatggctgcaggacccctacttagctctagggccccattttgtgcaggatcctagtggtgacttattctgtgcagtgaatctgaccatgcattattttgtgcagttgagcttgtctttgcattctattatgcagctgatctggtcctgcgttaactaggtagagactcttatatagtaacaagtctctaccagtatacatcttatgtatcacctattctatctaggcaatctattgtgacatgttgtggttgagaaagcccaaggaactatattggatcaaccataagactattatattattattcacatgttctgagcatatatccattaccatttctgctgttgtgatgcattttgactaatctgagctgatgatttttttttttgccaatgatatgcttgttttttgatgctgcacaatatgagcatatgttcattgccaataatgtacttgatttttttacgctacacaatccgagcatatatctgttgccaatgatgtattttttgtaatgatattttttcttaactaaggcaaacgacactagctgtgatgataattttttcttatgctcttgcttccaggaactttaattgatcaacaaagatgatgaccattgcctatggtgcagttaacaattgcttcacattctgagctaatgataattgccagttgctttagaactgatgccaattattaatttgggaggctaataaatgaagaacaatgatctgttgtgtt

SEQ ID NO: 134538 - DNA, 387 bp, Zea Mays
ggtattcaaaatttgcaaacctgcgccattgccgacttgaacggagtcgccgccatggtattgctcgcgaagcgcgagacgatctagatcacttgtgatgtgatccgttgcgccggtgtcgttgtaccagcttggatcaaccttggatgaagaggtagcagcaagggccatggtcgaaggatcaccttgatagttctcgtccatacgatgccaacagttgatggcagtatggctgaatttgtcgcagatttgacattggggtcgattgccccgaccatggccaccaccacgcggtgaccatgtgccaccacgagacggcacaccagctcgaccacgagttgtatcgcgagagtacgtgcctccaggtgcaccaccgcgcccgcgacc

SEQ ID NO: 134539 - DNA, 461 bp, Zea Mays
cgtcggatggtccctgggcggtccagatcaactcatagagtgagcagtcgcgtgaacaaatcaggaccctagatccgtagatgatcgtctgggatcttgtgtggacgtggtcgcttctgggggcctcgaatcatgatccgacgatcgcgggcagtataccaattcataaaagctgggatctaatcggagccgtccgatttagatcggaccactacgatcaccgcataccccttcacgctgacagttttacataaaagaccctagctttctaggaaacaaacccgcagtcctggtagaagtattcggagtcttaggaattcttctgtattggcccctgtccttcctggtaaataaggcgcggtccagagaatatttgaataaggaaattttattagaaatggaattttagtgtaaaaataaatgctataacttaattaattcatagaaaatccatatgaact

SEQ ID NO: 134540 - DNA, 715 bp, Zea Mays
ccaatataaatctggccgctcccttgcgcgttcaacccgacccagattgaagccagaaccacccaccaacctccgaatttcgtgctgccgtggaggaggacgggtcagcgccgccttcacttcgtaatcaggtgaggaaaccttcttttctgctcgaattgacctcagcgaacatcgggagagcggaattagtagatgggggtgtggctctgcggcgaatcgcctctggcgaggttagcgccgccgtgagttggtgcttcgccgtgggcagggctctgggcgtttcgttgcacgattggggtttgaccaggcgattccttgtgtccgagcgatcgtaaaaactgtgtcgggggtgtggaccggtcgaagttcaccgcattggcgcgttcgccggtgtgcctccgccgctctgggcgtgcgtcgccgtggtttagcgctgggggtggaagacaacgcaggggccctagatttaataatggacgatcacgattagatggagagaatagctagcgacagccgttggatcgttgtgtggcggttcagatttaatcgcgtgctccccttcgcgcgatccgttcctgaccgtcgatctcgagttagtcggccgggatttaatgatgtgtggagcgagcgattgccgtagattctagatccggtggctccagttgaataccgtttcgtctcacgccggtttgatcctggccctagaattcta

SEQ ID NO: 134541 - DNA, 508 bp, Zea Mays
atcaccacgaccctgacgtggactaatttttttccgttctggttctcatatggactaaattaccttcataaacgtaacacgtcccctaatagggaaattccctaggggaatcagctcaccattgccatctctagtgaagccttatttacctgtgtgtgccttagttactcttcgttttatgctggtaattttgtatgcgccttagttactcttagcgatctcggacgaacaccctgcacaccctcctgcacggccttggtgtgaactctctatctattattttttaagaactatcttaatgttaatgaacttcattaaatatatggattaacaaattttgaccacagtttttgcacgacctattctgtttacttttagttttttcaagtaaaatcattaagtagcaagagaaggtggtcatgcgtgattaaactaagaacacatctagttaaacatccaattcatcattcatccaagtgcaattggtcaagagcaagtctgtagtttt

SEQ ID NO: 134542 - DNA, 531 bp, Zea Mays
tttgtagccatcccatagttagcggtttttgcagaagggttggtggcgtcggatgtccttatgtcgatgttgtttggccgaggccatgctcggacgagacggagatttctcccgaggccatggttgggcctgcgcctggacacgtggtaacactgggagtggtcaaaacaatagtaatgtgagattggcggggagttggtagcatttaatgcgccaaggctggggcagttggttgagactgagctcggtcgaggtggagttccctcctgaggccgacttcgggcgaggtggagttccctctcaaggctgaggctatgcccaaacgtcgcatgtcccatatggagttgttgagaatagtgaacggagcggggagaagtgttcggtattcacgggcgtgcggtatcatagacggtgaaattagatgggactgtggtcccatcgtcctctattgaatgtggcatcattggtggagcaggtattcgtatcggttgtatttaatgcgcacgtcttgtggttcctgagaactttggc

SEQ ID NO: 134543 - DNA, 711 bp, Zea Mays
agtgcacaattttcttctcgccgagatggaggatgtgcagatggggagaggaggggttcacggtttatatggccgctagcgcccaaagtccgcgcaggagcagggaacgaccgccgagatctccgccgcacttgttagccgagcgcggaatgcggggaggggatgaatctgtccggtggagcccacccccgaagccgcaatgcgcgcggcgagtgactcagggtagcggcctaggtggaggtcgtttctgacggtgacccgcgccagcgccgcaaagacaacggggaatagcttccaccgagctcgcgctccgtggaagatggaggactgcggagggggccaacgcgtcagcgaccgagttgactcgtgtgcgtatgagaggtgaccgaccatgtgggcccgcgcgtcattggtgcagtggcatactgcgtgaggttgggccgcgtggagatcacagatcaagcgggcccgcgtgtaggcgaccggagcggaagcaagcgagcgggtgggctggcgcggtggaaaagtagtattgggccgaggcgcgcgagaattcggcccaaggtgagttttcccctttttcctttttctttattgtttctattttcctttcttatttcaatttcaaatcaaaccaagttttaaattctaaatttcaaatttatgcacaagaaaaacttcacattatgcacaattactacatagtatttc

SEQ ID NO: 134544 - DNA, 428 bp, Zea Mays
gtgggtaacaaggtcgtggccataccacggattatgcactcagacgacccgaccacggcacacggcggaaagcccagggttcctcgacgtcggcgagcaattgaggaacgaacggctggtttccgccctcccgaggtggtcgcgcacgcgcggcacaacaaggcgaaccttttgggcggtatctccaggtcacggctacagcgtagcacgcggtcgatggtggcgtgctttcaccgccctggacatggcgctagcggtggcgatttggtttcggtgttcgcccgcgcaagattgtagttgaggggaggaaaggggcacaggggggtgttcctacttatcccctggggtctcggttcaggataggaggagggagcccatgatttccgacgatggcggcgatcctcgcgcgagtcgttgcggagaagggg

SEQ ID NO: 134545 - DNA, 756 bp, Zea Mays
gttttggtgtttgtgacccgactgcgcaacacggggttacccacgtgatgcttttgggtaggacgacattgttgatcgcaactcgatggttcgtgtagaggcatgctaggatcactcatagaattatacaagatcgggccacttagaattgcgtaatatgctacttcatgttgtggtttgatattgatctttggagtacaaggattacaagctgggggtttgtggttgaagatgagttggagtgattagtgatgagatgaaatcgtaggccccccctcgaccttatatacacgaccagagagagttaacccattacaagttgtgattattatctacttgcttatcttcttctttgttgcagactgtatccctgcatatccaaagtcttgatcgcctaaccgcccgagctatcgccgagggcatagctcttcaggtgtttgcaattgcatcacttgacacatccgtgctttagtggtgctaactcgggttttggtcttcgtcagcttggatcgggctcgcctgagttggctacgtccagctggcccatcccatagggtgactcagtaagaagcccgttaggcggcctgtgatatgttttagtgttaatgaggacccgggagatcagctggcttcagggttggtcaagagattaaatgatatgatctcacaaaaccaaagtgctttcattagaggttgttttatccaggaaaatttcatgcgtgtgcagcaaacaactagagccttccatcagcaaaa

SEQ ID NO: 134546 - DNA, 358 bp, Zea Mays
gcttaaatgcgtcaccgaaaccgaaggcattcaaatccttcgcgaagtccacagcggaacttgcagctcccactctgggcctagggccctcgctgccaaggtgatccgtcaaggattttactggcctgccataatcagcgccgcgaatcgagtcacgaggtcgtgcgaagcttgccagaagttttctccccgctcgggcaacccttcacagttcaccaagctgatcgcccacacatggccacttcaacgctgggggctggatattgtcgggccactacctatggctcaagggaacctcaagttcaccttcgtcgccgtcgaatacttcaccaagtggattgaggctagggcagtatcc

SEQ ID NO: 134547 - DNA, 631 bp, Zea Mays
catgattggacccttcaagaaagctcagggaggctatactcacgtgctagtcaccatcgatacaatcaccaaatggatataatacaaacccattgcttctctaacctcagctaaggcagtggagtccatacaagacataatattcaggtttgtgataccgaatagcattataactgacctgggatccaatttcactagttctgaattcttcgatttctacgaacaacaaagtatccagatcaagtatgcatcagtagcacacccaagagctaatggtcaggtggaaagagctaatggaatgatactggaagcactcaggaagaaagtcttcgacaaaaatgaaaagttcgcaggaaagtggatcagagagttaccttatgtggtttggagcctaagaactcaacccagccgagctctacatggaaacacccccttcttcatggtgtatgtatcggaggaagtgctacctgctgatcttaggtttggggcaccaaggctggtcttcgaaagcatagttgaagcagaagcaaccaggctagaggatattgatgtgctgaaggaagagcgattgaacacagtaattccgtcagctaggtaccagcagaccttgaggcactatcatgataaagct

SEQ ID NO: 134548 - DNA, 752 bp, Zea Mays
catacagtttgcgaccattattgctatctcaccactcatgcagttttattccctggctggtattgtgacatccgagctgagtagctagacccggcaaccaggcggtgggatggttaggggtcgtgaagtcgcttggtatggtcaagtaccgtaagcctacacgccccaccgccccacggccggtcctgttgcgtaaatcaaaggataagaaataccagccggcggaccctatgggcgcactgctaaaaataccttgccaagactatgtgcaggttaagttccaattgggagctccccttgagggtcacgacatcagttgccaattacgaatcctagtatccagccccgacgcgtcgaggccatatcccaggggggccaagtaccaaggaagaagttggtaacggtgcacgcagcaaaggaaaagtggtgtgcagataagttgtaatattgcccaataagtagtatctgaagagtatcttgcgaaatcaatggtatattacaacccgttccccagcggaaccctcgttttctccacgcaggcctagctactcatcgccagtaggatcccgctgaaagcgctcggccaccgcgtccacaacgtcctacacgccctcacgagcagcatcttcagtgttggccaccggacctgcgatgactggccccaaggagatagccggatcgtggctccggaagcatgtcaagacatattctattgccgaccggcaaagtctgctgccctcggcctccaagcg

SEQ ID NO: 134549 - DNA, 794 bp, Zea Mays
acaagagctatcacgttcgctcgatcacaattacacagtcacgattaaatcggcgagctgatgaatcggtgcgcgccctccaccatccgatttggaaacaacggcgaggattttaaacaagcgtggacagtcggatccgtcggatcagaaaacaagcgccaggatctgcctccacttaaaacgaatcggtatatgatggtggcccttggatcgtcaatcaacggcccgaagcactcccacactcagcactgatcctaaccattcactagccgatcaacggttctaatctccccttccccaacagagcacaccacggcggcgcccatggcggtcaacgacgagcgctaacctccgcgcatgcaaccaacccgattcggagctcctacgcggacgcgacgggatgcaaaacagtgagggaggtataggaaatccagagaggctatcattaccatgaattagggtgtcgacccgagctgtccatggtgtccaacaacttgactaggggaaacgaactccgacgagcaatcgccgattcctggagcgcccaaccgacctgattcttgacgcacacacccacgaggtccttgccgcactcctagacctagtatcgggggtggagcaaagttgagaggcgcaatggtgtggcggcggcgcaccagcaattaccatggtgaacagaggagacctagggttttggggaggcgcggcgattggtgtggcacgcggctcccgtggcggcgcgatttatatagctccagggtagcggcccaatcggaggaatcgccacgaccgcg

SEQ ID NO: 134550 - DNA, 728 bp, Zea Mays
tagtgcaagtagtggaaaaggaaacacgtcatatttttatttccttatttcttgtacaaggcaggggtggtatggggtctactcctcttttacaacaattgtacatatctcacaaattacatgaagctaaaaagcctgggaaattcttttctaaaaagtcttgggtttcccatgtagcttcatcttcagtgtgttggttccattgtatcttatagaattttagaactcttctttgggtgatcctatccttttgatccaggacttgaatgggatgttctgaatatgttaaatctggttccaaggtaacatccgtcacatcaatagttcgatctggaacccaaagacatttctttaattgggatacatggaacacattgtgcactgcagacaatgtttcgggtagttggagtcggtatgccactggtccacacctttcaaggataggaaacagaccaatgtaccggggtgcaagcttcccttttaccccgaaatgagatacacccttcattggtgatactttcagatacacatagtcttcaacttgaaagtacaagggttggcgtcgtttgtctacataactctgttgtcgagcttgtgcttctttcaaattatgtataattcgttgaactttttcttccatctctttcaccatatcaggcctgaaaaaccacctttctcctggttcagaccaattcaatggagtacggcaccgtcgtccatataaagct

SEQ ID NO: 134551 - DNA, 817 bp, Zea Mays
ggggaatacatctatgatcttctgacagcccagtgcacactcctgaactagacgtcacgaatgacagagtcatgagctgaacgcaagactctgacgacttctctggccaactgctcgaccgggcctcacataccatgaccgaccacagtctaggagaacagaagctaataaagccaaacgtgacgaaagcagaagtggaatatataaggaaaatcacccaacacctctcaataagcgtacctagcagcacggctttggactccttctggactgaataacccccatgcccagggttagctcaaggattgcggaacaaacacacacgcacataagacatatgagaagaaatgcacacccgaatatagcaatgatgcacccgataaaaatagcacgtaacagtcggttgctcacccccacaactatataaaggtacgaaagccaagttgtaaaggcagactagctcatattgtaccgtttctcacacaggcacgagagccaagcactatgacttgtgacacacgaaacccaagaataaacacttcaatactatactggacctaggagttctttctagaccattcaaaaactctttctcaggcttgttgagagcaaagccattgggaaagtgacatgctaaccccctcctaacctacaaatttacttgttgtggaccaaaccacgaccattggcacactaggtaggggtgcttggcatgtcgtgtttcgttatctcttgcgaggttatcctaatatctcgtgggattttgttggatttcgcctaggatcgggtccagacctcctatctcatagatatgaag

SEQ ID NO: 134552 - DNA, 290 bp, Zea Mays
gttctttggtcatcttctctacgctgttgttagttttgatgagagtttcctccagcttgagaagcgtctcgccttgttccttgttctgactcaacagcttaatcaagagcaccttgtcttcttttgttgagattggtgtagaattggtagatttcctcttctcccacatcatcggtctcatttaccctgtcatcatcattaacagaagcaatacggaaaaatgtaccttgtggtgatgtagattcatccttgctatcatcatgtccctcctcatcgtcgctttcatctcc

SEQ ID NO: 134553 - DNA, 319 bp, Zea Mays
attcatctatagagaagagcaatagatacactctattcactaaagatgtatgaacagggtatatgaaacacatactaaaatagctacacagggggtttaacttaaagttgtatgacatgatgcatgctcgtcctattcgtccttgcaactcttgccaacatatagtggctatcacgttttatggcggtggcatacctactcactccgtcattgaatactagtcgcactttcctattgtttagttagtgtacctgcaaaaaaactgcattatagttgtgggttagtggttagcatcctaaactaagccaccttatagtcc

SEQ ID NO: 134554 - DNA, 311 bp, Zea Mays
cttagcccgagatacattggaccgttcactatcttggcctaggttggcagtttggtttatcgcttgcaattgccggattccatggaaggggtacacccagtatttcatgtctctatgttgaggaagttttttgcaggattcaaaccatcaaattgagttggaaccaattgctgtggagcaggatctgactctggagtgtcgtccggtgcgtatcttggagtcctcggagcgtgtcatgagaaggagatcaattaagcatgttaaggtcttgtggactaatcaggctgagcgcaaggctacttgggaacttg

SEQ ID NO: 134555 - DNA, 348 bp, Zea Mays
atccacgaagggcttgtggttgctccagcaaaaatagagcgagaggcagctggagacaggcacactagcggccaggacccacgtatgaaacattaagggtgtcaccaactcgtgttcgagtcctcagaaagtatgactcatggtttatcatggagagaggctgcgagccatcggttccaatcgaacggaaccgacaactatatgagtcggtgcccgagagtatgaggacggtcccaaagagacctcgctcttgggtcctgcagaaggaaccaaagcctcactcgaattacccatttgaaactcaccgagcgctagtgctagcccatcgaggaaaatgtggtatagcac

SEQ ID NO: 134556 - DNA, 446 bp, Zea Mays
tttgcaaaatacttatgttagccagaccgttgttatagcatttagtctttgttaaccactagttgttagaagtgaagttagacactcttaaactccttagttcttgtgctcgtcattatagttgtactaggaggggttataatcttgtgatattacaccaactacgtttgtagtgtggtcgctaccatgtactggagggaataaggccggtgacgttttagctggaagcttgatagtggatacaacggggagcatatgagagagaccagaactgaagcaccacttgcacatgaagaagacctagggctatctacgagttacctaaccaagaattttggcccttaagtgagctttccttgtgtgaggctcgaacgagtactagtgagaagcttgcacgtttctagggatggcaataggtcatgttcgggtcgggtgtagcaaaaacc

SEQ ID NO: 134557 - DNA, 445 bp, Zea Mays
ttgtagatggttttaggttcttgtagggtccctcctacccttcttgtagcttctagactaccatatactgatataactccttggttgcttggtatcttcatacagaggtacgctgaatgtaggactgcttcggagatgttgagtgtttgtctttcgatgattgcgttgtatgggaattctatatcaactatttcaaacacgacctctgttgttcttgtgttgttgacatagctgaaggtgataggcatagccaactttccaagggtcatcacttgttgtccttcgaagccacatacaggaaaggttggatcttgaatcttatcctctagttcctgcatctgtctaaaagcctttgcaaatataatgtctgtgaaacttcctgtatcaaccaggacgttgtgtaccatgaagccctttatgacacacgagattaccatggtgtctc

SEQ ID NO: 134558 - DNA, 413 bp, Zea Mays
tttttagaaaagcccaattcacccccctcttgggcatcgtgatcctttcatcgccctctccatctccatatccaccagcaaccaccttctctccgacagccacgttctctccatgccataggaaagtagtactggtctctccatatgcgctgcaaggaaacaacatcgcccctcaccatatgtggctccaccaagaaacattctcatattttctctatgttggatggttaggaacaatttgatcctgcatccaatcaaaggtaagttgcttctatgaatttgttccatgttattataacttattataatgtagttgcaacaatatagtattcattgttgaggtttggtttctagttttaatgaatctagttactctggtttgatcaattattgaatatgttgttctatgtttc

SEQ ID NO: 134559 - DNA, 657 bp, Zea Mays
cacaagtcattgctagtggctaggataagtgcttcctcaggagtgaggagctacaaggccatcgcgcgcttgtgacaggtccttggcgcgtattttattgtagctccattagaagttgagcatgtactgtttcgctagagctaggccagttgggaacgagatagagatggttggtggccttttgatgcaaagcatggacgacagatacgtagtggatgactgttgttcgaggcatttggttcattagctcatctgtttcttgtagatggatcggaattaaccaccctcgtgcataacgaaatacgatactgaacacctctcaactcatgcatgttcatgcatgctgcatcatggatccctgcatggcctctatttgataattgttgaggcatgttttattctatattagattattgtgcaatagccaaaaccatcattatggttctatctgtccatgaattgtgtgtttaatgcgtgtgtctaagagaaaataaaagggcataggttcaatggaagatgttgtgggtctttaaaaccggcagtcatatcgtatgtttatatggagtcaatgtcttgagttataagtcattaaagctattacaccatatatagaccgtgagaagccaccaagccaatacgacaggaagccgtacatat

SEQ ID NO: 134560 - DNA, 639 bp, Zea Mays
attttctggaaaacgcaggggctacggtgcaaatattcctaagactcagagagtccctggtgtgaacggcgggttgattctcttaatttgtaaggtcttttctgcaaaatggcatggcgaaggggtatcgggaagtcctggcagcccgatctaaaacggacgcaccagattagatccaggagagttatacatccgtgctcaaccctagccgttggatccggaatttacggcccacgtttaatgactcgaaggggcacgccagatttaaccagagtcgttgcttggctgatctacggtccacgctcatcctagcctaacccacactccctgatttaactcataccattgatttcacaatctatggccatgccatcctcatcaacctcccgacccggcgggagacgacgctgcgccccgagggccatcccctacgccgaacccgatggcctaggccctgtccgacacgcgcgtaagtgcaaaatcgcatggaggccacaacgaactcaagggggaaatttctcaagtactagcacagtggtgatgtcgaccccctggtgaggcggtgcctcggtaacgtccacaccagcgctcaatgcaccagttgttagagccctggaatcctagcttaaggagtactac

SEQ ID NO: 134561 - DNA, 478 bp, Zea Mays
accagagatcacgtcgcggagatcgacaatcatggcgggaggcggtttggcggtggtccgaggactccgacgaatagttcatcaggaatggggcagcgtttcccacggtgacacgagcgacagctccctcacacacaagcggacaccatcggcaaggatccatggcggctgcagcccactgctcctcttctctctcccgtactcacgttcggcagcgaggccgagcacgtacacaggcaccccggcgaccaaacagagtgcccagtcaagaccttggagacgacgaatcacgcgaccgatggaagaagtagccagcaccgagcgactgagggccagtggccatggatcagggagtggcacgacggagcgcagatttgtgaatccacagcactaccgacgagggaggagatggataaaaatgcactgccgccagcaggggctggacgaggcgcgaggcgagctcgggaggataaactcc

SEQ ID NO: 134562 - DNA, 478 bp, Zea Mays
ggaaaccaaacatgctcgtagtcttagaatagtctatgggtacatgaatcatagcagctcccttctctatgattttcttttttcaaagacatgcagccttaacttgatctcaaccactcatttgacggagattcaccagttcgagtcacattctttggtttgattgagagtttgagactgataatcatcaaacagaagtcatagctagatcaacagttaggaaactattgtgtaggtttgatttacttcaggcaccagaaagtacacttgcaactgtaacgtagactccataacactacacagaaaatcggcaaaggtataaatggccatggaacttctgaaatcacccatatgcatgtcaagttagaacatagtctccgagttgtttcgttgctgtagtatcacaaagatgttgcacacaccacagtccacatatatacaattggtgttttatgctcatgttcaaactgcactggcg

SEQ ID NO: 134563 - DNA, 696 bp, Zea Mays
agctttcagaatgcttcctcttcttgagttagctgagttagtcttcgatttctggaaacctaatgcttcgaatgatattccttacaatttttgattcatcgggattaggtacacacttaagcatttgatgtcctccaccgaagagcatagctctaggtccgtaccccatggcctcgcccttatgttctagctctgaaacttccttgtcacttagctcaccaagcgaagatgtcgcacaaagaaaccaagctcatccaattcttcactgatagtttgagtagggtcagttgtatatgttcaaagtgtaaggcttggatgttttggttctccttctaccttctcgtgccccaaagatccgccacgtttggcggtcttctttttgccattttcttcggaggaggatgaatctccgaaggcatcacctccaagacccaaaatttgcgggctctctacttcctcttcaaacgaaatatcatttcctttcgaagattggcgacctttgttagaacccttcgtggttggcataaatcgagtcagtatcagtccaagggacctagagtagaaaatggtaatggttgtgtcactacctcaagaatccatgtacagctcatagatgaggtggttgtggcactccctttccctttctcttatgcaacataagtcttcttcttagaagtcatggctttcttttttctg

SEQ ID NO: 134564 - DNA, 371 bp, Zea Mays
gtttaacctctcacttggagttgctctaagtgaaagaaaccggatatgccacaaggaaagattttggtgcagaaggcaaacaaacctctttccgagcaataatcggagcgggcgatgaaagcggcgatacaggaggcgaaaaggatggcacagagaagatgaatgaaagtgatggaaaacgaagagaatgagagcacgacgacgcaaagcgaccgggagagggacgacgcggatggagtaagaaagaagaaagacgtggtggaaggagtgcggatagccggccaagcatatcaaacagaagtaactagggcaacaactaatatgcactcagatcttatgtgcaaacgtgacagcgaggttcctggttcgtt

SEQ ID NO: 134565 - DNA, 523 bp, Zea Mays
cgcgcaattgacggcatggagctcgatctatagaacgctgctcgatccaaacgggaggaacgggaacctacgaacgaacaccgaaatccacctagtaattcaacttaaacatgactgtactagtggattgggattgaatggctgctcttgggtgcagtgcaggtgtgatctgatctggtgccgtgagatcctgctcgtggatccttgatcggtgcttggttggagtctaaatacacatcctgcagcacgggcaagtcgcaaatggatagcaaagttggcacgggcgcttgccgagggaattctaagtgtcgatcttatctggtcggactttcctaggggagttctagtcatcttgctgtgagatctactctgatctgagagcaggaagcacggatctgttatcttgcatctccgatgcagaatctgtgcgtggttgaatctagatagtgaaacactacttgcccttgtgactgataaatcggtagtgatggtaaaagcctcatgaatctctgattgcattgcc

SEQ ID NO: 134566 - DNA, 605 bp, Zea Mays
gttttacagtacctgattcaacatttaattaattaaaatagcaatatttaagtttgctcatctttatcggatcttatcttcattgttacctaaataagtgtatattgtaacattcctctgttctatttgcatatgttgttgtgtttagaaacaaaccccaatatttttatcgtgtggtatgtacatatggagatctaaatgaagtacatgatgatcttgtcaaagtgcttgtttacatgtattgtattgatgagccgctgcataaagttgcaacccattttttgctgccatccgttgcccacagaggcaacctcatgacaatttactatcagtttttttagatgtggaatacaagaaagtaggttacatatggttaatgaagtctttaaatcatcatgaggtagtactactttcccatgttctctaggtatttattagtttgtttctgtttttaacttgtccggctggctggcagctgttcggactgttgcatctgcaatctatagagacaaaatactgtagaagtcgtaactgaattaaagacgcaacaagccacaacacgagcatatttacttttcgttgtatcccagtgatttatatatctc

SEQ ID NO: 134567 - DNA, 705 bp, Zea Mays
gcggcggcggcggcgaaggaggaggacgacctcgcgcagtgcggacgcagcgggaggaggccgccgtccctcgtgcagacggcggtggcgccggccgccgacatcgtggctggctggatcctgtcgcctcgatcttgtagcacaacaaggacggctgaggaggccggccggtcagtcgcgacgatccgcgtgatcgacgaccttgtggcgatgggatggaattggtggaacgccaacaggcgccttctcctttggtgatgaattcaaatgcaacgaacaaagcttctagccggccgccaccgcgcgctctgaagaagtaactacatggaatgacgtggagcttcttccatggctacgttagtttgatttctttcgatctgatctgcccctagaatgaattaagggaacaacctagccccgaccgacgacccccttgcttgtctcggcaggcacagagacgtggcagtagcagaggaggctgcgatcgatgctagaggggacgggaaaggacgatcgacggacggtacgtacagagctggtccaagacgacgatgggggtgggggaagggaaggggcaacctcaccacactcggtgtccctggctcgtgtccggcgacggagttcgcgagcgcaaaggacacgcgagcgggcgatgggtccttaccaccaatgggaagaaccgaggaagagagggaggcgccggag

SEQ ID NO: 134568 - DNA, 492 bp, Zea Mays
ccgtgatcggccatggaaggaaaaatctcgtcactgccacagaaggaaacacatcccctcgccgctatccacgcctcgcagcaatccagcacgcaggaatcccatcgtcgatgacccgcgcgcgcaggaccaccccacccaatcgttcttcccatgcaccgcgtgccccgcccatatcctccgcaccccaaacgcaatccacgcctcaccgccatggtaggaatcgcaacccaatcccttgtcgccatccaatgcacaggaccaccatcggcccgcatcccatcgcaagtgcaggaccaccccaccatctcattcttcccattctacgcgccagccccgcccagatcttgcgatgctcgagtatttaaaattctacgcaccagccccgcccagatcttgcgatgctcgagtataagatggaagacacctctctcagcactcaaatatgaacaccacacctctctgaaacacaaacagacttggtttacaaaa

SEQ ID NO: 134569 - DNA, 856 bp, Zea Mays
aaaattggagaaaagcaaacccaaagttgggctgtcagtcagccaaaaacctgaaattggatattcagtgacatgggatgaactttgggagtctttatgatgatgatccagtaagtgtttgagcatggttactctagcaagattgtagctggtttattaggctatcactttgttatagagagttgattcagtccttatacaaaatctggagcaaattggtaccaaaactgctctgtcaagtcaactgaataggctgcgccatggtacagtgaaccggataggatcaagttcagatcacatcgccgccgacgagctgtgcactcggattcgtgctcgccgttggcgattcacgctcagatcggttggatagcgcttggggtaagtaaatatcacgtcgtggatatgttccggccactaatttactccgaccaccgtacccgagctagtcacggttgcttcggatgagttcgccggagattgccacctcgcggtcttacgccatgtgcccgggcatcttaccacgtcgcggttagtcgtgttaggcatatctggtgatcgctggagggaccgccacggtgaaagccacttagcacttgcgccagtgcccctcttcctctccggccaccgcgcatctcaatccaaattcaccggccaccgctcttgcctgctataaattgagcccgctgtgagctccatagggtagtcaagcaccaagccaccaaaccgtgccctcaatcgatcaccagagctcgctaatttctcattccccccaaatccgttctctgtcaccgtaaaagagcctcaccgtggtcagcgtgttctaggtccgttcgtactccctgctctcttgttctaa

SEQ ID NO: 134570 - DNA, 711 bp, Zea Mays
ggctaatggaggagggcgccttgggggtgggtgctgaggtattcttggggccattcaccgagttagagtaagcaggtcccgatgacttcagctggggacaattgttcttgaagtgacggggatctccgcagtgccaacatgcattcgctggtggttggttggttgcaactgagggggcatgaaaggagctctgactctgctgactgaaccgcgatggagtgggtccagctggtctactgaagcttggtcccttgggtggaaatccaaaggatcgagttttctggtgccggtcttgctgctaagctcggaggacttggaatttcctcttgagatggcctttttcttcttcatttgccctttccacttgcatggctttgttggagaggtgcgagaaactaaggaagtcttggctagctaggatggtcttgagttctggtctgagccccttcagaaagcgggccatcttcttgacttcggtgctgacgtcatccggcgcgtagtgggccaactctgtgaatttgtgcatgtactcactgacagatctttcgccttgagtcagttcccagaattcatcttccttgatctgaacgatcccttggggcacatgatgctcccggaaagctgtttcaaactctgcccaggtagcatctctgatggtaacattgaaggtatcccaccaggctaaggccattccggaaagttgatgagcag

SEQ ID NO: 134571 - DNA, 382 bp, Zea Mays
cgccgatcggtgagatggtttccaggagcagcgcgcgtagcagagatatataggccccagggacgccactatcctgggcaatttggtcgaatccccaagagctcgtcagggtgaattagtgtcggatgttcagtttcctactaacagtagcacatctgattcggcagcaagatttagaacgaaggtacttctcacgaacgcaagtcagacactacggtcgcatacagtcattgccatggcatgttcgacgtcgatccatgatcgggctatggacgcgacgatccatggcgatctctcgctctgcttcttcattcgccttctctgggctctgctagactgctacggtgtgtgttgtgtctccttcgtttcgacgatccatggc

SEQ ID NO: 134572 - DNA, 522 bp, Zea Mays
aaagagtgcaacttccagaaaggatgatgcttcagctgctccaagcgagcctgtgccaaagaggaaaaaggtgaaggttcttactcaccgaccgcgctacattgaatcggccacagtgccagaatttggcggtgagacctctttggctactgaagccaaagaacctgcgcttacgcagaggattgaagagccggctgcaaagtcgaaggcatcctcagccaaattagctgagccgaaggccgataatattgaagatataggggtcgaaggaataaagatattagaagttacaagcccttcggcagaagtgatagtgccgaaggcacaaaaaggtcttacagcgacccccaagaggaaaagaatggtcaacgtactagatgcgctggagacgataaagacttcaagctctactccaaggaaaactgccgaagctccaaagacgtagactgagacaaaactaaccgaagccgaagctgcaaagagccaggccgaggccgaagctgggacttcagagcccgccaa

SEQ ID NO: 134573 - DNA, 329 bp, Zea Mays
cgctcagccaagggccaccgcacgtcgggggaggggctcggccggccctaggcagccactctcggccggctgggcgcgagcagaggggagcacgacgatgaagaagccgagcaggagatctaggagcggccatggaagacgagctcgacgtggggaagaaggctggtgcgttcctgggcgcggggtagagaggaggtctcatggttcggagaagactcgtgtgctgggagggaggagtggcgtgggggagaagggagaaagcagactgctgccatttatggaggagaagctccagagcacggctgccacgtctctccattgcagcaatt

SEQ ID NO: 134574 - DNA, 720 bp, Zea Mays
atcgatgcccgcgccagtgccgcgttgatccaaaatgcctacggcgccctagtcggagcagcgaggagtgatgcggattcgatgacccttgcacgtgttcagagcacgaaagcgagctctcaccttcgtattctggagcgagggaaagaggtcgtcgaggcccaagtcgcggtcttggaggaggagctgggcagtcagaccaagaaggaggagaaattcctaccctacatgcaagataacaccttttattagtctcttctgaagctagggtccgttgcctacttcctccctctgattgctcatgtcttctctggtcaaccatacaagggaaatttgacgccaccgaggggaacttcgtcaaggtgcaaagccgcctggaggagctagataaggagaggcatctcctatcggaggtggtgagcaccatgtgtgtgcacttcggagcacctccttcgtcggagtctgaatcgctcatcttgagggcctcgctagcctagaggagcttgagaaggaatccttctgccaagggatctaccaggtcttcgctgtcgtaacgtctcactacaaagggggatcgagttggaggacctaagcaagcactactacgatgcctggagtgattcgaattttgctggcatgatgaaggccgtggagcctttcgctcgaaagctaggagccgccctgcttggaaacaccccacctagggggttaaggtggaag

SEQ ID NO: 134575 - DNA, 322 bp, Zea Mays
gcgaacgctgctctcttgctcggtaatatagtagtacactgttttgggacgggacggaggcagtactctttgttgtgaacataatctactcttgaaatcgacggtttggactagctacaccacattgataatcaaagctcgtacgggttacaagcgaatgagacacggaagagagactcctaaatctcaagtctcttattatggtagagccgtagaggtggagctaagggttacagagtagagtcctaactaaatcttgctcggcggcgggcctccggtctctgggtcctcgttggtgtgtcctcctcctgttcgctggttc

SEQ ID NO: 134576 - DNA, 388 bp, Zea Mays
actcccgggtggaaagcttagagcaacaggtcaaggaacttaaaaaggagaaggcgtccgtccaagagagtctcgaaatagcagaaggtgaagaggccaacactcgtgaagcctaccgaaccctaaagatggactacgataagaagctaaagaagctcgccccaacgaagaaaattcgaaaaaagaccaagagccaaggatgccagactgagcggaagaaggaagcccctccagcactacctccctccaggatagagaacttgtccgacgttgaggacatgtccctagctagccttgacgaccttctcaaggaatttggggacactttagaaagggagttcggaagtaccttagaaagcgctcgcgtgtagtgcgacttgtggtaact

SEQ ID NO: 134577 - DNA, 630 bp, Zea Mays
cgcaataatctgtactgcgaatcgagtcacgaggtcttgcgaagcatgccaaaagttttcccctcgctcgagcaacccttcacaattcaccaaaactaatcgctcacacatggccacttcaacgctaggggctggatattgtcggaccgttgcctacagctcaagggaacctcaaattcaccttcgttgccatcgaatacttcaccaagtggatccaggccagagcagtatccacaataacatcgaagaccgcccaaaagttcttctggcaaaacattgtctgccgattcggagtcccgtccgaactcatagtcgacaacggcaaacagtttgacagccaagacttcagggatttctgtttctccatcggcaccaagcctgtcttcgcctcggtataccacccgcaatccaacggcgtcgtcgaggtgccaatggcaagattttcactgccatcaagaaaagacttctcgacgacaaaaagggcaaatgggccgaccaactacctgaattagcctgggccctaaacacgacagaatgtcgggaaatcagattcacaccattttgtctattatatggatccgaggccatgacgccacaagagataaagcatgggtcgccccagacaagcac

SEQ ID NO: 134578 - DNA, 481 bp, Zea Mays
cctgcacagacggcggtgccatcaccggtgacatgcccacccgagttatagcgctccaattcacataccgctagacgctaaacatagagggaaaacgaatggagcaatcctcacctgcgttgggatgatgacatgtcccacccgcagcgcacgaccatggacaactccggtgagaaatgcccggagctccagttgatttcgcacagagtaagcgcgagtacaccctgccatgatccgatgcctccctcgatccgtcccaagggttgaggtgccgcacaacttgctttctatggtggcacacatctctttctctcccctagttcttgtggccgtgacggcccacagcgtttggatacggatcaaatcaaggagccaaagacacgcgggggaagatttatatccgcacgctggcatgggtgatccccatcccaacagagcccggagctatcatgtggatctcggcacgcaacaaccacacgag

SEQ ID NO: 134579 - DNA, 290 bp, Zea Mays
cttcactcaaatcgatcggatgcgctcttacgtggctttgcatgtgtaggagttgttgcacttgatgtatggttgcttggtgtagctcttgtgtctttaatgtgctagttggggtgtatatagccccaaccaccccaaatagtcgttagaaagctgggttaaacactgtacctgcaggtggtgcactagacccactataatgttggcccggtgcactaccgaaccgtctgtatcgacatagggcaggtgaccgttcggactatcagaggcaccagaccatgaatagtgaa

SEQ ID NO: 134580 - DNA, 536 bp, Zea Mays
cgacttgaaatgatcctcaggggtaaggtttcaaatgttggtgctccagtggcatactcggcctggaacctacctcctcccaaagatttcaccctttttgtgtcaaatccgcctgtgactgatggcaatttgggccttagagtgcgaccctctgctgaagaagtcagtactttggttgcttcgcttggggagatacctgatgacgagcggcaggttcattttgaggtgcccctgaaccctagtgatgcggatataaatgtcatgcttgatctgctagctgaggattcctccgacgctgctcctactggtacgttggcagtggtgccccttccagaggttggttcaactttggatgtccagaaaccagtcagtactcgcccgaggcgccctagccgaaccagtcagcctgagccttctgttgatgagcaaaagaagaagagaagacgcctccggcgagtttccagttttgatgaggacgccggcaccttagttcctgctgctgaagaagtgcctgcaactggacttactgacgctga

SEQ ID NO: 134581 - DNA, 1051 bp, Zea Mays
ttgtgttgggcttgagttaatgacccactagtaggcaagaagcgggagagaggagaacagatgtgcgcttagcgtgtgacgcaagatgaccatcaaaactactgctttaaaaagtattaaaaagtagagatgtgtggacaagcatgatttatatgtttgagggtgcaactcccaacgggctatctttttagggagtgttggtccaacaaaactaaaactcgttgttgtatgttcaggcacgtatgttgcggccccacgacctagggtgtgtgtgcaggtgtgttgtgtgtgcaggaaacccggcgagcacgttgtgtgtcggtagttcggttccaacaattggtaccgaaactcaggtcgacaaatctcggctcaatgtgtgagggggagattgtggaaatagtaccacattgtgagttgcgtgtgggcaagcatggcttatatggatgtcactaccactggagcactcgaggacgctgtctcatcaacgagggcactcaccaccacacaacaacaaaatcgagaggttgtaatcaatcgtactatcgagcgagttactgtgcccagaccaacaacctatccatgggaaggccatcaacacggtgaggttgatgatcataatgatcgtatggcactcgacttgatttgcagcgctacgttgctagacatgttctctatactggcagtcaagctgatggcaaaggcagtgtaggaggcgttgaagacgatgcaggtgggaaatgaccacatccgcaagacagtcgtgcagaggctgcgacgcgagtacgagataggtgggtgatgaccgcattcgcaacaccgatgcacagaggctattgcgtgagtacaataacctcgtgttcaaggatggcaaatccatggagaacttcgcccttgtgctcgttggcatcatcgcactactcagcacactaggcgacctgagacagaggacaaggtcgtggctaggtatcttcgaatcacccgaccacgatataaatagctcgtgatctccatcaaaacccagctagacatgtcaacacacactgacgag

SEQ ID NO: 134582 - DNA, 636 bp, Zea Mays
aggcccaagccaagcaatcttgaattgttcttccttttatgaaaccatattggttcctgtgaactaaccgtgtcatcattgtttgcagtcgatttgccagaaccttcgtgataattttcatactattgtttagcagtgatattggcctaaaatctcccacttttgcggattatccttcttcggaatcaaaacaatgaaggatccattgatgcttctcaagcaaacctcttcttgataaaacttttcgcagaggtcataaaagtcttgagcaatgatatgccagcattttttaataaaattggtgttgaacccatcaggaccaggggatttgtcgaaaggtagggatttgataatgttgtcaatctcctgcttactgaatgaagaatctaaccattggagaccctcgtttctggttaaaagatctgttaggtcaaaatcaatgcctaagaaatcagaagatcctagtctgctcttgaaagcatcccaaagaatatttgatttgtgatcatgctccgagtgaattattccattctcatcggttaatgaggcaattgtatttcttctgcgttttaccgtggcatatgcatggaaaaaacgcgagcaaatatctccttcagtgatccatttgatagacgc

SEQ ID NO: 134583 - DNA, 319 bp, Zea Mays
ctcccaattacattctcctagagatcacccgttactgaaatggctgccgtgtgctgctacttccattcctgaaatgatgtcagtactgaaacagtttgagataatgcattgcttgactaacaatgctccgtgggtatgtggtagcacgggatgcctgatttggttggtggaaaacaggaatgaggctgataaacttggctttgttgacctgaataattgttacgttgcgcacatataactgcattgatcatgactagcgtgccttgtgctgctctagtgcctctttgggcagcttggtcgcatacatgcttatttgctg

SEQ ID NO: 134584 - DNA, 576 bp, Zea Mays
agggtgttcaggttatcaaggaaatgatcgagcagaaagcagaaaaatacaaatgcttctgtcaggacagcaaagggattctatggtttggtgatcgattggttgttcccaaggaccctgagctcagaaagaagatattcgatgaagctcacctttcaaaattctccatgcacccgggcagtaataagatgtatcatgatctcagatccttatactggtggaccagaatgaagagggaaattgccaagtacatatccgagtgtgacacttgccagaggatcaaatctagtcatttgaagacagcaggccccttgcaaccccttcccataccatcctggaaatgggaggacatttgcatggactttatcgtgggcttgcccaatacctcccggcaccatgattccatttgggtcgttgtggacagattgaccaagtcaactcatttcttgccagtacacaccacccacaggacagagaagtatgcggaaatctacattgaccagatagttcgtttgcatggaataccaaggactatagtatcggacagaggagcaccatttgtggcacgattttggg

SEQ ID NO: 134585 - DNA, 372 bp, Zea Mays
gggggttcaaatacaggcgtaattacttgaaactttatccaaagaagctttgtctacagtgtgctgcctgcactccattcaggagagagatcaattaatccacctgtactgtacttgttcggcactgactttaatagaggatgtgcagtggagacaggatgccaccatgaggccatgaagccggtcaaaatgagcacatcagttgctgctgagttcatgcacggaacgtgcacagccaggtatgtctgtacttgttctaggtgcacaacattaattttgaagaacacgagctatatgttccaaactccaaatttacgtcaggacaaaaaaggtccggaagagctgcatacttgagaagctggtcaacaccat

SEQ ID NO: 134586 - DNA, 498 bp, Zea Mays
aagaaatgagctgtcttggttagcctatccacaatgactcaaattgaatcgtggtgccgggaggtgttgggcaatcccacaataaaatccatgcaaatgtcctcccatttccaagaaggaatgggaagaggctgtaaggtgcctgctaccttcagatgactagccttgattctttggcaagtgtcgcactcagatacgtacttagcaatttctctcttcattctggtccaccaatacaaggatctgaggtcatgatacatcttgttactgccggggtgcatggaaaacttggatagatgagcttcatctaatattttatttctgagttctgggtctttggaaacaaccaatcggtcttcaaaccagagaactcccttgttgtcctgacgaaatcattcgtacatatccaccttttgttcgagcatctccttaatgacttgaacacccttgtcaccaatctgtgccatgattatctgctcttgtaaagttggctccacg

SEQ ID NO: 134587 - DNA, 675 bp, Zea Mays
agttttggagaggcttgttgaggtgctggatcacttgaaaggtgggttgagaagtataacgatacctgtgtgtgcaggtaggtgctctttggacgtttgagtaaactagaaacgatgtggttttcagtaagaagatcatggcttctccgacgatagtagcccacaactccacatgactataatgccagccagccggtcaagtcctagaggtcattcttcaaacccaagcctaaggcgatggcgcagtttatgattgagttgagtcaagactttttggagtctggcgtgtttttgtcagtttagatgaactagattgtgtttaactcttttttttggcaggtgtggaagttaatgtttcgtttgaaggatagtagtctgggacctgtcctgtcagtgtggcctcgcaatcgcatcgcttattcgcttgcaagtcaatgggcagtttgccttgaaattatgctcagggggcaatcgatatgcaataaagcaagcattagttttttttttgatacttcccaaaccatcgtgaaatcatccacctttcttctttgtttttgcttttttttttctcccgaatcaatactcgtcttcgtctttcactgggggtctgattgggtagtcgcattagtataatacttgcattgcattactgtctatgcatcatacccttagcct

SEQ ID NO: 134588 - DNA, 500 bp, Zea Mays
cttttgtatcattctttattaatttgtgtcatatgtattgaagtccagatttatgtttgtgcaggtaaatactatcttgtggattctggttatccgaataggaagagataccttgcaccttataagggtcagaagtaccacatttcagaatggcaaaatgcgaggcaacctgttggtagcaaagaagttttcaactttgcacactcttccctacgtaatgttatagagcgatcgtttggggtgcttaaaatgaagtggagaattcttctaagtctaccttcattttctcttaggaaacaatcgaagataattattgcttgcatgacattgcataacttcattcgagacagtgctctacacgatcgagactttgaccaacatgtacctactagccttgctcatgatgtacccgtaggtgagagtagtagtagcacatctgatgagttagacatgagtgcatttcgagatgcaattgctaatgcattagtgtcgtagtttaa

SEQ ID NO: 134589 - DNA, 306 bp, Zea Mays
aaaaaacttagttcattttcaaatggatgcaaaggattcatatgatggaggaaaggagcaattcatatttctgttggcagcctcgactgctttttccactgtactttttcatttgtttggtcattggtgcttaatatcaattattccactccctgcttgttgcattgttgcttaaattggataacacatggtttctagcattacatttctgttatttactcagtagtccacactaagttaacaccttttgaactttcctaattatgtctattggcacacaaaatgattgcaaggataatttaagta

SEQ ID NO: 134590 - DNA, 326 bp, Zea Mays
attttatctttggtatactggtatctagcctcgacacgtcgagcctacctccccaggggggcaagtaccagggggaagttgatgacgctacacacagcaaggacaaataaacatacagataagtttaagttccagtgctacctcattagcggttcttagaatatgttacaaaaccaaaagttataacagcctccccccagcggaaccctcgccttgtttctacaggattgactattcggcgtcggcaggatcacgctgaaagcgagcagccaccgtctccacggcatcttgtacactctcccgcccggcatcttctgtggcggcta

SEQ ID NO: 134591 - DNA, 523 bp, Zea Mays
cccctaggtgggatgagcgatggggtcgctggaaatttctcgatggactttgtcgaaccgccgcgcagcatcggactacatcaccggtgagtgccctaattcagtttgcaggattcttggctaggtatttggtgctatgggtgtgagattggagcactcggtgccgcgatgcagtgctccagtgagcccttaaccgtacagggcggtggcgttgttgttgccggcgtttgtaggtggaagaagtagtgaaagtggtgaatcataagtttaacgactgggattgaagggtatacaggttgggttggattaaggctagtccgttggatcgagatcgggtgtacgagattccgtcttggctatttaaatcctgagcattgttatttgtttgggcggttaggatgacgttctagcttgagaccaatctgatctaatctggataatctggatagttgcataataatcagatggttgatctccactcatgccctaggttttggggaaatcaacttgccgtccaatatca

SEQ ID NO: 134592 - DNA, 672 bp, Zea Mays
acattatataatatttttttcaccatataatattgatgaattggtcggccccctttatactataatcctagctccgcccctaaccgggagttcatgagccacaagccgcctacctttgccagctctcgagatcctctgcatgccgatgagtggttgaagtcagttgagaatatgctaaacattgcctaatgctctgaccgggagaaggttctctacgcttctggtcgtctgactggtcctgctgttgactggtgggattcttatgttgttgcccatgatgctgctgatactattacttgggctgaattcaccactcaattcaaaaactaccccattcctgctgggttgatgaagattaaaaagaaggagttcctgtcattgaagcaaggcaacatgtctgtcagcgagtaccgtgacaagtttattcagctatcaagatatgctcatgttgaggtggccgatgatgaaagaaagcaagagcacttcactaaaggactcaatgggtcactacagtacgcactggttgctcacacatttccatcattccagaggctgcttgataaagctctcgctattgaacacaagcatgttcaactgggagatctgaagaggaaggtcattgcccaagggcagggtagcagtagtgttcgtccttgctacgttccactcgag

SEQ ID NO: 134593 - DNA, 701 bp, Zea Mays
ctctaattagagccatccatggccggatcaacgcccctgacaattcttccccacccaagcacatcaggcggtggtgctggcctcccccgcggcgtcgaccatcgaccagagaagcccgacacagcccctagagcacccaaaccatcattattacacgctacgcaacacagtgaacagaacaaatcaatctcaaagcttcttacctacaatggtgttgcgacgcataccgccctcggagtagtgtggcccacgacggcgccattgctccgttgagcgatttggccaagcacgccacaaaatccccgcaccgcagaccatgcacacgacctacgctccctggtgaacatgtacgatccccatacaaggctgaatgatgaccgatgcgtgaagtggctgcggcggtcagattctctcacatctcaccatggtgcccggtaatgatgtctccttgctcacggcgagcaactccagttcctgtggatcctggtgatggcgtccagattatataagccttggtctaacagaaataaccccacgaggcgtggatcgcgggaatccggtgaaggcggtcgcgcttcgcctgccaccaggaaacgaaatcccgatcaggacggggaaggaggatggagctgtcaccagggacccacgtgtcggcgacggagttgacctgtacgcggatgagatgagaccgacaatgcggg

SEQ ID NO: 134594 - DNA, 779 bp, Zea Mays
ccccagactcagaataaccctaggacggactgtgggttggttttctaaaaccaggagggcttttctgcaaaacacgcacatcgaagggatattgcggtttactggttgttggattcgagatcgagcgcccagatcagactgcccactccgcgaatcggtatgtgatcccaactgttggatcccacatcggtggctctgatttaaaaacctatgacctaatctcccgcgttcatccgccgattgacggacgtgatggctccattgcccaaccggtacgcttggatgatctcggccgtgcagattagatccgaccactcccgatcgtcttcctgaccctgccgaactccgccgacccccagcttcacgccgcgatgaagccatggccagagggacctgctctaccccccaatgagccgagtactaaattcgttgggcgctaaatgaaattgggacgatggcggaccagggaaggaagaatcttacaatggttacgcagcgcttgactctgtccacggcgcacggcgaattcgcggcgacagtgatgaattggaggcgcccagatcgctccccctccttgattccactgtgagtgcattccggatgaccaggcggagctcctcgactccaccccgggtacccgccagcgatgttctcacatggcgacaatctctttcctcacggagatccgcttggacaacacggcggcaccgaggcgattcacggggtgtcgaaaagcgaaaaggaagaggagaggagaggaaagaagtcgcgacgatccg

SEQ ID NO: 134595 - DNA, 323 bp, Zea Mays
catgcgtttccacaggttctaccgtaatagatgtcaggtttgatggcctacacatgcctgatccaagattggtattactatataaccatgtcattggacttacctggatccggcacatgcatatgttcttcccgatgaggcacacgtgcctcctgataatgctttcactgcaataagcactgacctgtcccgaactgcattcttgtatagtgatcgtgccccaccaatcttctccgtaattccgtatgtatcagttaacgctacacaagtacacaagttagttctgattttccactagcccgtttggcatatttttgccgctg

SEQ ID NO: 134596 - DNA, 516 bp, Zea Mays
tgagtttcttactgcatctattgcttcttctccaagatattgcaaaaaatatagagcctccgaaggtattttccttgcacagaatctctcctataaatcttcggcaatccaccaatggctagagttcgctctactactaggttgactagcggtgatgatagtgcaaatgtgactgaaatagctcatatttcaaaagtgatgagagaatcaggtaatgtcgagccgaaggatgcggaagaagcggacgttactgagaaaagcaattcagaagcttaggctcagaatgatgctgatagcgataattatgaagaagatcctagtattctctatccaaacatgcctagtcacattgagttcggtaaatcaaccataaaagccgaagatttagacgtgatgagaagagttggatatattgggcataaagatgataacatgatcagatttgctggtgatgaaatcatcctagagccgaagaatgatgaggttgttgtttttagaagcttcgtccgggctagg

SEQ ID NO: 134597 - DNA, 1337 bp, Zea Mays
cccacttgaaatgggaaaaagtatggtcactcgctcgataataataaatagaaaaagcgcctgatttggacacactcataaccagaaaacattaaagctaagaataattaaataagccatgttacaggtctcatggattgtagtatttaatcaaatagtaaaatttgtacactaaacaacattaacccaacaagttggcacctcctatctaaagtaacacagattagttcattctgattcagtgcaagtaaaaaaaacccacaatattcttctatagcattagatgaccgaaaaacctaagccttgtctaactttcttcattgagttctacacccatgtcaaaattatctcttgggctaactctcaccacagtgttccatggttcaacttttgggttttggatatctccttcaataagcttgcatatatattctgttgcctcccaaaagtatcttcttctgctagattcacattatcctcactggcattatgttccacatctacagatccagactgaatatcatctacttcagcaccaattatacttgcagcccttccaaatgcagcctgcaagagttcttgcatgccatccaatcttccatcctagcggtctcgtattggacctgaagtagtcaaatttgcactaatatttggtacatcagcaagttctatagatggtctatcatatttttcaccatgatgaacatagatagtataacctttaataataccatcacatctcagatgtgtcctgacctcatcaggactgtggttgtatctatttttgcagtttatgcatggacaaagtatctcgctaccttgtggaaggactcggtaagcaaatgctaaaaactcatcaacgccatttttatatgcagtgtccaatcttgattctttcatccaacttcgatccatcaatctttatattatgacctattaaagttgaataaaacctgtaagcttttattgatgaattactaacaatcacaaagcaacaggatctgctcaagcatggggacactgccataataatgcacagcaggacgttacgaaaagaaatattggacaagcggagagaggggtcaaggaactgaccagttacttcgctgaacgctgattgaatcaagctgggacgaatggactgtcacctcatagccaatttgtttgtgaggctcccagcggactgctcagagggccaccagactgcgtcgaagccggtccttcctggttgatgatgtcactgtgattagcatggaaaaagaactcacgttcaataaatctgaccgagtaatccacacttaatttctcaaaattgagaaaagatcaagagaaataag

SEQ ID NO: 134598 - DNA, 512 bp, Zea Mays
caggagaatgggacctcgggtatcagtcccccgagcaggtcctcaaggacatcctcactggagactccgactcctgtgatgataacgaccgccgcaagaagttgtacgtgatgtacggcggaagctgggaactcacctcccacaggaacgtgaagtccttgcgccgtgaggtcctatcggcgaccccagcggtcccgagggcagccccacaccagcggtggtggagcaccactatatccttcggggcatccgactgccccgagaacatggcagtggccggcatactgccgctcatcaccgtccctgtcattgccaacatcaagctgcatcatgttctgatcgacggtggggctgggctcaacgtcatcagccacgctgcgtttaggcagctgcagatcccagggtcccgactaggaccctctcgtccattctccagagtgggcgctcaaccggtgtatccccttgggagcatcacgctcccggttacattcgggacagaggaaaacttccgc

SEQ ID NO: 134599 - DNA, 557 bp, Zea Mays
ggcagtagtcggtgacgtcggagggacatggccctaggatgcgtgggccaaactctggatgttgctgcaagctgctgcgcgcgtaaacaggagcaatagctaaccgcgaatgggtccttgacatgcatatgatttctctctgttgcgaggggatctgaggtaggacggagtagctacgactaggctggtggtggtggacttgcggtggacggacgccatgcgacatgtgcgcgccgctggagttgatagggcagtagccggtgacgtgggagggacacgtccctaggacatgtgggcccaactatggatgttgctaaaagctgttgcgcgcataaacaggagtaatagctaaccacgaacgagtccttgacatgcaaatgatttctctttgttacgaggggatctgaggtaggacggagtagctatgactaggctagtggtggtggactggcggtggacggacgccatgcgacatgcgcgcgccgctggagttgatagggcagtagccggtgacgtcggagggacacggccctaggatgcgtgggccaaactctgga

SEQ ID NO: 134600 - DNA, 500 bp, Zea Mays
gatagaacattctcccttactatgctagccatgaggatatgggaggtcatggtgtcgatgtggtggtagtgaccaggagcaggaggacatatgcccaacgtaactaggacggtcggagatgttgaaggcgatgggggtagcggtctagttgaggcaaccacacccctgggaccttggcacaatggttagctcatcgagtcgaggcaaggtgtttgtatgacctaccttagtaatgggtaggccacatgttcgttggccacgatggcggtcgctaccagcacttaagggtgcttcgtgccttgctgctagagctcatggatcgtagcgtttgacgataatgaaggactaatgaggcgacgagacgggagaatgagagccacaaaaaaattctctacttgagagcacaccgtgacttgttcccaacttgaatccaacccctcgagactcaaaaacagagtagcactatgcagatcaatctagtgtcgattgactaaaccaaa

SEQ ID NO: 134601 - DNA, 477 bp, Zea Mays
gaggggaaggttggcgggcaccattgaacatagtctgatgtaatgtaacacaacaggctcttgctgtaaaatagagagagagagagaagaatgttggcgatactttgatgagcagaaatgaaatggtttcttttcttttacgagatttatatgtgaatattgtctagtcagtatcgcaatctgctgaacttttcatgctcaccgtcgagttgtgttatcgagaatctcacacttgttgcgcacttgcaatagtccaggactagatacatttttgggcaaacacaaatcgcccctgtatctttaaaatgaggattatttatccgggctataaaacatcgtcggcgtctcttcggttaccatcattttttctgcgtgtttgagggggtaataaataaaaacactgcatttttctctgggcagtttctgttgtaggtcaggtcctgtgaacagaagttgacatatatgaattgcttctgc

SEQ ID NO: 134602 - DNA, 553 bp, Zea Mays
cacgcctcaccgctttccacgcccaattgacggtagggaattgatgcacggttgcccccacaaacgtatccggcgctaactcggtctccgcaggcggattcaccgagatgcacatgaggcggcggtgaaccgagatggcgcccacaacccgcaatctctctccccgagtatagctagcggttattccctaatcaagtcctatagcacacgcactggccaggggattcccatacttgtagtcggggcgtgggtgagctcgagcatgaatcgcgctaccgaactccacttgcggcggtgcgacatttgcgccatccgttacgagggagacaaacgcgctgacgtgcgggcccgagctccagagagctgagcgatcggcagccgagaggggaagagcgttgtccagtggggcccttcggccagagaacgtgcaagagggatggcacggatgtggggcaacatgggccacgcggtgtggattttacgtgggccgaattgggtgccacgagcccaacaggtattcctttccttttttttcttttctctaatcccaaat

SEQ ID NO: 134603 - DNA, 349 bp, Zea Mays
cctcattgtctcattgcacacctacatggctgcactcagttgtggagggttatgctcagtacagccccactaaggaattgttggccaaattaagtttacattcgggagtttttggaccattttctctgaccagtggcgtgattcgctataaagggcgtatctggcttgatggcaatttggagttacaacagcaagtgctgcaagcgatgcatgactctgcaatgggggtcattccgggattccagtgacatatcggcgattgaaacagttgtttgcccggcccggaatgaagtcggccattcacaactatgtttggtcttgctccacttgtcaacaagccaaaccggac

SEQ ID NO: 134604 - DNA, 696 bp, Zea Mays
gcgtgggccagcttcgtcagacccgtctccaaccaggccgtaacagaatccctgagctcacgcgcgcggaattcgccgttaaggccgggcgcggcgacctcctcctactcccgaatcaagaccgctgaatataaattcgacctcgcctcgcatctcctgttcacccggtcgcaaactctccgccgccgtcaagacacacctagccgcgctgctcatcctctctcctccgcgtcgtcgtggtttcgcgattgcgacactggcacggtcggagttgtcgtcctgagtgcttctacgcaacctccggtgtgttccctcggcctctgtcggcgcgattgaagctctgcgcgccggtgattgctcgctgtcgtccgctcgccgccgtgaaaccatccacgcggtggccggagcactcggctactccattaccggtatggatcccttaaccgaactcgcaatcttgtcaatttcatcctgcgcttatcggcactagtagcggtacaccgtggggcgcgattggggtcccggttatggcgtctccgccatggccctgtgctgcgccgcggaccgagctctgcgctcgtcgtcgacacaaattggtgggggaattaggttcataatgtcaccaattgggcgtggagcgaatgaattaggaaatggaggatgggagggccggaatcgcgatctctggtgagctcg

SEQ ID NO: 134605 - DNA, 314 bp, Zea Mays
caacgtgtcaggaggattaggttgcggcggcggcggtggcggtctgctgccgtcgtgagatctgctgctggctggaagatcggttggctgcagttctatgttgaataggttaagcaatgtgttaggaggattcggttgcggcggtggcggtctgctgccgtcgtaagatctgctgctggctggaagatcggttggctgcaattcgatgctgaataggttaagcaacgtgtcggttggctgcagttcgatgctgaataggttaagcaagattcggttgcggcggcggtggcaatggcggcacatcgacgggcggg

SEQ ID NO: 134606 - DNA, 495 bp, Zea Mays
gcctactcgacttagggtgaccactataccctactaacggagcaatcgccttaagtcggcaatgacataagacgctgcaacatgctcacgcttactcgacttagtgtaacatgctcgtgtttactcatcttagggcgatctctatgccttactagctgatcaattagcataaattagaaaaagattccaaaaccagcacactgcacttacttctacaatcattcatgataaccgttgaattctaacaacaaaaacaaaacgttatagttttcagcgccaagagcacattctaatatcctaccgagtattcaaacgcgctgatcacacacacatagttcacaaatgcattcaatatcttctaaacacagcaaaacatctttacttggccatgtcttttgcaggggcaatcgaggaggaagggcgactcgaagcatcgggtgtagccttgacgtccgcaacaatgtcatcaggaacaactacaccaggccttctcat

SEQ ID NO: 134607 - DNA, 417 bp, Zea Mays
cttgttgctgttgttgctgctgttgttgttgttgcatttgttgttgcagctgctgttgttgtgccctcctttcctggcgtatctcctctcgctcctggcgcaactcctgtcgtatatcttctctttcctgacgcatctcctggagttcttgctgcatctgggcacacatatcagccatagtgtccgccatttgctgcatcaccgccatctgagctgcaatcagtggatcaactccgcctggtggaggattaggaggattcatccctgctggctatggctgaggttgtctatatatccttcgagtgtgtcgattaggaggcaagtcaattccaccacccctcctggtattgaccatctgagttagatacataaggtaagagaatagtaaacaaggcagtaattacaaatcatgttact

SEQ ID NO: 134608 - DNA, 621 bp, Zea Mays
gcggaattgcgtgctgtgtgtgcagcacaccactatctggatggtggttctcccgcccctgtcgggattcagcacccttaccgttcaccgccccgtggtcgcttcgactatggtaccccagactgcaggacccgaatagatttggatccctagatcgacagagtcggagtctgtaataatgcttagttcagtgtcttagtctagtcagtcttagttagagttagtttgcttattttatgttggatgcttgttatgatggacatgtactaaagttggatctttgtaatgattgtcaccaaggtgtgggtatcccctgcaacttggtgtagttattaataaagtcgattatttagttgggtaatccatttatttccactttcctctttatctgagaagctgtcagtgaagatggtcaattgttcagtgccatgaagattttctatacatcttttcttatgctgaaagactgtagaatcagatttgatatatgtgtgtgatttctacagatgtctgagaacaggcgcagaggtgcgaggcgtgctcagccagaacagcaggcaccccaagaggaggcagccccgtagcagcatttgccaccgccacccccaacgaccattgagc

SEQ ID NO: 134609 - DNA, 468 bp, Zea Mays
cgggccgccatgcggccactgatccttccggccattcctggtcaccggtgccgctcctctccgttcatccacgccatcaccgatttgaccgcattactgtcgcggtgggacgtggcaaactcataagaaagggcagcgcccgacatcgtcgttggtcaccagcaaagtccggtgatggttatcaccatggccgtcacagtagctcgctgggcctataaattcaccgcgctctcacccccgtcatccaaatcaaccgagcacagctcttcgtcccttagttgcaaaggtaacgactcactagccaccctgttctgtccaccaccctcagagatcatcggatttccctagaatcggtctcttccgccgccgtgaaggacccctccgtggccagcactcctcgggtcagtacctaccaaattgcttcatgttctagcttgtctttggccttctattgctctcgaagccgac

SEQ ID NO: 134610 - DNA, 385 bp, Zea Mays
gcagcatcgctggaggtttccgtcctcgctatacaagcagcagaacttgtcatcgccacacatgccatggcgctcgaccaaacaacctaacctccaatcctccgccatctgctcgtggcaactcgaggtagaccaagtcatcactgccacgcccgccaccaccgtgcctccacaatccggcggcgacccatgtcttctgttgtgcctcgactgagctgaaagtgaatggatagaggacgcacagtaaaccgccaacaataacgtgtgccaggaccctccgctattttagcgaatgctttacaggtctttgctggactggtccagaacgtctccattcgttagatttggcgaacagaacgctttagcgttcgctgctggaggcagc

SEQ ID NO: 134611 - DNA, 510 bp, Zea Mays
agggagtgcagatagtagctaggaaaaagcagcttcgattccattgtatagaaaaatctgtcaattcttgttagcgttggattcgcttgcccgttgctccaaatgtagcggcagccattaaggtggatttccttcatctgtaggctgtccagtgctaatttgaacgcgcccatgaggcgctgattcaagttacaattatttttatctgaggcttgatatatgagattgaaatctcctaacgccaaccactttgtccaacgttgtgctgcaaggccacttagttcttgaagaaaaacaagtttctcagcgctcgactgtggcccataaacccctgtgatccaccaagctgaattatcggccttcatagtgatcatggccaagacagtgtgtgaggtggtgtacacttgcgaaagtgagaaaaactcattcgaagctgcaagcagaatcccacccctagatccatttgcaggcagcacagcaatattgtttagaaaattctgacccaaggta

SEQ ID NO: 134612 - DNA, 486 bp, Zea Mays
cttacatgctagcacttaccatcgagggaagattccaggcagagtatgaaggaggagcaccgacgttcaaaattttacccctcaacatcaaatcaactcgactcagtacgttctccttagatatctacttattggtaactcgagaagggtcgttcacccctgtgtacaaataaaccgggtagactccatccttcaaggttgagtgttcttaaaaatgaagttgacaatgacgacttcaacagtcaggcctctgttcttcagtgcagatatctcaacaagcaaaatcttggcctcaacaagctccgaatcagtcgggacctctgtccaactaggtgttcagacgtcgggttgtctcctagagtgtgcgggtagcgatttgtgatgattctccatgttaaaccactcgaaatgccatcccttggtactatccttcaatggaatgtcaaggtattcagatttcctaccttggcgaagctccaaactggc

SEQ ID NO: 134613 - DNA, 667 bp, Zea Mays
aatccgtaccttagtgccttgtcgtgtcgtgtcgcccctatcgtaactaaatttaaggcacgatccagtagtcatttgggtaatggtggtccattttttttttgtgtgtcgggcaatggttcagacttgtatttttggctatccctaaacgggcgtaaatgacccggcccaaactttcaggtctaacttcaactacacaacgaattaagatgaccacaaggtccaaggtgcatgttgcgcgtgctctttagctccacatattttaaacttccgtttactccgaaactgcgcatacctatatgcatgttattacgagttacaagacagtttacccaggtttaaatatgtaacacagtaacagcaataatgttggactcgcactcactgcatctgtatctgtatatgcatcatggggattggaatgagcaacaagctgccgatggatcgagaacgcggagtaaggcccgggcgccgagctagctacaagcaagtggcagaaacgcggttaactatagtagcagtaatttagtttagtaccgtacgttaaattaacgcggagtagctttttgttcggccgttgcggtgaaacgaagcaattataatgggtaaatcaaagcgacgcgaggcgagatcgagcaggttagagctgccgccgtgattgcgtgct

SEQ ID NO: 134614 - DNA, 331 bp, Zea Mays
atttttggagcccatttgtgcctaatccatgaggttttaggctgtagagtatatagaggaattcaagaccacctaatggtgaacaactttattgaaggatgatggacatgatcctacataaaaagtgaagtaacagctgctcaaaggttggactgtcaggtggctagtgacttagtctattcagaatttaaagtctgaaatcagtgcgtgatgcaaagtttagagcctttttgtgaccaatctagaggtttaaaggctgggagctgtatagataaattagagaccattagaaggggattaaatgttcttaagaagtatgggcttgttcctg

SEQ ID NO: 134615 - DNA, 567 bp, Zea Mays
gtcgcactctaaggcccaaaccactatcaccgggagcaggattcgacacaaaactggtaaaaggcttggaaggaggcatattgcaggctgagtacgcacaggagcgctgatgttcgacaccttgcctctgagaatcatttcaagccggctcaccaagtccacagcaaaaattcttctgttggttacccgggttgaatcagacaggcctcggtacagataggacggatacgctctgtctttcagtggctgaatgttcttgaaaacaaagtcagcgaccacagcttctgcagtcagacccctttctttcaacaatccaacttcagctagcagagcccttgcctcagccacctcctggtctgtgggggattcggtccagctcggagtgcgaacatctggttgtctccctgaccgtgggggagggaattcccatgattctccacgatgaaccattccaagcgccatcccttgatgctgtccttgagtgggatgtcgaggtagtcagtcttcctcccacggcgcatctccaagctcgcgccccccaccaactagtgctgccctccggccatc

SEQ ID NO: 134616 - DNA, 312 bp, Zea Mays
cagtgtaaggttctttcaaatgcttgggactgcaggttgatactgaggaaacagaggggctcttttgtaaagttgtcggttgaaggggtatctagggttttcggccgaaggattagatctagacagccttgattaaaccagtaccgcgaggaattaatgtgcggtcccaagcgctcgaatcctgatgctatggtccaaacgaatctagcatcgacccgagctccccatcctacgatcaacgatctaccgctatcattatcccaggccgaatcgttttcaccgcatctaatctacgccgtttaatcgggatct

SEQ ID NO: 134617 - DNA, 403 bp, Zea Mays
ggtcgttctcacataggctacggtgtcattgtgtataggtgatgcagggattcaaagatttttttgactaaagtgagaaagttttttcttaatacaatgtccgattatgtcttaccccgtaccgagtttttttaacacaaatttatattttgctgccgggacacctgaacaccgtacccagacccagcttgcgtggctgtaccagatgaatgattttgctggatgctagtgcaagtcgcatcacctcgtgtacgtactcgccaaagaatgccaggatgtgattgaagctttgtcgccgagtaatgcaccatgtgggactgcttgcctgctcgccgttctcaactcttaagtactaactacatgaggtgctgcttacatccagtgtaggcttatcatatacttc

SEQ ID NO: 134618 - DNA, 400 bp, Zea Mays
ggaccagcactattccattgggaacaacactattttaggtaccagaaaaacgagggataacagctccagtttttccctcttcgtcagttgaaattaaatttattatgctcatgatgatgaatacaaggtttaggaatattccactttagaagttggttcatttgttgtcctaagaaatatgaggacaggttcgacgacacactttttaaaacatatggtgacatcacatctttatgaagtcagttttggtgaactatgagcaaatgtgcttgctatgcatatcagtaccaaggatgaggctagcaggaggacgctatcttggtggcttgatccattgaatttattatcatttatggtttcaagcaagcatgtataatatcaatagatcgaagagaaacaa

SEQ ID NO: 134619 - DNA, 372 bp, Zea Mays
gggcggcgtgcctgtccattccgttggtaggcagtatgcccatgctgcggcatacaccatgctcatcatggctcgcacgttaccaaggaagcagccgcgagatattaatattgtatggactatggacattatggcgcacggagatcttctgggcaacactagcattggatacttctatatgtattccctctgttttgcccctgggcccacatgtcgaggcccaacacccttgtacgtgcccccctttgagctataaaagggaggacacatgacgttacaaaaggggcagactcagacccaacttaggctcaagctcacttagactctcaagctctcaagctcaatacatcacacagtggagtagggtattac

SEQ ID NO: 134620 - DNA, 472 bp, Zea Mays
atataataggcaaaataaagagaaaatagaaagctaaataaaaaaagagagatttgcacgacttggcccaacgaacagcacaaccgagcaacccatccatccttatcatagctcacgtctcctattgattttcgtttttatttattcccttgccgcaacatgacttctatgtgacatcaagcaagaaaataacccagaagcacgtgtggatatgtgagaccgaataccagaaggatctctaatctaatcagttacgccagatgcgagattctcgggcaaacttcgtaggagttcagcggatcaagccatgactcctgggcatataagaaaaccatacccttggccatagacgcatgcagacgcgagccgagaacccagccaccaccaacaggaaccgtagagaggagagagaagtacgccgccaacgctgttcttcgcttaccaaggtcgctcggcgtctgcggataattcg

SEQ ID NO: 134621 - DNA, 899 bp, Zea Mays
gcgtgctcctactccccacttgctcgtggtgggcactacattgaactatctagcttctttcctgtttggtgaaccaactcggagtcaacaacatgctagagtaaaactatgcttttttatgttgcccgattagtttaggtctttaggatgggtataggatgctattgtgcaatattaatgatctatttttccttggtggttctctattttcatggtggccattgaaagatctatttttcctccaagcatggtcgcttgggaggaaccgtctatgtcctatgaatccaattttgtttgtcagacattcagagcatggattctcatcacagtgcacacatgcgaagtaacccttagtggttctgcctgacatgatacctaatgcaggatagtcattgattccccatagaatcgctgcacgcagggtgaagtttttgccttcatatgcatcataagtagagacaccattccaaagagtcatcatgtctgctatcataggttgcatgaacacatggaaatctttgcccggtgattttttgcctgttattagtaaagcaagcatgtaattgggttggtctatacacatccaaggtgcaaaattgtatggaaccactatcactggccatatgctatatgaattggtcatctgaccaaatgggttaaatccatcagtagcaatggctaacctcaaactgcgaggatcatctgcaaaagacttgaaactatcatcaaattctttccaagcttctccatcagcaggatgtctcatttcattctcaacctgtaccctcttttccttgtgccatcttgcatactgtgcccgctgctttgagataaagagcctttggaggcgtggaattattggaaagtaacggaggaccttgtgaggcactttctttctg

SEQ ID NO: 134622 - DNA, 399 bp, Zea Mays
cgaatgtaaaaattgttatgttttattatttatatatgtcacacttatggacaagagatgatgacatgatgttaaaatgcttgaactgctattgagaccacctaaccaactcagctagagatccttttgccaagtcccttgtctctctactgctctctccattacgggagaggaagcctggtgctggagcaaggctggtgctaaaggcctccagctccaattggcacaggaggaggatgaggaaggtcttttgccttatcgtcaggtctttggttggtgctactgggtttcttatcctgacctttgatgtctaactagggctggaaacgagccgagccgagttcggctcgcctcgcccatttcacgagctggagagataggctcggctcggctcgtgag

SEQ ID NO: 134623 - DNA, 853 bp, Zea Mays
atagttcatatttcacagagtctagcaaaattggtttgaccaaatttgggtgaataaaactaaagttatgcatttttgaagttgactgctgttatttaaatgagagttaattcgaaaatggaaaagaaaaactgatttgcgctgaggcccctgggttcttgtaccgttcttattacatctaggtccccagagcactattcatttgtgtgactgacagtgcgaaaaaccccttgggttttcccatccttaacccacgctccaccctcaccggaacagtaaaccgcggaactccggtgagcgattatggtagcgcgtcgaggaagaggtcggggagtctcgtgggggtccggtgagcttggtgacggtggtgattggtcggaggaggttggtgacgtccggtcctcgcgtacaggcgggcggggaaggcctggcgacggtgatcttcgcctctaacggtgtaggcgtccaaggagaggttctgggagcttcatcgggctttggcgaagtcgtccgtgagcttcgatttggcagtggtggcttgggttggccggtccacgttcgccgacgagcgctcgtcgagtggcgaacgaaagcaggcctcactggcgtggtagggctcgattaaactggccagcgagctatgggaaggtgctggggagtcgctggagagtttagctgggcgttactacggcgagctagccgtggcggccgtgctttggcggtggttgcaggcggtattgcgcggcgaactctggtgaactccggctcaggcgggagtctgggcgtgcgagggagtacagccgaggccgtgcgactctttattggcgcgggcgcggcgcatggtcgagtgtgg

SEQ ID NO: 134624 - DNA, 521 bp, Zea Mays
tggaataattaagaacagggccattcaatttctcactaaaatatgcaatgggtttacctccttgcatcaaaacagcaccaatgccaactccacttgcatcacattcgagttcaaaagtcttaccaaagtcaggaagttggagtagtggcgcgtgagtaagcttctcttttaaaagagcaaaagaatcctcttgtgactacccccaattaaatgaaacacccttcttggtcaactcatgtaatggggcaacgatggtgctgaaatccttcaccaaacgacgataaaatcctacaagtccaagaaaactccgcacttgtgtcaccgtcaatggcgttggccaactctgaatagcatgcaccttggcctcatcaacctcaataccctgtggagtgacaacatagccaagaaacgatactcgttcggtgcaaaaggtgcatttctcaaggttagcaaataagcgtgcggcgcgcaaagcatcaaaaacagcacgtagatggtcaagatgttcagataaacaagtg

SEQ ID NO: 134625 - DNA, 400 bp, Zea Mays
ctatccgtgcaaaaatcgactacaggtgcagccggaccgacataataaacgcgctagatcaagtgcacaagtcccccacgagcacagccagatcagcgaacgcacacagcctcatcatacaaatcatcataccaattaaagttacacacatacagcaagggcatcacaccttacattggttcaaccttcgggatgatacccatctccctgtagttaaacaacattatcctcagcttctcaccctcaaatagacttcacaactccccctcacctacactcgccccaactggcggggacaacaattcccgcttgccagtcctatccacatgaagacgcccaccctccacctcactcactctacgcttcgccaccgcccttcgccgcctgcgcccagcactcg

SEQ ID NO: 134626 - DNA, 493 bp, Zea Mays
caagaattcagacatagcattgcatcagctgatcagcctccccgagggccgagactagactgccgtcgacccgtcgttgctacctcgctactagctgtcacgcaccttcgtcgtgaatgtcaccggatatgagaaagagagtagaagaggtccgagaaagaagaacggaagaaatggacgaatattgttctgttattcgacaactctattagcagcatcccatcgagtatttgtacaacaatatatttgatacggcccacggcccatgagtcaagtcatccattcggctcccgtcacccgcgtattaggcctacgcacgcggcggcccatccttccaacagcagtttcattcgttcctgcgcttgccgattggtgtttaaaatgtactgaagccgatgatatgctgacattagcctgctggctgctacagcatgtgaagtgaaggcgctgtttgacgcacgggtcgccggtcgaatctatcgttattttcccg

SEQ ID NO: 134627 - DNA, 279 bp, Zea Mays
agtaaagttcgctgccggggtatggggtagtgtctgcgccgccttcgacctcgggcgattgtcggtggtggtccgccctcgcggatggaggtctacgcccggggtactcgtgccatgggaatttgggccttgggtgatcgcgaatgagcggcaatttctcgccgaggttgatctccgccgtgaaacagcagtgcaccgtgggcagccccgcactctccaccactactggtaagactacttcctgtgcgtttgccatcgatttgcttcacgaagatcgcg

SEQ ID NO: 134628 - DNA, 496 bp, Zea Mays
gacttcttagttcgtgccgatgcagggatttcctcagtatctggctgcgcctactcctgcaccgactactcctatgccgtctcagtttggagctccgcgtctgcctcacccggcggcttagttgggttcttctgttaatttcactccgggagcttcctcttctgcgggtatttccggggcttatgtgctacccgctacggatggcagagatcaaggagacgtggtgacaggtatgatttcaattgattcgtttgtggcccatgctctttttgactctggcgctagctattcatttgtttcggaggattttgtgtcgcgggctggtctttcggtgcagaggttgggtcacccaattttggttagttctactaatggctccattagtagatattcagtttgtcaggagtgttctgtcattcttgctgatgaggtcttttcggccaatctagttgtgatttccttgggggcattcgatgttatcttgggtatggattgg

SEQ ID NO: 134629 - DNA, 558 bp, Zea Mays
aaaaatcttatccattgatatttcccattcattatactcatttgcaatattttcatcaaaagaagagaaggatggatatagcgaacctgagggagacgaatcatcatcaatggtgtggctctcaaaggctttagtcaatgcgagcatcatctccttcaattccagatagaagtcacactcgccgttagtaggcttaggacccttattattgttcgtttgggtctttggtcctatcattgttagtacaaaaaaagataaaatgcaacaaacaaactatgtgaatccaacaactactctcgggggtggtggtagaacacaggttatgaaagtgtcttaccctgctcttacaattttcttaccagcactgtaggtgccaaatggtagctggtgtgactgcacaaagaacgttggtgtgattgcaaagtgtcagtaacagataacaatggtgaataagtgtattaacacggctggaggaagacgcaaaggaggtgacaagaatttaggaacattaagggaacaagttagaatgaaaaacaatcacaaatgtgcacatatcaa

SEQ ID NO: 134630 - DNA, 513 bp, Zea Mays
gtccgaggggccgtgtcggtcctagaaaaagtcggttgtgaacatgctaaggctgtggttcagccaggattctcgctttcagctgatggcattaaaaacccatcgaccgatgctactgcattaagcggaaagttctattccgaagtatggctgaagggtggccgagagatagctgacgaagctataagaagaaatgagaaagattctcacgacaccttagaagaggctaagagagctgaagaaactactgaacgtgccaagtttataggtatatcaattatagcttggcttcgtaaattactatagcttcggtactaacagatacttgtattttgatgcagctgagctttctccccctctagagccatacgatcctgaagcagattcatctctgaaagggcactcttagttttactgcgtacatgtctaacaacatcatcattcctaggcaaatattatattatgttttactgcataagaaacaagcaccgagtgtcccacatacatcaatgt

SEQ ID NO: 134631 - DNA, 583 bp, Zea Mays
caaacttcagaagattacattgtgcaataccacgctgactgatgagaagctgggcgcccttagcgaactcccagtcttggtctgcctcaggctccgtcacaagtcatacaatggaagagaactcgccttcaggaaaccaggagggttcccgtcactcaagtttctccggatcgaggacgtccttgtcgtcactgagctcagctttcaacccaactcgatgccaaagcttcaggagatcgtctggtcattggcggaccacagcagcaatgatgcactcgttgcagccatcacagtttccgtggctggagtcgagaacctgcctaatctgaaaaatgtggtgctcaaaggcttgcgagagcagcatccttccaccttgaccaaggacatcgcaaagcaccccaatcgcccagtctttagccgtcatggccactaactacattgcaagtaccacctacgtactgcagatgatcgacgggcggcccgcccgtcaggatattcggtgatgcgacacagcatactgtgtccggctccatatctcgcatccccacatgtgtcttatctctctgtgtattgtatgcaagag

SEQ ID NO: 134632 - DNA, 495 bp, Zea Mays
ggctatagttgctatggcaagattgtagctaaaacattggtctacaacttcgctacagagccttagataggttgccaaataaaataggagaaaatcaagcttcaaattgatctgtcaggccaacttaatgaggaatcccatggtacagtgcccgggaggataagcttcagaccctcaccaccgatgaccgccacgcacggattcatgcttctgccgttgtgattcgtgctcatattgtttggatagcgctcagggtcacacaaatatcgtcgccgtggataactccggctagtaaacaatttcggccaccgtaccacaatcaccacgacggatgtggataagttcatcggtgatggccgcctgctagtcttgtgccacgtgctctggtacctccactgcatcgctgtgaccagtcataactctctgttgctcgccggagtaattgccacgatagtcggacaccaattcactgcgccagtaaccttccgctcctcc

SEQ ID NO: 134633 - DNA, 435 bp, Zea Mays
tcaggaagttttgcacgctcctgacttgtgattaactgcatgtactgcatgtacaagttcccctatggttttagtacgtgggaatccaagaaagatttcccatgcgtacattgggtatgttcccaatctcaccaccgcagcgtacatatatgggcacacagaaaactggggatctatgtgagaattcattatccgtcgatcattaagttttagaatctcttcataagattctatttatggcccgtacgcttgcttgaatcatgagcttttccaggcattagggggagatttcaagtaccaaaaatgaatgccaggaaattataatgaatgcagtaagcattcaggctcaggatcacgtactaaaactgaacctttgggttcgaatgatttgcaagaagttgcaaattaactgccatgtgcatttactatgaggtg

SEQ ID NO: 134634 - DNA, 372 bp, Zea Mays
gttgagaatctaatctaccgacgtgtgccagaaagagaaaggagagatgtgtagtacagcaagagctagctgcgtggggtggcctctgaaatctccgaataaaaatacacggtccgcgcaagtgcaagttgacggttctcgccatttggttgtgccttgccttgctcctcgtcgttggaacatgcaaacggggtggtttcaccgattggcgtcgtgttgacgctggaaccgagtccggaaattgaaccgttcatcggcacgcccgtgagggcagtccaggccaggcgtgtgcgatttgaagtggtcacggctgtcgaactggcgtccaagtctcaacaagtagcttttagaagcgaggacggatattttggc

SEQ ID NO: 134635 - DNA, 687 bp, Zea Mays
gagagcaacggctgagatcctaaataacagaaatcgccagtcgcccgatcgatccaaaatcaacggctcacacaacaccacgaaccggtaagagatcgatctaatcgccatggttgatacctgatccaacggctacgacgcgatcccctacccatctctccttaccgcagaccaaacacagcggcgccgcccgaagggcgcaccggcgacaagccacccatgaaccgatgccctaagctctaattctaccggtgccacgcgacgaggaggacaaggcagactcagatgaggactacttaccgatggttaggctgcaacattcctttcccacagggacatgcgatccatggtggatcccaacttctgatgaggaattgcgacagcgccagaggtcgttccaatcccacgacgcaatgccaagcatccaaacgggccagtgattaaccttatctcccagccaaccagcaactcacaatcgatggcggcacggagcgacttcctctgtgctctcccccatggaggctctcagctctcacgatcgcgcgacgttagcgggacgagatgcagaggagtatggggagctgacttaagtacccgggaggatcatgtagtggctcgggaaaaaggggaagagggttgagggagatgcggaattcacaggcgggagatcggcgaagtctgttggga

SEQ ID NO: 134636 - DNA, 435 bp, Zea Mays
cccaagtcagtttactgaccctcgagaccacgctctaaggtcgacgaggcacgggatgctgcccgggatgatcccaacccggcgtcgagcacatcagcacaaacctccatcacaccatcattcgctggctctgacagcaggtcttctggaaccatatcttcaagagtctgatcaaagtttgccagggacaactcttgtagaccaatgagggcagacagagcaggagacggaactccactactttccccactggcgacatactgccgactgttcttcccagtcaaagggacctcatcttcttcctccccatcgttttcatcagcaacacagacaacacacccattggggtcagcagcaggtggagcacccccatttgggtcagcagcaggtggagcacccccattgggatcagcaacaggtggagcacccccattg

SEQ ID NO: 134637 - DNA, 309 bp, Zea Mays
tttcagatttttaagttgcggtatggattagtaacgtgggaggagtttgtggatgctgtgatgaagaagtttggggcggatgaatattcgcaggcgatgaacaacctgatgacggtttaccagaaggggtcggtggaggaatatctgaaggagttcgatgaggtgaggtatgcaactgcggtgcataaccaaggcttggatgaaacattgtttgtggcgcattttatcaaggggttgaaacaagaactgcagggttcagttcagtcgcatatgcccacgaccgtggatcgagctgctaggttggcacag

SEQ ID NO: 134638 - DNA, 554 bp, Zea Mays
tatccaatctaatctcgatcctatctaatcttatatgatctaatctagtgtgagttacttaatgctggtacaaaggataaggccatacttctaattcgcttacgcctaaattggtgacttagatcaactcggccatacccaacaacttgacctacatgataggttacataacctatccgacccgtctagaagcaaacgaccaaaccagattctgactaacctcattaaactcatagccatctactaaaccagctgctctacctacgtgttacatacagatctatcttcacctcttgacccaaactcggatagagacaccaaagagcaagaaggaggagatcaacctcgacaaggaagcatataacagtcagaacgaatctcgagatgaatcaagacatagacattttggatgaagtcttttcctggtcataatctttcttacctcaacctatccatctcttatatcttacataataagtagctggatacctatgctctcttaatcacccaccattggctatataaaaaaacgagacccttgatttttgaaccaa

SEQ ID NO: 134639 - DNA, 589 bp, Zea Mays
ataataaattgtcggactttgggcttctttcatttctcgagcttcagcaccctgcaatttcccatcgtgttagcactgaatctatgtgaaatacgacttgacttttgctattgtttcggttttcaatttacaacggcaaataaagtaaaaaagattggagcctacgcattgggtaaggagttgctggtgaaagcttaactggactcatcggcttccatgaaaatatgatgacactttcattaatattatcctaaatatatctataaaactctcacgaaacatctattaagaatttaagattgggctaagtaacctgattaagatagttgtcaagatgttatgaatactagttgtttccaatgggctttggctcttacttaaatactcaatgacgtaggaatagttgtttccaatgggggttgggactctctttaaatgctcaatgacgtgtcattcattctcttttgaagagttcaccttttttccttttgaccgtctcttgacacgtttttccattaaaaggaaatatagaaatttacaagcatcaagacggtaatcatcggataaccaaacactcagcaaagtctcg

SEQ ID NO: 134640 - DNA, 671 bp, Zea Mays
ctgtcccagacccccccaaatcgcctaacacgcgcctccgtgcataaacagtaaacaaagacatgtcggcacagacacaagttgagtacatgagctccactcacatgggaacatgatgaaaggaggcagtccccatgtatagagcacataggtaactgaaagaagaagccacttcagtcaggacaaagccaaggatccatccaggggcgccacagagtaaacaagggattttggatttgtggttccattcgttatggtcacatgactagacgtcgatcatctcacagtcaccagacatgtatgccctccccccctccctggctccacatgtcaatggaacatggaacataataataaatttctaaagtggcaaactggcaatcaacgatggagtagacatgaggttccagtagagtagaagctgctagagactgcgacacgcaagcatccaaataaatattataagcacaaaatggcagcctgatccttaatgctcctacaacattcgatttgaacttgctcccaacacaaattcaaatactcctatatatataaatccgaagcaggagtgcgggggaaccttgacctggatcctggcgacgtactccttctggaagcggatccgcatgccgaggtccgggtcgacgaagaggaacctgcggaggccgtgc

SEQ ID NO: 134641 - DNA, 651 bp, Zea Mays
attgcgggagcttggtggtgttgctcacgggcgtgtcgaggaggatcggacgtcagggcgacaggaattcctcgtcggagcaaagaccaagccatccgtccgccttactctgagaacgtgcacagcaacacctacttcgtgatgagaaccttttcccaagaatcgcattcattcccgcatcgtgtagaacctcggggtcagggagttcgtgcactacagccgtagttggcgttggcgtcggtggggattcgccgtggttcaggcagcgccaccgtcctacttgggtgcgcagagaagatgaaggcggagccgtgtgatctagaatcgatggccacgattagaagcaggttaacggttcggccaacgacgcgatggccgtccgatcgggatcgtactggtctggggcgtgttccactgttttaaatccggaccgcagatccaggattgtgcggttaatagggcgtaccgattcatttgacagtagatctaatcagagtcgttcgctccagatctgacggcttatcaaacctgtgtccattcaatgaaggcgttatgcgtatgagcccctactgaattacaaaatagaacccagcgtcctatgcgactattcactaagtctcgggatacttgcgccgtagcccctgtgcatcc

SEQ ID NO: 134642 - DNA, 976 bp, Zea Mays
gctgcaattggaaacccatcaccaggtatcatctgccaccacaagaaacaagcagcaacagccaggacccaagagcgagccagccagcttccacctctagttgtccaacccaactgagagcataggcatagcagcacatcacatctagtgccagttctagcttaattaatccttttcttttaacagtaccgcttccccctcccccgtgggctgagcctcgccccgcctcaactccacctccgcctccaaatccgatcgatctccgaggcctccagatccccggcggccggaagacggcgagctcaaggcggtggacacccctcgcagcgctcgtctcctctcgctctcccaatccccttaccaggttcgtgccattcatgctgtgtttccttttttttttcttcttctcgctattgccctgcctggctgctccctgcattgagcttggttgcatggaagttggaggtttccgtgcgatttggagcgcgctggtttgggtgtaaagcttcgatctttacgtaagaaccggtttccggtgctggcgctgtgggttagcttgcgctggctggggctggttcctgcgggtggtgctgaccggatcgactggcaatgcggttgtttggcttggtcagagcttgactattcgtcactcgccagccgccgccgtggactcggcccggccgctgtccttttttgggggcgaatcggctgctttgggcattgtagaccacctacctcgacacattttctggacggtcgaacaacttaccaagctttggacgaagtggtgctctttcaatgttcgtagctttcgtcaggattttccaggacagatcgtgactgaatggcatactagtcagtgcttcgcaacgtgtactagaacaaccactactagggtggactcctcggttgtacaattgtagggacaaatcttggtgacttgacttgaatgtgtcactataaaagcatatggaag

SEQ ID NO: 134643 - DNA, 554 bp, Zea Mays
aagggaaaaaaggggggcgaccactagggttttgtgggagaaagaaacgacgcctcagatgtctcctgactttgcatccaacggcccacaaccctttccctcatctacgcaccgaagatcaacttttggtcaacatttttttgggatattacactctaccccccttaaaaataattcgtcctcgaattcgaccactccaagcaaaacacccaaggtaccccatatagcaccaccattcaaaacctgggtccattattggtcttaattaacacaagaacttctaccttggactaattgtctaaggaaactatacgacctaacatcaagcatgaaacaacatgcaatgaatctcaaagcaagtcatagatgcaatcaacactacaatttcacaccatcgaatttggatgcagctatacatcaacatcaatgtcttaaaaccacactcttttatgaaggggtaatatgcactaggcacaacccttaccaactttaacaattcattttaattaaatggtgaaacatccacacgagatgaatgtataagaagatcaaac

SEQ ID NO: 134644 - DNA, 478 bp, Zea Mays
cccacggagtagtctctcgctcgcgcgcgccgtcggcctgacagacggggccatctggtcagtatcatagtcgtcatctccatccgcggtcagctcgcgcgaactactaacaactccgccgagatcctcgcgtggatggaccggggaggaaactgcttcggggccacgtttgtgggtatttgagccgcacctccttgcccctctcgtccactcgcaaactccccaccatacctgccacactcgcgacctgaaggaagggcccgccattgccgccgaccgagaagaagagtgaggttgtgtgcttgtgggcgacgccgtcatccgcacctccagtgtggggctcggggttttcctttggctgtgaggtaggcgctcgtggccacgccccctagaattggacgccagtgacgagggaatcgctagccggacttgcagcaccgccattgtgccacctccttccgtggtctgacaccgtcat

SEQ ID NO: 134645 - DNA, 276 bp, Zea Mays
tgtgggaaaatgaatgggttgaagaaaataatgaagctaacggtggtaacacatatgacatgttgtggatgaggcattaggaacaactcaagctctccaaggcaggatttcgtcaagaatagttgttgcaagtgctggttcgtcttctcagcctcaacggacatatgttaggacaaggaagcgttcaagaaatgcaacaactcaaggtattgaataagatgacagtgatgctcaagaagatggtcctgccacagcagatgcaaaacaacaaccgcc

SEQ ID NO: 134646 - DNA, 339 bp, Zea Mays
ccaaattgttatggtccaacttagtgataagggagtgaaaatcatcaaagaaatgcttaaccagaagattgaaaagtataagtgtttttgccaagaccataagggaatattgtggtttgagaaccgactgatacttcctaaaaatgaagacctcagaatgaaaattctggacgaggctcacctctctaaattctccatgcatccgaggagcaacaaaatgtatcacgatctaaaacccctgtatttgtggacaaggatgaagagggaaatagccaagtatgtaaccgagtgtgatacatgtcagaggataaaggcaagtcacctaaagtcggctcgtgc

SEQ ID NO: 134647 - DNA, 1142 bp, Zea Mays
tattttgtctacgtattcctcaagtaatccatgcatcctggacccatctttgcatgtagagacctacaaagatcgctcatactatggtggcccatcagacgagtgccgacattgtggcgctgttttctggtttcaagaacgggtcaaaagcgcttctacaattacgcagcgcaggcttgtgtacaacctgtgttgcagaggaggtaagattgttttggagccttacaaacgtctgccgtctcccttaagtgacctactgcgattcgatggtgataatcgtgccaaaaggttccttaggcaaattcgctcatacaattcccttttcgcgtttacctcactgggtgccgtcgttgatagatcgataaataacggtacaacaccttatgttttcaaaatcaatggtgtcgtacaccatcgcattggctcgctgctacccaaccatggattgcgaccacagtttgcacagctttacatatgacactgaacacgatgtacaaaataggttggacatgtttgagaatgaggctgacgtccatgatcgtccggacccagaggtggcccgtttattgcttaacatgctagatgagcatagcagtctggtcgcagcatttcgctttgctaaagaacgtttagatgaagcaggcaaccaaaaggtgacgttacgattgttagtctgcaacacacgacatgatgcacaatataacctaccggccaatggtgaggttgctgctataatagtgtgcgattgctcaccttcacagttcaagtatgatgtcctcgtgcacgctagagagggtggcctcaaacatgtttcgtgcttgcacccatcctacatggccttacagtacccgcttcttttcccttacggtgatcgtggataccaccttggaataaaatattctgacatgggaggaggtgatgtctcaggccgcaagtatgttacaatgcttgaatttgttagacatcgttcccattacaggctcaacgaaccgaacccattcacttgctacggcaggctgagcaaccagctagcggttgatgcatattctacgatcgaggcgtctcggttgcagttcatagcggaccaccaaaaggaattgcgttgtgaatccgttcaggggataaccgacgccattggcaag

SEQ ID NO: 134648 - DNA, 455 bp, Zea Mays
gtccttaaaggaaaaacaactaaagctatcaaccgatcgtcaacttacatcgatcaaagaattaaaaggaaaaaatactacaagtcgcacaactccgacacgcacaacactggagactgcaaagtgctccaacgatagatctagtaggccattgagcaagggtggcttatatttggcaggaaacatatgaaagttgacaagaattcttttcctatcaatattgatgagataacatcaacctcaaaagggaaggaagtggtcgacccgcatgatcggctcttagactttgatccataggaacacatgtcatcaaaagaaatcacatgatttcaccgatgttgtttgaagtccacacacctaaatgccatgtacacatggtggtacaagcaccaggacttggacaacaaggaggaggtgtgcccatatgcaagataccagtcgtaggagcatgaaca

SEQ ID NO: 134649 - DNA, 426 bp, Zea Mays
ctgtttgtggtggttagttccaagaagtggagcaaaagacatttcaaacttattcgtctgaaatgtggtgtcgaatgacacagcatcaccaaagcatttgtaatccattatagattgaccatcagcccaaaagaaattatttatctagccattttccttatgtatttcaattgcataaaaaatccaagatcctctgcccacttgttcttcaagtattccaaaagtgtgtgtgcatcattgtgttctaaatatttttttccgctcacgaccaatctcattatcacaatccattttaagaatgcaacaccagtggggccataaaattgcttcatgaaatcatagacttgtgttggcttcatcccggcttcccgtttttgactgataagttgtctatctacttctataacatgttgttgggaccttagc

SEQ ID NO: 134650 - DNA, 479 bp, Zea Mays
caaatcaatcttcattttctccaggaaggtgaccgggtagaacctcctctcaaactgcctgatgaaaacatcccaggacatgactcctggtgaagaggagtgagctgcctgcacgcccctccactaaatctgagcttctcccttcagcagccgtgtgccaaagcgaacacgatcaccatacacaatctcaaagacattcatcttatcctccacataagttagacaatccgccgcctcgaccggagtaccactgccatcaaaagtatccaacttcatgcccatcgactgcatcagagaaagaccactgactggaagaggcaccttggccccgccaccgggagcagcacccgcagggacagtgcccccgggcactcctccaccactagcaccctgagcagcacccgcaggggcaacaggaatagcttgcctcagaatggcgaactcctgctgcatggcctgcatcgcgactaacattgccg

SEQ ID NO: 134651 - DNA, 352 bp, Zea Mays
ctgatgaaaacatcctaggacaggactcctggtgaagaggagtgagctgcctgcacgcctctccacaaaatctgagcctctcccttcagcagctgtgtgccaaagcgaacacgatccccatacacaatctcgaagacattcatcttatcctccacgtaagttagccaatctaccgcctcgaccggagtgccactgccatcaaaagtgtccaacttcaagcccatccactgcatcagagaaaggccactgatgggaagaggcacctcagccccgccacctgaagcagcacccgtgggaacagcgcccccaggcacacctccaccaccagcaccctgagcagcacccgcagaag

SEQ ID NO: 134652 - DNA, 722 bp, Zea Mays
caccggacgatactcccaggtcagatcctactgcaccgcaattggttccatctcaaactgatggtccggatcctgcaagaacttcctcagcatagagacatgaaaaactgggtgtacccctgccatggaatccggcaattgcaagcgataagccaagctgcccacccgggccaagatagtgaacggtccaatatatctcgggctaagctttccggagacactgaactgaacaactcctttagtgggtgataccctgagaaggacttggtcacccactgcaaattccaaatcccgcctcctcacattagcataactcttctgacggctctgagcagccaaaatattcttacaagtttcccgaaccttttcagaagtctgctcaacccaatcaggaccaaccagagatctctctcccaaggtctcccagcacagaggggagatacactgcctgccatacaaagcctcaaatggtgccatcttgatgctagcctggtagctattgttataagcaaactctgccaatgcaagatgatcttcccagctacccttccaagacagaacacaagcacacaacatatcttccaaggtttggatcgttcgctccgactgaccatcagtctaaggatgaaaagcaacactaagagaaagcttggtgcccaatgcactgtgaagactctcccagaatttggatacaaatttagagtctcgatcagaaacaatgg

SEQ ID NO: 134653 - DNA, 482 bp, Zea Mays
ccgggacatgtataactctgccagcaccgcattgttgtagctagtcttgactggtatgaaatgagccgcctttgttaagcgatccactactacccagatggagtcataaccggctcaagtgcgaggcaaaccgactataaagtccatcccgatctcacccacttccattgagcaatctgcaacgactgcaacaaacatgcgggcctttaatgttctaccttaattctctggcaactttcacatttggcaacatactccgcgatctcctgtttcataacgtaccactagaatctattcttcaagtcttggtacatcttctcgcttctagggtgtatggaataagctgtttcatgggcttccttgaggatcaactcccaaatcgacttgatgtcaagaacacatagcctatctttgaaccataccatgccttccgtgtcctcccagaagtctttgccttttccgtctaggatcatctgccgaat

SEQ ID NO: 134654 - DNA, 676 bp, Zea Mays
attcgacgctctgctgatctcactgtacgtaggttccggcgtcaatcagcttgcaacacgtagacgtgtgccaacctgcctgatccgataagcttaacaatgggatgatcttgtccccttttctttttgttgccaccacgtacgtcctggacccttgaaccttcattacgagccccactagtccactactttcaactgtaaagctgtttccttggtactgggtctctcacagctttaattaatggtccatataccaacttcagattctcagatatacgctgatcgatacacaagcatgtttgggacaactcttatcgtcgaaaaattgatgttctgaatctagaatttatcgtgaagcggctccactagcgaacatgagatccatcataaaaccgtttgccttacatagcagatcaagatcatttttgagaagcacgaactatggctctgtaggtatcgacatcctttctcacggcggtgaagcttttagttattagtccttgccctggggggtgaataggcttttatgaaaaagtacaacctaaaatgtgaaaggcgttagaagaggatatccaattgtttggaaattccaaatcaaagtaaaacaacccctataggagaaatgaaaatcacttggaaaaatggatttccaaactaatccttagctaacttttta

SEQ ID NO: 134655 - DNA, 404 bp, Zea Mays
gataagaacacatggtaaacatcttacagctaaaaggcaaatagtgaaatacggagtataactgaaggcagttgaccattaagacacggctatcaagacatcacgagacaggtgtatcttacttcttacaggtactaatcagaacaataaatgctatatgaaaacattcaggggtgtgtccatcagaggaactggaaacagttaaaaggtgcatcatagacgagataaacttaccagcaaaaagactaattagacaagtgctaatcagaactaagtcacaagcatgcattgacagatctccttcttaacaacttatttcacaggatattcattataaacgctaaatcggtcggtgatagaatgatctaatcataccctgcgcctgaagcgctccggcggcttgc

SEQ ID NO: 134656 - DNA, 395 bp, Zea Mays
aggtggggaaaatctatgtgaagttcttcttctttttcccaagttgcttcgtcttcaccgtagtggctccattgcactttgcacatcttcatcaccttattcctcgtaactcgagtcaaagtatccaaaatcttgatggggtactcagcataagtcagatcctcttgaacactaaggtcctccattggtaattgttcctcaggtaccctgagacacttcttaagttaagacacatgaaatacattatgcacatcagatagattatcaggtagctcgagttgataggccatctctccaacttgcctaaaaactccgaatggtccaatgaagcgagggaacaatttgccttaactttaaatctcctcgttccacgaagtagtgacactgtgaggtac

SEQ ID NO: 134657 - DNA, 344 bp, Zea Mays
tcttattcaacggccgtcggatttggatactgctttcgtgcttgctaaattgcaggatgaagcaatggcccatgaggtgcactgacggcgtgatcaaggaaaatcggaattctggtcctcaggggtgcatgctgccaaatcaccttgtcctatatcagtgccacccaagatggataaaggttcagcacccatgttgacagatgacagactgtatggagacactgctcgtggaagaccaagtgatgacaagttgttggctctgcgtgcctatcgtcgtgccaagggtctttgctaatgctgtgcagagaaatggtctcgtgatcataaatgtccagcatcggtgc

SEQ ID NO: 134658 - DNA, 1004 bp, Zea Mays
attaaaagttatgcattactttcctctaaataagtgacataatggatattcattattggttgagcttggaatttgatcacgcactagtaatattttttttctaaagagaaataatatgggtgcatgtgggattatgttagggagcatttacttcaataaatactaatataagtataatacaaaacctttgcatatttatgctggagtctatactgtgcatagtaatttgaattgaaaactggaaacctaggtttaatttgtttttgatttaaaccatatttaaacttgagggaaatagaaaactaaaaatgaaactaagaaaaagaaaagggaatggcgaacaggccaaatgggtcgaatttcatcagctgacacattgcataggcgttctcctggtccaagcaccatataaccagctccccaatgacagctgggccccacctgttgccgtggttcttcctctgtattgtggacccggcctgtcatcttcttcttctctccagcgaaacaaacggcaactccgtggcaattccaaacggaaatcgcgagcacctcggccgattcgcggaactcctccctagattcgggtcgatccgatcccgtgtccgcgccgcagcctggtagggtcgcgccgttatcctctttccccaaacaaatcccacatgcggaccgacattgccgtgttcgctgtgatccgtccgccgctgcgccacctgcgcgtcgacccgtgcgcgatttccgcgggcgcctcaaccaacctccaccggggcctataaaaccaggaaccattgatgtaggcacgaaccagatgccagaatatcacagcatcgaacagggatagagctggccgcctcatattcatcaatcagagagagaaagaatcgagctgcgccattgccctgcgtgttcgtcgttgtcacgactccagtgtcgtgccgtgaagctccacctgtgcgtgtcctcgccgcgtggaaccggcgcccggggctcgggatttccttcac

SEQ ID NO: 134659 - DNA, 285 bp, Zea Mays
caattatcggagtataaaagctaagtcctttgcttgtaaagaaagttgctttgaaataatgcggaattgataatcaatataactactagatatatggatagtaaagcaagaaggcttagatgagaagagcaataagtcaagtttctttcttgcgaagtgttgcttcactaaatgagaatttaacttgaagcaacacaaaatgatattgacaaagaatagcgcaagaaaacttagagaaggaaaaacaaacaaatcacaagcaataaacacaaatgacacgggtga

SEQ ID NO: 134660 - DNA, 327 bp, Zea Mays
gtttccttaccttcttttttttcgaacaacgcaggagagctgcgtgtcatttcattaaggaagaaaagagaaccaaatacacagagatgaatgagacctccctgaacacacaacacactatcacaactcctctagagaaataaaacaacacgaccacgaccatacactaggtagcagtagcacccaactgatgggtctgcgcattccttaagatgagctcttgcaggccggctgtcccgtctaggcaccacaaatggcccttggcagccacttgagagaggacagattgttcatgaggttgggcaccatcaaacacaggcattccta

SEQ ID NO: 134661 - DNA, 475 bp, Zea Mays
ggggtatggagctctgctggccgctggattagacaccgagcgcccagattaattcgagctggttatgtacactaatgcgccagcaaccgttggattccagatccgcggtccacaactcctagcgcgaaggggtattccacgttttaatcctacccgcccgcgcccgatccgacggtcgcgaaagcttcgtcttctacacctggcagaggacggagacgcaggcccctacggcggcgcccatggccggcgagtcccaaatcgaagtccccaagagctatttcttatgcggtttagggcatcacgaggagcagagggaggcaaagcttggggtgggattataccggggtagtaggtcgcgaaggcacccgcccacggcaggatgcagtccagagctgtccgccgagctccggtgagcaattggccacgccgtgcttgacgcccggccctggtaagcccctgtacatctttgttgaat

SEQ ID NO: 134662 - DNA, 351 bp, Zea Mays
ggaaacagtccacaaatctatccatgacgcgattattgcaatggatcttggagaagtgctagatagggtggagagacggataaccgagcttgtcgatcgggttgccacgttggagacacgtccactacatcagcagcctcctcctccaccaccacaaccccagcagcatccaccacggcatcagcaacctctaccacaggctcaagatgatgccattttcgatgcacgtggcaattttgatgaggcagctaccagagacgcccgcctacgacaccgtcttcgttgaaacagggtaggtatgggtgacaaccagcaaggtaataacaatcgtcttcctgatgacccttttgc

SEQ ID NO: 134663 - DNA, 886 bp, Zea Mays
ctggagtcgtgtgtctgtctgtgcggctgtgccatggcgaccaaagggtcagaccctgcctccccggcgtcggcgccaccgccgccaccgaagcggcgaaagatcgagccgcccaggaggtaccggtttcgaccacactcccaaattctggtggcgagattcctagcaacatgtgttgcgactgctacgtgctcccaacgcccatgtccgaacgagctgcgctgcccttctagtttcgatgggtggattggagaggttccgtcctagctagtggagtggggggcagggcaggggtgactataagtgtaggtttcttttgttgtgtccattgttaggcacctctgttaactcaactccagttgtgggttgcaagtcaaatatgtttctgcttctttattcatttttatcatcactaatccatcaaaccagaaccatctatcctgtcagttaactccactgcgcgtgtagatttaagtatcagtattaggttatccggagggcatatcttatatataccataaaataacaaaaggaaatcatagtgcaattaaattcatgccctgtagttccttctcagatagaatagcgcaatgcaagccaaataggcttgtgtgtcttcctcagctcagtcaagacaaaaacaagtgattctgctatgaacttcacatcaaatgcttttttaatcattttctctgttaatgtattaagtaccagccaaatatactgtatcttctactccttttgtttaacagttaccgattcacaagcaagcagcaactgtactgaactattgtgttgttgcctgttccataatttatctcctctggaacacaggaccaggctttctcaagttaccatcgataacaagtcgtcttccaactcatcg

SEQ ID NO: 134664 - DNA, 492 bp, Zea Mays
gcgacgataccttatacacaacatcccaacccttaagatgttctttcgtttggcacgcatatgggagataatacacttgtgtggcctgttgggccacgatatagacatcgtctcctggtaaggtggaatcttgtcgaatttcgactatcccaagattagaatgtgttcgtctcgtcacttgagggtcaaaccaatgacatttgaatatcactggagtaagaggtttggaaccataaaaattgtgctcatatatttcttcgattcgtccaaaataatcgacatcgtcaaggccgggcgtaaagactccagaacacgttgttttccgattgggccgacttttgtcgtagtttgttgtgcgaaaatggtatccattgatgtcatacccagaatatttcttgtgccatgccatctgtttcgcggattcctcggtcatgtatagacgctggatccttggtatgaatggaaggtgtcgtaggattgttaaggggatgt

SEQ ID NO: 134665 - DNA, 386 bp, Zea Mays
atcgcacttagctccttgtctagtatctaccgcacctacattttgcggaatcggttcatcaggggccgcgaatttgtcaccggggatactccgacatcccatagccgcacgatggcgtggcctgtgacgggtggtgtccaactgtagaaattgagggtaggaacaagttcgtcatgctttgcccgaggttttgggagctaggcgggtcacgattggggcgtgtacgcgcggattagtcacctcgccggtgagcctcaccgcggtggaggtgtgatttgccgccgcctgggcgcaggttggggatgacctgcgtgcgccgttggatctggtatctacgtttgtgattagattcaaacgtaccgcttcggttgggtaatcgtgcgtcg

SEQ ID NO: 134666 - DNA, 589 bp, Zea Mays
cgactgctaactccaggtcatgagtgggataattttgctcatgaggcctgagtgctcttgatgcataagcaatgactcggttgtcttgcattaagacacaacccagtcgagtgccagagatacacatcaaatggcttgctgctgtcgggttgcgctaacaccagtgctgtggtcagatgttgcctcaatgcatgaaaggcatcttcgcacttctgaccccaaacaaacttggcttctttcttcaacatctcagttatgggcttcgcaattcgagagaaatccggaatgaatcttcggtaataaccagctaatcccagaaaactccgaatctgacagacagtcattggcggcttccagttcatcacctcttgcaccttatcaggatcaacagctatacctgcctgagagatagtgtgacccaagaatttgatctcctttagccaaaaatcacattttgacaatttggcataaagatggtgctctcgcagacattgaagcactacatgcaaatgcccgacatgttcttcttcgttctttgagtacaccaagatatcatcgatgaaaaccactatcaacttgtccaattcag

SEQ ID NO: 134667 - DNA, 440 bp, Zea Mays
taaaactcaagaacaagagcacaagaacttgcaacaactgaagaacacaagtcactaagtctctctaactcaaatcgatcgaatatggcacttgtttggctttgaatgcttgggaggtgttgcaatgaatgtatagatgtttggtgtagctcttgtattaaatgtgttggttggagtgtatttatagcctccaactgtccaaatagcagttggagtggttgggcaaaaacttcccaattctgtgtcacaccagacattgcacaatgacggtctggtggcgcaccagacccctgtcagactactttaatagggagccattctgacaggagttgtcttgtcaagggcaccagactggtccgacgtgccaccgaacctttgccacgtcaccctaattattggagttttttttcttgaatacgcaggagagttgcatatcattg

SEQ ID NO: 134668 - DNA, 443 bp, Zea Mays
caggaccctcctcgacaggacaagagcaaggcggtctacttggagaagtagggaggcaagaagaagcacaaacaggatagagctactcgagaaatgataggtgcaacaacaataactgagagggcagaccagagaggcaacattcaaattggctcggatgagattgcctaccatgtcagacgatagtcgtctcggttatgctatacctagccagacttgatcccttgctaaagccttctactccaactcccactatagccccatcgcttgcagcctcgactactctagagtcaaccactacctccactacacccatagcttccaccttgcctacctccaccactcctgctcccttcgctactccacctgttcctccacctcgctttcgggagcgtgacgagacaaaggttcatagagctactgccaccatagctcgtcgattc

SEQ ID NO: 134669 - DNA, 353 bp, Zea Mays
gtcgggtcacacccattggggtcagcttcagcaaaaactggcactggcacttcctcagcagcaggagcagaaggaccagcatcctgatccaagcatgacactcggtgaagacgtctctttttctttttcttcccctcagcaggagaagttggttgattggctcagcgaggatgttttgggcgaacactatcagacctctgagtatccaaagctttgccagcctctgggatgggcgctgcatctagtgtttcagcaggggctgcatcagaagaatcttgtcccacatatccaacatggcacttatctctgcatcacttggattcaaaggtacctcaaaatgaacctgcttctcg

SEQ ID NO: 134670 - DNA, 356 bp, Zea Mays
cttcagcgaggccctcagagatgctacctgggcagaattcgaaacagccttccgtgagcaccatgtaccccaggggatagttcaactcaaggaagatgagttccaggagctaactcaaggtgggagatctgtcagtgagtatgtgcacaagttcacagagctggcccgttacgcgcctgacgatgtcagcaccgagtccaggaagatggcccgttttctgaaagggctaagacccgagcttaagaccatcctcgctagctaagacttcctcaacttctctcacctctccaacaaagccatccaagtggaaagggcaaaagaggaagaaaaagggcacctcaagaggaaattctagg

SEQ ID NO: 134671 - DNA, 578 bp, Zea Mays
atccatccatctgaccggctgaccgcgatagacttgcaaaagccccccctaacgaaattcaacaagccaacgaagccaccatatttttctaccgaagccactgctgtatttttctcatcaaagctactatcgttctctcgatcgcttggctgcacagacctaatcgatcgatctgtgtcgcagccgttctgccgaccatgccacaatctcatcagtatgatgcagcagcaattatcccaagtgagtgcagcttcgtgtgagtgcctatgcccatggaactccaggtacaatcgtatgatgatgctcctgtcgcacatgaagatagcttcgacgagcaaggtacacgacatgccaaaactttactgattaccaggttcgagtgcatgttcacgtgtgtgatggatgtcgtaaattgttttaatgtagatcacaatcatgttgtcacgtccgagaagtcaacttgaacgttgaatataggacaccatcaaagaaaaaatatatacttaaggtgataatttatatttgaattttcatatagtgcatcatgcatcattttattaatgacatatactttgcat

SEQ ID NO: 134672 - DNA, 578 bp, Zea Mays
ggtcgtcggcgctgatgtgttgagtacaagggcaaggaggaagcaggaagggacgcttggcgttgtccggcctaggtgagcggcacgatggcgggcgaggacgttacgaggatgctggcggtctgcgtgagagacttccagcgatgcaataatgcacaagataagagcaaggctggcaagatttcagagggtacgtggttcttctaagccacgtctggagcatgcactagaagaagataagaacgtacacgttgaggagcattctctggaagaagatatttcacaaacgttctcaccaattgcaagttctcatgaacgtttattttgtatttttttttctaaggagccgacatcttatctaggataagggtttaaaagggataacaagggattgacccaaaataatatccggcaaaataatttagacagttcagacaaacagaaacagataagatattgaaaatcgtaacagacgaagacgactaaaatttagtgactattatattcatcgatatcccgtacttaagtccatagtcgatatccaacaggagataaacacctggggtgttacagccctc

SEQ ID NO: 134673 - DNA, 400 bp, Zea Mays
tggactggctaactaagcacaagggtatcatcagctgcgcaagtaagaccgtccttctcaccgatcggcaaggaaaagcattttcctgtcaagccgagccgcccgcaaatgatccaatgatgtttaatctggcagcagaaaacatgtccgtaatagaagagttcgtggatgtatttccggaagaattgcctggaatgccacccgaaagaggagtggagttctatatagatctcattcctggcactgcgcccatcacaaagagaccataccgcatggcccccacagagttagcagagttaaaactccagattgcaaagctgcaacaaaaagggtacatctgtcccagttcgtctccctggggagcacccgtccttttcgttaccaaaaaggatggaagtat

SEQ ID NO: 134674 - DNA, 765 bp, Zea Mays
cgacgcccacttccccctgttccttttctctgtctgaactgtagccgccgccctgctgctttgggttcttctccctcccccaccatgccttcaccagtaccctcctcgccttctctctccctctctctcctatcagctgttgccttcccgagttttcttttgcccttttccccttttccggttatcgtgagtgcgtgacgaaactgtccctagtggtcagcaaaaaatcctttcccttcgtcgctccaccaccaccaccatcttcgctttccttctctcatctcccaactctttccctctcaaacacacacttccaaacgagccatccgctaacctcgcccctccatttttttctctctcaatgctaagtttgcttgacgcggacgtcaagtcccatctcacgtttcgctttacagatccgcattcacattcctctctcttttttctattaccttcggaatttccaaattttgcgttggattagacatttgataagtacttacaaaggaaaataggttcttcgctttttttttccttccttggtgtatgtgcctgtgtttttgtttaattcatttatgcgccggtggttgactcttagacgtggggttaatttagggcaagtagtggaagccggtgggtgcggccggagctgggccttccatggcttccgtgccgccagagctgcccctgggcttgccccacggagcgctcgttttcccgggggggtagtccggtcattttcggccttccttttatcccccggcg

SEQ ID NO: 134675 - DNA, 277 bp, Zea Mays
taaatatgcaacatataaatctcgtaccgaataatacattcctagcgaatgaacactctcttatgtagagagaatatgtcctagatgagattatagttccttaatggaacctttcaagaagaaataaagtctatgttaaacaccaaagtttgataatccctataaagggataaagacccatacagacccgaaaaggaatgagacgaggtaccaacggacttgaagttcactgaataagcacatgtgcattccacgagttttactcatggtattttcc

SEQ ID NO: 134676 - DNA, 346 bp, Zea Mays
aagagcttgaccaagagatcaataatctcgaagcaatccaccaacaattggagaagcgcagggagaaggtgctttgtctttatgagcttgaaaaaaagattaacgaagcaactaaaaaaatgtgcaacattgaagcgcaggaccagaacaactacaaggaccaaaattacgagggcttcaaccaagacaatcttcatcatgaaccaatcaacttccaagatttcctctatgacaaatcttccctgctaacaccagagctacaagagacaccctggacaccgctatacaggccccccacattactaatatatgatggtctagctgatccaaagcaattccttatgag

SEQ ID NO: 134677 - DNA, 548 bp, Zea Mays
ttagagcagatatccagataatagggtaggatcaataggggatccggagattcggatgataaagccacaacatgattcacaagaaaaagattaccagatccacgcaaaaggagaggtaggcaaacaggatcagctaggatgatcaacagaaatgttatgaagttttaggggcaaggacttatggaaagaaacatggccttgataggttttgcgcaactagacacaaaacaattttccttgatacaacaagtgcacaaggagacttgggtcggtctagcagtcaagctatgggtgtctataagttgtgcaggtgcaatttcaagtgtaaaacacacaaggctagaaacacaaaaacaagcacgtgatttgattttttttaagggctttactcgggaacaactagattatttggggaagggggtcttttcatgagcaggacagacaacttttttttattggttagaggaaaaatggactgaacaactatcgtgccttctagaaagcaaggcaagagaaacacatatcacgacctagtcaagacttaccaa

SEQ ID NO: 134678 - DNA, 839 bp, Zea Mays
tagcggagcaggcggggtcggcaatttataggctcccacaacgatggccggtgaattggagggagacgcgtggcggctggagaaagagaaggttactggcgctcgggattagtggctttcaccgtggcagctccaccggcgacgagccagggccacggggttgtttatggtgactcaccgtgacgtggtaaagcgttgaggcacgtagcctggctagataacggcgaacgctggtgatgccaacgcgactgaccacggcgggacacgacggcggtgagaacagtggccggagtttatctccagtgcgatatttcttaccgaggagcgcttatctgagttcggtcgggcgtgaatcgtgacgccggcgcggatctgagcgcaagatcaccggcggcgaggggggtgaatatggtgatctgtttcagttactgtaccatcagatccatcttcagtcagtctgacagtcaatgtttagggcgaatttcctcccaattttccatggcaactaaaccaatgctctgcaacaaagttgtagccaaataaaccagctccaactttgctacattgtgcacccacaaatagtcacaggatcttgcttagaattgagccctaagtcatccaattccactgtcagtctgaattcaaacttagggcagtctgacagctcgactttgggcacatttttctccaaatttttcatggcaccaaggcataatccctatagaaaagttgtcctccttttatagctctacaaacttgatgtgttgacctagggaaaaatcttcataatttggaaaatatagggcttcaaatttgaccaattcactaaaattcatact

SEQ ID NO: 134679 - DNA, 342 bp, Zea Mays
cttctgagttgcgggtcttccggactgctgagtcaagaatctttattggcttctcatggtactgaagatctttctgaatctgtattgcctcttcttcgatgtgactttctggtacttgcaggcatttgcggagatgggacacgtgaaacacattgtggatatcagacatggattttggtaattcaagacggtacgctgcgggtcccactctgccaatgatgggatagaggccgacgaatcgcggtgctagctttcctttcacttggaaccttctgacaccatgcatcggggagaccttgaggtagacgaagtctccttcctcaaatctgagttctctccacc

SEQ ID NO: 134680 - DNA, 382 bp, Zea Mays
tattacaaatttgtggcccaagctaccacaaccaaatccacgtgcctaacccaagagtcagaacctcaaattattgatgtatcaaccggcgtgacccaagacagcacaaggcatattttgagcgaatctaactgaaagttagataatgacacttggaaggcgcataaatggcttgactcaggtccacagaaattactaacaggcaaggacagggaattccagtgcaaatgctatttgctgacataaagtagagagacctgacagactgccctttagatatgtacactcatttatatcctttgtttcttcactctttatgatgcaaactgacaagtgaccacaaaaactatcatgcaactgtacaaggtgttacaggcctttg

SEQ ID NO: 134681 - DNA, 515 bp, Zea Mays
aatcgctctaaatatttatgatgtgttgagcttttggactcacgtcgagcgattaaattgtatagtgggtactcagacacatcgatcagactatattattaatcgaccgagttatggcattggctgagcactggctgcgccctggcaacacgacgcaatatttgtgtcgtatgaacttggctgcgtcatgtgattgctatgtagcactctcgtttgtttggatagctcccgttgagtcgacccgccatcactgagtcgcgtatttttcgcatgccctgtaggcactgtctgtctgtcgtgatcattaagccacaattgcgcctgttgcgcacgttgcgtggacttatcgtgtaccccgattaccgagccataattgtgcctgttgcgcttattacgaaggcttgttgtgttgtcgtggccctgatggccggacacgcgttgacgccagatacgctagagcttgtactcgcgtggattgtggtgagttgttcaaggccctgaagtcatattatgca

SEQ ID NO: 134682 - DNA, 518 bp, Zea Mays
aaaaaatataagataactaatcaaacttagattgtccgtcattaaaaatgtatcgagcttaatagatccaccctatcttaaaagatactctcttatcttaataagattcatcttatcttgaaagattcgtcttatcctaaccaccctgcttatctcatcctaaagcaacaaccatgacctaattaatgagatcatatctagtcatatccaatctaatatagatcctatctaacatattatgatctaatctaaagtaagttacttaatgctggtacaaaagataaggccatactcctaattcacttgcgcctaaattggtgacttagatcaactcgaccctacccaacaacttgacctacaaaacaggttacacaactaattccatctagcatatagctattgaaccctctacccatcttgtcacaaacccggatgaagacaccaaaggtcgaggaggaaaggatcaactgcgttaaggaaggataagagtcaagccaaatatggtcttcagccccaac

SEQ ID NO: 134683 - DNA, 873 bp, Zea Mays
cgatcatctcaacacaagataagaaattaccattctgatcattataaagttgctcactagatcctctaaatgccaaattacgcttaccaagaaatttgacaacaacaattattcttaataagacttgcctaacacgctctttctcctttgtgatttgatgatgaaattctttatcgattgtttcatgtttattgagtctagctctcagttcattccaagagttcatgttggtaatatggtccatactagcctcatgttctttaagcttatcattgatatgtttccaatctctaaaaccatcatgcgccagtgaactcttacacttctcagaattgaaaatcttacaacaaaagcaaaacactctatcaacatgttttgaataaaccaaccattttctatcatgaacttcttcattgctcaactttctaaagtaatgcttatatgaaaaatgcctcccattatcatccaaaggaaatacaatattttcttctcttatagcccccttctctactaatatgtcccttgacttgttatcaagattattccaattccttggatcacagatgtcctcaataaaatccgattgttcatcaacattagcattttcagtaggagatgaattaaatataggctcatgaccactcacattgttatcatccatgttgatgtcaacattttcatctgatggaagaccctgatcttctagattaatattaggttgttcctccacaaccactatagccaattcatatgtatttgttcaagttcttggattactggtcaaaaacctatccatagctcctctctgtgattctataaactcttctgtcctttttctctctttcttttttcactgccagatgcatatcttct

SEQ ID NO: 134684 - DNA, 507 bp, Zea Mays
gcaccacgttagtagtcgagcgggcggaggaaggacatacatatccggtgtagcatccagtctacttcatcagcgaagttctcgggccctcaaaaatgaagtatccccaagttcagaaactgctatacgcggtacttctaaccgctcgcaagctccatcactactttgacgaccacaaagtcatagtagtcacaggatttccaataggggacattctccacgacaaagaagctatcggaaggatagccaagtgggcctatgagctgggagctcacgacatagagttccaacctcgcacggcaataaagactcaagcactggttaacttcgtatcagagtggactgagcatcaggtcccggacaacccggagactaccgaagtatggagaatgtactttgatggctcgctgaagttgaagggagtaggtgcaggaatcctcttcattgctcctggaggagaacaactcaagtatgcactccagctattatttccagcatcgaataatg

SEQ ID NO: 134685 - DNA, 374 bp, Zea Mays
tgagatgccagtgtgtgcatattcatttgacctttcttggctggtctccttgtgtagaacataattgttggtttctgcaattccagaagagtagggttgcgttcacgaagataaccttcaagaaaccacacgaccattctcttggacgagtgctgattgtatggtatgatatgtgttcgtttgtgttgtgttgacgagaacatctcatcagcggacgagctttgggtttcaagaaggagatgctcaaacgacacaacatgtgcctgcctgccgttgcaccgtgatgaatctacatgtacgaccttcacacgagttacagtttttttaaaaaaatcacagaaaacaaacaaaccaaagctattcactgtaaccaa

SEQ ID NO: 134686 - DNA, 552 bp, Zea Mays
tcagccttttcaaccttatcttcgactggctcaactatatgcgtcttcggcattacagttgattcttcagcgccctgtgcagtcgaagcagtttgtattgctttggctattgaagaggaccctgcgccaaagtcaggcaccacagccggttcaatgtaacgcgaccggtgggtcggaaccttcacctttttgcccttcgacacaggctcagctggggtgacgaaagcggcaatcttcctctttttctgttgccctcgcagcgggtaccgataatcggggtatatgaagccgattgcatcaaaatctctgttcagtcttttctccctccgacctccgaaggctgcggacagagtattatctttggccttggaataagctccaagcagttcatcactggtagcttcgatacacttcagtcagtcgtcgtttggctcatcaaatttctccctgaatctgaaggtatacttcagtcggaccagaccacctttgctagaatcggtggtggtctccttcggcattttctagctttctacaagcggccataccctaaag

SEQ ID NO: 134687 - DNA, 272 bp, Zea Mays
cagaattgcaagacacaccatggacacaactgtacatgcctcctacactgcgtatttacgacggtctgagtgacctgaagaattcctcatgagttacgatgctaccatatcctctaatggcggtaacttagtagtcatggcaaagtctttcatcatggcagtctgaagtgtggcccaaacctagtattcgtcacttcgggcaaggactattaattcatggccgaagctcatagaaatgcttcttaccagtttctagggctttcagtccaaac

SEQ ID NO: 134688 - DNA, 428 bp, Zea Mays
ccgatcccatttttagaagcaaattaccgaggcctgcacccaagccgccacataccgtgcaaaccctagataacccattcggaccgtccacgtatgacgtcaaacagtccgaatataatgtcagacggtccggccacatggccggacagtccgcgcatggagccggacggtccgcgcatagagccggacggtccgcgcacggagccggacggtccgcgtacttaaccggatggtccggcacaaaattttttgaggaggatggatatccaactccgtatccgtcccagctagactccccatctcaccgcacgacacaccagcaccataatataatctaccaaacccatgagagtgagtactttccagcccccagaatgccagaaaggaatggccagtcctatgagcctcatagggcatgtattaacgca

SEQ ID NO: 134689 - DNA, 641 bp, Zea Mays
tggtgcgtcgtttgttcatttcccatgcagcgcaactgagacggcggcatatgttccctttccttgtgtttgctgctttttggttatttgattcgagatggcttctcgcttttcgtaaatacgtctttttctgtttttttttgtgacaggagtctgcttctagtatgtaggcttctcaagggaaaggtggagatgttcctaaagttgaaaacggcaggttgcaacaccaaaaggctcaagaatataataagaacagagagtgagagagagattgataggaggggaagatggtttcatttagataaaactcagaatatgtgacgtgacattcttaaaaacattgtacttggaatagcctaacagcttcacacatctagtttcaatttttattggatcaaatattttaaaatttaatagtgttttgttttagcagtaaatgatgttttcgtggacaacaagacatttatgttgacttagtcaaacttgaggatttgttgatctagtctttgaaagtaatcatttagttagtttgcatgcacgtatttagcggtgtttaaatgcactagaaactaatagttggttgctaaaattagctgagatatctaaatggtctaactaatggttcagctatgagctacttt

SEQ ID NO: 134690 - DNA, 464 bp, Zea Mays
cgagtatgttaaatctggttccaggacaacatctgtcacttcaatggttcgatcgggaacccgaagacacttcttcaattgcgacacatggaacacattatggatagcagacagaatttcggggagctgcagtcgatacgccactggtccacattgctcaagtaccgggaatggaccaatgtatctaggtgcaagtttccctttaaccccgaaacgcgatactcccttcatgggtgaaactttcaggtagacatagtccccttcatgaaaatataagggcattcgccgtttgtctgcataacccttctgacgggcttgtgctttcttcatgttatgaataattttctgaaccttttcctcggcctccttcactatatcaggcctaaagaaatacctttctccaggttcagaccaacttagcggagttcgacaccgtcgcccatataaggctgcaaaaggtgcca

SEQ ID NO: 134691 - DNA, 353 bp, Zea Mays
caagtatacaagcatgctagctagcacatgttgcacctgcactatcttgccggctcttgtcatcaaatcaaccttccaactagggagctgatccgcaatcctgtccacaaatggctgtacttgctccttggttagtttccaaagggatagagggagaccaagatatcggtagggaaaggaagaaacctcgcaaggcagcaactcatgaaccacagttaagccgtcctcaggacattggataggatacacattggatttctgaacattattatgtagccccgaagcatcaccaaagagctgcaagatctccatagtagaatagatatcatctctcgatgggtgtaggaacaggg

SEQ ID NO: 134692 - DNA, 327 bp, Zea Mays
tgcctgcttgggcccaagtctgaattcggcccacttcacccgttgcacccgtgcagcccgggggcgcatagtggtgtcgacatatcggccccactgggaagtcggaccctcacatatgtgtgcctcatgtcgctgcgacgtgagccccgtttgccagcctggctccctgttgtgcacgtcgttggctcaccgctaggtgggcctcgcggtcatctcctccactcgttcgttcgcaatagaagctcacccatgttgtagggcacgtaaccactcgtgctaatctcggggattctgttgtacctaccccaaaccaacccaccgggaggc

SEQ ID NO: 134693 - DNA, 464 bp, Zea Mays
gtcgtcgccgccgcaggcagcagcaagtcccccacgaaggccgccgcgaagtagccgaagtagtgtctcgtctcacgttcaccccgtgctatacactgtggttgtggatgttgacttttgccgttttgcaagtgtgtagtgatgtgtcgcctgcgattgacctaagttctagttaaatttctagctctagtgttgcttggtaatggggtctccattccatgtgaagtttaatgggaagaagtgccttgctttatttgatgctgaactaattctctcttatcattccataataagtaagatttgcatcctatcatgttttgcaaacatctgtgatatgggtgctagcgttaccaaacgaagtgatggctgcatacatgttgcatctgtgtccatttatgacgaaattggtagattgacaggcacatccgaccaaaatcttcaggctgcatacaatacatatgtgc

SEQ ID NO: 134694 - DNA, 285 bp, Zea Mays
cttcgcgcgcttaggtgttgttaatacgtttatattgttccgattgcaacgttaggcgattggtggtagggtattatattctgtctaggcgatgacttcgcctttttgtgatgcgcctattgtgtgaatccagctgcacccttaggcgacttttgcgtggatagaactatgcgtctcgaggacgacttcgcacccttgggtgttgttacacacttgttgtactgatctagctgcacccttggatgacttttgcttggataaaaatatgcgtctctaggacgactt

SEQ ID NO: 134695 - DNA, 515 bp, Zea Mays
ggagttcagtggtgtggacggaagagtcttcggatgaggatttggattattttgcggcattggatgtggctgcggcggaggcttctccgcgtgtgatggatgctgaagttcttcctggtccgagtgctgggcgtaggcggcgaagggtggtggcgaagcgtagagtgagtgaggtggagggtggtcgtcttcgtgtggacagggctggcaagcgggaattgttgtccttgccagttggggcgagtgtaggtgagggggagttgcgaagtctctttgagggtgaggagctgaggataatgctgtttaactacagggagatgggtatcatcccgaaggttgaaccaatgtaaggtgtgatgccctcgctgtatgtgtgtaattggtatgatgaggctgtgtgcgttcgctgatccggccgtgcccgtgggggacttgtgcacttgatctagcgcgtttattatgtcggtctggctgcacctatagtcggtttttgcacggataatcttttgagggag

SEQ ID NO: 134696 - DNA, 486 bp, Zea Mays
ggcctcattacctcaatagccttgattttctccgggttagcttcaatgccccggtatgaaaccaggaaccccagcaacttccctgcggagacaccgaagatgcatttctccgggtttagcttggtgcgggttgcccgcagcttgccgaaaaccagggtcaggtcttccactatagttgacccctctctagtcttaaccacgatgtcattgacatagatctccaccttgtcctgaatcaggtccccgaaggtcttactcatagcccgaacaaatgttggcaaggcgttttttagaccgtagggcattacaacataacagtacagcccatccaccgtcacaaaagcggtatgctttctatcctccctagacattcggatttgatggaaaccgaagtaggcgttcaagaaggacaaaaggtcgcaccccgaggtagagtccacaatctgatctatacgtggcagtggatacgggtccttgggacatgcc

SEQ ID NO: 134697 - DNA, 573 bp, Zea Mays
atggacaccgcctgttgtaatcaccgcacggaccatgtatcatgaattcatcaaccagagcatagcccaagggatcaatggcaacgtcaggtatctcagcacatatgaaagtgtcgatggcacaggcatcggtctccgaacgaccaccaagcaaccatagaaggcggtgtatgtgcagtaggccccttttttggaattctacggtgtaaatcactgcatagctcagactatagatgagagcatgcaaataaatattaaggaaccactcaatgtgataagttaagatgaagctcaccagcacggataggaccgaaaattttattttcactaatgtctgctatgaattcatcgactttcatatggaagacccttacaacgatatcaggacgatcgcatggctgctaaccaggctcgaagcgcagcgcatcgaatatctccttccatttagggttgcatgtgaacgtgacaaagagatctggtgggccgtatactctgcagatggccatcgcgtcctggtagttcattacatggtaccttcgactgcccgtaaaagatgcaggcacaataactctt

SEQ ID NO: 134698 - DNA, 686 bp, Zea Mays
gtggaccagcgtgggcggggccggggccggtggcgggcacggttagaacggcgtggcaagagagagacgtacgtggatcggatactcggatcgagtgagcgaggagagagagggaagcaaatggtgtggacgtgtgtgggcgtgtcgttccatatatcctataacttctgacgacctagatctgacagacatcggacataatactatgttctatagtttgttcctaaccactatcagagataagtttatgtccgactatctgcctataccgtacgtcagacatgagttgtacgacggacgtccgtttcgtgttgtgataacttgattttttttagttcacaaagctgactgcgggggtatttctcggtgcaaaaagattactgttttctctatgaagtgacgctaataactctatataaatactacgaagacaggtcccctgcctcctactcctagtgctgcgatgatcgtcgttcctcagacgaccgtcaatatggcgctcgcattcctggttttgctgctgttatttgctcctgtcgccgtcagccagcaaggtaccaatctctcgctccactgcaccgtcgatccgtacgtcgaccacacatgcacatatggcctcgatcggaaccgatgagccgtcgatcgtgtggcatgcaggtttcctgagcatcgactgcggcctggac

SEQ ID NO: 134699 - DNA, 556 bp, Zea Mays
cttcgacagagtactgataaccttcgctccagttcggactcggaggcatcctaagctttcatcgtcaataccgccgaagagcaatgctcctggttgatagccgcatgatattgcataatctctcaactcttctttctcagccttagacaacttttgaccaattatgttttgaaaattgaaatccttttcctccgaagtatcttttccagacactgtggccagggtctcttcggcagctatagcagcttcttccgcggccatattcaaaagcattttatccatatcagaaaacgtgccctccagatttgtatcttcggccgttgcagcttcggcagttgcagcttcggcggggggagcttcggtagctgtagcgtcgacagctcgtgtttttgacgccgaggccggcggtggtgtttcttcaatggcttcaatcacagtaataatcctctgcctttttggcccagcagacttcttcgctgccaagagctcccccttcttctgtaaaagcttcgtcagatgtggccctagtggacttagcgtgataggcagggattca

SEQ ID NO: 134700 - DNA, 343 bp, Zea Mays
gtccgaaccacccggacagagtcacggggcaagctggagccaaagtgggagggtccattcatcgtcaagtcgaaggcgtcccccagcgcgtacaggctaacaacgccatctggcgaagacctagagaattcctggaatattgacaatctccgcaaattttttgtttaaatctttagggcccacgtgcccttgtaattcaccaaacagtatttttccggcccgcactcttttcctcctggggggtgaggtttttaacgaggtggagccatgtaatatacctacaaaaatcccccgcaaaaactaagatgcaacatgtcaaaaaagaccgcatcgacggtcttcg

SEQ ID NO: 134701 - DNA, 625 bp, Zea Mays
gcactgaaggcccagcttcagcttcggcctgggctttgacaacttcgacaactttcttcgtagaaagaggggtcaaggtttttgtggtctccatgacagcgtctagcatgctggccatcctccttctcttgggagttgtggcaggagcctttgtcatcttcggcaattctgcctctgccggtgggctcaaaatttttggcatcatcactgttttttccaattttggctctctggccgtatcatctttggcttcggctgcccgactgtaggcaccttcggcactacaatcgatccttcagcgctctgaatggcgggagcaacttgttttgctttggcagtggaagaggtcccttcaccaaattcaggcactacgaccgtttcaatatatcgaggctggtgggttaaaacctttattttcttgcccttcggcacgatagtggtggccaaagcggtagttttcctcttttttccttgccttctcaaggggtagcagtaatcaggatatatgaagccaattgcatcaaaaaccctgttcaatcttttcttgccccgacccccaaaggctgaggacaaggcatcatcttcggccctagtatatgtcccaagcaactcgtcgctagtagcc

SEQ ID NO: 134702 - DNA, 314 bp, Zea Mays
atcgaagtcaatggcaacaaacagacgacgaccggtgaacatggacagacgacatcgtggcatagaacaacgatgagtgcgacaacagcagtggcgagtatgccatggcaacgacggggcactcggcgaggtgtggcatgacaacggctcaagatctggtgatggtgcggcagcagcagagtgtagcacgacgacgatgtggataacatgcgcgcgagtgatgaatgatgatgagggcagcagcttcagcggagacgaaggcgaggaggctgcgtgagcagagcaggatgttggtgtcgtggggttcgattttg

SEQ ID NO: 134703 - DNA, 281 bp, Zea Mays
gcaagctgcttcatcgtgtattccttcacgagttcttctgaaccccgaggtagaacaaacctcgttaatagcttattccatatttgattcttgacatcatctgacacatctttccaatgtcggattgtgatgtcaagattatccctaattaagaacccaagtgcattccagaacttagggagtgcctcttctggagctaggggctgaccttttgggctcacatctgagattttatatgttttgtcagaaaacttgtttagtcccctgtcacctcttttccg

SEQ ID NO: 134704 - DNA, 306 bp, Zea Mays
acaatatccagtatggcggaaacgacacgacgccatattgaatggacgaatccatagacgcggaatgacaacatggggcccacgatagcggaagggaatcgtgccctgttagtcgagctccgaggctgaaccatgggacccaccacacatcagcacagggacatcagccacgaacccatcacacggatggggcgacgccatatccaggagcactacttcgtacgatcaggagaaagaacccgccacaacgaatgaaggacccttaagatataaaaagggaaggaccctcttcctctcaacagatat

SEQ ID NO: 134705 - DNA, 718 bp, Zea Mays
cgcaaaccggccgtgccgccaagcctgcagtcttcaccacagccgactgatgagagggtagccgaacggagctgtcatcatccactggtggcaagttagcagcgctcctagaacggggccttctccccctggtacgatgtcgacccttcctggagtgaatcatcgactgaccaggcccgtcctcagcagcagcttgccttccatgatccatgggaggggagaccctccgccaaaccagcctccgcttagagaacggaactgaaacctccactggttgactgcctaagcgctcccacacaggacggcgggcgacgagtggaagcaggactggaccgccagacggaaccttggtcacgtcgtgcccacgatcggcgccaggacaatcagcagcacggtggcccggccgtcggcaacgcaagcagcaagacggacgtcggcatgcagccgcacgatgggacgtcgccaagcagttgaaacacctcccccggagatcctgcgggaccggtcgacggggaaggggaaggcgggggcgctcagccagacgacgacgacgacgggaccacctagtctccacttgaatccagccctctgcgtctgaaggcggcgagatcccttgcagacgacggtcaccagggcagtccttcaacctcacgatcgggacggaccacgccgaagagacgcgagaagaggtcgccggcctagcacgagctgccggccg

SEQ ID NO: 134706 - DNA, 602 bp, Zea Mays
atcgaaagcctcgcagagaattcgtatggagctatggtgcatctgactctgctggagaaaaaagggaccgttcagaggagcacagaggcagggaaatcatgcgtagggactgggaccatgacgaagatgaagattttcaccagcataggcagcagggtactcgtcggcaccgcagtctctctgggtgggcgcgttcgtcgcgatgccgtggtggtgtggaggactgttacagctcgagtggaaggaacaggccatccactcctttccgtcggaggggggaaggaatgggtcagacaacctgctggatgcccaaggtaaagaacaaagtagtctcttttgcagatcctatcgtctcagatatttggcctacagatgtttctaaaggacagtttgctgctgagagtccttttccatcgggcgacatggaaaattccactcaagctgtgccggagactcatgctgctgcaaattccaaggtaaatacttcttatggctcagttattgctgatgctttgattcccccatgggctgctaagggggtttttccttctccggtccctattgttagtggtagtcaacctacaaatgttgcagagcaggta

SEQ ID NO: 134707 - DNA, 445 bp, Zea Mays
ggcagagattagattgtgctgtggtgaaaccctggctttcagattgaaaatgaacggttatgattaactctggtgcatacgggtcggctagatctcatcgggccgctaattggtgatcgcgcggtcaggaatagatcgacgtagcgggcgaatctaggcgggtggatgctgatccaacggcgggtgatggcgtgggggttgttaatagggccgatctaatcgggccgcgtatttcagatcgggcggccgagatcaaaacataccccttcggccgcacgttttgtaaaagaaaccctgggtttaaaggatatcaacccgccatccagagaaccttattcactgagtctcggtaatcttgcgccagagcccctgacttttccagaaattgacgcctagtccagagaacaaataaaaccagaaaaatgaatttaaaaatggattttta

SEQ ID NO: 134708 - DNA, 280 bp, Zea Mays
gcccagtgcaattgtatgagaatggatgcaagagttaccaccctgtgtgatgagctgtgcaagctgaacctgaaagttgtttcttcaggtgccttaagttacatctcggtggagcccaccttacaagagcaaatagtccgggcacagattgaagacaagggtgtccaggttatcaaggaaatgatcaagcagaaagcagaaaaatacaaatgcttccgtcaggacagcaagggaattctatggtttggagatcgattggttgttcccaaggaccctgagc

SEQ ID NO: 134709 - DNA, 642 bp, Zea Mays
gaatagtgacagtattcatttttaaaattataaaatcatacacatacccgaaatattattgggcggttcgattttggctatacgtatacatcggaatctcttttcgacaatctctaaactgaaaatcccgaaattaattaaatttacaaactagggaccaaatcacaaatttgccttcttctaccttggagctcttgctcaagcgcatggaattggatgtcggcgaacaggggctcggcaggtcagtcgcggcaagggagtaggggcgtggacgggcagcgagatccggccggggcgctgcgcggacggatagctcggaaagcggagctcaggcgtacgacggcgcgggcgtggtctatggcgagagcaaggagagcgagagagagatggcgagttcggagagggagagagagagggaggtggtggcttttatagatgaggagagggaaggggagagggcgccggggagggagaagaaatggtcggtcattagtgccattgatggccattatggcggaggtttcctcattgatggagaagaagaggtgggggagagagaggagaggaggggaagcaaccgttcgagtcggcctggggcgtggacgcctaggcgcaacggcgtcggcggcagctcggcgcgtg

SEQ ID NO: 134710 - DNA, 324 bp, Zea Mays
tagtctcaggcaccctgcacatgcagatggacttggttcctgagtcgtgagggacctgcattagttgaagcgagcgagctgtaagctgtatccttatgcatagggtgtgggtactcatatcatggttgttgtctatgcatttcatgattaatgcaagttgtgtgataatgatttgtgtgttgtgtatgtcaatagttttgcataaatgctgttaaaattttgcaaaatttgtcaaaatttgcaacatttaaaatacatgcagccacttgtgttaaatgttgttgccaaaatccttgtcaaatctgcaaaaataatgtcaaaacc

SEQ ID NO: 134711 - DNA, 314 bp, Zea Mays
cgacattgccaggcactctcgctgagacgctgacccagcgtcatccagagttcttcaatagatcgagacgatggtgtgttctgtcctgacgccgtcgtctactcctccgagcgtatgctgccgtgcgacggagctgtccgcgtcggcgcggccgtatcagccgggtcgcgtcatcttggtgaagtggtcaccgccgcctcgtggatggttcaagttgaactttgacggatctgtttatcacgatggatcagcgagagctagcgtcggcggcgtcatccgcgacagcgccggtcgcgtcgtgctcgcgttcgccg

SEQ ID NO: 134712 - DNA, 430 bp, Zea Mays
gttacttaactttagttgtgctttctgcttttgcatgtattgtctgattagttttcgattaggacaacaagttggatggtgtttgtttcttaattgtgtgattatttttttaaaagcatgcctttttattactgaagttaagcataaaaggaacacattatgatttgttttccccttcgatagaatttcttatgatgttagatgcaggcaatctcgttgtacaagcaggtgctagaagcaaacattttgtttggtccataaagtacgcaaacatttactatattgcaatgtggtattaactatattcagtgaaagccccatttatgttgggcaaaggctttggaacccctccaacacccaaacccctcaccaacgtcacctctatgaccaaaagtagtagagaaaaaagattaggacactggcataactg

SEQ ID NO: 134713 - DNA, 285 bp, Zea Mays
gtcgtattcgtacgcctgtgttgatccggctgcacccgtgggcgacttttcgcgcggagtgtcttttaaataaaagacttcgattgatgcagttgttgtgctattccggctgcacccttgggcgacttttgcgcggagactctttagtaggagacttcgattaatgcacttgttgtgctattccgactgcacccttaggagactttgcatggagagtctttagtagaagacttcgattaacgtacttgttgtgctattccggctgcacccttaggcgacttttgc

SEQ ID NO: 134714 - DNA, 439 bp, Zea Mays
cacttgaagctaaagaagtatgcatcgctatcactctatcagaacatggtggagatgacccgacttggacatccatggaggtatgggaaggagagctcgctcggacacccttgggggttgggttgcatctcgcattgcccatcagagccggatcactaccgacaacaccctcaggggctgggttacagcttgtgaaacccacccatgctggatcattaccggcgacaccctcgggggctgggtaatcgtcagcaccacccttgggggctaggttttctgcaacagccacctctacggctgaaggatccttagtcacctccatgggagtcgggcaatcttgaccaacctcttgacaccgaagaccgccttccaaggtcgacgatgcacgagatgctgcccgggatacctctaatcccacatctggaatgccagagcaaac

SEQ ID NO: 134715 - DNA, 581 bp, Zea Mays
gccgggacggctgcgttcggtcatcacgaagcccacccacctgttcttcccctcgattgcccaccatagccggagaatttcccctttcccccaaattggtctccgccaccgtaaagcacaactccaccgtggccagtccgttccggtaaggcaccatccaatttgcgcgttgttctcatgtccctgtatgctggtgatgctctccaaaccgtccaattgaactaggagcccaccaatcactgggaacacgaactaatgtccatggctttcgctgtcctcgtgggcagagcgaaataggtcaccaatcatgcaattgacttaggggaaatgctcggggcaggtataatttggtgtctgtcgctcgggagcgccggtcatggccccgttcggccggtacagttgctcaccggagcgcgaccgcgttcaccgtcgtcgtggacctcgtgcggtaaagaaatagaaatccagggaccgtactgcaaactgtcagcgactgtgttaaacagtggaagaacctgtctccagttagccaagaacccagggtccttttcgcaaagccgccaacccacgggcgcgggcgc

SEQ ID NO: 134716 - DNA, 307 bp, Zea Mays
cagtgttggacccctgcttggggacaagcaagctttcaagtggggcagatgtcacgaccctgaattgaagataggttgtgccatcgatgtctgaagcctgaagatggtgccgaatgggaaccagtagctgaaaaagagaggtgtggtgcttgtgtggagttgtaagtcggatgggccgacgggccgtattgtacgcgggtaattgagccagcccaggaagtgtggggttaaatactgtaagtgaactggaaagcggcaggaagaaatagaaacagaaaataaccagccacaaacccccatacctcgc

SEQ ID NO: 134717 - DNA, 408 bp, Zea Mays
gtggggcccacctattggttgcaccggtgctaacacgcgagggaggtgagatcggttgtgcaggcatcagccgttaatgggtcagcggtagaactgacccaggttagggaagttagggatgaaaagtaggaacctctatttgtgactctggtgacgactcttcttgctctccgaccactcctcccgtctgggctagccacgcacaccacccgagagacagtgtagatctgaaactgcggcgtggaccttctctccctctcgttcgtcactcggttcacggtggcactctcaactccttgggtcattgcgacatttggctcctcggcgttggcacaagatggatgaggagggggtgctcaggttatatagccaagaggagatgcctacgattgtaatggtcggtccctg

SEQ ID NO: 134718 - DNA, 544 bp, Zea Mays
aataccgcgaaaatggaatggagaagtgctctatggcggtctacctgggagaaagccaaagttacccaaaccaccctcccttccaagtcaccttcatcgggcaccgcttcctagacacttgccaaagtgttgcccgaaaagcccttaaacagctatgccaaaactacagcagagagatctttgaaaccccccttcgttacttcccacctagcaacaaaaatacccccacctggaggaaaatacttcaggccctgtcagggagagaccctaccgaggatgaccccaccattgtctacatggccggatacctccacactctcgataaccactacgatgaccttttctcccactgcacccacctaaactcccgggtggaaagcttagaccaacaggtcaaggaacttaagaaggataaggcatccctccaagagtgtctcgatgtagcagaaggtgaggaggccaacacccgcgaagcctaccgaaccctgaagatgggttacaataagaagctaaagaagcttgcccccatgaagaaaatccaaaa

SEQ ID NO: 134719 - DNA, 712 bp, Zea Mays
agattttattatatatatagagagagatactatatctgaattgaataacaagttctatatataaaaaattaaaacaactttacccttaaaaaaaggaagaacactaccagcgcaggtcacttgtttgttactgtataactaggtggagaacttctacaattaggaaatcaactctgatctagtagctagtgttattataaaatagtttttttcctacgggcatgtgattttctttttagttaggatagcatgcaaaagataataaatggtaggaaagtatgtatcctcgtagtgatataagactgtccgtagcaaatcctgtaacataggggttctgattgtagattacactgttttactgggcaaaatttgaaatagaggatctgataaaatagctgctcaagacagactaatcatggcctggttttgtttaacttttaaactagtgcattccttgtagacagtagactttatctagatattgtgcatccttggtataggacaaagcttcatctggacaacttcttttgatataataaactgtgaattaggctggttcaagaatcacatttttttagttttgtttcttcatgtatacactactgacctctattactaatgtgtttacatggttcaaaactgttttggtaatcgaatttattaccatataatcgtcatgtaatcaaactaacaaattataaagaaacctgaa

SEQ ID NO: 134720 - DNA, 796 bp, Zea Mays
cgcacgcgagggtagtctgcgctacctgtcgcggtgacctcgtacatgtcgaatgtcgaaggccgttgtagcggtcttttttgacactttttggtaatgatgcatggagttttttgcgggggtttttcattggtatattacatggcatcgcctcgttaaaacctcgcccccgggaggtaaagagtgtcggcccgaataacatagtttggagaattacaaaggcgcttgggccttggatcttaaataaaaaacttgcgaagactatcgatgtttcatgagtgttctaggtcttcgccggatgatgttgctagcctgtaagcactagggtacgcctttgtcttgactatgtatggtccctcccactttggatcgagcttgccctaggactctgtccggatagtccttacgagtacgaggtccccttcgctgaattttcttggtatgattgtgttgtcgcgcatgctttggtctggatctggtacttattgagggtctgcagagcaagaacaaggtctccgtcgatgagattcttggaggttggttcgtcgacttcggggacgactagcttgtttgttcgagtggactcgtgctttaattcttgcggcgtcattgcttcggatccatacatcaagcggaagggtgtgaacccgattgctcggcactctgtcgtattcaaggcccatacaacttcaggtaattggtcggaccatttgccctttttgtcgtcaagtagccttttcttgatggcgctgaagatcttgccgttggcgcgttcgacgccgccgttggattgtgg

SEQ ID NO: 134721 - DNA, 400 bp, Zea Mays
tgcttatcccaaccctgagcttcgaaattttgtctaatagacctagaatttatagacgtagacatagatgagccaacaaatcacaagagtcaatgggtatttttagggagtgtaggcaatgatgaggtaagcaaaatttttaaaaatagcagaacactgcagccgttgaaaaaatcaataatattcagtttactcagtaacagtcaaatggtaccgtatgtactgtgcgtggagtatagattgtgcaagtagccgagacgaaagcgagcgaaatagggatcacttgtctgaaaccactcggataccttacgtgtcctttcgggcaccggcctgtgttttcgcttttcgggagtgcgtccatccaatacgctggccataggctatgaccagcagaacgagc

SEQ ID NO: 134722 - DNA, 338 bp, Zea Mays
gccttccaagccggtaagaggtctgccagtttatcgatgagaggttgaagctgggctttggttaacttcttcagggagagaggtaaacccaagtatttgataggaaaagcttccaatcttcagggtagaagttgctggaccacatctagatcagcaggggagcactggataggatcaacactactcttagtcatgttagtcttcaatcccgaagcctgcccaaaaagatccaaaatctgcacagtagtattcaggtcgctgtacactggtctaagaaagagcgccacatcgtcagcataaagtgagatctggtgtttgatgaaaatagtagacagggg

SEQ ID NO: 134723 - DNA, 321 bp, Zea Mays
gcttaatcctgaaaagtgtgtctttggagtaccagcagggaaattgctcgggtttattgtcagccaccggggaattgaggctaatccagaaaagatcgaggctatcatgagaatggaggcaccaggatcacagaagaaagtacaaagacttactggatgcatggcaaccctaagcaggttcatatcaaggctgggagaaaagggcctaccgttctacaagttgctcatgaaggtagacaagttccagtggacttcagaggctcaggaagctctagacgcactgaagaaattcctgacaacaccaccagtgctaaaaccgcc

SEQ ID NO: 134724 - DNA, 402 bp, Zea Mays
gccgcgaaggggtacgggcgagtctcggccgttggatccgattccagtgcgcaggattatacctagcccattatgaaacggtacgcaaccataaccctaggatccaaaaccgacggtgccgatctcgatcgcgcagatccgtcagaccccgaaccgagcacgcagatttaatgaatcccgatctattccccgcccatccgatctgaatcgaacgattcacgttgctctgacctaaacccatgggcaccatctaatctggaccgcagattgtgccatcaacgatccagcacgatttggactgacccggccgacctccgcccaactccggccgccggggtacattccgcgcgcggcggcgccatgtccgggcaacacacgcccgacgaatcctaatgctactcc

SEQ ID NO: 134725 - DNA, 520 bp, Zea Mays
acttctccggcgatctctctcgccagcggtgatcttccggcgaccaagctcctgctcggccttggttcccctctcgtgagcagccctgtcttccctcttctctcttctctctctgttcagcctagtgagctcacctcttccccaccttgattccctatatcaaatctgtgaattctctgtgaatcaaagtgttggatgtggttcctttgtgtcccattgaatcccctgcaggttcctagctccttcgggagggtttcacagcccaaaatggccatatctccaaaaacctaactcaccgcataccaggtgttcggtgaaatgcccaaaccagccaataatgatccaattgaacccaaatttttcaggcaccttcacaatacctcgcgtaacatgttcgccaaatttcacgccaatccgatataccaggattcaatttcacacatttccctgtttcgagcgatcgtttccgagccgagtgcccaaattccattttcttcgcctcaaatcaaaccaagcacac

SEQ ID NO: 134726 - DNA, 971 bp, Zea Mays
cgatagtccaaaaggagctgtaaccgggttagagtaatcatcaaggaagtcgaaggccgctggtgtgggtggattggaatcctcagaaaagggaaacaaggtttcataaaaaaccacatgacgggagataatggtgcgattggattggcgatcaaagcataggtagcctttgtggtggggggaatagccaaggaagacacaaagggttgagcgaggggataatttatgtggagtggtggcagaaaggttggggttgcatttgcagccaaaaacgcgaaggtgctcataggatgggttgcagccgaagagagcaaagtgtggtgtagagagtgcgagtgttttggtgggtaatatgttgaggagatatgttgcggtgccaagagctgcagcccaaaaactggggggaacactagattgaatgaggagggtgcgaatgatattgttgatggaacggatgacacgttcagccttaccattttgagctgaagtgtaggggcaagacatgcgtagatggactccatgggaggagaaaaaggtgtgggcttgaaggttgtcaaattcgtgaccattgtcgcactagatgctctggatagtgacaccgaactgtgtacggacgtaggcaaagaaattggttagggtggagagagtgtcaaatttgaggcgtaaaggaaatgtccataaatagtgggagcagtcatccaaaataacaaggtagtatttgtggccagacacactagtgatgggtgatgtccagagatcacagtgaattaactgaaaattacgggtggcgcgggaggaagaggtaggaaatggtagacggacatgtcgtccgagttgacaagcatgacatggatgagtactagtatttttattacaagaaattgcggatgattgcactaaatgagataaaacggcgtgaccgggatgtccaagtcgttggtgccatatggtagatgcaagaagagcagagg

SEQ ID NO: 134727 - DNA, 379 bp, Zea Mays
ttaccaaaactctggactgcgcgcataattctcgagaaaggcaggggcatctacgcaagaattcccaagactgaatacccacagcgcaggactgcgggtttattactaagaagtccagggactctttatcaaataggcccggcgaaggggtatcctgcgttcctggccgcaaggattagatccgcaatcagccgatccgaaatgcgatcaaaaccatcggatccaaatccaagggtctcggtttaacgcgcgcaattcacctcgcggccgccagatcgaacttcgacggctatgatttaatcaagcgaaggggtaaacccgcttctaatcctatccgcccatctacggatcgacgacccacagagcttcggcaggcacg

SEQ ID NO: 134728 - DNA, 492 bp, Zea Mays
ctttgtgttctagtgctaagtctgaaaatcagtgatattgactccactttggagctctatatcttccaaaatagtgagaatttgccctaggtcaccacataaaatttgtaaacctatcaaaggagaacaactttgtttaagagtgtaagcatagttgttatgaagaaattggaggtaatcaaacccaaagatgggctgtcaggctgtttaaattctgaacttcagactagcagtgcaactgcaagcactttgggcatgaattaatgcatgatcgagcaaggatttgcctagggttgctataccaagattataactggatcctagggctacgactttgctaaagagtgtcgatcatgttgctatataaaatcaagagaaaatctaccctaaatcctggctgtcagatgcactgaatgagggttgccatggtacagtgatctgaataagatcagatcgactgcccggccgttcaccaccgacgaccgatctgcg

SEQ ID NO: 134729 - DNA, 292 bp, Zea Mays
tttaaattcttgtctgcaaaaataggacaaaatgggtgtttattctgaaattgtgaaacctgtgtggagttgtagttgtgtgacacgtgtggggacctatgcagtgctggcaccctggagaatactctccactgcttaatattgggctcacggatgtctgtccctggatgcagtcaccttagggcttagttttgtggagtctttcccctgcccttgaactcgagctcgtgtccatcgcgtgagaggaggagttctggttttcaggtctgagtaacccctttccatcaccaag

SEQ ID NO: 134730 - DNA, 334 bp, Zea Mays
gcgatccttaaaccatactattccttgattatctttcctgaaacaatttgccttgttggtctctattttctcatgaatatacttcaaatccttatctgttctttgggcatcactaatcctttgtagaagaactgactcaaacttcaaattcatcaaggttccttattggattatccccagattcaacctttccatttcttgacataaagtggtgtcaggtgctcttactgtaagacaatgacaaaaagtcttgcgacttaaagcatctgccaccacattggcttttcctgggtgataatggatttccaagtcataatctttgattagctcaagc

SEQ ID NO: 134731 - DNA, 475 bp, Zea Mays
gaacaaagatttttaacaagtaccattggaaatgaactttggcttcgtatgtgtatggtccactccttgttcaaccatgcctgcactcacacgtttagttggactacatgctatcgtcatcgtgcaatattcatttaaaattggttgtaattaccattggtgtggatctctgcagtcggatggggctgtgtccaatcgtctccttccatagcatcacaaatagtatcctcggtcactgtagccacattccttccaatgtcgtcttcaaattgttggtttcgacggcctaaggtagctggtcttgtcccagatagcacatgatgtctacgtcttagtggctcagtagacatatcgagtgaaccaacatccttagtctgtgttgaagttggcaggaagggtgtcacggtgaattcagggataacccagtcgcaagtggtaactgaggatccatatggttcaattccatatgttgtag

SEQ ID NO: 134732 - DNA, 716 bp, Zea Mays
ggcgaaggctctggtaagggccacagcgtagactgatacgccgacgtgcgtaggagcgtgcacaatcgcatgtgttgtcatgtccggtcgatcactgtaacggacacattacccgaccgaacgacgcttcatgatggtgtcatcacgcgtgtggcacaacggcctcggtaacgcgcggagctctaagcgaacatttaatgcacgcgacgctaccatgctactgtgcacctcgataacgtgtgggtggttacagagacatgttacaagcctgccaatgccctgcacttggtcagaggctgccttgcatttaatgtgggctaaggccttgcttccatgcgaaggttcgcaccatgcgctcagcggccacgtggcgttaccgaacccctgcttgggtccggagtagggcctggggcatgttctgccctggagcaccgatagccctcattaacgacccagaccccatacggggggagggtctagagccctactcgagggtccggtttgtatacgtggaggtcctggaccttccatgggttctgattgtgtacatgggggtccgagacctacccatgggggtccagatccataggtgaagtccctgagcatatcgcctccctggacacgtggcaccactggacctacccataagacagggacatgcgctgttctagaatcggagtggttggtcgaggcaggtagctctcggagtgttgctt

SEQ ID NO: 134733 - DNA, 329 bp, Zea Mays
cagcatccagaactctggttgggaaagttttcaggtctggtttctattggccaacaacaaagagtgacgcaaccgagttagtccagagatgtgaagcttgccaattcttgtgaaagcaacaacatttaccagcacagcagctacagaccatacctgtaacatggtcattttcatgctgggggttggatattgtcggtaccctgaaactagggtaccccttgctactgtataaagacgcagtaccacgcgactatctcttagtcgcgtggtaaaggtgttgtatgtgggaccgagccatgactcgccccagcctcgagcgactactctgg

SEQ ID NO: 134734 - DNA, 785 bp, Zea Mays
agggcatagtggtcaccccgagttaagtaagcgcgagcatgttgcaccatcttaagtcgttgccgacttaagccgattgctccgttagcagggcatagtggtcacccgagttaagtaagcgcgagcatgttgcaccgtcttaagtcgttgccgacttaagccgattgctccgttagcagggcatagtggtcaccctgagttaagtaagaatgcagattgaccatgaacaatttgagtattcttgaggcctttttattgatgatatatttcccagtttacagagtacattgtcgccctgatagcttttgaagtgcagctaggggtaaaacttcttgaggtgttctatgttccatgagttcccaatttctgtgccgtccatctgagtgagacgatatgatctcggccgagtgacttctgctactatgaatggtccttcccatagaggtgacaacttgtgccgtccttcacccgttagaattcggcggaggacgagatctcccactgcaaaggatcgacgacgcatggtcttatcatgatagcgtctcaaagtttgttgataccgtgctgattgaattaccgtgttcagtcgttcttcttcgagtacatcaacatcctctagcctagtagcctcggcttctgctatgctttcaaagatcaaccttggcgccccaaatttgagatcagcgggtagtactgcctctgaaccatagaccatgaagaaaggagtgtttccatgcagagctcgagtaggttgagttcttaggctccagacgacgtagggcaac

SEQ ID NO: 134735 - DNA, 428 bp, Zea Mays
cgcacctacatcgcatcaatcccacaaaagcaattttgctgacgcccacgccagccagactacaaaggaaaaggagaaattgccaatacatatagatcggtgccgtctggtcgtgtaccactgcaccggtctgcctgggcggagctgacggatgtcttgcggcgcagctattccaagagctgcatgcgcgcgtgtcgccgagggacacgaccgcagccaatggctttcaccttgtggtgtactcctaccggtcagtttgggaccaggggtccttctcgactgcatagcttgtccactcgttcccacagtagagtagagtagaccagggcctggtggcgccgcttgaggtgaaagagagcgtcagatcgcgagagacctaacgataggagcgagacgtgaccgctcgaggtgacgcagctcggcatagc

SEQ ID NO: 134736 - DNA, 515 bp, Zea Mays
gaaggggagacgcaagctagcatgtcaacggtactagtgcaacgaagagaacacttcaaagtttgcaagacccacgtcgagtcgtcgacaacaacaacaaggatccgaatcaggacattgtcgcacggtggaagcttttaattcctcgaaacgtcagtgatccgatgcgatccggtcgggccctgcgccagctgccttcagtccaacggcagtgttggacgccgtagactgactagtcgtccctatggtttactagcagcagcgacagcggggaagccgtcaaccaacgcagcggacgaccgtcgacgaacgacgacccgaccacgaccatgccaatggcaatggcaatggcatgccatcacatcgttacggctgttgtactagcagtggtactacctgccaagaagcaagggccgaacggcggatgcggttccgagttgtcatgtccggtcgattcatccgatcctagaattccattctcttaagtcacggttgttattctccctcaacctaaa

SEQ ID NO: 134737 - DNA, 330 bp, Zea Mays
acgtgttgtttttgatgttttgcgtaatgcacgtttatttggtaaccttgagaagtgcacctttagcaccgatcgtgtgtcttttcttggatatgttgtgacatcgcagggcattgagatggatgaggcaaaaattgttgccatcacgagctggccacttccaaccacggtcacacaggttcgaagttttcttggtcttgcaggattctacaggcgatttgtgcgggatttcaggaccattgcagcacctctccacgagttgacaaagaatggagtgccgtttcgttggggatcgtcacaacaacaagcttttgatgccctcaagtcgaa

SEQ ID NO: 134738 - DNA, 666 bp, Zea Mays
aacaaaagagcggttttacgccgaagttgactctgaatagcgtgatggcttcaaaggcgtgcctatgagtcctttaagaattagcttcggtctgaaacgaccgaagtgcaaattaaacgaggttgctaaagagtgctatgaagcctttcatacagttgttaggaaaattgggtctcaagatttgattcaagaggcacttgcctataacatttatctgactcggactaggtggaaactaccaaggaggtgaagtcaaaagatgaagagcttgttactctagcttttggtttcaaggaacaatcttcgtacaaagctcctttggctagatggcttaggttgatagaagaaaagtacaatgagatctatgggaactacctcactagggagcacgaagatatgtcatctgttttcagaagccgggggaagcttcggcttaatagagttatgaatgccattggttttgagtatcttgactatgaagatcccgctattaatactgaaactggggaaaaggaaaagggttgctaagggtgctgggaagacatcgaagaaaattattgaagctatcacagagaatgatgagtcagagggcgacaaagaaccatctccgagccccaaaatgaagaaagtgaggacttcaaaaaaactgttgttgggcaagatcaa

SEQ ID NO: 134739 - DNA, 546 bp, Zea Mays
ggggtggtcgagcaaccctaagatgtacaaagcctttaggccccaaaataggcgtcgctgatttctggcagattctggaggtcatattgttatgacgattcatatcatctccaagcatattttgacgtgagaccagttgggttggaaagcttatccctttatcttttcagcgttatctagaacatcgaaaacatagtccgtatgtggtctggacgtctgttttcatgaggaccactcctgcaatccgaactagatccgcgaataaacttgacttcgactctcctagagcttgggactccatgattgattggccttcaccatatagttgacattcatgtacttatcatgcaccaagtgcattctggagggagcctagctttgaggctgcgtgggagcacagctggccatgcaaagaagcggccaaccccctctcgaggagatcagctaccgtaacggagtcgtccaatgcctgaacaaagatggttgggtaaagggtggcaaaatcatcgctgtcatgctaggcatctagccagaaagcagtcttgc

SEQ ID NO: 134740 - DNA, 487 bp, Zea Mays
actcttatttcaagtacttacctctgaatttctaatgcctacttaaacatttcagtttatatgtccatgatcatcctgtcttttgagaccctttcctattctgttgttaagtcgctatctttcggcaattcgtactcccttggtcttggtatgctcgcaccttcgtaatcttgcatactcttactttttatataaatgcttacctttgtaccccaatgtctgtttaaaacatttcagtttacatactcttgaccacctttgtttcttcatgatccatgagctatcgttccattcctcatatccttaatgatctcatcgtttgcatataacttccctcggtaataatttcttttacttcaaccattctgttggaaccttacctaccttacccatgattgttttctccatttcgccatttcgtgagtcttgccttaactccatcctttcctatgctctttgttattatcacctttaccctcgacacttc

SEQ ID NO: 134741 - DNA, 317 bp, Zea Mays
gccaaaagacatgtaccagtccaagaaattgcttcaaggtcttggtatggagtatgagaagattgatgtttgccaatacaactgtatgcttttttggaaggaacatggcagagaacagaaatgcttaaaatgtgggaagtcgaggtacgtggagcttgtaaatgaagatggggagaaggtggtgacaaaggttgcacataaatagcttcgttacatgcctctcactccaagagtgaaacgtttgtttctcttgaggaagaccgctatgcacatgaggtggcataaaagattgtacggacagacaagatgggttaatg

SEQ ID NO: 134742 - DNA, 594 bp, Zea Mays
acaaaaaaattacttactagaacaatgagtgaacatccatatattgttgttgtgatgtttgttttgttccttttatgccaacgtgtggcatcatcacacaaatccgtgtaaactagttgacaccagtcaatatcagccattcgggccatgtttgaagtcattagtacctcattgtttgtaatgccccatgaagcagaaggaaaaagaagtcgattgaatagaatcagaaaaaagcatctgattgatagctcatcatcattgccaagcactatcttgtcttgaagcttgacaacatcaaattcttctttaccaacattgagatcacgtctcagttacgttttgcagcagcatccacttcaccgtaccaatcagtaaactctctgcctcctccagcacatggcaaacccaaaatcagacgaaccgtatcttttgttatcttcagttccttgccagcccctgggcgtatggtcatgtcatgtggatccaatttatccatcaaccacctgatgagtgatctgctctctaaggcatcagttcgcaaatcaaatatactagaaaaccccaacctagcgacagcatcgcgctgccgatcgc

SEQ ID NO: 134743 - DNA, 917 bp, Zea Mays
tgaatttggaagaacacgaacctcggtgtaatgatcttgcaacaatagtggactgtgggttgatatacctatttctaagatctctttaacaaatgttccttgacgataggggtactagtttacaacagtcgcccgatctagaatcaagtgctcagattagatcacttatacatcaaaaaggtattccaaattggcctccggatctagatccgatggtgaagatttaaatttaatgagacgaaaggggatcgcgtagatctgatctacaccactccttatccgatcgacgacccgaattctatgatgtgaagaggtatctgactcctaatctggttcgttcatccaagcaccaactcctggcagccatccctaagctccgccctcccccaccggcaatccccacggtggcgccgccccaaacacatcggaaacacgccggggcaacgcaatttggcggccaggctcaccactccgaccatcgatccccgaaaacaaatgcggagcaggcgcggaactgaatatgtgaggactcaccggataattgggtgtccaaatatatgccgaccacggtcgaccgtggtgcagaggcgtggaagtactccagtgacgaattcactggacaccgatgatccacgcgccaagggcttgctcgtagatgatcctcgcgcccctgtgaactccagtgatcccttcttgcacacttgacgacggcagcacgaagaacgggtgtgatggtttcaaccccacccgcctgcgataatggcacaggacggacacacaggatgcccaacataatgggcgagacgagcctgggtcccaactttatacaccgatccaccgaccccaatgaagctagctggcggagttggagtttgttacgatcctcatgcgggcgattcgatctcaacagattgttg

SEQ ID NO: 134744 - DNA, 444 bp, Zea Mays
cacgaaatgacgtggaattgagccgatacttcacgaataggtttatatgggtgaatatgagtgaagtgtgtgcttggtttgatttaggcgaagaaaatgagattaggaaactcggctcagaaacgatcgctcaaaacggggaatttggcgaatatgttactggaggtattgtgaaggtgcctaaaaaatttgggttcaattggagcatttttggctggtttgggcatttcaccgaacacgtggtgtgcggagttttagggtttcggtgaaaagactatgtgaggtgggaaaaccctcccgaaggagctagtaacctgcaagaatgctcaagaagcacaaagggacacttcctaccagtaggaatcacatgaattcacaagaattggaaaaaggcacttagggggaggaggagtattcactgcccagagaaatgaagagagaaag

SEQ ID NO: 134745 - DNA, 619 bp, Zea Mays
attattcctttctgagaccacgcactggctagcttcttgttatatccattatctgtcaataccatgatgcatggatcaaacttttagttaattacaaatcttgaggttaaaagcctttatgctcccctgtcgaagccgccttgtgttactttcgatttcaaaaatggtaaggagttcagtttgccatgcagccaatcatgtcctcgttcctaacagtcagtacctggaccatgtgatttcctttcgtcaaaaatcaaaattcactgccgtcacttacatctttgtatcaaaaggaacgaggtggagaatgaattttcttccttggatgctgccgtgatgttaacacttctcttgagatcagagcaggtgggattacagagaagaacagagagaacagcagagaagaacagagagaacagcgagggagacagagagtagttcttcagttcagaagtggaataatattctgttacaagttattccctcaatctctctctcatctatttaagtctcacgcaatacttccatgaagttgatccacatcggcccagtcaccatcttgttgttgtgcctgggcctggtcgaccgccgcggcccattgggtgcatcatctggtcca

SEQ ID NO: 134746 - DNA, 543 bp, Zea Mays
cggcgatatagacttgaactgttagcatctgacagttctccaaagtgttctcctgtgcaggtttcaggttgttcccaggagccgttcacaacaacaacgacatcgacttcatctgatgtttctctgataacattgcccctgccagctccgtgccttcctctgcatactcagacaactgatgttactgacgtccactcgccatcagcttctgagacccaaccgctaatagaggaagtgtctgcagctatgccctccagaacagaggaagtgtctggagctatgccctccacatctacggtgcttactcgactacgcaacaacattgtcaaacccaagattccaacggatggcaccattctttatcatcactctcgtaagggtttctttgctgcacccacctcttacaagactgccttgactgatgaaaagtggtatgctgccatgaagtctgaattcagtgctcttcagcaaaacaacacatggacattggtccctaaacctccaggtcagaacatcatcagctgcaaatgggttttcaaagtt

SEQ ID NO: 134747 - DNA, 552 bp, Zea Mays
ctcggtaggagccatgcgataaggtctcttcgcgatgggtgccgttccagggatcagatctatgtagaattccacttctcttttcggtggcattcctggtagttcttctggaaacacatccatgaattcttctaccactgatatacttcctgttgctagattgaacatcattagatgattggcgggtggctgggcctgacaagagactgactttccttggtggtttgtgaggaggactgtcttgtctgcgcaactgatgatacctttgtgtttagttaaccaatccatccttaagatcacatcaattcctttggatggcaagacggttaagtccgccaagaatactaccccacttaaatgtattctgacttgggagcatttgagctggcatagaaggtcggaccctggggttcgggtgaccaagggaatccctagaggagtagagggaatgccatgtttctccacaaaactagtggctatgaaagagtgggatgctccagaatcgaaaagtacggtagcgggagtaaattcaacaaggaactcaccgagcac

SEQ ID NO: 134748 - DNA, 298 bp, Zea Mays
agcttgtggtgggtccgaggagttagagaatgtcggtggcttgtcactcataaaactcccggtgcttgtccctgggcggagctggtggtggtggaggtggtagttgttgtcgttcttgccgttcttggtgcatatcctggcgttcttgcctcatttcctgtcgtatttcttgccgctcctggtgcatctcctgacgttcttgtcgcatttgcgcttgcatttccatcatggtgtttgccatttgctgcagtagctgcatctgagcggtagcaacgggatctgttccaccctgtggagg

SEQ ID NO: 134749 - DNA, 407 bp, Zea Mays
tgttggcaattcctttttttcatatggaaaattaattatgctattattatattaacgttgtttgtgtggttgggacagtcatatcttcactttactgggtgcacaatcggttgcgcggtgtgatggattcgagtaggaccgtgccagcctatagcccatccagcccatgagaacaaaggcattaattcacctcagccccaccaaaggtccaaagcgctcgtcttttctcatctcccctttggtttcttgcattgcatcagagagctttagcttttatgtgctagccttgtctgtgctgtgccatcacttttggtgcttcttcagagcgcaacggcatgactgctgcatcaggcgtatgtggaaggttaggtgaggtgtaatatgtaatgcagtactatatgctgtca

SEQ ID NO: 134750 - DNA, 292 bp, Zea Mays
cacagaggaaggtaaggcgaacttagcagggctcacataccaagagtcgagttgcgtagcgcccaggctaccgaacgcagcacgagtctgtggtggcaagcttcacttctgccacccgccacatcacccactgcccccgtccgtagaggatgaagacaccaaccatgcattctggtgtgccacgagactttctctaacgcctcgccgaagatgtggacacaccacaatccctcatcctggttcgcactattccccgacgaccatggcttctctcaatccagtggcatggtga

SEQ ID NO: 134751 - DNA, 387 bp, Zea Mays
tctcatgcttccatctttcttagagacgaacatgactggtgctccccaaggtgatgagctgggacgaatgtatcccttttgctgaagatctgcgatttgaagcttcagttctgctaactcggtcggagccatgcggtatggtctcttcgcgatgggtgccgttccagggatcagatctatgtagaactccacttctctttctggtggcattcctggcaattcttctggaaacacgtccatgaattcttctactactgatatactttccgttgctagattgaacatcattgggtcactggcgggtggctgtgcttgacaagagactgactttccctgctggccggtgaggaggactgtcttgtctgtgcaactgatgatgcctttgtg

SEQ ID NO: 134752 - DNA, 568 bp, Zea Mays
cgagaatcgtgcgcgtaggcgtgcagtccacggcgacggtgcggtccacggcgacagtgataacaacggtgaaaaatctccgccgttccgcagtttcccacgcccgagtacgcccttgcgcacaatcaacacttgctttaggaccccagggatcgcttcgcgggcgttgagaggcgacgatggtgacgaacgactacggcgggtctcacggctcgaagtggatcctggtggtggcgccctaggtatttgttctctctttctctcggcggctgccgtgatggtttctaagctatggcggcgaaggttagggccacagtagaggctttatgcgcaggaaagcacggaatcggtcccaacggccctacgactcggcgcgagcttccgctaagtccggcgtccgctgcggaggtggaagacgagcgctgaccgagccgtgagggtcggggtccactggtcagagggcacgcgcacggtggcaggtgaccgacgcgtgggcccgccacaacggtgaccaattcgtgagaaaaggtgacagggccgcgcggtggacatccactggtgggccgaa

SEQ ID NO: 134753 - DNA, 483 bp, Zea Mays
caagcgtggactgagctgctagacgcacggagccagtcaacagctaccagtaaactagcgaacctctaacagaatacatacacatactcttaacagtccccctcaatcacaacagagggtgcctatgttgaggttgtcacagttcttgatgaatggtgctcttgacagtggcttcgtcagaacatctgcaagttgatctttggatgatattattcggacttccatggctttgcgtgccacttgctctcggacaaagtggaaatccacttccatgtgcttggttcttccgtgaaacactggattactggttaagtaagttgccccaatgttatcgcaccataaccttggagccttgtgcagaaacactcccaattctttcatcaatgactgtatccagattagttcagcagtaacattggcaatggctttgtactccgcttcagtgcttgagcgtgagacagtcacctgcttccttgagctcca

SEQ ID NO: 134754 - DNA, 536 bp, Zea Mays
ctagtaattattttcatattaaaaatctattttcaattcgtttattaaatttcaactcagctctaggctaggcgccaataactggaaaatgcaggggcctcggtgcagttctacccaagactcataccacagccgccaggacggcgggttctaattctggcaagtggaggggctcttaagtaaaatggacccgcgaaggggtatcgagagatcttggccgcccgattcacgatggagggcacagattaggttgaaatgatcatgaaaccccggccgcacgatctccatcgaatggaccggatcaccccccaccaatcggtacgcttcataaaatcgtagccgcacaatcgagcatccacggtctcgattaccccaaccctggatccaatcgtaaccgtacgcgcccgatccaacggccgcgccatcttcgccttccacccagcccgagccgtgcaaacagcccccacgcacggcggcggggatcaccggagatcacgattccggccctcccgagcgccataccccaatccgcacga

SEQ ID NO: 134755 - DNA, 617 bp, Zea Mays
tctttattctccttcctagatacttgtgtgtggggcccaccagcagtccctcacgtacccagccaagtctgcttcccaatcgtttctagctctgaggaaaaatgaccggccaccaggatgcgacctcgccgccgatcggtttttcggctccctgcgcccgcctcctcatcttccctaaagtggagctcgccaacctccgtccacgacacgtcctctccccttccttccccagtgcgctcacgtcgcagaccgtttcccctcctccgcgacagtttcttctatctccattaatggctacaattgctcctccccataattcctctctcggcgtacgtttcttcttccctgggatataaatcaaagcaccgcgcctgtgacgattcccttctagatttcccctgtctcttctcctcccgtccttgcctataaatggagccacaatgcagttgctcctcctcccccagctgctctcttcctgctttgctctgacgcccatcttcgtgctactcgcccggagcagcgccaccgctcaccactgagccttcctctccagcagctccctcctctatttggcttcctgctcacgacgtcaagactccgttgctatcatcacatgc

SEQ ID NO: 134756 - DNA, 692 bp, Zea Mays
tcccaagacacagaactacatccatacggacggcgggttgattagctaattcttggagggctctttagcaaaatggtcgctgcaaaggggtatggatagacttcggccgttgaatccaccgtgtgtggtctggattagatccgcataaccctgagccagtacgcaattgtgcccgttggatttgcaactgacgacccaagattcgccatgccaagcacctacccatggccatcgtatggataatatatggctcagatttaattctcgtgaatggttacgctctcatctaatcgcatccgtccgagctagatcggacgacactcacgccttctcctacctccccactaccagacctggccccgcctaggcttacaccgacgagctcgccggagcaggccccatatcgcatcggcaacacccccgatcactactaaatgaaagagaacgcgagggagatgaggaattaggtggatggatactcaccaacaacgacgcaacaccgaagcctggccccggccgtacgcggtactacggtggcggcaagattccggggagaaattccctgtacccacggcagcaatctgcacggtgagggcaccgccacccacaacatccaccagtgaacgccatgagcagcaaatcggggtttgacgatggcgtgaccgattctggctcccggcggtcatcagctc

SEQ ID NO: 134757 - DNA, 494 bp, Zea Mays
gttagggaggggtgacgggagggttcggccgagagaaaaaccggccgccggagttcgacgatggttctccgccggtgacccggttcctggttgtcggggaggtggcgaagcacaggtggggatagggggtcgtggtggaagggtcaatttggtcggtgggggattagaatggtcggtccacggtgaggtggcgggcgcccgcggcggtgaggtcgccggtgatgcccatgggtgtaataggtgaagggaaagggtgtgccgtgttcgcgatggagaggtgaaccttgcgagccaaaccaattgaactctaggctaccaaagaagggagggattgctcaccggagcggaggaagagggcagtgcgctggctcgattgagctcggggaaggggaagagaggtggtcgaagttggtgtgaaggaagctggagcttgggcggtcccttttataggcggtcggggagggggaaagaggaaaggtggcgagcaccggaga

SEQ ID NO: 134758 - DNA, 772 bp, Zea Mays
cggacaggcactgtagactgtccggtgcgcccatatccagtttttaaaaaatccttcccctctcgcgcccgaggcctggcacctcacttctctgattctctgcctctgctctcgggttcaggcgatttctcccctcaccggcgatctcccctcaccggcggcgactctccggcgaccctgtgcctgcgctcgtcctctccctctctcggtgagctgcactccgctctcctctccctttctctcttgttctctgactaaaaggcagtgaagcccttctttctctcctcttgcgcaaatctcgaatctctgtgaaatccagtgaaaccatgtggccatttgtgttcctatgtgtgccttaaacatccttgcaggtacctagctccttcgggagggttttcatacctcaaatggccatttctctaaaaccttaattcctcgccctccacgtgttcggtgaaatgcccaaaccagccaaaaatgctccaattgaacccaaatttttcaggcaccttcacaacacttccagtaacctacttggcaaatttcacgccaatccgagatcccaggcttaaatttcaccaaatttcccgttttgagcgatcgtttccgagccgagtgcccaaattcctttttcttcgcctaaattcaaaccaagcacacacttcactcattttcacctatataaacctattcgtgaagtatcggctcaattccatatcgtttcgtgcctcaattcgaattccaaacatcctatgacaccatttatccgtca

SEQ ID NO: 134759 - DNA, 485 bp, Zea Mays
ccaacgcgtgcagaacatcctgcaacaggttagggaagtgccatgtctcgaacattgaggtataatgttcaatgacaggccataaccccacgtagtgatcctgctgttcatcgttggcttctttgttgatgtcctcttcttcttcgtcgtcgtcttcatcatcgtcaccagagtcgtctgggtcgtcgcctccgggagcaggggcttggactgctggtgttggcggtgctgaagctgacgatccagctgtgaaggctagtgattctgccaacgggttgggcgtagacagaaactcctccgagctatcttccagaataactccgttctccacacaaatgtgagggagatccacagggatttcctcgactaccactggatagacaggaacttgtcgtggcggagggatgtagttggtgttgatccgagtcgtttgaatagtacgagctgtaacaccccaggtgttgctatggctggagcacaccttg

SEQ ID NO: 134760 - DNA, 929 bp, Zea Mays
gttatgaacctccacgtcggataggctcagtcatctagactcttgccctcctccttagtccagtctttgcaccaatctattaggcctcattctttctaacgcagccgaagctggtccacacagatgccctattcccgacaccgtccacagttgtcgccttcccaatggatgatgttgcccgaccccactcccttcctggtgccctatcttccttgtcgtcgtcgtgatgccggctcgccttgcaagcccgatctcactgccgatggatgatgctgcccaaccccactcccttcctggtgcccccgtcctccttgttgttgccatgatgccggctcgccttgcaagcccgatctcactcccgacgaatgatgccgcccgaccccactcccttcatggtgccccgtcctccttgtcgttgtcgtgatgccggatcgccttgcaagcatgatctcactcccgatggatgatgccgcccgaccccactcccttcatggtgccccgtcctccttgtcgtcgccgtgatgccggctcgccttgcaagcccgatctcactcttgacggatgctgccgcccgaccccactcccttcatggtgtcccgtcctccttgttgtcgccgtgatgccgactcgccttgcaagcccgatctcactcccgacagatgatgccgcccgaccccactcccttcatggtgccccgtcctccttgtcgtcgctgtgatgccggctcgccttgcaagcccgatctcactccagacggatgatgtcgcctgaccccactcccttcatggtgccccgtcctccttgtcgttgtcgtgatgccggatcgccttgcaagcatgatctcactcccgatggatgatgccgcccgaccccactcccttcatggtgccccgtcctccttgtcgtcgccgtgatgccggctcgccttg

SEQ ID NO: 134761 - DNA, 1273 bp, Zea Mays
tggaaacttctaatggcgtcaacacacccatgctacccgcggataaactttctcttcatgatggtgagatactatctcctgaagacaccacaagatttcagagtgttgtaggtgctctacaatacttatccttcacaagaccggatatatcttatgctgttaatcgggtgtgtcaatttttatctgcgcccaccacctctcactgggttgctgtgaagaggattttgcgttatttgaagactacactggatgttggtctatgttttactaagaccacttcttctctattaagtgcatttttctgatgctgattgggctggtgacattgatgatcaccgaagcacgggtggctttgctatttttttggcggcaacttaatttcatggtcttcacgtaaacactccactgtatctcgctcaagtacagaagctgagtacaaagaagttgccaataccacagctgaaattatctggattcaagttcttctaagggaacttggtatatcacaacctagacctcccagtctttggtgtgataatattggcgccacttacctaactgcaaaccccatatttcatcgtcgcatgaaacatgttgaagttggttatcattttgttcgagaacgtgtggcctctcaacaactagaagttcggattatttcttccaaagatcaagttgctgatatcatgacaaagccgttaccaggtccggcgttcagcaaaatttgtaccaatctgcacttaacttcgtaccgtccagattgagggggtgttaggaataaaagataaggcatgtagggttgtttatctctcctagaatctcgacactattgttgccttcggttgtatcccatgcatgtaatctttttctatataaagagacctgggcgtacctgagatggtgcaaccttccattatcctaacaagtataaacaaaaaatattcgtccaactaatcaaacaacgtgaagtcttagccaatcctttctttatctaatttgatgtgaataaatgtatctgtacgatccttgactagagctgtcatataagacaatgtttggttccagagtaaagagtaggtggaacatagccgctccgctcccattttgttgttatttgaattggttacatgtagtatagagtgtctctaaaaaaaggaaaaatagattcaaatgttgaaccatccatctcccccaagtatcatagatggagccgcttcctagcatggagtcgcttcccaactatcttaacaaccaaacactaactaaaaaactt

SEQ ID NO: 134762 - DNA, 345 bp, Zea Mays
cgggcaagggcggctcctccaaaagtggtctttactggaacgaagtgggccaccttggtgagacgatcgattattacccagatagaatcatttcctctctgcgttcggggcagtccggtcacgaaatccatgcctatttcttcccacttccactcaggtactggaaggggttgaagtaggcctgcaggcttctgatgttcggcctttgttcgctgacaggtgtcacaccgggccacatactgtgatatttcattcttcatccctttccaccagtatctggctttgaggtccaggtacatcttggtggttcctgggtggatggagtaagctgagttgtgagcttca

SEQ ID NO: 134763 - DNA, 453 bp, Zea Mays
gttacctcccacaaacacgcaatatctagatgtggatatctgatcgtctctactgcttgcccaatcagcgtcacaatagccctccagattcatatgttgatttgatctaaaccacaaccctttgccaggggttcccttcaggtacctcatgatttgattgaccaactccatatatcttgttctaggatcatgtatatacctactcaccacattcactgcataaacaatatccggtcttgtataacaatgatatatcaaccgacccactatcccctgatatctttctcgattcactgggtcacctgactcggcacaagtttggtgattcttatcaatgggtgagccacttggacgacacccaagcattcctgtctctctcaacagatcaagaacatacttcctttgagagagaatgattcctctagatgatctagcgatctcaatcccaagaaa

SEQ ID NO: 134764 - DNA, 1117 bp, Zea Mays
ccctgccacccttggtgtagggtctcctttaggtggccatccaatagcactgtgtatgcaactacatcaggcttgattcctaaatttatcatttgaacaaataagtcacatgcttcttgcaaccgaccaaccttgcaataaccattcatcagtatagtgtatacaatgacatcagaaagtcctctttcatccatatcaaggaaccataagtgagcattgtgcatatctctgttctgacaataagctgaaataagtttgctatatgaaattacatcaggaataacattcttttccagcatcatactacacacggttgaagcctcctcaaccttttcatctatgcagaggccatttatcaattttgaacatgaaaattgatccaccatatttccttgtttagcaactctaagaaaaagtgcgtgagcatggtcagtccagcccgagtgcaaataaccacaaaccatagaactgtacagcagttcaatattatctatccctttttcttctactatattaaataatacctctgcttcgctcaagttgcctcctctacaaaaactagtaatagctacaccataggtgagtgaattaggctccaacccttgattcatcatgtgctcaagaaggtcatataccttaataacagtgccattcctgctatacccactggccaatatgttatatgttactacatctggttttacattttccttcagcatctgctcaaatacttgccaggcattttccatttctcctttcagacaataaccattgatcaggcatgtatagtggattttgtctgggaccaaacctcccgccatcatttcagttagtagcttaactgcctcattcatgttcccaagcttgcaataagcatccatagcaatgttataaagaacgccgtcaagatggagtcctagatctctaaatttctggaagtgaacaataacttcagatatcatgcctagcttcttgaggcactgtagaaggtaaccaacaatgtaacaatttatctcgatgccatgggataccatggcttcaatataatgccacaccttttctaagttacccattttgcaataactacgaatgagatagctataaccatatagatcag

SEQ ID NO: 134765 - DNA, 638 bp, Zea Mays
cttagaggtggctgctgtagagaacccggtcctcaaggatagcgctagcgattacccagcccccccgagggtgttgccggcaatgatccggctcgggtgggtagcgcgagctgcaacccagcccccgagggtgctgccggtggtgatccggctccaatgggcgatgcaggctgcgacctagcccccgagggtgtccgagcgggctccccttctcatacctccatggatgtccacgtcgggtcttctcctccacattctgattgcatggcagtagcacgtgcttcaaatcaggaagtcgccttagagaccgacattcccaacgctagagttttgattcctgctggtgatgttgagttgatcctcaatgatgctcttcagattgcctcggctgatattccctcatcgagtcaccaactggtttctcatgatttggggcttccttcattcttctccaatcttcaggtaacttggtttttcctgatctggctatacttcgggcgaaatattgtctttgcactcacctattttcaataccaggctttggttgacgagatggctcatcagctgagatcacagggtgcttctgttcccagaaagagctctgtctctgacgcattggaatccagtgctactttagc

SEQ ID NO: 134766 - DNA, 567 bp, Zea Mays
acgacgtttgaaggataaatagtgtcataggaggtttggaattcgaattgaggcacgaaacgatatggaattgagccgatacttcacgaataggtttatataggtgaatatgagtgaagtgtgtgcttggtttgaatttaggcgaagaaaaagggatttgggcactcggctcagaaacgatcgctcaaaatgggaaatttggtgaaatttaagcctggaatctcggattggcgtgaaatttggcaagtaggttactggaagtgttgtgaaggtgcctgaaaaatttgggttcaactggagcatttttggctggtttgggcatttcaccgagcacgtggcgtgcggggaattaggttttcggtgaaacggctatttgaggtgggaaaaccctcccgaaggagctaagaacctgcagggatacacaatggggaaaattgaacatattccaccaactggattcatttgatttgacaagatttggagtttttgcacaaaagggagaagtgggagcctctgctcaccagaacagagggagagtggagaacagagggagtgtgagagcaccta

SEQ ID NO: 134767 - DNA, 886 bp, Zea Mays
cagccgcacgcgcttgtattttcttcgctggcgctggcagatggccccagaaaccagccctttcttcctccctgtaacaactcaacaccgtgatgcgcgcttctgcgttcgtttctcccaccgcgtaggcggattcgtccctcaagccgtcggaacgtgggacccgggggagaaccagtcaaccatcctacctgtgctcgccactggaggatccgaagattgaggactggtgcggtcgccatttcgtcgcgggcattacggacgcgatctgtgggggatttccgcagcgccaaaatcgggggtcgttgcgccctgtgccccttttctcgtgccatttattttctccaagcaccgcacttctcccatgaactggctgggcgaaccagtagccttcttgcctcttctcttccccttcggagctgtgagttggagagagaaattgggggaaagccgccactacggactcgtgcgtacaccatatgcagggttctggtgtcgggtctgggagctccagctcgtcaccgggatgatgctcatggcggcgatgctcagaattggccgggaattcgccgtcgtcggggaacttgcgcgtctagccattgcgaaccgtggccggctctccaaccttcgccttggtcttcggtaagcccctgggtagcttcgccatggctcgcgcttccttttgcactggttagctcgcgaattagggaatccacgcgttgggtcgtatattaccggcgatggtccgtcgcgggggggcaatggcgccgccgcacttgttctacgccaccgcgctcggtcggcttaggggaggactcgcgatgaccatccgatccatcgcgtgcggtcgagatttgaagcatgggtagccgtcgatcgagagtca

SEQ ID NO: 134768 - DNA, 475 bp, Zea Mays
gcaccgtccgatcatccaacgagggccatgcttatatcttattttgtgtgaaccggtattaaatgccaaccattcgattggagatcgttgtcgtggattgaaaacaactcatgtcgacctggagtcgcccgatcttggatctgcggctcagatcaaaggatccaaccggtagcccaggaaccaattatagctactcgctactggatcagtggctcacgacgatctcctcacccttctccctcactgaccagacaccacggtggcgtgctctgaaccgcgacggcggccatggccgactctcaggcgctctaaactccgaaccagatagtccaaaatagtgcaaagatcatggtgaacacgtgggaatgacttaccaactccggcgcagagcagacacccctggcaccgacacacgacggtccgatgtaaaccaccgacgtccgacgagcaattcccatccccacgacaaacctcg

SEQ ID NO: 134769 - DNA, 2167 bp, Zea Mays
ggcgatcatgatctaggatgagcaattgcattctatacctgtggcggcggaatggttctacgcactggaacacgacaacaacgttcgttgacttcaccaaccttcgattcgactcaccaattcgctccagccccttggccgaattaaatgatctctagcgcattggcactgtcgaggaataccagcgacagttctcacttcttctgtgccggtgcaatgaccttactaccatgcagtaggtcagcatgttcacggcaggtctagggaacccctgcacacggatgtcaaattataagctcccaggaatttgcagtgcgccatgaacctgacaagggcctatgaaaaaagggaattggaggcaggaaaaagaggaggatacagagctgctaggaatagtttggtagtcaaggaagccggcaacaacacagcatccaaggtagttgttcgcctcgacctcgattcaaacggctatcaccggaagagttagcgacgaagcgtgcaaaggggaaatgctatcattgcacagagaagtactcaatgggtgttgctcgggggggagggggggtcttgctggaattagaatatggcacttgagaggagaggaggcagtagtcgagttgggcatatcacataccacgtcgcgccctgactggaattgaagtaggggaaaccatgaagcttacagttctgacaagggagtgccactcacagcccaggtagacactggttccacacacacattcatcacagaggcaatggtgtctaagatgtaacttccactagaaaggcgccaaggcacagtgaaagtcgccaatggggacaaggttaccaacctaggattatgtacatggttatcagttcaaattgttgaagaacagttctccctaacttgctatgctctaccactggaaggctttgatgttgtgttgggagtacaatgtgatccttaggtctgattccatgggacttcgaacgtctatcaatgacattctggaagcaagaccacaaggtttgttggacagggatgtgtgactataagccacgctgttgtgcattttcagaagggaaggaattggtggacaaattattgtactcctacgaagacttgtttgcataaccctgcggcctaccaccagcccgacgccatgatcaccacatcaaattactgcctggcacgacaccaatggttgtacgttcgtaccgatacccctagctcttgaaggatgaaattgagaagcaatgtgaggacatgctgcatcgaggaattataagggaatgcacgccaacattctcttctccggtgctccttgtgaagaagtcagatggaacatggagattctgtgtggactaccatgaactcaatgggaagacggtgaatgaccatttccccataccagtggttgatgaattgttagatgagctttagggttctagattcttcaccaagctggaccttcggagtgggtaccaccaggtgcgaatgcaccccaaagatgttgacaaaacaaaattccgaacacaccgaggccactttgagttcctcgtcatgccattcggcctcaccaacgccccgtccacattccaaagcttgatgaatgatatcctcaactcattcatatgcaagtttgtgctagtatttttcgatgacatcctgatttatagcaagacgtgggcagctcacctccaacacgtcaagtaagtgttccaaacactgagaacacataagttggcattgaagcgctccaagtgtttttatggggttactagtgtgtcatatttgggccatataatctcggcatatggtgtggctatggatcctgagaaggtagcaacattagagacttagtcgcagcccagaactttaagggtgctacgtggtttccttgggcttacaggatattaccggaagttcattgcaagctatggcgaaatcgcagcaccattaactgtcctattgaagaaggaatcatttcagtggtcggaggcatcaacaaaggcattcctcgcactcaaacaggcacacatgaccgtctccttgctgcagatgcctgacttgagcaagagttttgtggttgttccgacgcgtcaggttccaggtttggggcagttctccaccaaggtgcacgagcgtgtggcatattttagtaaagcggtggccagtggcgga

SEQ ID NO: 134770 - DNA, 477 bp, Zea Mays
gatatcgtgttttcaacaataccaccggtcttgttgaaatagcgatagatgtgacatttgatgagtctaatggctcgcaagggcatgtttctaatgacattgcaggaaatgaagaaccaccttgtgaggccataacgaagcttgcaatagatgaagtgagacctcaagaaaaggatgatgaggaaagaaccttgtggatgaccaatgagatttttgatgtgggtgcaaaggtggtgggtgataaatcctccacccaagcaaacccatcaacctcaagtcatccaagtcttgaagaaggtcatcaaccccaaaggatgccaaccgtggtagaagatgaacatgagagtgttgatggtgaagtgcctcttgattaagtggatgatgaggaggagcaaattcaaagacaaccctcagtgccccatcctcgagtccatcataccattcaaagagatcatccggtggacaacatcctaggta

SEQ ID NO: 134771 - DNA, 539 bp, Zea Mays
cagatttgcgtaaaatcctttaacttttagcgtaaatatcctctattctgaccataaaaaacgatccaaagtcaaagatgttgataactcagatgtgttgtatttatgatcatagaaaccatcaagtttgcgcataaaatattggagatgtagtgtaaatgttactcccgtagaaataccaaagccacgtgagagacgacatattcatcatcataaaatactcaaatggaatgcattaaaattgcaccggtcgacataaaaatattatagaatgcataacgcatggagcagatgaggtcgtcggaggaggatgccccaaagcctccggatcggagaatgtcgtcctcgggaggcacgagcgacgttggccagaggcatgcacgggcagtggcacccctaatgtgcataaagccaccgtcgcacgcctagggggccaccgccaccgtgtgccctttgcggagccgccaccacgcgtgcccctcgagaattgccgcctcagcacatctcaggaactgccacctccacgcgcctctcgagga

SEQ ID NO: 134772 - DNA, 447 bp, Zea Mays
actaatcaggagtggagctctacaagacgggccaactgtaccgaaacagcacctcctatgggcctcagtgcctcactattgaacagggcaaccaaacgtcacgcgttgagtgggagactggtgtctgcgacgggccaggctcagtgtcctaagggattcagcccattcagggaggcggcgcgcacgcgcagcggggcgcagtcgaggtcacgcacagacggcacagtcgcacagacacattagtcgagggaggcggcatgcggcaccgtcgcaccgagcgggtcgcgtactcgcgttcagttcaaggtcagcccaggccggccccgtccctcctccgcacggacctgacgcggggcacggtcgaggacggcggcgcagggcggggtggaggtctccaggacgcaaggcactagcgggctcctccctcccgcgcgggcaccaacggcg

SEQ ID NO: 134773 - DNA, 503 bp, Zea Mays
ttagcccgctacgcgccagatgatgtcagtaccgagagcaagaagatggcccgtttcctgaaaggactcaggcctgaactcaagacaattctggctagccaagacttcctcaacttctctcacctttccaacaaggccatgcaagttgaaagggcaaaggaggaagaaaaagggcatcttaaaaggaagttccaggttctccgggcacagcagcaggaccggcaccagaagactcgatcatttgggtttccacccaaggggccaaacttcagtaggccagctggacccactccgtcgcgattcagccagcagagtcagagctcttttcattccccctcagtggcaagcaaccaacccccggcaaatgcatgttggcactgtggtgatcccagtcacttcaagaacaactgtccacagctgaaggtaccagtacccgcctactccaactcggtgaatggccccaagaatacctcgacatccacccccaaggcgccctccgccgt

SEQ ID NO: 134774 - DNA, 411 bp, Zea Mays
aaaattacagcgtgaaaatcgcgtgcaaccgatcgtgcgcgggtccttgctcgggccgattccagcgtaaaccgtgagctaaaacagcgtaaatgagtacagaatttagcgtaaatcttatatatgttttgtaacagcaaatgaagcctaaaattacggcgtgaaaattgtgtgcagccgatcgttcacggattctggctcgggcggattccagcgtaaaacgtgagctaaaacaacgtaaattaatacgaaatttagcgtaaatcatttatctgtttcgtaacaacaaataggtcccgagattacggcgtgaaaattatgtgcggccgagtgcgcaggttctggctcgaatggattttagcgtaaacgtgaacctaaacatcgtaaattagtacgaatgttagcgtaaat

SEQ ID NO: 134775 - DNA, 557 bp, Zea Mays
cgcgtatgggcaatccacatctatatgtctgatgtctaggcatatgtgcatgtagttggcccagggcgtctctcactctagcagctatagctactcgctgcaagttgcaaagcatgttgcgtgcaagttgatgtaccataccatctgcttcatgcatgcatggagcaccactacgctatctatgcgccaatgtacgtagtgataatgttgcatggcgcgcaacagcactcacgtaactggtgggaacaatggtgcaacaagttggctgaactgcaggtctgcagctataaattaagctagaggggcccatgacacgtacgctacaacgagcgcgagctcatcccggacgataaggcgagagaaatatcagaggggacctctgctttgcatcgtgcacaagcaatgcagtaccgctggattgttcatgtaccacactacactaccagaaacaactttctgtacgagcactcggcaaaatctggaaaacactcaacgaaggctttgccgagtgtgacattcgacaaaaaaactcgacgaactgtacattgacaacgact

SEQ ID NO: 134776 - DNA, 406 bp, Zea Mays
tgtctctccaagaaagtctcaaaatagcagaaggtgaagaggccaacactcgtgaagcctaccgaaccctgaagatggattacgacaagaagttaaagaagctcgcccccactaagaagatccgaaagaggaccaagagccaaggatgccagactgagcagaaaaaggaagccccaccagcactgcctccatctaggatagagaacttgtccgacgtcgaggatatgtccctagctagccttgacgaccttctcaaggaatttggggacactttagaaagagagttgtggtaactgtatgcttgtaatgaacttgtgtgatgaataaaataacatggttgaagaaaaattggcatatgcatagtagtaattctctccccctagcagatggcttcggataaaaccac

SEQ ID NO: 134777 - DNA, 531 bp, Zea Mays
gcgagggagccccacatgtaggtggcatccaatgtcatggcgatctagatggtggacaacaccaccaccaccactaaccactaatatatgatgatgaatcattgctagaacttgatgaggaggaagatgacatgacatactagtgacaacggtgagcggtctgcttgatgtgtgccagcgatgacaggctctagcgccgaacttggcggtgagctcggacgtaaaagacgacaatgagcttgagcagagagaatgaggaatgcaaaacatgagagagtgatggcagatgtcaagccctaaccatgtgacaccttatatagccaaaaaaatcaaatcaaatcaatcgacaattgcaaatatgtcgccctcgaaaccactcacctgatgatcgaagacaactttcataccattctctagtctctaggattgactcatcagactgagcctcattgttaggggggtactgctggggagaaggccaaacaagacctcaatcaccaataaacttgatactgcttaaccatttatcag

SEQ ID NO: 134778 - DNA, 338 bp, Zea Mays
acatcaaacttgtagagccatgtatggagaacaaatttgcttaagtaatcaaacactagtgttacacaaaaatgggagatatatgaggttgaaaaggcgccgtcagtcggcatgataggtatttattcactgcatctaatttgggtcagggttcagtgttgttgcgccaacttgagcgccctagcctgatcaatccgtgaggatttttgacatagtcattatatcaaaatgaaagaacattgatcaaggtacaattttgatacagactcgtctgcgagcaaccacatgaaattaggagcagtagccacttgaattcgagctggcaggcgcactgttca

SEQ ID NO: 134779 - DNA, 654 bp, Zea Mays
gtggaattctggtggcccgaactggatcaaagaatggcagttgttttctgaagaagaatcaaagtcatggaaagtggtttctcgtcatcgtaataagtctgtttcgtttgctgacattgttcgtaagcccgctctatcaggtgcaaactttgtgcctttgggacatccggctagttctggaccatcctcttcaagcttgcggcagaggtcttcggttttcaatcgattttcttatacgatgtatccctccaatgatcggttggggtttcggccaaattactcttcaagttcttcgaagaactcggtggtgaatctgcgctggggtggtagagggttttctggacgttctcaaattcaaaattattcaaattccagtaacggacgcattgagggccttaacaatcaggcttctttaagtgactcttgtgctcgtccttgggctccacgaaagttaatttggcggcccaagaagattttgggtcagcgccctttgcctctgggggaagctgggcaggcttttggtaccaacaatgttgctctcttcggcccagtggtgtgggattttcgtcatttcttaggactttctatttcgggcaataatatgcaaattttcgtgatttctggtcagaattgcggacggtcctttgattcctt

SEQ ID NO: 134780 - DNA, 272 bp, Zea Mays
tctggacatgctcatccttggcttgcttccgggcttcaatagcaatgacttcacgactttccaaggcagttgcacgagcttgagctgtggttagatccatatggagcttacggttgtgcttttctgcatcttctgctcgggcaatcatctgacggtggtgccgagccaagaaatcatactgtgtatctagggtgagcaggtatggagtgaggtacacgactgtggggttgtcctcaagcagctgctgccttccagtgcacgcatccgggcca

SEQ ID NO: 134781 - DNA, 408 bp, Zea Mays
ggttcgccttctggcaccgataggagggggtcgtggaacgagtcctgaacagggtccgacattcccacggtcttggtgaaaagtgggttgcgacacatgccgccgcctgttacctcttctcgggggaccaagccgaaggctattaaggcattcaacaatgtcgagtgagtcgctcattgggggaatgggggcttccagggtcatgtccattggtccctctctattgatgacaaagttgagattcccaaaatggatggtcatcccaggggtctaaaccactccattgtcgttgctggccatccggagcttgacgaatttcatcaagaacgtgcaaggcccctacctagcatgccaattgtcagtgtttcaaacctcactccaacaagtaaatttatgtgtgcatttcgg

SEQ ID NO: 134782 - DNA, 322 bp, Zea Mays
cgtggtgtcaaaaggttccaaatgaaaggaaagctagcaccgcgtttcgtcggcccctaccccatcattagcagagtgggacccgcagcataccgccttgagctaccagaatccatgtcagatattcacaacgtgtttcatgtgtcccagctccgtaaatgcctgcaagtaccagagaaccacatcaaggcagagacaattcagattcaaaaagatctccagtaccgagacaagccaacaaagattctcgactcagcagtccgaaggacccgcaactcagaagtgagactctgtaaggttcagtggagcagagaaggagaag

SEQ ID NO: 134783 - DNA, 559 bp, Zea Mays
tcacctggtgatttctcgccgaagctttgggctccgccgcgctccgtgggtagagttatgcgtcgcgctaatcaaggtaatgatgcctacctagagttctccatgtcctccttcacgtgtctacccatcgaatcaacgtttagggcagaattgtgtgtggtcagaccgcgcggctatggcgccgccgtgccggagctggcgcgccgccgctgactgatgtcgggggtagaggatcgcatctggatcattgatgcaagatggacggcttagattaggttccaggtgccgattgggtgggaatgcctaggaccgtccgatcaggatcgaggggcccaaatcgttgtctgcgtaattaaatctgagctatgcatcacggatctgagggcagatatcgtgtaccggtttagggtagcgagaatctaatcggcaccgtacagttttgatccaacggcccacagagcaccgtaccccttcgcgatagcgttttgcataagagaccccgcagaagttgagtatcaacccacggtccatccccctgtgccctgtgtcttagtatttt

SEQ ID NO: 134784 - DNA, 436 bp, Zea Mays
aggttctttatggatatgatccaccatttgctgctgcaccgatggttccagttgggactgatgaggatgtatcagctctattagctgatagagcaaggtttactgagctgttgaagggcaagttggctgaggctcgtaaccgcatgaaattgtatgctgacaagcttcggactgaacgacagttttcaagttggggaaatggttctactgaagctacaaccgtatgcgcagcattctgtggtgaatagatcatgtcccaagttggctttcaagttttatggtccttataaggtgcttgaacgaattggggaagtggcttatagattggaactgccagccgaagcgcaggtgcacccggtgtttcacatttctcagctcaaagctttcactcctaaccatgtgtctgtcttctccaccttgccaagatatgaggatt

SEQ ID NO: 134785 - DNA, 315 bp, Zea Mays
cagagatgaagtcgatcgagaggtcgattaggccgatgttgatcttgttctttatttggtagactaatgaacacctttcgagaagatctttagaggaggggtatatagaggttttcctagaatcaacaagttcacgtagaaccccgtcaaatgtctccgaaagatatgaagaacaacaaggtagagaaagggacagtgggtaaaaggttctgtagattgttttttaacgtttgaaagtttacaatattcagacgtccgtgacattctcagatatatacatacatgcatacatgtgtgtgcgtgcgtgcgtgcgtg

SEQ ID NO: 134786 - DNA, 827 bp, Zea Mays
ttccctcatatgacgcactcatcttgtcatgacatatcgtcataaacatgatgacacacaaagttatgacattttttgtgacgagtctcaatttttcgtcatgaaattgttttggttcctagaaatcgtcataaacatagtcacctagtgacaaattctacaattgtcattgagcgtttgtcataaaaggccatatgtgttgtagtagatccatcccatcttaaaagattctatcctaacagattcatcctatcctaactaatccgacttaaacaagatccaatctaattagatctgatctcatgtaatccaatctaactaggatcccatctcatctaatgtaaactaatctgatctgaatctaatcttacctaatacaagtctgatctaatcaaaactaatcagatctaatctaataagacctagtcaatcggtttatatttcttgcaccaatttgaaggatagagcaaattaacctagattagttaatagattaaactctacacctagaaactcttttctcacctaattcacttaaacctaaaattgatgccctagactaactcggccatgaacagcaacttgacctacataataggttacataacctgatcctacctattctcaatatagcttaagccacctactaagtcatctgctctacataataagcaatttggtttacctacaaatctgttctaactacatgtccctaactcggacggcatcaccaagacctaagaaggaaggaagtcaacctcgtcaaggaagacaggagccaacccagatctctagatgattcaggacccaccatccggaatggaaac

SEQ ID NO: 134787 - DNA, 359 bp, Zea Mays
cttcacggcggcttaggcacgggcacggcacacggcctcggcgaggtcccctgccggtgcggcctccatccgacgagtcccaccgttgcccagccttggccgtggttccctggcacctgcgctgaagcccagcgctctcctcccccacgtgatcccatcctcccttgcgatggccaattcgtgtcgagcataggagagagagaaaggtaattgctcttgcgtcagaaacagagaagaaacctcgtgaggttgcaacttgcatgaaggaaagaaatcgtttctttttttaatcatggccggatttattaaaccttcatatctttcgtgttagatgtccgatttagttcattcgagttacg

SEQ ID NO: 134788 - DNA, 596 bp, Zea Mays
cgactatcagtcgcataggacggggggttatttgtcagaaaggttatggactctttagcaaaatggcctggcgaaggggtacgggtgatttctggtcgtccgatcagaaacggttggcctggattagatgcgaacgattcaaattagatcagcgcggctgcgaatcggtatgccaccatggcccctggatcccgatccgacgatcgtagtttaatgaaatctagatcagatctccatcgcccgattcccccgcaacgacccagattcgctcacgtgaaagggtatcccactgtataatctcagccgttcagagatccatcaacggccgaagtgattctcccccaaccgaaatagacgacggcggcgccgccatgacctcacggtggagagtccaccggagaatcccgcaagcggtgtggatgcacagattcccatgccctctagcgtacgggttaccccatgccatagccaatgcggtggggaccctcacaccaccagcaacccgtcgactgcacccacccacggcacgcggcggatttctagcccccggcgaacaattaacggagcacaggagttcgattcggagctaagacgag

SEQ ID NO: 134789 - DNA, 352 bp, Zea Mays
ataatttttaaactaatgtggtttatatatcggagcaagcaagcaaacagagctccccgtcttttctgacagctactggatatgctattctcggactttactgttagataaggttcggttttagagattctgagaccagaaaaaagacggcttgcttttcgtatgtttatctccggacacggaatttcaaactagcgtatcaaggcctatggatgaatcggatgcttctcatgattgttgagcagaaaatgggagcagtctgttgaacacaaagcatgtttcttaccttcatcatgaattgaacccatgcgtctgtgtttctgccttacctaacctgtcatgttcacagaag

SEQ ID NO: 134790 - DNA, 491 bp, Zea Mays
tgaagaggcaagcagataaacatcgttcagagaggacatttgctgttggggattgggtttatcttaaacttcaaccttacattcagtcatccattgcaactcgatccaacaacaaattgtttatcaagttttttgggccctatcagattgtggagcatactggtgcagtggcttatcgtcttcagcttcctccagccagtgccattcatcctgtaattcatgtttcgcagttgaagcgttctgttggccgtaatgtgtctctttcttcacagttgcctcaggaggaggtgcctgtgcagattccattacagattttgcagcggcgtatgattgagcgaggaggagatttcatcgcccaagttcaagtgctgtggtcaggcatgtccaaggagctagcgacatgggaggacgaagcagccttgaaggtgcgttttccagatgcaccagcctgggggcatgctggttcacaagcccgggggaatgttggcgac

SEQ ID NO: 134791 - DNA, 716 bp, Zea Mays
cttaattgtgtttcataattaattgtggttatgtaatagtttgtttgtcctctctatcttaattgtgttcgtagttcatgtacttatgtacaaacaagctacatttatggtgattcatggtaaaaaatctttatagtgggttttatacaattgaccatcctaactataaatcctagctacgccacgccctgtagtacctctcctggtcctctctaaggcatcctgcaaaccattcttgctgcctgatgttcacctcactgccatcgaggaatgtgaactagaggttgttgcttctttgctgacagcaggtttgccccgtcgcaaatatgctatagtgctggcggcaatgaccacctactgtcatattaagatatgataggtcgtcagctgcttagtgaataaagagttaattcctttcgttggctcatatattttcttgcttaataaaaaacgaacgctcattcaggatgttgcagtgttccatgccacacccctccttttgtgctttgctcacttcatgttcgcaacaatgattaatagcctaggtaactatccgtattttataaatcttgatgctaacgttagtttattggtttgcttcttcacaaaaagaattattagtttgattgctgcttaaatacatgaacattattgaggagtaacttcagatttcatctgtattaaaatgatccttggttagaaatattggatcatgg

SEQ ID NO: 134792 - DNA, 281 bp, Zea Mays
ttccaatccatcacttcttgtactttctcaggatcaactgttatcccatcctgcaaaatggtgtgacctaagaacttgatctctcttagccagaagtcacactaggagaatttggcatacaagcggtgatcccgcagtcgctgaagtacggtgtgcaagtgctttgtatgctcgtcttcacttttttgaatatactaggatatcatcaatgaagaccaccacaaatttgtccaattgtggcataaacactgaattcatcaaatacatgaagtatgccggcg

SEQ ID NO: 134793 - DNA, 395 bp, Zea Mays
gaagattcttaatgatatcaggtgtaacaagaacattgttaagataaaactggccagaaagaactgtatctcctactgaggtgaccggcagactggacccgtttccaacaacgatggatgaaggaatagcagaagttggagaacgaaaactagggagatgttaccagaatccggggtcgtatggttggaggcctcggagtcagcaatccactcggtgatggattggggctgctgaagagtcatcgtgttgaaggaagaggccggtgactgctgatcccaggcaccctgccacgggttccagggtgattgggcagcctgttgttgctgttgcgcaccataagcagcctgcgcctgctgctgcagctgatgttgctgctgggcagcatacagctgcg

SEQ ID NO: 134794 - DNA, 307 bp, Zea Mays
cggttgcttgccatgatctttatgacatggaggatagatcgctgtgtgtcacggtcgacgaaacggtgagctccagtgatgccaacactactaaccgcggcgggtaaggggaatacacgatggccggaccgaccagtgattgggttcacccctccccggatcttttcaccccttcccgacgttatctacttctcacacggcatgaatctcctaggcgagcatgaattgcggcgagagaccaccggcgtcaggttcacgacactggagatctttccatctactttaccatggtgatcttcttcagtcc

SEQ ID NO: 134795 - DNA, 519 bp, Zea Mays
gcttggacctcgttgtgttgtatgttggctataagggtacctttttttgcttttgtagattgatgttgtgcatgcgaaggcatctgagtaaaagttgttgctcggtgttgattttggggtctaaacggtcctgctagtcttcatcatcatctaggaggggcatccctagcggatgctgctggcgccttgctgctgcttggaagcctacggggacggatgacatgttcttggctaggtctggcaaattgtggcttggtagggataacattttggattgggtggggtcgtttgggtgtctaagctagaggtgtgtactttgtcctctcgctcagtggggtggctaattgcttgtattttgtggagttgcccttgctttgtggcttggtggtggcctttggatcgactggtgggatatcatcaacgaaggcagcattgcttttttagcggcgagggtctcccttgctacgtcatcgtcagttgctgagctggctcgagtggtctttttgggaggcatcgagg

SEQ ID NO: 134796 - DNA, 451 bp, Zea Mays
aacacattccccactcgggtagcgatggcaggaccacccgggagggatgaagatgaactcaaagtctccatcgccggaacagaagagtcaacatcggctatggacaagaagacctcgccacccgggccatcgtgagcatctggattctctgatgatggcataagacccactgggctcccagaactagaaggagacaggctagaaacagccacacccaaagtcacagtggcaggcccatgaacattctccaggggcagactcagcccagcatcaatgcagccaatcaccggctccacagcgtctgcatgcgtgtccacagtaaccaaggcgacggaaggcgctcctctaggagaagaaacgccaccgccatgcaacccagcctctgcatgtgccacatgtcgaacagagacaggggcaacaccaagtctttcacggacgtgccttcgtgctg

SEQ ID NO: 134797 - DNA, 829 bp, Zea Mays
ctgtcgtaccaaccaccccgccaagggtggtagccatgtgtggcatgtcgtcggtcgtcgtggtgtagtcgtccgttgaggcggtcgtgaacaccacagttctggcggttatcgaagaggtggtcccgaaccacgaggctttctcctttgttggctcgggatggaccaaggcctccctctcttggtgagagggcccctctcgttgttccgaggcgggttcccgaagtcgagaggcatagctctcagcctgctggaccatagcacactctagaagtcccttgatctcaccgtggattcggcttcccttggtggtggatggctccggcttggttcgaagcaagattgttgctgcaacgaggttctggctagccctatgaaaggccagaggggcttcaacctcggcatctgccatgatgcgccgatggacatcgtgagccttggcgcgtgctcccttgtcaagggctctacctgtgacttcctgctcaagaacttgccaaagctgttgtagtcgctgttgttcttcctcgagcttggtgtgcagctcgctagctactcgaggtggactatgtgactcctcgtgggggtctgagccacaccggtgtgcaggggtggtgccagggtgttgtcctcccaaggcatgtcgagatggttcccttcgccatgctcctcgtgccccacgtgaaagcactctcaagtcgggtcgtaaccctcctcgtcagagttgtagtcgttggagccgtcgaagaggaggccgtcgcatgcgaacaagaactgtagcatggcctcagggtcacgaagtctagagaagtccaggccagggcccagacca

SEQ ID NO: 134798 - DNA, 693 bp, Zea Mays
cgggaagctcaacgagagtccaattcaagcctgtgcataccatctaaaggagtcgttgccactagacctccccaataaagcttttgagtttaaaaggatgtgcggactttgtggcggaggcttatttgcctttttcattagattctgtctttgttgtgttgagtagcttttttgttggttgctcgtgttgtcggctgttgtgtgctcctgttgctagagtgttgttgttgttggtagggttggtgtagttttttgctctagcagttgttttttgttgtaatcctctttgggaggttgttgattgccaattttgggctcttctcttttatcaatataatcgacagctctcctgctcggttagtttcaaaaaaaagctttgtgtgctacttatttacgtgtgtgcagagcctagctaatttatatactcgtgacttttgctaggtgctacacgtatgtggatttatatgcaatctgtgaaggtagtcgatgcatatacggatgaggcagcaagtagtactgggcctccgagtgagccatgggcctataaggccagagattcccctggcgatggaaggaaaaaagctacggttataggatggacttgcagcagttgggttcggcacagaggacagcagaggacgagggctgattcccagtcccagagcagcatctggttggcgccgcggcacgcgc

SEQ ID NO: 134799 - DNA, 544 bp, Zea Mays
ggcatgctcaccggcgatcgtccatcgaagggaagagcgcgccaccgcgcgattcgaccaggagggagagagagcgcctcaaaccgttggatgcaccagggacgacccggattaaaacccgagcataccgtttcaggagttgatctggggtcgtagatcgaccagggtgcgaccctgattaaattaaggacgagagtttcggttgtgatctcatagccgtagatgggaagacgaacgcgctagattagatcctagataccggttggatcaaatcaatccggggcgttagatttagatcgggcgtacacggtataatctgaacgtgttttaaatctgaggcatccgtccgcgatccgacgacccctgttgcataccgattcgttataaactagatctaatatgggccctcgtttgttgatcgaacaaccagatgcgaaggttatcccttcgaccgtgcgcttttgtaaatgagcccctgaacttatcacagatcaacccgccgtccacattaatgagaaagtaattaaatttaggccctgaaaac

SEQ ID NO: 134800 - DNA, 300 bp, Zea Mays
attttctccaggaaggtgaccgggtagaatctcctttcaaactgcctgatgaagacatcccaagacaggactcctggtgatgaggagtgcgctgcctgcacgcctctcaaccaaatttgagcctctcccttcagcagctgtgtgccaaagcaaacccgatctccatacacaatctcgaagacattcatcttatcctccatgtaagtcagccaatctgccgcctccaccggagtaccactgccatcaaaagaatccaacttcatgcccatccactgcatcagagaaagaccactgactgga

SEQ ID NO: 134801 - DNA, 427 bp, Zea Mays
gccaattcttgtcaaaacaacatcacttaccgacacagcagctgtagaccatacctgtaacatggacatttgcatgctggggactggacatgattggacccttcaagaaagctcgggaaggctatactcacgtgatggtcgccattgacaaatttaccaaatggatagagtacaagcctattgcttctttaacctcagccaaggcagtggagttcatacaagacataatattcaggtttgggataccgaatagcatcataaccgacctgggatctaacttcactagctctaaattctttgatttctgtgaacaatggagtatccagatcaattacgcatcagtagcacacccaagagccaatggttaggtggaaagggccaatagaatgatactagaagcaatcaggaagaaagtgttcgacaaaaa

SEQ ID NO: 134802 - DNA, 544 bp, Zea Mays
ctctcgtcgccccggtgagtgtcagtcgtattccgtcgcacaggatcggtgattgcggattgaaaagcgcctttcgggtgggggtgggggtggggggtctgtactgtgtactactactaccccctcccgcgccgagggtccgacacgtcaatattccccgcccgattccggcggtccgttctgtggctggagacgctttcaaccctcccctccccggcgcctgcccgctttcctctccccttcctctctctctctctctctcggcgccgatcgcagcggcgggcagaacacgcggcgctgttcttgtccgcccctcatcgccggtcagccacgcaaaaagccgcatttctctctgtgcctcgtgttctgctcgcttgggatagataccagcacacaccgatggttgttgactgaactgaagtgaacgtcgctacagcagcagaagcaacactgagggaaggaaagggaaaggatttgtgcagtgtggtgatgaccacctttatttgtctggtcaacaatcgaacctctctctctcgcgcgcgca

SEQ ID NO: 134803 - DNA, 570 bp, Zea Mays
gagcagcattaggagaacctaagtacactaaaatgaacgatcagagagtatgaacagacctggaacaagttggctacggcgagggctctttcacggtggcggaaaccgatttgggggaaaagagcaattcgtgggctctagtgagtaattgagggcacaagcggttggattagatgttggattacctaacggagccgagggagtgctcaatttatagcgtgcttgagcggtggctagtgaatttgatggggacacgcggcggccggagagaaggaggggcactagcgcaaacgattagtggctttcaacgtggcggactcactggcgacgagccagggctatagagcggcttatggcgatgtggtgaaggttcaaggcacgtggcatccgatcgacgggcggccaatcccggtgaacttatctgagccggccgcaaagcaaagggatacggcggtcagccgtcggtgttatccccatgcgaagatcttttacccagaagcgttatccggtcaccggtgagcacgaatcacaacggcgacgtgaatcctggcgcacggtcgtcggcggtga

SEQ ID NO: 134804 - DNA, 416 bp, Zea Mays
tacgatagaaacccgcgaggcctagaaaattgcgtaactctttgctatttgctggagtaggccattgttgcacaacagttatcttgtcgggatctgttgagacaccctgtgcactgattatatggccgaggtaggaaatactggtttgagcaaattcacatttggacaactttactttccactgatctttccgcaacaagtgaaatatcgaggacaaatgagtcaaatgagaatcaaaagtggggctatatattagaatgtcatcgaagaataccagggcacatttacgtaagactagtgctaaagtggtattcatggcctccagaaaagtgttgggagctccagtgagtccgaaagccatcacccgaaactcaaattgtcccaaatgcgtttgaaaggctgtttttggttcttcg

SEQ ID NO: 134805 - DNA, 500 bp, Zea Mays
cagacatattatgtaaatagtttggcataaaactgaagcagtaacaacatagactctgaaatgacataagtccacacaatattttgtgcaaatagactaaaagactctcaaatgaaataagtccacataatagtttgtcgacatgacataagttcatcacaatagtttgtggttttttgtgcttattttagactcttcaaatgaaataagtccacataatagtttgtgcaccatctctatagccacttgaacttttggtctgttgtatcaaatcggctgaagatagctgtgttgtagtcgtccctaaacaacttggtggccacacaatattcatttgatgctttatcagctccacttgcttctgccaagttcaaacaactttcaatttcttctatgggtagtgtacttctattttgctgggtatttgtaatttgggtgaaaacttccgtatttgtagtccttgatgtttgcatttcagtaattattccttctaacaactt

SEQ ID NO: 134806 - DNA, 614 bp, Zea Mays
gcgcgcttcgcgtcttgctctctggcatggggagagaaatagctgtgggccattgatgcttgagggaacggatgagactggactatgggtattcatcgtctggaccgtgggatggggatctaacgtaccacagcgcgtaccggctcgggtcgtggataatttaatcttagccctccatctgtgatcgcacggctcagaatagatgatacctcttcggccgatctttatgcagaaaagcccctcagttttcagtgaaccaacccgcagtccatgcgccagtagtctgagtctcgggtaactttgtagtttagcccctgtggtatctggtaattagtgcgccgtccagaggacagctaaattagatgaataattatgggaaaggatttttagtgtaagaataatcacaaaaacttgtttaatcaatagaaaagtcatatgaagtccaaatttattcattccagttcctataatttggtaataatattgtttatcacttagtgccactgttttagcatgaaaactatattaaatttgatcacttagttatttccgtaccaaacacataaaaccttcggaagttcataacccacaatccgtaattccgatttgatccg

SEQ ID NO: 134807 - DNA, 746 bp, Zea Mays
tgaaagaaaccatatcaaaaaatccctctctaatgaaccatcctaactcaaatttaaactcagagaaattccccaggttcgtcggggctttaccattcagtaataaaggcgtatgatcagaccgagatctatcaagcgccttcactgagacgttagggaatttaagttcccactccgggctcattaaaaccctatcaagcttctcaaacgtgggtggattcaaatcatttgcccaagtaaattgacatcccaccatatcaatttcgtgcaattctaaattcgctatgatactattaaacaatttaggccatcgaaggctgaagttatcattacttttgtcttccgcacttcgcatgatattgaagtctccccctatgataaacggatgagtctcagaactacacgcacctgcaatttctgctaaaaaatcattctttaaatcatcttgagcagggccataaacagcaaaaagggcccaaatgaatccatcctctttgtttcggagccggaacttacaatagaaattaccttcatcaatagctccaagtcataaacccccgaattaacccctaacaacatccctcctgatcttcctctaggtggcataaggtgccagaggaaatcgacgccactacaaaaatgtctcaaagtagactctgagaatgcactacgacctgtctccatgagagcaataaagtcgagtctatgttctctagaaaggtgagataagtaattgtgtttagcca

SEQ ID NO: 134808 - DNA, 391 bp, Zea Mays
tcctaaaatgaaggaatttaaacgtcctgtaacgaaaaataaactaattttcctagagaaaattgagttgccaagctagcctaagataaataccgctcgccacgtttttgagtttgacctctcgatgctgcgtcctctccgctcgacgcgtctcctgccagctgaatcggtccaatatgcatctcctcacccggttccttcctgcctgacgcctccttctcaccctgtgcctggttggcagctgaatcggctctccctccctgatgccgcctccttggtccatgctaaggtccctggcaggcatctgaatcggtcgtccctccacatgcctttgatgtctctccgttcctccgagaaggatgaaaaggaacacggccgcctcaggtgaaga

SEQ ID NO: 134809 - DNA, 486 bp, Zea Mays
caacctcggcgccccaaacttgagatcagcaggtagtactgcctctgacccgtagaccatgaaaaaaggagtgtttccatgcagagctcggctaggttgggttcttaggctccaaacgacgtaaggcaattcccttatccactttcctgcgaacttctcatttttgtcgaagacctttttcctgagtgcctccaatatcatcccgttagctcgttcaacctgcccgttggctctcgggtgtgctaccgaagcatacttgatctgaatgcttttttgctcgcagaaatcgaagaactctgaacttgtgaagttggatcccaagtcggttatgatactgttcggtattccaaacctgaatattatgtcttgtatgaattccacggctttagctgaggttaaagaggcgatgggtttgaactctatccatttaatgaatttgtcgattgctaccaacacgtgagtgtatcctctttgagctttcttgaa

SEQ ID NO: 134810 - DNA, 513 bp, Zea Mays
agaagatcaccaatgagatgttagctgaaatatctgaacactctagcgatagtgagagcttcgatgtagaaagtggaaatgaagatgctgaagatcggccatggagaccgagccatgttgtcttcggaaaatcgactattaaacaagggcagattgaagcaatgagtgggaggtactttcatgatatttcaatcgtgagagccagaggggagaataatgttcctctgcccgaaattgacgaagtggtgatttttagaagcttcatgaaagctggacttcggttccctctggacaaaatgttggtcgaagttctgaagacttttgaaatctatattcaccaacttacccccgaagctattgtcaaagtaggggttttcatatgggctatgaggagccaaggattggagccagatgccaggtgtttctgcaatatgaacgagctattatacaaacaaaggcaactgggaaagagaaatatcacaacaatttttgttgctacagctttgtacatcg

SEQ ID NO: 134811 - DNA, 565 bp, Zea Mays
atctggttcctctctttgatgcatgacacatggtcacctttgagacaaaaatgcatacatagttgtatagtttactcccatctgtagttttaaacatttttttcctgagcaagaggctagacattatgaagctgtagtaacttcacaatttgcattagtgctagtagctggaacacggggcatataatggtgctgtctaatcttctgaaaactttacaggtcttcccgttactcatcaagaagttttcacacgaagagcaagcagatttagtatggcagttcttatgtagcatccctgtaaacctgatggcaaaatttcttccatggatttctgcttatgtttctatagatgagaatcaagatattcttgactgcctaagtaaaatagttcctgaagaaaaactcctccaagaggtccttatgattatggtatcacacatcttaacttcccatttgtaaagttattggcgtatttcacttcagttttttactttgtgaaggttgttttcacgtggtttggagggaaatcagaaagcagttctacatgtgagtctagctctggcca

SEQ ID NO: 134812 - DNA, 1003 bp, Zea Mays
gaggacaaagtagtggaaactcaaataggaggccttagaggacttcaataataatgttatcaaagaaggattttgggagaagatgcaaataacatgcatgtgaatatggcaacatatatttgaaggtatcttcaaaggtgtttgaagtgactaaaacaagaggatgcaaacctaaagatacttgttataggaactaggatgaagaagaaagaacaatataggtggttgtgccatgacataatatgaactatgtagagaagtttaagatggtaaagaaggctgcaaaacatgttgtgagtgagagggtcatgcctatgagaatatttaccaacacctaagtacaaacaaagaagagaaatacctatatgatggatagggttgatgaaaggaatgtgagagaccccaatcaagttaaatgcatcaatatgatgatggattcattgttggtgaaagaggataaggccaaccataaatcacaatagtgtttatacaaaatattcaacggtgagaatgagaacataactatttaattggatggctcctttgatgacattatagattctaggtgcacaagattcaagaatataatgtctagcaaacgaggcacgttgatgagccctaatggtatcctaattaaagtatgaatatgcctcaagggtagaggtaaatttaggggcgattgttatggtttaatttgtcgatcctgaaattttttgtaatcctttagtaaaatatcattaaaacttaacaaagtccatgtcatgtaataaaattaatcctaatgatatttagctagatcacaatcaaaggtgtgctaattatctagaaagtaagtgatcgacgagacatactataaagtttgagacagagttatggaatgttatttttatagatttatagaagatctataaaaagtagctaagaaatgccatgtggtgggttttatacaaacataaattctaaacaaatcatgtttgcctcatgaaggacatatacaataatg

SEQ ID NO: 134813 - DNA, 416 bp, Zea Mays
cacgtatcctctataatgttttattttcttttgtcttccttatcccaatagaagtcgatggagccttctccctcatcgtacaggtccgctctctggttttatcttctctgttggaccgcgcctcccctttgctcgtcttccagcccgcctccgtggcgcccctgaccttccactagctcggcgacgctagccccttctctgcactggcgctcctctctcttcctcactgctcgcgcgcgcccgtgcttcctattcctggcgccggatccccttccccacgcgtcctcttctccgccaggcatccatggagccgtcggccatctcccctgcgtcgagcgccctctcctactcgagcattaccgccatggtctcaaccctagcgctcggctgctgccccaggccgagttcctttccat

SEQ ID NO: 134814 - DNA, 480 bp, Zea Mays
cagaccttgaagatagactttgacaagaagctaaaggcgctcgcccccaaaaagaagatccagaagaagaccactaaccaaggatgccaaacagagaagaagaagaagaaggcccctctagccctacctccccccagaatagatgactggtctaacgaagaagatgtatccctagccagcctcgacgaccttctcaaggcatttggggacaccttagacaaggaactcgctagtacctcgaagaacgctctcgtgtagtctccccctgtagtagtcttatgcttgtaatgtgatggtgtaatgaataaaataacttggttgaaaacaatttgcatgtgcatgatagtgactctcttccctggcagatggcttcggataaaaccacgcctaccgcctcagggattggagcaggtttcccccgaagagctgaaggggaagtcgttagagaggaaagtgaaacccacctccccgcacctccac

SEQ ID NO: 134815 - DNA, 375 bp, Zea Mays
aaacactctacaccaggcagcagagcaggtcagaaatccctccttccttctctggccctcctaatccttcccttgcaattgcaacgcattcatagaagaagaaaaaataagggggttaggcgagtgatgtgacgtcacaagatttgaaagcgccaaagcgagtttggggaaagccgtgtagctcgccctcgccgtgcgtcgcattcacatcaacgacaaacagtctggaagggaatggggttctgtctgtctccgtggacgaagccatgaattggctccgtcgttcgtttccgggctctgcctcccctgcgtgtctcagtgaagttttgaggtggaagaaagcatattgatctctctgaaccaacttgcaggcac

SEQ ID NO: 134816 - DNA, 1019 bp, Zea Mays
acatgaaaacagggaagtgcagggttatcggtgtaaagtttcccaagactcagaacactgtttcactggacggcgggttataacactataaacagaagggctcatatgcaaaagggcacggcgaagcggtatcatggatccagggccgttggatcttggtctaacggactagattaaattagtcccatgccgaaccggtatgcaatcgtaaccctaggaccacaaatcacggtattgtttttaactctcctacattaaatcatgcgcacacatctacggatctacggttgtagatcacccaggcaaactggtacccagacctcctaatcctgaccgtgcgggtgccaatttacggtcacgggcggcttctccttcctccggcccgacggcggtgccgtacgactaccatggcgcagaacttcaccggtgaggcgagtctatggtcctagcaccccaacccctaacccaaacggctttacacgattcgggaacgaaagcgaatgcggttgagggaaccataccgaggatgatgcgtgcaggcgggcggaccacggcgtgagcggccctgtggcggttcgcgtactccgacgagagattacaggtcacctagtggtgcacttcccccgcgagagtaatcggcagcaccccggagacacggtgatacttcccgtccaggcgcagaaccccccggcgcgacgtcatcgcgaattaagcagcggcggtgggttctctcgtctgtaactctccagtgatgatggaggtcgagctgggagtgggttgcagcgcgctagcgatggaaaagggaagagaaggctgtggctccgccctatttatggccgcccgaggtcggttcatggatggcctcaacggttttccgagaagcgcgccatggttgcgcacctccgatatgcatggcgaaggaagaggggagatctgacgacccggtcccattcatcagccacagaaagaaggaaacgctgtccgggtccacgcgccagcgacggaaggatcagtgagcg

SEQ ID NO: 134817 - DNA, 447 bp, Zea Mays
tgtatagatttgtgttctatgttgtaaaaatatcttgtaaatcgcattaaaagagcaagataactcattgtattccacgtgatttatattcatacaatgatgatcgtcatttgttggtacccatagaaggttttttttcacgtgaacatgctaattattgcagaacttacaatttcctcctctcatcgatcttcctctctgatatatattagcaggcgtagccaagggacatagatatatacatccatttattacgccattacatcaactgtagcacgtcgtctttttaccactccattaagcattattattactggtcacgcgatttggttcagcttctgggacgacaaggtttctatcgcatcgcctagcggccatgctgcgtcgacgtagtattctccgtacttcacctttgtcaccagcgtgaactccttggtcggctccaaa

SEQ ID NO: 134818 - DNA, 613 bp, Zea Mays
ctgaacaagatccagatgcagctcccctcaccaccgacgagccacgcgcgatttgtgccgtcatcgccgtgattcgcgttcggatcgactggataacactcggggttgagtaagtctcatcaccgtggataaactccggccattaaactactccgaccaccgtaccaagcttgccagggtcgcttcggatgagctcgccgatgacggccgtttcacggccttgcgtcacatgccttagcacatccaccacatcgccgtgactcactgtaaccctctgtccatcgtcgaggagctggccacggtaaccggacactaatcgcgtgcgccagtaactccttgttcctccggtcgccgcgcgtcatcctctaattcaccggccaccgctcacgggctctataaattgagcgcgccctcggctccgtcatgtaatcaagcaactagcgcacccacccgcacctcaaatcctccaccagagagctccaattttggattctccccaaaacactcaagaaccccgcttggtttagcctcgccgcggtcagcccgtcacaggtccgatcatgccctccttgttcttgttttagcatccttgtgtgcttgtgatgcttctcga

SEQ ID NO: 134819 - DNA, 308 bp, Zea Mays
gagctcacgcccaaggcaacactcagtgaaacctcagctctgacagcatgcagcggattcccagcgttcgggtcaccgacctctaaagtgatcagaccaacaagagaaataggaagacttgtcaacactggctcctcagactgaactggcggtgatctgacatgaacatccatagaagcggtcgaggaggagccaagctcggcaccctcgggggctaggtcatcctcagcagcaccctcgtgggctgggttatcctcagcagcaccctcgggggctgggttatcctcagcggcacccttggggctaaa

SEQ ID NO: 134820 - DNA, 483 bp, Zea Mays
caatggaaggctagacgatcgtgatgacggtgtgaaggcaaaacatgaggtgctctagcagcgcctcggcacaagaggttatctagtggtgacaacatcaagatgcttggacgctggagaaggatttgtcgtcaaaggaacagtgagacaacgtgaaacaacggctcgagtatgcttttcttgatggacttagcaccaaggttggtttagggagtctcgacgaggttggtaataaatatagggatgaaattgggtttgtaagaagtttgcaaatttagagacctgctttacataactgttggagaagagtttttctcgaaaacttctaaaattcatatttatagaaatgtttacataaccattagagatgttctaaggggatgtttgggaccactccaccccaccaattctagctctgttccgtcaactcgattatggagcagctctactttagagttcaacaatttttttgatatgattcac

SEQ ID NO: 134821 - DNA, 314 bp, Zea Mays
gtgatgttccattatctccttcaaagtgcaaggtcaagagggtgaagcgagcagattgttggaaatattttaaggtggtctaagttcaatcaaagaagaagtttggggaaaaggtgacaaaggccaagtgcaagttttgttacaaactatatgtgtatcaacctgggggggcaacatcacaactgaatcgacatcttgataagtgcactgcctaccaaaacaagttggctgagataaagttatcacaatcacacttgacaatgcttcaaataacgatactgcaatcaccaatttgacatccaagcttcttgcta

SEQ ID NO: 134822 - DNA, 585 bp, Zea Mays
ccgtgccactgcctcggctcacgccaacggccgaacctggcgagctaattgatctgcatgacaattgacaagccaccacccccttctctctcaagcactgtgtcgggctggcggctaggctacacatcagagtgggggtgtgactgtataagcctatcagaaacggaaagacatgggggcccctctgaagaagaaggtactccaggttgttgcaagaatgctagctaggtgcatgcacgtcaaatggcgaaaggattaagcaactaactagctggtgcatttgtgataaggaggggggaaaagaacgagccctatcgtccgtcccggccgctttccctttacgccaggggatcacaggttgggaaaacaacgccgcaaataatcatgtcctcggagaggagagacatcagcgccatcatcacggacagcctctttcagtgcacaagctgttggttccatgtccccgtcgccctttatcttcttcttttttctcggctcacaactcacatgcacggaccatcccgtgccgtgatcacgttcgcccaaggaccagccttaagtcttcactccagggttgacaaggcg

SEQ ID NO: 134823 - DNA, 470 bp, Zea Mays
ctatgattgaggcgtcagaagataatgtggagagtaacgacaggagacatgagcaggcctgcatggtggaggctggggcgtcagggctgtccggtggttgcccatctcactcccccctgccagtaccatcttccccctcttcacccttgagggctccggcagtttgttgctctatgggtggatgcgagaaggagcaggcaattcaggggccacccccgggatctccgtctcgggccacattcgacatgggagggcagaagtcagccttggtggatgcgcgaacgtcgagacgcctatcgcggagaagcaccatcattacttacttttggcagaggaggaagaaggatagtcaacccagtcagctgcttggtgcgtccccgtccccctcccccccttcgggtgcaaaagagttcatcgataagctgaccagaccagcaggtgggattctgagggcgccagtcagaaggccg

SEQ ID NO: 134824 - DNA, 394 bp, Zea Mays
ctggagagagacagttctttgggcctgaactgattcaagaagcagaggaacaagtccgtataattcgagagaatttgagggtggctcaaactaggcaaaagagctatgctaataatagaagaagaccactggaatttgaaggagattatgtgtacctcaaggtgtcaccacttcgtggaatgaggagatttaaagttaagggcaaattgtcccctcgctacattggaccattcctgatctttagaagagttggggagatggcaaaccaactcgagttacctgctagtctatcggatgtgcataatgtgttccatgtatctcaacttaagaagtgtcttcgtgtccccgaggaacagttaccgatggaagagctcagtgttcaaggtgatttgac

SEQ ID NO: 134825 - DNA, 304 bp, Zea Mays
tattgcttgatatccctagaatgcattcactaggtcaacaacttgcaaaattgggatgttttgtattgagtgtagggcttagtattagggctttgcttgagctaagtaggtgagaatcatctcttaggcgagtgacaaattgacttggagtcttaagtactgaaggtaaacttagaacctagagtaactttacctttgaagtgtaaatcaagtggaaggatcgcttgaggagagggatcgacatcaaaaccctaaattgagcccaagagtgaaatggtgcataaacaaagcaactccaaaaata

SEQ ID NO: 134826 - DNA, 334 bp, Zea Mays
cgcttgatagtaatggcattttagaagtaatgcccgagtgacgattgcggtttttatttttccgagtggtgatctggcactttagaggtaatgcctgacctatggagtccatttatactcatgccgacgtgcctttttgagttccgagccataacttcactttttcctctgttgcttctccgcctttctgaattcttgagcccgcccgttctgcccgagagattacgatggctcccaagtggaagagacagagcgccgttgctccgatcattccacccatcgatcccaacagccagcttccgatcattccacccatctctgaatctgatcttct

SEQ ID NO: 134827 - DNA, 513 bp, Zea Mays
ctggtagtagctggagtgtgctagaaaaaattggggtcaatttgagccattttgactggtttgggcaattcaccgaacacttggtgcgcgagattttggataggtggtgaaatgactgttttagggtttgaaacctcccaaagagagagggaaacctgcatggaagctctagggacacatagacacacatggattcacaagatttcacattatttgattgaatgttgagtgcaattcaaaagagtggtggagctcctacacttcactggtgagagaatagagaggctagggagaggagttgctccccacgagaaagggggagagcagcaccaactgaggcggctcgttggagctcggacgacggtcaccggtgaacaccgatggagagggagaggagctggaaatcacctgggcgcagagagacagagagcagcacggaggaaatgaggctcggcctcgggcgcagacgaggaaagtttttttaaaaattagttatgggcacaccagacagtg

SEQ ID NO: 134828 - DNA, 754 bp, Zea Mays
gggaaaaagaaaagggaaaagaaaagaataaaggatttccagccagctgggccggggggtgatttttggcccaccaggcgcgagcgcgcgcgggggcgcgcttgcggcccagttggcccggctgcgagggagcgacggcggggaacgacgttgtggcgcgggcccacacgctagggagggggggttaacggcgttgcggcaacggacggagagggggggaggttcgaccggagcctggtcggcggtgaactcatgcggcggttctccgccgctggtccggttctacggcggggaggtggtggcgaggcacgggcgagtgcgggggatcacgggggtgggatcaatttggcctgcggtggcctatggcggtcggtccgcgacacggtggcgggtgtccgcgtcggcgaagccgcaggtgcggttgctggccacgataggaggtggggaggtgtgcctcgtgaccgtgagagtgtggcggagcttcgagcctagtttgattggacagaggatcaccagagagggggaggggagctcactggagcaatgaagagagcacggcggcactagctcgattggcgtggggaaaggtggaggagttggccaaagccggtgtggtgaagacggggctcgggtgggtgcttttataggcgctcgggggaggcagggggatggaggagacgacgagcaccggcgagctcgccgtgagggcgggaatggcgctaacgccgatgcgatggctcgggcaggcgggggg

SEQ ID NO: 134829 - DNA, 825 bp, Zea Mays
gggagaacccactcggacaccctcgggggctgggtcacagctcacgttacccatccgagccggatcaactccgacaacaccctcgggggctgggtaagcgccagcaccatccttgagggccgagttctctgcagcagccacctctaaggctgaaggtccctcagtcacttccatgggagcagtgcaatccagaccagcctcctgaccctcaagaccacgctccaaggtcgatgaagtgcgggacgctacccgggatgaccccaacccggcattgggcacatcagcacaaacatccatcgcgccaccatctgccggttctgacaacaaatcttctggaaccatgtcttcaagagtttgatcaaagttcgccagagataattcttgcagaccaatgagggcagacaaggcaggagaaggaacaccactactttccccactagctatgtaacgccggctgttcttccgaatcagagggatttcatcctcttcttcatcatcttcatcaacaacacggacagtacacccattggggtcagcttcggcaggatcacacccatcgaggttagcatcagatgggtcacacccattggggtcagcttcagcaaattcaggcactggcacttcctcagcaacaggaacagaaggaccggcaccctgatccaagctagacactcgacgaagacgtctcttcctctttttctgcccctcagcaagaaaagtgggttgatcggcttggcgagaacgtttcgggcgaacattgtcagacctctgagcgtccaaagctttgccggcctcagggatgggtgccaccaccagtgtttcagc

SEQ ID NO: 134830 - DNA, 566 bp, Zea Mays
ccgacacagagcacagtcaccctggactgcgggtttatttcaaataagtggaggggctctttataaaatttgccacgcgaaaggggtatccggtgatatgggtcgtcagatcgaccacggagcgccccgattagatcccgatttccccaaaccggtgtcacacagcagccatcggatcatagatccaaggtcacgatcgtaacacacgccagtcgttggattactgatcatcgaatgagattgatcggcccgaagcggtaccccaaaggaaatccgagccgtccatcagttgaccaacggctccagttttcttccccaatccacagtagaacacggcggcaccggtcaccaggggcggcggcgccatggccggcgatgagccatacggccaatcaagcccccaaactacacaccagacgcccctacgcgaagaggagaactaggcgaatcctatggttagcggcttacctccaatcgatggtcaaggcgagctggccacggtatgcggcggcaccacggcagggacggtgctccggcaagaaattgccagcacaccggcggtccaa

SEQ ID NO: 134831 - DNA, 286 bp, Zea Mays
gtcagggaatgattcaatcccactagcaggcatcagaactctggcatccggtgcgccgacctctaaggtgactccctcatttgaagcatgcactgctattatgccaccataatgtggtggagaaaacccggcgtggacatccatggaggtatgagaaggggagctcgctcggacaccctcaagggctgggttgcagctcgcactacccatcagagtcagatcatcaccgacaacacccttgggggctgggttgcagcttgccctacccacccgagctggatcatta

SEQ ID NO: 134832 - DNA, 386 bp, Zea Mays
agggagaagacaaaggccatagtaccaccataggacaatgtcgaccaagagactgagaaccttgaagctatccaaaaagttgaaatatcgaggcagaagatgctttgggtcgctcatctacaagaatagattgacgaagcatcagaagaattttaccatatgacgagagaagaaaaacacacccacaaccaaggtcatcatgatgtaagagacctacacccacaagggcaagattatgctaccttcgtctacaacaacacatttcctttgttagtcaatctttaaccaacatcacacccaaagctgcacctaatcatgtgcctttaccaacaacaaggtcccacatgtcagcttgggcttgccctccaaccatcgttccctcacaa

SEQ ID NO: 134833 - DNA, 1061 bp, Zea Mays
cgtggacttcacgctgccgtacatgtcgtcggggatctccatggtggtgccgatgcgcgaccagcggagcaagcgcgccgcctgggtcttcctcaagccgctccgctacgacctctggctcatcagcttcgctttcttcgtcttcaccggcttcgtggtgtgggccatcgagcaccgcagcaacgaggagttccgtggccccccatcctaccagatcggcaccctcctctacttcggcttttcgaccctcgtctttgcacacagtaactaatctctctctctctctctctgctagctccgattcttccagttttgcatgcattattattgagctgggaattgaatgtccggtggaatggtcgacgcaggggagaacctgaagagcaacctgtcgcggttcgttgtggtggtgtgggtgttcgtggtgctcatcctgcagtccagctacacggctagcctgacgtccatgctgacggtgccgcagcttgagccggcgatcggggacttcgcctcgctgtggccggggacggacaaggtggggatcatgaacaactcattcatgcgggaggccatgaccaagacgggcttcccccagtacaggctcaggccgtaccaggccacgcagagcttccacgaggcgctgctcaacggcaccatcggcgccatcgtcgacgagacgctctacctcaggctcttcctcaactcctactgcgacaacttcacacagatcgcccagagcaacaagaccggcggcttcggcttcgtaagcgccctcccctccctgcctgctgccgcacaaccgcttggtttgcagtgcggcgcaccatttcatttatttttttcggcaactgataaatatgcatggcccatcgaccgagcaggcattccccaaggggtcgccgtacgtgggggacctgtcgcgggcgatcctgaacctcacggagagcgacgagctgagctcgatcgagcgcaagtggttcggcgacgcggacggctgcgcggcgcagggcagcccgttcacgtcggccagcctcagcttcgacagcttctggggcctgttc

SEQ ID NO: 134834 - DNA, 534 bp, Zea Mays
gtttatgacaatttttcaaaattcgtggactggtctgccaagccttttggacaaagcgaagaatttaacagcaaaattcaagttcaccagaaagatcctaaaagagtggcagcgatcactgccgaaaattgacaaaactgtgagacaaattaagttgattattgaattcattgatattattgaagagcaccatgaccttttgattgaagaatggaatttccgtgagttattgcaatacaaggctgctgagttgcttcagtttcaaaaaatttattgaaggcaacgggcttccatcaaatgggtcactgatggagatatctgctccagattttttcatgctcatgcaacggtaaagcatggccgcaatacaattgcgttgctctcggatgacagtggctcaatcttttcagagcatgatcttaaagctaacctgctttggaatgttttcaaatgtcgcttgggatcctctgattttttggaaaatgtctttgatctccctagcttgctgctcttccacagtgacttgcattggtt

SEQ ID NO: 134835 - DNA, 488 bp, Zea Mays
ttcgccaattgaccacctggttgttgccatcattgtcatggtcagagggatgaaccttatgatgtctagagttcaccatgaagacgaatcgatctcctgaataatagtaatttgagtctgagttgggggttagaatccgagtcggagcctgagtcggaatcagatcgtgatgagtttgagtctggtccgtcatgcagattggatctatggaagtttaaatgagaggcaccacggtcggcaaggtttccggggcaagcctaagattctcaagctcatcaacaatgaatctaaagggtgccgaagaaaatctcgtcttctagtacaaagctcatggctgccattagatccactatgatcgtcacaaattcccctacccgacgtcccaactgtcgagcatgtatgtccttttgggatgtctcaccctcattttatggtccaaagagaacacaattacaaaaaggttatctagttatagtaccagataaaca

SEQ ID NO: 134836 - DNA, 798 bp, Zea Mays
tggccctattattctatcagtagagaatcttgtcagggagctgctcgcctcgcctcgcctgctcctaatccatatggtaaaccacgcacaaatcttctgttgttacgctgagctcagcaataaacatctattcattcgtacgtagcctagccttaagcagccgggtggaagtcaacttgcggttgcggacaaggcggcttgggcagggagcggttgacgacgtcaagccgcctcccaccctctatctaacgcccatattaatcagcgccatgtaaacttgcattggtgacaggtcaccccgtccctcgcccgtccgcttctagaaccggatcatcacgctcacgcatgacgaccgtgcttgcgttgcactcctggacgtacgtagtacgccctgtccaagcccccatgaccgatgcgatgcgatgcgacggaccatgcatcatgttcgcttcagaaacgtgccgagcctgcatggtcctattggtttctaggggaaataaaaaacaattctagctgagctgatggatggcgcagtatatcaatttttcattcacagtaggtgtagtactacttgccataaaatgaccgtgtgcactgtgcggacttgaattcttctctcgaagatgtgtgtcctttttggatggatggatggacgaccgatggccactacgaactgaactgaccacgccatatcctacagtcgatatacttttggatatatattaaaaaaaaggaattgcatctctgcagaagacaacttttatgattggatttctaatttatctgcccgtgacttgc

SEQ ID NO: 134837 - DNA, 544 bp, Zea Mays
caaaccggtatgcgcgatttaatcggagccgttccttaggaatctgacggcgcatgacaccctcacctagatctaatcctagtcattcacagagagatcaacggtggggatatcttcttccccaggaaccacggctgacggcgcatccctcccgcccggcggggcaccattgaaggcgaacctagacccgcggctatgacgcactaaaccctccccgacgagttcctatgcgaataggagaacatagtgcaacagcggaagaaggcctcaccggagttagtgacacgacgatgtccgcccacgacgtggtgcggatccgcggcggagctcctaccacgacgagcaattgccggtcccctgcgtcccaatcgtgccagccgagaccacgcacgacctgaagggatcggaagggagtgcccaggccagctatcctgacctcaacgacgctgttgtcgcaggaacacggcggcgggatctctcttcccgtgggcacgactctagcggcgacgattttgttgttccggggcaaaacgcttgcatgaat

SEQ ID NO: 134838 - DNA, 537 bp, Zea Mays
agtttgttttcgatatgcgcattagaattggtgaagcacttagggtggttgagtatctctaaaccctaaacctgagtcccaaaagtggatttggaaatttagccctgctttttgaaaatgtgcatatatcgaagtggtagggtttggagagcccaacatttttcccatttgaaggtttccatatgttgtggagcaaattggagaaaagagcaaaaggttataggtgctcaaatattggaaccctaagtaaaaatttcaagcaagagatattgttttggtgttttgcaaatagaaccctggatagggcacttaaccttaggtcgggattaaaggggtaaagcataatccaaattgagaaaatctaaaagctttaagggaaaagtcataaaatgatcccaagaaggaagttgaattgcacttatacccctgagaaaccaaaatccccatttgaaccctggaaaaccctaaaactaaaacctaggggcttatgtgcaaaattggtgcacatttggactaaagtgaaaaaaccaagttaaa

SEQ ID NO: 134839 - DNA, 527 bp, Zea Mays
ctaagctctccattaaaattttgcttgcaggatccaaagacggggaactggtggttgcaagtgggaaaagatcttctgggctactggccgtcatccctcttcaccaacctggcgagcagtgcctccaacatccagtggggcggcgaggtatactcgcctgacgcgggccaaacatccacacagatgggcagtggacatctccccgaggaagggctcgggaaagccagttacatccggaacatccaagtggtcgatgcgtccaacactcttctgtcgccaagtggtggtctgggtctgttcgcttcacgacccaactgctataatgtgctcaatggtgctgctggtaacagctttggcacctacatctactatggggggccagggaggaaccctaactgccagtagtagtcaaattgaacgtttcctggagtgcaagcatagctctctctcctttacttaattacacgtgaagaagatataccataccggccccttacagcaactagaatgtgttatggcttactgat

SEQ ID NO: 134840 - DNA, 448 bp, Zea Mays
cacgctcgcgtaatggtcattagcccttttccagtgcccgtgctgccctcgcgccgttagacacttgctgtcgtcttgttcttctaccgtctcccgtgagtctctcgtattccattccccgtgtctcctctcctccttattctcgccctggccgtcgtcttcctcgagctgctctgttcgtctccgcacactgggtgcattcgtgccctgtccttgtccggatctcgcccttccctgcctcgccggttcctgcgcccgtggtccattgccgacctccgacgctggtgagctttccttcttctgtaaccctagggtttgcagattaggcagccggcatggattctgccgccgagctttgtgcccagaagttgtccttggcggctgttgcagcccgtgacacactgaatgcttctgctgccgcgagtattgttgctgctgattattgcgc

SEQ ID NO: 134841 - DNA, 699 bp, Zea Mays
gcctcatctacgagatagttcacgacacatccaatctctgcaaatgtaatgagacaaataagtttgcaaagtcaggatacataaattatacaaacgaaactatcatgtcatttttctcactcacttccactgagacgatcaacaagattccccaatatctgtttttcggctctagccgcctcccattcccttgtatcctgtgctttcttctcatttgtcgccttcaatttgctatgctctgcacgcatcgggctatcaaaactcattgattttgcgaacctacacatgtcctgtatgcgatcgttaatgtacgaatcgacgagctgagatccacaacgcatcttctgtcccattagtatcttggactttattgtacacatcacctcttctttgtcgtcgactcgtcgtaactctcccaaccgcatttcctcgtttcctacaaaaaagagtaagtacgggtgcaacattgcagctgatgcaaacaaaaaataaataccaacctcatcgtaatctaccatatgtccacaaaaatagccaacaccatgctcggaaggaactaatccatacttagcttcaataccacatttgcatagtactggatcaaacttcaactctttcgcccactcatttttttcttttcctttgcctctggctctgaccaatgggacataggaccatacaaccactctatgaaatgac

SEQ ID NO: 134842 - DNA, 697 bp, Zea Mays
gcaaaatgtttctaatgtcaatcaagaccatatgttgcacatgcggtttgctttgagtactacggtgatagtcctctgacattgcgtcaaggtatctctgccataattctgccacatcattcggctcgcagtataccagtattgttgcaaacaaccttcgtagcgttgatggcatttggtaaagagcggcttcgttgagacactcatctattgtgtcgtctgcttcaagcagtcccctcctttgtgctgcctcacgaaaagatggtagtgtgtcaccatctattgtccttagatccgcataggaggtagcacccgtcacatggtttaagagaagtcgaagataaaagcgctccccctcagctagatgagcagagactattataccgacctgtccacccatgtttcatttcctcctttgccacaccttgccttgctgcaaagtgtaccactcaggaaagtcatgataaaggatgccctgagcctcctcgtgtggcctatttgcctcaaaatatgccgtaacgttgacctatcggcacctggatgttggacaacaggatttactttagcacactcgtgaaatgataccatgtgcatgttttcaagatggagctgcagttgcatcactcgtggagagttttgacttagatcaaagctgaatatcctccaaatggcttctggaggggtcacccacctagca

SEQ ID NO: 134843 - DNA, 405 bp, Zea Mays
tgacattgaactggtgtccgaatgatagacagagaaccttacaatttgtccattcccatgaatttcatcttccctccacaatgaaatctgccaaatttgtctttgtcatcaccaacttcttgatcaccctcccctacctattggtcgtcctcaaagtcctcctcaaccggtgcaacacctgaggaaaattgaacttggcattaaaaatagtttgagttacttcttgggataattaaaaaagatataaagaagtcaaattctgttgtgggtaccttgatggtcatcaaatgaattgtactgtttgccactgtgtttttctctattccatcatcatctgaaaagccgaagtggtcatccatttcagattcccttccagccttttaagcgcttaatcttgtttctctg

SEQ ID NO: 134844 - DNA, 436 bp, Zea Mays
gtgcattgatggcagctcgcgatggtacagtagaccaaaggggatcagatcgccagcacggcaatctcaccgccggcgacctctctgcgcgtagattcatgctgccgccgtcctgatccgtgctcaccagtgcttggactatgcttggggtcacgaaaatattgccgtcgttgataagtgcggtcactaaacaactccgaccaccgtaccaagttgccacgaccactacggataacttcgctggtgaccgccgtcttccggccttgtgccacgtgcctgagtacctccaccgcatcgccgtgaaccccttgtgactctccgtggctcatcggagtgactgccacggtagatgccatagattcacgcgcgccagtgaactcttactcctccgactgccgcgcgtcaccgctaaaattcccggccaccgccctcctgt

SEQ ID NO: 134845 - DNA, 371 bp, Zea Mays
gtcagatggcgggtcctgtgggtgtactactaatgctccctagctgaagctgtgtgcaagcccaggtcccagtcgaggctacctcctgggggccattgccaactctttcttaggtatgctggtctgcagcttcgacaaatcgagcctacatcccaggggggcaaggtaccaaggaggaatcggttacaccacacacaacagggacaagtggtacacagataagtgctaatactgcttgataaatagtactcaaaagtacttacaaaaagcaaaagtattacatccgccttcaagtggagtcctagctccatctctactctacaggtatgaactacctccacaccagtagggtcgcatgggtagctagctcc

SEQ ID NO: 134846 - DNA, 396 bp, Zea Mays
accaacaccatcatcaagtactaatgctccacctgcagcagcacaaccacaatcaggtatagacaatgtcattgtggaagatgatgatactgttattgttgggacgaagaggaagctgaaatctgatgtttggctagagtttgaacaagtaactgttggtggtaaattaaaagctcaatgtaattggtgtaaaaagcaattagttggagatagtaaagccggtacaactcatttgcgtagtcatcttggaagttgtcaatcacggcaagttagaaaaggattaaagcaagcaaccttgaagttgagtaaggatgagcatggagcaataatagttgataagtatgtttttgatcaacaagttgctaggaaagaactcgcaataatgatatgtgtcca

SEQ ID NO: 134847 - DNA, 444 bp, Zea Mays
gcatttctcaagattaagccctacaaaaaagggggatcagcacaataataagagatacaaaaacaatctgtttataggtcaaaacatctttaccttcagaatgttgtaagcgaggctgtctgcaaggtcatccttcgacattgcagataggccaagctcgagcttcggaaaccctatgttccttgccatctcccgacaaacagataactccttattatccgaaaggcagtacagaaagtcgtcttcgtcagtgccattatacaccaaggattcttttgggtactttaaatccctggcatagtgcttaacttcggcaatctgctcttccgtcaactgtttacccgaagcatgtcgtataataaaatctagctcttcagtagacgcttcaggggtaggagatttaaccttctttggtgtgccttctttttccaagatcagagcggc

SEQ ID NO: 134848 - DNA, 284 bp, Zea Mays
actctaaggcccaaactgccatcagcaacaggtggattcgaagcaaaatgagtgaaggctttggaaggaggcaggttctaggccgagtatgccactggggcaccaacgtttgataacttgcctctaagaatcatctcaagtcggctcaccaagtctgcggagggaattcttctgttggtaacccgagttgagtcagctaggcctcgatacagataagccgggtaagccctgtccttcaacggctgaatgttcttgaaaacaaaatcagcaaccacagcctctgc

SEQ ID NO: 134849 - DNA, 305 bp, Zea Mays
tgaaccttcttttgtgatcgaggagcttccatcttcatgatagcttcaattttatccggattagcctcaattccccggtggctgacgataaacccgagtaactttccagttggtaccccgaaaacacatttttcaggattaagcttccatctataccgtctcagactgttgaaaaccagttgtaagtcttcgatgaagtcttccgaattctccgttttgattaccacatcatctacgtaggcctcaacacgcttgcccagtgatcggccaagcatgtttgaatggctctctaataagttgctcca

SEQ ID NO: 134850 - DNA, 356 bp, Zea Mays
tgtttgatacttaatcatgttcatgtccatcttgaatttttttgataaactgatgagagcgactacagatccattccatgtaatatgtagccatttagaaaggtagaattatctagccctagatttatgtgtagttacaacaatttttgtgttaattctctccattagatataatactcccaggcatagcctgtgcctatattagttcatattgacgatctagactcttaaataatctatgaacaaaacaagaacatggcaaggtccatgccaaatatatttccagaacctcttgcacaacagatcccatgtcaagaagtattttgtatggaccttcattacaatacacataccat

SEQ ID NO: 134851 - DNA, 480 bp, Zea Mays
tcttgacgcctcccccatttttccatacagtttgaacagactgtttttcattcttgatgaaacaacacacaattctcctgcgttgttcaagaaaaaaaaatcctccatcagggttacgctgctagaaaaatcagaatgaaaccatgtttagcagggctaaagcatccttagctgcaatgatgaaacagttggcaatatcatagcagcatggcctctaaaaggctatagcatgctatttataacaatggaaaataccatgtctacacctccacgaatgtgaagtccacacaagtggtcccaaacaaaacaaagccaccgctagcagtccaccaatgcccattatggatttcatcattggccaccaaaaacaaagccgttatcctgctacgatatcatacatgcctttacaacctaaattgagcttagttacgatagctctcaaaggttacactaaacggcagcatgtactcccagcagatg

SEQ ID NO: 134852 - DNA, 468 bp, Zea Mays
ccgcactgtaggctgtagcctcggcactgacttggttaaccctggcaatgctaaatcccttgccaggagtctgttgcttgttctgagctggtgcacttgaagcatgtagggcctatcttctgtcatgcaggcctcgtcggggtgccagtgggggtagccagacaagtgtggggtgtctgtggagtcccctgtggagcatactaagctgggtgtggtcctcctccgggacgagctggtgtactctggggtggcacgtagcgagggcgaatactgctgctaccctgcccctgggtaatggccttccacttcatgtctcccagttgaacacgcttgtgttcaattgctagagctttatcatggagcctctaaaatgatgggaacgtatgagcaaccagtgcatactgtagtggcccattgagtccttctgtgaagtgctcttgctttctctcatcatcagccacctcatca

SEQ ID NO: 134853 - DNA, 601 bp, Zea Mays
ggaattcaaatccttaggaaacttataaagggaatatctatttatgactataatcgtgagactattgcttttgtatatttgacctaagtagtctcacatatagagaataagtttctctatggaaatgcgtaatctaacatgaaaggaaaaatcaatccaatggtttatgattttttcttgcttaaattggatatgattcttctactttcatcgctctccatgttatgaattagatttgttcccataatcttaagaaattgactatgcttgttttatgagttaaaactaagcataacatgataatctagttcatgatatcaagtttccatgctttagtaatctacttttcattccttctcaaaaatgattacaaaaagggaaactagtacttgtgttactaatgacatttctcttgagcatatttacgaaaatctacaaaagagtaagtgcatgttcaatttattaaaagagacaagcctcaagggttgctcttcacctaaaagaaggaaggtaaaagcaaaggtatggaaactcatcttcttactcaacaatagtttccattcaattggtatttattctaaattatcttaatataccaatg

SEQ ID NO: 134854 - DNA, 461 bp, Zea Mays
aattttttgacatccccaggcgccacataaaaccaaaagtcccacaagttgccccacttactctttgcacaaggaacaatttcaatcacctcagtcgaagtcttcctagtcctcggcgtgaacgtgcaggacccaaattgtgcaatcaaaccacctatctttatttcatgtcaatgcaagcaataattcttggcgaagacctcagcagatggttctccgccatacgatgacacaacccagacatacttcgttaatgcaaccataacatttggcgtcaattgatgaatttgaatttcaaacttccgcagaacttccactatgaagcgatgtgccggtaagagaaggccagcagtgaaaaacgcctcaaacacaaccaactccccctccggctccgagacatcttgagcccccgacgccctcccgactccgttctcaaaataacctagacactgcatctcgag

SEQ ID NO: 134855 - DNA, 577 bp, Zea Mays
taacgttgtgcatcaagtatttgaatgacatgcaccttgcacattctagcatcctcagaactagaggggatcacaacataccttggtctaggcataatatatcaattgcatcacaaaaagataccaattgaatagatgacataatacaacttatgcctggtggaaacaatgcatgcctcaagatatatcacattttaaaagcaacctaggcacgcttcgcacatgatggtcattgcacaacatataccaattgaaaaacgacaagatcatacatataaaaaccaatatctaagcgcaccatgatcacaaagtaattttcttaggtacatcaatttaaggggggtcatcatattaaagcataaagcacataatccaagatactaccaattgaaaggcaagagcacatctatgatcacaattaacggaacttcaagctatttaatgaatttgcatagttccattctccataccttttccttttacctgaatgcaatgagatccattcttctaggtagtatgcagtgggatcacttgttgttaccaattcatggcttctttttgcttatgcacttccttc

SEQ ID NO: 134856 - DNA, 453 bp, Zea Mays
tccagccagaagcagcaaagaaaaatgatgttagaagggtcaagtaaatgactttttccaaagcatcaatcatttctagtgcgccaaatagcccagaataaagcaccacaatcaaataacactaaatgagccattttgtcttttggtttacataaccaattgtcatacagatttttgatactattcggaatcagccttaaattcaaggcaacttgaattactctccacatatatttagcaatggggcactgaaaaaacaggtgatcgatagattcatccaccccacagaaacaacaattcaaagaaccaatccaactccttttcttcaggttgtccttagtaagaattttatttcttaccactaaccagaagaaaaccttgattttatgaggcaatttagatttccacaaaaacttatatggaatcaaaatttgatcttccattttctttttg

SEQ ID NO: 134857 - DNA, 845 bp, Zea Mays
ccagcgatctaataaagttttttcttcttctgttatttgccatcaagtgaaaaaaatttgtgtttgcatcacccaggcgcatccagacgagtcttgaatgttgcttagctcttgccttttaaactgacactattccgaggattttcaattttagacttctcctgaattctagctcatccccagagagctgtctggattcctgctctttctcaaggaaggtaaggacggtctgaataattgctagttacactttaaaattgcctacagtctttcgactccagatctttagagctttagccgttcgggccattttcacatgcagccgaaggatggcatctgaggaactaacactagacgtccacgcttgctgaaccacctcattgaacccatcaatttttgtccaaaaagcctcaaatcgaaacccctatagaaaccaaaatccgagcaaccttgcataactagagggcaatgatccgaggtcatggtcccaatggcttgcagatcggcctgaggaaacgtatcatgccactccgtagtcgccaaaaatctgtcaattctagtcatcgtagggtcgtcttgttcatttgaccaagtgaataatttaccattgagatcaatctctaaaagctgaaggtagtcaattgtgtgattgaattgtcttatcactcttctatttattgaacctttgtttttctcccttgctctccttatcatgttaaaatcacctaggatcaaccattccggcttcatcatatttcgaatattgcgcagctctgttaagaaagtcattttctcattctcaggttgagggccataaactcctgtaaggtcccacaccacatcgc

SEQ ID NO: 134858 - DNA, 307 bp, Zea Mays
cgccacgagcagcctgtccccctaggaaactgaccttgagctcgtttttgtggagccaggttgagaagtcagttttgcacgcttagagtcaggctcatgagttggtcagacaacgaaacccaggagttgcaacccgacaacgtagcccgaccactgagccatgtccgcaaacacgcccttaaaatcgagctactgtttaaactgggacgagggaggtccttgaactcgaggctataggtgtgatgatatcggcacaatgggcctcgaagtcagccgaacccttaaggggtgtttgtgatctagtttt

SEQ ID NO: 134859 - DNA, 304 bp, Zea Mays
gtctgtccatcagtctaagggtgataagtcgtactaaagttcaactttgtattcatattctcatggaagcttctccagaatcttgaggtaaactatgaacctcgatcggacacgatcttcgttggtactccatgtaaacacacgatccgagccatatataactctgcgagctgggagcctttataagtagtcttgacgggaatgaaatgagctactttagtcaatctatccacaatcacccatatagcatcataccctttctgggtgcgaggcaatccagtaatgaaatccataccaatctctt

SEQ ID NO: 134860 - DNA, 401 bp, Zea Mays
actaactccaccaaatttcctggaggtagagctgtcccaaacagggcctaaataaacatggccttagaaggttaaggataagtgacatacaggaaagtttttcctagtgcgcacaaatgaggataaagtgtacacaaaagtttttatcggtgctcacgaggataaagtttgcagagaaaaaacatggtttgtggggatgatgttgtgttataccaagtaattaccactcgctcggggagtggctggggtgttacagtgtagatcacatcgtcaattaaccatgcatatatgtctgataaaagcgtcaactaatgaaagttcgaggctcaagtgacacaacatactaagttcgagggacccaaatgactccaacatggcacaccgcgtcaacatcgggtttg

SEQ ID NO: 134861 - DNA, 475 bp, Zea Mays
cgggtagtggagatcggccacagggggcccaaatccacattcccggtgagatgaagcgaagcggggcccaaaacgtgagccgtcagcttgaccgccggtggcagaagaacacatcggcgccgatctgggcgagccgaggaggccgggcttggagaagccgtcgacgcgcgccccttgggaccaccggatctccactttggacagctcggcgcggacggaatccatggaagattgtagggcgtcgagggaggattccatcctggggcgccaagcgtcgaacgtgtgctgggtggactcgagggaggtgacgcgcgctccggtagtggcctcccagtagcggacgcggtctgtgagatccgcatcgaccgccgaaaggtgagcttcaacgtccgcgcggatggcggaggcgaactcgtcggagtggcgagcgaagtccgccgcctgggactccagcgcgccgacgcggagttcccac

SEQ ID NO: 134862 - DNA, 350 bp, Zea Mays
cgacttcatatccttttgcagtcaggctctaataacaatgtacccatcaataagtgattcaaattctcaagcacaattaataatgctgcaaaactacacatttgtgtttctttcagctgaagttaatataaatgtctgctgagttattttattcttttggctgaatatagtactgacgagaatggaactatatgaaagtatcataggtatcattgatgagaaaataaaaaaacggtgaagagcatcaggacatgaaccgctcgcgatcgtcgtgcgcctgcgaagatcccctcctcgatcagctttggccatcatggtcaattcagatgacgacaaataagaaaagaaac

SEQ ID NO: 134863 - DNA, 390 bp, Zea Mays
cggagttgtaggcaccggcatccgccactgcgtcactgacgtcctcgtccgtgtggccgccggacggaaaatgagatacatggagggtgagaggcacgtacccttctccgcgtgacgcgggaacaggctgggggagagtgtcgcctgacgaggggacgggctgggtggagagctttgccgaggtctaggggcttccgccggtggagccctatgtgtgttggaacgacgtcggagacctaggtcttccaccagtggagccggacacgggcttgatcggtgcctgggtcgaggaggtttcactgatggagctcggctaaggctgggacgacattacggagagcaacagaggcatggcaatggggaagagatgatgctggtggcggcgacaag

SEQ ID NO: 134864 - DNA, 631 bp, Zea Mays
caagcattgggttggcagcccttggtgacgcgtcgtgtcatgatctaaatacggtgtgaacaaagatcgagttgttgcttccttagtggtctgctacatcgatatccacgcgtagcgaaaaatgagtaagggtcttcatatcatggatgggttcaaagagtaaagaagttagtcgaacgaactaggatctatttgggtagttagaatgtagggtcacttacaggtaagttaagtgagttagtttaggcagcgactaatagatgtgtaaatatcttatgcgttcaagagattaaatggaagggtcagaaggcgatggaggctgcaaatagaaatggaggaattttgattaataagagcctcaaaaacggtgtggtggatatgagaaagcaaggagatacgattatcttagtcaagcttgtcatggctgatttggtcttaaacatagttcgtgcatatgcccccccccccccccaagtaggacacggtgaaaatgttgactcttctgggaagacttagatggcatggttagagctataccaactagtgagaagattttcattggagatctcaatgacatgtaggtacaagtagaggttttgagacgattcatggaggttttggccttttggta

SEQ ID NO: 134865 - DNA, 306 bp, Zea Mays
atctacgactacgcgagaaccgaaccaagacgacagatgctacggtcgagggatatcacgtttacactaagcgaacgtgaattacaatacttagttcgacgtaatcctattaacggacaataatcatatgccgagtaaaattactacttagtcccgattagtgtgttgttcgaataaccgttgcttaaatatatatttaattagcgtgagctattctaggtgagatgaatcattagcgtgcgtaaaacgcacgacgacacgtgtgaacagcacgcacaacgcgcgcggacagcacgcgacgattta

SEQ ID NO: 134866 - DNA, 570 bp, Zea Mays
gaaacacctggcgtctagctctaacccttggctcctcatggcccatataaaaacccctactttgataaaagcttcaggggtaagttgatgaagaaaaatttcaaaagtttttagaacttcaaccaacatcttgtccaggggaaccgaagtccagctttcatgaagcttctgaaaattaccacttcatcagctttgggaagaggaacagtactctcccctccagccctcacgatggaaatatcacgaaagtatctccctttcatcgcttcgatctgcccttgcttgatagtcgactttccaaaaacaacatggcttggcctccatggccggtcttcggtatcttcatttccactttgtacatcaaaactctcgctatcgctggagttttcagataacccagctagcatttcattggtgattttctttgtgttggtcctctccatagattcgtaaaatcgaccaatgcgtggtcagtaatcttcttctcctcagccattcaaacgatggtcgcatagatgccaaaactcaaaaagttaatcaagcttcagaaagcaaagaaagctaaatggc

SEQ ID NO: 134867 - DNA, 1156 bp, Zea Mays
gctctagcgggcgcaaccccactgcaactgattgggtgggcccgctggtcatcaccagcgcgcgtgctgcgtatctcgctggcaagtgggccgtccagtcaatggctatgtcgtctggctctctctaactgcgccacttccacgagggtcccacctgtcatcccagatctccgcccaaaaatcgcatcgccgcaacgaagctccgcttcagccgcgctcgttccgggatcttctccacgggcggctatccacccataaaaattcttgcgccgcacttaccaagacccgttccttccccctgcttctctctcgcgcgagttcagctaccgcagacccaaatcaccgccgcctgcgccatccaagacagcgagaaaccgccgccaccgtggaccattgcctgctggggcgactgctgcatggatgatggctttggggcatcaccaacctgtcgcgaaccatctggtggcagtttgaggcatgggggagcacctgagcgccgccgattcctcgccgtcactcctgcgccgctgcgcatccgtcgctcgtcgtggtcaggatcagctgcggcaaattgtgaggtacatgaccgttcgttgcactcgccagtcatagggcatcgtgtagcactcttcgaattaatgttttgcgcttggtaccgatgaattgagggagccacccatggcgccaccgcaccgggtggctgtgtcgctggtgaacctggcggctggggggagatagcttccgtgccattggatccggaacgagcgggcacgattagaagcagggtaccgtttcgttctgggcaattctggccgttggattgggatcgtcggatcggtacgatgatgggtgatggcgtgatcatccaacgtccgatgcggatccggcgctcgggactcaatccgttcattttaaatctgatacgtccatcacggatcgggtggtcaggatttgataccggttcggttaaagagtgttgtaatctgagccgtccagatcagatcgggtggctgagacatgcccgtttccctttgccgtttgcgttttctaaaagagaccctaggagaatagagtatcaacccgccgtccaccagtactgttctctgagtctgagaagtcttacgcagaggcccctgctattctctgtttttatgcg

SEQ ID NO: 134868 - DNA, 1225 bp, Zea Mays
ggtctactcccaatggctgtggactgcaatcttcggcttcacagccaacaatgtttcctctggaacctccagggatgaaagattctctgtctgatatgttctcaggtttaaatgtgtctcctttggaaacaattcgagcttcttgggatgaagagtccaactgcatttatcaagcgaaaaactgaacgaacaaaagcatccatcctccaaggaaaagaagcagggccctgcatcaatttcattatccatgtatttcaccgggagcatagtgatggataagttaggagcacgatcattgtcagtagtagtgacactgatgcaataagcattgatggatccatttccctctgacaagccaaggaataaagagccatgtggggtggcgcgaccaacgaatggtagccccttggtgtcaattttgtgccactcgactgaattggtgtcaaatgcatatgtgccccaaagttgattgaatgataccagtatgtaggtgtcgaccaccacataagacgtgataagtacaactggcagcatggtataaacaaatggggtaatcttccaagggaagcaaggtggatgtggtagctcaatccaggagcatccctccaggtgggagcggtcgtcaacaatgacaactttggctttggaaagatcgagtacctcgaaccagggtgggaaatcggggtctgtgaaccagcagagagtcttgcacagagcataaaccttgtcccccattgttgttaggacagggcaccactttgtagaattgagagtcggcccgtgaatgaccttcttcgtcttggtgtcgaagatgacggtgtcacccggatcacccccgaccctaatgatccacgcgcggtgcactgaccgtagggacgtgaaggtcataccgccagcaacggtggtcagacgggtaactcggtgcaggctcttccgcttcacccgcgaaggaaaggaagtggcgacgcccatcttgtacacgacgtagggcatggaattcctagaccaatcccagtggcatgccacaaggtaggcagatcagacctggccttcatacaactcatcgctgacgatcctcgtcgggtcgagatgttctgtttcttgcatcagcggatcgccgtcaccgccgcacacgatctctagatcccccatctgaatctgatccggatcttcgcttccttccagctccactgatggcttgacccttccatgacggtcgcccgtc

SEQ ID NO: 134869 - DNA, 400 bp, Zea Mays
gaaggctcgctcgtccagtttctgcaagataaccgagacatattcacatggcaacctgcggatatgccgggagtcctgagagaactggccgagcacaaactgaaggtctatccccaggcgaggccgatccgacaaaagttgcgtcgtttcatgcccgataagagagaagccatccgtgccgagctagctcacttaatcgcagcaaggttcattagagaagtactgcatcttgagtggttagcaaatcctgttcttgtactcaaaaagaataaagtggattggcgcatgtgcgtcgactatacagatctcaataaacactgtctgaaggatcccttcggacttcctagaatagatcaggtggtagattcaaccgctggatgctctatactgtcattcttgg

SEQ ID NO: 134870 - DNA, 350 bp, Zea Mays
tgcggattacatggcgcaaccggcctggccctcaatttatagaagggcaaagcggtggccacgaatttgaggaggacgcgcggcggccggaatgacagggtgagtcatcggcgcggctgacagtggcacttaccggttgagaagctacagcggtcatcgtcgagctagggcggcaagtgacgacgtgtttaacgggtggaaacgtggcaccatcgcggcgcagaacggcaactccggcgatggccacgaagccacgtcgccggcgtaaaaggtgaagacagcagggctacagtagttcatacccatcggcaaggagatctttccaaggtcaacaaaatccattcccccgc

SEQ ID NO: 134871 - DNA, 925 bp, Zea Mays
agaaaaaggaaaaagtgaagcccttacctgggctgaatctcctgtgtcctcggcccactctcccttgctcagcctgccagcatgaccaagcctgccttgatgccgacatgtgggcccatcgcgtcattctcatgatcccgacgttggcttgtggtgtccccatgtcaggagctccttccatctcacgtcatgtttggagcgatgctactaccggtccatgccacgcggaatccggggctccctaaccaaatcatcgggattctcggccaattgcgtttccccgcagctatataattgtgcccccttgggccatactccagcaatgctttgggcgccgttgccgtgaagttgaagaagaccgccgccgctggggaaatcgcctatgccgctgttcggggttcgtggggggatgagggtccatcgccgatacacaccgcacctatccgtggccttcgcgggctaaggcatcaaccggaacacaaccaattgctcaccatggatccatctccgttgtcgtccacgtcacgtcgttgttgggttccttcatagctcaatcggctggtaagtaccccacacaccaatcgccccgttgccctcaacgttttgaacctgttcggccatgggttggtgtagcggtgggtcattgctccttcgccagccatggcctctgtcgtggctatgggcggcgccgccgaggctcggccgtggggaggagcctcacgtgtggacgtctatctatgcagcaatggtcccgatttgatcaagccgataccctttcgcctttaatcgcgggccatagattcgacatctgacgtgccggatcaggccgtggcgttggcaatcgtggtacgtggatctatgatcaaatgattggcattgcataccgatttgatttcaacgagatacactctgtgttgttcaatgg

SEQ ID NO: 134872 - DNA, 558 bp, Zea Mays
cgaaaaatcgaagtcttctctaaagaactccgtacagaagcctacgggagcggcctaatcaacgaaagcgcgcagcttcatcacacaaaattatggttacatacttacagcgagggcatcacacattacattggctcaacctttaggatgatacccatctccctatagttgaacaacattatcctcaattcctcacccgcaaacagacttcgtagctccccctcacccacactcgccccagccggcgaggacaacaattcccgtttgccagtcccgtccacacgaagacgaccaccctccatttcaccacgatgacgcctatcacttcacaacaactcacccactctccatttcgccaccgcccttcgccgtctacgcccagcactcgcacccggaagatcctcagcacccatcacacgaggagaagtcttcgctgcagccacatccaacgctgcaaaataatccaagtcctcctccgaagactcctctgtccacacaatcgaactcccagaatcatcagactcaaaacacttagacacagaatcatcagaatcgtct

SEQ ID NO: 134873 - DNA, 468 bp, Zea Mays
tggagatcgccatcaacgccgaagctttctgcgtcaactgttacggcatcaacctcgacgagtttgatcttatccttggcgtagagttcctcagcacactgggacctatactgtggaatttcaaggacatgtgcatgtctttcacgcgggcttcccggtccgtgcggtggactggcttgtgctcgtccaggggccaggcacgcacaccgacctcctgtgccataccgtccacacccggccagccactcatggatcgcctgctccagcaatttgaggtggtgttcaccgaaccagcagggctgcctccacctcggccatacgaccaccgcatccatcttccaggcactcctccagtcgcggtttgcccctacagatacccccagctccagaaggacgaactggaacgccagtgtgcagccatgcttgcccaaggcatcattcggccaagcacctcgccgttctctgctc

SEQ ID NO: 134874 - DNA, 642 bp, Zea Mays
aatataggctttgttgattgtgttatgagaactaatgtggctttgacaagagcaaagtatgttaacttttgttcctttttgttggcttaattaaattttattttttttgttggcaaaggatcaacctttggatacttagttaattcaagatcccagtacatactcatctaaataattatttcttccacaggcactgcatgtggatccttggacatgaattcaacatggtatgatttagtcaaagacgcgaaggatcgtgaatgtttctttaaagctcgcgatgatgatttttttgctagaacaatggatcagtttagacttatgcaaaactcacaggtgacagacaatgtttcacgatggaacattgaatgccagtgtgctccagatgcacaactcacatgtgacaaccatgctacaataccagacaaggctccagatgcacaactcacaggtgacaaccgtgccacaataccagacaaggcacaggttgtagagcctgcacatgcagagcaggtgcctatgcagtcagaaagagctgcagaaaagacatggcagctgtgtcttaatcagctctcgcacattccttcttttgctccaggtgaacaactaacagacgaaaaggttgtagagcctgcacatgca

SEQ ID NO: 134875 - DNA, 313 bp, Zea Mays
cgagcgtgagtttctcccatgcatttataggctaagatgggaatatgccctattacatgaggttatggtcaggcgaaacaagcagtggttaggcaacatcgtatactttgtcgttcgtcaggattcctgctgttcaggcgacactgtgaatgatgtttaccttcgtcagtcctggcatggtagctatgcacgagtcatcctatcatagggtgttatgttccattgcatctcacagcgggctagccagtgtcacttttgacttcccttcatgggaatggttgagctgatgttagtctccacaccacgacgggtg

SEQ ID NO: 134876 - DNA, 516 bp, Zea Mays
tatctgctgggaaatatctgtcatatctatacagatcataaaagcttgaagtatatcttcacccagtcagaattgaatatgaggcaaagacgatggcttgagcttattaaggactatgaactagaaattcactatcacccaggcaaagccaatgttgtggcagatgcactgaaccgtaaggtttcctgccactgtcttatggcgaagacctctgacaatactttatgtcaagaaatggaaaagctaaacctggggatggtccaacaagggaccctgaatcagctaaagcttgagtcaatcatcttgcaaaggataattgatgctcaaaaggataatatgggtatgaagcacatacgagagaaaatagggactggaacagccacatatttcaaagaagacgatcaaggtgtgatatggttcaataaccgcatagtagtgccgaagaatgaagaactccgccagcaaatcttagatgaagcgcatcttagtcgctattctattcatccgggaagcact

SEQ ID NO: 134877 - DNA, 526 bp, Zea Mays
aaagatcttggcgcctagatcaacttgggtccgatcgcggataagctccccgtaccacttgctcaccgaccgatcgggataagacctcgccgccattggccgattaccgccgtgcgccacgtgctaaagcgttagaccacgtcgctgtgaatcacgtctcgcatgcacggtgatcgccggtgtactgccacggtgaaagccactaacccgagcactagtgacctcgtcttcctccgaccgccgcacgtcttcatccaaatcctcggccaccgcttagcgatcctataaattgatggtcgggtctgttgcgccatgttatcacgaagccaacgcaccagctattgcctcaaatcattcaccagagaccgcgaatttcttacttcccccaatcctgtttctgccaccgcggagacaccctcgccgcggccagcttattcaaggttcgttcaagcgctctggtcgattgttctagcgtccttaggtcctcctcaagcttcacgactcctttgattgaactagaccgccc

SEQ ID NO: 134878 - DNA, 376 bp, Zea Mays
gaacaacagtatcacccatcgggtttgttcaaaccttccatggtcttgaggaagtctgccaaggtagggatcaaagatgttgaatcatcaaaggcgactaaggttgttgcgaaggaggtagctagaggcctagagcgaaataagccatagccataatcactactgtcgtggtgatgataccctcgctaactgacacattcgaagctcaagttctagctgacaagaacatggcagccccaagcaagctcaacctttaaaagggctttcttacgatctccctttcaaagaagatgatgacaaagatcatgaagtgcatcaacaagcttgggcactaaagacttgaagagggtagagcatttgaaccaaaaaatgaaag

SEQ ID NO: 134879 - DNA, 519 bp, Zea Mays
acgtcatcaccaaaccacatccggactgtgggtacggtgctaaaaggtctctgtcgaacacaacgatacacccccgaacacatcctcacatatacccttgctgactagtggggccaatcaaccctggtcgtgggggccttagcaccagagtctctatagtgaccacatactagaagggatgggacaatacatcataccgagtgtatgcctacgcatgttggagagtgatgtaagggcatgatggaagacggagctaaaccaacctcgaccctaaaccccacggtaagtctactctgcgggacccaccaagcgccgcaatgtcaacatcgaactcactacagggacccgtataccggacggatggggcagtacgacatactaggagtaagacatcgcacgaccctatggacggcgtcaggagggctacaccacccagtgacaacaagtcaagcccccaatagaatacaggttcccactgtaaagtccacccttgagctataaaagggcaggacaaccttc

SEQ ID NO: 134880 - DNA, 585 bp, Zea Mays
ggacgaaatactttcttgctagctctgaaatgaatgcgacttctagcctaggtggaagcacctctctagctatgcttctccgcaatcaataaatcatttgcaaaggtttgtcacagcttgccagtgtttgctcacagtttactggtcgtgcttctagcctcggagcaacggggaaaggaggctgttgcgtcgatggcaggatgaaaggggacatagtcctaaagcagaggctatgcttctctgcgatcaaagaaatcatttacaaaggtctatcacggcttgccactgtttgtccacagtttgctggtcgtgcttctagcctcagagcaaggggaaaggggctgttgcgtggatggtaggaggaaaggggacagagccctaaagcagagatgattttgaggcgcctggagcaaagcagtagtgggcataggcaccgtcaccgtcagcaaggacgcgatgacactcgatagacatccacataggctctaggaatctaggtcaatactcccaaagaaggcactgtcaattggaacaaagggtggtaagtgttttctttttatttatttattacagtcctaaatgaat

SEQ ID NO: 134881 - DNA, 610 bp, Zea Mays
gcgttccccgaggtactagcgaattccttatctaaggtgtcctcaaatgccttgagaagatcatcgaggcttgctagggatatatcctcttcgtcggaccagtcatctattttggggggaggtagggctagaggggccttcttcttcttctctgtctggcatccttggttggtggtcttcttatggatcttctttttgggggcgagtttctttagcttcttgtcatagtccatcttcaaggtccgataggtttcacgggtgttggcttcctcgccttctgctatgttgagactctcctggagggatgccttctcttgcttaagctctttgacttgccgctctaggctttccactcgggagtttaggtgggtgcagtgggaggagagctcgtcgtagtggttgtcgagggtgtggaggtatccgaccatgtatacgatagtggggtcatcttctgtgggatctcctcctgacagagcctggagtcttttcctccaggtgggggtgtttttgttgctgggtgggaaatatcggaggggggtctcagagatctctcggctatagttttggcacagttgtttgagggcttttcgagcaacgctctggcaagtgt

SEQ ID NO: 134882 - DNA, 514 bp, Zea Mays
ctcaggtgttagtagaacaaccacaaccttccaaaccaatttttgtccaccaaccccaagaggaggaagaagggggtcgaagcttcagtgtaaggttcaacaacaatactcagcaaggaagttgtaatgtgttttctatggagaaacaaaggccacactacgaagaccttttagataaccatacaaaagtagaaagagcttgtcactgcataaacaagtcaaccgaaggaagtatttcgcacatcttcatactattcttcttatatcccacaacaagttcagcatcaagagccaaaaccacaacctttggggtccattgcttcaactagtccctcacttagttattgggctattccattaccattcatcctaggccccccatatgagcaagtacctgtagaccaccctcaattccaatataggatatgcttcaccaggacagaagagagccttccgaagctcgcacggtgaacaatgtggttcctgagtccaagcacatatattagggcccaag

SEQ ID NO: 134883 - DNA, 286 bp, Zea Mays
cctctcgcccccttcgccgccccgggcgcctataaaaggaccgtccgagctccctctttctccacaccggcctcggccactccctctccccttccccgagctcgattgagccagcgccgccatgcccttcctctgctccagtgagtcccaccctcctctctcggttaagttatggtccaattagtgtagctcttgagcttcaccactccctcacaaatacaacacacccatccccttcacctattgcgcccggcatccctcgctagcgatctcccgccacggacgc

SEQ ID NO: 134884 - DNA, 601 bp, Zea Mays
gcgcttggtccgtcccaaggacacgggcggccacccaaggtcccgacgcactcccacggcaacgcgcagagaccggaacgtcgtcacagaaggaggtcgccggcgtcagtgcgagtggtccgatctttcgtgggtttagccgcggcagtatcatacgacgagagggagaagaggtgaagactcggcgctccgctttaaggtcgtcacggaacggattttatctcccccagtaacctccctccgagatttccgggtcaaccaacatccatggcggccacgactgcgtgcccgccaacggcggatctcctctctcgctgcatgccaggcttccccaacgcgcgcgcaggcgcaattgctggatgaccccggggcggcgtccttgcttcgcatacatgggacgaggccgaggagataggagggatcggtgacccggtcgccgcgattttctgtttccagccgcgaccgagaagaacggaggagtaagatgcgcctgacaaggttggcccgagcgccggtgagatgagagttgacgagcgagggtccgcacgccagtgaagcaacacggtgagcggctggagaggcattgaccgcggcccgctag

SEQ ID NO: 134885 - DNA, 375 bp, Zea Mays
cctcgaactccacgcaactgaggtgatcacgccttaggcctcggcaggtgatgcggtccaggttggtcgacgaattcatcgccggagcaaaggaatctgccgctgggccgctacacgggtgactatcctccctcgtcgtctgctgtcaagataagcacctccgttgggctcgcttatgccatctttttgcgtaggattgtttgggagggggatggtcaccagtgtgccgtactgggggtcgccggcgcgtttccgccaagcgcaaggggctaccgggttatgggcagtgggctggtggccgtcggatcggccaccaatggggtggattcaatcgggtgtatgccggttagccatgtgatccaagtcgttgaatcc

SEQ ID NO: 134886 - DNA, 515 bp, Zea Mays
aaaaggacagggttacccgaagaaagactctcaagttctacaagatacagtggaaccaacattctgaagatgaggctacgtgggaaacccaagacttcttgaataagaatttcccaagctttttagcctcatgtaaattgtaaagcctgtataactgtgtaataaagaagtgacccccacatcacccctgccttgtactagaaataaggaaataaaaatatgatgtgtttcctttaccattacttaccctaggacttttaatctcgggacgagattcttttatggggggaaggatgtaacacccctagtgttactataactaaaatttgagcatggcatcataagcattggcattgcatatgtttgatactcctagaatgcattcactaggtaaaaatttcaaacaagttgtattgtttaagtgttttgcaaataggaccctggatagggaatttaaccctaaataaggattaaaggggtaaaacttaacccaagttaagaaaacctaaagactt

SEQ ID NO: 134887 - DNA, 597 bp, Zea Mays
gtcgtcaagcccttgatgatcactcgttggggttcgctgagatccagggagggcactcatgaactaaccagtgccgggcgacatggctggatcgaccgattgctcgccgagggacaaattccgccgtggtgcgtagtcgcgatggtctgtgtcataactacaggtaagaagctacccgattggtccgctatcgtatctagttcgcgtgggaccgattagttgtgagcttggagttctagctcgtcgggagggcctgcgccggcgatggtccaccgggcggatgtcggctgcgccgtagctctggaggattgcagggtagaagaagctagggagccatcggatccgagatggagggtggagattagatctgcgataacggttcgggtatggcgagcgtggattgctggatcgtgggcggacggccatgatcggatccctagtgtttaaagtaggcaccgttggatcttgatccgacgttgggtggcgcgtaccggttagatttataaaacatctaatctggaccgtacccttttaatccaacggcccaaatagcccgatacctcttcgccctggctttctttctaaagagcccctcgg

SEQ ID NO: 134888 - DNA, 787 bp, Zea Mays
cttaagacctcatctcataagcatttcattcatcatatgcatacaccatgatttctagtagcacttcacacatagaatttcattttggcacctaggaaatataaaggaatatttgtataaaggagaaaaggaattaagaaaaagtagaaaaagaaaaaaagagaaaaagggaaaaccctcccccctctcggctaggccgattttggacaatacttttcctctctcgtgcgcgcccacgtttccccctccactcttggaccactccggcccaccagcgcgcttgcccgcgctgcgctccccctccctcgctgaccgcttggccccactcatcagccgcttcctctctcgcgcccgctctccctctgccagtggggcccggatgtcagctctctctccctcaccgtgcacagcatcgatgtgttccccgacggccaccgtcctcccctgctccaccatcacatctgcgccagtggagttaggcactgctccgtcctcacccaatatgctcacacctccgcacgacaaccagccctgagccgtcttgtcctcggcgccgtgtgccataatcaccatcgcggcacacctcgccggtgtccgccatccccgctccccctcttccccggacgcttataaatgggtcgtcccgagcccctcacctcctcgccccggccttagccactctcctctccccccgagctcaatcaagtcggcgccgccgcccatccccccgctctggtgagttctccctcccctctccgatggactaatgccaaattaaactagctca

SEQ ID NO: 134889 - DNA, 484 bp, Zea Mays
atgcccccaccccgattcccccacacgcctgactcgcgccgccccacccgctaagcagtatttggtcgaggacgaggacgacagcggctgggcaagccgtcgtggcaagagatgcaaagctgcccctagatctggccggagatagagccaatggcgacgacgctcgcgggcatgcctaggaaacggccgatgacctccatccagctccacctccacgtgctctagggcgggctgtccatggacggcgcgcacggggctgcgctactggcgctagtgccataaggagtgatggtgacaacgaattggggctaggcgcggtggaatcgaagggcggagagggaggatgcagtgcctcatgctgtgcaattgggagggggcggcaccggcctaaccatccccgatctatgttgctgcctcgcccatctcctattcatgtccattattccttgatcctccaaatcttttaatgcattttcagaggcac

SEQ ID NO: 134890 - DNA, 413 bp, Zea Mays
cgtgtcatgaactcagaatctgatgaagacgtgtccatagatttagttcgctttgccttttccttcgaagaatctcgacctagtggcctcttcgatgtgaagctagttggtacagattcttctgcatccacatcgacagtgttagaatgggtgggattagcgttgccatgctgattttgttgacccatgtggttgtccatccattttggttggtccttaagtatggcccaacaatgtaaaaagtggaaaggcttcttctcaatagctgcaaacctagaggctgcaagtgatgtctgggagataaaaactggttagagcaggaacatatttgtaaatacctataatacttatgtaataatgttacatagtaaagatgtaccttgtctacgtcagtgagtccactaggattctgt

SEQ ID NO: 134891 - DNA, 526 bp, Zea Mays
gaccaacactaataaactaaataaaaactaagtaaatactaaactaaattaatactaactaaccactagatactaactaaataattaaaactaacctatggtgcagcaacttggtggtggcgcgatggcttggtggtgatgaggcgaggcttggtggtggcggggaggcagcactggcagtgcggtgacgacgttaccgatggcggtagggcttggtggcggtgggcacgaaggcgggtaggccgccagcgaacggtggtggcggggctcggtagcagacgtgctcgacggtgtggtggtcgatggcgaggcggcgaatcggggcgaacggtggtgggctcgggaaggagaaagaaggagtggtgcatgggtaaagagaaggagttggccagcacatttacttccaagcttggcaccaagatttgtggccgagcatgaggacacatggcagtcgcgtcagccttgcagtgccagcacggcacgtacatcggcgccataggctatggcgagaagcgagtctaaaaac

SEQ ID NO: 134892 - DNA, 364 bp, Zea Mays
gggggctggccacggcggggctccagaggcttggggactagctcgagtgcgttcagggcggtctggcggactcggccatgggcatcacaccggcgcgggagcaccagagggcgctacacacggcgaggcgggctaacggcggcgcagggctactctggcgaacaatcgcgcgctaaccagggtagtaacgaccgaattaagggcgcgggcaggttactcacctcgaggggaagcgctggagtcacggggcaacaacgatggcgcagggacacgatggggcgacggtggcggagctcgagctgcgcaagaaccgctctggtgagcgtgtgccgagtaaaccagagagggggagggcacaccgaag

SEQ ID NO: 134893 - DNA, 372 bp, Zea Mays
attttatttgtattgaacaatattccttcctctctattttcatggttttattcccaagttagagtttaaatttttatggatccattgatatgttgttaatgactcatttattttattaaccacaaatgcgtaatcgagtaaaactcagcatgatgcaagatttatttaggtgtctttggggtatttatttaattgtgtaagtggtgtgttcacatatgatagtaagtagaaataacacacacaaatagataaagggattaattcctcctattttattatatgttacaaactgggtgttacatttaacctaacaacaaaatagagatcctgacctaccgacaccatgtaatccatcctacccacatatatcta

SEQ ID NO: 134894 - DNA, 463 bp, Zea Mays
gccagcagttgttcgtcttctggatgcctttatgactattgtcatggacatatgctagcaggtgtggccaaagggccaccacatctggcacatagacatgaccgctaaaggtgaggaagccatccacctcagttcaaccctctggagtagagccgtcggctatctgcggtgtaatgtcgtgacctgtgggtcggtgaagactcggtgcgcaacacctcaaagatcttgaaggagggcatggagatggtgtggagggagaccaccacctcctcgtcatgccgagacagtgcattagccacattattcatcttccctggcttgtacttcacggcaatgtaatgttcatagagcttgttcacccatgtgtgctgaggaatggtggagagacgttgatccaagatatattttaaactacagtgatcggtacaaatcgtaaaaggttgtcctcaaatgtatggcctcc

SEQ ID NO: 134895 - DNA, 327 bp, Zea Mays
ccgaatcattaggatggagtttgtaacatgatggacagtcaggctttatgcctgtgcgtgagctgcattttgagccgtgcacgttataagtaatgctggagtgaccaatttagtggatgtaaaggccggtgccgcagtctttgttagatagtagtactcatgacttcgaagcatcctaaggcgtcttgttcttttgtttggtaacggacccaatgtctctgatgggtatggtagcacaatcatccacagctcgaaagtgagggttacttgcaaccaaattaatagagtaccaacctaaacactatgatttattagttcgatctgcag

SEQ ID NO: 134896 - DNA, 682 bp, Zea Mays
acgaatgcgtaatgcaggattctggaaacagatgtcctgcagaagagcagaacctccactggcagtgaaatcagtcactggctcattgccagcgtgacgggcctccgcccggtggaggaccaaacctcgaataacaggggcgtgggcagggggaagatcaacctcatcatctttcccaccctcatcatcacttgttgcttcccatgcatgagggtttgtcgtgggtcaggatcgactggatggattctgggccatccgaccacgaccaccatgagacccggaggcctcaccaccctgcatgacgttgccacttcctcgcccacgcttggatctggagcgtgggggagtatctccatgaatctcttggtcgtcagaggagtcggattcaaccacagaaggattcctccgacgcaccatccttaaaaagagaagatagaacctatgatgagcaaggatcttaacaaccacgcttgagtagagacgtgtatgatattgagcatgcacttcaaccgttcatgcgagcggttcaactacaacgaacaatatcaaaccgctaaactcaaacaatgttcgtgacaaacgaagataatctaagtgttgcaagcacttaaactaaaatgtacccaacgaatgatacactagataatcaagaatgggtgggattgagtaaaaagagatgaac

SEQ ID NO: 134897 - DNA, 356 bp, Zea Mays
ctcagagtcagcagaagagttatgcggacaacaggcggagagaactcagatttgaggaaggagactttgtctacctcaaggtctccccgatgcgtggtgtcagaaggttccaagtaaaaggaaagctagcaccgcgattcgtcggtccctatcccatcattggcagagtgggacccacagcataccgtcttgaactaccagaatccatgtctgacatccacaatgtgtttcacgtatcccagctccgcaaatgcctgcaagcaccagaaagtcacatcgaagaagaggtagtgcagattcagaaagatcttcagtaccgtgagaagccagtaaagatccttgattcagcagtctgg

SEQ ID NO: 134898 - DNA, 374 bp, Zea Mays
ttttaccccttgccctcgcagcgggtaacaatagtcagggtatacgaagccaatagcatcgaataccatgttcaaccttttcttattcggacccccgaaggctgcggacaaggcattgtcctcagttttggagtacgccccaagtaactcatcgctagtagcttcaatacacttcggccaatcatcatttggttcatcaaacttatcctcaaacctgaatgtatacttcagccagaccaaaccaccttcgctagagttagtgatggtctccttcggcatttcctagttttccacaagcgaccatactctgaatgctatatgtttttgaattaaatctcttgtgccaatgaaggagcaaacagtactgaaggcct

SEQ ID NO: 134899 - DNA, 473 bp, Zea Mays
cggttgtcttggagacgatcgcgcacgtgggcaccctctctttggtagacgcagggtgcaccgagggttccctctcgaagtgagggccccacttgatgacttgaggcgggctctcggtgtcgataggcagagctctcggcctggtggaccacggcgcattccagaagcccccgaagtttgccatggatacggcgtccctcgatggtggagggctttggaatgatgcagagcaagagtggtgccgctgcgaggctttgactggctcagttgaggacaggggcgtggtagcgccgtcgtcttcctcgatgtgacgttgtacgtcacgtgcattcgctcgcgcgcctctgtcgagggctttgccagcggcctccctctctagagcttgtcgtcattgctacagcccttgttgttcctccccgagcttgtcgtgtagctcttagggttgctctaggtgagccatgtggctcctagaa

SEQ ID NO: 134900 - DNA, 780 bp, Zea Mays
gaaattagggtgctcgatttgatgaggttcagagatgagtttgacgatctgagcatggagtctggtctagtgcaggccctaggaagtctgcacaagctgcagaccctactagtgagcagtgattacacgaagcaacaagtcgcacagtacagctgggacacggcggcccttccgcggtgtctccggatcttggtcttcgttgacctcaggttccatcatgtaccatcgtccatcaatcccgcgagcctccccaacctctcacgactggaattgtctgtgggtcatctagacgaggcaagtctgagagccttgggtgggttgccagggctcacctacctcacactaacggcggctgattggctgaagagctcatgcaaggcttcggtagttgatgtcgttgtcgctgatggcttcttcctcaagttgagatccctcaggctgtatggctggatgctccagttggtgcccagcgaggactcgactagtgtttcgttcaacatctggaaaggagatgaggacgttgtggcccttggtttctgcagaacaagtgtagcagcacctatgacctcctctatcatcatgccagacctcatagacctgtggttctatgtccctgttagagccttgtgtaagagtagaaatggaagcatctgtgacagcctcggctgggagtgcctcccttcgctacacaaaatcgatgcagttgtcgacagtaagggcgcctatatcggcgatgtgaagaaggtcgaggctgagatgaggcaggcagcaaaactgcat

SEQ ID NO: 134901 - DNA, 402 bp, Zea Mays
ttccacttcatcaaatacgaaacttgatcggggacaggggtgccacaagatttcaactgggccgacacagagttgaggacattctgcaagcttaaaagttagcaagagaacctgtttgctaatgtaaataatgcaaggcaaagatcatctcacctagaggttagaaaggaataagggaaatcctagagccggaggcatcgatgcactgtgtgatgatggaatattgacagagacaatgttgagagcatcgctcaaagagacctcagctctgacagcaggcggcggattcccagcatccgggtcattggcctctaaggtgaccggaccgacaagagaagttggcgaactcgtcaccacaggttcctcagattgaaccggtggcgatccaacatgaacatccat

SEQ ID NO: 134902 - DNA, 461 bp, Zea Mays
gacagtctcgtagtgccgccgcgcgcaccagcaccaccatgcgagcacccgttctgcatttttatcaggggagagccggtgtgcaggtgcctcgacggaacccggccggcccccagcagcagcgtcgaaatgaggatgatgatgcacgcagacatggagagagccagcagctagcgtgccactgagccactgatgtacgtggttttggtttgtttgttcttggtccagcagtaacagtgatagtgtcgtgaatgagctagcacactgtcgagtctgtcaggatgatgctcattctcagtgtcaggtcgtctgtccgtgtcgagaccgatcgtacttacgtctttgttttggtataataaagcgtcgtgcaaacgagttctgttactatgccagctcgtgatcaatcactagagaagccaacaccagatgattcactggagaaggtgcagccagaagctgat

SEQ ID NO: 134903 - DNA, 493 bp, Zea Mays
cgccggcctggcaaggagagggtcgacgacggtgacgtggccgccggagagcgggacctcgggtatcaatccccgagcaggtcctcaaggacatcttcactgaaggctccgacttcgatgacaacgttgaccgccacaagaatctgtacgtaatgtacggtggaagttgggagctcacctcccgtaggaacgtgaagtctatgcgccgcgaggtcctatcggcgaccccaagggtcccgaaggttgctccacatcagcggtggaggagcaccaccatctccttcggggcatctgactgcccgacaacatggcaggggccggtatactaccgctcatcatcgcccctatcatagccaacatgcggctgcaccatgttctgattgacggaggggccggcctcaacgtcatcagccatgttgcattcaagcagctgcagattccatggtcccgactgggtccctctcgcccactctccgaagtgggcccacagccg

SEQ ID NO: 134904 - DNA, 350 bp, Zea Mays
gggactggaaccagatgcaagatgcttctgtaacattcatgagttgtcttatgagacgaaggctaccggaaaggagcagtatcacaacaactttgattgttacagcttcgtgcctcgatctgaggcaagctacccagtgcctatgttttgaaagaggtggccgagctcctggatgcaggaatggttttacgtaaagaatgacctaagttagagggaggatgtgatagggattattcaacgccctatatggtctcgcttcgggattagaaggctagcccctacacttgggaatgatgtgcaagcatgccacgcagctttcaacacagtgtgcacctacattggctcaagag

SEQ ID NO: 134905 - DNA, 609 bp, Zea Mays
gtagaacttcaaattggttagttttgcaactaaactcagtaattaacagatgggtggagattagagctcccccatcaacggagggaaaaatttctctctcctagacgtggtcaccgagagacatggtcaccgagggggaatggttagagtgcttccgggcttcaccgcacgaagttgagagggagggggagttgagggggagctgttggatacaacctaagttgggcgtcgtgcaggtaggagcattccagcggggtgattaggctgggacactgggtccattgccatgcggtgtcgttcgctgtcatcgcttggggtgtggtcaattggtcggtatcaactgctacgatccagcgacagccgatatgatcgatgttatcgatactaatcacattagaattgatattgaccgtgttggtcgatactaaccgtcgtgttagacccatattgttattgaccaggtgtgatcgatatcgaccgcctgctgttaatgttgtgcctgcgcctcctaatggattgtcgtcattttaactgtttggatgataaaaaataaaaaaaaactgaattcaccttataaatagaggaggtgcttgcctgcttgggttcatt

SEQ ID NO: 134906 - DNA, 515 bp, Zea Mays
ggaatatttttgaatattaaattgttactgtatctccatatacaccaagacatggttatgatggcctccattctccatggttttgtcggttgtagtcgcattctttgtaccgccaaggagagatgggaagtgcggggaatgatcccaatgagttgccaatatcttcgagcataattacattttaggaataagtgagctatagtttcttcgttttgtagtatgcagtttttgcaagtgtatgagtaaggatcatgtttcttcttctgagtagggacctagtgttcagtctgtctttaagcagaagccaaaagaacaccttttgttttggttgctattttgatttccacaaccagttataagcagggtgaacgggctcacaccccatcatgtgtttataaattccaacttttcacaaccctctaagacttcatgcattgtatcctccttcaccccatccctatcgtttagtggctacagagcaaccctaaccactacactgatagcctctatcgtct

SEQ ID NO: 134907 - DNA, 545 bp, Zea Mays
cacaacaaaaacaatgcgtgcagtccaaaacagcaatcaataaattttcagctcctatataattcaagaattgtcgcgttctagatacttgattctagcactttgacaattgttagagttaaaataaccaagtggaaactaataagtagacttactaatttttatccgtgccatttagtgcactaaaattaccacataaattcaacaaacacattcaccacgtaaatagcatgatcgcacatgacctcgacttaaccgcagaggaagcgatgactacttcggcatgtcaccacctctctacagttcaatcaatagtaactacatcgatcgaacctcctattgcgcaacttttataatttactatctcaaatataaccatagcacggcatgcacttgagactctttgttcaagttaacgccattactaccacaacgcacttcggcacacatgtttgataacacatctttctaaattaatctatctcatcttccaaacactaaatatatgtcacgtaatttacgtttttcacctaatttaacctaca

SEQ ID NO: 134908 - DNA, 1214 bp, Zea Mays
tactaatcccatgttcatctcaagtggaaagttgaataggtccttaatcattattggtgattcaagcagaggaccttaatgagattctgcaacttgcgctccataggatggtacccttgtatcttaagtactttgttaataatcagtactgctcttaagtcttattgatgtgctacctgtccttggagcagttatgctttgttgattacctgtgttgagtacctttcaatcaatgattaataatcaccaagatcgtaaccatgcttgcttaatcatgattgtgtgctttagaggttatgtctcttgaatcatttaatgggtagtttttcattagatatatccaccatgattaactcttgttgtgttcgtgaataaacctgtattccgttgtgagttatgctatatggttttaatgattaacctgtgtgcaaatatgacatattgtttagtttatgttcacatgatcactctagtctggtattgtgtgaataccaactccatgttgtgtctttaatgcactcttttgagctataaggtgcatgaacaaaaggagccctcaattagtatcaactggtgctctaatggcaattcaggaaaaggcaaaggtatggagaatggaactatgcaatttcattgaatatcttgaagttccactgattgtgatcacagttatggtcttgcctctgaattggtagtatcttggcttaggcgctccttactttaaaatgttgtttcttctggtgtacctaaagaacctttttaattatgatgtgcttagacattgcgctttatatgcatgatcgtgttgtttttcaattagtatatgtggtgcaatgattgtcaagtatgaagcatgtctaggttgcttgtaaaatgttatacttcttgaggcatgcattgttgtattaagtcaacctttcatttgatattcaaatcggtatccctttgtgttgaaattgttagagtataccttggccaagatatgttgtgatcccctctagttctgagaaagctagaatgtgtaaagtgcaaagttattcaaatacttgatgcacaagtgtagggggagcacacataacttgcgtcttttgagactaattgtatcttgagcgatcttatgtagtctcaaggtggagaagagaaaatgagcaagaaatggagcaatcaggactggggtacctctgtaagtcaaggaattggtatctagtcgtgag

SEQ ID NO: 134909 - DNA, 392 bp, Zea Mays
ggaaggcaaaacgaaaggagagagggactgaccgagattgtggcacagtggcccttcccatgatgagatgcagtatgtggtggatgccattgctccgacgagaaatcaagcggtgcgcgatcaagctctggcggtgggaaggccacgagtaccttcgggacgtctctgcgattcgccaagccaaccgccaaggtcggagctccatacaaatcgcgggtccatgatgacagaccctatcttctatctgcgttcatcgtgcacgatggtgcgaacaacgcccatgcccctatggcacacatcattgacgctagcaggttatgcccgagaggaggcattgaccgagcacttataggccgaaggctatgaattctgcagagggtttgttagcgaag

SEQ ID NO: 134910 - DNA, 386 bp, Zea Mays
ggggagggttcctcaccagtagcgatggagcaccagggtccgaccacggagaatcgcggcccgtggcggagcaacaactccggccagcaatcgcaagggtcccagcggcaaaactcacggactatggtgacacaccccttccctagggtctgagcaagcaccagagcatgaccaacagaggcgtggcgacgactaatccacagggaggctcggcggtagacctcttcttcgccctctctcatggtggcgatggaagcttgcacccggcgaatagatggaggaggggaacccgactcccggttttatagatgctagcgagtcggtccaggggaagcggcaacagaaccctgaatctgagcgagaatcgcgacattggttgcggcggc

SEQ ID NO: 134911 - DNA, 480 bp, Zea Mays
caataatgtgcccaaataacctgagttcttggtcattatcttgagcctcattacgaatggatgaaagagtcgttacccaagcatatagatggcatcactgttatcatgaactggatccaagaattaaagggctagggcctcacggctatccatgtggccagtaattagtttcaatgttgactctctcctctacgtgaggaagcaaattatgcttgtgagtatggtggaaacggggacccctcttcatccgagcccatcgatatgttggaggtcaaagcccaacttcaacaactttttacttctattagcagttggcatgagggatgttcgatgagggcttactccctacttgagcctcatcttgaggtatctttaatgattttcttgtttatactcttttttttgaaaccatcaattttagtttggaacatttttcatgttcattcagatgttgtaacaatgttatcctccaacatagtt

SEQ ID NO: 134912 - DNA, 411 bp, Zea Mays
cgctgggcaggcggtgtccaaataaattaaccggttgctgtgtagttgtcgtgcgtgatttattgttagtgggtagttggattacgagttatgtaaggattatgttagaaactagaatgcggcgtgtaactgtgttcgtgttgtgaataatagataagtaggtcttgttggtgtcattagcaagtgggatgattcctgttgtgcaaaaaaatttgaaaggcgaaagaacatgtatagtgtgtcgatcaagttaactgatatgtttcgtaaatatgcttgtgatgcttttatgtgcatgataagatcgatgccttgtcgtcgtagtctcaggaaattttctgaaatatgctagtgctccactgatgggttgaatgaacttgagatgtattataatagctgtgtgtggtgccg

SEQ ID NO: 134913 - DNA, 503 bp, Zea Mays
ggaccccgttgtcgccatccttgcaagccgctcgggactttcgactaatggcagcaaggcagagagggaaggaggaaggggcgacgacatgtggctaaggtttggtgctgcctgagccacattgggagacggcatggggattgaaattgtggtttctcactcggcatatgaacacatttatacaggttacatggtagacgaattaagatcgggcacaacaaccagttcaaacaaagcacaaatcattgtaaaggtttagtactcgtttaaacaattatcccatttaaacaaggtctacctacgtgatatatagatatcccccgggtctttacgaggacggaaacattgttccgtctcgctcgaggccaaccttggaagggagacgttgtttcgcctcgctcgaggccaacctcggacgagagacgccgttccatcttgcctgaggccaacctcagacggaagatcccgttccagctcgcccgaggccagctttggatgggaga

SEQ ID NO: 134914 - DNA, 509 bp, Zea Mays
gctggaatgtgcagagactgatgcccaaactcggccaacacctatttctacccttggcaactctaatccgaccctcgattgcgcaaatccggcccggagtccttctgcccacgacgacagcgaaacccgaggggaaatcgatgtgttcttggtgattcagggcagtctagttcaatcaaacaggtctacgagtagcaggaggcttaatgaaggctagaacttcaagcaaggatgcttgaactaacctgcagagagctggccacggcgaggtgtttacggtggcgtggaaatccaatttgggggaaaacccgaattaaggcgctatggtggactatcatgcgcgagagtgggtgctctgggttcatgatgagaaggtgaagcaagggaggtgctcaatttacataagtcggccatggttattccgaatttgggaggagagtggagcacggctgtgacaagacattgcactggcggccgtgccgtggcgccagccggtgcaatggctttgg

SEQ ID NO: 134915 - DNA, 592 bp, Zea Mays
gccaagtaagggtctagggtgttcggtgtcgtgtgtgagtcgtgtgggtgaagtatcaaggccaaaagttgagtctggtgtccggaatttctcgccgaacctcaccgcaattctgcgatgccgaacctcactagcctcgacacgtcatttgtgccggtaagatctcggatatcttgcccacctcgtcttcctcgaagtatagagctagttatcggtagggttggacctccagggcacctagtgcgccgctcgtcggcgagcaccgccgcgcagattacccacgtcgccacgtctaggcgtatgttggggaagaagggttgtgggacgtcgatcttgcgttgtgcggctctgattagcgtatgagcatacccccttcgcgctttaaatccgagtcgtaggctgttcatccgagggcaggttgtgggtactggcgtggttggatcctgggcgttgatctcggatcctagggctagggtcgcgtaccgattcgtacacggttagatctaatcgttgccataggtttttaatccgacgaccaagaaccattcgtaccccttcgcctggccattgtgtaaaaaaacccttagtgttt

SEQ ID NO: 134916 - DNA, 465 bp, Zea Mays
ccgcaataaccacctctaaggttgacgggccctcagccacttccataggaccaggacgatccaagtcagcttcccgaccctcgagatcgcgctctaaggtcgacgaggcacgggatgacctcaacccagcatcaggcacgtcaacgcaagcttccactgcaccatcatccactggctccgacaacaagtcttccgggaccatatcttcaagagtttgatcaaagttggctagagacagttcttgcagaccaatgagggcagacaaagcaggagagggaaccccactacttccaccgctggcgatgaattgccgactgtttttccgagtcaaaggagcttcattttcttcctcctcatcatccacattgacaacacaagcagcacccccattgggatcagcaacaggtggagcacccacattgggatcagcagccgattgggtacacccattggggtcagcatcaa

SEQ ID NO: 134917 - DNA, 315 bp, Zea Mays
tagaaagtgaaataacagcgacacgacaatctgttgtctgagaagtattctcgatacagtagaacgcaaagatgggaggaaggatttgctgtgcgtttgggaggcgttgggaacaaaaacatgccgtgattaagcaagagctacgcttgagaatgctatgatcactcaaatgagggcagcgacgttacttatccatggagctgctgcacacattacctgagatgtcgcctgctcctccttagtcaagtataacgtggaaaaaacatcctaggaatgtaaatggagaaaacaaatacattatgaatagttttgtcc

SEQ ID NO: 134918 - DNA, 894 bp, Zea Mays
gccgatctcagttacaagcatccttgttccgttacaaagccccgcagtctggttcaagttacgtatcagcatgactgtgacgcctctttttagcacgagtttgtggcaagggaaatttgctgcattaatagagtttaggaactcagtaggatacaacatgtcaaaatcaggtatgcgttcagacgcctttgagatcgtgtcgcaactaaggcattggacaccatgtccagggagcattgagacaatgtagtcgtttattttatcagttgtaaggttattaggacatacaatggcgcgtgtagctaggtatgtagggtccatatatctctctaacaaatctgggtagacctcggatatgaggggcgcagcagcatcaccatccgtgcgtatcaacaaatcttcaggaatcgtaacccatgtaggttcggactcgtctcctcttgtcatggctggcaaagcaccgtcgccgatatctaagacccatttgctaaattgttccaagtccgcacgttccttcccatgtaaagaggggttggagagcctcatatttgttcgtagttttaaaacggttgcatgttgccacaacggtgagctggtaatcgatgcgttcactatggcagaccgtgagcctttgcgcaccacgggtagaatttggcgaaagtttcctccaagcacaataggtttgccaccaaatgggatgttcgcattttccgctctgtgttccgaaagaatatcacgcatagtcctgtctagggcctcaaagcaatgcctatggatcatcagcgcctcatcccatatgacaagagaagtacgctgtataagtttagacaacatggtacctctcttgacaccacatacacctctctcatctagatcgaagggtattttgaaacg

SEQ ID NO: 134919 - DNA, 330 bp, Zea Mays
ggccgccaagtgaaagaacttagtgttagcatcgcctaatcgcatccaagtaagtctggaatgttgtcttgctcgtgacctctgagcggaggcaatatccagaatcttgattttaagggtcctcctgaattccaattcttcggaggagagttgtctaatttcttgtgctttctccagaagagtgaggatgatctgaatgatagccatccacactttgaagttgccaactgtattgcgtctccaggtcaaaagagccttggctgtgcgagtcatcttcacgtgaaggcgaaggattgcatcatcagtgttaactgtagaattccatgcttg

SEQ ID NO: 134920 - DNA, 377 bp, Zea Mays
ccaaacatggatatcatcaatcctaggctgtaacactaccttttttgcttcatgtaatgctcttttgctaattctcttgggaactgttgcaaagacttgtggtgcaaggtaagcaattctctggccctgaatccgtctatccggccaaaacaggtttgctgccccactgcccacctctgaaaccactgctatggagaagaaagcttgcgcacatttatgtacaggtatatgaaaagtagcccagcgaagattatgatatgttttcttcaacacaaagccacctcatcctaagagcccaactcagattttgaagattggagatccccaggccacctaattctctagggaggcacattttagtccatgcaacaaaacat

SEQ ID NO: 134921 - DNA, 694 bp, Zea Mays
ttagtattgactttaggtgcccccatattgggcgttggatttttccagcctcctaggggctgaaaaggactcgtatccatgtgttggtggaataacatcacaattttgaggtttgttctgcataccttgccttggatggtctgacgtaatagccaaacggtccgagcatgctagccatctctagtgcggtttcggtggtttgtcgtggaggacgtgatcgatcgtcgttgggccaaactattcggccataggtacggactatacgactgtgcacgagggcgtgggtttttccacgtaggtggtggaggttatggttgactgttataggaattcatcggcattccataaattggttgggactgtgaacgcccatttgtggccgatgaatcttgtgtggcatcagtgtcatctgataggaagtatggagcaacggatttctcaaaaacgtgtgtcattcttttaaaatcattctacataccccaactaattgttgaaattgcacctactgttcatctacataaaccctaagagagtgaacctttacttacattgggtgcgagtgcagcgggccaaagagatgacaggtcaaactcattctgtcggatgggattctggtgtcgatcgaccttgaaagcagccaagaactttgtgtcgacttccgccaacacctatttcctgatgtcctccagcttct

SEQ ID NO: 134922 - DNA, 448 bp, Zea Mays
cgtagtctgacggatccagaggtcccctgcgaacctcctccacggtatgaactcgagtgcgacatgctcggtctctcatggcgtcgtcctccctgcaatggcgatggtggctcgagttcggctgtagagaggaaaacgggtctataaggaaccggcatcgtgacccttgcttaagtattcggtgggcggatcctaacaaactagctagaatcccgacagttatgcgagggtgggttgcgaagggatccaacgtccgtcgaattcaggcagatgcgatctgttggatccagagaagatgcagctgacgacatggccctacatgtaagcggcactagatggaaatgagctaacaacatcatggcgtctggatgagatagttttgtagttaggaaataaataataggaagaaaagaaggtgggttgacggcagggaagaatgaatgggttg

SEQ ID NO: 134923 - DNA, 363 bp, Zea Mays
caaagacatggcttggacaacgttttgatcctttctttgcaagagaagagaaagctcatttgtgatacggaggatctgtaacatcatcttcatcataaacacaaagctgaaacactccatttttccaacaaagccacctgcacctgatggattacgctcatcttggtgcacaatttctaaaacttctatcactgattcccacatggactcaatacgaagcaaagtcttgtaatgagatccccatcttgtatctccaggtcttgacaatgatgtttcttgttgtttgcctctccctgatgaaatttctccactctctaactttgataagagattcaaatgatgcttatgttgtaatatatcctt

SEQ ID NO: 134924 - DNA, 1074 bp, Zea Mays
ttgtttgggggaaattcataaaattggagatggagccatgagttctttttgagcactgctacacgtatgacttcagtgatacactcagatacgactaggatcatttaatggctcatggtttatttgttcagacaaagaggcaataacagccatagattaacgttggtcgtactcctgtcgtacaggaaagtcctatgtgaagcatttcccgttctttttggaataacagttggataggtgtaactgcactggaaattcaattccctgatattttaagtattttctcaacacaaaaattacagtagcagaggctttcaacaatgctgattggcgaatacaatatagaaggggtctagtcattgctgaggtaaatcagtggtaggacctatgggggacaaatcagtaacactcatacagctgaagggcagcaagatgcagttcgagcctcagataaattcaaatcttatacaactaagtccttatataatttcttaactcatgggggtgtaattggtctccaagcaaaggtgccctggaaatgcaagattccggtgtaagttaagagtcctttggcagatgttacacaataaactgcaatccagtggaactgaagaaaaggggttggaaccgtaaaactaactatagttcgtgcagagagagaaggggacaattgataatattttcttcgattcgatgctctatagaacagacggtatggtgttgcatgctggatgtgtttgattggaatggcttcctgacatgacaagctgacttatgggagaggtgacccaattacagattcagagtcccttaacagttaagtttgtttttgttttcaggtttagcatgggtgctttggactaacagaaacaagatggcaatagaaaatcgccaacaaaccaagtgatgtaatgtaatcttaagttcttaacaggtgtagggttttttcagaaatggcgtccactgctgaaaggaaaaaaggcaagaacatttgacagagaagatgctgaactggctttatagcaccccaagctgttgtcttcaaacgtttgaaaaatttaggctgcttttgtt

SEQ ID NO: 134925 - DNA, 546 bp, Zea Mays
ggaaacaccacaattgctcaccagaacatccattcgccgttggccgcgcgatgccatggccgggggctctgcgctgctcgatttctggtaagtcagctcctaccgagttccttgcgatctccatttcgttgtgatctcgtcggtctaaataagtaagcgcaagggctcgggggagcgcgtgtcagcgatggcctccgccgtgaccctgtagagcgccgccgcttggggatagtgcggtgtgggtgaggtgaggggagagcgacagtcgttgatcgcttatccagtggacaggatccgatcgcgctttagctctttgctcgtctgatcctgaccatcgagccccgatcggatggagtacaacagataagctctttcgttaaatattaaccattgattcctgatcgggcgacccggattggatacctattcgatttagataacttctaatctgggccactggtcttggatcggacggatcacagtgcctcgtaccccttcagcgcgactgttttacagaagagaccctacacttgggtataatcaacc

SEQ ID NO: 134926 - DNA, 941 bp, Zea Mays
tttgatttttgtttcagatagtgtgtgctgacagtgggttgtcgaagtatctggtgtatctactgcactactctgtagcatcagtttgacatgttcagcccgttaccgtggcaggactcaagttcctttgcacaatttacatggtgatgtcccttctggttgttgtagccttgatattcagggacgcttcctgtgttttatttcttattcgggactcttgctcgtgttcattgccatggacaacgtagctgattttggattatttattgataatagtttgccttgtctcagtttcctcattggtttttgagtttgctaatacacctgtataaggatacatggcaagttaatagttcttttcaaaatgtaacatgctgcataataagttcttagtttctaaatgggcatacataatacacttttttcgcatcagtcttgtgaccttctggtactttggtttcctccctgatctaaaagaatcataattgcatcacaaagtgtaatttttcttgtttataatggctgttgttagataagtaaaacaccatggccataatccgctactctgctttgcttcggcttacttgatgtgatgtcttttgctgagttgtccatttgtgaattcaatatatatgtagacgtaggtagcccctacatgtgtccttttcctttttgcatcttgcactatttaacttaacagaagagaaaggaaagaaactttgaattcttatccgtatcaaagcttttctccaagttgtatgccgtggagtaaaagagagcagcaatagttgggtctttgtggtctatgcactaccttattgctcaattagaacaaaatcttaccttacttatttgcaggagcagtttcaacaagtagctggctaaaaaggtctcaagtgcagagcacttatcaacactttttttatttaccttatcacaca

SEQ ID NO: 134927 - DNA, 573 bp, Zea Mays
acgagatggagcggcaatgcgccgcaatgatcacacaaggcatcgtccgtcgcagcgtctcagcgttctcatcgccggtactcctcgtcaagaaggcggacggcgcatggcgtttttgcgtcgactaccgggccctgaacgcgctcaccatcaaggacgcgttcccgattcccgtcgtcgatgagctgctcgacgaacttcacggtgcccgcttcttcaccaaactcgacctacggtcggaatatcaccaagttcgcatgcagcctgatgacatccacaagacggcgttttgaactcacgacggcctctacgaatttttagtgatgccgttcggattgtgcaatgccccggcaacatttcaggcgctcatgaacgacgtcttacgaccattgctacggcgcttcgttcttgtctttttcgatgacattcttatctacagccagacatgggcggagcacctgcgccatcttcgcgtcgtgctcactgagctccggagacaccaactcttcgtcaagcacagcaagtgcgcgttcggcgagcagtcggtctcctaccttggccacaacatctcag

SEQ ID NO: 134928 - DNA, 274 bp, Zea Mays
gctgctctagggtgtccagcttgttcttcagcgtctcgacggtcgtggtgagcttggtgatgagattggcgcggtcgttggtcgtgagattggccatcggaggcgcgacagatggggatggtgttgtgggcgtgatggagacggctggtctgaacgaagaagatctcctagataccgataccaagttgtcaagggcttcgacgcccaagacatcgaggcctcgcctatggagttcgtagcctcaaccagtaatgacgtcggggttgcttacttt

SEQ ID NO: 134929 - DNA, 420 bp, Zea Mays
gcaaggttctcagtttcactctgcaaatcagagtggaaataataattatcaagtgcaatgctctggacagcaaggacaaagaaacaaccagaaccagcagaggaacaactctcagactagtcaaaggtctagtgggtaccaatagaatcatcaaggaaacaccgtgaacacaccggctggaaacaacaatacaactactccagtccaacccagtggatgtttcaagtgtggcgaacttggtcattatgccaacaattgccctaagcgcaacccacagacaccctagaggaacagcaatcaaagagttgatccgaatacacctgctcgtggaaatgcatagaacaagtctccgcagaaccagagtaagggaagagttaatcatgtaatagaagaaataattcttgaggatgccgacgtggt

SEQ ID NO: 134930 - DNA, 394 bp, Zea Mays
tcacagtcataaagtcagacttctgaataacatttttgccatgagaggttatctcaccaaccttttccaatcccagctcttctttcattttgtctcccacatttctggcttttttgccagttttttcacaagaaggatcatccagaccttgcctatccactgaagctctcttaccaaggttaatagaatcatcattccaaccctcttcagttatatcatcaatcttaaagaaaatatcataaaggtaaggtttcacacccacctcaatgataggaggaatcatagccacactcttgacatggactttgaacctaaccatatctttagaatctaaagataggatatcaacttcttcaatagcccctatagtagagcctaattcacagatagcctg

SEQ ID NO: 134931 - DNA, 811 bp, Zea Mays
tatctctttaagatatatccgggcaagggtggctcctccaaaagtggtttttactggaatgaagtgggccaccttggtgagacggtctattattacccagatagagtcattccctttttgcgtccggggcaatccggttacaaaatccatgcctatttcctcccatttccattcaggcactgggaggggttgcagtaggcctgcaggtttctggtgttcggccttcgttcgctggcaggtgtcacaccgggccacatactgtgctatctccttttcatccctctccaccagtatctggctttgaggtctaggtacatcttggtggttcctgggtggatggagtaggctgagttgtgggcttcattgagcaggacttcccgtgcctctcctattggtacacacagacggttcttgaaccaaagaactccttgttcatctgccctaaggtccagaagttgctccttgcgagctctttccataagtcttgcagtctccacgtccaggcgttgagccttgcatatgaggtcttctagcattggcttgacttccaggttaccgttgtctcctagacatgcatttagctgagctgattccttcttccaatcttctaaaaagttggtcccctttatcccgaaaggttttcggctgagggcgtctgctaccacgttggccttcccggggtggtaatggatctcgaggtcataatctttgatcagttcaagccatcttctttgacggaggttgaggtctggttgagtgaagatatacttcagactcttgtgatcagtgaagatgtgaaatttgttcccaa

SEQ ID NO: 134932 - DNA, 402 bp, Zea Mays
gaaaaggggctggtactgggtttaataatgcctgactgtagcataacaacaatctgattttcaatttcatctttaatggctggaggatagcgatagggcctaacttgaaaaggtgtagcacctagtaccaaaggaatcgcatgatcacaatcccgtgatggaggcagcccagtaggaggagcaaacacaacggcaaactccttcaataaatttataaaggactcaggcaaccccagctctgcaaaaggaggcacagactgtactacaaatacctcgacaacagacccaggtggaacacttgcagataacccatgtaacaataccgaagagccctggtatggtatattcatccacttttgtaaccaatgtactttcatgggactatgtgctgataaccaatcc

SEQ ID NO: 134933 - DNA, 471 bp, Zea Mays
atcggatcgtacagccacattaattctgattttgtctggcgggcacgggtagagcaaaagtgcaagatttttgcttggattcttctacaggacaagctccttactgctaacaatcttgccactcggggttggccgcaccaaccaaactgctccctctgcaatggtcccttggagaccggccctcacctctgtttgcattgcccttttgcccgtgcggtgtggcatcagattctagtttgggaaggcttgagcctcccggcccaggctgaccatgcccacttctccaacataaaagactggtgggaagctacatcctccccactcccaaataaccaaaagcgtgacttcaacgacctcatgatatacaccgtgtggaacatctagaaggagagaaaccggatgatatttgaaaacagcgccctcacccctatccaattagccttaaggattaaagaggatgtgttcactttc

SEQ ID NO: 134934 - DNA, 563 bp, Zea Mays
agtccccccctgaagcatgacaacgatgtacttgtgtcgtctaggcggtaccatctctatggacactgaagctatttcctctttagagccctcatccttaggacctacaacttcatccctctcttttcccaaatcaaggtcagccttcagactaacaaataactccgattcagttttcatgctctcagcaatagatgtgctaagaggagtttccatgaactttgccaaggcgaagccaccttcgtaggctttagaacaactttcagaatgttagccatcgtattccctttccggggtgttcccctaaggattgtcttaagcttcggccgagcctctaccttcgtcgatgcttctggttacaagctggtcaaaggcacttcaacctagattagcacctcagtaagttcctcctcatccttcttctcctcctacattgagaattaaaaccattgtaaaaaccattccaacgcattcaatctatgcaattaaaaaaccaagtaatcactacctatgtaagcgcaagaaagtaaacctttggctcatcactcaacgcaccctaaact

SEQ ID NO: 134935 - DNA, 694 bp, Zea Mays
tgcaaatgtgtagggttcaagtgtccttaccatacatggggccgaagatccccttggccataatcatggtgccatcttccttcagtgttcctgaccgtcgagtaagccttgaaggatgactcctaggtcttcatcgtcagacctccatcgctccacgttcgctgtcatgtgcaccaaccaccgtcgagagcgatggagtcgaggagacgtcggggagaaaaataaacataggaaaggaggaaacacttttctaattggttgtatcggtctgtttggacccgttaggacttaattgaaacccgaatagtgatcaagattttaagaggcatactttaaaagtttatggaccaggatgatacaaccaaacaagtttaaggactggaattgtattttactctttttacaaacaaagccctaatgatctacctgtcaacactagttacattacatataaaagcttgtgatatataatatgtatggaaactaggttatacatgtataacattttttgggaggggacacataacatagcagcgtccgaccggctcattcctatcgcccaggtcatcgccgaccatcttgatcgctagtgcctccgactcctctgcccggttctagttgcataggtcattgcggatgcggccatggccgctactatcattctcttctccaacaaagacgaccactgaagtgg

SEQ ID NO: 134936 - DNA, 823 bp, Zea Mays
ggtgatccaggaggtggaagatcttgaggcacaactctctgggcaacccatccatgtctcctcgaggctttcccagttctccggcccgaagtctcgcactcaccgagaagctctggctgaagactcgaaacgacgaaagactgctcggcgtttcagatccggagctggaggtgaagagtgagacgagcacgaggggtggacgacgagtggagaggagaggagaggaaagggaaggagggaaggggaacatgcgggaaggagaagctaagatcgttggccccgccggtagttagatgcagccaattcggatttgacgccccgtgggggagcgggcgagcggcgagggcccgactgtgcctcgcccgcggaggatgccacgcgaggtgtggtggcggtggagggagagtgccgaccagatctacagcggggcacgaggagcagaggggaacctagagaggtggaggcatcgtcaggagacgcttgttgtcgttcgccccgtcccgcgcagacgccgccgccgtggaccagaacctggaggtgtcgtcgagagggaaccgccatgtcacccatgggagcgccttcgagtcagtctggtcactatttatcttcattgttgcgccctcaagcggtagaggtggaggtcgtggactgggatcgtgctgcacgccgaagggagagcaaggcggtccgcggttgcgccgagatgcccgagcttgacgaggaacaggagagcacggggtgagaccaggagagcaggaccgctgggctaggaaggaggtggtacaagaggatttggtatgggccgcaacaagcagatgggcct

SEQ ID NO: 134937 - DNA, 413 bp, Zea Mays
ggatgaatgtgttctgaccaaacaacggcgtggataaccaaattgaggctggggaaaggttcacggattcgctagaggttaggtacacacttggatttgggcgaaataggaatcaaagagtgggtcgacagaggggtagtcatggcggcgttttacagagcaagggtgcgttccggtgatgggcttcggccgaccttcaattcgccgctttcgagagcaataagagatcaaagactaactaaaacagggaacaatttgataaatactaacccgaggagcgctggccacgggtgttgcttcacggcggagcaagaacagaggagagagggatttgtggtttcttcggtgaaattgagccgagtgctcgatcgcggaggtgcgggatgtgataaagaagtagaacccgggcgcaa

SEQ ID NO: 134938 - DNA, 330 bp, Zea Mays
cgggggctgggcagtggcttacgcttcccacccgagccgaatcatccccggcaacaccctcgggggctgggtaagtgtcaacaccatccttgaggaccaaattctctggagtagccgcctctaaggctgagggtccctcagttacttccatgggaacaagacgatccaagtcagtttcctgaccctcaagaccgcgctataaggtcgatgaggcgcgggacactgcccgggatgaccccaacccggcgtcgagcacatcagcacaaacatccgtcgcaccatcatccgctggctctgataacagatcctctggaaccatatcttcaagag

SEQ ID NO: 134939 - DNA, 714 bp, Zea Mays
caatgtcacattttgatctgataatattaactcataattacaagcccaaaattaaagagttgatagtgctttattagatattaggcaggcaaatacttgtcacttgcagtaataagaaacacacatctgaagcagtaaattttctgatggatggagtaaaatctattacacacaaggctatatatgagcagcaatacacgcatcagatattaaaaggcgaggtacgtataaacgtacatattgacgaggttactaacaaagccattaactacacttgatcaatgcaataagcaaattcgtatgtaaaaaacaaataacaaccccttttaccctttaaagtgaaggaaacaatgtgatgaggtacatcagtataaaaacgaccaataaggaacagtatgccgtagactgtggagtataagtgtaatataatgtactgacaaagaaattaatctgtctaacgtatacatgcacggagttacagatcgatatttttattaataagctagcttggttccaaaaacaggacctataagcatgtctacgtttcaagggcctagtcaaaaaatcatgacctggagttttcagcttcctgttttgatgtaggatccagttttcggtcatggtctaagcctatacatagggattctaaatttctactaagctatactagtacccgatatagagaagaacgtaaaagaggacaggttctctaga

SEQ ID NO: 134940 - DNA, 273 bp, Zea Mays
ggggagaggggcatctcggtgatgtagatggaaggatgtggagaagggggcaatgactagatttctcatgatgatggagccaggggcaggggcacgttggaggcgggggcagggagcaacattcgcgcccgagatccacggcaggggaagcgcgatggcgtgtgggatgggaacctggttcgtgtgggagggagaggcgggggtgcgacgtgtggcgacatccacgggtgcacatgcaacacatcacaccataatttcgtaagatctggatac

SEQ ID NO: 134941 - DNA, 529 bp, Zea Mays
cttgcaatgacgagcccagtggccagtttgcccacacttcctgcactggtcacgacctagcttgcggccgggtcccgtgcctgttctgccgctcaacgcaggcacgccgcgacgtggatgccgctgccggtcaccggatttagacgtgccaccgtctcctcccttctgctgctccttccgccgcgcctcccactgctcctccgttaggtacagtttaccccccgtcgaagttggtggtgcatcgtcagcatccttggccgctttcagccggccggtgatgtcctccaccgtgagggtcgagacatccagtagagtctcgatagaaattactagctgcttgtaccttgaacgcgcgatccgaagatacttctccaccaccttctctggagcctccgggtcacccagcatggcgagctgcgcgacgacatcggtgagccgaagtgcgaaagcctccaccgactcgctgtctcggaacgagagcatctcgtactcgcgacgtagcctctgtgccgtcgacttcctcacgcgt

SEQ ID NO: 134942 - DNA, 461 bp, Zea Mays
gtgagtttgggagctcgttttcatggacggaggagtcttcggctgaggatttggattattttgctgcgtttgatgtggccgcggcggagaccgtgccacggctggaagcgcgtggagcatccgattccccgactgaggcgaggaccggggagtgccgccggcgaagggtggtggcgaagcataatgttggtggtacgtcgcgaagtaataggcgtcgttggatggggatggaacaaacccgccttcggctagatcgggatagccaacaagatttgttgtcttcgtcgtcggggacatgtattggggaggggggtctgcggagtctctttgagggtgaggagttgaggattatgttgtttaatttttgtgaggcagaccttatcccaaaggctgagccaatgtagcgtttatgctgcccttgctcttgtattgcgatagtgagtgaaaacgatgccctcccc

SEQ ID NO: 134943 - DNA, 438 bp, Zea Mays
acagtgatttgtttagtacacacataaacatatttgttgtcacacagtataaacagtacacataattctcaaacacaccaaggttcacagaatattcgaacaaacaggttcacagacaaccatttgcattatagattcgtgcaccgaggtttgttttgctctgtctcggtaggttattatagcacccattgaagaagatcactctcccatataggaaaatgaagaagttcttttattggccgggtttgaaatcggttgtgcattagtatgtgacttcttgtgccatctgtcagcaggccaagccagatcaagatgttaatcgttccagaccaattagctatgggtcactatgtaaaaactgtagaggaactattggaacccaggaaaaagaatggttccaagtggtgctgctgtgtttctgaattttcagattctaaa

SEQ ID NO: 134944 - DNA, 290 bp, Zea Mays
ggacgatataaaatcattgagatgactgatggattgccaggcctactcaatgatcaagaatcgggcctaatcaaatcgacagaaaagcaggtggtctgaacgttgaattggactgggaattgtggacgcactcgctcgttaactcgttagttagcaatagtaattagaggcgtgatgtggtacacgcccaactaagctatggtatgtctggtgctgcatgttgattctgaagttctgaacagatgtcctgctgcccacctatccctcccaattatgacggtaaacaggca

SEQ ID NO: 134945 - DNA, 276 bp, Zea Mays
tttaatttgaaaggaaggaataccatgaaaaagtttatcgtgagtcgtgacagggtatgtagaagcaggcaccagctcgaggggcgattccggttagctcaaggccagatatgcaggctagtcgctcgtccaatctggagaagcagccgccagctcaaggacgtttcttgctagctctaggctagggaaaatttaactatttgatgataactctctaaaagaactatttgatgataactctctaaaagatacttttataatgtccataacagttac

SEQ ID NO: 134946 - DNA, 460 bp, Zea Mays
gtatgcttcctatcttccctagccatctggatctgatggaaaatagagtaggcatctagaaaggacaagaggtcgcacccagaggtagagtccacgatttgatctatgcgtggaagtggatacgggtccttgaacaagccttattcaggctggtgtagtcaatgcacatccgaagcttcccgtttgcctttggaatgatgactgggttggctagccacactgggtgatgaacctcttcgatgaagccaccgtcaagcagcttccggacctcctggcgaatgaagtcctgtcgctcaacggactgtctctgaggcttctgactcaccggtttggtgtcagggtggatcttcagatgatgatcaatcacctccttagggatcccaggcatctgcgacggttcaaacgcgaaaacgtcgacatttgcccggaggaaggcaacgagcgcgagttcctatttctc

SEQ ID NO: 134947 - DNA, 918 bp, Zea Mays
ctcgacgcgatctgcagcggagttccggcggagatggttcccgtgctggtggccaagccatccgcaaaggaagcctgggaggccatcaaaaccttccgcatcggtgatgaccgagtgaggaaggcgacggcgcaaaacctttgcgccgagtacgagacgatcaagctgcgagacggagaagcaatcgaggatttcgcgctccgtctgacgggaattgtccagcggctggcatcgctgggtgatcccgagccagacgacaaggtcgtggccaagtatctgcgcgtcgttcgaccgaggtacaagcagctcgtcatttccattgagacgctccttgacatctcccagctctcggtcgaggaaatcaccggaaggctgaaggcggcggacgacgtcgagcctacgccgcctcaagccgctggtgggagcttgctgctcacggaggagcagtggatggagaggtacaagcagaaggggtcggactccggacgcggtggtgcgcgtgctggaggacggggcaagcaccacggcaagccacgcggccgcggaggccgtaacaacggcgctgcaaactccggcacgagctcgagtcgtgccagcccggatgacgaatgcaggcgatgcgggcaaaagggccattgggctcgcaattgtcgtggacaattgaaggtggaggagcaggcacacgtggctcaggacgacgagcccacgctaatgtttgccctcggcattgaggaccctggcggcgctgcgaacacgtcttctccgacacctgtcgatgctgctgtgaacatcgacggcctcacaagtgtccacacgccacatcacgtgaaccttgtggaggcaaaggtgttcgcctcatttgacgcggctgggcaccgggactcacggcgatgggtcctggacactggtgccacgaac

SEQ ID NO: 134948 - DNA, 294 bp, Zea Mays
aacgagacaaaggacaccaaatcctcaagaaagttgcaccgccgtcggagctgtttgctatggatttagactgtgcagctacaattcatatagacaaaaacattgtagaagccgatatagattaaagccaagcgaacaatgtaaaacataaaaaacaacatgccaagctaagtgcagattaacataacccaaactcttaacagtccccgtcgcaatcagatcaactaacgctaatgttctcagcgccattccaaccatagaggcagacacaaaccagtccatcccctaaatatt

SEQ ID NO: 134949 - DNA, 334 bp, Zea Mays
agtagtatgggccctgaatacgaaagagtgccgagcaactgggttcacacccttccgcttgatgtatggttctgaggcaatgacaccgcaagagttaaaacatgggtcccccaaaacaaacaaatcagtcatccaaaaagtcgacgaaccaacttccaaagatctcatcgacggagaccgtgtcctcgccttgcaggccctcaacaaatatcaaatccagaccaaagcctggcgtgacaacacagtcatcccaagagaattcaatgaaggggacctcgtacttgtaagaaccaccagggcaagctagagccaaagtgggaagggccttacataa

SEQ ID NO: 134950 - DNA, 782 bp, Zea Mays
ggacatgatcccacataaaaagtgaagtaacagctactcaaaggatggactgtcaggtggctagtgacttagtgtattcagaatttaaagtctgaaatcagtagtgatgcaaagtttagagccctattgtgaccaacccttgtggttttggactatgaactatgtggcaacgttggagcccatagtacagagaatatgttttataaataggtttggacttggttctgcataaaagtgggagtaaaacacctctaaacttgctctatcagccaaaaggtatgcagatttagttgactgtttctaagtaatttagtgtgtttttacccacatttggagctctatggtaattaatatatggagtatgagccctatttcatgtagaaaagttaaataccatttgaaggagagtaagtcttatgcaaagtgttagccttgctgctgtgtaaaatttggagataatggtactgcaatcctctatgtcaggtttggcatggagctgtgtcagttagctgaaatcagtgtttcagtatttttgttaaactttggagcactataaccattgatctgtgtggttataagccaaggaccctatagcaaagtgataggggactagatagtgaacaagtttgtttaggaatgcttgagctgtccttgtttggaatagggagaaaaaggtgttcaaactgcctttatcagacatgtgaagtgcaggtctgatgcagtaatttgagttttggttcagtgtctttctatggattttggagcttgtttgtgattgatcc

SEQ ID NO: 134951 - DNA, 570 bp, Zea Mays
ggggggcacggccacggcggaaacccaagctccggcgagcaattccccacggaccgcgatgcctccacacgaattgatgccactggcgcatgcgatgcatcatggcgaacactcggttacattctcccgtacccgaacggcgacgagtacggaaaacagcggcggcgacctccatcctttttgcgacacggtaatggtggccctctgtgtggttctcggcgagacccgaccctcggcgtgcgcatcacgcgagcgggtcctaggaatatgattcgcgcggccgctggtgctctcgctgtggaattcgaagccgccggaggatggctggacaatggccgctagcagcacgggtagggggaagtgagaggagcggctggtgtgggtgagaggacttggcaccatggagcggagaccgggaaaaaagcacaagcgccccgggattttatcccatgtcgaggggcaacgaccgtgccgaattcgctggcgagatccggtttccgcggcgatggattttgacggagcaacgatggccacagtgaggaagatgaggactccgaccggagggtcccc

SEQ ID NO: 134952 - DNA, 533 bp, Zea Mays
aatatccaaggctttactagcttctgggagaggcgccaccgccaatgttctagcaggagcggcatcagaagaatcctcggctaacatatcaagcatagcacttatctctgcatcactgggatccaaaggcacctcaaagtgaacctgccgttcatcatcaggaatttcttcaagcaaaacaaccaaagcactaacttcttcggcagagggtcgcactctaaggcccaaaccgccatcaccagcaggaggatttgacatgaaatgggtaaaggccttggaaggaggcaagttccaggccgagtaggcaacaggagcaccaacatttgataccttgcctctgagtatcatttcgagccagctcaccaagtccacaacagtaattcttctattggtgacccaggtggagtcagccaggcctcagtacagataggccgggtatgccctgtccttcaatggctgaatattcttgaagacaaagtcagcaaccacagcctcaatagtcagacccctctccttcaacaccccaacttcag

SEQ ID NO: 134953 - DNA, 299 bp, Zea Mays
gggaatccttcgtcaacactctgcgccgcattctcctcaacagaatggcgtcgtagaaaggagaaaccagatggtggtgaacacggcgcgctccatcctgcgcgcacgaagcatgcccggcttcttctggggagaggcagtgcacaccgcagtgtatctgctcaatcggtcgccaacagccgcactcgatggcctcacaccgttccaagcgtggtacgggaagaaaccacccgtgcacttcctaagagtgttcgggtgcgtcgccttcatcaaacacctgcgcccgcacccgaccaagc

SEQ ID NO: 134954 - DNA, 566 bp, Zea Mays
gttattcctcttcttctcaacccttcttcattggatttgagataatccttgttcttgatgattgtgtgaagtgtttggggttacttgttgtttgaggagtgccctaggatcaatacaaggctctggtttgagcagatcgtgttttgtgcagttctctagtagttttgtttgaaattacagaaccccaacaaaaccccgatgttcttgttgcgcttaccttttcatgataatacttcatgaataccttcatcctctgtgcttgctgcctacaaaattcagaatcattctgataaattttcatcgcatgacactgctgccttgacgcgcggcactgccgctccctagcattatcggacctacgtgcaacactaccagacctaagtgcggcactgctgcttgcttctgcaggtgcttttcttaatactgttcggtgtagctaatcgacactagattaggttgttcctgctggagtgttcttggtgtcccttgggggtctagattgaattttggaatcaagtctcatgtgctcaagtttgagaattttagaggctcccattcacctcccc

SEQ ID NO: 134955 - DNA, 689 bp, Zea Mays
gttttaattgagttagtttaaaagaaatcacatttagaagaccacaaaaaagatgcattgaatgttactaggttcatatgacaagaaacttatgttttgtatcacaaaagcatatctgcatattaattaagtaatcattggctaaagcttcgtccaaacacaatgaaagatgcattcaaaattcaaacaatgtactaaatttgaatgaccacaagctaaaacaaatttatataccgaactaaacataaactatgtttatgatttaagcagaccaaaatatatgaacagaaacaatctcacaaggaatatgaatacagaaatggtacacatacaagatgtagtagcaatgagcgtcacgtgggaggtacagatcggagacatcggcaacatcgacgacctcggccaacatggagaaggcgcgcacaaggcctccagagcggtggacggtagaactaagcaaacgtgaaaggcgacctaaagccgccatctcagccgagcgagcggcgaggaccggcgctaggaagttttcggatctcgggcgtactgtaagtaacataggatcaatggcgtaaagaactaacaatagtttaacattaggatcagatactaatttaaacggtccagccaatagatctatatgcttttttaaacggcgttgggatgcataactctaatcttaggtaaatttt

SEQ ID NO: 134956 - DNA, 436 bp, Zea Mays
agtagttcatttggagggaatcctaggctatgcggaccaccactgtcagaatttccatgtggtgcgtcaccatcaccatacactccaagcgctcaacttgtgcataggtcgtcacctaacagttttgatgtggtcttgtttctcttcatcgggcttggctttggtgtaggatttgcagctgctattgtcgtgaaatggaatcgggtcggccggtggttcattgcaaatgcaagagctttgcatcgttgatcaccattggaagttgagagtctgtttccaaatgcatgtgtctgcaatatatatgtttgtcaccaagcctcttttcttaactatcggataagctatgctctaggtagattatttgtaaaatctctattgtcatcgatcatgaagtttgttgttcaaagattatgtaggagaagcgtattggtttgat

SEQ ID NO: 134957 - DNA, 310 bp, Zea Mays
aaaagatcaaggttttgacacaccggcctaggtacattgaaatggccagggtgctgaagcttgctgagggggcttctcccgccgctgagccggaataccccggtcctgccggtgccaagggagaatcggctgaagcaccgaaagtaatgggacaggagaaagccgagtcggccaaagcgccgaagcgtcttgtcgaagccaaagaaaaacggtcgaagagtcagagctagaggagttggcaggattgccaaaaatcctgagcccaccaccagagccggagttaccgaaggtatccaaaattcctgcaata

SEQ ID NO: 134958 - DNA, 286 bp, Zea Mays
ggggtttgattttgtgaaaaagagaaagcatatgggtctcgtgcacatgtctgtgagatggatgagtaggaatcggggtcttgattagctgttcaaaatatcgagggccttggtgtaaagtggcaagcgcaggtgcgggctaccggccaggggccggttttgcctagttcatggatcgagcccacagattttggcccaaaactgttcataggtttcctttttctttttgctggcaacttataaaattcaccagaatatgtagaaaaatgcaaaaattgtgaaacat

SEQ ID NO: 134959 - DNA, 488 bp, Zea Mays
tacacaatgccatacccttagaggggttggggacacatatttatagccctaggggctgcagtacactgcactacacactacacactgcagcacacagatgctgtcctttagatactaaagtgctaaagtgtgcagtcaaaaactgcaactgccatctactgctactgtcctgctgctgcagcagtcaaaaggtgctgttgtgctgcagcagtcaaaaggtgactgactgtctccaactgcactcaaccgcactgctgctgtgctgcagcagtcaaaaggtgactgtctccaactgcactcaactgcactgctgctgtgctgcagcagtcaaaaggtgctgttgtgctgcagtcctgtactgctgtgctgctgtccttttcaccacaaaacagagaccacatgacttattctatcagcctagcagtgtgctgaggcgaggctaatgcgacctgtcccagcggcccatcacccgtgctggcctcctcgag

SEQ ID NO: 134960 - DNA, 397 bp, Zea Mays
tactccgttgaactccagatggatggcgtcgagcttagcttcaatgcgacgactggaagtctaatctccaccgtccaacacgtgatcaacggcacacgggcacacagccttccccctttccccacgacccctgtcacggcggcgcatcaccaaacacggcggcgccctcgctggcgcaaacacgccgcccgattcaagacgtgatttcgcccgacatataacggaactcaacgcttatacgaacgcgaattgaatagtagggttcatactggtggaacgacggtcgtagagtctgtccacgacacgagcagctgagcggcgagagggatgtcgacggtgtaaaattccggccgccccgatggtcgtcacttccttctccggcatcgagcgccctccc

SEQ ID NO: 134961 - DNA, 323 bp, Zea Mays
tgtagacaaactatctgagtcatatacaattcttctcgcttggctcccgtgtaattcgtcctcactagtatgaaatgagccacttttgtcaatctgtccacaatcacccaaatagagtcatatcctatcggagtgcggggtagtccaacaatgaagtccataccaatttcttcccattttcactcgggtatcttaagcaggtgcaatagtccagctggtctttgatgttcggctttgaccctttgaaacacatcacacttagccacatgtgcaacaacatctcttttcaatccataccaccagtatttctgcttcaaatcctg

SEQ ID NO: 134962 - DNA, 509 bp, Zea Mays
tccctgtgccaccctagtctactgtgacaacatcagtgttgtatatctctccagcaatccagtgcagcatcagcggacaaaacatgttgagattgatctccattttgttcgagaaaaggtcgccctcggtcacgctcgggttcttcatgttcctacaacatcacagtacgcagacgtcttcaccatgcaaggggctacccacctcgttgttccaggagtttcggtccagcctgaccgttagcgatgctcccgattagactgtgggggagtgttagactactgtatttgtatttatagtatgtctaatattggtagttagtccttgattgtaggcccttgattagaggcccttgattgtaggcatgtagggctgtgcgttgccatgtgtgccacgacgcacagcctatgtatattgtacatctccatggaatacaatcaagcaattcccaacaaatcacactttcactaagttacctttccctggacaacaactttttgaatggcgtgat

SEQ ID NO: 134963 - DNA, 664 bp, Zea Mays
ttagtcggtcgagcagtcccaatctttgtttacttaacttatgaccaccagtgagtcatcatacactattaatttcttgatgccgagtgaaacaacgatgcttagcccgtggaccagtgctttgtattctgttgcattatttgatgctggaaacaagagctggagtgcatacttgagttgttcacctccgggagcgataaagagaattcatgtccctgctccttgcagtctcagcgagctatcgaagtacatcctccatatttcagtgacctctaggctctccgggacctggtgctcagtccattctgatacgaagtcgaccagtgcctgagtttttatcgtcgtgtggggtcgaaactctatatcatgagcttctagcccgcacgcccacttggccattctcccaatagcttccttgttgtgaagaatgtcgtctattggaaatctcgtgactactatgactttgtggtcgtcaaagtagtgccggagcttgcgagcggttagaagtaccacgtataacagtttctgaacttagggataccttatctttgagggtccaaggacttcactgatgatgaaaaccggatgctgcactggatatgcatatccttccgcccgctcgactattaacactgtgatatataacagcaaatcttctaccggc

SEQ ID NO: 134964 - DNA, 469 bp, Zea Mays
attggttgccagatgagcagaaccaggcccaacccagcagttgattggttgcacagttgcattagcaaattcaaacacacagatgcaagtagagtgattggttgcagctgcatacaagtggtatggtcaccactgcatacaagtggtcaggttacccaaaccaaatgatcaacaagagcacaactatcagtacaaactgagagagaatcaagccatctttccaactgaaaccaacacgaccagtcttaatgactgattgtttaaaagcagcaacagcttcatcttttgaggagtagcttttgcagcgtgctcctttgaaaccatgaacttgaacatgacaagcatcccaggaatcaaacacaccaacttttcttccatgatgaacaacataccacttcatgttggctatataggaagaaaaaacatcattgacattgcacatttgctcagatcataagtagtataatgc

SEQ ID NO: 134965 - DNA, 524 bp, Zea Mays
ctccagcagcagcaagaagaagggcgagatcggcagcgccaacccgtaggagatgtaggaggtgaacaacacgaactccccggcagcaagatcgccaagggggatggcgccggtgcggattcttccggcaagccctggcgcgctccacccaagcaggtcgcgcaccaggttgagcgcctcctcagactgaaaacggtcaggatgaccaagcgaagtcatggcttgtgcggcggcgtgtggaacagaggagcacgaaggcaaaggggtgcaggtgattgggagagaatgcgaaaaggtaactgttgcaggcggcgtgaatcctttttcaaggaaacctgagtccttgttcagggaaacccttccgcgcgcccccgaattgccacaggaaatccacccgacgcgcacctaggacccagacagcccactctatgacacgggggcctgggtccacaagtcatacaggttgtgtgctggatttcgggtgcggaaagagcgaaccgtcgcgcgcgatagcgcacctcctt

SEQ ID NO: 134966 - DNA, 851 bp, Zea Mays
gttgaaatcttgggacgtggaaggtggaggagcatgttccccatgccgctaaaggtaaaggagacctgggaccgcatggcagcaagtcacggatgatcaagatcgaagacatgtggcgaacgacgcgggtgacttggaacttgacgattcatgacacatttcatccatgtcgctaccgtgcccaagacgagaaaacatgccgcccatgccgccataatgccacgttgccgccacaccccagattattagggcctaacagctaggaagtgggtacgatgctagtatagttgcacctattgcgtcgaataggcgcgacatctcctgactccaactctttgactgactgtggcgtggctagccacatggcatgcccagagcccccctttgaacagggtcgttgtggggccctcggatacgtggcatgtcaggacccgcgcaaggtgggggctcctggagcccgagtgcgcagggctcccaagctctgcaagatagtcggcgaagcgggtgcttgaaggagtctaccttaggggttcagagatcgtctagggaggtctgagaccgccggtgatacctcgggaacacatggagccattgggcaaagaagggccactggggtctgggggccctactgggaccctagaacacgtggtagcaccgaacctcgtgaaaggcagggaactagttgggccacgtggcgcaaccggaccctactaatgggttggcgagggttgttgtggaagggagcctaatgaaagtttacatggcaggaggcacttgcaatagcgtgtggcgaggccccgaccacgtattctccttgtatgttcagagaaatcctatcgatccgacccagc

SEQ ID NO: 134967 - DNA, 743 bp, Zea Mays
agcgaccaacaccactcgcgcacttgtctcgctccagtctccggtcggtggcccccgtttgtcagtttcttccttcttctccgcgtcgcacggctgaaaacggaacagccgcacatctcgccgtgcgtccgcgccggcctccctcccacgtcgtgtctcgcacgtgctggtcgagtctccaactgcgcgcgtcgtgccacttcctggtgggatcgggatgtcagttagcctcttccccagcagcacggtggaggtagccccgtagacggcggaaatccgttgcaaccatcgatccgtgcatggcgtggctgggcgacccgactagcataacagcctccgcacctgcgggatcgggtgcgcagtagatataaaccctcctccttgggtcttgtcgcctctcctgcccaaatcactgtccgccaccgttgacagctgttctgccgagagcgagagaggaaggtctgccgtcgacgcctagcgccttcggtgtcactcatgtcccgggaaggggtaaggggagcatcgccacacactatagaagcccgccgttgaccaaatcctatgggaaatcactgaaccggaggcaatttctcaccggcgctcattttctgtcgcggatctaccctcatcgtggctggagcgttcacctgtgcaaacatcggtaataaaaccctctggccatttgcgttatcatatggtttctttaggcatgctcgatttaactagggaagccctgatgcgac

SEQ ID NO: 134968 - DNA, 485 bp, Zea Mays
attggatgaagctcacctttaaaaattctccatgcaccccggcagcaataagatgtatcatgacctcagatctttatactagtggaccagaatgaagagggaaattgctaagtatatatctaaatgtgacacctgccagagagtcaaggccagtcacttgaaggtagcaggcactctacgaccccttcccatcccatcttggaactgggaggatatttgcatggattttatcgtgggattgcccaatacctcctggcaccatgattctatttgggtcatcgtggataggctgaccaagacggctcatttcttgccagtgcataccacccacaagacagagaaatatgcagaaatctatgttgatcaaatagtacgtttgcatggaattccgaagacgattgtatctgacagaggagcactgtttgtggcactcttttgggagcagctccaagaatcacttgggacccatgtaataagaagctcag

SEQ ID NO: 134969 - DNA, 659 bp, Zea Mays
cttttttgggcatgcattaacaaaacagcggaggtaggtttcgaggcactggttaactcgctccgtctgaccgtcggattgggggtggtaggaagaactcatgcgcagctcggcacccgctagcttgaagaagtgttgccaaaactgactggtgaacacagggtcccggtcagaaatcacagccactggaaaaccatggaggcgatagacttgagagacaaaaacttgagccacggtcagcgcagtatacgggtgagacagtggaatgaaatgagcaaacttagtgaatttatcaaccaccactaaaatgcaatccgcggtgcccgaacgaggaaggccttcgacaaaatccaatgacaccgtgtgccaggcagacagcggaacttccagtggttgtaacttgcctgggtaagctgaccggtctggttttgcctgcaaacagacttgacattgctgaacgaatgtcttcacatattgcttcatctgtgtccaggaaaaaagactctttacacggctatatgtagcgggaatgccggaatgtccaccaatcgctgagcaatggagagctgagacaatcttatgctgcaatggttcagctgccccaagccatatacgattcttataccggagcagaccgactttcaaagtgaagtgcggga

SEQ ID NO: 134970 - DNA, 549 bp, Zea Mays
cgtacattgacagactgaaagttcattaggtgttccgtccgtcagcaaagaagctagcatcgctgaacctttttttttcaagtgtacaattcacttggtataatgcactaagcacgataaaataccgttgcgataaggaaaacaaaattaaattaaaatgcgcacagcaccattctcgacggaaaatgtaaagaactgagagcatcattgagcaagcggcgatccatatgtcactagactgactaggcaacaaggcaagagcaacgtattctatttcagcagggacgtagaccacgtaactgacgctactggaaataatcaatactccttgttcttgaggaggcggatatggattggactacacattgaatgaataattatggagatgctgcccccagcctaatcgcctacagtagtacgcacgtagctagcagctggacgaacgttatagtagtagatagactagtagtagtggctaacgcattcaaaaatccggtaggctcaacacaattaatcgaggttacattagcacgacaagatttttttttt

SEQ ID NO: 134971 - DNA, 297 bp, Zea Mays
gctggtgaggacggcctcaacaccctagctagtgtagtggctggtctcaacaccgacctggacagtgccaccctggatctctacagggtgcacttggagctagaaaatgcccatgcaggattgcagccctggaagcccaactgcaaggactagatccgctcaaagctcagatccccgccatggcattgtctcctccccgcaagaggctgcgctatggagtgcccggatccgtcactaggctgctttaaagtattttgagctatgatgtaataagttagtcttcgcgttagacgttga

SEQ ID NO: 134972 - DNA, 337 bp, Zea Mays
agtccttcttcatggctcagctgttagctcagattgctctgcaagctcacctgcgtctggatttcactgctttccgtacaacggccgacgtagagtcagagggtcactccacttatctgccagggttatactctttgctaacttttggtggcagatatgttgagtgggtgagagcattctatggcacagtttcgatcgaccctgaccatcagtggatgaggttttggttcgagcatgaagatgtcactttgcatgcagctcagatccgagagctatttggattccttgagtcgacgacgaggcttcacaacatgtgctatggtacctcagaccctcc

SEQ ID NO: 134973 - DNA, 373 bp, Zea Mays
attccaaccaaacaagagctccaaccaaacagccctttaatgcatgcagtcgctagcactcgtggagattcttttcgggccggccgggttactgctagctgcaatgaatttgaaagatggacagttggacacgaacacgacacgcatgcaatttccttcgcatctcctgtagcctatcacgcatctctgctggagataataatattgcattgagatgtgtagtagttaagacctgtgcggcgagagggtgcactgtgcgtcgctgtagtgtttgcttggtcgtcgatctagagggttactggccggaacgacacaaccaatccgggggcgagattccatctactaccatcagcactgcaaagctgcagatcca

SEQ ID NO: 134974 - DNA, 1195 bp, Zea Mays
gctatatttatccttctagaatcaacctgcgataagcttttcttctgatcttgtagttcgagtctctaggagttcattgacctaactctattaagcctcccacgatgctgttactgcgtgttacccaatggccaacctgatttcgcctttgtttacatatgaataatctcatcgcatgtccacggacgccacgagagaaactaaacacgatcagccgtggcaacgtgcaacaaacaattcttgactgcaacaattcaaactaatctaccaacagcaacctaactagattttcaggaagaaaaagaacacctccccaaagaacacaaacaacaatgagaaaatttatacaccaaaatcttggagaaaacctgacgtagatctaactctccgcaaaccaaaaaatgtcactttagaactcaacaccaattcacataaaaatgaattggtcatctgaaaccagactaatttgcatcagagaagagtggaggaccttcggtttcagcaaactggtagaaactgattaactcccacagtaagaaatccaaacaccttatagctaatctatttacttgaacataaaagcatctccaaaagtgccttaaattagtgtctatcttacaacttataaacaacaaattcaatagtgccatattttacaaatttttatcaaaaaaaaaagcaaaccatgaagtgaaccaaatatagtccaccgcatattaatacctgttttctacatcatcctcaaccttttctttcttaacaatataatttatttactaaaatgcatggcttaattgttgcatttgtttttagcgcccttctaaacactttaaatgatgtatgctctaagacacgtgacagtatagcaagctggcgagtgccgtcaatttaaaccgtgaaacagtgagtttgaaaattaaatattttgcttcataatacttcctgtctccctacatttcacattttccatcatgttggaatatattgtacaaaaatatacatctgttcagggaaaaaaaacgtaactattgtaatgcttccgctctaccctcgacttcgaagctacaaaagaagcttagtgattatagcatgcaatgtaaatggtgcatggtcatttctcattaactctttaatttagttctcccaggcccatgtttcaaagtactaaatctaagaaaaacactacacatgttct

SEQ ID NO: 134975 - DNA, 490 bp, Zea Mays
tcgagcccaaagcccctcccttctttgtccagtgtgcacaatagggtcactgcttatttgcaaccatgttgtgcaaaggagaaggtcttcaggacctgtaaagttttgttccttcgacttcttatttttcaaaacaggtgctgcatttttttctggactattgatgtcctgaacactatgttcagcatctgactcaaggttgacaagtaaggaaggtatagtattcgaaccctgcaatggtgtattggtatttgaaggaggataggagtcaccaaaaggaggatgttccactgaaccgagaggattcctgacaaagttgaggtaatggttccaataaactgcagactgtgaggcaggaatcatggttgattgggaagtagaatttccagtctgcatgggagcccacattgtagttggaccttggccaggattaggaaaatttatgttggccatcatgttgtaatccattggaggctgctgcatgaagccc

SEQ ID NO: 134976 - DNA, 355 bp, Zea Mays
gggggacagcaccagctcgttggtggcgcaagtctggagatgcgtcgtgggaggaaaacagagtatctcgacatccccctcaaggatagcatcaaggggtggcgtctcgagtggttcatcgtggagaaccactgcaagtccctccccccttagtcggggaggcaggcagatgtctgcactccaagctgggtagaatctctaacccattcggagataacagaggcaaaagtactgcttgccgaggtctacttgttgaaagacaaaggtctgactgctgaggctgtggtcgctgatttcgtcttcaagaacatccaacctttgaaggacatggcataccctgcttatctgtatagtg

SEQ ID NO: 134977 - DNA, 445 bp, Zea Mays
ccaagggtgagataagtagaacaccactctcaaattgagatagaagactgaagattttagataacagacataatgtaatcacaaggtaggatagagtgatgagaagggtaaaggaaataacaaacaaaaacacaacaaaggatagagttaaaaacttgcaggtgacaaagaagtggatacgaccaagggaaaagtaggtaaagtacgatgctcaaattgagatggaaagggagaagatttttaaatgccggtataagataaacctcaagtaagatatagaggtgtctaaggtgaaggtgataataacaaaagtcatgacaaatgatagagttaaggaaagactcacgtattggcgaagtggagaaaacaatcaagggtaagataggtgagggtgcaagagaatggttgaagtaagaactcattatcgagagaagttataaaggaa

SEQ ID NO: 134978 - DNA, 284 bp, Zea Mays
caacatattacaccactgatataaaaatacaagcagccaagcagtcaagtattcaatgacaacaagcatatgctatcaaagtatcaagtatcaaccagcactccaggtctccagcaacatattacatatatcaaccaaaagtcaaaagcactcatcaacttgcatatttcaaaaggccaaaaacatccagcaacttcaacttcactgcttgtaatcttgtatagttgtatccacatccaccattccaccaaaactccaaaagcatccagcaaccagcagtccag

SEQ ID NO: 134979 - DNA, 373 bp, Zea Mays
tgataaggctatacgacatcgatcctttgtagtgggagacttggtccttcgccgaattctaacgggggaaggacggcacaaattgtcaccactatgggaagggccatttgtagtagtggaggtcactcggccaggatcatatcggcttactcaaatggatggcacataaatagggaattcatgtaatatagagcatctcaggaagttttatccttagcaagattcaaaagctatcggggcagcattgtattctgtaattggaaaatacatcatcaataaatttcattctcaaggggcactcgaactgtttattatcaatcagcacgcttactcggcatagggtgaccactataccctactaacggagcaatca

SEQ ID NO: 134980 - DNA, 502 bp, Zea Mays
aaaagagatggataggttagggcgagaatagctaggggtgagaaagtttatggtaaggaagaactatgtgtttgatggtaaagcatctgaagattgagtttgactttcttgacgaggttgatcctttcttctccggccttggtctcattgatttgaggttagtgtatattatcggggttggagaatattgttaagatagatatatgtgagatagactacatgatgtaggtcaaaatcttgtttgaggtcaagtgagggtagacagattatgcaatctatcaagattctatgggttgggtcagatctcatgcatgtgattgagttggtctaatgtactgagttaagttaacacctggctagtagggtctaatctatttcactagtattaactagtctgttaagtaactcactttagattggaccatattagattagatgggatctagattagattggtatgactagattagactagataatatctaattactttggattagat

SEQ ID NO: 134981 - DNA, 400 bp, Zea Mays
gaagcacataatcttccaataactactatgtcaacactcattcaaattgattcagccggtggtagaattcgagctgatagtatttgcctgaatgtaagtgtggaaataaggggatagattgtctcgctaatctcatagtaatgggtactcagggaatagatgttatcctagggataaactggctagttaagtaccaggcagttatcagttgtgataagaggacaatcaagttgatgtccccaataggagaggaggtggtgaccgagttagtcccgcctgagccaaggaaagagagttgttatcagatggctattgatagcagtgaagcagatccactcgagattatcaaagttgtgttcgagttcccagatgtgtttccaaaggacttaccaggtatgcc

SEQ ID NO: 134982 - DNA, 332 bp, Zea Mays
gggtaattctgctcatgcggcttaagtaggcgtgatgcataagcaataactttttcattttgcatcagcacacaccctaagccttgcctcgaggtatcacagaagacgacaaaatcctgatggatatctggtaatgtcaaaacgggtgctgttgtgagtttctcctttatgatctgaaaacttccttcacattttggggtctacacaaatttatggtctttcttgagaagttctgtcataggtcttgctatgctggagaatcctttgatgaagcggcggtaataccctgccattcccaggaagcttcgaacttcactgacgttggtcagctg

SEQ ID NO: 134983 - DNA, 373 bp, Zea Mays
gttcttgtcctgctctttaatgttaggcatctcttcagttgcttcatcaatctttttctgaagctcagaaagacgaagcaccttctccctgcgcttctccaactgttggttgtggttctggggctgatagccttccccttttggctacttgcttcccttagagcatcgtccccttgattggtgtccaaggtcctgaggatggggccagtcgttgttgacttcttcgatggcatggtacgagttgtggtcgtgagatcaccggaggtgggtgccaatgttggtacttgatctcaatccctctaaaggtgccaaaaatcaaggcaatacaagttagatataaagacctccatcctcaagaactaacacttcttcg

SEQ ID NO: 134984 - DNA, 438 bp, Zea Mays
cgaaacaagtcctgcatactgcttcgtgttattccctatacattccagagtatgttggtaatcagcagccattttcacatcccatagttttagtagcttcagcaagccactctccagctgcttgggcattgccacaaccaccggtcatggctccaactttgtcccacaaccaactgcctgaagggcagcatcaaattcagcaacaacatgatgcaagagaagagtccgaagctcggacagttaatagcactgttccatagtcgaggcacatttactgaagccacagagggctgggttaattttttttcataaacacctattgtaattttcatttctctcgatttcatgttctttccttagagacaatatgagaaggtataaccttcgacatgttgtaataaatctatgattacaccatcgagtgtaacagcaagggtg

SEQ ID NO: 134985 - DNA, 868 bp, Zea Mays
ctattcctatgtgccgctgacagatcacaaataggacctccaccttctatttccttgcacggtgaagtccctgacggcgttcatgcccagccgagctccggcgagcggctgcaccggccgaatggatctatgaccggcactcccgagcggcggacactaaattggacccaccctaaacatttcccctaggttaatttcaccaatagcgcactaaaacgccctggccacggtgaccgtatgggcaatggatgaacacgggcgttcatggcaacccagggcggtctggttcaatcagaggggtcgtgaagcttgaggaggacctaaggacgctattacaattgatcaagacactgggcctaacctggaataggctggccgcggtgaagtgttcttgcggtgggttcagaccgatttggggagaattagaaattcaagctcactgatgattgactggaagcaatactggtcggggtggtgcaggataatgtggtggagctggccgcaggctcaatttatagaaggagcaagcggtgacgagcaatttgggcagattgcactggcgccggagatgaagaagaaggtgctggccgcgtgagtgcgtgtccacagtcgtggcgagctcaccggcgacgatgggactgctattggagtcacggtgacgcggtggaaagactcggacacgcggcgggcacagagttggcacgacggcggcgagcagctttatctacggcggtgagcaagggggaatgaattacggctagccggagtggcttccaaatcaccagcggcgaagatattttgaccccgcgacgttatcgacttaccccgagcgtgaatcatgacgccggcgacgcgaatcacggcgggg

SEQ ID NO: 134986 - DNA, 516 bp, Zea Mays
gtctcgggtaagaattccacagactcaggggaacacccgagtggactgcgggttgattattaaattatctagggactcattagcatatcgcatccgcgaaggggtatcgcggcatgtgagccgtccgatcaggcatcgagggtttggattactcttctcccgcaccgaaccggtatgcaacgcggaccacacgatttgaaaggaactgttcagattttattaagccagagtcactgagatccacccgatcggatccgacggttaggatttcacccagcctaaccgatctgcgtgcctctatctaagccgtccgcttcacgatccacgaacgaaaagccatcgtattcctcccgacgaacacgtagtacccccagcgtatacaggacccagggccagccattgccgtccacgcctaaacaccgagccaaacccgactctctctctctcctgctggctaaccggcgctctggccggccaagaccaaccagtggtcggcaccgccgtcctccttcaacc

SEQ ID NO: 134987 - DNA, 469 bp, Zea Mays
gagaacaccaaccaatcgacgcttcaccattgagtggatgtggcaaaggtcatggtggagggcgatcagatggttcactggcgactcatcccgacaacaggctgaggcatgggctggcatagcggaaggggccaggggatcggtctgtccacgtcgctagtagacgcaggtggggtcagcaaagtgttccacatggggcgcaggcgacggggctgcatgtggcacatgcggacttgatggggagagcttgtgagtagcagtggcagaggtgctgggatagcaagcacaaccaaatatctgaaggtgtgcataggagggggttgtgccaaagagagtgaagtggggagtagggtgattgaccaccttgaaggggagttggttgaggatatgtgtagcagtgttcaaggcttccactcaatagctagcagggagagatgcctaaaagagaagacatcagatcatgttattg

SEQ ID NO: 134988 - DNA, 344 bp, Zea Mays
ctaaaatctgtgcaaaggtgatatttgtgcaacgaaagcgttgcgtccagcgcgcggcgatgtgtcctaccttcgcactatcgtattttctcacgtgatggttgtttatgtgagttcatcttttagtcggcgttggccttgtgggcttgatggttgtttatgtgagttcctctcttagttggcattggcctcgtgggcggtaatggttgtggctcttggttgtgtggccattaacacctctgcttcgtcatctgtctcctgttggtggtgacatcaatcttatgctaggtgtacccaagatctcgccctccctccttagaggcttcctcccctttaagagcgta

SEQ ID NO: 134989 - DNA, 614 bp, Zea Mays
tgtgtgatgagttgtgcaagctgaacatagaagttgtttcctccggtgctttaagttatatttcagtggagcccaccctacatgagcaaatagtcatggcacagattggtgacaaggatgttcaagtcattaaggaaatggtcaaacaaaaggtggacaaatacaaatgcttccgtcaggacaacaaaggaattctatggtttggtgaccgattggttgttcccaagaaccccgagcttagaaagagaatattggatgaagctcacctttctaaattctccatgcatcccggcagtaacaagatgtatcatgatctcagatccttgtactggtggaccagaatgaagagggaaattgctaagtatatatctgaatgcgacacttgccagagagttaaggccagtcatttcaaggtagcaggcaccttacagccccttcccataccatcttggaaatgggaggatatttgcatggatttcattgtgggattgcccaatacctcccggcaccatgattctatttgggtcattgtggataggttgaccaaaacagcgcatttcttgccagtacataccacccacagggcagaaaagtatgcagaaatttatattgac

SEQ ID NO: 134990 - DNA, 441 bp, Zea Mays
ttttgatggctcgttgaaactgtagggggcaggcgcagggatcctcttcattgcacctggaggtgaacaactcaaatatgctcttcagttgctattcccagcgtccaataatgcagcagaatatgaagctttgattcatggactgaacattgccatatcactgggcatcaagagactgatggtatatggagattcactagtggtcgtaagtcagataaataaagagtgggattgctcgaatgactctatgggcaagtactgcacaaccgtccgaaagctagaagacaaattttaaaggttggaatttcatcatgttgagagagatcgcaacgcggcagcagacgcgttgtcaaaactaggatccagtcagactcaggtcccacctggagttttcgtccaagaagtaccacacccgagtatttccttagttcgggcagaaga

SEQ ID NO: 134991 - DNA, 478 bp, Zea Mays
gccgcttgtagagcaatgggaaatgccaaaggaaactatcagcaagcctgacgaaggtggactggttaggttgaaatacaccttcagatatgagggtaagtttattgagccagatgatgactggctgaaatgcatcgaagctacaagcgacgaactgcttggaccatattcaaagacagaagataacgcgctatctgcgaccttcggagggcggaaaaagaagaggctgaatagagttttcgatgctattgggtttatgtaccctgattaccgctacccgctgaaagggcaaaagagaaaaagcgcaacttctggaaaaggtgatacttcggttgctctaagtgaggttgcgccgaagaggaaaagggtgaaggtccttactcaccgaccacgcttcatcaaaccggcctcagtgcccgaatttggtggtgagaccggtactgctactgaaaccaaagaaccttctcttactcagaag

SEQ ID NO: 134992 - DNA, 587 bp, Zea Mays
cacccacgcacccaactctcttcttatagccccgccagtgccccgcactcacccctcacctcatttcacacaccctcgcattctctcgtgctctgctctcgccgccagacaccgccagagacccgcgctcacattcccgaccgttcagctcaccggagactacgccaagcatccccgagctccaccccgaggtgagacatccgtcaccgtgcccaatttcccttattgcgccctgtgttcgtccaattttgctttcgccggtgctcgaccgtggcggtccaccgtgctcgcgcggtggccgattgatttagtccggtttagttcaccggagtagttccctgtgtcgcccctttctctgctgaagctagcccaggccttaacgagccttaagtcccctccccgtggccggaatcgctcaccgaagtttcttcggcccgcccgaggccacctcaccgccgctctcccctctctgcccgtggattcatggtcctttccccgccattgagttcgccgtggcgccctcctcccctctgcccaactttggcgaccccggagccaccctagctcgcgcctgcctcaacgccggc

SEQ ID NO: 134993 - DNA, 691 bp, Zea Mays
caaggatggggctccatttcccttttttccactaaagtcagcaacgccgaaataaaagatatcttttctattggctcatgcatttttcctttttttggtcggcagactctggtcagcctgcgtatagggaatgaaccagctagtgtcaacatcagccttattttcccactttgattggccatattagcatcttgcttacttgggaataatactaaaaagatcgcactcagccttttccacagaggttttcctattttatttttatttttttgccagggaactttggggaacttgtgtggtgtctctacaactgtaaatgtggaaaatgaagattagttgcttcttaggagtctatgaattcaccacgatggaatgattactctagcattgtaaaagaataataatcatatagtcgcaaaataatcacatgaaagctgtaacaatcattatatcatcgatccccatcaactttccaaaacaccactaacctatctagttcaattgacctgttactgtagctgttttaacaccacagtaccctcatctattgtagctttcctcgtccttgtgagtttgtgaccttgtcccaactctcaacccaagaaaaaaagacgtgtgatatgagccatgtcccatctaacctatgctcttctttttgagctttaattgcagaaggggagaccccactaag

SEQ ID NO: 134994 - DNA, 541 bp, Zea Mays
ctgaccccttcgtcctctcgcccttcgttacagtgtcctggtgagtcacttatgcttgccatgccttcaatttgaactctaccgcgttgtcgtgttcggaacaggctcgtcggagtcttggttccgccattaccgagctcggggggatttccggtgtgtgatcgtttaatcaatacatggggtagcgtcgtcttggctcagcaatggtgagaaggcgctcggttttgctagtcttcaccgccgttggcgagtccaagcgaggggcagggtggccggcgcccgaccgtgccgtcggggacgagcgtttgtgaaagaatcaaaacccaaggacctaagtgaatctgtcagtgactcatgcaatagtgtttgaacccctgtcggaataatcagtaagccgaggaccgttctgtaaaaacgtcagcgctgctgcgggcgcgcgggcttccccgtcgtgggctgattcggcgcgatgttgggccggttgggctgatcctggcccaagactattcacagatttactttttcttttatatgtgagctt

SEQ ID NO: 134995 - DNA, 420 bp, Zea Mays
cccaaattcgccaccaagactcgatccgaacgaccctatacgacgttgggaggaaggcgaacgagatgggtgtgatgcataccatgaatcgatgcctgattgatgcagtgcccggctacggcagaattgtacggcggcgggcgaggacaacgtggaattccgctcggccttccaattgtctttgttgccggtggtgtctaggtgaactcaatggcgattccacaaggcgaggcaatggtgggggcgctgggctctccaattccctctctctccctctctgctacggcgcacgacgacggtgttctttgggttctaagcgcggcagctaggctagcagggagataggactggggagcttataggcggtcaggaagttgatccacgagcaccaaaatcgcggaaggcgcgctggtcaggtat

SEQ ID NO: 134996 - DNA, 289 bp, Zea Mays
gtttaaagaagcttttgaacactaccacctcattcttttccggcttcggagtaatctcctctccgccaaaacgaaccagctccttttttgcttcagtgaaatatcccagcttcaccattttggaaagatcagctttagagatggtggactttccaaagtccaagtgactaggtttacttggcatcccgcagctgtactcatcttcggaaacaacttcttcaacatcagcttgtgttgcttcaacagcaggtgtgtcctctgatgaaaccagcccagaacgcctcattgc

SEQ ID NO: 134997 - DNA, 433 bp, Zea Mays
tgaagcccaacttccgccttatctgatctgatgctacactgttctgaatttttactgccagttcatgggagcatggttgcagggtgaaccacttcttggcgctcaggaaaggagaagctgacatctggtcgatgacagaggattcgagttggctgattcctaggaggtttttgggctgggcaccacccagctgagtgtgtgcgtgtgtaacctctggatcaatgttgttcagggacgcgccattgctttttcttctcaaaccgcgttctcgtcatcccatggcacctcgttctcatcaatctatcaaacctcaccgtcagtctgcacctcgttctcatcatcccattgcactcacaagaagaaagaaagaaaaccactctggtctcatgcgcaccttttccgtgtatcaccagaccagaccatccaaaagcaa

SEQ ID NO: 134998 - DNA, 978 bp, Zea Mays
tgggccgcaggttatatttcttaaaagatcagggtcgagtttataagattttggactaagttgcgatgctctttcctcttacgtggatggagggttgatttaatcaaatctcggggtctcatttgtaaatctggctcagctgaaggggtacgggcgcgcctcgattgtttgatccaaaattgagggcccagattagatttggcttacgctgaataggtacgtgttagtggtcgtcggattcacgatatacggcccagatattatgaagaacgacctaatcctactccttcaccccaaatcagacggcccagatggccccaggatgaaatagtgtcgcgtcatgatcttgcccgtcggttaccaatcaggggcccatgcaccgtcaccttcctccgcatgcctgggcacggcggcgccatcatcggcgacatgccaacccgagttctaattctccaattcacacacagctcgacgctaaacatagagggaagtaaggcaaaatgaatggagcaatcctcaccaatgttgggttgatgacatgtcccacccgcggcgcacgaccatccgtgacaaaggacaaacccctggtgcacaatcccgaccaacgacagccgagacataccttgatgatgccgccagactgagcggaggagcgtgaccgataacgacgcgcccacggtggcgaagcaggagcgtcaggcttccccgtcgaggttgacgatgagcgcccggaagcagagagggcaccatgggaggagatgacaggagtgcacgacgttgtgtggggaggagaccagggcatcgagaggggatgaggcgaccgttttatagggctaggggctagctggccagatcctagtggctgcgggagatctcaaccgaccgacaacagcggtcgcgaacggaggagagggggaagaagatgtcgacccagagtgccccacctgtccatcaccccagcctgagagcttgggccgg

SEQ ID NO: 134999 - DNA, 388 bp, Zea Mays
ccgcgcagaagtcgcccaagggtgccgccggacatttacatcacaccaccaagcgaagggcaataggccacattacaatacaagtcgtagattacacacacacagcgaaggatcaccagtctcaccgcacaaataaatacaattgcgccctctactaccgcacgacaagcgagggcatcacacattatagatcggctcaaccttcgggataatacccgcctcccgataattaaacaacattattttcaattcctcacccgcgaacaaattccgtaggtccccctcaccaatactcgtcccaaccgccgaagacagcaagtcacgttgattaccccgatctacacgaagacgagttcgctccaaccccatctgatggcgcctcccactt

SEQ ID NO: 135000 - DNA, 742 bp, Zea Mays
tgcccatccttagctttggccttggaagaattcatgaagtggaacggtgtactaatatctctcctatgtgtctgaggttaatttatacgaagacataacaacgacattagcaccgggactgcatctttttcaaagcagaaatagtgaatacattgaggaggattgctttccgcgtccaaccacgacacccttggaccggaccccataccagcatcagaagcttcacctctctcggttcgcctaacatggtcgactctcatgcacgattctgacataacttctccttcgcgcgcaccacatggggaagaaggatcctctatagagcgtgttgtcttgccttcgaccacaaaccactcatgttgcacatctttgtctattgtgtgcctagcgcatgcagcaaatccttccaacattggttctttagtgactgatgcgaccaagcctcctccatcaacagaacatgtggtggccaatgtttttgcaacacaagttgtctctggtgtcatggttgattcaagaccttccacacaagcttagaagaggatccatcagcctagggtctacacagatggaacaataaggtattgaaagtcacctagagggggtgaataggcgagacctaaaatttacaattttgaacacaaaacttcacctggggtcaatgttagaacgagtatagaatgaatcagagtgtggaagaggagttcttcttgcttagagttactcaataaattgtggatta

SEQ ID NO: 135001 - DNA, 513 bp, Zea Mays
gtgcgaccccgcaaggatcatccacccacgcgatcttggtccactgcgtaagtgcgacatcttgctcctctgctcccctccatcgtgcctttctcgagcctccccacaactcgcatctaagccacagcctgcggcagcggtgaaatggcggcgctagactgcatcttcttcaagtcgaaagccacccctgacctctcgcccctttcttacagttccttacgggagtgggatttatcattatttagttcttcatgtcttgcatgaggtagacatggaggagctctggatcgaggaagtcgatgacgctgaacatggaggaggctaggagagatcgggacaggacaacggcgtcggaggatcttgggttcgccactaaggttaggtgaacggtacctctacctctgcctctgccaatctattgtatcctctccattagtgttttgtgattagaaggacactgtttggggatctaggggagtaattactgtgccctggcctttgattctgtttcgg

SEQ ID NO: 135002 - DNA, 681 bp, Zea Mays
ttgggtgcacgccacaatatggttgtatgcaagacagggtaaaataaagtgtgctcgacataaatgtttggtcgttgtaggtagaaattgtcttggcttaagtagagaggtgatgacatgccgtaagcagtcatcacttcctctataattataagtcgagtctatacgcgttaggcgttccttaaattgtgcttcacaaataagtgtatgattgtgtttatgacttgaatagatgtcttcgagtgaactaataggttcctaaggcaattatgtgtaaggtgtttatagtgacgctttatcccgaaaggtgttaagtctgcgcataaataagagataagtgtattttgtgtagtgtggattgattttgagtgcatgtgtcgcaagaaatgaattagtgcgcatataggcgatgaatgggtgtgatgaaattgtgacatgccttcatagtcatcatgtcgtatgttggtgacctaactgaaggtcgtagagaagggtcgattacctatgtgttattattgtcaccttgcgattctgtatgaattgcaatgtgaagtagtaggctctctatgtgatgctagatgtctaggtagactttcgtgaattgtggtgctcggaccgtcaagatgaaggttaagtcggtcgatgccgattaagtagttaaaatgattaatggaataatca

SEQ ID NO: 135003 - DNA, 442 bp, Zea Mays
caccaatcaggtgactcgtatgttggttttgagcatagcataaatcaggatcaagaataacacgacagtcatgatcagtaagttggctggtggacatgagatgcatggttagatcaggtacaaagaaacataaggaacatgaaaagagtcagatgaaagagtgccctgcccaacaaaaggaacaggtgacccattgatagtatgaacaatgagagaatgagatgaaggactcatagatgaaagatgggtatgataaggagtcatatgaaaacaagcacaaagtctagaatgcatggacatatatctctacatatggacatacatcactaactccccctcaaacttaatgtggataaagaacactgagtttggagagacaaaaccgatggtgagcctaggtatgtgccttgttgaataaatctgccgttggagacttgttctc

SEQ ID NO: 135004 - DNA, 271 bp, Zea Mays
tcgtgcggtgtgcacagcaggagtgactggtgttgtgcgactgggaacctgcgatgtggaggaagcagcttctccctccaccacaaagtcaaccgaagtctcggcgcggtgctcaatgatctgcaccatcatgcttgggcaagggatcaagcaaaaacctaatgcctaggcccctacctggcgcgccaaatgtcggagagtaaatctccggccgggtggcagagtgcacccgccctaaatcctgagatgaggaggggcttaggtgttttgc

SEQ ID NO: 135005 - DNA, 735 bp, Zea Mays
gaattattcaaagttaaactcaactgaaagacatagaaactccggaggaataagtggcaaaaaggaagaagttattgtcattgctgatgatgtaggggctgatcaggaggtgatttttttggtttattctctcatgtagtctgctgtatatttgttatcttttttcaatcttttttaatttatcgtataaacatacattatgttgtatttttctaggtgcaaactgctgctgttaatatggttggcgctaatttacatggtagtagtagatccaaatcagcagctgcaattgatcagatatacaatgatatgagcatattcaacgtagagtcagaagctgggggattctttttggaaaatcaactagaagttggaaatgtagtcaggaatgatgttggtgaaaattggttacaagttcaaaatgctcacgcccgtgttccatgttctaatgtgctattgcgatattataatattctttgtggcatggggcggagccaatggaaagagtaagtgtagcttttatttttatttcaattttttctttattatgtttattttctgttcctatacaccaattttcataatagtctatttttcttactttttttgttcagtttggtcgcagttcagttttccaaaaccaccactgtaaattgggaatctttttgactgtcaatagaacccaaaggtcactgtgacaacttttttattgctggattttgccggaaacatttt

SEQ ID NO: 135006 - DNA, 556 bp, Zea Mays
tggaggtgaaagaccctctggtactgtggacgaagctgcgggagcgcttcggtgtgcagaagcatgtgatgcttccacgggcgcaacaggaatgggccacactccgcttcctcgacttcaagactgtggaggcttacaacactgccattcatcgcattgtcgctcagctacgtttctgtggccagatagtcacagacctggagatgattgagaaaactctctagacctttcacccctccaacatggtgcttcagcagcagtaccgaaacaacaagtacacgaagtactgtgagctcgtcaacatgttgcttggcacagaggctcagaatatgagctcctgatgcaaaactaccagaagcgtcctgtcggcgctgcggccgtactagaagcacatgccaacttcccgtctcaggggaagagaggctcctccagaggaaggggtcgtgggcgccgcaataatcaggggccgacgaggggaacttttaagaagcagtcacagaatggcaacgacagtagcagcaacaatggtcgtggtagaggcagaggcaaaggcaaa

SEQ ID NO: 135007 - DNA, 434 bp, Zea Mays
caggggtctgcgcgctaaaactcaggacggcgggttgattctctaaaacctgagggtatcttaagcaaaagtacacgagaagggtatcgggcgatctcaaccatcagatcgcagatcaacggccaagatcagatcccgtgggcgcgagcgcgcagcgagcactgacaagcagggacaggtgtcagcgaccagaggggaaggcgggctgaccagtcaggcccatcgccagggggcacaggcgctgactagcgggcccgaggacagagcgtgggtgaggggagcggatctggtcggctggatttgcatcagacaggcgaggttagattgattctaattaaatgctaaccgtcagatctcgagtgaacgtccgagatccatcagtcagcatggtcgggatggcaggtccttggtgcggcggcgcccctcaacctcgc

SEQ ID NO: 135008 - DNA, 476 bp, Zea Mays
tgaggagcttgcggttaggcaagaggagcaagggggtgcggcttaaataccctggaggccgagtccggctagaagcgagagaatcgcttggtttgttgagatttcctaccgccgcggtcgctgttccgattggggaagaagaagatccatcctgccagagcggacccatcagtcggtgaactagcaggcgcgcacggtcccgggcccacgcgccagcagccgagtccggttcaacggccccgcgcggattccgcacacaccgccgtcgattgcgccgaggtcgttagctgtggaagacgacgcctgacagcgggggcccactgcgcagcgaaaggctgatcgcgccgtgcgcgcgacgcagcggccgccaagcgggtcccgcaggccagtgaaaggaggtggaaatagcgcgggcgcgacgacgggaaaaagagaagtgggccgtgggggagcagaaggaaagtggagatgggcca

SEQ ID NO: 135009 - DNA, 529 bp, Zea Mays
agagtgcaatgttctgagccagccagagtcagattcggatgactggagggagccaatcatcagatatataaagaatgaagaagagccggatgacaaaactgcggcagaacgcatcgcaaggcagtcagcccactacactctcattggggaagcactgtacagaaggggcacaacaggagtcctcatgaagtgcattctttcggctaccgggaagcaactactagatgagatccacgccgggcaatgtgggatacacgcagcatccaggactctagttgggaaggtcttcaggtctggtttatactggccaacagcaaagaatgatgcagccgagctagtctagaggtgtgaagcttgccaatacttatcaaaccagcagcacttgccagcacagcaactgcagaccatacccgtaacatggtcatttgcgtgctggggactagacatgattggaccattcaagaaagctcaaggaggttacactcacgtgctggttgccattgacaaattcactaaatggatagagtac

SEQ ID NO: 135010 - DNA, 875 bp, Zea Mays
cgcgcgcactcaccctcacgaccactgccagcgggacccgcgccccagccgctcagcctcgctcgttcctctaactcatgggccccgcttgtaagagtcaccaacggtggactgcaacaaacttgactgcgtccctcgcatggccatcaggcaagctccgaatcctagtcttcatttccccccttctcggaccgttgcggtgccctcacgagtataaaatccgagcgccgctagctcctcgtgtgttcattccttccgctcgtgccttggtgaaccccgtcgacgtgcaccgccatagccgggaggtgagatgagggagaaggttgccatcgccgcgcagcaatgctcctcgcctcagtcgggatgcgaactcaggcctggggcttctcgacgttgccagggagttgttcatggctgccctggatggaatggtgttcgtggctccatcaattgctcaccggcactagagcaccgccgcatcaccgctgcgcgccgggggcagggatcatcgcgacataatcactggtaatgacacctttgtggcactcacctttccttccgcatcatgtagcacctcgctgaagttcaattagtgcacctgggtcttgcgccggagaaacgtcgatggacctctgcctagggtcgctcaggtgccgccgtggtcggcccacagggaagaggaccgggataccgttgatggtggggtgaacggttaggattcgatcaagcttgactggttcagggttggatctgggtcgtctgtccgttattcaacgggtgtggagcaaatcgcgcctattaaaatctgagttgttgacgcttgatcgtgcgatctgtgccacgtaccaattcatttaatcggtgacctaatctgg

SEQ ID NO: 135011 - DNA, 676 bp, Zea Mays
gtcaaagctcctttcaggccccctccgttgcaagcaaccaacctccagctaatgcatgttggcactgcggagaccccagtcactacaagaataactgcccccagttgaaggcatccgggcctacttacaccaactcggtgaatggccccaagaatgccccagcacccacctccaaggcaccctcctccaacagccagcaaagcaagacccaatatcatggcagggcacgagtaaaccacatcgatgctcaagaggctcagcaagctccgagaatagtgctcagtgagttcctagttgaatttactcccgctactgtagttttcgattcaggagcatctcattttttcatagccactagctttggggaaaagcatgacattccctttacacacctagaaattcccttggtcacccgaacccaagggtcagaccttctatgacagctcaaatgctcccaagtcagaattcttttaagtgggtagtattcttggtagacttagccgtcttgccatcccaagggattgatgtgatcttaggaatggattggttaaccaaacacaaggacatcataagttgcgcaaataagaccattcttctcactgaccaccaaggaaagtcagtttcatgtcaggctcagccacccgcccaagatccaatggtgtttaatctagcagca

SEQ ID NO: 135012 - DNA, 411 bp, Zea Mays
tacggccatctccctgcaagtctgcaaccatacgattccaccatcggcagaaacgtggaaaaggtcggcacaatcgtttagcacacgaaccagcaacaaaacttcaatccttttcttcggcctactgccaagtgccaaccgtcgacgtcttttaagcatagactttcatccattgatctagatgctaaacttgttaagtagccaaggcacaccgagaataccggccccgtgatgttcatttgaaccttctttatattttcttaaagcgggaaaattccattgaatcaaatgtgtaatgtgcctcgtgatgatgttgatatgcctttgttattttcactagcttgccactacggtctagtctaatgaagagttgaagagtacaagagacgtttaggcgtcggcgcatagcac

SEQ ID NO: 135013 - DNA, 544 bp, Zea Mays
ttttgtcccaagttctttaaagttagtagatgattgggaaaacatggacatagtatgccgagccatattattaggtcagatgaggtacggttatagcaagtatggtcgtgggaaggaagagtataataaggaaagacttcatcctgaactgtggatcttgattcctcttggagttggatttgactcatctccttccttgtcggggttgagctgttcttttcagaccttggtgtcttcattcttggggttgccaccagagttagggacctatggttaagatagatttgtgggtgacaagtaggtagagcagctagtttagtgggtggcttagaagttaaatgagattggtcaaaatttggtttggttgtttgcctctagattggttggataggtcatgtaacctattatgtaggtcaagttggtctatcgttcttaatttagtgcagagtgaactaagttaaaacatgttctataggagtagggtctcatttatttcatcagtattaactaatttggtaattatcttatttagattagatcaggt

SEQ ID NO: 135014 - DNA, 444 bp, Zea Mays
ctgaaatcgtacctgtcaccacgtctccttgctctctgccatccgcagcgggtagcacataagctccagaaatacccgcagaagaggaagctctcagagtgaaattaacagaagaaccccactgagccgccgggtgaggcagacacggagctccaaactgagacgacataggagtagatggtgcaggagtaggcgcggccagatactgaggaaaaccctgcatcggcacgaactgagaagtcccaggcacataaagctgctgcggaggaagtcaccggctcccatctgagcttcccattaggattcctcctacacaccacatctttgtggtcctgactgcagatagaacacctgccactccactagcactctacacggcgatgcgcatcaccacagcggaaacacaccagccccagcccaggcttaggaacagcccgaaacctc

SEQ ID NO: 135015 - DNA, 581 bp, Zea Mays
tcgccaaatttaggcactacggtcggttcaatatatcgcggccggtaggtcagaaccttcacttttttgcccttcggcacagctgtggtagccgaagcggcagtctttctcttttttccttgccctcgtagcaggtagcggtaatcagggtatacaaagccaatcgcatcaaataccctgttcaatcttttcttgccccgacccccgaaggctgcggacaaggcatcatctttggccttggaatatgtcccaagcagctcgtcactggtagcttcaatacatttcaaccaatcattatctggctcatcaaacttctccctaaatctgaaggtatacttcagttggactaggccaccttcactggattcgtcagtagtctccttcggcatatcccagctctccacaagtggccacacccggaaggatatgtgctcttgaattaaatccctcatgctaatgaaggcgcaaacagtactaaaggccttctggcatgcttcaacatcgctatcaatattcacctttggccttcggaggccgaagcaagaccagatggggcgctggataatttccttgatgtcttc

SEQ ID NO: 135016 - DNA, 429 bp, Zea Mays
ggcatcacaagccattcatagagaccaaatttagttttaaacgttgttttccattcatcaccaagtttcatgcggatttgatgataaccactacgcaaatctatcttggtgaaaatgatagaaccactcaattcatctaacatgtcatcaagtcgtggaatgggatggcgatatcgaacagttatagcattgatagcatgacaatcaacacacatgcgccaagagccatctttctttgggactaaaagaacgggaattgcacatggtgataaagattcatgaacataccctttgtccaaaagcttttttacctgtcgctggatttcctttgtttcttcaggattagtgcggtaggctggacgatttggaagcgaagcacctggtaccaaatcaatttgatgctcaattccacggagtggaggaagtcta

SEQ ID NO: 135017 - DNA, 747 bp, Zea Mays
ccccaacttggcagactcgcatggcggcgccatcccacctcacggtggagcttcgccgtcatgcgccctgttccgggccctagagtgagcccctacgcgatttctagcgcagatccatgagagaacgatagtgaacacgatgggagggttattaccggtgttaggaggattggttaagctgctccccgcgtagtgcttccgcggcgacgacatagcgctggtgagcaatcgcccccgctagagacgacgacatggcttgcctaaaccacgcacgcacgagccacgcctgcgcgcagatccggtgcccctccctggtccctaagccacaccaatcgatggaataggcaggcgacggtggagcgcttctctctttcccactttctcctccccgggcgaacacgacgggatcacacagctgggcgcgaggagcgaaacgggacgcggaaatcctatttatccccaagggactcggtccacaactacccgcgtgcaaaaggcggcatcagaagcggtgaagctcgcgacagcggcggcgttcgttacggagaagatgaccgagctgacgggtgggtcctgtgttgcagtgtaacagagccgcggggcaaaggtttctggtgagcgcgtggcatggggagtgcatcaaatccgagcaggcggtagcgttcttcatagacatcatccatcacttcgaggtccccatctccatcatcacagacaacagcacacagtccacaaggaagacattcc

SEQ ID NO: 135018 - DNA, 615 bp, Zea Mays
caatatcatgcgaagtgcggaagacaaaagtaatgataacttcagccttcgatggcctaatttgtttaatagtgtcatagcgaatttagatttgcgcgaaattgatatggtgggacgtcaatttacttgggcaaatgatttgaatccacccacgtttgagaagcttgatagggttttaatgagtccggaatgggaacttaaattccctaacgtctcagtgaaagcgcttgatagatctcggtctgatcatacgcctttattactgaatggtaaagccccgacgaacctggggaatttctctgagtttaaatttgagttaggatggttcattcgagagggattttttgatatggtttcttccatttggcaacaagaaaagagaggtgaaaccgccattcagatatggcaaaacaagattaggtcccttcgacaatatttaagggggtgggcaaagaactcagcggggttagtaaaaaaggagaaacaacatcttttgaaaatgattgatgatcttgataaaaaggcggagtttacttgcttatcgcctaacgagttggagtctaaatcttttgccaatgataggcttgccaatattttgagagaggaagaagttcg

SEQ ID NO: 135019 - DNA, 1849 bp, Zea Mays
ccctgcacagatgattgctcccgctccccactgatggtctgcgtccgtgcccccatcccctagatcggcgtccatgcccctgcctgctcccccgccttcaatcccagatcggcgtcctcgcgtggtggtcgattaaccagtcctgcccaaatcagtcacggttgcgcttcagttcacacccattcttgtgcgatctgttctgcatctcatattttgttcgtgtgcgtcttgtagaactgtgtctctcagcttgaatggttcattttgtttcttgtcgaaggtgttccttgaccacaccagttagatggcaacactaaaattgtttatgaaaccttccgctatgtgatgcattaacatgtgaaatatattttcttgctcccctttgttgattcacccatttcaaaacacaattgttctatgaaaggcacgtaaattttctgctgagctatgtgatgtttcaaatatgcattctatatgactggtacactattactgtcgagaagatctgatcgtaaccccagaactaactacagtgccatttaacaggtataattcaatatatgatttattttaaaatacattgccatcatgaaacatgagcgttggtagctactattggttaattgtcttatatggccatgtttttttaccggtggcgccaaataaaaagggcacttgtgtcctttagtttgtattatctagctcattatctaagaaaccaaacactccactgctagctaaaatttagctatttaatagttttggttaaattttagtttggatggaaccgaaggggccttagtcatcatcaggattgttgcatcgtcattactgatcaatcagagcattagaaagtcaggtggatatcacctattcacttcgccaagttcctagaatcagatccgtctaagccaaaagacctgaacaattatgtattttctattaataagtggatgcatccatttttggttcttcatcctttgtgtatttgattttaaagacatatcttctacaaattggacgagaaaacattatttttcatacaataggactctacctggtccaattggatgagaaatacaatgtataaaaataggaaaatgctaggagataaagtcagcaagacaattcttacttggagatgattgatacctctcatagatacactcttccattttttggatcgtttttagttttatccacaaactatttgaattttggttgcttgtataatggtattcctggaaataagttgtacactgcatagttgaagttatgacatttatgatttccacatatgggctatcaatatcgttttaaggtgttaataaattagaaacttgtgcaaatattggacaataatttgtagctacttcaaacttctgacttattactgcctacattaaatttagttgatgattctgatatttaaaacagtggggatcatatttttagatgcttcatttttagtctggataattaattcatcatattgtaacttttgtttatatccttagctaacctttcactctttcttctaggattgctagcaacaccttcaatgtcaggttgttgaatatgtgaatagtgataccccttctcttcctaagtaacaactcttcttttttgatgaataattttcataaatttgccaatttatttgagtaataacttattttcgtgccctttgtgtatcttgggtttgtacagctaacacctactgctccctaacagggaatggattatgctatgagagagatcctgcaagggtaaaacatatatattctgaacaaatggggcaaaatatgttacagctacaagtgctctatgtgtgctccattatcctaac

SEQ ID NO: 135020 - DNA, 344 bp, Zea Mays
ccaagttctagccaaccaaacccgactcattgaggtcctcactagaagtctggaaaatcaatgcccgaatggtggaagaccataagacatgatgggagatttcctgaggctcaagcctcccacattcgctggatctagcaatcccctcgatgctgatgattggctgtgcacgattaaaaggaagctggaagccatcggatgctcggagaatcagcgtgttcaactggctgctcatcaacttttcggaatggccttagcctggtgggataccttcagcgctgccatcagagatgctacctgggcagagtttgaaactgctttccgagagcaccatgtgccccaag

SEQ ID NO: 135021 - DNA, 463 bp, Zea Mays
tgacgttcctagcttcttagagctgccatttaggaatgtttgaagcctcctggtacatggacaatagtcacacgtgaaaaaccatacttatcagtaggcctaatagtggtgcgatcccgtagattatatcgccgagcaacaactcatcaacatattagaatcatcaacaacaggagcatcacgactagccatccatcaatggttatgaaccaccaaccaaatgaaaaaaattgcaacgcaggagggcccaacttttccacattattctccatggactgaacctgattgttccaacaaagaaggctaataagcggacttgctcctgtaggagcccaacgtattcaacttccacttaaactggtcaagcacatcttgttgcaaaactataccatccactaagtcccaaacctgaagatattcaaccaaaacttactgtaagagccctatttatgtctctgaccca

SEQ ID NO: 135022 - DNA, 479 bp, Zea Mays
catgttttacacaagtgacgtttacaagagtttccaatcctggactcttatctcaaaagccccttaaacattacttaggtagcgtttggttccggagtatggtgttatagagccgctctgttccttatttgttgttgtttggattgattacatatggataatgattctaaaaaatgaaaaattgtgcttaaatattgaactatttagctccgaaaatctgctgactgaccattctattccaactggctccaaactaaacactgtttagaagtggggcagatcgggagccatgggcgcagttacgagtatgacgcagtgagccagcactgatttcgttattgagctaggctccagacggagggggagaaccggaaaacagaggttggctaggttagcgtgaaatattgggctgggctaattcgttaagaccgggtcttttgttccatttcattttgaggaattagaatcttattattaga

SEQ ID NO: 135023 - DNA, 349 bp, Zea Mays
gaagatcctacatgaacatccatggaagtatgagagggagaacccactcggacaccctcgagggctgggtcatagctcgcgctacccatccgagccggatcatctccggcaacaccctcggggctgggcaagcgctagcgccatccttgagggccgagccctctgtaacagccacctctaaggctgaaggaccttcaaccacttccatgggagcagagcaatccagaccagcctcctgacccttaagaccgcactccaaggtcgatgaggcacgagacgttgctcgggataactccaacccggcatcaggcacatcagcacaaatatccatcatcccaccatctaccgg

SEQ ID NO: 135024 - DNA, 416 bp, Zea Mays
gaagagctttatatcccacgcgcacctgtccgcgcggagttgatatgccagccggagccggggatctcgcaggttaggcgagaagatcgcgacgattgttacggtccgccgcgagaaagacggacccgacgagatggccccactgatcagggtcacgagcacgcgtgtgtctgcggtacgggcccacccaacggtgaaccagtggtcacaagcacggaacgatgacgctggcgatgagggcccacgcgatgcgcgtggcggcggaaggagatggtggcgtgggtcccgtgtgtaagtgtctgcgaccagattgggccgcgcaagaggagacgagatgggccgagaacttggaaattcggcccatgacgaggtctgttgtttttctccttttatttttcacttccattttctattta

SEQ ID NO: 135025 - DNA, 437 bp, Zea Mays
cccaaggacgttcgtctggttgctgcccttaggaagaatcatcatgctagataatgagttgaggtaccgatattacctatgcatattagaggtaatccagtattccctcccatttgaggtgtgcaccacttccttatcctctcgcctgggtagacggatatcatgaactctaaggttccttcccctgatatcttcgtcagagaaatcaaggatatgagcaaaatgacgataactgactttgtgccaaactccctggagaaagaagtacattactaggcaatcatacacatctacttcctcaccaaccttcttgatccaaagagtggcatagaactgagcaataacttcatcattcgatccatggataatccattgtgatgatatctctcacccctttctgttcacaaactctcagaactcgagtcatatcatcatca

SEQ ID NO: 135026 - DNA, 395 bp, Zea Mays
gctgtacatcggcccgcgcggggagaagctgctcgtgcacccgttctacgccgccggttcgctgcgccggttcctgcaaggtctgtttcgcttcatgcatttgctttcgacccaagctagctttgagtaaggataatcatacgaaatgatttgctcgattgtcgataaggtttcctggttctggttccattgcttggatttactgcagaatttgaaactcgcctcagatttagatgattagctactttcgtcatcccatgcccgcggcccgcggggtgcggtaaaagcgtcgcaggcaatgatgcatcgcggattaagcaaattgctgtggtggcctggtgggtattatgttccagccttgcagggtggttttattacttttagccatgttcttc

SEQ ID NO: 135027 - DNA, 614 bp, Zea Mays
catgtaccaactaatgtattgagcgtgtgtattccagcacagggtttcacaaagaacgattgatgttggtgactggtgagcctgtggaggatgagatttgatatgtaatttgataacatgaaaagaggataaatagatatacctaccacaaagcatatcagaacaactttggaaagtgggtgaggcaaattctcgtccataaaggcccacaacaatagaacggtgatagcctagacccgcagtctcgatctcggtcagcgcaagaggcttggaggaatggcggccggggttgtcgacgctagagtacttgtacaacgggttttagcaggccatctgaggcttaacccggcgttgcattaaaacacgcataagccacacgctggtaagaccgtgctgcttcaacgtggtgatcgcctttagaagctgctccacttagctcttggaacgtgcatccgtgccatggtgccacttattcgtcgaaagcggctcccatccgatgtacggtacagcactgccgggcagattcttggcgtagaaccactcaccctcgtaccgaatgatggagggaagcaagatcttgaaatactctgccttccagctagagaggagttgga

SEQ ID NO: 135028 - DNA, 347 bp, Zea Mays
agccaacactccaccgacctcgctcgatgtgttcatgactcgggcaaagtcggggttcaggtttcgtccgaaaagagggttttctcaacgttctctcgcctcctgctcggcctgctcttgagcttgccgatgattacatcggcgggaattcctcctctccctgaagactcgttcatctggagtttctcccacctctgagatctcgtctcgttatacaggctgcgccgggtctcgttctccgacttcatgatgttgtcgagcattacggcgtcggttccttcgtcggcgagcttcccgctgaggaggttcttccctaggcgcggtcggttcgtcgtcggagatggggg

SEQ ID NO: 135029 - DNA, 429 bp, Zea Mays
attggctgggaaggttcagctcatgatgccttgattctatcggatgcattggaaagatctgatggcctcattgtgccaccaggtaattccataatatgtttggatatgcttttaaattacttcacaatcaaactaactagaattctttgaactaggaaaattctatttagttgacgctggttatgctgttagacctggatttctacctccataccgtagcacaagatatcatctaagagaatttggtggaggaaatcatccactcaatccaagagaactcttcaatataaggcattcttccctccgagtaacaattgggagagctttcggtgccttgaagaatagattcaagattctatacaacaagccttttcatccatatcggacataagttaaacttgtgttagcatgcaccatccttcacaactg

SEQ ID NO: 135030 - DNA, 675 bp, Zea Mays
caacgctgcttggttagcgtcatggagccgacccctccgtcatccactcattccaaaatacagtttaaccgcgacccattcctcgaaatcaatcggacgacctcgctacagttcgcatctcgcctctggggcggcggctgcgcgaccccgaggggatctcgcctcagcgacggtcccacctaaggtgagctcctctgatctccttcctcctctctgaggtgagatcctgtctcctccctcctctctccttgcttgcctacaacacccccaccacggcgccatcgtaccgctttgcagctccaatcttcgcacgctccagtgagaggagcccactggactgccagctcagtaccctcctaaggcgacgttgtcgcacacgccgtcattaggtgacactcgtccttgtgccaccacccacaggccatagccttcggcttctgatctggagttaaggattcccacggcagccgaacccaacacagaccgtcccaacgtagccgaacccacgacaaccataataatgcaaatgcatcgagttaggttgtcaagcggcatgtcggccgctcaccatgacttgggtgggtgcgtgggaagaacaggctaattcttttctttttccagcaaacaaacactttcaattggctgatggatgaactcttgtttgcttgtcctctc

SEQ ID NO: 135031 - DNA, 322 bp, Zea Mays
agagacttcgttgtgatcgacggtcatctatacaagaagggaataagtcaacccatgttaaaatgcaaaatcgaagtcgaaggcatcgaacttcttcgtgaagtccacagaggttgtggatcgcattcgggacctagagctctcgctgctaaggtcatacgccaaggtttctactagccagtcatcgtgtgcacagctaacagaatgagccattcgtgcgaagcatgccaaaaattctcacctcgaatgggtgccccttcgcagttcacaaagctcattgcacacacttggccactatagcgttggggacttgacattgttg

SEQ ID NO: 135032 - DNA, 1057 bp, Zea Mays
tgaagaccaatcataggagaacaactttgtttaaggattcaagccatgttcttatgagaaatgtggagaaaatctcaacccaagttggacggtcaggctggttctgtctgaacatcagactaacagattcatgccctgaactttaagcccaatttcaaaccagatgcagtggctttttggggcaacatcatatggcaatattgtagatggcatattgctctacaactttgctgcagagcttggtatgagttatcatcagaaatcatgagaaaacttggcttcaagtttggctgtcaggttcatttaactgaactcctccatggtacagtgctatcgggagggtcaaaccgtcagcgccaaaagatctcgccgccggtggaccgtcgctgttgatcgattgtttgctacgattcgtgcgccatggccatggataagcacaaaccagtaaacatctcagcgtctggtccactcgagctcggtcacggctaagcatgccgtactttcccccagccgtcggtcgctcggataaccctcaccgccgtcgtgctgtcaccgttgcgcaccacgtgccttagcgctggctctcgtcacgatgaatcatgcggtgcatgtccggtgatcaccggagttactgccacaccataggacacgtaaccgcgcgccaaggttcctctccagctccggccgccagcacggcccgaccgaattgatcaccaccgcccgtcctccctataaattgagcctgtgcctagctccgcaaggtcatcagctacccagccaccaagaattgctagcaatcgatcaccagtgtgcccggattccttgtttcccccaaatcctttctccgccaccgtgaagatccgttcgccgcgaccagccctttaccggtcagttcatccctcactctcacttgttcgagcactcttgacgctctgtgatgcttgacgaaccccaattcgtacggagtagctttagatcaccgggaacacgtaccaattgtcttcatcgtccgcggtttacgtgaacagagctcgagagcttaccaaatatgaaattg

SEQ ID NO: 135033 - DNA, 474 bp, Zea Mays
cttcaaggcaaggcttagggtgcgtcttgatgcaaaatgagaaagttattgcttatgcatcccgcctactcaagccacatgagcagaattaccccacccacgacttggaattggcagccatagtacacgctctaaaaatatggaggcactacctgattgggaacaaatgccacatcttcaccgaccacaagagtctaaaatacattttcactcagccggacctcaacctccatcaaagaaggtggcttgaattgatcaaggattatgacctcgaaatccactaccaccccaggaaggccaacgtagtagcagatgccctcagccgaaaacctttcgggatgaaggggaccaactttttagaagactggaagaaggaatcagctcagctaaatgcatgcctgggagacaacagtagcctggaagtcaagccaatgctagaagatctcatatgcaagactcaaaacctggacgcag

SEQ ID NO: 135034 - DNA, 695 bp, Zea Mays
gtggagaaggtggtggtgtcctaaatgttgatgcttgtggcggagatggtggattagaaagaggatgaggagcagcatgggaagattgtggaggtgatgatggatgtaaaggtactaaagtttgaggaggcggagatggttggggatgagatgacgacggagttggtggatcaaccaattcaacatcccttagaggccaaaggatgaaattttttatggcttgtccaagtgtctcgattccttcgggcccagggatgtctagcatgtcgtcctcagatccttggacgaccatcgtcacttctaccatgcaataatcttctggtatgtcggttccatgaaacttacgtcctgggatcgtaatgcatgttcctactttcttcgtgcgattattgttaataccatatcttataaccagtgtgcacgtcactggccttgttatgtcatcaactggataacagaccttattacccgttgacgcgacagagcttgggacggttgtacaatcggtgcaagcctgcggttgagctgctggaattatttgcagctgtggagtggtcatctgttgaacagacatcgcacttgccaactgctgcatcaattatggtggaggatttgatgcatttgagacatcaagtctttgaactctttctttgcctcctgcttaaaataattcgacaacttttctttgtatcgat

SEQ ID NO: 135035 - DNA, 440 bp, Zea Mays
gtgacagtgacttgggcggtgatttagatgatggaagaagcacctctagaaccatcttcttcattagtgattgcccagcaacacggagttcacaaaaacagcacgtggtggccttgtcgtcttgtgaggctgagtacattgcagggtctgaagcagcctgctaggcagtctggcttgctcggctaattgaggagatgctagggaattttgttaagacaccagtgataaagatggataacctgtctgcaatttctctgagcaagaatccagtgtttcacaagagaagtaaacacataaaattgaagtatcattttatcagggagtgcgttgatcgaggggagattgagctggaagctgttggcacctctgattagttggccgacatcctgacaaaagctttggcaaaagtgcgatttcaagaccttcggggaaggattgga

SEQ ID NO: 135036 - DNA, 375 bp, Zea Mays
ggcgcctggcctgatgccgcggttaatccagggaataaacccctcctcccgttgggcgcccgtcgccgagccaaccaccctataaaactcgggcgcccgcctccccctctcctccgcaccgtcgcaggctcacatcagctcacggtcacgggctcacggcaccacttggcgggcgacatggccgtgtacatccgcctcgacgacgccgtgcgcgcgcgcctccgcggggacgccgccgcggggtgcaccagcagcggcagcgaccacgacgcgtccgcctgcctctccgggctcgtccaggcgttcctcgagacgggcgccagcgcggccgaggcaggcgggccgggcccagcccccaaggagtgcgactccgac

SEQ ID NO: 135037 - DNA, 509 bp, Zea Mays
cccgagtcgtccggtccccctccctaatggaatcgcgcacccaccgtaggaaccgtgccgcaaaactcgtctgcgcgctccgttaaacgattctccccaagaatcggactcagtcttggtataagaaccctaggcgctgccatcgtgtgctcgccaagagggttagtagccgtcgtgatccatattgctgagcgaatccatgggagagatatggaatagagaggatgccgccatggggataaatcacctactgcggcaatggagccttaaatgttgatctgggacatctgtggagcactccggtgctgcgccatgactcctagacgctttggcagctgctaatttctccgtggtgttgcagcgctagcggaatttctcgttgtacctcatcaccgccgctggggcagctctgcaccatggactggcttcaactcgcgatatgagccggtaatagcccttccctgctgttcatagtaccccgcacttcgtctagcacggttcgggttggg

SEQ ID NO: 135038 - DNA, 504 bp, Zea Mays
ttcccctccaagagctcgtgtcgtgaccgtctctcctactaaaagcaccccccctctcaaactcaaaaaaaagggggagtgacagtgtttgcctgaaagaagtgagcactaaggaaggttgatggaatcagacgatcttttctctggatggaggcagctccggtaaatggatgctgttgtctggttcgacggctgaaattaagcaaccagagcacagatattttggtggccacggtgggcaggggagagataaaacaaacattgttatggcatgggtttatggccaagctcccatcgatctagcttctaacctgttcgccttggcttctaacctgcttctaacttgcaccgagacattggccttgccgtccaccctgctcgcttcgcgaccaggaaacggaagcactgttcatctttgccttcactgcactgtccttttgcaaatgaagtctgggtgctcgttgaaaaatgggttggagaatgaattctggacatcgatgaggg

SEQ ID NO: 135039 - DNA, 387 bp, Zea Mays
ttgaaaaagagcccaaccttttatataggtcgctcagtctctttcgagcgatgcaatgcatgtggcttcctatcgtatcaggattgggtgctttctcaaggcccatctgcgatgtaacgaccccattgttagacgagaagcgagaaagaggaacaaacttacgtgcttcacacatgacgcacaacacactagatggtttctcaccatctacaatataacatcctattgttagacgataagcgggaaagaggaacggacctacacgcttcacacgtgacgcatgacgatagcttgacatggcagttttctgtgtaacttatggcaactactccatggttcatgaaagcaatacaccgttcatttaggatacatgcctgccatcatgac

SEQ ID NO: 135040 - DNA, 426 bp, Zea Mays
gatgactaacatcaggggtacaatcaaggataactgaaaaatatttggcctctttaacagtgtttatgatagatttagtgatgttagaagccaaaagagaaatcaactcattctgaattttatgactaagatagtgataatgaatctcattgttttgaatacgtctgaggtgatcttgcataatcaaatcaaattcagcaatcatctcaacacaagctaagaaattaccattttgatcattgtaaagttgctcacttggtcctctaaaagctaaattccgcttaccaagaaatttcacaacaacaattattctttgtaaaacttgcctgatacgctctttctcctttgtgatttgttgctgaatgtttttgtcaattgtttcatgcttaccaagcctcaccctcagttcattccaagagttcatgc

SEQ ID NO: 135041 - DNA, 560 bp, Zea Mays
tggtactcttgttgatactgaagttgtagctgagatgagtttagatttccttggccaactggttctaggtaccacgtgagttactgctccaagtagcaaccatatgattccaataggtatgccttagggtttgttgttcttagtactattatctgcggtgttgagtgatgacaaggtaagagatgaagggggatttatctaactagacatcttcatcttggctacccccttaaaaatggagggactatgggacacaaaaagggtagaacactctgccatgtcaattgaaactctaaacatctatttgtgatcatatccatgctctttttctttatatttgtccttttattatgatagataaccatcgtcaacgatgcatgagttgtgaggcccgcctagctaatgtgggacgtgggcgggtcgaggcagaggcgcatgcattcatggaagtacttgtatgtcatgcatcgtttcatgccacatgcagaggtgcatgcatccatggaagttcgtcctgtggcctgcggaaagtggacgagggcatccggacgtgacaccta

SEQ ID NO: 135042 - DNA, 478 bp, Zea Mays
ccagttccaagcctgatgaccaccgaagtcttttcttcccctcggcaggcatggctggatggctcgtccgacgctatcgtttgtgacgaacacttccaggactccgaactccttcatcctcaccaaggccatgtccagttgcaacagtcatcgactcagtatgggcagtgtcagacatttcacctgctagcatactgagaatagcgttcacctcagcctcatcaacgcttgtcggcatcttgaaatgggtctgtctcttctcttcagggagattccggaatgaagcaatgaaagcctcaatatcctctggggagggtcgcactctataacccggattaccatcttgaggagaagggttggagacgaactcagaaaaggggctctatggaggaaggttctaggcagaataatataaaagagcactagcatttgaaatcttgcctctcagcatcaagtcaattcggctcagtatgtcctc

SEQ ID NO: 135043 - DNA, 559 bp, Zea Mays
tttatacatgtggggatggtgcattagtttagataaagatcaaggccttttgcaactttcgcatgaccgaaggggtatcactacacctcggtcctccagattagatctagcagtcggcatttaatgcacgaagggtatgcaatgccgcccgccgatctagagatctacggccagcaattcaaccacgatatcagttaactcctgccatcggatcgtagatcggtggttatcgttgaaacggtatgaatctcttttaatccgggccacacaatcaaatccaaaggttcaatagatgcccaagctcagctctaatccccaccctccatcaccaatcggacaacccaagcttcgtcttcaacctcatgccaaagcacgatgccgcagggccttcccccgcggtgggatctatcgcacgagtcatgaggtcaactcggcactcaaatcctaccaaccggatggtcccacacgatgcaagcggaggtagcgaggggagccgtggtgttcttactagttcttgcgccgcagtccgcagaccatcgcccatggcatcccgcaactc

SEQ ID NO: 135044 - DNA, 583 bp, Zea Mays
tgaggatgccaatgcagaggaagacacatgatgaatatccttcaaccacatccttgagtggaaataggaaatattgttatgaattttgtttccatatcttaggatatgaaatctgtgaccattgcatcaatatttgtttttatattgacagcttatgtatgaactagtttttatagccgttttttattgtctccttgaggtgcagccacgtgcctccatataatgcagcttatgtatgaccattgcatcaatatttttgtatcaaccacatccttgcatcaatagccgtttttatatttctatcttgccattaatctgttttcttgcttctattcacagcttaccatttttgtgcatttgttatctatgtaggatgtagcaatgcaaagcaagtatggaaatgtgagatcccctccaaggtcacacttcatcagcccaggattgcttcgtcaacaacatgcgaaaaggtcctatccaaaccccaatacaggcataggaacaaacaatgagagttcgtctagaaagcgagctatgaaagctatgggcaatgttaaccaaccaaaagtagcatatggtactgcat

SEQ ID NO: 135045 - DNA, 779 bp, Zea Mays
ccgttctggaggggccagaggtcattcttgggcggcggcgcggcgccggtccggaaacagcaccacctcccctccctcgggtgttgtcccgcgctcaccaagctctccgggagactgaagcggcgatccttcgggagtgggaggcactcgagactgagcaccagcgtcttggcgattggagcacccagttggagcatcatacgaaggtcgtgtcctgccaatttgcttcggagcggtccgagcttgagcgggggcgtgaggaccttagggaggacctggagaaggtgatcgagcgggagcgggaggctgctcgggaggagaggaggctgctcaagaagaaagagcacttggaccaacgggaggtggtcgtcacggaatatcatgagaagttgaaagcctacaatgtgatgcttgaggagcaacgggataagcagaccgctactgaggcggcactgcaaaagctgcagcaggagcttgacgacaaggctggcaaaatctctcttgccgaggaaaacctcagggcgaagggtgtcttcctggaggagcgggcattggatctcatccgacaggagaaggagctcgcttggagggaggagatgtgggaaaggcgagataagctgctggccgagcacgagcgcgaggcggagtagaaggagaagaaactggaggagcgggtctgctggttccaggcggcgcaggccgcgcatgtagcccagatggcgcaggcggctccggtttcctaggcggcagagacgatgaagaagacgctagaggatctc

SEQ ID NO: 135046 - DNA, 430 bp, Zea Mays
gacgaggataccagcaccttagctcctgctatcgaagaaatgtctgcaactggcctagctgacattgatcccaatgggtgtgctccgcctgctgctgaccccaatgagggtgctgtttgtgctgttgctgtggaagatgaggaggaagagaatgaaactccattgactcggaaaaacagtcggcagttcgtcgttagcggcggtagtagtggggttccttctcctgccttgtctgctcttattggtctgcaagaactatccatggccaactttgatcaagctctagaggatatggtccctgagaacttgttgttggaacctgcagacgctgatgcaacagaaacttatgcggccgtgccagatgctgggttgaggtcatcccgtgcctcttcgaccttagagcacgatctcgagggccggaatgatgact

SEQ ID NO: 135047 - DNA, 316 bp, Zea Mays
tggctcctctccaagatggttagagaattgctggcgtcacgatataacctatccagattgtcgcgagaagctgcaagtgctcgtttctcctcctacacacaagaatcagctcttaaatatccagaaatcagtaaaagcacaacagatccaattaagttagcttaccttgttaaccgcactttcagagtcaagctgagcattaagagaggaattcaaagaatttgcgtcgtctaaagaagcaaaaacctgggtcaggtcaatctaaccttgggaatatctctcctcaagctcagaataccgccgggttgagtcggtt

SEQ ID NO: 135048 - DNA, 311 bp, Zea Mays
ctgaaagaagcatttgaaaaatacgcattcattttcctaactcaagaaaattaggtacatacatgcaacaaaaatgggggtcaactaaactcttcaaacatgtttaaaaaatgaaacatgagggacttaactttactctccgtttaaaataacaaaaattataatttagaaaagagggaatagtaacaagagtgagaaattacttagtctagaatggcaaacaagtccttggcagaggggctggagttcccagcaagggcagtaagtaggtacacaatcaacaacaaacttcatgtgcaaaccaccattcc

SEQ ID NO: 135049 - DNA, 381 bp, Zea Mays
gcgtcgactatatcgatctcaacaaacattgtccgaaggatctcttcgggctcccgaggatagatcaggtggtggactccaccgctgggtgttctgtgctgtctttcttggattgctattccggataccaccagattagtttggcgagagaagacgaggaaaaaacggcgttcatcactccgtttggtgctttctgttatacctccatgccattcggcctcaaaaacgctggagcgacttatcagagagccatccaaacatgtttagccgatcactggggcaagcgtgtggaggcatacgtagatgatgtggtaatcaaaacggagaattcagagaacttcattgaagacttacagctggttttcaacagtctgagacggt

SEQ ID NO: 135050 - DNA, 940 bp, Zea Mays
gacaagttgggtataaataaatttagcgcgcgaaaacacagcggcggcatggctggcgtgcgcaagggaacacagtgaggggtggcgaaacagaggctggcgcacacaggacttgcggacacgaactatccgatttcacatccgtattagaccaacgtaaattcggatatcagaatccacattcgttttcgctaaacggattcggatactttgactttgacttttatatgaaaaatgaattcagatacggatatttttcatgtgcatcttttactgggtacggatatcgtataatatgaataaccatttccatttttcatccctggttggtactgtgtttttttatctctagatttttactatatggtacaactactattcagcttcagtagtccttttgcccgtcacagcgtggcgcccgcaagccgcaggggaattaatggatggcaaagcagaggctagcgagctactcaaaaagcatttgacggaaattgttacaatggaccgatctcagcttcccagcgaatctaaagtatgatggtcatttacatacatggtaggcaaggtgtaggcttaggtagaattgataaaccgagatgaaggattttcgataggctagttgtctattttttggtagaatatttggaaaaaagaaatagaattttttttaaaaaaaatccatgaaagatcatctcgccgttgcttatctcatcagagagaatgtcatgcaatgcatggcggctcactctacctttatttagaggatctctttgtcgcaggatggttcactctagctttgtttaaagagtctcttattgttgtgtgtgttttttttaaatctttgtataggttgttgtagtcgtactcgtggtggttagggaccctgtaattggtgttttgcttctccctcttattaatgaattgcgacaactatcttgac

SEQ ID NO: 135051 - DNA, 3607 bp, Zea Mays
gatccatctaacccaactacaacaagacatttcttacacaggagcatcagacaaagggcacttcgacttcgacgcgcagcagtctctggacgacttctcacaggggagtcaagcggagggccctagtcaagcccccgaaggcatttcaccgatggttgtgcccaaaccacgcgaaggcaaggacgcgacttcactacaccatcggaggccttgcctacgacggcgaccttgcagaaccgagggtgcaacacgcagttggagacttcgttaggctacaaaagggcccaggactcctcctcgacgccgtctggacccacttgtaagcccccttgtggagtagattttatagtacgtccagattactctgatcactgtaatgaccccgtcgagagaaatattctgagaacgtaacaggtaactaggggtataactgtacttagaggcccattatcctttttggttacctataaataccactaacctgtatacaaacgggtcacgcataataaagctctacagttccccgctcagtgtcttcctgtgcgcctgatcttacttatccactgagtgttgggcccacctgacatacagttccaacactgagacccaattcccatcagcaattgttgcagagtggaatactgcaaaaacttctctgagtgactggtgaccattatttttgggggcactttgtgaaggctggccaaaccttccgaaccatacaactccatgtcataacactgctagacacttctctagacactatacttttctatcttcaacaacatattcactacctccctcatggaaggcctagactggcaagccacctgcgtgcatgaaaccccaaggtccagcaagctcagagccttttcttgctcatcttgagaccaacacgtcatctcctcatccatgaggcttatgatgctgcggcgatctccatgctccaggttagttctcatccatgtcacaatgtcaataccatctccgaacgatgagtccacaggcgtcttcctgcataggagctcaagtagcactactccatagctgtagacatcactcttctcggttaatcttgtagcgtatccatgctctgggtacatacaatagagaatgtgtcaaccctgaagttcattcaagtcgccatggtgatgtgatcgaacaaattacagtatgaatctgagagaacctacctggagcaatgtagccaagggtgccaatgatggcagacactgttgcatcggcgttctcatcggcgacaatcttccccatgccaaagtctgtgagtttgggtacaaactctgcatccatcagtatgttgcttgacttaacatccctatgaacaatcataggcacagagtcatggtgcaagtaggacagggcttgtgcgacaccaagtgcaatctggcaccgcgccatgcagtcaagacgcactcgaggcttcctttcgtgcaacagttcgaagagcgttccctcgggcatgtactcgtacaggattaggccgacgctgccacggatgcagtagccgtccatcctgacgatgttccggtgcttcactgtgttcagaatcttcatttcgatggggaatttgcactgggacaggtcgaccgtcttgactgcccagtctttgccaagtttgcattctgtccggtagaccgtaccatgccggcctcttccaatgacgtatttctcactccagttgtctgtcgcccgaaggatgtcttcgtaggtcaggtcttcaggcaattcctctgttgtgtccaggctacggacagaggcacgacttgctgacaagtgatgtgacctcttcacaatgtagtaagcagcacacgcaccagcaaccatggcagcaagagtagacactagcaatgccacaacaactcttgtcttgctgtagcgtagtttcccagcaggttgactgttggagtgatcagcacaagccgactctatgcatagctgaggattgcccacgaaaccgtcaggcgactttgctgcaagcttagcccagcttccagggagctgaccagatagttcgttgaacgaaatgttcacaaccaaaagtgagaccatgttgctcagctgtggtgggattgggccggacaaagaattcactgacaagtcaagcagctccagatcttctaggttgccaaggctacttgggatttggccgctcaatctgttgtggctaatgttgagagctttggacaggtactgaaggttccctaggctgcgaggaactgctccttccaaacgattgtcaccaagctgcagctcaattaaatcctgtgctgcagtgaatgtgtccggtattgttcccgtgaggttgtttgcgctgagtagaaggctttgcaggcgaccaaatgacgtgatttctgcaggtatacttccgttgaggagattcttcccaagatccaaatggagaagatgtgtacagtttcctaactcatgtggtatacgacctttaagcctgtttgacgacatgcgcagagtctcgagctttgttaaagcaccgagctcacgtggtattggtccagagaagaggttattggagacatcaagcattgttagattgcgccatgaaccaaggacagcaggtatcacaccatggagcagattgccactgatgtccatgtaagccagtcctatgtttgtgctgaaattcgcaggtatggtcccactgatgacattgttcttcagaattaacctccggagagactcacattgaacaattccaataggtaagcttccattgaacttgttgtatccaagatcaagaacgctgagttgacctccagtacaaagaccaggtggaatttccccgtggaagtggttgccagtgaggtcgacctgaaaaagtccaggtgttgtgttcaaccccagggcctgcggcaacactccagttaagttattgccgaacagggagatctcgcttaggttcctcatttgagtgatctctgcgggtagctcgccgctaaggctattattgtagaggaaaaatatctgcagctggctaagcatgcaaatctccggtggtattgtgccggacaggctgttgttctggagctgtagctcaaccaactcctggcacttcccaatttcaggtggaattcttccagaaatgttattgtgagccatagagaacttctttaggctgctaatattgctgacgaacaccggaattgagccattgaaattgttgcgatccaagtagagcattttcagtgactgacacttcccaattgcatctggcacagtgccagtaaacccgttactggacaccaccagttgttgtagactcagagccttaccgatgctctctggcagctccccgacgaacttgttgtcgtcaaggtaaagaatctgcaggttcggcatggatgagaaaaaatctggcacctttccgccgatgccattgtaggacaggtacaaggtggtgaggttgccgcagttggcgaggctccggggaatcgcgccggagagctggttgtagaagaggctgaggtagacgatcctgcaccgtgcaggaaactccggcaatggtccagacatattgttgctgctcaggtccaagtagctgagcgacgggagcgcggcgagatccggcgga

SEQ ID NO: 135052 - DNA, 429 bp, Zea Mays
gccgtcttcgagtagaccggattggtaagcgagaattgttatccacgcctattggggcgagcataggtgaaggtgatttgcgaaatcttttcgagggtgaggaattgaggataatgttgttcaattacagggagatgggtatcatcccgaaggttgagccgatgtaatatatgatgccctcgccgagtgtatgtaactgtaatttgtatgatgtggcctgttggttgtattcgtatgcttgtgctgatccggctgcacccgtgggtcacttttgcgcggagtgtcttcttaatgagagacttcgattaacacacttgttgcactattccggctgcacccttaggcgacttttgcgcggagtgtcttttaagtaaaagacttcgattcacgcacttgttgtgctattccggctacacccttaggcgactt

SEQ ID NO: 135053 - DNA, 321 bp, Zea Mays
gtcacagtttgctgatgcattaccaaatcaccagggatatcatcttcgtgatcgtagtacaattgaacctccagatcgctatggatttcctagtgctgctgctgtaattagtgaagcatctaattatcatgaagcttctggtattcatgaaaggtggcttgctatgaaagaagagttggatgctcttgatcgtacgggtacttgggatcttgttcctttaccatcacatgcaatccctataacatgtaaatgggtctttaagattaagaccaaatctgatggttcagttgagcgatataaagctcgtcttgtggcaagaga

SEQ ID NO: 135054 - DNA, 279 bp, Zea Mays
ctggatgcagaaaagcaaaactagggcacagaatgcagaggcatgcgacagtgcagtacatatggggttttcccgggccagacgtcatttctaaaaagcgcccagtcatcacccagctgttatttctaaaacgctggtgtgccatgtcatcacttggccgttatttccaaaacggccgacgcggcccaatttaactcagttgttatttctaaaaacgctgacattaccagacttcactcggccattgtttccaaagcggccgatgtggcccgttatcac

SEQ ID NO: 135055 - DNA, 375 bp, Zea Mays
caccatacgcgtgcgtctgcatgctgggccgtgcacggacgtcgagtattacgcacttgctagctagctagagcctagattcatgggctagctcatggccgcagtccagcacatcactacacatttgctcggttaactcccgagtcccgatcacgtgcgatccatgccatggcttaccaacgattatatataactgcactgcaatttagtttcaaatctgtcgagcatgctttgcttccatgagatcaccctcatcaattcctttgcaaagtcatcgatttaagatttttgcgggtgcttttgcatttgtgagtcgtgtgcgtgggtttcaagatcaaaacgtactcaaacttatatgccgtccgatcccgttct

SEQ ID NO: 135056 - DNA, 479 bp, Zea Mays
agatcttaggttcatttggttgaaaaagggtggcaaatattcgtcgttcgataaacttaacaatttcttcctcctgaccatccattccgcctagacatcaagaactttacgaaaggtgtcgtagtgatagaccgcccacctgcaacgatgactggtgccgaaattcgtcaacagatagatgagctcgtggccaatacagaaggtggttttgtgggatatagtgagcaacatatgtggacacatgagtcgggcttgactcaactcccctattatgaggacctactccttccacacaacattgacgtgatgcacactgaaaagaatgttgccgaggcactttgggcaacaattatggacattcctgataagtcaaaggataacgtaaaggcaagagtggatctgaccaaaccaagagatgaagccgcctagtggtggaaagacatggagaaggcctaaggccgatttcgtcctaagcaggg

SEQ ID NO: 135057 - DNA, 428 bp, Zea Mays
gctcgatggaaggttgacagagatacaaagccactaccagagccaagggagatgttcatagcaccaacccgaggatcagaggaacaccacacattagagagcccaagaacagaccatgttcgatagtaaccaaaaacccccgtgtagtaccacatagacacacaaaccgacaatagactatcggtttgcactagttgcaaaaacagcacaagagcacctcgaagctagtagatacacgaccttcaatcaccaccggtagatggggcactgtagttcaccctctcaatccaccgcaatacaaggcacctgctcgatgaatgacaccaccacatgatggaaaggaagaggatgagaaccagtgcccccagagccgaacaagttgattgttttcttggttagagtgaatgaaggaaatcataggagttcat

SEQ ID NO: 135058 - DNA, 747 bp, Zea Mays
gccaaaagtgcggtgaagatggtcaccacgcacgaggccccacatgacatctctccccgcctcaaaaggcagctcgtcctcgagctggaacgccggaaacttggtcatgaaggagtcgacgtcttcccatgtagctgacgcaggggactgatccttccactggatgagcacttggcgtatgccgcgggcgactcggatcttgacgacgcgttcgggttcaggggtgaccgcaccatggtgcaggaccggcaggggaggtgttgtcgctggtggagtgccatggaacttcttgagaacgcccacgtggaacacgtcgtggatgtgggcacgggcgggcagctctaggcggacatcgacggtgttgacgatctccgtcacccggtatggcccgtagtactggggctttagtttgtcggcgacatcggtggccagcgacgatggggaacggtggcggagttggagcaacacccattcacccacctgatagatgatgtcgcggtgcgtcttatcatagtgcttcttctgtaccgcctgagtctgctccaggcgatgtcgaacgttagccaggaactcctctcgttcttccatcgtgcgtgcaacagctgccacacgtgtttcctccggctcataggaggaaggagggtcacgaccgtagacgaccctgaatggcgtgtcgcggagggagctctggtatgcggtgttgaagacgtactccgctcacggaagccactgcaggcactggcgggg

SEQ ID NO: 135059 - DNA, 311 bp, Zea Mays
tgtaaatgtgcttttgaagtgtcgactaataagttcttagggttcatcattcatgaacatggtataaagatagactctgaccggattaaatccattcggaatgtgggacctccgacctgtaagcttgaagcacagaagttcctcagaaagataaattatttacggaggtttatttctaacctagacagaaagattgatgcctttactcctatcctttagcttaaaaatgatgccgaattcacctgggggtagaacaacaggaagcgtttgatctcatcagaaagtatttgtcttcggctcccgtattaaaa

SEQ ID NO: 135060 - DNA, 334 bp, Zea Mays
gcatctgtccgtcaaacggacttcacctgaggatttcattctgatgctccctgatgaagaggttgttgttagggtgttcaataatggtgttgtattcgatacgcctaatggccctttgaaattcttaaggtggttgagttttgcccatgctgaatcgacactacttcattttcatgctcgagatcttaccacagtgcagagcgtgttgagcagttggtgctcactggtggagttacaacctgagtctgaagcgcatcatgatttatcggtcttgctggcctcagcttggagttgccggttggacttaatccacattctagagccggtactatca

SEQ ID NO: 135061 - DNA, 523 bp, Zea Mays
atctctagcaacacccaggttgcagtccgacatggaggtcgaggacgaccgcaccacagcaacacagcgacggttccagatttatagtccgggcgcaaggtcaacgaatacccgacgaaatcgcagcaaaccaggaggtagcgctagcggtccggtttgttcgggcttcagttacggtgaagaagggaagtgatgacatgcgggtcccacatgtcagtgtgacgccaagagaggaggagctgggctgctagaggaacaaatgggaaattgggccggcgtgagagcaagggagatgggccgcatgtggcaatttcggcccaggtgaggtctttctgtttctttttttagttcatttctccaatttcaaacttcaaattcaatttaaatctaactttaaaattcaaactcttattcaaaagcaccaacaaaattccagtatgcaaatgcaaaaatatatatttgcttattattactcttcattaagtagatgttccaaatcatataaatttacttattgtttgtt

SEQ ID NO: 135062 - DNA, 529 bp, Zea Mays
aaatctgtaaattcctgtgaatccaattgatggaatgagttcatgtacctcccttgtgtatccctgcaaactcttagctccttcgggagggcattcccacctcaaatggccatttccctaaaaccatagatccccgcacaccacgtgctcggtgaaatgcccaaaccagccaaacttgctccaattgaacccaaatttttcaggcaccttcaccacacttccagtaacctacttgccaaatttcacgccaatccgagatcccaggcttaaatttcaccaaaattcccgttttgcgcgatcgttcccgagccgagtgccccaaaccctttttcttcgccaaaattcaaaccaagcacacacttcactcatattgacctatctaaacctattcgtgaagtatcggctcaatcccatatcgttttgtgcctcaatttgaattccaatcatcctatgtctctatttgtctgtcaaacgtcgttttcacggcatttgacttatcgatcgtcccgtctcgtgccatatctctttg

SEQ ID NO: 135063 - DNA, 952 bp, Zea Mays
gcgatcacgtctagcgcagcggtatgattacgcctatgccaaacattgcgcgcacgtcgcctgtcgctctccgatgggatgcctaatacgacaagccaagctgatgagtctttgggcgcaacctctccgcctcgcccgaccccgagctcagaccttgggcaagtttgtcgcctcgcccgagctcgacctcagccaccgactatgccgtgaatccctcagacagccactccacccgactgtagcgcacgtcgagagacggctcggctagcgcctcgggaagacttctgcatcaaccaagcaggggctctgatctcgatgagtgctgcatgaaatcttgacgtcatcacgcgccagggcgatgacatgccccttaagcagcctttcacccataccccggcgctgtttacaaccactacggcatgggcggcctctccctcgagggctcaggcgtacggacgacccctcggtctcggtctctgcctcggctctctacggaaagtcaacaggcacgaatctactatacagtacgccaccgcgtcaggtgctaggcagctcttcttcgaatacaagacccgacttcactaaggacgctccccttggcgtataaatagggcaggggaccctccacggacagggtgatccacagatcgacatcaacgccacacgcccacaacacgcgtagacaaactctcgctctctcgttctgtcttagatattgacacttgcctcaatcatctctagggacttggggacttctcctctcccgttgtgcttgtactcccctactacaggcaccacggtgcgagtaatataagcctcatcctctctactggaagtagggccttgagtagcctgaaccaggataatcgcttgtgtctcctcgcacaccatctagagtcggccacgcgacacatttactggttggttaaggacccacggtccaaacaccgac

SEQ ID NO: 135064 - DNA, 466 bp, Zea Mays
tagttggtccaacaacatcgctcggaccagagaaaaaatgtctgtgtttttatggacgccctttcaggttgatgtgtgcctaattcatatgagaatgttggggcattacacttgtgatgtaaacaatctgtgacttttgtttggtttccaggtaatcagccaaatatagtatgtggtatggagttcatatttttgctacttttctggtgcgacgatgtggcggaggcgatggcagggcctagaacggattggtcgtcctgctctgtgttggaagttatgtgaattttctacctcctagcgctagacatatgattttcttcattttgccaactccttgccattgctttctactgttgtttgtttattttagtgcagcaacggagcctatgaagaaaccctattttctgctcctgtttgccaactctaagcagatcgctcgctgaagaagcccaccctcctcgctata

SEQ ID NO: 135065 - DNA, 478 bp, Zea Mays
ggacgatgctccggttgaagatcgtgatgtcgtcgtatatgaggatgttgatttcaacacacagccacataccgtggaatgtgtagatgcagggattcatgcaactcatgaaggggatcacacagctcaggtaagctcatgtagtttgtttgatcatttttttgtcatatagtagatattgtatgacacgagattgggttatactataggtggctgataaatttgtgcatatttcaattgttcctaaagttggaatggcttttgaatccaaggacaatgtttatgagatgtataacaactatgctggcaaaattgggttcagcattagaaagagcacctcaaagctccgaccagatggtactatatatcagaaatatatagtttgcagtgccgaaggacatgggaaaactgagtcatcaaaaggcatgacacggacaggatgtggtgctcgtgttcagcctgttattagcagagaggg

SEQ ID NO: 135066 - DNA, 514 bp, Zea Mays
aaacttaagaagtgtaattaatgttgtattattttcattgcatcttcttcattatgcacaattacaaatatatcttttgtaagcaaaagaagaggtatagatgtgaagaaggtacaacttcgtaggtggagcaaatcaggtctccaccagcaaaaaggtgaccccatgcacaacattgtacacctatttatagtgtcgactcacaatacatcttcgtacgcaattacaaatatacgctcaattcatatgcctacaaaccacgaaatcttctggcggtatcatcgtcttttcttttgtcaatgtgctgatcaagccttcaagttttcttccccttcttccgtgttggcttgttggcacccgccttcatcatggagccgaagcatttagcttctctatgcgtgtgcgcctttcaagcgaaggtcctaaacgaatatgtgatttattgtccctttggagcacctgaaacaggcagaaaacaattaacaacctcatgttttgaggagcttcagtaggg

SEQ ID NO: 135067 - DNA, 693 bp, Zea Mays
caaaggagtaccagcaaacgagctcgaaatattctgaattttttatcactgatccaaaatcacaattgatggaagcacacaaaatttcaattaaaacagagttgtattgtggcctagagaaaatcacaaaggatctctaaaattcctgaaaacacttaagcaatttttttaattatcttcccgattttttttgaatttttttgaccgaaccaaacaggccgttttagcccgttttatggaaggtacctcaagttgtggttttctagggcacaaattggtagaaaccgtagcggcggctatagagcacaggggcacaaccctccctggtataagcaataggtaagcgccagatgatgaaacaaggaggggctacaatgcaatgcggcttgcaacctaatctagggctagtgtggcgagaattcacataaggcggctagcgagggcaaatcgagtaatgtggtgtctcaacttgtaatctgggtaagatggatgggctagcggcggaaacaaataacagcgatggagcggttgaactacaattacgacatgacctaaaccagcaacaagactcgaacacagacacagattcaacaaagcaatctgaaacgaaattgcaaggctaaatagggttataggacaacggatttttttgtatggcaattatctggagttataggatgaaaaaccgaaact

SEQ ID NO: 135068 - DNA, 419 bp, Zea Mays
aaacatactgttgttaattttattattgtcggaatcattttgttcatcacgaaattgctgttatttccaacaataggtcattagtttaattatatatttgttttggctaggatttataaataagatttgaatcccactattcatcctctcccctcttgtcggccaccttggtcctaatagttttgtgcttttcttcccttagttgactaaggtatggcttgaggccattgacacgaggaacggctagagagagtggttgagaatgtgtatgggatataagggtttaccattgaggaaatcgtggttcatttcatagtggtggtgggctatccagtcgaactgtaaagcataacagaaatttaatttgaccttaacattacggctagctagttcaagacaaaaaagaacctttgtgcgag

SEQ ID NO: 135069 - DNA, 633 bp, Zea Mays
ggcggtttagctcaattgaatgggtcaaagagcatcaggagaatctaaggacactaaaacggaagagcagagagcatgaacagacctagaacgagctagccacggcgaggtcactacgcgtggtattttggaccgttttgggggaaatcccaaattgaggctctctgatgagtaattggaggcacgagcgggtggattggatgctggaatacctaacggagccgagggtgtgctcaatttataaggcccttgagcggtggcggctaatttgaaggaaacgcgcggcggccggagagaaggaggggcaatagcgcaatcgattggtggcaattaccgtggcaagctcaccggcgatgatcggatgtgctagagcgagtcactatgacgaagtactgcgtataggcacgtgtcatccgagtggcaggcggctaactctggtgaacttatctgcattcagccgtgagccaagcggacacggtggccggggcggaatagtgccataagctcaatagcggtgaagatctttccaccccgaggcattatccgggcaccagtgagcacgaatcacctgtggtgtgaatccacgtgcgggggtcgccggcggcaagttcactaaaccagcagatcttttcg

SEQ ID NO: 135070 - DNA, 464 bp, Zea Mays
caggaacacgctctattgtatcttaccaagctcttacaagtgtctgacgaaatacaaagcaaaggatggtacaatcggaggctggttcgtgatacttacaaagatggagtgaaaccgcgattgaaaggtcacagctgtattgatcagaagaaagtatgtggagcttgggaggccaaaaactaatatcaaggattagcaaaaatcgagtgcagattagcgaagttcaataagtgttcaaagcacaagtcacaattgctggctaagatgtgtcctatcgaagcacaacaaggtaaaagtaacaaaccagcagaatggcagttctgtaaatagagcagatttttcagcactagtataaatcaaaggcgcgtttccaaaggagtaccagcaaagggctcgaaatattctgaatttcttaccactgatccaaaatcacaaaggatggaagcacacaaaatttcacttga

SEQ ID NO: 135071 - DNA, 360 bp, Zea Mays
tcgcgctctaaggtcgacgaggcacgggatgacctcaacccagcatcaggcacggcagcgcaaatctctgttgcatcatcatccactggctctgataacaagtcctctggaaccatatcctcaagagtttgatcaaagttggccagggacagttcttgcagaccaatgagggcagacaaagcaggagaaggaactccactacttccatcgctggcgatgaactgccgactgtttttccgagttaaaggggcttcattttcttcctcctcatcttccacagtgacaacgcaagcagcacacccattgggttcaacagcagtttgggcacacccattggggtcagcgtcagtaaggccagtt

SEQ ID NO: 135072 - DNA, 594 bp, Zea Mays
agcgaatcaccttttattttagggaaatgcaataccctaatcttgtttgtaaagggggtaaaaaaaatgaaggagcatagatattaggtagcagtccaaatgcacgaacgcgtttgtggatgcggggcgagcagtaaaaagcaaaggcaggtccatttcaggggaaaacacatttcagagaaaaacacatttagggtttctaatgtggcataataaaagagatcaaaaggcatctatgccttatagtgtaggtagactaaaaaagggcagcaaaaacatgcgtgctttcaagtgtacatggagaccccattgcaaagattcaaaaccaaacgcaatgtctccatactggaaagcaatcagagtttgggacccttctactgagcaacgaatagggtaaaggaaagtgaagcctgaaaaggatctatttacctccaagaaacgacggcggcgggggctggacgcacgttgaggcagcggcggcgtcgctgtcggcgctagcagcgtggtcgttgtggtaagaaggagcaagcagaccgagagccttctaggcggtgccggcgtgttttcctttttttttattgaccagaggaagct

SEQ ID NO: 135073 - DNA, 346 bp, Zea Mays
gcgagaggatgtcactattcatgccagccagattcgccagctatttggatttcccgagtcatcgactcgtcttcacagcttgtgctatggcacctctgatcctcctcgtcgccctcacggtggtgtcgctcctggtacaactcacgtcgcggctttgttccgaccgcccttctcagatgggtcgcgacgttctccgtcagatttcaccacagcggccagatttctatatcacctcatgagacggacgcttctgccatggatgggatacagggaggctgccactcatattcagctttggctccttggtgccctagtttctcactcaaagtttgatgttgtggatttt

SEQ ID NO: 135074 - DNA, 741 bp, Zea Mays
caagcttcaaattcgtcaaggttccttgttggattatccccagattcaacctttccatttcttgacataaagtggtgtcaggtgctcttactgtaagacaatggcaaaaagtcttgcgacttaaagcatctgccaccacattggcttttcctgggtgataatggatttccaagtcataatctttgatcagatcaagccaccttctttgtctcatatttagttctgactgggtaaaaatatacttcaaatgtttgtgacccgtatacaaatggcatgtattccccagcagatagtgatgccaaatctttagggcatgtacgactgcagctagttccaaatcatgagttggatagtgttcttcatgccggcgcagctgccttgaagcatacgctatgattcgtccttcttgcattaggaaactccataatacgcatcaaaaggcttttcaagatccagttcggccaacaccggggcagtggtcaacaacacttttagctgctcaaaggctttgttgaatttcaaagaccaatcaaactttgtatcattcttcaataatcttgtaatgggtttaacaatcttatagaaatccggaatgaatctgcgataataaccggccagtccaaggaaactccgaacttgatgcactgtagtaggtgagttccattctagaatatccttgactttgctgggatcaaccacaatccctttagtagacaatacatgtccaaggaactagatttc

SEQ ID NO: 135075 - DNA, 286 bp, Zea Mays
gggatgtaaaaggcaggcgcggtagcttttctttggttggtgtaagaacgaagctaggtgtacgtagatctgcctggtgttggcgtcgctggaatagcatgagaaagagcaaccgtggccgtgctcctgcatgtcaaatgccaatactggttgatgttactggagttggtggtgggagggtacggtggtggtagtcatattcatatgtagctttgcctttacgagttgatgaatgtgggcatggagatgcatgtgaaatgtgaatgggcatcataaagcacaaaag

SEQ ID NO: 135076 - DNA, 454 bp, Zea Mays
gaccgagctcctcaagaaagacaataaatttgtgtggaccccaaagtgcgaggaaagtttccaaatcataaagaagaaactcacaatcgcgctagttttgacaccaccagacatccaccagagtttcgtcattttctgtgatgcttcgagacaagggttgggatgtgtgcttatgcaaaatgagaaagtcatcgcctacgcatcacgcctactcaagcctcatgagcaaaattatctgacacatgatttggaattagcagccatagtgcatgccctaaagatatggagacactacctgattggaaacaaatgtcatattttcacaggtcacaagagcctaaagtacattttcacctaaccagatctcaatctccgtcagcgaagatggctggaattgattaaggattatgacattgagatccactaccaccctagaaaggccaatgtagtagca

SEQ ID NO: 135077 - DNA, 286 bp, Zea Mays
ctaagtgctcttgatgcgtaggcaataactcggctgtcttgcatcaaaacacaacctagtccagtgcccgaagcatcacaatacacatcaaatgatttggtgttgtcaggctgtgctagcacgggtgctgttgtcagatgccgcctcaaggtgtgaaaagcatcttcacatttctgaccctaatcaaacttcactcgcttcttcaatagctcaatcattggcttagcaattctagagaagtcgggaatgaatcatcgatagtatcctgccagtcctagaaaactct

SEQ ID NO: 135078 - DNA, 739 bp, Zea Mays
ttccttttctagagtgtccccaaattccttgagaagatcatcaaggctagcgagggacatgtcctcggcgtcggaccaatcctctaccctagggggaggtggggctggaggggtcttcttcttcttctctgtctggcatccttggtttgtggtcttcttctggattttcttcttgggagcgagcttctttagcttcttgtcatagtccatctttaaggttcgataggcttcacgggtgttggcctccttgccttccgctatgtcgagacactcctggagagatgctttctccttcttgagctcttcgacttgctgctctaggctttccacccgggagtttaggtgggtgcagtgggaggagagattatcgtagtgggtgtcgaaggtgtggaggtatccgaccatgtagacaatagtggggtcatcctcggtggggtctctccctgacagagcctgaagtcttttcctccaggtgggggtatttttgttgctgggtgggaaataatgaaggggggtttcagagatctctcggctgtagttttggcatagttgtttaagggcttttcgggcaacactttggcaagtgtctgggaagcgatgcccggtgaagttggcttggaagggagtgtggtttgggtggctttggcttcctcccaggtagaccgccatagagcacttctctattccattttcgcggtattccttccagacatattcgggcttcttgcggatccccatg

SEQ ID NO: 135079 - DNA, 396 bp, Zea Mays
gaaatatcactatctcctctactacctcagtagagtcggctattcttgcgaattagtggaacttcttcttcttcttcgtcctcatcaaaaatgcggacaaaagatggtgcaggatcacacccattgggcttagctgcaacaggattacacccattgggggtcagcttcagcagggtcacacccattggggtcagtcggtgcatggtcacacccattgggctcaacttcagcagatacaccaccagtgggatcaactccagtaaagacctctgccggtacttcttcacaagcaggagcagaaggtccagcatcctggtccaaacatgacaatcgccgaagtcgtctctttttcttcttcttttcttcagcaagcacagccggacgactgacctggcg

SEQ ID NO: 135080 - DNA, 466 bp, Zea Mays
ctcttgccggcggtgatctctccggcgatctccagtgcgcgtgcttcccctccctcaggtgagcagctctagttcttggtgcacctccctctctattcctttgatcagtgcaccccccttctctccccttgtgtgtcaatttcaaattcttgtgaaatcctatgaaaccaagttgtggtatgtgttcctctatgtgccttgaacattcttgtaggttctcagctccttagggagggtttcaaagccttaaatagccgtttcaccgtaaccctaaatcctcgcacaccacatgctcgatgaaatgcccaaaccagccaaaaatgctccaattgaacccaaatttttcaggcaccttcacaatacctccagtaacatattcgccaaatttcacgccaatccaatattccaagcctccatttcaccaaattccctatttcgagcgatcgtttccgagccgagtgcccaa

SEQ ID NO: 135081 - DNA, 1380 bp, Zea Mays
cctcaacaaccaagctatagggcagagaatgcgggctggtgggccactgtctcgataccttcaactaaattcagttaagattggatcgcaaaactccgaacagattccgcttataatcttgatcggctagccaaacaaatcctaacggactgcatggctggcatacggactcgccctcatcctctccgcgagcatcgcaacaaactcaacagaacgcgcgtctggcgggcgaaatcccctctccgcgtcgtgatccgttcattgaaatcacggatgctgtacacctgggaacccaagccaccttcctctgagcctccatcaagcagccgccgtcgagtgctaattcagcccagttcctgcctgatcgcgttttccccgcttagtctcgttgcggtgtgatcgcaacaaacaccggagatcacggagccgatctggttgcctgcttcaccctcgccctgggatataaaatcaatctccctgtgactccccttggccattagcaagttgaagcactgagagccatagccgtcggcgagccgagcgattccaggttgaagtgaaaaaaatactaaagccactgctctcggcgttcgccgccgttcggttgttgtggggcggtgaggccttggacagagaggttcagagcttattgctgttgtgcgtcgtgatcggttgagtcaacagcgactgcttgcccaatttgtcttacatcgttgccgatccatggctcgtggagggtagcttgactgacgcccagggtcgtggtaagatttctatctcgaagtttgctttgccctccggttcaggtagtgatggtcggatcgaagttcttgcgctgggtcgccggatctctgcgtaccggtgatctgcgccgccttggagctctttgctctgagccgcatgggtgtttggaggaaggagatggatccagggccgctaatctggtgatggacggataagaatagaagtggcagtagccgtttcatctcgatcggtgattctggggccgtggccgctggatccgtaacagacgactgggatcgctcttggcataccggttcggtcggggtggctttgtggccatcgatcggtggatggaggggtgatattagagttcgcttcaatttaatctgcgccactgatcttctgattcgacggccggtagtgagtgcaggatctataagaagagcgatctaatctgggcacttgaaagataatccgatggcccaaatcacaccgtaccccttcgccagggctatctttcaaatgagaccccgtaaaaccctataatttatccgccgtcctcgcggatgtagtctgagcctggtagattttatagaataaacccctaccttctctgtattaatgtgcccagtctag

SEQ ID NO: 135082 - DNA, 407 bp, Zea Mays
cgcgctccctctcaacctagctcgctgcgctgtgggtcccggagatcagcacgtctcccaccacccgcaatggaagccgaacacggcgggagagcacgccggaattactgggccgttggggccgacctcgggcggccacaagaagggcgaagtcgggtctttgccttcccctttttccctcgaccacgcgcaagcaaccatgccagatccgacctccaccatcgctgtagaaccgggagggaaaaagggagtcgcgatgacctcgccgccgccactgcggatcgcctcggggttcgtcgcctggcctaaatttgtgtttgtggggattaccagaagctggtgaagctgctcgggtcttcggcaggtagagcctagggctgggatcccaccaattggccgccgtcgac

SEQ ID NO: 135083 - DNA, 371 bp, Zea Mays
aaaaattattgggagaaaacagttgtagaacttcggtcttcaaatgagaaatgttaagaaaaatccatagagtgtgtgcaacaaataaaatctagcttcgccaatgttggcgcattctctagcgaggacaacttcgtaaggggcgatcctgaaggcccaattgattggatcagcaacgaagttgaagccttttagaaattttgagtggtcgcggggatgtctgcgccttctcaggtgccaggggaatcgtggctattttggagaaactaggctgtgaccacgtgaaagctttggcctaaaccaaagctaccttatctattggagatacaaaagacccctcggctgaagcaagcttagttggcaggaaattc

SEQ ID NO: 135084 - DNA, 415 bp, Zea Mays
gtccaacacgatggacacgagggatcgaatgttgtggagaccggtagcctgcgtgtggtggacgacgatgtggtcggtgtcgagaccaggggcgaggggtgcttcagggagtgggcggaggtgccttcgcggcgaccggaggatgttcgaggaggagtcgctgtgcggttgccatctgggcggtcagagcggcgctcatggcacgctcttgctgtagggcgaggttcgcagcgtgttcgcggtcgtgggaagcctccatgtccgtctggatagtggcgatggccgtgacgagcgttgacgaggccgacggggaagcagtgacgtcagcccaagtagtggttgcgcggacggggaagcccggaggagaaccgccgcgcggttgggcagcgagggtcgcatcgggtagaggcccgag

SEQ ID NO: 135085 - DNA, 1052 bp, Zea Mays
cgacgaggaaagatgcatgtattgtgtaacatgacgcttaggtagctattatataatcgtgtgaagaatgctcgtgatagttgtgtgattaaggagtgatgtagtggcaagcgagaagtaagtttagtttttcaacggttagtggatagtagctgtcggtgttgtcatgatttttgttgtatgacagatcgatgctcagctttataaattatcgcattccattccctttggataataaatgtcttgttgatcgattagaagtcgtatatgagcgttatcgcagcccaattattggaggtgagtagcgttcatgagtcagtccttgctaaaattgaagaacagtccgataacatatgcacatgggtgctgtatgtccttcagtaaccaatgtaggtcttatggagttttatgccatgttttaatgtctctatgttagacctcctaaaatatggtgttttaagtgacttgtgcgttgactaattcgagtggagaaatggttaagaaaaactaattaacctgcttcaacccatgtttcgagttacaatgtctaaaatggttggctaagtcttatacggcgttagccaactcatgttaagtaagagtcgatggcgtaagagattgcgatatatatacatgtggtgtctcggactgcgttaataagaggcaagtcgacgtgtatgtcgtatggcgggctgtgccgtccctttggttaatcgactagttagatggtgttggttaagctcgtagttacgatgaattacttgttgtggtctaaatgcgtatggttatggtcgcaggtaacaattagtagtgctcatgtggtgtctaagttaaaatgcggactagtgggtgaaaagcgcttcgatataaatatatgccggatttgatgattgtggtgaatgcgtttgttaaatgaatgtggtaattttagtgcactaaatgatttggataaaatttgtaagcctacttgctagtccacatgtaattaatttaactctaagaagtggtaaagtgctagaatgattcaagtctctagaatgctgcaattcttg

SEQ ID NO: 135086 - DNA, 376 bp, Zea Mays
ctaaagctacctagatgcttagctccaaccatcacccaataagaaagctcatccaggatgcttcttagaactatgttagtagggggatcttatgaaaaaccactctattctgttgcaaccaaagacaccaagccccaagcatgatgacactattaactcccttctttttgtctttgtggaccttagaacacaccccagcccaccaatcagcaaaggaggactccgtcgatcttggaatgagatgaccaaacctaaagggagacaaaatgttgtaccaaaattggtgagcaaagatgcaggatgttaggagatgttgcattgtctcatcctcttgatcacacagagggcaagcatcagggtgtggtaaaccatgctt

SEQ ID NO: 135087 - DNA, 573 bp, Zea Mays
aagggtatgagagaaaagatgaaggcattgaagagccagtggtatgagtacaacaaagaatggagtcacatcaaagcttacacgcggtaaagaagaggatgttgtcaagggtgagataagtaaaacactgctcctgaactaggatggaaaggagaaggctccaaaggctaggttcaaagtaagcgccgtggtaaaaatataggtattacaagggttgaaggcgataacagaaaagggtgtaagagaagaggtaaaggtatagaagaaccaagggtatgagtacaacaaagaatggcgttaaggcaaaatttgcacgtgtcagagatgaggttattaccaagcgtagggtaagtaaaacaccactctcgaattgagaggggagaagggaggttttaagtggcacacatacgacaacatcaaagtaggatcacaagggtaaaggcgatagcaaacaaaacacattaaacgatggggttgaaagttcaagaggcagagaataggatacatccaagggaaaatgggtaaaatacaactttcaatttgagatggaaaagggaagattttatagggcag

SEQ ID NO: 135088 - DNA, 450 bp, Zea Mays
aaaatatccggagggggccttggtgtttaatggcacaaacgaatacgatttcctgtattgtctcccggacaacaaagaaatatctgtttgctgggagatagccaaagtatgggatttccaaagcttgaggaaggcctttcggtcatgtcgaaggatgatcttgctgatagccttgcatgcaacagtataaaggtacaaaagctgttaactttaaagttgggaatgaagtatttcattgtcatgcttaattctttctttctctttcagggcttaattcttatcaatgccttgagggctcaaaaaaagcgtcgaagatgaaagctgcataatggctctcagcaaccttcgctcaagggtaattgacttgagaaacgaaggtttagagaaagacaagattttaatttcattggtgaataaaatgaaagaagacgaagctaagtacaacgctca

SEQ ID NO: 135089 - DNA, 491 bp, Zea Mays
ctgcaccgacaacttgaaaaccattgtggcgatatttgaactaattacgcttggccctaacaacaagaggttttctaaagaactaacaacaactgcacataattgtacaccatggaatcatgggtaaattctatagaaggtgggggaaaaagcatacaatgtgtttaagggaacacaattgtacattaccctgcaccagaatatatatcattacctgttttaaagtatttactatttggaaagaaaaccatcttactagcagatgggaatgtgcaaaatgtggcctatcaactttatttgtaaaatctcagtggatgctcaacccgcagaaacaaggcacaagattattactgatgggcaccaatgttcctatcatctctatatattcaagaaaagtattgagtgtgaagtcccagtgattaaatggtcatgtcagtagaagcgcaacagactgacctcaccattttgggcatggtaagccctagaggcta

SEQ ID NO: 135090 - DNA, 577 bp, Zea Mays
  misc_feature (547)..(577): n is a, c, g, or t
tcatctccctccacgccgcgcgcccctggagtctcctcgccgtgcgtcgctgctccatggctggctccctgagctcggcccctggcttctatgctacgcgcgcgcggtttcctctctcctcccttcatttctcttcagccgtcgcgccctagttctctgctcggccatggaggtcgcggttccctgatctcctgctcgcctggccacgccgagctccatccagggccggagtctctttgctcggatttcgtcgggcccgcgagctcccctacgcgctcgtactccagctcggttttccttcaccgcggctctccctgacccagcttctctctccccatggccacggcacccctgctccctggtacagcgcgcagcttgcctgctcggctgtagccaccgcgcgttcccctgccctcggcttcctgcatcgcgtggtcgcacccctcccttgcttctccagctcgaccgttcctcctctcttttcctgctaatcgcgcgccatggtgttctctgacgaatcaagctgattcatcagaagcacgaaaannnnnnnnnnnnnnnnnnnnnnnnnnnnnnn

SEQ ID NO: 135091 - DNA, 471 bp, Zea Mays
taataaagctgtgttggagtgcgacgaagcggaacttacctcttcctagacgtggttgtcagttcctttgttatagcgggagtagcacatggaaccacaatgccgctgccaataccaatagtctgcatataagggtcagtcacagcgcgtactgtttgctacataaatctgaaagtgtatgggatgcacaccttatcttgcacactggttgcagaactttggggtgtgagcggggtcgaaggcatgaccaagttagaggctttgctaggagtgtcttcaatgcttctgggtgcgccttgcaatagcacaggttgtgactgttttggccccgatgaagatgtttggatggagtcctttgcagtacctatctctgccacgactgcgttgacctggaaacaaatatttccagtattgattgtgtggtcagagaaactcacattccatatatacgtcttctcgagcagatctgtg

SEQ ID NO: 135092 - DNA, 419 bp, Zea Mays
cccgagggaaatcaacccagaacttggaggtgctactcggaagccttcaaccactaggctttcgaaacattcttatgcttgtacaagctcttcaatctgagaaagaaagtagcaaaacgagtggcagtgggtctcacaagatcagccccaccagttttctccctcatgataacaaggattctcctatgtctgtatatgaaagttgtcatacgccttacgcgcaattggtttcttgaattctttaagtttcctatgtccaccaacatgagatccaaaaaatatacagcacatggactctaaaataatgtaggaatactttccattagaagcttgcctgctgccttataattgatatcattataagtaacaacttgattacttgaacgaccttgtctctcccactatcatcaattttttct

SEQ ID NO: 135093 - DNA, 280 bp, Zea Mays
caatcatgtctagccattctttgcaaggcttcttgaattgtttttcaaatttgaaacggtaagcaagacgaacaagttcatgcttcttccatgcttctttcttcttcagcattccccagccacttgacgttggatatgttctattcgccaagtattcttgcaccaagtccctggtactgatttgctcagctaccactctaaattctactttgggcagctgttagggtgaccccagttgcatattgcttagaggtcgggtcattccgaagctcaaactcag

SEQ ID NO: 135094 - DNA, 291 bp, Zea Mays
gccggtagaatgttggtagcttgttgacgtaaacccaaagctaggctatgtccttgtttagtaaaccttgatctaaacgtgtattaatttcttgacaacctgtcctaggtgtcgtcttgtgtgaagatcattttcttcacaagattattggagttctagtaattagaccaagtcatgtcctcatcatctcaacatttgaaattgtatgagatataattcataattttgtcatttcttcaaagtcgctctaaatcttcaaaacatgcatgagtttgaattatcgattcctac

SEQ ID NO: 135095 - DNA, 319 bp, Zea Mays
cgatgctattcactttaaacatatttattacacaaacactgattcactataatgaccatacacgtagcctttttggtacctctatagtgtaagctaaatttcactaaaagttatgaaatgtagtatgcttggtcacactgtgtacattaaaaaaccaagtcatatttggggtgaatatgagaaccggaaaaatgaagtaccaaattattcttgctggttcgcttaaatttaactgtagtctttttggtacatctagactgtgagctaaatctgttgggtacctgtatagtgtgagctaaatctttttggtcacactgtg

SEQ ID NO: 135096 - DNA, 628 bp, Zea Mays
caaaaatatttactagtacagtacactagtccaaagcgaaagcgagagagagagaaagggggaaaagataaccagagaccaatacgccaagccctaaaataaaagcgaaggataggccctcgctctcgctcacatgtatcacatcacgaatgagacaatctcggacactctcacaccgtccaccgcctccactactccaccacatgttgactggagcgagctcaggccggtcgtcggcatccgttctccgcgcgggcgcgaacaaaaattcacttttttcccggtgatgctacagcacatgcgctgcttaacaacccggagctaatggcgattaacaaggtagctaatggtagagtagagtagagtagcagcatgcgctagttaattggtcgattattaattagtacatggcggcgccgactccggcaccggcggcggccccctcgccgtcggccttgttggccgtcatgtcgtcgtcgtcgtcttcgtcatcctcttcccgctcctccacctcgccttcctcctcgatgctctccgacctctccctcccgcctccgccgccgatgctgcctcctccggcgctgccccgcccttccgatccgggaggcgagcccgccatcgccgccgc

SEQ ID NO: 135097 - DNA, 614 bp, Zea Mays
ctgtaatgcatgtcaattagccaaaagtcatcaattaccatatcatagttctacttttcatgctacatcacctcttgaactcatatattctgatgtctggggtcctgcaccagtgtctattggtggatacaaatattatattagttttattagtgcatttagtaaattcatatggatttatctcatgcatgataggactgatgctcagctcatttaaaacaatttcaggctcatgtcgagcgtcttcttaataaaaacattaagtgtgttcagtccgactagggcggcgaatatcaaaaacttcataatcgtttcttcacttccttggtattggacatcgtgtatcctgtccacacactcaccaacaaaatgggtcagcagaacgcaaacatcgccacattgttgaaacaggcctcgctcttttagcacatgctgccatgcccctcaaattctgggatgaggcctttaccacagccacatatcttataaacagacttcctactagggtcattgataacttgtcgcctctacaacgtttattccaaacaccacccaattattccttgctcaagatttttggttgtgcctgctggcctcacttacgtccctacaat

SEQ ID NO: 135098 - DNA, 630 bp, Zea Mays
ctttgtctgctctcgttggtctgcaagaattgtctctggcaaattttgatcaggctctcgaggatgtggtccctgaagatctgctgtccgagccgacagatggtggtatgatggacgtttgcactcatatgcctgatgtcgggttagagttatcccgagcagcgtctcgtgcctcatcgaccttggagcgcggtcttaagagtaaagaggctgatctagattgctctgttcgcatggaagtggctgaaaatccttcagccttagaggtggctgctgcagagaacccggtccccaaggatggcgccagcgtttacccagcccccgagggtgttgccggtaatgatccggctcgggtgggtagcgcgagctatgacccagcccccgagggtgtccgagcgggttccccttctcatacttccatggatgtccacgtcgtgtcttctcctccacattctgattgcatggcagcagcacgtgcttcgggtcaggaagtcgccttagaggccggcgcacctgatgctaaagttttgattcctgctggtgatgctgagttggtccacaatgatgctctgcagattgcctcggttgataatccttcgtcaagtcaccaactgacttcccatgatttgg

SEQ ID NO: 135099 - DNA, 701 bp, Zea Mays
actacaccatttcggcccacataccctaacactcacgcgcggcccactttccttctctcctccgcgcgcaagcctacctgtctcctctcacgcctcactgggtcctcggtcccactggccggtcactcaacagggcgcgtcgccgttttcagtcgttgctctgtgggccctggcggtcagccccgctctcccctttgctccgcgcgcatggcgggcgatctgcaacggccgcgaccgaggataccggctccagctgaatcgtgcgctgacttccccgcgggtataagggtgcggacctcgctgccgttgtagtgctgtgccaattttgccctatccactagcccagaattcggccaccgccggagagggagcagataggagtgaagaagcgtgcgtccgccgtcgaggtagttctcgtctgcggccctcgttgtgggcgtgggggcggcttcggggcagtagcggttctccgtggtggcatctgcaacggtggttggcgcggcagagcatcccggtggcggaaatctctcgtcggagccgcgaattggctcatcgccggggagcatcccctttgcggtcctcttcaccttgggtaaggcatccaagtcatctgccgcatctatgtgatggattacgactgaccagattgagaattgcgggtcgggttgtgaactaattcctcgtcggggtcccgatttcgc

SEQ ID NO: 135100 - DNA, 744 bp, Zea Mays
caaaaatagaaagaattagggatagtgaaacttagtagcactgacagaatattttttatttccatgataaaaatgttgaacataaacgcaagtccaacaaattcaccccaaaacataacatcagaaagcaaaaatataaagaattgtccctgctttctgtaactagggttgggtagaggagatagggttgcacaaaaatacaaaacaagaataggacaacttggctagtgagaaaggtcatacatgcagatgaacaagttgtcttattgtccacccaacagatgaacaaattagcttgtgatacttaatatgcggaggagtggtatttccacatgactaatgcatctaattttctgtttgctaaaaatttgtaaaacaagcttaacacatcacacattctaagttgcaccaacaactttatcaatagcccagtgatggtgtttcccctcctcgctggtgtttgccctcccgtcgtcttgccttccacccccacgtcagcgccgccataggcctcgatggccacaatcaacctcccttccatccccgaccatcttcttcgacgccagtgtcaaccaatccctctccaacctttaccaaacatgcctcgtgcggccgctcgtgggtagaagggtggcaggactccttgtcggaggaaggtttggacgtccctcctcgaagaacctctaaaggctttaccgcgacatggtgtcttttgggatggacggacatcttcctgttgtagct

SEQ ID NO: 135101 - DNA, 519 bp, Zea Mays
ctgattcgggacaaggtggagatctacgtcgatgacatcatggtcaagactagagaggggtcgactatagtggaagacctgaccctggttttcagcaatctgcgggcaacccacaccaagctaaacccagagaaatgcatcttcggtgtctccgcagggaagttgctggggttcctggtttcataccggggcattgaagctaacccggagaaaatcaaggctattgaggtaatgaggcctcccgcccgtattaaggacgtccagaagcttgcgggatcactggctgcccttagcctcttcatttagaggttggctgagagggcactgcccttcttcaagctcctgcggaaatctggcccatttgcctggaccgaagaggcggaacaagccttccaagggctgaaacagcacctagcttccctcccgatcctggttgctccggagccaggggaaccgctgtacctgtacattgcggtggctgcagaagcgataagcatggtgttagtcgccgaaagggcg

SEQ ID NO: 135102 - DNA, 409 bp, Zea Mays
gttttagaaaagggcacaaatatggctcggatgccactgtatgaagaactaggggccttaaccctagccactagatacgtaaatgatagatagtatacctccggtgatggagaaggtcgccattaaggcagttattcttcacacacagacgttgaggagcgatggcggccttccctccactaaccatctaatagaatagatcagatatagagtgtgtaaggaagagttgacaacgtcaaacattggtttgcgtgttggctactctttctcttttatttctgcagtgtaaaaggtgcccacaactaaaagagtggttgtgcatcaggacgtgttatgataggattgccttgatcccatggctgagtcaattgagatcaatccaaacaactatatgatgattgtctagtcc

SEQ ID NO: 135103 - DNA, 439 bp, Zea Mays
aggcagacgaggaaggaagaaggagcacggtatggagagggtggaaggaaacagaggcaggaactggagttatgttattttattacttgttcgtcacaatccaagacatcgaggtatatatcactccctcctctcacagcgctgctaattataaagttaagcaccacattattggacccaattgccaccacacatgtgagttcatcatcattattgttcttgttaaaccggaaatccactcagatacctaataataaattagtcagcattattatgaaaatttaccacgtaaaatttggcaccaatactccataaaaacagccgccacccaaaaaaaatatatcacccccccttccctgaccttccacatttttctctcccacctccatattttttgcactttctatcggtaaccacgctcgcctcctcatggtttccc

SEQ ID NO: 135104 - DNA, 507 bp, Zea Mays
caagaaagtagtgatctaccttgcacttgtgatagtttgctccactggctcaagcttcccaacatcctctagcatgagatctaggcaatgagcagcacatccattccaaaatattgagggcctctttgatgtcaatagacttgttgctgctgtattgacactagcattatcagtcacatgagaagtccactgaatctaagaagcaaactccatgagcactatgaacaactaaattcatcactcccctacccttcctatctgtccatgcatctatcatgattgtacatcctgtttgctcccatgattccttgtggttcttgaaaccatccaataccttttgcttccttttctacaagaatggtccactcatctcataaggactaggccctctcaaaccattaccaaatttcccaatggactcaagcataagtgcaaagctaggaagggtgactgtgttgtgtgcaatactagcttcatagaaaaactgacatatgtactcacaagcct

SEQ ID NO: 135105 - DNA, 366 bp, Zea Mays
ttgcctctgaccttgggattgatcttgctcttcagtgccaagcgcacccagcaagtgcacaccagtttgcattagtgtatatgccggagccgattcatcatctggtctggcaatttcttcaacaccagagagagcaaatgaccgcggcgatggtggtgcggcgctccggctaggctgccctcgttgtccggcgaagtgccccccagcccttggccatgggggcccctcgattggttctggtccatctgccctagatttctccgacgaccttcattttcaagattggattcttcacaagttaattgcccgatcaatcttctcccgggtaaatttgatcgcaatgagttctttttagtcatctctttc

SEQ ID NO: 135106 - DNA, 282 bp, Zea Mays
ggcttgcttggactcaagataccatcatcttcctcatcatcactaccaacttcggcatcaacattttcagcttcggtattagcactatctttctctagaaaaggtccctctccctcttgaacaaccaatccagaatgtctcataacctccaaaattggagctgtctcaatggtttcggtctctccaccctcacttgtcagtctagcagtagatctaatcctagccatgtgagttcttaagatgaagctaactttcaattgttttgacgcttgttcgaagacc

SEQ ID NO: 135107 - DNA, 423 bp, Zea Mays
tggaaagatggtgatgcaagaaataagagtcctcagaaggtgttgtggcattttcctttgattcctagattgaggaggatgtttgctacggcaaaaatatctgaggaggcacagtggcacaagttgaagaggaaagaagtgggaaatgagcttagccatccagctgacggtgaggcatggaaagactttgacagaaaacataattggtttcaagaagatcctagaaatataaggcttgggctagccacagatggttttaatccgtttggcaaaatgagctcctcttacagtatgtggccagtttttgctatcccttataactttcctccgtgggtatgtatggagcaatcaaacttcatgttgtgtctactcatccctggtcgggaatgtccaggaaaagattttgatgtatttctagagcca

SEQ ID NO: 135108 - DNA, 371 bp, Zea Mays
ggtcgcttaggcttcgctctctgagtactctgaccacatgtgtctcgaagtagtgttgtagtttccccgacgccgcaaggacaacatacactatcttctccatttctgtcatgttgcatttggaatccgtaagcactttagagacgtagtagactaggtgttgttgtagcttgccgctaagttgttctcttgaaatagtgctgcgctgactgcgtcgaaggatgttgtgacataaagcaaaagtggcacagttgggtctaggccttgtcggagttattagttttgctaggtattttttgagagattcgaaagatgtggcatgctctggtccccaaacaaagtcctttgctccatgaagggttcggagaaaa

SEQ ID NO: 135109 - DNA, 678 bp, Zea Mays
cagagacaacatattgggttgcaaggccaaccccttttatgaaggttatcagcagttaggattctcttatgtagtagtgtccaagcaaaaaagcggcacttcggttccacattagccttccaaatgggacagagattcattttactgtaattggatgagaattggattttgtatgcactgcttgcactgtactgcccatctgtcgtccatctctaagaaatggtgtcctccaaaccattaagcttctgcatgttacctatggcctgccatagagagacgaactctcttagctccccctcacccgtgtatggggagcataatcgtatccaattgttgttagtgagcgctttgtcaaccgtgatgttcttcctctttgccttcttgaatagagatggtgcaatgttcttaggggcttggccttggatccagctagatttctagaattcagctatctttccattgccaaccgtcacagttgtggaagcattgaagagatcttcatcagttttgtcacaaggaagcttcatggcagtccacgccctgtctttgctcttccatcgcagccatagccatcttagtcttaaccccctcgcaaaacgatcaagatccagaattccaagaccccccttgttctttgggaggcaagtgatgggccagttgataaggcagtgacccccg

SEQ ID NO: 135110 - DNA, 400 bp, Zea Mays
tttgcacagaggccctcggtttatcagctaaatcgaagtaggtttgtttactgttcctctgtgtcacatgcaatttgcagagatgccctcgatcttctatctcttccccacgaataccactaaccacggcgcacacgcagatcatccctaacgtggtccgtaccggccatggccggcgatgactgctcgggataactaacggggaggcttcaccgatctaagatggcctcggaacacgcatcaatttgacacgaacgcactgagaacgccctgtccacatgcacggcgaaaaccgtgaccacgggcacgcgttcccgcttaatcagggccggattgagcaatcgagcgccactgggagcttcgcaagcatgcagaggcatgaaaacaatgcatggattgg

SEQ ID NO: 135111 - DNA, 750 bp, Zea Mays
aatgggagaagaagggctttaattagttatctgttttagtgattagcaaaccaacatttttactccaagctacgaagaatatttctgtgcttatactagaagggaatggctaagcagtgggttgctttttgatgactgacttttattctcttgagtcttcacaaaagttggcatactctgcatttacaaagaagcaataacacggtcactgatagctttgtctatcaaacaaccttcataaaaactctgtatgctaaagactgttccagagaaccataggttttgtaagaagatttgcttaacaaagactctaaaagctatacatttctagtgcacgggtcctacaaaaaatagactatgatatttactttcatttaagaaatttgatggcagacaaatggaggtaataatttgatggccaaagccaaggacaactttatctagcagacaaatggaggtaataatttgatggcagatcgattcactactagatgaaattgcattttcacaaattgtagcctccctaagctcttggcacgaacgaatcatacgaagtcaaaaaatctgaactcccctgggatgggacaggcgatctcactcatcgatctcactccccttcgttccatcgacccacagctagcctccctcatatgatctcataaaaaatacactaaataaagcaaacaaatgaacttacaagtgcttctcttgccggttcactcaggccacgtttggagctggtatggcagg

SEQ ID NO: 135112 - DNA, 378 bp, Zea Mays
aaggatctattgatgcattctaaattttttttgcccaccgtagaaagccttcaacatggtaagcactctgtctttgatcgtgctctaggccactttatagaagctagggccaaaaccatcaggactgagagcagatagacttgacatggcaaagactgttgtcccggcctcttcttctatgaagatgtgatctgagcttaagccaaaagtagcttgcccccgataaagagcgttaacatcgaactaccagtgagcagggggacctaagttcgagttttggtggaagtagagggtggttgtagccatcatagagttgtggtctgaaagtgctgcgtctccatcctagatgaacttgatcgcatttcgctgacgacggta

SEQ ID NO: 135113 - DNA, 857 bp, Zea Mays
gcgcgctccacgactccgttggactgggggtggtacacggaggcgaaggcaagcttggtgccgatggagaagcagaagtctttgaaatcttggttgtcgaactgcttgccattatcgatcgtgagtttggatggtactccgaagcggcaaacaataatattttgccagaagaatttctgggccgtctttgatgtgatggtggatactgccctcgcttcaatccatttggtgaagtattcaacggctacaaaggtgaacttgaggttcccctgagccgtgggcaggggcccgacaatgtctaggccccagcgctgaaggggccacgtgtgggcgatcagcttcgtgaactgcgaggggcgtcccgagcgtggggaaaatttctgacaggcctcgcaggatctgacaacccgatttgcggcgcagatgatggcgggccagtagaaaccttggcgtatcacctttgccgctagggccctggggcctgcgtgggagccgcaggtccccctgtggacttcgcgcaggatttgaacgccttcggtctcggtgacacacttaagcatcggctgactgaccccctttttgtaaagttggccctcgatcaatgcgaagtcccggcttcggtggtggaggcgcttggcctcgctgctgttgactgggtgatagtacccctgcaggtacagggttattggcgcccgccagtcttcggtcatgataagattgatcatgcggtggccctcgctgtcgttggttatttggagcccttcagggctgaggacgactggcgtgccaatgacgtgatagaatacgtcggagggtaggacttcacccctggcggctgccttggccaatgcgttggc

SEQ ID NO: 135114 - DNA, 813 bp, Zea Mays
tgagggagctgccacggacggagtatggcatcgacttcggggtgatcgttcgccactcgtgtgcgcttcgggcgttcaggactcgaacgagcatgaggttcgagctaggtgctcggggtcttcgatggtgatcgcggggcgccgcggtccacaccgtgcgggtgccaggattgcctcggcgagaatcacggttagggcaccctgatttgtttcgctgtctctctggcgtggtgtagaatcggttgttcgtgtgtttggggtgcggggtcctgggttggcctacgccgcgactgacatcgctcgcgccgccgcgcttgtgccttgtgcgtcaggaggatgagggcgagatgtgtgccattgctcgcttgttggacggtggagattagatatctggttgtcgcattgaagctgagatcttggccatccatctagagttcaacggagtagattagatcgcattaaataaaatctgggtcgtcgaccgctcgttgggcagctcggatttcataccgattcgggtgagattcaatctaatctaggccatcaaaaacagatcgtgcggccaggatgcgagggtacctcttcggccgggtattttctataaagagtccctcgagttcggaataatctacccgcagtccggttcttgtcaaagaccattacagcaaggtcctaaaacttacaaaatagaccctggatttcaatgaaatagtggccgcagtctaatagccgtgtatgattataaatttaatatgagaattgcttattaggtatgaaaataaatctaagaacctaagaaactcataaattcct

SEQ ID NO: 135115 - DNA, 404 bp, Zea Mays
tagatctggagtgtcactgtcagagtaaacaattagacctcgatcacgggcaatctttgactttcattttcattaactaccaatgcacgttattgtatgcctttcatcactgtgtgtctgtccgtaagtaaaggggggaaagttagctgcaatgctatgatcaggtagattccagaagccaacaggcaaattccagaagccaacaggcccccgctccaacgtgctccccacttgtcctccaaagacaacctgccatgtgggccgttacgaccttaaatcatccatcccacatgtcagtgacggcaacccctccgccaaaagtgaactgtgaaccggacgatccaggcatccagctaaccgcttccccctcgtcgcgctcgcgccgcgccgcgcctcgcctccac

SEQ ID NO: 135116 - DNA, 946 bp, Zea Mays
caaccgaacaagctcttagtgtgctacaactgacccaaatctaaattaggaatctacaaaatgaagtaaaaagcaaattgaaactaaaaatagaaaataaaagggaaatagaaaaaaaatgatgaagcctggagcgagactcttggcccacttcactccaatggatatggaggaccgtgcacccatattttcttttcttttttttgtcttgccacaatcctacgagcgctaggaacagacatatgggtcctgctgctcacgtcatcgcgtgataaagatgtagccaggcaacaaaccccgccccaatttgcgctaactgtctgccactatacctcttcccggctgcgaaacgagcactagcagaacagaatcacgggatcttccttccgggtcgtgtgcgtcgcaacagaatcagccgttcctggttccacgacactggagcctacaaatagcagctccgctcctctggaatccatccgtcttccacaaatttccagccaacattgaacatccatgcgtgggtgagcgaggcgtgttgcgccgccaggagacttgcatgcgcgtcggcttctaaactttgggatcggacaatgatggaatcaggggagcgctgcctcggtgacgtcgcgtggaattgctcttcggaatcgtcgagccaccgtcatgccacatctcgtcatggtcaggcacctacacggctccaaatcatcgataagacaccttgagattgttcgcctggacctcagcatgatgtagcagtaggccttggggcagagagtgcaccctccgcgtcggcgagatcactgccacggcgctgcgaaacatcgtagtcatcccggtcgaagtatccatcataggcgggtggtcttcctaggagatcgccgagtcatactcattgttttgtagtgatgggatcgagctttgggcaagggggttcgggtctgca

SEQ ID NO: 135117 - DNA, 808 bp, Zea Mays
agccacatccaacgcaacaaaataatctaagccttcatccgaggactcctccgtccaaggaaacgaactcccagactcacgtcggactcaaaacattcaaacatagagctaggcgcactatcatcggcgggcactacaactgaagtctccgccgcaaaatcagtattgtcagtagtggttgcttgcgcaggcccaaacgtcggaacctgcgcagcaatcgaggttcagtatcacacacacaaaagttcacatgcaatccctaacccctattcctacacctgcgaaggctcggccgtcggcgtggggtcttcggtagctggttcgaccaccgccctcgaggcgtcctcacacgtcggtgcaggggctggtgcgaggtctttgccggttgcagtcggtgcgagggtcaacgaggggccctcgtcggcatcagatggcggcgccggatccacctccgcggcctcgggtagcgcgccgtctagaccaccaaggtcctcgacgccttcggcatgcgccatctgcagcaacatcacactcattcagcaaaaccacgcacgcgcacacatataaccatataaaaatagcctttacctgatctattgcccggtcggaccgctcccggcccgtttctcggccgtgcgggccccacatccggtcgaagagcgcccccgccgactgcttcagcacagggtcctcgaccttgaagatttcgcgttcaaagttttcgtccgattggtcgaagacctcgaaatgcctgcacccctcgcgggacaaagcattcacggccccctcgcaggtgacgagggaggca

SEQ ID NO: 135118 - DNA, 563 bp, Zea Mays
gtcaatgttccaggagtgctctaagtcttcgccggaaggcgttactagcctgtacgcgctgggggatgccttcgatttgacgatgaatggaccctcccatttcggctccagcttgccccgtgattctatccgggtggtccggacgagtacgaggtctcctttgttgaactctcttgggatgaccgcgttgtcgcgccaggccttggtttgagcctgatatttgttgagggcctatagggcgaggacgcagtctccgtcgatgagatctttggatgttggttcgtcgatgtcggggaccgctgatgtgcttgttcggggcgacccatgctttatctcctgtggcgtcatggcctcggatccatacaataaacgaaaaggtgtgaatccggttgctcgacattctgtcgtgtttatgggccagaccacttcgggtagttggtcggcccatttgcccttcttgtcgttgagaagtcttttcttgatggcagtgaaaatcttgtcgttggcacgttcgacgacgccattggattgcaggtggtataccgaggcaaagtcaggcttgg

SEQ ID NO: 135119 - DNA, 502 bp, Zea Mays
tgcacggccacccgaacctttggacacaagtgtcggcacaacgttttgggtggcccgagggcaaggagtcgatgatatagaggctaaagaagcactcaatcatagagaccttgccggaggtcaagggaaaaaacttcgatagcaaagacagggaacggagacggaaaacaacagtggagcacatgtggcgaaggtccgtggccactggaaggcggtagcgggggactgagcggaggaaaaggtgtggggcggaggggagtagtagggcctagactcaactatagatctgaaccaatgcgttgaggccgacaacgtacatgacacacacgacgaacgtggtcagcagtatgatcaccatctccaccaccccgctatggccggggcgagtagaggggcgcgccgcggcccacgcgctgccagggtgaggaccgcaacaactacagccgatggccaagggtataccggaactgcgacggcatgctagatccaccctcgggcggcc

SEQ ID NO: 135120 - DNA, 528 bp, Zea Mays
gggtggtcggcgcctttcctggggtgaatcgagatcttgcgctatggaatttctcgccgtcgtgcaaacttcgccgcggatccaccatggtgcgtggacagcctcgtcagcatgctaatccttggtaaggacgcctccattgagtttgcctctctctccgcagcgtttagcatccgtccgaattagaaatgggcgctgtagctggtagttgggaggtccgtccatgggtgccgccgtttgaggcctctgcaccgccgccgggcctgtgtggggaggaagaaaggctcctcgccgtcgatccgaattggacgggtgagattagaagttgggatcgttttgggcgagtaagttagaaccgttgagatctgatcggacgattctgagtcaatctcgacttcattaaattccgagcgctgatttttaatccaacggatctggattgggtacccccctttcgtttgagtgggatctaatcaggcccgttgaattttgatcggatggtcgggaattgtgcgtaccccttcggcc

SEQ ID NO: 135121 - DNA, 656 bp, Zea Mays
tctgattttgcactccaagctgaggttgcctttaatttgcatatttgagctactagtgaattgaattcggccgtccacctctaaagttgctctatctgttccataccctggtactgtgagtctgagcaaaaactttttgaggaatcataatgactctttactgatggttcttcttagcccaaggttcagccattgtgacctggacacccataggccatagacaagaactttttctttctttcaatccataaacatgtgcccagcatcctccgctcagattactttggaagataacttagtgtgttcagttatctcagtttggttcatgctttgtttgagcatatgttttgtccagaaggttggcttcctgcctgaacttgttcccttgcatttgcagtcaccatgtaccatttatgtgagacatagtagacctgtcttgactttacagtaccattttttagatgtagttccagggaatggatacttttcaaacatgatgatggatgactacgttgaaggagaatttgataataatagcaatacatgtcctgatattcagccacaatcaatgcaagttggaccaatagtccccacatcgaggccaaaccataagagatcaaaaaatttcagtgatcaagaagatgaaattttggttt

SEQ ID NO: 135122 - DNA, 920 bp, Zea Mays
ttaaggtcactagcaaccccggccgtaaaaagagtaccacatcatcaacatatagagatccaatgttgaatagaacgcgaagatagaggttggagcagtccatcatccgatgccctgataataagcgcattgagattgtccatgactagcacaaacaacaatggggacaaagggtccccttgctgcagcccccttctatgtgtaatgaaatcaccaggcatcccattgagaaggatatgagtagaggatgtcatgagcagcccactgagcacatcgcgccattcaggcccaaaaccaaccctctctaacacctctagaagaaaaggccaggaaacgaaatcgaatgctctggaaatgtccaatttgaggagaatccttggttatttctgagaggaggaatctagtcgtttgttgaacaagcatgaaattatcttggatgaagcaccctttgatgaaagtactttgatttttggatatcagtttctccatgtgatcccgtagccttttagcaagcaccttggtaaagagcttggcaaaactatgaatgaggctaatatgtctaaaatccttagcaaaaacaaccccttcttgcttaaccgggtcatctttgatggggaatctccttccataggcaaagtgcaaagaaacttcttagatgaattagtttgctggatgatggcgggagctaaacttcttgtgagttttggcttagctgaagctcttaatgtggctaggtcgagttatgttcccattatgtaatagtcctcttgtgtgtgtgatttatgggatcttgcctagcaaggctccctcttttgtaagacattttctcctctctaatatataaagatgcgcaactctcttgcgcttcgggaaaaacaaatctaatttagattctatatattttttcgatttgtatttac

SEQ ID NO: 135123 - DNA, 660 bp, Zea Mays
tgcgtggttctgatgctttccaggatcctgtgtgctgatttggtcgctgctccggcgttgtcaatggccttgcagggatcgcaatcacaacacgggcgcgcaagctttttctggcgctcgctgccaggcacacacggtttagtatagctagcgatcgtgcctgccggtgccgtgtcaacttagtgccgccgccccccaacggcctggctggccggccggagtcttttcgacggcacggcacagctcctctccccacctgcaaccccggagtgggagtgggagtggtttcgtcgtgggtccctcgcccatggccttatcgcgcagtatgccctccctagtgaatgcagtcaggaaaacgtaatggcgccgccgatggttgcttcgcttgctctgcgctgcagatgcgatccatccaatccaactgcacagcggccatgtgtactctaggctggaagcaagcagcctgcagcctgcagcgcccgattagttttgcacggcatctcgtttattattgttgcctgtcgctcgtctcgaggagacctcgtttatgggttagcaagcacgaacccataatttggccagggcgcttggagattttagaacgacgggatacagtgcctcgctctggccactttggatcactactagtagctcaagctc

SEQ ID NO: 135124 - DNA, 372 bp, Zea Mays
atttggaccagttttaaattaaaatgatttatttagccttatatagactgaaaatcaattattagagaggcaaaactataaccaaaatgattaataaaaatccagtggacttacaacccccagagccctactacaaaaatatagagcacctcagcccaactttttaagtaaggaaaataaatacaaagtgatagtaaggcattttccaactaaatcatgaacaaccccaaataatatgataatgggcaaccaaaattttgctaagtccatgatgagataaactaccagagaaaaatgcaaacccatgaaaaagtagcaaactcacacctattgataatgatttaggagaaaggccacttaattcaaataatg

SEQ ID NO: 135125 - DNA, 313 bp, Zea Mays
tttgcatgtagtgcttcaacgtctgcgagagcaccgtctttatgccaaattgtaaaaatgtgatatttggctaaaagaaatcaaattcttaggtcacactatgtctcaggcaggcatagctattgatcctaataaggtgcaagaggtgatgaactggaagccgccaactactgtccgttagattcgaagttttctgcgattggctggttattatcgaagattcattccggatttctctcgaattgcgaagcccataactgaattgttgaagaaagaagccaagtttgtttggggtcagaagtgcaaagatgcc

SEQ ID NO: 135126 - DNA, 320 bp, Zea Mays
aatcgccagtaacacgaagttgcgagtataccgagaggttattctgagaattttttcactatgttggtgtgaaaaccatagtgtgttcccgtcgaaccactttactcgttctatctaggacctctatgcttgtgtcgtatacatatctcggaattgtaaatacttatagtcctaaattgactcgggatagtcctttgataatttggtatacactgtaagctaaatggtaaaggtcggtcctgaatggacacatacctagggtttatgtagccgaactacactgaattccaccctttggcatgcttaccattatctacctc

SEQ ID NO: 135127 - DNA, 611 bp, Zea Mays
cattccccatccacctaatgttggaaaaactttattggccagatactcttgagctaagtgtcgcgtgctgatgtgctcggccacaactctgaattgaacttcagctagctggcatggggagtcgagttgcatattgcacaaaggccttgtcatgccaaaactcaattttaagggacacatcaccatgctcatgagcttctccctcttcttctcattagctttcatgtaaaaccactcgcttgtccaactagtgggtcattttgtgtggtatccaattacaggagcctttgtatcttttcggtatgcaaaattgtagcatctgaagtttttgtgcagaccatctgctcttgccttggtttggtaatggagttcatggactctgcagaacccttcaacattagcactcataccttggcttcgtagagaccatatatacacgatgagtctgactatagcatttggagtcaactgatgaagatatatttcaaatttcttcaatacttcaccaatcatttcgtataaggggaaccgaagtctagcatgaaagaagcttttgaaaactatcacttcatcattctttagttccgggactattttgtcacctgcgaacc

SEQ ID NO: 135128 - DNA, 531 bp, Zea Mays
tcagagttgtattttggtagatatcgcagtttgaatccgggtatgttgctgtaaaaaacagatttgcaggtgggcgaacagcagtagtactgacaatttctagggatttttcgtaggtaattggtgataatcagtatgataatcatgtagagctttgtcatatctttccaacgagtacttatgcgctcgattcggagttatattttggtagatatcgctgtttgaatccgggtaggttgcggtccaaaaacagattgcagggtttatcttgtggactgtgttgggctaattagattttggaatttaattataaattgtatacaaaactggtggggaattttatgtagatgcttccggagtttttgattgatatcactgctattataattttaaagttatgaaattatcaagcagcgccgctgcaatttggtggtgatggcgagagttgtcgctcgcgacgggttggaattgtgcgtaggtgcggcgttgtttattagcgtttgttatgtgaatttgtgcactaaggtgtgt

SEQ ID NO: 135129 - DNA, 794 bp, Zea Mays
tccaaattgactgacagatcaacgccaatggagttcattgggtatgagcgaggtacaaaaggctatagagtgtatgatccgatagccaagaaactccatatatcaagggatgtaatattgaagaagcaaaaacctggggactggattggtacagaacagccgggtccatcagcatctgtaattgatgtggagcattacagtattgcaggaccaggaacagcaactgaaagtgcagagaatgaaacagaagaaacaacagcagccgatgattcagatccacagtcacccactcacccaatcaaagtcaatggcagatagacactggttatagtgctggttcaaatcagaatacaccacaaggaagtccaactgagcaaggagtggtgtttgccacacccgcccacagatgcagcaagtggagagctgaggttcagaactctagaaagtgtatatgacgacactgatgaagtcactgattttcagatagcggtttgtgctatcttgctgcagaggagcctagaagtgtagatgaagcattagaagaaaagtgttggagggaagccatggtcactgaaatgaattcaattcaggataataagacttgggagcttgcactattaccacctggacaccgagctatagggcttaaatgggttttcaaagcaaaaagagaccctgatggaaagataaataagcacaaagctaggttggtcgctaaggggtatgctcagcgtgagggggtggattttgatgaagtatatgccccagtggcaaggattgagactataaggttg

SEQ ID NO: 135130 - DNA, 466 bp, Zea Mays
cgctccgcttggactatgcggcgggtgagctcttcttctccattcccatccctttctctgacgatgacattgagttggctgggcgctttggaatgtgcggctggtgagctctctctagcgtgcattaggtcttggcaggattctgtttttgacggctctctctccagcttgcatcagctctctgcagctcatttcagttttgacgactcctccagccaggagtagctgcctgggagcgagacggagcgctgccgggagtctccattgcttcaattggagtagctgcctgggaggagcacgagacgggggtacctgctactgcatagaactggtgaaacagaggtagtttgagctgcctggattttactgaactggagtagctgactggagtttactgaactggttgaaagttcccagtttgagctgccaaacagaggtagtttactgaactggtgaactcgacgcc

SEQ ID NO: 135131 - DNA, 388 bp, Zea Mays
cacatcagatggtgctcaaactaggacaactagtgcttctactatgacaatagatgaagattggattgatactttcgatgattatatgtcaaagcaaccaacagtgacatccacatacgtccggacagagttggatttgtacctagaagaaccattgttgcctaggacacaagagttggatataattcagtggtggcagcatgctgggctcaagtatccaactttgcgaaagattgcacgtgatgttcttgctattcctgtgtcaacagtggcatcagagtctgtctttagtactggagggaggattattagtccacatcgcagtaggcttgcaccatcgatgatagaagcacttatgtgtatgcaagcttggtctcgttccgacatg

SEQ ID NO: 135132 - DNA, 3410 bp, Zea Mays
caaaacgggaggtgagacgagctgaagacaagatccacctccccccactgcccaacgccgcagcgccatttttaatcggcgatccctcctcagctccaacccccagctgtttttaattcgaaaattttcgaaccaagccctcatctctctcgtcttccacctcctgccttccccaccccaccgcacagcgccctgtccggccccagccagagaccagactagacagctccgtttcccctccccgtcctgcatccatctcgaccgcgcaccaaacccgaaaacgcagccacattccctcctgcagccaccccccccccctccgctctcgcgcccctccgctgcgcgtcactccgagcggcggcggcggcggcggcgcccgcccccacagggcagtggcggcggcgaacgagggagggtttgttccccggaagagggagggaggctctggcgggagtgtgttacgggcttacggccgcctcgtgctggtgacaggcgcggcgcgagatccgggctggaagggctggcgggtcccgttggtggcgccgtggcgtcggcgtgatctgagatgagattggacccggctgcgcggtattcgctgcggaggtagacggccatgacgaccaacaccaagcgcgcctacaagctccgtatcctcgtcgcttcgtttgcgctatttcgcttcctttttttaattccttgtcggggttgctgcatagtggtttttgtatgaccgatccatcgctgctgccgcggtcgttcaaccagtagaggggaacatttgggtcagcaagtttgagaaggagctcccgactcttaattttctgtttctgttgagttgttaaataggtattttgtggttgcgagattcggcaggtcacatttagctgttggtgattatcgagtagtcgttactgatttgtcgtttattatcctagaagtgcgattgctggcattccggcatgtatgtgaaaatgtctgaagtggtacattgatgcaaataatatcagtcatcgagggagattgggctgttaaattcgcacacattggaatgccttgacttgcatttggtgtagaggagtttgtggcgcactcgtccaatgttaactgcctcaagattgggaggaagacctcgcgggttcttgtcacaggaggagaggaccataaggtcaatctttgggctattgggaagcccaattcaatactggtaagactgtttttctagttctgtttctacgtatggactgattgtaaactgcggctccacagttgggtaggaaaacaaaactcttaactcacttgaaaaactattggctgacctaagtggttacaagatgagaacttcaccttttcaaccgctaacagatttttatgtagcacagttctccttatgccagtattcaattaatagaaagatacttttaagttagttatatcaacctaccgcacagcaatgcgttttgaggatggttcgtttatatagttaaaataggtgtcatgaataatgtttcttaaggacggagtactttatttaatccactttaactttttggtggccgtacagagcttatcaggtcacacaagtgctgtggagtcggttggttttgattccacggaagtgtttgtggctgcaggagcagccagtggaacaataaagctatgggatttggaggaggcaaagagtatgcagatatgaatatttaacttactatatgtgtatatgtatgaatcgttcagtaattgcatctcttggctcattttctatgcagttgtccgcactcttactggacatagatcaaactgcatgtcagttgattttcatccgtttggggaattctttgcctctgggtcactggacactaatctgaagatatgggatataagaaggaagaattgcatccatacatacaaaggtcacacacgaggggtgaacactattagatttacacccgatgggcggtgggttgtgtctggtggcgaagataatatagtaaaggtaagaatttgccaataactctatgctgtgtgtgttcaattgctagttcttctgctggaatttgatttttcttttgccttaatatttctaatgaaaaaaatcctttttttcccgaacatattacaatatgtttttctttggcagctctgggatctgacagctggaaagttattacatgaattcaagtgtcatgagggtcagatccagtgcatagatttccacccccacgagttccttctggcaacaggttagattcagaatttacaatgcttatctgtttcttgactgttatcttttctttgtcccttttggttgtacaatgtagtatgtacttgtttatggtaaaatatcagacttctgtcttggtatttgcttgaagaaaaaactcttctattcgttgagctagtaaattaatttaagtatttaggtgctctctaaaaccaagcttggcatttgtccgttaagtggagaagctgtttaaatatgatttcctaactagacctgaaccaaactgtaatggctgttcctttgatgttttaagtggtaaagtgtaatggatcatactatcgctgtaattgttgtctgccccaccgcacctcataataactttttgattgtttaccaaaaaaattcctagtagtcatatcttggcatagttcagcttgctgtaagtaaatcactatacatgtattgtgtaaaattttcgttatgagatatcatgcttgttttcgttggtgacatctgtaagagatgcattgaaattttgtacgatacgttctatataaactttctttccatgtcatcaattaacacatttcattttttgttttgttgtgagacacattctctcctgtcaggcagtgaagaatgtattcatatgtttgtgtgggagctcagaagactgtattccttttgaaactatatctctcttatgtaaaacttgttgcttcattcaggttcagctgataaaactgtcaaattctgggatttggagacatttgaattgattggatctacaggacctgaggtacatcggtatttggagctgatagttcacaattgtttatttcctttgcatttgtaatcctcagaatttaagcattatttccttaataagtagcttgggtggggatcccatctctaatgttacatcgaaaaagaaatggaaaatgaacataaacttagatgtccctgtttgatgcttctttatacaacaaacagtcatatgctaatgttttgcagcataattcagttcaatttgggcacctatttaattcatttggatacctcttttgtttccatcatttaattcatttgaatcacttcttggaatcacttcttgtgtttccataaaaaatactagacaacaggtgtccgatccatgacattcaatcctgatggaagatctttgttatgt

SEQ ID NO: 135133 - DNA, 557 bp, Zea Mays
caaccaattgctcatcggagtgtccgccgttgcgaatccgtacccaaccgtgggcagccctcacggctaccccatcttcggtaaggcttgtcttcataagcttcgccctatcctcagcgcataggacatatctgcactcaaattggctcgccagagcgctatgtcggggtgctcgccagcgcggcttcgccgtgggtgcgggcgtcgccgggtatcctggtcgatggttgaagacgacccatgaactgtagatcgcgatatctgcggccaagattagaagatagggccaactcgactagaacctatctccactgttggatcctcggtcaacgtatgggatcagacccgtgtgtaccccttcgtgctcctaatctgaaccgtagatctaggatggacggttgagggcgatctgacgcttaatgaaattgggaccatggatcgggaatcctgcagtcatcgtagggtaccggtttggtaaacgaattgatctaatcctcacctgaatctctaatccaacggcctgggtcgctccatacccctttgctgatgcatctttg

SEQ ID NO: 135134 - DNA, 468 bp, Zea Mays
gttgaagggccaactacttcaaagaaaattcatcagcgaatcgccactgacaatgtcaagaaaccgtcagaagcagtgacacgctacctgcaaaaattgaagagagttatgacagatcaatcaaaagcggaatcagcatctcgtggagtacgcacacggtcccaaatagacaatttcgaagtatgggaagaagatggaatgattcatactcgagaatcattacgtcttaaaatcaatatcccgatatacaagaaggaggatgttcctcctaaatttgtgaatgggaggccgttcttgacgacggtgcaactttctaagttgttgacttcggagattagaatgcatgagttgtacatggtggccagcaacaaatacaaactcgaggacttcacatttgttgtgccagaagatgcattttggagcaaagataatataaatcctgtgctgcatttattctttgatgatctg

SEQ ID NO: 135135 - DNA, 472 bp, Zea Mays
cgggtgtcgtgtagaagttttcggattagagaatggcgcactggcgcgccctcggaccgcctctccagcgtggcgcgccgccgccgttgttctgttgggttgggggagatggacgctggtgctccgatttggggtgagcggctgagatgtagggggctaccctggccgttggatggggatttgacggcgcatattagaatcttgggcatcgttttgtatgagtggatatgattcgtccgatcccgatcctgcgcgtgcagatcgatctcactcgtataaaacctaaaccgttggatggcgatctgatggccaggatagggtaccggttcgggttgatttggatttagtctgggacatccgtttttaatctgacggaccagatcaacagatacccattcgcaagcaaattattcataagaacccccgagtttgactggattcaacccacagtccagtcctgagttagcctgag

SEQ ID NO: 135136 - DNA, 281 bp, Zea Mays
gtctaaaatggcgatctaagcaaggtgatacgaactcgaaactctagtggtaagaaaactttagaccagcaactcgacacaaatggagcaaccgtgaattcaacaagtcagaaactaagtagtaaagcaaaggctcaaaaaattttaggtgattttctgatctaaatatatctttgggcaaaagtggactgtaggtaaataaaacaaggaagacggagatctcttaccgagcaacctgaaactttgataccacttgataaacccaacaggtagatgggagc

SEQ ID NO: 135137 - DNA, 433 bp, Zea Mays
tgcccgagctcctgctcttttcagctgttactgtagtgttatgaatttacagagactgctgcaaagaatatctagtctggactctggaggagcatgttcacattaaatctgttttatgtttattaaaagcatgctgtcctgccagcaaaacactagttaaaactaatgtcagcaggtgcgcggagtggcttttgctttcaacaataaaaaagacgccttgatctgacagctcactacgtgttaaatctttaatcactcgatcacaaatcatgttccatttgcaagcaccaacaccaacacgcggcacggccgacgagtgaggccggtcgtagtagtctctttctcgttaataatactacacgcaaaccataaaaatggtttcttggatccctgcatctctgcgtccccggctctcgccgtcgccgccgttgac

SEQ ID NO: 135138 - DNA, 318 bp, Zea Mays
tcagccggcaatgcagatagaatagaatgatccttgtctggcaattcagcaatatgacacagttcaacaactgaatactgtcccttgggcgaatgcaatccaaataactgctttggtgaacctttataagtaatggtcagccatttgtctgcccaatgcacccacataggactaaactgttcaagccagtccatgccaacaatcaaatcgtaagtctgaaggggcaatatacgcaacgtcgactgaaactcacagccaccaagagaccaagaagcttgcaccaactcatgagtacactgaagtttagacccatttgcc

SEQ ID NO: 135139 - DNA, 398 bp, Zea Mays
cagtcgttggatcaacatttgagggctcagattatattcgggccacatcgaaccggcacgcgaatactgatcaagggatcacgatccaacgactcatattaacctatacgaaacaacgagctccatcaaatcctggccacccatcccacactctacggctcgcattacttcccaaacagtacgctacgacgctcaccggatcaaaggtcgatggctaccgagcttcttctccaaccagcgacaggccacgacggcgcagccctgcccacgacgcgtcctcaccggcgaggtacccgacaagcggacaagagtgcaaaacccccaatccgaaagcccctacacgatgaagagaggatggcgagcacaacggaagtggtcttaccggcggtggtgagtcc

SEQ ID NO: 135140 - DNA, 654 bp, Zea Mays
ctggtaactcttctgggaacacatccatgaattcttctaccactaatatgttctctgttgctagattaaacattatcggatcattggcgggtggctgagcctgacaagagactgactttccttggtggtctgtgagaaggactgtcttgcttgcgcaactgatgatacatttgtgtttggtcaaccaatccatccctaagatcacatcaatcccttgggatggaaagacggttaagtctgccaagaacactaccccacttaaaaggattctgacttggtagcatttgagctgacatagaaggtctggccctggggttcgggtgaccaagggaatctctagaggggtagagggaatgccatgcttttccacaaaactagtggctataaaagaatgggatgctcctgaatcgaaaagtacgatatcgggagtaaattcaacaaggaactcaccgagcactactcccggagcttgctgagcttcttgagcatcgacgtgattaactcgtgcccttccttgatactgggtcttgttctgctggctgatggaggagggtgccttgggggcggatgcggtggtattcttggggccattcactgagttggagtaagcaggtcctgatgtcttcagctggggacagttgttcttgtagtgac

SEQ ID NO: 135141 - DNA, 282 bp, Zea Mays
gatggagatgcaagcgtcagtgtgggagagagatggggaatggagccaggtgtgcgcgctgatgggcctaggagaagccaacgggtgacacggcccaacgtccggctctcgggccatgaatgggtgaaatgatttaggcccagatggtttagcagctagcagagagaagaatatacactgccgtggagaggaggaaaggattggactggaacttggaactggatccggctgcgtccggcgaaccgacggtgtgtcgtcgtgtaccctatccccatacctact

SEQ ID NO: 135142 - DNA, 1367 bp, Zea Mays
ggacaatcaacatgaggcatcatctcagaagacaacttataataagcatggaaaaggcatggattcttgtgttgaaggtattgctagaagtatatcctactgcaaaatagttcaagtaggcatgctagaagtatatcctacttcaaaattttggtttatgtcgtagagctgactcaacctcgactactataaatagggaacatgaccagagcaagtcaagtcccatgtttcaaacaaaataacactatagaaatattacagaaaaatcagataaaaattatatgtggtatgagattaattataaatcaattccctgcagataggcatgcttgttacatacttgtggttttgcatctggtacctgtcgtggatagtatagtatattaaaaacatggaacaactaatcatatattcatattcggaatcacctttttagaatgtcttggtcagcatagaatctactataacttttagaatcaatacaggaagtgcaaggagaatctactatgtttagtggttgataaccaacatattaacagccttgaacaaaattgcatttggtcaaggaattaacgccacttttgtctttggaattaacagccttttctcactgccttgtactgcatatcttccggttcttagtagctttcttgcaactctggacaaatatattactgaccattatcctcttgattctacttaggtggcacaaaaaccttctgtgtaaaaccttaatagttttatactttttatggaaagctttgacaattgtaaatgccagccatctatacactcaaactcaaataatcaagcatgcctatgtgcagggtgtcatggagactaatattttttaatgacacgagcttagttgtttcgaggctgtatatataaccaccatgttctttacacgcacatctaggctgttcccagccgagattagctaaagggatcagcactaagcttggggcttgggcacagttgtcgtcatgatttttctgccacatataagtatgtaacaagcatgcctatctgcagggaattgatttataattaatctcataccacatataatttttatctgatttttctgtaatatttctatagtgttatcttatttgaaacatgggacttgacttgctctggtcatgttccctatttatagtagtcgaggttgagtcagctctacgacataaagcaaaattggaaaggcaccaacgcatagctgagcgagcggtatactccaatgctattgctatgttgccttctacttgtttgtttacctagcctgtggcagtcctcatcattaccaattttcaggcgaaagcccttgctgaaaagaacatgcgggatattctggtgcagaggga

SEQ ID NO: 135143 - DNA, 612 bp, Zea Mays
gatgactctttaaagctcctaacgacgaacagtccagctactgacagaaagtgtcacgacccacattaaaatgaatcagtaaacgctctcgctaccctcggatccaacatcgacggatcacaagctttcgcgccgaatcgttacgatgaccgaatccccgccattcattcagaattgacggtcacaagaccacacacgatacgatctaatcgcaaccattgatcacgaaatgcgcggctcagggaccttcttcctccacccgagcccaggccggcggcgcagttagcccgcacggcggcgcaccaacggcgcgcaccccatttcaagcctccgatgcacgaattcctaagataatgagctctaaacgtagcggggacaatagagaacttgaagagggctacctactcagaatgataaagcgcagccgatcgaccacagccagaggcggatccgcggcggctccccaactccagcgagaaatccggttggcacagaaggtacccgcacccaacagcaccctaccacacgacccgcacgcaccagagaatcgcctaagtggtttgttgagggctaggcgacggcgtggacatggattgtctacggcggcgtttc

SEQ ID NO: 135144 - DNA, 363 bp, Zea Mays
gtcgccgtgactctttacagccgtcaaatcgtcgccggtgagctcgccacgactgaggacacgaacccactgcgccatgatccttccctgtttccggccgccaactctgcccggccaaattgagcgccaccgtcgaagccctttataaattgatggccggggcagctgcgctatgtcatcttgaagccatagcacccgctcccacccttaatcattcacccgagcccgtgaatttcgaacttcccccaaattcgatccctgccaccgtgaagatcagttcgccgcggccagctcgattcaggttagctcgagtccctctgctgcttgttctagcatccttaggtaccccgcaaaccccttgac

SEQ ID NO: 135145 - DNA, 591 bp, Zea Mays
tgaagatgatgctatgtcgacagccttcgggggtcaaggcaaaaagagactgaatagagtttttgacgtcatcgggtttgtatacccggattactgttatccttcgcgaaagcaaggaaagaaaaggaaaattgctgcttcggcgatttccagcacgccgaagccaaaaaaagctaaggttttaacacaccgccccaagcgtattgaaatggctgaaatggctgaagtgccactgccccaagcgtatctgagctaagtcgctctgatcctgctgaagctgggacaaaatcggtcggagagccagaactaaagacagcatcagagcaaccaaaggctttgagcccgttgcgagaaaccgagccgccaagggcatcaaagattcttgtagtaactccaagaaggaggagaatggccagcgtattagatgctgtgatggagtctgtgaaggtacaaactcccgctttagcgcctgacacaaagagtgaaaccttaaagaaatctgacgaagctggtgtggcacgggctacctctgaggctgaaccctcaactcccaccgaagcatgccctctaggggctattcctgtgctcgtg

SEQ ID NO: 135146 - DNA, 351 bp, Zea Mays
gaggactcctcctgcacctcttctatacagcagaccccctatgatggtatagtgggtcaaccgtcttgcgatgcgctctgccatggccttgtcatccggttcttccttgtttttatgtacttaataattggctccctccagtcgttgggatctgcttctgcttggtctaaggcgttgcactcctcaacctgctctacggtgacgctcaattgccatacctcttggacgaaaatcccaggaggaacctaggcctgactggtccccaattttgacaatgcatatgctgctgcattgtgatcccttttcatgtggtgaaattctaaaccctcgaatttgtcttccagcttccgc

SEQ ID NO: 135147 - DNA, 311 bp, Zea Mays
gttcctattaagcggaagagctcttgccacaacttactagtgaaaatggggtctcgatcagatatgatagcagcaggtagcccatgcaatctgtacacctctgacaaatacaccttagccactgttaaagctgtgaaaggatgtaatagaggtaggaaatgggcatacttcgagaacttgtctaccaccaccaaaatgcaattgcccttgctggaaggaggcagtccagaaatgaagtccatgctcacagtttgccaggcttgttctgggactggcaggggcagcagtaacccggggtatttgactctttc

SEQ ID NO: 135148 - DNA, 373 bp, Zea Mays
attgttttatgaggggacttaatgacaggcttcagcagaaaatggcaacgtgcttggatcttacctacagtagggctgtcagtacggcactggcagtagaagccaaaaatgcaggacatggtaaatcaaagggatttggaggtgaaaggtcaaatcaagggcctgagaagagaaccaggttggtgatccgaccttttaatcaaagtcgttcttcgtctcgcccaccttcctatcccttgaagcagcctgtttttattcgtcccactactgcccctgctcctaccaatcagccaagtgccctggtactcgtttccctgctctccctagttcttccactggttgcttcaactgtggaaagtccggacactttatc

SEQ ID NO: 135149 - DNA, 526 bp, Zea Mays
gcgcgctctacttcctcgacgtgtgcaaggactgggaggaggaggaaggcgacggccatggccaccgctgtacgagtgatgacgagaggagggcaacaacacaagggaaggatgcagagcagcaagtgtagagatggatgtgctaggcatttttaggctagaaacagatcgtgttctcgagatcggacctgtgcccagattgcaaatgcccactctactctggaagaaacagttttgagaacatcacctacagctacaggcagcagaataggttcactgatctaccaccaaacacaggtgcagtcatgtttcttcatgatgcccacaaaacatagggaccttgagggtccaattcgtgcagaaagagtttcctacgagagcttttggaatagaataaatgctttccaacaaatgcttttggaatttggattgagctactcctactacaactccagaggactctggaggaaacaaggcatgagacctctgtactgcccatgcggttcatcttctatttcaaattcta

SEQ ID NO: 135150 - DNA, 500 bp, Zea Mays
ctctgtcgtagtcactggactctatatgcaatcaatttccagcttcgttgcatagacattttagattcaaattcatatggtccagcccttggcggtactacctggaaagatatccacaatgatcaagtaatgataaatggaatgaaactcccatggttagcatggcgttacaagaagcttgaccagattcttgtatactaaaatttggcaacttcaaaattgcgcttcttcccaactgtccaaacatgcagccaggctccaatgattgtggcttttttgtcactagcttcatacgatgatacgactttgatgatggtgatgtatcagaaattgttgtaccggtacattactaaattgcttctttgttactgcataaaatcagtattaatacaatttctaaccattaatagaactattatgacaaatgcaggacgaaccaatggaccaacatgcgtttgttttacattacctaacctttcatggcaacaacagggtttacc

SEQ ID NO: 135151 - DNA, 354 bp, Zea Mays
gataaaaataatgtttttaaggtgtacaaaattttattacaaagttaatgcaatttgaacggagcaaaacagagttagaatgaattaaatatggcttaacaagttttgagcattatttttataccaaaatcaccttaaacattaatttcactaataattaaaggttaataggctgcggccactaataccagagagcacagggtgtttcttataaatttcgggactaaaccgtgatactcttcccacaatcccggacaacgggtttatttaaaaaagagcaggggctcttatgcaaatccacacagccaaaggggtatcaagcgactgcagccatccgatcaaccaacagcggcc

SEQ ID NO: 135152 - DNA, 523 bp, Zea Mays
cgaccatccggatcaccaggcgaaaatatcggtacctgacgcattctttccatagatagagaaactgaatttgaatttgaaatgcccttagaagacggatcaatatggatgtaattcttcctcaatgccggcgagcaattgcgactagaggctaccttccttgccgaagccatcacatggccgagagtaacgactgatggcttactttgctttggcaagggaccttcccagggattaaacgcatccgcaagatctaatgtacgtacctgagtttttgattttgacgctgagcccagacgacgcttctcttcgtccgccgaaaaccccatcctcatgtacgttcgccgcagatcatcgtgagctgcaagatcgtgagctgcaagagaacaaggagcacttacctcggacacagcatggcgccctgcaaccctgtgataaaaatcaacgcatcgctccgacagcaactgcctagcagcctgatcctcctcaagacggattgccgatcgcctaatccttgcaagcc

SEQ ID NO: 135153 - DNA, 339 bp, Zea Mays
aggtggagttcaacatatagaatgttggatacttgcattgactatagggctgcttttggttactatgctgaaaaagatcataactatatgtgggagccttcgcagtcacaatgggacatgtatgaaaagattagaccaatcttaggaacaatggctggagcaaccactgcattttcaggatcagtttatcccacagccaatgtcttctacccttatatagtgaaagtaaagattgcattaattggagcaaagaattctggtgatccatatctatggagtatggctgctaccatgttagaaaattttgataaatattgggagaagaggaacaatatcatg

SEQ ID NO: 135154 - DNA, 921 bp, Zea Mays
tcaccaacaatacaggggaggcaaacgggctcgagctatgctgtataactccttgctccaacatttcaataatctgcttttcgatctcatttttctattggggggtgtagcgatatggtctaagtctgaatggttgggctccagataacaatggtatcgtgtgatccacttctctgggaggaggcagcccagcaggtttgtcaaacaactcatggtattcttccaccaactgagccatttcaaaaggtatgttctggaactggcccttgtcttccacactcaactccaatatgtgttcccaggcctcttgtttaagaatccaatttaactgcaccttggatagttgatggcaggtgctcaactttggaaccaccccttgtaagcgtacaactctcgattcatattcaaactccagccacttaccaacccagtgtactttcatgggactgtgggcctctagccagtccattcccaaaatgatatcatacccacttaatggcagaaatttgaagtcagtatggaaagtgatccctccacacaaccactggcagccaggtacaaagtatttgctccaaagacatctcccatcagccacttttacttgaacaggttcgagtatgctctgaactccagtcacctttcccatcagatggtcactcataaaactcgttgaactgcccgagtctaccagaactagcagctgttggcgttgaattaacgcccaaagacgcacggttcgattaccctcacttccactgactgcattcaccgaaatggacaacactgcttccccatcactatcaatgccaccctcagtcacgaacttcgtttgttcctcttcttcgcctgtaactgttagagcccacatctcctcaactaggtgtagggtacggtgttagaacagcggtgtgcatgccccca

SEQ ID NO: 135155 - DNA, 553 bp, Zea Mays
aaaccacaagagacttcatcaatcattgggtcaacccagtttgaaacattaaaaacagcatccccaagagaaggcatataaaaatcagaaacagaaccatgcttgctgatagcagaagagtgtgctgcagccttctcctcaataaagtgcaccaagggctcggcaaaggagaccttcttgttagagagacgcttggggcgccacaccagcttggagttgggcatgaaagcacctcggccccaggcaagatgatgaacagcatgctggcgacgatattgtgcaggagtgcgagaccactccccctggcgatgagaggaggagtagcagtcgttgatcgaaccatggcaacgggacactcgatcccacacagagcgactacggtgacggcgacctccatggtcgtcctgctcatcgtcatcgtcgcctccctggcgccaagaacggttgccgcgctccaactggcgcccacgctcccgacgctcccccaggtggtcagggacgccataatgccactccatcacccgacgacgcttcctgccaggccccccaccac

SEQ ID NO: 135156 - DNA, 784 bp, Zea Mays
aaacccagaattgaacatgatccagtgcaagtttgggcatgatccccatagcaagattgcagttggttaattgggctataactttgatgcagtgggatgatggggttgttacatgaaatcaggagaaaatcgagctccaaattgctcggtcaggtcaactaaagataaatgccatggtacagtaactgaagaagatacctagttcatcccccttcgccgccgatgaccgtcgcaccgcgattcacgtcggtcgccatgattcatgcgctgtgacttgtggataacggtgaacgagtaaagatcttggcgcctggatcaacttgggtccggccgcggctaagttccccgtaccactagctcatcgaccgatcgggataaacctcgccgtcattggccgattaccaccgtgcgccacgtgctaaagtgttagaccacgtcactatgaattgcgtctcgcatgcacggtgatcgccggtgtactgccacggtgaaagccactaacccgagcaccagtgatctcccacccctccgaccgccgcgcgtctcaagcccaaattcatcggccaccgcttagcgatcctataaattgatggtcgggtctgttgtgccatgtaatcatgaagccaacgcaccagctattgcctcaaatcgttcaccagagaccgcgaatttcttacttcccccaatcctgtttctaccaccatagagacaccctcaccgcggccagcttattccaggttaattcaagctccccgatcgtttgttctagcatccttaagttctc

SEQ ID NO: 135157 - DNA, 439 bp, Zea Mays
gtgatgtggtatccatgcaagcttgctctatgttatttggtagaccatggcaatttgataaggacaccgtgcatcatggtaaaacaaagcaatactcttttatgcataatgagaagaagcttgttttgcaccctatgtcccccgatgctatcttgaaagatgaagttgctagagcatgcaaagagaaaaacaaatctgtttataataaaaatctagatgttacaaaggaattggtacaacctaagagtgataattataaatctgctcatgtaaggaaaaatgaaatacaactgaaaagtgcttgtttccttgcttccaaatctgatttacttgaattaaatgatgttgatgcaatctgctatgtgtttatatgcaaggatgctttgttctcacttcacaacataccatctactttgccttctactatcactaatctttt

SEQ ID NO: 135158 - DNA, 440 bp, Zea Mays
cctaatcatgtgaactcgggggagcctaaggtttgtctaattagatcgatgaacacaaaatcgatgaacacaaaatcacaccacattttatagtggatcatgctattgaagcgtaaaatcctacatccactgtaagttgtattgatcagggcttgggaaagctcaagtgtggacgaatctgagtgtgctcgagggtctcccagtgagtctgtcccttgtaacattatgtgtcctcccttttatagcccaaaagagacacatataaggaagctgagccccaacaggcaggtccaggaatatagtaataaaaaaacatactacatggaacaattgatgttgtcgacggactgagatcttctcttgatcgccatgcggatttcttgaccaacctctccgtagattttttttggtcgcgtgcggatttcttgactagactctcc

SEQ ID NO: 135159 - DNA, 497 bp, Zea Mays
aacgaaggcatgcagcctcatacaaattatagttacatacatacagcaagggcatcacacattacattggctcaaccttcgggatgatacccatctctctgtagttgaacaacattatcctcaattcctcaccctcaaaaagatttcgcagctccccctcacctacactcgccccagccggcgaggacaacaattcccgtttgccagtcccgtccacacgaagacgaccaccctccatctcaccacgatgatgcctaccacttcgcgacaactcactcactctccgtttcgccaccgcccttcaccgcctacgcccagcactcgcacccggaagaccctcagcacccatcacacgcggagaagtctctgtcgcagccacatccaatgctgcaaaataatccaagtcctcatccgaagactcctctgtccacacaatcgaactcccagaatcatcagactcaaaaaacttagacacagaatcatcagaatcgtcttca

SEQ ID NO: 135160 - DNA, 342 bp, Zea Mays
ataagtgaaggttgtagagggcgagcattagtggaaggagcttcattagtgctaggaggaggacctttggttgttagaggctcaagagtagaaggagaagcatcaacacttggttagtatggatacagaggatgagcatacaggtaaggaaacataggttaaggagttagtccacatggactagcaagaagtcctcgtcgatggtggatatgagaaagatagtcgaaaaagacttattctgcactcgtaagggtctcaggcgttgtgaagattgctcattgagcaagtctgtgaacattttgtagttgagactccatctcaaatctatattaaaacgaaggt

SEQ ID NO: 135161 - DNA, 306 bp, Zea Mays
ctttgacatcaccattttcctcctcaaaatcaaattattcactatcgttagagtcataaaataagtcagccatgatttatccagtaatcttttcaatcccggtcttctctgcggcatcatagtatgccaccagggcgagttcatcactccttccttctctagccatttcacaaagccatgaagattgcaaggagcgaagctttgtggaagaaagttttagaagtaaagcttcgtagtatgaacaaatgacaacagtaggttggcaaaagcaagtgaatgtcgtgtctaacacatgggactcggtcc

SEQ ID NO: 135162 - DNA, 683 bp, Zea Mays
tggatcacgccgatggagaagggagtgaatcgcgccgaggaggagaagggagtggatcgcggaccttccatccgcggcctcaggcagaaccgtgcgccagcaaaaaatgtggacgcctacactaagaccttatagagtagtaatagaatatatatatatatataatcaccttaagtgaaacttcacccgtccgtgttcgactgcatctgatcgtgcccgatgttgacccaacacactcgtgctcaccgatcggaccgcacggagccaatcgaatccgaccgcacagaccgcaccaaaacaccacccaactctccacctccctcccttttcggaacacacacgacttttcctgttttgaattttcctttaacgcacgccacaatcatcggttataatcgccgcgaagcggggggtgcaaatcagcgtgttttgctagggttttgagctgttcaagcaggggcattccgttgaagtggcagaatattgagtccagaagtgaagcagccgcgacggagggttttcactatctcattcccaggtagggttttcgctcatcggtaccaaatcgcttttgttttctgtagtttttttttctagcgcattgatgttccaatcagtaatgcgtcatgcgcacatgtgttttgaagtgaatcggattttgtagcactcacgttcagcacatc

SEQ ID NO: 135163 - DNA, 369 bp, Zea Mays
ccggagaggaaccaggatcggcacccttgggggctgggtcatcctcggcaccacccttgggggctagatcgtcctcagtgccaccctcgggggctggatcgtcctcagcaccacccttggaggaaaaagcgagaactagggttcggaattcaaggggatacatcagcagaagtatgggttggctcgataagtcgggcacaaagcgccagaccgtaacttggaaaagtggagatcccaagcatcactcggaaattacctctaaaatgccagcgagccgccaaatgcgtaaacaaaatgtgcaataatggattagcaaggaactgcactttcatttatagggggagatcattacaagcatcctgagtcggc

SEQ ID NO: 135164 - DNA, 956 bp, Zea Mays
ctaagacacagagttacagccgcattgatggcgggttgaatgtatgaaatcctagggtctcttttagaaagtgcacgcggcgaaggggtatcgtctattcctggccgtgcgatcggatatggacgacacagattaaatcgatcaacttcctaaaccggtatgcactgagcaccgctgatccccagatctggggccagattttatgaaacccaattaacccacaaccgccagattcaaaatctatggcccccgctgcccggtatccaacccccaatccacaccgttgattaaccccatcaacggccatgacgttcccttcttccctgagccagaccgagcggcggcgcacatgactacaccactaccgaaagtcaccggcgagcgaccgatccgaccctgggcgcaccataccccaatccggccacgcaacacaatggggaaacggacacgagtcgtttggtggggttcttaccattgagggttgcgtagagatccccgcccacggagatgtgccgtcctccgcggtcatcgttgctccggtgagcaattggccgcgccgtgcttgactcccggccctggttagcccgtgtacatctttgttaggtcccatcgaacctcacagagcagtcatcgaggctaggacgtcatcctgagcgcagttcgacggcagcgacagcctgcatcttcacgactgcaagacaatggtggctcgggcgcggtgcgattcgagggagctagggagacgacccgagctttatacccaggtatgaggcataccggccgagcgacaatctcggaatgcggacttggtcttggcagatgcaacggcgcagggcgatcccggcagacatggctttgactacgacaacaggggaagagggcggatctgaccgcgaggccccacctggcggtgtcctgtagctcgcgcatggagccagcgaaaggggaaagcagca

SEQ ID NO: 135165 - DNA, 496 bp, Zea Mays
cgccctctttcccttcctactcggccacaccttccacccccgtcgcaaccatcatgcacgctatcattgccgtcgtccactggagggggaaggtccccgccatcgacgctatcatctgatggatgcgcgatctacatcatcttcccactcattgggtctccaatcagagtcgtggtgaatgtggacggcagaggctggaagagggtgtctgcttctcctcgtggcatcatctgtagagctagaggtgaaggcatcatcgatctgctcgatggtgcacacgaggtggatgcggtagcgttgccatgggggaaggagacacacaatgacagcaaggcaaaggcaaaacagagggaatgcgaaggtagaaccctcttaatgtaagtagaggtttactcttttctctgattcgatgcttaatctaattagagagtctagccaatcgcatgtcgacatgtcctccattggcctgcatctagcaaagacatcaacaaactat

SEQ ID NO: 135166 - DNA, 522 bp, Zea Mays
gttggtctgcaagaattgtctctggcaaattttgatcagactctcgaagatatggtccctgaggatctgctgtccgagccgatagatggtggaatgatggaagtttgcgctgatatgcctgatgttgggttagagttatcccgagcagcgtctcgtgcctcatcgacctaggagcgcggtcttaagagtcaagaggctgatctagattgctccgtccccatagaagtggttgaaaatccttcagccttagaggtggctgctacagagaacccggtccctgaggatggcgctagcgtttacccagcccccaagggtgttgtcggtgatgatcaggctcgggtgggcagtgcgagctatgacccagcccccgagggtgtccgagcgggttccccttctcatacttccatggatgtccatgtcgggtcttctcctccacattctggttgcgtggctgcagcacaagcttcgggtcaggaagtcgccttagaggccggcgcacctggtgctagagttttgatttct

SEQ ID NO: 135167 - DNA, 514 bp, Zea Mays
gcggaggcggaggaggaaccccaaaatcatcatcatcatcatcatcatcaactgctgcatcctgagcttcgaactgttgaagagcagcatcctcggcctgagagtcaaaaactggagcagaagctggcacaggagcctcaggcgcaggacggtaggacccaaagacaaggcgtaaggcctcaagtgtgccctgaaactggggaggctgaatcagctacgcaaaaatgtggcacaagtagtgagcatacggcagttggcgtcgagcacgcagaccatccaagacagtgtcctcgatctcacaaatgaggaaatccacgatgtcaaactcagagtgagagaccagggcaccaaggagccagagctgaatatgtgtggtagcctccctatatcccatcctcggtagaagagtccgtctgataagctcaaataagtacttggctgctgtagtgaaatctgccggtgaacgtcgcgacccatctgagaagggcgggcggaacagagccgcgacatgagc

SEQ ID NO: 135168 - DNA, 655 bp, Zea Mays
aattaacaaaggtcgaaccattcatacccattcgatcctgatcggacggatcaccgatcgtctagacgaaacggtccccgacttcaatcgtggccgcccacgaggagatcaacggccgaggcttcgtcttccacaacccacctcagccacagaggcggagtagccaccccggtggtgcgcccaccggcaacatggacgatcgaccccaattgctcaaacccaagcgctaattggtgcaaacggaagagatgaagatgccgaaccaaatggagaccttcctaccagaaatagtggtgacagccatgctgcccacgacacggtgtggattggtgagtgccatcgtgcaattgtcggcgtcccgaccacggcccacgcctgacgaggccacatatatgtgaggagggatccttcgctgccccagtaccacctgtcgagactgaaacagatgccggtgggcgcactggcggacttctcatgcacaccatgcatgcgacaacccccgatgatctcgccatggactttctcggctcagtccccttccaccacgtacgagcacgcgctgatggttcgacacaagggccccgcgtgtgggatcttcaaatgtaagccgcaacaaactcgaccgcaacaattgtgagcttcgaaacaaactccg

SEQ ID NO: 135169 - DNA, 462 bp, Zea Mays
gctgcatccacctgtcctgcgttgttgatcttgacgacgcgttcttcattcttgctttctagtgccaattagtacctgcggttatatgtgaattttgagcattttttgttgattagtttacttcttgactacgagcggtatcagaaactatcttcagaagttatatccatgaattattagagctcaaatatgatgttgggatcagaagactgcccccgttgtacctatgcgttgattattgagttgagtacacaataatgattgttaaacaacaggaatcgctgtcttgattttgctatggttcgtacttgtgcaattttgttcacatcctttcctcgcgtaggtgatgggcagtgggtatgagcagcatgcgtcattatttaccacttcgacctgtatgttcaatatttaagattaaataaaatctttggcaggaacctgtgcgaataatgtgatggaatg

SEQ ID NO: 135170 - DNA, 350 bp, Zea Mays
gaagacttccttctgttaatgcctgatgaagatgctgcttctaaggttttcaatgatgggaaggcactgcgggggcctcgtttcaccttgctattcaaaaaatggtcgagatttgctcatgcttctgcctcttctttggtcaatttagtggatattgaaattagaggcatcccagagcatgcatggtctcgttctacgacggagcatattctgagaaactcatgttggataacagatgttcatcacaattcagggtgtgggagagattctgcatccttttgggtgcgtgcttggtgtttaaacacggaaagggtgtgcagaaaattggatttgcatatccttgagcctgg

SEQ ID NO: 135171 - DNA, 741 bp, Zea Mays
gcttgtggcgtctgttcgcggtattggaggaatctccagagttttggtaattgcttgatagtgagctcctccgctgtttcgtcatggtgtgccatgggtggggtcctccgcgctgcacccttcggtaaggacctcccttctgtgcattagcgttgactctagctttgcgtggatttatcgatggggcagggtagggcgtgtgcttgtggtcttggcaccgtgggcgagtttccggcgattgcctgtgccgtggttgcgtctgccggttcggcgcgcgattggtccctggtctgggcggcgcaaggaagaagaacatgcccttgccgtcggatcgagatggatggtcgagattgaaacagccataccctttcgcttcaagaaaccgtgttcgtggatgacgaaatcgacggtgtagattaggtctggatttaccccttcgcgcgatctgatctggaccttcagaatctgatcgggcggctcacgagtagccatacccctttgggcaagatattttgctaaagagtccctagtgttttgtggaatcaacccgccgtccgctatagatctaagaacattacatatgggccctgttttttaacagtttaaaccctatctgtccagcgatttgtgcccaaggtcctcaggtcgccagtaaactagaagttaattcgaaaatagttttcagtagacaaataaatccaaacaaatttgtataatccataactttctcattttaagtct

SEQ ID NO: 135172 - DNA, 685 bp, Zea Mays
gtgttttccacggtgaagacatcaagcattccataaagaactgtccgattacaaaagaggccaaagagtgcatggctcgaccgaccccaaacaacaaccccagagccatagctttaacctaccagccacaataccccctctactaccaaaacatgcaacaacactatccccagcaaaaccaaaattacaaccaagaaatattccaccacccaaaccaagaaaaactacaactacagcctccaccacctcctccaaaaaatatcctcccaatccaccaaattcagccacagtaacccaaactagaagaagatttcccccaaccgcctgtccagggggtcatccacatgatctatggaaggtccagtcaagactttgactcaaaatggcaaaatagggattactaccgctaggtcaatcaacttgcagtcactggacccgtggtcccacgtccccctaactttcgatgctcgggacgtagacctccaaagtgctccgcacaccgatgtgatggtcatcacatgtagtataactagatgggaactccacaaggtcctcgtggacaatggcaaccagaccgacataatcttccagcacgcattcgaccagatggcaccaatcacaaactcctccagccaacagacaactctctctacgactttgttggaaaaggcacatttcccctcgg

SEQ ID NO: 135173 - DNA, 360 bp, Zea Mays
gtttttgaaaccccatattcgagatcttcattgtacatctacaactttcacttcaattgagttgttatttcgagttattactagtgttattcaatttacgcgcatgtattaaccttcttggcgaggtcaaccggattgtgacacagttggcaaccaaaggatatgtggtgctaaggttgtagggttcgggtcgttgtgctgctctctaataaatcaattgttattatgaaccaaacagaagattaggactccaactcccatcaagaagtgccaactaaagggccctaggccttaggtgtagtgattaatggcaacataatattattatgactaatgtgtattttgtagaggcatttaact

SEQ ID NO: 135174 - DNA, 436 bp, Zea Mays
ctcactctcttgctctcgtctttcttccacccgacaccgacctccatgaccgccgcgagctgagctcgtgctcgcatcgtctctcttttccccattgtccaaaacaagccccgcaaccgcttcaccatctcatgtgcccgtcttggcacctccttcccgagccgaaggatgaccggagcaccaccgtcgacgccgccgttccttggtctccaccggcgtgcgtggaccgaacatctccatccgcgaatcaccaagccaagaccaccgtcgagtttgccttcgtcaaacgcacatgtctgccactcgcctagccatcttcaccgccggtaagccgtcacccgagtcgcgctcatgtttctccctctctctgttctgaggtagaagacagatctcacgcacgattaagccaaagccgaggggtttctgtgtaaaatgt

SEQ ID NO: 135175 - DNA, 540 bp, Zea Mays
tggccagctagaagagtaactcttgtcaaggtagtcctcacagttattctcatatatcaccttattgtccttcagtgccccaaatgggttcttaaagcgatagacaaaatcagaagaggcttcttatagaagggacgcaaggacatccaaggtggtcactgcttggtgggatggcaaaaggtatgcaaacctctgcaccagggagggttaggaatacataatttggatatgatgagtcgatctttgaatttaaggtggttttggatatagaaaacccaacctgattgaccttggggtaagctagatcttcctattcacccatatgttgctgctttatttgccatatccatctattctttggatggtaatggggcatgcactttgttttggaaaggttgatttataaatgggaaatatatttcaaagatggcccctaatctagtagcttcagttgttaaaagagctagcaaaattcgtacggttcaggaggctgtggaggagggccattggattactgatattaagggtgagatctctcca

SEQ ID NO: 135176 - DNA, 515 bp, Zea Mays
atatgatataaaagagatagccacagtagtgtaatatcctacgtcctcttggttgttgattgtattgatcgaaaggggaaatggctaagtgttgttgtgtaagttgcatattcgtttcaatgtgtccccttagaagggtgcccctttccttgttatagtccaagggagaggggattacagatcgtgtggggtcggcctagcagctaacccttactattgttactattgaaggtgtaatagtccatcatggtcctatgtcagcatcgcatgtatgtcgtgggtgactaaagtcatcgtacaccatggatagaggaagtcatcaccagacatagcagtcctcatccacgtgtgtgccataatggcgcactattgtcacgcctacgatgttcggggatgataactgtcatggcatgggttgcgggcatggccgtgcctatccatcaaacatacactactgccatctaactccaccaacaccatttcatgttccatcaagccgtccgcgtcgagcgaag

SEQ ID NO: 135177 - DNA, 315 bp, Zea Mays
cttactttctttgtcgagggatgatttctttgtgaccccttatggactcaggcaagcgtccagcagaagagcgcccccagcactgcatcctctccagcaaaagatgattgacttggggtatgggttctttttcctttgcttcctgattctaaaggttgtgcttgcctcaccttcttccgtgtgcaaccaagtgatctcgatgggtcaaagaacagacttcgggctgcctttctatcaaggcgagatcttgatcccctcattgtagacctccttggatcttcgagagagcttggtcgctacccatatggagctcga

SEQ ID NO: 135178 - DNA, 284 bp, Zea Mays
ctggtattgaagtagtaattttctgccaataaatgaattgctgatcttgaggcattgcggtggctatcttgacagtgtcaactcagagatacggcaaaatcagtggggacacgagcgctttcaagctaggtcagtcaagttcgactgctaagctctcgaagacggctgctatttatggagtataaaccgtgactctcttgtgggcatgaccatactgctttaattcttgtccatgtgaccacaacagtgaccccatgtgttgtcaacgtttttgggctttcccc

SEQ ID NO: 135179 - DNA, 899 bp, Zea Mays
ggaattcggcccaactttcctttggcaccgcgcggcccacgtcgctccgctcaccgcgcgcgcgccctggggtttccctgccactgaccggtgggtcccacgtgcagcctcaccgtttcacgccgcgcactcatttgtttcactgtcacgcgggccggcttgtcagccgcttcgtcactttcacaacgactccgcgaagactgcggcgtggtgtacgcggctgctccgccgcgaagctcgcgggtggttgacccgaccgccgcctcgggctgggtacaaatgaggtcgcgcacctttcctccttcccctcctcattcgcttgcgccgacagctcctaccctaacgctatagtccaccgtcgagaacacagagagaggagtggaggtcttgggcaccgccgacgttgtctacggccatcaccgtcgttcagtactcgtgtagggattctggggaagcttcgtgccgtgtgggacctgggcagtcccctctcgtttgggaattcggccgggagcggggggaatttctctccgtcgctcacggttcgccgccgaccgcaccacaacgtggctgggaacctccgcactataatcaccggtaagggtcttctagatcttctcacatactttggtagaccgtgtaggatcgatcggagttaggatcggggctcttgggtgtccgctcggccaactccggccatggcgctccgccgtgggggccctggtcttctctccggccgtggtctgtgggtgggaggcgttgtatccaccgtcacctgatggatgtgcggctcagattggaaactagttaccggttcggacgcattcacctgagtccgtcgattagaaatccgatggtagggatcggatctgggtactgtaaaccctggccgttgatcgtgg

SEQ ID NO: 135180 - DNA, 507 bp, Zea Mays
gctctggcgcacacacacacacgtgtgatatatatttattaggactacatcaaatcaaatgcaagcacggttcgcggggcctcgcgcgcgaatatgcaaacgaattccattatgaggtcgcgggtcctttcttgtacaccccatgattcagtgcttgtttcggcggttagttcctggcccctccagtaattgggaacatccttatatagtctttgtggcaatggcgcacactaaggccatggttacatctatgattctaaccgggaacccattggcacagcaatgcctttgcgaggaatcatgatctaggtttttctttctttttggtgagcgttcaactaatatattctggtaaaaagaaattctagagagaactaatacacacaaaaaatacatttctttcacaccaataagtgagcctaatgattgtagccgtcgtctccagaatcgtcgactaaaaaagcaccagacatttatgtttgaatctaaccagaaaacgaactggca

SEQ ID NO: 135181 - DNA, 500 bp, Zea Mays
aaggcattacaacataacagtaaagcccatccatagttacaaaagcggtatgcttcctatcttgcctagacatctggatctgatggaaaccagaataagcatctaggaaggacaggaggtcgcacctagaggtagaatccacgatttaatctattcgtggaagtggatatgggtccttgggacaagccttattgaggttggtgtagtcgatgcacatccgaagcttcccgttagccttgggaacaatgactggattggccagccatactgggtgatggacctcttcgatgaagccagtgcgcagcagcttccggacctcctcacggatgaaatcctgccgctcaatggactgtctccaaggcttctgactcaccggtttggcgtcagggtggatcttcagatggtgctcgatcacctccctggggatcccaggcatctgcgacggttcccatgcgaatacgtcggcatttgcctggaggaaggcgacgagcgcgatttcc

SEQ ID NO: 135182 - DNA, 420 bp, Zea Mays
atatgaacaggcagggatgaccagggccgacctggctcagttgtttgcagccaagcccaacgcattttaggagcccaactcagttcagtgatgctcactttgaaagtttctggactaagattgctgatttcttagatgtggtggctgattcttggatgcagccagttcagacctcctgccctctaaagcgtgtatccttgaagcttcgaagattggccaggtccttgtagtcctgggggcacaagaatgcaggcaatgtgaagtcccaattggctttagcaaaggaaatccttcacagactcgaaatggctcaggatagcaggctgctgtcttctgaggaactatggctcatgaggaggcataagcaacattgtttggccctcgcttctttagataggacagtggctcgtctcagatccc

SEQ ID NO: 135183 - DNA, 432 bp, Zea Mays
aaaaaataaataaaaaaatgaaatcgtcctctagatcgaagggcacacacgagatctcgggcttgaaaacattcccatcacggggcgaggaacaagattcttatatatcaccacagcatctcgtttcttttatcagccatgcctctagctagcttttcactttgaagatgcaggaataatttccttttctccatggctgtttgcttgcttagttacgagaaaagaagggggaaaaaagacctacctttcgccaaaaatgttctcgggacgtttacaatcatcggactgcgctccccggtccagcgcattgagtttcatcatgatatgggaccaaggaaacagagcgttagagcagtcccaacccatgaagcccataagtagagtctatgctatcacatcatcaagaaatgagttgtagaaactacatcttcc

SEQ ID NO: 135184 - DNA, 320 bp, Zea Mays
cgttgagccaacagtgcgccaactctgtgcagccaatgactagttctgacacaccggacagtcctgtcagccaacggtgcgccaactatgtgccaacagtgcgccaacagtgagccaacggtgcgccaacagtgcgccaatgctgtgcagccaacgactagttctgacacaccggacagttcggtgcaccaacagtgtgccaaaggtaagccaactgtgtgtcaccggtgagccaactgtgtgccaacggtgtgccagctgacagcccatcttctaggtcttctgtattttgttcttgggctcctttggtcttgagtctt

SEQ ID NO: 135185 - DNA, 459 bp, Zea Mays
ccgggtagcgcccgcagtcagtcagggttggtcgtctaggttggaagaggaggggcgaggtggtcacacacctcactcgcgatggcacggagctcttaaagttcgacattgtgctcctgcaacgaggcttgtacttggacctgtgccacaatagcgtcgtcgcaagtgatttaaagcttgtgtgcttcatcctccactgccttccacacctcctcggttgccttcatagcgtcatgggcctcagaaaacttcttttgaagatctgagaaggaggaatcatgaagcgatcatgtataaagacagaacccagaagaaacacctaagacgaagaagacccacctccggccacctcacgctctcaccgacggtccgagttatcctcctccaggcggtcagtccccgctaggtcgactcggcttcttcagctcgcgatgtcaccttgcgcaaatcttgctgaag

SEQ ID NO: 135186 - DNA, 460 bp, Zea Mays
tgatccatcccgcgctagatctttttacccatccccggtgttatccattcctccctgagcacgaatcggaacggcggtggcacgaatcgcggcggataggtcatcggcggcgaggaccctgcgctggcggtctgatccttatcggactactgtaccatgggatatgttcatcagtgtgcctgacagtcacagtttaggaccaaatctctctaaagtttctctagtaactcactccactctctgtagcaaagtttcaaagctacaaaccagctacaatttgactatagggattgaactcatttgagcactggatccaaatcaaaatcgagctcaaagttcacctcataacactgtaactctgaaattcaacttcaagcagtctgacagcccatctttgattgggtttttctccagatttcacataagaccatggcttgaatccttaaacaaagttgttccc

SEQ ID NO: 135187 - DNA, 471 bp, Zea Mays
atggatgacattggatcaagcagcgaatccataacatccaaagttgttgtgatactgctctttcccggtggctttcgtctcgtacacaagttcatgcatgctgcagaaacttttagcactaggttccaacccttggctcctcacagcccagacaaacaaacccatcttgattatagcttcaggcataagttgatgaagaaaaatttgaaatgtcttcagcacttcaaccaagaacctgcttaatggaaaccgaagccctgctttcaaaaaagcttcggtagataaccacttcatttgcttcaggagcaggagcaatgttgtcccctccaaccctcacaatagtcatatcacggaagtatcttcctctcatagcatcaacatgactctatttaatagacgatttcccgaaaatggtatggctgggccgccagggcctatcttcagaatcctcgtctccgctttccgcatcat

SEQ ID NO: 135188 - DNA, 563 bp, Zea Mays
ccacccctcatgttgagcatattcttttgctactaacctagccttgtgcttgatcacactgccttttggatctttcttcacattgaagacctacttgaggcttacaacacagcgaatcgactccattttagctaccattgcctccctctagcactattctcgcaaggcatcctccacactcttaggttcttctgctgctagataacgcaacccactatactcaaaattttttacctcttcagtagtgtcatgaatgttttctaatgttctaaatctcattggcacaccatcagaattcactaattctctagttggtggtgttgcaaactcgatttcctgtatagtagggcttcctagaggtgttgattgagctggtgttacacctgaatcggtgccaactaaccactgaccaagggaaggtgatcctagattaggagaaaatgattcagctgaatcttcaaatactgcacctgaattcccactatcagttactgttccctatcctgcaatagtgtaaaactccacttcaaacacatgagcaatatatttatcagggatctcat

SEQ ID NO: 135189 - DNA, 383 bp, Zea Mays
ccattccaaccaaacatcaaaccagatcttgacctacttaatgtagtctatcctactcacagctatcttagccatatgtccctaactcggatggtaacaccaagaccgaagaaggaagacatcaaacgccgacaaggaaggatatgagtagaaccagatcttcagataaatcaagattcaccatccgggctggagtctttctttgcctggtctttcttgccacaacctatctttgctttaaccatatctcatcttggacctaaaagatacccatgctttcttaaaagcacctgataattagtacttaaaaaaacctcttcgatttttgaaactaattaagaaacaaaaagggtaaaccgcaaacaaaacctgttgcatccctt

SEQ ID NO: 135190 - DNA, 479 bp, Zea Mays
aacaagcacagcatagagaagcttatgcgtttcaaggtacctggtctttgcctcgtggaggacctcgctggtgtagtagaccagcttttgaacagtccggacccctgtagccggtcctgagccctcaggttcctagtcttcttgtgccgtcctctcgacgaccagcaccatgctcaccgcttcggcagcaaccgcgatgtataaatacagcggctccctaggccccgaggctaccagtattggtagggacaccaggtgttgcttcaactctttgaaggcttgttctgcctctttggtccaagagaatggaccggacttctgcaacaacttgaagaagggcagcgccctctcagccagcctcgaaatgaagcgactaagggtggctaatgaccctgcaagcttctggacgtcctcgatatgggtcggaggccgcattgcttcaatcgccttgattttctccgagtttgcctcaatgccct

SEQ ID NO: 135191 - DNA, 703 bp, Zea Mays
ggcaaacgttcgatttgcctagtgtttttctttgcctagtggcggacactcggcaaacgactgatttgcctagtgtcttgatttgccgagcgtaacactcggcaaagaagatctttgtctagtgcccgtgaattcacactcggcaaaatatttagcgctaggcaaagtttatctctcccgtagtgattgtaggtgttagactaagattattattaaatatgcatactgaagtggctattcctgctcgatccctagagtatgacttttgttccgaatgagaagtgcaaggacgctaagttgaccttgatggtgatcgaggatgcgcatgtagcttgtagcctagacacaggtcaaagttgcgattagcctgcgacgacgccgaggaggcgaggactgtgtaaactgtcgagcatggcaggacacagctagcccccgcactgcattcatccgtcaaggtccgtagggccaggcctcgatggcaggacacagcttgttgctcgcttttttttcgcgaaacgtgaaaaaaaaacagtagcatgcagaatgtgtgcacgctttattttacgcgacagggaattcctgcctctaggtacgcttcgtataggatccagcagccttgtttgtagctatagctggagtactatactactatctttcctagcgctgtagcgcatgcatatagcgcagcgtgccagtgtctcgg

SEQ ID NO: 135192 - DNA, 595 bp, Zea Mays
ggagtaggcaccagcccaccgactggtgttagtgtgttacgggcttacggccgtgttcatcttgctgctcgcctgctctccccgttccgtcctgcgaggaggagatccgcattccggagggaaacggcgaagggtctcactcgatttatactcgtgccgtactgctgctgctatcttctctatccccattactcgtgcaatggcgaggaggccgtagtgctaagtggagcagcggcaggcagcgcagcgcaggccaacgcggaattgctcgctgctgcggtccagtggcgtggcggcacgcgtgtcgcgttccatgcggcactagcgcggcccctgagatccatccgcagcagcaggcatgtcgcgcgcgttgtacaggggcgtgtcggggatcggcggcaagctggcggcggcggacgaggcgtacgcgtactacgaccccaaggagcccagcgagaacagcattggcggcggcttcggccggggcggcgcgcggaagcggcacctcgcggacgcggcggtgaaggtcggggtcctgctgctggtggcggccgcgctcgtgggctcggtcgcgtgggcggggacgctctacgcg

SEQ ID NO: 135193 - DNA, 356 bp, Zea Mays
aaattttagatgaagcacatcttagccgatattctattcatcccggaagcactaagatgtatcatgatttaaagcaacattattggtggataaagatgaagatcgaaattgcaggctatgtggcaaagcgtgacacctgtagacgtgtcaaagccatacacatgaaaacttctggtccattgcaatccttgcccatcccgacttggaaatgggaggacattagcaaggacttcattgtgggattacccaggacagcaaagggttttgactccatttgggttataattgatcggcttacgaaaatagctcattttctgcgagtcaagacgtactacccggtcatcacttatgcccag

SEQ ID NO: 135194 - DNA, 486 bp, Zea Mays
gagatacgccaggagagaagggcgcaacaacagctgcaacatcaatttcaacaacaatagcaacagcagcaacagcagcaagtaccattgcctccaccaccaccaccagttccacctcgtgataagcaccaggaatttatgagccataagccaccgaccttcgccaactcgctagatccactagatgcagatgattggttgaagtcagttgagaagatgctcaacatcgcccaatgttctgaccgggagaaagttctttatgcttctggtcgtctgacaggtcctgctgctgattggtgggattcatatactactgcccatgatgccgctgacactattacttgggcgaaattcagtacacagttcagaaactatcacattccagctggattgatgaagatcaagaagaaggagtttctgtcattgaagcaaggcaacatgtctgtcagcgagtacagagataaattcattcaactgtcgagatat

SEQ ID NO: 135195 - DNA, 596 bp, Zea Mays
ttaaacgcaagcggtggttcccattcggccctccccggtaaaccaacaaattccaccgtaaccaacaaattccgccctagatctcactctctgctacagttgaccctggatatccgcgatccaaattccaagatgcagatgcagcagaacgaaattcagcatttctatgtccacggttcaaggtcttcactcttcagttacttcacgatttttgcaagctcgttccagttgaagccgatgctatggacacgacggtttttatgtgtgacgaagccggggggctcggatttgttcctgagtcgtccttactgaccgtcgctaccgaaccatttttgccgtcagaaggaggcggcggcgtcgatttgccgtcgacactccgggcgacgaagcggcctggcgagtgctttgctgaaacacctgaaagaaccgaatcacaacgccatctttgaacggacaataacagctagctaaagcacaccgtgcatgcctgaaacaaagaactgttcacgtaatcaaatttgctccactcggtaagaaaatttagcaaagaggaaccgatgcaactcacctacaggcgcggtgctcgcccggcgccg

SEQ ID NO: 135196 - DNA, 400 bp, Zea Mays
atcatcagatatataaagaatgaagaggaaccgaatgataaagtcacagcagaacgcattgcaaggcagtcaacccactacaccctcattgggggcgcactgtacagaaggggagcaacaggagtcctcatgaagtgcattccctcggttactgggaagcaactgctagatgagatccacgccggatagtgcgggatacacccagcatctaggactctggttgggaaggtcttcaggtctggtttctactggccgacaacaaagagtgacgcagccgagttagtccagaggtgtgaagcttgccaattcttatcaaagcagcaacatttaccagcacagcaactgcagaccatacccataacatggccatttgcgtgctggggactggacatgattggac

SEQ ID NO: 135197 - DNA, 418 bp, Zea Mays
agcataaaagattaaaagatgacatgaagaaaatagacgaggaggtccaacgacaaaaagatcaggtgctcaaggtggcgaataaatggttcctctcgcacttcagggtggattgccaccagaagaccatccaagaaagggaaatagacgccaattacatgtcatccgtgctgcaacagctccccacaataggtgatgccaggtcagtcgatgatattccatctattagaatttcttttgataatcggattaaaagtatcacagaggatatagaaaggatggcgcatgcattaggaaaaactcacatgcctagttttttatcacataaattaggcgccaaaacaattgcgccaaacacatcggcaacaaatgggtttccccagccatactctggtatgccgatggactcatatccagg

SEQ ID NO: 135198 - DNA, 361 bp, Zea Mays
tgaaaataaacacacacggaatgcttcggtatcgaccaattctcctaattgtgctaagaactggtctatgtgctcacgcgtgctctttccttggtcacccgaaaactttgcgaattcgggtattctggtcccctgtgggtatgggagacggtcaaactggctattattatgtctccgatatgaatgccctacggggactatactaactccgagcttatctcggaacgccccagctatttcctctcttactacatcgatggcagccggtgggagaccaccggctctttggtccaatatgggtgagtttgtttggatgttggtatgttgttttcctccccattggtttgggttttgcggcgcg

SEQ ID NO: 135199 - DNA, 356 bp, Zea Mays
ggcctggttaccattgatccctaagcgaatggcttggattacattatcgcataatgattcggagtggcaaatcttgaccctagatcagtaaatggacggttgggaattggttaagagattttaaaatcatggtcgtcaatctggtcgtgcacggtggggattcggtcatcgtcgcggttcggcagggaggattgtgattcgtcgatgttgggtccgaaggtagatagagcttaccgagtcaggatttatgagggtcgtggatcttagatccaacggatagcaggttgtgctgattcatttttggtcaggatttaatctgggccaccgattactgatacagcggtggcggtcgtctg

SEQ ID NO: 135200 - DNA, 618 bp, Zea Mays
ttaggacgacggacaggaggaacatatcgttgctgatttttttaatagatctcctctttatactgtgtttatactgggtgtaccggttcaatcgtatagtcatttaaaatactattttgcactatagactattgtatatagtcacggtggcggagctccgtaaaaataacgtcccggatcactctacaaatataacgatgtactactcgtcttttaatttttcgcattttaggggtagaaacatttaaaacaattcagtggaactgtgagagatagaaaaaggggattggatattcgggaacaattactcgcaatagaggagaatcatgggtacatgacatcagacagtcaacactcagcacacagcgctcgtcgctcaggtggtcgctacccattggccagggaggcgctccgccctctcctatgaataagaaaagagagtgaatcgggttgagaaagttgtatagtttgggagaagatgtaacggcaggggcggatttgggcggtggcgcggcgccagtgcaggccgcgcgtgtcattgctacagagtcgcagggacgctggaggcaggctgacggaggtggaggtcggactgacggtggcggatgcctgagtcag

SEQ ID NO: 135201 - DNA, 394 bp, Zea Mays
ttcagtggcgctcttgtacaaatgtcccatatttattttttcttgactgaacgattgttattcttttggaagtttctatgagtcaagtaaaaattaaatatgggacatttgtaccctccgacagaggtatggaataccattagcaattaccctccgacaaggctcccggtccggatggttttaggggtcaatctataaagtttgttggcctattattaaggatgatattatgcctgcagtggctgctatttggaggaaagattttagaaatctcagatttcttaatacagcctttattgctcttttgcctaagcaggatggagctgtttttgctaaggattttagatctattagcctcattcatagttttgccaagctacttaccaaggtgctt

SEQ ID NO: 135202 - DNA, 451 bp, Zea Mays
aaagcttcatcttttgttgccagaagttgtatccacatatatctactatgatcatccactataagcatgaaataactcttacctcctggtgtcttgggcctaatctgtccacagagatctgtgtgaaacaggtccaaattcttgtctgctctgtaatttgctacttgaggaaatggctgtcgttgttgcttgccaagagcacatccatcacagaactcttccaccctatcaatcaatggcatgccttctaccattttcttcacgccaagatctctgagggcccgaaaattaagatggccatatctcccatgccacatccaagccacatcatcaaccttagctactagacagacaggtgctgcaagactagtttttagcaaatacagtctattcttgactcgaggtgctttggccagcagtgagcgctcgacatcaaacacattgcaaaaac

SEQ ID NO: 135203 - DNA, 285 bp, Zea Mays
ctgtgggaaacgcattcagctgatgatcgtgtccggttcctgcggtagccccccgtggccctgtctgccccttgagccgcgattcttggattgtggttcagacttcagagacgcagcacatggagcatgtcctggcatactcaggggcccccctgtctttttgtaacagaaaatggcatgtactacgacgtatggcttctttcttgctgtcaaccacaccacgcgaccacggatggtgctgccagtgccatgccaagagcatccacgctcgtgcgtctgtggacg

SEQ ID NO: 135204 - DNA, 395 bp, Zea Mays
tgacaataactgcatgcttttctggaaggagaccgcgagtgagaagaagtgtactgtatgtggtgagagtagattcgttgaggttgaaaacgacgatggtttgaccgtgacgacgaagattgcacgtaagcagcttcgttacatgcctcttatacctcggttgaaacgtttgttcatctccaaaaatacagccagacacatgagatggcacaaagaaggggtacgtgagaatccaaatgtcatgacacacccagctgatacagatgcatggaaggcactagatgcttttgattccagctttgctgatgaagtgcggaatgtccgcttcggtttagcaacagatggtttctcgcctttcaatctaactgcaacgtcctactcatgttggcccgtct

SEQ ID NO: 135205 - DNA, 491 bp, Zea Mays
gtgggtgtctatccagtgaaagatgtccatcacgttgtcctaaaatagtaaactgatgcgacggggaggtgtaacgttgtgtctgagcggttgactttgattccatccggtgctgtgttatgtgaaacggtgccggatgcctgacccatttcttggagacttgagccgctattgaagtcttgcgatggttgagtgaatgggcgggaaacgaacggtcgcctcccggctcctttaaatagcccacatcgccccgactgccttcgtcacttgcacttgttaactcgtcatcttttcctcccttttccccttcacacccgaaaaacgatggtcagaggcaaataaggcaaggggaagcgccgcccattggatggaaagcgtaagcgccacccattggagggaaagcgtaagcgcccaccgagtcccccatatgaagagtttgggggctcagagttctccgaggaggagttctcctcaggagactatggttcgcc

SEQ ID NO: 135206 - DNA, 892 bp, Zea Mays
tagtggggttattctggtcgacgaagcgctgaaggtgttcggtcaaatgacggtaaggagcgtcatcacctggaaggctggaagtaagtgtcatctcttcgttcttgcggtttggtcgcggccacgatgctgtgtcctggtccagggagctcccgagaagcggcgatgcattgtcagatcagatggctcgcttgttgccgtgttgcctgcatttgggcttggcaaagcaagttcatgagaaaattggaacgggttccttctcaacaggtgaaaatgcactgttgaattcgtactgtacttgaggtgctctatgtgtggcagagaagctgtcgatgagtttagagatgcgatgcacaaataaactcatgcttcctgttcacctacaatggcattgaagtaaaaggggcagaattcacttggtttgcttggaaggagcaaaatggtcaatttcctgccaaaataacaccccactaacagcacatggacggaaatggtgctgagggaatctgttatttcatttgatggcaccaaagagaaattcaaaaaaattcaacggcatcgagagaagcgctataatgtccagggctgggccatggcatggctgttgtaagggacagtgcgtcggtgcgtgtggtgcatttgtttaaagagcaaggcacaattccagctttatcctttggctcccacaccaagcaaagcaaagaacctacgtgccttcacactgtagtgaaactgtgaaagcagcgagagcagaatttaaaggcaaagtaagaagtgacatcagaagctccctgcagatttgcatcaaactacaccatcgacagttagcaagttcctcatcctccacactagggcgtcttcgcaatatttctgctgtagcgctagcattggg

SEQ ID NO: 135207 - DNA, 515 bp, Zea Mays
tgagatggtatcgtccttgttcgctagggagtagctggaatgcacttagatttgggtctggaatatggctaccgattcctggatctggcttgtgttacagattgtgagcatgcggtagtaactgactgaacaagaaaaacacatgtattcagttgcagttggtttctcaagccattctctttcaaatggcactcatgtaacaaaacaactatgatgactttgttattgatggctatatctgtttttccttattactaattagggtcattgtccagttacgtagagatgaaagggcacctgaagttttagtgaggtataagatttgctcttgacattgcaatgtgtctgaatactctatcaaatatatattgtttagattgtctatccttttgataaaattctatgtacctcgcagtttgcaaaatattgactgaactgaaacaggtagtgctacacttttttatactcatgtagaaaaaaatatactcattactcacttgttcatcagaatggaa

SEQ ID NO: 135208 - DNA, 1489 bp, Zea Mays
ccgcggttcttgggcatgtgcagaaactggggttcagcgctgacgtcttcgtggtgaacgccgcgatgcatttctggtctgttcgtgggcccatggctttcgcccgaaggttgttcgacgaaagtccagtcagggacgtggtctcgtggaacacactgattggtgggtacgtgaggagtggcctcccgcgggaggcgctagagttgttttggaggttggcggaagacggcaatgcagtgaggcctgacgaggtcacggtgatcggagcagtgtcgggatgtgcacagatgggggatttggagctagggaagaggctgcatgagtttgtggacaataaaggggtgaggtgcacggtgaggctgatgaacgcggtgatggatatgtatgtcaagtgtggcagtttagagttagcaaactcggtgtttgaaaggatcagtaacagaactgctgtttcttggacaaccatgatcgtggggcatgcgaggctggggatgatggaagatgcacggatgttgttcgatgagatgcctgaaagggatgtattcccatggaatgctctgatggctggttatgtacagaataagcagggcaaggaggctattgcactgtttcatgagatgcagaaatcaaaggtggatcctaatgagatcaccatggttaatctcttatctgcttgctcgcagctaggagcattagaaatggggatgtgggtccaccattacattgaccgacataaacttcatcttagtgttgcacttggtacatctctggtggacatgtatgcaaagtgtggcaacatcaagaaggcaatctgtgttttcaatgaaatcccagttcaaaatgcactcacatggacctcaatgatatgtggtcttgcaaatcatggacatgctgatgaggccatagaatacttccagagaatgatagatcttggattgcagccagatgagataacatttataggggttctgtcagcttgttgccatgccggtttggttgaagcaggtcgtcaatttttctccttaatgcatgcaaaatatcaccttgagaggaaaatgaaacattattcatgtatgatagacttgctaggcagagcagggcatttggatgaagcagaacagcttgtgaacgccatgcctatggatcctgatgcagtagtttggggtgctcttttctttgcttgtaggatgcatggtaatataactcttggtgagaaggcagcaatgaaattggtagaacttgacccaagtgatagtggaatctatgtgttattggctaacatgtatgcggaggcaaatatgaggaagaaggctgacaaagtgagggttatgatgaggcatttgggagtggagaaggttcctggatgtagttgcattgagctaaacggtgttgttcatgaatttatcgtgaaagataagtctcatttggacactaatgcaatttatgactgcttacatgagatcacattacaaatgaggcatattgcaaa

SEQ ID NO: 135209 - DNA, 450 bp, Zea Mays
ctccggggggccaggtcagggcgtctgttccccaagagccgccgctcgtgccggcagcgcacagaggtgaccctcaagtcatcatgacggtgcctgggcaatctgctccccgggtgcccaaagcaagggtggcgtcgaagttgccggcgaagcggacctcggcagctgttccgggagctgggatccaagaaacttccccccaggcgcggtggatcatggcccggagcgggtaagtatctcggaatgtcttcgtcttggctttccattcatatgtctcggccgtgattttcttttttccctcagcaagcgaagctatggccagactgacctggcaccccagaaggcccttaagacggcgccggcctgtgcggccagcgccgctccgggccttgtcgttcagctgaccctttcgcagggtgtttcaccgcagggggctcgggcggcacctgt

SEQ ID NO: 135210 - DNA, 454 bp, Zea Mays
tttttaatagcataaaacatatgtttttcatatttgtcacttaccatgcatcctagtgcctctttggcctctttcatcttcctactatgctggagcttcatcatttgctttgcaaattgatgaagcggtgtgtttacatccacgtgggcactcttcaccagcttgttcatgctctcgctacattgtgtagagaccataagaccacaatagtctcctttgaaaaatgcaggtacccaaactttacgtatttcaaacaatctaacaagggtgttgttctcgtgtagctggaaatcatttagcatcatttgccaggcagcctcgaactccatttcattcaatggatgatgtattatagattggaaccttgttttgaaattcatttcctcgaatcttgcatacaattcattcaagtggggcatatacctgttttgcacatgccacaaacacaatcgat

SEQ ID NO: 135211 - DNA, 284 bp, Zea Mays
ctggggaggacaaaaggcacgaactctccagcagcaagttcgccggggtggatggcgccggcgtaaatccttccgccgaacgccggcgcatcccacccaagcatgcggtataccatgtcgagcacccactcagtttgggcatgctcgggatgaacctacaaggccatggtaaactatggtgacacaaaacagaaaccttgaaggcaaaggggcgcagagagctcggaggtgagaggacgccgcgagtgggagagaagcaaggcatggccgctactcgagggacg

SEQ ID NO: 135212 - DNA, 548 bp, Zea Mays
gtggatgtcagcccctcgcgctcctcgccgacatgtgggctccatcactcaacccgcaccgcacatggggttgacatgtgggccactctggtcagcttcgtaacctcccctcaccgcagctcaaccaactccgcttcaacaggagatcacgcgaatcccccgatctcgtcctcatccagactctcggccatgggtgtataaaaacgggtcccttgcgaccttcacgtccatctggtgaacctcgcagaatctccaccgtagctgtcggagctcggggagttatgggaatcggtcgctgcgtggggaaactccatcctccgttgcttggggtcgagtgaatgcccagggatctttgctgggtcacgatgatgatgcttgtgctgtcgtcgggtgtgaagggtgcctggggatggcgaatcgctcgctagatttcacttccgtccgccgatctatagggtatcgtggtatgggcactgtgtcgggctaccaccagcgtgaggcctcttggggcattcactggtgcgcatagatgatgaccgtgctctcac

SEQ ID NO: 135213 - DNA, 472 bp, Zea Mays
cgatagcagtttacggaggttgcggaggtcgcgtgcggaggttggctatccgacgcaggtgggcgggggtttcgtggagtcagagctccgtgtgcgcggagtcggcgtggatgtcgcggaggcgagggcacggagatggtctacactattgccttaatagatagtagagaagtagagatagataaaaaaattgatacatcaaacagttgaacatgtgggaatgaagccatgctgggccagctgccccgcccgccgtacgataaaatagaggagcaaagtaggcgcacacgcatcgccaacgcgtgtgtgccagcctgccaggtccatcaggccctagcctgaccaggggagccgcactggagtggactggactgcctaccgcgggtacgagcgcgagtggtggtgcgtgcccggtgcccgcgacgcgcgatcgctcactgtcgtagtcgttcgtctcgatccgaccggctcc

SEQ ID NO: 135214 - DNA, 420 bp, Zea Mays
catatacttaacatattttttgtacaatggatacacctttatttacatctgacacaaatgtgatgagattaaaagtcgaagtgaacaagtagaaatggatacactttagatggcttccccatggtgttttctttgagcgtgcatagagttttgcttcggtttacatagtattctttgatgagttttgcttcggtttacatagtattctttgatgctgctaatgccaatattgttttcgaatatatttatgtacaatgggtactgatggtgctaattcaataggaacaaatgagttatgagtcatcttctgatacatctgggtcatcaacttcaaaaacctctaggtccacaagtagctcatgttccactagcttgcattcagaggacattgtcgaaaaaggttcttgtacttctgccagg

SEQ ID NO: 135215 - DNA, 926 bp, Zea Mays
gtgagcatgttacaccgtcttaagtcatcgccgacttaagccgattgctccgtcagtagggtatagtggtcaccctcagtcgagtaagcgtgttgatttcaagtccaatcgaatcgaagtcagctaatagtcaagagtttgaatgcctttgaaaatgaaaactttattgatgatggattctccaattacagagtacaattttgaggccttgctaagggtaaaaccttctaagatgctctatgttccatgagttccccacttccgtgccatccatttgagtaagccggtatgatctcggccgagtgacctctgatacaatgaatgacccttcccatagtggcgacaacttgtgtcgtccttcccccgttagaattcagcgaaggaccaagtctcccactgcaaaggatcagtgtcgtatggctttatcatgatagcgcctcaaggtctgctggtatctggctgactgaattactgtgttcaatcgctcttcctccagcacatcaatatcctctagtttggtagtttttgcttgagctatgctttcgaagaccagcctcggtgccccaaacatgaggtcggcgggtagcaccgcttccaaaccatagaccacgaagaacggggtatttccatgtagagctcgactaggttgagttctcaagctccaaaccacatatggcagctctctgatccactttcctgcaagcttttcatttttgttgaacactttcttcctgagtgcttccagtatcattccattggctcttttcaccttaccattggctcttggatgcgctactgatgcatacttgatctggatacttcattgttcgcagaaatcgaagaattcagagctggtgaagttggatcccaggtcggttatgatgctatttgttatcccaaacctgaatattgtgtcttgtatgaac

SEQ ID NO: 135216 - DNA, 858 bp, Zea Mays
atcaagggcacataagggtactgaaacaagagggcagaggacatgaattgacctgtagtacgctggccacggtgaggtgctcacgcggcagtacttagaccgatttgggggaaatggccaagtgggcggctctggtggacaattggaggcaagtgctggtgcgttggacgcgtaattacctagcggagttccctaaggcttcaatttatagcacgcaatggcggtggtgctcaatttggaggagaagcgctggcgaccggggagaggggtgagtcactgcggcgatcaaccgtggcgatcgcagggcaagaagctatgcggtcactgggcagtcactacgactcatgataacgcgataaaagtcctaaggcgtggcgcccccacggtgaatggcaaacatgccgatgatggctgctcggcaacgtcgccggtgcgaacagatgaataaccgagcgcacagtacttccaagctcatccgcgacaagagcttttactcggggatcgttatctgtgtttatccaagtgtgaatcgcggcgttggcacaaatccacgcgcacgactcaccggcggcgaggttctctgaacctgtgatatttgtgtagcactgtaccatcgaaatccttattcagagcgcctgacagacagtattgcagtgcccagatctcggatttttgtgtaagaacttgctaatccatctgtaacaaacttgtatctctatataccgactacaattctgctatagggatcttgctcatttgcttattcccttgagaaagaatcgagcccaaagttcctcataattcactgtcagtcagtattcagtccagagtggtctgacagccaaactttggggctag

SEQ ID NO: 135217 - DNA, 722 bp, Zea Mays
cgcggagctagattaaaattaaagtggtcgacgaaggggtagatggcaaaaataaatctcgtcttctaccttgaatggctgagggagaacacgatgagagtcacgacccagtggtagctgagcagggccgaccggagcttcagcgtggtgccgatgaggttgtgacaactgtggcatgaagcgacaatagcgagaacttcgacgagggcatggcacgagcagcagacaacgacgtcgaggcgagcgttcggctctgtgagcagcggacggcgagcggcagcatgcgagcgaactagagcgagagggacaccaagggccgagcaaggggcatggcgcagttcggctatgcgtgtgcagcaacaaaacaggcgcggtgaggcgagaagcagtgagcagggaatggagtgagcagggaaaggcgcgagcgagtgagcaggggttcacgacgcgctatatataggtgagcagagggacggagaggggcgctgggacgcagacagagggcggacctccattaatggacaggagacagaacgtcggtagtgggaaggggagaggaacggccggcggaggcgaagctctcaacggtggacgcgaggggtcggaaggtgaggaggctcatgctgggtttttataggcagggagggaccgagccgaacatgcgctgggagaagaagcgagcagacgtccattgatgacgagaatcagtgaggaagatgaat

SEQ ID NO: 135218 - DNA, 361 bp, Zea Mays
agatcaacgtcgctgcggatccactgcgcgctgtggccatctcgcatcatcgtccctaaccattgtaagatccccgctgtcatacaccttcttttctctgcgtgttggggttactggtgctcggaatagcggtagggattccggggcgtcggcgtcggttgtagctgcaccggcaagctcgccaaaggaagaaacgccacctgggcgcttcggttgggaagaaaggtcgtggggcgttgattcgtgagtgtgtggttcagattagaggggagataacgtttcagctcgaggaatcctatgcgtgggatctaaatcgtgcggttgtggtgagatctaggacttaataaaatcgggaccgcag

SEQ ID NO: 135219 - DNA, 695 bp, Zea Mays
tatatatatatatatatttcttcctctcgtcgaacctattccagatctcgtgccccttttcgcgagattactgaaccgcgtcttctcgcgaacaacatgctgctcgcgtcggcgatcctcctctatcctcgtctttcccttcggcgtccacctcgtcatcttgggcccacgggccggctctgatcgtcttcgtctaattttatctaaccctgtctaccacccatctaactctgtctaaccctatctcgtgcaacttgccgcgcagctgtctctctcgctcggccaagacaagagccgtcgtgaaattgacaaccacctctcgtgccctctcctttctatacataccctctcctttctatacaatcgtacaccctgccatgaaccccttccctcttccttctcacacatgagcagcccacgcgttttcctctctatgcattgtgccttcgtggtcttagggtccacctcgtcgtcttcctcgcgtcgtcggaggagcagccccatcgtcttcctcgcgtcgtcttcctcttctttgattgcctgctcggctggtcttcatgtgtaggtgacaaatcctctccttctccctcgtcttcgcatccttcttcctcgtcactacgcaaacatcatggcggccaaggagctcacaccaaactccctactcacctagcgacgcagctggcctagcccctcac

SEQ ID NO: 135220 - DNA, 520 bp, Zea Mays
gagctcgtagaccggccgaacggggcaaggactggcgctcccgagtggcagacaccgaattgaacctcgcccgagcatttcccccaacctaatttcatgaatggtggtctaccttgctctgtccacggtgacagtgcgaagaatcaaaggaacaacacgttcccgacgattggtggcggtctagttcaatcggatgagtcgacgagcatcacgggtatgtgagatcactcaaacgagggagcagaaggtttgaactgacctcaattgcactggccacgacgagggtgttcttgcggtgggatgaaccgatttggggaaaactcgaaaatcgtgagctctagcgaacgattgagggtgggagcgggtgctttggtttcgtgatgacatagcgcagctgacccgaccttcaatttatagagggcttaagcggtggtgctcaatttggccgagcagtgctggcggtcgaaggggagtaagagtactggtgcaacgaaacaggtggctttcaccatggcggctc

SEQ ID NO: 135221 - DNA, 738 bp, Zea Mays
gcaaaaaccaagccaaataagtatcttaagtcctttggttcacaaatatgtgaatttacaagccaaaccctgagatttggacttaagtgcaaaatggacctcatttgagttctacactaagtctgaaattcagtgttaaaggctccactttagggctttgtaacttgcaaagcatagggtttttgccctaggtcaccacatcaagtttgtagctcaatcataggagaacaactttgtttaaggaagtgagcattgttgttaaggaaaaactgaagataatcactcctgaagttggactgtcaggctatctaagtctgaaaattcagactgacagtggactgatagcaacttcaaggccaagttcatgcatgatctgctgtctttttgtgacaataccatatagcaaagctgtagctggtatgtagcactacaatattgctgcagagagttggacttgttgccacatgaaattgagagaaattggagctccaaagtgctctgtcagtcgctctgaatcagtgtttcccatggtacagtagactggaatggatcaggacgccagtgcgactgctcttaccgccggcgaccgatttccgccgcgattcgtgccgccgccggtccaacttgagcttggggtaagtggataacacctggtgcacgttgccgtggataagtccggccggaaaaataaacccgaccaccgtacagagttgccgcggtggaaacccgataggctcg

SEQ ID NO: 135222 - DNA, 1149 bp, Zea Mays
gcaaaatctgagatacagtgccttcttattgcagtggtgtttgcaaaaacaaacattaactattactacactttgttcagtaaaaaacgttcaaataggatacaagcaacatatataaaaaggttttaaaatacaatatgtgcttacaacgtgctttgctagcctgcatcagaaagtgaacaccgacaactatctcataatcatattgcaacagttctaacagaatatacacaacaaaattaccccactaaaaaaatctctaccgctgataaacctcttcatctctaccaatcgttcaaccaatatcccactagaaattcagcacaactacccatcactcgttttatgtcatttgcttcacagtgctcgtccttttctgcagcaaacgcggatatcaaaccaaaatagttgagaggtggttgttgttgaggtagggataaatcaacgaacagatttctaccaagatcatgagggtaagaaagaaaagagagaaaccaagaagaggaaatcaccactaggaaatgctagggccaagcgagcagacgaccatgagggaagtgttgtgcgggatgctttatagcgtggctagaacaacagcacgcgttcgagaagatccagagtcagttctaccatgatccccaggccccaacaacacttgttcgtcaccgtcgtccccaaaccccaaaatacaagctgccgcgctcgctcctaccatccgtccagcccacgttcgtcgccatccaagaagaaggagcgaaaacagagaaaataaatcctagcaagaccaagaaggtgcggaagaggttggatttacctgacaaaatcgccggcggagtggtggcggcaaccagcgaaggaggggtggcggcgtgtccgaccgcagtggcggagttctataaattgtcgcctcgagccacttttaaaaagctctttaagatatcgtgtggctaaatataccgctaaaacataatatactacaaacatagactaaagtaatatttacctcaattcagcaccttaaaataccacaaaacttgataaaaagttaaaattacctaattaaagatgatctggtttcctcgcctctaatagcttcataaacatcagcacgtgaatttaaacctacacattgacattgcatcgatttac

SEQ ID NO: 135223 - DNA, 358 bp, Zea Mays
aaaagatcttgcgcagggatgaagtcggggcactgtggccgccctgtcgccgtacccacttgcgctacgacgtggccagacgatcatcaccgtggagatcgccattcaccatgattgtgccacgctgtagtcgattcaccacgtcgtcgcaagatgtatggactcggtagtgaccgtcgtagatagttagcctgtgagtgccacgttagcggcctccggtgactcctcccccttctcaccgtgagcgcttccccgtccaaattcaccctcctcgcagtcatcctctataaattgatgcatcgacatgttccatctacttgttacgaacccagagcaccagccctcgcctccgatcatc

SEQ ID NO: 135224 - DNA, 609 bp, Zea Mays
gagcgtttcatgtcaatactgaatggttatgtatcaacccgtgctcgtcccgaggcatccatgatagaggggtactgtaccgaagaggccattcagtcccaaggtccattgtgcaatagtatcctaaaagaccaagttgcaataggtctgcttccatcacgacacgggggtagactgtatggaagcggtaggatgggacggaaatacttcatcccaccgaattacaatataatacttgaggcacatcacaacatcctacatcagctagagataatggaaccttaaatccaacaacacatcaatgagctttgcgagcaaaatcctaggcaaatagatgattaagtaatgaagcaacataagtagcggttcaacacatggctaattgtgaaagacattccacacggagatacaatagaagaacaaaccattaaggggttggcatctagaccatcacgccaggtcatgacatgaaaacctatgacattagtggatttacattttgtaccaagtccaaggacaaaaggagcatatcacaaaaaacggtgtttgatgtgaggccatagacgatgaaactagtcagactattacatattttggctttattgagga

SEQ ID NO: 135225 - DNA, 781 bp, Zea Mays
gaggaagtggaggaggatgaggaagatgttcctcctttggttcacaggaattgtcgtagcaaagctagcaacgatgtcccaattaaggctctatcagggctagttagcctctaggggatgacgatgtctgccattgaccatgaactggaggaaatgcatatagaaggcctcttattggaactttctgatggtgctccttcggctagtcttcttgcttgtcaagaaataacctagacactttcccatgcatcttcgacctttgatggcgatctgattcgtgaggacactctgatccttgatgttacaaacgagggttatccagactagaagggtatgattgaagataacgtagcccccgagggtgctactgaaggtggtctagcccccgagggtattgctgagggtgacccagcccccaagggtcctgaacctggctctgctttggctgcttctatggatgttcatgttgggtcatcattggttcagtctgaggaagctacggtgacgagtcttgatcttcctactgcccttgctggcccagctactttacaggttagtaatcagggtgttggggacccgctacatgctattggagccgagattccactaggcgtcgccctgagcatgagttacaatccttctttggtattcaaacctgctcttgatattgccactatcagtgtcccgccgtctgatagtatctcaatgcctccggccttgggatttcctttgttcctttccaaccttcaggcgagttcatccttaccatgctttatcttca

SEQ ID NO: 135226 - DNA, 516 bp, Zea Mays
gaggaggttgcgttatggcacacggggatggtaggcgcgtgagaagcgggcggaggaagaagcgcgtggaggttgcatgcatccctatccaggtgcgtgagaaaggggcgaccgagatgaggacaacggaggttgttggcgacttggcgtcgttccgatgtttgcggtcggggcagcccgtgcgcggagtggtaaaaagctcgattgatctacatgatacactgcgcatttggaataaagttgtcccgtccgtggattgaaagggtgcgaaataaaccaaaccatataaaaaactgaattcgaacaacagctacatatccgaatctatctagatcactacctcacaagagtttactgtgcgtcctaaagataaacccctcctaacttcagaaattaaaggttttttttacatgcagacgcttccctcctcgaaatcagaaagaaacgaaactgaataccaaaatatgtccccgcccatttaccatctagtataagcgcgatcattttcgataatca

SEQ ID NO: 135227 - DNA, 743 bp, Zea Mays
cgcggagctagattaaaattaaagtggtcgacgaaggggtagatggcaaaaataaatctcgtcttctaccttgaatggctgagggagaacacgatgagagtcacgacccagtggcagctgagcagggccgaccgaagcttcagcgtggtgccgatgaggttgtgacaactgtggcatgaagcgacaatagcgagaacttcgacgagggcatggcacgagcagcagacaacgacgtcgaggcgagcgttcggctctgtgagcagcggacggcgagcggcagcatgcgagcgaactagagcgagagggacaccaagggccgagcaaggggcatggcgcagttcggctatgcgtgtgcagcaacaaaacaggcgcggtgaggcgagaagcagtgagcagggaatggagtgagcagggaaaggcgcgagcgagtgagcaggggttcacgacgcgctatatataggtgagcagagggacggagaggggcgctgggacgcagacagagggcagacctccattaatggacaggagacagaacgtcggtagtgggaaggggagaggaacggccggcggaggcgaagctctcaacggtggacgcgaggggtcggaaggtgaggaggctcatgctgggtttttataggcagggagggaccgagccgaacatgcgctgggagaagaagcaagcagacgtccattgatgacgagaatcagtgaggaagatgaatgagcgcccgcgacattcttcc

SEQ ID NO: 135228 - DNA, 605 bp, Zea Mays
ggtcactatgtcatgcatatgtctaacctctctaccctgcaaaccaagtatgccttcttgcttgattagtagtatgagttaaagtctaggcctagcttattgggtgcttgcaagtctatcccacttttgagtctaagctagctgataagaatgttaggatctctttacttgagaaaaatagttgtggtagcatttttataagtgcacaatgtgtcagggtttggatgatgatcttgagtgttgtcatcacaacaagataatattcgacaaacaaaatagatacattcgggccatattgagctaggtgtcttgtattgtcacggttgggtatgatgttaaaccagtttaaataaggcagttgtctagctttagactttgtagtaggtagggaggttaataagcactatggaaaaattggtgagtgcagtgtcttaaaaccaagtaagaaaccttccattgctctctcaagctgatcaaaatcacacaaccaaatctggcatggaaggtcttcctaggactttatcgaggcctcgaggaggttcacaagtcatgatcatgtaggctacgttagggctacatgaaaatagttcttcgttgctctctcg

SEQ ID NO: 135229 - DNA, 361 bp, Zea Mays
ccctgacctcaggaaatgaagaacttcaacattgactatggttcatacaatggcgctcctggctaagtctggtagaccacatgacatgacatataaaagtaagtcccatggctccacacgccctaggtcgcttgccagtctaaaccctcaatgctccatgctccccaaaagcctgatggatgaagcctcgcgggccactcgcgtcccaggatacttatcagtataagctctcgaggtccatcatgctccaagacatctattagtagaagaacctaggacccctcatgtccaaggacacctagcggtataagcctttgaggcccctcattccttcacgcacctaagggtacaagcacctcgg

SEQ ID NO: 135230 - DNA, 451 bp, Zea Mays
cagacccccctcacttgaactatcagtggactccttcgacatttcccattcattaacaaggggccataccttgaaagctatgtgttcctaaatcaagtctctggtgctaatgtaactgcacacagtgttgaaagccaccaggcaggcttgagccttatcactattcataattaagggccttcggatgccgaagcatgattgtattggacgttgaattatatctttaacatcctccctctcaaccaaatcattcttaacataaaaccattgcctcatctaggatcctggccacttcttccgaaatgttgggacatggtgtcttgcatcagagcggtatatgaaggaataacaaccaaagctgttgtgatattgttccttccccattgccttcgtctggtaagataattcatgtatattgtagaagcagtcgacatctggttccagcccttgg

SEQ ID NO: 135231 - DNA, 917 bp, Zea Mays
ggctatggttgttgactttgtcttcaagaatattcagccactgaaggatagggcatacccggcctatctgtaccgaggcctagctgactcaacccgggtaaccaatagaagaattcctgctgtggacttggtgagccagctcgaaatgatactcagaggcaaggtatcaaatgttggcgcccctgttgcatactcggcctggaacctgcctccttccaaggcctttacccattttgtgtcaaatcctcctgctggtgatggcggtttgggccttagagtgtgaccctctgccgaagaagttagtgctttggttgcttcgcttgaagaaattcttgatgatgaacggcaggttcactttgaggtgcctttggatcccagtgatgcagagataagtgccatgcttgatatgttagctgaggattcttctgatgccgctcctgctgaaacattggtggcggtacccatccctgaggctgacaaagctttggacgctcagaagtctgtcaatgttcgtccaaaacgttctcgccgagccaatcaagcctcttttcctgcttaggggggagaaaaagaagaagagacgtcttcgtcgggtgtctagcttagatcagggtgcccgtccttctgctcctgttgctgaggaagtgttgtgacttaatttactgaagctgatcccaatgggtgtgactcgtctgacgctgaccccaatgggtgtgctgtccgtgttgttgatgaggatgatgaagaagaggacaaaatccctctgattcggaagaacaaccggcgttacatagctagtggggaaagtagtggtgttccttctcctaccttgtctgccctcgttggtctgcaagaattatctctggcgaactttgatcaaactcttgaagatatggttccagaagatctgttatcag

SEQ ID NO: 135232 - DNA, 776 bp, Zea Mays
aaaaaaccaggaatctaggaacaaccaagaatagagttaagataagtcttgcaagtggtaaagtataggatatatccatgggtgagataagtaagagaccacgcttgaactaaggtgggaggttttagataacgaacatagcgtaatcgccaaggtaagattgagagatgagaagggtagaggcaataagaatcaaaagcataacgaaggatgaggttacaaactcgcgagccaaagaagaggatacgaccaagagaaagaaggtatgagacggaagaggggcgattttaaagggcaggtatgagatgaacatcaatgcaatatatagaagtgtcaagggtaaaggtgataataacaaagagcataggaaaggatggagctaaggcaagactcacgaaatggcgagatggagaaaacaatcacgggtaaggtgggtaaggttccaacagaatggtttagtaaatgaaattattaccgagggaagttataaggaattgatgagatcaccaaggatgtgcaaaataaaatgaccgctcatggatcattaagaaacaaggatgatcaatggcatgttaactgaaatgtcttaaacagacattagggcatgaagataagcatacacgaaaatataagagtatgcaagactcaaaagatacgagcgtactaagaccaaggtaaaagaaattgtcgaaagatagcgtcttaacaacagaataagaaaggatctcagaagacaagaagatcatagacacataaactaaactgtttaaataggc

SEQ ID NO: 135233 - DNA, 347 bp, Zea Mays
gtgatcgcaagaacggaagggtggcaggcccttaggttcttcaaatactgtttgatgtttgtgcaacactgaagaaattattggatccaggtcaactgagaagggagcactattatccgactgaaggagatacaccacgtgcagcatatccaattgatctgataggggcaacacaccttgtagcacaatgtgtttcccttggtatggcatagaaatccatttgtccttccagtggatcttcatagggctgtaagcttccaaccagtccattccgagcaccacatcatacgcagccaatggaaaaattcgtaaatccgtcttgaatgaatacccctggactgtccatt

SEQ ID NO: 135234 - DNA, 334 bp, Zea Mays
accagaacgaactcacccaccataaactccctgtcagtcctatttttatcagcttgcatcttcattcgattctgggcagaagccaacttctgcttaagtatttcagaatgagctttcctctcagccaacagtccctccaccaattgatccccagttttggccatcacaggagcagcagcaaacacaggttcataaccatataaagccttgaagggggaacatttcagagctgtgtgataagaggaattgtaccaaaattccgccaaaggaagccactttttccactgagttggggaatcaaaaattgcacacctcaaatacatttccaaacatt

SEQ ID NO: 135235 - DNA, 491 bp, Zea Mays
aaattctataatcattttctcggtttttaatatcccctggactaggcctcgaattccagaaaactcaggggtctctacgcaagaggtacgagacccagtgcacagtcagataggatggcgggttgatttgttatttttccaggggctctgacaaaaagtacccacgaaggggtatcaacggtttctgaccgcccgatcgcaagtgaacggccccgattagatccacacgtggctgaaacgatacatactctacaccgtcggatctgagttcaacgatcgcgatataattatgctagatctaacctcgtccattagatctagatcgacggtctgattttaacgtggtgaaggggtatccctgaatctaatctcagccgcccacgcgatgatcaacggacgcgaccatatcttcacccttcgaccaaccgagacggcggcgccgaacacgcgcggcggcgctcgccggtgagccaccccactacggcgcacag

SEQ ID NO: 135236 - DNA, 707 bp, Zea Mays
gtttcgggtcgataaggtgcgcgcgaacctgagtatcgtgctcctgacagcaatcgggggccggagttggtagtttgaggacaatttctcgccgccgattgtgctccgccgcagattgcgtggttccgtggacggggggttcttctgcgccactgctggtaagttttccattcccgtattcatcatcatgtgcgcttcacgccaacgctagcgggctcgggggtagtgtccttgggcacggaacagggggttcaccggtgtatcgccgtcgtggtcaacacggctgcagccgtggtgtttctgggaagaagatgacgggttcgtggccgtcggatcgtctgatctggtttagacggctgggtctacccaggttgaggatggcgcaggaccgtaggatcttaagggacgactgcaattagatccgggttcccttctcgcgcggtcgatctctgccctccatcggaaatcgatcgtcggagagcgtgtcttcaccgttttcgaatccggaccgtagttggctaatcgtagggctgtagcgtgatcggtggagtgaatcgatcttggccgttgtccatcgatcggacggttgcgggtgaacgtcggctcaggatgaagatcggtctaatcaggggcgcacactaccgatcttgcggccgagttctaacgataccctttcgccatggtaaactgcaaaagagccctcggat

SEQ ID NO: 135237 - DNA, 312 bp, Zea Mays
gttcgttgcactatattgagaattgtgtccttgttgactattcttgagctacagttgttgggattgttgatttggggagaaaattatgtaatgatattgcttagccatatgctgatttggcttagggtggaaaaggatgcttgccgacttgccgtatcacagggcttttacagaaacaaaatcatcgttgatcttgcacttttcatgtattcctggatcggtcggcctattgattggtcgattttggtgctcagggattttttcactattcaaacttattaaaatagtcatcagtaaaaaagtgaagctgag

SEQ ID NO: 135238 - DNA, 332 bp, Zea Mays
tatgcattatgttcattttcctgggttagtgggctttgacaagaattctgtgtgtactttcattagttgtttcttaattatcctgtttaaatatttattgtttatgtgtcctggcctccaattttgataattactactaacatactctaacaccctactgtaactagtggcagagctctcgcctcttggcaaggtggggccattaccataccttgagtttcttccgtacctactgtaatatgctgtttcatttgctaactatgctataaatcatgctacattgttctgtttgactgtctacgccatacctcaattcccacctgtcctctgct

SEQ ID NO: 135239 - DNA, 444 bp, Zea Mays
ttgtggagcacagagacgattgacgataaattgagacgataattgaaaaggtcaagtagggtcatgtcatgccgacggactcgaggtgaaaaaggattgaagggagtcttggaccgtgggctgaaagactggctgttgatggctaacacttgggaacatcaacaagcaagtatacatgtggaagagcaaaccgtgttgaccaagttaagatagcagttggcaaagtcaagcgggacacaaaggacttggtgatcaggcaatcgagaaggggtgatgatatgcatcaagatcatgcaataggcatagcggatacgcttctttagctgcatttggtggtttgagcatcaaaaacataaatagatgattttgtcgggtttgggccttaaaccccaggatggacttcttgacggcatgtggtgtcttcaaggcgtttccattgaagtg

SEQ ID NO: 135240 - DNA, 512 bp, Zea Mays
ccaagtcctccactgacatttcgtttagtaatcgtggaccaagcaaccagcgacgacttttttgagcttgtgtcattccccctccaaagacaatgcttcctgtaaatgtctatctacttaatgatagaccttgggattttgagcgtacacataaaaaaagttggcaaggctgaaaacaccgagtttaccaactccaaacgtccagcatgagatagaaaattggaagtacatgacaatctcttttcaattctttggattaaaggtaggaactgctgaagtctaggctttgaaagacccaaaggcaatccaaggtaagtgaaaggcattgcacctgtctgataattgagagttcttgataggatctccatcttctcagggttaacatttatcggatacatacttgatttgttataattgaccctaagaccagttgaggttgcaaaggaattgagaattgccttaagaaagaataattgcttcgggcaggcctccattatcaagagagtatcatc

SEQ ID NO: 135241 - DNA, 366 bp, Zea Mays
tccgttagtagggtatagtggtcaccctaagttgagtaagcgtgttgattccaagtccaatcgaatcgaagtcaagtgatagttaacagtttgaatgcccttgaaaatgaaacctttattgacgatgtattatcccattatagagtacaatgttgctccgatagctttcgaggttttgctaagggtaaaactttctaagatgctctatgttccatgaattccctactgccgtaccatccatttgagtaagctggtatgatcctggccgagtgacctccgatacaatgaatggcccttcccatagtggtgacaactagtgtcgtccttcccttgttagaatttggcgaaggaccaagtctcccacta

SEQ ID NO: 135242 - DNA, 329 bp, Zea Mays
gtgcgcccgtcttgctctcctcgctttgcttgccttgctcttgctcaccacccgccgccgagttggcccgtctgcggctgggtggtttccgggagctctgtctgctcccacgggacctacttcaaatcggtgggttggtctagcacaccacgatgcacgcggcaagtgccgttcccgaggggtttggctgggcgccattcctggccctcgcggagccgtttctgcgtttggccaaacaaattcgaatttacttctgctctgccgcggattcgggtgtctggcaactggccgtgtcgtccttctcctcgctgcaaatttcgtgctctccg

SEQ ID NO: 135243 - DNA, 529 bp, Zea Mays
tctgaaatcctaagttcagtgacatttggttaactttgggagcagttcatggttgattcaatggagataaggtcagggtcactgtggcaaaattgaagctctaacattagtgaacaactttgctataccaagcttgactaggtgctgaattttttttggagtgaatcgctctcaaacatgctctatcaggcgctctgaatggagttctgatggtacagtacactgaaaaagatcgcaggttcgctgtatctcgtcgccgatgactccgcgccgcgatcctcaccggcactacgattcgtgcccggtggagtgcagataactacacaggagatgaacttggggcactgtttcgccctgtcgccgtgcccacttgcccggcgatgtggccgcacgatcatcgccgtggctgccgccgttcattcggtcgtgccacgccttgggccattttaccatgccactttgagccatggaggctaaccagtagtagtcgtacgcctttgtccagtgaacgccacagtagatcactgcg

SEQ ID NO: 135244 - DNA, 490 bp, Zea Mays
atcgtatttagtactttgtcctccatttgcactgcctaagatgaagtggtagtgatcagcctagcagttgagcggaccctagccatctatggatttgccaaagctttgtgggaaagttagagctcaaaaaagagcttccaaggcagagaaaatgttggcagcaggttggtacaagcagtaaatatcatgataactacacccagctggccagtttatatagctgagcgggcatggaagtcgacaaggcgagactcgttagctcgctatccagtgggccgcggtaactcattctatttttccttccgataacaagcttagggaaggtgttttcggaccttcgggacgagaccttcgtttatttcacgatcggagttcattataaaaacaaactaataccgcgaggacctattattggggggctttagctgaaggtactcaaaatattaactaaccagttatcgttcaacctattttaagtatagcaggacaa

SEQ ID NO: 135245 - DNA, 434 bp, Zea Mays
gatgttatgctcatatgattgtgattgtaccgagtttatgattcattcatataggttgggtacatttgattcatcgattgactctagggagaccgagcatccatatcattgtcctcttaaatgtctcgttctcgcacctccgcgcaggacatggagattgctaggctacaggaagcgttaaggcaatagtcagagtattagaggcaacaagctgagcaccaaatgcagcaaaactagcattatgtgaatcaattcgctcagtaggaggctttcctctcagtaagttgaactaatatgttattcatagcaactagaaagttgtgtcattcctaaataatgacttgcatctaatttgtagcaagtggcacaacaaacgtgcatctagatgtcagccattgggatgccgcctctagattttgcaccaccgcctccac

SEQ ID NO: 135246 - DNA, 324 bp, Zea Mays
tatacatagtacctcagattttctaggagtcttctgtttaggagagctttttttgtaatgatattagactttggactgcttttcacactcggaacttgtggggaagggacttttatcttctttgcactgtttttttctgaaggggaaggtgaggctgatcagaattggcgctttaaagatggagcatccatgaaatcgtcatcggacagtgtggatggagcagaaggaggatttcttttaacacgacaagctagggcctttctacgaaaacgatgaactggagctggttgtggctcagtctgcttctggttatgtggattatca

SEQ ID NO: 135247 - DNA, 528 bp, Zea Mays
gggcattggactgcgcgaccaacggtaatgaccttcccctcacttcgtcgtttccttagcgtggagtagcaccatatgaatttggagggagatcaccagtgcgtcgatgggttgttcatcggcgattgcgctgctgagtgtaaagtgggcgtcgtcgcccagggtcatcggaggtgtaaggcaaagccctagccgttggatcttgagcgggcatgcgagattagatcagtgtaacatttcggctagtgggaatagagattgtaaatctgcggatgtgcgaataggattagatcatgccccataaaaatatgggccaaggatcctagatctctaggtcccgagtgcatacttgttcaaagagttgagagtctaatctgcaccaccgagttttgatccaatggttaaaattaaaatgtaccccttcgccttggtgtttttgattaagagccctagtaaatgtagaaattaacccgtcgtcccctttgcacaaagatggttaccattaagtcctaaatttacacatccaaa

SEQ ID NO: 135248 - DNA, 471 bp, Zea Mays
ctcggcaccctcagaggctgggtcatcctcaaaagcaccctcgagggccgggtcatcctcagcaccacccttgggggctgaagcatcctcaattgtgcccacaggaaccaggtgacccttacatgtaacattaggaaccaaggtgtttccatgaattaggccaccttcaaaggtttaagaagcatgggaaactatccgggttatttcttgcctgactagattactagctgagggggtgtcatctatgacctctgcaaggatggcagcactctcagtttcaggaagctccaataaaaaatcttcagggataatctcctccggtgcatgatcaatggcagacatcgtcaacctctaaagattaaccagccctgacagagcctgaattgagacatcatcgttgtttttgctacggcaattcttacgaatcaaagggaaaacttcctcttcatcctcgtcagacacatgtccacc

SEQ ID NO: 135249 - DNA, 492 bp, Zea Mays
gtaaaaagctttatttatagattagcctttaacttctaagaagtgtcatgttatttagaaagtggttatgaaagcatgggtatatatatgtatagtcaccttattgtgtaggatgaaagataggttagggcaagaatagcctaaggtaagaaagtttatggtgagaaagaactccgtgttgagtggcaatacaactgaaggttgagttgacttctctcctcccttgacgaggttgatcttttcttctccggtcttggtctcattgagtcagggtcagtgtttatcatcggagttaccggagtatggttaggatggatatggatgagataaactagataagatctacttaatttattttagaatagatcatgcttgttacacttttatgagataagcaaattggtgggggtaagtatgctgattaggacaagatgagtctccaagagtaagatagaatcttctgagattgttcagatctattaggataggata

SEQ ID NO: 135250 - DNA, 352 bp, Zea Mays
tcaacctgctcctttggggccattcgatacagagccttatgaatgggctgcgtacccggaatcagcttaatctcaaaagctgcatcgcactccggaggaatgcctcgaagctctgccggaaacacgtcagcaaagtcacacaccacccggatgtcctgcacccgcaaggcagcctcaccctccaccaccatggagaaaaagattcccgacttgctggaccggtgattcggaagcaattgcgccaacaaggataacgtgaacttaggggaacttcccaagaataccacctccctacctgacggcgcctgcaataacagtcttccaaaaacaggacataactgcgcaatactgg

SEQ ID NO: 135251 - DNA, 695 bp, Zea Mays
acctctggtctgcgcgcatgaaatctggaaagcgcaggggcttgcgggtaaaatctcctagacacagagcgtccctggatatactgcggattaatttcctagtattccgagggttcttttgcaaataggatggccgaaggggtatcgtctgttgtgagccgcacgattagaaactagcgcgccagataagttgattcataactgtgaaccggtatcaaatgaaggccactggatccaggatccatgggccatgagtcaccacgtcaaactctcatcctgaccctagatcaacgatcccgcggcccggattgtacaaacgaagggggtacggtagcttctaatctccgccgccagatgcgaaaccaacggtcccaaagtcgccccaatcagaccggaccacggcggcgcaccaaccatccacggcggagcactcgcccttccggtgacccactgtcaacgccccagagctcccaaactaaaattaataggtcccgacgcaaactataaaggaaagggagctgggccatggccttacccgcactggaaggtagcagaggtcaccggctacggcgcggatggcttcacggcggcaccgaagtcgtcgacgagaaattcccaagcaccgcaacccaattcgtgcgcgcagtggccttggtttgcttcctggtacactgaagacgccccctggttcacaa

SEQ ID NO: 135252 - DNA, 730 bp, Zea Mays
tggacaccagaaaatgcctaaccatcaggagtcacaccgtagagggctgtggcagggaatggactcaacctccatggtgagctcctcgaggacaatatcgttgtggacatcgtcgaacaaggggaagggcataatctatttcatgagggcctttaggtggtcgtagcggggtctcagaccatgcaagaggttcaggacgacagtgcgatcgacaacgggcttgctaagatcacaaagggagtcaaccatccctttcatttgttggcagtactcgctaatggagagatcccctaggagagaaggcagaatgcatcatcgaggtggagagcctgggcctccctattgccgaggaactgatccttaagggaaacattagcctagcgacctaggacaacaatatgatgtcctgaagcttgatggttagggtgccgatgatccacaagagaacaatgatgtccatctaaaaccaggagggagccactagcgggacaatgtcatcaaggacatggtcggtaagggagtagcgctaaagcatcaggagcacctgatcgagttagcaagcaaagtggggtgacaacgaatctagcctgattgagactagggacccgatgttgtgaactctagccacctgagcgtgaagagcggtgatggtgtcggcgttgtccctagaggcatggggagcctcaagagccactgggggtgctgcactacgaccgaggaggaggcgcgg

SEQ ID NO: 135253 - DNA, 433 bp, Zea Mays
gaataagttgaatcggaataatcaggtcctgccacatgtaacacctcctcgttggttcgatggtcgatttgcaaattacgttgacagggtgttctgggatgtggatcaaaggactagttcatgaatttgaagaggggttgaaggggcgtacggggaagttgtaggtcatttttgtaggtccaaccctaattcctctccaagctccctgaatcgtctctgctccagtcccaaaattccacatattatcaagtttgtaggtcattttggggcaagcactagaggacttacgcgaaagttgtgatacccagtaacactcctttgattctggtgaggatgcaacagcggggggcaggtcgccgcggtggagggcgaaatatggtcgtggtggaggccacgagcatgtgtggagaagagttcatgaagtggcttcctc

SEQ ID NO: 135254 - DNA, 365 bp, Zea Mays
tcaaaattggctatggacaactcttgcagaccaacaagaacagacaaagctagagagggaatatcactactccccccactgactaggtagcgccgattgtttttccaaattaaggggatttcctcctcctcttcctcatcctcgtcaacaatacaaaaacacacccattgggatcagttctggccagatcacacccattgggatcagctctggccggatcacactcattgggatcagcatcatcaaggtcacacccattgggatcagccccattaaaaagttccaccggtacttcttcagcagcaggaacagaagggccagcatcctaattcaaacatgacactcgctgaagcctcctctttttc

SEQ ID NO: 135255 - DNA, 440 bp, Zea Mays
cacaggcgtatggagttggtgcagagctcgattggaagtatggagtcgacgatgaagggtgtgattgctgagcaaggagaaattcagaagtggaagccggaggtggaagcgaagatgaacctgattgcgggggcgttgaaggacattcagggtcaggtggagtatcttggcaagaggtcactgatcaaccaaccggctgtggaggagcaaggagggctggggggagcggtgctgtaggagattccatcagttgagatttcgtcagcccagagctccctgcatccagcgggacattctcatcagaagcctggggcgaacatggaaggacaacacctgttctcgtcattcggaggtacgaatcacaaaaactcccagacaccttgcaattggggatcggtgctgaaccaatcagtgggtaattggtcccagggatcgagatc

SEQ ID NO: 135256 - DNA, 348 bp, Zea Mays
tcctaccccctcccccttaaaaagaatctcgtccttgagattaagaaggactagggaagaggtgaggaaattctattcgaagctcttcttctctctccaaagtagcttcatcttctccatgatgactccattgcactttgcacatttttatcaccttattcctcgtaactcgagtcaaagtgtcaataatcttgataggatactccatgtaagtcagatcaccctgaacactgacttcttccattggtaactgttcctcagggacacggagacacttcttgagttgagacacgtggaacacatcgtgcacatcagatagatgatcaggtagctcaagctgataggtca

SEQ ID NO: 135257 - DNA, 529 bp, Zea Mays
ctagtttcctatcatcgacgggagccatcaccggaagtcgcgtggatctgggcactgctgtcaaccagcgcgtgcgctagcgtcgggcccttggggattagtcacaaaacaccaccgaaccgctagtatcgtgcccttgtccatgctggaggtgattcgtggccaggggcgcgtgaatcgctcgccgatgagaagaccgccaggatgccgccgcgattggttcatgcgttgggtggtgaggggtcctcggtagcaggacagtatgcctcgccacgtcgtgcgcaatgcatccgtggcttcgcttaggtggatgttagcagcctactctagatcgggagacaactactggaggaagaaggagataggcgaggaagaagggtttaactggagttcgacatcagtttttccatatcccctacagactgcctgggtaagctttaatacccctttcccttacacggtccactccggacccgaatacagagtgttcggccttttagctctgcgccccacccgacgcagaggcgag

SEQ ID NO: 135258 - DNA, 577 bp, Zea Mays
cggagcaatcggcttaagtcgacgacgacttaagacggtgcaacatgctcgcgcttactcgacttaaggtgaccactataccctactaacagagcaatcggcttaactctgcgatgacttaaggcggtgcaacatgctcgtgcttactcgacttagggtgaccactataccctactgacagagcaatcggcttaagtcggcgatgacttaagatggtgcaacatgctcacacttactcgacttagggtgaccactataccctactgacagagcaatcgacttaagtcgatgacgacttaagacggtgcgacatgctcatgcctactcatcttagggtgaccactatgccttaccagccaagcgatgggcataagtgaggaaaaaactccaaaaccagcacgccgcatttacttccgcaattgttcaggataactgttacatcctgacaacagaaacaaaatattatagttgtcagcaccaaggacacattctagtgccctatccaccgaatattcgaacacaatgatcacacgtacataaaattcaaaagtacattcagtgtctcttagaatgtcac

SEQ ID NO: 135259 - DNA, 302 bp, Zea Mays
ggcagctgctggatgaaatccatgcggggcaatgtggcgtgcatgcagcatcaaggacattagtagggaaagctttcaggtctgggttctactggccaacaacgaagaatgatgcagcagagttagtcttgaagtgcgaatcatgccaattctttcaaaacatcagcatctacccgcccaacagttgcagactattcctgtaacctggcctttcgcatgctggagggtggacatggttgggccattcaaaaaagctcaaggaggatatactcacatactggtcgccattgataagttcacaa

SEQ ID NO: 135260 - DNA, 309 bp, Zea Mays
attcatttggagatctgtttgactctttcgaagacttgagctcatgcttatctttccttgacgaggttgatcttatcttatttctctagtcttgatgtcatcatccgagttagggtcatgtagttaagataattgtggttagaatatatttcatgaggtaggatggttagaatctcggtttgtcgttaggtcgatacagagaggttatgcaaccatttgatgggtaaggtagttgcataaggtcaggtagttgtatatggtcaagttagtctagggcaacaatttaggttaaaatagagtctaatccat

SEQ ID NO: 135261 - DNA, 287 bp, Zea Mays
cctataaccatctgcgtgtttttgggtgcctctgttaccccaacatgcaagcaacctccaaacataagctcacccctcgctccacgacatgcgtcttcctcggatatcccccctcgcacaaaggttaccgttgcctcgatctatcgacatgtcgcatcatcatttctcgccatgtcatattcgacgagaccactttcccctttgcagccacctcagacgcctcctcccacgcctcccatgactttctcctcgacgacgatatggtttcggtgccttgctctactgtt

SEQ ID NO: 135262 - DNA, 367 bp, Zea Mays
attggctgatccaccaccgtcaccgtctcatgcccaacccctaacacaagagtaatcaccttctattccttttcacctaccatcgccacttcctcatcctctttttgacacaccgtctccgccacaaagcatgtccattaagggctccaccaccttctccacccctactcatcctctctgtgacccattgtctccgccaccagcatcgccatcaagggctactcctccacagtcaaagaagcctaaattttgtataccaaaaattggttttcctgttcgagaaaaagaagaataaaactattgctggcatagcgagatttttgtcaagtattgcacggagccacacttcacatactattgatttgtt

SEQ ID NO: 135263 - DNA, 515 bp, Zea Mays
gcgttcccgagcggcggacatcaaatcagacctaccccgagtatttcccctaagttaattgcacagttggtgagctatcaagctctgtccacgtgaaccgagggggtggcggacagatgagtgcgttcccggtgatccctggcggtccagttcaattagaggggtcgaggggcatcaccagcatgcaaagatgctagaacaggggcggggagggtatgaacagacctgtggagggctggccacggcgagcttggttctatggtggcagaaacttgatttgggggaaacaagaaattcgggcacactggtgatcgattgctagcaattcttggtggctgggtagttaatgaccttgcggaactggtggagggctcagtttatagggagagcgagcggtggtgatcaattcggtcgagccgtgctggctgccggagatgaagaagaaccttggcgcagtgaattcgtgtccaccgtcgtggcaacctccccggcgacgatgggacagctctagggag

SEQ ID NO: 135264 - DNA, 287 bp, Zea Mays
gggaaggagatcaagaacgtcaggccaagcttctcgcaaggaggagatcaagaaacccggcctagggcaatccggtcgcaagtcgcgacgacggaatcatgggtgttcttggcacccttgctagaaatctggacgcccttgttgggtaagtgcgtggaatgtttatgtctcaataccaagtcctggaaacatttgggtgtcccaaagcctactggccttgttctcttctttggttcatatgaactctgaccgtctccataattcttttctgcaccggatcaggccag

SEQ ID NO: 135265 - DNA, 569 bp, Zea Mays
caacgcagaacttacctcttcctaggcgtggttgtcagttcctttgttatagcgggagtagcacctggaaccacagcgctgctgccaataccaatagtctgcatataaggggtcagtcacagctcgtactgtttgctacataaatctcaaagtctatgggatgcacaccttatcttgcacactggttgcggaactttgtggtgtgagcggggtcaaaggcatgaccaagttagaggctttgctaggagtgtcttcaatgccactgggtgcgccttgcaatagcacaagttgtgacttttttggccccgatgaagatgcctggatggagtcctttgtagtacctatctctgccacgactgtgttgacctggaaacaaatatttccagtattgattgtgtggtcagagaaactcacattccatatatacgtcttctcgagcagatctgtgattggatcaggaataaagccgatcagattgttggcaatgagcatatcacatggcttcttgatgatgcgttgcgccatccggccaaagaggatgaagtctgtgtcacccgtctcatcccctg

SEQ ID NO: 135266 - DNA, 323 bp, Zea Mays
ccggccgcgttatattgaaccggctgtggtgcctgagtttggcggggaggcctcttcagctgctaaaacaacagaaactattcctcccacgcagaagactgaagaaccgactataatgccgaaggcaccttcgatcaaggtggttgaactgaaggtggataaggctgaaaagccagaaattgaagaaataacaaagatgccagaggttttgagccctccagaaaaggtaacagtaccaaaggtacaaatgggttctgtcgtaactcctaagaggaggagaatggtaaatgtactggatgtgctagaaacaaccgaaaccttga

SEQ ID NO: 135267 - DNA, 409 bp, Zea Mays
actgactatctcgacatcccactcaaggacagcatcaagggatggcgcctggaatggttcatcgtggagaatcatgggaattctctccccccacggtcagggagacagccagatgttcgcactccgagctggaccgaatcccccacggaccaggaggtggctaaggcaggggctctgcttgctgaggttgggctactgaaagagaggggtttggctacagaggctgtggttgccgacttcattttcaagaacattcagccactgaaagacagagcataccccgcatatctgtatcgaggcctggctgattcaacccgggtaaccaacagaagaattcctgttgtggacttggtgggtcggctcgagatgatactcagaggcaaggtgtcgaacatcggcgctcctgttg

SEQ ID NO: 135268 - DNA, 358 bp, Zea Mays
ttgacaaaaatgaaaagctcacaggaagtggatcagggaactaccctatgtagtctgaagtttgcgaacccaaccgagtcgagccttacatgggaatactccattttttatggtatgcggattagaggcagtgttatcagcagacctggcctttggagcacctagattgacatttgaaaacattgcgaaggtggaagcagctcggcttgaggaaatcgatgtactagaggaggaatgtctgaatgttgtcattcagtcggctagataccagcaaaaccttgaggcgctaccatgataaggatgtatgacaccgggtatttgtagtaggagacctagtgcttcatcaaatacagtaagg

SEQ ID NO: 135269 - DNA, 649 bp, Zea Mays
catcagcagaagtcaaaactctgtcatcaggagcgctggcctctaaggcgactccctgacccgaagcttgagctgatgccatgcaaccagaatgtggaggagaagaccctacgtgaacatccatggaagtatgagaggaagaacctactcggacacccttgggggctgggtcatagctcgcgctacccatctgagccggatcatctccggcaacaccctcgggggctgggcaagcgctagcgccatccttgagggtcgagccctttgtaacagccacctctaaggctgaaggaccttcaaccacttccatgggagcagagcaatccagaccagcctcctgacccttaagaccgtgctccaaggtcgatgaggcacgagacgctgctcgagataactccaacccggcatcaggcacatcagcgcaaacttccatcattccaccatctgccggctctgacaacagatcttctgggaccatgtcttcaagagtctgatcaaagtttgctagagacaattcttgcagaccaatgagggcagacaaagctggagaaggaacaccactaatcttcccgctggctatgtagcgccggctgttcttccgaattagagggatttcatcctcctcttcctcatcttcatcaacaatgca

SEQ ID NO: 135270 - DNA, 411 bp, Zea Mays
gtccgagctcacagtcgataacaacaaatagtttgatagccaggacttcagggacttttgcctctccatcggcaccaagcctgccttcgccttggtataccacccgcaatccaatggcgtcgtcgagggcgccaatggcaagattttcactgccatcaagaaaagacttctcaacgacaagaagggtaaatgggccgaccaactacctaaagtggtctgggcactaaacacgactgaatgccgggcaaccagattcacaccttttcgtctactatatggatcggaggccatgacgccgcaggagataaagcatgggtcgccccgaacaagcacatcaacggtccccgacgtcgacgaaccaacgtccaaagacctcatcgacggagaccgcgtcctcgccctgcaggccct

SEQ ID NO: 135271 - DNA, 525 bp, Zea Mays
ttgggacgttccattgattaacatagtagcttttgacatatggggttatttgtctgcaacctgactgtaccagcggattgccggattctaaggaactgttcagagagaaaattgcgggaactggtactggtgctcaatttgtactagtacataagatactgatagccatagtgttgctacttttattgttggaacggtatgtcatgccgacattgggaaactactaacaaagtgtaaatatgaaaatgccgttctaggagtactgtagtaattgttctttcgaagagggcagcaagattgtttaggtgatcttggacaaactgtaggagtactgaacgagcccaagaacatgcacaacccgttctggtccttcccaacaataagtttcctttggtaagttgatgtttctagaaaaggataaatgcctcattgtccagaatagcgaagccatgcaaactacttatacataatggagtcctctcatcctctgtcaccatttttactagggctgttggcacacgtggt

SEQ ID NO: 135272 - DNA, 653 bp, Zea Mays
gaaagaagcccatgattctgattactctatccaccctggtagcactaagatgtatcaggatttgaagcaaaagtacttatggtatgggctgaaaagagatgttgctgcacacgtggctaagtgtgatgtgtgtcaaagagtcaaggccgaacatcaaagaccagctagactattgcacccacttaagatacccgagtggaaatgggaagaaattggcatggatttcattgttggactactccgcacccctgttaggtatgactctatttgggtgattgtggacagattggcaaaagtggctcatttcatacctgtgaggactaattacacgggagccaagctagcataattgtatatgattcggatagtttgtctacatggggtgcctaagaagatcgtgtctgaccgaggatcacagtttacttctcgggtttggaagaagttgcatgagagcttggatacacagttgaattttagttcggcctacctcctcaaactgatgggcagaccgagaggactaaccaagtgttggaggatatgttaagagcttgtgctcttaaacatggtggtagttgggataagagcttaccatatgcggagttctcttacaataatagctaccaggccagtttgaagatgtcaccgtttgaggc

SEQ ID NO: 135273 - DNA, 710 bp, Zea Mays
ggccagcccttgcccctcttgcccctgcccatggtcatgcaaaaagtggagaagtgacaaagaagaagagagcaagtgatcaaggacgagtcaagaaaacagctagggcaagtgggctatttaaaggggtcgagggttgatcgtccgcttcctaccgcgctcgccgaacagtcgcaagaattcaataagcaattcaagccgcctgaaaatgagtcaggcaactggcgccgtttcgcgtaacacggcaccggttggacccaagtcaactgctctggcaaatgattacacctctccgtcacatcaagttactacttcaggacaacgcgataaacactctacgcagggcagacaccccttggacacacccattgggtggatcgcccataatttttctagattttttgaagaagtgatatccacaaaatatacgcaatgaatgtatcacgacaaaagaaggagatcggctgaaacgggaggaagcccaattgtggttactgaagcgcaagtccaatcaatagaagcattaaagtacagagcagggtggtgtccagccgagggccatctgtctcaactagctagatgtccaacttgtcactgatcaaattgattccagacctaacaaggcatggatagatggcatcgcctggttattctgaaaatggttccaaaagcatagagatgaagacctttgaatgcattacttctaaaat

SEQ ID NO: 135274 - DNA, 429 bp, Zea Mays
ttccgaacccctctggtctgttcctgtcactgaaatcctcagcaaaaaagatgttctagctgtttccaaacgaaaatctcatcagaaacttgacccatcctgcgaattcgcggttggtttggccaccggccaacgctgcctgcaagtctccgcggaacacaccacagtccacagtgtggttggggaaagtgtacgttgagttcttgacgaacatttgccgacggtgagtcggtgaccagaccacgcctggcctggcaaagcgggcgcgagttcctcccctccaccaacttggtcgccggccagagaaataccgcagctgtatgtggctaccgagctgctgcgtcagtgcgtcatgtcaccctcgcgcttcaaccgaattttttgttttttagcctctttcgagtcaaaaatttacgtttggacccccag

SEQ ID NO: 135275 - DNA, 509 bp, Zea Mays
cggcgttgatcatgctgtctggcgctgacgactatgctagaagcagcagtgccaggaggtgggttaggagggtcgccgaccatagcagctggtgtggcaaatggcgcatacatagggaacaacggcggcgagaagcagaactgcgaggctaaacctaggcgaatgataccatgaaagcggaaacagatcgtctgcagttacgtctggtcattgacatgtggctcaggcctaggccggcccacacgtcagtgacccatctgcagttacgttcagggacgtaagtgcagaggatttgctcgtcatgaaagcaatagagatagcacataataatgaattgattgattagagagacctctgtgtatatgggagaggagatctcatggcttatgaaaacagaaccaaacaagatctccccgtatctctctgacccatatataagggccgacctgctatacatggcacgtgcccataccttatacacacacacacacacaccatatattgcagtc

SEQ ID NO: 135276 - DNA, 858 bp, Zea Mays
ccccgctagtgcagcggccatgactagcagactgctcagtatgccgtgtgacgatgtaaactcagcttggatcgcccgatgatggccggtgagtgaggggcactcccatgttcattatgcaaaccgtgctctgtccgctgtcaaagcgcgtggtaatctgctgcctctcttttcactttaggccaacttccgttgcttgctattggctgatctgttcggcagccacttcgttgagccgtcattctccggacattattagaacgtgtcattagcaaacatgatcgtgcaggactggtaacttggacgtacgcttagtagatcagaccactggggggtgtgcactgcttggtagaccatttggacactgctcagtagaccatgtgaacttgcacaacccgatgaccggtcaccgtttgcaatgtctatgcaaagaaagcacatgtagtgtgaaactctcaggctaatagagagagatatttagttggctgcccatctttaggccaactgccactgcgatgttcacaggtacaggctggtatgtttgggtcattgggtgagccacttcactgaaacgtccttctctaggggtattggattggaacggaacggttcgttcaaccccaggatgatacggagcaggaagaatccggcaaagatccttatcaacagtggaagccacgagctcggaagaaggtccacacaccacggccccaagcggacggccccaactttcccggtcttcttcattgcatgcatgtatgcatcagtcgctatgcctccaatgacgcggcaagttcgtgccatggaaaggtgaaggtgaagggaccagttgggataaccattctgataaagatgcac

SEQ ID NO: 135277 - DNA, 351 bp, Zea Mays
tgatgatgcctttggaggaacacgagtgtttggtcgtgtcgtgtgccagggctcatccggccgaagcactggaactccggaaggaagagctgtaatacatccgggaataaagtcggcattattgtatcgtgaaggctgagaaagaatggctgggaatatcggaaagcaggaaatactctgcctctgcttgcatgcttgctgctgaagttgcttgccccctcgcgaaacagctgcggtctgcagtctgcgaaagacaggggggtgaatcaagaggagctgccactgcctctgccagagtctgtatctgtctcttaaacaagcggtcgtcatatttcttccttgccatgtccc

SEQ ID NO: 135278 - DNA, 629 bp, Zea Mays
attcattgccgccatcattgtaacgaggggtggattatgcacgctcggcagtttgtcaccatagtaagttgttgtgaagtttgacagctcctctagaatatatgcctctacaatggaagcatcgattttgcatttatttctacatttcttttgaatagtctttagacatctctcgattggatagcaccaacgtccctgcacgggccctcccattcgtgcctcatactggagatgaagaatcaaatgctgcattggattgaaaaagccgggtggaaatatcttctcaagcttacacagtaacacgagtgtcaatctttccaagtctgcaatcacgttccgagataactcttttgcacaaagctagcggaagaaattgctcaactctgtaagcgctagccagacatgctcagggacatagcctcgaaccatcgcaggaagactccattcaatccatatgtggaagtcatgactcttcatccctaatactcgcagagtagctaattcaccccctactcaagttagctgcatacccattagggaacattaacatcttgatccactgaattacttccttcctcttggccctgcttaggacgaaatcgtccttaggacttctccatgtctttcca

SEQ ID NO: 135279 - DNA, 627 bp, Zea Mays
cctaagaataatgagttggtatgtaacaagatgagaatgttgaatatatttagtctatcttgagggagagtgttggtgtaaatagattaaatgtaaatgacctacttgaatataaggtgtgtgtgctgggaccaggagagggcaacacattgaaaacaacacaagtaccggcagcaaaggatctgttctagctcataatatgtgcacgctttgccagagatgtccatgtctcttacatcgtgagagaatagatatatcagttttctaagggcagaacagcagaaatgaacaaatccctattttattcacagtggttttcagagggaaagggacttgcaagttaacatttcctgaatttacacttgatttctaacgcctcaccaatgccggatcattcactccgacagaagtttaccttcagtccaaaacatttgttagaacaaggataaaagggatatttatagccctctccaaaccattttgcacaaaaagacagtatggtaataaagaagagttgcattggatgattcaataactggcaggagttgctgctacttttatttcgcaattttggattggggtcttcgttgcgtttaactttgtagtatctttgatttagtagttggc

SEQ ID NO: 135280 - DNA, 677 bp, Zea Mays
atcttggcccgagtgggcagcctggcttatcgcttgctactgccggattccatggcaggggtacacccggtctttcatgtctctatgttgaggaagttcttgcgggatccggaccatcagattgagatggaaccaattgcggtgcagcaggatctgactctggagtgtcgtccggtgcgtgtattggaattctcggagcgtgtattgaggaagagatcaattaagtatgtcaaggtcttatggactaatcagtctgagcacgaggctacgtgggaacttgaggagctgatgcggcagaagtacccggaacttttcgttgtgggtaagtgttgttgattcattaatctattcttttgtcattccgatagaagcgtcagaattcgaggttgaattctttttaagaggggtagagtgtgatacccggtttgcaaagaagagaagttgggggttgttctttttgtttttttcttcctcatccggttgttgttttggggatttggaatttgtggaaaacgttcacaattatggcagtagaatttatttggtttggcgctggcgatggggtcgggagctgtcgcgtgggctagttgggccgcggttggtgattcggcccactattcctcccaaaccctagccgccctccctcctcaccccctccccctttgtgcagccgcccc

SEQ ID NO: 135281 - DNA, 689 bp, Zea Mays
gtattcattatagtttgtttctaatcctaaccccaggtgaagttcgtgttcaaagtttataatttacaggtttcgcctgttcacccccccccccccccccccgccccccgcccctttagtcgactttcacctatttctctatctatggaatctgaggaggatgatcaatcttcgcaaagcagacgtctgatctctcattcttaggggactgaacgtgggctacgtgatagtgcccaggggtctgctcgtcgtttagttcatgaccgagtaggtcttagggatgatggtgttggctagtcaaataattgttcagatgatatgagagatgggagatagaattctggtgttgtgactgatgaatctgatctaggggaaatggcagtgtttctgtggttgtggaggaaggggaaggtggtctgcagatccaagatgacaaccctgcagctatatccatcaatgatacaggaaaaaaaggatgtgggtaatcttctggtttgctctagaagatggcttaaggcgaatgatcaaactcaggagttggagacaatagatgttgaggcttctgatagaaggggggaggacaagaggtcccttttggtggctgttaatcagattacccttgtccccacccctctcaccttcatccactctaagactgatatgagtcaagatgttaatcctaattctgg

SEQ ID NO: 135282 - DNA, 737 bp, Zea Mays
ctgcatggaagtacgcccgcctttgagttcatcgtctgcagaaaaaatggcaagagcaaccaggaatgaaataggtagtagcgaaatcaggaacttacaactttcgagcttcacttctcacagcaaggatgcgaaaaattacacgctacactttgatcaagtaataatgtatattactcatctgttgaaaatcattttgatcaagtactagactgttgcgaagtcaacatgaatcagtatatagttaaatggctgtcctgctagttgttttgtttatatcaagaacttttttttagataatgggatagagtgttcccagcctacatcacgaaaatgacggcctgtcacgccaacacaagaccaacaaatccaactcaaatgacggcctgtcacgccaacacaagaccaacaaatccaactcaaagagccacaagcggcgatacaaaccccaaacgtagttgggtggacagcgaaaagtaaaaacaaaactcacagagcaatcctattactaaactgccacccatgaaaagcgaagatctgcatcaccgtcgtctcaagcttcctgcaggcttccctgatgaccttggcgtcttcctcatgcctttgaagttgcgcccagaaacgacaccagtaagttcctctgtaaagtacctgcatgtaagttttgatcggacttttattaaaaaccacatcattcctacttagccaaattgcccagcatatggctatagccccta

SEQ ID NO: 135283 - DNA, 394 bp, Zea Mays
aacggctcaggactcgacatcagacgatattattgtattttgaaattcgcgaaatcatttcaagaatactaaactgatattcttactggcagcctacgcttaagtccatagccgatgataaatgcatagtaacacatggggtgttacaacaatggctcatgtcagtccactcatcggacatgagtgtctaaagcatcctcatgcttctttctaagttctgattccctattaatagccttattaagcaattgactaccccttacctcatggtatgaaggtgaccagtatctaggaccatattgttcaatagactcaaagagaaaatttccagcttcaagagttaaccatatttaatgatataccattctcagacaaggaatcaactgcacagtca

SEQ ID NO: 135284 - DNA, 306 bp, Zea Mays
gaacagtttgttgcttccggtcatgtggcacaaacagcaagaatccatgagccatatgttctctaggtctctatcgtgcatcaatagaaaaacacggggtgagcaaatggcacaacattggggttaagataataagaataatacaagtgctacgacatttgcccctgaaaagtgtttgggaaaacaccaaacatcgtcggtcacaaatggtgaaagcgatcaccataagaaagaaactgtagtccactggggaagtaagaaccaaagccactatcacggggtccatagccatatggcacacgaaca

SEQ ID NO: 135285 - DNA, 564 bp, Zea Mays
taccacatcagtcaaatcacaaaggccaaaaccaactttatagcacaagcagccatcagccatgcgtgctccggcccagcttggcccaaattgttcaacgtcttatgcggtcctagcaaggtgaacagcccacggtcggtcgcactccccaatccctatccacagtcgtactgccgcacatcccctttggcctcagccacgccgccgccaccccattagtcataagtccaccacctaagttctgtttggaatccaccacctcagttttgtttggaatccaccagacgatcgacatccatggcgccaacaactcgtcgccggttgttggaagattcatccctgtcgtcgccgtcagcaaaccgacgtcgtttgatggagccaccaccgctgtcaatggcattatcaacaagacgccaattgatggagacaacctagccgcgcgacatgccgacctccctgtcaggctttcctgatgctagtggtgagccaggaaaccatcttcttcacataatctttatatttatcctgcatattttatctctcttcggatcatgagccaatata

SEQ ID NO: 135286 - DNA, 611 bp, Zea Mays
tggacttgtcgcgtagtgccatcgtggtgaaaaaggagttggtacgcctataaggtggtcgggttcctttttccaatgccatctcctgccactattgttgcagctttgttgactttcttggagaggtttcgtgaagattacgggccacagtgcatgcgtaagcatgcctcaggccttggtgtgggggttggggttcttctgaccccaacaagaggcctaagccggagtaggcattgcagggctatctattgtggttaccatcccttagggttgtttaacattacccacgagataaatcggtagatgacgccatgtagttcattcgtaccttcgtcattccatgactgacttctatggtagaaagttatatggagggtcggcttcgtccgcgggatggttggccttgacacgagcaaggttcaagcaatcctgtgagccagcttgtcttagctcgattggaggaatcagctttaggcacgtcctacccctttgtggtttgcctgaccccttctttaagtcaaggaaggggagtggtcgggcgcccgtggcctgcctctgcctaccagagtaggccaggtttcgtctaggcttggtttcagcatgctttttcc

SEQ ID NO: 135287 - DNA, 467 bp, Zea Mays
cagcgagacacgcaacaacaagttgcttcaggttataattctgcaaacttattgttattactaccaaatgcataatcattaagatttagactgatatgtgcaacactattttatccatgagggtccttcaggggctcatgcataccattcgtcgtttggagctattagttgacttcagatcaacaagtaaaatgaccatcagggtctagcgctcacaaggacattcactggttgcattttgctttgaggcacgtaggaaaaatgtgtgtttatattggtagtaaagtgcacgacatcatgccaatgctgccaagcagagaattttatatgcagagatgtatagtccagctcgtttttattattgcccacggtttacccaattactcataccgttctgaaattgggtatagatttatgcaacattcttaggtataataattttgagagagaacttataacaatagtca

SEQ ID NO: 135288 - DNA, 347 bp, Zea Mays
gcatcagggacgacgaagtgcggtcctcgtagccggcccgggatcgatcgagtagcatagtacgtgtgcatggcgaaggctagcaccacggccggcgtggtcgtcacgctcctgtgcgtcgtcctcctcctgtcgtccgccgtgacgacgaccgaggccggcaggcatctggggacggggaggagggacgacggcgcggccgtgatggcgggggcggggcggccgctcggtaacaaggtaatacgggaggaggagatggaggcgtcgacgacggacggcgccaccggcgccgccggtgtcggcgagtccaagaggcggagccctggcggcccggatcctcagcacca

SEQ ID NO: 135289 - DNA, 1016 bp, Zea Mays
ggaaaattctgcagaagctagaaagcacaaccggagcaaattgtgcctctcataaccaatttttctgttgatattttgcatgcaaattctgcagaagctcgtcggctaggtggcaactacagcctacatgttcttttagaatagtgtggacaagagcagataccttccgatactcatttggggcacatcgacatactttgaatcttttcttgacaataacggtaagtatgtattctccacatcgtgcaggaaccagcttcttttgttttgactgtccccatcttgccagaaatcattgttgtaaagggctattgaggtcaaccggcagagaattatttctttgtcgaaaattggaggaataatcgagagaagtggccatagttggaaagatccttttatctacttattatagattattaggcaactggtgtttctatgtcagttactttaaggcccaatggtttcgttgtctcaggtatatatttatctctctctctctcttgtcttttattagctactaactgggcagctgcaagaaaggtgcaaggaaggtgatgatatgctgaggcatcgatacatgcattgtaataaagttcaaagagtagcagatggatcatgaggtcattggttttgttcttttttgaaatttcatctccataacgtgatgatggttgtcagcattaggattatgtttgatcactcgtccgcctcactgtttcagatcggaagatcataggccagtgtcatcctcttcaggaggagcttgagattaagataattaagtcataaccatgactgagtaattatatgtcagttctaattactaaatggagaaggcagattggcttgagcgcagtataatgcaataagcacatgctctaacaagtcattggcgttgggtttctgctctaacattaattactcagtaaaaaatactcagtctaacaaatacaacaaccaattaaaactggaaattgtaacgcacaggcatcacgcaacaactatgaaagaataag

SEQ ID NO: 135290 - DNA, 735 bp, Zea Mays
ctttctttgatgatgatgctgatagtaaaagtgaggataaaggttttgataggaacaacgaagatggtctcaacaggaaggaaaatgctagtgatcagccccttaacaagctggctggtggggataataccgggcacaaatcagttgctctcggggaagtcactaccattgcgggtcagccgatagatggggtgttagctgctggttctttgggggtcggtcaggagctacctgctgatccattggagtccagcatggacgggaatgttgttgatgatgagaagcttttgatgagtgatgctatcgggaaggctaagcaatctgaggtggttgctgctgtcaccgatcaggctggggctattattgctgatcatgtgccaatggatagtccagagttgatgcaatcgcctgatgatagctgtgacaaattgaagcagctggctgctattccagaagcttcacaatctgtcgcagctggtcgcaagaggaggacgagcatcacggatgaaaactccttggcccgtgctgaaacgctgaaggctgaatgtaatggaggtaacaacccatctccctcctctatttcatgtaataaagttttgcaaactcctttgaacttggctgtttcgaatcttgacgcgatcgatatctctctaggtgtagaggaatcccatttagctaagtcaatccaggttcttaatagctatgataaaggtatggtgagtcaggtgggtcggg

SEQ ID NO: 135291 - DNA, 514 bp, Zea Mays
gtggatacttgttcttgattgtaacttcatttaaggatcggtaatcaatacacattctcatgcttccatcctttttggtgacaaacaatactggggctccccaaggtgatgagttgggacgaatgaaccctttttgttgaagttctccgatctaaagtttcagttctgccaattctgtgggtgccatgcggtatggtctctttgcaatcggtgcggtgcctgggaggaggtcgatgtagaattatacttctctttccagaggcattcattgcaactcttctggaaatacatccatgaattcctcgaccacatatatgccttctgctgctagactaaacaccattggatcttgggttggcggttgggctttacatgaaactgaccttccctgatggtcggtgagaagaatagtcttatttgcacagtatatgatgccattgtgccgggtcaaccaatccattcctaggattacatcaatttcgtgggatggtaatacgactaagtcttctaggaa

SEQ ID NO: 135292 - DNA, 468 bp, Zea Mays
attagccaccttcacctccactgctgcacacttttgcacaggcaagcccattttatccactaagttttgactgacaaaactcagagaactgcaagagtctatcagaactaccaacatctggttatgcacaaaaccttgcaccctcatacatccatcactttccattccactgatagcatttagagacagtttatacaattcttcaacctccttgtcttcagactctagatgctccaacacaggatcagtcaacaccatgcccatgtcttccacggttaaggcatgcaactgagtcaccaccctcttaggacacttcccttggtgacctggctcaaacttttcaccacaagtgaaacaaattccattagctcttctaaactccctgagttgcctctcctttgttagatcacccagaataaatcctcccttattgttagtcttcagattactgcccacagccttattagc

SEQ ID NO: 135293 - DNA, 495 bp, Zea Mays
accagatcgtctgtgtgacatctccaccaaatcgatagttaccttcacttgacggaagatcgggcacccccgttcctatcaagtggtattcaaagactcaggtattaccatcaggattactctagtttagtttatgtttttcttcctataactctagaaaattgccatacaaaaaaattccgctatcctagaaccctgtttagccttgcaatttcgtttcagattgctttgttgagtttgtgtccgtgttcgagtcttgttgctggtttaggtcgtgttgtcatcgtagttcaactactccgtcgctgttatttgtttccgccgctatcccatccacctttcccagattacaagtcgagacaccacattactcgatttgccctcgctagccaccttgtgtgaactctcgccacgctagccctagattaggttgcaagccgccttgcatcgcagcccctccttgtttcatcatctggcgcttacctattgcttata

SEQ ID NO: 135294 - DNA, 600 bp, Zea Mays
cgacggactagaaggggtgggagtcgaggaccgcatgaaagtggcgggggaggctcgttggcgttggactggaagcgtgaatgggtagcaacaacgtggactgaagagtgagtggtagttggaagggcgactacagtaggattgaggtgcaagcaagaagtggcgactacaagcattagaggggatgacctgcaaggtgcaggctgcggccaggggcactgtagccgtcgaccagacgccaacggtgctacggtctatgggacttaaaaggggacacgacacacagcgcaggaagtcatcaaggctagaaagagtgatcaacggtgtggaattgggagtgcttggggtttagggagttagggttttctctttattgtgtaataatatgtgttaggctaaaaataaactatggtccgatttcggatatctaatggataacctaagggtgagaggtaatgtcctaatacatgcccacccaattttgggtcggatatgcggctgacccacaggtcaaaaatgtatccatatccggcttcattaggtcggatatcagaagttggtgaaggaggttattaagatcttaagaaaatcgtgaagttg

SEQ ID NO: 135295 - DNA, 542 bp, Zea Mays
attcattcagcttgaaggctagtttagtcggttgtttgtcatggatattgacgactcgatcggagtcttggcaaggaagatggtaccagtgtcgtctactttttctaagctttgaggcaaagcatacatcactatatatatatgcatgcaggcaggcaactactggctaacgaatagagacaggcaggcaagtaaattaataaagcttctgttgcctgtagctgtaggaaagatatatagtagctagggggggtaaggtaaggataggcaggcaacgaatatgccatgcaacttgctgttaatcttgaccggatttctttggtacgcagatcatgctccatccatccgccggtgatgatgcttctcctctcctacatacctagccgactttagacagaatgtatatcccatatggttatgatagcagagatcacattcttgatccaaagcagcagccacttactcccaactgtcaataaactagtttgtaatccgtctcgcgcgcgacagaataacatggctagctagtgtgatccatcgat

SEQ ID NO: 135296 - DNA, 379 bp, Zea Mays
tggaaaccgaagcccagctttgaagaaactttggtaaatcacaacttcgtcttcctcgggagcagggacgttgttgtctccaccaactctcacaatagacatatcccgaaagtaccttcctctcatattgtcaagatgactctgtttaattgttgatttcccaaaaattgtatgacttggcctccacggccgatcctcagaatcttctcccctgctttcagcatcataatcatcactgtcaccggtatctttagacaggccttccagtatttccttagtaatcttctctgtatttgattttgccattgactcgataaacccagctatgtaaggatttgcagccttcttttcctcaaagagcttctcctctttagttagc

SEQ ID NO: 135297 - DNA, 448 bp, Zea Mays
gaaggattggagccttatcaccggactattcactgtgccacttgccgcgcgattgactaaggtgtcctcgccggagtttgtcgtctttcgtagccacgccacgtacttagaagagctaccacgtcgtagtagataaccgtaggttgtctgtccgtcacctgagatattaccctggtgaacgccacggtagtttgcgccggtgactcacccctctcttcaactgtcggtctccccctttcaaaattcagggccaccaccctcaaacactataaattcatggtgctgctagctccgcaaggttgtcacaaagccagagcatccacccctaccctcgattagccaccatagctggagaattttgttcttccccccaaatctgttgtccgcgccaccgtgagacatcgcgttgtggccagtcgtctctaggtccgcccttgctctccttggc

SEQ ID NO: 135298 - DNA, 698 bp, Zea Mays
caaacggcttcgccgaacggtgcgcgcgggattgacggccacggcatcagctggatcgcggcacgactccgtcccacggaggctacaaaggcggaccggctccacctcgtaacccttgcctcgttgacccttcctgccgccataaccccaaatccaagcttacctcgccaaccagagaagaagggagagccgccgcggtgggatcccactcgcgcccatgattggagcctttcagttggctgtgaagctctgctagatcgcgggggtacttcccgggtcccccgttgggtagaacttggtgggggttggtcgtcaatcgctcgccagcgcccaggctccaccgcaggattgcgctacgtcgtgggcagtcgtctgtacgccggatccctcttcggtaagcattcatacgcgttcgcaagaatctgggcactaagtagcacctttcggcgtcgggtttgggcaccgggatcgggcgtcggtgttcaccggcgatgttccgtcgttggccgttggcggcggccaccgtgcgtcgacgccagtagaggggaaggttgccagccgtagatctggtgttcgacggctgagattagatactgggtacccctttgctcggatgtggccgcgccattggattccgatcccgcgatcacggtttgatctatggatttaaaatttgggtcgtcggatttggatccgag

SEQ ID NO: 135299 - DNA, 712 bp, Zea Mays
gatagggttcgcaagctactgagatctgaattactccctttgtatttcagcaagacctatggcttatcgattcctgacaccgatttcattaaaaaaaacctggatgtgctgcctgagtttgatttactggtattcagatcactgaacatgagtcgctctgagtctgaaataggtaattgctacaagccattcgcgaagttctttaaggctcttgtgggtaagtatgctgtaagggatgcaatcttcaagctacccaagtcttgatctgcatttgaagtaccttgagttgcttattgtcaaggactatcgtgtgatatatggtccagccctcttccctaagcttttgatctctataatgtactgcgaaatgcatcgacttttgagtgagttgtgcccgacacatggatagggtgctgcaggcaatgcaatcatggtgacgattgaagagaaaatctttgacttcatgaagtcttgcagtacaaatgctctgctaattagctattctggtgctcatggtgagagggcaaaaaagcacattgggtcagtgaagatggagatgaggcactgacatttgaagttagtgatgacgctaaagatctcaaagcgtcgaatgtccccctgaaagttagaaattttatgggcaacaagaagctcagtgttgagggcaaaagaactaccgcaaaaggaaacgttgagattgttccaggagatg

SEQ ID NO: 135300 - DNA, 771 bp, Zea Mays
agcacctggagcagcggcccacggctcgccgacgtacctcgcagatgcgccaactcccgcagccccaagcgcgacacgctaactaggaaaaactgagatctgagcccgtattcgacaccgcacggcgctggagtggcacactcgcgccgttcaaatttgccgcgcccctaactcgatgctacgctatggaggagcagagaatcgtaggaaaaactcactgggttacgccgcccaagccccacagaagcgcgccaccagcttcgtgatcccgagacgcgacgccgaccgcccttggatgcctgctacacgacgtcctctctctctcctgccccaccggcgacaatggcgagtgggtaatttcgatgctacggccgcgcgccacgacagtactcctggcggcgcacgtgaactcgtggggaagaggagagagaggttgcggctagctttatgggtgcgcggatgaatcgggcggtggagtcgtgggtcaccagcgtccgcggttctcgcgcggcgagtacgtcgcagcggaagtcggcgtccggtgcaacgaaccgaggaagacggaagccgtgcgtgcaaagtatacggtccagtgggacccactcgtcggagagacgccagtggttcagcttgcgcaggcatgcggctggaccgtgggtctgcagtgccagcgactgcacgcacgcggaattgggacgctcgcgcgtgggagaaaagaaaatgggccgaggagaagcatttgggcccagacgcagattgaggttgttttct

SEQ ID NO: 135301 - DNA, 569 bp, Zea Mays
gttgggtcaaaaatcatggtatgtgttcgacatatggattgttgtggctcaaaacttatgatttgtacctgcccgctcatgtattggtcgggttgggtcataccgggttttagtatttttactctttgtttcgacatatatggatcagaggtgtagtcctaattctgatatgtccacagacttgctcaacgaacaatctctataacatctcgaggcccttgctagtgtagggtaggtcttattttgacggcctttcttctgtccatcatcatcgagaggatgttcttgcccatcccactccatggctccacaacatttatttccttatccatatcctccccatatccatatcgatcaagtattgatgctccttctttgatgatcctccttctaccactaaatacccttccaatgatagtcctgcttcataaccttttgtttatccatatcctcctccatatcctcatatgatatccatataatcctctttatgagccatatggtgctcctcatatgttccttctctagtatggtgcttctcccatatattgtggttgtgctcctttttg

SEQ ID NO: 135302 - DNA, 841 bp, Zea Mays
ctcagctatgtcatctgggtcaccattcttacagttataccacctatggccatatcccttgcaaatagggcactggtgtgaccccttctttcttgtagtgctgccaccagcctctgtacaactcttgaaccgctgagtatgtcttcttccagctatagattttagaagtggtgggtgcatgaagaaaccatgattagattctggccactggtccttgtcaggcatggcagggattaaagtctgatatgctgctctaaatttctcaaccgagtaatacatgtcaacatatttctccaatggttccctaagagatgtgatgaatgcaatggcatgtttgcaaggaatgcctgagacttgccattttctacaagtacaagttcgttcagctaggttgactacacatttgaagccactaccaccctttacagacacctcaccaagaatatccccactcctttgcacttccatatccaagttaaagctttgctcctttaaatccttcacgatgtgtggcagaattatccctccaatcttttgagagattgttcttctaacatcccacttgtccataataagttgcctgatcttgtccatcaagtcatctaaattcaaccccttgtacttcttaacccaattgttgaaacactctgccaaattattggttacgtaatcaaccttgcaaatggtgcagaattggcttcttgaccatatcctagtatgacattcctttatgtaattcatcgctacaggtttagcctcatccattgctttccaatgtttgtcaaagaaatataggctccatgaataagctgctgcccaaagatggtcatcaaatatcttg

SEQ ID NO: 135303 - DNA, 765 bp, Zea Mays
ttcactgaaaccgcttcgaaggaggattccatcctttgaaccatgtcaaggtacttttctaggcctgggttatttcctttgtttgacttgtccacctagcctatgatgacttgggaatctaatttcaagactacccttcttacacccattacctttagtttcctcaatcctaggagcagagcttcatattacgctacattgtttgtacactaaaacaacagctcgacaacatatgaagttcttacattggatggtgaaataataatagttgtagcaccagccccgaaggatccccatgaactgtcatagaaaactgtccagattgattcgtttgatggggtagcatcatcttgtggattaggagtccaattagcaatgaagtttgctagtgcttgggattggatagatgatccgtgaacaaaatcgatgacaaactcattgagttctgctgcccattatctgatttggtctgaagcctcactgtttcttatgatatccttgagtggctgagatgatggtacaataatgttgtgggattgaaactagtgccaaagctttctcgaagccatcaggattgcatataggactttttccatttctgtgtagtttcttttggatgggcctaatacttcggacacggagtatacatgtatttgcctttttataccttcctccaccaattcttgacccaaagcatcgctcacagttgactgtgaagttgatacataaagcaataaaggagcccttggcgaaggtggggagaat

SEQ ID NO: 135304 - DNA, 634 bp, Zea Mays
ataaaatattattgcatcatgttgggattattttgtttgtcaaaactcagatttgaatttgaatttaaattgaatgttgtaaacttgaaatagagaataaaagagaaataagaaaagaaaaagaatgggaaataaaataaaaaaaagagaaaacgcctgctgggcccaaacttcattcggcccattgaacccccctcgcgctggcccattgccgcgccttaatctagcgccgacacctgggtccggaatgtcagccaccctgtgctcgctttctctgttggtcactgctcggtggggtcaccatgtcaggcttgtctcccacgcgagctccacaacagaacgccggattcgtcgcttgcctgtgcgcggattccgccgctgcccgttcttccctcccccgtatcacgcgcgcgctgactagcgcctcccgcggatccaaagcctcgtggccagggataatcgcgcggactgcgcgccctctactgccgctgttgggtgggaccgggcgtctcctccatccgtctcgcgccaagctgttgcaaccgcccgcgaatccagctcgggcgtagcgcgcggagcctttccccaccctcgcggtacaagagtataagtgcggggcctcgtacgccccttc

SEQ ID NO: 135305 - DNA, 342 bp, Zea Mays
caccctcaaaggaggacgggaagaagaacaccatcacgccggctcctttctaccccgacatcttcttcatccaggggagattggagtcagcgcccatttccgacgatgagcctaccatgcaaggagaggaacctccccagcgtgaagcacgatgacagaggaacagacaccggaacgtgcagtgacatcatgaagccggggaacgggatccggtgcagcccgtatctcgagacgaagcctcaaaggtgggagaaactcccgacgaatgagtgcacttagaaaggcacaactctcgccgccacgatcgccgacaatctcaagaccgggagcgagagctagccg

SEQ ID NO: 135306 - DNA, 443 bp, Zea Mays
cttggtttgaatttagacaaagaaacagaaatttaggcactcggctcagaattgatcgctcgaaacagggaaatgtgtgaaattgaagcctagtgtattggattggcgtgaaattttgcgactatgttactgaaggtgttgtgaatgtgcctgaaaagtttgggttcaatcagagcaattttgaccggtttgggcatttcgcgcgagcacgtggcgtgcggtgttctagggtttggaggaaatggtcaattaaggctgtgaaaccctccctaaggagctaggtacctgcaggggtatccaagggacacaaagaaacacatcccaccacatggattcacaggaatatcaagaattgaagatagggaatcaaaggcgggggagaggttgagatagagctcctttttagatgagaacagagagaagacagaggaagggaagcaggg

SEQ ID NO: 135307 - DNA, 749 bp, Zea Mays
ttgagttgtgtatcttggatgacttgggtctgagttccccttgcaacgttgcatgctacccccttttatagctcgaagggtggcgtgtacaagagtgctgagccacgacatgtgggcccaggagcacaatggatgtaagacttggggcagcaatagttggctgttggagcaatcttcccgcgttctgacacccgtggtctacgtagtgttggcgtgttggggaagcttgtctggtaatgctcaagtgtcggtggacatagcgtatcctacagcgcgggcacactgttcggattagacgggcacgccgcctgctgtatggcctgggtgccgtctgccagcggagtggacatgacgcattaaatgccgaaggggcacatcacctgacagcagggtggacaggcgacgcatcctctccacaataaatgtggaggccacacgccccaaagctcttacgtcatgctccgcccgctggcctacgtcacgggcaataagccatgtggcagcattgggccctcggccgagcggggagcggaggcgctccggatagagcctggacacgcgtcaacaccggacccatgcctaggtcacggctcttcctctctcgggaccttgttatgggtggtccggagctcacttggtggggtccgaactctatccaatggctccgggctgctttacttcgggggtccgggttgtgcgcacaggggtcctgcgccttctgggcccgatggcgttgtctccgagaacgc

SEQ ID NO: 135308 - DNA, 311 bp, Zea Mays
ctttggttttggcaagcagggttgataatacataattgattgactagagaggaggagagatcaaacattcaaaccctagcaaaagagaggacggaaaatggctccgctgaacacggctaactgccacccatcctgggcttgtgtctggacgtgtgtgatggctgacggactaccacgtcgtcgtcgtccaatgaacccatcatgtggttaccatgcaggcgtacgtggcagattgaattggcacgcgacgcacaagcacaaagcctcaacgctagcttccaagcacaagcaagctctgctgatgcactgtg

SEQ ID NO: 135309 - DNA, 444 bp, Zea Mays
gggatatgcgaccacttggacttgatgtatggatcctgtaatcccaccaatcgaactcatctatgtgcctcttttctttgtctcttttttggttcgaagctttacccccgcccatgatggggaatatatgttttgacgcacacaccatgctattgattgttctagattcgaagccttccttctatcggtttgatatggctcttgggttgggtacttgggttgactaaaaggtggatgctcatataatagatttattgaagggtatgattggtgggcaccccaatggtttggctatggatgaaccgaagcatgtattttgaaggctgcatttttggttcttggtattagacgtgctgcagaacataggggcgggcaataggatgccatgtggcatacttcctttggttgcttattttttcttgtggctaccaactctttttgttt

SEQ ID NO: 135310 - DNA, 863 bp, Zea Mays
ccactttgtaataatagagaaacaatttctccttatgtcagtttaacctttgtgcatcatcacatgtgtacaccctaggtaaaaacaaataattaataacataaaagccactagaatcatgcatcatgctggtggttatatgtttgtgcattcactcatggaaataatgagacaagaaatacattaaagtcccaaagtggaatttagaatataaaataaaatctaggatttagaagtggagaaagaaaagaaataccacataaaacataggaaataaatatatacataaaaatatttccttcatccccaaaatttaatttgacacattttatacatgtgcaaacctataactgaagttcaaagttgaatttgaaattcaaaagggaaaggaaaatctaagtttaagagagaaaaacaaaagaaaaagagaaaagaagccaactgggcctcaggcttcatttcggcccactgaatctttccagcgcgcgcgcagcccaccttcattcccgcgccactcatcctttcactgtcagatggggcccgcatgacagtcgctggcttccacacgctcgcgttacctctgcgcactgatccgtgggccacagcggacagtcacaccataacgtcgtgcggaaatccccgatggctgacaggccggtccctctagtcagccccaaccacggtccgcactcagcttcaaccatcgcgccgtgcatggcggagctccaccgggagcttcgggggttgttgcggcgctcggaccggtctgggaggattttaagcgcgggggagccgagggattgaccctccctcatcgccacgcctctagccagcctcgtcggggaatcgtgagagagagacca

SEQ ID NO: 135311 - DNA, 619 bp, Zea Mays
ggccagacgaagaaaagactacttagtctaagggccagtcaagccaaccccaatcagccactcaacaacaatcttctcagggtaactttcacccaccagcctcaagaggacgaagacgtggccaaagctctagaggcaggtttaacacacaaccaaggaagttgtattgtgtcttttgtggataaaacaaaggtcacatcataaagacccatcggataagagataacaatccaaaagcaaaaaagagcttaccactgttgttgctactcaaccatctcagctaaaggaagtgtttagtacatcttcatactattcatcctacaccccgcaacatgtccaacatcaggacccaaagacacaacaaccttcatcctctaatgcttcgatcaatcccaaacctagtggttgtctaccacctacaactttcattcgagaaccaccttcatatgatcaggttcctatcggccacccaaaatgcaaaattgatccaaactaactctaattgagctaaaattttgcgtgtaccttcactagagagtttctaagatctccacaatattttagcttaagagggtttaaacttcaaagttagatcagaaaaactcaaactcgactttgg

SEQ ID NO: 135312 - DNA, 273 bp, Zea Mays
tatcttcatattgtagtctctcattctgtatttcaatatggatctagatggagtccaaatttttgaaccttcactgtcttgctcaatgatcaatctccacaacttcacgagacacctactggtgtaggggaagtcttcttcgatgccctttctcccgtacattgtcgtcgggatgatgttcatatccgtctgttccctcactcgagaacctttgttttcatacacatatcctcctccttcgtattcctaacgatcttccatggatgttcctcc

SEQ ID NO: 135313 - DNA, 310 bp, Zea Mays
gggtaggttgggttaagaaaggttcaggcgaagaaagactacatttcacatggctgatcctaacttgtctgacgatctggtctgactctcatccttcattgacgaggctgatcttctcttcttgggttttgatgtcggcgttcgagttagggacatatagttaagatagatttgtaggtaaaccaaatagcttagttggtagagcagatggcttagtaagtggcttaagctaaatgagaatatgtagaatcaggtttaggtgtttttcttctaggttgggctggataggtcatacaacccactatgtagg

SEQ ID NO: 135314 - DNA, 346 bp, Zea Mays
tttgctaatattgtatatactgctcgtttgaaagcagatgccattgggatagttacttcagtctcgaatgtttcgccacatcgctccaaaggacaataagcttctagcttgaagaggaacatttccatatgcagtgcaaggtttgagctacatggttgttcttaccttgtgttctgctagatgtatggtatgtattttggcgttgtcttacatatacattgtttgtgactcatgttccatgctcgaactggaaacaacagaggtgcttcggtcaatgtcgtgttgtggggtgcccaagccaccctattcccaggagagcgcatatacgaagatgggcagaattccc

SEQ ID NO: 135315 - DNA, 539 bp, Zea Mays
tcgccattgtctcctttgcatgtagcaccttacgattgggagaatagtgcctcagttgatgatccacgcaattccgatgttcgccgccgggaagtcgggaggcaccgcccacacctgtcgtgtggagaatatgggaggaagcgttgatttttcggtggacggctcagattgaatgtgtgttccccttcgcaggtttgatctgagcggttggatccgatctgatggccctggtgggatcacgactatttaaaatatgggtcgtagatctcagaacgtacggttctgattagatcatgtgtaacgtttcggccaggatctatgttgatcgtagatttttgatcgggtggttgtaagctcatgttgctcaagatccattttggaaggtaggatcgggatccattgacccagactgcgtaccgattcataaccacgccgctctaatctgggccactaatatctgatcggttggctcacaacaaaagttaccctttcggtctagtaaaattgttaaagcaaccccctggtttctattattcaac

SEQ ID NO: 135316 - DNA, 481 bp, Zea Mays
cagtggatcaaatggactcatcaccacctcagagcgctctctcggtggaaattcagagtttaattcaggagttcgcctccctgtttgacaaaccaagtggtcttcctccccccagatcccattgtcacaatattcctcttattcagggagctacaccatttcggttacgtccatatcgctacaaccctgctcaaaaagatgaaatagagcgccaagtggcaggccttctccaatcaggaatgatacaaccgagcagcagtccattcacatcaccaatcattttagctcgtaaaaagactggagactggagactatgtgtcgattacagacgactcaatgccctcacagtgaagaacaaatacccgttgccggtaatagatgaacttttggatgagcttcacggggctgtctggttcacaagtctggatttgagctcaggatatcaccaaatccgaattgcacctcaagatattcacaaaac

SEQ ID NO: 135317 - DNA, 527 bp, Zea Mays
gcccagtttcatcatcataggcatgtcgtcttcagacacagtagatttttcaaaatctagatgactaggcttcgttgggatcagaaaactgtagtcttcttcgctctcaacatcttcaccctcaatcacagtctgctcagcttcgacattagaagtaccttcgtcagctacaacaagacctgaccgtttcattacttctgaaattggttctatctcagtggcctcgatttcttctccctcatgagacacccttccagttgatcgcactctggccattttgatgggtttgtacagtttgacaaagctagcccgtctgacgaagttaaccttaaacgatgaagtgttcgcttgaaagcgcagtgcagaaagcttcggctatggttaaattttttaaaagcgcaacagtgcaatggcaatgaatgttgtggtaactcttcactaacccgtctgtttatatagtgctgcaggtgggaaggcgaactgccaggtcgcctgcactcgctgaatggtggaccactcgacgcttg

SEQ ID NO: 135318 - DNA, 538 bp, Zea Mays
agtttgacaaccaagacttcagggatttctgtttctccatcggcaccaagcctgtcttcgcctcggtataccacccgcaatccaacggcgtcgtcgagcacgccaacgacaagattttcactgccatcaagaaaagacttctcgacgacaaaagggcaaatgggccgaccaactatctgaagtggtctgggccctaaacacgacagaatgccgggcaaccggattcataccatttcgtctattgtatggatccgaggccatgacgccgcaagagataaagcatgggtcaccccgaacaagcacatcagcagttcccgatgtcgacgaaccaacgtccaaagatctcatcgacggagaccgtgtcctcgccctacaggccctcaacaaatatcaggctcaaaccaaggcctggcacgacaacgcggttgtaccaagagagttcaacaaaggagacctcgtactcgttcggaccacccggacagaatcaagaggcaagcttgagccgaaatgggagggtccattcatcgtcaagtcgaag

SEQ ID NO: 135319 - DNA, 788 bp, Zea Mays
agatcttgtaaatgaaggagcaggatttctttgaagttccattcctgaatggttaaatctctgctctcctcaatgaagtctagcagttgcaccactaacttaaccttatcaatcaattttgttaagttggggagagacttacaccagccatggatatgcttgcgtgcccttttaaactttgccatgagccttttagcagggtctggttgaaagataggctgattccaagagtcttgaaagatagagtggaaatcatcaagctgaagccaatagttttcaaatctaaagatgggtggcttgggcacattgatttggacattgaccatccaagggatatgatccgaggttcctctaggaagcgagagtgcagaggtagctggaaaggtgaccgaccaagcttgtgagacaaagcaccaatcaagtttttcaagaagcgggtgacgttgcatatttgaccaagtgtatacttgtcctttgagtggaatttcctgtagccccagttgactgattgccagattaaaactcatcattctgaggtgatccccacccggtttgttgcggttgtcaggggatctgatcatattaaagtcaccgaggaagatccataatttgttatcctcaatctcaatgctggaaaaccaagaaagaaactcatctctcctgtgaggagtacaaggggcataaatgttggtgagccaccaggtctgattggtaagctttgtgtggaatcgaattgtgtgaccgaaagaattttgatcaataatctccccatcaaaaagagatccttt

SEQ ID NO: 135320 - DNA, 519 bp, Zea Mays
gtcgatgtgttgcgtcgcgcgcttcgtcgcgcgacggtccttttaaatttatatttattaatgtgttgcgtcacgcgctttgtcgcgcgacgattcgtttaatttatatttattgcagtgatgcgtcgcgcgcttcgtcgcgcgcttcgtcgcgcgacaattcgtttaaatgcagttcagttgacgtaagccatcgtgcgtttcgtctcgcaacgcttaacgtttgtctttaattaatgcaagaatctcgttgcacgctctatcgcgcggcgagtcgtttactccttaattcaatctaaatgttatgtcgtacgtctcgtcatgcgaccactccctttcattcatctttatctatttataatgattaaatgtggaacatgactttactttatgcttaacgcagtgtccaaattaatgcccttctgataaacgagtggtttaatttataattatgtaacgtgatcgcttctcgactgtagacgcgactgtcttctcctctttctctcctaaccataattg

SEQ ID NO: 135321 - DNA, 795 bp, Zea Mays
aggccttacgtcaggctccgcccactggcttatatcacgggcaacaagccacgtggcagcaccgggtctcctcctgagcggggagcgcaagcacacaggataaggcctatatatgtgtcagtaccggacccttgcttatgccagggtctcccctgttccaggacctcgtagtgacccgaaccttactcggagggatctggaccccatccaagggacccggcatgcttacttgggagtctcaggccgtaatcgggggtccgggttgtgcgtataggggtccgggttgtgcatataggggtctggtccaactgatacatcttgggatgtatcatcttttctcgccacgtggtgccccttgagtcgtccatgtggtggggtcgggtgctgttcaccgtgcggctagagatcgtcgtacgggcaccatgtcttcacactatagtaaggggtacccctgattcagggtactgacagtcgtaatgccttacggtctgaaaaacaccttgccaacttttgtacgggcgatgagtaagactttcggggacctgattagggacaaagtagaggtatacgtcgatgacatcatggtcaaggctaagagagggtcgaccctagtggaagacttaaccctggtcttcgacaggctacacgcaacccgtacaaagctaaacccggacaagtgcgtctttggtgtctctgcagggaagttgctggggttcctggtttcacaccggggcattgaagcaaacccagagaagatcaatgcaattgaggcaatgaggcctccgacccacatca

SEQ ID NO: 135322 - DNA, 711 bp, Zea Mays
ctcaaagcaagcaaagcttggtccccaaagaaatgagcaacgactcaacacgaagcagagagggctagtccttaagaatccagcagacaaagccaaatcagagcacaaaatcagcacaaaagctgaaatcaaagctagttcctccagaaagaggccaacggctcaacacaactagcaaaaagctcctaccggctaaaatctctccccctatcaaagcactctctctagaagggaactcaacatgctcaaaacctctcccaaagcaaaaatcttctccttgtaaggagtcaaggttgaaacactaaaaactcaaattctcttccgctttgacgatgggaacaacataagcctgaaaagttacaaaatctctctcccttgttggcaattggattcatcaagcacaaacaaggatagagactaaaaactcccgcttgacaagagaaactgcctagaaaatgtagaaaaatacaaaggagaggagaaaatagagaaaatgtaggagtttcaggagtatacctgtcagagtgtaaaaatgctctaagtggtgatgtgctatgtgggcaacaataaatgcacgtgctagcaaatactcaaactgatcatatgcacaagatatgtgaagtgaaagcattttgattcggtttgaagtaattcaaaagagaagttcaccactaaagacaacactaggcatatagtaagcaggaaatcaac

SEQ ID NO: 135323 - DNA, 553 bp, Zea Mays
gatcgacagcctagatccaaaaagattgagggatcggatcgaagcgccaaatggataccaatggatctaatctcgagcgcccattttctaatgaacgaccatcggcaatctcctacctcagtccgagctgagcgactgccccaaccgcgacggcgccatggccgcaaccccggacctcgacgccccggcaacccagaacacccaacactcggatgatcgatgctacgcgcatcagagggtagggtgattcgcgcatgtgtttccttgctggagatgaaggggccgataaggctgtcttcgtgaacgttatggtgtacggcggagcgtccgcgccatggacatgcgtggttccgagcgctggtgaaggacgacggagaaacagggatgactacggatcgatgaccggagcgtggcgcgatagactggggcgccatgatggtcgacgagcacaggggagatggcaccagcgaaggtgggtaccaacggcggtgacccgagccatcattctctctccttctcactctcctcccgcccatagttcgctctgcgcgtg

SEQ ID NO: 135324 - DNA, 542 bp, Zea Mays
ccacactacggaagacaccatcctctcactctcagacagtcatcggagccaggctagtcccgcaacaagggcccacccattcgctagcccagttgtccagcactcagtactgtttgcactggcaaagctacatgggaccacatgcacgtgagaagaaaaaggctacgggcatctggaaaagcgtggacgagcaactgtacccacaacgtgggcacctgttaatggtccaggttcatccagccgtccgtattaaacccaggctaccatcaccgccgtggatcatgctacgcgcagaatttcttctttttgctgaagaacacggataatttttgcaggcatatagggctgtttggttaagcttttttatgagagctttttttaagaatctggttgtagagaagtattatgtagattacatgtgtaagaagataaaagagtctataaaatttaggatttagaaaatgacgttttttactatcataacgacctgagcaattatgtgttcacgttgattttatacggttttgactaaattaattttt

SEQ ID NO: 135325 - DNA, 635 bp, Zea Mays
agagggagaacacgaggaaccgagcgcaggattggggtcttcatcgtggaagcgagggagaagtcagccgcctctgccatcgacgccgtgtgtgtggggggaagaacttggtggactggtgcgtcgtcgtgggctccaaccattgcgctgtgggactgggatcgtcctgaccttcattggtgcgcgtggcgaggatcaccagtcggctccgtcgcgaatcagcatcaccgaggagcgcgctctgtcacaacaactggtgagcaccccttcctggcttgcgaggagagagagtaatgggcgtaaggtagaagatggactaggaccgtccgattgataatgagcgcctcagattaggttagcttacccctttggctgggcggaaccccgtccgtcgatcccagatccaaaggctatcaccgtgtaccagtcactttaggggaggttgaatctgcacccttgatggctgatcgaacgactcagaccgcgcactgattcttatcccgcgccaatctaatctgggacgtccatattcgatctggcggctcacgatcaccgatacctcttcggacgtgccgttttataaaagaaaccccctagtttccagtattcaacccgcagtccaccacggggtaaat

SEQ ID NO: 135326 - DNA, 296 bp, Zea Mays
tgtttatcttctccaaactaccaagcccgagccacacacgcccacgatgaagaatcttccacgacgtccgcttccctctccctcatgcccagatccacgtagcgtcttcatcgccttggcactcctcgtcggctagccgccaggccatcacatgtcagagtcgtctgcgttcacggtcgtgccagagcgccgtcccgccgaagtcgctgagcgtagccacgtccgcgtcatccgtgctcacctcatcgttcgatgtcgtctcgaggtgagcacatctgtaacaccccgagatccac

SEQ ID NO: 135327 - DNA, 310 bp, Zea Mays
gtgagtgttttgaattcgtgtcttggccttcactgggtgttatgcctccttgagatcacatctgcaagttgctttgagatttaacatgagcaccgtgttttgcctttttggtggttgtgactaaacccttgatctggaggatgacaattctacattttttatggatgtgacaagttgaaactttccagatacttccctgacctttttaagtcttatgccaagtttcatcaaaatttgattttaattagaggatttagagaattttagagagtgcttgtggtttaggcctccacacccagccagaccaccc

SEQ ID NO: 135328 - DNA, 436 bp, Zea Mays
caagaagatgttagtccaaacataatgtgttgagaatttaattaccaaaacaaaataaaaatggaccaagaacatatttctctttcaatcatgctccaacatgtgcatgggaacaagcacgcttttggtgaaattttttgtggaggccagttgcctgactgaagtggtcgagctcagctttcaggtggactacatcgacagtgtctccatgaaggacggtaagagtatcgtcgttgtattggaaaaccaagcaaggtgtgtggggggaagtgggatgtttgatcccaccattttgtttgatcaaagattgcagaacatcagccactaataggaagaggtaggatcataaggggtcaccctgccagagatcggtcttacagtcgaaccaccccctagggactctgttgataatcacgacaattttagaagacaaaag

SEQ ID NO: 135329 - DNA, 321 bp, Zea Mays
cgagcatttcattagatcgggtagaagagtgcaatattctgagccaaccagagtcagatcctgatgactggagggaaaccaatcatcagatacataaagaatgaggaggagccggatgacaaaaatgcagtagagcgcattgcaagacagtcatctcactacactctcattggggaaacactatacagaaggggtgcgacaggagtcctcatgaagtgcattctttcagctactaggaagcaactgctagatgaggtccacgctggacaatgcgggatacacgcagcatccaggactctggttgggaaggtcttcaggtct

SEQ ID NO: 135330 - DNA, 631 bp, Zea Mays
acatattatatccagtgaaggggtcgcgacggaccctgcaaagacagctgctatgctggcatggcctagaccacagaatatcactgagttaagaggatttctggggcttacagggtactacaggaagtttgtgtgtgggtatggagttttggcatgacccctcactcagctgttgcaaaaacaacatggtttcaagtggaatgatgaagctcaagcagcatttgaggccctaaagaaagctatgacgactacttctgtcttggccctaccacgatttgatcttccttttgtggtagagacagatgcatgtgacaccggaatgggagctgtgctcatgcaacaaggaaagcccatagcttatatcagcaaggctttaggagagaggaatagacacttatctatctatgataaagagtttttagccttaattcttgctgtggagaaatggaggccatatctgcaacggagtccttttgttatcaagactgatcataagtcacttacatttttaggagagcagcaacttcagtctgagctacaaaggaaagctatggcgagattaatgggccttcagtttcagatcgtttacaagaaaggggtagagaatcgagtagctgatgctttatccagg

SEQ ID NO: 135331 - DNA, 386 bp, Zea Mays
actccgatggagacaagatgaagaaggtcggactcagaaacaacagacatgtggttacctgcgaaaggcaactggctgttgggatcgatgagaggaatagtcgcggcagatgaactctagttcttccgcttgggcgccatctcaatctcgttggcgaactgagcggaagcaagattacaaggaagcagagaaggtatggatgcagaaaagcagggctagggctcagaatgcagaggcatgcgacggcacagtacaaatggggctttcccgggccagatgccatttctaaaaagtgcccagtcatcactcggtcgttgtttccataaacgccgacattgcccaatacaactcagctgttatttctaaaacgctgaagtgccaagtca

SEQ ID NO: 135332 - DNA, 471 bp, Zea Mays
ggtataccaaaccctccattcagggctgagcctatcaacaggttcaacacaaccctcttccagatagtgctccactcctttacctcctaagagcactcgcactctcctagaccaactcaagtaattcttgctcccttctagcttcacatcatttggaacgagttccaatttcaattcagatgagataggcaaagtcttggggccaatcatacctagtcccatgagttcctgaatcatactcctcatctcatttctcatctcactttttgtgattagtggatcctcttctttcttgtcaccatgaatcattgcccttttttcagcctcttcttccaacctttttgcttcagtctcctctgaactcatcatcatcaatgcctgcaaacactaagacgaaccaggcttccttcccttctctcaatcagtagaacctccaacctctgtagcagcaccacctccactaatcgtagc

SEQ ID NO: 135333 - DNA, 514 bp, Zea Mays
gccctagggtttttcgaggcgggtagctcccaaaacacaagcaactggtaccttggcatatggttcaatagcatccccaaatttaccgtagggtgggtagcaaacagggatgccccaatgaagaaccacacctcactggagctcaaaatctcccacgacggcaaccttgttgtcgcaaaccgggccaccgactccattgtctggtcgactgaggtcaacatgaactacagaaacaacaccattattgctgttctgctgaacagctcaaatcttgtcctaagggacgacgatgcctccaactcgtccagcattagtatatggcaaagctttgaccacccgacagattcgttgttccagtgggctaagcttggttgggacaacgccaccggtctcaaccgccgcctcgtctccaagaaaaactcaatcagcccggctagtggactgtaccgagaggagctagaccctagtggcgttaaccaagtcgtcctcgcgtcactgatcaggtccaccaaac

SEQ ID NO: 135334 - DNA, 788 bp, Zea Mays
gtcgttgtggatcatgcatcatgtgtcctaacatgtgatgcagattgtgtttggcatgtatgaggagagatggaagatcaaggaccgagacgtgagatctgattaagatcgatgcattgatgttcgctaactcagttgcagcaacatgcttttgcttgtgaaagccgaagcaaagggccatctcgtcatgatgagaatcatgacaatagtagctcagatgatgagccaaaagatgtatatgtcgctaagcttatttggaccgctaagaccaaactttctgcttactcttacctatagccgatttagaagaattggtaaggagaagttaaatatttattgagttacataagaatggtaacattaaatagtctcacacaaaaaacacatgtgtattgtaaatggcatgtcttcttttttcatgaaaccaatgattgtaatgtcttccgtcggcgaacacaatccgctataaataaaggttggttgagattcaggaaatgaagattgacaggcaacctgtccctgtcaacacatcagagtcggtagttaagaaagtcttggttcggtcatgtacggctgataaaggaaaatgcaaaagtattatcattggtgaccctcgcatgccaaatctttctcatagagtggttactcaaatggctctagacaaaagaaagcgattggataccagatcacggtcacctaacctgcataggtcggatggttcgggcactaaggccgaacagttcgctatgaaggttgtacggtccgcgaacaactagaagcaacaacga

SEQ ID NO: 135335 - DNA, 444 bp, Zea Mays
tgctctctgtttcttccgtggatggacgccaacagcagcagccctgtcccacgatgtcgtcgatctttggtgagaccccgatgttctcgctatttgtgtgccctagctgctcgatgaaatgtctaaaccatgtgttgtcgttgcttgcagctagttgtcaacaccacgcctcgcgtcgatcgtccggtggtaaggtaggccatctaggttttgctgcctatgtggatgacgtgtgtgatgtcgagatgatggttgattggtgcgtgtcctttgcagcgatttaggaagatggtggtgctatgtttgaataagtaggtgaggtccgtgcgatgtttgttaggtgtttgatagaaggcttgaaccggaggtcctcgctgtttcatggttttcaaatcggatttagtcatggatgaactaatttgcactcttgttggttgatttgat

SEQ ID NO: 135336 - DNA, 543 bp, Zea Mays
gaagtcttttcctccaggcaggagtatttttgttgctgggtggaaagtagcgaaggggtgtctcagagacttccctattgtagttttggcataactggcggagggctctttgggcatcattctggcaagtatctgggaagcggtgtccagtggcggtgatttggaagggagggtgatttgggtagtttcggctttctcccagttagactgtcacagagcatttcttaatcccgttctcgcggtattctttccagacgtacttcggcttcttatggatccccatgcgaagcgcacaactccacagaaggtgagggaatccttccacctccgagaagtaggacgtcctaatgacaaaggagccttccatctggtagcaagagaagtagggttcgttaatatcggggaaagaagagaaggttcctttagaggttaagaggtcttttcttttaagggaaacttttaaggtcagggctgcggtctacgaccagtcctatggctctgataccacctgaagcatcccgatcctttgggactcaaatgtga

SEQ ID NO: 135337 - DNA, 433 bp, Zea Mays
gagaaaagctactgctttggccgacccagctgagcctgtgccgaaggcttcgggcaaaaagatgaaggtacttacccaccggtcgtgttacattaaccggctgtggtgcctgagtttggcggggaggcctcttcagctgctgaatcaagagaaactgttcctcccatgcagaggactgaatagtcggctataatgccgaaggcaccttcggttgagctagttgaaacgaaggttgacaaagataaggctgaaaggtcaaaaactgaagaagtaacaaagatggcagggattttaagtccttcaatagaagcaacagcgctgaaggcacaaaagagttctgccacaactcctaagagaaggaggatggtaaatgtattagatgttttggaaacaaccgactccataagtcccgctcccacaggaaaggttgccg

SEQ ID NO: 135338 - DNA, 487 bp, Zea Mays
ctgcgatgggagaaagggataaagtagttagtaaaagatatttattattatagtttctatgggtgcaggaatgaataccattcattatttgtagaaaggacaaattgatctcagtataaatcgtaccatataaaaaacgaacggtgtggatgtctttgtaattggaataagggatatgctaaatagaagaaatgatacaagaatgcataaagcggtacaaggaattttaatatgtatttagatttcataaatgggcaatagtaaaccagcttaccttttacagactttgatactacagaggctgcaagaatcacctgtgatacataaacaggaaaaagattcaatagtcgtattcttatggtatgaataccaagacaataaattatgctcatcaattatttaatcgtagctgccgtctacttttgctaaaagagagtacgtactctgcggaggaaaaagaaacaaaaataattcatcatagttgttg

SEQ ID NO: 135339 - DNA, 1098 bp, Zea Mays
ttcaaaatatttgaactcaacatatagaaagtaaacttaggacaacaacaaaacagtgattatttgcttgaagggtgcaaccaaaggagcttcttacctgttatcctcatgggctcatattacgcagtcagttcaagctttctacatgagcttggcatgatgttgccaacttttcctaagttacactggttagactgttgaagtccaggtgttgagatcccagtgtcatcagagttcgaaggttggcacaaacttaatggcaaaatcaggtggacgcctctccccctggtagactttttagcttggacttgtgtgtgcatggagattttgtgtctggactccataactcatgttgagctatatatgcgttatataaatttctaattgcacttttcaatttaatgtgtattcagtgactggcaaacctagcgtccctgtatgttggattgttggcttatttggcagacataatttgtttggtggactcacataatttgatgtagaaaacctcaaagttcaaaactttgcttggtgctgtcatgaccatttaattttgctggagaagagattacagtttagcaaatgacatagaagccttaaatttagcctttgtactgagcgaaaaatgttttgccttcaaggtattgtatgacttaaatttagccttagctatgcttgtattgagtgagaagtgtctttaaaaatattatgaacgcatgagttggcttctgtttctttcgagtatcatcacctgggctatggttcgtttttgaatgttgagtgtgtgcttgtcctggttgctggctgccaacgatgaagtaacctattggttcttttcattcatttcaaccgttctgatcaggcgtgttttgttttccttgaagcgggaatgaactgaatgggcactccgtttctcaatgtagatcggacagaccttgcagtaatttgttagattgatggaatggctcttctgtctcagcagattcgaataaactggcaaatcatattttcagtttcttgaaatgtttttttttgcggtgccaagtctagacgctttgtttgagctgattgttgagaatgaatagacagtttgctaag

SEQ ID NO: 135340 - DNA, 428 bp, Zea Mays
cggcggtatcaatttcttcgaccaaagttggctctgacattttcatttcttcggttgcctttgcaatttttgcttcttctgcttccaaaggtattaccttggttggttctgaatgcccggtttcaactccagcctgttgcttcagggcttcagcaacggacacttcagcaagcgcctcagaagtttcagcagtcttctttggggttgtgcttggaagtttaatagtttccaaaacatctaacacattaaccattcttttcctttttggggtcactgttggcccctttttaatttttgatgcttcaatttcttctgaaggacttaaaatttctgataccttcactccctcagctgatgctttcgcttcttccgtctttggttcttccatcttttctgtcgctggcacgtcgaccatttctgtgacttct

SEQ ID NO: 135341 - DNA, 432 bp, Zea Mays
caaaatatgagaacagcagggtttactctacaaaaattcctgtgactcagactcaacccacgcaggactgcgggttgatttctgtattggtcagggtttcttatgcaaaaggctaacgcgaaggggtatcagtggtttctggccgtcagatctatagctgacgacccagattaggcctgagctcccgcgaaacggtaagcgatcctagcctttagatcctagttcagccgtccggattttatgtttccctcaatgaactctaggcgctagatcagaaatgaacgggccggatcgaatcactgcgaaacgacacatggggaactaatcctggccgaccagtgcagatccgatggtcgatacccagcttcccaactctggtcagacagtggcggcgcgttcgctgccagcggcggagccctggttttcacggag

SEQ ID NO: 135342 - DNA, 530 bp, Zea Mays
gttccaggccgagtatgccacaggggcaccaacatttgataccttgcctctaagaatcatttcaagccgattcaccaagtctacagcgggaattcttctgttggtgacccgggttgagtcagttagaccttggtacagataagccgagtatgccctgtccttcaacggctgaatgttcttgaagacaaaatcagcaaccacaacctccgcagtcagacccctctccttcagcagtccaacttcagccagcaaagcccctgcctcagccacctcctggtccgtgggggactcggtccaactcggagtgcgaacatctggctatctccctgaccgtggggggagagaatttccgtggttctcaacaataaaccactccaagcgccatcccttgatactatccttgagcgggatttcaagatagtcagtctttctcccacggcgcatctccaaactcgcaccccccaccagggtgacagggatataagtacttccacagtccaaaatgtggcaggacgccaagaaaagcttca

SEQ ID NO: 135343 - DNA, 721 bp, Zea Mays
ctcatggacatcttcttcatctctcctgggcagtgcagccatccttcctttcaatagctagctgataggtcagggggttcttgtctatggatttgggcattgtggaatgctaactggattgttcagtctcggctttctgagcttgtattcattttacctgtcaaaactaggaattatgagtgatggtgctacaatttcttaatagcacacccaggtgtcaattgctgtcaaatcaacgaattgtcttgtttgccacaactgcctcagtggtacaagaccatgttcatgttcaatttctgtgttgcagcaagtcttgcttttgctcgtgcatctagcaatgtcattgtcttctaagttgcagcacagctacagctcagctacattctgaaaacaaacttgcataacttgaggaacatatgatagtgtcagtcacctttctacttaacctggtagggttttaagccatcagattattagtttacggtcataaggccatatagggcatagaactataacgtggatggttgggctagtagagccatgacacttcccagaaaggcgtaactttgtttatgttgtcggcattgcatatcaatctttttttgctgtgtacttgatcatgccaactctgcttctgcccttactgatcctgttgccttttgtatgtactttatgatctacatggcttaattccacagctaatcaccaaatagttgctata

SEQ ID NO: 135344 - DNA, 839 bp, Zea Mays
ttttcaaatggtcagtccaacttagagctcaaatactaataaaaaacatttagaattcaaacataaccaaaaaaagaacaaatacattgctggaagcttccatgcgactgggatctaggaaaaagttaaattgacgcaaagccttttttttttgcaaatgtagataggctggccgtagtatgacagcacaacacttacaggtacaccaggtttgctctacagagttcaaacataagaatccattcaagttcaaacattgtgagtgcaagagatcaccttgtagtcatttcaatataggtttcaaacattttgagtgttaaatactgcccctgccgatgatgaccacaaagaatgctcaaactttattaaagagaaatgatcaaataacatccatgcatatgcaatgtaatacttggaattaaaatctatttatttttaagtttaaaccaatgttaagcttttagacacttttgagtgattatcttaacttggttttgtaagtcctatgttcatagcaactttaaacatgttttatgttacaatgtaatgcaagagacaacataaactctttttagctgaaattgcttagatcaagaatattacgattattcttcaacataaaaagtgtgtttcatctaatggattatgaagatatccggtaattgattatccaaccttcttctaatgctatgtccttttgcaacatcatctctaagtaaatgatgatgaatgtcaatgtgcttggtgccggtgcgagagtgttgaaccaaactattagtaagttttaaggcaatatctttgccacatacaagaggtacttttcttgaactatatcatag

SEQ ID NO: 135345 - DNA, 495 bp, Zea Mays
gagtaaacaactccttaaccctgccacaaaatgcctcaactactgcataagaaggaaagagaggaggaccaggaagagatctcatacagaatttttgcccaaatttaccaagatatggagccaatgggcatttgaaaatgactaaaccgagttttgccacgtgctcgacgtcgtaactaagtggccaagtgcgcactggccgctccccgtgctcgccttgagcgcctgtttgtccgaccacgcgcccatgcctgagtcgtgcctaagtgcgcctataaatcctatatcgcgacctcagttgagagtccccgaagctccgccaccttgcccaacaagctttgcagccgatgatcgcctgaatagagcaagcttcaccgcccgtcgttccctccaatgcatagccatcatagcccgagcaaaccacaccaccctagcctcatccaagaacactgtcatgatccccaagctccagtgaaactccctggccctttctcc

SEQ ID NO: 135346 - DNA, 545 bp, Zea Mays
agttaacagtattgggattactcattgagtaaataagaagtttttgaggcagagcaatacccagaccagagggtaaagccagattcagtccacaagcaaaatattaacagaacattaaaacaagcacgcacaggtgctaaccaagtatccagaagacatgcatgagtcaaaagtaaaaccaatcccacccaaaagtttatggggcccactccagagcccagatctcccaccgtccgcttattgtttgtcatgcttatcttcatcggatgaatcatcagtactgccatcctccagatccttcctgccaaccctccgctgacccacaggtcccacagctgatttcttttgctttagtctctgctcagaaaggtcatcctcagacaggttgcaaaacctggagcccagattccgcagcaccttggaggatagcggggggcatcgaagttatgttggcacatgaggcagttcctttttgggcaggcccctgcctgaacccagcacgtgattctttcaaacgtttgcttcttctgagctccgactccaca

SEQ ID NO: 135347 - DNA, 437 bp, Zea Mays
tagcaatgttagtttcttgattcacacctctaccagataaaatttcaccccttttctagtttttccaaaatattctggtggtgttttccttttagagcatcccttctcttgcaagatgagcttgtggtggtgacaattaagtgaatgtactcaaagaagtcatgaaccgattggcaacaagtactactagcaatagaaaccaccacaagttggagttgatgtgcaaaacaatgaacataataggcatgtggattaatatccaatatattcctttgtaagccattaaattcacctcgcatatttgatgctccatcatatccttgcccctgatcttggatataaataatccatggagatcaagaaggccaaaaatagcttccttcaaggcatctgatgtagtatccttgacatgcttgagggcaagaaaccgttccatc

SEQ ID NO: 135348 - DNA, 430 bp, Zea Mays
ataactacttagcggagctcactggggcggcaatttataggttcaatcggcagtggcggctaatttttgagaagacatgtagcggccggagagatggactgagtcactggcgcgggtgaccgtggctgttaccgtggcaagaccttaggcgatagatgggctatgtattgtgatcaattgcgacatggtaaaatggctgacggcgtggcataaccgcgaggaatggcgtcacgacgacgatggtcacgcgaccacgtctccgggcaaaggggcacgacaacagggcggaacagtggcctaagttcatcctcaacgtgatatttcttaccccgagtagttatctgcactccgctaggcacgaatcgcggtgccggagagaatccgaacgcggggtcgccggtggcgaggggggctgaacctgagatcttat

SEQ ID NO: 135349 - DNA, 353 bp, Zea Mays
gcgagaagtctgttatctactggcggggctgagatcacccctgacaatgcccttcaaattgttcctgctgatcttcccccgtcaagccatgacatagctccccctgccttgggcctgccatcgttcctctccaatcttcaggtgagtcaactacttgccttttattgttcatattggtaaattatctttcttatgcttatctgccttcgatcacaggctttggttgatggaatgtctgcctagctgaggtagtgcggtgccactgtcccagaatgagctctgtccctaatgcagtggaacatattgctgcttcagaaacagattgttgacttgaaggcatcgaacgctggtta

SEQ ID NO: 135350 - DNA, 805 bp, Zea Mays
ggacagacaacacgcatgctttgctttgctttgctttgtgtgggctcctccagccctccttagctagctgtcgattcgcaagcacgactacctgaacgaaacacggacgaccatgtggctagcatgtacctgtacccactgacgaatggactgagctgagcgcacgcacgcaccgtaccacacgagaggggcttgacacgcgttgcgcgctcttttggttagcagccagtcatcgcaaggcggccagcggttttggcgagctgcgtgtgtgtgtgtccagtgacaaggtttcacgcggcggctgggtggtggtggactggtggtggtggcgcgagaggtaggctttggaattgcttcgcgcggacgaccgccgacctcgccctcgctttccctagttcccagtttagactagtagtttgtagtttccgtgtccgtttcccctgtccgcgtccgtgtctatataaacggcatcgccccgcggcttctcacaccctctcctcctcctccctcctgccgctgctctctctctctccgttcctgatcggcaaggcaacttattgaagcagcctctctccctcgacggctggacctcaacaattgtttgttcttgaggcccgccagaccttaataatcttgctggctggctggctggtaacttactaatctagctagctataggcggctctgaccctctgataatggtcttggactccatcggcttcttcttcgtcgtcgtcatagtcatcccccgcgcgctgcttaggaagagcttctatttctggatcttccacgtcttcaacagata

SEQ ID NO: 135351 - DNA, 279 bp, Zea Mays
cgcgcgacagcgggcgcgcgcggctgcgactgctgctgctgcttcttctccacttctccttccttcccctataaagcaaggaatagtcgcagcttgccccagcttcgcaagctttcctgctaatccctgccattagtagcaagcaagcaagaaagcagtggtagtaggtgccacccacacggttttcacggctgccggctgggagcgaccgaggagatcgtcgtcacgctcgatggaggccctggtggggaggtactggggtctggggggacggcggtg

SEQ ID NO: 135352 - DNA, 539 bp, Zea Mays
aaataattaagaacaggtccatgcagtttctcactaaagtaagcaacaggtttacctccttgcaacaaaacagcaccaataccaactccacttgcatcacattcaagctcaaaagtcttaccaaaatcaggaagttagagtagcggtgcgtgagtaagcttctctttcaaaagtgcaaaggaatcctcttgtggctgcccccaatggaacgaaatgcccttcttggtcagctcatgtaaaggggcagcgatggtgctgaaatccttgacaaaacgacgataaaagcctgcaagtccaagaaaactccgcacgtgtgtcaccgtcgaaggtgttggccaactctaaatggcatacaccttggcctcatccacctcaatgccctgtggagtcacaacatagccaagaaacgaaactcgttcggtgcaaaaggtgcacttctcgaggttagcaaataaacgtgcagctcgcaaagcgctaaaaacaacacgtaagtgatccatatgttcctctaatgacttgctgtaaatcaagatatcatc

SEQ ID NO: 135353 - DNA, 467 bp, Zea Mays
tgacctcttcataaagttcagtcgcgttctctgttttccaaaactcaaatccacaaaacccaaatatgaatgtggcgtcaaattaccttgaacatactctagcaaagttttaaatcaaacaaaaactgtttgacacgatttgactcgaccttggtctcggattccagctgagcgacaaacccaactttgccccctcgtatctcgcaaatccgagatccaatccactcaagtgatgtaagagaaacaaagagtaaatgaaatcgtgcgcaacctcgccgaacttcggccgcccgccaccgcacgtagaccgggctaccaggtgaaccatttttcaattccttgcgcctacgacttccctgacatccagttaagctccccaactcactggattgagctatcccgccgtgattagaccggaatcctcgcagccgacgagctcccttgcctgcgcgcgaagaccaaccaac

SEQ ID NO: 135354 - DNA, 555 bp, Zea Mays
tgattgccggagcccaggactacccttccccaatcggacgccattaccagctcccccaatccacggcgaacctcaccaaccctccacgaaggcgtagacatgatctccccagatggatcgcgattctctctctcctcacgcttatgtcttcatggctcccaggtgccagtacaaggtggatgagggcacgaccggttttatataaggctggagcaaggcggtgacgaagattgaatctcaatcgattcctagtgcagtttgaggaacagaatccccaagcagactctaacgttcggcatgaccgacgcgtgaaggagggataaggatcttgatgaactggccacacctgtaagggacatgtagctgtggcactagccgagttcttcgggtgatttccgctacgctgttggtgttccacttccacgccgagaagggttattacggatgcccagccgcggatctcgcgagcccgtttcaacgatgacagagattttgcgcgtccggcctcacgcgacggcgacaggttgagagaagcaggtgcccagtgtgactcgc

SEQ ID NO: 135355 - DNA, 313 bp, Zea Mays
gggaaggttcagctcccaacccaaaaggttgttctgtttattctgcggggaggataaaggacatacaacaaggacatgccaagtcaccgaaagaaatagctgaagccgaagcgcagcagaatcagccgaagcaggtccttcatactgcttcgtgctattctccgtatattctggagtatgtgggcaaccagcagcccacagcatcagttgcttcggcaagtcattctcaatttgcatgggctccactaccaccaccaccacatatggcaccaaccttgacccacaatcagtagtcagaagggcactgccaagc

SEQ ID NO: 135356 - DNA, 1087 bp, Zea Mays
ctcacgcacacacaggctagtgcatgctcagcgtacttaccggtcatgatcagcccgcgcttcctctcccctttcattgacgtgtgggtcccctagcatataccttcttcctccccggtgtttctctcatagtcataggcaggaccagaaaagcaagccgctgccgccagccaccgctacacgacgcgcacccagctgatgctcgctcatggcagcgcggtagtagcccaacagtaagacgacgcgttcacgaccgtcctctgcagcgacgattctcctcctactggcggcaatcgttccagcgccctgcatttcttgagtcattccttccgtcattaatcgccatcacagtttcagtttcctcattaaattcaagagagcgtcaattgtcatcaaatccgctttaatccagctaatctcctctcctccagtctctataaaacccaacaacccctttccctcgccaacaacagaaatatcacttcctgttcgtcttcccattacgccatcctctgctagtgcgaacccagtcgcgcgtctacttgcttcgttcatcggcgattgttccaagaggcacgctcgcccttcttctccatttccgtgccctggcgcccaccgtccatacctccatgctgtccctgcgccgtgtcatccttcctagtaccaagatttgggtgtagctgcaccatcgactccagctcgccagagttcgttattgctcgcctctactcgcacctctccacaagtgctcagtccctaccgtgctgaagatcgatgacgagcaaccatcttgccatcctcgctgttcatcagcactgcgtcttgctcgcacgccacgcactgcgtcctctgccctcgtgtcgaagcctttcacaccggagttcttcatgtcattgttgtcgtgctgctctcgcctctaccaccatcgcactcggttgctgctgtcgcacctacacactgcatcgacgagccccacctcgacgtccatcccgaagtctagagtgcctcgccggtgaactgcagtcgagctgctagttgtgccgacgactgcgtcgtcgactccctcgcgctgtgcgttgccaccctg

SEQ ID NO: 135357 - DNA, 422 bp, Zea Mays
ctagacagtacgacaatgaacttacatccatttagatactctaccaaatttgggttgaagctataatcataaagataatgaggttggcaatcatggagtgtctccctcaacccttaataggagggatagaacatatcaatggattggagttaaccgggaacaatatttggtaatctcttctgtattcaaaataataacatccccaccacaaacaatgttttagttctcttatcctaaccgtggactcattgtttaggtgtactgacaaagaatgaactaaaacaagccatggatccacgttattggaacacatacacagcatgtatggtgacaaataagtcaaccacaaattgatttgcacggtacctttgcttgactggaggttgcaaccgaagtcctcgaatcccagatgatcttggaac

SEQ ID NO: 135358 - DNA, 678 bp, Zea Mays
tgcaaagagacttactgcagggggtccctaccaaagggataccctcagtagaatataggtggaggtcatgagtgccacaatcatttgtaggctcacttaatgggatcatattacgggcagattgagcatcaggcacgattggcacgacctcgacaccacgatcatagtttccatcttcagggcgagaggcaactaacaaacgacgtaccagtacctccatgacttgcttttgtgtcttcatagctgatttaacataattatcccactctcgctgacactcaattgggatgataagtctttgcacgttgggtggaggacctacgtttagcaccccatcaacgacgatgtcctcaacatcatgccaaccaatcttctccttagccttagcaaccacctcactaaaggagggtctatcatcgaatatcacagccacacgttgcatgtcaacgaactcagcatttccataacgatcttgttccacgatgcctccatggtatatgcccaaaaaattgtccatctatttgaaatacgaattcaacgttgaataaccaattgtgatggttagtgcataaccccatccactatgactaactaatacctaactataaactacctagtacctaataaataattgtaaactaatacaagataataactaactaatacctaactacaaac

SEQ ID NO: 135359 - DNA, 309 bp, Zea Mays
tctgaactttctttactaccctgcagatgcaaagaggccacgctgaggtaagtctacgttcatctccatagatattctattacttgttttacaaacacctccaccttttcttatctatttgactgtttgtaattattcactatttaataaagtaattaaataggcagtttttaacttaaagcatacagatttacccagaaaaagtttaggtaaaaaaggtgaacagcaaaatagaattagtcatcataaagaagttacatttacccctgttggcatttggattgcagttcattttctatttcttaaatt

SEQ ID NO: 135360 - DNA, 732 bp, Zea Mays
gagggaaagatggaattgctataactgctactgaaccggaaacgatagaagaagaagatgagatagacccactcatgcttcataatctatgtggggaaataatggaagagcttctggatatagattttgtcaataattcaaattggcaaaaatcaggtgattcagtgtctcttagtaagccctcacatagtggtagggtgaagctgggtcggcctaggaagggcaagaaaaagaaaaaaaacatacagcaaaatgaaaggggtgttctggaattgtgatgggtttagagacccaaaaaagcatcgtttcgtgactgatttaactaaggaatttaatcttagtttcatcgctttgtctgagaccgggaaaaaggatttttcggatgtgttccttaaaaacctgtgtgccggtaaagactttctttggcattgcaaggagccgaggggcaggtcgggtggtatggtgttggggatagaccttaatgtttacgacattgggtcgattgatgagggtgatttttacgttaagtctttattgcgtaataaaagtgatggtttcaaatgggcactggtgagcgtctatggccctgcacaagataattttaaggaagcctttcttgccgagttggttaacatgaccagccatgtttctgagccgatcctcattgggggggattttaacttgcttaggaagtcggcagataagaataacaacaattttaacacaagatgg

SEQ ID NO: 135361 - DNA, 406 bp, Zea Mays
gagaataattgttggcttagcaggaataccaacgacctcctcgagtagcttctgtagccatactgcctgagctgccgcggctgcgctcgccatatattctgcttcacatgacgatgtggccactgccttttgtttctaagacatccatgacattggactcccccaagaaaaaatatagcacctgtagtactgcggcgatcatcaatgtcaccggctaagtcactgtctgaatacccaatcaattttagactgcctcttcctcgactgtactccataacctgttgtcgctgacagataacgtaaaacacgcttcaatgcgaccttgtgatcatgccttggagactccatgaaccggctcagaaatccaacactgaaagagaggtctggtcttgtatgaagcagatat

SEQ ID NO: 135362 - DNA, 330 bp, Zea Mays
ctcaaaggagaacgggaagaagcacaccgctgcacctactcctttcttcccaaacgtcctcttcattcaggggagactggatttgttgcccatctctgacgacgaaccctccgtgctggaggaagagcctccctagcgcgacgcacgatgatggagacacaggtgctgaaacgtgcaacgacatcatgacactagagaacaagacccgactcagcccatctcttaggatgaagcttcagaaatggggagacccctaatgaaagaacgcaccgagaatggtgcaactcccgccaccgcgaccgtcgccaagctcaagaacacgagcgggag

SEQ ID NO: 135363 - DNA, 830 bp, Zea Mays
gccatttcatcaaccaatgcctgacattaaaaacaaatgagtgtaagaacaatatcacacccggggtacagccagatcaggaaaaaccaaattacctggaggttggagaagaacgaaggaactcccaagtcgtgggaaatcagttgatggctcgatgaaggatcaacacccggagcaacccgcaatgcatcagtggcgaccaagtcagtgtcaacagcagaaatcaaaactctgtcatcaggagcgccgacctctaaggcgacttcctgacccgaagatcgagctactgccatgcaaccagaatgcggaggagaagaccctacgtgaacatccatggaagtgtgagagggagaactaactcggacaccctcgggggctgggtcatagctcatgctacccatccgagccggatcatccccggcgacaccctcgggggctgggtaagtgctagcgccctccttgaaggccgagcaatctgtaacagccacctctaaggctgaaggacgttcacccacttccataggagcagaacaatccagaccagcctcctgacccttaagaccacgctccaaggtcggtgaggcacgggacacttctcgagataactccaacccgacatcaggcacatcagcgcaaacttccatcattccaccatctaccggctctaacaacagatcttctgggaccatgtcttcaagagtcttatcaaagtttgccagagacaattcttgtagaccaatgagggcagacaaagctggagaaggaacaccactactttccccgctagctatgtagcaccggctgttcttccgtattagagggacttcatt

SEQ ID NO: 135364 - DNA, 369 bp, Zea Mays
cgcgcgcgcgacggataaactgctcatgcctttgtccctatgtctgcgcgactccattctcctccctccctctcacctcgcgatgccgcccacagcaaccgtgtctgcgtcccatggctacctagcgcgctcgcccgatgcactcctactgctgtgcagccacaccgtcacgttgacgtcgacaccgacgagcccttcttccccgacgagcccttcgtctctggtgagtttcctcccttctctgttctccgtttccgttttctctacatcgtgctgcttagtcatgctcccgcttgcgcgccccgctccgtagcctcgtcgtgccgtccctgctgccgctgcgtagccccgccccacacatcaggccgg

SEQ ID NO: 135365 - DNA, 877 bp, Zea Mays
gcgatctcccggcagacagataattctttgttgtctgggaggcagtataagaagtcatcttcgtttgtgccattgaacactaaggcccctttcggatacttcagttctcgggcatagtgtttagcttcaaaaatctcttcttcggataatatttttcccgaagcgtgtcgtacaatataatcaagtacttcggaagatgcttcgggagtagaagtgacagttttttcaggcagaatttgttttgtagcttcattttccgtttccttttctctggtttccaaggatttctccttggcgggctctgaaggcccagcttcggtctcggcctggctctttgcagcttcggctttggttagttttgtctcagtctgcatttttgaagcttcggcagtttttcctggagtagagcttgaagtctttatcgtctccagcacatctagtacgttgaccatccttttcctcttcggggtcgctgtaagatctttttgtgccttcaacactgtcacttctgccgaagggcttataacttctaatatatttgttctttcgacctctgtctcttcaatattatcggccttcgactcagctaatttggccgatgatgccttcggcattgcagccggctcttcaatcttatgcgtaagcgcaggttctttggcttcagtagccgaagaggtctcaccgccaaattcgggcactgtggccggttcaatatagcgcggctggtgagtaagaaccttcacctttctcctcttcggcgcgggctcactcggagcagctgaagtaacatccttcctagaagttgcactctttctcttctgcccccttggcgggtagcggtagtcaggatacataaatccaatagcatcaaaaactc

SEQ ID NO: 135366 - DNA, 429 bp, Zea Mays
cacagtgaactcatacaacccatacttggtaatgaatgccgtcttcggaatgtctgaaggtcaaatcctgagttgatgataacctgacctcagatctatctttgaaaacacgctggctcctctcaacctcgttgaacagatcttctattctgggcaaggggtacttgttcttgattgtgacctcattcggagctcgataatcgatacacatccttctggtgccatccttcttctccacaaataggataggggcggccgaaggcgaggtgcttggctggatgtaacctttctctggcagctcatcgatctgcttagttcaactaactctgatccagatactctgtaagctctcttaaagatgggggcggttccaggaagaagctctatggcaaactcaacctttcgctcgggtggcatgcctggtaagtc

SEQ ID NO: 135367 - DNA, 380 bp, Zea Mays
aactttagccgattgttctgttagcagggtatagtggtcaccctaagtcaagtaagcgtgagcatgtcgcaccgacttaagtcgtcgttgacttaagccaattgctccgttagcatggtatagtggtcaccctaagtcaagtaagtgtgagcatgtcgcaccggcttaagtcgtcgcagacttaagccgattgctccattagcagggtatagtggtcaccctgagtcaagtaagcgtgagcatgtcgcaccgacttaagtcgtcgccgacttaatccgattgctccgttagcagggtatagtggtcaccctaagtcaagtaagcatgccgatttcaagtcaagcccaattgaagtcagctttgagccaagaatctgaacg

SEQ ID NO: 135368 - DNA, 514 bp, Zea Mays
gtctagacccgttcctaggtgacctccaacaactcccgcgggattagaggactaaacatgcgaggagataggagttttaactgtcattcaatttattcggggaccgtccgcgcctatgactttatgagctatatgtatatatatcacgttgtagttgttctcacttagaagtgttgaaagtaaacttgagatattgatagttgtatccaaagccaagagtaaatgacatatagaattttctttaacaatcaaatatgtattaaaaaactatgtgtttgttgttacatcaacctacattatgatgatgtgagatatcatacagtgtcaaatatcttctgaaacatgcatggttacaacttgctagcttggtcctctgagaaatccagagtgtatatgatgcaccacacctcctcccatgtgctaggtgtcattcagaaaaggaaagagctgaataatggagggatgggccggtagatagatagctctagctgatgtgtctgcacttggataattc

SEQ ID NO: 135369 - DNA, 617 bp, Zea Mays
caaaacaccatcgccaactaacaccccaccggagacacaactcgtcaccaggagtaccccacacaatagggccgcggcgccaacaccagaggcagaggcaaaggccgggcttcacagtcgcgaaggttctattgcctttttcacggtgaagactacgcacaccccaccagggattgctccgaaaccaaggccaccaaagatagaatggccagaaatcagccagccggtaaccaacgagttgttgcgcatacctaccatccccagcaataccaccaacaacaattccacaacgatccaatccatcaccagcccaatcatatgtaccatcaacaccaagagatccaagtcctccctccacctccacaccactaaaatcctccaccacccccaccagcacccaaacaagaggacttcgccgagcaacctttctgtggggtcatccacatgattaccggagggtcaagtgcagacttcgacaccaaacggcaaaggaaagatcactatcgcagcgtcaatcacgtagccgtcactgggccagtggttcagacaaaatggtctcatgtaccaatcactttcgatgccagagacatcgatctacgtagcgcgccacatgcaaa

SEQ ID NO: 135370 - DNA, 572 bp, Zea Mays
ggcggcagtaggtaggtgcaaaagcaataaatgttatggggtcacatgggaccgatcgatttatatacacgagcgggcgcagaagccaagaaaacgtcgtgtccctactcaatgtcttatggaccagaaaatataacccttcattacaacgcttcgcatttcttctcattttcaataacgctcgaggaaggtgttttcaggccttcgacgtaaggccctcgtttgtttcgtggcttcggcatgttatgaaaacaaactaatcctgcaataggctactattggagggaatgcatttgttgaaaaccctcaaaacattgtactaccggtcattttcaagtgtgttccaaaatgacaacgaaactacccttcgtcgaaagcaatgcacaaccaaaaaacaaagctaggaagctttgtctccatgggaccaacgtgtgtacaaatacgaaggaactttgcctccacaataccgacatgagagcaaaggtgaaagagaaggatctagaagcttgaccaccacgtatgtgaaggaaaagtacaatgatatacccttacgaaacttttaatttatgtgt

SEQ ID NO: 135371 - DNA, 365 bp, Zea Mays
ccgggaggcagttagggagcggtctgatcgggcgagggagcaggtaaggcttgttttttgtttcgtgtggttgaatgtgggtacgtgtgggtttgctgaatgagtgtgctattgctgcagatggcgcatgctgaggatgtcaaagaccttggggatctgaacggcgcgtggcccgaggccgaggtcaacccggtgctgcccgaggctgaggtcgacccggccctgcgctcggaagccgttgagggctcctccgccgggcctgtgtccactgtgtccggtgaaggctccttgctagcccctgtgccgacggcggaggaccccccgaaggcggtggcgcagccggcagcggaggatcccatggcggc

SEQ ID NO: 135372 - DNA, 648 bp, Zea Mays
tggactcatcctctgccagttgggcttactgattccgtccccagctctgcacgatgaggatgcttgccagttctgcacgatgactcctcaagatacagcactgtatgcgttaggttgtcagcatacatgagaagacaactgggtcttctggaatggctaacaacgtactagaaatgaccggtagggttgtttgccaaacaccctgacatagagaagcctgctttgtatgaaagaaacaggaccgaaggtggtagatgctgaccattcacctgcattgcgttcgagataggccacggatgtgaaaccgcgacggcagcaggtggtagcatgtggagaaggagtgagttgaagagttcgggaggaaacagctgtagcctgaagaatgttttcaagcctaatgacactgaacgatgtagtggcgttctggctacctttacaacagctgcattgcgatctcgatgaacagctgagttggagagtttacaacagctgcattgcccacgtctccccacctcacaagaatgtacatggctctcatgagctctggaggcccatacgatgataccactaatgatgagacaatgcttgataagctgacattctgttggcgttatggaactgtctgggatcatatcgctaaggccttat

SEQ ID NO: 135373 - DNA, 560 bp, Zea Mays
ggaagacaagacaaaaataaaagaaaaaaagaaatcgcgtggtgggccgttttactcccgtcggccagcccatgaggcagcccgcctcctcaccttggggccaatatgtggaccccgaaggcaggccatcacccacccgtgcacatgagtcaccttaggcagatatatgggccccccttggtagccttcctttcctcacctcgcgcgacatcttcgcgcatggccgaccccgtcatccccgcccgctttcgccctgggctgttgcggccttgccctcgggctactaaagcctaagtcatccatgccatgcgccctgaaccaatcactacccccacacaaagaaccgcgtcaagcgaccagattcccaccgctgccacaggaagaaatcacgctgtcgccgatcaagactggagcaagggccctggtgcttctctgggctacactgatcgtgcgcatgtccgggccataggatcttggtcgaacaactatagtactgatataccacttcgcacgcagaaacttctgaaagagcccctagtgttttgacatatcatcccgcc

SEQ ID NO: 135374 - DNA, 697 bp, Zea Mays
tgtcgtcctaaataacaaataacagaacaacaaataataggacactgtgagtatgttggacaggaagtcataaaacgctatctgaaggcacagacattgtgtgcgacagacataggatgtttatgtgtacaggattgaggaatagaggtatagtgtcactcatgcatatagacctacgaagttgtgctgcgtttgtgttgttttctgcgttgtgctgcgttcgtgttgtcacccatgccccatgccaagaagtacaaatgtaattatttatggtgagaagaagtacaaatgacactcgaatggatcactcgctcggcatgtgactggcccaaaataagtgaccgaccacactaactacacttagacgtccacgtggcccatgggtccgtgtggcttcacaccatggtaaaatgctcggttgtaccatcgcccagtgattcctttttgaggaagcaaccgacggccgaccccctccttggcctatataaggagaaggtcggtcctcgtgcataggagggagagagaagagggaagcacagagatacgaggagatgcacatacgggcaccaagacacaaatacgacggacccagaggccagagtcctgacgcgaagccaagacttagctaggacaccactctgtagcccttagctccacatcgtccactgtgaatcatctagacccctaagtggtgttt

SEQ ID NO: 135375 - DNA, 728 bp, Zea Mays
gttctgtgttggcgggcagtgggttacagcaggtgtcgacgacgtgagtgttgtcgccgggagagtgttcaacacagccgtgctttggacatcctagtacttgcctgtgcacgtggcgtgaaacggaccaagccacctcgccgatcgtcgaagaccgtgcgaaggttcgccatggagggagaagctggtaagggcgtccgattggagaagggtcgtctcgggctccggctactgctgcgatgcgtgtgcgccgccgctggtatgcctcatgctgtgggcgggtctcggcgcaacatccctgtggtgagttttctctctagtgcgcgctttcacggattgcgtgtcgctcatctttctgttgtgattaactcaccattgttgcggtcgggatttaacgacgaagtcaccggcgcgatgcggcctctacgtggtcgtccgggcacagacgtgagagagtgagctgtagtagggtgaggttgaagatgaccttgggccgttgaataatagatcatcggttaggattgtgcctgcataccggttcggccaccttcgttttggaccgtccgatcggaatctagcgcttgtgagcgagcctggcagtttaaaatccgaggcgttaacccttgaccctacggctacgactgagtgagatgcgcatagcgcgcggcctgatccacaccgcatactgccgatccaatggcggggagtactggataccccttcgaacc

SEQ ID NO: 135376 - DNA, 571 bp, Zea Mays
cctctagccaatgcttgttggcactgcggagaccccagtcactacaagaataattgtcctcagttgaagacatccgtgcctacctactccaactcggtgaatggccccaagaatgctccagcaactgcctccaaggcaccctcctccaacagccagctaagcaagacccagtttcatggcagggcatgagtgaatcacgtcgacgctcaagaagctcagcaagcctcgggagtagtgctcggtgagttcctagttgaatttaccctcgctactgtactttttgattcaggagcatcccattcattcatagccactagttttgtggaaaagcatggcattcccactgcatctctagaaattcccttggtcacccgaatcccagggtcagaccttctatgccacctcaaatgctcccaagtcagaattcttttaagtggggtagtgttcttggcagacttagccctactcccatcccacggaatcgatgtgatcttagggatggattgattaaccaagcataacgacatcataagttgcgtagataagaccattcttctcactgaccaccaag

SEQ ID NO: 135377 - DNA, 444 bp, Zea Mays
gccgtcatctcccgactcatcagccctaccggaaaagccttgaccagagcctcgctactcgctagctaggtagacattgtggtggtgcaattcgcgctgcactgcactgcgcggtgcacgccgtcctcgcgcgccgcttctctagttctcttcttcatccctggtcgtctcctaccgccgactgggactaactaaccgccaaccccactaagctacctcgtgctgctctgcgtgccatctccaccacttggggtcctccaaagcttctccaattcccaccgctttccgctcgtaaagcgcgcgggagcggctggctactgcgcttgtgctccacttgtgccactgccacccttctccttcgcccggccagccgtgcctatggaagcatgcataagcgtctccttctccttatatacccctcaacgtcttcccgtcgtagacgac

SEQ ID NO: 135378 - DNA, 363 bp, Zea Mays
ggcatacacgtttgacaacaccgtgctcaggcaaacccacacttccaatctacttatcacatccaaccaacaccacgatgattgcataaaatatatttaacatagactaactcattagtcgactatggaaaccactaagcatgttttacgctttatttattttaccccaactaacacactactttacgacgaagtgctttagcaaacaatttaatacatccgtgaccaatctctacgacgcacaaaaagaaactattgtacctacacatatatccaatccaacaaccaaataacatatcggctcacccacgcacctacgtgtccccacaacacgcacaaggcatcaactgcacaagtgactct

SEQ ID NO: 135379 - DNA, 647 bp, Zea Mays
gttcggtcacggcgtgggctcaggagaccagcgacggtgtcgccacggcaccgacgagggcgaggcgcagagcagcgatgtcactgagtggagcaaagcacgtaggaagcgagagagaatggggcattagtgagaaatgagagcgagcaggggcttacgagcgagcgggcgaggagaaactcggccggggtgctaccatttataggctagtggggagaagaaatggatgaccaattaaagaggagagcagagcggttacaaccattaatggcgtgaagaggaatcaacgtcgtggtgggagagagagagaggaaggagagaggtcacgacggtagaggtgctccatttctgagctgagcaggcgaggcagcggtgttgcttggctgtgttgctatggagatgagggggcgctcggtatcgggcgtagcaaattaggccagaggctggtcagcagcgagaggctgcgtgctgacttccgatcgaaagatgcaaaggagaagaaacataaaaaaaaatgactgacatgtgggacccaagcgctggtgagagaacgtgagaggaggctacgagtgagttggtttcggagactaggtgcgtacgtccgttctttaaatttcaaattttgtttcctttttaatgcgtgagtg

SEQ ID NO: 135380 - DNA, 355 bp, Zea Mays
gaaaaacttctgaactatggccgatgtcattgtagccaatggtttagcttcgattcgtttgaataagtactcgatcgctaccacaacatatcttaagttcccatgagttggtggtagtggtcccaacaaatctagtcctcatctctgtaatggccaggtaggctgaattaattgtgttagagaagaaggttgctttttgtccctagcacacctctggcaattgtcacatttctgcagcaagtctgctgcatccgaagcagtttttggccagtagaagccttgcctaaagaccttgcccaagagtggcctagatccaatgtgagcaccacatatccctgaatgaatttctctcatc

SEQ ID NO: 135381 - DNA, 1277 bp, Zea Mays
cttgcagctgattgtgcaccggcttccctgtcatgtccgggttcgggacactaataaaaaatcagttgacggagcccaaacaaataggatcttattatttcgttacagttccattttggtttgtgcatgttcaagtttgcatttatgtacatatattcagcaaataagattgactcaaaagatgatatttgactggcctattatttaaagcttaattatggggggcatggttctttatttcaccaaacaagtgaattatgttttatttgctgtgaattcatgttctgtgccttgcgtgcaataatttaattatactatggtacgagtgtatgtgaactagtaactgaggccctgagccttggccttcttttctttctgctgattcatcacctgtatgcatgtaattcaagttgaagaaaatatattgctgctacttacactccagccatgttcttctgtttgcatatgtccatttcccttttattactctgttagatacttagattgatttgtactgctaggctttagcaatgcatgaaaggagtctactttacaagatgagttttaggttgtcataaatgtgaccgatatttgctatttacttaaactttatttaatgcactgttatctggtttcagcctttcagctggaaaattacacatgctcacctgcattatatactatgtagaatactagaatcgactatgcaaaggcaaaacatcacataacatcatgctatttcttttttgaccgttttctttaatgtgactattgatgctgccatttcatgttgagaaacataaagagaactctctcttgtcaaagatatttgacacatttgacttgcatagttttcaatgcatatctttgaccactaatgtattctcatatattcttaaaatccttaaagagattttgcaagtattttgaatctaaatatacacatatagcttacatgtttccaaactaaataatgcaatagctattgatgtttgcagtattcaaagtttgacaaaatctccccctgaagtagccttttttgtggccagagggagtaatagtctagtttcaattaaacactatgcatttgttaagattgtactcagaacaatatatttactttgtcaaggtggactttggtatagtcccatatctaagtccagcgcagcattcgtatgtttctctcacttctgtgggaagcaaaatgtttctgcccaacctcaggtccatgaattgttctctcttcctgtgatgaaatgcaagcacctgactacgag

SEQ ID NO: 135382 - DNA, 510 bp, Zea Mays
gtcaaggtacttgtacaaactcttgtttaaacaacatgaaagagaaacacgtaataatataacttgtcttacatttggactgtgtttcttcatcttacattatcattacttgaatgttaatgttttatccgcttgtttaaagccccatcttcatcctttcaattttatcttctccctagagatggttaaccaaaaggatggagatggaactagatttaatttgttgtcttgatttttttcttataccttcatgggattgaaatcaagtacccaacattggcttccacatccggtgaactcacaaactccacaagaagcttcatcatcaaattgataaagaatatggcaagtttcagcacttcatcaacaagcctgaagaagtttattctcccaatgatggtatggcaagttttaaaccagctaacaagaggtagaaaaaataagctcaatgaagggtacaacatgtcggagtccaaggacccttcgtcaaatctaaatggccccacatcc

SEQ ID NO: 135383 - DNA, 460 bp, Zea Mays
tcttcaacttttttagcctcttctaaggcgtcatgagactctttctcattttttctaatggcttcatcagctatttctcagccacccttcagccatacttcggaaaaaaacttcccatctagagtagtagcttcggtcgaagggtttctaacatcgttggctgagaaggcaaaatctagctgaactacagccttgacatgatcacagccaaccttttccaaaatggtcacaaccccatgggcatgggtaaaagcacaaaaatccactctgtcactaagaatctcctcaaaggcttcgatcttgccgttaatccattggataactctataacggtcaccacaaatgaatttttgctctgaagaaaacacaccaactttggaaaagctgttcttagattcttggcattccatagctaaaccgtagcatttttctttagctgcacgaaactcgccaacatttc

SEQ ID NO: 135384 - DNA, 499 bp, Zea Mays
cagacatttacaacataatagtgatggaggttcaagtggcattggggacaacatgattttgatggataaaactgcctctaaacgttcctttcaggaagttgaagaaaacaggccaccctctaaaaaggttgaagtattagttgagaccaagaaagaggcgagtaaaccacaaggggaattgtttgaagtggcagaagtgtcagcaaaagggaggggtaagtggtgttttcgatgcaggacaaagggccatgtgtcagtggaatgcactacaatcttgttctgccaattgtgtgaaagtgatgaccatgtcgctgctatatgcccaataaagaaaaaacctcgtccgattgcttactcgatgggttatgcgatggatggtttgggcttctaccatatcccccatggccctatttccatgtcgaaaaaggataatactttggctttgatcacagttatgggaggcgagcttaaggaagctgaacttgttgctcatatggag

SEQ ID NO: 135385 - DNA, 483 bp, Zea Mays
ctggccacagaacttggtagaggcaaggtagccaaacagaaaacaggggttcagatacaagtagtctgtctttctctctctctctctccccagttcttgagcggcatcaagcaaaatggacaagagcgttcctgtagttagcaagatcttttgctcaggagctccaacaatgctgatgataaggaggagacctgctgtggtgaacggtggcggttttgttgttactgacctcagccatagcattgtgttcatcgtagatggttgtggaacacttggatccaagggagagcttatggtcaaagatggtgaaggagaaccaatactatccatctctaaaaaggtaacgggtcataactgcaaaatagcaacccttgaacagatcgatatgcatgattccttgttttttccatgattttgagtgtttcacttgaacagaagttaattgataggtcgacaagtgtagctctatcaagttgatctaat

SEQ ID NO: 135386 - DNA, 328 bp, Zea Mays
gtgatttagtggttgtggtcatcacaactagagttttcttcgagttcaagctttcacagtgaaccaaggagtggggaaaggtagaggaggtagtctagacatagggaagcaaaaaggacatgttgaaactgctatggaatcaccaggacttgttgagattcagttctttggtttttggatgattttgagcagtcaccacaaacaggagtttctaggctttttagctcgaacttagcaagggctaactacactaatagatcccccaatacctcttcatggtaaccacgcaagcccgcacatagtaaaaaactttacacctccccctttg

SEQ ID NO: 135387 - DNA, 746 bp, Zea Mays
gctctcagcccgatcctggagtagctgctgctgaagcaaatcctgtctgtcctgaatggtctggaacatcgagagcatcctctcggataaccgggtctgctcggctgccaggtgagcctgctgctgagtgagagactatagaatcgaagcaagggcagggtcaatagccggaggggcagcaggggaagtactagaactcccagcctcatgatcatgtgagcgtggaggcatcggagccggaggcggaggaggaaccccaaaatcatcatcatcatcatcaactgctgtgtcgaactaacgaagagctgcatcctcggcctgagagtcaaaaataggagcagaagctggcacaggagcctcaggcgcaggaccgtaggatccaaagacaaggcgtgaggcctcaagcgtgccctgaaactgtggaggccgaatcagctgcgcaaagatgtgacacaagtagtgagcatatggcaactgtcgacgagcacgaatcccatccaaaacggtgtcctcgatctcacaaataaggaaatccacgacgtcaaactcagagtgagagaccagggcaccaaggagccagagctgaatatgtgtggtagcctccctgtatcccatcctcggcagaagagtccgtctgataagctcaaataagtacttggctgctgtagtaaaatctgccggtgaacgtcgcgacccatctgagaagggcgggcggaacagagccgcgacgtgagctgtacccggag

SEQ ID NO: 135388 - DNA, 581 bp, Zea Mays
gttttttttaactcagaattgaatttacttgaagttcaaattcaaaagaataaagaataggaaagaaaacagaaaaaaataaaaaaagggggaacaagacctatttgggccgaatctaccgtggcccatctccacctgaacggcttcatcgcgcgcacaccgcccacgggtggctccctggcgcgtgggtcccacaccggcttcacactcacgccgcaccgcgggcactcgctgccatgtgggcctgtgtccttgccgcctcgctgtgtcgctgttgcgtggtcccgcgttgtcatccctttccccgtttcctcgcgtagatcgggtacgatctcaacggagaccgcgtgattcccggactcggttgccagctgccgtgatctacggaccttgtgcggagctataagattgggcgcctgggctgtcgtctcttcctcctatcaacgcgtgctacccgcgaccgagcgtgagagagaaccagagaccggaagagggattgctgccgccgccataagtcgacccgtgcgctcatcgccaccgcgtcctctatgtcgtgcctgggggcttcactggaccacgag

SEQ ID NO: 135389 - DNA, 653 bp, Zea Mays
acgtcggcttgcctattattatctctatataaggcacaacatacaccacaatatttttataaacatacatattcacatgtatattcacacatcgaccaaatcatacgaatcgtaaaccactaatctccaaatcgaaatcaccatgcatttacttcccaaatcatgaacgcatacatgtttatcatacgaaccgagtatttcaataattatcctaaaacaactaactccattacacaacttgtatcacaaacctacttgacttacttaaagcgtctactcgaaatcgtgagcacagtcatacactacatgcaaagcataatttaacgagcgcataatatgcatcatcacgactcggcttataaatatagagaaagcgacgactactttggcatgtcaccacctctctatataagccaaaataatttctacctacaacgaccaaacattcatgtcgagcacacttcattttaccatgtctcgcatacaaccatatggtggcgtgcactcgagacacttcaatcaatgtggcgcgaccactaatatatgaactccgatactcatgtcttaataacacatcctctacgcaaactagcattttctaaactactcgtcacatcaataaatatactccctatataatcatgaatcccatc

SEQ ID NO: 135390 - DNA, 452 bp, Zea Mays
gacaggagtagcgttgtgttgaagaaagggctactgaactagagaatacactacgcaagcaggtgaataccatattcagagtggtatgcaacatgcttggggacatccataaggtatcgaatatgtttgatatgccaccgaatactcccaccaaatagagtactcaaagaggttacaaagcaatctgagagggactacaacgcaccagatatgtttggtgttacatcagtcattgcaccagatgcccatattcaaacggttggcaaaaactagtttcaacaactagctaatacagacactcatgtctatatccggtgcaagcacgtagagattctgcattggttccaaccgctagttttaaacttggaggctatatgtaccaccccaaccagtcatttgagacgtgtgagagatgataaacattactagagtgttgaagctccatttctata

SEQ ID NO: 135391 - DNA, 436 bp, Zea Mays
aaatcttcttcataattagagagaattagggggagaaatgaactaattcctctctcaatcctttccaattgcaaagcagcgttgagttttcaaactagccctcaaagtaaaaagatacgacatccgagacaaattatcggtctatacaaggatggcatcacacaatgaccctatttggttaggcttataagccgcttatagatgggaaaacgccaaaatctagtccaaacaccgcacttcttgcccgccacacgcgactcccatgaacgggattacatagacgactcacattctcgtatcacgacttcaacctcgcggtttctaaaacgcggtctcacccacgcccccacggtccaccctcaacaccacgtccttgaccatatctaccccgtcgctaggcgctcgactccatgccaccgtcgctaactctgcctga

SEQ ID NO: 135392 - DNA, 445 bp, Zea Mays
ggggggtcccaagcaaaagacacacctttctttgtgacttcgtgaaaaggggcagcgatggagctaaaatcacgaacaaaatggcggtaaaatcctgcaagtccaagaaaactccgaatttgggtgaccgtcgttggtgtaggccagtcctgaatggcttcaaccttgctgctatccacctcaataccctacggagtaaccacataaccaagaaacgaaacacgttgcgtgcaaaatgtgcacttttccatgttaccaaacaagcgagcagcacgcaaagcatcaaaaacagcacacaaatgttctaaatgctcctctatagacttgctgtaaataaggatatcatcgaaataaacaacaacaaacctatgaaggcccatagaacttcgttcattaaacgcataaaggtgctgggagcattagtcaatccaaatggcataaccaa

SEQ ID NO: 135393 - DNA, 364 bp, Zea Mays
ggccatgacgtcggcggtatatccttgtggagtccttcctccttgcggcgacacttgctctgtgttagtaacaatgggggcaccccgattgtgcctcctgttgggagcgacgtctccgtggtggctatgtcgtggtggttctggtcacttggtggtggtgaggtgatcaggacctatgggggctagggtttcggtagaagagagcattggcttccgtcgcaggcgtagcctctgtttatatagagcccaacgttatcaggaccacaaccataggtgtggtcgcgccctcaatcaggtgcacacgtacgggatgggagaaaaagagtctcctagtttttccctatttgtgttaccagaaaacata

SEQ ID NO: 135394 - DNA, 656 bp, Zea Mays
ctttcttcgctacgaccgaatcacgcgcaacaacccccacgctcgagcaacaaactcactgtgattcgctcaacgcatgccgaccttggtttctcccgcaactgaccctctcagctcagactcgccccctctgacgcatatataggtcaccgtgaacccctgtgccaatccagtagccatggcgtgcagagatggaagggagagagaggaattggcctgccactcaaatcgttcgctgccggtgtgtcttcggcctcgaggtacggacccactgtagttctccatctgttgtggttgctcatgtgatcgacggggtggggtttcgccggagctgtaccatacgcgcatcaggccgccatggggggaaagacattcctgcatggttgttctggtgtcagcactcagcaggggaccttggggcatcgctgatcctcggggcaggtgctcacgggagtagctagtcgtgggagtccttggcgccgtcacaattcctcactggggccggattgcactactccggcaacttctgccatggggaactgtggcgccaccgccgtggtgggcgcatgccttcgcgatggtgactggggaagggataaagtgtgatggctgttcatcacggaaccatcagctcagaataagtgacagataccctt

SEQ ID NO: 135395 - DNA, 559 bp, Zea Mays
ccgagaacaaatccatgggcgagcgggcgggcgcgagcgcgcactgaccagcgggctagggtggtcagcgaccaggggtggggaagcagactgaccgaccaacatgtgggtccaggcgcagggcacgcgtgcgcgaagcggtatccggtgatccggaccgcacgatagatatcagacggctgaaatcaagcaccggaggggttaacggttgcgggcggtgccactcttgctcacgacgatgaggtcgccagagctggggcgggtgtgggctacagtggtttcgaggtcaccggggttggccaggatcggcgagaagaacccgatgaactcactagtggggttccggccacgagaccgggaccagagatgggagaacggcgcaggggagacctccgggcgggttggggtaactccggcgaagaatctcggccacgagatgggtcgatcgagtgcgatagggctcggtctagttcccatgagggtaggggagtgctatgggccaacattggggcatagggcgggactgagttggccggacaccgcgtggggcgcggcgagc

SEQ ID NO: 135396 - DNA, 339 bp, Zea Mays
cgaaggatgaggcagccgcggagccccaaactgggatggtacaggagcggttggtgcaggagtaggcgcgaccaagtactgagggaaacctggcataggcacgaactgagaagccccgggcatatagaactgctgctgagggggtggtacagaaaattactgctaagcgattgacatcacgttgacagtgccctgcgaagaggaagaagtaactagctcccatatgagcttcccattgggattcctcctacacaccacatccttgtgatcctggctgcagatagagcacctgccactccactgacactcggcacggcgatgcgcttcaccacaacggaa

SEQ ID NO: 135397 - DNA, 280 bp, Zea Mays
cgagatttaaggaaatcccccatgtaatcaatccatcatcaaactgaggattttggagccttgtgaaaccagcatctacccaacagcaaggaagcaagcaggctagctagggagtagcagtagctagcagtagcccttctggttgctggtgcagcatcagcgtccacagtagtccaggttgggtctggcaacatggcattatatgtcggccgtgaaacattcttggggtgttaatgtgttatatcccaggcacaagcacaacacacgaacgaggttgccg

SEQ ID NO: 135398 - DNA, 652 bp, Zea Mays
aaaggagaacaaatgagaggttggttatgaaataattggggaaatttgggctagccagttgcatgggtccgacctagtcacgaaccagccagccaggcgcgtggaataaccacacaaaaaataggacgtggggattcaaaccatgctctttcgatacaagcgagcgtcttctaccactataacttatgtctgtttatgttatataaaggagagatattgtatgtgtgcacacatatatacacacatacactataaaactgatgtcagccattcacattttgttcaaccatccattatcttttgttgagccatttctaatcaataccacttgtcgggtatcataattaggggtacccagattatgcccctaaaacacacttaacccttagaccaccttcaagacacattccccgagatcaaaggatcataaaccgcgcttcgcccgaggccccgctcaggggtcaccataggtccgcttcgctcaagcctgccctcggacatggtgtgctctagggagaattctcgtcccggccgaggctccatctcccagaacaaaagtctttgcctcgcccgagcacatctcgggtaaggaagacaaccccaatgcaagactcaaccaaagtctgcagggggcaggagcattcaatatgca

SEQ ID NO: 135399 - DNA, 645 bp, Zea Mays
atgtttcatcaggaggtcatgttagcgctaagacttttcagagtaacccatctcagttttgtgttcgtgcaccaatgggatctcatggacacaggtaccgaccaccatcatatcctcagcctcctcctaacacagttgttggcactggtgtgcccctctcacggtgcgcctcgctgaacgctgaggctcagggaacacaacgcccacaagttccgccggcaggtacaatatcgaaggaatcacttgcaaatttggcacgtcggctgggattaccttattacaatactaatcagccattaggtcagcagtcaacgagcacatctcaatttctgcatatgcatcctcacgagatgctacctgctcaaggtgctcaaaacacgacctggcaagcttacgttaagaaaagtgtggcaacaacttcacaaatcgtgccttctagtgaacataattcgtcaattcatgcacctgggagcactgttcttccatctggttcagttcagatccagcagcctttgcgccaattcaaatcgggcactgttctatcatctggtgcagcccagatccaccagcagcctctgcgccaactcgattctcagagcagtgttactccgagtgaaaccgttccaagtactctctaccttccgc

SEQ ID NO: 135400 - DNA, 512 bp, Zea Mays
ctaccgtgtagggttaactcgaacaccgttgtgtctttcggtgaacgccgccgagggcagtgtccatgtcgactggccaaaccgtagcttctccgggcgaacttgggtgagcaccgtatgtttgatgtattactggtactcgtcgtaaccttggattgaaccctaatgtgctcgagacctcggtacacctcaccagagctcgtcaatccgccatcaacgtggctagtgagactctaggtgttttgaggttgattaacttaggggaaataggaggtaagtctcggggatcacattggtaggctcggtttcatcagagatggtcgccatcggtgggtctaggcggcggatggccggtgctcatcggggttagaccgtggaccagagtttgtgaatagaagggaagccgagggcatatgtgcaactgtcagtgagagggaaaaatagtgcttagacctattatccagttacccaaatcggcaggggtctccatgcgaagtacgcagcgcgagcgc

SEQ ID NO: 135401 - DNA, 530 bp, Zea Mays
tgatgccctaccctagacgaacgtgatggatggatacttacccctcaacactatgcggacagtcaaggtgacggcgggcggtgaattcgtaggtccggttaggtcaccgtcgtggaattggccgagtctaagcgcccgacgcatagggacttctctgtgcacgcttccttggtgtcgaccgaccccaatccgacgacagcaaggccacggggcgaagtatgcaacgacggtgccgatcgcaggtgtcctttccgcccacgatgaggcgtccaaatgatgtggtggttgtcggtgcacgcggacccgaggaggggaggagagggaggttatggccggatctcttatgagcgcgcggggacagtcttgagttcaacgccaccagccgccaagaccgcaacgacgcccgtggagtacggcgaggtttttgacgaacaccctaatgcactggccccactccacagctggacagggtgcgctagtccttcccagcgcaagtggctgaaaactggggcccaaccgatagcgcgcag

SEQ ID NO: 135402 - DNA, 852 bp, Zea Mays
tgaaatataccttcaggtttagagaccaatttatcgaaccagacgatgactggatgaaatgtgttgaaaatactagtgatgaactacttgggagtatactccaagtctgaagataatgcattatccgcggccttcgggagtcgaaaaaagaaaaagactaaatagggtttttgacgctattggatttgtgtaccctgactatcggtacccgccgcgggggcagaaaagaaagggtgcaacttctgggaaggatgttgcttcagctgctccaagcgagcccgcgctgaagaggaaaaaggtgaaggttcttactcaccgaccaagctacattaaaccggccatagtgcctaaatttggcggtgagacctcttcggctactgaagccgaaggacctgctcttacgcagaggattgaagagctggctgcaatgccgaaagctggcaaaattgaagaaccgagaaccgaagggatgaaaacattagagattctaagcccttcggcgggagtggaggcgccgaagacgcaaaaagatctagtagcaacccccaagagaaaaaggatggctagcgtattagatgtgcttgagacaataaaaacttcaagctctactccaggaaaaattgccatggcttcaaaaacacaggtcaaaaccgagacaaagctgaccgaagccgaagctataatgatccgggccgacgccgaagctgggccttcagagcccaccaaagagaaatcctcggaaattggagaaaaggcagcagaggaagaagctatagaacaaattttgcctgaaaaagctgtcgctcctactcccgaagctttgaaagaaaatactgaatattttatccgtca

SEQ ID NO: 135403 - DNA, 392 bp, Zea Mays
gtagtgtgatggttttgaaatttctttgtatttcgcgacttatagtggtcaccctgagttaagtaagcgtgagcatgtcacaccgccttatgtcgttgccgacttaagtcgattgctccgttagtagggtatagtggtaaccctaagttaagtaagcgggagcatgtctcaccgccttaagtcgttgccgacttaagtcgattgctccgttagtagggtatagtggtcaccctgagttaagtaagcatgagcatgtcacaccgccttaagtcgttgccgacttaagtcgattgctccgttagtagggtatagtggtcaccctgagttaagtaagcatgagcatgtcacaccgccttaagtcgttgccgacttaagtcgattgctccattagt

SEQ ID NO: 135404 - DNA, 484 bp, Zea Mays
tctaactatctctttaagatatatccgggcaagggtggctccttcgaaggtagttttcactgggatgaagtgggccaccttggtaagacggtctattatcacccagatagagtcgttccctttttgggtccggggcagtccggttacaaaatccatgcctatttcttcccacttccattcgggcactagaaggggttgcagtagacctgcagtcttctgatgctcgaccttagttcgttgccaagtgtcgcaccgggccacatattgtgctatctctttcttcattcctctccaccagtatctggttttgaggtctaggtacatcttggtggtccctgggtggatggagtaggctgagttgtgagcttcctcgagcaggacttctcatgcctctccttttggtacacacagacggttcttgaaccaaaggactccttcctcatctgtcctgaagtccagaagtggttccttgcgagcttttcca

SEQ ID NO: 135405 - DNA, 433 bp, Zea Mays
ttttcagccaccacccaagtagtatggagtctggatttagctttagcttgagaggaccaaggtataacactaattttgaccccagatattttcagttttagttcaggaaagttaacaacctcctccaatctttcctgtgaggggaactgcattaaaaatccagatggacatttggtggctttccaagttcttccccagggaaagtggaaactaaaatcttgttccagatcctcacatctaatctctcccacaatgactttcaccaaacctaaaaaactttttctaggtttcttggcaacatttttagcaaactgagaggcatagaaacctaatccatcagccgccataccaacaataggcatggtaggtttactttgtttaggccaaacacatttagcagtgacatgagtttcttttctacaaatctcgcacc

SEQ ID NO: 135406 - DNA, 515 bp, Zea Mays
cccggctaagtattcttccaagaggggtagaatcataaaaggacattggtgcacggaataatgagttgagtaacttagaaaataaggatcttgatgtcttgaccccaagaacaacaactgctaatgatctaaatagcaagaagaacaccgagaagattccaattgcaatgtacacagaagtcaacttaagagtactaacatcaggattctcgacattagtagccatccatgaattctgtgatatttggccacatacgaaaattatatgggaaataatacccagagaagcatagaagaagcctttattctgacgcaggtagagaatataaggcttgagaccagtatcacccatttctctttcttctgtcttaatcagttgatctgttggtgatggtttcaaagactctttgtatctgcttccatgaacatcaattgtcttcttgatcaatatttcattttctctatggggaggcaccctgttaagatctgaaacaccaatagtgtctttatgggca

SEQ ID NO: 135407 - DNA, 816 bp, Zea Mays
aaaagacataaaaacggattatttggaaccaagccatcacatccagaaggcctagaacttgcaaccagtagacagtagtaattggcttccagatccaaaagaaaaaacttaaccccaccaggcaggaacccaataaaacaccaaccaactcatctccttcctggagctccccacacaccctccctgcatgatgcaatcctaaagaaagctgctgaaacctaaagctggtagaaagctgcctcccctcccccctatggtgttgtctgtgtagcagcaaagccaaaaaaacaacactgctcctccaaagaccttttccaccctcactctctctctctcctctcccctctcctcgccctctctctctctctcaaattcattcctagctgtacccacatctctctcccccggcccttttgttttgtttattcacaactctcctccgtcctcgctctcatctggtccgcactccggaggagtgatttacctccccctccggcctccaatcttatatagagatgcctcaattccattgccccattcccatcgcctgacctccagctccaggcttttgaattgtgatcgtgagagcaagtagaacacggagagatttgtttgcacagttgcaggagagaggatatatacagggagtcggttctttggtttgctgatttgcttggggtggcattttgttacccaaccaaagactgatctagcgagaaggagaggcacacaagtgacggcagtgccgtgcgcgcggcgccacccccaccacaccatgttgagttcttgcgcgccaacgacggcctttccgccccc

SEQ ID NO: 135408 - DNA, 939 bp, Zea Mays
gcgccagtgcgcactctggcgtctgggcacggcgtcgagcacgaggcagcgcagagagaggtcatgttcaagcgcggattggctccaaatctttgagattatggccatgatcccgttgagagatctattcccctgacattcctttgtcgtttgtgtgtggaggcttatgggtttcgctgactggatcaagagatatggaggggtgaagttgggtttgtctcactgctgaacaccgagagaagatcccgggtttgacgtgtctagggctcgtgtcccaatgccatattcaggtatgaggtagaggggttagttaagcacatttttgtcaatgggagcttagggttttgagatagagattaaggtgaacgcgctcaggtttggtttagaggctaaaaattcagaaatctgaatttcagatttccctatgaaacctccacttgcatggcttgcttgaggtttttaacaaattattttggccaaacttttataatctttattgtagcttagttagtgtattctacttttaataattggcctaagccatgattccatgtttttcatggtctttttaccccttttcttcctttctacttaagtggctcaattagggttgatctagggtttcaacatttttccctttttgaaaacctcatatggttttggcatgattcttttagataaatacttagtggatcttttattctcaagttgattggtgtcttttgcccaatttggttcacatgaaataatggtcctagagttagtactgagaagtaaccttaagtgacactggggtgtcatagccttccccccttaaaggaatctcgtcccgagattcgggtcagagtcctcctggggtgaagcgaaggttaaggcttgcttgaagtgggtaacattcattaaggttcttcttggcaaactgctcttcgaatgtcatct

SEQ ID NO: 135409 - DNA, 275 bp, Zea Mays
gagagataaagcttgatcgggaacagtagcgtcgcaagatctcaattgggcggatacaccgtcaacaaaatcctatggtcatagacagataagcaaaaaagataattcgccagtatgaacaataaagagcaaaatgttgactcacctgaagattggaaaggaatagtggaagacccaacgcaggaagggctggtgcatggtttgatgagggaagatcagcaggaacaatctcaagagcacgaattggggtaacttcagccccaccaacagacagc

SEQ ID NO: 135410 - DNA, 295 bp, Zea Mays
caaccaaccgccagcaaatgcatgttggcactgcgaagaccccagtcacttcaagaacaactgcccccagttgaaggcatcagaacctgattactccaactcggtgaatggccccaagaataccgcagcacccacccctaaggcgccctcctccatcagccagcagaacaagacccagtatcaaggaagggcatgagtaaatacatcgatgctcaggaggctcaacaagctccaggagtggtgctcggtgagttccttgttgaatttactcccgctactgtactttttgattcag

SEQ ID NO: 135411 - DNA, 522 bp, Zea Mays
atttgaaagaggcacaagctcggcaaaagaattatgcggataagcgacgtcaacctttggtctttcaagttaatgaccatgtgtacctgaaagtatcaccaatgaagggtgtaaaccgtttcggggtaaaagggaaactggcaccccagtatattggcacgtttcttattcttgaacgatacagaccagtggcataccgacttcaactgcccgaaacattgtctacaatacataatgtgttccatgtatctcaattgaagaagtgccttcgggttcctgatcgaaccatcgatgtggtagatgttgccttggaaccagacttaacttatttagaacatcccatttgagttttggatcagaaagacagggacacccgaaaaaggactctaaacttctataaggtacaatggaaccagcatactaaagatgaagctacctgggagactcaagacttcttggaaaagaatttttctaggtttttagcttcatgtaacctgtaagatatgtacatttggttgtaaa

SEQ ID NO: 135412 - DNA, 490 bp, Zea Mays
ccaaggtttaactatggtaaaccctagacccagttcaatttgaagagcaacagttccaagcaactcctatactaagcacaagcagaaaacaacgtgtgatggcccgtggccgccggcgagttgtggatcgccgcgacgtgagcgtggacgccgtcagaagcaggacacgagtctcaggtagtatttctttctcaattattttcttaacccctcctcaagtccgagacaacctatatagttcccttacatgggccggcccacaacgcaactcacgcactcacccaatacaacccagaatggcgcacgacaaccttcgcttcaaacctcatctccttctgattccactccattgctctctgcattctccgctatggcatccaccggtgtgacatctgccccccctgcaacgcttgcttggccccaagcaagagcatccggatagcgctgacgcagaacatagtaatcttcccaggttgtggcgtccgctgga

SEQ ID NO: 135413 - DNA, 409 bp, Zea Mays
aacacgttatgcacatccgatagactatcgggtaactcaagttggtatgccatctctccaacttgcctaaaaactcagaatggtccaatatagcgaggggacaatttgcccttaactttaaatctcttcattctacgaagtggtgacaccatgaggtgcacatgatcaccttcctcaaattccaggggtcttcttctattatttgcgtacctcttttacctggtttgagctaccctcaaattctctcgaattatacgaacttgttcttctgcctcttgaataagttcaggtccaaagaactatcttcctctagtctggtccaaaaatagaggagtcctacatttcctgtcatacagagtctcgaacggtgacatcttcagactggcctggtaactattattatatgaga

SEQ ID NO: 135414 - DNA, 318 bp, Zea Mays
cagcagagtgggcaaagatagggggatagcccctcatgaattctgcccgcttgtctctaggcacttgtggcatctggacttgcactggaggctgaggtggtggtggctgctgctgaacctgctgcatcgctgctaatgtctgaccaattgcctaaactacctgagtctgcatcaagaacatctgctcaatggtcatcgggggtggcggtggcaaatgctgctgcgaagctacctcctcttggggtgcctgctgctctggctgtgcacgcctcgcacctctgcacctgttctcagacatctgtaggaatcacacacata

SEQ ID NO: 135415 - DNA, 506 bp, Zea Mays
cgatgggtaagctgctgaagacactctaagagcatctttgttctaaataaagttgtgtcggtgtttcgtacctcactccgacaagtgaatttattatatgtgttatggacttctgagggtgtgtacggagggtgcaaagtttatacaggtttaggcagaacgcccctatttgcagtcatcgatggcttgcgctaccagcaacattgattatcagactcgtagcgattgagagagggaggagatgctcctaagtctctttatcggggtggaagtggagctttagaagctgcaaagtggagtattagctaagttttggctcgacgtggctccaacctcctggtcctcatcagcgctcctcccctcctcttcgtccttgtgggttcatgttcgtctgaaagcgtcttcgaggggagagtgtctcctttcatgggctgataacgggtcacacatgtgacgggtcggacattgtcctattccctttcgtcgcttgctgttgtcgattgaaa

SEQ ID NO: 135416 - DNA, 284 bp, Zea Mays
gacttatgaatgctatttgcttccaataattgtttgggctgcgacaacgctaatacaagatttgtaatcgatcaacaagacatttatttatccaatgggcatggaaggtaatgattgataaagcgaagcatcacattgccatacaacaaaaatcatgaccgtcgtgagcatccttcactcgattatacaacagagacctaagcgtcgtgttaccaaatgcatacatttttcctcgtcacgagtataaccatattatggcatatacccgcacacctcaaacaaac

SEQ ID NO: 135417 - DNA, 457 bp, Zea Mays
cgtccatgaggtcagcagactgagcgaacacaggagatgacctctcataaactccgcacattatctcttggcatctacgatatctgtatctgtggctgaggttgttgttgcacctgctggatggctatcagggtctgcacaattgactgaactgcttgagtttgcatgaggaacatcttctccattgtcatcggggatgggggaggcaactgcgaatggggtgcctcatcctacgaatcatgttgctcttgctgggtacgtctccctcctctacgcctatggtcagacatctacaaaagtcaatcatacatcagaactgatcttgcaaacctttcagcataaaaaaggtagagttcttcacaacacttaataaacaagcatcttcattgactctcaacacggccaaactaatcttctcggataaagagaaaagtctaaaaaggcttcccaactaaat

SEQ ID NO: 135418 - DNA, 443 bp, Zea Mays
cgacgggtcgatgagaaggccctccacctttctatatcgcaacgactcgccatcgtagcacgcgtcgacgcgctcctcgtcgtgggagagtgggatcacgagctccactgggtcgtgctcgacacaagatggcatcgaagaggacgtccggggagtgtaccatcggtgctagagtacgtggtgacggagagctcgctggagccagagtcgtggctggattgcatggtggcgaagagctcgttgtagccggaactggagagcgtggcgctggagttggtggagacttgggtgctggggtaggcctacttggaaaaaggtcgcctactcctccggctccctcaaagtggacgtactcgatggtgaagtcatcgtacgtcgaagtcgtgctgtcgtccaccgccttatcctaggcccatcctcgcccttcgtcgaacactacgtcg

SEQ ID NO: 135419 - DNA, 346 bp, Zea Mays
cttacgtaagaggccgtatatagtccttcattcgtatgacaaacgtcgttacacagttgtatgcgacaaggataattgtgcatggagggtctgtgctaggatacaaaagatcaccgcaaagtgaaagataacaaaagtagtggggccacacacctgtgctgaacatgagttaacgatgaaacatcgccaattgacatctaccctcattgggaagtggcttatgggaatactgcagtcggaaccaaatatgaaggttaggacaatcatgaggattgtggagaatgtgtatgatggatataagataacatattgtaaagcttggagggctaagcattgtgcgtggaag

SEQ ID NO: 135420 - DNA, 407 bp, Zea Mays
ctgagatcctcgatccgatacgatcttcttaggcacaccgtgtaaacaaactattcgtgccatgtacaactctgctagcctggctcttgaatatgtggtcttcattaggataaagtgggctaccttagttagcctgtccacaatcacccaaatagagtcatacccagtagacgtgcggggtagaccttcaatgaagtccatgccaatctcttcccacttccactcaggtatcttaagcgggtgcagcaaaccggcagacctttgatgttcagctttcaccctctagcaaacatgacataatgctacatgtgaagcaacatccttctttagtccataccaccaatacttctgcttcaagtcctggtacatcttggtactgcccgaatggatggagtaagctgagtcat

SEQ ID NO: 135421 - DNA, 741 bp, Zea Mays
tggcgacttcatgggtgtcctctgtcaaaacagtgacctcgcggcaaattcgcccagagcatagctctttcggaagtaaaaccccaacatcgacaaggtgaagaagataagattctgagataacagacatgtggttacccgcgaatggcaactggctgttggggtcgatgggcgggatgcttgccgtgacagagctttgcctctttcgcttcggcgccattgcaatctggccagcggaacgaatagaagcaggatcttggggaagcagaggagtggttcgaggcggaattgtgaagttagggctcagaaattataaacgcatgtaggtgcaagtataaatggggttttctgggttgagcactacttctaaaaagcgccaagtcattacttgggaaagcagaactttaggcatgactcgcgttacatctaaaacgccggtatcatcagctataactcgacggttacctctaaaatgccagcagcatcaagcatgactcggcgttacctctaaaacgctggtatcatcggctatcgctcggtggttacctctaaaaacgtcggcagcgttatatgcatggatgaactaccaagtgtgcatgcagaaaaagcagcaagagcacaatgttcactggaagcatcagaagtttttcatttatattaaaggggggttacacaaactcaaagactaactcattatgagccggcctttttacccctaccttctactacattacattaccc

SEQ ID NO: 135422 - DNA, 293 bp, Zea Mays
gcggtgctgaagtctagcttggtgcccatagcttgctgaaggctcaaccaaaattttgaggtgaattgtgttcccctgtctaacactattcttcgtggaatgccatgaagtctgactatttctttgagatatatctgggcgagggtggctcctccgaaggtagtcttcactggaatgaagtgagctaccttggtaagacggttaattataacctagatagaatcgttccctttttgggtccggggcagtccgattacgaaatccatgcctatttcttcccacttccatttggg

SEQ ID NO: 135423 - DNA, 288 bp, Zea Mays
aggctgacaggtagcacttggagagtacatgaacgccaattcaccgctcagacattcagtcttcactggagagcacatcagcacacaccacttacagtcttggacagctaaacatcaacactaagagtctagagtcttggatagctgaataacaacacttagagtcttgaagtatcgaagaattgaagtatttactgtagacaaatcaacgagcgtgtgatctgatcagcacaacactcaggcactcagcacttggagagcacatgggccttttctgttgttttgcgt

SEQ ID NO: 135424 - DNA, 284 bp, Zea Mays
ccgcgacgttagaggtggtcaacgagtagggtagcatccttacgacgacatgagacagaggtggtatgtcggctagaggaaggaggtgcggtcggcgcatgcatgaccaccatgacctagcaatgagagtggggtggagaggagggaggaggtctgtaagattatggggaggctaaactagcgcaaaacaaaaatttcacccctataaaaccaagatctactgctgttataggtcacaagattaccactagacgtgcaggactgcgaaaatcgtctcgatgtag

SEQ ID NO: 135425 - DNA, 503 bp, Zea Mays
gcttgatgagtccattagtcaataagggggagcaatttcgagattttttggcctcctaacaaagggggagagattttgtgtctttcaggcttttgctgttcccatcaaagtgggagagattctcaagggggagaaatttgagctgtttggagctttttctagttgtgttgagtcgtttgccgttttcaacatcgccatctggaggaacatgaaccctgcttttgcctcttcttgaggactaccctttcttgcttggttgtattgagtcgttgcccatttctttggggatcgagctttgcttgctctgaatgacctttttggcttttatctggattttggtcgttcgagtgagtttctcttcttcctccattttacttatatatgctcatatggtggtgttaacaatgcactcatcaaggtggagtctgaatacatggttgacttgccccttatagtttgggttgatgatggtgattgtcaatgggtagcatctcgggtcgagt

SEQ ID NO: 135426 - DNA, 517 bp, Zea Mays
cgaaaaaagaaaaggctaaatagagtttttgatgctattggatttgtgtaccctgattaccactacccaccgcgggggcagaaaagaaagggtacaacttctgggaagactactgcttcggctactccaagcgagcctacgccgaagaggaaaaagctgaaggtccttacccaccgaccgcgctacattgaactggccaccgtgcccaaatttggcggtgagacctcttcagctactgaagcgaaagagcctgctcctcccacgcaaaagattgaagagccggctgcaatgccgaaggcatccttagccaaattagctgagccgaaggccgataatattgaagagacatgagtcgaggggacgaaaatattagaagttctaagcccttcggcagaagtgacagtgtcgaaggcacaaaaaggtcttacaacgacccccaagaggaaaaggatggccagtgtactagatgtgctggagacgataaaaacttcaagctctactccagggaaaactgccg

SEQ ID NO: 135427 - DNA, 667 bp, Zea Mays
cctagttcatttgaatgactagaggttgcatacccattggcagcaaagagtatttactaaattgttggggctgcagtacaaggtcatctacaaacaaagggttcataatagggtggctgatgccttgtctagaagggctcatggagaggtgatatgttcttcattgtctatggtccaacctaagtggtgtcaagacatttgtgatggttatcaacaagatgaagcagcccaaactctgattactaagctatcagctaacagcacatctgtaagggttgcttaggtacaaaggcaggatatggctgggtaccaattctgcaatgcataacaaagtgttagtagccttgcacaattcaccgttagggggtcactcgggtttcccagtgacatatcagaaagtgaaacaactgtttgcgtggccgggtttaaagaaatatgtgcagcaatttgttcaaacctgttcagtctgccaataggcaaaacctgatcgtagtccatacccggggctcctacaaccgttaccggttccggctggggcctggcagactataagcatggattttgtggaggggttacctctttctaggggcaggaattgtgtcatggtcatcgtggataagttctcaaaattcagtcatttcatacctttgaaacatcaatttacagt

SEQ ID NO: 135428 - DNA, 484 bp, Zea Mays
gaaagggagaggcagacagacagctgacagatactagatactcgatagatttgatagaacaggtgctggtcgtgccgtgatcgagacgagaaccagttcactgaaacttttagttcacagcacagagcgaagagcagcgagcgacgatacacatggtatcgcgcgcggcatgtataccaattaccacccctcctggctcctgtacatcgtacgtgcaagataggactacggctacgagccactgttgtactagtgttggtggccgccgcgtcctgcttccgatgaggacgggttggaaactatgtgcctgccggtatgcaatgcaagccaaggtaccccacgcaccaaagcgtctggtggccgctttgacttgcctacgtctcctaactgcacgggtagggatcacatcaggtttttaggaactgtcattacgaacggctcgttgttggtttgctttctctatgccgacatcgtcatcatcacc

SEQ ID NO: 135429 - DNA, 327 bp, Zea Mays
caactgagcagacatccgtcaaccaaagcctgcgatcgaagacaaatgagtatagggaagataatttaccaggaggaacgatagaacacaagagctgagttacctgaagattggagaggaatgatggtaaccccaagttaggaggagctacgtcatagctcgatgaaggaagatcaaccgaaacaatttgaaaaacgttgtcaggggttggctcagccccgccagcggatgtcagacttcttgcatctggctcgccgacctccaaggcgacttgtttgctcgaagccaaagaagcatgcatcgccatcaccctatcagatcatggtg

SEQ ID NO: 135430 - DNA, 918 bp, Zea Mays
gcgtgagcctgcgtactagtttggtatgtcgccgtggagtgccgcgccgccgggtgtgtcgtgcgggccactactgctgggggctgagaaggaagacgatgggagaaacgtcgatttctggtggagggctcagattgaacgctgcgtacaccccttcgctggtttgatctgagcggttggttccgatcggacggacctggtgtgatcacggttatttaaaatataggccgttgatctggccagggacggatacgattagactgggcgcttacctcttcgttggttgagtatgtactgttgatctataatctaacggttgtgatgcgcgcggggttaggcagccgagccagctttacgtaagagccctcgagatttaaggtaataaacccgccgtccatttttttagtataaagaaagtaaaattaaatgaagactttgcgttttagcccatggggtttgtttttaggcacaaaattgatacaaatatgcacaaaagctaagaaaatccatatcttgctcatgttaactccattttagtccgtttaagttgcgttagcttcgtaataaaattatctacactttggtaaccttattttatcatgaaacatgtttgtaaataattaatttgtttaccctatgttcattggattaacttctttatttaaaattaaagtaaaattttcgcttcctagttgtaatttgacttaaatatgttttctaatcaagttataacttgggttaaaattaaattaatggtttcttaggaatatatttctcacgtgatttataataatcaacctagaacctagttttcctgtttaatcacataaaccttcggaaaatcataactttataaccgtagctcctaatttagcaattctcgagcccgcgatctcatagcttcgcgtagattattat

SEQ ID NO: 135431 - DNA, 858 bp, Zea Mays
ttatggaagaacgcgacattagtctgttggggagttagcaggttttatacaaatccggacgacaatccatgaccgcattgattactcacgcgatgactcctttactataagtacagtagatggctcgatcgatcgatcgatcgcacgaagtatatttctagactatagtagctagatagactcgtgcctgcatctgcatgccctgcggggtgtgtgactaattaataaccatggcaagcagcctccaaaacgaggcgtccccgctaacgcaccgagagaacgaagagttcctacgaatgatgcgtgattgttaacacgtgtagggaaggaagtagtagaagcagggatcggaggtagaagaaagctattgaggagacggcggcggccaaacagccagcccccagggtattcgtgttgtctgtctgttctttcatacctcttcccgttcgagtctcaggttatatatttcttattacaagcagcccatcaggcctacacgacccactccggcccaaatacttttacactacgacgctttactcgttgtggacgcggcgctgctccctcctcagactcgccatctgcatctctgtccactgctctgctgtcctggacgccggagctgacattcccccgctcttgaaacgccgcttgtccccaagccggcgcgtgtggaaatcggtcttgtaatgctttcaagacttcccaggttgctaaggattcatccatgccggaccatgtcaccttgacttgcgccactgtcgctccgcccttttggatcagccgactttgtaacactcgaagaggaatctgtagagcgtcagtatgagcgggaagtgaggcagccaccacctgatc

SEQ ID NO: 135432 - DNA, 854 bp, Zea Mays
gttgattccaagtctaatcaaatcgaattcaattgataaccaacagtttgaatgcctttgagaatgaaatcttttattgatgacgtattctccaattacagagtacaacattgctctgatagcttttgaggtcttgctaagggtaaaatttcctaagatgctctatattccatgaattccccacttccgtgccatccatttgagtaagccgatatgatcctggccaagtgacctccgataccatgaatggcccttcccatagtggtgacaatttgtgccgtccttccctcgttagaattcggtgaaggaccaagtctcccactacaaaggatcgatgtcgtatagccttatcatgatagcgccttaaggtctgctggtatctggctgactgaattactgtgttcaatcgctcttcctctagcacatcaatatcctctagcctagtagcttcggcttcagctatgctttcaaataccagccttggtgccccaaacctaaggtcggtaggtagtactgcctctgaaccatagaccatgaagaagggggtatttccatgcagagctcgactgggttgagttcttaagctccaaaccacataaggtaactctctgatccactttcctgcaaacttttcatttttgtcgaacactttcttcctgagtgcttccagtatcataccattagccctttccacctggctattagctcttgggtgtgctactgatgcatacttgatctggatacgccgttgttcgcagaaatcaaagaattcagagctagtgaagttggatcccaggtcagttatgatgccattcagtatcccaaacctgaatattatgtcttgtatggattcc

SEQ ID NO: 135433 - DNA, 357 bp, Zea Mays
gagagaccaaagattctgtttggcagcatcgctgcccgaagcagcgtaggtggatagcggtgtcagggactcatgagctaatagagtcctgaaccccctatcccctgcatccatcaccctgacgtggatgcgagtgatgtagtatcaagcccgaggaggctcgcacactcgccttgtctcgtacaagggtcagacgtaggatcccaacgtatgcagcacgtcttgcagcaggttggggaagtgccccgtctcgaacattgttgtgtaatttcggtgacaggcccaaaccccatgaagtattcctgctgagcatcgttggcctcctcgttgttgttgtcctcctcatcttcgtcatcg

SEQ ID NO: 135434 - DNA, 360 bp, Zea Mays
cgtcggcattgacgcagagaaagctggctagatttttaggcaaaaacgagcgcgctttaaggcagctgaggtcgcacagtttggattcttgtaggcaagcaacggacggggaggcaagggagataacaaacgatagtgcatttatccggatcgcctaaaccacggacgttccacgaaagcacaacacagtttttacaacccggactcatgactgaactgacagaccaccaggggacacactacgaccacggcagagggggaacacaccacggcgacatgtgacatacagggataggtatgaccagacaacagacttggggagacagcaggataacattacagaccacagaccgacaacag

SEQ ID NO: 135435 - DNA, 855 bp, Zea Mays
ttgacaagattaaggaggagggaatggttatggagaacaaggtttttgagaccgagaccaccataggttttgggacgacagacgtcatcctaggagaaaaggaacctaaacccatggcaaccatcggacccaatcaacaaaaaagctctctgatgctggtcaatagctctaagaactatcttagggataatcagagctgacatatcgtgaagaggtaaggcgctaaggacactctgaacaagagtaagatgatcagcgtggttaagaagtttaacttttcagctcgctaggtacagatcacatgacacgattaaagggaagtagtcagaaggagtaattgtgtgaggggtgagagggaggccaagataggtttgggggaaggacaaaatgagagtgcccaaaatcttagagagggcatgagtggtggaatcatcgacaaagacagggaggaaggtaggtttgctatagtttacggtcaggctagtggccaaagcaaaatcatcaagcactttcctaagcactggaggttttcacaaagataaatgtgtcatcggcatacttaagaacatgacacggctccccatctacgatgggatgacacagatcgtgctcaacactcctaaaggcaatgagctgacggagaacatcgaccacgatgatgaaaagaaaaggagaggccttgagtttagtagcatggcagatttggaagcatagaaatgcgtgtgtgtttgacaatgcttccccaaacatccacgtaattttgttgtccatccatgatgatgccttattatggggctttgttggggctgctgctcttaggaaggtctggcagtagttgggtgtgtattctcgttt

SEQ ID NO: 135436 - DNA, 722 bp, Zea Mays
tgcatctctgttcacaaaagtcgaagaattctgcgctggtgaaatttgaccccagatccgtgatgatactgttgggtatccgaatctgaatatgttttcctcaatgaattccactgccttggctaaggtcagggttgcaatcggcttgtactctatccactttgtaaatttgtcaatagccaccagcacgtgggtgtaccctccttgagctttcttgaaaggttcaatcatatccagcccccaacacacaaaggcccaggtgaccgaaatagttggcagttgttgagctggtaagtgctggtgtttagctagaaactagcacacttcgcatctttggactaagtcagctgcatctttttttgatgttggccaacaaaagcgtgctctaaaagccttccccactagagttcttgctgatgcatgtactccgcactgcccttcatggatctctttcagcaaatgcttcccaacaactgagtgaatacatttcatgaggacttcggtggcccctctcctgtacaacaatcctcctatgatggcataatgggccgactgcctcgcaatgtgctcggcacgaccttatcatctcgctcctcctcatttttgatgtatttgataattggctccctccagtcctttgggtctggttctgcctgctccactgctttgcattcctccgatggccctggtgcgatgctcgactgttgtatttcctagacaaa

SEQ ID NO: 135437 - DNA, 396 bp, Zea Mays
aagtcgcctaagggtgcagccggactagcacaacaagtgcgaaaaaaaccgaagtctaccgcgaagactatccacgcagaagtcgcctaagggtgcagccggactagcacaacaagtgcgaaaaaaccgaagtctaccgcgaagactatccgcacaaaagtcgcctaagggtgcagccggactagcacaacaagtgcgaaaaaaccgaagtctaccgcgaagactatccgcgtagaagtcgcccaagggtgcagccggactagcacaacaagtgcaaagaaaccgaagtctaccgcatagactatccgtgcagaagacgcctaagggtgcagccggactagcacaacaaaagcagaaacgacaacatcaaaccgtccgcgccaagaccgactatac

SEQ ID NO: 135438 - DNA, 693 bp, Zea Mays
ctcaattaattgcactaatccagaccggagcacgtctgctcacaacgacgataaaatccgagaagaagctactgtgttctgggtaactcagtacggtctagttcaatcaatcgagcctacaagcaacaggagatcctagagatgctagaacattcaacagaggggcatgagtcaatctgagacaggctgaccacggtgagagaccttcacaacgggattccgactgatttgggggaaatggacaattgggcggctctggtggatgacagaaggcaagatcgggtgctttggatgcgcaatgacttagcgaagctcactggggcagcaatttataggatctatcgatggtgacgtccaatttggaagaaatgtgctggcggccggagagagggaggagtcaccggagtcacataacgtggcatttactggggtagaagcctgggacgatgactaactaactcacacgacaccttacgacgtggtaatagggtctgtagcgtggcagattccggtgaatggtggtcacgatggcgatggccgtgcggccactttactaggcaagtgggtacggtgaggccaaccacagtgcccccaaactcatccgcggggaggatcgtttcactgccgagcgcaatccacttatccaaggcacgaatcatggtagccggcgcgaatccaggcgtggggtcaccg

SEQ ID NO: 135439 - DNA, 291 bp, Zea Mays
cttcaacctgcatcagctgatcaagagaatggctctaaaaggaggcatgacttgagatccttgtttgaagtctaggtacaccttaggtttgacaaggaaattatctagacatttatttgtacgggtgtggtcatgaagtgataacggaaaattcgactttgggtcgggtcatggttcactaaatacgaatatagcctaattcttgggtttaggcactcaagtcatccactctctattggtcataactcaacctgatggttcttagatcagggttgagaattgctttatgct

SEQ ID NO: 135440 - DNA, 851 bp, Zea Mays
ggaggaggcgaacaactagaaattgctgtcgtggtgcagtaagaggaggagctggtgcggtaagaggaggcagccagaaggagttagtgtggctgtagtgctgctggttggtgtggctgcagtgctgctgttattggaagttgtgtttgccggtgcttgttgtatagctgcttgattcggtgcttctgtgaagatgagtacagaagagatgaatcccaagagaatggaagaagaggctgcaacgaagggaacaattggtggtggttcaggtgggattacaaagagtgagatgatgagtgagacgaggattatgatccaggagcttatggggttggggttaaagttatatgagttagagggcagattatgatccaaagccaatacaaacccatatgagttaaagttagaactagtgccgaacgatgtgaagctagagggcagcaaaaattacttgagctagtcgaggagagtgtgcgtcctcttaggaggcaagggagtggagcactacttggaggagacctgtgttgagccggttgataagcttggcactgaatggagaacttggcatacaacaaactctgtgatagtggcatggttattggcatctatgtctcctactattagcaagagggtggaagctatgtgcactgcatcacagatatggcagaccttgagtagcatatactctcggagggggaatgtggtggtgatgatggagattcagaataaggcagatgtggtgaaacaagcagggagaccaatggagcaatatgctagtgagcttcagtacttatggggagaactagatcactatgcccctctccaaatggtttgtccacaggatgcacaca

SEQ ID NO: 135441 - DNA, 770 bp, Zea Mays
agggcggataagagggaagtcacatggaaggctctacgaatgttgaatactcatacaaggcgaccgtggatgatgtgtggggatttcaatgagattctcatgcaatgtgagaaagaaggtggagaacaaagaagccggacagccatggaatcgtttagagttgctctggaggactgtggtctgagtgatcttggtttctcaggggatcaattcacctggagaaataatagcaaatgccaggaccggtacatcaaagagcgtcttgatagggcagtggctgatgtctgttggagaaaccacttccctggaggccatgttcgcaatgggaatatgtaccattctgatcatagagcgattgtgattgatacagaggaaccggagatgcatcacaatcagcggagtcataaatttttccgatttgaagctgcatgggtgaaagaggaaaattgtgtaacaattgtggagaatgcatggaaaggatgtgtggaatctagagggggatcagtctctgaagcggtgaaggcagtgtcacaagatcttggtgactggagcaaaaatattttaggagacctagaaaggagaattaaaacactgaagaaagagcttgacatgtgcagaaggggtaacataccacaagtttgcattgagaaggaacaattgctaaaagttaaactgcagaaacttgaggagcagcaggagatgtactggaggcagcgagccaaggtccattggcttcgcaattgcgacaagaatacaaaatattttcacca

SEQ ID NO: 135442 - DNA, 1143 bp, Zea Mays
atggcagtcttgagtaggttcatatcaaggctaggcgaaaaaggcttaccattctacaaattgctcaagaaggtggacaagttctagtggaccacagaagcataggaagctctcaaagcattgaaaaaattcttgaccacgccactagtactgaagccgccacgccgagccacaccaaatcagccggtagaagatctgttgttatacatctcctgcacggctcacgtggtgagcatcgcgttggtagtcgagcgggcaaaggaaggacacacatatccagtataacatccggtctacttcatcagtgaagttctggggccctctaaaaagaagtatccccaagttcaaaaactactgtacgcagtacttctaactgctcgcaaactccgtcactactttaacgaccacaaagtcatagtagtcaccgggtttccaataggggatattcttcacaacaaagaagccattggaagaatagccaagtgggcctgcgagctgggagctcatgacatagaatttcggctgcgcaaagcagtgaagactcaaacattagttgacttcatatcagagtggaccaagcaacaagtccctgacaacccggaggctaccgaagtatggcggatgtatttcgatggctcgctgaaactgcagggagcaggcgcaggaatcctcttcattgcccctagaggtgaacaactcaagtacgcgtttcagctattattcccggcatcgaataatgtagcagaatatgaggcactgatccatgggttgaacatcgccatatcgctagacattaagaggctgatggtatacggagattcactagtggtcataagccagataaataaagattgggattgctcgactgattccatgggcaaatactgtacgaccatccgaaaattggaagacaagtttgaaggcttggaattccatcacgtggaaagagaccacaacgtagcaacagacgcgttgtcgaagctaggattcagtcgagcccgggtcccacctggaatcttcgtccaggaagtgccacgcccaagtattccctcagatcaggcggaagagtgcaacaccttgagccaaccagaatcggactctaatgactggagagaacctatcatcaggtacataaagaatgaa

SEQ ID NO: 135443 - DNA, 669 bp, Zea Mays
cgcccccgctcgcccgacgtccggattccgcgccaccgcaaaccatccgcaaaccccgccaacccgccctacctccggattccgcgccgccgcaaaccgccagccatccccgctcgcccgacctccggattcaccgccagccaaccctgcccgccaaccccgctcgcccgacctccggattcctagccgcggaagcagcagcaagtgcgaccatggtgggtggcgccggcgggcgggacccgctcgtcgcctccgagatccacggcttcctcacctgcgcaggtcgcccccgcccccgcacgagggcggccttttctccctccgtttttctcttcttctcctttggtactccccaacccgccctacctccggattccgcgccgccgcaaaccgccagccatccccgctcgcccgacctccggattcaccgccagccaaccctgcccgccaaccccgctcgcccgacctccggattcctagccgcggaagcaacagcaagtgcgaccatggtgggtggcgccggcgggcgggacccgctcgtcgcctccgagatccacggcttcctcacctgcgcaggtcgccccgcccccgcacgagggcggccttttctccctccgtttttctcttcttctcctttggtactccgattctgttgctcgtcttggtcct

SEQ ID NO: 135444 - DNA, 415 bp, Zea Mays
ggagtttgaagtcctaattggtgccaagctcctaaactgagaaagcataacaggcacacaagtaactgttgtttctgtgctccaaacatagatgttctaagctctccatggttaggataaaccaagatgtaagctcataacatgtgtttgggttgggacaggaataggatcacttcctaaatttgaacgcctagatgcatccccttgtagttatttgaacgtggacagtggtagtatagtgtacagaaaagagagctcaagcagggaactcttattttgtagtgaaatctcttaaagagaacaaaaaggtaattaagtgatcgtagagggttggaagccatgtgcacaacttttcttacaactgaagtatgaagcttaatggctgtaagaatattggactagcatatccttcact

SEQ ID NO: 135445 - DNA, 696 bp, Zea Mays
ccccgcgacggcggcgcataccacccactcggcggagcatcgccggaggaacacaatccccgacaatatcgcaccaaattcccgaacccgaggctctaagcgtaactaaattgatgatgaatcgaagggagcaattcttacaggcgcggacaactcacactgatcgataggcgttgtggtgcggacgaacggatttgctcccgctccggtgagagattcccggacttccggtgcgcagcgcaccccgattccgagggatataccctcccggacgtccctccttttgcctggatggcttcacgggttcacgccgacgacgcacgccagaatcgactgcggcggcggtggaacaatggtgcggcgaagttcgattatggctacacgggttctaggtcacggagaccaaggcgaccgagcggggcactatatgggcgcgacgtggccgaggtgtttcaatggccgaagccggaatccgcggagtagggcgcggtcaatagccatggcggaagaatcggtcggttcggccatgaccagctggggcaacgatgacaggtggggccacgagtgcagcgacagagcgaacgcgcggcgcggagtcacagcggctggcatgcgggtcccgcagagcagcgagggaagggaatcacggtcgacgcgcgtgaggctgccctgtgggcccaacgtgtcggcgcgcac

SEQ ID NO: 135446 - DNA, 491 bp, Zea Mays
ggaagacacgctggcgggcggagagaggggtaagctactggcgtgagctaccgtggcagtcactggctaatgagctacgacggtcactggttactctccacgactcgcgacggcgtggtaaaatagcctaaggcgtggcacaactgagtgaacggcggcagccacggcgatagccgcacagccacgtcgccggcaagtgggtaaaatgaacagtccggtgacagggttcgagctcatcccagcgccaagatattttaccccgagtcattatccgcgtgccaccaggcatgaatcgcagccccggcgcgaatccaggcgcgggtatcaccggcagcgagatacactgcacctgatcttgttcaatactgtaccatcgaaaccattcatcacagcgcctaacagagtgagttagagggcttgattctcaaacttttgtgtagcaactcaccaatccttcagtagcaaagttgttgatctataatctagctaca

SEQ ID NO: 135447 - DNA, 512 bp, Zea Mays
gataaacttggagcacagtggccactcggtcgctcctccacttaccggcgacgtggccgcacggccatcaccggcgtgccgccgttctttgcagttatgccacgccgtcggccatcttaccacgtcgcagttgattaccacacaccgtccttctattacctaaggccttgccacgatgttcgccacctatcgcacgcaccagtgaactttctcccctccggccgccagcacaacctgctcgaattgaccgtcgccgctgtcgctccctataaattgagccccccaccagttctacaaagtcatcagctacccagcccccgctaatcgttagcaatcatccaccagtgagctcgaattcgagtttccccaaaatcagtttaccgccgccgtaaaagcaccctcgccgtggccagccacttccaggtctgatcatgctctctgcggttctgtttcagtacctgtgtgcattcgtgatgctcatcaacccaccagatcgaactagaccatcccca

SEQ ID NO: 135448 - DNA, 325 bp, Zea Mays
ggaaaagagaacatgagagcaaaagagaaagtaactcgtggactcatcggtgaccatgaaggaagacgaaggacactaggatgaaagaggcggccaggaaggagacgacggacactagatacgaatgaggatgaaaatggatttgtgagggagttattcgtccaattataatggacaactaaggacaatatctaatgagagtgtacttctcgggactctgtctcaacaccaaacaaccaaatttaagtaaccttcttgtcttgtcgtgtctcgacccacaaccaaacacatcctcacaccatctccaacaaatcttatattcaat

SEQ ID NO: 135449 - DNA, 504 bp, Zea Mays
cgaattctcatataacaacaaccatcaggccagtatcaagatgtcaccgttcgaagcattgtatggacgaaagtgccagacccccctaatgtggttcaatgtaggggaaaggacactagaaggacccaactttgttaaagaggtcgaagagaaggttgccctgatccgcaagaagttacttgaagctcagagtcgccagaaaagttatgcagacaacagacgaagggaactcagatttaaggaaggagattttgtataccacaaggtctccccgatgcgtggtgtcaagagattccaaatgaaaggaaagctagcaccgcgtttcgtcggcccctatcccgtcattagcaaagtaggactcgcagcataccgccttgagctaccagaatccatgtcagatattcacaatgtgtttcatgggtcccagctccgtaaatgcctgcaagtaccagagaaccacatcgaggcagagacaattcagattcaaaaagatctccagtaccg

SEQ ID NO: 135450 - DNA, 323 bp, Zea Mays
tggttgtcttcccagagtagcatgtcccgtatctaggaaccaggatccagcaggccatgctctgtgcatgcaaaaagggtatgtttggatgtctggctgtcaccggcctggttgcaggagatgttgtttggtttaaagatgtagtacacctagacaacagcggccagttcctttttgcatgccgctggccaggctcaggagaaacgaagaaaaaggtcgcacgccgctggccaggccgaggggtgcctcgtgcatcaggagggacaggcccaatagactctccaggtaaccaatcagccataggttgcatcccatgagcctgg

SEQ ID NO: 135451 - DNA, 516 bp, Zea Mays
gggacatagggtggtggtagatacgcatattgatatggcatcggtggatatgggggtagaggtgtccatctaggtaaattgggcattaatttgacattgttcttaggtggctcaatagatcctacttgtctcccacatagaggtgaatggggttgttttgttggtcgattgttgggaccgaccttctttttcacatatttgaatagtaactaatcaaaggttgggccagatttggctagccgacatgatgctttagatgtattggtcttccacgtacctatttttggtcatcatggcttgaaggtacgtggttgtcgctgctcctggttactgctagactgtctgccagacccatctaaaccattcgatggggtcctggaccatccgtgcctacgtggcggaccgttcgcgatgcgcaaaacaggtcgctgcacttggtcgcctgcctgcgcctgcccccaacattggagtccgagatggtgatcttcaatgtctcccctccatctagggtctttt

SEQ ID NO: 135452 - DNA, 793 bp, Zea Mays
gaagattggagaggaacgatggtagacccaaggcagggggagctatgtcatggcttgacgggggaagatcagtaggaacaatttgaagggcattgtcaggagtgatctcagccccaccagcacataacatacttctcgcatctagctcgccaacctctaaggcgacttgtttgttcaaagctgtggaagcatgcatcgctgtcgccccatcggatcgaggtggagacgacccaacatggacgtccatggaggtgtgggaaggagagcccacctgaacaccctcgggggctgggttgcagcttgcgctacccaccaaagccggatcactaccggcaacaccctcagggctgggtaactaccagcaccaccctcgggggctgggtcttctgcagtagacacctctaaggatgagggctcctctgtcacctccatgggagtcgggcgactcgaaccaacgtcttggcattgaagagtgccctccaaagtcgacgatgcatgagacactgctcgagatacctccagtccaacgtctggaacctctgaacaaacagccatcacatcatcggcagttggctctgacagcatatccttagggacgacttcctcaagggcctgatcaaaatcttatattgacagtccctgaagactgacaagagccaacagagctggagaaggaatatcactcccccctcactacctctgtaatgctggctgttcttacggattagcgggacttcttcctcttcttcttcttcatcttcatcaaatatacagacaacaacttgtgcacgat

SEQ ID NO: 135453 - DNA, 466 bp, Zea Mays
tgcacattaaatgcaaccggtacgaacacatgctccaccgatgacaccgtagtcaataaaggatgatgggaccgcagtcagatctactttcaccgcccacgatgacgcacgcccgcgaataccaggcactgttccctcgctccagtcacaattttcaacaactccggacaggacatacgacgattggacacggactcagcctcgggaggaaactctgcctcacccaagctcagtctcggccaactgccctagcagtggcgcattaaaagccaccaaatctcccacgaatcccgcaggagaccactccgactaatgttccaaccactcccagcatgaatgtgtacccatgcgcagacccgacctcggccttaggagaagtctccgcctcacccaagcatggccttggctaacaacatcaacagaagaacacccaacgtcgtcaaccgtctcgtaaaaaccgttgacg

SEQ ID NO: 135454 - DNA, 299 bp, Zea Mays
aattgggtaaatttctgttttgtcatagttgatctttagcccagagcacccctcgaacgcgttgagaatccctttgagcacctccaagtctgatttgtcagctttaatgaacacacccgcgtcatccgcgtagagagagcatcgcaacttagcccctctaggtaaaacctgtccaagcaatccctcgtcagcggctttctcaatcatccggtgaagtggatccatcgctaaaatgaaaaggaagggggaaagtgggtctccttgtcgcaccccacgcatgtgcttgattgcgtttgaac

SEQ ID NO: 135455 - DNA, 569 bp, Zea Mays
gtcgttctagaatcttgagagctgttccacctcaggaaccggtacaacttgttagctcttgaagcaaacagcacctgaggttacttcagaatttgccaatctctgcgccatttcgctgttacagtttatactccacatcttagcatttcatacttttagcaaggctccaaattcttataaagattcaaacccttaaagactagtttgaaaactcaaaactccttagggccttgtttcggttagaggtggtcttgtggatccaaggaaattggagtggattaaataccttcctacttaaaattgagtagaaagagatttaattccctctgatcccttctggtccaataaaaccgaacaaggccttaggattatatggaacttaagttcatttcccccttcgatcagatcctctatttagctagctcgctggatttagaaccagagaaacctggttttcggtgctccagaatcagtttaacggttttaggcagcgattctagtgattttactgaggatctgaaacgttcctcgcagccaaacacaccctcttatgtctcaactacatccca

SEQ ID NO: 135456 - DNA, 402 bp, Zea Mays
cgcctccagatctaagttggtgatggaagacatgggccatgggtcatggggaggaaggacggtgatcttttctgccatcgaaacaaaccaaggggcgagaagaagacgaagctctttgggcagaagatggaaacgatgtttgaaggcaaaggattaaaactgcaaaggtaacgatctgaagccctccctcttggtcaactttattggatggaagaagccaccaaggtgtgattcgataacggctggacgacagccgtttcgaatcccgcgcgcacgcgtgccacgaacggtcggttggcaggcaggacgtcctatcgcattaaatgaccgtgtcccctccaaggtaaaacacgccatgcaccgttccgcatcccgcctcaaaaggtacgccatctccccttg

SEQ ID NO: 135457 - DNA, 447 bp, Zea Mays
gtcgttgcttccttagtgacgcgctacatcggtgcccgggtgtagtgacaatgtgcaagggtcttcgcatctgtctcaacgggtgcgaggggtaaggaagctagttgagccgactacgatccatgtaggtagttggaacatagggtccctttcaggtaagctaagagagttagtcaatgcagtgagtaggaggcgtgttaatatcctatgtgtacagaagacaaaatggaaggggcaaaaagcgaaggaggtggagaacactggttccaactttggtactcaggaacagtggcaaacaaaaatggagtaggtatcctgattgataagaccctcaaggattgagtggtggatgccaaaaggcagggagataggattatcctagtcaaactagttttggaggatgtagtcttgaacattataagtgcgtatgcccctcaggttggtctc

SEQ ID NO: 135458 - DNA, 346 bp, Zea Mays
ctcaatctctatacacgatttgtagagtatacatcaaggaacaaatcttctgcagtgatccgggtccgaatccaaacaaaaaatgccaaaactggacgtccaaagtcgtcctgccatcacctgccagcagactgtcatgtgcagagctctgcaggccaccacccacgccaccaatggctgaagctcgccccctccttttataccccgagtgacctgctccctttcttccccacgctgtgcacaacccttctccgtgctccacagagctaccttgccactctccgctctcctctcctatgctgtgcgcgctgctagtcgcgcccacgccatgggagccgtgtggagc

SEQ ID NO: 135459 - DNA, 481 bp, Zea Mays
ggcattttagaagtaacggccgagttatactgagccatgttggcgttttagaaataacagccgagtgaagaccagtgacatcagcgctttagccgagttatattgagccatgtcggtgttttagaagtaacagccgagtgaagaccggtgacgtcagcgtttcagccgagttatatcgagccatgtcggcattttagaagtaacagccgagtgaagaccggtgacgtcagcattttagaaataaccgctaagttatatcgagccacgtcggcgttttagaagtaacagccaagtgatggctgggcacttttagaattggtgcttggcccgggaaacccccatttgtaccacgtcgtcgcacgcctctgctttctgagccctagccttactttctgcttccagacctcctctgtttccctttgatctcgcttccgctcagttcgccggcgagattgagatggcgcccaagcgaaagagccag

SEQ ID NO: 135460 - DNA, 484 bp, Zea Mays
tggtcgcggccgagtcatccgaaattccctcgttgctttaggaatgacggccgagttacggtgggtcgtgtcggtgttttagatgtaatcagccgagtgatttatggcaacatcggtgttttagaagtaacaaccgagtgactgatggtggcgtcggcgttttagaggtaacaaccgagtgattaatggcaacatcggtgttttagaagtaacagccgagtgactgatggtggcgtcggcgttttagaggtaacaaccgagttagaacgggccgcgtcggtcgttttggaaataacggccgagcgatgacatggcacgacaacgtttttagaaataaccgctgggtgatgactgaacgctttttggaaacggtatctggccgagaaaaaccccatatgtactgcatcgttgcgcgcttccgctttccgtgccctaattcttgcttttctgcatccaagctttccttgcgctcgtgcgatactgc

SEQ ID NO: 135461 - DNA, 497 bp, Zea Mays
aagacagcgcaacaattacttaagggcgcagccgaaacaacgtttatcgaagtctatcattacaaagacactccgcacaaagccgcccatgtacacagccggaacaatacaagcgtacgaatacgaccaacaggccacaccaccattacaattacatacacacgacgagggcatcgcctattacacatacacggtgagggcatcgcctatcacatcggctccaccttcggaataatacccatctccctgtaattaaacagcattatcctcaattcctcaccctcaaaaagctcccgaagatccccttcgcccatgcccaccccattcggcaaagacaacaattctctcctaccaaccctgtctactcaaagtcggtcacgctccatccctgtgcgacggtgcctgccactccgcgaaaattcacccacacactgttttcccaccacccttcgccgcctacacccagtactcgtaccaggaagaccctcagcaccctc

SEQ ID NO: 135462 - DNA, 765 bp, Zea Mays
caagaagcccgaatatgtctggaaggaataccgcgaaaatggaatagaaatgtgctctatggcagtctacctgggagaaagccgaaactacccaaaccaccctcccttccaaatcaccttcatcgggcaccgcttcccagacacctgccagaaagttgcccgaaaagccctcaaacagatgtgccaaaactacagccgggaaatctctgagaccccccttcgatattttccacccagcaacaaaaatacccccacctagaggaaaagactccaggctctgtaaggaggagaccccacagaagatgaccccaccatcgtctacatggccggatacctccacaccctcgacaaccactacgatgagctctcctcccactgcacccacctaaactcccgagtggaaagcctagagcagcaggtcaaagagcttaagcaagagaaggtatctctccaggagagtctcgacatagtagaaggcgaggaagccaacacccgtgaggcctatcgaaccttaaagatggactatgacaagaagctaaggaagctcgcgcccaagaagaaaatccagaagaagaccaccagccaaggatgccaaacagagaagaagaagaagaataccactccagcccctcctccccctagaatagatgattggtccgacgccgaggatatatccctagcaagccttgatgatcttctcaaggaatttggggataccttagagaaagagttcggtagtagtcttatgcttgtaatgtattggtg

SEQ ID NO: 135463 - DNA, 562 bp, Zea Mays
caaacctgaatttaaactcaaaccgaacttttgcttgcgcatttaaacccaaacgtgaatttgaagtttgaatccaacttagtaaataaaataaggagaaggaaaaggctcacctatacttacctggaccgaatctcctctgtcctcggcccactctcttaccccatggcccatcccatctgacaccgccggaccactctcccttgctcagcccgctagcacgcccacgcctgcctaggtgccaacatgcgagcctgacacgtcagcctcgtgatcccgtacaggcaacatgcttgcaggcgtgtagtcactagcgtgtgggtcctctacacagaccggatctctcacttacacgtagggttggcttgtcaggcctaccttcttcctcacaacaaccccatgcggcgcttgtaacaaactcgagttccgttggatcctgcgtgatctccgtgcggatctcttgtccccgatgcataaatgccagagccgcaccaacccctcgtccataccgtaccaagccaaagcaccaagagatcagtcccccccaccatcgccaagctca

SEQ ID NO: 135464 - DNA, 474 bp, Zea Mays
gcagcaatcctccgctttttctcttgtcctcgcagcaggtagcgatagtcagggtatacgaagccaataacatcgaataccctgtttaatcttttcttgccccggccactaaaggctgtggacaaggcattttcttcagccttggagtatgctccaatcagctcatcactggtagcttcgatgcacttcaaccagtcgtcgtttggctcatcaaatttctccctaaatctgaaggtatacttcagtcggaccagaccaccctcaccagagtcgagagtggtctccttcggcatttcccagctttccacaagcggccataccctgaaggctatatgttcttgaattaaatctcttgtgccaatgaaggagcaaacagtgctgaaagctctctgacacacttcgactgtgtcatcaatttccaccttcggccttcggaggctgaagcgggactagatggggtgcatgatgatttct

SEQ ID NO: 135465 - DNA, 582 bp, Zea Mays
cgcgtaggcacctagttcctagaccgtaaatagccgggcccactgtcagcttctgtttctagctccgccttccaccatggaactcggcagatgaaaaccgctccgccgcgaaactcgcgggtgtgggctgacccggtcgtcctcctggactaggtacatatggggtccttgcacacctttatttccctttccccccttattccgcagtctctcgcctgtcgccattgcgcagccacgtaccgtgcgggggacatcaccgccaccgcagatacccagctaaagtgcgattctggctccagcgtgaccatccggggcatgttcgggtcgctttgacgacgtgcttggtagtaatcgaggaggggctcgctgaagtcatggtaattcctccccggaacccgtcgtccgcgcgcaccgtgtagtcgaccaaatcagacgctcgcataattggtatgtaacctcgaactaagctcgttacccacttctcgttgcgtagtacccattgcggtgagggatcgtgcgccgagggcgaggattgtgcactcgccggtgatggcgcgacgtggagtgagcggcgtcgccgcg

SEQ ID NO: 135466 - DNA, 408 bp, Zea Mays
tgactcggcttcaaaagcgggccgaagaccctcctcgcttcttccctcgacctccctctcctagccgtgcgcgcaggctgagctaatccatgagagagatgaggaacagagaaggttgccgccgcgtgacagtatcacccaggtcgtcgccagggcccagattaatggtcagtgtgcatcgctggggccgtttgcacatgttagtggccttcccatgcggagacatcaacaggaccgcgacaaattgcttgccggacttggggaaatcaccgacgatcacaccatgccgtggccagccttgtgggtgcctttctcgcaggtagtctactaatccatagcttggcctctccctcctctttgtttagcaccaatttatttgggaatttgggacctaatgcgccagcaaac

SEQ ID NO: 135467 - DNA, 560 bp, Zea Mays
tggacactgcaacatccatcaatttgaggtttatgtttgagctagagatcaatccagacctgcaggatctgtttagctgggtgcattcctgcttccgtacttgtccagatttcatcaagccatgtatcttctacctatcattttttccaagagaccacaacattcgacgaaggcgtctagtaaggcgttggatcgctgagggttactgcagggacagtgatgataaatctgcagaggagaatggggagttcttcttctccaaactcctcggtatgagcataatccaaccggagtccagtgacgcgaggatggtctcgtgtcaaatcaatggatttttccgtgagtgcatcctctcacggtcaggggaaatggaagaccttgtcattgaactggccgacagatgcaacctaaccacccaacgcagtgggcgtcatcttgtcatatcggaaagctgggacagagataagattttattcgagagcatcgacttctcacggctacggtcaatgacagtgtttggaatgtggaaatcattcttcatctccaaaagtatgaagctt

SEQ ID NO: 135468 - DNA, 326 bp, Zea Mays
cgctcattgccaagagtaccccacacaacagggtcatgacagcaaccctagaggcagaggcaaaggccgagtcccgcaaccgcgaaggttctactgcctttttcacgacgaagactccacgcaccccaccagggactaccctgaaaccaaggctaccaaagataggatggccaaaaatcaactagctaacaaccaacaagtcgttgcacacacctaccacccccaacaataccaccagcaataattccacaatgaaccattctacccccaccagcaaaaccatatgtaccagcaacaccaagagatccaagtccttcctccaccac

SEQ ID NO: 135469 - DNA, 396 bp, Zea Mays
gcactatcaatcgatctaagcctcgctacgcgacaagaaggacaatcggaacatactaatcaggcactcaccaacggtagcggcggaggtgatgttgcccaccatgtcgcacgttccccgcggtggtcctccaccaccgatgagcaattgccgatggctcagtcgattcaatgctttgttcggtcacagtcaagcttctacaacgtctaacgatacccttggaccccttcctaaagctctggcggcatccacggctctaggtgccgacggcggatctccctcacccgcaatgcttattgttcttcatttagggcaatagagagaagaggaggaactcctggagcttttatcaggcggagagggggaaggagccaagaccagggtcctgggaaaggt

SEQ ID NO: 135470 - DNA, 410 bp, Zea Mays
ctgggcctcaaatacagagaagtgcaggggctggcgcgtaaaaattcctaagactcagtggactgcacagggtggattgcgggttggttctctaaatttataaggtcttttctgcaaaatggcatggcgaagggggtatcggtcgattatggccgatggattagaaaccaaccgcccagattgactcaccactcacgcgaaccggtatgcgccatgggatccacacgatctaagatcaatggtcgcaatttaatgaatactgagacaagcgcctatcgtccgattatgatccaagggttaggaatcaacggttcacacgatccaatctcgggcgctcctttcccatccaacggccatcagcccttcttctctcctacacgaacagccgagcgatggcaccaggagctccc

SEQ ID NO: 135471 - DNA, 322 bp, Zea Mays
gagcaattgcgtgttaaccagtgcagtacacaggaaaataggggcgcggggaggttgctcaccttgaggggaagcgctggaggcacggggcaacaacggaggcacagggacgcgacggggcgacggtggcggagctccagctgcacaagaaccactccggtgagcgcggaccggacagaccagatagggggagggaacaccgaagggtgtcccgagtagctgacagcaaggcgaagcttaccgtggcgctggacggggcacgggcgcaacggcggccacggaacaggcggtggacgtcggcgggcggtggcggaggttctcg

SEQ ID NO: 135472 - DNA, 785 bp, Zea Mays
agacaggcaagagggagaaggagacctgggctaatggcaggcgcgcgcatgaggaaggagagagagggagggaaaggaggagggggaggggttgtggctttatagcaaagtttgggagattattttatgctgggattcttgtcatctttcacatgaagctatattacccctctctctctctctctcaaactttggcttttgcttttgctgtgtcctgcgtcagtagctttatatcggtgaatagaatagaaatatcccaatcttctcttcttgtctttggcagccaaagcgagctggtgtagccgcagcaggactgtaggatcggaaggccattggctgctttgtgggccaccagagcaatgcctagtcagctcccccgttggaaagggtgaggggcccaaggttggtactcgattccccgcacctttttccctttgacggtttacgtcacgttcccacacggacccccatgtagatttgccggcaggtgggggcctccctgcctcgatgcctgtgcctgaatctgcatgattagcagctaatccatgtacagtactgtttgtgccgccagtacttttgccagaagcgattatctgtctcaactgactcttaattttttttttcccctgaagcggagtggcaaccaaccaactctgggctaaagttcgtctgtgcttctgtcccccatgttaatgctagctagaggggtgaatgtgtgctgcatgccatagcccatatggttactgttactggtcggtgcacaatggctgcgtgcatgccggcag

SEQ ID NO: 135473 - DNA, 491 bp, Zea Mays
ccaacagaggaacaacattcagaccggtcaaaggtctagtggtcaacaacagaatggtcaacgaagcgccgtgaacacaccggccaagaacaacagcatcactactccagtccaacctaatggctgcttcaagtgtggcaaacttggccactatgctaacaactgcccaaggcgcaacaaacagacaccccagaagaacagaaaccagaggactgaccagaacacaccttctcgtggatctgcacaaaacaagactccgcagaaccagagtaggggaagagtcaatcatgtgacagcagaatcagttcctgaggatgccgacgtggtgtatggtatgtttcttattaactccatacctgcatcagttttatttgattctggagcatctcactccttcgtaacaaagtcatttgtggaaaaacataatataccaaatatcccttgaagaagaaactactaattcgatcaccaggaggtgaacttagagccac

SEQ ID NO: 135474 - DNA, 298 bp, Zea Mays
attatttacacatctctactactacttaagaggagagtgtagacgtccacaccccggatggtgcacggttctgcctcccacatcgggcccaacgcgcagctctgctccctcgctcttccaacgcatgcaacccagcaggcccatttcctcaccaagcaaaacaaatatctacaacattacctaaatcgttctctaccaacgccattgagccgctagcaagttaacatttggggctgcaccaacgcttataagccgttctctacctgtttcactagccggtatggcactaaccacaata

SEQ ID NO: 135475 - DNA, 467 bp, Zea Mays
gtgccggcagtccctgttgtcgcggcttcgtctaaccgccaggtgggcccggcttgtcaggcccttctcctagctccggttcagttgcaaaccgtcgccgggaatcacggatctctgatccggccgcgtgccaccgaacctctccttcccccaggactacaaatccgagccccgcaaaccaattcgccgtgagctggcccccacctagggcccttcctgtgaaccccatgccgactcgtcgtcgtatactcgtatgggtgttgctcaggagccaccatcgtggttgtgtgctttcaccatcgtcggggaccctctgtcgggtcagggagactcgcctatcctggctgatgcatccgttgcgtcgtcgggcggttagggtcactagctctgactgaattgctcactggttcttggacatcaccgtcgggccgcactccgccatgggcgttattctccacgctacaatc

SEQ ID NO: 135476 - DNA, 634 bp, Zea Mays
ctgtattccaggagttcccaacttctgtgccatccatctgagtgagacgatacgatccgggccgagtgacttctgctaccacaaagggtccttcccataagggtgataacttgtgccgtccctcccccgttagaattcggcggagtacgagatctcctactgagaagaatcgttgccgcacggccttgtcgtgatagcgtcttagagtctgctggtaccgtgctgattggatcactgcatttagccgttcctcctcgagtacatcaatatcctctagtctggtggcctcagcttctgctatactgtcgaagatcaaccttggcgccccaaacttgagatcagcaggtagcactgcctccgacccatagaccatgaagaaaggggtgttcccatgcagggctcggctaggttgggttcttaggctccaaacaacataaggcaattcccttatccactttcctgcgaatttttcattcttatcgaagacttttttcctgagtgcctccaatatcattccattggctcgctcgacctgcccgttggctcttggatgtgctacagatgcatacttgatctgaatgctcttttgctcgcagaagttgaagaattctgaactggtgaagttggatcctaa

SEQ ID NO: 135477 - DNA, 467 bp, Zea Mays
ccaaaagcagcccagatggcccagtcagggggaaaagcgcccgcgcgcgcctgcgccctggcgattttgcacaaagacccctgcggttttgactaattgcgaccgagttcccctgctgttttcgtgggtcacagacgatttgcagaaacgcccctgatgttctatttcttcacccgacacatcctcgacggcgttcacgcatggccgaagtccggcgagccagcagaccggccgaacgggaccgtgaccggcgcttagctttggcgtaaaccgaattcactacctgaagaacgtttcccctaatttaattgcacaaatgatcaaatgttttgctctggccacggtgaccgtgagcaacgtggcaagatcgtcgtgttcccggcgatttaaagctactccgtatgaattgatggttcggcaagcattacagagcgtcaagagtgctcgaacaagtgagagtgagggac

SEQ ID NO: 135478 - DNA, 320 bp, Zea Mays
tagaaagcacagcttcggcttgggctagaaccttcacatgctcgcatcctgccttctctaagatagccgcaattcctctggcacctgagaaggcgcagacatctccacggccactcaaaacctcctcaaaggcttcggctttgcccttgatccattcgattggaccttcggggtcgcctactatgaagttgtcctcatttgagtatgtgccaatattggcgaagctggtttttatcttttctacgcatgccatagatttttcatagcatcttccttttgaagaacgaagctctacaactgttttctcctagtgatttttc

SEQ ID NO: 135479 - DNA, 576 bp, Zea Mays
gtttgaaggtcgggccctcgatagggttcgggagaccgcctcaggacgagtgggctccgagcccgttactgatcagaagttcgaaggttgacccctcgaaagggcttcataaccgcctcagagcatagagtcagggatgactatgggtacgtccgtacatgaccaaggctcaggatacgatcctgaggtaccctgagacatatccgagacccctaggagtgattcatgatggtgtcccatcgtagggagggagctctcagaccccatcaatcgggttcggggctaagcgaatcactcgcaggtacttttggggcatgtcttcggaccgctagtcgactcctatcaaatggagcttggacccctgctcggattacccgttaacatctcacatgagacgtcatgctcgttgcccatcgagggtagcatggcgtgatccccctcttcctcattgctgagaggcgacgaagaggcgtataaccgaaaacatcaaggcgcccatcgatcatcctctcgccccgcgcgaaggctcgggggctacccttgcaacctatgctgtggaaaaatttattactgtca

SEQ ID NO: 135480 - DNA, 449 bp, Zea Mays
tgaaaaatccatgaaatgtgtggaaaaaattaagactagtttcgccagcgtcggcgcatatttgaatgaaggcaacttcatactgggcgatcctgaaggtccaatcgcctggatcaacggcgaagtcgaagcttttgaggaagttttaagtggccatggagatgtatgtgccttctcaggtgtcaggggaattgcggctattttggagaaggcaggctgcgagcatgtgaaggttctggcccaagccgaagccgcgttttctattgaagatacaaaggacccctcggccgaggcaagctttgttggcggaaagtttttcaccgacatctgggaaaatggtggccgaaggatggctcacgaaattataaggaaaagtgaaaaagatacccacgatgctagagaagcagcaaatgcagctgaaaaaactgcagaacttgaaaagcgaatag

SEQ ID NO: 135481 - DNA, 691 bp, Zea Mays
ttcctctcatcggtgaaactttaaggtatacgaagtcttctacttcgaatatcaactctcttcttctattatcagcgtagattttctgtcttgattgtgctctcttcaaattctctctgataatctgcacttgcttttctgcttcttggagaatttctggaccaaatacttgactctctccggtctgattccaataaagcggtgttctgcactttcgtccgtaaagtgcttcaaatggtgccatttttagacttgcttgataactattgttatacgagaattctgcataaggcaaacttttatcccagcttctaccatgctttagagcgcaagttcttagcatatcttccaacacttggtttgttctttctgtttgcccatccatttgcagatgataagcttaactaaagtttagcttggtatccatggactcatgaagtcttttccaaaaccgcgaggtaaactgggttcctcgatctgatatgatcttcttcggtactccatgcagacaaataattctcgacatgtataactctgcaaactgggctcccaagtaagttgtcttcacaggtataaagtgtgccactttagtcaacctgtctactatgacccatattgaatcatagccatcccgagtacgaggtagtccaactatgaaatccatactgatttcttcccatttccattctgg

SEQ ID NO: 135482 - DNA, 679 bp, Zea Mays
agccaatgcacggaacctggcatgaagcctctgtgctacgcgcgtctttgcattcattgcggataagacgtgtgtctgtccattccagtgacaggtggcgtgcccagtccacgctgcgtgggccgtgttgtcactcacacgttaccatagcaaggacaatgactcaccattacttgtgcgttcccaagaaaaggttcactgcctatcaatgctgcatcgagtacaatcatcatgactcccgctgattactcatgtgttactaaggcagagggaatctgaacggctccgcctatatgcctctacgcacaacaggcgtactagtctactccgtattctactgcaacaagccatcacccacctgcggacacgacaagatgtggcagtagccagtcagagaagcaacacagcgtccagcaaagatctttgtgtgctatcagtattaattattcacataatgtattccttccattatgctcctgcgcccgcatgtcggagcttagcatccttgtatgtaccccccttaactataaaagggaggggacacgacgttacaaaagacagggtcaatacaacgtatggacagtggatgtagggtattacgctccagcggcctgaaccactataaaccctcgagtgttcttgtgttcatccaaaattcaccaatcaggcaagcgcttag

SEQ ID NO: 135483 - DNA, 617 bp, Zea Mays
cttgtcgacaccctcttctccgccgtaacagccgcgcgaaaacgccgccgcggcatggaacgtgtgcgccttcctcctccccaggaaatcccgcagatcccaacaacctcgcagccggtatttctcgtcacgtacgcctttcgtgtagaataaaggggggctggacaggggagtcttcgcccttgtttgcaactcagcgcaaaagggaacgtgaggagagagagagagagagagagagagaaggagttaggctctgcgctggtggtactccatcaggtgtcaggacactagtctggtgacgagccacatttccctgggcgttggactccggtgagttttgccctcattcctcgacgcgtaatccagggactgtagtagtcgtcttggtaactcggcgcggttggggcatcggtgcctccgggattctgtggactatggcggcggcatgggactccagccttggacgcggtcggctgtgctcggttgtcacgggttggatgacaccgataggtccgcagagccgagtacctgggtgtggggactgaccatggggcagctggggccgccaccgtagagtgcgagtgcggggtagaagacgcaagggcatcccttgatct

SEQ ID NO: 135484 - DNA, 712 bp, Zea Mays
tcttcataaccaaatcttcatagccaactctgaattttagctctgttggcgctgtattaactgaattttagctgtacagatccatttccttgaatgtgcaaccaatattttagagttgcaagctccaaatgcgccaacaaaacccatgctaggggacgacgactgtaggtgacggtgttggtatgggatgacagcggctacaggtgacagtgactccgcgactagggtagaatggcgacgtgtgtagggccggcagtgacatgatagaaaggcggcggcgttgctccctgcaacaggaagacagagagcgcccgtgtccatcacctgggtaaaaagggtgtggaggtttcttcaaaaagtggtaagaatactgcagagagcgtgggagggctattttgcaatttgtgtatcatccgttggatcacatatcaacgactcacgtttgatttgtgcatttgtgcactggggcatccttgtgtacctgataggctgatatgatgcctttatagggaccctatgctatacatcttcatatgaaattacattgatatcacgaatcctttacacaaggactatgcaaccaccggagggtattttgtcttctcactcaaaagatgtgttgtacacgtccctcatgagctctcttgtcttttcaatgtctatatttgaccgaagttttatttgaatggcgctccacgaagatagcttagat

SEQ ID NO: 135485 - DNA, 448 bp, Zea Mays
atctttctgggggtgataggcggtgctgaagtctagcttggtgcccatagctctctgaaggctcgtccaaaatttggaggtgaactaggtttctctgtctgacactatcttccttgggatgccatggagtctgactatttctttaagataaatccgggcaagggtggctcctccaaaggtagttttcactgggatgaagtgggctaccttggtaagatggtctattattacccagatagagtcgttccatttttgcgtccggggtagtctggttacaaaatccatgcctatttcctcccatttccattcgggcactggaaggggttgcaataggcctgcaggcttctggtgctcggctttcgttcgttggcaagtgtcacaccgagccacatactgtgctatctctttcttcatccctctccaccagtatctggctttgaggtctagg

SEQ ID NO: 135486 - DNA, 450 bp, Zea Mays
ggaaataacaggatgattaaaggataaatggagactggacggggtcttatggggttttggaccattgtgattctatctgtgtcgattaaggaccgatcgtagtcggccctcgagtcatgttgaatttatgccccacatttagctcgaaggataagtcgttccgaccccgaagcctaacctattccaggccaggagtcagtctgttcgggccgtatcgttgcatggttgaggagaaagtcgggggcacgaagagtgagcccaagggtaggctaggcctgaacgtcctggcagtcgggcggtccctgggtgcggtggttccagtcgagcccgcgattcctagaatagtgtgatggttatctgtagctcactttagcgggtgagtgtggtttgtgtggggagtacctcgccagctggttagtaatcgattcgaatcgccatgctcctggacag

SEQ ID NO: 135487 - DNA, 294 bp, Zea Mays
gggagatggaggacattaaacgcaagattggtggatctcaggctaggagtagcagccatccccgctactcagacaacccacctcagcagttcaagcaaggtcaccagcatcagcgtcagcaccagcaacagtaccagagacagttcccacagcagcagcaataccgttagaacagccagcaaggagggaatccataccagcgctagatcaaccaggcacctcaccttcctgccccagcaaccaaccagaacaaccaagcagctccagcgcaaggaggaggccacggatgtttcc

SEQ ID NO: 135488 - DNA, 275 bp, Zea Mays
gttcataccatggattggggtagcagacgatgccggccacgtgccgcggcagccccgcgatcttcaacgcacgacggagagctccggtccgcccaactccgcacgaacagggaagttccaggcgctcagcgcacggtccagtgtgatcttgagaactcctgggcgcggtttcgtgcaccgaaccatgccgagtcctccgatcaacccccggcttgctcccgtgaagtcccggcggtgggcaagcaacccacggatgcaccccagccccccgcgag

SEQ ID NO: 135489 - DNA, 374 bp, Zea Mays
gccggactagcacaacaagtgcgaaaaaccaaagtctaccgcgaagactatccgtgcagaagtcgcctaagggtgcagccggactagcacaacaagtgcgaaaaatcgaagtctactgtgaagattatccgcgcagaagtcgcctaagggtgcagccggactagcacaacaaagtgcgaaaaaccgaagtctaccacggagactatccgtgcaacagttgcccgaaggcacagccagacgaagcgtaacaaaagcgaaaacgaccacaccaaactgtccgcgcaaagaccgaccacatgcgcaccagtccagcataacaattacacctgaccaagtacgtaacgccttcgcgagcatagccgaatgtgcgaggg

SEQ ID NO: 135490 - DNA, 699 bp, Zea Mays
tgaacagtcaacaatatttgcttccatactattctgaggtaaaaaagcatctcacatgagaattacctttatgaagaatgtagaaatggtcttcgatttgaagaatgagttggtttattatatttttactccttacttttttatttgttttgtgaaatgaaataaattggtacatcatcacaaagaacattgtaaatatagtgcgtgcatgcttgtttctcaaatgatgcttccttcgggtactaactttatgtgacaccttcatagacactaatgaacgaaacaattctagatgaattagggcatattctaatgcactagagttaatagatagctgacttagtaataataattagttggctaaaaaattactagtgaagtagctatctagactgtttgaatgttttcggttaattttagcaactaattattggctctaatgtattcaaacaggaccttaatactaaggaagtgtttagttctcaccttctaaagtaatttttagtcactaaaacaataccaaacatgatgactaaaataagttatccaaataaaatttctagagactaaagtttagttcttaaagtttagaacggttactaaacgaaccaaacatccattaaaaaaccaaacctgatttagtaaataaatagctctatttcttgtattagtattaattattagtttgtgagaaataat

SEQ ID NO: 135491 - DNA, 415 bp, Zea Mays
tgcagccgggcggttctctcggcgtgaacgctttgggcgggcaccttcaggtttctgaatctccacctctttgccaaattcttgcccagtcgtgatggccatcggctcggtgcgggtagagtcagacgattcctcggccagcaggcaaagcacgacatccatctcaactttattagtgctgactggcatctcaaagtgagtttgcctatcagccttgggaagactccgaagcggagcaatcaaggcctcaatgtcctcatgagagggtcacactctatgacccgggctaccatcatgagtaggagggttggagacaaattcaaagaatggcctatttggcggcaggttccatgcagaataggctacatgagcaccaacattcgagactctgcccctcagaatcatgtccagtcag

SEQ ID NO: 135492 - DNA, 548 bp, Zea Mays
gctggacccactctatcacgtttcatccagcagagtcagagctcctttcagccccctcggtcgcaagcaaccaaccaccagcaaatgcatgttggcactgcggagaccccagtcacttcaagaataactgcccctagttgaaagcaccaggacctacctactccaactcggtgaatggccccaagaatacctcggcacctgcctccaaggcactctcctccaacagtcagcagagcaagacccagtatcagggcagagcacgagttaaccacgtcgatgctcaggaggctcagcaagcttcggaagtagtgctcggtgagttccttgtcgaatttactcccgctactgtactttttgattcaggagcatcccattcatttatagccactagttttgtggaaaagcatggcatcccctctacgcacctagaaatcccattggtcacccgaaacccaaggtcagaccttctatgccagctcaaatgctcccaagtcagaattcttttaagtggggtagtgtttttggcagacttaaccgtcttgccatcc

SEQ ID NO: 135493 - DNA, 331 bp, Zea Mays
ggtcctgggaggggagtcggtgatgcgtcgtctcgaccgtccccaaatcggcccactagttgaagccgcagctgactcaactcgggtggtgtggcttcgagctgggacgccgtggtcccggtcatactcttcccggcgccttatctcgtttttgtgccatcggtcgcgtgaagcgttgatggagctccgtgcgtcccgccgactgttgatggtgtgtcataggtcgttcgagggatgagcaataggcagaaggtggttagctacctgagtaagcagccgtcgatagccttcagcatccggagttcgcgggaggccatcatctatctgggcc

SEQ ID NO: 135494 - DNA, 322 bp, Zea Mays
ctcaccctctgaaaacggtcttagtttttatgtttatttctgcttaaaccaaatgaatctgccctactctgttacatagagtcagccctgacaagattgactaacatactgctgtttcttctcctctcaaataacttatgcgacttacagcaatgaattcaaacaaacttgaacaaactctcaactaggataagctaggccactggtggacgcctgatgctgcttgctgcttgcatcatgttatcatgaataggtcttgttgatgaagacatccacaacgtatatgttgtccatgccagttgtttttcatagcataagctcc

SEQ ID NO: 135495 - DNA, 555 bp, Zea Mays
cgtcggcggccacgggctgtaacaacctggtatcaaagctcgcgctcctcggagtgggtcagtcgcgacggcgcccgttccaaaaccctcggtgcagacccggtttgtacttgaggccatggcgaacaaggagaaggaagacggggatcggtgggatcggatgatggcgaagatcgatcggctgacggagaaggtcgttggagtggaggaggtacaacagcagctgatcatgcagtcggaattggcggcggctgtggctcagaaggcggcggaagagcgggtccatttggcgcagcaattggagaagacaggacgagaggtggccgagatccgactcgagtggatggcgcggaacatggaaggttcagaatcggtgatggaggatcgagctcgcggggaacctcgacatcacgagccgaacgccaatcgaaggtatcgcagttattctcctgttcgcgatcggggaggtgggaatggtggcggagatgcgggggagtatccaccagtatctataccgaagtggaccttccctaggtttgatggattggagccgaa

SEQ ID NO: 135496 - DNA, 453 bp, Zea Mays
cgcggatcgtttggtcccgtcatggaccgtccggccccttacaccagatcgtccaggtatgcgtacgcggaaccgaaagttgcacaatatacacagttcccacactcctcgcaacaacactaaggtgccccaccggtgacatattataaccatgtcatgccacctcatgaacacatggttgaatattctttggccaccagagagcctgagagatataaagcaggaggtggtggcattaataggacacctagcacacatctcggacacccctgggaggaaagtcgacagaatgatgtcagtcaacctgatatttccacccataaacttaatggagggctgccatacatggtggaaagaattagggacaaggtagctaggttgtttagagacaaactcggtgttagtgtgtcaggcatagggcagtcgtatcgaaaaccttatagtcaccgattt

SEQ ID NO: 135497 - DNA, 369 bp, Zea Mays
ggctccgcctcattaaaaacctcaccccccggttggaaaagagtgcgggccggaatgatactgtttggtgaattacaagggcgtgttagccctgaggattcaaacaaaaaatttgcggagattatcgatattccaggaatgctctaggtcttcgccggacggtgttgttagcctgtacgcgctgggggatgccttcgtcttgacgatgaatggaccctcccactttggctccagcttgccccgtgactctgtccgggttgttcggacgagtacgaggttccctttgtcgaattctcttgggacgactgcgtggtcgcgccaggccttcgtttgagcttggtatttgttgagggcctgcagggcgaagac

SEQ ID NO: 135498 - DNA, 327 bp, Zea Mays
cgaagctgaacagatcgttgccgaagatgatagcgaaaatgaagatgaggatgatgacagcatcctaagcctgagcaaacccagccatatcgaattcgggagatccacagttaaggcagaggatctagttttaatgaagaaattaggatactttggagagaatgatgacgaactgcttcgttttgctggagaggaggtgattccagagccaaaagaggatgaagatgtagtcttcaaaagcttctttagggcgggacttcggttccccctttatgagatgatcggtgaagttttgaagaagttcgaaatttacctacaccaactgac

SEQ ID NO: 135499 - DNA, 569 bp, Zea Mays
cgcgaggtgatcaccggagttattgccacggcgttagccacgtattcactgcgccgccttcttccttatctccgaccgccacacgtcgccgttaaaattcccagccaccgtcgaagctgcctataaattggagcctcgaccagtgccgctaggtaattgtgtgtccagagaacccacgcgcagctccgattacttcccacagctctccaatttcacgttcgccccaaattcaatttccgccatcgcaaggaactgctcactacggccagccgtactccggtcagtccaaccctccctctccctcgtttaagctttcccacatgccttcaatgcttgctgacccgtccaattagactagaggtccactgaccattgggaacgcatgcatctttggtttatccgcgcgctcaccgtggccagaccgtattagttcatcaaatgtgcaattaacttaggggaatcgatggttggggtgtgaattcggtttcgaccgaagaggggcgtcagtcctttccccaatcgaccggcctgctagctcgccggagctcctccgtgcgctgccgtcgtcg

SEQ ID NO: 135500 - DNA, 579 bp, Zea Mays
ggcaagagttgggttcgccgttcactgttcgacggcgaggcgtcgtcgtcttgggtgggcaacgccgccgtgcgcccaacccgttggagggagatggttgccggtgaccgttgatgaagcgaggaacagatcaaattaggtcgtgggtatttaaaaccctagctgtagatctaggatccaacgacatggattagatgagggatacccctacgcataattgaatcctaaccgtccgatccgatcggacgattgaaggtgctggctggcgtggggtcccgcgggccatcgatctctgatcgttcggacatcgccgaataccgcttcataacttgaccgtggccattcaaatctaatccaacggctgcggacgcgtaccggttcattttagaagaaacctaatcctggcgctgaattgttgatcgaacggctgagatttccccatgcccccctttcggtcgtaccttttgcataagagcccctgactatttgacctactgacccgccgtccttagtaattcaaagagtactacaatcaggcctagaattttataaaagtaaccctgtaatcctcagtattag

SEQ ID NO: 135501 - DNA, 479 bp, Zea Mays
gttgatttgtgaaaaaggcagggtctctttagcaaatcgtccaagacgaaggggtacgggtagaattcaaccgttggatcggcatttgagggctcagattagatcaccatcatatgtgaaccggtattcaacctgggccgcaggatcaaagatccacggtggtaaacgcccctgggcgaaacgctatgccctggtttgatccagcccgatcatcagtcgatcaacggcccatggtgactcactcccggatctaatcccatccgccctacgtagatccaacggtcctgcgcataccaccccttcatccaaccgaagccgttgatcccaagatcaacgccccggtgctgtcttcttccctgggcacagcaacacggcggtgccgcacccgcggtgacgtgcccccccgacgcacacacaagcagcgcccggagtccccaatgaagaattctagtcgcaacacagtcgagggtaaagagatt

SEQ ID NO: 135502 - DNA, 292 bp, Zea Mays
cggatgagaagcgccaagagcgtttcttggaaggactaattggaccactgaattatcaacttcagagccatactttccccaatttccagaccctgttgaacaaggcaatcggccttgaaagcaaaagaaaggaattatctgaccataaaaggaagtttcaaggtgagtctagcaggaacacccgcccgaacaacgctcaaggttcgcagttccgctctggaaatcaaggcggaaacaattatcaagtgcaacactctggacagcaaggccagagaaataatcaaaatcagaa

SEQ ID NO: 135503 - DNA, 761 bp, Zea Mays
cgagttcatcgttgattcttgtaatcgccaggatctgagatcctcgctatcgcttgctgagcgtcctagctccagggtataaataccatcgtgtctcgccacctctccatcgggtcttagccatggacgacggagctgaggccctaagtactgagaacgaaatagaggaggagcagtggctgccgccgttgttgaatcatgttttcttcttcgctccggcctcggcgtagggtcgttggggccgtcagggctcgtggatcccgtatcatcctctggggagcacgaggatcatcggtgggttccgaatttgtcgccgggcttcgtcaaacgccgcggatccgccgagccgcgtgggtgggggcctctgcgtcaccgtactaggtaagaaccgtcccatttcatttcgccttcatgcctgcgagatgtatcacctttcaaattggaatttagggcaccagtactcagtgtcgagttttctggcatggtttccgccgtcggccaataggtaccgctgtttccagctgatgagggaggaagacgatcggtgagccaatggatcccagccgaacggcagtgattagatcataacctaccctttcgccgattcaatcttgtccgtagatccctaattggatggcttcgagtagatcacaagttaataaaatcgtgactgttgtgatggcatcgggcggtgaggagagaataccgcttcaggccctgttcggttgacagggttttaaatcctaagggcttgttcggtt

SEQ ID NO: 135504 - DNA, 373 bp, Zea Mays
atgaaagagtggggttttgttagggttttctcaatgaactcaaaatgaaatcaactccgattgcaacaaaaaaaactactccaacagagcatatgcggtgatacaaagagtttatctcatcatctaacaacacccacaattcaagaactcgatggttcttccaaaatccaaaggcgagggaaggaaatcgaggacagagacaaactcgaatcaaaacttcagcgaagtcaaaaagtgaatacaagggtcgaacttcagcgaagtcaaaaaccgagtacaagagttgaactactccatggatggatatggccactccctttgaatacagagtcgaagattacaagacacagatgtgaaccaaacacctgtggat

SEQ ID NO: 135505 - DNA, 428 bp, Zea Mays
ccgacttgggttaccaacaggagaattccctctgtagacttggtgaaccgacttgagacgatccttagaggcaaagtatcaaatattggcgccctagtggcatattcagcatggaacctgccttctcccaagaccttcactctttttgtgtcgaatccacctgttactgatgacggtttgggccttagagtgcgaccctctgctgaagaggttaacacattggttgctttgctcggggaaattcctgacgacgaatggcaagtccactttgagatgcccttgaatcctagtgatgcagaaataagtgttatgcttgatttgctggctgaggactcccctgatgctgctcctgctgggacattggtggtggcgcctctttcagaaactagtataactttggatgttcagaagcctgccaatgctcgctc

SEQ ID NO: 135506 - DNA, 293 bp, Zea Mays
atccgtaactctgttgtagtatgccaaccaaagtttaaaagagacggaatataagataaaatactcgttgaatgactaatcgatgatatgagacgtcaaacataattctcttgttgaaatctaaatctcacccatttatgatccatcttatcatctgggtgggcagctatcgattgccgccgaccacttgacttgtctctgccatagccccacaaccaaagtctagagaaggtgatcacgtgaaacaacagaatgagcgccaacagcccaacaacatcaatcaccagaaccac

SEQ ID NO: 135507 - DNA, 511 bp, Zea Mays
ggaaggaataccgcgaaaatggagtggagaagtgctctatggcggtctacctaggagaaagccgaagttacccaaaccaccctcccttccaagtcaccttcatcgggcaccacttcccagacacttgccagattgttgcccaaaaagcccttaagcagctatgccagaactacagcagagaggtccttgaaaccccccttcgttacttcccacctagcaacaaaaatacccccacctggaggaaaagactttaggccctgtcagggagagatcctactgaagataagaagctgaagaagctcgcccccacgaagaaaatccaaaagaagaccagagaccaaggaggccagactgagcggaagaagaaagcccctccagcaccacctcccgccagaatagagaatttgtccgacgtcgaggatatgtccctagctagccttgatgaccttctcaaggaatttggggacactttagaaaaagagtttggaagtacctcagagaacgctcgcgt

SEQ ID NO: 135508 - DNA, 560 bp, Zea Mays
atctgagctcggcttggctggataacactctgggtcacgtaaatatcctcaccgtggataacttcggccataaacaagtccggccgccgtacatgcgtcaccgcggcggagatcgataagaacgccggtgaccgccgcctcctagccttgcgccatgtggctttagcttcccatcgcgtcgccgtggcttcttactgccgtcaaatcgttgccggcgagctcaccacgactgtggacacgtactcgcgcggccagcgccttcttcctcccctccggctgccagctcaacttgctcgaattgatcgccgccgctgtcgcacctagccccgatcgttcgctgaggtccgcgaattcggagtttcccccaaatccgatttccgccaccgtgaaacgagcctcaccgtcgccagccatactccggttagctcctcccctctgctcccttgtttaagcattcacatacgtctgcgatactcgccaacccatccaattgagctaggatcccatgaatcgccgggaacacgaccgtatagtcgccatactcacggccaccgtggcca

SEQ ID NO: 135509 - DNA, 304 bp, Zea Mays
aagagtcacggccatatttatggttgagggcggagtctcccctgtgaccgattcctgcgccgagaaggtcggtcgcaaggatccgggcggggatggcggactccgtgcggacggttgccgtgcagctcggattcgttgcgaaattcacggcgtgggagctgaacctgacaactggggcccacatgtaagtgtgtcgcgtgtgagacatcatgaggccgagtgcaggcgcgacagcggatagctaggctgcgcaggggagcatggttgagtgggcgagggatttttgggcccaatagtggtagag

SEQ ID NO: 135510 - DNA, 444 bp, Zea Mays
accatcaaactatgtaaccatatctacaaaggaaaaaatgcagcatggattggcatcgcaacgccgtttgagagttgtgtgtagagaggcgaggctctcgacgttggtgcttgcgatgttgcagttgcctacagcgtcgacattttgtgcatctacaccaatcaaatctaattcatgaacggaatgctctgttttttcgtttaaagtgaattaaatccaataaaggtgacactctgtcatgctataatagaggcagagagctagctcgagcagctttaacacattcagtcttcatcatcgacaggttcttcagagactctaagccactcctcaagtttcagttcttgttcttatttgaacatattacacttgcatggctccactggtccgggctagccagtagcagtctagatgttgtagatgctctcggcgatgtttgaggga

SEQ ID NO: 135511 - DNA, 401 bp, Zea Mays
ctttaaggagtaggctaatgttctgctgttctgtcattccgccgttctacaatcttagtcgtccgttctaccattctgctatgagccgtttgatcccgtccaccagccccggtcgtgaagtccccgatcccgcccaccagccccgaccctcccactttcgtgcacgccgtattccctcgtccctcccaccggtttgcagcagccgccacatcacgcgacgttgttccacagccgccgccaacctcgatgccccctctccaccccagcgataggaggacgtgcaggtctttgggtgaacgcctggctccgtgccaactgagacctccgtgcctgcttccacgccatccacaaggtctaactcctcaccgcatcctccgcatttgcatggagttgggcaccgc

SEQ ID NO: 135512 - DNA, 502 bp, Zea Mays
tcccgagctccgctccaaggtgagacacccgttcctatgctcggtcttcccaattgtgcttcgctgttggccaatttcggcatcgccggaggttggccgtggcggtccgccacagtcgcgcggtggccggccaaattggcccggtccagtgcccccgcgccagcccttggtgttcccctcgccttgctgaaggtagtccaggacttagcgcatctcaaaccctctccccgtggccggaatccctcaccggagttaccccgacccgcccggagtcctccttcagccattctcccctctctgaccccggtctcgtagctacaaccctaccagtgtgttcgtcgtgccttcccctctgtttttggccagctctggcgaccccggagccaccatagctcgcactcgccccaactccagcgacctcaccgccgcgagaaggagcggcgccgccgcagccgttaacccctccctggctttgatctcccccgtccgatctctatcgcac

SEQ ID NO: 135513 - DNA, 540 bp, Zea Mays
cttaagatgaaacatacaggtgaggtcctgtggaactgagaacaacaaatatcggcgacaaaacgctgagctgctcgcaacgaacatggaactcaaggagcaactgaaaggaatgacatgcagtagatgcgatgccccaacaataatgcagaaatggcagttgatggatgaaaatgctaagcttagggaaatgtactcgctcgccagtgcagaactgaccaagctcatgcaggaagcaaatctccctccctctgtgatactagaggatatggcattagttacttccatgaacccattgtccagcaatgctagcagcagtcgtagcaccatcaaccaggatgagcttctctcatatgttgagtgtgctatcaaagagtttgagatgctagtaagggatggtacgccgttgtggctgccgaccatcggtggcgacgtgctcaacagtaaggagtatgcctgccagagattcccaagattacatgggacgatccgcccagaagggtttgttgtggaggccacaagggacactgccatagtcaa

SEQ ID NO: 135514 - DNA, 358 bp, Zea Mays
gtatggaacaacaaagacgggccagcatgagtaggatggtgaggttagattgaaaggcgagaaagcatctgttgccaaaccaaagcggacattccgcacttcatcagcaaagctggaatcaaaggcatctagtgccttccatgcatctgtatcagctcggtgcgccatgacatctggattctcacgtaccccttctttgtgccacctcatgtttctagttgtattcttggagatgaacaaacatttcaaccaaggtataagaggcatgtaacgaagctgcttacgtgcaatcttcgtcgtcacgtcaaaccatcgttgttttcaacctctacggatctacgctcaccacatactgtac

SEQ ID NO: 135515 - DNA, 391 bp, Zea Mays
aaagtcagctgatagtcaagagtttgaatgcctttgaaaatgaaaactttattgatgatggattctccaattacagagtacaatgttgctccgatagcttttgaggccttactaagggtaaaactttctaagatgctctatgttccatgaattccccacttccgtgccatccatctaagtaagccgatatgatcccggccgagtgacctctgatacaatgaatggtccttcccatagtgttgacaacttgtgtcgtccttcccccgttagaattcggcgaaggaccaagtctcccactacaaaggatcggtgtcgtatggctttatcatgatagagcctcaaggtctgctggtatctggctgactgaattactatgttcaatcgctcttcc

SEQ ID NO: 135516 - DNA, 864 bp, Zea Mays
cttgggtatggactggttggagtgccacagtcccatggaagttcattgggcagaaaaatggttggagtttgactataatcacagaagggtgcagttacaaggagttcagcccaaaattcagacctgccacagtttaacctgtttccaattgggatctttgatcagacaagaggcggttgagcaactcttggaattacagggagtggagagtatggatacggccactgtattgattcctgagtcgatcaagcaagtggtggaccaatatcaacatttgttcgtgaaacctaccggtcttcctcccaagagggcaattgatcatgctattgagctcttgccaggtgcccaaccttttcggctaagaccttatcgttatactccacagcagaaaaatgagatagagaagcaagtgaaggaaatgttggacagtggcgtgatacaacaaagtttcagtccttttgcatcacctattttattagtcaagaagaaagatggtgaatggcgtttatgcgtggattacagaaaactaaatgcttatacagtcaaaaaccggtatcccatgcctatttttgaggaaatagtggacgagttgcaaggagcatccatattttctaaattggatcatcggtcaggttaccatcagatacgcatcaaggaaggcgatgagtacaaaaccgcattccaaacacatcatggacattttgagtacagagttatgccttttggtttaactggagctccagccacattccaaagctttatgaacagattactggctcctttgctacgaaagtgtgtggttgtatttattgatgatgtgctggtctatagtgctactattgcagaccatgtcagacatttgaa

SEQ ID NO: 135517 - DNA, 543 bp, Zea Mays
cccgctggcgcgatgagttcctcctcgtcactggcaaatactccctggacagccacatcctcgatgacactcccgcgcctcacttccccaactgggcacgcatggactgcgttgtcaagtcctggatctccggctccatctccccggaccttgctgaaatggccatggaacgcggcgccactgctcgcaccacttggctgactctcgagaaccagtttctcgggaatcgggaaactcgcgccctccacctcgacgctcagttctggcacttcgtccaaggtgatctacctgtctccgattattgtcgccgtttcaaaaccatggcagatgccctcggtgatcttggcgaaccagtcttcgaccggacgttggtcctcaacgttctgcgcggccttagcgaccgtttctccgacatcagacgtcatcttcgcctcggtcgccccttttcgacgttccacgacgtccgggccactctcctgttggaggaacttacgatggctcatcgtgcgtcttctccatccgccgccctgcttacctccacca

SEQ ID NO: 135518 - DNA, 936 bp, Zea Mays
gcaatggttgggctacagttctcatccgtgtcgccaaaaagttttcgcttgagctttagcttggttggaggctgtgcattgatatttggaataacaatactgggcgtttccggcctctgagtatcttgaggcaatgaaacagcctgattgtctatcaagttttcttgagccggtatgttgtcagggctagatgaggacccggcaggagggccaatgtctgggttgtttcttggtcgctgataagagcgtacagagcaagacaaacaagtcagtaaataaaaatgagtgggcaaaagtattaacatatccggggaaatggagacaatataatgacctgaaaatccaccaagttctctcgagtgggttgatacattttcagttaatattggtctagatgaaggaccagcagcaggatccatctgatgaagtttgttgtaacaaacttttccaacgcgcggtcaacggccagcgcgaattcggtttccttgcctatatatatatgcagccaccgtagcgttccatgcacatcttcatcttctccaaaggaaaaggaagcgctgatggtgtcttcatcttctccaaaggaaaaggaagcaatgctacctgctgtcactactcatgagaagcagggggccgattcgtccataccttgtccaaggaattcaacatcaacaaagtctttcccacctccaaataggggctcgcaacctcacggcaaacaagggaccgaagtggcggaaggaataaactgcgatccctcttgtttcatggaccaacacaagatgatcatagtcggtaaaagtgaggtccaagtcacagtcacatctgcaaccatgacggtggagcgcttcctgcgggatgtccgcggcgaggagcctaagcccctcatcgtgggtttagataccgaatggtttgaaaatgaccgtaagaagatag

SEQ ID NO: 135519 - DNA, 510 bp, Zea Mays
ccacccaatcggtggtggttcggggaggtggtggtggcgaaggtacggtgtgagcggagagggccaaagaaggtgccccgatagaggcactaggaagggagggagatgacacaggctcaactgctagggaggcgatcgcagcacgtgggaagacaagcggaccagggacgtgacggcctgcctgagggtggacctcgacgtagtcctgaagaatagggttccagactggatcgaaggacacgaacgtgccctagatgagctgggcgtcgtggaggaggacacacacagtcacgagagcggcgggcgaggtaaagctcatgtatggcgggggtgacgccatggaaccggtgtgggaggagataacaatggtaggagtagcgcagctgcgcgagtagtgattggggtcgtcaagaagggcgcgcgcagccgctaggatcgggtcgggcggcgaggcagggagccgcggcggagagcgcacgcggcagggagaagggcggctggggaccagcg

SEQ ID NO: 135520 - DNA, 1376 bp, Zea Mays
tatgaccttaatggacaccggcccgaatagcggaacatacgacacccatttctgtgattcctcgccctcacctctttctctcatcttcgacccctttctctcgtcttccgagattcctcacctcccgcaaatgttttctaccacctacttaacaacgttccatattctttatcattattgtcgatcatcactctaaagtctaaactcaaaggcagcatatccagtgcgcctggctacctcgtgctcccatgcgcataagccagaaagagcttgcaaatcactcatgagcagatggtgcaatataaacataatgctcgttttttcaggttacatgacaacttttcttcgtgagaatcctagtggattgtctgacactgacatggtactttgttgtagattgatttgtaaatgcccttttttattgttgcatatatctatcatattggctaaagtaattttgtttaccttaccatgtagacatctatgtcggcttctcagaatgcagttgttgaaaagcactgatttactcttttatattgttggtccattctaaaggatgagcccagatggatggatcacaacactgatcgacaagcatagaccgctgaagctgctcaacttgggtcaaacactatcaagctatacctcgaagaatagatcaagctataccactaccagttcatcagaagagtatctcatcaagctagagatctatctttgcaaagactttccgtttaccaaatagttgtgtcgtttgagcaacaaaaagtggagatggcgggtcaatttcgcagacaacagctcaggattgagcgtaaaagttgtccattgaacacgagcgtttgtaacgatagaaacaaattgaagggaaacataccttgccaattgacttgtcgacttgcaatcttcttcagcgtgaatattacaaaacgatacaataacaaatcatgttcaaaattaaaggcagtgtaccgagacgtgattgagttgttgttggaggttgtttatatcattgcttgtgagaacttatgaacttattagtttaaatatttgcatgtaagtctgccactggattgtatttgagtttctcaaaactctgaacttgatcgtattggttgtaataaatattctagtgcctagaatgttgtgtgttatctagacgttttgtgatgaatgcagttagttctatcaagtcgggaaacaaatggaggaatcaatattccacaacttgagctaccagacacattgaaataatagacttacacaccattgacaaattgttgacaatgcacacatacattcaacaacatccacttacaacctacgacattgacaaaagcacacaaagacctagttcatgactcatgagacaacac

SEQ ID NO: 135521 - DNA, 424 bp, Zea Mays
gacgaaacgtcatatgtcattgctatcggctaggagaagtgtttcctcaggagtgacgagctacaaggctgtcccgcgcttgcgacaggtccttggcgagcattttattgtagctccattcgaagttgagtgtgtaccgtttcgccagagctaggccagttgggaacgagatgaagatggttggtggccttctgatgcaaagcatggacgactgttgttcgaggcatttggttcattagctcatctgtttcttgtagctggatcgaaattaactatccctcgtgcatgacgcaagacgatactggacaccgctcaactcatgcatgctacatcatgaatcctcgcattgcctctgtttgataattgttgagtcatgttttcttctctatcagattattgtgcaacagccagagacatctttacg

SEQ ID NO: 135522 - DNA, 1000 bp, Zea Mays
ggcagttcaattcgattaaatggatcggggagcaacaccaacatgtaagggtgctagaacaaggacgagaagggaacgagcagacctggggaaggctggccgcggtgaggtgagttcacggtggcggagagtggatttggggcgaatccaaaattcacgagctctagcgaagaactgccagcgattaacggtggctgggtggatgatgatgtcatgcagctagggggagggctcaatttatagtggcccacgggccgggtggtgctcatttggccgagccacgcggcggtcggaggtgaagaagaaagcactggccgcgtgaattcgtggccaacggcgtggcaagctcaccggcgacaatgggacagccttaaggtgtcacggtggtgcggtggaaaggctaagccacgcggcgcatggccgggaggcggcggtcaccggcgaggtaatccactcggccgcaaagagggagagagagccacgggggtcaccggagagatcgccagcgcacgggcggtgaagatcttttcaaggtgagcaacacccacacgaccgtggcaccaatcccggcaaagaggtcgccggcggtgagatcttttctacggcggtcgatctgatccggttggggcactgtaccatcaggagtttcagtcagatgaacctgacagcgcatattgaagcttcattttctccagtttttatgtggaatctatatcaactttctgcagcaaaggtgtagagctataatccatctatatctttgctacaatgtgtactcacaaaaagtcactggatccaaatcaaaatcgagctcaaagttcatgtcataacactgttaatctgtatttcagatttcaggcagcctgacagtccatctttgattgggtttttctccaaatttcacataagaccatggcttgaacccttaaacaaagttgttctcctatgatttggctacaaacttgatgtggtgacttagggcaaaaaccctatgctttgc

SEQ ID NO: 135523 - DNA, 356 bp, Zea Mays
ttttttgacaaagaggaacaccccctgtttcattacgaaatagacagaaacatagttcatacatgaccacagaggccactagaaaagaaaagccgacaaaacacacgcaactatcagccgaagaaaacatgacacggggaaagccttccaccgaagagccacagaccatctaacagaactgaccaaaagcagagcataaagaaccaaccgaagcgacatgatcatgacagagcaaactaaggacttatcatgtttacaggcaaaacacccacatgattaaagttcccatcacggatataccaaaaggacaaactaacacacaatattcattgaatgcgtctatcaaccggcttcca

SEQ ID NO: 135524 - DNA, 1120 bp, Zea Mays
ggctgggctcaacgtcatcagccacgctacgttcaagcagctgcagatcccagggtcccgattggggccctcacgcccattctcttgagtgggccctcagctggtgtatccccttggcagcatcgcactcccggttacattcaggactgaggaaaacttccgcactgagaatgtccagttcgatgttgcggaggttaacctccattttaatgccatcattggcaggccggccctgtaccggttcatggccattgcccattacgggtacttggtcctcaagatgtcgtcccctactggggtcctcaccgtgtggggcgaccgccccgctgcgcttgcagctgtcgagaagttgcacgccctggcggtagaagctgctcgcccggatgacgggggagggaccccttgacttcctgtaccaagacgcctgccaaggtgccaaaggtgcagccatctgggacagacggcgtccccgtcaagaccatccggctcagcgcggattcctcccagaccactcgcatcgcgggtgatctggaggagaaataggaactcgcgctcatcgccttcctccaggcaaatgctgatgtattcgcatgggaaccatcgcagatgcctgggatccccagggaggtgatcgagcaccatctgaagatccaccctgacgcgaaaccggtgagtcagaaacctcggagacagtccgttgagcggcaggacttcatccgtaaggaggtccggaagccgttggacgctggcttcatcgaagaggtccatcacccagtatggttggccaatccagtcatcgtccccaaggctaacgggaagcttcgaatgtacatcgactacaccagtctcaataaggcctgtcccaaggacccatatccactcccacggatagatcaaatcatggattctacctccgggtgcgacctcctgtcctttttagatgcttactctggtttccatcagatccagatgtctagacaagataggaagcataccgcttttgtaacagtggatgggctttactgttatattgtaatgtcttacggtctgaaaaacgccttgccaacatttgtacgggcgatgagtaagactttcggggacctgattagggacagggtag

SEQ ID NO: 135525 - DNA, 610 bp, Zea Mays
ggcgaggctgtgccagcaagttcatggccgatgaaagggacttggctacgacgacatgggagcagctggcagtggagaactccgagaagaccaaatcaagcactgcgcagaggagtgtggcggtggaggtgagacgagtagctgggacagggtggggagtgtggccagcatcgacttatatagccacaggagagggaggggagaagacgtcgatggggagagggacggacaccattgatggtgtggaatagaaactgccgacgttaatggtgggagctgaaacggacaaagttagggaatggaagaaattatcgtcgcagtaccacagtgggggagaggaagggccggttcgagccttccatgagtggccgtggagagctctggtgctgagcgtggcgtgcggctggacatggagcggcggcggctgcgcttccgttcgtagagtcaacaggagaaggagccacaaggaagaaacatcgagtggggcccatcggtcaatggcacaaacgagaaaaaaatgagaaggctgggcgtcgggcattgagctggaatggccaagcggctgagcgtacagagtagttaggttttcaaatttattattattattttt

SEQ ID NO: 135526 - DNA, 595 bp, Zea Mays
aactagggagtatgagcggacacttcccccaactctgaaaccccaaaatggtcgcatacgaggtcgatggtcgtggactgattggagcgcttagcactaagggcctggaggcgctccttcgcacgtgcaagcttctctagcaccatcattggtaaaaaataggaaaacccatcaacgaactgctgggactaaaaggataaaaaatcaaggatgggagagtatgatactcaccttcagtcaaggaccccaacacgaatgcacctacacgacatcctgatgacagcgtctccacgagatctggctgggccattggtaggccgttattcgtgttgaccacaagatgcttaggccatgccgattgaccgaacgcggaccctgctgccacaaccccctctacggtgggacttcgaacggcggcgtaagtcccatgcctcctcaaatgactgagccaaatttgaactattgatgcctaggctcggggaaaataaaacactcccccaatcgccacggggcagttgcgcacctcagacgtgtgcatggaccgtccctgttcttcgaaggtgatccaccccgacggcgaggatgctgtgtctcc

SEQ ID NO: 135527 - DNA, 477 bp, Zea Mays
gatgccgaaatgtttgacaaacttccggtaatagcctgccaacccaagaaagctgcgcaattccttcgtgttttttggtgtaggccaagtgaccacagcagacaccttttgagggtcagtctgaactccctccgaactgataacgtggccgagatatgaaatggacctggcagcaaatgtacacttggacagtttgaccttccactggtcttgatgcagcaagccaagcactgcgtccaaatgggcagcatggtcatccaaggaagaactgtataccaggatgtcatcgaagaaaacaagagcaaacttccgcagcacaggtcgcagagtgttgttcattgcactttgaaaggtggctggtgcacctgtcaagccaaatgccatcacacggaattcatagtgtccactatgtgtttggaatgctgttttgaactcctcaccctccttaagtaatatttggtggaacccagcacggag

SEQ ID NO: 135528 - DNA, 499 bp, Zea Mays
acggattcaataatgtaaactgtaaacaagatcaagtcaagaataaaacctttgaaaggacttcagttagtacacgcttaatttccttgttgatcgctgccattcgagcagcttcaatctcatcctgagtaagagcgcaataatttaaacaagagccatgttgatactcaacataaaaatgtccaaaaaatgacaacatgttgttcaatgatatgttctacttattctgcaacacatgaaaatagcaaagttgattattattttaatcagtattgctgctcatgataggtttttccaataactggtgtatgggcataacaaatctgtaggacataaatgagtcattgtatgacaaaatgtttacatgccctcattaggttatttaaaggcactggagaaatattggacatgtctacatggagagctggataaggaggcacttgaaggtggagtcaacaccctgctgcaggtggtcatggacatactggtgtttaaatta

SEQ ID NO: 135529 - DNA, 304 bp, Zea Mays
tcctgatccaaactagatactcgctggagacgtctctttttctttttcggctcgtcagcagaaggatcaagttgattggctcgggaagggcgccttgggcgagtactgacaggtttctgaatatccaaggttatatcagtttctgggggaggtgccaccaccaatgtcccagcaggagcagcatcagaagagtcctcagccagcaaatcaagcatagcacgtatctctgcatcactaggatccaagggcacctcaaagtggacctgccgttcactatcaggaacttccccgagcgaggcaacca

SEQ ID NO: 135530 - DNA, 385 bp, Zea Mays
gtgattctcacctttgaatgtgtaaaagtcctgtagactgttaccaaaaactgaaactggcacataaaacctgtttagatataaaaaaatgaaatgttagattacagagaacaataaacaatttcatgttagaactgaacaccagcacaatttttcttaactaaaagaacccaagcctctattgtctttctccaaaccaattggtgaaagttgcagctcaacaatcacatttaatccaccagaccaccacacacctagggcatcagagaaacatacttgaacatcacttactattttactaactaagagcaagaaagtagcaagtgttactcagaacatgagccctttatacgcatagtcgaatctcagatgtgaaaacgtaaac

SEQ ID NO: 135531 - DNA, 418 bp, Zea Mays
ggagcaacaagatggaactatcataagagcacaactgagggggtagtttttctttataactcgtcgtgcatgtgtgcagaccaataggccaggtttacggggacagaccccaccggtagggatggcagcgggtacggttatgggtaaataaccgcggttatttacccgtcgggtacggttatggtgggttttcgtatccgcgggtacgggtatggttactatatagtatccgcgggtaataatttcgcgggtatggatataggctatccatatccgtcacccgttgggtatatgacatgtggacccagatcttattctccaatcccatgcgccagccgccagccccgtgggccgtgggccgtgagcgatgaaagtgtgaaatgttgagtccttgtctccttgagcggtgctggcgtgc

SEQ ID NO: 135532 - DNA, 367 bp, Zea Mays
gtgttggtgctaaatgctgcagcctgcagctggatgcagtagctactgctgccgtgaacaatagcctgcctgcctggctgccatccgtcgtctgatccattcaggtagccgtcctaggttgagccccagccggccagcccagtggaggctaggcccccctatcgtaggctctgtagaatgtagattgatcatgctgcactttgccaccgtccatgggaaccaatcacattgctctgtccctctctctcccagtttggcctttgcattggagccaagggagctagcgccgtacaggatcgcgtagcactggattggcatgtttcaaatcaatgcttttcgtcactagttgacctagcaccgtacacct

SEQ ID NO: 135533 - DNA, 504 bp, Zea Mays
agacaatgaaaataaatgcacgtggaatgcttctgtgtcggccaattctcctaattgtgctagaaactggcctatgtgttcacctgtgcttttcccttggtcacccgaaaattttacaaattcgggtatcctggttcctgtgggtatgggtggtggtcaaatcggatgtcataaggcctccgatatgactgccctctagggaccatgcttactccgagcttatctcagaacgccccagctatttcttccctcactatatcaatggcagccggtgcgagaccaccggccctttggtcaaacataggtggggttggctggatattagcatgttgtcttccccccattggtttgagttatgtggtgcattattatttgccttatatggttcataggattgaccgttcctttccggccttctaggtgaggccggaaagtactcgctcccatgggcctgagactccgtattaatgggctggtgcattgtatagtgtgatgggaagtgtt

SEQ ID NO: 135534 - DNA, 738 bp, Zea Mays
agcgccttggcttcatattgcacaggtaaaaagctcaagccccattatcgcattgggtgtcaactgatgaaggtatatctgatactttttcagcactttgataaccattttgtgtaatgggaaccaaagcctaaccttaaagaagctttgaaacgccacaagttcattgttctgcggcttaggaatagtgtcttcctccccgagcataatcatatcaatgttatcaatatactccaacattttcatcacctcaacttgtcctttctttatcattgatttcctgaagcaaacatggcttggctttgatggtcggatgtcactatcatcttcttttaaatttgaattcttcactatcctcattggactcctatactgcaagatcggctaaaataacttcaatgttaccttcttcggctagggcaggagcctcaatcgcggtaactagggcaccactctcaatgatggggacttcttccattttctcagcgacatccgaagatgtcacgattgccagtggaacactcgatttgtcttccactattaggagcttcggaggcatataaattggtggcaggagcagtaaatgtcgtgcaacactgtcacgaacatgccccgttatataggtagaggacacatgattcgaggagtcaagtaatgctcaatcgctgcaagtggggcttccgtaccatccgaccaggaaaacgtatttctaaaagtttgtttcagataacaagctct

SEQ ID NO: 135535 - DNA, 469 bp, Zea Mays
gagagagcaaaaaataacttatttgtgttttattgtatttttatttaatttcttagatttccaaactctatagagcttgatatagttgttatggccacttggcgatatataaatatataatgccacacaacacaatcaaataaaatatagaaccaaacaaaattgtttatgaaggttgcgcataatgtgactttaggggcttgaacaacccaccacaatccacgcgaatacaagctctagtgtatctggcgtcaacacatgtgcgactatcagggcaacgacaacacatcaaaccttcgtaaccagcgcaacagatgcagttgtggcttggtagttggggtacacgataagtacatgcaacaggcacaacaggcgcaacaagcacaactgtgactcaatagttacgacacacatgcaatgccttcagggcccacgaaaattgtgtgactcggtgatggcggtccgactc

SEQ ID NO: 135536 - DNA, 463 bp, Zea Mays
ccgcgtggcccaactcgcgtgttgcgcgcgcacactcactatcacatgggccccattggccagatgttaaccgcgcgtacgcaagcctccagcgccgacctttgggctcggtcccgtttgcgctatgcatctccttcgcgtactcgctgcctgtggggccgatacgtcatctctatcccgtaccagtcttcaacacacagaccacgctcctcgcaacagaacaccaccaaactcgccgggacgttgagctacctctgccgttctcgcgctcgtgctgaccgcttcatctcgcttctcagtgcataaaagccatgcgtccagtcccctcctccctccatcttcttacacttgcgaccctctcgattcagccacaggggcatgacaccagggagaccgagctccgctgccgccgtagaaattcgtgcactggttgcggttcggggccctctggtgggcaccggag

SEQ ID NO: 135537 - DNA, 546 bp, Zea Mays
cagtggacaaaggtttgttccagtacgacatatctgcatcttcagtagctcaatagttgtaacatgtgcatgcctgcagaaatttgagtccctcgccccctcgccccctcgagcggcataaatcacactactgcatgttttcaggaatcatggtgcactctatctgaccaatcatgcaagcataccaactgctagccaaatcattccttgctagatctcatcacggtgtgcgccttctgcttgcgaaacaaacaaaaaagtatatcacacatcagatttctctgcaagtccgtcggtggatctgtagccaccgccacaagtccactaccatgaacactaggaccgagaaatgactcaactcaagaaccctagctaacaaaagagagagaccaactggatagaagcttgacagtgtagtggaggttgccggcggcggagaggatgtcgtcatcgcgatccccgctcatcaacaccttgtcttctcgcttgcgctgcccccgtacgtcttctcatcgctcgcatgggattcgttcctggcccctcgag

SEQ ID NO: 135538 - DNA, 352 bp, Zea Mays
ctgaagggtgcgagggatccgaaccgttcgatcaagatcggacgggaaaaagtcaaactaggacagatgagcggctgcgggtgacgctgacaagcgggtcagggcgtcaggtgcgcgtgcgcgaagcggtatcccgcggtccgggccgttcgatctgaatcggacaaagaggatcagaccggggaaacaaacgactacgggcggcgccgctcctctccgcggcggtgaagtcaccggagttgaggcaggcgcgggctaaggtggctccggggtagccgaagttgggcagagcggaagagggcgccacgacaaactcgatggcggggaagaggccatgaatccacgggccgag

SEQ ID NO: 135539 - DNA, 407 bp, Zea Mays
ggggtttgtaggtcatgagtgggaggtggaccgacgcctccgttgtggctcgatgccagacactgataatgcggccggtcatttatgacaggtcggtcttgggctagacacgagatccactcgagtggtttcctttcggcatgcctagttccccttgttcggttctgccacggccaaccccgggttcgatgccgtggggtttgtcttagggcggattcttctaggatagacgttacctatctcctccgactgaccagcgggccctagttgccagaggcctttccctagtgggcttgttgactgatgggccccaaggatcgcggatcgtatctccaacagtagcccccaagccctcgaggtgagaatatttccccaatggggctttcccagtgtcggacgttgtcttg

SEQ ID NO: 135540 - DNA, 515 bp, Zea Mays
gactgggcgcgcaaatacagagaagttcaggggctaagccgcaagattcctaagactcagatctctgccgccaggacggcgggttgataccccgatacttcaggggcttttgtagaaaatcggccaccgaaggggtatctgtacacgcaggtcgttggattagatttggacggccgcagatcacgcccagacttaatctattctgaagtgttggatacggatccaacggttacgattttatgaacccaggtccattactacccgtccatcgtcgatctagcggacaccatttctcagacgaaaggtcacgggatctaaccacagtcgtcgatcctcccgatcaacggtcgtgaattccctagccgaacggatacacatggccgatccgagccgctagcggctggatcaacggctggcgtgcatcatcctcgctctggtcgcgcacagcagcgccgccccgtgccgcggcggcgaaacccgccggagccattggaacacgcgacacacgaccctag

SEQ ID NO: 135541 - DNA, 608 bp, Zea Mays
gcttgggccagcatttgaccacttcggcccatttccgattctcaccccgcgcggcctgctgctcaactttccccatggcgctgatgactgggcccctttgggcagtctcaggtggcacactctggttgatttccctcgcttccatgtgggtccagggagtcggattcatctgcttccctccaacaaactcagtcgaccgcatatagatacgggattcaacgcttacgaccgattcttctgtgtcccaacaaacctggctgaaatattcgctaatcgagtgttagctaccacgatttctctcttagccgactactggaggggctaggtaagcagtactgttagcccaatctcaactaccgtggctgagatggtcacccgataatggcgccctagggcgcggacatggtgcggcttgtttataaactccgagcgccgcgaagcccgcccctccctcgtcgatctgctcggtcatccaccttctaactccaccttcgcatagagtgccgctgcaggcggatcttagcagtcgccgcgcgagctagagcccctggctgtagcggccatccattcccatctccatcactctgcaatcagggattcagacgcga

SEQ ID NO: 135542 - DNA, 422 bp, Zea Mays
gccagggataaagaactctaggaaagtgcccttactgacgtttggaggcggctcgcacgacggtgctccttcaagatgcggtcccgccggcgcccaagcctgacgtcacgaagaacgccagccacgatacggggtcgtcgcaaccaccacacgcgtcgggaacccaaacgcacttcccccggcacaccgagctcgtactatctctcacctcatcggctgcggcacacaacgatgcccacccggccactttctcggtcgacgccgatctatggttggcgctggcagaggatgatgggaaggtaaggaacgcgctagggctggcggctacttatttgcagaatccttcccccggcgaaatcggccatatagttcctaggtggttgagctcccgcaaactgcgacgcccacgggaaaataggcgg

SEQ ID NO: 135543 - DNA, 477 bp, Zea Mays
gagaaataatcgacagaatagtcaaagatgaagtgatgatctacaaaaagactaaagcagaggtaatattggtttcaaggtgatccactgaagtttgtataattaaaattcattattaaagcgtttttaataattaattatgaagttcagtgtgaagaagttgttgtgcatactttaaggaaacacatgaaacaagaacccatctaggacaaaatttcactcttgggctataagatcatatcgatgtacctgtgtttcaagtttgtctttgagctgtattcccttatttgaaactaaaatacgatataacatttattatatgcatgaagtattgtcatgtttcatatttgtttgtgttctttaacaaggaaattagcataattttttgtgccacttggatattgtggatattcattgtttcatttgaataatgttttgccaactctgcaccgtcctccgcagttgtggaatcacgaa

SEQ ID NO: 135544 - DNA, 461 bp, Zea Mays
tacatataagtgtttgattctttaaatcaaatatctcatacttgattgtacgaatgtcacttgttacagatattatgattgacctaaaaatgtaattagtgatatagcatatcatgtgtttcctgtatataagaaaatggctctcaaccaaagaattaaaaaacttacttatcagggctctcaatccaaacatttggtctctcctttgagttatttgtaacgtcataaaattttggtggtttattggggtactcatttttcttgattaaaaaatagcacaatatgataggttgagaagagactttagttccttaagtgtaataaataggtttttaagcttcaaggaaacgtacttaaacaaaatactgaaccaataaatatgaaacataagaatcaaagttgaatacctgaaataagccttcagtttggtccatattctcctttgattcttttgccagcag

SEQ ID NO: 135545 - DNA, 626 bp, Zea Mays
gagttgcccaggagcagcgatcgtcgaagtgggcgtagtctctagggacagacccgtatggagttcctcagaggtggtgcccgctggagcgtggcttgaatgtgcgccagtgcatcagtatgatgtagccctcaagcccccagtaatccgtgaggattgcataggggtttacttagttcctagcaaagccatgggtcaaccctttgttgacctatcctgtctcagtcccccaagtcggttgttgacgcctattggttctttgttatgcatgcatctccattcggaagggcctttgggcccctttgggagagggtcgtcttttccgacctagtcggcgtgagggaaggggtcattgagcagcaaggggttatccaagtgagatttgtccagtccttcatagggtgtggtctcggcgagtactccactagggggactcgacccgttgggggcatctcatttagtccttccttattctatcccgtattggccctctggtcagtctgatcaatcgaatggggccccgtagccacccgtcaaccgggtttccatacgagaatgtgaggtacgaccttggacgtgggacctagcaaatgacctatgggccagtcatctggcttgcaactcgc

SEQ ID NO: 135546 - DNA, 480 bp, Zea Mays
gtggtagtggatttcgaggtcataatccttgatcaattcaagccatcttctttgacggaggttgaggtccggctgagtggagatgtacttcagactcttgtgatcggtgaagatgtggcatttgttcccaatcagatagtgcctccatatcttcagggcgtgcactatggctgccaactccaagtcgtgggtagggtagttctgctcgtgtggcttgagtaagcgggatgcataggcaataactttctcattttgcatcaagacacaccctaagccttgtcttgaagcgtcacagaaaatgacgaaatcctggtgtatgtccggtaatgtcaaaacgggcgtggttgtaagctttttcttgatgatctggaaactttcctcacattttggagtccacacaaatttattgtcctttttgagaagttcggtcataggtttcgctatgctggagaatcctttgataaagtggcggtaataccc

SEQ ID NO: 135547 - DNA, 338 bp, Zea Mays
gcagcagggagctagcatggtgaagacaaacggcgacgcacaacagcagcacaggtttggcggggactacaggcgcgaacgacgaagcatgtggagtcccgcgagcgatggcaatgatgcggcgtgacgacacagcacgagcgtggggaatccaggtagatggacgggcttcgggacaggaacatcaaggaatggcgagaggaggaagatgaacatgaaaatggcaattgctgctggctaagggagtgcagcgtccttatataggggaagagagacaggagattggccagattaactttccctaatgtccagttaaacgttacattcatccacattcg

SEQ ID NO: 135548 - DNA, 455 bp, Zea Mays
ccgaaggaggatgaagttgttgtttttaaaagcttcttcagggcatggcttcggtttcctctatatgatataataggataggttttgaagaagtttgagatataccttcatcagctgacgccaaatgccattgtcaggctgagtctttacatatgggctctccgaagccagggcatgagtgctaatgccaaaggtttctgccgagtgcacgagttgcactatcaaacgaaggccagagcggatggccttcacaaaaactttggatgttataattttgcgtatcgaaaggacaccagggccccggtaatcgtctaccgcaccaagtggccgaccgggtgcacaaatgagtggttctacgtaaaagctgacgagaagaagagggaaaagttgatgactatggttatgagtcccatgagattgagcttcgggatgacaaggccattgtgccatacgca

SEQ ID NO: 135549 - DNA, 496 bp, Zea Mays
tacactcactatctctaccatatcttcgcgcagctgatctgacctcctcacttccaggctacactcgactctaccagacttgtgttggtttccaccgcctggaacctaaggatgcagctcaccccagtgctctagtctccagttctacacctatggatcctttgggccccgagtgttaggttgacaatgagtcgatccgtcagcttgaggatcagggtatggttgatgacacttctttagattctgatgatgaggacttagggattccacaaccaccacatcatgtgccaccttgctcacacgatcacgaggccggtggttccaatgttgttcctccctctacacctcctgctattgatccagccctggcagccatccttaagtcttccacccagcagcaggctcacttggcagctgagcaggcatatcaggtagccatcctgcagtagatgtctgagcggatgtttttgatgtttcagactattcaagactgcta

SEQ ID NO: 135550 - DNA, 725 bp, Zea Mays
aatagggggttgaacgttagggtctaggcaccagtgaaataggcgcttggtcgcgagggtctaggcaccactccaataggtgcttggaagggagggtccaggcaccaatccaataggtgcttggtcgggagggtccagacaccaatccaatgggtgcttggtcgtgagggtccacgcaccagtcgagtaggtgcttggtccgaagggtccaggcaccagtgcaataggtgcgtggaggtgatggtccaggcacctattggagtggtgcctggaccctcccctccaagcacctattacaatggtgcctggaccctcccgaccaagttagttagaagaatattctattttatgacgccaaatattcctcgctagaaaattgaatatttacaccatgtgccaaccgcctacctattttgctctgcttggtgcgaaagcttcggtctcctcctgtccgtgtccccttagtcttctgccattcccgctatcgcggagcgcgcgggggtcatgcttgttgcctcacctactccagaggcgtcaaaggtttccgtctacttctcatccaactcttcgatcactttcttgatttttgccacggtggcggtgctggagctgaggtctaaggtttcgaacatgcggtagaagcaccatataagcctttccataatggaattccaaactagaagatggaatatttacagttagttagaagaataatccattttctg

SEQ ID NO: 135551 - DNA, 827 bp, Zea Mays
ggataatcatggcggagtaagaatcttggcaccagataggctcgggctcggtcgcgaatgagtttcaccgtacccacttgctcgctgatcagccgggatagacctcgccgccgttggccgcttaccgctgtgcgccacgtgctcaagcgttgtaccacgtcgctgtgaatcgcgtcttgcatgtccggtggtcgtcggggagcttgccacggtgaaagccactaatcccgagcgccagtaaccttcttcctctccggccgtcagcgcatcttcgcgaaattggacgccaccgctatgggagcctataaattgccaaccccgcctgctccgctaagtaattgtgcacccagtagagcaacccgtgcctcgaatcatccactagagctccccaatttgggatttcccccaaaccacccaagaacaccgagcagtgtgacctcgccgtggccagctcgtctcaggtccgctcataccttctgccccttcgtttcagtgttcttgcgtgcccctgatgctccccaaccccgccaatttgactaggaccccttagaatgccgggaacgcgttggattggccgttgatcacacggttaccgtggacagtgcgtgttagagcgccgtttgtgaaattagttggggggaaactcttgttaggatttgaatttggtctcagccagagtagagcaccggtcgttgcgggatccggctggtacaagctcgtcggaactcggttccccgccgctccccgtcgtggacttcgggctgtgaaggattagaaacgtgggggtgttcttgcaaatgtcagtgagacatgagaatagtgccatg

SEQ ID NO: 135552 - DNA, 530 bp, Zea Mays
gaagcaaacaatacctaattggatggtttgcttccagatccataacaatcattattatggtcacaatattctcaaaagcaatttcaccaagaatcatcagtggactggtagcaaggagataatagctttcctatgcccgctaatacttcaccaagcaaacatcccaattaagtagagctgccctaaacaatgaacatgaacgttgcaacttaaaaaccgcctacaacatgaaagccagccaaaagcccaaaaacaagcaaacatccacgagaaccttcccacccaatagttcttaggttctagcagctcgtaaaacgctaatgcaaatggtcacttcacgttaaagctcactatgtacaaaattatatacagttctggtatctaaaattagttgaacaggcaaccatacagaaatggtcacaccactactccgaaaacaataaattttggatattcttagttgtacccctcacagagaatgtacacgatataaattaaatcaaccaaataccagtcttgaatcattttgg

SEQ ID NO: 135553 - DNA, 319 bp, Zea Mays
ctcgcgacgtttcgaggcgggagcgggggagtctgcctttaaagaggggttcatccctcgagtagcagccatgccttgcttctctcccactcgtggtgccctttcgccttcgagctctctgtgcccctttgccttcaaggtttctgctttgtgtcgccatagtttaccatggccttgtaagttcatctcgagcatgcccagactgagtgagtgctcgacatggtatacctcctgcttggatgggatgcgctggcgttcggcagaaggatttgcgccgcgcgccatcctccccgacgaacttgccgccagagagttcgtg

SEQ ID NO: 135554 - DNA, 606 bp, Zea Mays
ctacagcacacagggatgttgaaacgagagcgaggaaggcatgatcggacctgtagagaggtagccacggtgagctcactcacagcggagttttgactgaattgggggaactttgaaattggagcgctctagtggacgatctgaggcacgggctagtgcgttgggtgcatgattacctagcagagctgatggcacgctcaatttatagggcccgagggcagtggctcgtgaatttggcatggcacgctggcggccggagagaggggagagcactggcgcaagagatgcgtggctttcaccgcggcaaggtcaccggcgatgaatggacacgccaaggcaagttactgtgacgtggtagagcacctaggcatgtggaaactgatcaacaggctaccaactccggtgagcctatctgaaccggccgtgaatcaagcggacacggcggccggggcggaacagtgtctcaagctcatccgtggtgaagatcttttcaccgtgaggcgttgtccgggcaccagtgggctcgaatcgcatcgccggtgtgaatccaggcgcgagggtcgccggcgcaaggggagctgaatctgtgatctgtttcagttactg

SEQ ID NO: 135555 - DNA, 445 bp, Zea Mays
tgtgggaggagatgcgtcaggagaggatggggcgacatcagcaagtcccattgccaccaccaccaccaccacttccaccccgggacaagcacaaggaatttatgagccacaagccgcctaccttcgccagctccctagatcctctgcatgccgatgactggttgaagtcagtggacaaaatgctaaacattgcccaatgctccgactgggagaaagttctatatgcttttggtcgtctgactggtcctgctgctaactggtgggattcttatgttgctgcccatgatgatgctgacactattacttgggctgaattcaccacgcaattcagaaactaccatattcctgctgggctgatgaagattaaaaagaaggaatttctatcattgaagcaaggcaacatgtctgtcagcgtgtaccgtgacaaattcattcagctatcaag

SEQ ID NO: 135556 - DNA, 713 bp, Zea Mays
gtttatatattaagagccctgtgctctacatatttagaggaagccccagtcgtttggtgccttctggcctagccataccatctaaatccttttcaattaaaccacatgaacttttataaggtggcccatttaaaagccaattaatttaggccaaactaaagttctaccaaatccacatgttttgtaccctaacattttcactgctctagcgaggcatacggtcgctaccatttcttcgtctcccatcctcatcttcctcgagtgtcgccgccccgtgcgtcgccatcaaactcttcttcaccgcgtatctgggcaacagccccacccaggacggagggagaccggcatagcggcgcggcaccaggaccagccccgaccgcaccgatcgatccgccgggcaagaggcagaaccaccaccacgcctcaggtgtgggtcgagcagtgggtgactaattcggcaagattccccatcatgcatgtgtgtttgttaatctcccaaaccattattaggtcatgattaggggacacgtaaagtattaggaagagatctttgttaattgcctttagctagcatatggttttgtatccatcacttgcgggcaagacgcggttgtttacatgcattataatgtttgtgtcttcaatttcattcatcatttttatgtttttcgatcgagcaaattggagaactctgtgtggttgaatggtgatgg

SEQ ID NO: 135557 - DNA, 524 bp, Zea Mays
atggattatagcactacaactttgctatagatcactgggtgtgttgccatttgaaaatcatagaaaaagaagcttaaacattggctgtcaggcactctgaacaggctccttgatggtacagtaccctaaccggatcagatcaatcgccagcgcggatgtcttcaccgccggtggctttccgccgtgattcacgtcgccggcgtcacgattcgcgctcgggtatgtggataacttcgcggcgtcaaaagatcgtcaccgcccatgacctggacaccacaccgactagccgtagtccatctcccctggctcaccgcccgcggtaatgtgctcaccgtcgaccgccgcctctcggccgtgcgccgcgtggctcgacccttccaccgcgtcgctgtaacttgctactgctgtcaaatcaacgccggtgaggttgccacggcgtaggacactaattcgcgtgcgccagtaccttcttcctcatctccgaccgccgcgtgtcttgtccaaattcgtggccaccgcccgtc

SEQ ID NO: 135558 - DNA, 340 bp, Zea Mays
gtcccgggccacgtcgtcgcgtacgaggacatggaggacgacctcctcctcgccggcgatctcaagtggaagtgagagagaatttaattattaactactgatgtgaccacaaacttaaaactggttttccgtcgtttcaaacacacagctcgatttactctctcgatggtgtgcatgattgcatcgcagcgattttgttcgcgtcgccaaaaggatccggatcatccctgccaagaagacgacgtcgtcgtcaagccgcgccaagaaatgcggaggaggagatgtcaaccacagcaactagtcgccggcgtccggccgggccgggctagcttttgttaga

SEQ ID NO: 135559 - DNA, 346 bp, Zea Mays
ctgcagttgctgtgctggtagatgttgttgctttgacaagtactggcaagcctcgcacctccgaactaactcggcagcatcacttttcgccgttggccaatagaatcccgacctgaagaccttcccgactagtgtcttggacgctgcgtgtattccacattgtccagcatggacctcatctagaagttgcttcccagtagatgagagaatgcatctcatgaagatgcctgatgcaccccttctgtatagtgtctccccaatgagcgtgtagtgagctgactgtctagcgatgcgctcgactgcatttttatcgtctggttcctcttcattctttatatatctgatg

SEQ ID NO: 135560 - DNA, 664 bp, Zea Mays
ctaccttgggcattctccctcagaaaggaaaaggaaagaagagtattgttcagaggtttgaaggccaggccctcggaaggggtcgggaaaccgcctcagagcatatgggccttgagcccgttactgatcaagggttcgaaggttggcccctctaaagggcttcataaccgtctcagatcatagagtcagggatgactataggtacgtccatacatgaccaagactcgggccacaatccaaggtatcctaagacatatccgaggcccccgggagcgatttgtgacggtattccattggcgggaggaaatctagccctcggaccccatcgaacgggaccgagaccaggcaaatcacctgtggtacctttttgggtcacgtctctaaaccactagtcgactcctaccaaacggagctcgggcctccacttagattacctattaatagctccgtggaaacatcatgcttgttgcccaccgagggtagcatgatgtgctccccctcttcctcctcgtggagaggcgacgaagtggcataaaaacaaagaagtcaaggtaccccttgatcatcctttcgccctgtgcgaaggatcaggggctacacatgcaaaactatggtacgacgaataagttgaaagttccaatagaccaacacacagtgctcggag

SEQ ID NO: 135561 - DNA, 339 bp, Zea Mays
taggttaattaatgagtatatgtataatctaatacgaattatattttaaaatggaatgagtattcttttagaaaacttgatccatataaaaacttcttaaagcactgagtcctaatggtaaatatgggggtatgctgagtggtgtcagatcagaattttttgatctggataattttaaagctagggagttcattactattgtaaatgtttatggaaaatcagttgaataaaagatggtcccaggccgatgtcataaaaactcggttcctcttgaaagtgaaatatcctctagctataggtggtggtttcaacattctgagattcacatggtgtttgatt

SEQ ID NO: 135562 - DNA, 290 bp, Zea Mays
gttgaattctatatcactcggggtctcttatgcaaaagatctaggttgaatgagtatggagaaattcgggctgcacgatctgatccggacggctcggattacaacgtggtcataaccgaaccggtacacagcgtggggcatcagattaagatcctacggctagggtgttatgaagatgtgatctaatcccggtcatcgaactaccatcctacggctcggatccgtttgatgaaggggtatgctgattctaatcctgaccgtccacgcagagatcaacgtcccaaaacaat

SEQ ID NO: 135563 - DNA, 329 bp, Zea Mays
caattaattgactgatttcttttcaactaagtttgtctatatataagtcgtagcgaacttaggtacttaactaatttaatgttaagtaactaatggatgattagagtgagcatggtgaatgcgcgtacttgtgataccgtatttgtgttgcgtaaataaataaaatgttgtcttcttttaagggtgttaatgatgaacgccgataacgtacgaatagctagcgcttgcgtatagtcgttgcagtgtcttactagttaatgttagttcgctatcatgtacttggagtatcttgtgctatttcatcatattcatacatatgcatcctgcat

SEQ ID NO: 135564 - DNA, 649 bp, Zea Mays
tataaatttgatctttcatgagttattaggaaacatcatggaggcatatatcgatgatatagtagtcaaatcgtgtatgtttgattcacatctagccgatttgtgtaaagcctttgataagatgcgacaatatggtttaaaaatgaacccatgcaaatagtcctttgggatgtcggtgggcaagttgtttggatttattaatcatgagcatgacatagaagtagatcccgaccgaattagagctattcggaatgtgggagctccaacttgtaaacttgaaatgcaaactttttcttggcaaggtaaattatttatggagatttaattctaacttggtcggaaaaaataatgctttcactcctattctccgggttaaaaataatgctgatatcacttaggggtagataacagtaggcatttgatcctatcaatgattatttatcttcagtcccagcgtcgaaagcattgaagaacatgttgtctttcaggttgtgtattgcggcggaagataaagttattggagttgtcctgactcaggagaccgacacaagtaatctttggtaatgcatacatgttgcagacattgcaaggtaatgaattacctaataagggttcgtttggatgtagatattagagatgttaaaattga

SEQ ID NO: 135565 - DNA, 298 bp, Zea Mays
gcctattgggtgttgttgcattgttctggaactattacaacattagttaatcttagccttttgacatctagactgacataatttgcattgtacatctctccttctctcttgataaataagaatgtcctttatgttccttattctctcccagatatttcacatttttggattgttttggtttcttggatgctcctgtagctttacatatgttgatcacccgatgcagttgagtgtttaacaagctagattgtattagattctcagcttacaaaagattctgggtccatctatttcaagg

SEQ ID NO: 135566 - DNA, 515 bp, Zea Mays
tggtgcgccaccaccgttaggttcgccgtgtttttcccaacgtgagagtgtagctcgatttgaatttgggagatcggggtgcgagagtgcgaatcccggcatgcattcgccatgcgcatatgcggcggcgctgctgccgacgtcatggagattggggaggcacttgtgccgttggatcggtttccagcagatgagattagatcgtgactgattcgttctgagccgttgatccgtcgatgtacgcccagaattaaatgtgtggataccacttcgcgacttcagatccgggcaggatatcttagatcctacggctgctagtgaataccgattcgaaaacctaatcgtagccatcggggtttgatcgggcgactggggtttacccgtaccccttcaccatgactatcttacagaagagcccctgcactccataaaaattatcccgcggttcagggcaggtgcaatctgaatctggtggactttagcaagttaaacctcagactttctagtatttgacg

SEQ ID NO: 135567 - DNA, 416 bp, Zea Mays
gcccgatccggcccacaaccaggcaaaatgcgcccacgtgcgcccgtgttggccattttgcacagaagtcctcagctattcgaaaaacccgtaaagaatacttattcactattcacttgtgtctctgacatgtgcacttaggcccctcacttcttactccttcgcaataccgggtacctgaccacgaacggcggagcggctgctccgacgagcttgtaccggccgcagtacccaataagccacgctcaatttcagtctacgcctaattctacccttggcgctccactaggaatcactaatttggtctgaacgccattctagagctcggtccacgtacacccacggagtttgagacattcccgacgcgttcctaacgacacagtgcagtaacatacgaattgggagcacggtaagct

SEQ ID NO: 135568 - DNA, 589 bp, Zea Mays
aggattcaaggtttcggctgtttctagcacatccagtacatttaccattcttctcctcttaggagttacgacagaacccatttgtaccttcggtactgttgccttttctggagggctcaaaacctttggcatcttcgttatttcttcaatttctggcttttcagccttatcaaccttcgtttcaacaaccttgactgtaggcatcttcggcattacatccggcttttaagtactctgtgtagttgaagcagtttcttttctttcggcagcagaagatgtccctgcgccaaactcaggaaccacgaccggtttaatgtaacgtggccggtgggtgagaacctttatttttttgcccttcggcacaggcttatctgggctatccggagcagaagttttcctctttttcccttgttccccagtgggtagcggtagtcagggtatacgaagccgatggcatcgaaaactctgtttaatcttttctttctccagccaccgaaggctgcggacaaggcattgtcctcggttttggagtacgccccaagtaactcgtcgctagtagttcaatgcacttcagccaatcatcatttgg

SEQ ID NO: 135569 - DNA, 557 bp, Zea Mays
gcacagcttatcaccctcagactgaaaggactaatcaagtattggaagacatgttgagagcttgtaccctttagcatggtagtagttgggacaagagtctaccttatgctgagttctcatataataatagttaccgggccagtctgaagatgtcactgttcgagaccctatatggcaggaaatgcaggactcctctatattggatcagactaggggaagacaattctttggacctgaacttattcaagaggtagaagaacaagtctgtataattagggagaacttcagggtagctcagaccaggcaaaagagctacgctgataatagaaggagaccactggaaatttgaggaaggtgattatgtgtacctcaatatgtcaccccttcgtggaatgaggagattcaaagtcaagggcaaattgtcccctcgctacattggaccattcttgatctttaggagaattggagagatggcataccaacttgagttacctgctagtctatcagatgtgcataatgtgttccacgtatctcaactaaagaagtgtctccgtgtc

SEQ ID NO: 135570 - DNA, 1025 bp, Zea Mays
caaggatttgatgctaggcggggaagctttaaccagttcggccgtggtatgaatcatttctccaattccagggttgtccgtggatctagtgctttcagggggagaggggctggtgtgttcaatcgatttggaggtcaggaaccaaggtgtgggcagcgtgcaggttctcaggtgaatttttcaagggcggaagcggcctcttcttctgcagcagtgccgccgtcggctgaggctctggctcaggccgtggccttgattaacgaggcgttttcgaagcagacaccttctgtttcaggtgtgtctctccctgcagttgtgcagcaggttttcgactcaggggataagttggtgggggatgcgcgagaggaaactgtgctgccagggaagaatagtgaacaggaggatgtggtggtccggggtgcagcacagggtaagaccaaggaaggaaagcctccgtattgctggagatgtctgacaaagggtcatgtaatgcagggttgtactatagagctgtggtgtgatatatgcaattgtgatgcccataacactgagagatgccatcagtttagaggggtaaaaccaaatgttttgacttgtgggtatgcagtcgatgggctcggtttttttcacatcccttacactccttcgcagaagcatagaggggattcaaaaaatgctataattaaggtttcagggggtgctctgtccacagcacaggtgtcatcagaacttgagcgtctggtgccggttaggtggaaatgggaggtggagtctgttggtaccaatgtgttcaagactcgatttccatctcgtgccgatatggagcatatgatagaatggggtgtggtccaaacaaaattcaatgcgtcaatgtcaatagaggagaaggtgttgccagtggaagtgaaatcaactttgggcaaagtttgggttcagttcactggcatccccaaggagatgatggattttctgcttatttgggcggtgggttccatcctcggggtgacaaaggcggtggacatgaa

SEQ ID NO: 135571 - DNA, 394 bp, Zea Mays
cgggcctgagattatacaagaagcagaggagcaagtccagcaaataagggagaatttgagaactgcacagtcaaggcagaaaagctatgctgacacccggaggagactgcttgagtttaaggagggagattatgtctatttgaaggtgtcaccactccggggtatgagaagatttaaagtcaagggaaagttatcccctcgctttattggacccttcttaatcttaaagcgactgggagaggttgcataccaattggagttaccggatcatcttgcggatgttcatgatgtctttcatgtatctcagctgaagaaatgtctcagggtacctgaggagcaattaccaatggaggaccttagtgttcaagatgatctaacttatgctgagcacccc

SEQ ID NO: 135572 - DNA, 490 bp, Zea Mays
cccgcaacatgtcttccaaaatctggtttacccattctgtctggccatctgtttgaggatggtatgctgagcttcatattacctgggtcccaagtgagtcttgcagctgctcccaaaagcgtgccacaaacagtgctcctctgtcagatacaatggtctttggaataccatgcaaccgcactatttgatcaacataaatttctgcatacttctctgtcttgtgggtggtatgcactggtaagaaatgagcagtcttggtcaatctgtccacaataacccaaatggaatcatggtgcctggaagtattgggcaaacccacgataaagtccatgcaaatgtcctcccatttccacgatggtatgtgaaggggttgcaaagggcctgctaccttcaaatgactggctttgattctctggcaggtatcgcactcggatatgtacttggcaatttccctcttcatcctggtccaccagtataaggatctgagatc

SEQ ID NO: 135573 - DNA, 390 bp, Zea Mays
aagctttttccatgccagggggtgcgtcagggagacactctcttgcctttgctattcatcctagctatggaccctctgcaacgcatacttgaccttgcaaccaaccatggcacactttccccgttgcccgaagagatagctagacggagaaccttgttataagcagatgatgctgccattctcctaaacccggttagataagacatgcaggcggtcgtggagattctccaggcttttgggcatttctctggtctccgcataaagctagaaaaagctccattcatccaatacgttgtgaagacatcgagctagaccacgtccttgagcccttcaatgggatcagagaatctttcccatgccgctaccttggcctgtagctccatacacgcc

SEQ ID NO: 135574 - DNA, 515 bp, Zea Mays
aaaaaatgtaatcaggtgctagggtagctagcatttttttaagatgtttggcagagcttcatcagttccaaatccacacaggtctactatagagcagctctactagtttgttcgtttcatgcaagtgttcaatacactatttagcacattgaaagtgttcaatacactatttagcacatttgtattagtagttagcttttcgctattaatgcaggatcttacttatctctctcacaaagtttcttggttcttgtgtctaaatttggcggtaaatttacagtccgcttctcttctcttctttttcatccatctcagcatttagctagcttctaacctcttaattatacttactcttagagcaagcttaataacgcaacctatagtgagctttataagagcaagtttaacaatagtgcctatggtgggcttaaaacctctatagccatcaataaaacattcatataatggtgttaactataaggttgactcttagattactattttgtctttttgtc

SEQ ID NO: 135575 - DNA, 422 bp, Zea Mays
ctgtcttattaatattcttgctcgctgaattacttgccatgtttcccttgccttgatttgagctccctgagttctgctgattgttggatttgttctacctcggataggggtagtctttgataaaatgtccaaacttcccacaattaaagcagccagttgaggaactagggagggcagggaaacgagcaccaggggcactcagctgacttgttgaagtgggggcagtggcagggcagatgaagataggctgtttgaaggggtaggagggtggataaggtgaagaacggttttgattaaaaggccggattaccaacctttgtcacttttcaggcccctgattggacctgtcacctccaattcccttctatttccctgggcctgtgttcttagcttctactgccagcgcggtgctgacagccctg

SEQ ID NO: 135576 - DNA, 660 bp, Zea Mays
tcgagaccatactggagaagtccggtgttgaatagttacttggtagccaggtcatatatcggaattctcaagtccactatctacctcacaataagcaaatacgacgacggtgaggtctatatgtcctttggcgtacccggtggctcctcatcgtcaactgccatgaagatcaaaatggactactcaggaaagatagaaatcctaatctggaacaccaacattttggaatggtacgtcctggaggcacagcctatgaatgaatgcagtacatatggatattgtggtccgtttgggtactgtgataacacagagcttaatgcgacatgcaagtgtctcgacagtttcgagccaataagcaacgaaggcaggagcaatggaagttttacagaaggatgccgccgcaaggagacactaagatgcggcgaagaagatactagtttcttaactttggcggacatgaagattcccgacgagttcgtgcatgtcaagaatagaagcttcgacggatgcacggcggaatgcgctagcaactgctcctgcacaggttacgcttatgccaatttcagcaccacggctttcaccggggatgacacaaggtgcctattatggatgggagatttgattgacacagcgaagcgcactggagatggagaaaatctt

SEQ ID NO: 135577 - DNA, 1063 bp, Zea Mays
tcctcatattcctcatgataggacaaaggggagctaataggcaatccagctccaataaccagacattcatgatctggtggagttccctcatccatatctgcaccgatgccagaaacatgtgccctgaagtcatcttccgctccatacatactggagtaatttaaagacatgctatctgcaagaggatgtgaaataattggttctgccagagcattggcgttttgcgtgttagcttgtgaccacagtatgtctgtttgcatctctaccttctgagggatctcagcaacaccactatcctggtcttcagctataaggtcattaaccaattttgtcttggcttcagcttttggtgaagctacttttggtgtttttgacagtatgtccctcttgccagtacgtggagaaacagcagtaaggacagatgaaaacctgtcttttctaccttcagttggggagagaggctttggatgtgttgaactgaatagtttactggcagctcttggagagaaaggatctgaaaacaatgggctaatctgtctgtcaggagtgattgaaataggcccaggaaatgatggatccaaatccattctgccatcaggaggaatcgcaggagcattctgtggtagaaatagatctcttttgccagcaactggttgaccagtatatggaaagacagtcttttctttgctagttggagcacaatctggcccagaagaaacatcatcaacgaccctctgcgattttttagaatgcacaagctgtgaacagccagatgggaaatcactttcactgttaagaaaaggtccttctttgactaagtacagttcttcatactgcctcaacccaaaaccatggtattctaatagattttcaacatcctcgcccttgaaagagaaaatgaaggcatataaggatttcacaagttcccagttcagaattagtttctgtccaaaggaagaaaacatactaacctccatagcaagccacaccacaacctgcgaaatagggatgccttggccattctgaagaccactgtgcaaggaagcgagtgcttgcctcctta

SEQ ID NO: 135578 - DNA, 561 bp, Zea Mays
tggttttccaagcagcgactgtatcaatccacaataaataaatctccgaggagtaaaatacttctattgattttcaaagcagtggctatgtccaaaattcatgcaaactagggaagatgacaaaagttacttatcttttactacaattattattttcttcttaccgaattctttgatcttgtaccgtgtctagctgcacggcgtcaatgcgttgttattggcctgaatgttatggagcagctgctttcttgtgcctgcaaacacaacgactttcagcaacctccctttgtccgttgtgacgttgtgacgttgtgatcccaggtcaatgaagatggcatttcgaaacggtgctgaaaattgttttacctcttcagatctctctgtcaaattaagaattccagttctcggatctggaccgtgcaatttatatctgcagaagatgaaaggtcattcaattgccgtccatgtacgaagatgccaacaagctcaaacaggttccaactttagcaggtaacgaacagttacgttggtgagccgacagtaagcgacgccttgtctcca

SEQ ID NO: 135579 - DNA, 367 bp, Zea Mays
caagcacgagagggcgtgagagagccatccacaccaagcgatcgcttgggcagagccattgtttttcaggcggtatgctcataggcgggcgtccacgatgcatgcacggagggtgactgctaacgaggatagatctatctacaagacataattgttgcgctgcttccagaggtgccagtagcagagtgttgcaaaggtcgaggaagacgttctgctgtaggtggcagagggtgaggtagccggtgtaggttggagcagcagatgtcgtcgatgatactggcgccgatcacagatgtcatcaacgacgatctggggaagagatgtgcgacgttgactccggttctgcagaacatacctcgcagatgtc

SEQ ID NO: 135580 - DNA, 456 bp, Zea Mays
caatggttcaatctgaaacccaaagacacttcttcaattgggatacatgaaacacattgtgcactacagataatgtttcgggtagttggagtcggtatgccactggtccacatctttcaagaataggaaacagaccaatgtatcggggtgcaagctttccttttacaccaaaacaggttacacccttcattggtgatactttcaggtacacataatcttcgacttgaaagtacaagggttggtgtcgtttgtctgcataactcttttgtcgagcttgcgcctctttcaatttatgtatgattcgttaaaccttttcttccatctctttcaccatatcaggcatgaaaaaccacctttctcctggttcagaccaattcaagggggtacagcaccgtcgtccatataatgcttcaaatggtgccatcttaatactttcttgataactattgttatacg

SEQ ID NO: 135581 - DNA, 619 bp, Zea Mays
gagcgcttggtttttatttggtaattgcattctgaaacgatttttattagccctgctgtatgagctggatagagcgctcggttcccatgagctcatgcgggttgttggagcgcctacttacaagttacaatgtgttctgcagcatagctggttgcgtatgcacaagcagactagccgcgtgcagcatgcccttcactcctgttccatttccacctgttgctgtgccgtcttggcttttcagcagccctggcatttgactgttagtgctagctactagtttcttcactcgccttacaaagttacaagtgacctcagcaaagtgttactagtagtttagtttctagaaaagcttgttctcttgttgttggatgattgatgataatttgataaggtcgtaccttctggcttcagattttcttcatggcatattgtatgagctggatggagcgctcggttttggctaagctaaccaagccaaggagccaagccgattagtgttttaaggatggagccaaacgtgtttgctataagattagaccacctaatttggaaggaggagtttgacagaatataagttgtgggtatttgaaaacaccccaaacttgtaagtggatttatg

SEQ ID NO: 135582 - DNA, 487 bp, Zea Mays
gctagcgacgttcgtccagataaatccctccttgagcaatgcggtcagaggtgcagcaatggtgccaaaattcttgatgaatttgcggtaataacccgcaagccccagaaatccgcggatggctcgagccgagcgtggttgaggccaatcagtcacgacacggaccttctctggatccatggccaccccatcggccgaataatatgcccgaggtaggagatggatgggacaccaaaatcacatttggacttcttaatagttggtgttgatgaagaacagtgagcactgtacggagatgacgcaagtgctcagtgatggagctgctgtagatcaggatatcgtcaaagaaaaacaagacgaaacggcgcagaaatggtcgcagaatgtcattcattagagcctgaaatgttgctagggcattacagaggccgaagggcatgacgagaaattcatagaggtcgtcatgcgttctgaaagccgttttctc

SEQ ID NO: 135583 - DNA, 358 bp, Zea Mays
tccacataggaggtggcgccagtcacgtggtttaggagaacacggagatagtagcgctccccctcggccggatgagcagagactattctactgacttgtccacccgtatctcgtttcctccgttgcaatactttgcccttaccactctaccaagtgtaccactcagggaagtcacgatacaggatgccacgagcctcctcgtgtagcctattcgcctcaaaatatgctgtgagcattgacctatcagcacctggacggttgacgactcgctcgaccatttgccgctcgtgaaatgccaccatgtgcatgtttggaagatgtagttgcagctgcatcacaggtggagagttctgactaa

SEQ ID NO: 135584 - DNA, 598 bp, Zea Mays
agaatttgcgttttcaagggggcgtattgcatccgataggtacaaactagcttcgccactgagcttcatatttacattaaaatgtgacgctttgatgcaggcagctgacactgcacctgcagctactggtttctccactacgcttagctagcaccccccaaaaagtcgtgccactgcttctatcgtggaattacttctcctgtcctagtcgaattatcagaggacggatccaagatctgggtgcctgcttctgtttacaaaagcaaaggttacaacgagatagagagggagatgcatgcgcacttcctgagctgagggtagagtgttggaggatagctttaggtcggaatatcctcgcaaaaatccatcgtgttgcagtgtatagcttgaacctgacgacgatcctgttggcttcattctgatggcacgtcagcacacgcaactcgagtaagaaaatatcttgcccacccaacccaaggcaccaaaacaaaaggaccctggtgctctatctcactattctctatgtggtccttcccacgaatcgaccggtgactgtatctgttaagtactactcctgcatcgaatgtcttttgttcaa

SEQ ID NO: 135585 - DNA, 335 bp, Zea Mays
gagtactccctccgtctcaaactagtattcattttggctcttgtttttaggttttgaatatggacattgactttagagagctcgatactcacaacctttcacataatgcaacgaggcattacacaacacatagccacatagggcttaaaattagcttgttgactttagtgagctcaatatattactccctccttcccaaattaaaattcgctttttgaagtaattaatatattcctacattgtttgatgtatgcgttttataaatatgtatagatttatcatcatctatttgaatcaacatcaacatgtcttgttgcatttgggacatatattaa

SEQ ID NO: 135586 - DNA, 712 bp, Zea Mays
cgggatggcaagggcggtttctgggctccatctatttatggctgggcaagcatcaaggtggagtggtggcggagtcagatccgagattcccggcggatttagctgcaacaaccgagcagggagatggttcaggcgagattcttgcgcgggatttgctcctggtttgttgagctttgccatcgaacgaccgagctccagcggatgtggggaaagttgttgacgccgctaggggatacgctgcgcaatctccgattgagaagggagagaagaggaacaatggttccaggtcccacccgtcagcttcctgcgcgcgatgaaggttaggctgggcgtgctcccaagattacgatggtagtggttgcaaccgcttggtccgaacctcacggagaagaagacctggcatgatggccccacccgctggctgcagagaagttggaaggcgattgtggtggtgtagctgttgtgcgggctgagcaaggacacatgtgtgcctggtgtggacggcttgtgatctgcatttgccaaggccgttcggccttatccctccaacttcccatccgtgcatgacaatcgttgactggattaatggctgcatgttgcgagtacctggctacatgtgcgtatgaaggtaactacgtgcgcgataatagcatatggtggccacaacagatagctatgtgcgcgacgaattaggaccgtagcctcccatgat

SEQ ID NO: 135587 - DNA, 325 bp, Zea Mays
ctaaatgtgaattctggctgagggaaattaaatttttgggtcccaccatttcttaggatgggatatcggttgatcctgagaaggtacaagaagtaatggattgaaaacctcctaccacagtgcggcagattcggagttttctaggattggcagggtattatcgacaattcattccggatttctccagaattgccaagccaatgactgaattgttgaagaaaggagtcaagtatgattggagccagaagtgtgaggatgcctttcatacactaaggcaacatttgacaacagcaccagtactagctcagcctgacaacaccaagcc

SEQ ID NO: 135588 - DNA, 403 bp, Zea Mays
ctgttgccccgtcttactgcggtgtcctggttagaatgtgagttaccctttaggaagcaaatagtgagcgaggaaaccatatccctgaggcgtaggtgttcccgtggctcgactatctttcctaatcgggatgtcccttgttcttgagggtttcgcattatgactagggcaagggtacgaagcatgtttgttttaaaactgcaaggaaaaacaacacataggaggggttcccctgttagcccccgagggaggcttggtattgaaagcaaggtcgagcctcccttggaagctattctttattaatcacgaaaatcatagtatagttaggcctgtatgcctaaggataaaagcgacgtacctgttctatgttccatgtgttgttgtagacttctccttcctcgtt

SEQ ID NO: 135589 - DNA, 349 bp, Zea Mays
cagccagggcatcatatattacattggctcaacatcatcctcaattcctcaccctcaaaaagatttcgcagctctccttcacctacactcaccccaatcggcaaggacaacaattctcgtttaccagtcctgtccacgcgatgacgaccactctccatctcgctacgatgacgtctaccactttgcgacaatccactcactctccgtttcgccaccgcccttcgccgcctatacccagtactcgcacccgggagcccctcggaaccctccacgcgtggcaaaggcttcgctgcagccacatctaacgctgcaaaataatccaagtcctcatctgaagactcctccgtcc

SEQ ID NO: 135590 - DNA, 983 bp, Zea Mays
aaaaggcttggctctcccatccgtcgtcgccccatcgcgttgtccctagagaggaagcaaggcacatgaccgccgtctccgggtgggacgacgagtctgtcctcctcgatgtgatggtcgctgaggccaccctcgcctgtgagtcccatcgcaagaggcaggcctccacctgctccaacgatgacggcaccggatccaacaccaaatacggagatacagttgacaggtgcgtatgttagctgttgtggcatgctggtctgattttaggccaccgtctgcgcctggtttcaactttcaagtcatagatcggtgcttattctgacgcctctcctacagcagggctcctctcttccacgatgcgaaggtgacttgtaggtcctcttctctcccttagattgcactcaaaactagactctaattcctatgtaccggaaatagtataatttcaaatttcataattactgaagtttttttatcacactttaatatttgtcaacaggtgtacttagcaatggtgcaaatcatgcccatccacgagatcttggcctcatcgccgattgagaagatgacgttgcaaatatttcagacttgtagagccctcgagcacctccatctcttgttcagttgcttatattagtcatatgttccctatgtttaaatttgatagtagattgaggcaacatataaacttcaggtcaaaataagaagagataaaggaagaacaatcaaatgagaaaccttttcagtcagtatagaatgacatcttttttctttcagttcaggttcagcgacacatgcatgtaagaatacattgcagactaatctttgttgtggcctgagtgtgaattattttatttttgaaaaaaaacagaccaccaaggagccaccttcctccaatggtgtggtgcaaaaacaacaacatggtctacacagtagtgcctctaacgcaaggacacaggcaggcgtcatagagtatcattgag

SEQ ID NO: 135591 - DNA, 544 bp, Zea Mays
cacaaggagtccacgaacgataaaaaaacatgagaaatcgggagcccaaggaccaaaccacgtaggcttacccgccccacagtcattaagagccgcaagacgcgcctgaagacgtcgtacctcggcgttagccgcctataaaggtgtgcaagtcattcccatatccctatggaggtcatcccctgaccgctccagagaggtcgacatagtgggtggtcgagacacagaattgcgactcattttgcgccttgggtgggtgaaccgcctccacaaggagaaccaggaaacgactatggaaggtaagaggagtaatggaaacctcgaggaaaggacaaaacaatcataccatctccccggatgacctcccctaggaggtttgttgccccgatacatgggcggataacgactaaagggaggcgctggctaatagggaagccctcgaggtatggagcgcagacgtggttgcctatgccaatacggtttacgaaggaagaaccctgggaccccgccagatgaacacgaaaagtaaaaaaacaagtagcaa

SEQ ID NO: 135592 - DNA, 367 bp, Zea Mays
caagtccctgttaagcaagtctgtgaggcagagcgaacaactaagtcctcgtcgagtaagtctgcgaggcagggcgaacgaccaagtccccgtcgagcaagtctgcgacgcagggcgaccgatcaagcccctgccgagcgagtctacaagacggggcgaatgaccaaatcctcatcgagcaagtctaggaggcagggcgaacaaccaagtccccgccgatcaagtctgcgaggcggggcgaccgaccaagccctcgttgagcgagtctgcgaggcagggcaaacgaccaagtcacgaatgcctcaacactagagtctctacattgacccatacactgaaaaggacgagacaataccccatactgggc

SEQ ID NO: 135593 - DNA, 397 bp, Zea Mays
ggtcaagccacaggaacctttgctaaataaggttatccactggccctatttaccaactatggtgcgtcgaaatgacccggccagcacatatattgccttgcaagatttgcactttctagcgtccccagctagcgaaacaagacggcactagcaaaagttttatagaagggggcatctagccatctcatcaggccactggtttaccaagttgtgatctagtcagacgtttgagtaatccgacgcgcggtagttatctgaagcgatgtgcaggtacgtgatcgctcacctaaaataaatccgtgccacacgattttagttagtgtccacgcgagttgcagctgttggaaagggactggtatggtttcatatggtctggagcctctcgtccgcttttgtc

SEQ ID NO: 135594 - DNA, 374 bp, Zea Mays
gggaaggtcagcaggaacaatctgaagagcattatccggggtgaccttaacccccaccagcagacagcaggctccttgcatctagctcgccgacctctaaggcgacttgttcagttaaagctgtggaagcatgtgttatcgtcgctccatcggaccgaggtggggacgacccaacgtggacatccatggaggcatcggaaagagagcacatctgaacacccttgggggctgggtcgtagtttgcactacccacaagagctggattgctaccagcaacaccctcgggggctgggtagccaccagcgccaccctcgggagctgggtcttctgcagtagccacctctaaggttgaatgcccttcagccacctccatg

SEQ ID NO: 135595 - DNA, 537 bp, Zea Mays
cacacagcactgttatctgactctgacagtcagccaagacaacccgatgaatgcagagagcaagagccatatttcgcctttggatcggacccgatatcattgtcgtcccgaactcttgaggtctagctgtgaccacgctaaacacagcgtaacagtagacaaatatgtgcaacactgaatcaatggtagagtagggccggtgagacaatgcgatcttttaggtgcggaaattcagctgccactggaaggtgtcagcgaggcaggcagcgcagggagcagaggtatgcactatgcaggcgaaggcagcccaacgagctgaccggccatttcgtcaggcttgcactgcttcagttcagcgcttgcactgctgcggtgtgctgtgggtggctgccattggctaaccttgtgcggctgcggcctgcgggcctgatgcatgcaactttctgccgcggaagcaggtcggcgctcggtgggctatgaacaatccttgtatatgggctcggctgtttcggcatgcgacgggcgagctgggcttgg

SEQ ID NO: 135596 - DNA, 553 bp, Zea Mays
ctgggggatttctcgctccagcatagattcccgagcctatataacctagtgtagcggaagaatgctactgtggccaatgtgctagggtctgtacctctcaatgtatcctacaggagaggcttacatggtgctaatttggagagatggcataccttagtcagcctagtagtggatacgacgttgaaccaggcaagagatagttttcgttggagccttcatcaaaacgggttgttctccactcagtctatgtatgcggcattgattgggaacggacaagtacggcaggatggcctcatctggaaactaaaactcccttaaagatcaagatcttcttctggttcttaagacaaggggtaaccttaactaaagataaccttgccaagagaaattggtcaggatcaaaaaaatgtgttttctgtccacaagatgaaaccattcaacatcttttcttccagtgccattatgcgagatttctatggcgtacggtatattttacatttggcattagagaaccaactagtatagaagatatgtgttcttcttggcttcaggg

SEQ ID NO: 135597 - DNA, 787 bp, Zea Mays
tcatagtggtgccagtacacggtggtcttgacattgttagggagaatgtgatcgtcaagggcgtagcggcaaagagcgagcagcaccatgtcacaccatgtggggtacttggtggtcgagagatcaaggacgatcgtgaccaaggcgcggatgtcctggatcatggttgtctgagtgtggaggtgcgcgatgactgcagtgtcacaggcggtagttgtgtcgtctctatccttggtgggtgtcgctgctttctgggcatcgagcaggtggcgttccatggcgcggatagcgtcttgttccttctctagggaaagagcaatggcatgtgcacgctgccaagcgacctccaaatcaggcgtgccttctccacggtggcgcgagcaggcgcctgttcttgctcttgtttcttggtggtagcagttgctttctattcgtctgtcaagttggagtggcactcgctgatgttgtccatcatgggaaaaaggaggggttgctaggggagagagagagggtatagcgcaccctagggtaggattagaggacggaagtgaattggatctagtctcgtgataccatgttaaagggatgtggcactgaagtcggatattggattgatgatagaggtacaaggggtgtacagtatataggcaaggatcatctaaggcttatagaaaacacccaatcaatggagatccttgcataacctatggccaactaccataaacaccaatgcacaaatggcagtcataatcagcctatttacatagtctaacaaatagcacaatag

SEQ ID NO: 135598 - DNA, 471 bp, Zea Mays
gaagtcgccgagcattccctaaacatctagtcgacgacaaggccggtcgcatagcggcttcgtggtttcaacgaggagaaacaaaaggccatcaacgaggaggtcgcaacactcttggcgacaggattcataagggagatacaccacccagaatgggttgtgaatcctatgctcattaagaagaagaacgtgagctggaggatgtgtgtcaactatacgaacctcaacaaggcatgttctaaagatccattccatctcccacgcatagaccaagtcgtagactccaccgctgggtgcgagctcctttcttttctggatgcctactcaggctatcaccagattgccacggaagaagctaatcaacatgccaccaccttcatcacccctttcagaacattttgttacgtctccatgcacttcgatctgaagaatgctggagccacgtaccaatgttgcatgctccaatgcttc

SEQ ID NO: 135599 - DNA, 845 bp, Zea Mays
gcctgatcgaaaatgagtctgtgctatcattaaagtatgtagatatcacaatgcagattgactctgcgagcaatctcgtgaccgctgccaaaaaccggattctccccaacccatacaggttcttaagcggagcgaggtttcgaagacactgctttgctcaccatcggcataatgccagtgtcagggatcaggagtctaaggtcatgcgataccgaggactccatcatttatgactctaatacatagtagattgaatgtttctcttatctttcggtgaaaacgtcctctctattatattggagattggggtcaggataaccacaagttaaaataaaggaaccgactcagctacggaattaactaaagtcacaagtcacacaaaaaaagtgaaacacgcatgtgtacttgtgcgtgtagatttagcttcctatctctcatgcttttttgaggaatgaccagaaacaagctatttaggttggttatatccacattccatgtatcatgtggaactaaaactcaccactcccaccatgtatgaatgagtctttgagatttattctagattttattataaagtaaataggacatgcttaataaactccaacaatatccaactagatgtcgaagccacaacataatcaactctttagatgtccttaaatggtgtttatatatcaattttgtactaaagattgttaagttaaacattcacttagacacaagaggttggttgagtctcaaaaccacccaacgatagttcacaggttccaccggattttggcctcaaaacctgtcgacacggttccgcttcagcccatatacaaagaattcaatctcctacatgt

SEQ ID NO: 135600 - DNA, 334 bp, Zea Mays
ttcaccgaattcggagttatccagtctcacagaaggccgaatttggagcctgttaaaaacttttattctcgacgcgaatgcaaactcgaaaatcattctctatttataaatctcgttcaaaactcatttattcaagcgctcgacagttgctagtcgagcggtgtccgaacccaatttcttgatgttcaatctatatatccaaatattttatccgaatctgtactctcaagcgggatctctaatgtgtcggcttctaatgaattcttatccgacccaaactagtattatccatattctatctgattacttccctgctaaattggttcctgattta

SEQ ID NO: 135601 - DNA, 1044 bp, Zea Mays
tccaggttttgctgacacaactcatcctaattatcactgtcatctgcagaaatcgttgtatgggctgaaacaagcttcgagagcttggtattcccggttgagtgagaagcttcaaagcttgggattcgtaccttctaaagttgatgtttctctctttatttacaatgcacattccactgctatctatattttggtgtatgttgatgacattatcattacgggatcctctccgcacgccattgataatgttcttgccaagctcaaggatgattttgccattaaggatctaggtgatctccactattttcttggtattgaagttcacagaaagggcgacggtctccttctatgtcaagaaaaatatgctcgtgatctcttgaaacgggtcagcatggaatgttgcaaaccagttcatactcctgttgccacaagtgaaaagctctcgacgtctgctggtaccttgctttctcttgaagagactacaaaatatcagagtgtttttggtgcattgccatatttgacactcactcgacctgatctctcttatgcaattaataaagtttgtcagttccttcacgccccgaccgaccttcactgggcaacagttaagcgtatccttcgcaatatacaacatactattggcctcgatctcactaccagaccatctccgtccctaatgctaagtgcattctcagatgcggactgggccagttgccctgataacaggaagtctacaggcgggtatgcgctcttccttggtcctaatttgatctcctggaactctaagaaacaaagcacgatgtcacgatcaagcacagaagctgaatataaggccatggccaatgcgactgcccaagttatctggcttcagtcccttctccacgagcttggtattcggctcaccggtattcctcgcctctggtgcgataatctgggtgctacatacttgtcttccaagccaatttttaatgctcgcacgaagcacattgaagtcgacttccattttgttcgtgacagagtgctcaacaagaagctagatattcg

SEQ ID NO: 135602 - DNA, 441 bp, Zea Mays
tcggtattgttgatgtgatcagtttatcgagattgagtttgtgggatggcagcggatggtaatgaccaaactgacccaaaacaaatctaaaccagcaacctaatttgggttgttggcgaggtaaaagaatggtgaatggttcggtttatggatagggccagctttgtggatgtgatcgatttatcgagattgagtttgtgggatggtagtggatggtgatgaccaaactgacccaaaacaaatctaaacctgcaacctaattagggttgttggcgaggcaaatgaagggtgaatggggtcggttttgtggataggtcggttttgtggatgagattggtttatcgagattgggtttgtgggatggccgcagatggtaatgatcaaactaacccaaaataaatctaaaccagcaacaagaaattgatctaggacagaaactca

SEQ ID NO: 135603 - DNA, 404 bp, Zea Mays
caacaacacggtgacgagatcaaatcgggggtcgagacgaaaggcgggggcgatcagcttcagcaggcccgtcgtcgattcggaagcgatcggcagtaggtgcgcgtagatccgattgggtaacgaactccgcctgctcgtgctaaaatgcaagttccactcactcccgcccgacccgaggccattattcacacagtgccgctcaccgctctcgcttgctctgttgccttcggcttttataggccgtgtagcgttaggcctctgtctcgtctcgtcccgtccctccctgtgctgtttcgtttctggtcctacaaggttcagggcttcaggctggtcatgcagcaggtcaactttgtgtgtttctgccgctggtttaggcttgttgactattgaacattgtcaac

SEQ ID NO: 135604 - DNA, 618 bp, Zea Mays
cgcgtatttgctcattttcctccatatgagcctatgcggtgtcctgttagaagttgtttgagctctttatgcagtcgtgttgcttgattggattggaacagtagtggtatttctgtacttctgttggaaactgatcgaatgcactgtgggcgtttggctgctcagttttcttagttcacttcacctcgtcaactgatttttttccagcagttcctttcgccagattttttctgtgctcggtttaagcacttattagcttatactttatacttggtgtttttgttgctcttgttgtccgttgtttaatgatctgccatgctgaatcgggtacgggaagggcctataaaagacaagggaggagagaccggttcggctttgcttgttggaagacagagcaagaacagaggtactgttgcaccgaagtcttcatccaggccacgcaaacaaccttttcattcgcatataagtcaccaggaatcctgaatggccacctaatgcgctgtcacggcatgctgctatcaacttgttttggggagtaacattgtgcccaatccatatatgatttttatagcgcagaacaccgtccaccaaagagaagctaggaaccgatgaaggggc

SEQ ID NO: 135605 - DNA, 404 bp, Zea Mays
gtcaagctgtcctctaaatgctaaaggactacggaggacagtcaaaagcaggctgtcctctagatgctcaagactcaagacttattccatcataggaaacagggttgatgtcgcgttctgtacccggggtcatcgtcccaaattgtgggtcggggtcaccatgggtcatcgttcgtgacagaggatgatcatgcaggttagggatgggtggcacgaattggggtaagccgacgtagatgatgatagggcgatgcgtatggtggtgaggacagggatcctcctgtggccagtaagcgctttggcttcctgcgtcggctctcctcttgtaggttgcagaggtcctaggatgggcggcgacgcttttgcctcgtgaggtctatggctcctatgtgcgtctagggcag

SEQ ID NO: 135606 - DNA, 299 bp, Zea Mays
cccacaagcttatgttctagcatctttataggcgggtgaagctcacccaggggtccgtttgatccttattgttttagcttgacctaaacgcgggctcgacaccgcagggactgccatgatgtcgacccaccagaaccttgtttatccagtgtcaattgttgtgcgcatcgtgctgcccgtgtctcactcgtgctccctgtgccctcaatttgaaacatctcgtgcttaaaccagttgggtgagcgccgcggtactgggctcccgtcatgggcacagtcaggtcactctatgagctgttg

SEQ ID NO: 135607 - DNA, 466 bp, Zea Mays
gtgagaattcaggtaaactgagctctgtgcatgagttgccactgcagggccacaactgcaatgtatattgtgagcaggatatcggagttccttgcagaagaatttattgcttaaaaggccactgatgatggtaaccaaaatttgttcctggctactgctaagtatgcatttaaagtcatttaaaccctttgtggttcacccaataccaagacaagttttagaatacatcaatgtacaagaagattcatcgaagccttgagatacagaggcccaacaaatagtcagttattcatcaaaggcatccagagggctgtgtttggacttgggagaatgtgttgatttaaaaagtcgcttacccatatctttcagcactataagtacaccctcactgagatgtcataggtcacgcaaaagatgacccgcacattaaaaggtcagttatatttcagattaataatttcaaaac

SEQ ID NO: 135608 - DNA, 372 bp, Zea Mays
tccattgatttgtaattttgctagataaaactccaccaaatccagagtggtcaggctctagctaaacacgtactttgtcacctaattcagaattttttgacaggacatcaaggagcaaggtcattttgccactataatctgttttcatataagtattcttatctaaaagttcctcccgccggttgctttcatacaataaatatgaaaaagacacaaaaagtgtaatcagaaccaaatgcttagtttttcatgcaaagtattccacccattagtgctttcatataagtattctcatctaaaagttccttccaccatttgctttcctacaataaataaatcatgaaattactacaataagttctgggatgagca

SEQ ID NO: 135609 - DNA, 435 bp, Zea Mays
gagagatgcgagcaagacagatgatgatgtagatgagatcaagcagtacagagatgtaaggtgggtgaccccgccagaagccttatggaggatatacgactttgagcttagtcagaactctccacctgtgatgcagctgcagctccatcttccaaacatgcacatggtggcgtttcatgatcggcaaatggtccagcgagttgtaaaccgtccaggtgctgataggtcaatgctcacagcatattttgaggcaaataggctacacgaagaggctccgggcatcctatattgtgacttccctgagtggttcacttggcagagtggtaagggcaaagtatggcaacggaggaaacgagatacgggtggacaagtcggtagaatagtctctactcatccagccgagggggagcgctactatcttcgtgttctcctaaa

SEQ ID NO: 135610 - DNA, 501 bp, Zea Mays
ggctatataagtgggccatataggccaaccttagaatagtagggatgacttagaagcacccctctatcggtgagaagatgttctttccagcatgcacgcattataaaacatgaagaaattagaagcttaggaaaaatgcatctaattatgaacttaacaagcattattaataatgaataacaaattgggttggagtagataaatctaatttaacccaccttcttttaacaacccgggcacacgtttctccttaccactaccatgacacttacatctaaccctttttcacagatgacttcacccaccccccatcaacggaggagacactcgtttcagttttgactacctttctcacgagggttttccctccatgttgtgggaagttctctgctctgcctgttaccctacaccccctctgtatatggtgcagttgtacgaggagcatcaggtgccacgttgcagggtttggctgaccctggagtctcaccctctgcagcctgg

SEQ ID NO: 135611 - DNA, 677 bp, Zea Mays
ccgctctgccttgcgggtttgctcggcagggacctggtcggtcgctctgcctcgtggacttgcttaacgggacctgatcggtcaatctgcctcataggtttgctcgacagggaccggggtgatccctctgccttgcggacgcgcttggcgtggatctggtcaatcgccatggctcgcgggtttgctcaaaagagacctaggtggtcgtcctggctcgtggatttggttggtgggtgattttagtcagccagaaggtttataggccttatttcgggtaccccattcctaggtacccgagagcagaccctgagccttgcttgggggtttattacgcagtctaggggtggaccctgcccacgatggtcgtcacgcactgaccgtttgtccacattcgttcggctattaccgatggttaaaatatcaggtgtgtgcgagcgcatctgctagatgtagcacccgagcaatttatgtgaattgcatgggggtttattacgcaccatttggcactcaagctctaaactggttatccaagtgagatccgaccaccatttggcagggtttggtttctgcgaatggtcccactggagggctcgacccgttaggggcatctcatttagtccttcattattcaatcctgttccgaccctttggtcggcctgggtgaccaaagaggggcc

SEQ ID NO: 135612 - DNA, 365 bp, Zea Mays
caagcaacgaactgcttggaccatattcaaagacagaagataacgctctatctgcgaccttcggagggcggaaaaagaagaggctgaatagagttttcgatgctattgggtttatgtaccttgattaccgctacccgctgaaaaggcaaaagagaaaaaacgcaacttctggaaaatgtgatacttcggttgctctaagtgaggctgcgccaaagaggaaaagagtgaaggtccttactcaccgaccacgcttcatcgaaccggccttggtgcccgaatttggtgatgagacctttactgctactgaagccaaagagcctacaccttcgcagaaaattgacaagctgactgcaacgccgaaggct

SEQ ID NO: 135613 - DNA, 294 bp, Zea Mays
ccgcatcagctcctcaagttcccaagtagcctcgcgctcagactgattagtccacaagaccttaacatacttaattgatctccttctcatgatacgctccaaggactccaagatacgcatcgggcgacactccagagtcagatcctgctacacagtaatcggttccaactcaatttgatggtccggatcccgcaaaaacttcctcaacatagagacatgaaataccgggtgtacccctgccatggaatccggcaattgcaagcgataagccaagctgccaacctgggccaagat

SEQ ID NO: 135614 - DNA, 345 bp, Zea Mays
agcacctttccctcacacatcccctagagccgtgagcaagaatctcggtgtcatgtgagagcagaaggatgactacgaatgggcagaccgacgcgatgtattccagtcacgccatcgttcgggccccaacaacaggagacataggctttacgggatcaagggaatcgtatgcatggacttgttgcgcaggcagagacaacagagccacgatgaatttctcgtcggcaatgtgagccaccacggtgctgctcggtggcggggactgcgcgcttcgtatcacggtaaaagttctttcctaggtttgcattttcctcctctaggcgtaggaccattcgaatcttgaac

SEQ ID NO: 135615 - DNA, 695 bp, Zea Mays
ccatcatcgccggggaggttgccacgccgttggccacgaactcgcgtgcacccgtgccttcttctttatctccggccgccaacacggctcggccaaattgagcaccaccgcccgcgggctctataaattgaccgtacccccagctccgccatgcatccaagcgcctactgcacccaccggcatcctgaaacccccaccagagcacgtgaatttgggatttccccaaaaccgttgaagaacaccgcgaagaacacctcgccgtggtcagcccgattcaggtccaatctcaccctcggtttccttgtttcaacatcctggcttgctcttgatgctcaccgacccgttaaatcgaattagactgtcatgaatcgacgggaacgcactcatcggtccgccttgtccacggtcgccgtggctagaccaaaccttgtgaccattagtgaaattatgttgggggaaatgctcggggtagtgctaattttgtgtccgctgctcggagaaccctgccgttgccctaatcggccggtgctagtgctcgccagagcacggctgtgcgcgagcgccgtcgtggacttccaaccgtgaatagatagaaatgcaggggtctttttgtaatcggtcagcgacacacaggaacagtgaagaagctcgttttcagttagtcaaaaactcagggtctcttctgcaaagatgcc

SEQ ID NO: 135616 - DNA, 360 bp, Zea Mays
gtttggacgtgaagggggtgagggatcctctcagggatttgaaaagcgatcaaggctagtgatccatccctttaacccaaatcgccctttttctcgcccatccccccatccttttaagtagtcggtcttcatctatccaactgttgcccgtactcaaatcattcagccgggtgcccctggtactcatttcctagctctacctagttcatctaacagctgctttaaacgtggaaagtctagacagttcatcaaagattgtccttacccgaagcaaaacaactcaaacttccaaaagacttcttgaaatacttctcaaggcaggggaaatgtggcaagcaatcaggcaggcaaaggggaaaa

SEQ ID NO: 135617 - DNA, 858 bp, Zea Mays
gcgaataccagagagctcggggttatttctataaattctaggacccaaccgtaattactttatactaggataggacgacgggttatttacgtgtaagacgaggggttctttagtaaaacggtcgccgcgaaggggtatctacctactagagccgtcagatcacatctgaacgaccaggattacatcttgctacattagaatcggcgtggatcccgaaccgtccattcccgatcccccgcctcggatttaatgaggccacgacccgactctgatcatcgatttataaacggacggccacgatctacttaaccgaaaaggtatctacgtttttaatcccagccgtccgcacagatctaacggtcagaggctttcccccgtattccctaacgcggagcacggcggcgcccggagccgtaacggcggcggcatcgccggactcggccacgcgtgattccggccacaagggcttaatccaaacgtatctacacgttgcgggggcaaaactgaagtcgattagggtgttcatactcactatagtcgtgtcggtgttgctgcccacgacgcccggcggccccgccgtagatccgcgattctggtgagcaatcgccggccacgagagctttcttttcccccgagaaagtggctgacggctccccgtagacacgacgaagcgattcaggggtcgtaccggcgtttggggagatagcagaggtcaacgacggcgcacgcaggggcgggcatagcggtgacccattgctccaccggccagatgactccgcggcaaaacgacgacgctgatgattttgtggtatggtggctctctctctggtcggcaatggcggtgctcgtacctgttgg

SEQ ID NO: 135618 - DNA, 533 bp, Zea Mays
gtagttttaccctttttgtacctttacttggagacgctctcttcattgtgctttgtccttagtcttgtttgcttaagacctatactcaatgacaatgaatgaaaatattttgcacaagagagagttcttacaactagtgattcttttctaattcatggtcagcatataccaagtggatcactaattgtatatcatgaattctcctcttaacttagtgcatatcaagagatatcgattgatagtatatgcggcactaagaaacataagtgttaattgaagtcattcaatgatcaaacaaataacagatgagatcaaaagaacaacatatgcatgagataagcttaaaacaggagaattcattacatatgctactttagtaatgaaagcaacaatcctttataaagatgacattactttaacaagaaggattgattaagtagcatacttcatgagaaatttattcttatgtaagagactatatgagattatttaagataaagcgatagtctcaacaaaatcaagatatagaaaga

SEQ ID NO: 135619 - DNA, 356 bp, Zea Mays
tggtgccctcgcttgtatatgtgtaaaaggttgtaagatgttgtgtgccctcgcgtgcctgtgcctgcgagggcgctgtgtactttgtgtggcatggttggctatgctgtgctggtgtgattatggtcggtcttagcgcggatggtttgatgctgtcgcttctgcttttgttgtactagtttgactgcgtccttaggcggcttctgcgcggagtcttcgcgagagacatcggaatttttcgcacttgatgtgcttagtccggctgcacccttaggcgacttctgcgcggatagtcttcgcgatagacatcggaattttttcgcacttgttgtgctaagtccggctgcacccttagg

SEQ ID NO: 135620 - DNA, 324 bp, Zea Mays
tgcaatccaatctctccaccaagaagggaagcctagatgttgaagcagcgagagaaggtattcccatcggaccgaatcaaaggctttcgcaatgtccaatttgaggaagagcgagggtatgttcatgcgttggtagcgcctcactgcactacgcacggccataaaattatcctgaatagtccgtttcttgatgaacgcgctttggcatggtgagacgatttcatgcatatgtggcgctaatcggagagcaagagtcttgatgatgattttgacaaaggagtgaatgaggctaatcggaatgctcctcaccgagtcaaaacttaa

SEQ ID NO: 135621 - DNA, 467 bp, Zea Mays
gtaggatccaagaatcagaggtcaaagaagctttcaagagaatgaaaggtggcaaggcgatgggcacggatggtatcccaaagatgcgtgaaaatgccttggggatattgctatcgtttggctaaccaggttgttcaaccatatttttcgatcaaacaagatgtccgatgagtggaggagtacattagtatcaatcttcaagaacaagggagatattcagagttgtaccaactatcgagggattaagctcatgagccacactatgaagctatgggagagagttattgagcatcgagaggaatgacgcatatcaccatgaaccaatttggattcatgcctagaaggtcaaccatggaagcaattttcttaataaggcaggtcattgagcgatataaggagcagaaggacttgcaaatggttttatcgacttggaaaaggcctacgataaaatacctaggaatctcatg

SEQ ID NO: 135622 - DNA, 507 bp, Zea Mays
cataaatgcttttttaatacaaaaaccatcagtccaggacatctagataattttctttcaattctgctggaactctagcacaattcttagtttaactgttgcagtacatcagtcatggagcattctgaaaaaggcagcattatctcaacaaatggactaaatcagtcatggagcattctgaatattttacttatcttggcaggaaatgcataatggacagcagataaaaaattgggtaaagtgcacacacaccttacaatttcacctccattgtcgcatagagcacaaactaaatcaacattagcgtatctagacagcagataaaaaactaggtaaagtgcacacacaccttacaattttacctccattgtcgcatagagcacaaactaaatcaacattagcgtatctatcttcataagcatgctcagccatatcctctgagctaacaatcccaaatttttgtttgatctttccacttctatgaaacctgttaaggcaatagaatca

SEQ ID NO: 135623 - DNA, 815 bp, Zea Mays
gtcatatgatttgcctcaacaggccctttaggtgtaattactatcattggttttctcatatttagcagtggtatctcatttgtgttggcatatcgagcagacataaatgaatgtgtagaactagaatcaaataatatggttgcaggaattgcattaatgtaaaacataccaagcacgatgtcagcaccatcaggagtagcatcaacgctgacttgattaaccctgacaatcgaatatccctttccaggagtctgttgcttgttctgagctggtgtaccagaattccccaccagacaagcattagcatagtgcccaatctgactacacttgaagcatgtagggctagtcttctgtcctgtaggtcttgctggagtgccagtgggggcagcctgacgagcgggaggtgtccgtggagacccctgtggagcatactgaactaggcgtggtcctcctcctggacgagctggggtaacctgaggtaggcggcttgtgactcatgaattcctggtgcttgtcccggggtggaaatggaggtggtggtggcagtggtatttgctgctgttgttattgctgttgctgttgcgccctccttttctagcgtatctcctctctttcctaacgcagctcctggcgtatctcttctctttcctggcgcatctcttgacgttcctgctgcatctgcgcacgcatatccgccatgatgtcagctatttgttgtatcatcctcatctgagctgcaaccattgggtcaacttcgactagtggaggcggcggtggaggatccatcgctgctggttatggttggggttgtctat

SEQ ID NO: 135624 - DNA, 405 bp, Zea Mays
cgtgtgttgacggtggagtgtcctgtccgtcgccgtggtgttgtgcacgcgcaagcttgggcggagggtggaagaaagccaacaaaccgttgatcaaccgttgtagggctaagattagatctagagggacttggctctcgaccgtcgatcgtgtagggaatggcctagatcgatcttgggcgtaccccttcgggtcattaaatcgggaccgccgatcttggactcatcggcgtagatttaacgctggctccaccaggaatgaatctaatccgggccgttcagggaggatccaacggcccaggacgtgtgataccccttcggctgcgcgatttacacttgaaccccctctgtttgtacgaattagaacccgccgtccactgcgcattagtcctgtgtctgtgtggc

SEQ ID NO: 135625 - DNA, 545 bp, Zea Mays
catacccagcttatttgtatagtggtgtcaccgattcaacccgggttaccaacaagaggattcctgctgtggatttggtgagtcgactggaaatgatccttagagcaaagtatcaaacattggtgctcttgttgcatattctgcttggaatctgccaccttccaagtcctttttcgattttgtgtcaaatcctcctgctagtgacagtggtttgggtcttagagtgcgaccctctcttgaagaagttgaggttttggttgcttcgcttggagatcttcccaatgatgagaggcaagttcactttgagatgcctatgagtccgggtgatgcagagataagtgctatgctggacatgttggctggggattcttctgactcggtccctgctgaaacaatggctgttgcaactctcccagagcctgagaaaaccatggatactcaaaggcctgagggtactcgcccgaaacgtctttgccaagtcagtcatccagctgctcctgccgagaggaagaaaaagaaaaagagacggcttcggtgattgtcgt

SEQ ID NO: 135626 - DNA, 678 bp, Zea Mays
catccacaccaacaacacaagcagcacccccattgggatcagcaacaggtggagcacccccattgggatcagtagcagtttgggtacacccattggggtcagcgtcagtaagtccagtcgcaggcacttcttcagcagcaggaactgaggtaccagcatcctcatcaaaactagatactcgccggaggcgtcttcttttcttcttttgctcatcagcagaaggctcaggctgattggttcggctagggcgcctcgggcgagtactgacaggtttctgaacagccaaagttgtatcaacctctgggaggggcaccactgccaatgaaccagcaggagcagcgtcggaagaatcctcagctagcagatcaagcatggcatttatatctgcatcactagggttcaggggcacctcaaaatggacttgccgttcgtcatcaggaatctccccaagcgaagcaaccaaagcactgacttcttcagcagagggtcgcactctaaggcccaaattgccattagttacaggtggatttgacacgaaaagggtgaaggctttgggaggaggcaagttccaggccgagtatggcactggagcaccaacattggacaccttgcccctgagaatcatttcaagtcggctcaccaagtctgcagaagggattctcctgttggtaacccgag

SEQ ID NO: 135627 - DNA, 809 bp, Zea Mays
ctttagagagtagtctgcctttccaaccggccagtctgttgttgattttttccagtagcggttgcaaggagatctttttaatcttcctaaagtggaggggaagaccaatatactttccaggtaagttagcatatttacccgggaacacttcggcaagatttgaccaaagcgactgaggataacgaactggaaagatttctgttttatcaaaatttatctttagctctgaacaaccttcaaagacttccagaatcgttttgagaactttgaggtccgacttgtctgctcttacaaacaccccagcatcatctgcatatagggaacaacgaagctttgcccctttaggcaggacgcttcccaatagcccagcctgagccgccttatcgatcatacgctggagagggtccattgctaaaatgaaaagaaatggagaaagggggtccccttgtcgtacaccacgcctgtgtttaattctatttgtcggctctccatttattattattttggaggaagatgagcccagaattagagcgatccagtctcgcctcctttgggagaaaccaagggcctttaacacatcaaggagataagcccaatttatggagtcgaaggctttggagatgtcaagcttgatgaaaagcgcaggctgacccctcttgtgcatcttcataatcaccctttgaacgtataagaagttatcatgaattgatcgcttttggatgaaggcattttgggcaacagatacaatttcattcatgcgcggtgccagtctgtttgccaaaattttggtgacgatctttataaagctg

SEQ ID NO: 135628 - DNA, 444 bp, Zea Mays
accggtgctcccatgcggttgacaccgaattgaacccttaataaccatttcccctcgattaattgcacggtctgagctttaaatcaccctgtccacggagataacacgaaccaaggatgaacacgggtgttcccgacgatctagcgcggtttagcttaattgaatgggtcgaggagcatcaggagaatctaaggacactgaaacggaagagcagagagcatgaacagacctagatcgagctagccatggcgagatcactatgcgcgggtggattggatgcttgaatacctaacggagccgagggtgcactcaatttatagggcccttgagcggtggcctgtgaatttgagctcgcgcggtggcggtcggagagaaggaggtgcactggtgcaagcgattggtggcatttaccgtggcaagctctccggcgatcaccggatgggc

SEQ ID NO: 135629 - DNA, 298 bp, Zea Mays
tgggccatgaggagccaggggttaaaaccaaatgcaagattcttttgcaatattcatgaactgccatacgagacaaaggacactggcaaagaacaatatcacaataattttggttgctacagcttcgtgcctcgctctggtgtgagctatccagttccaacgtttttgaagaggtggccaggggcctagatgcaagagtggtattatgtgaaaaacgacctggtcgaaagagaagacattaagggtaccattcaacaccctatctggtctcgcttcggcatcaggagaccgtcttctg

SEQ ID NO: 135630 - DNA, 302 bp, Zea Mays
gcagtcgtaaacggtttatttacgcatcgttatgcagtcgttaaccgtcgccaatatcacagatacgaacgtggacgagcggctgtaaatgagaatttgtttcctcccgtaactgtgcctttatttacgcgaacgtggagcacgtctttccttatctcaaaccgatggatatttaaatgttgcatgatttacgctatcatgttacacagcgttatgcagtcgtaaacggtgtacacatggtaatattcgttcccgtgattcgtggcccaaagattccttctatgcatgatttatgcacattt

SEQ ID NO: 135631 - DNA, 630 bp, Zea Mays
taaaaatgcgtcgcgaaggggtattcttggatcttagccgttggattccggttctgtggcccagattagatccgagccccggtaggcaccagagccacaggatcagcgatctacggccctaattccgctgggtgaagggatacactggatcagatcgggaccgtaagccagcgatcctacggctacagacgtcgcgcggcaaaaaccaatctaggccgtccaagacccatcagacggtccgcacccttcttctctcccacgcgaacagccgagcacccaagaacacgcgcacggcggcgaagcgtcgatgtgctccctccggctaccccacaatcccacttctctgtataaatccgaacgcgacaagtgttacacaacgtgggaggtacgacggacacgatggaggggcactcacctcgtttcacggcgacaacaggtctggccacgacgccttgcggtccacggcggagctgcacgaccaccgagcaattccgagcaccacagcgggtcaatcttcaattaacctcacacacaactccgctaaggtacgaaccaccaccgtatagctcaattgaagcccgactctcgccgctgacgggaatccgcagaggtgtcctctctacctccccg

SEQ ID NO: 135632 - DNA, 562 bp, Zea Mays
gcttgttggagagcgtcgtcctgatacggacgtgcttggaggagtcggttgcatcgatctgcacttcccttgtgtccctggagaactggaaggtgtcggagctggcctttggggcgtcagggatgccttgttgggtggcaccacgtcgtagcttggctaattcccttgtggcggctagcgccgacgcaagtttgcagctggcttgctcacatgcttaggctacgtcaaaagaggcagtgaccgtaataaccccgtgggggtctgggcatatttaacttgagataggtgtaattaggaatcgccatgaacttgatgtaacatggcctcccaaatatggtgttatagaccctagggatgtccaccacctcgaagcgcaacagctaggtgcagatgttggaggggctatcaaacttgaccagcaacgtgattcgctcgagcgggtgagcccttcggcctgacgtggtgttgtggaccagctccatgcttgggtatagtgcgtagctctagatccgcatgcagtcaagagtcttgatgtacatgacgttgaggccgcttcctccat

SEQ ID NO: 135633 - DNA, 330 bp, Zea Mays
catcggtaaggagctagagcattgtttgtggccactagaagttggcgatcattaagtttttgttgccttttgctttcttgtgcctcgtggcctccgaatatgacattgacctccctatcaatgtgtggaaaagctctgcctctacccccttcctgttgctgaggctgcctaggctcattacgctctcctcgaggtgggggaggcggtagcggctggaatggttagccatgcccgacggagtttttgaaatccctacagttctgcagggtgtgctgcatgtccttgtggtacgagaactgggagtcgaggatctcatctagtgtccttacc

SEQ ID NO: 135634 - DNA, 440 bp, Zea Mays
aatcggaggcgagggttggtgctctggctttgtaacaacctagcggagctagctgtacactcaatttatagtatccgtgagaggtggctctgaatttggaagagggaagctggcggttgaagagagggggtgagtcaccggcgcgaactactatggcattcaccgggcaatgtctcaggcgatggacaggctacctacgacgatctactgcgacgtggtaactcttctaagtacatggcacggcaacaaagagcggcaaactccggcgaggacacctcaatcaatcgcacggcaagtggcacggtgaacagtccggtgatgaggctccaactcttccctgcattgagatctttcaccgccagccgttatccgcacaccagggcgcatgaatcgcgatgaccagcataaatcgtggagtaagttcaccggcggcgagatac

SEQ ID NO: 135635 - DNA, 1248 bp, Zea Mays
ttggaacatcacaattagtctcagggataataaactaaaataaaatcaccaaaggtctgtaaacaaaccttcccagatgcacaaagttgataaaagcagtggtaattcctttcggattcagaaatttgcacaacacgagaccgttccaagaggtaagttcgaactgcagccccagatattctaccagatttgttaaactgaatttcaacaaatttcccaaatcgactgcagtgatatgaactagtaagtatacatatgtgtatatagaagaaagcagtacacctactagtaatatactatcacacctatgagcatactgatataagtgtctagcttcatttctttttataatgaggattacacctaaaacattagcacctttcaaaaattaataagtatggcaccctcactattcaaagactatcaaatgaaagatgtatatagttgtacggtaaaagaatcaaacagccattcttttttatgaaaaaatagtaaaacaagttgattgactacaagaaaattaatgaaagaattaaagttcacctggagttatcatttctcactgtccgtgcattaccaaaagcttccaacagtggatttgactgcattgaaatgtgagaaggatagatgcagagttgagaaaacataaagccttctacagggcatgttaatcatgcaccaaaagaattgatgagaaaactgaatgttacctctagaacttgttgctccacagagcggatatcaccaattgcacgcccgccaacaaaagtaagatatcgcataatgagtttggtggtctctgtttttccagcaccactttctccactgactaatatggactggctgcagttctcgctaaccattgctcttcaagaaagagaaatataccatgtaaaactccatattctaatttctcgctaacacactgcaagctggtttccatgttccgtacctgtaagatgcatcagcaatggcaaaaacatgtggactcaattcaccaaactgcacacctctgtactgttccatcatatgcatatcatacatatgagggagctttgcaaaaggatttacagcgatcaagatgcgccctgtgtatgtctgaagaaaaaacagaaccgttggaataatgtatggcacatagaacaacaacattagcagcatgttcccacaaaacacaacatatggctaagcacatatcgacaaaataatcccatcttccacatatattggacccatacatgatcttac

SEQ ID NO: 135636 - DNA, 1377 bp, Zea Mays
caacataattccagtcacattggagttaatcatccatggataaaatcgaaggatcttgcaaatagtaggggaaaatatattgacaaattagaaggcaaaaaaggagggtggacacacagatccaatcatagtagcatttttgtcattgtattcttttttgaggtagcaataaacatatcacacactggtgaatcaagtgatgtgatttgtatgtcgaacacctgaactttaaacctaatagaaattacttgttgatatctgtgtgcatgaagtcctaacatagctacatgtgttgactgttgaccgttatacaacaaactgcataatgtttgttgactaattgcaagtcaaatgaattaaaagggaaaaacaggcaaacactgagattttttatatgaaagcagcgtcaaagagccaacctgctaagagctccaaatgtcctgtcccagaagcacgatatgcaaccaaatcaccaaggagtcttgcaacagaataaacctcatcttcttccaatacagttctaaattagtaaatataattatcagctcaaataactaaactaatattggagttccaaggtgtaaaatcattggactgccacctacagatattttgcacgtcctaggcagcacaaagcttctcggattccatggtcgaacacttccctgtaatgagctttccatgccatatcatgtgttgcataaaatgatcgccacctcaatatatcagaacccgtgaagcattggacaatgatcacaacccatgaaaggataagaaataaagcaataagtgctcgtactgacacccgatcagctttatcctgtcctagattataaaccatccaaacgacttattcaatcccaagtagatgagtggattagcacagcagaaaataaaaccttaggatagtataatgaaatgtgtatactcttaagagttgttactagattgtgttaattaactatgtttcagtgcatttattgaagcaaaatctgctcaaagtgagagtagttagcatgtttgtggtacattcactaaaaaaatttcatatggaacttcaagaaaagggtgctcgaaagtttttcccactttatgtgtgtcgttgtatatgtatgaagttcatgtgattgtaaactaccagcaaacaagaacttgtaaaaaattatgtacaaagttaggaaataaatagctcagaatggcgaccaacataccaaagaagcaggaagtggatcttctttcatttgagagatctcttacaatgacaaacatgagataaattgctgcaaccaactgcaatgcaccaactgccataccaaatctggtccaccacaaccagcgtttgtacctcaccttttcagcaagatgaaagaagcgatg

SEQ ID NO: 135637 - DNA, 290 bp, Zea Mays
caagtttggggcaccaaggtcgatcttcaaaagcatagcagaagccgaagctactaggctggaggacattgatgtactcaaagaagaacggctgaatgcagtaattcaatcagcacgataccagcagactctgagacgctatcacgacaaggccgtacgacaacgatccttttcagtgggagatctcgtcctccgccgaattctaacgggggagggacggcacaagttgtcaccctcatgggaaggaccattcatagtagcagaagtcactcggctgggatcatatcgtc

SEQ ID NO: 135638 - DNA, 407 bp, Zea Mays
gataaacatcaaggtaagatatagaggttataagggtaaaggtgataatgatgaaaagcataaccatggacagagttaaggcaagactgacaaagtggagaacaatcaagggtaagataggtaaggttccaacaaaatggttgaagtaatagaaattattaccgagggaaattacaaggaattaacgagatcaccaaggatatgaaaggtaaaaatgaccgctcatggatcattaagagacaagggtgatcaagatcatgtaagttgaaatgtcttaaacaaatattggggtataaagataagcatacataaaaaaaatacgagagtatgcaagactctaaggacacgagtataccaaaaaccaatggaatagaaattgttgaaagataatgacctaacaacggaac

SEQ ID NO: 135639 - DNA, 440 bp, Zea Mays
atgaaactgaccacataccccgacggtggagtccggtcagcctcgctcgcgggagccatccactccggctgcggctcaccggagaggggacggagcagaccatcagcaatgagggtctccagatcctccatagcgacggtggagaaaggccacgggtcgcgcggcggaatgacggtcaccttgtcagccatcgccgaatggaggtggtggaggcggaagggatgaggtgcatggtttccgtttctctagctactctcttaggttgcggaaaccaaagcaggggcaagcgcaaatggtagggtaaagaaccaccaccggtccctcttccgagtatataaaggcccgggcgaggtccacccaaagcttcgcccgaacccatcgcgaaattcaaactcgaaggtgaaacggtctttctgttcctcgaacggctcgcgcacgcg

SEQ ID NO: 135640 - DNA, 396 bp, Zea Mays
ctttcgtgcccttctcggtgctcaccatggccggccttggtcgagcccgttgcggcggcaaggccccgtggccaagctccccggtgcgcaccgtcagtcgatccgcccagtcgtgtgtgcaacagcagcctcaccgccaccgcgcatcatgcgcaggtcgtcgaatccagtcccgaaaccggtcgtcgtgcttgtgcaaccgcgtgtgaattgggtgctgtcgaagtttagacgacgttcgtctacccctaaacgactcccgtctaccccccgtctacctcgtctattcccctgcgctaattaatttcctattcgattgtcgatcagtaaactgagtactcaattggattaaaattatgattttagttaggcgattgtaaatatgtgataatgtga

SEQ ID NO: 135641 - DNA, 586 bp, Zea Mays
tgttcagtctctcgtcctccttcagctaacgaggtggtgctatgtgggagcgttgagctgtgtgtggcttcctgtcgagttaggattgggtggtttctcaaggccaatccgcggtaacgacccattgttaggtggggaagaggaatagacctatgcgcgtcatacgtgacacacgatgcacgaaactggtgctttaatatagtagagatagagatgtaatgaattggccttttatttgtacctttatttaacaccatacatcaaggatcaactttgatcccttaccttcttgcctggtgatagataaagtcacaagggacatatgtagtgccagttgatgaaagtcaggcaggagtaaataggaaattagagttgtgatgggaggctctagagtccaaaggttttggactcagtaaaactaaactaaataatgagatttgatttcggcactaccacacatggggaaaagatgttagtttggaaggccaagtagtgcctagcaaggacaactagggctcggtgcagctgcgagccaagctaggctcggctcggtcatattgcgagcctgaccgagaggctcggctcg

SEQ ID NO: 135642 - DNA, 451 bp, Zea Mays
tccacacaccttatggagggagagtagtagggattctgtgttccaaggtgacaaacacagatagagctgctctacaatctaaatctgaaaaggaacaataacaattctgatcagtatgacagcaagctgaaaaaatggtacagtaaatgagtatgacgttgagcaatgctaaggaaagcaaagatcaatatgattctgtgttccaaggtgacaaacaccagaaaagaattcagctccaaaacacatgcatcagagaatcagagatctcaaggtataattcaaagaatcagagatcacactggatacttagtttctatctatataaaatagttgaattatcataaccaactcattgtgccagtgttagttcagttagtggctattttttccgggtagagtattaggcatccacacacatgcatctatttgtaattatagtgctcaatccccc

SEQ ID NO: 135643 - DNA, 849 bp, Zea Mays
cgttaaatgatttggtccgcccacctagtacattcaccatattttggttaaaataatttaacaccgcaacgacaaatgagtagggttacaacgagattgttcaacattacgtttgtttgggttgaaccaatcaatgtatgtttctcgctactgctagactgagatgagcatgtgcatcaccaccttgaagcaagaagacttggcgccacctagtgcctcgttacaccattcctaagcaagcttgcttctctttccagaaccgaagcaaccgaaaaggaaaccccagttccttcaagccgctgccacagcatttgccccattctgcagtaaacagcatcacaaaatccgcctgcaatgcaaagggtgccaatatataagagggtgcatgctcagaggtggagatggaatcatgcaaacatagatcaagaaaccacgcaatggggagcagcaagagagtgcccccgtaccttctgctggtgctgctggccgtcggagccgccgcggtgagcgtcggcatcctgcacaagatgagggagcgccgcgtccttgctgtcctcctccaggaacgcgaccagcagctcatctccttccaagtcctcctcgaggtaccgggtatgcatgactcgttttcatgcatccgccgcgttcgagaatttttttttttgcatgaaccacaattgtgcttctaataggtagagctgttgcttgactgaatacatgtttctctgtgcctgcactttttggccgactctgtcagtagataatggataccctgcttttgtcacccagagtcctggactattaactactccatccgttttttgctagatacataggctttgcgacgta

SEQ ID NO: 135644 - DNA, 635 bp, Zea Mays
gctggttgtattgatgaggttggtaggtgtgagggacaactctttgcttgttagctggcatggccctggccattccatcctttgttgctttagtctctgggtagtccctggtcgggtgtgctgagtcttcgccgtggaaaacacaatagaatcttctctgttgttgaagtccccagcccctgtctctgcccctggtcgcgttgccaccgcgaccttgttgcaggggtaatcttggcgacgaggggggttatcttctagttgctgctgatttgcaatattgtgtacctaggaatggccatggtcttgccgggctgaatctggttgcgaaggcctgatccatgttctgctagattgcggagtctccttatgttttcatggagacttgactttcctctggtggatctcttctgaacgggcatacttttaaaatagctggtacaactcctacaggtttttgggtggatcccttatgtagtggctgtatagaacacctgtccaaagtccgctgattgcatagtggatggctatatggtcatcgaccgaaggcaactgtgattttagtaagagaaactttttgtagtattcccaaagagtttctttctcttgctgcctacagagcaagagttctgccaggg

SEQ ID NO: 135645 - DNA, 462 bp, Zea Mays
tctcatcaagtatttagaagaatgggccagttttgaatgtttactaattttctcatgataattgtgacactaagacctattgattataccattttcaacatcattgttttcactgagttctttttttgaatgcaattgtttttactgggtttgagttgatgacttgagcacgaatcacatgtttatttttcttgttggatacttatttttactcatcgcataatttattttgtttttccatgctctgtacttctattttttctagcaacatgtacttatcagatagtgcgtactgcttgaaatggagggtgggttgtctagctatcagcgtctagatgtcttcgatagaagattctgaagcatcatcctgtacccttcgtctttagtaaagcaacatcacttgtgggggcatattcagctgtaaagattggtcctgatagcagttctagaattgtaagttac

SEQ ID NO: 135646 - DNA, 682 bp, Zea Mays
tgcgacattatctaaaatactgctgtagtatattagatacaagtcaggaggtccggtctcacaccaccggttcctggcttaactcaccaaacacacacacacacacacacacatcaccaaataagtcccttggatcgtccttgaccgtggacacgactatacatatagatttacactttgcagaggttgtacaactgtacccatacgaagcggaggcatggccgagcctcgacacaacaccatccagtaaatcccccgctcacggcaccaaacctacttttctgagccaagatctgtgggaagtactccctcccacacaacagaactgtgaactcccccatccagggccctcgggaggagtctatcggatgcggacagggcgcaccatcagcgtcgttcctaacacttatcgccttatgccacagttcgtggtgtcgcttacgggagaccaccttccgaactggtacccacaaggcgtatggtatgcccagaaattcccaaagcgatgttaacccgtctcggtccttacatggcaagggcttgcctcctctagagtcggttgccaccctcaacggtgggccgctcactccatccgtctctctcgttccacaatcactcacagggtcacaggggatgtcttagtcatcccctaaatcttttacacgcacacatgcttgcccct

SEQ ID NO: 135647 - DNA, 332 bp, Zea Mays
tgcagctgctcgcccacgaacactccacccgaacgccgcaagaaaccagccgtcccttccccgtgaccgagaaaaccattccgtgtggtccgtccgccgtcggaaccgtgtctccaccttcaccttcgtttggaggaaggtgtgggatcgtggttgttcggcactccatgtggagtgcgtgtgcgaagaatcaagaccggacgttgagactggcgtccggaattcctcgccgcgattaatctccgccgtggctccgccatctctccgcgaccagcgttctgcgcgtcaaatcctcctagtatgatggctctatcaagttcgcagtgatcccc

SEQ ID NO: 135648 - DNA, 580 bp, Zea Mays
gcctaggagaagtaaacgtgtgtaacggcccaagaacttgttgtcgggagctgagtggaaattgtaaacctggcctaatgggggcagtacacaaaccccgtcgtgggcaaggggaagaaaaaaactggacgatgaacatgaaaggaaaccagcggcgattcggtaatcgtgagtcgagataaaaatatcccgtgatctcgctcgtgtgtgtcaaagggaggccaaagacaaaattgcagagcgggtcctatttgtcactatctactagaatatttttaaggatcaacggtgcagttggagacatgtagttggaagaagaaaagttaggtcgatagaagtacaggagcaccaatgttgaaagtagggagccgccgaaacaaataggacttgtcaatcggttttttcagttcggttttttcggtatcgcaaaactttggtttctagaatatggcaaccggtcggttgcgaaaatgtgtaaaacccgagtaattcggttttcataaatttcggttcggttatcggttttcagaaatctgagcagcacactactacctctcgccaggcgcccagcgaacacagc

SEQ ID NO: 135649 - DNA, 589 bp, Zea Mays
cgctgacacgtcggccgctcgggtcagtgatcaatgtgccacgctcaggttcctacgaccgcagacaagtggacccctcagaacaggagcttctcctcccttcggatcgaaacaaactcgcagtcgtacccaccgcgaggttgttgcggccagctgtgaattacctggccgagattccctcttccgtgggccatataaaccgatttctacccccccctccctgtatcctcatccattggcactaccagcagggaacctcgcgctaccggtggtcgccgagcggaacagaggaaggagaggcaaactaacgtcgacgttgttccgagcatgcggcggcgattggtggcaggggaagggttgtgggcgttcatcaagatgtttggatcgtgtacacgaagtatcgggctcgaggggatgatccaagcgctgggaatttctggtcggagttcttcctccgttgtgcacccgctctccaccgcggaccagcctcaccgcaacctcacaattggtaagaagcctctcatagtgttcgcagacacatactttttttctttttcaccgaaccaaagtttagtgcgacgggaatggc

SEQ ID NO: 135650 - DNA, 619 bp, Zea Mays
ggaagatggacgtgcactagggtgggctttatagccgtggcatgggtgtgggcacggggcggccgagggcgcgtgggggttcgcgtgcggcatgctctggacgcgcccccgagtgtcagccccacgtcgaacacgtgggggtttacttctgccagggttcaacggccgatttggttgacttagcgtgctgatcttagcaaaacccccgtgtacagtctcttctctgcaccaaatcctaccttttttatgttagttccaagcaaagatatggtcagggtagagagatatgggggtgagaagtcggctctgtccgagctgtccacaccgagacaaaagccatgccaagtcgtgtcaaatggcttagggttgggttcaaacttttccagggtgttctaggggtctttgggcgccattttgtcaattgggccataaggttttgaggttgggaacaaggtgaacatgtttgatctttgaaagagggtcggttttgaacttgagaaaaacctgatttttcttttatgttcttctctttggtgacctttttggggtttttctgaatcctttttggggtcactctctgtctattttttgtagggtattaagtgtactacaactttaa

SEQ ID NO: 135651 - DNA, 619 bp, Zea Mays
gaccaagatctcattagtaatcttcttagcattacacctctacatgtcatcatgatatgcaacaagagcaagctactcacttttccatctaaaaactcacaaagctcgaagctacacaggcaaaggcaagcttcggagttttagcaaatggaatggctagcaaaagcaaatgaatgtcgtgattggtgaacatgacccccaacttattttatacacaataagtgcaggagaaaaattttaaaacccgacctttcactgcaaatgggtaccccttggcactttcttatgaaggcatgttttcagtaattcattttttcgctaacaagcttaggaaaggtgtttttcagaccttcggctcgaggccttcgtttattttgcggtctaagctcgttatgaaaaatgaattgataccacgaggggcaattgttgggggtcttcttcctctgaatgtccccaaaacactaacttaacaaatattttctagtctgtttcaagtgttacaagtagaataccaaaggtcatcttcggctagagctgctatggacacaagacaaagctatgaggagtcctcaagacttgctcaacaaaacagcaagagaaaaggacaacactaccctta

SEQ ID NO: 135652 - DNA, 642 bp, Zea Mays
gtggggtcgtgggccatcagcgggtcatgggtaacctgggcgcggtgtcgcaggaaccggtgatcaatcccgttgtccctaattcctcatcggtgtcgggggtctgccgttgtgccgcatggagtcgtgggcagcgcctagggatggcaatttgatccgtggatttggatatccgtcggatatccgacccgacggagccagatatggatacatgttttgacccgtgggtcagacccgaatccgacccaaagtcgggtgggcacagattaggatattacattctacccgcgagttatccgttgcatatccgaaatcgacctatagtgtatttttttagcctagcccttactacatagtaaagaacaaactctaacaccttgaaccccacgcctaacgctcctaatttccagtgttggccgccccttatagccttgctggcttcctgcgttgtgtcccatagccccttccaagtctcatagaccgtagcaccgctgacggctggctgttgcaagctctagtgcccataaccgaggcccacaggcccataataattcttctattaagttctaattgtgtatgatggtgaactgggaagaaatttgactaattatgctattgaattgttgaataaatgattttatc

SEQ ID NO: 135653 - DNA, 280 bp, Zea Mays
ccaaattgagtgagaggacagtccaaacataggttaaggttgtaaggcacattgggctagtcgatgaagacgtcattaggctaaatattccatggtctttattttattttcagaaaagatgtggcaaattgatgtgtggtgttttacttgagtggacataaacacaatctaggtatgccttgaatagaagggattataggaaacctggtatcacaaaaagttattagctagcccaataacgtcttcatcctctagttgtactctaataccctctcgtgcg

SEQ ID NO: 135654 - DNA, 316 bp, Zea Mays
gggtttgtaaccgtgatcctcggatcttagatcaacggccagcacaccccacaacacccaaccatcggtttcgagatctgcggctacaattcactagaacgaaagggtatgggtggttctaatctccaccgctcgctggcaatccgacggcgcgcgtacactcttccacctccgacgaccaggggaggtggagcagaggcccgcgggggctctccaccagcgcgcggcgattccggctaacccgacctccatctccaaattccttcgttcctcgcccaatcgacgatgttacaaactcaccctccctaccaatttc

SEQ ID NO: 135655 - DNA, 292 bp, Zea Mays
ggttatgaattgcgggagggtctgaatattttcatctaattcggcacttaactgccaatccatgaaggcatagagcaagacacttgtgcagatgtaaatttctataaatgtgttttgtccatgttatattgtagttcttcatgctaaataaatccaccagacgaatctatggtcttatggatgggataaagtgtcaaagtttactatgtagacttctgactgtgtactattaaaatggacaaaagatggcataatatatttaagatgttcattggcaatttttctatccatc

SEQ ID NO: 135656 - DNA, 686 bp, Zea Mays
ggggtttccaaactagctcttattatacgtattttgctatctataccattatgtaatccatcagtttaaacgactttgcaaaactcacccatcaaatcactcccacactcataacctatactaaatccaccaaacaaatgacatctaaactttttttgatgttatgacacatagacttaacacattatcagaaccaacagttcgaatagttggataaccgcctctcttactcactcaaatccaataaacattattactatacttagattatctctcatctctctcctcgccgccccaagcctcccccactcacttcgcgtccttgcttccccctccacctcactcgcgccgccataatcgacctctctctagaatcataatattagcaatggtctatatgttaatatatcaattaataagctagtgaatttgcatggttgtcgtcccctacatcatcggcccgtacgcagggagaagcctatatgcatagtcgtgagccgtgagtcgtcgtgagacatgcatgcatgcctcgtacacggtggccaaaaacaaagtcaacttcttgtgtgtcattgatttgaggtatgtatagtacaccagctaaaaaatgtcgcgatctatcggtttttaatttccagtctccggccgggccggtagcaatgcaattaggtggtagaaatttagtc

SEQ ID NO: 135657 - DNA, 359 bp, Zea Mays
ggctcatcgagtcgtcctcatagtcggtctctctggtatcgggaagtcatgcctcgcacgacagattgcttctgatccgccacttagtttcgtggatggtgcagttgagattggttttgggaggtggtgcagcagggcagcatgtaatgggagcagaagcgaataccataagcgccttgctaggaagatctgcacgttccttgtgcagatcggctccatgactctcaaggaggagactagaatagatcttgatgatgtctgttgcttgctccagacgacattggtcggaagaagcatgctgatcctacttgatgatgtttgggagcaagacattgttgatcgcttcacaagactttatg

SEQ ID NO: 135658 - DNA, 596 bp, Zea Mays
cacaacaagtgcgaaaaatcgaagtcttttccaaaagactctctgtgcaaaagtcgcctaagggtgcagctggactagcacaacaagtgcgaaaaatcgaagtcttttccaaaagactcttcatgcaaaagtcgcccaagggtgcagccggactagcacaacaagtgcaaaaaatcgaagtcttttccaaaagactctccatgcaaaagtcgcctacgggtgcagccggaatactagtacgaaaaatcgaagtctttttctaaagaactccgcacagaagcctacgggaacagcctaatcaacgaaagcgcgcagcttcatcacacataattatggttacacacatacagcgagggcatcacacattacatcggctcaaccttcgggatgatacccatctccctatagttgaacaacattatcctcaattcctcactcgcaaacagacttcgcagctccccctcacccacactcgccccagccgacaaggacaacaattcccatttgccagtcccatccgcacgaagacgaccaccctccatctcaccatgatgacgcctttcaccacgcgacaactcacccactctccgtttcgc

SEQ ID NO: 135659 - DNA, 747 bp, Zea Mays
catccttggcttgcttcagggcttcaacagcaatgacttcacgactttccaaggcagttgcacgggcttgagctgtggtgagatccacatggagttgacggttgagcttctctgcatcttttgcttgggaaatcatctgacggtggtgccgagctaagaaatcatactgtgcatccagggtgagcaggtatgcagtgaggtacacaactgtggggtcgtccttaagcagttgttgcccttccaatgcacacatcctggccatccaaactggacggtctctctgaaagggcgaaaagaatctgagcggggtgttggccacttcttcttcatagatttgacacagggccctcaatgccttgcgagcgacatggcaggtgtctttgaatatgtgccccgcagaagtgacactccattccgcatggtgcagactggatccaatgtatacagtcacgacacacttctccgtgccatgctcaacgaattcatgaccatcatactctggctggcccctgattctgaggtgaactgtgcatgctctcaacaacttggggaaatcgtcttcattctggcaaaagctggtttggcagtggacctccatctgacttctaagagaaggaaaggggaaaacatttttgaaatgaagggatgagagcaagaatttttttcagaaaatagttttgactcaaaaacttttggatcaaggctaagggttacatcctgcggccaacctaacagctctgataccac

SEQ ID NO: 135660 - DNA, 531 bp, Zea Mays
cttcataaacattattttagggtgaagttgttcagatgatcttttgcatagaagtgattaccttagattggacactcaataagctctcaaggagttgctacttagaacctctgtgttgctactccctttatttcttactatgttgtgtctcggtccgactatgtctagtttttcatgtgctacaagcctacaatgtcgtgtcctagaacgttcacgatctatgtgactcggggaaatgaaccattatccgagacttgctcataaacacctctccctccattgtctgcattcaggagttcaaactcgacattctcgtcttcctcaaatcccacacctttctcatgtctgaatttagagagttcacccgtgtcgatgattagtggcctcattagtgtaaacaagagtaattcatcatttgatcctattggtcttgttaaagtcacgtgagagtatgagcttattactcttggtgatccacatcacctaaataattcagtgttgatcaaagtgtggtaataacctagagcgttt

SEQ ID NO: 135661 - DNA, 308 bp, Zea Mays
ggagaagcaagaggtcagattgcttggtgtgggagtgttggagggggatagaggtggtgcatgcatgtgaggtaggtgtcgtagaattgattaaggggttggaaagcatggcagtagaggtttgggtccctctagaggagggagggagctcagcacccgctcttgaagaggaaacagggagggcagtgggacccgaggaagcggggagagtaggtggcagggggaatagggggaaaatcggaatgtagtccccctgttgattgaactactactctatgggctagatgtggacggggaaacctgaacca

SEQ ID NO: 135662 - DNA, 296 bp, Zea Mays
aggaagtccttcttgattttgttttaaagcttactcagtttatgttaagatcatccttcttatatttggattcaaagggcaggggaggggctggggcatggttacgtatcgattcccttaggtagacaatcggggtagttcgaacgtagaaattcctcagtctcccaggtagcttcttcctctgaatggttgctccattggatcttatatgttttgattgtcttctcatgagttgatctttccttgcaatccagaaccttggaagggtactcttgatatgagagatctggctatat

SEQ ID NO: 135663 - DNA, 282 bp, Zea Mays
ctggcgatggcaccggcagcggcctctggatcctgctgcttctcctctgctagctcacggtcttccccatggcgcttggctgctcggccctgccacctcccatggcgcgcgcctgctcctgacgctcagcctcctgcgcatctccaatggcgcgggtccttctctcccctacacgctctgccctccgtctgctgcgtgctgagcgcccagccggagctcccatggccgccgtgccctgcgcgcttggtcctgttcgcttctgatatgcgcgcctagctagcg

SEQ ID NO: 135664 - DNA, 596 bp, Zea Mays
aaaaaataactagataaactagagtatctagcctaacaatatccatctcatctaaaaagattctattctacactcatagatctatctcatcccaaaagatcctaacttatcctaattaaaatgtatctagcttaatagatccatcttatcttaaaagattctctcttatcttagtaaatttatcttatcttgaaaagattttatcctatttcaatcttatctagatctcacctaatctaacatgatccaaatttagttacttaaataagttagataatgttggtgacaaaaaaaattaagccctaattctataaacatatcttaccctaaattaataccttggactaactcgtccgtaaacaacaacctaacccacgtcataggttgcctaattcatttgttccaaaagcaaagttaaactatgttcaaacctacctacctcgtgtacccttgctattctaactatatatccttagccatatgtccttaactcggatgacaactccaagaataaaggccaaagaagaccaaccatgtcaaaggaggataagcaccaactcaagtattcaaagagccaagctagatcacgagatggg

SEQ ID NO: 135665 - DNA, 425 bp, Zea Mays
ttcgcgtggcgtaacggagagggggcaaatggtcgcggggcgaagcgatgtggtgctgctccactaggcggcgaggatacgagcagtcggtgagtcaaagggacacgacagatggttactcgagtcttggcgacggcggctccttcatttctctgtgtgaacgacacgagcaaaattggtgtgggagaagacccaaggcgggccaacctgtcatatgtacaatgaaaaaaagaatggagagagctggacaaaggatgtcttggctggagcaagccgagcgagtgtttcatcttgtctttttttattttccaatttcttttctctttttcttttaaaaaaggtcagaatataagtaaataaatttatatattctaaaaactagaataaatctaaatataatattaatataccaaaatacatatttt

SEQ ID NO: 135666 - DNA, 737 bp, Zea Mays
caccaacctagctacaaaaagtcgtaccgaggcccctcaagcgatagcggtggtggatctgctcgccgccggtggcctgacgctctctagctactctgactcgtctacatcctccaaggtatgcacatacgtacatctgattttctggctcactgactccacgagcatctacataggcctatccaccgagtttgtgttgcattcgtgggacctaatggacatcgacgctgccaggatggaggacatcaacggttagacacgatccacgtggagggcatcggcggcaagtaaccaaccttaggcgcaatgacgggcattggtggcaaggcaccaaccttcggcacgacggcgagcattggctgcagcgtcacttttggcatgacagcgggtactacagctggcatagggggcaacacggcgatgttcggcaccacatggatctgtggcacgacacccaccgcggaaaccgtcggtatgtcaagcatcagtggaagagtggccacgggcacgatcggcggcttcagcacgataggaatgcctaggacgacgaaaggagcgacggggtgcggggagtgagcaagatgctgcacggcgtggcacatagtgctgccgtaaccgatgagcatgatgagcgccatcgtcacaaacatcgtgtcggagaagagatacgaagcgtcacaagtcacgcaccgtgtggcacgtagtgctgccataatcgatgagcatgatgagcgcca

SEQ ID NO: 135667 - DNA, 349 bp, Zea Mays
gtcaaatctggttccaagacaacatccaccacatcgatggatcgatcaggaactcgaaggcacttctttaattgagatacatggaacacattatgcactgcagataatgtttctggtagttggagtcgatatgccactagcccacattgctcaacaatgagaaacaggccaatatatcagggtgccagctttccttttaccccaaaacggtttacacccttcattggtgatactttcaggtacacataatctttaacttgaaagaacaagggtcggcgtcgtttgtctgcataacttttctgccgagcttgagcttctttcaagtggtgtcttatccgttgaacctttg

SEQ ID NO: 135668 - DNA, 1524 bp, Zea Mays
cattgcagtagctgctgaaacctctagtaccaaactaaaaaaacaattatcagagcacccatagtgaaacacacatagcggagactgactgtcaaccactaaatttcaagtaatgatacagattgaatttctatgataaatctaaaactttatcgtcttaaacaaaaaaaatgttaacagatacaaagcaaacaaatattgacaagttaatacctatgaaccatcggtggagaacactcatgatgcagatagcaaagagcctcagctactcccgttgcaatcttcaacctctttatccagtccaaagattgcaagccttcatcttcctcccttgactttttgtgcagtgcacttgacaagtcaccatttcggacaaacctatacacaagaaccttttcttcttctttatcaaggcagtgacccaggaaaggaaccagcctttcatgcaatcctttagcaaacaaatctaactctgccatataggcatccttccgagccacgcgcaaagtgatcctcttcaccaccacggcagtcccgtcttggagcacaccatggtatagatcacctgagtgaccatgcttgatgagcctctcttccccaaatcccgatgtggcattggcaatttggtcgtaagcaaatgaatcgccgactttcgccatgtttgtggacaatgcagaagggtgtgtgccaccagtagctgcagctgtgccggtagctgacactaccgatggtgctggtgcacttggtgatgccccactttccctctgaccatccgtcctccctgttctcacagaacacacaaagcagaacacaatggctgcaaccccggctatcagcaggaggcttccaccaatggccccgatcagtatgtatttcagattcctgttcttcttccttgccggtgaaggtgcaggctgtggtgcgggtgggataactggaccatcatatggcaagccacgcttggcatagaactgctgacaatcagcctgggtacgctgtcccagaacgtcaaggaagcaattcgattgaaacgaaacattgccaccaggcccaccaccaccatcggacactcctagcttgccgtcgaagtagttcccagaaatattggccagcagcaactgggcgaacagccggcgaaaggtctctggcacgccgctatagaacaagttcgacgacagatccaccacctgtgcattggctggcagcgcgaaccctgccgtgggcaatgcgccggtgaggttgttacgagagacgtccagaacgctgagccccgggagcgaccagaccgcgtcaggcagggcgcccgaaaacgcattggacgagaggttgagggtcctgagccgcgttagcctcgagagcgcggtggccggggagttgaccggacagttggttgcctgcgaagttgagggtggtgaggttgccgaggcccacgagcgcggaggccgggatctccccggagacggcgcaggcggagatgtcgagggactggaaagtgggagcgagcccgtcgcctagccacgccgg

SEQ ID NO: 135669 - DNA, 292 bp, Zea Mays
actcgatacccattttagatgtgatgtgggagagtacctatatattgatggccattttctcaaacgtgtatttgggcacaaaaatatttgggtctcgtctttcggctgactgcataacacgaacgtgtatttggattcccatttttgcatattattgttagagttagccttagattgaaaccgttacattacctatatatttatagcccctattggacttgtattaaaaacaaactagagcagtagtctttatagatttggacactcctttcctaacaaaccaatattcttt

SEQ ID NO: 135670 - DNA, 568 bp, Zea Mays
ccttccctaatctgttcgaaatccacgtaggcgacatggaacgaggtgttggcaaacctccgttcttcgatgggaccaactactcgtactagaagattcgcatgtctgcgcatcttcagagcattagttatcgggtttaggagatttgtctcgatgcgaatttcgatgctacaaatgatcgaatcactccaattcaaatggagttccatgattcgagcaacaaagctcgaaacgctttgttcccgtgtctctcgtttggtgagtttgagcgggctggacatctgactatggctcatcagatctgtaccttcgagagattccatgagggcaacgatcatgtgaagaccagactgtttgagacgtacatgcgagagtactagaacttcacatagttggctggagagaccatcaatactatgttctctaggttgcagtcaattgtgaacaagatgcatgctaacaaggcacaagatgcatgctaacaaggcacaacttgtaatacccactttgtaagaaagatctaaaagagaaattatatcactctacatctatatgtactaccaatgtt

SEQ ID NO: 135671 - DNA, 316 bp, Zea Mays
accaaatattacatgtgtgattttgtgaggtcgttcccagcttggggaccagttgccaaacatctgatccctgctccttagtggcaggactattttccagacaaggtatgcgatttggaatgacttagccttcaccttcttgttatagactttggtgactatgaccttttcactctcgatcttccttagagccatcatcttcttgtcaatcatcttgtcagtgttgtccatgattagatcatgatagtcaccaacagtaacatcattctgcctaacaaatctgatagcgtttaggcttatctccacacgcaacttc

SEQ ID NO: 135672 - DNA, 334 bp, Zea Mays
atctttatttagatgcagtcgccaagttcatggattatgcattcagtagatcaggtgatgggggtaaaattaggcgtccctacatcaatgttgtaatacatacaacatgtcccacgatgtagtctattcgcatctggtagcctatggaataataagaagctataccttttggtatcatcatggagaagttcttggagaaactgagaatgatttggaagtggaagatgatgatgatttacatgatggaatgcaggagctgatggaggatttgttcccttcgactaaccagcagggcaacgatacaatgaaagaaccaacccctagtgtttttttg

SEQ ID NO: 135673 - DNA, 575 bp, Zea Mays
gctttacctcgttccatgaacaaggcttcagggttccggcgagtcgcttcatgcaggccttgtcacactactacgaggtggagctacacaacttcaaccccaactccatcgcgcaggcagccatcttctctgtcgtctgcgagggattcctggggattaagccccactcggacctgtggcgccacctctttcgcacggagcccttctccctacctagcgaggtgaggaaggtgcgccacatcgttcacgccagtggctgcacactccagctacgcttggatcggacggcgctttacatccctgccacccttacctcgttgaacaaggggtggtagagtcgatggttctacctccgtatcgatgatgggcggctaccagagtttacacaccacgtcgtcctcggagcggaggataagtggaggtgggggctgccgcgggatctgtagacccacctaaagtcgctgcttgaggggctgtgaaagctccggtactgtggtctcactgcagctggagttgtcgtggccttccaccggtggtgggtgctgccgctggccgaccgtcgactccgccacgac

SEQ ID NO: 135674 - DNA, 582 bp, Zea Mays
ctggtatgcacaagtttgttaaggttgacgagaaccctttgttcggtgttgtagggtttggtgactgtaataaattatggttcatctggtattgtaaaactgtttcatgtgtgttgttcagactatgtgttataatgtatccagtcatttggtattatatttattttgtcttgcttccttcaattacaattcttctataaattgccatgacagccgaagaatggagaactacaactacggccaaccttcacaagcccctggagactatgtgccatgcacatacacagaaggcatagatttaacagaaatcgatgacgaaggcaacatgaactttgcctttactaagagcatgaacatggaagacagccagcactcaactccaactgcaactgaccctaagctcaagaaagtaacaacttggaggcttggaaactacactcaggccgaggatgagatactggtatctgcctacgtgaacgtgtccaaagatcctgcaattggaacgaatcagtcaggaaaggcttattggcgtcgcatcagcgactactacaatgaacacaagaagacagctaatgctaggac

SEQ ID NO: 135675 - DNA, 1030 bp, Zea Mays
tagcgcgtgccgttatagctcacgcatcaccctaaattgctacaggggtaggagaggggaggtcggcgggcgttgaaagcagtttaagcagccacctggccacataacccaagcatccgccacgaaacacgccagctcagctgtgtcacgctcatgtttcgccaacgtcgccgaagcaaagcgcctcctcgtcctccagacctccacgactgcatgcaggtggggccactgggtccagcatgtcagtaactcaacccacgaaaaaaatctgtacgaaacgcggtagctagaggaggaaatgcttcgaggtgaatgaggggcccacgcataaaagtccaattctttgttcactttttttcttggcgtcttatctcttcccttctctgcctcgcttcgcttcctacccacgccacgcgtgtgttcttggcagccacccaatccccgcctcgcgaaatcagacgccaaatccccttatcttatcatcaaatcgatcgccaacgggcatgatctgatggctccctcatcatagcctctgctgctgcaccgcagcaaaatggccctggtttagtttagtcctcaagatcccgcctttctggtgctctgtttggctagtgtcgtgccgccgcgcgaggacccggagattcgattccggtccggtgtatctctaggctgcttggtttgggttaggatttagtgggcagggttgtgcagctggtgtctcgtggaggaagaatttcgtgggaggattttgaccgggtttgggcaaagagcgcgccgttcgggaggaggtgattctcgcgtggttgcgtgctttgctgggagtctgctgcggccaccgccggtatggcgacgcacttcacgccgtcgcaggcgcacgcggcgtcgcaccacgcggcgcaccaccactcggcggccgccgcggcggcggtcacggccacggccaccgcgcgactgcacccgtccgcgccgccggcctcggcgtcggccgcggccgcggcgctgtgcccgccacacctcctcgcggcggctt

SEQ ID NO: 135676 - DNA, 625 bp, Zea Mays
tgcttcctgtgctaactttacacattatattaatgttgctgctagtgaggtaagcatcattaaagtcatctgcttgataaaaccactgtacttaatagcttcatgtgttgtatacatttgcttcttggttgatgtcctttgctcttgaattagcattctttagaatctagtcatctttctttttacaagacatttcattttaatttcatcaatatccgtaccaactttttatcttatttactaggactttaaagcacgagatttgtacgtcgtgcatcacacgcgaagcgcttcctcctcttcattgttgttgtcgtatattaacatccaagtccccatctctttccccatcttcgccttcatctcccaaattcttccacaccacagagtcatgcgttgcgtgcgaagtgcctagatctattttctcctctaggtgtcgtctaataaccagataaccaacaatgtaaccaacatgagcgcttcttcctcctctttgttgttgtcgtcgtatattaacctccaactccctagctccttttgcatctctatctcccttacccatgttcatttgcaccaccatagaggacatcgaccttccctcatcgacaaccacctcaaatcgttg

SEQ ID NO: 135677 - DNA, 515 bp, Zea Mays
ccagggagacaaactgggacggatgtaccctttttgctgtagttctgaaatctgaagtttcaattctgccaattcagtgggggccatgcggtatggtctctttgcgatgggcgcagtgccgggaatgagatctatatagaactctactcctctttctggtggcatcccgggcaactcttccggaaatacatcctcaaactccttgattacagacatgctctctgctgtcaggttaaacatcatcgggtcgttcgcgggtggttgggcttgacaggaaactgcctttccttggtgatctgtgagaagaacagtcttgcttgcgcagctgatgatacccttgtgcttagctagccagtccatccctaggattacatcaattccttgggatggcaagatggttaagtctgccaggaacactaccccacttaagagaattctgacttgggagcacctgagtttgcacaggaggtctgatcccggggttcgggtgaccaaagggatagccaggggtgtag

SEQ ID NO: 135678 - DNA, 310 bp, Zea Mays
gacatggatgagatgaccgttgccaacgataatatgggtaggaagatgctgggaagaggagggatgagatattataccagcgtcagatgtcatgtgactggaggcaccaatatcaaaatgccactcttgttgaggcggttgctgaagagtgatagtttggaagttggtagcgagggtgtgttgatcccagacgggtgcgggcgtagaaggatcggcgtaggcagggggcggcccatatgctgcagtgggaactgcccactggccaagagctccagcgacgaaggcatgcggtggtgggggcgaggcagca

SEQ ID NO: 135679 - DNA, 273 bp, Zea Mays
gaaggtatacatgacggcccccacaaatcagcatgaacataatcaagaatattttcggtattatgaacaacagaacagaactttacccttttatgcttaccgaaaacacagtgctcacagaaatcaagggtttcagcatggcaaccatcaagaaggcctctcttgctcaattctaccaaaccaggtgcactcatatggccaaggcgcatatgccaaattttagtagtctcagaatcagaagcaacaacagcattagcagagccagaactacct

SEQ ID NO: 135680 - DNA, 309 bp, Zea Mays
cgcattttgccattcagaaatgtggtacttctgacccttataaggtgcaaggtagccctttctatttggatagcctgaatcgacaagatagtatttacctgcacaaacatgaaatacaaaagttaaatacttaagacattaattaatagcatatgacaaaaaagtacaacatatttatataccttctggtggctgggggaacctgtccgcataagttatcaaagtatcttgtaatactctagtgtcatgtacggatcctggccatcctgtgacaacaaatgtgaacctcatatcgaagtcacaaacgac

SEQ ID NO: 135681 - DNA, 295 bp, Zea Mays
aatccgtcttctctagccttcgtctgatagtgaagttcatggactcggcagaatgcttcggcgagcggctctaccgcttggcttcggagagcccagatgtacacgctgagcctaacaatggcgttaggcgtcagctgatgaaagtaaatccctaatttttccaagacttccgcaatcattccatgtagaggaaacctcaaccctgctttgaagaagctcttaaaaactacaacttcatcactttctggtttcggggtagtttcttccccgccaaaacgaatcaaccccttctcgg

SEQ ID NO: 135682 - DNA, 400 bp, Zea Mays
aagggatacacatgatcttgagccgttggatcatcagatgagggctcagattagatcccgccttacaatacccaggatcaagcagcgaccgttagattttaggttgacggccagatgagtcactacgctactcaacaatctcggccatccgttaaatgatcaatgacccagatctaattaccccgagatctactcctatccgtacatcgtccgatctacggtccggacccaaccttgaaccggtatggactgatctaatcgcagtcaaccatcgcgtatccaatggtgaatatcaacgtcttcaattgccagaccccgaacataacaaagtcggccgccccgcgcggcatagcccgtcggcgagcacgcgagtcgaggactcccgtacttaccccgccac

SEQ ID NO: 135683 - DNA, 275 bp, Zea Mays
cagctctgctcgaaaccatctcagccaggttccataccagctcagtcgagttttgcgtaaaaagtccaaacggccagcaactttttggggagtcctttatatacccattaggtctctatcctcattcactttagctcctcccatgaatttacacttgagcaactctcaaacaagagcattcactccctctctcacacctcaaatctcatcctcttcaattcgttggaggatcctttggtgtgatgtgaagtttggtgatctcgttgttgatttcc

SEQ ID NO: 135684 - DNA, 439 bp, Zea Mays
atgaaaaatgttagatgtagtcccagatggattatccacgcttctcgcgacaattcttgatgcgccaagggtttctcgggtcgcacacacatgaccaagatgttgacagtattagcccaactttggatgcatccgggtcttaggtgttctagccaagaacaggccaattcggctaggtagggggaggttacagataacgaaatagccattatccacccccagtctaacactaactagtaatcttcaagccacaaactggagttcgattcctgagtacttgatgacattagcaagtgcatggtatgattggggtaccaatgcctagaggatgtggtgctcaaaagcttggggacgtggcaacggtgggctcagacttcgatcctcattagggatgaaatgccccccatggcgtcaaggatagccatggctaatgatgagc

SEQ ID NO: 135685 - DNA, 554 bp, Zea Mays
ggatggtgtggggcacgctcctggagccgaagtggtcccggagccggaggggaagttggttgtttttgtggtgtctttcactgcaggacttcgcttgcccgtgtatcggtttgtcgtccaagtgttgcaacgcttcgaagtttagattcatcagcttacatcgaatgccatggtggcattagcgaaatttgtgtgggcagcgacttcgtatggcggggagccctaggtcgaggtttcaactagaattattggctccattggcagaagaaagttattggttgcaagattgcacagtttatacatgcactttcatgccaaggactgggaagacttcgggtgaggttgtggagctcgtgccatgcgccaagaataaatggggaaactggtggtacttttggttttacgtgacgttggaggacaccgagggggttcctgggctgcctccatctattttgtgctcgcacttctacatcgcattcccgtagtttaagctgaaaaagtggtataaaagcaaagatgcccttcgacgcatggctaggatgagctgtggtcac

SEQ ID NO: 135686 - DNA, 606 bp, Zea Mays
gaaaaggcaaaggcaagcctccaccatctaagggcaataaagcttgccttagatgtggtactgagggccattttgctagggattgcacttgccctaagcaccttgttcttttgtatcaacaatccctaaagaagccaaagtctgataagcctggttttgaggctcattgcaattctgctgaagcatcaactgaggttagaagttcttcactggcttctggtgatctgaagaacactcttgctaaagagcacctcaatgcagttgacaacaagcctccccttctacaagaagatgaatctgatgatatgatcattgagtatatgtcaaagggtccatttggagatttgacataaatctctcatgcttggagatttgatcatgatcactgtggcttgtgtggttgttctatactgtctttataatgttgttgtaataagtagaggtatacaatctcatgttctgagatgtaacatactctacagatcagtgttgggtcctatgagtagtgcgaactcattggttgagtcgccataccactgatgtaatattgtttcgacattgtgatatttaatatcatgttatgtatagtactaagttgcatcacaa

SEQ ID NO: 135687 - DNA, 305 bp, Zea Mays
agggtttgcttctatgttttcgcgcgggcgcggcatgcccaaattgcacactgcttttatgccgactcacggtgcgagactattggtacagattgccgactaacgaagcgacgctattcacgtatacatatagtgactgatgctcagttggactatagatttataccgactcattatctgtggcaagatatgccgactaacagttcaacgataaaagtatatttatagcgacagttgtccgacgctaatttggtgttgtggtatagtggaagcaatcaacaccgcttgctacgccatcaaccgac

SEQ ID NO: 135688 - DNA, 279 bp, Zea Mays
ggagcaatcagcttaagtcggaaacgctttaagtcggtgcgacattatcacgcttgcataacttaaggtgattactataccctactaacagagcaattggcttaagtcggaaatgccttaagtcggtgcgacatgctcacgcttacatagcttagggtgactattataccctactaacgaaacaatcagcttaagtcagaaacaccttaagtcggtgcgacatgctcacacttgcatactcaagggtgattacaacaccctactaacagaataatcggc

SEQ ID NO: 135689 - DNA, 483 bp, Zea Mays
tacagcaatatctataatctgaaacaaatcttgccctagagctgaacagtccattccaatcctataacaagtacttccaatctgcgatgaattacttctataacaagtaaatgaatatatgatcccagaacatgagcactatatccatagtcatattgtatcagctccaaaagagcaccctgcacttgtatattccttcagtgcaatcccagcctcaacatacttgttatccaccatctctagcttcatgtctacatttgaatattcaggagccatgtattacagcaatatctataatctgaaacaaatcttgcactagagctgaacagtccattccaatcctataacaagtacttccaatatgcgatgaattccttctataacaagtaaatgaatatatcatcccagaacataagcattatatccatagtcatattgtatcagctccaaaagagcaccctgcaattctctagtccttcagtg

SEQ ID NO: 135690 - DNA, 926 bp, Zea Mays
acctgctcgaggcctcggtgggtggagattggatcggcggggctctggattgctcgtcggtcttccgttgtcgccgctgtaccacggaccgccgcggccgggtgtaaccactgcagtttcggtgagaaccaccccattccgctccgcgttcatgtgcgcatcatgtaggacttgttgaatctgggtgtgtggcggcgatttgggcgttggtcgccgcggcggcgagagcgccaccgcggatggacggtgccgccgcgccggagtgcgaatttgggaaggagcgaatctgaccgttccatcacagggtaacggtctcgatttagtcgggcatgcggatcggatctggtgatggcgtggcgcactgtgggccgtgggatcgtgatccaagcatgtgcggagccgtaccgcttcgggaggtcataaatctaatctggaccgtgccttttagatctaacggccagaatcaatcttaccgtttcggccaggtaactttgtaaaagagaccctgcgaaatagaagaaccaacccgcagtcctcggccaaagactctgggtctgctgactttttgtgttaacgcccctgcacttactaataataatgcgcccagtccagaagattagaaaaatcaggaaaatgcatacttagtccaaatttattcattccaatttgtataattttgtaatattattgtctatcacttagtaccactgtttgacatgaaacctatgttaaattggatcacctaattaatgttgtattaacacatatattcggaaattcataactcctccgttttaatttcgatttgactcgttcgagttgcgttagcttcgtataaatatttactacgcagtagcaacatttgttatatgatatcccctacttttataatttggtaactaattagattaatctgtgtctattgg

SEQ ID NO: 135691 - DNA, 937 bp, Zea Mays
attcggcgataactcgaaagagaagatgatcaagactccggatatataggattgcaagctgcgacaaagaaggagataagtgaagtagatagcaatcacaacttgtaaagggataactctctggtcatatatataaggccaagtggagatccctacaaaatcatctcaccccatcctcatcaacagcaactgagccatcacaaagctcatttgtaatatctatactccataaatcaatacctggccacaacagaacgtagggttttacgcaatttaaagcggaccgaatctgtataaatctacgagcaataccgacgtgcctccacacgtaccatcgaatcacgatcaacgacgtcgtcttacccaaaagcatcacgtgggtaaccccgcggtgcgcagtcgggtcacaaacaccgacacaccgcgtacaccctctggagtccggaacgcacataataaatttacttatcagagtgaggtttgaaacatcgacaatactgatctctatctctactcctttaaaacacgacttccgtacgtcgtgtgtcacacgcgaagcacatacgatatgtttttcttccccatgtctcgcctaacaaccatgccattatctcccagatagaccgtgagaaaacacccgagcccaccatgacacgaagccacatacaacacaacactcctggataataccacctcgttagatgaagagaacgagacatcgagcgagctataaaaaagaacatgtctcattttgaactcatacctccttgaccttctagctaagataaagtgtaaattctgtagtttaataactggtacgtgggtcatatgtccactttaattttaaatttatttttatgaggagggttcactttaattttaaatttattttatggggagggtctattacattgtcttgccactagatccgactctt

SEQ ID NO: 135692 - DNA, 519 bp, Zea Mays
cgggagttgaagagagagtttttcaggcagaatttgctttgtagcctcttttttcgtttcttctccggtttccaaggatttctccttgacaggctctgaaggcctagcttcggccacggtttggctctttgtagcttcgtcttcggatgtttttgtcccaatttgtgttttcggtgcctcggcagtcttctacggagtggtgcttgaagactttattgtctccagcacatctaatacattgaccatcctttttctcttgggggtcgccgtgagatctttttgtgccttcggcactgtcattcctgccgaagggcttgtaacttctaatatctttgttttctcggcctctatttctttaatattttgagccttcggcatcatagacgactcttcattcttctgtgtaagagcaggtcctttggcttcagtagccgtagaggtctcaccaccaaattcgggcactgaggccggttcgataaagcgcggtcggtaaggaccttcacctttttcctctttggc

SEQ ID NO: 135693 - DNA, 720 bp, Zea Mays
cgcgggcgctctctgaggtacttccgaactccttttctaaagtgtccccaaattccttgagaaggtcatcaaggctagctagggacatgtcttcgacgtcagacaaattctctatcctggcgggaggtggtgctggagggctttcttcttccgctcagtctgacatccttggctcttggtcttcttttggattttcttcatgggggcgagcttctttagcttcttatcgtaatccatcttcagggttcggtaggcttcacgagtgttggcctcctcgccttctgctatatcgagacactcttggagggacaccttctcctttttaagttccttgacctgctgctctaagctttccacccgggagtttaggtgggtgcagtgggaggaaaggtcgtcatagtggttatcgagagtgtggaggtatccggccatgtagacgatggtggggtcatcctcggtaggatctctccctgacagggcctgaagtcttttcctccaggtgggggtatttttgttgctaggtgggaagtaacgaaggggggtttcaaagacctctctgttgtagttttggcatagctgtttaagggcttttcgggcaacgttttggcaagtgtctgggaagcggtgcccgatgaaggtgacttggaagggagggtggtttgggtgacttcggctttctcccatgtagattgccatagagcacttctcaactccgttttc

SEQ ID NO: 135694 - DNA, 665 bp, Zea Mays
aaaaagtggccaaactacccaaggcacacccctgaaaaatttgaaaccaaaccagggtcgtttgacacggtttggcatccattttgtcgcagggtgaacagtgcagatagacaagacttggcaccaccatatcttccaagctagaccagatctccccttggaactcacatgaactagatagctctaggtgcagggaagaaatcttacacacggcatatggtaagattcacacgtttgggagctctgcaggcgcaagaactcgggcagattaacacgaccacgtgttcgacgcgccctggcaacgccagagcacgccccggcgattagccccgcgcccacgcccatgcccgcggctgtaaagcccaccccggtctcgaccgtacgcccccgctcactcccaaccctgcccgagcatgagttcaccggcgtttgcctagagaacagcgtgccagcggccgagcgagccccagccaccgtagccggccacgccagccctcctccaccccgtctgaccctttggctagcttccccggagctcagtgaagctcctcgagccacagattggacaccacctcaccggaaacgccggatcgacgtcactggacttcaaccggccgccgttgcacgtagaccgagccacacggtaagccattcgtcgattcctt

SEQ ID NO: 135695 - DNA, 440 bp, Zea Mays
ttcggaaagaaatgagaatcaggacaaattcaatccataagtgccctaggtactgtgctccataactcaacacgacagtagagcatccaggggaagaccgatgcgccgggtctccagctctccatcacaaatggcctagataaacacagctacacaggtgacagctatgttgaacgtgctgggggacattccaatcttacgcagcatggaatttgtgcgctcttatcatcctctgctcggcctccatccatcatgaaggcacgcaagatcacctcaccgaaatccaggaccagatgctcctcaactggctgcctacgtatagaagggaatgtcgtgcgggattaccagctagctggcctccaactccaatacaaacatttgcctctctctctctctcgcccacagccacccccgcagccagaaatgaggtacggcgagct

SEQ ID NO: 135696 - DNA, 463 bp, Zea Mays
ccggagtgccttctctctctcttttccttctcactctctctaccctccctctagctcagtagctcctttctctctctctctctcaacacacacttcttcctgcaagggaacaagaaagagcaagcaagattgaagaaggacgctctgaatccctgatcatgacaccaagatgtgagagaatacactgcgcctgtttaccatcaccattagctagctagctggtagctcccggcggctgatcgtcgctaaccaccacccttgtcttgtcgtgtcgtgtggcaaggccggccggcgacatggcgagcagagcatcggcggtgctgctagtgacggcgctgtgcgcggccgcgctgtcgcggtccaggatcttcggcgccgccgcgcagacgcagccgtgtggcgccggcgacctcgccgcgttgcgcgggttctcggcgggtctcgacgccggggtcgacggctg

SEQ ID NO: 135697 - DNA, 296 bp, Zea Mays
tgcagatcaagtgcagtcaccatctcagacaagcaagaggcaaggcgatgagctcggaacatgcagtgtttggcacttgctggagccaattgtagtagtttctggttcgttacatatcacagtgtgatgccatgccgctatgcctcatggaccatgagcccatgagggccacatgtaaaccgggtccaatttgtcagtatcagtcttttcgatgagatgattgcgcagtgagataccgatgaatattacttgtaaggcatctggaagctagcttttgtgcccaagctcgttctgtt

SEQ ID NO: 135698 - DNA, 1357 bp, Zea Mays
gcgacctatatgtttgtcacttcacgtgcgtcatctatatgggtactgagtagtcgatatgattctgttctggtattatagtccttcaaaatgctgccaggtaagtagatcaaattggcggagaacgagaatactcaaataggaagattacatcaaatccttatggtgttgtagtggttactctcttgtcattgtgctcgaattttgcattaggaagaatggtttattttgctaatgcacacataaactaggtctttggcagggttttccagttcatgctgcatttgaacattgccactagcattttaaaaacattttacatgggatttgaaatgtgcaagttgtgttttcagtgctgacttggtatcagttattcattcactgtgtcattttgttttgttaggtgtgtcaagagtcgaagtggtgctaacttggtagttgcagtcgagttgttgtcatctggaggtagttgttacttccacggagttctggatatttgggttcacagcatcaatagattgacatcatgatggtcaggtagtcaggtcattgttaacggtacatcggtcttgtggttctaagacatttgtgtgactaactggttttaaggccagtgaaaatttgctcatcaggaagtggtaaaatgtcaattattttgtcaagtattagcagttttcttgtgtatgtgatcagactaacactgacatgtctttgttttcctgtaaaactatgtatgatgaaaccatggtgtgattgtattggctggccttaccctgttttgtttcaatgcattcattgttgcacaagtaatatgttgaaacacaattcattgcatatgacaattctgatttttctttctagaatattgacagattgtttgatcattattttctgagcaataatcatggctattcttatagtattgcacaatactttttcttttcgaaccctagtgcattgattctttagtgaagttattatagtgattccagcgggagagtagggtggggagcagagggttgattctggactgatttcggtggagattgaatggggagcagtgaggagcatgttttttagatcccaccagaatatgtgcgccattttgctgtttggctgaggagtgatgctcagggagaatccgttctcaggagctgtgccaaatgtcgccttagattttatgatatgacctgacttctatgttaatatctgttagatctttattttatttgagattacaaaggtggtgttctctagctagaaacaaagttgcggctaggtcaaaactagatgatgctcttgaacgtgtcttttgactctgttacttgctgcaggtttgatgttcactaatatgttg

SEQ ID NO: 135699 - DNA, 413 bp, Zea Mays
atcacgcatgcctccccttgatctacctcgatctatagcaagacgaggtggatattgtggacaatgacatagctcgacgtcatggaggtggatcttcgcctcggtttaatatgctcgtgtgctccttcatctgcctcaacctcaacatgacgaggtggagatcgaggatggggacatacgtcaacaacatggaggcggatctctacctctgatccaccacatccccatgcttcttcgtctaccccggcacacaacgcaaggtggagatcgaggatgatgccatatctcaacattgtaaaggcagatatccgtatagattcaccatgcgtgtgtactccttcatgtgcctcgacctataacataacaaggtggagattgaggacaacgacatgcctcgatgatatggaggtgaa

SEQ ID NO: 135700 - DNA, 711 bp, Zea Mays
gggagaagttctggccgatatattcttttcccttgcttcacaggaggaacatcctctctaactgctaatttatgtacagccaccgctggatctaggcctggcatttcttcataagaccaagcaaatacatccctatttgcagcaaggaatttatggtattcttccttactttctttagataaatgtttgctaatgaagattggacgaggatcatcatctgtcccaatattaatttcttccaactcgtcaacagttggttgatttccatcttcaatctgtgaaggtgcttcagtagcatcaagaggtttggtggaagtcatattaacttcatagcctaaaccatatttctcttctttcaacactccatcttggtgtaaggcgttaaactgagcttgggacatcagcttttcgaaaggtgctagctgcccccggccgtcgcataaagaaggaccggtagatatatcatatcccatctgttgcataatataaagaactttgttatcatataaagagatgggtaatgctttatcatctctatttaagaaagtaacttgcgcagccattttgttatttttattatccctttcagtttgggcttgttttattttatattgcaccaaaggaggtaagggagttgggaatgaaatacctctattttgagaggcctttttatttataatgcgaaatatcggatcacctttcttcctttgg

SEQ ID NO: 135701 - DNA, 303 bp, Zea Mays
tggaatgtttggtcgtaggctcgtagctagtgtcatgttaggctgtgtgtacaacagctggcctcaacttgttcagttcattagggtcagactaagctctgtataatgaacttttagctcctacttggattgagcagtaataaatctctctagtgcatccctgtatccctgatttgtgtggtagctgaccacagttcctaagcctgtcatgatgatacacccacaaacagatctgcatgtgacaacctagttcatttaccaagctgaactgaaaatgttctttcagcatgttccatatctaca

SEQ ID NO: 135702 - DNA, 707 bp, Zea Mays
gcgtgtgatggtggtgaacgtgtcggacttcaaccaaagaggaaaagtctaaagaaaatggggaaaatcatccaaaatcaccaaatagtatttataaccagaaagactgagtacaggggaggtccagagatcaaaatgaaccaggtcaaaagcttgctcagctagagaaaaggaagtaataaatgggagacgagtatgtcgacctaactgacaagcatgacggaggccctcaaaatgtcccctactacatgaaggatctaaactgctagtaagcttggccatgacgtcaggtcctagatggtcgagacaacgatgccaagtggtgggggaggcggtggagaccaggacaggaggtggacgcatcggtggtggaaggccggagcgtgtagagtggccccgcgctgtcacagcgaacgagaggggtcctggtggccaaatccttcacaaaaaaacaagaggggtcaaactcaatggaacaagaattgtcggtggtgaaccaacgaacagagagaagattatgggtgatgtgtgaggctacgagaacgtcgttgagatagaacggcccatggaaaaccgggacacctactgaggtgaccggcagagtggaaccatttccaacgacgatcgaggagggggtccctaggggcgggagctggggcagtgttggcggcgtcagtggcatgacatagggaggtacgccataggcg

SEQ ID NO: 135703 - DNA, 287 bp, Zea Mays
ctggctcaacggaaatgtgagacaaagcaccagaaggaatcacttcaatctttattttgctcaactcatcacatagggtgtcaatgcgagaatccatcctgacacagttgcattgcaatttccgactcaaggcatctgccaccacattggcctttcttgggtgataatgtacctccaggtcatagtccttgatcagttctagccatcttctctacctcatgttgagatcagcctgagtaaagatgtacttaaggctcttatgatcagtgaagatgttatagtgggtt

SEQ ID NO: 135704 - DNA, 567 bp, Zea Mays
ggacggaagagtcttcggatgatgatttggattattttgcggcattggatgtggctgcggcggaggcttctccgcgtgtggtgggtgctgaagttcccggtccaagtgttgggcgaaggcgtcgaagggcggtggcgaagtgtagagtgagtgaggtggagggtggtcatcttcgtgtggacaggactggcaagcgggaattgttgtcctcgccagctggggcgagtgtaggtgagggggaattgcgaagtctttttgagggtgaggagttgaggataatgctgtttaactacagggagatgggtattatcccgaaggttgaaccaatgtaaggtgtgatgccctcgttgtatgtatgtaactataatttgtatgataggctgtgtgccttcgctgatccggccgtgcccgtaggggaattgtgcacttgttctagcgcgtttattatgtcgatccggctgcacctgtagtcggtctttgcacgggtagtctttttgagagagacttcgattttgcgcgcttgttgtgctagtccggctgcacccttaggcgaattttgcacggata

SEQ ID NO: 135705 - DNA, 668 bp, Zea Mays
cttggggccattcaccgagttggagtaagcaggtcctgatggcttcagctggggacagttgttcttgaagtgactggggtctccgcagtgccaacacgcattcgctggtggttggttgcttgcaacttagggggcatgaaaggagctctgactctactggctgaaccgtgatggggtgggtctagctggtctactgaagcttggtcccttgggtggaaatccaaacgatcgagttttctggtgccggtcctgctgctgagctcggaggacttggaattttctcttgagatggcctttttcttcttcttttgccctttccacttgcatggctttgttggagaggtgcgagaaactgaggaagtcttggctggctaggatggtcttgagttctggtctgagccccttcaggaagcgggccatcttcttgacttcggtgctgacgtcatccggcgcatagcgggccaactccgtgaatttgtgcacgtactcactgacagatcttccgtcttgagtcagttcccggaattcatcttccttgagctgaacgatcccttggggcacatggtgctcccggaaagccgtttcaaactccgcccaggtagcatctctgatggtaacattgaaggtatcccaccaggctaaggccattccggaaagttgatgagcag

SEQ ID NO: 135706 - DNA, 569 bp, Zea Mays
cggccgcccgatctaaagtggaagacacggattatatctggcgtcatccgaactggtatgctacgcaggatcttggatctagatccaatgctccgtgttttatgaaagcagggcccaatcccggccaccgatcgctcacccaacggctccgatttaattagacgtgatgagatcccctccctgcaatcgcagatccacggtcccgtttcggagtacgcgaaaggatacgcgtgctccaacctagaccgtccgatagaggatcgacggccaccacgtctctctctcccctggcccgactgaggcggtggcacgcacgccgactgctacggcggcggcggcagaggagtactgccctggccataacgcacccacaagcatgcacggcaacggttacacgtacgggaaatcaaggcgactcgattgggagaagacttaccggccgattaagtcgcggacagggtcgaccacgtggtggggcggacattcgtggcacacgaactccggcgagagttccggggcactggatctcgattcaccctaggcaaggtgccgaccaccctccccatgac

SEQ ID NO: 135707 - DNA, 565 bp, Zea Mays
gatgagtttatggtatgtttcttgagatgaaaattacatgtttgagtttttgcttttcaatttggtgcccttttgttcaattacatttacatgtgataatgttcacaaatgtgggtgtgtggagagaaaagcctgagtaacacctgaggtgttacaagttgtgttgcatctttcgaaggttcaaggggttgtcacgttggcctttctttcggtgagtgaggaagaacaagatgaggagcgcatagctccggtaatgagttaattttttcttattttaatggagatgaggatggcaaggaagaagacaccactacaactgctctagcggtgaaggatgttgtgttgcctgctgcagttgaaggaaggccaagagcctgaaggccgaattaatgcctccaatgacaactccttcgacgatggtaatggtcgagaagactggttgtactaagcctgttatggtggaagataagggcaaggggcctgcaaagattgaagagcgtaagaaggccattgaggatgacacaccacttggcgaagggcccttcgatcaagagctcggggccag

SEQ ID NO: 135708 - DNA, 347 bp, Zea Mays
ctggagataaaagaaaaagaaaaacacttcaacagtcgtgggctcaaactggcttaggcggcccaacatcgcacagaagcgcgcttgcgcacgcgtccacgcctgcgttggccatcttgcaaaagggccctcggggtttctggctaaccggaaacagctcttgccactgtttacagagtcactgaccgtttgcataaacaccctcctatttctaatcctttgcagaccaaagtccctgtcgacgagcgacgccggtccgcgctccggcgaaactattccggccagatgacgccatgactggagttctcaagcgacaggaaccaaattagctacctaccgcacctttc

SEQ ID NO: 135709 - DNA, 988 bp, Zea Mays
ggcgacttttgtgcggagtgtcttttaaataaaagacttcgattaatgcacttgttgtgctattccggctacacccttaggtgacttttgtgcggagtgtcttttaaataaaagacttcgattaacgcacttgttgtgctattccggctgcacccttgggcgacttttgtgcggagtgtcttttaaataaaagactttgatcaacgcacttgttgtgctattccggctgcacccttaggcgacttttgcgtggagtgtcttttaaataaaagacttcgattaacgcacttgttgtgctattccggctgcacccttagcccacttttgtgcggagtgtcttttaaataaaagacttcgattaacgcacttgttgtgctattccggctgcacccttaggtgacttttgcgtggagtgtcgcacgcgacggtagtctgtgctgcctctcgcggtgacttcggagtggtcgaatgtcgaagaccgtcgatgcggtctttttcgacatgctgcgtctgagtttttgcgggggatttttgcaggtatattacatggctccgcctcgttaaaaacctcacccccaggaggaaaagagtgcggactggaatagtattgtttggtggattacaagggcgtgtgggccctgagggtttaaagaaaaaatttgcggacattgttaatattccaggaatgatctaggtcttagccggatggcgttgtcagcctgtacgcgctgggggatgccttcgatttgacgatgaatggaccctcccacttcagctccagtttgccccgtgactctgtccgggtggtctggacgagtacgaggtctccttcgttgaactctcttgggacgaccgcatggtcgtgccaggccttggtttgagcttggtatttgttgagggcctgcagggcgaagacgcggtctccgtcgatgaggtctttggacgttggtttgtctacgtcggggactgctgatgtgcttgttcgggg

SEQ ID NO: 135710 - DNA, 388 bp, Zea Mays
ccagcctgttacgcataaaattccgccaatctaattcttcagtagtaagaaggcaactttctgctttcttatcaagaatatcaaggtcttggataatgcgtttttttcctttttatttgtaccactgacattttttgcccaaccccttaaaaattgcctaaccttccttatcttgttttgccatttttccatggccgataccccaccattatccctacaccacagacttgacaccttctccctaaaaccctcccttaagaaccaacccagctctaatttgaaactgggaggggagtaggttgaagtgtcaatgccggtgcttaggattagaggtgtgtgatcggacacatccatagagtgggccactacgttagatcggggataccgt

SEQ ID NO: 135711 - DNA, 843 bp, Zea Mays
ctcaccctgccgctggcacgtgggcccacttcgccagactcgcgtccgtctccgctcagtgcaccgcgccgacatgtggagcccacttgtctgttgctcaatcgcacccgcgttaagacccggccttacactgtgatcgcgagcccacaggacagactctcaggcgcgcgactccgtcttccccgcgcgtcggccacctccgcgcatgtcgcgcatcatccgaaggcttcgggaattcggttgtggaccgccttgacctggggataagaccccccctgaacgccacgcagatctccttgccttctccccgcacagaaaccacacgccgccacccgccacggaagtcttgagtgccaccgtcgtcgcctcgagccgtcagcatcgcccgtgcttcgggaaggagtccggtgacttcgtttggcgctgttgaagctcaccgggcactgaacgcgacaagtaatcaactacaccgtcggcaattgctcatcggagtgcgcaaatcgccgcggatccacaccgcaccgtggccagcgccgtcgagtcaacatttcgcggtaataaacctacccccaccttccttaagccttacgcattgcgtagctgagtttaattaggaaatgtgggtgtgggcaagggggtttagcctcgccggccatggcgcaccgccgtgggggagctccgctccgccgtgcgtgggtgccctgttggggcagaaaacgtgcgccgtcggattcttaaagaacggtcgggattagagttggcgtaccctttcgccacattggttgggtgccgttagatcgtgatcggacgacaccagtgagatcggagagaattaaatccgag

SEQ ID NO: 135712 - DNA, 698 bp, Zea Mays
cgagaacggacctggagacggtggtccacggcgcggtggctcacggcagcgtggagatccgaattgggggaagaaaggaattagggcgctatggtggctaatcggaggcaagggcgggtgctctggcttcgtgacaacctaacggagctagtggcacactcaatttatagtgtccgtgagcggtggctctgaattttgaaggagaaggctggcggccggagagaggggtgagtcaccggagtcgcataacgtggcattaactggggtagagacctgaaacgatgactaaccaattcacacgacaccttgcgatgaggtaacagggtcagtagcgtggcggattccggtaaacgacagccacaccggcggtggccgtgcggccacgtcgtggcgcaagtggatgaggcaacaaagcggccatagtgctccgacttcatccacgacgagatcttttcaccaagggtcgttatccgcacgttactgggcgtgaatcacagcgtcagcgcgaatccgagtgcgcgggtcaccggcggcgaggttcagcgcatctgagatttttctggctactgtaccatggccatcttcttcagtcgttctgatagcgcgatttgaggagccttgttctccattttccatgtaacaacttactaatcggtttgtaacaaagttactgacctataatccagctacaattcaac

SEQ ID NO: 135713 - DNA, 465 bp, Zea Mays
gtggtgacctactccgccctgcccacgggaacagcggaggctaagaacttttgctcgtgttcccggcaatgggtggcgatctaattcaattggacgagttggcgagcatcaccatcattcagagacataagaacaatgcgtgaattgtacggtgccttaccagaacgggctggccatggtgagctcggttcttgcggtgttttgggtggatttggggaaatcccaaattgaagatctcgggtagataattcagggcacggattgatgcaggagtttcttgactacatggcggagctacgggcgaggtcaatttatagagccctcaagcggtggccgcgaatttaagcgatgacgcgcggcggccggaggaggggaagagtactggcgcaacggcttggtgtctaatgccgtggcagttactccggcgagccacggggagtcgcaaaggttcacggtgacacggtt

SEQ ID NO: 135714 - DNA, 285 bp, Zea Mays
caagccataggatctaggatcaagggtccaggctcaatgtatgaagcggtatgcataggatctaatcctattcgttgattcaaggatccaaggctaccctgcaccctagccgaaccgctacgtggccatattatcttagtcgcttatttcatgatctatggcccatgagtcatcctcacccctcccttcaatccggccgagcattggctgcggcacagggctcccacgcatctacatccaagacgacaaccgccgaaccagcaattcgatgcccctccactccac

SEQ ID NO: 135715 - DNA, 409 bp, Zea Mays
cgagttctaagcttcggccactgtctttattgcttgtgtatagacgaagtgctcttgtatgctgcttttgtcgaatcttatctccatactctagcgagaatattcctgaaatgcacttgttaatcgttgaagccagatgttagacaaataatcttcggcattcaagtgatcttcgacattaatgtggcataactaaacaaaggaccatcggcaatataggccccaacactgacgcattggcttgcattgctatagtcgatgcccccatgctttggacctatgagaccgccacatgtctcacggtagttgatttttctgattatcagttcataagcataaacagaaaagggtttattcctgtaatgctacagccagttgagaatcggctaaatcctaaataaagtttaaa

SEQ ID NO: 135716 - DNA, 646 bp, Zea Mays
ctggttcgttgctcaggaaaaggcgaaaaggtcgcgcgataagacgtcgatttgttcgtttccttggaatgaaatggtcacgtgcgtcatcatcgtgagcaagaaatggctgcacaagagtggtgcttatcatgagctcgccggccgacgtgtcgacgccgaaacgacgaacaggctgggccacacggtcgtcgccaaccataaactggtcggctcggcccagcccatatggctgtgtgaaaatattttcttttatcggcgagggccgcgccatgccgggcaatgtctatgacgatgacgatagtgcatgctagccacggcagcatgttgcaagataaattatgtggaccggctattaaatagcaagcatgggctgggcctgaccccgaagtagttagagctagaacaaggggaaaaccaaaccaattgaatataaatggtttcgtcagccgccgctaaatgttgaggccgaaatcgattttagactgcatctatcgtttggttgggctagaatgcaatcgtttacagcgttatcagttacagaagagtaaactatttgccactttccattcggtgcaatcagatcccgtagccagtcgtctcccttatgagtcaaccaaacaaaaaattaagactggagagtcaa

SEQ ID NO: 135717 - DNA, 307 bp, Zea Mays
gcataccacccacagggcagaaaagtatgcagagatttatattgaccagatagttcgtttgcatggaataccaaggactattgtgtcagacacaggagcaccattcgtagcacatttctaggaacaactgcaagagtcacttgggacccatgtaataagaagctcagcataccatcctcaaacagatggtcaaacagaaagggtgaatcagattttggaagacatgttgagggcatgtgtgttgcactatggtaaggattgggataagtgcctttccttggcagaattctcttataacaacatttac

SEQ ID NO: 135718 - DNA, 539 bp, Zea Mays
caagtttccatttttgttcatttgtgtgaagccttccttggtattctgccacactttggcttatggaagtaattgtatcactgtcggcttgggatggccgggggacagcaccagctcatgggggtgcgggtttggagatgcgccgtgggagaaaaactgagtacctcgacatcccactcaaggacagcatcaaaggatggcgcctggaatggtttatcgtggagaatcacggggactctctcccccctcggtcagggagacagccagatgttcgcactccaagttggactgaatccccctcagacttggaggtggctgaggccggggctctgcttgccgaggttggattgttgaaggagaagggtctgactgccgaagctgtggtcgccgattttgtttttaagaacattcaaccactgaaagacagagcgtacccagcttatctgtatcatggcctcactgattcaacccaggttaccaacagaaggattcctgttgtggatctggtaagccggcttgagatgattcttagaggcaag

SEQ ID NO: 135719 - DNA, 624 bp, Zea Mays
caacgatgtcgagtggaggagcctcgaggctgaaaggccctgaccgaggaaggtatgtgaccaacttgctgagtgcagcgatagcgagcaatattttatcaatcccgcagcagccttgatgctccgatccaacccagagtcgggcgcgttggaggcgaaggtgatgtactggaaccttcacaactttgtggatagggacatcgtgcagcaaggtgtgatcgataggcagttccccctcaggatagaaagctacggcccagaaacaacctcgtcttggagtagaggggcacatccctcctatcaagaaggacacatgttcccatgaaggaccgccttggaggcatctgcgatatctgacacatcatcgacaataggtgttgggagtaggaagaagtcgagcagccgcacaaaagtaggcgcgagcgcaaccccaacccgcttggaccaggatcgcgtgccttcgggcatgagatcaggattgcgcatttccccctaaaggtacatgcaccagcaaacatctccaaatatgacgaatccacaaaccccaatgtatggctgaaggactactgcctcacatgtcgcatggcggcgatcaaggatgattacctaatcatccagttcctc

SEQ ID NO: 135720 - DNA, 542 bp, Zea Mays
gttagtttgcaagcataagtcaatggaatagaggacacatggatggccaggtggccattactcagctagatagccaagtcaagtggctagttggctactctctctcctccatcttccatcgaatggtccacaagccttcattgaggtcagcttgatagttaattgctacaaccatcagattagacttgtgtttctcccttagacattggatcaaggtgccttagatttctgactttacctatctatgtgctagattggtgatgtggcggtcttccagccctttgacatgccatccgtgtggctacacatacaagttgcattaggtgcatcgtgacaagcgtgaaggaccgaggtggagtgtgtgtgccttagccaagtggttgagcaatcttcgaggtggatgggtagccaatggcatggtcaattgaccatggttcctaaatgacttaaccatttccactcctgcctagccattttcactccttttgcattataacctgcaatcaaatattccaaacaaaacttgtgaaaatcaattagta

SEQ ID NO: 135721 - DNA, 496 bp, Zea Mays
actctacccatgactcctcgcactcgataaatcatatggtcacataaggatctctccaacaatccccctatacaactccccttatatgtactatctacaatatattactttatcccactaaaagattcttccctatttacaatttctctccaattatttcccttatttatcacccctataccaattaactcttaaagaaagaaaatagttgcatcccgttatgtatcccatgttcttcttcctctatttgtcttctacaacgtggagtcgtactcttcgctgccccgtgcaccacgagagatccccatgtccgacgactgttgaggcacccctcctcctcctcctcctccttgcacaccccatcggtccctctcatgctcataggatcagagactgtgggtgagcccgacggtggtggacacatcgcgccctcatctacctaatcggcggtggccctaaccccatggttgtaaccctgcaatgtcgcctttgcgtg

SEQ ID NO: 135722 - DNA, 425 bp, Zea Mays
cccttatctgttaccgtggctaatggtgaagttgtgcaatgtacagtggagctgccacaagctagctggtatatccatggtctggaattctgttgttccttcaaagttatccctctgccatattatgacattatattaggcatggattggctggagatgtttagcccaatgacagttgactggaaacataaatggctatcattaccacattcaggttccacagtggtgttacaaggttgtcagccattggttcctgcaggcactatactggagatctggccggttacggtaacggaatctgcatcagcccagctgcgttatattgaggagttgtccttgcctgctccagttgtgcagctgctccgcaattacgagagcctgttccagccacccgcgacgttgccgcccagtcggttctgtgacca

SEQ ID NO: 135723 - DNA, 352 bp, Zea Mays
ctccacaataaagaagccatcggaagaatagccaagtgggcctgcgagctgggagctcacgacattgagtttcggcctcgtactgcaattaagactcaagcactagttgacttcgtatcagaatggaccaagcaacaagtgccagataacccggagactgtagaaatatggcggatgtatttcgatggctcgttgaagctgcagggggcaggcgcagggatcctcttcattgcacctggaggtgaacaactcaaatatgctttccagttattattctcagcgtccaataatgcagcagaatatgaagctttgattcatggactgaacattgccatatcactgggcatcaaga

SEQ ID NO: 135724 - DNA, 370 bp, Zea Mays
agcatggatccgtctcttttggtgttaatttcaaagtggaaataactattcttagatacttaacattttgatgaaagtttaaaatatgaaatggaactagaaccattcttaaaatagagcaatggtgctcagcaatttttgtggttcttgatcatttgttggtcgtcagtggtgtaaaaatcacgaggctcttttgggccataataagtcagtagtacgaagttgggtccaagtagttgtagtagaacatactggatctttccctttacatatccctttctttcgagaaagctgctagcagggcatcgctatctttgagtccacctccttgttgcatataattgattttttgcgataaacaaggtatcgt

SEQ ID NO: 135725 - DNA, 583 bp, Zea Mays
ttggcctggttcccactattgtaacgaagagagccctcctgagatttgcctcttcccgtgccatgtcagcattgaactcaagaatacaagatgaccttgtcccccagctcatctctccttgatcatccggcctcggatcaggggactggctaatcatcggagctatggcttcatcagacgaggtcagtgacgcctgaccaggggcggcgacaggcttctttgaaccttttccgtgcttcgaccgtcttctctttcttttgttgcggaggcttctatgagactacccctcagcagccatcctaggggaatcctccatcttcgcaacaacctctggtgtgttgatcttaacccacaccaaacgtcgcctatgggggacagcacactccgaggttgctgacgaggccccgcgctgctccgagaggcgctgccacacagacccccttgcttgttgtttttccaatctctgccacactgtcttcttcctctacacttctcggcggcctagacacctgacagcctgatgtccagtcttgaaacacttgaaacagcgcgtgggtcgacggcagacaacagcaaagtggcc

SEQ ID NO: 135726 - DNA, 357 bp, Zea Mays
cgctcatcaacgacaacttgccggcgaggctgccaagttcatccgccacaataagatgggcaccatcacatcccaggacatccaagggcatcaaggccgtcaccaagttcacctcgtctttgtcttcttctcccgtgtgactgtcttcgtgtgagtaacatgttggttggtcggaggcttggctgttgtggtctcgcgtaattgccgcggtggctttttggcagaatggaatgctatggttatgtgaatgttgatctctcagcactccgtacacctgcttgccacactgttttggccattgtgtcggggtctagattgggactgacttgagagtgtttcaggtctgttcagttgggt

SEQ ID NO: 135727 - DNA, 747 bp, Zea Mays
ttcgggcagaggttgcgaaattgcgtgctgaatgcacggcactccactatctgaatggtggttctcccgcccctgtcgggattcagcacccttaccgttcactgccccgtggtcgcttcgactatggtaccccagactgcaggacccgaatagatttggatccctagatcgacagagtcggaatctgtaataatgcttagctcagtgtctcagtctagtcagtctagttagagttagtttgcttattttatgttggatgcttgttatgatggacatgtactgaagttggatctttgtaatgattgtcaccaaggtgtgggtatcccctacaacttggtgtagttattaataaagtcagttatttagttgggtaatccatttatttccactctcctctttatctaagaagctatcagtgaagatggtcaattgttcagtgttatgaagatcttctatacattttttcttatgctgaaagactgcagagtcagatctgatatgtgtgtggtttctacagatgtatgagaacaggcgcataggtgcgaggcgtgctcagccagagcagcaggcaccccaagaggaggcagccccgcaacagcatttgccaccgccacccccgatgaccattgagcagatgttcttgatgcagacccaggcagttcaagctattggtcagacattagcagcgatgcagaagactcagcagcagccaccaccgcctcagcctcaggtgcaagtccagatgcc

SEQ ID NO: 135728 - DNA, 466 bp, Zea Mays
tcgagaacttagcgtctgggcgagtagttggggagctccagccatggcactccgccgcggtgagcacgcagtcgggattgggagtgtccagggaaggagaacggttcctggccgtcgatctaacaccggacggtggagtttagaagatggcatacccccccctctgcgcgtgtaactctgggccgtagatttgagggtagacggttgggattagaaattgcttattccttcgcaatattgaatccggcccgtccatctgaaatcgggcggatccggggagtttgggtcttgcgctaacatcgaccgtcggattataatctagcggtccacatccggtactgattcgggtaatgaatgatcttatccgagcccttgaatttggatccaatggctcacgatggccgataccccttcggccatagcactttgcataagagcccccgtaatatttaagaatcaacccgcc

SEQ ID NO: 135729 - DNA, 374 bp, Zea Mays
ctttactacatattaagacagtaaaggtagtctgcctcccctcgttctgccgttctgccgtccatcgatctggaccgtccgtatcctatcgtgcgtctgcgtctcccacactccatccccctccaccgcacccaatccctaaccatcccccacacgttcctctcctctctctgccgcgttgcctgccccctgctcctgccgcgatagatgcctcgcggcccccgacaacgacgaccgcgccgccatggcctcccatcacctccacctccgccacaggcccacagggcgcaccctccccctcgccgtcgccttgccgcatcaccaactacccttcgcatccgcctgtttctaggagtcaaacgcgagcacctctg

SEQ ID NO: 135730 - DNA, 554 bp, Zea Mays
gttagtccatgtgtttgtgttggtcgtcaaccaccaaaattaattataggaaatggttaaccctatttccctttcacttgtcctagacgagagtgcaaaaaggtatcaaggttttggagtggagcataactggactcacatatgtggcttgtgggagcttccttatgctaagtcattgattctgatgcacaacatcgacgtcatgcatcaaaagagtaactttttctaagccctcataaatacatgtatggatttcccggataaaatgaaagacaatgacaaggcacgcatggacttagtcgtgatatgtgattgtccaacccaagtgcttagagaaaacggaggcaaaccaaaagctgactattgtctgaaacctaagcaacgggaagaagtgatgaagtggatgaaggatttgaaattcctctatggttatgctgctagttttagaagatctatgaatttgaagacaatgaggatgaagggactgaagagccatgacttccacataattatgaaaaggctcgtgcccataatattgtgtaggtacgtttccg

SEQ ID NO: 135731 - DNA, 654 bp, Zea Mays
ctcagcttggcctccttggttcttggtcttcttttggattttcttcgtgggggcgagcttcttcagcttcttatcataatccatctttagggttcggtaggcttcacgggtgttggcctcctcgccttctgctatatcgagacactcttggagggacgccttctccttcttaagtgtcttgacctgctgctccaagctttccacacgggagtttaggtgagtgcagtgggaggatagatcatcgtagtggttatcgagagtgtggaggtatccggccatgtagacaatggtggggtcatcctcggtggggtctctccctgacagggcctgaagtcttttcctccaggtgggggtatttttgttgctaggtgggaaataacgaaggggggtttcgaagatctctctgctgtagttttggcatagctgtttaagggctttccgggcaacactttggcaagtgtctgggaagcggtgcccgatgaaggtgacttggaagggagggtggtttgggtagcttcggctttctcccaagtagaccgccatagagcacttctctattccattttcacggtattccttctagacatattcgtgcttcttgcggatccccatgcgtagttcgcaactccgtagaaggtgaggaaatccttcctc

SEQ ID NO: 135732 - DNA, 427 bp, Zea Mays
cagtgaaaaagtttttgtctgctccgctgctgtcttcagaattggctcttcggctgatcccactatggcttcggcagtagcgggatgatttggttcagcggcagaagaagacccttcagcaggcttcggcaccttggccgtttcagagtgcctgggccggtgtgtcaagactttaaccttttttcccttcggcgtggcagagattgccgaagcagcaccctttattttcttttcctgctttcgcgagtgataacaatagtctgggtacacaaaaccaattacatcaaaaaccatgtttaatcacttcttgcctcgtcctccgaaggccaatgtcatggcatcgtcttcgggccttgtgtaggccccgagcaattcgtcactagttgcctcaatacaatccaaccaatcatcgttcggctcatcaaac

SEQ ID NO: 135733 - DNA, 304 bp, Zea Mays
ccagcttgacctacatatttctaatgatataatcattttttccaagtccgacctaaaacaaagtcacccaactagaatttgacataacacactctacttattctattctagatcttattcaatctaatgtgagtcacttgacaagttaacactagtgaaataaacaatatcctactcctataaaccttgttctcccctcatgcacttaaacctaaattagtgcattaagccaactcaaaccgtgagtagaagagctaacccaaccaatagagttatgatgaattacataatctgtctatcccca

SEQ ID NO: 135734 - DNA, 815 bp, Zea Mays
gaatattgtggaagtggaagacaccggataaagccgaatcaagaatccccaagctaggatacgccggatagcgaatatggcggaagtaaataacttggaaaaaaaggaacattggaaaaaaacttgacgaggaagctgagacgacaaagaaactgatagaaacgaagcaggtgtagaaatgggcacatggaaacctcataacatatccaccaaaacagatcggaccagtaaagagagctcgaggggaaaatatgtgtctcactaaacaatcagagcggaggagtaagacggcagtatacaaagcgtttaggctgaagcgaagtagacgagcaaggcgacgaaagacaaagcgactaagaaagaatgatacagagatgaggaaagcgaaggaagacgaagcgactagaagaggaccgagggcggagggagcgagaagcatccaaaggcaaagtgtcagatctcagatggaagtcatggcactctccagaggagatcctcgtctttttttctttgtttactcgccactgatgcagcgacatatatgatttgtaatcgaacgggggacaactttctgatgacgtggatagtctggtcgttgccgttttgaaccagctttaataataaagaaataataaatcaatcaataataatgtgaccggctacgtacctgctttgcaattttcaagttctagggttgcagttgaacattggattatattcgatgtggcgatgaactgaactgataaaagggcagcactggccataataagacttctcaagttttaggattgctgttgcagattcgattcgatgtg

SEQ ID NO: 135735 - DNA, 562 bp, Zea Mays
cctctccgcgtggcctagcaccacttgggtcaaaacccggtgccgacccaactcacctccacgcggagccattcgctcggcagcattgtgccgacatgcggggcctccggtcaggcctccacctgcacgcgcccgagatcctcgtctcggcgacttcggttcagcctgtctggtgggaccgcgctgtcagcctcacaccaagttctccggttctcccccacactctggccaccaacgtgtgggcccctactatcagagtcctcctccaccatgggttgttgtcgtaactgaatcgcgcgtatcccaggggattcgacgtctcttctcccaatccaattcgtcccccttcatagtatatatatgcgacctcaatccttcccctcatgccatcgaagtttagtcacctcacgggtcgccaccaccatcgccgatgagagggagggaacgagagatctctgccgcatgcggatacttcgattcactatcgccgagctgtcggagcctggccgaggaggttcaccggtgggcaacgaaagcttttgtggcacgattgggcgtgaag

SEQ ID NO: 135736 - DNA, 340 bp, Zea Mays
gtcaacagcggaatctagtattgggagcgcgtcggagatggacgctggccgcaccaatgccgggatgggactcatccccaacggtactagcgctgtgcttgcctcgctagcccaagcggcgaagcgctgagctccggcgcgttgctctgcccggaggtcgtcaagtgtcttcctcaacacctccactgcctgggggcccggggccgactgcgtcgcctacgctgcctggaactggcggacctgcccctccagcgcctgcactttcccttccagacgcttcactttctcctctgcctcgagctcaagctcatccagcagcttgttccgccttgcccacatc

SEQ ID NO: 135737 - DNA, 516 bp, Zea Mays
ggaaatactcctttcttcatggtctacggttcggaggcagtgctacccgctgatctcaagtttggggcaccgaggctgatctttgaaaacatagcggaagctgaggctaccagactggaggatgttgatatactagaagaagaacgattgaacacagtgattcagtcagcacggtatcagcaaactgtgaggcgctatcacgacaaggccatacggcaccgatccttcgcagtgggagacctcgtcctccggtgaattcttacgggggaagggcggcacaaactgtcaccactatgggaaggaccatccatagtagcagaagtcactcgacctggatcatatcgtctcactcaaattgatgacacggaaattgggaactcatggaacatagaacatctcagaaagttttacccctagctatatctcaaaagctattgggacgacaatgtattctataaactgggaaatatatcatcaataaaaagacttcaaaggcactcaaattgttcactgtca

SEQ ID NO: 135738 - DNA, 554 bp, Zea Mays
ataatttctgatgattcttttgcctctgcttcggccagtggctcaaagggctccgggggaggagatagttcggctgtggtagaaaacgtaaataagttcgaagtcacaaaaataaaaaataaagttaaaagctattaagcaatacctatacgtctttcgagttctgcagctttttcctagcatcgtgagtatctttttcgctcttctttattatctcgtgagccatccctcggccaccattttcccatatgttagtaagaattttccaccaactaagcttgcttcggccgaggggtccttcgtatcatcaatagataaagtagcttcggcttgggccaaatctttcacatgatcgcaacctgatttttccaagatagccgcaattccccttgcacctgagaaggcgcagacatccccatggtcatttagaatctcctcaaaggcttcgacctcgctgctgatccattcaattggcccctcgggatcgccccgtacgaagttgtcttcacttgaatatgcgccaacattggcgaagctagtttttatttttccca

SEQ ID NO: 135739 - DNA, 887 bp, Zea Mays
gtttgatcaaagttcgccagagataattcttgtagaccaatgagggcagacaaagcaggagaaggaactccactactttccgcactggctatgtagcgccgactgttcttccgaatcagagggatttcatcttcttcttcctcctcattttcatcagcaacacggacagcacacccattggggtcggcgtcagatgggtcacacccattgggattagttttagtaaattcaggcacgagcacttcctcagcagcaggagccgaaggaccagcatcccgatccaagctagacacccggcgaagacgtcttttcttctttttctgcccatcagcaggagaagcaggctgattggctcggcaagggcgtttcaggcgaacactgacaggcctctgaatatccaaggctttactagcttctgggagaggcgccaccgccaatgttccagcaggagcggcatcagaagaatcctcggctaacatatcaagcataacacttatctctacatcactgggatccaaaggcacctcaaagtgaacctgtcgttcatcatcaggaatttcttcaagcaaagcaaccaaagcactaacttcttcggcagagggtcgcactctaaggcccaaaccgccatcaccagcaggaggatttgacatgaaatggataaaggccttagaaggaggcaagttccaggccgagtaggcaacaggggcaccaacatttgacagtttgcctctaagtatcatttcgagccggctcaccaagtccacagcaggaattcttctattggtgacccgggtggaatcagctaggcctcggtacagataggccgggtatgccctgtccttcaatggctgaatattcttgaagacaaagtcagcaaccacagcctc

SEQ ID NO: 135740 - DNA, 304 bp, Zea Mays
ggcaaagtgcgccctcacgcgccagcgttggtgattttgcgtaggggtcgtcggcgattcgaaaaacccgtaaagaatccttactaactattcacccgtgtctttgacatgtgcacttaggcccctctcctttctcttcttcgcaagaacgggtcccaaaccacggacggcggcgtgcacgctccagcgaacttgtattggtcgtaatacgcaacaatccatgctctaattcggtctatgcctaattctaaccttggcgctccaatgaggatcactaattgagcctggtcaccattctagagct

SEQ ID NO: 135741 - DNA, 390 bp, Zea Mays
ggcgacatcctcacatcgccccagagcttctcctatgcctgaccgaatcctcgctgagattcgccctgctcactccctcgctctctcgcaccctctgctacctgttctcgtgctcgcgccgtgtgttgtggctgtgccgctcaccgttgctctgcgccccgcgccggagctctgctcctcgccgttggagtcttctacgccctatgccgcgacgtcgacgccctactcgcgccaacctctgcgcacccaccctacatgttgatctcgccactccatgtgttctacgtcgccagagttcctgctctctactcgccgtcggcccaccatgttgttcttcgccggagttctctattcgctcgcatgacacgctcagcaactccgcctcgctct

SEQ ID NO: 135742 - DNA, 638 bp, Zea Mays
gtacaggggtccggtgctctctcgtggaggtccggacccactgatggcatcctagagtatatcacctcttctggtcatgtggcgtccttgggaccgctcatgtggtagagttaggtgttgttcaccacgcggccagagatagctgcacatgcacagtgtcttcatactgtagtaaggggtacccctgatccatggtaccgacatagtccattaagcttgtgaaactctctaacttgtctttcacgaaataattcccccccccatttgttgtcctcttccatccacctttttaccagcaaaattctacttcgtagcatacccttgcctagcaaccttatgcctccctttctccaacatctcctgctgtaattgggctaatgatgcaaccttatctacaatggtaggttgatgcatctgcaccgcatgctgaatctccaacttaagcccatgtataaactgtcacaaaaaacagttcatccaaccttgtgttgtgcacagcagcctgatatctggcatgttcaaactcatgcacatatgagtccaaagtatccacctgcttcaaatttctcaattttctcagagccttggcatacgcatctgccccaaacttgccctctactgctgtcacaaactccgtc

SEQ ID NO: 135743 - DNA, 519 bp, Zea Mays
acagaaatctcgtcctcgagatttgtaagaaaaaggattataccaaggttggtttgtaattgagattgtaatttctaattgattcaaaaattaagagtctctctctctctttttaatactatttagcaagtaattagaaatgcatgggtatcttttatgtttagacacacagttgggcaagaggagagatggtcagagtgaggttagctgatggtaagaagaacttggtaagggaagactccatccaaggtggtaaatcttgaatcatctcgagatctgatttgactcctattcttccatgtcgaggttgatctcatccttcttgctctttggtgtcttcatccgggattgggacaagaggctaagatagatctgttatgtaagtcaagttgttggatatggccgagttgatctaggtcaccaatttaggcttaagtgtatggacttatcctttgtaccagcattaagtaaccctcactagattagatcatactagattagataggatctagattagat

SEQ ID NO: 135744 - DNA, 288 bp, Zea Mays
gaggatgtgaaagggattattcaacgccctatatggtctcgcttcggcattaggaggccacacattgggaatgacatgcaagcatgtgaggcagctttcaacatagtgtgcacctatattggcacaagagacttggttcaagagcacattgcttacagagtatggcctcttgcaagtggatgggaaatgccgaaggaggctgccactggctcctgccaaaatggcctggtctatctcaagtataccttccgatacataagtcaatttgatgaaccaaatgatgactgg

SEQ ID NO: 135745 - DNA, 729 bp, Zea Mays
ccaatgaagattctcgactcagcagtccgaaggacccgcaactcagaagtgagactctgtaaggttcagtggagcagagatggagaagagtaagccacctaggaaagtgaggactctctgaggaaggaatacccttaccttttctcgagccccgtctgaatctcgagggcgagattcccttaagtggggtaggtttgtaacatcccaaattctaacccaggtttgaaaccctaatctaacccccccttttcttattatctatcccaaaactcccttagattcttcccatcatatgcatatactttgtttgattacgaacacctcacttagattttattttccagcacctagattatctactaaataaattgttcaaaaggaaaagaaacaaaaatggaaatgggaattagaaaataaaaggaaaagagaaagctctcctcccccctgctaggccgaatccggcccatgccgcggccgcctcccctccccatcgcgcccgcgctttccccctttcggcccattgccagcccgctctctcgcgcgcgcagccgctccgcactcccctccctctctctcgctgacgagccggccccacctgccagccactccctctcgcgcgctccctctcgctggcagaccggccccaccggtcagccgcttcgtcgtcttcctcgcgtacgacgcaccgtcgtcccctccatcgccgtcccctcgcccatcccctcgccg

SEQ ID NO: 135746 - DNA, 567 bp, Zea Mays
cctgtcccgggacctcattgtggcctagatcttacttggagggatctggaccccatccaagggacctgacatgcttacttgggagtctcggaccgtaattgggggtccgggttgtgcgtataggggtccggtgcttcctcgcggagattcggtccaactgatacatcctgggatgtatcatcttttctcgccacgtggtgccccttgagccgtccacgtggtggggtcgggtgctgttcaccgtgcagctagagatcgccgtacgggcaccgtgtcttcatactgtaataaggggtacccctgatttagggtaccgacagtggcccccagccccgcctcaggagtggatacgagcctgcaggtggggccaaagtttgattggcgattggctcgctgcttctgcacacccgttggtgtaattactgccggtccgcccttggtcgcgccgactgccacgcctgtccccgcggctgaccgacccgtgacctccgcacttaatggctttgttgggccatgcgtggggtgcctcgagatgctgcattggttttaacttctccgtcttctgcg

SEQ ID NO: 135747 - DNA, 462 bp, Zea Mays
gaacatctctattttcaatcatcgacggcttgcgttaccgcaccattaatgatcaaatctcgtagtaggagttacaagcgggcgagagagtaagtagaggctcccaagtcttttatcatggtggaggtggagctaagggttacatagtggagtcctagctaagtcttagcttgggcgggctccggcctctgggttctcgttggtgcgtcctcctcctgtttgttggtcctcatgggcgtcttctcgtctggggcccatcgttgtgggtgagtccgtctttctattcttggatcccgtggtccgagggtcaacctcttccgtttataggccgaggaaaggggttggccagcggtagctttcttaggaaggagtcaccaggcgacggtaaaccaagtgttctaccatgggatgaagccacacatgcttgtcggccccagggtcgcctcgttgtctcgtattctt

SEQ ID NO: 135748 - DNA, 707 bp, Zea Mays
gctggctgaggactcttctgacgctactcctgctgggacgttggtggtggcacctcccccagaaactgatataaccttggatattcagaagcctatcagtactcacccaaggtgcccttcccgagccaatcaacttgatccttctgctgacgagccgaaaaagaaaaagagacgtctccggcgagtatctagtttggatcgggatgttggtcctttggttcctgctgctgaagaagtgtctgttcctgaatttactgacgctgaactcgatggggggtgctctacctgctgctaaccccaatgggtgtgctccttctgctgctgaccccaatgggggtgctccacctgttgctgaccccaatgggtgcgttatctgtgttgctgatgaagacaactgtgaggaagaagatgaggtccctttgactcggaagaagagtcggcagtatgtcgctagtggtgaaagtagtggagttccttctcctgctctgtctgccctcattggtctgcaagaattgtccctggcgaattttgatcagactcttgaggatatggttccagaggatctgttatcagagccagcagatgatggtgtgatggaagtttgtgctgatgtgctcgatgatgggttgaggtcatcccgtgcctcatcgaccttagaacgcggtcttgagggtcaggagactaatttggatcatcttagtcccatg

SEQ ID NO: 135749 - DNA, 468 bp, Zea Mays
gcctctcgtctcagactcgctcctccactgctcagtccactccgtcagacccagtctctactcctcctcccacctcgccagctcctgcagctcttgagccttccaccacacccgctgctaccaccacctccaccactccagcttccattgctcctgctcccgcttccgctccacctattcctccacctcgctattgggagcgtgacgagactgaggtgcgaccactcactgctaatcctcgactgctcaaccttcaatgggccacggctgcagggtacgtcagttcagacacgtacccgtggactcgtggttgctagctcagagagacccagcggttgcaccactttttagcaccaggacccaggagtccttctttagggcacaattgtttgctcaaattgccctgagagctcaccgacgattagatctcactgatttttgtttagcagtcggtgcagagtcaaaggg

SEQ ID NO: 135750 - DNA, 480 bp, Zea Mays
tagtgcttgcagtcgagggatggcccgttgctcggcaggacgaggcggtcgttggcttcggcgctggagatcacccagtcggcgcgccagttttcccacctcgcgtcgccaaaggtggagatgtaggctacggccgaatccggcctcgtctgaaagtagtaggcaccaagatggtccctagccttcccagacttgaccagcacgaagaaatggcggaagagggaagtgcagggggccacccctatgaacatctcgcagaggtggatgaagatggtcgcttggaggatggagtggggcgtaaggtgctgaagctggagcccgaactcctccaacagcagcaggaagaaaggcgatatcggcagagccaacccacaggagacgcaggagacgaacagaacaaactccccgaaggcgagattgtcgaggggagcggcgccggtgcggatccttgcggcgtacgctggcgcactccacccaagc

SEQ ID NO: 135751 - DNA, 536 bp, Zea Mays
gatcgggatgctggtccttcggctcctgctgttgaggaagtgcccgtgcctgaatttaccgacgctgaccccaatgggtgtgatgtccgtgttgctgatgaaaatgaggaggaggaagaagatgagatccctctgactcggaagaacagtcggcgctacgtagctagtggggaaagtagtggagttccttctcctgctctgtctgccctcattggtctacaagaattatctctggtgaactttgatcaaactcttgaagatatggttccagaggatctgttatcagaaccggcggatggtgacgcgatggatgtttgtgctgatgtgttcgatgccgggttggggtcatcccgggcagcgtcccgcgcctcatcgaccttggagcgcggtcttgagggtcaggaaactgacttggattgtcctgctcccatggaagtgactgagggaccttcagccttagaggtggctgctgcagagaactcggccctcaaggatggtgttggtgctcacccagcccccgagggtgttgccggggg

SEQ ID NO: 135752 - DNA, 724 bp, Zea Mays
ttcacgatcatgcattttgttgcattgcaattgccctttttctgtatctttcttcaagaattcatggttatgctcatagtttaccagatcaatccgaacggaaataacattctctttagcatcatcgtagattttttttaagtttcatcccagccttgcactgtgttcgtttcaaacatgtgttacgtatccttggatttccagctaccctttcagcattctttccttccattgaacaattcaaccatttacaattcttccgctccctgtatttcttcaacgaaaatccaacctcgtatgcatattgactataaaaattatacgcctcgtccacgttactaaatgtcataccgaccttaggtatcaatcttatatcaatattgtccggctgcgcacagaaatttaacatttacgattcaatagcgactaaacctaacgtaatatgtgagaacttacgtggctttgaagaatatgaggtgtgtcctgttcatgcggcccaatatgtctcatggggatgtgcttctctgcgccgaccacgtctgccatttttgtgtgctcatcgatatgtccaggtgccctcaattccgccggaggagtaacagagacaccctctgtgtatggggcgatcgcagacgctacgggatgcatgtccattgaaatagacgtacctgctggcttatgcacagatgatacaggtggcatgtcatcgccagttccggtggtg

SEQ ID NO: 135753 - DNA, 907 bp, Zea Mays
cgaagtcgccgtttgcccctccccttaacatcgttagtgaaaatcacaaacagttatgcatgtatactttaacatcttttcacacgatattgttacgtagtatccataaaaaatattacctttttattgtttgtaacactaaaaagggaaaaggttatgatatgtgaaggtccacatgtaccaaagaatggcctgagcgcaagtttttttaggccaagattattttttcacagaagattattcatgtcctgcacataaaaaggagtggtgcttgctccatgaccgaataaaagcaacggttaaatagttaaatgggaattacaacaattactcattaagaatgctcatggactcttggtaatctaagacttacttcctcgtagagtctaacacgtgtgtaatgccatgttccatcatgattataagaagtatccgatcgacgttgaacaattataaacatagagagcaaatcagatgtaacatttaaaaataaagaaaaagtatgggaaacaagacaatgtgcactaacttaaacttgtaaggtataattatgtatctcatgtaatcttgccgacgcaagaacgctagtattctcttcaatgcatagttgtgataatactacattgtttttattaatcgccactaaatctatgaagcccatattttaaaccccctctttgcgatatttttggatctccatcctagatgatatgaaatagtattgcaaactgtaaatagatataagtaaaccattgacaaaagaacacttacaaaagccaggaagtgattgagagaaatatcgagagcctttcacatatatgatagttatcctcgaattctagtcacatgtttttaacaccattgaagtagtcagtatctttgatgagcacaccaatacagtcctctt

SEQ ID NO: 135754 - DNA, 441 bp, Zea Mays
agattctattgtcttttccacgacgaagactcaacatacccaaccagagactgcctagagactaaagcaacaaaagaccgaatggctagggtcgtgccagctgacaaccaaagagtcgtcgctcacacctatcaaccccaacaatacaaccaacatcaatttcaaaacgaacaccactattacccccaacatcaaaaccccaacctctttccacatcaatggcgccttcaacaccaagaaattatagtgctgccacctccaccacctcagcatccaaactaacccctaccacccccaccactacctaagtaagaagacttcaccgatcaacccttcaggggagtaatccatatgatctttggagggtccagctccgagttcgaaaccaaacgacaaaagaaagaccactatcgaagggtaaaccatgtagccctcaccggg

SEQ ID NO: 135755 - DNA, 688 bp, Zea Mays
gcgatcgggattgtttggagtgcttgtacgggtaaatgggtttgtcatgcatagtattgtgacccttcataggtacgcaccaccgcgttagacaccgtggtgcgctaatggaacccttactggaaggcatttgccatgtggcttcgtggggcggtatggtgtccacaggtcccgctgtgaatatcctccaaaagatgtttcccctgttcgatcaggatgcagcgttaattcatcctatgtaccactttttgtatagttcttcgctaatgagaacaaatgacttggctcgtcgatggagccttcgtgcttccatctcatttgcgaggagcgagccattggtcaagtagttacgatatgacgttcttcaatctcctgtgggacttgccgaggcgtcttcgcccccaatgacaacaacgagttcatgggttggcgggctggcgctcaaaggttgcctgttttctcggtgggcttcgtcgtaacgagtggtcgactcaaagaggtcagtaacaaaaacccctagagggacggtcatccaaccagacaccatctttgcgagggcgtctgccacttcattatcctattagagaacaaggtctagctcaaggccatcgaatttgtcctcgagtcatcatatcttcaaatagtacgctgctattctaggatcacgacgctctgaattcttcatcac

SEQ ID NO: 135756 - DNA, 451 bp, Zea Mays
ctggataatgccctttatgtcaggccgctccttcaaattgttcttcatataaaaccattctttggcccagccatccggccacttactccggtacgcaggagccgaggacatggccccccttcggtaagcaaaattgtaacagtcgaagttgttatgaaggccactggttgcctttgtctagaaatgtaactcatgcacttggcaaaacgcctcacacagagcttcggcgctaacttcagtaccttgactccgcacagcccaaataaaaatgcctaagcgcactatggcgtttggtgtaagctgatgaagatatatgttaaacctcttcagcacagcgactactgtcttatgcagaggaaatttaagtccagcctttaaaaagctttggaaaataacaacttcgtctttcctcggttcagtactaaatcatcaccactcaaccgaacccaat

SEQ ID NO: 135757 - DNA, 492 bp, Zea Mays
tattatgcgcctcatttggtcccgcttcggccttcgaaggccaaaggttgagattgacaaagctgtcgaagcatgccaaaaggctttcggtactgtttgctttttcattggtacaagagatttaatccaggagcatatagctttcagagtgtggccgcttgtagagaactgggaaatgccgaaggagactgtcaccaagtctggcgaaggtgagctggttcgattgaaatacaccttcagatacggagataaatttgatgaaccaaatgatgactggctgaaatgtatcgaagctacaagtgatgaactccttgggacgtattccaaagcggaagataatgccttatccacatccttcgggggccgaggaaaaaagagattaaacagagtttttgatgccattggttttgtttaccctgactactgctacccgctgcgaggacggggaaagaagaggaacgctgctgcttcggccaaaattgctgcttcggc

SEQ ID NO: 135758 - DNA, 1199 bp, Zea Mays
tgcaggcatttgtggagctgtgacacatgaaacacattgtggatatctgacatggattctggtaattcaagacggtatgctgcaggtcccactcttccaatgatggggtaggggccgacgaatcacggtgctagctttcctttcacttggaaccttttgacaccacgcatcgaggagaccttgaggtagacgaagtatccttcctcaaatctgagttctctccgcctgttgtccgcataacttttctgccgactctgagcttcaagtaatcttttgcagatcagggcaactttctcttcggtctctttaacaaaggcaggtccttctagtgtcttttcccctacgttggaccacatgagaggggtctagcactttcatccatacaatgcttcgaacggtgacatcttaatactagcctgatggctgttgtatacgagaactctgcataaggcaaactggactcccagtttctgtctaatgttaacacacaggctcttaataaatcttcgaggaccttgttgaccctttctgtctgaccatctgactgggggtgataggcggtgctgaagtctagcttggtgcccatagcttgctgaaggctcatccaaaatttggaggtgaactgggttccactgtctgacactatcttccttggaatgccatggagtctgactatctctttaagataaattttgagcaagggtggctcctccaaaggtagttttcactaggatgaagtgggctaccttggtaagacggtctattattacccagatcgagtcgttccctttttgcgttcggggtagtccggttacaaaatccatgcctgtttcctcccacttccattcgggcactagaaggggttgcaacagacctgcaggcttctggtgctcggctttcgttcgctggcaagtgtcacaccaagtcacatactgtgctatctctttcttcatccctctccaccagtatctggttttgaggtctaggtacatcttggtggttcctgggtggatggagtaggctgagttgtgagcttcatcgagtaggacttctcgtgcctctccttttggtacacacagatggttcttgaaccaaaggactccttgttcatctgtcccgaggtccggaagttgttctttgtgagctttttccataattcttgctgtctccgcgtccaggcgttgagctttgcatatgag

SEQ ID NO: 135759 - DNA, 752 bp, Zea Mays
ctaccttccaacgggcaatgaatgcaactttatcatctttattgcgccgttgtgtgttggtattttttgatgatattcttatttatagtaccagttttgaacagcatatcgagcatgtgcagttggtcttggaactgttgcgaaaggatcattggcagatcaaactttctaagtgtaaatttgcacagcagcagttagcttacttggggcatataatctctgctgccggtgtatcaatagatccagaaaaaattaaggcagtggctaagtggactagtccaaccaatgtgaaagaattaagaagttttttgggattggcaggatattaccgacggttcgtgagaaactttggagtgattgcaaaaccgataacgtcacttttaaagaaaggagtcttgtttgtttggacatcttctcatgaatattcgtttacagctctgaaagaggcattagtgtcggcccctgtattatcattaccaaatttcaatctaccgtttatcttggaaacagatgccagcaacattggagtaggtgctgtcctcatgcaagccggccatcccatagcttatttgagtaaggcattgtgtcctcgcaatcaaggcttgtccacatgtgagaaagaatttttggccatcatccttgcagttgaccattggaggcattatcttcaactcaaggaattcattattcatacaaaccatcgaagtttggcacagttggatgagcaaaggttgcacactccatggcaaaag

SEQ ID NO: 135760 - DNA, 792 bp, Zea Mays
ggctgattgtctcggcaggaatgcttcgggcgaacactgtcagatctctgagcatccaaagctttgccggcctcagggatgagcgccaccaccagtgtttcagcaggagcggcatcagaagaatcctcagctaacatatccagcatggcacttatctctgcgtcacttggattcaaaggcacctcaaaatgaacctacctctcgtcgtcaggaatttcttcgagtgagacaaccaaagcactaacttcttcgggagagggtcgcactctaaggcccaaaccgctatcaccagcaggaggatttgacaagaaactggtaaaggctttgggaggaggcagattccaggccgagtatgcaacaggagcgccgatgttcgacaccttgcctctgagtatcatctcgagccagctcaccaagtccacaacaggaattcttctgttggttacccgggttgaatcagccaggcctcgatacagataggtcggatatgctctatccttcagcggctgaatgttcttgaaaacaaagtcaacgaccacagcttctgcagtcagacccctttctttcaacaatccaacttcagctagcagagcccctgcctcagccacctcctggtctgtgggggattcggtccagctcgaagtgcgaacatccggctgtctccctgaccgtggggggagggaattcccatgattctccatgatgagccattccaggcgccatcccttgatgctgtccttgagtgggattcagatgggtcagattcaagcaatagaaatcaaggagaccgcg

SEQ ID NO: 135761 - DNA, 275 bp, Zea Mays
gttaaacttgtcggtcttcaacccgggggtacccaatgctcagttatggagatccttttggggcagagcaatgaggcagttatggaggtatattcagctgaacacatctcagagaaggatcagtctattattcattccctgctggtgcccctgcaggacctacttcttcggttctctcatgtgtttgttgtcccccagggtcttcctcccgagcgtgactgcgaccatcacattccactaattccaggcgcacgcccagtccaaatgagaccctg

SEQ ID NO: 135762 - DNA, 323 bp, Zea Mays
tttgataaagctcatgacagacattcatggactagaagagatatggagggaattactgtagaaggggcaaataaaggccataatccaagtagtgatgccgaagatgagccataaaataaaaaggtgagtcatgtttgcttttgtcatcgtactagatttgctctgataatgtgaaatctgacaacccttattattacacacaagtaaactgaactgtattacacagcaagccggcttcaggacaggaggaccaccccggaattcgctctagcaggtggtgctgctttgctatctggaaactgtaaatggcttcttattatcta

SEQ ID NO: 135763 - DNA, 562 bp, Zea Mays
acaaaagttgtcggggacgggatggcgtgggccggccatgtcgccagagaaggggccgcccatcagggtgccgagcgcgaggtcggagccgagaccgggggcagggggcgcgcgcaacacgacgccccgcgtcatcgccgagtacggggtcctggattgggagcacaaccacgagcatgccgtgggtgagcatcgcctgctcctgtgggatctgcgtacgcagcggttggaggacggctagggggagggggctattgcgatggggcacagagttggggcgcagagttggggcacgatatcacctgttgtggaggcccgctcgtcgttgagccattgccgcagccctcgcgcggtgtccaccgcggcctccttctccccacgtcgttgtcgcctccagctcctcggggagagagcaatctctgaggggcggacctccgggcggcacaagcccagttagggatgggatacacacacactgggtgccggggcggtggtatcggtgttggtgaggaggcaaggagggaggaaagggaacatcagcaccccgatctccgtttggctg

SEQ ID NO: 135764 - DNA, 1052 bp, Zea Mays
gagaattacagaagaaggtccaaggctttgatgcagtctatcatgattgtgcatgtgaacaaggccactcatagcaccgttcagcaacttaagaacaaagtatctccttaactccaatttgtatgctcgatcgaaagggttccagaatggcgtccctccagatttttccttcaattgccttgcactagttacatttgcatagtctgcagcactatatctcccgtcatcacggaaggcgagccactgtcataaagctaagtcagtcttgcatgcattctgtggggagcctggcaacgaggtagttatgagtaatatacctgttctccagttgctgtctcgaaggcccctaaaagaaactggatgttctcgcatatgtcactagcatcactctgtaaatagaggccaaggaatagttttgtgtgcgtaaatatcatgtgtaagataatagttcaggcttgcagtttctattagcagtttatggtttacgtaacctgaagaaacgcatgagtccttaactcattcagtgccatcaaatcagcttcagaagcatcagcacgggctccagggtatacctttgtttcaaatcctatgtcttagcatattaagactgttaatatattcatgtacctatggcagagaaaggtaccataataaaatgaagacaaattgaaaggtcaaaagtgtatatcctactacaaataatcttttcaaggcactgtagaaccaaatttcaaggcatggcattctgctgattactaaaggacactatgcaactaaacttagcaaagtaacaaatctacacataccttaaatacagcccgtgtgcccctgaatggaccttgaacaactcttccctcataaagtctggaaaacaggatgatcaatgaatgatgggtactcctttacttcactatagtaaaaagtcagtatcagtcagaaaataacctaattgtcacttctccttctccaatatcttggaccctcaaccgttcgatctcttctggtgaatatccaagaccaaggtcttgaataccggcaacatttgaaggctc

SEQ ID NO: 135765 - DNA, 424 bp, Zea Mays
taaaaatgaggatggcaaactgatagctctcagagcatatcacagagcaaaaggattgtgcttcaaatgtggagaaaggtggggtcatacacatagatgttccaccagtgttcctttacatctggtcgaggagatgtgggaactggctatcgaaggtgaggaagcagtgggagaaactgaaggtagtatagaagagccaactggagagggtgttttggccatatctttggatgtagtgagtgggggcgaaggtaacaaatccatctggttatgggcatcgatccactgctagtaggtacttgtgcttgttgattcaggtagctttgcgagttttcttggtggtcatttgctaggagttatgctaggaattcaattgttgacagcaccaataaaagtgaaggtagcgaatggaaggacattgtgg

SEQ ID NO: 135766 - DNA, 357 bp, Zea Mays
caataacactatacctgcaaggccactatcatccaaccgaccgcaatgaggctaaacgactgaagcacaggagcagagacttcgcaattgtcgagggtcagctgtacaaaaagggaatcagccagcctatgctcaaatgcataaccaaaaccgaaggcatagaaatcctccgcgaagtccacagtgaacctgtggttcacactccggaccaagggccctcgcagccaaggtgatctgtcaggaattttactggaccacgataatctgcatggccaactgagtcaccaggtcatgcgaagcatgccagaagttctctcctcacttaggcaacccttcacaattcaccaagctcatcgc

SEQ ID NO: 135767 - DNA, 313 bp, Zea Mays
ctcggcaaagccgtcgattccggtagtgaagggaaccaaactttcgaactcgtatccttttctgcatgggttttggacgtgaagtatcagattgcgttggttgatcagccagtgaaacatccggggctttctagcttcagcttccaaacacagcggcttgctcataagctgttcttccgtaggacttaccgagaggatatggcaacatcgcagtgagctgacagccgcctgacacatacaccatcacatacagataactagcatcggttcctgatacaacacattcgtctcatatagggccattaacctccta

SEQ ID NO: 135768 - DNA, 1393 bp, Zea Mays
ctagtattgtttttgtattaaaaatcattttctacaatttattatctaatttctctggtctctcgactatgcgcataaaacagataagtatagggtttaatctgtaaatagttttaagactcatcactcttctgcgatgggtctcttttgcataatggcatggccgaaggggtaagaagcaaacagagccattggattaaaaggatacggtccagattagattgttttataaatctaaccggtacgcatccccagccgtgggattagagatctacgcttaggatttaaatacgtgacacggttcgtttttattcgtcaagattcgatccaacggcgcacatctcatcacgcgagcaggcacgccagattgaatcccaaccaataatcccaggacggacggtgcaggggcttcttcttcccttgccaacccgaggcagcgccgccgcaagccttggcggagccatgccggcgatgcgcccatcgtgaccacccgaggatcctaccctgcccatgactcgcctacgcgtagagatgacttaggtgaattcaatggcggcctccttaccttcaatcggtgattgcgtgatgcgggccacacggcgatgcggacgcctgcgccgagctacttaccggcgagcaatccaccacccagccgatccaatctccacccgccgaggtcctgagaaggtgcatcgtgatccgaagctccaagcccagctacgcctccccaatttgagagtagaccgaattttttttctcggcggcgacgtgagttttctggtccacggcggcgctcgcgattcgctgatctacgggtgaacgaaaccacaggacgccgcccgatatatatatacaccaggagggtccaacgatggccgagcaaccggagatcgttgcggagtttgttgccgccgagattcacggccggaagcacggattcggcggagatcttccgtggagatgaagaacaggcactggggcgacagaggggctgaccaggtggaacccccggaacagcggctcaagctacgggcgcacacgagcgagccactggtcgagcgggcccatgcggtagtggcgcggggcagggtagccgcccgcgcaccagcactggagactggggcccgcccgcaagtgacgacgggcgcgcaatactgtgactgacagcatcagcccactcgtcagcgtgatcaggcgcagcacgggggaagacgttgggccgagagtggaagggagttgggccggctgagggagaatcggcccaggcgtttttttttctcttttcttttcgtttctactttcttttttttaatgatttctatttcaaattcaaacctaattcaaatttgaatttcaaacacaattctaatgtggacagaaatcccatcatcat

SEQ ID NO: 135769 - DNA, 429 bp, Zea Mays
gacataaatgagatggcaccaagcgagagtgagagctagataggccaccaggatacatgatctgatgcttagagatatgaatgctcatattatgcttgatgttctagctcctccatcacttctagatgcactagcttcatgacctcataggattatggagagttaccatgagtagtggcagtaggaggactactacactcagcactatgggaatttcttatggctatgtttaaggacgacattttccccatgggggcaggatgtggctgaaattttccccgtggggatgatggggcaaggatccaaaacataacgaggcaggggtggggatgaattttccctacaaggatttgatgggaacccgagttaagagtcagatcctccccacgcaagatatgaaggttgaatctaacaaatcgtctcagtgtg

SEQ ID NO: 135770 - DNA, 511 bp, Zea Mays
cagaaacgccgggatgcggggtcgacgagggcactgctaccgcgcactccagcgacgccgcgacacgggatcatggtgcgctggcgggtgttctatggcgtgcaccggatgcagatgtcatggtatgcgggcacgggaggccttgatggcgtgaagattctcaccagggcaggtttcccattacagtgccgccatccgccatgccccgccaccttgccatcgcgcggtgttcgtgttgtgagcgagagggatcactagataaggtgcaggcttttcgtggagttggcaggatgagatggccaccgtcttctacccaattgctcgctgtgggcacggctccgccacggacatcatcacctcgtggtcaagggatgcgaccaccaaatagctggtaagaaactctacttcgagtccgccatcatctctgctttgcatattgttcgtttaaacggagtttgggcattggatttgtgggacggtgtcacgccagccatggcgccgccgctcggcc

SEQ ID NO: 135771 - DNA, 348 bp, Zea Mays
gtgttttaccgagaaaaacatccgagtgatctctgcgaaagtgagagccatccaatcaacatcatcactgttgttgctggcaaattaattgataacaacagattttggcaactccgctggggagcgatttctaatcgtttcacggcggcaaactgctggtgattggcgtcctcatcgccaatcatagtcgtggctatggaggacaagacaacaaagaagacggcgccagacaaatctgaagttcatcccttgaacgtgatcaaagtcatgatggaagatcttacagaggcggacaggaaggagattgaagaagaaatcgcacgagagatggaagagaaacggaacgag

SEQ ID NO: 135772 - DNA, 505 bp, Zea Mays
gatggatgaagaaaaggttgatgtcggcaatattgttaatccatcatttgaggttatggcgggtagtggttgttcagcacaaattctaagcaaatgcagtgacagacatgaattgggtaagagctgttatcaataactacattggagtaattgcaacaatattttttttgtttgacacctaattattctcttgtgcaccatagataataatgatggagagaatattaaggccagtgctggtaatgttgtagaacaatcgcttgatgttgcggcagtaggcagtgacccagttcatgtgtcggctaaagccgatgttggagaacaaccgagtaggctctcatatctagatttctaaatgctctttgtctgatgattactaaatgttgtcttataattttctactaaataatgcttttgtcaatgtattgatgttttttactcctcacacagatgtgactcccttgtcatccttggatgttcaaaatgaatcaactcaaataagttc

SEQ ID NO: 135773 - DNA, 292 bp, Zea Mays
ggaactttcccaggacacagcgcacagctccaggtggatggcggtttgaataccaaataatagaggggctcttatgataaaccgatcgaccgaaggggtacggtgcgctcacagccgtccgatctaaacggagcacccagattgaaacgcgcaacggaatacccatgatctaatcaagaccacccatcctaaatccaacggtgcggcttcaaccgagcgaaggggtacaccgcatcaaatctcagccgctcaactttgatcgaaccgcgcaggcgtatccggtcgacctctg

SEQ ID NO: 135774 - DNA, 468 bp, Zea Mays
gcggatcttgatgaggaggcccgacgtagtggttcctgatgacattgttgccgacgttaaggctgcctctaatgcttcgagtcaaccttcttcttcactggatcctgtggaaaacattgccaaccgagatgtttcgatgcagtgacatcaattataacatcctattcttctaaagtaatgactgtttttgctgtcagggtataacagtcatcctgaccaattatgtagcgtgctggttttggaacttttccttggcttatgccaatcgcttggctggttaggcatagtgatcaccttaggataggtagatatatcgtgctgacttttaaatcattgctgccttttgagttgattgtcctgctagtagggtatagtggttcccctaagccgagtcagcatgaacatgtagcctcgttttaggtcgttgccgacctaaggcgactgctccgttagtagggtatagtggtc

SEQ ID NO: 135775 - DNA, 476 bp, Zea Mays
tgatgattctgggagttcgattgtgtggacagaggagtcttcggatgaggatttggattactttgcggcattggatgtggctgcgacggaggcttcgccgcgtgtgatgggtgatgaggatcttccgggtgcgagtgttgggcataggcggcgaagggcggtggcgaaacggagggtgagtgagttgccgcgaggtgatagacgtcatcgtggtgaggtggaaggtggttgccttcgtgtggacggggctggcaagcgggaattgttgtcctcgccggctggggcgagtgtgggtgagggagagctgcgaagtctgtttgcgggtgaggaattgaggataatgttgttcaactatagggagatgggtatcatcccgaaggttgagccaatgtaatgtgtgatgccctcgctgtatgtatgtaatcatactcttgtgtgatgaagctgcgcgctttcgttgatcaggccgctcccgt

SEQ ID NO: 135776 - DNA, 579 bp, Zea Mays
ctggatcagccatcaccggagatgagagtattgatatgatagccttgaaaacagcacgatcaaattatccattgagaatgacctaagttgttcagccatcagttgatctccttttccatatacaaaatgtcagccaactttggtaacttatgttttttctgtcgtgtaataaagcttgtgccaaattttgtgccatccttaaaagaactcaacttcaaaaccatcgaagcaccctcaataagcttgtgccctcctgtactgttgcagatccattgaaacgtgtatagctagagtcctgaaaaacttgatcagatcataatgtcctgtgaatgaaccacttattttagataaaagagtatctactactcctagagcctcatgttgcgtctttgtccaattgtctatttgattctcctgcatgcatgctttatggagaacaatatctacaagactacaacctgtaaatacactactgcattttagtttggaggataaaataaatgtaggaagtctgcgcaaggaaagtttctcctacggacaattcgttttcacgaaaaggaaacgcgatcagaaccaaat

SEQ ID NO: 135777 - DNA, 276 bp, Zea Mays
ggcttgtcgttgtcgggttgcgctaacaccggtgatgtggtcaaatgttgcctcaatgcatggaaggcatcttcgcacttctgaccccaaacaaacttggcttctttcttcaacaattcagttatgggcttcgcaattcgagtgaaatccggaatgaatcttcagtaataaccagctaatcccagaaaacttcgaatctcacggacagtcgttggtgacttccagttcatcacttcttgcaccttcttaggatcaacagctatgcctgcctgagag

SEQ ID NO: 135778 - DNA, 441 bp, Zea Mays
cgcctcccacctccacgccccgcctcaccccacatcccgttcctttccttccactcgcctcccttcctcctccttccctccacggctccacccacatctccacctctccctctctcctatctctctccccgtctctccctgccgacgtccaggcttcgtcggtctgcgacctgagcaagctaagctaagctgcgtggggaagccaagccaccatggcagccgacgcggaagccgacgagctcgtggccgctgcggccggcatcatctgctcgatgcgcggggccgacctcgccgggtggacgccgccgtggttgcgtaggacggagccggcgcgggacggggagctggtgtggccggcggtggcgcgggggaaacgctcgcgccgccgctcgccgtccgcgggctcctcgggcaaggcgaggtggggcagggccagcccgg

SEQ ID NO: 135779 - DNA, 617 bp, Zea Mays
tccagatctgcccaaaacccaaatgatggaggacttcaagcagaaaaggccaagagacggaatcgaaggctttagtgatgtcaagcttcaaaagtacccttggtttgccttgttggtgaagcaatctagtagtctgttggaccaacatgaagttgtcttggatgaaacgacctttaataaaggcgctctgccttagagaaactagatcatgcagtcgttgggacaatctgttggccatcaacttggtgacaagtttagcaatgctgtgtaccaaactgataggtcgaaaatcttttacctcctaagccccctccttcttagggataagagtaacaaatgcagtgttaagtcttccaaactgcccaaattttctgcaccaaattgcagcaataacagccatcacatcccttttaataattggccaacaaactttataaaatctacatgtgtacccatctggtcctggagccttatctgaaggtagttgcattatggattccagaacctcattttcatcaatctgcgcatctaaatcagacaggtcatgagaaggtagacccaggtattccaaatcaacagtcaaggatctgttcgccttgcagcccaaaagcttgaag

SEQ ID NO: 135780 - DNA, 347 bp, Zea Mays
tgactactcaatctgttgagtgtgtttttcttggatacagccctgaacataaaggctatcggtgttatgattcatcttctcgtcgcatgcgtatttctcgagatgtgagctttaatgaaacccgacccttcttttacaactcttccactcattcttcttttaattccacagagtctacctccttcatgagccttcctcccatttctgaaatttcatcagtattaccacctactgtttctaccccagatgttcttattcccatcacaccaccttccacttccacaccatctcagtcttattcttccaaaccacctgttactcagacttacattcgtcgtcctcgctct

SEQ ID NO: 135781 - DNA, 352 bp, Zea Mays
ggccgatgcaagtttacaaagggtcaatcgaggttaggttcgaccttcgctccaatagtagcccccgagggaatggttcatcctaatcaaccgatcccaaagtctctatttgaaggggactaacactaccctcggtcattgtgtgaacttccttgggggagctgatatgaccattggaaaagacacggtaggtgttgtttgatatgctttttttcttttgcgataaatattgggtctgcgggactgctaccattcctactgctatgttgctttcgtagcacccgacctctctccgcctgcaaccatcgtgcaaaacctcttctctccaccactgcatcatcgtcaatgaccg

SEQ ID NO: 135782 - DNA, 635 bp, Zea Mays
agtcggcggtgatgccgaagaagcacaaggccatcgagggggtcggcgccgcttcgatcctcgacctcaaggcccagctctaccgcacccaggaggaggcccgaaaccccacagcccccggcgccgctgcttccggcggggagttccgccgcgcaaagatacgctccgcacccaccgaccctctcggggccaagaactccggcgttgaatcccgggcccacaagtacgtttcgtgtatagatttgcagtcagtttggtgcagatgttgtatgactatttgattgcagttttgtgtggaattgattgacctgtggcgatccctttttaggatttagatgccctagatggttaatatgagagctttggtaaagaaaatggggaacagatagccccttttacgataaaaacatatcccaaatttatttggttgcattttaatgttttggtttacgaaagatttttttatgtagcatatagaaaactaagaaaagaagcatttcgtcatcattgttatatgcttgttactttgtaaattcgtgtactccaataggatggtcgagcactaattgaccttgatcactctgcaacttgatgatttcagggaatgtgattcacattgtttattgaattggaag

SEQ ID NO: 135783 - DNA, 440 bp, Zea Mays
tgtcgaccacaatcgttgccgcaaagcgccgctgcgacttcacctcaacattgtgggagctcggagtcgaccaactgtgcaggaaggttcactggaaggtgaagatcgcgggcgtgagggatttggacctcgggaggtctcggtggctcagtgattgctcgccagaaatattctccaccacggattcgccccccatcgcggtcagagaccatcgtttcgttacctccggtgcgtagtctttgaccgtactcatcatagtctccacatcgtgtaccaccgtttgattccatggttgggacaagaactagctgggcggatgcttcgccagtggcaccgtcgtgctcgtgccccggcgttgtgtgccggcggtcgaaggagcaagatgagagagagatgcgagggctgtccatggccgttgatctggccggggccggctgaga

SEQ ID NO: 135784 - DNA, 1084 bp, Zea Mays
ggggaatagaaaacaaaagggatggaaaagataaagggagataaaagaaaaatagaagaaaacattagtgggtctcgttctcatttcagcccaactggacaacccccgctcagccaacacctcagcccatagaaccaaccgcgctcactaggatgcatgtgggtcaccaacatgcgggccccgcgggcaggcactcacccttgcgcacacggtaccctgactggtggggcctcacggtcagttaactaggcggacaacatgtcttctgttgctcttccgtcacgcttatgtgtggggcccactgtccagaatcgtcatctccaaccaacgcggcgggctcctgtacagtaaaacggactccgtaacaaactcaagcgaatcccgcggtctccgcctgagctctgcgcgcgcgtttcggagggccagggcgatgctgggctatataagtgcagggcgccgcaatatccccacctgcattccgccgctagtgctggagagagaaggtagaaagtgaccaggggaggaggaattgccgccgccatgggtacaagctcatgcggtcggtcggggcgcgcagacagatttgtgggcttcatcgggtccccaggaatgtactcatggcttcgggaggaaggattggacctgggtgtgccctgaaatgctcatcgtcgtgagactgtcgccgccggtagctccacgctgtgggcagctccactgccccgccatgtacggtaagaccagtgatctcaagttcaccatagcctcttcttcgggtagagacttctgggataaagtatcgcgctccaggaggctggtctggtggggctcatcggtcgccgccgtgggagtttggcgccgccgcctgtgctgactgggggaggaagaagggccctcactgtcgatccggttgcggacgactggatctgtgcgttggataccgcttcgggtgggagaaacgactgccgttgatcctagatcgtatggccgattggggcactcggggtatgaccgtggattgaaatccaatggccccaagtgcataccggttcatttaaatgataggactgatctgggacgtccagat

SEQ ID NO: 135785 - DNA, 361 bp, Zea Mays
aaactcacaagatcgtaccaataccactataaatatggcgacattgcttcatttctgaatagaagcgacacaacctcggtagcacctatcctttccatgaatatatggtagcacattagataagattattatgagggagctacaggtactggaggaaaaaaagacatgggaattggagacatcgagaaagaggcatataccaattgttacattccggatctattcggaaggatccatccggaatgacacacatcagagcgtgcctgtcctaagccgcagccccctctttcattgtttgacactggctgcaaaaaaacttatataagatcagaagtccgaaaatgtcatcacgtactcatca

SEQ ID NO: 135786 - DNA, 487 bp, Zea Mays
ttaaaattgttggtaaatatgtgccgaagacggagatgataaagagctaggatatacgaggttccaacgtcaggttgaaccgagtttttgaactgaatagcttgcggtacggtccttacccggagggggactctactgatgatggggacgactgagggaaacatgtgaagacccagtctgaagagggcgcctcgaaggagaaggttgtgatcgcaacgactctgaaaaggaaaatagatgtgaaaggtgcggagagggaaatgttcaggccgaaggccgctaggttttttgttgaggaattgatggggacatgtgctgggtctaggtaggttatgacttcgcccgaactccgggaaacatcttcgtgaatgttgaaggtgaccagggtcggtggaataggaagtaccttattccctgggtcgccgatgatgactattttacgtctcgtatggcttgcgagttgaaaatgtttccttatggaagaaac

SEQ ID NO: 135787 - DNA, 414 bp, Zea Mays
tatcaattagggctgactaaaacattcagaatattctctatttgtgcaaatatcgaacaaaattagctcacaccttcaaccgaccattccctcttctctctttaaaattagtatgaaggcaatgaggacatccaatctaccatgataagttactaaaaacaagaaacataagttactaaacaagcatgcacatcaagtctcaactactccaagaagcggccaccttgcaatcactagcatttgtttttgttgtctaaagctgacaaagctcaagtgtttgctacttgtcctccggctgggaagctccagcctgcaatatgaatgtagattttggagccatgcatgcctgtaggttgcagaataggagggagggagggaattgatcgcaaaaattgcctgatccaaaacgctgca

SEQ ID NO: 135788 - DNA, 530 bp, Zea Mays
agtggggtgtacaaaggctgataactgtagccttaattagatgcacagtatatttatattccactgtttgcaaagattcttgaacaaatatatttcaataatctaaaataaaaactaagatgtgtagccttatatagtcatggcccttcaaatgttgaatatgtcactgctgcttggcctctccaaatgaatatgtcacttatggataaacaaaatgttgttttaccctgtagacggttgacaatatgaaactgtcttagatgcggagtatattccacagtttgcaaagattcttgatcaactatatatcagtagtatagaataaaaaaactaagatgtgtagccttaggtgcggagtatagtcatggcccttgttgcaagattgcaatgcatgtccgtgcaaccgttccttcacttttatcgtattgcttatgggctggtggcaaagccaattgtgaagaaacttaatttatcatctttgaactcgtaggcccacttcacccccctacgccatgagctcatgatccctg

SEQ ID NO: 135789 - DNA, 768 bp, Zea Mays
tatgtgcaaaggggtacgcacttctaatctggactgcccatagccgatcggatgacccagaggtcaccactgtccccccgacctaaccgggtggcgccgccgagcccccatggtggagcaggccgtcggcgctctccgcctgatgccccaaacttggattccaagtctaatggccagcgcgcaacgtcctaaccttcctaaactcgaaaatctactacacgccgccgattaacttgcccagatccctaaccacggcgaaccgtggcaaaccgatgccagaggggctccagtgaccaattcctgtcccgtcaaagaataattccctcccccgcatgacactacacctcaaggattagtcaatgacaacaacggaagcgggcatacccgtggatttgttgtgatggagcgggtccacagcgtggggtggaaccgaggcgatgtcaagcgacagtgagcgatttcgatcgtgtcttgcccacagccacgactccgatctgtgcgtagagcaccagaggccccacagctccaccagcccggtctccgagcacgagcgcaaccccctccaaccccctctcacccttcctctttctttcgacgcccgcgagggaatcctggcgaacaaggggagaaggaggtgtccgactctggatatatacccagggaagagaagccggtgggcccaagctggtgccggcggttgcgaggatagggggaagctccaccacttgattccggcacggcccgctacatacccggcgtttgttacac

SEQ ID NO: 135790 - DNA, 562 bp, Zea Mays
atgcatctaattaagaaaccaatttcacctttatgttcctgataattttatgaacaaaacttgatctcactttctatatgaaatagttattttattttattttgcttctttctcactcagccaaccaatcaaaaattgtactagacctggttgaacagagaaacgaaaccaatcacacaagcgtggtccattgcacacattcccaactcagcctcgttccaaatcccatgcaggcttagttaataaatgaaaccaatcacgccctaaattacagtagagaccgggctgcctaagtacaatttagagcatctccaagagaaactgtaacacaaccccaaaagcatttatcatggaaaaactattctgagccctccaactcttatcttctcccctaaaagcttcacatcctgaatccgtggcccttccccctcatattttcgcgttgtctaatactccctcaattgtcccagcacatggcgcatttacacgctatatttggccacatgtttcgcgtcgccgaatcctcacgcgctcttgtcggtagaggcgcagtaaataaaga

SEQ ID NO: 135791 - DNA, 505 bp, Zea Mays
gaaaatctgttgcaaccgtccgctacgtccggctcctcactgcataaatataggagattttcccctcagatctcaaccccgtcaccttcgtcgccaagaacgtagagggagagagagagattgagatcacgttgtggcactgggagcaaggctgcgggcgtcgacgggaatctttgaaggaccagggagaatcactgttgggcatccgtgtggtcgtagtcttgcctggtgaggaagatcagccagagccacgggagtccacactatcgttcaagctacgccgcggaactactgtctggcgtggtcagcatcgtctacaccgtgatcgcgagtaagaaatcgccccgttaattttccacgggattagggttgtttagcgcctagccgctcagttgtttaggctccagaatgcgcgaccgagttgcgtagcaatggcgccgccgtgggcgcagccttgccggcgccgctggtgagttgagcgagggatcatgtacacaatcgttga

SEQ ID NO: 135792 - DNA, 501 bp, Zea Mays
gtctccataaactccatataggtcgcattcctttgctgattctggggaatacgaacctcagcctgattattctgatgatgggcgagttcccgtagaacccttgcattgtccacagtggcatttaccagcgcaacaatggcgtctaccagggtaggtggaattggcggtggtggaggattgaaattagcttctgcatcaccacacgatgttccatccccttccaaatcttaagtacgcataagcatctgaagtaaaacaaaattcatgaacatacattcataaccacgaaatatattatagagaattagtacatggagcattatttattacaataccaaaattggcatagtttacaaccctatgcctacaacagagatcgcgtcatcaatacacctgtcacactaaccctccgtatcagtagctacctccgaaacatcactaccacgtggggtctcaccactcagtacaagcataggagctgcttctatgtctaagtcggcg

SEQ ID NO: 135793 - DNA, 394 bp, Zea Mays
gccccactcaacgtttcttccttgtggctccttctcctgttgactctacgaacggaagcgcagccgccgccgctccatgtccagccgcacgccacgctcagcaccagggctctccacggccactcatggaaggctcgaaccggcccttcctctcccccattgtggtactgcgacgacagtttcttccattctctaactctgtccgtttcagctcccaccattaacgacgtcggcagtttctattccacgccatcaatggcgtccgtccctctccccatcgacgtcttctcccctccccaccctgtcccagctactcgtctcacctccaccgccacactcctcttcgcagtgcttgatttggtcttctcggagttctccactgccagctgctccc

SEQ ID NO: 135794 - DNA, 346 bp, Zea Mays
agcggcccgatcaaaatcgtgtgacccagattagatcaaccctggggtgaatcggtacgtggtcaaagctctcggatcaatgacccatgactcagatttgatcacaaaattatgcaacatggaccctcggatcaaaatcctgcggtccgggttttatgaaaatgggatctaatctcagtcaacaatcaagaacgaaatacatatctacatagcatagactatactatatatgtcatcaattaaacaattaaaccgttgcagtgcaaaccttgggggttgatgtgtagatatgtaattgggataaatctcagttcttcatatctacatagcatagactatattatat

SEQ ID NO: 135795 - DNA, 485 bp, Zea Mays
cccgagttaagtaagcgcgagcatgtcacaccttcttaagtcattgccgacttaagccgattgctccgttagtagggtatagtggtcaccccgagttaagtaagcgtgagcatgtcgcaccgtcttaagtcattgccgacttaagttgattgctctgttagtagggtatagtggtcaccccgagttaagtaagtatgcaggttgacagtgaacaatttgagtgcccttgaagtctttttattgatgatatatttcccagtttacagagtacattgtcgtcccaatagcttttgagatatagctaggggtaaaacttcctgagatgttctatgttccatgagttcccaatttccgtgccatccatttgagtgagacgatatgatctaggccgagtgacttctgctactatgaacggtccttcccatagtggcgacaatttgtgccgtccctcccccgttagaattcgacggaggacgaggtctccc

SEQ ID NO: 135796 - DNA, 768 bp, Zea Mays
gggatagtgttcgcggcaaattagagttttacgcacttattgcgctagtccggctgcacccttaggcgacttctgcgcggatagtcttcgtggaagacttcgatttttcgcacttgttgtgctaatccggctgcaccctttaggcgacttttgcgcggatagtcttcgtggaagacttcgatttttcgcacttgttgtgctaatccggctacaccctttaggcgacttctgtgcggatttgtcgcacgcgagggcggctgctgccgggcctcgcggtgactttgtattagtcgaatgtcgaagaccgttgaagcggtcttttttcgacgtggattttgcgggggatttttctcttgtatattacatgactccgcctcgttaaaaacctcaccccccgggaggaaaagagtgcgggccagaacaaaattgtttttacaaattacaagggcgggctggccctgatgagtcaaacaaaaaatttgcgcagattatcaatgttccaggaatgctctaagtcttcgccgtttggcgttgcaagcctgtatgcgcagggggaggccttcgactttacaatgtaagggccctcccacatgggctccagcttgcctctggactccgttcgagctgtccggatgaggacgaggtccccttcgctgaattcccttgggatgactgcctggtcgcgccatgcttttgtctgggcttggtatttgtccagggcctgcagggcgaagacgcggtctccgtcgatgagatccttcgaagttg

SEQ ID NO: 135797 - DNA, 553 bp, Zea Mays
gtttgttatggtgggtgtccagtataggcgtcgcaacaaggctggtagtcctaattaggaggctaaactggcttaggtgcttagcagcgctaagtgggctgttagcagggccctttaacagtagaataaagacgctaaaggccttttagggtaatatgtaataggaggttatttatactttaattggaatgaaatgagaggaggttgtgatcaacattatgttgatcagccgccgtccctgccctagttattctcctctcctgtcgtctttccctaggccgtgagaaccacaaccacctttcatcgccaaccgctcagggagcggccacccgccacacacagctacaacctaaggagaagagggcataccaatctggtatcaaagatgccgggcaacaatgacaacactgccagcgaagtcgcatctgctgtgacaacaaaccccccactagtgcagtcctagagcagaagattgacaccatgacgaaggccattgtcaatctcgccaccagggtgtccaatctagagatgcacgtgacataaatcgatgggc

SEQ ID NO: 135798 - DNA, 359 bp, Zea Mays
atcatgtgaaaggaacaaacaacacaccaccctagggagcagctgcagaagcagccagagaacataggcccttcgccccagctgcctcccaacgacttcttcctcgtctgcccaagcaaggatataggtgaggcaaggagacaatccatcgaagacacatttgttccgatgaatccaaatagtccaagcacccaggataataagggagttaaggccttttctggtgacacctgagaccacctctgaaacctcctcccaccaattcaaggaggtgaccgccggcaggggggctagggagtgaagcccaaatttccggaaaagctggtaccaaaagactctcgagaaggagcaagccacca

SEQ ID NO: 135799 - DNA, 596 bp, Zea Mays
cagcgccccaggcccccttggcgctgccagcgccgccactgggcgcagcaacgggccatggcgacagctccaggcgcttatctctagaggagatggcggatcggcgccgccaaggcctgtgttttaattgtatcgagaaatattcccgtggccacaaccgtttttgcaggcgcattttcttcttggatggcgtcaaaattgaggaggccgaggcggaaacgggggccgcggagaccgacgctccctgtttctccctccaggccgtggccggggtcgcgccaggggacaccatgcagatcgccgtcaccctcggtccggtctccctggtggcacagttcgactcgagaagcacccacaattttatatccgcggcgacggcgcaccagtcgggcattcccatccagcgccaaccccgcctcacggccatggtggccaacggcgaacagatcacctgcgcgggcgttcttcgcaatgcgccgctccacgtcgagggcgaactctacccggctgacctcttcgtcatgccattggccgggtacgacgtcgtccttggcacacgatggcttggggcgttggggccaatcgtgtggaacctc

SEQ ID NO: 135800 - DNA, 383 bp, Zea Mays
caaaaccgaagtcttccccaaaagactatccgtgcaaaagtcgcctaagggtgcagccggactagcacaacaaatgcgcaaaatcgaagtctccctcaaaagactattcgtgcaaaagtcgcctaagggtgcagccggactagcacaacaaatgcgcaaaatcgaagtctccctcaaaagactatccatacaaaaaccgactacaggtgcagccggaccgacataataaacgtgctagatcaagtgcacaagtcccccacgggcacggccggatcagcgaaggcacacagcctcatcatacaaattatagttacacacatacaacgagggcatcacaccttacattggttcaaccttcgggatgatacccatctccctgtagt

SEQ ID NO: 135801 - DNA, 399 bp, Zea Mays
gtttggctcctgttcgttgctggcaatgtctacaagcaggtcatagggctaggtcatgtcctcgcaatatcttccatgggagatcccattcaattcgagatctacctgggtcactcaagcattcactccagagggacagtattatctcctcgagctaccagcagcagaaacctcacctcggctctcttcaaaaggggcaggaaaggcatcctgggcaggcaccccctagttcatcattccagtcaaggaaatcttacctccaagctgtccagggaggccaggtcatggaagctcgctatcccggtgatcctcgggcacggcctgcaagagctgtctgtgctatctcgatgaccggattgatccgttgtcgtagagatgagttaatcagtaaggcggtgg

SEQ ID NO: 135802 - DNA, 272 bp, Zea Mays
ccaccatgtctcttgtccacatgcccataaacaaaacaattccgctaaaagaaaacatcgccatatcattgaagttggccttgctcttcttgcaaacgcttccatgcctttaaagttttgggacgaggctttcataaccgctatgcatctcatcaaccttctcccatctcgagtaatcaaatgaaaactcctactgaactcctccttgggcacaaacatgtctactctcacttaagaatctttggttcagcttgctggccaaatcttcatcc

SEQ ID NO: 135803 - DNA, 369 bp, Zea Mays
ggaaaatttcacagcatcgaaaatctgataaacgatgtcgcgccagattcccaggtctcggaccgtccgggtgtgggagccgaaccgtcaacgttgctaggaaagttctcctgattgattcggctgataacaaagccgatgcaattgattgaatgacacctataactaattacctacgaaatcctagtgttaggacagataggaacgttcgacgtacaactttcaagtacgttttaatgaatgatgaactctaccgccgaacggtcaatgatgtcctgcttaaatgcttgggcctaggtgatgctatattagccatggatgaagtacatgaggagatttgtggtacccatgaatcgactccaaagatga

SEQ ID NO: 135804 - DNA, 499 bp, Zea Mays
gggcgtatcaacatgtcggtgtggagagtcaacgagtccaccgcaaaattacgatggtgagacgacaataggcgtgggatagcaagggaaggcgacgatgtgacgatagatggcgacgacgaggcgaaaaggctatggcggcaagcgacagtcattgtcgtgttgcgacagctcgacgggacctttgtgagatagcgagggcaggtggcgctgtggtgccaagacagaatcccactaatagcctacccatccgccggtgcggattaggaggcaaagtagctgagctgcatacaggaccccgatgtggcaacgagcaccacaactcaggtggggagtggactgagtagtgaagcatcgagaaaaggttagatcaaagtctagttttcattaaatttagtccaatatagtatataaaagtttatttattttattgtatatctaagtctatttataagagtttacaaaaatcgaggtgggacagtggcctccattgcctatc

SEQ ID NO: 135805 - DNA, 841 bp, Zea Mays
aacgtgcctatgcaaaagaaaggtagtacccttagaaaatgtgaaacgaataaacgcagctccgtggaaatcacggtatacagagaaacaaaagagaaatatatgaatctccattttattaactaagttattaattggttaatgatgtttggaacttaaaaaaacagtacgtatgcaacatattgttgcactgctaatagtatttatggaatgcattgtactgttctaccgcaattggacttctatttgtaaacaggaaaaagatttggaaaatttggaactgatggaacctctacaaaagggacatctggaaaaagagacatgtaccaaaagggtgttaaacaaacgacttttggtaaataaggtggataaatttaatattacttgtaactcaggtgctaaggagcaaaaacagatgcattagaaactgtcaaacgaacaagcacaacccatagaagaattggacataaagatgaataagaaatatatgattactcatgcatttcaatatgtatgtaacatattgtgtcgttgttagtatttctttggcgaacagactattgaacacaaagtaaaccattaattgctgagaaaagggatctaaagcagcattgttcaattagtatggttagaaagaagacaataaaacaatagtagttggtaatgcttagacttaattatgtaaatgtaacttgtaaggtttggtttaccatctgttttagtttgcagttgtgaaacaagtatttgcaactcattttgcatgtgttggcatgtatggaatggtttggaacattctacaaagtatggtattcagagtttcacatgttctcttgacactact

SEQ ID NO: 135806 - DNA, 642 bp, Zea Mays
gcggacaagggcccagcccccgagtcaatggtgcggcgtaaagtgagctccatgtttgaattccgagtatagcaaagatgtagagtatcggtttgccaggccgattgctctataggaagggttttgaggtacccttttctgatttagcgtgagcatgttacaccgaacctgggtcgggcaccgagacccaagccgattgctccgtaggaagggttttgaggtacccttttctgatttagcgtgagcatgtaacaccgaacctgggtcgggcaccgagacccaagccgattgctccgtagggagggttttgaggtacccttttctgatttagcgtgagcatgtaacaccgaacctgggtcgggcaccgagacccaagccgattgctccgtagggagggttttgaggtacccttttctgatttagcgtgagcatgtaacaccgaacctgggtcgggcaccgagacccaagccgattgctccgtatgaagggttttgaggtacccttttctgatttagcgtgagcatgtaacaccgaacctgggtcgcgcaccgagacccaagccgattgcctcgtttaacgatggtcatatagagttcatgacgcctgttgtgacatgcacaaatctgagcgatctgaggtaat

SEQ ID NO: 135807 - DNA, 292 bp, Zea Mays
ataatatggggattcacttcttcactttggaggaagtgtgatgctctcattctcttatggttcttatgaaaagaactaatgtgcttttgtggcttgatgtgcaagcccaaaatgaatagcaaagaaaatcataagacatgtggacttatgagtatgtgtctacattatgttgtagactaacactttgtattcatatattttgcttgaaagcaaatatataagcacataaaaagggaagttcaatgagtatgacaaactcttttgtcattacactatacgtgatatagtgttg

SEQ ID NO: 135808 - DNA, 471 bp, Zea Mays
cggtaggtagcggctccaaacagggcacagtgactcgttgaggcgtgtcatgactacgatggcacgagtttttgaggtgtcggctagaaacagaatcgacgacgagcagctggggcagcaggctatggctagcagctgcttagcggcgcgttgcagtggctgtgggtgagagagcgcacgaatctagcaagtaagggaaaaggggaagggctcacgggcacagaggaagaagagaacgagtgcaacaccatttataggctaggcatgggagctaggacgacgccgaggatagtcaaggaggtggcacgaacggcagacattaatggctagagaagaaacaataggaaacggctgctgcgatgggaggagaagcgacgtgatgatgctctacttgaatgacgcaatatggagaggcgagggggttgcaggcgtgaagcggtgttttttttctccagagaaacgtacattcgc

SEQ ID NO: 135809 - DNA, 669 bp, Zea Mays
ctcccactgtgaaagatcgatgtcgtatggctttatcatgatagcgcctcagagtttgctggtacctagccgactgtattactgtattcaatcgttcttcttccaatatatcaatatcctccagtctagtggcttctgcttcggctatgttttcaaaaatcagtctcggtgccccaaacttgagatcagctggtagcactacttccaaaccatagaccataaagaagggagcattaccatgcaaagctcggctaggttgagttcttaggctccagaccacatacggtaactctctgatccactttcttgcgaacttttcattcttgtcgaagactttctttctgagtgcttccaatatcattccattagctctttctacatgcctgttggctcttgggtgtgctactgatgcatatttgatctggatgcttctttgttcgcagaaatcaaagaactctgaactagtgaaattggatcctaggtcagttatgatgctatttggtattccgaacctgaatattatgttttgtatgaattccaatccttagctgaagtcagagaagcaatgggtttgtactctatccatttagtgaatttgtcaatagcaaccagtacatgagtgtatcctccttgagctttcttgaagggtccaatcatatctagtcccca

SEQ ID NO: 135810 - DNA, 519 bp, Zea Mays
cgatccggtagatgagtgttgccctgtacgggcaacctaccttttcatattaaccattgtgtgaatgtctccagatcccagtcgccgaccatctgatctttttctggtctggcagggatggaccattgcatgcatgcatgatcttgtacagatggtgcgggatctgcatgcaatctgttgtgaaacatcacctcttcgccaaaagagatctcatttattcaagcactagattagtggttaggattaggtagtcagatttacccctagaaggtatgcccttttagaactgttatatgtttgttcggttgtttctttcgagagcagttgtgacccttcatcagggcaccccttcatcttgtgtaaattctttctcatatcactgaaaaagatagtttttttattttaccatgaaaaaatagcttttctattctacttattcatttacattcacgtttaacatgtcatcaacacttttgctttcaagaaacaaagagaacaaaggcacgaaggtcactgcac

SEQ ID NO: 135811 - DNA, 581 bp, Zea Mays
cttttcacggcggcggaaaaccaatttgggggaagtgagcaattcgggggctctggtgagtaatcggaggcacgagcaggtgtgttgggtgcacaattacatagcggagccgagggtgtgctcaatttatagtgcccttgagcggtggcccgcgaatttgagatggcgcggtggcggccggagagaaaagggtgcactggcgcaagcaattggtggctttcaccgtggcgagctcaccgacgatgatcgggtgggctaaggtgactcactgcggcgtggttaaagcaccaaggcacgcggcgcaaggtctcaaggtggctaactccagtgagtctatccgaagcggccgtgactcaggtgggtacggtggccggagttcatcaacagtgcgatatttcttacccttagtcgttatccatctgcgctgggcacgaatcacaacgacgggcgcgaatccgggcgcacggtcgccggcggtgagtcatctaaaactggcgttctgattcggacactgtaccattgaaaacctgattcagggcgcctcacatacagatttgtagtgtccagatcttggattttcg

SEQ ID NO: 135812 - DNA, 407 bp, Zea Mays
atttgggttgcgtcggtcgttttggaaataacggccgagtgatgacatggcacgccagcgttttagaaataacagtcgggtgatgacatggcacgccagcgttttagaaataaccgtcgggtgatgacatggcacgccagcgttttagaagtaaccgccgggtgatgactggacgctttttagaaatgacgtttggcccgggaaaaccccatatgtactgcactatcgcatatctcagcattctgtgccctagttttgcttttctgcatctaggtcttctctgccctcttgcaatactgcctccgctctgtttgccagtaaagttgagatggcgcccaagcggaaatcccagagttcgtctgctgcaatcattcctcctatcgatcccaacagttagttgtccttcg

SEQ ID NO: 135813 - DNA, 661 bp, Zea Mays
gagcgaaactcaacgaaaacactcaacggcggccccattgtgaagatgtcagtgaactgcaccatggtgggaacactgagaacctgaatgttaccagaagtgacacgcccacggacgaagtccaggttgatgtccacgtgcttcgacactgatgctacacgagattagtggagaggtagaccgtgctgacgttgtcgtagtagacgagggaggcacactagaggggatgtggatctcctggagaagctggcacaaccaagaggcctcggccacgctgttggccacatcacggtactcgacctctgcgctagagcgggagacaatagtatagcgcttggcggcccaggagatgagattggtgcccacgaacacaatgtaactggaagtggaacgatgcatgttgggatagccagcccagtcaccgttggtgtagaccatgagctccgacgtcggagagggtcggagtaggatgtcgtagtcgagagagccacagaggtagtgtagaatccgcttgagagcagtgaggtggggctcccgcggggtgagcatatgcatgcacacctgctgaacgacgtaggcgatgtagggtctggagaaagtcaggttctagagggcaccggtcatgctccggtaggatgtcgcatcgacgaccgagggcccg

SEQ ID NO: 135814 - DNA, 647 bp, Zea Mays
gcgatcaattattatccagatggaatcattccctttttgcgtccggggtagtccggttacgaagtccatgcctatttcttcccacttccattcaggtatcgggaggggttgtaataggcctgcaggtttttggtgctcggccttcgttcgttggcagatgtcacaccgggccacatactgagctatttctttcttcatccctctccaccagtatctgtttttgaggtctaggtacatcttggtagtccctgggtggatggagtaggctgagttgtgagcttcttcgagcaggacttctcgggcctccccttttggtacacacagacgatttttgaaccaaaggactccttggtcgtctgtcctgaggtccgagagttgttccttgcaggccctttccacaagttttgctgtctctaggtctaggcgttgagatttgcatatgaggtcttccagcattggtcttacttcgagactgtcgctgtttcccagacatgtatttagttgagctgattctttcttccaatcttctaaaaagttggtcccctttattccgaatggtttttgactgagggcgtctgctaccacgttggccttcccggggtgataatgaatctctaggtcataatcctttattagctccaaccatc

SEQ ID NO: 135815 - DNA, 527 bp, Zea Mays
cggaactgccagaagacgaaccatgtcttgtagtcaagacaacattgccagccacttcccgtcactctcctaggcatcctgatggattaaaagctattggaactggaagccaaatcgtatcaaaggcaccatctttagagcagactgtagacatcaccagcgtgcttgtgcattgggtcacctctatgcatatggggaccaacaaggcagacacttatctaagccacgtgtgcaccacatagttccggcccaggctgcctgaagacactgcatgcgtgttgccatgactactcccgcatgaacattgtgtcatggtgcagtgtcagcatagttttgtactgtggccatcacgctatcggcctaggctgcctcgccatggttagcaacaccatgcacacgtggcatcgtggccgcaagttctagccacctcgatgtggtcgtatctcggatgtggctagaccgttaagtttaattccgcaattatttcggtcaccaaagcgattaagttttagaacagactattcacc

SEQ ID NO: 135816 - DNA, 664 bp, Zea Mays
caagagtatgtacagtgagccctgggtgctcacgtggcagcacaggtggtttgaactgactagtgtgtctccaacgctattcggcatgagcatgcgatggcccagtaagttgatccggtgatacagtcgatatcgatggtgttgggtgtcttcgtcggactagagtacctatggtgttgggtctgtcttcatcgaactatagtacctattgttgtcgatctaggtgtcaaacattgggagataagtgtgatgcccatggcgagaaggctctagcgatctcaggaacaaggaagaagaatagaaggaaggcagcgcgaggaagcagaagctagaagaagataggagagaagcagaggtaggcagtagaaatgtttctgtattttctttcgtaatgacttctagtttcagttcagcatttatacaacctaatcttgggccaatcactagttacaaggctgtatatggcccaacaaaaaaaatcaaatcaccacacttatctactcaatacttcttctgttgatctcctaattctgtcatgcgccctgggtcatgacattcccccctcgagcagcatctggactccagatgatggcatcaggaaatcgatctttcaacactatatagtcttcccaagatgacatctctgctggaagaccgacccatt

SEQ ID NO: 135817 - DNA, 328 bp, Zea Mays
agggcgcacgaatcgcgacgccggtaaggatcgcggagcagagtttaccggtgacggtgcactgaacctggtgatctttgttaggctactgtaccatcaggaccttcatcagtctatctgacagagcatcttcaggggtgtttttcacaaatttttatgtggcaactccctaatccgtctgttacaaagttaatctcctatataccagctccaattcgaccataggaaccttggtcatttgctcactcgatcaggcttaatccgactccaacgttcatcggatcttactgtcagccaagttttagtcttcagcgatgattgacagtcc

SEQ ID NO: 135818 - DNA, 955 bp, Zea Mays
ccggaagagactgaggaacgagggacctaaccagtcctccctcaatggtaacaaggtcgaggctcccaaagggtacgatcgcctaggggacccagtctatgttgtgactgaccatccagtgcctgatgatgagaattatcaaaacacataaggcccctacctggggctccaattatcggtgtttcgagtaagcaccgatgattaaatttgtaatgcacgttctaggcccggatggcgtgcgaggtggacgcaagagttatactagtttggactaaatattcctactccagtcttcggtggcttgcgctactagtatcaagttgctcgtagtagggggtcacaagtgggcgagagagggaagtgttcccaagtctctagtgtgagtgtgtgtaggtcgggttcgtgtgttgtgagatagaatcctctaggtttgagtgcctcgaggctccaaaggtctcttactcctcatgtatctccttttcgttgttgagagtgaccctttcttttagatcttaaggaaggagcctcttacattgagggggactgttgtcaagatctttcatagtgctagtcctgtgctacttgccaacgtactttggttgaaaatgcttcgtgtcggttatgcgggcacaatgctttgtacccttgaaggtacccgacgttgacttggagtaccctagagttagtagtatagtgccattcgcaattgcgatgtaagcccccggacaggcttccgacatggagtttccattcgtaccctccactttcgccgaccctcatacctcatagtctgctagccatgccttcctctgccttctatgctagatttatgggctcaactattagcctagtttcagagaggagtggggtttgactgaaaaaggacgatcccacccttgccatatcatgccgactagagcatgatgacaaataatagtatggccactctaacctc

SEQ ID NO: 135819 - DNA, 517 bp, Zea Mays
tactacctcatcgtgtcgcgacctcctccatgtccatgtggtccgcgcgcatcgggggaactttgcagcattgtctctcttccccatccttgcctcctagagctccacagccgtgtcttcttcacccttgtcgcgactgtggtcacgattcagctctctgtgctcagcaaggtcaagttttggtgagctattagtgcggggaaagtggcccatgggcttgcagataggggccgggtgggggttcgccagtggcgaatgttgtctggggtggccggtggcattgcctggtgggggagagattagagagggaggagctcgtgggagaagaaagggaagcccaaggggctaagtggaaaagagccgagggttttttttttcagattatagctaggacctagaaaacgccatagaaaatttcataaaaatcatttaaatgcaaaaaatatttttattagattaggtgtaatacatgttgtacgagaccaatactagaaattaaatattcgcattgttttac

SEQ ID NO: 135820 - DNA, 291 bp, Zea Mays
gccatgtcgaggagacggttgacatattcgtgccactgcctcatggcccccggcgaggccatggaacttggtgggttacgcaggaactccctggctgcagataacgccccaccatgagcagccctcgatggggtcctggaggcctgtgtgggcgtgtgctgctgcgcagcgtgcatagcagcagcaccaggcacagggcgattggagactcttggcatagaagatgctgccccttcctccataaggaagtcctcgggagacaagtcgcggtgctcgccgatctgaaccatc

SEQ ID NO: 135821 - DNA, 1099 bp, Zea Mays
cgaataataaccagcagcccatactcataaactgtgaacacaaatataacaagccaataagcaacaagggcataagggataaggcataagggccaataagcaccaggcagccacgccacagagacagaggcacagtcgcactcgcacagacacacagttcacgacttcacgccacactactcactacactagacatttagagttcaagacataggggccattcggccagcatggagcagcccagcaacaagccaacaacaactcggccagttaagcagcaggagtgcaggaccagcaccacgcgtcgccagtcgccaccgcccaccaggcaccaggcaccagcccagctgtacagctcaagtccaagactaaaaagacaacagattaggatgcaactcagtaactcaccagctgtacagctcaagtccatttactcattttgtcacaaaaacaactcagtaactcacctatttaggaattaggatgcagtggaccagtggttgatgttgatggtattgtcctgctagacttgtttccttgtgactgggaaatagattcatccaacttgcgtttaccttttgcattgtcggcatattcttcaattaactctgaatggaagaacaatgtgaaatatcatttaaactaagtctcgactctcaaggagggatgcaacaagccaacaagtgaaataaaaaatgattacctgtttctaactctgctaatctctccatgtcctcctgaatatttattggagttgatcttcgcagccaatcttgagtacaaataagtgcttgcaccatgaatggagtgagggaggtcctgaaatcatcaagaattcgtccagttgtgctaaagactgcttccgaggcgactgtcgacaccggaattgctaacacatcacgtgccatttttgctaacactggaaatcttgatgaattcaccttccaccatccgagaatgtcaaacttactatcctctagttcagtatcttcaccaaggtacttctcaagttctgacttgttgctaccacttactgcaccatgtaacttcaactttttggcaagtagggatttcaccctaccgccttggctttgttttg

SEQ ID NO: 135822 - DNA, 319 bp, Zea Mays
gccgcccttagctgcttcatttcgaggctggctgagagggtgcttcctttcttcaagctcctgcggaaatccggtccattcgcttggatcgaagaggccgagcaagcctttcaagagttgaagcagcacctggtgtccctaccaatactggtagctctagaccctagggagtcgttgtatttatacatcacggcagccgtagaagtggtgagcatggtgctggtggtggaaagggcggcgcaagaaggccaggagcctgagggcccgagactagctacaggggtccggaccgtttagaggccggtctactacgttagcg

SEQ ID NO: 135823 - DNA, 301 bp, Zea Mays
cgggaacggaaagcgaaccgggaggaggggaagctggccaagaagaaagagcgcttggaccaacgggaggtggtcatcaccgagttccatgagaagttgaaagcctataatgcagtgctggagaagcagcgggataagcaggccgtgaccgaggcggcactgcagaagctgcagcaggagcttgatgacaaggctggcaaaatctcttttgccgaagaaaaccttagggtgaaggatgccttcctggagaagcgggcgatggatctcatccgataggagaaggacctcgcctggagggagg

SEQ ID NO: 135824 - DNA, 621 bp, Zea Mays
gtgagcaagcttattcacatcaaacttagaaaatgactctcttggatcaaggcaagcaaagcaagtaagcaattatgtggatacctcattgaagcgatgatcaaattctgttgtaatagagtccatagttgcatagaagatatcaacacggaagtaatgatcttgagtgatattgtttttccctccctttcttgatctaccaaatcttggtacactatcttccatatttgggattagaatatcatttttctggcaaaatgctttggcttcttcaagtaatggctcataaccttcacttcttaaatttgacaaacgtgttttcacatcaacaaccaaagacatggcttcaacaatattttgatccttcttttgcaatagaaaagataattcatttgttatgcgaaggatctgcaacatcatcttcatgataaaaacaaagctaaaggactccatggtatgcactaaacctcctgcccttgatggattacgttgatcatcatgtatgactgatagaacttctattattgggtcccacaatgtttcaatacgaagcaaagtcttatagtgagaacaccatcttgtatctcgaggcctagccaatgatgtttcttgatgttgtcc

SEQ ID NO: 135825 - DNA, 415 bp, Zea Mays
agtttgaccactggtgcaaaactggaacattatactttaactcaaggagtcatccgtttcaagggtaggatttggctgggagcgaacaaggaattacaccagatggttatgtcagcgctacatgacagtgctgttgggggtcattctggctttcctgtgacttatcgaaggatcaaaagtagctttgcatggccgggcatgaagcaacacattcgtgaatttgtgagtggttgtcaaatttgtcaacaggcaaaaccagagagggtcaaatacccaggactgcttttgccattacctattcctgaacaagcttggcaaacagtgaccatggatttcatatcagggcttcctccatccagcaagggtaactgtattttggttgtagtagacaagttttccaaatacgctcatttcc

SEQ ID NO: 135826 - DNA, 467 bp, Zea Mays
cagatgctaaacgtttttgcaacattcatgaattatcctaccaaacaaaggcaattaggaaagatcagtatcacaacaacttctgttgttacagctttgtgcactgttctgatgtgaggtatcctatgccaacattccgaaagaaatggttgggctcttggatgaagcaatggttctatgtcaaaaatgatctgagtgagagggaagatttgaagggtattatctagcatcccatacggtcacacttcggcattaggaggccatcaatcacgagtgggaatgcacatacattggcaccagggatttagttcaagagcatatttcctataaggtgtggcctcttgttaatgactgggagatgtcaaaggagaccgctgctgggtccagcgaaggtggtctggtctatctaagaaacacctaccactctaggagtcaatttgacgagccaaatgatgattggcttgagg

SEQ ID NO: 135827 - DNA, 370 bp, Zea Mays
ccgactcggaaacaacagacatgtgattacctgcgaaaggtaattggctgttgggatcgatgggaggaataatcgcaatagtggaattctgactcttccgcttaggcgccatctcaatctcgtcggtgaaccgagcggaagcgagatcaaagggaaacagagaaggtctggaagcagaaagtaaggcttaggctcagaaagcagaggcgtgcgatgacgcggtacaaatgtggttttcccgggccagacaccgattctaaaagtgcccagtcatcactcggttgttacttctaaaacgccgacgtgactcgatataactcatctgttatttctaaaatgctgacgtcaccggtcttcactcggctgttac

SEQ ID NO: 135828 - DNA, 489 bp, Zea Mays
cgctggagagcgcgcacgggcgcccgagagtgtatcgacgtcagcacagggtggtgccgtcgtcgtcacggcgccgaaggaggatagcggtggcagcggtgttgccggtgctctagtagccgtgagcacggacacgggtggcagcggcggcgcgtcggctgacaacacggcaaggaagacggtggacacgttcgggcagcgcacgtcgatttaccgtggcgtgacaaggtaagggggtggatgaatcaagtaatcatgaaattttgaaaagccattggtaatccaaggaactgtcatgatagatttgattgcatctagacatagttccgatcgaatcaaatgagtaggccaatgtttagcctttggggatctcgctgattattaggagtaccattgtattgggcatggttgtggtatagtagtagacaattaacaaaaaagctaccacttttcaattattttaggcatagatggactgggagatatgag

SEQ ID NO: 135829 - DNA, 365 bp, Zea Mays
gccgaccgtgattgtccccgtccttgtaggtttattgatacatactgacctgacttaaactaacgaagatcacggcgggagcagagcgatacgagtttctttgggggtgattaatcagtcagtatctagtgcaaatcccccgagcctgcaacgtcgtgcaaaatactgactcctttcttttgcccaaatttcaagaaatgaagtagccagatagtggtcagcatgttcagtgccttccaaatgtgtctagcccaaccgcttacaacacgacagaaagaaaagccgacagtgacaaaaaagcacacttcggcattttggcatggttctttgaatttatcttttctttctcccggtctgcacaaagg

SEQ ID NO: 135830 - DNA, 616 bp, Zea Mays
atttggcatgcacttgcaatgcaatgcataaaaagagggggggcaaaattacattttaaaaggtagtgaacctatgcgaccaagaggcaaaaaaataaaggacctataatttattttactcttcaatgaagtattttggatggccgaatatttttcaaatggttgatatgtttaaatctaagatgtactctctccattacaagttccaactcttgagagtcaaactatctcaagttcaagcaaagttactgagagaactataaaggtttacgacattaaataggtacaccataaaaatataactaataaagatactaatggtacttagttggtataataaatattatcattttattatataagtttggtaaattttacgatgactcaaatttaaaatttgaacttataatttaatgcggagggaaggtagcagtttgcactagggcttttgattttttgctacgttcacagatagcgccttaacctcagtcaaggacatagacacatagtattgacatagcattttatttgccattcaccccaaaatgatggcaacaggttaattgtttcatttaaaaaaaattaggagccctttctttaacctgttgggcttggc

SEQ ID NO: 135831 - DNA, 556 bp, Zea Mays
cggaagatgccttaagcaggaaagcccagtgcaactgtatgaatatggatgcaaaaatcaccaccctatgtgatgagttgtgcaagctgaacctagaagtcgtttcctccggtgctttgagttatatttcagtggagcccactttacatgagcagatagtcatggcacagatcggtgacaagggtgttcaagtcattaaggaaatgatcgaacaaaaggtggacaaatacaaatgcttccgttaggacaacaaagggattctatggtttggagaccgattggttgttcccaagaaccccgagctcagaaagaaaatattggatgaagctcacctttccaaattttccatgcaccccgacagtaacaagatgtatcatgacctcagatctttgtactggtagaccagaatgaagagggagattgctaagtatgtatctgaatgcgacacttgccagagagtcaaggccagccatctgaaggtagcaggaaccttgcagcccatccccataccatcttggaagtgggaggatatttgcatggacttcattgtgggatt

SEQ ID NO: 135832 - DNA, 531 bp, Zea Mays
aaagaagagctccccaaggttaggtgtacaactaacagagggaggcctcagaagtttttgaatttggatcaagctatatcttaatggaagggatagtttggaattgccaaggtttagctaaagcagaaaattttgatttcctgcaagatctcatcaaaaaaagagttgattttatttgcctgcaaaaaactaggaaaaaatgattttagcgcgagttggctagaggttgtaagttcgaataggaaatttatttggatccattctgctcctaaaggcaccagttgtggattattggttgggattgcttctgatgtcttcgaggttttagaacatgaagaaggtgattttacgctaagatgtctagtacatcacaaagataaagattttacatggaacctaatcaatgtttatggggttgctcaatctgattataaatataaattcctttgtgatttttttcctttttgttctagaagcaaagttcctcttatgtttggtagtgacttcaatattttgagaagagttgaagac

SEQ ID NO: 135833 - DNA, 1743 bp, Zea Mays
aggagcgtcacaaatgatcagactagctagagaagaaaccaaagactaaactctcccacagtcatagcaacattacaatgtggatgctgtgactggagtagaaaccaacaagtaactcatgcagatatagctcttttagtcatggaagtagtcaagatcgaggtggacattgttgaagccatagagggaggcgctagtccaaaacatcaacagaggcacacgagtatacataatcaacagcttctctctgacaaccgcagcaagacaaagagacggtcagatggcaaaggtaggccatgctactcgaacacattgacaagcactcacatgtccatctacaacaccaacagcgtcatcctggaggtggcagcagtaggaacagactctaagactcaggctgagactgagagccaaccagagtaacgaggaccaacagtatggatggcttcctggattggtggtaaccaggaagatggctgaaccacgagcagtgtcctgagagtcaacaatcaaaatgtcgagggatcggcaaacacggcaatgcaaccccgatctttggacagggaaaaaaataaaagaacacaacagcgtgacaaccaaccaccacagtggcgaccgtgcgtcctcaaccacggtgccctgacagccccaatggaagcagctccgtgtccccaagggcctccgccgcagctatgcgttcatgcttgttcatgctcaaaggcagcagcagtcgcgtgccgaggagggctgaggcagatcaggcacggctagagagggtgtggcaattcccgacgatggccacttagcaggacagcgtagagaatcaacaatgacaatagtagcgtggtaacccatggatgacggcgacttggcgagccatcctgatgatttgttgctgctcgacaataaggtggcagatcgattattggcgtattggcagtagtggaagcgttgactcaggatcaaaacctaaactcgtggttagtgaaagcaaacatgattgtgtataatgtgtggatatattgcattgagccctcgggaggtataaatggagtagaagacttagtaggtaaaacaccacctcaaaacacaggatttcaatatccttaccaaatatatactcgaacacacaggtttgaaatattggaagccggggccaaaaggtatatccatctcaagaaataatgagctgtgcttacattcccccattgcgcacacacatgtaatattgctatgagattagctgacccttactgccatggtatatccaggtctcacaggcttggccttacccaggctcagtgcttcaatggctaaaccaaaccatgtcaacaatgttaaaggagtaacatgttgattggattgctaatgttaattgggtagtgctggtgaagctccttttcactctaccgtaccacatgtaataacatatacgtaagacagcttcataatcccaccattgacagccaatccaaacgaagcccttcaaggaactaaaaaggcagtggtgttcattaactacagaccccttctgttcaaataaaattaccagtgaaactgaaaaacaaattctctcttttgtatgacctagaatatgaacctgacctgaagagttccagtttttattatgatgaaatatataatcagctttataaagttactaaatagtgaaaatgtgacacatatcaacttataaggataacgtgtgtgataggacaaatagagaaaattttcttaggtaac

SEQ ID NO: 135834 - DNA, 692 bp, Zea Mays
gcgcgtacaggctagcaacgccctccggcgaagacttagagcactcctggaacattgacaacctccgcaaatttttcgtcgaaccctcggggcccgcgcgcccttgtaatccatcaaacaatattatttcggcccacactcttttcctcccggggggtgaggtttttaacgagccggagccatgtaatacaccagcaaagcccccgcaaaaacaaaaacacagacgcaacgtgttgaaaaaagaccgcatcgacggtctttggcattcgaccactctgaagtcaccgcgacaggtagcgtagactacccccgcgtgcgacactccgcgcaaaagtcgcctaagggtgcagccggaatagcaagtgcgttaatcgaagtctttcacaaaaaagacactccgagcaaaagacgcctaagggtgcagccggaatagcacaacaagtgcgttaatcgaagtctttcacaaaaaagacactcgagcaaaagacgcctaagggtgcagccggagcagcacaacaagtgcgtcagtcgaagtctcttattaaaaacgctctgtgcgaaagacgcccaagggtgcagccggacaggcaggcgtacgaaaacggccaacaggccacattacaatacaagttatagttacatacacacggcgagggcaccatacactacattggctcaaccttcgggatgat

SEQ ID NO: 135835 - DNA, 455 bp, Zea Mays
caacaagtcaaagtgccccttatccactccaatctccttggggaggtgattaaccgaacaagcactcgggggttttgtcataggaatgggatcctacctaataatataggagttgcaactattagaggaaagcaagaatttaagagttagtctcctcgtggcgctacccaatgcccaccaacacaatgttggctctgatgttgtcacatccttcacctattctacgtgtcaacacttcccatgaaatatgagtcatccatttcccttcagttgtgttttgcacattagcaccttccaagtttggtcatgtattcattttatatgttccaacttgtcatgtagtacaatgtgaacaagaaatatgttaacatgagataatatgtactaccatggtttgcatagataaaaaattgtattatacactagtaaatctaagactgatttggatctgttgt

SEQ ID NO: 135836 - DNA, 483 bp, Zea Mays
ctaagtcacaaaaccagcagctcctgtaggtgtagaggctgcaacgcgatgaagtagcatgagcaattgggcttccgtagtcatagccaaactccattgggatcctctagtaccagcaccgccagtacccaatgaagaacggcccatcacgatcacatcaagcacaatggagaccaccttgcccccacgcacaggaggcgacaaaactgaagacaacatcatcggtggagtagtaggcggttgagaggatgaagaacgaacaaccaagatcgatgaagactgcaatagaccaacaacacacaaatgagtcctcattctaaatactagcaagaacatccatgagagagttgtagtgatgacgagcgagcaagtgagcacaaaggggctcaaactcatcacgaagtcataggttcattgaagcacaagtgcaaccttctaaccctagcaggaccagataagtatttggtgacagctaaaggccga

SEQ ID NO: 135837 - DNA, 518 bp, Zea Mays
gtggtgtgaaaacactatataatgtagttttatggtgttgttgagtttgattgattgttgggttacaacccaacttatcaatgtaatatttccatggatgcaatgctttgtgcctcacccctttttggctagtgtggctacttgctaacttgatcttagtatacaattgctttgtctctatagagcaaaggcaatgttgtaatgtctatgaaatcttgagactggtacaactcaagtgaatttgtaagatgacgtggatagataagtctaaccatgtttacctgatatgttttcttattgtgtgcaaccttatttttaacaataaatagggtggtttcaagtggattttatgtctatattatagttgaagaggcgtgcatgttttccttctatggtttgtttcaatagccataaaggctatgcataatttttagttgttgcaggctagtcatgtggacgatattgacaacccgttttatattttttattcgcgacgatatatggtagtttgatttttt

SEQ ID NO: 135838 - DNA, 850 bp, Zea Mays
cagtttgtatccccctgtagctcggtacctgggctgtagtgctcaaggtcaactgtccaagcttctctcctttgccatcccaacgagatcatatctgaatcccatcagaggtcattatcttaacttcccaacggtgtaggttgaaccctaagctctacctcagtaaactgagggaagaaaaaccaccactgtggcactgccccaactcaacattctttcttatcaccgtgattggcctgccaagcagtggcagacccaacacaaaatttaaggtatcagatatatgcccatgtttccttatcatgcatatatttctgattgaatggaaccaatttcatatcttaaagcatgtccttgggtcagcaggggggaagggggtgctgccgagaaggggctagggcatagggaaggagcatgagaaggggccgccaccaggaaggggttggggctagggcatagggaaggagcatgagaagggaccgccaccaggaagaggttgtggctagggctgagggctaggaagggtctggtcgctggggaaaggagctgggagtgtaaaacagtcattgccagtggtgaaattttttaaataaatatttttaatttgagaattatagagattagagaggtatcctgttggtgtggacattttagagagttcaacagctcgttgtgcattttaatgaagccgcatgttggtgtgggcattattccaattatctcgctgtcaaggaagctgctattttgagcctgccccctgcttcgttctcagttgtcaatagttgcagtctcatactctcattggactttgaggcaacatatcctctcctagatcctcaccagattacaa

SEQ ID NO: 135839 - DNA, 391 bp, Zea Mays
cttctaacgaaaatccttgcaaatagattgcagaaagtgataaaaaatctgatccatagaatggttttattaaggatagagctattcaggactgcctagcttggtcttttgaatatttacatctatgcaaacagacaaaaaaggaaatgatcattctgaaactaaattttgaaaaggcctttgacaaacttgaatataaagtcatccttaatattctacgttttaaaggatttgggcagaaatagatagggtgggttaaaatgatcatgagcttagacacgtctgctattcttcttaatggggtccctggaaaaatgtttcatcgcaaaagagaagttagacagggagatcctctctctcccttactttttgtgctggctgtcgatctgct

SEQ ID NO: 135840 - DNA, 514 bp, Zea Mays
tgagcacgttgcaccatcttaagtctttgccgacttaagccgattgcttcgtcagtagggcatagtggtcgccccgagttatgtaagcgtgagcatgttgcaccgccttaagtctttgccgacttaagctgattgctccgttagcagggcatagtggtcaccccgagttatgtaagcgtgagcatgttgcaccgtcttaagtctttgccgacttaagccgattgctccgttagcagggcatagtggtcaccccgagttatgtaagcgtgagcatgttgcaccatcttaagtctttgccgacttaagccgattgctccgttagcagggcatagtggtcaccccgagttatgtaagcgtgagcatgttgcaccgtcttaagtctttgccgacttaagtcgattgctccgttagcagggcatagtggtcaccccaagttaagtaagagtgctagtcaatcatgaacaagttgagtatctttgaagtctcctttattgatgacatatctcccgtttta

SEQ ID NO: 135841 - DNA, 473 bp, Zea Mays
ggggcagcatcagctggtcgggggtgctagtttagagatgcgccatgggaggaaatccgattatcttgaaatccctctcaaggacagtattaagggatggcgtttggagtggttcatcgttgagaaccacgaaaattctctccccccacggtcggggagacagccggacgttcgtaccccgagttggaccgagtcccccacaaatcaggaggttgctgaggctggggctttgctagttgaagttggactgctgaaggagaggggcctgactgcagaggctgtggctgctgattttgttttcaagaacattcagccgttgaaggacagggcttacccggcttatctgtaccgaggcctagctgactcaactcgggttaccaataggagaattccctctgtggacttggtgaaccgacttgagatgattcttagaggcaaggtatcaaatgttggtgccccagtggcatactcgg

SEQ ID NO: 135842 - DNA, 932 bp, Zea Mays
gcccgggccaaatttcgctgtggcggcccacttgggatatcggccttgtcgtcccctgggcgtgcctcaactgtgactagcgcagcgaaagcatgggggcccatttgtctgtcgcttggcgagggacgaagtgtcgctgccgatggggccatctcgtcagctccttcctcttgtgcgggggcacaacagaacgcgcgggcgccggtggtcctgttgccggaatgcacggaggaaaacccggggccgttgcaaccatcgcgaccttgcccttgtgtattaataccgatcacctcttccagctggccatcggcgaggacaatcgagacatcaccattgctgcagccgagtgcggagcgggagcagagagagaacgtagagagagaacgtgagggctgtcgccaagcgggtgttcgacactgccgcgctcggggcattccggtgcttgccagtgcgcgcggcgtggcggacgcgtccctggaagcggaaggaagaagaggcctgcggtgatcccgagatttcttgtcggagtcaagctgttccgccgaaccaacatcatagcgtgaccaccaaaacctaggtaacaatccgaggtatgtgttcccccacctgcttcgccttgatctcctgtacgctcggcgctaggcggaatgtagagttggggccgggttcgtcgagttatcgccgctgatgaggtgtgcggctgcggcggctctcaccgtcgtgcgtaacctcggcgagagaacgaagatagctcgggtccgtggatgtattgaccgacggcccagatcgatcgcgcgtctggaccgcacgatttggatccaagggtagcgtcgcgtgcattctgtggtgagcgtgatctaatccggacgctcgattcatcatccgacgaccagtgttggctgataccccttcgccgatcgcttttgcataag

SEQ ID NO: 135843 - DNA, 565 bp, Zea Mays
cactggtgcagtggtgtttactcgactcctcgctggtgctcctcggttcctcgctggtgctccttggatcgggttgtagcttgtacgcgtgcttgccttcgtcactgtctccggtctccgcctagtcgggatctggttgcttgtatgttgcccttcttggacatctatatttttgttctatactcatcctcctccctcgccatccttctatcatgtcccgttgtccagttgtctctggtggtcccattatctgctcctcgctccgtaccgtcgtctcgggtgctccagcttgaaaatgtgtgtttaatcgttcgtccttattcctataatcgtcttagatgtaagtttaattccatttttgttgccttgtaccttatagccgttgaggtagccgaaggcgactatctgttgtagctagaggagccaaccaagctcctcgggctcatggtcatagtcaaagtcatggaccttgatgtggctctagaggaggaggaggagcgttggctcaaggaccacaacgaggctgaggatgctaggttcttcattggtttcgatgacacccatg

SEQ ID NO: 135844 - DNA, 340 bp, Zea Mays
gcgaaggtaggtggtttgtggctcatgaactcccggtgcttgtcgcggggtggaactggtggtggtggaggaggcattggtgcttgttgttgtcgcatcattctctcttgacacatttcctccctcatctcttgcctttcctggcgcatctcttgatgttcctgccgtatctgcgcttgcattttcgtcatagtattggccatttgttgcagcatttgcatctgggctgcaaccacaggatcagtcccggccggtgggggatttggaggattcatctctgcttgttgttgtctaagcaccctctggttgtgtgggttggcaggtagatcaattcttcctc

SEQ ID NO: 135845 - DNA, 719 bp, Zea Mays
caaagcctaagcctgcccccatcgagccctcgagcctttggtcaccatatccttcgagcaccagtgcctcaatgatatcgggtgccacaaacatcgcaaaatattcaggagagtcgaaaccccaatctatggctctaggactaccgattggtgtgtcaagctagaggagcagatcatgactacttcataattcacaactgccccttatatttagccaactcgaatccggcatagttagagaacttgaggcctagctgcatctagggctgtgccaatctcgtagacatcttcgtcgagaacattcaaggcacgcatgtgagtcctggcaacccatgggatctcaagatttgccgacagaagtcagaagagacctttcgggattatatatggtgtttttcgtggcaatgtaaagatttgtccaaccttgccgacacggacgtcattagtgctttcatctcaggaacgatgagtgagactctagtgcacaagctagggcacaaaagccctcgcaccatgaaggaggtcctagaaattgtgacaaataatgcgttgggagaagacagtcatagcgatctttgatcgtcataaagaaaaaccaagcgcgtcgggagaagacatcgtcgttcatcgggaaaagaagaaaaagaaagataaacgatgacacaatgatatgttggttgtcgtcgctgactcaaaagggaagaagctcctcactgaag

SEQ ID NO: 135846 - DNA, 556 bp, Zea Mays
tgttgctggatctcgctgagctggtaataacaactccactggcacgtgacggaaacgtcaaactctggcagcagtggttcgctgaaaatcaaacagccaagggtccgcagcaagaggtagcacctcaatcttgtcacactcttggaaccgaggtggaggaactggtggagtggaagagggagcagtagcagtggaagcaggtgtggtggaggctataataggtgtggtggtaggctcaagagaggcggaagctggcatagtggaggaaggatgagtggtagtagtgactggggctaaggggccgaagcgagcaggagtggagtgagtccgagacaagaggcgacatacccgaaaagcaatctgatcagaggctatcctcagctaaccttcgtgctctacccgatctgctactgctgctgctgctcgagtagctctgtccaacttcctcttctttttgcctccctgctgctcaaggtacaaatccttgcccttgtcctgtctgaaaggacgaggaggttcctggtcatctcctcccccttacggtgtgacattcttc

SEQ ID NO: 135847 - DNA, 619 bp, Zea Mays
tggtgaagcatcaggtaccaaggtgatagcatgatcatattctctagatggtggaagagagttgggtaccttaaacacatccttgaactgttccagaataccctgaatgcaatgagggatttggtctgtctttttcaactcctgattagacactctctgcaacattgcaaaagcccacacttcattccccttgtgtcacttgcttagttgttcacaagaggtctcttggagttcttgcaaatccctaggcaccagcccttgtaatcttactgtgactccctcataactgaactccacccatttactatcccaagcacaaagcatcgggctaaacttctctaaccagtccattccaatcaccatatcataagctgtctcagggaggacaaaagcatcggcaacaaaagtgtggccacaacaccaccactctaactgaacaaccttcctgttataggtgatgatctgcccattggccaccttcacattgacaggatcaatctctttagtaacgcactgaactcggacaaaagccagttcactaatgaaggtattagagccgccagaatcaagtaattgaagcatcacttggtctttaatcaaagctctcagcctaacacat

SEQ ID NO: 135848 - DNA, 390 bp, Zea Mays
gcaactgctagatgaggtccacgctaggcaatgcgggatgcacgcagcatccaggactttggttgggaaggtcttcaggtttggtttctactggccaacggcaaagagtgacgcagccgagttagtccagagatgtgaagcttgtcaatacttatcaaaacaacaacatttaccagcgcagcaactgcaaaccatacctgtaacatgtccattcgcgtgctggggactggatatgattggacccttcaaaaagctcaaggaggatacacacatgtactggttgctatcgacaaattcactaaatggatagagtacaagcccatcgcttctctaacttcagctaaggcagtggaattcatacaagacataatattcaggttcggaataccg

SEQ ID NO: 135849 - DNA, 409 bp, Zea Mays
gtaggatagagcggatcgaagatataaattatgtgacatgtgattagtgttcttaagatgagatgtgcgaatgatcggttagtgttgcacttgtctagttgataaacgttgtcacaaataattgtgctaacattggtcattagaatgcagtgggcacatggtgtggttggatgtgataagtagatcggaagtatgggtttgtcgaagcactgtgatatcgaacgtgtatatcgaagtgcattgtagtggtgattgtgttaagttaaacggtaatgtctcgagtgcacgccacaatatggttgtatgcgagacaaggtaaaataaggtgtgctcgatatgaatgttcgatcgttgtaggtggaaattgtctttgcttaaatagagaggtggtgacatgccgaagtagtca

SEQ ID NO: 135850 - DNA, 702 bp, Zea Mays
gattgagagagcccccatctcagaaatgatgaggcgctctgggctggttgtgcaggaagaaactactgccgaaggtacttctaatgctgaagatgaaagtgataatgaaagtgaggatgacgatagcattctatgtccaactaagaccggccatgttgaatttgggagatccacagttaaagctgaagatctagttctaaagaagaagctaggatattttggagaaaaatgatgatgatctagttcgctttgctggagaggtgaacaattctagagctgaaagaagatgaaagttgtagtcttcaagagcttcttcagggcgggacttcggttccccctttatgagatgataggtgaagttttgaaaaaaatttgaaatctacttatatcagatgaccccaaacgctattgtcaggcttagcgtgtatatgtgggctcttcgaagccaaggaaagagtgccaatgccaaagggttctaccgggtacacgagcttcattaacagacgaaggcaagagctgacggtctgcacaagaacttcggatgctacaacttcacatataggaaggacacaaaggcccccgtgataggttactgtaccaaatgcccgaccgggtggacgaacgagtgattttacgtgaaagctggcgagaaaaaagggagaaactcatgagcatggtgatgagtccgttaagatagaactt

SEQ ID NO: 135851 - DNA, 445 bp, Zea Mays
acaaggaggaggacaatagccttgacatggaggatgatttctctctaagcctatcttcagaggatggtgggagccaaggtgaagatgaggttcaggtggcacaagttcataatacaaagagaggagtcaaaagggcaaagggtgatgttccattatctccttcaaagtgtaaggtcaatagggcgaagcgagccgattgctggaagtattttaaggtggtcgaagttcaatcaaagaagaagtttggggaaatggtgacgaaggccaagtgcaagttttgttacaaactgtatgtgtatcaacgtgggggtccaacatcacagctaaatcgacatctggataagtgcaccgcctaccaggccaagttggccaatgcaaaatcaaaggttgctcaaggtactatcagcttcgctcttgatgatggttctcttgttgttaatcccac

SEQ ID NO: 135852 - DNA, 342 bp, Zea Mays
gtcgccggtgggctcgacggcggtttgccgccggtggcccggttctcggtccaagggagggtggtttagcacgggcagaggctggcgattctaagggtaggctcaattcggccagagggggttgggagggggctgtccacggggaggtggcggagttccacggcggggatcgccgccggtgggctctgggtgagggactggggctggaagtggtgcttcgggttcgtggcctcgtgagggagctgcttggctcacttaatgtctcgctggaccacggagagggagagggaggaggggggaggactcaccagagagggggaagacgtcggcgcttcgcgaatt

SEQ ID NO: 135853 - DNA, 770 bp, Zea Mays
cagcacctcaggaagacttccgcctcgaccgagcaggggctctaatctcgataaacgtagcagggaatctcgacgtcatcccgtgcaaggacgctgacgcgccccgtaagcagcctttagcccataccctgacgctgttacaacaactacagtatgggcagcctctccctcgggggctcgggcgtacggacaacccctcggcctctgcctcggctctctacaggaaatcggtggacgcaagtcaaccgcacagtgcaccatcacgtcggcttgcagagcgccaggacatctccttcgaatgcaacgcctagcttcactgcggacgctccccttcatgtataaatagggcagtagggtccccctaagggacatccggccaacgacaggagacaaccatacgagcagcacaccgacgaacacttagttctccactcgatctactcagacttagatattgacacttgcctcaatcatttctagggacttggggacttcccccctcccacggtgcttgtaacccctactgcaggcacattggtgcaagtaatacaagcttcatccaccctctactagaagtagagccttgtgttgcccgaactaggataattgcttgtgtcttctcgcgcaccatctagagttcggccatgcagcacaatttactagttgggggtaaggacccatggttcaaacaccgacaattggtgcactacataggggcttatcgcgtgaaacacttttagttcctgccaagactctagatggcaggtttc

SEQ ID NO: 135854 - DNA, 279 bp, Zea Mays
cacatccaagaaggatcactgatgccagacattggtgtgggtcgaagttgtgattgtgggagttcagccatcatcaaagagggatcgttgttgccgaccatcaactgggctcgagatggatgttgtgggagtgcaacaactctagcatccatagaacctacagaatctcgacgaatcacatctatggcagcgtttaatgaagacctatgtcggctctttacctgtgtctgctctggtttccttcgatccatcctcacggaccgccgcacaaaggatttg

SEQ ID NO: 135855 - DNA, 486 bp, Zea Mays
ctgtacccaaataataaacggtggaacagattgaactaagaatccagaggacccgaatgctaccacaccgagtggagtactggagtctaaaaactaaggcaaccgttcccagcgagagtctagttccaacctgaagccagtgagacaggtctcacctaccaaacctgcccagaggagcacctcttttcaattcttgctggataaaatgaattatgaggcttgttgatataaaaatgggcgatagttttccatcagtccagaacaggcaggccccccattgtcatattcaacatctgctggccaacagaaatgaaggcagcaggttatttcacatgtatgccttgtgaaactaatgaggccgagattcacaaaaaaaatctagaaggtgtccaaaatacagcatcactacacataaatttcagtgatcaaagaaaacaggtggataaaattacaattaggattgatttggtgacaaggggatcacgg

SEQ ID NO: 135856 - DNA, 2141 bp, Zea Mays
cgcgcagcgagactccgaggaccgaatcaaagcacccgagccgcgacagaagaaaggccaccgcgctattgacttgcacagtcctcgtccttggaacgccggactgcatgttagctaccctatgcagtttaaccaagccgcgcgccatcgatcgcctgcctcactgcttcacaacctcatttagccaaggagctcacagaaaaaacagcccgtgacacgggcaccgatcgagagcgaaatggaactccgccatttccgctgctgcgcttcgcggcttctcctcctcgttaccctcctcctcggcttccggcgggccggtgcccaggacagcacaagctacaccgtccccgcgcagttcgcctgtgacgtgtcgtcgccgtgcgacacgtacgtcgtgtaccggacgcagtcccctggctacctagacctcggcagcatctcggacctcttcggcacgagccaggcccggatcgccagcgccaacggtctcagctccgaggacggcgtgctgcagcctggccagccgctgctcgtgcccgtcaggtgcggctgcgcgggcgcctggtccttcgccaacgtcacgtaccccatccggcagggcgacaccttctacaacctcgccaaggcctcctacgagaacctcaccgagtaccacctcatccagaatctgaacccggggtcggaacccaccagtctacagatcggccaggaggtcacggtgccgctcctctgccggtgcccggctcgcgctgagcggagccgcggggtgcagagcctcatcacctacatgtggcaagcaggggacaccatgtcccaggtgagcaagctcatgaacgccaccgtggacgagatcgccgaggcgaacaacgtaaccgccaacacctccgcctccgcgtccttcgtggggcagccgatgctgatcccagttcgacagcggccgcggcttccggctccgctctacgctgctgctgcagccgacggcaagtcccggtcgcgacgtcgggctgccgtcataggcgccagcgtctcggggtccctcgtcgcgctcgccgccttgttcgtcgcgatcctggcgcgccggaggtaccgaaagaagccgtcgatgcgcctgggttcacggttcgccgtgaacaccaagctttcttggtccaggaaccaattcggtcatgacggcagcaattccttcgcccacgtgatgaaaggaggcaagctgctcaccggcgtttcgcagttcatcgacaagcccatcatcttcgtggaagaggaaatcatggaggccacgatgaaccttgacgagcggtgcaagatcggcagcacgtactacagggcgaagctcgacggggaggtgtttgcggtgaagccagcgaaaggtgacgtgtcggcggagctgaagatgatgcagatggtcaaccacgccaacctgatcaagctggcgggcatatccatcggcgctgacggggactacgcattcttggtgtacgagttcgccgagaagggctcgctcgacaagtggctgtacgagaagccaccgtccgcgctgccatcgtcgtcgtgcaccgtggcaactctctcgtggggtcagaggctgagcatcgcgctggacgtcgcgaacggcctactctacatgcacgagcacacgcagccgagcatggtgcacgacgacatccgcgcgcggaacatcctcctgacggcggatttcagggccaagatatctggcttctccctggccaagccagccatggtcgacgccgccgcgacgagctccgacgtgttcgccttcgggctgctgctcctggagctcctatccggcaggagggcgatggaggcgcgcatcggctcggagatcggcatgctgtggagggagatccgtggcgtgctggaaaccggcgacaagagggaggcgaagctgaggaagtggatggaccccgctctgggaagcgaataccacatggacgtggctcttagcctggccagcatggcgagggcctgcaccgaggaggacgcagcgcggcggccgaacatgaccgaggtcgtgttcagcctctccgtgctggcgcagccgttgtcagtggccgacgggttcgagaagctgtggcaacccagttcggaggacaacatccggattgccggctcggtggcag

SEQ ID NO: 135857 - DNA, 599 bp, Zea Mays
gtgaaaagcggtatcctcggcctaagtgtcaaccactggagcaggtgccggcacagtatcctctggagctggacagtaggacccaaagaggaggcgagaggcctcaagagtaccctgaaactgtggtggtcaaatcagctgagcaaagatgtggcaaagatagtgagcatacggtagctatcgacgagcacgtagaccatccagtacggtgtcctcgatgtcacaaatgaggaaatccacaacatcaaactctgagtgagagaccagggcaccaagtagccaaagttggatatgagtagcagcctccctgtaacccatccgcggcagaagtgtccgtctcatgagctgatagagaaacttggccgctgtggtgaagtccaccggagaacgtcgcgacccatctgagaagggcggtcggaacaaagtcgcgacgtgagctgtaccaggagcaactccgccgtgagggcgacgaggaggaccagaggtgccataacacatgctgtgaagacgagtcgatgactcgttgaatccaaacaactgacgaatctgactggcatgaatggtaacatcctctcgctcaaatcggaatctcatccagt

SEQ ID NO: 135858 - DNA, 341 bp, Zea Mays
ccgagacaatcctagaacaagcttcaaatggatggttatggccctggcttagcctgaccacggtggcggtgaacaccgaacacaatttcatgcattccgggtaattgagcgtggtcaagcatagagggctgagccgacgagtatcacgagcatgtatgggcgctaaaacacgattaagaagagcaggagcggacctgggatcggctggccacagagcgctaaggattttcgcttgccggagactgagaagggggaaaatggtgtcgtgacggactctggtgaaattaggaggtgaggttggggctacatggtcgcaaagtgctactgattcaccgtgcact

SEQ ID NO: 135859 - DNA, 724 bp, Zea Mays
tcacgtcccaatcagcatttcccctaacttaattgtgcaaatggtgatctactctcttctatccacgagaaccgcggagactacggacacttgatcgtgttcccgacgattggtggactcccagtgcgaattggtgacacggtaagcatcccagagcaacaagagtgctcgaacgaaggagagtgagggatgaactgacctggaaagggctggccgcggtgatgtatggttcacggcggcggagagttgatttgggggaaaacccgaattgcggggctacggtgaacgagtggagatgagagtgggtgctatagctgcgtgaatacttgatggagttgaggacgcgctcaatttatagaccccgaggtcggtagctctcaatttgaccgcgatgtgttggcggccggagaagaagtgagtcaccggcatggtgattcgtggcctccttaccgtgacggccctcccggcggtcatcagaccagtatggcaccggggttgcgacgtggtaacaacggaggcacgtggcgttcggtcgtcggacagccaactccggtgaggataacttcgaccgaccgcacgacaagtggacatgacggccgaaatagtttactgggccggagtatccacgacggcgatatttctaagaacccgagcgctatccagttgctttggtcacaatcacggcggcgacggcacgaatcttcgcgcagggaggtcgtcggcg

SEQ ID NO: 135860 - DNA, 502 bp, Zea Mays
ggcctagtccgctgacctgtcgccggcccaccaaaaagagatggcaatccttccttccttcctagctcctttcccgactgcctctctactgtccgtgtcatgtcaagtcttctgatgatctccgtacccatgtccgtcttttactattcctcgtgagacggcttccagtgaaaaaaaaccgacagctttggcagctagcaacatttcgctttgcgttttgaccggtgcacttgccagaagccaggaaaaaagttttctcgtgtgttcggtaacggttgaagccagcagatcgatcgtgttcgcgttttaatcgtggtcattatggtgacaagacaggactagagtcaaggtgaggtagggtggccgggaaggctgaagcttatccacacagcactgtgtgtgaaggcatgcagctccatctttcacactctcttcctcacggtcacggccatggtcgatcgaaccgacagcatatatggcgtactacaccacaaagatcctg

SEQ ID NO: 135861 - DNA, 304 bp, Zea Mays
ggaatgcagataagagatcaagaaatatctgaagaacgaaaagatctgaggcactatggattcagatgtgctcgggtgaattggagattggaacaaccgcggcaagatagctatgagccgtgtcaccgttccgcgaacttggtcggagtctaaccggagatattttaccggcggtcaccgtggctcggtcatttcatcaccgtgtcactcgcgcctcactcctccctcactgtgctccttccttacgtgtttgccatgcgttaacaatgaacttcgtgaccacggaccgctagctgggtcgccg

SEQ ID NO: 135862 - DNA, 563 bp, Zea Mays
ctctgattcgccttcatctcaatttcattccgcggctagcatattagagtttggcgcactggggccagggattgacctcctccggtgtgtgctccgccgtgggggctggaccgccgccgtgtcatgtggtcagagggaggacgatgaactctcaccatcagatgttagttggacggtggtgattagaacagacgatacccgttcgctggagtcatctgggccgttcatctggtctcggatggatgtaaacgatgcgcacttattttaaatctaggccagaagttacgaatccgacggtgacatgtgagggcgggggtttagcatggcccgatctaatcctcgccgttcggatctaatccaacggccagaacggcccgataccccttcggcctgtaagttttgcatatgagtcctcaggttcttaaacaattaacccgccgtccatattaggggtgatctgagtcataggatttcttgcgcagtgacccctgagctttctggaattcggggcccagtccagaggacaaataaaaccagagaaatgcatttaaaaatgaattttt

SEQ ID NO: 135863 - DNA, 443 bp, Zea Mays
tgcgattcatgcccaatagcacgcagataacttcgtggggtgaaaggatcttgcgccaaggatgaagttggagcactgtggccgccctatcgccgtgcccacttgcaccgcgacatggccggacaatcgtcgccgtggctgccgccgttcactcggtcgcgccacaccttaggttgttttaccacgtcgcagtagatcgctatagatagcccctctgtcgccgaggacatagccaagtgaatgccacgttcagcggcctccgatgactcctcccttttcacaccgtaggctcttctccatccaaattcgtcgtactcgcggtcgctctctataaattgagcattcagcgtgcttcgttagcttgttacgcgcccagtgcatcgctcctcacctccgattactcaccatagcccgagtaatcgcgattgtccccaattcggttc

SEQ ID NO: 135864 - DNA, 421 bp, Zea Mays
tttacgtgaagaatgatttgaaggcaagggaagatattaaggaagtcattatgcgtcccatttggtcccgctttggcctccgaaggccgaaggttgaaactgatgatgctgcggaagcgtgtcagaaggccttcgacactgtttgctcttttatttgcacaagagatttagttcaagagcacatagccttcagggtgtggacgcttgtggaaggctgggaaatgccgaaggaaaccatcaatgattctagcgaaggtgatttggtccggctgaaatacaccttcagatttggagataagtttgatgaaccaaatgatgattggctgaagtgcattgaaactactagcgacgagttacttggggcgtattccaaaaccgaggacaatgccttgtccgcagccttcggtggccggagaaagac

SEQ ID NO: 135865 - DNA, 639 bp, Zea Mays
tttaccatctcccagggaaggccataccctcgttgtcaccaagacgattctaggatctcgatatagaaaattatcatgggcccaccaattgggaccctcgccttggggccccaaaccctggcctctacccttgtaggggcttggcaccgagtgatagtgacttgacattggggcaccccaaaggaataactacaccataaattttgtaagaagccactaaggggtctagggccatgggatgtccctggctagaagaatctaagtcttcgggccctcttgtgccttgaggcactcatgaacaatctaagcccttaggattcctcgtgccctcgggtgctcatgaagggtacgaatactcggagcaatccgaccacgacactagggccactgctggcctgaatatctctagcctcagattatgagcacgactaagccccgaaccctttggtgtctatagcctccaaaggaacaagggacttgatgcaactgagtgtaatcttatcacaagacgaaagggtgtgcttgggtccatcgaggcagtatggcctaaaatcaagaccccacaccaaaaggcctgctaaaaagtccatagcgttagcttatcggataagccttaggtgcaacacattaaatgtgtga

SEQ ID NO: 135866 - DNA, 769 bp, Zea Mays
gccattttgagctagatctgttgctcgattgatggttgttgctatagcataattgtaactggtatgaagggctgcaagtttgctactggcgaattagcaagtttttatgtagaaatctatgttctgtatgctacaagttgggctgtcaggggctctgaattgcatttccgatggtacagtatcctgatcggattgccagctcagtccctcgccgccgacgacctgtgcgcggattcgtgctattgccgccgtgattcgtgctcagatcagctagatagcaccgggggtcagtaaatatcacaccgtgggtatgctccggccactaaattactccgaccaccgtacccgagctagtcacggttgcttcggatgggttcgccggagattgccacctcgcggccttgcgccacgtgcccaggcatcttaccacatcccggttagtcgtgttaggcatatccggtgatcgccggagggaccgccatggtgaaagccactaagcgcttgcgccagtgcccctcttcctctccggccgccgcacgtcttcgaccaattcaccggccaccgctcacagactctataaattgagtgcaccgtcgggtccatagggtaatcacgcaccaagccaccaagtcgtgcctccaattgttcaccagagagctccaatttctcatttcccccaaatcactcaagaacaccgctcggtttgacctcaccgtggtcagcgaatcctaggtccgttcatactccctgttctctcgttttagcgtgc

SEQ ID NO: 135867 - DNA, 853 bp, Zea Mays
aacatgtatgttctcccgaaagagcgcccttctccttttagtaatttcagcattctctgtgttacgcgtatctgattttgaaaaatctagtttcagttcttctctaaatttcggagcagaagctctccacagatgatcaacttcagtaatggtttggcacacgggtgactatatctcatccataaggtgaaatatctccaaatatgtttcactaagggttgcaccataaatagacaaaagcaagaaaactaattctcttcatccactcaattggctattattctgttgtctgctcttaatatcatacagtacccttagtaatctgatggtttcaactcttctcttttctgcaatagaaatttctgccttattttcttccacgaaagaaaaatcaactaatttcaaaatacttggagctggctgtagcatcccccttgtggtgttacaaggagatggatacttagaatcttcattgcatgttattgtcgatacaaaattggagtgacccagtataagttcaagaatttcatcagctgagaactttccttgtgatagcacaacaagaatacatcgaattgcttttatggcgacaagatcattgaatctatgcaagagggacgatctgatgaattgagcaaggaaaggtattgatttcagctgatttagatagctttgaatctctaaagacagttcaatgatattcttgagaaatacatattccagaaaacagatgacctttcgttccttggtagagagtgataagatattgtcactcgatgggaaattcatgagtattttatccatagttctgaccagtatgctaataaactgtaagctagtaatacactacaac

SEQ ID NO: 135868 - DNA, 696 bp, Zea Mays
cccgcgccactgtcacgcgggcctgccctagcagccgctacatcacgcaccattccgtctcctggcacactgtctcgtgggacctctctgtcatcccggtcgcgacatccccaaccaagatcgtcgcacgcaccgttggttgtgcccgtgattcgagcgtggaatccgggcgttgactccaacaaatcttgcgtaaccatcgtccgcggcctcgggttatatgaatcgagcgccgcagccctaaactcgcctttgcgcgcactgtgtgcacgaccccgacttccatcgccgagctcagagggagagaaaagttgccgctgtcacataatctgcaccccgccgtcacccgaagcctaggatcgggccaggaacctgcgccgagctgttgtgaggctttccgcgacgctatcgggcggaatcgacgacggagcgaccagtaattgctcaccggagtgtgcggggtaccgccgagccgcctgaacgcgtgggcagggccatcaccgcttcataccgaggtaatgcgcccaccaacggattcgccttgacctcctctacgcttagcgctagggaatcgagaacttaacagctgggcatgtagattgggagtagggatgaaaacgggacgggtacccggaacgggtatcggatacgggtaccaaaacgggacgtaatttcggatacggatacaggtatttt

SEQ ID NO: 135869 - DNA, 412 bp, Zea Mays
ggttgagccagatgattccccagccagcaaactaagcacaacatctatctccgtgttgtcagtgctagctggcatctcaaaatgagtctacctctcatgatccggaagacttcaaagtggagcaatcagagccttaatgtcctcgggagagggtcgcactctaagacctagactaccatcactagcaggagggttggacacaacttggaaaatggcctgattagtggcaggttccaagcagaataggccataggagcaccaacatttgaaactctacccctcaagatcatgtccaatcgtctcatcagatcttgtgtgggaattctcctgttcgtaacccgggtagaatcattgataccactgtacaaataagcaggatacgcgctgtcctttaaaggctggatgttcttga

SEQ ID NO: 135870 - DNA, 830 bp, Zea Mays
cctaggtaaccacatcaatattgtagatctatggaaggagaataactttgctatagaactcatgccttggtaccatgaagaattctgagataaatgagcctgaagttggactgtcagactgcttgaaatctgaaattcagattaacagtgggatggcatggagttagggctcggatttaaacatgatccagtgcaagtttgagcatgattcccataacaaatttgtggctggtatgtagcactacaactttgatgcagagactcgggggtgtttccatagaaaattgggaggaatctggccctaaatcttggctgtcagacacactgaataagcatcgccatggtacagtgcctggacagatcagatcaaccgctcccctcgccgccgatgacttcgcgccgggatcgtcgccgccgttaagattcgcactcactggtaaccggatagcactcggggtcgcgtaaatatcctcgtcgtggatagactccggccaccgtaccatgttcaccgcagcggaatccgataacttcaccggtgaccaccgcctctcggccttgtgccgcgtggctctgcctttccaccgcgtcgccgtgactccctatagctgtcccatcgtcgccggggaagttgccacgacggtggacacgaattcactgcgccaaggttcttcttcatctccggccgccagcacggctcgaccgaattgatcaccaccgctcgctctccctataaattgagccctccaccagctccacaaggtcatcagctacccagcctccgagaatcgttagcaatcgttcgccagagctcgcgaattttgaattcgccc

SEQ ID NO: 135871 - DNA, 631 bp, Zea Mays
tatttgattcttgacatcatctgacacatctttccaatgtcggattgtgatgtcaagattatccctaactaagaacccaagtgcattccggaacttagggagtgtctcttctggagctaggggctgacctttcgggctcatatatgagattttatatgttttgttaggaaacttgttcagtcccctgtcacctctttttcggtcgctctgtgtccttttccttgacctctcggtggttgtatcgatcggtaccggtgcgtcttcgtcttagttcagcctcagtgcgtcttggtaatgtgccacagcttcatcaagtatcgcatgatattgagacaagacctcctattcatgtgtaatagacattgtgaaatcaactaattaggtatacacatacgaaactaaagatgtgtactttacctcacactcttgtggatcataattcaggtcaagatgtaattgacgccgagcggccctatctatgctaggacaagggtcggtaggcgtttcatatccttcatcacttgaatgttcttgagaaacacccttgttcatgtggtcaggcattaacccttggtccatgtttacagaactcattgagctatatatatataaaagattgcaacaaagattc

SEQ ID NO: 135872 - DNA, 451 bp, Zea Mays
ataatgttcggtgacaggccctaaccccatgaagtagtcttacggaacaccattggctttttcgttgacgttctcctcatcatcgtgttcgtcgtcgtcatcttcatcatcgtccccaaagtcgtccaggtcgtcgcctccgggagcaggggcttgaactgctggtgcaggcggtgctgaagttgacgatccagttgcgaaggctagtgactctaccaacggggtgggtgtaggcagaagttcctccgagctatcctccaggatgactccattctccacacaaaggcgagggagatccaccagaatttcctcgactaccattaggtagacaggaacttgccggggtggagggacatagttggtgttgactcgggtggtttgaagggtgcgaaccatctataagagagattgtcaactcatttgaattttaaagaggtaaggctaataaaat

SEQ ID NO: 135873 - DNA, 413 bp, Zea Mays
caactactacaagtcgcactacacgctagcgctctctgaggtacttccgaactccttttctaaagtgtccccaaattccttgcgaaggtcatcaaggctagctagggacatatcctcgacatcgaacaagttctctatcctggcgggggtggtgctggaggggctttcttcttccgctgagtctgacatccttggctcttggtcttcttttggattttcttcgtgggcgcgagcttctttagcttcttatcgtaatccatcttcagggttcggtaggcttcacgagtgttggcctcctcgccttctgctatatcgagacactcatggagggacaccttctcctttttaagttccttgacctgttgctctaagctttccacccaggagtttaggtgggtgcagtgggaggaaag

SEQ ID NO: 135874 - DNA, 624 bp, Zea Mays
atttctcgccgaagttatggatggtcgcagctccgcctcgtgtcgtggccaggaggaattactctgcgaatcccggtaagaaccatctccactgctaacccatgttcctaatttcgtgtagcatcgtttgattaggaaatggagcattcgggtgtgcgggctatcacccgaccatggcgccgccgctgtgcctgttcaccgctgtccctggatgcaggcacgggttggggagatgagagagatgcccttggaccattgatcgaccagcgaacggtttagatttgaactagcgtgggtcgtcgatcttagggtttgcggtcgggattgaatgtggggttaggactaatttgagccgttcgatcagatcagacgggatcggatcgtgggtgttgcagggtcgtagatcctcaatccaatggctgagttcgcgtaccggtttgggtgggcaagatctaatcctagcccttgttttctaatccagcggcctcgattcaccgataccccttcgttggcttatttgcttaagagccccctggtaatcagataatgaacccgcagtcccactcgactgtgcgctgtgtctagattattttgcgcagtgacccctggactctctggaatttg

SEQ ID NO: 135875 - DNA, 350 bp, Zea Mays
gcagttttttcaggcagaatttgttctgcagcttctttttccgtttccttttctccggtttccaaggatttctccttggcgggctctgaaggcccagcttcggtctcgacctggctctttgcagcttcggcttcggttagttttgtctcagtctgcgcttttgaagcttcgacagttttccttggagtagagcttgaagtctttatcgtctccagcgcatctagtacgttgaccatccttttcctcttggggtcgctgtaagacctttttgtgcctttggcactgtcacttctgccgaagggcttataacttctaatatctttgttccttcgacccttatctcttcaata

SEQ ID NO: 135876 - DNA, 289 bp, Zea Mays
aagtaactcatcttcagagtcatccgtcgcgcaatcctcaacgacaacctcgttccacttgatgtattgtcctgcatcacacttgtcagcagttctcttgtaataattggcttctgcttcatttacagcttgggagaatagctcatccttagcctcagcctcatcagacttctgcttgtaataagccgcctctacctcttcggcggcctgagacataaactcgtcctcctcctcttgagcacgtaatcctgcctcagctagtgcgatgagctcactcaaccttgatgtg

SEQ ID NO: 135877 - DNA, 399 bp, Zea Mays
gagcttcggtgcgccggggaagaggggcgccctgctgcagccgtggggagccagggaggaagaaggggagtcggttgaaaggagaagagagggagaatggttgtggcggtaggggggtagatgaataaaagccaatttgcaaggggaggcacttctatttatagaaaatggctagggttttagggctggttgcttagtggagaagcaagggttgcttctagactaaggaacccaaaaatatccctggattggattggcgattcatcagtgagaaatactcgaaccggtgtgacgtacgaaaaataaactagtggctagatgacaggtgactgagtgcttaatttggatcgagaattcgatttttttgtgtcactttgaaattctctcgcactattttag

SEQ ID NO: 135878 - DNA, 274 bp, Zea Mays
ttgttgtaggaggctcgaaagagggtcgggatggtaaacctcgagagttcaccattgatgagaatgatttggttcattttagaggccgtctttgtgtgccacagaaatcagaggtgaagatggatatattgagagaagctcataaaacgccttacatcgttcacccttgcgaaaccaagatgtatagagatttgaagcaaaacttctggtggaagaggatgaaggttgatgtttctaagtatgtggcaacgtgtggggtctgttaggatgtgaa

SEQ ID NO: 135879 - DNA, 390 bp, Zea Mays
aaaatatttcaatacgcattcaccccataagtaacatcatcacacatgactctgagttaaccgtagaggaagcgatgactacttcggcatgtcaccacctctctacaagccaaaccaatattaactacatcgatcgagtcttatatcacgcaacacttataatttattatctcaaatacaaccatatcccggcatgtacttgggacacttcggttccacttacgcaatcactactacaacgcacttcggcacacatgtttaataactcacctttctaaattaacctatctcaccttccgacaccaattaaatgtcacttaatttacattttcacctaatttaacctacaccaacgatgaatacataaatataattatcctagaccaactc

SEQ ID NO: 135880 - DNA, 318 bp, Zea Mays
gacgaccattactgcacttgtggacaagttttgttttaggattttatcaaattattcttgactcattgagctcgtttacactaaattgtttttttaattatgtaggtggcggcccgagacacatagctttcatcttccttttggtgagatgacagccacattagaggacacacagaagatacttggactagatgttacaggcagagcagtgataggctaatgtgactctgaaggttggagggctagagttgaggcgtttgttggtagagagcttcctgatgagggcattgataggactgctggagtacgcatcacatg

SEQ ID NO: 135881 - DNA, 346 bp, Zea Mays
tactaaccgagcaatcggcttaagtcggtgcgacatgctcacgcttacacaactcagggtgatcactatgccctactaaccgagcaatcggcttaaatcggaaatgccttaagtcggtgcgacaagctcacgcttacacaactcagggtgatcactatgccctactaactaaacaatcggcttaagacggaaaacgccttaagtcagtgcgacatgctcacgcttacacaactcagggtgatcactaagttctactaactgaccaatcgacttaagtcggaaacgccttaagtccatgcgacatgctcacacttacatggcttagggtgatcgctatgccctacta

SEQ ID NO: 135882 - DNA, 667 bp, Zea Mays
ggttggaagggtcggccattcccgacggagtgcttgaaatctctgcagttctagagggtgtggcgcatatctttgtggtacgggcactgggcgtcgaggatgtcgtccaatgttcgttcgcctccacgaggtgccccttgggcacgagagacgagtggtccagcgacatggacttcttcacgaggcctcttcttccagcgtttgtcagtctgctggtttgcgtcacgccgtggtgcagatggagcaggcttcgttcccccgatgaggtcatgggcccattcgtcggcggtgatgtagaggtccacctccctgaatagctgttcggaggtggtcggcgcctttcgtagtatggctctgacgaaggccgagtcattaggtcctcggtagatgtcctcgatcactgctgctttagcaacctcgagaatacgatttctcatggtctgaaaccttttgaggtacgaccgaagagtctcatcccctcggcgcctgatggatttgaggtcccatggttgtgtcggcttgtcggagagggattggaagttgacgataaaacgccgactggagtctttccaatcgtcgatgcaatgtcggggtaggtgtcgtagccattgcagtgcatcttgcccgaggacgatgggcaagtacgcagtcatcacatcttcagttg

SEQ ID NO: 135883 - DNA, 452 bp, Zea Mays
caattttctgcgaaggtgtaggctctttagcttcagtagcagtagaggtctcaccaccaaattcgggaaccgaggccggttcgatgaagcgtggtcggtgagtaaggaccttcactcttttcctctttggcacagcctcacttagagcatccggagtatcaccttttccagaagttgcgctttttctcttttgccctttcagcgggtagcggtaatcagggtacataaacccaatagcatcgaaaactctattcagcctcttctttttccgccctccgaaggtcgtagatagagcgttatcttctgtctttgaatatggtccaagaagttcgtcgcttgtagcttcgatgcatttcagccaatcatcatctggctcaataaacttaccctcgtatctgaaggtgtatttcaacctaaccagtccaccttcgtcaggcttgctgatggtttcc

SEQ ID NO: 135884 - DNA, 429 bp, Zea Mays
caatgatcaaacaaataacagatgtgatcaaaagaataacatacggattagattatcaattaagcttagagtaggagaatccagcaaatatgctactttagagtgaaagataagaattgaaaaatagtagcatacttcatgagaaactcattctcatgcaagagactatatgaaatgactaagataaagggatagtctcatcgtaatcaagatatagacagaggctccccctaaagatatgcatcaagtatttgaatgaattgaatggatgcatttactttaaagacaaatagggagaagcattatacatcttgatcaaggctcataaaatttgcaataaacaacttaagcctagtattctcattatgaaaggatttagaatactcacaaccacaccattgattgttttgtagatcttattatccaagt

SEQ ID NO: 135885 - DNA, 615 bp, Zea Mays
gccatctccactcgccctccctctctccctcgagctggatcacgcgtgctagggtttggcgccgcctcggccgggtacgccatctccactcgccctccctctctccctcgagatctccctctctccctctccctcgagatctccatcggtgtcatcgccgtgactcgtctgtgccgagctctccctcgagctctccctctcccttgagatctccatcggtgtcgtcgtcgtcactcgtctatgccgagctctccctctctccgtcgagcctccctccgctgtcaaaggtacggaggtttgacactttttcttgccctctccccctagatctggttgctcatatatggttttgtgcttactcaaatacgattttggggtgtagaacacacattattatgtattggttgctctgatatggatttgtggatctgatttagggtttacaacacacatttcgtatttgttgctcagatctggatttgtggatccaatttcgtattggttgctctgatctggtttagaacacacatttcttcaagaaaatctgtaatttacttggatgttattccgtccgttttgttacctgtatatgaggatgcaagacccatgggatgc

SEQ ID NO: 135886 - DNA, 352 bp, Zea Mays
cagatgtcgtcgcagccgacaatggaggtgcagtctctggggccagcagtgtgcaggagtggttgttagttgtcgctataggataggctaacccttttggatagtgttcctaggagtaggaacaagacttatggtgcaaggccgatgtaatgatggcttctgacgcgtgtgtgcgtgtgggggaaaacactctttgcttgtatgtgcatttatatattatgaagtatgtgatgatgatgttgcgcatgttgggatgtgattcttgccttacgatttttcacatgaagtttccttctatgagattgtatggcatgatttccttatttcacatgtgttacgacataactcaccg

SEQ ID NO: 135887 - DNA, 371 bp, Zea Mays
caaacaacaaaatatgcagcttgccgcacgtgatgtgtgtcgctgccagtctggtccaatagcgtggaagcctatctttcctttcccaccatgaaccgtataaatcggaaactgccgtttggatcccagctttcgtgttcgttcgctcggtcattggagcgtggggtcgtgctgtcagtcaccgttcacaggagattgttcaccatcgcgtgggacctcgatgataggctcacgttccggtgcatcttctcgccgcgaacccggggctggtgcaacagtttgttaagaactcccataaccgtcgggtttgttgggatttgatcctaggaccccgctacgatctacctaccccgagtatatatatattctag

SEQ ID NO: 135888 - DNA, 798 bp, Zea Mays
cagggcatagtggtcaccccgagttaagtaagcgcgagcatgttgcaccgtcttaagtcgttgccgacttaagccaatttctctgttagcagggcatagtggtcaccccgagttaagtaagcgtgagcatgttgcaccgtcttaagtcgttgccgacttaagccgattgctccgttagcagggcatagtggtcaccccgagttaagtaagcacgagcatgttgcaccgtcttaagtcgttgccgacttaagccgattgctccgttagcagggcatagtggtcgccccgagttaagtaagcgcgagcatgtcgcaccgtcttaagtcgttgccgacttaagccgattgctccgttagcagggcatagtggtcaccccgagttaagtaagaatgcaggtcgatcatgaacaatctgagtattcttgaagcctttttattgatgatatatttcccagtttacagagtacattgtcgtcccgatagcttttgaaatacagctaagggtaaaatttcctgaggtgttctatattccatgagttcccaatttccgtgccgtccatctgagtgagacgatatgatcccagccgagtgacttctgctactatgaatggtccttcccatagaggtgacaacttgtgccgtccctcccccgttagaattcggcggaggacgagatctcccactgcaaaggatcgacgtcgcatggccttatcgtgatagcgtctcagagtttgttggtatcgtgctgattgaattaccgtgttcaaccgttcttcttcgagtatatcaacatcctcta

SEQ ID NO: 135889 - DNA, 1150 bp, Zea Mays
gcgaggaagaccttcaataaaatcgagagagatgtcttgccacacaccttcaggaataggaagcggctgcaataatccagctggatgagacttttcatgtttggcatgttggcaagtaggacactgcttaacaaaagaatcaacatcctgtttgagccctttccagacaaacattcgtttgattcggtggtaagtcgcatcaataccagagtgacccccaagagcactagtgtgacaagcagcaatgagtttggtcttcaaagcagagttatgaccgatccaaatcagtgtaccaagccggatcacaccatcaaccaaggaataaccatcagcatttggactgtgcacagcaagctgctgcaataaatgttgggctgcagaatccgtagcataggagttaataacctcttgaagccacaagggttgtacagaagaaatggcatgcaccgacatgtggtgattgacgcgggatagagcatctgcagcaatattttcagaacccttcttaaacacaatcttgaaatggagacccaacagtttactcatggctttcttttggagctcggaatgtaagtgttgagcatccagataacacaaactctgatggtctgttcgaatgatgaactcttggcgttgtaaatattgcctccagcgatccactgccataatgagggccaagaattctttgtcatagatagacaaatacttatgtctgtcgcccaaagccttgctcataaaggctactggctggcccttttgcataagaacagcaccaataccgacagcacaagcatcagtctctaacacaaaaacctcattgaaatcaggtaatgccaacactggggtacaagacatagcctgtttaagagccataaaagcctgttgtgccgcagtatcccactgaaattgctgttttctcagaagattagtcaatggtttagccaacaatccgtaattcttgacaaatttgcgatagtagccagtaagacccaaaaacccacgtaactcagtcacattagaaggtggcggccaatcctgcatggctgagattttagctgggtcagtagcaaccccattttctgaaatgatgtgacccaaataatgaagctggtgttgagcgaaggtacacttggagggcttgacaaaaaat

SEQ ID NO: 135890 - DNA, 907 bp, Zea Mays
gtccccgagaggcaaacaccgaattggaccctccctgaactattcccctaacctaatttcatcaatgacctcatggtttacactggccacggtgaccgagggtgttgcggacagatgagtgtgttcccggtgatctaaggctacccagtgcaattgagtgggtcgatgggcatcacgggtatatgagagcactcaaacgagggagaaggcggcatgaactgacctgaacggtgctggccacgacgagctcggttcttgcggtgcggcggaccgatttgggggcaaacaacggttctccggctggggtggctaatcggggacgggagtggttgctatggcttcgcaatgacctagcgcagcaggttcggccatcaatttatagagggcttaggcggtggcgcgtgatttgatcgggcagtgcgggcggccggagacagagaagaacacggtggttgtaaccgtggcagtcgccagtgtaacggcgcaaggagaatactcctaaaggtgccgcgcttgctaacccgcagtaacaagcttcggtcgtggcacaaccgaggtcaccggcgcttccacggcgactccggtagtccggccacgtcgcagcggctataatcacggcgataactcccactcgcgatcctatccaatccccgttgcgagatcttttctttgccgtggttatccacccaccagtgagcacgaatcatgacggtggcgtaaatcatggcatagaggccgtcggcggcgaagtatactgcgttggcggtctaatccatacacgacattgtaccatggcgagtgcttcttcagtaagcctgacagccatagtttagggccagatttcttccaaatttctgtggcaacacatccagatctctgcatcaatattgtagtgctataaaccaac

SEQ ID NO: 135891 - DNA, 540 bp, Zea Mays
cactcatggaacccaccgcagcacagccgcgctccttcagcaacctctccccaacgcctgacctcgacggcagccaagacgataatgttctccccttcatctcgcgcatgctcatggaagacgacggcgtcgacgagttcttgtaccagcaataccctgaccacaatcccgcgctcctgcagacccagcagctcttcgcccaggtcctttccgacacctccaccaacgccctcaccgccttgcaggccgtcgcacacggcagcgacctccaggatccatcatccttgaatagcacagccacgggtgccgtggagccggccagtatcttgttgccagcggagggcagcagctgctgcaaggacgcggtgagcatggcgttcttcagaggcatggaagaggccaacaaattcttgcctggcgacggcggcggcggctacacggtggactgtaggggcaggaagaagaggcttgacggagatgacgagggggagggcaggagcagcaagcaaatggcagctgacggcgaggagtcggaggaat

SEQ ID NO: 135892 - DNA, 462 bp, Zea Mays
cctgaggcttgagcagatctattcccagatggaggctgcctgaggctcggggcacacacgttagtgtagctgatagttgggtgttagttgctgattgcaagaatgtccatgtatatttgataactaggggttgctttttccgctgttgtatgccgcctttcatgcagacagaaagaagtctttctagtcattagtcaatacctaaagtcctctccatatatatcaaacgagtgaaagctcgtgtttttaacccttctctgttgccactgtagacttagttgcataaataaaaagaaaaagaaaaaaaaacgtaccaagagctgcatatctttggaccaaaagggcaacaatttttctatattttcaatatcaatttttagtagtgaatctgatgtttacattatgatgtctatctaaaattgtttcgtattcttttattgtacaaagacattgtcatgatgt

SEQ ID NO: 135893 - DNA, 881 bp, Zea Mays
ccttgataccgacattggaatatgtgattcatacatgttgtgtgagatgcaagaccacgtgtataacaggaaacagtgggcaggttgtctgggacttttaggccaatagaaatgtggcgaacttaattaatgcgctaatcatttctctaattcccttatggtgccaggtcaaaggacaagcctgataaagtggtaagagttgtctcactgaatcatcatgttgcgggttcgaaaaaacctctctgtatttagggaaatgcttgtcttggtttatcaccattctctagactccattaataggaatctcgtgcattgaatgtatctttttttattgtgtcaggttccaccggtacaagggcattatcaccttgatcatataacataaataggatgataaaagataggtcagattgaaactgtacttgctgtagtctgacatgggcaggctaatggaacagagaagccatttagcaagaacagtccagatatgactaatataagtacgcagaaggtatatgaagcagatatatctatctgaagcctgacaccgactcatcaatatgccactgcttccctaaggcaaataattgataacttgcagaaattacataagaacagctaaacacaaagctgtaaagaatgcctattgcacaacaactgtgcgtgatatggggacggatgaccatattatcactataagcatacctgatggcaggacatatttcccatgctagcccagcagtttttggtattcaattcatgtttactggatctggacctgagttgactacactgcttacatccgctttatccaaaatttccaatgcaattgtgatttaaggggttagagcatctctaacaacgtgacctgtaaaaatgcc

SEQ ID NO: 135894 - DNA, 461 bp, Zea Mays
atcaaactctatatctagaaactcttttctcacttagttcgcttaatcctaaattagtgccctagaccaactcggccatgcacaactgccagacctacctaatgggttgcttaatccatctatcccaacctaaaagcaaaataaaccctgtttgacctatctcatgtttcacaacctatctgaaaccttctaaaccctagatggagacaccaagaccggagaagtaaaggagaagatcaacctcatcaacaaaggatagaagtcaaaccagatcgcgagatgagtcaggccccaccatccgggatgaaagtttcccttgcccaaatctctcttaccacaacctatctttgctctaaccaaatctcatcttgcctacgcgatggcttgacataaaagatgcttatgcttccctaatcgccaactaattaatgataaaggataagaaaactttttgtattgga

SEQ ID NO: 135895 - DNA, 465 bp, Zea Mays
cgagagtaagctgatgaaggtatatctcaaatgtctttagtacttcagccagcatcttgtgcaatggaaaacgaagccctgccttcatgaaacttttaaaaatcaccacttcgtttgcttctgggaggggaacggtattctgcccaccatccctcacaatggatgtgccatggaaatattttttctttcattgcttcaatatgtccttgcctaacagtggactttccaaaaacaacatgacttggcctccacggccgatcttcggcatcttcattttcactctccacatcaaaactgtcactatcgctggaatccccagacaggccagccaacatttcatcagtgattttttcgacgttggttttttccatatctttgtaaaaaccagcgagcgcggagtccatagtcttcttgtctttgtctattttgatggcagtcataacaaaagtcgaagctcaaaagaga

SEQ ID NO: 135896 - DNA, 911 bp, Zea Mays
tgctttagtccttcatcgagcagtacatagaagagtccttgacccttcatcgataggagacctaggagcagctttactctaggtccatggtcaaggagccaggggcaaccaaagctcggggtcacactgaggtggttgaggaaatgctcacccatgcactagaaagtcatgcacgattcaacaccatggagaagaatactgttgtcgctctggttcgtgcaaagactacaaaagcatagatcaggatagagcgagaagtgaaggacaaggtggtcgcctcgttggcgacatcgtggacagacttggggaaagcctaggcccgagttcggtccttggatgctttgctcgggcaggagcaatgaaaaggttctacctaggccttccaaggacgatgagattcgtctctcccctccctgcttattagtccctaaacatgtcgattcttatggtgtattttgaacaaagctttggggtaagcttcacttggtagagggctagctaagggcactcgatgccaagcacgctggactatgtgcgatcgttgatgttgtatgcgatcagctcgggattccatggtcggaggcgcctaccctagctgcccggttagaacttatcatcgaccacatacatgagctagaaatggacgtgttttagcttgggattaactgcgccttcgttgttgctcggtcgcactatgaggactcgatcaagctagatcaagtaagccatagatatgttgtcgagtggtaggacgacgagcttgaatgtctagaggtggcggtcgaccccttcacccaacatttagcagatagttttgttgatctaatattccctagaaaaagtcacaagagtcagtttctagagaaaggttcagaataaattaataattaatgtgaggcatcattttttgt

SEQ ID NO: 135897 - DNA, 955 bp, Zea Mays
tgatggcttcgacagttccgttgtgcatggtggactaagtgcttttaaccgttctgccgccttctctagtttcggctcttcaaccggttttgtcctagcttcgactgacacagagcgacttggctctgcaataggagcggtcccctcaattagcttcggcacgttggccatttcaatgcacctgggctggtgtgtcaaaactttaacctttttttacttcgacgcgctagaagtcacagtggtagcagctttccttttctttccttgcttccgcgaaggataacagtagtctggacatacaaatccgatgacatcgaataccctattcagcctctttttgcctcaagctccgaaggcagttgtcatcgcgtcatcttcggccttcgaatatgctccaagcaattcatcactggtcgcctctatggcatctagctagtcatcattcgattcatcaaattggttcctatatcgaaaagtatgcttcaaatacaccaaaccattttgattggaggcagcggcagtctccttcggcatttcccatccatgagcaagcggccacactctataagcgatatgctcctgcaccaagtctcttgtgccaatgtaagtacacactatgttgaaagccgcctggcatgtttgtatatcattcccaagagcagtggctgacttcctcatgccaaagcgagaccatatagggcgttgaataatccctttcacatcctccctttgacttaggtcattcttcacgtaaaaccattcctgcatctaggagctcggccacctctttcgaaatgtaggcactaggtagcttgcctcagaacgaggcacgaagctgtaataaccaaagttgttgtgatactactcctttctggtagccttcgtttcataagacaactcataaatattgcaaaagcatcttgcatctggttccagtccttggctcttcatggtc

SEQ ID NO: 135898 - DNA, 706 bp, Zea Mays
ggacagtagctgtctgttctgaatcgagtcctgaattcatgatggtacagcgggcgcccgtggagcttttcgtccacttccttctgttccaaatggaggaagagccgaagagggactgagggattggggaaagagggagagagggatagagagagagagagagtccggctcaaaagcctccaggctcctcatctagtcatcctcttcgtgcccacctggccacctcacagaacgaacaagcatcttgcttttcccttccaacggtagtcctccgagcagcgtccaaccagaaccggccgtgtcaactgagcacctcccgtgccgcctcccccggctcattccgccgcccattatattgccccaagaactgatgcgacccgacccaagattccggctcacgacggtgccaggtgcccttgctctagcgccgactcatccggtggcgagacaggggcctgaatgaagtgaagctcgtggtgggctgggttacgtatgccaatgggcgcgcttcaggtgatgctcctccgcttggtgctgctcgccgcgtccgccgcgacgacggctgtcacggtcacggccgcgccgccgcccagtgaggtggcagtgggcgcactcttcacctacgactccaccattggccgcgccgcgcgcctcgccattgagctcgccgtcgacgacgtcaacgccgaccgcaccgtcctcgccg

SEQ ID NO: 135899 - DNA, 493 bp, Zea Mays
taaacgatcagacttatggctgtcaaattttaacacaagtaagataataaagttatctacaacttttctatagcacatatctacagaaaacacaatttggttcatcaaacatacaacacggagaaatcactgcgtgcagtccaaaacagcaactaataatttcaactcctatttacttcaagaattgtcgcgttctagagactcgaaccattctaacactttaccatttgttagcgttaaattaatcaaatgaggactaataagtagacttactaattcttatccgtgtcattttgaacactagaagtgccatactcaattaacaacgcattctctacggtaatcaatatcgaagcgcttttcacccaataatttgtatttcaacttagacatcacatgagcactataatttttacccgcgaccataaccatacacatttagactacaacaagcaatttattgcgattacgcgcttaaccaaaccatctaaca

SEQ ID NO: 135900 - DNA, 360 bp, Zea Mays
gtttactagagaacgattatatgcatgcagctgacagtttatctgctctgtcgggggagacattcagctaaatttacttgatagcgtatcattaatgctggggtttagataaatttgagaatgatggtacatatcgtctcacattcttcctttgtcaatgtggatcttttgacataatttagacaactgaatgcagcaccagagatttggtatactaaataagttctcattgacatctcattatatgggatatagttccatgtactcaacggttcctattggacctaaatccatacctggatctcattaccttgtgaaagaagaaattcatttctatgttgctatggagaattgcaaaac

SEQ ID NO: 135901 - DNA, 294 bp, Zea Mays
ccaccacattggcttatcctgggtgatagtggatttccaaatcataatctttaattagctcaagccatcttcgttgtctcatattcagctttgactgggtaaagatatatttcagacttttatgatctatatataaatgacaagtatttcccagcagataatgacgccaaattttatgggcatgtaccactgcagctagttccaaatcatgagttggatagtgctcctcatgccagtgtagttgtcttgaagcataagctattactcggccctcttgcattaggacacattcga

SEQ ID NO: 135902 - DNA, 456 bp, Zea Mays
cgagttttttatcctaccttcgggtgctccacgggcctccgaaaaacagcccacacgaccacattacagcccagcccacataaaaaacctaggaatataagatccctctcccatcccactgctctcttgcccatgaccgcagaggcgcgacctcgttccatccctgccttcccagtatttccctcagcgccgccgctctcttcgctgctcgctaagacgctgtccctaaccaccactgcccactctccgccggtctgagctccatctcttggccgctgcaggtagctccatctcttggccgctgcaggctgctgcaggtagctccggtggtctacccattggtgcgctgctgggagaaggtattggattcatctaactacatttagacaatttccaaacctgcatctagtatttggcgtttacattattgagttattgactcggcttctaaaatct

SEQ ID NO: 135903 - DNA, 484 bp, Zea Mays
tgggactgtccgagatgactcacagacggtccgattgtgtcgaaaactggtcgtgtgcctggcggcggcggctgtgatggtgacacgaatgtgtgcatcagcgtaccatacgatggctgggccaaaggagacccatttatagccgagtgtttggtacgaatggttccgtattggattcacgcgagggaaactaagggcggtaggtttcttatatgaaagcgcccatcttttaatagattcgtctacgtattctttcatagttcccctcgttgttccatgaaatcctcaaaagatggatctggggtacatacaatgggaaccaaaaggcggaggtaggagagacgtcgtgtcgatctccccttgactgatgatcttctagtggcgatccaccatgaagtatgatatgtacttttctgtcgcctttatgtgtcattccttaagttgtcgcaacacctcctcctcctccttgtcgcgtcgttcggcg

SEQ ID NO: 135904 - DNA, 577 bp, Zea Mays
gttacgaaacacattattaaacattaatttatgaagcattatgaaacatattataaaatattgttaaccaatcacttatgaccaattaagatataagtctaaataggtttatgtgaaaagatcattattattaaacacatatttatggagagctatgatatatgccttaaatgaacttttatgcaaaaggacaatgaataaacagctatattttatttttattagaaagtacatgtcatatattctttattaagaaagctatatacaaaacaatatataaactaacattttaattattattaaagaacatgaacactaatttcattaggttatgctttaggaaaaactaagtgatatataaataatatggactaatttgatggataatattaatcatgtctagaaaactaatcgttatatatatgacatggactaagtttgattaataaattatgataaaggataattaatctattaattatctttaatgctattgtaggaacaaatgatctaaatgatctaattcattagaaaggaaattatgtataaactatcattttataaaagcaatgaccca

SEQ ID NO: 135905 - DNA, 329 bp, Zea Mays
aaacgctggcaatgcataactcagccattttcttcatgtaaatgccggcagaaccaaatacgactcagcaattaccagtcattactcgggtgttatctctaagaacaacgacaacgctgggcatgaatacaagctatcgatcgactataaaagaacgatggaaaagcaaaaaggagagactcagaataagctgaagttttcttcaatatattgataagggaagttcctccacaaactcaaagaccaactcattatgagccggtcttccttccttttttcactacattacactactacaccaccacactacttacactactctatactac

SEQ ID NO: 135906 - DNA, 299 bp, Zea Mays
attaatggttatcttctcaaccggcaacaggtaagctgtcttgcttcgtgtacatgacaagactgaggattgtttttccatatacaaatcgagagtggctgcatgtgtagtaacgtttcaactaacatctacttactgcaagactagatgacatcgtttgggataggatacacgatctgatagcataataattaacatgaacgaccgaccgataggcgatagcatagcatgcatgcactaaaacaggaagcaagatgcagctgtggcagcgttttcgtcaattctcagcgcgcacaaag

SEQ ID NO: 135907 - DNA, 419 bp, Zea Mays
caagaatgaagaagccgacgcattggccaaggcagccgccaggggtgaagccctaccctccgacgtgttctaccacgtcatcggcacgccagccgtccgcagccctgaagggctccaaataaccaacgacgacgaaggccacctcataatcaacctcatcatgaccgaagactggcgggcgccaataaccctatacctgcaggggtactatcacccaatcgacagcaatgaggccaagcgcctccaccaccgaagccgggacttcgcactgatcgagggccaactttacaagaagggggtcagtcaaccgatgcttaagtgcgtcaccgagaccgaaggcgtccaaatcctacgcgaagtctacaaggggacctgcggctcccacgcggggcctagggccctagcggcaaaagtaattc

SEQ ID NO: 135908 - DNA, 548 bp, Zea Mays
ggaacgcagttcacttcaaaattttggaagggccttcagcaagcattaggcaccaaactggatttcagcactgcttatcacccccagtcagatggtcaaacggaaagagtcaacaaggtccttgaagatttactcagagtctgcgtttttagccttcgacagagattgggagtctagtttaccatacgccgagttctcatacaacaacagccatcagtccagcatcaaaatgtcaccattcgaagcgctgtatggaagaaaatgccagactcccctaatgtggtccaatgtaggggaaagaacattagaaggacccgactttgttaaagaagccgaagaaaaagttgccttgatccgcagaaggttactagaagctcagagtcgacagaagagttacgcggacaataggcgaagggagctcagatttgaggaaggagattttgtttatctcaaagtttccccgatgcgtggtgtcaaaaggtttcagatgaaaggaaagctagcaccccgtttcgtcggtccttaccctgtcatttcccgaataggac

SEQ ID NO: 135909 - DNA, 495 bp, Zea Mays
ggctgaacgagacctcgagtatcagtcgcccgagggggacctgaaggatattttcgccggaggctcctactccggtgaagacaactagacggacatcgggggaactccgtgtcccccggtctacgaagctgaagcatgccttcctttggaggccctttcggacccccacgggtccgagatgcagataggtacatgcagaagtgatcacaaccagagacaagggctctcgtgtcaaatgcagacaggaaccctgggttggggcttagccccgcgacaagtgccataccaagaggtgctccgcaactctcccccagctaggaatgacccttcaaggtaatgggagtgcaccgacgcagggcaaccatctagctacgactggaggagtaccttgccctgatgccaaatatctctgtaagttctatccatagagcaagactaaggggtcgagtctgtttccttttttgtaactaaatgacgcatacgtgtatgataacc

SEQ ID NO: 135910 - DNA, 715 bp, Zea Mays
ccactgttagcaaacgtatctgctagtttcctcgaaagcaacgtgaggagttgttcatgtgaagctgtgtagtgcgggttgccaagggcttctttaagtccacgatgtatgtcatcggtaaagtagatccaatatttgtcgaacagagcacgaacattgcaaacaggacaatgaacgacaatggtaacgaacagctgacgaagttgagacgccgaggcagagactacagcctcatcaaatagaagggtccactcgttgtcaccttcgagcaaaccacgagcttcgcacgcctctctaaacgtttcgtacacagtattttggaaggtccttatatcaacgaagctcgttgcgccggaaacaaacatcaagagcatgcgtagatagtaaagttccccagctgttgggtggacgtagtacatgcggccaatcttggcagacgacaacctccttctacgccagcacctaatagaaacgtcccacgaccactctcttgggaaatcacaataagtcaggagacgcgcatcactgtatttcaagtttgtttcaaaccattcagttaacattgtcttgttcgctgcacggctcaaaagcaatgtctgtaggtctgccccaggctcatagcgtacaatgttttttgcaggtaagtgtacggccagacgttccatagaaggtactctaaagtgaatgtcgaattcaaagattcgccatagagcct

SEQ ID NO: 135911 - DNA, 942 bp, Zea Mays
cacttctgattttcttgattttgcattcaaattcattttgagcattcttgtcaaacttcttgaagattgatgcagcctcagacttgccatgaagaacacccattttgagcattcttgtcaaactcttgtttggtagacctaagaatgttactttgaccttttcatttgcaacttttttaagcacatagtgggcattatatgcaaaaggtgtttagtgctttggcaatggagttggtgatgtggcttttcaattgtgagcaaagtgtcattctttaccatactcataacacttgatgagctttgtattttgcttagtcttgttttgttgcttttttggacaaatgaattgtatccaataccactcctgttatttttcaagactgtgttcatgaggagctcattttagagatattgacccttgttaaatttttgcatactagggacaagatgttctttctcaagcttgactttcttaatttattctctaagcctctcattgtccattaccactcattattaaagtcattgctttctatgtcaatttttcccttggtggttccatcagtcaagtacttttttaatttcttgttctctagtgtcatgactttaagtttctcaacaaaatcatcatgaagactagattgatcaacattgctcaattaatcacatgaggttgctacatcaagcttaacaatagggttaatagcctcatgtgtatcaaaagagaaaagctcatttgcaacaaggagattatcatgatcaattttaatttttgtgtaatcttcttttatcttgacaagcctatcttttaactctctatttgcttcacttaatttttcatatttttgtttagcgtctttaagggaggtttttagctcatttctagtagatggcatagttttgctttcttccatcatttcctcactagctttaacaactgtg

SEQ ID NO: 135912 - DNA, 807 bp, Zea Mays
atgatattgatcgtcgcctagttttatctttaaactaaaggatgataaataaaaaagaacggagcgagtgcagtcagttagttagtgagtcatcgagtcatgtactttattttttgtttatctttaggtgcatctgttagttagtgtgtgcatgatcagagtcgagtgcatagtggtgctcggttcagctagaagtgtcgtcgtgccgcaagggtcgcggatgtggcggagtgtcaagtgtgtgtagttgttctttattcagtcaattcaaccagaaaaaacgctgcttcttgtttgcagcacaaaactgactctgtgttctccgtgttggtgtatattgtgttcttgttcactgggtgatcgccgttcgccgacaagaagagttgtttctccggtgagctcagacaagtgacattggagctggttatgaacacggcttcggagtttgtcgcggcgcggtatgggtagggatggtagttcgtactttattttaatccagtacttgattttaatccccataaaggtactgaaactaaaaggcaacacaagttagatataaagatcttcatcctcttaaacttcaaagtattagaacataagaacaaaggtcttcgaagagagacgtattggaatagttcaagagtgacgaagtggaacttaatatctcacttttctcacatgccttaacattttattccatttcccttcgtaaataaatgtacaagcatgcctttgactcctgcacacacaaaatgacacgaaggctctttgtaggctaagcaatatgaagtgagaactcaccaaaat

SEQ ID NO: 135913 - DNA, 364 bp, Zea Mays
tcggtgtcctgatcgagcccgtcctgcctctgcccgccaggctccctcttgcgcatctgttgtcccgtaggcggacaacctagcccctgccgtagtacctccatcagctggcatgctgccccctgtgttgggcgcaacacctctccctgttgcgccccatccctcgtgcagccccatcaactctgtggccactcctccatgctgaggtcgtgttgtcgtgtctgtcgggcttgatgttgctcggttgtctggcctcgaccacttcgttggtcgggcccctcatgtcgaggttgctgcatcccactccaccctcttggctacccttgtcatggccaagttcgtcgttacgggcgcacaagagtgc

SEQ ID NO: 135914 - DNA, 599 bp, Zea Mays
gccaagactggtgtccctgagtggctgacactgaattggaccttccccgatcaattccctcaacttaattttatggttggtaatctatcaagctctgtccatgcggaccacggacgatgaggacaattgcacacgttcccggtgaccagtggtttcccagtgcaattggttgggttggcgagtatcacagacgtataagaatgcttaaacaagggagcagaggggaggagatgacctgaattgggctgaccacgacggggtgtgttttacgatggcggaaaccgaattgggggaaatccaaagttaaggctcactggcgatcgactgaggatgattcttggcggatgggttcgtgatgatccaacagagctcactgcggggtcaatttataccaagtgaaagtggtggccggggatttgagcgacgacgcgcggcggtcggagaagtaagagttcactggcgcgcgattagtgtcctattaccgtggcagtcattccgacgagccacagagagtcacaagggttcacagcgatgtggtggacaggtagagacacgcggcggacggcggtgatggcttaacggcggtgagaagcttatcc

SEQ ID NO: 135915 - DNA, 532 bp, Zea Mays
caaggactctcagggaatttggttttgagcccaaagggcatataggtcatataggaagccctatcctgaattttttgacactgtgccatatcctcgaggttttagaatcccggactttgtgaaattttctggggatgattcaaaaactacctacgagcatgtaggacaatacctagcgcaggtaagtgaaattggtataacagatgcccacaaggtgaaattgttccctttatcattatctagtaccgctttcaattggtttacatctttagcaccaaattcaattactacgtgggcatgtttagagcagaaatttcatgattatttttattatggtgatactgaactcaggctatcacatcttaccatggttagtcagaaatataatgaaactgtttctgaatacattagaaggtttagagaaacaagaaacaaatgttatagcttaactttaggggaaaagatctggccgatttagctttcgcagggttatcatcctatctgagggagaaactagaggggcaagatttta

SEQ ID NO: 135916 - DNA, 405 bp, Zea Mays
gaaacgggccatacgtgttgagttgaggcggcggcgacagcttggggtatcaacaattcgacagggaaggagaaacgggccacacgttttgacttgaggctgcggcgacagcttgggggttgggggcggcggctagtagcctggtagtgactgaactactgatagacccattccaacagcaaacggccaaccgcgatcttccttcgtcctccacctcggctacgcccctcctccaatggttccttcgtcctccacctccgtgaacatgtacggctacgcccctcctccaatggttctcgccggaggccacgctgcatgggcccctctcccatggagtattcttaggcctagtttcggagccacaaaatcgaaaagaattgtagggctagaattatggggcgtttg

SEQ ID NO: 135917 - DNA, 283 bp, Zea Mays
gactaagccatcgctaatcctcagccaaaaccctaatctacatcctgagaggcacctatcgcctaggtgtttgcgagtgactagaatcattgtgatctatggcgactgacgaccacgatgccccaacggacactggatccaagcctccacctctacaggtgaaccaagacgacgctggtgaccatgctcctccaccaccatcgctttaggacatgataggaggagggagatctactattggaggttcatcggcgaccgatgcagcagcactggccaacctcac

SEQ ID NO: 135918 - DNA, 650 bp, Zea Mays
caaaatgtggaggtgaacacggcgtcacggtcggacaccatgtactgcggaacgccgtgcaagcgaacgatctcggcgaagaaagcctgggccactgactccgccgaataaggatgcgctagcggaataaagtggtagtacttgctgaatctgtccaccaccgtcaagatggcggacttgccgcggacccgaggcagggcttcaatgaagtcgagcgctacatccgtctagacgccttggggcaccggttgtggaaggaggaggcccgcaggatgaaggtgctcagacttatgacgctggcacgtcggcacgccctcacgtagtcctggacgacctgcttcatattaggaaaatgaaagtcacgtcgaagccggtgcatcgtgcgttggacaccctcgtgcccctcctcgtggatggccgccaacaactcctagagcagtgccgaggctggtggcacatataggcggcctgtgtagtggatcatgtcgtcgatgaccgcccacggcgaccggcgggtaccagctaggatctcgtcccggatggcgatgagggcaggatcggtgagctgtgcctgacggaggcggtcgaggacgtcgaatcgcggcgcggagagaaccagaatggtcccgtcttccggggagttgcggcgg

SEQ ID NO: 135919 - DNA, 326 bp, Zea Mays
ccaaggtggaagataatgcactgtccgcagccttcggaggtcggggaaaaaagagactgaacagagtttttgacgccatcggattcgtctaccccgattaccgctatccgctgcggggacaggggaaaaagaggaaaactgctgcttcgaccaccccagttgagcctgtgacgaagggcaaaaaggtgaaggttcttacccatcggccgcgttacattgaatcggccgtggtacctgaatttggcgagggggcctcttcagctgctgaaacaagagtaactattcctcctgcgcagaggactgaagagtcggctataatgccgaag

SEQ ID NO: 135920 - DNA, 427 bp, Zea Mays
cttagagtcgtttagcgcgtttcaatttatcaagtagtgcaccagagccgtgatcgccgcacgccggtgggagctccgccgtcgttcactggtgcgtcgccgtgttcaggctgggggtagaagatcagacgcggaaccatggatccatagatgggcggcccagattagttttagcataccgcctagggcgttggatctgtgtcgttggatcggtatcctacggctcgaaacagatcacgttccattaatttgtagccgttgatctccgaacttgcggctgatagctacactggttcgacaaatgtttggatctaatcctcaccataaatcgcggatccaatggccactactcactgataccccttcgccgcggctattttgttaaaaagccctcagccatttaagaaattaacccgccatcctctgg

SEQ ID NO: 135921 - DNA, 628 bp, Zea Mays
agaccagacatctgctaaaaaatacagagaataaatttaagatttctagcaccttcaagatcatcttggagtaaaaaatagtgtcatcagcatattgcaaacaacaacaaccattggtgataatatgaggaatgagacctttaataattccttcgtctttagctttttgaatcatgcaagcaagcccatctgcagcaatattaaaaagtaatggagaaaaagggtcaccttgtctaacacctttgtgagtcctaaaataagggccaaccacatcatttgtcttgatagccacttttccacctttaacagtcttcaaaacccagtcgcaccatttatcaccaaacccttttttaaccatcatgttatgaagaaagttccagttaaccttgtcataagctttctcaaaatcaactttaaaaatcactccattttgttttttccggtttacttcatgaataatctcatgaagagagagcactccatccatgatatatctgcctttgataaatccatattgaaaatcactaatcacagaggtaatgcagcaggccaatctatttgtcaaaactttggtaataatcttgtaacaaacattgagcaggcaaattggtctgaaggctttgatgtg

SEQ ID NO: 135922 - DNA, 1386 bp, Zea Mays
tccactaccccgcgaaagggtcttatcacagtgtagaaaagcagcactttttacctttcccttgcacgaacggcgacgatgagacgctgataagtatttctttggacatgcaggaggatgatggaaagcagaggaacaaagcttgtcaaatgaaggctggcccccgtctcatgccacttgttcttgacatcagaaagcactacggacaaggtcgatatcatgataaatagcatgctgtatgtatgggatcatcagcgaacgttatggctgaatttgtttgctgttccaaatgaaacgggcgatgaagaacactgcacagattgtacttatatcagtatccacacaaggatcgatcctcagattcagttccatacaagaactgcttatcaaaaagattcttcgcactagctgcgggaaacacggattggaggccgcatcattctctccattctccaacatgagaattaaaggaagcaaagaaaggaggaggaactaaatgaagccctgtcactcagtttgagccatcattctctttccgtaagcatccaatcatatgggccattaaagcaggcaaaggagagagagagagagagaagctcagtcaggatattccatgaaaaacgcaaaagaaagcacctgcaatcatcaccagcttcatcactcatcaggctgctaatgctaatggcggggtatattccccatcctggctctcccctgtcgggcgggtttcctgtgaatctgtgattcaatttgctgctcaccaggtggtgccaaacgcttgtctccctccctctaaaaaaacacttgtctcacagcttctagataccgtgcagagttgcggacacgcacttagctcgatgtcatagacagtagtgcacttgtatatttgattccctttgttttgttggtaactaatgattcagatgaagcgcacgtaaccacatcatcacacggctgcataaatttcatctatagatactactactagcccagtgcaattacctcgcatcgcatctaatgatcacgcacgctctgcctaaaaagtaaaaacccaagaccaaggaatctatgcttctctcttcccctgctctgctcctcattgagaacgatctgcatggtttcagtgactttgttaagtcttttttttttcctttcgatttttgaacattgagtttggggatgtttggttcctcggtacaatttgccataacttaccttagccaaatgtggctagaaaatttgaagacatacttcgccgcactttttttactctaatataggtggagccctaaaaaaaatcttacctatatgtatctttcaagttgtttgtttaactttgtttctatagtgttttgtctctatgagattgtatttgcaaatagctat

SEQ ID NO: 135923 - DNA, 347 bp, Zea Mays
cgcaggggtcggtgcaagaagtcctaagactcagtgcgcagcagaacaggacggcgggttagttttgctaaaacagagggtcatatgtgcaaaactgccgcggccaaaggggtatccttcgatcagagccatccgatcatcgactgagggatccgattagatcaagcccacacccgaattggtatgtaaatcccatcattggatccaggatcaagggtacacaccgagcatgacgcggaatcgcccttatccgcccgatgccgaatctacgcgccagatttaacctcgcgaagagttatcctatgatctaatcacagccgtcgaacacaagatctatgacatgcgac

SEQ ID NO: 135924 - DNA, 611 bp, Zea Mays
caagctccgggagtagtgctcggtgagttccttgttgaatttactcccgctactgtacttttcgattcaggagcatcccattcttttatagccactagttttgtggaaaagcatggtatcccctctacccctttagagattcccttggtcacccgaaccctagggtcggaccttctatgcgagcacaaatgctcccaagtcagaattcttttaagtggggtagtattctcagcagacttaaccgtcttgccatcctaagggattgatgtgatcttaggaatggattggttgaccaagcacaaaggtatcatcagttgcgcaaacaagacaatccttctcacagaccaccaaagaaagtcagtctcttgtcaggctcagccacccgccaatgatccaatgatgtttaatttagcaacaaaaagcatatcagtggtagaagaattcatggatgtgttcccggaagagttgccaggaatgccaccagaaagagaagtggaattctacatagatctgattcctggaacagcgcccatcgcaaagagaccataccgcatggctcctaccgatttagcagaattgaagctccaaatcacatatcttcaacaaaaagg

SEQ ID NO: 135925 - DNA, 518 bp, Zea Mays
catgcatactgactaaattgttgcatctcccctgtcccttgctgtttggattacgacagctagctttattagtttgccttggatattgttttctagaataggtgtggcattggattggcgaacaggtcccttggtaaccaaatttggctcttttttgttttagtaggtaatttgtttggccgggttcgttaattgattcggtttagttgtcaaatttgtattgtaatgattaaagctctcacggtcgatatgatatgattaatcagctaggcataattgctaatcgctttgttagcctaattaaggtctagtttggtactctagctaggaatgtgggagatatgaattgattggaatgaaatttggcttgttcgccttgacgtcaatctatgtgaatttgatgacattgagtcagtttaaatcaatcaatagcgagttaaaatccatctcaatcacactcaacccccttcaattcacatggaaccgaaataaccagacaaagcttgaggaggattttg

SEQ ID NO: 135926 - DNA, 332 bp, Zea Mays
agaaaaatcgacgtcgtctaggtaaagtttagctatgagattttggtttgctagcgctcagatggcctggtttttggactaaggatcggtgctaccactaaccggactctattggggatttcatacgagaacaagaaagtttttagagaggttcatgccggcggaaggtaattataatagcttacgtcctctttaaattgtattgcttgggcttgtgttacttgccttagccagtctaattctgtcctgcttgccctttttactgagaccgtgcttttccttttatagaccaagggaaaggataggtacattagttaggtgtgagtcaagcc

SEQ ID NO: 135927 - DNA, 1283 bp, Zea Mays
cagaactagatagggggggcctggcgaaccgagaacgacccgccggcctcgttaactatgtctggcatcgagccacgatagaggtgtcggtccgcctcccactcatgggttacgagcccctcgggctgcagcacactcatgacctacgaaccccttggattgtggcgcatatataaccctcgcacctcccccccgctctgcggcgcactcatgacctattgggactaggcctgagtgcgtagaccgcttgcacgacacaacaggacaagccgagcctcgggctacagagaccaggggtcggcatagctcgaatgatagcactcgggccccacgttgcatgtgtcgtccgctataaagaatacgagacaaccagacaaccccgaggcccacgagcgcgcgtggctccatgcccatggtagaatgcttggttttaccattgccaggtgactccgtcttgaggaagccatcgttggttgaccctctccttggcctataaaaagaggtcggtccccatacacaaaggaggacaacctggggcgaacaacccgagagacgggcatacgagaagacgcccagatggacacccagacataaagacgacagatcgacaggaggaaggaggacacatcgatgggacccaaagatcggagctctacctccaagccaagacttagttaggactccactttgtagcccttagctccacctcctccatcataagagacttgggagcctctcctccctctctcgcccacttgtaacccctactacgagcattgatcaacaatggtaccggtagcacaagcagccaatggctggatgtagggacatgatgtctaaatcagtataaatcttgcgcccaccgcgcacaccgttcaaagttcggaatgtgcacagagaaatttacttgttagaacgaggtttaaaacaccaacagttgacgcactaggtaggggtgttgtacgttcccgacgaagttctttaagcttcggatggccagcaacgacaatgatgcgggttggactcccggaatgaccattccttttgggtgtctcgacttcatcatcaatggcgagggaactatggatagtgccctggaagcctcagttcccccaacgagcgactcgctcgacattactaaaggccttggcagcctttggcttggtcccccaagaggaggcaatgggtggcggcgtgtgccgcgactcgctttcgcagaggtcgtgggaatgctagaggaggccacaaaggtctggtctattccaaccctttccttctctcaa

SEQ ID NO: 135928 - DNA, 1001 bp, Zea Mays
ctcaaagtgaatatggcaaagagcagcgttttccccatccactgtactgctgaaaatctggataccattcataatctgctgccatgcgttgttgccaacttcccctgcaaatatttgggggtgcctctatccttaaagaagctcggcagacaacacttacaaccattcattgataaaattgcacatcgtcttccctgctggaaagctgatctgttgactagagctggaagactgattattgtccagactgtcctgtcttcaatgaatatctacttaatgatggccatggaccttccttcttgggttttcaaagcaattgacaagatcagaaggaatttcctgtggagagggaggaaagaagctttgggaggacactgcttggtagcttggaacaaggttactaggccaaaagaatttggaggattgggtatcttaaacctgcgtttgatgaattgggctcttagattacgctggctctggctgaaaaaaaccgatactggcagaccttgggcatcctttaaaataaatgctcatccttcagttaaggccttcttctcggcagcaatctcttcggtggtgggcaacggtaaaaacactttgttttggacagataattggatcgatgcccaaagtctacgtcagctagcccctcatttggtccagatggtctcttctagggctaaaatgaggaatgtccacgatgcccttatttcaaggagctgggtccatgatattagaggagctatcattgtaaatgttttgtctgacttcctcaaggtttgggacctcactacagactgggtcttaacaccagatcaggaggataagcatagctggaggctttcaagctcaggtttatattcggcaaaatcggcatataccggtttctttcttggagcaacaacttttaaaccttgggaaaggatttggaaatcatgggctcctagtaaatgctttggagcaacactggttaaactggaccatgttttctgtacagccag

SEQ ID NO: 135929 - DNA, 371 bp, Zea Mays
attaatgattaatcactaggataggattaaggttattggaaccctatttgagataattagatgttggtagactttaataaaagttggagtacttaagtttagggacttaaacacataggtttaggagcttaaaaccatgtaataatttaatcccaccactgacttaaacctgattagtggataatgaaccactttgtatagtcctctaccccagacctagggaacaccagagtgcctatcccttttctgctatgaacttgtgatctctctctgctgcatatgtttggtatgttgctttctgtttgtttttttcccaagtgcatagtgtgaatgattactttacgtagacaacgagcagtctgtgtttcccg

SEQ ID NO: 135930 - DNA, 566 bp, Zea Mays
ggagcttttgctagcttctgtgggatccaaaaagtcaatgcacaagatatcccatagaagccagtatttcaaatcaaaggcctagacaaacaggactgggtgtattttctaaagctagacagcagtcaccatctgtctcacaccaactgcgtatatcggcaaaagggcacattaggttgcaaagtaatgatctggagatcgagtgttgcaaactttagccaagtctggtgaaaattaggtttagttcagagcataataggtccatggcagtacaggtgcaacataaatgtgccacatctgttttggcactgcagctaagaccgttgcaacaataggaatggaagcgtaagagtcactgtagtccattgctaatttaaatgttgcccatcacaactggacaacgttttttcagaggcaaaagaaaagcgagcaaataaggccacaattaaatctaagacctatttgataacagtggcattcagactgttgtaaacaacaagaaagcacagagaggcagaggatgtacctagaattagcaatgccggaagccaagtcatcgccatcac

SEQ ID NO: 135931 - DNA, 790 bp, Zea Mays
agctggtcgaacagatcttctattctagggagagggtacttgtttttgattgtgacttcattcagagctctgtaatcgatgcacatcctcctagtctcgtctttcttttccacgaacaggacaagggcggcccaaggtgaggtacttggtctgatgtaacctttctctgacaggtcatctatctgcttcttgagctccaccaattctggtctagataccctataggctcttttagaaataggccccccccccaggaataagctcgatggcaaactcaactttccgctcaggtgtcataccaggtagatctttaggcaacacatccagaaattctgacacaaccttgataacctcgagtgaatcggcctctttgctatcaatagtcatctggtgacaacctcctttctttggcttgggtgagactagctcagtcactacttcttctcctagtggggacaccaacttcaccatcctcttatcatagctgataactgtttggtacttatctagccaatttatccctaggataacatctattccctgagtacccatcactatcatgttagcggggaactctatcccccttgtttccacacttacattcaagtatacactatcggctcagacttttccaccgactgatcatttgaattggtgttgttaaggtggttattgggagattatgcgcttctacccatgacgcgacccatccctccggctcctgctcctccgagaggtcagtgttgtggctcgagctattgtcgtcgttgtctccgtcgtcagggtctcc

SEQ ID NO: 135932 - DNA, 380 bp, Zea Mays
gccactcttagtctggaattacactggttggagaaaataatcatggatgtgcaatctgtataaccgcagagtaaattttaaataggacaattatgccaagaaaaaagttatgatgttgtcacgcccagcatctgtataaaagttaatctatctgaatcaaatcggagtctaaataggctcagccaatttgttagcacatcttaagcttgaagagataacttaagcacctgccaatttttttaccaaagcaccatgtctaggatctcaattgtgcatggctatatgccctcttaggaaagaattttaactttgtaagccatgacttttcaaatcacgttagttcctcattattatttttgtttaccaagcagcaacttagc

SEQ ID NO: 135933 - DNA, 854 bp, Zea Mays
gtttcccctcgatcaattgcacggttcgagctcccaacctctctgctcatgatgaccgtgtgaataacggacaatccgacgcgttcccggggatctaatgggttctagctcaatcggtcgggtcgagaagcatcaagggcacataagggtactgaaacaagagagcagcggacatgaacgaacatgtagcacgctagccacggcgaggtcactccgcgctatgctctagactgatttgggggtaatttcaaattggcgagctctggtggatgatttgaggcacgagttgatggattgggtgcttgactacttagcggagccgacggcacgctcaatttataggatccctgagcggtggcccgtgaatttgagatggcgcggtgggggtcggagagagaggagagcactgtcgcaagaaattggtggctttcaccgtggcgagctcaccggcgatcacgggatatgtgtaatacgagctactgcgacgtggtaaggcaccaaggcatgtgatgtatggtcgataggtggctaactccggtgagttcatccgaatcggccgtgagtcaggcggacacggcggccggagtgaaacagtggctcaagttcatccacaaggcgatatttactaccccgagcaactatcaatactccgttgagcacgaatcgtagtgtcgggcgtgaatccgagcgcgtggtcgccgacgacgagatgaactgaacctgagatatttcaatattgtaccatcagtttctcattcagtcatcctgacagtccactttgcagagcctagatctcaaattttcatgtgaatacttactaatccgtctttaacaaagttgtagctcaaccaacc

SEQ ID NO: 135934 - DNA, 540 bp, Zea Mays
caaggctggccgcccccatccattccgtctaacccctaggttcatgtaacaggaccccattctcgttggtctataaaaggaaggggaggaccatgattgaaggcaatgggcaacaacttgtacaggtagccaacacctgttactgcaccgagcacctcactccacacgtactccacaacaaggcttgggcatcgacccctccattgaccaagtttgtaatccatccctgttaaagatatagtgcatggtgacacaagttacttgactagatgtatggactttcggcctaaaccagtattgtcgaggattagaccctcaaggtcctaagggccatggatcaataggtaggttgggcctaattaattcatcgcaaatcaattaagaaattgtcacgcccgtaggatgacccccatgccgagtgaagtggtcgagcgaggaagaggaaggcggagagggtcggacaaatatgacaaaaaatgcactcgagtgtgtcttgcatgccctttagactggtcacgttgtcagtcctgcgtatgccac

SEQ ID NO: 135935 - DNA, 526 bp, Zea Mays
ctcggctcggaaacgatcgctcgaaacggggaatttggtgaaattaaagcctggaatatcggatgggcgtgaaattttgcgaatatgttactggaggtgttgtgaaggtgcttgaaaaatttgggttcaatcgaagcatctttggctggtttgggcatttcaccgagcatgtggtaggcgaaggtttaggttttcggtgaaatagctatttaaggctgtgaaaccctccctaaggagctgagaacctacaaggatattcaagagacacatgggaacacattccaccacttggattcactagaattgacaggaaattgatttgggcacaaaaggggtggaggtgagctcactgggctgaacagagagaagagagaggagtgaagacattgctgctcaccagagggagaagggatgagcgcaggaggttgccggagtacggtggacgacggtgcacggtggtcgccggtgagaggatctgatcgccagaggagggcagagagccagagagagggaagaaatctgagag

SEQ ID NO: 135936 - DNA, 664 bp, Zea Mays
actcattggaaagataagacaaagccctacattattatcatactggttaacactaattacccacgaaaaatgcccagaaactgctaatactacttttgttcacccacctgaaaatctgtttttttggacagcaacataaccggattcaaacaacgatatctcctaaattataactccgaatcgagcgcataagtacccgttggaaagttatgacaaagctctacatgattcacccactgatccccactaattacccacgaaaaattcccagaaatccctagaactactgctgttcgccacccacaaaatttcaggacagcacctctaccgattcggataggtaaacatataatcaattggattacaacacaattaaacaagatacaatctcaaaatcaccttgaatcctccccctttcctcccttcttcttccctccaccaaaatccaattggagacatgcaccaacgcgacgtagatccgagcgagaaaggaatggcaccttggagagaagggcttgaggagggggcggctagggtttgatgggggaggtggggtggcggctgcaaatgggtgtaggagtgagaggggcgtcctccaaacctagagagaggggggcggctgcacaagagaaaggggagggggatggctgaaaaaaatcccaag

SEQ ID NO: 135937 - DNA, 675 bp, Zea Mays
caggttcagggcagttctccaccaaggtgcaggggcagtggcatatttcagtagagctgtggcaccacatcaccagaaactttcggcatatgagagagaattgatttggcttgtcaaagcagtccgcaattggtgtccatatttgtggggtcgagcattcacagtgagaactgatcacttcagtttgaaatacatattggaccaacgcttatccaccataccacaacacacatgggtcagcaaactatttgggtatgacatggaggtggagtataagccagggaagatgaatggtgtggctgacgccttatcaagaagggatgatgaaccaacagcaacagtgaatctgctgtccaccccaactctggaagtctttgatacactcaagaaggaagcattgacagatctgcaagtctaggaactaaagacatagttggcgtcaggaactgcaggagaagggtgggctaaaagagatcgattgttggtatgccggggcagagtcttcgttccagataattcaagtgtgtggggtcagttgctgatagctgctcatgcagcaggtcatgagggagtagagaagaccttgcatagatggaggagctcattccacaatacccatattaggagacgggtacaggaatttgttcggggctgtgcagtctaccagagaaataa

SEQ ID NO: 135938 - DNA, 325 bp, Zea Mays
gccgaatgataataaacaaaattgtggcagacatggaacatatagattcaaaaaaagcttcaactagaatcgtaaattattgtggattctcattagcgagcatgtgtcgattagcatttagagatggaaatcaagtagaaccgatgatgtgaatacggtgaatgaagctcaaaaggaaatgttgtggatagaaattaaaggtaagttcataatcaacaacgaaagcgagcagttagtcaaataatgggccacgaagaagatggtttatttcaacacaacaagaagggtttatactgaacctttaagaagactagataggcaccaa

SEQ ID NO: 135939 - DNA, 589 bp, Zea Mays
aagccataccatcttcggaaagtcgaccattaaacaaagtcaaattgacgccatgaagggaagatactttcgtgacttgtctattgtgagtgttggaggggacaacaccgcccctgctcctgaagaaaatgaggttgttgtctacagaagctttatgaaggcgggtcttcggttcccattgagcaaatttttggttgaagtgttgaagatatttcagatctttcttcatcaaattactctgaagctataatcagaatgggtttgtttgtttgggctgtgagaagccaagggctggaactgagcgcgaagtgtttttgcaatatgcacaaactgttgtacgagacgaaggccactagcaaagagcagtatcacaacaacttcagttgttatggattcattgctcgttctaatgcaagctacccgattccaacatttcggaaaaggtggcccgggtcctggatggaggaatggttttatgttaagaataatctgattgaaagggaggacataaaggggatcatccaacgccccatctggtctcgcttcggccttcgaaggtcgaccgtggcgattgaaaatgatgtcgaag

SEQ ID NO: 135940 - DNA, 356 bp, Zea Mays
gtcaagtgtgttcctaagatgattaggttttggaagccacacttgtttctgaggaggagctctcataggttcatcaatcacaccatctctcacaggggtaacaggcttagcagaggtgcttttgataagcttgggagtgggtgaaaatttctctgaaggtgtcaaaccactgcactcaccaaccttcccaaagcgagcgacactcccatccttagtagcaaagcctaaacccagtccgccagttccctcttgaactgactgaccatcatgcctaactggggctcactgcacgacacccaactcaagatagatagaaggtatgtgttttcttcctcgattcttgtcttgtcgtgtct

SEQ ID NO: 135941 - DNA, 920 bp, Zea Mays
tcgggagacagtataagaaatcatcttcattactcccgttaaaaaccaaggctcccttcggatatttcaactttcgcgcatagtgcctggcattcagaatttcttcttcggacaacttcttccctgaagcgtgttgaatgatgtagtcaacattttttatcaaagcttcgagagcaggagtctcgatcttttaaggagcaatttgctctacctctttttcttcaggcgcggcaggctccatctcggtgagcattgaagacccagctttggcttcagcttgagcttgcgtagcttcagcttctgcttgtctagtttcggcttcagcctgtgatttggcttcagcttgagcaattttctttgcaggagcagggctcaacgcctttgtagtctccagcatagcatccagtacgttggccatccttctcctcttgggagtggcggcagaagccttttgcatcttcggcagatttgcctctgtcggagggcttagaatctttggcatttttattatctcttcaaccttcggctcttcagccttatcaaccttatcttctactcactcaactgtatgcgtcttcgacattacagttggttcttcagcgctctatgcgatcggagcagtttgtattgcttcggctgctgaagaggaccctgcgccaaagtcaggcaccacggccggttcaatttaacgcggccggtgggtcagaaccttcacttttttgctcttcggcacaggctcaactggggtggccgaagcagcaatcttcctctttttctcttgtccttgcagcgggtagcggtaatcagggtatacgaagccaatagcatcaaataccctattgagccttttcttcccctgacctccgaaggctgcggacaaagcattatcttcggctttggagtatgctccaagtagttca

SEQ ID NO: 135942 - DNA, 783 bp, Zea Mays
gtgggccgtggctctcagtgctgagggagaactgctgatcaatctcggcatgttgtattgtgtccctcttcatgaggttatggaggttctgatacatcatctccgcttctggcttgctcggttctgggatggatcagagcatcttggccgctacggcgatgttttgtgcggggttgaggaaatattgtgtgatgtcattgcttacagtgagctggtcacacaccttcttcggacgctacctttcggcttcgaggcacctccgctcgacatcgttgtagacatggtcaagcttctgcatgagggagtcgagctcctcttgttgctgacagagcgaggcctctcatgctaggatgcgcgcttggcgctctcgttggtacttttcctcttgattacgggcctccttgtctcccctatagttttcatttggtgggggcattgccatgaagtaggtcctttttggcgcctcctcggcgtaggagttgaccccggttgaaccgtggctcaagtcgtcctctagcagatcgagaacaaatgtaagttggtggtcgatgaccaccaccagagtcgaggacggggcttccaccacctttttcttagtgtgcctattgaggcgccgctttagggtggctacattccttttcaagctttgcttctccaccttgatcctagtggagcgtgtctgttgtgcgcccttggtgctgggcatgccggggatgacgaggctatgcttgtcggctgcggtggcaaagaaatggagggtgccgaagatgatgcggctctcta

SEQ ID NO: 135943 - DNA, 1074 bp, Zea Mays
gtggagtgttgccggctcagcaggatgactttggccagggagagtgggaccagtggattgtgaatgaacagcccattcagcaggccccacaaccctttttgccagaggagcaacacattcagcaggaagaactacaactcagtaaccaacactctggcttgtcgtcagatagctccattggtgctggtcagcttgcaccccttctgaatggtcattttgcggtgaatggtcatgcactgcttggggatggaattgacatcaatgttgccccatttattgggcctcaggaggttgatggaccggcgcctcaagtggatcatgtccatgatttggaggtcgtgccccctcaggcccatgttgatgagcctaacaataatcaccctcagaatttggagatgaacttcatgctccatcaggaatggcaacctgaccccgtcttccagatgtttgaagagaggaaaagagctctccagttctctaggctctgggccaaattctttgctccgtctgggtcgactgaccactcagtggacatccctaagaagtgggcaccttttttctttcgaatcttcttcagccggatgctttcaattggtcgaagacttttctactgtcagatatccccccaaatttgcaggagcagggaatgaattccatcccttttgtggtccctaaggaatgtccagttgattcctccctgggggatgtcacttctgggatctccaaggattccgatggttgtggtgggccgtctccaatcattgtggagtcagggctcagaagaagcaaacgattgaaggaatcacgtgctgggttcaggcatggggcctgcccaaaaaggaactgcctcatgtgccgacataacttcgatggcccacccccactatcctccaaggtgctacggaatctgggcaccaggctttgtaacctgtctgaggatgatctttctgagcagaggttgaagcaaaagaaatcgactgtgggacctgttgggccgcggagggttgacaggaaggacctggctgatgacaaaactgatgattcatctgatgaggataaacaaggcaaccaata

SEQ ID NO: 135944 - DNA, 521 bp, Zea Mays
ggcccgaggtagctaaggtgttacacgttgcattgcatatagctagctgtagagtgtaaacctcacttttcgagattagattagtgtaggacatatgaaactacacatttaatttaaccctctcttctaccattctacctatacacataaattgaaaaaggcaataatactgcattccggagtgctcctcccacgcacatggatagtttgttagacatgcaggtgggttcaattcgggaaagctgatgatctcatgttctgagctgcatctcttcttttttttcgagacaaaactgttggcgaacgaagtggcttgactgttgacttgagtgcatcgtcaggtcaggaatccaaacatattctcgtgcactgcagtatttcctgtgcgctagcttgtacattccggttcgttcaactctctaccagtaccagtcccaggggcattccggacaatgctttgtggcgctcgcatgtcccattattcccgtcgtatataggcaaccatttggtgctcgacggcg

SEQ ID NO: 135945 - DNA, 586 bp, Zea Mays
tctagattccctcccaattctttagggccatggccagctgagatcacgtcggatcggatcggtcggtcaccgtcaaccaaacacgcgcacggaatccgtttgaatggagagaaaaaaaatccaaacgacgctgccattgttgcgttgcgacgctcgtgctggctcggaaacgacaccgtgcttctctttcttgttgattgatggtgattggggaacaggcggaatgtacatgcatggatcgagatgatgacgatccagccgcgctactgtttatgaacgcaaaaacgaaatcaaacggtacgggacgggatgaaatctctccctacttccccgacacacactagcttattgcaagcaggaagaacgacagcagtgagaggtcacggatgggatcggaacaacagggatcagcgaggagatgcatgctgaaaaggaattaatgagagccttccctattagcagcacccgattaatcatcccggtcgggcggtcgatcggttcaccttcaccacctcctctgcaggaagaacaattcgcgatcccgccgctcggccgccgccgcggcggcgtccgacgcgcgccgatc

SEQ ID NO: 135946 - DNA, 615 bp, Zea Mays
ccctaagttgagtaagcgcgagcatgttgcaccgtcttaagtcatcgccgacttaagccaattgctccgttagtagggtatagtggtcaccctaagtcgagtaagcgcgagcatgttgcatcgtcttaagtcatcgccgacttaagccgattgctccgttagtagggtatagtggtcaccctaagtcgagtaagcgcgagcatgttgcaccgtcttaagtcgtcgccgacttaagccgattgctccgttagtagggtatagtggtcaccctaagtcaagtgagcgcgagcatgttgcaccgtcttaagtcatcgccgacttaagccgattgctccgttagtagggtatagtggtcaccctaagtcgagtaggcatattgattccaagttcaatcaaatcgaagtcaattgatagtcaacagtttgaatgcccttgaaaatgaaatctttattgatgacatattctccaattatagaatacaatgttgctccgatagcttttgaggctttgctaaaggtaaaactttctaagatgctctatattccatgaattccccacttccgttccatccatttgagtaagccggtatgatcccggccgggtgacttctaacac

SEQ ID NO: 135947 - DNA, 292 bp, Zea Mays
aatgaaccaggtcaaaagcctgcttagcccgagaagtagtaaatgggagacgagtatgtcggcctaactgacaagcatggcagagaccctcaaaatgtcccctactacaagaagaatctagactgctggtaagcttggtcatgacgtcaggtcctgggtggttgagacgacgatgccaagtggtggaggtggtggtggagactaggacgggaggtggagacgcgccgatggaagaaggccggagcatgtagaggagcccaacgctgtcacatcgggtgagaggggtcctggt

SEQ ID NO: 135948 - DNA, 440 bp, Zea Mays
tgaacacccttcgaaagtctctagaatcgattttagaactttgagatcttctttatccgctctaaaaaacacccctgcatcgtctgcgtatagggaacatcgaagctttgcccctcttggcaggacccgccccagtaacccagcctcaactgccctctcaatcatcctctgaagaggatccattgctaatatgaatagaaaaggggaaaggggtccccctgcctcacaccacgcctgtggtaaatcttgtctgattgttgaccattgatggtgactctggaggtagaagaaccaagaattgcggcgatccaattacgccacctttgggggaatccccgggcttttagcacatcgagaaggtaagcccaatttagggaatcgttggatacatcaagcttaacaaacagagccgactggctgtttttatgaagtttcctgat

SEQ ID NO: 135949 - DNA, 530 bp, Zea Mays
atatgtgaaaactcacatttaaataaaacagtacatagtgtgcataaacaaattatgcaatataattcataaaattatatgtagtataactatcagaaacaacaataataacacagtacaataacatcactaatctattgattgctactgtaaaaaaaaatatattatgtttataaacaacactcagtacctatataaaaatgaacagaatgtaacaaatatgcaattgaaaaaattggaagccattatcggatactacatataatgaggcgattcaattaatttcgaatcaattaaagggatgtagaaggggcggggcgaacctgatggacattagcgacagaactatgtaaaagaatggggggaactcgaaagaatgagaggggaaacaaaccagggaaggagaacgacggcggtgaatcgatgaagcgcggagattacgacggtggaagaggtgggggcggtcgtcgatggcgatcgcaggagcgaatgacggcgacggggaggaactgattattttagggtttggg

SEQ ID NO: 135950 - DNA, 798 bp, Zea Mays
tcggtccccatcagagttgcggcatcgcggcaagagattccccatggtccgaggctgacctcgtcgaattggggtctcgcaaagcctgcccacaatcccaccaactggtccatgaacactgagcaccgatgaaggttcgtgcccatggcggcggcatccattccgtccaaccatacgacgcgtcaggaagaggctagtctggccatgcagcacggcgagtctgcggtggcgatctgtctgtttctctctcgttgtttccctcctctctttgtttactatggctcttggatcggctccaaatccagcgtcaattgatggcgtatttacggaaggtgtacaggtgccaatatttatatgcacgttaattttgccagtaacagaaaccgagtctcgcgggggattttattttttcggtttgtcacggcgtcgagatgcatgaagagctgctgttgcaacggcccgcgaactatacgatgattgtgtccaagtttgttacaggcgcggtagaagctggttcaactatagcggccccacgagtcattgaaacgcagcatgcattatagcgaggaacgaccagcatgcatagcctagagaaacgggagcagtttcccctgcggcccacacgtcattgagatattaatgacgtcatatatgtgcaagcgtgatgcaagcatccggctaactaataaaataataataaaaaaactagagaagagatgtgggctacgtgcatttggaaagggctaggccgagcgtgtcttgagcctacggtagagagaggtaaggctttttttctcc

SEQ ID NO: 135951 - DNA, 285 bp, Zea Mays
cacaagaccattaataataaacatactacaagttcatacatcgtgtcgcagatgctaatgaacctgaaagactttggcaacatatttagtataatagaatggcaaaaagttacagttcgacatagaaatagcagaggccatcagacctaaaccttgaaagcaaatctactcaatacatcacaaaaacgccttgatatacttggatccaatgaatttagggttcatccagccacaaaaccgagggggaaatgaaatatttgaacttaatcggtgaaggaggaggac

SEQ ID NO: 135952 - DNA, 716 bp, Zea Mays
cggcgtacgactgccgaagtcccttcccgccagcccgccaccgccactccgccagcaaggagcaagatccaggcgaccaggtgagtgcggcagtgcccagcccgcccaacaccatagtccacagcacgccctgcgtccgacgtccctgctgcccgtgtggtgactggtgactgcctaactggtgagtggcgacactgtgccggaccggctgctatttctgtccctcgcatgtatattttacagttgtcgtctcactgatctcaaataggtggaggactggaggtggttctcaaatctcaagcccatccatggcgcctacaagtggatccggtcagggacgcaagctaatcgtccaccattgtcttcacgtggtgctgcaacgaggagggggagggtgacctcaaatcggtcaactatcaatcgtgctgatgctgctggtacacctacatcgacgccgacaccgagtgcagacccatcaagtgccggcgatgctactgctagtggcacaccaacaccatcatcaagtactaatgctccacctgcagcagcaccaccacaatcaggtatagataatgtcattgtggaagatgatgatactgttattgttgggacgaagaggaagctgaaatctgatgtttggctagagtttgaacaagtaactgttggtggtaaattaaaagctcaatgtaattggtgtaaaaagcaattagttggag

SEQ ID NO: 135953 - DNA, 746 bp, Zea Mays
gaaactttgaattctaaagtgttttttcttctaaaagttgtagttatgtgcttatatatttggtttgccccaagcgctattgtaagcatagcagtaatttcagctagagaaaaaggagtcgcgtttgtttagttaagtttgttgtgcagagaaaatgactttgttcgaggactgcatgtagttttattctaaccttcaacttcaagtttttgtttcgatataatctctcagttgcatgcataattgggtacggggattcccgcggggagaaaatcccccgctcggggacggggatgggggaaaatcctctccgttacacttcgcggggatgggaacgaggattcttctcccccgcagggatgggtatgggggctcaaccctcgacggagaattctccattgtcatctctagtctcatggctagcagcatgccgcacgctacattacatatacgtgcacgcagaacgaaacaaacccgtgctcacacacttggcaccaagatctatgatgctgagatatatcacgtcagtcgctagtgtgtcccgtaaacgttagtatggttgagatctcggtgccaggggcagatctaagatctgatcatgccccaggccaatctatttaatctactagagttttaatagattttgacctaaatgtaatcaagtcatgcagagatatacaaatcacgtctcgagccacgaaccgagtgggtagccccctgtatgcgcccctgctcggcgccatggc

SEQ ID NO: 135954 - DNA, 493 bp, Zea Mays
agctgaccgcggcgagctcacacacgcggtgtccttgaccgatttgggggaaatctcaaattggggcgctctggtggacgatctgaggcacgggctggtgtgttaggtgcgtgactacctagaggagccgatggcatgctcaagttataggacccgagggtggtggctcttgaatttggcatggcacggtggcggccggagagggagaagagcactggcacaagagctgcgtgtctctcaccatggcaggcttaccggcgacgagccagcaatatagagcggtttactacgacgtggtgaagctacaaggcacgtggcatccgatcggtaggcggccaactccggtgagcttatcagggccggccgtaaagcaagggggtacggcggccagggcggaacagtgtctcaagctcatccgcggtgcccgatttttcaccgaggagcgttatccgtgttcgaccaggcatgaatcgcgatgccggcgtgaatctag

SEQ ID NO: 135955 - DNA, 278 bp, Zea Mays
tacaaattatagttacatacatgcagcgagggcatcacacattacatcggctcaaccttcgggatgatacccatctccctatagttgaacagcagtatcctcaattcatcgccctcaaacagacttagcagctctccctcacctacactcgccccagccggcgaggccagcaattcccgcttgccagtcccgtccacacgaagacgaccaccctccacctcaccatgatgacgcccatcacttcacgacaactcactcactctccatttcgccatcgc

SEQ ID NO: 135956 - DNA, 452 bp, Zea Mays
ttgtagatcgatctaggatttcgggtggggaacaataaacggttgctgttgcgaacatcattttcttgactcgcttgtccccacctccttttatagggctgcacagctgggagcactagacttgtcctaggctagacgccctgatcaaacacacgagatcaaaggcccggttagcccggtgaagatcaattctaacaggttaggcttgccgagacgacgattgtggcgggtacaacatatggggtgaggttggggtgagcccgaccatgctcgagctaggggagcgcagctagggacagggagtcggccgactataggaatggtataacttgtggtaacggtcaggaaagaagaaccaatgaagaagaggcatcgagtgaaagaaacacaaacaatgtgtaatcgatgatatgtcatatagttttatctatctacatcaaatttaagcggtg

SEQ ID NO: 135957 - DNA, 529 bp, Zea Mays
ggccgtgtctcaaaagctgtgttgatctcggggctccgagtgggccaaaccatctttatatatgtgcacgcagatgagccgtggaccacaggcaccatcatggcgatcgtcgacggcgcataacgcaagctcgatcgacggcaacaagctagctaggtgaaggtgatgaggtctcgtcgtctccctccgatccctcgacgggtccccttttggtgtcgattccccgtccgccgagtcggagctcggccatgtgcctgaacgctggccttttggcgaaaagctggggagcccaactgcctccagggtaaaagctggatgatgatctaagcggcaggagcctgctgctagctcgcgatagatttgacgacatgacagtgcctctaattagcgtacgtaatcctcgtcagacagccgagtcttcacttttaaattcttccttccttaccttgcagatgcagtcgtcgccgtctacgcgtagtgctgggaatctgggccggacttatagggccagcacgagcacgattaaaaa

SEQ ID NO: 135958 - DNA, 432 bp, Zea Mays
cggaagagttcactaggcgtcatcatatcattgcgaagccaagttgcacctcgtcaacaaagcagctccgacttcgccacaacacacatcaccaaacaagtcggacgacacaatcctccaaagcgacgcctccaaggaagggtgtgacgtatggcgtcgtggtcgcctgacctaaaggtcaaggattacaccatcaaagatagcacactatgcaaagggacggggatagtttgatagatgcttccaagaaagtaaacaacgcccccacgtcattgtcatcatcgcccacgaccacctgtcccgatgcacacggatgagcagggttgtagatgaaatatacgacacacataggatactagaagtaaattccattaaaactctgtggatgtccggtgtagctgttttaggtgcatgtatcattgctttgttgtt

SEQ ID NO: 135959 - DNA, 452 bp, Zea Mays
tgatgatgtatgcacaccaatttcaatcttgcgatgcatatgtattgatatctagactttcttctagcatatctgaaggagacaagaaattaggttcattacttaataggcttgagacagggttccatttcaatcttgtagcagtacttagtaacataccctggaaatcctataaaaggggcaggaaccctccagtgtagtagagagcttgagatatagaaaagatagagcttggttgtgaagatcaagcaaggtgtgtaagcatatagtgtacaaccagaagcctacaacttgattcttaacacagtcgttacatcatatacaaccatgaataagcatgatcagatctatatactaccagtgttttattgtccattcaaacatttttctttcaaatgcctagggcagggtctgcaggcgatagtcgagcgcgccggagcaggcagtaggcc

SEQ ID NO: 135960 - DNA, 278 bp, Zea Mays
tttaggtcttgcctctaatttcgtgcttttggggtagcctgttagacatatcccaaatgtacatgtataatatgaacccacatcaaagttgttgacaatacctcccaaacaccgcatcgtttcaccaactgtcattagagaaggattaagtggttccttgatcaattgattgtccaacccatattgacgggcattgcgtcaacatcaaccccacattattgttcattgactttaataccatctaaggacctcctatatccattctccactaaaacctc

SEQ ID NO: 135961 - DNA, 710 bp, Zea Mays
ttcaatttcttcacattcaaattttaaaacagaagcattgaagtaaatacttcaaaccgaacgattctatgacaacataacaagccaagtatcacaattcatataaaggcagaaacaaatgaaatggctgtgattgctcctcattcttgttgatagaaaatagaaggaacactatctagtgcccaaagacagaacaaccaaatacaaagccacacaaaatgtgaaagatgcaaggaagatggaatgagtcatgctaacttttctcaccatcgtattccactcagtaggtactgatggaaacataaatgaccacaaaaaaccataaatactatacaatggaagataatgccataaattaagcaagcataaacaagctaaaaaagaggagtgtccacaatgctctcacaacaaggaactgggtgcatgacattcgaggtgctatcaccctaaatgttctgtatgatttcctcaaagtttgggacctcaccgcagactgggctttacatccggaccatgaggataagtacatctggctgctctcaagctcaggtctttattccaccaattcggcatatgctggtttctttcttggagcaacaacatttaaaccttgggagaggatttggaaagcttgggcacctggaaaatgcaaattcttcatgtggcttgtggctcacggtcgctgctggacagctgaccgtctggcaagg

SEQ ID NO: 135962 - DNA, 601 bp, Zea Mays
accagagtgtggaggagaagacccggtgtggacatccatggaagtatgagaaggggaacccgctcgaacaccctcgggggctgggtcatagctcacgctgcccacctgagccggatcatcaccggcaacaccctcgggggctaggtaaattccagcgccatcctcagggaccgggttctctgtagcagccacctctaaggctgaaggatcttcaaccacttccatgggaatggagcaatctagattagcctcttgactcttaagaccgcgctccaaagtcgatgaggcacgagacgctgcttgggataactctaacccgacatcaggcatatcagcgcaaacttccatcattccaccatctatcggctcggacagcagatcctcagggaccatatcttcgagagtctgatcaaaatttgccagagacaattcttgcagaccaacgagagcagacaaagttggagaaggaacaccactactctccccactggctatgtaacgacgactgttctttcgaattaaggggatttcctcctcttcctcatcctcgtcaataatacgaacaacacacccattgggatcagctctgaccggattgcac

SEQ ID NO: 135963 - DNA, 688 bp, Zea Mays
caaggaggggtctgcgtctttcctcaggcgcgcttgctgaccgatgggccctagggaccgaggatcttatcaccgacagtagcccttcgagctccctaggggagaatgtcttcctccggggctgatgaagggtcaagtggctctttgtcctttcgcctttcgagtgatcgtggtgttcattctcccttgggactcaggccgctttcaaggcgacctgccactcctcgaggtggagtcgggtgcttcggcctcctttataagctctaggcgatcatcccattatcggtcacccttagccccctttctttggtctcttcctcgaatggacctcacaactgggtcggttgatggatcttgggtcgccgggatgtcgcactacgtgggtctcgagccgaggtagttaggtttctttctctgagtttctctaattcccttccaaggcctaatgtttatctcccttctcattccgttgcagggtgaccgccgtcgatcaagaggtcatgtcaccttttgttgggttgctatggtcaggctccttgtctgctctccctctccctcaggtgtctcaagtgagttgtaacgcctttcgcgcgacgcaagaggttgtcgaggtccaggctgagctgcttcgcacgcagctcttcgaatctaatggttgtgttgttggtaaggcggtcgtccttcgtcc

SEQ ID NO: 135964 - DNA, 1065 bp, Zea Mays
ggcggagcacgccggcgaggctaccaatcgcccgttctcgagcgccaaacctaaattggatcgagctacgcgtagaggaggtcaaggcgaatcagttggtgggcgcattacctcggtatgaagcggtgacggccctgcccacacgttcaggcggctcagcggtaaccctcggactccggtgagcaatttcccacaccccacggccaccttctctttcccgggggcacgagcgtcttcccaatgtcttagcgatgcactcaggaagcaaaccagggacgcggcgtgggcgaggtaagggttccaccgccggcggccgcgaggggcaatctcccccactctctgtttcgctcccgactctatctccactacggtggcggtcgcaagagtaggaaggcaagagggagaggtaagcccggtcctgctacctataagggcgcggacgtggccgggatgccacaacggatcgcgcgaaatccgcgcgcctaccatgctcggacgtacgttgacggagatggagctgacacaggggggtccaccagccagcggcagaaggcgcgagtccgcgtttcacgtgagggagacggagcgagcgcgggtggtgaccggccagtgggcccagtgagccaggtgccgggtacgagcgcgtttgtctgcccggtggggccctaatgtcggcgcgcgcgggatgtaaaaatgggccgcgcagatcagctttgagaatgggccgaattgggtgttttcagcccagttaggtgcttttcccattttcttttgtttttatttttctgttttcttttatttacaattcttttgaatcccaattttgaatgtaatctcaaatgcaaatttaaactcctttgaattaagcatattggtcataccaaattatgagggttttatttaattatcatattattttatattggatattacttccttctttcctctaatcctcttctcgttattattttatttttgttcatattattatggttttaaatgcacaaacaaagatccaatatgatgcaaaggtttattttaggtgttattaattattcaatctcc

SEQ ID NO: 135965 - DNA, 816 bp, Zea Mays
cttgcacggactgtataacaaatacatgggcattccgtaaacttacatggctttggagaatgtgtggtgtgtcctgctcatgttcaccaattgtcctcatgggtatcctctgagttgctcccaccaaacttggatgaactgtgttgctgtcttcaagaattccttgcaccggtaacgcagccgggggagttacagcatgccggccatctgacctacagggtgccgtcgtcgccatagcttctctgatcccctggccgtcgccatcgtgtatgccctaactctcccagggcattgaacaaaagcggcggcgtgtagcccgttttttacagctatcctcctatactcacctaaaccgttctggcccatattcatggcatgttccaaatatcctgtgtgatttgtatgtcacgagatttacgtgaaccgacatgttacgattacctgccaattgtgttacagcttcataaacatggctcaccaccacgtgcgaccccaccacgttcccggatgacgcgcgcgacacccccactacccgatctgaccacacatgtcgcgtcagatggatatgcatttgttattggtaatttaaacaagcataaaagccgaaccacctcctgatcacgtcccgagacacaactatgccaatttacgcagccaatatcggcaaaatacgcaagcataaacgcgcgacccacgtttgacatctacgatcccgtcgtacccgagcacccccactattaccatttacgcattcgtttcattcaaattccgtatgcataaacgcgtaactgcccacgtacgaccccaccatgactc

SEQ ID NO: 135966 - DNA, 338 bp, Zea Mays
agtttaccgatcctctccatgcaactggtctgttatgtttcattcgattttcagttatgtcatagtactaaactgcacagtctcattcgatttcagttaaatcaatccgttaattttgtaccataactttaaatatgttcatcttctctttgtgcgtttaaatatgttagttttgtacaattcaagtctgtcaaaccaaatttgctagactatttagtagtacggatatctttaactttgttgcctgctctttgctcatgctccagctaatttcagtgcctaatgctactcatagtactaaactagacagagtagaccttacaactggacgtaccttc

SEQ ID NO: 135967 - DNA, 528 bp, Zea Mays
tcaactcctgcgaaacaagtttcttcgaggcacgcaactccttgatgacagaatcttttgaagacagcaacttattaagctaggacacttcagtctgggaggccctcagctcatccctatgatggtcaagctctgacatggtaaagcgatgactcctctccaaagtagtaagggaactgttggcgtcacggtacagtttatctagactgtcacgggaatcaagaagtcttcgtatctcctcctacaggcaagaggggtactaagcatcaaaataaaggcgcgaaacaaaggcatcaggaacagttagaaaaatctacctcatgggctctcttctctgaatcaagctgagcgttcaagtaagagttcagggttcgggcaccatccaagaacgcagaaacctggtttaagtcggctcgactctaagcattcctctcttcagcatcgaagcaccgccgagtcaaggctggaaaggcaaaaaggaaaagagcacagagggtaaaacgagggaagcaacgagcagagaggaaa

SEQ ID NO: 135968 - DNA, 288 bp, Zea Mays
ttgcgatcgggaatcgataacacaaaacgggaacattgactctaataacacttcagagagttagtttgatgcaacaattgtaaccatgcatatggataattgtacagaggttgaatgcaacaattgcagccatgggcactcaacactcgtgtcactgtgtcgtcttgctatgctctatgctccatcacacattcactagtacaccgtacacttgtgcacaaagtcctaagtagaaacaaacaagcatcattgacatgtggcataatgtatatgcaaacaagcatcatc

SEQ ID NO: 135969 - DNA, 472 bp, Zea Mays
ctcaactcctcatcaagtggtcctcctagccagctgatcttgccacttgggaagatgaagacgccatcaagcatcaattccccaatgctccggcttggggtcgagccgtgtcaaaagggggagagaatgtcacaagacctgttgggagcccagaaccgagaaggaccaaacgacaatacaagcccaacagagcggtgtatgggtcgcactggactcagtaggggagtgtatttagtccattcgtcagcttcgttagggttaggcgaaggagagagttggctggaagagacatcttggccagctgcgttcggatttggagagtgttgagaggttttcatttctatttgctaccctggatttctgtaaactaagaacttcgtgagagggagagtactgggagcggtgctcattgtcaccatatccttggtgtgattacagtttgttaacgagtcacctcgcgagctaaacgagc

SEQ ID NO: 135970 - DNA, 543 bp, Zea Mays
ctgaactttattattaaaacttaaatctgacaccttcaccactctgtccaacctttttccttatgttgccactcaatttagttgcactatcaagccgctccatgtgacaaacgggtgtgaatttgataattcctccaccgggacttttgtactctccaaagacacttagttgtgaatgtcctgccattacacgttccctcaaacggtaaagccgagcgtattgttcgttccattaacaatgtcattcgttcgttgttgatcaagcatccattcccagacgatattgggttgaggggctccacactaccacctacctgccgaaccgtccatctccccaacaaaaaacgatcaatgctacgtgtcctcgtgtcactctctttggctcagcaccttcgtacgatcacctgtgagtttttagctacgtgtgttaccctaacattgtcactcctactctccacaagcttgctccttgattcaccttgtgtgttttttcgtctactcctccaatcacaaaggctaccggtgtcttgatctatcttccac

SEQ ID NO: 135971 - DNA, 416 bp, Zea Mays
gtattggaagatatgttgagagcttgtgcccttcagcatggaggaagttgggataaaagtctaccttatgctgagttctcatataataatagttatcaagccagtctgaagatgtcaccttttgaagctttatatggcaggaagtgcaggactcctctatactgggatcggattggagaaagacagttctttgggcctgagcttattcaagaggcagaagaacaagtcctataattcgggagaatttgagggtagctcaaaccaggcaaaagagctatgctgataatagaagaagaccactggagtttgaggaaggagatcatgtgtaccttaaggtgtcaccacttcgtggaatgaggagattcaaggttaagggcaaattgtcccctcgctttattggaccattcagaatcttt

SEQ ID NO: 135972 - DNA, 707 bp, Zea Mays
taaaaagccaacaccgaagggatatcctcgagtgccatctgttggatgctaatctactggttgggattagatcttggctcaccgaaccagtaaggagtcgtggtcgttggttcccagatcatcggcccactagtcatctactggggccacaatttattgcgccaaacgatacctttactatgattgtgaccatacgcgatcggttcaacggtctctatccaccctgtgaaacggtttgtcatcttctaatcttggcccttcatcacggagccaacgacacgcgcaccgcaggctcccttccctcacaccgatcgacatcgcacgacggcacgcaatagccaacagcagtgccaaagctggtgagcagtgctccccggcccaggtgcacctatccctacgctggtaggtgtagaagattgaggagatccatacgaacacaacaggggatgacttactggcggttacgtgatgccggcaccagcccacggggaaacacgatccgcgacggcctccctactccagtgatcaatttgctccaagcctgccacgatctcccacaccgctgtccccgcacacgccccacgccaccacccaaagcccccgatcccttttccttagctcgattggcggcgcaaccacggaatgccctccctctcacccttttccttgcgaatgctcgatacctctctgctacccacagtctcgaa

SEQ ID NO: 135973 - DNA, 494 bp, Zea Mays
cttgtaaatactattttctgcttgcgttgttactcttggccttgcttcacttgtgtagctaggttcgacccttccgcgaacactacaggggctcggattcatctcctctaaacgttacaccgtcccgacaacctttgtactcctaggatctccccttgcgggttgtggctataaaagaaggggcctagggtccccaaaagcagggagacaacacttgattgtctgctctgcactcccgatattggcacttttctcaatcaatctcaaagacttgggatttactccctctctcgtctagcttgtatcccctactatgagcacctaggagcaagataataaaagtctcaccccctcgctggaagtagggccttctcttgtccgaaccaatataaatcttgtgtcttcttgcattaccatctagaccaggacacgtagtacaaattcacttattggttaggaccctcgggtcaaaacaccgacataatcattataga

SEQ ID NO: 135974 - DNA, 433 bp, Zea Mays
gaccactgtgtttgtttgcctctggttgagcgccatcggctaggttcactgctttactatgctattgaggatgcatggtgtttatgtcttgaagccacgtaccctggttcgagcagctactggcacctccctgtggccatgtatttatcgccgcaccgctgattctccgtctcactgtggccaggcaagcaaggtcatgtttcacgttgtcgcttccacgtttcggttctcctatagggtactgtcgtactgatgcttatcggctcggccgtttcatctttactgctatagaacttccggaacatcgcggcgccgccggcgaacaccgcctgcctggattagcttcaccgtcgcggtcatatcctgatcacgtttgggagtcgttctactttgtgatgagtccctgatacaaacaacaaacttgttgtcttct

SEQ ID NO: 135975 - DNA, 1210 bp, Zea Mays
ttctggcgcctggttgtcacgagcaacctgccaggcagccggcggcttgctccagtgacccgttccaggcggcggcccttgagaagtttgagatgacaagcagccagccatcactctcatcattccggcgccccactcaggcagacgagacgcacaaggctggcacgtctcaagggctcaagtcttctgcaaaaacagaggctggactgaagatatcattaaacatggatgcatacagtccgtagcagaggaaaacaacaaaaaaaaattatcctgtggattcccagcacccttttccccatcgtgatgtgcttttctagttcctatcgaatccagattaaaattataatcagtaaagatcacacagattaggactgacttttaagtattcgatgctaaattttacttgcaggttccgccaaacaaagcagagggcgtcgctgccatcgcctctccggtctcttttggaagtgccctctgaattctaccggagaacaaagggaaaaagaaaagaaaaaaggcgacgaggtactccgccggtaaacaagtgcagtaaacgagtgatgacgcgaccatgacaggcactcaggctacttttctcggaccattagtgccagatcaacagatagacaggtctgctcggtaaccagaggacggtcgatggtttcagatttcgttgaccagtgaccagatccagtgacacaaggagccagagcatcactgctctccagctccgtgcaagtcaacggtctgtgggggacgacacgacacgataaaggaaagcagaagaaaattgcattgcgtttagatggaacatgccagatcacttcagttccttgcttggctgtagaaacctgtacctaatttcccaagctttcggctgacttgctggttctgcacgcgggcacgccactatgtacacaaggaaaaaaaataatcaattgtcacactcgtttttttatcttctccgagggcgtagcttgcattgcgagccaaataaaacaaggaggtgacgaagggtgagagaacatttcaagcatatccataccattctcaatgcttgtaagtcatccatgataacggggacatgggacacatgcttgccaatcaccaaatcccgtggaagttcggattttgtttatacagatcaaatcaacaaatgccaacacaccataaaaaacatttcagaaaaaaatgtccagaattggtc

SEQ ID NO: 135976 - DNA, 362 bp, Zea Mays
cgaggggccttcaccggcatccgagggctgcaccggattgacctccgcaggttcgggcggcgcgccgaccaggcctccaaggtcctcgacgtcctcagcacgctccatctgcagcaacagcacattcactcagcaaaaactacacatacccacacgcaaccaaccacacaaaaataataaccttcacctgctctctcgcccggtcggatcgctccctgacagcctcccgaccatgcgccccccacatcctatcaaaaagtgcccccgctgactgcttcacaacagggtcttcggccttgaagatctcgtgttcaaagctctcgtctgattggtcgaagacctcatagtgtctgcagccctcg

SEQ ID NO: 135977 - DNA, 375 bp, Zea Mays
taaacggagcatctaatgcagataaatcatgattgtggatggccaactcatccaagtcaagagtgtagctcctctcctcagccttacccaaaatgttctcatagaaatcaaaaacagccttctgtttatcttcttgtgaggtgaccacctgatcaccaacgtgcagcttaggaatgaagttcttctttttcctgtatttagcctgctgatgaaaaaaggaggtgttggcatcaccctcctgaatatacaaaatccgagaacgcagccgggcgatggttctcaccagagaggccaaaccaagacaatgaagcttcaacttccgtctcagccactcctcatcatcagcaagagccctttcatctctttcaatttccc

SEQ ID NO: 135978 - DNA, 550 bp, Zea Mays
gccaccttattatgtaggatatgagatgggttggttagggcaagaataacctggggtaagaaagtttatagtgagaagaactccgtgttggatggtaatgcatctgaagatcgagtttgacttctctccttccttgacgaggttgatcttctttggccttcaatctttggagttaccatttgagtttatagacatgtagatggacatgggtaggataggttttatgggatagttcaaactttcggatgcttttatgttgatttatacggattgtgcatgtaggtcaagtagtggtatatggccgagttaatatcagataccagttttggttaaaacatgtgtatagacgtagggtctaatctatttcaccaagattaactaacatgttagataactcatttttgattagatcagacttagattagatgggatctagattagactggataggactagactaggttagattagataggtttattagggtaagatgaatctttattaggataagttaggatcttttgagataagatgaatctcaaaaggtaaa

SEQ ID NO: 135979 - DNA, 650 bp, Zea Mays
gcggccgcgacatgggtcagaattggcccagcagaggggggaaactcttttcctttttctttttaccttctcaactcatttcctatttgtttctttttctttttgcacaaaattatttagtggatattctaggtgttggaaaataaaatctaagtgaggtgcttgtgatcaaacaaagtgtatgcatatgatggaaaaaaatctaagggagttttggaattagaggatgaaaagaggggaggggtagattagggtttcaaacctaggttaggattttgggatgttacaatgcggggaggtgggtctcactttcctctctaccggcttcccttttagctctcaggggaaaccctgctccaatctcggaggcggtaggtgtggttttatccgaagccatctgccagggggagagagtcactattatgcacatgccaattgttttcaaccaagttattttattcattacaccaatacattacaagcatatggctactacaagttgtactacacgcgagcgttttctgaggtactactgaactctttctctaaagtgtccccaaattccttgagaaggtcatcaaggctagctagggacatatcctcgatgtcggacaaattctctatcctggcgggagctggtgctgggggag

SEQ ID NO: 135980 - DNA, 1098 bp, Zea Mays
cgcaaaaagttgcctcaatttgacactggcaggagcatttgaccacgattgctttctctgaagaaggaaggcttataagcgggtagaagctatgttggctggccggtatggtcataaaaatgtgcaagttgtgatgacgacataggtcacgtgggctgtgtttctttggtgcaacccaagtagctgccaggaggccgcacgcttcctaccctgacccagcttggctttagggtcagtctcccttgctttctctgctcagcgagccctcgccctctagctcttcctgctagcaccgtctccgtcccgtgctctcctgttcatcatcgatctcagccatctcaggagcactcgctcactcccagacgcccgcgcaaaggaatctcccacgatctccctccaaactgccccactccctccatgatctccccctctagctcatgatcccttcgcccgcccccaccccctgcctgccacgcccacgggcgcaacaagccaacaacccacactcggccccgctaccccgatccgtcgccataaatccgctacctcctcctcgagtcctacttgatcgccccatgctcgatcggtcgaccggacggaagggcagccccgaccgtgacaacagcgcgatgtgcaacgagtgagggcgatggcgggggttgcgaccactgatggagagccacacaaagaagcccgtcgacgatgttttcctcaaggtttgctcactcattccttccttccttgtgctattggcgtgtgatcctagctagtgctctcttgatttcatccttatccacgtgaatcctggatcacactgcatgcagatcggattactggaaggccagaccagctgctcgcattcactggtgcacggtgtgggagctgagagctccgttcctatggccgggccccacctctcttgggcccttgtgcagatacacagaggtagtgtcccctaatttgtttgtcatgtcccctaatttgtttgtcagagctacttgaggatgtcaatgaggtatggctccgctggttcatcagtattcagtaattacaaggcattatgagttagcatgctccctcctgctaagctagctaaat

SEQ ID NO: 135981 - DNA, 373 bp, Zea Mays
taagagcagctccaacaatgccccaaaagagtgacctaaattaaaatatagggcttaaaacaggaaaacaaactccaaccgtgccctattttgccaaatttcatcaaaaaaataaagggcacctccaaacctgccacaaatatgttgcatccaaatgggcggacctatctctcaatcttaacaaactgaatgttcatggcaaagcgagtcccgccactccctcccgccaaacctccgcgcgcaggttgatattcaattttgcctcccgctgtacctccgtagtgcaggtcgaaattttaactcttgtagccgccgcctcgtgctcctattcaacaaggcgatctagtacctgatccaccgccgccagttcttg

SEQ ID NO: 135982 - DNA, 541 bp, Zea Mays
ctgcgtgccagcagccatccgagaacccaccgccgtagaccggccatcctagccattcctcgcctcgtacgaccctcgagggagtctccacgtgtctcggtgaagctcctagagccgggaatctataacaccccaggtgttacctagggttttcactcaagcctacactattgaacccatcatcacatgtggtttagttgagcaaaagacaccaaacttgggcatcaagatcctaagtaggtgtaacccatcttagaagtcatgccttggccttatcatgcactaaagagaagagaatgactcaaaccctagttcaaatcccttgtaggcaaatggagccctagaggggattatggcaaaaagtctatgtaaatcacattgtcatgacttgggctaattataaaagttgtagtacacttaataccctacaaaaactagaaagagagtgaccccaaaaagatttcagaaaaaccccaaaaaggtcaccaaagagtagaacatcaaaggaaaatcaggatttgctcaagttcaaaaccgaccc

SEQ ID NO: 135983 - DNA, 821 bp, Zea Mays
cggtgacgggcggacagtagtagtattggtagtttctgggatttttgtgggggtaattaactgtaatcaccgtgaaaatcttgtaaatctttgtcatatctttccatagagtacttatgcgttcgattcggaggtatattctaggagatatcgcattttaaactcagccaggatgctgtccaaaaactgaacgcagggtgtaccttgtcggctgtttggggccatcatctaaatgttggaatttaattatcttttgaatacaaaacttgtggggaattttatgtagatgcttttgaagtttttgtttgatatcactgctgttataattttaaagttatgaaattatcaagcagcaccgctgcagtttggtgggtgatggggacagttgtcgcttgcgacaggttggaattgtgcgtaggtgcggcgttgtttatgagcgtttgttatgtggatttgtgcactaagatgtgtgtcaaaacaggtggtggacttccagatcgtacttagtgcttttcccaaatccccggtgaaggcgagtaaaatagtgatggtttataccgtttggttgatttatgtgtcctgttcttgattcatataaatatcaaatgtgctcatcatcaaattccatttttaagaattgttgtttgaagttattcatgttctactatttacatatgttgagggccttgttcgagcatgttatatgtgttgattcttattttgaggaagtggaagtatatatttaacacatgataaatggggtggactcatgttgctgtcatccatagtgcatccatcattctttgcattgaagttttgtc

SEQ ID NO: 135984 - DNA, 443 bp, Zea Mays
gagaaggacgcccgacccctatagcatgttcctttgactaggtagagagccgaggccgagttcgggagcatgggcgtgtgttcaagctcggcctgtacaaggttgtggatgagacatttccatgtgtgagagttggagtggttgaaacagtgctcggcatggtgaaaaatcgtgtggtaatctattccaggcatcatcctagacggtggaaagtagattggacatcggccttgtttccgtagccttactgtcatcagcagggttcgcaggagagcaggtggcatttgatgcacgtgcttcgctgttgaggcacttggccgaggtcaagctcaagcgaggtgaagatttcttttgaggccaaggccgatattagatgttgcatgtagtcacgatctgggtggttaaaacagtggccagagcgggagaatagtaccttgtatgtg

SEQ ID NO: 135985 - DNA, 638 bp, Zea Mays
ggcctcctggcatgcatgtacgatgtcttcgtttatccgttgtccagtgagttgtgtgatgattgccggacgccatgagcgtttttgaacgagagatgcaatgtgcatggactcaagaacacttgggtttggtttggcagctgcatcattctgtcgtcggcctggccatcacatgaacgtttttacacgcttttctcgagggcattgaaatactgccaacgattaccaagaagagtgtactttacggagtcttgtgctttcaaacaatgtccctgcacctagaccttgtcagaaactcgccggagagacaacctccaccaggtcgccggcgatcactcaggtgaacgggcacgcacgcgaagctagagagcaggacacgagttggtgctgctccaattggtagaaacgttttctgaatagattaactgactgtaaaaatgcaggcccaaggttacataagcgtgtttctacttcagacacacaacaccacacatgcaccacaccaaccttctcattaaacacgatcagatcttgcttacactatcagtcaacaggttctgaccacgaaactgacaacagcgacacacaggctaaaatgagcggccaaacgcctatgacagactgaaactggacaaaca

SEQ ID NO: 135986 - DNA, 602 bp, Zea Mays
ctctaccggtgggctcagaattttttggcattatcactattttttccaattctgattctctggccgcatcatctttggctttggctggcgcgactataggcaccttcggcactacaatcgacccttcaatgctctgagcggtggaagcggcttgttttgcttcggcagcggaggaggtcccttaaccaaattcaggcactataaccgtttcaatatatcgaggccggtgggttaaaacctttattttcttcctcttcggcacagtggtggtggccgaagcggcagttttcctcttttttccttgccttctcaaggggtagcagtaatcaggatatatgaagccaattgcatcaaaaaccctgttcaatcttttcttgccccgacccccaaaggctgaggacaaggcatcatcctcggctctggtatatgtcccaagcaactcgtcgttagtagcctcaatgcatttcaaccagtcaacatttggtttgtcaaactggtccctgaatctgaaggtatatttcaatcgaactaatccaccttcgctggattcagcagtagtctccttcggcatctcccagctgtccacaagtggccatactctg

SEQ ID NO: 135987 - DNA, 480 bp, Zea Mays
cacaagtttacttagcaactcacaagaaaagggtcaaggaggcaaatcatcctgtggtatgctatttagacacaaagatgtatatatcatatatgaaaatatcaagaattttactttacaaacaagataattaggtatgatttttatgcatacaggttcagctggaaaaccttatagaaaagcaaccagaattagcacaaaattgtgagggaagggttgcgtgggaaggtgatgcactacatcaagtattgggagaggagaaatctggacaagtacatggcatgggcttgcttccaattcctaaacaagtttatggctgaacaacacgtcaatttaaggacataaatatagctacaatagaaggatcatcagcagacgtagacacacatttgttggaggaaatacaacaactcaaggagcatgcaagaaaacaagacaaagttattgatgaactcataaacaagaaaagacacaatgaga

SEQ ID NO: 135988 - DNA, 681 bp, Zea Mays
ctcttcgctcctctgcccacgaggcctccctgatccggccccgtcgaggcaatgtttcgtgtttcttgggatctcggtcggtcctacgtcgtcagttggatttgggtgtgtcgaatggaaggattcggtccgttgtcggagtctgggtggttgtgacggagctatggcggatttggatcattttgtgtgcggcagatctcgacttggtagcttgatccagtgtgcctcggtcgttttgggtttgaaacacagggatttctcagcagagtcgacgttttgacgtgatgcgtaattattgctgcaattctgtgtttgttatgacgaattgggcatgttagtgaaaatgggtcaatcatcgtccgatatttgggattgatttctttgaaggggttagaacgctgacaacggcgcagctttgacgatcaaattgcactgttgcattgcacaacatatttgaatagaaggggttgattttatttgaattgagctcatggatggacctggtacagagggtgaagcttttgcttgagcaaattttcagcctggttgtagttgttacaatggtttactgttcatttttatttttgctgaggacactactttgcccattttgaattgatggttgcattttttgttgaatcaccttctggaacaacaacaatccatttttgttgaatcagt

SEQ ID NO: 135989 - DNA, 682 bp, Zea Mays
gggtgaggctggagaaccatttgtcatctccggtcatgtggcgcgaacagccggagtccattatccatatgtcctcctcaccttcgacctgcagtcaacaccaagagcgagaatgagctaatgactcaacactggggttaggataatgcaatgaaaaccagtgctgagccacttgctcaaaagaagcattagcaaaatcaaagctctcaaaagaacaacgaggaccaggagggagaaaacgtggcctgtcattcctgcgtggtgcagaagcatgagtacgcgagcgaaaaccggaagaacaaacagctggctcacgtctcaaaataggacgatcatgagtaccacgtgcggggtactgctcacgtcgttcagcacgcatccttcgaaaacaaaactcataaagatgaccgtcacgatcacaaaaatcacaatggtatagtttatgtgctggcgcgaaggaggctttagcattagaaccagaagcaacaaaaatatgcttagcagaattatcacaagagaaaccacttggcttagcattttgtacacactcgaagtattttggcttaggcacccaaacctgccttttaggagcagatctagatgtctcaaccagcaacccatcagaggtgacacttgaacccttcctaggaggtggtccagtatatttagccagaggtggatt

SEQ ID NO: 135990 - DNA, 375 bp, Zea Mays
caccctccgttgcaagcaaccaaccgccagcaaatgcctgttggcactgcggagaccccagtcacttcaagaataactgcccccagttgaaggcacccagacctacctactccaactcggtgaatggccccaagattccctcggcacctacctccaaggcacctccttccaacaaccagcagagcaggactcagtaccagggcagagcacgagtcaaccacgtcgacgctcaagaagcccagtaagctccgggagtagtgctcggtgagttccttgttgaatttactcccgctactgtgctttttgattcaggagcatcccattcttttatagccactaagtttgtggaaaagcatggcatcccctctacgcccc

SEQ ID NO: 135991 - DNA, 434 bp, Zea Mays
agctaatcctggagtcctgggaccctatgctttcttgctgtctgcaaatttatttgtcacaagcttacatgattgaattctggcattgaattggatggttggcatcaccaattcgtcatgtcaattcttcaaatttacaatgcatgatggttctagtggtaagatcattgcaatgttttatgtaatgtggtggtggtatcactcgactggttgatccagattggttacacgtccttcgtttaagggtttgtttaggttggtggaattctgtgaatttttcttacagggaagtgaatgaagacgaggtgaacgtctgcggtacagtaagatgagtttggacaacgtgtgcggaaaaggacgagagctcgcttgcactccatcgatactgtctacaggctaaaggtaacaagaacgaggtcaaaggaaacgccaag

SEQ ID NO: 135992 - DNA, 556 bp, Zea Mays
aggacaagttctatagcaaactccaccttctgctcatggcatttctggtagttcctcaaggaacacatctagaaacctcgatacaacatgtatggtctcgaggggggtggtctctttgttatcaagggtcaactggtagcaaacttctttttttggctcaggcatacttagttcagctgttatatcctctctggatggggacaccaatttcatagtcctcttgtcacaactgattacctcttggtactttctcagtcatttcatctctaggatgacatctattccattccatgtgtaccattactattaagtcagtggggaatcctatcccccttatttccacccttatatccgaacatattttatctgcttgcactctcccaccaccgaactaactctcattagcgaggcattggttctactggaatgttatgtgtctctacccatgatgtagtaacaaaggaatgtgtagcccatgtatcaaacaacatagttgctggatgagattggacttggaacatacctagagccacgttcggcctttcctgaactgtct

SEQ ID NO: 135993 - DNA, 464 bp, Zea Mays
accagtacatggtgctggaggtgtacctatttgtagtggtagttcttccttaccagcagatgggggtggaggtgtacctgtttgtagtggaagttcttccttaccagctgatgtgctagttcaaagtgctgctaaaccatctgtttccagggcagagtgccggaaacatatgaataagcgggagattattgaaagtggtataaaaagttatattgttgtatgtcattattgtaaaactgagttgagtgcagattttgctggtggcactggacatctgaatcgacattttagagcttgtttgaagaaggtagtgcaaactcaacttaacttcattgcagatgacactgtaagtacatgggtttacaatccacaagtagcacgtgaagaaattattaaatacattgtttctgaagatttacctattatgatgggtgaaagccctaattttaagaatctgattcaac

SEQ ID NO: 135994 - DNA, 361 bp, Zea Mays
caaaattgtagaccaaacaaaggagaacaactttgcttaagagagtaagcatagttgttgagaagatgttggagataattaagcccaaagttggactgtcaggctggtggaactctgaaattcagaacttcagtgtaacagagctaactttggacttggatttaaacatgatccagtgcaagtttgggcatgattcgcataacaaatttgtagctggtatgtagctccacaattttgctgcagagatctggacgagttgctatatgaatctgagagaaaatgaggcccaaactctgtttgtcagaccgacttatgaacatatcccatggtatagtactggaaatatcaccggagtggataa

SEQ ID NO: 135995 - DNA, 360 bp, Zea Mays
cgagaagctgaggaaatcctggctggcaaggatggtcttgagttctggtcttagccctttcaaaaagcggaccatcttcttggcttctgtgctgacgtcgtcaagcgcgtagcgagccaattctgtgaatttgtgcacatactcactgacagatcttccaccttgagttagttcccgaaattcatcttccttgagctgaacgatcccttggggcacatgatgttctcggaaagcagtttcgtattctgcctaggtagcatctctgacggtagcgctgaatgtatcccaccaggatagggccatcccggaaagttgatgagcagccaaatgaacacgctgattctcagggcatccgatggc

SEQ ID NO: 135996 - DNA, 1487 bp, Zea Mays
aaaattatttttggttaaagcagggaaaatgaagacaaagatcttaggacaacacacaaaattagaagcattttgagtaacaccggaacctctaagagaggatgtagaaatcgtgaaggaatagaatcgaatttagattttacaaaggtgaaatagattactatttttgttgtacagtaactaggcgacaaagttgctatgtcccaaaaaagacttcctgcaacaatctatgagcacgaaaaatgttttgtgggtgaactgaaacgcaagcaatacacgcatcctaaaatggaggaaacaaatcatggattagaccgagaagccaaaattagagaaaagcctagacccaaatttttttagggaaaattgaggaccagagacattcggagttcctatgtcctcaaatgagttcatgcagcaatctatgagcacgaaaaatgttttgtgggtgaataaaacacaagcaatacacacaccctaaaatggaggagaaaaatcatggattagatcgagaagccaaaattagataaaagcctaaaccctaaaattatggggggaaattgaggagtccaaaaaagcatgaggttctccggtacaagaaaatcatagcaaaaggatgctgagcatgattgaaagcacgaatttggaaacaaatagatgtccaccgaatcgaaacggacgatgaaagataaaatatcaaatttgagcaaacaatcggagccgaggaggaagctagtcgagaggaaacttcagtacgaaggcggagtcaacgaggaacctaatgccgacaaaaccgaatgaacagagagaagaagggataatcaaaacctatatctcagcaaaacaaacggagccgagtaggaacccgcggcagatgaagcgcatgtgttgatccagaaaggactaaagtgatgtaaagcgccacagttgggagaagaagcgagaagcaaggaaggagaattggagaagtggtcggcggatttctctagaaatcagtcggccccctttttgaccaaaccataagatggtgcaacaggagcaacacgagcccttgctttgtaatccaacggtgtacaatttaacgatgacgtggatagccccacatgcgtcgttttgaaccgactttgttataagagaaattagaaatagtcgaacgacgttggatcgacgaggatacctatttcggtgtctgatgattcgtagtatccggtgtttgtcgaaagcctagagattgatgagcaatgccgagtcttccaatcgatcctccaactgaaacaatgcgctggttagggttggaatggcgacaggtgcaagcggctgggcttccggctcgaggggggagggaggcttcgctttcctagtcggcgaggacggttgaagaaagcccacgattgtcgtgcgagaataatggggaggggatggcaacgactgtttagacggtgtcaatgtggtctcaccggtgcatagagtcaaatggtctgaccgga

SEQ ID NO: 135997 - DNA, 873 bp, Zea Mays
gtcttctcagcctgcccttggagaactttgatttattttggtggtgacgtttatccagctctcgcctggtttgaacctattctgactggaatatcctcgatgacaaggacctagccgggtgagtctgaaccagtggaggtccagctggacggcactcaaccagggtcttcaatgcttctatcgattggactttggccgatagagttccagccgacttcagtttgaccaatcttgcttttttgtcgtttagtattcattgcggatattttgcaggtcatgctgcttcagaaaatctcgaaaaatctaggtggtacacccaacgggtggacccaatgggtgtatatccattgaaaagtgtacactgtcttgtccaaaaatagtaaactgacgtgatgaggaggtgtaatgttgcgtctaagcgattgactctgctttcttctggtgccgtgttacatgaatcggcgtcagcagtctgtcccctttcttggaaacttaagttgctattgaagtcctgcgactcttcgctgaacgggcgggaaacgaagagtcaccccttccctcggctgtcttcctcacttgtccttattcttctgcgctcttcttattcttgcccgagagaaacatgaccgacggcaaaggaggcaaggacaatcacaactcggtggaggggaagcgcaagtgtcctccgagtcctccatcgaaggactttggggacttggagtattctgaggaggagttctccttcgagtatggtggttctcctccgctggcatcctctgcggcgttgtctcatgactcgaacaattccatggggctgtcgccggttgagtgggcatacatccaatctgtcgagcaagcagggctcaaggggtc

SEQ ID NO: 135998 - DNA, 397 bp, Zea Mays
attaaatgtatctataattttttgaaaaaaaatataacttttgatactttgattatacaacgattgcatcacaagctcgattggataatggttttggatggttaaagtcatgtatgtgtactacaaatatccctttgtcgagcatcgagtttcaccgagagcttgacacttgataaagtcttctttaccgagagttaaagtatgccgagagttttgtgcttggcaaaggatgtctataccgaatgtctttgtttgtcgagaatgtcactcagcaaagcatattttgctgggtgtccgattaattgttctcgaaagagagctgggcacttgacaaagagccggattccgatagtgtaattgtctcgtacataatatcttgcttttgacggatttctaa

SEQ ID NO: 135999 - DNA, 356 bp, Zea Mays
ctgataatagacgaagaccactggaatttgaagaaggagattatgtgtatctcaaggtgtcaccacttcgtggaatgaggagattcaaagttaagggcaaattgtcccctcgctatattggaccattcctgatctttaggcgagttggggagatggcataccaactcgagttacctgctagtctatcggatgtgcataatgtgttccatgtatctcaactgaagaagtgtctccgtgtccctgaggaacaattaccaatggaagagctcagtgtacagggtgatttgacttacacggagtatccgatcaagattcttgacacattgactcgagttacaagaaataaggtgataaag

SEQ ID NO: 136000 - DNA, 455 bp, Zea Mays
ccaaacagaagcagagcggccgagaacaaggacaaaaagagaagtgccaaaactgtaggttggactccaagaaaaagaggtcgcccaacaataaaaaaggactagatggaaatcaagacgaggcgcagagtgagggggatgagacacagcaatctgggtgcactatggccgtggaggagtcagcagcacacgcggtgattgcaagaattaggagggcgacaacttgccatgttaattaccaggacgaaagtgattctgaatgactatgaatctgactgaatctccaatgtaatatttcaattttatcttattttataactctatgtaagttaaactcaataatgactgtgtgactgttctgaaaacactggacacacatgaccaaccaattgcaacatcgtagttgcgctggttgcaactgtatgtatacactggataatagatgaatctgtgtt

SEQ ID NO: 136001 - DNA, 480 bp, Zea Mays
tcccgtatgaattatggattcaggacactaattttccacaataatgtagatgcatggtagcggctacatatgatggtggaaaatgaaaaagaaatatatcagcttgctaggtacgtacgacatgcatgattttctttcaggtgaacagccgttgttgcggtctccttgctggctttatacttagatcctcaggatggtgttgcagcggttctgtgcaccggctctgatgccatggaacgcttatagtcccgccaaagagtgcggcgatcatggtggccacatcccctggcgtcagccgcactgcagcgccatgcctccggtagaacatcctgtacttgggcaccactgctgccgttgcggccgccctcaacgcctcgcccatctcctcgtccgccgccacccactgatcctgcatgcccaccgcttccagcaccaccgcctccacacccttagcttctccctgctgtccctgcggcatgg

SEQ ID NO: 136002 - DNA, 506 bp, Zea Mays
ctcaattatttaagttggcctcactccacctggagtagcaaggtggtactaaagttcccaccataccatgcatgtgtgagtgggactttgggatttataggaattattatttgggccaagcctaaattctctaacaatcccccaccagatcctagaggcacatttcatcctccctgtatcaaagtattgttaatatatcggatgttccgtggagaccggctaaggttgaacattcacctagaatgactatctaggctcatccacaactgcacaatggactaagccttggattgacagtttagtgtgaacaagtttcacttgacgtctgaaatgatactaggctaccaattgcctagcccgtgagtggagcgtataggtcatactcttgtgtctcttcatgagcttcgttaggaattcccaaatccgatgaattgtgaccaacaattgagctcacataggtgtgttcttacaaaaatactctatacgacagtatcttgctataaagc

SEQ ID NO: 136003 - DNA, 545 bp, Zea Mays
gagaagctcagctcagcgtggctcacatttcaaaactgctgagattattacagtactgtatgtttaatttccttccaaaaaatagagaattattttattttgaatgaatggacgtcgatttggctctcctgcttggtttggttttaagttcggtccaattattaatgaacgtcgatttgcatgcagctcgcaggcagggcgagctaggtcaggtcagggtagggctgtggcgaggaattgaataggggtgccgtgcatatatgcaaccctcgtctgatctgatgatgatccggcatgaatgatgcagggatgaggtggttggttttaatggcctgcctgcctgcctgctcgctcgtccttgcggtgggcggtgggggacgacggccggccagcacagcaggagccgtagcgcggccagcaagcctcctcatgctttgccattcgtgagtagtgcaagctgccgccattatcaccatgcgtcggtgggggggggttgcaataactgcctggtacggttatactatgcctgttggccgcaccggccg

SEQ ID NO: 136004 - DNA, 551 bp, Zea Mays
cttgctgctatcgcgggcatatctttcgaagcgttaggaatcgccggctcagcatccgtaggtctcgcctcggcgatctacgttgcgtgtgcgaggatcgttgcgtttcgtgaatgctcattttatctagtacgtgttccaaatggcgatgctcattgacgatagcttggatgcttgcaagtatcctgaatacttggatgagatctgtgtgaacccatttgacccatgacctgataatctaaactgcagtagtaaaaaattctagctcgagggctggattttactataggtgactgggtgttgggctatctcaacaggccacacaaaaggccatggaaatgcaaaaatttctctcgcacggcactgtagcgctatgcatgtgtctctaacaggccacacattcacaagaggcaaaatgcacatgaggagagaggttatacaaatttgcacaccctgtcttcttcaatgcataagcataactgtgcatgtgagggaggcaatgaggaataagaatctatactactcctattaagtacctaaagaaggcgtcc

SEQ ID NO: 136005 - DNA, 491 bp, Zea Mays
aatttcaatcaaaaacttatcatttttttataattactcatcatacttaaacaacatggatcaatattaacctcatgttcgcaagacttatcatctactgtttgctgatagataaccatgtcctcctctgctcagaagcaggcgaaaacaaagggccaagagctgtgcagtgcagagataggacatgatcaaacaatgcgcaaagctgctcctgctgcaaactgggaaaagaagacaaaactatattcaaaacaatttcgcgaccaaaagaggatagacaacaatcgtaatctttcttgctgatgatcacgttgagctcactaattgtaattactgatcctagctatatacatcccactaaagagtcctggcaacacacgcttcttcctcggaatcgtaatatgaaatggagcaaggtgactttttgttctcccaccattgttcacacatgatgatgatgcagtctactccactttgtagataggaataga

SEQ ID NO: 136006 - DNA, 1242 bp, Zea Mays
aggatatgtttgctgagctgcgatccaacgtgatgaggcactcatctctggaaggatcgaataatgtgctagttaaatttgaacaaaatgagcgtgtggctgcagctaggaaaggtggagatgcaagttagttggacagcgaatcacagccgaaacgatctgaaaatgttgtttttgatgtcaatgacaatatgacctcaaacatgtccaagaaagaaaaaggtagggaccatgacgaagcagcaaactgtgagaactctgcagttagcacaagcagatatcggaatggtcatgaagattttccgcgctaagagagattggaagacaggttggaaaaatgaagattgtatcgaggacattgctgtatgtgttggttccgatgatgaagagggttcaacagaagaaggtgcaggtcgaccctaaggatcaagaagactttgacagggcactgaaagccattcaagcttggagtcacgtaagctgactactgaagcagcggacaaaagatgtgtgggaatccggtggtgttagcgaggtgtgcattcaaggtgcttgtgaaggaaggacataagcagcagacaaagcaaatgcccatccgggggggactgccccactggtgccagagcaacagaatgctgctgagctcgaggagaagcagaacatgaagcggaaaattcttggatacaacgaaaggtaggaagaagaagaagaactgaacggagcgttcgccaggaagtgggaacggctggtgtcaaggaggaaggactgacgagcaccctgctggtcgcgttatctgggacggcccaaacagaggtggtggtgtacagtgcagcacagcggcactacttgggttgctggtgggttcttccgtggctatggaagggaggtgagctgatgccactgcgttcatggtttggtttggtaatggtttgccccaggaaagagccacctcagtatcgttccatgaacgtatttgcatcaggagttgtgcgacgtgagaacggtttgcatcaggagttggctcgtggtatgtggaactagtttgtttatgttgctatgcttgtacacaggaccgttttcactactacctcagatcaggtaatctcgtatccactagctcctcaaccgatgccttgcagtgcaaccctggacccggcgaccttgaacagttagttgactctcatgtttgctctgtcagatgtcaggatgcttatggcgcgcatgatctgagcacgagaattt

SEQ ID NO: 136007 - DNA, 504 bp, Zea Mays
cccgaacgtgggctaggcgctctccagtcgactgggcgagccatggccgggaaattcctcgtcgggcatcaactcttgctgtgaacccgcatgtctccgtgggcggcgagtcctgctactcgattcacggtaaaatcgctcccatttggttctgcatctcttcctcttccgtttgcaccatttatcgctcgggttaaggctgtagggccgaccgaccgtgttgccggcgacggcgccgccgcggtgccctgtccctggccgcacgggtggccggagggggaagagaagcgcttgccgtgggcctttgatctgtgtacgaacgatctagattagatcgggttcaaactagatgtggatcgttcgatctgaatggacgagcaagattatatacaacatacctccttcgcagatgaaatgtgagccactggttatagatccgatggttaggttaggtcaatgacgtggaactctctcggtcatggatttcgtgtccgtgggccttgg

SEQ ID NO: 136008 - DNA, 417 bp, Zea Mays
tttccatgtactttagtagaagtttcaagtttatatttgaaagacattgataaaagcttagtcatcaacatcaatcatgatgcaaaaccgaggacggtttgatgtcaagaaggggagaatgatgagaacataacccacacagatatggccatgttaatggctcctgctataaagacattgaggaacaaagaagttgattggggaccaagtaatgatatttccaacatttccaaccaagcaagcacatcatcaaatttaaagatatacttgggtgaggagcacacactagagtcgaggacgactctattaaaagaaggggggatgatgaggacatcactgccatcaatacaaccacaccagcgacccccttcaccatttaatcatggaccagtgaaacgagtccgtgcacgtaaattt

SEQ ID NO: 136009 - DNA, 496 bp, Zea Mays
ccgtggtacaggcgggggccgacggatgggtagggtcggcgtatgcgagcaagcgcagcgcgacgtatgcgaacggtggacgagcgggtgcaagaactggagatttccttactattaaagtcggatggaaacaacaccgatcggcctatcaacgtcgctccaaaaaatcatggccgttcgatcgagcatcaaacgttgcggtgaacagtcgtcttcctcctactgcaacaagcatcccacgtggtcgtcatcctagaaacatcacgaactcgcttcagacagaaagaagacccgtcggattttatgtgtggcctgcctcggcgcctcgctgctcgccgcagtcccgcatccattccagtccccctcctcttcgcctcgcccctcgcctcctacggcctcactgctcgtcgcggccctagacattagctcgcctccatcccggcctccctcccctttgcacctcgcctcctcctcgacgcttgtacctctgccaaga

SEQ ID NO: 136010 - DNA, 419 bp, Zea Mays
agccaacaagccgctgggcccaaaaaactcatggttgacacttgaatccacatagcaggatctaccccatacatatgaaagtagttctcacagcgtttttgccacaatttggggtgtgtgccataaaactcagggtaattaagtttgggcagttgacctaagtagctagcaaattgggtgccataatcgcgactgccaaagggtgaatgaggtcgtggatatggatgaccaggaacacccttacgagacacaatggaaggaaattcagactccacaggagaagatgcccacacaccttggatatctcgctcgcagagttgttgcaggatcttggattgtgtggcgatgttcttcgattgggagtcgatctgtttggactgtgccgccaaagccgctgtgatgccaggatctgctgcgcc

SEQ ID NO: 136011 - DNA, 603 bp, Zea Mays
aagcgcatgcataacacgttggtaggaggcacagtgaggaaatcacggcatgcgtgacagcgcggcgagaactcactgagtcacgatagtcgccggtgaacaagtctggcagagctcgggcggtggcgccacgtatggttgtccctccccgacgttatccgttcccaagtgtgcacgaacccgggcggcggcggcgcgaattttggcgcaaagaggtcaccggcggtgagcaagccgtgttggcaaccatatctgttcagttactgtaccatggcgcacctccatcagtcaaatgcacctgacagccacatttgaagccaagttttctcttgatttctgatgataactcataccaagctctgcagcaaagttgtagagcaatatgccatctacaatattgccatatgatgttgccccaaaaagccactgcatctggtttgaaattgggcttgaagttcagggcatgaatctgttagtctgatattcagacagaaccagactgacagtccaacttgggttgagattttctccacatttttcataagaacatggcttgaatccttaaacaaagttgttctcctatgattggtcttcaactttgat

SEQ ID NO: 136012 - DNA, 321 bp, Zea Mays
ctcgacaccattctgacatggctggaggagttgtcccagtagcttggtgagctacagggtgacactgattatggtggcgacaccgagtacgacgatcaacaccgtcgtcgctggcacggacctcgtcgtgtggtacataaccagaatgtttttcctctaagattaaactcactttacctgaattcaatggtacatataatcctgacgcgtatcttgagtgggaaattgccgttgaacaaaaatttgcatgtcatgcttttcctgcaaaccatcaagttagagatgctactagtgagtttacccatttttcttctatttggt

SEQ ID NO: 136013 - DNA, 326 bp, Zea Mays
ctgtgcggaagatagaagacagcttctgtgccataggatcgtaatctggcggctaggattagatcgcgatggcggtaggatattgaccgcagatttgagaagcaacggtctagattagattatgtataccccttcgtccacatagaatctcggtcgtggatcactcgatcgacggttctggatgagcattgtttcattgaatcgacgaagttgatcgaggcccttgatttctaatcctgcggcgagggatccaccgtaacccttcgtcgtggcaacttgcaaagaaacccctctgttttcacgaaaataacccgccgtcctatata

SEQ ID NO: 136014 - DNA, 327 bp, Zea Mays
catggttaaagcgggcggggttgctggtaatctgttggttgtctcataatctctttaaaactggatacagacatctatttggattacacactaataacttgcaaagacaggttctatcgcaaggaagccaatcagatctataatagtgtcagcgataggaggcaattatggccagtgcagattgccaaaaacacaccttttcaggcttctctttgagaatcaagtggtgaaaactgtccaaaatcaacgtgaatacagaaccggccaagtcgtcacaatagaaaaaaattgtcacttcttagatcctaaaccctatggtccccttca

SEQ ID NO: 136015 - DNA, 1487 bp, Zea Mays
cgagccggcgcccggcggcactggagcgacgcgagcgcggatcaggtcggactcccggccgccgcctcgccaaagtgggagcgcaaatgggcgccagcgccactcacggggtgcggccgcggcgtgcgtgttcggctgctgggagccgcacaaggtggcccacgggccacgacgcacgtgtacgtgctgctgccacggcagctggcaaagcatcggtcggcgccgtcgcgctggttgcctgcgtcggccactctagttcagttgagcagtgaggactcctgctgtgagtaagcccgcctccttgccctattgttcgttgccagttgccacttgccacggcgctaccgactgatgcatatattttatacactgtgctgcgcacaccaagtgtttgtgctgtccacccatcaaacctgtgtttcctttttttaatacgctggctgcttaaacagaaaacggcatctcaatttctctaaccaaaacaaacatctcatttattattcacactcctcacagattcatggagcagtaaccactaatcaacaagtcaatagggtcaaacgaagcttgatctcagaactagaagtgggtgttactttcagtctgtcaccacactataatataaggtaaatacacaatcacatacagacatactgcatgcgcatgagtgttccatttagaattcctcaagcaagatttgaggagtgagcgaaatttcaatcgctagctatgaattgcatgcagcactctcactgtcatctgagcttcatttttttggtgaggcattgccattgtaacctgccaatcaacgtgtgtgacactgcaaccacaacaaagatgctacctcaaccatgataattttagcagttcttatttagtcgttaaataaatcctttgcgattcctagaaggtccaaaactatattgtacctgatgcgacctcctcttgctggtctcttgggtgaccgcaggggagagaggagaaggagactagaaccagggacagatctcagggggtaggaacagtggctaggcaggcggacgtcgtcaccgcggctggcagctggccgagccacgttgaccgagatagtcccgcccactatagggagactttattcctcgatgatgcttaatacaaactacgggtctgcctttatagtatgaggcgacctctttaaaaggaactaaataactgaatctggaagtaaactaatgcatatcttttattctggaaataaactaatgcatatctccctacaataaaagcttgcctactaacccgattgctagccacttttttgatcactttccttgcttgcttctgctgctccttttgctggatcctggcgcctttgcctctggtactggcagcctacaaatgcatcagtaacatttctcccctccacaagaaacagctcgtccgcgagcttaaaaagaggatacttctgtgtgaagtcttccaattgttcccaagaggcatctgatgct

SEQ ID NO: 136016 - DNA, 375 bp, Zea Mays
cggtcatggagaccggttgagttttcttctcttctcaaagggacatcaagtcccgcaacgatcactatacacttaggcatctcttgctagttttacaacaatgagaaagggggtgagagcgagattgaaaaccaaaacaagagcataggaacttacaacactcaaatgcacaagccgctaagtctcttaaaacacgaaccggtcggatgcggcattggtatggctttgaatgcgtgtgagatgttgctttgaatgtaaggagttttggtgttcctcttgtgtcttcaatgcgttggttcacgagtatctatagccccaaccacccatatagccgttggagtcgaatgggctaaaatcagattttctgcatgtgca

SEQ ID NO: 136017 - DNA, 294 bp, Zea Mays
ttttcgagcttatgactaaaaacacaaaacggatagtaagagaagctaaaaagtttatggcccatctcgattcgtgtcttgtcccccaattttttgagaatacacaggagggatagctagcgtggctcgatatgaaaaggagaactaaattcgtccatttttctaaagaaaagcgattcctttttagagagagagaagaaagctatgtgatgactgcacctcgctcaggctttcagttccattttcatttatgtaatgactgatcaccggcgttggaaccagcctcgaccagtg

SEQ ID NO: 136018 - DNA, 608 bp, Zea Mays
cccatccaaaactttggatataaataacggatgcaaattcatctaattccgaagtattcactaaacaaaattatgtcccatttatttctatcgatctcatttgtatcactaaaattctgggttccaaaaatatctgcctatttcaaaaaaaatctcccagcccatttctatcctcacgccgctccctctctgtgtctgatttttttctcgccgctctctggccgcgcttatccccagccgccgttcagttcgtgggacaggaaaatcccgccgctcgcgtcgtgattttttccctgtgcgcgcttatcttctcattcggccgcgtcttcctccccttcgctatctctcctcccctgcagaccgtctccatctacctctcgcgctagctgccatggatgctggccgccgtgtgccactgcgctcggcctcctgcctatctcctcctcttcccatggcggttctttcctggatccctccctgcgctgtttcctcctctgccacgcccctcgagctcggattccagtcctagctgcgagctcccctgccactcgtccctatcctccatggccgacgattccccagctcccttgctcctctagctcggccga

SEQ ID NO: 136019 - DNA, 338 bp, Zea Mays
gagaggtacagcttcgtacgaaattacatgtataccacaaagtttacacatttgactcacaaatattacaggggcaactatttttccctgttattctttcttgttgctcaagccttctaagccctctccttatctgctttgtgcatgaagctgttcacagccaaggctggtaacttcggcatgcacctttgtcgtgctcatgcctaggcgaacttgtcgctttctggtttgctatcttcttcttcatgtcatgcctaaaatgcactttctcaatctggaaacactttcagaacgagattagaccacaaaaaatatgattgggaggccttgtgccaaag

SEQ ID NO: 136020 - DNA, 550 bp, Zea Mays
acaaaatcccaaatccccaaaacaacaaccggatgaggaaaaaacaaaaagaacaacccccaacttctcttctttgcaaaccgggtatcacatttatggccggcactgtgtagctcaccggagccgcgaacctccaccgccccccttccctcgcgcgcctataaaagggccgccccgagctcctccttccccgcaccagccacggccatccctctcctccctcgtccgagcgcaattcgcagagcgccaccgtcttctccctctccggtgagtttcccccctcttctctcttcctctccgttggtcccgcgagcgattaaggtagctcgctagtttcctcgcattgccgcgaactcagcacaccactctttcgccccgattcctcgccccaagctcgtcgacggcgaccccgccacgaaactccgccgcctccccgcgagcaaccccctccccgacctcctctgaccaaattgagcccacctctaggtccgccatcccctccccgtgctaagacacctgcgcactgtccaaaaaccgggccaccggcggc

SEQ ID NO: 136021 - DNA, 478 bp, Zea Mays
cgagtcaacgaggacttcggtgctggtgtattccaggttgaagacgacgtgttgaagcattctacgggggcgctttatgataggatgtgggcgctcatggccgcggtgttgtccgaaagagggccgaccgaatgctggcacatgcatgttttgtgtttggcgaaggtggtgtgtgtgtttgttgtctgatatgttgttgtgctgtcttcacaggcgatgagggatgaagaggtggaggacctcactagccttgagagcttggtggcctggaaggatgctgcggtggaggtgggagcggaggagaaatccttgcttcaagaatgtggtgcttagggtcctgtggcagcgggcacttctgtggaggttgaaagaatgtaataggaatggtttgacagttttcattttgtacatgatacttaagattggttgctgcgcaggtttcggcatctgggcctgcacaagcaaaccttgatgatag

SEQ ID NO: 136022 - DNA, 791 bp, Zea Mays
cgctgctcaggtccggcatctaccttgcgtcgatgctcgcgggcgagcaactaaatccactgaaatcgcgcggacgtcgcggaattcggctccctaactcgcctagaccgcggacaccatgggcgccgtgtaccttgttccgctgccggacaacctcgccctgccagttttcccctttccatgcgcgctctcggtgagctcatagcgaccgtgcgagattatcggaatccgggggctcctcaaccaaattgccgaggttctcggtcgattgcatcgctccgcccctatataacccagtcgctcccgctcccttatccatctagccgagaacccagccaccaccaacaggaatcgtagacggagagagagttagagaccgcggtacggatcttcctcacgcgcgaggtattgggatggatggactcggttcattggtcgacggtgagcttcgatgcttgcgttgtcgtcggggggcggagaaggacctcgtggccactagaatttctcacccatgccgctgctccgccgtggaaccactggcgccgtggtcggagaacatcagcatcctcaccattggtacgtgaaccctatatctgttgttgggatcccgtctccgtgtagcgctccctggattgggatctagagcacaggaccgccatccagcaggctcacccgcgatgccccgccgtggccacaggcagcgtcgccgttaccaggcttgggcgatgggggtggaatatgggccgtcaatcccagatgaagggctgggatttgatcccggattctggttt

SEQ ID NO: 136023 - DNA, 515 bp, Zea Mays
gaggtatactaaaaatacggtagaatcataaatgaagacaaattccttagaattttatagtatgcagcaattgtaggtagggagcggggaagaggaaagaaagaaataagaaatcgaaatagatttgcaatgataaatagtttcatcatgaaaacatagtaaaatgtatttgcacctgctttgcaaggaccaaatatattaccaccttttatatcctgtaacaactcttccaatttcatatgaaatactcttacaggaatatcaggtgcatctgaagatttttggccagagtgttgaagaccatctacaatttcatgccactttgcattgcatgtaaatgttacaaaaaagtcgggtggaccatggactctgcagatggctatgctatcatggtaattttgtatcatatatcgttgtccaccaatgtgtgacgccggaagtacgattgtttttcccatttcgtcaccgtttatgcagcctttactaacagcatctgatatgccttgaaggttttc

SEQ ID NO: 136024 - DNA, 577 bp, Zea Mays
tttaagtcactaccgacttagaccgactgctctgttagtagggtctagtggtcaccctgggttaagtaagcgtgagcatgtcacgccaccttaagtcatcgttgacttaagtcgattgctccgttagtagggtatagtggtcaccctgagttgagtaagcgtgagcatgtcacaccgccttaagtcatcgtcgacttaagtcgattgctccgtcagtagggcatagtggtcaccctgagttaagtaagcgtgagcatgtcacaccgccttaagtcatcgtcgacttaagtcgattgctccgtttgtagggtatagtggtcaccctgggttaagtaagtgtgagcatgtcacaccgccttaagttatcgccaacttaagtcgattgctccattagtagggcatagtggtcaccctgagttaagtaagtgtgagcatgtcacaccgccttaagtcatcgccgacttaagtcgattgctccgttcgtagggtatagtggtcaccctgagttaagtaagcgtgagcatgtcacaccgccttaagtcatcgccaacttaagtcgattgctccattagtaggg

SEQ ID NO: 136025 - DNA, 399 bp, Zea Mays
gattcactggtagtcataagtcaaataaacaaagattaggactgctcgaccgactcgatgggcagatattgtgcagccgtgtggaagttggaagacaagttcaaaggattggagttcaatcatgtggaaagggatcgcaatgcaacggttgatgcagtatcgaagctgcggtccactcgggcccaagttccacctaggatcttcgtccaagaaatacaacaaccaagcattgtcacagatcagaaggaagaatgcaactccctatgtctgctagaggcagatcccattgaatggagagagttgatcattaggtacataaggaacgaagaggaaccagatgacaaggccacagcagagcgcattgcaagacagtcggcccactataccatcatagggggc

SEQ ID NO: 136026 - DNA, 1087 bp, Zea Mays
ccatcttctcccaccggattatggcgaacttgtggccgtgaatgtcgccaccaagcgcatgagccttccggattcctcgccaacggactcttaaaccgtgtataaagctcgtggccgtggacccctcccttatccgcagtacgaataccatagacgccgtcatatagcttcgccgtgtggagggctatctcgccgccgcaggtatttcagaaccacgccgatgtttggggcttggctattgcactacgaggattgacggcgggcctcgaagttctcagtgtagtcggtgggcggcgagggaccttgtggccaccggaattcctcaccacacctgctgccccgtcgtagaacctgctcgcgccgtagcccgactcctctgcgacgtctttgccggtaagatgcccttggccatgttcgccgtcattactgccttgcgaagcattcgtcgaatcggtgtttgggcgcgcctgggggtcggattgggccagctccggccaagctcggccgcggtcctggacattgccgctggcaatggctggaggagggggaagagggcgcttggcccttggatggtaaaggtgcggttaagattagatctgggggctggtagatttggaccgttgatataagatcgaacggtcgggtgttttgggcgggattcgaagttagtaaccgttagatcaacatcctggggctctgatgggatccgcgtgcgatcatactgtgggtcgtggatccttgatccgacgggtagcagggcgtgcggactcatttggggttgggatctaatctgggcccctgatgtccgatcggacggccagatttggcctgtaccccttcgccctgggcgttttgcgtaagaaccctcctagaatttaggaaataacccgcagtcccttgtggttgttttctgagtctaggtaattttaccccgggacccctgcacttctctgtattagtgtgcccagtccaggaagctaagatctcagataaatggaattagaaaatgatatttaatgcaaaaataaatgctagaatgtgtttaaatcatagaaatttcatatgatgtccaaattagttaattcca

SEQ ID NO: 136027 - DNA, 426 bp, Zea Mays
ttcagattgatgatgtgcatcaatatttaagcctccatcctactcattagtgcattatagtcaatattacaaataatgtataaatcatcccatttgtttgcattatacataaattacattgtttttttgccataatattacctgttgtcgtgaatgtactgccacatgctcctcgttatcacattgcgatacatgttcaccttcagcgtttccaacatcatcctcttcgccctgcaacgtttaatttttacaattagcaataattaagttctgaataaaatgttcaacaattttatataaaagaacacccacatggttgccctatccagtagttgcaccaccagcatcttcacatcctatatctggctctaaacgcccaatcatctccaacagttcatccattgtgtccaaagccttatcactccc

SEQ ID NO: 136028 - DNA, 323 bp, Zea Mays
gttgggtttgggcgtacataacttgtatccagatctggcatagtgcaactggtgcactgtctggaaacgaaacttgaccagatgccctttatgcattttcgtttttgtgatagataaatttgattttactgctcccaagtgtacccaagcttttaccatgtgcataagaccgaggtgctctctacctgtaattaagacatggtctctacatgcttatagacttccattttactatggtttaaattttcgtctcagtgcatctagaaattttagcaggaattgcactgcacgctcctaaacttgcccgatcgtctaaactaacc

SEQ ID NO: 136029 - DNA, 524 bp, Zea Mays
cataccaaagtaccctcttaagaagatgttacacattggttcaccgagaggtgatatgaaggccacacactcatgcctccatgttaatctcaagattcaaggaatagatttccttgtcaacctagtggtcctaggatccaatggtattgatgtgattcttggatgtgactgattgaaaagttgtgatggagtgatataatgtgcgaaaggaaccattatgttgacaagtccacaaggtgaaagaatccaagttagcacagacatgtcaacaaatgcaaaaggagagacaatggtaaatcacttggaagaaaagcccctggaaaatatcaaggtagtgtgtgaatacccagacgtatttccggaggaattaccaggtatgccacctgaccgtgatatagagttttctattgaattattactcgtaattgcacctatctcaaaaagaccttatagaatggatgccaaagatttagttgaactgaagaaacaaatagaagaattactagaaaaaggtttcattcgcc

SEQ ID NO: 136030 - DNA, 478 bp, Zea Mays
cacatacaacatactaatcaatgcgtgactcactgttgtcgatatcaattgcatgttttttgatgttgttgtctcattccaatgaggagtgttaattccaaccttgttcctagatccagggaggtcgtcctctcttacgtccagcaaggctagccaaccgtactctattctcctccaatgacaaacatgtcctactgttgtgaccatcgacaacaccacacttctgacatttcttgttcattttctttgtaccttttgctcccaatttaataaccttttgttcactccctttgattgttcttcccttgggttttgagttatttggtcttgccaagcttatcccatcgactgcaaaatccagtttctgcaattcaaaagaatagatttcttcagcacttaatattatgcagtctcacattcactttaatatcattattacctttctggcatgatcattttgttcattgcctccactctc

SEQ ID NO: 136031 - DNA, 324 bp, Zea Mays
caataaaaaatcctttgatgattcttggctgcagtctattagtggtaatagaaattttgcctggttctggtctccagccaaggggagatcgggtggtttgcttgttggtttagatgctgatgtttttgatatcagacaagttgataaaggggattttatgatcaaggttcttgtggctcataaagaaagtggttttatctggaattttattaatgtctacggtgctgctcaaaatgattataagcagttctttttaactgagctagcttccttctgttcaaattgcaaatatcctatgttgataggaggtgacttcaacatttt

SEQ ID NO: 136032 - DNA, 322 bp, Zea Mays
gtctaagaatatatgttttgatcgagttaaatatatgtttaattgtagtcatagttacaacaaaaaaattatttattataggtctcacttaccaataacttaaaaataacttaaaaaacatgtcaatattttcttagatatgtcaaactatgacacggaatttgaataaattaactttaaataagtgtggcataaaatatgtggtaatcttttttgcaccttacaatcaaacatgccctaaccacgtgataggcaagcaggcatggccgctcgccgctctcgcccgggtcgtcctcggcaactgcatcagtctggagtcgcc

SEQ ID NO: 136033 - DNA, 345 bp, Zea Mays
cttgaaagcaaaagaaaggaattatctgaccataaaagaaagtttcaaggtcagtccagcaggaatacccgcccgaacaacgctcaaggttcgcagttccgctctggaaattagggtggaaacaattatcaagtgcaacgctctggacagcaaagccagagaaataatcagagtcagaaccaacaaaggagcaactctcagaccaaccagaggtctggtgggagttcacagaaccgtcaaggtggcgccagtaacacgcaggccagaagcaacgcaccagtccaacccaatgactgtttcaagtgcggtgagctaggccactatgctaacaactgcccaaagcgc

SEQ ID NO: 136034 - DNA, 601 bp, Zea Mays
ggggactctgaaccaacaaacaatattctgctagaagatattttgcgttgtctttgacgttattgttgacacagctctggcttcgatccacttggtgaaatattcaacggcaacgaaggtgaattttaaattgccttgcgttgttggcagtggtccaacgatgtctagtccacaatgttgtagtggccaggtgtgtgcaatgagctttgtgagctgcgaaggggcgcccgttcgaggtgagaattttttgcatgctttgcacgaacgggtcacccggttggccacacacacaattgctggccaatagaaaccttggcgtatgaccttggcagcgaggcttggtcccgaatgtgatccgcatatacccctatggacttctcggagaagccttatgccttcgacttcagttaggcattttaacatgggttgacttatccctttcttgtatagttgtccgtcgattatagcgcagtctctgcttctgtgttttaatcttttggcttcgctttggtcggaatgatggtaatggacttggagataaagggtgataggtgcccgccagtcttcggccattattagatttactattcggtgaccgtcg

SEQ ID NO: 136035 - DNA, 525 bp, Zea Mays
aaatccctcgctcccttgttcttaactccgccgtgaagaacatctccgtggccagctttcctggagtgagtacttacccaattgtttcatgtttttgcttgctattagccccctattgctcccagtaccaaccaatcgaacttaagccgaaacctttcaccggaacgtgcggttgctctgtaaatcgccgccataacccaccctcaccgtcgacctgctcttcggctcgtattctgcccaaaccaaagagtgtgcataactcctagtgaacccgtgaatccttcctcagcctcaatttggtcgtccccgccgtcgtttggtcggaacgcgttcgttcctataaccatccgcctgtcaccatgaaccagttgtttcagagctccaattcaaaaattgagtgaggggaaacctcgggttaggtcggaatctggagtcagtcgtcggtgagcaccaatccttgcgtgctccacccagtccagctcgtcggagcatggctcccgcgcggttcgccgtcggggatcagtc

SEQ ID NO: 136036 - DNA, 492 bp, Zea Mays
ccggtatctacagaggtccgcctcaatcttcggcaggccaacattctttgagaaagtcctaacgacctttgcctcggttcgattccgaaggcacctcaatttcccttcattgactccgccaaatagcaaagcccctggtttgtacccacaggatacagcatattttttcagttcttccttttcagtttctgataactcttgccctagtatatcttgaaaattgaagttttcctctttcgaagtatcttcaatctgctcttttcctttctcaattgttgtgtccaccgcggccgcatcagcttcttcctcagccatttttagaagcatgttatcaatatcaccaagagtggtttctagatcagaagcttcggtggtttcggctttggcggcttcagcttcggcagcaccagcgtcttcagcaattggtatttttgacgctgatgccagcggtggtgtctgatgaataacatcggccacttggataattctccg

SEQ ID NO: 136037 - DNA, 460 bp, Zea Mays
ggagtaccaagatgtatcaggatttgaagcagaagtactggtggtgtggactgaagagagtagagagatgtggctgcacatgtggctatgtgcgatgggtgtcaaagagttaagaccgaacaccaaagaccagctaaactattatacccattaaagatacccgaatggtggtgggaagaaattggtatggatttcattattggattgcctcgcacctcgaaaggatatgattctgtatgagttattgtggatagactgaccaaagtggcccatttcattccggtcaagactacttataagggatcccaattgggagagtatatatggttcggattgtgtctctacacggtgtaccgaagaagatcgtttcggataggggatcatagtttacctctagattttggaaaagttttcatgagaaaatggatataaagttgaattttagtttggcctaccatcc

SEQ ID NO: 136038 - DNA, 387 bp, Zea Mays
ctgagagggcgctgcccttcttcaggatattgcggaagtccggtccattctcttggaccgaagaggtagaatgagcctttcaagagttaaagcagcaccttgtgtccctgtcaatactggtagctcctgagccgagggaaccgttgtacttatacattgcagcggcttcagaggcggtgagcatggtgctggtcgccgaaaggacggcacaacatccccaggggagtcaggaagttcccctaggagaaggtggtggtccgaccaccacgatgttgacggaaggccaggagtttgaggacccgggaccaaccacaggggtccgaaccatccagaagccagtctactacgtcagcgaggtcctccatgaggtaaaggtcaggtaccttg

SEQ ID NO: 136039 - DNA, 289 bp, Zea Mays
aaagaagaagcttgctccaagatatgtaggaccttaccagattattgaaaggatgggagaagtggcctacaaaattcagttgccaggggacatgagcacaatctttccagtgtttcacgtatcacaactgaagaaatgtattagagtacccgaagagagagtagaagccaaagatctgaagattgggttagacctagtgtatcaagaacaacccatcgaaattttggaccctaaggaccggatcacaatgaatagtacggtcaagacatataaagctctgagtcaccac

SEQ ID NO: 136040 - DNA, 414 bp, Zea Mays
agatgtcctgcgcccacaaggcagcctcaccctccaccaccatggagaaaaagattcctgacttcctggaccggtgatccggaagcaattgcgctaacaaggataacgtgaacttaggggaacttcccaagaataccacctccctacctaatggcgcttgcaataacactgtcttccaaaaacaggatataactgcgcgatactgggataaccaatccatacccaagataacatcgaatgcccccaaggaaatcacaaccagattggccgaaaagacctcatcagcaagaatgacagaacacccctaacaaactgaacagctactaatggtgccattagcagaactaaccaaaattcggtgacccaacctctgcaccgaaagaccagcccgcgacacaaatcctctgaaacaaa

SEQ ID NO: 136041 - DNA, 365 bp, Zea Mays
tagttgatagtaatgtcgggattatccttggatgtgatcatgggaatgaattggatgaaagcttgggatatcattcttgacaccgcaaatcgaaccttgtcgctaagggagccgcgaggcaccgaaatgtttcagacaaccttaccttgctttaagttgaccaacgtatcctttgcaacccaagcaacctcaatggaagagatcccaatagtttgtgagtttcccgacgttttccctgaagatttgccaggacttttacctaaaagagatgtggagtttgctatagagcttaaactgagcaccgcaccaatataccgaagaccatataagatgccacaaaatgagctagcagaattaaaaattca

SEQ ID NO: 136042 - DNA, 898 bp, Zea Mays
caatgttttatgctttctttcatatcccatgcaatagtggttgagtgaataactcgtgcagaaacctgaataaaagtccccttttctaagaaagatcccatgcattagtgtggatgtggttttgcatagctaaaggcattatatgcacactatgtatgctcctttctttatctgaggtcagaatactgataaacaaaatctttatgcaaatatatttatgaccaaggaatgtacttcaatcgatgcttaacttttgtatctgaaagtttgaagataactcttccaactttcctctaaaagtcactctaatatgcacactcagattaagagatttttacttagcttctttcattgttttcaaagtgatgcatgagatgactaaactattgaggggtttaagttactaaatggtatgtgtcatgacttgcaagcattatgtttgtgctatatgatcgtttgttactaaatggtatgtgtcgcaaacattatgtttctgctaggtgatccttggagtcagtttacttatagcaatccagacaagactattaaaaaatgacatggttccttttgctctgttcaatagattgaacgctcccgctgtgggttggatccttttgccgttgctgcaattcctacaatggattatagttctgaggccttccattcaaaagatgatgcccagtaagtacataatgcatgatctatagttagtttacctccatgtttgtgaacgtaccattgctccttcaaccaaattgcctattctcagaggcagaggggattacttatatgataacccatttgtacgattgtcaatgaaatttgatgcaaagaatatgtggcatatcatttagtgtccacacgatatcagtctttttttttctcttttccgcacaca

SEQ ID NO: 136043 - DNA, 575 bp, Zea Mays
aattgatccaacaatcactgcctcatcatcctctatctcctcctgaatattaatagttggatcaccatgatccccactactttcatctttactcaatatatgcgtagttatccctttctccacttctgatggaatcatacctccaacaatcacccctcctgaagctccactagcttcatcaccactggcctcatcactacctcgaccactgtcatcctccccctctctacggtctcctccatcgaccggagagaagtcctccaggatttgatctggatcaattttctttctgtagtatgggtcttcctcacgaaatgttacatccatactcactaacagtctcttaccaatagggtcccaacacttgtatcctttctgagtagatgaataacccacaaaaatgcacttgactgcttgaggatccaacttgctcaccataggtcgatgatctttgacaaaacaaacacaaccaaataccttgggtggaacacgaaagtcacactttcccaatagaagttctgcaggagatttaatattaagtattcttgagggcatccggttgatgaggtatgtgg

SEQ ID NO: 136044 - DNA, 587 bp, Zea Mays
tggaaagtcaagatttccaagtgctcattcgcccagtcccaagtggcatacctcgaccacgtggttagcagtaaaggcgtggctactgacccctctaaaattcaagccattgctaattggcgcgttccttcttccatcaaagaattgcacagttttttagggttggcgggatattacaggaaatttattcgtcactttggaatcatatgtcagccccttcatgccttgttgaagaaaggtgtactctttgtgtggacatctgatcagtccctggcatttcagacactgaaaaaagcattaacgtctgcgcccgtattggccctgcctgatttcataataccatttactgtcaaaactgacgccagtgactcaggggttggagcagtgttgatgcaacgtggccatcctttagctttctttagcaaagctctgggtcctaagggcagagggttatccacttatgagaaggagttcatggctgtgttgtgtgcagtccaacagtggcgcttgtatcttcagcagggtgaatttgtcattctcactgatcaccagagtttggctcaactcaatgagcaatgcctacacac

SEQ ID NO: 136045 - DNA, 491 bp, Zea Mays
catgaatattacagaagcacctggcatttggctctagcccttggctcctcatagcccaaataaaaacctccacttcaatcaaagcttcaggagtaagtttatgaagttatatttcaaacgtcttcagtacttcaaccagcatcttgtgcaatggaaaacgaagcccagccttcatgaagcttttaaaaaccactacttcatctgcttcgggaagaggaatagtgctttctcccctagccctcgctataaatatatcatgaaaatatttgcccttcatcgcttcaatctacccttgtttgacagttgatttcccgaaaacaacatggcttggcctccacggccgatcttcggcatcctcgttaccactttccacatcaaagctatcactggaatccccagataacccagctatcatttcattagtgattttttcaacgttggtccttttcattgcttcgtaaaagccagcaggtgtggggtctacagtcttc

SEQ ID NO: 136046 - DNA, 351 bp, Zea Mays
caagtccttaccactacaagtcactatagtgaaaccaaaggctcgattgtcgcaatccctctctgcaattgcatattgcagaaaggcttcatattggaatgaagccataactcttggcggaggccagctttcgccctctgggcaacgcccattaaactagttctctgtccccccaccccacttgttcttcacgtagggggctaacctaacaccttctccttggtcttccttatcttttgggtaaagatacaactgtcaaactgatcaacaaccccatccacaaccttttctactaatgcaaacaataatgtttggcaaagaccacaactgatggagccctgcaaaagatgc

SEQ ID NO: 136047 - DNA, 575 bp, Zea Mays
agcaaactgattaataaaactaatcagttatattaaccaaaccctaattagattaatacaacaatcagtttgctagaaacagatgctttctagacaagatctgattaacataaacaaagcaaagcagctgaaaacagatcattgctaatatgaaactaatcagatctagaatgagaagacaaagcagatgaaaaactaatcagatcagtaatgaaaagcagatctagaatcagctaacaatcagacctaaaccctaaacctgagaacagatcgagaatagataagctagggagaccacacagctagggtcaaacttgagaacagatcgaggtcgaggtcgtaggagagcgatcaaacctgagaagagggagaccacacagctagggttcactcgcagctgagaaccgatcaaggtcgtaggagagcgatccttgcgaagcaaatgaaagtagatgagcagcaagaaagtagatgagcagccaagaaaggggctaacctctcgtcgctgacagcgaagcagatgaacccgagaggcgagagcgaagcagatcgacggagaagcagatcgagctcgt

SEQ ID NO: 136048 - DNA, 393 bp, Zea Mays
gtctccgtcgatgaggtccttggaagttggttcgtcgacatcggggacggctgatttgtttgttctgggggctccgtgttttaattcttgtggtgtcatagcctcagatccatacaaaaggcgaaaaggtgtgaatccggttgctcggcactctgtcgtgtttagggcccaaaccactttaggcaattggttagcccatttgcccttttgtcgtcaagaagtcttttcttgatggcagtaaaaaatttttccattggcacgctcgacaacaccgttggactatgggtggtacaccgaggcgaagacaggcttggtgccgatggaaaagcagaaatccctgaagtcttggctgtcgaactgtttgccgttgtcgacttcggacgggactacgaa

SEQ ID NO: 136049 - DNA, 498 bp, Zea Mays
cctgcacctcttctatatagtagaccccctataatagtataatgggccaattgtctcgtgatgcgctctgccgcagccttgtcatctggttcttcctcgtttcttctgtatctaatgattggctccctccagtcgttgggatctgcttctgcctgacccggaatgtggcattcctccatctgctctatggtgacgctcggttgctgtattttttggacgaaaaccctaggtggaacctaggccctaccggaccccagttttgatagtgcatccgccgctgcattgcgatctctttccacgtggtgaaactccaatccttcaaacttgtcctctagctttcataccactgcgcagtatctgttcattgagtcggttgagcaatcccagtctttgttcacttggcttatgaccaccagtgagtcatcgtacaccattagtctcttgacgccgagtgagacgacgatgcttagcccatggaccagtgcctcatactctgca

SEQ ID NO: 136050 - DNA, 325 bp, Zea Mays
atgcggatcactttcggagcaaacgctagcgggttacgaaactctatctgcttccgagtggagaggacggtttcctcgtgtatgggcttgttcatacatccttggcacgaacaaggttctgagcagtacacaccagcagcgaaacactcgcagtaactgcacatggcaacggtaggccaaataattatgaggataatgcaattaaagcacgttcgctttacccgaagtagttccttccggttaataacaagcccaacaacatttaacgaggccctttttcatgtactaagcaggtccacagaatcttaatgatatacgggtatgg

SEQ ID NO: 136051 - DNA, 2023 bp, Zea Mays
ttttctatataaaaatcgcgaataacttaataatttgttaagtcattccacccgggtgggtgatcatcacctaaagtgacaaacaacatctctctctatctatcatgcacatgtcctaaaataggacaactaaaaccaactaaagtcagcaacatatgtatgatttgaaactcttctctgatcttatatgaattagcggtgctcctgcttttttttcaaaaaaaaggactttgacatgctatcgatgtatggccgagcatgcccttgtagtagttatttggtagcatgccttatatgaccaagtagtaggtgtacatgtagttgtacaaaacttcttgtaatagtgtaaaccatatatgcaagcatatggagcagctgcatccttagatcaagcagcatcactagtgttcatgtgtgtgctctctgatctcccctttacttttacccccagctgtgttagtgggtaaattaacaaagctggtactaaagccacagttgggcggtcatcggcattgttaggccaacaccctctcccccgtcaaccaccgcaacgataaccgtttgtggtgcataggacggtaatggaggttggaggaggaagtgcccagtaccccacgcttacccgcatcaactatggtgaccagtcggtgttcatgaaggtgatactccaagatgaccgcccaaccgcaccaaggttgtggcacatggtgaacactggcaaaataaggacacaataaagcttgcctaggacagtctgaagtgcatttgtgtgggctccgaccacgtgcgccgagcaaggacgcatgcagctcgtgtgagagtatgaggctatgccattctaggaaggtgaggccgtggacttggcactgcgcctgtagtcactggtgagtcagctcatggtactcgccaaaaccattgtcaaacaacaaatcattgccatgcacctgcacgtggttctgaccaaattcacacagattgcgcttgtcgatctatccaccctcacagttgaggatgtgactgggtagctcaagtggagaactatgacacagtggcacagacgatggtactagaaagcttctcctcactaaggaatgagtgacccgtatgtgtgagcagcagccagtgcaaggcagggcttgtccagcagaagaggcgcagagtggtgacaaggaagaccgccaacatggaagatgaaaggtggcagcgctcgtaacagaaaagaggatgcgccacatgtctccaaccgcaacacttgccgcaagtgtgtcaagacgggccattgatctcaggattgtaaaaacactgcacgacagccttgtagtaggtagattggtagcatgctggtgtggtcaagtagtaagtgtgcttgtaattggtgtacaaaacatcttgtaaaagtgaagaccatgtatatatgcaagcatgtggaccagctgcatccttagctcaaggagcagcattaactagtgttcatcagttcatgtgtatgtgctccgatctcccctttacttctacctccagttgtgtgagcggtgaattaacaaagccagccaacaagtggggcaagaacccttaccacacacacacacacacacacatcttaatatcttatacatcaatactatagcaaatatattggcatactttcattggaaatatcaataaaagtatatctgttgaattgtttgttttatttaaattgatggaacaatcaatactactaatcactcacttcagtataggaattttcttcagtgttgatcattggtgatatattgtgattggccatctggggagtttctgttccaactatttcattttattctaaaaggctgaatagctatcaactttgcaccaattccattcagaacagctaaaataaacttctttaaagacaataactaatcccatgccatactaaactggcttataacaggtaaatttaattggaaaatactctattatagcatataaaagcgaactttttgagaaaaggtcccagtttgtctttggttaactttct

SEQ ID NO: 136052 - DNA, 757 bp, Zea Mays
gctaacttggttccttgattttatttaattgcacagctgtcaaatatacatatgattctttccatttgcttacgctcttggtgtaaagtaatctgttaatcgatgctctattcccaatgtattggagatttggagtcaccacacaatcatggcatttctatgattctcccatagaaaatcaaaatcagacagagctctaccaaattggctagtttcaccaacctttcttttcaacaccaactaattatcttgtcactagttctaacagagggaaaaggacttgtcagtagaggactagtaggtatttaattcgttgcctgaacattctacccccaaagaagattgtagaatcttctatgaactcacacacggcacaacaacaaaaccttttaggagctcatttatgaaaatatagcattagctgtcaaaaatatacaaaccaagacagctactagtcctctccgccaactatgtgagtagtagtgttgaactttgtttgaagagaataatagataacagaaagagtatgagccggtgggtgggtagaatgtagaaaaggtgggcaatcatcactgcttttcaataaaaattgtccactcacatgtcaggcatctgtttcatggtctgcaacttgggattggagatattaatcatcacaagatgaagcatcgatccacatctttgctcgtgatggaatgaaaagctttttgagatgtttactgtttattcatgagccttcttgaatattttcttatgg

SEQ ID NO: 136053 - DNA, 691 bp, Zea Mays
gcgccacattgattgaagtgtctcgagtgcacgccataatatggttgtatgcgagacagggttatgcgtatgatgagtttagtaaaaattccatcggtgtcagttgtgttaagttgaagtttatttgtgcatataaagtagtaaggtatttaatgcttacgactcttagtcgatggtagaaattgtcttggcttaaatagagaggtggtgacatgccagagtagtcatcgctttctctatatttataggtcaagtcatgacgatgcgtattatgcgttcgttaaattatgtttcgcatatagtgtatgattgtgctcacgatttcgagtagacacttcaaataagtcaagtaggtatgtaatgaaagatgtgtgatgaagttagtttgttttaggatatttgttgaaatgctccattcatgtgatagacatgtgtggttaattcaaatcgagtcaatgtgtgtgacgatgttattcatgaattaagtagatgtcctaaaattgtgtagtgaagcttaggttgagtttcaagcgatgggggaatgttttggtaaagatgtaggtgaattgtgaatgagtcatttaacgtattaggcatgtcgtgtagtggtggtatgaaaaatgggttagggaccgatcggctaaatgccaagttcggttagagtgattttgttacttgggattgtggggtg

SEQ ID NO: 136054 - DNA, 592 bp, Zea Mays
agggccatcattgccttggaatagtattctgcaacaaggctggaagctagcagcagcgcaacatatccggagctattcgcaattgaagctgaacctaagatgcagtacaacatctcgaccaaaataaaacccacaaccagcagctcagcgcagccgattgcaaaagggactaaaactgagttgcagtacatcatctaaaaccaaaatacacccggacaggctggcaaggaatcagacagccaccagacgtgctgcagcattgctccttgcttctgcttgcagattgtccatctcatcctgtatttcttctatagcttcacctgcaattcccatcagtgccttgtcaacgtgttcggtgtccggcatatgaatgttgaacagggattccaaagctgcccctgcctccttagataatggtttctggaaccaagcctgaaagtcctggaaagcattatcaaaattaggagttccttcattcgccaagaggccaagtttgcgacagaggtagcgttgtgcccgctgcatgatcggcatatgagggccattagcgagtctagcactacgacgtaccgcagagaggttgaataagcgt

SEQ ID NO: 136055 - DNA, 544 bp, Zea Mays
gacatgattggacctttcaagaaagctcagggaggatacactcacgtgttggtcaccattgacaaattcaccaaatggatagaatacaaacccattgcttctctgacttcagccaaggcagtggagttcatacaagatataatattcaggtttgggataccgaatatcatcataaccgacctgggatccaatttcactagctctgaattctttgatttctgcgaacaacgaagcatccagattaaatatgcatcagtagcacatccaagggctaacggtcaggtagaaagggctaatggaatgatactggaagcactaaggaagaaagtctttgacaagaatgaaaagtttgcaggaaaatggatcagagagttgccgtatgtggtttggagcttaagaactcaacctagtcgagctctgcatggaaatactcctttcttcatggtctatggtttggaggcagtgctacctggttgtaacaccccaggtgtttatctcccgttcaacaacaactatgaatttaagcgtgggatatcagtaaata

SEQ ID NO: 136056 - DNA, 378 bp, Zea Mays
ctgtattggatatgcgtgtccttcctctacccgctcgactactaacgcggtgctcaccacgtgagtcgtgcaggagatgtataacagcagatctttctaccggctggtctggcatggctcgacgtggcggttttagcactggcggtgtagtcaagaactttcttcagtgcatcaagagcttcctgagcctctgaggtccactggaacttgtccaccttcttgagcaatttatagaatggtaggcctttttctcctaaccttgatatgaacctgcttaaagctgccatgttccagtaagcctctgtactttcttttgtgatcgtggtgcttccatcctcatgatagcttcaattttttccgggttagcttcaattcctc

SEQ ID NO: 136057 - DNA, 550 bp, Zea Mays
gtcaaccttgtgtttgcaatctcccccttgatgagtgcattgtcaacaccaccatttgagcatatgtaaacagaaagaggaagaagaagaaaaacttactcaaatgaccataagctagataaaagccagacgagtcatttagagtaagcaaaactttgtccccaaagaaatggacaacggctcaacacgaccaagcaagaaaaggctagccctcaataagaggcaaaagcagggttcaacaccactagccagaagccaaaatctcatcagagcacaaaaggctttatcagagcataaaaaaccaattcagagcataagatcagcacaaaagctaaaatcaaagctagttccttcagaaggaggcaaacgactcaacacaactagcaatagctccaaataacatatctcaccctcttgaatgagaggaagctcgaaagacaaaattctccccctagatagaggaaacggaaaatctcaaaatctctcctccttgttgacaagtgaactcatcaagcacagacagggtagaaagaaaaactcccccttgaca

SEQ ID NO: 136058 - DNA, 323 bp, Zea Mays
atactttgcacagaagcgagagggctgttcgctgtggccggattaaaatttaaaatcgttcagactactgcagctcaatctatagagataaggtggaataaaaccgtagcgaacagccttatgaacattcatcggttttaagaattacacaatgcaatctgcactccatgtctccatcctagtcgggaagaaaattaaatacaaacaagagggcattataagagcgtgacgtccactcccacgggaacgcactgcaacggaagcttccaaaaccttcgctgcagaacgcacaccgtcttgtccccctgactgttggaccacgc

SEQ ID NO: 136059 - DNA, 503 bp, Zea Mays
cggggctccgtcgtggcggctcgacgagcagggcacggctccggcgggtacgacgaggctccggcacggtgacgagctctgacgaggtggttgggcacgacacgatggcgagagagaggagagctttagcaagtggaggaagagaagcaagggcgtggcttgaccttttataggggaagagggggagaggaaagggctcagcggccagggagaggaagggatgaccggcgttctccatcactcggcccttgattgcatcggctactccattaatggagggagggaatggggggagtgaatggaaggcacggggacacggtgggtcggtctcggccaggggcgaggggtcagactcggccgggggcgcggcgcaagcgcgcgaccagaggtggaagaaggccccctgcgggtggggcccacgcgcaagtgagaggggaaaaaaggctcctgggttgggccggttcaactgcacaattgggccggttcaaccggtccgactaggg

SEQ ID NO: 136060 - DNA, 553 bp, Zea Mays
aaagggtgcacagatgataaagctacagtcaattggagaaaaggaaacatatataaaacttagaaacacaaacctaaaattgtcagatgaacagccacacgagtagttctctattttgtaaaccaagtctgtttgtgtttcagagaggtgtggtgttcagatttgagcgctcagagaggtgtcttccatctcatactcgagcatcgcaagatctgggcggggctggcgcgtagaatgagaagtactcgagcatcggaagatccgggcggggctggcgcgtagaatgggaagaatgagatggcgaggtggtcctgcacttgcgatgggatgcgggccgatggccatggcagcgaggcgtggattgcgtttagggcgcggaggatatgggcggggcatccgcggtgcatgggaagaaagcgatgggtggtcctgcgcgtcgttggcactaagattcctgcgtgttggattgctgtgaggcgtggatagtagcgaagggacgggtttccttctgtggcagtaacgggatttttatttccatggctgatgcattaat

SEQ ID NO: 136061 - DNA, 437 bp, Zea Mays
gtgcggtgaaagatccttgccggcggtgagctggaggtcactccggtgactcaccgtggctttcttttctactttgcggctgggcagataacctcgccggtgcaccgccaccttccggccttgcgccgcgtgtcctaaccacgccaccgcatcgccgtgactccctctaaactctccatcgaccaccggagttactgccacgacgatgaacacgtgttcactgcaccagcgttcttcctcacttccgaccgccgcacatcaacgcccaaattcacggtcaccgctgaagagccctataaattgaagcccccgctagctccgcaaggtcatcctccacccggccaccgctaatcgctagcagtccttcgccagagctcgcgaattttgaattcgccccaaattcctctccgccgccgagaaccacaccctaccgtggc

SEQ ID NO: 136062 - DNA, 293 bp, Zea Mays
ctcgacgagttatatggggctgcctggttttcaacgttggacctccgtgctggtttctaccaaattcgcatggcgcccgaggatcaacataagacggcatttcagacccaccacggccactttgagttccgagtcatggcatttggccttaccggtgcacctgctacatttcaaggagctatgaataagacacttgcgccacttcttcgcaaatgtgccttggtctttttcgacgacctcttggtttatagtccgacatgggaaactcacttgcaacacattgagctcgtctt

SEQ ID NO: 136063 - DNA, 321 bp, Zea Mays
caggggccagtttcgaacgacgaggagaacgggacacgcgacggtgcgagcgctgcaggcagggccagatctgtgtcagccattaggtgtggacgcggggcgccggacagcgagccggcgggcaaggcaggggcggattcgtggaggcgccaggaacaggaagcgaacagccgccgccaacgtgaacgctcctacgctgtgactgcgagagaattagggtttgttttggggctaaaaaattatatatcccagattttaggggacggttcagctgaatggatgggtaactgtgcgcacatggggagtggagctgtggtcggg

SEQ ID NO: 136064 - DNA, 635 bp, Zea Mays
aggacctcgctgacatagtagaccggcttctgaacggtccgaacccctgtagccggtcccaagccctcaggttcctggtcttcttgtgtcgtcctctcgacgaccagcaccatgctcaccgcttccgcagccgccgtgatgtataaatacaatggctccccaggctctggggctaccagtattggtagggacaccaggtgctgcttcaactcttggaaggcttgttctgcctcttcggtccaagagaatggaccggacttccgcaacagcttgaaaaagggcagcgccctctcagccagcctcgaaatgaagcggctaagggcggctaacgaccccgtaagcttctggacgtccttgatatgggccagaggcctcatcacctcaatcgccttgatcttctccgggtttgcttcaacgccccggtgcgaaacaaggaaccccagcaacttccctgcggagacaccaaagacgcacttgtccgggttcagcttcttgcgtgttgctcggagcttgtcgaagaccaaggttaagtcttccactagggtcgaccttctcttagtcttgactacgatgtcatcgacgcatacctccactctgtccctgatcaggtccctgaaagtcttactcatcgcccg

SEQ ID NO: 136065 - DNA, 349 bp, Zea Mays
aaggaagtcaacgacgtcaaactaagagtgagagaccagggcaccaaggagccagagctgaatatgggtggtagcctccctgtatcccatcctcggcagaagagtccgtctgataagctcaaataagaacttggctgctgtagtgaaatctgccggtgaacgtcgcgacccatctgagaagggcgggcggaacagagtcgcgacgtgagctgtacccggatccacaccaccgtgagggcgacgaggagggtcagaggtgccgtagcataagctgtgaagtcaagtcgacgactcgggaaatccaaagagctagcgaatctgactggcagtaatagtgacatcctctcgc

SEQ ID NO: 136066 - DNA, 396 bp, Zea Mays
cgaacatgtggtggtttggttctgccggtgttcaatggcctgtttggtcgccttagcgtgtagatctcagcaaaaatcccgtgtaagatctcttctctgcaccatatcctatcttttccatgtgagttccaagcgaagatatggtcggggttgagagatattgtggtgtgaagttggctctatctgagttgtccagcccgagacaaaaaccgtgtcaagtcgtgtcaaacgacttagggttgggttcaaatttttccagggtgttctaacggatttgaattagggtttgagtcattctctcctctttaggtgcatgataaggccaaagcatgacttctaagatgggttacacctacttaggatcttgacccccaagtttggtgtcttttgctcaaa

SEQ ID NO: 136067 - DNA, 1022 bp, Zea Mays
ccgggtaaggaagatagaactctactgataatggtatcatagacatatctctgatcggtatttagctgggacagaagagattgggcttgcatggacaataccaacggttcaacgtcaagttcatcgttaagcaacctattttcgtacatgggatcattttgtgcagacagtttgggcaagttgaagtcttcaatattccctccactgttagaaaacaattgtgttagcttctttatcagcagcggcataagttgttctggtggcacaacgtagcgtggattggccagtgcgcgggtgagtgagcggtgaatgtcatccgtgaaatatagccagtacttatcaaataaagcacgaacattgccaaccgagcaatggagggcaactgttacaaagagttggcgtagctggtgtgatgaggcagagacgatggcctcatcaaagagaaggctccattcgttatcgctctcaagaaggcccctcgcctcacatgcctcgtgaaaggtaccatagaccgtgccactaaatgtccttagatcaacataactcgttgcacctttaactatcatcaatagcatgcgcaagtagtacagttcaccggccgttggatgaatgtagtacatccgtccaattttgtgacaagtgattcttttccgccacagtcgatccgaagggtgccaagaccactcagtagggaaatcacagtatgttaagtgtcggtatccaggatttcttgcattggtgttaaaccactcagttagcatggaactttttgatgcgggggactctaggagagacgctaaggtagtacccggttcataccaaacatagttattgttgggcaaatggacaacaagacgttcaaccgcaggtattctaaaatgaatgtcgaactcaaaaatacgccagatggcttcacatatggataggtatcttgcatcgatatactcttgaatttcattgcgaggagctacctgaggttcaggcgacgcattggctgtctttgccgtcacctcaaaatatat

SEQ ID NO: 136068 - DNA, 346 bp, Zea Mays
aatacatcaacaagctgaccatctagaagaacaatattgtatgaatgaggatattagtttgaatgagtctgaaaacccagaagatagattgcttgatatggtacaagagttgttcacagctggagaggaaggtgcacatagattctatgtttgcagttgtattggaagatatggagcaagaacttcaccttggtgcatcgtacacaagattttcttttgttgttaagttacttcatatcaaatctttttaccggatcatcaatgttgctttctccgcaattctaaagttgttatcattggctttcccatagtgttgtttaccagcatcttataaggaagctaagaa

SEQ ID NO: 136069 - DNA, 358 bp, Zea Mays
gatgtggttgatgcccatctggtcgaaggcatactggaagatgatgttggcttgactcccgttgtcaatgagggccttctggagctcccagctttccacattgcaactgatgatgagtgcgtctgcatggggcacgctgcgaaggtcgacgactgttgcatcgaaggttagtggtacatgagaccactttgtctgaatgacaggtcctgtgatggcgatatggttgacccttcagtagtgatcccttttttgtcgtttgttctcaaattccgagctggaccctctggtgatcatatgaatcattcccctgaagggtggatcggtgaagtcttcctgctttggtggtgggggagtggta

SEQ ID NO: 136070 - DNA, 509 bp, Zea Mays
gggtttaggagttttagggtttctaacctggggatcaaaattgggatgttacaaacctaccccacttaaaagaatctcgccctcaagattcagactgggcttgagaaatggtaagggtattccctcctcaaggagtcctcactttcccaggtagcctcctcttctccttctttgctccactgaactttacagagtttcacttctgagtttcgggtctttcggatggctgaatcaagaatcttcactggcttttcttggtactgcagatccttctgaatctgaattgcctcttcttcgatgtgactttctggcacttgcaggcatttgcggagctgggatacgtgaaacacattgtggatatctgacatggattctggcaattcaaggcggtaggctgcgggtcctattctgccaatgataggataggggccaacaaatcgcggagctagtttccctttcacttggaatcttttgactccacgcatcggagagaccttgaggtagacgaa

SEQ ID NO: 136071 - DNA, 369 bp, Zea Mays
aaagacttcaggccctgtcagaaagagatcctactgaagatgacccaccatcgtctacatggccggatatctccacactctcgataaccactatgatgacctttcctcccactacacccacctaaactcccgggtggaaagcttagagcagtaggtcaaggagcttaaaaaggagaaggcatccctccaagagtgtctcgatatggcagaaggtgaagaggccaacactcgtgaatcttaccgaaccctgaagatggattatgataagaagctgaagaagctcgcccccacgaagaaaatccaaaagaagaccaagagccaaggatgccagactaagcggaagaagaaagcccctctagctccacctct

SEQ ID NO: 136072 - DNA, 419 bp, Zea Mays
tgggatattggtggtggcgcctctcccagaaactggtacaaccttggatatccagaagcctgccagtacttgcctgagacgcccttgccgggccaatcaacttgatccttccgcagatgagcagaagaagaaaaggagacgcctccggtgagtatctagtttggatcgggacgttggtacttcggttcctgctgctgaagaagtgcctgtgcctgaatttactgacgctgaccctgatgggtgtgctccatctgttgctgatcccaatgggggtgctccatctgctgctgaccccaatgggtgtgttgtctgtgttgctgatgaggacgacggggaggaagaggatgaggtccctctgactcggaagaacagtcggcagtacatcgccagtggtgaaagtagtggagttccttctcctg

SEQ ID NO: 136073 - DNA, 333 bp, Zea Mays
tagaagtggtgttttgccctccaacgcatttggggcggtgtcctagctcattggagattgagccgacatggtttcctgcatgagacccagtgtcttcattttgtttcctttctttcattaacgctcttgtcacatcatcattttacctatgtggcagtctatttaatgttatgaaaactggttgacgtggagggttggaactgctcttattaaatacgtgcccgaactctgaataacgacatttcggtaattttgatcaaaccgacatcaaccgacatcgtgaagtcggctaaatgaagtttcctaccatgtgctcgtccagtggcgtccgcc

SEQ ID NO: 136074 - DNA, 289 bp, Zea Mays
gatatatgagaacaggcgccaaggtgcaaggcgtgctcagccgaaacagcaggcaccccaggaagatgcagctcagcagcagcagttgccaccgccacccccaatcaccattgagtagatgttcctgatgcagatgcaagcagtccaagcgattggtcagaccctagcagcgatgtagcaagtgcagcagcagccacccccacctcagcctcttgtgcaagttcagatgcaacaagcgcccagagacaagcaggcagaattcatgaggggccatccccctgtcttttcc

SEQ ID NO: 136075 - DNA, 696 bp, Zea Mays
gtggctgtttaccgatgttctgcttggtgtttagacccgtccttggtgcctgcttcaagggagctttggatcgtcgaacctccctttgccgttgatgggatgtcttctggcaggagaacgctgatgtatccaatccgcatcacattctcgtctgccccacggagggatggatccgatcctaagcttcatgctattacttcgggcggggatggttctggtcacgtgcagcagggatcccctcctttttcaagacctccccattcgagtgggagaaggggagaacatggtcattcgggacgtctctcagttcatgagcgtttgggcccaagagatgagaacatgcagcagcggagcattagctccggggtggcagtttcagatttgaggagaactttggaatctgatggggggaccttgtctcctaggctggtagagatgactgatgacatggttcttgtttcaccggtgaaggcgaagcagctgaaagtttattttcgtcaaagattcaagaatgtcctgaaccaggaggaagctggaactcccaattctgtcactgtgcttcctccatccaccacagacgtggcagctgctgacacagatccatctgagtatcctgtttcagatgttgacgctgtgttggcaactctgtctagaacattaacttcctccctgtctgatgtggcagcagcacacgcg

SEQ ID NO: 136076 - DNA, 331 bp, Zea Mays
aacataagggttcttatgcgaatttgtcccgcgaaggggtatcgtaggattctggccgttggatcaccagccgagggcacggattagatcggatctcggccaaaccggtacgcgcccaaagtcgcccgatctagatccgatggcaaggatttaatgagtcgaggatttaacattcatcactggatctcgaatctacggctgaaatcgtcttggtcaaaacattacacaacatctaatcccgtccgatcatcctgagatcaacggcccacgctagttcaaatctagaccgttcgataagatctgacggcaactgttccatcctccccacggt

SEQ ID NO: 136077 - DNA, 394 bp, Zea Mays
attcaccattaaaaatgataaaataaataaaaaactagacagttggattaagatacatgatttcttcttcttctagggtttcaatttccaacatccaaccaatttatcaatttctcactatccggtgcaaattttaatgttaaaaactattgctatttgattctgttttgtatgtctgctgttctttagaacttcctagatctgcattttctagcatcagaccctttcggtacacaattgttgcgcgcctttcatggtgtttggccttttgtagatcaatatgagctgtctgcaacaataattctctgagcatcacttgccccacgatctcctagccatatctatctcgcttagcattttcatatcatttctgctacagcatttcaccaacaac

SEQ ID NO: 136078 - DNA, 290 bp, Zea Mays
ggagaagaaggctgtgaattcttatattgctagatttattgagtcaatggaaaaaacaaatatagagaagattactaaggacatactggagggcctatctgaagatactggtgacagcgatagctatgatgtagaaagtggggacgaagattatgaggatcagacctggtggccaagtcattcaatctttggaaaatcgaccatcaaacagagtcacctcgaaaacatgaggggaaggtactttcgggatatgtctattgtgaggactggcggagacaacaacattcctg

SEQ ID NO: 136079 - DNA, 342 bp, Zea Mays
ctaagaaggcactacatgatgattcacttttagcaacccttatttagtacgaacggttggttgctaaatgttaaggattgatggttggttgctaaagacatttttagccatggttcattggctgctaaaactatataactttaatgacttacagttggtcactatagaggtaggtggacatccgactgttggttgctaaaaaaatttgggcccatgtagtcaaatagtttagggttggctcatttcttttcctccacatccaccaccactagaccatcgctcgataggggtcgacgacgcactcgacgcctactctacactgcggtgcgttcacaatgtcgc

SEQ ID NO: 136080 - DNA, 784 bp, Zea Mays
actccttcaactgtggcacacgtctttgaacctcggaacaggtttgctcacaacctcaggctgactttcgcctcgctcgagcccggctctgacctcgaaatctataatggaggacaccccaacatcattaactaccccagagccgatgtaccttttaagaagttttttcccatccttaccactgtgacaaccactatggtatggcaacaccttgccagggggctcgagtatgtgatcgtgccctcggcctcagccccatctctcaacaaaaaccaagcaggcgcaagtcaataacaagtacaagaccataccaccggccataccatctacagggatacaaagacatctcctcacagtcgcgaccaactcccatcctccaggcaactcccactgggcctataaataggataatctacagcttctagagacagggcaaacacttcacaagttttatcctccacacggtattggcacttgcctccatcaaccccagggacttgggatccttccctctcccgctcttcttgtactccctattgcaagcaattaggtgcaagtaatataagtatcaccccctctgctggaaatagggcctctccttgcctgaaccaggataaaagacttgtgtcaacttgcatcaccatcagggtctggccacgtgacactatttcactagttggttagttcctaagatccaaatactgacaggtgggtcctagggatcaaggatcatttccacgacacatatcaactcgttctgcttcattagcatcacttgctgaat

SEQ ID NO: 136081 - DNA, 412 bp, Zea Mays
taatggatgaggtcaaaggggcgagtagcacgggacatggaagaagagaagggtaagcgagtgtgacgcccgagctgacaggcatgaccaagtaaggtagcattactgctaggacaagggatggccgaggtgactgagagtctaaagaggatgtcgtgtctgggtggccgagacaatggtgccaagtggaggcaagggcgcagggtgtggtaacttgggcggaggaaggtgaggcaggaagcgaagatgatataaggccaagattgtttccataggagtcaggccagagtcctttgtagaccaagattgtttccaaaggagtcaggccagagtcctttgtaggccaagattgtttccacaagagtcagaccggagtccctacgatggcctatggaaactaaaaaccatctgc

SEQ ID NO: 136082 - DNA, 470 bp, Zea Mays
ccaaaagggtatcagcccatcggagcctttcgatccaacatcgacgctacagattagatcggcaccctgcccaaatcggtaatcaacgtgatccgaccaattagagatcaacgcccctcgacagatcaccacccgccagaccacgctacccctcggatctcatatctacggtttagatctatcgcgcgaaaaggtataccttgtattgaatcatggccgtccatacggaaatcaacggcccaacggtcgtcgtttacctacgatatacctaatggcggcgtaggcccctcccggtggtggagcatcaccggagaattcccggcagcattccagagccacaattcctactcccgcttcgagttttacagagccaagaacctaacgaacccgccaatgacattttcctggtggaccggccgcacatagagcgcgtccacgccactacacggccccgcggcgattattgcact

SEQ ID NO: 136083 - DNA, 972 bp, Zea Mays
acatcaatttcgatatgctttactcgaccatggaacattggatttgctgtgagataagtagcccctatattatcacaccaaattctagcagcaggtggacagggaacctttagctcatgcagaagagattgtatccacattaattctgcagtagcattggcaagagccttgtattcagctttggtacttgaccttgacaccgttggctgctttctagcactccaggacacaagatttctgccaagataaactgcaaaaccccctgaagaccgcctgtcatctgcccaatccgcgtcagcaaaagcactaacaagtaaagacaacgaccttgcaatctttaggccatgaccacaagggtgcattttacatatctcaatattcttttcactgttgtccaatgctgcgaggttggagcatgaaggaactggcacactttattgactgcaaagctcaaatctggtcgtgtcagggttagatactgtaaagcgccaacaatgcttctatatcttgttgcatcctctggcctaagtaactcaccttcatcaattctcaatttttcagaagtagagagcggtgtagtcaccggtttataggctgtcataccaattcttttcagaatatttgaagcaaacttggtttgagcaagatgaataccatcttttaccttctgaacttcaataccaagaaaataatgtagctggccaagatctttcaaggcaaaatcagatctcagatcatcgaggattgcatctatagcttcttgagaggaactagcaacaatgatgtcatctacgtaaacacacataaaaatagtgatacctcccttgttgtaaaagaacagagaagtatcagatttggaagcctgaaaacccagtttcaccaacttttcactgagtcttgaataccaaacccttggtgcttgtttgagtccataaatggccttatcaagtttacaaacataatttagtctca

SEQ ID NO: 136084 - DNA, 458 bp, Zea Mays
gaaagttcagctacatcataaaaaatgggtttgttaattccgaagctaaaaatgaatcctgaagctaaacctcagttaagatacctataagtctggcgcgctctgcagcttcttcagctcttttagcctcttcttgagcgtcatgagattctttttcgtttttcctaatagcttcgtcggctatctcacgtctgccctttatccatactcccgagtaaaatttaccgcttaacgaagacgctttggctgaaggattcttaatgtcgtcggctgagataataaattctagctgaacaacagccttcgcatggtcgcaacagaccttttccaaaattgatacagccccgtgggcaccagcaaaagcacataaatcccctcgatcgctgagtatctcgtcaaaggcttcggccttcccactgtcacacccgggttttagggaccctggcacgaacataatc

SEQ ID NO: 136085 - DNA, 343 bp, Zea Mays
taaaattcatcgcaccatctatagtgctagttcggtggtgcaccggaccgcgggctccaacagctctctggcgcgcaacaactagttcaatagtcgagtgacatgtggaggtccggtggtgaaccagactggtctggtgtcatcttgacttgaaaggccttaggcaagatattggaggacccacccctatttccggtctgatgcgccacccgagaacaaaattctaataggtttttagaagaaggctcaaaagctatttgttgccttggggctataaatagccccctatttcgacctccacataacatcaggcataccaagagcaagtacttcactcatacgc

SEQ ID NO: 136086 - DNA, 354 bp, Zea Mays
agaagtaccgcgtacagtagtttttgaacttggggatacttctttttagagggtccaagaacttcactgatgaagtagaccggatgttgtactgggtacgtatgtccttcctccacccgctcaactactaacgcggtgctcaccacgtgagtcgtgcaggagatgtataacaacagatcttctaccggctgattcggcgtggctcggcgtggtggcttgagtaccggtggcgtagtcaggaactttttcagtgcttctagagcttcctgtgcctctgttgtccattgaaacttgtccaccttcttgagcaatttgtagaatggcatgcctttcttgcccagccttgatatgaac

SEQ ID NO: 136087 - DNA, 685 bp, Zea Mays
tctccctcagtgtgtgggcctggcttgccagccccagccgcgtgcctgtgccaccaccctacgggccccgtctgacagtcctcgcctccttcaaccgtctgctcgtgtgagcgacacgcacgcacgccgagacgatcgtgcccatgtcgcgtctccacacgaaaccgccacccggacccctcttgaagtccctgcacgcacccactccccctgcctcattcatgtcacctcagcgtgcccacccgagttgcacctgcccgcgcccgagctcgccgaagctctctcgccgccgcactgtttgagcctcagatccgccacagcaagactgccctgctgtccctgacagtggaccgccaccaccgagcggagcttcgtcgttgtcctcacttcacgcgaggtgaatttccccgccaaagttccctttctctctcccctgtcctccctgctccgttgattaggcgccgacgatcagcggcaccgacaccgtgttgtcgtgtcggggttctttggccaaccgccaccgccccatgtcctcctttgcccgtgtgaggtcgccaattctggccatggcgctcgagctgagcgcacgatcgaggttgacggcaaccccgacaagatgggacccacctgtagcctcccagccgcgacccctctcctgtcccttcgtgtggccgctgaccggtgg

SEQ ID NO: 136088 - DNA, 361 bp, Zea Mays
tgctcgtcgacggggccacgcaaggcgcaggcgcaggcgacgaggctacgcttggtgcaggcagggtcgacggggccacgcatggcacgagcggagtcgacgggggcgtgcatggcataaatggggtccacggggccgcttgcggcacaagcggaggtgatgggggcatgggaagagatagaggcagtggggtcacacgtggcacaagtgaaggtgacgtggccatgggcgacgtgaaagagggcagcagaagaggaacatcgacacaatcgatatcgaggtcgagaggtggggaggagttagcaagagagaaaatctcctcatcaaagacaacatgatgagagatgatgatgcggtgggt

SEQ ID NO: 136089 - DNA, 718 bp, Zea Mays
ctccaaaggtagtttttactggaatgaagtgagctaccttggtaagatggccgattataacccagatagaatcgttccctttttgggtccgaggcagtctgatcacaaaatccatgcctatttcttcccacttccatttgggcactgggaggggttgcagtaggcctgcaggcctctgatgttctgctttagttcgttggaaagtatcacaccgggccacatactaagctatcttctttttcattcctctacactagtatctggtcttgaggtctaggtacattttggtagtccctgggtggatagaataggctgagttgtgggcctcgttgagcaggattcctcgtgcctctcctttcggcacacacagacgattcctgaaccaaagggtccccttttcatctgtcctaagatccggaagttgttccttgctagccttttcttcaagtcctgccatctcggtgtccaaacgctaagctttgcgaatgagatcttcaagcatcggtttaacttctatgctgccattttctcccgaacaagcatttagctgagctgattctctcttctaatcttctaagaagtttgttgctttctccccgaaaggtttccggctgagagcgtctgctactacattggcctttccggggtggtagtggatctcgatgtcataatccttaatcagttctagtcatcttcgctgacggagattgagatctgg

SEQ ID NO: 136090 - DNA, 374 bp, Zea Mays
ggcgatcggcaaaggtagatttgctcttctttttttttatctctgacgtaaggtgaatcgatggcgacgaggttttataggtgtggtagggggtagtacacacctacgtacgtagtactgtgcgttgcagttgattggatgggttggccaggaccgtgcacgccgctacagtttcctcgcttgcagtgacagtgcgggaggcgttcagtgtccaaccgtccactatggtcttctagcccttgccccttggagattccacctcggcagcttgtcgtgacatctgcgtgttcgtgaatcgtgatgatacaaaaagttttgacaggacactcatcctcgtgacgctgcaggttggtggttctcgggagataataatc

SEQ ID NO: 136091 - DNA, 807 bp, Zea Mays
attacgcgttgatctaatccacaccgtccgtaagcgatccaacggtgcggcgaccttctactacctccaggcacgcgctacggtggcgcagggccaaccgcggtggtccatcgccggtgtagaccacccggcgccctggaatcctgtgcatcggcacagcctacacaagttttcacgaagggtacggtgtatgcaatagggagtatttttaccagagacgaggaattccacccacagatgcgtccgcgccgcggcaaattccagctctgacgagcaatgtcggccaccgcgcactgccgcaaacccacggtggttcgcgcgcggttctcccccttccccgacgatcacccggccccttgcttgaagtcgcagcgccgccagaacccgcggcagccgtggttctacctctctctctctctctccccgctttctctctactgtggccgtgtttgctgctgcggccagagaaccttcggcggctagggttttgaagcctttggtcccccgccggctacacccccgttttatacatgaatcgagccgccaggtgcgtgaatttctcgactttcgttgagctcgcccgcgaacctcgcggggacgacgagtccgaccagccgaccccacgcggaagcgtcccagtggaagagcatctgccaggtgggccgccatggtcagcgcagggggaaaatcggtgacggtgggctgggcgtgggggtgttagggcgaatgggctgaattggcttctcccgacccaattagccaaaacctcctttcccatttcttttattctcttttctttctattttt

SEQ ID NO: 136092 - DNA, 692 bp, Zea Mays
taatttaatttccctagttttcctgctctcaggactgggcctcaaataccagaaagagcaggggctttggcgcaagattaccgagacacaaagaatagtactctctggatggcgggttctattcttcagaatcataaggtctcttttgtaaaatgtacccgcgaaggggtatgaaaggtttctggtcgaccgatcttgcgtggacggcgcggattaaaccccatccgcgacaaacatgtatacaacgagatcatcctcacacgtcagatccaaatcctacgatccgcagcacactaacaattctattccacactggccgcacgatccgtgatcgacggcgctcgttccttctcttatcccaagccgtcaggacacccaccatcaatcttggccgtccataacgcatccgacggtgcacgaacctcctcctaccctcagaccgtgcacgacggcgcttgctgaccgcacggcgacacccgccgatgagcgatgcgcctgatgacccagaggtccacccctaacgccgacaagctctatacgacaaggaaaacggggcgggcataatggttgagaactcaccgacgctaatgacgagtcgagggccgtccccgacgcggtgcagatttgcgacggcgatgaggcccgacgagcaattacaggcaccagaatcgatcccgggagcgatactccgc

SEQ ID NO: 136093 - DNA, 896 bp, Zea Mays
aaggcattgagagagcgaagcgagagagagaaaggaagaaccaccgtagttgtgccaccgccgttcaagccccggtggtgaagagtaaagcaccgcccatgctagtggaggtcgaccgcggcatcgctcgattttgtgatgactcgatgtcgccgcaatttctcaccggaatccggaatcagccgagggttcgcgccacattggaccgacccttttcccatcgccattcgccggtgagatacctcctatctagtttgtcgtgctcttctctctctatttcgcggggtcatgcatgatttagatcactgcggcgaggtatgggcgtaatcacgacgagctagtcgacgggtggcacgcggcactgccgtgtgttgtgccaagaaagaagaagggggcatcgtcgatcagagaacgaacaaccgtgattaaatctgggcataccccctctctccatccaactatggccgtagatctgcatgggagcggttggatttcaccccgggttagatgtcgctcgcatgtgatcagaaccaccttatcggaatcgtgcggctcagataaaaacctatgtatcgctttgtggtagggttgcggtggccattgatccgaccgtggatgcctcggattcgatcgcggtcgtttaaagttcgaacccttgatcccagatctggcgtctctgatcgcatcacgatccgatccagggtagttttgatcgtggccgtcgaattctaatctgatagccttggatgcttagtaccccttcgaccgtgccataatgcaaaagagccccttcccttttctgcaatcaacccgccgcacagagatagttatagggaattacagtcaagtcctggattttatgaattcaactctaggctttctagaatttatggcgc

SEQ ID NO: 136094 - DNA, 960 bp, Zea Mays
ttccattccaccacgggcacgtggcgcagcagagctcgaccgctataagggctcctcgtcagcctcagctcgtccatcctccaccagcaggcaccaggcagctgtcggccccggggccgccttcgttttctggtctcctctccaccaacacggcgcgcgcggagctcccatgacgacgacgagcacccacctggatctcgaggctgcgcggcgcggaggcggcggcggcggtggcggtggcagcagcagcccgcccggatacgagcaggcggaggttagttcgcttcgcacgacaaaacctcgcccaccttccttccttccttctgcaagatttccttccgtttccattcgaactcgagcctttcatgatctttcgatctgctggatcccctctccgcgctctagctagctagtgtgagtggcggtcgtccgtagtttcattacactcttgtcacaagaaaacaaagcaaagattttgacatgcagtgcctgcaggtttagtgtttcatcagctgtagtagcagtgctcatgcatgctacagtcatactaggcattctcagttgcagagattgtggcgtgatgatgtggactcgcacgctagggaatactagagatcatggatacctgggggagtgggaagacggggagtggtctggtcgtgataggaaggcggaccactttccaaagcccgttgcgtgcgttccgcgccggtgatcactgacaacggatagccttgtcaccttgcagtgagtgcaggttcattttctgctcttttccagcgccattagagacttcagtatttgttttttttttcaagtgtgtacgcgtggacgcgtggtgatcccactgcctgtccttccctttgcttccgtgatttgttcatgaaaagtcggtccttttattttgtttaacatgcctagtctagtacgtacaatctacttattagttttagtccctgt

SEQ ID NO: 136095 - DNA, 331 bp, Zea Mays
ctctatatattaaagtcgtgtggctaacttatcagcgactctatccacatcgcatattgattctttagccattggatcaattgctagtacaacttagaacattcgatccacactccctcccatgcgcctcaagtttgtgcccacatccgccactgtcaccccctatttcccatggacatgatcgccacgctggtgcaaccaccactgtcgtactcccatatgcttagaaagctcgtcctcccatcctatttgacacccctctcccactcctccatcgtatcctccctcattgtcttgcgatgccgccaccagtcctcaccctttcccaaac

SEQ ID NO: 136096 - DNA, 368 bp, Zea Mays
tcgctgctgcgaagagctgtcgttcttttgtcgtgcaagggagttcaaaggccgtccagaacctagttgatgaagcccaatcttgccacaaccaacgcaaacgcaaggcccttgcaaatttggttaaatgaaggatacccaagcctccacactcttttagccttgcggaacggatccaatttaccttgcatttacctcccgtaatttgtgcacacccagcccaaaggaattttttccttctcgaatcaattaaattcaatatttccttaggagcccgtaaagcagagagaaggtagattgcttgggaggtaatgactgacttaactaaagtcagtctgccagccatagagaggtttttcccattccag

SEQ ID NO: 136097 - DNA, 359 bp, Zea Mays
gcctgcgctgtgaatatttttcgtgccatctagctttttgtgctgtgattgccattttagccttcttctcctgtgagcgcaattggtttgtaagcttcggcatttgctatggtcatcatcgaaatggctgaagataagaagattgtagaccccagacctgctggttttttacgaagcaatggaaaggaccaacgttgaaaaaatcactaatgagatgctggcagggctatctggggattccagcgacagtgatagttttgatgtggaaagtggtaacgaggatgccgaagatcggccattgagaccgagtcatgttgtttttggaaagtccagtgttaaacaaggacagattgaaggga

SEQ ID NO: 136098 - DNA, 589 bp, Zea Mays
aaattaattaccataaaactgagctattctgtttcggtaaggcagtagagcaggaacatcaatatcaacagattttttgttgtaagaaaggggggtacccgtttaattacctaggtatcccgatgcactacaagaggttaagaattactgattggaaaatgatagaggaaaagtttgaaaagaaactcagtggttggaaaggaaagatgatgtctgtagggggtcgtcttgttctaattaattcggtacttaccagtttggctatgtttatgttgtctttctttgaggttcctaagggtgtaattgagagattggattattttcgatctagatttttctagcaaggtgaaaatcataagaagaaatacaggcttgctagatggaatatactttgccaacctaaggatcaaggggggttaggtattaagaacttggatctacaaaataaatgcttcctgagtaagtggcttttcaagctagtaaatgaggatggaatttggcaaagtatgttgcggaataaataccttaagaggcacaccttgtcaaaagtatccttcaggccaggtgattctcatttctggtcgggaat

SEQ ID NO: 136099 - DNA, 682 bp, Zea Mays
ccgcgttctagtgacttgaattattctaacgctttaccatttgttagagttaaattaatcaaattaggaccaacaagtagacttactaatttttatccaaatcatttagtgcactaaaattatcatattcatttaacaaacgcattcaccataatcatcaaatccggcatatacttatatctaaacgcttttcacccactagtccgcattttagtttagacaccacatgagcactacagatttttacccgcgaccataaacatacacatttagactacaacaagcaaatcatcgtgactatgagcttaaccaaagctatctaacaagtcggctagtcagagaaacaatataggccactatacttcacacgcgtcggctagtctattattatcgaaatctgagatacaacatgtatatgacaatcacttaacgaaatcgactcctacttaacatgagttggttaatcgcagtattggacttagcaaaccagcttagacaacacaactcaaaaacataggttggagcagattaatcagcttttcctaatcattgctcaacttaaagttgttactacacaagtcacttaaaatggtacatttttgggatctaacatagaggcaattacacatggcgtaaaactccataagactacatttgctactgaaggacctgaagcacttat

SEQ ID NO: 136100 - DNA, 315 bp, Zea Mays
cgcaactgcaaaatgttcagatctaaatcaatacagtatagtataataaacacttgtagaaagaaccgcactttatgattcattgaactgcagaatagtactgcaacatagagaaaatgcagctctgcaacatgcaaaaattcttttgccagggcactaacaacatataaaacttcaattctaataaagcataatgcagtttcaaaataggaaactgatagagtcacaaattatatcatcctggatttacacatctttatttgaagcttaaaatggtaaatgagataatggaaaaggtaaaagcagagcatgaaa

SEQ ID NO: 136101 - DNA, 404 bp, Zea Mays
gcaaagaactgatcctaaccgcccatgggcagggttcccaatacaagttccaagcaaagctaagctcttcttctctagtgtgctgattactgagactggcagtgggtccaacactttcttctgggcagatagatggatcaatggaaaaaggtttcagatattcctccaagactgtttgccataatcccaaatagaatagcatgaaaaaggactgtgcaagaagctttgttgaacagaagatggatagcagatattcaagggagcactcagttggagttctgatagatttcttatctctctgggatgctctttctgtcattgtgttgcagcctaatattgaagacaaacacatcttctccttggcacctgatggcaagtattctgcgagttcagcatacaagggt

SEQ ID NO: 136102 - DNA, 838 bp, Zea Mays
gtgaaaacagcagcttctaatctgttttcagtgtaccatcataatattctgttttaggcttcaaatgtgttttcagctcatgtgttttaggcttcaaatttggcacggcagtgtgaaaacagcagcttcaaattgtggtgtccatttgcaagctgatttcagcataccaaatgtcttctgttacagcagtccatttgcaggttaaatcgtggtgtccatttgcaagctgaaaccaagctgtttccatttgaagctgaaatcttctggacaactgaagtgcccagcgtctgtccgaatgtagtacaaaaggacagaaaacagcttggtgtccaaattctgttacagctgtccaaatgctgtccacatgctgaaatgctctcttctattttctagaatgcccagctactgtccaaatggactgaaaacatgaaactgaatggacatacacaaataaattcagaattttgaatggactgaatggactgaaaacatactgaatggaaatattaagataaccatacaaaagctatcgagtcccattctacactcgacagaatggacaacccaggttcacagataccttacacaagttcagttaccttacacaaggtaactactacacagataccttacagaagctaactcttacacaaataacacatccagtgccattcaacaccacccatattactctacttcatctgacgatccgaaagctcttcagaactgacatcatccagtgcccattccccaccacccatatcttcatcttcaccaaattggttgttgaaccactcagataatggtggcgacggaccagcttcgagatcttctaaac

SEQ ID NO: 136103 - DNA, 568 bp, Zea Mays
cagcggaagatatttcttcaccaaattttggcactatgggcgtttcaatatatcttggccggtgggtcaaaaccttgattttattttccttcggcacaacagaaatggccgaagtggcacctttcctcttttttcctttcctccgcaagggatagcaataatcaggatatataaaaccaatcgcatcaaaaactctgttcaatcttttcttgctctgacccccgaaggccgaggacaaagcatcatcttcggctttggtatatgccccaagcaactcatcgctagtagcctcaatactcttcagccaatcgtcgtttggttcatcaaattggtctctgaatctgaaggtatatttcaagcgaactaatccaccttcactggacccgataacagtctccttcggcattttccagctatccacaagtggccataccctataggctatgtgctcttggattaggtcccacgtaccaatgaaagcatagacattgctgaaggccttttgacatgcttcgtcatcattttcaatcgccaccctcggccttcgaaggccgaagcgagaccagat

SEQ ID NO: 136104 - DNA, 544 bp, Zea Mays
ggacactgtcacatggagttttgggaacaccaattgctacacgactagatcagcgtatcaagtccaattcttcggtaccataaacaaacacaagtggatgaagatttggaaggcaaaggtgccaagtaaatgcaagatttttctctggcttctcctacatagtcgactacctactgtggatagaattgtcaggcatgggggacacgctgttcttacctacactctttgccagattgatcctgaatctcatatacacttgatggcatcttgcagttatgcccttagttgctggcaactaattgcaaactgtttccatcttaaactgccgtcacaagtcccacatggaatatcgcattggtggcagacattggtccggtcggcgcggaacgcacatcaactgcaggtgatgatctacactatatggaatatttggaaagagcgatgtcgcagggttttccattgcaaggaacaagccttccaagtgctggcctcacaaatccaagaggagatctgctcatttcggttggctttcgctacaactctg

SEQ ID NO: 136105 - DNA, 420 bp, Zea Mays
ctaatctccgctgcgaataacgttcttcggattagaatttggggtgctgcgccatgggtggcgggcgcggtgggcggaacgccgccgtgcagtgtctctgtgccgtcggtcggtggggcgaaggtagcagataggttattaatcgtcgatgcgtgaatgtgtggttcggatctgttgtagcgtaccgctcggattggattggcgtagccgtccgatcgtgatccagcggccccgattacgtaatgattcacaaccccgccggtttaatctggtgcgctcacttctaatccatcggctcagatcctagcgtacctcttcggccgagaagttttacataagagtccctaagtttctttggaatagaacccgccgtcctattaccctgtactctgtgtctgcagagtcttacaccgagccccc

SEQ ID NO: 136106 - DNA, 369 bp, Zea Mays
atttccaaacctggcagtaaaaagaaaaggaaaaagaaggaacagtattgggctgaaaccatcccaaaccggcccaccaacaggggaaacccgtgcccgcccgcgcggtggttttgcgcagaggccccgacctttcgaataactattaaagaagtcgcggcactatttccctgtttctctaacaatcacacttaaacccctcggtttctgtttcttcgcaagatcaagtccccgacggtgaacggcggcatgcacgctccggcgagcttgcaccggccgcaacaccaaaccattcacgccctaagtcggtctacacctaattccacccctggcgatcgtaatccatcccacaattgaactagtccgtcc

SEQ ID NO: 136107 - DNA, 857 bp, Zea Mays
tctggctcgtcaccggtaagcctgccacggtgaaagacacgtagctcttgcgcaagtgttcttccctctctccgaccgccaacacgccttgaccaaattaggagccaccgctctaggatactataaattgagcacacccctagctctgttaagtcatcgcgaagccaaagcatccgctgctacctccgattagccaccagagagctccaatttctttctctctccaaatcagttttccgcacccgtgaacacctcgtcgtggccagacgcctataggttagttcaagcatccttgcttgatgttctagcctccattaagtcccctgctactcgtagacctgtttaattgagctagactgccctggatcgccaagaacatgtcgaattgttctcggtttccgccgtcatcgtggacagaaagattctgacctggattagtgcaattgatggaggggaaatggtcattaggagtagaatttaatgccatccacaccggagcaccggtcattgcgtatcttggcaggtacaggctcgccggagccactgctccgccgtccatggtcggggacctcaccttgcgaagaaatagaaaggggaggggccttagtggagatgtcagtgagacagagaaacagtagacaggagtctttacgggtttttcaaacaactagggacccctgtgcaaagtagacaccgcgggcacgcttttgcatgtcttgggccagctcgggctaaatcgagcccattactctttaatgcttttcctttttctttatctacaagatttaggaaatccatagaaaattatagaaaaaagataaaactatgagaccaattttgttggactcctaaatttc

SEQ ID NO: 136108 - DNA, 785 bp, Zea Mays
aaactccaggggctagagcgcaaaaggggtccaagactcagactccagtagccaggactgcgggttaatacctaaatactttaggggcctatgtgcaaatctgtgcccgcgaaggggtataggtcaattctggccgtccgatcctgcatcaagggccacgattagatcggggaaggttaaaatccgttatgcgttcactgccttaggatcaaagatcaatggcccaaaatcttcaacactacagatttaacacgggcccgccgattgatgatctacggcccagatctttcctagccgaaagggtatacgagatctaatctgtgccattcatcctttgatcaacggccactgcgataccgctccccttcaccagactccgaccggcggcgctgctaggcaacacgacggcgccatggccagccacggcgatcacgcatcctaccggtctaaaccagacaattctagccctacgcgatgccgagtgaaaagtgaaagtactcgtgggtcacttaccaagaatggaggggtcgcagaggctaaccacggcgcggcgcggatccgcggtgatcccaatcgccgacaagcaattgccgacacccgaatcgatcctgggagcgatactccgcacacacacgcaccacgcacgatgtcgaacacccacgaccactcgaacggccccaatcaccagcgcgggactaaggccacaacggcggatgtctctgacccacactggcggcgcccggtgattagttgggtcgcggcacaagctgggaggcgggttaggg

SEQ ID NO: 136109 - DNA, 491 bp, Zea Mays
ccagccccacctgccagccactccctctcgcgcgctccctctcgctggcagaccggccccaccggtcagccgcttcgtcgtcttcctcgcgtacgacgcaccgccgtcccctccatcaccgtcccctcgcccatcccctcgccgcacaggaaagttcggcaccgccccgtcctcgccgcttgaccgcgcccttgctcggtaccgcccccgccgtgaggtctcatcgtcgccgctgtgcgacattaatgccggcgctgtgcacctcaccggcgcccgccgagctccgccgctcccctcccctcgggcgcctataaaaaggtcgccccgggcacctccttccccgcaccggactcggccacccctctcctcccctcgcccgagctcaattcgcgaagcgccgccgtcttctccctctccggtgagccctttccccctcttctccctccctctctgttggtccagcgagcgattaagttggcctaccagcttca

SEQ ID NO: 136110 - DNA, 364 bp, Zea Mays
tggccatgtagactatggtggggtcatcatcattaggatctctccctgacaaggcctaaattcttttcctccaggtaggggtatttttgttgctgggtggaaagtaacgaaggggtgtctcggagacttccctgctgtagttttggcatagatggcggagggctttttgggcaacattttggcaagtgtctgggaagcggtgtccagtggcggtgacttgtaagggagggtgatttgggtagtttcgactttctcccaggtagactgccatagagcatttctcaattccattctcacggtattccttccagacgtactacggcttcttgcggatccccatgcgaagcacgcaactccgtaaaag

SEQ ID NO: 136111 - DNA, 277 bp, Zea Mays
agcctcttgcctcgctttgcaatcaagagcatgggagagagatagagaagaacaatcaaagctaaaatgatcacaagaccttgcaacactcaaatgtgctagacattatgtctctcaaacacaaatcgatcgaatgcgacacgggaattgctttgaatgtgtggagatgttgcacttaacgtttggaaggttgggaggattcttgtgtcttcaatgtgctggttggggtatttatagccccgaaccactcaaatagccattggagaaaaactggcaa

SEQ ID NO: 136112 - DNA, 418 bp, Zea Mays
ggggctgagtaatgggcacgaggcagagctgggcacgaaatcgctctctcgttatgtaacagagagtagatacgtggagaaggggcaataaggaagaaggagatagggcagggacagaggaggatttgtatttctgaaggttctaaacttgcttacagactcctgttcggctgggatatttatttcccgtgtccacgcacgcaccagagttcacgcaggaactcacacaccgccccatgggccgcacagcgctcacgcaggagcgttacacctgccactctgggccgcacacacgcacgttgggcctccgcatgcgcttgatagtcttctgctcctccagggacaccgacgcagccatcttctccgtcatgtcttgcacacgagacgtatccttcccatcctcagacagctgcatatc

SEQ ID NO: 136113 - DNA, 421 bp, Zea Mays
ggaacaatatcttaggtgtgcagtccatgatcatcctcacaaatggaggcagtggttggctttagcagagttttggtataacaccacctaccatactgctctggactgttctccctataaaattctgtatggttatacacctcctgtgatggttgttccttgattgagagaggaaggggacagggatgttactacctggttgcaggaaagacatgtggcctctgaactgctcagagagaggttggcacaagctcagaatagaatgaaacaaatggcagacagagggcgaactcctagggaattccaggttggagaatttgtgctcctcaagttacaaccttatgctcaaaagacagtggttaataggccatatccaaagttatcctttaagttctttggtcctttcaaaattgtggcaaga

SEQ ID NO: 136114 - DNA, 480 bp, Zea Mays
ccggtagctaagtggatgaacgtcatgaggacctctcatgcgcctcttctgtacagcaagccccatatgatggtatagtgggctgactgtcttgcaatgcattctactatagcttggtcatctggttcctcttcattctttatgtacctgatgattggctccctccagtcgttgggatctgcctctggctgactcatggcattgcattctttcatctggtccatgatgatgcttggttgttgtatttcatggatgaagatcctaggtggagtttgggctcgattgaatcccagttttgacaatgcatcagctgccgcattacaatccctttccatgtgatggaactccaatccttcaaacttgtcttccaacctatgcacggctgcacaatatttgcccattgagtcggtcgagcagtcccaatctttgtttatttgacttatgactaccggcgagttgccatataccatttgcttcttg

SEQ ID NO: 136115 - DNA, 330 bp, Zea Mays
ggaggctggagggagggacggggcccggcggagagggaggacgccctggctgactggcggcagatgcagaaagagatcagggagagaaagcaagcgaggggagcctacaaaaggaagggctggtggcgcatgtactgccatgtcgtacgcatgtgtgtatctacgatccatctaccccctggccgatctgctgacacctttccttctcccagcacgaaacgcaacggcgcgagagctacgacctctaaagactcgatcgatccacctctctctaacactctactccgccggtttacacgatccacgaatcctgccatgcgtacacctgta

SEQ ID NO: 136116 - DNA, 1182 bp, Zea Mays
ggaaaaaatctaggttgtggcaccaatgaatttcaacatagttccaacattctgtactgaagggacaattaaaaagatgataagttgcttctttatagccttgatcgtagttaacacatttgagatcgttgctttcattcagaaagccttttcttcttaagatgtttttcgagttgattctatcccggaaaatcaaccaaacaaaaacttttgctatcttacagaccttggatcgacagatccaagatgaaaaggagttggaggttgaataaagctgaaagtaagcttgtaaaacttggagggagctaaaacactcatttccccacggataaatccaaatgtccttgacagctctggtagtttgcatctgatcaataatgtcacagaacaagtggtattcctgagcaacctgaggggagacatgagtgtgaaaattttcttccaaagacattctcgagaaatttatttgcatagaatagctttgtctcctagcgaaagagaagaagttggggaacaatgacttgagggagaggttgttctagacatcgtgccataagagtatagtcctaccatcaccaacctagatgtagaatgacccttgtaatagtcaaccaatcttataacgactttccaccagaaggaacctttcacatgagaagcatgagggacccgacctgaggcataatatgagttctagacaagatcaaccaggggatgtcatgcccgccgtagaatttatgcagaatttaagaagcagagttatgttctagatcttcaagttgagaacaccaagaccacctttgttcttcgaacgagttaccttctcccatgcaataagagagtttcgatgagtagattcattgttgcctctccaaagacaatcccttctaatgcagtcattggtattgatcacgacaatcgatagcttaagggcacacagcgaaaataggcatcgccgaaaaggtggagttgacaaggatgagtctctcaaccatatatagccaagtactagtgtcgttcagccttctttcaattttagaaatgagaggaatataatctttaattttttggttttgtgagacccataggcagacccaagcaagtgaaagggaaaacaccaacttggcaaccaaaaactgcagccaactgaccaattttgatggtgttgaggttgatcggcaa

SEQ ID NO: 136117 - DNA, 336 bp, Zea Mays
gtggttttcaaaagttttttcagggcaggactgcggttccctctgaatgagatgataggagaagtcttgaatttttttgaaatttatcttcatcagctgacccctaacgccattgttaggctcagcgtcttcatctgggcccttcgaagccaagagatgagcccagatgccgaagcattccaccgggtacacgaattaaactatcagacgaaggccagggcaaacggtcttcatgaaaattttggctgctacaattttgcataccacaaggatacgaaggctccagttcttagctaccgcaccaaatggccaaccggctggaagggtgaatggttt

SEQ ID NO: 136118 - DNA, 790 bp, Zea Mays
ttccgcgaaggataatagtagtctagatatacaaatccaatgacatcgaataccctattcagcctctttttgcctcgagcttcaaaggcagttgtcatggcatcatcttcagccttcgaatttgctccaagcaattcatcactagtcgcctctatgaaatctagccagtcgtcattcggttcatcaaattggctcttgtacctgaaggtatacttcaggttgactaaaccatcttggctagagccaacaacagtctccttcggcatttcccacccatctgcaagtggccacactctataagcaatgtgctcctgcactaaatctcttgtgcttatgtcagtacacattgtattgaaagccgcctggcatgcttgtatatcattcccaagggcagtggctgacctccttatgccgaagcaagaccatatagggcattggataatccctttcacatcctccctttcacttagatcatttttcacgtaaaagcactcctgcatccatgaacccgaccacctcttccgaaatgtgggaactgggtagctcacttcacaccgaggcacgaaactgtaacaaccaaagttattgtgatattaatcctttccagtagctttcatctcataaaacaactcatgaatgttgcagaagcatcgtgcatctggttctagtccatggctcctcatggcccatataaagatccacaccttgatgatggcttcaggagtaagttgatggaggtaaatttcgaaggttttcagaacttcgaccagcaatttatcgagagggaacc

SEQ ID NO: 136119 - DNA, 513 bp, Zea Mays
aggtcaatacatcaaacttgtagagctatgataggagtacaactttgattaagtgactaagcattggtgctgtacaaaaattggagataaatggctaggaagttggactatcagtcaccattgaagactggaacttgactgacagtgagttctgataaactttggagtttatttaagcctaatcgagtgagcgaatgaccaaggttcctatggtcgaattggagctggtatataggagattaattttgttacagacagattagagagtggccacataaaaatttgtgaaaaacacccctaaaaatgctctgtcaaacagactgatgaaggtcctaatggtacagtagtctgacaaagatcgccatgttcagtgcaccaccgccggtgatcttcgcgccaagatcctcgccggtgctacgattcgtgctctctggtgtgcggattacgaccgacagtgaaaagatcttcaccatggatgagaccgtgagctggcccccgtacccacttgccctg

SEQ ID NO: 136120 - DNA, 417 bp, Zea Mays
tgcagttagattctgtgacagctgccaggggatcatgatattggatctggaggtcgatggatttggtagtccatgttttatgctcagcaccattgttgtgtttgcgttggggggattcatggaaacgcggtgcattttcactatctcgatatgctattgtgatcgtcctgggtggtggttagttggggatctgccgtgcttattatttgattcaggtttttgaggcatcataatatttgttatggtccctctgaaccccgtgggggcgatgatcctgatctgaatgcctctactatgaatgcaatttttatgtgtaattttgaatagtgcaaatatttgtttttaagaaaggtaggaacattgccactcacaattaaattaagtcactttttagaaaccagagaaagcgggtacttg

SEQ ID NO: 136121 - DNA, 649 bp, Zea Mays
ctattggccacatatgaagcaacatattcgagatttcgttgttgcatgtgttgtgtgtcaccaggcaaaacctgatcggtctcgttatcctggtatgttacagccactgcccgtacccaactatgtgaggcaggcgatttctctggattttattgaggggctgccgtagtcaggccactacaactccattctggtggtcgttgatagactcactaaatatggacatttcattccattgcggcacccaatcaccgcactcactgtggcacatatcttcatgactgcagtttaccgccttcatggcatgccagagtctatcgtcttggatcgtgattgtatcttcacgagttccttatggcgtgaactctttcatctgtctggtactaaactattgatgagttcatcataccatccgcaaacggacgaccagacagagagggtcaatcagtgcttggaaacatttttacgcagctttgtgcagtcctgtccttccaaatggtcctcatggttgtccgtagctgagttctggtacaacacatgctctcactcatccttgggctcttccccatttgaggttctttatggacgtgcacctcgtcacttcggtctttcagtggaagattctgtgcaacaaactgatctcagttct

SEQ ID NO: 136122 - DNA, 363 bp, Zea Mays
tggctagggtttagtggcgactagggtttactattgggctttattgttttttttgcccatctacagtcacataaacagcttgcctcccctcaccaaaccctgcctacgcccctctccaacccgtggcggctagggtccagtgcagtaactggcggctgctgcagtccacccgcgccggctccgcacccacttccgacgtctccaggtcaccagcgtcggctccagaccagcaccaatgacaacttacgacagacaagatgagctcccctcctcccccttttctatcttattatcagtatgtctgtagtctctagttcttgtcttcttggttcttaccatcgtatccacagctctagtcaatag

SEQ ID NO: 136123 - DNA, 510 bp, Zea Mays
tctctttccacgtgatgaaattctagcccttcaaagctgtcttctaattttcggacggctgcacattacttgcccaaagaatcagtcgagcaatcccagtatttatttatctaacttaggaccaccagtgaatctccgtataccatcaacctcttaacgcccaatgatatggcaaagttcaatccgtggatcagagcttcatattctgctgcattatttgatgctaagaatgacaactgaagagcatatttgagttgctcacctccaggggcaatgaagaggattcctgcgcctgccccctacagttttagcgagccgtcgaaatacattcgccatacttctatagcctccgggttgtcaggtacttgttgctcggtccattctgatacaaagtcaaccagtgcttgagtctttattgctgtgcgaggccgaaactcgatgtcgtgagcccccagcttgcaggcccacttggctattctcccgatggcttctttgttgtgaagaatatcc

SEQ ID NO: 136124 - DNA, 300 bp, Zea Mays
tggtatcaccaaggtcaccaaactacaataatattcaaagacttctctctgaatagagtacacaagcattttgttgataccaacgctcttagtcaagttttgctggtaacactgtactaagtacattttttcttgtgatgggacacaaagtacaaactgaccaatgatcatacagaagtacagttgaatgcttaatatatgaggggtcctactaccatcgtcatgtatcacgaaaaagttaaatcttactggctagtcatgtttaagatcatagagcaagctgaatcaagtatggccggg

SEQ ID NO: 136125 - DNA, 951 bp, Zea Mays
cgtcattatgcttatctgcagaaggcttgggtgaatgtttatggggtcccttttgaaatccgctcttttcttcctttatgggcaataggcactattttgggtgctactcagaaagttgatatgcgctacactaggaaaatgggggtggttcgtattttggtggcagtgactaatgtaaatcatattccggagtctgctgaaatagtagttggtgaagggttatatgagatttttttcaaagttgacaaggttctcatagcggggaagtggacggatacagataacaggggtaatcgagacggagatgataaggagcaaggagaggatgaagattactctgagaaacatggaaatgattcttttcagctagagaagctagcggaagatactgtcatggaagataactctttgcatggtgatcctaagaagcctcaagatggggcctgtgacatggggttggtgactcagcttgagaatcagattgttaatgggacagtgataagcacgggtttgaggtcagaagggctgcctctgggcatgccgacaggcttgttggcacttaattccccttttgctgatcagtatgtctccactctcacatctggcgctcttgatcagacaccaggctgtggtagcggtgatgggaagtccaaatcccggctcgtgcaggatccccattgctctttccttgcaggcgtgtcacaggagagtgaggccgtgtggaacttgtcaggtcctgcagcaagccgtttgttcctgaatgagtctgcatctcgggctggcatggttgccggtatggatggtgaggcggtctgtgctcagccaaaggttggagtcggattggataatgagcattttaaagctgctggtaacttactaattcaccagaatattttacatgtttctccttctttgtttaatattcccgttcaggtatctgatcagtctgtt

SEQ ID NO: 136126 - DNA, 526 bp, Zea Mays
agggtataaggctggggtcgtgccccccatcatccatggagcacagtgggcattggggcgagaagagagtgaagaatcatcattgttgaacctaggcttgcagcggtggtcaaggggggtcgtggaggtggtcgcttgaacctatcgctcgttcatggcctatccgagcgggattgtgcaaggttgcagggaatcgctcaccgtgaatgggggagaagaacaaaggttgcttcgtccgccgccacgggtgcgtgtactccttgtcgttcagtgtgcaagctcggccttgggatctttgtcgtgatctctagggctcggatatggcggcatctggcccggagaggccctggtggtcggcagattgctcgtcgtcatcacgcacgttggaaaaacaacacctcactgtgggctgagatctccactacaccattgctagtgagaagtactcctcaagattcgccttgacctcctctacgcgtagcatcgtcgggatcggagttctagcgaccatgtgtgggtggggctg

SEQ ID NO: 136127 - DNA, 667 bp, Zea Mays
agaacaccgagttaacaagctcaagcctaccggcctgggagaggagagctgaagtacatgacaatctcttctcaattctacaaatgagcggtaaaaagtggcagattttgggcttagacaggccaagcggaacaccaagataggtgaagggcatcgaacccatctgacagttgagagttttggctagaatctccattttagccgagcaaacattgattgggtacatacttgatttattatagtttaccttgagccccgtcgaagttgcaaacgagttcagaacagccctgaggaaaaataattgtctggggcatgcttccattatcagtaaagtgtcatcagcatattgaacgatcggaaagtcttgaccacagttcgccgcaaggggcaacttgagcagatcttgttgacgcgctttattgagaatgctctgcagcaaatccgccgcgaggacgaaaagaaggggcgaaagggggtccccctgtctgaccccacgcctgcagtgaaaagttttccctggtacaccattaaggaggaccgaggacgtaccagactgaagaatatccctgatccagctcatccactttggcccaaaacctctatgcgacatcacctgaagaatcagctcatgctcaagggaatcaaaggccttttcaaaatccagttt

SEQ ID NO: 136128 - DNA, 337 bp, Zea Mays
ggaaaagaaactacttggccaataagatgtagaggagagcagacgcaagatcaaaacatgaacaatcctcacttttttgctcacttgttgacctgcggattcacagaattacagaaactatagcagccaaattattgcggttctagagtggatcccgcagagctttcaaactgggcggtgccggtggcggctgccgcaggacaggagccgtgccgaggttgctcgccgccggatgtccttgtcgcgcttctgtcggatttggtatgtgacgggacgaaggggatccagccatccagggcacatgcagatgatgctggattcgggagattgagagaag

SEQ ID NO: 136129 - DNA, 422 bp, Zea Mays
ttgaagggctggtataagataaacatcagtgtaagatatggtgatgtcgaaggtaaagatgataataatgaaaagcataacaaaggatagcgttaaggcaagactcgtgaagtggtgaagtggagaaaacaatcaagggtaagataggtaaggtcccaatagaagggttgaagtaaaaaattcataaccggtggaagtaacaaggaaacaatgaggttacaacgaatgtgcaaaaataaaaatgaccgctcatggatcgttaagaaacaagggtggtcaaggacatgttaactgaaatgtcttgaatagtcattggggtatgcaaggttccaaggatacgggcataccaagacaagggaatagaaaaaaaaccaaaggatgacgacttaacagtagaataggaagggatctcagaagacaag

SEQ ID NO: 136130 - DNA, 292 bp, Zea Mays
tgtacttgttgatagttgaggatcaatttgtttctggttttccactacccccttctgctattaaagaaaaactttggacactggcaatcttgtaaaatgcaatgtgggccactattgcacaacaacgacaacaagagactttagttgagttggttaggtagcttgagtaggtcctgaatttgactatatgtgggagtgaattttcagactagggttaaaaaatctcttcgtatgtctaggtctaaggtctggctttagttatagtcattctcacatagggctatcgtgccgc

SEQ ID NO: 136131 - DNA, 455 bp, Zea Mays
cttcgttcagagcttcgggagcaggagctttggtcttttctggtgcaatctgctctgctgttttttcctcaggcgcgacaggcttcgtctcggtgggcactgaaggcccagcttcgtcttcggcctaaactttcgtaacttcggcaattttcttaggggtagggctcagggccttcgtagtctctataacaacgtctaatacgctggccatcctcctcttgggagttgcggcaggattttttgcatctttggcagatttgcctctgtcggtgggctcaggatttctagtgtttctatcaccttttccacatgtggctctttagccttatcatctctagcttcggttggcccgactataggcaccttcggcattacactcggctcttcagtactctacacaatcggagcagtttgcttagcttcggcagctgaagaggtccccgcgccaaatttag

SEQ ID NO: 136132 - DNA, 448 bp, Zea Mays
gaggtgtatgaggtgctgggttcaatgtagcttgggtcctttttttgttggcattttgtcccattaatcttatattcacacttttttttgcataagaccaaaacccttttgcataatcctctgatttttttaccttaagcaaataagactaaaacattactccatgccaagtttcaccattgtttgaccaaatttgctatttatttatttatgcctagggaaggcatttaacccacagaaaatagtaaatagtccaaaaaagggacatctatgcatgaattaagtttgtataggctagatgaacaaatagtacaaatttcaaggaagaaaacaaacaaaactaagaaatgtagctcaaaccgtgtagttgtagttcaatgtcacgaaacttggtgagatatgtgtccgtttgtgaagcacctatattcaaacttttgcataatcctct

SEQ ID NO: 136133 - DNA, 348 bp, Zea Mays
ggggggtagagtttcccgctaatctcatagtgatgggtactcacggaatagatgtcatcatagggatgaattggctagataagtaccaagcaattatcagttgtgataagaggacaattaagttggtgtcctcactaggagaagtggtagccgagttagtctcacctgagccaaggaaaggaggttgtcatcagatggctatcgatagcaaggagccagattcactcgagactatcaaggttgtgtcagagtttccagatgtgttcctgaaggatttaccaggtatgccacctgagcggaaagttgagtttgccatagagcttcttcctggcaccgcccccatttcta

SEQ ID NO: 136134 - DNA, 480 bp, Zea Mays
cttctttcccctcgagcacctaaggccgtagtgaaagctttttcctccttcttcgtgtaatttcccaggattttactacatgttgattcaatggcctctagtcattcgtcatctggctcaccaaactgactctgataccgatatgtatactcaggtacaccaaaccaccttttcccgccccttgttcagatgtgctgcccttttcagccttcgacatttcccattcattcacaagggaccataccttgaaggctatgtgttcttgaaccatatctctagtacaaatgtagctacacacaacattaaaaaccaccaagcaagcttgagcttcttccatctctacaatcgttggcctctttatactgaaccgagacattataggcctctaaatgaccccctgatgtcttctctttttctaagttattcttcacataaaaacactgtttcgtccaagaagctagccacttttctcgacatgcc

SEQ ID NO: 136135 - DNA, 1193 bp, Zea Mays
ctgggcttcacaacctgattttggcccactgattttcccctccgcgcggcccactacggatggttctcgcgcgcgcttgaccagtgacttggtcacactgccgcatgggcccgcttgacgagccgcacacttcgctcgcgctctcaggaaaggaacaaacgctgacaaaacggacccacctgtcatcccttcgttctgcccgtcaaccaacgacgcgagatccgcggcgagctcccttccctgatttccgacgccagttggccacgtctccgacttcgccggtcctggaagataaaggctgaccacgcccgcaagccatcactcgtactcaagccgatagaaccctgacgcgagtgattttacgcgtgcggcggaggtgagaagtccgccgccgcgactgccctcgccaacgcagtggctgcacctccacgcaggaatctgggaacctgcttggcgtggtgaagcttcggcccgcactggattgggcgaaccttaccccggcggtgagcaattcctcgccgtggtactcctccgccgcggcagccgcagtatcacgtggtccgtcttcgccatagctccagcccctcggtatgaccttcgaccacctttaccgcatttgtaggatcgtgatgcacctgtccgtggtgaggatcgtgagttatggagtcggattgcctctctccggcgtgaggacgccgtgaagtcaggcggtggcgccgtcgctagctgaggattgggggaaaacaccctggtcgtccaatcctcgttgaacggtatagattaaatcgacgataacctttcggccctttaaatctggtccgtagaaatgtgatcgaagggctacggttgtttcaaattcagtccgttgatgatagatccaagcgcctataatgtttcacggttcgtcgtagtcggcttctaatctgggccgtctggtctctatcctgcggctgtgggttgttggtaccccttcgcgggtactttttgctaaagagccccctaggaaatcactaatcaacccgcagttcttccctggctagtctgtgtcttaggatttgtttgcgccaacacccctgcgttttctagaattcgaggcccagtcctcatagttgataaaaccaggaaaactatttagaaaatagtttttagtataaatttaattgcagaaacttgtttaatttgtagaaaattca

SEQ ID NO: 136136 - DNA, 485 bp, Zea Mays
tgcgaatccaggaatcccagcaacttcccagcggagacaccaaagatgcacttgtccgggtttagcttcgtgcgcgttgctcgcagcttgtcaaagaccagggttaggtcttccaccagagtcgaccccctcttagtcttgaccacgatctcatcgacatatatctctatcatgtccctaatcaggtccccgaaggtcttactcatcgcccatacaaatgttggcaaggcatttctcagaccgtagggcattacaacatagcagtaaagaccatccactgttacaaaagcggtatgcttcctatcttccctagccatctagatctgatggaaaccagagtaagcatctagaaaggacaagaggtcacacccgaaggtagaatccacgatttgatctatgcatggaagtggatacgggtccttgggacaagccttattaaggttggtgtagtcgatgcacatccgatgcttcccgtttgcctttgt

SEQ ID NO: 136137 - DNA, 609 bp, Zea Mays
atttggaagtacattaccatcctggcaaagccaatgttgtggcagatgccttaagtcggaaggcctagtgcaactgcgtgagtatggatgcaaagatcgccactctgtgtgacaagttatgcaaattgaacctagaagtcattccctcaggtaccttgagttatatctcagtggagcccaccctacatgagcaaatagtcatggcacagattggtgacaagggtgttcaagtcattaaggaaatgatcaaacaaaaggtggacaaatacaaatgcttccgtcgggacagcaaaggaattctatggtttggagaccggttggttgttcctaagaaccctgagctcagaaagaaaatattggatgaagctcacctttccaaattctccatgcaccccggcagtaacaagatgtatcatgatctcatatccttgtactggtggaccaggatgaagagggaaattgctaagtatatatctgaatgcgacacttgccaaagagtcaaggccagtcatttgaaggtggcaggcaccttacagccccttcccataccctcttggaaatgggaagagatttgcatggattttattgtgggattgcccagcacttccc

SEQ ID NO: 136138 - DNA, 391 bp, Zea Mays
cctagtttcatcatcatgggcatgtcatcttcggacacagtagatttctcaaaatctagatgactgggctttgttgggatcaaaatactgtaatctttatcactttcatcaacattttcttcttcaacaacaatctgttcagcttcggcatcaggagcaccttcgtcaatagctccctctgtcacaactagacctgatcgttccatgacttctgaaattggtgctgtctcattgacctcggtctcttctccctcacgagacacccttgtagttgatcgcactctagccattttgatggtttttacaatttgatgaagctaactcgtctgatgaagctaacttcaaatgatgaagtgctcgcttgagagcgcggtgcagaaagctttggcta

SEQ ID NO: 136139 - DNA, 483 bp, Zea Mays
gttacttccctcggcgctgtcatcctctaccgtatttcattctccctttcctctttgtcgccctggtcgtcatcttcctccctcggctctgttcatcgcgcactgcggtgccttcctcccctgtccttcactggatcttgcccttccctgctgagcaggttccgcctcaggcggatcctgcgcctgtgatccattgccgccccgccgacgctggtgagctctcctacttctgtaaccctagggtttgcagattaggctaccgtcatggaacctgccgcggagctatgtgcctagaacctgtccgcgtccgttgctgcagcccgtgacacaatgaatgcttctgctaccgcttgtatagttgctggtgattactgcgccacattttccttaggtaacgatgtggtttctacgcttgatgttcttgaatccgctgtggcggcggaaaaaagtgctatgcgttcttatcaacaggcgagtgcagcc

SEQ ID NO: 136140 - DNA, 361 bp, Zea Mays
ttcgactgttgtctcgcgtcatgcacgaagcacataagtctgttatactcctagcttctcgcctaacaaactaatatctcttgcttattgcatgcgaagcgcataagtctgttcctctccccctgcttttttctcacctaagaaaccagatcagataagcattatctcttgcttgcaataaccacgagcaacttcctccttcttattgttgccttcgtatattgacccccaactttccatgtcttttcccatcttcgtcttcttcacctagattctttggcactaaatagaggacatcctgctaggcaagttgccatagaggacatcgaacaggtcatcttgctagcctttgactcaccag

SEQ ID NO: 136141 - DNA, 332 bp, Zea Mays
gccatggatcatcggcgactcgtcggagtagtgggcggttggggaacgtcagtggggttgcgtgcaggggcttcgagtgactacgcagagttcacacgcccgaaggccgctccgccgagggaacagagggaggacgcaagggatgggagagagggagagggctcacctagaaccgccatgtgcagggacatctgcttctacgcgatttggatctagggagggagatgaggagttatgcgacggtggggtgggtatatagaagagaacgcaggaggtggttgctaaattcgtcatcaattgcgtcgcaatcgagtgagagaggcggttgcgag

SEQ ID NO: 136142 - DNA, 431 bp, Zea Mays
cgcgtctttcatgtacaggtaactaaacatgtgctgtgataaagtgaacgcaagcgatggtgcaagatgagactatacagacaaatacaatcaatcagacgggttagtcttcacccaaacactctgcagttattgttaacacatgcagttattgttgaacacaggcagatcaacactctgctgctctggctgactgctgtatatgtatggctatacgaatggaaaacaacgagaaacagtttactctctactctttgcactgacactgaagttctgagatcggaccattggattcgtggctctacaagaaaggccatccgaggtcacctcgatgactcgatcagctgttaaaccttcggcagttgagcctgacttccccttgcctccccgtgagaacgttgacgttccccagcctcaccatcgacttcgcg

SEQ ID NO: 136143 - DNA, 942 bp, Zea Mays
aaccaccaatattgtattgtagaccccggaccgtggtaatccttcaatgaaatctaaggaaatcgcctgccaagcatgttgtggtaccggaaggggctgcaggagtccaggataccgagaacggtcgggcttagcttgatgacaaactgaacaagcatcaacaaggtccttaatagtctgcttcatatgtggccaatagaaaagctgcttaatgcgacgatatgtaacaggaaatccggagtgaccccccaaggcactagaatgcaaagcagcgaccactttgttgtgtaactcagaattattgcccaaccaaacacgatttttataccggataataccattgtgcaggctgtatggaggctgagaacccactgataatgcagtcaacaacttcagagcttcagaatcattgttgtaaccagccactacatcctgtaaccagctcggtgaagccactgacagagcacaacactcaagatcttcatggtgtgggcgacgagagagtgcatccgcagcagcattgtccacacctttcttataaacaattcgatattgcaagccaagtaacttggtgaacaccttttgttgccaagacgtgtgaagacgttgctcatttaagtgagacaaactgcgatgatcggtgagtattaagaattcagcatgctgtaaataagatctccattgatccacagctagaagaatggccaagtattctttttcgtatgctgaaagtcccaaatgagccacccccaaggccttgctgacaaatgccaagggatgcccgtcctgttgaagcacagcaccaatacccgttcctgaggcatcggtctcaatagcaaacgacctatgaaagttgggcaaggccaaaactggcgcagaagacaaagcctgtttaatagcttggaaggctgaatcctgaacctcagtccatacaaaaacagt

SEQ ID NO: 136144 - DNA, 472 bp, Zea Mays
cggatagcttgccagcacatctgaaatccgcacttcttccccaactccggtcaacagcctataaattgagctcggactccgcttcttctccacattacgcacctcagtgcttaagcaattgacccaattccgccagagaacttgcgcagccccaaatcccctcctcctctgttcttgctccgccgcatgggactccaccgtggacagcactcttcgggttggtagtttctcaattactctctgttctagctcgtgtatagtctcctattgctctctgtactgagcaattggaatttggccgaagtccatcaccagaacgcgcccttgccttgtaaaacgccgccgtgaccccctcaccgtagacccgctcttcgggtcttgttctgcccaaaccaaagtatgtccatggaccttggtgaacctgtgaacctttacccagcctcaatttggccatccccatcgctgtttgatc

SEQ ID NO: 136145 - DNA, 775 bp, Zea Mays
ggcgcaaggcaatcggtctcaaatgggtatataaggtgaaaagggatgagcaaggtgcagtatccaaacacaaggcacgactggtagtaaagggatatgcacaacaacatggtattgactatgatgaggtatttgctctagtagccaggcttgattcagtgaggttgcttattgcacttgcatcacatgagggttgggtgggaagtgcatcatatggacgtgaaatcaacattcttaaatggtgaattgggtgaagaagtataggtgtagcagccatcaggctttgtggtcactggcaaagagcacaaggtgctcaaactgaggaaggcactatatgggctacaccaagcacctcgagcctggattgaaaagtctcttggcttcaggaagagcagttcagagcttgctatttatctcaggagaaacatcaaatcacagttggtggttggagtgtatgtggatgatttgataatcactggaaccaattgtgaggacatcaatctattcaagaaagagatggcagctgttttcaagatgacagacctgggattactgaagtattatctgggcattgaagtaaggcagaacaaggagggaatatctctcatccaaggagcctacgcagcacaaattctggagaggaatggtatgaaagaatgcaacccgtgtcagactcccattgagacacggttgaagctgagcaaactaagtactgaacccctggtggatgccactatataccgaagcgtagtaggaagtttgaggtacttggtca

SEQ ID NO: 136146 - DNA, 390 bp, Zea Mays
actgaccaaattaaaaatttaggggcaataaagaccacagacaaatcagtgtttcttaggacaaacaccctagtctcatagactcagaaatgaactatagacaagtagcaagtgttgtttaaggaccacacaagcccatttgatatcacttggtttcaactgaactaaaacaaatatatatcagcagcatcctcaagaacaatacaataattagcatcagcttcttcgcaacttatagtgcaatgctatatacaaggacatcatggtgtgtattacaataagctattatggtagtgttttctttctactcaaatcacataaagcagacaccccttttcattcatattccttaatgagcaatcactaaacaaacatacactggcattttgc

SEQ ID NO: 136147 - DNA, 391 bp, Zea Mays
ggagagtgttcgcaaggtattggagtctcccgaagacatcaccgaattggaatggagaggtcgcgccttcggattggaccgcggttggatcaagggacccatcgtgtcatactggcaccaacggccgggtcatgcttcggggaggcagatctgcgggctctttttgacgatgaagagttgagattgatgctattcaatttccgagaagccggtcttattccaaaacaagagccaatgtaacaatgtgtgttgccatcgccgttctttggtgacgataagcgaaaacgctgcccttgcccaccttcgccaaaggactgttgtggggacatgtatgtggacaattttcttacgcgcagtgcacatcttataattgaaacatgatgtgtctttc

SEQ ID NO: 136148 - DNA, 327 bp, Zea Mays
ggggcctagagggaactttgaccctgctgactgaaacatgatggagtggacccagctggcttgttgaagcttggtcccttgggtggaaacccaaaagatcgaactctctggtgcctgtcctgctgctgagctcggaggacttggaacttcctcttgaggtgacccttttcttcttctctagccctttccacttgtatggccttgtttgagaggtgcgagaagatgagaaaatattggctggcgaggatagtcttgagttctggtcttagccctttcaagaaacgggccatcttcttggcttctgtgctgacatcgtcaggcgcatag

SEQ ID NO: 136149 - DNA, 622 bp, Zea Mays
cgcggatccatttctcggcccatttcacctggtctactgcgcggcccaactcccctaacccacgtcgacgctgaccgggggccccgcatgtcatcccgttcctctttcctcctcactgaaacaagcgagcatggagctcggctgttgaatcggccacacatttccccccattccgaaccggatactgcgctgtgattaaacctgtgcgtcgtcttcctcgactggattgtcaccaactcgcagtctgttccgaggaattcggatcgatcgcccgcgctgaaatcacggcagccgttgcgccctgtgtcgtttccgcgcttatatttgaccttcgagcatcgcctcccctacaacccgtcggggcgagtttaagggagaactcggtagcttgccatgttgccgagcgctcgggagaattggggggataatttgttgccactccgacgctcaggctgcgtcggtatttaggcaactgcgcaacgcgatggtgcttcgtcgtggtgcctgggtctcgggcgtggcggtgttgggctcggggagtcgccggtgtgggccaaattgctcaccggtgccaaacccttgtggcggaaatcgggttgcgacaccagcttggctcatcctc

SEQ ID NO: 136150 - DNA, 748 bp, Zea Mays
tgtctcaacttgaattgtaacagatggtatgctgcataccacaataagctaagacaaagaaacatatatatatataaccttaaacgtgtgtaccaaaccatatagagcagacccacgtgattgcaagcactgggaacatcattgtactccaaaggaaaacatcctaaagagccgtgacaagtcgaaacacttgtattaattcgaaaacagaatgatcgtcacacaggaaagaacgcagtggaaagattttttgctagatatctttttgaaagaaaaaagaacacaatcatcatcactagcaacagagaaagtgtggactcgaagacctctgtatagatatgttctcaagaatttgtcgggaaaagatgagatattcccagtagtaaataaagagcaaagagctaagatcgcatcagctcgtatcagatagttgccaccaatccttgtggctccaagttcctaagcaacgtgcaggctaaataaaaccaaatcaagctcaaagttccaagcttcaaatatatttttagtacctgctgatctcacccttcccagccttaaactactactctatctgacaactacggataagataacactagcccatgcatctttgcttaaacaagtcctaatctctatgagaaaagataataatcttctaactggattcaagagggttcgggaagggggagcggaattaaagaatacatacccgtgggcaagaatcatgtagagctgagctgcataggca

SEQ ID NO: 136151 - DNA, 392 bp, Zea Mays
cgagctcggaaaggctcggctcggagaggtatttgtttagctaataataatgaaaatcatgttctgaacaaatagccttacaccacttccatcatacataatgttgagaaactccatcatcaaggaacatgcataagcctgagaggacctagtgaaatgagaagctatcttcttaaggtacttcttggctatctcacactctagaataacactcttagtagagtacttgatgaggccctgcccttggctgtgtttgcgggctttggcttgacatttggccaaaaaacagaaccagacagcctgcaattgctctctaggctaccggcttcagttttggcatcatgcttgttctccatactgctgacaccaatctcctgtgccatgaaccttga

SEQ ID NO: 136152 - DNA, 840 bp, Zea Mays
caggcgtcttcaacaaacccgctaaatcaccggagctgctccttacgctggccgtggcagctccgatcgcctcggactcgctctcccccatataacctggaacgtggggcacccccttgatccgtttcatcgtgatccgtcgttagccacctgggattagggctttttcactccagtcaggaaaggggcggggcgggtttcagccgccactgcaatttcgcgtcggcagtagaaatctggcgcattggtgtctgctcggtggtagttcgggtcatatccaagccgtcggagggattaattagtcagcgaatcaccacaggattgggaattgctcgccggccattcaagctcgccgcggattcgcctggtaccgtagccaagcagcaccgccttacattcgcaggtaacctctgtcctatttcattcctagcgctgtgtgcttcgttttgtagccatcaatttgagcctcgggccctggcacggcgatttgggtgctcaccggatccgtcaccgccgccgtcaggggggaatagtcacgcgcttcagaccggggtaggagacagtgtagtgaccgtccgatccttctcggtcggctgcgattagaagtcacgataactcttcacttcattaaattttgaccataggatgcaaatcatccagtagagattggagcctagcgtagcgtgttataggccatcgatctcggatccgtcggtcggggtagtacgcgggtgagttgagcgcctggttttaatctggtgtgtcgcctattgatccaaccgtcagaaatccttggtaccccttcgcgggtacttgttgctaaagagccccctgggaaat

SEQ ID NO: 136153 - DNA, 415 bp, Zea Mays
agcgcctaggcgcgcctaatcgccgcctagtcggcgcctagccgaacactggtagcagctcctttttgcacaacagctcacataattgccaactacaacatgtcagcatcattaggagtaagagaatatataatccttgaacattagaccacacagatacctgatcgtccccgcggccgaaatgcaacatgttgtcttggagcatcttcagaagggggatcacgacaccatccttccatgttgccacggctgttgcggccagtgcaccgatcaaatccctcgcaaatacagtgtctcccttccataacacagagaacaacgaacggcctcaggaactagagcacccaatccacccccatcggcaaccatccctgctgcctgttgcctgccgcgtcagttccgtgcacactatcag

SEQ ID NO: 136154 - DNA, 439 bp, Zea Mays
cccatatgtaaatactaagcctaacaatagcatttggggtcaactggtcaagatatatctcaaatctcttcaaaacttcccctattatatcatacaggggaaccgaagccctgccctgacgaagcttttgaacacaacaacctcattttcctttagctctggaattacttcttccccagcaaagtgaatcaatccatcttcattatctccaaagtaccctagcttcttcatcacaaccaagttctctgttgttacgatggatcttccaaattcaatgtgactaggtttggttgggctcagaatgctattgtcctcttcactttcattgtcactcccgacctcagcctcattctgttcagctttcgacattaggggtcccttcggtagtacctccctcttgcacaaccaaaccctgagcgcctcagtctcagtcatttca

SEQ ID NO: 136155 - DNA, 507 bp, Zea Mays
atcctcaattcctcaccctcaaaaagatttcgcagctccccttcacctacactcgccccaatcggcgaggacaacaattctcgtttaccagtcccgtccacgcgaagacgaccactctccatctcactacgatgatgcctaccactttgcgacaattcactcactctccgttttgccaccgcccttcgtcgcctatacccagtactcgcacccgggagcccctcggaaccctccacgcgcagcgaaggctctgctgcagccacatctaacgctgcaaaataatccaagtcctcatctgaagactcctccatccacgcaatcaaactcccagaatcatcagactcaaaacacttagacacagagccaaacgaatcatcaccagcagccacgatcgaagccgccacaaaaatagtattgtcagtagcggttgcgtgcgtaggcccaaacctcagaacctgcgcagcaaccgaggttcagtatcacacagacaaaatttacaagctcctc

SEQ ID NO: 136156 - DNA, 640 bp, Zea Mays
cttttctagggaccagacacgactcgccacggccatgacatggttaattcagcgatgtcgtggaccaacgtagggaagcggtgctggcggccaggtacggtcacaagggccagcagccacgtggtggcctaggcgttcgcgcgccacaacggcgatcttaccccgtccacaaatatcacggcgaaaagatgcctggcgagcacccatccgggacgctgtgcaaatcacgacatcgatcaatgctagcagcgaggtgctccgcatctctgatatttcttagtcattgtactatctcgatctcatttagttcatctaacagagcaactttaggacacttgttctttgattttcatgcaacaaacctctaagccgactgtaccaaagttgttcctctataaaccaacttcaattttgttataaagatcttggtcaaacatccactggattgggcgctacttggttctaaagttgatccgatgccactgttcgtctgatttcatactgatactcgactgacaacccatcttcaagtccaattttctccaatttccatatagctctaggggtttatcacttaatcaaacatagactactatagtaactctacaacttttttgtagtaacccctggcaaaattgtg

SEQ ID NO: 136157 - DNA, 478 bp, Zea Mays
ctgctttcgaagtctaaagaacatgtacaaccatgtgtcagtgcacgaataacagtaagttcacatcaaccatgaccatacataaagtattacaaattcatataagtgtaccttgtcgttatctgtgaggccactttggttttcccagaggactcttgcgtagaatccagcaaatttgcctgtttcagctcttattttgtcccacctgctgctgagagccctattaagtctcaatggaaactcacctctaagttcgttgtaccttttctctattctagcccacaaaccctccttcctctgccctgtgctaatcactgggtcactactaatctctaaccatgttttgcaaagcaacaagtcttcatcaggtttgaagttctgttccttcgtcctcctaaatgtccctggtgtatctgaaggcttggtagggctgttaacttcctggacgctgtgttctgctttggattcaaaagttata

SEQ ID NO: 136158 - DNA, 315 bp, Zea Mays
cttttatgtgcttgtatggacttttatgagcttgtatggaattttataaacttatgtgcacttgtattgcttctacatgtgtatatgttggattgatataaaacaggggaaactcttcattgcctcctttgcatccgggttcactttcccttccggagagcttctgggttcttctccattgcctcctttgcatgacgtgcatgctcaagcttcttctccctctcctccctgtaatcagcggcacgtctcatttccttctctttaatctattgttgccccaccgcaagctcctctcgtctcttgtttaccctctcc

SEQ ID NO: 136159 - DNA, 1369 bp, Zea Mays
agacgccataggggcaataaggtcgactagtcgacgattagggtgactaatcgcccctagtcagcagtagttagtcattcactcgtcctactgcttcttgccctttgaaacgagctctctaatgttttgaaacttgttggacatctttcgcttgtagctaacatacactaacttgtttaaccttttatgctctaagcggtttctctttttggtatggacctacataaaaaagaagaaaacacactaattggtggtctgggtagcaacttcacaataaaaaaagaacaaaaaaggtgcacatacaagagaaaacgagcttcaattgcgctcgtagccagatgtcgaacaacaaaggctcacaattctttttgctaaactttggagctcgaatgcaagaccaccatatgatccccaccaaataactgcatttaattaataatttgttttagttcatcagtcaccacttagcgaaaaaatagaagaatgaataatttagatgagtcatgagtgaggataaaacttactaggattttttgatctctatctcttattgctaatgcctttgagaagcaatcaccttcggacctctcataatcatcagcttgcttacttatcttactttgttcatcatcatcaattgtcatcttctataaaacatcattaaatgtggaccttagcctcgaagcctgtctcctatccttttctcttatgggaaagaactaggctagattcaagaacaaggctgcctcatataacttttgctccatttgggtatcccatctcttgtcatagcaatccatgatctccttaagtaattgtggcttgtcttttgaagaatcattgatggtgcacttattaacatccatggctgccatgatcccaggagctggtggtgtttcattcccatctgctatcctaagagcaataagaagtggttgtgaagcttgtaagcatttttccaactttgtccaaaacggaatagaaaggacaatgttttcaacttgttggccttcactattggcaggcaacttgttttgatgccactcatcactaacaaaagacttagaccctgcttgtgcctttgcatgcttaccaatgtgagaaatgaagtagcagaacgagtcatgacaggcctcacaagatctccacctattttatgtctcattgtatcaataaatctcccatgcttgtagataaatctggccaccttctttgtgtgattgatgcaagtgttaaactctttacctttccaatattatctagcatcaaatccaagcaatggcttgcacacagtgcccaaaatagagttgggatcctctccattagaattcttctcgtcgccttgaagttggctccattgtccgtgaca

SEQ ID NO: 136160 - DNA, 735 bp, Zea Mays
ggcaaggccacttttggaaccccggacctgctaagggcatcagccaccacatttgccttccccgggtgataatgaatgaatagatcataatcctttatcaattcgagccaccgatgctgtctcaaatttagctccttctgagtgaaaatatacttgagactcttacgatcggtgtagatgtcgcaagactcgccataaagataatgcatccacgattttagggaaaagaccaccgcgaccaattcgtgatcatgagtcagataattctcctcatgcttcctcaactgcatagagccataagcaatcattatgccttcctgcatcaacacacagccaagaccaatacgagaagcatccgtataaactgtgaaacacttaccactctcaggcaaagctaggataggggcgttcacgaacttgttcttcaatgtcttataactgacctcgcaatcgttggaccagacgaaaagaacccccttctccaagagtctggtcaaaggcttagcaatgctggaaaaatttggcacaaaacgtcgataatatccggcaagccccaagaaacttcggattttagagacactagagggtctcttccactccaccacatcagcgacattcttgggatcaaccgcaatgcactactgattaatcacatgacccaggaaagccccttcagacagccaaaacgcacacttcttcaatttgccataaaactgattcttcctaagagcacct

SEQ ID NO: 136161 - DNA, 510 bp, Zea Mays
gtgattgcatggttggttgcatatgaaagagatgtgagacttatctggttttgttaggcgtgatatttgtacgtggaggagaaaaacatatctacgtacttcgcgcacgatgcacgacacacaaaactcacgctttaatggagtagagattctctcccctctctctcccccttattaaattgtatgccacgtcagcaaaatacttagatactagttagcaagataattattacacacattgcaacaatatgtctatatatgatggtttctgcaccgtgatgagtagcaaagccaccatgcatgaccgatatggcgattggcgaacctaaaaggaaagcgcgaacgcgaccactttggcttggcgtcttcctcgtctttccactcctacatgcaccccctattccatcgaggcatcatgcatgcatgctgtcctgctcgctaaaaagccatggatcatgcgatgcgcacgagagccggaggacaaagcaaaggccctagctagctagctag

SEQ ID NO: 136162 - DNA, 453 bp, Zea Mays
ctgctttggcggcctttggtttccacttcttttgtgtcggtgagtactgtagatgtgtatcattgaatattttttctgcctccttttttatgcattcttttgctctcaaacgatgtaatatgcgcttttgataacgtgttaatcccgatggatatgcatgaagtatttggggttaactgttttagtggttataaccttacttctctctttttaatttctagccaactcaccgaaggtcattagcccttcattattaccattgatgatgacatctattttgcctattttaatgatgtcgccagccattgtcctatttgtttccttcgaacttgaggccaattctatagatgttggagttttatccttatgcccacctaccagatttgtcggcctttgtggctgagtattctggcaatcttgctggagctattcatgctgactagattgagggag

SEQ ID NO: 136163 - DNA, 310 bp, Zea Mays
tttggagcctaagaactcaacctagtcgagctctgcatggaaatactcctttcttcatggtctacggttcagaagcagtactacctgctgatctcaagtttggggcgccaagattgatctttgaaaacatagcagaagccgaggctactatcctggaggatgttgatgtactcgaagaagaacggctgaacacggtaattcaatcagcacggtaccaacaaactctgaggcgctatcacgataagaccatgcgacatcgatccttcacagtaggagatctcgtcctccgccgaattctaacgggggaagg

SEQ ID NO: 136164 - DNA, 590 bp, Zea Mays
ttttttatgcctaaatttaccaagtccacgcgtgaattgagcccttcttttgttttgccctttatgtctagcaaggtgccaattatgctttcaaacaggtttttctgaacgtgcataccatcgatcacatgcctcacatcaaactctttccagtaaggcaagtactcgaagaaaatagacttctttttgaatatagcccacaaagctggtttggcatccttccttgttttcccatcttttgtcttcttcccgaaaataaagttgatattcttgactatttcaaaaactctatgacctctattgttacctgatggaggagtagaatgtagttcaccattaatgtcgaagtacttatccatctttcgcatgcggtacctgtgtccttccaataaaaagtgtttgtgcctcatgtacactatcttcttagatgcagcaagggacacgtaagcagtttcatcaatacatactgtgcaatcaacctttcccttaaactggcctgataatgtgaagagagcagggtaatcgttgatcgtaacaaaaataattgctcttagtgtgaacgaatctttacgatactcatccaacatttg

SEQ ID NO: 136165 - DNA, 290 bp, Zea Mays
cttttcctttgcctctggctctggccaatgggacataggaccatacaaccactctatgaaatgacacttacgccacccgtatggctgcaggagaataatttagtacatttatgcaaaaaataataaaagtttagacatttgttatgggctcacataatcaatgttcggacacacgaagtgcttcgcagtgtcctcgtcgatgacatcacgatctccgcaatcgcatcgaggcggcgagtccattcgtctttctgttgctacctccttctctgcatccgtcattggtggag

SEQ ID NO: 136166 - DNA, 500 bp, Zea Mays
aagatgatcttcctagctacccttccaagacagtacacaagcatgcaacatatcttccaaggtttggatcgtttgctccgacttaccatcagtttgaggatgaaaagcgacactaaaggaaagcttggtgcccaatgcactgtgaagactctcccagaatttggatacaaatttggagtctcaatcagaaacaatggacttaggtaccccatgaagcctgattacttccttcatatacaaagggaccaattctgaagctgaattggtggtcttcatgggaataaagtgtgcagacttagtcaagcgatcaactaccacccaaatagcatccctgccccgaggagaacgaggtaagcccaccacaaaatccatggtgatatgctcccatttccactctggaatttccaatggcttcagcaaacttgtaggcctcttatgctcggccttcacgcgttgacatacttcacaggcagccacgtacttagaaacgccaaccttca

SEQ ID NO: 136167 - DNA, 490 bp, Zea Mays
ttaaccctagcacttttgtgtactgacagacttagttgccttaacatcacaagactctacatacagtgaaatcgactgtcataataaactaaatggtaaaataactagtcacaaaaaaattgtcatgaataagcatttgcatcagcaaccaaagagctagaagaattttatttaggggccacagggaacatatttttagaagtaggaaaggctagacactccaaaaagtttcaaggaacaacattggatattagaacaaaatttcaagagagttgtgacttatgattatcttgaagcaataaaatttcccttatccaaaacaaagaacaaatgtctcaattaccaactgaagaatcattggtagactcatgtgtagatgttcccaagttgaaagattatcaccagtccatgttgcagcataacgctggcttcctataaaaccagctcgtgtaagaacaaatggccttttagctgcattggccatttccat

SEQ ID NO: 136168 - DNA, 350 bp, Zea Mays
ctatcaacttaaccaagaaggatggtaatagatccaaagaatccatagcaaaacttcttgcggagtggggataagatagaggatagggcatcttcaatatcttctaaaagggtttcttctagcaaacttcgcttcaaattccgaaatcctagcttgatcatcttgcaatgcttctcattagaatcttctgatagacgaagaatcagacaagaagggttgaagataaaagagatgagttttgatataaagtaagtttttatggaggacaatatatccggctttgaaagactggctcggctttccatttctaactaatctagcgacctacggtcacattgctttgataccac

SEQ ID NO: 136169 - DNA, 562 bp, Zea Mays
ccctatgatgcccatgacagaacaccgggacgcgatcggacacgatggactgcggaatgccgtggagacgaacgatgtcggtgaagaatgcttgcgccacggactcggtggtgtacgagtgcgccaatgggatgaagtggcagtacttgttgaagcggtcgacgacagagaggatgaccgtcttcccgtgtacccggggcagcgcctccacgaagtccatgccgatgtctgcccagacgatggtgggcactggcaacggttgcagcaagccagccaggtgcgggtgttatgacttgtacctctgacaagtcgcgcacgcgcgcacgaagtcctgcaccagacgacgcatgttgggaaaatggaagtcgcggcagaggcggtgtagcgtgcggtggacgccctcgtgtccgtcgttgtggacggccgccaggatctcctgcaggagtggtgctgtgagcggtatgtacaggcgtccgtcataggtgaccatgttgttgaccactacccacggcgctgtgcatgtgccggcgtggacctcgtcatggatgctgaccagggccgg

SEQ ID NO: 136170 - DNA, 390 bp, Zea Mays
gtacgccacgatgaccacaggatttagatcccacggtttagatctaatgatccgtggacccattcctatacatgaaccggtatacgctggtggccgctagatcggagatcgacgactacaacttaatgaaacacgatctgttctaatccgcaggataccgatccgacggcacggatccaatggcctaaagcggtacaccccaaactaatctccaccgcccatccaaatcctacggccaggacccaatttctcctttcccccaaacaaacactgcgccgccggcgccgcacagcacccccatagcggagcttcgccggagcgcacaaattcctgccaccccgagccccaaactctaattctctcagccctcgtgagatttacgacggcccg

SEQ ID NO: 136171 - DNA, 585 bp, Zea Mays
gaaatgggctaccttggtgaggcgatctattattacccagatggaatcattccctttttgcgtccggggcagtccagttacgaagtccatgcctatttcttcccacttccattcaggtattgggaggggttgcaataggcctgcaggtttttggtgcttggccttcgttcgttggcagatgtcacaccgggccacatactgagctatttctttcttcatccctctccaccagtatctggttttgaggtctaggtacatcttggtagtcccggggtggatggagtaggctgagttgtgagcttcttcgagcaggacttctcgtgcctccccttttggtacacacagtcgatttttgaaccaaaggattccttggtcatctgtcctgaggtccgggagttgttccttgcgggctttctccacaagtcttgttgtctctgagtctagacgttgagctttgcatatgaggtcttccagcataggtttgacttcgagtctgtcgctgtttcccagacatgtatttagttgagctgattctttcttccaatcttctaaaaagctggtcccctttattccgaatggttttcg

SEQ ID NO: 136172 - DNA, 614 bp, Zea Mays
gatgtgcttgtgattgatcctttttgaaactgaatttaattatattacagcctaaaatcatgctgctacagtggatactaaacaaattctaaggaatacccacagttctaggaatatatttctatttaccttcaatctgtaagataaagcctaaaaacatgctgcggcaatggatcctaaatagctaagaaaaaaattgaaggcagtccatgagttgtccttatattcagttatttatgctttgcctccagcaactctagcacaccatgatttcaggttatgaaaataacaagttataaatttcagggtataaatactttgtttgtttcatcaggtagcaaaaaggacaagcctgcacgtgcatacttgggaaaacaaaggcaacaatattgcaagcaaaacatccccgattgatttaacaaggtacctacatttgtcttttgttatactggacaatagcagataccttccctcatgcaatcctagccccatacctgcaagcaaaaaactatggatcaaaaagattgaaattgcatatataaacgaaaaactatggatctaaatttgtttgtgttgcaatcacagtctcatagtcacctccagtcaaaaaatac

SEQ ID NO: 136173 - DNA, 604 bp, Zea Mays
gcgacttttataggctgctgatgatggtgtgaccttttcacgtacgtgggggacaaagtcaaattcagagctgaaagggcctcgattttcatgtacggtcagggttcaagtagtcgttcatcgtcacgtagaacattttgtgacgtagacggaactgctatttcatttgttttcttctcttaacacgggaacattcttcgtacgtgcactacactacccccaacaaccgcaactgctagtataactaatatatatgcccatgtttcatttatttgaatggcgtgcgaagaatttgaatttcttggcaacacctgctagctgcatgcgccggatctggaccgacttgaccaagcgtgccgcgcgcggacagaaattaaggagagaaagcggtcacgtctccaaaacgccgagattaacgaactaatcaaaccgtttctaattatatgccgccgttcgttaccttgccgtgtccttttgcacttacttgttcatcctccctttttaacgcagcagctagattaattaaagtcaacttttgacattttatttcgggtaacatacatacgtaacatatggatggatagatgctccacacccacacggc

SEQ ID NO: 136174 - DNA, 525 bp, Zea Mays
aacgagctcaattgtgcagacgatggtggtggtggaaactctaggaatgttacgttcatgccttgttgctgcatagatgcctattaaacaaatgtgttagtattgaagaggttgttttcaatatacaaatttagagtttgcattagttatacttactcgaaacattgtttgttgttgttgcatgaatgccaagaaatattccctttgttgtctcatctcctcgcgcaccctcgctagcttcaaatcctgctccgtcggtgaacgagagactaagctatgggacaatgaacccatcctcttagatctcaccttagccaagtaaaacactccatcaaagagtgtgtacctacaaatgttttgaaaagcgtgcttagtgcaagaacatgttcgtagcaattgtgtaattctataagttagagctaaccatccatgcactttgccccaccactagaatgcaagactaagggatccaatggtgcatctcggcaatgaaagacgggaccatgacgccgaaccatctcctcc

SEQ ID NO: 136175 - DNA, 750 bp, Zea Mays
aaacatgtttaagtacttcaatcagttgttcaacacgctcattaaacagtcggatcaagtctctagcagtagtttgcctagaagatttaataaaccttggattgtgggcatgggttatatactcctgaaaagcactagattcaccaaaacaaagtggcaggtctagcctagctattaaacgacaaagctcagttctagcaacagaaggggaatactcccagtgattaacagatccatcagcattatatttaagcaaagactgtgtttttctagatctgtctttttctttcttagtagggcaaacatccaggtgtcggatcaaatggccagttccaaatgaagatttagtagacatgctattcttgcagtgaagacaaatggcagatactcttacctccttaccattttgaaccgtagttacctcctcaaagtgcagccataccttagaggtcggacctctccttctagaatgtttaccaggcacaaggatagaggtgctcgcgtcggtcgtcgggcttgtggagcccatccctgtttgtgcaccggcgccgtccagatcgatggcaccagtggaggtggtaccaaggaggaggcaccgggcatcgtctgcctcgttctgcgcttcaagcctccgctcctcgatcaccgcttcgagactaagctcgtcgtcggccgaggccgtggacatggccaccgcctcggtcggcttctccggctcctcacggcgcgcggcgcacacacacacggtgc

SEQ ID NO: 136176 - DNA, 851 bp, Zea Mays
gggcgtcagcgggtcagggcagaccgactagctaggcccagaggcgtagacgtgggggagggggaagagagagaggcggttggatccagatcagagggctgggattagatctgctcgagttaaatctaaactgttcgatctcggacaaacggtcaggatctaacggtcaggggcggacttcggcgcggtggcgccgcttggtcccgcggcgagagttcgccggagacgagaaggctggccatggcggggcactagaggctcggggtttagctcgggcacattcagggcggtctggcggactcggccatgggcatcacgctagcgcaggggcaccagagagcccagaccacgacaaggctggctagcggcgacgctggattgctccggcgagcaatcacgcaagcaacagatcgaggagggccaaattaagggggcaggcgggttgctcacctttaggggaagcgctggtgtcgcgaagcaacggtggaggcgcagagacttgatggggcaacagcggggggggctccgactgtgcaaagattgctctggtgagcgcggaccggacgcagcagagagggaaagggcacactgaagggtgtcccgagcagctaacagtgaggcggagctcaccgtggcactggacggggcgcggacgcgacggtggccgcagaacaggcagtggtcgacggcgggcggtggtggagctctttgcacatgtgggcagagcgagagagagggcgagagggtttggtagagggcgcgaatgagagaggggaggtgggtgagcaaggcgcggggctcaaaaggggcacggggcgcggacggggccggagaacgcacggacgtgggcg

SEQ ID NO: 136177 - DNA, 497 bp, Zea Mays
cttgagggaggctagaacaccaatcaaagaagcttgaactgacctgcagagggctggccacgacgaagtgttcacggtggcgcggaaaacagatttggaggaaatgcgaaattgggaggctctggtggatggtcagaggtgcgagctggtgcactaggtgcgtaataacctagcggagctcactggggcagcaatttatagactccatcggcggtggcatccaacttgaagaagcgatggcggccagagagaggggaaatgcactggcgcgggttatcatggctttcaccgtggcaaagcctccgacaatggacgggctccctactacggttcactgcaacgtggtaaagctcctaggcacgtggcacacggacggtaagcggccaacaccggcgaggagcatctcggtcggccgcagaccaagtgggtacggtgaactatctagtgaccgggtccgagccaatccgggcgccaagatcttttactcccctcggtta

SEQ ID NO: 136178 - DNA, 527 bp, Zea Mays
cggctctccaattttttcagccttcggtgttgcagccggctcttcattcttctgtgtaagagcaggtcctttggcttcagtagcagtagaggtctcaccaccaaattcaggcactgaggccggttcgatgaagcgtggtcggtgagtaaggaccttcacccttttcctctttggcgcagcctcacttagagcaaccgaagcatcaccttttccaaaagttgcgctttttctcttttgccctttcagcgggtagcggtaatcagggtacataaacccaatagcatcgaaaactctattcagcctcttcttcttccgccctccgaaggtcgcagatagcgcgttatcttctgtctttgaatatggtccaagcagttcgtcgcttgtagcttcgatgcacttcagccaatcatcatctggctcaataaacttaccctcgtatctgaaggtgtatttcaacctaaccagtccaccttcgtcaggcttgctgatagttttctttggcatttcccactgctctacaagcggcc

SEQ ID NO: 136179 - DNA, 484 bp, Zea Mays
gttctcaattatccacgctcggattggtaaaacggccactacgaggagcttcatgaacacatagagctgctaaaacaaggcttgaatcggacagggacttaccagagagggctggccacggagcgcagggctttacgttcgccggagacagagaaagggggaaatcggtgtcacgacggctctggttgaaattggggttggggattgaggctacagggccgtaagaagctgtgttttcattgtgtgcaatcaatttgggcgaagatggagagggcagtgcgaatttgacttcgactgagcttcactggtggagatgaaagcacctcgtcgtggcaccctactcaatttataggcacggtggcccaacagatgacccccacagatagtagcgcaagcgcatgcctaccacgtcggaaagagatacagtgagggagatggaggcatgggcgacaccgcggcaaaattcaatggtcacggtggccgc

SEQ ID NO: 136180 - DNA, 451 bp, Zea Mays
cccgcatgaacgtcaagtccctgcgccgagaggtcctttcggcggtcccaggggtcccgaaggctgctccacatcagcggtggaggagcaccactatctcctttggggcatccgactaccccgaaaacatggcaggggccattgtactgccgctcatcaccacccctgtcatcgccaacatgcggctgcaccatgttctgattgacggaggggccggcctcaacgtcatcagtcatgctgcattcaagcagctgcagatcccagggtcctggctgggaccctctcgcccattctctggagtgggcccacaaccggtgtatccccttgggagcatcgcactcccggtaacattcggggctgaggagaactttcgcacggagaacgtccagttcgacgtcgcggaggttaacctccccttcaatgccatcatcggtaggccgaccctgtatcg

SEQ ID NO: 136181 - DNA, 559 bp, Zea Mays
tcgccgccgacgtgagcgatcacggtgatcaccggagagaaccggaggacgcaaggtaggtggctggtattgttctgtttcttatttctttcgtaaaacccaagtctgcagttcacctccctttaacgatgcactcacgcaggccaacatgaccaggccgacacggccacccacacacacccacggcccacacggcccacgacacccagcaattcaacaaatgaaaaatactacttcctcccgtgtccactctcgacgcctgcatccatcacgcacgcaccaccgtgctgacatcttccccaccttcaagagttgattgcccccaatcaagtacttctggaaaacgagtcttgagcacatcaaagtcttcccaagtagtggcatcagatggcagacctgaccacaccacttggacctgaaccactggcttgttacccttcttcaccaagcgccgatctacaaactgcaccggcttgacctctactgcagacaagtccaccagctgtgaaatatcagagaaaacaggagtgtatttgggaatgaatggcttgagctgaga

SEQ ID NO: 136182 - DNA, 298 bp, Zea Mays
actatacacatgttcaagtaatttagctatccttgcaaaaaagaaacaaagcaaaactacaatagcttcttttgccgcataaatgtgtgttatctagaattaaactactggacccgcatgttgatcatcaataattctgtagtgccacaatacgatgggatgaaagaacatccatgctgcttgtaatataagacaagcaaataatgaaaaccatcgaaaaacgcaccattcgcctcacaataatgtggaaattgcataatgctacttacccatgtagtctgactcctcattgtgctgt

SEQ ID NO: 136183 - DNA, 401 bp, Zea Mays
ccactatataattcaccagttcaaactttgcaaaattcaacctaccaaatcacccccacacccataacctccattaaatctaccaaacaaattacacccagacataacataccatcaaaaccaatggttcaaatcattggataactcactctgtcttactcaatctagtagtcaatgttatttcaagcatctattatccctctcctcgtgaccctgtcaatcttgcctttcccttcccttcactcacgttgttgccgtcattgatgttggtacagaaaagcatgagccaaacactcaggagcgggaaaataggtggcataacaaaacagtaggctgagagctcaaatgctttgttaagcgtgtcctggatggctacatgaccgtggtacattataggggta

SEQ ID NO: 136184 - DNA, 378 bp, Zea Mays
tatcatcattcagccatctacgaaagtcaagttgggcattcctttccctagcaagctggactagaataaatttatcattgcacagttcatataaatctggttcagacacagctagaggaatctcattaagccaaggatcctcccaaaatctggttttatcaccagaacgagtgataattttccttccaataacataatgatctctaatattcaacagatcatgccagacctgagaatcaaacgatttgtgactaacattcatgatactgtcactgtgaatatattttttttcacaatttcttgccagatcccattttcatattcaagtttccaccaccatttgcacataaggcaaatattcatgactctcaaatcttt

SEQ ID NO: 136185 - DNA, 308 bp, Zea Mays
gggccgctttgagaggcgtaataccctacttcttgggatgggtctgtatgtgtggtgtgttacaagtggtgtcttccgaatggagaagggctaatgaaatgaaaatgaaggggtccccctaggccttatatacacgaccgcggggcactccctatgtacatgatgatcaaaatgtcatttggagggaatcaaagttccaatcgacatcacccaacttctgcagctattgtacccctataactacatcaaatccttccaagggaatcaccaagaatgaatcaaagatgcaatgatcctggatatagaac

SEQ ID NO: 136186 - DNA, 511 bp, Zea Mays
gtcctattggatggagataatagttcacaagatagaagattgtatcctcgattatcatgctcgggtagggattacaatgggtcgaggtcggatcgggtggagcaaaaactcgcccgaggtcacacatgtgaagtctatctacctaaacccgcctaggatcacacccgcggatgcaattccaaacccgaacatgtttggtttttaggtgggttttaggtcacccacaggtttttacccaacgtacatttttaaacaataattcaactataatcaattaagtactagcaataattgagttataactacgaattttaagcattctcacgtcgagctgtaacaaaacatttcatgaatcattagctaagttacttattcaaaataattattattgcatcttaatcatttttgtgcaaaacaatgaatcaaattttgggtcaagtgcaggtcgcccacaggttgaaatagaaacccacacccacacccgtgaaacttcaggtcgagtgcgggtgca

SEQ ID NO: 136187 - DNA, 448 bp, Zea Mays
gattcttgaaccaaagggctccttgttcatctgtcctgaggtccgggagttgttccttgcgagctttttccacaagtcttgctgtctctgagtctaggcgttgagctttgcatatgaggtcttctagcattggtttgacttcgagactgccgttgtttcccaaacatgcattcagttgagctgattccttcttccaatcttctaaaaagttggttccctttattccaaaaggttttcggctgagggtgtctgctaccacattggcctttctggggtggtaatgaatctcaaggtcataatctttgatcagttccaaccatcttcgttgacggagattgagatctggttgagtgaagatattcctcagactcttgtgatcggtgaagatgtgacatttgttcccaattaggtaatgcctccatatcttcaaagcatgctgaaagggaat

SEQ ID NO: 136188 - DNA, 655 bp, Zea Mays
gataaataaccatattcatgcatgcatgggatggatagaaagatcccaaagtcatcacgtaactacaactctattattttacgtcttatcttcagtcccttttttatttagttgatcaccgaaactgtttattatttattctatgataatttttcaacttctgctcaggaagtagaaaaatgtgaaaacttatcaaaagagcttagcatttgtcatgattcaatttctagccttagaagtgaaaatgctagcttagtttctaaggtcacgaaggacatgccttcatcatttcaataaataaatgtaaatgaagggcacattgtcggtaccctgaatcaggggtaccctcttctacagcatgaagacgctgtacacgtacgacgcctccagaccacacggagaacggcacccgaccccaccacatgggcaggtctaagggcaccacgtggcaaggaaagataatacatcccaggatgcatcattgggtccggacctccatagagggacaccagacccctgtacgtacaagttcggagctcccaagaaggcatgtcgggtccctcgggtaggccctaggtccctccaagtaaggtctgggccttggcaaggtcccgggacggggaggacctcagcatgagtaagggtccggttctgg

SEQ ID NO: 136189 - DNA, 654 bp, Zea Mays
gcaagattggtggaccgcaagccgggagcagcagccgtccccgtttctcagacaacccaccctagctgttcaagtagagtcaccatcagagatatcagcatcagagtcagcgtccacatcaacagcaattccagagacagtcccctcagaagcaacaaccgaagtaccgcaagcacagtcaactaggaggaagtcagtaccagaggcagagcagtgaggcaccttgccttcttgccccagcaaccaagcaacaccagcacaaggaggagaccgaggatgcttccattgtggagagcaaggtcactgggcgatgcaatgcctgaagaaagcagctcaacaatagtcagttttcaacaccccagcaagacaaggagcaccatagcaggcatcaggaggctgtggccaagcctacaactgtgggaaggcgaaccacttagaggccgaagcaatctaggatgcaccagatgtggcattaggtatgtttctagtcgaatcccatccaacaaaactacaaattgatactggtgccacacattattttgttgctacatcatgggtagaagcacataacatccctgtcgaaccaatgatttcgcctctaagggttaattcagttgggagaaaggttcagtcagataagatgtgccaaatcta

SEQ ID NO: 136190 - DNA, 363 bp, Zea Mays
tctcgaaccaatggtgctggtgtagcgttcgttgtggactgtggatctgtgatccatgggtcgttgtcatagattgcgtcgttaaagtggagatctaatctgggccaccggatctagatcggacggctctgagtccccggtacctcttcgcgttgccgagttgctaaagagcccttgtacattgtacgaattaacccgcagactaggggtagtgttaaggtattaaacttaagtcctaatattttcagaatggcccctgtgctctcggatttttatgtccgcagtccataatcgttggaggagtacaagatttaaaatagaaaatgatttctagaatgaaaacaattacataaacttggttaa

SEQ ID NO: 136191 - DNA, 968 bp, Zea Mays
aaactcggcatggagaacaggagctgggcgcgctagctcacagagggagaaggacgcgcggtcggccgaaggagcagaggagacgcgcggtggaagaaaggtccgagccaggggcgagccgcgtccagcagctagaagaagacggctgggtgagcgcgcgtggacaggagcgattgaaggagacgccaggaacaggataagagagaagctcagctgggcgcaggggagatagagcagggagacgcgcgtgcttaggccataggagatgagcggtggtggggataaggctgttggtgctccacagcaaagaaacagagaacgagatgagaaatatcaggggataaaaacagaagctaagtacgatggaatgaaagatccggctgaggatatttccaggaaaaataacgcgctaagaatatcccaggaagctgacatgatgagctctagcggcaaaaatctcgtcgtaggaaagtttctagcgtctaggagatgtacgtgacctgtgaacttgtatcggctgaagataatatcaacataaggtaaggctaaaagccttaggaggggatgacgtggggatattttagttttaggtttttttttctgtttttgtttgttttaatttccagaaatcgtaagtatctctaagtcctgatttttagagcggagcgagacgtaatcggaataaatcagaacagtatttcgaattgtattccaattgattcgaaatcaataatttcatccgtgtctgaacacctggttccacagccacggataatttaccagtgaattggagttcaattaaaatttctcggacgagctgtctcggtttttgatttagcgaactaaatcacgtaccaattacttgctattagtactaattattacagtcgtctggtttgtttcggacaggacgtaaatggactgaattaacggatttcgacttcggtattttaatttacgactaattt

SEQ ID NO: 136192 - DNA, 419 bp, Zea Mays
taccgaatagcatcataactgacctaggatccaatttcactagctctgaattctttgacttctgcgaacaatggagcatccagatcaaatatgcatcagtagcacacccaagagccaacagtcaggtagaaagggctaatggaatgatactggaggcactgaggaagaaagtcttcgacaagaatgaaaagttcgcaggaaaatggatcagagagttgccgtatgtggtttggagcttaagaactcaacctagttgagctctgcatggaaatactcctttcttcatggtctatggttcggaggcagtgctacctgctgatctcaggtttggggcaccaaggctagtcttcgaaaacatagctgaagcagaagctaccagactagaggatattgacgtattggaagaagagcgattgaat

SEQ ID NO: 136193 - DNA, 498 bp, Zea Mays
gcttatgtgggaagaaggagggggcctgcccttttatatctcaagggtaggaccttacactgggcttgtattctactagagagagatagaaagagaggaagagagacctgctccctgggtcgtgcgtagatatactctcggcatggtgtcgtcctttcctgcggctctggcttttgtagcgagtccattgttgacgtcttcataatgggttccacatatcagtctcaaagtgcggtcgtacggggcatggcttatcctatcgtcatgggcccttcgtcacatgccagcgtgcacatgcgcatgctcggtatggctcattgttccgaccttctgatgtacgggtcactgtatagaccctgttgcccattcggtgtgttgtgcacatatccagatgtggcttgttggtgacgcgtcccattgtagctgatgtggatcagtagcgctggacttagatctctgtctcgctgagttgctcgatagagaattggtcggccaaag

SEQ ID NO: 136194 - DNA, 935 bp, Zea Mays
ctcaagaggaaattccaagttctccgagctcagcagcaagatcgacactagagagctcgatccttcgggcttccacccaagggaccaagcttcaatagaccagctggacccactccatcacgttttagccagcagagtcagagctcctttcaggccccctcggtcgcaagcaaccaaccaccagcaaatgcctgttggcactgtggagaccccagtcacttcaagaataactacccccagttgaaggcaccaggacctacctactccaactcggtgaatggccccaagaatacctcggcacctacctccaaggcactcccctccaacagtcagtagagcaggacccagtatcagggcagagcatgagttaaccacgtcgatgctcaagaggcccagcaagctccgggagtagtgctcggtgagttccttgtcgaatttactcccgctactgtacttttttattcaggagcatcccattcatttatagccactagttttgtggaaaagcatggcatcccctctacacccctagaaatccctttggtcacccgaaccccggagtcagaccttctatgccagctcaaatgctcccaagtcagaattcttttaagtggggtagtgttcttggcagacttaaccgtcttgccatcccaagagattgatgtgatcctaggaatggattggctaactaaacacaagggcatcataagttgcgcaacaagaccgtccttctcactgaccgccaaggaaaagcagtttcttgtcaggcccaaccgcccgccaacgatccaatgatgtttaatctagcagtagaaaatatatccgtaatagaagaattcatggatgtatttccagaagagttgcctggaatgccgcctaaaagaggagtggagttctacatagatctcattcctggcactgcgcccatcgcaaag

SEQ ID NO: 136195 - DNA, 456 bp, Zea Mays
tgaatccacaacaacaagcacatctttgtcatgcctccgaaggagtcagcacctattggttctgttctatctcccatagactagaaccgaaatgaagaagcacttctccagcacgaaactaggagaggaaggtcatagacccccaccacaagacaatctcgaccaagaggtccagaatctccaagctatccaccaacaggtcgagaagtgcaaggagaaaatgcttcaagtctcttggcttcagaagtagatcgatgaagcatcagaacaattatgtcacatagcacaacaggttgaacaacccatagaaccacatcaccagagaaacctcctccacgaagagcacaactatgatgaccacatgttcgatggtaattctcctttggtgatagagttgcaagccacaccatggccaccattgtacaggccaccacatctactaatgtatgatggttt

SEQ ID NO: 136196 - DNA, 382 bp, Zea Mays
catgcactacaaagggagactggatcttcaatcacactcaagcaatacaactcgcagtggacgtaaggtattatgctctagcggcctgagccactctaaatctcgcaagatcttttgcttagcaatggtttagataaccaagaagcttctcagtttgtgtttggcaatacctctgttttcgcccgatcttttactgagcaacttctcacttttgttttcgccttggaactgcagcatgttactcgtgctaacaactcaacaatagatggactctccatgaggacatcaacttgggcactcgtgtcctagggcatcttcgaaagacgactactgagttcttccacccagcctactgaactgggtgaagagggttagactggca

SEQ ID NO: 136197 - DNA, 452 bp, Zea Mays
attgcctttcgttgcatttctgagtgcaacgtctgttctgtcaaataggacaggctgtggtgatcagtcttggtaatgaattcctggcgttgcaaatactgccgccagcgttccactgccataatcagtgcaagaaattctttctcatagatggacagattctgatgagctggtcctaaggctttgctaaggaaagctatgggttgatctcgttgcagtagtacagctccaatacccacctcacaagcatcggtttcgataataaactgttgtccaaaatctggtatggccagcacaggtgctcgaaccatggcttccttcagctgctggaaagccatagtggttgaatgtgtccactgaaattgtttcttgcggagtaagttggtaagtggtcgagcaatgataccgtaacctctaatgaactttctgtaatatccagtgagacccaaaaa

SEQ ID NO: 136198 - DNA, 522 bp, Zea Mays
tcggcaccgctagtgaggagactcgtatgcttattcaatcttccctcatggagagagtgcgtgcggctcagcagcaggatcgtttattgtaggaagctcgaaagagggttggcgatggtaaaccccaggagttctccatcgatgagaatgatttggttcgtttcaggggtcgcctttgtgtgcctcagaaatcagaggtgaagatggatatattgagagaagctcataaaacgccttacaccgttcaccctggcaaaacaaagatgtaccaagatctgaagcaaaacttctggtggaagcggatgaaggttgacgtttctaagtatgtggccgcctgtgaagtatgtcagcgcgtgaaggccgagcataagcggcctgcaggtttactgaagccattggaaatttcggagtggaaatgggagcatatcaccatggattttgtggtgggtttacctcgttctcctcggggcagagatgctatatgggtggtagtggatcgcttgactaagtctgcgcatttta

SEQ ID NO: 136199 - DNA, 658 bp, Zea Mays
gtgagatatggcaactgatgctcaatggattgaagccatcgtgatgctggcccagtaaaatgcatcttagacaccttgatccacacactagggtgtaccgaatacatagcaaagtaatcctcacaatgtgactgccacaatttaggattttcgccatcaaacccaagaaatggcatcttaggaagattgcaagagaccctgagtacgaatccaaagcagttcccccaaaaacatcatgtgtactggactaaaaattctgagggaaaaaactaggaccagtgttcataccattgtgcgggagtaagccgtgagtatagggatacccagggccttcctcccggcggtggtaagcatgacgatgtccgcgtggcgcgtcgacgttcatccgaggagcagtcggatgcgccatcggcggaatgtatggaaccgatgcatccggtcgacgcggaggagatgcgtagtgcggacgcccccagggttcggacatacgcgcgacctccgcacgaagagactccacgttggcttgggcgacgcccacagagtggtcgacgtatggcctccaagactctagaaccgccttagccgattcaaggttggccacacgcccggataaggcctcatcgacgtcatcaatgcgctcccacgtcagagattggaa

SEQ ID NO: 136200 - DNA, 340 bp, Zea Mays
atacatccgcaaacctcctcacgggggctagaaaataacatacaaaaagaactcatcctgtgaaggaaaaaacaacacaccaccctagggagcagctacagaggcaaccagagaacataggcccttcgccccagctgcctcccaacgacttctctcctcatctgcacaagcaaggatataggtgaggcatggagacaatccatcgaagacatatttgttctgatggatccaaatagtccaagcacccatgatgataagggagttaagaccttttctggtgacacctgagaccacctctgaaacctcctcccaccaattcaagaaggaggtgaccgccggc

SEQ ID NO: 136201 - DNA, 885 bp, Zea Mays
caacctcacgcacacctacggttccttctctcccattctttcccttcgttctctcgtctaccctcagaccggccatggtcctcggtcactagcagcaacccgccggtgatacgccagcgccgcgaagcacaacccttaatccggactaccatgttcgcggaatagaagaaccgagagaaaatctaacaaaaacattttaagcgagctatcgctagagcaaaagggaaagttttgtacatggcgaggaacaaaactgagcttagctagactaaagggaaagtcatactcaccacagcgagctaccgctagagaaagggtatagctccatggcgcccacgacctcgttcttctgctcgacgcggtggcggaaatcaccacaacaggcatgatgctcacggctgtgcttgggatagatgagggtaggttcctggtacacggtcgacttatatggaggtagggaagcatgccctaggcggtggacgcgcggactccccagagtttgttgcggatatttcattttcaatgccgaagaggaaactaattccccgagctacgcggagaagataacgctgacaggaggccccacgcgccggtctccgcatgacgaggacgtgtgagcaggcgtgctacagccgcatgcaccagctgccagaggagttggggtcacggaagaaacgatggtgtttggtggagcagagggaaatccgatctggtgagggttctgctgattggggtcgagctggaacggctgaatccgtaggagctcgacggggaagaaggggagggcgctggcttgggcggcgtgtggatcaggggcacagcgcagccactagggtgccatggctgggcggtgaggcgccactggagaagcggagggaggagcag

SEQ ID NO: 136202 - DNA, 546 bp, Zea Mays
acactgtctatagataaaatcattaaaacagcgtcatgatctgcggagaaggggcatgagaatgatcagaaatgagagattagactgatccacatttaatacttgagagtgggttatagaagataacaagatgacggggtagatctcgatgaatgatccagagattcggatgataaagtcacaacatgattcacaagtaaaagattaccagatccaggtgaaaagagaggtcatcaacccagatggcttctaggttgagcataggagaatttaatgagaattttggacaaggcttccaagaagaatttgggactggatattgttttgtgcaacagacaccaaccaaagctttatttttttaacataaacaagttcacaaggaagctttaggttgaactagtggtctagctatggggttctataagctgtgcaggtgtaaattcaagggtaaacacacgagggctagaaacaccaaaacaagcacatgataatttttttaaaggttttacttgctaaccacaaggttgtttggaggtggggtctttt

SEQ ID NO: 136203 - DNA, 414 bp, Zea Mays
tcgtctcctctccagcgaaacaaaccaattcatcatcattttctccaaaatatcctagtttcttcattaaaactaaatcctctgccttaactgtgaatctcccaaattcaatatggctgggcttaatcggacataggatactatcatcatcctaactttcattttcacttttagcttcaaccatggtctgttcagcttcagcattatcaacatctttggcaatagtttcttcctgcacaactaacccagaatgcctcacttctgagatgggagctatctcagaggttccatcctcatctccctcgcgtgtcacctaagcagtagaccttactctggccatttcggtgttcagaccctagcagatgaagttgtacttgagcgatgaagcgtttgtccaaagtacaaaccagcaag

SEQ ID NO: 136204 - DNA, 322 bp, Zea Mays
ctcaccaacatttacgccccatgccccctcacagaagagaggaatttctctcttggttctctaatcttgaaattgatgatgacaaactatggattttccttggcgaatttaatatgattagatctccagaaaaccacaataaaccaggaggtgaccctctcagaatgctgaatttcaatttggcaatcagtcagctggggctccaagaaattcctctcaaaagacaagcttacacttggtcaaatatgcaacgtcatcctttactcgaaaagttggattggtgttttgtttcgcaggcatggtatgtcaacttccctgttac

SEQ ID NO: 136205 - DNA, 521 bp, Zea Mays
ggaatggattggttaaccaaacacaagggcatcataagttgcgcaaataagaccgttcttctcactgaccaccaaggaaagacagtttcatgtcaggctcagccacctgcccaagatccaatggtgtttaacctagcagcaaaaagcatatctgtagtagaagaattcatggatgtattcccagaagaattgttaggaatgccgctagaaagagaagtggagttctatattgatctaattcccggcaccgcaccaatcgcaaagagaccttaccgcatggctcccaccgaattagcagaattaaaactccagatcgtagagcttcaacagaaagggtacattagtcccagctcatctccttggggagcaccagtccttttcgtcaccaaaaatgatggaagtatgaggatgtgtattgattaccaatccttgaatgaggttacaatcaaaaacaagtacccactacctcggatcgatgacctcttcgaccagcttcaaggggccaagtatttctccaagat

SEQ ID NO: 136206 - DNA, 562 bp, Zea Mays
gttcctagcttaattggcggggtcgaggagcatcagggacacacaagtacactaaaacgaaagagcagagggtatgagcggacctgagatgagctagccacggcgaggtttctttcacagtggcgcaaagcagatttgggggaaatttggaattggcgagctctggtgaacaattgagggcacggcttggtggcttggtgcttgactaccctacggactcgtcggtgtgctcaatttatagtgtgcttgagcaatggtgttcaatttggacgaaatgcgctggcggtcgagaggggaactgagtcactagcgcggtgattcgtggccttcaccgtggcagacccaccggcgacgagccaagactaaggagcggtttatggtgactcaccgcgatgtggtaaagcgtcgaggcacgtagcctggccggataacggcgaacgccggtgatgccagcgcgaccgtccgcggcggggcacgatggccggagtgaacaggagctcaagttcatccacacgacgatctttaccaccctgagccacatccggtactttgctgagcccga

SEQ ID NO: 136207 - DNA, 894 bp, Zea Mays
tacgatcgcgtccttgcttcgcttacatgagggaccagcgcgccaggtacgtcatcctcatcgaagtccatcgctgggcgattacagcaaacccaggatccgcgcggccggttgtgatcggctggttattatccgattcgcctcgcagggtgtatatataagccctgaaccacctcctcatccatcaaatcgaaccatcgcgacgacccaattggagagcaccttcggtgaggatcagagagggagaaagggagaaggatagccgtcgtcgacatcattcgcctccgccaccatccagaatccccaatgtgactgaaggcgttctgtcaggtgtatggtgcgtgctcggggaagcagtggagtgtgcgggaccacagagccatggcaattcgtcgccggtgacgggagcgccactgcggaacgcacttctcgatgggcggaggacgacgcgatgtaatcctcggtaagagcacccatatcgatttcgccttagcacctgcatcatttatcacctagttgactttgggaatcgggcaccacagccccgaagcgtgggagctgtgtggagtgttgatccgagcacatgtgactgttattagacgtagaatcacccttcgcacgtttcaatccgggtcactggatcagatcgggtggttctgatcgaatcccacttcattaaatcgtggttgttcatcctcgatcctagggcggtcatcgcgtaccggttcaagctgagaaacgtttaatcgatgttgtcgattcagatcgaatgacgctgatatacctataccccttcgaccgcatacacttacgaaagagtccctgatctatttttagaataatccacagttcagtgtagtattagattattgaatctaagtcctaacaatttgc

SEQ ID NO: 136208 - DNA, 569 bp, Zea Mays
gaccaactccacaaggctataagaacgtgagccaggcgccacaaacggaaaccaagagagagagaaacaagaagcaagctcgaacttcaccacggatcggagcagggaaagagaatccaattccgccgccatggaccttcttgtctatcggcattgaagctccgttagccactcatggactcccctggacgctcgggcagaggttcgcaccgtcaccaatccaactcggtggccggaacctagacaattcctcgtcggacttcatggggcgctgctgaaccgccggtcgccgtggccgacccccgtaacaacgccatcgccggtgagaaacccctctgtcgagctcgccatgaaccgtagggtgtttctaccatgtagtgttggggaggggcactttcacgcgtggggattcatacccaccggcggaccgcgccgccatggggcgtggtgttcatcatgtagggtatacgggtggagaagatgggtccgtagccatcaatcggctatcggatggccaggattaaatcatcacttaccccttcgtgccagaaaatcgtgaccatcggatc

SEQ ID NO: 136209 - DNA, 303 bp, Zea Mays
accgcttcgttgtgggatctgggccgtctattccagatcgggcggatccaacagggcctcggctacttaaaatcggggtcgtagatctgttgatgagcgctcgagattgagtgtaggcgtggccgtttctgggagcgtaggatcgcgatccgacgattgtgagcgggatatcaagtcataagaccatagatctaatcctagcggccaggtttggatcggacggtcagattcaacccgtaccccttcgcgatggtcatttttctaaagagtcctcggaaaataagaaaatagaacccgccgtcc

SEQ ID NO: 136210 - DNA, 318 bp, Zea Mays
cttatccctagcagagggaatccgaccaagtgatgactagctgtgtttgtgctttggtgtggagtctgtgtgtgaagccacgtaaccaccatactcatgcagctgttgatacctcaagacccctcctcagcgtgattccggacatagtcattgcatgttcctttatccctgcgttcaagtgcgtggtcagagaaccttgctgccttcaagctctaagcctgtgttcgccgagtgcttgacaaaattgtctgtccacgctggtgtcaaaccctccacagcagcagtttggcaccgagcttcatcacacgcactcgtctc

SEQ ID NO: 136211 - DNA, 476 bp, Zea Mays
tggcaaggccaatgttgtggcagatgccttaagcaggaaggcccagtgcaattgtaagaatatggatgcaagagtcaccaccctatgtgatgagtcatgcaaactaaacctagaagttgtttcctcgggtgctttacattatatctcggtggagcccacattacaagagcaaatagtcagggcacagattgaagacaagggtgttcaggtcattaaggaaatggtcaagcagaaagcagaaaaatacaaatgcttccgtcaggacagcaaaggaatcctatggtttggagatcaattggttgttcccaagaaccctgagctcagaaagaagatatttgatgaatctcacctttcaaaattctccatacacccgggcagcaataagatgtatcatgatctcagatccttatactggtggaccagaatgaagagggaaatagccaagtatatatccgaatgtgacacctgccagagaa

SEQ ID NO: 136212 - DNA, 917 bp, Zea Mays
ctcctctggagagcgatccacgtgtcatgcagttagctaccgtgattgtccgattcatgtggaggacgatggcgctattagagcagctccaagagcttctatataaatcctatctagatataacgtttagagagcactttataacatagatagcttcctacaaggcttggctaccaacagactatgtaaacgaagggttgactcagtttttttcaggtttgaatatgcatgacgactttttccattgcacactccatcgctgcatgtttgagtgccagactgccaggactgtgtgcatggtcgatctgatctgcatgacgatagtccatgctaggaatcagaaagccaatctccaccgtcgcgccttggtgtactaggatgttctgttgccgctcaacactggaccatcaacctgaagtattggacttcaacaacctaaagaatcggacttcaacaacctggagactagttcgtagatcacatctttgtttgttgtaggggttaagtgtgtgcatgatttgggctatctaggtgactaggtcatacatgccaaacggggagtggatcagcctatcgcctgagttgtttaggaaaaaagttctgtctttaattagaattcagacgactaggcttgcttcgtaagtttctttcgaccaattaatttaggactagggaggactcgacacctacaaactgaacccatcgtcgggaggacttgacgcctgcaacctgaagattgccgcactattgcgacagctaggtggtgtacggtgttatcgtgaatcggacgtctggaagctaaaaattaccactccagtaatagctgccgtgtatacacaaggtgatgcgtcacgatgcccgatcttcacgacgtaggatcaatcttcagataactagcttcaaagaagccaagataa

SEQ ID NO: 136213 - DNA, 477 bp, Zea Mays
gctttagtaggtgaaatattaatctgcttagctaataaatcccccaaagtaacctgatttgtaaataactgccttgtctactattctcttaccatatgtatctaactcagatggtcaattccaggcggggtggtggaattgatttgcctcctaatcgacatactcggtggatatatagacaaccccagccatagcttgcagagatgaatcctcctaatcctctaccaggaagagttgacccactggttgctgctcagatgaatatgatgcagcaaatggcggacaccatggtagatatgcgtgcacagatgcagcaagaacgccaggagatgcgtcaagaaagataagagatacgacaggagttgcgccaggagcgagaggagatacgccaggaaaggagggcgcaacaacagcagctgcaacagcaaatgcaacaacaacagcaacaacaacaagtaccactgcctccacctccac

SEQ ID NO: 136214 - DNA, 367 bp, Zea Mays
ggatggcccaagtcactgcttaaccgaagaagtctagcacccgtcgtcgctcggacagttggcgggggtgcctgcaccattcatcgaaaaggtagcatgagagtgaactcttcctttgtaataggatagaatttacctgtgatctagccggtgaggtccaccctcataaactcggtctctggaatctatcgcatagttattttgtacccgatggggtctgccctcataaacacgatctctggcatacatcgcctaactaatatgtatccagttataaaggaagaatttgctctccgttcaatccttttcttgctttagtttacatatattgtttactctaacccccacgtggtttctaacttctgtt

SEQ ID NO: 136215 - DNA, 507 bp, Zea Mays
acacaccttagtgcacaaattcacataacaaacgctaataaacaacgccgcacctacgcacaattccaacccgtcgcgagcgacaactctccccatcaccaccaaattgcagcggcgctgcttgataatttcataactttaaaattataacaacagtgatatcaatcaaaaactctggaagcttctacataaaattccccaccagttttgcatacaatttataattaaattccaacatctaattagcccaacacagtccacaagataaaccctgcaatctgtttttggaccgcaacctacccggattcaaacagcgatatctaccaaaatataactccgaatcgagcacataagtactcgttggaaaggtatgacaaagctctacatgattatcatactgattatcaccaattacccacgaaaaatccccagaaactatcaatactactgctgttcgcccacctgcaaatctgttttttggacagcaacatacccggattcaaacag

SEQ ID NO: 136216 - DNA, 450 bp, Zea Mays
gtggctgggcaagcgcgctgggcgggggtgctggcacggctgggccatgcccgcgaccaaggagaaggggaggaggggcgagtgagcgcaggaactcggacagcaaagatagagtacaaacagagcgagctccaacggacgatggggcgccaaagcggcttcgaaaggtggacgagggcgcgcatctggcgattactggggcgagggacgagacaacgaccgctggggacttgggaaatgaaggagagaagagaaggggaagtgtagatgctcggataaggcagtgtggatgcgtacgtcgggttcctcagcgtcgtggacgagatcgtggcgtcggttccgtcttccacgcgcgcacgaagagcgggggtgtggcggcggctgagcgtgtgcgacgcgcaactgggcgagcgacggcgcgaggcagcggctgcacgcgctcggcgaggc

SEQ ID NO: 136217 - DNA, 976 bp, Zea Mays
cgcgtacagattaacaacacaatctggcgaagacctggaacattcctggaatatagacaatcttcgcaaattttttgtttgaatcctcagggccatcacgcccttgtaattcacttaacattattattccggcccgcactcttttcctcctagggggtgaggtttttaatgaggcggtgccatgtaatatacaagcaaaaatcccccgcaaaaaactaagccaatgtcgaaaaagaccgcatcgacggtcttcggcattcgaccacaccgaagtcaccgcgaggggcagcgctgactaccctcgcgtgcgacactccgcgcaaaagtcgcctaagggtgctttcttggactctccatgcaaaagtcgcctacgggtgcagccggaatagcacaataagtgcgcaaaatcgaagtcttctccaaaagatcccccgtgcaaaagtcgcctacgggtgcagccgggctagcataacaagcgcgcaaaatcgaaatattttccaaaaggttcggatcaacgaaggctcgcagcttcatataagttacggttacatacatacagcgagggcatcacactttacattggctcaaccttcgtgatgatacccatctccctgtaattgaatagcattatcctcaactcctcaccctcaaaaagataccgcaactccccctcacctacactcgccccaaccggcgaggacaacaattcccgcttgctagccccgtccacatgaagacgaccaccctccacctcactcactctccgcttcgccaccgccctttgccgcctacgcctagcactcggaccaggaagaacttcagcatccatcacacgcggagaagcctccgtcgcagccacatccaaggccgcaaaataattcaagtcctcatccgaagactcttccgtccacacaaccgaactcccagaatcatcagactcaaaaaacatagacacggaatcatctgaatcattttt

SEQ ID NO: 136218 - DNA, 412 bp, Zea Mays
acccgcgggtacggtcgcgagcggatataggtagcaaccgcggatatggttgcggacggatatttgcaatatccgatccgaatccgatccgttgccatccctattctcgtgtcgacgcgtgcccactacgagccgtgaggattagtgtggatatcttcgtccctgtgagttcttccttccccttcgcttctccgctcccctcctagttccaacgagatccccgtttccctccccttgtaacgttgctgacgcgcgctcctagttctctgttcccctcctagttccggcgagatccccatttccctcgtgtattcacagttatgtgtgtgacgtgtgcagtgcatttcgctggctcctccatggattcttttggccgtggactccgaccccgacgcctacattggtgaatctg

SEQ ID NO: 136219 - DNA, 1987 bp, Zea Mays
gggatgcacactaccatactactactagcacctgtagttctgaacttctgtgaggcatgccgcatcgaagtcgttttttcctcctctgattcgatccatactactccgcttcgacggtcggtctacaaggcattaaggaacaacagaaacaaagaagaatcagatgaaccggtaagaaacacacagataaagactatttgaacgaccaatggaatcagtttagcaaaacgaggagctctggcaaaataaaggggaggtagctacaatctttgatgcctgaagacagagaaagagagagaagcgtggtccaaaaatgctttaactgaccagttctgcttttcttggcggcgcctgcctcccgctctgagcagctggtcctccattcgccatcatcatgcccgaccctccctgaatcgctaataaagcaaatttagcccaaacaaacaaaaatgcagcagatgcaaaggaaaagccagttgtttgagtccgtttgagcagagctactgtctcggaaatgaaagcgaaaacttagacaggtaaacacgccatgagacgagaaagatacaaaaattacaagcagcaacagacgaacatctgtatgtatcacttgggcgaaaaggtgtctgattgggacattctaaggaccaataccaggaacgaagactagaggcagccgagtcggattgagacatgttcgctggtaatgtatccgtctctgaatgaaagtatgaaacctaagaactagaccggacaatctggtaatgcgagagacgtcaagcgcaggatgacgaaaattccgttcagcaagcattactcggtgtagcgttaccttgggcggcggcgcaatccgcacggaaatcatgtggcttagtcttgatgttgaaccacttcctcacgagggatttcgaccaggagagctgcgcatgaatgtgaacaaagcaaaaaaaaaccacaaggctcgatcaaccaaaaaacacagcaaacggagcaacgaggcatatcccatactgaacggaaagcaagcaagcaaataccttgctcttcttgttgctctcttccctcattgtctcatacctccctgaaaccacgcactacagcagtgggagaactggcgctccctcccttcctcagggcacctcgttggaggaaagaaagctcaaatcccgcacaaattccgcctctcagagcaagattctggccccgggagccgcgaatcgactgctcgagtattatagcagcaaaatggttcggcttgcccacaacaaaccagccgcgaccgcgacggggatcaagagtccatctttccttcctgtgagtctgtgacctcctccgcccctaaatcttcctcctctccttgtaacggggaggaacgagtgccccgcctcgattggcttctctgcagcagcacaggctagtagcactgtaggggtatggcaagacagcactttgcttctgaaattctgaacacactctcctcctcctcttccgctcccgcttccgcaggcctcctccgtctggctctaggggttaaggctagcggtacagccagacgccgaaaacaggtttgtacagaacaaggactaggaggagtagagtagagtagagtgtagtagaggtcagcaatctgcactcagcagtgcggtgtatggtggtgtgtgcaatgcgaaagcgagatgcaaatcgagcctatctctctctgtctctgttcccccttcctcttttatcacccaccctgcgtgcccatctctgtctccgtgctcgggttctctaatctaatcaccccccgctgtcagcctgcccgctcaaatccgagccgctgcttagcttaatactaatgagtacatgggcagtaatgtaaagctggtacgagctggggcttgcgaggaaggaaaggtgcgtggcgtgaagcagcagcgagagaaaatggcaacgccgagaatgaaaaaaaaacattatttaaaaaaaatctggaaagctaaaatgatgg

SEQ ID NO: 136220 - DNA, 376 bp, Zea Mays
ttcctctccgatgcatcctttcttcgtgagtctgctcatagtggtatgcatcagcaccactccacctcgcgttcactcgctcccttgcctcccttcggtgttcttgtttcccccttcttcttcgaccacgtcctcaccctctccgcgtctgactgacggtggctctccgcttcgccctcgatctggctccttatttttctcatctccttcgctcatatccttgtgtcctcctcctcttcgcatccatcctacattcaactgacggtgtcttgctgctccccgctgatctggcagcgccttggccaccatgccattgaaccattcgcaccatcgccacaatggtgcatcttacattgtctcctccaacccattcccc

SEQ ID NO: 136221 - DNA, 318 bp, Zea Mays
cgtatgggtgcatgaatgtatatatgacatagatgtgcaaatattatgaattgtactgttttttccccaaattttgcgtgggtgcggctgtacccacaacgttgcatatagttccgtccaatttcattcatatgggctagagactctggtatctggaaaacaaatcttgcaaatctacaaaaggcacgcattatcacttagcactatactgtatatgactgcaacatgtagagttgtagacccacaccacgaacgaagaaacaaagtaccaggatgccctctaaaccagctataaataccgcagcccttcacttgttc

SEQ ID NO: 136222 - DNA, 683 bp, Zea Mays
cacatcaactttatagctctatgaaaggagaacaactttgcttaagagtgtaagcatagttattgagaagaaattagagataagtaagcccaaagttggactttcaggctgtttgaagtctgaaattggattaccagtggctttgagtcatctttggagctctacagattatgatcttcaaagaatctgcccgggattactataacaaagttgtagagctattaaagaggaatagctttgctgcagatattaagtcttggtaccatatgaaaattggagttactttgatcaaatgatgggctgtcagacgcagtttttctaaatcccatggtacagtgcctgaacggatcagagcaaccgcgcatctcaccaccgacgaccgccgccgcgattcgtgccaccgccattgcgattcacgccgccgatgacccgataaggctgccatgtaatagctatgcgcctggagatgactctggtgactcaccgtcgtatcccccttgctttgcggcctgagcagataagctcgccggtgacagccgtcgcacggcttggcgccacgtgccctggaacctccatcggatcgccgtgaaccgctgtaaccctctgtccatcgccggagtgacagccacggtgaccggacactaagcacttgcgccagtaacctttcccctcctccgaccgtc

SEQ ID NO: 136223 - DNA, 535 bp, Zea Mays
gggtggtcaagggctggtttcgtcttcaatccaacagtagcccccaagggatgggttcaactacatcagccaatcttgaagtccttttgaggatacgaacaaatgatgcccttgatcacaagttgaaccactcatcagggcatttgaaaagtaaccttggggcacgacgtgatgtgactagcgacattttagtttgtgtcgtttcgagtttttatgtgggttggggcctataaatgttgtcgtccgtgggacactaggattacttttggcctcaatcttcatcgctttctctcaatgtgcgccgcgcgtcggtgctgtgttgtgtctatgctcgaccaccgttgatcggttgctccattatgaatctagcacgcatgaagcaaattgcttgctgtcaccactagtacatcatgtcgtcttcttcctcgttgtcatctaacggggttgtgcgaacacaaggttgacttatcccttatggtttgagttgatgatgagtgattgttgttatgggtagtactttggtgtgagtcttgga

SEQ ID NO: 136224 - DNA, 514 bp, Zea Mays
cgtcgtcttcgacgaaggcgcgcaatggtgctggaccggagaacaggccagcgaggaggacttcaacatccaggaggctgttgctgtgtcgccccaggggatcactgcgacctctacgtctgcaggcatgacgtcaagtccagcatcatctgcgtcgccaccagaaggttttgatgagaacctggacgccgatcatgaagaggatgcaccactcaggttcaagaggatgaacaacctgctgggctctgcatcagcacctgggctggcacgaagagagctaaaggagcatctttttttgaccagcgacacggagccgtcgtgtttcgatgaggcacagaagcacgagtgctggcgccacgcaatgctcgacgaaatgacggcgatcgaggcgaacggtacatgggagctcgtcgaccctctgccgcgttcccgacccattgggctcaaatgggtatacaaggcgaagaaggacgcagccgggttcatctccaagtataaagcccggctggtcgcg

SEQ ID NO: 136225 - DNA, 374 bp, Zea Mays
gtgggaagggtatctgatggatgggtatgggcatggtagatgtgggtggcagcaaggctgaggttggcggtggaaggttggttgaggtggatcggagtggagcggctgtggtgatgatcggcggtgatggtatgggtggcgcggcggggtttgataagggaggtatcccgccataacctggcatgccatatgggatggaagtaggactggtggacgctaggggtggtggtggtgttggcggcctactgatcatttgagtgatggcggtggtgagatcggcaagggccttcgtcatggtgtcgatcttttgctctagcgctgtgttggcggaattggtcgcggcagcagatgcgacatcgctggtgttgttgtcg

SEQ ID NO: 136226 - DNA, 424 bp, Zea Mays
ggtggttctgccacactctccttcctggattgttactcaggatatcaccagtttagtctagcaaaggaggacctggagaaaacgacattcattacgccttttgaggccttctgttgtacgtctatgtcgtttggccacaaaaacactagagcgatttacgggctatccaaacgtgcttagccaaccattggggcaagcgggtggaagcctatgttgatgatatagtgatcagaagcacagacccggataacttcattgacagcctctagcaggtcttcatcagcctgaggcgctaccactagaaacttaacccagataagtgtgtgtttgggggtaccagcagggaagctactcgggttcatcgttagtcaccgaggaatcgaggccaaccaggagaaaattaaagccatcttaaggatggaac

SEQ ID NO: 136227 - DNA, 569 bp, Zea Mays
ctttttgcaaatagcgctggccgaaggggtacgggggtattctggccgttggatctgaaacgaggcgcccagattaaatcgcccatagtggcgaagcggtacgctaaactgaccatcggatcaagatcctagggtcctgattttatgttagcccgatctgccctgaaccatcggatagaagatcaatggctagggacctatctactgcgcccaccacaattaaccgttgatcaacagatcaatggacaccgcgcgatttcttctcctcctacccaagcagcgccgccgccgcaatggctacacggcggaggacacggccgagatccaatcggccatccccgagcacctctgtcaaattaaacggggctacacgaagttaatcaaacagtgaggaggatgaggtagcacataccgacgattgcgatgtgatgaactccacccacggagctgcacggacccacggccaagctgcgcgatcggcgagaaattcacctggcttcactgtttgcagtggaggtagcccgacgcactattggcttcactggcgcttgaatcccaccgacgacgag

SEQ ID NO: 136228 - DNA, 354 bp, Zea Mays
ccgtctacatgtatcatgtaaaatcattttttgttgtgtcatattttttttataatgaaaacaaaaaatgttccagccttttgtagtttcctacatacggcattacatattgaaaattaataaaacatgcatcattaaaaaataacatccttgacaagaacttgttctcgaatcaagcgtcctttaatctggcattagaactccaaccatgttttgcaaggatctcctttgccaccatctctaaggattgacataccacaagaatctcttggtgagcttcttgtttctgcaataatctccagagtctgagccaatgaaccttatcataaccatgttgtgtcatatctatattga

SEQ ID NO: 136229 - DNA, 715 bp, Zea Mays
gtcacgaggatccactctttatagaccagtctatcttgagctggctcccgtgcagcatgagggtccgccaaagacctttactcgtgttttaagctctcctagcttctacacgaggatccgacctctatacgtcaatttcatcttgtatgcacactagtgaaactagctagtaacaccctaaaattctagctagtaacaccctaaaattcgcttccactctaatttgaactcaggacctaaaaagtgttactcagaccatctaataaactcagttagagatcctttcgcttgataagtacatatcaaccaaaaattaattgcatacatatattaccagagtaagcgaatcttagaaaaattattagaagagtgataggtcgatcgtttttttacacaaaccgtaaggacttcgtaacatttttgaggaaaaaattaacatcgtacattcatataccatttgaatttaatcatgagaaaacgatatacctctaaggagataaccttgtacacatgcaacagctattctagcaaagaacagagtattgcatgcttgcacacttcagcaaccataacagcacgtgattatcatgaatgctcacagtcacagctagcttggaggaacacataccaattgagcgcgcgtgtccatctaaaaatggtggccttgcttgataagttggctgacaacaatgccacggccaatgcttaaatcccc

SEQ ID NO: 136230 - DNA, 271 bp, Zea Mays
aacaaaagagccaaaaggatgtgtccatgttatgggtttaggacctattcaagatattggcactccaagattgaagtcttatacgacaacaagactataaatggagattcctgctcgtacaaaggttcaaagtgagaaggttgctctagaacagcgtgtacttgaggtgcagactcaaattaagcaaaaggcacaacaataccaggcaagtgaagagcacatgtcatagcacgactctatttttaaaactagttacattcatattataaag

SEQ ID NO: 136231 - DNA, 366 bp, Zea Mays
gttgcccccgcggacatctcgcaaaggtaggcgaagacgaccgcctgaaggatgaagcaaggcgtgaagtgctgagattggaggtcgagctcctccagcagcagcacgaagaaggacgagatcggtagcgctaacccgctggggaagttggaggcgaagagcacgaactccccggcagcgagatcaccaaggggaggggcgccgacatggatccttctggcaaacgctggcgcaccccatccgagcaggttgcgcaccaagttgagtgccacctcggactggaagcactcgggagggtctagcaaggccatggcagctacgacggcagaagagcgcggagagctcggtggcgaatgggtgcagcaa

SEQ ID NO: 136232 - DNA, 362 bp, Zea Mays
ctttcatgtttgtccaattataacacatactttttttatactaggtggcagatgctgacaatgatgcgaaaacgagcagcgaggctaaaggtttggctaataacgaacttggagagtatgaatttatagttgcaatagtcatttggtatgaggtactatttgttgtcaatatagtaagcaagcacttgcaagccaaagatatgctcattgatgatgctattgataaagtgcaagggttgatttctttcttcaaaaattatagggaaattggtttcttagaagcattacagacagccaaagacattgcacatgagatggatattgacacatcttttcgtaaaagacgggagattaaaagaaag

SEQ ID NO: 136233 - DNA, 283 bp, Zea Mays
cattgttgtaccggctgagccgaaaagtaagaaaataaagattctgacccatcggcctcgatacattgaaccagccatactacctgaacaagctgctccaattgcacagagcattgaagagccaactgtagtgccaaagatgcctacagtcgggcccgccgaagctgaagatgataaggctgaagagccacaagcggaaaatttgataaaaaagtcagaaatcttgaaccctccaacagaggcaaaactgcctaagattcaaaaggcttctgccacaactccc

SEQ ID NO: 136234 - DNA, 459 bp, Zea Mays
cgacaacagaggagaaggggcataggagggacaacttgaggcagataagcatcggaggccaacgaggtcgtgcagagaacgttaggctctagactctggaaggatggctgacggccaaggaggaggtggcgacgtcgtgagcacagagacagcgggaggcgacgacaaaacaagtgggtgagcgcaaaaaggatcggacgacacctatatgcagcagtagaaaccctaatgggccattggatgccatcccattagcaccttgtagcctagctgtgagatcccactcctagtcgcccatagtgcctggtcgcccgattagtcgtgattatgtgacgattaatcggatggctagacgactagacctcctagtcacgtcactacccctaatcgggcataatagaacgacaaggtcgattaattgcgactggtcgcatgacttgaaatcattgcatgaaaaca

SEQ ID NO: 136235 - DNA, 542 bp, Zea Mays
attgaatctatttccataataagcatatttagagataaacattttgataatatttttctacaaatacagttaaatctaagagagtttgactggcacaaatactatgcccacttatttcagaacggatgaaacaaaacaagattaaaaacctttttattaaatacacgaatacgtgtatacgagaaatattctccatcacaccaaacctccgcataaaacagctagtactgctacactggtcaagggagatttgaagaaatcactgataaatgcaaaaaaaatacgttacgaacttacgattataccttagctgcggagatgccacaaataaacaccgtaaatcgcggtgattattatgccataaaccgcgccactccacacatatcggaaggccccaaagcccgtgggccgagccgagcgtgacggaagcagcacgcaggaccaattttgaaaaggggctgcaagacgcaagacgaccgttggaagagccgcctcttcgcctccgcttaaaagcctcctcgcctcgtcttccaaacccgaga

SEQ ID NO: 136236 - DNA, 596 bp, Zea Mays
ggctcgttgattctcctgggcatgcagtgttctcggcgcgggtggccggatcttggccggaaatgggaatcccgccagacccacgctccgcctcgtccagcttcgattacgctgcgattcatggtgagttttacctcttggcgttcccggtaattagcgcattacaaagtacttagcggctcgatgtttgggtgctgggggaatctggcgtagttcgccggagctagcgtcgtcgggtgtgtctctcggctggggaaggagaaccttgtgagccattggatccgggatggagggtagagattagatgggcgacaacggttcgattacggcgtgcgtggatcgctggatcgtgggccgacggccatgatcggatccctagtgtttaaaataggcaccgttggatcttgatccgacgacaggtggcgcgtaccggttcgtcgtagctggcttttaatctgaagcatccgtttcctatcctgcggccaaggatccaccataccctttcgtcatgggcgctttacacaagagaccctgcgaaatataagaatcaacccgccatcctcatctagggcgctctgtgtcttagggatgttttt

SEQ ID NO: 136237 - DNA, 516 bp, Zea Mays
agtgagatctattgctcgattgagggtagttgctatagcagaattgtagctggtatgaagggctacaagtttgctatagatgtataggcaagttgttgcacaaaaattcgtgctttaggcactgcaatctggcctgtcggtcactctgaatcaaggctttgatggtacagtaaccagatcagatcgccaggtcagttaactcaccgccggcgaccgtgcgcccggattcgcacccgccgcggtgattcgtgctcggcgtggttggataacgcagagggagtaagaaatatcacccagtggatgaactctggccgccgtgtccgcttagctcacggccgcttcggatctaccctcgccggagttagacacctcgcagccttgtgccatgtgcctcggcactttaaccacaccgtcgtgactcatgttagcccatctggtgatcattggtgagcttgccacggtaattgccaccaatcgcttgcgccagtgcatccccttccctccgaccgccaccac

SEQ ID NO: 136238 - DNA, 574 bp, Zea Mays
gggtgaagcgctcttgggcgatatgttgaagatacagataaccaaacttgtcgagtgattatgcgcacctacatgattgtctaagtgatgaggacatcctccactattacccgttggcaaagacgcaattggcccagttggcccaattatagtcggacggcgaccgtgtgagcctcaaaattatcccacctcgcataacttgggaggaggaagccactttaaaaggaatagccacccttcccccattggactagtcttttggagtgattgggcctttccctgtgttgggtgtgcttaatgaaatgttgggctctgggcaacactaatttgttgggcctcagccaaccccacctgggctgggtgtatcatctggtatcagaactagggcccattttaagaaggtgggaatgatgaggacatcctccactattacccgttggcaaagacgcaattggcctagttggcccaattgtagtcggacgacgaccgtgtgagcctcagaattatcccaccttgcttaacttgggaggaggaagccactttaaaagggagagccacccttcccccattggac

SEQ ID NO: 136239 - DNA, 312 bp, Zea Mays
tctatacgacctccgagaaacaggagttgtaccaggttttaattcaatagagaattccacatcacgttctggtggcaaacctagcaactcttctataaacacatccgggaaatctcgcaccaccagaatattggttaattcttcaactaccacactataagcccttcccggcacttcttctagagaggacaactgaattgtcaactgactttctcccgtcactgtttttatctgaatagtctgtttcctcatgtcaataatggcttcatgttgagctagtcaattcatacctaggatcacctctatgtcctg

SEQ ID NO: 136240 - DNA, 273 bp, Zea Mays
attccctaaagtaacacgaaagaaatagaattagttcaaaggataaacacgatgcacgatacaatcaaaatgagctagagttcaatgcaccttttgcatcttgtttcaaatctagttaagaagtaaggcatcggtaattcattaagcttttcacctctcaacgttaagatgatatgacgacatggaattcctatcgactcaaataacatgcaggagcaatttccaaatgattctgaagcgctccaacgaaccaccctatctttcagagatcca

SEQ ID NO: 136241 - DNA, 422 bp, Zea Mays
atgatttcctttttctacagtgtggcgcgtgtggcattgtgggtgcagatcctaggcggttggggaagaagatggcctgtcgcgtggggccagggagcaacggctaggcgatgacgtgccacacacgcgcaggggcagggtagtgggccacgacgcaggctgggggtcgcggactagcggagcgtgcgagatggactgggccatggatgtttgggagctatgggccctggctaaataggcctagagggggtagggctgaggccgaggtggccgctgggcaagggcgagagcgcgcactggaacgaccagtagggagggggagtttggctgtgagagaggcggggaaggaaaaggagttttctttttttattttcctttcttcctatttgaattcaaactcaagcatgactcataaattaaat

SEQ ID NO: 136242 - DNA, 318 bp, Zea Mays
caacttcgggttggtgcgccttgtccgttgatctggtcaccaacggctgtgatcgcgccttgcataccggttcggtcagggcttcgtgatcgtggatctcaggatcgacggtcaatagcgcgtaccccttcgtcattataacggatccgtcagatcgggatctgacggctcatactcgcccagatagattcagccgagcaaacttctaaaagagaccccggaaaacttgctattcaacccgcggtctatcgcctgggttctctgtgtcttggtgcactttgcgccagggcccctgcacttcctaatattagtgtgccc

SEQ ID NO: 136243 - DNA, 594 bp, Zea Mays
tcttccaataaaagctatatataatcctacgtgcacgatggtcaacttgatcgatgcaagagaactctagtgacctcccacctaatgatctaaccaaacccttccaaaaaccagagtttgagtttcactgcttggtgacgctgaacttgatccacagggtaaatccagtaaaatctaacctactcaaatagaaccggaaaatatatggggccagattgttacccattaccagcaaagctgcagacggatgaagttgctcgtgttacttgcaagacatggacaacagaccatgtaaataaccgtacaaaatactgttatacaatgtttataaaacatagtttgaaatagagaatagtataaagagtcaggctactctgccgcgttcatgatcgatcatggagtccacacagcgtttccggtgaccatcgtggccatcaggctgggttgtgcccaggttggaagattccggccggccgcacggacagtcggcaatagcaacccgcttttcttgctagttgtgctgttgttagaccctttgagctctcgttgtattatcccatctaaggttattcgttcgtcccgtgcaaagcgcgc

SEQ ID NO: 136244 - DNA, 737 bp, Zea Mays
gctcactagtcaggaagataaattgcacgaggcccataatcatttcactcaagttattggcaggacgggtgctagacaatgtgctgttcgttgggacaacttaggctatagcccctttgagttatcagatctggactctacgatcaacgatgatgagattaaaaatgtggttatggggatgcactctgaaaaggcgctgggtccagatggtttcatagggttattttttaagtgttgttttgagctgattaaggatgatctattcattgctattcatgatttctataatcatagatgcaaaagcctgcatcttgttaatgaggcaaatatcactcttttgcaaaagagggagggggctgacaggattgacatgtttagaccaataagtctcatcaacagtttcatgaaaattctaaccaagattttagcaaatagacttgcgccaagaatgaacgagatcgtctccactgcccaatacgcgttcattcagaaacgatcaattcatgataatttcctctacgttcaaaaagttactcagaaacttcataagagcaaacaaccagcactttttgtcaagcttgacatatcaaaagcgtttgactccatcaattgggcatatttgatagaggttttaagagctttaggattttctcagaagtggaggaattggatcgccacaattttgggctcttcctcctccaaaatcttaatcaatggccaacaaacaaatgcaatca

SEQ ID NO: 136245 - DNA, 1130 bp, Zea Mays
ccggttcgtcttaccccagcgagctccaaccataaggttcctgtgtctgtgtgggatcgtcttggaccattgctgaccaaagtctgtatgcccaaggttcgaccggaattggtgtggcgtgaggtctcctctcatggcgcgacgttcgaaaggtcggggccaccgggcggtcgcaaggcagtgccaaaaagcgtcgccactgcacgcggggcataaggcctaaggttccctccgcaccggcagcgggtgcacctgtccaaagtcctctttcaccgaagtcggttgaggtgtaagccacccccagctcctggaagaggttgctacggattttcctcatggttgtgttctcgagcggtctgaggcgcttgtcagagaggaattcagactccaacactgtgctttgttcgttgtggtcactggttcgcgacctcagtgaatgctcttgcagcggtggcagcagctgggttcggtttgctggagaactcctcattacatcgttctttccaggaggacatcgtgttgatctttgactcggagcgcatatcaaacatggttaacggtgttgtgctcaactcgccttcaggttcgttcaagttcatcaggtggtctaggcttgctcatgcagatatagttacgttcccctcccttgtcatggttgagttcagaggggtctcggttcatgcttagggtctgattactgctcagaacctgctgcgagatcactttgttgaggtggagcttcatcctgactctatcaaccgcctcgattttttctgctaggggtggttcccgccggggctcttgccgatcaaccggacgcagagacgggagtaggaacacctccatgaacgaccgctgcggaacccgacaaacgacctctccaggactcgccgctgaagaggaggggctcgtcgcagcccagcactgagccttggagcggccagacggtacgaacgggcaagccagaggagacaaggacgggggaacccgacgccacaggggaaggggaggtggtttccgtacccgaaatgggcgccgacgaggggctggagggaaggggcgggcaccggtgcggaggagggggaggcggaagggcgaggagccgaagagaccgtcgtcttctctctcca

SEQ ID NO: 136246 - DNA, 482 bp, Zea Mays
caattattgtgcttcctgtgttcttcactttgccaatggccaatggtgaatgatggtctggactgcagtgcagtttctttgccattcaaactgagatcgtgttcttgccattctcgcacctcacctccgcctccaatcacggccgccaggaatgcgcagaaagctgcccgccaagcgcccaactcgcctccaatcacggcagcaagccatgccccgcctcgattccttactctccaatcctgccctccaatcccagccgccatcagcgccctccgccaactcctaccaaaatcgagccctagccgtcatcagcggcagcgccctagccgctacatgccatgcgctgcttcgccgccagtgctccaaatctcggccgccatcagcgcctccccaattggaggagctcagcatcggccacggccccaccgcctggcccccatccacccccgaattggcaagaacacgatctcggcagtacgtat

SEQ ID NO: 136247 - DNA, 647 bp, Zea Mays
aaatgaagatgctgaagatcggccgtggaggccgagccatgttgtttttgggaagtcaactgttaagcaagggcaaatcgaagtggtgaagggcaaatattttcatgatatttctatattgagggccgggggaaagcactgttccccttcctgaagctgatgaggtggtggtctttaaaagcttcatgaaagctgggcttcgcttcccactacacaagatgttagttgaagttctgaagacattcaatataccttcatcaacttacccccaaagcctttatcaaagtgggggtttttatatgggctatgaggagtaaagggctagagctggatgctaggtgtttctgcaatattcatgagttatcataccagacgaaggcaaccggaaaggaacaataccataacaacttcggatgttacagcttcgtgccccgccctgaggcaaattatcctgtgccaacatttcagaagaaatggccgggctcttagatgaagtaatggttctacgtaaagaatgatctgaatcagagggaggatgcgagggcatcattcaacgttccatatggtcgctcttcggcattagaagaccatcaatcgcaattgggaatgaagtgcaagcgttcctaatggctttcaacacagtatgt

SEQ ID NO: 136248 - DNA, 490 bp, Zea Mays
caggtgggtgcggtagctgctgggatacatggcgaagccgaagggaggctcaatttataaatcaagtgagcggtggccgggaatttggggttgaatgcggtggcggtcagagaagaagtgagtcaccggcggggtgattcgtggtagttcacgggatgagaagccacgacagttactgggtaatgatcatagttcacggcgacgtggtcactgaccggaagcgtggcacaatcgcggcggaggacgcaaactccggcgacggccgcacggccacgttgccgatgcacgtggtcgggataccgcgaggccacggcagcccgaacatatccacgacgcgatctttccatggctgggcgtaatccactcaccagcagcatgaatcacggcgatcggcgcgaacccgagcatacggctcaccggcggcgaagttatccactccggtgatatttccagcactgtaccatgggatatgttcatcagtgttcctgac

SEQ ID NO: 136249 - DNA, 392 bp, Zea Mays
cagatatggagtcagttagtcgtcagtgcctcaccgccgaccacacgtatgcacacacgctaaaagcgttgggagttgggacacccgggtggaaactggaaagcttctgtcccggcgcttatgccgtgtccgtgtgtactttactcgacgtggaaaacgcttcccgcttccggtcgacggcgagaacactccggggtcccgctcgtcgatgggactatggctagacagacgtaggctcgtcgccatgcacatcttatcagctgcggttacgggagcaccccgattcgactcatacggctgcgtacgacacgatcaaggggatcaaaaaaaaatctgggcgagtgcttgggccttggatggcgcttctgcaccacatgtgcagattcgttcgg

SEQ ID NO: 136250 - DNA, 526 bp, Zea Mays
ctcaaaccgaagcatgaatttttgtttgtgatgtgatgttaaggttgaccaattcttcaaatttgaaagaaaaatcattttaaatattgggctcaaacccataagttaacatatgtgtgtgcatgttgggaaagaatgaacccttcgtaacctcctctcgcggtcgcacatgaaacctccccttcgcaacccctacgcaacataacccctcccttgcacgatccataccattttttcccttgctcgcaatttctcttcgcaccttcgcttgctcgcatcggaggttccccaagcgaggcgccattgtagcactgggaggaggaggagcaccatcatcttccttgccaccgctaatggttctccggccatcccttcctcggtgagaaatccctgcctccttccttgatttctccacatttagtcgtaaccggtgtgcagagttcctctgcaatgacctctgctcatagctatggtggccaatttccgcccctctcctcgttggatcataagaaagacgatctaatca

SEQ ID NO: 136251 - DNA, 578 bp, Zea Mays
tgcaaatatggcacctaaaatgaggaaatcctctatgtatttcttgtacacaattttgagtattacacttttgttgggctaaaatcagaggcactagacatgtccaaagcatcgttggttcctacactaggcatgtctatacctttccaagaactatattttcaacggctacaaactacttgttaacatttgtcatgtgactggtgcacacactagacacgacatcaagactcatccagtgcatgatagagctaaaatgcattttccactatctttgagtttcctatttggtgtcacatctaatgccgaaccagacacgtccgatgagtgttagagcaactatgctattttaccagctctttctgttctctttttggtgcgccaactggtgatgcactagacatgttcggttgttgatattcaatgcacatcagactccattgttcttggctaaaagttgtacaacttgaatggtcttgcctcatgtttggtgcacatgttcggtgcaacattgaacatctggtgcgtacgaaaaaactacaacaagagcactttctcatctcttcttaagtgtgcta

SEQ ID NO: 136252 - DNA, 482 bp, Zea Mays
aaatgatccagaaatcaaacttgagtgtcacggtcttcttatcaatatgaatccctctcacaaagaatcttcaagtctcttgcagtcgtacacaagatcgaagttacaacttatagcactagagagggagaaagtacacgctcaagagcaaatgcaacaacaccacaggagagaagatcataagtgcgcaaagttacgaagacacaagaacatctcagaaacagcgcctcgatctcactaaaccactagaatgcgttgtagcttggtgttggagttatgtgttccacttggagtgcttgggtgcttaaggaggtatccacggggtgcttttatagccccaaaagaccccatagccgttgttcctttcttgcaaaaaaacttgttgaatttctgctctatccgagggcaccggaccgggtctatgtgtctgagtctaggattctgattggctctttacatagttgatgggcaccggaccagtc

SEQ ID NO: 136253 - DNA, 440 bp, Zea Mays
gagatagtctaattaaactgctggagactaattcaaaataaattattttttatgtaaaatactatttttttttgacagtttctagccactataactttccaatagtgaataagtcgaaacatttttgacagtttctagccacctttaactttccaatagtgaatagatcgaaacagaactttagtcattctttattactagcaacgaatccaaccatataccaatcctcaggtaggcattgtatcttagaatccgggaaacgtttctattttactgcccaacaaaattagaagggcattattcgcaatcaatcccgtccaggttttagggtttcttcttcgcggcctagctaattctcggttaattgtataaaagcaacccctctcggcagagtcgatcgtgcatccatcccagtccaaatcagtatccaacaaatccac

SEQ ID NO: 136254 - DNA, 478 bp, Zea Mays
ggggatcagaccagtgaaacagacaaagcggtacccgcggtctgagccgttcgatctgaatcggacggaggagatcagaccggggaaacagacggctgcgggcggcgccgctcctctccgcagcggtgaagtcgccggagttgaggctggcgcgagctaggggggttctgaggtcgccggagttgggcagagagtaagaagatgccacgacgaactcgatggcggggaaaggaccatgaatccacgggcagagaggggagaacgacggtgagaaggcctcgggcgggccggagaaactccggtgagccattccggccacggggaggggtcctaaggcgcgttaaggccttggctaacttcagcagaggcaggggcgacacagggacctactccggtgaactagaccgggctaaatcggccggccaccgcgtgagcacggcggaccaccgtggccgagcaccaacgaaggtgaaattgg

SEQ ID NO: 136255 - DNA, 456 bp, Zea Mays
gaagaattttgacttgctatggattgaaaaccacccaatcttctccaatccatatggattttgttacagttcttgtgacgctcgatggttacgggtccccgagaagcaggtgcgatggaaatctccaagcacaagcacctctttttatgggcgccaatcggatggatgggaccacggcttcttccccatcctatctatcctattgggtggaactctcgacgctggcaacccacaggtcaagcaaggcgtctcttttctttatggcgcgaaagattgggtcatggcctcattttgaccacagttactccactatatagcagagcagagccaatcggcgagaagtctggctttgattctgcatagtgcagacccaggctgatctgcttcaagcaagagtctgcatgctggtggtgcttgcagaaaataaatttcagaacaccactgtggatcagaagg

SEQ ID NO: 136256 - DNA, 446 bp, Zea Mays
ggagtattaatgttagggttgccttatctttatgtgatctataaaagtaaaggttatttttagagatgcctctctaaagattggtctcgtacgtctctcttttttgtttgcaacggcctctccttccctccgtgtctctccgtcgtctctgtgcggactgagcagcggtgtgcatgcatctccgaccgacgactcacaagacagcaccgtagatcgagcgcgtcagcaagcgttcccgatcaggagtgccggatcaagcggcggcaagcgagcgtctcatgtcacaagagccgtagatcgagaggtggtacatgtcggcggcgaatccaggggccacgcgccggcggctagcgcaggcaaggcgaggatgccggcggcggtggatccaggatgtcgcgggcttgtttgggctcgacggcagaccctacatgggctcagtgttgagc

SEQ ID NO: 136257 - DNA, 556 bp, Zea Mays
gcttgaaaaatgtcggctccacattttcaagactgaccaagagcattctagagaagcaaatgggccgcaaaattttcacatatgttgacgacatagtcgtcgcaagcaaaaacacagaagatcatttgtcagacctcgcagaagcgtttgccaagatgcgcaaagccagactccgcttaaaccccaaaaaatgcatatttggcgtccgacaaggcaaaatattgtgttatctagtgtctcacagaggcatagaggggatcccaactaagatataggccataatggacatgaccccaccacaatcaacctgagatgtccaaaggataataggaagactcgttgcgttgaacagattcatctcgcggtttgctgaacggagtctccccttcatcaaaacgctgcgcagagccaaagactttgcctggggcccctaacaagctacaaccttcgagtcattgaagaagtacttatccgagctcacaatattgaccaccccagactccgcttcatcccttttgctatacatcgcagcctcgcccagcgcaatcagtgcaac

SEQ ID NO: 136258 - DNA, 765 bp, Zea Mays
caaaggcatatcatgttcaacatagagagaaaaaacgttttaagttagagtcgattttcctacttatcattttctctgtcgtatatacattcatttagtatttccggatgattcggatcgggacccttgtgtccctcgacgaagacttgaagcaaagtaggctccactccatttcgagccgcctgcaacacatgattggaaagtctagacaaatctatgcaattaacaattgacgaggcaatttgacacaccatacatgcagccttgctagcgtgtccatctgccccgaagaagtggacccctggcttactcaaccaattcatacgatttctattagatatggcatggaactcctcagaagcccaatactcgcacatccacgcccaagcatccgaatggtggctcaaccaatccacctcataatctttgtactgctcagccgtcaggtggatttcctttaccatatccacgtcacaatagttcccctgacgcttttggtacaccgtgacggccctcaaccgtgctttatacatcatgccctttacagctctatctgttgagccattgaatacctcacacacatatggatcatccaaggtataggggtcacacacgcgaaattgtccctgcaaatttgaagatcaccagagacttacaaatgcaaaatctgaattcaatttgaatatcacaagagacttacccaaaacaaatcccacactttgcttgtgggtgtcccgtcgttcctgtatggcttgaggtcccaat

SEQ ID NO: 136259 - DNA, 506 bp, Zea Mays
atcatgcatgcatcaaacaacaaaagaaaactaaatgcttgaactaactcctactgctagccacgcacgtcccttgatctcctccctcatatctcacttccatgtgggccccaccgcacctctctcctctcccaaccattcttctccctcacggacagcaagccgccgccgttagccatttcagcaccggccaccgtgtctctctgcctccccggctgttcgtctccctgtgagtggagctcgccgcacccggccagcagtcgtccgcctcttccctttcccacttcaaccccaagcgtttcttctcccctttcttctccatttacagccaccattgttggaacttaatggttaccgtttttccaaaggttaatgcaacgtttatttggcctctatagtgtattaatccgggtttaatcctttccctaacctcctctataaaacgtgcatcagcccattcttctccatccctcctcgccagcagtgattgtcattttcatgctcat

SEQ ID NO: 136260 - DNA, 496 bp, Zea Mays
caccaattttgatctcatctaatctaatcagatctaatctgatggacaaacatgatagataatactagaaaaatagaatggaccctacttctatgagcatgttttaacctaaattggtgacttatgtaaactcggctacacccaacaaacttgacctacataataggttacataacctatcccacccgtctagaagcaaacgaccaaaccagattctgactaacctcattaaactcatagccatctactaaaccagctgctctacctacggatctatcttaaccaagacaccaatacgaagaagatcaacctcatcaaggaaaggataagagtcaccgtcaaggaaggtaatcgtcaaggataaaagtcaaacgagatctctagatgcatcaagatccaccatccgggatagaagtttttcttgcctaaccttctcctatcctaagcttttctaaatcttacttattagctaaaacataatatgttcatgttttcc

SEQ ID NO: 136261 - DNA, 304 bp, Zea Mays
tggtacgagagatttggttcaagagcacatagcatacagagtagggccgcttatagagagctcggaaatgccgaaggaggccatcaccgaatctagtgaaggtgaactggtccggctaaagtacacatttagatacggggataaattcgatgaaccaaacgatgactggctaaaatgcatcgaagttaccagtgatgaactgcttggatcatattccaaggcggaagacaatgcactatccacagccttcggaggccgaggaaaaaatagattgaacagagtttttgacgctattggcttcgtt

SEQ ID NO: 136262 - DNA, 933 bp, Zea Mays
ctcaaagaaagggaccttagacattctaagcagctccacacattggatatcatcagattcatagataaatctaagatttgtctgcctctcaatgtccctttgaaacattggaccatatgtgacacgaggatgaaagagtctacgtgtaaggcatgcaaacagccaacaagatatagcaacaaccaatgccgatgctctcaacttcagcaaatgacgatttggacccaacatatctgaataaataagataagggaattgttgaatgagaaaaaattgtactctgctcagattaaaaaaacaagccagggttgctacatctaatgatgttcctccaaactggcttggtaacatcactgaaaaattgtagtctgctcagattgaaccaaaaaacatcactgagaaatcgtggtctgctcagattgaaccaaaaaacatcactgaaaaattgtggtctgctcagattgaaaaaaaaacatcactgagaaattgtggtctgctcagattgaaaaaaaacatcactgaaaaattgtagtctgctcaaatgtacagaaaacatcactgaaaactggtcctaagctcagacttaacataatttcatcactgaaaaaatggtcagaatataaagaagagagttatggaggtagcagcataatataatgcattaactacctgcatagtataaaaagaagatagttatggaggtagctgcataatataatgcattaatccattaaattaaacaagacaagaggctacagagagggagaagaaaggaggaacaaaaggtaagattgttgtaaggaaagaggaaaataggaatagatgaaggtaagagggggagaagaaaagaggaacaactagctacttaatataatagacagattatgctagttgcataatccattaaattaaacaagacaagcatgacaaaca

SEQ ID NO: 136263 - DNA, 473 bp, Zea Mays
gagcggccaaagcaacaccttttctcttcttcccctgtccctgcagcgggtagcagtagtcgggatagacaaagccaatggcatcgaaaactctgttcaatctcttctttccccgacttccgaaggctgtcgataatgcattatcttctgccttggaatatgatccaagcaattcatcacttgtagctttgatgcattttcgccagtcaatgatgggttcatcgaacttatccccatacctgaatgtatacttcagccggaccagttcaccttcgctagacttggtgatggtctcctttggcatttcctagctctctacaagcggccatactctgaatgatatatgcttttgaattaaatctcttgtaccaatgaagaagcagacagtaccaaatgctttctgacacacttcggcggcgtcatcaatttcaaccttcggctttcggagaccgaagcgggaccatatggggcgc

SEQ ID NO: 136264 - DNA, 423 bp, Zea Mays
gtgctttcaccgtgcgcaatcaatttgggcgaaggtggagagggcagtgcgaatttgacttcgatttggttcactggtgtgcgtgatgaccgagccttgccgtgatccagggggctatttatagccgcggatgtccggcgatcacctcgtggcccgaataccatcacaaacgcatgccaagcacgtagagaagtgatacagtgagaaagaatcacggtgcagaggacaccgcggcgaaaagggctgacgcgatggccgccggtgaatcactccggccgagctcgggagatggcgccacgtatgagtcaccctttccccggcgttatccatcctataccgtgcacgaatccggacggcgatcaacgacggcgagctgagctggcgttctgatccatccgaacactgtaccatggcacatcttcg

SEQ ID NO: 136265 - DNA, 291 bp, Zea Mays
aaaagagaccaaaaaataagataaaatatttgttgaatgaccaattgatggcacaagacattaaacctaatttggttgcagacacatatctaaacctcacctctatatgaatcatcttatcgtctagctgggcagctgtcgattgccgctaaccacttgacttgcctatgacatagccgtatagactacaaaaactagagaaggtgatcacgtgaagcaacataataagcgctaacaacatcgatcaccagaaccacatgtcgcagctgggacgtccgtatagactacaaa

SEQ ID NO: 136266 - DNA, 1118 bp, Zea Mays
ctccactacaccggcccaacttcccttccacttctcacccacacagcccatgcggactgatgcgctcgcattcactgccatgtgggtccctcgcgtcatatagcgctctgcctggctcttcccaccttgagccgctgacgggtggtccccgcttgtctggtctatcctccttccccgtctcgatcgggattctgtttcctggcaggcagggcgcgaccgcctccaccggctcagcgtgatccgcgctgggtggggctgcttctgttagactgggcctatataatctggatgccattaccatgatccgtaggagcttggaaccaggcacccatccgctcagacagtaagggattgaggcaggggacagcaccgccgccgcacaggcaactcatcggcgacaccgctccgggctgaacggttggcacgagcaggacgcagaggcatcacgaacatgggcgtgggcttcccgtgcgaggtagtcatccgaagtccaggtaatcgcgcgccagtgacatggtgccgccgcatggggtgggtagcgatactgacatcgggatctttggtaaggacttcctcgagttaaccctttccactgccttcctttccgattacctgtgatcatcgggacaatccggggcgtggggttgacttgcagcggcggggcgccaccgtgggcgctgggcggtgccgccgtgccatgctcggttgggggaagaagcgtgtggaccgcaggatctggcagggatggtgaggatcagatcgggttcaaagaggatatggaccgctcgatctgaatggacagacgagattagaagtggcgtttggattcgggcaagtgaatcggagccgttgagatccgatcgggtggatctaaagggtgccgggtattttaaatcacgaccgtagatctcggatctgatagctgtggacgcgtaccggttcataataacggtgatttaatcgtggcctttcggttttgattggacgaccagggatcacagataccccttcagctcgtgctttttgcaatagagaccccatactatttaaaaaacaacccaccatccaaacacatggaaaagtaattgcatatcagtcctgaactttatagatttaac

SEQ ID NO: 136267 - DNA, 505 bp, Zea Mays
gactactaacgtggtgcttaccacatgagtcgtgcaggagatatatagtagcagatcttctgccggctgatttggtgcagctcggcgtggcggcttgagtactggtggtgtagtcaagaactttttcagtccttctagagcttcttgtgcctctgtggtccactaaaacttgtccaccttttcgagcaacttgtagaatggcatgcctttctcgcctagccttgatatgaatctgcttaggactgccatgcatccagtaagcctctgtacctttttctgtgatcgtggcgcttccattctcatgatggcctcgattttttctaggttagcttcaattcctcggtggctgacaatgaatctgagtaacttccctgctggtactccgaaaacacatttttttgggttgagttttcaccggtaacgcctcaggctattaaagactagctgcaaatcttcgatgaagctttatgagttttctgttttgatcactacatcatcaacgtag

SEQ ID NO: 136268 - DNA, 434 bp, Zea Mays
aggtctctggttgaagtcgataggtatggcattctaatttcttcaaaacttccttgaataccatcctttatcactgagctttataagtttcctgaaattgcactgtgaaaagttgcaacatcttgaattcatgagcagaactttcaaagcaattattgtatgttgtaaggcctttaatgacatattacgaataaatagtatgcagatgttaactgtaccagttatgcactacctttattccttatgattctgaattgtatacatatttattcataacaatggtacagtaaatgagtacgatgttgagcaatgcaaaggaaagcaaagatcaatatgattctacatatttattctatgactgcaagctgaaaaaaatggtacaataaatgagtatgatgttgagcaatgcaaaggaaagcaaagatcaatatgat

SEQ ID NO: 136269 - DNA, 447 bp, Zea Mays
aagttgatgttatattttttgtaaatatagtgaaacttaagttgattgactatgataaaaaaaaatctaaattcgcaagaactaccatcagtacctgcagattcgtacgactggaatgctgtatgatgctggcctagttgtcttgggagttgggatgacgcactgggtgactgttttcagcggctgttatacacggatctctcatctctgttcctgtttagacatggaaaatatcttgcccgagatctcctaaaagcggatcctacttggatttgtagacttgacgtctcatgatcgacagagcggccgctttaattttgggtacgagcgagcagtactggtgctgtacttgtgtggtgtccggagaggcagccgattcctatgcaaaatccgtctgatggaaaagcggctagctccttgatggaggcacggagccgtcgcttttga

SEQ ID NO: 136270 - DNA, 648 bp, Zea Mays
attttctccaggaaggtgaccgggtagaatctcctttcaaactgcctgatgaagacatcccaagacaggactcctggtgaggaggagtgcactgcctgcacgcctctccaccaattttgagcctctcccctcagcaactgcgtgccaaagcgaactcgatctccatacacaatctcgaagacattcatcttatcctccaagtaagttagccaatctgccgcctcgaccggagtaccacttccatgaaacaaatccaacttcatgcccatccactacatcagagaaagaccactgactggaagaggcacctcggccccgccacctagagcagcacccgcagggacagcgcccccgagcactcctccaccaccagcaccctaagcagcacccgcaggggcaacaggaatagcttgcctcagaatggccaactcctgctgcatggcctgcatcgcggctaacattgccgccggactcatcgagtccccactaggaacttgcggactaccctgagtcctacgaggcggcatagctgcagccatagggatgagaataataagtatataagattggcatagcatctcttcagataatgtcaaactagctcagacaataacataccatatcaatagtaaagcagaaaacccatcc

SEQ ID NO: 136271 - DNA, 446 bp, Zea Mays
gaaatagccaaggcttctcaaagattgcaagtctttctccttcagagtggatcgaccaatgtcaatatagcttggcttcgaaggtctatccttcagcaactttgcagtaggtcttgatgtcgatgaagccctcattgcctcggaaataggcagagtatcttgtcgtgcctctgaggagataggagtgattagttttgcggtgattccgattctgtccatctgagcaagccaaatagtttttctaaaaagtggttcaaccgaggctggcttccgaagcactgatggatgggaagcttcggaggcacagaaaattttggcagcgtgtaggtgagggtagtaaatgtgatctacactcaccctctcttttgcttttatactgaaaacatgcgcgaagtagcacgggtcactggaaatattcccacgcagcatccttggcttctcctccg

SEQ ID NO: 136272 - DNA, 585 bp, Zea Mays
atggcgatcgagaggtcaaacgacgcgaaaacgacgtttgaacgagaaatagtgccataggaggtttgaaattcgaattgaggcatgaaatgacgtggaattgagccaatacttcacgaataggtttatatgggtaaatatgagtgaagggtgcacttggtttgattttaggtgaagaaaatggaatttgggcactcggctcggaaacgatcgctagaaatggggaattatgtaaaattgaagcctaggatatcggattggcttgagattttgcgaatgtgttactggaggtattatgaaggtgcctaaaaagtttgggttcaattggaacaattttggctggtttgggcatttcgccgagcacgtggcgtgcggtggattagggttttcgagaaatgctcattcgagaatgtgaagccctccctaaggagctaggaacctgcatggaaagtcaatagagtactaggaacacattcaatcacttggattcactacatttgataaatgattggaaaagagcaattagagggggaagaggagttgcactgctctgaacacagagggagaggagaagataagggaggg

SEQ ID NO: 136273 - DNA, 439 bp, Zea Mays
gcatcctctcgctccggcagttgactatactgcttgaaaaatcaacttgggagccaatttgggcagcccactcagctaaccaacctttttcgaacaggtcaacaagtaaccgaccatctatctaagatttaaaacaacagcggacccgtgcaagtggatcaaaccaggtcaggaagcaaacacatcgatctggtcagcgtttggtttggcgtgcaggtggaacctgagcgatttgacctacgtgcgccgggttatgttttattagagtaaccacgtccacgtcgtctcggaaccaactcgtggctggctgaacaccaacacacgtgtgccgtgcgcccctgcctattagcaccgtgttctggatagagatggagtacacgcgtccctccccagctcgtcctcccctctgtcctgatctccctcccaaatctcaagtcaa

SEQ ID NO: 136274 - DNA, 500 bp, Zea Mays
agagaggtttatagacctcgctttgggtgccactttactagtacccgataacaacctttcggtgcatggagtttgcagtcgtaattttgatttgcgccttcgaagactagccaatgcggccgcaagcgagctgtttgagtcttctttcgcaggtatcgttgtcttctcaccctgatgagaggcggatgtgtgtctccaaacaacgtttctcttctcgtgcagcctacatgttggggttgcctccacaaagcgatgacacggaggaaatctgcaagatctggaagctccaagttcctagcaaagtgaagatcttcttgtggctatttattaaagataaactgcacaccagtgaccgcctctgcagaaaacaaataaggcaggatctgctctgtcccttgtgcggcgcggcagtggaggacagactccatgcctctgttcagtgcccccgggtttcttccgtttgggcattttctggcatcacgatcgtggggatggaaggc

SEQ ID NO: 136275 - DNA, 531 bp, Zea Mays
atcttgcccagcattttgatccaatctgcttgtatcttgcccagatccgaatccctaaacacgaattgtttaaaattctgcagtataaattccaatcaagataaatcatagccagagattcaaacagggaataattattgcgctaaaaatacatcggaaagaagattatataataattaaggaaagaaagaaagttccaatcttctatctctgccgttatttttcctaagtacgtatgctgtcccaattctggtattttacatcgttcttatctcagccacgtatccttctccctgatccaaatcaagccaacgaaggaagcttatctctttcctatgcacgtcatcttcatctattccacgtacgtttcctctggtccatccacgttgctgctcctttctttattctgagatgagcgatccctggaagcatcttccgggtgtggcatttatctcccctcacacacgttctttgcttcgcttcggcaccgcacaggccctgctccatcgtcacttgtccctgcgctgacgc

SEQ ID NO: 136276 - DNA, 1305 bp, Zea Mays
ggcgggcggagctggaacgaaaaggtgccgaggtagacagagaacgagtaatcacggatgggaagcggttggacgtacgagatagcgaaagctagcgccgggttttataggcccccggtgcccctggtttcggaaggttgttatcccgtccttaatctgttactcggtgaggggttttgccaagctggcagatcaacgaattggattggattggattgtttttatcggtcgccggactcttaattttacagcctattagcgcagtatgagaatccttttccttcttgtattagattggaaatatttttagataatggaaaagcagttccggccttctcctccgtagagggtccgagccaacaacaacataaaacaacattcacacgaccacagagtcaaaacacataggaaactgaaagaaggggaaaaccacacagggtttcaaagacatcaaaaaactacagagtaatgcgattggagaaacgccatccataatgcgcaaacaccatcatcaccactctctgcaagcctggactatcttctcctttgcagcttcatgcctttgaagcagcgcccaggaacggcaccagtaggttcccctgtagattacctgcatgtaagttttcgggttatcatgatcaaaaaccacctcattcctgctacgccatacagcccaaagcattgccgccacccccgtcataattagggatttgttatgtttactgaaacccatcaaccaattcccagcaacgtgctccatatcccgagggatcggcaaaccaaaagcggttaacaacgccctccaaatgaaacgggcataatgacactcaaagaataagtgtccaatcgtttcactattagagcaaaacacacacaacttattccctttccagtttctacgcgccaagttatctttagtcagaataacccccctaccaagataccatagaaaaaccttaattttaagtggtatcttcaatttccagagaggattattatgtctaataataccatttgacataagcgccagatacatggaattaaccgagaacttcttattttggtgtaaatcccactcacccacatctttcgcactattaacctgaacaaccagcaccaacgacaccaatctaaaccaagcctcaaggtttgcccccgtcaaccctcgcctaaaagaaacattcagcggtactgacctgaaaacatcagccaccgagctcccttttttcctagtcagattatatagagaagggaaacgatctttaagcttaaaattgcccacccaccggtcctcccaaaatctgg

SEQ ID NO: 136277 - DNA, 333 bp, Zea Mays
ctaggctcggcccagtgccaaccaacacggatgttcatagaattgaagaaatgtcaaaaaaagttatatcccttaaaccattacaaagacacaaattttccttaacccctcgtgggggagcgcaatcaagcagggcgactcccagtttccgagcaaagggctccgcagctttcaccatttcggcaagctctgtatcactccaggcatcgcagtaaccttcacttagggcctccagttcgattccgccttcgatatgggacgtaacaacgacgaaggcctgacagatcccccggcagaagtattcaattttgagctcccagatccgacctgcga

SEQ ID NO: 136278 - DNA, 938 bp, Zea Mays
gtcatctaaaattggtaaacatgtatcatattcttttgttttgcaaatgtcttaagtagcatagcttataaattttcctttctagaacttaattgattaaatagtgcacatattccttatgttgcatgattatgttcaattgatactccttttatgccaatggtacattaagttgcaaataagtactctcaacaagtatcaattgaattcatatatatgtgcgcactaaaacttaaggagaacttagtgtaatatgcaaatagtgatctgcttatctaacaaattgtatcaattggtgtttttcaattaatatttttagtacatgatcactagttgtagaatccatacttgtacaattttcatgttgcctcttgttgtgataagaaaatgctaggtgacatctagactccaggtatcaagcttcaccttcgatttagtatgacaatcttcatttaatatcttgaacctatgtcaccaacaagagcttgcaaatgaattctaaatccaacacaagtctggaaaccccttgaaaaggtaaaacacaaatatacatcacttatgacacttatccattacctttgtgccatctaaggatccttttcatgataatgtgttcacatctcgcttaatcataatttctaccctttatattctttgtatccttttggagatttatgacaaaggggagaaattttgcattaaagcttacctttagtcttatgtaactaagtgttagaagacttttaagaaggggagaaataattaacaaatatgaggaatcataagaaaaacataggatgtaggaagttgataagtgcattttatgtcatgagcatcaatgttattttatgacacattacacctcatgaatagtatgatataagttgtctacatactttgacccaaatatgtgcgtttgacatttgagtacaaaattt

SEQ ID NO: 136279 - DNA, 345 bp, Zea Mays
acaattaatttaatagataatctaggtgctgaaaaataaaatttaagtgaggtgctcatattcaaacaaggtgtatgcatatgttgggaagaatctaagggagttttgggatagataaaaaagaagggggggttagattagggtttcaaacctgggttagaaattgggatgctacagttggccagcgtccggcttcgacgccgcctctgcctcggacgcccgaggcgccggggggtggcctgcccgagcgatgtcacaacagccaacggaacaacttcccgcatggctggcacgagcacttgctcttaggggacctgcggttcggcctgaccccccggagtcgcc

SEQ ID NO: 136280 - DNA, 389 bp, Zea Mays
aagcgctattgtaagcatagcagtaatttcagctagagaaaaaggagtcgcgtttgtttagttaagtttgttgtgcagagaaaatgactttgttcgaggactgcatgtagttttattctaaccttcaacttcaagtttttgtttcgatataatctctcagttgcatgcataattgggtacggggattcccgcggggagaaaatcccccgctcggggacggggatgggggaaaatcctctccgttacacttcgcggggatgggaacgaggattcttctccctcgcagggacgggtatgggggctcaaccctcgacggagaattctccattgtcatttctagtctcatggctagcagcgtgccgcacgctacattacatacatgtgcgcgc

SEQ ID NO: 136281 - DNA, 381 bp, Zea Mays
cagacacaaataaagaaaatggttgtcgactacagtgcaagctagtttacctttcctctctcttcccatcctttttgcttacctcatttggttgtcctattggaaagagttttgtgctgctatagtagctcgtgggtagctattttagctttgcctggccatttggctgctctgttggagtcagtcttagaactcaacgactctcaggacattcatgcggtggaacttttgcgcatgcaggatgggtgtaatgtatctatggagaatcctaggaaatcttgctttaggtgcttctccccataccatttggccagagaatgccatgttgagatcagatgctggtattgctttttcccaagtcatattgaaatcaaatgtttc

SEQ ID NO: 136282 - DNA, 463 bp, Zea Mays
agttggaactgggtatcgagtgtaccctccttttatagtctaacgggagcacatacatggtgaccgagccccgacaggttggcccgacaatataatacttaaatgtatagaaggtgcagagatggatcctaataggccaagatctcttccgcggtggttggatatcttctcttggtcttcgtgtggatctcctgacaccctacagccttgccccgtctaatcagaatgcaggtgtaggccttagagtaggttgcgacgtagtttggcacgctgctgtgcgtaggagtgtatgaacggtgtcatcccgtcgccttcgcctgttcactcacgccttggttatgcgcgaggaacagtaggggtcatcatgaggggcgtccatgcggtacattgagtcaatggtcttgcctcggtaatgtgtgggttacttgaaatgacgcaggccttgcaggctgcacacaccgcc

SEQ ID NO: 136283 - DNA, 808 bp, Zea Mays
cgtggaagaggtttgtgatgaattagcgaaggagatcacagaatacaaagctaaggtggaggctctgagaagtgaatcgatgaagatcaaagatgaattggaggaagaaatgatgatgctttagatggttgaggtttggcgtgaagagaaggcacaaatgaagcttgttaatgcaaaactggcatttgagaatacattttctcagccgaggaagcttcagagtgaatctgaggatttccttcatttctaactaggctgttatatgaaaaagggacagtaagggaatcggagaggctaaaaatgggtatgcgaaactgaaactatgtgaccacagggtgcataatttgacttagaacattctacaactaagggacatcatcctagctgagggctggggtctagcagggtcaatatgtcctttgcctgggtcacaacctcactgtagcttgagtacacaaagggtcaaaagggctaagaattggaacagtggagaggatagaaggggggagaatgatgtgggtttctgttgctaggacatgaagacactatggcagccctagttgaagatacccacagaaatgtagggcaagaacatatacaaacatgaatcaagtaacaaaactcaccaaaagatgtttcaaagagaacatattcaattttgcaaacaccagagctaaaattacatagctatagcaatcaagcaaatgctagctcactaagccaacatcatatttttaccattctactgatgcaaattacaaagcacaaacatgcattattgctttagcgccatcataaagtatgccaa

SEQ ID NO: 136284 - DNA, 490 bp, Zea Mays
aaacattgtttgccgattcggagtcccgtccgagctcacagttaacaacggcaaacaatttgacagccaggacttcaaagacttatgcttctcaatttgcaccaagcttgccttcgcctcagtatatcacccacaatccaacggcatcgtggagcgcgccaatggtaaaattttcacagccatcaagaaaatgctcctcgacgacaagaagggcaaatgggccgacctgttacctgaagcagtctgggcgctgaacacgaccgagtgtcgggcgactgggttcactcctttccgcctgctatatggatcggaggccatgaccccgcaagaaataaaacatgggtcaccacggacaagcacttcaaccgtccccgacgtagacgagccaacttcgaaggacctcatcgacggagaccgtgtcttcgccctacaggccctcaacaaataccaagctcaaacaaaagcatggcacgaccacacagtcgtcccg

SEQ ID NO: 136285 - DNA, 575 bp, Zea Mays
gacactacaaggccgacaagaaattgtcgaccacccgctagcagtcacaccccgctggacacgaacaccgtccttacgtctctgcagacccaacgacccctccacagaagctccaaggctccgtagatccagaacagcgacatggaccatctctctctctcttgctcacggcgatgaggagctatgatggctcttggggaatgattagatgagcgagatgaccgtggagtatggatataagtaccctagagtccggcaaaggagaacagccagtgcaaaatccgagaatttgttgcctggctaaatccttattgtgaggtggacgacaaatccgatcagcagggcccacatggaagtgtcacagggagagcgggccacgtgcgttcatagcttgatgtcatgcttgcatcgcgctgacgtcttgtgtggcaaggggaataaacaaataaaaaaagcgatgtgggcatggactgcatggtctagaaggtgggatgagccccgtgcggttctttttttgctttttttttctaatttcaaattctatattcaaatttaaattggagtctccaaattga

SEQ ID NO: 136286 - DNA, 288 bp, Zea Mays
tgaagactggcggccccaataaccctatacctccaaggccactaccatccatctgatcacagtgaggccaaaaggcttagaaatagaagccgagacttcgcaatcatcaacggccagctaaataagaaaggaatcaaccaggctatgttgaaatgcataactaaaactgaaggcttagagcttctccgtgaaatccacagtggtacttgtagatcacactcaggaccaagggcccttgcagccaaggtcattcatcatggattctattgccccgcagtcatgtgcacg

SEQ ID NO: 136287 - DNA, 414 bp, Zea Mays
acagaattgggggaaaagagaaattgggaggctctggtggacaatccgaggcaaggttcggtgcgttggatgcgtaattacctagtggagtcgtgggtgcgcccaatttataggctccgggggcggcggcgcatgaatttgggttggcgcggtggcggtcggagatgaaaggggtcattggcgctcgggattagtggctttcaccgtggcggctcttcggcgatcaccgggcatgtatggcgcgattcactgcgacgtggtacagcgctttagcatgtggcgcacagcggtaagcggccaacggcggcgaggtctatcccgaccgatcgacgagtaagtgggtacggtgagcttagccgtgaccgagcccgagtcgatccaggcgccaagatctttactctcctcagatatcct

SEQ ID NO: 136288 - DNA, 420 bp, Zea Mays
aggaaatgtccacaggtggtgcgagcagtcatcgaggattgcaagataatacttaaaaccagacatactgggaaccggagaggtccagagatcacaatgaataagatcaaaagggtaccaagcacgagactgggaagaggaaaagggaagacggacatggcgacctaactgacatgcatggcagaggtcagcattattgatatttttattacaagtaatggaagcagtgctggctaagcgggagagggcttcagaaccaggatgaccaaggcgttggtgccattgctttggagacgcagtggtgaggaagccagtggcagctgttgaggggcgaagcgggtagagggggccagagctattgcacctggtgatcacgtgttgggtcctgaggtccttcacagaaaaaccaaaggggtcaaa

SEQ ID NO: 136289 - DNA, 426 bp, Zea Mays
gccaggcgtttatcctcggccttgccaagagggagttatcctcggaggagaaactctaggtacggtgtgcgccagtctgaagttggggtggtcccgccctgctccccgtcgatctgcatggcttcgggtccgccagctggggggggtgtcgttgtcgggggttggttcggatgcctccttgggtaccaccgagagtttgtatacatccttggagaagacatttgaggaactgaggttcatctcgaggctatctttgctaatttgtcagcaacctcgttgtaccgtcgcgcaatgtgattaagttctaagccaaagaacatgtcctccaggcgtcgaacctttttgcaataggcttccattcttgcgtcgtggcagcttgaacttttttaataacatggtcgatgacgagctgggaatcccctcgaa

SEQ ID NO: 136290 - DNA, 929 bp, Zea Mays
gctgacccaatgattgatgaagtctcttgtggtttggatgctgcagattctcaagcagctagggtggccaagctcgtgcaggtgctgcagtccacccaacccatggaggacgtggcgtctcctactgtgagcactagatagctctttgctcctccaccgtaggtaccttccatccctagccttgatgaatttcttatgtcaatcactaggccgctcccagatccagtcctaggtagttgtctagtccaaacaaatcagcatgtcccctagttgactgatgctgcctccattattacaacagcagctgaggagtcttctccctatccctttcataaccttcctaccgaagatcaaacttgcaataatagtgtgcagaatttacctctgaccctgcaaactgtagatccctcttgcagtagacagtctagtggtgcttttgctggaaacccgcagctttcgagtcccattcaacgcaaaagcagcaggctagcaaaaaaggctaggaatagagtcggcaaaggagcactacaaatagctaaagatcttttggtcaaaaaattaaattcgacatctgatcgcaatgaactatctgtattatctgaacttgaggttgttgaacaactttcgcagcactttgatcgcccactgaccaaaggcaaggcggaggcaattatttcactggccaacctcggcacgaaggagacgaacaagatgaagaaatctaccagggcgacggtggcaccagtcgatgcagtggaatttgcggcgtaaggccatgtcattgggccagtggtgtgtggtagtagtttcccctatgatgtgtctctaaggaagtttgtgttcatggcttagtgtttggtggtctattattgccagtagcgagtgtttgtgtcctttgtgtttctggctttggatttgggatggcctgc

SEQ ID NO: 136291 - DNA, 521 bp, Zea Mays
cttatttgcacgccattatgtcgggacaaccaatccattcctaagattacatcaattatgtgggatggtagtacggctaagtctgccatgaatactaccccacttaaaagaatttggacttgggagcacttgaggtggcacagaatgtgggggacagatatcccccgggtccactagaaggcgaaagatccttgcacgaggcctcgggccatttaccccgcaaggccatctcatcgtgggccgggcgaagactactagcggaatgggccagaccgaaaaaggtgacggactcgagcccagacggtccatcgaatcatgcactattccaagaaaccgtccgactttcccatgcttggcaccctcgaatgttagggtggattagggatgagtcggcgagattttcgggagattggttaagtcggtttgctattagttaggagatacgtgatcatcatgtatgtaaggagtgccccatggtcgtgtatataaggcccagggggaaccccatcattttcatctat

SEQ ID NO: 136292 - DNA, 546 bp, Zea Mays
gacaggcttcttggttcataagtctcgatcttacagccgggtatcatcaaatcatgttgcgtccagaggacacatttaagacagcattccaaactcactcgggccattatgaatgttgtgttatggcgtttggcctcacaggggcaccagctacatttcaaaaggcgatgaatgcaacgttgtcttcactgctccgtcgctatgtattggtattttttgacgacatcttaatttacagctctagttttgcggaccatcttcagcatgttcgggcagttttggaattgttggttcgtgataagtggtaggttaagctgtcgaaatgctcatttgcgcagcagcagttgtcatatttaggccacatcatttccgctgcaggcgttgcaactgatccatcgaagattcaagcggtggcatcgtgggctaccccacgttcactcaaggaattgcgcagttttttgggcttggcgggttattatcggcggtttgcaggcacttcggtattctggccaagcctttgacagccttcctggaggaaggttcttt

SEQ ID NO: 136293 - DNA, 1030 bp, Zea Mays
gtggtgtctggtgcttggatgggacatggcaaggttgccagtcatgcagcctggggcagagaggaacacgggagagtgcgcacagcacatgagcatagagccatagacacatcaattcagagacagaactgatagggtgaggttcatgcttgttctggccagtctggcacatgggtatcgctgtcatttcgggtatgtgtttagagaaaataaacaagaaataacatcctctaagccgatcaattctaacagattttccataatgtttgtacctttcagtgatattttatggaattaagttctttcggtaaactcctcctatgttgatcggaattccttgagtcgtttcaacatagccggtcccaagcccggtaaaggaggagggttgtgttaggtccggcaaaccaacgtaaaaaccagccaaatcttatggagatgaaaccacagagaaaatcgttggggtgtaaccctcttagcgacgcgccatatcggaacccgggtatggtgttaaatgagcaagggtcgggccgtcaccccttaagtgacgcgtcgtctcttgatctggagccggtgataagtgagcaaggatcgggtcgtcgcatccttagtggcgcgctacatcggcgcccgggtgtagtggaaaatgagcaagggtctttgcatcttcctcggtaggtgcgaagggtaaggaagctagtcgagccaactaggatccatgtaggtagttggaacgtaggttccttaacaggtaagttacgagaaatagtcgatgttgtggtgaggagacgggtaaatattttatgcgttcaagagaccaagtggaaaggacaaaaggcgaaggaagtggaaggtacaggcttcaagttgtggtacatggggactgcagcaaacaagaattgagtaggcgtcttgatcgacaagagccttaaagatggggtagtagatgttaagaggctaggagatagaatcatcctagtcaaactggtcattggggacttggttctcaatgttatcagcgcgtatgctcctc

SEQ ID NO: 136294 - DNA, 409 bp, Zea Mays
ttgagtttgacttctctccttccttgacgaggttgatcttttatttctcgaccttgagctcattgattcgcggtgagtgcatatcatcggggtgggggaatgtggttaacatagatttggatgagataggctacatgatgtaggtctaaagttcatttgatgttaggtgggaatagatagattatgcaatccatcatgacactattggttgggttagctcttatgttcacggttgagttggtctaatgcactaattttaggtttaagtgcatgaggagagaacaagatttataggagtagggtccaatttattttactttcgttaacttgttaagggactgtccttaggttagctcaacttaagtttagacttcatcaggttagattaacctattaggttggatcagat

SEQ ID NO: 136295 - DNA, 328 bp, Zea Mays
gcgttattctcaatcttgctacgatttacactcttttggtgtgcgcacgtctcgcggcatccaggcccacgaaaagatcatgtccccgcaatctgggcagcttacgtctatcggacccacgaatcaaggaaccgacctctcattttttcagctcatctctcccgtaactctcgcggcggccgaaccctagccaaatctgtcgtcgtatgctgcttctcctccgcgcccgtccaaccctagactaatcgccgccgtgagcttcttgtccaccgcgcccgccgtgagcattaagattctccccccgtcgttccaccgccgtcgcattctc

SEQ ID NO: 136296 - DNA, 319 bp, Zea Mays
cctactaacggagcaatcagcttaagtcggcaatgacttaaggcggtgcgacatgctcacgcttacctaaactcggggtgaccactatgtcctactaacagagcaatcagcttaagtcggcaatgacttaaggcaatgcgacatgctcacgcttacctaaactcggggtgaccactatgccctactaacggagcaatcggcttaagtcggcaaagacttaaggcggtgcgacatgctcacgcttatctaactcagggtgaccactatgccctactaacggagcaatcggcttaagtcgggaatgacttaaggcgatgcg

SEQ ID NO: 136297 - DNA, 698 bp, Zea Mays
ctaggcttctttggctgactgcctgactcatccttcgatcactctatcttcttatgttatttgttcgactgtttagtcaacattagattttacgagactccatgcctcctttcaaacactgaggagtgcatggggtacaaagcggttaaattagattctaacttagggcttcttagtcttcttgttgacggatcatggtgttgtaggacctctctatcatgtatgagggtgctgagagtggtgcaacttcacttaacatcccttcggcagtctcgggcttgatagttaggtgatgtctactttgacgaggccttccctaggtgagtcttctctaggcttctttggtatataaggattttctctcgcattgaagagttgacagcaggctctaagccattattacgcaaggatctttgttctaatgtgtcatggccctgatgtggtcctagcgaaagagttgtcagcatgtcttgttgttgtggaaccaaaacaacattgagctagcttaatgtcttggctcgatacatcagttggccctaagacaaggatgggacattcatgtggctagtatctcagactgagctccccttaggtcaggaatcctcatgtcatggctaagcccctaaaccatgagcgctagcttgatcaatcttggccttctaatatatggggcctcctaagaggaggaccattcttaa

SEQ ID NO: 136298 - DNA, 478 bp, Zea Mays
gcgcttcagcatgtcatcttcaatctaaaatactccacgatcgaagtcctcgttcgcttggtcgaagacatcgaaatgcctacacccctctcaggacaaagcattcgcagccccctcgcaagtaatgagagacgcgtaggacatgagaaccatcacgatagacgggagcaactccagctcatcttgcaaccaccctagaaagcggagccccacctcctcccccgattcatcaaagggagcggtctgtgtgctaaggtcactatacgcatccacgaaaagcgtgtgcgcccgttcaaccccagcgcgggtggaggactccgtcctttcgcgatggccacgaatatcctttagctctagctctaggtcggcggtgcgcttgtggcagcttgggcctccgcacgagcggcctgagccttcgtgtgggctttttccgcatcctcctcatcagcaagtcggcggccgaggtcctccttctctt

SEQ ID NO: 136299 - DNA, 441 bp, Zea Mays
agaagacacaaaggagtaatcttcacaaaaatagaaattctagaacgagtagttactcccttgtttatgtctctaaggatcatatccaccaggtggtctctttgaatagtgtggtggactcttgggtgtggcacttagattttgtgtggtggtacttcatcttcatcctccttgtcttattcttcctcaacccccacttgactatcgccacgatcttgagcttgttgttcctcattttgagttggggttgagcttgtgtggaggatggttaatcttgcacttgttgaggttcttgtgggcacacgtctccaatggacttgttgaggttcacgtgtcatatttagagtgtcccatatctcctcagcgctctaagtcgttcaccttgttatattcttttaaggtggcaccttctttttgattggcaccttccttctgaggtgg

SEQ ID NO: 136300 - DNA, 500 bp, Zea Mays
ttcacccgctctcggtctctcgctctcaatcaccgtcgcccgagctcgccgaagaagcgtgcccaccgtaccgtccacttgaagctccaaacaccgtaccgagcctccccgagtgccgtcccaagttgatgaacctttccccatgctctggttgccctgattttgccttgccgtagtgaattcacgctcaccggagctgtgcctcgctggtctgccgcacccgcatggcgtctggccgatttagctctgccccatgcccatgctttggctctaggtgttccccatccctcaccggaggtcgtgccagacttggcacacccgattccccctcctcgtggctgagattgctcgtcggagtaaccccgaccgccagagcgccccctctgccatccactcgcctcctgtcacgttctcacagctagaaccccgccattgaattcgctgggcccccctcactggtcctagccatctccgacgaccccagatcccttggagtccgc

SEQ ID NO: 136301 - DNA, 379 bp, Zea Mays
gtcaccgatccggggtatgaggaggtttaaagttaaagggaagttgtaccctcgctttattggacccttcttgatcctaaagcaagtgggggaagttgcctatcaactggagttacctgaccatcttgtggatatacatgatgtcttccatgtgtcccaattgaagaaatgtctaagggtacccgaagagcagctaactatggaggatcttagtgttcaagatgatctgacttatatggagtatcctatcaagatccttgataccttgactcgtgtcacgaggtgtaaagtaatcaaaatgtgcaaagtgcaatggagtcaccatggtgaagataaagctacgtgggaaagagaagatgagctacgagtagactttccc

SEQ ID NO: 136302 - DNA, 607 bp, Zea Mays
gaacaagtaagaatcataaccttcattccattttgttcctgcatgcagacccatgatgttgtattgtctaatccagtgtgcaattcatcatgtttcttatatcttgatgattctgattttgattttaagtctaccctgcgagaataagtaagaatcataaccttaatttcattttgttcctgcatgcagacccatcacccatgatgttgtattgtctaatccattgtgcaattcatcatatttcttatatctctattctactactttaatgctatgtttagcatgtgtaatatttcccaatcatggttcagctagaatctgttgcagtcgaatatgagggcaacagttattgtatattagaatatgaccttccatctatgcataaagcatggctgccagctggttgagttgataagtctgattatatctgataattggtaatttatcaggcgataaatttaaatttatggatgaaatttgactgaaaatggggaaaacatgagtttgaccatttttttcaaatcaagtatgatatattggtatgtttatagtttataggacctcatcgatatcaccaacactttgcaacgtactgctgagattctgg

SEQ ID NO: 136303 - DNA, 344 bp, Zea Mays
tggtaatgcatctgaagattgagtttgacttctctctttcctttgcgaggttgatctcttccttcttgctcttcagtgtctccatcttggtttgggacaagaggttaagatagatctgtatgtcacacgtaggtagagcagctagtttagtagatggctatgagtttaatgagattagttagagtcgggtttggtcgtctgcttctagatgggtgggataggttagaatcttttgggataagatggattatatgatgtaggtagatcagaatctcggttaggttaaaacagatgggttatgcaaccacggatggttaaggtagttgcatatggttaggtagttg

SEQ ID NO: 136304 - DNA, 807 bp, Zea Mays
gatcagaacgccagtcagataactcaccgtcggcgaccgtgcgcccggattcgtgcccgccgcggtgattcgtgctcggcgcagttggataatggcaaggggtaagaaatatcccccgtggatggactctgaccactattctactccggctgccgtacccgcttgagtcacggccgctttggattggctcgctggagttagccaccccacaaccttgtgtttttgcctcggtgctttaaccacgccgcactgagtcacctcaacccattcggtgatcaccggtgagcttgccacggtaaatgccaccaatcgcttgcgccagtgcacccccttctctccgaccgccaccgcgcgagctcaaattcacgggccaccgctcaagggtcctataaattgagcacacccttggctccgctatgtaattgtgcactcaacacacccacctgtgcctccaattattcaccagaacccccgaattgctcagttcccccaaatcagttttctgtcgccatgaacaagctctcaccgtggccagtgcactccagttctgatcttgtcctctgctctcttgtttcagcacccttacatgcccctgatgcttcttgacccgaccgattaggctagaaccccttagatcaccgggaacacttcatgttgtccattgtggccgctgtcaccatgaatagggtgatgtagagctcaaatccagcaattaagtgagggaaaatagtcgcgtagggttgaattcggtgtccagcaaaggggagggctagttgttgcttagtctggccagtacaagctcgtcgg

SEQ ID NO: 136305 - DNA, 429 bp, Zea Mays
tagattctgcatttacgttaatttggacgattttcacagaagagatttacgtcaatttaaacaattttcacagaagatatccccccctataagcgggcaggctgagaagcaaaacgtttgtttggatgtaagaagtcgattctgactaccagaatctgcctaggagccaaaacaaacaggcccatatcatggttgcaccctagggtatccatctttcaaaatgcttgattaattaaaggctcatcatcaagcatcaatgcatgaatcccttgcagctagactagatacaatcacttgccttaccaatatataatacatacaggagcccgtgcatttgtccagaaccacctgctagataatcacactactagactagcagcaccgagatcgagatgttaatacctaagaacttactagctactctcctct

SEQ ID NO: 136306 - DNA, 458 bp, Zea Mays
tgctgctcagtgtcagtgtggcgccggccgccggaagagagggactgagctgccatgccatcgtccatcggccatcgccttcagttcctgcgtgctttggcttcgtttcgaactggacctcctctcctgatgctcccctccagtcgtcactcataggaacaagtactccgtagtccgtacgccggtggacgatgcctgcaacctggatgtgctggtcctggacccagtgtccgtgtccgtcagattcaacgcggactgtactacttgagtatgcgatggcaatgccatgtgtccacgactaaccggcgcccgccattgacccagtacagcctccgggctccggccacagacgggacgggacggccggcagtggctttgcgtgcgagcttggcggatcgactgctgcgactgcgacagagaatcaaagaaccggccggctgcagccttcagcttttatc

SEQ ID NO: 136307 - DNA, 428 bp, Zea Mays
atctgcctacacctttcttgtcagccgtgccaaagggcagttcaaggtcatggaatgtggaggcggaatttgtgtttctggtgaggtcggatctgcaaaatgaggtgctctcagtgaatcccaggtgagagacagggaatcagtcggattggttgccatttgctgacaaggacaggttggttggaccatatgtggtcttgacccgggcttggccttattgaccaggccagatcccagggcaggcgccatgattctgcaaggctgcaactccatttaaatctgctgctcatcttcacgtacgtggggcactgctagcacgacgcagctggtaataaaatggcggagggaatgctcatcggtaacaggacaacgctcaaaggaaatttgagcccagattatttgactcatctgttctctcagctaagttc

SEQ ID NO: 136308 - DNA, 461 bp, Zea Mays
gccaaatcatcactcgagaaagcaatacttcaggcttggctcggcggttacctccaaaacaccggcagtgtcaagcatcgctaggcggttacctctaaaacgccagcaacatcaagcattgcccgacgttacctctaaaacgccagcaacatcaagcattgccagacggttacctctaaaacgccagcaacatcaagcatcactcggcgtttgcctctaaaacgctggtgtcatcagctatcgctcggcggttatttctaaaaacgtcgatagcatttagacacaaagatgaactgtcaagcgattataaaaaaaggaaggcagcaatagggcaacgtgcactcagagcaaccaaagttcttcattaaataaaggagggaagttacacaaattcaaagactgaccccattattagtcaaccttttcttccccttttaactacattacattaccctacatta

SEQ ID NO: 136309 - DNA, 422 bp, Zea Mays
gaaaaatagaaaagggaaaaccctcacctatgttcggcccactcccttccgaccccattccagtgctggcccattacgtcatgccaccagccagcccattcccacacagtcgggcgcgtcgacgggtgggccaccagggttagcgtctcccgcggtgtttgcacgaatgaccgtgtctttgtcgtgtagggccgcctgtgcaagttcttttgctcgcgcatgcgaactcagtgtcgtatcgcttatagtaggacccgcctatcatctctttattttgtcgtcgtattaaactcgaacgaaattgtgaaaccgtccgcgatctccgtgatctcatcctgctatgcatctcctggcctggtgcccctatataaatacaagagcatctcgacaccctccttcctcatccaatctcgatgcccttg

SEQ ID NO: 136310 - DNA, 654 bp, Zea Mays
gaaggggtatcaggtgtcaacagacgttcgatcaactctggacgcgccagtttatgtgtagcttctaactaaccggcgtgctacaggagtcgtcggatcgagaatggaggtctcagattgaaaaacactctggtggcccatacacgtctgatctaaatctaaggcctcaggtttgtttggtcgaatcggtgtccgagatctaatcatagccgcacaccaggagatcaacggccagtggccatccatcctaacctcaaatcgtggccgcaccaatttaatcagatggcccaaccttttcttctacctccgaccgaccgcgacgacagccactagccaacggtggcgccatgtacggactccccgatccacgctataggtcggtaccctatgattcttacgatgcagcacaaataggagatcaaggcaaattccatggaagtattcttacccaagacagaggcgccggacatgctgctcgcttcgtgccgcgccctggtcgctaaccccttgctccggcgaggaattttgttcacaattcacaccaaccggacccagcgataccccttgcatgaccggtgtaagtagtcgagtcccctcgacccaactgcggagactctacgatgccccacggtggccaccctcttcttccctctc

SEQ ID NO: 136311 - DNA, 2221 bp, Zea Mays
ctagaatattcccctgaatctgaaagcttccatctaaaagtgtcaggaacctctggctataggataaccccttgcacttgatcctagacctggacataatcaatcagaactggaatggttaggccccttgaatatccatccaccacccacttgagattatttagagcttcagctacagttctttattgatcactcttcttgcaatattttggatcaggtagggggccaaatcagcaatggaattaccatttaaccatttgtctttccaaaacaggatccttttactatttccaagcactggagaagtggctgtatcaaaaaaaggtcgtagcattccgagggaccccaatttggaagccaacccaaggacggggccagtccaccttatgggcccgtaactaacggattttcagagcccagcctaatttctccagatttagaattcccagaccgccatattctagagggcgttgcaccgtttcccaagacacaaggcaattgcctccattagccttctcctttcccttccacagaaaaccttttcttcctttgtctatagctttgatgacccatttagggaggtcaaccgccaacatttgataaatgggggaggctgttagaacagcacgtaccatgaccaaacgacccgctctattcattaaagaggctttccaacccggcaagtaatcagagactttgtccacaagccgctgtagggcttccttaggtggtttatgaatagaaagaggcaggccaaggtaggtaataggaaaatcagtgatagaacaggccaaaatttcctcagtttggagcctttcttcatcggtacagtgtataggagccactgaactttttgataaattggtctgcagccctgagacatgaccaaagagctcaagaatggctttgataaccagcaggtccatccggtcaggccttagaaaaatcactgcgtcatcagcataaaaagaaatccggtgtctgccgtgctgaatagcaatagggcttaacatattattcctcatagcataatcaaccagataattaagcatatccattaccaagatgaagaccatgggagaaagggggtctccctgacgaagtccacgccatggtggacaggcataccaggttcaccgttgacaagaattcgggtggatgaagtggaaaggagcaaacaaatgaggttgcaccaacgctgtgcaaaacccacatatttcatggtctctagcactagcagaaagggccaagaaatggagtcgaatgccttagagatatcaagtttgaggagcacatgagcttctttcttgtgcaaggccctgaccatctgctgtacaaaaatataattatcatgtatgtttcgacccctggtgaaagcactttggttggctgagatcaaagaaggtagcagaggtgccaatctgtttgataggatctttgtcactagttttgcaaagctgtgaatcagactaatgggcctgtagtctactagtctttcacttgtgaggcgtcaactttcttgggaaggagggagatgaaggcagaattaagtaacctgaacttggtcacatgacctcgaaaaatgtcagtaagagcttccaataaatcatgtttgataatgctccagcaaactttataaaagcgaccagtgaaaccgttgggacccggtgctttatccgaaggtaggccccggatagaatcccaaaattcctcctctgaaaatgggacttccaaaactgaaagatcatgttgctgcaccccaatctcaggaaaatcaagcgtgaaatccctatgagctgctgttccaagcagattttcatagaaatctgaaactgcttcatgtttttcctcttgtgtgactgcctgagagctttccgtttgcaacttggcaataaaattcttctttttcctgaaacgggcctgctggtggaagaacgaggtgttagcatcgccttcacgaagatataacttctagagcgcagccgggcaatggttcgttccagggaagataaaccaagacaatgcaatttgagttttttcctcaaccactcactatcagaaagctccctggaatccctagcaacttccagcctatgcaaaatctcttttgccatctcaagctggagctttatgtttcccacatttctttgcccccatctctgtaagtctttactgagacgttgcagcttcagaaataggccctcaactgcacaggtagact

SEQ ID NO: 136312 - DNA, 823 bp, Zea Mays
gatattttgggctgaaagtgctgactaggttcagtgttatgggtgtgtctgtgcatctgtgaggaacttgggcatgaaagacacgtaggggatgtccatgtactgctggcaccctgggaatacatttgaactgaatttgtgcaagtccagggacacctgccccactttagctgccataaaagacatggtttagtgaacttcttttccctaagttccttgcagcaggtggtccctgtgccttcaggttcgtgtagcttctcctttctccagccatcattgtgctctgtccagggctgcacgcgccaaactcctatgagttgtgaccacgcctaccaatttgtcacctcgtcgtggccagcctagctcaggcaagtattggtatgtgttgtgcttgttccatgtcccccttagatcagtgaagctcaccgagctgttatccctaacgatacagtcatgttttggccggaacaagagcgcaccgccgtagaatgacaccgtgaacagctccgccgtcgcccgaccaacttgcttcgacttcggccggttttccacgagcataggaatctaggtatgtcactgatgctacccgtggtgtttggttaaactttactgtagaagtggctcaagtatgggctcgccggacttagctcgctgtcatggccgtgggcggcataggtcaagtgcagtagtggttcgattcttgaagtatatttgactatacctcagggtcggagttagggtgctggtcctcaatgagaaactcaccgacgatggaatcgggtgagcacggctaggtgttcaacctgtgcgagccgtcagagtg

SEQ ID NO: 136313 - DNA, 568 bp, Zea Mays
ccccaagagctttttgcttgggcggcgccgcgccgcgccgcaacacgccgcaccggcaagattttagttggagcacaggcaaggttgctggatgtatgatgcgcgcgtgcgctctgacctctagatcgcccccacactactgctgcagcaggtactggtcactccacgggtagctctatctctctctctctctctagattcggtcatttgctttgtcaccgctaccaacttggaatatgcaaatgtttggtcgattggagtttgatttttgctcggcatctatggcgcaggtgaggggatccttcaagcagacagtccacaaaaggagttggctcaagcagataccttgggacgaagacgaactagcgagatcaagaagctggcggcaagcaagtggtgggagcgcggcggtgagggcgtcatggccggaatggatcccggcggcggcggtggggccgcgtcgcactacctggaactcctccgtgcgcagcaacagcagctgctacagcagcaccagcaggcgccgctatccccgtcctcccacgtcaagatggagcgctccgcgccg

SEQ ID NO: 136314 - DNA, 368 bp, Zea Mays
ggatgctcatgatggtcgcgtggttgaggagtgatgtaggggcaagccaagtagccgtcgcttcccctgtaattataagtcgagtctatatgtgttatacgttccctaaaattatgcttcacctatagtgtatgatcgtgtttaggactttgaatggatgttttcgagtggacaaatagtttcctaatgcaattatgtgtatggtgtttatagtgacactttatctcaaaaagtgttatgcctgcgcataaataagaaataggtgtatttggtatagtgtggattgattttgggtgcatgtatcttaagaaatggattagtgcgcatataggagatgaatgtgtgtgatgaaatggtgacatgccttt

SEQ ID NO: 136315 - DNA, 556 bp, Zea Mays
gtatgaaaaatcgaagtctttttctacagaactccgcacagaagcctacgggaatagcctgatcaacgaaagcgcgcagcttcatcacacataattatggttacacacatacagcgagggcatcacacattacatcgtctcaaccttcgggatgatacccatctccctatagttgaacaacattatcctcaattcctcacccgcaaacagacttcgtagctccccctcacccacactcaccccagccggcgaggacaacaattctcgtttgccagtcccatccacacgaagacgaccaccctccatctcaccatgatgacgcctttcaccttgcggcgactcacccactctccgtttcgccaccgctcttcgccgcctacgcccagcactcgcacccagatgatcctcagcacccatcacacgtggaggagtctccgccgcagccacatccaacgctgcgaaataatccaagtcctcttccgaagacccctccgtccacacaatcgaactcccagaatcatcagactcaaaaaacttagacacagaatcatcagaa

SEQ ID NO: 136316 - DNA, 357 bp, Zea Mays
ggagaggggaaggtcccaagtcccataagatgattgaggcaagtgccaatactgggtggaggagaagactgatcatctatccaccgtatgtcccttgggaggccatagactatcctatttataggctcaatacgacttcctggaggacgggagtaggcaacatacttgtgagccgacgtcttgcgtaccctgtaggtggcatggtcttgtactttgttgttgacttgtgcctgcttgtttttcgctgagagccgaggccgaagccgagggctgggccacgttcttgtgcccctctagggaggggttgcccataccgtagtggttgacacagggttaggtatggaaaaggcttcttaa

SEQ ID NO: 136317 - DNA, 430 bp, Zea Mays
gaatttcccgacaccgatggatgtttgctggtgttcgattcaccttcgccggcaaccttgaggcgtgaggtgattttggtgatcaactcgtcctttgtgagattgagccgcggtgccacgacaccacgttccttcacgaggcgctccttggccgctttgagttccccaccagttcatcgactaaaacctcactcaaatcaagtagtgtttcaattgaggcagcaatctgatcgaacttgggagggagagcctgcaggagcttccacactatctcctcctccgtgtactcttcatgagatcggacagttcggtcgtgatccgaccaacctacgtgccgaagtagtccacagatctgccatcttcaaacacgagggcattaaagtcgcgcttgagggagctcgccttggccttcctcacacgatcattgccc

SEQ ID NO: 136318 - DNA, 489 bp, Zea Mays
gggagctctgactctgctgactgtagcgtgatggagagggtccagttgtttattgaagcttggacccctgggtggaagcccaaagggtcgagctctctggtgacgttcttgctgttgcgctcggaggacttggaatttcctcttgatgtgccctttttcttcctcttttgctctttccacttgaatagctttgttggagaggtgagagaagctgtggaagtcttggctggcaaggatggtcttaagctcgggtcttatcctctcaggaaacgggccatctttctggactcggtgctgacatcctcaggcgcgtagcgggccagctctgtgaacttgtgcacatactcactgactgttctcccgccttgagttagctcccggaactcatcctccttgagttgaactatcccctggggtacgtggtgctcacggaaggctgcttcgaaatctgcccaggtagcatctctgacggcttcactgaaagtgtcc

SEQ ID NO: 136319 - DNA, 536 bp, Zea Mays
aggcactgtagactgtccagtgcgcccatgttgcgttttaaaaaaaggcctccagcccgcgcccgagccataggccattgtctttctttgttttctagctcctctcttctctggcgatctgctctccctcgtcggtgacctcccctcaccggcgacaaccgtgctccggcgtcctccggtgcttgtgcctgcccttcctctggtgagcagcccaagctcctcctacctccctcttctctctctgttagtcagtgctgtgaactcctatcccacctcttgtgccaatttcaaattcttatgaatcccagtgaatccaagtgatggaatgtgttcctatgtgcccttgaatatccctgcaggtttctagctccctttgggagggtttcaatcctcaaatggccatatctccaaaaacctaattcaccgcacgccacgtgttcggtgaaatgtccaaaccagacaaaaatgcttcgattgaacccaaatttttcaggcaccttcacaacacttctagtaacatattcgccaaatttcac

SEQ ID NO: 136320 - DNA, 462 bp, Zea Mays
gatagcatgctagatggagatattagagcagagaagattggcaagcgaactgtgctgtcgacatcgtttattggcggtcctcgtgacatgagacgtcggtatatggatgctatggctctggtgcgcaagtttggtaaaccagacatctttcttaccatgacatgtaaccctaactgggatgagataaggagggagcttctccctgggcagacaccgcaagatcgttcggatcttgtagtgcgtgtctttcatgcaaagctacaggagttaaagcataggctgactaaacaggatattcttggtaaggttcgagcctacgtctatgtcgtggagtttcagaagcggggtttgccgcatgcccattttctactcataatgcagaggaagtacaagctcacatgccctgagcagtatgaccttttgatctcagctgagatcccaagcaacaagtaccctgaacta

SEQ ID NO: 136321 - DNA, 277 bp, Zea Mays
gtcgagtaagcatgctgattggtaataaacggttcgagtgcccttgagaacgagatcctttattgatgaggtatttaccgattacagaatacaatgctcccccgatagcttttgaaatcttgctaagggtaaaacttcctgagatgctctatattccatgaattccctatttccgtgccatccatttgagtaagcctatatgatcctggccgagtgacctctgctactataaatgacccttcccatagtggtgacaatttgtgtcgtccttcccccg

SEQ ID NO: 136322 - DNA, 553 bp, Zea Mays
cccttactcaagtgctcacaaagagtgggtgatacaaattgttcttggagtcatccacaacttttggagactcccaaggcaaaatacaattcgttaaggaacaacatgttccaaaaacaatgaattcgcaaaggaaacacccgaccatgatcctagaagtggttgcatcttatgacttatggatctagcatgcatactttggcatgcccagtagcagtaacgacatcaacattttgcatcattcgcacatattctctaggcatctaaatgtggaggaacctctggttgctttcacgatcaacagtaaccaatgtgacatggggtattaccttgtggacggtatttacccctattggctagcttttgtgaaaacagtctgccaccctgctaaccctcgcataaaacacttttcagcgaaggaagagtctgctaaaaaggatatagaaagagcgtttgatgtgcttcaggctaggtgggcagtgatacatggacctacttacggttggtcgccacccaacatccaagacataatgaagcatgcatcatacttcac

SEQ ID NO: 136323 - DNA, 288 bp, Zea Mays
gggctggcgcgtaaaaatgatctagactcagttactcccgggaatagaccatgggttgtttagcaattttctcggggactcttatgtaaaagtgcctggcgaagaggtatcgtgggcctacagccgctagatctacattctgtggtggagattagatcgagcctccgccaaaccggtatacaattctatccatccgatgataacccaacggtcacgatttaatgcttcgaatcggtatgacacatctaatcccaaccctccatcatagatcgcacgaccatgtgcctt

SEQ ID NO: 136324 - DNA, 569 bp, Zea Mays
cacaaaatccatggtgatatgctcccacttccactctagaatttccaatggcttcaataaacctataggccttcacacgctgacatacctcacaggcggccacatacttagaaatgtcaaccttcatcctcttccaccagaagttttgcttcaaatctctgtacattttggtttcgccagggtgaacggtgtaaggcgttttatgagcttctctcaagatatccatcttcacctctgatttctgaggcacacaaagacgacccctaaaacgaaccaaatcattctcatcaacggtgaactcatagggtttaccatcgccaaccctcttttgagcttcctgcaataaacgatcctgctgctgagccacacacactctctccaggagggaggattgaatgagcatccgagtctcctcactagcggtgccaacatagcataaagcgatccccatacagtccagttctgtgatcaaaggaaaggccacttttggaaccccaaacctgctaagggcatcagccaccacatttgccttccccaggtgataatgaatggacagatcataatcttta

SEQ ID NO: 136325 - DNA, 925 bp, Zea Mays
agagatcgcttggatgctcatatattaatatctattagtcttgaattaagataattgcatgggtatttaaacagtggatattaacatccaaacaaggcctaagacattatttgatgtccatatattcatatcaatctatatatggtgggggcgttttagggtaaattttagttcaaattttactctaaactatataggaaacatatcatgtgcaatcgaaccaattagtgcaaccatacaaccaagacatagtgatgaaggtgggatggcctgtttaaagtatcatttttcaaaacaactctcccactcttcctatatatttttaaacaggctttcctatctctatccttctgtcttggttgcacacattggttgcaccggttgcgccaaataatttggttgcacctgatgcgttcccaactatgtaggaacaaagttttttttagtattgaagcaatactgcagtattgaacaatatattatatattttgaggtgtttgggaactcatttttcttgacagtgttccaatgcttacagttttcttatccatagtcaacactgcacggtatacatgatgtatgcgtaccattacaagatgtgcagctacatacatctcacgttaaacaaagcaactccggctcataagtcgttgtcttacggtaccgtgtgtccatttcagatgatgcatggtacctctaaacaattccgcaacgttattgtaccagatggcaaagtcgctctaacagatttcaatcagaattcataaaaaagggataatatacaaacacaagaactaaaattttgattggtatagtgctactcctgtcatatgctttccgagaatgtaagcgagttataagacccattgtctttcactctagactttattcgtatagtagagtttaaatataaagattatgatgg

SEQ ID NO: 136326 - DNA, 303 bp, Zea Mays
atttggaaagagtagaaactcatctgaggggcagctcaatattgtacatgcacagccaagcttgcaaacaacagggcaacatcacaagtcaaaggatcacaagaaatacagaaaacactcacagttcatcacatgccttaatggtccacaaattaaatagcagtacagcacacaataattgttttatggtccacacacattaggataagtaaataactagatattaactacacggcgcctagcgcgtgcacaccgtgtctaggcgcgcccagcgcctaatactgcgcctagtccataaacgag

SEQ ID NO: 136327 - DNA, 672 bp, Zea Mays
agcaaatctgcgaggcggagcgactgaccaagtccccactgagcaagcctacgaggcggagcgatcgaccaagtcctcaccgagcaactcggcggggtggaggtcctagtctagtgctactaacccacgtcagctatgacatgacacatcatcaccaagttacgttcgaacatacgtgcagcatacctaaagagtgtcgggaggtcaccgtcaacatgactgcatgaccctatgaaaggtctcaggtgtatccccactaccccgtgggttcagtcaacctcagccgttggaggacctcaacacctgagtctctatagtgacccatatatccggaaagacgagacagtatgccataccgagtgtatgccaatgcacgatggcaggtaacacaaggctagtgacgactggcgaagccgcccatgcacgaccacaccataagactgacctgtgggacccgccatgcactactacgaatagatcaacaacagattcactacagggacctgtatgatggacgagcaaggcggtacaccataccgggagtacaacaacgcacaaccctacagacaacctcagggataccacgtcaaccctggggcaacagacctctcactctagtagaaaacatgtcatctctctaaggttctttccttgagctatataagggaaaac

SEQ ID NO: 136328 - DNA, 518 bp, Zea Mays
gatttgtgtaccctgactaccggtacccgccgcgggggcagaaaagaaagggtgcaacttctgggaaggatgttgcttcagctgctccaagcgagcccgcgccgaagaagaaaaaggtgaaggttcttactcaccaaccgcgctacattgaggcggccacagtgcctgaatttggcggtgagacctcttcggctactgaagccaaaggacctgctcttacgcagaggattgaagagccggctacaatgccgaaggctgacaaaattgaagaaccgagaaccgaagagacgaaaacatcagaagttctaagcccttcggtaggagtggaggtgccgaagacacaaaaagatctggcagcaacccccaagagaaaaaggaaggctagtgtattagatgtgctggagacgataaaaacttcaagccctactccaggaaaaattgccaaggcttcgaaaacatagattgaaaccgagacaaagtcgaccgaaaccgaagcttcaatgagccgggccgatgcc

SEQ ID NO: 136329 - DNA, 607 bp, Zea Mays
gggaaaagatggggaaattctatctgaagctcttcttctctctcccaagtaacttcatcctctccatgatgactccattgcactttgtatattttgatcactttgttccttgtaactcgagtcaaagtgtcaatgatcttgattggatactctgtgtaagttagatcaccttgcacactgaattcttccattggtaactgttcctctcaaacacgaagacacttcttgagttgagatacgtggaatacatcatgcacatcagatagatgatctggtagctcaagctggtaggccatctcttcaactcacctaaagattctgaagggcccaataaagcgaggggatagcttgcctttaactttgaatcttctcattccacgaattggtgacaccttgaggtacacatggtcaccctctttgaattccagtggtcttctccggttgtcagcatagctcttctgccgagtctatgctatcctcaagttctctcggatcatacgaacttgttcttctgcctcttgagtaaattcaggcccatagaactgcctttcaccagtctgatcacaatatagaggagttctgcactttctaccatgtaaagcttcaa

SEQ ID NO: 136330 - DNA, 483 bp, Zea Mays
accaaagtaagcaaatattaaataacagaatgtaaaatgcaatctatttgctaggatacaaatgcaaatataagatttttatgatggttaaagataccacttgtagatatttaaataaaaaattctttccaatgctaatttttctcatattgtggtattatggacttaagtctctccctagctccataatccattttctctctttcttcaaccattcttccaaattaggataacatctatgtattttaaaaaactctccctatccaaatacaatttaaccacagtagttagtttttgtgtatgattgataccaacacgacttgataccaaatgaaaatatttatgaaaaagtttgaattggagggggttagtagttggttcgtagtggtcatgtcctacccgagttgtgttttatggtattttcttaggtgattgtgtcttcaaccctttggtctagggtttggcatgaagtttgtattggac

SEQ ID NO: 136331 - DNA, 369 bp, Zea Mays
gataaatgcaggggctctttagtgaaattgccatcgcgaaggggtactggccaaatctggccgttggattgaggacgagtgacaccgattagatcggccccttgccgaaccggtacggcacaacagccgttggattctatatctatggctacgatcagctttaccagagatcgatccgctacgtcgtgcgagccgttagatataggatccacagcccacgcgagcgcacccactcttttaccccctgcccctcagatcaccaattaacggtctgggttacttggatcgaaaagctacgcccatatgatctcgaccgtcggtcaccagatcaaaggccacccgattttcttccccggcgcgacatccgcg

SEQ ID NO: 136332 - DNA, 367 bp, Zea Mays
tgcagatcaaagaggggcgatactggcgctggagaagggcttggaccacagaccagatcgacagaccaagacggcacacatgtcaaagctagcgatcgagcgagcaagctggccacacagtgtatgtcctttcagacaacatcaccgaacaatgcaagtcccacatctgcaagcgagctaacaagtcatctgcaagtcccacatcgaataatgatgcagcaggtggctttagtttgcacccacggccgtatattccatcgattagggttcggcctgctggccaggtgctgcctgcttgcttgggatgtatcaggaatcatggccagcttttcctgctttccagggacatgctgctcgccgcagtcgc

SEQ ID NO: 136333 - DNA, 572 bp, Zea Mays
ggcatgggatgacctcaacccagcatcgggcacgtcaacgcaagcctccattgcaccatcatccactggctccgataacaagtcctctgggaccatatcctccagagtctgatcaaagttggccagggacagttcttgtagaccaatgagggcagacaaagcaggagagggaactccactactttcaccactggcgatgaactgccaactgtttttccgagtcaaaggaatctcattttcttcctcctcatcatccacattggcaacacaagcagcacccacattgggatcaacagcggattgggtacacccattggggtcagcgtcggtaaatccagtcgcaggcacttcttcagtagcaggaactgaggtaccagcgtcctgatcaaaactggatactcgccagaggcgtcttcttttcttcttctgctcatcagcaaaaggatcaggctgattggttcggcaagggcgcctcgggcgagtactgtcaggcttccgaacatccaaagtcgtatcagcctctgggaggggcgccactaccaacgtcccagcaggagcaacgtcggatgaat

SEQ ID NO: 136334 - DNA, 416 bp, Zea Mays
acaactttgctaaagagagattaacaaggcatcatatgaaaacttgaaattcgggcactgtaaaatgatctgtcaggcagactgatggtgtcgcgccatggtacagtgcaccggggggatcaggttcagaacctcaccgacgacgatctctatgttgtgattcccgccgctgccgcgatccgtgttcactggtaaggtgataaccaagataaggtaaagatcttggcactggattaactcgggctcgagcgtggatgaggttcatcgtacccccttgccttgcggccggcgcggataagttcaccggtgatggccgcctgctggtcttgtgccacgtgctctggtacctccactgcatcgccgtgaccaatcataactctccgttgatcgccagagtgattgccacggtaatagga

SEQ ID NO: 136335 - DNA, 654 bp, Zea Mays
agagatgctacctgggcagaattcgaaacagctttctgtgagcaccatgtaccccaggggatagttcaactcaaggaggatgaattccgggagctaactcaaggcgggaaaacagtcaatgagtatgtgcacaagttcacagagttggcccgttacgcgcctgacgatgtcagcaccgagtctaggaagatggcacgttttctgaaaggactaagacccaagcttaagaccatcctcgccagccaagacttcctcaacttttctcacctctccaacaaggctatccaagtggaaagggcgaaagaggaagaaaaagggcacctcaataggaaattccaagttctccgagctcaacagcaagaacgtcaccagagagctcgaccctttgggcttccaccaaggggaccaagcttcaataaatcatctggacccactccatcacgctacagtcagcagagtcagagctcccttcaggcaccctccgttgcaagcaaccaaccgccagctaatgcctgttggcactgcggagaccccagtcacttcaagaataactgccctcagttgaaggcacccgggccgacctactccaactcggtgaatggccccaagattccctcagcacctacctccaaggcacctccttcctacagccag

SEQ ID NO: 136336 - DNA, 363 bp, Zea Mays
ttcatccaatattttctttctgagttcgggattcttaggaacaaccaatcggtcttcaaaccatagaactcccttgctgtcctgacgaaagcatttgtacttatctaccttctgttcgagcatttccttaataacttgaactcccttgtcaccaatctgggccataattatctgctcatgtaaagtgggctccactgagatataattcaaggtacctgaggaaacaacttctatgttcagcttgcataactcgtcacacagagtggcgatcttggagtccatagttacacagttgcactgggccttccgacttaaggcatctgccacaacattggccttgccaggatggtaatgcacttccag

SEQ ID NO: 136337 - DNA, 476 bp, Zea Mays
cttctctggccttcgtctggtaatgcagctcatgactcggcagaaagcttcagcatttgggtctattccttggcttcgaagggcccagatgaagacgctgagtctaacgatagcgttaggggtcagctgatgaagatatatttcgtaattatccaaaacttcccccaatcatctcgttcaagggaaaccgcaatcccgctctgaaaaaacttttgaaaactaccacctcatcatttttcggtgtcggagtggtttcttcctcggcaaaacgaatcagcttctccgaagtagcccaacttcgtcatcatgggcatatcagctttagaaatggtagattttccaaaatccaagtggctaggttttgacgggatcagaatgctataatcttcttcttctccttcattggcgatttcttcctcaacatcttgttcagtttcagcagtaggtgcaccttgttcaatggcttcctctgtcac

SEQ ID NO: 136338 - DNA, 332 bp, Zea Mays
gccggatcagcacacgtgcgcaaaaacggccaacaggccacattacaatccaagttgcagttacatacacttagcgagggcaccacatactacatcggctcaaccttcgggatgatgcccaactccctataattgaacaatattattctcaattcctcaccctcaaaaagattccgtagatccccctcaccaatgctcgtcccaattggcgaggataatagttctcgtttaccaaaccggtctactcgaagacggtcccgctccatccccatatggcggcgcctaccacttcacgaaacctcacccacactatgcttcgacaccacccttcg

SEQ ID NO: 136339 - DNA, 400 bp, Zea Mays
gccagaagaatttttgggcggtcttcgatgttattatggagattgccctggcctcaatccactttgtgaaatattcaacggcgatgaaggtgaacttgagattcccttgagctgtgggcagtggtccaatgatgtccagcccccagcgttgaagtggccatgtatgggcggtgagcttggtgaattgtgaagggtggactgagcgaggagagaacttctggcatgcttcgcatgaccttgtgactcaattggcagtacaaattattgcgggccaaaaaaatccctgacgaatcaccttggcagcgagggccctgggtcctgagtgtgagccgtaggttccgctgtggacttcgcggaggatttctatgccttcggtttcagttatgcatttcagcatggg

SEQ ID NO: 136340 - DNA, 299 bp, Zea Mays
gtggtccagttgcattgaacgggtcgagggttttgcggggtgcttatggatgctagaacaagaaacagagggacgcgagctaaccggaatcgagctggccgcagcgagctgttcttcacggcggcggagactgatttggggcgaatccaaaattcatggattctagcgaatggttgcggctgattcgtggtggctggatagattactgccctacggagattgtggcgcactcaatttatagatgcatcgggcgacggtgatgaattcggccgaggggtgctggcggccggagaggggag

SEQ ID NO: 136341 - DNA, 388 bp, Zea Mays
ccagctttacgcgtgttttggcgtctctcgcgtggtgtatgtgcatgtagcgctcgtgctctcccgcgccaatggactactctagtctagcaggtctagcacgacgacgctatacaaaataatccccatgtggccgttgcaaggcgccttattatcttccaagaacactttctttacttgccttcgatgacctgtaccggtgaaactactatccacccaaaccctaacagcaccaagcacaattatcaaattcaaaatgtaatcgtgtaatagtgtaagacataagaacaaagcaaggatactcttacccatctccagttggtattatctcaaccatatcaactggttctttaggaggaggggctaactagttctctgcggcttctgg

SEQ ID NO: 136342 - DNA, 502 bp, Zea Mays
ctgagttcttgagcccgctcgctttgcttgagagattgcgatggttcccaaaaggaagagacagagtgttgttgttccaattatcctgtcaatcgatactaatagccaacttccatttgctggcaaccacatgcccgttgtttccgagtctgacctcttgcacctcgtcaaaactagtgttcttccgctaaaggagctgtgttcgtggcgaacctggtgcggggttaccgttccgacagaggatacccacgaagctgtcgtcttcgtgccctttctcatccgaggattggccctaccggcctctccctttttccgtggactcctcgatttttatgctctgaatcttacacatttaaaccccaattctgttcttcaaattgatgtttttgttcacctctgcgaggctttccttggaattgttcctcatttcgggctttggaaatacctctaccactgttggcccgggatggctggaggacagcatcaacttgttggtggtgcc

SEQ ID NO: 136343 - DNA, 374 bp, Zea Mays
tggaatcccaatgcattttaggaaattaagtaatattgactggaaggtagtggaagacaaaattgaaaggaaattaagtagctggaaagggaaactgatgtcggttggtggtcgtctagttctgttaaattctgttctaacaagtttggtaatgttcatgttgtcttttttcgaggtcccaaagggagtcctagaaaaaatagactactttagatcacggttcttctggcaaggtagtgattacaaaaagaaatatagacttgctaaatgggaaattctttgccagccaaaagaagtagggggtttgggtattcagaatatagacgtccagaacaagtgtctgctaagtaaatggttgtttaaattgttgaatg

SEQ ID NO: 136344 - DNA, 476 bp, Zea Mays
gggcatgccatgcaatctgtaaatctgctgcagaaatactttggccactgaaacagctgtgaaggggtgtttgaggggcacaaaatgactgaatttggagaatttgtcaactaccactaagacatagttcattcctctagaaacaggaagtccctccacaaaatccaaactcaacagtttgccaggctcctgcgggaaccggaagtggctgcaagagtccaggttatttcaccctctccggtttggcttgttgacacgttgcacacgaagaaacagaggcatgaacactcttcagtccgggccaggcaaacaagtgtttgacacgttgatatgtcacaggcactccagaatggccaccaacaggggagctatgcagggcaaaaaaagtggcctgttgcagttgcaagttacggcctacccacagacgccctttgtattgagcagaccatcatgtggagaaaaatccggcacaacat

SEQ ID NO: 136345 - DNA, 521 bp, Zea Mays
gccatttttggataacctgcacgacatacaactattgtaatacatctcaagttcattcaacccatcagtagagcactagcacatttcagaaaatttcttgagactacgacgacaatcgatcttatcatgcacataaaagcatcacaagcatatttacggaacctatcggttaactcgatcgacacactacacatgttcttcgcccttcaaaatttatcgcacaaccgaaatcatcccacttgccaatgacaccaacaatacctactgatatattattcatatcacgagcacagttacacaccgcatactagtttctaacataatcctcatacaactcgtaattcaaactaatcactaacaataaatcacgcacgacagattccgcctcaaccggttaatttatttggaacaccgcctagcgtaccactagtaccccgcattttgactcgacttataaacatagaggaagcgatgactacttcggcatgtcaccacctctctattcaagcaaagacaatttc

SEQ ID NO: 136346 - DNA, 304 bp, Zea Mays
gtagttcccgtcctcgctacactaccactccaagtacaccagctagtggcagttccgggcaacaaactcaacgggcaccaactgctcctccgcaagtaagcaccccatcaggacccgttgctcctaacacaaccaccaacagggcatgcttcaagtgtggacaaccgggacactacgccaactactgtcccaacagggctgcctacaccacaccggctccgatgaagcaaggtcaagcctcggcaggaaaaagtcagcccctatctgtcaaccggggacaagctcatcatgccgaagtagaagc

SEQ ID NO: 136347 - DNA, 872 bp, Zea Mays
gaagaatgaaggaagccccaaatcatgagaagccagttggtggcttgacgaaggaatatcaactgagccaatctgaagagcatcatcaaggatcaactcaacatcaccagcaggaattagaactctagcaccaggtgcgccggtctctaaggcgactccctgattcgaagcacgtgctgctgccatacaatcagaatgtggaggagaagacccgacgtggacatccatggaggtatgagaaggggagcccgctcggacaccctcgggggctgggtcgcagcccgcactacccatcagagccggatcaccaccagcagcaccctcgggggctgggttgtagctcgcgctgcccgccccgagccggataattaccggcaacaccctcgggggctaggtaaccgctagtgccatccttggggacatggttctctgcagcagccacctctaaggctgaaggattctcagtcacctccatgggaatggagcaacctagaccagctccttgactctgaagaccgcactccaaggtcgacgaggcacgagacgctgctcgggataactctaaccccacatccggaatgtcagaacaaacgtccatcataccaccatctgttggctcggacagcagatctttaggaaccatatcctcgagagcctgatcaaaatttgctatggacaactcttgtagaccaacgagagcaaacaaagctggaaaaggaatatcactactctccccactgactaggtagcgctgactgttcttccgaattaaggggatttcctcctcttcttccccatcctcgtcaattatacgaacaacacacccattgtgatcagcatcatcaaggtcacacccattgggttcagcatca

SEQ ID NO: 136348 - DNA, 383 bp, Zea Mays
ggcccaacgagctcaccgtcagcagcgtcctgcccgcgtgcgctgcgctcggggccctcgcgctggggaggaaggtggagcgctatgccagggggagagggatgctcaggaacgtctatgtcgccaacgccttggtcgagatgtacgccaagtgcggcagcatccaccgggcttggaaggtgtttcggggcatggggacgcagagggatctttgttcttggaactccatgatcatggcgtttgtcgtgcatggcctctggacggaggcgctgaccttgtttcataaactgagggtgaggatgtcttgcttgcacttctcttcttatccctgcttcattcgctttgcatccagcttgcttgaccaaatatgcttcgaagcacca

SEQ ID NO: 136349 - DNA, 315 bp, Zea Mays
ggctagagctgacgggttgcataatatcttgggatgttacaacttcgcataccgaaaggatactaaagcacctgtgattggttatcgcaccaagtggccgactggctggacaaatgaatggttttacgtgaaagctgatgagaagaagagagagaagcttatgactatattgatgagtcccttgggaatgagctttggcatgacacgaccattgtgaaacatgcaactcaggtgcccctaccagttagccaaagtggaatttagggttgtggtgaagcatattagtactcgagatttggtgcaagaatacctggc

SEQ ID NO: 136350 - DNA, 770 bp, Zea Mays
ctgagcctgtccaaaagaatatacgagcaatggtattaattcctttcttaacccaagtaggaacttgctcagccatcaacgcaaaatttggaagttccagcagtgtggattgaattagaataaggtgaccacttttttctaacaaggatcttgccaagctggtagttttttggccactttatcaactataggtcgaaggtgggaatttggaatcattctagttgatagcggcaactccaaggttagtttggtagccacaaaatcgaaggggattttgaataaagaagtgattttagtctctctaatctcttccggtttttaaactcctaaactaggcctaaatatttgatcggggtcgaaaagagctagcagttaaaaatacgaggaattagcacaaaactttctatattagagtggtttggtactaacacatagacattaaagtcgatacgttcagataagatctcaattggttggcctgtgctcttgacgatccgagttgtgcccgtcataaaatctctcacccatgcaagcaaatcgcatgaaatttaacgtaagaaaatgaaacttgaggcacctagatgcatcatacatgcatgctatcatctccgtacgaaacaccgcaaggtcatttccctctttccgtgcagaaactagacttgcttctgagtgcatctagatggttaggttttcagatcaataagctctgttactaggacacatgaacatacaataagctagtgctgctgctgtttacatcttcgttgctc

SEQ ID NO: 136351 - DNA, 688 bp, Zea Mays
cgaggggacaactttcctttaactttaaatctcctcataccccggatcggtgacaccttcagatacacgtgatcaccctccttaaactccagtagtcttctcctattatcagcatagctcttctgccttgattgtgcaattctcaaatattctcttatcattcgaacttgttcttctgcctcttgtataagctcaggcccaaagaactgtctttctccagtctgatcccaatacagaggagtcctgcactttctgccatatagagcctcaaatggtgacatcttcaaactggcctggtagctattattatacgagaactcagcatagggtaagctcttatcccaacttccaccatgcttgagagcacaagctcttaacatatcttccagcacttggttagtcctctctgtctgtccatcagtctgggggtgataggttgtactaaaattcaacttagtgctcatattctcatgaaaacttttccaaaatcttgaggtaaactgtgatcctccatccaaaatgatcctctttggtacaccgtgtagagacacaatctgagccatatataactcagccaattgagatcacttgtaagtagccttgaccggaatgaaatgagccactttggtcagtctatccacaataacccatatagaatcatatcctttcgaggtgtgatgcaatccag

SEQ ID NO: 136352 - DNA, 701 bp, Zea Mays
ggggtgtggggtagctcatcgaggtatcaacatgcgcaaaggggcttctcacaggcaggaattgctcgtcgtcgctaaaaaggacgccctggtgccacaccatcgcgtggactagggcgctgcaaccctacactgaggtaataaagtcacagaccagctcgtcctttccttagcttggtgtagcgcgttcgaatttaggtttaggggcctggatgcatggattgggtgtgctggccatggtcgccgctgcggatcttgccggcgccgccgtgttctagtgtctgaaggggcgagggtcctctggccgttgatttcactgtgaacgactcaaaattaaactgtgcataccgattgggagggaggtccaggagcgttggatcgtaatccgtgggccacaatcaaattttagataattaaaaccggaccactgatctatgcatctacggtttgctttgcatacctgttcgacgcatagagatctaatctcaaccggtagtgtatcatccaacgaccgaaaacaaaccataccctttcggccgagaacttttacataagaaaccctttgttcttgcggaataaacccgccgtccagtgcgacagtgatctgagtctaggatattttgtggactaaccctcgagcttctcggtattataaacacggtccagagagatataaaatcagagaaattcattttgtaaag

SEQ ID NO: 136353 - DNA, 532 bp, Zea Mays
gtcaacaagctggtgcgggcagcggtgaattgaaggcaattcctcgccggagtcaaagcgccaccgcgattccgccaatcgccgcgggcagcactatcctcgccagcctagcaagtaaggacccgtccactgatcttactctcacccccgctctacgtaggacctatctgcttcgactctagagcgcaggggcactggtccgcagttcgccggtgagccgccgccgtgcggtggcctgctcgtcgtgagccagcgccaggggaaggagagtgacagcgggccgtgcaatatgcatcatgcggttgtgattgaatccagagagcgaagggtctggcccgtaggattagcatcgtatggttaagatgaagggtggagacttcattaaatctccaccgtagatctaggaatgcagggtcggatggctatcgtgtatgctgcgggtctgatctaatcagagccactaatttcaaatccgatgaacgagaatcaatcataccgcttcagccgccactcttgcaaaagagaccttctg

SEQ ID NO: 136354 - DNA, 605 bp, Zea Mays
gcagactttgtttttaagaatattcagccactgaaggatagagcgtacccggcttatttgtatagtggtgtcaccgactcaacccgggttaccaacaagaggattcctgctgtggatttggtgagccgactggaaatgatccttagaggcaaagtatcaaatattggtgctcctgttgcatattctgcttggaatctgccaccttccaagtcctttttcgattttgtgtccaatcctcctgctagtgacagtggtttgagtcttagagtgcgaccctctctcgaagaagttgaggttctggttgcttcacttggtgatcttcccaatgatgaaaagcaagttcactttgagatgcctatgagtccaggtgatgcagagataagtgctatgctggacatgttggctgaggattcatctgactcggtccctgttgaaacaatgactgctacgactatcccaaagcctgaaaaaactatgaacactcaaaagcttgatggtactcgcccgaaacgcctccgcccggccagtcatccaactgcacctatcgaggggaagaaaaagaaaaagagacggcttcgacgagtgtcgtgtttggaccaggatgc

SEQ ID NO: 136355 - DNA, 302 bp, Zea Mays
aaagaagctaaaaattacaaaggacacagtgcatgttatattggggctaccaaatgccggtggtggaaagccaataggaattgatgaagttgttgttgcaaataatttaagggctaagcttggtttatccaaagaagaatccggtgttgcagctctacaagatcgacctaggaaagaaggcgacgatgacctaagcatcaaatctttctttctgatactgtttaatcggctattgttccctactgcaagctggggaataactaaccttgaggtgcttttgactgaagaaatggatcgtttcc

SEQ ID NO: 136356 - DNA, 408 bp, Zea Mays
gtttgcgcatgttgattcgttttacccctttcgggggtctaaacttctgttgtactcgaaaaaaccaaataatagtgcctattattgcacctggtttggaacatcacttgacaatgaatgaggatccaatcaccgaatgtttagtccaaggaaaggggcacattctcagggatggtccagggccatgtagtcgcttaacctggttctgtaccctgaaccatcacactccaccaccctagaacaactgaccgagtaccttggaatgagtacttgggtggtccggacctcatccaaactcaggagatgctccaaactaggaccgactagaataaacactactattggagaattgatcacagtagcacccggatccaatttctaatttcattcatgaaacctggattatat

SEQ ID NO: 136357 - DNA, 750 bp, Zea Mays
tttccaaagatcttctgcgttctctgtttttcaaaacttgaatcaaataagtccaaatataaaagtagcgccaaactaccttgaacacaccctggaaacatttgggagcgagactcgaccgtttgacatgatcttggcagggatttgcctcggaactcggccttgtgacactgccacattgacgaggcgataactctccgcccttggcctgaaattgctcggcctcacacacaaacgacagagcgtagtcgggagaacaaatcttacacagcgatcttgcccaaatttgcaaagatctgcgccctatcggcgttagaactcgggcagaaacaatggtgccacatgttcgatcgcggctgacacgcctggttcacgccagttcgcgcacccgcgcccagccgtgcacgcccgcgcgctctcgccggtccacgcctgcccgtgcaccacgccgcgtctataagagcagggaagcctcggccatactccctccgcgcctcacttaacctctcaagcccagcacttagctccgacgagctctgcgccgcccgccaagcaacccgagcgctcgaccaccgtggattgacccctccaagccatccccactcaatttcgtgcctcggttagcttcaccaaagccccatagagctccccgaagcaagaaaccgggcgccacttcaccggagaagccgttccaccctcgccggagttgtaatccccgccggcgcacgtgaccacgactaaccggtaagc

SEQ ID NO: 136358 - DNA, 498 bp, Zea Mays
gaaaatgcctcgatttgtcttctgaaccttcaatctttttatgcctcgatttgtcttctgagcctttgacacatgattgccctccgattcctccccctcctcctcctcctccgcatcatcatcatcatcccttcctcctcccccacatcagcatcatcatataattcatcattcatgtcgatcaaaatctcttcctcttcttcatttctcacatgctgcacattaaccaattcattatttctcaactaatgatcagtccaaatacaacattagctagtgaacacagaacacaccttttctatagatgtacatgtagctaccacaacaggaatttgagttgtcgattgagagccagaacctcgacgaacttggccccgccgacgattaccttgcatagctgatggtaatggcttcttccccattattttaacccttgatccgcgacttgcaggtgatggacgcacttgtttgtggacttccttcttgtggtgctcgtcc

SEQ ID NO: 136359 - DNA, 351 bp, Zea Mays
tatgctttcttctgctagattaaacaccattgggtcttgggtgggtggctgagcctgacaggaaactgactttccttggtgatctttgagaagaatggtattatctgcgcaacttatgacgccattatgcttggttaaccaatccatccctaagatcacatcaattacgtgggatggcagtacgataagtctaccaagaacactaccccacttaaaagaatcctgacttgggagcatttgaggtggcatagaaggtctgcccctagggttcgggtgaccaagggaatttctagatatgcagtgggaatgccatgcttttccacaaaactagtggctatgaatgaatgagat

SEQ ID NO: 136360 - DNA, 520 bp, Zea Mays
gcctaagggtgcagccggactagcacaacaagtgcgaaaaaaccagagtctatcgcgaagactatccgcgcagaagtcgccgaagggtgcagccggactagcacaacaagtgcggaaaaaccaaagtctatcgtgaagactatccgcgcagaagtcgcccaagggtgcagccggactagcacaaccagtgcgaaaaaacgaaagtccatcgcgaagactatccgcgcagaagtcgcctaagggtgcagccggactagcacaacaagtgcgaaaaaaccaaagtctatcgcgaggactatccgcgcagaagtcgcctaagggcgcagtcggactaacacaagcgcgaaaaaaccaaagtctatcgcgaagactatccgcgaaggcagaaacgacaacatcaaaccgtccgcgccaagaccaactataatcacatcagcacaacaaaacaaaccagacaaggtacacaacgccttcgcaaacgtatacaagcgagggcacacaacttcatcatacaagcctc

SEQ ID NO: 136361 - DNA, 371 bp, Zea Mays
ttggtaattacatactaaggtattcgttcacttgggagggggggcataccccaatgtctgaaaacttcttgcaacaactgagtgtaggatacatttatatatacaacaaattagtccgaaatcaatcattttctttccaaaacaaccttctgtcatgtcattttgttccgcccaaattaccacaaatgttctatttacctttttgtgacacacgtactactaaatatccctgcgtttgggtcaacaacttaaatcatgtttcctatggatatcgttctctgactcagcaaactcaggggaatgggctggtagtgtggtaccagcaaagcaccttatcggaattcttgtacaatcatgcttggtgtgaaatt

SEQ ID NO: 136362 - DNA, 403 bp, Zea Mays
tcccctttctgcccctgctccctcgacgcccctacttcgctccacggtgattcacgtgcctccctacagtgtgtgtgtctccattcatgatggccaacttcttagaggcacattcgtggcttttgatcgggtcatgaaccatgttctccttgactgtgtcgagctccaccctcaggagggcagccatgctagtgggttgttagtgctccctactgccgcgattgtctccatgacgatcgaggtcctatcgtctccccacccatgattgtcatcagcatgctcgccagtcctggcttcagcctccttccggtggctctataggggtgcctcccttgactctcttctcatactccatgtcttcgccacccctcctactcccgtcgattgggttgtcgactctggt

SEQ ID NO: 136363 - DNA, 728 bp, Zea Mays
cgcagccgccgcggtgctagggttctctcctctcgccactctcctctcgctctcgtcttcagaccactcgcaggcgccgccgcggctctagggttctatcctctcaccactctcctctcgggttctctcgccactcgcagccgccgccgcggctctcgccctcgagttcactcgctctcgcctctcgggttcactcgctctcgcctctcgggttcactcgcagtcgccgtgctcacgggctcgccgccgtcatctctctccacccgtggtgacgacaccacgcccgcggacgagctcgatctgtcgatctactttcatctacttcgcaaggtaagcccctttcttggctgctcatctactttcatctgctttatcttctcatttgatttcatctgcttcgcaaggatcgctctcctacgacctcgatcggttctcagctgcgagcaaaccctagccgtgtggtctccctcttctcagattagatcgctctcctacgacctcgatcggttctcagctgcgagtgaaccctagctgtgtcgtctccctcttctcaggttagtacccatctagatcttctcttctcgtttgtcctcctagttccctcgattactgatctgtgatcttctcgtttgtcgtaaagttcttgtctttgtttatatatctgattagtatacttgccttgctgatctgttgtctagtaccaaactcttgtctttgtttatatattt

SEQ ID NO: 136364 - DNA, 318 bp, Zea Mays
gtcatcgtagtgagatggagagtggtcgtcttcgcgtggatgggactggtaagcgagaattgttgtcctcgccgattggggtgagtgtaggtgagggggagctgcgaaatctttttgagggtgaggaattgaggataatgttgttcaactacagggagatgggtatcatcccgaaagttgagccaatgtaatatatgatgccctcgttgtgtgtatgtaaccataatttgtatgataaggttgcgcgccttcgttgatccggccgcgcccgtaggcgacttctgcatggagtcttttgggaacgacttcgatcttcat

SEQ ID NO: 136365 - DNA, 643 bp, Zea Mays
ctgaaaaagcctcttcggaagacaaaagcttcgatcttcggcacctgggcgtccaatagctttctgaagaggatatatctgaattgaaggaatttgatatatctggcggctaccagcctatttctgttctcttcggcggcatggacgaagagattttaggatgtatccgtgatcacgctgggacaaaaattgtgagcacgctgtcgaagtgtatcggatttctgaagctggaaaaagacattagctgttacagaagacaacatgttataggtagcttattctactcaaattttaaggtatgattcctctattgtttctccttcgtcgggctagttttagcatttgattaatgaaggtctaactcggcttcatcctttaactcaaagcttactgctaagcaaggctctgaagatgcagcaagataatgaagatagaaaaaacgagttgaaaatgtgttgaaggaaaaggacgtcttgctcagctcaaccgagggctctcttgccgaagctcgtgctcggaatgagaaattgagtaaagagctcaagggagcattgatacttttaaaggaaaactcaagtcaattcaaccgtgagtccgaagctttaaacatgacaatcaaggctgaagctgagaagaatcttaa

SEQ ID NO: 136366 - DNA, 571 bp, Zea Mays
cgtagaaagagagagagagagagggcagcatgagctcgccacctccgctcgccaggggcctcatgggctaccactaatattgatatgcatgtgtactaccactaatattgatattgcatgtgtactaccactaatattgataaacaagttgaagcccctttacgacaccttaataaagagaaccacaatgttagctaagatgtcctacataatgatgtcctaggctcgacaacaaaagcttagcaagaaagaagcttccaaatatcattcatctcaattcactctagctctcccttgtcaacaaaacatgaactagcacaatgtcctttaggatacaagctagttcaacatgttctcaacttatgatggccaatcagatctaggacaatttgtgatgagttttgaagtagctattatctatagaggatgagacgaaaccacattggcaaagtcacttgtgatctgagttaaaggattagctcaaaaatggtactctttgatctgtccaaggccaatgcagtcctaggaacaacttaaggctaatcatctcatcgattttcaagtattctag

SEQ ID NO: 136367 - DNA, 672 bp, Zea Mays
tcttgaagtaatatctgtgtgtgtaatgaacctttatctatgtgtgtgaggtcttgaaatattatatacgtgtcttgaaatatttgaacttatctatgagctgtgatgtctagtcttatgcaacgtccttatagtttgttaaatgtgttgaagcaggaagatgatgatggcatcatgtatgaggaagaagaagccgatggaggcagctcaagtgaggatgaagttatatccaggtgtcgcaacaatttggtgcaacaacaaaaaatgattgtgcagttggttcctatcttgggtatgtactctgataactacttcctgaaactacctaagagggtcgctggggattctggtttggaatgggtgcaagagacactagcaagagatacccaatgttacaacatgtttagggttgagaggcctttattttatagactgcataatactttggtccgtagatatgggttgaaatccactaaaaaattgacatctgtagaggctcttgctatgtttttatggattgttggaggctcacaggcagttagacaggctgacaaccgttttaggaggtctctggagacagtaagtaggacatttagtagagttttgacatgtctcctgaagttagcacatgacaacattccacccaaggacccaacatttgcagagatgcac

SEQ ID NO: 136368 - DNA, 675 bp, Zea Mays
aagtcgtcctagacacagagaacagtggaagtaggacggcgggttcattataaaataccctagggtttctttagcaaaatgtacccgcgaaggggtatcttctattgtgggtcggacgatccagatcctgcggcctggattgaatctagtatttaatgaaatggtatgcgccgaggatcgtcgatcacgaaatcgacggtcacgatctaatgcgcgaaggaggtatactaccgtttgatctgagccgcacaacatccatcccacggtccaaaccccatctgaccctgggccgttcatcctgagatcaacggcactggtgcattctcccttcctccgcaccgtggcgaacaacggcgaataggggcgcggcgccagactacattccgacgaggacaacctccatccccagagcgcaattcctcaatcacaaccgcatgcacacacaaggacatgtaccgaaccaaataggggaatactcaccggctctagtggaacggagaaccctgcccacgacagctagcggaacagcagcggctctgcgtcaacgtcgagaaattggcggccggtctagcctccgccgcacttgattcctctaggaatacgcccgccaagatcccgcgatactccctgaaccaatccgagcgccctctacggcacagtcggccagaaccgcgg

SEQ ID NO: 136369 - DNA, 1545 bp, Zea Mays
ttaattctatccttacccccacagacgtcttcagttatccccaaccccactggtcaacagcaacaaccatttaaaaggcagaagttggaattacacggttgtcttacgcaaaaagagcaggaattggatgagtcaaaaaaatgaactttgagtttagcaaaacagtggagttccttgaggtaaaactagttagtaaattggctatgtcatcttcaacaaagcaaatcagcaactgagtcatcttcaaggaacatgcccccacacttatctcctctctgcactcagggtagttaaaaaatatttccaatactccactttagaatcccaagttaactctatctacaagctacccagaatctgctagaaaggataagggatcaggatattcttcagacattttgaaaaagaaaaactagaatctgatcaatcgactgaaatattaatttcctccccgcttcccttccaattccacataaggacagaccttgcccattacaccaaacttgttcaccaagtattggtcttccactttgctataacattacatatctaataatacatgaattttgtgttacattgccccaaagtcgagcatcctgccctggtttttatttctgttatctgaaaccaactccatctgcacagtctgacagggcaaattgggaatcactttcctcacattttgtgtagcaccaagccatacaacctataagaaggttgttatacttactatggtctaccaacttactacagaagcttcagccaaaaactgcatggtttgagtaccaaagagccccaatctaggtgccacatgcagtcctatggttcttcagcgactgaataaccctcagttgccactacctgtcagtccatatgagcattgattttcttttaaatttttgatgtagtgccaggcttaattacctcaatccctttattcttcttgaattaagctaccacttaccaaagatacctttgcccaaatccctacaactaagctacaggaactctccaaggtttgagtcaaacactgaaattggcactgactactatttatcatctgaaaatcccaagggcctaacagcccattttcaatggtcactggtgaattaatgtggctatggcagaaaattctagttacttgtgactggtgaatttcaatggtcactggtgaattcaatggtcactgagtctgaaattacaagcagtgaagcagcagaaatgaaagtctgaaattggaatggaaatatagtagtagcagcagaactgaaagtctgaaactgaaatattggaaagaaagtacaagcagtattaaatagattgtggtactattaaattaaatgtaaaaaacatgaacttattaaatagggaaatacattaaccttatgtttcatattggcttgatgtgatccatttgcttcttcactaaccatagtactaggtacatggagattaagagatctcatccgcttcaaattttcttttatgtaggcagccctttgaagttcatattcattgacctccgtttctttacgcattcctctt

SEQ ID NO: 136370 - DNA, 980 bp, Zea Mays
gaccaatttggagttcatatgaattttctacaaattaaacaagttctaggatttattttcacactaaaaatcctttttctaataagttttctctggttttgtaattctctggactgggcctcaattacaggaaactgcaggggctacggtgtaagaattccacagactcagggagacacccgagcggactgcgggttggtttcctaaaaataggagggctcttatgcaaaacaggtacgacgaaggggtaccgagcatccagggccgcacgatcaagatccggtgcaccagataaaaccttcaatcggtacgcagcaccaaccgctagatcgggatctgacggcccggatccaatgtaaccgaatagcttatcaacgatctaatccggtccgctcaggatggatccaacggtccgggtcagaataaccaaaggggaagagctgagtctaatcgtaaccgtccacgttgagatcaacgtcgcacgaccctttaccccatcccgcaatacaggatggcgacgccgcccaaccacggcgatgcaccatcgccggtgacacgccatcattctcccagatgcctcattctcgaatccgaagcgctctacccgaattgaagtcaaagtgagtaggttgagactgctattaccgatattcgcgcaggggtgagccttatccacgagaaggggcggatgcgcggtggtgctagatctccggcaaggaattgaagacgccctgaggggtatcccattatggcgtggccacggaaacgttccccgcggttcgacggagcgagcgagcaggcgacagcactcaatcgacggtgttggtgcgaattccactgcggtggtgtggaatcccaggacccggctgcacccgcggcgtcaatccggccgcgacatcgaagcccggccaccgtggttgcgtcctggcgagcgcttccccgtacgcgaagctccctagcggcggcatcctctctgttcc

SEQ ID NO: 136371 - DNA, 457 bp, Zea Mays
ggcttaagtgcaaagtagcatggccgaaggggtatccccggatcctagctgtccgatccacagcagacgcaccagattagatttaggcaagttactcatccgcgctcacccccgaccgtcggatcctaaatcaacggatgaaggacgctcctgccccgatctgacctagaccattcattactgaatcaacgccacagatctattctcgcgaatcagtgcacagtcgtctaatctccaccgtaggggacgatccaacggccaggaggccaccttctccccatggacccgaaccgggcggcgcaattgcggcggcgcgcccgccggagctgtcccactgcggtgccccgatgctctacccccactccaactgttgctatgcgatctatggatggaggtgaacagtttgagggaaaccttaccgtgaatcgtgtagtgagtaagcctgccaacggcgagg

SEQ ID NO: 136372 - DNA, 536 bp, Zea Mays
ccccagtttgctgctgatttgcgatgttgtgcacctaggactgagtgtggtcttgtcgtcctgagtctggttgcaaaggcctgacccatgtcctgctggactatggagtgtccttgggctttcactgagacttgatttttctttgatggagttcttctgaccgggtgtacttttcgaagagctgatataactcatgcaagtttttgggtgggtctcttatgcagtggctgtataaaacacttgcagaaaggccgctgattgcatagtgaatagctatatggtcatcatccgaaggtagctgtgacttcaacaagaggaatttcgtgtagtattttcaaagtgtttctttctcctgctgcccgcagagtgataattctgccagagcgactgtgtctagcttgtacccttgaaaatttaacaagaacttgtcgcgaagtgctttccaagagtcaattgacaatggagacagtctcgtgtaccatgtgagggttgggccttcgagagctatgatgaaagatttgtccatggtggagtcg

SEQ ID NO: 136373 - DNA, 449 bp, Zea Mays
tgggcgagaaacctttagcttcgtcgtcgtcttctcatgcatgaagatcatgaaatgaagctagctacctagctagttacgttgaataatacacactgctggtgctgcagtgtcatgcacacgtcttgatatttctcgtactgtttcatcagaactgacagggaaaagcaaaataaaaggtgtccgcggagatacaggggccgcgtcacagtacccttgagaacaggctacagattcgtcgtcgtaggctgtctctgttgcaaaacatgacgtgacacgtgtcggttcggcagcaggtctggtgcattcatgttaccgtagccgctagcttgccttctctccttgtccgcgtggcctcggattttactgccttgcaattgcaacatgccgctggctggtgaagtgaagcgtcacctgttggcctgcacccgcgcgtgtactggccggac

SEQ ID NO: 136374 - DNA, 515 bp, Zea Mays
gctaaccgtgctctattctcctccaatgacaaacatgtcctactgttgtgaccattgacaataccacacttctggcatttcatgttcattttctttgtaccttttttctcccaatttaataaccttttgttcactccccttgattgttcttcccttgggttttgagttatttggtcttgccaagcttataccatcgactgcaaaatccagtttctgcgattcaaaagtatagattttttcagcacataatattatgcagtcccgcattctctctaataccattattacctttctggtatgatcattttgttcatggccaccactctcattcatatctgcgtgatcctgcaaattaacatgtacccgccaacacatttttaagctcaaacataagccaatagcacaaaccaaataaatcatttgtatgtacaaccgcaaatcaatatagttgttaaagttattacatcttcaaaggaacgtataggtatagggatttgaacattgtccacaccccc

SEQ ID NO: 136375 - DNA, 283 bp, Zea Mays
gggggaccttgtctcctaggctgttagagatgactgatgacagggttcttgtttcaccggtgaaggcgaagcagctgaaagtttactttcgtcaaagattcaagaatgtcctgaacctggaggaagctggagctcccaattctgtcactgtgcttcctccatcccccacagacgtggcagctgctgacacggctccatctgagtatcctgtttcagatgttgacgctgtgttggcaactccgtctggaacgttaccttcctccctgtcagatgtggcagcagc

SEQ ID NO: 136376 - DNA, 337 bp, Zea Mays
aaaaatagttcttgttttttgttcttcaattttttgaggtcgtgttgtggggtcccaaggttttttcttcgtagagttaatcagatgctgccccttttaaagaaggaggacgttcctccaggtaggtaatcgtgctagctcttcacacctcgtgggctttcttattagcccatgccttccattgaccaccctccgttcatgaattggggtggactttctaggagaggtcactcagggagatggtatgacttacctgtccttctcacaaggtctttgctgcccctcttaccttccttagtcatcctcagtttctctaagggtggcggttcgccctccc

SEQ ID NO: 136377 - DNA, 651 bp, Zea Mays
gtcttcgacaacttcaatgtggttgaaaatggtgtacacatggccttccttcagatcagtttgtgagtcatgttgagccccaaccagaggcagagggcacgaggaggggggagctccctatcaggttctgtgacagttaaccatacctccttggggatttcacaagggtccaagcaccaagcccaaatgtcaaaggacctagtgcgctccctgcgcctcgagcgctcctcgacatagtgaatagaacagctcctgcccaaagccctaacagccacatcctcaccccagcagtgaaccggaatcccctccaccctaaccttcactatgaactcaaagctagtcttcctggtgtaacagtcctctgaccagtccccaaagtgaaaaacccgaccacgataggagaccgacctcctatccagtgcccattgctcggttcttgaatcagagaaaatgatgaagaactactctagaaagtgtttgactagttggtactgaccgtgatgaagatcaaatgtctccctcagcatatcccctgctgtcaaaacgcccacctcatggctgttcccaccaaaggagcaaaccaccgccttactgattaactcatttctatgacgacagatcaatccggtcgccgagatagcatagacagct

SEQ ID NO: 136378 - DNA, 388 bp, Zea Mays
gacaaaggctcctgccacaactcctaagagaaggaggatggtcagcttgctagacgctgtcatggagaccacaaaagccttgacccctgctcccattaagaaagttgccaaagctgtcacaacctaggctgaagccgaagctgggcctttagtgcccattgagacgaagtctgccgcgcctgaggataaagctgagcaacaaactccggatatcggcaggtcagcagggcaggacatgatagaaaaagctaaatctcttgcccccaaagctctagtcgaagacgttgattacattattcgacatgctttggggaaaaattatccaaagaataaatcttagaagccagacactacgcccagaaactaaaatatctgaagggggccttag

SEQ ID NO: 136379 - DNA, 1535 bp, Zea Mays
aaacggtggagagaggtttccaaactttgtcatggtgtgttccaggaaatttggcgccactttgctatttggacttgtttgatttatgttttgaaaaacagagaacgcggtcgatctttggaaaggggctgaaattcagatttttgaatttctgaatttttcccaagtgcattagttcaggggctgatttagggattttgaaaaattcaaatggcaaaactttcttactatattttgttggttatttagtgtactaaaactttgttatttggtttttaccaaaatttgtatttttctcctaagtcttttcccaaatgccctttatgtgcttaaatggtccacttaagattaattagggtttgagagttcttcttaccttgaggttcatgacatgattaaggagaatttcttaagataaaaagaattacttcaagctttgttattaatttttttgtttgatgttcatcccttcatttggttcacatgtgataatggtttgggttagtttaaggaagaaaccctaggtgatactggggtgtcacactctttagctgggaaattctctcagatttaacaacggaacttaacctctcttctatttcctccaaactcatttctgttggctacaaaagatgaaaccaataattatcatgagttgtacgtactatctctaacaatatttttatccaacgccaatttgtccttcaaacgtctagatgacatataaggggaataaaagtcatataattccatagatttagtacggcaaataaaatgccttctcaatcatggtccccagtggcaactctccgtcataaaaaagagtacgatcgataattcaattaattctattcattatgtatgaaaatcaatcttttactcagtatgaaaatcaatcttttactcagacttattaggtttttatggtccggaagtcaagcgtttgttttcaaattactcaaaaaacattatggcaaccttgttggctgattctttgacacccccatgctgcaggttattggagctgttggatcagaggctggacattccaagcgatacagatcctaaatgggcatcaatgatcgagagctgttgggataggtaagcattctttttttcctgctgagaaacagttaacaggtcgaatgcagtccatccatgtttgaagctcatagaagcccaaatcatctttgacaaaaaagaagaagatcatagtttcattctgataaacagtgtgattagcagcccctaatacacacgccctttcatttgagcaatgacccaaggaatgagcaccgaggaatgaatgctagctctgaatccaatgaaacacaattatagtagtagagattaacacaattatagtatattaagactaattaggtcattctagttagccaacaacaatgccatttctcttcgtagaccatatttaggagacctttggttcagctttttaacctagattcattgtgaaaaattgaaatctcaactaaagtggtatccgcagcagtaaatttagtcatacaggaagg

SEQ ID NO: 136380 - DNA, 422 bp, Zea Mays
ccagtatcttggaaaaatcccgctcatcagtcatttgttagaaatcccctccatgatcgccacttcccctagcacggcccatgacacagccgtgcgatattggagacgagtgcactgttagcagcctactcgaatggggaagaacagatcgaggaagaagaagaggataggcgaggaaggaagtttaactggagtttagcatttgtttttccctcctgcgtagggttaatacccatccgcttacacagtccactccggaccagagtaccgaacattcggcctttttactgcccaccaagcgcggcgacagcaccggaccagtgtcggtggctgtgttgtgacccagcgatggagcgttgctgacattccctccctcttgcgatgctgcttgcccccaagcagcggatcggggaaactgttgg

SEQ ID NO: 136381 - DNA, 333 bp, Zea Mays
ccgcctgccactacactgacaggcgacaagccctctcgacattaaatgcgccttgtccaatccgttggtagatggcatcagggttgtccagcagacggcgcgcctgaccagtctgttggcggacagtgtgccggttccgagcggagcactgcacccatcttctctcccgcaagaagcttcccccgcacgccaaggatacgcaaatctcgggcgccagggcacaagaagattgctcggcaacagacattagtaggctccaagcactatattctttatgtccctgggcccacatgtcggggcctagtccctttgtgcatgccccccttcagctat

SEQ ID NO: 136382 - DNA, 406 bp, Zea Mays
caaaccgcgcactcgcgcgacagggcctactctattctgttgcaatggacgccacgcaactgcggccggtgacgccgacctgccatttataaaccggcgccgcgacgagagctttacagggcgcaacgagctcggagcggtcagaatcggaattccttagctgagacctgctcgccttttagtactttgtttgcattggggtcagtgggccgggtagacgcctagacggcaccaatttgtttgttgctttcagcttcagcgcatacacaaccaacctaaaaaaaagacgtatcagaatcaccagacgatcctgctaaaaaccgctgcttttttatttattttttcccgtactctattctgtactagtatcgtgcagtatcccaaacccttttcgcgtcgattagcg

SEQ ID NO: 136383 - DNA, 750 bp, Zea Mays
gaagacctaggcgtttctacggagatggatcatgagtcgtctagggaagatttagactttttcatcgcaatggacatcgtgacctcgaagacctctagtgctattaggggcccttctgttggggtagactaggtgtattgtactcatgttaactcctctgggcgaagggctccttcgcgaataggtgactctagtccatcggcctaaaggcatagttgtagtcgacgtcgggaattctttgacttggttgatcccgtgtcaggcaaggatgtgtgtattagggctagtgagttgggcgacgaggacttgggacctcgttgtgtcatgtcgggggtcgtaagtggtgatcacgccatggatcgtgttagcgagttagtcctcgtgctttttgacaagggccaagagctagagattatgttgtttaattgcagggagcgtgtgctgatcttgaaggaagagccccctagtccgtgactttgtgttgtttcacagttatgttattatgtaataatgacatcacattgtttttgtgtgtttattgtgcgtggtgtacttgtgtaaaaacactcggtcagttgtcgccgattggcaaaattttttagcatgaaacattgccctcccccctctttgacaatgggtggcgagtgtcgtacttcggtttgttttgttgtatgagctttgcgacgtgcggcttttgtcgagatatttgggtctgattatgctcgtgttaaatttttcgccaagattttg

SEQ ID NO: 136384 - DNA, 457 bp, Zea Mays
ctgaaacgtgaccatatgggatgttgaatgatgcccctcacatcctccctctgattcagatcattcttcacgtaaaaccattggtcatccaagagcctggccacttcttccgaaatgtaggcacatgataatttgcctcagagcggggcacgaagctataacaaccgaagttgttatggtattgttcttttccggttgccttcgtccggtaagataactcgtgaatattgcagaagcacctagcatccggctctagtccctgactcctcatagcccatataaaaacccccactttgataagagcttcgggggtaagttgatgaaggtatatctcgaatgtcttcagaacctcaaccaacatcttgtggagtggaaatcgaagcccagctttcatgaagctcttaaagaccaccacctcgttagcgtcatcacctttcatgaagctcttaaagaccac

SEQ ID NO: 136385 - DNA, 494 bp, Zea Mays
cgacgatggcatgggctaaagaggcaggggcgactgagcgggcagatggcataagcaagaaggggcagccacgatgctagaaggggtggtgacagtgtggattgaagagccaggagcggtagggttggtggatggcgtaggattaaggcccaagcaagaaggggcagccacgtgcacaaaaaggggtgacctgcaagacacgggttgtggccaagggcattggagcctaaaagggtagacatcggtcagccgccagcggtgcaggtgttgtggcatgtgagacttggaaggggcatagggtgcaatgcaggaagccagcaaggttattagtggtgtccagcagtgggaaattaggaggcattaagcgtgaggttcagggagtttgagttttctctttgttgtgtaatatgggctagatcaaaacaataatctattggcctattttggatatctaataggcaacccacaggtggaaggtaatatcctaatccgtg

SEQ ID NO: 136386 - DNA, 573 bp, Zea Mays
catggcgcggtgccccgcgctcgcgaggctcgtgctccgcatggactggtgaggacaggtcaagagctgatctgtatgcatgcggcggcgcttttagtggaactgatctggtaccgtgagatgcaaatgacgggcatggaggtcgatgcaatagaacgctgctcgatccaaacgggagggaaaggaactaacgaacgaacactgaaattcgctagtaatccaccttaaacctgatttaactagtggttgaactgctgctcttgactgcagtgcagatatgtgaactgatctggtaccgtgagatctccgcttgtggatctttgatcggtgcttggttggactctaaaatctaaatacgcatcgtgcacggtcaagtcggaaatggaaagcgaagttggcaccgaaatggaatttaagggtcgatctgctgtggcttgactatatgaacttgaatttttgctggatttgattttcttagtggagttctagttatattgctgtgagatctggtctggtggtctgagggtaggaagtacggatctgataactcgtagctttgatgcagtatcactg

SEQ ID NO: 136387 - DNA, 532 bp, Zea Mays
catcacaaggtactctaggaattggatccccgcctttagctgtgggactatcaactaacatgccaggcgagaggggcagattgtgtcggcttcataaactagaacctccccttgtatctagtggattcgacataagcatggctcgaaaacctcagacctaggaattgggctgaccttgacgttcgaactcactgacatgtggccaagtgggtccaagcaatgagagatgagaacactttgatgcttagcaacacaatgaattagagaaaaacagtgttgttcagcctgttgcgtcaaggtaaagtgcatgagtatttataggtaaccaggagggtagtctcagccttataagtacaattatgcccttggttacctacgttatttccgaaatattctccctcaggggccactataggtcattacaatatggttaagtacaacccggactaacacaccatcaatcctactccgattggggcttacacatggtcccaaacaatctagcatggcgccgcatgggcctacttcattg

SEQ ID NO: 136388 - DNA, 349 bp, Zea Mays
cttctgcctcagctacgttttcgaagaccaatcttggtgccccaaacctgaggtcggtaggtagcactgcttccgaaccatagaccatgaagaaaggggtattcccatgcagagctcgactaggttgagttcttaggctccaaaccacatacggcaactctctgatccactttcctgcgaacttttcattcttgtcgaaaactttcttcctgagtgcttccattatcattccattagccctttctacctgtccgttagctcttgggtgtgctactgacgcatatttgatctggatgctccgttgttcacagaaatcaaagaatttagagctagtgaaattggaccccag

SEQ ID NO: 136389 - DNA, 561 bp, Zea Mays
tggaagatctgtcagtgaatatgtgcacaagttcacggagttagcacgctacgcgccagatgacgtcagtaccgagggcaagaagatggcccgtttcctgaagggactcaggccagaactcaagacaattctggctagccaagacttcctcagtttctctcacctttccaacaaggccatgcaggttgaaagggcaaaggaggaagaaaaagggcatcccaaaagaaagttccaggtcctccgggctcagcaacaagaccggcaccagaagactcgatcctttggatttccacccaagggaccaagcttcagtagaccagctggacccaccccgtcatgattcagtcagcagagtcagagctctttccatgccccctcagttgcaagcaaccaaccctcagcgaatgcatgttggcactgcggagatcccagtcatttcaagaacaactgtccccagctgaagccaccaggacccgcctactccaactcggtgaatggccccaagaatgcctcggcatccgcccccaaggcgccctcctccatcagctagcagaacaagac

SEQ ID NO: 136390 - DNA, 423 bp, Zea Mays
tctcacctcaaattgaggcgacgaaggttccacccatgcgacactgtggctcccatgcggatcgtcaacaccgacgagtgattcagctggagatgatgactttcactgcccgaccactccacgatgagcttgcacacgatctgactaacatccccaaccatatcgtgcgctcagaacaaagacggagatacgggaccactgcgccagcttgtttcttttcccgttgacggtaatcccgactgcgacgtgaagctctctgtgcggcgtgtggtacggctcttggctcagggccggataaatacagcggagagtccagtcagtggttgagatgagatcgctttggtttgttatagttgcaagaaatacgactagaaagcaaggaagatgaacccgccatcccggccccacgcaacaccggacacg

SEQ ID NO: 136391 - DNA, 678 bp, Zea Mays
cagccacagttatcgacaatagttgcatgacacgaggtacagacattttcctctacgtcttcgtggagaaagccacaccagtgttgttctaggtgaagctggagaagatcgcctcaacacccttgtaggtgtggtggcaggtcttaacactgacctggacagcactacactggatctttcaagggtacatggagaacttgaagaagcacatgtcaggattgcagccctcaaaactcagctcgaaggaaggaatccacccgaagccctagtccctgccatagctgtgtccccgccccgcaaaaggattcgctatggagaactaggatctatcaccaggatactctagatttataagtcatattgtaataagttcagttttgcgttagacgatgaaactccttatgatactatgattataataacaaccatgtgatggtgatgtttgcataatgtttgatttggattcttgcttgagtgcaatgatcttatgaaatgatgaccataagaacatttaaaaaattaattaacaaataagcttagctttagttaaaagttgttccccctagaattttctctactcctcacttactaaaggatacactttctaaccaactagatggtgaacgattgcccaggtcccagaaatacccataatcagtgtgctggtcagcagttacc

SEQ ID NO: 136392 - DNA, 288 bp, Zea Mays
gactagataagcaaaacctagtcaaaataggctcaagccagttttcctaggctttctatgtggccttgtacaaaccagacatgccactgattttgtctgtccaaactccaaacttcaatccatcccaaactcctcgaaaatcaatctagtacctttttcctaacttagctctttcaaccttctaatgtacagcacaacacctcacttgatgggattcattggcgttgggtcttagaaagtgttcgctgttcgcgagcttttaagaatgggcatctacattgcatggcc

SEQ ID NO: 136393 - DNA, 597 bp, Zea Mays
gcagaaagtcccgcaaagccaaaaaacgaagaattatccaagtggcagatgtcattcatcagacaccgccaccgaccttggcgtcaaaaaatgtcactgccgaacccacagccatcggagccgaaaccaccggagccgaaaccgagggagccgaagccaccggagccgaagctaccggagcaagcactgaagccgaagccatcggggccaaaaccgggaccaacgaagatcctaacctggaaactacacttgatgatattgacaatatgcttctgagaatggctgaagaagaagctgctgtggttgcagtgaacacggcaacagaaaaaggaaaagagcagattgaagacattttggaaaaagaaaattttaattttcaagatatacttggacaagggttgtcagacgctgaaaaagaagagctgaagaaatatgctatatcctgtggatacaaaccagggtctctgctatttggtggagtcaatgaagggaagctgagatgccttcggaaccgaaccgaggccaaggttgttaggaccttctccaaaagcgttggcctgccaaagatagaagcagacctctgcagataccagcgac

SEQ ID NO: 136394 - DNA, 811 bp, Zea Mays
atgagctagagcagtacatgtaggaggtgatgtcttggaatcagtcccttcgagaggaagtgaggggatgtcttggagaaaccatgttgagaatacttgaagtcacgacgacgaccaccattgtccacctcctactgcagctgagcaaggccataagcagtatctagatctcttagtcgttaactaaaatgatagatttaacatcatctttgaggccatcaataaatttagtggtgtaatacaatggatcatcatgagattgataggcttttaattggtcaacaagctaagaaaagttttctacataatccaaaatagtgtagtgttgtcggatatgcaactgatgtcgaaggattcgtgttggtccttcccaaggccctcatgaatgaggaatccaaactcatgccaaggcattgtagggagtttatgtttaatggactggacccaatgggcaatagggttggaaaacttcgtagtagctaccagaatccccacgactaggtcaaccccatacatggtgaaataactttcacaacgagattgcgacaacttagggtgttcaccatcaaaggaagggaagctggggcaactgcccgagttggttggcaaaatacgaccaatggacaacatctagtactacaatggtgtgtatggaggtgctagattcttaggaggacgcacaccgaatgaaaattctatagccataggatgagggggttgaggaacataccattgcccgagacatgatgatgggtaaaaattgacccaaagccacgctcccgaaatggtttgtcaaagcggtgcccgtggg

SEQ ID NO: 136395 - DNA, 1035 bp, Zea Mays
tcctggttcgagcaagagaaagccctacttccagcagagggggatgagacttatattacttgcacctaagtgcttgtagtagggggtacaagctggccgagagagggagtggatcccaagtccctggtggtgattgaggcaagtgccaatatcggtcgtggaggtgaaaaactgtgaagtgttaccctccctgaatgaagccctaggctcctctatttatagcctcaaggagggctcccagtagcgccatggtttgttgcgtataggagaggaggcatgtctgagcccctgtagtcagtatggtcgccgatatggccttcatacttgttgctaacttgaacccgaaggtggttgtccgttccctgtatttgcatctttgaccgagcagagagccgaggccagcgtctggggctcgaacacgtacttgagcctgcctgatgaaggcgttgcctgagtcgtagttgttgccacagtgataagcatggtaaaaagcgcatggtaatccgtcccatatggtgtaaagcagacttgacgtcgatcctatagccatcctgttgtcagcagccttcgcggaggagttggtgatgtcctctagtcgatgttatctaggccgaggccaagctcgggcgagatggaggttcctccgaggccttggccgagcctgcctttgggggccgtataaggaggaggtagcacagttgtcggagtggcctcctgcaggattcgcagggagttgttgttggggcagttggccgaagccaagctcgaacgaggcggagttttctccgaggctgaggccgacttcaggcaaggcggaactctctcctgagggtgagaccatgccctgacgtacgcacatctcgtccggagttacttgagtacagcagacagcgtggggagcagacaacgtgggggagcagtggtcgttatccccgggcctgcgccatcgtagttggtgaaagtggatgggaccgcggtcccgtcgctccctgtttgactacggcgtcacgtggggtaggtattcgcattaaatgc

SEQ ID NO: 136396 - DNA, 981 bp, Zea Mays
agaaatctggccctaaactatggctgtcaggcttactgatgaagcactcgccatggtacagtgtcgtgtatggatcagaccaccagcgcagtataccttgccgccgatggtctctacgccgtgatttacgctgccgtcatgattcgtgctcactggtgggtggataaccacggcaaagaaaagatctcgcgacggggattggataggatcgcgagtgggaatttatcgccgtgattatagccgctgcgacgtggccggactaccggagtcgtcgtggaagcaccggtgaccttggttgtgccacgaccgaagcttgttactgcgtgttagcaagcgtggcacccttaggagtattctccttgcgccgttacaccggcgactgccacggttacagccaccgtgttcttctctgtctccggccgcccgtactgcccgatgaaatcacgcgccaccgcctaagccctctataaattgatggctgaacctgctgcgctaggtcattgcaaagccatagcagccactcccgtccccgattagccaccccagccggagaatcgttgtttgcccccaaatcgatccgccgcaccgcaagaaccgagctcgtcgtggccagcaccgttcaggtcagttcatgccgccttctccctcgtttgagtgctctcatatacccatgatgcccattgacccactcaattgcactgggtagccttagatcaccgggaacgcactcatctgtctgcaacaccctcggtcatcgtggccagagtaaaccatgtggtcattgatgaaattaggttaggggaatggttcagggagggtccaattcggtgttagccgctcggggaccccagtcgttgccccattcggccagtccaggagctcaccagagctcggccacgctcgtcatcgtcggggacttcgacgtggaagggaatagaaaccgaaggaccttagtgcaaactgtcagcgacttaggaaaac

SEQ ID NO: 136397 - DNA, 593 bp, Zea Mays
aaataccccgttcttcatggtctatggttcggaagcggtgctacccgccgacctcaagttcggggcgccaaggctggtcttcaaaagcatagctgaagctgaagctaccaggctagaggatattgatgtgctggagaaagagcgattgaacacagtaattcagtcagccagatacaagcagaccttgaggcgctatcatgataaagctatatgacatcgatcctttgtagtgggagacttggtccttcgccgaattctaacgggggaaggacggcacaagttttcaccactatgggaagggccattcattgtatcggaggtcactcagccaggatcataccggcttactcaaatggatggtacgaaagtggagaattcatggaacatagagcatcttagaaagttttacccttagcaagacctcgaaagctatcggagcaacattgtactctataaggagagaatacatcatcaataaagttttcattttcaagggcattcgaactgttaactatcacttgacttcgattcgattggacttggaatcaacacgcttactcgactcaggttgaccactataccctactaacgga

SEQ ID NO: 136398 - DNA, 865 bp, Zea Mays
cggtatttccttcacattgtgcttccattccaagcagcctcgaatggcaaccagcaagaaaggcctgatggctatggtgtatattcgttctgccttcatcctcatattcttgagttcaccctgtcaatccaacgaccagctgactcaaacaaagccactcttgctcgaagacacgctcatctcggagggcggggactttgctcttggcttcttttcccctaccaattccagcaagaagctatacataggaatttggtaccaccgcgtcacagaacgcacagtggtatgggtcgccaaccgtgacaatccaatcaccacaccttcagccatgctcgccatcaccgacaatttagagctagtgttatcagactcccaaggacacactctttggatggcaacaggaaacacaagtggagatgctggaggagctgcttctgcggtgctactcaactctgggaactttgtccttcggttgccgaacggcacggaggtatggcatagcttcgatcacccgaccgatacaattcttccaaccatgaggatcctcctaagcttcaagacacaaccggcaacacgtttgattgcttggaagggccctgacaatccgtcaactggggatatttcttctggcatggattcaacgaaccttcagatgttcatttggaaaggggcactgccatactaccgtttccctgttgttaatgatatggcagtcgccggtgctatgtaccagcagagcaatggaaacgccgccatcatgtatgaaacgagggtgaacgcaggggatgcgttgtattatacgtacacagtctcgtccggttcaccctacacacgcttttcacttgactacacaggcaaagggaga

SEQ ID NO: 136399 - DNA, 336 bp, Zea Mays
agggcagatcatactgattaattgtcctgctggagcagtactcagcaatagagaatcttctctttggataagtccatcctgtgatgtcaattggataatctggatgagcgtgtggaacatcctctatgtccatagagatgctgcccccagctgaggattgggcctcagagtctgtagctagattataatcttcatcatctgcacgatggcgctttgaattgaaacgacctgcaagcttcttcttaagaccacccagaccacagcaatatatatgaggaatatccactggttaatagttgatgacgccacaacatagagaaagaaagtgtaactttc

SEQ ID NO: 136400 - DNA, 318 bp, Zea Mays
cgcaggaatcccattgccgatgacgcgcaggaccacccattgcccaatcgttcttcccatgcaccgtggatgccccgcccatatcctcctcgccccaaacgcaatccacgcctcgccgccatggaaggaatcacaacccatacccctcatcgccatccagcgcacaggaccaccccgccatctcattcttcccattctacgcgccagccccgcctagatcttccgatgctcgagtacttcccattctacgcgctagccccgcccagatcttgcgatgctcgagtatgagatggaagacacctctctgagcgctcaaat

SEQ ID NO: 136401 - DNA, 283 bp, Zea Mays
aagaaaatgagatttgggcactcggctcggaaacgatcgctcgaaacggggaatttggtgaaattaaagcctggaatatcggatgggcgtgaaattttgcgaatatgttactggaggtgttgcgaaggtgactgaaaaatttgggttcaatttgagcatttttggctgtttgggcatttcaccgaacacgtggagcgcggagttttagggttttggagaaatggctattagagactgtgaaaccctccctaaggagctgagaacctacaaggatgttcaaggc

SEQ ID NO: 136402 - DNA, 332 bp, Zea Mays
atcgcgtgtggttgtcttcgtcatctcgggctcgacgcaggaaccgtatgggaattggtaattgctcgccggactgggtgaattggcgcaactccgcggtccgatggtactcgtccccagactcgtcgatccaaggtacgagaacttcctagacttcgctctatcaacctcgactggtcgcggtgaaggttgccagcgatgtttctgggtcgaatcggagcccagcaccttaggatttctcgccgtcgacttgcggtccgccgcataccacacctcgccgtgggcagagctccgtgctccatcaatcaccgtagaagttagccggactaagt

SEQ ID NO: 136403 - DNA, 463 bp, Zea Mays
gacaagagtaatacaagagagcgtgactgacatgtctttggatctatcagtgtgtatatcaatgtgtaggctggtgttggctcaccgaggcatggtacctagtgtgcttcaccatttgtgaaacagcacctgatacatcacgcaggggccctcctctctacaaggcacttttcacggttttggcaagggtctacggcaataatgcggctcatgggcatgtgccacccgaaacaccgcacagcacagcacagcacggtggacgtaagaacaggacagagtcctgaacaccggatagacatagacccatgacaagtcggtggccgggggcgggcacatgtgttttacacatgcatgcagctcattagtttgttactaggtggatacctttcatctatgcacatgttcaccgtatgcaatgcaagtgcaacgatgatagattcagattagatagatagagcacgcc

SEQ ID NO: 136404 - DNA, 620 bp, Zea Mays
aattttagcaaggactgactcatgaacgctactcgcctccaataattattgggctacgataacgctcatataagacctctaatcgatcaacaagacatttatttatccaaagggaatggaatgcaataatttaaaaagctaagcatcgatcggtcatacaacaaaaatcatgacaacaccgacagatactatccactaaccgttgaaaatttaaacttacttctcgcttgccactacatcactcctcaatcacacaaccatcacgagcatccttcacacgattatataatagcgacctaaacatcgtgttacacaatacatacatcttttctcgtcgcgagtataaccacattacggcatatacccgcacacctcaatcaattatcttacaccatcactactacaatacaccacaacacacacgtacatacgtgtccccactgccttctcatgcccaattttagcacaattatttatgacaacgtttatcgactagactagtgaaacactaaccgatcattcgcacatctcgcctttaaaacacgaatcacatgtcacataatttatattttcaacacacgctatcctacgccacaatgaatacataagatatatttaac

SEQ ID NO: 136405 - DNA, 466 bp, Zea Mays
gtacgacgaagttggaactgatgtgggtggttgaggtaaggcccatgtggctcgagaatgacttggtgaggcgactgaagctgaaggctgttggattggttgttggttgcgtacatactctggaatgtatggagagtgatatgaagcagtatagagaacctgctttggctgattatgtcttgcctcaacattggcaagttccttctgcttttgaattgtaacttggcaggttcttgttatgtgccctttattttctccacagaataagcagaatagtcttctttcttgattgttgtatcttccttcgaagcttcttcctccccttcctcctcttggagctagcggtctgaaggaactctgttgagttaccgttgactgggagtgactttgttgtccttgaatattgttgtttttgtcttcactttggccttggttgtggattgttctggcgtgccttggattgaac

SEQ ID NO: 136406 - DNA, 438 bp, Zea Mays
cgcctacggaaggtttagaaaacgccttctcgatgtagcccttgtccagcccaaggttttcactcatggctgctgcgagctgttcagccagtttgataacctcttctgcatattcagataccattgcactgcacagcacattttgcatcatatcgttagtttggtttacagttcacttcagatgactattagacttggtaaattaaaaatgtttttcttgtattcaattcaaactccgcggactcaccgaagcagctcaggatatcatggatgtttgattctggctgatgacggtacatgaaactgcactcccagtcaacatttgatggaactttctcacaacctaggatctttgcattctccgagctatagaagttcttctccatgagcccaacaaacacttcccctacccacgtgaatatgttcctcccgtcaaaa

SEQ ID NO: 136407 - DNA, 434 bp, Zea Mays
cgccgcgtgtggagggtgccggggatcttcctagtgcgagtactgggtgtaggcggcgaagggtggtgggaaaacatagtgtgggtgaattttcgcgaagtggcagacgccgacgtatggggatggagcgtggccgtctccgagtagaccgggttggtaaacgagaattgttgtcctcgccgattggggcgagcataggcgagggggatcttcggaagctttttgagggcgaggaattgaggataatgttgtttaattacagggagatgggtatcatcccgaaggttgagccgatgtaatatgtgatgccctcgccgtgtgtatgtaattgtaatttgtatgataatgtggcttgtttgccgtattcgtacgcctatgttggtccggctgcgcccttgggagactttgcacagagtgtccttttaatgagagac

SEQ ID NO: 136408 - DNA, 285 bp, Zea Mays
ctttagcactggtggtgttgtcaggaatttcttcagtgcttctagagcttcctgagcctctgaagtccactggaacttgtccagcttcttgagcaacttgtagaacggtaggcctttttctcccagccttgatatgaacctgcttaaggctgccatgcatccagtaagtctttgtactttcttctgtgatcgtggtgcctccattctcatgataataaacccaagcaatttttccgctggtactccaaagacactttttaggattaagcttccatcgatactgtc

SEQ ID NO: 136409 - DNA, 517 bp, Zea Mays
caccaagagcagagctcttttggaagaagaaccccaacatcaacaagatgaagaagatctgattccgaaacaacagacatgtggttacctgcgaacgacaactgactattggggtcgatgagaggaatgattgccgcagcagagctctggttcttccgtttcggcaccattgcaatctcaccgccgggacgaaggggagcggaatttcagagaagcaaaaaagtggtttgaggcggaaatgcgaagttagggcttagaaatcaaaagcgcacgtcgacatgagtataaatggggttttcccgtgttgggcgccatttctgaaaagggccaagtcatcactcgggaaaacgagacttccgatataacccgaccgttacctctaaaacgccgacaacatcaagcactacccggccgttatctctaaaacaccgacaagtgtcaatcataactcggttgttacttctaaaacgccggcatcatcagttattgctcggtgattattttcgataacgtcggc

SEQ ID NO: 136410 - DNA, 680 bp, Zea Mays
caaacactccgataaaactcagatttgaaactgctctactgtgaattcatgaagctctgccaaatggaataccgtcgtgctttctgatgtatttgtcgcttctgccttcagccttttgccatttcagctgagcggacatcggtgtcctgctcctggctcctgcaccaacaacactccactcgccatgcgccgtacgaggaacgtccaaagccaccaaggcgcgacagaatgaaagaagtgtgaacggcgagaaggtcaagtcgagacgggcagctagcgaggaccatcgctttccgctgggacttgcccgatcggcaaggacagcatcgtcgtcgtcttcgtcctcatccacttcgttcctgttcattcacacaccccaacgcccgggcgtaggcgcgtagcgtagccactgagatcgaaagtgaggagtgaggaggatgggagaggaaaggagaagtgcaataccaaaaggcaacctgtgagtgaccatcattaagctcaaagcaggcactagcaccactagtgagcgacgctgtggcccccccagaccccacaggtgtcacaacactaaagacagtagtgctgcctttggacctgcctttgctcatagtttaattaattaaccggcaaactgacggtcaagaaacgaaagcatccaatcaagaacacgaaccatctac

SEQ ID NO: 136411 - DNA, 280 bp, Zea Mays
tgcccaatgaggtcctcagtctggtggggagaggttttgcaggccaacctctgtagcatcctgaaccacaattggtgggaaaaacacatgaaactatagtttggttgcggagtgtggggcactctttttgcaagcagtctgcagtctgcagtccggtacctattatgtgcgaccaaccacatgaaaaatttacatttccctagtgtccagctcttccatatcctctcccatggccagaattgaattggtggaattgttggttgtattgctgagcctcttg

SEQ ID NO: 136412 - DNA, 453 bp, Zea Mays
cgtttgaggcgttgtatggcagaaagtgcaggactccactgtattgggatcaaactggtgaaaggcagttctttggacctgagattatacaagaggcagaggaacaagtccatcaaataagggagaatttgagaactgcacagtcaaggcagaaaagctatgctgatacctggataagactgctagagtttaaggagggtgatcatgtatatttgaaggtgtcaccactccggggtatgcgaagatttaaagtcaaaggaaagttgtcccctcgctttatgggacccttcttgatcttaaagcgagtggtagaggttgcatatcaactggaactacctgatcatcttgtggatgtacatgatgtcttccatgtatatcacaattgaagaagtgtctcagggtacctgaagagcagctaccaatggaggaccttagtgttcaagatgatctgac

SEQ ID NO: 136413 - DNA, 737 bp, Zea Mays
gtccagccagggtttgctcttttggagggatgtggtatgtgcttgtggttgtcgacgacttctctcgctactcttgggtgttctttatgatggtgaaggatgaggtttttactcatgctcgagatttgattcttcggttgcaaaatgagtttcctaaaaatgccatgagagctatacatagtgataatggcacagaattaaaaaatactcaatttgcaaccttttgtgcttctttgggactcgagcatcagttttcctctcagtatgtgccccagcggaatggtattgttgaacgcaaaaatcggacccttgttgagatggccaggatgatgcttgatgagcataggactcctaggcgtttttgggccgaaacgatcaacactgcttgccatgtgtccaatcgcatctttctttgggcttttctgaacagaacttcttatgagctgcgatttggacgaccacccaaggacagtcatttcagggtatttggttgcatatgctttgtgctaaaacagggtaatctggacaagtttgagtcccggtcttctgatgggatttttctgggttatgcattacattctcgtgcttatcgtgttcttaacctagagactaaccacgttatggagacttgtgaggttacattcgatgagactgcaccttgtccatcccctgtctttgagcctgcaggtccagatcagatgggacagaccatctttatggaggaggagcacgacgac

SEQ ID NO: 136414 - DNA, 351 bp, Zea Mays
gctgagggcgcatgtgcgctgggggccatggggcaccgggaagggcacaggaaggttcgggatggcatggcggacacggttgttggcacggcactgacaaggggacaccagagagtggtcgtctatgatgaggtggcctagcggcagcgcagacttgctccagtgagcaatcgcacagacgacagggcagtacatgggaaatgaatggcatgggggagttgctcacctcgagagggaactttagagcgcttgagcaaaggtggggacgcagggaggccttgggtcgatggcggtggagctttgactgcatggggagaaggctagtgagcgcggactaggcaaaacagtggg

SEQ ID NO: 136415 - DNA, 504 bp, Zea Mays
gactggaggcggtgatggtgggtcaacatcgactccagaagcaggcggaccgtgtggccgcggcagcaaggaaggcacaagagagggagttcctcatagtggcaaggacagaaactaccgcacatgacatgatcgatgaaatatctactaagaaggtggtctgggatgcagaagtgttatttgattttgattcacatggtctattgcaacggctagctcaaggggagggtgaccagacgcacaacaattgtgagcagggtgttgtgtctgatgttccatgtatgttggttggaatgccacatcaagccaatacacacctgatgttcagtgaagttggtctaaaagtggcttgggatgaggagatgcaatctgaaactcacatgcatgaaggtttactgaagcagcttgctcaaggcggagaagatttagaagaatcgactagcaaggctgctgatgttgaagatgtgatttgtaatgagaacatgctacatgacttcagttcac

SEQ ID NO: 136416 - DNA, 547 bp, Zea Mays
gctcgcgactttcattttgcgattattggttcagcctcgattgcatttatcaatgacccgataagagagcttcaagcactcatgcctagaactttgttttggatccatttgcaatctagagcggcaagataggtgtcgacatatttgtctcccacatttaataatgatctccgtcgtttcccaaaaacgaaagattcattgttccgtattcccagcacaatgatattgcgcgcattgctaggaacttcatcattaagatgaacctcttcgtgagacaaatcaccatcagggtgaattaatcgaaggagagttatcacagaccacgtgaatctgcaatcagaacatatgctttgaataaggccgatggatcatatccgcaggcgtccccgcagaatagatcaaatgccaataagtcaaatgtggatatgatattaatcccgggtatatccacatctacatcaggtagaagcattcaaaccaatatggttactcctcaacgatttctggcaaactccatatacacaggagtacactccgaacgacgggt

SEQ ID NO: 136417 - DNA, 453 bp, Zea Mays
gacatggattccggtagctcaagacggtatgccacaggtcctattcgagaaatgacagggtaaggaccgacgaaacagggtgctagctttcctttcatctgaaaccttttgacaccacgcatcggggaaactttgagataaacaaaatctccttcctcaaatctgagctcccttcgcctattgtccgcgtaactcttctgtcgactctgagcttctagtaaccttctgcggatcaaggcaactttttcttcggcttctttaacaaagtcgggtccttctaatgttctttcccctacattggaccacattaggggagtctggcattttcttccatacagcgcttcgaatggtgacattttgatgctggactgatggctgttgttgtatgagaactcggcgtatggtaaactagactcccaatctctgtcgaaggctaaaacgcaggctctgagt

SEQ ID NO: 136418 - DNA, 457 bp, Zea Mays
tttcagcttgtagtcgtgtagactactctatgaatgaactactttatacagttattactagtagtgtcttatggaattacctagttgatgttctgatgaaggctggaaaacttgtttaggctgaacctatgatcaggtgtcattgattccagatgcatatggatcacaattcttggggcttgcagggtacatggaaacattgagataactgagagagcagcaagcaaattgtttgcgctagttcatgcagcgtaatttcttgcaaatcgctgtcacacttatttgctgattttacaagatgcagtgatgtcggtaccagacttctgaaatatatctgctagatcatgggggtaaagaaggaactatttgttcagctggattgagactaacggtcaggtatgactctatgaactattgttcttgttgcgagcccgatgctcaaaatactggaattttg

SEQ ID NO: 136419 - DNA, 406 bp, Zea Mays
ggctaacacgggtgttgttgtcagatgctgccttaatgcatgaaaggcatcttcacatttctgactgcattcgtactttactcctttattcaacaattcagtcattggcttggcaatcctggagaaatccggaataaatcgtcgataataccctgcaaatcccagaaaactccgaatctgccgcacagtggtaggaggcttccaattcatcacttcttgtactttctcaggatcaactgataccccatcctgagaaatggtgtgacccaaaaatttgatctccctcagccaaaaatcacatttggacaacttggcatataaacgatgatcgcgcagtctctggagtactgtatgcaagtgcttgacatgatcgtcttcattctttgagtataccaatatatcgtca

SEQ ID NO: 136420 - DNA, 316 bp, Zea Mays
tccatgtaaacacacaatccgagccatatataactctgccaattgagagcctttataagtagtctttacaggaatgaagtgggccactttagtcaatctatccataatcacccatatagcatcatatcctttctgggtgcgaggcaacccagtaataaaatccataccaatatcttcccacttccactcgggtatatttagtggatgcagtagtctagctggcctctggtgttcagccttaactctttgacacacatcgcacatagccacatgtgcagccacatctctcttcaatccataccaccaatatttctgc

SEQ ID NO: 136421 - DNA, 1027 bp, Zea Mays
ctgaccccggggttcgggtgaccaaaggaatttctaggggtgtagagggaatgccatgcttttccacaaaactagtggctataaatgaatgggatgctcctgaatcaaaaagcacagtagtgggagtaaattcaacaaggaactcaccgagcactactcccggagcttgcttggcctcttgggcgtcgacgtgattaactcgagctctgccttggtattgggtccttctctgctgactgtgttggagggggggtgccttggaggcaggtgccgaggaaatcttggggccattcaccgagttggagtaggtaggtccgggtgccttcaactgggggcagttattcttgaagtgactggggtctccgcagtgccaacaggcatttgctggcggttggttgcttgcaaccgagggggcctgaaaggaactctgactctgctggctgtaacatgacagagtgggtccaactggtctattgaagcttggtcccttgggtggatgtccgaaggatcgagctctctagtgacggtcttgctgctgagctcggagaacctggaatttcctcttgaggtgccctttttcttcctcttttgccctttccacttggatggctttgttggagaggtgcgagaagctgaggaaatcttggctggcgaggatagtcttgagttctggtcttagccctttcagaaaacgggccatcttcctggtctcggtgctgacatcgtcaggcatgtaacgagccaactctgtgaacttgtgcacgtactcactgacagatcttccaccttgagttagttcccggaattcatcttccttgagttgaacgatcccctggggtacatggtgctcgcagaaagcagtttcaaattctacccaggtagcatccctgacggcttcgctgaaggtatcccaccatgctagggccatcccagaaagttgatgagcagccaattgaacacgctgattttcggggcatccgatggcttccagtttcctcttgatcgtgcgcagccagtcgtcagcatc

SEQ ID NO: 136422 - DNA, 681 bp, Zea Mays
cagaagatgagttgtggatctcagctcgttgattcctacattaaagatcgcagacaggagatgtgtaggttcgcggaatcaatgtgttatgacagcccgatgtgtgttgagcggaggagattgaaggcggcaaatgagaagagagcacatgatgcaagggaatgggaggcggttagagccgagaaacagatgttggggaatcttgttggtcgtctgagtgcaagtgagtgagaaaaaggatatgttggttttgtttatacattgtatttatcttgtctttgcaaacttatttgtcccattagatttgcagaaattggatgtgtcgtgaactatatcgcagatgaggctcgtgcaagatacgttcaggaaaaaatggcgacgatggaactgatggaggaggaggacacattaaggttgagtgagcttatcgcgctcgatgaggcaggattacatggggaagaggaggacgacacatcaaagttgactgagctcatcacgttagctgaggcaagattacaatgcaagaggaggaggacaagtttatgtctcaggccgccgaagaagcagaggccgcttattacaaccttgatgtgttgtggctgctagggcacgcgtgtgggcgacgggggcgtgggggcgcggttgggccggcgagccgcgggggcgccaggttggggcgac

SEQ ID NO: 136423 - DNA, 619 bp, Zea Mays
tccatagtcgtccatgcatcaccataatcgttttgacatgcatcaatattagttccaccaatcaactcatttgtcaggcctagtgtatcatacatcacttcttcgttaacaactacctgttgtccttcctcctcccatctacggtcaagttaaattgaatcccaatcaattctaaacctactccaaatgagttagcctacaacatatttaaagaactatgagttagcctaatcgagcattactctaattgatttcataacacaccaaactaatcagagcatcaaacagtaaaggtagagaaacactacctgaccacatgctgtagaaattgaaatgactagtggtgctatagaaattgaacagactggtggaggagttggcactgatagggatgcaaacgttggtggcgtctctagcaataagatcgacgatgaaagagaacatggggtgaagggaggacaaggcggcacgggatctgtgccagatgcagtgcgttgtgcctttaaggaatcgaacgtagaaaaatctagtactgctgtcggtgaataagagctcatggcacccaactctgctactatcgccgaagacgatgggggcgccaccatcaaggatgagcatg

SEQ ID NO: 136424 - DNA, 380 bp, Zea Mays
gtcaaaaagaaataatgatgagtaaaaggtattcaaattcattgtcaggttcatttttgtggtcatgcacaatatggaatgaaataggcatcaataatcgatggttttcaaatctgttggcccatatggattcatgaacagcatgctgaccaaaaaggaaataaatctcactttgttgaaaacagtgagcagcttctccaactccagattcactggacctaatcacctaatgaacccagcgattagaactttcttcgctgtaaaaagacagtgaaacttgctgataagagtggccctgacatgaaattcatctctgcattccaaattctctaagtagcaattcagtcatccaatgtcacatactcacatgtctcagggtt

SEQ ID NO: 136425 - DNA, 294 bp, Zea Mays
cctgccgcaactcccaagaggaggaggatggccagtgtgctagacgctgttatggagaccacaaagtcctagacccctgctcctattaagaaagttgccgaagttgccaaggtccaggccgaggccgaagatgggactacagtggccattaaaacgaaggctgtcgcacctgaagataaagctgagcaacgaacttcatatactggcatgtcagcagggcaagatatgatggaaaaagcaaaatctcctgcccccgaagctccggccgaagatgttgattacattattcgacat

SEQ ID NO: 136426 - DNA, 410 bp, Zea Mays
cgcgtctgggggtggtcttaaaggcgcgggcgagcaggaccgaggggtggctctgacacgcgcttagggtgtgcgcgggcgagcgccaatgcacgctctggcgcctaggcacgacgtcgagcacgaggcagcgcagagagaggtcaagttcaagtgcggattggctccaaatctttgcgattatggccatgatcccgttgagagatctcttcccctgacattcctttgtcgtttgtgtgtggaggcttatgggttttgctgactggatcaagagatatggagggatgaagttgggtttgtcttactgctgaactccgagagaaaatcccgggtttgacgtgtatagggcacgaatctcaatgccatcttcacacatgttgcagagggattagtttagaacaattttgtca

SEQ ID NO: 136427 - DNA, 411 bp, Zea Mays
cttcaatcgacagaaatgcttcaaaaaatcgacggcaaactcgatgtatttcaatgttggattacctggaacttcttgaatcgggctccaatgctgggagattgaaggaggtcagctggattggaacgacgctggattggagcggcactggattggagctgcgctggattggagcagcggaaatcgcctggcgagtcgcctctgacgaaaggaaagactgcacggccactggggttttcttcctatcggcgcgggtttgcctccgttgattgcgcaaagacggttttagaaaccggaaacgtgggagacgtggctggctgacggaggaaacggtgtaatggcgccgtgactgagaactgttgacccggtgtggttcaaccaaaatgatcatattgactaacctgggcttcc

SEQ ID NO: 136428 - DNA, 552 bp, Zea Mays
gttgggggcgcgttggtgatcgttctgtctcactgtcatgtgggctagcgatgtcagtacttccccttcccttacgcgcgcggccagggcggtcgttgggtcctccgattctcgtgtggtcgcgcggggagtccgggatgccgccgtgaatctcgccggtagcctcgccaaatcgttgctcgcggtaggataaagctaccctgcgcttccccctctttctctccacgcaccgggggggaatcgagcctgtcagccgcggttgaccccgcccgggtggccgttcgtgcgggccgtgagggagagagggaggtgctcgcgaggccgccattgaatcgagcttagaagccccgtcgcgtcctgaggatagtatctgggtgctcgctgtggaggttggcgaccgggggtcaagtgtgtgctcgccggagtctaggaaccatggcggagaggcgccatcacatggaacgggaattgctcattggagcgattgaatcctgcccgcgatccacctcatgttgcgggctgggcaccgtccgactcgacgaatcaatccac

SEQ ID NO: 136429 - DNA, 918 bp, Zea Mays
agctgtatgcttgtaatgaattggtgtaatgaataaaataacttggttgaaaaaagaattggcatatgcataatagtgattctctccccctggcagatggcttcggataaaaccacgcctaccgcctccgggattggagcagggtttcccctaagagctgaaagagaagccggtagagaagagagtgagacccacctccccgcacctctagaactacccttagatttagtccaagttctagccaaccaaaccgactcattgaggtcctcactagaagtctagagaatcaacgcccaaatggtggaagaccacaagacatgatgggagatttcctgaggctcaagccccccacattcgctggatctagcaatcccctcgatgctgatgattggctgcgcatgattaaaaagaagttggaagccatcggatgcccggagaatcagcgtgttcaactgaatgctcatcaactttccggaatggccttagcttggtgggataccttcaacgctgccatcagagatgctacctggacagagtttgaaactgctttccgagagcaccatgtgccccaagggatcgttcagctcaaggaagatgaattccgggaactaactcaagacggaagatctgttagtgagtacgtgcacaaattcacagagttggcccgctacgcgccggatgacgtcagcaccgaagtcaagaagatggcccgctttttgaaggggctcagaccagaactcaagaccatcctagccagccaggatttcctcagcttctcgcacctctccaacaaagccatgcaagtggacagggcaagggaagaagaaaaaggccacctcaagaggaaattccaagtcctccgagctcagcagcaagatcggcaccagagaactcgatcctttgggtttccacccaagg

SEQ ID NO: 136430 - DNA, 533 bp, Zea Mays
gtcaagctcaatgggtcaagcagacgacgatcgcaagcatgtgtaggtgctaaaacacggactagaagagcgacggcggacctggaggcggctggtcacatcacgacgtctcatggtggcgcagatagatgatttgggggaagaatgaaattctccgtctatggtggctaattgaaggtgggaatgggtgctctggcttcatgataacatggcgcaatagaccgagtcatcaatatataagggcgctaagcggtggtgtccaattttgaaagggaagaccggtggccgagaggagaggtgagtcaccggcgtgaactatcttggtgttccccggggtaatgcctccgacgacgaactgacctcctacggatatctactgcgacgtggtagatcttctaagcacgtggcgtggctacgatcgacggtgaactctgacgaggacacctctgtccaatgcacgacaagtgtcacagtgaacagtccgacgataagtctctatctctttcccgagttgagatctttccttgtccacg

SEQ ID NO: 136431 - DNA, 641 bp, Zea Mays
gagatcccgtcgtagccctcggatcccgatctaacgccccaggcgagataccccgaatcggtatacttagtctaatcaacaccgtcggtgcaagatccaacggtcatattcctttacaacccggatctaatccgagtcgttacctacgagatcgacagctatcgtatcgtcttcatctcggtagctcccaacgacggagcacgagctgcctgctctccattaccgagctggccacacgatgccccaggcgaaccgaattccaacctaacggaagctacacgatgcaggggcaagggtgaacgcgcgaagaaggatctcaccatagatggcgcccagcagagctccgtcgacgagggggcacggccacgacgaaaattcaacctccggcgagcgattccccatggaccgagatgcctccacgcaaattgatgccactggcgcatgcgatacatcatggcgaacacccggttacattctcccgtacccaaacgacgacgaacacagaaatcagtggcggtggcactctcttctcaagttatggtgttttctcgatggcggtacaaaaggggatggtcaagggagcgagcgcttcgcttataaaatcggagttcatgacgtgagtggacggcgcgagattagcg

SEQ ID NO: 136432 - DNA, 433 bp, Zea Mays
gttgattttctgatgtcataaggtcccttatgcaaaaacggcaggacgaaggggtatggatgaaccagatccgtccgatcgtggactgaaggctcggattagattgggacttataatgattcgggacgacactggaaccgtccgatctggaacagacggcccagatcccacaacgaaatggtacgcggcagattcactcacaaccgttgatatgccaatcaacggtgcgcgatgattactccccagatctaatcctaggcgttccattccgatccaacggccaggaggccctctcctatctcagcaccgagccacggcggcgcgcccagagccacggcggaggttcaccgacgtgctcacgattctccgcccaagcgtccccaacactaaaatcgattgatactacgcgacgaggaggacgaggcgagtcgat

SEQ ID NO: 136433 - DNA, 407 bp, Zea Mays
ggtcattagctagcccaataacgtcttcatccactagttgtactctaataccctctagtgtgaatacaatgcccccaatatcatagaaacgtcatttgaggtttaaaaggtgatctattgttttgaattctttatattccaactttttagcaactgtatggtggaaaaaatttgtcttacaaccttaacctatgtttggacagttcactcacgcaatttggctaaattttccatagtctttattttattttgagaaacgatgtggtatattgatgtgtggtgttttacttgagtggacataaacacaatctaaggatgccatgaatagacgagattatagttaacatattatcacaaaaggtcattagctagcccactaatgtcttcatccactagttgtactctaa

SEQ ID NO: 136434 - DNA, 550 bp, Zea Mays
cggctctccctctggtgtagtggccacttgagtgtaatatattcgcccagtcttcttaatattcttgcccgctgaattatttgccatgtttcccttgccttgatttgaactccctgagttctgctgattgttggatttgttctgcctcggatatgggcagtctttgataaaatgtctagacttcccacaattgaagcagctagttgaggaactagggagggcggggaaacgagcaccaggggcactcgtctgacttgtagaagtgggggcagtggcaaggcgaatgaagacaggctgtttgaatgggtaggagggtggacgaggtgaagaacaattttgattgaaaggtcggattaccaaccttggtcgcttttcaggtccctgattgcacctgtcacctccgaatcccttcgattttcctgggcctgtattctttgcttctactggcagtgctgtgctgacagccctgtcgtatgtgagatctaggcaggtggccatttttctttgaagctggtcgttgaggcctcgcatgaagcaattcttcttttta

SEQ ID NO: 136435 - DNA, 803 bp, Zea Mays
aaggcccagcttcagtttcagaatgagtcgtagcagcttcggcaaccttttttacaggaccaggagtcgatgctcttgttgtttccatgacagcgtctaacacgctagccattcttctcctcttgggagttgtggcgggagcttttgcaatcttcggcaattccgctcctaccggtgggctcagaatttctggcagcactattgttttttaaaactctggcgttttggccgccccatctctggcttcgactggctcaactataggcaccttcggcactatagtcgattcctcagtgctccgagcggcgggagcagcttgttccactttggcagcggaagatgtctcttcaccaaattttggcactatggccgtttcaatatatcttggccggtgggtcaaaactttgattttcttgcccttcggcatagcagagatggccgaagtgacagtttccctcttttttccctgcttttgcaagggatagcaataatcaggatatataaaaccaattgcatcgaaaaccctattcaaccttttcttgccccgaccctcgaaggctgaggacaaagcatcatcttcggctctggtatatgccccaagtaactcatcgctagtagcctcaatacatttcagccagtcgtcatttggttcgtcaaaccggtctctatatctgaaggtatatttcaaacaaattaatccaccttgactggacccggcagcagtctccttcggcatctcctagttatccacaagtggccataccctgtaggctatgtgctcttgaatcaggtctcttgtacca

SEQ ID NO: 136436 - DNA, 646 bp, Zea Mays
cctgcacggcgtcaggtcctccctggtaggtcctcctccttgctttctctcaggtttctatcaagattcaagaatggtgttcctcctcccatgcttcccctggtttcaggtttctgtgaacatcgtgcaacgagtaccctggttttaggtttctgtgcacatcgtgcagcgagtaccctagttttcaggtttctgtcaagactgtgtagcgagtagcgacaacacaatgtcttctctaaatgaagctccatcttctgtggctggtgagtaacccgaagaacgatccaaaccagaagccacggaagtctgctagttcagggtggaagtatggattttggtcagatcttcaaaacaaagataaggtggaatgcaccctatgtggtcaggttattagtggagggataaagaggttaaatcaacatttggcagaggcatatggagatgcaaagttatgtttgaggctagcagtggattaaggaaggagatgacaagttatttggaggcaaacaagaggaaaaataccaatgtttctagatgaagatgaagaagctgatgaagtggtggaggtgacagtagcagatggggagaatgatgcatctgttgtggagtctcaagcatccaaggtgcaggttaagcccagttctag

SEQ ID NO: 136437 - DNA, 312 bp, Zea Mays
ggtagaaaagtcatgtgccgtgagcagcgtccgcgtttgttgcctcacgtgtaaacagttcgacacgagcgagcgtatagctgtctccatccggttctagcgaagtccgacggtgggatccgattgtggcaaagccacgcccgtgcagtgcgcccacagcaaaaagctcaccgccgcgacggcgattggcagttggatccatatagacggctctagttttatctactcggccgtatacatggacttgcccaattgactcagcggctgccaggtggagcccgcctctcagtggttcgttctcgcatcgcgtct

SEQ ID NO: 136438 - DNA, 387 bp, Zea Mays
cttattcctcgtaactcgagtcaaagtatccaaaatcttgatggggtactcagcataagtcaggttatcttgaacgctaaggtcttccattggtaactgttcttcaggtaccctgagacatttcttcagctgagatacatgaaagacatcatgaacatccgcaagatgatccggtaactccaattgatatgcaacctctcccactcgctttaagattaaaaagggtccaataaagcgaggggacacctttcctttgactttgaatcttctcataccccggagtggtgacaccttcaaatagacataatcaccctccttaaactctagctgtctcctccgagtatcaacatagcttttctgcctggattgtgcagttctcaaattctc

SEQ ID NO: 136439 - DNA, 370 bp, Zea Mays
ccaaccttagcgggagatgcggttccaattcaccagagcacaatcatgacttgcctgagcgcaatcctctcccgagtgcatctccgactcacctgagccagacatgattcggccgagagcatctccgacttgcccgagccagacactattcgcatgaacgcatctctgactcgaccgagggtgtctcgggtgactgcccggagaggcccagacagagccaaattgtccaactcttctccacttgatttcaactcttgggaggatcttcctatggcttagacaaacatatttatagtataactcaattgactaagtcctagaagattacctcttctcccatcttttttgtttcacctcaaacagagcttca

SEQ ID NO: 136440 - DNA, 472 bp, Zea Mays
gtgaaagctcagaagatgctccaagagttcgagaacatcaagttcaaggatggagaaactgttgaagacttcggaatgtgaatcacaaacctcgtcggcaaccttagagcacttggcaaaatcgtggaggatgtccgcgtcgtcaagaagttcctgcgggtggttccggctcgcttcacccaggtagtggtaacaattgagatgttttgtgatctgaagcagctttcggtggatgaattggtggggcgtctacgagcggctgaggaaaggttcgatgataaagtcgaacacctggtcgacaagacgggacgactcctcatcgccgaagatgactggcttgaaaagaacaaacaccatctgcgttcaagctacaaagatagtggcggtgacacgagcgctagttcatcgaaagggaagtcatcggcacaccgcgacaggaatgtcactggacaggtcaagctgacgtcccagg

SEQ ID NO: 136441 - DNA, 323 bp, Zea Mays
gtttgtttcaaacttctcatgggtttgcctagcactagttttcacaaatatgcatcgccactcataactagacttacctcggtcaagctacccatttcatgcaccactttatagtatgaccgaagaaaaaaaggtcatatcactactctaagtgtccaacgactccattgagacttagaactagctgatctttaaccttctcactcattcgttggaaaccaataattgatttccatcaacaggggcacgaataccacataagaccaatcattctctatcatcatgacctaattctcatgtgttctacaaaacacatgttagtc

SEQ ID NO: 136442 - DNA, 648 bp, Zea Mays
aatcttccaataactaccatgtcaacccccattcaaattgactcagccgatggtagaattcgagccgatagcatttgtttgaatgtaagtgtggaaataaggggggtagtgtttcccgctaacctcatagtaatgggtactcaaggaatagatgtcatcctagggatgaactggctagacaagtatcaggcagttatcagttgtgataagaggacgatcaagttggtgtccccattaggaaaggaagtggtgaccgagttagtctcgtctgagccaaagaaaggaagttgttatcagatggctattaatagcagtgaagcagatccacttgagattatcaaggttgtgtccgagttcccaaatgtgttcccaaaggacttaccaggtatgccaccagagcgaaaagttgggtttgctatagagcttcttcctggcaccgcccccatctttaagagagcttacagagtatctggaccagagttggttgagcttaagaagcaaatcgatgagctgtcagagaaaggatacatccgaccaagcacctcgccttgggccgcccctgtcctatttgtggaaaagaaagacggcaccagaaggatgtgtatcaactatcgagctatgaatgaagtcacgatcaagaacaagtac

SEQ ID NO: 136443 - DNA, 370 bp, Zea Mays
catcagtcgggtcacacccattgggatcagcttcagcaaaatccggcactggcacttcctcagcagcaggagcagaaggaccggcatcctgattcaagcatgacactcggcgaagacgtctctttttctttttcttcccttcagcgggagaagttggatgattagctcggcgaggacactttaggcgaacactatcagacctctaagtatctaaagctttgccagactctaggatgggtgctacagtcagtgtttcaacaggggctgcatcagaggaatcttcagccaacatgtccagcatggcacttatctctgcgtcacttggattcaaaggtacctcgaaatgaacctgtttctcatcgtcagggat

SEQ ID NO: 136444 - DNA, 399 bp, Zea Mays
ttcaaattgccttcaagtagacctgtgctcatactcatatcaaactagttagtccatcgtggtgtattggacacttaatcaccaaaataggtagaaatggctatataacatatttccctttcaatgcggagcaccctcgtctactgcgataacatcagcaccatctacctctatagcaaccccatccaacatccgctaatgaagcatgtggagattgatctccacttcattcgagagaaggtcgccatcggtcatgtccatgccctccatatcccaatgacatcacagttcatgaacatcttcatgaagggcctcccctctacggtgtttttggagtttcagtccagtctcaacatctgttgtggctagagcttcgactacaggggtgttagaatttga

SEQ ID NO: 136445 - DNA, 617 bp, Zea Mays
gcttgggcttgtcctcttcctctctctcggtcagctcctctccctctacccctgcctctctttccctctgtctcttaggcagtgaattccccttttgcgaatccttcaaaattctgtgaaatccagtaaaaccttgtggccatttgtgtttctctatgtgccttgaacatccttacaggttcctagctccttcgggagggggttttccaccccaaatacgcttttcaccgaaaccctaaatccccgcacaccacgtgctcggtgaaatgcccaaaccagccaaacttgctccaattgaacccaaatttttcaggcaccttcacaacacttccagcaacatccttgccaaatttcacgccaatccgagatcccaggcttaaatttcaccaaaattcccgttttgagcgatcgtttccgagccgagtgcccaaatccctatttcttcgcctaaattcaaaccaagcacacacttcactcatattgacctatataaacctattcatgaagtctcggctcaatcccatattgtttcgtgcctcaattcgaattccaatcatcctatgtctctatttgtctgtcaaacgccgttttcacgtcgtttgacttattgatcgtcc

SEQ ID NO: 136446 - DNA, 478 bp, Zea Mays
cattgctcaacttaaattagttaacacacaagtcacctaaaatagaacattttagggggtctaacatagaggcattaacacatggcataaaacttcataagactacatttactactgaaggactaaagcacttatgtgcatatgttatcggattgttcttcaattttaacaaggaccgacttatgaacgctactcgcttccaataattattgggctgcgataacgctcatataagacctctaatcgatcaacaagacatttatttatccaatgggaatggaatgcaatatttgacaaagcaagcatcacattgccatacaacaaaaattatgacaacaccgacagacactatccactaaccgtttgaaaaactcaacttacttctcgcttgccattacatcactccccaatcacatgaccatcatgagcatccttcacatgattatataatagcgacctaagcgtcatgttacacaat

SEQ ID NO: 136447 - DNA, 377 bp, Zea Mays
aatatatacataaaatttatgagggaaaacaaatactattttaaggaggctacgctctaccggctaccgctacggccagtgattttcactagttgcccgaggagagggaggcatgaaagagtagacaggtctaagcaaggcatgggacaacaactaccattctctagaacgatcccgtgaagccgaaggcagccgtacccttaaactgctcgcgtcgctcggatgtgttagtgacccttggatgaggatcgcgcggcctagaaaaacgaagatgacgtggatactctggctgcacgtctttgcgctcacggttaatatatagaattgtagaaaaacaaactgccgcgccagccagacactactacagccgagcggag

SEQ ID NO: 136448 - DNA, 317 bp, Zea Mays
acaaaaccgaccctatctacaaaacagatcctatctctaaaaccgaccctatccacaaaacagatcctatctctaaaatcgaccctatccacaaaatagatcctatctttaaaaccgaccatatccacaaaaacaaatcctatctctaaaaccgaccctatccacaaaatagatcctatctctacaaccgaccctatccacaaaatagatcctatctctaaaaccgaccctatccacaaaaccgaacccccacccttccaacacctcgccagaaaccctgattcggagtccaaacttaaaacagccgtaactttcgc

SEQ ID NO: 136449 - DNA, 595 bp, Zea Mays
gcaccgcttagcgtaccactagtaccccgcattttgactcgacatataaacatagaggaagcgatgactacttcggcatgtcaccacctctctatttaagcaaagacaatttccacctacaacggctgaacatccccatcgagcacaccttattttactatgtctcgcatacaaccatatcatggcgtgcgctcgagacactaccgattaacttaacgcaattaccactataatgcacttcgatatacacatgtttaataactcacctttctaaattaacctatctcaccttccgacaccaattaaatgtcacttaatttacattttcacctaatttaacctacaccaacgatgaatacataaatataattattctagaccaactcattagccgattgcggaaaccaccaattatgttttacgctttattaatttaccacaactaacacactactttacgacgaattgttttaacaaacaattaatgcatccgtgaccaatccctacgacgcacaattggaccagtgcaggcacacaaacacttgttggtattccaatcgcaaacacatctacgcgtaccactttctcctccatg

SEQ ID NO: 136450 - DNA, 606 bp, Zea Mays
attctacgcacgcgcggacgatccgcaccgctacgatggaaattctacgctgctacgacggatagtccagaccgtggatcatccggcctcagggccagaccgtcagcgaggacgtttttggtgctcaacactcttgtacccagattcctcattccctatgtttctagaaccttctagcatcttcctccaagcgctgattcactgcttactgcttcctcccgaactccatctctacgtaccggattataccaaagccttggtggtggctgttgtgttcatgtgattggagattgttaacaattgatattagaggcggttgttgcttgcatccccatcaccaggagccgtgaatctcaacaccaaacttcttctcgtcgagatttccaagctcttcgatgcacaagaggcaaagtgggatgaattgttttctcgtcgggatgcacggtggaaggcatccagtggagccccatacagcttctacattgacattcatcatgacgcagagattggccacgacgccagccctgttgttgcggaggagtcggccctccacgtcgtttctggcgccaactacaaggaggcacccaccacctgttcaactccgag

SEQ ID NO: 136451 - DNA, 380 bp, Zea Mays
gcatgctcaccgctaacgactacatcacccttccggtggctctaagggggtgacaccgctggctctctcatccttctccatatcattgccaccgcctcctcccactaattgggttgccgactaggcgcctcattccataccacttctgaccccgagttctgtctttacctcatcctcctagccccacattcccttcctccatcattgcggtaatgggtcgactctacctatcaccttagtaggtgacatggtccttcctagtcctttgtacctcaacaacattcttgtggcccccaacatcatccagaaccttctcttggtccatcacttcaccactgacaaccattgttctatgaagttcgatccatgggggctcacca

SEQ ID NO: 136452 - DNA, 741 bp, Zea Mays
cttaagtcatcgctgacttaagtcgattgctccgttagtagggtatagtggtcaccctgagttgagtaagcgtgagcatgtcacaccgccttaagtcatcgccgacttaagtcgattgctccgttagtagggtatagtggtcaccctgagttaagtaagtgtgagcatgtcacaccgccttaagtcatcgccgacttaagtcaattgctccgttagtagggtatagtggtcaccctaagttaagtaagcgtgagcatgtcacaccgccttaagtcatcgccgacttaagtcgattgctccgttagtagggtatagtggtcaccctgagttaagtgagcgtgagcatgtcacatcgccttaagtcatcgccgacttaagtcgattgctctgttagtagggtatagtggtcaccctgagttaagtaagcgtgagcatgtcacaccgccttaagtcatcgccgacttaagttgattgctccgttaatagggtatagtggtcaccctgagttaagtaagcgtgagcatgtcacaccgacttaagtcatcgtcgacttaagtcgattgctccgttagtagggtatagtggtcaccctgagtcgagtgagcatgtagtttgacaataaacggttcgagtgcctttgagaatgaagtctttttattgatggtgtattttccaattacagaatacaatgtcgtcccaatagcttttgaaatctagctaggggtaaaacttcctgagatg

SEQ ID NO: 136453 - DNA, 880 bp, Zea Mays
gcggagagagagaggaccagtgagagaaactagaagccggccgccgctgcggatcctcgcaggtggtgggaatcgacctccccgaaggccggcaccgcgacgttcagggccctggcaaggttgctcgggtggttgagaccggcggcaaatcgcgccacgaactccggggtagaccaaactccaccgccatatcctggggctcatctctataaaacccactgatctccaggaatccgtcgttcgtggtcgttctgtgggaagcaagcaagaactctccccccatagccaaagtaagatcaagcctgcgcctcatcgcggatccgtgcgacgtcattggccagctcgctccaacagtggtgacagctctttctttccctcgtaccttatcgtgtttccattgttgcgcgtagaccatgagatgtagttgctcggtcggcttcggaggaagacgaattcggggggggctggggcaaggttccgtgagcgccgccgtcttgggagcttacttcaccgtggagagacccgaggaagaggatgagtgccaaccgttggatctgtgttatccggctcggattagatcatgagttaccacctcgtaggatgaacccgaggcatcgaattaggattgtgcggtctggatctggtctcagcgtacctgttcgctgggggggggatctggaacgttggcgtagtatcggacggaggaggattgatcggggtgggatcgcttctcatccgtggatgctagatccaatggtcagtatcacataacaggttataatgtcagcgtctaatctcgacggtcggaacaggattcaacggcccagatcacatcataccccttcgcgggtacattttgctaaagaaaccctagggtatt

SEQ ID NO: 136454 - DNA, 353 bp, Zea Mays
gccaattaccgccgaccatatttgtccaacaacctacaattaagagtaaacaaataagcacatataaaaagatgtatttaaaaacaggtgcgaaataaaaagtcatatagcattacatcgattaaaaataatcttcatatgtgtcggggttagccggatcataactctcatcattactatcaaccatttcaatctcaacaccatcggaagacgcaagttcgtcattaatgtcattgccttcaaggattactaagtcattatcattttgcacctcatcctcctcctcatcaacaaccatttcaatatctacgtccattccgatagcttcggttaagtctatctcaaatcgccct

SEQ ID NO: 136455 - DNA, 655 bp, Zea Mays
aaaaaatgtacagtactgttggatgaactggtatcgtctttctacgaacggaaaggtcctacatttacattggtggacttggtgttgttgggtgtttatgttccaatcgggtgttggagctaatggccggttactgggtgcgacggatccgagagctgggcgtggcaggcttcgaatgttggaggcgagtcgctgcagatccgggagttgggtgcggcaggcttcggatgttggatctcaaagcgactcgctgcaagtctaggagctcggcgcggcaggcttcggatgttggaggttgaggggactcgttgcggatccaggagctcgtccagttctacggcgttgaagaagggagaagccgccaactcagtacacgtcggtcactgaccgccggcggggtagcgccttgagcctgccatgtgccacacaatcccgctggctcccataatcgacgaagctcgtgtcgggccgaagaagtgtgaatgggggcgacaaccacagcgactatggtgcaacagtgtcggggttgggaccgagctagacgaagaaatagtgtgaagttcagacaaggcagcttgaatgttcacaccaaccgcaagaacaagctcaaagacgaaatgggtatgggtatgggtacactgctggtcgggactca

SEQ ID NO: 136456 - DNA, 627 bp, Zea Mays
ggacgaagccgaaactttgtttccattatctaaaaaccctgtggacgaggaagcaaagtaattaacaaccaactcgctcgctccattttcaatcattctctttaagttgtggccagtagatcgtacttatagcatgtgtaaaatattgtttgatatgtagattgtctgttaatatagtggagtttgcaataggatatgagatgagtaaaactactggttccatatattataggtcgtatcgctcattctagttctagccccacaccatcctcctcctctaatggtctagtgggtatgccaattaccgacacgccatgcaaggaccatccaaggcaagagagaggatctatttgtttgtatacctaagatgccatatattttttgccacacttgcttaaggatagacgttcaaattctttgccatattttgacaagcctaaataaaccttgcaacacttttacaagtcgagtaagacttatgccgcaaaaaaatctttccacaactgtggctacaaagtacaaaccaaacacatgtctaagctagtcaaactagtctaaccttagacatgacaaaatgtggtaagttagacaacgctcatcccactcttaccacatgatttcagtttc

SEQ ID NO: 136457 - DNA, 681 bp, Zea Mays
caaaaagctatgaaaaccacttgatcatgtcttgggccaattataaaagatgtagtgcacttaataccctacaaataatagtaagaaagtaaccccaaaaaggtttcagaaaaaccccaaaaggttcaccaaagggttgagcacaaaagaaaaatcaaaatttttctaagtccaaaaccaacccttggccaaagatcaaacatgttcaccctcattcaaacttcaaaaccatttgacccaattgacaaagtggcgccaaaatacctctagaataccctggagaaagttgaaccccaccctaagtcgtttgacacgacttggcatagcttttgtcccggtttggacagctaggacagaggcaacttctcacccctatatctccctaccccgaccgtatcttggcttgggactcacatcaaaaaggtaggatatggtgcaggaaagagaccgtacacactggttttgccaagatctgcatgctaaggtgctcaaatcggccgttgaaccatgacagaagtaagcacacacgtgttcgacgcgggctgacactcgggggcgcgctcagagcacgcccgtgcgcgaaccccctcgcgcccgcggccgcccatgaccatgcccgcgccacggctataaagcccgccccagtgcctggctatcttccctgttgcatcctctgtcccg

SEQ ID NO: 136458 - DNA, 525 bp, Zea Mays
gtcaggttcgtgttgggtacccaatgtggatctactaagagcatgcgaaccttgtcaagaaggtagttctagctaaactcaacgaaggcatcccaaacatggaggttcatgtggtgggctagcactaaaagcctaacttctatgtgaggtcctcgagctcagtgaggaacaagtagatggagcgcgactgctcctgcatgtgtagtttgggttcttacaaatgcaagttcccaagctgattggtgacgaagtccagactaccaatggtgatctcggtgcctagttacatcttctcaatgccatcaaagttgaagatggagatcatctaaaatatgatgaatgtgtatgcaaaacttcctctacatggcttgctaatggtcaaacctattacctctagcaatatagaccagtgtattatgcatagagaatcagaagtgtagcacatgataacacaaggatttatgttggtttaggtacatggtacccaacatccattttatgatggatctcttatctcatatgctc

SEQ ID NO: 136459 - DNA, 892 bp, Zea Mays
ccccagcagaaaaaatgccaaaagatctactgcttccctgaggaatgcctcctaaaactccaaaccccaatgccacaaaacatgaaagaaaagagaaaaagaaatttagcttctttcagaaattgggatatcacactctaccccccttaaaaagaattcgtcctcgaattcgaccactccaagcaaagcatccaagataccccatatagcaccaccattcaaaacatgggtccattattggtcttaattaacacaagaacttctacctcggactaattgtctaaggaaactacacaacctgatatccagcatgaaacaacatgcaatgaagctcaaagcaagtcatagatgcaatcaacactacgatttgacaccatcgaatttggatgcagctatacatcaacatcaatgtcttcaaacaacactcttttatgaaggggtaatatgcactaagcacaacccttaccagcttcaacaattcattttaattcaatggtgaaacatccacaccagatgaatgtataagaagatcaaacacctcccctcaaagcaccacaaaacaagtggttatattgaaacaaaactcctaatcttcctaaaacttgttcttgccatcatgaaaagataatcatgtaatctcacattctttgcaccccacaaaagggagaaagtctacagaactaatggaacaataaagtcggcaagaagccaataacattctgcgcggcacagttcatcgaagaaatgccaaaactccacaaagaccactgacatcacaacaacaacacaatacttgcttaactaatgtcactatacttcatccaaaactcaactaagaaaaatatccaaactagtaaggttaacctacacataatataagtcttcatctact

SEQ ID NO: 136460 - DNA, 318 bp, Zea Mays
gttgggagcaccccgctattcaccagtcatgagccggtgtcctcggatgagtggtagcgcggtggagaggcgagactcaaaaccgaagtaggaaacttgctgacgtcggtcaagacactgaagctgtggggtctctccggcacgcagttggtgtgaaccttcatgcatctccagatccagcctctaatggcccgtgagaaaccgatgcaccaatactccgaggtcaacaaccctaatcgtcattcccctgtgttgctcgctctatcggagatcaaggccagggtcagggtcatcacgacgttatcgtcaaggtccttc

SEQ ID NO: 136461 - DNA, 505 bp, Zea Mays
gtttgattaattttatgtagaatagagtggctccaaaacaaaaaaaatatgctcaaatgttgatccatttggatccaaaaaatctcaccatataggatcgtttgtcaccgtcatcttacaaagggctaatttggtgaccagtgatctcggagggattgaaaagaattgagagaaaaattagttcatttctcccacaatccccttatcctcctaggatccctttatcaccaaatcagccctcagagttaacctcttgcatccaaatgctctcgtgctcgtactccctcaagaatcaagatgaatgccttgcaattacatttaatactatagccaaacgtaaacaaaagctctaacacacgctgcaatcaccaagctcatattcactcatatgtgtctttagtcttcatgtcctttcgatgtaccccacccatcagtgcaacttaggggtggataacgagccagctcgattcggctcgtccgagctaacaggtcaactcagctcgac

SEQ ID NO: 136462 - DNA, 713 bp, Zea Mays
agcgctttcttgctcaggcgagcaattgcgcatgcacaggggcagggaatgggaaatcaggggcctagggaggttggttaccttgagagaggggtctgggacgcttgaacggcggcggggacacaacgaagcctcgggttgacggcggcggggcctcagttgcacggtggaagtccggtgagcgcgagaagagagagatagagggggaaggggcgcactgatggatgtcccggcttgctggcattgaggcggagctcagaggggcaaccggcacgacggggactcgacgacggccgtggaacaatcccgaaccacggtggacggcggtggagctcctcgggtgcgaggcgggtgctggggtgctgtgggtgtgcgaatgaggggggagagcgagtggggtgttgggcagctagaaaaggacggggcgagtgcgacctcagcaaagtccacgacgacgtgcaggtcgtgcgggtgggcggttcgggagggacgggtccgacatgcagggtccacggaccagcaagagcgggtgcacgaacgagtggtcagcgctgacgggcgggacccgttgcgtagagagagaatgggatgcgcgcgcgaggggaattggcgccgacaggtcgatcccaccggcaagagagagagggagcgggtgtgagagcgagcgcgggcgaaggaaacgacaccgataggcgggcccagctgtcagaggg

SEQ ID NO: 136463 - DNA, 704 bp, Zea Mays
cgtgtaactgtagcggttaaggttctccctatagaggcatcggacctgtgaacagtggtgtcatcaaaccaatggctcatcgaacctgtgaacaattatcgttatcttatcgagccgtgagaattggctcgatgcttgggcgtcgaatggttcgacaatcatgttttctgtctaatgttattataatagttgattggctagttagaggttataaatacactaccaatcggtccatactagtgctcttacatattttaaacagttgaagcaaccatttgaagtgagggagagcctcggtaaggaacttgagggatgaaaattggttgattaatagacattagcgtttagagggtaactagtatgcacccattaagcttagaagagtgaagtgagagtttgtgattggtactcttggtgatcgatattacggtttagtggtgatcgagagtgcgttgattatctagagaacttgtgggtgcccgactcggtattgtacatggttgtgagcagttcatcatattggagcaacgaagaacaggcttgtagagagcacttgatccttgcgtggaccaaaggggagcgaaggggagcgacacccttatgtaggcgctttaatgaggattagtgggagtgctgactctttaagaccacggtaaaacattgagtattctaatccttactttactatatgtatttacttgaga

SEQ ID NO: 136464 - DNA, 932 bp, Zea Mays
ggtctatcttgcaaaaacaaggcctcactgtaaatctgtaatagttttaacactattctggactgcgggttgaatattggaaaccagggggtttcatttataaaactacacggccgaagggggtatcatggagccacagtcgttggatcttgcatcaagggctacgattagatcagcgaataggtacaacatctcggccatcggatcaccgatctacggcaccgattataccaccgaaagggtatccctaagatttaatctgagccgcccacgcgagatcaaatggccacgatttaattacgcttgagtcaatactgaccacccgatcagatccagcggccggatttagacacgtgaaggggcaccgagacgtctaatcttagtcgttccataccggatcaacggcgctcgcctatcttcttcctctagtcgcatccacggtagcccaccggcctccccacggtggtggacattgctgacgctagccactacactccctagtgcccgataacctaccatgtctggtgctaccagatgatgagtaaacgacgaactcagtcgaaggctacttaccgatgattacgcagtccgaagctctattcatgctagggcatggctccatggcgacaccacacaccgatgaggaattccttcaagcagaggtcagccaagcgctcggggtcacctcccgcagactccatgtgtgcaggggaaccccagaatatcctgctagcgatggcttgggcgttgcacacgaagatcaccggcgacggtggcacccctagttaccggtgtttcatgctcccagatcacagtgggggggagggttcgaccggattggatgaggagcaggacccgacttcagtttggttatatatgccgaagccgaggatccccagcacggctggattttgtcggcagaggtggttgcg

SEQ ID NO: 136465 - DNA, 515 bp, Zea Mays
atagggagcctgtccatcgcctgtaacgttgccctagtgaacgccacggtatctcgtgtcggtaactcacctctctctccgcccgccagctttcttcttcaaaattcggagccaccgctctcggaggctataaattgggtgcaccgttagctccgctaggttattatgaagctagagcaccagccttcgtctccaattagccaccgtagcgccctaattctgttcttcccccaaatcggccaaaattgctgccgttaacatctcaccgtggccagccatccacaagttgattcatacttctctactccgtgttctagcttcctttgagtctcctattgctcataggcctgattgattgaactagaccaccctgaatcatcgagaacacctcggttttccctcgggtctcgccgtcatcgtgggtagaagaactccgggccggactaactcaattaagggatgaattaggatcgccagaggtggaattaggtgtagaccgacttagggcatgaatg

SEQ ID NO: 136466 - DNA, 332 bp, Zea Mays
gagagagagacggattggtgcgctggggtcgccgcggggaacgccctgccgtcgtcgttcgggtgcccttgaaagaaccgagggtgttcgcccagtcgtgttgaacgtcttcacgggctcgtggtggtcggtgatccctgtggcggcggaaacctccttccctagcgtaagccacttaggaataactcatcgatttcgccacaatggtcgctcggtcaccactcgatcgtctcgaatttggggtcggggagtggcatgcttgcggggcaccgttgccgaggcgcttgcgccgctaggatcgcggccaaaggaggaagaaatgttgctgctca

SEQ ID NO: 136467 - DNA, 643 bp, Zea Mays
cggacaggcactttagactgtccggtgcgcccatatcgcgttttaaaaaaaggcatccagcccgcatccgagccagaggctcagtctttcttccccactgccgtgctcactgtccagcggcgactctctccggcgatctgccctatctccggcgaccctccggtgacctggccttcgtcctctccctctcggtgagcaggctcccctcttccccctcagttctcctctccctctcggttctgtgagcagaggctcattttccctccccatttgcatcaattccgatttcctcgaatccttgtgaaatcttgtgaatccagttggtggaatgcattcaattatccctattgtgtatccctgcaggcttttagctccttcgggagggttttcccacctcaaatagccatttcaccgaaaacctaattccccgcacgccacgtgctcggtgaaatgcccaaaccagccaaaaatgctccaattgaacccaaatttttcaggcaccttcacaacacttccagtaacctacttgccaaatttcacgccaatccgagattccaggcttaaatttcaccaaatttcccgtttagagcgatcgtttccgagccgagtgcccaaattcctttttcttcgcctaaattcaaac

SEQ ID NO: 136468 - DNA, 1640 bp, Zea Mays
gctagggcgcagggaggtaagggttcggcttcctgttgaagaagcgggcggatactatctgcttgctttatttctcaatgccaatcggctgatataatgctgagtacaaccaactatctcctaaaatctctcatcctaatctttagctaatccttatcttatctctagctaatcccatctctagctagtcccgtgcctggccttatccttagcctagtcggtctcacctacctgggtggccttgggccttagccccctctggccgcctggtataggggattccggtcatagaagttgcactcttatcaaggtggaggcgcttgaaacagtcatttttcttaatagccctttgcacctcatcattccaccaccaggtgcctttcacttcctgtttgcctcccctactcacaccaaacacttctaaagccaccttccgaacacatgtgccatctgtagccccatgtcgtctgcatcttctccttcttcccaaggcccctcgcatagcatcctgtccttaaacgtttgtgtcgcttctcctctaagcttccaccacttcgttctcgcgatcttgccacgtttgtcctggtggacacaaacccgaaaatgaaagtccgccaccacaagcttgcgtagagggacaacacactccccaggtatcaccttacaatctaaccaagcacgtctatcctccctccttgcaacgataaagtcgatctggcttgagtgttgaccattgtgaaatgtcactagatgtgattccctcttactaaagaaggtattcgcaatcaacaggtcataggctaacgcgaagttcaaaacattctccccctcttagttcctactactgtacttgaacccctcgtgcacccactcgcaacctacattagtcgcacccacatgaccattgaggtctcctcctatgaagagtctctcaccgataggcacggtgctaatcatgctatccagatcttcccaacctcttggtgctctcacaagacctacctgaggggcataggcactgatcacattcaaagtcgcatctccaactaccagtcggactaggataatccggtcgccttgcctactaacatcaataactcaatccttaaggctcttgtcgatcaagataccgacaccattcctgcccgaagttgcccccgtgtgccaaagcttgaagccaatatcctccacctcttgcccttccatttagtctcctggacacaaggaatatttacacgactcctaaatgctacatccactagctcacgtaacttacttgttagggaccctacattccaactactcgcatgaaacctagtttgtcaagtagcttccttacccttcgcacccattgagagagatgtgaagacccttgctcacttttcactacacttgggcgccgatgtagcgcaccactaaggaaatgacgacccggtccttgctcacttaatatcgtgcccagaccacgacacggcgcgtccccaagggacagacgacccgaccattgcccatttaacaccatacccgagttccgacatggcatgacgctaagagggttatgccccaacgaatatctcatgtgtttcatttccatagaatggctatgtagaggttggctcaccaaacctaacaacccctcc

SEQ ID NO: 136469 - DNA, 811 bp, Zea Mays
caacattacaaagaagtatgtaagaaaataagagtatcatatttgggagaacttacatggctctgaagaatatgaggtgtgtcctgttcatgcgggccaatatgtctcatggggatgtgcttctctgcgccgaccacatctgccgtttttgtgtgctcatcgatatgtccaggtgccctcaatgctgccgggggagtaacggagacaccctctgtgtatggagcgatcgcagacgctacaggatgcatgtccattgaaatagacgtacctgctggcgtatgcacagataatacaggtggcatgtcatcgccagctccggtgctggacattttctcgccgccggccgtacctctcacttccgccgccgctaaccgccgccaatacctcagataaagacgtggacaagcgaacgtggacgagcggctgtaaccttgtatttgtttcctcccgtaactgggcctttatttacgcgcacgaagagcacgtctttccttatctcaaaccggttggagattttaaatgttgcatggtttacgctatcatgtctcacaacgttatgcaatcgtaaaccggcatgcacatgcaaatattcgttcccgtgattcgtggcagaaacttttctatttatgcatgagttatgcacatttccacatacctttatgtgtgcgtatatcggttgcagcgtctcagccgggatacgttgctatcctatgcatggctgacgcaagctggcgtccagtgggccgaacgcgacccgatcggcctcctggctggggcttcgtccactaacgaaagatcagggcttccatta

SEQ ID NO: 136470 - DNA, 578 bp, Zea Mays
gattaatgtaccgaatcgctgagctatttctaatcttgacctttcaattacgatcggacggcactggcacaatcctctcaccgcggattgagcacggcggcgcccaacaccacgacgaccaatgccgcgacggcgctccccgccagggatggtcgcaaggtgatacgagccccaaacccaaccccgactagcgcagcatgcatgggaaaccaaggcgaactggatggagtactccttaccgtggattggtgtctggttgttgctggccacggcgaatggcggcttggtggcgatagcccaagtccggcgaagaattggtcatcggtgagaccggcctggtgtttcccagcgcgatcgatagactcctcggccctcgaggacatccccgggtgacccactgtcgatgatggctcgacggtcgcttgactacgcggcggcggtactgaccgaacacggtggataaaatggatggaggttctccaccggcgatggcgactggaatatgttggcgcgaggtagcaggggagtggtcttatccccaagcggctcctggttgagtagtcgccgcaggagccggg

SEQ ID NO: 136471 - DNA, 796 bp, Zea Mays
cggcagagcttttttgtatcttcggcactgatgccgaagggctcaaaacctctgacatttttgttatttcttcaattttcaatccttcagttttatcagctatcgtctcaactagtttaactaaaggtagcttcggcatcatagctgcctcttcagttctctgcacaagaggagtggcctccttcgttttggcagctgaagaggccccttcatcaaatttaggtataacagccagttcgatataacacggacggtgagtcagaactttcaactttttacccttcgtcacaggctcgtctggggtggccgaagtagcagccttcctctttttcccttgtccccgcaacaggtagcgatagtcagggtaaacaaaaccaatggcgtcaaaaactctgttcagactcttctttccccagcctccgaaggctatggacagggcattatcttctgccttggaatatgctccaagcagttcatcacttgtagcttcgatacactttagccaatcatcatttggttcatcaaatttatccccaaacttgaatgtatacttcagccggaccaaatcaccttcgctagagttagcgatagtctccttcggcacttcctagttttccacaagcggccatactctgaatgctatatgttcttgaatcaaatcccttgtaccaatgaaggagcagacagtactgaaggctttctaacacgcttcggcggcgtcatcaatttcaacctttggccttcggaggctgaagcgggaccaaatgggacgcatgatgacttccttaatgtcttc

SEQ ID NO: 136472 - DNA, 359 bp, Zea Mays
cttgaagctcctccttccagcagttgtgtgaggcgagcgagttctgaacgcattgtatcaactgaagtccgaatagcattgatggatccctcttccttgggtctccacaattcgaacaccgatgtggcattttccagagcggctacgcgtgtagtagcttgagtggccagatcgtcgatgcgattcatctgtgacccacgtaattccaccatctgggcatttatctatcacccaatagtcgagtgagttcttcatgcaccatggccatcctgtctgtgggggacggatatccccgggtccactagaaggcgaaagatccttgcgcggggcctcgggccagttaccccgcaaggccatct

SEQ ID NO: 136473 - DNA, 601 bp, Zea Mays
tcgctccgttacttccctggccgccgtttccttccagcgtattccattctcccttccctctttccctagccgtcgtcttcctccctcggctctgttcgtcgcgcacagcggtgcctgcatgtcctatccttcaccggatcttgcccttccctgctgatttagttctgcccagggtacatcctacgcccgtggtccattcccgcccctccgacgctggtgagatctcctatcttcttttgtaaccctagggtttgcatatatggattccggcatggaatctgccgctgagctatgtgtctagaagttttccgcggccattgatgcagcccgtgacaaattgagtgcttctgttgccgcctgtgtggttgctgatgatctctgcgccacagcatcaataggtaaccatgtggtttctacgcttgatgttcttgaatttgctgtggaggcagaaaaaagtgctatgtgttcttatcaataggcgagtgcagtcgtcgtttgtgctcgggagacattggccaataactatgaggtttgtattctgaaatttttactgagccaatgcttgagatatctgcgccatgagctttgtagcagccctgtg

SEQ ID NO: 136474 - DNA, 331 bp, Zea Mays
gttagaaacagagtaagttcaagaaattcaatccagcaagataaaccacactgttgttatgatgcaccaacatggggtgcaagaaatttgccattgcaaatgaagtgaagacgagacagtttttggaattcagagttttgtttttcactaaaatatataatcaaaacaaagtatagtgcatccaactgggtttcctacaaagctttcctagaaaagtggcacaagagttaaaactgcagagggtggaaaactgacacatcaagcatatcgttgctaatttaccaagatgcgcttcggtttgaaaactcggctaaattgtagataggaacca

SEQ ID NO: 136475 - DNA, 797 bp, Zea Mays
gagagaggaggggaatctcacctgcgcatgaggacaggccaccgcagatgctccttggctcttcgtcgagggacctcacggcacgcagcgaggggaagctccaggacgatcgtcgagcggttgcatagagcagtgcgagcaggagcgccaagagaaagcagggcacggtttggagagtagtgggcgtcctagaggggtttgataaggcgtcgagggcgagcagcagttcccggagtccgcatggtgtgggcgcgagtggaggagcagttatggaaggagagggaggagccgacgtgcaggccctgcatgcgcgtccgcgagcacgagtgtggctgatgggtcgggcgcgcaagaaatggtcttgtgggtgaatgcaggtgaggtattcgagcgcaaaggcgaggtacttatggctgcgtccgagtgaaactagcacgcgtgaaaaggacaacagtttgggaagatgaagctaacacacgagctcggaataacagcaagaggaataagtgaggggaaaacggttgcgcgcaccgcacgacgtttgcgacgaaagacatttcaatgatcccgcaaaaatgacacgagatctagaacgggctcgacgagaggaacatatatatacatatattattggggttctagagttttatagttttcgcaaatactaaattttaggtattcaattaacattagaaaaactaaaattcatatttaatactcgaagaaacattccaaagattctaaaaactctttggaacatcctcgagatatcttaatctgttacaataacattttgc

SEQ ID NO: 136476 - DNA, 768 bp, Zea Mays
tttagtccatgttttggatgccaaatagaaggcctaaacataaactgatcatggtctaacaaaaactagtagaggattagtactcattaaaaaaataattagtccatgcttagcctattattcagtgacggactaactttggtccggtgatctgaacaggctcttacagtacttccatgtccaacccccaaatcaaacgctacctaagatatcaagcacactgtaaattctctctgtcatcttttacttcaaggaatggtatgtatcatttaacacttgcagtaaataggtacgtaatatgtttattttgggcagcaggttcgcggtgtattgatttcctttcatgttactggatatgtgtgaagcattgccttttgtgggtgatgggattactgcagtttgtatgtttcgatttgtacacttgtttttttttttctgcagatttatggtgatggatatataggcatgtagcagatggattgccatttgccaagcattcggatcatccgatgagtagtgtgggctggcttgctgacgaacatcaataagacaggatctctactcatgacacctgcacttgtttttgatgttttccccatagttccctttgatgctgaactttggcgtatgctagtgtgcagtctagctgtctaggtcttgcgcgttggtagatttctgtagctactgagatagcctgatgtgtattacagttgagaacacatatcataaatccctaagtctttcactttattttgtagcaaaccaggg

SEQ ID NO: 136477 - DNA, 419 bp, Zea Mays
gtgatctctgtcaaatatcgagggccgcatcatggctctccattgcgattttcactatattattccgaagcggtctgactgcctctgtgtattgcctaggtctggaaaatccgctcggctcggtggcttagcgagatagactcggtttggctcgatagcattgtgacttgtgagttaagagattaggctcggctcggactattttaggtgccaacaactcctactagtagctttgttgtcggcctggctggaacgacacgctgttaacgataaccacgccactgattcgccgtatgtgtgttaacggacatgacgtggcgtagacgtacgtcgtatggtgtacagtacttctgtttcaccatttttttattactacaggtttcctgctgctttcgttcccagtgttttaatttggctgt

SEQ ID NO: 136478 - DNA, 372 bp, Zea Mays
ggtcaggtgggcgcaaacactcagagacgaaatagacgagctcaggtgcacgacaagatgttaggtagggaactctagcgtctcgttatgtgtgtcccatctcgctacaagacggtggtatttataggtccatccgggggtaggtggtccaaagtacattactgcccccagacaacgaccacattcttaaaacatgaactatacaacagggtaattatagtgccacagccccctagtagttacgcggacacacaattattcccactgattacattgataggtgggccccgcatggcattaccgcgggcccacaacaaatatgggtgtgtctactgtattcgcggtctttgttcgaaggagccttcacatctc

SEQ ID NO: 136479 - DNA, 354 bp, Zea Mays
ctttcttttaaagcttcgggagcaggagttgttatcttttcagtcaaaatttgccctgtgaccttttcttctgttgccacttcttcaatttcgacagactttttctcagcggcctctgaaggcccactatctattccagcctcaatcgttgtagcttcaacttctatctgcttagtatcaccttcagtttgtgctttgacagcttcggcaaccctctttatgggagcggggcttttggaatctgttgtttccaaaatatctaatacatttaccatcctttttcttctaggagttatggcagaattcttttctgccttcgacattgttgcttctgttgaaggacttagaatcccg

SEQ ID NO: 136480 - DNA, 316 bp, Zea Mays
cttgtttataaatattttagattaaaatgcactactggttcctaaacttgtattgtagtgttatgtcatcccggtccctaaattcccgaagtgcacatttagtcctaaacttgtagtgttgtgtcatcttggtccctaaactcttaaagtacacataccggtccatatgatttgtttgggtctcaccatggtccaaacagctctcatatcatttgtgtggtatgttgaatttgtgctgatgtggaactgacaagtccatttatcttcttcctcatccctctcccttcctccacaatgtaattggtgttccttccat

SEQ ID NO: 136481 - DNA, 766 bp, Zea Mays
gagggctggacgcaggtggtggagcacgacctcagagcgcagtgacccggcgatggaggatctgtaccggcgagtaatcccagtgccgtggtgactgatcttggaccgccagacaaccagatcctccctcccaacatggtgaagccccagggcgagcaatcggatcccgagcgacggtatgtacgtggttccacggtggtgcccccgtgtgtgcacggcggaccgacgagttaccccgcgagcttggtttatggggggatttcacccgtgatgactatggctaggggcaaagcggggccagattttatactgaggcagagtccacgttcaaggaggccgtggctgagaatctcgccgacgccgttgcccgagatccatggcggctccaccgggttcggttgtaacgaaccgagctagaagacgacattatcgcagtgtgaggcagacggtgcggtcccacagtcagtagacgaggggagagccacacatcatccgtttgcgtgcggtgagcccgagcagcaggccccacgcgccattgacccagaggaaaaacgcaagcgggccggcggggaagagatttagctagttgggccacgcaggatggggaaaagatgggccaaaaggggaggaaacgacccaaccgaaggtaagcttctttctttctttatttttttattctttttcctcaaaattccaaattttaaaggttcaaactaaattttaaattcctgttttgcactttaaactttcccaaagtgccaaaatt

SEQ ID NO: 136482 - DNA, 322 bp, Zea Mays
ggcgacctgaagaagctagaggttggagagcaggagagattgtgtggggtaagttctcgcggtggtggttgttaagttcatggctgtgcgatgatcatgtcgccttgtgcttcccttcccgttggaggttgcggaagcaattgtccccatttccagcaacctggagagctgtcagatcctaaacatggggagaaagacagcccatcgagcagaactacacaaatttctgctcatagtccctgtcagctgtatgattccactgttcctgtgctcaatcttcaggtaatgcgtacatgcaaatgcaagtagttagtagcattca

SEQ ID NO: 136483 - DNA, 498 bp, Zea Mays
ggactgtgggagaactgcaacatctcgtctaccacaaaagaaaatggcatggcgcctgcaatcagctttgcatatattttacgcgtccacttggtgaaagaataaaaggaggcaagcagtcagtgcgaccgctggcaattaagacccatttggtagggctcctatggctcctctgtctttttggcttctctataggagacagtggcagagactgtaattttatgaaatattattgtatgccggatagaaggagccaatagaagcttattttctcgtgcttcgattttcgatagtaaaatggctctcactctttgatgactctcgatgatgagctgttttttaagaccgtttagtacgccttcggaaccctgccaaagggggcctaacaaggagcagataggctggagatgggccagtaagatttgatcccgtgcccaccaccgcatgcgtggcatggtgaaaaaatgtactacccttgaacgcgttgtctgttctgcg

SEQ ID NO: 136484 - DNA, 672 bp, Zea Mays
cacccccattggggtcagcagcacatggagcacccccattggggtcagcgtcagtaaattcaggcacatgcacttcttcagcagcaggaaccgaaggaccaacatcccgatctaaactagatactcgccgaagacgtctctttttctttttctgctcatcagcagaaggatcaagttgattggctcggcaagggcgtcttgggcgaacactggcaggtctctgaatatccaaggttgtaccagcttctgggagaggcgccaccaccagtgtcccagcaggagcagcatcagaagagtcctcagccaacatatcaagcatatcacttatctctgcatcgctaggatccaaaggcacctcaaagtggacctaccgttcatcatcaggaatttccctgagcgaggcaaccaaatcgttaacttcttcagcagagggtcgcactctaaggcccaaaccgccatcagcgacaggtggattcgacacaaaatgagtgaaggctttggaaggaggcaggttccaggccgagtatgccactggggcaccaacatttgataccttgcctctaagaatcatttcaagtcggttcaccaaatctgcagcgggaactcttctgttggtaacccgagtcgagtcagttagacttcggtacagataagccggctatgccctatcct

SEQ ID NO: 136485 - DNA, 719 bp, Zea Mays
caaaaacttgcaagagttgtatcagttgtttgaaaagtacgccaggtccaaagagctatatcagcgcaagatagactcttagcggaaacccaaggacactccgcaatccagcagaacatgggttagaccggcgtagtccgaaaccggcaggcctaaccgcaaccagcaacaagtcaacactatcactaaccaacaccccaccggagacatagctcgtcactaggagtatcccacacaacagagctgctgcgctaacaccagaggaagaggcagaggctgagcttcacaaccacgaaggttctactgcctctttcatggcgaagactgcgcataccccaccaggggttaccctgaaaccaaggccaccaaagataggatgaccagaaatcagccagccgacaaccaacgagttgtcgcgcatatttaccatccccagcagtactaccaacaacaattccacaacgaacaaatccttcaccagcctaatcatatgtaccaccaacaccaagagattcaagtcctccctccaccaccacatcatcaaaatcatccaccaccgacacccaaacaagaggacttcgccgagcagtctttccacggggtcatccacatgattaccggagggtcaagtgtagacttcggcaccaaacgacagaagaaggatcactaccacagtgttaaccatgtagccctcactagcccagtggttcagacaaaat

SEQ ID NO: 136486 - DNA, 312 bp, Zea Mays
aaaattattttcggatgcaacagagacagtaccaccggtcttacccttatccttgttcctcttctccttgttctgtagtttgtaacagttctcaattacatggttcgtcttcttgcagtatttgcaaaataattcatcggatggcccccttgacttggagcgacccctctggttctttccctttcctttgccacctgagttgaactttttctgctcagtgcggccacggacatacaaagcttctccactcgagccagtagcatcttccgagttaaccatctgtctcatcttttctttcgcagtcaaagcttc

SEQ ID NO: 136487 - DNA, 1071 bp, Zea Mays
gcagatttaagcataatatatgtggagttccatctagttgggacatcagccttaagatatggattgttggttagcttctcttcctttataatttccttaaatttgagcattcttgaaccaccatttctaatgtacttcacagctgccctaacacgcttcactgataggtctacttcttttaggccatcgtgcacaattagattaacgatgtgagctgcacatctcatgtgcaagtacttgccactagctagattagtggtactcaattgcctcctcaaataactaataccggtatcattggcacttgcattatcaacagttattgtcatcactctctccaaaccccattcaaccatgcatcttagcacattttttccaatatcatcacccttgtgtcccttaaccaagaagaaaccaataacttttttatggaacttccatttatcatcaataaagctagcagtcacagtcatgtagctatctagttgcttagaagtccaaccatctgttgtcaaacaaacccgttgacaggagtctttgaagaatttctttagcttagctttctcctggaagaaacaatgtactacatctctagtacatgttcgtctagatggcactagaaagcgagggcatgctttggacataaactttctaaacccaggtttctcaccaaagcaaaatggcaactcatcctctattaccatctcggcaaaagcaacccttagtgtgtcttgatcaaacctccacgtgctaacaccttcatgttgagttgcttgtagagtaccttgagatggatctttgttaaacttatttggattgcgtttgcaagcaaccaaatgcctcttcaatgaagatgtgccatgacgtccagcctctgctttcatatttcgatggcaatatttgcacttggcatgcctaacgatgtctttatcatcttttatcttaataaaatgttgccatacatctgacctcggtgctatttccttcctactcccatccttagtcaactcagggtcctcttgtttagctattacatcctgtgactgagatgctggtgcaactacattctga

SEQ ID NO: 136488 - DNA, 450 bp, Zea Mays
gggtgctagtggtggaggagtgcccgggggcgctatccctacgggtgctgctccaggtggcgggggcgaggtgcctcttccagtcagtggtctttctctgatgcagtggctgggcatgaagttggatacatttgatggcagtggtactccggtcgaggcggcagattggctaacttacatggaggataagatgaatgtcttcgagattgtgtatggtgatcgtgttcgctttggcacacaactgctgaagggagaagctcagatttggtggaggggcgtgcaggcagctcactcctcttcaccaggagtcctgtcctgggatgtttttatcaggcagtttgagaggaggttctacccggtcaccttcctggataaaatgaagattgatttgcagtcctacaagcaagagaagaagtctgtcatagggtatgaagtgggcttcaacaagat

SEQ ID NO: 136489 - DNA, 661 bp, Zea Mays
gcgaagtgtagtgtaccggtcgtcctagattccaaatactaaattgtgtactcttccaagtcttcttctgctcgtcgccctttcgcgtatactgggaagcccgagctttgtcgtggcgccgggaactttaaacttggctactggggggggcccggcccggtggtccatgcatgcacccaccccctagccctaggaaatgcacgggctgtgtgcacgcgcatttcgtcaagtcgccgtgacatcgacctactttagcaaaaactaaggtccttgtttatgagcccgagttgcgttctagtttatgaatctgtatccgccaatttgtgtatgcgtcaatggatacatatatatatacatatatataggaccagtgcagtgcatagctagctttgtgagacaacagacacccgggccgcctcatcatcgctcaaagtgtatgaacactcgcctccatcgatgggtccatacgtacctgaagaagaaacaaacggctttggcagccaccaaacgcactgcgtgtctgcgtcggcgcgacaccgcagagtatccggcgatcagtagtcagtaaacgagggcggcaaggctcggcacggcaggcatggcgacgcattgatgaattcgagtctatgggccatggtcgtctggactctggagctgtgga

SEQ ID NO: 136490 - DNA, 564 bp, Zea Mays
ccgggcaagggtggctcctccaaaggtggttttcactgggatgaagtgggctaccttggtaagacggtctattattacccagatagagtcattccctttttgcgtccagggcagtctggttacaaaatccatgcctatttcctcccactttcattcgggcactgggaggggttgcaataggcctgccggtttctggtgctcggcttttgttcgttggcaagtgtcacaccaggccacatattgtgctatctctttcttcatccctctccaccagtatctggttttgaggtctaggtacatcttggtggttcctgggtggatggagtaggctgagttgtgagcttcattgagcaggacttcccgtgcctctccttttggtacacacagacgattcttgaaccaaaggactccttgttcatctgtcctgaggtccggaagttgttctttgagagcttttgccataagtcttgttgtctccgtgtccaggcgttgagctttgcatatgagatcttctagcattggcttgacttctaggctgccgttgttccccagacatgcattcag

SEQ ID NO: 136491 - DNA, 502 bp, Zea Mays
cgagccaagaatgaggaggccgacgcattggcaaggcagccgccagaggcgaggccctgccctccgacgtattataccatgtcatcggcacgctagccatccgcagcccagagggcctccaaataaccaatgacagcgagggtcaccgcatagtcaacctcattatgactgaagactggcgggcaccaataaccctgttcctgtaggggtactatcatccaaccgatatcaacatggccaagcgcctcaaacaccaaagtcgggacttcgcactcatcgaaggccagctttacaagaagggggtcagccaacccatgcttaaatgtgtcaccgagaccgaaggcatccaaatcctgcgcgaagtccacagcgggacttgcggctctcacgcagggcctagggccctagctgcaatggtgatccgtcaaggcttctactggcccgccatgatctgcgccgcaaatcgggtcacaaggtcatgcgaagcctgccagaagttttc

SEQ ID NO: 136492 - DNA, 461 bp, Zea Mays
cgcgtctgcttccggctgcctcgttttttatcctcaacaggccgggcaccagcaggttgcatctgattttctggtcgtgcaagggacaccggcaccacgcctggacgccggccatacccagtcattatccaccaaatactcaagacgtgcgtgcgtcaatcgaacatcaagcgcggtgttacatgcaaatggcagcgttgtggatggcgttgttgaatcgacaaaattgcacgtggatattggcaactgaaaacaccactagaagattagcatgccataatgttccgttttattaaaatcaaatctttcgccgatgaaccatcgtcggaaatgttcacatgcatgcgagcaccttctgagtgagactaagcgaacaaaaatagcttaccaaggatccttttagagatgaaaaaacaacaaagcctttcaacggcacgaacactaataaaccacacatggtg

SEQ ID NO: 136493 - DNA, 770 bp, Zea Mays
gaaacaccagggtctcttttagaaagtgcgcgcagcgaaggggtatcttactatcgtagttgtccgattagccttggacggtcacgatttaatcctatatctgccaaaccggtacgccatagggaccattggattatcaatcaacgccctagattttatgaagctcggaccattcctaacccacggattcagatccaatggctgacgcgcaccggtaggaacgcatcaatcggagccgttcattcgtagatcgacggctcccgtgtcgtcatctccaatccgcaacaggccacggcggcgcgactctgcccgcgatgcaccctcaccggcgaggtacccgacaggcggacaagagcacaaaacccccaatccgaaagccccaacgcgatgaagagaactaggcgaatcctatggttagtggctcacctccaatcgatagtcaaggcgggctggccacggtatgcggcggcgccacggcagtgacggtgctctggcaagaaattgccagtacaccggcggtccaaccttagcgcaggagccacggacaccatcgccgcaccacgacgaagcccacggatccaacttcaggaccgcaacgatgctaaacttgccaagcccaaatggcgaccaactccacctcacgattcggttcctgatttgatttggggctagatacaatttggaggagagatggggtaaacgcgccccaatttatacaccgccagacggaacacaactacctggcaaaatccacgggattcacgcggagt

SEQ ID NO: 136494 - DNA, 385 bp, Zea Mays
gccaaaatgatttgtcaccgattgcctggaccacccttgagtacgctgtggtgaacatagctacagagtagtactcgtggacaaaatcctccatcctgacatccctaaattcctgagctgttatcaagcatagggcatggatgcatggtttgcccgtgtgctgccactctttgcatgaacattaccacagctgagcattgacaatgtgcttcgaatgcacatcattattatcccttacctctgcaatgtagttgtcagctttccatactgctaaatgacctaaacctcttgtcctggcgtgtaggatatgcagaaccgatggtaaaatccgtccttgcaacttttgtgcaatcctcctcctcctgtgaaacaactccataatttc

SEQ ID NO: 136495 - DNA, 469 bp, Zea Mays
ctgtaagcaccttcggcgctacaatcgccttttcagcactctgcacaatcgaagcaacttgctttgcttcggcagctgaagaagtaccctcgccaaatttaggcactatggccggttcaatatatgcactacggccggttcaatatagcgcgactagtgggtcagaaccttcacctttttgttcttcagcacagctgcggtggccgaagcggcagtctttctctttttcccttgcccttgtagcagctaatggtagtcaggatatacgaagccaatcgcatcaaataccatgttcaatcttttcttgcccctaccaccgaaggctgcggacaaagcattatcttcagccttggaatatgtcccaagtagctcgtcactggtagcttcaatacatttcaaccagtcatcatctggctcatcaaacctcttcctaaatctgaaggtatatttcaatcagactaggccactg

SEQ ID NO: 136496 - DNA, 294 bp, Zea Mays
ataggcgagttggagtagctggagagcgtcaggtcaccggcggtgagcagatccaccaccgctatcgcttgaggggccttggtacaactctttgtcgctaggttggtgggcagattatgatgagtaaaacggcaccaccccacagccgctgcaaccactttcctcgcgtttctatgcattgaagacacgacgtgtgtgggtctgctgaatccgctttaccgtcccctacggagcgtcatgcatgggttgttgggctcctatcgcggtgcatttagcatgggcccaattgccatg

SEQ ID NO: 136497 - DNA, 975 bp, Zea Mays
ctcaatttatatagaaggaaggggtctctgcgcaaagatcctaagacacagtgcacagacgcgaggactgcgggtttattatttaacaacaccagggactcttttgcaaagtactatggtcgaaaggggtacggtgagatttaggccgtccgattacgcgcggatggtgcggattagatcctactcaaaacgaaccggtacgagacgctgcccgccagatcacgatcctacggccacggatttaaaacagccacaccctatttgtctccgtccgtgagccgatcaacggcccgggttggattcggccgaactcctgtgacgaatcaatcacaaccattgatcacgatcgaacggcgcagagcgcatcttgaacccccgacactctctctcctcacctcctaccggtctaacctcggcggcgcgcagcaggcatcgcggcagcgccatcaccggtgtgcagcagaccgagccccaggtgtcccaaggtgtgattcgaacggctcttacgcgtggatgaaaagaatgtgatcctagggaagacaatctcaccagaaatcgtgcagtgcagggctttggcgacatcacacggcggacgttggtgaaggagcctgaccatgcgtgtagcagccctggcgacggactccaagtccggcgagctaccctcgcccaaccgcggcactaggtccccaagattctatcctactaagatctactcgcggtggggagagcggtgaagcacagagacgaggtcttaccggagttttccgtaacgaagccccccagcgacggtaatggcggatgcggccctgatctgccgactccggcaagaaatcaaacggcccccgccagcaaccctggtctgccgccagcgagcgcacaactcccacgatgctccccgacacagcgcgagtctcacgaggcaactggctactggcttactgctgatatcttcgcgagctcacccctccaaccatg

SEQ ID NO: 136498 - DNA, 444 bp, Zea Mays
gcgagaggaatcaggtagctgcaacttatatgccacggaaccaatacgttgtagtacttgaaaaggcccgaagaatttgaatgccagcttctgatgagcacgaactgccagggacgactgcacatatggctggagcttgaggaacacccaatcgccaactgcaaactcgcgttcagaacgacctttgtcggcttgcttcttcattctgagtttagcccgttccaaatgttgtcggatcagttcagacatcaattgcctctcatgcaaccacgacgccaaatcagtggactgaatattgtccttctctgagatgccaaactcatgtggccggcacccatacagagcttcgtaaggtgaaagaccagtagctgaatgtggggaggagttaaaccaaaactgagcaacagataaccacttactccactgctttgggcacgcatgaac

SEQ ID NO: 136499 - DNA, 282 bp, Zea Mays
acctgtggaggactggccgcggtggggttgatttcgggtggcggaaacttgatttgggggaaaaccgaaattcaagcgcactggtgcacgattgctagcgattcacggtggctaggtgggtgatgatgctgcgcagctagtgggggcttcaatttataggcggagtgatcggtggccgcaaattttggacgagcaacgcggcggccggaggggaggaagaagcctggcgcggtgaatacgtggcgattgccgtggcaagctccccggcgacgatgggacggg

SEQ ID NO: 136500 - DNA, 480 bp, Zea Mays
atggagaggcagaagtcctggctatcaaactgtttgtcgttgtcgactgtgagctcggacgggactccgaatcggcaaacaatgttttgccagaagaacttctgggcagtcttcgacgttattgtggatactgccctggcctcgatccacttggtgaagtattcgacggcgacgaaggtgaacttgaggttcccttgagccgtaggtagtggcccgacaatatctagcccccagcgttgaagtggccatgtgtgggcgatcagcttggtgaactgcgaagggttgctcgagcggggagaaaacttctggcaagcttcgcacgacctcgtcactcgattcacggcgcagattatcgcgggctagtaaaatccttgacggatcaccttggcagcgagggccctgggccctgagtgggagccgcaagttccgctgtggacttcacgaaggatttgaatgccttcggtttcggtgacacatttt

SEQ ID NO: 136501 - DNA, 503 bp, Zea Mays
ttgggacttccactaagacattgaccccttctcgatcgattatgcctcaacgatcgtcgatgagtccgatgcatattcgttgtttgttgcgtgagttgcttgcctcctacatgcccctttgtactctcctcctcggaagatgattgggactgtgatgaggcatacatcgactccactgaggaggaagtctcctctgaggagatcggaggagttggtagagatgtggctgcgtaacagcagctccaccaacgaggagcctgaggaggacctcgactgagatttcagcgacgatactagtgtggagagcttccttgacgtcgctgccgccaatgacggtggtgacaaggaggaactagagcgtaagcgtaggaggttgatcagatacctctgccttttatagataagatttcttatatagggtccccttgtagtcctgctccttctcgatgaaataaataaaacttttggtcaatctgttctatttgtgcttccctgtgcttgat

SEQ ID NO: 136502 - DNA, 686 bp, Zea Mays
agatctacatcttcaaggacaagtatgcaaagttcaagatgttgtaagatgagtgtactggaaatgttttataggatcgatgtaattattaatgatcttaggtacttgggccataaggtggatgatgatgacttctcccactaattcttgagaagtttgcctctaaggttttacacattggttaccatcattgtggtgttacccctacctaagtactaggtgatgtggtcacacaagacacataccatgtggtaaggaaagatggagacgttgatgatgacaataataagaagagtgtgacattgaagaccaccacttcaattaaagggtaagagcaagaaggaataatcaagtgacgaataagatggatgctcaaatgatgaagatgaggagatggatctctttttgcatcagtttggcaaatttatgaagaagggatatgttgtatgaacaagaagatactcattaaagagaaaggaagaaaggtggtgctacatgtgtggtagccaagatcatattatgcttattatttttaataccttcttgtcacatctataaatctcattagtcatataacatatggtcattatcaccaaaacccacattagggcttcatcgcacttacaaaaacaagttaacttccaattgattttagggcttcatctaaggtatcttgttctagattt

SEQ ID NO: 136503 - DNA, 493 bp, Zea Mays
ggtagccctaaagtaagggtcatccaccttgctactaggaatgtcaatggcatgagaagccttagcccaagccctatcaagctctcttgcagtcttaccgttacttgtccatgtgccagtgtctatcctctgttgacgtggtctagagcttacaccaagattgtagtctataacttgttttggtacttgtggtcaagtccttaccatcatcctaggcagtggaccagatccttgtggtgcctcctgacttaacctagatccatcacccctatcatatcatgcaccagctctttgtctgaattcatgctcctcacaagactgatatataacatcctgaagttcatcatcataatcatcatattgttcttcaccataatgggttcttggtgcttcatctgtctgttgcctctactgaatccttggcctattctttcctttgtcttgtctaactcaccagtaaagaatgtctatttaaagagaaacatagggacaa

SEQ ID NO: 136504 - DNA, 527 bp, Zea Mays
agcgaaacagcgagcaggccggcgacagtgattccgagaatcgtcctcgcgcgcgtgggcggtaggcatgcatgtttattttgcccgtgccgtgcgtacgtgcatgtgtgccctagcccctagctctcgtcgtgtgtataaaacggggcgcttcgtgtgatcgcctgcaggctgcagcaacagcaagcacatcactgctagctactcggcacaattagcgctagcccaaaagcacagcaaagaagctatactctgcgagcataagccctagctagctagttagctagaactcaagtgaagctcgatacaagcagtagagcacacagctgcaaagggctactacgtactactagtagcttggtagtagtcaggtatatatatggccaacttctctgctcacgccgtgggcaagttcctcggcctcgtcgactgtgtcgccggacgcaaggacgacgtcgttcaggttcaggagccatggacgatgatgctccgacggcctcaaccatcagctgctcggtttatggcta

SEQ ID NO: 136505 - DNA, 612 bp, Zea Mays
tatcctaatcccaaatattgaagataatgtaccaagatttggtagataaagaaaaggagggaaaacaatatcactcaagatcattactttcgtgttgatatcttctatgcaactatagactctattacaacagaatttgatcatcgcttcaatgaggtatccacagaattgcttacttgctttgcttgccttgatccaagagagtcattttctaagtttgatgtgaataagcttgctcacctcacgaagatatatttggatgatttttctcttgatgatcgagaagcaataaaatatcaattagcaaccttcattattcatgtaagaagacttgaggagtttagagtttgtcatgactttgcaagcctagcaataaaaatggttgaacttaagaggcatatagtgtttccattggtttatcgcctaattgagttggcaatgctattactggtagcgaccgcatcagttgaaagagctttttcggccatcaagattattaaaaccgagttacggaacaagatatccgatggttggcttaatgatttaatggtggtgtatattgagagggagatattcaaaggaattgatcttgaatctattaaaaaagcattt

SEQ ID NO: 136506 - DNA, 1913 bp, Zea Mays
aaaaacactatttcagttgatttaaggttagggcagtcaattctctgatataaaaaatcagttcactgcagatttagtgtcatgctacatactataccttccaagcatatgactgataaaaaatttgctgctgccattggaaaaccatggactcttttttccatctgaatatagtccttggtcaagtctgtatcgccaggatttagctgattggaatgtcacaacctaaggcagaataacttattattagtacagattaactttatgcaagggaagtaggagtattctgaattctgaccttctcatctgctatcatccaactgtaactttggcaagtttcatagaaggaaaatagatctccctgagaagcattatcatttaaggaatggcaaacgtgaaaagataagcatatagcaaacagatacaaagcacaccttaggcagagatggataaactggcatgctacagccaatacaaagacgttcactttgagtattcaatgtcatagccactgggatatccacttcaactcttccaaaagcttcacagactaagatacctccatttgctaaaacagcagcacgtacagtctaaatagtgcaacagctcagtacattgagtgtataactgatccagattcaagattcaggagtaaatgatctcaaaatggtacaacttacagagttccccacagattttgcagatagtttcccagtggtattttgaacttctacaattcccatgttcagacttgagtattcaatggaaactccagtttttggaccacctttaacagaaagctaagcaggaggaagataaaactcaggacccacaatctttttacgaaaatggaactaaaatgtcaatgatttggcaacagcatgctaaggctattcacaatggagattccgtaccactttttccaacactgccacatcatccaaggtgtcatgaaactcagaatgaaacaatgcctctcaatgcaaaaaaatcacctcgctatttcagactaacataccaattaaatgatgtaactcaatgaccaatagaagttagtaaaatatgtaaagatgaaacaaatcactctcaatggaggttccacacggtttccaagaccttggaaacgagttgacatggtttcattcccatgaaactagtttcatcccatgaaacttaattctcttaaatgatatgacatgtcatcaaaaggtctgatgtggcacactattaaatgtgcatgaaaccacaatgaaactactatcgagactagcctaatagtacatccccaaatgtgcattagaaacttgtagggatgtagatatagctggcataaatttatagaaagagagcaggttattaatggttagttggttaccacaaaagaggcgcctggagtgaggtaaatatactcaggatgtatttgcaatggtccatacacttccaccttgacaacctgacttaaaactctgtgtccagagctttgtttagtactgacctgaagattggacatagtaaggatcatcaaccaatacaagcaactgaacatatatctatcaccaacttacatatagagatgtaatgccgatttttgcagctttaattgaaaattcgggtccatccattgattcgcttggaccaataagctccagaatctcatcgtcaagatgcaactcaatgtccatatatttgaactgcaaagatggagagaaattagcaaactcagaaaaactacagtatagccaatcaaatgagcaaagacaagagcaaacaattgtcacagcattaagatttggaaaggaaaaaaaatcattgagacaaataataacaaccctattttccaggcttgaaccaacatgataacttgaagaactcatagaattggtgttagctgattgaatacagttgaaaaggat

SEQ ID NO: 136507 - DNA, 318 bp, Zea Mays
tgaaccttacagagcttcacttcagaattgcgggtccttctgactgctgagtcaagaatcttcactggcttttcccggtactggagatccttttgaatctgaattgcttctgcctcgatacgggtttctggtacttttaggcatttgcggagttgagacacatggaacacattgtgaatatctgacatggattctggtagctcaagacggtatgccacgggtcctattcgggaaatgatagggtaaggaccgacgaaacggggtgctagctttcctctcacctggaaccttttgacaccacgcattggggaaaccttg

SEQ ID NO: 136508 - DNA, 561 bp, Zea Mays
ttttttttttctctgttgctgactgctgccgtcggcttcatctggtaggtgaggtcgtcgcacacagcaggcagcaggtgaggaacagatcacgaggggggatggagcgaaagggagggaggagggaggacagggcgtgcctctctctacgtacggtatcgacctgctgggtgtggcagcacactactcgtgagtacagtcgtcactgtcacactgttgcctttatatattcctagccggtagctcatcacgcttgaaagacgcatgcatgcatgcatggcacagttagtttgctctctgtgttcgtaattaatttgcatttgctcttgcctgatcaaatcaaaagcgatcgataacctatacacatcaaatggttccgaatgtacgtacgtgctatgcccaaagtattttacgatgatatacggtgcatgcatcgcatactgtatgcattatacggatggatggcaatggcatcgaccacacaatagcatatccatggatcttttatagctaggtacccgcccgcccccaatcaatcatgaccctgagatagtagtggtg

SEQ ID NO: 136509 - DNA, 444 bp, Zea Mays
ggaaagaagaggaagactgctgcttcgaccaaggctgctgcttcggccactccagatgagcctgcgccgaagagcaagaaattgaaggttctcacccatcggccacgctatgtagagccggtcgtggtacctgagcttggcgagaagatctcttcaactgctgaatcaaaggagcccattcctcctatgcagaaggctgaagaaccggctaccatgctgaaggcgtcctcagccgaactagctgaatcaaaggctggtagagataaggtcggagaaccaaagactggaaaaacaaaaatattagaaattttaagcccttcggcggaagtaacagtgccgaaggcacaaaaaagtcttgcggcaaccccaaaaagaaaaaggatggtaaatgtactagacgtgctagaaacagtaaaggcttcaagctctactccttcatggaaa

SEQ ID NO: 136510 - DNA, 1232 bp, Zea Mays
cgtccaaaatattcagagaaatatcttgtgtaatttttaaactaagcttcatgtttatctttttttttaaaataaagcaaatacaactgttgttaagaaatgcgaaggcaatcacgctcgattctttatgagacttgagaagacatcagagaaatatcttgtcagctagctgcaaaagtgagtcatgtcttttttagtcatttctctgaagcacctacaggatgcagctatcctggagaaactgattgacacaaaaaatagagaactaaaggtcacagcaaacaataaccaatgagccacaaaagtccgaatcaaattaaggccctgggatggagacataacagagcacaagctggtccaccagaccaccactgcgtactgcagcaccggttctactaccaccaaccaaacagacctgattttgaagaaagcagtgagcaagtgacagagaatgcatatacaagtccccttcaactgtaccttccggcacagaccaaatgacaggatccagagggtctaccgtcacatggcacagcagatcctccggaaagcttcccgtctgttaacaaactgtacctccgacagcagtccgcccatccggtgcacagctgtgatcgggctgtggaacggcgtattttaacaaagacagacagcccccaaagctaccgataccgccacagagaacaaatcacagggacacgccaaccgagccttctccccactctaaaaatatgatgagcagagcatgcttggagttggaatgcacacccctgtggatccagcttatggacttaccctcgaagaccccaactctacatagttatactaccattgcagttgcaggcccccagtacactccctaagaggcttaccactgtgctactctaattcttcattaagtagcacttttggtttttgtctaatttgattaggttggcacagtaagttcaacagcagcagcgcgctaagctgcttcgtgatgattggagtcctttcagcttttattgccctcaaatctgttaatcgataaatgacttcaatgctcttcccattaagttagctgcatccactgacatgcacagtgcaggaagcaaagcaagattggaacaagtttttcactatcataacttctagtggggcttgacccaacaacgtggtccaatctggaaaaggaacgcacaaataagacactgtatgtttggagatcccagatttgaagaaaagtaaacaga

SEQ ID NO: 136511 - DNA, 737 bp, Zea Mays
tcaccgcgttcgcgggggtgagtgcgtgggctcgacgggtccaaacgacgggcactgtatgttccggtcctccgcgcgcatgatttccgtgaggtggtggccgatggctgccgcggcctcactggtgccacgctcgctgtcctcgctacacggcatggggaaactcgggtcgatgccgactgttcaacgaagatcaacatcgctgcggatccactgcgcgccgtggccatctcaccccaacgtccctaaccattggtaagacctcgctgtcatgcgccattctcttctctgcgtgttggggtcgttagtgctcggaatagagttctggggcgtgggggcatctctctaccggcgtgctcacctgtgttccggtcgcctgttgctattggccggatgtggcaggatgttgaggacagtagcatggggtcgtaaggatgaagacaacgcgtgcaccgttgagtctctaaccagcggccacgattagatgagtgggcacatcccgggtcaattgaatcacaaccgtagaatcgtgatccgatggctatttccgcgcatgggtttaggatatcggcgatctaatctgagccctaggatgttgatcggacggctcagatcaaacgataccccttcgtgtagacagtttttcatgtgagcccctaggctttacggaaatagaacccgccgtccgtagtttctgttcactgggtctcaggattcctgcgccgaggcccctgcgc

SEQ ID NO: 136512 - DNA, 392 bp, Zea Mays
tgtcacacacaatacctacagtaattcatcagtgccgaacagttcgcagagaaagtcaactacaagccagtattcctcttatgctgatcagattgtaattatcaagggttaatagagataaccttcagtactcttagcatcacttgaaaaaaccttctctgggatgtttggaatcatagggagtgtgttcagatcagtctctaatgacatcatttgataccttggagcaccaatcctacatcaagaacagaattaaacagcaattctccggaagaggcatttgcatgcatatttcagttccagctacaggattaggatcataacgactaagtgttgttttaatttttttatctttcaatatgactgtgtgcacatgcttgatatccattgca

SEQ ID NO: 136513 - DNA, 678 bp, Zea Mays
ggtgtaactaaggtattacttattgttcggtagatatgctagtactctactagtcatcacttaataggtcccatcaatttaacctaaccatgcataatcgctccaaaactcatctggaacttcaaactctaaatctgatcaatcctactacatctttgagtttcaatatgtttcaatggtcactaaaaacttttccaaactctggaatgacccataatcttttgttctttctaggattctcacttttggtcccttaatcaaagtatgcacaactgaaagtccttctaggttctgactttaatactcaacttgatcttatgaccatgaccattacttgagctaggatatcttgagccttctggcttgagccatctaaatctatatgaattactccaatggcatcaagtcatgtctttaaatgttgtggtcttcaatatcacataacccttcacaacttgatgaacttgactcttgcaagcattctcttattcaccttcacttttggtacttcagtcctcttgaccttctcccttgattagtacctcgaggttcttccttgccttagtcctcggtctaccaaactatctacaagtcgtgttcattgattatgaacctattcaatgttcgctcttcttatttaccatcttcaacttaggatcactctcctcagcatgactt

SEQ ID NO: 136514 - DNA, 380 bp, Zea Mays
gtcggccagagagtcagggagtggtacacgggcctgccggccagggagtcagggagtggcccacctgagtgcttgactgcggcccgcggggtgccttggcctggcctgagtgggttagggcgttactgcgttataccgtttgcctattgggctgggccaaatctatgagtgattgctgtaattttgggtaaaatagggaaaatcgggtaccaggatgggtaacccgaattacccaaactaaaaacgggttttgtgacttgctatccgaaatagtgatcgggtaattcgggtacgggtaattcgggtccgggttcgggtaaatcggatttaggtaatgggtaacgggttttttgctcagtcctagtccaaatcataccaaa

SEQ ID NO: 136515 - DNA, 293 bp, Zea Mays
ctctgttatagctttccaatttatctgtatatactaaattgtactacatcatacaaagacaagattatcagctcattaaaagatgataccaatgaagaaaaaggaggtacaatctattccactttcactaacccgtcagatttccttcttctacataaacttctaatactcatattgtaacaatctcactttcatacaatgttaccacgtaatcgagttttgaaatcgcgtgcaggacgtgtggcatacactggtttgttcatcaatctctgccacaataagcagcattgaat

SEQ ID NO: 136516 - DNA, 770 bp, Zea Mays
acaaaactgagacgtgatcacaaagttggtaaagaagaatttaatgttgtcaagcttcaagacaagatagtgcttggcactgatgatgagttatcaatcagatgcttttttctgattctattcaatcgacttctttttccatctgcttcatggggcattacaaacaatgaggtactaatgacttcaaacatggcccgaatggctgatattgactggtgtcaactagtttacacggatttgtgtgatgctgccacacgttggcacaaaaggaacaaaacaaacattacaacaacaatatatggatgttcactcatagttctagtaagtaattattttgtttactgtgcatatatatgatatgcaaatatttgttttgtactaattttatatttttttcattctttttttcatatttactatcttgatcacttacatcaccctgcatctcctgataacaaatatggtactccccgcattaagttttttgataatgagaccataagagatttggctaggggtgacagacgtccaccccgtaaaactggtgaaccattcggctatgcagatgttagacatatacatttttgtcctgttttgcagatgtttcaattttaattactgctaacaattgtaactgggctttatacagtttcgtagtcgttcagaaacgtgttacgtcattgcaccagaacgacccgtttctgccgttttcaacatatatgtgccacgtatcaagcatttgattggcaacaagttgaaatgtttgccct

SEQ ID NO: 136517 - DNA, 964 bp, Zea Mays
agctgggacacgggaaacacattgtggatatcagacatggattctggtagttcaagacggtatgctgcgggtcctactctgccgatgatgggatagggaccgacgaatcgtggtgctagcttcccttttacttggaatcttctgacaccacgcatcggggagaccttgaggtagacgaagtctccttcctcaaatctgagttctctttgcctgttgtccgcataacttttctagtgactctgagcttcaagtaatcttctgcggatcagggcaactttctcctcagcctctttgacaaaggcaggtccttctagttccttttcccctacgttggaccacatgagaggggtctgacattttcgtccatataatgcttcgaacggtgacatcttgatgctggcctgatggctgttgttatacgagcactccacgtaaggcaaactggattcccaacttctatcgaaggttcacacacaggctcttaatagatcttcgaggaccttgttgaccctttctgtctgcccatctgtctgagggtgataggcggtgctgaagtctagcttggtgcccatagctttctgaaggcttgtccagaatttggagatgaactgggttcctctgtctgacactatctttcttggaatgacatggagtctgactatctctttgagataaattcgggcaagggtggctcctccaaaggtagttttcacgggaatgaaatgggctaccttggtaaggcggtctattattacccagatagagtcattccctttttgcgtccggggtagtccggttacaaatccatgcctatttcttcccacttccattcaggcactaggaggggttgcaatacgcctgcaggcttctggtgctcggccttcgttctttggcaggtgtcacaccgggccacatactgtgctatctctttcttcatccctctccaccagtatatggttttgag

SEQ ID NO: 136518 - DNA, 2721 bp, Zea Mays
cgcagtcctaggagttcggccgctttcctccgctttccgtttcgccgccaccgtcttccgccgccctacctcgccgtcgccgacgacatgcccgaaaccgtactccgctctatctctctcagactctcccgccccctcgcatcacttcttactgacctggtgttctactccctcgcaggcggcggaggccaacctccgtaggcaactggagcaaaccctcgccgctgaaccctccagcccgctccaccactacaaccttgtaggtttcgttgtccactgcattgagcccgtggtcgcgcccgcgcttctccgttgcgcctaatcacctgctggttggtcctgccgtcctgctcgtgcagggcgtcttcctatgggaccgcgccgaggcagagcaggagggtgatggggaagaggcgcggaagctccgcgcggaagcgtcggagcattttctcgcggcggccaagctgaatcccaacgatggcgtccccttccgcttccttggccaccactatgcgcgcggcggtgacaatcaacgagcggtcaagtgctatcaccgtgccgtgaccctcaaccctgacgactctgaggctggtgtatgtgtgggaatatgtatattcatatgcccaatgtattcgtcggtttgcttgtgctggattctaatgtgttttcccctttatttctgggatatggcgcaggacacactctgtggcttgctagatgttgaagggaaggagagcttggagcttgctgtctgcaaggaggcagctggcaagtcaccgcgtgcgttctgggcttttcggagacttggctatttacaggtaacttgtatagcaatttcttgaatggactatttgttgaagcaagaatgccaatagtatgtgtcattaacagaggtcctgattggatatgttatgttaatgaatcttacggcttcattttgtatcgggtcagaatccacaggtccaaacctgtccgagcctaaacccaatgctattggttaagggaaacattggtttgcagcaattagctagatttaacatggttatgcagaatgatgaaaatactttaaatttaacctaatctaaccccttcaatatttaattttttatagcaatctcatccatttgtcatcgatgtttcttgtactttatacagaggcagtgttcacttccattaattttggcattgatgtcatgaccccacaaaacatttatgttaagttgttaatgttagtgacttttaatgattcaattctgtggctatccttttaaattagctgacagatgaaattagaatgtgcaggataacatgactcagttggtcattcactattagtatagcattattaagttaaattctggattgtactggtcttggaaatatttgagagctttatgcgtggttctagcctgagcaacatctcttatgataacttctacttgagaagttgatcgcttattttctttaaaaattggtaagggttttctgttggaaggagatactgctgctaatattttaggtgtgcaattttcttttgtttgtgataaggcattacaaaatttgtatataatgtgtattgacatgagttggtgaaaggttaggttcatcagaggaaatggtcagagggtatacaaagccttcagcatggaatacgaggttacccaacatgtgcagatttatgggaggtgggtgctcccccccctccagtttgctcttgccaaggtttcttagtgtaacttatatgtgatgtgtcttcaagttatcaattattgaatttagacattccatatttatggctacaggcacttggtctggcataccaccgtttgggcatgttcaccgcagcagtaaaggtttgctgttttcagttgtgagcatccttaataactgttgcagtgcgctgtattgagccttctcaatgtgcttaattcagtttttgccggcagtcatatggacgagctattgaacttgatagttccagggtctttgcattgatagaaagtggaaacatccagttaatgcttggttactatagaaaggtaggaagttttctgcttgcttctttaactatctatcgttctgctggtatacatgatttaatcagtcaatgctaatctaacggtgaatccattcaaaaatctatgtagcactgatctctttcattgttaaaactatttaatttctctcgaaatacacaacgccagggagtggagcagtttcgttctgctttggaaatggctccatgtaatcattcagcatactttggccttgcttctgcattgcttgcatgggcaaggaattgtgtaactactggggcctttggttgggctgctagcctgttgaaggtactttgatctgatagtagctttttaaatatcattgaataaaccatagctgtatagctttaccatatagtttgttttctcataggaagcttcagaagcttccagaatttgtacttctttgactggaaacctttcatgcgtctggaaattgcatggagatgttcaggtatttgatatttcatcatttaagtctccttgtcatctacttataagtgaagagttgcaatattatattctactatataccttgcctgtttggtgtcagctcacacttgcgagatgctttccatgggtggatgggaaaatcaaaagggtcatggatgcacagatgttcaaaaattctgttcaagagtggagaaatacatgtttgttagca

SEQ ID NO: 136519 - DNA, 435 bp, Zea Mays
aggagaacgaggcaaacgcgacggtcgcagacttactggtgtttgggttgcacagagcttggtccgtggcattgaacgacgatggtgagggataccgagcttatcggccacaaaatctcgccgtgcgaagtcatcacctacgcgttgcgaagaagacccaggcgaattgtttggggcagggatggagcagacacggaggagcaggtcctgccagaagaggtccgtggcggcaattctcccatgactacgccgggcaccaccatcggtcgatgagacgagcactttattcctggatatggcgaaggactaacgcggcgtcgagtacttatgcttggaagggtgagagaggataagggcgagaaaatcgtgaggttgcggcgtccgaggatttctcccgcccaaggcggaggatctgttgcgtttctgttaggagcc

SEQ ID NO: 136520 - DNA, 550 bp, Zea Mays
ctcgccccctctcagccctcctctcctcccctaccaaccggtccctcccaaaccaccattgttgtgctcgcagctccgtggccgcgcctgctcgagccatttctggccgggctggggccgacaccgagcatggcggatgttggggatgccgtggtccgcgtcccctcgctttcccttgccaccagcgagcctctggccggccattttgctctccccgtggagatacctgaaggtagaagacggatggaccgcgggcacaaatttgaccaagtgcagggggctaactgcgcatcccgtgacccacttcaatagtaccaaaaggacctgtttgctggaataaagtcgtggcctgttccagggactgaagcgcaaaggtgattttccctttttccgtttctattccagattttgtgctgaaactttgaaaattcatagaaaaccgtagaaaaatcataaaatgttaaatgagaactttttggaatccttgtgaaattctctatgccgtggatacataagttggaatgttttagtagaaatatttggctgcaga

SEQ ID NO: 136521 - DNA, 359 bp, Zea Mays
atcggaacagtgactccacggcaaagccgccaagaacaaagctccttcaaaggaagaactccaacatcaacaaggcggaggagatctgattctgagacaacagacatatggttacctacaaacggcaactagctgttggggtcgatgggaggaatgactaccacagcagaattttggttcttccgcttgggcgccatcacaatctcaccggcggattgaacaaaggagaaattagagggaaacagaggaatggtttgaggcggaaatgtgaagctagggctcagaactcagaggcgtgcagcgatgtgttataaatggagttttcccgggttgggcaccgtttctaaaaaagtgccaag

SEQ ID NO: 136522 - DNA, 678 bp, Zea Mays
ggcgagtatccagtttggatcgggacattggtacttcggttcctgctgctgaagaagtgcctgtgtctgaatttattgacgctgacctcaatgggtgtgcccaatctgctgctgatcccaatgtgggtgctccatctgttgctgatcccaatgggggtgctgcctgtgttgctaatgaagacgatggggaggaagaggatgaagttcctttgactcggaagaacagtcggcagttcatcgctagtggtgaaagtagtggagttccttctcctgctttgtctgctctcattggtctgcaagaattgtccctggcaaattttgatcagactcttgaggatatggttccagaggatttgttatcagagccagcagatgatggtgtgatggaggtttgttctgatgtgcttgatgctgggttgaggtcatctcgtgcctcatcgaccttagagcgcgatctcgagggtcaggagactgacttggatcgtcctggtcccatggaagtaactgagggcccatcagccttagaggtggctaccgcagagaacttggaccccaaggatggtgttgacacttatccagcccccgagggtgttgccggggatgacttggttcggatgggaagtgcaagccactgcccagcccccgagggtgctgccgggatgatccggctcaagtggg

SEQ ID NO: 136523 - DNA, 573 bp, Zea Mays
atgttcttccaccacgcgatgaccagagaaggtgtagcagatgcccgtggcggctctccaccagcgtgcggcgaatccggcgacccggtacccgaatcctatggacgatgggcgttatacactagatagaacaaggcgatcgtcatggaaggtagctcaccaatgatggcatccggcagagtcccgtcgtcgaggaaggatggccatggcggaaatccccagctctggcgaacaattcacatcttgcccgctatacaccgtgacctccaccaccacacacacgctcgatttgatcccgcgaagcttcaaagccatctgccggtgctggagcgacaacgctcaatgatttcgcccgtggcggatcaatgatggcggctgcactctcccctctgtcccgctacacagggcgtcttggtggttctcaactcgacttcgtggctgcgctggtttcgcggggccgcaacggagaggtggttgtggattatatgcaggtgagggccaatgaccgagtcggctgggtcaagcaacccgatcgatctgttatagggagaagaaggtctgatgaagtggtcc

SEQ ID NO: 136524 - DNA, 416 bp, Zea Mays
gggagattgattgggataataaacacgggccaacatgtgtacggtgcatcgttcattccatagggattgaacccatctgtggccatcgcaacacgtacattacgagcctcttcggctttctcatggtgaatggcatcaaagtgtttccatgcttcaccatcagatgcgtgtaacatcttgtcaggattgtatcatttgccatttttgtgtcatgtcatctgtttcgtggattcctcggtcatgtatagatgctggatcctcagtatgaacggaaggtggcgtaggattgtcaaggggatgtcgagttgcctcttctgtccatcaccagagtctacctccatgaacttagatgatttacactttggatattactttgcctccacgtattctttcctaaatagcatgcatcccttcgg

SEQ ID NO: 136525 - DNA, 436 bp, Zea Mays
caggctccaaaccacgtatggcaactctctgatccattttcctgcaagcttttcactcttgtcaaatactttcttcctgagttcttccagtatcatttcgttggctctttctacttggccattggctcttgggtgcgctactgatgcatacttaatctggatgctccgctgctcgcagaaatcaaagaattcagagctggtgaagttggatcccaggtcggtaatgatgctatttggtatcccaaacctgaatattatgtcttgtatgaattccacagccttggctgaggtcaaagaggcaatgggcttgtactctatccattttgtgaatttgtcaatggcaaccagtacgtgagtatagcctgcctgaggtttcttcaaaggtccgatcatgtccagcccccagcatgcaaatggccatgttacaggaatggtc

SEQ ID NO: 136526 - DNA, 635 bp, Zea Mays
caacacccgaccgagaggatgaagacgacaagcccagatgattgaacgccgagattctagggtgagactgataacgcccagtagcgggagacctccaaccgttgcaaactgaggccagtttatcaagggaagaacccagacgtcctagtccgaggctgacgctcaaagccactgggagacttaatgatgttacgaatcggaatagcattggcaccagtgagagggagcttaacaatatccgcaaaggataaactctttttgccccgcacctgctgccaagaagacgcttcttcctccgaaaagatcttgaattcatgcttccagttaggtccaccaaaattccaaaggttgaagaaagccttgaattcctttcgatcaatgcacccggaattgtaaatatggaaacccacagccatcgaggaaaccggaaaccgaaaaacccggtcagcgagctggagcacctcgaagccagaagcgaacccgccaagggccgcctggaggaggtgaccaacagaatccgggttcagcttgaagatgcatctgccaaaagaaaccaccagccagaaagacgatcgaagacggggtcgaaccagacaaaccgaagaagctaaattgagcctgagggaatccgcgaa

SEQ ID NO: 136527 - DNA, 754 bp, Zea Mays
gcccgcgcgccccggcaggcgcctcgtgcggttcgcgtcggacctcaccgcgatccccgagtgagtaggcgggtcgggctcagacggacgggaacggattcgctgccattgaattggctctggaactggaagcagaggacgaggacgcctggagtcgggacggacagaggaaattccaggcaggcaccgtcagattctcatcgaggggaggccctgatcactgcacgtgcaagtcatggacgaaacgtgaatacaaatgtaaaaaatgaatagcgatgattcatggtcttaccaagatcgctccacaactcacttgcgtagttgcatgtcgtatcgtccctcccctcccgtgtcgcagtcgcagctcgcaccccagccagaagctctgtgccgtttcgtggagcaacaaacagcaagtggcttccgttactggacggccaaacacggacggacgaaccctcttggcgatggcgaaaccggacaccctaggttttaggaggtcaaatgtcttgtctctctcggaccagcacacgatgctggtcacaacaacgtaaccatagttcatgtaatcccgtaagaagactgcaaactccacctaatatagcgcgtaagcaccaagtgatttgatatatacaaacttaactaaatactagatctagacctacagcaagcactataagcaatggcctaaccaacttaaacacttctcaaatcacctataataattaccaaggtattttttttagcacttagg

SEQ ID NO: 136528 - DNA, 330 bp, Zea Mays
gatctagagagaagcacgtgcagggtgcaccgctgcatcggaacgaagaactagcagcatgggggtggccgccggcggtggggtgcggctgcgtgccagcagcgccaagaagcagcggcagcggaccctgaacaacatcaagatcacgctcctctgtggcttcatcaccgtgctggtcctccgcggcacggccggcttcaacctgctggtcagcagcggcgacctggacggcgcggcggcggacgccaaggtggtggaggacgtggagcgcatcctggccgagatccgctccgactccgaggcggacgacgtggtggtggtggtcgaggg

SEQ ID NO: 136529 - DNA, 417 bp, Zea Mays
cttacatgagcaaatagtcatggcacagattggtgacaagggtgttcaagtcattaaggaaatgatcaaacaaaaggtggacaaatacaaatgcttccgtcaggacaacaaagggattctatggtttggagaccgattggttgttcccaagaaccccgaacttagaaagaaaatattggatgaagctcacctttctaaattctccatgcatcccggcagtaacaagatgtatcatgatctcagatctttgtactggtggaccagaatgaaaagggaaattgctaagtatatatctgagtgcgacacttgctaaagagtcaaggccagtcatttgaaggtagcaggcaccttacagccccatcccataccatcttggaaatgggaggacatttgcatggattttatcgtgggattgcc

SEQ ID NO: 136530 - DNA, 610 bp, Zea Mays
tagaaagctcagcctgagatacattggaccgttcactatcttggcccaagtgggcatcctggcttatcgcttgctactgccggattccatggcaggggtacacccggtttttcatgtctctatgttgaggaagttcttgcgggatctggaccatcagattgagatggaaccaattgctgtgcaacaggatctgactttggagtgtcgtccagtgcgtatattggaattctcggagcgtgtattgaggaagagatcaattaagtatgtcaaggtcttatggactaatcagtctgagtgcgaggctacatgggaacttgaggagctgatgcggcagaagtatccagaactttttgttgtgggtaagtgttgttgattcattaatctttccttttgttgtttcgatagaagcgtctgaattcgaggtcgaatttttttaaggggggtagagtgtgatacccggtttgcaaagagaagttggaggttattctttttgtttttttctcattcagttgttgtgttttggggatttggaatttgtggaaaatcattcaccagtagggcagtagaatttgtttggttaggcgcttgcgacggggtcgggagctgtcgc

SEQ ID NO: 136531 - DNA, 643 bp, Zea Mays
gtgatggtttggtggaggcagaccttaatgcttgtcaaagaggtcagtgaaggagtccatggtggatggactttgaacgaatgtgtgggttgaccccatgtccactagggacaccacaatatggttgtcgatcgtgacatggagctccatagtgatggtgatgttgatccctatcaaggcatacagggagatctcagctcttcgatcgtggcctctatttcctcctcatcattgagctccaacagaaacacggccttcgacacacatttgtggacgctggtgtaccttttagggtagtggtaacattccctgtttgcccatttggccgccaactcctttagggacaaccattagaaacatggcttagatgtttccaaggttgcctatatggaaggaaacgatactagggtcttcctagccgatgtcatagtagatattggtgaggttacgcctgaggatacaaacatatatcactcgtaagctcgggcgactgcgtgtcacactataggttagggaaattgatctttgggtgatgaaagttgtggtcatcatactgctcatggatggactggccacctctgccagctccataaccatccaagccacctagctcaattagtgttataagtgtcgctttaaggca

SEQ ID NO: 136532 - DNA, 973 bp, Zea Mays
cttcataaggttaatggtcctatatattttactattttaaagtatattggttacctgtgtcatccttgaaactcttccattcatttgaacatatagggcccataggggggggggggtgactggaatacgaaatacgatggcaaaaaagaggaagttataatatgtgatatagtgtaaataatttgtgtgacctttaaattgccttgaggttctgattgtcactgcgtttatttaggaatatggagctcaagtcatatcgaccataccaaccgtaccttatatttttgaatacggtgatggaaggtctgcactcactattgtatttgctacctcggttttctggtaggatactaaaactttttaggttatttttatcagcaaggtgcaagttgagaaccctgctgctttggcttcgaatcctggaaagcgtgtagcagcctgttgggagcccacagttattgcaacaatcattattcctagtgagtaagaccctcttcctttctcacctgttctctacaattttttttcaatatttgagcattacaaatagaagtttgttatcatgctcaatcactttttcaggtatgttgggcctgtcattatgctttgttcagaaagaaggggcgaacagctagaatatacatttatcgatgcgtaaacctttcttgcttttaattctcagttttgttaagtgctcatctattctttgctttttattcatatggcttattttgatgcagccaaagggctctgttgaagtaccgattaccattgaaggagataattgtggacttctacaatgagttgaagggcattacgtctggctatgctacttttgactacgaagattcagagtaagccctgttgtgaatgcaataacaaggcatggtctggctaaactttttttttatttctggaatttacaaatgagaaaaatatcatgtttgttatttcacttcctcgtatgctttcg

SEQ ID NO: 136533 - DNA, 750 bp, Zea Mays
gtcgcctggaatcgctactgggtggggcccacgtggccatctcacccacacgccgttccactcctcagcctcccgggcacgcgtcgctcgtcaatgacgagtgggaccacctagcggagaccacctctcctgcggacttcgcgtgctggcgaaacagaatggccgacgatgctgcatccaccgtgactagatcgcgcgcaccacggggttctagccacctttgggttgtttaagaatgtggccgcctcccctcgcatgcgaccgagatgcctcgtgctgatgcacaggtgccatcaatcatggatcggacggtcagtacggatctggcgaatatcggttcgttgcataaatctaggtcgctagttaatgaatcaagggcaggaatcaactatgggggacgtggcgagtttctgaccgtaaattttagattcggtgatcgtgtttgtaggtcatctcggaggtagggttgtggtcgttcgatctgatctgaacggccctcattagtggataccccttcgcgactgtagattttcatatgagccccctcctttcacagaaataaaacccgtcgtccatcacgagttagtctgagtctgggacaactttgcaagttagcccttgtgctattcggtatttgatgtcagtccaacagccagggaattaaaaaaacaatattagaaatttatttttaatacaaaaataaatccagaaaattgtataaatcatatttaattcgttttagctctaaat

SEQ ID NO: 136534 - DNA, 396 bp, Zea Mays
ctgagctcagccttgacggtctggacatgcacatggtcgtgggtttatcttaaatcggtggaggaggttgtggttgcccaatgtaagagttcatcggctaccataagatggttgggtttgtgaaagcccatttgtagccgataaattgtgtgtggtgggcgcaacctcattatcatacgtcaaaaatttatgaatagtagatttctcaaatgctcgtttagttttcctaacatcttccgccattctccccatgcattgtttcatttgatctcgttgttcatctatataatgtctaagagatcgaatgtcatagttttacttacattaggggtgggtgcagtgggtcgaagagatgacaggtcaaactctttttgtcggtcgaccttttgatgcctg

SEQ ID NO: 136535 - DNA, 551 bp, Zea Mays
aatcaagattattgagtatatgatatgagacagaagccctcaaaatgagtaatgaagatgtggcacaaggattgggatccttcattggagcctgatgtacttgtttataacttggtgaggattgcctcttgcccttttatttttttctttttacctaatttcctatttgcagtaatattttccttaaaatatatttgtcttgtcccttgatgttgttggtgttcagtgcacatgttctgtcacagcagtggaaaggcgtattttgggtgttcttgcaaatgagaattggtggtttaccatctacagctacaggagcaacatttggattggacatggaactaagcttcattttttgtaaacaaaaaactacaaaccgactgaaagctttatgctgcctgcgttgcagtcttactgggttgtgttgttgctgcttgctggagcgatactacatctgctaaggaggatgacagagtgtggtgaagtgctgcctggaatacgcatgtagtgtggtgagtggagacatgctgtgtgcactctacgaggcagggttg

SEQ ID NO: 136536 - DNA, 438 bp, Zea Mays
gatccgttgctcgcagaagtcgaagaattcagagctggtgaagttggatcccaggtcagttatgatgctatttggtatcccaaacctgaatattatgtcttgtatgaattccactgccttggctgaggttaaagaggcaataggcttatattctatccattttgtgaatttgtcaatagcaaacaacacgtgagtataacctccctgagctttcttgaagggtccgatcatgtccagcccccagtatgcaaatgccatgttatagggatggtctgtagctgctgtgcgggtaaatgatgttgctttgataagaattggcaagcttcacatctctggactaactcggcggcatcgctcttcgctgttggccaatagaaaccagatctgagaaccttcccaaccagagttctggatgcagcatgtactccacactgcccg

SEQ ID NO: 136537 - DNA, 585 bp, Zea Mays
cgctttagtagatatgcttggactccggtacagtactatttactgttctagcttcatattgctcccttgtatcatgatgtggtatatcttgtatggggaaatgtggctagacatgaaattgtcttagatgttgttggttatatggcgaaggtggtgcttgcgtgggcggttgagtcaggacccatcgagccaaagaatgacttgtcgaagcaactgaagctaagggttgtggacttggttgttgattgcgaacataatttgggatatatggagaataatatgaggtagtgtggaggacctacttcgactaattctatcgtgcttcaacttcgacaattccttctgttttggattgtgacttggcatattcttgttgtatgtctcttgtcttatccacataataagcagaatagtttccttggttgggagttgaatctccctccaaaactccttcctcctcttccacctcttggagctggtgctctaaaggtactttgctgaattcctgttgattaagagtaattttgctgcccttgggtacgacagtttttgtcttcgttttgacttggattgtgaatggtcctg

SEQ ID NO: 136538 - DNA, 433 bp, Zea Mays
gtcaaggatgggtttgttgtgttgaaacaagatgaaccatcggctagtgacaatgaaaacattcttacaaatgatcaagccatgaatgtattctatgatgctcttgacataaatgagttcaaccgtatcaagaatctcacaattgctcatgagatttggactaagctaatggaaattcatgaaggaactacaattgtgaagagtgcaaagcaatatatgtgcaaaggaaaatttgagcaattcattatgaaagaagaagaaagtgtatccgatatgttcaaccggttaaatgagatagtgaatgagctcaagggacttggttttgatgtaccggatgtggatttcactcataagttccttagatcccttccggagaagtatgagactattgtgaccatgctagtaagaagtgatttatctacaacttctccaa

SEQ ID NO: 136539 - DNA, 423 bp, Zea Mays
agataagcacagggtttactatgcaaatagttccaagactcataactccccgcgatggaccgcaggttaattccttaaaaaccgaggggctcattcgttaaaccgactggtggaaggggtatgaagtatccagatctgtccgatcctatacctacggctctgattaggttgaccccataacaaatcgatatgtaatctgagcccacggatctttatacgacggccaaccttccatcacatctgacccgcccgattcactaccgacgactcaaatcttatgcctgaagggttataatccctatctaatctccctcgtccattcacgatcgaatggcaggaagcccttcttctaccccacgtccgaggccgagcaggggcactcgcgccctcgccagagagcacgccggtgcgcgaccaatccac

SEQ ID NO: 136540 - DNA, 800 bp, Zea Mays
attttccaattcaattattcaatttacaacagcactgaactggtccccattttcgtaaaaggccagggatctctgcgaaaattgcctaagacacagagaactattgaactagactgcgggttgattactacattggttaggggctcttttacataatattctagctgaaggggtatacgcttatcacgaccgttcaattcatattcgagggctcagattagatttaacttataccgaaccagtacgtgatgctgaccgctagatcacgatcctacggctcaagtctaaaacacgcgcgatttaatacgcttcgcacgattcggagccaacggccaggatccaaactagcgcgtaggggtacaccccttctaatctcagccgtacgtcaacagatccacggtatacgccacttcttcctccccgcgccaaaccacggcgacatgcacccagagcggcggaggcacaccggcgaacgcgccaatacggtgatctccgaccgattcacgcacccgacacggtttttacgatcgcttggccactaggaatcacatggctaaaccctaaccatgcaacgaagcgcccagacccctgcccacggcgaagcattgattcacagcggcgccattgccgtgagcaatgtctagcgctagaggacctaatactctcatccgaacgactctacatgacgctgggaggctataaaatccgataagaggccttaccaggggctgggagcagctgagatcgctggccacggagaatggcgggtccgcggcggcgtgtgcacgacggcgagaaat

SEQ ID NO: 136541 - DNA, 474 bp, Zea Mays
gctgccagaaggcgctggtgaagacacgatcacggtcggacacaatattgtcgggcataccatgtagtcgataaacctgatccaaaaaaagtttggcgactttgggggctgaaaaggggtgagacaaagctagaaagtgtccatacttggaaaaatggtccactaccaccaatatacagtccactgtacccgacctcggaagtccctcaatgaagtccatggaaatggaatgccacacatgaggaggaaccggtagaggagccaacagtacaggataacgagatctatctggtttggcctgttggcaggtgctgcacgactgaacataatttcgcactgcttgtttcattcctttccaatagaacaaatgtttaattctgttgtaagtcactggaaaaccggagtggccgccaataggtgaatcatgaagggccaaaatgatttggcgttgtatatccggactactccccagcc

SEQ ID NO: 136542 - DNA, 640 bp, Zea Mays
aaaattttaggagtattttctatatttcattttatccattcattctatatattatttctcttcaccttatctccatgtgcttcctcatgtgttttttaatcaaatctgaaataaatcatatagcatatcatgtaatttgtaacaaaagaaggccttttcacctgttcttagcatacattagttatgtgctgtacctgcaatgtggagttaacttctatcaaagtgaaaactttgaatcatggatacttatcagttgtgaagagatgatattttggttgttactgagctttaagttcaatttttttgtactaaggttgaatccactggaaaaccacctcattcttttttgaaaagagtactgcatgcattaggatggtttctcatgtaaaaaataactgttttctcccttttctacttggacatctcattgacacctctggaatgcacaataacttgatagtttgcgtcatacaatgcaaacaaataaggtcaagaatttacctgtattaaaaagttcattttcacttcttcaacgggtgtattgttcattcatcttgctcccgatctttcgatcagtggaatcgagtgtaaagctatgtttcctcactcccattaggatataatgcaaacaaataaggtc

SEQ ID NO: 136543 - DNA, 501 bp, Zea Mays
ctaagtgcaattggtgtagcaaactattgacagccgaaggtaaaagtggtaccagccatttacaaagccacataaatacatgtgagtcacaacaagctagaaaaggcctaaaacaatcctccttgaaattttcacaaaatccagatggcagtgtttgtttagagaagtatgtatttgatcaagatgttgctaggaaagaacttgcattaatgatatgtgtgcatgagtacccgctgtctatggttgaccatgtaggctttagaaagttttgtgcttccctgcaaccgttgtttaaattagtgtcaagaaataccattagaaaggatattctggatatgtatgaagttcaaaagctctctatggtgacaatgttccaacaacaacaatctcgtattgcggtcaccacagatatgtggacagcaaatcatcaaaagaagggttacatggcagtgactgtacactatattgatgaaaattggagtctaaaaagctatcttttaa

SEQ ID NO: 136544 - DNA, 335 bp, Zea Mays
cctgttgtagtccagaccacagatgtccaccctgatctgtatcaaatttgtatgagtattccaggtttcactgatgaggagttgatgacttgccttacctacctattggacaacaaaaggcaaggtgatggctttgtgaagatggagcctaaacaccgtgtgctttggctaaggcagcaccttccaaagatttgagcagaccagtcttatgcctatgatgcctaataccttgctctatgcgtagtactttgatctatgcctaatactttgctctatgcctatggcactgaatctggaactgttgtagcatcccaaaaattcaaatcctgaaattt

SEQ ID NO: 136545 - DNA, 807 bp, Zea Mays
agattatgtgtacgcatgatatcgtcaaccggtctcagatgcctgtttgcttgccttttcggtaaccatgcgaacagcgtgctaatattctaggacattgggtgtccactacccgagtgatgagccaattagcaaagggattaacatatcgtgtcattgtgtgaggctgtgaggcatatttagcaacgagattagtgtttagaatcactcatcctcttatttatggtgcctattacacatgcctaagttgatcttaaatattttatgctgaaccaaaaaaaaaatgctccaactctttcctcgatatatctgatggatggctacgtggtcttcacaactttgcaacacctcgccgcaaaaagcttcacgatagcaccacgtgttgccttttatttccatcgaaaccctaacatcggcccaaacttgaaacttgcccgctgataattttaaggtccaaaccaccaaaaccctcgtgagtagtgtatctaatacactccctctagaatctcggccatgtcacctccacctctcgatcatctaatcactaagtcctacaacgtctccacttgaattggtcaaccgttgtctaatatagtctactcctctgtgtactcttgtacttgtcagttttcccatatggtagctacacatgatcagtctctcaacctctttggtgatccctcgatccaagccttatgacattcgttcttcaccgcacctagttcattcatacaaacccgcttaccttcatcatcaccgtcgattgcgtctctgtatttcacaactatgcaccataaggcaaaagat

SEQ ID NO: 136546 - DNA, 668 bp, Zea Mays
ctgaaacgagggcaaggagggtatgaacggacctgtagacgtctggccacggtgagctctctcacggcggcgttctgaccgatttgggcaagggctggtgcgttggatacataaatacttagcagaactcacgggggcagcaatttatagagttatacggcggtggcatccaatttgaagaaatcgcgctagcagctgagagagaggggtgagtcatcgtggcgatctaccgtggcggtcactgggtaatgagctacgtcggtcactgggcagtccctatgactcgcaaagatgtggtaagatgtcctaaggcatggcacaatcgtggtgaatggtatacatcccggcgacggccgctcggccacgtcaccggcgcaactggatgagcggcagagcgcaacggtgcccccaagttcatccactgcgagatctttttacgccacgaagttatccgtgtgctactaggcgcgaatcgcagcgccgacgcaaatccgagcgcggggttgccggcggcgaggtgcactgcacctgagatcttattcagttcactgtaccatcagaatcctcatcagagcgcctgacagagcgatttgcagtgccttgatctttgattttcatgtgacaactacttaatccatctgtaacaaagttaatctccaatataccag

SEQ ID NO: 136547 - DNA, 540 bp, Zea Mays
tgtttgagcatggttaccatagcaagattgtagctggattatagggctagcactttgttacagagagattaacaagttgccacacaaaaaacagagattagtgccctacaaatggccccgtcagatagactgaatggtgttctgattgtacagggactgaataagatcacaggttcaccccccctcgccaccggtgaccttgcgcctagattcacgccggcgtcgtgattcacgcccggtcgaacacggataacactcctcagtaaaaaaatcgggcaccgtggatgagcttgagaccctattccgcccagccatcgtgtctgcttgactcacgaccagttcagataagctcaccggagatggatgcctgccaatcggatgccacgtgccttgaagcttcatgcgtcgtagtaaaccgctccatattgctagctcgtcgccggtaagcctgccacggtgaaagacacatagctcttgcgccagtgacctcttccttctccggctgccaccgtgccatcccaaattcacaggccaccaccc

SEQ ID NO: 136548 - DNA, 490 bp, Zea Mays
tgaatatccctggatgaatctggaatttgtagcagtaatagtcacgtacggacacacatagatgattaggagattctgcatacgtaaggattgatcattttgtgatgctgaaaggatagttaacaatgggttatgtaagaaatatcaaagaaacaactaacctgcatcttcatcgtttgcattacttgccctatgcgtcgcacggtatgcatccacttcgcccatggatacaccgacctttggtatgtttgcatgccatccaagttcacctctagggaagaacagtggatacgatagtgcatcatagcatccatggtatgagctgatgccgtggcttgacctatccttcccatgtagcataacactcttgctaaactggcctcgccgttcgctcccctcgatccagacagcagcgacctctgaagtgagaggcgtgttatatgtcttttggttcaacgtctggtcaaggttcagtgtgatacgatagtca

SEQ ID NO: 136549 - DNA, 430 bp, Zea Mays
gtgaacatggtggatctttagattaggttcaaaatttaacttagaaagaattagagagctctagtgtgctctctccttaagggggggaaattggggtcttcaaggggtctttttgcaatgttccctccctgcatttgctaggttacatggttactaaaacttgtttagggactaagatcatgctttggcaatttggttaacttatccactgatccttggcttggaagtctagtgctcttaggtgtccttagggtttaatcaccttgggtcctcatgaccattgttccaattgtgtggttgaaacccttgccattaacttctcttagctaacccatgcttccaaggttttatgttcttttcttccacatgtgatcacagtcattagtgcataaatgtaaccatggtcttggtaacacctggggtgttacag

SEQ ID NO: 136550 - DNA, 1462 bp, Zea Mays
actatttttattaaatattatgtaaaataagaagtctaggaaaattggtttcacaattttaggattttctaccattttctataattggtttggctctggaataaaaagaaaaggaaaaaccggtgaatagtactgggccagaagcagcccatacggcccagccactcagagaaacggggcgcgcccgcgcccgcgttggcagtcttgcagaagggcccccgaggttttcactatatgggaatgggtccttccactgtttaacacagtcactgacactttgcagaagagtccctgaggttctattcctttaccgcgccaagtccctgacgacggtgagcacggccgagctccggcgacctcgcgcactggccaaatcgcaccaagaccggcgccctgctacggcctaaaccaaattcacgccccaatcagcgtttcccctaacttaattgtgcaaatggtgatatactctcttctgtccacgagaaccgcggagactacggacacttgatcgtgttcccgacgattggtggactcctagtgcgaattggtgacacggtaagcatcccagagcgacaagagtgctcgaacgaaggagagtgagggatgaactgacctggaaagggctggccgcggtgatgtgtggttcacggcggcggagagtcgatttgggggaaaacccgaattgcggggctacggtgaacgagtggagatgagagtgggtgctatagcttgacgattacatggcgcaaccgacctggccctcaatttatagaagggtaaagcggtggccagcgaatttggggaggacgcgcggcggccggaaatgaagaagaaggcactggtcgcgtgagtgcgtgtccacagtcgtggcgagctcaccggcgacgatgggactgctataaggagtcacggcgacgcggtggaaagactcggacacgcggcggaaacggagatggcacgacggtggcgagcagctttatccacggcggtgagcaagggggaatgaattgcggctagccggagtggtttccaagtcaccggcggcgaagatattttgaccctgcgacgttatcgacttaccccgagcgtgaatcttgatgcaggcgacgcgaatcacggcgggggaggtcaccggtggtgggatttttctgtcgcgtccgatttgatccgttggggacactgtaccatcgcgagctcccatcagagcacctgacagccaatctttggtctggtttttctctcaaatcttcatggcactcttaccaaggtcggcagcaaagttgttcctatatagtagctctacaactttgttatagcaatcctaggtagattcccactggatcttagtcgaaatggctctcaaacttggaccaaagtcactgtccatctgaagttcagactatatcagcctgacagtccaactttgggcttcaatatctcctaaatcttcttgacaactgag

SEQ ID NO: 136551 - DNA, 391 bp, Zea Mays
gtgaaaatgctaccaaaaagggtcccttcctattttacttgcaacttacctactgtttctagatttgctatccttcaaagcatgaggtgacctggttgagtaactttagcttaaccttcctgtcttgccatttgaccgtttctacttgatacttgttaatgtgatcaagtgtttatagcatgatcccttctatagtatcttttgagattttctgagtttcttcatcatcaggcgaagctagaactctagttgatcctgtttttgcttccccagggggttatagctttgtctccatataagagcttgaaaggggtgaatcctgtaggccttaagatcgaagtattgtgattccataccactttgaataactcttctggccacctccacttgg

SEQ ID NO: 136552 - DNA, 896 bp, Zea Mays
caggacgagcatacgtctcagctgccgccttgtgtcgctgtttggtggacccagggggtcagattcgtcttcaacaacatcgcggggatcttgttggggcctgcggtgccacgattgctctgtgcctggcgcaaatccgagccatcctaggtataaagcctagcgccgccgttcattatccctccatctccttccttttccccaatccgttgccagccaccattgcgccgctgggattccacacggggatatctcgctgccgcaccggaatcacgggctcagcgcaaccgtactcgcggcaagtgtccagttgggttcgcccagtcctagggtaggtggtcgacgacttgcctgggtcgaatcatgctccaacaccttggaatttctcaccggacttcgccctccgcgattgtccgcctcacgccgtggtcggcccccttcgcgacccaatcaacaggtaacaaccttcccaattgatccaccgcatcattccgtatgtattgccatcgtcagtgtgcgatttagggcattggggggcaccctgtatctccgtcgccgccacggtagaccagtcgtgccgccgtgcccatatgagggggaaaggttatgatggtcgtgccgttggattcttatccaacggtggtaattagattgagtgatagcctttttgatggattcaatccgggccatcaatccagatcggacgggtataaatcaatcgcgtgactttaaaatctggatcgtagatttaaaattctatggacgacaatgtgtactggttcgcaggaagagtggatttaatccgggccgctaacgcttgatcgaacggccgatatcgctgcttaccctttcagccatgtaactttgcataagagcccctcaccttttagcgattc

SEQ ID NO: 136553 - DNA, 385 bp, Zea Mays
tagtaaccaagggatagctataccctatcaaagacggttgtgcccttggttacctacgttatccccagaatattcccccttaggaggttatggtgggtcattacagcgtgattaattacaagcgcagacagacacactaacaactctgccctcacagcggcttacaagtgggaccctataacgtgggccggttatacacaagtcccctattacaataacgagcgagtaacaacatatggtctttgtgtcccacatgctcagccttcgaaattcatggtggccttcatcatgacccgccaagacgaaggtaccgcccaagccttcgcccgctctttgctctccctctatagtggagctctctcttcagtctttgcgctctttagtc

SEQ ID NO: 136554 - DNA, 483 bp, Zea Mays
cagagacgtgtcctagcagatttagatcaagacataatttctgagacatgatcgatttttgttgtatgacttgtggtcttattttgagaggtgagagtgttttctttatatagcgtggagtggacagtgcaccaaacaaaaacgaaacgtcaaggtgcagactggcgccaaattaaaatcacgaaacctggaatgtgaccggtaaaatatttgtgcaggtgcatggcgggaagagacaggattacattttggcgccacttcgagtgaaacaggcaagcatcccaccttcagtgccgctttggtcaaagagccaaggattaatgagcttttaatagttgtcctgtaattaacgcttaatgcagataaagcagggttacatgcgtcatttcttctcttatgtaacctgtctcaaaataacccgaacgcctaattcaaccggacggagggagtaaccaatatcatcgttcagcatgttgatagtcg

SEQ ID NO: 136555 - DNA, 331 bp, Zea Mays
caccaataaacgaaaatttatagtggcaaacagcaatacatactgctgaataacagtagcagacaagtcgtagccttacctgaaccaaccagcctcacccagtaaataactgaaacctttccccaatcaacaaaccaagaaaaacaagggaaacgaaaaatcgcaaatcgcactaaggtcatctacgaacattaggggatgaacaggttgatcgaatctctcagtctttctacattgagcccagcatcccgattagtagcagaaactagcaaacgacgagatagagacacaatacaagcagcgcggtgcaccctaatatccactaatgcgg

SEQ ID NO: 136556 - DNA, 347 bp, Zea Mays
gcgtgaatcctcgaccgcaaggaaggactctggcagcaacaagaggaggtcaatgccctcggacgtagactcaatagagtctacaacgacatggagcaacaatgcctcgacggaaaaaggccttgggcgcggaaggtctatgaccaactcgtcaagggagcaatggtgcccaatactttcttaaccccggacagaacatggctaaggcgccatgatgcttcgatacatccccgagccatacgagccagaggcaaggatgttgtaatagaacctctgcaacctgttgagagggctactgtacagtaggcacccaccggcatagataatctccacacccattctgtgac

SEQ ID NO: 136557 - DNA, 825 bp, Zea Mays
tgattgaggcacttaaattgtacaggttaaaaacaatgagtataagtgggaggtggatccgagcacgaggctacagacgccggactccgcctcatatatcaccagcagctccgcgatgttgtacccttccagaaccacaatatgcacctgcaaatttagcaagcctgaatcagtcgatcagaaatgacgtcggtgtggcggcatccacccgacacgagagaaactaatccagctaaatttccaacatagatgccaccatttggaagggtattcccgttaaatagaaagacacattaaggctatcttcactcaatttatattaaaatgtttatatagtagtgcttccaagatttctgacaactatgtacatagtaaaagattccttaaaaaaatcttgaagcctcatggttagcacaacagtgggtattttttaaaaaaacactgaagagcattccaatagtaattagaaactgaaaaacaaatgacgcgttccatggtaagttttacctctgagtttagggcttgacttatcacttaacaccatccttagtggccagataaatgttatagagtgacttctcgtgtcatatatctcagaactataatttcgaaaacaagaaacgtatgaccggtaagaaacaatggaaacaggagccaaatgttacactggtttcaaaacacatacaaagtgaaccattcaatcatggcagttggtggccatgatcaaagcagaaacagaaacagagtcccagagtgacagggtagagaaattatagagcaagaatgagcacataccaacgacctcacctctacctccaaccccgc

SEQ ID NO: 136558 - DNA, 766 bp, Zea Mays
aacaagaccagtgatgtgcacactggttataagatatggtattaacaataatcgcatgaagaaagtaggaacaagcattgtgatcctaggacacaagtttcatggaagcgacataccagatgattattgcaaggtagaagtggcgatggtcgtccaaggatctgaggacgacatgttagacatcactagacccgaaggaatcgagacacttgaatagccataaaaaatttcatcctttggcctcgaagggatgtcgaattggttgatccaccaacaccgtcgtcgtttcatccccaaccatctcggcctcctcaaactttagtacctttacatccatcatcacctccataatcttcccatgctgctcctcatcctctttctaatccaccgtctccaccacaagcatcaacatttatgacaccaccaccttctccacagccatcaagggattcacgacaatcaaagaaatctaaattccctctaccaaaattggtgtccacattcgagaaaaagaagagtaaagctactactgctggcacaactcgatttttgaaagggattggacgggacctcacgtcacgtactgttgatttggccgagcacgaggagtctacagaaaaggctaaggcaatggccgcaaatataaagatcccaactaaggcagattataaaaatgtgcctaaacattttgtgccggctagacctctactaactcttgagaaactgaggaaggtccctactggtattaaaaggttgcatgactggt

SEQ ID NO: 136559 - DNA, 425 bp, Zea Mays
gcagctgaagaggtccccacactaaatttaggcacaacggccggttcaatgtatcgcggccggtgggttagaaccttcatctttttgcccttcggctcagctgcaatggtcgaagcggcaatcttctctttttctcttgccctcgtagcgggtaatggtaatcagggtatacgaagccaatagcatcaaataccccgtttaatcttttcttgccccgacctccaaaggctgcagacaaagcattatcttcggccttggaatatgtcccaagtagttcgctggtagcttcgatgcacttcagccagtcatcgtctggctcaccaaacttccccctaaatctgaaggtatacttcaatcggaccataccaccctcactagaatctacggtggtctccttcggcatatcccagctctccacaagtggc

SEQ ID NO: 136560 - DNA, 408 bp, Zea Mays
ctaaagatgaaaccgaagaagtgtacctttggggtaatgatcgatcagttccttggattcttagtgcatgagccagggatagagatcagccttaagtgtcagaaagccactagatcaatgatactgacgaccacaaacaaggaactacaacaactaatcagaaaaattaagttcgtcagaaggtctatttccaacctatctaggcaacttgagccatttatgagtttggttaaaatcaagagtgacagcgagttcaattgggggaccaaaccagcaaaaggcatttgaaggaattaagcaatatctgtcgaaacagccagtgttggttccaccacaaccaagcgaactgtgttatgtgtacctatcggtaggtgacagttccattgccttagtattagtgcaaataca

SEQ ID NO: 136561 - DNA, 535 bp, Zea Mays
atcaaggcatggagatgggcatgggtgtggagacagtcataggcgctagtgaggggtcagggatgggaagctgccagcgagttgcggagtgacgccgacgaggggtgaggaggagccagcgaggggctagggtcggggacgaggagatggcgacgagtggccgaggccgggagacacgatctggggtggcagtgcggcgatgtggtggcgcgggggcgtggcacggtggtgtcgggggtaagacagtggcggcgacataaagaacaaaatgcaaaaaggcacgcagttagggttaagttgaggcgctttgtcaagtgcccgatatctatcactcggcaaataaaataaaatatattttgctgagtaccgccctgacatttctttaaatatatgtgcattgagtatcatctaaatggtgtgtgcaagctttaaatcccttgtttgtttgtcctggaagattactaagagtaggtcaatcattgatttttttccaaactaaaatactcttaggtcaaagtctttatgtttgagctca

SEQ ID NO: 136562 - DNA, 577 bp, Zea Mays
gcctgaggcactaacatttccaataggagtcttgtcaaagactgggccagagtcatggtcaactatgccacctggcacggtgtgaccttgctgcacaaaaaaagtgaagtattcgttcatcataatatgtaaacgtcaaatgcacaatatcaagccagaaattatatataagtcaaacttaaatattaacagtattaggtgtaacagattcatcagggcaactttcgaagactcgccgcacttcctgttgtctgataactaccttttccacttgactaggagtcatctgcgactccatctggttgggtgtcatcaatggttcagatacaaattgatcaccagattgggaggctggttcaacacattgaaaactatggattagtgcatcatatgtttgcatgaaatatacatatatgatgacagatttattgcaagattgtgtcacattatctttaatgtctgaactatatgactcaacccgaagaacctcgtcaatcaactctccaaatgtatcagctagcttatactgcttcctaccaatattattcaaacattgcttcatagtggcaactatctt

SEQ ID NO: 136563 - DNA, 467 bp, Zea Mays
agttcggtgtcttccaaacctctagatcaagtaatatatttgctgctctgagaatggttccactacgagctcagccacaggaattgatgaaaagcgattgctacgtcatttcctcttacaagtcaagcagggaagaagtgatggacaccccctttgtcaaaacgggccacatagtttttcctatctcgagacagatgtgaggacacccgtcattcaacgagacctttctagcggcagcagcaaatctgactgattgattattcaccgtcggagcagttcaagtgataacggaaggacgatgctttgccatacagctgtacagcttatatttcttgacgcaatgttcaggttccataagccacttcctgtgataaattctgtgtaaacttaggacctgttcgtttcttacggaatgtatgaatggattggtttctagccggattcttctttattttatataaactttg

SEQ ID NO: 136564 - DNA, 473 bp, Zea Mays
ttttcatatcaatccttgtctcttgattgttttcagcgtaattgctttttctactttattgatcaacacttagcaaactaattagtcctttaagagtgttgttgtccaaatcaccaaaacccaccaaagggctagatgcactttcagggcctctagcttctgctttctcttggactcgtatgaatccgggtcgtcgatgatgaacataatatcttgatttggttgtgagaacttgcccccaacctccttatcagagtcatccttcttgtctgtgctctttgccttaagggccacggggtgaggcttcgtcaacagcttctaggtgaagccactaatgtcctggcaatcttgtgtggtgtggttgctctaggggtggtagatgcatcgccgctctatgatggatttgtactcggcgttgctgtcctccttggtggggaggggggcacattgccccgtgctgctgactccctcgc

SEQ ID NO: 136565 - DNA, 646 bp, Zea Mays
cggtggtccgctgctctgcgccttgtatggtcactggctcactcctcactgcctcactggtgcagtagtgcccctgctggctgcttggacatctataattttattctgttttcattttcctcccattctcgtcctccttctaacctgtccggttgcctgactttctctggtgctcggctggtccttgcttgctgttgctggtcgatctgcgcctctggtgctccggcttcgaaaggtatgtttaattttagcatttaattcttgtaattgtgtggatagttgctttgaaccttgtcactggctcactgactcactcctcactgcctccattttgttgctttgaaccttgtagccgttgaggtagccggagccgactgtacgttgtagcttatggaccttgacgcggcagcggaagcagaggaggaggagcgcagactcgaggactttaatgaggctgaggatgctaggttcttcattggtctcggtgagaatgaaacccatggagatcctattcatatcgatcctgtgaaccagctgttatttgttgtgtgattaattctgtgtgaatcctgtgattaattctgtgtgaaacatgtgattaattctgtgtgaatcattctgtgtgaatcatgtggttaattctgtg

SEQ ID NO: 136566 - DNA, 316 bp, Zea Mays
gtcgttgctctagatagccaaattgttagatggtttggttaagctcgtaatcacgatgaattgcttgttgtggtctaaatgcgtatggttatggtcgcggatgaaaaatagtaatgtttatgtgatgtccaagttaaaatgcaaattattgggtgaaatgtgcttcgatatacatgtataccggatttgagtatcgtagagaatgcgttgttaattgtgtacggtaattctaacgtgcgaaataacttgtataaaattagtaagtctacttattagtcctcatttgattaattaatgctaacaaatggtaaagtgt

SEQ ID NO: 136567 - DNA, 478 bp, Zea Mays
tcggtagctcgcacaatttgactgaccaattcaaccaatgacgttcggggcactgaccttcccggcaaccgacgccctcggcgaagccgtcgccctccgagcccttggggcagtcgcaccggaacgcctcctgccctgcgaccggcgtggtgacctgggtgcagttagcgtggctcgagcatcggcacggccccagcatccaccactccagctccatcgtggctagcagcagcgccggcgccggcgcgtccaagtagctcaccgccgacaccagcccggtgcattccgcggcgagcgcttgcatcctggttctgttgaggaaacggtcggggacgctggtcggccgtgtcagcacggggcagcggatggagtccgcagcggcgcggccgcactgggacgagttgtcgaggtaagcgctaggggggacgctgcagttacggatgtggtcggcctgggaggcggagctgcacgagctcac

SEQ ID NO: 136568 - DNA, 697 bp, Zea Mays
agaaaacctcaccgaattttatcaatcgcctttacaacccatgttggtaggtctacgaccatagccaagtaaataagcatttcagtgagaacaaactggacatggacacaccggccaactttagtcattaagtctgctttccacccaggcagttgattggcaatcttatcaataacgggctggaccagatccttagtgagctttttgatagcgagaggcagtcccaaatacctacaagggaacttgtaaatctcacatggcaccaattcttgcatcaaggccgaatcctgaattcctgatcatcgcaacttatgggaaaatcactagatttctggacatttgtgtgaaccctgaaggcttcaacaaagaggtgaagggtatccatggttatattaatatctgcagcagccggtctgaggaacacaagcacattatcagcatataaagagaaccggtgttgcaacactaaaggggccaagggctcatataacctatattcctcagccttattgatcaagtacccaagaatgtccataaccaatatggaaagcattggagaaagtgggtcaccttgcctaaggccgcatctatgatagatgggctgactcggtgacccattaagtaaaactagtgttgaagaagtgcacaatagcccactgataatatctctccaaatctgctcaaaattcatgtgttg

SEQ ID NO: 136569 - DNA, 632 bp, Zea Mays
gcaaaatattgtcaggcaatttcaaaagaccaaaacaccggcgttattcctatagctggacttccagaaagcgtttgacacgataaattggagctaccttttagaatatctacaagctcgcggatttggacaccgttggcgtgaatggattaccatcctttttagcacagcgagttctagggccctgataaatggtgttcaaggagacaacttcgaccacatgcatggggtgagacaaggagaccccctctctcccatgctattcatccttgcctttgacccaatgcaaaggattttagaccttgcttcagagcatggcgtcctgacacctctccctcttgctgcagctaagctcagaacctcgctctatgttgacgatgtggctatcttcatcaatccaacccgtaatgacctgcaagcggccaaacaggttctcaatgcgttcggagctgccacgggtctaacaacaaattttgagaaaagctccatccaccccatccgttgtgaaaatgtggatttgtccaacatcctccagccgttcccgggatgctgcaaaaccttaccttgccaatacctcggccttcaactccacacccgcccgctccaaaaaattcatgtccaaccactagtgg

SEQ ID NO: 136570 - DNA, 451 bp, Zea Mays
ctttttttggtagtactatgtgttggcccaataagagatccgctttcttcaattctgagatggaattctatcgattcttactccaatttccctaactaccatactccatctaatctccagattctggatgtcgccatagtagaagatgctagcgagaagaaactctgaacgtaactgcaaggaagcatgacgtgggccgactctccatcccagatcttcctatcatcatcatcacatcattatctttttccttgccaggtcagtggtgctgtggacccattcatccatgaatcacaatctgcatgtcctgttcatattttccgtccctctgtgttatatagatagtcggcaccatccatttatatcctttttatagagctaatcattgagatatcttttcctcttggtcccgatgaatttgttcgttctatgacgagaaatcattgcttcc

SEQ ID NO: 136571 - DNA, 324 bp, Zea Mays
ttggtaatgtctttcgggctgaccaatgccctggcttatttcatgtattttatgaactcagtgttcatgccagagctagataagtttgtggtggtctttattgatgacatactggtctattcaaagaatgaagtcgagcatgctaagcatttgcatacagtacttcaaaggttacgtgatcatcagttgtatgctaaattgtccaaatgtgatttctggctaagagaaattaaatttttgggtcacacaatttctcaggatgggatatcagttgatcttgagaaggtacaagaagtgatgaattggaagcctctacagtttgaa

SEQ ID NO: 136572 - DNA, 457 bp, Zea Mays
tgggtataagggttagatgtcatcctagggatgaattggctgcacagaaaccaagcaactgtaaattgtgacaagaggacagtaaagttagtgtcctcatctgggaaagaaatagaaaatgaaatgttcatgtttgatctagaagaaggagcctgtcaccatatgtctgtagatggtaacgaggccaacctgcttgaggctattagagttgtgtcggagttccccgatgtgtttgctgaggatttactaggcatgccacccgaacgtaaagttgagtttgcatagagcttgaacctgccatcgcccctatttccaagagagcttatagagtttttggaccagaattggtggaactcaagaagcagatcgacgagctgttggagaaaagttacatcagaccaagtacttcaccttggaccactcatgttctattcgtggataagaaagatgggacaaa

SEQ ID NO: 136573 - DNA, 602 bp, Zea Mays
gggctgcttgcttattcgggaacggcgctcgcgtgtgaggtcaccgctgcacagacaagggtgtgggcgactgggaattgctcgtcgcggttcgtcactgccgcggatccgcgccaccacgtggacaggaagatcttcaccccgaactgtggtaagttgagtaccttcatgtccgcccttctctgagcatcgtgtaggatcttttaatttaggtttggcgcggtgatgggccatgttggccgtcgccggcgacgcggtgtcggcgctggtgctgggcaccgtcgggaaggggaaagccacgaggaagaatcgtaggagccgtccgatctagacgtacgggtaggattagatcctgataccgattcagccgaagcaaacagtgaccgttgatgcgatatccggtggtggagatccgatcttgaactcattaagcgcggaccgtcggatttagatccgagggctacaattgcttaccggttcagataagattcaatctaatctgggccgtccgtagcagatcgagtggatgagagttaaccgtaacccttcggcctcgtgcgttttgtaaaagagaccttgtattatccctgaatcaacccgcc

SEQ ID NO: 136574 - DNA, 301 bp, Zea Mays
cgcgcgcgcgcgcatgcacgagcacgaccgcacgacgcgcccccggcctccacctctcctcctctgaaggcgaaccgaagccaagaagcagccgccggtaatgtggtcgtcgtgggtccgccggagcaagacctccttgcgactcacttcgtcgccgtccttctcatcgcccacggtttcgtcgccgtccttctcatcgcccacggtttcgtcgcccaccggcaaggaccatcctggcatcggcgctgtcctcgatgacgaggcgctcgacgatgatagcccctgcgccggcagcaagagc

SEQ ID NO: 136575 - DNA, 384 bp, Zea Mays
cttggccggtgggtcaaaaccttgattttcttgcccttcggcacaacagagatggccgaagtggcagttttcctcttttttccctgctttcgcgagggatagtaataatcaggatatataaaaccaattgcatcgaaaaccctgttcaaccttttcttgccccgactcccgaaggctgaggacaaagcatcatctttggctctagcatatgccccaagtaactcgtcgctagtagactcaatacatttcaacgagtcgtcatttggtttgtcaaaccggtctctgtatctgaaggtatatttcaaactaactaatccatcttgactggacccggcaccagtctccttcagcatctcccagtcatccacaagtggccataccttg

SEQ ID NO: 136576 - DNA, 349 bp, Zea Mays
gggagggagggctcctaggtctcttatgtgtggatgggcctaaagacttcgggactagagtcctacactaagccttggcttcggcctctaggtcttcaagtctcattgggcgggtgcggttgcctttagtcaagtgtcttctattctgtgtgcctctcccattcatcgtgaccaccctcctccttttatgggccaaggtaggggtcggccttcggtggctcccttgaggagccacaatatcgtggtaaaaccgtgtgttttacctaggcagggccatgttgtccgtatgcgtcttgtcgcctggtcgtccctattcatgctcattatgatggacgacatgggcggtgtg

SEQ ID NO: 136577 - DNA, 402 bp, Zea Mays
gaaaaatggcctgtgacctgtaagtaataaagtaatgtttattttgttgcgtgaaggcgtgtgtgccacggttcggcctactggtgcgtgttcgtgtaccacggttcggtggcagaacacactggtggcagaacatgtcagaggcatggcagaacacactggtggcagaacatagctagatggcagaacatgtcagaggcagactattattacagtcttaataagtagtagagatgagggactaaaccaatttccctcaatgggtggctaaaagggactaaactcgaatttttcctccattggccttatgctccctacctcacgtccgctctccattctgctgccaaccttccagcgtcgccgtttgagccgttccatcttccctgcatgttccttcgcccg

SEQ ID NO: 136578 - DNA, 384 bp, Zea Mays
ggaagtcccattaattcggaagaacagtcggcgttacagagtcagtggggggagtagcgatattccttctccagctctgtctgctcttgttggtctgcaagaattatccatagcaaattttgatcaggctctcgaggatgttgttcctgaagatctgctgtcagagccaactgatggtgatatgatggaggtctgctatgacacttcagatgtgggattagaggtatcctaggcagcgtctcgtgcatcgtcgaccttggaaggcagtcttcggagccaagaggttggtcaaggtcgctcaattcccatggaggtgactgagaatccttcagccttagaggtggctgttgcagagaacccagtcctcaagggtggtgttggtgg

SEQ ID NO: 136579 - DNA, 662 bp, Zea Mays
gttgatcctaaaataacgagggagtttgagtcatttttttcctactgctgggctacaagactgggatgaaaatacagcccttggggactgttggcgttcagtgaggagccgcagctggccgcttgggcgaaggggcagagagggatcgttggggcatggtggggtcgagtcgaagcatgagcgtgagagagggagagggatgggaccttgatgtgccgcatcatcgacgaccctctccacggtgatcctcaatagtggttgctccccgtcgccaccgcctctgccaggctgcaccatgggcacgacgcatgagaatcagttggagcaccacacctacaatcaccggacgcggagcgggttaaaacgacatagtttcacaagcaattcctgatagattcccacatcttaggcagaaactaagagattcctaaagatatagacgtctgaattacgtattaaactccaacttattggcctatcacgaatgtagctagaccgactccctaacagtaatgggtatccaaagtctctccctcaaccttgttgagtacactcggattaggatggaagccacctgattagagcagcagaacaagagcaaaaagcagacggacaaaggagaaaaacaaagaaaacaagagagacgtcattttctgatccac

SEQ ID NO: 136580 - DNA, 364 bp, Zea Mays
cggtgccattaatgggtccctgtgtcatgtcctgacctgatgacaaatcccagacactgcatttgcgggtcacttgactataagacgacaacaccacacgattcatcaagtaattgcacgccaactccgtccgcctcctgccgtcggatccacacatgccatgccatgccgtgccgtgccgtgcggcgagcgcagagaggccagaggcgtcggcggccagctgcagattggatcccggaatgccgtgccgaagcggggagagctcgttctcctgtctccctcacatctctcgcttgcttgttaatgcagccaagtagagtactactataatgccatagctgagtacgtaaggtcatccccatcc

SEQ ID NO: 136581 - DNA, 432 bp, Zea Mays
tcgggttcactcgcagtcgtcgtgctcacgggctcgccgtcgtcatctctctcgacccgtggtgacgacaccgcgcccgcagacgagctcgatctgcttctctgtcgatctgcttcgctctcgcctctcgggttcatctgcttcgctgtcggcgacgagaggttagcccctttcttggctgctcatctactttcatctgctttatcttctcatttgatttcatctgcttcgcaaggatcgctctcctacgacctcgatcggttctcagctgcgagtgtaccctagctgtatggtgtccctcttcttaggttagatcgctctcctacgacctcgatcggttctcagctgcgagtgaaccctagctgtgtcgtctccctcttctcaggttagtatccctctagatcttctcttctcgtttgtcctcctaggtcc

SEQ ID NO: 136582 - DNA, 405 bp, Zea Mays
atcaaatccacttcaatcgaccgaaatgcttcaaaaaacgacggcaaactcggtgtatttcaatgttggattacctggaacttcttgaatcaggctccaatgctgggagattgaaggatgtaagctggaatggaacgacgctggattggagcggcggtggattggcgctgcgctggattggaggcgcggaaatcgcctggagagtcgcctccgacgaaaggaaagtctgcgcggctggggttttcttcctatcggcgctggtttgcctccgttgattgcgcgaatacggttttagaaacaggaaatgtgggagaggtggctggctgacggaggaaacggtgtaacggcgccgtgactgggacctgttgacccggtgtggttcaaccaaaatgcccatattgacta

SEQ ID NO: 136583 - DNA, 784 bp, Zea Mays
actttgctgctagagtaaaatctgctagagagcatcgcaacccatctgtgaaaggtggtctaaacagggccgcgacgtgagcactggctggagcgactccgtcgtgagggcgtcgaggaggatctgatgtaccatagcacagactgtgaaggcgagtcgatgactctggaaatccaaatagctggcgtatctggctagcatgtatagtgacatcctctcgctcaaaacagaacctcatccactggtggtccgggtctatccacactgaagcataaaatactcggacccactcctcaacgtatctgccactcgtagtcagtagagtgagaagtcccagcagataggagagatgcacctcggaatccgcaccgactaccagcagaaaagtaggtagatccaatagccggtgcgctcatagggcgatctgcgctgacaactgagctcggaagaatgattcctgaatcttggtgctgaatagatctgtcgctgctaggtccctctgagctggcagccaagactccatgggtacgtgtctgaacctacatacccgggctgcagtggcacgctgaagatcaatcaaatgaggatcagcggctaacagtctcacctcagtctcgtctcgctcccggaagcgggctggtggaatgggtggagtggaaatgggagcgggagggggaacagtggaagcgagagtggtagaggtggtgggtatggcagaagtggtggatggcttgggagcaactggagctggcgaagtgggaggtggagtggtagctatggcggg

SEQ ID NO: 136584 - DNA, 514 bp, Zea Mays
ttagctgaagtcagagaagcaattggtttgtactctatccatttagtgaatttgtcaatggcgaccaccgcgtgagtgtatcctccctgagccttcttgaagggtccaatcatgtctagtccccaacacgcaaatggtcatgttacgggtatggtctgcagttgctgtgctggtaaatgctgctgctttgataagaattgacaagcttcacacctctggactaactcggctgcatcactttttgtggtcggccagtagaaaccagattggaagacctttccaaccagagtcctggatgttgcgtgcatcccgcattgtccggcgtggatctcatctagcagttgcttccgagtagccgaaagaatgcacttcatgaggactcctgttgcgccccttctgtactgtgcctccccaatgagggtgtagtgagctgactgcctttcgatgcgttctgctacaactttgtcatctggttcctcttcattatttatatatctgatgatgggctctctct

SEQ ID NO: 136585 - DNA, 477 bp, Zea Mays
cttgttgaaggagagaggtctgactgctgaagcggtagtcgcagactttgttttcaagaacatttagccactgaaggacagagcatacccgacttatttgtatagtggtgtcactgactcaacccgggttaccaacaggaggattcctgctatggatttggtaagccggctggagatgatccttagaggcaaagtgtcgaatattggagctcctgttgcatattctgcctggaatctgccaccttccaagactttttcagttttgtgtccaatcctcctgctagcgacagtggcctaggtcttagagtgcgaccctctcctgaagaagtcgaggctctggttgcttcacttggtgatctccccaacgatgaaaggcaagttcactttgagatgcctgtaaacccgagtgatgcagagataagtgctatgctggacatgttggctgaggattcctctgactccatccctgctgaaacc

SEQ ID NO: 136586 - DNA, 321 bp, Zea Mays
caacattaagttgcatcacgtcttgattgatggtggggctgggctcaatgtcatcagccacgctgcgttcaagtagctgcagatcccaggatcctgactgggaccctctcgcccgttctctagagtgggccctcaaccgatgtacccccttgggagcatcacactccctgttacattcgagacggaggaaaacttccgcactgagaatgtccagttcgacgttgcggaggttaatctccctttcaatgccatcattggcaggccggccatgtaccagttcatggccattgcccattatgggtacttggtcctcaagatgcc

SEQ ID NO: 136587 - DNA, 326 bp, Zea Mays
ccacaagtcattgagcggatacgcgcgcatgaatagtgtctgggagtatgcaggagagagtctaggcagtggggccccatgtcagcgatccaaggaaacgcatgggtgggcgaggtcgaaatgctggtgtgtggagtggagaacagctgatgcgtcgggcctacgcgtcggtgacacggtatgcgcgtgtgtggatgtggggagaaggcatatgacaggtggggaccatcagtcagtgcctgcagttggctggcgcacggtttacatgggccgaggcttagggaattcatcccacgagcacagttgggtgagtttttcctttttct

SEQ ID NO: 136588 - DNA, 432 bp, Zea Mays
cagcaatacgctgtcgcgaggcgagcaacggcgtggctctgcgcagtgggcgagcaataaagaggaggaatggcgagcaggggcaggggctcggcagcgctttatagccacgggctagcatacgagagggcgtcggaaggagaaacggcgctgcacaaatgctcggcatctattgaaggtagctggtgactggacaagaaactgacgtggttaatggagaggaattagtcacgagaaactgtcacgacgagtaacgggcgtgggacagctaggcaccgagtgcggtgcggtagtccactgcctgggatgcaagcaggcggggaagacaaagcagcagtggaaggcgacgagaaggcagattgcggcgacaacactgcctagacccgttcgaacagacgaacagagaagaacactggagcagcagtgggatcc

SEQ ID NO: 136589 - DNA, 409 bp, Zea Mays
tcaacaacagatcttcaggtttgatataatgattacccaccaaaagtccaaaaatttagaaactaaagaggtcccaaattgagaagaacctgctgctttctaaactctttagtgaactgaatcatactttagattctaaactgaattcgacaccagtttactgaaggaaaacacttaatttcagatccagtttactgaaccaattgctgaaatcgcagtctgacagagcgacttggagcagcattttctcccttttctaagcaaggtcagggagatccaccttaacggaaatttctcaccacactaccctctaacattttactatggagagtgcaagccataacattaggggtttatcacaatagaagtctgaagtttggtaaaaatgctgaaactgcatttcaatttc

SEQ ID NO: 136590 - DNA, 750 bp, Zea Mays
gctcagcagagggcattaaatcaccaatgtaaccagagaagataggtttaagcacatccatagtagtatgattagctgaagtctttgctcctcattgttggctggatcaagacacatggctgcctcctcctcgacgcctctggctcctaaagacgtgcatcacacagtcacacacgctctatggaagtgaaaccattggccaacaacctatgataacaaaagaccggttagatctacaacaagagaactagagagagaaaggaaggacgaaatgaggagatggcacctccgtagttggagcaccggattcatcgatgagggagaataaattaaagcgaagatcttaactagaaagaggaatagggttagggttatgatgagaagaggaaagaggatgagagttggggagagaggggaagggaatagagaaagtgagcagaggagctgtgttgtggcaatgacaatggtgagtcaccgtctacccgacatcccacatatcaacatgagtgggactaagggagaggaaaacagaggcagatgcgatggaaagagaaaggtgagatgcttagggttacagtaatttagaggatgacacgagagagttatatacccaagatctctgactgatggtgccgaaccttatatgggttggccgttgcagtcaagccatacgtcacatgctctgtgccagctgacccaagcaaagtcatatgatttgtgcctatctaacacaggtacgatgccagttag

SEQ ID NO: 136591 - DNA, 600 bp, Zea Mays
ccatgaccttagcctttggaaggcgaggcaagaaaagactaaacagagtttttgatgttattggttttgtatacccagattatagctatccctcgcgaaaggagggaaaaagagaaaaaaatgccacttcggccatttctgctgcgccgaaaggcaaaaagatcaaggtttttacgcaccggcctagatacattgaaacagccagggtgccgaagcttgttgaagggacaccttccaccgctaagccaggacaacctgctcctaccagttccaaggaagaatcgactgaagtgccggaaataatagggcaggagaaaatcgaatcgatcggagcgccgaagcattctgccgaagccactgaaaaagcggctgaagtgccagagctaggagaatcgacaggattacaaaaaatcctgagcccgccaccagagctggagttgccgaaggtgcccagagctcctgcaataactcctaagaggaggaggatggctagtgtgctggacgctgtcttagagtcgacaagggcgtcaactcctgctcctgcaaaggagactgccgaagctgctatagctcgcgttgaagccgaagctgggccctcac

SEQ ID NO: 136592 - DNA, 584 bp, Zea Mays
atcttagttaagcaagcaaacttttctgagtttttttatatgaaaatgcgtgcttggtttgagttgcgagtcgctgcagaaaaggttaatgcttgcataagattacagtgacagctcaactaaaaggaaaggaaactacagatgaacttacctgaagtacaagtactctaatgttgattccatgatgacaagttctttccatatattccttgttctagtcgggttggtcgtcagttattactactgcaatcttaggaatagatttagtaatttatatatatggtgtttggttcgaggaatagcgtcaatcatctcctcactttttttgtttgatttgttgaatgaaatgagtgtcacaccggtggatgccatagcggagaatgcagtgagccatggagtggagtcagaaggagatgaagtctgaagcaggggttggcgtgcgccattctgggttgttttggttgtgtgcgtgagttgcgttgtgggccggcccatgtaagcgaactatataagttttgtctcagacttggagaggggttaagaaataattgaagaagaaataccaccagatacttcgttacctg

SEQ ID NO: 136593 - DNA, 757 bp, Zea Mays
atttgggagccctacgcaacctaaccacagtatccatccttgtgcagtaaatggatgcttgagagaaataaaatgggcatatttagaaaacatgtccacaatcaccgaaaatgtgtcaaacccttctgacttagggtggccctccacaaaatccatagaaacatcctcacatgcaccttgaggaattggcaagggttgtaataaacctgttggatgcaccctttcacttttggcttgttgacaagtctgacattgtccaacaaactaagtcgcatcaattttaagtcccttccactaaaacaccttcttcactcgttgataagtaccatgcaccctgaatgccctccaactgcactatcatgaactgatgaaatcaatttagttcttaaagttgagttggcaccaatccaaattctaccatccttcctaatcacacttttgttgcagactaaaaccattctcattagggacctgaatcactaactgtgtctttaatacttgagcttcaacatcaatctcataagaattcaaaacctcttgaatccacaagggttgaacttcagacacggttgttaatgccatgagagaaccactctggaaaggcatttgccaccacatttgcagtccctttcttatacactatttgatagtggcgtgcctaggatttaaaggatgggtattcaaaattgctaagagctaaaaatggtatatatgataccgtataaagtctaactaattggtatgtataatgttataa

SEQ ID NO: 136594 - DNA, 378 bp, Zea Mays
tggaactcccagcctcatgatcatgagagcgtggaggcataggaggcggaggcggaaccccaaagtcatcatcatcatcacggactgctacgccctgagtctcgaactggtgaaaagcggtatcctcggcctgagtgtcaaccactggagcaagtgccgacacagaatcgtctggagctggacggtacgacccaaagatgaggcgagaggcctcaagagtgccctggaactgtggtggctgaatcagctgagcgaagatgtggcaaagataatgagcatacgatagctatcgccgggcacgtagaccatccagtacggtgtcctcgatctcacaaatgaggaaatccacaacatcaaactctgagtgagagaccaggg

SEQ ID NO: 136595 - DNA, 674 bp, Zea Mays
ccgccgccggctgcctggcgtgcctccagcgtctcctgggcatggtcaactccaccatggccctgcgcatgggagcacagatccatgtcatccggtgttatttcaggtacgaggcgtatgcgttctacgacagcaagcccatgctgcaagttgggccgtcggcgccggcgccggcgccatctccgaacccggtggaacacaagagtaagttaattaaagtttccgtggacgtgatttaattccatcctaaactcataaagaaatttacgtactcatggatcatttgttaattatcatgtcgagatcagggcgtagcagcaagctgtgggtaattccggtagttgtggttcctctagcggcagtagcatttctctgcttcatcttctactccccttgcttcagaaggtacaggagaggtatgcgacttaggtgtagacatgcattatggtcaaaaccatgttgtttgaatgagttccagttaatggtatatattcatactttgatacagtaaacatgcattaaagagggattctcatctgtatatattcaggcaaagcaatgaggttacaagcaggatcaaggcgtactcagggcttgcacggagacgaagaactagtctgggatgggaagaattcagacttctccgtgttccactttgaacaggtactggaggc

SEQ ID NO: 136596 - DNA, 271 bp, Zea Mays
atccttcaccgtctgattctgtcggtggttccgtttattggttggaacgcagatctggctccgctgaggcgaagggcaacggcaagccggacaaggagaagaagggtggcggcggcacgccgccaactcccaaggacagcagaccgcgcaagccggctgtgcccaaggcgagcgccgccagccatggcacgacgcgcgcggccgacaagtcccccgggtcggggtcggaccgcaaggcgcccacgcccaaggccgcctcccgcctcgccac

SEQ ID NO: 136597 - DNA, 404 bp, Zea Mays
ccgcaagattgtcccgatcttgtagtgcgtgtctttcatgcgaagctacaggagttaaagcataggctgactaaacaggatattctcggtaaggtccgggcctacgtctatgtcgtggagtttcaaaagcggggtttgccacatgcccattttctactcatcatgcagaggaagtacaagctaacgtgccctgagcagtatgaccttttgatctcagccaagatcccacacaacaagtaccctgaactacgaaagatggttatcaagcatatgatgcatggcccgtgtgggtcgttaaaccctaactgcccatgcactaagggccatgcatcgtgcaagaatcattacccccagccttttagtgacacaaccttgcaagggaaggactcatacccgatttacag

SEQ ID NO: 136598 - DNA, 794 bp, Zea Mays
ttgtacttctatctattctcggtttgaagtccccgacgactgaacgcggccgcgctccggtgagcaactgtaccggctgaacggggccatgaccggcgctcccgagtggctgaaacgaaataggacccatcctaaccctttcccccaacccaatttcactaatggtcaagtattttgctctggccatggtgactgcgagcagtgcggcaagaccgacgcgttcccgctgaccagaggctactccgtgcaaattaagggtttgggaagcatcacaaagatgtaagagtgctcaaacgaggaagcaggggacggggactgaccggaaaagggctggcgacggtggagctcgtttcacggtggcggaagtttgatttgggggaagttggaaattccagagttcgggtgaacgatttcaggtgggagtgggtgttaaggcttcacgatgacatggcgcagctacccgggggctcaatttataggcgtcgcaagcggtggccgggaattttacgaagggcgcgcggcggtcggaggtagaagaaagcactggcgcagtgaattcgtgtccaccgtcgtggcaacctcgccggcgttgataagatagtggtagggagtcacggtgacgcggtgtaaagatagagccacgcggcgcacggccgggaggcggaggtcaccggcgggcttattgggttccaccgcggtgagctttgtacggtggccggagtactttaatggccggacttatctacggcggcgtgctccaaacgttcatctagtcatcccgagcatgaattgag

SEQ ID NO: 136599 - DNA, 1119 bp, Zea Mays
agcctcaaatggtgccatcttgatgctagactggtagctattgttataagcaaactctgccaatgcaagatgatcttcccagctacccttccaagacagtacacaagcacgcaacatatcttccatggtttggatcgttcgctctgactgaccatcagtctgaggatgaaaagcaacactaagggaaagcttggtacccaatgcactgtgaagactctcccaaaatttggatacaaatttggagtctcgatcagaaacaatggacttaggtaccccgtgaagcctaattacttccttcatatacaaggggaccaattctgaagctggattggtggtcttcatgggaataaagtgcgcaaacttagtcaagtgatccactaccacccaaatagcatccctgccctgaggagaatgaggtaagcccaccacaaaatccatggtgatatgctcccacttccactccagaatttccattggctttagcaaacttacaggcctcttatgctcggccttcacgcactgacatacttcacaggcagccacgtacttagaaacgtcaaccttcatccgcttccaccagaagttttgcttcagatcttggtacattttggtttcgccagggtgaacggtgtaaggcgttttatgagcttctctcaagatatccatcttcacctctgatttctaaggcacacaaaggcaacccctgaaacgaaccaaatcattctcatcaatagagaactcccggggtttaccatcgccaaccctctttcgagcttcctgcaataaacgatcctactgctgagccgcacgcactctctccatgagggaagattgaataagcatacgagtctccttactagcggtgccgacatagcacaaagcgatccccaaacggtccagatcagcaatcaactgcaaggccacttttggaaccccggacctactaagggcatcagccaccacatttgccttcccgggtgataatgaatagacaaatcataatctttaatcaattcgagccaccgacgctgcctcaaactcagctccttctgagtgaaaatatacttgagacttttatgatcggtgtaaatgtcacaagcctcgccataaagataatgc

SEQ ID NO: 136600 - DNA, 321 bp, Zea Mays
catccttgacaacaggcatcgggaacaggaagaagttaatcaaccgtacgaaaagaaggagcgaatgcagccctagcccacctggactgggaccgtgcgcctttgggcgcaagattaagaaggcatagttccccttgatggtacgtgtgccagccaacatctccaaatacgatggatccacaaaccctggtgtgtggttacatgactactgcctcacatgttgcacgacggggatcaagatgatcacctggtcatctagttcctccctgtccacctcgcggaaggagcaagaccctagctcgagcatctactagccagaac

SEQ ID NO: 136601 - DNA, 285 bp, Zea Mays
caatgagctaattttgtacccttcagatggggatgcttggaaggctctcgacacgtttgatctagactttgcagctgaacgaaggaatgttcgaatcggcctcgcaatcgatggcttcacaacttttggtcaaatggcatcatcatactcatgttggcccatctttgttattccatatgactttctaccttctctttgttattccatacaaccttccactttttggtcaaatggcatcatcatactcatgttggcccatatttctttgcttaatcatacctggcc

SEQ ID NO: 136602 - DNA, 426 bp, Zea Mays
gccgaaggctggacaacgcggccatcactatgactggcgcaatggcaagcgtcactacacctccggtaagcacaagcccaaaccaaaccatatcaggaacacacttgacaccttgctagatatctctagtcatccccttcctagagcaccttagccacccaagaatacccactcccacaaatagattccacttaagagagaggtgaggtaccattgtgaatattgtgacagggatggtcacttggttgttttttgctttaggaggaagagagatgaatggtgggacatgcaccacccttctcatggtgtacgtgatcctcctgctcaaagacgcactactaggcctagaggtgctttttcttaggtttctaagcctcaggcagtgagaccacatgatggttgtgccatacggggtgttggtcgtgt

SEQ ID NO: 136603 - DNA, 331 bp, Zea Mays
gaatcaaggtgccctcacgacttccccttccgaccgcgcatcgctagctcccgcaacgacccgacctctgcgggtggatcatatcggccgccgttagccctccctcccccgatccgctacgattctttgaccagaccttggtccagaaacgaaaaggcggcggggtaaacagccgcagagtcgagcagtggccgcagaggcaagcagagaggccagtgggcagtggcgcctatggaggcgtggagcaggagagcgtcgggtggcggagaagcgagacgacgtggacctgacggagagtggccttggggaatgtctacgaagtgcaaggggg

SEQ ID NO: 136604 - DNA, 583 bp, Zea Mays
gttcatcaagcaattcttctactgctgggattgggaatttatccttaatagtcatggcattcaactcacgataatccacacaaaaacgccaagacccatctgccttgcgcgctcagagcaccggtgaagagaatggagaacgactaggccgaatgataccttgggccagcatctcagtacactgacgctcaatttcatccttctggcggtgtgggtaccgatagggtcgaacaaccactggatccgacccttccttcaaacaaatgcgatgatcacacggacgggagggtggcaggccctgtggctcttgaaaaagatccttaaatgtatctaggatcccctgcagacgaagatcatgtccaacttccaaactgcgtaactgaactgacttcccatgatgtagaaggccttgcaaactgacatgtccaccctcgaggaaaagagacatttggagggagtcaaagttccagctgatatcacccaatttctggagccattgcaccccgagaactgcatcaaacccttccaagggaatcaccaagaaggaatccgagaaggaatgatcctgtataccaaactgaac

SEQ ID NO: 136605 - DNA, 1108 bp, Zea Mays
atcatggtatactgttggcaggttttccctcttgctactatgctcgctctttgatcatgtgcttctgtcgtgttagtgccatggtgttgtgtttcttttgtaattgtgtagtcttagctctgaggcagcgttacctcggttcccacgtgtggctttttgggagtcggttttcgtgtgttgttgacccctgcaggttactctattcaaagttctgaaagtttagcttattaggatatgcatctacctgtgcgttgaccgcaaacatctagctattgcgtgtaaggggtttctgcaaagagtaaaagggttcacatataaatttggtggccaatctattatttcttaggctacaaacaacattggcttcggatggtgggtcttctccaaggtgaaacaaaaacaggttgagtcaatggtttgaattatggttacacaataagcattagcacaaaatatatttagagattccctgcagtctgatcctcgcatacagtttagttgggtgagaaaaataaatttcatgcttaattgtggttgggacttcttagctccctagagctctttatttatgcttacagacgttcgggctgtgtgctcggaacttagttatctctcttatttatagttgcggttctttgtgctatggaacacctgccttgctacagccccgatgatgttggtgggacccttttgtcaaaatgtttttctgcatatgcccttcacctctttactgctcttcttttcctggttgtgtctatatttggttcttcttcgtttatatattctgagattgattttgtgtcctttgcttcctctcatagacccttaccacatactggtgctgccttagtttaacttcctttgcttacctacggtttgggaatatttgcttttgatgtcgacgtcagctgaatgtaggcttttgctactgtataattgtgccttgcctcttttttgccctccttttgttggttctatccgtgttttctttttttacatgtatgtgttcttattgtttatgtatttacttgttcttattatttacaattgttgcttcaggaatttgcaacgtgcttccccttctgcccacgtgctcgctccaccgaat

SEQ ID NO: 136606 - DNA, 287 bp, Zea Mays
gtgggttagctcaagtttttaattcctctttgtgtttataatgcatgcatgctggaagtaacgttgcctctccaaacaatagggtgctcttagggcatccttaaaaatataagtaccggcccacggggcctaatcaattagccacctatttctccctctatgcctaaggcctttcgtcctaggtctagcggtctagtcctgacgatccgtagcagtttctaggcaagttttaatttttgaaaatggtattcatgatttattgtccttctctgtggtggaatttgctc

SEQ ID NO: 136607 - DNA, 698 bp, Zea Mays
tttgagctcgattttgaaggggatccagtgactttttgtgagtacacattatagcaaagatatagatggattatagcactacaactttgctataggtcactgggtgtgttgccatttgaaaatcagagaaaaagaagcttaaacattgcctgtcagacactctgaacaagttcctcgatggtacagtgcacagattaggacgccagcgcggacagctcgacgccggtgaccctccgccgcgatttgtgccgccgccgtttcgattcgtgctcgggttggtcggatagcacccagtgacccgtcgccgtggataagcctggtcagtaaactattccggctagtcgccgtacctccctccccttgctcatcggtcactcggatagatttctgccgccgttgagccatcactgtcgcccgccgcgtgtccagacactttaccacgtcgcggctaaccgtgctacacatatccggtgatcgccggaggtgccgccacggtaaaagccacgttgcgcggccaccagtgactcaccattagtctcggccgccggtctctctacgtaaaattgggcgccaccgctcgctccgcctataaattgagcccccggccagctgcgctaggtcataccgaagccatagccaccactcccgtctctgattagcccccatagccagagaatcgctcacttcccccaattcgg

SEQ ID NO: 136608 - DNA, 536 bp, Zea Mays
cccagcctgcaccgccgtcgccctcatagcctcgccccattttccgcattccgcaccacgcccgcgccgtccccgccgcttctgagagcgtgtaattctggaccgccgccatcgctgattatgccagccatgcctcatcttcggcggcggcggccgagcaggcgctcacgctgttgtggctcatgcttcggcgtgtcgtccctcgccgaacgccttaatggtgagctccgtggtcaggtgctgctcggcgctgccggctgtttgagtcgggatctaagtgcaccggttcttggtgaattctggacttagatgcgctgcgcacgtgggcgtcgggttggtttgacatgtgcgacaaccttggcctggtagcggatgcgaggagggtgttcgacgaaatggctaccacaagcgtggtgctggggaataccatggtggcgtgctacgtcaggtcaggggatatgtaagctagctgctcggatgtgtttcacatgatggcgaaagggacccaatctcttggaacacactgatgatggggt

SEQ ID NO: 136609 - DNA, 727 bp, Zea Mays
acggctggccgcggtgaggttgggcttcgggtggcggagaacagatttggggcgaacgtgaaattggagagctgtggggagtaatcggagctacgcgtgggttctctggacgcacaattacctagcggcactggccgaggctccaatttataggcagcttcgacggtggccgggaattttaatggcgatgtatggcggtcggagataaggaagaggtctggcgtcgtggttacgtgtccccagccgtggcgagctcatcgacgatgatgggacggcagtagggaatcacggcggtgccgtggaaaggctcggacacgcggcggcacagagatggcacgacgacggcgagcggccttatctacggcggtgagcaaaagggggaaagtattacggcttaccggggtggcttccagctcgatggcgacgacgatctttttaccacgcagcgttatccggttgccagcgaacgttaatcttaacgcggcggcacgaatccttgcgtgagggagggtcaccggcggcaagcacgcgatgctggcatcctgatccactcgagctactgtaccatggcgatccccccattcagttgcctgacagcccatgtttaggtcacactttctctaaaatttgcatgtaaacttcatcaaacctctgtaccaaagttgcagagttacaaaccaactacaattcgactatagggcttgaacacatttgagtacaaaatcaa

SEQ ID NO: 136610 - DNA, 506 bp, Zea Mays
tggggtatacattcggcgatgattgtggtgagtggttggtgtgctcgggcaagtgcatgaggacttaccagagtagctcttaagacatcactttaaggtctgcaatacgataatttaatctagcaactcaacgtgcatgacaatgttgtcttagagcagcgggtgtaggtggaggttcgctggagtgcataatcaccaaggaagctagatgtaggcttccggtttcttcacacatgttttagccatagatggttgttggctccttccttctaggtgtgagttatgatgggtgggtatcaaccgtttgctagggtagaatttaccacagtgaacgacaagcttgggctagcacttagaagaatggtaagagatagcagatggaggccatggtttgcataatctagattaagttaataatgcaatcaataattttaaaataagatttatttcaaagttgaaaattgggatgttataatatgtgtgtgaattgtgaatttatgatgagc

SEQ ID NO: 136611 - DNA, 379 bp, Zea Mays
ggaaagcatcccttgcagctagcgtccaagaaacaacatggaaatgaaataatgggcgccatgggagggaaggaacagccgatgtccatagccgtgagaggaaactgagggagaggacggtgacatccatgggaagctagggctgatccacgccatggagagagactagtgctaggtccatggaagatgaggaaggagcagctccctgcttctagaagacacgcacggcgtgagggagatgagatggggataaggaagagagagttaggcggtggaaggataagagaaaaattcagatttttgcttctccaacttttcacaaaagaacacatagataatatagttctaggatttgaatccgaacgagatgcaaacagac

SEQ ID NO: 136612 - DNA, 494 bp, Zea Mays
ctactgtactttttgattccagagcatctcactcattcatagccactagttttgtggaaaagcatggcattcccactacacacctagaaattcccttggtcacccgaaccccagggtcagaccttctatgccatctcaaatgctcccaagtcaggattcttttaagtggggtagtgttcttggcagacttagctgtcttgccatcccaaggaattgatgtgatcttaggaatggattggttaaccaagcataatggcgtcataagttgcgcaaataagacagttcttctcactgaccaccaaggaaagtcagtttcatgtcaggctcagccacccgcccaagatccaatggtgtttaatctagcagcagaaagcatatctgtagtagaagaattcatggatgtattcctagaagaattgccaggaatgccgccagaaagagaagtagatttctacattgatctaattctcggcaccgcactaatcacaaagaga

SEQ ID NO: 136613 - DNA, 712 bp, Zea Mays
ctggtcgccgtgctcaacaccgagctggaccacgcccttgacaagttgggcaaggttcgggtggaggttgtggaattacgtgctgagcacgcagcgcaccactatcaagatgtttgttctcccactcctgtcaggattcagcacccttaccgtttgccgccccatggtcgctttgattacggtacccctgactgcaggacccagataggtttggagccatagatcgatagagtcgtagtctgtaataatgcttaattcagtgtcttagtcttagtcagtctcagttagagttggtttggttatcatatgttttgatgcttgtcgtgatgaacttgtaatgaagttggatctttgtaatgattgtcatcaaggtgtgggcatcccctgcaacttggtgtagttattaataaagtcatatatttagttgggaaatccctttatttccactttcctctttatctgagaagctgtgtttgagagtcagtgaagatgatcaattgttcagtgctatgaagatttccatatatcttttcttatgctgaaagactgtggagtcagatctgatgtgtgtgtgctttctatagatgtttgagaacaggcgcagaggtggaagacatgctcaccaggagcagcaggcaccctaggaggagtcagctcagcagcagttgccaccgccacccccaatgactatcgtgcagatgttcctgatgca

SEQ ID NO: 136614 - DNA, 461 bp, Zea Mays
gaggagggttatttcttgcacaagggtctgattagaaaaggccagcggatttggaatagggagaattcagctctgtgcacaaggttgatatctgcttttcatgagtcaacattggaaggtcactcaggtatgagtgctacttttcaatgcatcaagaagttcttttgttggaggggtatgaagacagaattggagttgtttgttaggcagtgtggaatatgccggaaagctaagattgagaggcattatcctgctgggctgcttcagccactacctgttccagcaggggcatgggaggacatttctatggatttcattgaaaaactgccccaagttagaaggttttcacacaattattatggtggtggacaaatttcaaagtatacccacttctttccacttaagcatcctttcacaactcaaggtgtggcacaagtgatacttgataatgtggttaagct

SEQ ID NO: 136615 - DNA, 775 bp, Zea Mays
ctacgaagaagttcttcacggcggagcaagaacgaagaagagagggaattggggctgcgcaagttctctggcgaaatggagttgattgcttaagcactagggtgcgcaatggagagaagaagcagagcccgagctcaatttataggccgtcgaccagagttggagaagaagcgcggactacggatgcgctggcaagctttccgcgcggcggattccggtgagggcacgggggtcgccgtttaaccggagttcgccacctcggtaaccttttgccacgacgccgaggatatttaccgcggccaccgacgaccagtccgagccacggcggaatccttatcgccggcgagactgatccttatccacggcgtgatttttctgaaaccgatgaacagtgcgcctgtctctgtaaagagcttacctgacagatcaagttggagctctattctctccagtttttgtgtggtacctaagccaactttctgcatcaaagttatacacctataatccatcttcaactctgccacaatgcttaccatcaaaaagtcactgaatcacattcaaaatcgagctcaaagttcaccccattacactgctactgaaaattcagtcctttggctgtctgacagccagactttgagcatgattatcttccaatttttcacaagaacatggcttgcactcttaagcaaacttgttctcctataattgggctataattttgatgtggtgacttagggcaaaaaccctaggctttgaaagttacaaagccccaaag

SEQ ID NO: 136616 - DNA, 2192 bp, Zea Mays
gtacttacatgtccaatgtttatctccttgaacggcaggggcatcgggaaagggacggtgtcaggtggcctctccgacaagaagctagggctcgctggttcaccaaactcgccgaccgccgagaatgggtcgcatcgtcgcgacgagcgagatgggacctgccagatgtgtcggcgtcgtgatgatgaaaaatggggtgagggtgtcaggagggtttggggtcgaacgacgtcgcgtgtcgggaaggaggcagcggcaggcggcatcggggcagactggctcgaacgacatcaattttcagtgtgtatttgacagaggacaagttttatagccagaaattctactgttcatgatggagaatctgaacagaagcaaataggcacattgcttagtaggcacatagaatagaacataggctcaaacttgcttgtttgtaagcatacctcaaaaattgttggacgcttgatatatagcttctcctatcatttgttgtgctgaaaaatctggttatactcatcagctttcttagtgccatgaaagaaagcatgtcatgcaacagaaataagttcatagcaacttaggcattttctgaccaagtcaaccccatttccattaacaacaaaggcaacctaaccatttaacactatttcattttcataactatccaacagtaccatgttttccattattctaagtaactcatcacgacaatcatcaatgcgtgtgtggcattcatcgtctgcagaaaacacatgtaccattttctcaatctcaatccagctaagcccaggctccttttcaatcatgagccctctgatctttctcctaatttcagacacactatcccattttcctatagaagcataaaggtttgaaagcagtatatgtgttgagagatcatctggatccagctccagtgcttgttcagcagcatgaacaccaattgacagatttttaaatgtcacactagagcttagtagaattctccatagctcaggatatctcttggcagaaggggatttattaattaactcaactgcttcctccaataaacctgccctactcaacaaactcaccatgctagtgtagtgtttgaaccctggtacaatgccgtcatttatcatgcagaaccaataaagctttcctttctcaaccagtccacaatggctacaagtagaaaggagtgagatgtatgttacatggtcaggttgcagatcactacgaatcatgtcaccaaatagtttgaatgccatttcagaatccccgtggttgccatatcctcctatcatagcattccagcacttcaaatctggcttctgtatggtgcagaaaacagaataggcacgaagaagagtaccatttttcgcgtacatatcaacaaggcttccagagacacaaatatttccttcatagccactttttaccacttgagcatggagcatttccccttgcttaagacctgcaagatctgctgcggagttcaaagcactgctaagagagaaattatcagccttgtgcccaacctccagcatgccaataaaatatttcaatgacaattctccttcacctagtgcagaatggccagctaccatctcagtccacatgataacatctttcaccataacggaatcgaacaaaatgtgagcagactctggatcctcatttgtgaaatacatattgagaagtgtattcgcaacaaagacgctgctctccaacccagccttgatcacacaagcatgaagcggtttgccgctacacattgctggtaaagaagcagctgcagccaccactgccgcaaatgtgtactcatctggagccagccattcagaggacacagccttgagcttcacaaaggcctgcactgcggtccatccgtccgcaacgccagaaaatccagaaattatggtattccatgacaccaagtctggtgtttcgatcctccgaaacacaagtactgcagtgtctagatcaccacagcagcagtacatatcaagcagcgcattatgcaaaggcaaatcaggatcaagctcctctgatttcaccacccatccatgtagcgcacgcccatggtgcaagtccccagagcgcccgcacccactcagcaccgaagaaagggtgctctctgtaggcgccagcccagtgctcaccatccggcagaacttccgcagggcgcggtccaggtaatcgtaccg

SEQ ID NO: 136617 - DNA, 783 bp, Zea Mays
ggattagaccgagaagccaaaatcagagaaaagcctaaaccctaaaatttttggggcaaattgaggagtagagacgttcgttcaatgcacaaagtaaaatattgccctttcgaaccgtaatggagcacacaaaccagaaaccctaaactttgggagaaacgacagaaaaagatatgcttagttaatgagctaagtaaaacagtggccttttcgaacctcaatgtatcaaaaaagcatgaggttctcaggtacaagaaaatcttagtaaaaggatgttgagcatgatagaaagcacggatctggaaatagatagatgtccaccaaatcgaaacggacgacgaacgataaaaatcctatttgagaaaacaaccggagccaaggaggaagccgaccgagaggaaacttctatacggaggcggagtaaagtcaacgaggaacttaatgccgatgaaaccgaatgaacgtagagaggaagggataagcaaaacatatatctcactaaaacaaacggagccgagtaggaacccaacagcagatgaagcgcctgtgttcatccagaaaggaggagaaaggaagaaagtgatgtaaagcgccacagttgggagaagaagcgagaagcaaggagaactggagatgtggccggcggatttctctggaaagcagctaccataccttttggccggaccctttttttaccaaacaacgagctgctgcagcatgagcaacaggagcccttgcattgtaatccaacggtgcacaatttaatgatgacgtggatagccc

SEQ ID NO: 136618 - DNA, 479 bp, Zea Mays
caagaccaagggagtatttcccccaatttaattgcgctaatgatcaagtggtgtgttctggccacggtgaccgggaagccgtgcggctagatcgccgtgttccccggcggttggtggtctcctagcgcaattgtgtgggttgtcgagcatcaccggcgtacagagaagctagaacaggaacaaagaggacatgggcagacctgtggaaggctggccacggtagggtgtagttcttgacggcggagagggatttggggaaaaccagaaattcgagctcgctagtgggggatttgggatgcaggtgggtgcggtagctgcttgggaacatggcggagctgggggcacggtctatttatagagcccacgagtggtggtgaccaatttggccgagccgtgctggcggccggaggtgaagaagaacctgggcgcggtgaattcgtggcaaacggcgtggcaagcttaccggagctgatttgacg

SEQ ID NO: 136619 - DNA, 463 bp, Zea Mays
ccttgagttatatttcagtggagcccactttacatgagcaaatagtcatggcacagattggtgacaagggtgttcaagtcattaaggaaatgatcgaatagaaggtggataagtacaaatgcttccgtcaggacgacaagtgaattctatggtttggggaccgattggttgttcctaagaatcccgaactcagaaagaaaatattggatgaagctcacctttccaaattctccatgcaccccggcagtaacaagatgtatcatgatctcagatccttgtactagtggaccagaatgaagagggaaattgctaaatatgtatctgaatgtgacacttgccagagagtcgaagctagtcatttgaaggtagccggtaacttacagcctcttcccataccatcttggaaaagggaggatatttgtatggattttattgtgggattgcccaacacctcccggcacca

SEQ ID NO: 136620 - DNA, 342 bp, Zea Mays
catatgcaattaatcgattgttggttacggttgagtggaaatcattgaaaggtgttcatgtttgttgcagccgacccaatattacatttcaataagtgcatactagtaggttcacaccttgtcaagtttttgagtacatcaaaacggattaccatcgacttacttacgtttatgttcttcagatttccccagcaactcggattattcgtctgaggatccaagagccacttgaaccaaggtatagccctattctttggtcatgctttctttcattggtttgtcaatgtagtgattacgaattatggtcatgttttgggtaatccatgcacagtgtgctctaag

SEQ ID NO: 136621 - DNA, 1049 bp, Zea Mays
ctcatcatcgtcatcgtcttcagtggatttagcggaatcattgcttctgctgtcactttggtcaggtcttcctattgtctgtactgcctcattagcttccatgggatttaagttttctgagttttgcgctgaagcactcagtggttccgattttttctttaaaagttcttcccgaagccagttaggtactggaggctggtacagaatgcaacaggaacagttcaaagttaaacaaatgaaaacaatcagaaaaggaagtgcatggcaggaaaaaaatggaggcgtactttctttgatttatctgcaacactaaaaggagtgtttggatctgtagggaacacttctgttacattaccaacaccaaatgctgcaggtgaaacataactagaactagatgctgctccaaaaagtggtgcagcatgcacagaaggatccatctgtaggttcaaaaagagtagaatcactcgtgtaaggggacttaagagaaaaggtcagtaattcaatttcaaacatgtgtacacacctgtgctgtttgtggtggcacaggagctcgaggcaggtaccctactgtagcagatggcgtccatgaatgtgtagaggttgcagctacatcatgattaggtgctagtgtttgaggagctgggatattggaattgacatttatatgtactgccaaatcaggagctttcctactgttaaattccaaaggttggtcacttggatcaattggctgtctttcatgcccaaaaagaggctgttctgtcaagggaacaggcatactaaggcaaccctgtgagaatccaccttgaacagctgccgtggttggaaatggctgtgcttgagagtttggatattgaagcatattattcccagtacctattattacatggtaaagtcaaagtcagaattttctttacaaaaaatattactcatcatgatcattgtactttatgcaagacaaacaaatgagttcagctctatatatagcagaaaaggatgaatgctcaaatacattgtagaagtgatcatttaaagaaatgtacacttct

SEQ ID NO: 136622 - DNA, 2472 bp, Zea Mays
accagcttggtgggacggtcgtttatatggcccaaaagacccatttaaaatactaacacgccgagctcgaatgcagcatactcctcctcctccctcgagcttcgttcggtcgctcccactgcttgtccgtcgtcgcagcgccctatatcgctccaaatcgtcggctagccggccaacgccaccgagaagctgacccgagtgtccgctcgtccggtgaactagtaagccaactcattttaccgattaatcacactagttgaccaataaatcaggataggtcgcgactaaccgtactgtagacgcactgcccttcgcctaggtgcaccaccggttatcaccggttaatcactttagtgatgtggctacctgatggagaatgctgattaattggcctgatatgttgataagccagtagtcaagtaggagctagggttagaggattttccccttttcaacatgaaatctttttaaatcgccactactaattgcaatatagacttatgatacttgtaatagtagttcatgttattgctatttttggggatgtcggatcagatcaatccggattgggaacacaaggacaacatatatcctagatttacgtgtaagtattgcaagaaagagtcgaagaagcggtgctacacattttaaacaacaccatgcatcacgtgggggaaaagtgcagggttgtagcaacgttctgccggacatttctgattacttttggtggtacattgacaagggccaagataaaaggaaagcaagaatagtggtggaggtatggaggttggcattggtgggttcatctcgtggttttgatggtgacgacaacgacgagttgtaggccgcaatgcgtgtttcgttgtcgtcctctcaaaagcactacacggtattacccgtagtgcgttgtcggtaccaaacatcgacataacctccttttcccatgcgtgcttaccaactaatcatgtgggagtatgttgggagacgcctaggaacgagtccagaccccgccccctatatatatgaagtggtacggctgtggtggatacataccccctcggatcctcatggacactaaaacatatcatgggctgcctgataggtttcctgctgagtcgccatgtgggatgaactagtaggatgtagccaactcaggtgagcccgatccaagctaatgaagaccgacgtccgagttaagcgtcgttgaagcccggatgtgtcggatgatgtagttgcaaacacctgaaaggcttggcattcgacgataactcgggcggctaggcgatgaagactccggatatgtagggacacaatctgcgacaaagaaggagataagcaagtagatagtaatcgcaacttgtaacgggataactctctctggtcgcgtatatgaggccgagggggaccccctaccattccatctcatcacccaccactccagctcatcctcacccacaaccctgagcttgtaatcctcgtacttcggagatcaatatcaaacccaacaggaagtagggtattacgcaattctaagcggcccaaacatgtataaatccgtgagtgatcccagcgtgcctctgcacgaaccatcgagtcgcgatcaacgacgccatcctacccaaaagcatcacgtaggtaacctcgtggtgcgtggttgggtcacaaacgccgacaacgatcgattgagagaatcacatatccaatcaaacaaatctacctacattactttatattatcatgccttaggagtatacgtagtgtagccctagttgtagtttcccaatctcaatcttcacctagcttcgactctgcatcgtctcgaggtgtcttgtgtggcttaccgatcccaaaataaccctagatctttcctccctaaagggatccatcctgaggggcaagatctaggttctagaggagctcatccctatcttcatataaaattatttgcgcacgcggatggtccggtggccaactgcggacgatctggtgacttgtcgtcgacggttcgccgcctcacagaagggttccccaatgtcctcgcccccgcgagcgggatctatgaatagttggtgtttggcccaaaaaaggtgttaagattttttggaattaaaagcatcgatagaaattgatttagcatttacctcattacactctaaattacaaaaggtgaatgtcatataattaggtttatctttatctgttgccctatttggcataacttattttacaatttgttcgtaggtttaaacaaatgttgtatcaaacagtaggcttttgcatcagcttgtcagttcaacttcttcttagaatgaactaaaaataggcaataagcagaagctgaaaaactagcttatccgagatgctgcttttcaaccagcagtagttgttccaaacaaggtcaccatctctagcaacgtcttctaaatttcatcatttatatcttatcttctatattttccaatcatattaaca

SEQ ID NO: 136623 - DNA, 659 bp, Zea Mays
acagaagaagagggacgacttttagcatcatgcacggccttgacattggcaacaatatcgtcagacaccacaacgccaggtctcctcatcaagatccatccagcacgaacggctttatccatagccctatcgcgttgggccttcaatacgacgcagttgtcctctagagttttaacagccagttgagcggcctctagctcctgcacgacaagcttcttggaagcacacaaatccttgatggtggagtctttggtcgacagcaatcgcccaagtcacagaacttcatcttgagatgcctgcagctcatggtgatgatggtctaggtcagacatggtgaagcggtggctcctctccaggatggtcaaggagttactgacgtcactgtacagcctgcctagattgtcgcgagaggcaacaagtgctcttttctcctcctacaaacagaaaacaacagtcaacaccaaggcaataataacagagcagggtcagccagggaaatttacctcgtgtgccacctttttagaatcaagctgggcattcagagaagagttcagagagcatgcactatccagaaaggcacaagtctgagctaagtcggtctgactctgagaatacttctcctcaaggtcagagcatcattgagccatatctgataatgc

SEQ ID NO: 136624 - DNA, 763 bp, Zea Mays
aggattgcctaagcttgcagtggtcatgatttacgggcgaaacccacatcaagaactaatccaagctgatgacgactcaaactgccagaagacatacttcagagacatgaaatatttaaatcgccaggagcatcttcctgtcacagattattattaggagtgtggcaacaacaccatcggatagaagtgtggcaacgccaagaacatcagctagcagcaatgggccaagaacaacttattcaaggcacatgtacattgtgctcaatcaaaaccagaattgcgcacttcgggcggaattccaagaaaccggtgagtttcattccaaaaaggcttaccaaagccaggaaatctatagttttacctaaccgccagagctagctaataaccaatgcagcacacaagaagcaactaagcggagcggaggagagaggggcagagaaggtaaacggcattaccagaaagcagtgtagttggagaagccgtacgctgtggccatagcgcccatggatgcgccagcggacacgcattgcgacaaccgcagcgccatgccactccaggtccccgggctccctaccacatccttcattcccccaagccggtgagtgggagcgaatggagagaagcgcgcaagagaccgcggtaccagagagatagcagcgaccgccagtcggaggtccggcgagactggacgctcgaacccggatctgttaatactggctccagcaagacgaggagacaggaagagtgagtagagagatggccg

SEQ ID NO: 136625 - DNA, 650 bp, Zea Mays
gccgaagaaggcggtcgccaactgacgcgcggcttcattagttagtcaaaagctgccttgtagttatctttaccggtttgccgccaattctggacgcatgtcaagtcaagaacgccgcctgcttagttgttttagctaatgcatactggagttgcattgcatgcctaatgtaatgatcgagacatatgctgctctgctcccttctggagggatatagctagatcagctagtgtggtatatatacgtagttgggtgtgtctgctgtatgacaggcagtggtgcttaaggagtgagcttcttcttccctgggatctttaggacaagtagagctttctgctgcatgctccatgaggatgtgccaatctaaagcatgcatggtgctaccgtctttttgcatgaaaaactcgagtacagcgtagggtggtgtctaataagtgcagtgcaaaaatatcaaattgctcagccacaaaggaatggaactgacaatcatcaggcctgacaattcagaaggctaagtgttcacttgaaatagcctcttagacttgtacaagtggcattcaggctccatgagactacgtgacaatgcagtagtttatagggacagaatcacggaacactaagtttagtctagtcgttcgaattggtttgtg

SEQ ID NO: 136626 - DNA, 801 bp, Zea Mays
acggcagcgcacaatactagcgctgcggcagctatggccgacacgcccattcatcacactaacgccctgaacaccaatacgaatagtaataatcatagcagggtacttggtgagcacggtaggggcaacttaccggtggtttgagtaatgtggagtccagtctatggcgagatgtggcttcacggtggctcctccactccaacgagaaatcaccagcatttcagttggtggcttcgcccggggtggccacggataggtgcgggatgacttggccactcgcaagaccacctgttaaacttggagcagcgacgcaggcgagaagatcgttcggtgaccatctcatctccctctcggcggcaatggcactcgacggtagacaatggagcaggggtcggtctacgcacatatatacacggtagaagttgggaaccaaccccaacaaccccgcgaaaatcgtaactacccagctgatgatccccccacggccactacgagattctagatcggacagtagacgagcccacaaccaccatgaaggggaaagagctggcaagtgggccccacatggcagtgattgagagcgacttgatagagactagcaccgggactcacctgacagtgatggatgctggagacacgggcacgaccggcttgcggagtctagccctgcccgaccgacgcatagggcccatgtgtcatccacttgggggaaaagaaaaggggtgagttttggtgagccggggcaggggttaaaaggagaaatgggcctacggagcagaccaggctgaaagcatgttcctt

SEQ ID NO: 136627 - DNA, 352 bp, Zea Mays
gtggaagaagtgtcgtgattttggaaaccagggggcagtgagatttgtgttcgctgaagggattagtgtggacttacttcgaatggtgaatcacaaggactcgagcgtggatctaagacggtgggtttatactggtttaggcttgcgctatagtccggtgtagtgttgaccgtagtattgatatggagcgcgttacagtaggtgtgcttgtgtgtttagaaaaaaggggtccttccctttgatagttcaagggctgaactctataatgggggacttgtattctgctgggaggagctcgaccgaggggccttgggcagcgtggttcttctgttactctctgtagggtcgtgcg

SEQ ID NO: 136628 - DNA, 460 bp, Zea Mays
ctccctaagcgtgctctcatacatggatttaaaatatttcctctcacaagtagcaagactaagtaactttcctaattagccaaaacaattgttagctcctccaccttagcagcaagatcattggtggagtgtgataccttagaagcgtagtcatcgtcgatgtccttgttgtcgccaccacccgcatcatcaccaagggccaaggtgcaaaggccttctacagtgtcggcgatgaagcacaacttgttgatcttgtcctcaacgtgcctctcgagatcctcgtcacttgaagaagaggctaactcattagagtcgtggtcgaagtcgctcaaggaggcaaggaaggcgagcttcttgatcttcgccttctggaggtacttctttttgagtgcctccttatcaaacctcctcctggacttgtgcttgccagaggtgtgctcctgcttgcccttgctccaac

SEQ ID NO: 136629 - DNA, 293 bp, Zea Mays
cagatagctagtctattggagagttattttattgttgagtagctaaattttggcttgacgagtcatttgccttgtttgttggagatgctctaaggacacgaatgagtcattcattgccagtaatactatgtgccatcttgaattcatgtctgttaggaccaaatacaggtatcaaacgcttgaggcgtgcatcgacaatattgcccatcaagtaaccagcaatataggtatctagactatctaaggcccacaatgcatcagcacataactcattgttgggggctactttaccg

SEQ ID NO: 136630 - DNA, 350 bp, Zea Mays
cattagactcagtattgttagtacaagaatcaggtacaggatcagtatcaggaccagccgtaggaatagagcaggaacgacgaatgtaggtttgggtgataggtggtttggaagagtaagatggcgtggagatggaaggtggtgttatgggaataagaacatcaggtgtggatgtggaagatgatggttcagatgaaaaatcaggaatggaaggaagacacatgaaagaagtggattctgtgggataataggatgggtgagtggacttgttgtaaaaaaagggcgattttcattgaaactcacatctctagatattcgaatacgacgattagatggatcataacaacgat

SEQ ID NO: 136631 - DNA, 339 bp, Zea Mays
agtatgatcaagacatccattagctccaaccagcaaaacgatactgaaaatgtgatcaaatttgtaacagcacattgcttagaacaaagcagctacgtagattttgatatagacttttgtcatgctacattataggatgacatgggtgcgaagtttcaacccttttaagatagaaatatctgccaaagacctgcaaaacgtattaagggtaaatttagatatgactctaaaatgttttgatatggttgttcgattgttggccattaaagagtcacatatgtcgaaagatgaaatgataaaggataaaaaacattatatggacatgcgcttctgggtaag

SEQ ID NO: 136632 - DNA, 419 bp, Zea Mays
ttctcctcttttaatttcttgatttgttgctctaggctctccacccaggagtttaggcgggtgcagtgggagaaaaggtcgtcatagtggttgtcaagagtgtggaggtatccggccatgtatactatggtggcgtcatcctcattaggatctcttcttgacagggcctgaagtcttttcctccaggtaggggtatttttgttgctgggtggaaagtaacgaaggggtgtctcgaagacttccctgctgtagttttggcatagctggcggagggctttttgggcaacattttggcaagtgtctgggaagcggtgtccagtgaaggtgacttggaaaggagggtgatttgggtaatttcggctttctcccaggtagactgccatagagcatttcttaattccattctcgcggtattctat

SEQ ID NO: 136633 - DNA, 279 bp, Zea Mays
acagataacttttttggtaaaatttggtcatatacgcggagcgaaacagagaaggtatgggaatgggaaacgcggcacagaggtatgggaatgggaaacagagaagaggccatggttgtgggacccacctgtcagacgatacatgggaatgggaatggcagcagagaagatatgggaatgggaaacgaggcacagaagatatgggaatgggaaacgaggcacagaacaaagaagagggggaatgggaaacagagaagaggccacggttgtgggactaac

SEQ ID NO: 136634 - DNA, 343 bp, Zea Mays
gagacgagaggctatgtgacgtcagggtggttatataaaagagaacgcgggaggaggttgccaaattcatcctcaattgtgtcgcgaccgagagagaggcggttgcgagcacgacaaattgcgcgagacagtgtaagatggagactgagtcaaacgagtggtagatagggttggataaaattagaggaagacggtcagagctgacccgcgggtccaaggcgatgagatagacgtcggaggggtagacagggatagacggggatagccgacgcgagtagcatgtcgtttgcgaggaaagatattttaatgatcccgcgaaaaggacacgagatctagaacgggc

SEQ ID NO: 136635 - DNA, 907 bp, Zea Mays
gctgaacctgaagctaatgttgaaggctgcacctgtggagtcagtggtgagggaggtggcagatgattcccccccgaattctcaccaacttgatcagatgtagttgggtcttggattgcttcatcaggagcattaaattgaaactgaaagactgtagtttctgaattttcatcaggcaactgagtattttgactatcctccagttctccccaattccatcccattccctcttcaaacttaacatctctgctaatcacaagtttgttagtagagggatcatacatcctgtacccttttgatcctggctcatacctcaccattaccattctagcagatctgtctaataatttttcaatactagggccatccttctttacatgtcctacacagccaaaagtcttcaagtgactgacataaggcttcttcccataccaagcttcatagggggtcatccctgtgacacttttcgtaggagacctgtttagaagatatacagctgtagtgactgcttcaccccagaatcttggtggcacactcctgccttttagtagacatctagccatctcgacaactgactgatttcttcgttcaacaaccccattttgttgaggagtatagggtgttgtggtgaagtgttttatgccttgttcagtacaaaatgtagtgaacatccttgaattgaactctcctcctctatctgtcctcaaggctttcaactcgctttctagctctacttctgctctctgcttgatcttgaccagacatgacaaagcttcaccttttgtcttcaggagttcaatccacataaacctgctgaaatcatcaactactaataggaaatagaggtttccacctactgtctgtggtctaatctggccacatagatcagcatgaaacaattctagac

SEQ ID NO: 136636 - DNA, 552 bp, Zea Mays
gcgcagtctgcgctgtcagtttttgcagtctgtgctgtcagactgccagaattttcacgcagtcaacaccgttttctgcgcgcttttactgcgcagtttgaccagaaaccggttgaaccggtttttgaaccggttgaaccggttttctgttttctggcggccgactttcccccttttatttctctccctctctcctcttcccttctcagtctcattttccagccgccgccaccctctcattcttctctctcaccttcacactcctctccaaaaaaaaaaactctctcgtgccctcacacttttggaagagttgttggagatccgttcatcctggcgttttccatcatcttcctccatctcgttgggagttcttgacccaatctccggatcaaggtattgccctattttatttccttgtactcgatcctacgcattcttgattatctaatgtatcattcgttgggtaaattttagtttaagtgattgcaacacttagattatcttcatttgtcacaaacattgttagagattagcgatttgatattgttcgtt

SEQ ID NO: 136637 - DNA, 477 bp, Zea Mays
gcggtaaaatccaaactgaagtatggaggcatcaagggtagcctggaactgaggaggatggatcagctatgcgaagacatgacaaaggtagtgagcatatggctgtagacgtcgagcccgaagaccatccaacactgtgtcctttatctcacatattaggaaatcgaccacatcgaacacaaagtgagataccagagcaccaaggagccggagctgaatatgtgtggtggccactctgtatcccatcctcggtagcagggtgcgcctcatgagctcatataaaaacttcaccgctggggttaagtcagcaggagaacgtcgagacccgtctgtgaatggaggtctgaacatagcggcgacgtgagcggtgccaggagctactccaccatgaggacgacgaggagggtctgaggtaccatagcacatgttgtgaagcctcatcgtcgactcagggaatccaaataactctctgatctg

SEQ ID NO: 136638 - DNA, 355 bp, Zea Mays
tcccatcttggctttggtctgaaatggtgcaacttaatctccaacctattggcctcttcctctacgcaagttctcaatggggtcccaggtgatcatatttggcatcggcgaggtttgcgtcagggggatcctttgtcccctatgctttttatcattgtgatggatgtgcttggcagcttattcaagcatgcggaatctagagggctgctgcatagctggggggctgcaaatgttaggtccaggctctccatgtacacagttgatgtagttctctttgtcaagcctctggatgatgatctggtttgtaccaagttgatccttgactgctttggagaggcatctgggctgattgcca

SEQ ID NO: 136639 - DNA, 629 bp, Zea Mays
ccctagcccacacaaaaagtaacgcaaatcccattctagtgcgcagccgagatctggacagagagagagagaggcgagagagctcactctaccgaccagctaggtagggcacacaattgccacttcaaaactgccgaccccgtagctgcatccagttcttcagccagaaaaaaaaaagattaatcagtgggagtagcgagtacaccggcccatactgccgcttggatttaactaatgcacgagtaatcaaatcaaccacaggcctgggtttttaaaaaatcgtggctggcaggcactggcactggcagcgggggtgtggattgaactctctgcgctggcctgtcaggcagcattgggatcggattagaccggtcttaaaactcgaggaccagggaagcgcaggagggagggacacagctagcccggattcgcatggggtggatttggaatggaaacccggcgtgctctgctcccccggccgaccctgatcgattcgaactcgaagaagagcaacgacgacgcaccgcatcgagctccgcaaccgacaccgccttaaaacaaccacttgttcgagactagtacgcagatcgatggatcggttcatcggtgtttggcgtgcactggcaaac

SEQ ID NO: 136640 - DNA, 509 bp, Zea Mays
ctgcgcaatgcatggcggccatccttgaaatcgtcatgcacaacatgatcaattagctacaaccggaatcttacatacagaagatggcttacatgcatgcagctctccaaattaaatcccggcaactaaacgtaattactggtgctaattacctagccagggatcggacgatcgatcgatcgatcttagtacagacttttttagctgtagcagcagtagttctagttggcgatcaactatcttttactacaccaaggcaaggcaactgcatggtgcgtggcagctcgcgcgcgcgatctccatctccatcgacgacgagatcgagaccggaccgtccaagtcacaagccggccggcgcaaggctgagctgcaggtccagccccagggcgtcctccggcccggccacgaccggctccgccaccaccgccatcccaggcccagctgccatgccggggtatctcctcagggcggccgccgggctcacgtggaccctccgcccgctgtactgg

SEQ ID NO: 136641 - DNA, 457 bp, Zea Mays
ggtatctcctcctcgctaggtatctttgtcgaggcgtacggctcgccatctccctccctcgcgacctcctcgtcataggcggaccgatgttaagagcagtgggggcacaggcccccactcaattttattgatttagtggaagttttaccttatttactataatcacaaacgcttatttgtaattaacccttcatttaggcccccacttaaaattagacccccactcagatttttgtctaggtccgtccctggttgtcgttcccgcgtttcctcccgctctccagtcaccaccatcgacttgctcgcggtcgactgatcctgtgccatcactgttgcgagtttcccgcgacgtcctactactgtcgcgccaccacagtctccctcgtcgtcgttctcgcatattctgcagtcgatgtcatgatggcgcgacgacaccgtccaaggtgaccaactcttg

SEQ ID NO: 136642 - DNA, 804 bp, Zea Mays
tgtggggttctagtcgtgttgattggaagccggatcgtctgtgtgacatctccaccaattcgatagttaccttcacctgatggaagatcgggcacccccgttcctatcatttacatcccaaggtctgtttaagatatttcattttacatgcccttgaccacccttctttctcgatgatccatgagcggtcattttattttgcacatccttggtgatctcgttgtttccttataacttccttgggtaatgaattttttacttcaacccttctgttggaatgatacctatcttacccttgattattttctccacttcgcacttcgcgagtcttgcctcaactctatccttggttatgcttttcacgattatcatttttacccttgttgcctctacatcttactttgatgcttatattatacctatcctttaaaactttctctcttccatctaaatttcatagttgtgtcttacctattttcccttggtcgtattctattccttgttgcttgcgagttttaactccatccttggtcatgctccaattaggtattacctttacctttctcatctcttaatcttaccttggtgattacactatgttcgttctctaagatcttcaatctcctatcccaatttgagagtggtgttttacttatctaacccttggcaatatccacttccttatcgcgtgtaagccttgacataactccattctttgttgtaattatgccactgactcttctataccttcatcgttttttcttatacccttgtctggtattgcctttgacccttgtgatattt

SEQ ID NO: 136643 - DNA, 427 bp, Zea Mays
ataacaccaaacataagaacaaactgaataataatgacctacgcgtttctacgagacttaacacaacttgaacggatcaaatcggagttaaaacggaggagatacgaatttcctaaggttttatgtatttgatacgagattaactaagaaataaattttaataccattttcatgttaaaacagagacaccgggtgataaacaacattattacaaaattatagagactgaaatgggtcgatttggactaagtatgcattttctatacattaaacaagttctggcatttattttcacattaaaaatcctatttctaattcatttaattgatttaaaacaattctggatcgggcctcaattactggtaagttcaggggctaacccgcaagatctccaagacacagcgcgccactggtctggactgcgggt

SEQ ID NO: 136644 - DNA, 431 bp, Zea Mays
catgcccctacgagagcatgctggccctgatgtgtggtactggtacctactaccttctttcggttgctgcaagcctgtactgtaatccatcagcttgggtgttggagggagactgtgggcccaacaacgcactcgcgtttgacatttgtgcttggttccaacaatgcattagcggttgcatttgcttttttagcaaaagatggtaggcatctcaatcgatggctggtatctcgacccgcaccactaatcgctggcttgcgtattaaaaaaacgtaaaggtaggtatacaacgctgctttctaccaagttaaacgagctaatgtttctttttttttatcatcaaaatcgactgcataaacaacacaacgacggaccacaaaagtagaagtgctcacgcgagcacgtggaaagtggcggacgcacaaggaaat

SEQ ID NO: 136645 - DNA, 474 bp, Zea Mays
atttctatcaaagcaacatcatctatccgcacaacagttacagactattcctgtaacctggccatttgcatgctgggggctggacatgatcaggcccttcaagaaagctcaagggggatatactcacatgctggttgccatcgacaaattcacaaagtggatagaattcaagcccatcgcctctttaacctcagcaaaggcagtggagttcattcaggagataatgttcaggtttggaatacctaacagcatcatcactgacctaggatctaacttcaccagttcagagttctttgacttctgcgagcagaggagcatccagatcaagtttgcatcagtggcacacccaagagctaatgggtaggtggaaagagccaacgggatgatacttgatgcactcaggaagaaggtgttcgacaaaagtgagaagctcgtagggaaatggattagggaactaccaaatgtggtctggag

SEQ ID NO: 136646 - DNA, 400 bp, Zea Mays
caagcaaaaggttaacaaaagggtaaaacaagcacgcacaggtgctagccaagtatccagaagtcctgcaagaaccgaatctaaaaccatgcacacccaaaagttagtggggccaaaaccagagcccagaccacccgccttccacctagtgcttatcttgcttatcttcatcagttgaatcatcagtcctttcatcatccaaatccttcctgcctaccctctgctgaccaacagatcccgcagccgatttcttcttcttcaaacgatgctcagaaaggtcgtcctcttacaagttacagaacctggaacccagattccgaagcaccttggaggatagtggggggcatcgaagttatgttggcacatgaggcagttcctttttgggcaggccccatgtctg

SEQ ID NO: 136647 - DNA, 716 bp, Zea Mays
aatcttggattgcgagttgatttggcagaactctagggcttctttagcaaaagtgttgtcgttagtgatgaggcagtgacgtggagctctttgagcgctggattcggcaccattagttaagactagacggtgggaggtgaagcgacatttggtgctctaggccgtcagatcgtgggcaagctatggggatccgttgaggggctgcgacaatcaagaggggagggttgtgacggccccacttcgactctgtgtcggaggatagtcgacgtgcgagcatacttgcgattgggtgaggctcgggccgaaggtatgagcccgtgacaatgacgtgacaccacgaacctagcttgggggttgggaaagttcgatgatggcttggaaaaggcggtgcattagtgtgtaggggcgttggcggcctcgccaactacggcgagcgattgtcgtctgatcagatagagagagagagagagagggcaagacctagtcgggggagttcctcacctaaaggcacaggttagggaggcgagcttgacgatagggaggcgttgatggcgtcgaacggcgatggcgggcaatggtgaactcggtatttaaggaggaggatgggtgagtgtcactaggataaaggaagtgagagggagagcgtggtacatcccacctaacgacaaagctcatgtgggggtcctgaatagcgaaggcgactctggtggggcggt

SEQ ID NO: 136648 - DNA, 606 bp, Zea Mays
gagttgtttgtgtgctcctgagccggctgtgttggagttagtgaattatatacaagattaaatgacttcattcttctctatattatgctcagactgtctgttagaccgagacaagtaacatgatattaattaggggcatgtttgtatgcactaaaacatagtttttaagacgtcacctaggcgtataggcgctcaaaaattctggcgttcaccatcgccatgcagaattagacatggagggagggagggaggatggagataaagatgagggaaagtgttccaacactgatttctcgggagagtaggcgtcgatctgatgggaagcagcggcagtgctggagggagcttgaaggacagagcggtgacgcttgatgagcggtggtgtcatgtcccgacgatagcttggagggagctcgaagggtaggggagcagcactagaggaagatcgaaggggtgggcggcggcgctggagcgtgagagagtagggcgacgacgtagggagttttttagatgagaagtaggtcaaaatagggatgagagggagggcatatgggctgggatggtgggctgtctaagtgggctggagcccttatcccctctcttttc

SEQ ID NO: 136649 - DNA, 838 bp, Zea Mays
ctaggcctcgattttcagaaaggtcagggactatggcgtaaattttccgagactcagtgaatagagttctctggatggcgggttaatttgtaattttcttgggggctctttaacaaaaagtacccgcgaaggggtatggactaactctggccgttcgattagacttgggcgcgccaaattaaactgctgaaaacgcgaaccggtacgctgcgtgagccctcggatttcaatccaacggacacagtttaatgaaatcccgatccgattctgaccaccggatcataatcggacggcgctcgtgatcccaacccaattgatacgctccctctaatctggaccgcagatcgcgccattaacggcgcgaaatctcccaatccccagatctaatcgtgactgtcaactcccagatcaacggcacgcgcaaactcttccacctccgaccatgcctgcgcagagccacggcggagccatcgccggacttgtgcgattcggccacacgccgctcccattctattgtggcacggcttaaacggagtacggggtgatgcggaatgtacaggtagggaacttaccgccaatggacgacgggttggggccggtcacggtgaagcacgaacttggcggaacccccaactccggtgacgaatccccgcaatcccgatgacgagagcgaggcggaaggcccacagaaacactccccacgggtctgtggaacgagcgagcaggtgtaggcacccaatcggaggtgtcagtgtgattcccacgagggcggcgacggttcactcacacggcaacaatggcgggtggaaatctggagaaacggaggcagccgaaggaa

SEQ ID NO: 136650 - DNA, 337 bp, Zea Mays
tacaaaggagactgccgaagctgctacagctcgtgctgaacccgaagctgggccctcagtgcccattgaaacagagcctgctgggactgagcggagtgttgaacaaggaccctcggacatcggtcttgttccggagaaagaggacacgcccaagaagattgaatctcctactcccgaagcaccttctgaaggacttgactttattattcaacatgcttcgggtaaaaggttgtctgaagaggaaattgcggaagccagacactatgcccgggaactgaagtacccgaagggggccttggtgtacaatggcaccgacgaagatgactttctatactgc

SEQ ID NO: 136651 - DNA, 411 bp, Zea Mays
cggggtatgagaagattcaaagtaaaattgaagttgtctcgtcgctttattggacttttcttgatcttaaagcgagtgggaaaggttgcctatcaactggaactacctgatcttcttgcagatgtacatgatgtcttccatgtctcacaattgaagaggtgtctcagggtgcctgaagagcagctacctgtgcaggatcttagggcacgcaaaatgtgtcgtgtgtatacatcgtttgttgtgagcttttgcgttgcatctacagtaccacacacaaggtaaaatggttatgcgtctccttttgcatgtcgtgttgggatcagtcctagggatcatgcaatgtccaatttccttttgcctctcattctgaaacatgtacaccatgcatgcactcagctttcggtccaaatt

SEQ ID NO: 136652 - DNA, 528 bp, Zea Mays
ctgaagtatgtatctcctctggagataatggaacaagaaccaccttcttgtcattgtgaatgaaagtgtatttgttagaccgtccaaaatgcactgagtccacatcaaattgccagggccgaccaagcagcaaatggcatgcttgcatgggggcaatatcacaatccacctctccatgataatcaccaatggaaaatgacaaatgaatcatggctgaaaccttaactgtcccataattattcagccattgcatatggtacggatgtggatggcgacgtggctgcaaaccaagcttctcaacaagcaaagcactaactatattattgcagctcccaccatgtatgatgaaacggcacacacttggccttgcactttgcatcgggactgaaataaattatggcgttgtccttgttcagctgcaacaaactgagtggaaagaactctcctaaccaccaaagaaggagatggtgtattcattgtagaaggctcgaaattaggaaaatcagcaagcaactcatcaaaatcagc

SEQ ID NO: 136653 - DNA, 305 bp, Zea Mays
gtccgcacggatcgcgcgatcaccggcggtagctgcgttggccgttgacgaagaaaggggaagataagctgaccggtgggtcccgcaaatcagtgaggtgtgcgcgaaccattgaaagaactcgagcggctgaccccgggccctacgcgtaagtggcagagcggtgaggagcgcgcgcgcgttagactgcccggtggggcccttctgtcggcgcgccgcgcaccatcagagttgggccacgcggagggatgtgtaggtgggccgaattgaggggaagttggcccagttgcgggttttctcttttt

SEQ ID NO: 136654 - DNA, 797 bp, Zea Mays
cccatgctggcaaatcgacaaccattgccaaataaatcatcatttctgttaacacgaattgtacttgaactatgcgccccgtccttgtcatcaaatccgccttccatctaggaagctgatttgcaatcttgtcgatgatttgttgcactttggctcttcgaaagttttgtcagggatagaggcaagcccaagtaagtacaaggaaaagcaaataactcacaagggagctgctcattcagaattgcaatgtcttgtttatcacattgcaaaatcagttatgtttgttagtcaaccataatgattactttcgaagattgtttgatagtgtttatatggggtaggtcacaagattgaaagctgaaggtaaatgcacgagagacatgaggatttagagattcaggctctaaatgtgagataatacacacaggttcaggttctgtgtgtggtggattcttgtgatgtatgttcccatacgatgtcctaatggagtttttctgcccccttttatattccaaggagggacgatagtacatggtaggcaccgagtcgattacttggtgacgtaaccgagtcaataccgagttgtatacgagttgaactctatttgcaagcgtgtcttctttatctgttgaaatcattgtcatatctcttattctgatgatatctttatcatatatgcatttttagaattctcctagttctggaatccctcccggacttgattgttgagttcttgggctcatagccgagcccatgagcccttctgttcaggttctttttcataaagtttgatctgg

SEQ ID NO: 136655 - DNA, 391 bp, Zea Mays
gatcaaaggccccggggatgtcttcggctgaaggggtaatctcttcagaagcagctccaaccgagttgaatatccccttcagccgattaacgcatcgagtggcaaagttagcacacttgttccgaaggttctcaaaagcttcatgtaggtttgtatttctttcagtttcggccttgatctttgcttcgagctccttcgtctcatgattaaagcgacgtgtactttcgcccaaaattgttccagcttcatctagttcctcgctcaacttagtattttgagatcgtgcttctgcgagggaaccttcggctgtttgcaacaggatgtctttttcctttagagaaacttcaagttcctttactttgtcctccaaacctttaattatgactttgtt

SEQ ID NO: 136656 - DNA, 616 bp, Zea Mays
attgggtaagccagggcatacctagcatacccctaggcacgcccctgactgtgtgcgtcttctgtgtgcactctaggaagaaccaatgcactcctttgaattaaattaaggaacccgatcttctccacaagaaattatatcatttgccacttccttgtttctatttgttcagctgtgatcagaaggccaatatgtgcccttatgtgttgaatttgtgatgagtaattatcaaaagatgatccactttggtcaagcttggagactacacatcacgtgtgggtgcatgcaacatgtctctttcttttgtgttggtgtgtgtaagtatatagcataaagacggtctatagtcatggagaaattgaagtagacacatgccgatgaactgagagcggtaaaggacggacgtgaggcttaggctatctccaacacacatcgcaaactgcctcacatgcacattttctgcgttcatagttaacgatttagtcttgattgtgccatgagtcctaacggtctgaatctatccattatagtcgaatgactagttacacattggtctgatttttgtcgaactacatatcccaatccgacatcttgcattcaactccttgagagtcca

SEQ ID NO: 136657 - DNA, 545 bp, Zea Mays
ggaagagaagatccggaaaccagtgggatggcgatgatcaggaggcaacagttgcagtgccttcccaacgtcgagctgatcagggccttgatcgtgcaatgggtaggcccaggcggatcatcaaacacaccaggatggttcttcaggcagaggataatctccgtcgggccatgatcatcactgtcattgatcagtcgaattctggctgcgccgcggatgtgtctgactcgctcgccgtgaggtttaacctcgatgcgcagacgctcgacctccgtcgtgccgcgccgaattcctacgtcgcgttcctccccaacgaagaggttgcctgccgggttttcagtggcagcaagccttttgtctctcccaccgttcgccttcacatcaaacgctggtctagacaagccatggccatcggcggggaagcgctgatagtgccagatgacatcgagctgagaggaatccccgcacacctctgggggttagaaacaacagtgcaacttcttgatgatcactgcctcattcgggatgtgcacccagactccgcg

SEQ ID NO: 136658 - DNA, 553 bp, Zea Mays
cgacaccgccacttataagaaagtgtgccaatgtatgccatgacaaaccgatcaaaagccaagattcaggtaccctgtaagaagaacataggtgcctccaacattgagcgctatgatatctaacagtaataggttagacagagaccttctaattggacccgacagataaaaccaataaaaaactgatcgcctgcattcagaagcagcacataaactaaatttagcattttcaggagacgtcgtctacctccacaatactcatgttatcctccagacccctctccaccgtctcctacatggtaagcgtaacacaccacgcacatttgtcagttccttacctcgttggaagaagggcagtcctctgctcaccttccaggaccgcgggtgctgtggggagcgttggctccgcagcgtggcggcagcctgctcaccattgccatcgagagtcgaggggcttagcagaatgaacatgtagattgtggggcttataagaatgaactgcatttctctgacccaaattataatttctgacgcaggggctgggggacttcgt

SEQ ID NO: 136659 - DNA, 438 bp, Zea Mays
acagaatggcaggataaacaacacatcaatggtaggatggctgctaatctgctgcttggtgaagtggagtgcgtgaatgactgaatggtgtgctgtgtgcctggtgactggagtggtgagctgggcggtggccggtttctgctggtggctggtgcagtggtgcagactgtgtatgcgtgagcagtgagctgggcagtggctgtcggtgtctgctggtgctgccttgctggtgcccggtgagctgtaattctgtttgtgagtttgtgactgcctgtaatcagaattctgccgtgttggtgagctgtaattctgtttgtgacttgtgagtttgtgactgtctgtaactgtaattctgtttgtgaattgtgactgtctggactctggacgactatctgtaattttgttcgtgaattctgtttgtgaatttggtaatgtgtg

SEQ ID NO: 136660 - DNA, 340 bp, Zea Mays
ctaagacgacgacgacgtaccgatgcgcgcttgactattctttaactgccagatgctgtgacgattgacggcttaagaaaccgtggagctagaggaagatattagcaccagtccacacggcagaaatgccacatgattcacatgatggcaaagtagccaggtactcgtacggtcgtaccaggaaatcgtcacccagttgccttgtagggaaggcaacggcacaagagaaggcgcgccatccctttttccaagaatatctaaaaaacaaaattacctacatataatagtacagttttcaatcttaataacctacaaatcatgataataaacgccctcccca

SEQ ID NO: 136661 - DNA, 355 bp, Zea Mays
gtcaatctcatgtcctcgatcccaccaaaggcctcatccctcgtgccactagagtggaggccgagatggaaaggtggggacccgtcgccccatacccatggatggatccaccaccatctactcagcctcggccctatattgattcgccgatgtcgagccagtggccgccgcttacgcctgcacaaaggtgaaatcaacaacgtcgaggcaggggtgtcgccgaaatctgcatgcaagtggaagtggggctgtcgagattagcagtgttaatgcgggacctgataccgttaattcagagggaattcttctattaaagttagtttgaaagcaagtgaagacaaacctatagagaaaa

SEQ ID NO: 136662 - DNA, 544 bp, Zea Mays
attttttcgctctgtctcgcgagctaaacgagctcgtaaacaagccaaaccgagctggctggatatccagccctaattctaccttgccatagtttctctgtatggcctgtgtatcggctaagtgtatattcaaagaaagcacgagttcctccgagacaatccatacattgcaacgcatggtagtcccagaattaatggtatcatctgctcagtccaccacacaattggttccaaagtcatacatgatacatgcatccaaatacctgttgatatctgcacagttcttttttccttggtcaatataagtcctatactatgctcatatccaatatccatccaaacaaaagtacgtacactggagttcatctttacagctgttgctgctaccttcattaacaggatcctgggaagatatcctgacaaatctggtaagtaattactctgtttcagaacctgacgttcatgctggcacgtagtttaattagcatttgtatcaccgtattgtgcttccaaaatagatctagtattgtcgtctgtgtatccc

SEQ ID NO: 136663 - DNA, 921 bp, Zea Mays
gcttcgtcactggagcgtgagaccgtgttttggcgcttggaggaccaagagacgaggttagcaccgaggaagacagcataaccagaagtagacctcctagtgtttggatagccagcccaatcagcatcagagtaaaccacaagttccatttgcgaagaggggctgaggtgaaggcccaactgaagagtgcctcggacatagcgcatgatacgcttgagggctgccaaatggggttcccgaggatcgtgcatgtggagacagacttgttgaacagcatacgtaatatccggacgggtgaaagtgaggtactataatgcgcctacaagactacagaattccgtgggatctgagagagggtcaccatcagctgaaagtttggggttgatatcaaaaggggttgtacagggtttgcagtcactcataccagcttgctcaagtatctcaatcatatactggcgctgagagagagtgatgccagaagcagactgttgaacatgcatgcccaggaaatgatgaagaggaccaagatctttcagtgaaaactcctgttggagagcagtaatagtgcgccgcagaaggggcatggacgaggcagttaacacaatgtcatccacgtaaagaagaaggtaaatcatatctgcacccttgtgatagacaaacaatgaagtgtcagacttggcctcaacaaatcctatttgaatcaggtgggaagagaatctactgtaccaggcacaaggggcctatttgagcccataaagtgaccgattgagacggcacacataatcaggatgagtggaatcttcaaaaccagtggactgaacacaataaacagtctctaacaaggtcccctgaaggaaagcattgttgacatcaagttggtgaatcagctagttgtgcgagagagccagggaaagaacggtt

SEQ ID NO: 136664 - DNA, 504 bp, Zea Mays
tagggctttacaaattctacccccctaacagaaatctcgtcctcgagatttgtaagataagggatatagagagattggttgtaatatagcttttagtttctagttggtaccaaaatcaagagattttttttatacaaatgagtaggtgattatgaaggcatgggtatatatgtacaaccaccaaatgtgtaaaacaatgtctttaaagcatggataggttgggtaggacatagtagggtaaggaaggacttcataatgcatagtggatcttgattcctttggaagtatggcttgattcttattattcctcaacgagtttgatctccttcttctcgagtcttgatgtcttcatccgggtttgggacaagaggttaagatagatctgtaggcaacagatgggtagagggtttagtaggtagctatatgatagatgggattagttatgtaacctgttttgtaggtcaagttattaggtgtggccaaattgatctaagtcactaatta

SEQ ID NO: 136665 - DNA, 415 bp, Zea Mays
gcggcagtgccagtttcttcagctaaaatttgttctgttgcttctgtttctttggtttccaaggatttcaccttggcaggctctgaaggcccagcttcagtctcagcttggtgctttgatgcttcggcaccaaaggcttcaatttgcacttcgggagtttcggcaattttcttcggagtagtgcttgaagactttattgtctccaaaacatccagtacattaaccatcctttttcttttgggggtcattgctggacccttttggctttttggtacttcaacttttgctgaaggacttaaaatttcagatgtccttgtttctttagccttcggttcttctattctctccatctccggcattatgaccggctcttcaacattcggtaggggagtcggctccttggcttcggtggccg

SEQ ID NO: 136666 - DNA, 354 bp, Zea Mays
ctcgcttattgtcattgttcatttaagaaaattttaaatgataatagaaaacttacattactccgatcatgacagacatgataacagaaatgaccatgctaccattgtaacctcgctcgactatcagcttagatccataccaaacagctaagccataacttgaaaataaggttgccatcacaaaaccgagtccaaggggatttacagcaccttcttgcagagaagaccggtacgcctttcttatgaacatgttatatttttatagcatgattctcgccattgaatgaaacaaccttcaagataaacatggacagataaaccaggtaagcaggatatatatcaggaagttactgg

SEQ ID NO: 136667 - DNA, 279 bp, Zea Mays
ggaagccgaaggtgctgaaactgccccaatctccgaagtgatgaagcgctcagggctggtagcatcggaggatgcacctaccgctgaagcagagcagactgatgttgaggagactgagtctgaagatgattacagcgcggtgccaagtaaacccagccacctggattttaggaaatccaccatctccgaagatgacatgccgaagctgataaatttgggctatttcagtgaagcgaagaaagagctggtttgttttggtggggaagagattactccgaa

SEQ ID NO: 136668 - DNA, 1583 bp, Zea Mays
cacggatccaactgggacgatcacggtgccaataatctgaagcccgccgaagagtgccacggtttgagggcatattttctgtatgatgcaacagaaacagcctccaaacagccatatgcatatgccctcagttatttttcaacaaaaaaccaagtgtagtatacagttcaatattttgaaagaaaacatcatagggcaaagcaactagatcatctcacatgtatcacaagcctcagttcaatattttcaataaaacagcaacaaacagcctgatgccctcaaatgaatataacagccatatgaactggcattgtcaactatgcactgtcaccacaaacatccatatgccctaagctatttttcacaaaaaagaccaagtgtagtatacagttcaatattttcaaagaaaacatcatagggcaaagcaactatatcacctcatatgtatcacaagcctcaaaacagcactcaggttattataattccatcacaaggctgctacaaaccacatggcgcagatatctcaagcattggctcagtaaaagtttcagaatacaaacctgatagtatttggccaatgtctcctgagcacaaacgacggctgcactcgcctgttgataagaacacatagcacttttttccgcctccacagcggattcaagaacatcaagcgtagaatccacatggttacctactgatgctgtggcgcagagatcaccagcaaccacacaggtggcagcagaagcactcaatgtgtcacgggctgcatcaacggtcgcggagaacttctgggcacatagctcagcggcagattccatgccggaatccatatctgcaaacatggttttaaagtcgtccgactaatcgcgattagtcgcaattagtcggacttatcgctgctgcaaggccgattagggccaccgacgcgattagggcgactagaaacctagtcgtccgactaatcgcgattagtcggcgattagtcgtccgactaatcgcgattagtcggcgattagtcgtccgattaggcttgttcttgactaggtgctctgttttgggctccaggctgctcttttctatttgggccggcccaccaggggaggggagctgaaactgagcaccaatgtgccaatgccgttgcccctcttgtacagtcttttaccctagctggagttgagcgccgccgccttcatttgcttgctgctaactgctctgagcgccgccgccctcctctgcttgctgctgcactgagcgccgccgccctcctctgcttgttgctgctctgagcgccgccgccttcatttgattgttgctaactgctctgagcgccaccgccctcctctgcttgctgctaactgctctgagcgccgccgccctcctctgcttgctgctgctctgagcgccgccgccctcctctgcttgctggactggagatggactgctgagtgctaactgttgtgctgagcgccgccgccctcatcttcttgttggagctggactgctgactgctgagcgccgcctgctctgctctgttcagagttcagaccatcctccactccctcctgctctgttgttcttttgct

SEQ ID NO: 136669 - DNA, 473 bp, Zea Mays
gtgtggagtccggaggtggtggtcgacggagaaggtgaaggtcacacagattcgtaccgatggactaggagcgacgaaggatgagcgctaagtcttgaccgagggactggagaagttgggtgactatccgtggtgattgacacctagggacatcgaaaggcgcaaggacatggggaagcggatcatgttgccgacgacgttacagaccggtgagacacatgtctaagatgtgggggacacgtatggagtacactatccgcgaggtttcggtggctgatcctcaaaaccaactatcatgaccgttcacaagattcatcgggttttggcctcaaaacctagcaatacggttccggagggaattggaggctaggggtgatgctacattgtagtttgtgaatgcacatgcaccccaaaaatctaaagtaagttattatagtcaattttttaccatgtatgcatcacccacatctcat

SEQ ID NO: 136670 - DNA, 438 bp, Zea Mays
caataatgtgctcgctgccttcctcggaggatataagcttaaaaacttcttctacaaactagctgctgggactaagggggggtattctgctaatgtgggatcaagatcgcgttgaggtcataaatgttaacatcaagcgctcctcggtctcaatagacattgaactgaagagctccaacacatccttcctcatcactatcataactcgtgacaaccgaaaaccagcgttctttcatgaattgagacatctctaacctaaggatggtcacaagtggcttgtccttggcaattttaatttgatctaccaatcacaagacaaaaacaatcgaaaccttaacctgcggtgcatgagactatttcgcaggacgctaaatttctacgagttaagggaaatacacgtccaaaacaaaaaattcacctagagcaacgagagaaggc

SEQ ID NO: 136671 - DNA, 1083 bp, Zea Mays
ctcattccacttgctgcattgtcctgcatcacacttgtcaacagttctcttttaataattggcttttgcttcatctgcagcttgggagaatagctcatcctcagcctcagcctcatcatacttctgcttgtaataagccgcctctacctcttcgacggcctgagacataaactcgtcctcttcctcttgagcatgtaatcctgcctcaactagtgcgatgagctcactcaaccttgatgtgtcgtcctcctcttctccatgtaatcctgcctctgcgagagcgataagctcactcaatctagatgtgtcgtcctcctcctcttccatcagctcaaccgtcgtcattttatcctgaacatatcttgcatgcgcctcatccgccaaatagtttacgccacatccaatatctgcaaatataatgagaaaaataagttagcaaagtcaagataaataaattgtactaacataattatagtatcatttttctcactcacttcccttgaggcgatcagcaagattatccaacatctgtttctcggctcgagccgcttcccattcccttgcatcctgtgctctcttctcatctgccgccttcaacctcctatactctgcacgcttcgggctgtcataaaaggcagatttcgtggccctacgcatgtcgcgtatgcgatcgttaatgtacgaatcgacgagctgagatccacaacgcatcttctgtcccattagtctcttggactctattgtgtgcatcacctctcctttgtcgtcgtaactctcccaactgcatttcctcgtctcctacaaaaaatagtaagtaccgctataacattaaagctagtgcaaataaatgaataaataccaacctcatcgtaatcgaccatatgtccacaaaaatatccaacaccaagctcgaaaggaactaatccatacttagcttcaataccacatttgcatagtactggatcaaatttcaactcttccgcccactgattttttttcttttcctttacctctggctctggctaatgggacaaaggaccatacaaccactctctgaaacgacacttacgccacccgtatggt

SEQ ID NO: 136672 - DNA, 483 bp, Zea Mays
caattttggtagagggaatttagatttctttgattgtcgtgaatcccttgatggctgtggagaaggtggtggtgtcctaaatgttgatgcttgtggcggagacggtggattagaaagaggatgaggagcatcatgggaagattgtggaggtgatgatggatgtaaaggtactaaagtttgaggaggcagagatggttggggatgagacgacgacggcattggtggatcaaccaattcgacttcccttcgaggccaaaggatgaaatttttgatggcttgtccaagtgtctcgattccttcgggcccagggatgtctagcatgtcgtcctcagatccttggacgaccgtcatcacttctaccctgcaataatcatctggtatgtcgcttctatgaaacttgcgtcctaggatcgcaatgcttgttcctactttcttcgtgcgattattgttaataccatatcttataactagtgtgcacgtcac

SEQ ID NO: 136673 - DNA, 381 bp, Zea Mays
tgttaacttactgtccatacataaccaccaaatgtactcactgatcgaagaacacagcaatccaagaactcacctcactgcaatcgaaggggataagagccaacaaggactccttgttgaagctccgcgaactgggtggccctccttccactaaatcgagctggagattggtcagcgtacgaggagatgattgctcggcactaggtctgcaacccagatggatttcgtccatggcgacggtagaactcggccgctgcgagttgccagaagagaagaagaggtatggggaggtcacaagggggagatctgactgaagaagtactgagacatggaggggaactgaagaagtactcactgatcctaggctttctccgttttttt

SEQ ID NO: 136674 - DNA, 362 bp, Zea Mays
tacaaatcacacatttagctggagaataagggttacaatcaaatccacttcaatcgaccgataggcttcaagaaatcgacggcaaactcggggtatttcaatgttggattacctggaacttcttgaatcgggctccaatgctgggagattgaaggatgtaaggtggaatggaagggcgctggattggagcggcggtggattggcgctgcgctggtttggaggcgcggaaatcgcatggggagtcgcctccgacgaaaggaaaatctgtgcggctggggttttcttcaaatgggcgctggtttgtctccgttgaatgcgcgactacggttttagaaacaggaaacgtgggagaggtggctggc

SEQ ID NO: 136675 - DNA, 312 bp, Zea Mays
ctccggcgatctcgactctatggaaccgtagggagcgtgcaatggcgcaagcgttgtggggaacaggcaacaacacttggggaacccttgggagcgtggtgagtaccggtaacagaacctcacggtcagggctggtgcgagacatgagagtggagggagaggtgggtgggcggtcgaaggcagaaggaggctaggctagggttggagtaggcgtggggagcgagtggagagaatggagtggcgcaactggcgtacgaagagagaccagttgttgcgtcgtgggggagagagggagggccacgtgtcagcgac

SEQ ID NO: 136676 - DNA, 563 bp, Zea Mays
gcttggagcaccgggaacccgcggtggtttcccctttcctcaactcctctgctcacccacgctcaacctcttccctgcacaggtcggagttcaccgtcgccgcgatccttcgacgtccgtccaaccggagcgtcccctcgccgtgccaagccgccccaagcgccgtctcagggtaagtgaccctccctcatccctattttgcgcaaatttcgcttcactgtgatgaatttcgtctcgccagagcccccttcatcggaccatcgcttcctcgcagcgtccggccactgcaaccctccccgagcccaaattcaggcctcgagcatccctaccttctccccgaaacctatgccggacgtagagcgtcggattaacccttaccttggcgggtattgctcgctggagcagcccggggttcacccgagggtccccctccgccgtctgcccgccttagccccgttcacgccaccctggcctcgcctttgtgttcgctgagacctcccaacctctctggcagcctagactgactcctagcgccccagaagccctagtctacctcatctccg

SEQ ID NO: 136677 - DNA, 765 bp, Zea Mays
aaattggaaatgaggcatgaaactacgtggaattgaaccgatacttcacgaataggtttatatgggtaaatatgagtgaagtgtgcgcttggtttgattttaggcgaagaaaatggaatttgggcactcggctcggaactgatcgctagaaatagagaattgtgtaaaattgaagcctgggatatcggattggcgtgaaatttggcgaatatgttactggaggtatggtgaaggtgcctgaaaagtttgggttcaattggagcatttttggctggtttgggcatttcacccagcacatggcatgcggtgttctaaggtttcggtgaaatggttgatttaaggattgaaaccctcccaaagggagctaggaacctgcaggggtattcaatagagtactaggaacacaatcaaccacttggattcactgaatttggcaaggatttgaaatttgaggccaagggtggaatggatagctttactgtccttgaaacagagagagggaagggaagaaggcgctagggctgctcaccagaggaagaagagccgagcgcagtcactagaggtcaccggagcacgaccgaagatggtggatgccggtgagcagaggtggggaatcgctagagagagagagcaaagaagtgaagccagagaaaaactccttgcctcgggctcgggtgggggaaggtctttttaaaaaccgattatgggcgcaccggacagtctacagtgcctgtccggtgcacaccggacagcgcacaggaaaaa

SEQ ID NO: 136678 - DNA, 313 bp, Zea Mays
gcattttctaaatgcttgatcatgaacctattatgtatgtaatgctaaaagtttaataaaaatacatgcataaacagaattggactgaagttgcttaatgaaatgtttcaatgttgccttttctgtccagtacattggttgtccttgaggcaaggtcttgcaacattgtttgtcatgggtctgagttgtgcgccatactgctttgattactgaccatgatttgtgagataaaaagtgtcatgcatgcaaaactatgctctcactcgcaccacaagaattcttctagcaacctgcaggctaactactcgcactt

SEQ ID NO: 136679 - DNA, 311 bp, Zea Mays
cgcaagacctacatcaactagaaagaagagagccctccaaagctaggacaataaatagtgtggtggctgcctcaaagtacatattccctatcatggcagggtcaagcttcgtgccaaataacaagagatagaagaaaaaggcgcaaagaagggttcaacatgtgtggtgtgtaggggccctacattcggttgaaatggtcccatgccccgatcacattttttcaagatgatctccggcgcaaagattacccaaacaatgatgtcatggtggtatcctatgtaataaaaggctttgtggtccataatgtctt

SEQ ID NO: 136680 - DNA, 333 bp, Zea Mays
acaccattcaccgcgattgcaccacgccttaggacatcttaccacgtcgtcgcgagtcgtagtgactgcctagtgaccgccatagctcattacccagttaccgccatagtagatcgccacgatgactcacccctctttctcgaccgccagcacgatttcatcaaattggacgccaccaccgtagaactctataaattgcttcccccgtgagttcagctaggtatttacgcatccaacgcaccagcccttgcctcagatcatccaccagagcccctcaatttctcatttcccccaaatcggtcagaacgccgccgtgagagagctcgctgtgac

SEQ ID NO: 136681 - DNA, 579 bp, Zea Mays
caagaaatgagcactcttagttaatctgtccacaataacccagatagaatcatggtgcctggatgtattgggcaatcccactataaagtccatgcaaatgtcctcccatttccaagatggtatgggaaggggttgcaaaggacccgctgccttcaaatgactggctttgattctctggcaggtgtcacactcggatatgtacttggcaatttccctcttcattctagtccaccaatataaagatctgagatcatggtacatcttgttgctaccagggtgcatggagaattttgaaagatgagcttcatccagtatcttctttctgagctcagggtccttgggaacaactaatcggtctccgaaccataaaattcccttgctgtcctgtcggaaacacttgtatttttctgccttttgcttgatcatgtctttgataacctgaacacccttatcctcaacctgtgccctgactatttgctcttgcaatgtgggctccaccgagatataacttaagtcacctgaagaaacaacttccaggtttagcttgcacagctcatcgcacagggtggtaacccttgc

SEQ ID NO: 136682 - DNA, 517 bp, Zea Mays
gtgacttgtgagccgttggcgtcgtggcacagccgcacaggcactgctcgccgctgcagccgcaggtctactcgagggacgtacaagctcaccgctggtctactcgaggtagaggagaggatgagaagcactggttgccaccgccatcgtttttctcgagggcgactcggtcggagactcggagtagacgagagggtagggttctcgaggactagtgctggttcttgtttccttgaggattccctgttgtctgccttttgggagttgggactcccaatttcggcctaatagaaaggaagttgtgtttagcaacctcaatgcaaaagccatgtaaccggactaatagcggatattaaccctcttttttgtttagtgttaaacatggaatatcttattttagacctgtccagcaactgtatccggctataacttcgagggggagctgatcatagccgatcagacatccaaactccagcgtggtaaactcagttttaagagcacgtacagtttaaagact

SEQ ID NO: 136683 - DNA, 661 bp, Zea Mays
tgaccctgtctctttctcggtgtcccacccttcgagaagatcgatatttgacaacatacgcacggcttgattcgctcaggaagaacttagttgtatgtttgtttctcttctttgaacttgtatgttatatcgatagatatggaacttgaattttatgcaactatagttttaccgtcttgcttgattttgtaatgtggttttttggccccccataaattttggtcctgcgtccgccactggctggccaagtctacctgtgctacactccagtaaccataaaaagggatcgactaccagtttttgactaacgtcacactggttaaaaagtccccctcccctcacatttcttcgttaaatcatcattaccgcgggatcgaattgaagaccgcgccagctctcaatttcgtccacgtcgaggtcaacggacacccgtcgtccgcgtcaacgcacatccaccaccaccacgtacagacaccatggttctcaattttgagtcctctgtacatggtatgtgcattgagttctgtcaatattaaagtgtttaggctctggcttcattagatcctcggtccctaattagagctaacattccagacccaaccctgcaagagaggttcgtcccctgccgtgtcggtatttgcatttcccacgacatacatat

SEQ ID NO: 136684 - DNA, 306 bp, Zea Mays
tttcacctctctgcgcacatcctcaatagatattgctgttgtcatctgcaagagaaaaacaaaggaatgaggtgaattttgcaaactaaatataaaatctagatcaagatatatttttcccctggtgcagtgagctaggtgctaggaaagtagcgctaactgatgggttgtctaagagaaaccttaatcttaattgaaaggataccttgagcatctgttagcttctagcctcaaaaagtatataccatgtatgtgtgtatgttgtaacaaggaataaaattgcacgcaattcaaataaagaactat

SEQ ID NO: 136685 - DNA, 358 bp, Zea Mays
gaaaaagacaaaggaagtgtgtcagcttcatcccttggtgtgagccagataatggaggtaatgaccaagctaatgtctattattcagctaagtctcttaggaccggatctaatcaattttgcatatgcaatgaaggcgagaagagttgaagcctactcaagtgcaattaattcgtgagaatgctaggtacgaagagatgtctcccgaagaggtgattagaaagtttatgagctttgagcttatggtcaaagactccaaacacatagggaacttggagcaaggaaccacctctacacccgacccacaacatgttgccttcaaggtgacggaagaaaaggaggaaacctgaccaagaaag

SEQ ID NO: 136686 - DNA, 462 bp, Zea Mays
gtgacatgctcacgcttacttaactcagggtgaccactataccctattaacggagcaatcggcttaagtcggcaatgacttaaggcggtgtgacacgctcatgcttacttaactcagggtgaccactataccctactaacggagcaatcgacttaagtcggcaatgacttaaggcggtgtgacatgctcacgcttacttaactcagggtgaccactataccctactaacagagcaatcggcttaagtcggcaatgacttaaggcggtgcggcatgctcacgtctactcgatccggcataagcatgtttacgattactcatcttagggcgatttttatgcctcacaaaataaaaagaagtttcaaaaccatcacactgcacttacttctgcaatcgtaacaactgttgaactcaaacaacagaaaaataaaaatagcattcagtaccaagggcactttccaac

SEQ ID NO: 136687 - DNA, 679 bp, Zea Mays
cgagtgtttttcttgggaggcgtcgtgggtgttgtcttcatcgcaggaacagtgggcgccaaatgttgggcactaacacacgtgggcgtgctgttaggtggacccaagcacttggaaagcaggtgagatctcaggtacgcgacaagacaaaatttggggaactgtagcatctcgttatgcgtgtcacaccccgctatatgacaggggtatttataggcttgtccaggggtaggtggtccaaagtacaatcctatccccgactaccacctatatcctagggacatcccatgtaactgagtaattaaagtgctactcgtacaacagacggtgcgcaccagataatgcactcgcactctacgttgaatggtgggcccttgtagatgtcttctggtggactggtggcgtatagggtcgacatgtagccttcgtccctagccttcgcatcatcgcttccttcgctgcacctggcggaatgaagtcgtttagtcaacgtaatggcgaaggcctcagtcattgtcaacctattgtggtcgtccgctagatcagagaccattcacttgtggatccctcgtcaacgtatgctgcttgagtcgagaaccccttcgccggtgggcctctcatcaactgttgatccctgagtcgaggaccccctttgcctatgggcctatgtatggctagc

SEQ ID NO: 136688 - DNA, 602 bp, Zea Mays
gtcgtgagctcccagctcgcacgcccacttggctatccttccaatagcttctttgttgtggagaatgtcccctattggaaatcttggaactactaagactttgtggtcgtcaaagtagtgtcagagtttgcgcacagttagaagtactgcatacagcaacttctgaacttgaggataccttatctttgagggcccaaggacttcgctgatgaagtagactggatgttgcaccgggtgcgcatgtccttcctccacccgctcgactactaacgcagtgcttaccgcgtgattcgtgcaggagatatatagcagcagatcttccgctggctgatttggtgcagctcggcgtggtggcttgagtattagtggtgtagtcaggaactttttcagtgcctctaaagcttcctgtgcctctgtggtccactgaaacttgtccacctttttgagcaacttgtagaatggcatgcctttctcgcctagccttgatatgaatctgcttagggctgccatgcatctagtaagcctctgtacctttttctgtgatcgtggcgcttccattctcatgatggcctcgattttttctgggttagcttcaattcctc

SEQ ID NO: 136689 - DNA, 917 bp, Zea Mays
ccgtgcctgactgtgccaaggccgtgccgtgccgggccgcctgtttggccatctctagcagcaggaaaaacaccttccggacccaagattttattgaattcagctctaagcgttcccaatcctctctttcttcccacctctgccatctcggtcgaggtggaggatccggtggccacgatatccacactcttcccctctcccccttccactccttccctgtacgctgcatcgcgagggcggcctgctcaatgccgcaagctgtcccgtttgcatcgcgagggcgatctgctcaatgtcgggagttgtcctcgtcgctagccatctttgccgaggtgggctagctcgccatctcccgcccgcgtgctctcgcgtcctcccgctcccgtgaccttttgctccgcgccatcctgatgtcggtcccacgcccgcgatcttgcgaactcgcctccgtgtacagcctccgctgtcggtcccgcgcccgcgatcttgcgaactcgcctccctgtacagcctacgccgctgcatacttccatcgccgacattcagccatgctcagaccgccgcgaccccgtccaacggagagtagagaaaatgggatgtggactggacctgcagagaagcgccatgtttcctagtttctcccaggaagggtgaacaagagttgggtcatctggagagagaatttgacgaatccactgtcggatcgatgcacaatcggttggttcctctcacaattgacgatcagattctagaggatgtgtcaaatggtactgaattccatggtaaggatgccttcactgcttacatgttcatttgattgtagctgtaacttcatcttacaacacaacacccccgacatgtattctggttctattgggaatgctaaaacgaatatcccagcatgtgagagtgtcgcg

SEQ ID NO: 136690 - DNA, 462 bp, Zea Mays
ctgggggagaaatagaaactcgcgctcgtcgccttcctccaggcaaatgccgacgtgttcgcatgggagccgtcgcaaatgcctgggatccctagggaggtgatcgagcaccatctgaagatcaaccctgacgccaggccggtgagtaagaagcctcgcggacagtccgtcgagcggtaggacttcatctgaaaggaggtccggaagctgctagacgccggcttcatcgaagaggttcatcacccagtgtggctggccaacccagtcatcgtccccaaggcaaatgggaagctttggatgtgcatcaactacaccagccttaataaggcttgtcccaaggacccgtatccacttccgcgaatagatcaaatcgtggattctacctccgggtgcgaccttttgtctttcttatatgcttattctggtttccatcaaatccagatgtctagggaagataggaag

SEQ ID NO: 136691 - DNA, 462 bp, Zea Mays
taataatgcttaattcagtgtcttagtcttagccagtcttagttagagttagtttgcttatcatatgttttgatgcttgtcatgatgaacttgtaatggagttgaatctttgtaacgattatcatcaaggtgtgggcatctcctgcaacttggtgtagttattaagaaagccagttgtttagttgggcaacctatttatttccactttcctctttatctgagaagctgtttcaagagtcagtgaaaatgatcaattgttcagtgctataaagattttcatatatcttttcttatgctgaaagactgcagagtcagatctgatatgtgtgtgctttctacagatgtctgagaacaagtgcagaggtggaaggtgtgctcagcaggagcagcaggcaccctaggaggaggcagctcagcagcagttgccaccggcacccccgatgactattgagcagatgttcc

SEQ ID NO: 136692 - DNA, 510 bp, Zea Mays
cttcctcggcagcaggagcagaagggtcggcatcctgattcaagcatgacactcgccgaagccatctctttttctttttcttccccttagcaggagaagctagatgactggccggtcgaggacgcttcggacgagtgctatcagatctttgaatgtccaaggtctttctaggctctgggataggtgctacagctagtgtttcagcagggaccgaatcagaggaatcctcagccaacatgtccagcatagcacttatttctgcgtcactcgggtttataggcatctcaaaatgaacctgcctctcgtcattggggatttcaccaagcgaaacaatcaaagcttaaacctcttcaagagagggtcgcactctaaggcccaaaccactatcaccagcaggaggatttgacacaaaactgatgaaagtcttggaaggaggcagattccagactgaatacgcaacaggagcaccgacatttgacacattgcctctaagaatcatctcaagccggc

SEQ ID NO: 136693 - DNA, 317 bp, Zea Mays
ccagccgcgatacccctccccttgctcaccgcccgtggataaagctgctcaccgtcgtcaagccttcgtcgttgcccacctcgtggctccgcctttacaccacgtcgccgtgactctctgggaccgtcccatcgtcgccggtgaggttgccacgacattagccacgaattcacgtgcgctagtgccttcttctacctccgaccgtcgcgcgtccttctccaaattcctggccaccgtcgatgccctctataaattgatggcgcgggcagctgcgctacctcatcgtgaaaccagagcccccactcccaccctcaatc

SEQ ID NO: 136694 - DNA, 307 bp, Zea Mays
catcaggcgtcctcatgaaatgcattctctcatctactgggaagcaacttctagatgaggtccatgctagacaatgtggaatacacgcagcatcccggacactagtcgggaaggtcttcaggtcgggattctattggccgacggcgaaaagtgatgcagccgagttagttcagaggtgcgaagcttgccagtacttgtcaaagcaacaacatctactagcacagcaactgcagaccataccggtaacttggccattcacatgctggggactggatatgattagacctttcaagaaagctcaaggagg

SEQ ID NO: 136695 - DNA, 299 bp, Zea Mays
gcgtaaccatggttatcatgaaaatgctttatacagtaccatcaattgccgaactatcatctagatgcaatgcaaccaccatgcatctaccagtttaccactgtcaacacatagtagttgtaaagccaaggatctttggcaaaaattcaatcatgagtatcatacaagcatttttaggtggaggggaatgggtgtaaaaaacaaaagtgttggtacctttacatgtacatgtatcataggctgcacattttccctcattccagttgcttgcatcttctgtttctattctttacatcgtc

SEQ ID NO: 136696 - DNA, 398 bp, Zea Mays
ggggcgtcagtgggggaatctttctttaaaaagggggattcccctgagtgcggtagccattctcatcactcgcagcgccctttcaccctcgagttctccatgctcttctgtcgtcgtagccgccatggccttgctagaccctcccgagcgcctccagcccgaggtggcactcaacttggtgcgcaacctgctcggatggggtgtgccggcgttcgccggaaggatccatgtcggtgcctctcctcatggcgatctcgctgccggagagttcgtgctcttcgtctccaacctccccagtgggttggcgttgccgatcttgtctttctttgtgctactgttggaggagctcggcctccaacctcagcacttcacgccctgcttcatccttcaggtgtcca

SEQ ID NO: 136697 - DNA, 410 bp, Zea Mays
ggaaaggtgaccgatccatttctgtcggaatcggaacagaaagcatggcagttgcatgagcactactgaaccttgcttaaggtttgatgctgccgagactgaaagacaccactcaacaccatgctcaacgtgcgcccgggactcgagtggaaggtccactgattccgttcccgccaatgtttgtttcctctggatcgcttccacacttgtagcaaataatcttcctgagaattgcagttaccactaaccgagttcgagtagattactggttgatgagaaagatcaaatccaccactggcatcagggatcctcctgctggcggcggcaagtttggtttcgctttgccttttcatgcctgatggcagttcgttaatgcactacatgtaagcagatttgttgcctttcaccag

SEQ ID NO: 136698 - DNA, 272 bp, Zea Mays
agggcacacacgccaccaccgcccatatccaggtcacagggaagaagggccccgcagtcgccttcgttggggtccacatgtcctccggcggctccctccggcgatggccaggtgggagaagggggagggagaggtggtagtggctaggattcagatagataagaaggtatccaaatgagccctaataaagatattagggacccaagatattagagctcattcatccattttgagagatgagacttacaaagtgataccatattgtcaatggg

SEQ ID NO: 136699 - DNA, 412 bp, Zea Mays
gtgcggacgaggttcagaactgggagcaacgatggaggcgagggcggggggccgagagctcctgctagggttgggagcggcgatgtgcggcaaagttctagaaccgggagcgacgatgcgtgaccgaggaccataaactgaattggataaaatacttcgggtccgggaccgcgtgtggacgtgtctgcagtctgcacgcccggcctccgtcgtatgcgccgtacgtgggaagcgtgaagagcgctcgaaaccgcgtggggttttaatagaagagatatctctggcctaccctgcttgtgggtgtggactattggagggatgggatggaacattgggagcgggaccgagagaatccaccgcgccacgcggcactgttcttcttcccctctctcattaaacaaattaaaaggcc

SEQ ID NO: 136700 - DNA, 805 bp, Zea Mays
ttacaaaatccatgcctatttcttcccatttccattcaggcatggggaggggttgtaataggcctgcaggtttttggtgctcgaccttcgtccgttggcaggtgtcacaccgggccacatactgagctatctctttcttcatccctccaccagtatctggttttgaggtcaaggtacatcttggtagttcctgggttgatggagtaggctgagttgtgagcttcctcgagcaggacctctcgtgcttccccttttggtacacacagacgatttttgaaccaaagggctccttgttcatctgccctgaggtccgggagttgttccttgcgggctttttccacaagttttgctgtctctgggtctaggcgttgagctttgtatatgaggtcttctagcattggtttgacttcgagactgccgctgtttcccagacatgtattcagttgagctgattctttcttccaatcttttaaaaagttggttccctttattccgaatggttttcgactgagggcgtctgctaccacgttggccttcccggggtgataatgaatctccaggtcataatccttgatcagctccaaccatcttcgctgacggaggttgagatctgattgagtgaagatatacctcatactcttgtggtcggtgaaaatgtgacacttgttcccgattaggtaatgcctccatatctttaaagcgtgtactatgcctgccaattccaaatcatgggtggggtaattctgctcatgcggcttgagtaggcgtgatgcataagcaatgactttttcattttgcatcagca

SEQ ID NO: 136701 - DNA, 886 bp, Zea Mays
ggaggagtcctcggatgaaggcttggattattttgttgcgttggatgtggctgcggcggagacttcaccgtgtgtggagggtgtcgggatcttcctagtgcgagtactgggtgtaggcggcgaagggtggtgggaaaacatagtgttggtgaattttcgcgaagtggcaggcgccgtcgtatggggatggagcatggccgtctccgagtagaccgggttggtaaatgagaattgttgtcctcaccgattggggcgagcataggcgagggggatcttcggaagctttttgtgggtgaggaattgaggataatgttgtttaattacagggagatgggtatcataccgaaggttgagccgatgtaatatgtgatgccctcgccgtgtgtatgtaattgtaatttgtatggtaatgtggcatgtttgccgtattcgtacgcctgtgttggtccggctgcgtccgtgggcgaatttgcgcggagtgtctttttaatgggagacttcgattaacgcgcttggtgtgctattccggctgtacccttaggcgacttttgcgcggagtgtcttttaattaaaagacttcgattaacgcacttgttgtgctattccggctgcacccttaggtgacttttgcgcgaagtgtcttttaaataaaagacttcgattaacgcacttgttgtgttattccgactgcacccttaggtgacttttgcgcggagtgtctttcaaataaaagacttcgattaacgtacttgttgtgctattccggctgcacccttaggcgtcttttacgcggagtgtcttataaataaaaagacttcgattaacgcacttgttgtgctattccggctgcacccttaggcgacttttgcgtggagtgtcgcacgcg

SEQ ID NO: 136702 - DNA, 532 bp, Zea Mays
gtggttctagagccgcaactttgttggccgaggactacgtgagggcacatttgacaatgtcaagtactccatcttttgggtgcttttgctcgccttgaagtttgccttcagctattttctccaaatcagtccacttgtaaaacccacaaaagatatatacaagatgaatggaatccagtacacttggcatgagttctttggccaaagcaatcgttttgcggtgtttgtgctctggttactagtggtgttgatctacctcatggatatccaaatttggtatgctatattttcttctctgtcgggtgcatttgtggggctttttgcacatttgggagagatcagggacatgaaacagccgcgacttaggttctagttctttgcaagtgccatgtcattcaacatcatgccaaaggagcagcaggtgaatgagagcttcttgccgagccgttttcgcaatttctggcagcgattacagctaaggtatggtttcagcagatcctttcggaagattgagtcaaatcaggtggaggca

SEQ ID NO: 136703 - DNA, 433 bp, Zea Mays
ttcgcctgagagtcggatgtcgccttgttgggttgcttggtgggcaggttggtcggcagccccgcctcgctggttgctcggttggcaggttggtcggcagccccgcctcgctaggttgctaggcggacaggttggtcggcttggcgggccgtcacatggaggccttttggaccttcgcgccgagctgcttagcaggcagaccgggcggttagtgggccgtctttggaaggcctttgggtctttttgagtactgtgggggatggatatccccgggtccacgtctgagccacctagcaggagccctcctgaggcgtcttgtggtggaccggataaaggaaaccaacagaggtaaacatgttctaatacgaaagaggcacacgtccgagttagatgttacaagagcacgggtatgtcaagcggggttggttgcgcc

SEQ ID NO: 136704 - DNA, 309 bp, Zea Mays
cgaaccagtatgcaagacctgcttcggctagttctgcggtgcttcggcttcagcgatttccttctgcttctggatcgtgacttggcacgtccttgtggtgtgtcccttatcttcgctacataatatgcagaatagtttcctgggctgattacaaaaccttcccccgaagcttctccccctctgcctctcgggactggtggcctgtaggaagtttgttgcattcccaaagactgcgagctgtgctggctgctctgagtatggtttgtcctgtcatcatttgtattgggattgtggattgttctgacgtgc

SEQ ID NO: 136705 - DNA, 639 bp, Zea Mays
tgttgcatgagttcttggacgactttgtggtcgtgttcctggatgacattctgatttattctaagaccgaggctgagcatgagcagcatctccgtctcgttctgggtgccctaagggagaatcagttctatggcaagttgaagaagtgtgcattttggctgtccaaagtggctttcctggggcatgtgattaatcagcagggcattgcggttgatcccaagaatgttgcggctgtggtggagtggaagagatcctctagtgtctttgaaattcgaagtttcttggggctcgctggatattatcggcgtttcgtaccaaatttttccagcattgctaagcccttgactagaatcttggagaagggtgttctcttcatctggtccagcgattgcgaggtcagttatcagacattaaagagcaagttggtggacgcccctatcctagctttgcctgagagtggtaagcgtttcacagtttatacggatgcttcgcgtattggtcttggctgtgtgttgatgcaggaaggcagagtgattggttatggctcaaggtagttgaagaagcatgaggggaattacccaactcatgatcttgaattggtcgcggtggtttttgctctaaagttgtggaggcattatc

SEQ ID NO: 136706 - DNA, 554 bp, Zea Mays
ccagaatgcggaggagaagaccctacgtgaacatccatggaagtatgagagggagaaccaactcggacaccctcgggggctgggtcatagctcgcgctaaccatccgagctggatcatccccgacaacaccctcgagggctgggtaagcgctagcgccatccttgagggccgagctctctgtaacagccacctctaaggctgaaggaccttcaaccacttccatgggagcagagcaatccagaccagcctcctgacccttaagaccgcactccaaggtcgatgaggcatgagacgccgctcgggataactccaacccggcatcaggcacatcagcacaaatatccatcatcccaccatctgccggctccgacaacagatcctctgggaccatatcttcgagaatctgatcaaaatttgccagagacaactcttgcagaccaacgagggtaggcaaagctggagaaggaacaccactactttccccgctggctatgtagcgccgactgttcttccgaattagagggatttcatcctcctcttcctcatcttcatc

SEQ ID NO: 136707 - DNA, 548 bp, Zea Mays
tgtaaactgcatgaaaaatgtattttcgaaaagacacgctttgaggtttacattttttatttcaaaaatacctaagatgaactatgtactttccatttctgaacccaagcctaagaatatttgaaccagttagtggtacatatcctgacctacaaactggggaacctaggtattcgttttcctttcaggaggaactcggaagctttattatctttaagcctacagcaactaaggaactcactcccaatctgacaatatcggcatacaacaaaaaccgtccatcatattttagtgtcaatcatattttgacaagtgagcaggaagcagatcaaaaactttctggtagcccttccatttaggtcctatagatagtttttgttgaatcagacagagatagttttgttgggcatgtactcgtataccagcaggttgcagtccacgctggagtagcagcagtagatctagagcttcacgatgttcttgtgccggatgctgaccagcgtatccacctccatgtggacctcacgatcgtcgagccaccgccaccg

SEQ ID NO: 136708 - DNA, 594 bp, Zea Mays
cagagagctccgcgaccgcccaccgacatccgccgcccgttctactgtcactgtggaactccccgtcgcgtctgttgccccggtaagctccgccctatcacccgccacctagaacacccctcggttcgcccctaatccctctagtctgcccggtccgtgctcaccagagttcttcctatgcagccagagctccgccaccgtcgccccgaggcgtccctgcgtctccgccgttgccccattatcgtttcctctcaaggtgagcaatctccccgcgcccctatttccctgtgtattgccctggtcatcgcgcgattgcttgccggagttgatctgcgccgccgttagcccgcctcgtcgtggtctgcgccttctggtgttcccgtgtcggctttgtgcccatggtcatgtccgtcggaccacccttagcgcgcccgagctatttcccaagcctctggagccccgccgtggccagtcccctagtctccagcgagttctcaccgtgggaccgagcaacgccaccgcgctggtgtccgaccccagccgttagatctcgggcgtccgtccgagatcgggcggtttaaaccttagccgaac

SEQ ID NO: 136709 - DNA, 341 bp, Zea Mays
ggattctcggccgtagatgggagatcgtgcgtccaccagtgcacctccgattcgcatagcacggttatattcctgatcgttagattctaatctaatgatatgacatcctagataccccttcggacggaccatttcgcatttacgtccctgtaaaacttggaaaccaacccgcaatcctgtcagtgggattctgtgatacccggtttgcaaagaggagaagtggaggttattctttttgttctttttcctcattcgggtgatgcgctttgggaatttgtggaaaatattcacctataagacagtagaatttctttggttagttgtttgcaacggggtcggga

SEQ ID NO: 136710 - DNA, 302 bp, Zea Mays
tttaagcttatgtccgaaggtttctctacttaagggctcaagcaccaactatgcaggacgacatcattatggaagcaatgattaaaggacttcgtctagggccaacaactcaatattttgccaaaaaaccactcactccctgaagaagctactgcagaagatggatgagtatataaggccaaacaatgattttcaccaaagaagggaagaagcacaaagatatacagaaaccgctaggagctttggaggaaggttccatcaaaagcacatttgaagcatacacaacctggctcagaatgaat

SEQ ID NO: 136711 - DNA, 407 bp, Zea Mays
cgtggactcacccgaggtaaaacactggttttaccccttgccttatggctccttcccagggaagccacatgtggctgactcttgccctaacctataaaagggagaggctgacctcgaggcaagggagatgggtggagagatcgatagaccgatcaacagacggagacgagcccataaggacgaactagggcaggagtgccgacgaggaccaggaggccagagccccgccaagccaagacttagctatgactccacctctcagcttctaagctccacttccaccccgatctagagcatctcctccctctctcaactatttgtaacccctactgcgagtttgatcgtgccggtagcgcaagccaccaatgactgaatgtagaaacgttctgcccgaaacaatataaatc

SEQ ID NO: 136712 - DNA, 630 bp, Zea Mays
agcaatcttcgtataaagctccttcggttggttggcttaggttgatagaggagaagtgtaacgagatctgcggaaattatcttgttagggagcacgaagatatgcattctatcttcggaggccgagggaaacttcgtcttaacagagttatgaatgccacagggtttgagtacccggattacgaagatccggcagccaatgccgaagccggggaaaagagaaaaaggggtgttgaaggtgctggcaaaacatcaaagaagaatgccgatgccgaaacagaggatgataatgaatccgaacatgacgaagagacaccttcgggcctggcaaagaagaaagtcaaaatttctgtgaagaaaggtacaactgcgaagaaaactccagctacgaaaaaagctgcagctgcccaagagcaaggaaaggatagcaccacgactacctcgtcattcggttgcacccggattctcgaggtaatgactcgaccattaccattctccactctaagtccgttgggaccgacattaactcggtttatgccaactacgaagggtactgacgaaggtggccaatcatcgaaaagcaaggatattttgtctaaagaggaagtagagagcccgcgcattctgggtc

SEQ ID NO: 136713 - DNA, 330 bp, Zea Mays
tccggtattggctcaaccggacattaataagccctttgatgtgtattgtgacgcatcaggcagtggtctcggctgcgtattaatgcaagaaggtcgagtcatcgcatatgcttcaggcagttgcgccagcatgaggagcattatccaactcatgacctggagttagctgcagtggttcatgctctaaagatttggcgtcattatctgctggggaatgtctatcatatttatacgaaccacaaaagtttgaaatatatctttacccagtcagagctcaatatgagacaaaggagatggctcgagctgatcaaggattatgaattagagatc

SEQ ID NO: 136714 - DNA, 611 bp, Zea Mays
ggttggtgtagcgaggagggggccagggaggtcagagaagccaatggcgaaggcagcgccactgagactgccagtggcccaatggaggccagcggggaggcacatggtccagccaggggcggcagggcatctcgaagggagaccgggtgcagaggtgttgtgggtggcactggtgtcacatgcaggaacaaagtgggtgaatctgcagatgacaaaacaaagggtgtttttccagatggagccatagggtcagggtcaagaatgaagtccaactcgagaagggagtcgatggtggagctggaaaggttcaagaaggggaagtccatctaagcgaagacgacgtgacgactgatcaggagacgatgagtggtaaggtcaagacaacgctactctttgtgatcaggggagtaactaaggtggatgtagaggcaatgaagactgttggtgtggcggcaagacgaccgaacagaaagacaaacgcagggtgtagagtggtccctgccctattgcatctggtgatcacgttctgcgtagatacatccttcacagaaacaccccacgggtcaaactccatagagcaccagttgtcagtagtaaaacgacgaacaaac

SEQ ID NO: 136715 - DNA, 543 bp, Zea Mays
cgattaaatctaagtctagctcctcaaataataccatttgcaaacattgtgtcaaataccatgcttcttgttgtttgactaaccatgcaaggaagaaaagcccacaggttgaagtcaaagaaattttgaagaaatgctctagcaatgatgggttaaaaaaagttgaacccaagtacaaatccttaaagcccaacaatgggagaaaggggcttgggtacaactcacataaggtaaaccctagcatagagcataagggatggagatcccccaagttcatagagggaaccaccctatatgatgccttggggtggattcattcctcaaatgataagtcaactcaagcaaaggtaaacttgagttatacagaagacaagatgaaggatgtggtctccacaagtggagaaaagtttagagctcccatttcgcattcttacctttgtgattatatgttgacttgggattcagggaaactagttcttaaatatgtgggtgcctacactaaaagaaaagtcatgaaaagaagtgtgtgggtacccaaggcta

SEQ ID NO: 136716 - DNA, 371 bp, Zea Mays
ctggacttgcactggaggctgaggtggtggtggctgctgctgagcttgctgcatcgctgctaatatctaaccaattgcctgaactgcctgggtctgcatcaagaacatctgctctatggtcatcgggggtggcggtggcaactgctgctgtggagctgcctcctcttggggtgcctgctgttcaggctgagcatgcctcacacctatgcgcctgttctcaaacatctgtagaaaccacacacatatatcaaatctgactctgcagtctttcagcataagaaaagatgtatagaaaatcttcatagaattgaataattgaccatcttcactgacagcttctcagataaagaggaaagtggaaataaatggat

SEQ ID NO: 136717 - DNA, 496 bp, Zea Mays
gggatcttcagctctcctgggttgaactgggttggatgaagtgggctcttggatccgaagggctctacgttggttatgggtgaccaagtaggcatccatcaacttctggacgtgctcatccttggcttgcttcagggcttcaacatcaatggcttcacgactttccaaggaagctacatgggcttgagttgaggtgagatccacatggagctgacggttgagcttctctgcatcttctgctcgggcaatcatctgacggtggtgccgagccaagaaatcatactgggcatctagggtgagcaggtatgcagtgaggtacacgactgtggggtcgtcctcaagcagctgctgcccttccaatgcacgcatcctggccatccaaacgggacggtttctctgaaagggcggaaagaatctgagcggtgtgtcggccacttcttcttcataaatctgacacagggtcctcaatgccttgcaggcgacgacttggcaggtg

SEQ ID NO: 136718 - DNA, 592 bp, Zea Mays
gttggtagcaaggggttattggtgttggactgttggtagcaagggggtattggtgttggattgttggtaggtgtggactatggcctttgttagttgttctggtgccattcttgccattgttttttggcctcctttgtgatcggacaatccttggtagagtgtccgacatcttcaccgtggaatacacaatacaacttacagtcctgtgtggatcccctactacagtcacggtctctaccaccttcactcctctactaggctatggaggttttgctgtgtgcaagggggattcgttgggttgttgtaggttgcttatgttgtggacctgctgctgctaacgatcctgttagcccttatgctagggtctactactggcctgcgaatgctcctttgccttccgctgtgactctagcttttggtagtgcaactcctctgatttgcatacttcttgaagaatcggtagagttcttagagtgtgcttggggtctttggtgcagtgactgaacatgtggctagtgcgaaggtcgctgatggcatagtgaatggagatgtggtcttcaactgaagacacttgggatttcatcaacaaaaa

SEQ ID NO: 136719 - DNA, 425 bp, Zea Mays
ggcgaacgcatgcaaggagatgatgcatggggaatggaaggaaagaaacaagtgcgcctgtggagccgcgaacagctcgcgaaagcgacagcgtttctctgctagctgcctccattcctaactaatcaccactggcctgggttagacaagaatctcatagggggaggggagaggcgggatcagaaataataaaagcaggatggaggatagttgtaggagagctatagctagatgatcatggtccatcatggcatggcccgcatggcagggtgcaatgcaatcatgccgagaataaaaccgctcgcgcgctttctgtttcgaccgtccatctccccccacccaccgcctttctgtttcgaccgtgaccatcagattcggctgtctctcctcctagtggtacttggtaggtttccattcgttcaccg

SEQ ID NO: 136720 - DNA, 934 bp, Zea Mays
tgatgatatatatactcttggtgacctttcaggtgacctgtcggaggagatcatggaatatcttactgattctaacaggttgttaagcaattttaagaaagtgaaatctaaaaaaggcaaaaaacattgtgttaactcgaaagtaaagacaaaaatctctaataaatgaaaggaatcttctggaatagcagaggtcttcgggacttggctaaaccgaggtttttatttgatgcatctaatgaccataatttagactttattgctcttcttgaaactcacagaaagggctactcttaagctgagttaagtaccttttgtgggagcagagagttttcttggcaatggtgcccttctagaggtcgatctggaggtattctactaggtgtcaacttagaaacatttgacatggttaaatcatgtaagggcgagtttttttttctaaaaatacatttaaaaaataggagtgatggctttcaatgggttttaatggttgtatatggtgcagcgcaacctgaacataaagtccgttttcttacagagttagtcaatgtcatcagtacagagacaatgccgattttggtaggaggagattttaatattataagaaacccggcggaaaaaagtagtgaccgttttgataacaggtggccgaacttgtttaatgcctgcatagaatctcttaatcttcgggaactggagctctctggccgtaaatttacctgggctagctctgggccgaacccgacatatgagaagcttgacaggattttggtgagcactgagtgggaacgaaaattccctttatcggtggttgaggccctatcgagagatatttcagatcacacacctttattgtttcaaagtgaaaatgcctcctatagagaaaataaccaaatgttcagatttgagttctcctggttgtacatggaaggtt

SEQ ID NO: 136721 - DNA, 561 bp, Zea Mays
gtggtgacggtggcgctgagaagcagccgtagacgaaggcgcgatgcgtcgagacagatgagggtgtcgatgccgggggcgacacgtcaagcagccatggatgatgtgtgtttcaggtttgccatgcctaaaaatgtatcatggatgaatgcacgtgcgggtggtgctagtaccagacgtactagatgacccaaccatatgtgccagcatatcaagggaccagcagagaaggcctccgcgacggttgtggtgcatcacgacgggagtgccggcgcaacgcacggttgtcagagcggagtagacgaagtagtcgaggacgagacgatgatgctggtgacgaggttgtgctggacgaagcgaagaggtaggcgtggcgacacatcgaggttcatagagtcgcggcggcgagaaccacgacacataggaaacgagcctcaatggcgcaagtggagcgcgatggcggtgtttgtcggcgaagaactcgatgacaaatgcagtgcagactggcgacagtggctatcatgcctaggacaggtgcaacaccagtgcaaagtgttgacg

SEQ ID NO: 136722 - DNA, 484 bp, Zea Mays
cttatgcaaatgtaaccactagatgctctatgaggcactaagttttacacagatcatagtcattgacccctcttaatagtacggctatctagcctactaatccggtcaaatatcttctctaaactcctggagaccagcaaaaacaaaacctatgttatacctttgccttcacttgatccacaaccaatgcttataaatctccaagattttctgttctatgtggtccaaccctgcattcttatttctccaagaaccgttagtccacaaacagttatcattaattaccaaaacatcactaagggcctagatgattcacaatctccccctttttggtaattgatgacaacactacacattatatccaagagaagttttgtttttcaaatctcccttataccttaggtataagaaggattttagagatgagtttcaaaagacttatcttgatttgaagttctgtccgagagatagataaatctcaata

SEQ ID NO: 136723 - DNA, 577 bp, Zea Mays
tccatgagttccccacttctgtgccatccatttgagtaagccggtatgatcctggccgagtgacctctgatacaatgaatggcccttcccatagtggtgacaacttgtgtcgtccttcccccgttagaatttggcgaaggaccaagtctcccactgcaaaggaccgatgtcgcacggctttatcatgataacacctcaaggtctgctggtatctagctgactgaatttctgtgttctatcgttcttcctccagcacatcaatatcctctagcctggtagcttctgcttcagctatgttttcgaaagccaacctcggcaccccgaacattaggtcggcgggcagcactgcctctgacccataaaccatgaagaacgaagtgtttccatgcagagctcgactgggttgagttctcagactccaaaccacgtatggcagttctctgatccactttcttgtaagcttctcattcttgtcaaatacttttttcctgagtgcttccagtatcatccagttggctctttctacttggtcgttggctcttggatgcgttactgatgcttacttaatctagatgct

SEQ ID NO: 136724 - DNA, 422 bp, Zea Mays
ggtgcaccccatatgagggctcggaaggtggaagggcacgacgaatgcgaggagtgtgaaggcatggctactgcccgggggagagtctccacactcgcaccccaagcgtcacgggcagagtctccaccgacgtgtcccagggttctcaccctccgacgcgggggctgggtcccgcacgtcatgcgggctgacccaaaacggaagaagccaaatcaccgcacacgaagcatgtaatcgccccgcggttataagcattcccccatccacgacgaaacgagcggtcgaaagggcggaccgccgcgcaggaagcatgtaaccgcaccacggttgtgcaccctttcggccccgtcgcatccgacggaccagcatggaggcctgggcccacatgtcatgtaaccggcgcaacggttactgcgtgcaag

SEQ ID NO: 136725 - DNA, 440 bp, Zea Mays
cccatgaggattaattcggtcggtggtaaagtgcaagcagataagatatgctcaaatataagggtggaaataaggggggatagggttccccagcgacctaatagtaatagacacccctggggtagatgtcatcctagggatgaattggttaatgaaatatgaagcgaatgttagctgtgacaagaggaccgtaacattgaagtccccgtccggagaggaggtagtggctgagctaaggatgcctaaaacaacgaaaggtgattgtcaccagatttcggttgatagcaaggaggccaacccgctcgaggctatcagggttgtgtcagactttccagatgtgtttcccgaggaactaacgggaatgccacctgagagaaaagtcgaatttgccatagagcttatccctggtaccgcccccatttccaaaagagcctatcgag

SEQ ID NO: 136726 - DNA, 612 bp, Zea Mays
cccagatgactgatgcaagatgacacaagtcgttttatcctggttcgagcgagagaaaaccctacttccaacagagggggatgagacttatattacttgcacctaagtgcttgcagtagggagtacaagctgatcgggagagggaaggatcccaagtccctgaggttgattgaggcaagtgccaatgttgtggttgaggtgaaaaccgtgaagtgttcgcctgcccccttgaagccgtggactgtccatatttatagcctcaaggagggctgctaggagtcccggagatgccgcatacggtgaggagtgaagccgagcccctgtagatggtatggcctggagcatgggtcttgtacttgctgttgacttatgcccgatggagatgcccgatttctgctgagagccgaggccatggccgagggctcggtcacatacctgagccccctagacaggaggttgcccatgccgtagttggtgatgcagtggtgagtatggcaaaagcccttgagtaatatgtcagctttgcagtttatggtgacgtcgggtgccttttcattgcgaatatcaaggctgaagctggactcaggcgagacagaagtttgcccaaggccg

SEQ ID NO: 136727 - DNA, 827 bp, Zea Mays
gaaatattctgggtatgacgtcaatggataccattttcgcacaacaaactacgaccaaagtcggcccaatcgaaaaacaacgtgttctagagtctttacgctcggccttgacgatgtcgattattttggacgaatcaaagaaatatatgaactcaatttttatggttccaaacctcttactccagtgatattcaaatgtcattggtttgaccctcaagtgacgagacggacacattctgatcttgggatagtcgaaattcgacaagattccaccttaccaggagacgatgtctatatcgtggcccaacaggccacacaagtgtattatctcccatatgcgtgccaaacaaaagaacatcttaagggttgggatgttgtgtataaggtatcgccgcacaagagattacctgttcctaacgatgaagattataacttagacccggacacatatgatggagagttcttccaagaagatgggctagaagggcgatttgagataaacttaaccgaagctataggaatggacatagatattgaaatggttgttgatgaggaggatgatgaggtgcaaaatgagaatgacttagtaatccttgaaggcaatgacattaatgacgaacttgcgccttcagatggtgtcgactatgaaatggttgatagtgatgatgagagttatgatccgggtaaccctgacacatagaagattatttttaatcgatgtaatgctatatgactttttatttcgcacttgtttttaaatacatctttttatatgtgcttatttgtttactcttaattgcaggttgttggacaaagatggtgggcgg

SEQ ID NO: 136728 - DNA, 791 bp, Zea Mays
ctggttgcttttgctttggctatgctttcgaatgttaatctgggtgctccaaagatcagatctgctggtaacactgcctccgacccatataccatgaagaatggggtgtttccgtgtaaagctcggcttggctgggttcgtaggctgcagactacatatggtagttccctgatccattttcctgcgagcttctcgctcttgtcaaacacctttttcctgagtgcatcgagtatcatcccgttggctctttccacctgcccataagctcttgggtgtgccactgatgcatacttgatctggatgctcctctgttcacagaagtcaaagaactctgacctggtgaagttagatcccatgtaatgatgttgttaggtattccaaacctgaacattatttcttgaatgaactccactgcttttgccgaggtcaaagaggcaatgggtttgtattctatccactttgtgaatttatcaacggcgaccagtatgtgtgtgtacacccttgagctttcttgaagggcccaatcatgtccagcccccagcatgcaaacggctaggttgcaggaatagtcagcaactgttacgcgggtaggtgctgctactttgataagaattggcatgcctcgcacttttggactaactctgctgcgtcattcttcgttgttggccagtagaacccggacctgaaagccttccctaccaaagtctgtgacgccgcatgcacaccacattgcctagcatggatcttgtccaacagctgcttcccagtagccgagtgaatgcacatcatga

SEQ ID NO: 136729 - DNA, 324 bp, Zea Mays
cccggacagagtcccggggcaagctagagccaaagtgggaagggacttacatagtcaaggcgaaggcatcctccagcgcttacaggctagcaacgtcatccgacgaagacttagaacattcctggaacatcgataatctccggaaatttttcatttaagttccaaggcctaagcgcctttgtaattcttcgaacaatgctatccaagcccgcactcttttcctcccggggggtgaggtttttaacgaggcgacgtcatgtaatataccaacggaaaagcccccacaaaaagaaaaaaatatacaagcatcattaccatgtcgaa

SEQ ID NO: 136730 - DNA, 569 bp, Zea Mays
cgaagacaaggggggccggcagaggccatggcccctcccaaggctgtgacacatacaagagaatatatatatagttgaatttgtgtgtaaatatatatactataaattttatatagcgtaattaatcaaaggtttaatatagtggttagtaatacatgatccataactctagcgtagtatgtcaaccaaagtctaaaggagacaaaaaaagataaaatattggttaaatgatcaatcaatgcattaaacatcaaacctaatttgcctacagacgctgatatctgaacctcaccctttatatttcatcgtattgtctggctaggcagctgccgattgccactgaccacttgacttgcctctaccataaccccacaaccaaagtccaacacgcgaagcagcagaatgagcggcaacaacgtatatacatactatattagatcttgtggataataaaatttacagatttcaactaaatttgtcacctgataacattatacaatatttttactatacaatattcttatcatatagtattgatgaattggcccaaccccccttatataacaatc

SEQ ID NO: 136731 - DNA, 276 bp, Zea Mays
aagggatcgaccgcggggagataactttgggtcatgtcatgattccgcgaacctagcccgagcttgaccgggatatttcatcggcggtcaccgtggctcggtcattccgccgtcgtgtcactcgtgcctcgctcctccctcactgtgtctcttccttacgtggtaaccatgcactgacaatgcaattcgtggccacgcctataaatagccccaccacccacgacgaggtactcaccacttcaccaatgagctcggttgaagcaaaattcacggaat

SEQ ID NO: 136732 - DNA, 487 bp, Zea Mays
gtgagcatgtcacaccgccttaagccgttgccgacttaagccgattgctccgttagtagggtatagtggtcaccccgagttaagtaagcgtgagcatgtcacaccgtcttaagccgttgccgacttaagcagattgctccgttagtagggtatagtggtcaccccgagttaagtaatcgtgcagtttgacagtgaacaatttgagtgtctttgaagtctttttattgatgatatatttcccagtttacagaatacattgtcgtcccaatagcttttgagatatagctaggggtaaaacttcctgagatgttctatgttccatgagttcccaatttccgtgccgtccatttgagtgagatgatatgatccaggccgagtgacttctgctactatgaatggtccttcccatagtggtgatagtttgtgccgtccctcccccgttagaatttggcggaggacgaggtctcctactgcgaaggatcgatgc

SEQ ID NO: 136733 - DNA, 615 bp, Zea Mays
atatgaaccaaacaatacctaagcaagtattcactaccagactaccaatttattatctagtcctacaactaagatcgtttgtgtaatcgtcgcccccaagtgactgcctctcccctatacaagagggtggttgagtgttgtgtagtaaagtgtttgcacgctgtggagtggaggtagagctagtggggacggtgcgagagacgaccgaatctacgaaggtggctcacggaagaaaggagagagttgtggcgagtgtggatagagtacagcgaagcgaaggcgacaaaggttgggggaagagtgccgctaggactccattaaaataggatagatcaagctgctagcctagccccactagtcagttgtaatcctatctcccctaaatataaaatggagaggatgatcctctgtgcaagaggtttccttttctcgcttttagactcactagtcatcttcacgctcgatacttagccgttttcatgcaatacaaaccactcgtatgatattacactctagcagcctgaacctctctacatcacgtcacacaccacgtcacacactcctgagcaacatccttgtcgagtttgtgtgcacgcgtccgctggttagcctccg

SEQ ID NO: 136734 - DNA, 389 bp, Zea Mays
agacagtagactggtagcttgatataagtgcggcagccgctaggcctcctctcctcagcatttcagcacccagttcggcgttgcacatgtgacccgggcacccggcccccagcccccagctcccgaccatttctgcacatctacagctcgcgagctcagcaccagaacacgccaggccagcccaacctctccaagaacccaagcagcagcccccgaccgaccggccatgccaagggccatcggcggtggtgcggcctacaagggcggaatcaagggctactggaagcgccgcggctacgaccggatcgacgcggccgcggcgcagcgccgcccgcgcctccctacagcggagcttggcggcggcgaggcgcatcctcagccagcgggtg

SEQ ID NO: 136735 - DNA, 574 bp, Zea Mays
catgagaaatactcgactcgcccgaggtccccttcacagaaaagcaatttatgtctcacccgagatcatctcggacggaggacaacctcgagaccagcctcgagcaaagatctcgggaaccatgaagacgtgcgcattaaatgcaacgatacaaatatctgcgccacgtgacaccgcaatcaacagaggacagtcccatctactttcaccaactatgataatgcacgcccgtgaataccggacactgctctaccactgatgtcactgttctcgaacaactccggatgggacaagcacatgtctatgcgcaacctcacccttgggagaaaattacgactcaccataagaacaacttcagcctcgggagaagactccgcctcgcccgagctcggcctcggacaactgccctcccaacagccaccaactccccgcgaattctgcacactccagcagctgttctaaccactctctacacgactgcatgcccctgtgcaggtccaaccatggccttgggaggaacctccgcctcgcccgagcatggtctcgatctagataacatcgacaaaaggacgcc

SEQ ID NO: 136736 - DNA, 388 bp, Zea Mays
ggcaattatcggccagcattttttaacaaagtctgtgttgaagccatccggacctggcgatttatttgatggcagacgtgcaatgatttgatcaatctccaggctagagaaaggttgttcaagctcggatagattaccaattggctgaatcaaagcaggtaagttgaagaccatagtagtttgctgagaggtccccaaacggttcttgaaggcattaaaaagcacagcttctttttcattgtgagagagagccaaatttccattatcatctttaagagaggagataaggttatgtctgtgcttgacagtggcattggcgtgaaagaatttagtaccggcatctccaagggtggcccatttgatttgacctctctgcttccaataaatc

SEQ ID NO: 136737 - DNA, 461 bp, Zea Mays
atcttctcaggcgtgtcttctttctccagaaccagacagacgtctgaaggtccttgttcaatactctgctcagttctagcaggctctgtttcagcgggcactgagggcccagcttcgatttcaatgcgaactgtagtagcttcagcagtctcctttgcaggagtaggagttgacacccttgtggactctaaaatagcatccagcacactagccatcctcctcctcttgggagttattgcaggagctctgggcaccttcggcaacttcggctcaggttgcaggcttaggattttttgcaatcctgccgattctcctagctctggcgcttcggccgcttttactgtggctttttctcctgccgattccattttctcttgcccttttgtttccgacatttcagccgattctttcttggagcaggcacgtgcaggctgtcctggctcagcggtggaaggtgtccc

SEQ ID NO: 136738 - DNA, 556 bp, Zea Mays
cgacttttgcgtggagtgtcgcacgcgagggtagccaacgcttcccctcgcggtgactttgttgtggtcgaatgccgaagaccgttgatgcggtcttttttcgacgttgtagatttgcgcgggggattttttacgtgtatattacatggctccacctcattaaaaacctcaccccccgggaggaaaagagtgcgggcctgaataaaactgtttggggaattacaagggtgagttggccctggggaatcaaacaaaaaatttgtgaaggttgtctatgttctaggaatgttccaggtcttcgccagattgtgttgttaatctatacgcgttgggagacgacttcgtcttgaagataaatggtccttcccacttcggttccagcttaccccgtgactctgtccgggttgtgcggacaagtacgaggtccccttcgttgaattctcttgggacgactgcgtggtcgcgccaggccttcgtttgggcttgatatttatcgagggcctgcagggcgaagacacggtctccgtcaatgaggtctttggaagttggctcgtcg

SEQ ID NO: 136739 - DNA, 287 bp, Zea Mays
gtttgactgcagaggctgtggttgccgacttcattttcaagaacattcagccactgaaagacagagcataccccgcatatttgtatcggggcctggctgattcaacccgggtaactaacagaagaattcctgctgtggacttggtgagccggctcgagatgatactcagaggcaaggtgtcgaacatcggcgctcctgttgcatactcggcctggaatctgccttcttccaaggcctttaccagtttcgtgtcaaatcttcctactggtgatagcggtttgggcctt

SEQ ID NO: 136740 - DNA, 365 bp, Zea Mays
gaacttagctcgactgtcgatgacctgcaagtttactgcaatacattgcacgaggaagtccatgtgctctactcgcaactacaccctagtgagcctgcacactctgctgaggcggaagccggaccctctcacgctgcgggacgcgcgttgggtggggagttagatctttttgagccccctccttctttgaggttggtggacgtctggactcccacacctgacgatgaggccgccaagactaatggcaagcaggactagtagtgtaataaaagtagagtagtgtattgtagggtattgtatcctgttaataggttcaacttttgtaaaataggtaatgtatcctgctgtgtaatattgagtctgta

SEQ ID NO: 136741 - DNA, 485 bp, Zea Mays
aagatttacatcagccattcaggaataaacattcaacaactcaaggtgatgagtcgaggacatgaggtggctactgcggtggatgagtggaggcatgaccgtgaggaattatagacattgggtggcgtggttggcatggacgcgcgatggtgggtttgaccgtattagagtagagttggctaattatagatcgatagtggtggctcaacaatggctaagctgagatattaatggtgggcgaggcgtgtctgagtgggacacacatggaatcggttgggtgggttggctcgcaggagtggtttggcagattttattgtgtgagctggttaaggtgatgaatagtgctcccttgtgtgtatgcaagttcacacaattattttttgaaactttgtttattgcacttgtgtatgaactcaaataagtagtaaatatgtgtaaattcgtgtcttgaccctaaaggaaacaacaattcccttggccttgtt

SEQ ID NO: 136742 - DNA, 549 bp, Zea Mays
aaacaaggggggtctccgctaacacctaatcaccagggaacaattcagataagatcaaaaaacatgattgaagcacaactggtacatgttaaattgggttgataaccgataacccagtatcttgtttgacagaattttcttgcattggtattggttactaccattgactttgacttgcccaaagagtgataaaacccgttagtcatggttgatggcccaaactatattcaccatgaaatggcagaaaagataaaacagggataactagagggtaaactctctggtgtcagaagaatataaaagggtaaggcagtaggttctccgcatagatagaaccaaagatgcaattagataagggttagaaaaaatacccctcagaaaactgtagctagaaagtactaaacaaatccttgtgcaaactaactctgcagtctgcagagaagccagaaaagagaagtcatggtggaagaaaatagcacttatactaagacacctcaaacatcatgcttacaaaatgcacgcaggagcaatatgatccagcgaggaaac

SEQ ID NO: 136743 - DNA, 723 bp, Zea Mays
ggaccgcaggcctcggcttcggagcagtcggatattgaggctattgtgggaagtctgtgttatggttcaagaagcatgcaccgtggtgaccgtgtgggcctcgaggatccctctgcggatacctcggctctagtgtacattggtgaacaaatttgtcatggcgatgtttccgagtaggccaatcttaattgcatcggccgcgaggattattcgggagatctatgctccgatccatgccacgtgcactgtgtgggccttgaggttccaacaggggaggcctcggctccggtgcaaggggggatcatgatgatgtctcttccctttggtgatctgggcagtcggagctcgttccaattggccagggggagcttgtagggatggtgcgctctgattcttgtgatgctcactgtgtgggccttgaggatccctccggggaggcctcggctctggtgcgcattacagtgcaattccggtaggttgctggctccttgagcgttactggcctggttccttcacgtcatcttcatgtatactctcgacggcatcttcaaaaaaaaattccattgtattgacagagatacctgttgcctaggatggtggtatgcaaggctctacactccatccccaacagcgggcacatcagaggggcctgacccatccagttctaaccacaacgtgctggaccccaccatctagtgtaagaagcaaatgaccttcttcaga

SEQ ID NO: 136744 - DNA, 275 bp, Zea Mays
aaaatgattcgtccgacccttcttcccggggttaaaattgcatcaatttgcatatctgtttaaagctagcatttcatacctggctttgaagaaatctctctcgtatagcttagtgctccatgtggttactttttgaaacctactagtatccgcattcgaattgtgacgtatgttccgtgttatttcaaggcggtgctttgttcttggttctcgtatagctttagtgtgtatagttaaatgcatcacgatgcatatggaatataatacacgccacg

SEQ ID NO: 136745 - DNA, 1274 bp, Zea Mays
atagaaacaataaagaaaaagaaaagaaaaaggaaacagtgcctaggcagaaaccatcactgttggcccattatccctgcagcgcagcccagtttgggaatgggggcgccgacacctgggacccacttgtttgtcacaacatcgctcttcttctatcgctgacaacccgggccaccctccagccgtctctcccgttgcgcacacgtgattgtgctgtcattgccaggtaggcccgcacgtcagctgctgcactcctcactcggaatcacggacaaatgaccccacctatcgggcctatcttctccttcctctcactcgcaactgaatgtgtcgtactccgcgcagggagaatcaacctcgtctgcccgtcccaccggactctatcctacaggctatataagtctgtcgttgtgttcctttcctccatgaccatgcaagggagctagcgcacgccaccacgaggagatactctcgtcgcccaattgtgccgagcggagaggagagagagataaagaacgtccctgtgcggatcttcttcgagcgctgcctgctcggattctggtggggtaccagagatgttaattggggcacatcggacttggggctagttctcccaagcttctgggccaagcagagagatagataagctagagagagctcgccgatgggtaagaaaagaagtcgtcgtggtattccgcttcctcaccgccaccttcgcttgggccagtgcccgtgtatgttcgccggagtaccacgaacacatctgtgtcctcctcgggcacgaacggtgaacggtggtgcgccaatttctcgccggaatcctggcgcctccgcgaacgggtcctgcgccatgggtaggcttcgcccatgcctcaaatcccggtaaatcacgctgatgttgttcactagggcgtctgcgtttagttgtttttgtgggtgattcggaatgctagggtgccgtttggccatgccgccgacaatacgccgcggtggcgcctgtgcgccatggtggttcgagtagcttggggggagagagtgaggtgatgggcggctggtgaccgttgatcttgtgactgacggccagtagtcgatcctgaataccgtttgagcagggtgaatggtggtcgtcaatctttgatcgggtgggtctgtgatggcaccaaccattttgaatcctaaccgtgaatccaagatccgatggtttgcgtcacgtaccagttttctggggcgaggttatgatctgggtcgtcgatgcctgattgtgtggcccaaga

SEQ ID NO: 136746 - DNA, 682 bp, Zea Mays
gtcgctgtagatagcccctctgtcgccggggacttagcccagtgaatgccatgttgagcggcctccggtgactcctcccctttcttaccgctagctcttctctgcccaaattcgtcgtactcgcgatcgctctctataaattgagcgttcaacgtgctctgttaggttgttatgcgccagtgcatcgctcctcgcctgtaatcgtccaccgtagctccttaattcgcaatcttccccaaattggttttccgcgccgacgtgtgtcctcgcgctgtggccagccatttccaggtccgctctcgtctgcgttgtccgtgtttcagcacttccgcatgcttgtgatgcttgtcggcctggccgattaagctatactatgctagaacattaggaacgcggtaagaatgtctccaacgccgcgggtatgcgtgaacgagcccttgagtggtgtttgggttgaattagtgtgtcccagtagatcgccaaagtctgaattcggtgtaaaccaagttagggcaccggccgttgcgcattccggccagtacaagttcgccggagggcgctctcaccgtcattcgccatcggggacctagcattgtgaagaaagagaagtgcgggggcttaagtgtgaatgttagagagacagtgaatagtggctagggattctttaccagttattcgaaca

SEQ ID NO: 136747 - DNA, 913 bp, Zea Mays
ggcctaagggtgcagccggaccagcacaacgagagcgctaatcgaagtcttttattcgaaagacactcatcgcagcagttacttaagggcgcagccggaataacgttattcgaagtctatcattacaaagacgctccgcatcaagtcgcccacgtacgtagccggacaaatacaagcgtacgaatacaaccaacaggccacatcaccatacaaattgcaatcacatacgcacggcgagggcatcgtccattacatacacatggcgagggcatcgcctattacatcggctcaaccttcggaatgatacctatctccctgtaattaaacagcattatcctcaattcctcaccctcaaaaagctcctaaagatccccctcgcctatgcccgcctcaatcggcgaggacaacaactctcgcttaccagccccgtctacccgaagtcggccacgctccatccccatgcgacgacgcctgccgctccgcgaaaattcacccacactttattttcccaccacccttcgccgcctacacccagtactcgcaccatgaagatcctcggcaccctccacacgcggtgaagtctcagccgcagccacatccaacacaacaaaataatccaagacctcatctgaggactcctccgtccaaagaaacaaactcgcagactcaccgtcggactcaaaacattcagacataaaactaggcacactaacatcggcaggcactactattgaagtctccgccgcaaaatcagtattgtcggtagtggttgcttgcgcaggcccaaacgtcggaacctgcgcagcaaccgaggttcagtatcacacagacaaaaaatttacacatacaatccctaacccctactccgccacctgcgaaggctcggccaccgccgtggggtcttcggcagctc

SEQ ID NO: 136748 - DNA, 377 bp, Zea Mays
gtggccatggggtagcctgcaattcggtcgctagggggaagcatcatcaaaagaaatgttatcatgatgaaagtcgtcataccatatgtcatcatggcttgggctttcttgacgaaactctctcttttgtggcttatgctcttgttcgttgtcttgtgtgatgtgtcgcatcccttcgactgcttcatcaatctttttctagagctcagccagcaaaaacatcttctcccttcttctctccacttctagatccctaatttcttggtccaattcttcttcctgtggtgttgggctaatagctttcctcttctggcttcgggcctcccttagaaagagcccatcttgtttggtgtccaggggtgcagggggagccccta

SEQ ID NO: 136749 - DNA, 457 bp, Zea Mays
aaacgatcaggtgtaaggctgtcaaatttttatacaagcaagataatcatgttatctataactcttctatatgacttttctacagaaaacatgatttggtttatcaaacaaacagcacaacataaacaatgcgtgcagccccaaaacagcaatcaataaatcgccgcgttcgagagacttgaattactctaatgctttactattgattcgagttaagacaatcaaattagaaccaacaagtcgacttgcaaattttattcaagtcatttagtgcactaaaagtactacaaccaattaacaatgcattcttcacgataatcacccaacaattcgtgttttaaattagacatcacatgagcactactacttttcatccgcgaccataaccatacgcatttagaatacaacaagccaatcatcatgactacgatcttaaccaaatcatcgaataaatctg

SEQ ID NO: 136750 - DNA, 704 bp, Zea Mays
gcgggttcaggaatttagaaaagcagagaagcggtagaggaaaaagtgaagttagggctcagaaataaaaaaggcacgtcggcacgagtataaatgggctccttgggtcgggcattacctctaaagtgccagatcaccactcggaaaagtaaaagcctcagtcgtcactcggacattacctctaaaatgccagcactatcaagcgcatggacaaactttcaagcgcgcaaatgaaaaccaaaacatcagtgattatttggagcaactacatccttgattcataatagagggagtaacacaaactcgaagccgactcattatgagtcaacttctacccttgccactacattacattatattaccttactacttacactacaccacactacattattctactgctacttactactactatctatactaatatttaaaccagtggcactatgccactagccttgccgccgctgtcgttgcccttgctgctgtcgtcaccgttgccactgtcgtcctcgcactcgccgctgccgtcatcgtcgcccttgccgccgtcgctgctgttgtcgccaccgtcacccttgcttccgtcaccactgtcgctgccaccgttgcccgtgccgctattgtcgctgctgccgccatcaccgccacctttgccactgtcgcccttgtcgtcgtcgccgccgctgttgtcatcgtcttcg

SEQ ID NO: 136751 - DNA, 543 bp, Zea Mays
gggaagtatcaactcataatgagttgatttgtaagtctgttacttccttttaatgaagaatgatgttgccttctctgtgccgattgttttgcttcgtaatcggttaatttctgccatgatattcattgcccatgatgttctctatccgttatgtttgtagcataacttagagttcttgaatcattcctccgcccaccttatttgtgaagttgattctcttggaatagtaagtaaataacttaggcatcatatcgacgcttttagaggtagctgccgagcgactgaggacgacgtcgtagttttagagataactgccgagcgactgaacacgacgtcggagttttagaggtaactgccgagcgactgaggacgacgtccgagttttagaggtaacgccgagtgactgaggacgacgtcggagttttagaggtaactgccgagcgactgaggacgacgtcagagttttagaggtaacgccgagtgactgaggacgacgtcggagttttagaggtaactgccgagtgactgaacgcgacgtcggag

SEQ ID NO: 136752 - DNA, 850 bp, Zea Mays
tgtaccatggaatatgttcacaacaatctaatcaatcaagaatcaaatacagcaattggacttacatgtgaatgcagtatttgaggcgtatccatctccctggagctaatattggacataggaggtcgaaccctttgttctccttcttcccctatgctcatctcggcgatcacaggacccagtagagcaggaggtggtgtgaccagtgagttaccatcaactcctccctctgtctctggatcaagacgaacgccatctccttccatcgccggcgaatctccagagccggccatctccaactccaattagttatgcaggcttagcggtcttttttcgaatgaaaggaaatcacagatactatacaagtaaccgcatccacgtttacagggtctccccattatttccgaaaccgtcccgatattatggggatgtcaatgtaaaactaatatccataataaactatttacgcataatgactcaacgttttacgccaaacggtatatactatttatgcaactattatgccgtttcggttttatgccatagctttcaacatcttatgctacatttttttacctgccgccattacttcccatgcaatatccataaattacgcgcccacatatcatagtaatcacgtttgcatgtggaaactattccctataattctgcgcctttcccttatgtttaccgccttgccattcacacaaccgcgtaacggcgccgtctctcctgcatgccgcctctcagcactacgttaaacacaggcgcgcctgtctcagcggaccagacctcggaaccgacctgggcttcctttaatatccgaagcccagggctcccgttatacctg

SEQ ID NO: 136753 - DNA, 609 bp, Zea Mays
gataagggaactgccctacgtcgtttggagcctaagaacccaacctagtcgagctctgcatgggaacacccctttcttcatggtctatgggtcagaggcagtgctacccgctgatctcaagtttggggcaccaaggttgatcttcgaaagcatagcggaagccgaagctacgaggctggaggacattgacgtactcgaagaagaacggctgaacacagtaattcaatcagcacgataccagcaaactctaagacgctatcacgacaaagccgtgcgacaacgagcctttttagtgggagatctcatcctccgctgaattctaacgggggagagacgacacaagttgtcaccctcatgggaaggaccattcatagtagcagaagtcactcgaccgggatcatatcgcctcactcaaatggacggcacaaaaattgggaactcctggaatatagagcacctcaggaagttttacccctagtcgtatttcaaaagctatcgggacgataatgtactctgtaatgcgggaaatatgtcatcaataaagaaaggcttcaagaatactcagtttgttcatgattgactggcattcttatctagctcggggtgacc

SEQ ID NO: 136754 - DNA, 1113 bp, Zea Mays
catggatacactagctgacctacttttgcatacagggtgtgttgaaactgaaattggcaatttatggtgaattatacaggagtgttgcatacaactgaggttatatggtctaccctgctacaacatttaagcatgcatttgactacaagccagcaaatatatacatagagctgcatataacagtaacatgaaggggaacaatttagcacaataaagcctacctaaggagcatgatcctagcagcagctcttcactaatttgtatagaatgaaacaataaaaaacaagttaagaaataatatagtttcctttccaatcagttgtcgtcccaaatctgcagacacgtaaacaacccattgaatcctacagtagcaatgcaaacaaagagatgcctgaatcgtatatcctataataacactcttgctaggtttcacactcatcttctgttaatagaagaaacgtatggtgtagggatctggaagaaagtaaagtcaaaagagaaggacgaagtagatctgatccgaatttggtgacgccgtggagcaggatggtgacagaagggggatcctagctggaggcggaggccgccaaggcgaggttgtccggcagggcgtcatcggtccacacccggtcgtccgtgtccttggtccacacgcagtgcaagcggctaggagcagcaccagaagtagcaaggtggatagataaaacatcaagcagtgcccccgcgcagatttgtgggcagaaggtgtcagcagtagcacgcaggtggggaagggagcggtcgagcgaagggtgggtgtcaccagcagcaacacaaggttggtggtgatgatgtccagtggaaagaggtgaacttaccccagcggaggttggtggtgatgatgtcccgcggaaggcgatcggtggaggggccgcggcgatggagatcgcatgcagcgccgccatctgtgcaagacgagaggaagaacgagccgggatagtcgcccgacgtccacacaccgggcgtgtttccacgtggaaaatgggctgacatcgggccaatatccccacgaacctgccttccaaacataccggagccatacccaggggagattctcgcatggaccgccagcac

SEQ ID NO: 136755 - DNA, 458 bp, Zea Mays
gctctatattccatgaattccacactttcgtgccatccatttgagtaagacgatatgattctggccgagtgacctccgataccatgaatggcccttcccatagcggtgacaatttgtgtcgtccttctcccgttagaattcagtgaaggaccaagtctcccactacaaaggatcaatgtcgtatagccttatcatgatagcgcctcagggtctgctggtatctagctgactgaattactgtattcaatcgctcttcttccagcacgtcaatatcttctagcctggtagcttatgcttcagctatgctttcaaagaccagccttggcgccccaaacctgaggtcgacaggtagcactgcctccaaaccatagaccatgaagaagggggtgttcccatgcagagctcggctgggttgagttcttaggctccaaaccacataaggtaactctctgatccac

SEQ ID NO: 136756 - DNA, 397 bp, Zea Mays
cttcgaatagaccaggatcatacaggataagagacatggagggaaacgaaatcccaaggtcatgacacattggtgagctttagagatattatgtataattccatcacatcttttctccttaggctttgacacccttttgcttacaaggggtaaggtttttttaacggggccaagaatgtaatatctcacaaggtgcctaaaatcaataaaggggcatccccccaagtgtgacataaaagtgtacattgaggcagcaccttcaggtgcaaaataatgaaaagaaataaggagcagataccgaagctctcaacatgaagataagctagaaatcacctagtgatggtgaaaaagctcctaagtcattcctaagggaatgcagatgttggatacttgattt

SEQ ID NO: 136757 - DNA, 481 bp, Zea Mays
ctctcctgctcgcacgattcgtggtaagcagccctttactatgttcgccaggacatgttcctcgttttgcgcgctttggattggtgtttgaagcgacaagggtggcaatgcccctcctccggcgagacctccgccgcggcaggggcggcgccgtcgttggctgcgtcggatgcgtggagaaaagctccctgccgtttgattgtgaacggacgtgggagattagatcggaatcataacccttgggcgtatgatctgagccgtagattggatcggatccaatggctggtgcagttaaagtgggtgagtgctttgttaccgtaggatcctgatctgacagaggtaagggcgtgccagttgctgttgagtgtggcctaatccgtgccgtatgctctggatcggacggtctggattcccggataccccttcgcgtggcaaacttcataaagagaccctccacttttccaaaaccaacccgccgtcc

SEQ ID NO: 136758 - DNA, 462 bp, Zea Mays
ccgagggaatatataatctcacggtccgagcactcttatatttatagaagatatacaggggagaggagccaggcaaggcaaggcaaagcaaaatgagttggagaagcaaggaaggagaaaggaaacttcttgaggatttcatttcctttccctttccttgttgcttggactgccatgtgtacgttggcttgctgctcaaggacagtgatacatacatatggacaggggaggccgttgaatctaggtacgctacttgttgcaggtgttgccattgcacaccacacgctagcttgagcttcaacgtcaccaccaccagtctttcgtgtgtggctaacatatctacacatatcctccatctttatgccctctaatctagcttgaaaattactaccaaactttctcttttcaaaggtacttctctttgaaaatcgaaactgatgatccgtccaaaaacaatcattg

SEQ ID NO: 136759 - DNA, 553 bp, Zea Mays
ttatggtattgttcttttctagttgccttcgtctcgtaagataactcgtgaatattgcagaagcacctagcatccggctctagtccctgactcctcatagcccatataaaaacccccactttgataagagcttcaggggtaagatgatgaagatatatctcaaatgacttcagaacctcaaccaacatcttgtggagtggaaatcgaagcccaactttcatgaagctcttaaagaccaccacctcgtcatcttcgggaaggagaacgatgctttcccctagacccgcactatagaaacatcatgaaaatatttgcccttcatcgcttcgatttgcccttgtttgacagttgacttcccaaaaatgacatggctcagcctccacgatagatcttcgacatcttcattcccgctctccatgtcaaaactgtcgctatcgctggaatcctcaaacaacctagccagcatctcattggtgatcttttctgtgttggtcttctccatagcttcgtaaaactcagacattgtggggtccgtaatcttcttgtcctcagc

SEQ ID NO: 136760 - DNA, 607 bp, Zea Mays
ggtcgtgttcccgtttccttgatttgagttcccagtagtctattgaatgttggatttattttgcttcagatatggacagtccttgatgaaatgttcggactttccacagttgaagcacccactagaaaaacagggaagggcagggaaacgagtactagggcacttggctgattgttaggagcgggcagtagtgggacgaataaagacggactgcttgaatggatatgaaggtgggcaaggcgaagaacgattttgattaaaaggtcgaatcaccaacctggttctctttttaggcccttgatttgacctttcacctccatacccctttgattttccatgtcccacattcttggcttccactgccagtgctgtactaacaactctgctataggtaaggtccagacatgttgccattttccgctgaagcctgtcattgagccccctcataaaacaattctttttcttcaagtcagtatccacctggtcaatggtatgctaagagaggtggttgaatttgttgagatactgcatcaccgtatctcctccttgcttcaatcggataaactcttctagtttcatctgaagcactccctccggaacataatgc

SEQ ID NO: 136761 - DNA, 451 bp, Zea Mays
gaggattccagcgatagcgaccgttttgacgtggagagtaggaatgaagatgtcaaagatcggtcgtggaggccaagccatgttgtttttgggaagtcaactgtcaatcaagggcaaattgaagcgatgaaaggcaaatattttcatgatgtttccatagtgagggctgggggagaaagcaccattccccttcctgaagctgatgaggtggtggtcttcaagagcttcatgaaagttgggcttcactttccgctccacaagatgttagttgaggttctgaagacattcgagatataccttcatcaacttacccctgaagctcttatcaaagtgggggttttatatgggccattaggagtcagggacttgagctggatgctaggtgcttctacaacattcacgagttatcagacgaaggcgaccagaaaagaacaataccataacaactttg

SEQ ID NO: 136762 - DNA, 278 bp, Zea Mays
tctgttgtttgaattcagcaatacacttgctgtctgggccacagataatgagatcatccacatacactccaaccagtaatagggtcttacttgttcctctcttgtaaacagcattttcttcaagactccttttgaaaccaagattcagtagttccaaatcgagtctggcattccaagctctaggtgcctgttttagtccatagagagcctttttcaatctcagaacttttcttgatgcactagagtctataaagcctggaggctgacttacatacacc

SEQ ID NO: 136763 - DNA, 671 bp, Zea Mays
gacagaggacaccgccagatcaaggggtggtgcagccggccctcttcccttgatgtgcgtgcacggtggtgtttggtagtggatgaaaaattggtaatggatgataaataggtatgaaaaatgatattttatggaggtagttggatatagggagagaatttaggaggaaccgctgcagagagtgaaaacataggaggagaccggttgctgacgtggcgggatagtgggatatagggggtgaaatatagatggaaccattgaacacagtctgatagctcgtcgcctagttggtctcatagctcggagctatgtactgtggttacagtgacacagggagttcataggaggagcctgctggctggtcaatggacggcaatggccccccaacaaccgtgtgcagaatgcaaagacgtcttgcacaaaccggcgccttcccttttataagcttaaatatactccaacgattattcgatcaacgtagtcagccacctcggttggtgaaacagaagcaggcaccagaagtgacgaaactcacaaaagccgtcgccagaaactgtaaatgacacttcagattgaaatttgagataagaatatatgatacgagacatcgtcgcttcctcacattcacccttgcctttccgcataccgagcgcccagcgcataacacgatc

SEQ ID NO: 136764 - DNA, 370 bp, Zea Mays
aggcagatctgctgtgcatcataacaggtctcgccactgcagcacccgagaccgaagtaagcaagggcgcagggatacccttgcggtatgcacaagtcctgcagcagtagctttcttgcgccctgcaggctgaacgccgagtaaccgccgctgcggctgtcagtgacactggaccagcccgtggctgatgccggctccacggttgccgccgccgccgtcaccagcagcacggcagtgaacacgatcagtgctggcacacgaacgcgacagttttgagtgctggcaatcaccgcagccatcttcttcttcgcgcaacaaggacgcacagccctccctcgcccttgttccttcacgcaacacgggcgcacta

SEQ ID NO: 136765 - DNA, 473 bp, Zea Mays
caagtagacttactaatttttattcgtgtcatttccaacactagaagtaccatactcaattaacaacgcattctctacaataatcaatatcgaagcgcttttcacccaataatttgcatttcaacttagacatcacatgagcactactactttttatccgcgaccataaccatacgcatttagactacaacaagcaattcatcgtgactacgagcttaaccaagtcatctatcaattcggctagctagagcaacaatataggccgctatacatcctacacgtcggcttgcctattattatcgaatctgagacaacacatatataacaatcacttaacgaaatcggctcctacttaacatgagttggctaatcacagtataagacttagcgaaccattttagacatcgtaactcaaaaacatgggttggagccgattaattagtgtttcttaaccattgctcaacttaaattag

SEQ ID NO: 136766 - DNA, 513 bp, Zea Mays
accgaaccgaggtatggtaagcactagactagttgtacaccaacaatcaaatgggatagaccaacattcggttgtggcactgacatggtgtagtctgatggcgcaccggacgatccggtgagtgttgatagctgacaacttttttcataatggatactaacaagataggagggtcagagctctgatgtgcactgtgccaaacactgtttgaggtccggtgcacatgaatcctatgcagttttgtagcggatcaccattgactatttgagtggttgggggctataagtaccaccccaaccagtgcattaaagatctaagagctaagcaacaattcctatacacaagtgcaacatccccaagtgatcaaagagcctcaagtgaccaatatagtgaagtgaccttagagataggcattcagtgattgaattgtgataaaacacttaagtgagctaaagctagagtgttgcactgtgatcttgagctttggagcttggctcctgtggcagaaccgcc

SEQ ID NO: 136767 - DNA, 423 bp, Zea Mays
cacaaaccaaccagcacgactcctgaaagcctgatcgcactccactgaccgcctcacctcctctggaggagaccaaaaggccgagcacaccagcaccaacccagaacagagagagagagagagagagagagattactaaaaggctcgcgagcaggttagtcaaaacgtacttgtagctcgcgccggcagcccggcaccaatcaccggaggacagcgcttccctctccctgcgtggctatatcttcttcgacagtgggagagacagagagagacaacacccacacgctcgggatcggagaacgcgcacaggcactttccatcccccgatcaaatcgtcatcatgtgcaacgccgccgggacagattccttgccggcgccggcgcccccgctcggctctctcaaggcctccgcgcaccagctcct

SEQ ID NO: 136768 - DNA, 664 bp, Zea Mays
gtcagcggtggcttccttaggaaggacccacttggtgaaggtcctgttcttactatagggtagagccatgtgtgcttgcggtcgcttggttgccccgtattctatattacgaatggcgcaggcagcgtgggcacgggcaccatcatttgggctataccgacgcccggtcttcgtagcctggggctcaacacgactcgtcgtgttgcgccctaccagtggcctgcgcactcaggcctagtcccaataggtcatgagtgcgtcgccggctaggggagatgtgggccataaatgcactgtagtatgaggggcttgtaggtcatgagtgctctacgacctgagaggctcgtaggttatgagtaggaggcagaccagtgtccctcccgtggctcagcgtcaggcgcagtttaatggagtcgatcatttatgatgtcaaccgtggtttaggcatggaatacattcgagtggtttaccttcgctacacccagtcccctgtccagtttcgccacgttcaaccccggactcggtgccgcatggttcgtttggagcgggttttttcaggataggcattgtctatctcccttggctgaccaacgggcttcagtggacaaaggcatttttctcagtgcgcttggtgaccgacgggctccatggactaggatcgtat

SEQ ID NO: 136769 - DNA, 530 bp, Zea Mays
gtaaaatcaccttttaatgaaggttacgcattagaatttatttctcctaaaaataatctttatggcttgtatgatgagaacaattgctaaaagggataataaataacaaaaattatacttttgaatccatattggagttttgtctgtgcacataaattgttttaagcttgaactctatttacatttaattcgaaattggaatttaaaaacctgatttgaaattaggatttaaatatgaaatcagataaataaaagaaaaagaaatgtggctgtactcgtagctaggccaacattcccctctggagagagattcctctcctatttccctcttccgcgcggcccacttcccctcagccctgtgcgccctctactgccgctgtgccgtgggccctaccggcagactcatagccacccacactgcaaacctgtgacacttaggtgtgggacccgtcagtcatattcatcccctccctatcttctctccgcttgtgcgatagcgctgccggatctcaacaaactccgtgatttcg

SEQ ID NO: 136770 - DNA, 317 bp, Zea Mays
acgaactactctgcaccagcaggatcgaggtgcctcgcgcgtggcgaagccatcaagtatgggggtcacacgtccatcgaccgcagacatggcagacggcgtgaccgaaggtgggacagcaacgactacgtcggcaagtacccggaagtggcacgtcagtcactattcagactttggccccacctgcaggctcatttcctcccctgaggtgggcccgggggccactattggtaccctgaatcaggggtaccccttactacagtatgaagacacggtgcccgcgtggctatctctagtcacatggtgaatagcgcccg

SEQ ID NO: 136771 - DNA, 276 bp, Zea Mays
gtggctttggatacctgccagtggcaattcaggaggcaagcagatttggattaacagtagccttctagagattgaggggagtctgataattgtggaatgattggtattttaccaatcagattgttgtctttttggtattatgtcatttatgcctatggtttgtaggtttatctgtgtctatgatttgtgggtttgatggcaaaattttgaagcccactgataataatgacaaaatagcaaatctcttgataactgtttatgggccctgctggtcag

SEQ ID NO: 136772 - DNA, 399 bp, Zea Mays
attaaggaaggttagcacgaaagcaaaggagatacatggttatttgtaggttcttagttctcattgaactcttctaatattaaggaacttccttactacttcgctctgcaatgtatactaatcaggcgaccttcatcatcatacttataaaatggttggtcttctgaattattgcttaggtcatgcttgttagctttcttctctagtcggtctagacacttcttggagcattcgcgaataacatgtccttcatttttgcagtagtagcaaacacctcttgctttgagttctttgtgagttaactttgcttgaacaacagggggtgagggttgattgggtgtctgtatcttatatagccgagtctgacttgattcttctgtttgggtatccatgtgtttc

SEQ ID NO: 136773 - DNA, 469 bp, Zea Mays
gttaactctgaagatgccattctgaggctgcatgtcaagatgtcacgcacaactaaggcccttagtatgtggagacgcaaaacagtagggagcgtcaagttccgcctggcaattatccagatcactcttactcacctagagaaggcgcaagaaaatagacagctctccaacgatgaattggagttcaggagaagactgaaaatcaaaattcttggtcttgcttccattcaaaaagcaactgcgagacaacactccagacagttatggatgcgtatgggagacgccaacacgaaattctttcacctggtagccaacaataggagaaagaagaactatatcagatctctccttcagaatggtactttattgtctagccaacaagacaaactgcaagaggctcatcagcatttcaaggagattcttggagagactggaatgagacataaggtagttcagtgggccgctctag

SEQ ID NO: 136774 - DNA, 539 bp, Zea Mays
caaaaatcgaatatgagcaaacaaaaattattctagatgcaaataaaaatcaaaaattaggaagaaaatttattaccattaataatctaaatgcattattttagttgatggtttttatagtgttatatgaaagcactttggttttttgaaattaagcaatccagcttttccccgagcctgttggccaagatctttgtcatgaacttagcaaaactgtgaatcaggctaatggggcgaaaatcagcagcaccatgagcgccctccctttttggcaacaatgtgataaaggcagagttgaggaggcgaaggtttctgaagtgaaggatgaaagatcacatttggccacagtttctgaagacaactctgaaatccaacaagattccccgagcattttgtctactgtagacttactccatgcgtgagctgggatgccacaaagttccacatccaccaaaactggcaaggaaacaccagtggaatgagcaaaccgtgaccatttcttgaacttcaactcaaaatccgggcagtgaagcactctt

SEQ ID NO: 136775 - DNA, 400 bp, Zea Mays
ggaagacgatggcggcggctcttccacgaattgagctcggacgagggaggagagggatggccgaggccggtgtggggaaggaggagcttagggcggcccttttataggtgcgcgagggaaggggagcagcggagcttcgcggcgctggtgagctgcacagcgccggccataaatgtcgcacagcgccgccgatgagacaccacggcggggcggtaccggcgaggacgttggtcaagggggggaggacggggcggtgccaaacttccctgtgcggcgagaagacggaggaggggacggaggtgatggccggaggtgaccgtgatgagccgtacgcggggaggacgacgaagtggctgacaagcggggccacactgccagtgggagtgatcgcgagcgaggc

SEQ ID NO: 136776 - DNA, 362 bp, Zea Mays
tccagaatgctagttgacttaagcttgggctttgcatagtgggaactgggagctatgtcaactgtttatgattgggagcattacagtcttcagttctcctatgagtattattctgagatcataaaatcggttttaagaatgctgtttctgtatgtctacattgcaatctctatgttgttttgcactgaaccagttcattttggagcagagatttgaacgacctggaggtatagaattgtgttacagttttttcccattagattcatgctctacagtttttatttattcaggaattagaaagtttgcctaaaaacacccaaaatggaaggcgagaatgttatgcaccaaggatccttgctaac

SEQ ID NO: 136777 - DNA, 968 bp, Zea Mays
tcatttcataccaaagcaggctttggggaggcttatgtcccgtcgaggccggttagccaggtctgaacttgattgtgctgaagcatcgttgttccctgtgacttgcattgccataagaaaccagaacttctcgacccccacgccgccgccaacctcgatcacccacaacgccacaacatttgctgacattgtgaggtttgggaggactaggatggatggggaaggtcaacgcagaggaggttttagggcacctggagtcattggcagatctggaggtggctttggtttcggcaatcgcgtggaggggttcacctcgggaggctttgggcaggcgtatggtccaaatggtgcggggcgaatttctggccaacacctaggtcctcagttcggatttggtgccgttggacacaacaacagggtgccgcaaaactcccagcaaacaatagtttttggacatggacagcagcaacctgcctcgttctcagttggaggagctcaacatggtacacaacaggttggtgttgggggacagaaacatgattatcataatcagcgctacaaggataattctgggtctggtcgacaggtagaaagaggtttttggccaaagcagcatgctaacaggggccgggccccattctccaaaggtccaagtttcaaccatattgcagctagtggttctgaaggtcttcaaaaggggttgggcagacatttacaacataatagtgatggaggttcaagtggcattggggacaacatgattttgatggataaaactgcctctaaacgttcctttcaggaagttgaagaaaacaggccaccctctaaaaaggttgaagtattagttgagaccaagaaagaggcgagtaaaccacaaggggaattgtttgaagtggcagaagtgtcagcaaaagggaggggtaagtggtgttttcgatgcaggacaaagggccatgtgtcagtggaat

SEQ ID NO: 136778 - DNA, 516 bp, Zea Mays
attagggacagggtagaggtatatgttgatgacatcgtggtcaagactaagagagggtcgaccctagtggaagacgtaaccctagtctttgacaagctgcgggcaacacgcacgaagctgaacccagaaaagtgcgtctttggtgtctccgcagggaagttgctgggattcctggtttcgcatcggggcattgaagcaaactcagagaatatcaaagcaattgagacaatgaggtctccggcccgaatcaacgacgtctagaagcttacagggtcactggctgcccttagcctcttcatctcaagactagctgagagggcgctacctttcttcaagctattacggaagtccgacccattctcttggactgaggaggcagaacgagcctttcaagagttgaaacaacaccttgtgtccctaccaatactggtagctctagagccaggggagccgttgtacttatacattacagcggctacagaggtggtgagcatgttgctggtcgccgaaaggacg

SEQ ID NO: 136779 - DNA, 389 bp, Zea Mays
tatttttccctagttgatttgttggatggagtatagtgacattggttaaccaagtattgtgttgttgtgctgtcagtgctctttgtggagcttttggcatttcttcgatgaaatgtgtcgcgcatgatgttattggcttcttgttggctttattgctccattagttctgtagattttctcccttttgtggggtgcaaagaatgttaattacatgattatcttttcatgatggcaagaataaggtttagggagattaggagttttgtttcaatagaactacttgtttcgtggtgctttgaggtgaggggtttgatcttattatacattcgtcgggtggggatgtttcaccatttaattaaaattaattgttgaagttggtaaggcttgtg

SEQ ID NO: 136780 - DNA, 445 bp, Zea Mays
acccaatcggagacttggaggccaaggtggaacaacttcggatagagctacgtcaccggaataggatatgggtgcaggatagccaacgtatagctgaattgtcagctgacgtcagccgcttgcagtacaagatatctgaacgggattcgaccattgattgggccatcaactcgcgttcgatcgcttgggaccgcgaagcaaaagctcgagcccgtgtggcagagcttagtgtggccctcaacagcctgcaagtgtactgtaatactctacatgaagaagtacatgtactgtatgctcgactgcacccggatgtgccttccgatgctgctgcattgggagccggaccatcacgaacagcaaatgatgggcctgatgaggagttggacctttttagggcccctccttccatgaaccttgctgacgaacgatctcctatagcatgaaa

SEQ ID NO: 136781 - DNA, 605 bp, Zea Mays
ctcaactaatgaggaggaagacgatgatgtcgtgagtgcaagctctaattttttagccatttctatgggcgatgcttctctcgatgcgtcgatggttgatttcgccttgtccatctctggcgggcagtaaacatcttctccgccatgggggaggtagatttcttggagctcctcgtcctctcccctggccgatggcgccaactgtgttaccgagcctgctccttgtgagccatcgaggacggttagcgagggcatccttgccaccctaggcacgtcggaggccccaggttccgtatccttgggggctcccctgtccactcctgggtctagcgatttgccgggaagccatgagagtgaagtgctacccaaaaaatgaagttccatcaacgcgtgtacaacaggtggcgggcctcactggcccctatcgtatgcccctttttcgtcatgattcctaatttgacttctcttccccatggtagtgctatctgcctcaccgctcccatgttgtgtgtaaggaaggtgatctctaagaagaggaaggtggcacccgctttcgacatggacgacagggcaatcgtatcactagcaacctttcagtcgccgcc

SEQ ID NO: 136782 - DNA, 304 bp, Zea Mays
cccgcctgctcactccgtcgtggacgcgcccacgtcgcgtgtttcctggcactccccccacacgcccgacctgcttctgagcccgcagccactcgctcacttccctcgctcagtagcgctccacagcagaccccctcgcacccctctctcgcactgagtgcgcatccatggagaaccatcgtcgtctgtcatccgttccacggccgccgtcgagctcttgtcgtgtccattgccctggtgagctccgcctcctcaccagcaacacaaggcaccctctggtttgcccctagcccctctatttccc

SEQ ID NO: 136783 - DNA, 759 bp, Zea Mays
gactcacccgaatcccaattccatcttgcaaatttccatctttgtacatctgtgtgaggcctacctcggaattcttcctcatttcgtattatggaagtatttgtatcactatcggcctaggctggctaggggcagcaccagctcgttggtggtgcaagtctggagatgtgccacgggaggaagacagaataccttgacattcctctcaaggacaacattaaagggtggcgccttgaatggtttattgtggagaaccacagcaagtctctcccccctcggtcggggagacagccagatgtacgcactccgagttgggttgagtctcctactgccttggaggtgacggaagctaggattctgcttgctgagatctgtctgctaaaggaaagaggtctgactaccgaagctgtggttgctgacttcgttttcaagaatattcagcctttgaaagacagggcgtatccagcttacttgtacagtggtattactgattcaactcgggttaccgacaggaaaattcctactgaggatctagtgagccaactagacatgatcctgaggggcaaggtatcaaatgttggtgctcctgttgcttattctgcttggaatctgccacctcctaggtcatttttcaatttcgtgtccaaccctcctgccagtgatagtggtctaggtcttagagtgcgaccctctcctgaagacattgaggctctggttgctcctcttcgtgatcttcccaatgatgagaggcaagttcac

SEQ ID NO: 136784 - DNA, 477 bp, Zea Mays
aaataccacaaataatatgctgcaagaagacccagtgaactcaatgattcagtgaaagttctgacaaacaaaagtagtgaagaaatagtaaatctgaacaaagtgattatgatacataccattgataaatgtgttgcccatgtctatgtgttgaaatcttgctgaggaggcgccgttgccccggtacggcggcgtaaaaccaggattttttgcaacgaaacatgaccttgcatctcacctgcaatttcttcaacgccggtaaagcctaggtcttcaccatcggatctttcaaaccttctatcgccgtcgggcgattggacccgacaaaggaactggtcgccaatgcgacggacttgttcttgtcgagctaggccacattgtctcctaagccgatccactgctgcctccgaatcaaaccctcacaccagcgccgcagacgcccctcacggcaccgctccatagctccttcgatccctc

SEQ ID NO: 136785 - DNA, 587 bp, Zea Mays
attgtgcctccaaaatagttttttaacatatagtttgtataattgatttgataaaatacactagtggttcttaaatatgtctcatggtataatataggtccctaaattcttaaaatgcactgccggttccccaaatttgttagttacttaagtgtgccacttgattttctagttaccataatcagcataaacttgcctatatggtgtgaaaaatggtacctgacatgtagtttacacgacaacaacaatgaccatgatcctgttgtcgagcatggtgaccttttggtcccaagttaaagtgtaaagtgccacataagtaaatatttgctaaatagtgtgattaggatcccagtgacacactaaagtctctctttagttgttttttctaacctgctctctcttctcaaaaagccaaccaaaggggcggaaacctataggtgcttttggccaaaagcagctttccctccagtacaaaactcacagcagtccccccctgctttctatggccatggaaaccataacttcaaagaaattacccacctatcactggttatgaaaataccgattcatttttccccttgtgttcc

SEQ ID NO: 136786 - DNA, 585 bp, Zea Mays
atcccgatctaatcgccaccactggatagcctacggtcgagatcagattgccgaagcggtatggccagactcaatcgcacccgtccgtcgtctatcccatggttctcaacccctctcagcactatccgctcctggccattcattctaagatccacgacagcaatattttcttcctccctgaggttacgccatggtcatataccggtaaggtccagcgaactgcgatcgggcgggttctagcctaccagttggagcacgaccagaacctacgcaacccaggaacgacggcgaacacaaggccaaaaccttaccggcgttagtagcgtaggtcgagccacccacggaatggtcagcgcgatggagcgccctggcggtgcgtcactcccgacacaatgacgcccagacgctttccaaagaaatggagccgccgtggagcgcccttgccagacatccgccctcgatttccttgtgtgctctgcgattcggcggccgcaccaatactcaggcccctccctttttctctctttgttagctcggcaatggcggcagactcctttttttcctctgctgcttctccctatttgg

SEQ ID NO: 136787 - DNA, 491 bp, Zea Mays
cagagtaagatctactgctagggtggcccatgagggagatgaggctgagactactgagacagctcccatttcgaagatgattaagcgctctggattggttgtgcaagaagagactatcaccgaaggtgctgctgatgccgaagctgaaccgactatcgccgaaggtgatagtgaaaatgaagatgaagatgatgacattatcttaagcccaagcaaacccagccatatcgaatttgggaaatccacgattaaggcagaggatctgattttaatgaaaaaaactaggatactttggagagaatgatgacggactggttcgttttgctggggaagaggtgattccagagccaacagatgatgaagttgtactctttaaaagctttttcagggcaggacttcggttccccctttacgagatgatcgacgaagttttgaagaaattcgaaattttcctatatcagctgacccctaatgctattgttagacttagt

SEQ ID NO: 136788 - DNA, 485 bp, Zea Mays
ggccaacacagagctcggcgcaatactcggtgaaccgcgccgacgtgaattctcccccgcaatcggtacgcagggcgagaagcttgtggccactcttgcatttcgcgactgcttgatgggttctggtgcgttgaccttcatgggcaagagtgccacccacatgaacctgctatattcatcaaccaataacaagaagtagctgttactgctggttgtcgtcagagtgatcggtccgcacatatctccatggagcaactcgagtggcttggtggagcgcctttgtgttccagtcgggaatgggtcacgttggtgcttgccgatgacacaggtgtcgtagagtcgctccgcctgattcaagacagggagaccacggatgagtccctccctgcccatcttgcggagggcgccaaagtttgtgtgcccgaagcgcacgtgccaacaccacgtgtcctctttcgtgtgggcagctaggcagactgtacgtg

SEQ ID NO: 136789 - DNA, 486 bp, Zea Mays
acaatattgtagctggatcttaggactataactttgttaaagggtgtcgatcatgttactgcacaaaattggaagttattggctctgtaaattcccatgtcagaagcactgatggagcattccatggtacagtaacccgagtggatcagaacgctagcgcagcttgctcgccgccggtgaccctccctgtgctaagattcgtgccgccgccgtctcaattcgtgctttggatgtcgtgataaacgctcggagcacaccgccgtggataagcccggccattaaagtatcccggccaccgtacaaagttcaccgcggtggaaccagataacctcgccggtgcactgccccctttcggccttatgccgcatgtcctaaccgcgccaccgcatcgccatgactccctctagcctctccgttgatcgccggaatgaccgccacggtagaagccacctagcgcttgcgccagtaccttcttctacctccgac

SEQ ID NO: 136790 - DNA, 385 bp, Zea Mays
cccaactaggtctaaagcagaccatgcgaagacatccttattgtggttaaggcaggagagaagtcttgcttcttcgcttggtaggaggtcttcactaattaagactgtttgcttggggttgcgaggtcgagggggactaccttggttccctcgttactctgcaattgtgcattaactttttgtgcttggttgtgcgaggactgttgttgtcttcgcattctatcgttagacaatgcacgttgcactagcctgggacgaagtctctttctatgttcctggctgcttgttcatctccatatattgtaattacaccttgagggcctggtattttcatgcatagatagagtctgtgtattgctacctcaaacttattgatggatcctcg

SEQ ID NO: 136791 - DNA, 458 bp, Zea Mays
aatgtcatcattagcaactaggcacatcacacaaagaaagtgacaatgttcatcattgctaatagacaatgttcttagcatggaactagatcttatagatctatgagcaacttagcacagtacataatgaccactatcccctattgtcacccttagtgatgaatgtctaaggttgaagagctcttttgggttctgtggattcctcccccccatattcactcaagtggtaccgtgtggcacgataagggggtaaaaacccaggcctgacagcataaccagcatccacaaggtaaaatttacctaacatcatagatcatatattagggaataccaagggaagtgtgtattgtgtagaccaatactaattttttaccttggggcacttttagaccatcttctctctcaagggcatcagcaaggataagggcatcatgtgctgatccctcccagccagcaag

SEQ ID NO: 136792 - DNA, 409 bp, Zea Mays
gcaggatttctgtaatcagggtactcaaaccctatagcattcataacactattcatccaaagtttccctcagctctcgaaggtggacgacatgtcttcatgctcccttgcgagataaatgcccatagtttcattgcatttctcttctattaatcttagccacccggtggaagtagctttgtacgaagattgctctttgaacgcaaaagctaatgtggcaagctctccatcttttgatttcacttcctgcggcattttccatctagtgtaggtaggaaagatattgtaggcaagtgcctcttgaattaggtctcaagatccaattttcttgatggtcgtattgaaagctttatagcactcctcaacatcctcattcatttcacacttcagactctttagaccgaagctat

SEQ ID NO: 136793 - DNA, 371 bp, Zea Mays
aaccatctctcccagtatgccattgaccaagtgaatacagatctgaagaaaaagaattgttttatgaggggactcagtgacaggcttcagcggaaaatggcaacatgcttggaccttacctacagtagggctgtcagtacagcactggcagtggaagctaaaactgcaggacatggaaaatcaaaggggtttggaggtgaaaagtcaaatcaagggcctgagaagagaaccaggttggtgatccgaccttttaatcaaaatcgttcttcgccttgcccaccttcatatccattcaagcagcctgtctttattcgtcccactactgccccagctcctaccaatcagctgagtgcccctggtactcgtttccc

SEQ ID NO: 136794 - DNA, 849 bp, Zea Mays
cccatggtggttgcctggttggagggagatgcatgcattcattcgctcctgcttggggtacctaactggttggagggtgatcattagtctcccctctacataaatgacactcctcttaatttcctcgtttccagctcatgaaggccgtgacactgtctcagcggctcatctgcatgcctagcgttcgttcgatgcttttccttctctggattcactagctagtaatcatgcaatcaaaaggtagcatatcatccttccatcttctattctatattagtagtacgtcttttttgtaacctgttgtatctatcatttatctaactaatgcttagactatatatatactaggccagctgaatgaatattagcttgtgggccgggcgaacggtcctgttaaacatgcttaggatgggaaaggtgatgcagtccaggttcatttgttcaggcttctacgcaaagcaatgtacattattatatagcttcgtgtcgtgcctaccatgatcgtagaactccctttacaaaattaggccacggataaactttggagaatatgggggattgggagtggctggcaagtacgaggcgactagctgtagaacttgtagcactctattgggattgtatcactccctatcgggacaccccatttatccacgtcaaccaagaaaacaggcgacgactacagtcaggcccgtctctagaaatctagggctcaggagcgaaatgctcagactctccaggctccagcagtttacttaattatatgccgagcagcttacttatgttaccgtataaaacattgttttacattgtagatgttcgtagagtgagtttaaatacgaggatatt

SEQ ID NO: 136795 - DNA, 388 bp, Zea Mays
gaatttccgtagaaatgggatgactgtctgcccttggcagaattttcgtataataacagctatcaagagagcatcaagatgacaccatttgaagccatgtacggacgacggtgttggacacccttaaactggtctgaacctagagaacggtggtatttcaggcgcgatttagtcaaagaaacggaagcaaaggttcaacggataaggcaccacttgaaagaagctcaagctcggcagaaaagttatgcagacaaacgacgccgacccttgttctttcaagtcaatgattatgtgtacctaaaagtatcaccaacaaagggtgtaatccgttttggggtaagaggaaagcttgcaccccgatacattggtctgttccctattcttgaac

SEQ ID NO: 136796 - DNA, 439 bp, Zea Mays
taggactatgtagtagcacaaactcgcagttctctcgctacctttccgcaattagctagctaggagtcaatcatcctctgtgtgcgtgggcgtggcatatagacacgcatgctgttgactgcctccttgtaactcgctgtcactatgtacagaaacagctaacggtgtaaaagcaaaggagagtagctagtggatagtcgtcccgtagccaagatcgatcgtggagctgagacactgacccgtggtgaaagtgaaacacccgtttctgtgaacaaagagctctgctaccagggtggtttcgcattattccacgccgcttcttcccgatcgatcgagctagctagtcgaaatcatcaggacgtgctgctttccaactgcgctcttgacttccatgcacgcacacgcacacgtactaagctatcccctcttgtgctactga

SEQ ID NO: 136797 - DNA, 395 bp, Zea Mays
gcatgccatgacacaagattatttccgataaaaactgcaaatccaccagttgatcttctatcatcaggacaaccagcccaatcaacatctgaatatgcacttactaaaaaggaccttgatctattaattcttagaccaagtttgacacaagattttagataccttaatatcctttttactgtcgcccagtgaacagttgttggtgcatgaagaaactgacaaaccttatttacagagaaggcaatatctggtcttgtcaatgtaagatactgcaaggcacccactatacttctgtatctcgtcatatcttcaggacctagtggaactccttcatagatcgaaagcttctcactagtggacaagggtgtacttacaggtttgcaatcagccatatt

SEQ ID NO: 136798 - DNA, 409 bp, Zea Mays
ccaaatgttagtcataggaaaactaggtgaactaccccaaacaacggtaactcatcatgctagaatcatatttgtgcctcaaacttgagctacaatatgtcttctcccatgttaacatgtttatccttatattttgtctcaaacatgatatcatccagttatcacattcttggttttaagttcgacacttgtatatataggaaaaatcatttctactcaaagggtgtgtagctactcgtatatttatatctcaagacattatggtagatttgtcatttattgatggtctgcaatccaacatcgctaccgaattttaggctgacaatgagcagacaacaatggtgtctagccaattatagtgtcggtctttccacccaacaatgataaatatttgaaaagcaccctcgtg

SEQ ID NO: 136799 - DNA, 315 bp, Zea Mays
tgtagtgcaggtgtctccttacaaactcaagcatcgtaacatattttcgctttgatgaaccaacatcgtcagcaccaaagtacctattaccaagatggaagccatgttcaccgtaaggaaacaacatcgggtattgcaaaggcatgtatgttggatgcaagcatgaaacatgttttaggccacactctctatcatgcacaagaacatcgtatgtgtattccccagccgtgtagtcgccaactataatggcagcgatctcaccatttaagggtaggttgtattgtaaatcatggcgtgtgttgtagcctagcaatc

SEQ ID NO: 136800 - DNA, 442 bp, Zea Mays
aggggctctaggaaggggatcgctaaagatgtcaggaaaggtgtcaagtgtgttcctaagatggttaggttttggaagccacacttgtttctgaggaggatctctcataggttcatcaatcacaccatctatcataggggtgacaggcttagcaaaggtggttttgataagcttgggagtggatgaaggtttctctgaaggtgtcaaaccactgcactcaccaaccttcccaaagcgagcgacactcccatccttagtagcaaagcctaaccccggtccgccagttcccctcttgaaatgactgaccatcatgcccaactggggctcactgcacaacacccaactcaagatagatcgaaggtatgtgttttcttccttgattcttgtcttgtcgtgtctgcaggactcaagggcagattgcaaaccctcacaaagtgcacac

SEQ ID NO: 136801 - DNA, 776 bp, Zea Mays
ggacttcacccattgctagcaactctagttatcaatactatttggtgcttcttgatgatcatacccattatgtctggacatttcctcttcgatataaatctgatgttcttcccactctcatctcctttcatgcattcgtccaaacccagtttcagcaccaaatcaaatgctttcacactgacaatggtcgtgaattcgacaacagtgctagccgtgcgttctttacaacccatggcatcgcgcttcgcctcacatgcccatacacttcacaacaaaatggatgtgctgagcgcatgatccgttctattaacgatagtattcgtgctctcctctttcacgcttctatgccccttcaattctggcctgacgccctcgctacaaccactcatttgatcaacctacgcccttgtcgcacacgcgccaatgtcaccccacatgaactgttgtatggctcatctccatcctacgatcacttgcgcgtctttgggtgtctgtgctaccccaatatcactgcgcagacgccacacaaacttgcaccatggtctattgcgtgtgtgtttcttggctatccggtggatcagaagggttatcagtgctatgatcgttcatcacgccgtgtcatcacatctcgacatgtctattttgatgaaactgtgttcccttttgcacaggattcttcaccacccatctatactccatcaccttcttccgcagtgattcagaatgtgcttctgatccttctggcacgacggtatcctcgtgtccactcccaccag

SEQ ID NO: 136802 - DNA, 311 bp, Zea Mays
cgcaacaaagctcttacaggccaccgctctaagaggtagaagaggcagaagcttcggaggaaggttcagctcctagcccaagagattgttctatttattatgtggggaagacaaaggacatacaacaaggacgtgccgagtcacgatccagaagcagaaagagatagctaaagccgaagcaagacagaatcatgctaagcaggtcctgcatactacttagctattccccatacattcccgagtatgtgggcaaccaacagcccacaacatcagttgctttggcaagccactctcaagctgcatgggtcctg

SEQ ID NO: 136803 - DNA, 567 bp, Zea Mays
gcacgttattcctcacaacttattgagcgatgaatgtatgtgatacacccagcctaggtggggttggccgaggcccaacaaattagggttgcccggagcccaacagttcattatgcacacccaactcagggaaaggcccaatcgctccaaaagactagtccaatgggggaagggtggctctcccttttaaagtggcttcctcctcccaagttaagcaaggtgggataattctgaggctcacacggtcaccgtctgactacaattgggccaactgggccaattgcgtctttgccaacgggtaatagtggaggatgtcctcatcattcccaccttcttaaaatgggccctagctctgataccagatgatacacccagcccaggtggggttggccaaggcccaacaaattagggttgcccggagcccaacagttcattatgcacacccaactcagggaaaggcccaatcgctccaaaagactagtccaataggggaagggtggctctcccttttaaagtggcttcctcctcccaagttaagcaaggtgggataattctgaggctcacacg

SEQ ID NO: 136804 - DNA, 785 bp, Zea Mays
gggaactctgaagcgcttgcgccggctatataggtgaacaagtcccctggtttaccatgattccaggctacaaacatgccgaatttgcgattccatggtttgtttttgaggaaacagttctgccgagccgtaaaccgcaatgagctttcaacgacaaccattgctttccggatcatccacgaccacgcctacagctagctacaaataataggataagagcctggtacgtctcatggcctcaaaaacattctgggtcgtacgtgaaaggtgaaaagctttggcacgcattagtccaggtcgagaccagagtcgagcaggcaatccgaacgcagtcaaccacaagtcatcaggattgctggctgtcctagtcttcgcaccaacacgttacacgcacacggcacaccatctctctcgcttcgccccagagtccagagatgtctctctcagcagcttccatcctccatgcccttctcctcacccttctcctcggcgccacggcctccgtcacggctggcaacggccacgtgaacccgtcgatgtttaccaacggcaccgagacgtgctccagcgccgacgacacgacggagagatacatctgctacctctgcacgggccgcaacccgttcctgatcaggtactgccccatctactgggacgagtgccacctcgtcctcgtctgttacgacgaccaggcttccgactccattcccgcagtgcccgtgccgacgtcgctagggccggcggcgtcggccaaccccagtgagctgcacgaagacgaatgctac

SEQ ID NO: 136805 - DNA, 684 bp, Zea Mays
ctaagtcatggtcaaagtcgtagagggaggcaaagaaggcacgcttctagatcttggccttgtggaggtacttctgcttgagcgctccttgtcaaacctccccttggacgtgtgcttgtaggaggtgtactcgtgctttcccttgcaccaaccagagtggtggtcacacttggaggcctctagcttaccattcatattggggcagttggtgttgaagtggtcagagtcactgcagttgaagcattcatccttgcaccctccacgccaccggttcaggcggttgttgtggaactatgtgaactaactggcaacaagcgccagctcctcatccctaaggctctccacctactccttcgggatggtcaacaaagaagacaaagcaaacatagcatgtgaagtgttagaagaagagccacctatagacactagggccatggtaggtgcactaggggtctcaatcatgccccgggtctagtagtcaatctgtgtggacttgagcttgctgaaaagctcatccatagtgtgagtctcatagttgggcgactcgaggatcgttgataccttcacctcccaaaccctccgatttagagcatgtagtaacttgagtgctctctcatgattgtcatagggcaattgcgccttgtttcatgcatcttcttcaccattgactagaagcaagaaaac

SEQ ID NO: 136806 - DNA, 833 bp, Zea Mays
aattgaacaacattattttcaattcctcaccctcaaaaagattccgcagatccccctcaccaatgctcgtcccaatcggcgaagacaatagctctcgtttaccaaaccgatctactcgaagacggtcccgctccatccccatccggcggcgcctaccacttcgcgaaacctcgcccacgctatgcttcgacaccacccctcgtcgccggcacttggtcctcgcactaggatgatcgacctcctcgccaacctccacccgcggcggggactcgccgcggccacatctaacacagcaaaataatccaagtcttcaactgaagactcttcggtccaggaaaacggactcccatactcaccatcagacgaaaaagaccaagatccagaaccagacaaattgtcgttggcaggcattacagttgcggccaccacaaaattagtatcatcaacagaggttgcttgcgcaggcccatacgtcagaacctgcacagcaactgagtttcagtatcataaaaacaaaatcctacacccgataaacctaacccctaccccgccacctgtgaagggtcggccgatgctgtagggtcttcggcagctggttcgcctgccaccaccgaagtgccctcaccagtcggtgcagcggctggcacagggtccacacaggtcggcgcagaggtcaccacggggccttcgccaacattggacggtggcgccagctccccctcagccccctccttcgcacccgacgcctcgggcagcgtgctctctaagcccccgaggtcgtcgacctcctcatcatgtgtcatctatagaaacagcatacccattcaaccaaa

SEQ ID NO: 136807 - DNA, 698 bp, Zea Mays
attagcaaccgtcaaatccaccattgaagtctttgcgctcgggcaatcgttcgccggagcgaggtttcggcgaaggtgagggctcgtccgtagtcagaacaccccgtagcacgatagtcggtaagcattccttccctgtgttcaccatggcctgttcttcgtgttgcacgctttggattggtgttcggagcacaacaagtgtggcaatgccaccctacacgagacctccgccgcgatcaggggcggcgccgccatgcggtctgccatgtgccgggagatagctctgtggccgtcgaacccagatgaacggtcaagatcatatcacacatgtaccccttcgtgcctgtaaattggaccgttcaaacaaaatcctaccgatggattggcgtatcgagccttttaaaacgaagactaaatccgggtcgtccgtcttagataggtcagacccctgtcacgcactgattgattgtaaagtagatctaatctggagcgtctgtctgtgatcgggtggtccatatggcaacataccccttcatcgtgttcaacttgcataaaagcccctgatgaagtagtaaaccaactcgtcgtccatttcttgtataaactaattgcattcgtgccccggacattcatacaacagcccctgatctttaggatattaatgcgcgcaacccagagaatagataataaaaaatata

SEQ ID NO: 136808 - DNA, 280 bp, Zea Mays
gaaagatcaaaaactgaagaagtatcaaagatgccagggattttaagtcctccaacagaagcgacagcgctgaaggcacaaaagagctctgccacaactcctaagagaaggaggatggtaaatgtattagatattttggaaacaaccgattccataagccccgctcccacagggaaggttgctgaagctgacaaaatgcaacccaaagctgatactaagcaaatagaagttgaagctacaataacccaggttcaaaccaaggttgggcccgcaatgcctg

SEQ ID NO: 136809 - DNA, 297 bp, Zea Mays
ccttaagtcagtgcgacatgctcacgcttacattacttagggtgatcactataccctactaaaggagcaatcggattaagtcggaaacgccttaagtcggtgcgacatgctcacgcttacatgacttagggtgttcactataccctactaacagagcaatctgcttaagtcgaaaacgtcttaagtaggtgcaacatgctcacacatacatgacttagggtgaatactataccagactaacaaagcaatcggcttaagtcggaaatgccttaagtcagtgcgacatgctcacactca

SEQ ID NO: 136810 - DNA, 520 bp, Zea Mays
tcagcaagctccgcggcccacttggcattgttgcccgtggcgttagagttgtggagaatgaactttaacgggaaggcggtcatcaccacaactctgtgtgcctgaaaatagtggtgcaacttcctagacgcaacaagaatagcatagagaagcttgtgcgtctcaaggtacctggcctttgcctcatggaggacttcgctgacgtagtagaccggcttctggatggttcggacccctgtgattggtcccgagtcctcaacctcctggccttccgtcaacatcgtggtggtcagaccaccaccgtctcctgggggaacatgttgactcccctgggattgttgtgccgccctctcggcgaccagcaccatgctcaccgcctcggaagccgctgtaatgtataagtacaacagctcccctggctccggagctaccagtattggcagggacacaaggtgctgctttacctcttgaaaggcttgttcggcctcttcggtccaagagaatggaccggacttccgca

SEQ ID NO: 136811 - DNA, 367 bp, Zea Mays
tcgaaaggtaattctgagaattttttcacaatgtttgtgtgaaaaaccattgtgtgttcccgtcgaaccactttactcgtcctatctaggacctctatgcttgtgttgcatacatctcttagaattgtaaatacttatagtcactgaattgactttgtatatttctttgattggtatggtatagctttaagctaaatggtaaaggtcagtcctaaatgaacatatactggagtttatgtagcaaaactacattaaattccaccctttgaaatgcttaccgtaatatatctatgatctaccaggagtaagaagagtaaaaaatagccatgaaatcccatattaccacagagctagaagtgcatttggc

SEQ ID NO: 136812 - DNA, 1088 bp, Zea Mays
tatgatatttggaatggggcttaaggcacattgcaagaaaccaacaagactagaaaggccggtcaatggaggagaattgggagcattatacatgaggttcatggagttaggttttgttctttgctgtataatatagtctagacaaaaaaattattggtcaattttgattatccaacagatatcccacacgtgtgagataatatcctaatttataccggtccgacttcggatcaaatacgggttgatccacgggttaaaaaatatatttagagctagtttgagaacccatttttccataaaatttgtaattttctaaaagaaaataaactaatttctcttggaaaaataaaaaatctttggaaaaatatacctcccaaactggccattatatccggcttcctgcggtcgaatattatcatcctcctcccgccacgcggccaccactcaacgccaccctccctgttctgtggccatcgtcctcctcgcgttcccctccatggccctaccttctctgattctgtcgaccagataagcacaagactgctacttcaactattgattccccgccttgacgctgcactcttgcctgcactgcctcgccaacctctctgcaaacgcttcgacggatacgagtacagagagttcaactgtgcacagtgatcaaaaaggtattttcgcggaaaaaggatccgatccgttataaacctgcgtgtagtgtagtgtagtgagtgattcacgatcacgagtaggagtaggagcacctgtcgtctaagttggtagcatcatcaggttattcagctcggattcgttgttcgtaaacaatcgtagccgatgaaggcgtgcaagcgacaccgccgatatatatatatggtagagataagattcccaatctcccaggatgaacagacgggcagcaatccaagaagcagcagcccacatcatctctgatggtacgcaacggagtatctgtctgtcgcaaacaactggcgcctctcccacacacagataaataatgcagcgcagcgcacacagtggaaagaaaccggaggaccacaagtgaaggctctctctctctctctctctctctc

SEQ ID NO: 136813 - DNA, 504 bp, Zea Mays
caaaccgctatcaccagcaggaggatttgacacgaaactattaaaagcctgggaaggaggcaaattccaggccgagtatgcaacaggggcgccgatgttcgataccttgcctctaagtatcatctcaagccggctcactaaatccacagcaggaattcttctgttggttacccgggttgagtcagccaagcctcgatacagataagccggatatgctctgtctttcagtggctgaatgttcttgaaaacaaagtcagtgaccacagcttctgcagtcagacccctttcttttagcaatccaacttctgctaacaaaacccctgcttcagccactttctggtccgtgggggactcggtccagctcggagtgcgaacatctggttgtctccctgaccgtggggggagggaattcccatgattctccacgatgaaccattccaggcgccatcccttgatgttgtccttgagggggatgtcgaggtaatcagtcttccttccgcggcg

SEQ ID NO: 136814 - DNA, 728 bp, Zea Mays
ctaaaacagagcttgtgcggccatgggcttcgattgaaaaccctagaagctggtgagaagcatttccttgaacttcgtccatgaattgacagttcttagccgaagcgatgaatactaagtctaggtcgcacttcagaccgccatgacgaaggactttgccatgactgctcagttaccaccatacgaggacatggtagcctcataactcatgagtaactgctttgggtcggtcaggccatcatacataggcaatgtaggaggcttgtacagtggtggccatggtgtggcctgtaattctggtgtcagcgaagaaacttcgtcatagcggaaatcttgaatgttgaattcttcatgatgaaggttgtcatgattgcgaccatcattgtcttggttcttgtagttgtacatgtttttgtgcgctttgatgttgtgcatctcttaggttgcttcgtcaatcttgctccgaagctcagaaagacgaagcattttctccttgtgctttgagacttgctgatggatgaattagtggttgttgatctcctcatcaagctcctattcttgaggtgctgggttggtggccttcttcttctgatttctttcttctttgatgagtgcttcgttcccttgattaggatcaaggggtgcaaagatagagccagttgtcgttgttttcttcggtggcatggtgtatgttgatgtggtcgtggaatcactggaggtgggtgcca

SEQ ID NO: 136815 - DNA, 599 bp, Zea Mays
gttggatcgagtaggcgtgagtgtgtcgtgccgatttaagtcactaccgacttaaaccaactgctatgttagcagggtatagtagtctccttgagttatgcatgagcatgtcataccgccttaagtcgttgccgacttaagttgattgtttcgttagtagggtatagtggtcaccctgagtttaagtaagtgtgagcatgtcgcaccgccttaagtcgtcgccgacttaagtcgattgctccgttagtagggtatagtggttaccctgagttaagtaagcgtgagcatgtcgcaccgccttaagtcgtcgccgacttaagtcgattgctccgttagtagggtatagtggtcaccctgagttaagtaagtgtgagcatgtcacaccgccttaagtcgttgccaacttaagttgattgctccgttagtagggaatagtggtcaccctgagttaagtaagcatgcaggttgacagtaaacaatttgagcgcctttgagaatgaagtctttttattgatgatatatttcccagtttacataatacaaggccgtcccaatagcttttgaaatatagctaggggtaaaacttcctgagatgttct

SEQ ID NO: 136816 - DNA, 331 bp, Zea Mays
gttagagttaaattaatcaaatgaggactaacaagtagacttactaatttttatccatgtcatttcgtgcactagaattaccacacacgtttaacaaatgcattcaccataaccatgcgcatttaaaccataacaagcaatccaccgtgattacgagcttaaccacacgcctagataagcatgatttgaaatcaaattgcccatattttaaatctcggcataagcttggcaattggctaacgacgtgacccttttctaattaccaacatacaccacctttcaccatttttggatacttgcacgtcccaccgctattgtaatacctaacaag

SEQ ID NO: 136817 - DNA, 496 bp, Zea Mays
cttggcttcagcgcattccgattgcgagcacaacgtagccgaatgcgttcatggtctggatcgggattctctctcggtctccctcccgtcccgtcccgtcccgtcccgtcccgtcccgtgagagcggataggttgaaggagtactagtagagtacgtaagtacttcggtagtactggattggtactaagattggacatcggaataccgataataccaggcaaacacagatgtcactactcgaacacgaaaggcaagagagcgagaggcaaacaggaaaccaggaaagagatgatcagtaggggcacaagatgcaaaatcattgtacggttgcagcactgtccagagcctgctttaacacgcccttgtgtcccgtggcaaatccagcgtaatgactggctcagaatggcaataaaaccgtctcaggagtaaccactgtcaaacacagttactgcggccactgactgttgtaccgtacacctctgggttgagcttccg

SEQ ID NO: 136818 - DNA, 391 bp, Zea Mays
tagcatccgcatgctacgctcggaggcgctcgatcctgccctcgagtcattgcctctcggcagcgaactccgaagtcagggcgcccgacgcaacatggtcggtgaaggcggccgcctgccacgaaaaaaccattagatgtgcaaccacatacaacgaaccaacaaagtccaagacgacttacatgcttcagctgctcggacgcatgcctcagctactgggacacagagcccgccacgtctttagcggcggcggccgacgaaatctcgccgctggcgcagaatttggaccatgggtcctgcgaagtacccttcgctccaaccgccaccataagcgaagtggccaccaccgaacccgggacaacagccagctgccccgcatccgaccctgcac

SEQ ID NO: 136819 - DNA, 366 bp, Zea Mays
cctccgctgctagctccgccaccgccttcggggggtcctccgccatcggcgcaggggctggcaaggagccttcaccggacacagtggacacaggcccagcggaggcgccctcaacagcttccgtgcacagggccgggtcgacctcagcctcgggcagcaccgggttgacctcggcctcgggccgcgcgccgttcagatgcccaaggtctttgacatcctcagcacgcgccacctgcagcaacagcacactcattcagcaaacccacacgtaccacaatcaaccacacgaaacaaaaaacaagccttacctgctctctcgcccgatcagaccgctccctaaccgcctcccggccatgaggaccccac

SEQ ID NO: 136820 - DNA, 609 bp, Zea Mays
cacgatttcgagtagacgcttcaagtaagtcaagtagatataagtgtgtaatggagttagttgtcttaggataagtattgaaatactcggttcgtatgataaatatgtatgcgttcgtaattcgggaagtaaatgcatggtgatttcgatttggagattagtgatttacgattcgtatgctttggtcggtgtgcgaaaatacttgtgaatatgtatggttataaaaatgttgtggtgtatgttgtgccttagatagtgataataataggcaagccgacgtgtatgttatttagcgggctatgccgttgctctagttagccgaagtgttagatgtgttggttaagctcgtaatcacgatgatttgcttgttgtagtctaaatgtgtatggttacggtcgcaggtaaaaattagtagtgttcatgtgatgcccaagttaaaatgcaaattactatgtgaagagtgcatcgatatatatgtatgtcggatttgatgattatggtgattgcgttgattaattgtgtatggtagttctagagcgcgaaataacttgtataaaaattagtaagtctacttgttagttctcacttggtcattttaactctaacaat

SEQ ID NO: 136821 - DNA, 379 bp, Zea Mays
cgggggcacctgaaggcacaagacccaaggttttggaccattgcaaactatggttcttgaaagtaggggagtgtcgcgaactttagagtgcctcaggatgtcgagggccttgaggcctttgattgttctggtaggacatggtataaatatcttatttctttggagtgtcccgagatgaagttccctagagggttaggccccttggccaaaggcagagcaggttctcggggcatgaggccttaggagcgatggtcctagtagttaggtctcacaatcatttcttagttaggtctcacaatcatttctcataccaaggttcttgaatgtgtcctggcatcatccggaggttagccttcttcatgtgctagcaagatcacaa

SEQ ID NO: 136822 - DNA, 576 bp, Zea Mays
atttagttcagtccctcctaaacttttttctggctccgtccctgcttgctagattttacttttagttgcttgtgcttccactatcccacttgtgctgtaccaaatttcccggtggaaggacagaaagaaaatgaatgttatgacctaagatgaaatggaacccaagcagaatcatcctagcgttgctgctgagtgctgaccacgtacgaaatggcttgagttcttagcctcaacagtcacaaaagcatgcatgacaattgtctattacgactgcaggtaacccattaccaccgttaaccagggctggctacaagtccagcacatatatctatgttactctattaaaaacctattatggataattggtgctaccacaacttcaccctccacgctgacactctggatcttctcacgcgtcatgactgtttctcccgccccaccttggcaccgtgccgtgtgggccccacgtcccgcgcagcgctctgttagctactgccctgtgggccccaactgcactgacctccaacacccacgcagccagctacggacctcgcccgtgtagctatcacactgcgc

SEQ ID NO: 136823 - DNA, 345 bp, Zea Mays
gccatcgcgggtagctctcctgctgggttgccagggccttggtggtgggtctgagggattcggcagaacctgaggagcgtttctgtagacctataagctgaggaagccggggtaaaatgagcaatttctcgccatcatgcacaccggcgcaggaaccgcttcatcacatggtcagaccatcccgtcgcttgatctgtggtgagaaaccatataagttgttcgccttgtccttctccttgcatagcttgactcggtttcaagtttggggcattgggagcaccaacacgcagtactctggcgtggttgcggggaacagaggggtggcgtcgtcgtcctagcgtcact

SEQ ID NO: 136824 - DNA, 426 bp, Zea Mays
ttagtttctattttgaatttgaacatataacatctaaagttacatacctttctcccttgagtcgaatcagtgggcgcctttcacaagatattggtcgcttagggaaactcacaggacctgacaaatagacccgcgatgaactagaggcggtctgctatgcctcctaatcatcgtccacctacgcctcatcgtcgtccagctgcaccgcatcagcggcttgctgcgccaaattgatgacttgatgcgcggcatcgacagcggcctgctgtgccatattatcagcctgctacgcctccgcgttatcctgtggggcattagcgcctcttcccccgttctacaggtgctcatcctctagggctagaaaaatctcgaggatcgcaagccagctcgggcttggctggactcacgagcctgaacgggctcgag

SEQ ID NO: 136825 - DNA, 708 bp, Zea Mays
cagagatggacggaccagatcgaaaacacgcgaagatttcttcccaggctaatctggaccgcgcgttcatgaatcaacggtcgaagctaccttccccaaccagccgactttgggcacggcggcgcaacccaccgtgcggcggcaagaccgccggagctgagaatccaatcacccagccagccatcttctaattcgttcactccttgcctaattagtgacattacgagcccgtttcccccaccaattcctgctcacaacaagcccagagtaccgcccacggcgcaccgcggcaacaccatggccggacagtggactcaggggctcagctgcaccatcctacgattcgctagtgcatagcctataggaagggaggacgaatacggtggggacttaccaatggccggccgaggtcagacgacgctcatccacggagaaggcggaagcgaggaaccggctgtgctccgacgagtaattccgatggagcaggcgacaatttccaagcgaagaggccacggctacttttcctagggtctagaggagttcttgggtacaattccgaggccttggacaatggttagccaagttttccccggcggcggcaacggcgggtttcttttccctctctctgctacggcggtggcgcggtatggtggggggtttgcgggtggacgagagaggcaaggaggtgcagctcaaatacccacaaac

SEQ ID NO: 136826 - DNA, 465 bp, Zea Mays
atccaagaacagcattaataagagcaaggatttacatgccaagtgcagtatgaatcaaatttccgtcatacacttgttggccactgataaaaagaaaagaaacactagtcgcatgattgatcacattgcaaaaacaagaaaaagagaaagaaaaacgacgagaacactcgcaggaacacatgaaaacgttcttattctcaattactccctgaaagagcctctcgtcatcttgttggcatttccaatggagcttgctgatcggacggacctgaccagtcaccacctcctctgcaagaacgccagcctgtcgttctcactgcctgcaacctccaacgagcggtccatgcggccaacgacggccgtcctgaagctgaaggcctcctgcgcccgggggccgcacccgcgctgcatgcccatgacggcgctcaggctggcgcgggacgactccacgacaactacttcgct

SEQ ID NO: 136827 - DNA, 291 bp, Zea Mays
ttgcggttttgaacggtccatacagcttggcgtgttccttatttggttctagatcgggattttaggtggttggtagaaggaattgcatagagtttgagagcacggctcgagagtaatctgggatgccaggaacttctagccaatgcattatgatgcccaaaaagcttccacaccccctttgtttcattccatgtacatgtttttattttcaccttattaggtcttgatgattctttgagaggtcacttccatgtggagatcttgttcaccataactgtgatttgtttgtta

SEQ ID NO: 136828 - DNA, 426 bp, Zea Mays
aggtttggggcaccaaggctggtcttcgaatgcatagctgaagcagaagctaccaggctagaagatattgacgtgctggaagaagagcgattgaatacagtaattcagtcagctagataccagcagaccctgaggcgctatcatgataaagctatacaacatcgatcctttatagtgggagacttggtccttcgccaaaatctaacgggatagggacggcacaaattgtcaccgctatgggaagggccattcatggtatcggaggtcactcggccaggatcatatcggcttactcaaatggatggcacggaagtggggaactcgtggaatatagagcacctcaggaagttttatccttagcaagactccaaaagctattagagcaatgttgtactctgtaattggaaaatacgtcatcaataaaag

SEQ ID NO: 136829 - DNA, 498 bp, Zea Mays
gtcgatgagcgtgctttcctatcgtcggagagtgttgccccgatgtgaacatgcttggaggtgtcatttgcgttaatcgggacttcctttgtatgctcggcggatttgaaggtgtcggagctggctttgggagcatttgaggcaccttggggcaatcttttgaagctcggccaactcccttgttgcgaccagtgttgaggcgagctcgcaagtgtaggtggtcttgaatgaggcggatgatgtgatgattttgtgcggaccaggcatcttcagctttaggtacttgtagttagggacgaccataaacttggcgtggtatggcctcacgagaatggcgttgtaggaccccgggaagtccaccaccttaaattgtaatcaatcgatgcggaagttggggggtcaccaaacatgacaagtaaggtgatacgctcaagtgggtaggcctggtggcccagtatgatgccgtggaatggcgtcgagctgggacacagcatggag

SEQ ID NO: 136830 - DNA, 449 bp, Zea Mays
atcgctgccgcgggttggatcggaggggacaccggacactcgctagtcgctgccgaatccgaatgcattcataattgcccacgccacggaggtgacgcggtgccattccctgctctctggctctctgctcggccgggagcgctagctagctcatcggcgtcactttttttttctctctctatcggttgtgagacagtgttttggatgaaatttgaggctggccgggccactctctgcatgcgtcgacgagctagagtcgtctgtgagtgactgacaaaggaacgaagcgaatgggggacgacacaaggcactgttacgcatcagcgatcatcatctcatgccgtatgcatgggcatcaacgatcatgtccctcttatcgttagcaattagcaacgcacatatggtatcctaagagagcacgtaacatcaaaggagtacgcaaatgggat

SEQ ID NO: 136831 - DNA, 439 bp, Zea Mays
gggggcactttttgataggatgtggggggcgcatggtcgggaggctgtcagggagcgatccgaccgggcgagagagcaggtgatggttattgttttgctgtggtttgttgtgcgtgggtgtgtgtggtgtttgctgaatgaatgtgctattgctgcagatggagcgcaccgaggacatcgatgacttcgaaagtctagccggcgcgccgcccgaggctgtggagggtaaaccggtgctgccctcggatgctggtgaaggtccattggacgcgcccgtgcctgatgctgccggcgaagaccctgtgttggccgctgtgccgacagccgaaggcacctaggaggtggtggcggagccggcagtcgaaggccctacggccgcggtcgcgccctcgcaggtggctaattagttgaataggtgtaggggaggttgtaaattttg

SEQ ID NO: 136832 - DNA, 457 bp, Zea Mays
attcaccaagtaggcagggtgtttgcgtaatatgttgttgctaatgtgatgcgggtgtgctaatgtacaatttgggctagggttaacatggaaatttggcttcagctgccaagaggtggttgtaaggtggttgatttctcttgaaggtccttgttgttggcattgtgagtttttcctatgattgattctttcatggggtttctttgttcctaagccatataatgttatgtgccctttgtcttccccatgacagaaacaataccaccttcatggtttttggttggttgtctagattttgttccatgttttattctaactacttctatgattatcttgttgttgtgaggatcctctgtcatgcttaggatattgttggttgtgctcggttagttgctaggtttacatggatttcacattgaaagcctattggcctaggccccatgatggctagttgtgg

SEQ ID NO: 136833 - DNA, 371 bp, Zea Mays
tccggtgatctggaccgcgcgattaggattggacggtggagatcgaccccgtgaaggttttgtggatgagggcgacaccgctcggctccacggcgaggtctcgccggagacgagggggatggccacggtggggctctaggggtttggggaatagctcgaatgcgatcagggctcagagcgcggggcacggtgaggcgggctagcagcggcacggatcaactccggcaaggaattgcgcgggcaaaaggatagtaacggacgaattaagggcatgagaaggttgctcacctcgagtgcaaactctggagcgcttgagggatggtgagggtgcggtggagcctcgggtcgacgacggcgagctccggctacgc

SEQ ID NO: 136834 - DNA, 323 bp, Zea Mays
ctgggtgcgacctcttgtccttcttagatgcctactcgggtttccactagatccagatggctagggaggataggaagcataccgcttttataacagtggatgggctctactgctatgttgtaatgccctacggtctgaagaaccccttgccaacatttgtacgggcgatgagtaagaccttcggagacctgataagggacaaagtagagatatatgtcgatgacatcatggtcaatactaggaaggggttgactctggtggaagacctgaccttggtctttgacaggctgcgggcgacgcgcacaaagctgaacccggacaaa

SEQ ID NO: 136835 - DNA, 531 bp, Zea Mays
gagcgacgacggttcaccgacgttcttatcggttccagccgcaaggcagaggggaagtacggtgggggggtcaccggagtggcgtccagcgcatggcttttaccgacagccttatctggtcaccgacgacgtgaatcgcaacaacggtggcacgaatcacggcggggagcggtcgtcggcgatgaagcggctgcgctggcggtctgatctgattcagggtactgtaccatcgcgagtgctccatcagtaagcgtgacagccatagtttagggccagatttcttccaaatttctgtggcaacacatccagatctctgcagcaaagttgtagtgctacataccagctacaaatcgactatagggattaaactcggttgagcactggatcaaggttgaatttatgcccaaagtcgtagtgattgcactgtctgtctgaaaattcagaccttaacagcctgacagtccaactttagatttaattatctctaaattcttcttaacaactgagctcacattcttaagcaaagttgtt

SEQ ID NO: 136836 - DNA, 907 bp, Zea Mays
gcccggtgcgggctacatggtttacccttcggtaatggtatttcttttgtcgttttgtttcgaacttagagctagaccctctggatatcatgtggattactcccctgaagggttgatcagcgaagtcttcttgctttggtagtggtaggggttggtttggatgctgaggtggtggaggcgacaacactaggatttcttggtgttgcaggcactgttgttgaggaaataggttgtggttttgctgctgggggtaatagtggtgttcgttttgaaattgatgttggttgtattgatggggttggtaagtgtgagcggtgactctttggttgtcagttggtagggtcctgaccattcggtcctttgttgctttagtctctgggaagtacctggttgggtgtgatgagtcttcgtcgtggaagagacaatagaatcttcattgttgttgaggtcctcggcctctgcctctacccctggtcgctttgccaccgtgaccttgctgcagggggtaatcttgacgacgaggggggttatctcctgtttgctgctgatttgcgatattgtgcacttgggactgggcgcggtcttgccgagctgagtctggttgcgaaggcctgatccacgttctactggattgtggagtctccttgggtttccgctgagactcgattttcctctggtggagctcttctgatcggacatactattcaaatagctgatataactcctgcaagttttttggtggatcccttatgcagtggatatatagaacacatgcctgaaggccgctgattgcatagtgaatggctatatggtcatcgactgaaggcagctgtgatttcagtaagagaaatttttttgtagtattctcgaaaagtttctttttcttgctacctacagagcaagagtt

SEQ ID NO: 136837 - DNA, 538 bp, Zea Mays
tcaggatagtaaaaggaaatgcctcgtttttttttctcaccgaaatgaaaggtaaaacagtgcagataatccacacactctctccttttctaacgaacttggggctcccaaggaaaaaaacaaacaaacagcaccaagtgtgaagaaaacaatcaaaaagtcaaaacctaccctggcctcagccctacacccccaccagtagcctgcacttaaaaacagaagagatttgcacagctgcaagtaccaatcaccaccgttaacctctcgtagaaatatatgacatggcacaacaaaccaaagaaagaaagaaaaaactactcaaaggacagcgaagaacccctctcagaacctcgaataaacacaatcagtgaagatcgcaagatctttgggcccatatctcccaaccagcaatggttcagttcctgacttcctgctaccgcatagacgcatgcaacgatgggtgcgttcctttccttgtcgttttagctcctcgcaagaacgcggatcagaacttatagcagaactcgacccccaacaa

SEQ ID NO: 136838 - DNA, 1093 bp, Zea Mays
cacatcatgcactggcaggcgggtcccacccgcaagtctcacgtatgatgccactggcactgcttgtggacccgtgctgtcattctcacctgcgctcggacactgatcaccggggccgccttgacagtttgtccttcctccccaaaacgcgaatccgcgggcagcgcacaacaaactcaaccaggaatcacggggttcgttcactggaagatcttcccatgggctataaaacctgacctccgtgctcccctctactcatcacaacaaaaccaagaagctagaagctctcgtcgccatagctgggtgtgggagaggggcgaaaagaaagaaaaggtgggcgccgtatgccaaaatccaatcgttccatcgctcctgctggggcgcatagcttgggacatcgccgtgaagcatggatgctggggaccttcgggttggtggggaattggcgaccgagggacaacgttggtgggctgccaaccatgaacgccattgggggaccgccgtgcaccagggcgaaggctctgcatttcacgaatcatggtaaggaatctccgaatcaactcgccatgacctgtgcatcgtgtagcgcgtttcgtccatgacggtgggacattggaaccgcgcgtcgcagttctctggtgtggaccgccgccgcaagggaggctccgcgccgccgcgtccgaccgtggggaagaaaggttgttggccatctgtttgttgatgaagggttagattaaaacaacgtgtaccggttgaatctcctgatccatgccgtggatccgcccacggatggcggggatcgtactgggcatccggttcggccagatcagatcggaaccgttgatccgctgatggacgtgggccgttagatcgtggcactttaaaatcctcaccatagatctaggatccaacggtccattgagtgtaccggttcatttaatggccagtctaatctgcgccctcgactttggatctgacgatcagaaaacccccataccctttcgcatagctcatcttgcaaaagagtccttgtagtattgatgaataaacccgccgtcctctcctagtataaagtaattatggttgggccctg

SEQ ID NO: 136839 - DNA, 311 bp, Zea Mays
ctaggcgggggcaggagtgggacgaatgaacatgggttgtctgaagggatatgttggcggacgaggagaagaatgattggaattgaaaggtcagattactaaccttgtcctctttttaggtccctgagttgatctttcacccgcatatccttttgactttccttgcctgcatttttggcttcaactgacagtgttgtgctgacagccctgctatatgtaaggtccagacacgtagccatcttacgctggagtctatcatttagtcccctcatgaagcaattcttctttttcaagtttgtgtccacttgatc

SEQ ID NO: 136840 - DNA, 360 bp, Zea Mays
tgcctgcatatggtatttggtctggctggtgtgtccacggtcgactgtgttgtcccatatgcatgggggacacacaagcatatcgattggagcatggtaaaaaggtctcattctttgattgtcattgacggtttcttccatccaatcacccatttcgaaatgatacgaagtcatttagaagaggcataaaagttaaagagggtccaccaaaacgtttaatgggtgaagatatcatgatataacatcgtgcccttcaaagggctacagaaggtcatgagtttgaaggctatggtcaagatcacaactggactcatatttcttttctctgggaacttccgtatgcgaaggtattgattttac

SEQ ID NO: 136841 - DNA, 461 bp, Zea Mays
ggcgcacggagctcctagatcccatcgcggtggccttgctgcaccttccatggagccggagaggggcacgaggctatgggcaggctgggctccagcggcaggctgcggaatggtggagggaagagcgagggaagaaggcgactgggaggaagtgatatgcgcaggagggcaagtgcgtcgggtaccacccccttccctcccatcctcctttatctccctctccaagcgatgattgcggggaatggtagagaaggaggaagacgtgggatgggggcgcgatcatcgcgcggtgatgagggcggctcgcgtggtgatgagggcgatgacatttttggaaaggaagggcggcaagtgcgctggagacggacggtggcaggggagggggcattgatggagatgtggaggcagaaccgtgcaccatatcctgtgaacgtctacactactgtcttatatagtagtat

SEQ ID NO: 136842 - DNA, 332 bp, Zea Mays
gttggctgttgggatcgatcggaggaatgtctgggatggtagcactctgttttcttttcctaggtgccatcgtgatttttcaaacggcaaaaaaggattcgtgactcagaaagctagagagcggcggaggaaaaaacaagaactagggttcagagctcaagaggacgtcaacagaattatgggttggtatactaagtcgggtgcaaaggggcaggctggtagcttgggagagttttggttgcagcaaaacagcttcactcgggcattacctctaaaatgctaagtgaaccgtcagacacaagtgcggaggacgcatgggcccttgacctgac

SEQ ID NO: 136843 - DNA, 864 bp, Zea Mays
gcatggcgggtgggaggtgcgccatcagcgaacgatctgttgcagctcgtggactatttctccccgcctatttaagaaaacgcggccgaagcctctccttcctacatctcccttccctcgcaacctccttgagtcgactgcggaaagaacaatgcccgggcggctgagctcctcgccgccattgaaattcaggcgctagtgccgatttggggccctctggtggacgtgggaagttagcccagtgcttgcgatggggattacgtccggaaacaccgcggtgcgccggtggaactccgccaattcctggtcggagttggtcatcggaggtcgcgaccgccatccctgctgctgaccacaacctcgccgcgccggtggtaagtttgccacggcccagttcaccgcattgtccacatcgtgtaactagtactagatctggttgcggggcaccgggggccggaaatcggtggcgccgccggccgctccgtcgtggggagattctacgccgttgtcagacacactgtgggttgtcgccgattgagtaactgtggatcctcgtttggacggtccggattagaccctgtaggtaccccttcgcagcattaaggagctggccgttgatcacccatcgtacggctagggataacacgtgtgtatctgtcgttcatcattaatcccacggatctggactctgatctagcggtcagatatcttcaataccccttcggccgagaacatttactatagagatcatgcgcttatcagaaaataacccacaatccatatcacagtggtctgtgtctcggtatatttagcgtcagagaccctgccttttctggtaattgaggagcagtccagggaattggg

SEQ ID NO: 136844 - DNA, 415 bp, Zea Mays
gctatggtgacaataacggctcggcagggcgaggctgccgccgcgggggtgcgtctcgccgtggtcagacctcctcgtggctccaatcatcggtatgagcccctctgtgagaatcgccctcatcttaatctcgtctgacgcctcccgcggtgggttttgtcgctaccattggccgggaatttctcaccgtggccttggcaccgccgttgtgccgctgctctacgtgggcaagactcccatcggcgtaatccgtagtggatgtgtgcctctcggtttccccgcggcacctacattatgtatttcctggtggatgtgggaatcgagcttcagggctggggattcgtgcacgccggcgatgccgccgccgtgtataaacaaggcgttgccgcagcttagtgtcctggtgatgacgctt

SEQ ID NO: 136845 - DNA, 619 bp, Zea Mays
aaactctctcccccctcggtcgggaagacagccggatgttcgcacccctagctggaccgagtcccccacagatcaggaggtagttgaggtaggtgcgttgttagctgaggttggatcgctgaaagagaggggtctgactgctgaagctgtggttgctgattttgtcttcaagaatattcagccgttaaaagacagggcatacccagcttatctgtatcgaggtctagccgactcaactcgggttaccaacagaagaattccctctgcagatttggtgagccgacttgagatgatccttagaggcaaaatgtcaaatgttggtgccccagtggcatactcggcctggaacctgcctcctcctaaagccttcaccctttttgtgtcgaatccacctgtcactgatggcggtttgggccttagagtgcgaccctctgctgaagaagttagtgccttggttgcctcgcttggggagattcctgatgatgaacgacaagtccactttgaggtgcccctgaatcctagcgatgcggagataagtgctatgcttgatttgctggctgaggactcttctgatgctgctcctgctgggacatcggtggtggcacccctcccggaggct

SEQ ID NO: 136846 - DNA, 334 bp, Zea Mays
tcgtattaacgaaaccctaatttggatttagttgaattaggcaacaacaacactatttatctacccccagcccctctcggcctatctcgtcattaaccaagccaccagcccaccagtgaccactgaccagccaccatgggaaggaagagggcagctgttaagaagtcttatgttagtagggacgatggttgtagcaatcctccctaactctctccaatcgtaggaaatgctgctttggatagtactggtaccgaatctgctgatagggttcatgttgaagctgaatcctttgtggtcagtgcctcctgcccagtagatgttgatggtgatcatg

SEQ ID NO: 136847 - DNA, 648 bp, Zea Mays
tcagctcctctttgcctctctggcgatttccactcccttgccggcaacctcctctcaccggcgaccaccgtgctctggcgacccagtgctccatctcctgcccttgctcggtgagcagcccctttctccctctctgttccattgagcagtgcacccctttttccacccttgtgtgccaaattcaaattcttgtcaattccagtgaatccaagtggtgcaatgtgttcctatgtactccattgactcccctgcaggttctcagctccttagggagggtttcacagccttaaatagccgtttcaccgaaaccctaaatcctcacacaccacatgctcggtgaaatgcccaaaccagccaaaatgcttcgattgaacccaaatttttcaggcaccttcacaacacctccagtaacatattcgccaaatttcacgcccatccgatatatcaggcttcattttcaccaaattccccgttttgagcgatcgttttcgagccgagtgcccaaattccattttcttcgcctaaattcaaaccaagcacacatttcactcatattctcccatataaacctattcgtgaagtatcggctcaattccacatcatttcgtgcctcaattcgaattccaaacctcctatggcactatttct

SEQ ID NO: 136848 - DNA, 453 bp, Zea Mays
cttcgtctttgaacacaagcttcgacaacatcggagttttggcggacactactcatggttgcatggccgagcgcaatgagtacatcaacaataggtatgagcaactgcatgatcccgtcaaatatactcagttgcaggttgatctaatccatcaccactgggcgcagcttggatccggagctgcttaagtatgaagtttatgtttgcatcaacaatatgaagtttatgtttgcatcaacaataaaatgacgacattttattaaatggcgtagtgtcatgtgtaatgtgtcatgtcgtagtttcagtttgtggcaagctccaggtgaggagtatttgcttatttcagtaccatattggttttggtcaagattagagactaatagacactggttttgaaactattgtatttttttacttcagatttagttttttgattgtttttatcaagacttg

SEQ ID NO: 136849 - DNA, 663 bp, Zea Mays
ccgagggcctagaaatcctccgcgaagtccatgatggaacctgcggctcacactcaggacctcgggccctcgcagccaaggtgattcgtcagggattttactggcccgcgatagtttgcacagccaaccgaatcaccaggtcatgtgaggcatgccaaaagtttctcctcgctcaggcaacccttcgcgattcactaagctcattgcccacacatggccactttagcgttgggggctagacatagtcgggccactgcctatggctcaaagaaacttaaagttcactttcgtcgacgtcaaatattttacaaagtggatcgaggcaagggcagtctccacgataacagcgaagaccgcccaaaaatttttctgacaaaatattgtctgccgcttcggagtcccgtctgaactaataatcgacaacagcaagcagtttgacagccaagacttcagggaattctgcagctccatcggcaaaaagccggtcttcgcctccgtctaacaaccacagtccaacggcgtcgtcgaacgcgccaatggcaagatttttagcgccattaagaaaaggctccttgatgacaaaaaaggcaaatgtgtagaccaattacccgaggtcatatgggtgctgaacacgacagagtgccgggcgacagggttcacacc

SEQ ID NO: 136850 - DNA, 575 bp, Zea Mays
tctggtttcgctcgcctcttgctagttgctaccgtgttcgtactacgaccccgcttgacccgagggtgccatttttacgggggcgaaagcaaacggcctgtctctgtgctgtgtgcttgccaaagtaccagagctgccagggacaacgccaggtgctgcagcagtgtcagagctgagacgctgccatgcactttgtatgttttccccctctattttctgaagaaaaaaatatagcttttcggttggaatttagtggataattaattatgtgcgaaagcatcgaagctaccgcactatcaatggtggcacgtcaggatacgactggctgtggagagccacagcgctggttaagtatctcaacccaaattgttctgaaatttccatgaaaacgaagttgtctgaaaattgctcccagaacagccactaacaccctgcttcttgcgaggaagataccaagcaataagcttggacctgaatctaaggtacaaccattagctggctaaccccaatccaaagttatcccagagacggggctgcccagcggtggataccataccaaccgtactgaccaaatg

SEQ ID NO: 136851 - DNA, 290 bp, Zea Mays
cttggcccgcgagggttgtagacacttcaatgcctttgaccgaagcaacgaggacttcgatgctagtgtatttctggtcgaagacgacgtactgaagcgctcggccatggcgctttatgataggatgttgtgtcctcacgacctgtcgtcagagagagagccaaccgggcgctggcacatgtatgcttgtatccttggcggggacatcccttatatttgccttgtctaaagcactgttgtattgccttcacaggtgatgaggaatgaagaggtcaaagacctcaccggct

SEQ ID NO: 136852 - DNA, 550 bp, Zea Mays
tgactctgttgactgaaccgtgacggggtgggtccagttggtctactgaagcttggtcccttgggtggaaatccaaaggatcgagttttctggtgccggtcttgctgctgagctcggaggacttggaatttcctcttgagatggccttttcttcttcctttgccctttccacttgcatggctttgttggggaggtgcgagaaactgaggaagtcttggctggctaggatggtcttgagttctggtctgagccccttcaggaagcgggccatcttcttgacttcggtgctgacgtcatccggcgcgtagcgagccaactccgtgaatttgtgcacgtactcactgacagatcttccgtcttgagtcagttcccggaattcatcttcctttagctgaacgatcccttggggcacatggtgctcccggaaagccgtttcaaactccgcccaggtagcatctctgatggtgacattgaaggtatcccaccaggctaaagccattccggaaagttgatgagcagccagttgaacacgctgattttctgggcatcc

SEQ ID NO: 136853 - DNA, 608 bp, Zea Mays
catcggccctcattgtcatgtctgttttgatgtccctcctcaagaagctcctccacgtccaccctccattgtctccagcactggcagcaacactccgacccctggagtgtagaagggagtttgttgaggtccacatcgacgacgttgaatatgtggtcagtaaagctttagcatacatccacaacgaccagcctgtgcactttcccttctccctggtccgtgagctcttggagaggcaatgcggtgtgcccttgatcctgctagccacttcagctaggggcttgggggtggtttgtctttgaatctgaagctgaacatggaagagttatctccatgggtcgtctggtttgtggtaccaactaggtttggttcgagcgtcacgaagaagcggacaacaatgtgattgcagagtactagtggtttgctgaaatagatattgtagactaccctcttgagcaccaaagtaggatgtgtgcggtcctcagcgccattggcaatgtgttttgtattgatcctagatgtcggggaatggggactacgcttctgttagaggggttgtcaagatcaacggtgcggaagatgtgcctgagaaattggtaatccacaac

SEQ ID NO: 136854 - DNA, 742 bp, Zea Mays
tgagcttcttattgcacgggtcccaagtgattcttggagctgctcccaaaagcgtgccacaaacagtgctcccctgtcagacacaatggtcttcggaattccatgcaaacgcactatttgatcaatatagatttctgcatacttctctgtcttgtgggtggtatgcactggcaagaaatgagctgtcttggtcaacctatccacgatgacccaaatagaatcatggtgtcgggaggtattgggcaatcccacgataaaatccatgcaaatatcctcccatttccaagatggtatgggaaggggctataaggtgcctgctaccttcagatggctggccttgactctctggcaagtgtcgcattcagatacatacttagcaatttccctcttcattctagtccaccagtacaaagatctgaggtcatgatacatcttgttactgccggggtgcatggagaattttgaaaggtgagcttcatccaatattttctttctgagctcggggttattgggaacaaccaatcggtctccaaaccatagaatccctttgttgtcctgacggaagcatttgtatttttccgccttctattcgatcatttccttaataacttgaacacccttgtcaccaatctgtgccatgactatttgctcatgtaaggtgggctccactgaaatataacttaaagcaccagaggaaacgacttctatgtttagcttgcacaactcatcacatagggtggtg

SEQ ID NO: 136855 - DNA, 406 bp, Zea Mays
ctcaagtagcaccatacacggccggaccatctgggtataccttcggatcgttcagcccggtcgcggaccgcctggccccttacgctgaaccgtcgtctagatatgtcacggaacatccagcatatttcctcggatcgtccgaccccacgtgaatccgcatgcagaccacccaggtctcgtcacacatggttgggctatccgggcacgaccccagacaatttggccagatcacagaccatctagttcctcacgccggaccgttcaggtacagaactacgaggcagcgccatatatgaccggacagtccggacacgcactcggatcgtttggcccggtcatgaaccgtctgaccccttacactagaccattcaagtatgtgtacatagaaccaggagctacacaatat

SEQ ID NO: 136856 - DNA, 561 bp, Zea Mays
gtcagttacagctaaatgctttggagcagatcatgtccctaagaatctacatcaaacgtggagatggtgtgatctttggattccgggtggacagaaattccacgcgttaggcaatgcagcgttgtgctgtgccatttggaaaacaagaaataaagcatgctttgaggggaaagtttgtgaaacatctttttgtgattatttgttatgcatgcgctcttatgctttattggacaggttgtttacgctgaaatgggcaaagaaggactactggaaggggtgaacaccatgcttcagaccgagtcaagaatccttgctgataaagatcaaccaaaggtggtgttgaagaagctgagggatatggatcaccaaggtgatgatgaccaggaatctgacagatgcacctgaagatgctgttgtactgggtctggtgtcgttctttgtttatctgtaaacctgaatgcgtgtagccgtgtagtgctctgtggtcagtcgttctctgtctagctatgacgcctgaatcagattgcaatagatgaaagggggctgttaggttcatgttct

SEQ ID NO: 136857 - DNA, 450 bp, Zea Mays
ggtaaaggtagtaacagacaacaaacggtggattaaaaaaatcgcgagcgacaaggaatatgatacaactaagggaaaataggtgaaatgcgactataaaactgagatggaagagagaaggttttaaaggacgggtataatataagcatcaaagtaagatgtagaggcgacaagggtaaagatgatgatcgtgaaaagcataaccaaggatagggttaaggcaggaatcgcgaaatggcggaagtggagaaaacaatcgagggtaagataggtaatgttccaacagaagggttgaagtaaaaactcattacccaaaggaagttacaaggaattaacgagattgtcaaggatgtgcaaaataaaatgaccactcatggatcatcaagaaacaagggtggtcaaggacaagtaaaataaaatatcttaaccagaccttgggatataaaggta

SEQ ID NO: 136858 - DNA, 736 bp, Zea Mays
gtggaaatggagctaagagctacagagtggagtcctagctaagtcttgggactcttggcttggcagcaaggctccggcctttgagtcctcgtcggtgctcctcctcctattcgtcggttcgtctggggtccatcctgggtgcgtattcgaaagaactccccactttgcctaggggtcaacccctccattttataggccagaagagaggtcagccaacagtggtttccaaggaaggagccataaggcaagggtaaaaacaaacaccgggtagagccacacgtactcttgggccccgggattgcctaactgtcttgtatttactatgacgattggcgcagggctgtgtgggtcccaaataccattatttaggctatgccgacccctagccttcatagcctggggcggtaaggctcgatgtgttgcaccctgccatcggtctgcacatgcaggcctagttgtgataggtcatgagtgtgtcgtaggtagggctggaaaaaagttcgaggctcgcgagtcggctctggcttgcccagattcagctcggctcggagaggctcgcaagcccgaactatcccgagccgctttgcgccatcacgtacatattacagatgatggcgaacacatgaaggtcatggagaacggtcgggcagtgttattcctgtttagaaagaccatgacatcaaaactacttctaagtggggcttttaatttttatctagtaaaaatcttatataca

SEQ ID NO: 136859 - DNA, 819 bp, Zea Mays
ctttcgcctgctatacggatcggaggccatgaccccgcaggagatgaaacatgggtccccgcggacgagcgcttcagcagtacccgacgtagacgagctaacctccaaagatctcatcgatggagaccgtgtcttcgccctccaggccctcaacagataccaagcccaaacgaaggcctgacgcgaccacgcagtcgtcccaagagaattcaacgaaggggacctcgtacttgtccgcacaacccggacagagtcacggggtaagctggagccaaagtgggaaggaccatttatcatcaagacgaagtcgtctcccagcgcgtacagactaacaacgcaatctggcgaagacctagaacattcctggaatattaacaatctccgtaaattttttgtttaaatccttagggctaacacgcccttgtaattcaccaaacagttttattccggcccgcactctttttctcccagggggtgaggtttttaatgaggcggagccatgtaatatacacgtgaaaatcccccgcaaaaaattaaagcaatgtcaaaaaagaccgcatcgacggtctccggcattcgaccacatcgaagtcaccgcgaggggcagcaaagcctccctcgcgtgcgacaatctgcgcaaaagtcgcccaagggtgcagccggatcagcacaacaagtgcgaaaaatcaaagtcttttccaaaagactctccgtgcaaaagtcgcccaagggtgcagccggatcagcacaacaagtgcgaaaaatcgaagtcttttccaaaagactctccgtgcaaaagtcgcctaagggtgcagccgg

SEQ ID NO: 136860 - DNA, 391 bp, Zea Mays
ggaggatttagaaaaaacatcattaaagaagagaatatgtgtatttaaggtagaaatgggactacgatctcgtagacagtccatagtatggagacaaggcacaacagttcacatacctagctttcccaactagtataccaaaaagctgatcgcgcaggcagtgtggtcccaccgctcagaaaggcaaaagatggagcccaaacagtcctggtttcatggaaagaaagttttaccctaccccactcacttgagaaagcgcatcaagtgtagggcactttggacacaaggccagcagcatgtgtgtaccaaaaaaaatggttgagtagatcatgggcatgcatgctagtctaatgcccgaaatatgggccgggctttttgacagcaatagcac

SEQ ID NO: 136861 - DNA, 273 bp, Zea Mays
ggaaattgacaagataaggaaaggtttcttatggagaggcagaagagaggttaaaggtgggcattgtatggtggcttgggaaaagtgtgtagacccttgaactttggaggtttgggaatttccagcctccctgaactctgttgggcacttatgatgagatggctatggctgcaaaggaccgatcctacccgcccctggaataatcttcctgttcatgtccccagcaatgctaaagccctcttctcttctgtgcttgtcacagaaattggtgat

SEQ ID NO: 136862 - DNA, 335 bp, Zea Mays
ggggagatacgtcgaggtttagcccaatctcaagattggttgcgtagcttgacaggttgatgttctgcgtttacggccatgaattcatgatcctttttgatggtccgcgatgccaaaggaggacactgcttctgaagatcgcttaaacaagatagctatgacaaactgcaatttcggcagttgaattcttttcagctcttcgattcttgcctcaggaaccaacgaaactgaactggtaaacagagcgcgcatattctgagaagattgtttacgcgagcttagaagatttaacgagtttgagtttcgctacattgttttccgttttccgagctttt

SEQ ID NO: 136863 - DNA, 766 bp, Zea Mays
cgatcttgtgtgggggtcataggattttgcctactggttgcagagatatggagcccggaaatccggtctgtctccctgctcaaacctcgagacaaatctagggttttgtcgggtatagggctccggttcccaatgcctatttttgggggattcatctggcgggaggtgtcaagaactttcatttgagtgtggcattgagagaacagttgacaacgtgtatgctatgtcaaagttgttcgtaacagagtttcaaagggagttcttttgtggccagttaactcctgagcttaggttgggtttcttcaagaaatggtgcagggacaacaatttggagtagagaattgttatctcatatctatgcatagtagtgaacctttatctatgtggtgtaatgaacctttatctatgtggtgtaatgaacctttatatatgtgtgttcggtcttgaagtaatatctgtgtgtgtaatgaacctttatctatgtgtgtgaggtcttgaaatattatatatgtgtcttgaaatatttgaacttatctatgagctgtgatgtatagtcttatgcaacgtccttatagtttgttaaatgtgttgaagcaggaagatgatgatggcatcatgtatgacgaagaagtagccgatggaggcagctcaagtgaggatgaaattatatccaggtgtcgcaacaatttggtgcaacaacaaaaaatgattgtgcagttggttcctatcttgggtatgtactctgataactacttcctgaaactac

SEQ ID NO: 136864 - DNA, 410 bp, Zea Mays
aatagataagaccctatttctataaacatgtcttatcctaaattggtgccttcgaccaactcggccatgaacaaacgacctgaccaacatgttcatgatgaccatccatttcaacctaacaacaaactagatcttgacctacttaatgtaatctatcctactcacaactatcttagctatatgtccctaaactcaaatggaaaacaccaaaaccaaatgttcctaaccccgatggagacaccaagatccaagaaagaagaaatcaacctcgtcaaggaagaaaagagtcaaatcagatcttcagatgcgtcaccacccaaaatagagtctttccataccataatcttccttatcccaagattttgttaccccaacctatccatctcttatcccacgtatcaggtggctag

SEQ ID NO: 136865 - DNA, 701 bp, Zea Mays
ctctgatttttcttattctctggactgggtctcaaatcctggaaagtccaggggtctcggggtaatatttctaagagacaaggaacactcgtaattggactgcaggttgatttcttgtttaccagagggctctttagcaaatgtgttggccgaaggggtacgtagagatcctggctgttggattagcgattaactgcggggattaaatccatttatttgtcaaaccggtatctactggtgaccactagatccaaaatcaacggccatgattcaaaatctcctagatctaatcctagccacaggttctagtgtcttctcctatcccgaacaccccaggcggtggggctggccccacggccgtgcagcccagcgaggtaccctgccaagcgattcaacgcactagagcccaacccgaaaagtgctacacaacacaaagttcatggtgaaacaaagggtaggaccttacttgcaaacgtgtagcatggtgccccggcgtcgtgcatggtggctcggcggtgaaggaggaccttcagagaagaattccggcgactctaaccaagctcaggatgttcatgccctcacacagcgtgccccagcgatgcaccctggccaccctgagactttaaacagcagtcatcgatctgatcgatgatggcggctcctgctggcttcccattggtttccgcccgtgcacgagattg

SEQ ID NO: 136866 - DNA, 497 bp, Zea Mays
ccgccacgtgtggagggtgccggggatcttcctagtgcgagtactgggtataggcggcgaagggtggtgccgaaacaaagtgtgggtgagttttcgcgaagtggtaggcgacatcgtatggggatggagcgtggccgtcttcgggtagaccgggttggtaaatgagaattgttgtcctcgtcgattggggcgagcataggtgagggggatctgcgaaatctttttgagggtgaggagttgaggataatgctgttcaattatagggagatgggtatcatcccgaaggttgagccgatgtaatatatgatgccctcgtcgtgtgtatgtaattgtaatttgtatggtaatgtggcttgttggccgtattcgcacgcctgtgcttgatcaggctgcacctgtgggcgacttttgcgcagggtgtcttttagtgagagacttcgattaacgcacttgtgctattccggctacacccttaggtgacttttgcgtggagtgtc

SEQ ID NO: 136867 - DNA, 761 bp, Zea Mays
aaaggccctggcgttttaaacaacttgaaaagagtctgaagcactatttcctgagtcactgacaattgcaccgagaccctcgcacttctattccttcacaacgccaagtccacgatgttgaacggcggagcagtggctccggcgagcctgtactggccaagatacgcaatgaccggtgctcagaagaggttgacacctaattcaacccctaataatcatttcccctcaaccaatttcaaggttctaggcctcaatctctctgcccatggtgacagtgcgatcaacaaataacttgaagtctccccggtgatcttatgggttctagcttaatcggccgggtcaagggcacataagggtactgaaacgaggaaacagagggcgtgaacagacctaaagagcgttgtccatggcaagctcactctgtacggtgctctaaaccgatttggggaaagtctcaaattggggctctctggtggataatcggaggcacgagtgggtgtgtttggtgcttgactacatagaggagccgatggcacgctcaatttataggattcaagggcggtggcccatgaattggagatggtgcggtggcggccggagagggaagaagttactggcgcaagcaattcgtggatgttaccgtggcaagaccaccggcgacgaatagacatgctaaggcgatgtactgcgacgtgtttaaagggtcatagcgtgtcgcgatcacggcggacaacgcatacctcgacgacggtcgcttaacc

SEQ ID NO: 136868 - DNA, 439 bp, Zea Mays
ttctttgggaggaaaagaggatatttctcgagtgacctagcaaggagaatgacaaatgatcacaatatgtttccatccagttgttgggcagtgtttgggtcagagacacagactctacaatgtgttgtgaagcggcttcttgcacagtgtgtttcatcaaatgagcgtgaacgcaattggagtatattcgttttcattcgtacaaagctccgcaacatactaggatacgagaagctacatgaactggtgttcgtgaattacaacatacgtctacgaattcaatgtgcatcatgtatgcctgggcctagtgaatttgatcccgccttagccctcatggatctctcgttacataggcataacagagccattcatgattggatggaaagagggagatccaatgtggatccaacattggatgaggactcatcttacagtgaca

SEQ ID NO: 136869 - DNA, 583 bp, Zea Mays
tgattcttgacggcttgttaagaagaatattccaggcagagctaacctccagtgcctgccaagcgtgtgaatcgccatcacgtggatctgcttccgcatgaactttctccagaaaacgccatgatgtcaccacggcacgaccactgtaagttatgtccttctaacttcatttatagcgctgtcaatcagccatgacccatgaatccatgaactgaaactccttccggaaagctcggttgggttgctgaagaagcaaacatcatgttttgactctttgcttcctaacaaaacaaacgaacaccgatccaatcttcctagtttcttgtgtaaggtctcttgggtcaactgcactgaagtttgccaaagactttgcctgacttcctagctcttgacaaacaaaactaccatgctctagcatcagcacgtgcaccacacacattttttttgttgaaaaggaaatcttcctcgtatttcacatcattaaggaagtttattacttcgagtccaagttaattgacctcgctaagagaagattcaagcctttgctgggggttaaagacccactaatggagttcctaaagct

SEQ ID NO: 136870 - DNA, 543 bp, Zea Mays
ctctctttaggaaacttgttctctgtactatgagctccaacttttctatggaaactttagtccaaaaccacttggattgatcacaaatgagctacaaactgggcaccatttactgaatttcagttttagttaactgaaccaatttcagtcaccagtaacccaatagtccattttcagtttactttttctccactttttgtgtaggatcatatccatcacccgtaaatacatttgtacaccaacttatggtcttcaattcctctatagaaaccatagctcaaaaccttatggattattcacaaggaagctccaaagtatgtcacaatcactgaaattcagttttcaataactgaatataattaagtttcagccacaacacagtcccactttaagcagttgttactccaattcttgtatgggatcatgtccatcaccctttaaggaagttgttcaccaatatatggtctttacttccttcataaacatcacaacccaaaaccctctagatcagccaaaaacaggctctaaaacagctatcaaaac

SEQ ID NO: 136871 - DNA, 297 bp, Zea Mays
gggttctccgtgtgaaggcgcttgctattgactactccgtcgtttttgggtgcctcttagggaacttcggtgacaagggttgccttgcctttcttcttggcgagggctgccttcgtcgcatcgtccagagaggtggtggccttggaagtcgctttcttgggagccatcgcgggattcctttgtcgaagcacaaacagtgggtgccaaatgttggaaccgactgacacatagtcaattgggcccaagcactaggacacgggagtattttggtgctcaacaaaatagtagacggggaac

SEQ ID NO: 136872 - DNA, 409 bp, Zea Mays
agctggagccaaagtgggaaggaccatttatcgtcaagacgaagtcgtctcccagcgcgtacagactaacaacgcaatctggcgaagacctggaacattcctggaatatagataatcttcgcaaattttttgtttgaatcctcagggccatcacgcccttgtaattcaccaaacattattattccggcccgcactcttttcctcccaggggggtgaggtttttaatgaggcggagccatgtaatatacaagcaaaaatcccccgcaaaaactaagacaatgtcgataaagaccgcatcgacggtcttcggcattcgaccacaccaaagtcaccgcgaggggcagcgctaactaccctcgcgtgcgacactccgcgcaaaagttgcctaagggtgcagccggaccttcca

SEQ ID NO: 136873 - DNA, 574 bp, Zea Mays
gtaaccatcgactttagagggtaaacagaagaaaacatgggctggctggcctaataatcaaaacccaagtggctaacgtgctaaacaagcaaactggctagtggctcaaataataaaaagagcagggaccaacacataataatttggacctatgtgaaacaatttttgaactatagaaatttggacatgattaaaacaaagcgtggggcgttttctgcaaaacattcctcttctacctccatcgccggtgatggagatcctcagtgtttgtatagcgggctcgacagcatgtggacaacgtagaggagtggggagatcgtgagcggggacaatagcgagctcagagagggactcgtcggcagtacgtgaccctatggatgctctggcgacgatcagctgcggtggcaatgcatggcgagcaagggcagcaagcaggagggcacgatagagggagaggagttccaatttataggggttgaaggggacgagaacgacgtcggggagaggaatcgatggtcagagttattgtcaagtgggagagagagagagagcggcagtagcgctcggtggaggg

SEQ ID NO: 136874 - DNA, 366 bp, Zea Mays
atttgacaattgtcaaaagcgacaattacttggcagaagtgagagatagtacaaattgtttgacaaaacatgtggtgaaggtagagtcgagacaatgttcttgtgaagagtggcagcacacagggaaaccttgtcaacatggattgacagtgattattgcccaggatgtaaggaatgttggtatggagaactttgtcgatgattattattctgttgacaagtttagaaaagcttacatgcgaaggattccaccaattggtgaccgttctttttggccgaaggtggatttttcaaatgaagtatgtgcaccaattgctaaaagaggggttgggcgacaaaggaaaaacagaatgaagagttgtctag

SEQ ID NO: 136875 - DNA, 295 bp, Zea Mays
agctcctcacctgcaaaaagactccgcaattccccctcacccgtactcacggcggccggcaaggacaacagttcctgtcggccgaccctactcacacgaagtcgaccgccgtccgccccactcactctacgcttcacaaccgcccttcgccgcctacgcccagtactcggaccaggcacatcttctgcatccgcagcgcgcggtgacgcctccgccgctgccgcatccaaggccacaaagtagtccaagtcctcatccgacgactcctcagtccactcaaccgagctcccggagt

SEQ ID NO: 136876 - DNA, 784 bp, Zea Mays
cgcgattcgtgctcattggcgcgtcgataactgtgagaggtaaaaagatcggaagggaggaggatttggtcctggatgtgagcttatcggccgcactcgattgcctggcgacgtgtctgtgcggtcgatgtcaacgggggatgccggcaatctcagtcacgccacgtcataggccgttttaccacgtcgttgcgagtcatggagagtaactagtgactgtcgtaagaccttgccccagtacgcgccatggtgaactcactttagcaacaatatcccttcaccgtcatgatccaaatctcgttcaaaatttggagcaaccatgaccgacttctataaattgagcgcatcccttgctccgcccctttgtcacgaacccaacgcaactccaaccacgtcatgccatctatcgttgctcgtgaattctggttttctcccaattcggtctgccgtgccgccgtgagacaccttgccgaggccaaccatccacaggtcggtttgtgcttctctggtttgtgttctagcatccttaggttctcctcttgcttgtgaactcgatcaattgaacgctatcgcgcttggtcatcgagaacaactctgcatgtcctcggtattcgccgtcgtcgtggatgggggtgattctgggtcagattagctcaattagttcatggactaggatcgtcttggatcggggatgatgatccggtattcggtttcggtggtcgtcgccatttgaagcaagttccagcaaggggtggccgacgaacgaacgcgccgtcgacgagga

SEQ ID NO: 136877 - DNA, 526 bp, Zea Mays
ggttctgcgagttagggttctggaacccgtcgggggctagcccttttatagtgtacacacatcaaaggcggatatttagcaaaaccgcttgtgatagataacatcacaggcggttttttacgtcgaccgcctgtgaagttaatttatcacaggcggtcggaattaacaacactacaagaaaaaaggcaaggagtgtcggccaaaaccccacactcttactgaaataagccgacactctaagtataagagtgtcggttgaccgacactcttagccgtcactctaaaatggacgctcttattcgtatagaagtgtggggaccgacgctcttatgttaaaagtgtcggttcaacacgcaaccgacactcttatgttaaaagtgtcggccagtaacgtggccgtcactcttactgcgcgcacgaccagcaagctacctgggcgcatataagagtgtgggggccgacactcttagtgaatatttttttttaatatccaattttatttttctccctccccggatgggaagcc

SEQ ID NO: 136878 - DNA, 461 bp, Zea Mays
ggacaaaacgggacgcgcgacgtgaccttttccatacttgcatgcgtgtggctggcgcgcctcctagcaattgcaagtcggggaggcaggccgccttcaaacggtagatctagccgatgtcgtcgtcgatgggacacgagagtagcggtggcggcgccgacgaggaggaccccgccggcctccagcgggtcatttggttgcggcagatgctccaccgctggcagtcctccagctccaggattgccgccgagaggaggtccagcgccagcgacgacggcgacagagccaacccagacgacgccaacgccacgacagaccaaagcagcaacggcgaccccacgcctgccgctgcagacaatgccagcagcagcagcagcagcaggaaccagatgctgccggcggcgccgcatggtgcggcggacgaggaggacgaggacgaggaccggcggctcctgtcgcgg

SEQ ID NO: 136879 - DNA, 359 bp, Zea Mays
ccggagtggtgcgacgaacttccacccttcttgttcttgcccatggttgattggaagagaagagaaaagtgggagaataagcaacaaatgatcagaagatgtgtgaagacaccaacgaggcaggcagtctatttatagaggcaggaggcaaccgctcatctcctaccacggtcactgaatagtcgcacgtattcaataagcaattcaaatcgtctggaaacaagtcagacagcagacgccgtttcacgtaacatgacaccatttggactgaggtcaactgcttggacgatatgattacaccccacggtcacgtcaagttactactcaagggcagtttgctaaacgctcggcgtaccaag

SEQ ID NO: 136880 - DNA, 342 bp, Zea Mays
ggcagcaacagcaatgttcggtgaagcaggcgttagtgcagcaacaggtgtcatgacagtatgtctcctctctcatactgaccttctgctcttgaacaagtgttctttaatctaactatagagcaccattttttaggttgccatcttacttcttacagaaatcactcccaaaagtgttgcagtccataatgccaccgaggtcgctaggtttgtggtaaggtgagagagaccaagtataactttgtttgaaacatgtttattttgagtcctgaacatcgtacatttgttgtgatatatcagaccggtcgcatggctttcactgatcctctatccagttgggcg

SEQ ID NO: 136881 - DNA, 1150 bp, Zea Mays
tgaaaacaagggtaaacagaagaacaatattgagtccatggcttatgacatggaacataaaaataacaatacaaccattacagattaaatattagtaagacagttcttgaagaaaaaaagtaagaaaatgcataagtggaatttaactcagtctggacaaaacatacctgaagattaggtcttagatttgttattcctttccctccctagaaaatatcagtaaaaatgctctgttagtgccttgaggaaattacggaggactaatcatagtgtatatagattctaatcaatagcaggtacagtgcaagcgtgaaatatgaaagacagaaaaccacaatgtgcaactaacaagcgctggacctaaatatcgagattagaatatgcagaacaccagtatgcacatttgcataggtgaagagtgtgaacctgattgcagacatgcaaataagaaaaatctggattacaagtaacaaggttcccaacaaccagatcaaggagatgaacaagcagagatcaataggcgaactaacctagatacacgaaggtttcacagcacctaggtcacgaacgccatcagcggcaaagcgggagtcttgagaacggtgtccggcaagaaccccaaaataaagaagagctggactgaggacgacggtagaggtaggtctctaaaatgtcaagaagggacgaggtgtaggggggcacataataaactgaaggaaggtactaacccagtttctgtggagaggacaacagcgtcggcgactatgtcgttgcagtgctgaagcgtacgcagtcgtggggtgctgggttcaccgatgaggattacacaaagggttgcatcccctgctcgctgtagctgcgcgtgggtccgcacagcgccaggggccaccatagcagcggcagaccggctcccatgcagaaggtgaaggtggatcggtcctatgcggctcccatacggtggacgaagcacgattgggtcgaagcagggcaacagtggtagccaacggcgaccatgccgcttcctgttcagatctggacaccgtgcatagccgttgggtcgcctccctattcagatctggagaccgtgagcagccgtcaggtggtgggtacaacgatgacggccacgcggcggactgtgtcgtctgcctgc

SEQ ID NO: 136882 - DNA, 363 bp, Zea Mays
gaaagatgtactgtcttttttgtggcgaggacaagggccacacaacaagaacatgctagattacaattcagaagcagaaggaaattgccgaagctgaggcgtggcagagtcagctgaagcaagtcctccacactgcttcatgttactccccatacatcccagaatacataggtaatcaacaacctacggcttctgttgcttcggcaagccattccccagcctcttggccccaattgccaccaccactgatccacaatcaacagccagaagggcgcaatcatattcagcaacagcgcgaccttcaggaggagtccgaagctcgcacaatcaacaacactgtgcctgagtcaaagtaaatttact

SEQ ID NO: 136883 - DNA, 516 bp, Zea Mays
cctccatagcttttgaaatatagctaggggtaaaacttcctgagatgttctatattccatgagttcccaatttccgtgccgtccatttgagtaagacgatacgagctaggccgagtgacttccgctactatgaatggcccttcccatagtggtgacaacttgtgctgcccctcccccattagaattcggcggaggacaagatctcccactgcgaaggatcgatgccgtatggcattatcatgaaagcgcctcagagtttgctgataccgggctgactgaatcaccgtattcaatcgttcttcttctagtatatcaacatcctccagcctagtagcttcagcttctgctatgtttccaaagattaatctaggggctccaaacttgagatcagcgggtagcactgcctccgaaccatagaccataaagaaaggagtgtttccatgcagagctcggctaggttgagttcttaggctccagacgacatatggcaactctctgatccactttccaacgaac

SEQ ID NO: 136884 - DNA, 388 bp, Zea Mays
cgcgttaggctgcctccaacaggcggcggctaaaagaagcaggcattcagcatgttggctggcgtagatgttttagctgtccatctataatataacactttccaatggtatagcaaaaatagtttgcctcatgctcactgacaagaatggcccaccaatttgcatcagagatgcctgctcagttcctgcccagccataatagcttttctctcacctgccatggaatttggctgctctgtttggctactctgttggatgaaagatgcatagtgctacagtgaatatgagtagccataatagctttgcatacccttttggctgctccgttggaggcagccttagcttcaaaaaatggtgatacctcatagtcgcatctctgatactccca

SEQ ID NO: 136885 - DNA, 808 bp, Zea Mays
tacaaaaaattcgtaaaaacataatgagtgacacatcataacaaaatgattgaacaccaaattagaaaatggttgattacaaaattacaattacgaactacaaaaatagaatgactaactacaaattagaatgactgaacaagtacaatgaccgagcacaccaaaatcacatgaaacattcacaattttttggaatcaaacaaattgatcctgccataagttcatgataaacaaaggaacgactgacacataaacaacatcaattgagcacaaaaaagcaccaaaacacatacaaaacttacacaaaatctatcatagtgctttgagttacttgtcacaatctccaaatccactaggaacaaattgcacgcaaaaagcaatagggaaccaaatccaccagaatgtttacatttggaggaaaactcgctagggttgaaatgctaagatagcaaccgaagaattcaccagagaggatgacagagatgatgaattggattgtagcctacacaatccgcaccataaacatccactgatctccacaactacgaaaccccataatgtttacattggggggaaactcgcttgggttcaaatgctaagagaacaacagaaggactcaccaaagaggacaccagagatgacaaaccggattacagccgagacaattcgtaccacaaacccctcgatctctacaactacaaaaaccatggaggattccacaaaaagccataaaccacctaggtcattgaggccaccacgaggaagcatggaccaaaccaatgccgaaaaaacaccacaactacacgcg

SEQ ID NO: 136886 - DNA, 462 bp, Zea Mays
aaattattatctttttaggtgatatgctatttattaaccaagtatcccttgtgaattgtgatattttgttgatttaacagggtttacaccaatttttaccttcatgagaaccaaacaacaactaggggattgtgcacgtatgattcatatgttcatatctcatgatgcaaaaaatagatagtgtcagcgaaaacgcccttacaatgcctgagacgcaccagagttctaccaagaaaaggtcaacgcaagattccctttatttctttaaatatttctaatccacaacgcctacttttgcatatatctaaagcatatcatatggtttctagatgtcgtgcatcacttgctaagaaacctgcaaagattttttttgtcgatggagacaccaaaaataacgatagagatgattctgctgccatccctattgaactaaggtactactcatagcccatatatatttac

SEQ ID NO: 136887 - DNA, 334 bp, Zea Mays
aagaagaagataagggatggagacgacggcaaccagccaaattgttgtggtttttggattaatccatcgatacccacttacaaagctagggaaggcttataagctccacatacttggcccaacggccccaattacacaaccccattcgggcccatatactctaatgttgcctcacttctgcgacgtggtcgcgtaggacaactcttctttcttgttgcttcttcgtagtgacagctccttcaatggcctattctccatcttcaccgatggtagtatggttggcgttcgaatctctggacgttgctgacaacgtagtagtgctgctcaaaaagac

SEQ ID NO: 136888 - DNA, 461 bp, Zea Mays
ccgatggaggggagactcgaaaggttaccatcacgacctccaacgctgggggcagacgcgggtaggtaaccaggcgtgggtccctatcctgcgcatcacggacggtctggcgcatagacacagacgatctgggacatcatcggacagtctagatcattccagcggatggttcggcaacgcctaggagccacgacgaccacgtaccttcaaaccacgatgaccagaaatcggtacgtggaaaactaacacattaaaggcagctggtcgactggtcaaattcggcccaacctttaatcaattattgtctaaatatgtgaaaaagaaggctgactcaagtgaccggccaccaaagcaacatcgctaacacacttaggagcgacaacaggtaagaccgattggactacctcaccaatcagaaaagacgagaggtcataatgtccaattagaacctaacgtgcctg

SEQ ID NO: 136889 - DNA, 512 bp, Zea Mays
cagaaaatgattcttgtggaacggcagagaacatgccaatgggggttgctgtctagtggcttgggataaggtcactcgaccaatagagttgggaggacttggtatacccaatttgaatgtcatggcatgggctttgcagataaggtggcaatgccataagaaagtgagggctgatcgaccgtggacagacttggaactcccctctcatcccaatgatgctatggcccttttctcagcaatagtagtgacagaggttggaaatggtaacaacaccctattctgaatggatcaatggatagatggaaaatctgttcagaacctggcaccaacaattttgctaatgtctcagttagaacaagaggaagaaaatatgttgttgaagtcctgaataataataataactgggtcaatgacattcagggtgggctttcctggcagcattttgcagaatttttcagactctgggattatgttcaagaagtgaccttaactgaacaggaagatagacacat

SEQ ID NO: 136890 - DNA, 771 bp, Zea Mays
ggatacatgagtctttttacagagcacagttgtcagctcagattgctctgcgagcgcatcggctattggatctccctgtcttcctgctagcagccggtgccgactctgaggttcacctctcctatctgcctggacttctcactcttttgactaccagcggcagatatgttgaggaatgggtccgagttttctatgctactgtatggatcgaccctgatcaccactggatgagattccgatttgagcgagaggatgttaccattcatgccagtcagattcgtcagttgtttggattcaatgagtcatcaacttgtcttcacagcatgtgctatggcacctctgaccctcctcatcgccctcatggtggagttgctcctggcacagctcacattgcggctttgttccgaccgcccttctcagatgggtcgtgatgttctccgacagacttcaccacagcggccaagtttctatatcagctcatgaggcggacgcttctgccacagatgggttacagggaggctgccactcatatttagctttggctcctaggtgccctggtctctcactccaagtttgacattgtggatttcctcatttgtgagatcgaggacaccgtgttggatggacttcgtgcccggcgtcagctgccgtatgctcactatctctgccacatcttcgcatagctgatccagccaccgcagtttcagggcactcttgaggcctcacgcctacactttgattcctaccgtccagccccagaggatcctatgc

SEQ ID NO: 136891 - DNA, 459 bp, Zea Mays
gagaaaatgagagatatggcgatcgagaggtcaaacgacgcgaaaacggcctttgaacgagaaatagtgccataggaggtttggaattcgaattgaggcacgaaatgacgtggaatggagccgatacttcatgaataggtttatatgggtaaatatgagtgaagtgtgtgcttggtttgaatttaggcgaggaaaatggaatttgggcactcggctcggaaacgatcgctcaaaacagagaatttggtgaaattgaagcctggtatgtccgattggtgtgaaatttagcgaatatgtaactggaggtgttgtgaaggtgcctgaaaaatttgggttcaatcggagcatttttggctggtttggacatttcaccgaacacgtggcgtgcggtgaattaggtttttggagatatggccatttgaggattgaaaccctcccaaagggagctagaaacctgca

SEQ ID NO: 136892 - DNA, 420 bp, Zea Mays
ctatgttctgcatctgagtccaaattcacaggtatggaaggtatattattcgaaccctgcaatggtgtactggtattggatggtggaatgcaatcaggaaatgggtttacttctggtggcctaagaggattcctcacaaaattcaaataatgattccagtacatagctgattgagaggccggaatcatggaagattgggaagaagtattccctgtatgcatgggtgcccacatagttgtcggaccttgagcagggtttggaaaattcagatttcccacgaggttacaatccatagcactctgctgcatgtaagccgtgggccacatagggggtggaggaacaaactgctggccaattgatgagtttgacatggactgagaagaagtcgcattgtttgatgggtcctttctagtaagggtg

SEQ ID NO: 136893 - DNA, 592 bp, Zea Mays
attaaagataggctaaaaagattgtttatgtgcaaggatatagcacctctcataaggtggcatgatgaagagcgcataaaggatggtgcattacgtcatccagcagatgcacccgtatggaccaggttcgatgaaaagttcccattttttgcatcagactctcgtaatatttgttttgggttggctacagatgggtttaatccatttgggatgttgagcagtactcatagttgttggccagtagttttaacattatataacctacctccgtggttatgcatgaaagatcataatcttatgttgtccttattgattcctggtcctaaaagtcctggagacaaaattcatgtgttcttagaaccactattggaggacctgaaagatatatttcagaatggcatgtccacatatgacgcatcgagagatgaactatttaatttgcgaggggctgttttaatgacgacaagtgacttgccaggtttaggaatgctctcatcacatatggttcaaggcgaatttgcttgcccgccatgtggtgacaatgcatggaccaaacgtctaaagcacggtcgtaagtcatcttttatgggac

SEQ ID NO: 136894 - DNA, 364 bp, Zea Mays
cagggggtcaggcagccacattggagacggagtgggcgacgtgtggtcgctgaggaagaggaggcccttgcagcggcaccgtggaggcagcgctcggtcgaaaaggtttgtgtgggaaccgacagagggacgtcacggcagccggaagagccaaatcagagccggcagagctgcgcgctgcgacgacgggacgagggaaggagaggcacagggaggaggcgaggctggtcaggccgacggtgagaagaaagatgggatttgcagcgaggcgggcggtgtcatcggagggagtagccgagtagtacaggatggaggagggtagagaacacaacacccgtcacaggctcacaactggattgaagga

SEQ ID NO: 136895 - DNA, 477 bp, Zea Mays
gagagtatgaacagacctagaacaagctagccatggcaagggttctttcacggtggcggaaaccggtttgggggaaaagagcaatttgtgggctctggtgagtaattgagggcacaagcggttggattggatgctggattacctaacggagccgagggggtgctcaatttatagcgttcttgagcggtggctagtcaatttgatggagacgcgtggcggccggagaggaggaggggcactggcgcaaacgattagtggctttcaccgtggcggactcaccggcgacgagccagtgatatagagcggtttacggcgacgtggtgaagcttcagggcacgtggcatctgatcgacgggcggccaactccggtgaacttatctgagccggccgcaaagcaacaggggtacggcggccagcctccggtgttatcctgtggcgaagatcttttacccagaagtgttatccggtcaccgatga

SEQ ID NO: 136896 - DNA, 303 bp, Zea Mays
cgggtagaacgtccctacatccagtcatcggtgacttgcgctaccggcaccattgatgatcaaactcatagtaggggttacaagaagtcgcgagagggaggagaggctcctagatctcatatcggggtggaagtggagcttagaagttgagaggtggagttctagctaagtcttggcttggtggggctcctgcctcctggtcctcgtcgacgctcctcctcctgttcgtccttgtgggctgatcttcgtctaaagacgtccggtcatccctaagtctatccttctgttccttgatcggtcgac

SEQ ID NO: 136897 - DNA, 503 bp, Zea Mays
tggggattgagctatgcggccggggcacattgctcgccggcgttcactgcctcgtggcgccgtcgctgttggggccgtcgctcagctcggtctggggtaggtgatgatgcgagggccgttgatctccctgtgttcggctcagattaaatggtccatgttactttggcccgatccgatctgaattgtggatatgaaattgagtggctgagattagatcatgaaataccggtttgtccaattagatccgagccgtcgatccttgatcctatggttctgagagcttaccggttcaagtgagactgatttaatttgagcccttggtttagatcggacggccaccattcaacgataccctttcggctgcgtgtttttcaaaagagtccctgtactatataagaatcaacccgccatcctacgtgactatgctctgtgtcttaggagttttaccccgagccccctgctgttctcagattttgaggcgcagtccaggaattaaataaaac

SEQ ID NO: 136898 - DNA, 529 bp, Zea Mays
gggtaagccgccataggtgttgtgcaggctacaggagagccacgcccgaccgacctgcacggtagccggtagggacacggtgaggggttgcaggaaggggcttggctacgaccatggtgaggttgcggggagacttcaggcagcacgcggaggggctgctgccgtgcctaggcgtgcgagggacttcagtgatgggcaccggtaggatcaacgaaggaggaggggagaagaagaggactcaccccggtcatgacgatcggtaaccgaaggggcgcctgctttgtctgagagaagtggaggagtgggcgggacatgggcgggcagttggagaagaggaatactaggaggggaaggaactgacgtgcgggaccctctgcgcagccaacagcctggagcagcgtgatgctaggcgcgggatgggctaggggaagcaacgcggcatgggccgggcgcgaagcgcgcgctgctgctggcgggctggcgaggaggtggagctggtccgcgcgcgcaggccggccgggggtaaggg

SEQ ID NO: 136899 - DNA, 578 bp, Zea Mays
ctcgatcgaagatgccacacgacaccactgactgccacatcccatgtgctcgacctgcttgctagcttctcggcgcctcggcggccacttgcaagttgcaacgaaaccatgcatccatccaggctagcaattcaaagctaagcgcaaagcaggcctgtgagagggtccacgtcatctcctatgttctcagccgtccgatctttttccaacggccaccaaacaacgatcatgagcttctcaaaatccgaagaacagtgtcgacgcctctcctccctcacatcagcaccgcaccaccgccattcccacctcgcccagctctgcccctggcccaacgcttctcctctctcacctcatcgccgcaccaccactgcaccacctctcccagctctgctcctggcctcgcccgcagcgatgccaagccctcgacgacgccactgctcgccacgaccccgctgcagcgctgctccagcctctcctgtcgtaccagcacaggcgaccacagtgacggcccctctgcccctggacctgcccgcggcaacactaagtcctcggcgcagccgctgctccatcatctcctg

SEQ ID NO: 136900 - DNA, 478 bp, Zea Mays
gccagagcgacggagtggtggagacaaggtagatgccggaaaccgcagagggtagagtggaccggagctatcacatcggacgatctctctccgagagtgaaggtccttcacaaagcaaccaagaggatcaaattccacagaacaattattgtcagaggtaaactgtcgaacagaaatgaggttcttaataagacttggggaaacaagaacattattaagacgaagagaatctgtaagaacagcagagccagtggatgtaactggaatagaattcccattaccgacaataatagaggagggaaaagggtgttgtaaaggagtggaatgggagagagtaccggcatcagaggacatgtgggtggttgccccggagttgaagtaccactcattttgttgaggggttggagcgtcatggtgttgaagttggagacgagcgattgctggtcccatgatggcatgggaacaacctgatgggggg

SEQ ID NO: 136901 - DNA, 677 bp, Zea Mays
ctcaatcgtgaacagatgggcgcggaaatcgcgggggctcggccaacggctccgtgaaccatggcgtgatccccgcgcggacttcctgacctcggtgcataagaacggatccgcacccgcccctcttccatccgctcaccctgttccaagccatggggcactgtgaatttctcgccgttgatgaatctttaccgcggatccgcccaacgtcgtgggaagccccgtatctatcgtccctgtcgctaagaacccctcctgtatattcgtgatgacctcagcttcgagtaggattagtcgacggtggtgtttgggcgccggtctgaagaatggccttgggcagcaatggcaccgccgtaagggagtgcgccgccgccgcctggttatgtcgtgtggaagaaatgggtgcgaccgttggatcttggatttacggctctgatcgaatctggtgatggttgatcgatggccgttgatttgcagatgaacgcgcgggattagaacaacttaccccttcacctcattaattaacgaccgtagatcgcgaatccaacatcccagagtgtgtaccggttcgcagtggtataagttctaatcttgatcgttcggtagtgatccaacggccgagacttcaagatacccctttgccgcggtctttttctaaaatagcccctccacttttc

SEQ ID NO: 136902 - DNA, 405 bp, Zea Mays
gctctatataggtcagatcaccctgcacactgagttcttccattggcaactgttcttgtgggactctgagacacttcttcagctagcacacatggaacacatcatgtacatctgccagatgacttggtaactcaagttggtaggccacttctccaacttgcttacgattttcaagggtccaataaagcgaggggacaacttccgtttgactttaaatcttctcatacctcgaactagtgacacttttaggtacacatgatcaccttcctcaaactccaactgtcctcttcgggtgtctatataactttttgccttgactgtgttatcctcaggttctccctaattatctgaacatgttccgctacttcttggataatctctaatctgaagcattgtctgtcacca

SEQ ID NO: 136903 - DNA, 410 bp, Zea Mays
caaaacgcagcgatgatgtagtgctgatatatataatgcctcgtgaaagctgtgccgaaatgcgatgctgcttaatactaagcgcgaaaggtccacaggatatttggccaacacgtacgcgtacgtctcaggctctcagctactgtgagagaaagcgcgcgcatgcaacacatgcatgctgaactttttgcgaaaataatacgaatagtacgtacgtacgtgggccatacagccaatctcctgctacttattggttcttcgtcaacttgcaatttgaatacacaaagaaaaagaggcaccagatgagcaataataatgagaaaggatagcgcaaagagcatgcaatgcaagagcgcgcgtcgtccattcagacccctatctgctccccggttaggccacacacaggcaat

SEQ ID NO: 136904 - DNA, 650 bp, Zea Mays
tctaagaaaagaaaagaagggaaattgaaaaaaatctgaaaaactaaaacaagatctcccagcccgatccttatcgccgccttgccgccgagttctaaaaaaatgccgctgccgtggagattttttttctcctggattttttctaccgaccgcactctgctggtcgccaacgcgctcatctccctcaaccttatctcctgcgctgctccagctcgtagaaaaatcccaacgctgctctctcccggcgttctcctctcctgccgtgcccatctccctcctctgctcggctttcctcctccctctctgctcgccgaccgagctccttccctgcagccgagcttcttcttccacagcccgccgcgcctgctccctttatccggctcgtccccatggcgactgctcggccctgccctcagccgcgagctcccaggtgccgcgcgcgcccctggcttggcccagcgctccgttcctgcatcgcctggccgcgattccccaaccatggatgcgtgcagctccctggcatttcctccctactcggttcctatgcgtgctcgccggccgaagctttctagtgcgctcgtccatgcagcggcgcccctgctcaaccgcgcctggccggttctccctcggcgaattccagccgagctcgc

SEQ ID NO: 136905 - DNA, 563 bp, Zea Mays
atacacagagagatatggcacgagacgggacgatcaagaagtcaaacgacgtgaaaacgacgtttgacagacaaatagagacataggaggtttggaatttgaaataaggcacgaaatgatatggaattgagccgatacttcacgaataggtttatataggtgaatatgagtgaagtgtgtgcttggtttgaatttaggcgaggaaaagggaatttgggcactcggcttggaaacgatcgctcaaaacgggaattttggtgaaatttaagcctgggatctcggattggcgtgtaatttggcaagtgggttactggaagtgttgtgaaggtgcctgaaaaatttgggttcaattggagcaagtttggctggtttgggcatttcaccgagcacgtggtgtgcggggagttagggttttaggaaaatggctatttgaggtaggaataccctcccgaaggagccaaggacctgcaggggtatgaagtagggacaggggaacacaatccaccaactggatgcatgggatttcacagaaatttgaaatagatacaaagggtggtgctttg

SEQ ID NO: 136906 - DNA, 549 bp, Zea Mays
ctatggtggctaatcggaggcaggagcgggtgctctggcttcgtgattacctagcggagctcgcgacatgctcaatttatagggcccaagggcggtggctcttgaatttggaatggcgtgctggcggccggagaggaagaaggtcactggtggctcaatcgtggcgttcactggtgccgcggttcagagattgtattcctaggcatgccacggttactaccgcacagtaaagagccacgacatggcataactaaggtcaccggagtttccacgatgacaccggcgatccggccacgtcgcatggctataggcgcggttgataagcttcaccccgcgtccaaatccgctccccttctgatcttttcaccctcccggcactatcctgcccgagtccagcatgaatcaccgcgatcggcgcgaatccttgcgcaaaggtcaccggcggcgaggaggactgatcctgaagatcttttgcgcactgtaccatcagaacaccattcagaacacctaacagagcttatttgggggcgatttgctccaaatttcgtg

SEQ ID NO: 136907 - DNA, 574 bp, Zea Mays
gggtaatagtggaggatgtcctcatcagattttgcccaaattcgcttggatttttgacctatgagcacttgaaactgactaaaccaagcgggccccatgttcgatggcttgtctggccggccgagcgcggaatgcatgtccccgcacactgtcggcccgaccacgtgctctctaccgcgcctggctataaaggccaccatgcggcctcagttggacgctactcgtcccctgctacagcgcccaaaggattgtcggtggtgatcgcctaatccgagcctgctctggcgcccgccatcaccgtcgagccacttcttgcgtggccaagccccaacgaccactctcccactagcccaagcacccagtcgctcccccacgccttgccaaagctcatcgaccccctcatctgagctctactatgccgaggatctcgccaccccacgtcgaccgatgtccgcccgccagaccatgtgaatcggtgagttcacaccaccatcgtcaaattcgagctactactagcttcaccgagccctcatgaatctctcgtgcccttccccgagcacactactgcaccgag

SEQ ID NO: 136908 - DNA, 371 bp, Zea Mays
aacttgtatgccttggaaaatggaagctttattgataatgaaaccttctgcttataaagtacaactcgtcctcaagagttttgaggcattgctaggggtagaatttcctgaggtgctcaatattccatgaattctccacttcggtgtcatccatctgggtgagccggtaggatcccagtcatgtgacctctgcgaagatgaatgatccttcccacggtggtgatagtttgtgtcgtccctcccccgtcagcactcggtggaggaccaaatctcccactgcaaaggatcgatgtcgcactactttgtcgtggtagcgcctcagggtctgttggtatctggccgactgaattaccacatttagctgttcttcc

SEQ ID NO: 136909 - DNA, 576 bp, Zea Mays
ccgagttagtccagaaatgtgaagcttgccaattcttgtcaaagcaacaacatttaccagcacagcagctgcagaccatacctatagcatgaccatttgtgtgctggggattggacatgattggacccttcaagaaagctcaaggaggctatactcacatactggtcgccatcgacaattcaccaaatggatagagtacaaacccattgcttctctaacttcagctaaggcagtggaattcatacaagacataatatttaggtttgggataccgaatagcatcataactgacttgggatccaacttcactagctctgaattctttgatttctacgaacaacggagtatccagatcaagtatgcatcagtatcacacccaagagctaatggtcaggtggaaagggctaatggtatgatactggaagcactcaggaagaaagtgttcgacaagaatgaaaagttcgcaggaaagtggatcagagaattgccctatgtggtttggagcttgaaaactcaacccagtcgagctctacatggaaacacccccttcttcatggtctatggttcggaggcagt

SEQ ID NO: 136910 - DNA, 567 bp, Zea Mays
agcccacaagagagctcgctccgtattctgctagatgcatttatgagaaattgtagttggagctcccatattaataatataatggaacttcatccatgtctgaaataagtatgttctttgttttttctataaaagtgcttgagcaatcaggaacagatagtggagttacttgaacgtgaaaaattggagaagaagccgcaggatccagctgcagaaccaatatgtttgccaatagaatttttgaaagccatcacatgcaatttttcaactgaacgagaacttggcagggtgagtacggagtagtgttcaaggtatggccattcttctatcgctccaattttcaactgatgaaaacagtaacagataattcatggctcacctacttgctatgaagggagttctgcattgagctgtcgtagagagcgcagacaggcactctagccaacgttgttggctaggattgggacacaaaagcgagacgagggatgagaagcacaggaggagtcagtctgtcctcatcatcgatatatgcaagccatccaggtgaggtgaagtggcgacacacag

SEQ ID NO: 136911 - DNA, 350 bp, Zea Mays
agggacgaaacgaaacgaaactactagcctccctctcccagtttctccccctccctatctctctgtccctgcttgcattgctcgtgttgacgcgcctgcaagtacgagacagcgagcgggaggaagaagaaacaaaaaggccggcccccgatgctagctcgccgcaagagcactaccaccacgccaatccattgaggcggcttcgttagcgtagcggcggccggcggtggaagctaagtgtaaagcggccgcctgctcggggggataaaagctacaacgggcagcggcaggaggaggcgtcgtctcgaggactgcgcgcaatgcccctgtcgcggcacacggtcgggaac

SEQ ID NO: 136912 - DNA, 290 bp, Zea Mays
gtgcccctagggatcgtccagctcaaagaagatgaatttcgggaattaactcaaggagggagatctgtcagtgaatatgtccacaagttcacagaattggctcgctatgcgcctgacgatgtcagcacagaagccaagaagatggcccgtttcttgaaagggctaagaccagaactcaacactatcctcgccagctaagattttctcagcttctcgcacctctcaaacaaggccatacaagtggaaagggctagagaagaagaaaagggtcacctcaagagaaagtttca

SEQ ID NO: 136913 - DNA, 474 bp, Zea Mays
cacggcacaccctaaggattatataaggttagttagtatagtgatataaatactgatttttgaacttggcatttaagaatttagtgccggattaagctgaaccaagccaaaccctatacggatgcagatctgccgaggcttgttgcatcacgagctagctagtattcagttggtcatccaccttggcgtcagcacaccaggaagtgggttgtacgtgttttggtcccagagatggctagagatggactagactgatcccgtccatgatagctagcattcggatggaggacgagctaggaaggaatccatctatacccgtgtccactccagcagtgtgtgcgtacggacctcagaagcccagggaagataagcaggttggaccgtacatgacggttaaacttgatcctgccatgcactgcgcccatctcatctttacttcgtcctccttcccaccaacacaaaattgttccatgc

SEQ ID NO: 136914 - DNA, 640 bp, Zea Mays
tggccttgcaaggtaactggcccaaagcctctcgtgaagccttcttgccttctagtggacccgggggatatctgtcccccacaattgccatgctccgtcatcccatgattcttgtgcctccaatgtgtataaatctaggctgcaaccccctggcctccttgtccaactcgtgccaaaacgccagcgccaccatagatgcataggagcagaagggaactcgggagggtgagagaaatcgttgtcgcgggggagatcggagtccactgtcgtttcacttctggggcgaggctcgggaggttcgtgagtgtgtgcggagagtttacacgaagttgtcgagctcgtgggtcgatgggtggtcgggaatcactcaccagatttgatcgccgccactgatccacacctcgtcgtgggcagagctctccgcgtcgtaccacctggtaaggcacccactaatgtgtttgcaataatccatgtatcatgtagaacgtgtcagattgaagtgtagcataccagagcaagtgttggtccacgcgtcggtggcttgccgccatgggagccctatacgccgccgtgaacgttgatgaaagggagaaggagaacataagggttgagattagatcaacagatatcgtttgggtca

SEQ ID NO: 136915 - DNA, 444 bp, Zea Mays
cacaggcgtatggagttggtgcagagctcgattggaagtatggagtcgacgatgaagggtgtgattgctgagcaaggagaaattcagaagtggaagccggaggtggaagcgaagatgaacctgattgcgggggcgttgaaggacattcagggtcaggtggagtatcttggcaagaggtcgctgatcaaccaaccggctgtggaggagcaaggagggccggggggagcggtgctgcaggagattccatcagtcgagattccgtcagcccagggctccctgcatccagcgggacattctcatcagaagcctgggacaaacatggaaggacagcgcctgttctcgtcattcggaggtacgaatcacagaaacccccagacaccttgcaattggggatcggtgctgaaccaatcagtgggtaattggtcccagggatcgggatcattg

SEQ ID NO: 136916 - DNA, 557 bp, Zea Mays
gccacttctaggtggtgaaggccggtggtgacaatggagtctgtgaagggagaacaagggtggaggtcgagaggtaagggaggggagtcacgtgtggaaatgaccacgggcgtgggaggtggggtcactgcaggtgagcattgaggggtaggattaaagaatttcaagagattttgtcttagtagagtaggaataagttaatcaaatcgtgatgacaatgccatggtgatgagtacccatacttggggtaccctaaagaacaacacgaaaaatccgcagctccgcataatctaggaagaccgccaatcagggtaaccccaatcgacaactccaacctaggaagaactggtcaccccgatctagtccctccgacctaaatctccaacctagtcaccatgatcagactaggtccacctagggaagggcttcccaacagtccctgattgggccacccaacacggtcggacccgatcacgacatacccaataatcactcgacctagtacattggccaaattgtcaggcgagacccaagaaaacataactaggagatcctca

SEQ ID NO: 136917 - DNA, 327 bp, Zea Mays
gtacaaagtggaccaaaacaagggcgagctcacggtggccaaaaacaaaaaatacacaggcatccattaggaacacaaggacaaaatagccactaagctagatatccaggaagggagcagttaggagtgaaatgcccttagctccagctatcttccaaagtcttctctcctctctagcttggatcaaaacatcaacaatattgggagactctgcataaaaaacacaatcatttctatgcttccaaagcacccaagctccaaggatgataagcgagttgagtccttttctaacttgacccacagcagcctcatcagcaactccaccat

SEQ ID NO: 136918 - DNA, 284 bp, Zea Mays
gctcagtctggtgtgttggaccactcgagttcaacagctacttcgagattcaacggtcgactccaacgactaaccgatatggctgttggcctggtgaggtccggtggtgcatcaaactagtctagtgctagcgtagaaggaaggcttcagacaagatcatgatgattctgttatagcaagaggtctagtggtgcaccggtccaatgcatccgagaaaagcagaattccagtaatcaatccaacagctcttttaatgggtttgaggatataaatacccctcccaa

SEQ ID NO: 136919 - DNA, 896 bp, Zea Mays
tagtctctgatcataggtgctacaactagaataacgaggcagatagaggccgacatgaaagccaacatttcgtcgcttcatctaaccctaggcgccacaaactcataaatgacatgatatgatctcctatctagcgtgcgcctcagtgaccgaaaatcgtccaatctatcaatgacggccattgatcctaatggttctacctcgttgcccactgacgcatgcactctaaagtcctaacgcacaaggagagtcgagcccaagatagatgcactcatcaactgagacccattgacgatctgactcacctcagacccgaaggtatggtcctcatacactcctctcctcccccaccttactagtgcacaagccataaatctttgatctatccgaaataatctagacatgttaatagtgataaatcgcataatcctaagacaagaaagttttgtcgctcctatccttccacagctccacccatgctcttcgtctatctcactcacgtcaggtcgcaagtggaggcacaactcctcattattgtgccaaaagttttgccccatgaaaataatatcttttgatttgacatttgagtcagaaaaagaaagtggtctcatgagatgagattcatgaaccaatgcaactgtataggaaactctagtcacctcccacaagatacatgaattaataaacatgctagcatttatttcttttgtccttagataaatgaaggatttcttaaaaaagaatcataggtggcactagtcacaaaagcataatataaaaaatgctaagaaagtatattaagcaatatcaagtgtcaataatatgtcgtaccattggtatctagatcatgccttattgagaaggacttgtgtgaatgggcccatgggctcgatcat

SEQ ID NO: 136920 - DNA, 542 bp, Zea Mays
cggctatagcgaaagatggccacttgtctagatctcacatacagcaaggccatgagcacaacacttttggtggaggccaagaattcggggcagggaaagacaaaaatatttgggcatgaagggggtgaaggatcctctcaaggatctaagaaggggtgaaggttggtgatccgtccctttaacccaaatcactcttttcctcgtccacccgcctatcctttaagttacatccgtcccactgcccctgctcaaaatattcagccgagtgcccctggtacttgtttcccagccctacccagtttatctaatagctgcttcaactgtgggaagtctggacaattcatcaagaattgtccctatccgaagcaaaataaatcaaacttccaaaaggcttctggaagcacatctcaaggcaagggaaatgtggcaagcactcaggcaggcaaaggtgaaaggaaaactgaatgagtctactatactctaccaacctagaaggagagcctgtgatgatgggtacgttttccattgccaatcatcccgcc

SEQ ID NO: 136921 - DNA, 429 bp, Zea Mays
gtccgccgaagcgatgaatttgatgatgaaacagctgcattgccctgcactgattgcataccacaagaaagggtatctgtttgcaacagatctaatccaataatgaagtttggtagtttgtacaaggatatgaaagaattcagattggctatgaggcagtatgcgatgaataatgagtttgagttaggaattgagtcaagctcacctttcagatatcgaggttattgcaaaggaggtgattgtccatggagaatcaatgcaaggctacaaaatgtcgggtctcccattgtcgttgtgagtaatgttttagcacacattgtttgtattttggatcatggatgaaattagggaagctcacaatgatacctttgttttgtgcgcaggttacagttatcgtggatcggcacacatgcacttctagtggtcgtc

SEQ ID NO: 136922 - DNA, 406 bp, Zea Mays
tgggggtggaggaggacgagggagggagcgcgattacctggaactctggagcgccggtggagaataccgatggccagacgagcgggggaaggtgaggtttttgggggaagagagagcgcgagattgaagacgctggggaggagggagcgtgagactcggtggcggagagacctagaagaatctgcaaacaacggacacaggggagaatggcaccactggataacgatccaacggccaaggacttccggattccttgctggtttaataataaggaatagcaggggaggcaatgcggcagggagctgaactggtggctgcgtccgtcaaagcggcagcgtctggtgcgagcaaaaaaaatggcgtggtgatgctgctgcctggtgggcccaccatccatagagtcaag

SEQ ID NO: 136923 - DNA, 825 bp, Zea Mays
gccgtaggtcgcagccttgaccctaaaacttgccctaaaaagaaaatatctctttccccaagaaaagtcttctctcctcctccccgattttaacagacccttcttttcctattccagatggaagactctctggccattaggacatcctactgctcggaggtggaagggttcccacatcttttgcgaagttgtgcgcttcgcatgggaatccgcaagaagccggaatacgtctggaaggagtatctcaagggcggaatggagaaatgctctatggcagtctacctgggagaaagccgaaactatccgaaccatccttccttccaagtcacctttaccggataccacttcccagatacttgccagaatgttgcccgaacagccctccgacaactgtgccagaactacaacaaagtgatctttgaacccccccttcgctactttccaccccgcaacaagaatacccccacctggaggaaaagacttcaggccctgtcagaaggagatcctattgaggatgatcccaccatcgtctacatggctggataccttcacacccttgataaccaatatgatgacctcaccctccactgcacctacctaacctcccgggtggaaagcctggagcaaaaagttagggaactttcaggggagaaggcgtcccttcaagagagcctcgcaatagctgaaggcgaggaaaccaatacccgtgaagcttaccgcaccctaaagatggactatgacaagaaactgaagaagctcacccccgcaagaaaaatacgcaagaagaccaaaagtcaaggatgtcagactgagcagaaggaagaa

SEQ ID NO: 136924 - DNA, 349 bp, Zea Mays
gcggagcggcgacaacgtaacagcgaggtcagttcagcctggagcgcgcgcgcagctttgcaggggctcggacgaggaacgagcgggggctttgggcgccagcactcggcaccaggggccgccatggctgcagtgtagaggaagaagaaaagcctgtagaagaggggagaaggagatgatttgtcacctgcgcatgaagaacaacggagcaggcacgcaaggaagagggtgacgacggggctgctcctctagcgacacgaggaagatgacgaggcggctcctccaaccatggcaacacaacacatagagaagaaagggcgtaggttgctgctgtgcgagaaggaagagg

SEQ ID NO: 136925 - DNA, 638 bp, Zea Mays
gatttccacatatggattgaacagattcttcctgcgatggttcgaggctatgtcccttagcatgtctggctagcgctttcagagttgagatatttcttccgtcagctttgtgcaaaagatttatctcggaccgtggttgcagacttggaaagattggcacccatgttactgtgtaagcttgagaagatatttccacctggcttctttaatccaatgcaacatttgattcttcatctcccctatgaggcacgaatgggggggcccgtgcagggacgttggtgctatccaatcgagagatttctaaagactattcgaaagaaatgtagaaataaatgcaaaatcaagggttccattgtagaggcatacattctagaggaggtgtcaaacttaacaaccacttactaaggtgacaaactgccgagcgtgcataatccaccccctcgttacaatgatggcgacaatgaatcgaatctcagcatatttcgaggccaacttggaagcgcaagtggctcgaccaccaagaccctaacacatgaagagtggcggcatatcatgctatatgtattgaccaaccttgaagaggtgaggccatacatggaacaattcctttatgaattctggcgtcgatcaagggacca

SEQ ID NO: 136926 - DNA, 404 bp, Zea Mays
gtacatcaatgtcctccagcctagtagcttcggcttctgctatgctttcgaagaccaacctcggcgccccgaacttgagatcggcgggtaatactgcctctgacccatagaccatgaagaagggggtgtttccatgcaaagctcggctaggttgagttcttaggctccaaacaacgtagggcaattcccttatccacttccctgcaaacttttcattctttttgaagacccttttcctgagtgcctccaatatcatcccgttagctcgttcaacctgcccgttggccctcgggtgcgctaccgaagcatacttgatctgaatgctcttttgctcgcagaaatcgaagaattctgaagttgtgaagttggatcctaagtcagttatgatattgtttggaattccg

SEQ ID NO: 136927 - DNA, 449 bp, Zea Mays
aaggcctgcacgacgacctacaccaactcatcctcaccaccaccgatcgagaggctccaccttcgacattgccttcaccatcatcgtctctgcctcgcacgctctcgacctaatcaatcaattatgtgcgaccatcctcccatgacgtatgttgtctactgcatgcctctccaagtacaagggttgtcgttgtgtcacctcctcaagaagcaacgtcgttactgcttgttgccatcctagtcgttgcccctacattgtcgtcaactacttcgttgtgtgcctctcacacatggactaccccaactgttcgtgctcttcaccttcttcgagtacaactatctcaacactctagcaccatcgcgtctctccttgtgtggtgcggctctctcacagctgcaactccagaatcctagatgtgtcacccatcacttcttcgacttcatctagca

SEQ ID NO: 136928 - DNA, 625 bp, Zea Mays
ttaacatctccaaactctaacactaaaacttagagcgatgtatataatatataatttcgtttcctctaaagaaaatatagataagatgagaaaatattttgccttttctcttcatttgtacgtcacctatcagctttatctccacgttgatcatttttttcactggagctgttggtcttatgatcttatccccgtcgtgggatattttcccttccgctcactcggctgcctcccgttcatctccctcctcttgatatttcttaccgccgcttaggcaatggaaaaatcccagccgcctggcttatctcgtcgttccctgctcagattttttccagcgcgcgtgagcttccttatctccttccagcgcacgcagctgctcctcctcagcctcctctgtgccgcacgccctccccagccaaagttcctctcatggcgctcggctccttcctctccctctcgctctcttttggccggtgcttctctctctcccttacttccctcccgtctcctctctcttatgcgcaatttcggggcgaattccctggccgcgtgtgctccagcgccgcgctctgctcactggtgccgcgagtccggccggagctcccctgccttccatggccgcgcc

SEQ ID NO: 136929 - DNA, 1293 bp, Zea Mays
ttgggcgcccggatgggtcgtatggccacatgcgcacggtgccggcccagggatgggcgaacgacgggtgcatgcctggtgaagaggttccctgcccaccatgtgccgcaccagcgtgaggtgcaggggggcgccgccggtgttggttgagtggccaccacgtccattgcgtccgcgacgacggccgttgcgttggccaccgatgggtgcattaggtcgcgcaggggtgcaccgggtaccgctgggcgcggcgccgcagcgacaagggtagcaggcggggacagagggcgtgcgtcgatctccagttcctccatcaggaggtgtgtccgggcttccgcgaacatcgggaacggccggtgcatctttagtatggacaccatgtggcggaacttgccgctgaggccgcggaggagcgtgagcaccatctggcgatcgccaatggggtcgccgaacttggcgagggacgctgccatggactcgaggcggcgacaatagtcgttgatgctcagagattcctgacgaaaggtgcggaactacgtctcgaggagaagagcgcgggactccttctggccgaggaattcatcctcgaggtagcaccatgcatggcgcgctggacctgggcgcatcatcaggaactgttgtaagtcgccggagacggtgccgtaaatccatgtcagcacgtagcagtccgcctggacccaggccaagcgcgtggggaaggattcgtcgtcgaggacatggcgtgctaaggcatatttgccaagcacggtgaggaagatgccacgccacttggtgtaggtgtccgtggccttgtcgaggacgacggggatgagggccttgacgttgacgacggcggtggcctgcgcctagagagattcgtgggccttctcgtaggcatcgagagtagcagtgtggaggagagcctcctcggcctgacgcatggtgtctacgcgggcggcgtcggccgcggccgtggtgtcgtcgtcgttcgccatgggaaacgggaccagcgaccgagcctgatgttgacgacaacaacggggcgggcgatcgggagtggaggaaggagctgaccgacgaccacacccggcgagaaggtcagcacggggcgggcgatcgactgggagtgctggtgatgtgcggcgtcgcgtgaggccggattgacagcacagcgctggcgattagattggcaatactccaggcgatggcgtctgcgactggagcaacgatcggatcagcgacaggcgcggaataggttgcggaagagtagcggatcggaaccacgattgatac

SEQ ID NO: 136930 - DNA, 396 bp, Zea Mays
cacttgcgctttaaaggtttttttaccttcaggaagctcaaccaatttccatgtataattcttttaaaggctctcaaattcatcattcatagcaactaaccacttggatgaatcatcacatgagataacttccagataagaagaaggttcaaatgcaatgagagcataatgagccatactaccagtgtcacgatatcaatgtggcaaaacaatatttcttctaggtctatcttgattaataaggtgattgttgctaataggaggtacagaagttgaaactgactttgtgataggagtaacagaattaatattaacaggtacatctacctcaagattctcatcagtagtttcaggcatagatgtggatgaggagccactatcagaaacacctccagg

SEQ ID NO: 136931 - DNA, 836 bp, Zea Mays
ggctccgatagcatatcctcaggaacgacatcttcaagggcctgatcaaaatccgttattgacagttcttgaaggctgataagagcggacagagctagagaaggaatatcactattccccctactacctctgtaatgccggctattcttacgaatcagcgggacttcttcttcctcttcttcgtcctcataaaaaatacggacaatagccgatgcacgatcacacccattgggatcaatttcaacacggttacacccattgggttcaacttcagcacggttacacccattgggatcaacttcggcatggatgccaccattgggatcaacctcagaaaggacctctactggcacttcatcgcaaaccagagcagaaggtctggcatcctagtccaagcatgatagtcgccgatgtcgcttcttcttcttcttcttttcctcaacaggcacaatcggacgactaacttggcgaggacgctttgggcgggtaccctcaggctttcgggtctccactgttttgttaagctcttgtccaaccatgatagccgtcggcttagcatgggtcgagtcagaagactctccagccaacatactgagtacaacatctatttctgcatcatctggacttgctagcatctcaaagtgaatctgtctctcatcattgggaagatcacgaaggtgagaaaccagagcctcaatgtcctcaggagagggtcgcgctctaagacccagaccaccatcactagtaggagggttggccacgaaattgaaaaatgacctatgaggtggcagattccaagcagaataggcaacaggagcaccaacatttgatatctt

SEQ ID NO: 136932 - DNA, 340 bp, Zea Mays
tgatttttgaaaagtacaatcttatttttgtagttgacttatagaaacgtaattggtgatgtgtactcagatggtccaacctttttatttttaaaagtacaatcacatttttgtagttcgcttatttaatatgttatgtgttgtatgattctaagataggagtgagaggtacataggaatgtcttaatgctattgccccttgtagtgtgcaactagacttgggtagaatagtcagaaaaatattgaataggaataggacaacttggccagtgagaaatgacatacaagtgacaaaaaaggagaagataattttggtgtttagtgaccaccatagagataa

SEQ ID NO: 136933 - DNA, 616 bp, Zea Mays
taaaaagtgccataggaggtttggaatttgaattgaggcacgaaatgacatggaatggagccgatacttcacgaatatgtttatatgggtgaatatgagtgaagtgtgtgcttggtttgaatttaggcgaagaaaatgaaatttgggcactcggctcggaaacgatcgctcgaaacggaaaatttggtgaaattaaagcctggaatatcagatgggcgtgagatttggcgaatatgttactggaggtattgtgaagatgcctgaaaaatttgggttcaattggagcatttttggctggtttgggcatttcaccgaacacgtggcgtgcggagttttagggtttcggtgaaaagactatgtggggtggaaaaaccctcccgaaggagctagtaacctgcaaggatactcaagaagcacataggaacacttgctaccaataggtttcacagggattcacaagaattggaaaaaggcacataaggggagaaagagggggcttctctggtggcaggagctcagagagaaagggggaaagagagagaaggggatactcaccagagagggaaggggagaagcacttggacgccgccggtgaagagatttccggagaggggtg

SEQ ID NO: 136934 - DNA, 456 bp, Zea Mays
gataaacgttcaacaattcaaggtttactttagtcatataagatttactttaacatgcaacatgaataaatatttagctactcaaggtttactttaatcactcatcgatgttaaattttataacaaagaaacatccatcaattaaaggtttactttagccatttatggataaacattcaacaattcaaggtgacgagtcgagaacgggagacgactgccacggcggattagtcgtggcacgacagggaggaatcgcggatcttgggtggcgtgagcttgcacggtggttagttggatcggatcggagcagagtttggctaattgcaagctatggttgagagggacatgtgaatgacagcgtgtggggaaattagttttgggtggggctgacgcgtatgcggttgtgattcgaatgagacgttaattagatggggctggtagttgatgaatagcatc

SEQ ID NO: 136935 - DNA, 836 bp, Zea Mays
cggcgcgggcgctgccgcagccacccgtgccgttcgacttcgacgtcgagttccgcaacgtcgcggatctcgaccgcacggtgagcgcccagtacctgctgctactctgctagcgtgttgcgtgtgtatcgttgtgtttgtgaagcacggaagcgacccttgagttgtgtagtgatggtgacccggtgatcccaagtcatgcacgggcccaattctgttcaggaaaatatccactaaatacttgtttttattttacgcactggaacacaggttgatcttttcagtcacattgctgttttatataggagtcatgtttatataagctactagcctactactgaactcgaggtcgcatgtgcattatttgtgtgactgtgcaagctcattgacatgaaaaacataaaccacaggtgtccagttcatctctgtttcaagaatatgaaaactgtccatcttgaccaaacaattcagcctgagatgggccaagtcaatttgaatagtcatggtaataccatgttatttactattatattcttgattatcagattgaaaaaatgggatttgtagccctgtgagatatggcctttggattggcagtatggttaccaaagatgatttgattaggtacactgtatatttgaatatctggcagtattttcaccctcaaaattatgcatcatatgtggttctatcctatcttctgatccatgaacaatactattaagcctattattattttgtcatttcaaatgataggctggtatgtatgtgcatcatatctctcaactgtgaatatgatgtttagtgataagttaggacctaggtccatattctgc

SEQ ID NO: 136936 - DNA, 529 bp, Zea Mays
gaaagaagtacagtgggatctagtttgccatctactatgaaaatagtaatgacacagtatggcacaaagtcccaaattcccaatcatcacaattctaacatacccaaaggatttattagtcatgtttggaacacgtacggtgtttattctgagtcacacgagacaactatttaccgcggaacttctacggagttactatgtcacgaatcgccaaacactcttgatgcggtaaactaacgatgttccgtagagacgtgtcgtgtctctccctagcctacggtgtctacgtcgattgactttgagacgaagatcacatcacaataattgcttgacacaagacacacctccacttgtacaagccagtacatgcggtgcattacaatattcgattaaggtttgaccattcaatacacacgtccctgaccaaattaagctagagatccagaggacacacgtgcactttacttgtaaaaactaccattgcataatgaatggcattcttaatggctactaccctatccgaatagtg

SEQ ID NO: 136937 - DNA, 674 bp, Zea Mays
atgtagatgtctgcctccctgaacagttgtttggaggtggctggtgctgtttgaagtatggcccggacaaaggccgggttgttggatccgcgatagaattcttcaatcacaaccgcctcagcaacttcgggaatatggttcctcatcgtttgaaatcttttgaggaacaatcagagagtttcatcactctgccacctaatggacttgaggtcccatggctgtaccggtttatcggagagagactgaaaattcacgataaaccggcgactgaagtcaccccaatcgtcgatgcagtgtcgaggtaggtgtcggagccattgcagtgcgtcctactccagaacaatgggcaagtacgccgtcatgacgtccttcgttgccccagcatctcgggcagcggttgtatagacgaccaaccatcctctcgggtcctacttaggctcgtatttgtcgatgttggagaccttgaaattaggaggccattggatggcctagaggtgaggggtaagcgcggaaaccccgcatgtgtcctcttgccgatgatcatgtcgttgatcccggggaggggagtcagtattaggtcgccacgaccgtccctagaacggactattggttgaggctgctgctgactcaatccaggttgcgcggttgcatgtcggcacaccatgatctcggtc

SEQ ID NO: 136938 - DNA, 558 bp, Zea Mays
gaaagtccaaggcctagattacatgacaactcattgataattgcactaagcggttgcaataacgtctcatgggtggtgaggatcttgatgatcactagcatggttgggtaggggttcgtcttcctcaatcttgacattccaagtatatgagataaatgggtatacattctacattattgcacaagacaaaaggaacactagctaaaatagtgatgttcgtatagatgccattgtgacaatggtactaaggagacgtgttatggttacatcgaggagatatgggaacatggaggctgtggacattattttaagatccctctagaaaaagttttctttatccaaccacatttttacgcagtaccttatttgccttctcaaatattctaatgtattaatatattacaagtgatgtaaatatatatagataatgtactctttttaatattggttgtagccacctgtcggtactaaaaacattttaatattgattcatggctagaaccaatgcaatacatccttgagtgtatctcttctgtggccatgtaactatagatggac

SEQ ID NO: 136939 - DNA, 2083 bp, Zea Mays
ctataaatcaaatctgcagggtttaggcctattattggcgtaacgctagccatacagggaaaacgtcaaagccagccccaactcgaccacagatccaacgcggtggcaagcgagatggcagccgcagcccgcagcccacaagcgcagggtgccatgtctgaaccatgcgtccacgcctgtcaccatgatcagccgatcactgctagtgctagcagactagcatcacaccgcgacccaccggcgtgttttagctttcaaggctactctccgtcatagtagcaccatcctcttccggagggaagtcgagcccgccacctgcttgtgcaaatgcgcaagacgacggccgtaacggcagcgccactcgtcatgcaccagattactctgggaaccacagtggataacgggggaccgaggacaagattgacattaggggaaccgaattccagcactcagacgcacttctgctttactcgtagtttgaagctaggcaattcgtcaagagccaggtacatgcagctccttgctgacgaggggcgcgcaggagcagcaattttcgcatgtgcagatatgttccaatgagaccatctcatggaaccacaggttgacttctccgtagtctttcgtcctggatgcatgtatcttttcattcttttcgtacctatgaatgaccttctatgaccacgttgtattcttttgtgaccttaccagaagaaagaaaagaccggcgatcttctctctctcaagtggatggcacagaactagcacacggttacatgctgagctatgccccatggatcacttccgtcgtaaaggtcagaactatcaactgccagttcgtcttgtagatgtgtcactaattaggcatttagatagtagatgatgcttcagacagatagcgtcgcacttgggcaattgagctatccgtaggcatagctgggactcatagccatagggttgtctcgaatggtgtaaaggtatgaatctgattgactattactgattaggctttgctctcacacagttttagtactagaagctgtactccgctttgcctaattacagagaacacgtgtcagaaaccattggagtactaggagcggcagactctgctttatctattcccttgcacatacctaaactttattttaaacaaatatgcccgagattgtgcctatttctgttaaaattatcttagaaactagtgcataaactattagtatctttaatcgtgctgctgttcatgggaatgtggtgaaactctgaatagaaatactgcatgtgatctgcttaacaaccggtatatctgccaaggtggaatagtgccagaacccagaagtatgctaactaagcatgtttttttaatgagaaacatcagaggacaaattggacaccacaaaaatcacactagatttggtgaaaagggaaggcatgatgtacctataagcaggcatgatgtagctataaaccagttaacaatatcatgtagatgtatagtctggtctttctagccacagttctgcttcgctaaatgttaatcattctttgacatttcttagtcacctaggcataaataatgtgtggtaggtttagctttgtggcccaccaattcatgcatggcaatataacaattgtaggctgatatttattagcttaggtgtggaccgaaccatctaaaagcgtaaatatgaatcacatttatctagtgcatgctggcttaccctccggtgggtgggcatgttgggcacaacaagatgggaccatatcctggaattctctgatggcaacaaggatataaatgaccttttcccctgatattggttgaccattaagtcagatcactgcagcatatctatgactgagcagaactttggctgcattctctggtagccttgtccttcccagttctcttttgcaaaattcccaaactcagaacattctaaccttctgtatccactgagcagaacttttgcaaaattccaaaaatcatactttaaaattgctccgtgtccatttcttacagtcttccaactctccttctcaacttgtatatacaagcactcactagattgctatttaagctgaa

SEQ ID NO: 136940 - DNA, 302 bp, Zea Mays
cgtgaaatcaggttcggctaggccgcagttggcgcgttgctagacgacaaaaaatgtcacgtactactcagtcacaggtagtactagtagtgaacgatagagagcagaaatacagcacgagtattgtgtgctggcctggcagtagtacatacagcactcacaggactgactgtaagtaggagctcgcagctgcagctgcagtttcacttttttcagaaaggaaggcggccctctccaaacactacgctacgcacgctagacgcgccaccgatttctgtgtacaccagtggaaggagacggcc

SEQ ID NO: 136941 - DNA, 493 bp, Zea Mays
cggacgtctaatcgttgggccccgctactcagccatggcctgcacgcgcgatcttgctctcacctccatgtggggccgcttcgtcagtcacacattcatcgcgtgccggtcgatgctctctaccgctcgggaccctcttgacaacttcggttcgccgtttgcaagcgcggacaaaaccgtaacaaacttcatcgaagacagtgacatcggatcataacaaactcaatcttttccccaaatcaagtcatcccggaccttcctcctctttgcctctatataataccaccccaatccagagcaaagccactcaccattactgagagcgtgcaaagagggggagagagagtgagggagggatggcggagccgctgcggccgcttcccgcatccgacattgttcgagtgttgctggggtcgagaaggattcaccttggtgcacgaattgtgtatggagtcggtggaagcatagaaccgagtagtgttcgggcggaatc

SEQ ID NO: 136942 - DNA, 280 bp, Zea Mays
cgcccccactctccagtcaaagcgcgcgctccctttctttgttttccgatgctgttagatggggtccccttgtcattctcctacaccgtggttgctgtagatcttctcggatagttgtgagcgctgtatcggtctcccgggggaatcgggttccgttgcaaccaccggtccaccagctggctgccaggtgcggactccggaaaccacataataccgtgcccttctctccgccgacccggcgttcccccactcgttgcacgagctccgccttcgcctcgag

SEQ ID NO: 136943 - DNA, 379 bp, Zea Mays
tccagcacgcaggaatcccattgccgacgacacgcaggaccacccattgcccaatcgttcttcccatgcaccgtggatgccccgtccatatccttcgggccccaaacacaatccacgcttcaccactatggaaggaatcacaacccaatcccctcgtcgccatccagcgcacatgactaccatcgacctgcatcccatcgcaagtgcaggaccaccccgccatctcattcttcccattctacgcgccggccccgcctggatcttctaatgctcgagtacttcccattctacgcgccagccctgcccagatcttgcgatgctcgagtatgagatggaagacacctctctgagcgctcaaatctgaacaccacacctctct

SEQ ID NO: 136944 - DNA, 339 bp, Zea Mays
tctggacagacaatagagaagcaatgttttctggacagacaacagagaagcaatagcggctgtgggttttttctggacagacaacagagaaacaacagagaagcaatgtttttataaagctagtcctaattgggcagcagcagccctattaaaggcaaaaagaccttcaattgggcagcaacagccctattaaaaatctgtccaggtgattgaaaatactgctactctactcttttatgcagtagaccttcaattgggcagcagcagcagaccttcaattgggcagcagcagcctaacttcacatgtattcattaagccaatctaaatactgatactct

SEQ ID NO: 136945 - DNA, 417 bp, Zea Mays
caagtctgcacatggcgtttcgggaaccacgagagggatcacaagaagacaatagcgagtacacgttggatccctaagaaaggaaggcaggccgtagtgttcgggacatgtcagacagcgtacttagctgtcctagctacaaaggtcaattatatgtgatgtaaaagcagatcatctatagtcgcaagaaacgaagacatatataattaattagtgtttgtcaggatctcgatcaccgtatattgccagtacgacgtcttgttattttagctttgttctaagttaaatataaaactcgcctaactttaacaaagtgtatagataacactcaaaatattgtctgaggacgtatctattgaacttaggatattatgcgtatttttctataaacttggtaaaaactataagactacaatg

SEQ ID NO: 136946 - DNA, 300 bp, Zea Mays
gatacaactggaatgggatttatgtttctgaatttccagtcagagatgggcaagctgcaatgtcggtggctgggcgtttctccatctcctccttggcttttgccctttgctgcgactttctaactgaaaacgctgcttcggatgtctgcgtgtctatttatctgctctacactgcataaatgtgacgggcatttccgtgccccgtacttgcattgcatcatcatcattgcaccagttctgcggtacggtacagtatactgatgactgtaaaacttgttggtggggggcagcgtacataat

SEQ ID NO: 136947 - DNA, 555 bp, Zea Mays
atcaaatccatgagtatggatgtggcataaactcataatgggtgccgatggttgtcttacaaaattaacatggtctaaaattatttgataatgcagcgtagaatgtatatcctagatctactaacaaataatatacatgatgctagaccaaagaaaatcttaaacaactcaagaataataacacaaaaggaataaaataatagcagatctaaataagagatcaacgtcgcttaaccaaaagaaattactgacttacaatgcttcccacgagtgatggtgaggtatatgagcgaatgtgctagatgcacttcctagaaccctgatttgttggcacccgtgcaggttgtcagatcaccaacgatggttagaaaacactggtccctttgatcttccacacagcagccgaagggtcggcagggtagaaaagcggtggcaccgaaacgaaaagaactagcgagttgcttgattatgtatgctttccgtttgaaggacatctcccctttatagaggggttgtggcaacttcctagattcaatttgatctgctaaattccag

SEQ ID NO: 136948 - DNA, 445 bp, Zea Mays
tgtttttttttgcccgggcctagttgcagcacatgttcaatttttcattgcacaaagtcgtgatcgttgattgatgggccttcatctcgttataaaagtactcaatccatgtaaaaaaactagaatatgatatatactaatattataatctcgatggggggataggtagaagacgacgacaacatgagtaagggaagagagaggagacgatatggtcgtggaggaagggacaagctggggtggcagggtcacgaggaaggattaaggatgatggacggtctaaataatgttgttcattggatttgagtgaaaaagggtgatagattatatatcgttctaaactgatggttttgataatgtggtaagtctaagagaaattgtttggtggatttagagtgtctttggtttggcttttgcccgcaaaagccaaaaaccaaaccaaaag

SEQ ID NO: 136949 - DNA, 360 bp, Zea Mays
caaattttgagacagagaaacacacaccagtaacaaggcactgtaatttttgcagaatttttagaattttatagaagcaacttgtagttcaaacctaccccaaaaccctaagagaataaaagaaaaaggaagaataaataaaccccaataagtctaacttgagaacttaatcaattctccctaagacttaaaaagaattcagtggaaccccaaaattgtaacctacttaccttagctaagtttaaaccaatttaccaagtataccacccaagggacttatataagcaaagttaaccttgtttaactcaaggaagatcatacacctttaaagttgtaatttctaaaagcacatatcatatc

SEQ ID NO: 136950 - DNA, 745 bp, Zea Mays
gaattgtaagtttgagctttatgcacatatgttcatgtgtttatttggtatttatttaaaagaaaatatgcctcatgaataagtcacaaaatcaaagagctccttcattattttcaaggacaaaggtcaggagtactatatactagggtttacaaatcctaccccctaaaaacaatctcgaccccgagattaagaggaactaggaaagatgtggggaaattctactcgtagctctgcttctctctcccaagtagcttcagcttcactatgatgagtccattgcactttgcacatcttaatcactttattcctcgtaacacaagtcaaagtatcaaggatcctgatagggtactccgcataagtcagatcatcttgaacactcagctcttccataggtagttgctcttctggtaccctcaggtacttcttccactaggatacgtggaagacatcatgtacatccgtaagatggtcgggtagttccagttggtaggcaacttcccccacgcactttaggatcttgaagggtccaataaagccaggggacaacttcccttttactttaaacctcctcataccctggatcggtgacaacttcagatacacatgatcaccctcaaattctaactgccttttccgggtatctgcataccttttctgcctggactgcgtagttctcaaattctcccttattaaccggacttgttcttctgtctcttgtataatatttggcccaatgaaatgc

SEQ ID NO: 136951 - DNA, 337 bp, Zea Mays
cggaatctttgctcgacaccaattgcctaaggcaaatgatttcatcctgggattcttgcagcttgtaatgatggttatccaaatctgccatggtaaaatgatggctcctctccaagatagccaaagagttgctggcgtctcggtacaacttatcgaggttatcgcgggaagctgcgagtacacgtttttcttcctgcaaataagaatcagatttcaaacacccagcagacagcaagagcgcagcagagagagtcaagtaagcttacttcattggccgccctttcagagtcaagctgagcactgaaagaagaattcaacgagttggcatcatccaaag

SEQ ID NO: 136952 - DNA, 288 bp, Zea Mays
ttcaagaggatagagtgaaatggtgtatgggtaacaaaggttttactgttaattctttatataagaaaaattcgattgatcaggcgactgttccttacaggttcttgtggaaatctaagttaccacaaaaaattaaagtcttcatttggctggtggtaagaaataaaattcttacaaaagataatctgataaaaagaagttggcatggctctagtgaatgttgtttttgtggtggtctagaatcgattgaatatttgttctttaaatgttccattgctagatttctat

SEQ ID NO: 136953 - DNA, 857 bp, Zea Mays
atataatccagggcagacagtgctagaggctcccacatgagcagggtctaggaaaaagataactcgaaaagtttacatatgtttgctactaacaagaacagaatgacattattggagtgagttgaaccattggcaaggaataagactgatctaatctgtatggagctcgttggcctggaacactaactgggtcagatgtgcttttctattcaagcactgctctatgctctatcagttacaagtatagccaaaattacgatgctttggtgaaaaatgtaagaactacaccctaactgaacaagagcctaactaatatacccgagcacgagatgaaaagaaaaaaaaagatctacatagaaccaaacatgtattcaaaataccagtgtttggtatatattaccttgaactcagtacactaaaatcatgtttacaaagtcatacgagattctaacagaacaattaaattgacatgtacaccattgaactgaacctagacaaacgagattcaaatagactaaggcttgtgaagttgtccaagaacagtttcaaaatatggaccggtcatctataattaataatactaaaccaggtgcttccttgctagtgtcatcatgcctagcttttatggcaagctgtgtttattttgtttggcatcacagctaccacaaaaattgtcttaatagtaatcaaacaaaaataccctctgtccaatcacatattattgtctagtgatgcaaacctattattatcttattctctgctaacaagaacataatgacattattggagtgagttgaaccattggcaaggaagaagactgatctaatctttatggagctcatggcctaaacattaac

SEQ ID NO: 136954 - DNA, 479 bp, Zea Mays
cggatgtgatgacgagactgaaattgtgtgcaagtaatagtccatccatcaatgtaacactcttgtgtttcttcttggggctgggcatccttgtgatatttcctttttggcatactttgcaattcatcaactgacagtgcattaggtacgagagaatctgctattagatgttcttggggagacatttgtctgtttatgccagaaaataaaattcggttcttctgttttgtactttcactttcatttgtattgatctggcgacaaggaattccatagtactcacaacaacaacatgttccaaggtcacttgtttgttggtttggttgtgcatccttttgtgtcttcaatgtctgttcatcagctgctttatttatagtgttgttttgacttgtcaacacactgcattctttgcacttagtgacatcacttgtagttgacattctaaggtctgacatctgtatgggtatggaagaatggaa

SEQ ID NO: 136955 - DNA, 1003 bp, Zea Mays
gtgattatatcgggaatatatttattgatgtgacgagtagtttagaaaatgctagttgtgtggaggatgtattgttaagacatgagtgtcggagttcatatactagtggttacgctacgcacgccaccatatggttgtatgcgagacagggttatgcgcatgatgagtttagtaaaaatccatcgatgtcactagtgttaagttgaggtttatttgtgcgtggaaagtaataatgtgttaaatacttagaactcttagtcgatagtaaaaattgttttggtttatatagacaggtggtgacatgcccaagtagttgccgctttctccatatttataagtcaagtcgagacgatgtgtattgtgcgttcgataaattaggcttcacatatagtgtatgattgtactcacgattttgagcggacactccaagtaagtcaagtaggtttgtgataccagtgtgtaatggagttagttattttaggataattattgaaatactcggcttatgtgataaacatgtatgtgttcgtgatttgggaagtaaatgcatggtgattgcgatttggggatcagtgatttacgattcgtatagattggtcgatgtgcgaaaatacttgtgagtatgtgtgtttataaaaatgtggcagtgtatgttgagtctcggattgcaataataataggcaagtcgacatgtatgttatttagcggtctatgtcgttgctctagttagccgactgttagatggctttggttaagctcgtaatcacggtgatttgcttgttttggtctagacgcgcatggttatggtcgcgggtaaaattagtggtgttcatgtgatgtctaagtaaaaatacaaattagtgtgtgaaaggcgcaatcgatatacacatttataccgggtttgattattgtggtgaatgtgtttgtcgattgtgtacgatacttctaacgcgcgaaataacttgtataaaattagtaagtctacttattggtcctaatttag

SEQ ID NO: 136956 - DNA, 464 bp, Zea Mays
ggatgctcctatcttagccttgcgtgagagtggtaagcatttcacagtttatacagatgcttctcgtattggccttggttgtctgttgatgcaggaaggcagggtgattgcttatggctctaggaagatgaagaaacatgaggggaattgtcctatccatgacctcgagttggttgctgttgtgtttccactgaaatcgtggaggcattatctttatggtgaatcttgtgacatttacaccgatcataagagtctcaagtacattttcactcgaaaagagctgaatttgaggcagcgtcggtgacttgagttgataaaggattatgatctgttagttcaatatcacctaggaaaggcaaatgtagtggttgatgcacttagcaggaccagtgtcccgaaagtggccatgtcatttattgcagatctagaccgtatgagagttgctttgtgctatgttggcaccg

SEQ ID NO: 136957 - DNA, 359 bp, Zea Mays
tcttgcagggttgtatcatcatctcccaaatgaaatatccatccgtttaagataaacatcaccatatagatcttttgtctcgaagagatgaaagagcacacaagttgttgttgctgttttgaccattattgattaactacgtccagtacttggtgtgatgcatctgcttacctaattcgatgacagtgaacaagagttgagtgagatgtgttcggcatcataggacacacgtacatgtatcgttctccttccttctagctagggcgcgctatgtctggagctccgcagaaccacagagacgaacttgtggtcttgctcatgtgctctatggttggagctctatctctttggtggaggcc

SEQ ID NO: 136958 - DNA, 505 bp, Zea Mays
ttttcgccttcgccccaacagtggtcacccagactcacttcgaaaaacctgtcaaacactcccgctacgtaccctactgggttgattcctccaacccagctgctcgtacgaagtgggctccctcagggtctggaggccctgcctcctctgatgagccacctcctcagcctcctcatcacccatcctcctctcgcgccgccgctgcctcgcgtccgatggaccgcagcgggagaggaagtggtccgggccagggtcagggccgaggccggggacttttcattcgtctggccaagggccttcttggcgtcttcgccatttgccgcacccgggcggtcaaggagtctgtgcgccgtcgcaggaccgaccggctgcatgaggatcttcgtcgttatgtagccgagactggtcatcctctccctcctgggtcccctccacctccagcccctaccttccccgtagaccttaatgagtggcaccaataggagtttggtgtgccattcattac

SEQ ID NO: 136959 - DNA, 1059 bp, Zea Mays
ataagggatatcattgttgggatccagttgctcgtcagatgaggatcttttgggatgttgtctttgatgaggttcgtcctttttatccatgtccttcttctgatgcttcatcaacatccttggttgatcccctttcttttttgttcttcctggatgctcctactcctaccgtatgtctcacgcttagagcaccccttggtggagtccttccaacttctgttgtgccttctttagtggtacctccctttgtgtgtccttcataatctccttccttggtttctgactacaataggaagcctctggtgacacatgtctacactcgtcgggtcatagattcttctggtacaccatctttctctgttgagctaccctcttttgttgtgtcatcttttgctgttgagtcatcttccctctgatgattcaccttcatttgatgagacaactcctattgaactagcttcttctgctaattcttcaccgcagctgacccttagacagaatcatcattttgttagcaacctgaccaatactttcctttaggttttgctgctactcttcttcctgagccaaccatttatcatgatgttattcttcattagaaatgacaacatgcaatggctaaagagattgcagctctttagcgtaccggcacgtggaaacttgttccttgtccaccacatgtctgccatatcacaagtgggtctataaagattaagacctgctctgatggctcttttgagcgttataaggctcacctagctacccgtggcttccaacaggaacatggtcatgacaccgatgggacttttacgcctattgctcacatgaccattgtttgcactcttcttgctcgtgagtggttcatctctcaacttgatatcaagaatgcctttctcaatggtgagccacgtgaagaggtccacatgcagccaccataggatgatatgaatgatcttcgctatgtgccttcaaagctttagttcattgatttcttcaagaagaagaagaccacaacttagcataggttttatctctccaaatttggtatgtttgatccac

SEQ ID NO: 136960 - DNA, 650 bp, Zea Mays
ctccgttagcagggtatagtggtcaccccgagttaagtaagcgtgcttgatagtaaacaagttgagcacctttgataatgaagtctttttattgatgatacatttcccattttacagaatacaaggccgtcccaatagcttttgaaatatagctaggggtaaaacttcttgagatgttctatattccatgagttcccaacttccgtgccatccatttgagtgaggcgatatgatccaggccgagtgacttatgctaccaagaatggcccttcccatagtggtgacagttcgtgtcgcccctcccccgttagaatttggcggaggacgaggtctcctactgcgaaggatcgatgtcgtatggccttgtcatgatagcgcctcagagtttgctgataccgagccgactaaatcaccatatttaatcgttcttcttctagtatatcaacatcctccagtctggtggcctcagcttctgctatgttttcaaagatcaatcttggtgccccgaacttgagatcagcaggtagcactgcctccgaaccataaaccataaagaaaggagtgttcccattcaaagctcgactaggttgagttctgaggctccagaccacgtatggcaactctctgatcaactttcctacgaacttttc

SEQ ID NO: 136961 - DNA, 478 bp, Zea Mays
gaacaaacctagaatacgctgaccacggtgagggctctaccacggtggcggaaaacagaattgggggaaatgggaaattggagagttgtggtggctaatcggaggcaggagcgggtgctcatgcttggtgatgacctaacgcagcagaccgtgccttcaatttatagtggcgctaagtggtggctagtgaatttggtttggcgtggtggcggccggagaagaaaggggctactggcgcacgagattagtggctttcaccatggcggctctccggcgatcaccgggcatgcatgacgcgattcactgcgacgtgttaaccctccaagacgcatggccaggccggataacggtgaactccggcgatgccagcatgatcgtccacggtgggacacgatggccggagtgaacaggagctcaagttcatccacacgacgatctttaccaccctgagccacatccggtactttgctgagcccga

SEQ ID NO: 136962 - DNA, 390 bp, Zea Mays
cagacacaggctaaccctcatatggacggcgggttgattcacaaaaagagcaggggctcttatgcaatagcgccgcatcgaagaggtatgaagggatctgagccgtccgataaaaaaacagcggtccagattagatgccacattcattgaaccggtatacgctatcagcccttggatctgggatccacggtcagagcatcacgtgcccccaaaaccgtccgatcgctggatgacgtcaaggatttaatgcatcgaataggtatgtgccaactaatcccagacgcaagttctacatctgacggctggcttgtcttcttctatcccgagccaacccgagctacgccatccgccaggcacggcggcgatctcaccggcgccagtcgagttgtc

SEQ ID NO: 136963 - DNA, 343 bp, Zea Mays
gtagaagtgacgacggtcgtccaaggatctgaggacgacatgctagacatccctgggcccgaaggaatcgagacacttggacaagccatctaaattttcatcctttcgcctcgaagggatgtcgatttggttgatccaccaacgtcgtcgtcgtctcatccccaaccatctctgcctcctcaaactttagtacctttatatccatcatcacctccacaatcttcccatgctgctcctcatcctctttctaatccaccttctccgccacaagcatcaacatttaggacaccacctccttctccacagccatcaagggattcacgacaatcaaagaaatctaaat

SEQ ID NO: 136964 - DNA, 598 bp, Zea Mays
ggcgctcccgagcggtggacaccaaatcggagctaacccgagcatttcccctaacctaattgcacgaacgaccaactactgagctctggccacggtgaccgagagcattgcggctaggtggtcgcgttcccggcgaccagaggattcttaattcaattgcatgcgtcggtgagtttgagggaagcttaaggatgctaaaacgagattagagagggcgtgatcggacctggggagggctggccgcggcgagctggagttcacggtgttcttcaactgatttggggaaagtttaaaattggagcttgctggtgattgactgggagaaatactgggtggcttggtgctggatgacctagcggagctggtggagggctcaatttatagggagagcgagcggtggcccgggaattttaacggcgacgcgcggcggtcggagataaggaagaaccgtggcgcagtggattcgtgtccacagtcgtggcgagctcaccggcaatgatttgacggctgtaaggagccacggcgacgcggtggaaagcaaagccacgcggcgcaaggccgggaggcggcggtcaccggcgaagctatccgcgctagc

SEQ ID NO: 136965 - DNA, 763 bp, Zea Mays
ggcgccaatatgttcctgggccggcgcgggggaagagtgggccgagcggcgttgggtgtgttgggccggttggccgagatgggccaaggtgaggagagttggcccagccggggtcttcccttttccttttttttctgtttttttttctttcttattttcaattccctatttcaagtttcaaattcaaacttagttttggatttccaattcaattaaatgcacacccaaaactccagcatgagatgcataaactaaatctcttctctctctctctctctctctctcttttaaatatttattgaaagaaaccatgtttcacaaataaatcctaattttatttctccagggctacttactttaatactatattttaagggtttacaaatcctaccccccttaaaagaatctcgacctcgagattacgacgaactagggaaaagatggggaaattctgcttgcaattcatcttctcgttccaacgtagcttcatcttctgcgtgatgactccactgcaccttacacatcttgatcactttgtttctcgtgactctggtcagggtatcgatgattttgataggatgctccgtataggtcagatcaccttggacactgagttcttccattggtagttgctcttctgggactctgaggcatttctttaactgtgagatgtgaaaacacattatgcacatccgacagatgggtaggtaactccaactgataggcaacttgcccaactcgctttaggatcttaaagggtcca

SEQ ID NO: 136966 - DNA, 899 bp, Zea Mays
acacaccatacatgtacaacaacgtagagcatacatgttccaatgttacataccggaacttaatactaattcaatatacaaggattgcaattttcatggattatgaacaaagtaactaaatgtgtacattgtactacagtcaccagaaatctggatcgactgggacatggatcgttggtgtctaaaaagtccaatgaagtcatatctcttaagcagcaaaaacagagaaaggatgggaagtgtcttgacatagtaattgaaattatgaagaatgttgctgccttaaattggacatcatttgaacaaacttaaaattaattctagttctgagaccaacttaaatcctcccaaaaagacgaaaattgtgatattggaggcccagtaaacaagcaaatgtgcaactttcatgaagaaatagaagtgcttcattgacttaataattccagttccaaagacagtttgtaagctcctcaacagattgtagattatgcttagaaaactagacagtattcagtgaatgctcagcacctggtttaaaattgcaatggcacaactgtacagtcaagcttgtgtagacataagctagcaaaaactgtatagtcaggcttgtgtagacatgaagaatgcacgccaatgtgcatactgcgtactcttttcctacaaaaaaaacctatgtgggtatgaacaatgcacagagaagaatgcaaatgaagtacctctgctagagagtaaattacttccatccaattcttcaagcattgaggcaggctgctaaagaaagaatacaactgaagtaccactgctagggtgtaaatttacttccatccaattcttcaagcaatgaatcttcatctgctaattcaatcttatccattaacaatctcccaactgtacctgct

SEQ ID NO: 136967 - DNA, 604 bp, Zea Mays
attgaattgactctctcaagcatcccaaagcttcataccatctccttttcctgcaaagcttgtcaagcatgttttggtacccatcgcttgatggatccattatggttagtcaacaaagatctaggaacccaaatgtcctttgttctagcgcttggcagattcattgcctttctagcacaagtttcaattttgggttgcctagttatatatgaatcaaatgacaagctatgagtggaggagttaccaatgggacaatccttgcattgatgtcccttttcccggcatttgtagcataggcgttttccaagttttgaagatatcttctttccttgtttgttgcttgctacatggttagtaaaaactttcttttctaaccctatgcccttttgttttaaatggggacaagatttaaagtgtcccttctttgaacatttaaaacaaagttcataatccttgttaataatcaagccatttttaatatagggacaagatctaatcaagtgcccctcttcaaagcattcactacacttcttgattctatttgtatgaagtgtaacttgattattaccttggatgttaccttttatggaggcatggttgaggc

SEQ ID NO: 136968 - DNA, 388 bp, Zea Mays
cagctgagcaaagatgtgacagagatagtgagcatacgacagctgtcgacgagcacgtaaaccatccagcacggtgtcctcgatctcacaaatgaggaaatccacaacatcaaactctgagtgagagaccagggcaccaagtagccaaagctggatatgagtagcagcctccctgtaacccatctgcgacagaagtgtccgtctcatgagctgatatagaaacttggccgctgtggtgaagtctgccggagaacgtcgcgacccatctgagaagggtggtcgaaacaaagccgcaacgtgagctgtaccaggagcaactccgtcgtgagggcgacgagaaggatcagaggtgccatagcacaagctgtgaagacaaatcgatgactcg

SEQ ID NO: 136969 - DNA, 521 bp, Zea Mays
gggagtgggaggcgcttgaggctgaacaccagcgcctcagcgactggcgtacccagctggaggagcgcaccaaggcaacgtcccgccagttcgccttcgagcggtccgagcttgagcgggaccgcaaggactaccagaaggacctccagaaggtgttcgcccgggagctggaggtgacccggaaggagaagaggctggccaagaaagaggtgcacttgggccagagggaggaggtcgccatggagctccaggagaagttgaatgcctacaacaagatgctggaggagcagcgggaccagcaggccgcgactgtggagaacctacaaaaggtgcagcaggggattgatgacagggccagcagccttgccctggccgaagagaacctcaaggagaaggatgcctccctggataagcgggcggcggatctcgcctggcgggagaaggacctcgccttcggggaggaaatgcttgagaggcgggataagctgctggccgattatgagctcgaggtggaggagaag

SEQ ID NO: 136970 - DNA, 674 bp, Zea Mays
cagccctaagtggtcctacaacgactcattcaggaggagaaatagcaaacatgcaacacgaccaacactagtcattccctaagttctctaacaagggcccttgataggaaacgtgtggaggacctgactggtcatcccaacaccctaacacgttctaaatattcaacttcataaacgagatgtgtcccctgcatgtgagactacaagctaccccttggcaacaaagctatcgcttggaaaactagccaaaatacattgacagcacgaacccatcacaatacatcataagctaccaagtgatagtgtcttcgtatggcaaggacaacaacaaaatggcaaagtccaccatcatcgccatagaatgcctagtattaacatggtatacgatactgcacccctatccatcgacttatggcaaacccttcatgacaaattcttgctcaactttcaaggctatagacccgacattgttgacaagtgagagaaccttcatgagtattatgacaaattcttgttgctaaagtcttagctcccaatcgtcaaagaccatagtgcagttcactatgcatgaacaagcttcgggtagaacatctatatagccacttcacaagagatctaccacatcgctccaagaattataacagctattcgagaaatatgcacactccaaagag

SEQ ID NO: 136971 - DNA, 1309 bp, Zea Mays
ataaaatctgtatgtatacgattaattatatatctctgcatgtcaacgagttattgtggaaggcccttgatcgagtcgagcccacggcgtggttaatcgaacacattggcacacgagccacatgctctcgacgatcgatgatctgcatgcatttaccttaataactaggtacaacaaccgcgttcgtttcagaatctaaccacatggccggcggcgtcgggttactacgcaccacgaacgacgatcgctagcttgctcgttgacctctagtttgcatgctttgttattaatcggtgaattagtttctactacaccctattattgagtgattttattagatccttaataagaaatgggatgaaagcgggtaaaagtggattctctactaatcttgactaaaatacagatcgagtgaaggagagagcaaggtgaaggaggggattttttttaatttcctaccctaaaccctaatcccacctacctcgtgatatgaaagtctgtaacaatgcccttgacttgcatggtggtctgttagcccgatcggacactggactctggagcacgccttaacagctcgtcctaatcaattggacagcgctcccaggccccatctcgagcacagtacagctggtagtagactgcgtgaccaccaccggcgtgtccccgtcatcacatgcatgcatgctcgcatccgtcgcctaaacgacccttgtattactggaccatatatatgcacacacgccacacgcatcttttcattaatttcactgtgcacgcatggtggtatggatacatgctgcatagtactcctactactggagtagtggtatttgtttgatacataaattacaggacaggaggagggtgtgtgttgtactctcctggatcggagtcggagtgctacgtggcagcaccagacaggcagggagacagttaagtactccaaatttttaatttaattaattagcctgacatgccagctcttttccactgacatactgccttgttatttcgggcggtcggtttctcttccacgccacgcgtgcccaattcactggttctctcgtgcatgcatgtctgactatatactaattggatggatcctaatctatatcgatctcccagacatttttacgtcctctgttaaagcagcgaaaatcaagtcggtatattcttatgagtaggaaaggcattattgcagtggacggacggacaacgcacctctttcttgccggttgttgccgccgcgggcttgttgctaccgccggagccatcatctttgcgcgagctggacgtcgaggtgacgctg

SEQ ID NO: 136972 - DNA, 392 bp, Zea Mays
ttttttatgtggacattgagaccgtgcatgtgcatgtttaccattttatgtcgcatgcattattttatgtcttatgcacttggtattggctattgtttgaactttgaactctatgtcttatgcttgtggacaactatttgtaatattctgtgggttgaaccatgtttagttcaaattactctgtgaatggttaatcgaggagtgattataattgctgcgtttactttacatattatctcttgtacgtctcgataaccatgactgtaggaaggtctccatcaaaactccgatctattatgtgtgttgtatcttcagcttgaaatatcctgcacacacatagggggagcttttcttacattctgagttttaattaggatttatctatctctcgg

SEQ ID NO: 136973 - DNA, 362 bp, Zea Mays
gtgaattacaagggcgaagtcagccctaaatggattaaacaaaaaatttgcgaaggttgtcgatgttccaggagtgctccaggtcctcgccgcttggcgttgtgagcctgtaagcgctgggggaggctcttgttttgactatgaaggggccttcccacttgggctccagcttgcccctggactccgtccgagctgttcggatgagtacgaggtcccctgcgctgaactcccttgggatgactgcgcggtcgcgccatgctttggtctgggcttggtatttgtttagggcctgcagggcgaagacccggtctccgtcaatgagatcttttgaggttggctcatccacgtcagggacggctgcc

SEQ ID NO: 136974 - DNA, 490 bp, Zea Mays
caatgggtgtaaccgtgctgaagttgatcccaatgggtgtaaccgtgttgaaattgatcccaatgggtgtgaccgtgcaccggctgttgtccgtattttttatgaggacgaagaagaggaagaagaagtcccgctgattcgtaagaatagccaacattatagaggtagtaagggggatattgatattccttctccagctctgtccgctcttgtcagtcttcaagaactgtcaataacggattttgatcaggcccttgaagatgtcgttcctaaggatatgctatcggagccgactgctgacgacatgatggatgtttgttctaaaattccagacatgggattagaggtatcccgagtagtgtctcgtgcatcatcgactttggaaggcagtctttgatgtcaagacgttggtcaggattgcccgactcacatggaggtgactgaggatccttcagccttagaggtggctgttgcagaaaacccagccccc

SEQ ID NO: 136975 - DNA, 333 bp, Zea Mays
ctttttttaaacatggttttgcattatagtatggtttcaagtaaagctgagggagttgtctgcacaatggacaaaataatgtagatctgaagttagttgtgcactatgttgctagttgttgttgactgcacaagttatcatatcataaaggaccaaaactggtataggttatccttgtttgcatgttgtgctggaaaaaacttcgcttcagtgattgaattctggtttcttgttatgattgctgagaaatttctaaaagggttataccaattagtctaggaggaaaataatacctttaatggttgaatttctttacctattgttggatgttgt

SEQ ID NO: 136976 - DNA, 404 bp, Zea Mays
gttattgtaagcatgttatactaggtcgggtaggcgtgagcatgttgcgccatcttaagtcattgccgacttaagctgattgctccgttggtagggtatagtggtcaccctaagttgagtaagcgtgagcatgttgcaccgtcttaagtcactgtcgacttaagccgattgctccgttagtagggtatagtggtcaccctaagttaagtaagcatgagcatgttgcaccgttttaagccactgccgacttaagccgattgctccgttagtagggtatagtggtcaccctaagttgagtaagcgtgagcatgttgcaccgtcttaagtcactgccgacttaagccgattgctctgttagtagggtatagtggtcaccctaagttaagtaagcgtgagcatgttgc

SEQ ID NO: 136977 - DNA, 612 bp, Zea Mays
gcgaatctgtaatttataaccagtgcatctgcatggggtgcgctacgcaggtcgatgtctcttgcatcgaaggtaagtgggatgtgggaccacttcatctggaccactgggccggtgagggctacatgattgaatctttagtaatggtccttcatctgtcactttttttaaaactcggtgatagaccctccgatgatcatgtggatgactcctttgaagaatgggtcgacaaattcttcttgtttgggtggcgaagggggtagttggtgttgttgttggtttgcttgttgaggcggaggggtggtagggctagtctttcttggtgttttaggcgtggctgctgggggaaagtgtgattgtagtttggttgatgttgggggtagtatgggtgttcgttttgatagttagggtggaggtatggtgtggttggtaagtgtgagtaatggctctctggttgcttatcgtagcggttctggccatccagtctttgatttcttttgtttctgggcaatctttggttgggtgcccggagtatttgccatggaagatgcagtaaaactttcttggcagatgggggcctctacccccgcctctgcctcttgttgcgttgct

SEQ ID NO: 136978 - DNA, 541 bp, Zea Mays
gcggtgggcccggccggtcagtccatgcgtccggggtcgtgtggccatgccgttgcctccatctcgcacgtggtcggagattccgggataggccgttgagggagtggtggataaagcctaggtgtctccgcgacctcctccttccccgtgtcaccccctcgcgcttgaaccaagttggcgtcacacagagaaaagggaatcgagcgagagtgagtgccgccgccgtggattgccaccaacaacgcaaattggaccctagtcttgtcacccgaggcttgggaagctcacgaggaagccgtacgcgagcgcaatcggagggtggtgccctgggatccctggaattccacgccggagtggtgataccgccgtgctcgggcacggccgtggccagtgactgcggcgttccgattcaaggtaataacacggctactgcattcgctaaatcatcgggaacgtgtgggtagtctcgggtgcgcctttggagcagtggttcgccagttggcgctgaccggaggtcgaccgccatgggggaagtagcgcc

SEQ ID NO: 136979 - DNA, 341 bp, Zea Mays
gcaccaaaaccttagaaaccatggattgattaaggaatgatcatgacaaaagaaatacccaagattttcatacatcttcaccttggaaaaagtggctcaaaccctagacccccttcttgagccattagaccccaagcactggatttatgaaaagagtaggcaaatgaccatttcatgacttaaaccctttaccaaagttgaagtacattaatatatctacaagaaatagtaaaggaagtattccaaaagggtcctacaaaattctcaaattcagcccccaagtgaagaacactcaagagcaaccaatttttctctaagttgaaaatcagcccttttccaaa

SEQ ID NO: 136980 - DNA, 294 bp, Zea Mays
ggcatagcatatcatagctaggggagaagcacgtgtagcagcgcgacagacgagagagcagatagcagagagcacgcatgagtagagtagcggcctggagctagctacagtaggagtagtagtgtatatgcttgctagctcctccgcatcgtcgcggatggacccacccagacccagcggcgaggcctggacgggtggctggatccctccctctgtctctctctgagactgtgcccgtctctagatccggccccgacaatctttcaagccccggccacggccagtctctctcct

SEQ ID NO: 136981 - DNA, 620 bp, Zea Mays
gtaatcttcatatttttgcctgtcatccatgtcagcgaggtcctactttcatttacaatgtggagtagaactgtttgattgtttcttcatgccagttctgttttatagccatcaattcatgaagaccaatgtcatgacatgctttctcaatatctggcatctcaggaatttgtctgatcttttcccaattgatccatttattgtcagcacattacttcttgctatatatattgttgtatagattcatatgctcgttcgaccaaaaacggtcatcgcttgcagttctatcctgtagatacaaatttacgcataccttcccgacactttacagtgtacctaatgaggaccgcatgaagaagaaagttgagaatggaaaattgtcagaaatatttaaaagcaaaattgtttcttcaaaaaaatcaaaaacaaaagatgcaagacttgtgttttgcactccctataggtctagttggttggaaaatcagaaattccacatcttatttattgatgaggcagcatacttaaaagaatgtgaatcattgatccctcttgcaactagtgggataaaacatgtggtgcttgttggggatgacaaacaactacaatcagtggtaaagagc

SEQ ID NO: 136982 - DNA, 945 bp, Zea Mays
gcgtgctgtaatgtcatatatttctccatgctgcttcttgaaggaaggtgtcaaaagaaggctagttttgtagtgggtgtggatgatgcagctatgacttgtgagactggaacggcatgccgtaggccggtgaggatgccgatgttgtggtatctagctgattgtgattgtgatgtgtgtttgtcgttgtgatggcagactggtatcttttgctgcgattggaataatatgtggtctctgtttttaggattaattgggcacacctatcaacgaacaagatatttggtgtgcaggtggggtcactcatcgagcagttaaaagcagagcagaggcagactagtaggaggaaagcagataacattcagttcagagaaggtggtggatgaatgttcttaattttttgctggatactccgctgatttattatagtgtccccatctcatgtcacgtcatttaagctcggtcctttgtttggatttttttaaagaaattgtgagggaagacatatctatgatcttcttgtgaacttgattatgttagtgccatttgaaactgttttcagaaactactctacatagaacacttcttatctagaacagttagacaatatatcaggcagagaaaacagttagacattatatcagacagagaaaatagtttctcttggacaaaatgagcgcaggttctatatatctacaacactgcttgtctagaacagtcaaataccaaaaatactgaaaccttattgaaacaccaaaatactgaaattgtagctgaccaacagaaattcataggaaaagaacagtctcactacacatgtctgataatcaaggattagtgatgcaaatagtgtatacaagatccggacgtacctggcagtagtatgaagagatgcattttataggcgcgaatctgtgtctgtcgcatcctacatggaaggttttt

SEQ ID NO: 136983 - DNA, 366 bp, Zea Mays
agtctttctttcagacaaccagtccctgtctcgtgggaggtgagaaagaaaaatctgacctgctgatgcattcctctctagctagatgattatatatggctagatgattatatatatttctttcagattggttaatacgatggatagacgatacattaccaacttgtggaggtgagggcgcggaaggagacttttagggaggaacaggaacagccacgaccacgatgagtccttggcagtgcatgccgtcgactgcaacactactacacgtccatcaggtaacagatgcaacaaggcgtctgccgcccatcaggttcagtcacctaaatgctccaaatccaagaccacgtccaggtgtgtgatcca

SEQ ID NO: 136984 - DNA, 312 bp, Zea Mays
ccttaggttaagtcagagccaatcccataggtgaatgaacgatcaacctgttaaggtcgttgtggctgacagtatcgacgatgacattgttttcaactctggcgaaaatggttagtttttctcacttcgtctgagcaatatgtacgccttagctcaatatgattgtattagtggttacattcatatttcagtttcgtttagcattcaacttgttttgacatgatctttgcttcacagtactgctcgagttctatgcgccttggtggtggccggcaattgcgggaagctggccccgatcttggaggaagctgc

SEQ ID NO: 136985 - DNA, 818 bp, Zea Mays
ctcgagcactgcgttgtcgtagatgtcgcttccagttccagcatctctccggtagatgctcagaaccttgctggcggctaccttgaaagccccttgctccatcagctctctggtgaggtgcttgtcccttttggggaggttcgccaggatctgaagcgcagcatcttgctcatctgctgcggcgtttccatcgtttacgaatgcaactttgactaggcagccaagcagcgtcggacttgcacggaagacttgggcgatctcgtactccatgtggaacgagattttgtgtatcagctttatggatgcggtgcggctttcctggtgatcgctctcgacaaactgcaccaggttggtgatagcgccggaagattttatagccgagacgatcgatagcactgtccccgtggaactgctcagggtgccgaaaaattcaaggagcttgcactggattggaggcgaggtgttgctgatcaggagaagcaggctgtgaactatgtcttcggacaccagagtacggtctccgtcaaggggcactgtcccgaagtcgacaccggacgcaaccagattggctagaaccgcagccgcagcctcttgcagcctcggtggaaggaggctggtgcggttgatagagagaactcggaagagagggaggaggacgttttcctctataagaaccttggcgctgtctgcgttggcggatacgtgctctagcaccttgaaagcaacctcttttgcttccaagcttcccttctcaacgatgccaccaaacaaggaacccactcttcgcgcaaccaagatcttcaagtcgttagacaaga

SEQ ID NO: 136986 - DNA, 355 bp, Zea Mays
gccggcatgggctccggcgccgctgtcgtcggccgccgcagccgcgagaagcatcccagcatcgtccttgctcgctctagcgcgactgatttcttggctctgttgcttgttggcaacggtagggaaggcgacgtgtgctcgtactcgtaactcgatcgtgcaccgagaggagctagctagctttggctcgtgaatggagtgacaaagtcggcatgtgacgctgcaaggaacgagagttttataggacaggtgagtagtgagcagggcagtggcgtttcaggtaaatggggctcagtcacgctatcacgctggttctaaccagggatggcaacgagcagttcttcgttgtggaata

SEQ ID NO: 136987 - DNA, 675 bp, Zea Mays
ggcgagggctctttcacggtggcggaaaccgatttgggggaaaagagcaattcatgggctctggtgagtaattgagagcacaagcagttggattggatgctggattacctaacggagccgagggtgtgctcaatttatagtgtgcttgagcggtggccagtgaatttcatggagacacgcggcggccggagaggaggaggggtactggcgcaaacaattagtggctttcaccgtggcagactcaccggcgacgagccagtgatatagagcggcttacggcgacatggtgaagcttcaaggcacgtggcatccgatcgacgggcggccaattccgatgaacttatctgagccggccgcaaagcaaaggggcacggcggccagccgccggtgttatcccgtggtgaagatcttttacccagaagcgttatccggtcaccggtgagcacaaatcacaacgactgcgtgaatccgggcgcatggctcaccggcggcgaggttctcagaacctgaccctatccattcactgtaccattggaaatctcattcagagcatctgacagacaggattacagcgcccagatctcggatttttgtgtgaaaactcacccatccatctgtagcaaacttgtagccctttatatcaactacaattatgctatagcaattaccctcaat

SEQ ID NO: 136988 - DNA, 491 bp, Zea Mays
agagcgagtaaaacgaattcaaaatttgacactttataaaccaaatcagaaagttggtcgtactgaggttgcaactattaccgtagagttaaacaaaggggatgaatagtagttaaacaaaaacaatataaaatgatgcagaaaacatatatatctttagaaacaaacgagatgaatagtcaaatataaaaggtatggaatgatgcagaaaacatatatatgctgaaatgtcatgagctctattattaaccttggtatttggtttaaaaatgtctcggtccataatttggggctatttgggacagcttcaccagtaaaataacgaatctgaatctaagattcaccatagagcactgctctccaggtcaatagataccaattttataaagcaacaaatatctaaaaataaattagatggcacttcgcacaatgcagccatttataatataagttcttccataacacattgacttttgaaatagacaaaaaat

SEQ ID NO: 136989 - DNA, 661 bp, Zea Mays
tagtttaccatatgattactcttcttttctcagatgaaaatgatggtacgtgaaacatttgcccagtgccttaaggtgggtgctttggatgtttggcaaagatgcacacgcttgctagcgcagcaaccacgtttagtcacatagagcttatgctttagagttaaaacttgtaaaatctttttgcaactgtggaggctaacacacaatacaactatgtatactacaagcttgtagctgaagaatgattcaatccaatcctctgatgtatgctttatttttttatatagagatgggtcaatccgttcgaaggtgataaatggtcaaatggatggacgacctgctcatgtcatgctatcggactgaaatgatttatgtagagtagttatcgaattgaacatctggagcatgacttttcattacccgatctacaatcatggattttttttttcaaggtttgagttcgtgcctcctggtatccatgaaaaaaaaaacatgaagcacggtttgccgacgtctgggttatattcgtccagtgcaaatccgaatgctatctgtgataataacagcgaggaacaatttaaggtcaccatgtgattttgaaagttgtcgatatgattacgttagtacacttgctaccgttttcttcaatttttaaggaaaa

SEQ ID NO: 136990 - DNA, 615 bp, Zea Mays
gtcaggattagatctatctctttataaaccagcatttgaccagagcccttggatcccgagatcaacggtcccgatcacacacaggcaaaggggcatggctgcgctaatctgggccgcccgttaggatctaacggccacaagcgttctttaattccccccacccgaatcgcactgaggcgagcataccacagcggcgcacaaggacaacacagcggcgcgccatggtcggagctggtcatccccgcgcacaagcgcccaggcttcgattccctagcgctaattcgaagaagggttaaaagcgaacacaacgggggtcttcttaccgcgcatggtggtggctgcagtcctgcccacggcttgaggcgggtccacggcggggctaagcgacggcgagcaattgtcgatcctccggtcacccacgtgtttggcggaatcaccgaacccactcgggaatcacaggcgaacacccccaaacatgcagtgggtgcccaacaagcgcggaggtgagggacgacggtggtggatccggaggagttcatggcggcggtggcggctgagactaaagtgcccggcgcccagaaactagggatggagaaagagcggcacaaatttata

SEQ ID NO: 136991 - DNA, 1093 bp, Zea Mays
agatcctcctcggccaccatttcctctagggttaggacaattgtaactcgggtgtcccctttccccataattatagcattctctatcctcaattgcaacgtatgccggcttcacatgattaccactactcatcactcgaagtctgctctcttcatctatcatggcagacacagcctcaccaatggtaggaagactctcctggtgacaaaaggccgctctcctgctctcaaattcagaatccagaatctttagaaagtgggtcactctcctatcctctacccacttatgaaccatctgtgcatcctgtgggcaaaccatttggagaggagcataatgatccagctctccccataaatgctggagctcactagcatattgttccactagtctccccatctgctttactgcatctgccttgctctgaatttccatcatcaccaccacattcccctttcgggggtatatattaatcaaggtcttccatatttgtgttgcagtacgcatggcttccaccctcttgctaacagtgggagacatggatgccaataaccatgcaactatcacagagtttgtcgcatgccagatcctccattccgcgccgagcttatcaatcggctcaacacatgtctcctccaaatagtgctccactcccttgcctcctaggagtacacgcactcttctagaccagcttagataattcttactaccttctaacttcacatcattaggcacaagttccaacttcaactcagatgtacctgtattggccttagcaccaatcaaccctaaccccatgagctcctggatcatacttctcatttcactcatcatctcactctttgtaatccctcctgaaccactgccatcaattgttgtcttcttcgcagcctcttctgtactcattttcacaaaagcacggagtcacacgctcgactcctctctcgcatccgagaccgtagcctcacctggatgtggacctagtgctgcagctgacgatgtagttcactgtaccccactatcagctcaccgctctcagttctagcctgatggctgcaaggatggctggctggcggccccttcactcggccacctc

SEQ ID NO: 136992 - DNA, 319 bp, Zea Mays
ttaacaagttgtcatataaaaatctgagatctgggtcatgcaaattggtctgtcagacgctctgatagtacagtaaactgaataagatctcaggttcagcccccctcaccgccagtgatctcacacccggattcgcgccggcatcgcgattcacgcctagttaaacgcagataacaatccttgggtgaaaatctggcgctgaggatgagcttgggacactgtttcgccctggtcgccgtacccactcgccttatggccggtccagataacctcgccggagttggccgcctgccactcaggtgccacgtgcctaggtgct

SEQ ID NO: 136993 - DNA, 311 bp, Zea Mays
ttcttgttcttcttcctgagaaagtccctttcccgaagcatggcggatgatgtaatcaatgctctcttttaaagcttcgggagcaggagtgtcaaccttttcaaacgaaatttgctcggtggccttttcttctgttgccttttcttcaaattccgcaggcttcgtctcagcaggcactaagagccccgcctcagtttcagccaaggttgttgtagcttcaacatctatttgcttagtatcagctctgggttgtgttttgtcaacttcggcaaccttccctttgggagcgagacctatggagtcggttgttt

SEQ ID NO: 136994 - DNA, 503 bp, Zea Mays
cttttgggctgaccaatgccccggcttattttatgtacttgatgaactccgtattcatgccggaattagacaagttcgtggtcgttttcattgatgatatactggtttattccaagaacgaagccgagcacactaaacacttgcatactgtacttcagagactgcgtgatcatcagttgtatgctaagctgagtaagtgtgagttttggctgaaagagattaaattcttgggtcacacgatttctcaggatgggatatcagttgatcctgagaaggtacaagaggtcatggagtggaaacccccgactacagtaaagcagattcggagttttctgggattggcagggtattatcgacgatttattccggatttctccagaattgccaagccaatgactgaactgttaaagaaggaagtcaaatttgagtggagccaaaagtgtgaaggtgcattccataccttgaggcagcatttgacaacagccccagtgctagctcaaccc

SEQ ID NO: 136995 - DNA, 291 bp, Zea Mays
tgagaagtggaatggagtagtagtgctgtttcagttaacttcagagtttggtttcagaaactgaacaagatcctctctctgctgtactctagccatgtgctcgagttgggatacatccctgaagatctggggctctccatactgtaaatatctagggtttggactgttgtggggggctgtgagcagtagagtccttatccattttgttcactgtctctagtatgggacagggggagatatttgtgtatgttgaagagctggcctagtgttgggtatttgtttgacacgtat

SEQ ID NO: 136996 - DNA, 510 bp, Zea Mays
gagaaggaatatcactatctcctttactacctttgtagagtcggctattcttgcgaattaatggaaactcttcttcttcattgtcctcatcaaaaatgcggacaaaagatggtgcagaatcacacccattgggctcagctgcaataggattacaccaattgggttcaaattcagcagggttgcacccattagggtcagtcagtgcaggtacaccaccagtgggatcaactccagtaaagacctctgccggtacttcttcagcaacaggagcagaagggccagcaccctggtccaagcatgacaatcgtcgaagccgtctccttttcttcatcttttcttcagcaggcgcagccggacgactgacctagcgacgatgctttgggcgagtaccctcaggcttttgggcgtctgttgctttgtcaagctctggtatagcggcaacagccattgttttagtagggcccgagtcagatgattctccagccaacatgtcaagcattgcattcattt

SEQ ID NO: 136997 - DNA, 463 bp, Zea Mays
ggagaagtgagctatgctttttgaagccagcggcgagtcagacgcgagcggcgaaattccagggcgaccgtgcgtgcggtgcgagaatcgcccagtggcgtgcccgccatgctcgccgtggatcttgcgtcccccctgttgacggaccgcaccaagtaatgacagacgggccccatgcgcagtgagggagagcaatcaccagcgcgcccccagctcattttcagcgaagtattgaggagacgcgcggcgagtgaccgaccggtggggtcccagatgacggcaccgcgagctaggatgggccgccctaacgacttgggcccgccggtcagtataagagaggaatctcccagtgcgactgcgcagtgggaccacggtgtcggcgccattttcctggacttgggccgaattgcgcgaaggaggtaaggtggggtgggccgaaattgtagctgaagcccaggtaagt

SEQ ID NO: 136998 - DNA, 449 bp, Zea Mays
gagagttcaacacaggagacctcgtactcgtccggaccacccggccagagtcacggggtaagttggagctgaaatgggagggtccattcattgtcaagttgaaggcatcccccagcgcgtacaggctatcaacgcccatcggcgaaaacttagagcactcctggaacatcgacaatctacgcaatttttttaaacctcagggcctacgcgcccttgtaatccaccagacaatactattctcggcccgcactcttttcctccccggggggtgaggtttttaacgaggcggagccatataatatacccgcaaaagcccccacaaaaaacaaaaactcagatacagcatgtcgaaaaagaccgcatcgacggtcttcggcattcgaccactccgaagtcaccgtgagaggcagcgtagactaccctcgcgtgcgtcactccgcgcaaaagtc

SEQ ID NO: 136999 - DNA, 773 bp, Zea Mays
gtgaaaatgagctaatttccttctgaattccctccaatcctcaagggtatttaagtttccaaactagcccttaagggatcaaatctctctcaatcccctccaatccacatggactgagattaaaacgaacatgcccttaccagaatatggctgtcatgaaggttctgtttgtgtgatgctaacaagctttaattatttaggtgatttgttttgagctttgaagagtgttctttgagttctgttctgttgcactgcgccgagtagtgctttggcatgacatggataacacgtttattctttgtgtggttgtgtcgttatctggttaactggatatgcattagttcttttatatttttccgttttagatgatcttcttttgttgacacatgtttgtttcaagctggtctttcaatgcgttacataaacttgtatcatttctttctttaaaaacctttcaaagtcggtatgtttaagcgtgatttttttccattattgatcaattagtccttagcaaccagacaaagcctgatgatatatctatcgaagtgtctaccttaaactgcagattcgtgtatatatatgcagtatgtatgcattccttgttaggcgcttgtaggatatagattatacgagctattggagcttgcaatgcagagtcgtacagccgtgcataaaggaaagtttatttgtccaatttctggggattttttttgttcaaattggtcaactgaatcaatcacaagtacgtatttgtatcaaccaatctatcctaa

SEQ ID NO: 137000 - DNA, 779 bp, Zea Mays
gacagtgacccacgttgcatgattcaggattacttccattccagaggaaacttcttcttatcttatcaatttttttcaatagccatttttgagccgggaagaccgtcagatgataaataggttgctcggataacacagatttaactaatgtctctctacctgcctttgagagaagccttcctttccatcctgcgagccttttattgattttatcaactaaaggttgtagctcaattcttttagcggttctgaagtgaaggggtagacccaggtatttcccgggtaacttagcgattttactggggaagacttctacaagatttggccacagctcctctgggtaacgaatcggaaaaatttctgttttatcgaagtttatcttcagccctgaacacccttcgaaagtctctagaatcgattttacaactttgagattttctttatccgctctaataaacacctctgcatcgtctgcgtatagggaacatcgaagctttgcccctcttggcaggacccgccccagtaacccagcctcagctgccctctcaatcatcctctgaagaggatccattgataatatgaatagaaaaggggaaagggggtccccctgcctcacaccacgcctgtggtaaatcttgtctgattgttgaccattgatggtgactctggaggtagaagaaccaagaattgcggcgatccaatcacgccacctttgggggaatccccgggcttttagcacatcgagaaggtaagcccaatttagggaatcgaaagctttg

SEQ ID NO: 137001 - DNA, 558 bp, Zea Mays
tgggcaaactgagcgggtgaacccatgtgtggaagcttatctcaggtgctttgtccatgcctgtcctcgacaatggtattcatggttatctctggcggaattttggtataacaccagttaccatacatctcttggcaaatctccatttgaggtcctttatggtcacacgccttctcaattgggacttgaatcaacagagcagtgcatggtacctgatttagcaacttggctgcagactagacaacttatgcttcaacaagttaaacttcatctacgacgcgcccaagatcgaatgaaaagacaggctgataaagggagggtggaaagagtttttgcggtgggagacaaagtattcctgaagctgcagccctactgtcagaaaacagttgacgatcgggctgttcaaaaacttgcatttcggttcttcggaccttttgaaattattcgtcaagtgaatagagttgcttatgaacttgcattaccagcgggctgttctgttcatcctgtttttcatgtctcacagttaaagtcgacagtgggagctcgtacaccagtcag

SEQ ID NO: 137002 - DNA, 829 bp, Zea Mays
aggaaagggaagatgttcattagcaaagtactgtccactttatagtaatgcttagtgcacagcgcatttgatatttgggataagtgttgacacacctgcagaaataacgatgacgggttaattgatgatccacttgtttcttcaggcacttggagaatcagttctgttgggtgtagtttatagtcgcacatgatggttactataccttgatagcagggaatcatcaatcaggaagcgaaggcaacaactaattaagatggtgagcaatctcaggcttctggtccttaaactatgtgttttgtaatgacttctttggaacttctagaagtcagctggatgaataaatataaagtgagcatcactaagccgtgagcatcaccaagctgtgagcatcaccaagacttcgtaatgggatttatttattttttctatagaagcatcaccaagctttccttaatattatgactatctttatatgtgtagtgatgtcaattgcagggtccattaagtgtagaacagtgctaaatacatgtattaattttccaaatattttaatcttattacctttattgttgtgtagttttttcattccaaacagtaaaagcgaccctggatttgattaaatgtggggctgctaaagaagcagaccttgatttggtgttggtggaggttaatcttaacaatatggcaccagacacttcggcaaactctgattgttccatcacatattgaatgaacttaaagcccctcttatcggtaagtgtttatatttagagctctattatcttaaggatttctcacctatccaaactcaccattctagggttat

SEQ ID NO: 137003 - DNA, 347 bp, Zea Mays
ccaccatttcagaggcttcttgaaaaatctctagctattgaacacaagtgtgttcaactgggagacttgaagaggaaggccattacctaggggcagggtagcagcagtcttcgccctctctacgttccgtcccagggtacaccagctcgtcctggaggaggaccgctcccagctcagtacgctccacaggggactcctcagacaccacacaatcgtaaggctgccccactggcaccccggcgaggcctacatgatagaagataggccctacatgcttcaagtgcagtcaggttgggcactatgcaaatgcttgtccggtggggaattccactacaccaactcagaac

SEQ ID NO: 137004 - DNA, 346 bp, Zea Mays
ttggggttgcgttgggtttataaaaagggggcagagcaagggaagcgctcaatttataaaagccgaccacggttgctccgaatttgaatgagatttggatcacggcggtgacagaatattgtgactaaagcgagttcactgtggcacgtactggggcaaggtattacgacggtcactaggtactatccacgactcgtgacgacgtggtaatacgacctatggcgtggcacgactgagatcgccggcgtcccccgtcgacatcggccgctcagccatgtcgcaaggcaattgagtgcgatcgataagcttacatccgagaccaaatccacctcccttccgatctttt

SEQ ID NO: 137005 - DNA, 377 bp, Zea Mays
agtcccccgaggagaattcctcctcagagaactctgagtccccaaaatcctcagatgggggactcggaaggagcttatgtttcccctccgacgagtgacacttccccttgcctcctttgccttcggccattgttctcgagggtggaggggaaaaaagagggagagaagacgagttagcaagtgcaagtgacaaaggcaaccggggcgagtgggctatttaaagaagccaggagacgaccattcattttccgcccgttcaccgaacagtcacaagacttcaatagcgtctcaactctccaagaaatgggtcaggcggctggcaccgtttcatataacacggcatcggatggaatcacagtcaaccactcaaacgcaac

SEQ ID NO: 137006 - DNA, 337 bp, Zea Mays
acggtgaaccttgccgaggtgtgagtccagccaccctccttgcttcccggtggacgcgcgacagcggctcgcgaaatcatgcagctcggctggcggtaatggtggtttcgttggcaatcgcgcgggatcagggtgttctcgttcaggggcgagcggagggtgccgaaggcatatatatagccctggcagacgaccccgaacgcgagagctcccatgcccatagctggtccggttttccggcggaagatctgtcgccataggaggtcgctcaacatcctgaaggaggatcccctgacgtccggtcccacaagtaagtggcagggggcatggcgctcaa

SEQ ID NO: 137007 - DNA, 395 bp, Zea Mays
aaggaaattcagaactgaatttttacccctttatgaagttcagccgttttctctgttttccaaaactcaaatctacaaaacccaaatatgaaagtcgcgccaaattaccttgaacatactactggtaaagtttgaaatcaaacaaaaaccgtttgacacatgttgactcgactttagtctcagttttcaaccgagcgacaaacccaactacgccccctcgtatctcgcgaatccgagatcaaatccactcaagtgttataagagaaacaaagagtaaacgacaaggaagaaatcgtgtgcagggattcggaagagttatgagaagatcgcgagccaattagcgtttgaaaatgaccagaccgagcgaggccacgtgttcgatcgcttgcctgacc

SEQ ID NO: 137008 - DNA, 405 bp, Zea Mays
tgccgctgtgtccaacaacccttcatgcggctcattcctctatgtcactcctcgagggcgtactctgtcagaggtagtctccgtattcaacgggaatgcatctctcatccagcctatcaagcgactctctggttcagaggacctgttggtgggcgtggcgtgcaagtgcgaggctatcaacgacaccatgacggcttttttccatgacactcagtatgaagtggagccgggtgatacacctgacaacgtcaagagcaacaacttcagcgggcttgccatgaacgttggtgatggtaggacactgatagctgggacgacgatcgcggttcacctcccatgcgggtgttcgtcgacagcaccagagggagtgctgtcttactctgtgcaggaggaagataccctgag

SEQ ID NO: 137009 - DNA, 365 bp, Zea Mays
ctggaggcctacgagcaaaagaagcaggatatgagcacgcgagcggcctcacaggtctcacaagattacacaggcccaaaaaactctagctaaaccccatgttccgcgtggccttcaaatttgtatcggagatatataggctggttcaagcggtaggtttgcttttgttacatttttagtaactttgtcgtattgtttttggtcgcatagaaggtctcgtgtgagtcttttactgttttacacaactttcctaaaactttctgacctgaatcttcactggacgccttcctttcgcattgttccttgatgtatatgtatatgaggtgatttttccagaaccaaaaaaaaagtcgcataggctgccc

SEQ ID NO: 137010 - DNA, 351 bp, Zea Mays
actaaaaggggcagtaagataatttctgtcatcttcattaagccttcgcatattcatatcattcatattaatagtcgtaatatttgaagggccaaagaggtttttataatagtcagtggctaacttattaatttcatcctcattatccacaagtctcccattatcgagcagagaatgaattctcagacgtctttttttccattggcttttagatgaaaatatttagtattctcatctccagcaatgatatttttttctgtggcaatctgtttcatcttcgtttcttcctcaagaagtaaggatttcagctgcaattcatactccatcttttcatttttctctctatcagag

SEQ ID NO: 137011 - DNA, 459 bp, Zea Mays
cgagggcaacatagcctttttggtggcaagggctgccctggcgtcatcgtcatttggtggtgggctagaacgagtgctcttcttgggggcatcgtgggtttagtcttcatcgtacgaacggtgggcgccaaatgttgagtactgacacgtggtcaggtgggcccaaacacttagagacagatagagagtacgagagagcgacaagacggctggtgggaactatagcttctcgttatgtgtgtcccatcccgctacaggacggtggtatttataggcccgtccatgggtaggtggtccaaagtatggttctacccctggttaccaactacgtctagggaatattccatgtaacgaagtaattacagcaccgtgcgtacactagacagtgcacaccaaataacacacccacaaactacgctgataggtggacccctagggatgccctccggtggactggtg

SEQ ID NO: 137012 - DNA, 383 bp, Zea Mays
gaaaattgcacaagtatggattatacaactagtgatcatgtatgaaaataccaattgaaaaacaccaattgatacaatttgttagataagcagatcactaattgcatattacactaagttctcctcaagttttagtgcgcgcatatatatgaattcaattgataccagttgagagtacttatttgcaatttaaagtaccattagcataaaaggagtatcaactgaacataatcatgcaacataaggaacatgtgcactatttaatcaattaagtgctagacatgagaatttataagctatgctactttagacatttgcaatccaaaaggatgtgatacatatttaccaatgttagatgacgttggagtagcatatacaagaga

SEQ ID NO: 137013 - DNA, 599 bp, Zea Mays
ccggagatgaggaagaaccttggcacggtgaatatgtgtccaatggcgtggcattaactccggtggtcgacgaagagtttagagggagtcacggcgatgcggtggcgaggttgggacacgaggtggacaacggcgatgacacgacgacggcgagcagctgtatccccggcagtgagcaaaggggatgaattgcggctagccggagtgacttccaggtcaccggcggcgaagatattttgaccccgcgacgttatcgacttaccccgagcgtgaatcacgacgtcagcgatgcaaatcgcggcggggaggtcaccggcggtgggattcttttgctgcgtccgatctgatccgttgggggcactgtaccatcgtgaactcccatcagagcatctgacagagcattttgcagaggaatttcctcccaatttcatatggcaactcctcccaagctctgcagcaaaattgtagggctataaaccagcaataatccggctataggacttgaactcatttgagcactaaatcaaggttgaattcttactcatagttggctctgttacactgaacatcttaatttcagactgaaccagcctgacagc

SEQ ID NO: 137014 - DNA, 709 bp, Zea Mays
ccaggcgtcccatatgggctgtcatagatacattccaacaccctccctcagtctaatcgggagtgttacgaacgcaaagactggacctaaaatcagtaaataactgtacaggtaaccctttggtcataatatcagcaaactgaagtgacgatggaacacagagcacccggacctgtcctaaagcaaccttctctcgtacgaagtggatgtcaatttcaatatgcttcgtgggacgatgatggacggggttggcagtcatatagacagcactgacgttgtcacagaagatgattgttgccgaagagatgggtgcatgaagctcctggagcagctgacgaagccaacaagtatcagccacatcgtgcgcaacagcacgatactcagcctccgcgcttgaacgagaaactgtagtctattgtttggaggaccatgagactaagttgtcgccgaggaagacacagtaccctgaactggagtgccgggagtctggacagcctacccaatcagcgttggagtaggcagacaaatccgtaatgctgccggtgccgatgtgaagtccagtggagagggtacccttgacataccgcaggacccgcttgagcagggccagatgaggcttgtgtggatcatgcatgaatagacacacctgctgaacggcataggcgagatccagccgagtcagcgtgagatactgtagagctccagcgag

SEQ ID NO: 137015 - DNA, 340 bp, Zea Mays
ccacaaataacgggaggtggtagactacagggcttaatctcttcttggggtccttcagcattataacatcacagccatgccttctctatctaactgcattggaaagtgcatttctatctgcgagcttgcttcccgacccgattcaggcattccgccgatgccattctccatataagtcccaaacagagaatagggatgaggtagtcaagattgtaggcgctagtgctcaactactagcatctatagatatggacacaagtccaaatttggtgctactcggcaccatcgatatcactaaaaaaatacatcaaagagatccacttcccaatagtactcgaag

SEQ ID NO: 137016 - DNA, 723 bp, Zea Mays
caggcgttgagccttgcgtatgaggtcttctagtattggcttgacttctagactgccattgtctcctacacaagtattcatttgagctgattctttcttccagtcttccaagaagttggtttctttcttcccgaaaggttttcggctgagggcgtctgctaccatgttggccttcccggggtggtagtggatctcaaggtcataatctttgatcaattccagccatcttcgttgacggagattgaggtctggctgagtgaaaatgtacttcaggctcttgtgatctgtgaagatgtgacatttgttcccaatcaggtagtgcctccataattttagggcatgcactatggctgccaattccaaaccgtgtgtaggataattctgctcatgcggcttgagcaggtgtgatgcataggcaatgactttctcattttgcataagtacacaccctaaaccttgccttgaagcatcacagaagatgacgaaatcctgatggatgtctggcagtgtcaaaacgggtgcggttgtgagcttcttctttatgatttggaagctttcctcacacttcggggtccatacggacttattgtctttcttgaggaactcggtcataggttttcctatgctagagaaccctttgataaaagggtggtaatatcctgccattcccaaaaagcttcgaacttcactaacgttggatggctgcttccatttggatactgc

SEQ ID NO: 137017 - DNA, 550 bp, Zea Mays
aaaattaggaaaactcatattaggcaccaatgatcctgatccctgagaccaattacccactgattggttcagcaccgatccccaattgcaaggtgcatgggggttctaggattcgtacctccaaatgacgagaacagacgtgatccttccatgttcgccccggcttctgatgggaatgtcccactgaatgtagggagccttagggcaacgaaatctcaagaggtggaatctcctgcagcaccgctccaccaagccctccttgctcctccacgggttggttgatcatcgacctcttgctgagatactccacctgaccctgaatccttcagctcccccgcaatcaggttcatcttcgcttccacctccggcttccacttctgaatttccccttgctcaacaatcacacccttcatcgttgactccatactcctgatcaaactctgcaccaactccatacgcctgtgagtctctcgattcccttcctcaatcttcactaataaccgtgccatcggatcatccgctcgcgtcggcgccatccctctgatcttcg

SEQ ID NO: 137018 - DNA, 385 bp, Zea Mays
ctgccatacgggtccctgtagggagtccttcactgatgtattcgtagaagtgtgcggtgggtcctatgggttagcctcatgacttggtcgtgcgcgatgtagctctgcttgtcgtcacgagccctgcatcactagtacgtatacgttagcatacgcttggcatggcgcattgttctttcttccctaatatgcgagccactgctcagactctagggctaaggtccccttgtaactgaggttgattgaccccacatggcagtgggggcacatctaaggctgtacgtggaggcatccgagcgtgtttgatagcgacctcccggtgctactttggtatgctgcacatatgtccagacgtgggttggtgacgacatgtcttgtcatagct

SEQ ID NO: 137019 - DNA, 645 bp, Zea Mays
aagttggccccctttattccgaatggtttttgactgagggcgtctgctaccacgttggcctttccggggtgataatgaatttccaggtcataatccttgatcagctccagccatcttcgctgacggaggttgagatctggttgagtgaatatatacctcagactcttgtgatcggtgaaaatgtgacatttgtttcgattaggtaatgcctccatatcttcaaagcatgcactatggctgccaattccaaatcatgggtggggtaattctgttcgtgtggcttaagtaggcgcgatgcataagcaatgactttctcgttttgcatcagcacacaccctaagccttgcctcgaggcatcacggaagacgacaaaatcctgatggatatctggtagtgtcaaaacgggtgcagttgtgagtttctcctttatgatctggaaacttccttcacattttggggtccacacaaatttatggtctttcttgagaagctcggtcataggtcttgctatgctggagaatcctttgatgaagcggtggtaatatcctgccattctgaggaagcttcaaacttcactgacatttgagggctgcctccatttggatactgcttctaccttggaagggtccacttctattccttctg

SEQ ID NO: 137020 - DNA, 320 bp, Zea Mays
tgtacattgatggggcacgcttatcaggacgctacagctccctgcttaccattttgttgagtacttttgttccctcctctcgagtgtttgtgcccaccttacctcgtgtcagttaaccccaacaagcacctaatttgacaccactggtactgtcagatagtgtggcatactaggccaaacagttaagcgtgttagcctagaaaatccaatattagatatatttgagttgaagtcttgattcctaacgagatcctccgaaattcttgcgagattttgttgggctccgcttagtaaagggtctatacctcctcctataaata

SEQ ID NO: 137021 - DNA, 653 bp, Zea Mays
ggctagaattgattaaggattataacattgagatccaataccaccccgggaaggccaatgtggtagcagacgccctcagccgaaaacctttcggggagaaagcaaccaacttcttggaagactggaagaaagaatcagttcaactaaatgcttgtctgggagacaatggcagcctagaagtcaagccaatactagaagacctcatatgcaaggctccgcgcctggacaccgagatgaaaagtcttgtagaaagagctcgcaaagaacaactctcggacctcaagaaagatgaagaaggaaccctttggttcagggaccgtttgtgtataccaaagggggaggcacgagaaatcctgctcgatgaagctcacaactcagcctactctatccacccagggaccaccaagatgtacgtagacctcaaggctagatactggtggagtgggatgaaaaaggagatagctcagtatgtggcccggtgtgacacttgccagcgaactaaggcagagcatcagaagcctgcaggtctactgcaacccctcccagtgcccaaatggaagtgggaagaaataggcatggatttcgtaatcggactgcctcagacccaaaaagggaacgattctatctgggttataatcgatcgtcttaccaag

SEQ ID NO: 137022 - DNA, 438 bp, Zea Mays
gatagagggacgcagttcacttcaaaattttggaagagccttcagcaagctatgggcaccaagttagattttagcaccgcctatcacccccagtcagatggtcaaacggaaagggtcaacaaggtcctcgaagatttattaagagcatgtgtgttgacgttcgatagaaactgggagtccagtttgccgtatgccgaattctcatataacaacagccatcaggccagtatcaagatgtcaccgttcgaagcattgtatggacgaaagtgccagacccccctaatgtggtccaatgtaggggaaaggacactggaaggacccgactttgttaaagaggccgaagagaaagttgccctaatccgcaagaggttacttgaagctcagagtcgacaaaaagttatgcagacaacagacggagagaactcagatttgaggaag

SEQ ID NO: 137023 - DNA, 371 bp, Zea Mays
gagcgaggtgaggagaaaccgggatgggaacgtgaggtggaggattcttccaaaggacgaaggtgaggctacagtggagtagaacaggcggtggtggccagatctagaagaacgacgaatcacccccaaatcgtcagacgatagagagcaaagaggagaggttcaagagagtgtgagaggacgaaggtgaggctacagtggagtagaacaggcggtggcggccagatctagaagaacgaggaatcacccccaaatcgttagacgacagagagcaaagaggagaggttcaggagagcatgagaggacgaaggtgaggctacagtggagtagaaccggcggtggcggccagatctagaagaacgaggaatcgc

SEQ ID NO: 137024 - DNA, 776 bp, Zea Mays
ttttctacatttttctataattgttttggttctggggataaaagaaaaaggaaaacatttgaaaagtgctgggccgaattcagcccaggcggcccggctaaggcagaaaggcgtccgcgctcgcgcctgcgctgatgtctttacagaaaggaccccgacgtttttactaactaagaacaggttatgtcactgtttaatcaagtcactgactatttgctgaagagccctccaacttctaattctttacacgcccacgtccacgacgacggcagcgcgcggaggagctccggcgaggttctataccggccgattggggctacggcaggtttctccgagcggcggacatgaaattggggctagcctaaccatttcccctaacttaattgcacaaataaccaacccccgagctctggccacggtgaccgagagcagagcggcaagatcgccgtgttcccggcgaccagagagctcgtagtttaattcaatggcccggaaagcatccaaggcatgtgagaaagcttaaacgaggaagcaggggatgggagctgaccggagttgggctggcgacggtgagctcggtttcacggtggcgaaagcttgaattgggggaaactccaaattcgagcagatgagtggacgattgtggccaattagcggtggctagctagcagactaccccacggagctggacacgggctcaatttataggaaggatgggcggtggtcgcgaatttggtcgagacacgcggcggtcggaggtggagaagaagcactgg

SEQ ID NO: 137025 - DNA, 293 bp, Zea Mays
ggaataggtgcatagatgattgactcttgtgcaagtgggaaattgttgaatatatacccaagagacaatcatcatacatgagaatggtaatggacgtttagggtaaaagcacattaacaaagttttatatatacaaaggcattttatccatgcatgtgtaaatattgtgggtacactgctaatattgatgtggcgttgatcatcgacgaaccactttatccatgaatggtggcacacgggaacatatggctacttccactacatcgacatggccttactccattgtgttgcgt

SEQ ID NO: 137026 - DNA, 491 bp, Zea Mays
attcgtgccacgggcgtatggatttcgttcaccgggtaaatatctcgtcgcggatgtgcctgagctactgtggcctcgctgtcccctgcccctttccaccggcgacgtggcctcatggccgtcaccggagttgccgtgctttgctgcggctgtgccacgctccaagtcttccaccacgccgtccctagctgtaatagctcaccggtaaccgccgtagctcctcaactggtggtcaccggaggaagcgccacggtgaaagccacccatcccttactccagtgtccctgttccctccggccgccagcacggctcggtcgaattgatcgccaccgcccccggagtctataaattgagcccgccgttggctccgcaacctgatcacgtaccccagcatccagtatcgcccccaagcttccaaccataagctccaatttcaaatttgccccaactcggttctaaaacaccgcagggtcgagctcactgcggccagc

SEQ ID NO: 137027 - DNA, 357 bp, Zea Mays
atgcatgcatcatgtttaaaactatactaataaatcttcccctcttatggagatatggcgcgcactaagactacccagcgcaaatcgactggacctcagggtgtgcctcgacatcagttggcctcccgccatgaaggaagtagtagtggaagtaatgacccgattggagacttggaagccagggtggagcaactccggtcagaactacgccaccgaaatagggcacgtgagctggatagccactgtattgcgaagctgtcagccgaagtgagtcgcctgcagtacgaaatttcagaacgcgatacgaccattgattgggtcgttaacttgcgctctttcgcttgggactgcgaagcg

SEQ ID NO: 137028 - DNA, 337 bp, Zea Mays
ctatgaatttcaaagccgaaaatcctccaacatgaatcatatggacaaataaatctagcatctagatattccttgacctcattccttgtgtttgtttcttcgtcgacaggagtgtcttggccatctaaaactcgttgtaggtataatttgctgcaatcaggacctttggtaacatacttgaatattttatgaatatacttttgttacaccactctacattgatgtgcgcctgatatttcttgagtaatgtcatgttataaggaacgatccacctgatgtctaatttggtgtttgatttgatgacaaatctagcattgctcgctcttctataaactgc

SEQ ID NO: 137029 - DNA, 450 bp, Zea Mays
tgggctgtgatgttccagactgcaaggttctcttacgcccctttgcataacatagagattgttggtgttctcgagtcaaacaatcactgacgaaatcgttgaaggaagtgcaggaggaaattcccatactcttcatcatctttgggcttaagcccctcttgaaactagcaatcttcatggccttagtgtccacatagttaggcgcgtaatgagacaagctgttgaaagcatgcagatactctgttactgattgtgcgccctgagttaatctcataaacttcgacaccttcattgccattagacccggtggaatataatttcctctaaaagctgcggtgaattggtaccaagcaatgggagcattctcaaggtaagcggtgcggaaatgagaccaccacatccctgcaggtccctacaactaatgcgctgcatactctatcttgagaccat

SEQ ID NO: 137030 - DNA, 431 bp, Zea Mays
gggatcactttgtacgcgcataaatgtggctgtgtgattctttttacaactttatagttaactggggacaaattttgaactaatggtaccttgtattatggagcaatacgattatatagtgacactcggttgtggaacggagggagcaaaactacagatcagagaatgtggctggactggaggccaccacttgtcatatgttcaagttttttcttggacaatctgaattacggttgtcagttgtgaggatgtaggtagagagagaataaatttcatagaccatgtacataggggttgaggcaatagtgtaattttatactacaatggtgtcgccatacccctataaataggtggacatcgcccatgcatatacagggtcacttatcatcattcacatgctatcgaagcaagcacttagccttcgaagccca

SEQ ID NO: 137031 - DNA, 447 bp, Zea Mays
tcgaaacaaaacatgtcgtaatcgatcctagttccaatcatatattcatatctatatatttattctaggagaactgcaaatctgaaggaagtccctttacatatactgtagatgaagagcaacaatagaaactcgctgtgtcctgaactcatcatacataatcgatcgaacgaaaacacaactaaatgaaactcttgagaagtaaatcacagacaaacaaaacgagaaaaataccagacctcgcttgttaactgctcctcgtggcttccagactgctgctgccccctaaacatctctctcctctttgacagaagctagctaataactgcctaacttccctctagctcatccagttctctctcttcagatctctttgttcctgcagcggtctattgcttataaagataggccgctgctgcacagcctcgtgcgtgtctctctctctcc

SEQ ID NO: 137032 - DNA, 492 bp, Zea Mays
caagcacgacacaatgaagtcatcgtgtcatgtcgtgccagctcgcgagctgccggagccgcctaggcacgacactactaagcttacacgggtcgtgccgtgccggtggcaataccgtgtatgtgctcgtgcccaaatacaacaaccaacatagaaagaactagatctaggacaacaatccagcacaagaacaagtattcaagcatatccaaacacgactaatatatacaacaaagatgagagaggggggagacaggtgggcgacacaaggcgatgcgcccgctagagcagacatggagatgaacaacgcgatggcgtagagacaagcggcgcgcgcctcggatgagcaacacatcgacaagcgcgacagagacgattggcgtagaagatctccctccctccatgacgcggaagaggtggagacgagcagcgcgccgagcggagatgggcggtgtggagcaagaggccctccggcatggagacgtacggcgt

SEQ ID NO: 137033 - DNA, 405 bp, Zea Mays
ggcgagtatccagtttggatcgggatgctggtacttcggttcctgctgttgaagaaatgcctgtgactgaatttactgatgctgaccccaatgggtgtacccaatccgctgctgatcccaatgtgggtgctccatctgttgctgatcccaatgggggtgctgcttgtgttgccaatgtggacgacgaggaggaggaagatgaagttcctttgactcggaaaaacagtcgacagttcatcgctagcggtgaaagtagtggagttccctctcctgctttgtctgctctcattggtctgcaagaactgtccctggccaactttgatcagactcttgaggatatggttccagaggacatgttatcagagccggtggatgatggtgtgatggaggtttgcactgatgtgc

SEQ ID NO: 137034 - DNA, 708 bp, Zea Mays
tggaatttgacccatttggtctttctgtgaaggatcttgccaccaggacccttctcgctcggtgtgacagccccgggccaccccggtcgtgatgtgatgtccaagctctctagcagcacctcggttccggttgtaggggattttttgagcacctctatcatgcttgtcagttaggttgccatgttaggctcccattccccacctcctcttctagagcagcatgcccttttgatctgatacactgtgatgtatgaacatctcctgtaatcatcatttctggctctaagtattatttactcattcttgatgacttctcacattatttgtggacttttcctttacgtcagaagtccgacacttatcccaccctatctcacttctttgactgggtctccacttattttggttgcatcatccggagcatccagtgtgacaacgggcgcgagttttataacaatgtgtcccatgacttcttcctctctcgcggcgtccacctccgcatgtcatgcccctacacgtctcctcagaacagccgagctgagcgtatgatttgcacaatgaacgatgtcgcgctctctctacttttccaggcctctcttcccgctcattactgggctgaggccctcgccactgccacctacctcctcaaccgtctccccaccaaggcagttgcccaccccactccttacttcgctctcttcgtcatcc

SEQ ID NO: 137035 - DNA, 291 bp, Zea Mays
cgtggctgctgatggcaattcgtttggctctgtgtctaagtgttttgagtctgatgattctgggagttcgattgcgtggacagaggagtcttcagatgaggacttggattattttgcagcgttggatgtggctgcagcggagccttcgccgcgcacggagggttctgaggagcttccgggcgcgagtactgggtataggcagcgaatggcggtggcgaaatggagagtgagtggattgtcgtgaagcggtgggagtcatcgtagtgagatggagagtgggcgtcttcgcgt

SEQ ID NO: 137036 - DNA, 612 bp, Zea Mays
cggaggtggggacctggtcaggcatcttagtatgttgctgggacaaaacccctagagcgtttgctatgttgggtgacttgttgtgtggaagtgtttgaatcagagagagtactggtggcatagttatatttgcgatgaagttttgtaactgcaagctgttagtgctgtttggctgagaatccggtggtaaactacaagcctcctgactatgctgggttactgccgtaactgttgagggtactggacattcgtcttgagcagcagtcacattacagacttgctcggcatagatatcatttgattctacttggggctcgacaacttgaaacccctgctgcgactgctgatgcacgtccacatttgagatcttaggattcagagaattatggaggtttgagataggactggggacaggcttactaggaagtggggctgttgcagtatctgaagagagcttcgatattaccttgggagatgtagcagtttccatggcgaggtcgttctggatgtcgaatcaattggctgcatcttgggcggggctttcgtcagcgaccatctcaacaacggctccaggggacgacccatcagtgcgaagagcacctgcagagaaac

SEQ ID NO: 137037 - DNA, 792 bp, Zea Mays
aaaatgttgaaaccctaatactaaccctacttaagctatttaagtagaaatgaagaaaatggatgaaagacaatgaaaaacataaaatcatggcttaggccaattataaacattgaaatacactaaataagatacaataaagattatgaaagcttggccaaaatagtttattaaaaactccaaacaagccatttaagtggaagttcaatggggaaatctgaaattcagatttctgaattttcagcccttgaacaaaaaccgagcatgttcaccttgatccttaactctaatccaaattctcccatggacaaaatcgtgtctaactaacccctctgtcacatgccagaagatggcattgggacgcgggtcctagacacgacaaatccaaggatttgcctcgggctcgggctgggagacagaccagacttcagagctccaaatctttgaaaccagtaggcaaaatcctatgacccccacacaagatcggtatcttatagggaggagaagaggttttgtgcactgaccaaggcgagagcaggctcggatgaatgaccacacgcgccagaacttgggcagaatgaacgcgcacacgtgttcgaccctggtcggcatgccggcgttcgcccaacccgcgcgtgcgctcgccccaacgtctggtcaagtccaccgcgcgccctcgctctcggccgtgctcgcccacgcctttaaagcctccccgggcatgcctcacctcaccccgtgttcaccctcgctggccaggcgcccctctttagctccggcgagcctttcttc

SEQ ID NO: 137038 - DNA, 428 bp, Zea Mays
aagaagtcagtactttggttgcttcgcttggggagattcctgatgacgaacggcaggtccattttgaggtgcccctgaaccctagtgatgcagacataaatgacatgcttgatctgctagctgaggattcttccgacgctgttcctgctggtacgttggcggtggtgccccttccagaggttgatgcaactttggatgtccagaaacctgtcagtactcgcccgagacgccctagccgaaccaatcagcctgagccttctgctgatgagcaaaagaagaaaagaagacgcctccggcgagtatccagttttgatgaggacgctggtacctcagttcctgccactgaagaagtgcctgcgactggacttactgacgccgaccccaatgggtgtaccccaactgctactgatcccaatgtgggtgctcca

SEQ ID NO: 137039 - DNA, 774 bp, Zea Mays
cgttatttggtcatctataatttaatatcttctctatgaccgtctttgatctcgtgagtatggaaaaaaggaagagaaatttttttatctcgtcttatcccacacaacatacctcgccaccagtgggggaggacaaaataaaaaaaaggtatggctagctagtagaaaaaaagagacaatgttggtccactttgaatcgtgtcgagtcagaccacgacactattaaatagattatgtctcgggacggcccactagacaccgctatttggtcatctatgaatcattatcttctccctcagcatatttgatctcgcgagcatagaaaaaaagtagagaaatttttttatctcgtcttatcccgcacaacatgccttgccacccgtggcggaggataaaataaaagaaagatatggctagctagctagtagaaaaaagagacaatgttacaccagcaagaatcgaacatgcaatctactgttacaaacatcaagtcttaatgatcgcaccaggtgccatactcaaaccataatgagccctccgccacccgtctctttgtctttcttctcgccacgtcgtcgccaacgtctctagagaaaattctaggtacacagtgaggcgcatccgaaaccacacaatctgaccccaggagcgcgctgctgcgtgtttagattcgcgtgagacgcaccactaaatctatcgtgccgacaaagatggcaccgccggtccgccgcacgtctaactcgatattggtttggctcaacccgaagggtgccg

SEQ ID NO: 137040 - DNA, 373 bp, Zea Mays
ctgctgagctcggagaacctgaaatttcctcttgaggtgccctttttcttcctcttttgccctttccacttggatggctttgttggagaggtgagagaagttgaggaaatattggctggcgaggatggtcttaagctcgggtcttagccctttcagaaaacgggccatcttcctggactcggtgctgacatcgtcaggcacgtaacgggccaactctgtgaacttgtgaacgtactcactgacggtccttccaccttgtgttagttcccggaactcatcttccttgagttgaactatcccctggggtacatggtgctcacagaaggctgtttcgaattctgcctaggtagcatccctgacggcctcgctgaag

SEQ ID NO: 137041 - DNA, 586 bp, Zea Mays
cggacctccgcgagggggcaccgaacccctgtacgcacaacctggacccccgattgtggctcaggactcccgagtaagcgtgtcgggtcccttggatgaggtccagatccctccgagtaaggtccgggccacaacaaggtcccgggacaggggaaaccttgacatgagctagggtccggtactgacacgtgtccgggccttataccgcgcgctagcgctccccgcttagacggagactcgatgctaccatgtggcttgttgaccgtgacataagccaacaggcggacgtaaggcccctaggccgcgcggtctctgcatttattgcggagaggacacgccgcctgtccaccctactgacaggcgatgtgccccctcaacatttaatgcgtcctgtccattccgctggcaggcggcgccagagcaatcctgcagacgatgcacctatccagtctattatcaaacagtacgcccgtgccgcgtggcgcactatgatcatcatgcccagtatcaaatattggtagctccatgtactacttccgtgatattcctgggcctacatgtcggggctcagcacccttgtacaagc

SEQ ID NO: 137042 - DNA, 849 bp, Zea Mays
gaccaatctttgtaacttttcaattagatctctcagactaacatataactcttgtaaccaagtcgagttgtacctttttcatatttaataaaagattctcagtaggggtctcccctcctgatctttcaaaaaaaacaaggactaacacacgtggctttcatgctcaagatccacaccagccacgacttagctcaaatatctgctttgtccagttattcaaatagagagtagagcagataagggctcattgtccacaaatatccaaccaatccactgaatacagacaggagtagagacagacaaaaactctactgtggtaggctcaaacaggtgcaaaactgatatttttctgcagagggggactgaacctcgagccccatattgcccaccccaagtctatctcagtttgtgcacataagtggaggacagcagggatgtgaagatctttcttcagatttttgtagcaactcccagtacctgttgaactctgatctctccctattcacctccctcaatcccacaatttcccatagtaacatggggagcacacttactaaaactggtcgattaaacaaccctctaccaattcttcataaagacttcagccttaaaccccttagatcaaacaccaaacagctccaatactaacagaaaatactagaacacagctttagcgactgaatcgagttcagaatttcctagactgacagcctgacttggagcaacactttctcccaattcctggtgacaacaggctgattttggttcacagaatttgctcacctaacacaactctacaagtttgttgcagtagcctaaggccagatgcccctaattcaagagttatgg

SEQ ID NO: 137043 - DNA, 1035 bp, Zea Mays
tagtggatgaagacgtcattaggctagcaaatgacattttgtgataccaggtttcctataatcccctctattcaaggcatacctacaaggtgtttatgtccactcaagaaaaacaaaacacatcaatatgccacattgtttctaaaattaaaataatgaccttggaaaatttagccaaattacgtgagtgaactgtacaaagataggttaaggttgtaaggcaccttttttccaccatacagttgcgaaaaagttggaatataaagaattcaaaacaatagatcaccttttaaacctcaaatgacgtttctatgatattgagggcattgtattcacaactagtggatgatgacgttattgggctagctaatgaccttttgtgatactaggtttcctataatcccctctattcaaggcatacctagatggtgtttatgtccactcaagtaaaacaccgtacatcattttttccacatcgtttctcaaaataaaataaagaccatgggaaatttatccaaattgcgtgtgagatctgtccaaacataggttacggttgtaaggcaccttttttccaccatacagatgctaaaaggttggaatataaagaattcaaaacaatatatcaccttttaaacctcaaatggcgtttctatgatattgagggcattgtattcacacgagtgggttttagagtacaactagtggatgaagacattattgggctatctaatgatcttttgcgatactaggtttcctataatcccctctattctaggcacaccaagatggcgtttctgtccactcaagtaaaacaccacacatcattatgccacatcatttctcaaaatataataaagaccatatgaaatttagcgaaattgcgtgagagaactgtccaaacataggttaaggttatatgacacctttttccaccatacagttgctaaaatgtaggaatataaagaattcaaagtaatagatcaacttttaaactaaaaatgatgtttccctgatgtcaatggcattgtattcaca

SEQ ID NO: 137044 - DNA, 881 bp, Zea Mays
ctcttcactggagtcatgatatggactccctgggtcatctaggttcggaacttcatctaccaattctgcagggttaatgtgtccaatccctccactttgtagtcctagcttcttagccctgatattcctcttcacctcattggcatattttctgaaatcaattgcttcatcatcttcccctgaactgtcatcttcaatgggttggaagtagtctttatctaatgattcagtttcagtgtcttcctctttatcttctactggaaattcagcaaacctattatcttcaatttgcttgctgctgccaccatcttcatcttctacaatttgcttacccctgccacaatctgctgcatctcctagactgactccttgtgattctttggaaggttgctcaaccatttgaagacagacaacaacttcctcaacataaatttctgcaacaccagcatcagttatgtgactaaccattgttaggcaagatgcatcatcgactagcagtacaagaccattgctcaattctgcccctggcttcaaccaatgtaaacgcataaagttcttactgacaacatgatctgctaggtggccctgtatctctggaagagaaaccttgtccaactccacatatgacaaatcacatttgcctcctacatactcaagcttcccttgatttatcacaaatcccccactatgatggaacctaattgacaaatgatccaacctacatttcataaggaaatgttaatacacttcctaaatcatgcagaccttggactacagctacgtcgtcatccatccacccacaagatatggaccttcccccaaaaacaatctgccaactccaaaactaccagcgacatggacaagtgggtactcacctctcg

SEQ ID NO: 137045 - DNA, 652 bp, Zea Mays
ttggatgagcggtggcaccttttcttataggcaccaggagcccctttagctttcaagttaataccttgaaagggccaacaaatgacagcaactcccgaccatcaagagacataagttaattacttctagttaaaagatacacagttttgctggcttctaagcaattcacgcggattcggcgtgttgcgcggcgacgcgtgccgtggtggggtcgtgtttggcgggcttcgcgccatccattacgcgacgcgcgtcctccgtcggtccgatgcacgcggacgtgagacctcactttcgacggacgcgaaatttccagccacacacctctcgccacagtacaaacgtacagtgcaggcatggtcgcagctgttcttagctgatggcgatgcgggacctactggagatgtctctgctccatgcctccattacttcatgccgtcctccctccttccacgctccttcccgcaagagcagcttccctcctccctttcccccaaacgctcccctcctcttctctcgcgctgaactcgacctggcgtccgactccttcacggccccgtcgcagggtgtcgtcatgggtgatggtgtcgtcgtccctgccacagtccgtcggggtcggcttgtcctcggatctcgcatgatttaggagcag

SEQ ID NO: 137046 - DNA, 374 bp, Zea Mays
acttggcaatttccctcttcattctggtccactagtataaggatctgagatcatgatacatcttgttactgccggggtgcatggagaattttgaaaggtgagcttcatccaatatcttctttctgagctcagggtccttgggaacaaccaatcgatctccaaaccatagaattcctttgctgtcctgacggaagcatttgtatttttctgctttctgcttgatcatttccttgataacctgaacacccttgtcttcaatctgtgcccggactatttgctcttgtaaggtgggctccaccaagatgtaacttaaggcacctgaagaaacaacttccaggttcagcttgcacaactcatcacacagggtggtaact

SEQ ID NO: 137047 - DNA, 367 bp, Zea Mays
caagaaggccgagtcatagcttatgcttcaagacaactacgccggcatgaggagcactatccaactcatgatttggaattagctgcagttgttcatgcccttaagatatggcgtcattatctgctgggaaatacttgccatttatatacagatcataaaagtttgaaatatatttttacccagtccgaactgaacatgaggcagagaagatggcttgagctgattaaacattatgatttagaaatccattatcacccaaggaaagccaatgtggtggcagatgcactgagtcgcaaagcttcctgtcattgtcttacagtaaggacctctgacaccaccctatgtcaagaaatggaaaagttgaacc

SEQ ID NO: 137048 - DNA, 567 bp, Zea Mays
ctcatctggtcttgcttcggccttcgaaggccgagggtggcgattgaaaatgatgctggagcgagtcaaaaggctttcagcaatgtctgtgctttcattggcacaagagacataatccaagagcacatagcctacagagtgtggccacttgtggataactgggagatgccgaaggagactgctgccgggtccatcgaaggtggattagttcggtcgaaatataccttcagattcagggaccagtttgacgaaccaaatgacgattggctgaaaagtattgatgctactagcgacgagttacttggggcatataccaaagtcaaagatgatgctttgtcctcagccttcggaggtcggagcaagaaaaaactgaacaaagtttttgatgcgattggttttgtatatcctgattattgctatccctcgcggaagcaaggaaaaaagaggaaagctgctacttcggccatcactattgtgccgaagggcaagaaaatcaaggttttgacccaccgaccaagatatattgaaacggccacagtgccaaaatttggtgaagaaacatattcc

SEQ ID NO: 137049 - DNA, 563 bp, Zea Mays
gcagaagttgcacgagtgcttggacacacaattgaattttagttcggcctaccatcctcaaactgatgggtagaccaagagaaccaaccaagtactggaggatatgttaagagcttgtgctcttaaacatggtggtagttgggataagagcttaccgtaggcagagttctcttacaataatagctaccagaccagtttgaagatgtcaccgtttgaggctctatatggcagaaaatgcaggactccactttattgggatcaaactggtgaacgatagttctttgggcctgaaattatacaagaggcagaagaacaagtataaatgataagggagaatttgaggactgctcaatcaaggcaggaaagctatgcggatgcccagagagggctactagagtttaaggagggtgatcacgtatatctgaaggtgtcaccaatccggggtatgtgaagatttaaagttaaaggaaagttgtcccctcgcattattggacccttcttgatcttaaagcgagtgggagaagttgcctatcaactagaactacccaatcatcttgctgatg

SEQ ID NO: 137050 - DNA, 384 bp, Zea Mays
ggcgagagagcgcgtctgccacgacgttcgtcgcgcccgacctgtactcaacagagaagtcgaagcccaacagcttgtcgacccaatgatgttgtgggatcgtggccaagcgctggtcgagcaagtatttcaagctatagtgatcggtcttgacgacgaactgccgaccctagagatacgcccgccagtgtcgcactacctggacgaggccgatgagctcgcgctcgtaggccgcgagagcgcgatgtcgaggagcgatgggtctgctgaagaatgccaccggatggccctcctgtaccagcacgacaccaaacccatgtgacgatgcgtcacactcgacgatgaatatcttcgcgaagtccggcatggccaacaccggagtag

SEQ ID NO: 137051 - DNA, 567 bp, Zea Mays
aaggacccaaacggatagattttgccctagtgcaaaggttcaaataagggggatagagttccccgctgatttaatagttatgggtaaccaggatacaactatagatgtcatcctagggatgaattggctaactaagtatcacgccagtcttagttgtgacaagagaacggtgaagttagtgtccttattgggagaagaagtgttagtagagatggtcttgtctggaccaagaaaaggaagttgtcaccaagtcaccgcccgtattgaggagattaaacaatcagaggctatcaacgtagtatcagattttcaagatgtgtttcccgaggagttacctggtatgccacctgaaaggaaggttgaatttgccatagagcttataccagtcaccgcccctatttccaagagagcctatcgagtgtccggaccagaattggtggaactcaagaagcagattgatgagttgtcggagaagggctacatcagaccgagtacctcgccttgggtagccccaatgctgtttgtggaaaagaaggatgtcacgaagaggatgtgcatcgattaccg

SEQ ID NO: 137052 - DNA, 276 bp, Zea Mays
ggcttcaacaacaatgacttcacgactttctaaggcagctacacgggcttgagctgtggtgagatccacatgcagctgacggttgcgcttctctgcatcttctgctcgggcaatcatctgacggtggtgccgagccaagaaatcatactgggcatctagggtgagcaggtatgcaatgaggtacacgactgtggggtcgtcctcaagcagctgctgctcttccaatgcacgcatcctggccatccaagcgggacggtctctctgaaagggcggaaa

SEQ ID NO: 137053 - DNA, 312 bp, Zea Mays
ggaattatccacaatcactaggacccgacagtcagagagtgcactgaggaaagagcccttgatctctgggacccattagtcagttgggagaggcggatgtgtcaacctagaaacgacccgccctagtcaaaccacgtggcaccgagccgggggtctggcatggcggaacttgacaagagagaccgggcatgttggaagggaaccacacgagtggatcttgtgctcggccccagactgtctcaccatacacagccaaccgtatttaaccatgcctgacactgagccacagcgcggcgctggtccgcttcccac

SEQ ID NO: 137054 - DNA, 576 bp, Zea Mays
gatcactagcattgtctattcttcaaacactattggaacgctggcatgagcctagccacttctagcaactatccacaatgcggaccgtagaggatagtggcggacgcaggacaagaattcatgaggggacaagaaaaccatgtgacaacaaaatcaagcatggccaaaaaactagcgttgcatagaatccaaatttcatatcaatagacaatacaagttaaaagaagaaaactatttaaacaaaagaattgcaaacatggcactaagttcttgttgacttacatatctatcgaatgtctatccttgaatggcgggggcactaggaagggggtgatgtcagacaacctctatgacatggagccagggctccctggttcaccaatgtcaccgaccgtcgagaatgggtcgcatcgttgcgacgaacgagatcggacctgccagacatgtcggtgtcatggtgatgacaagtggggtgaggatgtcgtgagggtttggtgtcgagcggcattgcacgttaggaaggaggcagtggtagacgacatcgggatggcctggcttggataatgtcaaatagaa

SEQ ID NO: 137055 - DNA, 344 bp, Zea Mays
cggacagtgtggaatacatgcagcatccagaactctggttgggaaagtcttcaggtctggtttctattagccaacagcaaagtgtgatgcagccgagttagtccagagatgtgaagcttgccaattcttgtcaaagcaacagcatttaccagcacagcaactgcagaccatacctataacatggccatttgcgtgttgtggattagacatgattggacccttcaagaaagctcagggaggttatactcacgtgctggtcaccatcgataaattcaccaaatggatagaatacaaacccattgcttctctaacttcagccaaggtagtggaattcatacaagaca

SEQ ID NO: 137056 - DNA, 996 bp, Zea Mays
cgtgggaggaagacagagtacctcgacatcccactcaaggacagcatcaaaggatggcgcctggaatggtttattgtagagaatcacgacaattctctaccccctcggtcagggagatagtcagatgttcgcgctccaagttggactgaatcccccacagacttggagatagccgagaccagggttctacttgccaaggttggcttgttgaaggagaaaggtctgactgctgaagctgtggtcaccgattttgtttttaagaacatttagccactgaaggatagagcgtacccagcttatctgtatcgtggcctcactgactcgacccgggttaccaacagaaggattcctgctgtggatctggtaagccggcttgaaatgattcttagaggcaaggtgtcgaatattggtgctcctgttgcgtattcagcctggaatctacctccttccaagactttcatcagttttgtgtcaaatcctcctactggtgatagtggtttgggccttagagtgtgaatctctcccgaagaggttgaggctttggttgtttcgcttggtgaaatccccaatgacgagaggcaggttcattttgagatgcctataaacccgagcgacgcagaaataagtgctatgctggacatgttggctgaggattcctctgattcggtccctgctgaaacactagctgtagcacctatcccagagcctagaaagaccttggacattcaaagatctgatagcactcgttcgaagcgtccccgcccggccagtcatccaacttctcctgctgagggtaagaaaaagaaaaagagacggcttcgacgagtgtcattcttgaatcaggatgccaacccttctgctcctgctgccgaggaagtgccggtggagatttttactgttgatgatcccaatgggtgtgacccggctgatgctgaccccaatgggtgtgaccttgatgatgctgatcccaatgggtgcaatccggccagagctgat

SEQ ID NO: 137057 - DNA, 466 bp, Zea Mays
tgcgatgggtgagtgggctccaacggattgtattggggacaaataagttaagttacaattttttatagttttgttgtgtgattagagaaagtcgtaaatcaagaaggatggaatgtcccagtctaatctgttgaaagttctcagaggatagtatcgctgtgtggggcggctattgcctgctaatttagcagactgaggtgtgaatgcggtttaggtcgattagcttccattttggacaaggcgcactgttttgctgtgtgtgccctgaatttgtccagaatccccgtgaagaattaatgcttggtgaaacgaacaatgtcatgtgatgtttctccagaaatgtggtcccgttcattttttttatatagttggtggtgattgcagtactgaagttatcctccctggaagctggaacgattgaactgtagtggtcggtgttaatatagtacaaagtctagcatttggc

SEQ ID NO: 137058 - DNA, 355 bp, Zea Mays
gaaagccatcgtgagaaaggaagtcagagctgaaacgagtgtctcctccactcgtgggggtgggtgaattcatctgcggaagggtatcaaaggtaaagattatggtggaaggaagaaaaataaaagagcctggatggttttaaaaggaagcaggttagctcaagttttaattccttttagcttttataatgcatgcatgctggaagtaacgtctcctctccgaatataagggtgcttcaaggcatcctttaaaattctaagtactggcccacagggcctacttaattagccacctatttccccctttattcctaaggcctttcgtcctaggtctagcggtctagtcctgacgatt

SEQ ID NO: 137059 - DNA, 480 bp, Zea Mays
gtaagagctcacctctcctcagaattctgtggatcttcggatctgtttggttatggtcagaaatgagtatcactccacacagctgagtgttggcaataattccaactttagaaacttatgaattgttcagtgtattcaggatttagtgcatgcttaaatttgtgctgtatcttgatacccttttgcaagtgttatgcttaactgcatatctaagaatatttttgtcacgttgcaggactctaagctgtgacatgtgaaactcatattatggttaatattctattcttctgatatgcctattcatgtaacaaaaaggctttaaagaggctcatggttagattaacattaaactcagactttgtaataattttagtctgatgcctgattttatccatcatctaaaaacaatctaaaggcaacgctttaatgataatttccctcctctcaaaaacacgttgatatgcctagtgagtttcattc

SEQ ID NO: 137060 - DNA, 435 bp, Zea Mays
tttgcatccaaattttagtcttgggctctattaggctagtttcggctaaaaatctccctatataaacctagggttggctagttggacaacgtcttaggattttgacctctattaggctagtgcatgccaactggaggatacaagagcacaattgagtgataggacgcgggtggttggtcctttgacaggtaggaaccatactatgtatatacatgtaatactacaagtcctttggactaactaactctctataagagttccaagcaagatccaccaaatccaaggcaagggagttgaatgcaatctgaccagggcggcaatagcgagtgacagtctaacctaccatgttccactcctttgtaaggagacagtccctctctaaattatagttgtaatcttgcacgtcgcctacatacaaaaatccatgattagcaa

SEQ ID NO: 137061 - DNA, 288 bp, Zea Mays
tgatcttgacaagtcttcaaggagccttctaatgtcttatttggggtgttcatttatttgattaccttgttgccttagtccaagtccacgctacatacttttagctataaacataaacactatcaaacacactagttcaaatggttgtgttgattgtaaaacaccaaaaacattaagcgaatggggcatgcgtgatgcattacgcattagagaatacccgttgaattcctccaaccctgcggctggtgacccatgattgcaggaggtcgccgaaggtttaaaagttcg

SEQ ID NO: 137062 - DNA, 325 bp, Zea Mays
gttaaagtgttggtcatgttcccctttccttgatttgagttcctagagggctgctaaaagttggatttattttgcttcggatatgggcagtccttgatgaaacgtccagactttcaacagctgaagcacccactagaagaactgggaagggcaggaaaacgagtaccagggacactcgactgattgttaggaactggggcagtagtgggacgaataaatacgggctgcttgaatggatatgaaggtggcaaggcgaagaacgattttgattgaaaggtcggatgaccaaccttgttctcttttcaggtctttgatttgatctctc

SEQ ID NO: 137063 - DNA, 337 bp, Zea Mays
gggggcaatacagattgatgatagatgcgagacgttggaatggagcacttcgtagacgactacttttctgttgaaaaacttaaaaaggcttacgcacgaaggattgaaagtgtgggcgacaaatccttttggccacaagtggccatagccgaggaagtgaatgcacctattggtaagaggagtgttgggcgacaaaggaagaataggatgaaaagctgcctagaaggtggtgctgcaaagaagaaacggtccatacctgaggaggaaaaggagaagaagctactcagaggaaaaattaaatgcccgaactgtggccaactcggtcataggaaggcca

SEQ ID NO: 137064 - DNA, 667 bp, Zea Mays
tcgatggtttggtaaccgccacagaagatgccgcacaggagagtgtacaatatgcagtggagatggtggccgcgcgctttcagcgtgatcctgccgactccgaatagctgaacctgtagagacaaggcaagggttccgctgggggcggctgtaataacttttggccatgtaacatattttaagaaccgttaatcaagtagcactagaacttatctgtatgttatttgcccttgttatgtgtagcgtcatcaacttccacctggtgcttggcccccctaggaggtaggctcaacgtgtcgagtctggataccagtataccaaagaaaaaaatggtggcccggcccctaggaggtagtctctatagtttgagactacctacctctggactgggacctggacctgcacatagcttcagctttgaagttttaggagcacacccataggacccaccatctggtatctttcatcctttgatttatgcaacaggacctgcaggatttagcctgggaagccaagccgtatgctcggacccacaggatcacagttccaaatactagggtacccgttgcagagtggtggagcgtgcaggcttagggtacggaaccatgctaagcagctacacagctccagaccactccaggaaacgagcgcccattctctagaactg

SEQ ID NO: 137065 - DNA, 521 bp, Zea Mays
agtcgagcggtttggggcagtgtacagagagttgtcgtgtcacaaaggtggcagtgtcacaaggttgagtcccgaggtaaaaccatgtcaagagcgtgtcaaacggtggagagaggtttccaaactttgccacggtgtgttcaagggaatttggcgccagtttgatatttggactcgtttgatttgagttttgaaaacagagaacgcgattgatctttggaaaggggctgaaattcagatttctgaatttctgaatttcccccaagtgtattagtttaggggctgttttggggattttgaaaagttcaaatggcaaaccttccttactatgctttgttggttaattagtgaactaaaactttgtaatttggtttttaccaaaatttgtatttttctcccaagatttctcccaaataccctttatgcttaaatggtttacttaggattaattagggtttgagagttttccttccgtaagattcatgacaagattaaggagagtttgagaagactgattataa

SEQ ID NO: 137066 - DNA, 559 bp, Zea Mays
cctgtccttccggggtggaaaatatcccagcctgaaaaccacaccggaagggcacgcgacggcggtggcacggatacgaaattcttcaatccggcgtcgatctgctccggcgaccgccttctcactggtatgcttcttcctccctgcttctggtgcccggcggagacattccgtccgcgcgtcgagttgtggagtctaatttcaggctcagccacatgaccacatgtgtttttccccggcgacaaggacgtcgcagaagtcaacgcggtcttcttgatgtcccgtgcctccgcctctcgtccctgcttctggtgccgaagcactctccgctacgtggccgactggctgatctgctcccggttcagtttcgtgtggatgtctggttttgcttgcttgcttgcgctctcctcctttgtaaccaggtgtgatacagatacaaccatgtggtgcaaggtcgtggcggctgggtgacgccgccatgctgcaaccaggtgttccccctagctccctcgtcgtcactgccacaacgaggctacgtgaagctagtctcatttttttg

SEQ ID NO: 137067 - DNA, 687 bp, Zea Mays
gttaacaaacaaggtttcatccaacttgtgattatgcaccaaagtggcatatcgctcttcatcaaactccttcagatactcctcaactgatcccctttgatataaattcagtaggtttttctcatcgcctaggaatactcctcggtgccaaatttctgcatcattgcatgttcaaaatctctgcatgaacccaaactgttatgtagtttgaatattttaaacacgtgaaccgtgtttccctccatatagattgatgcaatagtcacccaaatagccccagacacatgatacaccatgcaataattcacacatttgtccaaccaaattttgggttccaacccctcgaacttaggaaacgacaacttatgcggtggtgtctgctgaaactctcgatcccccatacacttgaattcaccctcccgaaagcccaaaggcagaggatcatgatacattcattgtggttcaggcggctcctatggtgcagcaccaccacggcctcgggatccaatgatcgactctgataactctaagcgccatctgctccagtcgtaactcagcaacctccttgcccatctgctccagttgttatgccatgcacactcgatctttcgccacattctaagccacagtggtagccaacctctcctggacgagaagctgttgttgtacttcttccacctcaacaaa

SEQ ID NO: 137068 - DNA, 398 bp, Zea Mays
gctttaatgaccctgactaccactccatcgagccgctcgcactgtctgagattgaggcgagagtcaaggtcatcactgcgctgtcatcatggttcttcatggacgaggacttcccgcacccctttctcggggcgtaccgagtggtctggtgatcccttcttttcgttcctctctccttttgttttgctttgatggtgatgttgagtcacggtccttgtaggggattggtcctctaacgcccaatcttccatcgctccccgagggggtcgcagttcaatcggagcgcaaacacatgaagcgtcttcaagcgaagaggaagggcaaggatgtcacgcaccctattggattgagcgagggaggtgttcttcctcctatctaggagggagcatcttcctcaa

SEQ ID NO: 137069 - DNA, 761 bp, Zea Mays
ctctatctatttatcatcagacattgtcgccttcatgaattgagtgctactaaccgagcggtggaggccatgcgtaggaaaaagaaaaatggtgggcgacgacatgctcctccctccgcagtccttcgtcccccagcggcccgttcggttgaaggcgtggcttctgggccgtcccctccgcgtcttgagcgcgtggttgtgtgcggtccacagctacatgagatcggcgaggcgtgctctggacggcttctttcaggtacgcggttagggtttccagtagacttcttaggctcgcattcttttccccatcttgcttcgcgtctttctcgcctctggtggcttccgagttcgtcgcgcgaaagtttctgtggggggtggatctcctctccgtttcgcccgccttcgcttggtgaggagtggcctcttccgggccgctctggtgtgtcggctccgatggattcgaaaaatcgaaaccctaactgggatcgatggggtccgaaggaggcgccgcagggttctcagtcgtggggaaagaatcggaacctcagctggcgattgaagactggatccggaaaatctgatgtcaaagaagatattcctgtctccactcccggtgatgccggtctgccaggtatcctcaaaacccccccgccccccattctaaaatctgagaatgatttggtgcgtagggttttttgccagaaatgtggtttagatggtcatcatgctagggagtgctttaagtctttgtggtgcgaaat

SEQ ID NO: 137070 - DNA, 604 bp, Zea Mays
ctggatttaggaagcatttccttgagttatgcccaggtttgtcacacaacctgcagctcatcttaatgcccatcctgcttagtttagtccccttaggtgcttcccccacctctctagttctttcagtttttggccttcctggcattttgacaaaagctggtggttttggtctaggcatgtctgaaattggccagttagcttggccctcaacaggctggaggacatgtgcataggtcttcaagtaatctgctttggtgaagcatggtgcaatgaaatcatctagcagctttgatgccttgtagatgcagctaatagcatggcagcagggcagacctgagagttgccaatatctgcaagtacatgttctaccaaccaagttcacaatgtacctcctgtcttctttctcttgcacctcaaagccatcttcaccattccacagcacatcacagctaccagacctcagaatgttgatttttaatttcttgaagatattaggacagattgttcctgtccacttctcagccttggccctattctcttgtatcctcaccataaccttctttctaatggcttcacacatggaaatgactggatagtacctagc

SEQ ID NO: 137071 - DNA, 527 bp, Zea Mays
acaaagttgtagagcttctatacaggaacaactttgttgcagaaacttgggtgtgttgccattgaaatttaggagcaatttggccctaaaccgtggctgtcagatgcactgcaagggactcgccatggtacagtgacctgaagtggatcagatcgccgcggcagaaaatctccccgccgacgacctatccgcgccgcgatttgcgccggggtcgagatgatcgggcggcgagcatctcccccatgaagacctctttgctccagataagaccgccgcggtggagggcactaactctggctgccacgcggccatccctccttccggccgtgttcggtcatcggcgccgctcccctatgttcatccacgccgcgcggatgtgaatgcgttactgtcgcggcggggacgtggcaaacccgtgagaacagctatcgcttgacgccgcagttgatcgccagctaaggccggcgatggttatcaccatggccgcgacagtgactcaccgcggctataaattcaccacatcctct

SEQ ID NO: 137072 - DNA, 1270 bp, Zea Mays
cttgtgtgttgtgcattttcgcttatcatggagtgcttgccaaaagacggtggccgacactctggcgaactctgacaactggtatcaaagtcgattagagtctgggaaaagagatcacgatgcagtgtctttgttgggatcacaaacgcgagttcatcgacgacctgatggacggacgtggtccatcactaagagaccatgatgcggacagctcaggtggaggtgtggttgtgcagcgagtggttcatgaggttggtgttgaaccaactatcacatccttaataggaacaactacaccgacttggcatcattgatgatgctgaggctcaaggcccgagcgctcaaggcagtaatcgatccaggtggcaacatctacatgaggatatggtggcgctatacgtgatggcgactgttgtctcaacggagatgatgttgtccattgccaacaaggtgacacatccaaggaggcttgggacgtgatcacgaccatgcgggtcaaggatgactatgtcaggaaggcaatatgacgcgaggatcaaagtgtcaaggattactcgatgtgtttgggtggtatagtggcacaattggtgactcacgatgcggaggtggacaaggccacagtggtggggaattttctgtctagtgagtcagaaagggtcaagaagattgtggtggcgattcagacactactcgatatgtcaatactcacattagcagaggcgacagtgcagttgtacgccatggaggaggagctatagccgccatcgatatcggtccatcacaacgacaagctctacctcatagaagcatgcatgcgagtgacagcacacatggtggctctagctgtcatgatggtagaagcagccatacgagaggacacagaggtaactcgaacacatcatcttcttcatctgggcaggaggaggaaccaagatcgataatgaccaatgcatgaagtgtgggaaaattgggcattaggctcgtgaataatggccctggcccaagaccaagaaggagcaaatgaacgtggttcaagagtaggagacattgatgttgatgagaatcgcacataaaatttgacactccatgagtgctccaagtcgaagcataaatccattgtccagtcaacacctttcatcacaagaggtacttcgacattggtgcatttaaactcaaggatatcaggtgtctaggtacacttgcacaaagaagaggctttcgttcaacttggagcgagggaggattggaggaacgtaactcaaagctctag

SEQ ID NO: 137073 - DNA, 636 bp, Zea Mays
tatcttaatagattaatcttatcttgtaggattcatcatatcctaaccactctacttatctcctcctaaagcaaccataaggatctaatccaaaataataagatcttatctagtctaatctagtcacacgaaaataacttagatgtgatagattgatctaacctaacgaaggctaacctcaagttgagctaatctcatgtaagttgcttaagcaagttggataatgttggtggcataaattagaccctacccttataaacatgattaacctaaatcggttccctatattagctcagccatatacaagtacttgactgatgcgttgggttgcaaaatctgtatagatcaacatataaaattataagcacccaagattttcaactatcataacttatcctactcacatctacctacttgtccctaatttggataacaactccaaggatgaagaccaaagatgatcgacctcatcaaatcaaggaaagataggattcaagccggatcttaaaggaaccaagatccacaatcttggatggagtcttttcttaccctacactttcttaaccaaacctatctatactctaaagacatctactatcctacataataaagtggacatacatatatatacccatg

SEQ ID NO: 137074 - DNA, 487 bp, Zea Mays
agtgtttaaaaaagagaaaggtggaaaaaatctaatttttcttatccccaccgcctgtctcatccatatcctaaaccaccgctctaattctacatccaatcaaatatcgtgttccttcttcaccaagccacaacacacgtacatctccagctcaaaatatctctgctccgttgcgctcgccccagcatttatggccgcgtttgccgtgctcaagcttcaccacaccagtcatcgccccatcctcgacattcgctcagcccctgccctgtttcctgcgtgcccttcctgctcctcccttccccagctcgctcggacctcaccgtggagcttcctcgccagcgcgcgcgcatctccctggccaaagctctgctctcctctctcttgcgttctccctggtgccccagcgtctagtttgctccagttcctgcgctcgcctggctgccgcgccccagctcggatctccttcgcccgtgtcatgcgaccttcc

SEQ ID NO: 137075 - DNA, 807 bp, Zea Mays
gatacaacctttcgttgtcgtgtcggtgtttttaccgaggcatgaaaaagtgaacaagttttctactggttctcgtggagcccaatgcaatggaaccccacgcgagggccaagctctcggtcagattactttgtaggtagccttggaacatttccatatacaagtggtgctccggttttggtatatctcggatgctcgttgtctccattatcaagctttcggctaaaacaccacaagccttgttccctctagtacaaggtggtgcaagggcgggcctaggatttggaggatgtgtattcgaaattttactagcacattattttttgacagcgtaaagcctttatacatatataattaattataatatcacatagaaatatttcatagaatataaaatatatatcacataattgaacatacacattacacaactagtaaactagaccataactcatgcaacaaagaatgacccataagatgatgttcaatactcaacatattaaaatattaattgtttgacgtaattaagtggctagtggcaatatctaaaatatatagagagactcaagtggttggttgcaggttgcgacatcgcctggcgctggttgcaagtcaccatgggcagcatgccgatgccgcgccgacgctcccttccccagtccctatcgccacgccggtgtcaccaccgtccgttgggattagggttgcgtgtgcgtcatgtcgcacgtcaggcgtgcagagaggcaacaaccctccaatcaggctaaagattgttgggtccgatgggccacatgatagagaaagagg

SEQ ID NO: 137076 - DNA, 470 bp, Zea Mays
gacagcttcccctcccttgcaagccatgcaacgaatatggaaaccactgtcaggcaagtgctgcttgatgggcttggatcagcacctcaaaccacgcctgagcacaacctcaaagacaggagcttgccaccctccagaacaccctccacgacatctctctcacacaacaaaatgataaaagactaagcccactgattgacatagaagggatcctaaaaaccggtatgctctacaagctgatcaatcaatgactacctccaactttgataatccagacttcgtgtgaagctctttctctcctaaagtttaagttctttgtgtggatcctcatataaggaaaggttaaccacaaaaagaaccttgtcaagaaagggatgattaccagcgtcgtgtgtgaccttggctctgtcaggcagatgaagattacgaccacattatcttcaagtgtctgattgcttcctccttctggc

SEQ ID NO: 137077 - DNA, 401 bp, Zea Mays
ggtaggtagtggagaggtttgctgctcggggcgagtagaactgctcgtagctgtccgagaaggaaagaatggtctacccaatctgaatttgtgtctgtccaggattgtttcatgtatctttgcgatctgaagagcttgttccatagtttgagggaggtgggactgcactcgcccagcaatctcaggtttcagacttctagtgaattgtgtcacaaaaaacataggattaaagccactgtgatgcatttccaacatgaactgcagggactcatattcataatagaattgctccactgtccctgtttgtttcaactccaacaaggcgctcagagcacgctcataatcatatgccccgaatttagcttccactgcctgcatcaattgattccagtttcgaaaac

SEQ ID NO: 137078 - DNA, 1970 bp, Zea Mays
tctggacccaaacccgttcctagcattgtcccattaacaatctgattctcaagctgagacaccaaccccatgtcacaggccccatcttgaggcttcttagaatcaccatgcaaagagttatcttccatgacagtatcttctgctagctcctccagctgaaaagaatcatttccatgtttctcagagtaatcttcatcctctccttgctccttatcatctccgtctcgattacccatgttatctgtatctgtccacttccccgctatgagaaccttgtcaactttgaaaaaaatctcatataacccttcaccaactactatttcagcagactccggaatatgatttacattagtcactgccaccaaaatacgaaccacccccattttcctagtgtagcgcatatcaactttctgagtagcacccaaaatagtgcctattgcccataaaggaagaaaggagcggatttcaaaaggaaccccataaacattcacccaagccttctgcagataagaaataggctctattttttgattaacctcctgaatcactaagataccttctcctcccaacgtatgaacatatttcatagcaatcatacgttgaagctcaacactgcatgggaacggtactataaagccgtcagcatgcctttggaccgaccaattccacttcactggtataagtcttgagagctctgacttaacgagatcagcagagacattaccttccttcactgtaatgaaagtcgtaacaccatccgacctcggaattgcacccttagatccccaagttgggatttggaagaaaccagactcaccgcccgcaaaaccgcatagagctgcctgcggctttggaccattaaacaccggacactcctcagggacatgattatcttcacaaatttcgcaacaaagatcttcccgtcttttcttccccatgtctgaaacaccgggtgttaacacggcaacccgttttctagccatctcagactgagcgcctctgctattattcataacctccctgtccactgcaccaagtgacgtagcgggcgcaagaaaacgtccaccacatccccgccaagcaccgcgaccacgtacctcccaactacctcgaccgcggaaagacccactgccaggaccggagggacgtccatgtacctgctgacgccgatgatccaccacacgccagccagcagcatcagaaccagcattagccataacgccaggccgacttgaggacgaaggaaaatccccaggaagaacgtctgtcctgagaacatcgacgtacgttctgggagcaggaaactgcggctggtagaagctgctcgaatgaatagtacacctaggttttacggtgctgtataatctctaacgaagagaatggaggcctgggtgacggctggcccaattagaaatggtcgaagcctgctcgcccaacgccagcggcggtagatggcccacagaaacacccgacacaggctccacccgatgagaaataggcttaggatgtccaaccgtattcccaggcgaaataagcggcataggaaaatttctttccttggaaagagaaaaggaatttgattttgaaccacaccgaacgtgcgaaaaagtcggcatgtcatccttcctccacgccggcgagcaaccaaggcgggcatcaaccttatttgccgacagcgtcacatggccgagagtaacggcaggtggcgagcaagacgtcggtaatggggcttcgcaaggattcaacacaccaacgggtttacgagaacgtacctgaggcctgggcaccgaatccaggagaaccttccgctcagccgccgcgggatcgaccactcgtgctgcataacgtccagcaatccgatgatagaaatcttcacaccttcttgaccactgctgccttgtcgcttgaatctcctcctggcgtataaccgaacgtctacaccgcgcaagccgataagcctccgtccaccg

SEQ ID NO: 137079 - DNA, 346 bp, Zea Mays
ctagcgttcgtccctgctccagctctgcccataatcttcttgccatggtgccctagccgagctcgcccctgcgctcgcccatggcggctccctctgctcggcgtccagccccagctcgcccgagctccctgcattgacctcatctcccccatggtgcgtctccctctactcctctcctccccttggcacagcaacgcccctgcagctcctgttttctgtccatggcgcctaggcgagcagctccccttcctcagatctagcgttcgacgcgccccctgtgtcgcaacctcgccgaaccgcgccatttcctcgccggccgctgcttcctcaaacccctagctcccaa

SEQ ID NO: 137080 - DNA, 589 bp, Zea Mays
aaaagttaaagacggtccaccaaaacgtttaatgggtgaagatatcatgatacaacaccgtgcccttcaaagggctgcagaaggtcatgagtttgaaggctatggtcaagatcacaactggactcatatttcttttctctgggaactttcataagcgaaggtattgattttaccacacaacatagatttgatgcaccaagagcgcaatgttgctgaaagcatcataagcatgtgtctaaacattaagggtaaaacaaaagacaacatcaatgccaggaaagatttagctaatctttgcgatcccctagccttgaggtcaaattaaatcctaatggaaaggaaaggacaccacgagctccatactgtctaaagccggaagagcgaaaagaagtatttcgatggttgaaaatgttgaagtttccagaccgctatgcagccaacataaaacgtattgttaacctcgacactaataaattaaatggtttgaaggctcacgattaccatattttgatggaaagacttatgctggtaatgttccgtggctatttgaagcctcctctgtggaagatgattgctgaacttagttaca

SEQ ID NO: 137081 - DNA, 1428 bp, Zea Mays
caacatgatatcagagccaaagcgcggcggcgtgctactgtagcagcgacgacctacgcggagcaggcgtggccgacggcgagcttcagactgtgcaggacgcgagtagagcggtctgccgtgctgaaggaaggaggaggtgaaggtggggcggcaagcgcagcaagaagcaggcggggaagacagatatctggcaccgcgtggagcttggaggcaccaccagcttggacgcagctgccttcgccggcgctggcatcgactagaaggagacgtaggccagctcttgctctggaagaaggctaccgccgtcgagggccagctcgacccggcagctgctgccatcaacttgctctgctccaactccaagaagactgctgtcggctttgggttcttacccatcggaacacaagagaatgggagagaatcaagggattgagcaagttcttggtaagttggttgaattgttgtcagcaagaagggacgaagctccatcttcaagtaaggaaaatattgtccatatagaaccagttcagaagctagagctgatgccaaatgaggttaaactggagggggtaaagaattatttagcttggtctaggagagccttgcgattattgaaagcaaaaagactcgagggctatgttgatggaactgtcgttgagcccaaagacaagccaagtgctgaatggaaggattgggatgctataaactctttggtagcagcatggatgttaagttctatgatcccagcaattgctagcactgttgatacaattataagtgctgcagaaatgtggaaagcgcttgaagaaatgtattcgggagctggaaatgttatgttgatggtggagactgaagatcgcctccataatatcaaacagggggagcgaactgtggcggagtatgttcaggaattacagtgtttgtgggctgatgttgaccattatgatcctattgagctaccacactcagagtgtgttgtttgggcaaagaaatgggtggaaataagacgtgtgcttcaatttttaaggggtctaaacccagagtttgagggaagacgagcctccatgtttcatcaatccactcttcctagcctacaagaggcaatagctgctatatcccaggaggagtcacgactcaaagtgatgagggaaagtcctccagtgtcatctcaccctgtgttttcagctatgagaactaaagatgctagagagtgttacaattgtggtgatgttggacacattgctcgtaattgtactaaacctttcaagtttaaccgcgggagaggaagaggggctgctagaggtggtagaggtcgtggaggtagaagttgggcaagagctaatgcaacaactacaaaagaagaccttgagatctttatggagaatgaagctgaaacaaagtcgactgagcaacataaaattcctg

SEQ ID NO: 137082 - DNA, 658 bp, Zea Mays
cttactctctgccatccgcagcgggtagcacataagccccggaaatacccacagaagaggaagctcccagagtgaaattaacagaagaaccccactgagccgccgggtgagttagacgcggagctccaaactgagacggcataggagtagtcggtgcaggagtaggcgcagccagatactgaggaaaaccctgcatcgacacgaactgagaagtcccaggcacataaaactattgcggaggaagtggaactgaaaactgatgctcagcacttgacatcatgttgatagtgccctgagaagaggaggaagtcaccgactcccatctgagcttcccattaggattcctcctacacaccacatccttgtggtcctaactgcagatagaacacctgccactccactggcactctacacgacgatgcgcatcaccactatgaaaacacaccagccccagcccgggcttaggaacagcccgaaacctctgagtactccctcccgaagtacccaagtcagaacatttgccacggtaaggatggtggcactgatgctgagacttgcccctcttgtgggctggacctccagtgttgcccctcctcgcgtcctagccacgaggctgatcaacacccgaatacttctgcgactccatggtatactgatg

SEQ ID NO: 137083 - DNA, 964 bp, Zea Mays
gtcgtgaaacgtggaaggtggtcacgcctttccttccgcgctccggatttgaaattttgcactgatttgtctggtttttgaggtgatgcgcgaaaggtggcatcttcattcctccaagcgtcgaggatttctcaaaaaaaatacgagggtaaaggtgtgcacttttagtgtgcgaaattcacgtaatctgtaaattcgtcgcggagtgggtacgctataattttccgggaatggaaggcttggttcacttttgcaatgttttcttgagggatttgaggcgatgggcgccgtcgattgcttgaggggtgggtgctgcgtgtgtacgccttgatccaatagaaaatcacatggaacctgttttttaccgggagtgttacggccggccctatgctatgttatgttatttatgtagtggtgtttggttcctacctcctaaactagtcatttttagtcactaaaatatcaaacggggtgactgaaataggtctttcaaatagaatttctaatgactaaagtttagtctataaaatttaggagggtggctaaagaaaccaaacatcccttattgtgtcattgggtgagtgttctaaatatagggggtgtttgctcctaaactttagtgaccaaaatttagtcaccttttgtcgctaaaatactaaacgaggtgactaaaataggtctttcaaatatgatttttatggaccaaagtttagtccctaaagtttagaaagatgactaagagcatgttcaacaattgtcttaaaacagtgccctgtcttaaaatatagggctcaatccataaaaaacaacttcaagagtgtcatattttgcatttttttgttaaaaaaatatagggcactgtatgaagttacccaaatatactacatgctacactagtgccctatgtttgttttctacaccattcttaatattttctttccaaataatacaattcacttccaaa

SEQ ID NO: 137084 - DNA, 273 bp, Zea Mays
gttgggactgattttgtttgagggactgtcttgggttatgtagggtcttaatctctaggaggggtttttgtgctatccttgggtaccccgtgtatgggtacatgttagtcgtgctctctcattttccttcgacctttgacccgacgccgcacgaatggaagcggtggctagctagggttcttcattgtcgtctctgtcggacctccccaacccaataattgaagcatgaccgccctctcaaccttatctggcctcatttctaccttctctagg

SEQ ID NO: 137085 - DNA, 390 bp, Zea Mays
aaatgaagctatacgagagcgagtttgaacacccttactaatgtcgtccacaatttgatcaactgggtgatccttcacaatagaatgatggattcttgataccatttgagaattactagttgaagcatgaggaggaaccgaatgacttgaagtatcttgatcatgagcatccacaacttcatcattttgttggctttggtgattttcttcatttagggttgaagaggatggaatgacaaccacactattatcatcatcatcttattttggctttatttcaccaatagccattgttttcatagcatttctcaattgagctccaccaacatcatcaagattatcgttttcatcttgagacccatttgtttcatcaaactcaacatcatatgc

SEQ ID NO: 137086 - DNA, 360 bp, Zea Mays
caagatgagatggtcctagtaacaagcagagtacgttttagtatggacatttcagtctggcgttggcaagatggtagtagggctgtctgccctgtcacaccagcaataaattttgcagaaccaaaccaaaatactgctccagagccaggcgcgtgccaatacgcggagtccagaacacgcgtcgtagagtatcggctagagactgtacagaactggatcgagcatccaggacgactggatgggatcatggtcgagctggaatatattcgtgggaacgtactgtacaacgggggaacctcagtcagtcctggatcagtggatcctggtctgtccctcagtgcctcagtccaaaaaatagta

SEQ ID NO: 137087 - DNA, 401 bp, Zea Mays
ggccgagtgacttctgctactatgaatggtccgtcccatagtggtgacaatttgtgtcgtccctcccccgttagaattcggcggaggacaagatctcccactgcgaaggatcgatgccgtatggccttatcatgatagcgcctctgagtttgctggtacctggctgaatgaatcactgtattcaatcgttcttcttctagtatatcaacatcctccagtatagtagcctcagtgtcggctatgttttcgaagatcaatcttggtgccccaaacttgagatcatcaggtagcactgcctccgaaccatagaccataaagaagggagtgtttccgtgcaaagctcggctaggttgagttcttaggctccagaccacatacggcaactctctgatccactttcc

SEQ ID NO: 137088 - DNA, 639 bp, Zea Mays
gttctttaacaaaagtgcccgcgaaggggtatggcagaacatgggtcgttcgattcacattcgagggctcagattagatttgacttataccgaaacggtaagcgctgttagccgctggatccaagatccacggccacggtttaatgaagctagagcttgcctgagccgaaggatggcaaatctacggtgcccgtttgattgcgcgaacgggtaaggggatacctaatctcggccgttcacaacctatccgacggctcgcaccattcgtccttccctcggcagcttgcaaccgcgccacccccaaccgagtaccacggcggtccaccatggatggaaagccaattgcgctccgcggtaccccattcccccgtatctcgagagcaaaatgaaattgagaaggtaacaaacatgggaggtgtgcttttaccgtgattccggccgtcaccaggtctgcccgcgacgacccacggccctgctacggcggcgatgaattaagcgcccctcaggtcaccttctgagcccacaatcgccacccaaccggtccaggggcttgggcgaagccttctgtccgcacgcgaggccccaatttggcgtcgagcacgaccgacgacggggaggacgactttccgcccgcttggt

SEQ ID NO: 137089 - DNA, 307 bp, Zea Mays
gtttgtgactcataaattttcgatgcttgtcccggggtggagctggtggtggtggaggtggtagctgatgtcgttcttaccgttcttgacgctcttgatgcatttcttgacactcttgacggatttatgcttgcatatccgtcatggtgttagactactgctacagtagttgcatctgagcggcatctacaacatacatcccagccggtggaggatttggaggaggattcatctctggttatatatggttgggtaactatcatcctacgacgaatgcgagcaggttgattgataccgcctcccttcc

SEQ ID NO: 137090 - DNA, 530 bp, Zea Mays
gctaagttacctaaagattggagaagaatgagggtaatcccaagtcaggagaagctgcgtcgtagctcgacgaaggaatatcagtcggaacaatttgaagaacattgtcaggggttgactcaaccccaccagcggatatcagaattcttgcatctagctcgccgacctccaaggtgacttgctcgttcgaagtcaaagaagcatgtgtcgccatcaccccaccatattgtggtggaggcgatccgacatggacatccatggaggtgtgggaaggagagctcacttggacaccctcgggggctgggttgtagctcgcgccacccaccatagccggatcattaccggcaacaccctcaggggctgagttgcagctcgcgctacccaccagaaccggatcactaccggcgacaccctcgggggctgggtaactaccagcaccacccacgggggctgggttttctacaacagccacctctaaggctgaaggatcctcagtcacctccatgggagtcgggcaatcctgaccaact

SEQ ID NO: 137091 - DNA, 485 bp, Zea Mays
actcggggtcgggggttacttcggataggtaatatcgaccgttggttttttttttatggaagtggcgtaaaatgcgattcttccgatttagccaagcagttttggctacagttgtttagttcgctcgcatgcattgtttactttgcatattattctgtaatagagtagtcaggattagtctcagcatagaactgctcaatcaatagcatatatgaattggagtactgaacaatgcaaggctctgcatgtttcagcttgtaaattttgaagaagaaaaaaatagtttgtaaatcgcaacaatccacaaggtgggggtgcagattgtggggttgtaacaacctggcctgtggattgttacaattcagggtgaggctccttgactccttgtttgttttagcttgagatggtaaaagctacaatccacaatatgaatataaaacaaacatgacctaacgatgtaagtaaagttacatatctgcttgcag

SEQ ID NO: 137092 - DNA, 464 bp, Zea Mays
ctgggtttgggtttgcgcagcaccgggttgcgcacggtcggcgtcgtggctgacgaacaggacgaagaagacgactcgccgtccgttgattaggggaccaacggctgtgattcatccggtgcgcccttctccgccgtggtagaggtagatagcgtcgtggaccgttagattgagatcgggttgaccagggcacctaggggtctcgtgcgattttggaccgtggatccgtgatccaaggaccacgtctgtgtaccgcttcactcaagtgatggtctaatccgagccatcgggatgtggatcaacggccagatccatcccgtaccccttcgtctgcatcatttgcataagagcccccgacaaactagaaaatacaacccgccgtccagtgcacagttccctgagtcttaggagtaattgcgccgtagcccctgcactttgcagtaattgatgcgaaatccagagac

SEQ ID NO: 137093 - DNA, 346 bp, Zea Mays
gcgaaaggtatgcccggtttaatctcagccgttcagagaacaatcaacagcagaaccccatcatcaaccttacaccccctgccgcgacggaatgaaggctccgacggtgccctcaccggcgacgagccacctcacacgccagagcgcgacgtgagcctaacgcgaggatacccaaagagaaaactagggcgaactccatggtggcatcaattctgagaatcgacggtagaccgggtcgaaccacggcagcactcaagccgcgacagagatgcacgtcggccggataattcctggcaccctaccacccaattgatccaagtatcccagcacatagaggggacgaagg

SEQ ID NO: 137094 - DNA, 341 bp, Zea Mays
gacatctcgtatattcggccaaggccacatggcccaaggatagcccaaggtctgctacacgctagcctaggaaattcacgtaacctagttctaggcttctccccaaatgcttgtcgctcgccggccgccgtccagcagacttgctctcgcgccgctcttgcctccaccagccatcaacccatcaccaggtccgccaccactcttgcctccaccggtctgcctcggctcctctggccatccactgctctacctgagctcctccggcgtctagccctgcacatcgcatctcgcggctccagcagtttgactctccggtgaagcacaacaagcacatgtcggct

SEQ ID NO: 137095 - DNA, 357 bp, Zea Mays
gggagcgagatagcatgcttgcagtgggggtgatgtggtaggaggcaccagagtcgatgacccagtcaggtgagggtggagccagcaccatggtgttataagcggcgacgagggaggctaggtcccagcctccagcgagtggggaccagtgagtcgtggtggtggtccctggaggcgggagctaaggcggagtctaagtggtcgggggcacgccgtatggacgtatgtcgtaggcgggcgtatgtggtgcgccataggggggcgtagtcaagagagccggcgctaggggatgggaggcactcggggcctgacccggccacatggagatggttctgctctagaggttgtagaatgacg

SEQ ID NO: 137096 - DNA, 722 bp, Zea Mays
tgtccaatacatgagtttggttggacactacatagatgtaaattgggaattgcaatgtcgtgtactaaactttgtggagttggatcctccccacactggtgtagtgatagctcaagctatttttgagtgcctggttgaatggaaaattgaagataaagttatcacaatcacacttgacaatgcttcaaataatgatgttgccatcaccaatttgacatccaagcttcttgctagaaggaatacacaatttgatcccttgtattttcatgttcgttgtgcttcacacatagtcaatttggttgtaaatgatggcttgcaaccaatagatgatctcataagtaaccttagggaaacagtaaaatatttcaagagatcacctagtagaatgtacaagttcatggatgtttgcaaagagtatgctgtaaaagttggaaaaaggctctctcttgatgttaaaacaaggtggagttcaacatatagaatgttggatacttgcattgactatagggctgcttttggttactatgctgaaaaagatcataactatttgtgggagccttcgcagtcacaatgggacatgtatgaacagattagaccaatcttagggacaatggctggagcaaccactgcatttttaggatcactttatcccacagccaatgtcttctacccttatatagtgaaagtaaagattgcattaattggagcaaagaattctggtg

SEQ ID NO: 137097 - DNA, 633 bp, Zea Mays
gctttccacccgggagtttaggcgggtgcagtgggaggagacgtcatcgtagtggttatcgagagtgtggaggtatccggccatgtagacaatggtggggtcatcctcggtggggtctctccctgacagggcctgaagtcttttcctccaggtgggggtatttttgttgctatgtgggaagtaacgaaggggggtttcaaagatctctctgttgtagttttggcatagctgtttaagggcttttcgggcaacactttggcaagtgtctgggaagcggtgctcgatgaaggtgacttggaagggagggtggtttgggtagcttcggctttctcccaggtaaactgccatagagcacttctctattccattttcgcggtattccttccagacatattcgggcttcttgcggatccccatgcgtagtccgcaattctgtaggaggtgaggaaatccttcctcctctgagcagtaggatgtcctaatgacccaagagccttccatctggtaggagaaaagaagggtctgttaatatcggggaaaggagagaaggtgtttctgggggtaagtggtgttttcttgttaaggcaacttttaaggtcagggctgcggtctacggccagtcctataggctct

SEQ ID NO: 137098 - DNA, 638 bp, Zea Mays
gtttcttttgtaaacttcgagacctgattgtaacagtttctgtatagggatggacggaagattaattttactagacgaaggggcttttagcactttcacacggccaaaggggtatttttgagctacgactgtccgatcaagagtcttcagacaggattagattgacctaataatgaagcggtatacacttcgggccatcggattgcagatctatggtctagattagacacacgagatttcaaccgatatgcaacacgagtcgttagatccaggatccacaacccacgcgtgcacacaccattctctacgcttttcccatcggatcaaaaatcagtggctcagacttaaatgggccaaaacgttacacgcatgtaatcctgaccatccatctaagatcgacagcaaccaggccatctccagccctagcaggaccctagcggcggagcagggacgccgcggtggcaccattgccgggactcaccgagcgggtgcccgagaggcccaaccttagaacgtgagcatgcagaacagagagggaatgacagccaactatatggtggaggccttaccgaggatttggcacgcaatcaccccggccacggcgctcggtggaccggaacaactttcgtcgacgacgg

SEQ ID NO: 137099 - DNA, 446 bp, Zea Mays
cataaggtcctccgtcagctgctcctgatgcaccagctcccatcaccgcaacctccagtggcacattcggatgtagctagtcatacagcacgtgcacttcctcgtgcagagtattattatacgcttggaaattttctagggctacgcttagctcttccacccgagctcgagaagtcgcctcgcaatcccaggctatagatcatgaattcacagcccagtcaatagccatatccagctccacaatctcccgcagtaaacggtcaatctctactgacaactctatgatgtggcggctatcacgtgcacgctccctgcttccatggcacagttccatcgttagacgttcaactctggcctccgatcctctataggatcattactcccgctactgctctcctcatgtcgaggagccaactagtgtcgaggtacaccctgaagcccggtcg

SEQ ID NO: 137100 - DNA, 403 bp, Zea Mays
gaaaaagggtattttgggatggagggagtatcagattagatgcatttgggagtgcttataactttggcacgtgaggctatatatcataaaggataaggtcatgaataaacaaagagtcactagttcaccaacaatgggtgcttcccatcgtttcagcacatcgccacccctttccaatggttttccaaagtaagcgccacattgccttgatgtggtctttgatcatgttagggcggcatggtgccacctctttatcttggtagatcttgtgctaagtgttgtttattagtaagatctgctagttatcatgtgtatttttaatctatccaagtctttacgcttcatgccattagattgattttatatagccacatgtgtatttcttgatcagttgctacattcc

SEQ ID NO: 137101 - DNA, 363 bp, Zea Mays
ggcatgtggaacgggctgcttgacagatacaaggtgttcgaggcgctggagatggtcgtctacttccgcaccggcatccgcccgcggtcgtggggcgaaaccgacgcctcgtggaaggaggacaccggcgctgaagctgccgccgccgccgccagtaatgctggtctgttacagacagcgggcatcagctctgactctgactgacggtatgcgctgatgcacatagaagcacacaaagagtacttcagctatcacacaggtgcattagttaacaaaaggttgcactcaaacgagattttattgttttaattgatgggattgaaggctcaagaacagtctcctacataagggagagaacacgtc

SEQ ID NO: 137102 - DNA, 661 bp, Zea Mays
caagtacctagcttgacccactggaggagtattcctgcaaacataaatttagttgcttgatttaggtccctaaggtgagttggggcctaataggtcagtcacaatcaactttggaacccaaatttgccttttgactaaagatttaggttgcttaacaacatattttgcaacaactttaccaaggttgttgactctaaggatatagatagattcatgtttgtcatgagatgcatgagccttgaagagttgatctttgtccttagctatccacaactgttcaacttgcttctgggcaattttcttctgaggataacctttctttgtatgtgccaaagtttgatcagaaacagaaatggtgaccttccctttattggggcgcgacactgccgcgtgctattcaggtctaattgtgccattccgcttcttcctctcaaacactacacattcaactcccttatggtagaatctaccatttgatttgctttctttattgtacccaaggccatcctttatgagaggatgtcttcctttgatgaactttgtgccatttactttttctagcttctttcccttttcttcatacctatcattcatgcatcccttactgatgatagagtttagcctagctatctcatgtctcataacattgatgttagcgata

SEQ ID NO: 137103 - DNA, 354 bp, Zea Mays
caccatgcgagcgaactgatcccaggccagtgaaactaactgagactctaccgactgcacccaacgggcagccggacccgtgaactgcatataggctacctgaatccataaactcggatctactgaatacatatgaaaatagtcctcacaacgtttctgccacaatttgggattctcaccatcaaacgatggaaactggattttaggaagattgcctaaggttctcgggtgaatcatatcctggaagcgacccccatgtaccttagccccagaaggatagtgctcccaaaactgataatccggatactgctcatgatgaggagtgggaggtggattcataccattgttcgggag

SEQ ID NO: 137104 - DNA, 295 bp, Zea Mays
cgagaggaagataaaataagacaacagccaagttctcctagccagcgtgcgtcgaacaatttggtgactatgaccaaacactctagtgtttcggatagttcaatacttagaattggacaatctaattgatcgacggcccgctagatgaaggtgaatggcgacatgaagcaagatcggactaaggctttgagtacgtctgtgaaatctggtcctatgttcaatcagcttctctctaaatatatgaacgaaagcgtcgttccacacaatctagcaaaacaatctaggtcatccgcag

SEQ ID NO: 137105 - DNA, 288 bp, Zea Mays
ggcgaaactgaatcatcggcgcgtcgttatcggcgtacccaagccggtctagcttaatccaaggatgcagcacgaaccagtgacctaccggggctatggtgcttatgcaattttggacaaagactaccaggaacggtcggtcaacgtgagctatgtccgcggtgacattcctggacaataacgtgatgttcactatgctacagcgcggtagagtttattcggttgagccgatgagcttcattaacgcttaaggatgctaaaatatggcacaaaggggaatgaacggac

SEQ ID NO: 137106 - DNA, 507 bp, Zea Mays
cgaagatagagataggggtgggcatagttaaccaccaggggccatataaaacaaagatgcccccaaaagttactggaattcttcttttctttttataaccgagttctaaagctcaacagtggcccagcagttgttgccaactcgagctcatttaacacagcggtagcacaccgagggcagaaatcatcataagtttagacattgtgaacgagaaaccattattcatcacaatgcaactttttcgtacctgttgttcagataataataaaacacgaggcaaatttattcgcaatagtgcgcttctctcccgtctctggatcctctgtgcaagccctagccactctagctcgctcactattcatcatcgtcgtcgcagctgcagtgtctctcgtcaatcatcatctctgtccatatccgatccgtcacccgttagagaacagcagtagttaacgtcgtctgcggctagcgccaaggaggctagtggatcgatctgacggacctgctctg

SEQ ID NO: 137107 - DNA, 360 bp, Zea Mays
gcggaagggtgtgaacccggttgctcgacactctatcgtatttagggcccatacgagttcaggtaattggtctacccatttgccctttttgtcgtcaaggagccttttcttgatggcgctaaaaatcttgccattggcgcgttcgacgacaccgttggattgtgggtggtatacagaggcgaagacatgctttgtgttgatggaactgcagaactccctgaagtcttggctgtcgaactgtttgtcgttgtcgaatgtgagttcggacgggactctaaagcggcagacaatgttttgccagaagaatttttgggcggtcttcgctgttatcatggagactgccctggcctcaatccactt

SEQ ID NO: 137108 - DNA, 650 bp, Zea Mays
gttgtgccgccttgtcaagccataacgtaatcccccatgtgtacttcgacattgcacttacatagttgttccctatgcattatgtctgtgctacacaatcttctatgctatctatctgcacaaggtcttcgtcctattgatccgaacttcaccatcaacttagaacactacctttgagaatgaggccatcatttcccttacacgtgaaggcactgctgcacatccatcgctagctcacattgcttgccttcgagttcaacgtgtccactcatccgcttcttttttgtctagcacaatagtgtcatcatcttgtcaccacctacttcatctacttcgataatagtgtgctacattggcaccttctaccttgttgttttgtgcaccacaatcgaccctcagatgttgatgcatatttgcaccccttcaccttttacattcagtgttagtaacaatgaagcctcctttcatccataatgtgttgttgggtctagcaaacctagctgattccttggttcatgcaacttgactacatcgaccctctagttttcaaggcatttgccttgattggatggtcttcgttcgaatatgctttgatgaccctattctgtcggcctcgacatttcccccttctatggcaactacctcgatgc

SEQ ID NO: 137109 - DNA, 347 bp, Zea Mays
gcgcatggaaggtctcctctgctgccgcgcatggaaggtgaaccgccggcgcccaaatctctcgctatctacatggaatgcaaggcctcgcgaacgtcgctcgatccgcgctctcccctgctctcgcactctacatggaaggaggtgacagcgcccaaatcgacggcatcaaactgattgcgcacggattccctgctccccgctctctaggttcgcaccaccttcgcccaaatcgacggcatcaaactgctccccgctctccaggttcgcacggattccctgccgaaccaacactgtcatgaacaataaagcagccacggaagttgaaccaaatatcattctcggcg

SEQ ID NO: 137110 - DNA, 377 bp, Zea Mays
tgattggactggggacactattctgtgaaagaccaggggctatttcgtatatttctccaagactcatacccaccccgcgcgtggatggcgggttgaataagaaaaacaacaggggctctttagaaattatccaccgccgaaggggtaccttcagatatgagccattcgattgatatctgatggcccagattagactagaactgagacacatcggcaaccctcaaatcttgatccatcggttcagatcatacattgacctttatgcactgatgaccggacatcatcagatctgtggtcccaatgcattgagcgcatgcatacaagttgacccaatcctagccgttggtggctagatcgacggacaagggttgtcttcc

SEQ ID NO: 137111 - DNA, 464 bp, Zea Mays
accacttttggaggagccgcccttgcccgaatataccttaaggagatagtcagactccatggcattccgcggaagatagtgtcagacagaggaacacagttcacctcaaaattttggaaaggccttcagcaagcaatgggcaccaagttagatttcagcaccgcttatcacccccagtcagatggccaaacggaaagagtcaacaagatcctcgaagatttactaagagcctgtgtgttaacgttcgacagggattgggagtccagtttgctgtacaccgaattctcatacaacaacagccatcaggccagcatcaaaatgtcaccgttcgaagcattgtatggaagaaaatgccagactcccctaatatggtctaatttgggggaaaggacactagaaggacccaactttgttaaagaagtcgaagagaaagttgccttgatccgcaagaggttacttgaagc

SEQ ID NO: 137112 - DNA, 402 bp, Zea Mays
gtagcctgccaggccaagaaacccgtgcaccgcccgagccgagcgcgacaccggccagtcaaagatggcctgcacctttgtcgggtccatggctacgcccgccgccgagatcacatgaccaaggtaggcgacagacggggctccgaaggcgcatttggagcgcttgacgaagagttggtggcgttgtagttcctagaggaccatcctgaggtggtgcaggtgctcctcccaattcttgctatatatcaggatatcatcaaagaaaacaaggacaaaccggcgcaggaagggacggagcacatcgttcatgagggcttggaatgttgccgatgcgttgcaaagcctgaacgccatcaccaggaactcgtattggccgtcatgggtacgaaatgccgttttgtg

SEQ ID NO: 137113 - DNA, 671 bp, Zea Mays
aagcaactggacgtacataatgctttcctgcatggactacttgaagaggaggtatatgaaacaacctcctgggtacgaagattcaactcgacgagactatgtatgcaagctagacaaggcgttgtatggattgaaacaggcaccaagagcttggttctcaaggctctgtaagaaactttgtgatcttggttttaaaagttctaaggcagatacatctctgttctactatattaaaggagatgtcattatgtttatgctgatttatgttgatgacataattgtggtaagttcaagaccggaagcagtaacggttcttcttcaggatcttcatagtgaatttcctctgaaggacttgggcgacttacactattttctcggtattgaagtaagtaaaacctcgaatggaattattcttacacaagaaaaatatgtgaatgatttgttaagaagagtaaatatggctgattgcaaacctgtaagtacacccttgtccactagtgagaagctttcgatctatgaaggagttccactaggtcctgaagatatgatgagatacagaagtatagtgggtgccttgcagtatcttacattgacaagaccagatattgccttctctgtaaataaggtttgtcagtttcttcatgcaccaataactgttcactgggcggcag

SEQ ID NO: 137114 - DNA, 408 bp, Zea Mays
gtgaccaaccgtggaccttctggtgacctaccacggatggtttgccccctcgcagagaggttccccaaggtctcattccccacgagcaggatctagggatcattagtgtttggcccaaaaaggcgccaacacactttttggtgaccccgctggggatgagaggtgtgacctaacaagattggccatagatggccggttcaaaggatcacttcaatatctccctaagtaacatcgtaaagctgactatagagaacctgccggctaaagataagaagaaattcgaggactacaaaagataaccgaatgaggccaaggcgaagtacctagcgcacttcaaggtggaccgacatcaaaagatcatccggcaaggggaatgcgacctggcatctctttgacctaccgcacctg

SEQ ID NO: 137115 - DNA, 364 bp, Zea Mays
gtgcaagattccaaggatatgagcgtaccaagacaagggaatagaaaaaggcagagggtaacgacttaacaacgggatagggagggatcttagaagaccagaagttcatggatatataaactagagtgtttaagtaggcaggagaaattcatatgtaagtatttgaaacaagagtattgaaaaatctaggagtatgagcatgtcaatactaagggaataaaaatagtcaaagggtagcaattaatcaccaaggagggaagactcccaacagacaaaaaaggttatggtcagggggcatctacaaagatgtcgcaagcacaggagtgagatcagatctaatagattgagaaaagtatagaccata

SEQ ID NO: 137116 - DNA, 555 bp, Zea Mays
tcgatcccagaatcctatagcaaggttgaagattgaggtatagtgaacaaattctattaagagagatagctctgttcttaacaagaatccagagataattggggaggatggtggctggttcaggcgactgatgaagatgtgccatggtacagtgttcggatggatcagaatgccagctcagctcgccgtcgttgatcgccgtccggattcgtgcacgatataggatggataacgccggggaaagggtgactcatacgtggcgccatctcccgagctcagccggagttttctcaccggcggtcgctgtgactcagcgcggttcgccgcgctgtcgccatacttcgatctctcttactgtgcttcgttcttacgtggtagacatgcgctaacagcccacctcatggccgcggaccgatcgctggaccgccgtgcctatatataggacagggagccacgacgaggtgctcgctgttctccaagtaagcttgagtacaaccaggaattcgcactgccctctccaccttctcccaaatcaattgcgcacggtgaaagcac

SEQ ID NO: 137117 - DNA, 452 bp, Zea Mays
cagatgcaaattatatttggagctgggcaggctactggcaggtatgccatggcctccaatgagctccttggcaccatctcggatatcactgaaggtgctggtgcatctgaagaaccatgtcttattggtactactgcttctggttctgctagtgccagcccttctcatagtggcgctggtgctggtagttcctatggatcatatggaaagaaaaggagactcagtgatgaagagctgggaattatgacagggcttactggagctgtgaacaaattggctgaagctatccaagcacctgttgtaatccagactacagatgtccaccctgatttgtatcaaatttgcatgagtattccaggtttcactgatgaggatttgatgacttgccttacctacctattggacaacaaaaggcaaggtgatggctttgtgaagatggagcctaaacaccg

SEQ ID NO: 137118 - DNA, 762 bp, Zea Mays
atcggtacacgtagcagatacatatatgatcactatactcattatagtagaaactaaaataagttttataaattaagagtatagaatatacacaacatatagacttatgttcaaggcaccggtggatccattcatacaattgatattatgtgttgctcgaagtcgtgggtcatagttggtgtagatagatgttcatagtattgttcatcaatccatcatgaaaaagattgtcagcgagcaatcacaaacgctcccccactctctaaaaacataatcgcccacacactcgagcagatgtttctaatacaactgatagttccacaggcctgctctcccaactctttgtgcacagatgattaggatggggaaactctttcttgcaacttaaccgagaagtgggggtgtttttgttctttgtgatctatgacttacacaagtgataatcacatgagttccaagacgatagaaggatgatgtaattgtcataatgtctgctcattacaaagtctgttacatgcccataacacctccacggttcattcgtttccccctccattaattgatttaggtggtgcacatacccacccacacacgagtcacgactacaacacaactgatggccctaaagaccttgtcgatcccgaagccccacccgacctcgacgcccccgaacaactccaaagggccataacgccctaggacaacaataaatgtccctagacacctcgatagcctcgatgcttttgatcaacttcgaagggc

SEQ ID NO: 137119 - DNA, 272 bp, Zea Mays
caaacttgaaacggtatggaagccaaacaatttcgtgctttttgcacccattctttttcttgggcattccccagccactagaggtcggaaatactctatttgccaagaattattgtactagatctctagtgctgacttcgcccgctaccaatctaaactccacttcggctacttggcatggggagccaagctgcatatggcacaagggccttgtcattccgaagctcaaagtcagtggactcataaccatagtcataagcttctccctcttt

SEQ ID NO: 137120 - DNA, 320 bp, Zea Mays
tttttaaataggaggcgtacgataagcatcaaggtaagatgaagggatgacaaaagtaaaggggataacaggcaaaagcatagcaacgggcggagtcaagacgagactcacaaagtggtgaagtaaaggggacactaaaagggtaagacatgtaaggttccaacaaaatagttaaagtgaaaattcatcacggagggaagttataaggaaacaacgagaccgtgaaggatgtgtgaaataaaatgatcgctcatggattatcgagaaacaagggtggtcagggccattgtaacacccctggtgttactataactaaaact

SEQ ID NO: 137121 - DNA, 555 bp, Zea Mays
ctcgccttctttcgccatcacttcctctctccttcgtccttgtccctgtcgtttctctctcttggccagcatcgacgacgactccatcctgcacctcccatctctggcccttttcttcgcctctccgtcccactccagcgagctgctttctcctcccaaaatataatccgatccacatgaacaataagcaccaccatcagcaagcaagcaagcagcaggataaattaacttaggagtacgtacgtgagagagaaattaaaagaaaccccaagcgcagagagagagagcgcgcgcgcgcggcagcttcagccttcagctatagctgcccttttcgtctctcctccccacatcccagaaaccattctttactcccctccaagaaaacaagcaccacacaaaccctaaagaaattcagcgcacgcagcaagcgcgcctctcatcctctccttcctcgccgtctactattttcatcatcaccgccaccacttcctctctcgcgccgccaattattaatattatcggtactgttgtgtagccattatttttactttcgct

SEQ ID NO: 137122 - DNA, 273 bp, Zea Mays
aacaaagtctgcaactacagcttcagcagtcagatctctctccttcaacaaaccaatttcagcaagcagaaccttggcctctgttatctccaagtctgtgggggatttagtccaacttggagcgcgaacatccggctgtctccctgaccgaggggggagggacttgccatgattctctacaataaaccactccaagcgccatcctttgatgctgtccttgagtgggatgtcgaggtactctgtcttcctcccacggcgcatttccaaactcgc

SEQ ID NO: 137123 - DNA, 322 bp, Zea Mays
gtagatttccccgctaacctagtagtaatgggtactcaagggatagatatcatcctagggatgaattggctgcacaaaaaccaagcaaccgttagctgtaacaagaggatagtgaggttagtgtccccatctgaggaatagataataactgaactgatcatgtctgatctagaagaaggagcctgtcaccatatgtttgtagatggtaaagaggccaacctgcttgaggccatcagagttgtgtcggagtttcccaacgtgtttcctaaggagttaccaggcatgtcacccaagtgtaaagttgagtttgacatagatcttg

SEQ ID NO: 137124 - DNA, 456 bp, Zea Mays
accttacagagcctcacttccgagttgcgggtccttctgactgctgagtcgagaatcttcactggcttttcccggtattggagatccttttgaatctgaattgcatctgcatcgatgtggttttctggtacttttaggcatttgcggagctgagacacatggaacacattgtgaatatctgacatggattctggtagctcaagacggtatgctgcgggtcccactcggctaatgacggggtagggaccgacgaaacgtggtgctagctttcctttcatttggaaccttttgacaccacgcatcggggagaccttgagataaacaaaatctccttcctcaaatctgagttctcttcgtctgttgtctgcgtaactcttttgtcgactctgagcttcaagtaacctcctgcggatcaaggcaactttctcttcggcttctttaacaaagtcaggtcct

SEQ ID NO: 137125 - DNA, 589 bp, Zea Mays
gacgtgtatctcaccttggaactcacatagaaaagcaagatcttggtgcaaggacgagatcctacatggaaccctcactgagataggcactctagggcagctaaacagacgcttgaacttgggcagacgcaatcctccacttgttcgacctatcctaggcgcgctctgaccgcacagcgcatgccacaagcgtcgaacgacttggccgcgtgctccaccccgcgcccatgcccgaaacctcccctataagaagcccgacccttggcctttcccttctgcacgtccaaatccttccaccgacgaccgagcgccggtaatcgcttgaaaaccgagcacggccccacaagatcacagacgcgacgaccgccatagccggccactccagcccaactccgcccaatccagtttctcggctagcttccctataggctagcaaagctccccagccgctcggaccaaacggtacctctccagagaagccagaatacctcgttggacctccttcacccgctggagcacgtggaccaggtaatatacccatctattctttgattccttgcgcacacaccctcatggccaccaagtaaac

SEQ ID NO: 137126 - DNA, 600 bp, Zea Mays
gagcgtgaggtgggacagggaagcgggaagcgcacaggtggtgggggcagaccacctccagtcgagcaaagggaggagaaggaatggggaattggggataccggccttgaggtagtaggggaagctgggctgggggcatggatcacacggcgagctgggggcatggtgaggcgggggggcgtcggggtgggggcacgcccttgctgtgcgggcatcgcggcgtcgcggagaggggcacgggcatcgcggtgtcgcggcgtcgcggaggggcacaggcatcacggcgtcgcgggggcgggtggactcctttcttcgcccggcgtcggcgtcagcgtgatcctcgtatggggggaagaaggggattcgtggaggccaccctcgcagatgcgcgggacgtagacggggccacgcacggcatgccatggatgtcgcgatgaggtggagatggatgtcgctgggatgcaatcgaggcgagggatctgcgcgggagggcgaggtccgcggagattccaccttcatcgcggcgagattagcgggagggcgagggtggcatggatgtcgcaggcgcgagggagggggcgcgagaaatggggatctgcc

SEQ ID NO: 137127 - DNA, 279 bp, Zea Mays
cagaaggcagggcgtggttttttgttgcattgatgataggcgccggccggccgccgcaaaggaaatctactaagctagtgcaccggccactagctaacaagtttctgcaacttgttgtcttgttccgtgtcgtgcactggccagaactttacctgcccgttttggtcgatttaaagcggggagccggtaccgaaattttgctacatgaggccgcacaagctagctagtttgcataaacagacgcgcgcgcgtgcggcttttcgctggctgtgctgcccc

SEQ ID NO: 137128 - DNA, 320 bp, Zea Mays
gccactgcttctcatcaaagaagttggagtaggagaatctcagaataaaatgaatctcataacaaactcatgaaagatcattttaattctgagatttctgggcatcctaacatgcatctagctgatacatgctgcaaaacaagcattggaagatcttagatccaatccactgcgagctagcttagatggcagccatgagatgccatccataagtcattatcctgttccaaatgcatgtcagaaactctaaaaaatgcatgctgtcattacaaaatacatgcacataagaaaagttggctcctgctctatatgtcttggac

SEQ ID NO: 137129 - DNA, 615 bp, Zea Mays
gtgatgtttgtgtttgatgttagtatggagttataagtctaaatcccagtgtcgcaaccatcgaggagtcggtgttgccatcttaaccctaaatctgtaatcctccattcctctctgattcttagctcccctcttcgtctggtacctcctacgctcaggtgttcctcatcttcattggccgacgggtactcggcaactctagtgcttcgggtgcgtttggtaagtccatgaatgtttgttccggtgatgtttcttcagttctagtgatgttcatcatgtttgattttttgtatggaggtattggtctaaatcccagtgccacgcagccattaaggaactagtgtcaccatggatatcgatccggctgctgaggaggagtaccgacttgaggcacacaatgaggagtaggatgcacaggcctttatcggcatcgacaacgatgatgctcctggtactagaacatggataggctccactacccctactattgatggaagcagttctggtactagttgtaatgatattggagagacataccatcatatatgttttttctttcatactagatcctagaactgagatgagaggttttcataaagctttactatccccatt

SEQ ID NO: 137130 - DNA, 383 bp, Zea Mays
ccgcagttagcagcaatggttaaccgcaataattgagagacgtgtaactgcgaccaagaaaacgatcacagataaaaccgatcacattgggccatcccatccgaagcataagattaactccaatcatttcacccatatttctgctactttctattctatttttattacatcgctctaaaaaatattccccaaatgcatgatgtatgtgaccattcttcctattcagtccctctacactataacttaaatatttattatttttaccggtctttgaagtttttaaaaaaactcctagaattgtattgttataatataatatcacaaaaaataacataattaatgtatagaaggtcaataatactatcttagaagttaattgcccg

SEQ ID NO: 137131 - DNA, 811 bp, Zea Mays
ctccatttgtgcctcatacggaagatgaataatcaaatgctgcatcggattgaagaagtcgggtggaaagatcttctctagcttacacaataacataggtgctattatttccaagtctagaatcacgacccgagataaatcttttgcacaaagttgactaaaaaatagctcaactatgcaagcgctagccagacatgctcagctacatagcctcgaaccatcaccataaaaatttgttccatcgatatgtggatgtcatgattcttcatcccttagagtcgccaagtagataagttcagccccactcaagttagttgcatacccatcaagtaacattcacatcttgatccacattagtatttccatcctctaggtcctactcaggacgaagccttctccatgtctttacaccactaggcggcttcatctcttcatttggtctatcacatgacgcttcgaaacccactcttgcctttacgttatcctttgacttatcaggaatgtccataattgttgcccaaagtgccttagtgacaattttttcagtgtgcatcacgtgaatgttgtgtggaaggagaaggtcgtcataataggggagccgagtctagcccgacttatgggtccacatatgctgctcaccatatcccacaaaaccaccttgtggattgaccataagaccatctatttgttgacgaactttggcaccagtcatcattgcacgtgggcggtctgttactatgacacatttcataaattcttgatgtctagtcaggatgcatggtcaggtgggagaaattatcgatatttatcg

SEQ ID NO: 137132 - DNA, 374 bp, Zea Mays
ccccagtccgcacaccatggcccaccagtcgatcaaccgagtctgcatcctggccagaccccaccgcatgccccaaacctaaccactcgcccgaacatctagcaaccctaattgatttcctcgtcgctctcgccgtcgtgtgctcccacaatcgccgtctccaagcgcccccgcccctgccacaccgccgtcttcgtgcgtggcgtctcggtcccccaacatcgtcgcacggtattgcctcatccatctgtcatttctcgtcttcgtgcactcttctgtcgtcgctccacatcaacagtgtcgtcagatcccactcccgctcgccattgctcggcgatttggtgcggtggctccacggccctcgcctccacctc

SEQ ID NO: 137133 - DNA, 1228 bp, Zea Mays
cactcttgtatttatttttgcattaataagtattttccaaatgaatttattgattttctaactatctggaccgagcactaaatttataaaaatatgagggcgaaatcataagtgttccctagactcagcccaaccctagggtggacggcgggttctaatcttgaaaagtaaagggtttctttagcaaaaaggccaacacaaaggggtctcagtggttttcggccgcgagatcgacagcggacggcttggattagatccatcccaccgcgaaccggtacgcaaccgcagccacgagatcagatatcgacggtttggatttaaaatgctaggatcacatcgcggctgtccatgttcgatctaacggaccagatcgagacatggtgagtgagtacactacttctaatcaccaccgttgggcaagaatccaatggcacaaccatcatcaccttcccccgctcccacacaggcagcatgcggcggcgcccgagctccacccggcggagccacaccggagccgcgcaatccaacgccgaaggccgcaacctcgagtctagttagtgctaagtgatgaggacgggataccaaacacaataggagatgaattacttacagtggtatagcagagaccccagtccatggcgcacggcggattcctggcgttgctgcgcgacggcgagaaattcatcgccaccccattgatctcagtcctcggcatcgcaacggaaatgtcccatggcaccaggcgaagcacttcaatttgtctttgcgcccagaacggccgtatgcgctaatccagtcttatgccgattagtgactccgccgaggatgaagacccacggcgagtgaattccccagcgcgccggctatggcttgggtaccgaggaaaggcataggtcttataggaggcgggtccggggttaattgcgctcggtctgcggaaatcgcgcgcgtgcggagttctcaaccacggccgattcggtcagcgggatccgattctcgcggggaagaaggtcacccaacggggcggccccaccaccagtgagccagcaacgcgaggggcaacgacgcgagcaccagacgacccggttcttatggccccatggtcaagcacccgagcggaatcaggaagatggcgcggagtttgttgagaatgaggacacagccgccgcggcacgcaacagagagaaggagctggaagaagccccctcccgatcctgcagcatcagcc

SEQ ID NO: 137134 - DNA, 475 bp, Zea Mays
ctagatcccatctaacctaatatgatctaatctaaagtgagttacttaacggactagttaatactagtgaaatagattagaccctgctggccatgttttaacttaaattagtacatcagaccaaaccacccatgaacaagtaacttaccagcatattcatggtgactatccatcccatcctagatgttgccataatacacttatcttatgccaccaacctgttaaccctctatccttacctacaagttatcctaactacatgtccctaattcggataacaacttcaagaacgaagatcgaagatgatcgacctcatcaatcaaggaaggataagattcaagccaaatcttcaaaggaatcaagatccacaatccgggatggagtctttctttaccgtactctttcttacccaaacctctctatgctttaaagacatcttttaccatacacaataaagtggatatacatacccaag

SEQ ID NO: 137135 - DNA, 422 bp, Zea Mays
cccatttgctgagcaaaccagtaccggggagcggacgaccaagtccctgctaagcaagcctacgatgcagagcggctgactaggtcctttgtcaatcaagcctatgaggcagaccgcccaaccacatccctgccaagcaagcctgcgaggtggagcggctaaccatgtccccgccgagaaagtatgtgggcggagcaactgatcaagtccccatagagcaactcggtgaggctgaggtcctagtccagcgctactgacccgcatcagctacgataggatgcatcatcatcaagccacgcccaaaaatacatacatcataccgaaggggcaccgagaggtcaccgtcaacataattgtagtctccacaaaaggtctcaggcatatccccactaccctatggggtcagtcaacctcagtcgtgg

SEQ ID NO: 137136 - DNA, 401 bp, Zea Mays
gtctgactgcagaggttgtggttgctgactttgtcttcaagaatattcagccattgaaggacagggcatatccggcctatctgtaccaaggcctagctgactccacccaggtcaccaatagaagaattcctactgtggacttggtgagccggctcgaaatgatactcagaggcaaggtatcaaatgttggtgcccctgttgcctactcggcttggaacttgcctccttccaaggcctttacccattttgtgtcaaatcctcctgctggtgatggcggtttgggccttagagtacgaccctctgccgaagaagttagtgttttggttgctttgcttgaagaaattccagatgatgaacggcaggttcactttgaggtgcctttggatcccagtgatgcagag

SEQ ID NO: 137137 - DNA, 704 bp, Zea Mays
tgtcgctgtagcacgctgaagatcaaacagcctgggatccgcagcaagtggtcgcacctcagtctcatcgcgctcccggaagtgagcaggtgggataggaggagcggaagcgggagcggaaggagcagtggaagctggagtagtggaggtggtaggtatggctgaggtggtggatggcgcaggagtgactagagcaggggaagtgggtggtggagtggtagcagtggagggagtggtaggagcggaggagcgaggacgagaggcgtgacgacgaactcggtaagcaatctgatctaaagaaatccgtagctaatctcctctctctctctctctctctgcctgctcagcgactgctgctgctgctcgggctgctctgtccagacactgcttcttgcggccttcctgttgctccaaatgcacagtcttccccttgacctgcctaaaggggtgagaaggatcctcatcatctcctccccctggcgccgacacattcttcgtgcgtggcatcctatcccgatgactgcaaatgagagagcgaagctaagcacaagtcgataacggccgataggatgtcaaaagaacaaatggctacctagaaatctcacaggagatggagagaatccaggcagggcaggagacggctcatgggcaggcaaggtcactgaaatgacagaagaggtgagcacgtattagtcacatagtca

SEQ ID NO: 137138 - DNA, 320 bp, Zea Mays
gattgccaaagtatacaaatgatgaatatgcaatctaccatttgaagtgcttcatttttctatgtgactacacaagacacatgagaaatagtaatttaagatacttgcacttaaaaacatagatgttaccatcctttggctttcctccacgttgtagaccttgttgtttccgcacaagataattctttatttcctacaacatcaatacttcccccgagatgatatgagtttaagacatagtaatttgaaaaataaccttgggtcaatcatggatatagatcattgaagattgatagcttgagttaacaagaattgaattg

SEQ ID NO: 137139 - DNA, 614 bp, Zea Mays
ccgcggttattttttaatgaaatgaagacaagatataccattacatggacaacaatgatatctggttttgcttatgtggcaggaggttccactgtccctattctcttgcctttttacaggtgccttgtgctcggagcatgtcagcaggtagaggtccaggattagtggaaaaccttgttaatattttctacaagcatctgtgtggagctaatttagatagtcaggtatcattctatttttgattcatcgagtgacctacaatcttacacaaatatatggtaaaaatgaaacttgttttcacacaatattttactaatggtgcagcatgtacattgctatagacaaactcacgaatatatcacacaacattgtacatgctacggttccaatagtggatgtcgaagtcaaatagatttttttttaaaaaaatgattataaaaaatcatccaatattttttatatcctggtttaatcttagataaatactagcagttgcccgtgttttgctacggttgttatatctctactacttattaagttagtaaggatagtctgtcatttcctgttctgtcattctcattcattgttctgcctttctcattcccacctcccgc

SEQ ID NO: 137140 - DNA, 492 bp, Zea Mays
gcggaatcagcaattcatctctccgcggactctatgcccctataaattccgcccgggacttgccttggtcgctctacgggttcaccgtgaattgacagtgtaggtgctcgggccgccactgccgttcggggtcttcatcgttgtttacagaccgttgtgtggtcctggtttgttgtcggggcgtactgaagctcgtcttggcaacacctggacaaatttgcacaccggctcaccgaatcgctcatcggggccccttccctcactgtcatccgctccctgccgtggccaacagtgttcctgccgtttcttccaaaaaggtaccccctcaggtgttcgcattgttcttctccgcgtgaatcgatgatcgagtcggtggttggggcttggggtgtggaggtcggtgaccaccggtgggctccttgccaccgcggggttgatggcgtcgttcctgttcggcgttggggatcgcgggggtggaggacgagcgctgcg

SEQ ID NO: 137141 - DNA, 428 bp, Zea Mays
gttctggtgaagtactatctatccagtagatcattaagcgggagctctacacctaaaatatccgaaagtattggtaaccgtgttattttttagatattgttttagatgctctttaactaggctagatgaccactgatggaagtgatgtgagctcgtctatctgtgctgtgcccgtgcttgcttgtggcgggacgggagattttgattgagggcccaacaaacatgatagtgataaatatgtacatcacgtgtatatcttaatttcatttacctaataattatatatataggctgttggtaatggaagcctattgcttccgataggcataggaagtcccagttagggtagtggtcacgcgcgtggtcggattgggctagtgggatgcgtttatgcatgtgtaaacatgtgttatgttttgcgtaaacag

SEQ ID NO: 137142 - DNA, 725 bp, Zea Mays
attccgtggaaccacctcgcgggcgccctttaaacatcgaagccaaacccctccgctctcctctcaaccaccagcgacccgagccatccattactagctccattgacgccgtgttaacgaaacgcggtccacgccatagcggactagcgctctggccgtcgctccggcctcggctaggcttctggggccttcgttgaggctcgctggtgcacgtgatttgctcggctggcgtgatttggggctggggtgcacgcgatttctcgccggtgttcctacgtcgctgcaactccgccccgcgccgtggactgggtaccgtcgcggccaaatccctggtgagccatcccctatcgaactcgcgctagctgcaatttcacttttttgcacatcaccgtaggttagcttcatcggatcggcggattgggtggctctccggtgatggcgcgccgctgtctgcgctcgggcgccaccgcctgggtgaccgcgtgtgagaggatgagccctggtcgttgatctggccacgaacggccccgatctagccgtgtgcacccccttcgctcggtagaataaggcccgttgatccgtgatcggacgttctctgggcattagcatcacattaaatccacgccgcagatctccgatcagacggtttgatttactcgcaggtttggcatgcgccagatctaatcgatgccgttcgtttctaatcggacgaccgtaatcggctg

SEQ ID NO: 137143 - DNA, 372 bp, Zea Mays
gaaagattcgtgtcaaattatgatcaccatcttgagcattactgcatggctgcctgcctaattcagattcagagctgagactactatcaaattatatggaacgcttggtttcttaattgcgcctagcttgtttcgtgcaatgccggtgcttgcattggcatacactgcatttttcttattttcaacgaggctggcgagaatagaagcaaacacttgtcaggcctaagcctgtactgctgtataagcatgcctagtactactacaagtctacaacaacctgaaaacgtgcggcgcagaagcatttgtacagtgtttatgcatgcaacaacgagatcgctgcactatatgtttctgtctggccacgatatctgc

SEQ ID NO: 137144 - DNA, 485 bp, Zea Mays
gttaaaccctaagttttgggcttatttgcaaaactcacctcttaagtccttaatagtctaagtgtgatttcagtgttatgggctcaactttggagccttgtaagtgttaaaatatgggatctttgccctaggtcaccacaccaaatttgtagagcaaccaaaggagaacaactttgcttgagagtgtgagcacagttgttaagaaaatattggagataattaagcctgaagtcaggctgtcaggctaatattgtctgaaattcagattaacagtgggatgacatgaacttagggcttaattttaagcatgctccaatgtgtttttgtggcagaaatcatatggcaacattgtagatggcataatgctctacaggtttgctgcagagcttgacttatgttgccatttggaattaagataaaatctggctccaaagtgctctgttagaccggctgcttgcaattcacatggtacagtatgatgatca

SEQ ID NO: 137145 - DNA, 345 bp, Zea Mays
cctccgtgagcgcgccgacacggggcagtaaggcctcaaaacgatcctggtactcagcgacagtcccggtccgtttgcaggccatgagctcgccgagagggttggagcggatgggcagcccaaaacgaaggttgaggagttctgaaaattggcgccaggacgacgttccttcctcgttctggatctggatgtaccacatctgggcgccgccttctagattgtatgaagccatccaggcctgttcctcggcggcaatccgctgttgatgaaaataggattcacaccagttgaggaaggccagcggatcagacttgccatcaaatttcgggaaatccaacttctgag

SEQ ID NO: 137146 - DNA, 481 bp, Zea Mays
ccaggggccattgctgcgtccggattgtcttcacgtaccagagcgaacgaacgagtgagagagctaagctactccagctatagcaaaggccctgcgcgcgtctgtcttgcgagtaatgggaacctgactcgctcgcagtcgcagcagcagctgttcgggctgcccggttggtgacaccagtaaatgtgggtgcctctggcatgaagatgtgcgtgaatgaactttgcaggcctctttgcttgcgcgcgtgcttgcttttcaccagaacttctgggcggcatggtatctaggtgaggagtgacaactagtcttgtgctagaagcctagaacttaggatctcaaggatcctacaggtagatagatgggtgtatttaacatggctctgcttcacttttagagtagctctgataaatcgctaagaagcataagaagcacaagcacggatacagcgctcaagcccctgctacatctcctaaatcca

SEQ ID NO: 137147 - DNA, 380 bp, Zea Mays
ggagctggcagtgcgaacggaaagctccaactgtgctgcaaggaccgccagcgtattgcgagattcaatagcctagggaggaagaagcagaactataagaacacagacgcagggtagatcaacgccggagagccgtcgccgccaccgccgcctcgtgcccttcatttgtgatgcctcagctccttcgtgtggggtattttccacccctcagggaccagacgtggttcccgatctggaacgaagaggaaatatcaggatacagtccatacgggggttaactgaatgcacatttgttcgtgggctgggcttctttccagacgagggaggtccacgggctttggtccttgttcccggccgggaagtgcttaaacgaacatggc

SEQ ID NO: 137148 - DNA, 319 bp, Zea Mays
agatgccatttgcaaggtgcgcggactttagagcaataatacaagacgagaggagagagagggttaattcacgcaggggcgcaagagatcgaggaagcaacgagtcgctagctgttggttgacgtcgctaccaagcttagaagactttggtggccagcagcagccatgcaccttttgcgcgcggtgccggccggccggcctccctcttgttgttttcccgccagatgaattcagcacgtgtgcgagcgagcttctagatgtttgttgccagctagctgatcctgcctcttgcgattataatgaccacatcatgcattgc

SEQ ID NO: 137149 - DNA, 528 bp, Zea Mays
ccacctcgctcgcaatccggagcccattgacgagggcctcatattcagcgacattgttggcggaatcaaagtggaggaagatggcgtagcggagtttgtgcccttaaggcgacatgaggacgacacccgtgccgcttctggtcttgaggtaggatccgttgaagtacatgatccggtactctgggtccttgattgtgggtggctcctgcgcttcgatccattctgcgatgaagtcggtaagagcctagaatttggtcacagttctagggatgtagttgatgtcgagcccactgaggttgaggggccattttgtcatgcgactggacgcatcccgattattgatgatttcaccaaggggtgccatggacaccacctgcacgaagtgtcggtcaaagaagtggatcaactcccacttggcaatgaggactgcatagagcagtttctagatctaagggtactgtgtcttggactccatcagcacctcactaacgaattaaatggacttctgcaccttgagcacgtttccct

SEQ ID NO: 137150 - DNA, 441 bp, Zea Mays
cttggtacaaggagctataaaacacttgtatttttcttatttttgtatacttgttgtttctaaatgacaatcttggtacaaatatgagaaggtgaaatgttggcaaaggtgaggtgaaatttgacttttcccttcatcaatctaggtcaacttattatttgcctctccaattatgacctcatattatagataaagcaaaaagacaagaacatattttgaaagataagaatctataaagaataaatcaatcttccacattataagctctaaaacacttggtcaagattgagtctttttctaagaggtcatcatgaaaagtaactctctaattaagaaatcatactaataaagcaacaaaattataaaagagacaagatgggaaaataaaacattcaacttgaggagactaaagatgtaaatccatcttgcaatccatcaaaa

SEQ ID NO: 137151 - DNA, 750 bp, Zea Mays
gcctgctgctgagtgagagtctgaagaatcgaagctagagcagggtccatagcctgaggggtagcaggggcagcactagagctcccagcctcatgatcatgtgagcgtggaggcataggaggcggaggcggaggaggaatcccaaaatcatcatcatcatcatcatcatctgctgcaccctgggtgtcaaactgtcgaagtgctgcatcctcggcctgagtgtcaaacacaggagcataagctggcactggaatctctggagcaggacggtaagaaccaaacacaaggcgtgaggcctcaagggtactctggaagcgaggtggctgaaccagctgcgcaaagatgtgacataagtagtgagcatagggcagctgtcgtcgagcacgaatcccatccagaacagtgtcctcaatctcacagatcagaaagtccacaacatcaaactcagagtgggataccagggcaccaaggagccatagctgaatatgagtagtagcctccctgtatcccatccgaggcaggagagtccgtctgataagctcatataagtactttgctgctgtcgtgaaatctgctggagaacgtcgcgacccatctgtgaaaggcgggcggaacagagccgcgacgtgagctgtccctggagccacaccgccgtgagggcgacgtggaggatctgaagtgccatagcagagactgtgcaggcgagtcgacgacacagggaagccaaatagctgtcggatctgatcagca

SEQ ID NO: 137152 - DNA, 385 bp, Zea Mays
gtttagtcattacctctagaatttctgtcacaccaatagaagttgccgaaggggtctctgcataatgcttcggcggagaaggtctttcttcttctccatggctagatgacataatcttccatttctttgataccgaaggttctagtgtcaacttcgagttctttgtttaccttttcttcctatccttctcgacagatctctgccttttccttttcaagatactcataacccttttcttttttactccccagcttcttcgacaagtctctcatagttaggatactcgaagccaagggcgtccatcactcgatttaaccttcgtttatctcgtgtgcaaaggcaacgatcattagctggtcctctttcttagtataatttccgagga

SEQ ID NO: 137153 - DNA, 648 bp, Zea Mays
ctagctcatttagttgagccgacaagcatcacaagcatgcgagggtgctaaaacacgaataaggagggtgagtgcggacttgagagcggctagccccgacgggggtgattcacggcggcgcagatgaccaatttgggggaaaacccaaattctacggctatagtggctaatcggagctgagagttagtgtctcgggttcgtgataacttggcaaagcagagtggggcatcaatttataggagctttaggcggcggctccgaatttgggagaagagtggagcttatcttcctggtgaggcaatcaccaaggctcaccgtggagcgcatgcgttcacctagcgactgccactatctcggggatgccacgatcacggcaatgtggtgaatcaagcgactacgtgtcccttgctgcaatcacgacgagcaccgatggcgatattttaccgaccacgcggccaagtgggtacggcggtgactcagcttcggctaagaccttcttccccgagatctttttaaccctcacggttatctactcttcatgggcacgaatcgtgacatcggcgtgaatcgcagtgcgaaggtcactggcgacgaggtacctgaactcggcgatctgatccaaacactgtaccatcatgctgccattca

SEQ ID NO: 137154 - DNA, 737 bp, Zea Mays
cgttcgaaaattggccgccgggcaattgcgtggtgactccaggcgggtgggcggatcgtcgtttgggcgattagaccttcgtgccactgaaatcgcgagctgcaagaagaatccgcggtcagttcgtcaagctctgcgggcgtcatcatctcgggttcctcaccgacgaggtaaacccgttttccccatcgcttccagctctgcccaatcggaatcgtattctgcgcgtgcccgggagatcgtcggggccttgttgctcgtcggcgggcggagcggtagtgaagagctcgggatccgccgaggtgggggttggccggtccttggcgccgccgcggagctctgtttggttagcaggactcggcgtcagaagcttgaagattagaggtggtcgtgggattgtctgtgaacggctacaatcaaatcgtgtcttcactgaatctagaccgcgagatcgtaatgaacggaccggattagatcgcggtcacattaaatcataggcgtagaaattgaatctgtgggctcgtatagctaccgggtcaggggggcagatttaatatgtgccctagattcctgatcggacgactctgggtccccgatacctcttcgccttggcgtttatgctaaagagaccctgacaaacatttgaatcaacccgccgtcccccgcgggatacgcctgagtctgagaaatatttcgagttagcccctgcgtttctttgttttttatgcccagtccag

SEQ ID NO: 137155 - DNA, 643 bp, Zea Mays
tgaaaacaacctggaaggcttgaatttgagcattcttgtgattgtgatcgccaatttaaaaaaaacttgcaaagcagtgttgcaataccttagagtgagaataatggagtgataaaaatgtttaccaaaatgaagttcactattaatatcggttactggctttgtagcattgttggtaacttggtattatctagctatgttgttttcctttcataaaaacggttccctcaatcaaatgttcttagttggcaatttaaatgttaaaatctatgacatgtactgattcctatgatttacaaggacatgtaaattttcccaatgtttaaaaacatgtatcttttgcaatgattgtcaaactaggacatggtttttgaggcgctgcggcgtcctgtggcgctgggggtacgcctggacgccttataggcgatgcctaggcgatatggcatagctaaaaccctgtggtaccccacggtgcctgtagtacacctcaacaccatgaactaggaaatgataccatgagtgcattaaagataggtggaactgaagtattcaaccataaatttcaccaaatcagtaccaaattttctcttatctctctattgtttattttggagtcggacgacagtgagtttggcgatgagcg

SEQ ID NO: 137156 - DNA, 412 bp, Zea Mays
aaattgcatatacttaggccaagtgtgaagcattactatatcttagcatccgtggagtgcactgtgtcaagaatcaaactgtgatgcgcatgacacacaaatgcacaaattagagtaaagcaccatataaacaccaattaagcagatataacacaagatatcatcctaccactttttatcataaagataccaattaaagcaccatgattataatcaacacatgaatatataacacaagataaacaacaagcaccatagatatcagttgatctatacatcaaacacaagatgatatcaaaactaaagcatcggttcgcatcggaagcaccatatatgcattatcaccatataatacaataagaagcacatgatgagcattataaacaaaagtaaagcattctccccttaagat

SEQ ID NO: 137157 - DNA, 430 bp, Zea Mays
gccgtcgcagcccttccgtcctcgaacccttatccagatatgcgcacgcggaggtgcgcagcgaagccgccggtcaattccagctgcttttcaccgatgctgccagccagcagcgtcggagcggggggagaggtaacggacggacggcacacagctcttgacctggaagctccccgccctcgtgttgatggtagcgcaatatctcatggtgagacgagatctggagcgtcgtttttatcccactgtgcgcggaaaaggccttgcgcgtgcctggcgcgagctgattggctggtccaggttaaaagttactgcaaatggggggtgttaatgttattaggccgtgcagaaacggggacgagggtcgcgctgtcgctgtcaggcctccattcacttccgggtcgctctcagattggttgcataaattcccctc

SEQ ID NO: 137158 - DNA, 650 bp, Zea Mays
ttcgccgcgtggtgcggatgctgaagttgtgcctggtccgagtgctggccgtaggcggtgaagggcggttgcgaagcgtagagtgagtgaggtggatggcggtcggcttcgtgtgggcaggtctggcaagcagaaattgttgtccttgccggccgttgcgagtgtaggtgagggggagttgcgaagtctttttgagggtgaggagctgaggataatgctatttaactatagggagatgggaatcattccgaaggttgaaccgatgtaaggtgtgatgccctcgctgtacatatgtaactatagtttgtatgatgaggttgtgcaccttcgcgcatccgggtatgttcataaaggcgttgcgcacttggtctagtacgtttattatgtcggtctggcgcgcctgtagtcggtctttgcgcggacagtttggtgtagggtttagcacgggtagtcttttgaggaagacttcgattttccgcacttgttgtgctagtccagctgcaccctttggcgacttttgcacggatagtctttttgaggaagacttcgatttttcgcacttgttgtgctagtccggctttacccttaggcgacttttgcatggatagtctttttgaggaagacttcgatttttcgcacttgttgtgcta

SEQ ID NO: 137159 - DNA, 395 bp, Zea Mays
gtcgactgctgttgcttttccattgtcgtgcgctgagctaccgatgacgaggatgatgttgaggtccaccatgctggctcgcttgaaaaccgtcgtcgcctgtggtatgctgccatgcctcctcttctgagtggtggtaatacgccaccgctgctctgctctaatgggcgaggtgggcgctggttcgtctgctactagggttggctgttttggtgggctaggccgtgagaattatgcactgggccgatagaagagctcttcacgaagggtcaaggagatggagacattgggatattcccatgttggttatggtcgagctgcgggagcggagaccaccccacgaccaaatggcgaagttgtggtcttcgaaagcttatttgctgccagacttcgcc

SEQ ID NO: 137160 - DNA, 277 bp, Zea Mays
ccctccggcagatctataaccttctcgacctcgtctcgcacgcatccggccaattagccagcgttgcgttggcccctgcctctcgttccgatccgcacaccactgattgacccaggtcccagacacacgtccactatctaggtagacatcggcagcttcacaagacaccgaagaagcaacaagtaccgtgtcagtcagccgctaggtagctaatgaccaaaattctcctcctcctgctgctcctcgcattgccgctgccggcagccctggcgctcac

SEQ ID NO: 137161 - DNA, 405 bp, Zea Mays
gggggaggaatatgagtaactctgctactaaggtgaaaagcaaggtgtccagccaattatgtgaggagaagaatgagaaaaagctgaacaaaacataccgggggaagaagatgcagactgctgacaacaagatgaaatatgacagtggagtaaagaagggggattgtgttcacaacattttgtggtatagaaaagaaaaggaaaaggccagtgaataccagtaaggagactgcaccaatcacttctcttgttaaagagaagaaattgaggatgactgagagcgtggagtttaagatgagacatgacaaacagaataggataaatgtgttgcgtgatatatccgacgagaatatgggtacatcaagtggctctaactataaaataaggaagaaaaaattaccacac

SEQ ID NO: 137162 - DNA, 457 bp, Zea Mays
gacaattctgaacgatgatagtcctagcgaggtcgaaggctcggtttcacagggcgaaaggtgccgcgcgcgggcgaaggctatgccgcccaagggcggagcccaggtcgcattccgtcatcatttgggcccatttgtaagcccctcctcggggtaggtttcgtagtacgtctaattaggttgtacttaacataactataatgaccctataaggggaatattttggagctgtagaaggtaaccgggggcataacagtacttatgggagcacacctacctgctcggttacctataaataccttcacactgtacatggatgggacacgttgaacaagacgctaatgttcctttcttactcttttattgagcacctgagttccctctttcccaagtgattgggcccacctgaccacatgtcaatcactcccaacattttgcgctcaccgtttgtgctaca

SEQ ID NO: 137163 - DNA, 466 bp, Zea Mays
ctagaccgctagacctaggacaaaaggccttaggcatagagggagaaataggtgtctaattaagtaggccccgtgggccagtacttagacttttaaggatgccttaagagcaccctattatctggagaggagacgttacttctagcatgcatgcattatgaacacaaaagggaattaaaacttgagctgaccaacttcctttaaaaaccatccgggctctttttttccttccaccataatctttacctttgatacccttccgcagatgaattcacccacccccgccagtggaggagacacccgtttcagttctgacttcctttctcacgatggctttccttccatcttgtgggaagtgctcaactccgctggttaccctacgccccctttgtacacggtgcagctgtatgaggagcatcgggtaccttgttgtcgggtctagctgactttggaggctcatcccctt

SEQ ID NO: 137164 - DNA, 430 bp, Zea Mays
aggaaatggaagtgaaagcgatgaggaatttgctctctttgtgaaaaatcaacaaattcatgaggaaaaagaaggatcaacctagaaagggacaaacatcaagaagaaatgccttcaatgatagaaaatgtttgagtgtggggaaatcggtcacattgccatgaattgtccaaacaagaagaacaaaggtaaggatggagatgataagaagaaaaagaagttctaccacaagaagtgggatggcaaagcctatctagtcgaatgggattcggatgcaagctcggatgatgatgatgatgattcttcatctaaactaaatgccagaattgcaatcaaggaggctcccacacttttatcatctcctcattgtcttatggcaaaaggagatgctaaggtaaaaatcataaccgacttaaatgacattgatgat

SEQ ID NO: 137165 - DNA, 545 bp, Zea Mays
gaatgtgctaggcaacagcagtgcggttgtgtatggtgtggctctcttggcttgtggaataagctcttccatcactggtacttacgctgggcaatacatcatgcaggtagcgcttcttggcctgttgaagatgcatagaggatctgtatttgtcctagccagcaatcatcgttaaactaacagattataatatcatattctttccaacatttacatacttgtacacagattgttatacttgaagcacggtttgcatgtgtttggctccttgctcagggtttcttggacatcaagatgagacagtggctgaggaacctgatgactcgcagcattgccattataccaagcttaatcgtcgccatcatcggcggatccagcggtgcgggccgcctcgtcatcattgcatcggtacagttgttccaccttctggtgcatcgattattgtctgttcaattacataagcatcatttacaggatctgtaaatacaacttatcggtagtttaattgtatgaactaatagcaaattcattggcttaaactcgtg

SEQ ID NO: 137166 - DNA, 518 bp, Zea Mays
ccctgaacatcccggctacctcgtctctgatcctctctgccatgtctggcgaccatccattaagtttgtgggtggaaatcttaggttgcctgacatcactctgttggctttcctcccaggggtgtttgaggtgtgtgttaggtgtcctattaatgtcaccagctcctgccctatacctctcaggctctcttatggccgaacagtattcagccctatgtccatgaggtggtatggcatgattataatgtgttgctggtggggcaccataatgttgctgcaatgaatgtgggaactgtgtgtattgcgcagctctcggctctgcgtacgcatatccggacggtccggcgtaagaggccggatggtccgtgactgggccaaacggtccgaagatatatctggattgtccagccgtatatgctaggcagtctcgtacccagaccgtctatcgtaaagaactggatggtccgcgatcgggccgaatggtccagggctacacccggacggatcggtcatatatg

SEQ ID NO: 137167 - DNA, 309 bp, Zea Mays
atctaaaaactcgacctgcaacacaggtcgagaaaacaactgtcctagcttctgtacttaatttgcatgaaccagcgcttcccatggaaacaactgtcctgtcaaggaagcacttcagcttgtacactgggatcaagtcgatctcctctagtatttggcacaaatcttggcacgaccagcagcagattgtccacccgtttctcatgcccaccccccgccgccacctctgcttcctccgcgcactcgttgggctccgctccaccggcgctgctggcttttcctcggctcctacacgcgggtgcccactcc

SEQ ID NO: 137168 - DNA, 316 bp, Zea Mays
tggcccagagctgttgcacctaaggattgtgttcctggaattgagatccttcacaaaaaggccaaacgggtcaaattccatggaacaattattatcagtcgtaaactgacaaacagaaagaagattcttaatgatatcaggtgtaacaagaacattgttaagataaaactggccagaaagcattgtatctcctactgaggagaccggcagactggacccgtttccaacaacgatggatgaaggaatagtagaagttggagaacgaaaacgggagatgttaccagagtccggggtcgtatggttggaggccccggag

SEQ ID NO: 137169 - DNA, 312 bp, Zea Mays
caggaaatccggtaggagaagctgagctgtgggtcgaaagaccgagtgcaacattgaaggagaatatgttggcagatacgtgcgacgttggagttaagctgccagcagcgtggagaacaacatagctgcgggggggagggagtaatggtgaagcgtgttaagaaccacttgctaccgagtgtagtccaaaggctccttaactgaataataatagaacacagggagacaagagtgtagagaggaactgattctttgttactatatggtgctgttgtccaaggttacatgatatggggatctcctctctattta

SEQ ID NO: 137170 - DNA, 503 bp, Zea Mays
ctttttactaaaacggggtttgagcttcctccgcgcttcacatgaccaacaacgctcaggtgtcccgatgcgtgccaaagggacagacctgaaattctcatccaatgcagttatgagcgctctgtcacgcgacagacccaaaaatcctcttccaatgcagttatgagtgctctgtcctctccctctcaaactctctctcgtgctctctttcgtttgccgcctctgcgaccacgcttcgccactccaccactttggcggccatccacccctctattccacctccgctaccgttgcctcaccttgctccccactgcccttccacgcgtgcaaccctccttactggcacacgcctgacccctctcaagcaagtttaaataaagagaagtttacagggagtggtacgtggggaatggagatgaagaatagatccccatccccgtctcggcgaacccaatgataactaaattttctcatttttgatcctcacatggactaaattatcc

SEQ ID NO: 137171 - DNA, 498 bp, Zea Mays
gcggtgtctgcttcggcggatcagtcacgcgcgcacgatgctgctgccgtcgtaacggggcataagcacatgggtcggccgcctcgatctcctgccacgccgccggtccgccgctgatctctgtcttcctcctcgctctcttctctctatctctgatctctctctctctctctctctcaagtctcaaccagcaggttggcacggtttattgttccatgcatgcaattaatgcaacccagcggcaacatcgggggtctgcgggcactcgcgagtgacactcgagcgcgggcgatttaaaccgggggctcggggacacggggggtgcctaaatttggagcacttgagctcttcctgcggtggtggttccatggaggaccttgtttcactggaaccagagcagaagcaagcgcatgcagtgctgggacgtagcaaccggcgaagggaattccatctgacgcgtgcacgcgtgcctctgacaccaggtcatgggtctcccac

SEQ ID NO: 137172 - DNA, 523 bp, Zea Mays
atcgaagtctatagggatccttgcttcttctttgtcgtgtgccatcgaaacacagaacagcaaacaaacggtgatggttatccctaataatttcactacacgctcctctcaggtgcaacacaggaacacgctctaaggtatcttaccaagctcttacaagtgtctgacgaaatacaagcaaaggatggtacaatcggaggctggttcgggatacttaccaagagggagtgaaaccgcgattgcaaggtcaaagctgtattgatcagaagaaagtatgtggagcttgggaggccaaaaattaatatcaaggattagcaaaaatcgagtgcagattagcgaagttcaataagtgtccaaagcacaagtcacaattgctggctaagacgtgtcctatctaagcacaacaaggtaaaggtaacaaggaacggtggacaaaaacttaaagaaccagcagaatggtagttttgtaaatagcgcagatttttcagcactagtagaaattaaaggcgcgtttccaaaggag

SEQ ID NO: 137173 - DNA, 374 bp, Zea Mays
ggcgccagcaacaacccctcggaatccgcgtcggtgatccgagctctgcggagccgagcgctcatgggggaagagatgaattggcaaggcagggccacgaatcagagacaacaagtagctcacggggcagggggtgtctggcgaacgggcccgcggtgtcggtgacagggggatcggcgcgcgcgtgatgagttgagcaagcctagcgtgcgcacgaggggaaaaggaggatgggtcgaattccagtctcgtggcccaatacaggtgattctcctttttattttatttttcatttataatttctagtttatttcctattccttatttgaattttcaaattccaacttttgagtttaaccagattcaacttttag

SEQ ID NO: 137174 - DNA, 440 bp, Zea Mays
agtattgctagatctcttcgagcttttggattgttctttgttttttcaaaatgcatgcaagtgtgtatgagtgctttggcaacattactttcttggtgcatgacatcaccgttgtgcacaagaatcaatgacggcatataagagagctcccacatactacatatatgtgtccagttgtggtccacttcgaatccttggtacttgttccctttttcatttaggacaaggttgttaagttgagcacaaatttctgttgcgttcagacattttggaggtcatgtcatgaccacactgttctttataaagtctttcttatcgctcctaaaggggtgtttcctaggcaaccaacgtcaatgatactcgaagtaagagatctttccaccatgagcaagatagaagcaatctgtatctaaaccgcaatacggacatgtcaataacac

SEQ ID NO: 137175 - DNA, 1563 bp, Zea Mays
tgttgctcaagttcctgacaaggtacatgtttcactgttttgcagttcctaccaattccatgtgctggttgatttttttttctttctgcagggctcatctctgcatcttgagttcttagtcaactacatttgtgagctgtcacttctggagtacagcttactttgctatttaccttcaatggtagctgcctcttctgttttcttggcgaagtttatccttatgccaataaaaaacccatgggtatatgtccccaaccttatattttatgaatcttcattgttaaactcgatgtttgcattcttcacccccaaaacataaataaattttgatgcttgcattagctaacatttgcatttattcttgatcgaaagcagaattcctcactttcttactacacgcggtatacaccatctgagttgcgtggttgtgtaagggtactgcaccggctcttccgtttgggccctggaagcaatcttcctgcaattagagaaaaatacagtcagcataaggtgagccttgcctcctacataaggtgattgccgatgagaatcattactttggtacctactctgatgctaaatgccctaccctttatctgctcagtacaaatttgtagcaaagaagtactgcccacagtcaatccctactaagttcttccaggatctgacaagttagaagccaagattacttctagttactcaatgaaaccttcctgaggtacttagtgtgatactatgatattgatttgacagatagttttgaatgcaaggcatgcgcgcggccttgcgtttagcagataaacaggttcaagtaaactgtatgtcacttgtggcaatgttgtttcagtgttgtgctttgattgcttccagcatcgtcttatacgttgctgttgtggtcttctcacgctgtctagaacttttattgtatagttctggaccttgctcataacaagggtagatagtttggctaaagataaagtgtactcattctctcattgttatctacgtgttgcttctgtattctgaagattctgctctgaaacccagcaaatgtattatcaggcatcagaatagtagagtctgagtcaatttttgctattgggaataagtgggagggtaactttggaaagcaaccgatcaggttatctttgctaatccaaaagttatttcagggttatgctttaatatgtctttttactgataattatgctaatgagatcttcagggtcttggacgcatggattgcaaacttgtatattagcagtacatgtcatttgggtatttaaagtcttaagtttgtgttgtctaaatttctctattctacacatccacctaaatttgcatggtacagttaacttcttgggcatagaatagatctgcacatcttgtttaggtttgtttagtgaactctaggaaaatatactggttagtaatggaagtttaatatgaacataagaattattgaaaagatgttttggatggaacatcatgtaaaacacaagtttaagagagaaagtaggtgttctttttttatcgcatctcttataagttatttttgacagt

SEQ ID NO: 137176 - DNA, 420 bp, Zea Mays
caagtgtagaagaagttgactcataatgagtcagcttcgagtttgtattacccccctattatgaatcaaggatgaagttactctagataatcactgttgtttgcttttcatttgtgcgtttgaaagtttgtccgtgtgcttgacagtgatgacattttagaggtaatgcccaagtgacgattgcagtttttacttttccgagtggtgatctggcactttagaggtaatgcccgacctaaggagcccatttatactcatgccgacgtgcctttttgatttccaagccctaacttcactttttcctctgccgcttctctgtttttctgaattcttgagcccgctcgttctgcccgagagattgcaatggctcccaaatggaagagacagagcgtcgttgctccaatcatcccgcccatcaac

SEQ ID NO: 137177 - DNA, 296 bp, Zea Mays
ctcaaaaacaccggctcaacattctcccgcctcaccaagaaggttctcgaggaccaaatgggctgcaatgtattcacatatgtcgacgatattgtcattgcgagcaaaaacaaggaagatcaccttttagacctcgcagaaacatttgccaacatgcatgaagcctgactctggctgaacccagagaaatgcatcttcggtgtatgccaaggaaaaatccttggttacctcgtatcacacagaggaattgaagccaattcgaataaaattcaagccatcatagacatggcactgcc

SEQ ID NO: 137178 - DNA, 451 bp, Zea Mays
cttggccgaaccatgagataaaatcgtgtgtctcttgtgattgctctctctgtgattatttgtgctcgcaagaactcgcttcaagctacttagtcgtactaactctatcataactaagtcttgtggctattattgtttgatttttacaggatcacctattcaccccctcttgatgctctcagatatcactttgtaaatgagaaatcgattctttgtcagggctcaatcgcaaagattcgcaaagattgtttcaaccttatatgctcgtcctgtgtcctactgtcctacacttctatctttactactctataagagagcaaagtaggcatccacccacggctccgccctcgccctctcctcccccactaatctcgctgcgccgcaggatccatggcgccgcccccgcaccgcgcgttcagctcctccgcgcccacctcactcgcccccacca

SEQ ID NO: 137179 - DNA, 765 bp, Zea Mays
accccttcatcttccttcgcatgcaagccccacaatatccatattctcgggacagctagattatcgaggaatccagattcacataaaagctcttcagaaaagtcatcccaaacaagcccattattcgaataatggcaagctcaagtggtattaattttgcactaccttcagggcactccaaatttggttcttcgtcttcactgctcgtccacctccgagctcatcatttacatgaatgtcaactgggctagttgttaggattcacacaagtccaccttaggccctgatctatttctcgatgatagcttgatcttctggtcatcaaagcgtcagaatgtcgtctcacaatcgagtgttgaggctggatatcgagatgttgcaaatggcgtcgtgaaagctagctagttgcaccatgtgctataggaggttcgcttcctctctgacaaagtacacttgtccactgcaacaacatcaatatcgtctacctctccaccaaccctatccaacatcaacacaccaagcatattgatattaatctacactttgttcatgagaatgtggccatcgatgacattcatgtgcttcatgttcctacatcattgcagtttgtcgacatcttcaccaaagggcttacgtcatcggtctttccagagttttggtccagtctcaatatctgtcgtggctatagtttcgactacacgagaggtgttagaagtacatttgtattagggatagccatgtcttgcctcccaaggcatctccccc

SEQ ID NO: 137180 - DNA, 470 bp, Zea Mays
tttcactctagtggacagtacatgagaattttgatatatagtagctttgtcatattgtaatctccgctgtttggatagcttctctaaaaattgtacctgggcactatacttgggccattaaatcttatctttcaaacatttatggcactgcaccatatttggttttgtagtcgtaaatgctgttccagtctggcacaaagacaaaacaaaggaacgttcagacaaaaaaattgtggctgtagttagttggactataatgaagttacaatatacagttcatagtgttagaatgtaatacgtgtgtgcagttactgtaatgggcctaggcccacctaactccttattaatacaattcccaaccttggttatggttagggtttcatttgctccaacatggtatctagctaggctcctctctctattcctctcccggctgccatcttctagccgctgtttctccaccactgtcc

SEQ ID NO: 137181 - DNA, 617 bp, Zea Mays
ttttaaatgaccatggggacgtctgcgctttctcaggtgcgaggggaattgctgctattttggagaagtcaggttgcgatcatgtgaaagctttggcccaagttgaagctactttatctattgatgacacgaaggacccctcggccgaagcgagcttagttggtggaaaattctttactgacatctgggaaaatggcggccgagggatggcccacgaaataataacaaagagcaaaaaagatactcacgatgcaagggaagcaacgaaggcagctgaaaaagctacggaactcgaaaggcggataggtattgcttaatagattttaactttattttgtttatttttgtgacttcaaacttatttacgttttctaccgcagccgaactatctcctcccccagagcccttcgagtcattgatcgagccagaggcaaaggaaccagcaggaattattaacatggccgaaagcattttggatgaagtcgttactcaactcctgaccgaagttgcagacagagttttgaaggaagaataatggatattgtaaaaacattgctagaatattaatgtaacatttgctggactatgcttgtaatatttggtgctcatgagctttt

SEQ ID NO: 137182 - DNA, 399 bp, Zea Mays
ggcaaggagatgtcacaactgcgtctggagcagatgggaagggaactgggagatgcatcaggaggatcggaagaagaactccctaaccgtgatcagaatcgatttcctcaacaaaacagacaggtgaagcgggagcaaggaaatggaaacagagaagggtgacacccatttgatgctaacaaagaggtactgcctaaacttccttttcccaagtttggcagtggagatccagtggtttggattgatcagtgtttggattatttcactatctatcgtgttcctgagtcaatctaggtgtccgtagcaaccatgaatttggaatggaatgctgcccagtggtggagatgtcataagcttagtcatggaattgggaattggtaggagtttgttgcagttgtg

SEQ ID NO: 137183 - DNA, 664 bp, Zea Mays
cgacagcgagcgagaattgatgtttaccagctgctggacgagttggcgatgcccgcgacccggcactgaatttctcccacgcacagcagggatttcggcaccgcacgcgctccccctggttcttcacaactctccacagcttcgttggtgaaaggaacagaagaggagagagggccggcgccttatattagggtcacgacatgcagcgagaggatctcgcccgcacggttcaccagctgcgtagtggtggcggtgctaacggcgtttgcgcgattccagtggagatgaggatagtgcgtgggtcccatgcgatagaggaacacccgaggccggccatgcggacctacaacgcagtgagcgcatggcagcacgcgcgcccactgaaggaggtgcaggcaagttgggccggcctagaggttttcccagttgggccgatctgtgagttgtgattgacggcccagcacgatgttttctttatttattcctttctgttttgttctctctttattttggattccaaactttgagtgcaaacttacttgtgaattcaaactcccttttttttactgcgtaagttggtcaaacctccatagtaaggtttcacttatcttacattttgttttatgttgggatagtagttttctttctcttttctaaacttaaa

SEQ ID NO: 137184 - DNA, 517 bp, Zea Mays
cgaacataacacgccataacgagtgtgcacgcatcagaagacgccaccaccagaagtactcctatagatagcgggacccagtctcatctcatccatcccttgaaactatacaaggggagggccaattgaacagggggcattgagcagaacctttctccttcctcgctttctcattcttatttgcacctattgtaacacattttgagacactcgtccttgagaccaatacaagatcagcactacactacacgtagggcacctgcctaaaccagtataaaccctcaacgagtcattcgattcaccattcaaagtttgtccgtgctagctctccgttgaaccataaattctactgtgccttcggtttttggaaccataacagttggcgcgctagggcaggggaaccgttagcattcctagagacattcccactccgatggccctgccattcgcttttaccagcggcaagatttttgtgccggggagccgcgtcaccttcggcctcctcgactcctttgcc

SEQ ID NO: 137185 - DNA, 705 bp, Zea Mays
cgcctattgcagtgatgcaactgttaatatgaattcatgatgcatctgggtaagctggggataagagtttgtgctggcaggatgagggtgggataacttgggatagtttcactgccaaggattggattgaagaggtgaagcctatctgttgactatgatgtttgcctgtctgcttgcctccagtccgaacactattggtcaccgttcactgtttctctgtgcccttggacatatgtggtgtccgtgcagtagtgaagctatgtgctggctctggctccctccatattaagctccaataaggccacgagaactcggtttctgttaactctccgttatcgtagtctcgggttcgggctgaacttcgctgttcctgtgccccatcgcttcgtttggtgctcaccatccctttacgcttgtgttaaccccctaagtcaccccagtttctttgtccaagtttggtgctcgaagccgtccctgtgactggtgaccgcgctggctgttctgcccctccttactgtgggcaacttttcttaaggtgtgattcgtccatgtggcatgtgttctatgataattttactatccctgtgtttagtgtgttttgctcagagtactccagatttgccccgataggaaaatttggctttctttgtgtttgtaacttctattattcacattatagcagagagtatctataaaaacatattg

SEQ ID NO: 137186 - DNA, 1021 bp, Zea Mays
gcgttatctaattcaatagttgcgagtggcaccagcgaagttgaaatgtcaagtattgacgagtcctgtgtcactagtttgtccaggaatatctataagaaaaacaaaggaaccagttgcacttggtattttccattctcaccggccgaggccaaccaagagcagggcagcagacttgaagcagactcgcaaccggcatccgaactctggtgcgaactcgagcttgctcggccatgctccatgcctccctgtgcggcggcgctgccgcggctgagatttcgcgccaccaggagtaataactgcttgtagccggggtcacgcgtcggccgtcgctgcttcccaccttcaccgaccactggcaaaagtgaagtgcccctccaacccaacccagcgcccagcaacaaaaaacaggtaagaaatctgaagcaccgatttgaacttcaaattactttggcggttgcaacttgcaagtccgggctattagctctaggtaccaaggtacatgtcagctaagtacagtattatgactgaagaaaagttcaaaacacttatggaagagctaacatcttttcctttgtggctttctcctaattcaaacagctattacatcttttattttaaacttcactatataaacaatacagtatatagtttaatatagtgtattgcacgattcgtatatacaatcttctagtcacagccatacatcatctttatgtggctgcaccggacacgggtccgaagacttcaaaaaggaaccgataaaattgaatttacgctatccagttaccccctgcagatttacatttgaggggtattttagtttctgaacaacgagaaattcacaatttatatgcaaaaaaaaatgtgtttactttagatcatatctgttaatggcataggtgactaaatacagatccatagcattactctgtcattttacacaatcatagaggtggatggttattaagaaattagaatatattaatggttattatcactgatggtgattagacttcgg

SEQ ID NO: 137187 - DNA, 378 bp, Zea Mays
ctggggatgagaatcatgcgctcgctgacgatggcgcagcgtggattgagcggtgccgccacgtttatacgcggatgagcaaaacctgcgcccagtcgttggatcgaaagggcgcagccaggattagaaggtagcttaccccttcgtttaagagaaccctgaccgtagatctgcgatccgatgaatacaattcgatctcggttatttaggattcgagccgtagacataggatccagtggctatcattgcgtcctggatccggggggattggatctaatcctaagcgttgaacccagatctaacgactttagtcacccgataccccttcggccgtggtattttgctaaagagcccctagaacctttataaatcaacccg

SEQ ID NO: 137188 - DNA, 551 bp, Zea Mays
taagctttgcgaagccaagcgatccttccttcttttgtcttcagtgatgcaaatacatctctatactttttctcaatcaacagatgagtggcaaacaaatgtaggtcgctgccttctggtgatccatcatcgataacttgttgcaactgcacaataacctcaactcaaactgggtccgtgtcagcagaggtaatggacttgttagtggtcattgaacgtgactcaaaagcctccacaaggcgtttcatgtactcttccctcgaatctttttttcttctttggtttaggagaatcatgccgcatcttacgcttcccagttgcatttgtgcatgggtcaggtgtgctgttttcacccccacctaaagtggcttccaaatgatcatcagatgatgaattagcatcctctacgccaggaacaagggttctttcatttgtgcagacaatgggtccaaacataacctttagctcgtcctcattctctaggggggttgttttgaacataatacaacctggcattgcctgcagcaccatggtagttcctagtttcagat

SEQ ID NO: 137189 - DNA, 655 bp, Zea Mays
acggcttcggggctgaactaattgctcaacggaggcatgtcgccgccgcggatcgacgccccggcgtggacaacaccttccctatcatcaccatcggtgagttccccgtccgcatggtcaccataacccctgcatcgtgtagcgcggcttaggttagaggctacgctactgtggcatgctcggagccgagctccggccatgacgccgccgcttacgtgcgggcgccgccgtgccctgtcggccggggggtgaagctggttggccgtccgatctggatgtacgaacgggatttggatctcaacgttttgaatctgagtcactggttgtgagatggagggccgagatttggtcaaggcgtggacatcccgtaggccgttgattcgggatccaaggacacctagggaatactgattcgtaacccaatccggtctaatctggaccgttgcttcgtgatcgcgcggcccaggacgagagataccctttcggtcgaaccggttttacaaatgagaccctgagttctttataaataaacctgcactccatagtagtagaaatatcattacccccaggtccctaattttatgaaatcaaccatgagctttataagaatagtgtccactgtacatacaggcttcggattttataaatataattc

SEQ ID NO: 137190 - DNA, 328 bp, Zea Mays
cccccttggattcactggtcttctatttgcaccactcggaatccatggatcaagccaaatgttgattctttctccattaccaactctctatactagccgttttcaaagctgcaacaccattcaaaatacttctccaagaataagaaataccatattttgtttttgcctcaagaagatgaccattagggaaatgttttggtttcaaaagctgagcacacatcgagtctgagttctgaatcaaccgccacccctgtcttgccaacattgccgggttgaacaaatgcaaatctctgaatcctaacccccctcctccttccgccgagtcagc

SEQ ID NO: 137191 - DNA, 370 bp, Zea Mays
ctggcatcaagcacctccaattctttccggcgttctagcctcccagttccaggttgtagctgcccaaaccaaagccatcccacagggcctccgctctacctgtagcccgaaaaatggaaggggacgcggttctttcgagcatggattccctgtggttctactccagcgtcttcctccggcagccctccaagcacaaggggagcgagtgcgcagaagagccgcagcaagattgggcaggaaccaacaagacgaccagcggccgcccttgttgccaggctcccaaatgcgccaaggaggcagcggggcgaagagcggaggggggaacggtgcgaattgcgcctgcaacgggccgcggggagtgggatgagcg

SEQ ID NO: 137192 - DNA, 381 bp, Zea Mays
atttcctttccctctcctcggagcctattcgcattatttagtccttatctactgattctcgaatccgccgtcctcgctgtttcgctctttcgttttgcaagccaccgtcctcatgggagcgtttagtgtgttcctgctacctggcgtgccctagccattgctaccgcctctgtaggcctaggtttgctctgctatatctttttggttcatgtgcatgtgtcgctgttaggatgggttccagatccgtgcattcatgggggcatgttgtctatgcgtgcttgagctttggttagcttccagatctgcgcatttgtgagggacgtgttatctatgcatgttggatatttggttggtgcattttgcttccagacttgggtgcca

SEQ ID NO: 137193 - DNA, 428 bp, Zea Mays
gaagaagatggtatgagcggacctgaatggtgctggccatggcgagattgatttcacggtgttcttgaatcgaattggggagaatccgaaattagtgctcactggtgggggatttgggatacaggtgggtgcagtagctgctggaatacatggcgaagccgaaggggggctcaatttatagaccaagtgagcggtggctgggaatttgggttgaactcggtggcggtcagagaagaagcgagtcaccggcagggtgattcgtggcagttcatgggataagaagccacgacagtcactgggtaatgatcatagttcacggcgatgtggtcactaaccagaagcgtggcacaatcgtggcggaggacgcaaactccggcgacggccgcacggccacgttgccgatgcaagtggtcgggacacagcgaggc

SEQ ID NO: 137194 - DNA, 379 bp, Zea Mays
gcccagatcacaaagaggaaatgactccatttgggtaatcatcgaccgtctcaccaaggtggcccatttcatcccagtaaagaccactttcggaggagcagccctcgcccgattataccttaaggagatagtcaggctgcatggcattccacggaagatagtatcagatagaggaacgcagttcacttcaaaattttggaagggccttcagcaagcattaggcaccaagctggatttcagcactgcttatcacccccagtcagatggtcaaacggaaagagtcaacaaggtccttgaagatttactcagagcctgcgttttagccttcgacagagattgggagtctagtttaccatacgccgagttctcatacaacaac

SEQ ID NO: 137195 - DNA, 736 bp, Zea Mays
ggcaaagtctacacacttgtttcgaagatccttaatagactcgtgtagccttgtattcttttcaacttcggcttcgacccttgttttaagttctttcgtctcttggtcgaagtgtcgtgaactttcatccaaaatcgttcgagctttgctcagttccgggcttaacttagtattttgggatcgtgattctgtaagggaaccgtcggctgtttgcagcaggatgtctttttccttcagagaggtttcaagttcttttattttatcctctaagcccttaattatgacttcgttttttctgtccttagtatcctgctgcattttcaatgctttgcttagcaacatgctctgcaaaacaaattaaagttagagcactcaatgtatcacgaaggtaacaaaaatctagataaagatctcaccttgaaactgaaataaaataggctcccgacaatgtgttgccgtcggtaaccgctaatgtcatcctctagcttcgggaattcgacactcttagacagagtgccgattatcttcgccccggcgcggtcgcgaatacatcctaaaatttcctcatcaaccccaccaaagagcaaagatcctggctagtaatcgcaggatattgcatattctttcaactcttccttgtcttccttggacagctcatgaccgcccaggtgccgaagatcaaaatttgtctcgtccgaaggagttttatcaattttttttcctttatccggcattg

SEQ ID NO: 137196 - DNA, 873 bp, Zea Mays
ctctgatttcttaaacgcaacggaaatcaaatctgggccaccagacatgtagacgagaataaagaaaaacattaccgtctgcttactacgcaaagctagcaatgaataaagaaaaacaaatctggtgaacatgtagacgagaagctagtagtagagggtagggcaggacaaccggacaaaacaacattaccgtcgagctcctccgcggcagatctgggccgccgtctgcttactacaccatcgagaagctagcagtagagatctgggccaccatctgcttggtcatgaggtcctccacggcaggggcaggtgagcagcgtgtccacaggtcaccgcctatagatgctatgccgcctttctacgagcaccacactatctgaagacgaagaacacatgggttgcagaggatccacctccctgctccatgggctgcacccttttgtttgatccaaacgtacgtttgggccatgtttggtcacagatccatgctcatccttttattagaatggcccaattcaactctgccctaattagtggaaaacccaaaaaatccaaattgtttagcccatgggtttgaaggccctatgtgcccacgagttcccgctcgcctgatgtgcctcttcatgcaccccctcctgatatcaatgaatggcaccgagaggcatatgatgttccattcatgtctactgtggatgaagacgttgaggaagaattctttgatgatagagatcagtttgccccgcctccccatcagggtgatccgggcccctcatcttcttatcatccccccaggatccatcaggtagcactcctcctcctgctaaccccggggaggaaaactttgctgttaatcttcgtcttggttcttcgatc

SEQ ID NO: 137197 - DNA, 640 bp, Zea Mays
gtacaagccgtcgcaagatagttggcgaagttgcggagaggcaccaagtccaggggacgtgcctaatgcacccaaggctggctccggtgcgttcaagtccaccgaggacacgaaggacatccggatagacaatgccaattcctccaagcatgttcgaatcagggcaatactctccgataggcaagaaagtgccctcatcgattttctccaaaccaatcacgatgtcttcacttggaagcccgcggacatgccgaggatcccaagggaattcgttgagcactccctgaatatctaaccaacggccaagtcggttatccagtggcttgccgctttgatgaagaaaaacgtatgtccataggcgaagaggtggcaagaatcctggcggcggggttcataagggagataaaccacccagtgtggatcgataatcacgtgcttgtcaagaagaagatcaggagctagaggttgtgcgtcgtctacactgggctcaataatgcatgccccagggacccttcccacttcagcacattgaccatgtcatggactcgagtgccgactgtgagctcctttccttcctagacgcgtactccggttatcgccaaatcgccatcaaagaaaccgaccaacacatcaccacttt

SEQ ID NO: 137198 - DNA, 349 bp, Zea Mays
ggcaccagggataggatgtctcgggcacaaccagccgacaacccaagagttgtcgcgcgcgcacacatatcaacaccacctcccacaaccatacaaccacggccccgctcagcacccacctaaccttgcatatcaacaccaccaggaggtacaagtcgtaccacccccgctcccgcctccgcacccgcatcagccaaacatccaccacccaaatcaccccaagcaccaaaataggaagacttcgccaatcagccgtatcgaggagtcattcacatgatcactgggggtctagcgtcgacttcgacacgaagcgacagaagagggaccactaccgaagcatcaaccacgt

SEQ ID NO: 137199 - DNA, 410 bp, Zea Mays
catttacttcccaaaccatgaacgcatacatgtttatcctacgaaccgagtatttcaataatcatcctaaaacaactaactccattacacaacttgtaccacaaacctacttgtcctacttaaagtgtctactcgaaatcgtgagcacaatcatacactatatgcgaagcataatttaacgaacgcataatacgcatcgtcacgactcggcttataaatatagagaaagcgacgactactttggcatgtcaccacctctctatataagccaaaataatttctacctacaacgaccaaacattcatgtcgagcacactttattttaccatgtctcgcatacaaccatatggtggcgtgcactcgagacacttcaatcaatgtggcgcgaccactaatatgtgaactccgat

SEQ ID NO: 137200 - DNA, 314 bp, Zea Mays
ttattttctcatgtcaggatggtgtccaacgagtgcatatctgcaaatcatagaatagttttgtgtggcatgtgtcaaaacaccagggcgtcttagctccgtgaaagcctctacgacgagaaaactaggtcaccttttaataaaagagatgctgcaagcatcctgttttattatttttgttgggacatgtgtacgatttggaaaacacatgtattgtgttgtgcttccctgtatcctctagaacctctagaacgatgtaaaagattactaccttcttatgtaatactttattatctgatattttgtaatatttg

SEQ ID NO: 137201 - DNA, 391 bp, Zea Mays
gagagctagctgagcaggacgccaggctatggcgagagaaccctctcccgcttggaacctataccccaattttgctcgagcactgaacacgccgagtgaagtcataggagtactagcacagatagctgaaggtctcccgcataccccagacgtggaagactaccggcggctgcttactcatgcagctaatcaccttgtacccctcgctcatcccgtgaatgaccttcgtcacgccatcaacagccgacgagacgcgcggagctccatcaactcctcgcgcgaacgacatcatgaaaattagataaggcgcagggaggagtacgactaggatcacggcataccagcatagagtcgtgccacccaagttgagtcggcggcagcctcaaccagt

SEQ ID NO: 137202 - DNA, 398 bp, Zea Mays
cattaagtgaaccggtatgagattgtggccatcggatccgaatccaacggcccacggccgggacgcaggtttggacgcggggccagatcttaccgtcggttctcaacggactgtcccaaaccaatttccatccaacactaatcccagtcatccaaacatgatctaacggtcatcaacccttcttctacctcacgtacagaccagtgcgccactccgacgccggtgttggagatcacccagacaggcgccccagttctccagactccaattggacagagctatgcataaaagagatgatggcgaacgcgtgcaatggaaactcaccggtatggatgcaacatagaccactggccacgatgcaggcggcccgacggcgattccccagctccaaaccgtgg

SEQ ID NO: 137203 - DNA, 560 bp, Zea Mays
gacgacgaagaaggtggggacgaacacgtcaacgaggaagctgactacgcccagcaggacaacttcttggggtttggtcctgttgtcgaatattacacatcaatgttcgagacggggcacttccccaacctgctacaagaagtgctacacgcgctaggcacctacgtccgccccctgtatgaaacaaggcgagtgagcgagcctccccgggcttgctattacatcactcgcatccacgtcagggtgatggatgcaggtgacaggggattcaggactctgtctgctcacgagtccctgacgccactgtccacctacgctgcctcggtcagcgatgctgcccgtcggaccctatggtcgctcagccacacctaccggcagctgctacagaacacgaggttcaggcatattcctcagtgtctgcgtggagaaagccagaccaacatcgtcccaggagaagccggtgaggatcgcctcaacaccctagctggtgtagtggccggtctcaacaccgacctggacagtgccaccctggatctctacagggtgcacttggagctgga

SEQ ID NO: 137204 - DNA, 530 bp, Zea Mays
tgggggggccacacgcgagaaccaggagaagctccaacctattctccgtgccttgcagaagctacaagtcgcgggccgtaccgctgcggggatcatcgccactatacatcgccggagggtgctccccttggcagagcggcggttgcggctttcagagatgaagtcgggggtcgatccggagggtttgcggatgtcctcgacctccctttccgccgatgacctcctcaggcgggtagcgggtacggtagggaggctggatgctggcgccctcagccagcccccgatgcgtcccgaccgtgggtatgtgtccctggtaagtgtctggtcctcctcctgctttgcgccgagttttttacgtttttagcttttactgttgggattttggttcgtccccaggggttgaggagttttaaactctcccttccaccggtcccggaggacgcggcggaccgaaccgcgcgtaggctcaccgcggagaaggacaaggagaagaaggacgtggaaaaggcccgagctcgtgagaggatgcg

SEQ ID NO: 137205 - DNA, 356 bp, Zea Mays
ggttacgagaagtcaggagtttctctttctcagcccctagccgctaaggctccctaacagttatctcagacatggggggtcctcttagtctagggagctactcttgtgtaggtttaagaataatgcttaggagcgtaaggtattttgagagtggctcaggagtactgctcaccggtgtgccctcgagacccttgctttgttgtactcattccatcaaattatataaccaggtccttgctagccggagtttatgagatctggcccttaattttgaacgaggcgtaggcctttcaggcatgtagttcggaaagtactaggtcagctattctggggcggtggaaggtgtaggcttacgg

SEQ ID NO: 137206 - DNA, 375 bp, Zea Mays
ttgaaatccaataaaagacttcaaaatccccaataaaatggtacaatttgctctttccaccaacccattggattcttggtgccttaccgatgcaaaatgtataggtgcgtatatctgatcacagaaggatctgaatgcttccacaatcaacgatttcggcacaacgaagtggcatataatgttttgctaataaaacttttgaattgtagctgaagttatggttgctagtgcttttgcttcgatccacttggaaatgtattccacaccaactacgatgtattttctatttccttgagttgggggcattgggtcgatgatatcgatgccctatctttgtaaggtcgaggttggttggatcaactaggtgaaagatga

SEQ ID NO: 137207 - DNA, 338 bp, Zea Mays
ataagaacatcaggtgcggatgtgaaagatgatggttcagatgaaaaatcaggaacagaaggaagacacatgaaagaagtggattctatgggataatatgaggggtgagtggacttgttgtaaaaaaagggtgattttcattgaaactcacatctctagaaattcgaatacgacgagtagatagatcataacaacgatagactttgtgttcaggactgtatccaagaaagacacactcaacagattgagcagtcaatttagtctgttcacgtggtggtaacaggacataacataaatagccaaacacacgaagatgatcatatcgtggagatgtccca

SEQ ID NO: 137208 - DNA, 322 bp, Zea Mays
tatataactctgtcaattgagataccttataagtagtcttgaccggaatgaaacgagccactttggtcaatctatccacaatcacccatatagacccatatcctttcagggtgcgaggcaaaccagtaaataaatacataccaatctcttctcacttccacttgggtatcttaagtgggtgcaatagtctagctggcctctggtgttcagccttaactttttgacacacattgcacatagccacatgtgcagccacatctctcttcagtccataccaccagaacttctgcttcaaatcctgatacatcttggtactcccaag

SEQ ID NO: 137209 - DNA, 764 bp, Zea Mays
gccataacttggcggtatggtggtactttcatataacattagaatgtctgtaaaataggagatacgaaactgtaaatcacactatttgacactgtttgtatagtgaactttgaaatagagaatgtgttagaagatctactggagatagccttaagacactcgtccccactctgggttggacctcgataggtcacctcaacggatatgattacatcggcgcacgtccaatgtatattgtatgattataagacagaggatttatcattgtacatgatcatgttgggacgagggcattatcctgatgacagataggatccacatgtagagtatatatgtaagcttaaccactcctttgaattataaaagggaggggtggagcaacatttaagggtattccatttgaacttctaccataccatccaacactagctaaaggtgatcaatttgatctaggcaagtggcaatagttggctgtagtccagtataccataacatactttatatatatctaggaggtcctagcactctctggttagattgcttgtagtctctctatcatgtgtatacaccaatcgataatcaactgaagaagacgtagggtattacacacaatttgagccggacatatacaaaaaaattgatgtgttttaggtataaatttcataactctatagattcgttctctgcttcccttgctatcttttttctcgtgctctggtaccaagtgtctttactatgacacatgaatagaacatagaactcat

SEQ ID NO: 137210 - DNA, 1212 bp, Zea Mays
gcgcgcgcgcccgcggtgtgtattttgcacagaggtccctcgtcgtttgaaaaaaccagtaaagaatcctctccactatttctctgtctcactgacatctgcactaaggcccctccctttttatttcttcgcaaggtgaggtccccgatcgtggacggcggagtagtggctccagcgagcttactcaggccgaaaaacacaacggctgggctccttgtttgctcgacccctaattctaaccccgacgacaagaatccctcaactaattacacaattccaggtcgagaactccctgtccacggtgatggcgcataccgaggataatccgaggtgttcctaatgatctacccaggtctaattcaattagctggactgatgagcatctacagcacacaggggtattgaaacgagagcaaggaggttgtgaacggacctgcagggagctatccacggtgagttcactcacggtggagttttgactgatttgggggaacttcaaaattggagcgctctggtggacaatctgaggcacgggcgggtgccttgggtgtgtgattacttagcagaactcactgggacgacaatttatagatgccatcggctgtggcggctaattttaagaagacgcgcggcggccagagagagggactgagtcactggcgcggtgattcgtggcttttactagggtagtggctgaggcgatgaacgagctacctagagcggtttatcgcgacagtgaactccggtgacgccaacgcgattaaccacggcgggacacggcgaacggtccgaccagcgatcggattcaccccgctctggatattctcaccatgcccgacgttatccactcttcccgtggcacgaatctcccaggcaagcgcgaattgcgacggtagatcacctgcgacgaagggtgatgaatcttgggatcttttttagctactgtacaatggaatcctcattcagagcgcttgacagaccaatttgcagggcccagatctcagatttttacatgacaacttgtttatccgcctgtaacaaagttgttgccctatgatccggctacaatcttgctatagcaaccatagtcaaacaatcactggatcatggtcgaatccaatctcaaagttcacctaacttcactattaaccattattcagttcaatgactgaatgttagcccgactttaggtctatttatctccaaattatg

SEQ ID NO: 137211 - DNA, 2001 bp, Zea Mays
gaaatttgtatttttgttttgggatggtagtgcaagttgattgaaaggtaagtctacatttgttgaaatggtgggaatgaaatctttcatgtttactcataccaaggattacaacgagtaaaaaacatggttgctccatgcgctaccgattgcgctacatacaaaggaggactttgaacaacaacaatgtgcattttaaaactagtttggaggcctttgtgtgtattttgtttgtgtttttgtaacgatttccttgtccaacaaattgtctaatcgaaacaacatggatttggtccagagagttgaaaccctagccgacctcgtgtcttggcgggtgcctccccctcccttccgtatgcaatccctagctagccttgtgtggccacatgtgatggcgcaattgcgggctagccactttgtcatcgagcatcgggttggcactcgggagcagtgccttttggccctacggatggccttgcccgcacgtatgtcagcgcacagttcctcctaggtacgctcgcaagtctagaatgtgagtaccatgtttatgcgcgatggtggcggacacgcgaaccttgtcggcgtcgacgccgaagatcaccgcctccgggcgtacgggagaccatgcaaactcggaaccggggaagcatggcctgtagctggggcaccactgctggtggcaacgaccatcatggcatgttgctccagtgactatgctctcgatctacttgaactgaagtctgggttgccgatcggtgtggggagccccgtgcctgcgatccgtctcctcgagatgatggtttgatgaccctaaacccacagtcctcactatcctccaccacctccctttttatcctagagggaagtttagaggggtgttatgcttgttggatggaggatggtctgcttgatgtctctagtgtggatctgtcatccgatagcctccccatcccctacctcggtgctagacattgacttgctcagtatgctgtcgcgggacaaccatcttgtcgtcagcgacaactctgccgctcgctgcctaaacaacttcaccaagcgggtgctgaagaaggtggacacgttgctaattcatcaacctccgaagcagtcgtcgcctgctaagccgatgctaccactttggagcaaacgcctagcaacttagagtgtctgggtgcttgcttccgaacaaggtgaaatcctagtcatgtagaccatggggcattcaatctcaagtgcatcggacaaacgaactacgatgagctctttgaggctgggccaaacgtgtccaacgttaaagtactgcacgctcttcccagttgaaaataggtcgcacaggcagcagtggagacgctaggccgcatcactgcccttatcttggttgactaccttttatgcaatactgacacttgagtctgtgtgtgctaggacggtctagccttgttgtaatcttgtacaaactcctaggacgctcgctagaatagaagcgagttgtttgtatggttaagctcctagggcgctcgctagaagcctagaagcgagttgtttgtatggcaaaactcgatgttggaggagttcacaacctcacatgttgtcagctggactgtgagttgcccttcacctctaatgaccgcttctctggatgatggcccctcttggaggccatttgcacgtgcacctacgctcctccaaccccgttgtttgactcaacgggcaatgggttcaccaccatcatcgcccgagcaggggcatgcacatgtaatgccaccgtgggtggagttggccaccctcttgggcgttgatgcattgacaaaagatgacgatggcaattcaccaggtgttggtctgaccgagcccatgacgaacgttgacctgcttagtatgctgtcgcaggacaaccatccggtcatggtcgctggtcggcgacagctccgccacccatctcctcaacaacttcaccaagcgagtgctgaagtaggtggactcctcgctaattcatctacc

SEQ ID NO: 137212 - DNA, 327 bp, Zea Mays
gcacctcctagtgccgtgtagagaaatagggaacagctagagatgaatcgtaaatgacgaggcgacatgccatggatcaggacaatagatttggtgctgagccttattacagatgtcttgaatgccggcaaaggtgatggcaccaaagacaaggacgaaaggctcgggtgaggacggaatgctccttgggagctcgggaacaacaacaatggcactattggcaaggggtgaggtcttctagtggttgtgagctcgaggtgagatgagcagggggtgcagaggggtctgttttatagcacgatgccattgattaagaaataaagtcaa

SEQ ID NO: 137213 - DNA, 574 bp, Zea Mays
ctgtcgtgtgaaacacctccagttcctgtcaagaatctagatggcaagctttcatcacccgcttaggctcaaggcagtgatcaggttcggcagcctagagttcatgtcacttggcatcgagtacgacatggtactcctctcacatgtccctttggagcgtccgagcacccgtcgtcgcccttctcgtcgcaggaggcagagacggaacaaccgcaactgtgccacccatggcaccctgtgccctggcgaaactctcgcgatggccaatggtgtagactccctttcgagggacctagccaacatcagcatcgcacctggagcgccaacggcggcacctgcatcaactctcctggtaccacctcctccagcatgggaagtaccagctccacacgccattgagggagctataccagccacgccggacctcccactcgtgggtcaggaggagcaggtcattccttggcaggacatgacaagggctgggggagaaccgtccatgttacaccgtatcccctttcaaccgagtttcgacaccatctccatcaccaggctgtatggtggacttcctttcccc

SEQ ID NO: 137214 - DNA, 359 bp, Zea Mays
tctcgttctcatctatgccgacgcgtaaaccataggcaccgcttccgaagccaactcattagcgcaaaaggcgtgtgtacctgtacctagctctcagaaactcggcttcggttcattttctgtgtgacgaaaaggtctatatgggaaattgagctgaaaatggggggaaaatattcgccgtgttaattttctatagagatcggttacgatagacgggtagagagagtagcccacggagcacgatgcgctcgtggtttcctcctgcagttttctttctttcagatacttggcgttgaagtcacacaatcgtgggttgcggcctcgccgcagacactcgtccacttgacagaatttaggcc

SEQ ID NO: 137215 - DNA, 321 bp, Zea Mays
aggtacttgagtactacttatcaagcagtattagcacttatctgtgtaccacttgtccctgttgtgtgtggtgtaaccgattcctccttggtacctggcccccctggaatgtaggctcggtttgtcgaggctgcagaccagcatacctaagaaagagttggcaatggcccccaggaggtagcctcgactaggacctgggcctgcacacagcttcgactagggagcattagtattacacccgcaggacccgccatctgacactagccatcctttgatacatgctcgagacctgcacggtctagtctaggaagccaagttgtg

SEQ ID NO: 137216 - DNA, 464 bp, Zea Mays
gtggacacaagcgtgcataattaggtggaggtgtccatgatgtcgttggtaccggttgtggatttgatactaactggacaacattccggtttatttattcagccttatcccttgaaatggatcattttctttcacatgtctctcttgggtaagcgaatgaggttgctttgctagccggtcatggggaatgacctttttattaacatatttagaaagaagttgattaaaagtagggtcagctttaatcagccgacaaggtgccttaactatattttgctttcgtgaacctatttcaggtcattggggtttgaaggtgtgtggtcactgctgtctttggttgtcaccagacagtccgtcagggagccggactgtcaacgatgcataaaatagggaacttcgcttggctacctacatgcatatgcccccagtgttgtcagtcatgatggtgatctttaaagtttcac

SEQ ID NO: 137217 - DNA, 483 bp, Zea Mays
tgtggacagaggagtcttcggacgaggacttggattattttgctgcattggatgtggctgcggcggagacttctccacgtgtgatgggtgatgaggatcttccgggtgcgagtattgggcataggcggcgaagggcggtggcgaaacagagagtgagtgagttgtcgcgaagtgataggcgtcatcgtggtgaggtggagggtggtcgtcttcgtgtagacgggactggcaatcgggaattgttggcctcgccggctggggcaagtgtaggtgagggagagctgcgaagtctttttgagggtgatgagttgaggataacactgttcaactacagggagatgggtatcatctctagggttgagccaatgtaatgtgtgatgccctcgctgtatgtatgtaactataatttgtatgataaggttgcgtgccttcgctgatccggccgcgcacgtaggcgacttgtgcacttgatgttgcacattt

SEQ ID NO: 137218 - DNA, 546 bp, Zea Mays
ccaggattgtgatataagggggtcggttaattcatcaatactatatgataaaaatattgtataatattatcagatgacaactttagttgaaatttgtagattttattatccacaagatctaatatagtatatatatataagttgtcgccgctcattctgctgcttcgcgtgatcaccttctttggactttggttgtggggctatggtagaggcaagtcaagtagttagtggcaatttgcagctgcctagccagacaatacgatgaagtataaagggtgaggttcagatatcagcgtctgcaagcgaattaggtttgacgtttaatgtattgattggtcatttaacgaatattttatctttttttgtctcctttagactttggttgacatactacactagagttatggatcatatattactaactattatattaaatctgtgattaattgcgctgcataaaatttagagtatatatatttacacgtaaaatttcaactatatatattatattgtatatgtcacatccttggccccctcccggcccgc

SEQ ID NO: 137219 - DNA, 457 bp, Zea Mays
attggagtccgtggcaagtcacgaggaagaagcaccttttgggaatctatttgcccaagtacgccctgcaggattaagtgaatgttgtgaacagtcaacatctcttgggagcagtccatctaacagatattgatatcagatacaaatggtaagtataaatataaccaaaaagactgagcttatctagctattttgtagtagatatgataggacacatcacttcagatatatacctgcctcttatagacttgcttggtcgttctcttttatttcaggttcaccttgatggcagaaaggaatagaaagtagtttacaagatggaactatatattttagatgcaacaagcatatgggttacctgttactgatctaatgaagtgttatcatcttgttaatatggttgatgttatctgattacaaaagtagcagcacttcaacatcataaaatcagcaatca

SEQ ID NO: 137220 - DNA, 819 bp, Zea Mays
gagatctgaagatctagaggccgaagctaaggcatagcataggactccagtttcgtagtctttaggtccatccgcgcataagagactttggagcccttcctctctctctctcccccacttgtaacccgcttgtaactcctactacgatcatcgagcaacaaaagtgccagtagcgtgagctgacaaagactggatgtagggacattctgcccgaaccagtataaatcttgcgctctccgggcacaccatccatatcctagaaggcacacatagaaatttaattatcggagcaaaggctcgaaacaccaactattggcacgccaggtaggggccttgcgtgttcttgacaaactctctagactccggatggctagcaacaacattgcgtggtttggacccctggaacgaccatccgttttgggagtctcaacttcgtcatcaacaacaggggaacaatgatcagggccccagaagccctagttcccccaacgagtgaattatttgacattgccggaagcctcggtggccttcggcttagctcccctcagggaagtggcggccaacaatgcacactgcaacctgcctatgaggagatcgtgggaatgctagacctcgtccgagactcattccacgacctcctcctgtcggggtcagagagcggccttagctccccatccagacaggctagccacgatccggcccaggagtgcattgtggccaattcgctggagggccgctccccgctcatagagagcctcaaggggacccccaccagtgccatgatgtgtgtgtggcatccgccccaccttgactcgaccc

SEQ ID NO: 137221 - DNA, 546 bp, Zea Mays
gggccaaatttcagcaagctagcaggatctgctccatcacgtttcaactatccatgttagagttccttctgcactcaatctgtagcaagcagtcaacctccagccaatgcttgttggcactgtggtgaccccagtcacttcaagaacaattgctcgcagctgaaaacaaactgcacctaccttctccaactcaatgaatggccccaagagtgtcgcagcacccacctccaaggcaccttcctccaacagccaattaagcaagaagtagttccacaatcgagcccgggtgaaccacatcgacgcccaggaagctcagtaggcacctggagtagtactcgatgagttcctagtcaaatttacccctgtcgcagtactttttgattctagagcatctcatactttcatcgccactagttttgtggaaaggcatggcattcccactgcaccgttagaagtccccttggttaccgcagaccttctgtgccacctcaagtgctctcaagtcagaattcttttaagtggggtagtattcctagcagacctagc

SEQ ID NO: 137222 - DNA, 326 bp, Zea Mays
gctaggtatacctaggcggtttggtgagactccaggactgcgccatcatccagctgtcattaacaagattgcaagattcttccaaagagtggagacaaaagcagaattcgtgacaaattctggaacattattgatcatgtcatgaaaggggaagtcatggatgttgttcttttcatgatgcgccagttaaatgatctgaaaatggataagaaccagaatctggcctatgcaccatatattatggccttaattaatgccaaaaccatattcgatgggtggtgtgaaactgctcacacaccattcaggccattcaagaatgaaattgg

SEQ ID NO: 137223 - DNA, 640 bp, Zea Mays
gaaatgcattctttcggctactgggaagcaactgctagatgaggtccacgctgggcaatgcgggatacacgcagcatccaggactctggttgggaaggtcttcaggtctggtttctactggccaacgacaaagagtgatgcagccgagttagtccagaggtgtgaagcttgtcaatacttatcaaaatagcagcatctaccagcacagcaactgcaaaccatacctgtaacatggtcgttcgcatgctggggactggatatgattggacccttcaagaaggctcaaggaggatacactaatgtactggttgctattgacaaattcactaagtggatagagtacaagcccattgcttttctaacttcaggtaaggcagtggaattcatacaggacatagtattcaggttcagaataccgaacaacatcataaacggcctaggatccaatttcactagttcggagtcctttgatttctgcgaacaaaaaagcatccagatcaaatatgcatcagtagcgcacccaagaaccaacgggcaagtagaaagagccaacagaatgatattggaggcactcagaaagaaagtcttcgacaagaatgaaaagtttgcaggaaagtggatcagagagttgccgtatgtg

SEQ ID NO: 137224 - DNA, 972 bp, Zea Mays
aggcgctaagcttcggccgagaccaaattcgagtccccatgaatgtttcccccaacttaatttggctcatgattgactaaggagctctagccacggtggccgtgagcagcgcggcaggaccgacgcgttcccggcgaccagaggctactccgtgcaaattaagggtttggcaggcatcacaacgatgtgagagtgctcaaacgagaaggcaggggacggggactgaccggaaaagggctggccgcggtgaagccggtttcacggtgttcttcaaccggtttgggggaagtcccaaattcgcgttcactggtgggggtttcgggatgcaggtgggtgcagtaggtgcttggatgcatggcggagctgggggtacgctcaatttatagagcccgcaggcggtggtgctcaatttggccgagccgtgttggcggccgggggtaaggatgaaggcggcgcggtgaatacgtggctactgccgtggcaagctcaccggcgacgattagatggccgtagcgagtcacggtgtcgcggtggaaagcaaaaccacgcggcacgagaccgggaagcggcggttcaccggcgagcctatctctccgccgcaaagcagaggggaaggcacgggaggggtcaccggagtggagcctagctcacggcggtgaagattcttactgggtgatgcttatctggtgtccacggcgcacgaatcacggcgagcggtaatcgacggtgatggaccaccggcggcgagcagggaacgggatcttcttcagttaccctttactgtaccatggcaattaccaattcagagtgtctgacagccaatatttaggcccaatttgctcacgaatctttatggtaacatacttaaagttctgcagcaaagttgttgtccattataccatcttcatctttgctacagcagccatgggcaaattctttctagattagtcataaactgtttccaaagatgat

SEQ ID NO: 137225 - DNA, 431 bp, Zea Mays
tcaagattgaagagcttgtagagacatgagagaactaaagacaagaatcaaatccattgaaccaaatggatatgccatttagagataagttgataaaacaagcgtcgtgatccttggagaacgagtatgagcattattagaattgagagatttaggcagatcaacattcgatacttgagaacaggttatagcagataaccaggtgacggggcagaatcattaagggatccagagattcggatgataaagccacaacatgattcacaaggaaagagatcaccaggtccatgcgaaaggagaggtaggcaacaagatcagctggatgatcaacaggaatgctatgaagttttaggggcaaggatttatggaaagaaacatggccttgatagggtttgcgcaactagacaccaacaacaatttttttttgacac

SEQ ID NO: 137226 - DNA, 356 bp, Zea Mays
ccactgtgtgctggatgtcgggaggttgaagacgcatccggggccgttgatcggctgatcggcggttaggattgagtaccctttcgcgtgaacgatctgggccgcacgtgtttggatcgggtggtcaatatcgattcaggcttaattaaatcctgatcgtcgatctattgatggacggtcgtgggctcgtagcagttcgaataggcgacaatctaatctgggtcgtgcgagtttgatcggacggctcatgggacccataccctttcagcctgggtcttttgctaaagagtcctcgaggaacctagaaactaacccgccgtccaccagcagggcaatctgagtccagggagtttttg

SEQ ID NO: 137227 - DNA, 303 bp, Zea Mays
caacagccccccgacaatgagagcctctcccatcccaccaagacctgctccaaagatggcgacctccacggcccgaatcctccctatcctcatcatcccttcggtggtatcttcccttcctccctgcatcctgataaacagccttcacccttttctctcccaaagagtcaggaaccccataattccactcgaactcacgccgccttctgcgatcctgaatgttacgcccttcaatgaaagataggtcctccaccacatcaacgtgaattagcagcttatatgaaagaccaaacttaaggcccg

SEQ ID NO: 137228 - DNA, 656 bp, Zea Mays
agattctggaaggaatgtccgtcgacgaacagaagaggaggatgaagaaggtggcatcggcagttctgatgtatgtcttcttctaggactaataatttgttgtatattaaagtatggaattatggtttgtcaactactttactactatctccactctaaataggtacttctaggtttgttttgggtaaaaaaccccgatatgttaacttttaaccaagtttgtacaaaaataattaacatatatgacaccaaattgaaggacagacctggtagagtggcgagaagcctttccactgagccgtcctgggttcgacgcaccctctctacaaaatacagggggtaaggcttgtctcggttatttttgccctggaccccactcatgtgggagccaccataactgggtctgtcctttttatatatgacaccaaatcagtacattccgaacatatatttcataattgatcaaataataccagtttagtgcttaaatgttgctattttgttctaaaaatttggtcaaatctaacatagttcgaattaggacaaacctcgaagtatctatatggagggagtattatttattgttgaatctggtttatttgatgccttgtaggaagagaaagaaatgattagagatcagcaggaaaaggctcagc

SEQ ID NO: 137229 - DNA, 374 bp, Zea Mays
gcctagggataaaactttctgaggtgctctatgttccaggaattcccaacttctgtgccatccatctgagtgaggcgatatgatccaggtcgagtgacttctgctactatgaaaggtccttcccataagggtgataacttgtgccgcccctctcccgttagaattcggcggaggacgagatctcctatcgaaaagaaccgttgccgcacagccttgtcgtgatagcgccttagagtctgctgataccgtgctgattggatcactgcattcagtcgctcttcctcaagtacatcaacgtcttccagtctggtggcctaggcttctgctacgctttcgaagatcaaccttggagccccaaacttgagatcggcagg

SEQ ID NO: 137230 - DNA, 338 bp, Zea Mays
cgggggggaaataaagactcgaccgtgccgtaggtacctgcctatcgtgctcttgccgctgttccacaagcaccatcgcgccgccgtgggttcttcttgttccgccacaagtgaagctcgtcgtcgctgggactctgtcctcggggttggcctaggctgggtcgccatcgtctagggtggccgtccgcgacctcaattggagggcggaccttggggagcgcgggtaattcctcaccgtgatcccgccaccgtcgtacttccgcccatcgccgtggccacgctcctgtgcctcattccgttggtaaggaaacccatccaatcgactcgcctcgtcctcc

SEQ ID NO: 137231 - DNA, 446 bp, Zea Mays
gccttttgttgggggtagaaggaacctagatgataggttggggtgtcaacatgagagggacaatagacctaaggaggaacaacttaaagaaatcaagtacttcaagtgtgcccaaaccagccaccaccaatctgaatgtaccaatgaacctttgtcttacaagtgttaggagtttggacacatggtagcgaatgtctttcaaggaagaagatgagattgttcggatttaggatgccagaacagagattctttggtattgacatgccggagaacaaaatgcatgatgctggattgtctggtgtaattcatatagataaaatattatagaaaccgcagccgcaaccggattaaagtcgcagcgaacaagctaggatagacatgaatgacttcattgttacctttcccgataaaagctctctggaaacatttgtcaaattaaatagttt

SEQ ID NO: 137232 - DNA, 676 bp, Zea Mays
ctgattatcactacccgctgcgaaggcaagggaaaaagagaaaagctgctgcttcggccaccactgatgtgccgaagggcaaaaaagtgaaggttctgacccactggccgcggtatattgaaccgatcgtagtgcccgaatttggcgaaggggcctcttcaattgccgaagcacgataagctgctctaattgtctagagcattgaagagccgactgtaatgctaaaggtatctatagtcaggccagccgaagctaagaatgataaagccgaagagccacaggtggaaaaaatagaggaaatgcctgaaattctgagcccaccagctgaggcgatattgtcgaaggttcaaaaggctcctgctgcaactcccaagaggaggagaatggtcagcgtgctggacactgtcttggagaccacgaaggccttgagccctggacctattaagaaaaatgttgaagcttccaaagtccaagacgaggccgaagctaggccttcagcgccattgaggcgaaggctgtcgcgcctgaagacaaagctgatcagcaaacttcggataccagcatggcagaaaaagcaaaatcccgtgccctcgaatccccagccgaagttgttgattacatttatcgacatgcttcggggaagaaattatccgaagaagaaatccttgaagcccga

SEQ ID NO: 137233 - DNA, 481 bp, Zea Mays
ggaggaggacacgcacagtcacgagagcggcggacgaggtaaagctcatggtgaccggtgcaggagggtcgagacactgctggagccggggcgcggtcagccggcacagggaggcgcgggctggacagccgggcgcggaacagcaggggcggcaaggtgctcggcgtcgggcgtcctcggaacgggacagcaggggcgctgctcggcgcggaacagcaggggcgtgggtcctccgggcgggtgctcctggacggcgcgaacagagggcggcgttcaagctgaaccacggcgagctgaactggaccccggcggaggtcctcgacgatggcacggcgcggcggactccggcgagaaggggcggccggtcgtgcaggcgctgcgcgcgggtggctgtgcggccgaggcacgcagctggagcgtcgcgcgcagggaccgacagggaggacgcagcgggcggaggggcactcgcgaggcccacgcc

SEQ ID NO: 137234 - DNA, 658 bp, Zea Mays
ctgggttgcttacctcgagagaagactttgggacccttgaacgacggtagggacacgacaagggcttgggtctacgacgacggctttccagctgcgcgagggaaactttggtgagcacggacagagggaaccagagagggagagggtaagctgaggcatgtctcaagttgcgggcacctaggcaaaactcactgaggcgaaaggcacggccaagctccaacggtgacgacagaacaggcacacgggcacggcgaacggcggcggccttccgagagctcagaggaggaacgacgcatgagcgagagcgagctagggtgtctgtgagtggggaaatggccgagcggactagaggggcttgagtaggggctgggcacgtgggtggtagtcgggattcgcacggacgtgggcgcggaccaggagttagaggagggggagaggggtgacgagcgaggcccgacagacagcggcacagacgcgcgaacgcacaacgggccagggcaccgacaagacgaccccactgggcagagagggagaaggcgagtgagctaactgggcgcggtgccgacaggacgggcccacatggcggtgagagcggggaaggggaaaggcgggcgcgagatccacaactgacaggcgggggccgcctatcagcgcgggc

SEQ ID NO: 137235 - DNA, 358 bp, Zea Mays
ctttaaatttttctatcacctcatactcatctcaatgtctgagcttgatgaagacaccaacaatggtctgctggaataaatttttctatcacctacattctatcacctcgtttcattccagcagaccattgttggtgtcttcatcaagctcagacattgagatgaccaaagacaaagtactcaatttgttgtatcaaactataatgaatgtagagatgaagcttgcctcttggttttccatgaggaggcggtgaaggatacatcatgggatcaacatcggccaagattgtgaaacctcccatgactggttgatgcaagactacttcaacgacccatatgtttaccctctcgtttactt

SEQ ID NO: 137236 - DNA, 542 bp, Zea Mays
gtgctgcacactgataataggggtgagttcatttctgttgagtttggatagtactgcgttgaacacaacatcaagtggtagcacacaatgttgtacatgcaatagaacaacatcgtcgagcggtgaaaccatattgtcgtcaccatggcgtgtagtctgctgaagagacaaaacataccaatgatgttctgtggaaaggcggttgccaccgcggtctgggtgctcaccagggtcatctacaacatgacgtcatatgagtcctgacatgggtgcatgtcggatgtccacttcatgcgcatgttcgggcgcgtggtgtacatcaagatgacgaagccacatttgacgaagctagacgattgtgacaccctagttgtcttcctcggctacgagccaggcgctaatgtgtggcgcttctacgacccgacgtcacatcgcaccattgtgtagagacatagtcttcggcgagccaacaccctggagctagaacgacaagtatggggacctagaggtcgacatagacctcatcatggtgtaccactcaa

SEQ ID NO: 137237 - DNA, 753 bp, Zea Mays
aaccggacaaaacattccccctccttactttctggcacttgcaggcatttgcggagctgggatacatgaaacacattgtggatatatgacatggattctggcaattcaaggcggtaggctgcgggtcctaccctgctaatgataggataggggccgacgaatcacggagctagcttccctttcacttgaaatcttttgactccgcgcattggggagaccttgaggtaaacgaagtcttcttcctcgaacctgaattctctccgcatgttgtctacataacttttctgccgactctaagcttcaagtaatcttttgcagatcagggcaactttctcttctgcctctttaacgaaggcagccccttctagtgtcttttcccctacgttggaccacattagaggggtctggcactttcgtccatacaatgcttcaaacggtgacatcttgatactagcctggtagctattgttatatgagaactctgcatatggcaaaactggactcccaatttctgtcaagtgtcaacacacaggctcttagcaaatcctcgaggaccttgttgaccctttctgtctaaccatctgactgggggtgataggcggtgctgaagtctagcttggtgcccatagcttgctgaaggctcatccagaattttgaggtgaactgtgttcccctgtctgacactatcttccgtggaataccatgaagtctgactatttccttaagatatatccgggcaagggtggctcctcc

SEQ ID NO: 137238 - DNA, 374 bp, Zea Mays
ttgggcttgatatttgttgagggcctgcagggcgaagacacggtctccatcaatgaggtctttggaagttggctcgtcgacgtcgggtaccgctgaagcgcttgtccgcggggacccatgtttgatttcctgcggggtcatggcctccgatccgtagagcaggcaaaatggggtgaatctggtcgcccggcactcggtcgtgttcagtgcccagactgcttcaggtagcaggtcggcccacttgccttttttgtcgtcgaggagcattttcttgacggctgtgaaaattttaccattggcacgctccacgactccgttggattgtaggtggtacactgaggcgaaggcaagcttggtaccaatggagaagcaga

SEQ ID NO: 137239 - DNA, 822 bp, Zea Mays
aattgtacgtcgtcgcaactcacgagtattatactagtattaaattaaagaacgagttttatgtattgtggctcacgtgcgaagtgcataagtcagtttctctctcacacttcgcacctaccaatgtgtctaccctacagataggtcgtgagaaaccaccacgctctctcctacgtttcttgtctatcagtaggccattttcctacagatggtccgtgagaaaccactcaaactcaacacgacaacacgacaggaagttgcacgcagcgcaatgctaccatatagtaccacatcgctagctggagaatgatgagggaccgagcaatctataaaaaagggggtcaaactatttttcaactcacctttctcggtctgttggctaatggctaagtgtaatatttattcttatgagctatatattcacttcaatattaaaattatttttattggtattttttgtggggagggtccaccatattgacttattgggccctcacatgtcactagccattacactgctagtagggtctggcccacccaaaccaatatcatcaaatatgattgtatggcatcacaatgtacgagcatcatactagttatatattaaatacgctagtgccgtctacaggagaccagaactctcggaggctcctaggccacccgaattgtctgtggctatcgaggctggtcggagacatcatagttgtgaggttgtatctagcagatgagttgtgaggtagtctctagcagatcgtgcatatagttatgtaaaataatattttgcactatatagtatatagtatagactgtattgttcacaga

SEQ ID NO: 137240 - DNA, 483 bp, Zea Mays
gtagttctaaaaatacaaagaatttgcctagggtcaacacatcaaaagtctagagctataataggagaacaactttacttaagtaactaagctttgatcacatataaagtttggagaaaaataagctccaagttgtgttgtcagtcactctgatgactgaatttaggtcaccagtgacattggccaaacttttgggtcaaattagagtaagatctattgctcgaatgagggtagttgctatagcagaattgtagctggtatgaagggctacaagtttgctacagatgtattggcaagtctttgcacaaaaattcgagatctaggcattgcaattcggcctgtcaggcactctgaatcagggcttcgatggtacagtgtaaagatcagatcgccagttctgataaatcatcgccggttggataacgcatagtggtaagaaatatcgcgtcgtggatgaattccggccactattctactcccgcc

SEQ ID NO: 137241 - DNA, 438 bp, Zea Mays
ggctatctccctcttcattctggtccaccaatacaagggcttcagatcatggtacattttggtgctccctggatgcatggagaatttggagaggtgggcctcatccaagattttcttcttgagatcctcgtttttaggaaccaccaatcttctttcaaaccacaatataccctttccatcttggcagaaacatttatacttctcagtcttctgatggagattctccttgataatctacactcccttgtcactgagctgggccattatgatctggtcttgcaaagctggctcaacagaaatgtgagacaaagcaccagaaggaattacttcaattttcatcttgctcaactcatcacacaaagtgtcaatacgagaatccatcataacacagttacattgcaacttccgactcaaggcatctgctaccacattggcctt

SEQ ID NO: 137242 - DNA, 535 bp, Zea Mays
caactggatggagcacagtcacctttttatgacaatgtttcatgagatatttctttatcaataactttcctctctatgacaatgttttctttagtggttgcatctctcaaatcttttctttagcttctcattctctaatgtgattaggtgaatcttgtcaaaaagttttttctcttcctcttgattgcatatatgatcagttgaatgttcatgattcatactcagtcatcatatagtagctacatcaatcttaacaatgttgttaatagcctcatatatttcaatagataaaagctcatgtgtaacaataagattgtcatgatcaattttagtttgagtgtaatcttattttagtgatgcatgtctatcattggtctctccatttgtttcacttagtttgtcatatttctctttaatatcttttagatagatcttaaacacattattaatagatggcatatttttactttcatttttcattttatcacttacttttacaactacgtcattttttaacaatcaatgatatattctt

SEQ ID NO: 137243 - DNA, 462 bp, Zea Mays
atttggatcagttaggccatcatatattggtaatatggggtcctgtacaaaggtgccaaggtgtggcctgcagctctggtgtcagtggggaggcttcgtcgtagaggaaatcttggaagttgactggttcatgacgaagattgtcttggttaaaaccctcataattctggtccctgtagttgttttggtctgcgcttcaatggtgcacatttattcagttgctttgtcagtctttttctaaagcttagaaagacgaaacaccttctccttgtgcttctccaaatgttggtggattgcttcgagattgttgatctcttggtcttgtggttctaggctgatagcctttctcttttggttccttgcttcccttaggagagcttcgtccccttgattggtgtccaaggtcctgaggacagggtcagttgttgttgccttcttcggtggcagggtgcgagttgtggt

SEQ ID NO: 137244 - DNA, 688 bp, Zea Mays
ggcccatttgcccttcttgtcgtcgagaagtcttttcttgatggcagtgaaaatcttgccgttggcgcgctcgacgacgccgttggattacgggtggtataccgaggcgaagacaggcttggtgtcgatggagagacagaaatccctgaagtcctggctatcaaactgtttgccgttgtcgactgtgagttcggacgggactctgaatcaacagacaatgttttgccagaagaacttttgggtggtcttcgacgttattgtggatactgctctagcctcgatccacttggtgaagtactcgacggcaacgaaggtgaatttgaggttcccttgagccgtaggcagtggttccacaatatccagcccccagcgttgaagtggccatgtgtgggcgatcagcttggtgaactgcgaagggttgctcgagcgaggggaaaacttctggcatgcttcgcaagacctcgtgactcgattcgcagtacagattatcgtgggccagtaaaatccttgacggatcaccttggtagcgagggccctgggtcctgagtgggagctgcaagttctgttgtggacttcgcgaaggatttgaatgccttcggtttcggtcacgcactttagcatgggctgactgatcccctttttgtacagctggcccccgactagtgcgaagtcccggctttggtgcttg

SEQ ID NO: 137245 - DNA, 363 bp, Zea Mays
ctcgaactcgctcgttcatttgggttttgttttccattgcaggtagttggcaaccgaagcttcatcaagcagagagtacatatctacttcacgatgaacaacctcgctttaggtaggcgatcgacatgcgttaatataatttagctagcagctctgtccaataatgcttcgagtttctgatacccccgtaatgaattcttttagcccttttgccaatcctgatgatgcagctgggatcataactagtggcattgtcatcatcctggtcatgaaattcgtcaccagatggatcgaggtgacacgagaatggcagatggagcgcgcgcggctgcaggccttggagatgcaggcggcggcggcggc

SEQ ID NO: 137246 - DNA, 843 bp, Zea Mays
ctctgcattgggacttcgactgcatgcaaacccacgcatagatggtggaaaaggtgatggcatcttaaaaaccatagatgggcgttggaacaataaatttccacctctttgtatggtgcagcttgcttcttgaaccctggaaaattttattccctcctcaacaagagtgatgaagcaggaaatgaatagaccattgcacaaatgaggtgtgacttcaaaatggtggaagatttgggtcttttagataaaattgataaccaagttgttctataggagaatcgaagaggaatgtttgcaaatagaatggccatccaacacgcagaaacaaggaatcctagtaagtaaacttaaatttcagcaagcctattttaattttgtaataatctaaattgttacaaagcagaaaatacaaactaacaattgttacttctagttgattggtggtgcgcatatggtgccaaatgcattgagctacataggtttgctatgcgaatcattagcatttgtgcttcttccggttatgagagcaactggagcacctttgaatctgtaagttcactacaaacttatgtaatgtacaagaaaatctgtgtatcatattgttcggttagccttatgttctctttcaatgctatatagatgtataccaagaaaagaaaaccagttgttacacaagaagttgaatgactgtatatgtatcgtacaataggaagatggctgctagatttcaaaagaggtgtgaagaggagaccaaaggttatgatccattggtgttggatgagtttgattgggacaatgaatgggttaatgcatcatctaatcaaaccaatgatattgaaggtc

SEQ ID NO: 137247 - DNA, 908 bp, Zea Mays
cggaggacttggaatttcctcttgaggtgccctttctcttcctcttttgccctttccacttggatagccttgttggagaggtgagagaagttgaggaagtcctggctggcgaggatggtcttaagctcgggtcttagtcctttcataaaacgggccatcttcctggactcggtgctgacatcctcaggcgcgtaacgggccaattctgtgaacttgtgcacatactcactgactgttctctcgccttgagttagctcccggaattcatcctccttgagttgaactatcccctggggtacatggtgctcacggaaggctatttcgaattctgcccaggtagcatctctgacggcctcactaaaggtgtcccaccatgctaaagccattcctgaaagttgatgagctgccagttggacacgctgattttcggggcatccgatggcttccagtttcctcttgatcgtgcgaagccagtcatctgcatcaaggggattgctggaccccgcgaatgtgggaggcttgagtctcaaaaattctcccatcctgtcctgaggccttccaccacctgggcgctggttttccagacttcgagtgaggacttcaatgagtcgggtttgattggctagaacttgggcaaggtgtagtggtagttccggaggtgcagggaggtgggtctcactcccttctccgccagcttctccttcggctctcagaggacaacctgctccaatcccggaggcggtaggcgtggttttatctgaagccatctgccatgggaagagagtcactatcatgcacatgccatttttttaaactagttattttattcattacatcaagccattacataatacaacacactgctatcataagctcatcacacacgagtgctatctagggtactcccg

SEQ ID NO: 137248 - DNA, 672 bp, Zea Mays
cgtccaacgaataagggagcaatgtgccaacatctagttgagcaatctatgactgagatttatagtgtttattcatttggtaaggtcttttgcttactaatagaatctcaacttgtgatgtctttgatgccaaaaaggctttcatgcattaatattgattttcttcaggttacttcgggtaaaactttatgcatgaggagagagcagagaattaacttatctgtgttttattgtatttcagtttaatttccaagatgtccaagctataaagagcttgatatagttgttatggccacttggcgatatatataaatatatgatgtcacacaacacaatcaaataaaatatagagccaaataaaattgtttatgaaggttgcgctatgatgtggcttcaggggcttgaacaacccatcacaatccacacgagtacaagctctagcgtctgatgtcaacgcgtgtgcagccatcagggctacgacaacacatccagccttcataataagcgcaacagacacaactgtggcttggtagttggggtacacgatatgtacgcgcaacagacacaacaaacgcaacaagcgcaattgtgactcaatagttgcgacacacatgcaatgcctttagggccctcgaaaaatgtgtgactcgacgatagcggtccgactcaacg

SEQ ID NO: 137249 - DNA, 305 bp, Zea Mays
gaaaaaaaagaatggacataaagtgggagtttacatcaaccgatcctatccccgcaaagtgccactagtgcttgtatgactactagtacacggcaaaaagagagtcccttgttcattggacactgggaaacacaaacttctgcctgtctgccgcctacctaaagcatctgtagacctgcaaatcaaggagcagaaagagtttagttacataccgatgctcctaatctacatgcctgagatattctacgtttattgactcgacgcgacatctgctcgaatgaatggtaccgtctactttaattttg

SEQ ID NO: 137250 - DNA, 476 bp, Zea Mays
gatttccaagcctgtctgtattggcgaaaggagcaagatccaatgaagaaaaccctataggcattccttgcagagtagtgaccatcaggagcaatagataagatgtgcttgtcctcaaagttaggatgcaacacgacctatgcgagagaattccatagggacatataatctatcaaaactcccaaggtacaggccccctaatgtttgcaatccatattctattcagcaaggcttcctgcaccattcttttgttagttattctttttgggattgcactgaacaatcttggagctatgtcagcaattctccttccattaatccatttgtctatccagaatagactccattgccaacctatgaaataaccacgacaacaaagaaagatctaaccttactaggaacttgcataggtagatctgtccaaggttgaataggatcagtttttttcagccaaagccatctcaagcgaaggaccc

SEQ ID NO: 137251 - DNA, 654 bp, Zea Mays
tattttcatattaaaaatcattttctttatttagtttatgaataaccgagaactttggctgcaattccaatttctgaagcaaccaggggccaaagtgctaaaacaagacctaagtgtagtgatcttttacacaaagggggacgacgggttgatttggcataaacccgagggctcttttgtaatatcaccggccgaaggggtaagcatgattcctgactgatcagattagatcctacggcccggattcgatcccaatttggtacacgattgcagccactcgatcagaaactcgcggcccggattaaatccgcccaattctgaaccggtacgtaatagcggtcataggattgggtttcgatggcttcgattgtaaatacccagatctaatgatgcacacccgttccagatcggatggttcccattggttccattcaatctggcgcagagttttaatctacaccgttgcataggagatcaacagccaccgaacaccccccaacccaaccgcgcacgacggcgacacacagtacttgcacggcggcagccatggtcggagtttctggtaacgcacgtcggtaccctatttcaagcgcggctagatgctacacgttgtagagattaaggataatggttaggggggttattaccagttat

SEQ ID NO: 137252 - DNA, 275 bp, Zea Mays
cgtgtcaaggccatacacctaaaagctgtcggtccattgcagtctctaccaataccaacatggaaatgggaagatataagtatggactttattgtgggattgcccaggaccgcaaaggggtatgactctatgtgggttattgttgatcggcttacgaaaattgctgattttctgcccgtcaagacagtgcacctagttgctgtttatgcccaattgtacattgctcgtattctaagtctgcacggggtttcgaagactatagtgtcggatagtgg

SEQ ID NO: 137253 - DNA, 302 bp, Zea Mays
tattacaaccacataaagtatacaatttactaaatttaagaaattaaacagtatcagcttcattggaccataccgtccaagcccggccatgcatgttgtcagctatatatgcctatggttggacaaaccgaaatttgaggtctggtttaggtccgtgttcgagccgtgctagcctgatccatagtattttgtgttagatcgtgctttggactgctgtttggtcgtggtcgtgctggaatgttgggttaaaaagctcgccctatattcttaggaatatcatagctagtgatgtattccgtcct

SEQ ID NO: 137254 - DNA, 381 bp, Zea Mays
cagttggttatgtgaaggcttaactttttctagcaattttaaatactacctctagggggttacgatatgatcctcggtatggattggctagaatgtcatagccctatggctgttcattgggcacaaaaatggttggagtttgagtatgaccaaagaaaggttcggttgcagggagtgctgcccaacacacaaacctgcaacaatatcacctgtttgcagctgaattccttgatcaggcaggaaggagtcgagcagttactcgaattgcaacaaatggaacagacagcagcaactgaaattccggagccaatcaaacaattattaagtcattatccacatctgttcagtaaaccccacggcctaccgcccaaaagaacagtt

SEQ ID NO: 137255 - DNA, 503 bp, Zea Mays
gatagattcaacagtgtcactcatgggcactctgatgcatgggtgagagttgcagatgaattcgtagcactcgcatttgctggtgatgctcgttcagcgaggtgcccgtgtataaaatgtcggaacttggtttggttgaaaaagtggagctctcgtatcatgttttcaaacatggctttatgccgaactatctggtatggcatgagcatagagaggtggaccatactactgagtcggaaggggactaggatgtagaccgaatggaagagatgttggatgatattaggaatgagtacccagaactacagaataatcaagcttttccagaggatgtgagagagttctacaagcgtcttgaagcctcgaaggcttaagtgcatgaaggaaccaatgtgagcgtactgcaggtggtaacacgtctcatggcgatgaagtcaaagtacaccttctccaataattgttacaatgattttgtgaaactgattattgatatcaccccaccg

SEQ ID NO: 137256 - DNA, 541 bp, Zea Mays
agccgtgcggcgtccccacacacacggcggcgcccttggcccatgcggcggctccacccatctggcgacgaaatccgcgccctcttctagatacaaccaaattcactgccacccgaacctattgggataataattatcccggattgcgatcccagcggctcgggccaccatgatccgcggacaatggtgaagcggcggcggtgcccggtcattcggtctacctgaattcgaattcaaacacagccaaggacaagggagcgcggtagaagtcttgaacgagatggaatgcttaccggtcaacagggtcgcgcatgaaccggttctcgacgccgggacgtgtgatttgctccgaccacgaattccagcccgccagtcggttaattcgccctaccgaagcaacgtacgcgccacgcgtgctctagtacagctctggtagacagccgacaaggccaaaccccggccaatcccaagccgacgcttgcggcactctccttccctttttcctcaccgcgacactctggtgattattttggtcgccaca

SEQ ID NO: 137257 - DNA, 877 bp, Zea Mays
tctgccctggtactgggtcctgctctgctgactgttggagggaggtgccttggaggcaggtgccgagggaatcttggggccattcatcgagttggagtaggtaggtccgggtgccttcaactgggggcagttattcttgaggtgactggggtctccgcagtgccaacaggcatttgctggcggttggttgcttgcaaccgagggggcctgaaaggagctctgaccctgctgactgtaacgtgacggagtaggtccagctggtctagtgaagcttggtcccttgggtggaagcccaaaggatcgagctctctggtgacggtcttgctgctgtgctcggagaacctgaaatttcctcttgaggtgcccttttcttcctcttttgccctttccacttggatggctttgttggagaggtgcgagaagttgaggaagtcttggctggcgaggatgttcttaagctctggtcttagccccttcagaaaacgggccatcttcctggtctcggtgctgacatcgtcaggagcgtaacgagccaactctgtgaacttgtgaacgtactcactgacggaccttccaccttgtgttagttcccggaactcatcttccttgagttgaactatcccctggggtacatggtgctcacggaaggctgtttcgaattctgcccaggtagcatccctgacggtctcgctgaaggtatcccaccatgctagggccatcccagaaagttgatgagcagccaattgaacacgctgattttcggggcatccaatggcttccagtttcctcttgatcgtgcgcagccagccatgtgcatcgaggggattgctagaccccgcgaacgtgggaggcttaagtctcagaaattctcccatcc

SEQ ID NO: 137258 - DNA, 375 bp, Zea Mays
ccgcgctcccggattcgcaccggtcgccgtgattcgtgcctcgcacgtagtggatatccacggggaggtaaaagatctcgcgggggagcagatgtggtcgcaggggaggcttatcaccgcgcctatagctgttgcaacatgaccggaccgccgggttgccgtggaaactccgttgacctcggttgtgccatgccatggcttgttactatgcggtagtaaccgtggcacacttaagagtacaacctttgagccattacgccggtgaacgccacgaatcctttgcgccagtattcttccccctctccggtcgccgcacgtcttctccaaattagccaccaccgctcatgaatcctataaattgagcgtgccattagc

SEQ ID NO: 137259 - DNA, 289 bp, Zea Mays
cgcataatgacttccttaatatcttctcttgccttcaaatcattcttcatgtaaaaccattcctccatccaagctccgggccacctttttcggaatgttggcactgggtggcttgcgttgggacgggcaataaatgcataacaatcaaagttgttgtgatcctgctctttacccatggccttcgtctcatacagaagttcgtgcatgatgcagaagcacttcacgcttggctctatcccttggcttcttactgcccagacgaaaacccccatccttattatagcttcgg

SEQ ID NO: 137260 - DNA, 314 bp, Zea Mays
catgaatagacgagaatattggaaaccaggtaccacaaaaggtcattagctagcccaataacgtcttcatccactagttgtactctagtaccctctagtgtgaatacaatgcccacaatatcatagaaacgtcatttgaggtttaaaaggtgatctattgttttgaattctttatattccaactttttagcaactgtatggtggaaacctgttatcaaaaaaggtcattagctagcccaataacgtcttcatccactagttgtactctaataccctctcgtgcgaatacaatgccctcaatatcatagaaacac

SEQ ID NO: 137261 - DNA, 465 bp, Zea Mays
agcgaacaccgcgcgcgcctgaaccaaattcctcgctggctcatggatccgcccctgtcaggtcattctccttgctctgtttgttgcgagctccgctagatctccgccgctcgcgcatgtcgaccgtctcgagcctgcgctcatcccctcgcatctataaaacctcgatcccgctattcccatccaaatcggacacctgtcgcccaacccctattgcagaccgccatggagggagaaggaggaaaccgcggaccatcacggcggttgtcgggggatcacggtgcctcaacggtttgggcctcgaaataacatctagggatgatctccagaccccgtggatgttgtacgcgcgcttgattcgaacaaaggttggccgggacccaggtaattggtcaccggagatcgtgttccaccgtggagccacacgctgcagcgagcgtgtgtctgtgcacgatgaatctcggt

SEQ ID NO: 137262 - DNA, 391 bp, Zea Mays
caccagaacaaaactccataccattgtcagttctcagaacttttagcttcctctcagtctgcttctcaaccatagtcttccaaaccttgaaagactcaaaggcatctgatttttgtttaagaaaataaggccaaactctgcgtgaattatcatcaatgatagtcaacatgtaacgagcaccaccatgagaaggtatacgtggcggcccccacaaatcagcatgaacataatcaagaatatttttggtattatgaacagcagaactgaattttacccttttatgcttaccgaaaacacagtgctcacagaaatcaagagtatcagcatggcaaccatcaagaaggcctctcttgctcaattctgccaaaccaggtgcactcatatggccaag

SEQ ID NO: 137263 - DNA, 452 bp, Zea Mays
cgcgtggccaagccgctgggtcacatgggctgatcgttgccgctttgaatatgggacgataagtcctccgcccagctcgcggcagcgttctctttgtttttgcgccaactaattttagtaggagggtcgccgggggccaatctgcgtgatttcggttaggaaacactgctcggcgagggagcgccgcccattgtggttggaggggagaagatgaggtttaagtcgtagatctatggagcaacgaccacgattagggcgcctgtataccatttcgctgggatgatcgcaacccttgatgtgtaatccgacaaccgaaatcatatcctgactcaatgaattgggaggctaatctgaactgttgattttggatccagtagcccagatgcgccaatacctcttcgccatgctagtttcactaaagaggccctagagttattgataataaacctgtc

SEQ ID NO: 137264 - DNA, 474 bp, Zea Mays
gagctacatcgatatggttgaaacatacctaaggcccaacccaacaaatcaagcaatagttgtaagaagaaaagaaaactcctttcacatacaatgtttgtattcgtctagctccatttgtgaataatgatgctcacgacacattcgacctgtccaagtgcgaaggtgccatggattgatgaggatagtcaccgacgagtcaaaaagattcttgaagtgaacaatgtgtattccccatctcgccccctagtcctctttctccccagattccaaattcgtaacctctatatctctaattagatgtttaggccgttgtagagggcaccaacgcccctatttgttttcttatcattgcaacattgacttgccccttgctcaatagttgtggaccatagagggcatgacaacaactgagcatgtaatctccacacaagaactcaacccaactcttttgaactccctaaggcacaaacc

SEQ ID NO: 137265 - DNA, 757 bp, Zea Mays
ctaactttggacttggattcaaccttgatccagtgctcaactgagtttaatccctatagtcgatttgtagctggtatgtagctctacaactttgctgcagagactcaggtatgttgccataggaaattgagaggaatctggccctaaatcttggctgtcaaacacactgaattagtattgccatggtacagtgtcccaaacggatcaggccgccagcatggcaacttcaccgccgaccgattccgccgcgattcgtgctgccgccgatccaatccgtgctcggggtgaatggataacacctggtgtacgtcgccggggataaactccagccgataaacaattccgaccgccgtaccatattcatcgcggtggaatccgataacttcgccggtgaccgccgcctctcggccttgtgccgcgtggctctacctttccaacgcgtcgccgtgactctctatggtcgtctaatcatcgccggtgaggtcaccacgacggtagacacgagttcatgcgcgccagtgctcttcttcttcctctgaccgtcgcgcgtcaccgctaaaattcccggccgccgctcttgcttcctataaattgagtcctccatcagctccacagcatcaccacgtactcagccgcccagtattgcccccagccgatcaccagtgtgcccgaatttcttgtttcccccaaatcaagtttccgccaccgtagaaccaagctcgctgtggccagcgcgatacaggttagttcatccctg

SEQ ID NO: 137266 - DNA, 608 bp, Zea Mays
ctggacagatctgttgtgttagcacttttaaccttgctaagtgctgaatcttgttgagatgaaaataccaaagttgtagagtgtttcccaaactttccaaaaagtatttgttcactatttttggataaatatttgaagagttatgactgaaacaagcaacttttgtgttgttgtcctaattttattatgtttggtggattgctctactctgtggtgtatttcttgagtcgactgtttccttgtttgatgattggttgaacccgcagtaatgataatataactaatacaattgggcctaattatataagtaacaagtatacgtctcgctaagttagtgaaccaaattagtgagagtctaataagtgtttgcctagtgaataattttaaagcccaattaagtgtctagttccttttcaactaagtctatctatatataagtcgtagcgaacttgtgtacttaactaatttaatgttaggtaactaatggatgattaaagtgaacgtggtaaacacttgtgctcatgcttgtgtggtcatgtttgtattggttaagtaaagtaagtgtcgtcatctttccagtggtagccatgtatggacgatgacgtgta

SEQ ID NO: 137267 - DNA, 654 bp, Zea Mays
caggactgcgggttaatacctaaatacttcaggggcctatgtgcaaatctgtgcccgcgaaggggttcgcacgcatttaatcaggaccgcccgccgatcgatcaacggtccggggtcgatacagcgcgatctaatcttagccgcacatcaggttttcaacagctatcgcgtgtcttccttctcccaccgtggagggagcggcggcgtagacgccctggcgccatggccgacgcacagacgaggcgccccagcgaacgcggtggcggccatggccggaaatggccagatcgacatcccggcctcaagctttagttcaaaacgcgccacgtgatgtgtagaagaaggcgagagcaggtgaccagttcttaccggcgatggcggtgtgtcgcacgcggaccacggagagggattgattccgcccctgcttcaatctccgacagggaattcctcgactaaccgcccccgattaaatcacggaggattctccttgccagcagcaccccgaggtggtcttcgcagcccctacgccgacgtcccgacagcgacgcccacgagtttcaatcgtcgcggcgaaacctccccatacgctcaccacgatctccccaatattcgactctggatatggaatggtgggctggtgacgcggcgcgcggg

SEQ ID NO: 137268 - DNA, 479 bp, Zea Mays
tcatttctcagttcagtgagacatctttctttgccctgtaagaaggcaaaggtacgagcatgtaacacatatatgtagctgaaaaagatactgaatacgctgtcgtgcatattctagaagaaaaaagctatccattgaaatttacatgaacagtgtaaaagccaaacatacgtataaaaaaggagggttaaagtaaggaaactaacaagagcatgaatagtaaggtttcaacaacatatactcagaagtgacatataagaaacaaaaagtatctaccatattaccatgtcatggtatagagtaacagtctaacagatcaccataaagtgtgaatgatttgcttagtaatacttcacagctgaacttataggagtaaaaatacttcatatactgaaccagaaaggggtttgggagcatcccgacccagtatttttacatgcaccaacaatctgagctttagggcgccgaattttactccc

SEQ ID NO: 137269 - DNA, 446 bp, Zea Mays
cagctatgagcaagggttttcaagtacctccaggaaaattctatctagttgatggtgggtatgcaaatactccatcttttcttgctccataccgaggagttcggtaccacttgaaggaatttggggctggacatcgaagaccacagaacccgaaggagctcttcaaccatcgccacacacttctgaggaaccatgtggaaagggctttgggggtgcttaaaaagcgcttccccattctcaaagttgccacgttccacacgctggaaaaccaagtaaagatacctatagctgatgtcatcttccacaatctaattcgatcacttcatggtgatgaggaatggttagatcatcagccagataatattgatccatcaaactttgttgctctaccaagtggtgatcaaatgagtgacccaggcactacacaaggcaatgctttaagagat

SEQ ID NO: 137270 - DNA, 934 bp, Zea Mays
tggaaatcaaggaaggcatgaaaaaagggggaatgaacaaacctaggcctcaaattaagaaagggacaaaaaccacggattcatgggtatcctccatgggcacggtaatcccttgccaaatccgctaggcacacaattccttcaatggaagaacaccaatttaaactagatggagtaagtcagattcagaaacaacagaagcataattatacagaagggaagttggctgttgggatcgataggggggtgatgggcacaacaccccccagtttcttcttctagggcgccataagacctcatgaaggtgtggaatctagcacgggctcaccgaggtgccgaaattttacagagaagagttgcggtgaaagaacagagctagggttatcttgccagaaaccatcaaatggtaggcatgtatatatgtgtccactatagacctatcacaagcttcggtgcgggggaaatagattttcagatcgaagggagtaaatgctaagtcagataagtttaattggacgggttcagacgaatgagctaaatgagacagaaagcatgtttctatgcaggattagttaggagaacttagtcggggcacaagaaattgatcagaacaagaaactcagtactcatggtggataatactagcaagctttattcatataagcggaagtagtattacagaagaagatccagttcattatgaaccgaccctgcagaataccccttctaccactactcctactcactaccactacatcctactactacattacactatactaatatctaagccggtggtgccttgccatcggtgttgccgccctcgcctccgccactgtcgtccttgccgctaccgccattactgttgtcatccttgcctccctcgtcgtcgccgtcgtagccaccctcgtccgctctatcgttgtcctccttc

SEQ ID NO: 137271 - DNA, 529 bp, Zea Mays
ccgggtcaccagggagagcaagaacggcagcggcagtgtgggagagaagcgcggaagcttgggagggttctgagctcgctcgctctgtctagtgtgggcagatgtagatgtaccagcgagtaggcacttcttgtaaatgaaatgaggtgtagggagtgagatgagaagaagcgtcgtgtttgtcgaactcttaatcaatctttaggaaacattctgtgtgcatcatgttaccgggcattctgtccgatcgagcgaaattcgcaactgaatttgctcatgaaccatggactatgcagagtttgctattcagttggcccattgttagtccaccctctttcactgaacttcgtcgacctcctactaacaagtgttccaacatcccccacaatgcttgattactggaccagcagcactggtggtggtggtacatgaactctctccgaccccccagcaatccgtcactgattcgcagcgcatgtgctgtccagctctctagtacgtactccgatccagcatatagctctgccgg

SEQ ID NO: 137272 - DNA, 472 bp, Zea Mays
gcctgtgtagggtacgtacagctgaaatcagatccgccgcgtgtcaatttctgcttcgtttgacagtgtgtgcccacgccgcggagcgtgttcggtggcctttttcggcgttctagcggaatgggcgaccgcatttatcggctatgcttcattacataaaaccaaggctctgttttttagtacattagtagtaatgttcattgactgcgccgaactgtccgtatcatggcacagatgctcgttgatgacaacctcaacaggtggcagcgttacaacacgccatgcgacggtgtgttcccctcatgatgcgcaagttgcaggcagcaggtagcaaagcacatggttcactgggcacgaataggatgtttccatgccgacgtcctaatctcgtacagtacgtaatctctactacttaagtaagagtagtctaccattccatgttctatcaccattccctgttcttctgccattc

SEQ ID NO: 137273 - DNA, 274 bp, Zea Mays
tccgtgctctggaacgaggatgtactcctcgtcagcgagattacagtctatcgaatgcaatgaataagatatatgcatattaatgatatggcatttcgtaaacactaagcatagggaaacaatactaaaatagtggtacactagggtttcctttgttggccttaagggttttatacattcattttagggtcttgaattaacttaaaatttcagtcattccttggaggtttgttttggttcttggaggatttaaggttgcaccccactaatctcc

SEQ ID NO: 137274 - DNA, 390 bp, Zea Mays
ctttatgagaggcctcaatgactggcttcaaagaaagatggccacttgccttgatctctcctacaacagagctgttagcacagcgctggcagtagaagctaagcatataggcccaggaaaattgaagcgaattggaggtgacaggtccagtcaggggcctgaaaagcgacaaaggttggtaatccgacctttcaatcaaaaccgttcttcacctcgtccaccctcctaccctttcaaacagcctgtcttcatctgccctgccactgcccccacttcaactagtcagccgagtgcccctggtgctcgtttccccgccctccctagctcatcaactggttgcttcaattgtgggaagtctggacattttatcaaagactgtccatatccgag

SEQ ID NO: 137275 - DNA, 1270 bp, Zea Mays
gagaggtgcgtattattgtattaagaaggaaaaagggataagaacccttaacgaagccagacactcacaccacttcgattacaaagaaacacgtgcgctctttacaagaaaagtcgaccacaacctaaacttaactcttactgcgcatgagggcaaggagacaattaacgccttgtgctccagctagccgccaatagtgcagttccttctagcgattaataaagctccagcgaagcttaggagataccccatcaaacagacacctgttgtgaaggttccatgaagtccaagaacctgagatgataagggagttgaagcccctcttaatctgatcctgcacaccaacagagattgttttccaccgatcctcaaaggatgtttccagcgatgatgtcccaaagtgtaagatattcagagatgactccaacagtcaaagctccctgaatattattaacccaagcatgattggtgagggcctcgagtactgttctactggttgctcttcgcttggatactaatgcaaatacttgcggtgtaaggccagcaactctgtggccttggatccacctatctttccagaaaagcgtgtctgatccattgtccacttcggataccacttccacggagagcttgggcacacttcagaatttgattgggaaaaaataatctaaggtcgactaagatctgtctctgagccacaaccacctcctctgaagtgcccagcccaagttttgaagattggaaaaattcccagcccaccaagctcctttggagacaaactttgaaccaagcacaagacaatggccacctctagcgtccttccttctacgccaaagaagcccttgtttaatcttgtcaattgccttaatcacctaggttggattaatggccatggccagatacgccaacatggatgtggaaattatagtatcagtttacttaacacttagtgttttacgggggcaaaaaattagaattgtggaatgtttgtgctcctctacttgtctctggcagtggctcctgatgcagtatttgacaccccagtccctcctgtatgaaccagctgccctaagcaaccttggacagtgacgcccctgtgtattaactagcgtggtctcattttctttgcatttccccctcctattcgctttgtaatattatgctgaatcaagagcccaacctccaattcacaaaactaaagaatacaatccctagcgaatgatactcctaaaaaatggtgagccatgaagcatgaacccaaactacaatc

SEQ ID NO: 137276 - DNA, 557 bp, Zea Mays
tgaggatagcgatgacattgatattgaagaagacagcactaccattcgtcctacgaagccaagtcacgtgaacttcagcaaatcaaaaatcaaaggagaacacattgaggtactgctttggctatattgataatgtcgattgggtgcggctaggaggcgatgatttagtgttgaagccaaaagagggcgaagttgtcatgtttcaaagttttctaaagattgggcttagatttcctttggataagacattagttgtagttttgaaaaggtttaacatataccttcaccagcttacaccaaacgccatagtgcgtttaggcatttttatttgggttatgtagagtcagggtattgagcttgatgttgaagctttctgcgaggcctttaaccaaattcatgaattacactttcagacgaaggcaactaggggccttcaaaacaacttcggctgctataactttgcttatcggaggggtgcaatgttcctggttcctgcataccgaagcaaatggctgaatgagtgggcgagagtggttttatatgaagaatggtttgaa

SEQ ID NO: 137277 - DNA, 327 bp, Zea Mays
gggatggcatggtccagcgggcggggaaagatccttagcactagtccttcgtgtggggcgcaggtcgccgttcgtcgccatcgccgatgtgggggtcggctcggccagcgttgaaaggaggaagaagtagcatcagccgttgatctgttgatggacgacggagattagatggtagcgtacctattcgcgataatactttagggccgtaggatttggatcgtgcgggcgacgaggtaatctggttgactctgaatccagagcgctggttgtcgatccgacgtttgtgaacacctcacagttcataactcacactgatctaatccaggc

SEQ ID NO: 137278 - DNA, 746 bp, Zea Mays
gagatctggacgcagtcagtggtgtggggggagcgcaacggctcggcgacctccgggccgggaggtgcggtgccgatggacggtgcaacagcaactgcaggatcgtgtatgatgatatgatatgcccattcaaactggcaggcaggcagggctggctggttggtgccgccgatcgaaggccgtccgtcctctttcttcctctcatgcagccccgctttcagagacaactccactccacccaaccgaaccgaaccgaaccggcgagcattattgtcgctggcgtttgggatgggaaattcttaggggagggggaggatgtcaattgaggaccggaatcggatacacactcgcatgaacagggcaaaggctgccgagctgtacagtcaggcaggctcatgcttagtgctggtaatgcgcgctttcaccagctctcatgaaatcattcattcatgggcgtcgcctcgcccaccggtgcctttctccactactaaatgcagtgctcaaaccgaagcatctggtgggtgctgtcagagccacccccctttcctttggccccaagctcacacttctccatgccatcgccatgcatgctccttcgttctttagcgagccacacctactctgctctgttgctcacattgccatatatccttttcccatccatccattcattcattcattcgcgtcctcttttgtgtttggaccccccgtaaaccgtaatctcgctgccatacgtatcatgctgc

SEQ ID NO: 137279 - DNA, 712 bp, Zea Mays
ctcgctgctggtcgaagaccagaaaactcaggcagaagcgaaccgtacaacaactcatcaatccctagccagatctgaaaagaaccaccccgactccactgccataagaacgaccccaatcagcgctagcattcttattcgcctgcaccgttgttcccagcaaacgcaagagctgagagcacgaattgtatcatctagaagcacatcgatcaatattcccgtaggctacacacagaattaacctacataacctaaattacacaaacttaaccataaactgcgataaaaaaatcccctctccacccagacacccacaagaacacactacacacggtaaaccctcaaatccacaaccccaggtctggtctctagcagatccaaggaatgatggaagaataaatccccacagatccaattacccaaacgaatcctgacaccaaaccaaatagcacgagatgtagcgcatgctgcgcataccacccccacgggtgattggcgaaacagggttctttcagatgaaaaaatcgggaaatgatagcgcgagaaggaaacgtctactaatcgggaagcgcgaacctgaacaagcgggaaaggaaaccgcggcggaggagggagaggacgacgggattcaggagccgagactcgagaccacgcaccttgtagagaggacgagcggcgaggggaacggcgggcagcggcggcggtttgctcg

SEQ ID NO: 137280 - DNA, 430 bp, Zea Mays
tcggacattttccgcagtcgttgcttccttggacgcacagaggggtcgatgcccagactgtgctcaatgattgtgcggctgaccccgactaggtctaaagtagaccatgcgaagacatccttattgcggttaaggcaagagagaagtcttgcatcttcgcttggtaggatgtcttcgctaattaaaactgtttgcttggggttgcagggtcgagggggactgtcttggttccctcgttactctgcaattgtgcgttaacttttttgtgtttggttgtgtgaggactgttgttgtcttcgcattctgtcgttaggcaatgcacgttgcactgtcctgggatgaagtgtctttatgtgttcctgactgcttgttgatctccatatattgtaattacaccttgagggcctggtattttcatgcatagatagag

SEQ ID NO: 137281 - DNA, 426 bp, Zea Mays
cgtgttaggcatatccagtgatcgccgaagggtccgccacggtgaaagccactaagcgcttgcgccagtgcccctcttcctctctggccgccgcgcgtcttcgtccaattcaccggccaccactcacagactataatttgagcacagcgacaggttcgtagggtaatcacgcaccaagccaccaagtcgtgcctccaattgttcaccagagctctctaatttttcatttcccccaaatcactcaataacaccgcttggtttgacctcaccgtggtcagcgaatcccaggtccgttcatactctcggttctctcgttttagcgtgcttgtgtgcccctgttgctccccgaccccgccaattgagctaggaccccttagatcgccgggaacacacttggttgtccgttgtgcccgctgtcaccgtgga

SEQ ID NO: 137282 - DNA, 639 bp, Zea Mays
cgaggtcggaactctatgtcgtgagctcccagctcacatgcccacttgactatccttccgatagcttctttgttgtggagaatgtcccctattggaaatcctgtgactactatgactttgtggtcatcaaagtagtgatggagcttgcgagcggttagaagtaccgcgtatagcagtttctggacttggggatacttcatctttgagggcctgagaacttcgctaatgaagtagaccggatgctgcaccaggtatgtatgtccttcctccacccactcgactactaacgtggtgcataccacgtgagtcgtgcagaatatgtataacaacagatcttctactggctgattcggtgtggctcggcgtggtggcttgagtactggtggtgtagtcaggaactttttcagtgcctctagagcttcctatgcctctatggtccactgaaacttgtccacctttttgagcagtttgtagaatggcatgtctttctcgcctagccttgatatgaacctgctcagggctgccatgcatccagtaagcctctgtacctttttctgtgatcgcggtgcttccattctcatgatgacctcgattttttctgggttagcttcaattcctcgatggctaataatgaatccg

SEQ ID NO: 137283 - DNA, 387 bp, Zea Mays
ctgcggcgaaggcttctccgcgtgttatggatgctgaagttttgcctggtccgagtgctgggcgtaggcggcgaagggcggtggcgaagcgtagagtgagtgaagtggatggtggtcggcttcgtgtgggcagggctggcaagcgggaattgttgtcctcgccggttggggcaagtgtaggtgagggggagttgtgaagtctttttgagggtgaggagccgaggataatgctatttaactatagggagatgggaatcattccgaaggttgaaccaatgtaaggtgtgatgccctcgctgtacgtgtgtaactatagtttgtatgatgaggctgtgcgccttcgcgcatccggctatgttcataggggcgttgcacacttggtctagc

SEQ ID NO: 137284 - DNA, 763 bp, Zea Mays
aaggggggggggggttcaccaccgatctttagatcttgatccaagggcccagtactaaacgtgaagcggtacacagtacgagccgttagatgggcgatctagggacatgatgtaatggagacgtgcacaatccagaccgcccgaaccggatccgacggactagccttaatctaacccaaccggtatcactcctttcatcctagccgttcgtgccgaatcggacggcgtggaccccatctcccccatcacctcactctcctcccaacggcacggcgcgccaccgaggaacaaacgccaacgatgaggtcaatcaagcccgctactatgctattcctcaattaccaggttctacgcgctcgcaaggagaaaacaggtcggatggatgttacctcactagcgattagccgtcgcttgcagcagcccacgcaccgggtgattttgtgcccaaacgcggacaacggcgagcaatcaccgacggttcgatgacccccagaccctccagtagacaccacggcgagcgtgatcccacgacgaagctcttgagcccaaagccgacgccaagacgctgcccaggccgagaatggttgagcagtattccctccctcaactcacacaccgatgccagccgaattctggttagtggccaggttagggtggacacaggatgccacgaccgggttgttcctcttatacgcgcggaaatagccaacgcacaacgaaattcgcctgacatccccggcgaggtcgacacggcgcgcgcggg

SEQ ID NO: 137285 - DNA, 375 bp, Zea Mays
tgatgatgtactgaacacatcttttggctatgaaggttgcatgactgacgaagcaagctctttcttcttattgatggtatgatgccatgttcttgtagtgtggcctttgtcctcgccacaaaacaagaagaatggtttccttggggtgcactaaatctgccaccaaagctttggcctccccttcatcctcttggggcaagtggacggaacgtgctatgtgagggttgctgctgagaccttgcctgttgctgccctgactaaccttgagaccgagccattctttccttaccctgtgcttggttatggatattttggacatgtattggatgaaaccttcctccgaagaccctggcgacttcggtgtatctatggaac

SEQ ID NO: 137286 - DNA, 440 bp, Zea Mays
aaaggaaagctagcaccgcattttgttggcccctatcccatcattagcagagtgggacccgcagcataccgccttgaactaccagagtccatgtcggatattcacaatgtgtttcatgtgtcccagctccgtaagttcctgcaagtaccagagaaccacatcgaggcagagacaattcagattcaaaaagatctccagtaccgggaaaagccaataaagattcttgactcaggggtccgaaagacccgcaactcagaagtaagactctataaggttcagtggagcaaagaaggagaagaggaagctacctgggaaagtgaggactctctgaggaggtaatacccttaccttttctcgagccccgtctgaatctcgagggcgagattcctttaagtggggtaggtttgtaacatcccaattttcaacccgaggtttggaac

SEQ ID NO: 137287 - DNA, 819 bp, Zea Mays
ttgccatgctacagtagtctgatatagatcagatcgccagcgcgacgacctcaccgccggtgacctccctgcacgaggattcgtgccatcgtcgccgtgattcgcgacctgattgactggagaacatctaaaggtcaccgtcgtggataactccgaccattaaataactccggccaccgtaccatggttaccgcggcggaatcggataagaacgtcggtgatcaccgtcgcacggccttgtgctgcatgtccgagtctttccaccatgtcgccgtaactccctatagttgtcccatcgtcgccggggagcttgccacgacggtggacacgaattcaccgcgcccaggttcttcttcacctccggccgccagcacggctcggccaaattgatcaccaccgctcgctccttctacaaattgagcccgtggccagctccaccacattatcacgcaccaccctaaccagtattgctcccagtcaatcaccagtgagctcgaattttaaactttccccaattcggtttccgcccccgcgaagaacacctcactacggctagcccttttccggtcagtccatgtcccctgcttcctcgttggagcactctcatagctctgtgatgcttaccgtgtcaccaattcgaactaagagaccaccagtcatcgggaacacattcatctgtccgccacccattcggttcacgcggacagagcttgataggtcaccaaatgtgcaattaacttaggggaaatactctctaggtcgtggaattggtttagtccagtgcggagcgccggtcttggccccatccgggcggtctag

SEQ ID NO: 137288 - DNA, 556 bp, Zea Mays
tgggaacgaggtatggaacaaatctttataatgtattacatatgctgatttgtgtcttcactggactttgctttatttcacaggaaattttaatggggtctaatacaaatgaatgcaatactaaggatgatcaatgtaatatgctgatattaacattggaacaaaacgctgacattcggctggttgatagtagttctacggatgtggaagctagaaaggtaataacattgctacaatatatgatgaaatacgtgaatataaaaactgacttaatatctttgttttgtagaaactggaatttcatatggaaggtgtaaacttagcaagaccagataaggccaagcctaagggaagaacaatcaaaagtagtgagcaacaagtttttaaattgggtgcgaaaggagctaagaagatgagcaggaagtgccagaaatgtggcatagctgatggtcacaacagccgtacgtgtttaactgttgaggataatagggttcgattggctaacctatctggacgtaagcgaggacggcctcctggttcaaggaacaaaatcata

SEQ ID NO: 137289 - DNA, 371 bp, Zea Mays
cgcgcagtcgtgacacggacacagtcgtaaccacctcgtttgcctcgtctcatcgcgcaatgccccacgtgtcgtgcacacaactacctccccaagcactctactctctctatataaatatacgcccccgcccccaactccaccacaacttctcccccgtcgtgcagccatcctcttcatgcgtgctcgcgcggtgccgcgtcaacctgcctctttgtcgttgccggtggtgcctttctccggccatatcctccatctccggtgacttctctcccttccctatcttcttcgcttctagtggtatgtcgcagcctctgcaaccaccgttcgccccaagcctggcctctccgtgtgctgctcgtgcccatccc

SEQ ID NO: 137290 - DNA, 539 bp, Zea Mays
cagggacagacccagaacaaaacaaaaatgaaggcacacttctaaggatagacaccaaaatattagagcgaggacattttagttaggttcagcagaagatttaatggtaaaaaatctagacactaatacttacaataaagaaataagcgaggcctagaccctcacccccttatatgtaggtcgcgcagacagcggatcctagccatcacttatcgccaacgcaagggcaagactgtgaaacaaacttagaacggctcttgggtgcaggcaggagccgtctatttgatcaatcactcggccggcctttgtatctgtctctgtcgatgtatgcatgtgacttggaagccagggatcgtgagctcccctcaattattgggcctcttttatgtctgtccgaatctcgtggagcttggagccatatgcctggtcacttggcacgacagacagggaggccacctgtcgcgggcatggccacattgcttgcctgcgctcatcgccatttctccgagtcacagattattctatgcgattaatcgcgc

SEQ ID NO: 137291 - DNA, 583 bp, Zea Mays
gcagtcggcatgaccataggcgggccggcagtaattacgtcaataggcgcgcaggagcagcaggccaaccgctaatcagactctggccccacctacaggctcgcatcctctcctaaggcgggcacaggggccactgtcggtacctaaatcaggggtaccctcttctacagtatgaagacgttgtacacgtacgacagctccaggccacacggagaacggcgcccaaccccaccacatgggcaggtctaagggcaccacgtggcaaggaaagataacacaccccaggatacatcattgggtccggacctccataaagggacaccggacccctgtacgtacaagtccggagctcccaagaaggcatgccgggtccctcgggcaggccccaggtccctccgagtaaggtccgggccacagcaaggtcccagggcggggaggaccccgacatgagtaagggttcgatgctggcacgtgtctaggccttgccctacgctccccgctcagacggagatccgctgctgccgcgtggcttgtggcccgtgacatgagccaacgggccgagcctgacgtaaggcccctaaag

SEQ ID NO: 137292 - DNA, 772 bp, Zea Mays
ccctactttacgaaggcaatcaccaaaggttggactccaacccatgaacagcgttacgcactctcactgtgcctcgacggcacagacttagtcacagctcgggagctagaccgctatccaccctgtggagtcactactccgacatctcggggttgggccatcgcccgcctcggcggctcgctgcttcaccaactctggggctgggtcatcgcccacctcgccgactcgctgcttcactagctcgaggactgggtcgttgcccgcctctccaagtcactacttctctagcttgggggctgggtcatcgcccgcctggttgagtcactacttctgtagcttgagggctggggcatcgcccgcctcgccgactcgctgcttcaccagctcgagggctaggtcgtcactcatctcgcactcgcactactccaccggctcggggcctgggccatcgccgtgggggacagatatcccccgggttcactaggaagcgaaagacccttgcatggggccacatatcagttacctcgcaaggtcgtctcgtcatgggtcgggcaaagaccgcaagagaaatgggccgacccaagaaggcaatgggcttgtgcctggatcgtccgtggattacgcataatctcaaggaaccatccgtttttctcgcgctcggcgcccttgaacgttgggggaagatcgggatggagtcgatgggttttccttaggatgagctaagtcagttcactattagctaggagatatactgaaagaacgtgatcatcat

SEQ ID NO: 137293 - DNA, 363 bp, Zea Mays
gaagaggtggggaaattctatttgtagctcttcttctctctcccaagtagcctcatcttctccatgatgactccattgcactttgcacatttttatcactttgcttcttgtaacacgagtcaaagtgtctaggatcttgataggatgctcagtgtacgtcagatctccttgtacactaagttcctccattggcaactgttcttccgggacacgaagacacttcttgagttgagatacgtggaacacatcatgtacatcagacagatgatcctgtagctcaagctggtaggccatctcccgaactcgcttaaggattttgaagggtccaataaaacgaggggataacttgcctttaacttttaa

SEQ ID NO: 137294 - DNA, 570 bp, Zea Mays
gattgcttctatattgtttcttgactgagcttcattgatggcttactgtatgtgtagtacatagtacatagatgatattttgataatttttttgaaacattgcaacatgctgcattcgcaaatgggaataccacaacccctggaatctggatataaacctgacagctttatgtaaacaactttgttctagttaagtagaaaagttgttggggcatggatcctttagaattcatttagttccctagcctttaaattatctactagatttaatctttctgccaataaaactaaaagaagttatccccacacccacacccacataaatgataggagaagtgttttttctctcaaacacacacaggagagccgtgtatctttgtattatagggaaggagagtggtgcatacaagaacccttcttttacttggaccaaggcaagatgagtaaaccaaatccaaaacaaccagaaaagactttctgagattataactaatcgaccctactatgcaaatccagtggacctagagcccaagacgccaggagaagcgtgaactttggaaaataaaaatg

SEQ ID NO: 137295 - DNA, 284 bp, Zea Mays
gaggatagggaggcgccggcggtgtccagtgtcgacgcgagagagagagccccacgcgtgggccactgggcgtgttgaacagggcgaaatttattgggccaacgggcctccaacagacaagatgtttgcaatacttgcaatactggcatcggctacgctgggcttttgagaattgacatctcgaagatggcaattgccatactggcattataatcctaggctctttgaagttgtagcatcgacttcacttagctggcattagtgtattttcttttccattcatg

SEQ ID NO: 137296 - DNA, 325 bp, Zea Mays
ccgagattagatcttagctgaccgattcaactggacaatctgagcgcttgattttatatcccacggtcattagcattcaccgtttcatatggagcccgatctgatctgggctgtccgatcatgatcggatggctcactgcgtctgataccccttcggctcgataatcttactaaagagtccctggggttttgtgttatgaacccgccgtccacagggcagagcgatgagtcttgggcattctttcacgttggtccctggtctttctaaaaattgaggcccagtccagaatagcattaaatcagagaaaatagattataaatggat

SEQ ID NO: 137297 - DNA, 1062 bp, Zea Mays
ttcatgtttttaattcacattaaacttcgactctgcagatactagtacctggtatgatgcttggaatcatagatgtgaaatattgactggcagcattcatcttttcatcttaaagcacctcaccaagtttggcgaatagtcacagttcacaaaaagatggagaattgggtacactagtgtgccatctgccatgggatctgaacaactgcatattgtgcttttttgtgcaggttgccactggcaagattagacaattacttgcggggatcaagtatggaagttcacttacatttcttgtaacataactctactgccagcagtggaccaaggtaaagcagctactaccttttttcttcaaaatgttaccgtgttcatttgtatctgtggacatcaatttttaacgacagtatttacaaatccataattattccttgcgttgtatgtaaatatttaaagtttcataaaaaagaagtgtaatatatgtttctgggtgaaactagttagtttggcaaggtctttgtttcaaataacttgcaccggatttgattgtcaaaactgaagtaatcatgctgatccatgaactgcatgtgcaagtttatagaatgtggcatagctttgtaacatctgcaacacccatagtcattttttactagcaagagagattatatgcccctcaatcccctccaattcctatgcgactaaataagccttaggactaatttgggtgcgagaaaatcggaagaaattggaggggctagaatcccattcttatttaaaattgaataagaagggaattttagccttccgattttgtagctctcaaactaaccctaagtgtcccacttccggagcagggaagggaaggaaataaaacagcatcatatggaacccgtggcgaaaacgagagcatgacgatgttattaacttgcgttccagagccaagaaggccagaaaggttcacaaggatcacacgctggcacgggcgacgcaaagcctcgtcaaccgccccgtgaatctgcaagtatgacaaccgcgggcacgtattgctctagaacgctacca

SEQ ID NO: 137298 - DNA, 472 bp, Zea Mays
cctaacgcattaaatatatataaatgagtgtgattcgtggcgcgcgtaatgcgtgtgagaagcatggatattgttttctatcggaaggtccgaatgccagctcgttacgaagacaccaaagtcgattgaatcatttaaaagagtaggtatggccagcagcaagcttttcttcttcttcttgtcattcaactgcgccgcttgaataaaatatcgttgtggtggtctccatgcacacggcgtacacaaataatattgatcacggatccagcgatatcctaaaaaaaaatttgtcgtctactgtaccaaacctgatcaactaatatgtgcatgcatggaatttcttatcgataccgtgacgcctgtttagtatggagggtgtattaaagtttgtcatatggattctgaagatttatcctttggtctcaaatgaaatcaacaaaacattcggaagccaactaaagcaagctactgc

SEQ ID NO: 137299 - DNA, 745 bp, Zea Mays
atatttaaatcgctctgaattgcgttgcgttgagttttcagactcacgatgagcgattaaattgtatagtgggcactcagacacgtcgaacagactacgttattagtcgaccgagttatggcattggctgagcactggctgcgccctggcaacacgacgcagtatttgtgtcgtacgaacttggttgcgtcatttgattgctatgtcgcactctcgcttaatcggaccactctcgttgagtcggaccgccatcatcgagtcacacatttttcgcacgccctataggcattgtttgtctgtcgtgatcatcgagctataattgcgcatgttgcgcaagtttcatggacttgtcatgtaccccaactaccaagccacaactgcatccgttgagctggttacgaaggtttgatgtgttgtcgttgtcctgatggtcgtacacacgttgacgccaaatacactagagcttgtactcgcatggattgtggtgggttgttcaagcccctgaagtcacatcataacgtaacctttgtaaacaattttgtttgactctatattttatttgattgtgttgtgtggcatcatatatttatatatatcgccaagtggccataacaactatatcaagctctatagtgcttgaaaatctgggaaattaaattgaaatacaatgaaacacagataagttaattctttgctctctcctaatgcataaagttttacccgaagtaacccgaagatatataat

SEQ ID NO: 137300 - DNA, 415 bp, Zea Mays
ccgccgccaaccgcaaccgcaaccgcctggaatggaaacctctcccctgtcgaggaactgcgggagtgtcgtgcggacgaactagtgttgtgtgatgacagagcgtttgctctagagaaatattatgcgcggagatttttctggaaacaatggtgaaagtagttagtggggtggctctgtggtttatcgattctggtgagcgcctgtgctttcctttttaaatcatcgctggtgcctggtgtggtgatggactgaagggatccgggacccgcggccgtagccggagccggattggtggcggggaccctgatatgctttggcaaagctgtgggctggttctgcgtgctcgcgcccaccacagtcgtttcgtgcctcccagcaaaatcggcgtctcgcggttttttttaaggttgag

SEQ ID NO: 137301 - DNA, 566 bp, Zea Mays
cgggggctgggcatgtgtcaacaccaccctgggggtccaggttctctgcggtagccacttctaaggctgatgggccctcagtttactttccatgggaccagaacgatgcaattcagtctcccgaccctcgagatcgcgctccaaggtcgacgaggcacgggatgacctcaacccagcatcaagcacatcagcacaaacctccatcacaccatcatccactggctccaataacaaatcctctggaaccatatcctcaagagtctgatcaaaattggccagggacagttcttgcaggccaatgagagcagacaaagcaggagaagggactccactactttcaccactagcaatgaactaccgactgtttttccgagtcaaaggaacttcatcttcttcctcctcgtcgtccacattggcaacacaggcagcacccccattgggatcaacagcagatggagcacacccattgggatcaacaacagatggaacacccacattaggatcagcaacagaaggggcacacccattggggtcagcgtcagtaaattcagtcacaggcacttctt

SEQ ID NO: 137302 - DNA, 323 bp, Zea Mays
ctcacaccaccaaaatatcagctttgtctcagctgcagacaagagaaggcagctgagaacctattggtggataaacactaaagggtccatagtgtgatattttgcaggggtgaggccactataatgtttgttgtccagttcattcttatctcaatcccagcacacaagtatcacctttgttcccctactgtagacaacaaacaaaactaataattactcactgttcactgcttcacaacagtccaaactagatatttttagaggagaaaagctcctagcgcacgaactatgcacttcctccgtatctccatctctatctcaat

SEQ ID NO: 137303 - DNA, 387 bp, Zea Mays
gggtagcactgtagagggtcgtcgcggtgttggtggtggtgacggtcgtagtcataagttccttgagtaggagatcatcccagacccgagcgaaggatgggaacagggagatccgcgtgtggatggcgtgaaggtgtgtgtagcgtggactgagcccacgcaggaggttgaggacgagcgtctcgtctatgaccggagagccgaggtcccggaggttgtccaccatcatcttcatccaccgacagtactcggtgatggagagattcccctggacgagctggcgaaaagcggtgtccagatggagaatctggaactggcggttgccgaggaactaagcctcgatagcaacacagacctagcgagcgatttgcgatttcaagtccttgc

SEQ ID NO: 137304 - DNA, 885 bp, Zea Mays
atagttgttaagagaagtttgaagataaacatgctcaaagcttggctgtcaggctggtttcattctgaaattcagctattcagtgtagcagggtcagctttgagtgtgaattcaaccatgatctattgaccaaatgagctcagtccctatagtcgaattgtagatggtatatagctctacaactttgctataggtcactggatgtgttgccatttgaaaattagagaaagtggagctctaagatgatctgtcaggcgactgaatcagctttttccatggtacagtaactgcagaagataccccttctttccccttcgccgccgatgacccacacgccgtgattcacgccgtcgttgggatttgtgttcgctggcggggagataacttcggtgaagtaaagatctcgcggggaggagtggataagatcacacatcagagcttatcgccctgattctagtcactgcgacgtgggcggtctgcctgcgccgccgtggaaacgccggtgaccgccgccctccggccttgtgccgcgtgtttaccctttccaccgcatcgccacgacttacccctgctcaccattgattgccggaacaaccgccatgcctctggacacgtattcaccgcgcccaatgttcttctccacctccgaccgccgcgcgtcttgctcaaaattcatggccgccgcctctgggatctataaattgagccccccaccagttccgcaaagtcatcagctagccatcccccgctaatcgttagcactcatccaccagtgagctcgaattcgagttttcccccaaatctctttccgccaccgtgaaacgagcttcaccgtcgccagccctttttccggtcagtccaaccctccctctccctcgtttaagc

SEQ ID NO: 137305 - DNA, 313 bp, Zea Mays
gggatagagagatctgctcaccgccatatttgtgcagctcgtgctctggatttgttctgccacgccatactgagaagaggatttgagagagagaggggtggagggtgccaacgaggtcgcgattgctcctcattgccaagcgtggtccggtggggacctggcaaggggcgccacgacgaaaggactgggcttcctcgtcgtgtgcagaagacgaactgggcggccgcggagcgtatcagctcgtgcctgcgcagtgccacggtaagtcttgtgcccctgggctccctcgcccttaccttcctggcggtagtgc

SEQ ID NO: 137306 - DNA, 345 bp, Zea Mays
catcaaaagtgagtaacttataactaagatattaccaataactatctagtacttacctctaattattaacgatttgatgaccatcaaaacacactagagggagtctaggttcagtgaaccaacctcctactatgtctatagaagagatagtcaccccttcttgccccaacacgaagtgacaactcacaaatacttctgcttaggagacttctctcttctacctctatgttatgctctttgctacgttttttatctatgggcgcatagatttgacaagagcatgcctctaaaacatcaatcatatttttggggagtgtcagtgatacaattgttgatttcatctcc

SEQ ID NO: 137307 - DNA, 374 bp, Zea Mays
ggttcttttacagtaatcatgtgaattacacctctaaagggtacatcaacaaactcttcttgcttgggtggtgggggaagctattggtttgcttgctatggtggaggaggcaggtctaatctgtcttggtgctgcaggcatggttgatggggaagactagattgtggttttgtttgtgctgagggtagtatgggtgtttgttttggtagtagtggtggtggtatgggtgtggttgctatgtatgagcgatggatctttggttgtctgctcgggcggctttggccattcggtcattggttactttagtctccaggcagttcattgttgggtgatctgagtcttcaccgtggaaaacatagtaaaatgttcttggc

SEQ ID NO: 137308 - DNA, 471 bp, Zea Mays
ggccgaggactcttctgacgctgctcctgctggggcgttggtagtggcgcccctcccagaggctgatacaactttggatactcagaagcctaccagtactcgcccgaggcgcccttgccgagccaatcaacctgatccttctgctgatgagcagaaaaagaaaaagagacgcctccggcgagtatccagtttggatcgggacgttggtacatcggttcctgctgctgaagaagtgccggtgactgaatttactgacgctgaccccaatgggtgtacccaatctgctgctgatcccaatgggtgtgccccttctgttgctgatcctaatgtgggtgctccatctgttgttgatccccaatgggtgtgctgcatgtgttgctaacgtggacgacgaggaggaggaagatgaagttcctttgactcggaaaaacagtcggcagttcattgccagtggtgaaagtagtggagttc

SEQ ID NO: 137309 - DNA, 665 bp, Zea Mays
gtcgggaccatccccttctttcggatcaatgctcaacaccacaatagaaaaaagccagtcatatggccctggcctcatccagtgcccgggactcaaggttagatatgtgccacacaattgtactttgtggttgtttgtgggaccccaatcgctagcgttccccctccaactgaacgcttctagaagccactacgtatccgatatcgtgttcgttgagattcgatggctaggttgttaggattcaattgcccatccttagcccaggccctgggtatataagcggacattggggcgccccatcgtccatctaagccaggtctctgtgggacctatcacgggttcagccacctccatcatgcagagtgagaagagagttactgcggtggttctccgtcgtcagtgccgttctggaggtcaaggaaaggtctgggcacgttagcggtgcaccttgatggtgtccgtagctcaatcaggagagaagggtgatcgggtaactaggaattactcgaaggagcaattggcgccgccgcggactgcacctcgccttggtcagccctcgtcgtcaccttgcacgagcggtaagtcacatccctgtgtttgccaccatccccacatggtgtagcatccattatacttgggcacggggcattggagcacgattggcg

SEQ ID NO: 137310 - DNA, 400 bp, Zea Mays
taggagttaacatgtcttgctagaggacactgtcaattattgggacaagtaagaatactcgggcatgtctaaatgtatgtgaacctatagagtcacacacctaaggggaaagaagcctaacacagataggatccgaattagactgggtttagagttgctgatgggcctcaaagtcagaagcccaccagaacaccaatataataagtggtgggcctgtggttagggttaacctaattcgctcaccagtaaaccagcagacacgtctctctcgctctcgccaagccattatcgcgaacctattagttctatacgtgatgcttcctcccagtacatgtggatacctcgaaggtgctacatctagagcactaggacaaactgtgcgatgacatcaaggacacca

SEQ ID NO: 137311 - DNA, 457 bp, Zea Mays
ggttaggcggttaccaactccgagctttcggctcgggatcgggagttaccattcgataaccatccaacccacgcctgcagtccagctccagactcccagtttcacgtcgttcgaatcgacgccgccatacgagcaagcgcaacaggatctctctgcctggctggcgatgctcgaccgatgcagcagtacagtacgtacgtactactactactagtttactcctgctaagttagggttcacacgagcccccattggccgccactgaacccttgtagctagatttgcgcgcgctcgtgcccacctaccaccgtgtctcctacggcaacccaacccgtgcaggaactagcagaggagtagtagtagtactagcgtgcgtgtgtgtgtactggctgcttcacagcatctcccctgtttttctgcccttgcccccacatgggagcggagaaccctgttcttc

SEQ ID NO: 137312 - DNA, 304 bp, Zea Mays
gcttggtctgatgtaacctttctctgacatctcatctatttgcttcttaagttccaccaactcttgtccagataccctgtaagctcttttagaaaggggcggtgccaggaagaagctctatgacaaactcaactttccgctcaggtggcatacctggtaaatctttcgggaacacatccgaaaactctgacacaaccttgatagtctcgagtgaatctgcctccttgctatcaatagccatctgatgacaacctcctttccttggctcaggtgagactaactcagccaccacttcttctcctag

SEQ ID NO: 137313 - DNA, 692 bp, Zea Mays
gttgacattactcctccgtgagtatgccctttctaatttctacggatatgtaacctgttttaaaaaattggtgttaggtaaaatgctatcaaaaaatgtttttactgccaaaaaacgctcagctgcaaggatattaggagatatttcatcaaagacacatctatttcggtggttccaaagaatccaggcacctaaggtagtgaatgcttatcttccacgtcagactgcagcacaaagtctgaaatcagattccagagatggagatagtccactaagatccaaacagatggagatctagcaatatcaaaaatccatcttatatctgagaaggcttcatgaatcgttcttttgttagaaattctcttcggaattgccttaaatattctaggtgcaagattagcaattttctacccataaatccatttatcaatctagaacaaagtgtgtgcccaattcccaacttccgagagcagcaccaccgggaagaaagctcgtgctttttgcctgacacttggataggtaaactacacaatgtccaactaagctctttgagaccggagatgcaagtctgtccatctagagaggtctacaaacacttcctcatgcaacgaagcagtgccctttcgacttcatttcaccatataaggttatgtttggatactcttatatttacttcgatacatatggttggg

SEQ ID NO: 137314 - DNA, 345 bp, Zea Mays
agagtcccagggcaagggctcaaaattgggccctcaaatagcctttgaatataaggtggtgaggatctaaaacgccggcgcacacgccgacacgcgacaacaaattcgtcgtcatacaagttgtctgacatcttcttcatgacgacttcgcctctaaggccggtccaatgacgcgcgacagcaaatctgaagcgcatgtggtcaggcagcactgattgcttctccaaccaaggcattgcggccggcaacacctcgatcgtcatccgtgtgtccgccggtgtccagttccgggcttctgccgtctccgcgactccagcacttaaggtcgttgcggcggcgatgggc

SEQ ID NO: 137315 - DNA, 1020 bp, Zea Mays
ctcggagtcattgcgtctgcttggacgacttcacacccttaggtgtcttcgcacactttttgtgctgatccagctgcacccttaggcaactttttgctcggagtcattgcgtctgttgggatgacttcgcacccttaggtgtcttcatgcacattttttgcttatccggcagcacccttaggcaacgttttgctcagagtcatttgctatcgcaagcgatggctaacttagatttttgccatcgactatgtcgaaggtgatctgctcgcttcttacgtttggcgttgtgccgaatgataatggtagctctattttgctaagtggaaaggtccattttccttcgaagccatagagggagttatttgttggcttctgtggtttatgcccatatgatcgaaggcatgcacaaagatgatatcaacatggctgctgttatcgacgagtactttgtggagctcccaccacgcgactctacaatttatgaccagtgtgtctgcatggggcacactgtggaggtcgacgtctcttgcatcgaaggtgagtggcacgtgagaccactttgtcctgaccatgggtccggtgacggctacatggtttacccttcaatagtggtatttattttgttgtttggttttttgaagtcggagctagaccctctagtgatcatatgaattactcccatgaagggtggatcggcgaagtcttcttgcttaggtggtgggggagtggtagttgttggtttgcatgctgtggtggtggtggcagggctaatatttcttggtgttgaaggcatggttgctgggggaagggattgtggttttgttgttgggggtaatatgggtgtttgttttggtattggtggtggtggttgcagttggtaggtatgagcgatggatctttgtttgtctgtcgaggcggccctagccattcggtccttgatcgttgtctttgggaaatccctaatgggttgcgctgagtcttcaccatggaagacacaataaaatcttttgggttgttgag

SEQ ID NO: 137316 - DNA, 925 bp, Zea Mays
aaagcacgatctgttgcccactcgagtgcttcgtggtgcgttgtcagccatttgcgctgcgcatccttgatggtcaacgtcagactgattgcacgagtgcagtgtgacaacatcagcacaattctgtagtggtacttgtttccactgctccagacatctagtagtaacagtacccagaagcagttaccgtcacctcatttgtcacccatgtttgtttcaggcatgtctgcatctgcatgccagaagagtttggttgattggttcattcgaattcacccctccctctgcttctaagaaaaatcccgttggcgacccaactttgaaacttcctgttcctgctttccacttctcttctacaagtattaaatgcagtttagtactactagtactgacgccctgtttggtgctgccactgccagttaattagcacgggccaaacatgacaaagcctaaagcatcttcatcccgttaattcatgacacgatcgcacaaccaatttgcctagctgtgtcaacacagtggagcggtgctaatcgctgagccgtgcaacgggcacaatgaatgcgccatcacattgaaggtcagcagtacttgctgtctgcttaatacccggatacggacacataaccgcacatgcggctgcagtcaggagcgggggggctaggctagacgataaacacgcccatccatcgctctcggggcgattcagagacgctacagtccaagtagcaaaccctggacgtgtctgattaagttttttcttaattttttttacccgttcctgcagccggtttcctaaccagatctctgtagcttttactgttggtgtaggtcgcctgcagaatccgcgaacaattcacggaaaccagccggcagccagtcatgaaaaaaaagctctcctgtaacatcacattactacttgcac

SEQ ID NO: 137317 - DNA, 919 bp, Zea Mays
cctcctgccggtgatagcggtttgggccttagagtgcgaccctctcccgaagaagttaatgctttggttgcctcactggaagaaattcctgacgacgagaggcaggttcattttgaggtgcctttgaatcccagtgatgcagagataagtgccatgctggatatgttagctgaggattcctctgatgcagcccctactaaaacaccggtggtagcgccccaaccagaagctagcgaagctttggagattcagaggtctgaaagtattcacccaaagcgccctagccgagccaatcagcccgcttctcctgctgaggggcagaaaaagaagaagagacatcttcattgagtgtctagcttggatcaggatgccggtccttctgttcctgttgctgaggaagtgccagtgcctgcctttactgaagctgaaaccaatggtcgtgatctgaccactgctgaccccaatgggtgtgatcctgctgaagttgaccccaatgggtgtactgtccgtgttgttgatgaagatgatgaagaagaggatgaaatccctctgattcggaagaacagccgacgttacatagctagtggggaaagtagtggtgttccttctcctgctttgtctgccctcattggtctgcaagaattatctctgacgaacttcgatcagactcttgaagacatggttccagaagatctgttgtgagagccggcagatggtggcgcgatggatgtttgtgctgatgcgctcgatgccgggttggggtcatcccgggcagcgtcccgcgcctcatcgaccttagagcgcggtcttgagggtcaggaggctggtctggattacactgctcccacggaagtgactgagggtccttcagccttagaggtggctgttgcagagaactcggccctcaaggatggtgctg

SEQ ID NO: 137318 - DNA, 319 bp, Zea Mays
tgggagtataccgactgcaccgactgaggctcaaattgtggttgttcaatttgaggcgcggtgcattgttttttattggcatgagcttttgctccacgaaatcagagttagcattggacttcgcaatctagttgtgtggtagggactagtgagtgtgcatgcatctgtaagactgtaaccccaaaaacggaggcacttggaggttggagcttattttctcattcaatatgataaattcaaaaggttatattgttgtatgactgataaacgccatccttgggaaatcttttatgttcccttggctattttgctgttgttg

SEQ ID NO: 137319 - DNA, 357 bp, Zea Mays
ttgaagaacttactagacaatttcagaatgacccttctatttattgcagtaacttgataattggcctaacaataactttctcatttggataaaagtaaagtgttgaatgcctagaattgattatttgtaggatcatgacaccatggttcctgtaggttgcaaaattctcttgtaacccatccatatgtgcaccccaacttgaagcagttcaaatgattacaagttttcgtcttaaaacactttgttcattcaaacgctctaagttgatgtttgaggttcagcatattttttagatttgtttgccagccaacatcttttgctctatgtaaaaactttcatcattgacgataaataaac

SEQ ID NO: 137320 - DNA, 606 bp, Zea Mays
agagacctaatcaagctttataatgaacgtatggacaaattaattgaaactttgaaaaagtctgtgtcatctattgctattacatctgatatctggtcaggaaaggctaaagaagattacataagtgtagttgctcattatgtaaattcagattgggagttagaaaagagattgctaggtttaagaccaattgaagtggctcatactggaagaaacattgctgatagagttcatatggttgttgatgattttggcatttctgataagattttctctattgtgctagacaatgcttcagcaaataaaactgcagtatctgttcttaaacctgttttttctgcttatattggtcatttgttgcctgtagaagttagagaagaggatgaattagcatctatttttttgcatcaacgctgtaattgccacattgttaatttgattgtcaagtctggtttgaaacgactgaagaattatttagatgattttaggactgcaattacatttctgaatgcatctaaccaacgtattgctgcatttaaaagcttttgcttgagtcttggagtgcctcctcgcaagtttggtgttgatatggatgttagatggaac

SEQ ID NO: 137321 - DNA, 497 bp, Zea Mays
cccccccacaaggacacatgcggaagggtttaaatgtgaaagttattgtgaccgtcggatcatctatgaagcatcaggacttcacacgtgcatatatgcatagggctgcccatgtgatacgatacagcctcatctttgattcgtgacagttgataactctcactcggcctcggccaccctctcaaaccaaacagaacccacacgcgtgcacggacacggagcacgcgtgcgcgccccacgagcgatgtctccccttcgccgcgcgcgctctaccctgctcctcctccactacgtggccgcctcccacttcctgctgtgcgcgccgatccagcgcaccgccgcggccacattgccggaccccgcgccactcgacccggcactgatcctcccctcggcgacctcggtgcagcccaccgccactaccattcccgggggcacgatcccggcgttccccgagcagtcggactcgctagcggggtcctcgtccgcgtgcccgc

SEQ ID NO: 137322 - DNA, 399 bp, Zea Mays
gccgagatctggttgccctcatagatctgacctccctttggtcgccagtcgtgccgaagcatttggtgacagagcagagaggagggagcaaaaaagggaagtttgggagaagtgaaataggtgagatagccccccctccttgttatggtcgagaaactagcagcgtcgaaggctaggaggtgcatgcaggggtgctagctcaaagtcgtgggagagatactcagagttatcctattcagacgatgtgggttaaattcagtgacatagggacgagagtttttggtgtgtctccccacttataaagggatggattgcatcaatttaggccatgtacaactctgagactctggatcgggttttaagtataagagacaattaagagactgcatgatataactc

SEQ ID NO: 137323 - DNA, 348 bp, Zea Mays
cgccgccgttagcgcggacagtggctgggggctgtcgatgccatcgccaatcgaggtggtaagggacgtcgacgatgtcttcggaagctgctgtggcaccttttcctcctctgccgtgaagaccatctagatccacgccatggggaggaagcaatccctggaggttgtatgggcgtcgggtccgccatgcgacgccgccagccacccgcccgccgcagctagcggcacaacggccaggcgtacgaccacgcacgcaggtcacagcaccggcagcccgcttggaccagccttgctctgctactctggactcgatttcgccatcgcacgacctagccaccaaccctgtcg

SEQ ID NO: 137324 - DNA, 479 bp, Zea Mays
aatgtcattggatgcaaatgggtttacaaagtgaaacgcaaggctgatggcaccatagacagatacaaagctcggctggttgctaagggttttaaacaacgctatggcattgattatgaagacacgttcagcccagttgtgaaagctgctactatacggctgatcttgtctgttgcagtgtcaagaaattggtcccttcggcaacttgatgtccagaatgcttttctccatgggtatctagaagaagaagtatacatgcaacaacctcctggctatgaagacatgagtcacctaaactatgtttgcaagttggacaaagctctctatgggctgaagcaagcaccgagggcttggtatgccagattgtgcaagagactccaagaattgggatttcttccttccaaagctgacacctctttgttctattatagccggggtgagtacaccatttatatactggtatatgtcgacgatattat

SEQ ID NO: 137325 - DNA, 394 bp, Zea Mays
gtttcaaaagaaaaaactcaatcatcacaaaatagtccactatttagccatccccttatagtgtaagaaaagaaatgttctccccaacttggagaaaaaatgatgctttgttgatcactaaaacataaaactaatttaagaccctcttctctcggtatcccttatgcttccattatgttacataatatatgttgtcattcctgggactatatttctaatctcatggaagcatattggcagcattcctagtgcatacaaattgggccacccaaaactgaagccaccttgcacacaataggaacaccattcgagacctatcccaaaagcacgtcacagcccaacacgcctagaaaattttttaggtatacattgccacatttcgcactgtatgtac

SEQ ID NO: 137326 - DNA, 565 bp, Zea Mays
gggcctccctccgattgattccttcacccgcccgtagcacgccaaaaaaggcaaacctttttttttctaatcgcccgttgataatactaaccgctgtgtcagcggtacacaactagcctcgctaaatcgcgcctaccgtgacatctttcggtgccgcgacttgtaccaatactttcagaacaaaacaaaagaggggcttcttagcaaccattaattaattatggcttcgtggcaaataatgagtactccctccgtcgggttgaatttgtcgttctagcctaaataagatgtccagtgattttatcactttgccagcccaactagcccaacacctgtatacggcacccactcggcatccatatacagcacctactcaacatctctcaagtatactctgccactgtcgcccgttcacaccgcgtccgtcgtttacaccacttcgaccgtgccgttcgcactaccaccaacgcgccattccccatgtgccacagtttctagttcacaccccaattcctcatgcgtctagcaaggagtctgaccccaacctaggcatatcgtatctccg

SEQ ID NO: 137327 - DNA, 540 bp, Zea Mays
cgattatcaatattcatcctttacctgagcacgaggttttgttccctgcggtcagagatgtggtcagggagtatcttgttgagcattgtcgggtcggtattcgtgccattcagcgctcgcacttggggcaggtgatagtgcagtttcgtagtgttctggagcgggataatttggttctgctgggcccccagcaatatctggatgctactttcaccgcggtccgtcacaatgatgcttggaaccaccgggctcttcttttcaaccatgaatgctggcttatgcttctggggtttccattggattatcgttcttcagaatacctgcaggctgccattggatcgtttggaaggctgattctctgggaggaggatcggagtaatatctctagaaccttgcttcgagttcgtgtcacttcacttgatgaggtcccccaattttttgttttttcggaggctgagggatttgttggtgactcttggactgttcaatgtgaaattattcagcaactcatgcttggcggccaagctcaggatgaggacc

SEQ ID NO: 137328 - DNA, 742 bp, Zea Mays
gtcttattgcaatttactttgggcctaggtcatgtttctggtctctgatgtgtcctttggcttcctctgggtttccaaatttctataatgtagctctttggagtgtgcatatttctcgaatagctggtataactcttggagcgatgtggcagatctcttgtgaagtggctatatagatgtcctacccgaagcttgttcatgcatagtgaactgcactatggtcttcgatgattgggagctaagactttagcaacaagaatttgtcataatactcatgatggttctctttctcttgtcaacaatgtcgggtttgtagccttgaaagttgagcaagaacttgccatgaagggtttgccatgagtcgatgaataggggtgcaatatcgtataccatgttaatactaggcattctatggcgatgatggtggactttgccattgtgttgttgtccttgccatacaaagacactatcacttggtagcttatgatgtattgtgatgggttcgtgttgccattgtattttggccagtttttccaagcgacaactttgtagccaaggggtagcttgtagtctcacatgcaggggacacctctcgtttatgaagttgaatatttagaacgtgtcagggtattgggatgaccagtcaggccctccatacgtttcctagcaagggcccttgtcagagaacttagggaatgagtagtgttggtcgcgttgcatgtttgctatttctcctcctgaa

SEQ ID NO: 137329 - DNA, 2124 bp, Zea Mays
taaaatgcgcagacttagtcaagcgatccactaccacccatatagcatctctgccccgaggagaacgaggtaaacccaccacaaaatccatggtgatatgctcccatttccactccggaatttccaatggcttcagtaaacctgcaggccgcttatgctcggccttcacgcgctgacatacttcacatgtggccacatacttagaaacgtcaaccttcattcgcttccaccagaagttttgcttcagatctcggtacatcttggtttcgccagggtgaacggtgtaaggcgttttatgagcttctctcaatatattcatcttctcctctgatttctgaggcacacaaaggcgacccctgaaatgaaccaaatcattctcatcgatgcagaactcccagggtttaccatcgccaaccctctttcgagcttcctgcaataaacgatcctgctactgagccacacgcactctctccatgagggaagattgaataagcatacgagtctcctcactagcggtgccgacatagcacaaggcgatcccaaaacggtccagatcagcaatcaactgcaaggccacttttggaaccctggacctgctaagggcatcagacaccacatttgccttccccggttgataatgaatagacaaatcataatctttaatcaattcgagccaccgacgctgcctcaaattcagctccttctgagtaaaaaatatacttgagacttttatgatcggtgtaaatgtcacaagcctcgccataaagataatgcctccacgactttagagcaaaaaccatcgcggccaattcaagatcatgagttaggtaattcccctcatgcttcctcaactgccttgagccataagcaatcactctaccttccggcatcaacacacaaccaagaccaatacgcgaagcatccgtataaactatgaaacgcttacctctctcaggcaaagctaggataggggcgtccaccaacttgttctttaatgtctgataactgacctcgcaatcgctgaaccagatgaagagaacacccttctccaagagtatagtcaagggcttagtaatgctggaaaaatttggtacgaaacaccgataatatccagcgagccccaagaaacttcgaatttcagagacactagagggtctcttccactccaccacagccgcaacattcttgggatcaaccgcaatgccttgctgattaatcacatgccccaggaaagcgacttcggacagccaaaatgcacacttcttcaacttgccatagaactgattctcccttagggcacccagaacgagacggagatgctgctcatgctcagcctcgatcatagaataaatcagaatgtcatccaggaacacgaccacaaagtcgtccaagaactcatgcaacatcctattcattgcttccataaaagcagtaggggcattagttaagcgaaaagacatgactatgaactcataatgccaatacctggtgcaaaaagcggtcttctcaatatcctcctcacgaatcctcagttgatgataaccagagttcaaatcaattttggagaacacctgggcacccctcaactattcaaagagaacctcaatacgggggagtggatatttattcttgatagtcacttgattcaaagcgtgataatccacacatagccgcttgcttttatccttcttctcaacaaacaatactagggaagcccatggagacctgctaggcctaatgaaacccttagccagcaaatcatccaattgccgcttcaattcaacctgctcctttggggccattcgatacagagccttatgaatgggctacgtacccggaatcagcttaatctcaaaagctgcatcacgctccagaggaatgcctaaaagctcttccggaaacacgtcagcaaagtaacacaccacccggatgtcctgcacccgcaaggcagcctcaccctccaccaccatggagaaaaagattcccgacttcctggaccggcgatccgaaagcaattgcgcaaggataacgtgaacttaggggaacttcccaagaataccacctccctacctaatggcgcctgcaataacactgtcttccaaaaacaggatataactgcgcaat
